United States Patent Application Publication US 2019/0348154 A1 - sequence listing, part 96

SEQ ID NO: 358761 - DNA, 1260 bp, Pseudomonas aeruginosa
atgggaaagacgctcaaggaaatagcccaacagctgagcatgcccaaaacagttcagaaaactgtccctgagaaaacgaaagttatagaagaggtcagaccccttcctaaggttcagctcatctatgccttcaatggcacaggaaaaactcgcctgtcacgggagttcaaacagctcattgggcccaaggatgatggtgacggagagggcgatcaagttgagctatctcgcaacaaaatactgtattacaacgccttcactgaagacttgttttactgggataacgatctggaagaagacgccgagcccaagctgagaattcagcccaataccttcacggattgggtgctgaaggatcaagggaaggacatgagcgtcattacgatttttcagcgttacaccaacgacaagcttaccccgcgcttcaatgaagagagaaaagacgataaaaccggagaggtcattgcaaaagccttctcggaggttactttctccctggagagtggtgatgcgacccattcgggaaatctgaaaatatccaagggcgaggaaagcatcttcatctggagtattttttacgcactccttgagcaggtgatcgatgttcttaacgtcgctgagcctggggatcgtgaaaccgaccagttcaatcagctcgaatatgtgttcattgacgatccggtaagttctctggatgacaatcacctgattcagttggcggtagatttagcgcagttggtgaaatcaaacgaatccagtgtcaagttcatcatcacaacgcacaaccctctctttttcaacgtgctttgcaatgagtttggtagcgatgataaaagcgagcgctacagctggaagtcaaaatggtttagcaagtcacgcttggagagaaatactgatggcagtttcaacctggtagcacagccaaatgattctccgtttgcctaccacctgcacctgatatcgcaactggaaggcgcgatcaagagtggtcagattgagaaataccatttcaacttgctccggaatgtactcgagaagacggcaacatttctcgggtacaaaagatgggagaatcttctaccagaaataggtggtggccagcctaatccgtacgcaaaacgaattgttaatttctcaagtcattcaaagcatgctgccgaagaagcgcaaccgctgaaaccagaagaaaagaagcttctcgaaaaattggttaagcatattatcgagcaacatcggttttggcaggaaacaacaacatga

SEQ ID NO: 358762 - DNA, 1548 bp, Pseudomonas aeruginosa
atgctccaaggcatacatttctgtgcaggcgccgccgtcgcagcaagacgactggacaagactacatttacccaacagtcacttctttactgtcccgcgcgaaatttcgttgatcttcgcaatggcgacccatatcaaaaccaatctgcatttggctacctcagagtaagaggggtcgtcggaaatgatgacgaccaatacacagttcgcgtatatcgcggaagaaacgaaggaaatgtcggttgcggacgccacgggaatccgggcattggcgcaatagtcacggcattcatccctcctttctcggtgtatgttcctggcttagccggaattccagaggttgagcaatatcgctcagaaagcgttgtgaggaaaggcgtagcaagtggagatgccaatctttacttgagaaatgtcctgcttctgataaaaacaaagaaacttctcgctgaactaactcagttaatgagactgatttttccaaacttctctattgatattaagtttgaccatgtccacgacagccacatagaagtactggttcaagctgggcaccagcaaacgaaaaagcccattgaacttatcgggacaggtgtgcttcagacgttacaaatattttcatatgcgacccttttcaagccaaagctattgcttttagatgaacctgactcgcacttacatccagataatcaaggattgctggcagactcacttattgcactagtcgaaaacttagagacgaaaatcattatatccacacatagtcgtcacttagtggaatcactatacggcgaagccaattttgtctggatgaaagatgggaaaattcaagagcagggatacacgctcgaaaaagttcctctccttatggatattggcgcgctcgacagcttcgacaagttgataaatggtgcaatctcacatgtcatcctaactgaagacacaaacctcgccatgatgaagattttggtggagggatctggctttgacatgtccaaaacgctcatatattcatataaagcttcgtccaacttaaattctgcctatgcattgtgtgaattcattttggcgtcagctccagaatgcatggtaattattcacgcagacaatgatttcctgacagagtgcgaggaaaaatctctacgtgacaaaattgaaaaatatggcgcaaaagcctttgttactgagggctccgacattgaaagttacttcgtaatccctgagcacattggagctttactcggcgaagcccctgaaactataagtggatggctcgatgagattgccttggctaagcacaacaaactaacccataagttttcaaggaaacgtgacgaggcaaagaagaagctttacaaaaatgacaatgcccctgacaccctgcagcttatgggagaggcagtgccactgccgccagaaaaacgcctaggaaaattcatgctagccgagttacgcaatgccatgcatgagagatttggtaaaactgtaaacataattacagagtcagattacctttactcggattatttgtatgatttgttagattag

SEQ ID NO: 358763 - DNA, 1029 bp, Pseudomonas aeruginosa
atgggacacattaaaaaggacaatcactatgtcccgcaggcttaccttaggcagtgggcagtagaaggaaaaatctccacttataggctgttagtgccacatgagaaatgcgcgctttggaaaagccattcccctagcagtatcgcaaagcaccaacatctatacacgtacttttctggcaccgaagacagtgacgagattgaacgctggctcgacagagacttcgaaaatccggcgataccctcaatcgcaaaagtagtgagagaagatcgtcttcatcctgaggattggcaaaagctttttcgttttgccgtggccacgtctgtgagaactccagcgggtcttgagcacttcatgaaaaggcagagtgagactttgcctagcttcctcaatgaaacgcttcaggcgtcagtcgccaaatacgaatcggcaatcaaggcaggtattaaactgcaatctactcccatcgacgattcattgaacaagctaccactcaagattcaaagggtgaaccatgaggatggtaccgcagtggtgcaagctaagattctgaatggtagaaaaatgtggatatggcatcttcgccatgtgctgactaagaccattaatcgccttcctaaataccgatggactatcttgcatgcgcccaacggggtctcttggccgaccagtgataatccattagtcaagctttctatcaatgcccaaaatcaataccacttcgacggtggatgggcgacaccaggagtggaattgctgcttccgttgagtcctaagcatcttctttatactcgcgtaggtagtaccaggccgcctctgagaggaacgattcttagcgaacaaaaagctagattcttccggaagatcatccttgagagggcccgccggtatatttttgctacagatccagaagagattgaccgcataaggccccgcacggtttcgcaggaatggtgcactcaggaagctgaaacgtgggcgaattggcacaagcagcagtccaaagaggaggctgagtacccggactag

SEQ ID NO: 358764 - DNA, 192 bp, Pseudomonas aeruginosa
atgcgtaacggaatccatgctgtatccgccccgctatccaccctgttcgtatctcccccggcggtcttcgccgccttcctcgagcggtttcccccacgcgctcggcaggcccccgccggccagcgcctgccggggtcgcccggcactcccggcagcgcccggttgcagactggcgccgccacgtcccgctga

SEQ ID NO: 358765 - DNA, 1935 bp, Pseudomonas aeruginosa
atggatgcgcagcaatttttggcggaatttgggcatattgccaatgcgccggggggggttcatcagctccgggagatgatttaccagctggccattacaggtaaattgacagctcaattcgatgctgatggtgatgcgcatgagttgctggccgaaatcgcagcattaaaggggcggctaactcgggaaaaagcgtacaagcgtctgccaaagctggaggctgaagtgcttaatataccgtcagccatagagcttcctgccacatggtgctggacgcgccttcttgatgttggcgagattagcccacgaaacgatgcaccagacgaggcagatgcgtcgtttatccccatgagcggattctcagaattccataagggtgcgcttgcacctgaggctagaaagtgggggcatataaagaagggctatacccacttcagaaatggcgatgtggtagttgccaagatcacgccatgttttgaaaacggcaaagcggcagttattgatggcttggcgcacagcatcggcgcaggtactacagaacttcacgtattccggccaattcactctggcatattgtcggggtacatttacctgttcttgcggtcgccgtatttcgctgtcgaaggcgaaaagaacatgacgggcaccgcaggccaaaaacgattgcccacggaatattttgcgacccgagccttaccactgccaccgaccaacgaacaatcccgcatcatcgtcaaagtcgatgagctgatgaccttgtgcgacaagctggaagcgcaacagcaagcccgtcgcaagcagcaaaacgcactgcgccagtccatcctgcaagccgtcgcaagcagccaaagtgcgcacgaactgcaaaccgcctgggcgcgcctggccgacaacttcgagtggctgtttcatgcgcctgaggatcttattgatctagaccaatgcataaagcaattggccttgaaagggcttttgagcgtccgggctgaaggcgagatggttaactccgaggttgcagacttaactcggacttcgacggccgcagtttctgactccgaaatggattggtcaatccccgatcactggatctgggctaggtgtgcttggttaggagaagcacgccttggaaagatgcttgatgccgcaaagaacaaaggtgatttcaggccatacctgcgtaatattaatgtcagatggggaggattcgacctttccgatgtccttcaaatgcgcgttgaagagcacgagctcttaaaggtttcggtaagaaagggtgatctagtaatttgcgaaggcggcgaaccagggcgagctgcagtgtggtccgacgaagaagagtttgttatccagaaagcattacatcgatttcgatgcaatgaacatgtgctgcctgagtacatacttttctgcttagagcatgactatttttcgggtcgcttgtcgcggtacttcacaggggcaacgatcaaacacctgacgggcagagctctcgctgaatatccgatcccactacctccagtagatgagcaaaagcgaattcttgtggccgcgaacgaacttatgcgttccgtttcaaccctgaaagacagattgatagcgattaatcgttgctcagttgcacttgctgcggcctctgtcgccagcctcatcggtatcgccatcgaacaagaagaggaacctatgaaagccccgcaaaccgaattgatcgcccctctacgcttgggcacagcgcctgacattaaagccctagcaccgctggccactattctggcccggcacaatggcgagatgagtgccaaggatttgtggcagcgctttggtggcgaaatagatgccttttacgcgcagctgaaaatcgaagtggcctatggctggattttggagcctgcccccgcagaaatgcgtgaaaagccagccgacatggtgaacacctga

SEQ ID NO: 358766 - DNA, 1851 bp, Pseudomonas aeruginosa
atgcagttactccgcatccgtatcccgggctttcgcaatctgcacgatctcgacattgccttcgcaactcacttgcaagttgcggcaggtctgccttcggatgaaccgctcaagcccatccgcagtcatgcgctgatcggccagaacggcaccggcaaatccaacttgatcgaagcgttgatcaccatcttccgcgacgtggatctggatcgcgaagcagcgtttaatttcacactggaatacagcattcgcggtcatgtggtacgcattgaagctgactctgccaagcagaagcgcccttttgtttgggtagatggcgatcgggttagtcaggaatacctaaccaagaacgaccctcctgacaaggaaaagccagaccgtcgtcgtggccctcgcttacttccaacacatatttttgcttattactccgggcgtaatgagcgtgttgagaccttgtttcaggagcaccagcgccgcttcaacctgcgtcaggaaattactacagaccaagtgctacctgagcagctgctggaaaactttactggcaccgaggctgacatccgcgcggtggaggacgccaaacgccggcgtgaggctcagctgaaacaggcgggcgacgaccgccttcgtcgtctgttctactgccgtggtgggcatagtcagctggtgctgttggcctgcttattgtccgatgacccggtgtttcagaaggtgctgaagaacctgcacatcgagtcgctggagtccgcgctgttcgtgcttaaggaaccgcaccggctgcgcgaaaagcgccggagtggtaagttcgacgagcaggagctgaatgagggcgatccgcgcttctggtatgcacgcggcaacgtggtcagcgagtttctagacaagctctggcaagtgtcctgggcgcccattgagcaggaggcgaccaaacagatcgacttccgtggccgcaccgaaaaacaaaagcagctttatttgttcgtgccgagtcaggagaagctcaagcaactgggcgagctgatcggcagcacagacagcttcttccgctacgccgagggagcctacattggcgacctgatcgacgaggtgcggatcacggtcaaaaaacgcgatgagcatggtggcaaggtgagctttacccatctgtcggagggtgagttgcaaatgctcaccgtgctcggcctgatgcgcattacccgtgccgacaactgcctcttcttgcttgatgagcccgatacgcacctcaatccactctggaagttgcgttgtttcgaggacatcgaggatgcgctgacgaatgatgcaggactcggttctgctggtgagtcacaggttttattgacaacccacgatccgattttgctaggaagcctgatgcgtgagcaggttcatatccttcgacgtgaagctggtaagacgttagttgatgtgcctgaggagcacccgagaggaatgggggtatcaggtttattgaagagcgatttgtttggactcagctcgacgcttgatcagcgaaccttagatgatctcagacgtcgcaacgatctgttggcaaaagaggccagcagccagttaatggcgaatgaacgagaagagcttgagcgcctaaaggcctatctctcggatcttggtttttctcgagagtaccgtgatccgctttatcagctatttatccagaaaatgtacgaagcgcgtagcctgcctatggcacagcttttaacccctgagcagcagcagttacagaaccaattggcagagcaaattgctaaagcgatggtggccgatacccgactcaaagggatggctagtctcactgaatctttaaaaaagggtgaaggagatgagttttga

SEQ ID NO: 358767 - DNA, 852 bp, Pseudomonas aeruginosa
ttgagacctgtacgtattccgccaggtagcactccaccaaaggagtggttggaagaggctgaggcactgaccgagcagcttaagggggctgctgatgataaagcacgcatcgctttagtgtgggcgaataggaaactttggcgcgataagcgtctgctgaagtggctcactgatttgcatcaccgcaaatgttggtatagcgaagctagagagtctgtttcttcgtatcatgttgatcatttccgtcccaaaggtcgagcggctcaactcgatggagtccaaagggctggatattggtggctaacttttgactggatgaactatcggctcagtggtcaacttctcaacgttaaaaaacgcgacttattcccggtccagcttcctggtgttgctaacccagccattccgcatactttggatattgaggcgagtctgctcattgatcctttgaaacaagaagcctggttgatatcgtttgagcgcactgaggacgagcagtgtcttgcgtgcccatgtccgggagtagaaggtgatgaattgggacgggttaatataacgattgatgttctcggcttaaaccgactagatgcattgaaccaaaacagagcggctatttgggatcaatgcatggcgtggattcaggaatatcgagcggctcacgatgaggcagttttgcatacacgtaacgccagatgtttgatatctgccagggagttggcatcactctcatccgaagaggcagagttttcgtctgttgcaaaagcatgtattgcaaaacatgcacctaaggttttgcagttgcaggtagaggattttcttctgcatccggagttactaagaactgttgcttga

SEQ ID NO: 358768 - DNA, 1026 bp, Pseudomonas aeruginosa
atgttcacgctacccgcacttatttttgaagagcgatattcgattggtgttgttcggcatcagatccgtccggcgctccaggtctcactcgtcgttgaaacctcaatcaacgtgtcggcgaagatcaagcaaccattgagacgcttcgataatgaagagcgggtaattgtcacctcccgcaaggatgtacagctgccggaaggcgtggacggagtactattcgagagtgacggcaagttcagttggtctcgtcatcggctgcttgatgagttccataaacatcgagcggcggtaggtctgacggctcactcgcgtgaaatctctgcatgctggaatggcaaggtgcgttttgtcgctgagacgcgcgagtcgggtcaatcgggttggggattacgtccacctcaattaggtgctctgcatgccattggggctcactggagcttggagcgagctccagcgaccatcgtcatgccgacaggtaccggcaagacggaaacaatgctggctgcgttggcggcctatgctcgcgatccgatcctagtagttgtgccctgggatgccctcagagagcagaccgcgaaaaagttcattactttcggcttgttacgatccatcggcgtactgcccgcggatgtgccaaacccgattgtcgggatcatgaaaaaacggcccaagacccaagctgatctgctcatgttcgagcactgtaacgtagtggtcgcaaccataggttcaataggggctagcttgcctacagcggtccttgaggggctcgccagccggtgtaaggcgctcatcttggatgaagcacatcacgtgcctgctacgagctggactcacctcaaagacgcattccgaggcattcccactctccagttcacagccacgccgtttcgacgtgacacccagcttgtagatgggaaggtcatcttcaattacccgttgggcgcagcgcagcgcgatgattacttcaagcctattcgcttcgaaccagtactggtctgtcccgggctgagtggacactga

SEQ ID NO: 358769 - DNA, 846 bp, Pseudomonas aeruginosa
atggttcctttagtagttctttctcccctcccagtggagggaaatgaacttattatatatagcaaggaaggttctgagatttatgcgagacactggaatgatcagctgaaagcttggtctgaagtttcttacaagaaagggaaaattattttttctttatatccgaagcccaagcatattgaagagagtggtgtcaccgccttctctttggacaaaaacagcctgtctccggcaggagatatcatactaatccaaagaatccagagaggagaactctatttagagaatggagggacaaaggctacagagacttcctattgtgatgcaataaacatgaagactggctgcgtaatgcagactagacctgccagttattgttccggaacctggggtaaaaattggaaaccgagctatccagagtacacagcgccatccgggctagagacaaccagcccctcggatatactttccagtataaagagattaaaaactcctccagataaagctgaagctataaacagctatatctatatgtccatcgagtcatatctctcttgctatccattagcgccatcgaacctctcggagttgaatgatataggattctacctcgcagaggggggagatactctttctgcattgaggatatacaggaaacttgaaaaagcttacccatccagggtggttctgaaattgaatatagcagatgtcctatgggaaaccgaaaacaaagcagaggccggaccatactataaaaagtaccgagacggcatgaaagaacatggactgcttaaaaaaattccagccagggtcgatgaaagaataaaatatctatctcacaaataa

SEQ ID NO: 358770 - DNA, 2826 bp, Pseudomonas aeruginosa
atggcaaagcagaagaaagtcgagcgctggtcctatcctttcaagacccgaagcggcgccgaagccaacgatccgcagcagtattacgatgcgctggccaaggccgctggtggcttctacccgctgtcgaggaacggcctctggcatggcggcgtacatttcgacgagggcagcgcaagcgtgctcgatcagtcggaagtccgctgcatcgccgacggcgaggtcatcgcctaccggatcgacgaggaataccccagtgtgagctatggcgaaggcgatgccgtcaggaaaacgccttactccaccggcttcgtgctggtcagacaccgcctcgaactaccacccgcagcgaccagcgcttcggccgcaacgccgggcgaagagcctgatctggtcttctacagcctgtacatgcatctgctcgactggaagggctaccaacagaaaccaggactgagacgtccgacgttctggggtggtgacagccatcaggtcaaggccagcgcttccgacagagtcctgggcctgcgtgtccggaagcaaccgaacggatccatcctgggcgtgttgccacgcggcaccctcgttgaggccgaagcggggatcggccaatggctgaggttcgtccgcgccatccccgccgtggatggcgtggccgagaacagcggctacatctacgaggacaaccagaacaagctgaaggccctgggcggtaaccagtaccttgtcggccccagtgccagcgaccccgtcacgcccttgcgaaaaggactgaacatccgcgcgaacgccagcgcccacgccgacatcctcggcgtgctgccgcccggcacccgggtccgcatcgcgtcggccgctagtgtcagcaaatatcacaagttgctggagattctcagcggtgatgccatacccgcactggctcatgaacaactggccaacgaggggtatgtctggcgcaacgacctggaagccgcccaggagccgcaagcctgcggtagcctggtgccggtcgaacctcccgtcgccatcagcgccggcagcccgatcgggcacctcggccaataccaggcctatagccaggatgcgccgcaatccatgctgcacctggaggtcttcagctgccaggacgtcgaagccttcatcgcccagagtcgcgcacgagcgacgcaattgaggccggaagcgaagaccttgctgaaggtgcccgccgagaccaagctgatcatccgcgacgacgtcacccaggacgatccaccgaagatcagcgatccaggcctgccaaccggccacgatatgatcattccgctcgccgttctggacgccttgcccaacgagcggaagatcactctcgaaaccaatgtcgacggagtccagcagaccacccgctggtggaagctggaacggatgccaggtaaggacggccaggcaatcgacggctggctctgcgaaatcgagaacatcaccagccgccacagcccctgggactgggaaggcttcgacttcatccgggaaaccagcacgctgggcgcccagtatgtctgccgcctcgacgccgacggcaccctcgatgacggtgaaaagaccaactaccaggcacaaatcgacgaaggcgatagcggcccgatcaggcaacggctatacgacctcatcgacctcgacgatgaccagcgactgacggcggatgaaatcaggacggcgctggagtgcccatggcatgcgcagtccattggtcgtttgatcacttgctacgagagcgagtggtatgccgatgaagcgatgagcaaatggacggcgttggattgctatatgaccaaggagggagagagggattgggagcaggagaagtctaggattaagtctcttcaatggtggggggaggaaaccgaaaaccttggactcagcgaaaatgcatgttcgtggcatttccacccaatcacattaatatcgaataactcaagacctaagtgcaaatgtcaggcacgcgtgaaagtaacaaggtggaataataaatatgggcctgtgcactggggctctaagagccttagtcaagcagaccaatgggatgaactgcttagctccggaaacataactactgaagagaaagaaataatctgcgccatgaccgagaacgaaggaaagatagagtccgttcaaagttatgatagtgaagtgataaccgctggcgctatgcagaagacaataagaataaacggtgcgggagagcttccgctacaggtaaaaagattcagagaggaaaatcctctgctttttatagagctatttgaggaaagtgggtggtatctagatgcagaagcagtccctcccacaatgtattatcagcatgtggactgggaggggggaaagcgattggagggagatgagttgaaatccagcctgaggcaaggatgtaactcaagcacatttggaaatgaaattgattgtcagcctgtttcatttatggcttgcgcaatatctcatccagaatatttaaatttgcagattatggactttgttgctcgcctgcgtacgtcgttagacacagttccagcagggtattctttcactgcaaggcttttattctccacaaaactgggaaaatcccttgtcttggatgagcatataaatcgccccggaaatgtggcaattgacctgggtgctgcattggataggtttttcatagagaatccatctgttagcagagatgtttctacttggggagcggaccatctttcatatgagcactcaatatccgaggattatggaaggaataggagcatgaccgattcagtaggtcgatatgagaacctcagagggctgttgatttga

SEQ ID NO: 358771 - DNA, 156 bp, Pseudomonas aeruginosa
atgggcaccgaggagatcggcgtgcttgtgaaaatgtatccgcaatacgctctatggctgactagtggcaacaccgcccccgaaatcggccagaccagtcctgacttcgaaaaagtaaaatcaaacttgccaactcaaactgcggaacaacgataa

SEQ ID NO: 358772 - DNA, 510 bp, Pseudomonas aeruginosa
atggccctgaccagcaccatcaccctctacgacgagcgctggcccatgcgcttccaggccgcccgcgagcagatcgccgatgccttcggcgccgaactgctggccatccatcatgtcggcagcactgccgtgccgggactcgcggccaagccggaaatcgacctgctggcggtggtctcggcgcaccgcgacgaagcccggcgcgacgccttgctgggcggcctcggctacgtgcgcgggagcgacctgtcggcggggcaccatttccatcggcgcgacgtcgatggcgtacgcacccataagatccatgtctgcaccgagggccatgcgcagatcgacaggatgctgcgtttccgcgacctactccgccaggacccactcctgcgccaacgctaccaggcgctcaagctggcgctggaggcgagcaataccggcggcatcggcgagtacctcgccggcaaggcgcccttcatcgacggcgtgatggccgcccgcggcgatcacgcctag

SEQ ID NO: 358773 - DNA, 150 bp, Pseudomonas aeruginosa
atgaaatctttgaatgaaaccgagatggaactcgttgctggcggctggaaagtgaaaccggcgcccgtaaagccgcccgtcgacaagccctggtcctgcaagccgaagcccctgccggtgattccgccgtgctgggtaaagcccaagtaa

SEQ ID NO: 358774 - DNA, 1245 bp, Pseudomonas aeruginosa
atggaacagtcatcccacttctcctggcgctaccccctcgcactcgcggccgtactggtcctgagcgcctgcggtaaggccccggaaaccacccaaggcatggcggcgcccaaggtcagcgtcgccgaagtcatcgaacaaccgctgaacgagtgggacgaattcaccggccgcctggaggccccggagtcggtggagctgcgcccgcgggtgtcgggctacatcgaccgcgtggccttccatgaaggcgcgctggtgaagaaaggcgacctgctgttccagatcgacccgcgcccgttcgaggctgaggtcaagcgcctcgaagcccaactgcaacaggcccgcgcggcccaggcgcggagcgtcaacgaagcccagcgcggcgaacgcctgcgcgccagcaacgcgatctccgcggaactcgccgacgcccgcaccaccgccgcccaggaagccaaggcggcggtcgccgcgacccaggcgcaactggacgcggcacgcctgaacctgagcttcacccggatcaccgcaccgatcgacggtcgcgtcagccgcgccgaggtcaccgccggcaacctggtcaactcaggggaaaccctgctcaccaccctggtcagcaccgacaaggtctacgcctacttcgacgccgacgaacgcgtgttcctcaagtacgtcgagctggcccgccaggccggtcgcgacacgcgtagcgagagcccggtatacctcggcctgagcagcgaggacggcaacccgcacctgggccggctggacttcctcgacaaccaggtcaacccgcgtaccggcaccatccgcggccgcgccgtgttcgacaacgccaagggcgagttcaccccgggcctctacgtgcgcctgaagctggtcggcagcaagacctacgccgccaccctgatcaaggacgaagcggtcggcaccgacctgggcaagaagttcgtgctggtcctggatggcgacaacaagaccgtctaccgcaccgtcgagatgggaccgaagctggagggcctgcgcatcgtccgcagcggcctgagcaagggcgaccggatcgtcgtgaatggcctgcagcgggtccgcccgggcatgcaggtagatccgcagaaggtcgagatggccagcgccgacaccctggccaccctcgcgcgcctgcgccagtcggtcggcgacagcgaaccaccgaaggtggcggcgtccaaggacaacgccactcgcaacgagccgcgcggctga

SEQ ID NO: 358775 - DNA, 210 bp, Pseudomonas aeruginosa
atgcaggttatcgataagcgtgaattggagtgggttgcgggtggtggactcactatcggcggtgtccatgcgaaacccggtatggatctcaacggtattgtcagcaagaacggtgggggggtgagtatcggtattggcggttcggcaagcggcaacggcaaggccggcaacggtatcggcataaatatcaagggcggctctttcaactga

SEQ ID NO: 358776 - DNA, 936 bp, Pseudomonas aeruginosa
atgaccgaccgctacgaagccggcaccacccgctccggtcccctctggcaggacgactgcctggcaccgccggccatccccacgggtgagaagccggcggatgtattgaacgtcatctggcgcaagaacgaggtgtttctcgatatcggctcgtgggcattgggctcggcggtgatgattctatgggcaggctttattactgcggtgctggttatttggctcggttgggatgtggcggccaaggagttgctgattggatatggcatcattcttggtatcccaattctgattttgcttatcggactgagaaaaccagtccccccacccattcgcttcaaccgccaacgccgcgaagtctgcgtaccgcagaaggacggcagccactggttcgtgccctgggaatcggtgaaagcggtaggcacggcggtttcctcggtcggccaacatggccgtgccacccagggtttgctggtcatcggctttcccaacccacagtggaacggcaagtccgaggaagacaaggaatactccctggcgctgagctgtggcggcggcacaacagccatggccatgtgggagtgcatccgcaccttcatggagggcaatcctgatgaagtcccggacaagagccatcgactcacccgaaaaaaaggtgtttgggcctactactgggaagggatcaaggaaggcgcagaaaaacgggatggccttaccgccttattgtgggaagggctctgtgggctattcgttttcaatacgccgctcatcgactttctggaaaggaaaaaactgagtcctccgcctgatcttaccgatccaactgtcgtggaatggtccaaaccgcttccaccgaaccagtggactcgccgttcagcggaactggaacgcgccatccaggctcgcgaggccgacctccgggaacggtcttcccaatga

SEQ ID NO: 358777 - DNA, 939 bp, Pseudomonas aeruginosa
atgagcgaacaccccgaagccggcaccacccgctccggtcccctctggcaggacgactacctggcaccgccggctattcccacgggcgagaaaccggcggatgtattgaacgtcatctggcgcaagaacgaggtgtttctcgatatcggctcgtgggcattgggctcggcggtgatgattctatgggcaggctttattactgcggtgctggttatttggctcggttgggatgtggcggccaaggagttgctgattggatatggcatcattcttggtatcccaattctgattttgcttatcggactgagaaaaccagtccccccacccattcgtttcaaccgccaacgccgcgaagcctgcgtaccgcagaaggacggcagccactggttcgtaccctgggaatcggtgaaagcggtaggcccggcggtatcgtcagtcggccaacatggccgtgccacccagggtttgctggtcgtcggctttcccaatccacagtggaacggtaagtccgaggaagacaaggaatactccctggcgctgagctgtggcggtggcataactgccatggccatgtgggagtgcatacgcagctacatggaggtgggaccggaggcggtgccacgctgtacctacgagggtacggagcggcagggattcttctccgtgctatggatgatgctgagccaggtgggaagaaagctgaaagaaggcgaccttggcggtgtcctttacgatctgttcttcattgtttgcctgggagcccctcttgcgggttaccttcaggttcaaaagctggctcctccgcccgatcttaccgatccctctgtcgtggaatggtccaaaccgctgccaccggatcagtggacccatcgctcagcggaactggaacgcgccatccaggctcgcgaggccgacctccgggaacggtcttcccaatga

SEQ ID NO: 358778 - DNA, 3234 bp, Pseudomonas aeruginosa
atgaccgactggagcaataccctcgcggtacgcctgatgcgggcagaccgtgaggccaaggccaacttcgaaaaggaagacctcgacagcccggtcggcgcctgtccggcgcggcaggccaaggtattcgttgtacccgtgcgctacgccctggccgaacgggccgccgagcatcccggcctgacccccgcctgcgctgccagcagccatgccatggccctgcgccgcttgcgtcccggctacctgtatctctggcaccggcaagggccgctcgcgcgctatgcggtggccgccgatggccagttgctcgcgcaaggcctggacgagccgcatgcggcgctggccgccggcagcctggccggcctcgccctggacaaaaaccacgaggtctggctgctgtacaccgagcggcccttgccgccggcggcccagcgccgtctggcggagaacgcggacgaacgccgccaacgcatgcgccgtctcgacctgccccaggtcgcgctgaacctgcaggccgaacactgcccgccgctggacaacgccgagcaggtgctcgccgaactgatgcccgacgtccgcgatctcgccctggcccatgaccatgccgtcaatggcgagcagcgccgcaaggacgtcgaggccctcggccaacgcgccgcgagcgatcccggccgggagaatatcgaggcctatgcccacgctgccatctggctgggcgaggccgagcaggcggcggcacgccacccacaggccggcgggagcgcgccgggagaatggagcgcgcaaccctgggacattcccgccacggacggctggctgatgcaggcacgtcaccaggccggcgtgttgtggggcgtgttcgccgcgctggacgacgacctcggcgtgctgcgcgacctcgatcacgagcaggagctgaacgaggctcgtcatgagcgctggctcggcgaaaacgcccagcgcaccgccatcgccggcttcatccgcagcctgacgcgcctggacggcgccgaggcggcgggcctgctcaactatcgctaccgcgagcacgagatcgtcctgacgcccgagcagggcgacaccctgctcgacgtccagcgcgaactgcgtggcatccgcgcgaaacgcgccgccatgcagcgcgaggaacatccgctgctgcgcggtaaccaggccacggagttgctcgatgaaagcgccctggaactggaccagcgtcgcgaagcgcagctggatcgcgtgcgccccttcctgcccgtcgaactgcaagccgaggcgctggccgtggtgagcgagtaccgccacgaaaagatcgacaacctgtccggcggccacggcaccgcgcagatcgccgaacgcatcgcgctgtggaggatggacaactggctggacaaccaggcgcccgcgcactacgccttggtcgaacggcgccatgaacggctctacgccgaccgcgagcgcttcctgccacgccacgtccaggccacctggttcgccgaccatcgcctcgccgagcaccaggactggctcggcgagctggccgaggcctgcctcggcgcgctctgcgtgcgcgagcgcggcgccgtccaggcctacgacctgctgcgcgacaacaccggcgccggcgtcttcggcctgctgctgcagggctggagtcccggcctgggcgaactgctcaacgatggctcgcgcctgggcgaactggaaagcgccctggccgccgacaacctcgccgatacccgcaccctgctgggcaagctgctcgaccccgccgaagtcgccgcgctatcgcgcctggcggccaacctggaaggcgcctgggcccgcaccctggcccgcctcggcgccggcatcgccaggctggccgccagcgagcccaagccgctgctgggcctgttgctgatcctgcgcctgaacgacgccgcccgcttcgccaggacggtcgtccagggcgctacccagtggcaagccagcagccaactggccgatgccctgaaaaccttcaccgaccagctggtggacggcatccgccaaggcacgctgaaacaggtgcaacgctgggaaggcgccaagcgcgccggcggcgtgctgcccctggcggtgctcgccctgaacatcgccaatgcccaggcctacgcccgggccggcaacgccttggaagccgaaggggaacagcgtcgggccgagcggttgtcggcctacctctatacaggggcggcgttgtgttcggtggtgcagaattttgtgatggtggggatggggcgacaggagattggtgttaagacgtttactgcgccaacgttgacgttatttggtggggttgttggtggactttcattcggtgcagctatttttgaagggaagagtcttcgtaagcaaatagcacaggcccaggcaggtatagacccttatctggacatacgccgatttgccgtagacggacaggtacttttttacggttcacaagcagtacttggttttagtctcaccagcatgcgcatggccggcatgctgagcaccgccgaagccatccagtatttccggattggcatggccccgctcaactggctgctgttggcggccggtgggctctatctctacgcctggtggcagcaggaaagcggcttgcagaccttcctcagccagtgctgctggggcgccgatgccagccgccggcgctgggacgacagccccgaggggcaggccgacgagttcctggccctgttgcaactgctctacagtccccaggtccaggtcggcacccgcagtgtcccgctggccgacgagcagatcgtgggacggcccaacgcccgtatccagggtcaggccatcgacagcctgaccctggccctgcccgccgccgaaccgggttcggccaaggtcggcgtgcgcctctacggcgagcgcgacctgggccacgagtgggcgaacagcgtagaggccgcctggataccggcggacgctggccagggcctgctgctgagcgggcgcttccgccggccggtttcgcgcctggaagtgcagatcggctatcacagtccactgcccaggctcagtggcgcgcaaggcgcatcctctatcattggcggcccgcgcggcgtgcgcttcgccatttcggccgacggcctggtcacgccgctgcatgccgacgatcccacgccacgcctggaagcctgcgaattcgtcaccctggccccaggccagttgatccccaaggaaggaaacccacgatga

SEQ ID NO: 358779 - DNA, 849 bp, Pseudomonas aeruginosa
atggacgagctgaccacctatctgctcctggactgcgcgcagatcgacgacccgttacccctcatctaccgtctgcgggactccgcttcggtgcacgtgctctatcagcgcacggcctatgccgaatgggccgacagcggtccctgcctggtccgcgtagcgccaggccaacccttgatgcgccacttcgaggaacattggcgcggcaaagcagggcttctcctggcctccgccgccgccgaggagctgctggtcgagcatttgcgcagcctggtgcatgcccgcctcagcgacggccaggtcctgctgttccgctactacgacccgcgcatcctgccgctctggctggaacccctggacgcccgcgagcgcgaccgctgcatggggccggtgcagcgcttccaactgtcgccccgcgaggggcaggagtggctcattcgacgtggcgggcggccgacggagccggcccgctatgccgccgagccctggctgagtctcgacctgggacaactcgaggcgctcaatctcgccaaacggagtctgttcgaagatcgcctgctggagcatctgcagcgccactttccggaacggctggccgccctcgacgccgccgagcgccagcaactgcttcgccgcagccgtgacagcgcggctcgccacggctattccagcgccgaagacgtcgcccgctggagcagcctgctgctgatctgcggcgaggccttcccggatgccgccgaacacgcccccctccgcgcacggctggagcaaccgggccgctcgccggccgagcggctcgatgacctgctgctggccgccgcgcagtgggacaaggagccagcccgatga

SEQ ID NO: 358780 - DNA, 2049 bp, Pseudomonas aeruginosa
atgccaacggatatccattcggctcggatcagccttgccatcgaaggcggcccgagcgacctgcgagtactttcgttcgaaggccgcgaagccctcaaccagccctacagcttcgagatcgactggctcagcgaacgtcccgacctcgacctcgaagacttgctccagtgccccgcctatctgtgcttcggccccagcgagggcggcgtgcatgggctggtcgacagcatcgaacagggcgattccggcaagcgcctgacccgctaccggatcaccctgcagccgcgcctgagccagcttcgtcattgccgcaaccaacggatcttccagaacctgacggtcccccaggtgctcgccagcgtgctggaagaccacggcctgttccccggcgactaccgcttccagctcggcccctaccgctacccgccgcgcgactactgcgtgcagtacgccgaaagcgacctgcacttcctcagccgcctgtgcgaagaagagggcctcggcttcttcttcacccacagtccggacggccatgtgctggtcttcggcgacgaccagagcgtcttcccccaacgaccgccgctggcctaccgccagggcggcggcatggccgccgaacacgagaccgtgagcgccttcgagctgcgcctggaaacccgcagcacccaggccagtcggcgcgactacgacttcgagaaaccccatgtgaggctggaggaagactaccgctgcgacttccagcccgaactggaggtctgtacctaccccggccgcttccacggcgaagcccgtggcaagcacctggccaagcgcagcctcgaacgtttgcgcggcgactacgaactggcccagggggccagcgacgccaatctgaactgcggctgcctgcttccgctttccggccaccctcgccaggagtgcaacgacctctggctggtccgcgaagttctccacgaaggccggcaaccgcaggtgctggaagagtccgccgacagcgccgcgatggcagacgacggtttccgccagggctatcgcaaccgcttcctcgccacgccctgggacatcgcctaccgcccgtccctggagcatccgaagtccaagctgctgggccaccagaccgccgtggtgagcggcccggcgggcgaggaaatccactgcgacgaatatggtcgcatccaggtgcgcttccactgggaccgcaacgacagtgccggcaggacctcctgctggttgcgggtcgccagcaactgggccggcgaccgccagggcggcgtggccatcccgcgggtggggatggaggtgctggtgagcttcctcgaaggcgatccggaccagccgctggtcaccggctgcctctaccacagggaaaacctcgtcccctacgaactgccggcgcaccgcacccgcagtctgttcaagagcctgagcagcccggctggcggcggctacaacgaactgcgcatcgacgaccgcgccggcagcgaacaaatctacctgcatgcccagcgcgactgggacgagaacatcgaacacgaccagaagatccgcatcggccacgaacgccacgatacggtcgaggccaacagctacagcgaattccacgccgaggaacagcgcatcggccatgccgggcgcaaggtggaagtccgggccggcgatcacctcacggtagccggtgagcgccacctgcgggtcggcgtgggccacttcgtcgagaccggcgaggaactgcactaccacgccggcgacacgctggtcatcgacgccggcatggaactcaccgccaaggccggcggcagcttcctcaagctcgatcccggcggcgtgaccctcagcgggccgagcgtcgcgctcaacagcggcggcgcgccgggcgtgggctcgggggcccggccgatcctgccggggcaggcgctgccggcggcggccgagcagcctggcgatccgttgcttgccgcccagaaaaacgccctgcgccgcgccgcgcgccttgcccaacccgtatgtgaaatctgccggaagctggaaaacacccaatggacgagctga

SEQ ID NO: 358781 - DNA, 189 bp, Pseudomonas aeruginosa
atgaagaacataatcgacgccctcgactgcacgcctgcaatcaccaatgtctctgatatccccctgtataagcttgaagttcctccatctctcctcgccaacaagccccctcacttcatcaaggttatacatatgcccggtagaaaaatcatccaaccccacaaccttctgattaaatttcagaagtaa

SEQ ID NO: 358782 - DNA, 3501 bp, Pseudomonas aeruginosa
atgagttccggaaatgccgagcagttgcgtcgcgcccgacgcaaccaggccttcgacaacacacccgccagcgctaccggccagtgcccgctcaagggacccgaggtggcgatcttcccggtgcgctatgcgctcgacgagtctccgcccaaaggcagcggacaaggcccgaacccgctgccggcggactggtcggcggaacatctgccgaccctgcgcacgcgcagctacaccctgcgccagttgcgcgacggctggctctacgtctgggatgaacaggaccgcaccttccacgaatacagcctgcaaggccagcagttcacccgccacaagtggagcgaagcgcagatcggccaggaccgccggcacaaccccgacaccacccggccctacctgctctatccgcgtcgcagtcggctgcgcatcgcctactccccggtgcaatggacctggcgcctctgcgagctgatgcgccagccccgcacggcgcaacggcaatggatgcgcgaagtcgacctgccgggctactgccgggaactccgcctgccccatggcgggccgctgcgcgaactgggcggcagcgtggccgacatcctcgccggcggcggcgaggcgccctccttcctcaccaccctgctgccgacccgggcgccggaaagcgccgacggcgaagcccccaccgccttcaagccgggcttcgacgaagccctggtgcgcggcagcgtgccgagccaggacagcgccctgttcgtcgcgctggacgacccgctggcgctgatcgacgacctggcgatgaaccaccttggccgccaggccgagcagaacgccttcgaggaagagcagcgccagcaactgcaaaccgcgctcgccgtcatgcgcctgtgcggctgcgatgtggaggccctgatccccaccgacatcgccaccgaccctgaacgccgcaaagcctatgtcgaggacgtctacgccctgctccagcgctacgacgaggccgggcgtggcaatgacctggacgataccggcggcttcgcccggttcggcggcctgctctacaccgacaaggcggacaaggaattcatcggcaagtggggacagctccccggtggcgccgaacgctggcgggaagccagcctcgactgggaagagaaacgccgttggcgcgaagacgtgcgcttcgacgaatgccggcgcttcctgcgcgacagcctcgaacgactggagcgcctgcaggcccacgcgctcgccgccgagaaagacctgaccgcctggttggacagcctggccccggcgccggagccgttgttccacgacccctgcaacgaggagcagagcgagcgtctgttcagcctcgccgtcaccctccaccagggcctggccaactccgaaagcggtggtcagtggctgtgccggcagttcggcgaacgccgttcgctgctgggcctggccctgttcaacttcaacccggaactggccgggacgatcgacctcgccgcgcagaacttcgccgccaccggcagcctcgacggcgccggccgccagggcgacggcagcggtcaggcgctgggcggcatcggcgaggccaccagcgccaccacccgtaccgcggaaagccgcgaggcgctctatctgctgttcaaggacagcgcgctctacaaggcactgtccgaaacggccaggcaatccctggaaaccctgcgccaatatgtcagcggcaagggcggcgaactctggaaccacctgtccttcgtcctcctgccggcgctgagcgaaaaattcgcgcccacgctgcgcatccagagcttcaccgtgcagcaggtgctggtctccacggaaatatccagcagcacccggctggtcttcaatcccgccttcgacagcgaattcgccgcctggcagcgccaggtgcagatcctcctcaagcaggtcgaaggccagcgccgcaccctgctcctgagcggcgcccgccacgaccggcgcgccgcccgccaggccctgcaactgctcgaagaacgcctgcgggaactgcaattgcagcgcccgctcaagatcaccgcagccgtcagccatgtcagcgagcgcatgacgctgtccgtccagcaggtgcagcaccacctcgccaccctcggccagaacgaactgctcgcccagctccagctcaaggcccgccaggcggcggcccacgccgcccgggccaaggcctgggtcgaccagaacctcggcggcgccctgccggtgctgatcgccggcctgaacatctggaacaccctcgacagcctggacaaggcccgccgcgacggcatcttcagcgccgacgaactgcgtaccgtcagcgccaacgcggcctataccggcaatgcgctgatggcgctgtgggtgatgccggcgtggcagcgggtgaagggggtatcgggacttcttgttgaaggaaaagccaaggagctgacacgggccggagtccgcgcctggagtaaagcgggtaacgtagagtttgcgcggatcgctcgtggactggtactgcgcacggcgacttgggcggcgttgggagcggtggcggcgggagtcgaggcgtggcaggtaagcaaagacatcaagagcgcgaccagcgatgaagaagcgtccatgctgtactggaaacataaagctctacaaggtttagctaccgtaggggtagtccagcttgtaggctctgtcttaggtatctggttcagctttgcctgggtcatggcgccctggatcactctgattgtggcttttctcggcatcctttatctcgccacgacgctgttcgccaaccgctacaagcgcgaaggcttgcgcctctggttgcaccgttgcgcctggggccacaatccgcagcccgagtggagttctggcgaaagcggccatgccgagcagttgcgcagcctcgctgaaatcctcctgcgccccagcctgctggcgcggggcgtttcccgcatggtcaacctcggcgccaatgcccacggtccctatcgcaccgaatggcaaggtttctgggtcgaactgatcctgcccgccagcctcgccgggcagaatgtcaccctgcaaccggccatggtcgacagcgactgggcccgcgacgatatcctgcggcagatggaagaccgtttctacgaccagtggctggatggccactgggtcgcccctgggcaagccggccagctacctggggcaaaaccgggtgaccagataccgggagaccatgcctattcccgtgacgatagcgtccgtatctggcgggtctggatcagttactctcaccaaccgaccctggagctggaagtcagctatccgaagagcgttgtccaacgtcccgatggacgcggctacctgttccgtctggccatcaagagcaacgccgaagaggcggaaaggaaaagtacaccgttcagtcaggaaccgtcggcagatatggtgctgagcaaaagtgcctcacataagattgcgctgccaatcgttggaatcattgaagggaaatcatga

SEQ ID NO: 358783 - DNA, 735 bp, Pseudomonas aeruginosa
atgaagctaccttggagcaaaactttggcattaccgccacaattggagtggaagtacgcaggcgagccagcgcttatgagctggactataaaggcgagaaactacaatacatttgttgcaaatataatgttttccatatgctttattgtagttgttatttccacatcgcttgcaggattttggtttgacagagacttaaaactagatatcccaggaagcattggtttttttttggtgatgatttctgtagttctctcagtaacccaccaaagaatgaacttcgcctatcgacttagcaaatccggcatagagtactgtgagtggaaattcctaccaaagtggcccatcataattgttaactgttttgccgcagtcgttatgctttttctaatgttcatgttgcgcgacgatccggctggaatgctgatcggcttggcaggcgcaggggggattgggcttaccgctgtcgccaccctgaactcggaaagtttcagaaagctgcatacaacatttcaccatgttacatacacctgggatcgcttcgaaaaaatctcgatctacaaaagccgacatatcatcggactgaatttcgagtgggagaactttgggaaaaagctcaatgcaatagtgaatatcttttgccatcgcaaggatgtcgataagcgactggcgatgatcgagtcactcttgcccaagcccattcccgttgtcgtcgagaaattcgaggtctattga

SEQ ID NO: 358784 - DNA, 723 bp, Pseudomonas aeruginosa
atgaaactaccctggaacaggtccttggcattgccgccgcagttggagtggaagtacgcaaacgagccggagctgatgagatggaccataaaggcgagaaattacaacaccactattgcaaatatggtttctgttttgtttttttctatggcagctacaggagccgccatatatggtgggtggattggtgtggggctggatgaaagccttacaagaagcttcttgttatttcttgtagtgtttccggccatgctatccatgacccaccaaagaatgaacttcgcctatcgattcagcaagtcagggggggggagttttgtgagtggaagaactttccacaggccgctgtatgggtcggtcatagtcgcaatcgcctgcgttgctcttctagggcccgatgggatgctgctgggcctactgggagcgggaggaatggggtttacagctatagccatgatcaactcgaagagctttcagaaaatgcacacgaccttccatcataacgcctatagctggagcgagttcccaggagttgtaatagaccagcggcaaaaactggtaggcttgatgttcaaatggtatcacaaggagctgaatgaagagatggtaagtgtcgaggcgctttacactcgctcccgcgatttcaagaagctggttgatttcctcgaaaaacagctgcctgacgttccattcacggaagggaaagtacagcgcggaccgtga

SEQ ID NO: 358785 - DNA, 285 bp, Pseudomonas aeruginosa
atggggcttaccgctgtcgccaccctgaactcggaaagcttcagaaagctgcatacaacatttcaccatgttacatacacttgggatcgcttcgaaaaaatctcgatatacaaaagccgacatatcatcggactgaatttcgagtgggagaactttgggaaaaaactcaatgcaatagtgaatatcttttgccatcgcaaggatgtcgataagcgactggcgatgatcgagtcactcttgcccaagcctattcccgttgtcgtcgagaaattcgaggtctattga

SEQ ID NO: 358786 - DNA, 723 bp, Pseudomonas aeruginosa
atggtgaaaacctgtggcaaggccctgctcggcctctgcgccgcagccgtcgtactggccttgctgatccactggatcacccccgcgaccatcctccactaccgcgaggacctgctgttctacttgcaggcccacctggtgctggtcttcagttcgatggcggccgccctgctggtcggcgtgccggccggcatcctgctcagccgtcccggcatgcaggcccaggccgaacgcctgatgcaggtgttcaacgtcggcaacaccatcccgccgctggcggtgctggccatcgccctggcgatcatcggcatcggcaacggtccggcgatcctcgccctgttcctcgcctcgctgctgccgatcgtacgcaacacctacgagggcctgcgcaatgtctcgccggcgctgaaggaagccgccaccggcatcggcatgacgcccaaccaggtgctgctgcgggtggaactgccgaacgcggtgccgatcatcgtcggcggcgtgcgcgtggccctggcgctgaacgtcggctccgcgccactggcattcctgatcggcgccaacagcctgggcagcctgatcttccccggcatctacctgaacaaccaccagcaactgctgctcggcgccgcctgcacggcgctcctcgccctgctgctggacgccctggtggtgctgttcagccggacgttcctggaacgcggcctgaccgccaaggaggcctga

SEQ ID NO: 358787 - DNA, 1560 bp, Pseudomonas aeruginosa
atgagtatggatatcaaagaacgtttgatagagatatttaaagctagaggctcaggtccatttttatttgttggatctggcttttcaagacgctatcttggtcttgaagattggcgagggcttttagagcgattctgtgttgcggggaggcccttcgagtattacttggcaagggcaaatggagattatcctactattgcaacgttgcttgcaaaagattttaatgaagtgtggtggaggtctgaggagtatgcagagagcgtagggaggtataagtctcgtgttgaggatgagacatctgcgcttcgtatagagatatgtaattatctttcaaccttggatcagtcaaaggccttgtcttcgcaatataaggcagaagtcgagcttttgtcgggtcttaatgttgatggcgttattactacaaactgggatatgtttattgagcagcttttccctgagcatcgtacatatatagggcaggatcagttgcttttcgctaatcctcaagagataggtgaaatatacaagattcatggatgttcgacagatccatcttcattggttctaactaagtcggattatcttcagtttcaagagcgaaatacatatctggccgctaagctaattactctttttgttgagcatcctatagtttttataggttattctatttctgatgagaatataagtggtttgcttagggctattgcagcatgtattgggaaggaaaaggttgaacagcttcgaagaaatttgatatttgtgcagcgtttgtattctggtgaggaacctaatgtatcggacacttatttggccattgatggcgtgcagattcctttggttctggtgaaaacaaacgatttttctgaagtatatttggcgatagaagcaacaaagagaaagattccagctagagttcttcggtattgtaaagagcaactctacgaattggtaaagtcctcagagccggagaaaaaaatatgtgtcgtcgatattgatgagatagaggctaaagaagatgtagagtttctggtgggggtcggggttgcttcaagagagataaccggacctgcgccagttgggtatgcggctatagaagttagtgatttaattgaagacttgctattagataacaaagagcttgatgctaggaaagttgttgccaatgttttagttcggttgagtaaggggactccttatgtcccggtttttaaatatctaaaagctattggtgttaatagttttgaagagtataatgctttaggtgtgaatattgatcgggtggtgtgtaaggatataaaaacctacaggcttaaagtgtactctaaaccatactttaggaactataggcataaaagtattagggagctaatagaggcttgcactccagaaaatgcggctgcatatataccttttattccccgcaatcaaattgatgtggaagttcttcgagagtttcttttggataaccttgataaaatggaatatagagggtgtatttatgctagtaactttaaaaagctagctgccctttatgatagattggtatacggttggtga

SEQ ID NO: 358788 - DNA, 1053 bp, Pseudomonas aeruginosa
atggaattggagttgagaaaatttaagtctgttaatttggaggatccattttttgactcattgaaagcttcctataaagagttttctaactggtttttaggaaaggcggaagagtttgcttacgtctttgagcaggaaggagtagggattcaaggttttctgtatttaaaggttgaagaggaagaggtgttagatgttaatccctctttacctttagctaggaggctgaaagttgggacaatgaaggttaatccccacggtacaaaaatgggggagcgctttgttaagaaaattattgattatgcggttcgtgaaaaaacaaatgaaatatatgtgactgtttttgaacatcatgaggttctgatttcactacttaggcgctatggttttgaccagattggtacaaaaacaactcataatggcgtggagcttgttttgatgaagcgcctttttgatccttatgttgatatgtataaaagctatccattagttagtctgtctggtgctcgctcttatattttgtctttatatcctcagtggcatacgcgcttgctgcctgattctatattaagaaatgaggcgaatgatatagtcgaagatatttcctcagctaatagcatacataaagtgtatatgacgaagatgaatggcgtcgatgcgctgcgacggggagatatagttgttatatatagaacatctgatggggttggtcccgcccattatcggtctgttgccacatcgataggtgtggttgaggagtatcgtcatattaatagtttttcctctgaggaggagttctataggtattgccgtccgtatagtgtttttactcatcgagagctaaagagtttatgggaaaggaagaactatccatttgtattcagatttatgtataatctcgccttcaagcgcaaagtcactcgtgctgtgatgattgaggatctgggtcttccaggagcagagcagtattggggattttttgaaatatcccatggtcagatgagagacattgcgaataaggggatggttgatgaaggtcttattgtcgattaa

SEQ ID NO: 358789 - DNA, 186 bp, Pseudomonas aeruginosa
atggagagctttttccgttcgctgaaggccgagcgggtgtacctgacgcgctatgccagctaccaggaggcgaaaaccgacctgttcgactacatccgcttttacaatcaccgtcgtcgccactcgacgctgggctatctcagcccgatggagtttgagcggcgctatgcgagcagtaactcttaa

SEQ ID NO: 358790 - DNA, 1263 bp, Pseudomonas aeruginosa
atgctgatggagcgggtgctggcaccggccaacctcaagcgtgcgtatcagcgcgtagtgagcaacaagggtgcgccgggtgccgatggcctgccggtcgcagccctggcgggctacgtgaaacagtattggccaactcttaaagccagattgctggccggtgagtaccatcctcaagtagtgcgggcggttgaaattcccaaaccgcagggcggtacgcggcaactgggcatccccagtgtcgtggatcggctgattcagcaggcactgctgcaacagctcacgcctatcttcgatccgtctttctcggactccagctacggctttcgtccgggcaagagcgctcaccaggccgtcgagatggcctgtgcccatgtggcatcgggttaccgttggtgcgtggagcttgatctggagaaattctttgatcgagtcaaccacgacatcctgatggcatgtgtcgaacgacgggttgaagacaaacgggtgctcaggctcattcgccgctacctcgaagcggggagcatgtcgggtggtgttgtcagccaacggcaggaggggacgccgcaaggcggtccgctttcaccgctgctgtcaaacatcctgcttgatgaactcgatcgcgaactggagcggcgaggccatcgcttcgtacgctatgccgatgacgcgaacatttatgtgcgcagtcttcatgcaggtgaccgggtgctggcaagcatcgaacgcttcctgattcagcgtctggggttgacgctgaaccgggacaagagccgtgtggcgagagcgtgggagtgcagctatctggggtatgggatgagctggcaccggcagccacggttgcgagtggcaacgatgagcttgaggcgcttgcgcgaccggctcggggagctgctacgcaaggtgcggggccagaagatggcgagcgtcatcgagcggatcaacccggtactacgtggctgggctggctacttcaagctgagccagagcaagagtccactcgaggagctggatgggtggatcaggcacaagcttcgctgtgccctatggcgtcaatggaagcgcccctggacaagggtacgcaacctgatgcggctggggcttgccgaatcgcgggcttgcaaatccgccttcaacggccgaggcccatggtggaactctggagcgccgcatatgaaccaggcgctgccgaagaagctgtgggaccaactagggttggtttcaatactggatacggttaatcggcttagccgcataacctga

SEQ ID NO: 358791 - DNA, 186 bp, Pseudomonas aeruginosa; identical to SEQ ID NO: 358789

SEQ ID NO: 358792 - DNA, 147 bp, Pseudomonas aeruginosa
atgagccttaagccaatagatgagtgggaaaaaccgtttttcagtgggcgtatccatgcctgcccgctcgcactccagaacacgttcaacccgtggatgaataacgtccagaaatgcagtcattggcaaggagacgcccccgtatga

SEQ ID NO: 358793 - DNA, 237 bp, Pseudomonas aeruginosa
gtgcttgccggcacgccgcttcgccatgtcgccgagactctcggcatcgctgaaagcctgttgggcaaatggaaacgccagtacgagcagcaaggtgacgatgcctttccgggcaacggcaagcagcgaggcgagagcgcggagctgcggcgtctacgccagcaactggctcaggtcaccatggagcgcgatgtattaaaaaaggcgctcgccatcttctcgcagcccacgaagtga

SEQ ID NO: 358794 - DNA, 255 bp, Pseudomonas aeruginosa
atgacctggtacgcgacaagctggcagcacatggaaacagtcaggactgataacgcgggcatccaagctatcgacgtagcaaaggcaatcgacaatagctacccataccgcgagcgcagcggctgggcctacaaggcttggctggctgcccggcgcgatttctttcgcaaacataacctgccactgcgccgcgcgaagaaacagcctgcagcgcagccgttcgagcttcagtccacccaagagggtgaggcatga

SEQ ID NO: 358795 - DNA, 249 bp, Pseudomonas aeruginosa
atgccgaggggtatccggctggacggcagctcggtgaggatcagttgcatcgacagcgggatcagcaccgcccccgaagccccctggatcacccggatcaggatcagcgtcgacaggttcggcgccagcgcgcagctcagcgaactgagcaggaacaccagcgagccgaggagcatcacccggcgcaaggagaacacttccaccagccaggcggtaagcgggatcatgctgatttccgcgaccagatag

SEQ ID NO: 358796 - DNA, 1530 bp, Pseudomonas aeruginosa
atgagcgaaagcagcagcttctccccgcccagcctggtgatggcgaccatcggcctgtccctggcgactttcatgcaggtgctcgacaccaccatcgccaacgtcgccctgccgaccatctccggtaacctcggggtgagttcggaacagggcacctgggtgatcacctcgttcgccgtgagcaacgccatcgccctgccgctgaccggctggctggcccggcgggtcggcgaggtgcgcctgttcatcgccgccgcgctgctgttcgtactcgcctcgttcctctgcggcatcgcccagtcgatgccttctctggtcggcttccgcgccttgcagggcttcgtcgccgggccgctgtatccgatcacccagaccctgctgatctccatctacccaccggcgaagcgcggcatggccctggccctgctggcgatggtcacggtggtggcgccgatcgccgggccgatcctcggcggctggatcaccgacgactacagctggccgtggattttcttcatcaacgtgccggtcggcctgttcgccgctttcgtcgtctaccagcaactaaaggcacgcccggtggtgatcaagaaggcgccgatggactacgtcggcctgatcgccctggtgatcggcgtcggcgccctgcagatcgtcctcgacaagggcaacgacctggactggttcgagtcgaacttcatcgtcggcggcgcgctgatcgcggcgatcgccctggccttcttcatcatctgggaattcaccgaccgccatccgatcgtcaacctgcgcctgttcgcccaccgcaacttcgccgccggcaccctggcgctggtgctgggctatgccgcgttcttcggcatcaacctgctgctcccgcaatggctacagacccagatgggctacaccgccacctgggccgggctggccgccgcgccaatcggcatcctcccggtgttcctctcgccgctggtcggccgctacgccaaccatttcgacctgcgcatgctcgccggcctgtcgttcctggcgatggccatcacctgcttcatgcgcgccaacttcaccaccgaggtcgactaccagcacatcgccatcgtgcagttgatcatggggctcggcgtggcgttcttcttcatgccgatcctgagcatcctgctctccgacctgccccccgaccagatcgccgacggctccggcctggccaccttcctgcgcaccctcggcggcagcttcgccgcctcgctgaccacctggatctggaaccgccgcgccacgcaacaccacgcctatctcagcgaaaacatcagcctctacgacccggccacccacgaaaccctcgcccagctcggcggcaacacccaggcgaacgcggcgctgctcgacaggatggtgcagagccaggcctacatgatgtccaccatcgactacttcaccatgctcggctggctgttcctcgccctgctggtgatcatctggctggcccgcccgccgttcggcgccaagcccggcgcggccgcctccgggcactga

SEQ ID NO: 358797 - DNA, 126 bp, Pseudomonas aeruginosa; identical to SEQ ID NO: 354100

SEQ ID NO: 358798 - DNA, 606 bp, Pseudomonas aeruginosa
atggacgatgaacaggcgctgatcagacggttgcgagcaggtgacagcaatgcctttgaggtggcgatcaagctgcaccatggcttcttggtggccatggctacgccgctggtagggcaagaactggccaatgatgttgctcaggaaacctggctgaaggcctttgccgccatcggcaaattcgagggccgtgcccaactccggacctggctcgccaggattgctctcaatgaggcctacgcgatcatgcgtaaggggcgtcgcgaggtgtctctggaggcgtgggggactgatcccggctcgccgatcagtgaacgcttcaccgagcagggcgcctggaacactccaccgactcagtggcatcacgacactcccgaagccttgctgaccgaggcggagttgcacgagtgcatccgtaagcacatgcacaaactacccggtgaccaacagagcgtggtgatgatgcgcgagctgggagggttggattacccagaaatcgcgaaagtgctcggtttggctgagggcaatatccgtgtcctcttgcacagggggcgtcagcgcatgcacgccatgctcaatcacttcgaggaggtggggacatgttga

SEQ ID NO: 358799 - DNA, 351 bp, Pseudomonas aeruginosa
  misc_feature (309)..(309): n is a, c, g, or t
atgagcgtcaagaaagaaacccgtctgcgtcgcgctcgcaaggcacgcctgaagatgcgcgagctggaaaccgtacgcctctgcgtgtaccgctcttcccagcacatttacgcccaggtcattgcggccgacggcggcaaggtcctggccagcgcctcgaccctggacaaagacctgcgcgaaggtgccaccggcaacatcgatgcagccaagaaagttggtcaactggtcgccgagcgcgccaaagcggccggcgtcacccaggtggcgttcgatcgttctggcttcaagtaccacggccgtgtgaangcgctggctgatgccgctcgtgaaggcggactggagttctaa

SEQ ID NO: 358800 - DNA, 1032 bp, Pseudomonas aeruginosa
atgcgcgcaatcgttaactacgagtacttgctggcgccggcacttgctccagatactgatgtatttagcagagccgaagacgtatgtatactttggcagcaattccaggaactcacagttccaccagtattggaagaagatgccttaatcagcatgatcgatgctggcctctacccgagcgagaatatatataaagagaagttctgccggatagaagacttcccatttagcccacacgacattgcgcgcatcgttaataacatacttgaatctggccaatgcctttcagaagtcgagccagaaataataaccgaatgggatgaaaaagaattcaccccatccaagatacccaatataacagagcatcgtgagtcgcagctattctctcaatcagagagcattgcaatatgctcggccataagccaaaaaagatatggaattttattcttcaatcagcaccttcaatctacactaaaacaaatagaagtaactggaaatctaactgatatttacccagaggacgcagcaacactgcctttaaagatatcagaaaccacaccaatattttattctcaaagcgaatatattcaatcacagaacccactagccatctacaagtcggctcaaaacgaaactgacttcaaatattcctattacgtaggggcaaagaaactttccaaaagcaatggagatgaatcaaaccacttaaagtgggaagaattccgcataggcccgcactttatccaatcacttatcgactgtgagtgcactgaagaccatcagttcagcgagacttgcttcgatacagtaatacacttactcgcaaactgcccaaaatccgatttggatatatttacgaagagcgcagactccaaagagcctagaacacatggcaaccataccgcatacaggacgcacgttacaaagggtggtcgagctcttcgactaatgtactggaaggacgacaacaatcgactaactcttgcgaatgttggaaataaacatgatctgtatatcgcccctccggagtga

SEQ ID NO: 358801 - DNA, 840 bp, Pseudomonas aeruginosa
gtggtgattgaaccggaccagctggaaggtctcgccctgaaacgggcacaactgatcgccggcgtgacccagtcgcacctgcacctgctggtctgcgagaagcgccgcgaccacagcgccgccctcaacgacctggcccaggaactgcgcgaggaaggctacagcgtctcgaccaaccaggcctggaaggactccctgcaccagaccatcatcgccgagcaacaggccgaaggctgcgggctgatcatcaagcagcactttcccgacaacccgctgaaaaaggccatcctcaccccggacgactggaaactgctgcgcttcgcgccctgcccggtactgatgaccaagaccgcccggccctggacgggcggaaagatcctcgccgcggtcgacgtcggcaacaacgacggcgagcaccgctccctgcacgccgggatcatcagccatgcctacgacatcgccggcctggccaaggccacgctgcacgtgatcagcgcccacccctcgccgatgctctcctccgccgacccgaccttccagctcagcgaaaccatcgaggcccgctatcgcgaggcctgccgcaccttccaggccgagtacggtttcagcgacgaacaattgcacatcgaggaaggtccggccgacgtgctgatcccgcgcaccgcgcagaagctcgacgcggtggtcaccgtgatcggcaccgtggcgcgcaccgggttgtccggcgcgctgatcggcaataccgcggaagtggtgctggataccctggaaagcgacgtgctggtgttgaagccggacgacatcatcgcccacctggaggaactggccagcaaggagtga

SEQ ID NO: 358802 - DNA, 1032 bp, Pseudomonas aeruginosa
atgtcgaaaaagtcccgctccagactctggttcctcgtccatagctggctggccctgcccatctggttcttcgtcctgatcgtctgcgtcaccggcaccctggcggtggtcagccaggagatcgtctggctggccaaccctgacgtccgggccagcaagccctacgaagatgccgagccgctcagcttcagccaggtcctgaaggcgatcaacgaagcccaaccggacctcctggtcgaatccatccagcgccccgacgaagagcatttcgcccttactgccgaggtcagctatcccggcggcagcgaggcgaccctgtacatcaacccctacaccggcgccatccagggcgaaagcccctccttcgactttcgtcagttcacccgtgccctgcacggatggtggctggttccgttcaacaacggctacagctggggctggtacatggtctcgctgctcggcctccccatgctggcatcgctcatcaccgggctggtggtctataaacgattctggaagggctttctcaaacccagattacgcatcaaccagggcgcccggatcttctggggcgacttccatcgcctgagcggcatctggtcgatctggttcatcgccctgatttccatcaccggcacctggttcctgatccaggccatccttgccgacaaccacgtcaccctgaccaacgacggcatccctccggtcatcgcacgcgccgacgtgccccgcgccgcacccggtcagaaggttccatacatcgagctggacgaggcggtgcggctcgtcaccgggcgtatccccagcctggaggccagcgcggtgttcctgcccggcaacgcctacagcccgatgttcgtggccggacgcggctggtatccgctcatgttccagtcggccgcgctgaacccttataccggcaagatcgaaaccacccgcctgctcagcgaccgtacccccccctgcagttcgtcaccgaatccatgcgccccctgcacaccggcgatttcggcggtatctgggtcaagctga

SEQ ID NO: 358803 - DNA, 291 bp, Pseudomonas aeruginosa
gtgcctgacatgagagaagagtttgaagcttggctactgcgcgagcatggccttgagtcggaatggcaggatgagcgcaactgcttcaaggactacccagcgcaccttgcgttcaaggcctggcaagccagccgcgcggctctgagggtggtgttgccggacgacggcatcgaggactgtcgacgtgactggcagaactcctgccgtgacaacttcgataccggctactgctatgcgactgaccggatcactcaagccctccagcaagcaggaatcgaggtggcgccatga

SEQ ID NO: 358804 - DNA, 348 bp, Pseudomonas aeruginosa
atgaacgaccgcacactactcgaactggcggcgcgggctgctggttttaccgggtacggattcttcctgggcgatgatgggatcgatgtcagtgacgaaactggtactcgcttcgcctggaacccgcttaccgacgacggcgacgcgctgaggctggcagttcagctcgacataaccataggacctgagcatccagacgtggttggaaaatcgctatgtcgtgcttcttggagcaatcgaaatatgagtcttggcgagttcggtgatggcgacaaaccgtccgcttatcgccgcgccatcgtccgcgccgcagccgagatcggaaagtctatgggaggtggggagtga

SEQ ID NO: 358805 - DNA, 510 bp, Pseudomonas aeruginosa
atgaatgatgtcatccctctgctatcggagattcatccgcatctcgttggcttcatagacttcctcgaagacttcaataaagagacggagcgtggagccacattggctgctgcggcgatgctcgatgagcagctcggtcggatcatcgagtcgtttctgattcctaacaagggaagcaaagcgatgcttgatggcttcaacgcgccactggggacactgtcggcgcgcatctctgcctcgttcgccttgggccttctttccgacgtcgagtacaaggagtgcgagttaatccgaaaggtgcgcaatgagtttgcgcaccagatcaaggtatcgttcaaggatgagaaagtcagggacctctgctcgaagcttcagctttctgcgaagagctatggtggagttcacgtggacactaggggacagtttaccgcggcggccatagcattaatattgaacctcacgaaccgccgtcactacgttgaacaaaagagattggaggcatttaactag

SEQ ID NO: 358806 - DNA, 2106 bp, Pseudomonas aeruginosa
ttgtttactgtgcatgacacattcaagccaaagcagtatcttgcggaaatcccaagcgctgtaagggtaatcgaaactataaacctaaaaacgatcattctaatttcattagacggtgagccaacagccccatacagactagactaccaaacctgggtagatctgattacttcaaaccaagtggaaaagatacaagaccccttcactggattaccttacatcgtttcgaatctgcccgatgccgccatgaaaagactcttaatggctacaaaagcagcaaacatgtttaatgaaattgaagatgcgctcagcaacggggcaaaattcagaaatgcaatccttcatatctccaaccatctgaaaataggtaaaaaaacaacaactcgctggatatgccaatggttgcaagccgggaaaaacccggcagtaattgtgagaaaattcttagcaaactcaagtaaacctctaaggcctcaaggcataggcagtaagcgcggaagacagacttacacccctcaactcacttcaacagtgcctgcccatgaagtttcagaaaatatagaagcagcatacaatatctatataagacagcagaaaatgcgatgggtggatgcatacagagaaatgcttatcacccaattcaaaattccagattcgctcgtaatcaccgaagatgacaaccctggtttacttcaaacacctggcgccatggagaaataccgagccccttcttggtctcaatttcgctatcgatgcagacagttaaaaaatctagcagctgacgctcagagcgagaatccaagaggaaagagaggcaaagccaccgatggtattccaggccccggcttctatgagattgacgctacatgcttccaaatacaactagtctcgcgaataactggcagcctcctgattggacgccccctcgtatacctgatagtcgaaacttatgatggaatgatcacaggctatgcagtttccctagagaaccctagttgggcagtagctgcacttgccctccataattgctttagcgataaaggccctgtattcaagagattaggccttccttataaggctgaagactggccaagtcatcacctcccaacgctgctgcgggcggatagagctgagtttgtctcgaaccaagggcaagaatttcctgcttcagggataagggtcgaagtcaccccatccatgacaccagaagcaaaaggcacggtcgaaggcaagcactctgaaattaagaggcctcaagcgggcagattcaacttacctggcaggttctctaagaaactagagagaaggcaatccaatggcaagaaagatgccgctctcgatattttcacattcgagcagatattggttgaaataatcatggatataaacggggaaccagttaacccaaaggctattccaccagatgcgttaccattcggcgccaatgtcgccagccgcgcagggctacatgcatgggcgcttgagcatcgcgctggcttcacacgcagcatgccgccaaactttttgttcgagcatcttttaaaaacggccaacgcaacagtgaccccacttggactgcaactcaacaacgaactctattattgcgatcggcttagagagctaggattactttatgacgcatcaaaaagacgctctaagataaaggtggcattcgatccaaatttggcatccgagatatatttccttgacactcaaaaaaacacttggacaccggcattcaacaccgaccaggagatacatagaataagagcgtctttcgcagaagctactggatatcgcgcagaacaacgcggactagcagaacaagcaggactgaacaatcatgtaaagcgccgcaagcgaacccccatgatcagacaatcaatcagggaaagcataaataagaagaaagaagacaaagtctctgtatcatcttcgcgcacccagatacgtgagaaccgggcagaggaacgcgcaaaggaacgtcttcccattgcaaaaagctatttgtctgaagggtctgctggagattctgactcaaaagccccgaagaacactcagccgagccgtactatttcaatatgggatgaggtcagtgatcagtag

SEQ ID NO: 358807 - DNA, 798 bp, Pseudomonas aeruginosa
atggctggtgtaaaggcaagaaggccaacgcccgagaacgtcgctcgctggatcaaggccggctatgggcaaggcgaaggggcaagatacaagccatttctctatgtgcgcgatgttccctccaggggtacatccacgatggtaaacagcagagtcacaggcaggacgcatcactatctgtcgcggcaagagtacagagagcacctgctagccgagtacgacaagtcgacaatagacatccgcgagcagtacgcactactcccttgggaagagacatatcagacagcacaacgattaggcattaaacccccgctttatcctggaacacgcacaccacaagtaatgacgaccgatctgctgttgagcaaacacaggccagacggaatcgaattggttgccgtaagtgtaaaacttgagtctgatttaacgcccagaaatctcgaaaaattattaatagaaaagatctactggaatgatcgcggcattcactggcgattagccacagaaaaacaccgcccagaagcccgagtaagtaatttggacttcttctccctctcgctaagccaaacctttgattcagaaacctttcccagccccgaaaagttcagccggcactttgaagaaaaccaccgaccgaacctgactttcaatgacatcttaaaaacaacagctagcgaactaaagatagatagctcaaccgctcactcactcttgggaaaagccatctggaacggatcaagccgaatagacctagatgcgggagtcataaaccaccggtcaaaagtgcgccttaaataa

SEQ ID NO: 358808 - DNA, 1500 bp, Pseudomonas aeruginosa
atggctgacccagtggagattgacctgccgtttcccaactcgggttttctggcctttgatggcacaggcaaacatctgaaacgcgatctcagtgtcgacgacctgttgggggcgcgtctgtatctgtttggccgggctggcgcaccaacccgttttagccttgagctgaccctcaggggtagtgcggccaggaatgcttgttacagctggacctacacggtggccgaaaagccgctggagctcagtctgttcaatatccgtgaacagattgttgacctgctttcgcttcagtcgggcattgatcaggtcgtcgagttgcgggtgttcggtaacggtcaggataccagttaccgcatccgtaggtattcgacggagatgcaactggatcgcgaccgtcagatgctgtgtgctgccaatctgcacgatggcgccgacgccattcccgaaccggtgttgatgctgttgcatgatcctatgcgtagctccatcgcgctccgttcccgcaccagcgaaggtgtgcccaccggcgacttcgagttaccgatagctgttgaaagggatggtccctggctggtgttgcccaaatcgggctcatctgtatcgttccggccgctatttatcgctggtggatggaagccgttggcgccgagcgatggaatccagagtctgcaaaaggcagtgttgaccttcgatcatgcttcacctgttagctccttcacgcctgtgttggatgccatggcggttaaccctatgcatagcggctggcagttcttgcgggccttgtatgaagggtacggctatctgcccctggcgaccttcgaggtctggaaggctctggtagggcacacccgcgcgttggcgatggcacttttcaagtttgaaatggaggcgacattccttggccggctggagactgagtttccgattttctgggagtttcttcccattacagaaatccatcttgcggccaagcgcttcgctgcattccttaaggtgaaaggggtcgctgaggaagccattgatgctctgatcggacgaatgttttcgcgattgggggaaacctattcagcctacgggcagagtgtgcagcgcttcctttctggcaagcctgttggcccagagatcaaggtgccgctagcgactttcaagagtgtcctgcatggctggtaccttgagttgattcgcgagcgcagtgaggcaaagtggccggagttcggcggcaagcggctggagcgttggcacagcagccaaggctgctcggtgattgccttcaggtcggaaatggattaccgcaatgcggtgctctatctaccggtattcgccgctgcggtcgcctgtggcaaggctcggttcacagatgcgtttgcggatggcgtcgaggcgattttcttcttgcgccaggtccgcgatttcgattcgaagtggttcaactcgatctatcaatattgcttgttgaacagcgtcatggatatgcagaaggcagagtcggttaatggataa

SEQ ID NO: 358809 - DNA, 351 bp, Pseudomonas aeruginosa
atgccgggcgatccgatcatcaccatctggccggaacaacgcttcggtgaatacgccagcgccctctacggcatcctggaggaggagcccaaggccggcctcaaggaactggtggacgccatcgactacacggtgaagaaggtcggcatcgaccacgtgggcatcagctcggacttcaacgacggtggcggcgtggacggctggaaggatgtcagcgaaatccgcaacgtcactgccgaactgatcacccgcggttattccgatgccgacatcgccaagctctggggaggcaacttcctgcgcgcctggggcgaagtgcaaaaacgcgccaagccgacagccaccccctga

SEQ ID NO: 358810 - DNA, 342 bp, Pseudomonas aeruginosa
ttgcagaacgcgacccaatatctgcaacgcctggaaatcgcccacaaggtcagcgtcatggacggcaacttcagcaccaccgatctctccaccgggcagcgcaagcgccttgcgctgatcaatgcctggctcgaagagcggccggtcctggtcttcgacgaatgggccgcagaccaggacccggctttccgcagggtcttctacaccgaactgttgccggacctgaagcgccagggcaagaccatcatcgtgatcagccacgatgatcgctatttcgaaatggcggaccagttgataaggctctcggcaggcaaggtcgtcaaggaaaccgagacggcgtga

SEQ ID NO: 358811 - DNA, 612 bp, Pseudomonas aeruginosa
atgttgcccgagatcgaccaattccttgcctgttccactcccgccgcctgggtcgaggcggccctggagcgccaggacgtcatgctgctggaccacaaggcctgcgagatgaaggccgcggctacggcgatgcaactgatcggcaagtactccggccgcctggacctggtgaacaagatgagccgcctggcgcgcgaggagctgcgccacttcgagcaggtgctggcgatcctgaagaaacgcggtatcccggtggtcaatgtcagcgcctcccgctacgcctcggcgctgcgcgacctggtgcgcaagcaggagccgcagcggctgaccgatacgctggtggtcggcgccttcatcgaggcgcgttcctgcgagcgcttcgccgccctggtgccgcacctggacgcggagctggcgaaattctacggcggtttgctgaagtccgagtcgcggcatttccaggactacctgaagctggcctaccagtacggcgacgaggccgacgtggagcggacgatcgaggtggtgcgggccaaggaggccgagctgatcagcagtccggacaacgaattccgcttccacagcggccacccggtgggcctggtggcctga

SEQ ID NO: 358812 - DNA, 654 bp, Pseudomonas aeruginosa
atgaaaagcgaatctaccgatctttacggaatagcacctcatatcgatcgagccaaggatctcttaaatcaagataccgagacgtcgcttcgctatgcagcattggaacttcgattatctttggaatacatcgcatatcggcagcttcaacaatatggcgatgtatttccaagtggagttattggcacgtggaagccagatcaaatagtacgcctcctagcgtcttttgatcctatttcggaaaatgaaggcgagttatcctttgccatcccgcctagcaatggcggcatgcccaccaattggatgtctcttggtaacaccaaagccatcccttggcggaagttcagatcctattaccagaaattgggctcttttcttcatgccccagcaccgaagcgggctggccctgagcgcaagccactgtcgaaagatcttttccaagatgtagtcgaagcaatagagaacgttatgacagcatccttgatcatggcgatccagaatgtcatatctgctcactgcgaatgcggcacaatcattcacatcggagaagctgaattcatcgaaggcgaaacactctcctgccctaacacgaagtgtaatttaccgtacatcaagcgcatctctgaggacggagttggggttatgccgagataa

SEQ ID NO: 358813 - DNA, 324 bp, Pseudomonas aeruginosa
ttgctgaagttgccgatggcggggctggcctcgtgcgggcagcatgggcgcatgcatgacatggacgcgctccagagccaggacctgaggggcctgacgccacaggccctggaggccctggcgcagcgcatgctggtgcatgtccagcagcaggcgcgcgagattgcccggcgcgatggcgagatcgtgtggcgggacgcgaagatcgagaagatcacgttcgagctggcgcggctcaagcgctggaagttcggcgcgcgcaccgaggcgatggatgcgcagcagcgacagctcttccgggtattcgggaaagggtgttgttag

SEQ ID NO: 358814 - DNA, 840 bp, Pseudomonas aeruginosa; identical to SEQ ID NO: 322854

SEQ ID NO: 358815 - DNA, 411 bp, Pseudomonas aeruginosa
ttgccggtaaccgccctggtgatcggcaacttcgccaccatcacgctgctgaccaagaacagcttcctcgacgagatcggcaagcaatacgtggtcaccgcccgcgccaagggcctgaccgaacgccgcgtgctctacgggcacgtattccgcaacgccatgctgctggtgattgccggcctgccggctgcgctgctggggatcttcttcaccggttcgctgttgatcgaggtgatcttctccctcgacggcctcggcctgctcagcttcgaagcggcgatgaaccgcgactacccggtggtcttcggcacgctgttcatcttcaccctgttcgggctggtcatgaagctgatcagcgatatcgtctacaccctggtcgatccgcgcatcgacttcgagaaccgggagtaa

SEQ ID NO: 358816 - DNA, 630 bp, Pseudomonas aeruginosa
atgagcggtccggaacgcattaccctggcgatgaccggcgcctccggcgcccagtacggcctgcgcttgctcgattgcctggtgcaggaagagcgcgaggtgcacttcctgatctccaaggccgcgcaactggtgatggccaccgagaccgacgtggccttgccggccaagccgcaggcgatgcaggccttcctcaccgaatattgcggtgccgccgccggacagatccgcgtgttcggccagaacgactggatggcgccgccggcctccggctccagcgcgcccaatgccatggtgatctgcccttgttccaccggcaccctgtcggcggtcgccacgggggcctgcaacaacctcatcgagcgcgccgccgatgtcgccctgaaggagcgccggccgctggtgctggtgccgcgcgaggcgccgttctccagtatccacctggaaaacatgctcaagctgtccaacctcggcgcggtgatcctgccggcggcgccgggcttctaccaccagccgcaatcggtggaggacctggtggacttcgtcgtcgcgcgaatcctcaacaccctggggattccccaggacatgctgccgcgctggggggaacagcaccttgtcagcgacgagtag

SEQ ID NO: 358817 - DNA, 963 bp, Pseudomonas aeruginosa
gtgatcggcgacagtgagctgagcctaaccgtgcagcgcctgctgaaccaggccaagggtgtgctcgccagtcgcgatggattgcacctggacggcgctgaactgctcaatggcgatggcggcctgctcagcagccaacgcctggtggatgtaacgctcagtggtgcattggacaaccaggggagcggtgcactggtcagcgaagggtcgctgacagtgaaggccgaccaggtcaataaccaggcggggactttctccagtgcgggtagcctgctcgttaccagccggggcgagttgaacaaccagggtggcaggttggtgaccgatgctggagccaccctgaacagcactggcttcgacaacagccgtgcgggcctggtcagtgcgaaaggggctgtggccattcgtaccggagccctgaacaacagtcagaagggatccattggcggcaatacgggcgtcaccctggtcgccgggttggtcgacaacggccgggaaggacggatcagcaccaagggtacgctcgacgccaacctgaaagggttgcttcagcagggggggaggctcgctggtcggcgagcgcggtgtcaccctcgacctcaacggtggcaccctggacaaccacgacctcggtctggtttcaacgcctggcgcgctcctgctgcgccaactcggcatggtggacaacagcgtcggcggagagatatccagcgaccgtgctttcaccctcgccgccaacacactgaacaatcagggcgggcggctgatcagcagcgaagctttgaccctgcgcatcgccaagacactggacaacagtctcaaggggcaggtcctggcgaccgacggactggccatcgagtctcaggtcttggacaaccgtgcgggaaccatcggcagcaagggcgatgcccgtatcagcgtgaccagcctggacaacgccgaacaaggcagcctggtgagtga

SEQ ID NO: 358818 - DNA, 942 bp, Pseudomonas aeruginosa
gtggtcaccgacgccggtgccgtcctgcgcagcgccagcctcgacaatagccagggcggcatcgtcagcgccaagggggccgcggagatccgtactggcagcctcaacaatagccagaagggcggcataggcagcggtgccgggctcgcgctggtcgcggacctggtggacaacagccagaacggccggatcactgccaagggtgcgatcgatgccaacctgaaggggctggatcagcagggcagcggcaggctggtcagcgatacggccatcgcgctcgatctgcgcgggggagaactggtcaaccgtgctcagggcctgatcgccacgcctggagccttgctgctgcggcaactgggtgtcgtggacaacagtggcggtggcgagatctccagcgatcgaagctttaccctcgccgcgaccgcgctgagcaaccggggtggccgcgtgatcagcggcgactccctgaccctgcgcatcgcccaggcactggacaacagcctccaaggcgttctttccgcaagcggagggctggatgtcgctgcactcgtcttcgacaaccatagcggcatcgttgctagcaagggcgatacacacatcggggtgaaccgcctggagaacgaggcaggccgcgtggtcagcgaaggcgccctggatctgaccgccaagcaggtgagcagcgccaaggggcgcattgccgcgaagggcgatctgcaggtcacggttggcaccctcgagcagcagggtggagaactggccagtcaggggacgctgactctcgacgccgatagcctggataaccgcaatggcggcctggtgagcgccgatggcggggtcaccgccgaggcacgccagatcgataaccgcggtggggaaatatccagcgtggccaaggtggctctggctgtccgggaacaactggacaaccggggggcaaggtga

SEQ ID NO: 358819 - DNA, 1815 bp, Pseudomonas aeruginosa
gtgcagaacgggggagagctgacgactcagggcgcgctggccctcgacgccgacaaagtcgacaacggcgctggtcgcatcgccggcaaccgaggtgtggtcatcgatgcccggcaggtggacaaccgtgccggcgagattgccagccagggcgtggcgacgctgaacctcactgagcaactggacaaccgtggcggcaagatcgtcggtgacagtggtctgggcatcaccgcgccacgcgtgctcaaccaggacaagggagtactcgccagccgcgatgggctgcgcctgagtggtaccgaattgttcaatggcaatgccggactgctcagcagtcagagacatatagaggtcactctggacggcgtgctggacaatcagggcaagggcgcgctgctcagcgacggtaccctgacggtgagcgccgggcgcatacacaaccaggacgccactctgtccagcgccggtgcgctgagactgagcagccaggaggcggtggacaaccgtggcggcaagttggtgacggactccagcctgcgcctgaccagcgccagcctggacaacagccgatcagggatcatcagtgccaacgctgcggcggagatccataccggggttctgaacaacagccagaaaggcaatcttggcagtaatgacgggctcggcctgattgctactgaggtggataacagccaggaaggtcggatcactgccaaaggcatgatcgacgcaaatatcaagggactcgatcagcagggcaaagggcggctggtcagtaatgccggcatcatactcgacctgaacgagggaaccctggccaatggcgctcagggcctgatcgccacgcctggaaccttgctcctgcgccaactcggcatggtggacaacagcggcggggaaatttccagcgaccgagccttcacactcaccacctccgcgctgaccaaccagggtggccgcctgcgcagcggcggtgtactgacgttgcgcatcgcccaggctctggacaacagcctcgaaggtgttctctccggcaccggaggcctggatatccgggcgcttgccctggacaaccgcagtggctccatcggcagcaagggcgccgtcgatatcgacgtgtcccgtttggaaaacgatgacggcgacctgcttagcgaaggtcgtctgaaactgactgccgagcgagcgaacagtgtcaggggacggatcgcggccaggggtgacctgcacgccagcgtgacagcctttaaccaggcgggtggcgaattgagcagcgagggtgcgctgatgctcgaggccgatagcctcgacaaccgcagcggcggtctggtcagtgctgatggcaacctgaccgtttccgcccggaggatcgacaaccgtgcgggcgaaatcgccagcccgggccaggtgacactggacgtcgccgagcagttggacaaccgaggcggcaaggccatcggcgatagcggacttcgcctcgccgcgccacgggtactcaaccaggacggcggggtactcgccagtcgtgatgggctgcgcctgaatggcgccgaactgttcaatggcaacggcggcctgctcagcagccagcaaagcatcgacgtcattctggacggcgtattgggcaatcaggcgggcagcttgagcagccagggacgcctgagcgtgaagagcggtcggctggacaaccagggcggtgcagtctccagcgccgggaccttgtcgctttccagccagggtgcgttgaacaaccagggggggcagggtggtcaccgacgccggtgccgtcctgcgcagcgccagcctcgacaatag

SEQ ID NO: 358820 - DNA, 936 bp, Pseudomonas aeruginosa
gtggtgctggcgttgccgctggtgatcgccccgatcctgctgttcggccgccgcgtgcgcagcctgtcgcgggaaagccaggaccgggtggccgacgtcggcagctacgtcggtgaaaccctcggtcagatcaagaccgtgcaggcctacaaccaccaggcgcaggaccgccagcgcttcgccggcaccgtcgaacgcgccttcgacaccgcgcgcaagcgcatcgcccagcgcgcctggctgatcaccgtggtgatcgtgctggtgctcggcgcggtcggcgtcatgctctgggtcggcggccgcgacgtgatcgccggcagcatctcggccggcgaactggccgcgttcgtcttctacagcctgatcgtcggcatggccttcggcaccctcagcgaggtgatcggcgaattgcagcgcgccgccggcgccgcagagcgcatcgccgagctgctcagggcgcgcagcgagatccgcccgccagcgcaaccacgcaagctggcggcacgggtgagcgggaggatcgaattgcaggcggtgcgcttcgcctatccgacccgtcccgaacactgggccatcgacgacatcagcctggccgtcgaaccgggggaaaccctggccctggtcggaccttccggcgccggcaagtcgaccctgttcgatctgctcctgcgtttcttcgatccgcagcagggacggctgctgctggacggacagccgatcgtcgaactggacccggccgacttgcgccgcagctttgccctggtgtcgcagaaccccgcgctgttcttcggctgcgtcgaggaaaacatccgctacggccgtccgcatgccagcgccgccgaggtcgaggccgcagcgcgtgccgcgcatgcccacgagttcatcctgggtctgccgggtattcgggaaagggtgttgttaggccctttctga

SEQ ID NO: 358821 - DNA, 234 bp, Pseudomonas aeruginosa
atgagtgtcatcgtcgaacgcaacggcccggtcaccaccctggtcatcgctcgcccggagcggcgcaatgcggtggaccggccgaccgcccaggccctggccgacgccctgcgcgagttcgaagcggacgatacggcgcgggtcgcggtactcaccggcagcggcggcaatttcgggtattcgggaaagggtgttgttaggccctttctgaatacccctgggttgggtagttga

SEQ ID NO: 358822 - DNA, 885 bp, Pseudomonas aeruginosa
atgggcgatcggtacctggttgctgaaggagtagcggccggcgtcgtcggagtgattgcagatgtgattggcgtcgaaatcgtcgaggaaggcgtagggcccgtagtcgaaggtaatgccgaggatcgacatgttgtcggtgttcatcaccccgtggcagaagccataggcctgccagcgggcgatgagttcggcgttgcgctcgacgacctggcggaacatcgccgcgtatggccgctcggctgcgttgcagtcggcgaagtggtgttccagaacgaacgccgccaactgtttcaactggtcgtgctggcgggtgtagtagaagtattcgaagtgaccgaagcgcacgtggctgggcgccaggcgcagcagcgtcgccgctctttccttcttttcgcgccagaccggcgtgctcgaaccgatcacgcagagcgcccggctgctgggaatgcccagtgccggaagggcttcggaggcgaggaactcgcggatcgacgagcgcagcacggcgcgcccgtcgcccatccgcgagtagggggtctggccggcgcccttgaggtgcaggtcccagtgctcgccggcctggttgatcacctcgccgagcagcaggccgcggccgtcgcccaggcgcgggttataggagccgaattggtggccggaatacaccatcgcccgcggctcggcttccgaccacagcttgtgcccgccgaacagttcggcgaacagcgcttcgtcgctggtttccgctggcaggtcgagcagcgccagggcggcggggctggctaccaccaggcgcggctcggcgatgggggcgggcaggacttcggtggagaaggcgtcgcccaggcgggcgaagcggttgtcgaagtcgaggtcgtcgagtga

SEQ ID NO: 358823 - DNA, 756 bp, Pseudomonas aeruginosa
atgaagcctatgattcaagcccacctggtcgagcgcgaccagttcggcttctggacccatccgaactatccggacctggccgacaactgctcttccagcgaggcgcaggaaacgctgcgccggcttggactggagttgcagaacgtcttcatggagtcggatgcgcctcgcctctacgactctgcccgttcggaccaacgatacagcgagtggatcccaacgcagcccaaaggcgccggttggttcgtgctgtcgatccacgataccgataacggcccggtgtgtcagtacgtgcgaccgctcggagagcacctgagtccaatcgatctcgatgcggcagcagaacagcatgagcgcctgctcagcgaggcttgtgccaaggccttgaatcagcgtgacgtcgccctggccagggtcgcctcgcttgagtccaagctggccgaactggagaagcaggaacccgttggtgtgatgcgcgcgtcaagcgagatgggggtagcgccttacgcggatatctggccttggctggagcctggccaaaagctctacaccaccccagtagcccaggctcagcactgcgtggtgctggacgctgagaagctgatcgcacaattcaaggactgtgcgtcgcatgccggagatcccgagcgagctgcagcattcaacgatgcaatcagcgaggtacacgccatgctcgccggcgccccttcccaagctaaacccagcagcgacgaagagcagggaggcaggccatga

SEQ ID NO: 358824 - DNA, 1158 bp, Pseudomonas aeruginosa
atgaccaccccccagcgcgccgacgcccagcaacgcgccgacggtcaggctgaaccaggtgctgtactgctggctgtagtcgtaggcgatccacaccagcaccgaggcgcaggcgaacgagaccacggcgaggaaggtcctcccgcgctggcgcagcgaggaactgtcgatcagcagcagggtgaaggcgagtaccgcgagtaccgccgaggcgatggccagggcgcgccacttgggaatcggcaccaccggcccggtgaagttgaacttggccttgcggtcggcgttgtagacgccccagtaggcgcccaccgagccttcggcgctgaccttccagggctggtcgaaggcttcgatgacgaagtagctgtagccttcgccgttgagcgcgttggtcaggcgccgcaggtagatggcctggtccgcgggtgtcgcctcggcgctgccgcgcatgcgcccgttgctcggccagccgacctcggcgagcagcagcggcttcctcgggaaggcggccttgagttcgcgcgcgcgttcgagcacgaagtccaccgcgtcggccaccggcgtagcctcccagtagggcaggacgtgggcggcgatcaggtcgacgtgttgcgccagttccgggtgttcgcggtagacgtgccactgttcggcggtggtcaccggaaccttgaccgccgcgcggacccggtcgaggtaggcgatcaactgttccgccgtcacctcgcggcggaacagcgcctcgttgccgactatcactcgcaccacgctcggcgactcgttggcgatgcggatggcgcgggcgatctcggcctcgttgctggccaggtccgggccgagccagatgcccaggctgacgcgcaggccgaacgcctcggccagcgccgggatgtcgccgagcgcgccctggaccgaataggtgcggatgctgtgggtgtgccgggcgaccagttccaggtcggtgcgcatctgttcggcgctggggtagcggccgctctgcgggttctggttgaggcggaacggcgagaaggagaagccggagatgcgttccggccagtccggtacgctgaccggacggttgtacagggcccagatgccggtgaagagggcggccagggcgacgatgaccaccaggttgagcccgatcttgcgtga

SEQ ID NO: 358825 - DNA, 852 bp, Pseudomonas aeruginosa
atgcgccgacgcgtctatgatgggcgtgtcggtgaccctaccctgtggataaggtttctccatgagttccgttcgcttgccttcggtcgaccgcctgctgcgcagcgcggcggccgctcccctgcaccagcgctacggccgcgaggcgttgctggcgaccctccgcgacctgctcgacgaactgcgcgagccggcccgacgcggtgccctcgccgagatcgaactgagcgaggcggtgctcgccgggcgcgccggcgaacgcctcgccgcgcagcatgccagccgcgtgcggcgggtgttcaacctgaccggcacggtgttgcataccaacctcggccgcgccctgctgccggacgaggccatcgaggcgatcaccctggccgcgcgctacccgctgaacctggagttcgacctggccagcggcaagcgcggcgaccgcgacgacctgatcgccgggctgatccgcgaactcaccggcgccgaggcagtcaccgtggtcaacaacaacgcggcggcggtgctgctggcgctgaacagcctgggggcgcgcaaggaagggatcatctcgcgcggcgagctgatcgagatcggcggtgccttccgcattcccgacatcatggcccgcgccggcgtgcgcttgcacgaggtgggcaccaccaaccgcacccacgccagggactacgaagccgccatcggcccgcgcagcggcctgctgatgcgcgtgcataccagcaactacagcgtccagggcttcaccgccagcgtgcccaccgcgcaactggcggccatcgcccatgggccatggcctgccgctgctggaagacctcggcagcggcaccctggtggacctga

SEQ ID NO: 358826 - DNA, 249 bp, Pseudomonas aeruginosa; identical to SEQ ID NO: 355380

SEQ ID NO: 358827 - DNA, 849 bp, Pseudomonas aeruginosa
atgggacagctgcatcaggcacacgcacaggtagaacgccagcacgcccggctggcgcaactgggcgaggaagccgccctcgccttcgcgcggttcgcgatgggccggctgggcattgggcacccaccagctgcacagcacgatgccgagcatgatacccagcagcgtcgccgggtagacatccaggctcaggcgctcgaacagcgcgccgagaccgaccacggtgcagatgaaaccgatcgagccccacaggcgaatccggctgtagctggcgctgcgctcgcgcaggtgggccagggtgatgacctcgaactgcggcagcacggcgtgccagaagaacgcgtgcaacgccatcaccaaggccagccaggcgtagctgtggctgacgaagatcagcgagaagcccagcgccgtgcataccgcgccgaagcgcacgatggccaggcgctggccgctgcggtcgcccagccagccccacaggttgggcgcgacgcaacgcatcagcatgggaatcgccaccagctcgccgatgcgcgggctggggaagcccaggtgatggaaatacagggcgaggaacggcgccgtggcgccgagcaggctgaaatagaagaaatagaagctggacaggcgccagtagggaaccgcgctggtcacgatccgccgttcacccgtcccgcatcgctgcctgccacagccctcacagctgcggcaggaccggcgtgtcgacgcgcacgtcggcgttctgcccacgctggcgcagcaattggtcgagcaggacgatggccatcatcgcctcggcgatcggcgtggcgcggatgccgacgcacgggtcgtgacggcccttggtga

SEQ ID NO: 358828 - DNA, 594 bp, Pseudomonas aeruginosa
atgatttctgatggcgcatgccgacatgcggcgtctgcccgctcgtctggcttcgttctggtcggagtggtctggttcctggccatcatgaccctgctggccagtgccgctgtactctgggtcgggcgctcgctggatgccacggaaaaccggcgcaaggcgctgcttcgtgagctggaggagcatgccttgctggcgcgggtccaatggctggtggctacccagcgctataccgtcgcgggcctgagcgtaccgggaaatgctggcgccgcgccgagcaaggtggacatggacacttcgatcctgcccattggcggggagctgcctctggatggccgggagttctgcatggccaatggctggtgcattgcgctgctcgatcgctccgcgcgcctcagtctttccggcatcgatccgcgggtactgtccaggctgctggcggggttggggttcccgccgagcaggtgcaggtcatggtcgcccaatggttcagctatctctatcccggcgccgctccacgactgggtagcgccgcgcaagccagcgacaggtcctctccgggccaggcccggcgccgtccgttgcgctcggtga

SEQ ID NO: 358829 - DNA, 183 bp, Pseudomonas aeruginosa
atgagcccgtccgaaaacatccagtacgatttcgagtggcgaccactcaacaactacctcgccgtgcaacgcatcacgcctccggacatgcgtcagggttcggctgccgagccgcgcctgcccagcgaagcgctctacgagtggatcgtgctgaacggacgctcccccccctggaaggcctga

SEQ ID NO: 358830 - DNA, 660 bp, Pseudomonas aeruginosa
atgcaggtaggggttgtggttcacagggggcttgggctcggccaccacgtccaggtcggaggccggattggcttccagcccctccacgatgacaagggcatagcggaacaactgccccagccaggtgcggaccttttcagcagtggtgaacgccttgcgctcctcgatcctcgccaggacgcccaggagctggggccggcgaatgtcgtagatcgacatctgcttgaggctgggcagcacgtccttgttgaagatccgcaggatctgcgacagcgtgctgttcctgccttccttgatttccttgcggcgatgctcgacccacgcatcgaagacggccttgaaggtgtagtcggccgccagcttgaccgcgtgtcgcttctgtttgcgatctgtatgggggttgatgcccttggccaggagcgcgcgggcttcatcgcgcaaggcgcgcgcttcgcgcagtccgatctcggggtagttcccgagggagatgcgcttttgcttaccgagccagtagtagcgcaagtgccaggacttgccgccagtgggggcaaccaccaagccgaggccatcggtatcggggatgctgtgggttttttcggcagccttggcttgccgcacggtcagatcagagagtgccatcatcaagctcctaagtcgtga

SEQ ID NO: 358831 - DNA, 603 bp, Pseudomonas aeruginosa
ttgcaggaaagccactacggccacgacctgccgctcggcgtgagcctgaaagtgcaagaccgactggaaggcatggccccggactggccggaatcgcccgccgccgtggcgctgcgcgaactgcaacaggtcgccggtgaagccttgccggaggacaacgccgaactattcgccgcgctgctggcgaagccgcaagacgaactggtgcggctgctggccgtgtgcgtggcttccacggtggacgtggtgacgcctcgcgccacgccgcaccagcccggcgcggaactggcgcaggccgtgggcctcgacatggctgcatggtggaagccgaccgcagaaggctacttcaagcacgtttccaaggccgcgatcctgcaagccgtgggcgagtacgcgccggagcaggtttcccggctggcgaagttgaagaaggccgacattgccagcgaagccgagcggctggccgatggtacgggctggatgcccgccatcttcaagggcgctggcccgcaggatgccgtgcaggaggcaggcccggagcaggacgccccggaggatgccgaagtaatggcggatgagtccgccgaggcgctggccgcttga

SEQ ID NO: 358832 - DNA, 207 bp, Pseudomonas aeruginosa
atgctcaccggctactcgatcatcgcggtgcccaccgggatcttcaccgccgaactcgccaccgcgatgcgccaggacccggccaacctgttgcagcgggattgcccggtgtgccgcaaggcgacccacgaagtgcaggcggcattctgctgccgctgcggcaacccgttgttccctcgcgaggaagacagccatgggaagtcttga

SEQ ID NO: 358833 - DNA, 483 bp, Pseudomonas aeruginosa
atgggttcgcgcacctggcactggcccggcgtcctgctcggcctgctcctcgccacggccggcgcgcaggccgacaccctgcgcgtggcgaccctcgactgggcgccctacgtcggccccgacctgccgggcaagggcctcgccagccgcatcctcgacgaagccctggccctcgacgggcaccgcgccgaactggtgttcctgccctggcaacgtgccctgaaagaagccgccgaggggcgcttcgacgctctcatgccggcctacctgtcgcccgagcggcgcgaactgttccacgccaccatccccctgctcgactcgcaactgggcttcttccgccagcgcgagcgcctgctgccggtcaatcccgcgcatctggaaagcctgcgtccgtaccgcatcggcgtggtccgcggctacgtcaaccgggaggatttcgacgccgaccgcagcctgaccaaggacgcggtgaccaacgactga

SEQ ID NO: 358834 - DNA, 2349 bp, Pseudomonas aeruginosa
  misc_feature (2046)..(2046): n is a, c, g, or t
gtgattcttctggaaaagggtgaaagcacaccagcgccatggatcaatgtcatcgccaatccccggttcggcttccaggtctcggcggagggcagtggctatacttgggcggagaacagtcgcgaaaatcaactgacgccctggtccaacgatccggtcggcgatccctgcgtagaagcgttctacctccgcgacgaggacagccgggcgctgtggagcgtcactgcgcggccgattcgcgacgatgggctctacagcgcacgccacggattcggctacagccgtttcggccatcgctgccagggcatcgacatggatctggtgcaattcgtcgcgctggcggacccgatcaagatttcccgactggtgctgcgcaacctctccggcaagtcacgacggctgtcgttcaccagctatgcggaaccggtactcggcagcgcccgggcgacatcggcggccttcatcgagacctgccaggatgtcgaaagcggtgcgctgcttgcgcgcaacccctggaacgccgcctttcccgggcgtgtcctgttcgccgacctgtgtggccgccaaagcagctggagcggtgatcgtcgcgaattcctcgggccgctcggtgacccctcggcgcctgcggcgctgctcggcgaggcgggactttccggatgcacgggggccgggctcgacccgtgcatggcgcagcagtgttcgatcgagctggcaccgggggaggtggtggaaatcgtcgcattattcggccaagcggactccctggctcatgcccgtgatctggtcacgcgataccgtcggactgatccggaagagacgctggcgggtgttggtaggcactggcggaccttgcttggagccgttcaggtgagcagtcccgagcgttcgctggatatcctgctcaacggctggctgctgtaccagaccctggcctgtcgcgtctgggcgcgctcggcgttctaccaggccagcggcgcctatggtttccgcgatcaactgcaggatggcatggctctgtccctggccgctccggcgctgacccgcgagcatcttctgcgcgccgccggtcggcagttccgcgagggtgatgtgcagcactggtggctgccgcactcgggacagggggtaaggacgcggatttccgacgaccgggtctggctggcgtatgctgcctcgctgtatctcgaggcgacggccgacatcgggattctcgacgaagtcctgccgttcatcgaagggccgccgttgcaagagggcgagcaggacaccttcttccagccgatgctgtcggagcagtccgcgtcgctattcgagcactgtgcacgaggcctggaccagtgtctgacgctgaccggtaagttgggcttgccgctgattggttccggcgactggaacgacggcatgaatcgcgtcggtgccggcggcacaggagagagcgtctggctcggctggttgctgctggagactctcgcgcgcttcgatggctatgcccgttcgcgtgaccctgagcgagcccgtcactggcgcgaacatgccgggcggttgcgtctggccatggagcgcgaggcctgggacggccactggtatcgccgagcgaccttcgatgacggaacctggctgggttcgaaggatggtgaagcctgccgcatcgattcgatcgcacagtcctgggccgtcctggcgggcgccgacccactgcgggcgggaatggcaatgaccgcactggagaggtacctgctacgtccagtcgatcgattggcgctgctgtttacgccccctttcgacgagaggggcacggatcccggctatatccgcggctacccactgggcctgcgggagaatggcgggcaatacagccacgcggccatgtgggcggtcctggcatttgtccgccagggcaaaggggacaaggcggggacattgctttccttgctcaatccaatcaaccacgcgctcacaccggaacaggtggaacgctatcgagtggaaccctatgtggtggccgccgatatctactccgaggcgccgcatgtcggccgtggnggctggacctggtataccggctctgccgcctggatgtaccgcgccggactcgaaggtttactgggaattcgccggcagggtgcctggttgctgattgatccgtgcattccggtgacatggtcgggcttcgaggtaagcctggaggtggagggggggcactacgagattcaggtggagtccggagaagggcgaagccacggcgtgcgcgaggctttcctcgacggcgtcgaagtggagtgtatcgatggccaagtgcgggtgcctctcgattgtcagcgacaccgcttgcgactgagcctttag

SEQ ID NO: 358835 - DNA, 291 bp, Pseudomonas aeruginosa
atgccggtttcgttccccttcgagcaagtcgatgtcttctccgaacagcccttcaaaggcaacgccgttgccgtggtgattggcgccgaccacctgagcagccagcagatgctcgagttcgccgcctggacccagttgagcgagacgaccttcctgctgcggccgaccactgccgaagcagactaccgcgtaagaatcttcaccccgctgcgggagttgccctttgccgggcatccgacgctggggagctgccaggtctggctgaaccagggggggcggcaatgctgctga

SEQ ID NO: 358836 - DNA, 813 bp, Pseudomonas aeruginosa
atgatttccgtctatcaactcaaaccgcgctttcagaatcttcttcgtcccggcgtgcagcgcctctaccggcgcggcatcactgccaaccaggtgaccctggcggcctgcctgctgtcgctgctggtcggcgcgctggtcgccggtttcgccagccatctctggctgttcgccctcgttccgctgtggatgttcctgcgcatggcgctgaacgcggtggacggcatgctcgcccgcgagttcggccagaaatccgacctgggcgcctacctcaacgaactcaccgacgtgatcgccgacagcggcctgtacctgccgttcgccctgttgccgggagtcaatccgctgtgggtggtgctggtggtgctgctggcggtgatcagcgaatatgccggtgcgctgggcaccatggtcggcgcttcgcgccgctacgacggcccgatgggcaagagcgaccgggcgctgtgtttcggcttgccgctcggcctgctccagggcggcctgcaggccggccgcggagagatcgttggtggcggcgtaggcttccacgccgttcagccgtacgcagagcatggcgccgcggtcctggctgaagtgcggcggttcgctgacgttgcggcgcaccgagaggtactcgccgctacgctggacgtagcgcaaggagtggaattcggcgcggctgcggagcgccgcgaagcggtgtttcaacgggtcgatcatctgtgcgtccctggccgattgcggagtgggcgagtgcaggacgctctatttcaagccttcgcccgtaacggagcaagccgtttgttgtcatag

SEQ ID NO: 358837 - DNA, 1458 bp, Pseudomonas aeruginosa
atgaagcccaaccctccgatcaacgagctggtcctgctccaggcccaccagcttgccgaacgcatccgcctgcgccaggtgtcctgccgcgaggtgatgcaggcctacctggcgcatatcgagcgcttcaacccacgggtcaacgccctggtcagcctgctgccggcggaacgcctgctggaagaggcggacgcgcgcgacggcgaactcgcccgtggcgaatggcgtggctggatgcacggtctgccacatgccatcaaggacctgtcgctgacccgtggcatccgcaccaccctcggctcgccgctgtaccgcgactacattcccgagcgcgacgggatcatggtggagcggatcagggccgccggcgcgattctcatcggcaagaccaacacccccgagttcggcctcggctcgcagacctacaacccgctgttcggcgccaccgcctgcgcctacgacgaacgcctcagcgccggcggcagcagcggcggagccgccgctgccctcgcgctgcacctggtaccggtggccgacggcagcgacatgatgggctcgctgcgcaacccggcggccttcaacaacgtcatcggcttccgcccttcccaaggccgcgtaccgttcgacgacagcgccgacctgttcttcgaccagctcggctacgaaggcccgatgggccgcagcgtgcgcgacaccgccctgctgctctcggtgcaggctggcgccgatcgccgcgcgccgctatccatcgccgaacccggcgcgcggttcgccgctccgctggagcgcgatttcgaaggcatccggctgggctggctgggcgacctcgatggctacctgcctatgcaggacggcatcctccaactgtgccagcgcgcgctaggcgatttccgcagcctcggctgcgagatcgaagaagcgaacctcggcttcgccccggagcgcctctgggaatgctggcgcaccttgcgccactggctggtggccggctcgctcggcggcgtgcatgccgatccggcgaagcgtgccctgctgaagccggaagcgctctgggaggtggagaacgggctgcgcctgggcgccgacgcggtctttcgcgcgtcggtcatccgcagcgactggtatcgcgccatcggccggctgttcgagcgctacgactacctgttgctgcccagcgcgcaggtatttcccttcgccaaggaaaccccctggccgcgcagcatcgaaggcgtggcaatggacacctaccaccgctggatggaagtggtggttcccggcagcctgtccggctgcccggtggccaatgtgcaggcgggcttcaatgccgagggactgccgatgggcctgcaaatcatcggtccgcaccaggccgacttcgcggtactgcaactggcccacgcctacgagcgggccagccgctggttcgagcgccagccgtcgccgctgctggcgaactga

SEQ ID NO: 358838 - DNA, 1443 bp, Pseudomonas aeruginosa
atgaccgtgaacgcgagtattttttggtacgactacgaaaccaccggcatcgaccctcgccgcgaccggccgttgcagatcgccgggatccgcacggacgaggcgctgaacgagatcggcgagccgatgaacctgtattgccgtcccagcgacgatatcctgccccaccctatggcttgcctgatcaccggcatcactccccagcggctggccgagcgggggctgtccgaggccgacttcatgacccgggtacacgcccaactggcgcagccggcgacctgcgtggccggctacaactccctgcgcttcgacgacgaagtgacgcgctacagcctgtaccgcaacttcttcgatccctacgcccgcgagtggcaaggcggcaatagccgctgggacctgatcgacatggtccgtaccgcctatgccctgcgcccggagggcatccagtggccgcagctggacggccggctgtcgctgaagctggaaatgctcaccgcggcgaacggcctggagcatgggcaggcccacgacgcgctttccgatgtccgcgccaccattgccctggcccgcctgatccgtcagcgccagccgcgcctgtacgattacctctaccagttgcgcagcaagcacaaggtgctcgaccaggtgcgcctgttgcagccgctggtgcatgtctccggacgcttttccgcggagcgccatttcctctcggtggtcctgccgctggcctggcacccgcgcaaccgcaatgctctgatcgtctgcgacctctgcgccgatcccgcgccgctgctggagttgtcggccgaagacttgcgcaggcgcctgtatacccgtcgcgacgaactggccgagggcgagttgccggtgccgctgaagcagatccaggtcaaccgttgcccggtggtggcgccgctgtcggtattgcgcgccgaggatcgccagcgaaccggcatcgaactcgaggagtgccagcgaaaagccgagctgttgcgccagcatcaaaccgtctgggcggacaaactgacagcgctatatggcgaagaaagtttctccgccagcgacgaccccgagcaacagttgtatgacggatttattggcgatcgggatcgacgcctttgtgaacagctgcgccttgccgaaccggagcaattggccaaagaacaatggcccttcgacgatgcccgtttgcaggagttgttctttcgctatcgtgcgcgaaatttcccggaaactttaaatgtggccgagcgccaacaatgggaaagcttctgccgcaatcgtttgtcccatgaagaatacggcgcaccgaatactttgccggccttcgaggcggcgctggaggcttgtcggcaagagcagggcggcacattgccggcggtacttgcggcctggcgcgattacgccgcggaactgcgtcaacgctattcgctggagacttga

SEQ ID NO: 358839 - DNA, 636 bp, Pseudomonas aeruginosa
  misc_feature (228)..(237): n is a, c, g, or t
atgagaaagtctcggtcgggcgtcgtgttttttggtgttgcggcccgaatcactccgccaggacctggcctcggcgccgagggcgagctgggtgttgccactggcaacactccgccaggacctggcctcggcgccgccggcgagctgggtgttgccactggcaacactccgccaggacctggcctcggcgccgccggcgagctgggtgttgccactggcaacactccnnnnnnnnnncctcggcgccggcggcgagttgggtgttgccactggcaacactccgccaggacctggcctcggcgccgccggcgagctgggtggttccactggaaccacttcaccaggaaccaacctcggcaccgccggtgcgtttggtgtttcggcccgaaacactctgccaaggatcgacctcggccccggcggcgagctgggtggtgcggcccgcaccactctgccagatcccggcctcagcgccggcggcgaactgggtggttccactggaaccacttcaccaggaaccaacctcggcaccgccggtgcgtttggtgtttcggcccgaaacactctgccaaggatcgacctcggcgccgacggctatcaacttctcccactcaagagaaaccgaaagatgtgtga

SEQ ID NO: 358840 - DNA, 396 bp, Pseudomonas aeruginosa
atgctctcctatatcctgcggcgcctgctgctgatcgtccctaccctgttcggcatcctgctgatcaacttcatcatcatccaggccgctcccggcggtccggtggagcagatgatcgccaagctggaaggcttcgacgccgcttccggcggcgccaccggacgcatctccggcggcggcggcgaagtcgccgtggccggctcgcaataccgcggcgcgcaaggcctggacccggagctagtgaaagagatcgagcgcatgtacggcttcgacaagtcggcccccgagcgcttcatgatcatgctgaagaactacctgcacctggacttcgggcagagtttcttccgcgacgccaaggtcaccgacctgatcatcgagggcggccgcaaaaactga

SEQ ID NO: 358841 - DNA, 762 bp, Pseudomonas aeruginosa
atggctgaacgcagcctgctgctggtgttgcacgacgtggccccggaaacctggccggactaccggcccttcgtcgaggccgtggacgcgctcggtgaggtccccatgacctggctggtagtgcccgacttccaccatcgcaacccgctggaagccgacgaaaagttctgcaaactgctctcgcggcgggtaacccggggtgacgaactggctctccacggcttctatcactacgatgacgccccaccaccgcgtactccagggcaatacttcatgcgtcgcatctacacctgggagggagagttctatgccctcgaccacgccgaggccaagacccgcctggccgccggcatcgagctgttccgccgccgcggatggccgctgcacggtttcgtcgcgccggcctggctgatgagcgccggcacccgccaggcgctcggcgagagcgggctgcgctacaccagcgacccgtccaacctgtatctgcttccccacctgcaaccgatcgaggcccccggcctggtctggagcgcgcgcagtgcctggcgtcgcggcctctcctgggcgctcagcgagcagcgccgccgggcctggcgcgcagcgccggtgatccgtctcggactccatccggtcgacatgcgccatcgcttttcccgcgaatactggctgcgtaccctgcgcaccctgctatccgaggggcgccagccgttgaccaagatcgactggctggagcgccacctcgccctggaccgcgcggcatga

SEQ ID NO: 358842 - DNA, 858 bp, Pseudomonas aeruginosa
atggccaccgtcatcgatcgccacagccagccgacctggcgcgacttcctcgaactgaccaagcccaaggtcgtggtgctgatgctgatcacctcgctgatcggcatgctgctcgccaccaaggcgccgctggatggcttcgtgccctggcaggtgctgatcttcggcaacctcggcatcggcctttgtgccggcgcggcggcggcggtcaaccatgtggtggaccggcgcatcgactcgatcatggcgcggacccacaagcggccgctggccgagggtcgggtgtcgccgagcatggcgctgggcttcgcgctgctcctggcgctggccgggatggccgtgctgctggccttcaccaacccgctgacggcctggctgaccctcgcctcgctgctcggctacgcggcgctctacaccggcttcctgaagcgcgccacgccgcagaacatcgtcatcggcgggctcgccggggcggcgccgccgctgctcggctgggtcgccatcaccggccacctgagcgccgagccgctgttgctggtattgatcatcttcgcctggaccccaccgcacttctgggcgctatgcatccaccgcaaggacgaatacgccaaggccgacatcccgatgctgccggtgacccacggcgagcgctacaccaagctgcacatcctgctctataccctggtgctgttcgcggtgagcctgatgccgttcgtcatccacatgagtgggctggtctacctgctctgcgccctggccctgggcgcgcgcttcctcgactgggcctgggcgctctactgtgacagccggccacatgcggcgataaagaccttcaagtacggcggttgcagaagctga

SEQ ID NO: 358843 - DNA, 846 bp, Pseudomonas aeruginosa
gtgctggtcgtcttcgcggttgaggctgataaagctgggttgcaccgtcgggccatccggcaccaccttgagcgtcggcggacggaggctgggattcaggcgccattgcttcatgcagtgcatcagcatcgggctgtggcggcccaggctggcgccctgcacgtcgtcctgcctgagcaggccgagggcggcctggttggcgaggaggatggcctgacggctatcgaccacgaggatgccggtgcgcatgcgctgcaggatcaatgcgttgagttcctccaggttggcgaccgtctcggcgcgttcttcggccagcgtttcggtctgctcctggcgccgcaccagagcctggatcaccagcgcggcggcgaagcacagggtgccgaggccgccggcctggacgtagtggttggtggcgtccggactgctcaggctgaggaagaaggtcaggtagagcaggccgaggctggccgccgccgcgatgaccaggccgatgcgcccgcgcagcaggatgttggcaatggccaccgccaccaccagcaggctgccgatgccgctgggcacgccgccacctgcgtagaacaggccgcaaagcatcagcacgtcggtgagcgcgaggatgaagatcggcagcaattgccgcgacggcggcaggaacagcgcgaccaggatgttgaagaccaggtagcaccaactgccgacatggaacagttcagggtggacgagcttgaggacctgatcttccagttcgctggagatcagcaggaccagtaccaggccgatggtcaggcggtacaggtggtacagacggaggatgcgttgcccctgctcctcgctcagccgtag

SEQ ID NO: 358844 - DNA, 246 bp, Pseudomonas aeruginosa
atgtgggtccatgcgggtctggatgtcgccggcaccgagctgcaggtgcagttggctgtcgttgcgcagcctgccggggtattcgtcgacgaaccgctgaagccactccttcaggtcgagctgctgcggttcggcctggcggcgacgggagagctgcaggacgttctcgatgaccaggttcatccgcttcgactggtcctggatgatctgcgtcaggcgtcggtccggggcatccagttcctctga

SEQ ID NO: 358845 - DNA, 339 bp, Pseudomonas aeruginosa
atgtcgcgtgtgcttttcctgctcctggccatggtgctcgccggcctgggccaaccgaccctcgccgcgcccctgccggacgagctgccggcagcgttgcccgccgcgccgccggtcgcgccgttgcccatgggcagcgcgccacagccgcaaccggaggccgccgagccggacctgccgggcagcgacgcggccagcgccgacggggaggcgaccaccaaggacggcttgaagatcggcaacggcagtctccgcctgcgccaggacgatcccgggccgacccgggaaagcccgctgcgcgatccccgcctgaatccctacgcaccgcgccagccctga

SEQ ID NO: 358846 - DNA, 630 bp, Pseudomonas aeruginosa
atgatgcacctgcttcaatccagtaaccgtgttgcactcagcttctgcaaccgcctggctctgcagcaccagcgacgacagcccggccggcatgccttgggccatgccgacgaacagcaggccgaacttgaccaccccgaggagcacgccgatcagcaggatgcgtccgaacggcgccggcatcggcccgcgcaggaccagcagcggcagcgccgccagggcgaagcgcagggcgcagaacagcagcggcgggaagtcgccgaggccgaccttgatcacgacgaagttcagaccccagatcagggtcaccagcagggcgagcaggatatgtgcaacaggcatggcggcctccggaaaacttcaggccacgctagcagttgcgtgcgcaagggtcgcgatacagttggcgggaaaaaacatccgccagccgctcactgcaaccagggcggcggcggttcctcgcgctcgccacgcggcgcgtcgtcggcctggcgcagcgcctggcgacgcgcctcctcgcgctgcgcggcctcgatctcgcggagcaccgcgcgcacgtcggcggcctcttcggcttcgacgaaggtgccgctgagcggggtttccgctgtcagctcgccggcttcgtag

SEQ ID NO: 358847 - DNA, 339 bp, Pseudomonas aeruginosa
atgaaattcgccaacagcctgaaaaagcgcatgcccaccgggcggcatgcggtcatcggggtgccgttcctgtggctcttcctgttcttcctgctgcccttcgccatcgtgctgaagatcagcctggcggaagcggacgtggccatcccgccctataccgagatcttcgcctacgcggaccagcagttgcaggtgctcctcaacctcggcaactacctgatgctgaccgatgacccgctctacatcgatgcctacctcggctcgctgaagatggccttcatcagtaccctgatctgggcggccgcaaaaactgagtgcaacacccgaccatttcggtaa

SEQ ID NO: 358848 - DNA, 843 bp, Pseudomonas aeruginosa
atgacccagccctcgaaacggaatgggcaggttccgctggacgacgccctggagcgccatcgcgacgcgctgaaggacctgttcccgctgccgccctcccggccgaaatcgcgcaaggcaagcaaggcggccggcgtcgcgctattgctggcgctggccatcggcgccctggcctggctggacccggcctacaagcgcgagcgcttcgccaccgccatcggtgagcggcgcgacgtgaccctggccgacggcagccagctcctgctcgacagtggcagccagatcgaggtcagttggcacccgctcagccgccgggtcgcgttgcgcgcggggcaggtgcttttcgaggtatccccggcgcgctatcggcccttcgtggtgtccgtgggttcgaccgacatccgcgtgctcggcacccggttcaacgtgcgccgcctggacgacgatgtccgcgtgaccctggagcgtggccgggtggaggtcggcacctcggctacggcgcaagcgccagtcgtgctcctgccgggccagcaggtcgatgccattggcgggcaactgatgccgctggccaaggtcgatgccgccacggcgatggcctggaaagacgaccgcctggtcttcgagcgcacgcccctgggcgaagccgtcgcgctgctgcgccattatcgcaaggcgcccattctcctggacgaccccagcctggcctccctccggctgaccggcgtcttcgccgcgcacaacgccgaccggctgctcgacctgctgccgagcatccttcccgtggccgtgtcgcggcaggaggacggcagcgtcgagatccaacgcaaatcgacgcgaaaataa

SEQ ID NO: 358849 - DNA, 612 bp, Pseudomonas aeruginosa
atggccgagcacgtcaaagccgtacgcaagcacatcgacgaccttgcctccaaggactacactaaccttgtcggtatgcgcagccccagcttcgtgctgatgttcatgcccatcgagccggcttacatcgaggccatgaagcacaacaaggacctgttcgagtacggctacaagaaaggcatcgtgctggtctcgcacaccaccctgattcccattctgcgtaccgtctccaacctctggatgatcgagcgcagcaacgccgaagcgcgggaaatcagcgagaaggcgggcgagatctacaaccaggtctgcactgtggcagagcgcctcggcaagctgggcggcaccctcaacaccgtcagcaaccactacaacgacaccgtcaaggcgctggctggcaagcaaggcctctacggaaaggtggaacgcttcaacaagctctcggccaaggtcagcaagaccctgccagcgctggagcctgcacacatggacttcgagaacgagcggctcgtgctgattgtagaggcgctcgacgaagcgccggagccagccgacgatttgccgcaactgatccagaacagtcacgaaggcgagctgctaccgcaggcctga

SEQ ID NO: 358850 - DNA, 861 bp, Pseudomonas aeruginosa
atggcggacgcctgggtcggcgggctggatggtctgggaggaaaacgcaaagaactcgccgatctcgaggcttggtttcaggagacatgctgggcccagaaaaaaaagcacgatagtgcattcgctttggcattccagggcgtacgcaacaatgccgagaacttcaaggtccgtgtgctgcaggagcatgctgggaattctgcagcattggtttcgttggccgatctccaggagaaagccaagaccatttttggcccctcacctatgttggagccccacgtcgtattgccttcgttcgatgcgctgttgtcccacgaatcgaatccgatcctgagcaagcgcgttctgggccgggaagatgtcgatatcgcggcaatgatcaaggcgctgggcaacagcgattgggtgcggcagggccgggcttacttcgatgaggcgacaggagtctgccctttctgccagcaagccacagaagcctcgttcgcggccagtctggaggcctatttcgacgaaacgtttctggatgacagtcgtgccattgatgaactggctaagacctatgccgcggcggccgatcaccttttggcgcaattgtccgagatccttaatgcgccttcccgattcctcgatgcggaaacactgaagacagaagtggcgctgctggcttctcggattgccctcaatcgtcagcatcttgccgataagcaacgcgagccaagccagctcattgcactggaacctctggctgacgctctgggcgcgatctcccaggcactggcgcttgccaacgagcagatcgagtcacacaacgctacggtagctaatctgggcaaagaaaagcagggcggccgcaaaaactga

SEQ ID NO: 358851 - DNA, 123 bp, Pseudomonas aeruginosa
atggtcttcatgaccatggccttcctggcttggtcctattccatggtgcagttgtactatgcctatggtgcgctggagcgttcgaacaaggtatacggccaagcgtttcctcgtccgcgataa

SEQ ID NO: 358852 - DNA, 183 bp, Pseudomonas aeruginosa
atgtacgggtcacgcatgaccagggcgggcgacatgcgctgcgcatcgcgcatcgtcgccagctcctgcgcgatcgtctcgcccggcttttgggacagtaccgtgcgctcgtacagcatcgagtcgatgcgctcgcgcagcgtccgcacgctccagcgttcggcgctcgccatctgcgcgtag

SEQ ID NO: 358853 - DNA, 363 bp, Pseudomonas aeruginosa
atgtccctgatcaacgaatatcgcgccacggaagaagccatcaaggaacttcaggagcgcctgaagtccctggaacaagacgacaaactgaaaaaagaactggaattcgaagagaagctgcgcacgctgatgggcacttaccagaagtccctgcgtgacgtgatttccctgctcgatccggacgccaagatcggcaagagcacccgcaccgccaaggcacctgccggcaagcgcgcgcgcaaggtcaagcagtacaagaacccgcacaccggcgaagtcatcgagaccaagggcggcaaccacaagactttgaaagagtgggcggccgcaaaaactgagtgcaacacccgaccatttcggtaa

SEQ ID NO: 358854 - DNA, 174 bp, Pseudomonas aeruginosa
atgggccacgcactgaaaaaacctgatcgcatttacattcccccgcgcgacaagtctcgcggcgaggcagtggcgcgtccggctgaaggtgagtaccaggtccagcttgagaaggctttctgcatggctttccagcgttatgagaaagcgcttgaggagctggccaaggtataa

SEQ ID NO: 358855 - DNA, 498 bp, Pseudomonas aeruginosa
atggccgagaaggatctctcccagtacggtgaaatctgcgaaggcattcgctacctcaccgttgacgcgcttatcttcatcaaccagcaactgatcaggcttcagactccggacgaaatggtcggagtcttgaagcccaatgagctgtcttcctcgcagcagcgcccggcacagattcgtttctacgaacagacgaacgacatgtaccggctagcagccacgctgatggaaagcatcgtgcggaaccatccgtttgccaacgccaacaagcgcacggcagcagccgccggtttccttttcttgttgatgaatggctacgagttgaccgccccaggccacgaactggtaacaattgtccttggcctagccaatggcgaatacagttgtgacgaattggaaagctggcttgcacactggggccgagacttcgacactcgcaacctgaacgcgcctgatgcctggctggatatgttcgccaaagcattccagatagcctga

SEQ ID NO: 358856 - DNA, 555 bp, Pseudomonas aeruginosa
atggccttcgaaatcgcctatctcgactatgacgaactggtcacgttcaagaccgacttcctgcacttagcatctgaccgaattctcaccagcaacaacggcgaaatgatgccgcatctcgtgctcagagcgattgacctggacactggagagattatcaacgatctactcaagagaatgcagggagagccggaggcccaaggcatctattggtggcttcgctgcctaaccatctacccagcccttctatgcctcaagcaaattgcatgcacctacagaggaggcaagaaggccaggcacttcgctggagccgcaaaattcgccgccagcatgcgttgctcgccctacaccgaagatgagcttaaagagcacatgatcggggcgtggaagtgctacacagaacgctatccaataatccaccagcttattccggccaatcaattagcagcgttcaccgatggcgcctggacgacactgaatcggggcgaagtctcaatagcaggacaagatgaagagtcggtaagaatgctccgactcttcaaactgctcccctga

SEQ ID NO: 358857 - DNA, 267 bp, Pseudomonas aeruginosa
atgaccaggctgtcgatgagtatctgcgcgggcttgtgcctgctggccttggccggctgtacgaacggcccgagaccaccgacccaggcgcctaccgcgggccgacagttctgcccgctggtgccgtgcgtcctaccggcacggccggcggtgctggtgaacgatcagtggcggcaggccctggatgacaccgaggccgcgctgctgagctgcgccaaccaggtgctggggtgcatccagcgccaggacgcccaacgtccgaagtga

SEQ ID NO: 358858 - DNA, 414 bp, Pseudomonas aeruginosa
atgggccaagagtgtgatgtagatgtactggcgcggacgctgtggggtgaggcgcgcggcgaaggcgctgccggcatggtggcggtgggctggaccatcaggaatcgggccgcccagccaggctggtgggggcgggatatccagaccgtctgccagaagccctaccagttcagttgctggaacagggacgatcccaatttcccctacctgagcggtgccaagcagattccggcggcgcagtacctgcaggcgcgcgaggcggcgctggtggtgctggcgggcaagcagccggatcccaccggcggcgctacccattactactccaccagcatgtcgaagccgccggcctgggctgcgttggccaggcgcacagtgaagatcggccggcacattttcttccgcgacgtgccgtag

SEQ ID NO: 358859 - DNA, 543 bp, Pseudomonas aeruginosa
atgacctggattctcacctacaccggcaagcgcttcgacctattcgagcccaagccggaaatgatcgatccgcgggatatctcccacgccctggcccactgctgccggttcaacggccacgtgtcccagcactacagcgttgcccagcacagctacctggtggcagacctggtgccgagcaccgactgcctgtccgccctgctgcatgacgccaccgagtcctacgtcggtgacatggtccggccgctcaagaagcagatacatgcctaccgcgaagtcgaggaccacatctgggaagccatctgcacccggttcgacctggacaaggaactgccggagtcagtcaagcacgccgacctggtggcgctggccaccgagcgccgcgacctgatgcctgccgaccccgccgagtgggcctgcctgaacggtatccagcccttggcggcacgcatcaagccctggtccatcgaagaagccagcacccgcttccactaccgcctgatggatctgctctccatcacccatcgcaccgcgaatgcctga

SEQ ID NO: 358860 - DNA, 459 bp, Pseudomonas aeruginosa
atgagcacccgcaagccccacaacatgcgcgcccgcctcgagcgcaactgccgggcactggtgcgcaccaaccacgccgccgtgatcaacatcgatccagccggcgaccagcacctagtgaactggaaaaccggcaggctgattaagtcgcaccccatggttgacgcggtgtgcgacttcacccatccctggtgcatctacatcagcgccctgtgcatcgaccagttcggcaagcgctacatcaagagcaccgaggtggcgccacaaggcgtctacctcgccgaccagctaaccgacgtgatagaggccttctaccgcgaacacctcgccagctgtaattcgaagcacatcgtcagctccggctggattgcaattcccgacagcgtgaccctggacgaagcccaggccgcccgcatctatgacgctgtcggcgcctggccctcgccagtcgccgcctga

SEQ ID NO: 358861 - DNA, 216 bp, Pseudomonas aeruginosa
atgagcagcaatgtcgccggcatcctagacttcgaggatcttcagcaggtcaccggctacgtgcgccgcgccgatgtcgagcgcgtgctgcgtgagcagggcatcaagattttccacggccgcaagggcccatggaccaccacagaactgatcaaccatgccgcgggcctcgccgcaggcaaccaggaacactacggaccagacatactcagatga

SEQ ID NO: 358862 - DNA, 1170 bp, Pseudomonas aeruginosa
atgagacgcggaagaaaacgccaggcaaaccctcacatccctgcccacatagaccaagcttctctgccgaaggacgtctatttcgaccaccgcggcgccggctgctggtaccggttgagcatgaacgaagccggccgccgggtacgcaagaacctgtgcggcgctacggtcaccctggccgaactgcaccgcatcgtcgaagaattgcagggcatcgaccgtgacagcctgcggtacctgtgcgagcagtatcacgccagcatcaggttcaccagcctcggccagaagacccaggaagactacagctacagccgcgacgtgctgcttggcgtaccgacccaactcgccggcaagacgctgggcgacctggccgtccgcaagttcacctctcccctggtccagcgcctgatcgacaagatcgcggagcaaggcacgccatccaaggcggcccacgccctgcgctacctgcgtctggtgctgcagtggggcaagaaccggggctttgtcgacgagaacgtcgccaaaggcatcgaggcacccaaagaacgaaagcgccgccggctgcctgcgccggctgctatgacgcagctcattcagttcgcctatcagcagggccaactggtgcgcggccagaaaggcgcctgcgcgccctacctctggtatgtcatggagatcagctacttgtgccgcctgcgcggcatcgagacagtcacgctcaccgacgcgaacgaaacagaagaaggcgtgctgaccaaccgccgcaagggcagccgcgacaacatcgtccgctggacaccgcgcctacgcgcggcctgggatgcagcaaagaaagtccgtgctgacgtgtgggagaagaagcgcatgccggtaccgatcgcagcggatcagcgccggctgatcgtggcagcccacggcgggccactccggaagtcgagcctagacaccgcctggcagcggttcatcacccaggccctggagaagaacatcatcaccgccgaggagcgcttcggcatgcacgaccttaaacgccgcggcatcactgacacccccggcacccggggagaaaagcaggaggccagcggccaccgtgacgagtcgatgctggacgtctatgacttcagcgtacctatagtcgccccctcgggaggcccgaacgggggcgtacaatga

SEQ ID NO: 358863 - DNA, 135 bp, Pseudomonas aeruginosa; identical to SEQ ID NO: 343151

SEQ ID NO: 358864 - DNA, 249 bp, Pseudomonas aeruginosa
atgggcgcgctcatgagaacggtcagcttccagggtgcgaccctctcggccagtgaacgccgctcgcttgagcttcgccagcgtgccatggcggcggtaagtcaaaccgttctgcaacagcaggttgcggccacgctccaggccctggagcagcacaaagagcagggcggcaagcccgaaaaggtctggtccatgatctctaacgaaaagggcacgccgttcctgggcgacgtgttcgggtggccgtga

SEQ ID NO: 358865 - DNA, 216 bp, Pseudomonas aeruginosa
atgaagccgatgatgccggagcggatgtcgtggttgcgtaccaggtattcggccaggtgcatgccgctctcggtgaagccgaggatcaccgtgcgttgcaggtacatgccgcgtttcatccaggcccggtacaggcgcagcaccagcaggcgctgcatgccgaacagcagcaggctgccggtgaaccagaagatcaccagcttgctgctgaggtag

SEQ ID NO: 358866 - DNA, 795 bp, Pseudomonas aeruginosa
gtgaaccacatgataaaatttgcaactgcactcgtagccgttggaagtctggcaggatgcgggggagaagacttcagcggcgcttacggaacagatggcccctacggcaaacatctggtgctgaatattactggcgacaatgccaaatttttcattgtgaataagtccactgcagaaatcagcggcttgaccgatttcgcagtatcttataagaatgagaagcttctgttggactcgtctaaagagaatgtgcacctgaccttcaaacgtgctgaagatgagcgcggactgaactgtctaaactgcaacgaacgttcgatccggttgccgatcgactgggcactgctcaactctgagccatacgacgtggactcgatgctgaaagcgcaagaagagaagcgccaagcggcagaaagagaagaggagaaacgtagggctgaagctgcaaagctggttaagttcagtggtgactgggtggctaaacgtcactataaagatgactctctatttatcatgtcgataagtcctgagaaaggcgtgaaacactgggcattcacttacagcactgcaaacaaactaatctcgacggatcgcaatttcgaagttgatggtgatgaactggtgcttctctccagcgactcatcaacaaagtacgctctgaacgaagatggaacaaaattgatgtgcaccaactgtaattcagagaattactggctcaaggccgatccggtgaaggttaacgacctagattacactcgagcccttgccggcaatcctcaagagcaacgtaagtag

SEQ ID NO: 358867 - DNA, 207 bp, Pseudomonas aeruginosa
atgacagatcccgaacgttacccactgcgtgcaatcgccctgctcagcactgacgaaatcgctcggtctgcccttttggccatcctgggagagaccctcaacgaggcgcgccagcatctggctgaatcctgctggggagaagacctgcataccgaccaggaagttcaacgccgacagttggctgcacaatttgggttggatacctga

SEQ ID NO: 358868 - DNA, 363 bp, Pseudomonas aeruginosa
atgagtaccacttacagcgatttcctagagcaacagcatgacttggcagacagcccgccgcgagacttgcgttggctactcgatgccatgttgagactcagccatcgctactggaccctggacgatgaccctagatacctccgtccgcagttaatcggctactccctgtatttctgccaaggcctatccggcgttcgccccgcagctccggatctggacgacttggaactggggttgctgctaggcgaggtgaattcgcgcctaggaatcggaattgaagttcagcggttgcatgagcgcgagctggagcgacgcatgagttcactacctgctccaacagttgactacctggggagggcctag

SEQ ID NO: 358869 - DNA, 1923 bp, Pseudomonas aeruginosa
atgatggacgctgaatcactccacaatttcggctggattttctcgacattcagcggcgtcgtagagcagctaatcgttgccactagccctctgatgatcgccataggtcacgccactgcctctctgtttgtcagtggcgccgcaatcatgctcatcatggtgatgattggagtgctcggtcagaacaccatgcggcaaggcgttctgtctggtgctttggtgctgttagcagttggctgggggctgcaacctcaaaagctgacgctgccctcgggaacggtagtcgactcggtcaacctaaccgcccacggcgctacgctggcgttctccatacaaaaaatcttcagcagtaccatgcagcgcgccctggacgaacgattcaatgacgcgggacagtttctgccggcgcaaagtgtcaccgactcggctgttgagcgcaccgcatcgcaattctccaatactgatctggcgaggctcattcgggactacaacgcgcagtgcaacccggcgcctgaaatgttcaaaaaggcagaggacgcggtacctattgaggcctatcactcggttggcctcatgggaggtgggggactcggaattccagacgccgacatcggactaatggcgcagttatccaaagcctggcagatccgatttaccccctctcagtggttgggcgttctcgatctgaacacgatccagagacgtcgagccgcaggcgttgcagctctaaaggaaaaaaattatccgttcgtaagtcagtctccatatcaactgccaacaaaggcgtattggctcggcgcgtatcgtggcgaagaagggaccacacccagctatctctcgattggagatgcgcctggtgcgctagcatcggcaatggagaagcaagcccaggcgtggaaagagtccgaggggaaaatagcctcgcagggtttctcgccaagcaactgctatgaggcgtaccaggttgcgcaactcggtgccgagcaggcgtataacgccctcgtcgacactggaagcaaggcatccggcggacagctagccaatacaagtagcggcgtagtaggggctgcgcgagccctgcaaaggaccatagaccgtagcctcaatgacggaaaagcagaaagtagttggtggtcgaatttggtctctggctcagtcgcgggcgtgcaattaatcaaatcaatgtccagctacatcgacctatatacgctcttacctctgtatgtcgccggttgtgccgccctcctctggcttgtgctcaccacaatgccgatctatctaatgatggccctcatccgaggcattaccagcctaaccaattggctgtccctcctggtgttccctgtcttacttgtgatcatggcccagttggtaacagtcgccgcgtcgatctctataggcagcgtggctgtaactcaggctgctgctgttgccggttggcaaggggccagtgcagatcaagatctagtacgaggatctctgctgctggtattcgcgctaatccttcctgtgagcgccttcatggcgatgaagatcacaggcgttgtcgttgggcctctgggcgctgccgcccagaatgcagcaaccacgattcccgaagcggcctccgtagtggcagggatcgcgatgcgcgtcatttcccgaggctggtccgcagcaatggagagcgacaatagacagcctggcggcccttcgggaggaggcgacggcggagggaattccgtggctgaccagggggcacagcagaaagtacgaaccgcgcaggaggtcagttccggcggagggtggtcctcgacaggcaacacttcagcacgttcgtccatcccccctttggttccaggagtggcagcaaacgaggggcgtttcagcaacgggagaactccacgtagccagaaaaaacgtccgaaaaaaaatgacgactga

SEQ ID NO: 358870 - DNA, 261 bp, Pseudomonas aeruginosa
atggacaatttccaaatgctgatcctggtgcccctgatcgcactcggtctttatcgtgttatcaccaagccgggcatccatgccgaccgcctgctctcgctgcgtaaccgtacgcgcatcgcacacctgatcacatttggcctcgcgcccggaaccctgctcggatatgaggcctggggcactgtaggcgttgcagcccccctcatgctcggcatggcgctgatctgctggctgctacccgagccgtggagtgccccatga

SEQ ID NO: 358871 - DNA, 198 bp, Pseudomonas aeruginosa
atgcacaacgcccaagcacgcatgagcgtcatcaatcactatgcagccgatggggatttttttctcgccaactccaaacacggagcgtccgttgaaaagcttgtgtacattggccaccaaaatggcgcgccctgcgatgaaatcggggtctctttcatcatcagtggcagcaattcccagagcttcagcctctgctaa

SEQ ID NO: 358872 - DNA, 309 bp, Pseudomonas aeruginosa; identical to SEQ ID NO: 332590

SEQ ID NO: 358873 - DNA, 162 bp, Pseudomonas aeruginosa; identical to SEQ ID NO: 332592

SEQ ID NO: 358874 - DNA, 294 bp, Pseudomonas aeruginosa; identical to SEQ ID NO: 332596

SEQ ID NO: 358875 - DNA, 264 bp, Pseudomonas aeruginosa
atggctatcgagatcaaccgccagtcgtacctgtcgctccggtcctccctggagctggaactgctcgatgccggcatcgactcgccggacctgctgagccggcttatgcgccacgtgcttgccgctgaatccacgactcgcgctgagtcgcaaaccgttcgccgtgcgttcttcacggcccgtagaaacccgctgctgggcgcaatccctcagcacagtccagggcgcacaaatcgcccgtatatccgcaagaggaaaccctaa

SEQ ID NO: 358876 - DNA, 690 bp, Pseudomonas aeruginosa
atggcagtcacatcggcacccgagaaatcggccactcccatcatcgtcccgggccagctcgcgctgcgcaccattcacggccgcaacggaaagttcaatgttggcaagctcgaatgccaactcggaaaattcacgattaaagacgcggagttggagcaataccccgagggcaagtatcaaggggagttcgtccttcgctacatcttcctcaaaggctatccgatcagcgacggcagcatgcgtttcgagatgcgcgccaacctggacggtatgacacttttcggcatcgacaaactgagcaaggccgaagcacatagcttcgccccgcaggaagtcgatccgctcgatgaagagcaagggacacagcctgcgacaacgccggccaagcccgccaaggcatccaggtccgccagacctgcacccgtgcagacgtccgcggacccgctggtcgataccacgcccttcggcgtggacgcgccgcctgctgcggctgctgcccccggcagcaccgaggatggcgacgccgcgctgttcggcctgttgtggccgctgggcgagtctgtgaagctggattcgaccatcgaccgccgcgccctgcgcgcccagatcgcccgcctgggcgaactgggctacgcgctggacttcaagacgcaggagtggagccgccaggccgaactgcaacctgcgtga

SEQ ID NO: 358877 - DNA, 324 bp, Pseudomonas aeruginosa; identical to SEQ ID NO: 341295

SEQ ID NO: 358878 - DNA, 408 bp, Pseudomonas aeruginosa
atgggctggtatttctctcatcagtcgcggtctgaattgatcatggaactgatcgcaccgcacgagaccgagcgcatcagcgcgaaggtcatcgctcacgcactgcgcggcaacgtgctgtggtccgtggtcgaaatgaccgccaaggtcgagggtgtgcatcgtgatctcgcaccgggccagtccctgtgcaccatccgctgcgatctgctggaacgcagcggcaaccagtggggctacaagccgctggacgagtccatgcacccgtactactactcgtgcccgctgtcctatctggatcgcacgccggtgcagtccgccgaatggcgtgcaggcgttcgcgcctaccacgcacggcggcgcacacccacggctgtcacggctcccgccgcgacgctgatggcctga

SEQ ID NO: 358879 - DNA, 252 bp, Pseudomonas aeruginosa
atgtcgacgtttatgggctccgccagggaaacccagatagctgctgttcgagtccgccgcgggtggttcggcaagctggttgtccaggttcgctacaagatcgagcgccccgaaagcccgctccctggccgggagttgatctaccacgtatgcgggctctcccgttggcgagatgccaacgcaaatgatttcgctgagtccctgatggtcgcgaagctcatcgggatgtctgatgaaggaacgccctcatga

SEQ ID NO: 358880 - DNA, 234 bp, Pseudomonas aeruginosa
atggatgctccgcttctactgaagaacacaggcacgagcctgattttgtgtgacagcaacgggaagccgctccctggacagctttcgttgagcgtcagcaacgacggccctatcccaaccgtcacggtcacgttcgcactcgttaacaagcgggtgaggctctgcggcgaagagatggagtcgcgcatctcatacgatgcgtatcttgagacaattaagggaaggagcagatga

SEQ ID NO: 358881 - DNA, 774 bp, Pseudomonas aeruginosa
atgctgcacatcccggcgttcacgctggatggcagagtcggtctctctgccatccggtatggcgtcgatgtcttcggttcggtcatgtcggcggaggatgccgccaacggcacattcaagaacggactgctccccacggtcgcattcaaggtcgaccgcattctccagcctgcgcagagggaggagttcagggagtacgtgaagtccatatctggcgctatgaacgctgggaggtcccctgtactggagcagggtattacccctgagactatcggcatcaacccagtcgatgctcagttgctggagacgcgagagcatggagtgatcgagatttgcagatggttcggggttccgccctggatgattggtcagaccgacaaagggagtaactgggggaccgggcttgaacagcagatgctcgcgttcctgacattctcgatcagttcgatcaccaatcagattcagcagtgcgtcaacaagcggctgctaactgcgcccgagcggattcgctattacgccgagttttcccttgagggattcctgaaagctgatagcgcgggtcgcgctgcctggtacagcaccatggcgcaaaacggattcatgactcgcaatgaaggtcgccggaaagagaaccttccagagcttcccggcggcgacatcctgactgtgcaatccaaccttgtccccctcgaccaactcggtcaatccaatgagagccaggcggttcgcgccgcactcatgaactggctcagccagccagaaccacaggagtaa

SEQ ID NO: 358882 - DNA, 216 bp, Pseudomonas aeruginosa
gtgaagctgctggcctatgccgtcggctgcaacccggataccgacccgttcgacgactggtgggaactggcgcgcgccgaactgggcggcgacgacttcggggagtacttcgacccgaaggacggcgtattcacgcgcatcctgcacaccgaagacgacctgatgctgtcggccaccgccacacatctgtcgctggaggtggtgcctcccgcatag

SEQ ID NO: 358883 - DNA, 834 bp, Pseudomonas aeruginosa
atggctaaccaatatgtgatggtgggcggacgggagatacctctcgttgtgcctaaatctgatttgacgatcgagtcccgcttgccgggtggtaagtaccatcgccaattttttaattggtggaaaggagatgaactattcgctttcgattccaccacattggaatctatgaatgccgatggctattttttggatctaaacggaaccaacatgttggcgggcaggaatgcctatggcacttcatctggcagccgacccacaatagcggaaggggtacagtttgaatttgggaaaggaattcgcttaaccaaatattcatatcttgcttctgtaattgggaacattccgagcgatgtaatagctaaaagctttacaatggatttctggatgcgcgaagaagccgcaccaacggatcaaccaattcgaccagtcatggtatatgctgatataagcgcacctgccggaacctccacttggaataaccgattcgtgtttgggccaggaaccgacaccatcaatgatccaataactaacttggtgatttggaacaacaaacgaagtccggtcgcaattggtagttggcctcacggtatgaaggggtcaagctggaaacatatagccgtcatttttgataagcctaccaaccgcaattgcttttatgtaaatggagctctcaaaggctttatagctcacaacaacgagccggttattggccctagccagattggaattggcggcgccactagcgaagcagtgacgattgttgagcgggttcgttttagagaaggagtccgctttgatgtgtccggatttgatgtaaaccttatctattaa

SEQ ID NO: 358884 - DNA, 903 bp, Pseudomonas aeruginosa
gtggggtcgctcaacctaaccaatgccatctttcatgacgtgaatcaggcaatcgactacctagaggaactgcgctggggacgctgccggtactgtccgaattgtgcggaggtaggcagctccgccagagtcgccagcaagaaccacaggtacggcctctactactgcaatggatgcaagaagacgttcactgtgacggttggcacgcttttccaaagctccaaggtgcccctcaacaaatggcttcttctcatctacctgatggctacagcaaagaaaggcaggccggccctggagctgcaccggcaactgggactgacctacaacacggcctgggcgatgggccataaagtgcgaagcgctatgcgcccgacagagcaagagctatccaagaagctgggcgggccagctaggccggtagaagtggacgaaacgtactggggcacgcaattcaagaagatgcccggtgcgcgaggctggggccacaagatgaagatcgtctctctggtggagcgaggcaacaacggtaggaaatggtcattccatgtgtctgacacgaaagccaaaacaatcatcccgctgctggtcgagcacatagacccgcgaacccgcattatgaccgacgagagcagcatctataatcgggtcaaggaacattttcgttcacataagaccgtggtacatagccaatggcagtttgctgatggtgaggtgagtaccaacacagttgagggcagtttctctctggtgaagcgaaagctgcgcggcactcaccaccaagtcagcaaggagcacatgcagaactatttgtatgagatggactatcagtggaacaaccgaggactgtcgtatgcagaaattttccacaagacggtcagccggatgtgcgaagtgcgcagctag

SEQ ID NO: 358885 - DNA, 381 bp, Pseudomonas aeruginosa
atgagcaaagcagtttcttccgttagccacgtccttgcttcggacgctaaagaagaattttccaagttgatttctgatgtggcctctgcaattggaataaaagccaaacacatatcgggaaatgaagtacatttccctatgccagaatctggcggatatctaactattgagatgttggggacgtccaaggagcgctactttgtagcctccgtcaacctggcgggagatgatgatctgcttttcggcgggccaaataaccgccccgtcacggcagttgaagctgtaaagcagctcaaggctacgcttagtgcgtatgtgactaagaaccagccgttcgttaaagcgctgaagtcgatggatggttgggcgaagaaattatag

SEQ ID NO: 358886 - DNA, 657 bp, Pseudomonas aeruginosa
atgagaggcgtattagcgatacttgcatccttggttttcgtattcagcggttggtacttttccactaccggcaacgccgaatccaaagagaatccacaattcagctttacgctatgtgaagaccgtaactccgcgaccaagctcttctatagtcaaatcaagttattgataaaggaggcatgggaaaccaaaaccgatccagaaatgaatcccaacctatctcaagtgtacaaaagggttggactgacttctgaatgcaagtacgtgacagcagcagagcaagacttggtatttacgccgaatttttacagttataacgggcttgccgagcgcgtcattgcctttgaaatctatatcgtggatgcgaattgtgaaaggcaatgcccaaacaaatttggcggatgggcttctagctacgagctacctcaacatttctggcccaagggagaaggctggctaaccgcgtactacaacaacaggcagggaattcatgtaagtattttgaaaatcactgcggctaacagagtgttcttaggtatggacaaatatgatacgcaaggagatcgggattacatgcgtaaagtcgctatgaaaggatactctgaaggaacagaattcctgaagacttatggggtcacacctggcgcgccaaattaa

SEQ ID NO: 358887 - DNA, 369 bp, Pseudomonas aeruginosa
atggagcgcctgttccgtaagggctacgaaccggctctcaccctagggaacgccaaggcaatagacatcttggtctgcaatccagagaccaaaaagaccatggcagttagcgttaaagccgttcgtggtggcggtaagtggggcgttggtcgcgacgacctgtccagccataaagatctggtgttcgtgttcctgctttacacagactttgatgatttgatcgttaatccggacgtatgggtaatgcgcgccaaggatgttgagactcgaaaggcgggttggctgaaccaggctttcgccatctattacagcggagcaaatgcgccgcatgacttggatagattcaaagatgcttggcacctgatctga

SEQ ID NO: 358888 - DNA, 387 bp, Pseudomonas aeruginosa
atggctacagacgacgcgcgaatcctggagaagatgggcaaaaccatcgctcggaagcgcaaggtggcgggctacacgcaggaggaaatcgccgattaccttgggatcggcaccgaggcgttctcacgcattgagcgcgggctggtcagccccggtatcccgaagctgtacgcgctggcagagctgtttcaatgcgggatcgagacgttctttgtggaaggcagtcgccggccaaacgaccaagctgagtaccttgctagcctgatgaaggacatgagtaccgacgacagagcgatggttgtcagcatcattgaaacactggcggacaggctggctcctgagatttaccaagagtctcgccctatacccataaagccgaaaaggtga

SEQ ID NO: 358889 - DNA, 309 bp, Pseudomonas aeruginosa
atgagcaagttcaaggctggggatttggccatgatcatttcctgccaactggttcctgaactgattgggaagaccgttgagctggttatgcctgttctgccaggcgatgaagccaatcatggcggaagagattggcggaaccagacggatcgtcctgcctgggtcgtcgcagctgaagggctgtacgtcctgaccatcaagggaaacctggagcctgatcaatacacgctgatgcctgatcacaagctcatgcccctgcgcggcgacttccagcccgagcagcagaaggcgaagggggtggaggcatga

SEQ ID NO: 358890 - DNA, 1401 bp, Pseudomonas aeruginosa
atgaaactcacgctcacccctcccctgacccccagccactggatgcgctcgaccgacctggccgacaccgccagcgcccccctcgtcggcgcccactcggcggacgtggcgatagtcggcggcggtttcgtcgggctctggaccgccatcaccctcaagcaactggaaccggacgcacgggtcctgctactggagcaggacgtctgcggcggcggcgcttccggcaggaacggtggtttcgtgatgtcctggtggccgaagatcggcaccttgctgggcttctgcaacgaggcgcaggcgcgcttccttggcgaaagcgcggagcgggcgatccaggaactcggggagttctgcgcgcggcatgacatcgatgcgcacttccagcagaagggctggctgtggaccgccaccacggcgcgccacctcgacgcctggaacgataccctcgccgcctgcgaacggctcggcgtcagtcccttcgaacgcctcgacgccagcgaagtggcacgccggaccggttcgccggtgcatctcgccggggtcttcgagcgcagcaatgccaccgtgcaaccagccttgctggtgcaaggcatgcgccgcgtagcgctggccctcggcgtggaaatccacgagcgctgtggcgtcagccagatcgttcccggccagccggcacagctgctgagcgccggggcccgggtccaggccaaggcggtggttctcgcgaccaacgcctggtcggccgccctgcccaggctctccaggctgatcgtaccggtgaacagttccatcgcggttaccgaggcgataccgcaacggctggagcgaatcggctggaccggcggggaagccatcaccgattcccaactgatggtggactactaccgcaccacccgcgacgggcgcatcgccttcggcaagggcaccggcgccatcagctacggctcgcgcatcggccgggtattcgacgtcgaccgggagagcctggccctgaccgaggccgacttccgccgcacctatccctcgctaggcgacatcccgctggtcgacggctggtccggccccatcgaccgtacctacgacagcctgccggtcttcggccacctgcacgagaacatccactacggcatcggctggagcggcaacggcgtgggaccgagccgcctgggcgggcggatcctcgccagcctcgccctcggccgcgacgacccgtggagccgttgtccgctggtagaacgccgctgccggagcttcccccccgagccgctgcgctacctgggtggctccctggtgcgcaacgccgtcctgcgcaaggaacgcgcggaactcgccggtaccgcgccctcggccaccgaccgctttctcgcgcgcttcgcccccgccggccttgaagacaaatcctga

SEQ ID NO: 358891 - DNA, 1176 bp, Pseudomonas aeruginosa
gtggccaaacttcttcgagtcatcctgattgattcactttgccgaggcgagatcgtcgaggtgaaagcagacgaaaacacctgcctgacaggcaccaacgggatcggtaaatcaacctttctgaagctgatccccttgttttatggggccccagctgggcgaatggttcgtaaggggaccaataccaccagtttcgctgatcactacctgcctaatgcgtcgagctacatcgtgttcgagtacgagaaccacgagggcgcgcttcggctggccatcctgcatcggtcatccaatggttacgcctaccagttggcagcctctggctggaggcctgagctgctttatgtggatcaggactccggcgagctggtgctgcctgggaaggtcagcagtcgtatccagggcatgggagtcgactgtacgccggaactgagttggagccattacagcaagatcatccagtacaacactggatcggcagacatggacggcatcacggatgcggccgtgaaaaagatgatcaacctcttccggcgcatgtattccctggcgccgttgaggcgcaactttgctggcatcgacagcctgatgttctccctgctcgaatccaagggcacctttgactccatggagtctgctgtcggagaaattatccggcaggagaccatgcgtagcgagatcgacctttcaggtatcgatgtccagtccttcctaagtgcgatcagcaaccgggcgagctacctggtaatggatagggaagtaaaacccaagattctcaatctggcggccttgcgcagccggctgatggcttgcgatctgcagcttggacgcctgaagacggtcgctgcgacgcggcagttttccgtcaagaaggagcaggaggctgctgcggaagccatggaaacgcagcgcaaagaggagctttctgcgcaagatgtttctcgtgatgagcagcggcagcttgattgtcgtctgggcaacgcccgtgcagcttccgctgagcaattgcggctgctgaggacgctggaagagcagaagatcgggtatgacaaggccggtatgccggcattgcttgctgaaatcgacagctgtgggggggtggttcttttggcgcgggggagcgggtggcgtcggatggctggaagccagacgtggcgcgggtttaggggtgtttga

SEQ ID NO: 358892 - DNA, 402 bp, Pseudomonas aeruginosa; identical to SEQ ID NO: 329443

SEQ ID NO: 358893 - DNA, 237 bp, Pseudomonas aeruginosa; identical to SEQ ID NO: 342595

SEQ ID NO: 358894 - DNA, 177 bp, Pseudomonas aeruginosa; identical to SEQ ID NO: 330351

SEQ ID NO: 358895 - DNA, 237 bp, Pseudomonas aeruginosa
atgaggacgatcagcttccagggagacggcctgtcggccagtcagtaccggtcgatccagcttcgccagcaggttagggcggcggtgaatcagtccgtgttgcagcagcaggtcgcggccacgctccaggccctggatcagcacaaagagcagggcggcaagcctgagcgcgtctggaccactgtcacaaacgaaaagggcacgccgttcctgggcgacgtgttcgggtggccgtga

SEQ ID NO: 358896 - DNA, 540 bp, Pseudomonas aeruginosa; identical to SEQ ID NO: 332562

SEQ ID NO: 358897 - DNA, 810 bp, Pseudomonas aeruginosa
atgcacggatatcaaatcgtattttcaacgcactcgcctcaaatgattaccgccgagcgcgctcaacatacattgcttgtaagaaaaacaaatactgatggaacaatcactcgaaaacgtatgaaagatgcgctcgacattgtcattccgaatgcaattgcgcaagctcagcatctattctctttaactcagtcatctcagattcttttttcgaacagagtcatactaactgaaggaaagacagagttaagattacttccctttctatacaagagctttttcggaaagacattagggcaagaccagctagcaatgatagaaaccggctcggtagatagcattgcaaagacacttagagtactcaaagagatggatattccagcagttgccgtggttgaccttgattacggtttcagaggagccatcgcaaatggatttttgcaagagagaagcgaggagatagtagagctcaaaaaaatcctagcaaggcttgagcaggctggtaaatgtaaattacatggaggacttcccactagtaaattagccccgtgcacagcagctcaagcttttgagctactagcattagaggctgatgcagtaccacatcttaaggcgcttcataatgctttgcgcattcagaatatatggctgtggtgggggggagcgattgaggcacacctgggtttaacagataaagaagaagctacttgggtcaagtttaaaacagacattgaaatagatggcatccgtgctcactgcaaggacgctcagtctatagaagatctccttacgtggtttaaggaaggataa

SEQ ID NO: 358898 - DNA, 1161 bp, Pseudomonas aeruginosa
atgaacgatgtcagcgtgattgaccgcttcctagaggtgttcgggctgtatatcgacaccggcttcggcctgctcggcggcgaggtggcctttctcaccatgaccctggtggtgatcgacatgaccctggccgggctgttctgggccatgggcggtgaggacgtcagcgccaagctgatccgcaagaccctctatgtcggcgcgttcgccttcatcatcggcaactttaatgccctggccaagatcgtcttcaactccttcgccgggttgggcctgctggcctcaggttctgcgctgagcccagccgagttcctgcagccaggacggttggccgcgattggcgttgatgccggagggccgctgcttgagcagatcagcagccttagcggatttcccgaagtctttggcaacctgcacagcatcctggtgctgttcctggcctggctggtggtgatcgtcagtttcttcttcctgaccatccagctgttcgtcaccttgatcgagttcaagctgaccaccctcgccggcttcgtgctggtgcccttcgcgctgtggaacaagaccgcctttctcgccgagaaggtgctgggcaatgtggtcgcctccggtatcaaggtgctggtgctggcggtgatcgtcggcattggcagcgggctgttcgccgaattccaggccgttccggacgaaccctccatcgaccatgcactggtggtcatgctcgcctcgctggccttgctcggcctgggcattttcggcccgggcattgccaccgggttggtctccggcgcaccgcaactgggtgctggtgcagcagccggtactgcactcggcgcagcaggcatggctgctggtgcggctgcagtcgccgcaggtgtcgggggcgcggtattggccggcgcacgtatggcacccggagcagcacgtttggcaatgggcggcgctcgctctctggcaggagccccctccggcgctacagcaagtggtgcccccgccacttccgatcctgcaactgccccagccaaacagcccgactgggccaggcgcctgcagcgcaggcaacaactctcacaggccaccagtacggtcgcccacacccttcgtggtggcgatggcggtggttcatcacctgggccgcagatccgcgacccatcgaattcgtaa

SEQ ID NO: 358899 - DNA, 525 bp, Pseudomonas aeruginosa
atgagtgaggtcatggaccaggcagtcattggtatgccgtatgaaatggcgttggggtgcgaagtgtcgcgcaggcagtactactcccgtgcgaacgctgtcctggcggaacgcgacgccctcgccgccaaactggcgatgctagaggacgcagcagcaaagggagatgctgctcgccagcaatgcggcggaatggagatggagatcgaggaacttcgcgctgaactagcggaactgcgcgcaagggtggctgttgtgccggatgcgagcacggtgtatgcggcgctcgatgctcgtgagcggttattcacaagtcccgagaacattcaggtagcgctggaagctcaatcgcgcctcaacggcatgacggtcagcgaggagctgttgcggaggcttggccaagtaatctcgtggcagtgcttcggcgattgcagagctttcagcgatcagcgcatccctgaaccttcggaggtaatcgaagaactccgcgccctgctgagcgagctggagggagggaagccatga

SEQ ID NO: 358900 - DNA, 498 bp, Pseudomonas aeruginosa
atgaccacaaccatttccgataccgattcgattcacccgagtgaacttcctgaaatcggacaaccactggctaatggaacctactttgcccgctactggctgaatggcaaggagtacgcctacatcgatcttggcaagagcgcagagttcactggcgaatggggcgaatacggccagaacgtggacggggccgccagctaccgagacggcgcctcgaatacggccgccatggctgaagctggcagcccgattgccaggcaggctttggagatcggagccggcgtattcattccctctgctctggaactggctcttctgttctccgccaaacaagcaggcgagctgcccggtttttcggatcgctggtactggtcgagttcgcagttctccgcctacagcgccttcctcacgaacttcgacgccggctacgcgggcgacaccgacaaggacggcgccttccgtgtccgccccgtccgcaagatcccgatcacggcgtga

SEQ ID NO: 358901 - DNA, 204 bp, Pseudomonas aeruginosa
atggccgtaatcgtatctcgcaagcagaacagcaaaggcgcgacctattccattcagcgtgaaggcgaaaactttggcgtgtggaagctgtgcgaaaactactgccggcacagcgcggacggcatccgccgcacatggcgctatgtagagcgcggcatgaccctggaagctgcgcagaagctgttcgaccgccgcaccaagtaa

SEQ ID NO: 358902 - DNA, 210 bp, Pseudomonas aeruginosa
atgacagaacctcgcctgactctcgcagactgccacgcgatggagcctcggtactgcaaccaaggtatccgactagtgcttgggcgcctggggctgagctggcctgagtttcgggaccatggtctgccgttcagcgtgttcgaagaggtggacgacgcgatggttcaagcagccctcgacaaagcgcgtgagcgcctgggtgcccgataa

SEQ ID NO: 358903 - DNA, 912 bp, Pseudomonas aeruginosa
atggaagaaccacgtaaacccagttattttgtgcgcttcatggtcgcagcgctatgcgttcttctggcagccatgattctgttccgctacctcgcggtagacccgaagggagagatcacatcgggagtgatcactctactcggcttcttaattgtattggtgctagccgaatccttcgataacttttcggtcggaaagcttataacaatttcacgtgaaatcacaaaaaaggaaagagaagtcgataagcttgaacggcaaaatgctcagcttctctctcaagttttaagcgttaccaatacacaggctcaacaccaaaatcatacaaacgtgtatggcgactaccatgctgccccaagtgtagaacgggcgtctgctcttgacgtccaagaaagtcaatcagctgatgcagtgccgtccacttcaccggaactctcggaagtaattagggagcggatcaatatccgagcggccacagcaattgctctaacaaagtattttgcagaacgatcaatcaatacgttaaacgtaatccacgacgcaaaacttgtaagtcacttcaaggacattgatccaatatctaattttcagcccattttcgatgcgtacttcaatgatggcgagaacgaaattttcgtagatgttcgaattaagcggaactcccctctatttattagagatcgcctctatgtgttgctgtccaagatacatcattaccgtgtagcaaggcggatcaacgcgcggctagacctgattctcatttcaatgccaaacacagaagagtcaccacgacctaactccaacttctatcgtattctggagagctttgagccagccatcgccaatggaactttaaaaatacatgaaactgtatttacagaggaagagagaattgcatctcttgtgcagtaa

SEQ ID NO: 358904 - DNA, 804 bp, Pseudomonas aeruginosa
atgttgcgtcccgccactgcccaggcgcgcgcggggttgctacgtttgcctcccctcctggagaaacagccaaggcatgagcactacttccaccgacatggcgtcgctgatcaccaccctgcaaggcgaaccgggtttcgacgccacccgcatccccggcgtccgcctgatgcgcgccgaacaggcctatccgcgcagcccggtgttctacgagccgcgcatctgcatcctcgcccagggccagaagatcggtttcctcggtggcgaaacctaccgctacgacgccgaacgctacctggtgatgtcggtgcccctgccgttcgaatgcgaaacccacgcctccgccgccgagcccttgctgggagtgagcgtcgacgtggaaatcggcaccttgaaggaactgctgctacagatggaagaggctcccggcagcgacgacgacaacgaactggcgcccagcgcgccgatggcttcggtaccgctggacgcggggatggccgatgcggtgatgcgcctgctgcgctgcctgcagagcccgttggacagccatatcctcggcccgcaactggtccgcgagatcatcttccgcgccctgcgcagcgagcagggcaacgccctgcgtgcggtggccggccggcacagcggctacgggcgcatggccagggccctgcggcgcatccacaccgactacgccagtgcgctggacatcgacaccctggctcgcgaggcgaacatgagcgtgtcgaccttccaccacaacttcaaggcgatgaccttcacctcgcccctcctgagagagagtga

SEQ ID NO: 358905 - DNA, 516 bp, Pseudomonas aeruginosa
atggactaccgcatcagaaccagccgcgacgaggacgccgcgctgctcccggccatcgagcgctcagccggggaaagcttccgcctgctgcccgagctggcctggatcgccgacgccggggtcgccggggtggacttccatcgccgcctgatcgagcgcggcagccactggctggcggaagacgccgatggccagccggtcggtttcctcgccgccgaacgctgcgccgacgagctgcacatcgccgagttgtccatcgcccaggcccaccagcaacagggcctgggccgccgcctgctggagcgcgcggtgacctacgcccacgccagccactgccgggcgctgaccctgacgaccttctgcgacgtgccctggaacgcgccgttctacgcacgcctgggcttccagcggctgacctggcaggaagccggcgagcgcctgcgcgcgatcctcggccacgagcaggagatcggcttcgccgccgacagccgctgcgcgatgcgcctggtgctctag

SEQ ID NO: 358906 - DNA, 264 bp, Pseudomonas aeruginosa
atggctatcgagatcaaccgccagtcgtacctgtcgctccggtcctccctggagcttgagctgctcgatgccggcatcgactcgccggacctgctgagccggcttatgcgccacgtgcttgccgccgaatccgcggcccgcgctgagtcgcaaaccgttcgccgtgcgttcgtcacggcccgtagaaacccgctgctgggcgcaatccctcagcacagtccagggcgcacaaatcgcccgtatatccgcaagaggaaaccctaa

SEQ ID NO: 358907 - DNA, 183 bp, Pseudomonas aeruginosa
atgaaaagcggatacctgaaaaaagaccggcaggaacgtttcaacctaaagcgcggttggttcgtgaacgcatggcgcatcgtggacgaacaagggcgcgaccttgttcaaccttggccgaacacaaagaccgaggcgcgccgggtcgctcgcctgctgaacattcaactcatagaaggttaa

SEQ ID NO: 358908 - DNA, 510 bp, Pseudomonas aeruginosa
atggctaaggaattgaacgaacagcagcaggccgtcgccgacttcctggcggttgctggcgtagagttttccgtgatcctgcgcggcgccacgaagcgcgacggatgggaatgcgatgaatgggcgccgctgttccgtcgcggttcggaccgtgaaggccgccagttagcgcacgcatacttcacgggaaccggccaccgtaaatccgaacggccgatgccgccggaaatcgcccgactggcgccccatattctcgcccgcgtggagtgggaaaaacgctacctgaagccgttcccgccgtgcgccgccgacgttctttactgcctgctgtcggacgccgacggcgcaaaccagaatttcaatgattggtgcgccgacttcggttatgacccggacagccgaaaggccctggccacctatgacggatgctgcaaagtcttggcggacgtgcgggcgttcttcactgccgccgaacgcggaaagctggccgaattgctggagggtttctaa

SEQ ID NO: 358909 - DNA, 717 bp, Pseudomonas aeruginosa
atgaacagaagccatatcattgaggctctgcgggccgccgattggtccaacacccccaacggcaacttggccctgatccaagcagctatcgaacatctggaggcgcagccctcctcagcgatggcagctatcgagtgtcgtttcgaggtaagcgaggacacactcaaagtcattcgagggtgcctgcgggctgctgaggaagacgtcgagaagctccaggcgaggctggccgagtcggagaagcaggaacagctgctagccaccaagctcgcaatggctctcgacgcagcagcaaagggtgatgctgtccgccacgctgctggcggcatggaaatggagatccaggagctacgcgagaaagtagccgagctgcagaaggagctgcgcagccgttggacctacgccagcacccaggcaaccaattgcgccggttgtggggagcacaaacacaccccgctgcgcgtcgactggatgggcggctatgtctgtctgacctgcatcgacgagaagctggaagaactccacgacgaccaggatcagcgcagcgtgccggagggcttccgcgagaagttcgagcagtgcgtggaactggcgttcgccgaaatcagctactacgtcagcccggagaaggcttgcaacccccagtcgcgcgctcgcagggcctcagcactggctaccgagctacgagccatgctcgcctccagtgaggagtcctga

SEQ ID NO: 358910 - DNA, 234 bp, Pseudomonas aeruginosa
atgaccagttgcaaagcgcgtcagcacagcgaccagatcctctgcgagtgcggcctgggatgggacgtcaacgaccccgacccaccccagtgtccaaagctcgcggagagccccaggacgctggctaaaccgagccaggcggcagccataggccggaagaccgagcggcgcactccagcagtcggccgctcctggctccaacacatccgctctctgctggcggccaagcgatga

SEQ ID NO: 358911 - DNA, 243 bp, Pseudomonas aeruginosa
atgacacccaagatcgaatggcgggcatacccgtcagcaaccaagactgtgatcatccaagcagccatcagagcgcccaaagacgcctttcgccgcgtgaaggacgtgttcagcacgaaagaggtgagctgcgacgctacgagcgatgaagtggcggccaagctgcagcagatgcgcctggaagtggtccgactgcacgatcagctcaaccgagttcttgattaccggggaggcaggcgctga

SEQ ID NO: 358912 - DNA, 210 bp, Pseudomonas aeruginosa
atgtggatgtacagattgatcgtatgcctgatggcgagtctgctgagcggctgcgggacgactggtcccgagactgacctcggctgcacttgggctagaccgatttacgtgagtcgagtggatagtctcactaaaggcaccgctgaccagatcctcgcccacaacgaggcaggcgcgaagcgctgcggctggaagcggacgagtaagtag

SEQ ID NO: 358913 - DNA, 225 bp, Pseudomonas aeruginosa
atggacgagattcggaggcgtaggctgcgggcggagctgctagaggtcggtttcctcaaccagtgctgccttgatctcatggaaagcatggaggcggagttcagcctctcgcaggatcagcaggaatgcatcgagcaactcggccggttcctgcgggaagggattggcaagctgactgctctatcggagcgagtggcgggcggtgagatcgtagttttggcctaa

SEQ ID NO: 358914 - DNA, 1782 bp, Pseudomonas aeruginosa
atggccgtgtctgccgtcatcacccagcgcctggttgacctcgaccggcagctacagagcgccggtcaggggcagcgcacggcgctatgcaaagcagccgcggcagagctgggtctgtcgctggcatcgctgtaccgcaagctgaaggatgtacaggtgcgtgagcgcgcaccgcgtaagcggcgcaaggactcggggcagagccgcctggggcgtgacgaggcactggtgatcagcacggcgctgatccactcggcccgacataacgcgaagcgcctgtattccgttgctgatgcggtcgaggatcttcgcgccagcggcttgatccgtgcggagtctgtcgaccgacgcaccggagagatccgcccgatgtcgatcagcgcgatcagccgcgcgctgcacagctaccgcctgcatccgtcccagctattggcgccggagccggtcaccgaactgcgcagcctgcatccgaaccacgtctggcagatcgatgcgtccctctgcgtcctctactacctgaagcctgggaccaacaagaaggctagcggcctgcaggtgatggatcgcaaggagttctacaagaataagccagcgaacctggatcgcgtggccgctgaccgtgtgtggtcctacgagatcaccgatcactacaccggctggatctacgtccgctatgtgatgggcgccgagagtggcgagaacttctgcacggtgctgattgaggccatgcaagagcgcggtggagccgacatgctccacggcgtgccacgcatcctgatgatggaccctggttcggccaacatctcggcgatgtcgaagaacctctgctgctccctgggcatcgaggtcatcgtgcacgcgccaggcgcggcgcgggttacgggctcggtcgagaacgcccggaacatcatcgagcgcaagttcgagtcgaagctgaagttcgaaccggtcaacgacctggacgaactcaacgcccaggcgaagaagtggcgcgcccacttcaatgcgaccgccgtccacagccggcataggcgcaccaggtcagaactctggatgaccatccgggctgaccaactgatcaaggcgcccacggtcgagctgtgtcgggagcttgcagtgagggcaccagagtctcggaaggtcacggccaaacttcgcgtctcgttcggagggtgcgagtacgacatttcggttgtcccggacgtgaacgtcaacgaccgcgtgcttatcacccgcaacccctggcgcgaagatgcagtgcaactggtcacggtcaacgagcagggccgtcaggtcttctatgtccttcccaaggtcgagaaggatgagggcggctacgcgaccacttcaccggtgatcgggcagacgttcagccgtcaggctgagactccggcgcagaaggcccgcaaagccgttgaccaactggcctatggcgtcgaaagcgaaatggaagtgcaggctgcgcgcaaggccaagtccgttccgttcggcggtgccttgaagcccttccaacatatcgacgacacccaactgcccaccttcatgccgcgacgcggcacggaacacagcttggtagcccccatcgtagaggttccgctccttccgcatgtcgaggcggccaaacgcatacgcgcgcagttgggtgacgcctggaccacggactcgatggcctggctcaagaagacccaccccgaaggcgtgccggaagaccagctcgacgccatcgccaaccagttgcgcaagccggcccggcctggcctgtgcgttgtaggaggcaactga

SEQ ID NO: 358915 - DNA, 855 bp, Pseudomonas aeruginosa
atgccagacgacgacgaactggttcgcagtgccgtcgagcgatgtgatgctgtcgtcgtcgatcccgagcagcccgctgtcctcatcgaatacgggcagcgtcgcgacgtcgtagtcgtcacggatcagccgcagcgtccagagtccggtcgagcgggaaaggaactgagtggcgccaatgtgatcgaggactgtctgctcgaagttgtccagctcgtctgccacgcgaaacttgaggcacagaccaaagccctcggcgaacaacgtatctgcggccgtccgatacgacgcctggtccagaaggccgcgatccttgccacggccccagtcgcggtttgtctggcactcgaacaagatgtgagcggggttcatcgccttcacctggtcgccagccaggctgatcactgctttctcgggataccaggttccaccgtcccatccgttgagcgctcgtcgccaccggctcatccaggctttcgggtacttgttcatcgcgcagagctgaccgtcgaagaaagcagtggtgaccccgcggaacgcaggtaccaggccgcccaccatcgccgccagtcgaggattcaccggttggtccggggcgccgaacatgacgtccagcggcccgacgatgccgccctcggccttgtctccaccgaacaattcgccggcattgatctggatggtctggttgctcttgaccgatcctttccatgcagtgcgatcacctgccttgatctcgaccagctcatccagcggccccctggcaaaacccatgagaatgcccatgaggtagcgaaagccgacagtttgcgctttgctacggctgcccattgctcgcctccgcacgtacgtggttga

SEQ ID NO: 358916 - DNA, 489 bp, Pseudomonas aeruginosa
atgctcgataatgctattccccaaggtttcgaagacgccgtggagttgcgcaggaagaatcgcgagacggtggtcaagtatatgaacaccaaaggccaggatcgcctgcgccgccatgaacttttcgtcgaggacggctgtggcggtttatggaccaccgataccggttcgcccatcgtcattcgtggcaaggacaagctggccgagcacgcggtgtggtcgctgaaatgcttcccggattgggagtggtacaacatcaaggtcttcgagaccgacgatcccaaccacttctgggtcgagtgcgacggccacggcaagatcctcttccccgggtatcccgagggctactacgagaaccacttcctgcattccttcgagctggacgacggcaagatcaagcgcaaccgcgaattcatgaacgtcttccagcaattgcgcgccctgagcattccggtcccgcagatcaaacgcgaaggcattcccacctga

SEQ ID NO: 358917 - DNA, 267 bp, Pseudomonas aeruginosa; identical to SEQ ID NO: 330012

SEQ ID NO: 358918 - DNA, 399 bp, Pseudomonas aeruginosa
atgcgtcgagaccctgaattgatccggcttctgatgctcaagctggagtcactggatatgccggcaaccgcgatcgccacaattagctatcgagaagaccttgcgaccgagggctactccgacgaccaggtctactaccacatcgaacagatactgatgaacaggtgggtagatatggccggtggacaaagaatgaaccctagcggccactttaccttcaggtgcctgacaccggccgggcatgacttcgtcgattcagtccgtgacgatgcgatctgggcgctgaccaagaagggagcgtcagaagctggaggattcaccctggatacgctcgcggcgctgggcaaaggcttcctccgcaagcagatagagaagctcaccgacatccagctcggataa

SEQ ID NO: 358919 - DNA, 1752 bp, Pseudomonas aeruginosa
atgaagaccatcgtcgatttgcccaccgatccccgccgccatgccaagcatctgtattggcagggtttccgtatctgcgaaatcgccgagctgatcgacgagaaggaaaagacccttcacagctggaaggcgcgcgacgagtgggaccgcgccacgccgctggagcgaatccaggccgcgaccgaagcccgcctcgtccagctgatcctgaaggacccgaagtcgggcgctgactacaaggaaatcgatctactcggccgacagttggagcggcaggcgcggattgagcgcttccaggacggcgggaccgagacggacctaaatccgaacatcgccaagcgcaacgaggggccgaagaaggcgcccaagcgcaacgagctcagcgaggagcagatcgagacgctggtcgaggccttccgcgatagctgtttcgactaccagctcgactggtaccgcgcggggaacatgcgcacacgcatgatcctcaagagccgccagatcggggcgacgttctacttcgcccgcgaggcgctgatcgacgcgatcacaaccgggcgcaaccagatttttctttccgcctcgaaggcgcaggcgcaccagttcaagacctacatgcagtcgttcctcaacgaggtgcttggcgtgaagctgagcggcgaccccatcgtgctctggaacaacgccgagctgcacttcctgggcaccaactaccgcacggcgcaggggcgcagcggcaacttctatttcgacgagttcttctgggtgcatggctttgccgagatcaacaaggtggcctcgggcatggcgctgcacaagaagtggcgcaagacctacttctcaacgcccagcagcatggcgcacccggcctatagctactggaccggcgagcgcttcaacaagggaaagccgactgccaagcatatccagctggacgtgagccacgaggcgctgcagcaggggcggtactgcgaggaccgcatctggcggcagatcgtcaccatccttgacgccgaggcgcgcggctgcgacctgttcgacctggacgagctgcgcgacgagtacgatgcggcggctttccagaacctgctgatgtgccagttcgtcgacgacgggcagagcattttcccgctgtcgatgctgcagccgtgcatggtggagagctgggactggccggactacagccccttcgcgatgcgcccgttcggcgaacggccggtctggctggggtatgacccggctgagagcggagactctgcaggcctggtagtggttgggccaccgctggtggccggcggcaagttccgcatcctggagcgccatcagttccgcggcatggacttcaccagccaggccgaaacgatccggcaggtgacccgccgttacaacgttgcctacatcggcatcgacacgacgggactgggcagtgctgtggtgcagcttgtgcgccagttcttcccggcgttgaagaccttctcctacaaccccgaggtcaagacccgcctggtgatgaaggcctgggatgtgatcagcaaggggcgcctggagttcgacgccggatgggtggacgtggcgcagtctctcatggccatccgcaagaccgtgacccctggtgggcgccagttcacctacaccgccggccgcaatgacaacaccggccacgccgacctggcgtgggcgctttttcacgcactgcacaacgagccgctggagggccagaccgtggccaacaccggcatcatggagatctactga

SEQ ID NO: 358920 - DNA, 849 bp, Pseudomonas aeruginosa
atggccagcaccgcccccgccaagaaattccgctccaagtggacccgcattgccgtagaaggcgccaccaccgacgggcgcaagatcgagcgcacctggatcgagcagatggcggcccagtacagccccaatacctacggcgcccgtatcaactgcgagcacatcaaatgggcctggccgggtggtgagttcggcgcctatggcgacgttgtcgccctcaaggccgaagaggtcgagatcaacggcgacaagaagctcgccctgctcgcccagctggagcccaacgacgccctcttggccctgaacaaggccggccagaagatctacacctccatcgaggtgcagccggagttcgccgacaccggcaaggcctatctggtaggcctggccattaccgataccccggccagcctgggtaccgaggcgctgtccttcagcgcccagcacggcaccctagcctcgcgcaaaaaggccaaggacaacctgttcaccgccgccgaagaggtggttatcgaattcgaggaagtcaccgagcccgaaaacaaggccctcggcctgttcaaccgggtcatggaggccctcggcaagagcaaggacaagtcggtcaaggatgacgcccaattctccgagctgagccaggccgtggaggcactcgccaaccacgccatggagcagggcgaggccttcgccaccgagcgcaccgcgctctccaccctgaaaaccgcccacgaaaaactggccggcgagttcgccgacctggtcaagcgcctgggtgaaaccgaagaccacagccagcatcagcgcccccccgtcaaaggcggcgacggcaaagtgctgacccagttctga

SEQ ID NO: 358921 - DNA, 1008 bp, Pseudomonas aeruginosa
atgcgtaatgcaacccgcctcgccttcaccgccctggccgcacaaattgccctgctcaacggcgtagccagtgccaccgagaaattcaacgtcgcccccagcgtgcagcagacgctggaaagcgccatgcaggaatccagcgccttcctcaaggctatcaatctgatcggcgtcaacgaacagacgggcgaagccctgctcgccggcgtcaacggccccatcgctagccgtaccaacacggcagccggcaaccgccgcaacccggccgacgtctcccagttgaccaaggacagctacgcctgcaagcaaaccaacttcgacacggcgttcccctatgcgctgctcgacgcctgggccaagttccccgacttccaggtgcgcctgaccaacgccatcatcgagcgtcagtccctcgaccgcatcatgatcggtttcaacggcacctccgctgccgtggtgactgatcgcggtgccaacccgctgctgcaggacgtcaacatcggctggttgcagaaggtacgcaccaccgcgccggagcgtgtactggatgaaggcgccgtagccggcaaggtcaccgtaggcgccactggcgactacaagaccctcgacggcctggtcttcgacgccgtgcagatgctcgacccgtggcatcgtaaccacccgaacctggtcgtcatggtctcgcgtgacttgatgcatgagaagctgctcgccgccgtcgagaaaggcgccgcctccaaccaggaagaaaacgccgcccaggagatcgtcagccgcgcccgcctgggtggcctgccggtggtcgacgcccccttcttcccggccggcaccgtactggtcactgtcctgagcaacctgtccatctactggcaggaaggcgcccgccgccgccacctgaaggacgagccggaatacgaccgcatcgccgactaccaatcctccaatgacgcctacgtcgtcgaagacttcggcctcatcgccctggtcgaaaaaatcgagcgggtataa

SEQ ID NO: 358922 - DNA, 702 bp, Pseudomonas aeruginosa
atggccctgaccctcgcccaacgcaaccagctgcgcaaacgcgcagcccaggaggcggctgctaccgcccctgccgcgctcatggacggcctcaccagctacgagctgatgctcgccaagcttcagcaggaccagctgcgcctcaagcaggtccagtcgcagcagaacaaggcgaaggtcaaggccgagctgctcccggactatgccccctacgtcgagggcgtcctcgccgccggccagggagcccaagacgacgttatggcctacgtaatggtctggcgcttcgacgcgggtgactacgccggcggtctggatattgccgaatacgtcctgcgccacaacctgcaaacgcccaaccgcttcaaccgcaccaccggctgcctggtggccgaggaagttgcccaggctgcgctcaccgtccagaagtccggcggcgtgttcccgcacgacatccttacccgcactgccgtgctcaccgccgagcaggacatgccagacgaagcccgcgccaagctcaccctcgccttgggccgctccaccctggcaggcctggacgagaacaaccccggccagccgggccagatacaggccggcattgacctgctgaaagaggccatccagcagcacgacagctgcggcggcaagaaagacctggagcgcgccgagcgcctcctcaagaaacacgctggccccgccagctaa

SEQ ID NO: 358923 - DNA, 291 bp, Pseudomonas aeruginosa
gtgggcctggcgcaaggcatccaggctggcctgcaggccttcctgtgcggcgcgctgctgtgcgagctcgccaccgaggcgggtgatggtggcggtctgccgggcgttacgctccagagcgacctggagcttgtcctctgcgcgcgctgcacgagcctgctcggcctggagcttctggtaggtgccccagagcagcagggccagggcgccgagcagggcgaggccgtacagagcctggcgcagcgtgctcaagcggcattctccctcatggattcgctgtgccgggcatag

SEQ ID NO: 358924 - DNA, 435 bp, Pseudomonas aeruginosa
atgtcgcactttttcggcacgaaacccatcgccttctacgacacagcgatcaacaccgatatccccgacgacgcagtcgagatcaccgcagacgagcacgcggacctgctcgcggctcaggcacgcggcaaacgtatcgcggccggcaaagacgggcggccgatcctgctggacccaccagctcccacacgggacgaactggagagcttcgaacgcatctggcgcgccgcacggttgcgcgaaacagactcactagtagcccggcaccgcgacgagattgagaccggggaagcaccgactctcgacaccgagaaatacagcgccctgcaggcctaccggcgcgcactccgggactggccagaagctggagagtttccgctcgcagaacaccggccagcagcgccggaatggctgacaggcgaactggcatcctga

SEQ ID NO: 358925 - DNA, 1059 bp, Pseudomonas aeruginosa
atggcggagactgtaactaagaagattcattataagcgcgcggtgatttctggcggaggaaatctacaagaaattttagagcgtgtttttattgatggcagtccagcgcacagagtaggtcagcggaaagaggttgttagcgctgatacaaatagttttcgtgttattaatcacaagcgtgattataatggtatgctcttctgtcagatgatttattttgaacctgggcgtagtcaagcctatattacgctaaatgatgatgcggagtcttatgcgctggatgctttgactaatgaggttcttaataatattgatgagccggctgagagagaacagcaccgtaaagagtttgtcgactcattcctatactttggtgttttcgaaaatcatttggtcgttttgcagtccagtgcgctgcgctcacgtgagttggaggcgcacttaggttggctcgtcgggagcttcggtggggtagccgttggaactgccatcatactgcaggaccagccgtctcaggagaccttcgaccgtgtggcgcgagcctcggtgaagaaaatcgagattggatcgccagtgacgacagcagaggttgttccagaaggcgaacgtcagatgcagcagaatgctgcacctgcagaggaagtggaggacgcccgtagggtacggttcttcccaacaggattggctggtgatgtgatcaaggctgccttgggggccgattggttcaatcgcctcgaccttgaggaggaccttgacgaagctaacctcaaggtgagcctggaaatcacgtacgttcgtcagacaacacgtgttggccagcgaatgattgataatatcgcaacctcgttgcgccacgtcgatgaggcggacgtcaggatctccctgaatggagggggggagatcagaggaaatgacctgaaactatcaggaccaatctcggtcgcaaagctagagaatggactgctcgacgagggggttctataccataagatgcatggttggctgattggcaagcttcgtcaaggtgaggcagaccctgagcaaaacgcggaagagtga

SEQ ID NO: 358926 - DNA, 243 bp, Pseudomonas aeruginosa
atgcaagtacaaacccccgaagtcagcgggacgaaggctaccactgcccgcacccaccccaccatggccagccagcggctggacctgccgagcatctgtgacatctgtggcacggcccgctcaacccgcaagcacgccgcctgcagccgcatacgccagcagctcaagcgcgacgagtgggcgacctacatggccaaccttacggctaagaaagcccagggcggacgtcgctatgctcgttaa

SEQ ID NO: 358927 - DNA, 1731 bp, Pseudomonas aeruginosa
atgctcgttaaacgcacctacaaacacttcggtttctgctgtggcttgggctccggcgccgctgggttcaatgacagttccctccagatcgccaacatgctgggcaactggcgttgcatcggaggcgtcgatatagaccccgccggcctggccgatttcgaggagttcaccggcaccaagggcaccttgctcgatctgttcacacgggaacaatacatcgcgtatcacggcaaagagccgccagccggctggaaggaagccactctcgacgacattcgccgtgccgccggcaacgaggacccagacggcgtattcattagtagcccatgcaagggcgcctctggcctgctgcccgagtccatgagcgttaccccgaaatacatggccctgaacgagctgacgctccgctgcgtctggctgatgctggaggcctggcgacacaacccggtcaagctgatcatcttcgagaacgtcccacgcctggcttcccggggccgctatctgctcgaccagatcgtcaagctgttccgccactacggctacgccgtcgaggaaacggtccacgactgcggcaagattgccaacctggcacagagtcgcccgcgcttcctgctggtcgctcgccacctggaacgtgtcccggcattcctctaccagccacagacccacagcctgcgcggcgtcggcgaaatcctcgaccgcatgccgatacccggtgaccttgccctcgctggcccgatgcaccgtgtcccagcgcttcactggaaaacctgggtccgcctcgccctggtggagccgggcaaggactggcgatcgctcaaccgactggcgatcgaggacggctacctgcgcgacctgatcatcgtgccggagtgccacagcgggtatctgggcgtgcatggatggggagatccaaccggtaccattgccggccctaacagtcccaccaatggtgcctactcggttgccgatcctcgaccagtcagcaaggcggaatactcccagtacggagtaatcccttggaatcgccactccggcgtggtgaccgggcagcgcagcccggggcaaggcccgttcagcgtggcggaccctcgccctgactggaaccgccattccggcaacttccgcgtcgtaccctacgatcgagcagccggaacaatcatcgccggaggcaagggtgtacaaggtggctggcagtcggtggccgacccgcgcgtccttgatcgtaagaaaggcgacgcctacctcaccggcggccactatggcgtggtcggctgggacaactccgctggtgcggtatctgccagcgcccgccacgacaatggtcgctggtccgtcgcagacaccaggctgccagcggcgaatgaccgcttggcctgtgtcatccgcagctcctccaacacctggaacaggccgttcaccactctggagctggccgcgctccagtccatgttcgaccccgaggacatctggcagccgcacgaagaaaccggcgttctggagttggttggcaagcagttcatcctgagcggcagcaacgacggcgcctggcgcgagcgcataggcaacgccgtgccccgcaaggccggaaaggccatcgccgacgtgatgctcagcaccctgatgctttccgaaatgggcgaaaccttcaccctcaacagcatgccggtctggtgccgcccgctcgcgatggctatcagcctgagccgcctggaggtggcccatggctga

SEQ ID NO: 358928 - DNA, 1557 bp, Pseudomonas aeruginosa
atgaccagcaccgaacaacgcgccatcctgcgaagccagatatggaaaatcgccaatgacgtccgcggcgcagtcgatggctgggatttcaagcaatacgtcctcggcaccctgttctatcgcttcatcagtgagaactttgccaattacatcgaggccgacgacgacagcatccagtacgccaagttgcccgacagcgtcatcacttcagacatcaaggacgacgcgatcaagaccaagggctacttcatctaccccagccagttgttcgtcaacgtgacagccagtgccaacaccaacgaaagcttgaacaccgacctggcgcgcatctttgccgctgtcgaaagctctgccaatggttatccatcagagcgtgatatcaaaggtctgtttgccgacttcgacaccaccagcaaccgtctcggcaacaccgtggctgacaaaaatagccgcttggccgccgtgctcaaacgtgtcgccgaactcgacttcggcgactttgaaggcaatcacatcgacctattcggcgatgcctacgagttcctcatctcaaactatgccgccaacgccggcaaatctggcggcgagttcttcaccccgcagaatgtatccaagctgattgcgcggctggccatgcacaagcaagtcaacgtcaacaagatctacgacccggcctgcggctccggatcgctgttgctgcaagctaagaagcagttcgacgaacacatcatcgaagacgggttctacggtcaggaaatcaaccacaccacgtataacctggcgcggatgaacatgttcctgcacaacatcaactaccacaagttcaacatccaattgggcgatacgctgcgcaccccgcatttcggcgacgagaaaccctttgatgccatcgtctccaacccaccgtactcggtgcagtggatcggcagcgacgaccccaccctcatcaacgacgaccgctttgccccggccggcgtgctggcacccaagtccaaagccgacttcgccttcgtgctgcacgcgctgcactacctttcggccaagggtcgcgccgccatcgtctgcttccccggtatcttctaccgtggcggggcggagcagaagatccgccaatacctggtggacaacaactatgtcgagagcatcatttcgctcgcgccaaacctgttctttggcaccaccattgccgtgaacattctggtgctctcaaaacacaaggccgacaccaccacccagttcatcgacgccagcagcctgttcaagaaagaaaccaacaacaacgtgctgctggactcgcacatcgagcaaatcatgtcggtgttcgatagcaaggagaacatcgaacactttgccaagtcggcgccgttcgaggaagtggcttccaaggaatacaacctgtctgtcagcagctatgtcaacgccaaagacaaccgcgaagtagtggacatcgcccacctcaacgccgagctgaaatccactgtcgccaggatcgaccagcttcggagggatattgatgccatcgtcgccgagattgaaggcgaggagctagaggcatga

SEQ ID NO: 358929 - DNA, 1203 bp, Pseudomonas aeruginosa
atgagcgtcgcgaacttcatggacaagctgcttaatggcgttgccgtagagtggacggcgttgggtgatgagcgttttattgaagtggcgaacgctgcaaggagaccagtaaaggcttcgctacgtgtttccggggaggtgccgtattacggcgccaataatatccaggattacgtggatggatacacgcacgacggcgaatatgtactgattgcggaggatggttcagcaagtcttgataattactcagttcagtatgcaacaggaaagttctgggcaaataaccatgtgcatgttgtgagtagcaaaaaggggctgaataccagattcctctaccactatctgcgagcgacagacttcattccttacctgcccaacaaggatagatcaaaactgacaaaaggagagatggtcaaaatccctctccccattccctgccctgacaacccccaaaaatcactggaaatccaggtcgaaatcgtccgcattctggatgccttcaccgagctgagcgccgagctgagcgccgagctgagcgcccgcaaaaaacaatacaaccactaccgcgaacagttgttgagttttgaagacggggaagtggagtggaggacgttgggggacaaagatctcttcgaagtggcttctggaggcacgccttcaaaagaaaagaaggaatactgggatggtggcgacattccgtggcttaaatcagagtcgtgcaataacgaacctgtccattcggctagtaatttcataactgcgattggattaaaaaaatctagcgcaaagcttctgaaaaaggaaacgacattaattgctcttgttggcgcaacaattttcaaaactgcttttctcgaatttcccgcggcaacaaatcaaaatatcgccagcatcaaatccatgaatgccgaggtaatctccgacaagtttgtcttctattttcttacaagcctgtacgacaagcttaagtctgagatgcgcaactatggaatgcttaatctatcgacgctaaggcaattcaaaatacccatcccttccccggaagagcaagcccgcatcgtcgccatcctcgacaaatttgatgccctaaccaactccatcagcgaaggcctgccccgcgaaatcgaattgcgccagaagcaatacgagcattaccgtgacctgctgctgagtttccccaagccggaaacggtagaggcatga

SEQ ID NO: 358930 - DNA, 1143 bp, Pseudomonas aeruginosa
  misc_feature (489)..(489): n is a, c, g, or t
atgagcaagacgctgaccgaaatcgcccagcagttgcaagacgccaacaagaaagtgcagctgatctatgccttcaacggcacaggcaagacgcgcctgtcgcgtgaattcaaacaactgattgtgcccaaagccaatggcggagagggtgatgaggaagtcgatgcgcctgagttatcacgcaacaaaattctgtattacaacgctttcaccgaagacctattctattgggataacgatctagcgggtgataccaagtacaaactgaagattcagcccaactcttataccatctggctgctgacgctactcaaggacctgggtcaagatggaaatatcatccattattttcagcgttatgcaagcgacaagctaacgccgcatttcagcaccgatttttccgaaatcaccttctccttggagcgcggtaacgagggggactcccctcatatcaagctttccaaaggcgaagaaagcaacttcatctgnagtattttctacactctgctggatcaggctgtgacgatcctcaatgtcgccgagccgggagagcgtgagaccagcgcttttgaccagctggagtatgtgttcattgacgacccggtcagctctctcgatgaaaaccacttgattgagatggcagtcaatctggccagcctgatcaaatcaagtcagtctaatctgaggttcatcgtctcgacgcacagcccgctgttctacaacgtacttttcaatgaactgaatggcaagacctgttatatgctggagcggtttgaagatgggagttttaccctcactgaaaaacagggcgactctaacaagagcttttcctaccatcttcacctgaagcaaaccattgagcaggcgatttccgacaacaaggttgaacggtttcatttcactttgttgcgcaacctctacgagaaaacagccagctttctcggccacccaaagtggtccgagctgttgcctgacgacaaacagctttatttgagcagagtcatcaatttcaccagtcacagcacgctatcgaatgaagcggtcgccgagccaacgcccgcagagaaagcgatggtcaaactgttgctcgaccacctgaagagcagccaccgctactggcaacaggaagagcaaaatgcttga

SEQ ID NO: 358931 - DNA, 645 bp, Pseudomonas aeruginosa
atgcgtgccacttcgttgaagggcaagcatgtcgaaaccctgctgaaacgctggcaagccgaaggcctgtcgaccggaacgctgaagaaccgtatggcgcatctgcgctggtgggccgagaaggttggcaaggcaggcatcttgccagcagacaacaccaagctcggcattcccgagcggcgctatgtgaccaatgaaagcaaggccaaggaattgggcgacaggttggacaggatcaccgaccatcatgtccgcatgagcctgcgtttgcaggccgccttcggcttacggcgggaagagtccatcaagttccaaccccgctatgctgaccgtggcgaccatatcgccatcaagggatcatgggcaaaaggtgggcgcgatcggacggtgccaatcacgacgccggaacagcgtacggtgctggatgaggctcatcgcctggtaggcctgggatcattgattccggcgcacaagacttacatccagcagcggcatgtctacgacgggcagtgcaaggcggctggacctggtaaagctcaactcagtagcagtcaaagaatgagtgaccaacacgctcaacagcagatcagccatgaactcgggcatgaaaggttgaaagtgacgtcgatctatttgggaacttga

SEQ ID NO: 358932 - DNA, 285 bp, Pseudomonas aeruginosa
atgtccatgcacaatccaccgcatcccggcgagtctctgcgcgaggatgtgttgcctgcgatcggcctaagcatcactgccctggctgagcacctgggttactcccgtggccaactctccactgtgctaaatggccgtgccgccattagcgctgatctggcctatcggctggaactggcgggcttgggcagtgcgagccagtatctgaaggagcagatcgcctacgacctgtggcaggctcggcagcggccacatccgccgatcaagcgcctgcagacgcagtga

SEQ ID NO: 358933 - DNA, 1185 bp, Pseudomonas aeruginosa
atgtcacatcaaccttcagacatcatcaccccgaaagccttgttgctggatgagcggctgacgccgctggagcgcaatgcctggctgactttccgtgcgttggccagcagcgacggcaccgtggtcctcagctacgacgcgctacgcaaatatctgcccagcgcaccgggcagcaagcaggcggcccttgaaaccgtgtccagggccgtgctgtgcctgcggctgtccacatggattgccctggtcgaataccgccgtaaccccatgaccggcttctccatggccagccgttatgccgtgcgcaatcaaccgctgaccttcgtcgaagcatgccaggaagacgacgattacctgccgttgctcgaacgggcactcagccatagcagtgcgacgattcgccagttggctcggtctgtcctcgacgaggccctgcgccagcctgatgcgctggagaggttgcctgctgcagcgaggcagcgcatcgaacagctgaggggcaatgacgatgaccctgatccaggtggtccaagtgggccaacgccacccgacgttcgttgtcccatcacgaacaggcccgtcgaagccagggacggcatcccgaagtccgcaccggcgtccactacaacagtacgtactgtagaaaaagaagtattaaaagaagtacatacgtacccggcacattccgaagtgcaagtatccgggtcagatttgccgctccgcttccggcaactgccgcaggatcagcagcaaatccttatggcgcgtctcaggggcttggcgctggagcaacgccaggctgtgctggcggaatgggacgcgcgctgcgcctcgggtggtgtgcataacgccattgcctacctgtacgggctgatcaagaaggcggtgaacgggatgttcaagctgtgggcagcgcgcaaacctgctccgcagcaaggggctgcaacagtggccagcggattgcaggtttcgccgcctccagcctctgaatttcctgatgtcccagccgtcaaaccggcctctcgcgacgtggtggagcagtccttggcgcagattcggcaaatcctgcatccgcccgcaaaatcggttggacagatcattgagagcatggcgggcagtggcgtgctgcctactcggatcaaaggggcgcacgttgcaggaatgcctggatcgcttggcgcaacgtaa

SEQ ID NO: 358934 - DNA, 993 bp, Pseudomonas aeruginosa
atgatcagcagggaggatctgccgcaggggcgaggtgccgtcggactcgtcggcgggcagttcgaggcgtccggcccagccgtcgggcaggcgccccaggcgttcgaggatgcgccgcaggcgcgccgcgtccggtgcgcggcgggcgaggaagcgcaccgactccggcaggcatgcccagagcagcggcaggctcgccaggggcaggccgccgccgagcagcagcacgctctcccagcccagcgccgggaccatccgcgcggcgagcaggccgcccagcgccgagccgagggtgaagccgcagaacatcgcggtgaccatcagcgcgcggtgccggcgcgggcagtattcggaggtcagggtgatcgcgttgggcatcgccccgcccaggccgaggccggtgagaaagcgcagcagggccagggtttccaccgaaccggcgtaggccgaggcgaggctccagccgccgaagaacagcaccgagagcaggagcacgctcttgcgtccgaaacggtcggccagcgggccggcggcgaaggcgccgagggccaggccggccagcgcggcgccgaggatcgggctgagttgcgccgggctcagttgccagtcgtgggccagggccggggcgatgaagccgatggcggcggtgtcgaatccgtccatggcgacgatcaggaagcacagcgacaggactcgcaactggaaggcggaaaccgcctgcgcatcgatgaaagcctggacgtcgttcttgttgttcttgtcgggcgtaggcatgagcgttcctcggccgtcgccgcggcgacagcccggatgaagggcagggtgggcccgcgccgtgcgcgggcggtgggtcagaccacgcggacgctgagttcgccgaggccgtcgatggcgccgagcatccgctcgccgcgctcgaccgcgccgacgccttccggggtgccggtgaagaccaggtcgccggggcgcagctcgaagaagcgcgacaggtag

SEQ ID NO: 358935 - DNA, 306 bp, Pseudomonas aeruginosa
atgacagataaagacctgtacggcgggttgatccgcctgcacatacttcaccatgcagccgagaagcccgtcttcggactgggaatcatcgaagaactgcaacgacacggctacgagctgagcgccgggacggtatacccaatgctgcacgggctggaaaagaagggctatttgacctcacgccacgaacgcaccgggcgacgtgaacggcgtgtctatgagatcactgagcaaggccaagttgcgctggtcgaggcacgtgcaaaggttaaggaactgttcggcgagttgatcgaaggttgctga

SEQ ID NO: 358936 - DNA, 1206 bp, Pseudomonas aeruginosa
atgactaatacctccaccgatgaccgcagcccatggtcggtttttcttatttttctacgccttggattgacctccttcggcggccccatcgtgcacttaggctatttccgtgacgagttcgtcacacgacggcgctggttgtctgaacgcagctatgctgatttagtggcgctgtgccaatttcttccaggcccagcaagcagccaggtcggcatagcgttggggctatcacgggctggatatagcggggcgctggctgcttggacaggctttacgctgccttcggccgtagctttaatcctgttcgcgctgggcatttccaactatggggattccgtttcgccgggcgcgttgcatggcctaaaagtggtggccgttgccgtagtcgcccaagcggtatggggcatggcgcgcaacctgtgtacggatgggctgagagtcacaataatggcgattgccgcctgtgctgtcctgctcgtaccgtccgcgtgggggcaggttggtgtgattgctgccgcaggcatcataggccgactattgttcaagccagcacatactgttgagcacgacccactacctatcacggtcagtcaccgggccggcgcactttggctatcgttattttttgccctgctgattggcctaccgatcttggcaaaattgctgccaagtccaacgatggtggtagtggacgccttctatcgtgtggggtcactagtgttcggtggtggccacgttgtgttgccgctgctgcaagccgaagtggtgtcctccggctgggtcagtaatgaatccttcctcgcggggtacggggcggctcaagcggtgcccggcccattgttcacattcgccgcgttccttggtgcttcgatgagcaccgctccctctggctgggtcggcggtattgtgtgcctactggctatcttcgcaccctcttttctgctggttgtgggagccatgccattttgggagcgcctgcgtcgcaatacaggcatgcaagccgcgctggctggggtcaatgcggcggtggttggcctgctgctggccgcgttctatcaccctgtatggactagcgccatatttcagccgcaagactttgtcttggccctggtcgcccttgtcgcactgatgttctggaagctcccgccgtggctagttgtcgtcggcagcggtgcagcgggttggctgttgagtatcgcgctgtga

SEQ ID NO: 358937 - DNA, 738 bp, Pseudomonas aeruginosa
gtggccccagtgcagaccacactgcaaaaacgcatcctgcgcgccttcgttgctcggggcctgctggagaactgtgacgccaaagacatgctgggctacaaacacagcggcttctcggtggatgcgggggtgtgcatcgaagcccacgaccgcgctgcgctggagcggctgctgcgctattgcgcgcgtccaccgttttccatggagcgcctacgcaaagagggaagcaaactggtgtaccgctgtgccaaacagcgcagcgagcccaccagtgacaagcgtggtgccaaggcagatgagctgcacctcacaccgctggaactgatcgaccgcatcgccgcgctggtgccaccgccacgcacccaccggcaccgctactttggtgtgctggcaccaaactcgccgctgagagcggcggtaacggcgctggctcagcctgctgcgtcgcaaccagccacggtggagactgcacaacctggcgcgggcgtacctggggtggcggcgccgggcaacgcggccacacccacacccgaacctgaagcacgcccgaagcgagcggcgcattacttgtgggcggtgctgattgcccgcatctacgaggcatttccgctgctgtgccccatgtgcggtgggcagatgcgcatcattgccttcatcacccacagcgccgaaatccgccacatcctgaaccggggtctcctcgttttcagtgcaataagtgacggtacgaaaagctag

SEQ ID NO: 358938 - DNA, 276 bp, Pseudomonas aeruginosa
atgagggtggtgctgatgttgatggcgatcgcactggcgggatgcgccggcctggtcgagcctgagccccgcacggtgcgcgtggaggttccggtggctgtgccctgccgggtgccggcagtagaaataccgtcttgggcaaccgctggactgaagaagagcgacgacctacagactaaggttcgcgcattacttgcagagatccaccagcgacgagggtatgaggctaaactaatagctgcatacgcagcatgtcgagaagaaagcataagctag

SEQ ID NO: 358939 - DNA, 597 bp, Pseudomonas aeruginosa
atgcaccaccacggagccggcgaaatcgtggaaaggtgcgccgaactccaacttcagccattcctgcaagccgaaattgccgttccacaccaagccttcgaagaacgggtacacgaaggccacgatcagcgccgtggcgcacaactgcgggccgaaccgggcacgctcggcgatgccgccggagatgatcgccgggattgccgcggcgaaggtcagcaggaagaagaacttcaccagcgcatagccactgtccacggtcagcgccgctgccgggtggaagaaggtcacgccgtaggcgatccagtagccgacgaagaaataggccagcgccgagatggcgaagtcggacaggatcttcgacaaggcgttgacctggttcttcaggcgcacggtgcccacctcaaggaaggcgaagccggcgtgcatcgccagcaccatcaccgctccgagcaggatgaacagggtattggagccgtggatcaggacttgcaccgcactattcaggttatccatggattgaggcagccttcgcgcgtagtagagaaagcaccagaaacgcccacgcccacccttcaacgcaccatgacgaagcagtag

SEQ ID NO: 358940 - DNA, 1383 bp, Pseudomonas aeruginosa
atgacgcgtctgttggtcgaatgcacctatgtgttcgagcatcccaaggtcaattccggtattcagcgggtggtgcgcaacgtcatccgcgagttgccggaagccgacgagacggtggagtgcatcccggtggcaatgctcgacggcaccctgtatcaggtccacagcctggcgccgctggacccgcggccgcattcgccgctggtacgcctgcgcatcctggtggagcgagccgccaactacttctggctgggccagcgcaccctggaaaagcgccgcccgttccgttcctcgccgtgggcccggcgccttctctatgtagcctgccgcctgttcgccttcgccttcctcagcattccgctgcgcctgctcgaccgcatcctcggcaagcagcagcctgcacccgtgcgcgcgaccccgctcgaacatcgggccggcgaccaactggtcttgctggactcctcctggcacgccgatttcttcccgctggcggaacgcctcaagagcgagggcgtgggcatcgtctcggtgatctacgacctgattcccctgacccatccgcaattctgcgatgccggactggtcaaggtgttcaaccactggttcgactggatcgcggccaccgccgacggctacgtcgcgatttccgagaccatccgcgacgaagtgcgcgcggagatgctgcggcgcatcggcccggagaaggtcgcgcaacgctggttcgattatttccacctgggttcggagctggacctggtggaggacggcgcctccgtcgagcccgatctgctgcgcatgttcaaggccaaggcgccggtattcctgatggtcagcaccatcgagccgcggaagaaccacggttacctgctggatgccttcgagcgtgcctgggcccagggttcgcaggcgcggttgtgcatcgccggacgcatcggctggaagtgcgaggcgctggtggaacgggtgcggcagcatccggagctgaacaagcgcctgttcatgttcaacgacctctccgacaagagcctggagtacgcatactcccatgccgcatcgctggtcttcccgtcctatgtggaaggtttcggcctgccgctggtggaggccatgcagcgcggcctgccggcgatgggcagcgacatcccggtgttccgcgagatcggcggcgaattcatggcctacttcgacctcgccgatccgcagaccctggcgaacctggtcacccgcttcgaagccacgggcgagttcccggccgagcgaccggtcggcgaatggcgctggatcggctggcacgaggcgagtcggcaactgatcgcgcggatcctgctcgccctcggcaaggccccggcgcatggcgaggcagtacatgcggattgcggttaa

SEQ ID NO: 358941 - DNA, 237 bp, Pseudomonas aeruginosa
atggaggaggatgccgccggctacataactgaggtgctcggggacgttctcaaccagcgggaactgcaggtagtggttgcacgctatggtattggaggagcggaagcccagactcttgcgaccctctccgagatcatgggtgtttcgaaggagcgggtacgtcagatcgaatgtgaggcgctgaaaaagctgagagaaagtgagcacgcagaatgcctgctggagattttggaatga

SEQ ID NO: 358942 - DNA, 294 bp, Pseudomonas aeruginosa
atgcacggcccgatccgcagccaaacgcacgaaagcttgtgcccatgtagcaagaacctctcgcttcgtgccctccacaattaccgtataacggtctgcatctggcttgttagcaggatcaatctttacctctttggagaacttcttataaaactcctcctgctcatcttcgctttccgctccctcacccacctggggaaggtatatcttatagaagaactcttttttattctcatccgaaagcagattgcgcgaaaagatcgcatagatacttctaacagtatatgcatctag

SEQ ID NO: 358943 - DNA, 237 bp, Pseudomonas aeruginosa; identical to SEQ ID NO: 342595

SEQ ID NO: 358944 - DNA, 297 bp, Pseudomonas aeruginosa
atggcctatcagcgcgatatcaagctgaagctgactcagcttggcaaacccacacagaatgcgttcatcgagtccttcagcggcaagtttcgagacgaatgcccgaatgagcactggttctgctcactggccgaggccagaattcgcatcgcagcctggcggagggattacaacgagcaccgaccgcatagcgctatcggcaatctcaccccagcgaagtttgccgcgaaatggcgggcgagtcagcagcaaccacgacatgaaaaactgatatcaaccccaggacgtactaactag

SEQ ID NO: 358945 - DNA, 285 bp, Pseudomonas aeruginosa
  misc_feature (115)..(115): n is a, c, g, or t
atgagagctctgaattcgctgacccagaacctgatcgacaacctgacccagatcctgcagaaccccgaagaagatgccctgcagacgctcaggatatgcgctcctgtactgatcnaggagctgcagcagattcaactgagggcagtcgatcgccgggatatcgtctcgcagataaagcagctcctggatgaatggctgcaacaacatccacagcctgatacggcccaacaggcgctcatcgaggccgtggaccgcgcggagatcctacagcggaggcaagcgtga

SEQ ID NO: 358946 - DNA, 855 bp, Pseudomonas aeruginosa
atggtttccgaagcgtcagagccggtcgggcctctcaaagaggagcctgttcaatctacctcgcaaaatgttgaggctaatgggcttaaggtcgcggttgacgcggcgattattgagcatgcacagcagaatgccgccagtgaatacggcgaagctcgccgttacctgcaggtggatttcgacgggaatggcagcactgatgcagttgtgatgtacactcttgagccaactagtggcggtaattacagcaaccaatatcttgttcccctcatccataacggtgatgcgtgggaagctaagacacgcctcgatatcatgaactccgcctctgatttggctgacgaaggcaatggcgttctgagctatgtcgagctctcgcacggcccagatgatgcagattgctgcccgtccatggagacaaagcgtctgtataagtggaatggttctgtcttgcaggagtacaaaaatgatggtgcagtgccaacacaggcatcatccaaatctcttgctgaaccgcctttctactcagtgctcacgctgaatgattcatcggacgaaaaagaagtgacgaccaagcgagttttagagtgcagcatggcctcaaagcttgttgggcagttagagtcgatagacatcatcgcagataagattaatcggaccggcttggccaatactattaaccctaatccagaaattatggccgattaccatctgatgattaaaaaggattggtcgctaaaagatatgaatcgagcaagccaagatgagtatttagtggggatctataattctgaattctgccataagctccacgagcagccggcaattcaggtttccgatgtcccagccgattag

SEQ ID NO: 358947 - DNA, 2967 bp, Pseudomonas aeruginosa
atgccgcgtcgcttgatcctctcgaccatggagcgggacaccctgcttgcgctgccggaaaaccaggatgatctgatccgctactacaccttcaacgactccgacctgtcgctgatccgccagcggcgcggcgacgccaaccgtctgggtttcgcggtgcagctctgcctgctgcgctaccccggctatgcgctgggcaccgacagcgagctgcccgagccggtcatcgtgtgggtggccaagcaagtccaggccgacccggtgagttgggcaaagtacggcgagcgcgacgtgacccgccgcgagcatgcccaggaactgcgctcctacctgcaactggtgccgttcggcttgtccgacttccgcatcctggtgcgcgagttgaccgagctggcccagcagaccgacaagggcttgctgctggctggtcaagcactggagagcctacggcagaagcggcgcattctgccggcactgggagtgattgaccgggcctgctcggaggccattgcgcgagccaatcggcgagtctatcgcgccctggtcgatccactcacgcactcgcatcgagccaaactggacgaactgctgaagctcaaagccggcagcaacatcacctggttgacctggctgcggcaggcaccgctgaaacccaattcccggtacatgctccaacacatcgaacggctgaagacctttcaactggtggacttgcccgaaggcctgggccgatacatccaccagaaccgcctgctcaagctggcccgcgagggtggccagatgacgcccaaagacctcggcaagttcgagccgcaacggcgctacgcgaccctaactgccgtggtactggagagcaccgcgactgtgattgatgagctggtcgatctgcacgaccgcatcctggtcaagctgttcggcggcgcgaagcacaagcatcagcagcagttccagaagcagggcaaggcgatcaacgacaaggtgcgcctgtactccaagatcggccaggccctgctggaggccaaggaaagcggcagcgatccctacgccgccatcgaggcggtgattccctgggacgagttcaccgagagcgtcagcgaggccgaactgctggcccggccggagggcttcgaccacctgtacctggtcggtgagaacttcgccaccctgcgccgctacacgccggccctgctggaggtgctggaattgcgcgccgccccggccgcgcaaggcgtgctggcagccgtgcagaccctgcgcgagatgaacgccgacaacctgcgcaaggtgccggccgatgcccccaccgccttcatcaagccgcgctggaagccgctggtgatcaccccggaagggcttgaccggcgtttctacgaaatctgcgcgctgtccgagctgaagaacgccctgcgttccggtgacatctgggtcaagggctcgcggcagttccgcgacttcgacgactatctgctgccggcagagaagttcgccgcgctcaagcgcgcacagaccctgcctctggcgatcaacccgaacagcgaccagtacctggaagagcgtttgcagttgctggacgagcagttggccaccgtcacccgcctggccaaggacaacgaactgcccgatgccatcctcaccgagtcggggctgaagatcaccccgctggatgcggcggtgccggatcgggcgcaggcgctgatcgaccagaccagccagttgctgccgcgcatcaagatcactgaactgctgatggacgtggacgactggacgggcttcagtcgccacttcacccacctgaaggacggtgccgaggccaaagaccggacgttgctgctatccgcgatcctgggcgatgcgatcaacctcgggctgaccaagatggccgagtccagccccggcttgacctatgccaagctgtcctggctgcaagcctggcacatccgcgacgaaacctattcggcggccctggccgagttggtcaatcatcagtaccgccatgcttttgccgctcactggggggacggcactacctcatcctccgatggtcagcgcttccgggctggcggccggggcgagagcaccgggcacgtcaacccgaagtacggcagcgagccggggcggctgttttacacccatatctccgaccagtacgcgccgttcagcacccgcgtggtgaatgtcggcgtgcgcgattccacctatgtgctcgacggtctgctgtaccacgagtccgacctgcggatcgaggaacactacaccgacacggccggcttcaccgatcacgtcttcgccctgatgcacctgctgggcttccgcttcgcaccgcgcatccgtgacctcggcgaaaccaagctctatgtgccgcagggcgtacaggcctacccgacgctgcgcccgcttatcggcggcaccctgaacatcaagcacgtgcgcgcccaatgggacgacatcctgcgcctggccagctcgatcaagcagggcaccgtcaccgcctcgctaatgctgcgcaagctcggcagctacccgcgccagaacggcctggccgtggccctgcgtgagctgggccggatcgagcgcacgctgttcatcctcgactggctgcagagcattgagctgcgccgccgcgtgcatgcaggactgaacaagggggaggcgcgcaactccctggccagggcggtgttcttcaaccgccttggcgaaatcagggatcggagcttcgagcagcagcgctaccgggccagcggcctcaatctggtgactgccgccatcgtgttgtggaacacggtgtacctggagcgcgccacccaggcgatgggcgacacgggcaagccggtggacgacgagctgttgcaatacctgtcgccgctgggatgggagcacatcaacctgaccggcgattacgtctggcggcagagccgcaggctggaggacggaaagtttcggccgctacgaatgcccggaaaaccttag

SEQ ID NO: 358948 - DNA, 606 bp, Pseudomonas aeruginosa
atggatcatcaccaacgccagctggttctacgtactggccgtggcgctgatcctgatcagcgtggtgttcctcgccgtcagccgctacggcgacatcaagctcggccccgaccacagtcgtcccgactaccgcaacaccacctggttcgccatgctgttctccgccggcatgggcatcggtctgatgttcttcggcgttgccgaaccggtgatgcacttcaccaccccaccggtaggcgagccgaacaccgtgcaggcggcgaaggaagcgatgaagctgaccttcttccactggggcctgcatgcctgggcgatctacgccatcgtcgcgctgatcctggccttcttcagctatcgccacggcctgccgctgaccctgcgctcggcgctgtatccgctgatcggcgaacgtatctacggccccatcggccacgcggtggatatcttcgcgatcatcggcaccgtgttcggcgtggcgacttcgctcggctacggcgtgctgcagatcaacagcggcctgcaccacctgttcggctggccggtgaaccagaccgtgcagatcgctgtcgttttcagaagacgattgcaccaattaactggacgtaa

SEQ ID NO: 358949 - DNA, 510 bp, Pseudomonas aeruginosa
atgagcgcaataatcagtccatgcggtagataccgttaccgtcttgaacgcgagtgcggcatgccgctggaggggagcaaaacgctcgcctttttcgggattaaccccagcactgcagacgccatgatcgatgacgctacagtgcggaagtggcgcggcttcacgatccgaaacggcggacaccgcttcatcgtgggcaacattttcgcgtaccgctctacggacccgaaggcattaacccttcaagacgacccatttggtcctgagtggctgccgaacctgaatgcgatcatcgccgacgcagatgttctcgtgccgtgctgggggagcttgtccaagatgccgcgtgaccttcgcggtgcgccagcgcaggtcctggcaagcctggtgcgtagcggcaagccagtgatgcacttcggggtaactagctgcggccaacccaagcacccacttatgctgggttacgacacgccgctcattgcatggcccgcccagggaggtgctcagtga

SEQ ID NO: 358950 - DNA, 3705 bp, Pseudomonas aeruginosa
atggcgaacaatcagcaactgacactggccctccgcatccgcgccgatctgaacgacgcccaggacgcgctgcgtcgtctgaacggtaatgtcgatgaactgggccagagcaccaggacagcggcgcgggatgctgatcaactgaatgccgccacccagcgcatcggtggcggcatgacggcccttgctgcctccatcaaggccgctgcgctggggctgggggcgctgttcagcattcgggagatcatccagaccaccgacgcctggaccaacctccagaaccggctgcgcctggtcaccagcacccaggctcaactggcggcggtgaccgatgacgtataccgcatcgctcagttgaccagctccgcgctggactccaccgccaccgtctaccagcgtttcgcgcagaacgccgaccggctgaacatcagccagcggcaagtcgcatcgctgactgacacggtggccaagtccatcgcgatttcaggcgccagtgcgcagagcgccgaggcggccctggtccagtttggccaggctctggcgtcgggcgttctgcgtggcgaggaattcaactcggtcagcgagcaggcgcccgcgctgctgaaagcaattgccgatggcctcaacgtcaatatcggcgagcttcgcaagatggcgaacgaaggccagttgacggctgacgtcctggtggacgccttgagcaatgcggcggccggcgtgaacgatcagttcgccacccgcatcaagaccgtttcgatggcagtccaggaactggagaatgcgttcactcgcctggtaggtgagttcaccaatggccgaggtgcgggcgaagcgctggccggtgccatttccggggtcgccaatgtcatggacggcctgagcgataacgccgagctactgggcaccgccctggatgccgtgatggtgacggcagccgggcgagcggtggcggccatcaccgggctgaccactacctggctcagcaacgcggcggccagccgcgccgctgccatcgccgccgctcagaaagccacggccgacgaaggcgccgccgtggcggcacagcgagccgctgcccaggagctgcaacgggccaaggccgctgtcgcctcggcagaggccgaggtggtggccagccgcgcccgccaggccgccagcctccagaaccttcgggacgtccaggccgccctggtcgcggagcgcacgctggagcaggcccgccttcaggcgcagatcaccgatattggtcggcagcagtccctcgctcgcctggctgagctacggctgtccgaagcggccattatcaggcaggtccaggccgcagaggcggcgctcgcatccacgacgctggcgtcttcggccgccgtcaccgccgcctatcagcgtaggaccgccgcagtcgcggccgccgcttcggcgcaacaggccctgacggtcgccacgaacaacgcgaatatcgcctctgcggccgccgctgcggcatccagcttcctggctcgcggcatgggaacagtgacggcggtcggtggccggctgctgggattcctgggcggtcccatcggcgttatctcgatgattgccattgcggccacggcattcctggacttcggtagtgacgccgagtccggcatggaccgtgccgccaatgcaaccgagtcggctagcgtccgcatccgcaacgcctcgcggaacatcatccaggcgctgaacctgggtgacctgaagacggccaactacgaccagctcggcaagagcatcgagcagatcaagcagcaactggccgaggccgagcagatacagcagcgtgccgaggccctccaggacacggacgttcctacggtgccgggcatggacctcccgagcctggacgaagccaacgaacgggtacaggcgctgaccggagccctgcgcaggcttgaggcagagcgagccggcgaccgcttcaagaacgtgcgcgagggcaagcagtacctggagaacctggagcgccagaacgaacgcctacagaacctcaccgcgacagaagaagccctgaactacctgcgcaaggaaggtatcgacgccacgtcggagctgggtaggaagatcctggatcaggccgccgccaaccagaagctggacgccaccaacaaggccgaagccgagtccaagcgccagtctgaagcggcggcgcgcaagagcgctcagacgtcggaacaactgcgcaagagccaggagggctacgtcacccagctggaacgccaggcggccctgctgggtatgaatagcgccgaggttcgcgcctacgagctggccgagaaaggacttaccggagcgctaagggccagggcagaagctgcccttgctgctatcgatgccgacgagaagaggcgccaagccgatgccaatgcaagcgccaatgccgaccttcaggccgagtatctgcgggcgaccgggcgcaccgttgacgcggggctgctggagattcggacgaaatttgacgcgatgcgtcgggacttcgaaaaggcgggcaacgacgccggcctggcctggatcgacaagctaatccccgtcgccgaggccaaggtccgtctggatgacgtcaagcagaagatggacgacttgctggccgagcaacagcgagctgagtcatccgtcaacgtccagcaggatgccggcgttatcaacgaaatggacgctcggcagcgaatcctggacattcaccgagcgacctacgagaagctccagcagattcggccgatcctggaacagatggcccgccagcctggcgaggtcggccgagctgctgccgaatcgctcgcccagctggaagctgaagcggagcgactccagcagaccacgacgctgctcgaaaccaccttgcgggacgggctcactaccggctttaccgacgccatcaaggggctggcttccgggaccatggacttgcgcgacgccattacgtcgctgggtgaggctgtgctcaatgccttggtgaacatggcggcgcagaacctagcgcaatcgctgtccagcggcatcatggggctatttggtggcggtcagcaggacaccagcatgacgaccggcgcggcggctgttaccgcgtcggccggcgcgctttcgaccgctggggcgtcgttgctgactggggctgccgcaatccaggccgccgccgcatccctggccgctgctaacggcgtccagggcctgggcgcagccggtggcgcggcgggtgcagccggagcagcggcgggtggcggcagttggtggtcctccatcgctggagcgttcggttttgccagcggcggccatgtacgcggccccggtacgtccaccagtgacagcattccagctcgcctctcggactgggagtacgtcacccgtgccgccgtcgtgaagcaacctggcgctctggcatttctcgaacagttcaaccgttacggcatggccgcactggccggctgggcgaatcctgttcgtcacgcaacgggcggacgtgccggcattcccgcccccaacctgccggcccccgtccgtgtcggcgcgaacctgcccgaaccatccaagaacttcagtacctcggtcgccaactcgatctacctgcacgccgttcaggacacggatcagatggcggccgacatgtgggccggcaaaggcggcgaacacttcctggtctggctgaacaagaaccgccaggccgtcaagcagatactcggaaactag

SEQ ID NO: 358951 - DNA, 141 bp, Pseudomonas aeruginosa
atggaaatcctgtttaccacgaatgtaacggcccgggagttgatcggaacgacttcgaccgctacaacccaacagggagtgacctacgccgcactcttaaccgtgcatacactggaatgttcttcgctcaataaggattga

SEQ ID NO: 358952 - DNA, 924 bp, Pseudomonas aeruginosa; identical to SEQ ID NO: 325920

SEQ ID NO: 358953 - DNA, 234 bp, Pseudomonas aeruginosa; identical to SEQ ID NO: 329016

SEQ ID NO: 358954 - DNA, 183 bp, Pseudomonas aeruginosa
atgcggctgctccagttcagtggcggactgctgggggagaccgttgagatactgcggctgtttgccagttgggctgtgcgtagtggtaccgagcgcatcactggcgacatggtgacttgggaaaacttgcatgccctgggttatgtcctgccaagtgatcgcacacgccacctggagctttga

SEQ ID NO: 358955 - DNA, 822 bp, Pseudomonas aeruginosa
gtggggtcgccaggtggtagtcgcgccggatggcggcgccgaggtcgcacaactgggcagcccgcgccgcctggataccatctaccagaccaacatgcaggcggcctacatggcagggcgctacgcggccgcctacgaagccagggaaacccacccttactggatgtatgtggcggtgatggatggcgttacccggcccagccatgccgccctgcatgggaaagtgttcaggtgggacgatccgatctggcagcacatcaccccgcccaatggctacaactgccggtgccggatcgttgccttgacggaggccgctgttcgccgtcgcggcctgaccgtcgaatccagtcagggcaagaccggccaggtcaccgtcgaaaccggcgtggaccggcgcacaggggagattcgcgaacagaccctgaccaccctggagacgaccgaccgggccgggcggaagatccaatttcgccccgatgccgggttcgacggcagccccgtacagagtcacctgatggaccaggtgctgtacgacaaggccgagcgcaccctgggagccccagccgcaatcgacgaggtgcggggtgtgctgctggacccggtccgccagcgcgcctgggcggccttcgtagatcgcgccgcgtccccccaggggcagaccatgtccatcggcgtgctcgatccgaccgatatcacctacgccctagcccagggcgcccagttgcgggccggcgtggtcgccaccagcgataccgcaattcgcaacagtgctgtcgctcgcgagcagctcgccagcctgccgcagcgcttcgcccagcctga

SEQ ID NO: 358956 - DNA, 225 bp, Pseudomonas aeruginosa; identical to SEQ ID NO: 325055

SEQ ID NO: 358957 - DNA, 303 bp, Pseudomonas aeruginosa
atggccgacgagtacgtctacggcgtgcgctcccgctgcaatgtcggcttcggcttctggcaactggcggcgatgtccaccgaagaactgaaccaggtcaacttcgagaaagtttacgacgccatgcgcaaccagaaggccgacggcggtcgtccgctggacattcgtccgaacctgctggtggtgccgaccactctgcgctccaaggccaaggaagtggtcggggtgcagcgcctggccaatggcgcggacaaccccaacttcgaactggtccaggtactcgataccgcctggctcaactga

SEQ ID NO: 358958 - DNA, 195 bp, Pseudomonas aeruginosa
atggacagcacggagtattacgccggcgagaagatcaagcgggcgctggcccgctacccgttgcacgttatccgcgccgacgtcgacccggagactaatcccttcggcctgcagtgggactgctactccgacacgcctcaacgtatcgagcttgaggagccggccgcccccaccaagcgggagggaggtctatga

SEQ ID NO: 358959 - DNA, 195 bp, Pseudomonas aeruginosa; identical to SEQ ID NO: 358958

SEQ ID NO: 358960 - DNA, 207 bp, Pseudomonas aeruginosa; identical to SEQ ID NO: 328650

SEQ ID NO: 358961 - DNA, 309 bp, Pseudomonas aeruginosa
atggcccgcaaccgcgcgcaacagctgtgcatcgtcaccttggactatcagcgtttcctgttaccccaggctgatgcactcaagctgatagacatcatgagtcgagccgcagaggttcaggccgactacgcctctggagctgggttcaagtacaccgtcggcgaagcgccggaagtcgagttgacggtagtgcgccccagtcaattggtcatgccgcaggctgagccggccccagctacaccacgcactcgccggaagtctccggcccagctcacgcacgattccactcggctgctggaggggctctga

SEQ ID NO: 358962 - DNA, 381 bp, Pseudomonas aeruginosa
atgaaaaaactggtcttcgtctacaacggcgacagtggcctggtgaacggcgtcatgcactacctgcacaagcgcatttcgccgcagacctacccctgccagctgtgcggcatcatctacgacggcctgtcgctgaaccgcgactggctggccttcgtcaaggcgctgcaggtacccaccgagtacctgcaccgcgacgaatacgccaaccgctacggcgcgacctcgctggcctggccagcggtgctgctgcatgacgagcgggagctgctcgcggtggtcctgagcgccgagcagttcgccgatatccacaacctcgacgacctgcaggagcgcctcggcgcgttcgtcgagcaggccttcggggctacgccggcctga

SEQ ID NO: 358963 - DNA, 681 bp, Pseudomonas aeruginosa
atggacatccgacgaaaactgaagaatcttctctacgaacaggtagagcgcctggccaagggcgtcgccagcgccaagcgcctggagctgatcgagctgctctgccagtcgcccaaggcggtggaaacactggccgaggaagccgggatcagcatgaaactggccagcgcccacctccgcgaactgcgcctggtgcacctggtggaagccgaacgcgacgggcgcaatgtcatctaccgcatcgcttgcgccgaggtcgccggagtcctggtcaggctgcgcggcctggcggaacagcgctcccacgaaatgcaggacatgctccgccggctggaggcactggcggcgccgaagatcgagatcgattacccgcgcctgcggcgtcaggcccgcgccgggacactgatgctgctggacgtccgtcccgccgacgaataccgcgccgggcacctgccccgggccctctcgtttccgctggcggagctaccccggcggctggacgagctgccgcgcgagcgaatgctggtggtgtattgccgggggccgttcagcttcctcgccgacgaggcgacgcgcttgctggtggatgccgggttcaacgcctaccagtggtgtaccggcgccgccgactggctggcggcggaagactccctcccgcaacccatccgaggtgacacatga

SEQ ID NO: 358964 - DNA, 1449 bp, Pseudomonas aeruginosa
atgccgcttgccagtcatctgcgttgcgtggcgctggcgctggggatctcaaccgcgctgggctgcgcgaaccgcaaccaacccgcgccacgcgcggaaagcctcgaccctggcctgtcgagggtagcgggaacccgcggcgacgcgctgcccgcccagtggtggacgctctaccaggaccctgggctgaaccgcctggtggccaccgcgctgcgccacaaccgcgacctggccgcagccgatgcccatgcccgcgcgctcctcggccatctgcgcggcgcacagggcgaacgctggccacggaccgaggtcggctatggctaccagtatgggcgcgacggcgacgaccagaccctcgccgaagccaccgacgaggacgtacgcagccagtggaaacacaccgcccgcctcgacctgtcctaccagctggacctgtggggcgaagtccgcgcccgcatcgccgcggcgaaggcggatgccgaagcggcgcaagcggcgcgcgacctgctcagggtcagcgtggccagccagaccaccctcgcctacgtccgcgcctgcgccctggcgcgacgtgcagaggtacaacgccgatcggtcggcctgctcgacgcgagcctggcgctgagcgaacgccagctcgccgccggcctttccagcgagctgcagcgacgccggctgctggccgtgcgcgagcggacccgcgccgcgctgccgatgctcgaggcacggcggcgcgtggcactctacgaactggcgctgctcagcgggcgctcgccgcgccagttggacgctcgtgccgcgacctgcgccggcataccgcaactgcgccgtgccctgcccaccggcgacggctggagcctgctggcgcgtcgcccggatatccgcgcggccaagcgccggctcgccgccgccgacgcccggcgcgcgctggccgaagccgagctgtacccgcgcatcagcttcgccgtcggcgccgaaacctccgcagcgaccctcgccggcctcggcgccagcggcgcgctggcctacgcggccggcccgctgctgagctggcgcttccccaaccgggaaagcgcgcgaggccgcctggacagcgcagcggcagagcgcgacgccgccctggcgcgcttcgacggagcggtgctcggcgccctgcgcgaggtcgagcgtgccctggcgctgtatgccggcgagcgccagcggcgtgccgacctccagcgcgccctcgacgaacagcgccacgcctaccggttggcgcgcagcaactatcgcgccggcgccctcgatgccctcgagctgctcgacagccaacgcagcctggtcgccgaccgggcgcgcctggtcgacgccgagatgcgcgtcgccgagcgccaggtcgaactgttccgggccctcggcggcggctggcaagccgctcccagcccctcccatcaggaaaacggacaatga

SEQ ID NO: 358965 - DNA, 1152 bp, Pseudomonas aeruginosa
atgaaccaggcaatcagggaacccatcaaacacaccactggcgaaaccatgccagcagccacgcgccggcgccgaacctggctgctgggcggcctcgccggcgccatcgcgctcgccgccctgctggcgtggtggtggagcagcggacgcttcctggagggcaccgacgatgcctatgtacgcgccgactgggtggcggtcagcgcgcaggtctccggctacgtcgccgaggtgctggtggccgacgacgccgacgtccaggccggcgacctgctgctacgcctggacccgcgcgacttccgccagcgcctgcgcgccgccgaggcccgcgaagcggcggcgcaggcggcgctggaagcccagcgcgcgaagctggagaccctcgaccggcaacggctggagcaggcgcagacgatcagccgcgcccgcgccgatggcgaagcggcgcgagccgaatggcgccgcgccgagaccgactggcgacgctaccggcaactggccgacgagcatgccaccagtcgccagcgcctggagaatgccgacgcggcgcaccagcgagcgcgggcggcggcgcggcgggcaagcgccgaggaaggccgccagcgcgccgccagcgacgtgctgaagagccggcgacgcgaggcggaggcggcgctcgcccagcgccaggcggagctggaggaagccgcggcggcgcgcgaactggcgcgccacgccctggacgataccgagatccgcgccccattcgccggccgcgtcggccagcgcaaggtgcgcctgcgccagtacgtcacgccggggctgccgctgctggcggtggtgccgctggagcaggcctacgtggtggccaactacaaggagacccagctcgaacgcatccgccccgggcaaccggtggaactggaggtggacaccttcggccgccgctggcgcggccgcgtcgacagcgtggcgccgggctccggcgcggtgttcgcactgctgccgccggacaacgccaccggcaacttcaccaagatcgtccagcgcttcccggtgcgtatccgcctggacgccgacgccgccgagcggggccggctgcttccggggatgtcggtgatcgccaccgtggacactcgcgaaccggacggagcctccgccgatgagcgctga

SEQ ID NO: 358966 - DNA, 309 bp, Pseudomonas aeruginosa
atgtacgaaccctattggcacagccagcgcgaactgaccctgggcggcgagccgatccgcgacggccgggtggtcatcgcggtgaattccaacatgatggtgcgccaggccctggcgcgtggcctggggctctgcgagctgccgctgtacatgggcgagcgcgacggactggtgcgggtctggccgcagcgcgagcgacgccggccatacgaggtgtggatggttacccacaaggacctgcgccacaccgcgcgggtccgcgcggtgatcgagcggctggtggaggcgttcgccgaagcgccggcctga

SEQ ID NO: 358967 - DNA, 993 bp, Pseudomonas aeruginosa
atgcggcaggacttccgtgtctctacagcggacggtgttgcactacatgttcgggaggttcgcgggagcggagctatagagcgaccggcgctcatccttgtgcatggagcacgtgttcccggcataggatcgttcgatttggacgtgccaaacggatcactcgcgggcgatcttgcacgcctgacagggcgggccatcttcattctggatgcacgcggttacggtcagtcggatcgccctacagccatggaccaccccacacgcgaaagtaagccgctttcgcgcgcctacgaagtcatccgtgacattgatgccgtagcagcgattgcgcggcaacgcacaggtatcgatcaggtggctctgctgggctgggcgaccgggggcatgtgggccgcgtactatgcatcactctggcccgagcacgtcagtgaactcattacattcaatgcgttgtatggcggatcgggcaagcacgaagggctcggcttaggatcaagtaacgatgatcctgtccattcgggccgcttcaattcagcgataggtgggtatgcgctcaataccgcggcgtcgctattgccttcgtgggacaagacgatccccgtgcaggataagacggagtggcggggccctttggttacagaggcttacgcacgcgctgcgctctccagcgacccgcagtcgggcgaccatcagccgccagcgttccgtgcgcccctgggggctatggaggacagcttttaccaagcaaccggacgtcgattgttcgacgctgcgagcatcagggcagcggtgctcgtcgtccgctccgagcatgatttctggagtcggccagaggacgcggagaactttgttcatgatgcggttcacgcggaaagcatccgtgctgtcacgctggccaatgcgacccattatgcgcatctcgaccgccctgaacggggaaggagccaatttatcgatgaggttgtgaaatttcttgctggtgaaaggcaatag

SEQ ID NO: 358968 - DNA, 285 bp, Pseudomonas aeruginosa
atggtcgtgctgcactcctaccgtccgtcatcgcggggggtcaccaaaggcgatccggcctatgtggaagacgaagtgcgcctgaaccctgcaccgatgctgtcggtgccgcccctggtgctgcacgcaggggccgatacctgtgaccccctcgacagttccaaaggacgggaagcgttcttcacgggtcgcagcgagcgacagctgcttgatggactcggacatttcccgcagcgggagacgccgcagcttgtcgccgagagtatcctgcgatactgccaatag

SEQ ID NO: 358969 - DNA, 456 bp, Pseudomonas aeruginosa
atgcaatggattacccgtgaacgcccgaaaatcgaccgcatcgcctgtccctggctgattgcccgcttcatcgacgaaagcccggagtttctctacgtgccgtcgggcgacgtcatgaggatcgccgccgagaccggggctaccccctatgacgtctccggggcggaactgggtcaccagggcgatcaatgcagcttcgatgctttcatcgccaaataccagctgacggacccgtccgtgcagaagctggccatcatcgtgcgcgccgccgactgcgcccagccgcaactggcgaaggaagcggccggcctgctcgccatctcgaaagggctgtcgctcaacttcgccgacgaccacgagatgctgaaggcaggcatggtgatgtacgacgcgctctacgcctggtgcgccgacacgccactgaagaaggtcgctcgcctgcttggtttgaagtga

SEQ ID NO: 358970 - DNA, 132 bp, Pseudomonas aeruginosa
atggtcaagcagaacagccggacggatgaatgccacatcatcgaaaccacgctttcaaggtcgaggaataccgtctggatgggcgcgaacgtgggttcggttcccggattgccgttgtacgaaggcgagtag

SEQ ID NO: 358971 - DNA, 264 bp, Pseudomonas aeruginosa
atgactgccaaacgcaaagtcgaggtgttcagcgccggctgcccggcctgcaccgatgtcgaaacccttgtaaaaagcctggcctgctcctcgtgcgaagtcgatgtgctcgacatgcgcgacttggccgtcgcacagcgcgcgaaggcgctcggcgtgcgctcggtgccggctgttgcgatcgacggccggctcgccggctgctgcgttgatcgcggtgtcgatgaggcgagcctgcgcgccgccggcctcggccagccctga

SEQ ID NO: 358972 - DNA, 267 bp, Pseudomonas aeruginosa
atgaggatcgagctcttctacacgccgggctgtgccaagtgtgccggggcgacagcggcgctcaaggcggcggtgcaagccttgtccggagtcgagtggtgcgaggtcaacgtgctcgatgatctcgaccgcgcggtcgatctcggggtgctgacgctgcccgcgcttgccgtggatggcgagttggtgttcaccgcgctcccgacagccgaacagctcgttgccgaactgcgtcggcgcgatggagtgcgcagccatggagcttga

SEQ ID NO: 358973 - DNA, 696 bp, Pseudomonas aeruginosa
atggagcttgagacgctacggcagctcgcctcccaaagcgtgggggtcgccagcggcatcagcctgctggccgggctgctgttcagcgtgagtcccttggcgatagccgcattgccggtgccacttgcctacgtcacccgagcccgcgcgccaagcgaggcggcccgttacggccttgccttcatcggcggcctgatcgccgcgcatgcgttgctgggtgccgtggcaggactcggcggtcaaggggtgcaagcgctggcggggcgctggtgggggttgctgctcggcccctggctgatcgtcttgggcctgctgtggaccgggtgggtcaagctgccgttgccgaaggtcggattcagagccaagcgggtcggcagtggctggggcgcgtttgcgctcggcattccgttctccgtcgccgtctgcccatcctgcgccccggcgctcgtcgtgttggttggcgcggcggcagccagcggctcgccgcttttcggcgccgccatgctgatcagtttcgccatcggccgcgcgatccccttggccttggcggcggtcgcaatggagtggatcgagcagatgaaaccgctcggacggttccgccgcgcctttgagctgaccggcagcctgctgctgatcgtcaccggcctgtatctgctcaatggctacttcgcctttttcccctggctcacctggtag

SEQ ID NO: 358974 - DNA, 399 bp, Pseudomonas aeruginosa
atgaagaccgattcgtcgcagcttcggcaaaacgccgtcagttggctgacgctgttcaccgcgaccggcacgctggtctgctgcgcgctgccgatcctgttcgtcacgctgggcctgggcgccgccgtggcggccgtcaccagcgcagtgccgttcctggtcgcgctggccctgcacaaggcttgggtgttcgcgggttccggactgatgctgctcgtttccggctggctgctctaccggcctgggcgagcctgtccgagcgaccccgagctggcgcgcctgtgcgagcgagccgaccgctggaaccggcggattcatggaatctcagccgccctctggggcgtcggcctcttcgccgcctatctggcgctgccgatccgtatctggctcggggtctga

SEQ ID NO: 358975 - DNA, 315 bp, Pseudomonas aeruginosa
atgcaaagatcccatctgaaacacttggcagcagctttggcgctgtgcttgccactgatggccttcggcgcggagcgcctggtggtggacattgctgtcaagggcatgacctgcccgttctgcgcctacgggctggagaagaacctcggcaaggcgagcgaagtcgatcatgcaagcgcgagcctgaaggggcagaacgtccgcatcgtgctcaaacccggtgcgcaggccgatctcgatcgttacaaacagctcatccatgatgccggctttacccccggcgaggcgaaggtatccaaggaagaagccaaatga

SEQ ID NO: 358976 - DNA, 201 bp, Pseudomonas aeruginosa
atgacgagcaaccaagctgtgactgtcgactgctgcgtctgctgcaaggaaatcccgctcgacgccgctttcacgccggaaggcgccgagtacgtcgagcacttctgcggactggagtgttatcagcgcttccaggcgcgagccaggacctgcgagcgcgaacccgagcgagcgccagatcaacagcctgatcgatcctga

SEQ ID NO: 358977 - DNA, 777 bp, Pseudomonas aeruginosa
atgatcgtgcccccatctgacgaaccgaccgccgcgcaattggcgcgggcggccgaacggcaggagctggtccttcactaccagccgatcgtcgcggtgggcagcggcgcgctcatcggcgcggaggcgctgttgcgctgggcgcaccccgacctcggtctgctggccccggagcatttcctgccgctggccgaaactgccgagctgatgccgcagatcggcgattgggtattgcgcgaagcctgccggcagatgcgtgactggcaagcggacgtccctgggtcattccgcctggcggtcaacgtggccgccagtcaggtgagagcagacttcgacaccggcctgcggcagatgctggccgaggcgcagttgcccggcgaccggctggagatcgagctgaccgaaacggccgcgttcggcgatccggcgctgttcgccctgttcgacgccctgcgcgccgtcggcgtgcgctttgccgccgacgacttcggcaccggctattcgtgcctgcggcacctgaagtgctgcccgatcaccacgctcaagatcgaccggtccttcgtggcgggactcgcggacgatgcccgcgaccgcaccatcgtgcgcacggtgatccagctcgcgcacggcctgggcatggacgtggtcgccgagggcgtcgagacaccggccagcctcgacgtgttgcgccaggccggctgcgacgccgtgcagggattcctgttctccgcgccgcgaccggccgacgagttcatccgcttcgtgagaggaggatag

SEQ ID NO: 358978 - DNA, 219 bp, Pseudomonas aeruginosa
atggatgacgatcaagcgccgggctggcgggcttacgcctggggtgtgctggccgcgctgacctgcccgtgccacttgccgatcctggccgccgtcctggcaggcacgaccgccggcgcgttcctcagcgagcattgggggatcgcggcgctcgccctggcagttctgttcctgttggccctgactcgtgcgctgcgggccttccagagccggtcatga

SEQ ID NO: 358979 - DNA, 354 bp, Pseudomonas aeruginosa
atggacgattacaccatctccaggctcgccggggcggccggtgtcagcgtccatgtcgtgcgcgactacgtgctgcgcgggctggtgcatccagcgcggcgcacgccgggcggctatggcctctacgacgagcaggcactcgcgcggctgcgcttgatgcgggcgctgttcgaggccgggatcggcctcgatgagttggcccggctgtgccatgccctggatgcggacggcgatgccgccgagtgcctggcccgcttgcgcacgtggcttgcggcacggcgcgagcggctggagtccctcgaccggcagcttgccggcatggcggatgccaatgtggagtgccgttatggatga

SEQ ID NO: 358980 - DNA, 423 bp, Pseudomonas aeruginosa
atgaatccgatcatgcgtatcgccgacaaggccggcgcgctcggcgcgctggtgtctgccatgggctgtgcgatgtgctttccggcactcgccagtctgggcgcctccatcggtctgggctttctgagccgttgggaagggctgttcgtcaatacgctgctgccggccttcgcctggctggcgctggtcatcaacgcgctgggctggttcagccaccggcaatggcaccgcagcgcgctcggcatgctcgggcccacagtcctgttgctatcactctatccctggttccagtacggctggagcagttatgccacctacagcggcatcggactgatgctggcggtgtcggtctgggatctggtgtcaccggccaaccgccgctgcggaccggatggctgcgaactgcccgcgaagcacggctga

SEQ ID NO: 358981 - DNA, 2601 bp, Pseudomonas aeruginosa
atgccccacggcggccaacccgccgtggactttcctctgttcgacaaggctctttccatgctctcagacgccagtccctcccataagcgtccttgtcagccgatggtagacgacgcatctgaccggacgcgtttgccgatattgatcccggccttgctgatgtttgcctccggcgctgccgccctggtctaccaagtgctatgggtcaagcaactgtccctggtggttggggtcgaggtctatgcggtcactaccgcgatcagcgccttcttcgctggcctggcgctgggcggcctggctttcggtcgttgggccgaccgcttgcgcttcccggtgttgctgtacgtcggtctggaactgctggtggctttcctcggcctcgcggcgacgctcggcctggcaagcgctggcggtcccttcgcccgtctcgaaagcagtgccggaccgctggcctggctgttgccgttccttctggtggggctgccggctttcttcatgggaggtaccctgcctgtcttgatgcgagccctgcagccggcagatgggcaggtggggcaggctggaggagggttgtacgctgccaataccgccggagccatcgccggcaccttgctggcggcctttgttctgttgccgggcctgggggtcttcggcagcgcctgtggcgccgcgcttctcaacctgctggccggcctggccgcgctgctgcttcggcacagggtcgtggcgtgtcccccgcgagccgcccaggcggcgtttccgcgcactcgcgcggcacgcctggcgattgcgctctactgcctggccggcggagtagcgctggggtacgaggtggtctggacgcaagccatcgtaccgttcatgagcacccgaaccttcgctttttcggtggtccttgctacctacctgggtgggctggtgctgggcagtgcgctgcattctcgatatgtcgatcgcatccgtgatccctgggggctgttcggcctcctgatcgctgcggcggggctcttggcgactctgcagatcgccggcctcggcgactggctggtgggcgcgcaaagctacgccgaaacgatggttctgcaactgggtggcagcgagctggccggtatgtccgcgcgtttcgccgtggccgctctgtgtgtggtattcctgcccacgacgttgctgggcgcggccttccctctggtcctgcgtttgtcggtggacagcgcctatgtcggccgggatgtcgggcgggtggtggcgctgaacaccctgggcggtatcgtgggcgtgacacttaccggtttcctgttggtgccgggcctgggtctggtacggacgctggttgtgctagccatgctgtccgcgctcatcggtctactggcggtatggcgtggcgaccgggttcgccggacgatgcgcgcgggcgtagtgctgagcggcgtagccaccttgatcagcggcgcgctgatttcccctcgccacctggccgaactcatgccggccgcgcgcaatggaaaaatcgatttctaccaggagggccgtggggggaccgttgccgtggtggaacagggacggggacaggaacgattcaggcgcctgtacatccagggtgtgtccaacagcggcgacgctatgccatccctgcgttacatgcgcctgcaagcgctcctgccgttgctcatccatcgtggcgagccacgctcggcattggtcatcggcttcggtactggcattaccgctggcgccatgctgcgctaccgcgacctgcaacatccggtggttgccgaactattgcccgaggtgctggctgccgcgccgctttttcgaggttcatttgacgccatccacgatccgcgtctggaggtccgcttgcgggatggtcggcgcgaactgctgagcaatggcgatcgctatgacatgataaccctggagccgccgccgccatccgcggcgggagtggtcaatctgtactcgcgggatttctaccggcttgccgctgatcgcctgggcgagaacggcatcgtcgcccaatggcttcccttgccgacccagaacgatgaggacagtcgttctttggtgcgcagcttcatcgatgtcttcccctacgcgtcactgtggacgacagagttccacgaaacgcttctgatcggctccctccagccattggagctggacgtatcgcgcattcgccagcgcttcgcgcaaccggaggtcgccgccgcgctgggcgaggtcggagtggcctcggtggaggcgttgctggcgacttggctgaccgaccgcacgggccttgaggtctatgccggcgatgttcgaccggttacagacgatcatccgcggatcgagtacgctccctgggtccgggccaaggaaatcacccgggtactaccggccctgatggctctgcgtcgcgcacctccgttggagaacgccgggcccgaggtcgtcgccgcgattgacgaccaatgggtacgtttgcagcgtttctacggtctgagtctgcatgcctatcgtggcgaccgcgaagcctggagcagagaggcgcgtcgtgtattccacgatgatggtggcaacccctattaccgttggtttttcggtgcgcctgattcttga

SEQ ID NO: 358982 - DNA, 1575 bp, Pseudomonas aeruginosa
atgaagcgttcaggaagatggttttcgcggttcgccctggtggcgacgatagcggggtgtaccgtcgccaacgcggctgacaagccgaacatcctggtgatattcggagacgatgtgggtcagaccaatctcagcgcctattcgttcggggtggttggctacaagacgccgaacatcgaccgcatcgccaaagaggggatgatgttcaccgactattacgcggagaacagttgcaccgccgggcgctccactttcattaccggccagtcggccttgcgtaccgggctctccaaggtaggcatgccaggggtgaaggtcggattacaggcccgtgacgtgaccatcgccgaggcattgaaggcacggggttatgccactggccagttcggcaagaatcacttgggtgaccgtgacgagtacctgccgaccaagcacggtttcgatgagttcttcggtaacctgtaccacctcaacgccgaagaggagccggagcgtccgtactggccgaaagaccccgatgaccccttcgtcaagtccgcctcgccacgcggggtgatccactccaccgccgatggcaaggtcgaagacaccgggcccctgaccagcaagcgcatggagaccatcgacgacgacaccacgcaagcggcgatcaacttcatcgacaagcaggtaaaggccgacaaaccgttcttcgtctggatgaacaccactcgcatgcacgcctttacccacgtacgcgagtccatgcaggggcagagtggcatgccgggcaacgactatgccgacggtatgctcgagcacgacgggcacgttggcaagctgctgaaaacgctggacgacctaaaggtcgcggacaacaccatcgtcgtctattccaccgacaacggccccaaccagtggtcctggccggatgcggccaccactcctttccggaacgaaaagaactccaactgggagggcgcttaccgggtgccggcgatgatccgctggccgggacacatcaaggctggagaggtgaacacccagctgttttccggactggactggttcccgaccctgctcgctgcagcgggcgacacctccatcaaggatcgcttgctcaaggggaccgacatcggcgggaagaacttcaaggtgcacctggatggctacaaccagcttgatttccttaccggcaagtccgacaagagcgcgcgcgacgagttcttctacttcaacgacgacggcgaactggtttccatgcgtttcggcgactggaagctggtgttctgcgaacagcgggctccggggggattcaaggtctggagcgagccgttcacctgcctgcgggtaccgaagctgttcaacctgcggatggacccttacgaacgggccgatacggtttccgaccagtactacgattggctgacgaagaacgactatctgctcttccagggaactcagaaggcggcggcgtttctgcagacgttcgtcgactacccacctagccagcgtcctgccagcttcagcattgaccagatccgcgccgatgtggacaggaagattgaagagaagctgagcaaggggggccgctga

SEQ ID NO: 358983 - DNA, 1011 bp, Pseudomonas aeruginosa
atgccccgtaactccactgtgcgcgccgcgtactggctgctcaccctgttgctgttcctgccgtcgttcggcgaagccgccgatgcccttccatcgtggggcaacgggccgtcgcgtcaggccatcgagcgctttgtccaggccgtgacccgcgaaggcggcaaggacttcgtgccactggccgaacggattgccgtattcgacaacgatggaaccttgtggagcgagcagccgctgtatttccaggtgtcgttcgctctggacgaagtcaggcgcctggccccgcagcatcccgagtggaagaggcggccagcgctcaaggcggtgctggatgacgaccagaaggccctggccgctctcggcatgccgggcatgttagacatcgtgatggccacccacgcaggcttcagcagcgaggccttcaacgagaacgcccgccgttggcttgccagcgcggtacatccgcgcaccggcaagcactacaccgaaatggtcttccagccgatgctggagctgctcgactacctgcgcgccaatggcttcaagacctacatcgtgtccggtggagaggtcgccttcatgcgcgccttcgccgaggaagtctatggcattccaccggagcaagtgatcggtacgaccctggccacgcggtttcaggagcgggatggccaaccggtcatccagcgtctgccaaccctgatccataacgatgacggtccaggcaagccggaaagcatcgaggccatcatcgggcgtcggccgattctggctttcggcaattccgacggcgatctgcagatgttgcagtggaccgttgccggaaaggggttgcggctcgccggcctggtgcatcacaccgatgcgcggcgcgagtgggcctacgaccggcagagcaaggttggccgtttgagcagagcgctcgacgaagcgaaagagaaagattgggtggtagtcgacatggccagggagtggaagcggatttatccgttcgaccaggacgcacgccaatga

SEQ ID NO: 358984 - DNA, 1314 bp, Pseudomonas aeruginosa
atgaggcatcccgccctgctctggctgctgttcatgcccctgctggcactggcgggtgagcctgaggtcaaggttcgtagccgcctgcagccggcggagacggtgctggttggtggcacgctgaacctgcaggtcgatctgctggtggatacctggttcactgcggcaccgcagttcccgacgctcatcatggacggcgcgctggtatccgagccccgcagcgaggcgccgcacctgaacgaaaggatcgaaggcaagccgttcttcggcgtgcgtttcgtctaccggatcaccccgcaagaggcacgacgcttcgatgttcccgcgctggccatccaggtccgagcggggcagggcagcgggctccagaccgtgcatgctcctgtgtcgagtttcgttgcccgacagcctgtcgggagtggaccggaggatggtgctcgtctggtcgcgcgacgggtgaccctgagccaggaggtgcggcactcccacgagcccttgcgcatcggtgacagcattacccgacgtctgcgcatacaggccgaaggcactcaaacaatgctcataccggcaccggcgtttgccgaggtcaaggggctcaggcgctacgtacatacgccgtcgctcgccccgctgagcgacgggcgcggcagcgtacgcggcggcgagcgtgaggatgcggtcacctatgtagtgaccgaaaccggccgttttcggctgccccctgtctatttgcgctggtgggatgccgccagtggcgaggcgcatgacctctccgtggccgcactggagataaaggtagctggcagcgccggctaccgatcgccgttctcgatcaacgatgacctgcgcaccctcgggcacaaggtgcaggtgcatgtcgccggccactggctgccggtgttcctgagcctgctggtgttgggtggggcaggctacttcggacgttcctggatcgcttcaggggttggtgctttacgcaattggcatcggacgcgcgagcgtgtgcggctgaactcttccggttatgcatggcgccggatcgctggagagctatcggcggtgcctccgcaactgagcgccttgtatctgtggattcatcggaccagcggttgtcgcgaaatgagcgcatacgcccgaacgctgccagccgcgctagctgaacctttgctagcttttcaaaaaaatcgctatgggcgtgaacaatccgaaagctcggcaaccgatctgatgaagatattgcccgggttgcgtcgggcgattgctggcggcaggtcggcttctgcgcggcacgggttgaaagagctgaacccctga

SEQ ID NO: 358985 - DNA, 1569 bp, Pseudomonas aeruginosa
atggacattgagctttccgccttccacttcctgcgtcccttctggctgcttctgctgttccccggcgtgctcttcccgctgttgtggcggcggcgccacgatctggtccggcacctcgacggcatcatcgctccgcacctgctgcgcagcctggtcgtcacaccagcggacagccggcgcttgcgcccggtgtatctattgggcgtgttgctggcgttaggcgcagtggccgccgcaggaccgtcctggcaacaggaccgaccggacttcctcgacaatcgggcaccgctgatcctggtcctggacctgtcgccgtcgatggacgccaacgatgttccgcccacgcgcctgatcgcggcgcaacacaagctgcgggatctcgtgcgacgccgtgccggcacccggatggccctgatcgcctatgccggcagtgcccacctggtgttgccggccaccgacgacccggggttgctggacggcttcctgcaggccctgtccagtgcgctcatcaagcctgggggcaaggatgtcctgggcgtcgtcgggctggccaggcatctgattgatgccgaaggggagccgggaaccctggtgctgttcaccgacggagccgatcccgggcagttcgagcggatcggagaggcgctgcgaggcagccggttgcaggttctggtcgtggcggtgggcagcaaggagggcggcatgctccgcaacgccgacgggcagaaccaggcccttgatggcaagggcctggagggcctggccagagctgccgacgctccccttggcagcctcaccctgaacgacgacgacctcgactggatcgaactgcatgcccagcggcatttccaggtgacccggggagcagagcagcaattgctctggaaggatgccggctactggctttgttggcccttggcgctgctggcgctgctgggcatgcgcaaaggctggcgagtgaattggctgagcggctggctgttgctcctgagtctcggttggccggtagcgccggtgagcgcgggccccctggccgatgccttccttaccgcggaccaacagggccgctgggctttcgagcatgggcgatacccgcaggctgcggcgctcttctccgatccttactggaaaggcattgcggcataccatgccgcggactacgcggttgcactggacagcttcgcccgcgtggatacggcgcaggctgatttttatctcgggaatacctatgtacgcctttcaaggttcgcgcaggccatcggcgcctaccgccgggctctccatcgccagcgggagtttcccgaggcgcgggccaatctcgctttggccgaggcactgcagaaagatcatgacgcccagcaggaggccggagcgcccgcgaagcaacccgacaacgtggtactggacaagccacccggcgcgggcaagacggtaacgctcacggtggaacggggcggctccgacgagcaatggctgaacaatcttggcacttcgccggcccagttcctccaacgcaagttcctgttgcaggactccgcgcgtcgatcgcccgcaggaggcgcgccatga

SEQ ID NO: 358986 - DNA, 1014 bp, Pseudomonas aeruginosa
atgtggcagtttgattacccctggctgctgcttctgctgcctttgccgtggctgacatatcgctatctcgatgtctatcacgagtcgcgtagcgccctgcgtgtgccgttcttcgctgccatgattcgcgccaccgggcaggtgccgggcccctcgggctcggctggtggaggttggcagtggctgctcaatcttctgacttgggggctgctattggctgcatgcgcccggccggtgtgggtggaaaagccgatcgagagagaacggccggcacgcgacctgatgctggccatcgatatctcgcaatccatggatgcccgtgattacagtgagtcctccgggcaacaggtggatcgcttgacggcggtgaaagaggtggtgcgggacttcatttcccgacgcaaggacgaccgcatcggcctcatcgtcttcggcagcggtgcctacccgcagtcgccgccgaccctggaccacgccagcctgctgttgttgctcgacgagatcggcgtcggcatggcgggcccgaacaccgccctgggcgactccatcggcctggctatcaagctgctggccggagccagggagcaggagaaagtcatgatcctgctcaccgacggcaacgacaccggcagcgccatcagcccgcggcaggcggcgagcatggcccgcgatcgcgggattctggtgcatacggtcggtatcggcgatccacaggccaagggcgaagccaaggttgacctgcagaccctggatgacatcgcccggatcaccggtgggcgctttttccgggcaggcgacagcgacgcgttgcaacaggtctatgccaccctcgatcgaattactccgcggcgggtgaacgtcttcagccactcgttcaagcgcgatctgttctggctacccctgggcgccgcgttgcttgcgctgacgctgggccacggcatcgcggcgctggcgtcttgtctgcccgcaccggaaaggcaacgtcggaaagggaggggccgggatggacattga

SEQ ID NO: 358987 - DNA, 507 bp, Pseudomonas aeruginosa
atgaacgcatcgactgtaccgagcatcgatcagctccgggaactgccgttgccggaattgtccatcagctatatcccgcaaacctggggctggctggctgtactgctggtcatactgtcgtcgttggcgggctggacactctggcacctgcgccgttggcatcgacagcgctaccggcgcgaggcgctggcgcgtctggagcggttggcgcaggcgctggacgagccacggacacgcctggcggcgcttcgcgagatgccacgactgctcaagcgggtcgctttgtcgacgccggcaggggaggccgccgcgtgcctgaggggagcggcctggcaagactatctgcagcgccgttgcccgatagcgcttccggcggacttcgcccggagcctggcgatgctggcttacgctccggacagccggatacaggccctggccgattcggaggcgcacaagctgctgcacgcctgccggaagtggatcgagactcaccatgtggcagtttga

SEQ ID NO: 358988 - DNA, 951 bp, Pseudomonas aeruginosa
atgcaagagaacggtctcgacgcggatggcttcgtgtacacctcgctggaacggttgatgctgttcgagcatcgggtgcgtggcctgagctttctctcccgccagccgctttccagcgtgctgtccggcaaccatgccacgcgcttgcgcgggcgcggcctcagcttcgacgagttgcgccagtacacgcccggcgatgatctgcgccgcctggattggcgtgcctcgttgcgccatggcaagcccttcgtgcgcagttacacggaggagcgcgaccggccaaccctgttgctggtggaccagcgcatgagcatgtatttcggctcgcaacgcagtttcaaatcggtgagtgcggctgagctgggagccctcggggcctggatggcgctgcatgccggcgaccgggtgggcggcatggtattcggcgaccagcggatcgagtacatccgcccgctgcgcagccgggcccgggttgaggctctgtgcgcggctatcgtccggcacaacagggcgttgcgtgcgacgtgcattgctgacgaggagcaggggcaactcgaccgggtcctgcgcgagtgtctgggcatggctgggcacgaccaccttatcgttgtcatcagcgatttcgctggcgctggagagcagacgctacaactgttgcggcggttgcgcgtacacaacgacgtactggctctacaggtgttcgatcctatcgccttgcatatgcccagtcgcggccgggtgacggtgacccagggcgaactgcaggtcgaactggaggtggcgcgccgccgagtgcgccgcccactgggagaattcctggctggacgtctgcgggacgtcgcggccttgctgcgacgcagcagggttccgctgctgatgttcagcagtgggcacgacagcctcgaacagttgcgcgaggagttggggtgtctggcgttgcgcaagcgatga

SEQ ID NO: 358989 - DNA, 975 bp, Pseudomonas aeruginosa
gtgagcgcccgcgaacaaataaccgccctggaagcccgtgtcggaaaactggtactgggtcaggaacagacgatccggtacatcctgcttggtctcctggccaacggtcatgtcctgctggagagtctcccgggcctggccaagacacgtaccgtgaaagccctggcggccaatctggatgcgcatatgagccgcattcagttcactccggatttgctgccgtcggatattaccggcggggaaatcctccagcaggacgagttcggcaatcaattgaggttccagcccgggccgttgttcggcaacgtcattcttgccgatgagatcaaccgggctccggccaaggttcaggcagcgttgctcgaggccatggaggagcggcagatcaccgtggctggacggacccattcgatggcggggttgttcatggtgctggcgacgcagaaccccatcgagcaggagggcacctacccactgcctgaggcacagatggaccgttttctgatgaaggtgctgatcgattatcccaaggacgaggacgaggtcctcgtcctgcgcttgctgcgtggtgaagagcaacgactgcaggggatgagtgagcggcccgagccgctggcacaggagatcgtcttcgaggcgcgccgggaaatcggtcaggtgtacgtttccgaagccatcgaccgttacctggttgctctggtcggcgcgactcggcgaccgggcgattacgacgctgaactggctcgttggattgacgttggtgcgagcccgcgtggcgctatcggcctggatcgggtggcgcgtgcgcatgcctggttgtctggcaatgatcatgtgtcgccggacgatgtccgtgccgtgttgcacccggtgctgcgccaccgcctgtcgctctcgtacgaggcggtcggcgatggtgtcggcagcgatctggtgctggatcgcctgctcgaccgcgtggcgattccggcctga

SEQ ID NO: 358990 - DNA, 1296 bp, Pseudomonas aeruginosa
atggcacagaacaatcttcgcaacgcctatctacctacgctggcctgtgcgctgggtctgcttagcggcaatgtctgggctggcggtatcctgatctacgaggcgggccaggaaggcaacggcctggcgaacgccggagcggcggcgcaagccgacgaccccagcgtgttgatgagcaatcctgcgggcatcaccgagctatccggcacccaggtcagcgccaacgctcagttgatcctgggcgacttccgtttttcccgcaacgacgccaacaatcagttcgacggtaacgaaggcggaaacgctcttcagtatcttcccggcgccagcctgttcatcagccatcggctcgatgatcgctcggctatcgggttcggcatgtacggcaacttcggacttgccctggattatgacgacgattgggccgggcgctatttcacccaggatgcggcagtgatcggtgtatcgttccaaccgaccttcgcctacaagctcaccgacgacctctccgtcggcatcggcccacgcatcatgtatgcctactaccgcaccgagatggccatcgacaacaacctgttcggcctgcgcgagcgtcccgacggtcaactggaatacaaggacagcgataccggtgtcggggtcaatctgggtttgctctaccatctcaacgagcgcacccgcatcggtctcgcctataccagcaagatagacctggagttcgaagacagtcccagcgtacgcaacgttagcaacccgattctcaacacagccctgcagcgcctggacgtcgactccctcggactggacttgtcggtgccgcagactgtactgctcagcgccagttacgacctcaaccccagatggaggctactgggcagcctgggctggcaggactggagcgagttcggccagatcggcatcgaagtcgatgccggcgccagtggcgtcgatcgtaccgtcgaccgtcaatacaaggacacctggcacgcctctgtcggcactcaataccaggctacgcagaagctacgctggagcatgggcctgggctacgacagctcggcggttgatgaccaggaccgcacggtggacaaccccatgggcgagacctggcgcctggccaccggggtcaactacgaactggagaaaggcctcgatcttcacctggcctacacgctgctctggctgggtgacatggacgacgaacagaccaaggcgcgctcgggcaccactctgtccggcacctaccagaatgccgccctgcatatcctgggaggaggagtgacctggcgcttctag

SEQ ID NO: 358991 - DNA, 675 bp, Pseudomonas aeruginosa
atgatgaaatcgacgcctctgctgactaccttatgcctggcggccctcacgctaaccgggtgcgcgagcaaatacgttgcacccgagcaatactccggcttcctccagaactacagcgccctcaaagaggacgagtccccctccggggcggcggtcatgcgctgggtccagcccaacgtcgatgtgaagcgctacacgagcgtctatatcgagccaagccaactctatccgaaaccccagcccaccgaaaaagtcccggatagcaccctgaaaggcattacccagtactacgatcaagcgctacgacgcgaattcgccaaagccctgccactggccaccagccccggagccggcaccctgatcgtccgaccggccatcacggctgtcagcgcgtcgaccaagggactgcgtccctacgaagtcattccgatcgccctggtcgcggccggagtgagtctcgctaccggtattcgcgaccaggacaccagcttggccaccgaagccgcgtttatcgatgccgcgaacaaccaggtagtcgccgaggtcgtgcgcaaaggagccggcgccgatctggaaaactcttcccaggtcatgacggcgcaagatgtcaaggcagtgttagatgtctgggcgtcggatatgggcaagtccttccaaaggctcaagggcaaatga

SEQ ID NO: 358992 - DNA, 2262 bp, Pseudomonas aeruginosa
atgctgtctcccgctcttgcagggtcgccggagcacggcgggacgcccgccctttcgaagaaccgggaggggtatgccgaggcgtccagttgccttggttgccacgctgcgcaggcccgcgaatggaagggctccgaccatgcctgggcaatgcgcgaggcgacccgggataacgtgctcggcgatttcgacggacgaaccttcgaggaggctggagtcaaggcacgtttccatcggcagggggggcgctactatgtcaacaccgaggggcccgacggcgagcaggcggatttcctgatccgctacaccttcgggcattacccgctgcagcagtatctggtggcctttcctggagggcgcatgcaggccctgaccatcgcatgggacagtcgccccaggaaagatggagggcagcgctggttttctctttatcctggccagcgcttcgcgccgaacgacgcgttgcactggaccgggcgctcccagaactggaatgcgatgtgcgccgattgtcactcgacccgtctgctcaagcattacgacgataaacacgatgcgttcgccacgacttggcaggagcagaatgttggctgccaaggctgtcacggtccagggcaggcccatgtcgactgggcgaaacagaacaagagcgctcccaaaggctatggggcatcgaaagaggtccgccttcaggtcgatttcaaggcattgggccccaaggggctggtcgagcagtgcgcgttctgccacggccgacggcagtcccttggggttggccaggtgccgggcgccaggcagctcgacacttcgcttccggccgtcctgcgtgccgacctgtatcacgccgatgggcagatcaacggtgaggtctacgagttcggctccttcagccagagcaagatgtatgcggccggggtgacctgcacggactgtcacaatccgcatactgcgaaagtacgtatcgagggcaacgggctctgtgtgcaatgccacaacgcccagccgccggcccgtttccccacgctgtcggcgaaggactatgagcgcccggaacatcaccatcatgcggccggctcagccggagcccagtgcgtcaactgccatatgcccagcaagacgtacatggtcgttgatccgcgacgcgatcacgctttccgcctgccgcgtcccgacttgacggaaaaaaccggatcgccggacgcctgtaccggctgccacgacgacaagacaccagggtgggcggcagcggccatcgaaggctggttcggacagccgcggcgtcccgaacattacggggaaacattcgaggccgtccgtaatggtctgggcaaccctgtcagcctgctgggcgcggtcatcgccgacctgggcaagcccgagatcgtgcgcgcgacagcggcccagcagttggtcgaactgggggttcccgacctggcaccgctgagctgggcgctcaaggatgacagcgcgctggttcgtgcctacgcgattccgggattcgcccgggtgccggtccagacccgggtcaagttcttgctgccactgctggacgatcctctgctggctgtccgcgacgaggctgtgcgggcgttggcggacgttccgcccgaggccctgccggcggaacggcgggaggcgttcggcgcccagttggcggactatgagcgccgtttgcgcggcaatgcggacttgccgggcggtcgcctcaacctggccgtgttcctggagcgccaagggagaacacaggaggccaccacgcagtatcgcgaggctcttcgcttgaacccgtacttcgttcccgcccgggtcaacctcgtgaccctgtatagcgccgccgggaacagcgtggcggccgagagagttctgcgcgacgggttggccctggacggcctgcccagcggtgatcatggcaacctggcctacatgctggcgctgctgctggttgagcacggcacgccgatggagggcctggagtggatggagatcgcggcgcaacagctcccgggcaactcccgggtgcgctacaaccagggcctcttgctggcccagttgcaacgtcgcgacgaggcgctgcaggtacttcgcaaagggctcgaagagtctcccgaggaccccgatctgttgtatgcgctgatctacctgcataccgcggcgggacaactggaacaggctcggggctatgtgcagcgcctgcgcgaggtcgctccggacgatccgcgcctggagccaataaaccggcaatggaaaggggcgggcgaataa

SEQ ID NO: 358993 - DNA, 1110 bp, Pseudomonas aeruginosa
atgcaaaataaaaagtctttggaaaccctgctctcacgggagtttctcgacgtcctgatacgtgccggcctgatcgccgtactggcgattttctgttatcagatattccacccattcctgagcgtgatgctctgggcagtcattctggcggtgaccctgcatccattgaatcgccgcatctccaacaccctccgtatatcgccaagcaaagccgccctgctgctggtactactctctctgctctgcctgattgtgccgctggcactgctcggagagtcagtggccaactcggtccagacagccttgcattcagcccaggacttggaactcgccattcctccgccaggagaaaaggtccagggtttgccgctgatcggcgagccgctgtaccgcatctggagacacgcctccgaagacctgtcctgggccatgcagcaggtcgcaccgcacctgaaggatctcagcaaggtaatcgtgatcaaactggcaagcatcggcagcggtattctggtgttcgtcctggccctgatcatcgccggcctgtttctcgctaacggcgaacgtagcgccctacgctccaccgccatcgcgcagcgagtcttcagtccagagcgtgggccggagttggccgctctgtgttcggccaccattcgcgcagtggcccagggagtggtgggcatcgccttcatccagatgctactggtcggcataggcctagcgatcatgggcattccgggagcaggcttgttggcgctgatggtcctgctgctgggcatcatgcaattgccggtgttgctgatcaccctgccggtggtcctctacgtattcagccaggacggtatcagcattgccaccatcgtcttcgccgtctggaacatagtggccgggctaatggacaacgtactcaaaccattgatgctcggacgtggcgtagcggtacccatgccggtggtccttatcggtgccctcggcggaatgatcagcaacggaatcatcggactgttcatcggaccggtgatcctggccgtgggatatgaactcttcaactcatgggtagagcaagctgccaagccgccagcggtaaacccttctgacgacatggcccactag

SEQ ID NO: 358994 - DNA, 1056 bp, Pseudomonas aeruginosa
atggacagtattcgcggcacagccttcctgcaattcgctgaactgctcaccaagcatggcgcatcgatgcgtgactatcttgcgcctcaccgcatcagcatcgatgtggtcggcaactacgagaagagtctcccgtacaagagtttggtgaatatcttcgaggattgcgcacgaactttgcggattccggagttcggcatggagctggcgacccgccagggctcctccctgttgggtcccctgcaatacctgtcccagtccgcccctagcgtcggagatggaataatcgcggtacttcgatacatgcgcatctacagtccgtcgatccgctgccgcctggagcgccggccaggccagatgctgctgtacttcgagaacacgctgcgctccagcctggagacgccacagatagtcgagaagtcgatactgcacggcaacctgatggtcacggagctgctcggtagcccatgccgtcccaaggcggtactttttcgccatgaaccacaagccagcctggccatctaccaaaagtatttcagttgcccgatattgttccagcaggactacaacgccatcgccttgaacctggaggatctgcagcgcccctgcatccaccacgacgccatgctgcattccattgtgcgcttctacctggaaacccattgctccgcgcacgcagacctgcacctcaaagtcaaacagcaaatccaggcattgctgccgaaacaacgctgtaatctcgaattggttgcacagactctcggcctgcatgtcagaacgttacaacgccgcctggccagtgatgggatcgacttcgagcagcaagtagaccagttgcgccgacagcaggccgagcagttgctgcgcgactcctccctgagcatcagccagattgcccgtgagcttggctatctgcgcactacctcgttctgccgggcccatcaacgctggttcgcgatcagccctgtggagcatcgacgattgcatggctatcttccctccggagaatccaacgatcaggccccagagacgcccagtagttggcaagggcggtag

SEQ ID NO: 358995 - DNA, 1014 bp, Pseudomonas aeruginosa
atgtcgcatccaactcccgtagtccttgcctccgtgttcgtagccgcactgttggctgcgccaagggagcgcggcatcgatgtcgacggcctgctgcatgcggcaggcatcgatccccggttgccccaggacctgcaacaccacgtcaccgtcgatcagtatgcagctttgctgcgcaagaccatcgagaccttggacgacgagggtttcgcactgttctcgcgcaagctgcggcgcggtagcttcgcccatatggcgcgctccgccttgtgcggcagtacgttggtcagcgccctgcacaagttcacccacacgttgcatctgctgcaggacgacctcaacccggtgctgctggacgatgggcgtcacgtgcggctcgaactgcacttcatcacgccggagctggaagcgcgccacttcgcccacgaactggtgcttcgcctcgtatggcgcttcatgacctggctggaaggcgggcgcctgaaggccacggggatagacctggcctttccgcaaccctcccatgccgagggctatctgaagatgttcccgaccgagctgcgcttcggcatgccctattccaccatctggttcgactcgctcgccatgcaggccccggtaagacgggacagcagcaacctgcgcgactatctggacaaagccctgctggacttgctggtgccggccataccgacacgcgtcagcgaccgagtgcgacgctacctgcaagaggagcacacgcggcaatcgaactggccgagcctcgcgcagacgagccgtgcgctgcattgctcgggaagctcgctccagcggcacctggcacaggaaaacacctcgttccagtacatccgtgaccacctgcgccgcgactgggcgatctaccgcctgcaaaccacccggctgcccatcccccagttggccgaggagctgggcttcgccgacagcgccagcttccagcgcgcgttcaagcgctggaccgggcgcccccccgggcaggttcgcaaaggccgctga

SEQ ID NO: 358996 - DNA, 1617 bp, Pseudomonas aeruginosa
ttgaatcagaacgttttcgactacgtggtggttggtgggggatccggtggttgtccggtggcggcgcgcctgagcgaggatccgcaggtcagcgtgtgcctgctcgaggcgggtggcagcgataagaaactcctgattcaggcccctccgggagtggtcgtgatgatgcgcgaaggtttccacaactggtccttcgaaaccgtgccgcagcgagggcttaacgggcgcaagggttaccagccgcgcggcaaggcgctgggtggctccagttcgatcaatggcatggtctatgttcgaggccatcgctgggactatgaccattgggagggtttgggcaaccccggttggagctatgacgaggtgctgccgtacttcaagaaggcggagcataacgagcgcttcggcgagagcgagtttcatggcgccggcggtccgctgaatgtcgccgaactgcagtcgccgagcccgttgtgcgaggtcttcatgagcgctgccgaggcgcagggcattccgcgcaccgacgactataacggccgcgagcaggatggctgcttccgttaccaggtgactcagaagaatggggagcgttgcagcgctgccaagggctatctatggcccatactgggtcgaggcaatctcaagctcttcctcaacgcttccttccatagcctggtcttcgacggcaagcgctgtgtcggtgttcggtaccacaatggcaaggatgtccaggaagtacgcgcacggcgcgaggtgatcctcgccgctggagcctttggttcaccgcaggcactgatgctgtccggtatcggtccgggcgcagaactgaccaggctgggcatcccagtgctggtggacctgccaggggttgggcagaacctccaggatcacatcgactacaccgtgccttaccgggtcagcaacccgcaaggctgtttgggccttaccgtcggcgccggcgtcaggctggcggttgcggcagtggaatgggcgagcaagcgtagcggcatgctgaccaccaacttcgccgaggccggcgctttcctgcgttccgatccgctcctggacaagcccgacctgcaggtcgtcttcgtcaccgccgtggttgacgaccatgggcgtcacttgcactggggttatggctatagctgccatattgaggtgctgcggcccaagagcgttggtagcgtcaccttgcgtagccgtgacccgctcgatgcgccgctcatcgatacgcgctttttcgagcgacgcgaggatctcgagttactggttcgggccgcgaagatccaggcgcggatcctggagtcggagcattttgcccgcttcgggccggaactcatctatcccgtcgactggaacgatgaccgacagatcgagcatgacatccgcaatcgggccgatacccagtatcacccggtcggcacatgcaagatgggaccggagtcggacccgttggcggtggtcgatgcgcgcttgcgcgtgcggggagtcgaagggctgcgcatcgcggacgcgtccatcatgccgagcattcccggtggcaacaccaatgcgccgaccatcatgatcggcgagaaggctgccgacatgatcaaggaagacgcgcgccaggcgtaa

SEQ ID NO: 358997 - DNA, 828 bp, Pseudomonas aeruginosa
atgcggtgtgttaccggcatgttcgagacccagtgtggagcctctcgtggcaagcctcattcctcgctgaccataggccggagccaattgccgcgttaccagggcgccacgctggcagcgatgcacgctggcttcgggcaccgctctgcggtcgctagcgagttcctgaccccgctgggttgcagcctgtctctcaacggtgttcgcaagcacccgaggttttgccggaaacccggctcacgctcgatggggtttctgcccaggggccaccgcttgaggttggagtactcgaccgaagacctgcgggaggacgtctcggattggcgtttcccgatccatgtcggtgttgctgggggcggctgcgcacgcggcaggcaagcggacgacgcccaaggcgtccgacttcgatccgccaagcagcgatgggctgaagcgcctactcgcggaaatactcgacgattaggaagccgcccaggtcgatgctgtgttcgaagacgccggttatttctcctggccgccgttcgatcctattgcagcgacgtttctgcgccgatgcgtccgctatcgatcggatgctacgacatatccattccggtaccggcctgctcaacgacagggactggcatgcctctggacacggtgctcctgtgggagacgtgggctcgctacggtcgaggctcggaggaggtcgcgagttcggccacggccgtacggtggccgagtggcgcagttgtccctccatccttgccttccgcccattgctggcggtctgcagggactgacctgccgctgtacctgggcaaggcagattcgaacgtgaagccttga

SEQ ID NO: 358998 - DNA, 159 bp, Pseudomonas aeruginosa
atgtatctgcccctgctttttcaccgtttgaagagggtcgacgccaaagcaaagtttgtcttgatcgccttcatccagcgctatggggggggcgtggcgcagtgcctgccagtagcctccgccgcacgaatgatctgggtctgccacagcgagagttag

SEQ ID NO: 358999 - DNA, 1278 bp, Pseudomonas aeruginosa
atggcggctttgccgtccagctcgcccgatatggttgggttgcacaggatctctgccgatgtttttgcctggctggagacccaggcattaagcaacaccgaagcgggtgagtcgacctggctgcgcctgacccaacgacacggccgaagggtcatacaggttaaaagcttcgtgggcgtgattcgctgccccgatggcttccaaattgaagtgttgcctaaactgggtaaaaccaatggcaaagcagatgcgcgacagctgctaatcgagatgctgtgttgcctgggtagctttcgccacatccaaacctacagtgcccagttacaggcgcgccgaatgcctttactggaggtattcatcgctgagtttctacgagcagtagatcacaccgtgaagcgaggcctacgcagcgattaccgcgcccagcaagacaacctctttgctctgcgcggcaagctgaatatggcacagcatcttcgtctcaacctatgccgtcgtgaccggttctataccgagttcgacgagttttcgctcaacagaccggaaaaccgcctactgcatacagccctaaagcgcgtattgaagtggagtgcctcgcaagcaaaccagcaactagcacgagagctgtgtttcgtattcgccgacattcccacatctgtccagatcaacgcggactttgggcaggtacggccagatcgcgggatggcgcattacgacgctgcaatggcctgggcgcgactgattcttcaggatgagtcgccgctcactggcacgggccaacatcccgcaccgtccctgctcttcccgatggaagctgtctttgaggcttttgtcgcgaaacatcttgcccgacaactcaactcaggcctcgacctgcgccttcaaacacgcagcctgaggcttgtacgacataaagagcatgactggtttcagctcaaaccagatctgctggtactggaagccaaaaccaacctcttggtactagacaccaagtggaagctggttgatgaaaggaaggccaatagcaaggaaaagtacggacttgatcaaagcgacttctaccagttgcaagcttacggccagagctatctcgacggagacggcgatgtgatcctgatctatcccaagaccgaaaccttcagtcagcccctggcagtatttagctttcccaagtcccccgacctgtgcttgtgggttctccccttctgcctgcataccaaacagatgctcttaccgccctgcggcagcctcgctccgtttttctcgtcggccacctga

SEQ ID NO: 359000 - DNA, 2505 bp, Pseudomonas aeruginosa
atgagcgactttcagaaagagtacgccctgtgggatgaatttctgtctatctggcctgcctcccgactagcctgcatgacgctggacgaatatacccaggcagggtcgaaagacagcttcacctattggatcgaatcacgcctcgatgaactgggcagcatctggggtggctcgtctttcaagttcggcgtgttctcgcgcaaggacactgaagataagggttcggacaccaagctctcctactcggaaacgcacggttggtattcatcgcttggcacatcagccgaggctgctttcgacaaagtccggggtttcgtagcgcaggtggcggactggtccgccaaaggcgatctggacgccatcgagtcctttgagcacctgggcgaggcctttaaatggaagattgccttccactaccaggatcggaagacgccagtgatcgtcgacattttcaagcgtgcgcctctggcggtgtttgttggcggtaccgcgagtcagcgcatggccacgctgcagaaggcgacactggccaaacgcccaagcgaccttggcattctggagttcgggcggcaggtgtgggaggcgtggagccaaaagaatctggcgatctggaaactctcgcatggcaacccacccaatttcaccgatgccgagcgtcagcaatatctggacggtcaatgggcagtgatgcatcaagacaccggcaaggagcaaggcaaaaaattcgcagaggcgccggtaggagccctgttcttcttgtgccacggcaacagtccgcagcgtattggccagttcacgtcgaaagccatgccctgctccaagggcgacggttggttgcagcgcagctaccgcctgctcaaaccggcccagcgcaccgaacgctacactgccaactccaagaactggtcgccgcagggcaactctaccttctggcaagtgggtgcacacgacctgcccgaattcgagtccaccttgctcaagcctttttttggtacggatttagctgaagtggccgcactggccggcgaacccattgaggcggccagcttaggcgatggagtggcaccgccaccggtcgctaccacagatacaggcaagaatctcaacgcagcgtgtttcaaccgcatctactacggcccgcccggcaccggcaaaacctacacgctaatgcaactgctcaaaagcgaatacgaagataacgttgccaccaaatcggcagaggaatggcggcaccaattcattacggagaagattgccccccttacttggtgggaaggtgtagcagcatccttatacgatctaggcggaagagctagtctgagctcgttgtatgaacaccgcttcatcaaggcgatacaagggacgaaatccgggattaatgtttcatccagagtcagagacactctgcaaaaacacaccaccgaaacgtcaaccacggtaaaactgaaggcccagttgagccccttcattttcgataaaaacggtgagtccgagtggatacttgctggggattggtcggaagagtgctctgagttaatcgagctcgtcacgcaactgcagcgggggccggaggaaggcgacagcatccggcgctatagctttgtaactttccatcaatcctacggctatgaagagttcgtcgagggcttacgccctgttctgaacagcgacgatagggctggcaaagtggagtacgaaattcgtcccggcgcattcaagaagctctgccacgaggcaaggctagcgcccgaccaacacttcgcgatggtgatcgacgaaatcaaccggggcaatatcagcaagattttcggtgagctgatcacccttattgagccggacaaacgcgacccgctcaatggcaacaagccgcccctggaactgacgctggcttattcgggcgagaagttttcggtgccagcgaacgtggacatcatcggcacgatgaacaccgcggaccgctcactagccctgctggacacggccttgcgcagacgcttcgacttcgtgccgcttctgcccgacacccgtgctgtgaaagacgccgatgacccacacagtgcgccgctggcgggtttgatggtgactacagacgcaggcgagatcgacgtgtgccggatgctggagcgaatcaacgaccgcatcgaggcgctgtacgaccgtgatcattgcatcggccacgcctatttcacccatctgtggagcaagacggatggcccggacagattcgacgcactggccgacacgttccgcaatcgtgttcttcccctattggaggaatacttcttcgaggattggcgcaagattcgcttagttctaggcgacaaccagaaacctgacgcagcccaattcattacagagaatgactcacacgagcaggatctgagcactctctttgggagtgatcacagcctggatagctataccaccaagcgccgctacctatcgcagccttcagcttacagcgaaccagccgcctatctcggcatttaccaaccctcgacctga

SEQ ID NO: 359001 - DNA, 1179 bp, Pseudomonas aeruginosa
atgtggctgtttaccaaattcggtttcttttcagtcgtgaacaagggcgataacgatgaactcacggtgcgcagccgcaccaagagtgatctggaccgactccgcaatcactatctgccctcgctttcgccatcccgcgcccacgaaggcaccgactacccctggcgggcgaccacatcacccaccgccttgggcgaggcaatgcgcgctattgcgcaggacattgactatgcgaacttcaaggacgaagtagcacttggcctagggaacgatcgtgccaaccgctacggcaaaatctggtcggcgctttacgatatgccggatgatctgcacgaacctcatccggacggcttcgagggcctaccctggcaacaaaccgccagcaccggtaaagccgtggcctatggcggcgtggtgatcgaccctaatggctacctgctgatgcgcgaggtgaaaaaccacttcgatggctatgcgtggacatttgccaaaggccgccaggataaaggggaaagcccaaggcagaccgcactgcgcgaagtccgcgaagaaatgggcatagacgccaccattctctcagccatacccggtgaatttgctggcggcaccacgatcaaccgtttcttcctgatgctgacagaccgtggagcgccagatctcacctttggtaaccgggagactgagcgcctgatctgggcaaacccagaggaggccaagcgattaatcgcacaatcaaccaacagtaaaggattagagcgcgaccttgccattcttcaggcagcgctggaccttctgccagcagagccgccactgaaacgtgctatggctcgccgtaccgactggcaaagcagattcatgccagccgcacgagtcacggtgccgctggaaacccgctactcgcctcaggaaatggcaaccattatccgaggcttcgtgccgaccgagatggaggagaagtggttcatcttctacgaagacggcgtgttgcactgccaccgcagctggacgggattctgcattttccgtgttcacttcaagccctgcgataccggctggcaagcatggcaagtggaaatcaaccggcacagcggacaatacacagcaaccgataagcgcgaggatcttgcgctgctggatacgatcattgagcaattactgatcttttgccccgcaagctga

SEQ ID NO: 359002 - DNA, 783 bp, Pseudomonas aeruginosa
atgaaacggatactcagcatcctgctgcttgctttctgcaccactgcccatgccggcggccttgtggaccattacgcctggggtggtatcgcctacccggatgaaacatccaccgcaggacttcctgaagccatcccctgtatcaccaagaaagccttcaacgggcagcccatgatcaagtgcacctggctggagacctcccgcgaggtgctcatctggaatccccagcgccagcaggatgtgcgttatgccaaccaggtaagcggtacgtgcctgcgcggtaagtgccggacaaacaccaccatcgtgggtgaatggaatcaggatgtcttcttcgcactgtcgatctggtaccgcatcggcaccagcaccgatggcaaaccggtggcctaccgcgtcgacacctcgcgccaagtgtcgtatgccgaggcaggatctctcctgtatcagttctacctggatatcggcgtcccggatgaccggctggctggcacgttcgatggacgctatgaaggcggctatgcagcctggcaggcgcagaaagaaggtgctcaagctataggcacctcagatcaatctgaatggccggaaatcaaatccgcctggtgtaatccgcgcatggatgacgactgctacatcaacgagaagaaggtacccgtagctgagcttggtaagtggttgccagccgttgctgaatcgaacatcgatcagatcggcggatactgcgagaccatcctctgtttcgataaggatgatcaaccagtcggctatttgctgcagtag

SEQ ID NO: 359003 - DNA, 354 bp, Pseudomonas aeruginosa
atgaacgtcatcaccggcctgaacgaagcgcagatcgaaagccttgtgcaaaagagagcgtccttcgagatcaatggtctccgtggcaatttcatggccggcatcaagctggtcgaaaccacgattgaacggactggaatgaagtgccgcgtcaagagcgatacgaaaagtgcactcgctcaaggtggcgcgcttggtgcgctcgccagtctagcttcggcacccgtgacactgactgtcttgggagtcacagccgcagccagcgctggacacaacctcctcacacgaaaccctgactacgaaatcctcaaggactatgtgaaccagcgactcaaggttatctacaagaagtaa

SEQ ID NO: 359004 - DNA, 783 bp, Pseudomonas aeruginosa
atgatgtcatctccttgccgtaacagagccaaccgcctggcgcgatggctctgctccatactggtcgcggcgctgctgccggccttcggtagcgctgcggtttcggtcgaccgcacgcgcctgatcgtgacggaaagcgagcgcgaggcctccccgcagatcctcaacgagggctcccgcccggtcctcatccaggcctgggtggataccggccaggctcaggttccggccgagcgcattcgcgcgccgttcctcgtcgacccgccgatattccgcctggagccggggcagtcgcggcggctacgggtactgatggtccaggcaccgcaaagcctgccgcgagagcgtgagtccgtgttctggttcaacgtgctggagatcccgcccaagcctgattccggagtcggtacgaaccatctgcaagtcagcttccgtacgcgactgaaggtctttttccggcccgctgcgctggccggacgttccctcacggacgcggatgcgctggacatcgctctgcggcgcgagagtggcggcaaggtcggcttgctcatccgcaatccttcgccgatgcatcggaccctcgacaccctgtcgctcatagctccgcaaggtcgggagacagcgctggagccgcccatgctcggccccggccaggtcgtgaagatgcccgtgcaacgccccgtcggcgagatgttcgggacgccagggtggcgggtccggttttccctcatcgatgacttcgggatcgcgcatgaacaggagaaaccgctgtcggtggactag

SEQ ID NO: 359005 - DNA, 1128 bp, Pseudomonas aeruginosa
atgaagaacattcttttgcgccggctcttcgtcgtctccgaggcgcactggccccggctgctgtttctggcgctgtccgtggcgtgcgtgcaggcgcgagccgacggtacctgggacgattgcgtccgcagcggtggaacgggcgacatctaccagtactttcccgcgactaccatctacctgggacgcgatgcggcggtcggcgacgttgtcggcccctggatcacggcctcgagcatgccggcctggagctgtacgcgtcgtacgggatacggaggaaccgccgtccaggttctggtgcaaggctatccgccttacaccctgctcgggaccctgagtcacgacggcgggtcctatgcctattatcgagccggtgacgcgagtgccgcgctggcctacatcgcccggtggcgggctgtcgtgaatggggtgtacaccgattggtcgccgctgatcgtagcgggaggcgtataccagaatgccgcgtctacggtgaccgtggacaagaccgcaggggagacctacaccattggcgtcgagacccagattcgctttgtcaaacgcaccaccgccctggttgcaggctacacccagggcatcctcgatccgatctacgtacgccattatcagcaagtcgggggtagtacctcggtcggcaccggcacgtatcgcatatcgcagatgacgccaggcacggccaccttcgaaggtggcgggacgtgcgtaacgcccgatgtgagcgtgagcctgggcagcactccggctggagatttttccggcatcggcacgacggtcgcgcgaacgccgtttaccctgtccttccagaactgcccgccgaacctggccagcatcgcctacagcttcacgccgaccaccagcgtcgtcgacgccgcccagggggtggtcgcgctggacgccacctccaccgccacgggagtcggcatccagctgttgacgcaagcgggcgcggccgtgcagttcggcaccgcctatccgctggagtcatacgactccagccaggccgcgagctacagcgtcgatctgcaggcggggtactaccagaccgctacgacggtatccgcgggcagcgcgaacacggccatcaccttcaccatgaactacaaatga

SEQ ID NO: 359006 - DNA, 2526 bp, Pseudomonas aeruginosa
atgagcgaaaagacggatttcgtgcgaaggactggtgctcctctcatcgcgctggcgggttgggtctggccgttgccgctgtatgcagccgccgacccggaccctgtcgagttcaatgccgctttcctgcgttcgccggtggacgtacgcatgttcgccgaaggcaatccggtagcgcctggacgctaccgcatcgacctgtacacgaatggacattggaagggccgcaccgaagtgcgcttcgaactgcctgactcggcttcgcgcatcgcccggccctgttacgaccggaaactggtggagacgctcggcctggatcttgcgcagatcgccgagacgacccgccaggccctggtccgcgatggcctgtgcgcggacctggagcagatcctgccgcagtccagcgccacgttcgacagcgcgatgcagcggctggacgtcatcgctccccaggctatgctggcgcgcagtgcacgtggctacgtgagccctgagttctgggacgaaggggtgacggctggcacgttgcagtacgactacaacgcctatcacagcgagttgtcctccagccagtccttcaccagccagttcctggggttgcgcgccggcctcaacctcggcccgtggcgcctgcgctatcgctccacggccacctggagcagccaggacacactgcgctaccggaactctgccgtatacgccgagcgagccctggccgactggcgcagcaatctgaccctcggcgaggcctcgaccaacggccaggtattcgacagcatcagcttccggggcgtgcagctcgcctccgatgaccgcatgtacgccgactcccagcgcggcttcgcgccggttgtgcgcggcatcgccaactccaatgcgcgggtccgcgtgagccagcgcggcaaccagatctacgagacgactgtcccgccgggaccgttcgtcatcgatgacctgtaccccaatggctctggcggcgacctgctggtgacggtgaccgaagccaatggcagcgagcacagtttcaccgtcacctatgcgtcgaccgccgagctgctgcgccccggcgtgacccactacagcctggctgccggccagtatcgcagcggcctgatgcacgacgagccgatgctggccctgggtacctggcggcatggcttttccaacatgatgaccggctatggcggcggcatcgtcgcggagggctatgcggcgatcgctggcggcatggccttcaataccgacttcggggcattggctgccgacgtaacgcacagccgcaccgatgatgacgccggccatatctatagcggacagagcctgcggctgtcctacgccaagatcctgccggtgctcgacaccaacgtcacgctggcatcctatcgctactccagcagcggctactacgacccggccgatgccttcctgctgcgcgatcattcctggagtggcgtacctatcgaacgccggcgcaatcgcttcgtggtcaatgcgacccaggcgctgcccaatggctacggctctttcgccgtttccggcagcacccaggactactgggcgcgtgagggctcggataccgagtacgtgctcagctacaacaaccagttcggccggttcagcgtgggcgccagcgccgcccggacccgcaacctcactacgggggattgggacaaccagttcatgctgtccttgtcggtaccactgggcgaaagccgtcgctcgccgcaactgagtacgacctacacccacgagagcgactcgcagtccctgcagggggcgctcgccggcaatgtcggtagcgacaaccagtaccgctacaacgctttcgcctcgctcaacgactcctcggagggcggcacccacaagacggcgggcttcagtggtacctgggcggcgccctacgccagtgtcggcgccaatgcttcgtcgggacacggctaccggcagtatggcgccagtgcctcgggtgggatcgtggcctatcggagtggcgtggtgctttcgccgttgctgggcgacacgatcggcatcgtcgaagccgaccaggcgcatggcgcccgggtgagcaactactcgggggtgcgtgtcgacggcgacgggctggcggtagtcccctacctcaacccctatcgccggaactcggtcgagatcgatcccaaaggcatttccaccgacgtgcagttgcacagcaccagccagcatatcgcccctacggcgggtgcggtggtgctgatgagattcgagactgaaaccggctactcgatgttgctcagcggtcgattgtccaatggcgaaccgctgccattcgcggccggcgtcttcgatgccgggggacgcaatgtgggctatatcgcccagggcgggcaggccatcctgcgggtctccgacctggcgggttcgttgctcgtgagatggggcgacgaggcccggcaacgctgcgtcatcgattacgccttcgacccgcatgtcgccgcggacgaattgggctaccggcccctccaggcgcgttgcgttccactcgaatag

SEQ ID NO: 359007 - DNA, 762 bp, Pseudomonas aeruginosa
atggttctgaaatccttgagcggcctgctgctggtggcactggctacgtgttcccaggcgggcgtggtaatcaatggcacgcgggtcatctatcggcaagccgatggtgaagccgtggtgcaactgaggaatacagacagcggaccgctgctggtccaggcctggatcgacgacggtgacgttcgggccaaggtcgagtcgttggacatgcccttcacgctggtgccttcggtggcacgtatcgacccgtcccgagggcaagccattcgtattctgcagacgcgcaacgatctgcccgtcgaccgtgagtccctgctctggctcaacgtgctggaaatccctcccaagccctcgcggatgctggccgaggggcagaacctgctgcagctttcgtttcgttcccgcatcaagctcttctaccgcccgaaagaactggaatcctctccggaagacgctctgaagcaactgcgcttcgccattggccgcaacgccaatggcgaaccggaggtggtcgtttacaacccctctccttaccacgtcacgttccgcagcctgaccctgcgtgaggaccgcgacgggcccgtcgccgccgcgctcgacgacggcgccagcgagcgcatggtaggccctgtcggagaactctcggtgccgctgcgctggaaaagcgggacgcccgtatcgacggcaaacgtgcaggtgttcttcacggcgatcaacgaccagggtggcgatacccgtttgcagcagggagcgcgccgctga

SEQ ID NO: 359008 - DNA, 543 bp, Pseudomonas aeruginosa
atgaaatacgcactttcccccctgtccctggcttccgcgattgcgttggctttctctggttccgccaatgccatcgacggcaccatcaccatcaccggcgagattaccgacacgacctgcagtatctccgtcaatggcgcatcggcgtcgggcgcagtgagcctccccgcggtatccaccagttctttgagcacggcgggcatgaccgccgggaccacgccgttcagcatcgccctgagcggatgctcgggttcggcgttgagcaccgctcgcacctggttcgagcccggggtcaacgtcgatagcaccactggccgcctcaacaacacgggtagcgccaccaatgtgcaggtccaactgctcaacaagaacctgggcgccatcgtcgcgggcggtgccaacgtcgccacacagaacgatgtcggggaggacatcagttccggcagcggcacgctcaactattacgcccagtactacgccaccagtgcggccaccgcaggggcggtgacgacctctgtcgagtacacgatcgtctacgactaa

SEQ ID NO: 359009 - DNA, 1032 bp, Pseudomonas aeruginosa
atgggcgtttcgtcgctgcagcccctggtcatgccggcttatccccttccaccggcctggatgggcgcctccgatctgccacccgacacgttgctgttcgagtcgttggatctggagtatgcgcaggagcagatcggcagggtgtaccgcccctaccacttcaatgcggactaccggaaacggatcgggccagccagcatgtttcgcctgctgggagaagggatacaggtatcctggttctccttcggaaccgaaatatcggtcgaacccgagatctccgacgatttcatcctggtcctcacgaccctcgacgggcacgcggacatctgcagcggccgcctgcggcaccgcagcaatttcggctccaccgtggtgatcgccgcagacgcgctgtcgcgctatcgcttcagcgcggacaacacgcagatgggcgtgcgcctcgatgtacggcgcgtcgaaacgctttggcaacgcctttccgggtcgtccggagcttgcaccctgtcccgtctcctgccgccccggcaacaagagcgctggctggcttcggtgggaatgctcaaacagttgctgaacccggaaacgccgtctgccctgaaggcaatcctactcccccgggcggaagagctgctgatgctgcaactgctcgccgagccgctgtacgaggcaggagaacggcaccgacggtgtcctccaagcagcttcgccccggcttacctgaagcgcgccctcgccttcatcgacgagcatgcctcccagcccctgacgctcggcgagatcgccaacgccgcgtgttgcagcattcgtaccctgcagcgcgtcttccagaactggctcgacatcggcgtcatgcaacacgtcagggaggtccgcctgcagcgagtgagagaggccctgctggaagagggacgacaggcatccatcaccgagatcgcaatacagtgggggttttcgcacctgggtcagtttgccgcggactaccgtaagaaatatggagaactgccttcagagaccaaggcacgcatggcatga

SEQ ID NO: 359010 - DNA, 345 bp, Pseudomonas aeruginosa
atgacggacaaccatttcggcccggcttacctgaagcgcgccctcgccttcatcgacgagcatgcctcccaacccctgaagctcggcgacatcgccaatgccgcgtgttgcagcattcggaccctgcagcgtgtcttccagaactggcacgacatcagcgtcatgcagcacgtcagggaggtccgcctgcagcgagtgagagaggccctgctggaagaaggacgacaggcatccatcaccgagattgcaatacagtggggtttttcgcacctgggtcagtttgccgcggactaccgtaagaaatatggagaactgccttcagagaccaaggcacgcatggcatga

SEQ ID NO: 359011 - DNA, 243 bp, Pseudomonas aeruginosa
atgcaaatagttattgtgctgctgcttttggtgatcgctctagcagtagctccttggctcggtggagtgctggcaattggggctgctgtgtatgccatcgtcggcgtgctttttgtagtcgtgatgttctttttggttggcgcggacacgttgaaatcaatcaagaatagtgagtgggcacgtcagcgccgaattcgaaaagtggtagagcaagcaaaccgacgaaaccgatcgaaccaatag

SEQ ID NO: 359012 - DNA, 810 bp, Pseudomonas aeruginosa
atgatggagcctgtacgccttcccatctacatggtctatcagccagtagcgaagattcaccaagacgagttggaagtagttgcttacgagtcccttctgcgggtcaagcccaacagcagaaacctcactgctctctcggtcatcaccgaggccgagcgcaacggaacaatgccagcgctcgatgcactcatcaccagaatggtatgccatgacgcctctcaggttgccggaatgaacctctggctgaatctctcgcaagtaaccctaagcacaccacgggctacaaaatcgatagccaaggtcatcgaagatcacgggctctctagtcaagtcaccgttgaaatcaccgagacggcagacggtaaggtgcccctgctcttggagagcgtcagatggctgaccagcagacagatcaccgtggtgctcgatgacattgacgagggctatgcaaagtcggacctgcttcgatccgacctgatcacgggatgcaagctttccaatcgctctacgataagaatgagtgcagagcccgcttatctggagactatctcccagctgatccgttggtgcagaaccaatggcaagactgttgtcatcgagggcatcgagactgaatcccaactcgccatggcgcgacaccttgaagcggactactgccagggctttcatctgtgggaaccgattcccttaacctcacttcccgtccccggaactcggttacgggccttggccgaacggcctacgactggcgctaagatgagtcgccttcctgtgggcgctgcgggtattacagacttcgcccagcggtaa

SEQ ID NO: 359013 - DNA, 1029 bp, Pseudomonas aeruginosa
gtgagctacgcatcgcaaatcgaagtcgccgatgaaagcaagatggagagcgccttgaaggaaggcaggaacatcttgctgaccgaggactttgtggaaactactgatttccacggaatcacgacctttggccgtacaccggctgtctggcgtgatttctttcagcaaacccacgcgcagaaagcgaagggctacaacacgcggagttcgcactacacggcggagttcatgggctaccgctaccgctgctgccttgcgaactctcagaagggctggggcatatcgatgcgccacctgccctcgaagattccagctttgcgcgacgaccttggtctggactggaacctgatcaggccgcttaccgaaggtgccggcctgaccctctttgctggccgaatgagttcgggcaagtccaccacaatggctgcaaccatcggacagcttgatccgcgctctgcacaaattgccacggtggaagaccccatcgaggtgatttaccccagccactccataatccagcgcgagattggaactcacgtcgaatctttcccagaggcgatccgagattgcgttcggcagagccggaccactatcgtggtttctgaaatccgggactcggaaacggcgaatgctgcgcttttggctgcatccactggccacagtgtatttgccaccatccatgctgacagtgcgctcgacatttacacccggatgctcgcgttggttgaccagcgatacgagcgcgtgctcgctcgaaacctgcgcgggctttggtggcagcatgtggttcgattcggcactagcgagcgcaagccgcttccgatctatgagtcaataattgtagacacggaggcccgcaacatcttcgataaagggccaagcgctctgcctatgctggctggcgttatggacaaccaaaagcgcaagagcatggctgaggtcgcgatgatgcaggtggcccgaggcatggcgacccgcgaagaactgtctgagttcatccagcgccgaaatcgcctctcgaacgattga

SEQ ID NO: 359014 - DNA, 1158 bp, Pseudomonas aeruginosa
atgactgcaatgggtagtcagtttgggcacgatgtgcccgataccatcgagaacgggtacttcgtcttcacgatcatgcccaccttgcattgcccctataactgcaagcattgctacctgtccctagagcagcgccgtgacaccacgacgatgaccatagagcagatgcgtgaggtgtgtcgcaaggttgatgcttactgggatcaggtgcagcccccccaccgggtagtccttgtgtacaactacggcggggagccgaccagcactggcccagactatttcgagagctacgtccagatgatggccgaggaattccctgcggctaagggctatgaagtgaagcatgtgatgctcacgtcactgctcggtgtggacctggatgtatgggcgccgctttggcatcggcatacgggtggctatatccagacctcatacgatgggtctatgcgttcgaactcctatgttcggaagtgggaagcaaaggtacgtgacgctgtggctcgcggtcttcgcgtggcaaccatcagcgtggtcaattcagacctccttgcccaaggtgctgcgcagactctcgacatactgactgatctgggcatatgcgagacaggctggctgccgttcatgttgaacgagcagaacgctgtacccggcaagtacgaccgctatgcgccgacaatgaccgcgtttaatgactacatgatcgcgatgctcgatcactggtactcgctcaaatacagagggctcacgccgccatccatcggcgaggcgcactttgcagttgatcgctcgaagcgcagccctatgagcaacatgtgtggacagacgctgttcctgctaccaaatggcgacttcgttttgcccaactacagggacggctacacggagtacatgcactcattcgggaacatcctggatggggataccagcttccacgacattcttgtttcgcgtgagcgcaggctctacatgcggagacaggtgacgcggaacaacaatccagaatgccagggctgctcatacaagaacgcctgcctactggagttcgccaagcctaacaaaccgaacgacgaatgctttggggcaaagcgattcgttgagcatgccattcatagaaactcgctcgatcccatgttggacgggccggttacgctttattga

SEQ ID NO: 359015 - DNA, 216 bp, Pseudomonas aeruginosa
gtggacactatcgtcgccctggagaaaagtcagagcgggggcaatggtgagcgctctgtcgaggttgagctacttgagcagtcgctggagcgtaacaagcaccacttccatgtcgatccggcgaagcttggtctgagcaatggcccgttgcccggtgacttgcgccgccctgtcctctacgtgaagaaggaggccggcgatgactgcaatgggtag

SEQ ID NO: 359016 - DNA, 1242 bp, Pseudomonas aeruginosa
atgcagccagggctttccaatgtcggcattggccgaacttcatttctgttccagatcaacgtgacacgccgctgtcagctcaggtgtagccactgctacatcctgtctgacaagaaggatacgtcgcctgacatgagccaggaggaattcctgcatgtggtgcagggtatcgttgaccacatgaaactcgattacgagttctcgcgtcggtacaccttcgtggatattcacgtcatcggtggcgagccttccatgctcggggtcgagttcttcaaggctgtgctgccaaaagccaaggagcttttgagccaaatccctcaagaagtggcattcagcatagtgaccaaccttgtcaccgcagaggcgctggaggtcgcacgccttttcgacaaggtggctacctcttacgagcgaaccactcggttcaacaaacgcaagcaggaggaaatctggcggcataacgtcagaaccctcatggcggagtccaaagacccgtcgctgccagggcctaaagacttctcagtgaccaccgcgcttgtgaagccggttgtgcaggccggcgctgcgtcgatgatcgaggaactggtggagctgggtttcacgaagatgcacttcggattcttcatccccagcggcgatggggacctgaattctaagttggtgcagccatcgcacagcgaaacagcccagttctactgcgatgccttggactggtacatcgacaaccgcgaccgtatccctgacctgtgggtgaacccttgcgagtcctggcttatggcggttcaccaggatcagcccatggatgacgtggtgtgccctatcgtccacggggctctggacattgactccgatggtcgcaccatcagctgcatcgagaagggcggcactaacgactaccactcgcatggcaacctctttgagacaaaggaagtggccaagcccgatggcaccagtgaggttcagttcaccacaactgtccatgatgttcttacctcccgcagttatctgcgggaagttatgaaggcaacccgacttccagacgcctgtcgttcttgcgatgagcgcatgatctgcaaggccaactgcggcgtcttgcatgagcagtggaacgggcagggtgaatgtcctggcttcaagactttcatcaagtacgcccgtaagcgagtcagcgaaggcgtgttgccgcaggcgctgttgatgcgtaatgcggcgctgcctgaacacctgatcgcggtcggttga

SEQ ID NO: 359017 - DNA, 762 bp, Pseudomonas aeruginosa
atggcgttgaagaaaacgatcaagctcaaacgtttccaggtattggacgcggttagaaccgcacccaaggacatgggggttctgagactgctggcccgagtcgctggcacatttggcgacagcctctacggcaaggcgtccttcgatgtggttgtcgtcggcgatgatccactcgtttcgctgtgtctggccgcaagcctcaaacgctctggcaaatccgtacttctggcacctgactccctggggactcaagactggccgagcaaggattggggataccggctggcgcagttggtgaactatttcgacgagtcagttgcatcagtgctttcccagtacctccatgacttcgagagccaggatggatacatgaaagccctgtcagcgctgattgccgaggttgcaggccatgagcaagtgatgatcctcgcgggcgactgtttgcagtcgagcaaggggatgatcaagggctgtgatgagttgattttctttcccgtgcgcggggagttccagcacacgccgctgacgaaccctctttggcggatagtgcgagagagccttgtctgcctagcattccagcactcggaaattgagttcatccaggctcgccggctgctgatcaccacgccgacttcccggttcatcgatccagcaataggcaccaggattggtgtggcacgcgaaacgcagatggaccgcaataggtactcccgcgctgacaacgttctgtcgtctttttcactgattctgagagagcagtaa

SEQ ID NO: 359018 - DNA, 450 bp, Pseudomonas aeruginosa
atggaacaactgggcctcagtgaggcgacacagcatctgcggtcacacatgggcgattggtcgcgaaccaactgcatgctgcaacgcggcaagaagggtgactcgatggtttggcatcacgacagctacgacccgatgcacctgatctgtcttctgtacctcagtgaagacatatggcatcccgaggatggtgggatgttgcagttgggtgagggagatattgatgagcatgggtttctggttgatccagagtctgtctccatcaaggcgtctgtctctccgaaccacgggacgctggtgtgggccatcaatacgaacccccggtgggtacatcgcgtgactgaaatcgccagcgaaaagacccgctacacgatggtcggccagtttggttatcgggagaacgtgatgcgcacacgggttaaagagaagtacggtcgagaatggcgttga

SEQ ID NO: 359019 - DNA, 981 bp, Pseudomonas aeruginosa
atggtgccgagggccgagctggatgagcaaatacgtttggtcaagcggatatgcgcagagcgcggaatcggttgtgttgttggtgcgcagagcaacctgatcgtctctgagcagaaggctgcacgcctttacgatctgttcgagggtcgcctagggacgagcatcgacctcaccacggatgctaggacagtgaaaggcgatgctgagaagtaccgtctgatctggaagtcggcggatcaatatcttcgcagtaagcgcagcacgcccggtgcgatttacgttgttgagccggactcgggtgctgatgcggttaagcatcttcgggaagccgctcgctccaatcgggcaatcactttccgcccgatctttaagggcggaatcgaggcggtccaaacaagctccgcagagcagtttcgtgacgtgatgaccgagctgttcgatgagtggtttcttcgcttgccggtgatcgctgagcccttctttcaaatgtgtgaggcccgcattgacgagctgggtggaatggggcgagttcagtcaacggcatgcgcctttcaacaggactgcacacgcaagagcgtgaacatcgagccaaacggcgacctttacgtgtgcctggaaatggcagatgcgggttttgccccgattgggaatggggtgcgcagggagtggtacgccgatgcgctcgccatgtactcaagtcgagcgggcaacctgccgggttcctgtcgggaatgcccatacctagcctcatgtcaggggggctgcatgtacgagtcaatcgcccaagggcatggcgtacacggcaagtcataccactgcgcaacttggaaggctctctatgcgcgcatagacgaggccgtcgctacgcacggtttgagccacattcacgactggctgcaccgacttgcaacgcggcatgagaacgcgaggcttgaagggttatccagggcagtagatcagcatttcagtgggggtgagtaa

SEQ ID NO: 359020 - DNA, 1662 bp, Pseudomonas aeruginosa
gtgcataacgccctggacatgctcaacgtctgcattgcgccaacccgtctgtgtaatttgcgctgcgagcattgctacatcactcccgaacttctcggcgacaagacgatgatggccgagagcgtttaccgcaagactttcgaccggatcgagcagctgttcaatgccgaccgtaaagtcagcaagatcaacatcgaactgttgggcggcgagctaacaatgatgccgcttgagttctgggagcggaatctaccctggacgctggagcggatggcttcatgggactctctctacgatgcagaggccgcgttgatatggtgtaccaacctgatcttcaaggatgacggctacattgacctgctgaaccggatgggagagcgcttcggccatgggctcgatcttttcgtgccatgggagccagataccaacaggttcaagaaggacttcaagctgttaccccgctacttggcgactctcgaagccatcacacagatcaagcgaaagactctgtgcattacgatgagcagggctgtaatcgagcaaggccctcagttcattgttgataccttcatccagaaaggcatcacggacgttacctgcgacatgctctacccggcagggtcagggaaggcctacttcgcccgcaattgcacatacggccaagtctccgacttcattatcgagctgcgtgggcttctcccagaccacgttgagctgagccccctcatagaaatggagtccgcctgccgaacgctgactcactaccactaccctggtaacgacacctacgaccttgaggtggagccaaacggcgaagtcactttcaactcaagctataccggcgacgagagcgtttttgcaacgcatgcgttgtcggttgctgacgacgcattcgccgttaaaactgtcttcaacaatgcgccagagttgaggctgcgtcacagcatgccctacgaggaatgccgttcctgtgagtttgctgttgcgtgctcgggtggctgggcttggcacaagcaacttagcccggaaatgagccaactgatcagtcatggggattgcgcaggcttgaagcgtgtttggcagtttgccaagtcgagagccggtgtcagccaaagcgatagaagccaatatctggctctcattgagaggcgccagcggcgtggggcgagtgagcttcggcgtttggagtctgctgtggcgaggggtgctgacgtgccgctggttgaggatgcgtttgctggtgactatgagggctactttgcacagctctcaaggccgcgacttgtggttatggcctccggcaatcttcacggaaagagttggactgagcgtctgttcttctacgacgcgattggctcgcaagtcatgctcgatgccggctggttggccagggcggcagacgagggcggagaggaacttttccggcacatcgtataccgcaactaccactttcttgcgctccctggtcagggcgtagcagacgagctgctgtaccgccatcactggccgctctcgcaactgttcttcgacgcgctcaatagcatcagggcggggaaggggagtccgtttgatagcacccttgggagacatgacgagcttttcgagttcgcataccgagtctacgagtgggagcagagccgggtggttgaacatgcaagctaa

SEQ ID NO: 359021 - DNA, 3348 bp, Pseudomonas aeruginosa
atgatcaagcaacttgtagctggcctgtgcctattgctggccccgagcttggcattctcattccccatagcagttagcgcgattggcgctggcttgctaggggcgctggcgctgccagctgcacttctcgtcggcgccgttgtcatcgcacggaaggtgggggctggtcctctacaccttatggccacggcaattgcagtggtgttttgcgttgtgttgatgcgcgattacggcgctgagcaagcatcgaaggcggcgcttttcacaagtgccgacacgtcatttctcagtcatccgatccctttcccatttcttgatgccgccgcacaagctcggtcatcgcaggctgtgaccacagccgagttcatggaggggcttcaagctggccatttcaaagcgctcaagctcagcacctacgcaagcctctttactgatgctggtcaggtgtccatcgatgacctctggcgcgacaaagatgtgcttgttgatgctgtcgagcagcgtggtgggcgtgttgtccttgttgatgagtacggtggtatcgcgggttcagttgcagaagcagctcatcgaaacttcggcttgaacctcggcttcctacagggaggcacggcagccctttcacagcttggatggaagcgcatcgatgagggcgactttctttcaggcactccggttgccgtcgagcactacagggaatggatcgacacgcatccagctgcgttcattctgggggtcactactgatcgcgagttcgttactgacggatggatgttcgggcatcagacgctgaccctggccgacttcgtggccaactacggaagccttatcgaatccatagcgggtaggcccgtctttgtggccggtttcgagacgaatgacacaggtgccactccgatcattgtcagcttgcttgctggcgctggaatcgacgtttcttacgtcctgcctgatgacgatgaaattcttgtaaagccggcttacttcgactcctacacaaacgacacacgcctgatcagccttgaagacatgaagcgctatgtcctgcatcgatcagacgttgcgtttttggatttcagcgagcgcccatgggcgctgggtgtggaatatctaaaggaccgctaccaccacttgccgatgagagaggtggcgcagggtcgtttagcggagttcatccagggcctcgataaaagtgtcgcctacgtagggctttcgtttgaccggcgaacggcataccactctctgcttgcaggggagttgctgaccaagaatggcgggcactggctgggtcgctttactcaggcgggaagcttttcgggtgcatatctgacagtcgaggaactgaacactgaggccgagaaaatcgcatatgcagcccgagagtatttggcgtttgggggcaatctgctgcttggccatgggaaagcgcttgcagtcctatttggcttgatcctctcggcgccggcattgcttctcagcaagcgcgcaccgactcgaagtgtgtttgtgatcttttccatggtcgccacccaggcatgcgtgctccaggtgaagtgggattatccgtggttagagagcgcggctttcgtctttctggccgggaacgcaattggtcttgcctgcgtagcgtattggcggcggcgccagtcgcggcctgctattgcagctttgtctgaatatgccagctggatgcctccgaaggccggacttctgaacgccgcagcagagcttgggttccgagtgcccaaaggtgtcgtagtagcgccacaagacgttgatcgtataggaggcatcaagctaggaacgggcaggcttatcgtccgttctgcaacgacgcaagaagcgcttgatcacggcgctactgcgggcctgtacgagtccgttgtctgcgcctccccagatgaggttcagatagcggcggagagggtctttgccggtttcacgcagacttcggtttgtgggtttgtgctggtgcagcgttacgtcgaggctgattggtacggcgttattcagttccagtcaggtgatcgctccccatatctcgtctgtgagatagggcaggccgaagatgtgacggcgggctccgccacgccacaccgtttcgaattccccatctgggatgtgcgtaactcgccccggcttgcccggagcccggccctggcactgctggcgctgagccgcctcggtgcattctcgattgagttcgcgctcaggcgggggaggctcatcctgttgcaggtcaatcagtcgaaatcccgcgcatgcgcggaaaatcgacttttgcagctggcacgaaagaatgcagttgaagttggctcggcccatgccgacccactatcggcagcagtagttgccgcgctggcgccggggcatgtaattgcatatggcaaccggcgcttctgtatcgcggagcctgattcgcaactacgcaaaatcctgaaatcagaccttcgggcattaggcttcaatcctcagacggttgagcctaagcaccttgtggcgtgggttgatctgtattgccatgcatcgtgcctgtccgaggggtgtcgggctgatctgggtgaagtggtgcaggcgatcaagaaagttgcagacacccttgggcgtataaatcgcattgccagcaccatgctcgcaattgggttgcggtcagactgggatggtgagcctcgaatccttccttcctcccaggtcggagccctattggttgaagggaatgacgctgaatgggcaggtttcccggtttgcccgttagccggctttagcgcgctggctgagctgcgcgactacaaagctgacgagttcccgtctgacgttatcgaagccacctcaccgctggcatgggtgaaagatgccgcgagcgtattgataggggtgcggctgttcgccatccgaaaggcaattgctgatctggcgtttgacggcaaggctcaggaactaatggatgcccttgagtcccaggttggggattggcgggctgtggagcagcttcctctcgcgccggcatataacactgagccgcagcctatcccggcgctgctgactggagcctctaaccccgagttcggctggcgcatccccatggcagggctagagggcgtgatcactacacctgatagtggtgttgcgggcggcattctgctcctggaccagtgcagcatgagctacttgaagccgatgatgcaggccaaggctgtgattgcgcgtaacggtgcgatcacctcgcacctgatgcagcatgctgctgcgatggggatgcctgtcgtattgggtgcgaagctgccaagcgatttggagcccggcgataaggtaagggtcagcaaggacggggaggtgcttcgtgcataa

SEQ ID NO: 359022 - DNA, 1791 bp, Pseudomonas aeruginosa
atgccttacagcctgccccgcaaccgttcgattgagatgatgagtaccactatctcgacgaacctgaactgcaacatgtcgtgcaggcattgctacatccagcccgagctgcttcgtgtgaaagagtacgtcgatgaggccacataccggcgttgcgtggaggtcatcattgagtccttccacttggacgagtccgtgtcctacctgcacctcgacgtgctcggtggcgaggccaccttgatgcctttcgagttctgggagcgcaaccttccatggacgctcgacaagatcagcgagctgaacgccgcaggcatccaaactgagttcacgttctgtagcaacctgatgtggcgcgacgagcgctacctcgatctgctgcgagcgcatcggcaccatccagccatggatattgcgatcagctttgaggggccagagagcgggcgcttcgggcggaacatggccatcttcccaaagttcttgcagcgcatcgaagcgctaggcgactgcaacatgctgaacttggtgttgatcatggggcaggggattatcgacctaggtccccagtacatcatcgacacctttgtaaagcgcgggatcacagacgtgacctgcgacatgatcttcccgtggggatcagggaaagcttatttcgagcagcatcaacctctgtactccgatgtggcgaaattcatcgccgatctgaccgacctcggaaagccttatggcctgacggtcgatcacctggatgacatgaagaagtctctacggacgctttcccggtcgcagaatacgctgaacgatgcctacgagtatcactgggatcagcgcgggtatctttctctcaacccgaaccaaaccggcaccgaagcagttaggcccgtggtagggctccatgcaacggacgcgaatgccgctctcaaaatcgtctggggcaacaatacagagctggacaacaagctcagctatgaacatgacttctgtcgggactgcaaatacctccaggcttgcaactctggttggtatccgcacaaaggaatggagccgcaggtcgttcgcaaatacatggaaccctccggccaaggcttttcctgtccgggcttctacgagctttgggagcgagaagctaaatccagctttgaccctatcggggtgactcgctacggcgacgaaagaagggctcggaaagcgaagcgtcaggttcgagcggcgactacctgtgatcgtatgcgcgaggccgactactcggacgactacgagggtttctttgaggcggtgaaggccaagccgaaagttgaggtcttcgacgggttgctgtttgggttgtcgccgaggcagcggctttggttctacgaccgactggggattgccgtaagttttgccggtggagttgcttccttcaccgatgcggcatccatcatcgcgcactccattgcaggcaactatcacactgtcgaggtggagctagatgaggtggcccgcttcgcatcgagtcaacctgggcattccttggttggctatctcagggatgcactcggtgttgttcagcagtgggcgatggcgcccattgaattacgcgaaggctatgcacggcacggtcagtccggtttggagatttctttcaagtacgaggaccttttgatctggatgctgcggttcgccgagagactagccgaccacgccgttatcgttccgacagctgatgtgcggctgacacccgcctcctatgactacatgcagcgcatcaaggcaagtgcctacagggtgacgcgcatcctccagggctccaaatga

SEQ ID NO: 359023 - DNA, 1224 bp, Pseudomonas aeruginosa
atgctccgacgccaagcctacaagttccgcatcgagccaaccggcgaacagcagcgcaagctgcgacagttcgccggagcctgtcggttcgtgttcaaccaggccttggcgttgcagcaagccaaccgcgaagccggaggcaagttcatcggctatgtggcgatggccaggcagttgaccgcctggcgcaacagcaccgaaacggtctggctgaaagaagcgcccgttcatccgctgcaacatgccctcaaagacctcgaccgggcctaccagaatttctttgagaagcgtgccgacttcccacgcttcaagcgcaagggccagcgcgacagcttccgcttccccgactccaagcagttcaagctcgaccagggcaacagccggattttcctgcccaagctgggctggctgcgctatcgcaacagccggcaagtgctcggcaccctcaagaacgtcacggtcagcctgagcgccggccactggtacgtttcgatccagacggagcgagaagtggcggtgccgctgcacgccgccccgctcgcggttggcatcgacctcggcgtggtgcgcttcgccaccctgagcgatggcacggtctacgcaccgctcaatagcttcaaacgccacgaaaccgcgctgcgcaaggcgcagcaggccatgagccgcaaggcgaaattcagcgccaactggaagaaggccaaggcccgagtccagcgccttcacgcccgcatcggcaacgcccggcgcgactacctgcacaagacctcgaccgcgatcagccaaaaccacgcgatggtgtgtatcgaggacttgcaggtacggaacatgtccaagtcagcagcaggcacgaccgaacaaccgggtagaaacgttcgggccaagtctggcctgaacaaggccatcctcgatcaaggctggttcgagttccgccgccaactggactacaagctggcatggcggggcggctggttggtgacggtgccgccacagaacacgagccgcacctgtccgtgctgcggccatgtgtcggcggacaaccgccagacacaggcccggttcgcgtgtgtggaatgtggcttcgaggacaacgccgatgtggtcggcgcgatcaatgtgctaagggcgggacacgcccggttcgcctgtgaagtgagcggtgaggtaatgccgccagcagcaggaacccaccgaagcgactcaggggcggctcaatgccgcgcctga

SEQ ID NO: 359024 - DNA, 1749 bp, Pseudomonas aeruginosa
gtgcataaggctcggactgtcaatcaagcaaacgtgagcatcaccgcaacgaggtggtgtaacaggcgctgcacccactgctacatcgatccgaaagagctggccaatcgctctttcatgcagccagagactttcaagtcaattttcccgcgcatgcgcgagttgctggcgctggacaaggggcttgaagaaatcgagtgggagctgattgggggggagattaccagcttgccggtcgagtattggcaggagaaccttccattcgcactggaccaatgcgctgacttcaataaggtgctcaagacgccgggctcgatcaacgtgctctctaacctcatcttcgctgatgagaaacggcggagtgattaccttgacctgttcgctaaatatggcgacagacaggaaatgtgcctgtacacctcctgggagcctgagactaaccgcttcggaaagaacatggctttgttcgaccgctggaaagaaacggtcagagaagctggcgtccgtcaaaaaattctagatgtgatcctcacgcggacagtcgttgaccttggcccggagtatctgctggagactttcctgccgcttgggatcaaggacttctcaatcaagatgattagtccgttcgggtctggtcggacattctggcaaccgaatatggtggaattcgagaggatgagtgattacctcattcgccttttcgacatggtgcccgagggcatcacattcacgcctgcggatgaaatgagcggtgcggtgttcagggggacaagctatcagtgcattggaaacttccgttacgacctagcgattgagccggacgggctgactactttcaatgccaaccagacaaccgacgaggcatcgctcggttcggggctcatctacctggatgatccagattggagctggaaggtcttgagtgacaacactcaggagctggataacaagctatccgcgtaccacgattactgtttccagtgcgagtttcattcctcctgtgctgggggctggtatcactaccgaaccgctgcgccggaggatgtacgtgcctgggatgcgggtgactgtcctggctacaagaagctttggaccaagatcaagaacaagtacggcgcattcgaccgcccggttcaggttcaccgtgaagaaatgtccaggctccgcagcgagcgcaattctgtaacgcgctctacgagcctttccctggagccgactgatgactctctttctcatgcccagtggctaaagcaggtcgcaggtaacgaggtccagcttcttgcaggggagggtatgggcaagcccctcgttcaacggatgtgggcgtatcaggcagtaggttgccgcatgcttttgaccgaagcagagtttgtgaggctcacagacagtgaacagcgcaccgttgtagagcatctggtgtacgacgatttctttgccttgtcactgggtgagggagccgtatggagctggtgcgaacgaaacccggctgaccctctcgccaatctgctggttgctggagcgcaagcggttgagtcagggcatgtaggagaaagcttgattgctgctgggcacaacacggaacttctgcgctgggtgatccagaatccaaggcgtgggcatgacgctgcggacctggctgatgccgatccggtgattagagcgtgtgcgttgcggttaagaaccgaggcgcgctttagcggcgccgcaagtagtgctgaagctgttgacagggtacgggcggcgcgataa

SEQ ID NO: 359025 - DNA, 1062 bp, Pseudomonas aeruginosa
atggacacgaaagaggcagttggcttcatcaacgtaactcggcaatgcaatgtcgattgcaagcgctgttatttgaccgaggcccaccgggctgcgaaagagcgcctgccgttgccaacccttgagcgcttcctggattctggtttctggcttgggaggcccgtcaccctcatatgggagggtggcgagccatctgtggttgggcaagcggccatgaaggcctattgcgacactgcacgcagcgccttgagtcatgcgcaccagaccatggtgacgaattgctttaacgtgtccagctggctgatcgatcttgctcacgacgagtttgagggcagggtcgaaactacatacgcattcgcccacaagtattccctctcgggcgatgcagctcactatcagcgcaagttcctatcgggcctcaatgcgttctgggatgcaggggtcgaatgccctgtaaacgtcgagctgaacatagaaacgattcaggccggtccagcagcacttgccgcggtcattctcggctccaaatgccgggtctgggagttcgacgtttcggtagatttccgctcttttttgtcggcgccggcctatgccgcttcaagtgttcctctgctgccacttacagcaagctacgcgcaagtttgggatttcttgatgcgcttgcaggctgagtggggggcggcattccaagatcaagggattgtgattggagcgtttcaccagcaagtcgggcagccaaacaatcagtttaatgtcgcctgcgagagccgcttcctgacgcttaatcctgacgggatagttacaacaaaccctttgtactcagacctcgccggcacgttcctggggaacgtcaatgaaggaggtatggagcccatcctcttgtcatcgcgtcgtaaagcaagggtgctggccgacagggcgcgcactacgccctgtcgcaactgcattcacgcgcattactgcaagggcggcccctcgcacgtcccggtgagtgacggttcaggcgaatgctcaggtggtcgctcaatgtgggacaagattctggagcgaagctgtgcataa

SEQ ID NO: 359026 - DNA, 1323 bp, Pseudomonas aeruginosa
atgacagcgattatcggtgacgccctgatgggggaagcacccgccgaggaagtgtcggtacagcccgagcaaccgttcgtggttggtaaaacagcgtctgagttggatgctgttttccaggcgcaatccgaggctatcaaagccgaccctggcttgaagttcgagcgcactgttcactacgccttggtcgaatgcgacaccgagttgcagcgcatccccctcgatgcactctcgctgggtttgagtgtgcgtgcgagccaagacgaccctgacgccctcgacgaaaatttcattttcagcctgctgctcgcaacaggcacgttgagccgctgcactatcgacgttggtccaaactgcactgttgatcctcagctcgtcctgaatgaggcagaggcacaagggctcaatgtccgcttgatgctgccaccgtcccccgaaacagttgatgcagttgtcagctacgttgatcgcctggagtcctactcggcgctatggctgagcatgagcagcggcaatttcagccttacgcctctcgacggctatctcgaatacaagttctccgtcgcgctcggccataccccgaaggaaatcaccaacaaccgcgaaatgaagctcctattcaccgacgaagtgccggtggaggtcatggactacatcaaggctaggctcgatcaggtgattgagcgcgagctgggcggtgacgacttcttcgtgtctgaggcgcaaaagctcggcggcgcgctccgcctgaaagaagccgagcttcgtgaggcgcgcaaaaggatgctggaagaagaactggatgccaggacgccagttccgaacctcattcgcgcaacgagcaagatgactggcctttctattcctgatgctgctgggctcatctacgagttgaagaacagtttccactctgttctggacaagtacctgcccaaagaagccgacgagaaccttgaggactacaccccgagccgcgctcagaaggcttttgctcacaacctagtcagcacattgggcggtgcctttggtggggctgatggcttactgggggcgtgggatcagctcagcgccaaatcacagctcaagcagctggttgacttagacaggggagcggtcgagccttctccctctgctcgcggcgcagctgaggtgataggcgtggacggcaaagttgcggctctggcggcagccgagtttgttggcatgctgggttccatcctgaaagcaggcggggcaatcagcgagataggtctggagaagcctcagcctgtggctgagccagtatctgttcagccggccagcaacatcattgctgttggctga

SEQ ID NO: 359027 - DNA, 375 bp, Pseudomonas aeruginosa
atgaagggtaaggccgtaaaccgcgtgctcgtcggtttggctgtaagtgctgctgtgttcgcacagcactctcaggcatcgaccaagatcacgctcgacaaaacagttgccgagctggcttcggatgccgaaatcaagcgttaccgtgcgatgctggaactgaatcccatcaagccggtggtcgatcagtaccaggatgcactccagaacttggtggtcgataaggagccgatgggcatcgacaacctgcttctggctgccactgccacagctaaggaccgagactcgacgaatgtcggggcctggggctactgccacaccgcatgccatggtgcttgccatggtgcttgccatggcgctcgcggctggaggtaa

SEQ ID NO: 359028 - DNA, 1119 bp, Pseudomonas aeruginosa
ttgattcaggccggcaaagagttcgatcagatgatctatgtgcgcctcatcgaggcgtgcaacttgcactgtgagcattgtttcatcccgaacaatccgaagcggatgcaatggtcggacatagaggctattccccagcgcattcgtggttttgcagcgccagggcagactctcctgtttcagtttcacggtggagagccgacccttgtgggtgcggagtttcttcgcaaggtctgcgtttacctccgaaccgagctgtcggactatgaggtgcagttcagcatccagaccaacctcatgaattttgacctccgttgggccgatctgtatctagagttcttcggtggtcaggttggtgtttcgtgggatcaccgcatccgcctgatgcgcaaggggcgccctgaatccaatgccgaattcgagaaggcgttctggaagcacgtagttgagttgcaacagcagggcctttccccttacatggtcatcacgacgactagacctttgcttgagcgattcaagaatccccgcgagctaatcgactttctccttgagaaaggaatcagtcttgtgcatttcgagcgcttgaccaaaacggggtacgcgatcagcaattgggactggctgggtgtttccaaccgtgagtacagcacttggataggccgttttgctgtagcctacatgcgctttgtgcgggaggaacgcagtggcaaacagccgctgaacatttcccctctcgacgggctcatcgaaagtgtccgcaggcttcgagcaggcaaggccggggggtacggatgtttgtcggggaagtgcgatacgcgcttccatacttttgatcagacgggttactacgcggcgtgtacggctctcacatccgaagttagcaatcggaatgcagtaggcgcggcagttgttgatacggcaggtctaagcgagacaaggcaggttaggcaaatgagttgccttgactgccggtttaagccgatctgctctagcgggtgtatggcaacacctaagacagacgagtccggggagtgttccgggggctatcaggcgttcaaattactgaatgcctgtttggcctcggctgagagccctagcctcatagctgttgcagggtga

SEQ ID NO: 359029 - DNA, 1143 bp, Pseudomonas aeruginosa
atgttgaccgtgtacctcaagcccacgaactactgcaatgtgggttgcgacttctgctatttgcccgaggatgttcgggccaacaaagcacgcatgcctgctgacacccttgatgcgacgctagagctaattcacgaccttgccctgcgcgaagggcatgatcgcattgccatcctctaccatggcggtgagccgctaagcttgaacgctgatgcgttgacttggtactccgacagagtgagagaaggcctcggtcgttttgaggtccaggaggctattcagacgagccttatcccgcttcgcgagagccatatcggcttcatcaaagatcgatgcgattcctttgttggatcatccctggacttcacaggacgcacgctcaacggctccaatgagaggtacgttgacctctggttgcgcaaagtggatttagcccggagcaacggcatcgcagtaggaccgatcatggtgcccaccacgaacgagactgcaaaccccgcaaaggtctatgagtggttcaaagggcatgggttcgagcaattcaacatcgagcgttacaacgcctatggggcgggtgctgaccgccctgacaatcgtcaacatagcgatttcctgaaagcgctttttgatttggcaatggaagacattgcagctggcaggccattcgtggctaacaacgctgtggcggcttcgattggcggcgtgcttcatggtcagcccggtgagcgctggggcggaaagtgccagcgagatttcctcgtcgtgaacccagacgggtcactcaatacttgccctgatcgtatcgagtacgagcaagggcagtggccgaaggcgcaggacgggatcgatgcctttcaggcaagccctgtgcgcaggagctggatcaaagtccagatgatcgagcatgtggctaatcactgccagacgtgcccattccgaagcttctgcaagtccgggtgcccgatcactgatcatcaggtacataccggcagcggcgagtgcgctggctaccgctctcatctgcaccatgtacaagcttatgtgagcactcccattgggaggcagcatgcgtcggcatacctcgccgcagcaggacacattgcattcgacccctacacatacggaatggagcgcgtccgttga

SEQ ID NO: 359030 - DNA, 1200 bp, Pseudomonas aeruginosa
atgccttattcggtggtaatcgctaagcctacgaaggagtgcaatgctgattgcacttactgctctgcgccaccagacggggcttcgcgctggtcccttgatgacttcaagatcattctggatcgtctccaggggaacctgacgccgcaggtggattggatttggcacggtggtgagccgatgctcatggggcctgattatttccgcgcatgcgcggagtacgccaaatcccaaggcgtgaatctgaactttgccatccagaccaatctgctgggctacaactcaggtcgctggaagggtgttttcgaagaagtcttcggcggacgaatctccacaagtttcgacccatacaagaaatacaggaccgtgaaggggcaggccgagacatacgaccgcatgttctggcgggcgatggatgaagtcattgctgacggctttcgcccactggtaattggggtctatgacgagggcgctgctgatcgagctgcggttatgtttgaccgcgccaatgcctacggaaatttcggcttcgacattcgcttcaattacgcctaccccgcaggtcgggtgcgtaacgccggcatgctgatccagcctcagacctatgggcagatgctcattgacctctataaccgatggatcagtgaggtccctagcttcaacattacgccgctagatcagatgctttcgaaggttgcgggcttccgggcacttctttgcccatggacaaaatcctgtggtggcaaattcctgaccatcgaccctgacggcaccgttttcaattgctccgagttcagtgatcttggggactcggcgcatcgttttggaaacatcctaaccggagctgtccaggtggcagcccagccagtgcaggtccagtattactctggggctgacgtggttcctgctctggcgtcttcgccggcctcacgcgagattatcaaacgaagccgcaatgtccccccggactgcaagacttgccggcactttcaagagtgccagggcggctgcgcccgcgacgccgtgctgttcgagcgcggaatgggggggaagtttgcctactgccagtcgtggaagatggtctttgatcggctcaaggagtcggtgctaacgggcgaagctgacagagtgctctaccggctaggtattgacccggctgctgctcgatacaggctacaagctgggcagggtgctgcctaa

SEQ ID NO: 359031 - DNA, 1002 bp, Pseudomonas aeruginosa
atgaaaatgtccaaggctcggaagcaagcaggtttcacgcttattgagttggttgtggtcatggcggtcatggcgcttatcgccgccctgatgactccgaacatgatggaggaactgaacctgcgtcgggcaaaccttacagcggaggacacgaccgcgatcctcgacgctgccagaagttatcgagtggcgaccgcatcgtggccgggcggcgccacctgcgcgaccgccataaacgtcctgaaaacaggcggctacctgggtgcgatgagcactagcaaccgctacaacaacgcgatcaccactacttgcgataccaggacgttcagtgttgtccaggcggcagtcaaagactgggatggctatctggtgaacagtattgccggaacggaaatcaccgccgcagcgacgaacacaatcagatcgacgattggtgtgccgggcagcgagccagcgctgagcaacaagctcacgcgtgttgctaccggcaatctagaagataaccgtatgcgcaccaacctgctgatgggcggccagcagatcaacgaagcaggcaacatcaacttctcccaggcaaatccgactttaagcgcccagtcaggaagcttaacgctgagtgcgcagaatggtcaggtgattatcccggcagggcagaccctcactgtagatgacgtggtggtgcgttctagaggcaaccgccgcctctcggctagcctgcccaatttcgtccacataggtacttatatcgttcgagacggctggcttgttcagcagcccacttgcgcagcaggcggagttcccaaaggggctctccgtccagccgcaatgcgaggcggatattcgggttcgtatgatccggctttcgttggtcgttatggtttcaactaccggctcacaccagtaggcgcctactggagcgtgacagctgtagcggaggggtacgcagttgactacgcgaacctcgactcgcttgttgatgttttctgctactacccaacgtga

SEQ ID NO: 359032 - DNA, 1161 bp, Pseudomonas aeruginosa
atggcttacttcgtaatcaagcacattggtcctgatggcacctttcaggccaagccaatcgaagctctgaccagggaggaagccatttccaggtccggcttgcaaagtcggaacatccatagcgttgaggtggatcaccttggcgcacttcgggcggcgctgaccgagaagcgccttcccctaacagaacaagtgctcgcgcttgttactgttgcctccaagctcgaagccggcaaaaccccaggtcgagctatcacggaggccgttgacctttctaagcttggcttggctcaggcagacctcagcggatgtgagcgtccatcggactatctcaagctgatgcgttttgatgagacagcaatcctccttgcggatgccggcgacaaggcgggcaacctttcggattccttgaagcgtgctgcatctgtactgcgcgaccgcatgaagacgaaaaaagagttcgcaaagccgatgaagacggctgcgatcaacttcgtggtgggtgtgactgctggaatcggattcccaatcttcggcgggagcatgctgcgagagttcatctacaagcagaagttcccgatcacacctacgtcgctaagtcatttgctgatgtggctcgaaaacttctacatgacctactggccagtcatcgtgggcttgttggtcgctgcattcattttccgaaaccaagtttgggaaacctgccgtagatggccggttttcaatctgttcgatgaccgtctgcgctgtaagaggggtttggagttcgttcaaacctatcagcttttaacggcctctggatttacgacgccccaggtgttgcggttcatgctggagcgttccaagggtcgccaccgcgtcttgtatgaagaagctctggagcgcaacaaagaaggtcgcgaactgggattggtattcgatagcgaggaatggcctcagatcatccagcagaacctaaagggcttcgagcagcaaaacattgatggccgtggccggattctctccaacctctccgaagcgctgacggaaatgttcatccagtattcggagaagatcgccacaagcatgtctcggggcgcgatggcggttctcatcagctcgatcctactgttcgcactcggcttctatgtgccgatgatgaccatgcggatgagcatgtga

SEQ ID NO: 359033 - DNA, 495 bp, Pseudomonas aeruginosa
atgcaacaagtaactgtcgagcaggcgcagcagatgatccaaccggatcggatgatgaaggccaaaaagggccagcagggtttcacccttgtcgagctggttgtcgtacttgccatcctcgcactgattatcggtgtcatgtcctccggcctgttccagtccaaggaagatgccaaggtgcaggccgcgaaaactcagctgctcaaggatttcccgagcgcgatcacccgcctcgtcaccatgtccaacaagtgcaacaacaccaccatcacctacgccaagatggtagagcgcggcgctccaaaagaaaccgtttttggtggcgcgtggactgtggccacttctggtggcaacaccgcgaccgtgacctacccgctcgacctgcaagacaccgccttggccaccagcttgaaggactcgctggtaactgcgccaaacgtcaagtccgcaactggcaccgctgcccaagtggtagtcgcctaccactgcaactaa

SEQ ID NO: 359034 - DNA, 1770 bp, Pseudomonas aeruginosa
atgaaccccaacactgacaaaatccgattcgcgcaggccaaggtctacgagcaccttgtcaaacacggcaaagtcacgcctcaaattgcggagagtcagccagtctctgagtcgatgcaatcgatcatcattgacgcgattcgagtggccaaggatgacgctgctgttgctgcggcagcggctgcggcgctgaacatgttcaacctgattgtgctggaagaaggacttcccgtgcattgtgccggcccgcaggatggctggttggcatacagtgactacctctgcgtcacgaatccgttcgactcgcagatggtgagtagcgccactgcttgggctcggcgagaggacattgaagtccattctattgctgtcgtctccaatagctacctctcacagattcgagcggtacacggtacggacagcaatgatcagagtgaggctgtcgatgacaagctggccttacagcaggtagaggacctgatccgccttgcggctcaaatggacgcgagtgatgttcactttgtcccgaaccaatcggacaaagtggacctccagtttcgtatcgacggcatcctccgcgctcagaagaagatcgatcttcctctctacgagacgatggtccgtgccgtactggagcagcgctgccaagtccctctgcacagcctggatcagcaggatggcaagttcgagctgcaactggatagcaacaagtcgatcaacctccgggtatcgacattgccggttagtcgtcgctctgaaacctcatcgaagatggtcatgcgtctgcttggtaacaacaccaagctggccaaccttggtcggttgggaatgtcgtcgtccaactacgacaagctggtgcggttcgggaactacccaagcggcctgatcgtgatgactggccctactggtagcggtaagaccactgcgctgtatgcccagctcattaacatgcagaacaccaaccccaaccgaaacttccacacggttgaggacccggttgaaatgcagcagccggggatgagtcacaccgaagtcacagacattctgactttcgcgaaggcacttcgcgcactgcttcgccaggacccagatgtgatcctggttggcgaaatgcgtgacgaagaaactgccgagcttggctacaaagcagcaatgactggccacctcgtcttgaccaccctgcacaccaacaacgctcatgaatccatcggtcgcttggagcgaatgggcatcggtatcgacctgatcgtctccaatacaactgcgtttttggcacagcgcttggttcgctgcctctgcccgcattgcaaagtcgaataccgtttacaggacgatgctgatcgactcaaaaagtacgggcagaaccctgcattctcacgcgccaagggtgagacaaaggtattcaaggcgaagctcggcggctgcatcgagtgcaatgctacgggcgagaaaggccggcacagcatcatcgaaattctcgaaatgaccgctgatgttcaggtagcgcttttgaacggggccaatccttcgatcctccgccgcaagcagatcgcagaaggttcgtttgaagacctttgggatgacgggctacgcctcattgcagaaggcgttatcggcttcgatcaactcgaagcacagctcaagccatacgaagtggatcgagttgaggtgaatgcccccttgggttcggggcaagctatcaaggtagctgttcgacctgccgattctcgcccatcgaccagcgctcagccggacctgaccacgctttaa

SEQ ID NO: 359035 - DNA, 579 bp, Pseudomonas aeruginosa
atggagttcaacagagacaagctcaaaattcaggccgaaatggcaaagtcattcaaggacatgagtgacgccggatttatcgtggatcagcagggtgtcccgaagggtatcggtgacatggagcgcttggccctagaggtgcgccgcagaggcggggcgcaggcaagccagggattcaatccgtccgatcctttcaatggagccgatccagtcattcccatgcctgctggccaggggctgtttggcgagtcggcattctccgcccccttgccggcgcccggtctgcctgccgaggctgctaagcccgccgagccggaacctgaaaaggttgaggtcgtaacaaagcctaccgagcgagagaagtccgagggcaagaagctactgcggctggttgagctgcgcggaaacagtgcgttgttcttcaccaatgagggcttccaggaggtcaaggtgggggacagcatctatgaccagaaactcaccaagcttggggtggataacgccaccttgaaaggtaaggacggttctcgcgtcgttcgcatcgactggaccaaatctgtgcgttacgcggacgactga

SEQ ID NO: 359036 - DNA, 468 bp, Pseudomonas aeruginosa
atgaagaagccatcagtatcagttctaagcggaatgagcagcgggatgattgccgccattctgggaactcttgtgctttgtgtgtttggcacactcaagctggaggcacgccgagagcttccaagcgactacgaccgccttgatcgcaacatccaggaagcccaggcgctgatttctgattacgttgctgcaccagttctgccccctcttgaggaatcgtggcgcgaagttgcagctgcgctggagttgaatgggctcgaactcaagccggatgacggaagtatggccaacggctcagtgagcacttacgaggggccattgaagcactggggcggcatggttgatggggatgcaaaaaccatcctggccgtgatcaagaaggttcagcagaccgagcctgtctacctgctcgactacagcatgggtgacggcgagttcaaattgtatttggcagttgtgggtatctga

SEQ ID NO: 359037 - DNA, 951 bp, Pseudomonas aeruginosa
atggctcggttcagcctcggtaaaccgataacaatcggtggcgaggaagtcgttgtcgttcgtgacgttctgggctctctgcaagcggataaggcatcggaaacgtttgcgattgtggaaccgcgaggtgctgatgggcgccccgcgatctacgtgtccgagaacgatctgactcgcttgcgcgacgactatccgggcatgaaggtctacggcctttggcagattctgttttacaacgatgccgttcggatgggggcgccgctcgtaacgttcccgctatctgattcaggcggtctgtatctgctgatggatgcggttgcggacttgaactcgccagagagcatcgtttcttctggcgagtacctgaacggctacatccctgacaactacgacgttgacataaaaaccgccaacgtcattcaggtagacctacagaatctcaagcttccgccgcagcctgcgtatacgcgcatcgagcaaagcgggaaattgaaggctgagaacaagcgacgctggtttgttgttgcgagtctttgtgggctgatcattgtcggtgcagctgcctcgaattacgggttgcagactatctacaagagccgtatggccgactatacgaccaagaagactctcatcgacgaactggatggtcgagtcaggtcgttagctgctgagcggcttattactcggcctgatgactcaatgatgttgtcccagctgttcaatttcttcgagctgtatccgcaggcgaagacgcctccgcttgcagatgacatgaagattggttttgccgggactcatgtgcttgtcactccggccaaggctccagtcgatcctgcatcggtgattgctggtgctgattcggagcttcaaccggacctctcctacatggtcactttgacggagccggatggaactgatgcggctcattcagatggggagggcgatcaatga

SEQ ID NO: 359038 - DNA, 1524 bp, Pseudomonas aeruginosa
atgcaggccgcccgaggcacaacctttgtgcgcgaaattcggaccgaagacctggctatgcagcgcccgatattcctgacagctcagggtatgtcgctgcgatctgtcctccaagaaaccctgccgggctactccatcatccctagcggatcggtcaacttgaacgatccgatcgatgttgctgcccagggcatgaacctcaaggacttcatcgactacatcgagggtacgcgtgacctcaacatcgagctggagggtaagcgcgtaaccatttctgacttcgagacgaagcagtggaatctgtcggcgtttgccacgactcgtaacatcaacagcatcgtcacatcgaaacagtctcgcggtgcgcaggcaggcgatgacagttcccgggctgaaaacgacattactggctccaccattggggtgaatctcagtgaggatgagtggctgaccatcatggagggtgctcgtcgaattatcggcgcacctaagcctgatgaagcctccactcagcgtggttctggcggcgctgatagtacctcggttggtcagggcggcatgccctccggtgccactcgcatgcctgacggcagcactatggtcggcctgaacttcggcccatctatggagcagattgcccagcctttgaatgatggcagtcaagcgttcattgagggcattcggtcggttggcatcgtgaccgctggcggcaagccttctcagatgcgaatcctcgaccgctacctcaagaaagcggtcgctgacgcaaccaagatcgtgaacgtgtcggttaaggcctacgatgttgttctgaaagacggcaagcagaaaggcatcaactgggatgcacttagcttgggcagtatttctggcaacccgtttagcgttgggctcggcaatgcctctcaaatcctaactggcggcggtttctggaacatcactgggtcctattcgggcgaccgtggtagtgctgagggcatcattagcctcctggaaaccttcgggcgagtcgaactccaggatcagccgaacctgaccgtccgcaatggcgtgccggcgcaaatttatgccggtgaggaactgacctatatctctgatgtagaacagagccaggacgaaagtggcaacgtcaccgtaacgcccaagctcgcacgtttgaaggtcggtgtaaccctggcggtgacagtgcgcgttcttgaggatgagcgtcttctggttgacgtaacgcctgttatcgccaacttgaactcgttcgacactatccaaatcggcgactacagcttcgacacaccgcgtattgcgctcaaggagttctcgactcagctgatcgtcaactccggggagtctattcacctcggtggtctgatcaccgaaaaacttgagaacgctcttgaacagctgccttggcagaacaagttcaccaaggctgtcgtcaatccgctgttccagaacatcaacaaccagctggagcgccgcgagctggttctggttgtcactccgactgtgatcgagggtactcgctga

SEQ ID NO: 359039 - DNA, 915 bp, Pseudomonas aeruginosa
gtgaagaaaactctagtcggccttgccgctgccctctctgttgccaacgcacacgcatacagcgatgcagcgatggcgagtgccgaagggctttctgtctttgaccgcgtatacgaggctggtaaggcccagagcgttaccggcaacgtcaagtaccacaagaccgagccagcacctgctgctgtcatcgatctgtcgctggatgctccagtgatttcggtggaggaaacagaaaccgagcggcgctatcgcgaggttctggccgatctggagcagaaccgcgccaagctcgaatctgcgcgtgcggatgctgagcgcgtggttgagaacgcccaggcagaagtcattgccaaggctaacgagcgagtctcaatcctcgaacagcagcgatctgctatccacggacagctcgcgcagatcaaggagcaagagcagcgtatcaatcaggctttggcgctcaatgaagcggccatggccgaggctgcgaaactcaaagatgaaggcgcaagtcaggttgctttcatcaagcaggaaagccagcaaattctaatgatggccgagaacagtgctgtggccatcgagtcggcagcgaagaagcgcgtccagctggagcgaattgatccaaccgtagttcttaacgagccggtcaaggccgagtaccagtcggccacgatggaagaaatcgctcgcgggatgatgccggcagggtggcgtgttgaggtcgagttcagtaatcgccctgagctggctgaccgccgctaccagttcatttccaccgacccccgtgacctcgcgcttcggaagctcaccagctccgtgcgtgatgctcgcgttcgttttgcctacttctgggacttgaccgatgccaacggcaatcccgcaccgatgcttctgatcaccgaccgagacaagtaa

SEQ ID NO: 359040 - DNA, 1524 bp, Pseudomonas aeruginosa
atggccaacaaaccaacggtaaataagaacaccgggattttcgccactgcgctctgcgcactggcaggactactggtctacacctactacctgatccaaaccaatcagcacctcgacgtgcagaccagcgcacttgctacgagctggtatgagctaaagcctctctgggccaaacagatcgtctcagaagggggattccttggaacatttgcggctgtcctgctgatcatgctccagggggtgctgtatttcggcggtgtgttcctggccacctacttcggcttccaatacctgtcgcaaaagcctgtactcgggactgagcccgatagaagccctgcgaaacaggggatcaccctcaatacagccgaaatcaaaggctcggatttgatggtgatccttccgaagtatcctggccctgcgaagggggagtggcttgggggtaaggtcgataaaacgccttacgagcagaatttctaccggattgacagggcagccgtggttactcgcgaaggcgtagaactgaccccacacaagcggctatacatcagcatctactccatgctcaaagcccatgctggggttccagcgagcattggaggtcatcacgcagatgccaccttgttcgagcactcgctttccgttgcaaagaaagtccaagcctatttcaccgagcgcggcaaggtggagcccctggcccttattgccgggattgctcatgacctggacaagttgctcgcctacaaaaaacagggtgactcctgggccaagaacgtaaacgcaacgcaccacaacaagtacgccgcttacatcgtttcgacccagccagaattccgggatttacccgaggatgagcgcaacacgttggtgcttgcgctacggtactaccacgacccagacaacctccccattggcgccagcaatcgaaccgaggcactgatacaggccttgcgcttgagtgacggctacgcgatcaaagaagaaaagaccgccgccgtagagagcctgtcagacgaacagctcgaatcaatcgagaaagcactgcttgataccatcagcgaactgaacatcaacggatacctcaacaagaccggccacgcgggcggatggaccacccctgctcttgagtatgtcatcacccccatgtccgcagttctggagctgctgggcaagcacctgcccgtagagctgaaccgcaagctccagctagaccatgagacacggacgttttcacaccctgcttcgcgcttggtcagccagaggctcaatcagatggggctactgatgacgagctacaaaagcttcgcatcggagttcggactctacgactgccgcatagggaacacccgtttcagagccgtgctgatgatccagaagcaagagcttgaaaagctcgttccaggcctacaggagaaatgggggaccgctgcctatcgagtacgcattacgcgggctacggctgacaacacagtccagggcgacagcgacgtggacgaagaagaagcggaaaacgaaaaggaggcatag

SEQ ID NO: 359041 - DNA, 477 bp, Pseudomonas aeruginosa
atgaagcgaggctgtataggtctggcgatggcacttgccgtggccgggtgtgcttctcaagtcggtggagccatcccgaaccaatccaagtctcagcgcgaagcgcagatcgagcttgcggctcaagcagtaatggcaggcaactttgagtatgcagagcgtttgcttggcccttacatgtaccgcagccaggaaggggagttgcttttcaagtcccttggagtcagctctgacgttgagaagaaggcggtcgataccgttgccctgatgctttgggacacaggtcgcgatgtgtccttggagaaattcgcaggccgctatatgagcggatatgagcgcgatgtaatgttgtgcagactcgcagagcgcaacgctatctatgagcgggcatacacctgctggaacgatttgggtgatgtagatcgggccaggagggtaactcgaacggagagcgccctgcggattttgaaagactaa

SEQ ID NO: 359042 - DNA, 1353 bp, Pseudomonas aeruginosa
atgtcggcatttgttccatttgatgaaaagattctaatcggctactgcccgcaaggggaggtggttgagtggtgctttcccttcctaaataacttcaatggcttgttcatgggtacgtcaggttcgggtaagacctggacgctgaggaacatgatcgcccgtgtgtatcgccggggtacgacctttcatattgtggatgtgaaaggtgattttcaggctgagaacttcatatcgcagggacttggccatttagtctccgagtccgatttcaacttcatcaacttctcgtatttcgatggcggttcgtctctgaacccgatgcaggtgcccagaagccaagatggcggcggggtcacgatgaccatcgagacagtgaaggagctggccaccaagttcaaccacaagctcggctcgactcagcttggctatctcggcgaggtgttgaaggctgtatatgctgactttggtatcgagcacgaagatgagagcacatggggcaagaaggccccgactctcgctgacgtgtacgagaaactgaccctggtttatcagtgcatcgtcagtggcttggactctggttctgtcggcacgatcatgaatgagattggtcgcgcaaagcgcaagacccttgcagctatccgcaaggccgaagatgaagaacaagatcaggagtcaatttctctgctttgccaagaagaagccgatgcggccagtaatgtcgtggctggaataatcaagtcgcagctgtcctatgacgaactggggcggaatggcattggtgaggaatggcagcactggaataaaacctctgtttactcactccgagataccatcggtcaaatggttgatagccggctttttactggcgaagcatccaaggtgcgagagggtgcaatcaacgtctacaacatgacgaacatttcttctgcccaccagcagatcatgatggacattattgcaaggcgaaccttcgcaatggccgtcttgaaaaccaaaatcacaggtaatgccgacccgaaaagcgcaggccacattctcgtatgcgatgagggcaagcacgccaaggcaatatccaaacagccccttagcccggtaaaccgtattgcaacggaaggccgtggctttggcctcggcgtctggatgggggtacaacagcccgaccaggtaacacaggatcagctcagaaacttcgctttctacttcctgctcaagacacctgagtcgagttcgaaagaaatgcagcggatgtttagtctcaagccgaatcagctaaagcagctggagtttagggaaaactgcctgtacagcgccggccaaaagtacgtctgcgtccgacagttcaaggaggactga

SEQ ID NO: 359043 - DNA, 687 bp, Pseudomonas aeruginosa
atggacattatcgatatttccgcttcaaccgttcagcagcacaatgcccaattcccccgcgaggtcgagattgtaagggaggttgatcgcatcctccgtatgcgtctattccctcacaagcgggtatgggtggacgtgcgatttgactacggcatggctgagcattcgtcttcgaaagtcacgctcatgcaaatcagtggtgaagttcatgggatcgccgaggttcgctttcaggggcttttcctctggcaggatttccagacgttcttctacgaggtagtgccccatgagctggcgcacgttcttatggagctgcgctgcgctgagcgcggtgtaaccatggacaaggctcatagcgacgaatggattgatcttgtcctggacataaatccagacgcagagccggcagccaaagttaagggcaattttgacgacaggcccgtcaagcttcaaaagggtggtattgcctgcgaatgcgactgtgacgacctctcgtcctttgtcgttgtggcgaacactccatcaactgtcatgaagctcaaaggcgaggatttgtgctgctcagaatgcagctcggcctatcgacgaatccagaaagaacagtggcccgcagaaatattatctgcgttgagtttttacgaaggtgttatggagcgaaaggtccacaacgccccgctatctaggtaa

SEQ ID NO: 359044 - DNA, 882 bp, Pseudomonas aeruginosa
gtgctgatcgactttgagaaaacacaccgttcatacctcgtcggctcgatgattgaaaacgtttggcagttcaagcctacgaacgagcgcgatccaaggtcaggatttttccctgccagtcaccaaatattcagtaacgcggcgttgcaggttgcgctgcatctttttaacagcatcaacgagcgcgggcagtgtgttggcgtaagtcactgcctgtatctcaatttcactcgcaagattgatggggtatacaagctcaacaacgacaatgggcgcgtggcctttcaccttgacctcggcgtcgccagcgatctttacggattcgtgactggcgcagtcgatgatttcacctaccgcgtggttcgctctggaagacctcccaagtgcatccaggggatcagcatctggcgtgatggcgcaagagtcgccgtcttgcggggggaagatgggcgcaaggaagcggccagtattgaggtggatttggacagggcagcgcagatcgcggtagcggcgttctgtgtcgcctacggaaggcttctctatccctcgctcggcgaggcagcaatcatggctattttgtctccaccacctaaaacccgcgcatgcgcggaaaaatcagcaccccacgatcaacttgagggagaaaccgcgttcgcttcgcaacaggctggctcagctcaagctctggatgaccctgcaacaacacaagccctgcggcggttacgcaaagcgatatgggccataggtaatcagaaatggccgggaatgacgctcaaagcccttcaagcaatccaggcactgaacgaccctgaccacttacaggcgcttatcgatcagggtaatgccggcgacttcgccgcatggaacaagtacgcacagtag

SEQ ID NO: 359045 - DNA, 810 bp, Pseudomonas aeruginosa
ttgatcccgttcgctgaaatcgaccacgttctgattttcttctctattttcctctgcgtaagcctgatgatttaccgaactctgagagcctgggtggcactcggagcgtttttctgtgcctgcctatttattctggtggatgggcattattggttaggagctgtactgctgcccgaggggcgcaatcctcaaatcgcaacagtgggcttgatgcttgcttctgcggccatcctgaccatgcttgccgcgcttcgccgcacgcgaagtttcgaccggatcatcgttggggttgcgagcatcagtgttctgctcacgtcagggctattccactatgttcttgttcagcaagttctcccggcctgggcaaaagacgctgcttgggggaatagctaccttctggcgccggccagtgagagctttgagggcgaatgtgcagaggccaacctttcatgctggaatgctgggcatatcaaatccggtgcgctgccggtcgcattcaagcaacaggtcgaaggtgtgtacacgttctaccagtcgaacaagcctgacggcgaggtgggatacggatttggcgtattcaacgatcttggccaagacggagtggccgtcatcctgttccatatgaagggggaagatattcgcgtcatagctgaccctaagacgggtacgcgcatccactcgaaggtacgggacttgttttatttgctcgacaccacggctcacgcggtttggattgctggagcgttattcttaattgcattccatcgcagacgctttagccgaaggagtgcccgtgctgatcgactttga

SEQ ID NO: 359046 - DNA, 327 bp, Pseudomonas aeruginosa
atgacaccgaatgtaatagacgtagatcactaccgaagcatcggtgtgacgtttcttccgacctttcaaggcggggcggtaggtgtcattgcacgctatgacctccccaagctgttctatccgtcttcattcggtgaagcccaactcaggctgatcctcgacaagctgaatagcaacttgagagcgacgtaccgggggtgcggctactacggtagttgcccaccaggggaacacgactcaagcgacagtaatgtctatgttctgttcgctgacaaagagttctacgaagactatagaaacggtagcgagtcgctagtgccggcgtaa

SEQ ID NO: 359047 - DNA, 579 bp, Pseudomonas aeruginosa
gtgaaaacgcaaaccactcaaatgaacctcgctgaaaaagcgttcgtagctatctgcggatttgtatggcgcttgctacgactgctcgatcccaaaccgatccagcgatactttgcagcgaggatcaacgtaacgggccagccgatcagcaagcttcactcgctgagcattgctgacgctaccgagcatgtttgccgggtcaacaataaccgcatgaaggaaggcgaaggctttctggcgaagcgcggggacctgttgaaggtgtacaacccggcaaacatgaagttcgtttatcgctatgcccaaggggctggcgaactgcgaatccgttacaacgagctaggcctcgactacgacgctaagttggagttgggtgtccttaacgacgatgccgtcgaactccaggtcatgaaggctaataccgctgatcgtgagttctacttgatgtaccaggatcgttctgtttccagccgtcaaagccgtgcgcttggctggtacatgctcctgggaggcatgttgatcacgctgctcacttacgccattggcggtgtcgcgcagctgatcagaaccttcttctaa

SEQ ID NO: 359048 - DNA, 678 bp, Pseudomonas aeruginosa
atgcaatcacttgatctattcggcgatgttgtcgaaaccaagcaaccaactaagcccaaagctccagctgcgccaaagccaagtgcagtggtaaagctgaatcgtagaaaggcctggggacacggcggatacctcgccaccctggacgacgacgatagcttgtccattgaaggtactgagtcgtttaccgagaacgcgacaatcgaaaggttggagcaggctctgttcatgaccccagtaatccgaaatggagaatgggttgaagatggttcgttctactcgtaccggatcacaaagcacgtttgcgggcagcgtgagttcggcaagagaggttcgatgttgcacgactgcacgttgtacatggttcaaaccagcgcccagaaagtgttggaagaaacctatgacgacacaggttcgtggttgcccaaatgggcctactggttgttctgctatcgcctccgcaaggctgacgagaaagaagacccgtatgaactgctcaaagccttcaccgcagtaatgacgcaacacgacttcctcgacgcatcccgcaagggtgagtcgttgcgtcggatcacgaagcgtctgcacatgcggcaaaaacgagcgcaggaaagggcttcggcctctaacgctgctcaggaagacattgatgacgaactggaactgaaaacagcctga

SEQ ID NO: 359049 - DNA, 1224 bp, Pseudomonas aeruginosa
atgactcagacctatgtttctaaagtacgtaccgctgtaaacgacgaccaagttgttgtgttcaacctgatggttagctgcatgagtgccgaacgccagttcgacctcaccaagctgggcatcgacgtggacaagctgcctagcgcatcccgtaagctcgtacaggagagaatctttccgaaggagtttctgaacaactacagccgtctccgcgaccgcgccaacgccgttctggaccgtggcgctgccgttcggttggaaatgggtgttgtaagcagtcgtaccgaagctgtcgccaagatcgaagacctcgatgccatcaaggctgactgggccgctcagatcgaaaaggacagccaccgctatgccagcatctgcaacgagcgtatcgcgatgatcgccgctgaggcgtacaacgagcaagttcctgccgatgtggtaaacacgctggttgatgcactccgtaagcgccaacccacctgggagcacttcgtgagccgcatgaacttcgcttactcccctgtacctatcaagctggaactggacgaaaccaaggccgaattcgacccgattctgttcaaggctcagcgcgaaggtctggttgcattgcgtgaaggtgtgtttggtgctctggttcagtatctgagccgtgagagcaacgaaatcctgaaagtgttgaatggtaagaagcagcatcacggcgtctacaccatcaactaccggacggtagctcgcatcggggaaatcactgaaaagctgcatggtcttgccttcgttcaccagcaagtcgcgccgttggcttctgtcatcgacgctgcgctggccttcatgcccaaaagcgtggagaaggacttgggattgcagccgtcgcagttcttcaacctgattgcgtgccttgaagcgattgccgaccagcatgaacttctggcacgtctgcgtgacaagcagccgcttgttgaagtgagcaaccaactgccgccagtaatggtggcaaacgggcatgcagtatcgaacagcattgcacagcaggctctcgcaaccgcgagaaacagcctgggcgcggcgcagcagacccctgttgttcctagctctgctgtatccacctctcaggtggtggaagaagctgaaatggaagcctcgcaagaggtggaagttgaagccgagccggctgttcaagagtgcttcatgggcctcggtttcatgggcgcaaccctgttcgactga

SEQ ID NO: 359050 - DNA, 2076 bp, Pseudomonas aeruginosa
atgcgttctgtaaaaactgcacccgaaggttggattcagttcctgcgctctctggcttgcgacaacaagttgaaagtcgtcgttggccacggcgttggcgctgcaactgatggcgagactctgtgggttcctgcgctacctgaaaaactcacaccagatgatctggtgctgttcaaaggaaatgctttccacgaagtcggccatatccgcaagagcaacatcaagttctttcaggcctttagcaaggagcatggctccttcgctcagttccttctgaatgcgttggatgacgtgtttatggagggcgcgatggcaacctggaagaagatggcatcccggtacttgctggactcgaccatggttctcatcaatcgtggtcaattccgggacggctcggcgagcttgggtgaggcggtggcttgctactgtctctcctacttgaccgccaagcggtggccaacagtgggagctgctgaaacccgtatcgaggccaacttgcgcaagcatctggccgagcacgcggacaaagtggttcctgcgctacgcaaccttcttgatgctgagtttccggctgtgaagtccactgaggacggagcagcacttgccctcaagatcatcgatctactgaaaatgctcgcagagcaagagcaatcccagcctagtccgtctgctgacgaagacgaaagccaggatgatgccgaaggctccagcgcatctgaacaaggccaatctgacgatgccgacgaatccgaatctgaaccgcaaggcgatgacaagggcgaaggcaaaacagaggaatccgatccgaaaggtgagggtaagggcgacggcgctgctgatgagtccagctctgatccgaaaggtgaagggcagggcgaaagcaaagctggcgattccaagcctgagcaaaacggcgacggttccggcaatagtgaaggtggcgccgatgactccgaatccgatccgaaaggtgaggggaagggtaaaggcaaagctgagcatgctggctctgaaagcgacagcggtgatgctggtgaaggcaacggtgctcaggatgacaatggcgcaagccagagtggttcgggctccgaagctaacagtggcaagtcgctgcaacagatggtcgatgaaatgttgaaagaacaactgggcaaccaggaggtcttcgacaagggctcggcaatcgaagaactggcaaagggcattagctccggcgccgacgaggcctacaaaggtcagccagtcatcgaaggcttggtcttcgatttcgcaacaggtgcaggtaagtccgaaggctttgctgacgggatgcctgtggtcgaagcggacaaggtgatggctaacgtcattgccgatgtgactggccgcaaggcgaacgtgatgggcaaccgcctacgcgcactgctggcaaaccgtgaagaaaccgatgagtacgacgcccgtaatgggcggctgtgcgaacggaatctgcatcggttcgcgctggatgactcccgtgtctttgcgaaagcagaggaacgtgttgaggatacagccgctgtctctatcaccgcagacctctccggctcgaccgcgatggcgcgtgatggttcgtcagttgctgagcaaattcgcattgctctgacgctcatcgagaaagttctgcatgaggtgggaacacctcgcgaaatcctgggctttgctccgaatagcggccagctcaactgcatggtgaaaaccttcggggataaccaccgtgtagcgctggatcgtatcgcgggtatgcacaggcttgttggcggcggctgcacccccattggggatgccgtcctgcaagcaggagcgcgcctgatgggtcatgaagcacagcgcaagctgctattcgtgatcactgacggtttgcctgatgatgttgagcatgcccgagacatgaccaaaaccgtcctccagggcggagttgaggtcatctatctggtgatcggttcggccaaggcttgtacttggctgcaatcggccagcatcaagttcgcacatgcagaaaacgcagaaggactcatccccgccctggtttccaaggtggctgagttcctaaagtga

SEQ ID NO: 359051 - DNA, 228 bp, Pseudomonas aeruginosa
atgaagaaattcatcagcaacgcaaaaagtgttctcagcaaggcaatcctcgtagcttcgtgccgcgtggagattgctcgcgctgttctggcctacacggtcgcggagtaccgcttgaaaaagctgcatcccgtgcgccatgcccgtaagcgcgaagccatcagctatcagtacagagccaaccggctcacctgtgatctggcggtacagaaactgggcaacctttaa

SEQ ID NO: 359052 - DNA, 1113 bp, Pseudomonas aeruginosa
atgactcaagttaaaccatccaagaaatcgatctacgttcacaaagctttcgggtttaacgatccgattccaggctttgagcaaatgattcaaatcgacgaagttccgtccccttacgtcccagcgatcaaccctgactacgtgtttgagccagacatggttgctcgggtgctgcggtcatacgcttcatccgagaacatgatgttcaacggtgaaaagggcactggtaagtcttcattcgtgcagcagttctgtgcgcgtctgaatatcccgcttatgaccatcacaggtggtcctggcttggatgagacttacctgatggggtcgaaaacaattgaaaacggcagcgtcaaagctgttgatggagtgttgagctattgcctgcgtcacggcattgccgtgctgatcgatgagattgcagcaatcaagcccagcgtgttggtatccattaacgatgtgttgaatggcgatcaggtgatcaccctcaagcatcatggcctagacccgaccctcaaccctgatgacctagcaaaagtcgaagggaacatgaccatcaagcggaaccctcggttccgtctgttcgccactgacaacactggcggcaagatgagccgtgatccccgctatgccggtgtccacactcaaaacagtgcagtccgttcccgcttcacctgcttcaagatgagcttcatgaagccggcgctagagcttaaagctctgctcggttctacgaagggaatcctgccggtgttcgtgggtaggtccatggtcgagttggcgatccgcatccgcgcatcgttcgagatcggcgaaatgactgatacggtttctttccgtgagcttcaacgctgggcacgcaagtccctggtgtatgcgaagttcgatgctaatcaacttgttgatggcaagccgaagatgatccccgactgcgcgaaagcgtttgttgatgcgatctataccggcatggaggaatcagatcaggaagtgtcggccaacttctacgagttggttttcggtactgaactagacctgccaaatgagtacaaggcgactgcgagcaagttcctggaacagctcgatgccggcaaactcgattgggacgaagctgcataa

SEQ ID NO: 359053 - DNA, 255 bp, Pseudomonas aeruginosa
atgaacaaaagttctaaattcaaggctgcggcctatagcatcaacgtgttcgtacttggtttaactggtggctggataatcccggttgatttttacaagccagtgtccgtagtcaccgcactcatactgctggtgatgttcctgtctgacctcaagctgtcctttcccaaggacaaagcgaaagggaagaccaataaggtcaaaaccaagaggaagcgtccaccgaaaaagagaaagagaaacaagagaaagtaa

SEQ ID NO: 359054 - DNA, 675 bp, Pseudomonas aeruginosa
atgcctgacgtatccccagtcgttcgagaacaagaaggtattcggctccgcgctgcttacaggcgcattaagctgaggaaaaggattacacaggctgatttggccattgcctgtggctggcaaagtgcgagcacgtttaaccgcctgcttagcgggaagatcacgcttactggtgaggttctggctaagctgtgcagtcttctagaggtgttgccctctgatatttcaccacgccttgctgagtccgtggatgccatcgctgagcatctggtggctaggctactgcctgtcagctatgtcaattcagttactcgcgggagttggggggagccatttctcaccacccagcggatcattcatttcacttctgacagcaatgcctttgctctggcattcgaggcagccgcagcccctgctggtcttgaaggctgggtgctggtagtagagcctgctgggaaacccatgcccggtgactttgttgtgcttcgccatggcgccggcaaatactcgtatggtcggatcgggcagccgcagccagatggtgcttgccctgtagaggtagtggggcgcggagtgatattggctcggcccaagcagtgcatgctggttgcgaccctcgttcgccagcgggcgctacaggaatcccgcgcatgcgcggaaaatcttaatcagtaa

SEQ ID NO: 359055 - DNA, 1251 bp, Pseudomonas aeruginosa
atgaaccgcaaacgtgaaaactcgaagttttctgaacctctctcagtgaccgtccagaaactggttgatcagaacgggggctggctgaacgtgataggtcgcatgaccaacacgtttgatcatgcactcgcaaaggttggccggcttaccgactgtccgttcccttcgcgtcatggcaaggggggaggtaagggcgacttccgattctcggattcgactgagaatcacagccacatcggcagggcgatttgcacctgcatgcaagatggtggcatgagcgcagtagagcttttgatggaagacgggataggcggaggtgactacaccaaatgcctgctcgaaaccttcaaagcccttagtccggcaacgagcggtgagcatgtgaggaaggaaacggccccgaaagtggtacgcccagctgacagctccactgctctgacgcctgagaaaatcgcagagagaaagaggaagctagacctcattgcccgagacttagtgaccctcgatcatccaagcgctgcgcctgggcggacatacttcaagaaaaggggtatcccgcttaatgcaaacattcaggacgtgcgtttccatccaggcctggagtattgggtggacgatgagaatgatcctgagaagaaaaagaaagtcctcgttggggtgttccccgcgatagtgagcgcgttccgttcggttgatggccgtgtggtgaactttcaccgcatattcattacagccgagggggataaggctccggtgatcaaagtcaaaaagatttgctcgccgttgcctaagttcaggggctcatccattacagtcgcaaaaactgaggggcgtgttctgcacgttactgagggcgtcgagaaggggtgggcaattcatctggcgacaggtgaatccgtgaaagtcgcttactcatgcagcagcttacccaagctgtatgtggacaaaagcgagtacgactctgtagtcatctggagcgataacgatccggtcaatccgaagcgtcgtcggccagctggtgatggtcaatactttgcttgggaactcgcacgtcgcctctaccaggagggtttcgatgtgaccttcatgatgccaatcagtaactcagtcagcgagaaggggccggactgggaagacttgatagttagtgaaggagtgttggaccttgaggggtcttactaccgagtccaaacgctgaaaaccttcgcggttaaaggtggtgttcaaaagcagcattctcgtgttgcttga

SEQ ID NO: 359056 - DNA, 165 bp, Pseudomonas aeruginosa
atgggcgaggaagccaaaaagaccttcacgggtgaactgctcgtaagtcggaaagccaaggcaaccagtgcgggcgtgattgcctacctcaacgacgaaggccgtgaagaagtgattgaggtgccgttgaagtacatcggactggtgtcgatcaaccacgggtga

SEQ ID NO: 359057 - DNA, 1263 bp, Pseudomonas aeruginosa
atgcgcacttgcctccggcgcagcaccgtccagattagcgcgagagccctgctccggtgcgccagcgacaccatcagtaacgaccaccggctgagttccagattgggtctgaggatgagcaggagcctgagtctcagtcggcccacctgtcttcacctgggcggcgggctgagaacctgtgctttggggctcttgagcggcgccacccgaattctgctgggtagcagcacctgtttgctgctggccataagtcgaagacggcgcatcagaaccttgggaacctggaagctgcgacggggcctgggcggtcgtagtagtcgtagtgacaggcccggcctgacgctcaacaacagcagatacgctttccggccaaacccaagtttcaggatcgaacttgtaggactcatcctctgcgagaacacgcgcctgacgaatcagagtacggttgctgggagcgccgggcactttcaggctctcaaagattgccttggccaagtcctcattcagcttgcagataacgtcgaacgtaaccatggtatccaggtcactgagcaggtggctgtggcacacctccttcgcgacagggtggaaatccgcagccttgagaaggttgtagacggtcttctctcggagcccgtatacctgcatcaactcggtttgggaaacgtgccgtttttcttcttggcccagctcgcgctgataatcgcgaagcgcctgccccagctcaacagggttgaggtcaaccttggcggtgttctcatggatttggcaacgaagacgataggagcggccacgcttgagccagtcaacgtcaatcaccgctgccaccttgcggggcttcggtccgatgctcggatgatcagcagttgtcaggcggcagctaagcgtccggcgatggccataggcaatgccatatttcatcgccggcttagacgcgtcgagcttttcaggcggcagtggatacacccggataggttggagctgttcagctccatccatggtcaaacgcagctcgatcagaccttcgatgctgtcatccaccactttcccgttgcggatgttctctgccgggtcgtagaggatttcagtcgtaggatcaaggtgaaccaccttgtccttctgaatgccgatggtgccggcattcagctgagcagcggagctgtcaccaagcttcccgaaattacgtaccttcatactcccccccttaaaccgctgtggcctcagccgcgatcttggcgcgtactgctcggctcacttcattga

SEQ ID NO: 359058 - DNA, 954 bp, Pseudomonas aeruginosa
atgactactcaatccaaaaccaagaaaccgtcgctggcgaagcttgaggcggtcatcaaggcggcgctggcctcgcctgagcatcgtctcagcaagatcattgcaatcaccaaccagaagggcggcgtcggcaaaaccagcacctccttcaacttcgctcattacctgaacgagcttggctaccgtgtactcgcggttgatcttgacgggcaggggaacttcaccgagctgttcttcgatcagagcgtgctgacgcagtacgttcatacccccgctctcgcacttttcgagcagggtggttgcgataattttcagccactgactcacccgagcggcatcgacgtattggcgactccacgcaactgccatgagctgaatgaaatcgatagccgctcgatcagtgtcgccgaggtgttcttcaacaacctctcggcaatcgcgcagcattacgacttcgttctgtgcgataccccgccggccccaggtgtgcgcaccacttcggcatgcgcatctgccgactacatcttcgctccggtgctggttgatacgtttgctgactcagcgcttgaaggcgtcatcagcagcattcagaacatcggcatgatgcttgaggccgatctgagtcttaccggcatcttgattaaccagctggttctggacggcaccgctgacacggctcagcagtacaaaaacctcgccgctcgtatcggttcggccctcatcccaacaccgattcgccagactaagccgttcagtcgtgcccagcggaaggggattcctgtgtggcacctgcgccaaagcggaagtgagcgctcgaccagccacgaaacgcgccaagcgtatggcgaaatggcagctcgcattcctgaaatccaggctgagcgaattgcatttttcaatgaagtgagccgagcagtacgcgccaagatcgcggctgaggccacagcggtttaa

SEQ ID NO: 359059 - DNA, 1893 bp, Pseudomonas aeruginosa
atgcgtagcaaatttgccctgacacttcttgccagctcaattcttctgagcggttgcgcttcgagcccgaccccagaggtggggctcattccgcctcagtcgcagtacgacgacaggatgctcgattcccttgggagccagcgttacaccgagcagcaaatgctttacatgcgtaaggtcgaagcacttgagcatgagctggactctcttgagcagaaaaggcgggctcttgaatcatccataggagtaagccagcttgaggttggctcaggaaagctccaggcaagcgacagcgaagctgctcgcatgaccgacttcgcagcggccacacatgagtctcaaacccggctagcacaggagtccgctgatagggctgtcaatcaggcactcattgagaatgaccgcgacagagtgctgctagaggccgagcttgaggctaatcgccggcttgttgagttggatcagaagtacagcgcttccattcaaggtgccgagagcgaatccgccaagtctcgacttcgtagcgagctagaggtcgaaaaggccaaagcggaggcgcaaaggaagaaggctcaggcggaggcagatgccatccgtgacctctcgcgcctggagcaggactatcagtctcgaatttcgtcagcgaaacaaagggggttcgcgagcactcaggctgcctctcaagaaacgcaggcccaaagaatcaaggttgccctggccaatgcagatgcaaagcgccgcgttaaggatgacttgtccggcgcccaggctgcacttctccagctcaagaccgagaagcaagatgccatgcagtctgtgagtgatgagattgcaaatctgaatgcccagctcaacgcggctaaggggcgacttgccgggattgaggcgtcatttaactcccaaattgcaatcaagcaatcgcacctggatatgcttaacgcgcaaagccagcagcttgcggaggtggagcaaactctaatcaactcgcctgttgttggcctccccgagacgatgagtgaatctccagaggtcaagcgtttggaagctgagttgcaggaagcgaaggccaatctgctatcgcagaaagcaaataggcttgcagagattgagcatcagctggggcaagaccttgaggcaatatccgggcgattgagcgctcagctcaattcgcagccagcaggcgtttctgaggtggcggctcgtatcgataaggctgtttccgagaacgctattcgtgcagagctggctgcaaaaaagacccagatcaacaacgaagcgagaagcaagcttgctgagctaacggtcagaacggagattgctaaggcttctgtagtcgcccccgtacttacaaatcgagctgtgtattcagggacatacggcgcccggccagaagcgtttgcagccaagcaagacacagccgctgtcgaactggttgccaaagccaaggctgtcaaaaagcccgtcagcaagccatcgcctgctgttgagattgccgcaaaggacaagcagtcaggcactggtgttgcccctcttattgtcgcaagcagctttgagcccaggaagccaggacctctgctcagcaatgtcgaagaaggtgtcgtcgcctctggggtcatgtctggtggcgacctcaagccattggtgatagcccccgcagcgaccacttactccgttgtgtaccgatacacagagaaggggagtgctgacaagttcatggcatacctccgggcatatggcattaccgatttcacgtaccaatactctgccaagcttggccagcatgtccttttcatgggcaagtacaccgacaaagatcaggcagtaagtcgggtggcgttcctgaacaagacaacgaatacggcgaatgcacagattgttgagcatgacttgtag

SEQ ID NO: 359060 - DNA, 921 bp, Pseudomonas aeruginosa
atggctagacccgaccaggagcacgacaacgccaagcggccagctaggcgcatggcggttaaggcacgccaagtccaggtacttgcggccactcgcttcgacattcgctcagtgccgcaagctttcaagcaccttcctgtagagctgctaaggcctggcatgttccagacccggcgcaacttcaagccgagggcgctccgagagctagctgccagcctggaaacggcagggtctaacattaccccgctgattgtgcgccctctcaagcacgctgagggctacgagataatagggggtgagaggcgctggcgagctgcccagctgataggcatgccgacgcttctctgctgcatcggaaacttttccgatgagcaggccatgtacttgagtgcagtagacaacatccagagagaagggattaaccctatagaggaagcggagtcctataacttgctgctgctctctggcatgtctcacaaggaggttgccgacgatataggcaagtcccgcacccatgtcacgaactatacgaggctgctgagcctccccctcgcggtgcgagacatgctcggagacgagcgcttgagctatgcgcaggcgaggccgttatgcagtttgtcctcccccggacttcaagcaaaccttgcaagggaggcagtgcaaaagaaatggtcatcgaagcggattgaagccgaggtatcgaagctcaaggctcatcggcgcctcgctatacctaaaccgatacatggcgaagacgttgacgttaagcggctgcgtgatcttgtggccgaacaaaccggatacccatgcgtgatcgtcaaaaccgagtctggtggatggcagctgggtctgcatgctggatcggcggatgagttccaagggattctcgaacgcctcggtgtaaacaccgatcagctgtag

SEQ ID NO: 359061 - DNA, 333 bp, Pseudomonas aeruginosa
atgatcctcaacatgcctgtatacgacctttggaaggtcaaccagcagcgctcctaccccttcatcgttgaggaagtctatgcaacaggcgaaggccagtgcctagatgttgagagcgtggtcgcagcgtgcaagccagtaatcgacgccctggtacgtacccggttcctgccggacgatagcagccagtacatcgcgcagcccatcgcttacacctatcgccagcgaaacaacggtttggtcttggtgctcagacccgcacctaagccatggggcttggtatcggacaccaccgttgagctggcgcaggccattccgtatctgggtgcatag

SEQ ID NO: 359062 - DNA, 381 bp, Pseudomonas aeruginosa
atgagacttcaacgaatctgcttggtagacgacgcaagagcgatgcagaccctagcaaatagggtgctggttcaacagttaggcaaagagctggtggtggcatcgaacggattcgaggccctggacgtgatcaacaccactgagccggacgcatgctttatcgatgtggacatgcccgagctgaatggactgcaactggtgagcatcatccgagccaacccaaagttcgagaagatgcccatcgcaatgctctctagcgcagcaagcatcttcgaccaccagaaggggctcatagccggcgccgaccgttacctgaccaaaccgttctcgaaggacagcatcgaggccgccctgaaagaaatggaggccatgtatgagtaa

SEQ ID NO: 359063 - DNA, 501 bp, Pseudomonas aeruginosa
atgagtaacggtggagtcaaagaccagcgccttgcagcgttcaagctcggcgatacgcattgcctatgcgcaacctcgaacctcgacgccgtgacccctacaccggccaacgcattgatcattcccggtacaaagccttacttcaccggcaatgcaaagatcggtcgggacctcgtttcgtacttccacctgccaacctttctgggcctgaacagcacatcccagcaggaagcgaatgacgataacccgacgaccctgatccttcgcgaccctttatcaaccagcgtttatgggcttcaaacggacggcatcatcgcgttcatacccgctgccgagctggaagatgcggcccgagaagacttggctatccccgccaaactgacgccgtactgcgtgggcgttgtgtccgccagatcgaaactgtgggcgctaatccacctcgacaacatcatccgtgatccgaactttcgctccgtcgaactacctgtccagaggccttaa

SEQ ID NO: 359064 - DNA, 1989 bp, Pseudomonas aeruginosa
atgagcaaaaatctcctgatcccatcgtgcatcgcagccattgcgctgtctggaggcctcgcagcattcagtgcatttcaatacaccagtggcgtgaatgcagatcggttctactcagcgcaagcaagcaccctccagaactctgccctgaactcaatcactctttcgatgcgcgcatcgacggatgctagctatatcggccagttgcagcagcttgccgcacaggtagatgcaaccgtgagcaccctgagacaagggagcaccagcgcaagcatccctcccctgcccagcccagctgacgccaatctgggtcgcttcgaggatgcctggggcaacgtgctgaacgccatccaacatattgcggcctcccgtggaaacaacagcgcttttgagcgtcaggctgccgaatctagccaactagcggccagcctgatcacagaggccaccgaagcgcatgcggtgctagaggccagtcctgcggtcgatacgcgtgtcaaacaggcggtgtcgaaggcgaaagacgccgttgtagatggaatcgagttgctggccaacacatcaaccccgaacagcgacaacctgaatctcgcgcttgaggccagcaaggcatatgtggccactctggcaagcatcggcagagccgttccaagggacaacaacctcaccgggccactcctgaaaagctaccaaacagcacaggccctgacccgctcagctatcaagtccgttgaggctgccagtggcacagtcgataacgctccgcacgttcgggcgatctgggccgagcgggagaacattgacgctgcaatcaacggaatgcagcacggcattgcaaccctgcacaagtcccgactcatttcgccgatgatcctgctgagttcgctgggcgcagccctggttatcgtccttgggggcatcaccctcattctgcgcgaatcgagagcacacactcggcaagcccaatcgctggccaactcgatccaatcgtcgcaaaaggagcgctcccaggagctgcgccagctgatcgacgaaatggaggaagtagggagtggggacctgaccgtcgcattcagcgagggcaatgcctccactcatgacatcgcctcgacgcttaacaccgtattccccaagttcagggaaatcgtgaaagacgtgcagcagacgatagtcagcctctcggctgcgtctgaacaaaccctgagcatggcgcggaatactgagcgcagccgcaatgaacaagttcaggcgatccagcacatcgcaaagctcgtcgatgaactgaacagcttcaccaagcaactcgacggcgtgatcaaccgcacccgcgaatcttcgattgctgtaagtacgcagatcaacaccggctctacagcggttcaagaggtacacgaaggggtggtcaagctatcccagtcaaacctcaacatcatgcaccacgctaaggccatgaccgaaaacatccagagcctggagcagctggttgatgtggttcgtcgcgttgcaaaccaagcagcgacagttgcttacaacgcgcaccttgtggccgacgccattaccgatgatgacctgtccaagcgcatccgcatcagcgccgaagccatgaacaagctgaccaacagcgccaaggaagctgctgagcagatcgccaccaacctgcaagcgatcaacgtggcagcaaaggacacccagtatgtgctggaggaaagccagacagacattaaggcactgtccggcatgtcctccaatgcactgaaagcaatgaacgcgatcagtgagcaaacgagccagctggttgaagggatcatcagcgttgcagggaagactgccgacctgaatcaacgctctgatgaggtggctgacacgatggagcaaatccatcactacgcctctgatcacagctccgccagcgagcagactgctactgcaatcagcaacctgaatgcgcaggctcagcgcgtgggctcaacgctgtctcacttcaaagtctag

SEQ ID NO: 359065 - DNA, 783 bp, Pseudomonas aeruginosa
atggccgaagctatcgctgcactcgacgaccagcaagcgtgggtagacctgcttttcacgcgcttcaagatcgaggttgcccaggatcgccagccggcgctttttcgtgcccttgatgcctacgcaacctcgttgaacgagacggcagagtcgttgctactgcgtgcgacgcggcgacagctgccacaggcctgctgggcgcagattatccacctggccaccaatcatgagactcggttttaccgtaacccgcccgtgattgagcttatcgccagcctcgcaaaagagtttccgcgaccccgcattctttcagtcgggtgctcaacaggagaggaaccctactcgatggcggtcgagctttgcaggcaggaattcccaaacttccatatccatgggacagacgtttccgaaccctgcatcgagacggccatggccgggctctacaaggcaaatgagtctatccctgataggtatgccccaaggattgatggcgggcgaacgatgcgcttcgttagctggctcaaggactttgtgaccttcgagcagcacaacatcctgggcgaaagaccaatcaattttgcctcaccgaacatcatcgtcacacagcacatgctgatctactaccgcgccagaactcgctcgcgaatcctggacaccctttcttgccttctcgctgatgggggatacctcatcacagcatctgccgaagaagcccaatggaaggccgatggctttgagcgcctgaattgccttccagcaactgtttttaggaagaaaccatga

SEQ ID NO: 359066 - DNA, 5520 bp, Pseudomonas aeruginosa
atgaaccctgtaaaaattgcacatctgtcgtgggtgcgcggcccgattgagaagtacatcgagcgctgcaagcaggccatggtcagcattacttccgtccgcgaccgtatcaatactccccctgccggcgcggagcccgtgtggtttgctaaccaaaacgacaagcttgcgtctagccaagaggaactgaacgcactgctttcaggcattgcgtcggccctggacgtgattggcagcaacggcggttatgccctcgccaacgaaatgcgcacattggccagcgttgccctgacctcgaacgacagcgttttgcaagacaaagctctgctggccatccagaacgctttgcaggttctgccgggctatatcgggatggtcatcgagggcgcccatgactcaccgggcgtgctgctcaactacatcaatgagcttcgctcgttacgggacgtgccggcactcactgatgactcggcgctgactgtaaatctgagcttcgggtacaagagccctcccctacatgaaagcgactgcgacctcgcagagcgggagcgcgtattcaaaaaggctgctgcacagttttgcctgctttacacacaggcgatgaaagagtcgggcgaggcagcctgggtcgaaatgcgcgagcacctgcgagcactacaacgggtcacgaatgaccctgagctgggctgctactggtgggtaggcgaggcaataatcgacgtgatcattgctgacggctgctacatcacaccagcgatgacaacggcccttcgagtagtgatggttgctacccagcgccttccgcagggagagagcgcagccaaacaggcgctcagtcccgccaagttttcctcactgctgaacgctctttcgatcagccgcaagatcactgctacagcagcggaggtcgtcaaacacttcgatgtgaaagagaacgtcgaggaagatcggattgcccagcttcgacagcagctatccacacagagcgtgcagaacatcactgatgtgctgaccgaaataaaaccaaggcttgagtccgccatgattgcgtttggccgggcggtcaacgcgaagcacgcggatgccttcgctgtacagacccaagccttcgaccagtcgatgcgcaccattgcaaacatattcggcattttcaacgaaacggaactatccgaggtcagcttctatctggccgacgctgtgaagggcgtaaagagcccagctgagttcacgccagaggtgatcgagacggttaagaaccaaatcctgttcctggattccaagctcacccacttgcggcgcaacgaagccgctgatctgcttcaaatcgagaacgtcacggctgatgtgatcgaacgaattgctaccgaaacgaccgctgaactcaagaaggtcagccacatgatcgctacccacgttgatagcggcgttggctccgacaaactgctcacggccctcgcctcgttgcgggagcttgcgagcgtctatgagttcgctgggtctgtatccatcgcgaaaatcctggctgcaatagtcaacgtcatcagcgatgaggttcgtggaagcgtgctggatgaatccgaacgactgactctcgccgcccgcgctctcgtcgccctggaaatgtatctccagtacatcacctcgaaccttcatcctcccgccactctcattgaggcagccaacagcgccgtgcgcgagctggggcaagatgttcgtgagttccacattgtcagccatagcgatctggaggcgaaattcgatgcgagcagcaccgaggatgacggtctagacgccctgcttcgcgagattttcgagcttcgtccgtatatcgaagaactgcaacgggaatcagccgatcacaaacggacccagctgtctcagtatgctgcggcctgcctacgtctcagtgcagcggcgatgatcaaaggcgagaaaaaactggctgatctctgccgcaacgcatccgagctggcaaacatcatccctggccgagtggatgacccttcgttcgactcaaagtcggcagcatcaactttggctcgtgccagcgagacgattctccgctgcatggacgactactcggcaaagggcaaggtaaacctgttcctgatcgatgccattcgagaagtcgcggcaatcataggcaacgccccggctgcggttgatcagccggtcgaagctaaaccagaggctgttccagaaaagcaggaacgcgcctaccccgaaggttacgatccgcaactacaggtgctatttgacgaggaattctccgagcagatagccaaactgcgtgactaccttgagcgctccgacctcactgtgacggaagctgagtgccgcgccatccacaatatccacggctgctcaggctccgcttcgtgccatgccgtcaatacgctgttcgacgttctcgaagcccgcttctatgcactcaaggcaaatgatgactgcctctcggcagaacaagccgaaagcctcaagagcctgcttgtggaggtcgagcagtatcaaaagaacttcccgtgggaggctggggtgtcgcagcttcctggctggcttgaagtcgcaggggcaatcaccgggaccaggatagccaccgacgccccgagcgaacctgagcccgagcccgagcccgtttccgcagccgccactccaattgagattgaggaagcgccagcaccagtaacgacccctgaacaacccagcaacccagtagctgtgcagatcagtgccgcaccagactacgacctggaaatgtacgacctgtacctcacggatgcagacgatgttatccctgagctacaacggaacatcaccgcctggatggccgatatgtcagacaaagagctgacagtgaacatccgccgcaacatgcacaccctcaagggtgctgctgcaatcatcaatgccactgcgatccgcagcctgacccaccacatggagtctctgttcgactctatggcttccggggccataacggctgacaagcactgtgccgacctcaccacgttcgttctaaacgaactgatcaccatgagcgatgcggtacgcaaccgcgaaccctaccggacaatccccgcgctcattgatctagtgggcgatgcctgtgacatgtgcagggtggatggagacaagctcgcggctgtgatccagggctcttatggcgccggacataccgacgcaactcctgctgccaaacctacaccagatgccccagatgatgccgcgcccatatctgtcgtcgaggccccgccctctgaatcggttgagagcgaaacagccgaagtaccgcaattgctcactgcacatccaactggtagccccgcgcccgccacaaccctagcagcccatgatgagacggctgagggtgatgatgcacaagatgacgaagaagactcggggccgaaggggcgacgtggataccgtggcctgcgcggtcgcgcctttggggagcgccagcgcaactacgaaagtcgccaagcaaggaaatccatggccgctgacgggctggtcttcgatgcagagttctaccctggcgaacctgactacacggacattgttaccgccaacaaggaactcagccctcaagttcagtccctgttgcatcgagctactgaaagcaacagggaagcctcgcgcaccaagcggaaaggggcgaagggctccgagaagatcaaggttgaactccaacttctggacaactcggtcaagctgtcgaatgaactcaaggcatcctcctaccggcagaacactctgcaccgcgagtcgcagctatcggtcgtagccctgcgtgagaagctatcgctactcctgatgcacatgaacaagacaacggtgcagctgcgtcacttcaacaacatagggaatcctgccgctcgtcattcctcggtcgaatcgagcagcgatgaccagcgcttgtatctggagcgcttcaaccatctttcccatagccatacgcagtcgattctccagatcgagcagctactgcaagacgctcaagacatgctcgcccagtccaacctactggacagcgcattcagctatcagggcgaggtgatcgccagcttgcagcgcgacctgctgcaatcgcggcttgtaatgttcgacaacgaaaagcctagcctcaacggcgcgttggccggcgccctccagctgagccagaaaaaagcggaattggaggtgcttggaacagacacccggatcgacaggcagcttcttgaatcgatccgcgacccacttcgccatgtcgtaaccaacgcagtcgctcacgggatcgaatcggaggcggagcgagtgaaggcaggtaagccgcccgttggcaagattcaggtcaaagccagccggagagcaaaatctctcatcgttgaaattagcgatgacgggcgcgggattgacccgaaggccattcaccgcaaggccttgagtctggggctggtcaagccggaggatcagctatccgaacaggagattttgcacctgatcgcggaacaaggcttctccaccgccaaatccgtaagcgagctttctggccgtggcgtggggatggacattgtgaggacacgcattgcgagccttggcgggcatcttcacattgcctctgaactcgggaaaggcaccactatttccttagagctgcctctgaccgtgggctctaatcgcgctctcgtctgccggatcagtgatcagtggtttgctattccgactttcaacatggcccaggtgctggacttcccgacgaccgaacttatggcaatcaaggccaaaccggggcaggcaagtgtcagccatgaaggcaaatcctacgatgtggttcatcttgccgatctgatggccgtccctgacctcaaactcaacagtgctcaggcgccaagccacacctgcctggttttggtagagcaaagcggaacccgattggcaattgaagtggaaaacggagtctccatgcccgaaattcacgtaacgaagttcgagggcattttgagcacggtaaaagggatcatcggcagcacagaagtccacgatggcactccggctctggtcttggatgtgatcgagctggcccgcctgaacctcaagatgaccgaggacggctacaaagcgaagctctaccgaatccgtcgagtaaagcgtgaggctcgccccctggtgctgatcgttgacgacagcagtagctatcaaaaattgctgacacgccacttccaggccctaggctgggaagtagcatccgcacataacggacaggacgctctggacaagcttccaacgctcagtgccccatccctattcgtcgtggacgttgaaatgccacgcatgaatggacttgacctgacagaacggctgcgctcgctcaagaacttcgaccgcacaccgatcatcatgctgaccactcgcgctcaactgaaagaacaagctctgagcttgggcgtgaactacttccttccaaaaccatacgacgccgcaatgctcaacgagggtatccgcatcgtttgccctgaacttcacgcagtgggtgcagcatga

SEQ ID NO: 359067 - DNA, 930 bp, Pseudomonas aeruginosa
atgagaattggtatcgcgtctaagaacggaacccaggccggcatcatggctgaacttctccagcccattgctggggaggtgacagtcttcgatgaagctgcaattgacggcggttcgttcatgcaaagcaatgcgcacgtcatgatcatcgactactccgtcgattcgatcatggagaaagagtgcgtcatggacatgatcacccgcgacgaaccaaaggtgatcctgaccgaaaagcagctctatccgcttgctcatgatgagcgccttgcatggcgcaagaagatcatcaacgaaatcatgcgcgtccttcctgacctcgcctctgagttaaacaactcgaaggagacaggaagtgtccacgatgtgtgggtcattggctcaagctctggtgggccggatgcgctgaacaccttcctatcggcactccctcgcctgccgatttcactaatcattgctcaacacattggtagcgacagcggctccgtttcgctccagaaagtccttagcagtcgccaggatcggtgggcaattgaaattggtggcgacggtgcgccgttacaacccggtcacgcatacatagtgcccagagattctgtcatgtccattgagggcattcggatgacctcacggccatttcagctaccaaaccaaccgagcccgtcgatcaatgcaacgcttcgttcaattcggcggacttcaactggaggtgtgggggtcatcatcctcaccgggctgggcgatgacggcaccgcagcgctaaaggaaatcaagcacaagaccatcatggttcttgcgcaggaagccgatgagtgtgcagcacgctccatgccagactcagcaagacaagctggagtcgtggacgagagccatacagctgttggtttggccaagcgtcttgcgaaatcctacggagtcggcgtggtttga

SEQ ID NO: 359068 - DNA, 282 bp, Pseudomonas aeruginosa
atgtccaacagtacccaaatcatcactggaccaacgctcaggcagttcgccacgatagtggatgatgaggacttgatcgttacttcaaagctggggcctagcaccctgagcagggtgcgcttcaagttaatcgactatccagctgtaccttctgagcggactgaatttatccgaggcaaggtgctgcaagagttcccggttgtagcgaacgtcctgggcagcatgcttgagcagtgcatactggatcaggcaaaagcggttgagagccttctgggcgagtag

SEQ ID NO: 359069 - DNA, 1242 bp, Pseudomonas aeruginosa
atgagtgtgtttctagaggccccgctagagagtctttgtcggaaggtgacggatggcactcatgattcgccaaagtcattgccagatggcgttcctttcataaagggaaagcacatctctcaagggcgcctgaatctcgaatattgcgattatattagtcgtgaagatcatttgaaggttatagcgcgctccaagccagagaggggcgatactttattttccaacattggatctgttggtgattctgcgtttgttaatactgatgccgagtttagtataaaaaacgttgcgttgtttaagcctgactttgaaagggttgtacctaagtatcttttttatcttttgcgtagcccaagtgtcttaggtgggctgctttctatgcgctctggttcagcgcagccgtttattggtctcgaaactctgcgtaagtacagtgtgcgataccatggctctctttctactcagtcgaaagtcgtttcggttctctccgcctacgacgacctaatcgaaaacaacacgcgccgcatcgagatactcgaagaaatggcgcggcggttgtacgaggagtggttcgttcagttccgctttccggggcatggggggggggagttcaaagagagtgagcttgggctgattcctgaagggtggaaggtttcagctcttgatgagtttggtgaaataattactggaaaaacacctagcaagaataagccggagttttttgggggggatgttccttttattaagctccctgatatgcatggtaatactttcataattgaaaccaccgaaaagctttcgcaggagggggtgggctctcaaaagatgaaaaccataccgcctggctccatatgcgttagttgtattggtactgctggggtggtcgttattacttctgagctctctcagactaatcagcagataaactccattgttcctcgcgctccagaattgcgtgagtttttgttttttgcagccacatcgctgaaggataaaataaacaactatggagctacgggcgctacaatgactaaccttagtcgtggaaagttctcttccctgcaagttgttgagccaaaagaggatttgctgtgcggttacaacaaactagccgctccattttttgataagatcctgtgcttgcaaaaaactaaccgcaacctccgagcccaacgagacctgctccttcccaagctaatctccggtgagatcgacgtatccgatatccccatgccgacctaa

SEQ ID NO: 359070 - DNA, 459 bp, Pseudomonas aeruginosa
atgaaggaaaaagtcattgccccacagcgggtgcttttcatcggccaagagttgtccatcccggaagtcgccgagcaagcgcaggtatgttgtgccgaaatcatacgagtggcccaagagcggggacttcaagtcgctggcccttgggtgttcgtctcccacaagctgcctgacaatgccagcgaccgcttccggatcgagttttgcctgccagtggagggtagcctgggcgagccagttggtgcagtcgaatgcaagctgctaacggccatgcgctgtgtccatgacgactaccgcggaccactcgccgacctctttgtccgaggctatgcggagctcgtcgagaaggcccgcacggctggccataaactgaccggcgaaagccgtgaggtttatcacagctggcagggtgcggactcgctggtcaatcacatagagctgcagtttggcatcctctga

SEQ ID NO: 359071 - DNA, 147 bp, Pseudomonas aeruginosa
atgcgtctacctgaactgatcttcctgggcgccctgcttctctggcctttggttcccctggtgtacctgctgtgcatcgcctggcagaccgacttcaagctggtagctcgatccaagcagagaaccgcagaagactctcgctcatga

SEQ ID NO: 359072 - DNA, 201 bp, Pseudomonas aeruginosa
atgatccagctccagaagatcctcaagtccttccagaagaccatcgaccagctcgaacaactgaccgccgccaacaacatcgagatcagccgcaacaccgagcagatcgaccgactgcaggataagaacctactgctgatcgcagaagcccaggctgccaaggagaccgccgagaacctgaaagccctgatcggccagtaa

SEQ ID NO: 359073 - DNA, 534 bp, Pseudomonas aeruginosa
atgagcaagcaactgactgtatgcggcgtggctatcaagcaagacgccgagggccgctactgcctgaacgatcttcacaaggctgccggtggcgaggaacgccatgcgacttggcgcttccttcgtctcgacaccaccgaggaattgaccaaggaaatccaaaacaccatttctggtggattagagccggttgcctccaaggctgggcgctacggcggcaccttcgtggtgaaggagctggtctacgcctacgccatgtggatcagccccaagttccacctcgaagtcatccgctcctacgaccggctggccaccgagggcgtggctgtccatgcgtccgccgccgaggcagtgctcgacgacccgctcacctacatggagaaggtcatcgcccaggccaaggtgctgaaggcagagcgcgaccgcctcaccctggagaacaaggagatggcaccgaaggctgtcgtcttcgacaactgcatggcgctgcgtcaggagtccctggccaccttcgtgcgtaccctggagggctga

SEQ ID NO: 359074 - DNA, 1047 bp, Pseudomonas aeruginosa
atgggattggtgccagactcgcccagtacgtctcctcgcttctccaaggtggtcgaggagtgcttggggcagcaggagcaggaaggcgtctcgaccaagaccatcgacgacaagcgatccgttgcatccctactggtgcggatcatcggtgacatgcccattgacctgatcacccgccaggatgccaggaagttccgcgagacagccctcaagctgcccccgcgtctcaatcagctacctgaaggccagtccttggaggaggtcatcaagacggcaacccgcacgatcagcctcactacgttcaacaactatgtgaagaacctgacgaccctcttcacctacgccatccgtgaaggctactgcgagcgcaatcctttcgatgggctgcgggtgaagcagcgaggcaagatcagcgaggagcgcagcgtcttcaccgaggaggatctacgccgattgttctcgaaggaggtctacgcctcggccagcaccaagaagccgaatcagttctggcttcccctgctggggctgtacaccggagcgaggctcaatgagttgtgtcagctctacctcgacgatgtggtgaccatcaacggtgtggactgcctacacatccgagcatcacgacccgatcagaagctcaagacggcatcttccgagcgtctggtgccgatccattccaagctgaaggcgctgggcttcatcgagttcgtccagaagcagcgggcagcagggcatcagcgggtcttccctgagctgacctgccacaagaagcatggctacggggctgctccgtcgaagtggttcactcgtgtccgtgagcagttgggcttcagggatggggaagggcagaaggacttccacagcttccgccacaccatcgccgatcacctgaagcagaagggcatcagtgaggctctagtcggtgggctgctggggcaccagacgggtggcatcaccttcagtcgctacgggaaagacttcaggcccgaggtgctggctccggtggtggaggcagtggactttgatgctgtcgggtggctgcagtga

SEQ ID NO: 359075 - DNA, 432 bp, Pseudomonas aeruginosa
atgctgcgcccagaactcacgcccgatgatcggatttggcttgcagagcaggcggaagcccttcgcatcagctgcgatttcatgctccacgacctgttccaccaagactcgccggaactcataggccgagcctcgattgtccctgtctggctggatggtcgatacgttcctgccagcagcgtgttgaagcagatcgaacaatccgtcccctacagccaaatcttcgagcaatgggaagcacgggtttatgcggatgtagagcggacgtgccgtcgcctttcggcccaggatgcaagagcccttgtagtcactgccggcttccacaaagtcaccgaggcggagatattcgacgcggctggtgaggcggtgcaggaagcctggaacgctctctatggtgagcccgacgactcgttcgacgatgagggcgattag

SEQ ID NO: 359076 - DNA, 597 bp, Pseudomonas aeruginosa
atggggggcaagggcaaactgaattggctcgacggcaccctggcaaggggctggctccttaaacggacatgggcgctgttcctttttgcgctgctgtggagtgcatacctgctgctggttggggctctgccgcaccttgtatcgggcacgtccctgaactcactgacgttccagtacagggactacttgcttcgtgccttcgtggtgtttgcagtggcccacctgtttgtcaggaagacaaacttcaagctccttttcgcgataccacccatcacgcttgctctccagctgggactcgacgtttatgacttctcggaatggtattccaggacgttccgggtcaacctgcatgagctgaacgctcagctgtttgtggttcccgtccagttgatggtcctcgcaacgggcatctatttctgctgccgcaagcacctgcggacaactaccaggattttcgcgaccacgatgcttgcgggcagtattgtctcgacgttggggttccacctctccatcgtcaatgtcacctacaagcctgtcgagcgggtctatgcgaacaaccttcgcagtctcgtagtgttgccgctgaccgaaaactga

SEQ ID NO: 359077 - DNA, 438 bp, Pseudomonas aeruginosa
gtggtgtccccgctgccggatggagccatcgacaagctggccgcttcaatcagtggagagggatgccacgtagagaggtgccagaccgccacaagtggtcacgacctgaaagatgcgaagcttccgcagtctttgctggtgctgctggagcaggcgttagcgcagacctacgaccccccatccaggctctgggtagataaggccctatccaggaatccggtgctctacatcaaccggccagagttcctgcgcgtctacgccttcaaggatggtgtgatacgtgtcttcacgtcgccccaggcattttctgacaccacgctggacctcaaactgactttcaacctgattatcggcctgttctcggtgtcttggctcaccctcggagtgttcctgatcctatttcacactagaagacagcttttatcagatagctgttaa

SEQ ID NO: 359078 - DNA, 789 bp, Pseudomonas aeruginosa
atgcctaagtttgatgctattgcggaagcagcaagattgaagctagctactctgtctcgcagaaaaaaaactaagggcagagtctctaagcttaatcgatataaatatgagttgttggcgttacatagtcacggcgcctcaagttgcgaattacaagcatggcttgcagagaatggcttgggcgtgcagcgctcgacgatcacgcgctggcttgctgtgaatgctgggcagagccaaggcggaaacatacaaggcaatgcgcctcggaattggcctcagtatacggtcgatcaattcgagtccgtggttgtagcgcaaaaacaaagaaattcgatagcgagcaggatatgttgtgaggcggggcttaggcctagggaagtcttaactattcgccctctttctgactcgacctgtgcgtcggaattatcaaaggataatttgaggaacctgtatgaagttgatctattggggggtggtgtaagagtatttgagctaccgcaaagtgtcgcctcagagcttgagtcttatagactcgctgatccgatattgatcgcggatagaggaagtctaattaaacaaagatatttcatatctggtggcgcagcctgggctaagtcattcaacgatgctagcaagtctgtacttggttggtcgattggtgtgcaaggggtgcgcaatatgtatctaaacaagcgtatgtctgaattgcaagcgtctttttgccatgcggaagcactgcatttgcttgccatggaggtcggaggggttccccgcttgccctcatactaa

SEQ ID NO: 359079 - DNA, 1050 bp, Pseudomonas aeruginosa
gtgcagcagctcaaatcccatggatggaaatggcaggttagcggagggttaattcacggccttgttgaacggttgaagcgtccactgctcacggcagctgccattgcaatagctgtcgcggcggtgccagcgggtgcggcgccggacaacttctcagaggccaagagactgctacgacagcatgtctaccaagaccagaacctctctcaagctggcgacttctactgtggctgtaagtggcagtgggtcggaaagtccggtggcaagatggaccttgccagttgtggatttcaggcaaacaagcacgtagatcgagctgcccgtctcgaatgggagcatgtggttccaatctccgcagtcggacagcagcggcagtgttggcgcaacggtgggcgtcagaactgtcagcgcactgatccagtgttcaacatgatggaggccgatatgcacaatttggccccaagtgtcggggccgttaatgccctccgctctgcaatcagctatggcatggcctccgggcctactgagcctttgggggcatgcacaaccaaggtggccaccaccttccgcgtcgtagagcctcgcaacgaggtcaagggtgaagctgctcggatcaccttctacatggccgaccgctacaacatccgcctcagtgagaaacagcagcaggtcctgatggcctgggatcgagcctacccagtttcagcttgggagcttgagcgtgacaggcgaatctcctatgcaatgggccaccacaacccattcgtcactggcgagcgtaagtgggttcctggctacaggccccaaggcgccggccaaactgcaacgacaagagctgttccagcaaggcagtccgaggctcctgcgcgacaggtccaggtagctgctcggcaggacggacctgtattcggcaataagcggagtggtgtctaccacctcccgcatggctgccccagctacagccaggtcagcacgcataaccgcgtccagttcagcactgagcaggaagcgctggctgcggggttccgaaaagcggggaactgctcctga

SEQ ID NO: 359080 - DNA, 432 bp, Pseudomonas aeruginosa
atgctcaagaaattccctttcgccgccctgctctgcgccgtcgccctcgcctctggttgcaccactcacctgagcgaaggccagaagcgcgagcttgatgcctacgaacagaagggcctcaaggcagaagaaaaaagcgtgggcactgcggctgtgctcggtatcttcccaatggctggctatttctacacaggcccggtgctggcggtgactaccctgcccctctatccgttcctcggcccgctgtggatgccctatgattcggcccagagcgcgaagaaccgcaactattacgcgacgaaggaattcgtcgagcgcgagaagcgtaaggcgctcaccgaaatcgaccacaagatggaagataaacagctcacgtatgagcagcacgttcgcgagcaacgcctgatcgaggccaaatactcgccctactaa

SEQ ID NO: 359081 - DNA, 414 bp, Pseudomonas aeruginosa
ttgagcctgctttttggtgccttgatgaaagtaattatcctcgacgattcgcgaaccgactcctacctcgcaagccaagtggccaagaactacttcgccgaggtggaggtgtacggtacgccggcagatttccatgccggcctcaagcgtggacctgaacctgacctgatgctcatggacgttcatattggcgacctgtgcaatggcatcggcgagctggcgagcatcaaggagcagtacaactccacaagcttcattccgaccatcatcgtgacagcatccaccgatgccgccttgcacaagctggccatggagcgtggcgccgatgctgtgatcgtgaagccgatcagcaaagagaaactggagccgatcctgcgcgaactgctccccgagcttcaaatcgagggcgcgtaa

SEQ ID NO: 359082 - DNA, 537 bp, Pseudomonas aeruginosa
gtgagcgttgctgacctgtcctacggttgggctgtggtcctgtggtttgccgtcctgggcctgtgcgttggctcgtttgtaaacgcgttctgctatcgctggcccatcatcaagggggttggtgagtttgcagacggaaagcgtctccaggagcttgtagccaagcacggcaagttcaccctcgcttcacctcgatcagcttgcccgtgctgccagtgcaaggtgcgtgctcatcacaacatccccgttgtcggctggttgtggctcaggggcaaatgccacgattgcggtgcccgtatcagctggaaatacccagctgtcgagctgctgttcggtgcggtttttgccggctatgtgtggttcgagggcgtgtgggtagctggcctgctgtcgctggtcctgatgcctgttgcattcagttttctctggttgcgcattgcgtaccggcacaacgacaagacgttgatctggtcgtacatcatcacactggcagctcaaattgggctgagcggactgggtttaagcgcctacgtctag

SEQ ID NO: 359083 - DNA, 789 bp, Pseudomonas aeruginosa
atgcaagacacaccgatcctgtccatcgagaaagaggccgatctgtgcaatctgttcatgagggagttcggcgccctgcccggctggcgctgctatccagaagcgggcggcttcgatattttggctgtacacgacgatgggaggcagctgggtgtcgaggcgaagatggcgctcaatgccaaggtggccgaacagatactccccggtgatcgcgatgagttcttcgataagcccggccctgactatcgccttgtgattgtctccaagatcactccagcgagtgaaggcatcgcccgtatgctggcgatgttgggcgtgctggtgctggtcccgaatcagtaccgctccaggctaggggatgcgtactccttcaacgtccacaacatcctcgaagccaggggggcgcaaacatcctacggccagcagtatctgcatgactggaatccagctattcgctgccacgtccctgccctgctccagggcctgccagcgggtgttccctccccggtaaagctcactccctggaaagagaaggcgctgaccatcctggcactcatgcgcagacagggcttcatcacggctaagcagattgctgcacatggtcacaacgtcacaagatggactcagcctgacggcatgaagccagcttggctggccaagggggctgtcagggggcagtggatagagactgagcacatgccggccttcgacaagcagcacccggaactctacgagattgcggtggcagaccttgctgttgctgcggagaaggagttcgagctgggctga

SEQ ID NO: 359084 - DNA, 1332 bp, Pseudomonas aeruginosa
atgcaggcaactcacccagtcaacaaagcacgcgcactgcctcgcaagtcagcaaaaggcgccagtattcgtctgatcccgttgatcgacacgcatgcggctgtgactaactcagatgctgatgagtacgagggcgataggcccttcatcactgagtacctggaaggcttccaaactcagtttgatgcgcgggctgactacgatgctgtccgtcgattcctcaaggcgcacgacgacacgccgaccacgttcaacaactaccgcacccaggtcgagcgcctgctgctctgggcctggaacaagcgaaataaggcattcagggatttcgtccgcagcgacgttgaggacttcctcagcttctgcaagaaccctgatcccgcctggataagcagcgccattcacccgcgctacatcatggtggaaggaatctacgagcccaatccggcttggcgcccgttcgccatgagaacccagaagtccaccgccaagagcgctattgagaacaatcgcgaggtgccggccccaaccttccagatggcggatagttcgctcaagcaggtctatgccgtgctgaattcgctattcagctactgcaccgctgacaggctaatggatagcaacccttgcgtgctcatcaagcgcgacatgaagaagaacaagtccaaggcgctcaagattcccaagcaaaagtcgttgtccaagctgcaatgggaattcctgctggaaacggctgagctgatggctgcggagagcccgagcccaggcgaaagaactctgttctgtatcgtcatgatgtttggctgctatttgcgcgtcagcgacctcgccggcaatggtgagtgggtgccggccatggggtcgttcgttcgtgagcgcgatgcgtggtggtatcacgttatcggtaagggcaacgtgcaggcccgtatcgccgttaagcccgactgcatcaactacctgacgcgctatcgccggttccgtggtctgtcggattatccggcaccgggtgacaccgagccgctactgacgacagttcacggtcgccatggattgaaggcgcgtcagattcgcgatgacgttcaggcggtactggaccgaactgttcagaggatgaagcatgaaggcttcccggactacgaggtgagcgagctgcgatcagcaagcttgcactggcttcgccacacgggcgcaacgtttgatgccccgctgcgcaatccgaagaatctccaggccgacctgcggcacaagagcttggcgactacccagaatatctactaccacgccctggacgacgagcgcagttctgaggttgcggggctttctttacggcgctga

SEQ ID NO: 359085 - DNA, 1002 bp, Pseudomonas aeruginosa
atgaaatacataggcattgatcttattgagcgggaatgcaacgggccatacactttcaatttagtcacagatagcgagtcgcacttccctgtcaggtatttgaagctggagccacaaccaagattaggaactgaattccatccgatcacattcgcaatggaggttgttgcttccgagcccccctttctcagcaagcaagattgcccatggatattatcctacctggacgatctgagaagcttctacaattctaaatactttccccaaatgcacgatgaaaggtcaagcttaaatttccacgcggtagagtcaattagtagcaaagtagcatcttttgcaatggaaaacgatgcagtgtcagccacacgcatgatgtatgcaattgatatagcatccagcattctatatggcagcaatgtcattcttcacgactacttcataagcaatctaaccacatcatggctaaatgacatttataaattgctcttgattgatacagaatttctagataggcatatctatacctcactggaggtaaactatgataagtcattcaaaacactgatgactcgcagtgtcttcaaagatacgcaggtgatggtaacaattcccgagggagaatcacttgcaacggtcaaagggcacgaaaaagatgtaaccttaacctctgggacaagcctagaatgcacgatagttaggtttttcaaaactgacctatggtggtcgaatcgtggtgcgattgagttttacccaactttcaataaagctatacggagccgcctgcaagatgagccactttttgcagttgaaatggaaatagcaaaggagcttcaaagaagtctatatggagctaaaattttagctttcgttcctctgcactggattagatttgtatatcaccacgggcaatggttagaggtaggtcagttccctgtttctattgagtctgactcaaagctcccaatccctttgacaacaagtgatttctgtaatttattttaa

SEQ ID NO: 359086 - DNA, 1110 bp, Pseudomonas aeruginosa
atgaagcccacaaaacgccagcatccagtgaccctggccgaggtcgccgatgcaatgcgggagctgcaagaggaaggcaccgaaccatcagtgagggctgtcagggccagggttgggggaggctcgaacaccaccctcatgcgattcatcgatatggtccgctcgggcagcgccagcccacagcagcacctggacgagttcccaagcaggctcgaaagcttgtgtcgggaaatggtgcaaacgcttggcgagctggcagatgagcgggtggccaaagagcgggcggaggtacaggcagtgaggcgcaacatcgaggcgcgctggaacacactgctgatggagaaagaaacagcggtcaactcgttcgaggcggagaagcgaatcaccgccgacctcacgcagcgcctggaggccctgacgaaaaagctcgaatctgtagtagctgatcgggacgaactgaaagatcgcgctaacgtcgccgaggcgctgaacgagcagctgaatgagcggctacttggtcaaagccgccagatcgacgaaatgaagcgcatggctgaacactacgaacagcaggtggccgctcagcgtgagcaggacgctcgcagacacagcaaacagatcgagggcctggagagcagtcttcgagagtcacacgcaaatgagcttcgcctcactgaacagttgggcaatgccaagcgagagctggaacggctgacaaaggatggcgaacagctctcgcgacgagccgcgcaggccgaagcgcagcagtccaaactcgaagccttggtaagcgacttgtccgtggagcagcttgagttcaagcgccgtgatgaacagcgcgagcgccagctcaatgcaaccatgacaacgaacggcgaactacaaacacagttggcacgaatgcagtcccagatcatcgaggtgcagagccggtcggcaaagcagcttgaagatatggctacggataaccgatcagtaatcatcaaccttgtggatcactctcgccgggtgttcgagatagctagtctgaccaaggccaaggacagctccgagttcaaagaactggccattgcacagcgagagattgagcggctattccagaagacttga

SEQ ID NO: 359087 - DNA, 417 bp, Pseudomonas aeruginosa
atgacagatgtaatcagagtatcgcgagagaaagtcagcgaggcgataactgcgttgctcacagtcaacaaccggcgctccaatgcgctgaaagtcccccaggacgacgaaacggtgtactggcagcgcaaagagtgggttgaggcagcaatccgggcgggcctcgaccttgagtccaacgtggcgcttttgaacagccagccttcgacagtggatagccaagcaactgagctggtcacgatgccgtccgacgccatatgcctactccaggcttggcagacccatttgggctcctgtcgtgaagcatgcgacgaaggcggcaagcgaatctgggatcggatcgacgcggtgcttgagaaggtgcagccgtttgcggatcagccggttcaagtccagacattaggcgggggcgagtaa

SEQ ID NO: 359088 - DNA, 483 bp, Pseudomonas aeruginosa
atgggcactgacaccactgagcgcttgcttgcgaatgacgtgagcgagggtttctcgaagaatgaagtcttcatcctgcgcatcaaccccaacaggaaggttgcgttctacgtccacgccttgattctgtactccctgttcttgcttggaacatttggccagcagccattcctggattacctcgaaaagtcgtctgaggccgaaatggtcgaagaactgctgccatcgatgagggagcttgctcagcagggaaagccagctgctgcggtgtggttgttgaagcatgactgggagacttcgaaggcatccgggttcagtgcaattactgatgcggcgttgactggcgaccctgagagcatgttcacatacggggtactccagtacgatctggagcgtttcgacgtaggccgggtatggattgaaaaggcagctgccgaggggtatccgaccgccgtaaggttcctccagcacagtgaccagtag

SEQ ID NO: 359089 - DNA, 1086 bp, Pseudomonas aeruginosa
atgaaatcttctacaccatccattcccgaagcacctccctcccctcatggggaggtgcgttcggtttcggatgtagaggaactggctgcccgctaccgggagcgcggcaagtcagacaacaccgagcgaacctacaaaacccacatcaatcactaccgttatgtttggggtggctttttgcctgccggcgaagacgctgtttgccggtacttggccacctatgcgcagagcttgaaagtgagcacgctgcggcagcggttgtcggctttgtccaagtggcataagcagcagggttttttcgatccgactaccagctccacggtcaaacagaccatgaaaggaattgccaaggagcaccaggatcgccccaaacaggcataccctctgacattcaggcatttgcttgccatttgcgaccagctcgaagccgagaaaaaggcagccattcaggctggcgatcagggggccattcttcgcacgcaccgcgacctcgctctggtcctggttgggttctggcagggcttccgtagcgatgagctgagccgggtcgccgtagagagcgtgaaggcaagccgcaccgatgggatcagtatcttcctgtctcacagcaagactgatagagacgccagcgggcgcatatacgaaatgccggcgctcagggcttactgccccgcctctgcctacattgactggattcaggcctctggcatcacctcggggttggtgtttcgctcaatcaaccgatgggggcggttggcttccactggaatccacaagcagagcattggccatatcatcaaccgagtggcaaacgacctgttccccggtgagcctcatttcagtacccactcccttcgccatggtttcgcagactgggcggtacgagcgggttgggatatgaccatgctgatggagcacgttgggtggcgctccatcgagaatgccaagaggtacatgccgaagcgcaaggattttggaacgctcgctctcaagcagtcggctttaccagctggtggcgatctgagtaacgccggcaacgcgaacactctgctctcacatttccagtcgttgccagacagcgactga

SEQ ID NO: 359090 - DNA, 552 bp, Pseudomonas aeruginosa
atgaaaggcctaagcaatccattggcaatcgcggcaatgcagcgtgctatagccgctgcccaaattggccctgcgccgaggccaaagtacagcagccgcaccgctgacaagttcgtgattcgcggcttcgatgagctgttcgatgagctggctgctattggcaggcaccagggccgcagcctgaactcggagtcagtcgcggcagttctggaggccctggcgggggtgaagcgagccgccgcaatggtcaacatcctcaaggcgcatctgggcgaagatgtagctgcacgaatcctggctgaggtccccagctttgacttggccaagtgcaagagcccgagaaagttcgtgatgaggcttccgcccagcgtccgagacaccatacgtgagggcgtagtgaacgctgttgctgagcagagcaccggcaccaagtcgatgaatacatggctgctcgacgcactggtggactggatcaacactcagcgccagcagtacgccctgctggcggcctctatcgcgatggagcagggggctcttactggacctcagtag

SEQ ID NO: 359091 - DNA, 843 bp, Pseudomonas aeruginosa
atgaatgcagttcgaaagcagctttttcgtgcaggcctgctggccagcattactctggccaccgggtgcgcgatgaagcctatggacctagcgcgagtcagcgagggcagtggtctaaagccggttgccgtcaaaacgtcgcagttcaccatccagacccttcaacccgcagcacgacaagaacaacgccttcgcgtgtacatcgagggcgatggccgcgcctggatcactagccgcaccgtgagcgatgacccgacaccagtaaagagcttggtgccgggattggtcgttgcagacccagcaccagcagtctatctcgcccgcccgtgccagtttgtcctcggtgccaactgcaaacagaaactctggaccacgcatcgcttcggcaaggacgtgcttcaagccgcaagcgaagtgctcgacaccctcaaatcccaatatggggtgcgagacttcgagctggtcgggtattccggtggtggcgccatcgcactgctgttggcggcaacccggacggacgtttccctggtgcaaaccatcgccggcaacgtcgatccgaaggcttggactgagctgaaaggcctgacgccgctttcagggtcaatgacccctgtcgatttcgccgataggcttgccgccgtaccacagcgacacctgatcggcttgaacgacaccgttgttccaccagaggtaagccaagcctacatgctcaaggtccagcctcattgtggcgagacggtcttcgttgacgccgaccactactccgggttccagtcagcctgggccttgtaccgagacaaaccagttaagtgcgagcctgatcctggctcaaacgtgaagtga

SEQ ID NO: 359092 - DNA, 2595 bp, Pseudomonas aeruginosa
gtggcgaccattagcagaaagaccatcctggcactggcaatcgcagcagcatccagcgctcacgcagcaccggcacccagtcagatcaacgtcagcggcagcacccgcattgaagtcgcaactggcaacttcaccagcgtgacgctgaccggcaccgccaaccgcaacgctggtgaagacggcatcgacttcgacggcccgcagatttcgggcgacttcgtgaacgatgcaaacttcaacctgagcggcaacaacgttgatgccatcggcatcgaagacgattccgctgatggcgccatcggcggcagcttcatcaacaacggcaccatcaatgccaacggctacaacgcttccggcatcaatatcgcagataccgtgatcggtcagagcggtgtgaccgacgacgccatcggcaatgtggtgaacaacggcaccatcaacgtgaccgacacttccggcatcgcacctgtcgatgaacaagcagccatcatgctggagaacgtgcagctgtctggcgacgtaatcaacaaaggcaccatcagcgtccaggcccgcaacgcctcggggatcaaggtggacggccaagaccaagacccgaccgacaccgtgaagtacgccaccatcgaccgcgacgtggtgaacaccggcaccatcagcgtgaccggccagaatgctcgcggcatcgagctgaacatggtcaacttcggccaggacgtggaaaacggcggcaccatcaacgtgaacggcgcaggcgctgtggccgtccgcatggaccgctctgactacaaccgcatcctgaacaccggcaccatccgcgcccaaggtgccaactccatcggcatcgagagccgtgagtcgttcggcaacaacgccctgagccaaggcatcatcaacaacggcaccattgtcgctgatggcgtgggcatcaaagtcactaacgacctgctgcaaaccggccctggtgaaaccagcaacgccagcaacttctaccgcatcactcagaatgccggcgtgatcagcggcggcgatgcagctatcgacggcaacggccaaaccatcctgcacctgaacggtggcaccatcatcggtgacattgaaggtatccgtgatgccttcgtgaacggcaacgtggccatctactccgacctgatcgaggccaacaagctggatgtgaccgcaggcaagctgtatgtagcggaagtcaccaacgtgactggcgacatgttcgtccgtaacggcgccggcctgagcctgttcgtcaacaacagcaccgacccgagcaaggccatcgtcgaggtggacggcaagctcaccctggagcagggtagcgtcatcggcgtgaccaccaatccgggccagttcaccaaagaaagcaccaagtacgtgctggtgagcgccgaccaactggagaacctgggcgctcaggtgaagaccctgaccccgctgctggccgtcaccaacgtcgcgttcgagaacaacagcgtcaccgccaacatcggcctcgcgactggcagccaagccggtgaaggtctggcgaatgccggcgtagaccgcaacggtgtcgctgcgaccaaggcgttcatcgacagcgtgctggccaagctgccggtgaacagcaacctgtaccagaccttcatcaacgccaacgatgcagaactgcgccagctggcacgccagctccagccggaaaccaaccgtgcagcgcaatccgcttcgctcgcagcgaccggcctgaccaactcggccattggcagccgtgcttcttcgctgggtgcgaactcgggtgacgcgctgatcgaaaccggcgcgtgggtcaaagtgctgcacggcaacagcgaccaaggtgagcgcggcggcatcgccggttacgacgccgactccaccggcctgatcatcggcgccgatggcaagctgaacgagcagaccactctgggcctcgccctgagccatgttcgcaccgatgtttcctctgacaccggcaacgacaccgatgtggccaccacactcctgactgcctacggcgcgtgggagcagggtccgtactcggttatcggtagcctgtcctatggccagagcgacaacgagtcgaagcgctacatcgctggtgagcgcgccaagggcgactacgactccaatgtcctggcagccgacctgagcgctggttacaccatcaagctgaacgagaacctggacctgatcccgactctggcaagccgctacgccaaggtgcagatcgacagcttcaccgagaagggcacccaggccgcgctgcgcaccggcagtcagtcgctggaagtcttcgacgtgggcggcggcttcaagctggaaggcgtctacggcgacttcaagccgagcgctcgcctgatggccttccacgacttcgcccaggactcggctgataccacctcggcctatgcactcggcggcgccaccttcgcgactaccggcgctccggcgaccaagtggacctacgaagctggcgttggtctggactggaccaaaggcaactacaccatcggcgcatcctacgactacacccgtaaggctgacttcaacgccgacaccatgaccctcaaggcccgttacgacttctaa

SEQ ID NO: 359093 - DNA, 954 bp, Pseudomonas aeruginosa
atgaaagcggttcagttttcgcggtggatggcacagctttccagcctcaacccagagcaacgcgaccagttgagatccaagctcttgccagctgccaggcactcgcaggacgcaatcaaggccccaagccattgcccgcattgtcaatcgcgggaactgcgcccctggggttccagtggtgacttgccgcgataccgctgtaaggtttgcggcaaaaccagcaatgccctgacgggcaccccaatggcgcgactgagaaagcgccatctctggcaagactatgcggacgcactgacccagagcctgagcgtgcgcaaggccgccgttcattgtggcgtcagcaaaaacacagctttcctgtggcgacataggtttctttcgcggattgccgatcaccaggcccagcacgcgtcaggcattgttgaagcagatgaaaccttcttcctggagtccttcaaagggcaacgcgaactgcctcgaccgcctcgtcggcgcggtggcagcgccaaacgacgcggactgtctgccgagcaaattcctgtgctggtggtaagagatcgcagtggtcagcaggcagacttcaagttggaaaagctggatgcacagcacatgggggagcggctacgcccgctgatagacgcggatgcgattctctgtactgacagcgcaagtgtctacgcccatttcgccaaggttgaaggcatcactcaccgaccgattaacccgagccagaatcgacgggttgatggtgctttccacatccagaacgtgaatgcctacgacagccgactcaagagctggatgattccttttcatggtgtggccaccaagtacctaacgaactatctgggctggcgccgcctgcttgagcgctacaaaacacagctcaacccattgatttgcttgaaagaggcgttggggtatagggatatgcaacagttaactcagacatag

SEQ ID NO: 359094 - DNA, 645 bp, Pseudomonas aeruginosa
atgcagcatgctcaagctgaaaggacacagaatgatgtgtctgacgacattatgcttgctcgggagttagaggtcgctgagcgcattcgtgacaaaagcagtatgttcactatccgccaggtagcgagcatccacaggatgagtatcccgtatctgcgacagttcgcagagcgccatgggatcaccttcgtagggaccgatggcagtcggactaagcgtatttccagcgctgtcattgcccgtgaacgtcgccacacttcaacagttgtcgctcgatcactcacccgcaagcctgtcacgtctctcgactccgaaaagatcacccctgagctgcgtgagcgtgctcggcgccgcgaccaagaatcggtgaacgggtttatcgaaagccttcgcgagctgtccctaacccataccagggaagaagctactaaggcagccggcatcagcccgaccttcatgcgccggctggcctatgaccatgaattggtctttgtgggcgaagctgcacccataagccagtccgtctctcctgccgctctcaagaagctgcaaggcagcctgttccgacccaacaagaagatgaagcaagccacctcgcgtctgatccgaaattacgtgatcagcgacgttcaggatgcgctgtag

SEQ ID NO: 359095 - DNA, 423 bp, Pseudomonas aeruginosa
atggcgcgtaaagcgaagccccgtaaagggatgcgtttcaactacgccattgagtctgtggtggaccggactgttcgtgagcaatatcgcttcttagaccactgccaaaccaaccgggtcgaactgacgatcttttccaccagcggcgcctccttcaacggcattgtccatcgcttcgacagagaaacgatcctgttcggcggaagggggaaaagcgctacgccaaggctcatctacaagagctttatcgccatgattatccctcgggaggccatcggccttttcgctgagtacaaaggcctgggcaccgcacgctgcaagaaccgtaagaagcgctttctaagggcactgcaagaattgagggatcgacagcagaaggctggctggctttgtcatgacgatgacaatcccgcgcaggagtga

SEQ ID NO: 359096 - DNA, 1005 bp, Pseudomonas aeruginosa
atgcgggccataggctccatggtggcaggcctggacccctacagcgtggacgaggccttcattttgctgaccggcatgaatggcgacctctctgagcttggcgccagcatccagcgccacgtcctaaaggcggtcggcatcccggttggggtcggtatttctcgcaacagaacgacagcaaagctagcgaactgggccagtaaaaagtggaagcgtcagaccaaatcagtagtggctttgaccgagtacgagcgactacgcaagctgatggccttggcggaagttggggacgtttgggggattggcagccgtctaaccgagcatctgaatagctacggcatccacacagctttacagctggccgacgctgacgcggccacgatgcgccggcaccatggagtgggtttagccaggaccataagggagttgaactgggaatactgcataggcccagacaatgacggcagccctcgcaaatccatgacctgctctcggacattcccatcacccacaagcgccttctctgatctgtcatccagccttgcatcatttgctgccaacataggccgaaagttgcgtagagagggaatcctggcagctgcggtgagggtcttcttgcaacccgcccgtgcttcgataatgacatcacgggtcaaatctgaaacaattgaattgttgtcaccgacaaatgacacacgggtactgattgaagtcgcactgatctgtttgcgatcaagctaccaagaaggtgttacctggatacgcgccggcctaatggtcgttgaggcaatcccggagcagcactacacaccggacttgttcgccccccgagcgcgcccacgcagcagggagctgatgaaagcaatggacctgatcaatcgttcctctggagagggtacgatccgattcggtgcggaacgccgtaatctcgcacatatgattcgtcgtcaatacttgtctaaccgtttcacaacctcatggactgagcttccagaagctacttag

SEQ ID NO: 359097 - DNA, 450 bp, Pseudomonas aeruginosa
atgagcaatctggcgcagcgtctagcgctaagcgatgagccgattccactcagatttttcatcggcgtagcttgcggctggccatccccagccgccgattacgaagaagcaccgctgtctctcgacgagctggtgaacgtcaccgcctattcaaccttccttgtgcgagcgcgtgggaactccatgtacccactgatacgcgacggtgacgtattggtcgtggacaagagcctggatgcgctgctcgatgatgttgtggtggcagtggtcgagggcgacttcaccgttaagcggctaagccggctggacggtcgatacgcattggttcctgaaaacgactcgatggcgccgatcttcatcggcgatgacgaacaggtccagatatggggggtagtagtttggaatctacacaggctggaacgaggtcgcccgaaattgtcggccttgtag

SEQ ID NO: 359098 - DNA, 732 bp, Pseudomonas aeruginosa
atggaacagcagcaaagcccggacaacttgacgaaggccaagtcattcctgcaagccaagtggttcccaggtgccattgcaagtcttgccctggtgatcagtattggcggtcataccttcacagccttcaactccgttgggttggcaaaaatatcgaacagcatcgacaacctggaggctttccggggcgtgaccgagcgggcggacggcagtcaagaccacgcgctccaggcgcttcaaggtgagttgacgaagcaacagcgcaccattcaatcgctgcaaaatgaggtaaaagagctgcgcacgctcaagaccgaggccaaagcggaaagcaaaatgccgtcaggctttgaggcggtcaatgaagaagcgcgccgccaggaagctgccgccaaaaccgagcagcaaccgctcaaaaacggtgtgaacgaacgattcgataatctggtacgcacccgcatgaaacagcactgggaggcgccgcccgtgcgccccggtcgcgaacacgttgacgatgaggacactgttgttctccagttcatcgttgaccggcagggctggatttccgatgtacaggtcgccaactccagcggtatcgtcgagttcgacaacagtgctgtcaaagcagcactgcgcatgaactccatccctgaaattggccgactgagtgatcaggcctacttgcagatcaaggcgttccgactgacgatcagcccggtccatatgaagtag

SEQ ID NO: 359099 - DNA, 489 bp, Pseudomonas aeruginosa
atggatcaaacgaaaaaggcgccgactgtcagcggcatcagcaagattgcgcaactgtctgcattcactattctcggcgccgtgatcggcagcggggcaaccgcttacaccttccaccaagtgtggggtgatacagggcatacggaaaccgtggcgcaggtagccaccaccgttgagcacagccgcctcgtcaatgacgaggtgctatttcgaatcaagaatgtcgaggctgcgctggataaactgaaagacgccagcgcgcccatactgccacctaggccggcacaacatcagctggacgctgcgatcaatggcctgttcgagtcgatagaagacccagagcccatcggccatggacaggcccaggatgcagaagctgcaagcggcgaagttcagatgggtgatgctgccggcgattcggcagaagatcatgaagtcggtgaggcggagaatgcctcgaacgaggcaggcgcggagcagaaagagtaa

SEQ ID NO: 359100 - DNA, 363 bp, Pseudomonas aeruginosa
atgccggacgctatttcgagtctcctagagccctacagcaacgcgcccattgagtgcgacggtttcacccgaattgcacactcagtgctcgctggggccgggattccgcactcctgcatgcaagggcagctggtttcagcgtctggcaacgatgagctgccgatccacttctggattcagctagatgatggccgggtgatcgactacagagcgcggatgtggctaggcgacgatgctggtgtgccgcacggtgttttcaagacgggtgagtaccccgagtggaattacctgggcaacgaaatcgctctgccggtattcagcccaacgatgatccagttgcttctttgggagccatcggtatag

SEQ ID NO: 359101 - DNA, 453 bp, Pseudomonas aeruginosa
atgaacaccattacctgcccaggctgcgggcaacaagccaacgcgtttggcagcgtcacttcgtgctggtgcgacaagatgtattgcgaccacgttcaagggctgttcgcgagctattcctgcacgaactgcggctccagcggcgaaacgccggaagcaaaacgccacaatgaccaccagctctccaagttcaaggccgaaatggacagggatgcccatgacctactggtggacattgagggcaaagtgaaatcgaccttctccacgcagagcgctgcgatagtgggggctgaattgcaggttgcgttctccagtggcaccagcgccaccgtcactgtcgagaatccatactcgacccctgcggagttccaggttgtatccagcggtcgcagtcaaaaagccaagggcaaggccgaactcaagcaatcgctggcagctattgccggcgagtaa

SEQ ID NO: 359102 - DNA, 549 bp, Pseudomonas aeruginosa
atggaaaacacctacattcagacctacgcccccttggcgttccacctcagcattcgcaccgaatccacggtgccggcgctggctcgtaacgccatcaacccaaacaaggctactggcgtgcccgcgctccttgcgattggtgccgcatcggtcgccgcagccgctctcgtagctgttggcctgcctgcttgggtgagcattccggtggttgcatatcccggctaccggctgttccggttcgccaaggagcgctacggttcctctcacattgagcagagcattcgtgcaaaccactcgctggtgcgcaaggctgtcgatccgattgatgtgcagttgttcgctgacgtaaccgcggcgatcgtcagttcccattatgggaaccaagcatggtcggccacggtaaatgagcttcgccaaaaggacggttctgacccgtacatgtacctcgcgacagtgttcgcctacgcaccagtttgctggaggctttccgcacgtcgcgtttatgatcatctgctggccggcgtagtcccggctcccggccagagctga

SEQ ID NO: 359103 - DNA, 549 bp, Pseudomonas aeruginosa
atgaccgctttgaagctccagaacgatccagctgtgcagaaggcaatcgacgaagccaccgccaaggcgtgcgaggtcctagacgcacagtttccaggctgggacgctggcggcatcaccagcaacttccagggcctgctcgccgaggtcatcacccgcatgctgaaagggcaatccgtgctcgatggcgtccgtggccatgcaaccatgctgccgcgcctgatcgtcgatgagacgttctttggctgcccgctgatccgaggcgacatgttcctcatccacaagccggaaaagcccgtatacggcgagccagaccgcgtgctggtgctggaaccgggcgcatcgagcttcaagcccatcgcaaatgccggcgacgccttcaccagcttcgatgctgccgccgctgcggccatgaagtacctggaggctgaacagctcaccctggagcaggccaaggcgctccagctgtctgtggtgccggtcgtattcgaccctcagagcaccagcgactgcggattcaagatcgtgagtccgcctcacgccgcgtga

SEQ ID NO: 359104 - DNA, 447 bp, Pseudomonas aeruginosa
atggggaagtttcgaagttttctgacgctggcggcgctcggtttgccgctgctggctaccagtgcttacgggtatggcggcggggcagcggcggctgccgcaatttcggcctcggcggctggctcgaagcatgacgacagcatgatgagcgcaggcagcgctgttcccggagctaccggctacgtgtttgtggatggtgtcggctggcgcgatgccgtgatgatctactgcccgccctcagtcggccacattacgcctgatcgactccgctggcatgcgcagaacgagattgccgaaggccagtgcggcaagcaggcagcgatcacggcccaggaatacatcgaccagctgatcggcgccggcgaggcagtcgtgctgagtgtagcgccggtgatggggcgttactctgcgttcggcatcatctactatcgagccatcactgaatga

SEQ ID NO: 359105 - DNA, 1548 bp, Pseudomonas aeruginosa
atgaccttcaagaacccagctaccccgccgctgatcgaaatggcgcttctggtgattgaacatcaacttctaaaagacgccaccctccttccgtggcgcgatgctctgctcagcttgcagtccggggacgtggagtctgctgccgaactagccgccaaggcctacagcaatggcgcatccttggaagaccgccgtggggtgatcgacttgatttcccaggttgccatcgagaaccgcacacatggccactggtatgagtcgcttttgctgctggcggcagaaggtgggctcagccattgcgcttacaacgtaggcaacctgatcagcgaacgcgccacaacaccaaccgaccatgctttggcccagcggtattacaagcaggcagcaataaacgctactgacccggcgacgaaggcatctgcactggtgaactcctgcgtaccaatccgcgacgggctggtcacgggaaaaccggactgggaacgagcagtcgaaatctacgagcaggcagctgagctgaacctcgcggtcggaatgttcaacgccggaaacgtatcatgctggctcaaggaaaaaggccagttcgcctatgcggccagagctgagaaatggttcactcgactgatcgacagggtggatgcaggcggcgaattcgtggatataggcggcgccgccgaggtacacgccgcttaccaaaaagccaaaaaacaattggctgagctgcatgcgaaggatcaagttgctgttgtggatgtagacctgatcctctccgctgcccaagacgaaaccgaccaagatcgtgcagcatggctgaaaactcgcggccatgaacaccgactccgcaagactgccgtgcaggcgaaacctgctgcgtgggaaaattggctgtcggttctttctctgatggggtgggagttggctgccaaccctgaatatttgaacctggggcctggaaccggagactcccgcctgcttatgttcgaacgcaatcaaggtgctccccttgtccttgcggttgttgacctggacgaaatcgaaagcaacggcggcgtctacaggctggtcgaattggtgaatgatatgaaggaaacacacgcaggcccttgccttgccattggcgctaaggggctgttcgtgcagatcaccaagtcagagggctacagttcttacaccgtatgtgtgtcttcaaatgatgaaggtgtcatttcgcttatccctatctggcccggtgccacaaccgatgaagtagcgaggataatcgatggccaatcccccgtttacggaccgaacaatacggatgaaggcaacaccattgcgattctggtcaatgcccttggctcaggcgcatctgtagacgggaagtccttcccagaagcgatctacgtgaatgttggaggctacttcaactcccctgtttttacggtagaggaagcaataagcctgggctgccagtttccgcccgatgaaatagccttcgccctggctggggtgaagaaacatttccgagatttagagcaacgtaagctcaagtaccttggccttcaatag

SEQ ID NO: 359106 - DNA, 546 bp, Pseudomonas aeruginosa
atgaccgatcaacgcactcagtcccctaacccatccgtcgccagcgaccactgtgaaggcgctgtgactgactcgaagcgcgacaaggttctgcgcaacacacacttcgtgctttctgcggtgatactgggcgtcgccggccaagtctggatcaatggcgacggcagctacgcgctcggcttcatgcttgcagcgctgagcctgttgctcaccagcttcggcgccctgaacctgaccggcctgaccgacaacgctcgcaagggcgtaatcatcctcagcctcgttgtagcaggcctgggtgtgttcaccttcattgaaggtctgcgcgaggctgagcagcatggtcctcgcatttacgatgtgcgctacgagttcactgcggccaagttcaaggttgagggcatttccgatacgccctgcgtgcaagaatctggctccgccgatgcccccgttacctgcacgttggtcgtaacccctctgtccagtgaagaagctgccggcgagaaagctcagacgccggctgacgacgagcagcccaagggttga

SEQ ID NO: 359107 - DNA, 1125 bp, Pseudomonas aeruginosa
atgctgtcagctcagaacgcccccccacaaaacaccgagaacccgtctccctctatccgctggacaaaccggcgtgacctattgaagtgggtaaaagcattccaggtgtatttccctcggaaggctcatctggccaataaggctgccgctacccttgccggaattgagagcttcgagcggctgtatgacgacctgccggcaagcgctgatgattcagacaccacggatcggctgtactcgaaacgccgtatggtgaggttcaaggaagatcgcttaacgcttatccgtgacttccgaatcctgccggacgctgccgatcaattcctcactagctgccctgtcggctgccaggactgcctgttcgatggcatcaaggacacctactatgatgaggctctgtgctactaccgggatgatcaaccgccatccgattctgttgaggcaatcgtggagcagcagcaccagcttgctatcgggcaacgtctgtccaccgttgatagcactgaccgccttggggagtaccttcccccccagatgatctttgacctattcaacttcctacggctgccgttcactgcggacctcactggggaagacagcatcgacgcttctgctccaatgacaagagtaggctgggtggcagatcgtgagcttggccggctggagtgcttcgctctcgctttcactgcaccgcccaactggtgccgagacgaagtgttctattcggccctggcccaggtcagcctcactcgcaacctagacgaccgccccgtgatcctgctgaacaatctgccgcagcaactggtacgaacagggaacatctacacctcattcggctgggtcgtaacagcagcaaaggtcttcccgttcctggtgagccatcgcggcgtcccagttgctgaccttctagtggaactggccacgttcgatgcggccaagtcatcgagcatagctgacagcagtaatgtagccctcagcgtcttctggagcctactgcgccagcattcgcgaatgcagctacccgagacgccagagttcttatcccttccagacaactggatggtcactacaggtgcgaccggccatgccattgagcggcgcaaacacacctcacccaaggactga

SEQ ID NO: 359108 - DNA, 402 bp, Pseudomonas aeruginosa
atgaacgtggaacaactgctggcgcagagcgctgaccaatacatgtgtgaagatcaactcgaattcttccgccagaagcttgccgaaaaagcagcgatgctgcgtgagcggatcgagaagaaccaggcgctctgcaagatcgagcgccagccggacgaggctgactcggcaagcgctgaggaagatcgctccacggcgagtcgcctgatcgaaatggacctccagacgctcaaacagatcgatgcggcgttcaaagctatcgatgccggcgattacggtttctgtgccgataccggcgagccgatcactctccagcgcctcctggtgattcctgagtccctgctcagtgtcgaggcgatgcaggcccgcgaggcgcgtggccggcaccagcgagcagcatag

SEQ ID NO: 359109 - DNA, 339 bp, Pseudomonas aeruginosa
atgggaccagatttcagagttgaggccctgccagctggcttcgtctatggcgctattgccccgaaagttctctccgacctcgcgggtcgatatgcccaggaggcgaaaatcgatgtgcgtcattgggcgatgtgggtgttcgacaatggctgttctgtgcccgtaccaacccagatcgacagctccacgtttccgcccattcgtgcctgtcagctgctccgacaaacactggaggaagtggcccgcgttgaaatgcacgcaatgggagagactgataaattcaatatcagcgctgttgtcagccagctaaacgaagtttgcgccctcggcgccgtgtag

SEQ ID NO: 359110 - DNA, 282 bp, Pseudomonas aeruginosa
atgttgaagcacctgaccactgaaatcagcaacaagcgattcgtagcctacgttgcccttctttacatcctggcattcactgccggcgcttgggttcccgcgtcgagcccgatcttttcgagcgcgccctacgtgaagctcgctcttttgccgttcgcccagaccttcctgttgatgggcgctcgcagccgctggcctagcaactacggcgtgatcgtcgcagccagtagcgcgttctatggcggcacgattctgagcgtaattacctcggtcttcttctaa

SEQ ID NO: 359111 - DNA, 273 bp, Pseudomonas aeruginosa
atgaacaaggctgaactgatcgattccatcgccgcccaagctgacatgccgaaagccgcagccgctcgcgccctcgatgccttcatcgacaccgtaactggcgccctcaaagccggcgacgccgttactctggtcggcttcggcaccttccaggtcaaagatcgcgccgcccgcactggccgtaacccgcagaccggcaaggccatcgaggtcgccgcagccaaggtgccgggcttcaaggccggcaagagcttgaaggatgcggtgaactaa

SEQ ID NO: 359112 - DNA, 501 bp, Pseudomonas aeruginosa
atgaccctcatttacacccgagaagcacagtcgtttcttgcgcctgatgacgggctgtacaagcgcccaccaccccaccagatcatcccctacatggtcaggatgagtagcgcgattcgaagcacgtcgatggccaaccggaccggggccatcaagatggtgcaggccaacatgaacgaagcctgggcgaagattcaccgcgcattgcgcccctacttctacaagcccatcgacgagctgcttgccaaataccccgcttcacccatcgagttgccgaagctggatgacatgccacacatccatgcctcgatgcacttctgcttggacgtgcttgaagacctagatcgcctcaccgtgctcatccaggccgacacagacgcaaccgatggcgcggacaccatcttcaactgctggaacgccgtttaccgggcaactggtcgcgtcgagggtatcgagcggcggatcaaaagcggcaaaggattcaagaacgagggcgtatga

SEQ ID NO: 359113 - DNA, 2169 bp, Pseudomonas aeruginosa
atgacagctgctgcaaatatcggtggtcgcgaggaagcaacgcttgtaagcgttgtgtttcgctcccctacgagcccatggggcattttccgctttcgcagagaagatggctccacgttcgaagccacgggggatttcggccaatccgttctgtacgaggaattcatcctctacggccaacgcgtacccgatatagagggtggtgatttccttgtcagcaaattcacctcgcgccctccccgctcacccaaggcaatctctggctatctcagcgagctgaccggcgccagccgcgcctcgacagtgaaactggtcgagcacttcggtgagagcacgattgatgtgcttgagcgctcgcctgacatgatcggcgacgctggaatcccagaacgggatattgaacgcctcatcaccggctggaaggagcttcgctccgacagactcaccttggccaagatcgaggtcaaaggcatcccgctctacaagctgtcgaagctggagcgctactacgggaatgatgccgacctgaatcaggtgatcaagaccgacccatacgccctgtacgtgttcttcgatgacatgcccttccccaaggccatggccctggcgaaccagctcggcgtatccaatcaatccgaatcggcaatcagaggcgcggttatcgcagcactgcggcgcgaagcatggcttggccactcggtcatcgaaggcaagcaactcggacagctggtcgtgaaactgctccgtgtccacccggacgttgtgcgcccgctgctggcacccgcagttgctgagctgcggcggttgaacctgatccacgtcgatgaacgacgagtccagctcaagcagctctacgaggccgagcagaaactgttcgcccatatcgacaaatggtccagcctcaacgaagaagacctcgacctcgaccttgtgccatcggagcagatggggctcaagatgctcaagtcgatgcagctcaagccagcaagcgcaaaacagcttctgactggcctgtcggcactgctctccgaatgctttgcaatcgtgcaatgccagaccttcgaggatcagctttttgtagccaaggccttgtccctgatattcgaggcgtatggtgccgatgcggtcatcaccacctacaccctggaaatgctcaacgaggcgtcaccccggctcggctgctcaatccccagaatgacctacgcagaactgatcggcctggacgatgaaactggcatcccactgcaccggggcaccaaccccatagaagcggatgccatcgtcgtgctcggcgccgacgcactcggcgttgaggaaatgaactacctgatcgaggccgccccgcttgatggccgtctgtacctactgggttgcccaagggacttgccgagtctttcggtcggccagccgtttgcggacctgctggactgcggccagttcaaggccttccattcccggttctggggcattcctggtactgcaaagcacgacgcacaggagcagatatgggccggagccgttgagcctgacctcaacgatttcgatcccacgcagcctgtttcatggctggaatgcggagccgaagaactcccgaagatgatccccacgctactccgagaggttgccgcagccctagaggtaaaccctctggcggatatacgcatcgttgcgcccagcaccagcagcaaggccgtcagggcaatccaggacgccatcattgcggattttacaggcggcagcttgccgatcaccttccagggccggcagtaccacatcggcatcccagtggttgtacggcaacagttgaactccacgtcttgcccggctttttcggtgtattggccgacagaggtttcgccaacctcattgaccttgcaaagcctgacaggggccgtggcgaagctgaccccagatgaccgtatcgacgtgttcgacgcgttagtgatgacgccgaagttcgtcaggggccggcgatacgagctggtgatcctaattgctctggctgaccaatgcggcgccatcaaccaagagctggtgagcagcttgctcaacacgtctgcacgctcgctcatcgttgccggcgagattcgtgatctggccgatggattcgccgagcgtcaatcgagccgcactcgttccaaactcctgaactgggtatctgagaaatga

SEQ ID NO: 359114 - DNA, 1671 bp, Pseudomonas aeruginosa
atgggtgttgctgcggcgcacctctgcctcggcatcaataagaagatggccgaaaacgaaaagcccatcgtctgggactctctgctcgaagaaagcgaactaccggattgcgatctgcgcagaagcacctacttcggtcaggtcatgccctactctgagtggaaggctagcatcgaggatgtgcgcaacaacaagggcgttgtgaccgcgaatgacattcggagaaccctcaatgaggtgtacccgcagatgatgcctttcatgctcaccgacgaccttatgacgcgccacgtagcacttctggctgcgaccgggaccggcaaaacggaactactgctggcaatcatccagcagcaaatcagaaaaggggctggactaattctggtcgaggcgaaaagcgactcagacttctcgggctcgatctacgcgatgatgaaagaggcaaaccgccttgaccaattcaagttgatcaacttcgaattcccagagcagtcgcacacctacaacccagtctattcgggcggtgtccgcgccacgctgtccaccctcatgaaaatccaggctaactcgtctgaggaattctggacggacattgcccgctacaccctgactgcggcgacattgacgttgaaactccagccagggtcgccggcattcaacatcaaggacatgatcgccctactgagcgacttcgacctactgctctcttacaccaagcggatcagggccgaggaaagcaagcagcacaaagaaggcatggactggctttacagctacctcaataactggtggaaggatggcgacgggtggaactacgctcagtacaagaccctcacgcaaggcttggtgtccaagctgtcggcgttcgcccactccgaatactccagcatcgtcaacacctacgcacctgacgtggacctcaagcatgccattctgaacaacgaggtcgtggtgctctccatgtccagcctcgcggacaaggatggtgtggagctgttcggcaagctgttcatttctgacttggcgcgggcggtcggtgagattcagctggagaagtcgaaaccgttgatgatgttcccagccatcttcgacgagtacccatccttcatggacgagtcgcaggtgcagctctttcagctggcccgctcggcaaacgtaccgatcatcatcgccttccagggcgtcggcttcctggagaacatttcgcctgcattcgtggaaatggtcctgggcaactgctggcatcacctctactgcgacattcgagacacgaagacgagggagttcgccgtcaagctcgcgggctcggtcatcaccaagatggaatcaacagcagagggacaaagcgtgggcgccagccacgcatccaacgaggccgggttggtggccaaccagtccgatggcgaaagcgcttccgtcacaaccaaatcccagagggaagaactcatccagccggaagacttcgcaaccctggatcagggcgacgggatcatcgtcggcaaatcaggcacgtaccgggtgcgaatgccgatggtacgcaacagcttcccgaatgtgccattcagcgaaatgcagctggttcggaggcgcccgcgtggcaggccgggaatctatgcgtgggacgagttcacccgcaagaacaaggacaagttctcccggcttctcgggtag

SEQ ID NO: 359115 - DNA, 342 bp, Pseudomonas aeruginosa
atggcaacctggatcgacaagcttcgagagtggaattacgactgggagccggtcgcaacatggctcctagacacagttcagtatcaggcagcccgacacggcccaatagcgtatgtggtcgcagcactcactgtgatcctggttttcctttcgttccccccgacaaggaagctcacgcagactttctgtggcggagtcttcaagttggttctgaacttcatccagttggccggcgccctgctgttcgttcaagcagtaggcttcttcgctcggatgtgcctcacgctgttccataaggctcgaatttggttgatcgagacagcacgcagagcacgcgaataa

SEQ ID NO: 359116 - DNA, 345 bp, Pseudomonas aeruginosa
atgcgcatgctccacctgtgctttaccgcccttctctcagtcctagctgccacctctgcggtggcggctgacccctacctgatcgatcagcgcgacccggcctatcagaagtcgattgagcacttagctcgcgcagcacaagcccttgcggtggccaggaaagaaatggccaaggcagaaggcgcttaccagcttcccggcctcaacgtccagcagatgcaggaacagctgaggcctctggaagacaccctcgcggtgttgcttgcccccgaaaagaaacgaatggctcaccagacattggtgccggacggaatctttttcacccctctcaattctggagactaa

SEQ ID NO: 359117 - DNA, 354 bp, Pseudomonas aeruginosa
gtggacttatcgaacgttcttccccgttacggaacccgcgaacatcggcaactcggactgctgctggtcatgttgctcgttgtcgcgctgctcatgttaatgcctgacttcgccttagcagccggcttcgacggaaccatcaagccggacgagaaagttggcaccaacctggactcgtccgcacgttcctggtggcgcttcctggccaagccgggcttctggattgccatgatctggctcgcaggcagcgtgctgtttttcagctcgcgaggctggcaggtgcccttcgttctgggcgcaatcttcctattcggcgaaatggtcgtcgatgggttccaggccctgatgaagtaa

SEQ ID NO: 359118 - DNA, 384 bp, Pseudomonas aeruginosa
atgcacctgagagttacaacagaaagcgacacctatgtgtacgcaacatccccactccgcttggcaggactagaccccgaggacttcatcatcctcgcgcttcctgtggcagtgctcaacacgttggatgtgaaccccatcatctgtttgctggtggggttcttctgcttgtggctctacaaaagcatgacagcagatcagccgtccgggttcttgtccattgccgtatcgctcgcagtgggtgagctgctgaacaaccccgttgttcagcagatcaagcctgcgcgagcggtattgcaatggacggctgtgaagatcaaccacatatggatcaccagcggccttctaccgctgcccagctattgcaatctgtacgagcgctag

SEQ ID NO: 359119 - DNA, 636 bp, Pseudomonas aeruginosa
atgtcaaaaccaaccaaatatgggcctcccataaagctgttcaacatcttgggcgcctcggaactgcggcagagccgcatcatggttgtcttgctgttcatcattctggcggcggcggcaatcattggctttctgatttttcaggtaatcgatctacagcgtgcaaatgcgcagctgagttctgatcgggtgatgtacggataccccaacgcagaaggcgtgtttgtcagcgagaaggtaatccctcgccgtcacgttgaagggttcgtcagttggtacatccagaactactacaacttcacccctgattcggctgaggccaacgcaaccgaggcactgcgcatcatgtcgccgagccttcgcgtcaagcaggagcaccccctcaaaacactcgctcagcaatctatcgagcaggaaatcactcaggtgttcgctcccgacagcaaatacaccatcgagtacaagccgggccagggctacatcgtgtcgttcaaaggaacgcgcattcgggcaacgatgaaccgcgtattcagcacgcgtaaatatgacgtgaagctgctgctcaagcccgtcaagccatctgcccacttcgaatgggcactggttgtagacgactacatcgcgcaggagatttga

SEQ ID NO: 359120 - DNA, 750 bp, Pseudomonas aeruginosa
atgcctgcccttgcaaaagacgagtgcaaccgctcgccgcgcaccatcgtctatgacaataagcctgttgatgttttcatcagcaatgacacccagcgggcggaagtgactttcccagagccgtacctggaaggtatttacgttgaagttacagagggcatgaacttctacagaacaccgatcaacaacaagatcgcgttcatgtcagaagacccaatgtacaccggcctagtcaccatcgacggcccgagcaaaaaatcctacatcctgcgccttatcacgcgccccggatgcgctgacagccaagtgacgatccaggaccagccactcgctgatcgcagtcaaactgccgtgaacacttatggccataagaaaggcctgatgaactatctgttcgacggaaagctgccatcaggctatcgacaggctgactttggcggtatgtcgaaagaagaacgcacagtgtttcgtcagggctctttagagttcattctccaaagccagtacatcggcccgaaatatatcggtacgacctacgaagtaatcaacaaaggtcgcactgcaaccaaagttgcaattgatcagatcgattacagcaatccggcagtacgggaaacactcggcatcgcccgacaagtctccatgctccccacatcccgcatccttggcccttcgccagacttccttaccgaggtctatgcagaaagccaccgtgggctcctgttcatcgtctcggagaagcagaagtga

SEQ ID NO: 359121 - DNA, 1530 bp, Pseudomonas aeruginosa
gtgagcgaggccgataacaaaaaaaacccattgatggagccaaaaacgctgatagctggcggggttgtcgctgtcagcatcgctttcgcattactaggcaatggaaagaaagaggttgagtcggtagatattgccgcgaagcctattgaagtaggctcagaccaaatcaacgcaatcagcgtcaaggacaaggacgcagccctaactgtttttgccaaacagttcgaagccgttgagcagaagctttcgattcaagagcgagaagcagctcagagcatcgctggacttcgcaaggaaatgaaagagtccaacaacgaagtaaaatcgatggtgtcatcgctcgctaacgaggtactggctctcagagccaatggcgtcgaaacgatctaccaagaagccaacaagaacgacagcaaaacccctctctccttgccagacaaaatgccagattttggcatggaaggtttgaacttcgacgggctcaatttcgacatgagcccaccaaagccgcaagttgagcagccggttcagggagcagggatttacgggccgaactacttcattctgaaaccacagaatgtcggcaccaccgtaacgagcaagaacggcggggacgcattgagcgcgagcgaaagcgacctattcgcttcgatgagttcccctgccccgcaaacgcccaactatacaacccaaaacgcagggcaggcccaggcacaaccacagaagcagtatgaaagcgctgccgaagcctacgaggatcaacaaaagaatgctgaatccgttgctggcgctgtgcccacaggccccaagcttgagcgcatcaccatccctgcgttctcctttgttgaagtcactaccctacatggggtggcctgcccaatcggcgccaactctccaaactccaaatcgcaaagcgagatacctgcacgccccatagttctgcctgtacgtggaatttttcggggaccgaacggatcgagcgtggatattggcaacatccatctaatggggctttgcgccgggcgccgcacatcaagcagtagcgctggcagagccacgatccgtgtcgagcaaatgtcgtactgggacgaaggcggcgacgcccaaatgtccgcaagtaccggctacatcgtcgatacccgcgacaacgagcaagacgtatacggacgactcgacaaggcctctggccggacactggccttggagtctgcggcagcagccggggccgcgtttgcttctgcactcacccaaagcgagtacaccacgcaaaacaacctcaatgccgagggcgggtcatcgacggttcagcaactgaccggcgatgcaaccaaggcggcaaccactcagggcattgcagcaatcttcggaaagattgcccagcgctttgagcaagaagccaatgcagccatcgacacagtggtagtagagcccggcatccgcctgcggttcgtcactgatcaacctattcatgtttacaagcctgccgaagcgttcgacctggacggaagcagcaatgacgttctgctgtga

SEQ ID NO: 359122 - DNA, 327 bp, Pseudomonas aeruginosa
atgaaaaagccgcatattgccgccgccattgcatgcctgaccttgctcactggctgcgcctccgagccgacattccacaatcaggcctcgatggatgacgtttacgatgccgttcacgcgaccgcgcagcgcgagacagtgagcctcctgcgacaaggccttcgtgccagacccgagctagggagttcggagccctactacccaatccgtcaacctgacgttgtggctcccgtatggaacgtgccatacgcagacaaaaagactggtgtgaagcacggcggcagctggaactacatcgtggtcgaggaagcacaatgggccgagtga

SEQ ID NO: 359123 - DNA, 492 bp, Pseudomonas aeruginosa
atgggccgagtgatcatgctacttggctcattggtttgtgccggcatcgcgcaggccgagggtgtgcctcaaggaatccctcagcaacagatggacgcgattcgtgagtatcacaccaagcagatcatgggcagcagccaggacctcaccaatctgcaacccgatgttgttctgttcagaaaactgttcgagcgtcgggagaacaatttcgaccagcagaaactggtgccgctggaccctgtgcccatgacgcaggtgttcaaagcaaacgacctcacggttgggcaacttgcgaaagtagctgcggcagccagtggctatgacgcggtactgcacccgcagatcaaccagcagcaaatcgtcaagatcaactcccgcccgaactcgctcaccgatatagccgagtacctgacacgcgtcactgatgcccagttcaccgtctaccaagagagccgggctctggtagggctgcccaaaggactcacgcaatga

SEQ ID NO: 359124 - DNA, 2889 bp, Pseudomonas aeruginosa
atgaccgagataacccaactggatcatctgcatctttacgacacagacctccaagcactcgcgaggcgtaactaccaaggcggtatgccgattgagcttctgagcgacgcctacctgtttgaggaacatggatgctacttccacaccgtcgatggccgatttgcaaagatttggcgcatccagggcgcggacggcgccatgctcaacaatgaggaactgcatgccgtatgcgcatcattcggcgaagcgctgaataacttcccttatggcagttcaggtcaattcatccgtcatacgcatcgcgatattcgcgcactaatgtcgcactacgctcgaaacctggatacagacctcggcgaattcgaatcagcaatagctgactcgatcatcaagcgccagtacaacgctgcaatttccccaaacggtttttttgccaagctcagctccgccacattggagaagatgcgtgccgatgccatgtcggccttggacaacgaagaaaatgatgacgtgagagccaacgtctcaaacgcgatccagcgtgaaatcaatgaagggcgctacccattcatatcgaattactacctgatcttcatgtgggaaccggagtacatgtttggcaagttcattgaccaaacttggaaagcagcacttgcatctgttggtttagcagacgccgatgcgcttgcacatgaggcctactccaagcatagcgagaagtttggctcactttgcaacggcatcgcacagaccttggcggctcaagggttcagcccagaagaactgaatggtcagggcttcgtaaactggcaataccagcttctcaatcctgttcgctactacaacatagaaccaccggcataccgcccagatatgcctgtatatgagtgcctgaaatcacctgacatgactccgagtcatcaggcaataaactctgcaaccgctttctcgcaagttagaactagcggtaagggttacactattcacgatagcggacatgattacttcattcgcgctgtttcggtcataggcaaacctgcgaagtccgcgccgggaatgctccaaactgcaatgcgcggcattgagagtgagtcacttatcacactcaactggtacgtacccacgaaggctaaggtcacggcacgacttgcggcgcgaggcaagttgatcgcctccaaaaaaggaatgcgccttggggacaagctgacactgcaacaacaggaagacgacctggatgcagtgaagggcaaaacctccagcgagaacgtggtaggtcgtgagcagttttttgacacatccattcatgtgtgcttgatgggttttgatagtgaaaaactcgaaactcaaactgagcagcttgagtcgctattctggcgaattggctctgcggagaagatgcgcggtgacgcagcggttcgcaccgcctttccgctgaactatgtagaaaaaagccgatccttgctgcgccgggacacccctcacctcactgaaagtctttcgcatatgtgcccgattttcatggagtaccagggtgtgcctgaccctggcctgatcatgaacaatcgccttggccagccaatttaccttgaccttttcggcaacttggttgttacagcccactcgctgatcgttggtacaactggtagtggtaagtcgttcgctttcaacaacatcctgatgggcacaagggtcaagtaccgacccaaggtctggatcattgataagggtgatagctacgaatcactctgcatcgtgcttggtggtaactatattcgcctcgcgactgagccatatgtcgataaaacgacaggccgcactatctatccaatctgcatcaacccgttctatctcagcaaagatgaggacgggaagaatcttgtaccgaaaagcgacgagactatgttcattgctgacctgctggtcatggcaatgactaccggcaatggcgacgccaatgctgcggtgcataccaaatcgcgaccgcttctctataccgccctttcggagttttttagcgagtgggtagaaacaaggccgttcgatgagccgatcatgagcgacttcatgcctaagctcgccaagacaaacttcaccgacctgtctggtgaagacttggtagaacggctgaccttgttttatggcaatggcccatatgctgcaattttcgacgggaaattacaggttgattgggacaatgatttcaccgtacttgaaacacagcgtatggcgaaatctgacgctctaccaatcgtcacgctcgcgctgttccgccaaatcgacatgtactgcaagttcaagctcgacaaggacaggaagaagctgattgcagtggacgaagcgtgggcaacactgtcctcccccaccgcagccgctgccttggccggtttttaccgggaaatgcggaaatacaaagctgggtgtctactcattagtcagacagtcaaagactttgtgcgaatcctcaacgcggaggcaaacggctctggggatcagcaggatggcatcctggagaacacctcgcattacttctttcttgcctgctcggagtcggactacaagctcgcaaaaagtgaactcagcttctcagatgaggaaattgagttgtggcggtcgctggcatcacttccgccgctctactccgaagtcttttatcggatgcgaaccgaacaggggctctattactcgggagtcttccgactattcgcaagctcggtatcactctggatcgcatcgtccgcgccggaggactacgtgctgcgagaacagagaactcaagaactcatcaagaaacaaggcattgacgagcagctagcacgtcaacgagccatcgtcgaactagcagatgaatacccttacggagccagattccatgtccaagacgctgcgtag

SEQ ID NO: 359125 - DNA, 387 bp, Pseudomonas aeruginosa
atgtccaagacgctgcgtagtgccgcactcacaactgcaaccgccatccttctggccggttgcgcctccaaatacgagccgagagaaagcatcgtcgatgaggccaaggccgccaagaaagaaaaaattgttgccccgcaaacggttcttgagcgtcaggcatacgaaaaaggggtacaggacgtactcattgatatgaaagggaagatgagagcacgcgaccgattcacctgggaagcgccaatcatccaatgcggcgttgaaattccaggccgagtgatcaacggaatgctggtcccgacacacgaagaatgcgtccagattgcacctggccgctggattgaagaagcgccgacctttctgccggctctaggagcgaacgaatga

SEQ ID NO: 359126 - DNA, 1344 bp, Pseudomonas aeruginosa
atgagtgacaaaacgaacatgcttgggaaccttggctcgcggattcgtgacggattgtctcgcatgaaccaagacgccaaggacaaagcagaaggcaagaaaggttcctcgactcccgagaacgaaagcatcggtgctcccgacgaaacaatggacgaggctttggctgctgaaagccgcaccgagaaagatcgtatttcggctgtcccagaagacgaaatcgatgatgcgctcatcatcgaaatggaaccccaggaacaaaagccgaaacccaaagggcttgataacaagcagaagctgttggtgcttggcgccatggctatcgctggcatttactggcaattccagtcacccgcaccgatgccgactgagcaagcaggtagcgaacaggctcagaaccagggacaactggaagtgcctgcgggcgaggaagtggacgggccgacattcgatttagctggtcctgcggatgatgaatcaccgatccagaccacatccagcacaagctcgcttgatgagcttggattcggtgtaccagcggagggaggcaaggatgctgcaaatgatccaattggcactgacctgctgacagcggacctcgacgaacagctcaccagacttggggatgacggaaacgaaatcctcgatccattcacgggcaaagtgaaaactgagcctgccgctgcgctgcaagtcatgggtgcgaatgaggtaaaggctgagccaaccctgaacgtcgaagccgacttgggcctgatcggcgcctcggatgcgaacccgtttgatgcacctaatagtaagtccaccgagttgagtggcacccagatcaaaaatgcggatagtagttctggcgaactgaaagatcagggcgcgaatgctgacgtagccaacctcaatgccaaattggcagagaaggatggtcggattggtgagttggagaacgaggtgggcaagctcaagactgaccttgccaaggcgaaagacgaagtggcgaagctaaccagtcgcccgagtccgagcgccaaaaccacaaaaactcagcccgcaaagcagaccaccgctgcacagcgctcgccctcgacgaatcgagtcgcctctgcgccgaaagctatcgcaagaccacgcatttgcgtgactgcggtagcccaagcggccaggaattgcaccacatgcgtcccgcatgccttcatcacccaccgtggtgcagaagacatggtaggccaaggcgatttcatagaggggcttcgagtcaacatcgttggggaccgacttgatctacagaacgccaaaggcgatgtagttcacaagttctggagttcacccaatggctgtgccgcaggttaa

SEQ ID NO: 359127 - DNA, 660 bp, Pseudomonas aeruginosa
atggctgtgccgcaggttaaacagacgttaaagattcagccaacagagaaagataacctcctgttgcagcaatgtctggcggtaattaacaaagaacgctttagcaataagttagaagtcaatgcgcgctgggattatcccagcgccgttgagcctcgcgacccagctgaggaattgaaacacctgcccgaaagtgaacaggcactgatagcacaggccatacaggcttatgcagagcgtgactgggacaaggcaaagaaactactcaagccattctgtcagtacgagctgaggcatataaatagcctctatatcagtacgctccgccacttgaaagagccaatttggttcaatacttcgcaacagatatggcacaacgacccggagtccattgctccagcagttgcgagcatcgaaattcggaacgatgttgaagaaattctagtgtcccctgctctttcgagcattggttacaaagcccctagatacgtgctctgctacgtactttttcacgaagggcttcataagatactggggaccaagcactataacccccaccctcccctgttccgcagattagaagccactgcctatcgacgcaattgcgcagtggcctggctaaggaagcacaggttctcgacaatcgaggatttattctga

SEQ ID NO: 359128 - DNA, 699 bp, Pseudomonas aeruginosa
atgcgcgctattgcagtaatagcgatcctattttcgcaatgcacctgggcaagtcaatatgactccctcatcgatgccgcagcgcggagcaaaggaattgatccaattgttcttcgcgccctggctcaaaaggagtcaggtaagcatccttggacctttaactgtgatggtgaaggtttctactttcaaagtaaaaatgaagcggtatgggcactttggcaaataagcaagaacccatggatggccaaagtaaaaccattaaaaggcaagacggtacggcagtttttctcaaacaggcaagatgctattgcatttatgaatagctacaaggccgctcaggtaaaggcagggatgcagccaattactgtgcggaacgacaacctaaaggaactcaaatcaggccagggacgtgttcggcagctatgggtaataaacacagatattggtattgctcaggtaaattacagattccatggcgtcagcaaggctagggtacagcagtggttcgatccagcttacaacctatcatacgcagcatccgaagtggccagacacaaaagtagaggcaaatcagatattgaggctgctggcgactaccactcaaagacaccctccgtccgggctgtctacatgaaagcactactccccatctaccagagagagaaagcccgtgcgcattctgttcttgctaattattag

SEQ ID NO: 359129 - DNA, 453 bp, Pseudomonas aeruginosa
atgagtgactgtgtgccctatgccatccacattgctaccggcgttgcgctggaggcaatcatttcccaagctgagaagtatggttggcatccgcagttgggcatgcaagcagtagccggctggtgcttgattcgcaacatgggatttcaggtcacaccgatgactgccccagagccacgggcgacggtcaagcagctactgtcgagcctcgacaagagcaaaacgcacatcatcagcgttgatgaccactggtttaccgtgcgccagggcgaagtcttcgacaaaggcggcacacacccccgcacccaagtgaggcatgtttttgaagttggccagctccagcctgatagcacgctctttatccaatcgggggccggaagctgcggcaccaatggaaacgcgctgaatagccagagccccttttgtgggatgcaaataaagtttcatccttag

SEQ ID NO: 359130 - DNA, 435 bp, Pseudomonas aeruginosa
atggcaagtatcgagcgtgagccgctgccggctggtgccgtgatcgagtattgcggcgagcacggcgaagtcatccacgatccgggcggtaatggccgtttaacggtcaaggtcggcgaccatcaggcgcaatggtggtggacgttcgagggcgtcacatgcacggtagtgtcgatgccctccacttctcccgccacgcacaagagtgagattcaggagctgatccagatggttcgggattggttcgcgcagccggggaatgaaggcggcggcatctttcatgtgatgctggaggatggcaacgtcgagcaagagttcgccgacattgccctggagcaggcccgccaaagcggcgatgcaactgctatcgaactggcagagaagcttgcagcactcaccgtcgcggagcgcgtcaaggtctgcaatgcgtggtaa

SEQ ID NO: 359131 - DNA, 324 bp, Pseudomonas aeruginosa
atgccgcagcagatcaagaccgaataccagctggagcgcgaagcccgctggaaatccatgggtttcaccctgatcgacgaggcgaagccagagattgggaagccagtcgaggccatccgcgttcaccagcctcggggtttcggcggcgtgatcctgcgcaccgaatacctgctggtcaacatggtgcgggccgaagaatacagctacaccgacaccaccaacgacgacaagcacctcgcctccagcgagttcgagggctggcgcgagattggtgccgggcaaggcagcaacgatgatcaagccaacaccaagggggcagcctga

SEQ ID NO: 359132 - DNA, 351 bp, Pseudomonas aeruginosa
atgggcaatgagcgcggcaactgcatcgactgcggcgaagaactgtgccacctggatgacgaccccaacggcgcccacaactgcacctgcgcccgctgccgggcacaggatgagcatgacttcgacgccgagcccggcgccgttttcagccgctcgggtgagcggatcgacaacaagccccaacgaccggccatgcctcaaaacctgcgctcggttctggagagccttccgcagctaccacagcgccaggactcgaccgcagcccagctggccgaccttcgggtgatcgccaaccggctggggctgtatgacgccgccgacgccatcaaaaccatgcttggccgtcagtag

SEQ ID NO: 359133 - DNA, 240 bp, Pseudomonas aeruginosa
atggccaccagtgaacagaaggtcaaagaggtccatccccgcgccagcaagaagcgttattcgacccacggtggcggcggttactacctgatctggtctggcttcccggaaggccgcgagagcctgcgcctgggcgaaggcaaaaccgcctccgctgcgtgggtggacgcggccaagaacatcaagcgcgtggctgagcaggccagcagtgcggtacaggagagcagcaatgggcaatga

SEQ ID NO: 359134 - DNA, 240 bp, Pseudomonas aeruginosa
atgaccttaaccgtgacctctagccgaaaattgacgaggcctgtcccggatgactgctccgaccgctatgcctccggctgggcctatgcagactggcatatcagcaaaggcggcgacctgaacgccgacgcccctgctgactggcacgaagaaatggtcaacggcttctgggatcggctcactgctgagcgcaacgcgaattccaactctgagaaagggcaaaacaatggccaccagtga

SEQ ID NO: 359135 - DNA, 297 bp, Pseudomonas aeruginosa
atgaataagacccgtaggaagcggattgcagaaatctgcaagcagttcgaagaactgaaagaacgcatcagcgagcttgaggaactgaaagccgaggttgaggaattgcagagcgaggaacaagaggcctttgacaacctcccggaaggtattcaacaggcagatcgtggccaagcgatggaacaggctgctgaggcgttgggtgaagctgccgatcagatcgatgagctgattagcagcgccactgacgacattgacgaagtgctcactgcgcttggttccgcatccggcgaataa

SEQ ID NO: 359136 - DNA, 270 bp, Pseudomonas aeruginosa
atgcagacgcacacgattgacctgagcggcagcgccaacgtccgccatccgttcgcagactactcgctcacggacgcggtgaggctggccaacaacaaccgtaacttgaacctgctcccgcccgtccagacgctgagcgagacccgtgaagtggttcaggacatggccaatcatgccggcttcacctggatcaccggcatggtggcgctggatgttctcgattccgtgattgagaatcgggatttgcgcacctcctgccgcctgatttaa

SEQ ID NO: 359137 - DNA, 297 bp, Pseudomonas aeruginosa
atgtcgcaggaaaccggaaatctgttcctcctgaacaacaacggcaactacttcgagatcaacacgaaggaagtgagcgtggacaaagagcgtctttacgagtgccgattcttcgacaccgggaaggcgctgctcgaagccgtcagctctgcggatgggtgctcggtggaggaactggaggggacaaccttctacatcaccatgcgcaacgggaagcccacgttgatcgacgaccgtggctttccaagcgaaattgacgggtcggtggaaagcttcatcaccctctttgaactctga

SEQ ID NO: 359138 - DNA, 405 bp, Pseudomonas aeruginosa
atgagcgaattccaaaccttgcaagtcggctcgctggagctgcgcaagacagccgatggctggcagtacctgagcgaagggatcggcaacgatcccgaccgctggtgcgacgctaccggcgtgctggggccgttcggcaactcgggggtgaacacccttctcgatgagctgctggcggcacggcaacaggccgagcagaaagccgagcgcgtgtgcgagaactgccgctactggggccaaatttatgagggctgctgcgatttcatcgacaccattgccggcgagcgagtggctgcaacaacggggtgccagatcatcgccacggtaagtgacgacaccgggctcaacactgtgttgaagactggcccgaatttcagctgccccaatttcagcaagcaacggtga

SEQ ID NO: 359139 - DNA, 432 bp, Pseudomonas aeruginosa
atggttgaagtagaagttggcaccctgattggccgcgcactggactacgtgattgcgaccatcgaggaactgcccatccagcatgacccgatggggttctgcgataccgccaacggcggttactgggtctgggacaagcgccctggcggcaagatgctccagatcggcccgaagcctgcgggccataacggcggctactacagcccttccacgcgctgggatcagctcgggccgctggtcatgaagtacccgattgtcatgggcaaccatgagtccgggaaagaggatgggaagttctggggcagtgcccattgcttccacggcggaaccgaattcgatacctacgatggcgtcatggttgctgcctgccgcgccatcgtcgcctacacgcacggccctaccgtgaaaatcccacgcagccttcttcactaa

SEQ ID NO: 359140 - DNA, 267 bp, Pseudomonas aeruginosa
atgcagaccgatactgagattcaagcaaccgttttcgatgttccctccggcaacgtccgtggcttcgtgacggccaccctgccgatcaagggcaaatccaagcgcatcgcccacgcaacgctgctggtcgatgagacgccctctgtatacatcgaggtgcccaaggccgccccacttgaccgccttgacgctattgccgaaggcctcaaggcattcgctgcgaaggtgcgcgtgctttgcccggccagcgtcgcccaggaggggtaa

SEQ ID NO: 359141 - DNA, 168 bp, Pseudomonas aeruginosa
atgtcacgactgttccgccttcccctgctgccgtttgcggtgctgctggagctggtgctgctggcgcttggctggggtctagccctggcttccccgcatctggccggtcgcgttgtagcgcttgccaaacgcctccctagcctcgcttggtacaccgggcgacagtag

SEQ ID NO: 359142 - DNA, 339 bp, Pseudomonas aeruginosa
atggcctacgcgctgacccccgagcagattgcatccatcaccatgccggagctggccttctccaccgagcgcctgttgccggcgtgggaggacattcccgaagacttcaagcgcgggaacatctacaccgagctggcttcggcgatcttctatggcacggctatgccccccagcaccatcgagctgaacgagggcgttgagggcgaggccctgaacaaatgcgtgcgtgctcacctccagtcgtgggggccgaagcacgaacacaagattgcaggcgtcggctacatgattgcctgcgcctgcacgctgacgccggcaacagaggcgagcgaggcataa

SEQ ID NO: 359143 - DNA, 1311 bp, Pseudomonas aeruginosa
atggcggtctatgtgctggacaagagcggtaagccactgatgccgtgcagtgagaagcgggcaaggttgttgctggtgcgtggtcgtgctcgcgtgcatcgcttgatgccgttcgcgattcgcctgacagatcgcaagcaggctgaaagcctccttcagccgttggccatcaaggtcgatccgggcagtcgctataccggcatggccttggttaggcagcaggcaaagtgtgtgtccgtgctgtctctgatggagttggcgcatcgtggtgcagctatccgtaaggcgcttgagcaacgtgctggctatcgccgccgtcgccgcagccagaacttgcgccaccgtgaggctcgctttgacaaccgcagccgccctgacggctggctgccgccatcacttcagcaccgagttgatactacgctgtcctgggtgcagcgtttgcgccgtttggctccggtttgtgagatggccatcgagcgggtcaaattcgacatgcaggccatgcacaaccctgaaatcagcggtgtcgagtaccagcaaggcgagctggctggctatgaggtgcgcgagtatctgctggagaagtggggccgctgctgtgcctactgcttcgcagaaaacaccccgcttgaggtcgaacacatccaggcccgcagtaacggcggcagtgatcgggtatcgaacttgaccctggcctgtcatccctgcaaccagcgcaaagggaatcagccggttgagttgttcctgaagggtaagcccgagctgttggcccgaatcaaagccaacgccaaggtgccgcttcgcgatgccgctgccgtcaacgcaacgcgcaacaccctgttccaagcgctactggcgaccggtctgcccgtggccaccggcaccggggcgcagaccaagtacaaccgccgccgactgggtatcccgaaaacccacgcgctcgatgccgtctgtgttggcgaggtcgataccgtcactggctggcagcgccccacgctgtcgatcaaggccacgggccgtggcgagtaccagcgcacgcgcctcaccgcgcacggtttcccacgcggctacctgacccggcagaagcgccacttcggcttccagacaggcgaccagataattgcaaccgtacccagcggtaagaaagcaggcgtccacaagggccgggcagccgtgcgcaagtccggcagcttcaacgtccagatgctttcaaccgttatccaaggcatccaccaccggcactgccggattattcagcgggcagatggctacagctatgcccaaatctcaacccaagatagccagccttag

SEQ ID NO: 359144 - DNA, 1026 bp, Pseudomonas aeruginosa
atgggctctactgtatcgactggcaagcaggtagcagcgttcaaggccaccagcggtaaggtcatgtacgtgctgttcgaggaaacctacgagtccaactgctacccgcgtaccccgcgctggagcagctacatgattggcgagctgcctgctgttatgcgccacatcttccgcgctgcatccagctgcgagggtggcatgctcaagggggctggcgggcgagacattacccccgagggctacctccagggctggttcaaggagctggagaacccggttgagattgctgaccgcaagttcgagctgtacgccgtcaacaactacatggcgccgatcccgaccgagaatttcgcatgggccaaagctgcgatggtcaacgtaggccgcgaggctgacgcagtgaagcttgagaacggtgaacacctgatcgtttcgctgtacgacgacgccgagctgctggcagcaatctatgacggcatccacttcggcgccagccggattattaagtccgtaagccaagtcctatatgcgccgcgcaatcctaacctcggttacaagccggccaagtccaaagtcgtgagcatggacaccccgcgcttcatgcgggtgcgtgaagggcattaccactacgccacccaggacgccaacggcgactggcgtggtgacgcttcgcactgctttatgaactcgttcatcaccaatctttggaagtcggagctggctgagccgctgacctatcgcggcaagatcaaggcctaccgcgatgcgatcaagaacgcccaggtaatgccaagcaacacgaagcttgtcatcgacaccaaggcagtcaccgaccgctaccaccaggagtcggttgactgggtgctggccaacaacccgcacaccaagcacggcgatgaaatccacgtagagcttccgaccgactacaccgccctctaccgcgtggcgaccctcaatgagaagttcgcccgctacgtcttcactggcaacgcaccagcacagcagcttgacctgttggcctgctga

SEQ ID NO: 359145 - DNA, 327 bp, Pseudomonas aeruginosa
atgtcgcatcttctagagacgagcaccgttgccgccatcggcgccgacgccatccgggactgggttgcccgtcaccttgccccgctctgcccggagggtgcggtaatctcggtcatacagcggccctggcattgcaagggcgagtcctgctacttcgcggcggtcgaggttgaatctcccatcacaaccgaagaactgcgccgactggaggtagcggagcacacgcgaggccagtacctgcacttctacgtcgatgacgtgattgcggcagcggtgggcagcggcgccctggccggcgacttcttccacgttcactaccgctggtag

SEQ ID NO: 359146 - DNA, 441 bp, Pseudomonas aeruginosa
atgatgaccaagcgctcgaaacgggagtggtatacccagaacggcattgccatcatgggtgacgaaggcatccacgttactgacgtgaaaggcctatcccgcaccgacagcgagaacgaagccaatgccgcacgcatcgtggcttgcgtgaacgcctgcgacggttacacgaccgagcagctggtggccctcaagggcggcaacgtcaagcgcgaagtcacctactacgccgataagctctgcgacgcacagaaccgctatctcaaggcggagcagcaacgggacaacctgctggcagcgctgaaaaaccttctggagcacgaaggcacccaggtagaaaccggcattggcatgatggagcccgacgagctgcaagaggcacgtaagcaggcccaggccgcaatccgggaagtggaggccgctcaatgtcgcatcttctag

SEQ ID NO: 359147 - DNA, 342 bp, Pseudomonas aeruginosa
atgagcgagttcatcgtccgcgtgacctgctttgaactgaattaccgtggccaagtagccggccagattgccgaggcgttcgtgccagtcgaagccaaggacgaagacgaggcatgccagcgtgcagtcctttggcacggggacaacggcgttgccgttgaggatgatgacctgcaatggcagtgcatcgaccttccgcgagcactggtcttcaaggcaaccaaatgcctcgaagtcacagcttcggaactcgaagtgttcttgtccctgacccaaggcctgaccggcgcaaaagtcattgggcgttccacttccctgaccatgggctcggagcaagcatga

SEQ ID NO: 359148 - DNA, 1047 bp, Pseudomonas aeruginosa
atgggctccaccgtatccaccaacaaactggccgcagctttcaaaaccaacagcggcaagaccatgtacgtgctgttcgaggaaacctacgagtccaactgctacccgcgcacgccgagctggggctgcctgctgatcggcgaaattgccaacatcatgcgcggcatcttccgctcggctgggagctgcgagggcggcatgctcaagggcgctggtggtcgcgatattagccccgagggctacatccagggctggctcaaggagctggcgaacccggtaatgctcaacgatcaaaccttcgagctggcggtaggcgatagcctttactccacggttcccaagtcagagttcgacaagatcaaggagcgcatgactgccaatggcttcgaggcagaggccacccagctggagaacggcgagaaactggccgtcagcctgtacgagcacggcgagttgctggccagcatctataacggcaacgtgggtgcgtggcggatcatccgtggctccgccccgatttacggcctgcgcgatccagagctgggctatgcacccgcgaaggccaaagccttcgagcttgaaacgcatgagtgcatgcgtctgttcaagcatcgcgatgacatggccatgaaagacaagaacggggactggcgtaaccgtggtggggactacaggatcatcggcaactatgtccgtgatctttgggaatccgagctgcgtgagccgggcagctacagaacccgtatcaagaacctgcgcaaagccatcgagtctgccccgctcatgccatcggatgctgtcgtagtgatcgacacgactgtaaagctggcgggctggactcaggaaggcgtaacccgcgttgtaaacgagaacccgcacaccatcgttgggcacgaaatccatgttgccgtcccgcaagaagaacatcaggcgtaccgcgtgtgctgcctgcatgaggattgcgccaagtttgtctgcctccccctcgcagccaaaaaaccagcaccagcagcaccgaccctgcaactggacttgctggccagctga

SEQ ID NO: 359149 - DNA, 1068 bp, Pseudomonas aeruginosa
atgggctccaccgtatccaccaacaaactggcagcagcgttcaagaccaccagcggcaagaccatgtacgtgctattcgaggaaacctacgagtccaactgctacccgcgcactccgcgctggggctgcctgatgatgggcgtgatgggcgagattgccaacatcatgcgcggcatcttccgctcagctggatgctgcgagggcggcatgctcaagggagctggcgggcgaaacattacccccgaggggtacatccagggctggctcaaggagctggccaacccggtatcgttcaaggatcgaaccttcgagctggcggttggcgatagtttgtcctccacggttccccagggcgagttcagcaagatcaaggagcgcatgacagccaatggcttcgaggcagaagcgacacagctggagaacggcgagaagctgaccgtcagcctgtacgaacacggcgagctgctggccagcatctatgacggcaacgtgggcgcgtggcggatcatccaaggcttccacgccccggtctatgggctgcgcaaccctgagcttggctatgcccccgcgaaggccaaaaccttcgagcttgaaacccatgagtgcatgcgcctgttcaagcatcgcgaggacgtggccgtcaaagaccagaacggggactggcggaaccgtggctgggcctacagcatcattggcaactatgtgcgcgagctatggcaggcagaactgcgcgagccgggcagctaccgcgcccgcatcaagaacctgcgcaacgccatcgagactgccccgcttatgccatcgggagctgttgtagtgatcgacaccactgtgaagctggagagctggactcaggaaggcgtcacccgcgtcgtcaacgaaaactcgcacaccatcgtcgggcatgaaatccatgtggccgtcccgcaagacgaacatcaggcgtaccgcgtgtgctgcctgcatgaagattgcgccaagttcgtctgcatccccctcgcagccgaagaaccagcaccagcagcaccagcagcaccgaccctgcaactggacgtgctggccagctga

SEQ ID NO: 359150 - DNA, 438 bp, Pseudomonas aeruginosa
atgacccttatccaagtcactcccgagcccatgatccgtgtatctgcgctgggcttcacgctggggcgaaaccccgattcgatgccgaataacatccgccccgacaagagcctttggaatgcgcccgatggtcgcgagctgacctacacccaggccaaggaggaatcgtggcgcatcaacgcgtatctggtctattacctcgtttctggccgctacgtgctcgaccacatccatgccgctgatgaatgccgcccggctgtattccagacgaaggaagaagccttgctctttgttcagcaggagattatcggtcgccggtcaataactcggcagttttgcatcgagggtccaggtgcggactaccacatccccaacacgccccaaggcctcaaggacatgaactacaacctcatgccggcgctcaggaggaccgcctga

SEQ ID NO: 359151 - DNA, 462 bp, Pseudomonas aeruginosa
atgctcaccgtcaaacgtcatgctgcatcgaaggaccggaagccgaccgagtacctactgggcagagacattaaaatgctcagcccagtcatgatttacaaaatcacaagcgagggtttcgcataccaggacgtgcaggaaatggtatccgtttccgtcctcttgtcttcccagaaggtcatgagccgtatcgtagggcgttccgttcgtaccttgcagcgccatggaggcaagaaacaggcaaatctcgatgcgaagcagagcgccgtagcccttcaatacgccaaggtccttgagcatgcgatgagcgtgtttggaacccagcaacttgccgaggaatggcttagccgtccctgcaaactcttggagggtaatatcccgctggaaatgatcgacaacccggttgggtttcaggccgtcgaggactacctgacacggattgagcacggggtgtaccagtga

SEQ ID NO: 359152 - DNA, 246 bp, Pseudomonas aeruginosa
atgcggcgccacctgcttgccgtcgaactcgatagcgacatggacttgaccaccctcgcctcgcgccgtgtgcagatcgaggcgattgccaacaaccgctaccgcgtctcgccgcagctcaggctgtacaagtgcgaaggaagttctttcgttggtcgctaccttcggcgccgcgccccgcaattggcttggtatgcaggcaatgccagtcggcccacgggttacttcacccgcacagacgtgtag

SEQ ID NO: 359153 - DNA, 561 bp, Pseudomonas aeruginosa
atgagcagcatttatcttgaacaacgctacaccgacactctcgctgcaatggcagcacaagccctcatcgagggcgacgaactcccgtcgctccaagagctgatgcagaccatcaaggacaccgtggacgacgaacagcttagcttccctgacttcgagcacttcttcgcgtggtgggacgtgactaccgcctatgaccagatggacgaggaaaccagcgccgagcaccacaagcccgcgctggagattgccttcgctgcgcttgtgcgcgaagggttcttcgtcgtggacttcaagagcacctacgaagcaagggtggcagagctgatccagtccggcaccgtagctcagggagagctgcctgacttcgacgccattaccgcagaaatcaaggtggcggtgctcatcgatcaggatcgattctggagcttcgctgaattcttcgatttctatgagaaggccgttgccgtcgctgccgagaactttaacttgacgctcgaacaccagaagccggccctagaagtcctgtactggtcgcttgtctgcgaagacgctctttaa

SEQ ID NO: 359154 - DNA, 720 bp, Pseudomonas aeruginosa
atggaactgaccgtcaaatacagctacgtcgagcagatcactccgccccgctgccgcaagcccaggccgcagcgctttgatgacggggttgctgttctgtcaatccgcgaagtcacctccgagcaggcgccggttgccattatcgggcgcgagaagaacttcgagacaggcgagtatctggagcccgtcagctatcgcctgttcgatggccgtctctggactgacagcaccgtatcgggttgcacccggcgttgcagcgagcgttacccggccattggcccggagctgaatctggtcaaggacagcgccatgctctcgcatacagggctgggcatctacgtttgcgtccacgatggcaagcagggcatcgccgactatctccagggcctcgcccgtgactggctgatcatcgacggtcagctctaccgccctgccggcgagccaatgtacgtggtgatgaccttcggattgagcggcaatcacggcggcaccgcactactgactgacgatcacctgaatcccaatatccgacgcgaggcttacttctcgctgctggagctggatcaagctatcacgcgcacgctgcttgtcgccggaaagcgcggtgacaccgtgaaggtgagcaccgatcctggcttccagttccaggtactgatccccgctgcaatccagtggaaaaatcctgctgtcggcgccgatgacacagccgaagctgcctga

SEQ ID NO: 359155 - DNA, 639 bp, Pseudomonas aeruginosa
atgatggaaatcaaaccagtgggattcacgataaccactgagcgcgaaggaaagcgccagcagccagggagccacattgtctggtgggatcgcgatacgcacagcattgcggactactttccaggcgcgaatgccccacgccgcgagcgagtcagcgccgccgaagccgtcgcagcccatgttgcgttcttgggcgattgcgagagcaagccgcaggcgatggggctcgacctgacccctgaccaaggctcgctgttcgacgctcaggccgcagcattggaaccggcagccgtgccgccgactgacccggcgctggcgctgaaagagcgtgaggttcaggacgaagatcgggacggcaccagctacgaagcccagtacaaggcggcggtgcgccagatggagcagcagctgagcgacgagtgccccattccggcattcagcaagatgctctccgagtgctgcgtgatgctgtcgaagctgcccctcacgcagtattcgttcgatgccttcatgtccctatgggtggcagagagcggctatggggccgatggggacaccccaccggccagcgcctacgagccaatcgtcaaggtcgcttacagcgtgctgctgtcgggcgggctcatactggcgccgtga

SEQ ID NO: 359156 - DNA, 825 bp, Pseudomonas aeruginosa
atgaccaccacctacgaatttggccagctgctgctgatcgacaaagccccaacgctggcacagcgtgagaacgttatccgcaacaacctcaccgactggcgtttcgagtcgggctacatgcgagttcacaaggtcgctgtcacgtctgcgggcgagttctacgcttgcgtcagctacccgttccgctccaacaccatccaaacctacgtcgcagggactatccagtgccggcgcaaagacgaaggctactggctcaacttcgactgctttctggcgaccgcgagcgttcccttcaccctgactggctgcccgcgtgaaatcttcgacaccggcaatgccatggggatgatgaccaaggtgaacgaggactggtatcaggcctgcatgcagacattggtaatccgcgacaaagagcaggcattgaaaaagggcgccgtattcaagctgcaagcaggagcgccgtcccgagtcctgggaggcgagcgcgctaccttcgccgttgccctgagcaagtccaaggccctgtatatcagccccggctctcgctccacgatccagggcgggatcgacgacctgatggaacactacgacccggtagacgcgagcaccattcccgagttcttggagcagagcagctacaccgaagtgggcgaactgctgttcgacctgagcggtactgcgccagcgctcaaaggccgtctggccaaaggggtcaaggccaagctgttggccaaggtgcgcaaggagcgcgaccgcgcactggcggcttcgtatgaggctgcaaaccttgtgaatccattcaccacgggcgcatggctgtcctaa

SEQ ID NO: 359157 - DNA, 360 bp, Pseudomonas aeruginosa
atgcagaccacacccaccaacgccgccgcaatcgtgacagcccagctccaagcgagccgcgaataccttgaagccatgcgcccgctcgatctgccggtgatgggcaaggggacagtggtttgggggccggcagagcacgacaagagccagttgatcgagtacccgtcgaattggacggggctggccgctcgctaccaggatggaaactccacctactggttcctcggccaatgccaacagacccaggagcgcgagttctactgcctcggcaaagccggctcagttgcagaactgattgcacgggcggaagccgctgtcacccgtggcatcgattactggtcgtcagtgattgcagcctga

SEQ ID NO: 359158 - DNA, 264 bp, Pseudomonas aeruginosa
atgaacacgcaacccgcaattcaacccaagccgtctcagcaacgcttctgggttcaggacaagacccgactctgccgcatcacgatgggcgccgactatgccgatgaagctgtgcgtgatggattccgagaggtcacgctcgacgaacaggaagcctttcgagaagccacccatgcagcgaaggaaaacggttggaagcccggttcgcgcaagcccttcgagagcttcctgccggcgaacctggaacagcctcaagcaggatga

SEQ ID NO: 359159 - DNA, 567 bp, Pseudomonas aeruginosa
atgcaccaactgtccaaattgttccttgccgtcgcattcgctgcgaccgcagccaccgcccacgccgccgaggtcgatcccgaggccctggccgcgaaacgcttcgccatccagaccgaagtcaccaagggcggcaaagtcgtcagcgccagcaccaaggaaatccagaacggcggcaccgcgcacttctccgacgccaagttcaaggaaatcgacgccagcgtaacggtcaactgccgtaccggctggcagcgctgggctcagttctacaagccccgctgcgacgagccggtgcgcgaggtcgagaacgtggccatcggcttcaatgccgaggttggggcgcgagaagccagcgacggcgacgtgctgctctacgtgaagggcaactacgtggatgtgatcagcgaatacaacctggaaggcgtcgaggctgaccttcgtgctgcgtctttccgcgattcctctctgaacagcagcatgatcatcagccccggccaagtcgtcgaaatcaccaacggtatcgaagacgaagaaatccgcctcaagctcaccgtaaccccgatctga

SEQ ID NO: 359160 - DNA, 774 bp, Pseudomonas aeruginosa
atgaacccaaccccctggaacatcgcctatcactcgggcatgagttcccaatccgactttcaggcctgcatcaaaaccggggcaccagcaggcgtagtcgcaggcctgctcaccacacagcagctgttcggggcgattcctcggtttatccgggaaggcggcagcctgttcatcgacagcggcgccttctcagctttccgcaagggcgagccgatgcagtggaagcgtgtgtttcaggtgtatgacttggtgatcagcaccaccgaaggctctccgaaagtcagcatcgttgcacctgacgtggtggccgatcagccggcaacgttcgcgctctggcaagagcaccgcgacctgattcgatcctggatcgatagcggcgtgcgcgtgatcgtgccgctgcaaactggcccgatgcctgccgaccagctgttgcaagccgcaatcgagctgctgggcaccgaccgattctgcgccggaatcccaagcaacgaagcggcaatgtcgccggctgagtgcagcctgctgcgccaccatgacttccacatcctgggccgggtgaagctcaacgacgaggtagctgccaaggtcgcggcgctcaaagccaactccccagatgccaacctgaccgccgacgccaactggctgcgctcccggacaaggaaagcaggccggctgcgtgaggcaatgccaatccagatgttcgagagccggcgcacccaggccgtcactcacctgctgcgcgaggaaggctatgtcatcggagtagaggcgtag

SEQ ID NO: 359161 - DNA, 534 bp, Pseudomonas aeruginosa
atgcagccaaaaagcccttcgcaccagaccatgggggaaatcctcaaagcgattcgattgcagcagaatcgaacgcttcaagatttgacccgtgacctcaagatcgacaccagtggcctttcccgcgtcgagcgaggccttcaaggctttcctcaagacacactggtatctctgcttggctactacgggatagacctgccagcgctgctgatgagtgctgccggccttaccgaggcggacattgaagaagctcgcaggaaatctaaggtccaaaaaccggaaatggcgcccgaggaattatgcgaggccccgaccgacgatggttggctcgatcacaacccggtgctgtccagtcgccaatatgcagggcacacgatgctgctctgtcgcaggtcgttcgagaaccctgagtttgagctgatcttcatgggccgggtgcgccgagggatacagacgatccagggagcaaagaatgctgcccctgaattcgcacgcaaggtgctcaaggatgagtgtcaggccataggggtctga

SEQ ID NO: 359162 - DNA, 846 bp, Pseudomonas aeruginosa
atggaacagctctcgatccgcctcgccaacatcattcagcgtgctttggtgcgagagggcggcaagtctcggacacaaacggcctccctctctcatgaggacgttcgacagctgcgaatccacgggatgtggtacgagggctttgagccatgcgaaatcccaggccgggaagacgctgagttctggagcgtgttctctgttctagaccgggaagctgccgagaaggcggttgctcagttccgagttcccaaggcgccagttgagttcacccttacccccatcgagcagatcgatcaggcccgccagtgggctgagtaccgctgccctgcctgcaatacagcaagcgtggagtggcgcgatggcgacagcgtgccagttccggtgctgcccgaaggaatcgactcctacggactgatcgacaccggcttgatggtcgggcagtgcaagcactgtagccagccggtctatatctacgaattcgggttctcgaccgtcgataacccgcaagacgacatggccttctgcgtgtggaatctgctgtacgagcccgattcgttccaggtattccgagccgaggcagaaggtcacgaaccttggatcgtctcgcgtctcgactaccgcacgggcgccacagctgacggcgataccctactgctgcccaaaggccccttcgtgatcgacttccaccagttcggcccattcaagctggagcactccagcgagcttactggcccgcacggggtcagcaactgcggagcgtccggcgccagcgacaagtgggaagtaggcaaggctctgttccacaaccttgcaggcagcgccatgcgagcgcttaacgaccgctga

SEQ ID NO: 359163 - DNA, 627 bp, Pseudomonas aeruginosa
atgacgcccaaccacctgcaacaagccattgcccgcgccaccgctgccggcgatgaagtaatggtcggccttcttcaacgcgccagccaggactactaccccggcgccgccgaaatcaaccagctcgtcggcaatctttggaactcgggatggggtgccgctgacaagcagatcggcatcatcgaaagcgagtttcacgaaacggcagacgatggcattgccgcccgcgacgtgtacgagcttcgcgatggcgtgggcgacctgatcttcactaccctcggtctggcccaccgcaccggcctgaacgctgccgctgactacgctcaggttgtcgccagccagtacagcaagttcgacccgaccgaagaagacgccctgaaaaccaaggccaagtacgacgcactcggcatggaaacccgctacgagcggcggcaggtgcccggcacggacgattgggtttacgtcaccttctcggccaaggaccagatcgacggcgagggccgcaagtgcggcgccggtaagtggctgaaatcgtatcgcttcgccgaacccgtcttcgatgaacttcctgccgaggttagtgccaagctgaacgttgcaaccgtcgataccgccaaccccgcctaa

SEQ ID NO: 359164 - DNA, 141 bp, Pseudomonas aeruginosa
atgctgagctgggacgaagtagagaaagacgaaaccgaggaagacttcctcgctgcgaagaacgaagacggtgaagcccctgcgccggctgcctgcccgcttaatcccgatgggctcactacatgcgacgcctgccagtaa

SEQ ID NO: 359165 - DNA, 1236 bp, Pseudomonas aeruginosa
atgcttagctgggacgacgccgaagacactaccgaaaccacaactgctgccgaagctgcaccagcagcccagcccgctgctgcacctgttgaggcggaagcgtccgttgctgctgcacgcatggtgtcgagtgctgacagtgaggccgtggcccgcgccaaggaagccctgaacgacctggacattcaggaaggcctggatgatctggaaggcgccgccgcccgtgtgcatgtgggcgacaaaatgatgatcaacgcccgtgccgacctcaaccagctggtgccgttcaagtacgactgggcatggcagaagtacctggacggctgcgcgaaccactggatgccccaggaagtgaacatgaccgccgacattgccctgtggaaagacccgaatgggctgtccgaagacgagcgccgcatcgtcatgcgctcgctgggcttcttctccaccgccgactcgctggtggccaacaacttggtgctggccgtgtaccgcctgatcaccaaccccgagtgccgccagtacatcctgcgtcaggccttcgaggaagccatccacacccacgcataccaatactgcatcgaatctttgggcatggatgagggcgaaatcttcaacatgtacaaggaggttccgagcgtagccaagaaagctgcgtggggcctcaagtacacccgctcaatctctgaccctcagttccaaactggcacagtggaaaacgaccgtcagttcctcaagaacctgatcgcctactactgcgttctggaaggcatgttcttctactgcggcttcacccagattctgtcgatgggtcgccgcaacaagatgaccggcaccgccgagcagttccagtacatcctccgcgacgagtcgatgcacctgaacttcggtatcgacgtgattaacaccatcaagatggagaacccgcacctctgggatgcccagatgcaggaagaagccacccagatgatcctgcaaggcgcacagctcgaaatcgagtacgcccaggacaccatgccgcgaggcgtgctgggtatgaacgccgccacgatggccgactacctcaagttcatcgcgaaccgccgtctggtgcagatcggcctaaaagagcagttccctggcgttgccaacccgttcccgtggatgagcgaaatcatggacttgaagaaggagaagaacttcttcgaaacccgcgtcgtggactaccaaactggcggcgccctgagctgggactga

SEQ ID NO: 359166 - DNA, 192 bp, Pseudomonas aeruginosa
atgaccgaacaggcatacatcgcagtaacgaataccggctatgtcgagggggcttgcctcgtcgatgcggaagatagtcaagcttgggtgggtgaaatggaaagcaccggcatggcgatccagcaactacccatggcagaggccaaggccatgctttatacccaccgtccacaagccatccttgaagcatag

SEQ ID NO: 359167 - DNA, 255 bp, Pseudomonas aeruginosa
atgacccaactggtaagcatcccggcgcatcacttcatcggcaacggagatacccccttcctgatcgtagggcgcgtatggggtgacgacgatgacaccgccaccctcatcatggctgacaacttatccgaggcttacgctctgtttgtcgaggcattgcatgagagcgccggcaataccgaggaagatcggcacgaaatggtcgcggatcacggttccgaccacatcatcaccagttacacgccgctgacctga

SEQ ID NO: 359168 - DNA, 144 bp, Pseudomonas aeruginosa
atgagtagcgcaacgaaggtagttgagtaccacgtcacctacatgatcggcgagcgcgtgagcgaagctgtcatgactcagcgcgagctggatgagtgccgggccagctgcgaaatcatcgaagcccttcccatcggcgcctga

SEQ ID NO: 359169 - DNA, 201 bp, Pseudomonas aeruginosa
atgagccgtgaagcctgccaaattgaagacctcctgcactctgccggctacaagaccgagcgcatcggcggagaggtcaacgtctacgacccggtgtaccagtccgtcgccggcagcaaccagctggtcctgacccactggaagctcaaggaaattcgctcgatcagtcaggcctgggccttcattgaggaacgggcatga

SEQ ID NO: 359170 - DNA, 234 bp, Pseudomonas aeruginosa
atgaacatcgagcaggcaccggcaccaaagcgccgccacagaaccacgatctaccgcacggcacagcgtttggctcggcaggctgagggttgcagcgccggggtctactggacgcaggcccaggtggctgagtggcaccctgatgacttcgaggcccttggcgcccgcctgaccgctgccggcatccaggcaatgaccatccgtggcgagctgtgcttccacgtcgagccctag

SEQ ID NO: 359171 - DNA, 168 bp, Pseudomonas aeruginosa
atgactgagcagactgttatcgcgtggcaagttgagtttgaggacggctcagtcgaactgtggccggcgaaggacattgacggagttcccgcctttggccgctgggtcacaccactggtggctggtggccctaccctcgatcaggcgcccgatgatgaaggcgaataa

SEQ ID NO: 359172 - DNA, 204 bp, Pseudomonas aeruginosa
atgagcccaagtccgaacctagtcgcgttttacttcaccgtcatgctgatggcagtgctgattctctttttcggcttccagtacaagtctgcaatgggcgtagtgatcgggctggctttcctgcccgtcaatgcgttcatgttcatgcgcagcttcgtgctctgcatgcgtgcgtttcttcaagagcctcgtagtaagtcatag

SEQ ID NO: 359173 - DNA, 294 bp, Pseudomonas aeruginosa
atgactgtcgaggcaaaaaacgtcagcacgcgcagtgacaatgaacagcccgtttcggacgacgagattgtcgctgacctgttccggctagcgaggacaggccgctatcacacggctgaacccctcatggaggaagccgggcggatgtatccgtctgagccctccgaacgaatcaaggcctgcttgaagcggctggccgggattctgtgggacaacgaccatggcgggtgcgccaccgagtacaagcgccagcggaccaccaaacgcggcagccagttggccaccgcctactga

SEQ ID NO: 359174 - DNA, 180 bp, Pseudomonas aeruginosa
atgtcctatgaaagctggacgaaagaggtagtgcgcgaactgatcgaccagggcgccgacatgatcgaggcaccccacatcgtcgatgaaaatgacgattggttccgcgagcagttcgacaacggcgcttacgccggcatcaccgccaccgagtggatgacgcaccactacgtcccctga

SEQ ID NO: 359175 - DNA, 348 bp, Pseudomonas aeruginosa
atgcagattgcaaaagacttcctgatcctccggggcatcaaagctgatgggcgggtatcccacgccttggagcgaaagcccctcaaggtggcaacgctgctggatgaggaacagttcaaccgcaatggccacggcctgctgcacaaccgcacggtgttcttagaagaccagatgcacgactgggcatgggagaacgggcgcttccgctacttctcccgcgtcgctggcgaggcagacgcactgatcgtctacgagctgggtgacgtgttcttctgtacccagtgcggaggcaagaaggaatccctggacacccaatgcccgagctgcgggtacgcccctggcgcataa

SEQ ID NO: 359176 - DNA, 138 bp, Pseudomonas aeruginosa
atggccgatcagaacagcacgctccccccagccacccagcaccagggcagcctgcacgaccgctacgaaatctaccgcgccaacgccgagagtttgggctggccggtgaaaaccttcgaagaatggctggatagctga

SEQ ID NO: 359177 - DNA, 267 bp, Pseudomonas aeruginosa
atgagcatcgaccgcgacacattggagaaagtgggcgagtacctgcgcggcacctgcaagaacgttggcgacgctatcaccgccctggaactgggtgatgacgtggacgaaacgaagttggaagacgacctgctggaagtcgaaatcgagctgtgcaagcactgcggttggtggcatgaggtctgcgagctgcaattcaacgaggaacacggcggcgggctctgcgagcaatgctgcaacgagctggacgtggacttctacggctag

SEQ ID NO: 359178 - DNA, 345 bp, Pseudomonas aeruginosa
ttgtttccgtgggaggatgtgcggatttggaaggcgtcagataccaaagggatcgacatttccttgtggttcggcatagagctgtgcggtatggcctacgccacccctcggggtagcaacctgtgcatcaaggtgatcttgctggaaggaaagcccgacaggacacacccactcaagggccttgttgcgccactggtgctgttagccattgagagttatgcgtctctgctgggttgcgtcgaaatcgaaatgcacgacccgtcttcgggggctttgccttggtatcgcaagctaggatttgagtttgatgcgacgaatcgccttgtcatgcccatcgaccaataa

SEQ ID NO: 359179 - DNA, 171 bp, Pseudomonas aeruginosa
atgaagaagcaacagcatgaagccaagcccctaatggttgcccgtttccaagcagaggcgagggcggtgctttccaagcgtagcgaccgtcagagccgtctgctcaagattgccgtgtcctcgggtcgagacatggagccagttggccggatggcaggtgtaagcctgtaa

SEQ ID NO: 359180 - DNA, 135 bp, Pseudomonas aeruginosa
atgttcaagctcatcgccgaactcatcgagcgtcgccggcagcgtcgctactggcggtacatgatcaagctcatggatcagtctggcccggtagtcgtgcagacctaccctgtgcagccgcgccagcagaagtag

SEQ ID NO: 359181 - DNA, 315 bp, Pseudomonas aeruginosa
atggggttcaaggcgcagaacggctacatggcgttcatggcaaaacagctcgaagcggcgatcagcaactgcgggaatccgttcattgaggaatacctggacagcatggattgcagcgtcgaggccgaggtgtcgaacctgcgagccctccaacaaagcgttgcccgcaatcctggcggcgatcaaagccgggcatctgacgtgctgaacaaatggctctacgggtggaaggctgccgacaagtgccttgcctgcatgggtctcaagccctccgctgcgtgggcagagggttactacaaggccggtcgggcgtaa

SEQ ID NO: 359182 - DNA, 1179 bp, Pseudomonas aeruginosa
atgggctgcacagcaatcgtggatggcaagcgagtcattggcgcgttcctgcctgatgtggaatggcggcaggttgtgaagcgctcgaagctgcgggaggtgctgatgcctgacaccaagctgcccgccgtggccaagaccgttcgctggcgcgggggaatcacccggttcttctcccacttcccaggtgaggctcccgagggctatgtctcgcacgaaagccccgagcacgcagcccagaagctggccgtctacgctcgcctcctggaactgggtttcacggttgagctggaagccggcatggatgactggcgagctgatgtgctggtagggccttctgccttcgggcctgcccttgcgatagaggttcagcttacccggcagtcagcccaagccacctacgagcgcactgagcaacgctttgcgtctggggttcccacgctatggcttttcggcaaaaacgcatccacgggccacctaggggctgatctgaccgcatccaaccctgtgttcgtcgccaaggacgcagatcacgcagccgatattgctcaagccgtatgttcgggttcggcgttctacgatgacctgagccagttcgagcagacgccggcacggcctatcggcgtgaaggttgcgtgcaagtgcggggtggactggctgcggcctatcggcgttgtgttgctggccaaccgcatccggggcgacctcaagcccgtgtacgtctcttgctccgtcactggggcgaagaaacaggggcggacactcaccatgtccgaggctgaggattacctgcgacggtacatgcgggtcttcgtgagagccgccaaaacctacgggatagcccttggcgagagcagggtggcaagcaaattccgttctgatgccggtgctctgtaccgccgcgactacgcctgccccaaatgccgtgtgcgggcgtacaccatgggctccattggcgttgccagtcccatccctggtgatgagctggtgcgttgcccgctgccggtagtggcgaatgtggatgcaaggccggtgctgagactggagccagcatggttcattgcgaagcctgccccggcccaagaatcggtaatgagcattgccgagtggaaggtgcgcttcattgatcgggcgcgagcaagcttgctgatgctggcgcccgaggaaggcgtgtactga

SEQ ID NO: 359183 - DNA, 729 bp, Pseudomonas aeruginosa
atgaacaatctcttattgaccagcgcctcccaaagcgaatccgcctgggatcgcgctgagaactacgtgaaagaagaacgcccgatgcgtgcggtgcgcaagatcgtagtcaaaggcgcactcgacgttgtgttcttccgggccagtgagccccgcctcgtcgttgcggtggaggatcagaaagcgcttgcgaacgtcacgacgcgcttcgaaggcgacaagttggtcatagaccagattggttcctctatcagcatgagcggcggcaggatcaccgtgactggcagcggcaatatcgttgctggtgggacgatctacgaaaacggaatcaagaaaagtggttcaggcattgtgagccaggggcgctgcatggtgggcattgctctaccggaagcccccggcttccgcctaaatggtagcggtgacgtgaccctctacgacctacagcaagcagctctggaaattgctttgaagggagccggcgacattactgcgttcggtcacgttgaccacctggacgccgaggttgcaggcgttggcgacgtagatgcgcgaaagctcatcgccaagacagccaatctgttggtttccggggttggtgacgtaaaggcccatgtgagcgaggcggtgaaagcgagagtgtctggatgtggtgacatagttgtccgtgggaatccagcccaacgagagaaatccgtctccggcgttggcaacattaagttcaagtag

SEQ ID NO: 359184 - DNA, 399 bp, Pseudomonas aeruginosa
atgaacgtgatccacaccaccaagagcgcgatctaccgcagctgggaggaatacgacaagaccaccctcatagtcgccattaccgaagatggggcttcgctccatcacatcgacagcaactacacgaatgccgagtccacgttgctccagctgagcgtgccccaggctctggacgtggccgagcgtatccagcgtgtgctgcgcggtgagcccccgaagaaccccatcgaccaaccagcgccacagctattcgtggcacccattaccgatggcgacccctaccgcgaaggcgtcagggtgtcactgagcaatggcaactggatgcgtgacttcaacttcaacatgactaccgagacagcacaggctctcgccaaactgctgcaatcagctcagaagtag

SEQ ID NO: 359185 - DNA, 426 bp, Pseudomonas aeruginosa
atgaccagcaccagcaccgagcccaagtaccacaccctctatggcctcaagtaccgcattgtggctgagtatcccgattccgaagaagggactcgggacgccaatcagtacatggaagcctatcccggcgtaggtgtcctggcggtcgaggatgggaagatcatcctgtcccatgaagacgatccaggcgcagcaacagacgttgatctggtcatcaatcgcatgaaggccaaagccaaggctgaccgttgggggcgcggttcggaatcggtgggtttgacgctcatcatcgtggacgtgagccgtagcggctcctttgcgtggcagattgccgggcagcgcgtgaagctggcgcaggtgcgagccctgctggaggaagcggcggcgaagggcgagcttcccaccgaggcgccgagaaaggactga

SEQ ID NO: 359186 - DNA, 339 bp, Pseudomonas aeruginosa
atgaccgtagcctttaccgccgccaaagtttccgcgctggatgccgtttcctgcctcacccaagaccttaccctgctcgcttctggcgattggctcggcgacgacgatggttgcgaggcgtccctcggtatggtcgagcgcctgaacacttacctaggcgagcacagctttgcccagacgccagagctggaggcggcaaagcaagctgtgaagtgcttgggcgaggactttgctctgctggcttccggggattgggagccggatgacgacagctgcgaggcgtccctgacaatggttgagacgctacgcaccttcatcaacgacactgacaccatctga

SEQ ID NO: 359187 - DNA, 471 bp, Pseudomonas aeruginosa
atgaccagtagcactcccatcgtcactgaactgcattccagctccaacggcttccacgattacgatgtgatcgggcatccgttgcttcgccgggtagctatcccgcacggcatcaaggagggcgagcagttcaacgtctactacggcgaagccagtaaaggcggcgccgtgtggcgtggaggcatcgagaagtccctggaggcgtggcttagcctgcatgccctgacgaacaccctcaaacccaagaacgatgtagcgcagaagctattggccaagctcgcggaggttggccgtaccgttgagccagggtgctttggggggcacttctactgtgtcggagtgccggtcaaagacctgccggacgcattcttgctgggcagccagctgggcgaaagcttcggaggtatgggatgggaacagatcggcccgcaacgctacatcgtgttccgcgacgcacacgtcagccgctga

SEQ ID NO: 359188 - DNA, 468 bp, Pseudomonas aeruginosa
atgaccaacaccaataccgcccatctgggcaaagccgaactggccgcacgcgttgagcaagggcaccgggtcgattgcgcgaagcgcttcactggcgcagctgaatgcacttgcggacatgccgacgcagaggaagcgctggaaagtctcggcggagccggcgcggccacttactcactgttcgatctggttaaggcagctgattcggtctacgtcgaggccatggaagcggtagaggtgggtttcggccacttcgtagacgcgtcagccaaccaggatcaactccggctcagctgctgcgacgacaccgactttcacttcgaagaccagcaggtagcgctcttggctacgggtgaggtgatggctatcgactgcccaatcgatccagaggacagcggcaccacctaccgccttctgctcaccgtgcaacgccccctgaccgtggatgacctcatggccaaggcctga

SEQ ID NO: 359189 - DNA, 1011 bp, Pseudomonas aeruginosa
atgaacgaatctgcctgcgtctccgacctgagcctctacgagctagaccgccatcactggctggttgagcaccatggctctctcataggcttctccagtgagcgcggtaagctcctggctgagcaggttggcggatgcgagagcctgagagcccatcagcggattccaggccacatcaacgccctgtctgtatcgaacgagaatcggctcgcgctgggccagtgcatcaacacctacaagccggttgccgaccttgttacggattacgccgttgatcgagcccgtagctacgttcagagcctgttcggtgtcagcttaggtgaggtgcgagtcatacgggctgaggcacatgtgatgccagcatccgcgcttggatcggtctatagcaatggcaccagggggcacattgtcgtcgtgcctgggcattcgtttgatcctgttggcgtgctggtccgccaattcgctatcgctgctcactacacgctgatgcgtgggaaagtgggcttggctgcaatgatgagtgacgacctcacgcaagccatggtcgggcagtacgccgcgctcagattcgctacggatcacccggagcaatgcacggttatgcgccatatgcagttcctggtcagctgggagttcgcaaaagggctgtccaaaaccccggaaatgcctatgggcttcatcgcctctgacctcggagaggccttgatgaaggcgtatggcactgggatgttccgtgccatcctccaggacctgtatgagagcgcgagccatgggcgtgctatctggttcggtagcagtaatttcacaggtactgcgctggcgcttggctttctcggtgatgaccaggggatgcagcgcttcatggcgatagacgctggcgataggacgcttgctgacaagttgagcgaagcctttcctggcgccgaggaagatcacttccagtggattcaggtccgcttcaacgagactctttcgggcgtcatcgctaagtcgaatgctcaagctgcgtga

SEQ ID NO: 359190 - DNA, 786 bp, Pseudomonas aeruginosa
atgaagacgagcaccgatcagggcgtcatcgcccccatccacccctcccccgcacctgataccccaaagtggggggccgcagatgccctagctgctgctaaagagggctggggattgttcgatacatctgacagcgcgaatgggccatggcaagtacaggcgttcgacgacccagaggcagcaaccgctcagtttggggtcactgtgccgaagcttgacggtgacgacctagcgtggagactggttttccatggcaaggcggcacaccacgcagcagccagggcgttcctggctgctcacaaccctattgagtgggcctctatcgagaaggtcggggtagcactaggggaataccagaggatagcaacaactgaccccaagccatgccggagtggtccccatgccgattccgaagcacagcatcctaaagttgaaaggtctgtccccaagccaccacccatggccgaaacgatcagcaaggcagctgcggcgcttgctcaccccaagggccgggtactgctcacgtcatgcttgggaatcgatctgacggactgcgaccgtgaggtgactttctgcaccctcacagcggacggaaacctttccctagtggagattagcgctggctctgagtgggatatacatctgcttgcctttgctgctctcaagccgagtattgccgtgattgagattgaggcggatgaggtgttgtccatgcacagccggctgaaagagagtcttgcgagcggtatgcccccagctgacgccgtagcgatgctctcccgctag

SEQ ID NO: 359191 - DNA, 861 bp, Pseudomonas aeruginosa
atgctgggctaccgtgtgctcctggttgaggacagtaagaccgacgcctaccttgcctcgaagtacatggccgaggttggggtggaggtattgcacattaccagtgcggtagaagtcctcgatgctattgatgccttccagcctgacctgataattagcgatcttcacctgccagagtgcgaaggtgatcagatggctcggataatccgccaggaccgagaggctactatgccgatcatcttcctatcagccgaaggcaacagcgagaagcagctgatcgctattgctgcgggtgcagacgggtttatccgaaagccgctccacaaagagcccttcatcaaggtgctcaagtctacgatcaggcgctctgtcgcactgcaaaatcgcatgcgccgcgatcctctcactaacctactgaaccgctcgcagttcgattccataatgcggcgcctgtcagagcgtggagaggtatgcgccctggcggtccttgatattgaccacttcaagaaagtaaatgacacccatggccaccctgtcggcgaccaagttatttgccatctggcgaaagtcctagaggatggcgttcgaagcactgactatgttggacgcatgggcggtgaagaattcgcccttctcatgccggcctgtgatttagctaatgccgaagtcgtgctcaaccggctgagagagagattcgcggtggtggcaatgtcgggggagggtggggctgagttctgttgtacgttcagcggagggatgacaacgcttggaatggatgcgagtgctgcgtacaagaaagccgatcaggccctatacgattctaaaaaggcggggcggaaccgagtgacagttcgcccctaa

SEQ ID NO: 359192 - DNA, 1263 bp, Pseudomonas aeruginosa
atgggactgcataatctgaaagatgctggtggcctgatcccaaactgggtcacggcctgcttgctgaacgctgcgtttctggccatgtttgtcgtagcccagtatcggtacgactccaagccgagtgcatttgtggcgagcgcctgcaccatggcgattttgctgtctctggtcttgggacttgccctgctgatccgggagattgtgctggccagaacgggcgaagttgcgaacgcagtcagtaaaggcatgatggccgggctcaatctgagctgggccatcacctgtctttccttcatttgcttcgtagcctggaagccggtcagctcgtatgtggtttcgaacccgaccatcgttgccagtggcgcggtggctttggcaatcgtagccatagggtacttctttgcagccccagccaatcgctcgaatggtgaagatgcaaaggagggccactccctggtcgctgttccaggcattaagccttcggtgccacagcaacccgcattccaagtgacgattgccgacctaacccgcctcctgactcatcaggcgggtcgcgcaatcggctacgcgggttcgaatgtactgttcgatgacgctttcagcttggagctggacgccaacgaacgtgttgcccgcgtgtacagcaatacgaacctcgtcaataccgaggacttcctctactggcgcctgcatatgctgatgatgggctctgcggcagagaaggtacttactggtaaatcgagtcaggccgcgctagatgacctaacgtctttcgaccaccttgcaagcaactatctgaccttacgacctgatcgaaccttcaatgcagcccccatcaacgtgcatgaagcccagatcaaggcctcacgcatcgcaatgctcaggaagaatgtcttcgaccgctgctatgctgcctgcgtggagaatcgcaaggtactggccgatctggtgaaaatgatgcgcacccgcagcgtgctcacctacggtgatattcgtcagcaccttgagcgagtgaccatgccagaagggtttccggtagcacggtttgacgacgatgaggtgctactgaaagcgttgctcactcatgacgaccacccggaggtaactcttgagggtgccgcagtcgtcgcgagcgatgcggctgaccaggacctcgactctaccctgtcgagctttccccacgctcaggcacataccaccgagcgccagcccgccgacgcggcgaacgaagaaccgcaagctacctgcatgactgcttaa

SEQ ID NO: 359193 - DNA, 645 bp, Pseudomonas aeruginosa
atggctgagaagtcgaatcaaccgaatatcaccctgccgcagcgcaccatcactatcactggtgagtacagcgctcgtatgtgtcagaacaccgtccgcgtctctcgaatcgagcagcgcgcaatccagatcgccatggcgccacctgcaatccgcgatgcaggccgacgcgccatggaccgattcgcacaggcaaccgctcagttcgaatccgagctggcacagatcgagcgagaactggaggcctccagccgtggcggcaatcgtcgcagcaatggtgctcaagcgcgtggcaatgagcagcgccaaaaccagggccgtgacaatgctgcggcttcggcttccaccccggccaaggcagcggcaaagcccacagctaagcctgcggcttccaccaaagacgcatctaaaaacggggcctcgaaaggtgagcaggccaagccagtgaaacccagcgctacgccccccactggtcaggttgaagcagcttcgaaagcgcaaccctcggcgactcagaacgacgctgagcctgccaaagtgcaggatgccgtactcgcgcagggtcaggctgttgaagctaaaccagtggctgaaacagccactgctgccgaaggcgccactccggccaatctcgaagccctctaa

SEQ ID NO: 359194 - DNA, 306 bp, Pseudomonas aeruginosa
atgcctgaaagcgcaccagctcaacgaggcccattccgccaaatcgttcacttggtcctcattgttctactgatcctctacgcagcgaaggtttacctccgcgacccgaactacaggcatgtggaggtttgctacatgccttacaaagtcgcccaccttgtgtgggtagacgtatggggtgctgtggtcactgatgacacagcgtccctactcaaacacagccgcgacttgacccacttcttcaaggtctgcaccgatgaagtgagcacctggacgttgctgcggagccacggaaccaacccataa

SEQ ID NO: 359195 - DNA, 1368 bp, Pseudomonas aeruginosa
atgaacgatttctcccctgcggagttcctacgccgcgaggtattcccccgcctcgatgcagtgcaagcgaacctgctcgatggctttgatcccaaacagcgcactggcagtggctcctacccactgacgtgcccagcctgcaaagccaaagaggccttctacttcccgttcagtggattcatcaactgcccacgtaaaaaggagtgcggcaaatcgaccagcatctgggacgcgatgcttctcagcggctacgaccatggcgagattttttctactctctgcgaggcggccagggtcgagcctcctaagcgggatcagtccggcgctcaagctaaacgggaaggcgctgctgagattcgaattggcaaagccatctggcagatcacccagaagatggccagtgagaacgccgccgcactcaaggcattccaggaagcaagacgctatacccctgagcatatggcagccatgcggcttggctactacacgacacctcaagaaattcttacgcgccttactgcattgggcttcaccaaagaagacgctttagcttgtggctacgttgaggccgatgaatcgggagccctgctaactgggttatccggcagagtagtcggctactggccgcaccctgatggcgaggaccggctctggggccgtatccctgttggctctgggggcaaacaggtcaagaagtacaagttctccgtctcgctcaagaaggacattccatacctgttcaaccagcgaaagcccggtgtgcttgtctgcgtggaaggcacgatggatgcgtgggcactacagcattccgagatatggggctgtgccgtgggcggtgcctctatcaacggcgcccaagccctgtacctccagaacaggggcatcaccgaggtagctcacatggttgatggtgatcaggccggctggaacggggccatcacctccattcgtaattgtgagtcactggggattgtgttgagcatcatccctctgggtgcaggcatggatgacgcagatgcactgctcagctcgggccagtctggaatgcttcacacactggttgcgaaacgaatgaacgcagggcaatacctcgcgttgatgctccgctcgctctacaacgtcgctgcgccggatgttcaggccgtcaaccgcatacatacggtagccgagtgcctaacacctacctcccgaatcatgttcgacaagcacgccaccctacttggcgtgcgggttgatttgcgccttgaagcgggtcggctttttggacaattgcttcgagccggaatgggcttggacgaagccatttccaatgtccgccgcagaacaggccacgtcatatccatagacaaggaagaaccgaatgcctga

SEQ ID NO: 359196 - DNA, 780 bp, Pseudomonas aeruginosa
gtggaacaccgcacaacatggttggcagagcttactgagcaggagctacggggacttaacccgtgggtgatcctgacctctgacaaagcacgcggcttcctaatcatgtcggccagggatgcccttggccgataccggaagttcggcctagcgcagatgagcaacgatgagctgctgcatgaaatctacccgatgctgcatgacgcgctccccggcatccttgccaactgcgcatcgtcggtcgagccagagaaccgtgatcgatttatctacgggagccttcgtcgcctgatccgctgccgacttgctgagcaggttttcgggcaggtaagccctggcgacctcatctatatagaggaagtctcccgcacccccgatgacgctgacgactcctacctcccagcggcgcattcgttgatgcttccttacatagctgacgtgaacagctatctggaggctcaagcaaattatcagccccagttcctctccgaatcccagttcgtaccagaggaacatgtccaaatggtccaccttctgatcgagcggtttcgccactacctgaccaacagggaggtagacgtgctgcggaacctgcttttgaactaccaggatcgctcaatggttgctttggaggtcggcaccaccccaaagatggtttcgcgctacaggcagagcattcagaagaagatgaaggctgtgctcaaccaactcggctggtctaccgccgaggtgcaggctttgctcggtaagcagtgccccagtgaagaaacagcggtctga

SEQ ID NO: 359197 - DNA, 312 bp, Pseudomonas aeruginosa
atgaatacgaacaacgcgcacccgtcacccaaggagattctggaggcgtttcacgcgaaggtcgctgggcgcctgcacgcgttcattaaagagacgcatcaaggacggccagcagtgagctgtctctggaatgagactcccaacaacactctcaaggacgttgttttcgtgggcgaggatgggttcgatgccttggctgtcgttcgggctaccaacaaaagcatgaaggccagcgagcacgtcgttggaatgctcgttgagatgtatacagcgcagcacaagcgtgaggtgggtgtggaggttgagttctag

SEQ ID NO: 359198 - DNA, 1008 bp, Pseudomonas aeruginosa
atgacccgtgaaatcaatccgaacaagtacgagaaagctgagtatctggctcagttagatgcggccaggactcggctgctggctacacggacgctaatccttgactgggtgaatcgtctggatgagcacgcagcggcagccttcatcaaaatcgaacccttggtttctctgttcccacgcaagctgccagaaggtagctatcgaatcgtcttcgagattcatacaactcccaagcgatacggcgcgcttggagtatcactgcgcaccgacacaatgaggacggacctatcaaaggtcggcccatctggagtcgcaaaggttcttggctcgcattgcggttcagttgaggccaaaagccatgctctagcgtttcaggcgttcgatcagttcaacgaaagagtcgcgtcactccggccttttggtgtcgagctggagtcgttgcctgttggcgggcctgtactccctcgttggtttgaagctctgcatgcttatggattgaaatgccgcccagtccttgcggcagcattcgaccgattccttgagctgtctcgccaactggacgaggcaatgttcgagttcaactcgaccatgggtccggttcgctatagatcgattcgttgtacttacaccattgatgatttcgacctgctgggtcccgcgagcccatccctcaaggtggtcacaagcatcaaccctcatacgcgccgacgccgttacaaccagatggttgatttcaagaaggcgttgaagaaaaagcgaatcggtcagaagctgcggcgcgagctggggcgtgagcctgacaagctggaggttcagcaagcaataaaggctctcagaccaaggcaggaaactgcctggatcactaaggatgtgatcaaggcttgctacctcggcaggtcgatcaacgatgtatttgaagctcaagaaaaactggtagccgttatgcagtcctggaccgctttgcgggcgcagttgcaagcactacttcctatgaaggggaaaccatga

SEQ ID NO: 359199 - DNA, 1050 bp, Pseudomonas aeruginosa
atgaccaacactacgaacgaacaatccctgattgccattgatctggggaacgggaccacctcctacatcgccggaaacggcaagcaagggagcttcccctcgctcgtcacaccttataaagacaccagcgggcttggattgggcttcgcgaaggaaggctttactaccaaagatggcaaaagctttcttgtcggcgagagctgccgcgatgagggagccccttctcgcagcacagattcgtcgttctactcatccagcacgatccacattcttctgctcaaggtcctccatgaatgtgacatcaagaatccagtgatcgtgaccgggctccccaccgagttctatgaaaaggaggttcagaagttcgaggaaaacatccgtcgctgggcaaaaggtgaagggttccaggtgaaagctgtaaaggttgtgccccagtgggcaggcccatggtttgatgatcagctggagaacgagagcggcgagcgcattcctctcgatctagtcctcaagggtaagtggggcattatcgacattgggcaagggaccaccgatgttggccagttcaacaatgggcgcgtctcggacaagcgccatggtgaatcgaagggtgtatcggatattcacaaggcgatattcacgaccttgaaaaccaagccagagtccctggtcgctgagggtaaaaagactgccttgatccccaaggaattcacgctggacaagcagaccacggaatacaccattgaccagtggattcgtgatggttacatcccgtggcggggacagaagctggacatgaaaggaatcagctctccagctaggaacgagtttgccaaagacgttctgccgcgctgcattgagaaagtatggggctcaactgatttcctcgcaggcatgatcttggccggaggtggagcaagcgtgctcggcctggatgtgttcaagcaacacatccactgcccgatctatcaggcgaaaacacctgagctgagcatcgtgcgtggcttttaccgttacgccaaaactcaaatcctgccgatgattgaccaatga

SEQ ID NO: 359200 - DNA, 546 bp, Pseudomonas aeruginosa
atgaaagatgtagttcagatcaaagccgagctgttcgaagggcagcacgacgcgctgatagcgttctacgaaacctatcctaggcttttcgtgaacaagctgctgttgcgcttgtgcgaggccttcatgcctacctacaaacccaatctctcgttttttcgtccccatccggctacgccgggcgcgaagtcccgaaagattgcgatcagggtcgataaggacctttgtccaatgttttggcagttctacaaagagctgccgtatgggtcccgagtgctagtcgccatcaacctcatgaaccactacgtccaaatggttgaaggcgataggcagatgcttgagcaagtttactggaaggggacgatggaagaactaccagccgttgcttccgttcaggaggctcaacgtgaagctcagccgcttgagcccttagcagaagggaatctacaagcagtaccacctgacaactcgtcctcggatgatgacgctgctctcgcgccttccccgaccatcgaccctttatcagcagtccatgtcgggctttga

SEQ ID NO: 359201 - DNA, 906 bp, Pseudomonas aeruginosa
atgaccaaggcaaaattctttatttcccttctagctttcctgaccttgaccgcttgcgaccaagctcaatcgccccctctggctgacggcgccaaggtttcttaccaaccgtctaaggcgaccgtcctgcctatgaccttccctgctggcagtaagacgttctatattgatccgggcttgcgtagttctcttaccaaacccgcagaatataatcatggtgatgaatgggtggtctacatggccgctcccggctggactaacggaggcacggatatagttgatcgtcttgcaatggatgctgttgcaatcgaccgagttcggcaattcgttcttcggaatcatctacatgataaggtcaaggttgcttggctacagtatgaccctaaccctagtggttcgttctacggcccttctggtgtagaggataaagactttattcctttattcctcaagcctcacggccctaatgttgactactatatttactcgcccgtgtctcgcggaagctctgcacccggaagcatagcctatgatgcttggcttaaaccgtaccttccctttgctaaaaaaattaacggcgagtatgttgctgcttctgaatttcaaaaggcgcaaggttttaatgaaaacactggcccttattgggatagttggtcaaggcactggtttatagtcaacgactctggcctagtcgttgatgcctatttttctaatttaggccatgtgaagactaagggagcggagtttgcaattgggagcttggttcatcacctatccctagacaaggacaacctcaaactattgccttttacgtcccttgattacacgtctacttacacaccgccatactgggaaaagatttcacaagaagttttcgatcagctaggtctaggcggtgggaaatga

SEQ ID NO: 359202 - DNA, 426 bp, Pseudomonas aeruginosa
atgctgcttacgattttttaccacaaaggctgcattaagagtcgtttcttacgatctgcacttcgaatgatggattgggaactcagagaagctgatgctgccgaccccaaatatcagtcagaactgatccagttgaagtcgagtgctggcgcgggaacaactccgatcataccggcaatctacaccaccgaggcctacagccatgagctgtacccgatgatcgagtacctgaacgagcgcagcccggacggcatgtatccagccgatctacccacaaggctctttgcaagaacgctgatccatcgtgtgctcagaaacctcagcgctttgtggccggcgtatcaagaaacctcggaccccaagccactgctggcctactacgatgaaattgcggatttcggtgaacgtgaccgagcgtttcgctaa

SEQ ID NO: 359203 - DNA, 1086 bp, Pseudomonas aeruginosa
atgctctatagcgcaaggcaaggccagaaacgcggccttcaaagggggctcatagggctcgccaccacaacgctctacgccattttcagtcatgccgcctttgcaaccggcatccttcctgatgaccctcgcctgaaaccagcgaatgtgttgaccgttgataacggcggattcacccaggtcttcatcgacggatacatccacaatccaaccgttgatacgttccggcgctctgtaatgcctagaggccaggagttcgggatcgtttacttgaactctgctggcggcgaccttgtagcagcgcaagcactcggtcgtgcaattcgagctaagggatatgcgacgcaaattggccggcttagttctgacggccaaaccatacgaactggtgtttgtgaaagtgcatgtcccatcgcctttgttggcggcaaattcaggttacttgactcaggtacaggcaagttagcggtacaccgcttttatctagccaatcaaggtaaatgggcttctgacagcaagctcctgttcacagccgagcgagacttgagcagatacattgatgaaatggggatcagtagagagttctttgatctgattatgagaaccccagcagacaggttgatccaaataggaaagcccgcaatctatgactgggcactggcttctgggacctcaaaaacaacctggaaaacggttagcaaaggcacgcttttaggcaggacagaaagctctactggcacgctgtctatcagcttttcgtgcgagcagggcctgctcaacatggaggtgcaggccaatccctggtttcccggaatagcccttctcaactacgaccagcacagcctttcggtcgatgggacgaaattctccatagatgaggttcaggtaagtcaggacgaactgacaggcaatctttcgttcaggtctgtgccaagcagtctggcagtttctgcattacatggagcaaagcaggtcggatacagctggagtttcgagcgtagtcccggtgaatacagtcgagtcctcgaattaccagagagcaacgcacagctcaacgaaattgtatcaagctgcacgacgccttga

SEQ ID NO: 359204 - DNA, 456 bp, Pseudomonas aeruginosa
atggttggcatcctcggttttttgttcatcgttttggtcgttgcgcctgtactaggcacccttttttacaaggcttacagcggggcgaagtctctgactgctgaccccgagccgcttccttatgaggcccagcctgctggccgcattcacctgtttcacggggatcgctacttcgatagcagtccagacaacccttatgagcacagttcgctgaactgggccgaagggcgcattggatgtgctctcgccgttgagcttgccgaacagcctcagtaccaacctgcactcattggcacgatccaagtgctcaagccggaacaagacaaggggatcgtcgccgttatcctggataacgaaaaggtcgccgctttgggcttgcccccggcagggctggtgagcggcgctcggatgatcgcggatcggcttgtcccgcctcagactctccacaaccattag

SEQ ID NO: 359205 - DNA, 297 bp, Pseudomonas aeruginosa
atggctgtagaagtcctttaccgcagtagccgcgacccggagtgtttgatgactaacaaagccgacgcagaggcccatgaccgcatgctggaagtcggcgagaacctagccgctgtcttccgacatgtcctgccctcgatgagtgaggaaaatgccgaaaccctcggcatcttcctttccaagcgacgcaccgagctggtagcggcaatcaagaaagacccggctgcaattctcgacctcatcaagtccgacgagggcacaggcgggaccgttgtaccactcgcgaacgcaagctga

SEQ ID NO: 359206 - DNA, 615 bp, Pseudomonas aeruginosa
atgagccttcaacacaccatgaccacccgcagcgacaagctttttaacgccgctttcgccctggcaatcaaaggcgaacatcgcgaaagcgatgaaatgctggagctggcgcatgaaatgcgagagctggagttgcagctggcgtatatcgcccagcatgcgcctgccagcttggccgtccttctggtcaaggaagctctgaccagcttcgaggacgactctgacaatgagcagtacgtcgagcagaaccaagacacgcttaaattctacgccgacttcgatgatcaactgcgccagttggttgatgcggcattgaacccacccagctatagccgtaccaccctccagctcagccccggtgaacttgaatcggcgagggaagaactggcacgccgcgtcgagcgcgatccaggccgtcgagctgtaaccgatccggttatcacgccggcagcgattgccatcgcttgccgtgggttcacccagttcctgactggggggcgctgctctgttctacgccaatgtcctgagtgccagcagaagtacagcaccaaggtacacgcgaaaaatcgcatctactggcattgcccgcattgcaacacgatcaaggaggcctaa

SEQ ID NO: 359207 - DNA, 537 bp, Pseudomonas aeruginosa
atggcccttccacggtcgaaagcacaggttgagcgtcaaatcgcagaggacgagagctaccgggatgaccttgagtacatccaggaaacgctcgaacagaacaaggtgttcattggtcaactgacctctgagcagtctggaaataccgaggctaccttctgggtgacagtgggaatgtttcagcgagggttgcccgaactcgtcttgtcaggagtccccgcgccgctgatcaagggtatcgttgaggaactttatgagggccacgactttgatcgcgagttcctggccgggggacggactaaggtcattcacgacctgaccgtgatcgcacttcctgttagccagcctgactcgcacgatgttctttcgatctgtcatgacatgtacgcgctgatcgagcagccgcaccttcaagtcgtgcagttggtcttcgcagatgagcagggggctttcccctggagttcgaattactccgcgagtgagcgtcagttccagccggtgcttggggctccagtgggcgcgatgacagcaaattga

SEQ ID NO: 359208 - DNA, 270 bp, Pseudomonas aeruginosa
atgcgcattgctcgatataccatccatacagtcaacgacctccatgtcatcattaccgacgacttggatgaagacatgccgagcgtaaccaacagtgctgccggagtgatcgaagacctcaacggcaagcttggtgggctgggtcgccgtcgcgtcttctatcgggactcagtgaaccgtttcgacgagcttcgccatgagaatggaaccttcactggctttgctcccgccagcccaagccagcaggaagcctttcgcgaccttatctag

SEQ ID NO: 359209 - DNA, 522 bp, Pseudomonas aeruginosa
atgtccgttcaagacggcaagaaagatcgcgtcgttttccgcgtcagccccagtttctacgccgcaattacgcagcaggcgaatgaagcaaacaggagcgtgaatggtgaaatctgtacagccgtagattcctggctctacgagcgcgacacgatggttttcatgaaggatcgactgatggcatcggctagcgtcgagtcaatcaacgtgatccgtaaggctacgccttcctacctgactgtcgctgatgaggaaggtgacacctgcaagacgaccgtgcggttcaaggagtctgtagaggctgacctccgggccgcttgggaagtccacaagcgccaaatcggccatgtatctctcaactcattcctcaagctggtcgtgtcatggtggctcatgtacagctaccagatgagggagtgcgcaaaggctctgcaccgtgactttaacaacagcatgatgccgccaagccgttccacggcagccatccagccccctgtttatggcaaccttgcgcttgcctga

SEQ ID NO: 359210 - DNA, 315 bp, Pseudomonas aeruginosa
atggaacagcgacttgcccgcgtggcgatccccgatgatctgtcattttccgatctgcaactgacccgcgagcctgacggcagcgtcagcttcaactggtgggtggtcgagcgcatctgcgccgccagcggcctaccagtcgagattttgcgcgatggcccggaggacaatgtttgtgggctgatcgttggctggtatcagttacaccgtcagcatggcggcgaagccgatccggtagccgaggatttggagtctgagagggtcgccgaggatgcagccggacagtacgccagccacgcgccggggcgagcatga

SEQ ID NO: 359211 - DNA, 228 bp, Pseudomonas aeruginosa
atggaactgaagatcaattctcgcaagctgggccgcaccatcactttctcgcgccctggctccagctacatctacgccgacctcaatggtaagtcgggcaccttgggctgccagatttgcagcggtggcggcaccatgggctccacgctttcctatgacggcgacgaccaagcgcagtttgaggccatctgccgccgctggtatcgcgcacacgttcgcggtgagtga

SEQ ID NO: 359212 - DNA, 387 bp, Pseudomonas aeruginosa
atgtctcaatattcgatacccgtaagcattaccaacctgatgcacagctggccagaggaacagtgggacgaactgacgccagcctgggcgaccgttcttactgatcccgagtcagcagcaaaaatcaaagccgcctatagcgccagctgtatcgatggctttgccgggatcgcggccccgctggataacgaagacttcaaaatcaccttcacatccggcgaaggcgaggcagtcctcgtcaaagcgcagttcttcactgctgtggttacgagcctgagcattcgaattgagctgttcgataccaacatgattctcaaagccgggagcaattcaaaaaggacggctgggtacatccggctggagtgctccctggctggtttgatctaa

SEQ ID NO: 359213 - DNA, 261 bp, Pseudomonas aeruginosa
atgaaagcgacaactgtctcgcgagcggctgacaagttcgtagttcgcatgcccgatggcatgagggagcgattccacgactattccaacgttaagcatgtgtcgatgaacactgcaattgttcaggggctcgacagctttcttgatgggcacgctgagcttcaaactctactggacggcgtgcgccttctaaagcaacaactcgcagagcaacttcgggccttggaacaggccagccacaactccgaagtcggcgactga

SEQ ID NO: 359214 - DNA, 1119 bp, Pseudomonas aeruginosa
atgaacgctaaagccagcctcctggatcgcttcgacgacaccgtgatcattcctgccctcggccagcagatgagcttgctgggcttcgagccagagccaacgcgacttgctgcgggcacttatttcgacgcgcccaacatcgacctggacagctacgacaacatcatcgtctgcatgtcaggtaaggactcgattgcatgcttgcttgccctgattgatcagggggccgacatgagcagggtcgaaatctggcaccacgcagtggatggcagggagggcagcaccctgatggactgggctttcaatgacagcttcatcgagaggcttgccgaagccttcggcctgcctgtgtatttctcttggctcaagggcgggatcgagggcgaaatgctcaaggagaactcctactcccaaccgcacatcatcgaaaccccaagcggggtgttcgagctggagagggacaccaagcgcacacagccggcgacgcggcgacaattccctcagcagagcgcaaatcttgccacgcgctggtgcagttcggcagccaagatcgacgtaggccggcgagccatcaccaaccaggatcgctttctcgggaagaagacccttttcgttaccggggagcgccgtgcggaaagctcaaatcgagcccgctactaccaactcgaaccgcatgctgtagaccggaggcttggacgcctggggcgtcacgttgatgcgtggcgccctgtcctccactacaccgaggaaatggtttgggagctgatcgcgaagcaccgcgtggtcgcgccagttccttaccgccttggctggagccgcagttcttgtatgacgtgcgtgttcaatagcccggtgatctgggcaacgctccgccgctacttccctcagcgcctgcgccctatcgccagctacgagaacgaattcgatagcaccatcagccggcagcgaatcaacgtactggacctttcggctacggcagaggcattcgaaatcacagacctggaagccctggcccaggcagagcagcgcgaatacacgctgccgatatttacccctgcgggccaggaatggcagctgcccgctggtgcctttggcaaagaaggttgcgggtcgctctga

SEQ ID NO: 359215 - DNA, 411 bp, Pseudomonas aeruginosa
atgtcgaacaacaaccccgagtcgcttgaactcaaagctggagctgtcttcgagtatggctccagaacatatcgccttgacgccttcctttgcgaagtcgaagacaagacacctgcacaccccttcatcgcccagctcgtagccgaactgaacgccgaagaagactcaaaactccctgctggccacagacggatcaagctacgtttttgcatgccagaagaagccacctatgtcgctggcagcggcgtatgtggctgcgtggcagaaatcgccgacataacgattgtcggcactgtgccatggagcagccgcgaactgattgagcaccatgaggaagcgctaagccttggccgcgaggggcgtcgctgcgatccaatcgttcgaccaatccgccaggaggcatgcgcctga

SEQ ID NO: 359216 - DNA, 462 bp, Pseudomonas aeruginosa
atggaatgccaaatcttcactgaacgtttgcgcgcacttgccgggctgcatcatgggttccggcaatgcccgagcctggacagtttccagataatggggcgccttggccttgttctggcggctcgccgggcgcaggccgcagtgttggggatggcgatggtggtcgttggtgtatacggcatggggaagctcgtagagccatcccagctgagcatgctcggcatcgcacttggctatgccctggtgatgctcattgtccttcgccgattcccatactggtcgcccaggaagcccctatccgaaggcctgatggctctgagcgaatgtaggctcaacgacccggccaacttcttgtctggcatccgcagtgatctgcatgcagtgaacaatgcgatgctgagcgagctttgtatgctgctggcactggatcggcgccgttcaaatgctggtagcaaccaatga

SEQ ID NO: 359217 - DNA, 438 bp, Pseudomonas aeruginosa
atgaagccaagtgatttccttgccgtgctcgttatcgttcttgcaatggcgttcggagcaatcgtgttctgcatcagttgggtcgctaaccagctcgggttgccgttctgggccgtagtcgatgaagcccggctcctactgtcggccccagtagcgctggtcatggtgatggtgatcgaagccacagggatgccattcccattgcgcgtttcgaacacttggccgctcatcgctgctctgttctgggcaggactacataagctgatcaagatgaaggctgaacagactgctctggatcagttcggcggcagctctacagcctatgcgtaccatgtcgaactgccctggttcacggagctgtggttcatgctcgcggtctgcgcattgattgtggtgggcggctacgcgctcacagcgaagctcagcagcaaatactag

SEQ ID NO: 359218 - DNA, 666 bp, Pseudomonas aeruginosa
atgaacatgctcaaactcgccggcacgcttgccatcctcctgtccatcagcggctgcgcaagtaatccccaaaccggcaacttcgaaatcactcggacgggtgtcggcctgaccgtgggcgcggttggcggggctctgctaggcgccgcgctcggcgatagctcgatggcgatcaaaggcgccgtactcggcgctgccgctggtggtggcgctggatacctctgggagaagcgctacagagcgatgcaggcagagcttgcctacaccgatctacaggtgcagcaggctcctgccgacaacggtcagcaatcgctggtagtgacagttccgtctgacgttctctttcgtatcggctcgtctgacattgccccggaagcatatccggcactaagcaaactggcggagtcgttgaaggcccagacctacaaggtgggtattgcggggcataccgacaacactggcacgcccgaccgcaacaaccgcctcagctatgaccgcgctcgttccgttgccgcgtacctcaccgctgtcggcgtcccctatgaccgcttgtttgtccgtggtgcaggcgcaagcgagccgaaaagcagcaatgcgactccgcagggccgctctctgaaccggcgtgtggagattacgctgagtgaaattgcacccaacgcataa

SEQ ID NO: 359219 - DNA, 306 bp, Pseudomonas aeruginosa
atgtccaagaacatcattcgaacttccgcgcaagaaatggagctgcgtgccattgcagcggcaaagcaggtccttggccgcgaaatcatcatccagtcggacgccgatttcactccgcccggcaagcgcaaagtgcgcgttgttcgccatcaactgaatggtcggcgtgccgaggcgcacctccgctggtacgtgggcggcaaggcataccgttccctgcccttgaccaatagcaatgtcgcgctgagcaattcctggaagggatcggctgcatgcgtgggcaaaagtcagctggagctgttgtag

SEQ ID NO: 359220 - DNA, 1038 bp, Pseudomonas aeruginosa
atggcacctgaacgcctgcccttctggctgccaatcgtggcagtgaccctcagcaatgagcgcattgcagggctgctagggaattcaacggccaggagggttgccgttctcagaacccggtatgggcttccaaccttcccgcacccgttgaacggccccatggacgttgattggccatgcttgctgggccaagtcgaggatggcctgctggctgaactgatcagtcggttctacgccatcaccattaccccagagctgatagcgttgattcgtgctgaccgaggcttgtcgccttacggctcgcgcaaacccaagctggagcctcatgtccgtgagcttgtcggaaagtacggttcagccaacatcgccaagggctgggacgtagatgccaatgcggttgaggcgtaccgcaaactcgccaaggtcgaacttcaagtcacgggaaatgatgatcttccggcgagcgggcgctggaaggcagagtggatttcgctatttcctcagcacaccaatgctcagatcgctcgggcaacaggaattcccatcgacgcggttcggcagaagcgaaagtcactacgaattgcaggcccggcaggtcgcacgtactggaaactggtgagcgcggatgagctaaatgcaatgaccgatgccgagctggcctcgcagtatggtggccctactgctgactacgccgcccagcgcctttctttggccctccaggacagcgaactcagcaaacgattgcttcgtgagcgccggctaccggatgagctggcgcattacctcagctcgttgccagcccgaaggttggcaaggctgacagggctcagcgaattccacctaggaaaacaacgtagagagcttggtcttgaggcctatgcctcacttcccagcgagctagatgaccttctttctacgcgcccagacacggagctggcagacatgtttcacgtcgcagtagcaacggtgagaagccgcaggaaggtgttgggaaaacccccgttcagacaccccaagagactcacagaacagagttga

SEQ ID NO: 359221 - DNA, 336 bp, Pseudomonas aeruginosa
atgctgcccagtcacctactgcgcatggtcaatctgtgcgtctccggggattacgccgatgccggcgtgcgcgaccggatcaagaaccagtgcatcccacacctccgccagcaccgccgtgacgtgctggcgggcagcttcaatggtcggcactcccgaccagtggggttcatcagcaagatgatcgaggactccaagctcattcgccgcacgctgactcacacccatcggcaactgatagcggtggagcctcgcgacaacgttgtttcattcgaggccgcagctcgccgccgcgcccaggcctcggtcaacgcagacaaggagaacatggcatga

SEQ ID NO: 359222 - DNA, 813 bp, Pseudomonas aeruginosa
atgaaagacttcctgaaaagcgtcaccaaccactccacgatgctggccgtgttcagcttcgaccgcacccctttcctggccggcaatgcctggacccggagtcttctctctggcgccatcagcaccgccatcaccgctattggggtctacagcggttatgtcgccatggatgcgaactacgccgcagccctcggctcgcatgcacagaacttcaagctggccactggcgcgatcatcatcggcctgctcggttactccctgcgcgacctgttccgctccatcacgatggacgtgaagacccagatgcgtgttgctcgggcaaacagctggctcatgaagggcaccgcaagcactgtcgaatgctccagccacatccacatgcagcagacctctctcagcatggttcgcttcgttgaagtcgatggcggcatcaaggtctatgccatcgcacggcaccatgaccatgagtccccggtcctgatcgatgcgatgctgttcgacgaggactacccggcgctggcgacgttctacacccaccccgcagatattcgtagcgccctcggcgaggcctgcggcgatctgaccggccacgttgctcgccagctgggtatcgccctcgcttcgccggacctacgcaagcaacagccggttcctgacactaaggaagatgatgagctgtttcttgacgatgacctgctagacgacctggagacagcttccgaggtatttggccgggcctctgcgccacggatgcgtggtggtgaggcgttgcgtgcggcagcccaggttcctaccgaagctgtgaagcactga

SEQ ID NO: 359223 - DNA, 189 bp, Pseudomonas aeruginosa
atgtttggatactggctgttcttcggagccggctatcgcacgatgcaaccgaccgcctacgaactcactaccgccctgctcctgactcaccccgcaactgcaagcgatgcctccttggcgattcagtccgatggctacctcagcatcgttgcacaacaccgcctgctcaaccgcattcacaacgaatag

SEQ ID NO: 359224 - DNA, 246 bp, Pseudomonas aeruginosa
atggcattgtccgctgttcagcaggcacttgtggatgctgcgttccctgagtgccgcagcgatatggctgcatacctggagaaggccacggatgttgtgatcattcgccagcgggagtgcggggatgatgtaccgccgttcgctatcgtggccaagggcagcgacttctggatcgactgcgctgacacagccgttgccgcaaccagccgggcgcgtgaactggggctcaacgttgttccggcctaa

SEQ ID NO: 359225 - DNA, 198 bp, Pseudomonas aeruginosa
atggctcggcgaagcaaatacggcaacatgccctcggcgccacagctcattgcgaaggtgaaaggcgacgcaggggcgtacaaggtctggggcatcgactggatgcaccacagagtgctgctggatcgtgctggcctagagtgggtcccgatcaagaatgtcgctctggaaccgccccccgccgacctcgatgactga

SEQ ID NO: 359226 - DNA, 246 bp, Pseudomonas aeruginosa
atgaagaagcccaagctcagccctgctcaggcaaaagtcatgcaatggctcagccagggctggggcgctcgcgtctcgcatggcgccgctgttgaaatcaacggcgagcgcgtatgcaacctcgacaccatgaccgctctcgtccgtatgggccttgtggagcgcgaatctcaatacccatgctgggtggcaactgctgagggtcgaaaactcagccccaactacaccccacctgaatcggagtga

SEQ ID NO: 359227 - DNA, 207 bp, Pseudomonas aeruginosa
atgcccatgcttgagccctggagcgaccacgaacaaccagacggcagcatcgaggtgaagcgtgaaggcgagttgcgcttcaccctaacctgggttcaggcatacggccagtgggagctgcggcggaatggcgagtccgaagtgatcgaacgcgaccagtataggaacgacctgttttctgccattcagtccggcaggatcaagtaa

SEQ ID NO: 359228 - DNA, 219 bp, Pseudomonas aeruginosa
atggctaccaaggattacgaattcaccgtaggcaaaggccaccaagttatttccgagaagtcccactatcccgaccttgttcgtttggtcatcccgaaggatcaggctctcgatctggctcaaaaaatcctgcggcagcttgagcacgtccgacctgatcaaactcatctgggcgaaatagcccttttcggccaactcgaagtattcgacgacgagtaa

SEQ ID NO: 359229 - DNA, 486 bp, Pseudomonas aeruginosa
atggtcccggtcgaactactaaaaaccgcagtcgaacagctgccgaagtggaatgtcagcgctgtaacccggctcacatcggtgaactggcggcaggggtatcagatcaagatgcactggtacgatggcgccgcctttatctgctacctggacttcaagcgcgactacagtgcccgagaagctgtactcaaacgcgccttcgagctgtttgctgacgaaggcgccaagccgcgcaccatcgacggtcacggctggacgaagctcgattacgagttccgctctggctccttcatcagcgtcaacgagattgctgaaatcgcccagtcgatggggtatgacttcacagtgctctacgtccaggagtccatctgctcgcggccagttttcagcgtgatgggtatcccgctaatcccaggcgaaatgggcaaagagtgggtggatggtgagttcgtcccgtactcctgccctatggggaagaacctttga

SEQ ID NO: 359230 - DNA, 264 bp, Pseudomonas aeruginosa
ttgagtgcaagtctcaagcccggtcatgtagcacaagagcagttcgagctgcttctggccggcacttccatacgcagcgtgaaggtcatcaacgcactgcgtgatcaccttgtctctggggtgccagggaaagatgcgtggagccagaacggtgcgagcaaggcccagttctatctgaacctcggcgttctcaaggaggaaagcgagcgatcccgcaagcttgctccgttctatgccgccgtagaggtcgccgatgagcaataa

SEQ ID NO: 359231 - DNA, 234 bp, Pseudomonas aeruginosa
atgagcaataacgcgatggctccagtatgcgaccgctctgaaactgcgagctggtgctccggcatcgatgtgcgggccgttcgcttggtgagcaagatcgaagatggcaacctggagcacaacggccctgagctgctgatgtgtaagtgctgtagagcagtgcatggctggcgagtagcgctggttccagagcacgtcgcagtcgcgccgctggagggtgctagtggacagtag

SEQ ID NO: 359232 - DNA, 1941 bp, Pseudomonas aeruginosa
atgagcaccaaatttgaccctgctgtcatcccggtcgttgaggtggagaaggttttcactgacttcgagcaggccgagcttgggcagtggtactgggttgccgatgacgatgagcagttgcttatgtgcgtcatggagataggcaccaactatgtcgagctgcgcgagcctgagctacgcggctatcgatctacgcgggtgcatcgtgacgagtttggggactccctctcgtttgagcctaaccctgagcagcatttccagaagatggttcagcactatcaggacgctttggctgccaacatggccgaaatccagcgcctgactgagagccttggcattgcccctcagatcgggcaccagccagccggcgataccgaggggaagtcgcttgctttgctctctggtcaggttgacgtaagcgcattcaagaacgcgctagtcctggcaaaaaacgaaaccctccctgagctattcgagcgaaacgaaaagctcgctggcgagcttgcccgttggcttggtgccccaggcttggcaatgaaggccaagctggtgcctatgaaagaatcggtcaagcagatcgaggacaagctgttcaacatcagcctttactcgggaattttcgagtcgataaagcagatttctgacggcgttccagccggcagggatgagaagcttcgaatcatgcagcgccggctgtactgtgacgaggaatgcctactcgattaccactcagggggtatggagtttgatggcatggacgagttcgacgagtggctggctaagcctgtgaaccgtgatcgaatcctgccgttccagcgctgcatggtttcgatgaaggtacgccggaatgagaaagaccgcaccggcgtggggctggacttcttcgttcaaatacgccttgcaaatgccgacaagttcaccttcttgatcgttcgcaatggggagcagctgtaccgcatcagcacagacattgactttggggagctgatgtttcctgagcgtgctgtgtttgatcccagcgagccgatgatgatgaaggtctggaatcgtgaccgcatcgaacagatgatcaccaagcgcgagtttgatgctcttgtcgagcaacgaaatcagcgtgaggcggctaagcaacaatgggagttggacaacccccgcgaagaatgggagaaggccaatcctaatcagagctggcagttctctaacccccatcgcggctacgactctttctaccccggagaatggcagccgttcgacgacaccagtgtttactttgacctgggcattcgaaaaatccaaagccaagtaaaggagtacaacaggatcgcccttgtcgtgcagggtctgtttgatcgtacccagacgctgatcccacacaacccagttcagatgtggcgccctgcatcctttgccgcgtcggtcgagctggtctatgacggatcaatggcattgcactggggggaggcccccgatattcatggctacatcgctgcttgtaacgcaaaggcaaacgctgattcggtcatgtttggccaagagcagctttggatggagcgcgaggccgagcgcgagaacaacaaaaccaggaacaactggcggattccgagtaacaacaagtattactacaagacgcttcggccagagggtgatcttgggccgggacgtgttgcaaggatggccggctggactccgcgtagccgtatggccacattcacttggttgaaggcgcgtagagctttcagcgacgacatggtacgagcgcagctcaaagccccgctcgacaagctgttcaacgtcagtgcttacaagctgggtgacttcaaacgcttcttcgcagacccgaggacgcgagcacagtacctggagtgggcgccaatgctcttgagcgctgaggactaccatcgcggtgccctggctgccgctgaccctatcccctcggagtag

SEQ ID NO: 359233 - DNA, 171 bp, Pseudomonas aeruginosa
atgctgatcgtgaagcttgttgctgtcttctatttcctcatttcgctaaggggcctagcgcaggaaattctggacaacgcgcagaccccaaacacatatgctcagattgccttgtcatcaggcttgatctgctacttcgttttctcaatctggacgggttcaaaaggctag

SEQ ID NO: 359234 - DNA, 258 bp, Pseudomonas aeruginosa
gtgagccgcatcaatctgacccgcgcagccttcatcgccatgtctttgatcctgtccggctgcgcgtccagccatagcgccgagcaagtcgagacggcctccgctcccgaccgtgcgagggctatcccggtcttcgtcgtgccgaactgccaatcgctgggcggtgagcagcgctgccagtggatcgagcctcgcggcttcgagcgcgatgcgcctgctccgtccagcacgtctactgtccagggcattgccctctga

SEQ ID NO: 359235 - DNA, 564 bp, Pseudomonas aeruginosa
atgaccatccaatccatgccacaagccgccaccttgacttgggaaggcctgcgcaatctgccgatcccccaagaggtacgccagggctgcgtcttcaatgaaatcgaactcagccgaaagggtatcgacgaactgccggcgccgctgaaccgcgctacttgctggatatactgccgcgaggcgtggccgcactccgatcccgacttcgagggtgatattttcatcacgctggcggtccaggccgatcatcgatactgccagctcgttccggggaacaagcacacggaaatcccggttatccctggtcttctgttcacgactgatccgttgtccctgcattggcttgcgccgaacagtgatgacggggcgggtttcattggcctccagttcgaggtgccttaccactctgcggacgagttcttctcggcgctgaccgcagagctgtcctcgctcggtcaaattcgagttgagcgaccggctctgaacgatgccctccttgtcgcaactggggagtatgtcggtacgcctccagggccgcttgctgaaatggagaactgcgcatga

SEQ ID NO: 359236 - DNA, 210 bp, Pseudomonas aeruginosa
atgaacgtcgatctagtggatggttatctagctgctttcgaggctgcaaatccagacaaaagaaagcccaggattacctacaaaaatggctggtatcgcgtgagtagcatcaccaagtctgtccgagaatcgaagcttgctgaaatgcgcgacgttctgctcaagagggtcgaatcggctcaacacctcaatacccaacaagggagctga

SEQ ID NO: 359237 - DNA, 210 bp, Pseudomonas aeruginosa
atggcattgatcactggactggccatcgaagaagcggcggaaatggaacttgccgagggcggacgatttggagattcgctgtttggtgggcaggtcatcgaggccgcacgcgagctgcttgagcagcaaaccaatgagcacgccgacccactgcctctatgcgagttcacgagcgatccgacgacatggggcttgggcgtctgcgcctga

SEQ ID NO: 359238 - DNA, 267 bp, Pseudomonas aeruginosa
atgagcaccaattcccaagttgtgacctcgctctacctctggagtgacggtcatagcagcgtatacggccctggagagagtgccgaggtgtccgctccaggctggctgttcaattccgaagacaccgacccggatacccaccgagaactgctggcgaatttcaaagacaagatcatcgaagccttcgccctgatctggggcgaaaagactcatgccgcatacgacttcgagctggcggcgccgaacgcctgcgccgaggcggagtag

SEQ ID NO: 359239 - DNA, 261 bp, Pseudomonas aeruginosa
atgagcacgaacgcatcctctatcgaacagaacggcaatacgccctgcaagcattgcggcagcctggatcaatcctgggcgacaaatatcgtttcgccgggtgaagtacagaatggtcggctgaggctgagcgacgttgcatgtcagttcgtactgggctgcaaccgctgctcagaaacgctgatggtgctgagcgccgaccgcgtggccggcttgatgaatcgcgccctcgacgaacaaggaaagcacactaccgcttag

SEQ ID NO: 359240 - DNA, 306 bp, Pseudomonas aeruginosa
atgatgatgctcgacattcttgagtggacaggaaccatctgcggtattgccggcgctacgctgattgccagcaatgtgcggctctcgccatggggctggtggttgttcttggccagcagcgtggttctgtcgctgtacggcctgctgatcggcgcctacgggatcatgctgctgaatctctgctttgtgatgacgaacctgcttggcctggtacgcgtgtggataccttacatgcggtcgagagcgagcaaatctaagtgcccgcagccttccaaccatttcaacaagggaacagcagcgctatga

SEQ ID NO: 359241 - DNA, 423 bp, Pseudomonas aeruginosa
atgaacaacgcaccgcagtacatcacaggcaattggggccacatctttgagggcgagcgcagcgaacgcatgacgcgtgttgtgctggatgcaactacccggaaggttctggtgctgcaagtacagcgcaaccgcgcagcggcagacagctatgggctttcctcgcgcactgagctgctggatgttgaagactcgatggtcaatgccaacccagagctgttcgatgagccgagcgcatttggcttggaggcgactggctcactgccggattgggctgcatcccagatcgaagaatcggagctgcgtgtgaagctggcagagcttcaaggggaatttgcggcggcaggtggccggggtgttgagttggccgaacagattgacgaaatccagcgccaacttggcgaatacgaaggtgacgaatga

SEQ ID NO: 359242 - DNA, 132 bp, Pseudomonas aeruginosa
atgcgcagcatgatgagcgggagcattcacgacaacatgaacctgttgcgcctgaatgctgtatcggagaatgacctgaaacgcatcgcaaagtaccaccgagcctggaagcggctcgactccccagagtga

SEQ ID NO: 359243 - DNA, 291 bp, Pseudomonas aeruginosa
gtgatacgcaccgacaaatggcctctgcaagccactgcgcatcagcaacatctgatgcgcctgaccctggcggaataccgggcatattgcacaggaaagcagtacaactgcgacctcaatgccagctacaacatcgcggcccgctactgggcctggaaactcaaactgacccgccgcaaggacgggcagttgccggaggacaaaagctcccccggcaaaccgagaatgccggtcacgctctcaacgctttggcagagagagcaggaagcccctcatctatgcgcagcatga

SEQ ID NO: 359244 - DNA, 1341 bp, Pseudomonas aeruginosa
atggcggtctttgtgttggacaaggctggcaagtcgttgatgccgtgcagcgagaagcgcgccaggctgttgctggagcgtggacgtgctcgcgttcataggctgacgccgttcgtgattcgcctggttgatcgccagcgggcagatagtgccctgcaaccgctgacgctcaagactgatccgggcagtcgttataccggcctggccctggtgcgtcagcaggtcgggcgggtatcggtgctgtcgctgatggagctggtgcatcggggcgcggcgatccgcaaggcgctggaacagcgcgcaggctttcgtcggcgccgtcgcagcaagaacctgcgtcatcgcaagccaaggtttaacaatcgcactcgccgcaagggctggcttgccccgagtttgcaacaccgcatcgacaccacgctgagctgggtgcgacggattcgccgttgggcaccgatcaccgagctggccgtcgagcgggtgaagttcgacatgcaggccatgcagaacccggaaatcagcggcgtcgagtaccagcagggtgagctggccggttacgaggtgcgcgaatacctgctggagaagtggggtcgctgctgcgcctactgcggtacggaaaacatcccgctggagatcgagcacatccaagcccggagcaacggcggcagtgaccgggtatcgaacctgaccctggcctgtcggccctgcaatcagcgcaagggaaaccagccggtcgaggttttcttgaagggcaagcccgagctgctggcccggatcaaggccaaggccaaagcgccgctgcgcgatgctgccgccgtcaacgcgacccgcaacgccttgttcgtcgccctgctggaaaccggcttacccgtggccaccggcactggggcacagaccaaatacaaccgtcgcagcctgaacatcccgaaaacccatgccctcgatgccgtctgcgtgggcgaggtggaagccgtgagcagctggcagcggcccactctgacgatcaaggccactgggcgcggtgactaccagcgcacacgcctgaccgtccagggcttcccccgtggctacctgacccggcagaagcggcactttggcttccagaccggggatcaggtcattgccactgtccccagcggaaagaaagccggctttcaccgtggccgcgtggccgttcgcaaaacaggcagcttcaacatccagactcagggcgccgtagttcagggcatccaccaccgacattgccagatcattcaacgggccgatggctatgcctacgctcaaacacccaccgaagatagccagccccagaaggaggcagcgagaacaggggcacgctga

SEQ ID NO: 359245 - DNA, 285 bp, Pseudomonas aeruginosa
atggccgacgcctacattttcgaggttcacagtgatgccgatgtgaaggaggtggatgggcgccgggttgtgacggcgaagtacgtgttcgaccaccagaagctggaggccgtgccgaacaccgaccccagtcgcacgatccctgttatctctcgccacaaggacggtcgcgtcttcgcccacctgttgcgcatgaaccgggttgagttcgagcagtcctcgattccgaacgactgctacatcgagtcggcattccagtgcaggctccggcctgtcgcctgctga

SEQ ID NO: 359246 - DNA, 354 bp, Pseudomonas aeruginosa
atgaccacctcgatgccccacatcctgcaacaccaagtgcatgcgttcatttgcccgtgctgcgggtacgaggaagaaaccgtaggcgaaggcccgcaggcgtttggtgccgaggtattcgagacagtcacctgtccgcgctgcaaagaatcctggcgcaatgagtaccggctattcgctactcgacacaaggcgtccgatgaggtggccatcgtccagacccagcccctggctgcgctgatggcgctcgatgcaatgtcctggctcgatgaagacccttgcgacactcccgagctggctgccgccaagaagcaggctcgcgaagcccttgccggagcacaaaaaccgaactga

SEQ ID NO: 359247 - DNA, 285 bp, Pseudomonas aeruginosa
atgccaactccagactggcggtatgagaagtcatcgaacacggtcaaaaccctgtgccgactattgcggacggagctgactgacgatcagcggggcgaggttggccttgctttgcacgattcgctcaaactgatgtgcgacgcgatcacggcgggcgcaccagagcgcggcgacttgtggacgcccagcatggtgaggatattcttcgagcagccagagcattgcgagcgctggcttgagctgatcgacgagccggacttcaagccggactactacctcacttaa

SEQ ID NO: 359248 - DNA, 501 bp, Pseudomonas aeruginosa
gtgacgatcaaacagagccggaagacggcccgtgaattcgttgagaagcacgtcgcggcactttcagctgacgtgctcatctggcgcaagagcgcgtcgcttccatccgaaagcccagtccatgaactggcgagtctgtgcgtgcccttcgctgccgatggtgatcagtacatcgaagctgaacgcctgattgttcagcaagcactcgaagcaaccgcagcattgggcgcagcagcatccgataccgagcctcatcagcagggcagtgctgcacgtaatgaagcggcataccggcgcctgctgcccaaactggtggagctggccgagcagatcgacaacatgtcggaggatgagtacggcaactgggtggacgcgctccccaaggaagaattcttcgagtacataggcgtcgcgcataatgagcagacttttaaatccgcccttgctgctgcgagaatgctgatcagcaagcccagcgcagtcgtcagcgcgggacaatga

SEQ ID NO: 359249 - DNA, 1113 bp, Pseudomonas aeruginosa
atgaccacgcagccctccgattccaccacttctgaggtcgctccgatccacctcggagtgagcgatgcgctgaaccatgccgctcagcgaatggtgctgaacaagtacatcatggacagggcggtcaaggattatcgggcctcaatgctggcgcgtgaccttcacgatggtggctacggccctcatgaaccgcgcccttttcttcgccgcgtgctgccattctttttcctgagcagcaagattaccgaggctcgcgcagccctggtgccgacttccaacactctcggttgcagctggcttcggagcatgaagaacttcggtgccgacgatgttccggccatggttggacaactgaccgacacccaaaaactgctcgacggttccctggacaccaccagctacgcctggatcaagccactgggcctgatagcccctatcgagggcaaaaatcgagtcgatttccttcgcggccagggtatcgactacatcccggcgtatgtagccgaacacagctacctcaacccggaacgcctcagcctgtacagcatccaggtcaatggcttctcggcgacctgggcagtcctcgacggtcgctgggtcacggcagtagagaacccaagctggacggtgccgatgatggaagcctatggggtgggagccggcgcttcttggccatctgacttcccatcgccggagctggtgattcaggccctgttcgccccccgagggacgacaacggcccttggacaccctgacgcaccagaagaacccatcgttgacctcgatacgctgaaagcgaccgaggcgtacttgatggagccaatgtcggcccccatcgtcggcctgagcaacacaagaatcgatcctcggttttggctgatcacagccagcctcttggttcttggcctcctggggctcgcctttgcccccgaaacctgggattcgctcaggctggcggctgcaatggcgttctcctgcgcccttaccgccgcactgattcctgtttttcccggcattgccctcacgcagcgccggtacgtcacgaagcacccattcttgcctcttgagcgctcccccaagcacaaagcaactcgcagccggagactcggttag

SEQ ID NO: 359250 - DNA, 354 bp, Pseudomonas aeruginosa
atgctgattgacttgcgcaaggtcgccccaggcgaccttccaaacgaagtttttgatgaactgactgccggcaacaactacgggcctgaaatggtctgcgcccttcgcgaccatctggtcaatgggatggacgtgaaggaggcagtgaaactgcacggtgtacacgcccataagctcaagatgcgactggacaagctgaaagacgacattgagcgaatcggtcgaatcaatgccctgctgcacccggatcaagcccaggtggacctgattttctctctctccagcaaactcgctgctgctgttgagggtctgcgctcgaaccgcgcaaacgatacaagcgccagcgacgactga

SEQ ID NO: 359251 - DNA, 1080 bp, Pseudomonas aeruginosa
atgtccatgttcgagcaaacccagctggctatcgaatcgttcgacctgaccctcgtgccgggcagcgtcaagaaactcatggccggcatcaaagccgtctacgaaggccaagccaaggaacaagagaagatcaagggtgcgggcggcagctcggacctgtggaaagtgccggtcaacgaactcaaggtgctggagggcttcaacgtccgcctgcccggccccgacctggacgaacacctcgacttcctgactggcagcatcctggaagaaggcttcttccagcatcgccccctagcggctctggtgctggaaatcgacggtgagctgggcctgtacgtcttcgatggccattgccgccttacctccacgaagcgcgcaatcgccgagggcgctcctatcgatctggttcctgtcgttgttcaggatggtcgcaacgtcgatctggacgacctgtacgttcagatgcaccgcctcaacaagggcaaggagctttcgcccttcgagctgggcctgctttgcaagcgactggccaagaacaaccattccgacgatgttatcgccaagcgcatgggcatcaagccgcagtatgtcgatggcctcctgcgcttggtcaatgcgccgaagcctctggttggcgccgtactgagcaacgagctggctgcctcggaagccatcaagatgatccgctcccacgggaacggcggcgtggtgcaagagctggaatctcgccgggctcgcgctctggctgaaatgcagagcaaggccccggagactacccaggagcccggctcggcacagcaagagcaaaccccggctgccaccgcccctgctcggccccgcctgactgcccgtcacgcttccgacgcgcacgtcaagaaggtggtccgcaagcacggcctggatgcgttcaagatcacccgcgccgtcaagcaagacccggcatatgccactctcgcggaggatacccgccagaagctggaagctctgctggctcagctcgaagaagctgagaaagccgacaccctgccggctcaaaccgaggaagataccactgagggcggcgagcaggctgccgcctga

SEQ ID NO: 359252 - DNA, 1044 bp, Pseudomonas aeruginosa
atgcaaactacgctctcagaccagatcaacgaagccgccgagcgccttcgccaaagtgcctcaatgggtacagcagctgtctcggtatcggctgccgatttgcagttgctgctctccgccatgtcccaacctgagaatccaggctccatcgcatcgtgcgatgatgccttcgccgagcactacaaggccgaccctggcgatccgagcgtgggcgccgacctggaagtttggcgaaacagctgggctcaagcgcagaaggcttgcctgatcgaggtcggccatcaagtcggcttgctcgggcaagtgctgggcgactgtattgtggaggctgggatcatcagacccggcgttggccttactgggccagagctgctgatgttcgccaatgatctgctcacgtacatcaagcagcagcagcagatggaggcagccgcaaacgctgttttcacgttcatgctcaagtatccgtgcgagtccccgctggaattcttgcgctgctggaacgagggcaacttcgatgctctgcgtgcagagtggccggaggcgccggacgaaatctacatcgggcctgaccagttccaccccaagaccatagggttcgacgcatacagcacggctgacgccaaatctctcacctctgttcggctcctttcccagtgccgtgacaacctgaactcggatgcgggcaacatcgatgcgctcattgcagaggtcgatgcctacctcgccggtcaaccttccccgaccaactcgacggacgcaacaggtgggattcaggatgagctggacgttgacggcgccaaggctcagtacaaagccgcagctcaggctctgatccgtgcaacgcagcggcagtaccccatcaactcaactgtcgaggccaaggtcggtgggcacctcatccggggcacggtcattcgccacaacgattcctggtggtgtgatccgggcgagttcaccatccgcaacatcgcgactgggaaggagcggaagatcacgcacagccatgtcaaggaagcccgcgaatcccacgcgcacgtctaa

SEQ ID NO: 359253 - DNA, 303 bp, Pseudomonas aeruginosa
atgctgactgttgcccagattctcgcgggcgccccactcgacgcattcatccgccacgcaggtgtccacgacctcgcttcgttcggccagtggctggaaatgcgacgcgctgaatcggtccggctccaggcccggtttgccctggaaaagcgggacgatgacgagctgtacgagtgggttatcgctcacgcggctgcattcagcgaagtggcgatcaacttccgcgccgccagcaatgaaggtgatcagatttcgcatgccctatccctggaaccggcaactacatcggacaccatccaatga

SEQ ID NO: 359254 - DNA, 714 bp, Pseudomonas aeruginosa
gtgatcgaatccttacccctcacccgccgccgcttcaacaaactgagcgcagcagctctggccgccagcactatggggctcggagttgtttcaccatctgcacgggcgatgagcgtcaatatcgctcggcttctcagcatcgatccgcttactcttgaatataaggtttttagtccttgctgttacttttgccagaactatctggtcgtttcacattatcagcctgttgtgctttgcgaggtgatcaagggcggtggggatacggtccttgggcaatctatcggcggcattctttctgctggtgtggacaacaacgactacacaagcatgcacgttcgcttatgggaactccctgattgggccatcaacattgctatggctgggcagggctgcaagatgtgtggcgttgatgcagccaaaagtacaaacacaagcattttcggcggctctgggctctgctcggcagcaacagacaaaatcattgggcaggcaaccaagcgaattaacgacgccctgcccagttgcttccccaaactgctctatacaaccgagagtgatccagcctggaatacaggctgtagagactggcttatgttcccgccaactgatcttgagtgctcgacaatcggcgcttccatttcgaatctgtttggctttgagcgttgtatcgggacacagtgggggccactgtacccaaggtgcggatttcggtga

SEQ ID NO: 359255 - DNA, 1515 bp, Pseudomonas aeruginosa
atgaatacacaagcccgtgtgaaccatatccctcagccggctggcttcgtggtgccggatgttctgcctgacttccccaccacgccacgcgcaggtcttcgcctgagtcttgagcaggaacaggcctttggcttcaccgtctttcagctcacgcttgatcagattcaggccctggcctgtgatcgcgaggttgtagccgatctgctttctgaaatggaaggggcgttcaccaaggagaataaggcagataaagccgtggctctgatcaaggtggatggccagtggttccgccaaggctcgatccccgcagctgaattttccaagtattctcgggatcgaatccagctggttcgccagtgcctggatgcgctgaattctcttgaggggagcgagcgcgacctcttttacatggaggccctggactcgctccgcaaggcgctgtctttgctggtgccctacgatgcgatcctgtccaaggcggtgaacgccttcaaatctcgatgcggggacctcagcgctgcctgccgcgaactggctatgtacgtggcatccgaaatgcacttgagccgtaccactgtccaacggctctgcgaacagttctggctgtcgaacaagttgccggcaatatgctttggctcgaaccgctacgttcagtcgatcatgccggccaaggcaaagcgcgaattccgattcggcgttttggagcgccagcagcgtatcgccagggttgcgctagaaactggtgttcctgtgatcgagctgctgggtagctggtccgccttccatcgaatccatcagcgcattgaccgcctctctggcgcgttcgcaatgatcaatgcaggccttgctgaaaaggttgcgcgtgagcatcgattcgcagctgacttcgatcaggtgcgctctgcggcctaccaaggactcactcgcgccatcagtctttatgccccggaaaaggggatgaagttctctacctatgccgtcacctggatcaagcaaaccatcatccgcagcctcattcagcaggagctaattcggcttccagaaggtagccacaagatgcttggtcgtgttcgtgccgtgtacaccgacatgccgagcgccagtgacgaatacgtgtgcaaagcagctggcatcaccccgttcgagctggacgggctccgtccttacctcctgggcaatggggctatgtctatggacaccctctctaactctgagggtgatgatgcggggatgcacagcttcattgccgatcagaacaatgactttgtggcagagctggaggaagaaagcgaggcagcttatgtcgtcgggctgattcgtgcagctttgagtgagcgggacttcttcgttctcactcatcgcactggattggccggcgctcaagtgattcccgtggcggagcttgctcagatgctcgatacctctccgcagaacatcagtcgcttggagaggaaggctcagtctacgctggcccgcatcgaagaactcaaggctgtttgggagctaatggagtga

SEQ ID NO: 359256 - DNA, 1251 bp, Pseudomonas aeruginosa
atgaagatgcttctgcgggccgctatcgcgccgctggtgccgctttcggcggcaatcctaggcggatgttcctctccaagccctcaatggctcattgagcccgttggagccttctgcgctgctggcatcgatcaaccgtgtttgcaggcttttgcggcgcatgcctatgccgatgttgctagtgactttgtagtgccatcagcgccgaaggatgtgagcccgccgagcgacccagcacagccgcacgatgaagcgggccaagcgacagtaagcgaccagagtggtcactggagttgtccagttccgagcgtagtggagagcgctcctcagcagccaacagtccctactgaactggctgagaaggaggcgaccgctgaaggggagggcgcttcacccgctgatgcagcaacggcactacccgccgatgacggcgccaacgatagtagtgccttatcgccccaggttgatcagggggcaattccggcccttgagtttggttcggctgccattgctgcaaatcttgttgagccgaagggatacgttccgagtgatctggctctccagtaccgagaggctggttcactgcttaacctagaatccgaaccaatctcgaaggagcatatcggtagggtctacgacattcctgatgccgaccttcgcgccaaaacactctcgaccttcctggtgctgtactccaagggcatgtccgattcccaggtggatgaaattctcaatgtgctatacgagttggatcagaggcgatatgaggaagcgctgattatcaagcttcctgcgctgctgaaaaatggcgacctggagagagccaaggcgcttcggcacgttcttcttggtgaggtaggcaggcaggcggatcagttttcgatgcttgcctacgttgctagctgctacaccatgatcggcttgaagcaagatgctggcgacatagtgcgcgacgcggtatccggtggattgaagctgtcagccgatgacaggaccctcattaagctggctatggccgtgagcaacggcggctatccgatgatccaagatttttatgacttcaaaagcgatcaggctcggctggatgcttacctgatgctcgcggttattggcagacagctcaacattcagggcgttgagagacgcgccctatctgatgctgtcaggtttatccagaaatcctctgctcggatcgaccgcgcttccgctcttgctgcgatcctggcagctgctccaggtgctattcagtag

SEQ ID NO: 359257 - DNA, 750 bp, Pseudomonas aeruginosa
atgagcccagctatcacgtttgatccgtttgcgacgatgcccttcaccgggtacatcgatgacgccacaggaagacaagaacgctatctgtcgctggcgcactttgtccactctgagaggctgtccggcgtggatgagcgctatcggaagtaccttctcaacctggatgatcccgagctgttccgactggaggtggatggggttggcttcactggtggcgaccgacctgattgggaagccctccgcccgcgccttatgtatgcaggcatctacatgcaggcgctttccaaccgcgaacactatggacagctgatcactaatgcggcccagctatcaattgcgcattgctcattcagctcagatgcggcccttgccatggggcagttcattgacgacttgcaggccccccaggacaagctcaaggtcgtgtttcttggtgggtgcgttgatcaggattatgtatccagttgcctggaggttatcttcgctaagcgcgccccccagtgcctgctcgctttggaggatgacgggtgtgcgtcaggcatttcgacttttgcgcgacgccagggcagcccgttctcaatgctcagctcatcgctgagtgagcaggcgctagcagagagcatcaggctgcgctgtacgcatgttttccactttgtcgggcagaatgattccgccctcaatagcggcgtgatcgcattgcttcgaaattctggcgtaaccgtgagccccatagcgcctaagccatga

SEQ ID NO: 359258 - DNA, 1386 bp, Pseudomonas aeruginosa
atgcaacccatcatccacttctatgacgcccagtacattggtacgcctgcgcttggtcagctggtagcgtttgactcgctggtctgtacagagtccgatattcgtcgctactcaacccgtatcaggttgaggcaagacgtgtcattcagccctcaagcgatagagcaactggactgttacgatcaggacctgggggcaggggagactgaatacgaatggtcgagaaaggcccaatcgttattcggaagccctgccacccttcatgtcggcctaggcaatacgtcttcgctcgacaactacatacgctttgctctgtacaggtgcctcagcacgctgcccaacacggaactcccattgggcgcttactacctagatttgctgaccgtaagtcgtgccttgtctctactccggcccgaaactgacccccataaactgccggcgcagtggaatgatcaacgtcgccgcaattacgtcctcggcaagtatggggatttttcgggtgcagaatgcgtgaaagagttcgccggctcattagctggcgctaatccggggatgttcgcgcacgctatcgcgcattcatcccctggacagattgcctcgctttgcgggcttattgacggtcaggtcgaaagcctttcgacattgaagcctgtattcatatgccacgaacagctgatggcgccaaaccagttcggtgtattccttgctctggggactgaccctcagtatcgaaacatcgtgtacatgattgaccttcaatgcgatctttccgagctgatcgaggacgctggcgagtcagtagcaaggttcatcaggtcagaggccggcgagattcacaagccagttgtccgtgtgaatttcaatagaatccctttcgtaagccccctcggagtagttgatcgatcaaccgcagcccgattgggcatcgatccgactttgattaagtcacgggttgctcagctgcaaaaccagcccgaactctgcttggctttactcgaagtgtctggagcatcaggtgcaagcttggttgcggacccggacttccagctttacggagcagaatacctcgcgcccgacaaagctctcttgagcaatctgcatcaggcgtccccggacgaatggggaagtctgctgatacacgcgcatgatgctcgtatcactgctctcggcgagcgtctgatcaggcgctgtaagcctgcactattaagtaagagcgaaatgcaggcatggggtgcgcattgcgctagccggcttcttggtagaggggagccgtcccgtttgcaagccaccaaagactactgctcgaatgtggctggctgcccagccaacccacttgggatgcgtactgctgcaaagcactggttacatacgacaggtttggaatga

SEQ ID NO: 359259 - DNA, 768 bp, Pseudomonas aeruginosa
atgagcaagtggacctacgccaggattgatcgaaatgaactaggccaagtccactgtgttttttgcaacagacccctccgaagtggacgcctgatcgtcctgcgtgacgattcaggcgtcgaggcatttgctggcccgtcctgcgccaagactcatgttggtgcgccctctgagcctgtcctcgatctttccagaatggcgatgctattggtcgttcgaggtgaggcgcctgtgcgtggtggggccggcaacgaccctgacgatgaaacgctgcgcccagagcctgctcgcccgcgccctggcggtaagaccgagcctgatgaggttgctgattaccttcgtctaagggttgagcacatgcagggtttcaccgggaatgccacccatacgctacgcgaatttcacaggcagttgtcttcggaggctggcctagggcgcgacgccagactctacgttgagcggttgttggcgaagtcgaagaagtcgagcaccatcttctcctacaggaatgtggagcgctgtattggggcggcctactggctgcgggtcgcaatcgagaacacaaagccggagcgcagagagttcctggagcgattgctgagcagcctacaagaatactggcgcctgacctcaaagcagatcgaagctctcaatcgctggggggagggcgtgcgcaaaaccatcaaggattacccgattctcgatgttggcgcatttaacggagttcaggccccgcgccaagcgcaatctcagaacagcagcagctga

SEQ ID NO: 359260 - DNA, 465 bp, Pseudomonas aeruginosa
atgcgcttacaagcacttattctgagcttcgtggcaggtacggctaacgccgccagcctggaagttgccgtatcggaggggggcaacgaacccctgaaattcagctatccgctgacggatgatcgccagacactcgatcttcgagacgctggccgttacacagtcgcgatcaaggacaaggcccgtggcaaagagatttgccgcgaggctgagtaccgcaccggcatggtgatgactctgcgccgtgtagaaagcgaagaccccgacagctacaaggttgaggtcgtggggcaggtttcgaacctcaagggtatcgagcgaaaggagcagctgggatgcggcgtgaacatgcagcctgtcatcgagaatgcagccttttctgacacatcggtacttgttgcgggtaagcccaaagtgctggtcgtggacgggaaaactacgttgttacttaccgtgaaggagtag

SEQ ID NO: 359261 - DNA, 345 bp, Pseudomonas aeruginosa
atgaatgccagcgtgatcaagctcaaccagcaacgcctctatatcgagcttccagcgcccatggtccatgatctgctggccgatatggtcactcgctacgagagctttttcacgtttggagagccttcatacccagaaggtcagccggcccttcttttcaaggccctgtcggaaggctttgggctccctgcttgcggtgagtctctaggccttgaggttatcgacctagccgccttgaaggtccaatcgaaggcggttcctgatccgcgctggaaagacctccatgtggggcggattcttgccgctgccttcgcaagcaccatcaatcgagcacaggagcagtaa

SEQ ID NO: 359262 - DNA, 657 bp, Pseudomonas aeruginosa
atgcaaaaaatcaccttcaccgctctcgctgcggctctgctgggaggctgcgcctctgcgccgcctgagccgaatatttcctcgtatacctacgactccaaagcccactctgggactgttgtcgttaccgaaaagcactactccagcgatgcgctcgcgtgcgagccgaaatggcgagaaggggaggtgtatcaaccgactggtcttcccccgatgggccgtgacacattcaaggtcagcattgaaatcgaggctgatcgtgagggcgatgaagggtacaacttcaatcgctattccattgatgtgccacaaggcctgggctctcgcgttttggcgagagacttccagcgtcagaagacctttatgcttggcgccgagtcgaacggtctggtccaacagggggagcttttcgagttccccgagggtttctatctccgcgtctctcgaaccgcagttcaagggtctgaatttgtagcctgtatcgggattgatcacatgtacgtgctcgactccgagctacagtcgtcggtcaacccgcccgtttacctcgaccgcgttgtgattccgtttgccatggagccggaaaatcagccggttaaagtctcgttcggcaacaaaatccagcacaccgccgaaatccgagtccttcccaaatga

SEQ ID NO: 359263 - DNA, 294 bp, Pseudomonas aeruginosa
atgctgacattgctggccaagaacccgagccagcaagggcctgacgctgacacttgcctggaaaccttggtgaacgcctatgggcgggctggcggtgaagtcgatgatcttctgtctgttgaggggcagttgaagacggatcaggcgctaagtaatcctgagcattgcgcgctcgacccaagcccactctatgaggtgagcgacagcccagcggaagcacttccggcgccgcagaaaatggagctattcaagcagctcaagcggcagtttggaactaaggcgctgacagcctga

SEQ ID NO: 359264 - DNA, 1092 bp, Pseudomonas aeruginosa
atgaaaagcgccaaaaccctcaagctacgcatcaaagacaagcacgcgaaaacgctgcttgcgatggcgcgtgaagtcaatttggtgtggaactactgcaacgaaaccagccatcgcgccattcgtgaacgccagcaatggctctccggtttcgacctgcaaaagctaaccaacggactgagcaaatgcgacggcgtgcagattggttctccaaccgctcagcaggtttgcgaggactacgccaaggcgcgcatgcaattcaggcgctcgcgcctgaattggcgtgtatccaacccgcagtccagcaagtacagcctgggctgggtgccgttcaaagctcgcgccgtccggtacaaaagcggacagattcagtttgctggcttcaagttcggcctgtgggacagctacggcttgagccagtacgcattgcgcgccggcagctttagcgaagattcccgtggtcgctggtatctcaatatctgcgtccaggttgagactaagccgtcaggtggtactgctgccgttggcattgatctgggccttaaaacggcagccaccacttcagatggccaggttctggtaggtcgccagtaccgcactcttgagcagaagcttggcattgctcagcgagcccgcaagaaggcgcgtgttcgtgccatccacgccaagatcaagaaccagcgcaaggatgctcagcacaaattctcaaccgccctggttgagcgttgcgccgccatttttgtgggcgacgtggcgagcggcaaactcgtaaagactaagatggcaaaatccacgctcgatgcggggtggagccagttcaaaaccatgctggagcaaaagtgccaacgggcaagcgtggtttttgaggttgtagacgagcgctataccacccaaacctgctcgtgctgcggaagtatttccgccagcagtccgaaaggtagagccggcttgcgaataagagaatggacctgcgtggactgcggtacagcccacgaccgcgatattaacgcggcccggaacattctcgcggcggggcatcgccgtctagctgtaggaatccccgctccaggcggggaggatgtcaatcagtag

SEQ ID NO: 359265 - DNA, 642 bp, Pseudomonas aeruginosa
atgagcgaacttcaactttcctttctcgaaaccgcccctgcggagtttgatgtgaacgctgttgatgacggcgtggtagcagccggcaaggcaacccaaggatcggcagcactgtcgctgtctcagcgctcggttgatgactgggtgtttggtcttggctttaccaactggaagaacgtcatcgatcacgccattcagactggccattacgagcttttctctgctgaggacggtgtgtcagggctaaagaagcacggctaccgctacgcgcctattccaaggctaccggcagggggggccacatacgtacagcaacgcctcttggtaatagcagcccagcgcggagcagcatttggccggaacgagcgtatggttcaagcgggacccgagttcctgcacaagtgcgttgtggagaacgggctctgcgatctaatgatcaagcttggcggtgaggttgtcaggggctcggtcatggtcgatcagctgaattttcctgaccaagccaaatcagaccctggtcatatcgcaatccagctttgccgtgtgctggagtctgccggcgcccctgccgatacacggctcgaaaaggggtgtacgtctttggcagcgcactttatgcgcgtagttcatgggctgcgctaa

SEQ ID NO: 359266 - DNA, 348 bp, Pseudomonas aeruginosa
atgggcaatccccctcagacacctatccttcaacccgtccaactgcatgaaaagaagttggagatagactcgtccgccaatgattcatgtgaccgtgatgcagatgcggttttctcgttttgcagccaggaaatagctgccctgttaggcaatgactttctgaccaagctacccagagaggttttggctgaattctgcttggcttccgtcaagcacaaccacccgaccgctgagctgctgtacaagatcatcatcaacttcatgttggcctactccaatcccaccgcccacgaagattctctcaaggctttcgatttcctggactacttgactgacagagagggttga

SEQ ID NO: 359267 - DNA, 375 bp, Pseudomonas aeruginosa
atggattcaaaacagcatcgagtcatggtgattgatgactcgaagacaattcgaactactaccgagggctaccttcgagagcttggtcatgaggttatgtgctgcacagacggcttcaatggcattagccatatgatcagcttccagccagagattttgttcatcgacgttgaaatgcctcgcatgaatggcctggaaaccgcacgcttgatccgggcgaatgtgcagttcaagtctacgcctatcgtcatgctgtcttccaaggatgggatgttcgatatggccttggcgagtgcagccggcgccaacgactacatcgtcaaacccccggtgaaggacgccattgcggctgtgatcaccaagcaccttgggtga

SEQ ID NO: 359268 - DNA, 903 bp, Pseudomonas aeruginosa
atggttggagcagtagccattgccatacctgccggccaagatcgagccattgagacgcagggcggctctgtacaggccaacccccacatacaggacatgatcgcggaggcaaatcgtctcgggaccatgggtgactatcagggtaaagcagagcttttgagtcaggcgggatactcagggagttcggaagctttctatgtcctcgcgaggatgtacctcgatggcaccctaccgcacgatatggatcaggcgcttcactacatcaatctctcgcacagcgcggggtacgcggaagcaaccagagtgttaggcatgctctatttgcgcggccaaggcgtcccggcagatgagtcttatggtcgaaagctgctggagttggccagcaagagcagcccccgagcagcccgcgaatacgggctcttgctgatgaacctccagaggcctcatctgaacgatccctcacttggaatggagtatctaagggatgcgtcagttcgaggggacagcgaggctaccgtcgcactcggcaaaatctttgggaatgaagtcggcctggaagcaagcgttcattcgatacaagccacaggccccgctcccgccctccgtaacgatcaactgaaagcaagcgcgatgcgcggggatgcctcggcgatgtatcagtacgcacagaaggtcctgatcggtgcgattcaaagcccggaacctgaattcactgcttactgctggctgtctgtggctcaaatgcttggcagcgacgaggccaggaaggagatagcgctcatccggggtgtgcggaccattagcgataccaaggcacctggacgcctcgatcagtgcatcgccgacctgcactatcaggtatcagggcaggattccactgggctttctggtgcaactcagtag

SEQ ID NO: 359269 - DNA, 612 bp, Pseudomonas aeruginosa
atgctaattccccatacgcttctagaagcagatacgcttgatgaactgctcacagacttcgttactcgcgttggaaccgacgatgatccaacgcctgtgacgcagcgcaaggcgcagttacttcgtcagctggaaaccgaacaggtcttcgtcactttcaactatgagcacatgcaggcgtgtcttgtgccccggagtgagcttagcgatgcggcaatccaggagttcaaggaaagtaggcaagccatgatcgatgaggccgctgagcaagcggaagaactgaaagcaaagaacgatttcacgaatctgcatggcaagatggcccatgcaggggtattccccatcgagctggggcgcacggtcatgagcggcgcaacgaacgccctgatgcaggagggacgatacagcctgcaacagctccaagacctactgtatcgtcactccactggcgaatacggctctgtctgctgggccgacaagctgcgcaatcttcaatcgatccacagtaagggctatatgctctcccgctacacgctcggcggcgtcgatctgtatgtagaaatgctcgaaggctggcatcagacaatggtgatgcttgtgagtgagcgctag

SEQ ID NO: 359270 - DNA, 687 bp, Pseudomonas aeruginosa
atgacctcccagatacgccggaatgaaatggcgtccaacccacgcaaggcgcgccaattcggcccacaaggcgatgttcaggcggtgcctgatccagattcttcaaccatagagctggagctggacgttgcgcccgacctgccctttctcggggttggtcgctggaagaccgctgacacctatgccaagcgaaggattttccccatcaaggatgacgggagcctggttggctaccgggcgatgatccagcaggggcgtggtgtaaaccgacagacccactccgaggttttcagaatcactccattggtgaatgaggcgatggcaatggctatggcccagcgctggagagataagaaagaggcggagcttggaatactctcaggccgagtaagctcgaagtcggcttcgcgcttcgttccgggtatcagtctcgttgtctcaagctctggtccttgcagagcaagctggaggtggtcttctcccggtcgccccaccgtgactaagtacatcggcaagaagcttggatatgcctcagcctacagggctctcgttctccgcatatgcgaaattctcgattgccctgccccccaagcccccccagtgcccatgcccaaccatgtgcagtacctccgattacagtcaggaggtattagcgaattgcctgagcgtcgagccaagccacgatag

SEQ ID NO: 359271 - DNA, 774 bp, Pseudomonas aeruginosa
atgcaacacgatctgcatctaatcctaagcgactgcaaagtagtttttgcccgtagcattcaaggcctctacgcatctgagggctgcgcagtttttaatgcccccaggccgcttctcggtgcagagcactcttgcaccgactggtgtcatggccgcttctactctgaaatcgatcttttcagtcctcatgccgccgcgttcatcgaaaagaataatgccttggatgcccgtgttgtcgtggcgatcaccgatgcagaagcggttgaaatgctcctgataggcaacccgcatgccgatgactatcgagagtatgggttcgaggaacaactcgaaatgctgctgcctcatttcggagacattcagcacctgccctacggtgaggccatggctctactcgatgctgccaaagcgatgctgaaagctgacgctaagggagagcaacatgggctggcacttcccgagcgtttccagtgcaaaatcaatctcaacgtgactatggcttcggggctgagtgagagcattgatttctgtggtgacttggctgatgcggagcagatgcgaggtgcgaccattccggtgtgccaatcgcctgatggggagctggtcatcgctccagtctcaacctctcaggctgcggctctggccgaggtgcatggggtcagctaccgactcagcctaactcggtgcgccgcgcccatcgacctgggaacgttctcagagccggcagctatggttcaatcggcgaagcagttgaatgacctgcttgccgtctag

SEQ ID NO: 359272 - DNA, 285 bp, Pseudomonas aeruginosa
atgaccgaactactcaccagcgctgcggtgatcctgtgcgccctgctagcactatctttcaccaagccaatcctttgttttccaggctctccgcgtgtttgtcagcaggcaatcctgcgattgctcgtaggggtgcttgtcgcattctcgctgcatgagacgatccgagaaacgggactcatctatgggttgttgttcagcttgatccccctatttgccggtgccgtggtgatacatgtttttggggcgaaagactcagcggcgaagcctcacggccaggactag

SEQ ID NO: 359273 - DNA, 528 bp, Pseudomonas aeruginosa
atgaaaacgaaaaatctgcgccaggagttcgccattcgcgctgctcacctgcgcgaatcctttgcagacgctacaccgctcgctgagcgccttggttcattcgtcgaggatgccgccaaggaactggatgcaaagcagattgccctcgatagtatgttcaagcagtttgatgagcatggctttggggcgatctacaaaaattcgctcaatcagtacggattcgtcctgcatgatgctagcgagcaaggggcttatcgctaccagatgtttgaccggaaggggttctttggacactcgacattttcgagcgccgaagaagccctgctggagctgtgcgataacgggtacaccgaaatggtgagcccggacaccctggacaagctctcggctacccgagagtggaagttctcaaccgaggcgcttgcgcttcggactgctgtacaggaagggaagtacacttgggaggaagccgaccgtctatacgccgacctccagctcaagtacgaccctgacctctgggcagcttga

SEQ ID NO: 359274 - DNA, 246 bp, Pseudomonas aeruginosa
atgaaaaagctttatcaaatcgtgctctgcactgctgtagccctgtccgggatcagcttgggtgccgtggatacctacctgcacacgctgaaagaagaagcccagatcaccgccacctgcaactcccagccacagctggatgtttgcaaggagcgccagattgcggctaagggcgtgcgttatttcttcaatggccaggagttccgtggtggcgatgcccccactgctctcggcgcgaatgaataa

SEQ ID NO: 359275 - DNA, 294 bp, Pseudomonas aeruginosa
atggacagcaaccccgaccgcaccgatttcaagatcgatgtgatcgaagggcctgccgatctgttcttcgaatggctcgacgaaattggcggaggcaacattgtccgctatggcgacggcgccggcttctccgaaatcggcccttctcaatgggccatccaagagggggcattgatcgaactgagtttcgaccagttcttcaacgcacgtatcgagaggcttgcgagccatgctcgcaacaaaatccattacgagtgccatcaggcgctcatgaagctttcgctaaccgcttaa

SEQ ID NO: 359276 - DNA, 1506 bp, Pseudomonas aeruginosa
atgtctactaccgtaatcaacacccatgtatccgagtcccgctccgtcccccgtatttggctggaaggacagcacttggcgcatgctggtgtagaaattggcgttcagtacatgctgaacgtctgtgaaaagctccgtcgaatcgagttgcgtcctgcgccacaaggtttttcgggcaaaacagtcagcgtgagcaagcgcaccaggaacgaacgggtttgcccgctcatcgaggttcgcgattcgatcatcgctgtattattcgaggttgggacgaaactgcgtgtggccattcacaatggtcgcatcgtgatttccatgtctcacatcgccatgcgcgttcaagagcgagtaaatcgctttctgaacaagctcaatactggcgaaccgctcagtgtactttcgctctttcacggaggcggggtccttgatggcgcgatccaccaaggctttcaacaaactggactggcaagctacgtcaaaatcgctgttgagtttgacggcgattacattgactcatcactgcgcaacaatcctcagttgtggcgtgacgacagcatcgttatcaacggtgatattcgtgacgtaaacatactggggaatggcgtacctcaagtcgatgtgtgcgttgccggtgttccctgcacgggggcatcaaagtctggggcctcccgtaatgggcttagctgtgctgaggaacacatcacggcagggacacttttccacgactttttggagtgggtgaaggtcactaacccgtgcattgtcatccttgaaaacgttgttgagtacgcctcgacggcagccatgatcgtaatccgctcagtgctcagccatcttggctatcagctgagtgaaacggtcgtggatgggcatcgcctgggttctctggagaagcgtaatcgtctgtgcttggttgcgaccacgccaggggtttgcggtccagtggacttcaaccagttggtgcctctacgccagcgcgaagaaaaaatcgctgatgtgctcgaagtcgttcctgctgattctggcatgtggaagacctatgactatttggcggacaaggagctacgtgataaggccgctggtaagggctttatgcgtcagctgcttacaggtgaggaagaaggttgtggtgtgataggtcgcggatacgccaaggcccgaagcaccgagccattcattattgctccgcatgatcctcggctttccaggctgatgactccagctgagcatgcacgcgtaaaaacgattccagagaagctgatcgagggacttagctctaccagagcccatgaagttctcgggcagtcggttatctactgcgcattcgttgcggtgggcgttctgatcgccaagacagtaactggcttggtgggatcgctcacgaaacctcaatctttgaatcgagaggaaaaggctgcatctgcaataaagccggtgccggcgaataacaaacagctcaaggaatgctctgcaaccctgccgttgtttgcgctgaccgcttaa

SEQ ID NO: 359277 - DNA, 303 bp, Pseudomonas aeruginosa
atgaatccgaagctcatcgacctactgttcttgatccagggatggctgcggatcaatggcctgccttaccacatagtcattctcagcggttacagaacaccagaacataatgctcgcttggccaaggcagctaagggctctgagcatgtgaagggaaatgcagccgacattcggatacccggcctgaaagtcgatgcgctaacccgtctggccaaagcggtcggggtgggtggcgtcggtatctataccagcgacgagttcgtccacgtcgatgttggccgggtcagagagtggaaaggctaa

SEQ ID NO: 359278 - DNA, 1161 bp, Pseudomonas aeruginosa
atgagtgacgacttggtgctgacgcaggaggaatccgtccaaggcgtcatcgacgagcgccgctcgaagctccgtgagaaattcgacttggcgtccgcccaaggcattctccccttcaccaacgaacgtttcttcgagcagagcaacccgattgtcagatcggcacttttcacagccggcaagatgaacgttcgggcgaaatcccaatatctggactggactgagattttcagtctcggcagtggcagcatccactatcgaggccccttactcactgttgaccatgaagtcgttctagttcgccttcttgttctcgctcggggccgctctcttacgcagccgatctactgcaaccaagctgacattcttcgctggctgaacctcgacctcaactcaggtgcgaattacaagaaagcccggcgcatcctggatgacttggctgctgctgagctgcgcatcagcagcaagccagcgctgcgccggcttctcagcattttgacctcgcctgctctttcggaaatggctgacggcaagttcttccaagagtacgtgaagaacaggttcagctcgcatttgaagatgatcgctgatggtcttgaaaatgatcagccagttgatgtgagcatgaagttcattacgaaccagacgcataaccacatcacaaagcggatgattgtgaatcttgaccccatttccgcgatcttcttcgacggggtgaacactaccctgctccccttcgagatttgggacactctcgaccgcttcggcaaaaagctattgcccttaatcgcatcccatcgtgatggggtgtaccccaccaagcttgaaaaataccatgagttcagtgggtcgaaatctgactacaagatcgtgaagcgccgcttcaaatctgagcagaagaagcgttttgaggattgggagtgcaagggttggatcgtccccggatggaagatcgagcgaaacaatgagggcgaggaagtggtcagcgggttgaaggcaggggaagcggtgagaattcgctccgcactcgaaattcctgtcttacttgacaccccagaagatattgccaggggcgacgacgacgctattcaggagcgtttggatgcctttgcggacagcttcggcgccgaacgaccggcgccgcgcaagaaacgtggttag

SEQ ID NO: 359279 - DNA, 849 bp, Pseudomonas aeruginosa
atggctggcttacttaacccagccagcacggtgttcgccctcggcgccagtgaccctgagcttgtttctattcagtacatgctgcggaaggccggcttttcgtgtgcgctggcataccgtaacggaaagcgttgcgtcagcagcaacgcctatcaggcggacgcgcttttgcgccatgttgacgctggacaacaggttgtctgggttgagtgtcgaagccctgattacgacccggagagcgatcttattgttgaccaccacaatgagggcgatcccggttttgctgcccctcctgtgagctactgggaaggttcttctatcggccaagtggcgaagctcataggggggaagcattctgacttcaagcttgtggccgcaagcgaccattgtctttctgcggcaatgaggggtgagtgtcctggggttgatccaaaagagcttatggcttggagaatcactgctcgatctgcaatggccaaaatccagccttgggttctgaggcggcgtatcgagcgtgcgactgagcgcgttcttgagcttccaaggttgaatttgggtgggattcaggtagtcgatggaagctttgactcaactccagagcttcgggacgcagctgcactggtacagattccaatcctcacaacccgcaagacttcaactggccatatcaagatcggcttgtacggtgctgagccagatttggtttctgaatggctgtcgtcgatgcgagctgcggatgtagtggatcacgtctacgggaacccacaccgcgaatacgccggggcggtccttaatcgcgaaacctctgagcgactgatcagcgcaaatgctcaacgcatgagcttctga

SEQ ID NO: 359280 - DNA, 1632 bp, Pseudomonas aeruginosa
atgaccgcattccaaaccaatcttttcgcaaccgataaccttccccattcgaacccggagttcctgggggcaggctctactaacgcaccaaccggcctgaccagcttcgacattattgatcagctgcttggccaatatcgccagcgtgaacaagccatcgaggacactaagcagttcatcgattcggcgttcaatcaaggggtgatgaactacttcattgagggcgctcgtcttgtatatggcccggaatatcgctactccatcccgagcgataccgaagctgcaaaagcctccctccgcgccgaattctggatacgactcctgaatgatgcgcaggtttttgaggtgatgccgaccgcgaaaagggagcaagcacgggcacaatttagcgggctagagtgtccaccgttcgatgaaagcaccgtaaggcctaccctcgaaaacctgctgtctgcgcgcaaaaactacttcgccgagcgggtagatggaatcttctttggcttgagccgagtgcatgtgagcaattcaccagctggattttccaagaagatgatacttgccaacgtgtacgacgcgagcggctatgtgaactctcataaagccggcctcatcagcgatcttcgtggggttgttggtcggctgacaggccgtggtgagcccagtgagtacgccacccgaaagctgctgggcaacatctatcggaaagcgcttggcaagaaaatccagatcgatggcggagctttttccctggtcgtatatcggaagggaacagtccacttcgaggtagccgaagaagttgcaattgagctgaacagcatcctggcgactctctaccccaccgccattccatcgaaattccgcaccccgcagaaagccgggaaaaaacccgcctcattcgacctcaagatgcagcgcctcccgatggctgtaatagaccttttgagtgctctggaccggcgcggggatagctactcggcatacgtctattcaaaggctcaggacgcagttgaccaaacagcccaggtacttcgtgacattggcgcggtagtcagattgagcgccgataagaattacctgtatgcgcagttcgatttcgatgctgatgctgtcattgatcagttgatctacagcggtgccgtgccggagaaagccgcataccagtggtatccaacccgtagcgagattggcttggtggctgctgcactgctggatgtgcgcccaggccataactgctgcgaaccgcaggccggaactggcgatctggcccagtatctgccaatggaatcgaccacctgcattgaactggcgcaggttcgggttaaggttttggagtcgaaaggctatcgcgttgtaaaagccgatttcttggagtgggcttcgaacaacagctcgactcgattcgaccggattctgatgaacccaccgttcagccatgggcgagctactgcacacctggaagcggctgcatcgctgcttgctactgatggccgtctggtagccatcctcccagcctccatgatcaatacgagcccgcttgaggggttcagccacaactggtctgaggtgttcgaggatcagtttgagggcacagcagttcgcgtcgcaatcctgactgctgagcgcccccagtga

SEQ ID NO: 359281 - DNA, 780 bp, Pseudomonas aeruginosa
atggatgatcttgtacagcagctggagctaggcctacctgatggctgggctcgactcgccccccacttcacagcacctgaaacgacccggattttgctgtgcgccacggatggtcaaagaacgttagtgttttgcttggttgatcagatcgttcgtagtgccgcaccactattagcgttcaattcgcagctgcgagatagggggctagaggttgtctggattttctcggaatgctgcataccctcaactcggcatatggtttgcgtatcggctgccaaagatgaaggtgaatggaaggctcgaatagtcaacgcccgctcacaaaattccagtctcactagaagcgttagcctggcccatttggctcaagctgccgcagagcagaggcttcgtgttcaaacatttactgctggccagagaatcgccgttcatgtcgagagcatgaggtcgccatgtctgcattgtggcgcactggttcatgaagttaagcgggcaacgttcctgccggaaggggctccaactgcgccaggactcaagctaagcaaggcgagactggggcggtgcgtttcagcactgatcgccgaggcgattgatcgaacccagaaaaagcacaccggcagtgagccccaagcctacctctgcgaggcatgcacctttgataggcggcaatccttacgcatcaggggccacatcccatctgcgttagtgggggttgtgctctcaagcagcgccgcttacgagttggtcaagcaccatcaaacgacttggtatatcgcttga

SEQ ID NO: 359282 - DNA, 753 bp, Pseudomonas aeruginosa
atgcgcattttcgcctctgctcaaccctccgacttgaaaaccatcaaagctcaaggccaacgcattgcggatgtttgggaaaaagaatgcggactgagagtcgaggtcaaggcgatcaagcggacagaggcgcttgcagctgatttccagcgtggtttcatagtgctggagtcgttgttcaatacgtatctgtgccactacgaattcgacggtcgtcggcttgtagtcactccagaacaacaactgagcacggctagtcggacctacctcaagtgcccagcgtctctgatcttgaaatcggagcccgcaaacccattctggcgagattgcgttgccaaatacgctgccgccactaaggaactgacaagtgagcggctggccggcaacgtcaccttattcctggcgatcaaatacgagacacgggagtacggagagcccttcttcatcctccaaaaagatgaaggccagtggttcggcatcgactgctacggcgagcgcaagccgctaagcctaggtctggatgttattcatgagcattgtcctagcatcattgatacggactcactcaaaccgatggatacctcagagcttgcccccgactgcattgtcgccggaggtgtgatctacaaggagagtggcgatagggccatcgtccttgggcgacctaagactcgggctgaaacaatcgcagacagctttccgtacatgctgccacctacgttcgatctgcatggcgatagtatatggacttga

SEQ ID NO: 359283 - DNA, 1173 bp, Pseudomonas aeruginosa
atgtcgcttccgaccggccctcagagcaggatgttctacgactacctcacggtagagcaggtgtattcgcatccgctcccgaaggtatcggacacgggcatttgctactacgaccggcgaactggcgaaaccatccgcgatacagctcctggctggaagcatgagggtagctattcgaccctgatcaagattcgcgtcgatggctgcaagctccgcgtcgagggcaatcccagcgccgtcaatcggctcgacaatctcgacggctatcgctccctggatgactgcatcgcggtctacaaccaaatccttcttgagtacggcgaccaatacggtttttggcggttgccacgattcacgaagtgcactgagtgggggcttcgccagggtgatgacggcacgaagtccagcatggtcggcaacggtgcgcggattcggcgtatcgacctgaccacgaatcggacggtggggaagtgcaacgtgatggcctatatccgggcgctcagcacccagcgatatggctacaagaacgcccatctctacgaagacgggctgacctgtgactggaaggctcgcgaccactacgaaaaggcctatgcgaaaggcccagccattcgcaagttcctgtttccaaagtgcaaacgcaatttcggcgaagagtccgccgagttccgctatctccaacgcctggccgattactgcgacgaccagggcgtcgttcggatggagcaagaactcaagagtgagtttctccaggcgaagcggctggagtggtggggattattcgatgagcagcaatttcaggccatccatcaaaagtttttggccatagacgacaagctcgaggtaacggcaatggactacaacactatcgctgatcagttgatcgccaagggcattgtgtccagccgccaggcggccaatgcgacggcaaatatcgccctgcaatggatgaactgccctggtatcagttttgacttccagaagtctcagatgcagacctatcgcgctcgtctgaacaagatcggcctgaatatcgctcaaccctatgacgtcactcgccatagcgcggtgatcgtgcgtcgtgccgaagagatcgtgaccaacgatttcttggtgctgccggagttctaccggcatgccccggcccagcgtcatctgcggttggtggcctga

SEQ ID NO: 359284 - DNA, 144 bp, Pseudomonas aeruginosa
atggaagcggcaatgcaacttttaagttcggtcacttttgaaagtctcacggcggtatacggttccgggtttatcttgacctttgccgcatatgccgtgggtttaaaagtaggagtcgtactaagtgcgatccgcaaactatga

SEQ ID NO: 359285 - DNA, 135 bp, Pseudomonas aeruginosa
atggctgatattttcggtgcagtagacttttccagcgtttccacctgggtcgtaagtgccggtgttgcgatcatcggtattgcgatggcgttcaaagggatcgacctgggcaagcgcggcgttaagaaggcctaa

SEQ ID NO: 359286 - DNA, 144 bp, Pseudomonas aeruginosa; identical to SEQ ID NO: 359284

SEQ ID NO: 359287 - DNA, 444 bp, Pseudomonas aeruginosa
atgcaggcaacactttctgacaaggtacgagcgattcgcgaagagatgcttgcgctagacccgcacctggaaagtaggctgccaagtcttcaggcgatgcgtcactggattgacctcggacactcgccagatacaccgttcgagcagcttcgcccgcaagcaccattgcgtgaggaggttttcaagtcgtttgcacaggtacttggattctctgcgctggaggccgcctaccagtggcagcgcgtgatcatggcggtgcgtaactcgcgtcgaatggacggtcgccatgtctctgatatttatgcatacatgctcttgcagcctgagtccgccatggccaattcaagcatcaagcggcaaacattgtctcagctgttcgagaaggcgcgcgagaacgtcgccatagtcgagtatgtcggccccctcaaggaatcgcaacaatga

SEQ ID NO: 359288 - DNA, 333 bp, Pseudomonas aeruginosa
atgcgcacgggcatatacatcgactttgacaacatcgccagcaacggcttgggcagcatggtctatcccgcgctccgcaagcactacgagggctgcgggcgcgtcacgcaactgcatgcctatctgtcctacgatgagggcgccgaatcgagcaatgagcggtttgctgcgtggcgtcgtggctgtctggcgaagatggagcaggccggcttcatgctgcacttgaagacccctaagtcctaccaaggccctgatggggaagtgacgactaaagccaacgtcgatgttgacctgacggttgatcgctctgcgcggcagaccccgtacttctag

SEQ ID NO: 359289 - DNA, 309 bp, Pseudomonas aeruginosa
atgagtacgccgccattcaaggccacgatcaccatcaccatcgaagggccatcacctgatgagttcgggttggccttatcgaacgcaacggactcgcttggcttcggcagcgctgggaatggctgtaccccaaacggcacggcctatcggtacgaaatcgactccaatcttccatccgagccgatgaccctggatcgacttctcaagttcatggatgacaacatggacaacgaggatgaccggcagttactccgcgatacctggggcaccgaccacctcaaagaccccaacagccctgatcgctcatag

SEQ ID NO: 359290 - DNA, 246 bp, Pseudomonas aeruginosa
atgattccgaaatcacttggctggcttgggaagcaggttcgcagcgctgacggcagactgggtagaatcacgaatgagttcgtcggcttgggattcgtgaccctcacactgacgccggagaaaggagcagatgaagtggtcacgcttctgcctgacggcagcgccagcggcagtagcggctggcagtggctgtgcgacaacttcactggcgggccgcgctggcttgccctcggcaatcagcactga

SEQ ID NO: 359291 - DNA, 255 bp, Pseudomonas aeruginosa
atgtccatcgcaacccaagctcttatcgcagctcacacaccgctggccgtcctgtcggaagtccttttcgccgtaggcgatgaagttaaggcccggaacccgaacctgcccttctggatgacagtagtctcggtgaacccacgtaccggcttctgtcggtgcaacttcggtgcgtctgccaactatgcaggcaacttccatcagtcggagctgcgattcaatcgtgggaccgagtatgcgcagtcagcaggttga

SEQ ID NO: 359292 - DNA, 453 bp, Pseudomonas aeruginosa
atgtcaccctctatgaacgagatagtccaactcgcagttcacgccaagctcaacgaactggcgtcaataccagtgggtttcaggagcgggcgacgcctcacggctgacgacctgcgtcgcagcgggtacaacatcactgcggaacagctgcgcgaagggctgtctcggaacttcactgacgtggccaacagactcggcgtggagttcttcatgggcctcccggctgcactgctggaacagttcaccttcatgagcatcatgcgcaacgaagacactgccggcatgctcaagagcctgatcaacagcttcatgatcacctacgcgacaccggaaacagcagcatcctccttctctcacctggaaggcttggaaacgcttcgggcggaagtggcgaagtcccgcagtctgactcccgcgacactcactccccacccatcgcaaagccggcactga

SEQ ID NO: 359293 - DNA, 381 bp, Pseudomonas aeruginosa
atgagcctgataaagaccgattcccagattgaccaagctgccgttgcgattgtcgaaggctccctgccgtatcctcgcgagctgcttgagcaatgcaccagcctggagttgccgcacatcatggtaaacggcgatgttttcgggccggcacctgataacgcagcagctttcatgcagtacgggcctgactggacagggctggccgtcagcagccgttgtggcagcaccagctactggctgtactaccgctgccagttgactcaggagcgtgcgatggcctgcctggggccgcaacaaagcgtgggagcagcaattgaagctgctgtgcagcatgttcgagccgacctcgaatactggaacagcaagcgagcagctgcttaa

SEQ ID NO: 359294 - DNA, 531 bp, Pseudomonas aeruginosa
atggcgacaatctgcgagttcggcacggcccctgatctggccaaggccggcttccaaatcacaagcaccacagtgggtactgacgccagcgtcatggctgaatacgaagggtgtgatgtatgccttgtgcgtggccccgcgatcttcggtgatgacggcaaattcgagtttgcggtcatgggtcgtgtgcagtcggtgcaggttaagcactgggaaggctattccgatagcggcaagccatttacgcaccaagtggacgttgacgaccagcgcagcagtaatggccagctttacctcactgttggtgccctcgaaggccatgtagacgacatgctttctgcaactgccgagataagcaccaacccagaaaacggaatagatcatgtgccagtcatccacatccacttcgatagcgatgccttggcgttcagcgcttttaaggtgaacgacaagatcgttctgcgtcttgaggaaggcgtatccatggagcagttctacagccctgctgggcgtatgtattgggtcgattga

SEQ ID NO: 359295 - DNA, 249 bp, Pseudomonas aeruginosa
atgccctgctttgcattccagatcagtaccgaagacgtggaaaacgtccttcgctcctactcgctccgcgtcaccaacaccaaggggcagtccttcgagcacatggccgaggaactgatcgacgagctggatcatgaacgcatcgagcatgccgctctctcggcatccaccgatcttgatgagcagaccaccgctgcctacgaggaaatcaagaacaacctcgttgagctgggcgtgctggagttctga

SEQ ID NO: 359296 - DNA, 354 bp, Pseudomonas aeruginosa
atgagccacgcagtagcccgcgcattgaccctcgcagccacccattttgtggatggccacctgctcacgttcgacgcggacgaggtttacccgcgcctgaaaacgctgtcccagaaaggcaattgccttctggcgagtgaagttcgtgatttcactatcagccccgattaccagcacctgaccgtcacggagctggtggagcgcatcgaggtgacggccaaccaaatggtggttttcgggaaactgattctggaagccgcacatgcggggttggtggaagctgcttgtgatgacgagttggactcggatgcaagcgcttggcacctgccgagcttggccgaagcccacatctga

SEQ ID NO: 359297 - DNA, 321 bp, Pseudomonas aeruginosa
atgatcaccacaaacacacgcaccaaagaccccgaagacgttggcctgctgtttcattcgatcctgcgctacggcgaagccaatgccgagcgccttgatctgtcgatcatcgccatcggctacgcaacgctgatgcagcacgctgatcaagcggcacaggctctggctgagcttcatgaggatgaaggcccggagtgggatggttgcgtgtggctggagcggctggaggacaccgagcacggtagcctcgcccagatgctgtatgccgaagccccggacgtgcgtggcgcagtcaaacgctggctggacgcactacgctag

SEQ ID NO: 359298 - DNA, 753 bp, Pseudomonas aeruginosa
atgaactggcagcaacacagcatcgacctgatcgacctcaagggcatccagtgtcgattcacctccaacggctacggcaccctcggctggatcatgccggacggcgcgggtgtatttcatgaagggggcgtgatcgttgagtgccagcccgaaaccatcgtgaccgatgacccggaagggctgcggctcgctcgcgccgcctcggcaagcaatcatttccagcggcatgaccaagggtacaaagtcattgatgccgcagagtgggtgccgactggcgataagtgggtcaggcagtaccgtgtcggcctcgccgaacaagaagggacgcttagcgtacacgtccagttcaaggcaggctcagctgaacttcttcgcttctacaccgagttcgtaagcgatccacgccccgcaaagacggcagccgatcccgttcgccagggacgtatcggtggcgcctattcagctggggaagttgtccgcagtgcctcggggcgactctgctcgccgtttcccaagatcgaccttggtggcgagcgcaaggcatgcaacaccctcaagcgcgtcgatcagtggctgatgcagaacgccctggacgaagcacaggcccgaggcgatgagttcaatgcgctccagttccgagccagcttggccaatccccagcaagcggacaaagactgtgccgagcagtacctgttcgggcagcagcctgcggtgatcccctcacccctgaaattcctcacctgcaacggttaa

SEQ ID NO: 359299 - DNA, 417 bp, Pseudomonas aeruginosa
atgtcgaagcaggtaatcaccctccccctcgaaacctacggtatggatgacctgagtgccgcgctgacgccggaaaaagtggttgttcagttttctgctgctaccgttgccgctgtcgagagcttcacccagatgctgaatggcgataagcgcatcaagtctgtgagcatcgacctcggggcggatggttttgaagcagcattcatcaacgaggacggtaacgatacgggccttgatggggtgctcgacctggaactgttcttggacgcttccaatgaggggagccacattcgccttgtcctttctggttgcgataccgatgttgaggacgatcaaggcgacacctgctgtgtcacaggtgagttcttcgccagcatccctgtcgcagctatgcgcgatcagctgcaagctcgctaa

SEQ ID NO: 359300 - DNA, 285 bp, Pseudomonas aeruginosa
atgaaagtgaagatcatcgtggtgcaggcgcgccgcgatgagctggaggcagaatctcggttgatggcagctgatgcccttccagagggcaagctggagcagttgccgtccgcctacgaggccccgattcaagcgccctgcgacactagcgccacgtttcttcataccaaccctcgccgcctgttcgtggaatccagcccattcctcagcgagcttgcacagcaggacatggacaaggcgctgtcgattcacgacaacgtttaccgctggctatcccgcctctga

SEQ ID NO: 359301 - DNA, 687 bp, Pseudomonas aeruginosa
atgagcaacgacaaattcacccgcgcccagatcgaagccgaaggcgtgcgctgcaagttcagtagcgcgggcgccgagcatgacggatggatcatgccggatggctctggcgtcgattacgccgacaatacccagcgcatctatgcccccgagacaatctcgacagacaatgcagatggcctctttctggcccgtagtgccgtcgccgagcgagtgttcgctactaactactttggattcatctacacgaagtccttcggctggtttatggatggtgacgacatgatccgtgtttgtgacgcaaaacgtagcgacacaatcatccaggtcgaggaaatcgtcagattcatcaaaggcactgcaaggtcattctcgtctcgcctgttcaacatcactgacgctctcgacgtgtgcgcgaattgggagccgacctatagcaaatggcgccatggaggctggtatgtccgcaacgtgcagtacccttccgggggttgcggctgcgtgagcaacaactacgatgacggtgcgtggcgcattgtgtgtgatgggcgccggcaagcgctgggccaacccggcgacttcacgttcaagacccgcgatgaagcggcccgcgccgagcgcgagttggttcgtcagataactctcgacaggctctccaagcgggccagtcagcaaacggcagcatga

SEQ ID NO: 359302 - DNA, 243 bp, Pseudomonas aeruginosa
atggccagtttccagcagattgacgacaccagttatgccgttcaggcgcgaggctccagtatggttctggagcagaccaagaaaggatggcgggtgaaaactcgcaacgcggcgacccgcgtgtggggtctcggcggcgaaagctggaaagacttcgacaccctggccgatgttgagcgccattacaaaacttggcggggcatagctgcattgatcggtacaccttgtcagcagaaccactga

SEQ ID NO: 359303 - DNA, 429 bp, Pseudomonas aeruginosa
atggccaaggttcactaccgacgcagcggcaatcgcacccactgccgatattcagcgcggcccagtcgggtaaagctcaagatggtagaccttcccgagttcctagatgtggacgccgacctgcaatgcagtgactgcctccgggccgctcaacgtgatgtatttctagagaagatcggcaaaggctccaagaccgagccgatcaaagccaagccgctaaccgccgccgaccgagccgccctaacagagctgccggcgttcgactggttcgacgtggcgcatgcaccgatagcccgaccatcctaccgctgcgagcgactggaggcggcgggcctgctagagcgccgggtggttaatgccggcatcacgggcgaaagcctgtggcggaagacgcagtaccggcgcaagccgggcatcgactgcgcatga

SEQ ID NO: 359304 - DNA, 357 bp, Pseudomonas aeruginosa
atgacgaccaaactgttaggggaaaccgacatgagcaatcaacaagagaaaagcgtgggctacatccagctccagttcttcgacagcaagaccaatcaggtcgtctgcttgggcggtgccgggtttctaaccaaggccgaagacgatgcagcatgggctaacgtccctgcgttcgagggtgagtcggacttcatggctgatcgactggatgcggaaggggacattgtggatgagaagccgatttctgccgaaacctgcgaaaaactgatgagccgtcccattgctgatttgatcagcgagggccgtgcccagctcaaggctgaccttgagaacttacgcgccgaggcgcgagcatga

SEQ ID NO: 359305 - DNA, 261 bp, Pseudomonas aeruginosa
atgagcaatgcaggcaaaacctttgtttcgagtgatattgcacaaggcaagacggaggctttcgacaagctcagaaagcatcttgctgagcgacaggccgggttgacctggaaggacgcctgggcacttcgcttgagcgacttgggtggaaataaccgcctcccacgcggcttcaatgccaaaaacctgggtgagcgtgctgctggtcgtcatgtgcttcgtcagatcaagcaggccgcagccgggatttaccaaagttaa

SEQ ID NO: 359306 - DNA, 267 bp, Pseudomonas aeruginosa
atggctacagagtgtgatcacctggtgggctacatccctggcggcgaagtgaaagctggggactggaacgagaaaatgatggccttcgtagccagggtcgatgacttcaatgttcgtggccagcgcgtccagatgaaccatcctggcttcaccgccgagttcaagttttgcccgaactgcggccatccgattgatcgtattggcctggggctgctgacctacggagacgccttcaagcagcacgatgcggcgaaggccgctagttaa

SEQ ID NO: 359307 - DNA, 237 bp, Pseudomonas aeruginosa
atggcagaactgaaagtcgtgccgcacccaaagctaaagcgtgactacgccgggaagcgcgttcgcactctccgcgagtttcgcaacggttggggtgttatccctgtagggtcgctcgctgttattgaccaccagagccccaaggggtcgtcactggtgattgacacctgtagctgctgcggattgaaaccggttatcagcgcaatcaaggcttccgatatcgaattcgttgagtga

SEQ ID NO: 359308 - DNA, 216 bp, Pseudomonas aeruginosa
atgacgaccagtcagccctacgacccgagcaaccctttcaaagtcggtaataacctctgctggctgcatggggagcactaccgtgtggcggaggttctggaggtcgaggaagaccgggtgaagttgtcgggccttacttcggattactggcgcagcaaaaaatcgttgctccctcgcctggataaaacccccatcaacacaagctccggcttctag

SEQ ID NO: 359309 - DNA, 207 bp, Pseudomonas aeruginosa
atgaagaagacacgccaggtcaccattacggaaatcttctgcgacgtgtgtgggcagaagtgtggcaaccacgcaacccgcgctgacgccgagggcaacgaagaacatgcttgcttggacttcaatgaacagcacggcaagcagtgtgcggctgtgctcgatgaacgtctgctggcggctgcgattgccaagcggcagtcggcctaa

SEQ ID NO: 359310 - DNA, 210 bp, Pseudomonas aeruginosa
atggccaaccgtaatgcgcagttcctttcggtcattgacgacaaggcgaaagccttgattctggagtcaatcgccgctcactacgcgatcactcctcaagaagcctacaccgaggtgactgatgccgaggctgagcacctgcttgattacatggtagagccccagcgctccgctgcgtcggttctgatgcagcgtcacggaatggcttga

SEQ ID NO: 359311 - DNA, 252 bp, Pseudomonas aeruginosa
atggcacaactgatcgaggcgctacgcttgaccgccgcgaagtggcgagcaggcaaacaggaacaccgtgaaggcgtcgtgctggtgtgggacggcgaggtgtacggctggaaggatgaactgcgtgaccctgccagcgagcgcccaggtgcgtatgccgtggacaaggccggggtgatcttcaaggccgagggcggcgacgactacaacggtgcaacagcgtgggtcgcggttgaccctgacgcgcaatag

SEQ ID NO: 359312 - DNA, 270 bp, Pseudomonas aeruginosa
atgaagtcacagcagcacgccgaagcctttgcccgcgctctggctgggattctcttgcagttccgcgaatgtgtggaggctggagagaaggaaggtgccaatctggcctacgccacggcaatggggttgattgccggggctgctctgtgcggcgggatcagtagggagaaggggcaggcattgcaggccactctggacgaaacccgtgctgcattgatgagcgcgttcggtgctgttcctgacacccctgctgagctgcggatcaactga

SEQ ID NO: 359313 - DNA, 216 bp, Pseudomonas aeruginosa
atgaacgtgatccgcttcgccgttgcattcttcgagcgttgcatcggcctcatggcagacctggcgggcggcaacagcaaaggactggtgatgcagatcagccaatatcttgcgccggtatttggtcacgaaaactatatgggcatggagcaaatacgccgcatggcggctttttttgtactgcacactgattacctatttgtggttatgcattag

SEQ ID NO: 359314 - DNA, 1233 bp, Pseudomonas aeruginosa
atgatcatccgccagggcttcaaataccgactggacaccagcgaggcgcagagcgcccgcttgcgtgtgctgtgcggtcacgcccggttcgtttggaaccacgccctggcgcagtgcaatgaggcgctggccaccgaaggccagtatgttccccgctacgaaacgatggccaagtgggtcaccgcctggaagcgcagcccagataccgagtggctgaaagacgcctacaccgacaacctccagcaaaagctcaaagacctcgataccgcctggcaacgcttcttcaagaaagtcgctgacgcaggtaggccgcagtttaagaagaaaggccgctgccgtgacagcgtgcgctttgtcaatttcgcaaaatactgcgcccttgacggcaaccgggtaaaacttccagccggtatcggctgggttaagtttcgccagtcccgcgccatcctgggtgaggtaaagaactgcaccgtaggcttcgatgccggccactggtttatcagtttccagaccgagcgcgaagttgaaaacccgctgccaaaagcaacaggcgctgtcggcatggacatgggcattcagcgcttcgccaccctatccgatggcacctattgcgagccgctgcacagcttcaaacgccaccaggaacagctggcgaaagcccaacggcaaatgagccgcaaaaccaaattcagcaacaactggaagaaggccaaggcccgcgtccagcgcatcaatcaccgtatcgccaacgtgcgccgcgattacctgcacaaggcttcaacgaccatcagcaaaaaacacgcgatggtctgtatcgaagacttgcaggtcagcaacatgagcgcatctgctgccggtacggctgagcaaccaggccgcaatgtgaaagccaagtccggccttaacaaagcgatcctggaccagggatggtatgagtttcgccgccagctggattacaagctggcctggaacggtggctggctgattgcagtacccgcccacaacaccagccgcacctgtccgtgctgtggtcacgtcagcgcagacaaccgcaagacccaggcacagttcctgtgcgtgcagtgcggctatgcgaacaacgctgacgtggtgggcgcaatcaacgtgcttcgccgtggtgaggcacacctgagcaacgaagggctggacgtagcccggttagcctgtgaagtgaacggcgctgtcaggccgtcagcagcaggaacctgttag

SEQ ID NO: 359315 - DNA, 318 bp, Pseudomonas aeruginosa
atgtctgcccgcctggattcactcattggcaacagctattccgttgtgcaattcgccgatttacctgtgccaagccagttggcgattgtctggtacttggctgtcgattgcggcgcatgggatgccgtcgatttgtcgttatacagtgcagaccacctagagtcttcgctggtcgagctgctaccaaagtacgtcaatgagtatggcgccgaactgtttggctcggtttgtctaaccacttcggccctcgcctcggcaatcatgaaagacgaagaaatcgcagacagtcatagcagctgggaggattaccacaattga

SEQ ID NO: 359316 - DNA, 576 bp, Pseudomonas aeruginosa
atgtcacgcgaccttcccgagttcgagcagcatttgctgagcatcatcaagccgctgcatgcagccaaatggcacgcggattatcgctgggactcactggaaaagtcgctggctaacctgggcaatgactacggtggccttgagctgaaccctgacttccagcggggccacgtatggacccccgcgcaacagacccacttcattgagaactgcatgcgtggtgtcgttccgtcgagcggttttctaatccagttcaactgtgctgactggggcgataaagacgcccaaaccgacctgcctaaaggcttgcagtgcgtggatggattacagcgctacacggctgtgactgagtacgtcaaagggaacgtcaagccgttcggttattccgcccaggagctgctgggcacccagttctcaccgaagcgcatttacatgaaggtcgcgatccacgcctacaccaagcgtgcagacctgctggcgcactatctcgcattgaatgccggtggcacccctcacagcgccgaggaaatcgaacgcgttcgcggcctgctggcccaggcgcagggctctgcctga

SEQ ID NO: 359317 - DNA, 129 bp, Pseudomonas aeruginosa
atgataggtggcaccttgttcgtgagcgccctgatcttcgtcttgcttgctctgtcactggccccgcttggctttgagttatggcaacggggcgttattggccagaagcaccagggtaaggttgcgtga

SEQ ID NO: 359318 - DNA, 276 bp, Pseudomonas aeruginosa
atgtttaccctaaccctactccgcttctcccccctgccgaaggagtcacacctcgtagctgtgctgattggggtgctggcgtatatcgttgacagcttcgcgatgccgggcagcgcagccaccgacagcttcggtactgcggtcgtcgcagctgtctgctggtacgtttacaaggtctttgatggcatgacctatgacggggccgaaacagctctcggaacggtggcagggctctttctgagtgttgtgatctgcatcgggtacttcatgctctga

SEQ ID NO: 359319 - DNA, 696 bp, Pseudomonas aeruginosa
gtgagcaaggctcaaccttcaactgcttgcggtgctctaaacaggcttttccaggcatacggtaagaaacgtttactcaaaaagaatgaacagatcatcccacttctcgaaaacccgaagtgcctgtatctcgtcgtgctgggaagcatgcgggtatcgctgagcaaccccgaaggcgatggagttatgtgcatcagccacctcaaaccgggagatatgtttggcgagcagggggcctttgactcagctcctatgcagtacgcaaccgccagcatacaagcccggtgcaacgtcgaattgctgtgcctcactcatgaagaattgaagcgtgccgcactcaacgcgcccagcatctacagtgaactgtccgctcacatcaacactcggcttggtgaaaccaccgacaaactgttgcagctgcttttcgacgatcttgagcagcgctgctacaaatcgcttgtcgagattacccgcctcccagacgccctgacccaccctgacggcatgcagatttcgctgacgcggatcgaactggcccagatgacaggatgcacacgggaaagcgctgggcgagccatcaggcgacttcgggaccaaggtctgatcgaagcgagagggagcaagatcgtcgtgcgaggcattcgccacggccagcccttcgattctcagcagcgggccagaactgtatgcgtctga

SEQ ID NO: 359320 - DNA, 2166 bp, Pseudomonas aeruginosa
gtgcagttcgactctctgctgctagatgacggtcgcctgaaaatctcgccgaatgtagtggatcagttcaaggccgacgctttggtcagactgggagaagatcaccagccgaccgacgagcagtggaaggcgatcctgtcgccgactacgagtgctgtgacaatcggcatcgcgggcacagggaagaccttcgtcatgatgctccgggcaatttttcttcatgtctatctccgcatcccattgagcgaaatgacgattctgtctgtgaccaaggactgccgaatggatgtgatggccgagttgacccatctgtttgggcgctggggtgtcagcctttcccaggagcaggcatggcagctggtcaagacccccagaggggcgctgctgaacttgatccgttcagtcccgccgctgcgtgatgtggtgccgttcgagctgcttgggaccatagactcaggcgatgaagatgggcgggcgtttgacccccgactaacgcctgagcaatcggatatggtggagaaggcttatcagcacgcctacagccgcagcagcagtttcgccagaactgtgcaggcagttttcgccgatgccgttgctctcccgagggcagcgccagacaacccgcagctgatcaaatacagcgagctgggtagtgctcagatcagtgcagacgaggtgctgaccaaggcagtaacgagcgcgtggcatagctcaggacattggccaatcctggagattgatgcacaactgaccagcctttctgtcatggggcacgcggttcacgtcaacggctacttcccgcctctggatgcccacgtagtgcttggcttcccgaaaggggttggccgcgactactgccgtcctggctcgaataccccgttgtatgaggaatgccttgcaaagcgggcctacctacagcgttttggctcgcagagggtcatttggtgtgattcaccagaacagctcagctccatcgtttcagccgcaatggtgcttcatgacaccgcgcctcggtttaccgctcgggtaaaaggcctggagcgaccgatgggaatcgctgagtgcctgtaccagacgggtgcgcttatcgaaacgctagggctcaacccggcgaaagccattgcggacctgaaattcatgcccaatgacccggacgcaggcttcttcgatgcggcagccaagttctggccgatgttcgaaacgttcctgctggaggccagccctaaagtcatgacgttcaaccggctgttcctaaccttcggagagcaggggcacgtcaatctcaaggcggttcctacggaatgcctcgcctcgctacggaacattctgaccgacgagctgcaagacataaccattcacacaggggagttcatcaaggcagtgatggcagagaaccgccatcggatcgatgttgagggtgtggcagatgctgtcatgtccgtctttgcatgcggcgatgacttccagaccgcgcatgggactcaaggcgcgacgcctcgttacctcaccgacttccgcaagcacttcccttccaaggggtacgtgttgaatctgcttggggttaatttccggtcgcaacaggggatcatctattctgctcattcgctgatcctcggcattcctgccgtgagcacgctggcgccggccagtgccgctaacgaggaagtgagccctgttgaggtgtacgacctatccccggcaaccttcatgcggcttttcgacatgcactacgctgccggcgaaagcatcctcatcctggccgcaaaccctgacgactatcgacaactggaatccgtggtcaatgtcgcggttgacagggataaggccgacaacccagatgacaggctagtccgtgttcgtgctgctcagcggtctaaggggctggaggccggggtggtgatcattctgggtgacttcgttgccgccagctctacctgggccaagaaccaagtattccgcgctgcaaaaacggtagagacggacgatcagtcccccttcgatgtgatccagcagaacgagctgtatcgtcttgcccacatatcgatcacccgtgcgcggaaaacctgctactggctgctgccgaaagaggggcctgatgctgttcatcgcctcaaagcctcgaccaggatttcgggcgtggccggttccttcattgaccggcgatga

SEQ ID NO: 359321 - DNA, 1092 bp, Pseudomonas aeruginosa
atgacgcaattcatcgcaactgaacacaaattggcacgcctttgggtcgatgcctgcggcaagagcttaggcatcgagcgtgcagaggcggcagccatgtatgcaaacctgtgcggtttccgaacttgggatgcagtaacaagcgcaattgggcacaggcagccaggtgttccagacgagcaactggaagtccccgagttgctggctcgacgggaaagctacatcgccctgatggtggatgtttttgcgatcaacccatctatggccgtccatctggccgctaaccttagtccttccagcgccagggtgcccaaggccatatccatcgaccggagtaccttgcattctccgcccgaagatgatggcttgagcctctatatgccgggctttgatgatcctcgggtagctgacgccatgctcaaggatttgctgggtgatgcgcctggcctagagggcgtgaatctggataacttaaccgaccgtctgcgcatttctcatccgattgatccggcagtttactggaacttctacagcgatatgggcttcgacctgatcgacgatacctatgtcgaagattatgtgtacggcgctccatcgttcttcatgccgtgtagtcctgaaatatccgagagcgaaagggtgccggtcttcctgaccagccttgcttacacgccgctagatcatcaggacgatatggcagatgaggtccgtcgagtgatgctggagagcaccaaagcgatcactggtacggataccctgttcctctgctgggggcatttgcagcataaggaaattgggggcaagcggttcacctacgctggccagattcatcacaagggagcttggcgcgatctgctcctgaacagatcgctggattccttcgataagttgcttcactcagcaaccgctctgcaagacattaacgatccagagctggagtttcaggacaaaggttcggagtgcgagattcgcttctttatggtgcagacccagtgcgagtccagcgcggagttctttcagaagtacacggtgaacggcatcggcaacccaagtggttggtcacttgggatgattggcagcaaatccgagtag

SEQ ID NO: 359322 - DNA, 705 bp, Pseudomonas aeruginosa
atggccattggctacgatggggctctcgaacttcaacagatggccatgctcaatatccctccatcacaagcattcggtatcgaaccgcacatcggcaggtgcatacctctgccgaagggcgcttccgttgccgagtgctgggagccgggcaagggcgactacctgctgatcgaggaaggtgcattccttctctatgccgccagcagtgccggcgcacgctaccttctgtcgattgtcggggccgggcatgtgtttaccccccaaagcatgtcccagcttctgcgcgggaattaccgcattggtgttgaggccatgctggacgtgaagctcaagatgtactctcaggagcagtgggatgcagtgagcagcgagcgcccggacctgaatagctgggtgatcgagcaggaagcacagcagctccagatcgttcaattccaccttgctcagcacagccagcgctcaagcttggataaaactcgctttgctctctgcacctacgcgattgggctcggactgccgctgccctgcggtagcaaatcgatcaagatcagcagagccgagctggcgaattggataggcgtgtccagcgaccggatgtgccggctgatccgtgaactgcacgcctctggtgaagtcaccatatgcgggcgaagtatcaaggtcagtagcggcctcatggccaacctgttcccgaggcacgcctag

SEQ ID NO: 359323 - DNA, 708 bp, Pseudomonas aeruginosa
atgaccgaagaaacgatcgttaccatcctggccgacaccactgaggccgaatcgcctgtcttgtcccggctcaagagcctcggcgcccatgtccggcttggcgatttggaagtaggcacgcacgtaatcagcggtgagacggtggtgcttcgcatgaatgccaccgagttcgtcgagagcatcctggatggcaagctattccaccgtgcaggcaagatgagcctcaacttcccccgctccatcttcctgatagagggcgatgcgtattcaacccgcgcagcaatcgcccgtgaagcaatcgacggcgccctggcctttctcgtcggagtagaaggcgcatcggtgctctacgtccgcaatcccacggcgacggcagacctgctgtttcgtctggccaaacaagcccagaaggatttgacctacgggatggcgtttcaacgggccaaggtcagcccaggccggcagcaggcgctgttcactatcgagagtgttttcggaattggcccggccacggcagccaaggcgcttacaagatttcgatctgtttacgctttcatcaccgcgagcgttgaccagttgactgaaatccctggaatcgggccgaagaaggccgaacgcatccacagcagcatccgctggcaggatgagggcgactcgggcattcatcccggcgccctcaacgcctctagcaccgacactgcccagtaa

SEQ ID NO: 359324 - DNA, 1044 bp, Pseudomonas aeruginosa
atgatggacgagcagaaaaagaaagcgctggcggctgcactgggtcagatcgaaaaaagcttcggcaagggcgcggtcatgcgcatgggtgacaaagagcgtcccaagatcgacgtaattccgaccggctctttggccctggacgcggcgctgggcatcggtggcctcccgagaggccgtatcgtcgaaatctacggcccggagagttccggcaagactaccctgaccctggaagtgatcgctcaagcccagcagctcggccatacctgcgccttcgtcgatgcggagcatgccctcgacccggtgtacgccggcaacctcggtgtgaacgtcgatgacctgctggtatcgcagccggataccggcgagcaggcgatggaaatcaccgacatgctggtgcgttcgaacgcagtggacgtgatcgtgatcgactctgtggcggcactggtgcccaaggccgaaatcgaaggagatatgggtgataatcatttaggtttgcaggcgagattactcagccaggcactacgcaagctgactggcaatatcagcaactccaactgtctggtgatcttcatcaaccaaatccgaatgaagatcggtgtcatgttcggttccccggagacgaccaccggaggtaacgctctcaaattttacagctcggtgcgcctggacattcgtggtatcgagacggtgaaggatggcgatacggccattggccggcgtgcgaaggtcaaggtcgtgaagaacaaggtggccccgccgttccgcgtggctgagttcgtgaacatcttctcgcagggtatcgactgggcaaccgagctggtcgaactgggcgtcgagcacggctttgtggagaaggccggcgcgtggtacagctacaacggcaacaagatcggccagggcgtgaagaacgccgccgctcacttctcgcagaacatggaagacgcgaaagtcctggatggattgctgcgtgagaagctgttcggtggcggcaccaaagtcaccgagttggctggagtgccgcccgaagcttctgtagcttga

SEQ ID NO: 359325 - DNA, 570 bp, Pseudomonas aeruginosa
atgcaaaccaggatcagcgacttcactaccctgttcaacttgctttggtacagggacttcccagtagcgctcggcagcattgagtgggccaagcgtgcggactggacaacgcatatcgcttccacggtgcgacaggttgccagcatcaccgggatgttttcttgcttcgagtctggcgggcggaccgatgctgagtttcagttcgccgaccgtaaggtatgggccaagctggaatgggagtggagcgaaccgaggaacgatgacgttggtgagctggcgaagctggctggtgctgcctcgacctgcgaggtgtgcgtcttcatcggctacagccagctccagtttcacgatgctaatttggcaaagatcaaggccgagtgggctggcgtccagaaaccgctgctagccatcctggtgacgtttgagcaggaaggggagtggcgttacttcgaccgtctccagacgtatctcatcgatgcggatgccacgtcgatgatccgggatcagcctgcgttgccttggtgcgtgtccaacagccgctggcagtcgcttggcagccttgagggctga

SEQ ID NO: 359326 - DNA, 183 bp, Pseudomonas aeruginosa
atgggaatccaggcgtgtgaaagttgcggcgagcgattcgatgtgcaggaaatcaacggcaatcagccgcacaagcctgagcgggagtcaatcgactgtccccactgtgggcacaagaagtggagccggtctaccggctacttccaaaccacgaagctgcccagtggtaagcggaagtcttga

SEQ ID NO: 359327 - DNA, 864 bp, Pseudomonas aeruginosa
gtggaactgtcgcctgaactgcatgcttggtctgagaagctgcatgccgcgtcccttgccctgagcgaggcccaacatgaggtgcgcgtcgataaggacgcaaggaccccttccctctgggctcgcatcgtggactacctgttccagacgaaagccgaaaaatctgaggaacaagcggcaacagagctggcgaatgtgcaggcccaggcgcaggcatttgcaggccggtggatagtggccaccgcaaaggcctctctggcgaaggacgaacccgtctacacacgttacctcgcgcaaaggggccaagtaggcacggcaatcaaacggcacatccagatcgataagtggcgcggactggcccaggatgcgcacagccagctgatcggcgccgctgacgattgcagctctgcctccaccactgaaatgatcgacctcttttcctcgaataaggctgtgtcggtcatatcgagcatcagcacttcttctgctgccgactcagtgcgcagggcaactcgggcgctacaggcgctttccgaggcgctgccaaaacgcgccacctcggagagcattgctgaaccagacgacttcctcgacctgctagtggaccttgccatagccccgccgctggatattttctcctggatcaacatgggtaagctcgatgacgcagcagatcagtgccggaaggcagctgagaaagtcgaggccacgctgaacaagctgaacgaatcctcggcgagggctgcggcccagcgcgaggcagagcaacagcaactcagccagatcgcagcgccgtatatcctggcagcagcgaaacaggtcccgtcgagctttggcgtaaaggttccaacatcgttggagtga

SEQ ID NO: 359328 - DNA, 1701 bp, Pseudomonas aeruginosa
atgtttgatttcaaccttcccattacggctatccccgagaagtaccgcgagttcctgcccagcctcactaccccagctgtggatgatctgctgtaccagtatgagaagggtgaggcggaaatgcgccgcctgcatgctgagttgatgagcgccgagaaccgcccagtgctcagcagcttcgcctacggggcagaggtgtatcacgatagcaagtcgaagggccgcttctgggcgatggacctgatcgaaatgttcgacttgccgcgagcgatcaatgctcgacaggagaaatattggttccagcttttcgacctgtgcagcttcactaacatcctgcctaccgaactctgggatcagtggagagcgtcattcaccgcgtggcgctccaagggcggcgccggcatacctccctttgaccgccccaccgtttaccgctgcctgagtatggtggaggcgcaccgggcaaatttcttctcgatgcgggtagacgctctctggaacgggctctcacattggcacaagaccaacgtaggaagtggattttacgagcgcatgatcctggactggatgtactcggatcacggcacgccgacttcaaaggatcgagtgttcatcgatttggtcaatctgtgctcggtggtgatgaccggggcagaagacccatttttcagcagctacggggtgttgcgtgatgcgcgggccgagcactgcggtgagtgggtggacgtgctagacggtgccctgcaaattcgtgcctacaaacgcggaaccctccatatcgacattcacccggaggtggcgaaccggctaaacatcgcactggcctacatccgccccaatgcgctcccggatgaagccacgctcaagaagccgcgccgcaagagcggtttcggttccgccgaccttatgacctgctcgatcccgcgtcaggtccgcagctatctgcatctgtgccgacaggagcagcgtgaggatggcctgtggatgctggtgccttggaaagctggcagcctgactggccggttgagcggggcggtcaatgccatgattgacggggtgctggcgcagattggcggcgttcgcgatggcaacatccacctgttcgactacgccccgatggaggtcgtaggggaggtggttcgtaccggagaggttccagacaaactctcacaccagtatttcagcacgccggctgacttggcccaggagttcgtcgagtgggtgggtgttgaccagcaggcgatctgctacgaaacgtcagctggtactgggggcattgccaagcatatgccgctgcaaacgtactgcgtcgaggttgaccggcttcgggcgatggcactggacaagatggggttcgaggtcaagcacgctgacttcctctccctcgcgcctgatgatctgcatgggttggccgatgcggttctgatgaatccccccttcgctggccgggcatggcaagaccacttcgagcacgcacggaagttcgtgagggtcgggggtgttatcggcgcaatcctgccggagggggctcgactcaagttgcctgagctagaaggcggggagctggtctattcagccccgttgaagaaccgcttcaaggacgcctcgatttccgttgtgtttgcgaagtgggtgagggcaggtattgccgccgcatccaagcctgtccaggcaaatgagggcgtgagcgccgccgcgtga

SEQ ID NO: 359329 - DNA, 648 bp, Pseudomonas aeruginosa
atgtctgtcgcagagtctatctcgaaccggatcaagcacatgcccaaggggaagccctttgctggcgcggttttcgcgcaggtgggctcacgcgcctcggtagacaaggcgctgtcccgcatggttctcagcggctccctggagcgcgttgcacgcggtgtgtacatgcgccccaaacagagcgaatacaccggcaagaaggttcgtgccaaccccattgcggtcatggaagtggtcgccaaggcgagaggcgagacaatccaggttcacggagtcgaggccgcacgccggctggggctgagcacacagatgcaagttctcccgacctactacaccagcggatcgacccgtgaaatcaggatcggtaacgcggttgttcggttgcgccatgcgtctcggcagcgactccagcaagccggcacccaggttggcgtggctctgactgcactgctgtatctcgggaaagaggggctgactgagcaggcggtagaaaagatcgccagctcgctcagcgttgaggaattcaacaagctcatggcctgcaaaatgcctgagtggatgcggtcggcgttggccggttccgctaaggaatttgcgtgccaaagtcgtacttcgatctaccccaagctggtcaacgcgaaatcctag

SEQ ID NO: 359330 - DNA, 1035 bp, Pseudomonas aeruginosa
gtgccaaagtcgtacttcgatctaccccaagctggtcaacgcgaaatcctagacgaggctttcagcgagactggtcgctcgcccagcgtcatcgagaaggacatttggctgacgctggtgctccagctgctgtttgccatgcccggtcgcaaggccatggcgttcaagggtgggaccagcctctcgaaagtgcatggcgtgattaagcgcttctctgaggacgtggacattaccgtggattacagggagttgggttgcaagctcagcatcccagagcttcttgagctatcgagaagaaagagagacgcggtaggggaggcacttaaagcagaggtgggccgttacacccgtgatgccgtgctgccctatctgatcgagcagcttcaaagctacggatgcgcatccgaatgtcagctttccgtgagcgatgacggcgagtcgatccacgtccattacccagccatggcagccgacgccaagggctatctgcgtgatcatgtgctggttgaactcggcggtcggaacatcatcgacccgaatgcggttcactccatccagccagatattgccggcatgttcgaggggatcgtcttcccaaaggccgagcaggtagtggtgctctcgccggccaggactttctgggagaaggtcacgctgattcatgcgcagtgcaacaagcccattgccgagggcaaggatcgaatctcgcgccactggtacgacctatccaggctgctcaaccatgaagtgggagcagccgccaagaatgacctcgaactgctcaatgacgtgatagcgctcaagtccgttttcttcaacagcggaacggcgcactacggcaggtgtgttgctggcgagctgaacctgatccccgatggtcagaacttcgaccggctggagagcgactactacgccatggagcgctcaggcatgctgaacggacatttctatccgttgggcggcatcatggaagacctcactgcgctacaggagcatgttaatcagcttgcgcggaacaggaaggcagcggtctag

SEQ ID NO: 359331 - DNA, 669 bp, Pseudomonas aeruginosa
atgggatgggctgcgaagcacaacccaaaggcgcggttgacgattcgcgtcggcagcggcaagaaaacctacctctcccacccccgcgacgttgcagaaaacgcgcacatgaccctcacttacggggtcaagatggtcgcgagcaaatcagacccgacctacatctgcaagtggctaacctctcgggaggtgcatgagcgcgggtactatggcggtcagatcaacttgctgaatgtccttgcccacaccatggcgcacgaattcgggcacttcgtccaggtcatccttgggagacgatatgacggctcggtacacaaccaggaattctatgtgatcctggaccggattcacgcgagcggtgaaggcgataagatcagggatgccttgcaccaaaactgcctgctgcatggcatagacctcagcagaatcagcgccagccaggaaggcctcaacatgctggcaggcaagcttccaaacggcgagaagccgctgggcatgcgtgaaatctatcgacaccagaagctctggttccgcgacccggcaatgcactcagtagggccggttcgggtgaaagagaagcgccgaaccaagatcgtagtcgagacggtcgaggaaccgaaaagacgctgggagggctaccctgccggcttcaccaccacgcagccctag

SEQ ID NO: 359332 - DNA, 162 bp, Pseudomonas aeruginosa
atggcgacggtcaatccctggcatcgattcatcgggctcttatcgggcggtgcacatacgttggaggaggtggtcgacgtcgacgagggcgtcggcacctgccgcgtccgcctgcgaaacaacatcgtgatcgcggctcgggacacggcggtgccgaaatga

SEQ ID NO: 359333 - DNA, 2682 bp, Pseudomonas aeruginosa
atgtcccttattgcccaccttcaaaacctcgataacgacaccctggtgcttgcagcgaccgagcgagtgtcccggcatatcaaaatgcaggcggctctgttgcagtccattgctggcaagcgttcctggtttgctaagggcaaggtgcgcactatcacccaatggatcgaggaagtgtggctagagcagttgcccagcgagcagctgctttacccagttcaggaactcgcagtggttaagagcgtggctgaccgctcgggccttctgcctgaaaacttaatttcctcgaccagcacggcacgtcgcatcgctcaggcctactcgacgttcatcaagtacaagctgcctcatgatcaggatcgctttcgcttcaagcgcgagtacgaggtgttctggcagtggcgagcgctgatcgaagccgagtgtcgcaaaagtgggtgcgtgttccgtgcggagcttcccgcactggtgctgagcgctatccaggccggcgaggtggacttgccgcgtaaggttgtgatggtcggcgtgctgtacctgaacccatcggagcgtgcgattctcgaagcactacaggcgaagggtgtggaggttgtagaactcgatcttgagggcgaagccattacgcccaggctgagccgtgccgtcacgcaggcggatgaattcgagcaggtggctgaatgggtgaacgctactctcaagccttacatcgaaacgccccatgcagcgcccaccattgcgatactggttccggccatggatacccaccaagcgcctctgatcgaagctttgacgatgagcgtgagcccggcgtcgttgctgccgattaaggatggtgtagaggtgcgcgaaccatgggatatttccagcggggccacactgggcgctcgcccgatgatccgcgctgccatgggcatcctgtcgatcaccaaccgcgaggcggatgcagatgttttcagccgagtgctgcgctctagctgggtaggtggccacgtcagtgaaggtgcgcagcgggcattggtcgatgtttggctgcgagagaacaacggtctgaatatgggaggtaaggactaccttcgtgctctagctgcctgcaaggtgagctgccctatcttcaccgagaatctgcggcacgttctggcctcccaggaagacgacagtgaagatcgctatccgtctgagtgggccgacttctttaccgcgagcctgaccaagatgggctggccggaggccgagacactttccagcgcaaactaccagaccctggaggcttgggaagaagccctcaaggtgttccgttcgctggactatcagctggggcattgcacctatcagcgtgcctacatgtggatgcgtgaaatagttgataccttgcagttccagccccgcctcagtcatgttgcacccgtagcaatcatgacctatgcggatgcggtcggcctgagcttcgatcatgtatggatgctgggggctaccagcaaagtgttgcctctgcccgctgatccgaacccgttcctgcccctggagttgctaaccgctgccggcgtccccgaggcgactggtgaaggccagctcgaaaaggcacagcgtgtagttcaggctttgatgactaccagcaacgacattaccgtttcctgtttcgagcacgatgatcgcggcagtaatgtcggcccgtctgtgttgttcggtgagtggccggcgcctcagcgtagcaacgttgcctggggtggctttgtcggcaatgaagtcggcagcctgaaccgcgatgactatcaggaagaagctatcccagccgttggtgacgaggaacgtaagcagatcaagggcggtgtgagtgttttccagaactatgcggtagagccgttctttgccttcgcatgcaaccgcctgggagccaaggaattcccggttccggtgttcggttttgatccgcgcattcagggcaccatgctccacaagtgccttgagttcttctggactgctgttcgcacgcaggagaagctgaaatcgttcacgcaggatgagctggatgccgaggtggctcaggcaatcgagcaggccagtgtggcactgttgtacaaactccaatggcgctacggtcgccgcctgataggcctggagcagaaccgcctgcacactctgctgatggcttggatggaggtcgagaaggcccgtcactatcccttcgaggtgattggtttcgagcgacgcaccgaggtcaacgtcttcggtgttgagctgacggtgagcctcgaccggatcgacaagattttcgctcccggcgacgttacctattccatgctgttcgactacaagtcgggcgccaacttcactttcaagcggttgaatgcagagaagctgttggagccacagctcccgatctatgccacaacggttgaccctgacgccctaggtgttccctcgattgacgggatcacgctggcgcaaatcaaccccaagaagctgcacactcacacccgcagttcgttcaccgctaagctcgatggctcggcatcggacaagaatgacgtgtgccagccatccgaatgggctgcgcaagtagctgcgtgggagggggctctggaagaaatggctgatggtttcctcggagggaatggctgcctgtcgtcgttcgataaggcgctgcctatggggtatgaacatctggcgccgttgatctga

SEQ ID NO: 359334 - DNA, 306 bp, Pseudomonas aeruginosa
atggacttcaaatcactcgggctgcacgcgccaacactcaatgggggcgcaaaggcaggggcctacatcggcattgcttgtgcggtcatgtatctactcacttcgctgggtgccatatcgccctggatggcgtcggccctcctgatgggcatcgctggtgctgaactggcctctgcttttggggtgtcgtacaagaagcagggggcagttgcgctggtgttggtctgtgccagctccgcgttgctggcggctctctgcctattggtcgtgcaggtatcgggattcgcttctcacatcctctcttag

SEQ ID NO: 359335 - DNA, 3318 bp, Pseudomonas aeruginosa
atgaccgctcaagctcgaatcgaatccaagatttcccacctgacgccgatcatggcagccattgccgcgactaacccgcatgatgctgatgtgcgtgcgctgtcgattgatccggctcgctctgttgcattgctggcgccggcaggctcgggcaagactacccagctcctgtatcgtctccttgcatgcctcacagtcgttcagcgaccggaagaaattctggccattaccttcaccaacaaggctgctggtgaaatcgttgagcgtgtaaccggcgccctggctcttgcagcttctgggcgtgagccgctagaggctcatgagaagccgctttacatgcttgcgcgtctggtgcttgagcgtgatgccctttgtgggtggaaccttgcgctgaacccctctcgcctacgcatcatgaccttcgactctttctgcgctcagatcgccggcaagatgccgatcatgtccgggttgggcggtgggcgtacttcggatgatccctcgctgatctaccgggccgcgattctcaataccctcggcagcgtaaatgacgagtcgattccctctgtgctgcgtgaggcactggaggctgtactgggcttcgcacgaaaccagtttgagctgctggtgccgatgttcaccacgcttctcaccaagcgggatcagtgggtaggcgagctgctgaatatgagcggcgatgaactctctgaggcgctgcgcgagatagtagagacggaaatgtctggtgctctggccgtgctggacaagtacgacttcaacacctgctggagcatctttgctgacgccagcggggtgcatgagcaccatagctgggccgcatatggccgggtcgatatgaccgatgaaggtcgagactttgctcggcgtgccgccaaagcgctgctcaaggccgacaacatgatccgctccaaggtcacggcccgcgaggggtttccagctaaggaggcgctgacctctcggatgaatggcttcctcggctcgctgactggcgaccccgaggtggacaaggctctaatcctgctgcgtgacctgcctgatcctcaatatccggctgagtccgcacgcatgatggaacacctgacggtgatcctgcgctacctgatggccaacctgatgctggcgttcgatggcgctgctgccgttgacttccccgaggttgcccagcgggcgattctctctctgggtgctggggttgaaattggtgatgccctgctggacgaggatcgtgtctgccacctgctggttgatgaaaaccaggatacgtctccggctcagtaccagttgctgcgctgccttgtgcaagcctgggaagaagatgacgagcgcagcgtcttcatgtgcggcgacaagtaccagtcgatctatctgttccgtggcgccaccgtcaatctgttcaccgataccgtggagcaagcccgcttcgggcctaagcgcctcgacgtttaccacctgcgcgtgaacttccgttcttcaccgaccatcgtcgagtggaacaacaaggtctacggctcgctgttccagggagcgggcagcagctttgtgccgtctgtgccgtttcgctctaaccctggcctcgtaacggtcgaggctttgcaatcgtccgaggcagaagctcaacgtgtcgtgcagttggtgcaggacgcttttcgtgaagacccagagcagtcggtggcaatcctggtgcgcgggcgctcgcacctgaaacacatccttcccgcgctcaagcatgctggcattggtgctagcggcaccgatattgaccctatcgcggaatgcgccccggtagccgaggttgtagcgatgatccgctccctttggcaccaagctgatcgcacttcctggcttgccctgctgcgagctgccttcgtgggcctgagctgggaagactgcctgactgtcagcatgggtcatgaggtgatcccagtcgcgctgagaatgagcgatgtgcaggagcgtttgacactggacggaaaggcacgcgtcaatcgccttgtcgaagcccttgatggcgtggagaagtcttctcgcagcgatgagctggcatggaaagctcgcgccctgtggttggcactaggcggcatgtccactgttgaccagactgagctggcagacattaagacagtcttcaagctgctcggcacccacactgctaccggcgacctggacaatccgcaggaatttttcaacgcgctcaccaatctgtacgcctcgccgaaggccggtgtggtgcagatcatgaccatccacaagtccaaaggcttggagtttggcaccgtgattatcccggccctgcaaaagagcggcggaagcgatgacactccgctgttctactggcgcaccatcaacggtcggttcttcatggctcccaatatgggggatcaggatgctatgtcccctgagagccgcctgttcaaattcctgggctctcgcgtcaaggcggatcaccgtgatgagctggagcgggttgcctacgtgggcttcactcgcgccaagtcgcgactgcacctgaccgcctgcaaggacgttgagaacgaggatgctggggcctctaactcgctactgggtagcctcaagcgtgtgctggctgatgagtttgtcgaggcagacgtggatgtgatcgagctggatgttgctggcggagtcccgtcgaaagctcggctggatgcggggcactacgtcgagctgccgactgattgcttcatccctgcggccacgaacgaagcccttccgaccgaaagcgaactccatgatgaattgcgcgaaggggagggtgatgaccacaaggcgaaggttgagggcatcgtctaccaccgggtcgtcgaaatgatcgccaaggacggacttgagaagtggagcatcgacaagctgcttggtaaggcccaggcggtagccgcgctcatgcgcagggagggatacccgatccgggatattccgactggccgcgaccgcatcatgaagctgttggtcacgactctgcaaagtgagaaggggcgctggattctctccaagcacgatgaaggcggtcaggaagtacaggtcagcgggttccgcaatggccgctgggttcaccgctaccttgatcgcccgttcgttgatgccggcgcctactggatcactgactggaagacaggcgactgccccgaaggggttgaggttgaagccttcctagcggccatcgcagcccgctatcgcaagaagatggaggaataccgggcagcggttatcgaggctggcgtgacactgccggttaagcttgggctttatctgccggctgtggatcgcttcgtcgaggtgtga

SEQ ID NO: 359336 - DNA, 531 bp, Pseudomonas aeruginosa
atgacatacatcctgggagccctgcttcttctcgtagcaatcttcttcgtacagaagaagtcagcagccggcgcaatccattctcgcttcggagttcgggaatcgacgcatcgactgatcagcaccgatcttgggaacgcagcaggccgaatcaagctgtcccgatttggcatcaatggaatcgcagatgctgtcttcgagtcggtcaagggaagcgaaattctggttggcgagttcaagagccgcaaatacagagggcaggttcggctatatgagctatatcagctcatcctgtatatgggtcacatcaaggcgctgtaccccaaccacaaggtactgggctgcttagcgtatgcagatagcagagtacaggtgaacttcgaccctgcggtgtatgaagccttggtcggattgcgagaagaatactggctgaccgtcaggcacaagcgtgctgccgactccaggccgctgcataagcggatgaaggtgagcggggaaaacagagcactgcgcctttcagcacgtctttga

SEQ ID NO: 359337 - DNA, 705 bp, Pseudomonas aeruginosa
atggccagcagcattagctttgtcggctccaatggcttgatggacgtgccggcgccgccttggatcaggactgacgcgatccttttcgccagctgggggcagctgctgctggccatgatcaagcatggcgcggttgagactgtccgaaagggcgagcagctgtccatgaagcctgctgagtttggcctgctcatcgatggagggctctacgcaacagactcgccgcccggcaatgaatccagggctctattgatcgattttctgcgccgtggcgacctgttcatccccaccataagcggcaacttgaagatcacccttacccctcactgcaaaacaacgtgcttgatcgttcgtgaggccgcgctgggcgccttcaaggccgagttcgagacttgggatatgtgtgagccaatcctctgcgccgatatggcccaggcatattcgcaagctgtcagcgcttccatagggaaagaccaggacaaaatccgccgtgtcttgtcgatcatggccagccaccctaccgccattgactccaagcttgggcgagagattgaggcgggcaaacaactgatacgcgacctcgccggggtgcagaagcgttctgccacccgagcttttcgcttcctagaggatgcgggtgaggtcagcttctacgggtacaaacgactgttctacaggggccaacaggcgcatccccaggcttga

SEQ ID NO: 359338 - DNA, 201 bp, Pseudomonas aeruginosa
atgcggatgcgcgaaatgcgaaaggaagactctaccaagggcgtctacctgtcgcagtcattgcgctaccgaaatgtgctcctggtaattgagcccacttacgatctgatgaccggcctgaacggcgttgagctgccttctgatgtgaacgtcaggattgagccttacgagaatcagtacgaactcagggaggaccgttga

SEQ ID NO: 359339 - DNA, 999 bp, Pseudomonas aeruginosa
atgcagtacatccacaatttccttgcgagaatgaattcgcgcctgggcgctgtcacttggcaaatgcaaagtctgctgctttgcaccgtgttttggttcgtaacagtcgcaagttcgattccgtttagcgacggaggaatcagtgccctgacactgaatcagtgccttgaggacttcggtgtcttcctgcttttcttctcgatgtggtgcgggctctatgcccacttccaacgcaacattaccctcccctggctgcttttgcttctggccgttgctctctggcaggaagaaatcaacctgctgaacaagacgtaccagacactcaatctttggttcgaccgcgagattgattcatcagagcgccagcgaggcgatgtaacgatcctcatgctggtagccacgaccctggtcgcacgtttcttcacgccgggcttcaagagcttttttaggattcatatcactgcattcctgttgctctacaccgttttccagctctggctgcattacacgttcccgtaccaaatgcaggcagcgatccttgagcctcagctcaattaccagaaggagttcacgtcaacatacgaggggaggttccaataccagtgcgaccaaggcctctggacctgctatagctggaagggcgcgagcatccctgaccagctgctggatgatgaggggttgatgcaggtgatcaggagccatgaaggcgtagtgatgaacaccacgggctacatcggcacactttcatcgccaaacgacaccgttttccgaggcgttgatgcggagcagaagtacctgatcacgtacttcaagaaccatgacctgaacagggttgtgattgatcacgactccccgaagaaagccgcccaagtggtcactcggccactggtgattttctcaaccgcattcggcatggcctggttctttggcgggatgatgatcgtctttatgcaccagtccagattctcatcacggaaggcgcgcttggtcactacgtga

SEQ ID NO: 359340 - DNA, 369 bp, Pseudomonas aeruginosa
atgtctgagtctgagcgtcgcttccaacgttatgtcctggctcccgatgcctttgccagtcagcgtgccaagggcactgggctgaccgcattgctcaagggctggaaggactgtcgggttaaggacatgtccgctgctggcgccttgctgctcaccaagcaggagttctcccttggaggcgggatcgaggtcgagctgaccgagaaaagcggaaaccgcttggtgttcaagggggaggtagtaaatctcggcaaggatcaccacaccaacctgaacaagctgggcgtaaggctggatgtgcccggcgaggggtcactggaagcccggttccttgctggcctggaatcacggttcaagcccagccattaa

SEQ ID NO: 359341 - DNA, 1137 bp, Pseudomonas aeruginosa
gtggttaagcgcttcgccatcctcgcgctatgcgcggcttccattcaaacagcgcaagctggaggcggaacgctgtccgcgccactgcgtgagcagcctgtacggctccatgcagttgtcagcgtcggcaccacaagcgtttgcggcatgcgcgaagctccgcacctgattgagcatcttcttctgagcgacactcatctgggcgaaaccccggtcgatgccatccttgcgttgcgtgcaaaggggatcaagctttccgccctaactcggagcgactttaccgagtacacgcttgaaggtcccgcgagcatggccagcgtcatgagcgaagcccttgtcaccttcctctcacgaccctcacttcccaagacaggttttgagcgagagaagcgcgtgatcattagcgaagtgatggccacctcagcctacgtcagttcgccgacactgtatgagcgcttcattgccgcaaaggccggtgggcaagcctcatgctcagcagattcggaacggctgctcgactacggctttgaggatgtgcagtcgatctatagggcgtactacacccctggcaatgttcgcgtcttagctaatgccgcgcctgggacattcgatcttgacgctatcagcgcagctatcggggtgcgggaaagcacgacaatcgccgcttcccattatgggaagcgggaggcgactggctcgatagaggtgattggccgacccggtgtcgttgagctgatattcccaatcgcgggcagagccaaactccccagcgacgcagctaacgcactagccgaccaagccagacttgaagtacaggctcacattcgccgggttcatgagctgtacgccgcacggtcttttgttgatcagagcgttcacgggggctggattcgcctggagatacccggcctggacaatcgcgacgcacctcgcctcgctgaaatagcccaagccgcgatgcaccgcgttgacctttcactctatggcgatgacctactgtggcagtcttatggcgccgatgctgctttgagccccatgggcgaccccgtgatcccagaagcaccaattgcaaagcaaggctggctgcaatccattgctagcagcttatggtcatttttggctggtctgtggtggtaa

SEQ ID NO: 359342 - DNA, 1056 bp, Pseudomonas aeruginosa
atggctgtggccagagcctatggatacaggcgcctggacctgaacacgcttgagctgaccgagcccgttaccggcctacagtacgttcgcccttacgctgaaatgctcaagcaagacccggtgcatcaactgatggacttcatgcgcatgtccctgaacctctcactctcccagaatgaggacgttcgcaggggggttcctgagcgcaacatcgtagcggccatgagtggcttctcgaacttcgacgccctgctcaactatgcccgctccgatccggttgacccgaacacgactgatcgcgcaatgctggccaagttccaggggcgctatggctattacgcccctatccagtacctcctgggacgctatatccacgagcactgcctagtcatccagcctgacgcggaaaaagcgcagcgcttcgttgatcaggaggtaatccttaaccccctcgaaaacaccaaggtggttatcctccgggacgatcctcgcggcgccgactggctttcggttatgtctcggaacgtgccgtcgcttcgcggcgagcttgatgccacctacgaggatagggctctaaaagccatgggcaacgccaacgccctcgtatcactggtggagccagctctttactcgctgccagacctcgttgccgcacattccggcttgctggcaaaggattcgccggaagggcgcacactcatagttgatgttcaacgcctgcggctcgatccgaatgaactggacaccggctttgccgccgcgacggagagcggcatccacgttgtcgttatagtcaggcagcccaatgcagacctgtggaaacgtaccggcatccacctgatcttcgggttcgacaaggacattcaggagtcctacctggaaatggacaagtacatcgggtacgcgtcgccatacgttggcttcaagcgcgggaaaatgcagtacctgtaccactctgaacagtcaggtggtcgcttcggtgccatggacctgatccctgacgacgaaaagaccaagagcctattggaacgaatgaaggacgcaatacgtggttaa

SEQ ID NO: 359343 - DNA, 951 bp, Pseudomonas aeruginosa
atggatgagagaatgacgatctacatcagcccccagcagggcatcaaagagctggtcaataagctagagagccgcttggacacactcgtcaacaggatgcgggcgcggccagatcgactccgggtagaccttgcctatcaaattccctttcgggatcaagcgaccgtcgatgaacagaagggcatcgaggtgtgtgcgctctcagggcaggaagcggccttccacgccatctacggtcttaccgctatccgaattgaacagggcaagcagaacccccgagaaaccctcagagtccctggtgttatcgctttgccgcccgactggctctcggagctttacgagctaaacatcgtcaagcatgaaatcgaactactggtggcccagatcgaagatcagtacgaccgaatgaagctctgggggtcaatgaagtatctatcgagcctgcaaacaatgaggcaggcctggattatcagcggcccggccaaagtgcggttctactgggactctgccccctccatccaaaacaagacagcttctgaatgggtggccagctatacgaagcacctcaagaagctatacggctatgtcccctccctagacgagcttgtcgagggggacagctcgcgcaaattcgtggttgccatcagcatgctgagcgggacaaacaccgacatagcgccaaacgagaagatcgcctcgttccggcacggccagccccacgtcagggccagggtcactttcatcgacaaggtaaaggctcagattcgccctgctccgacccctattgtctaccccatcgacgatccagtgcccaagatcacgccactatcaaactgggagccagtagaacgaggcccaggccggtcggatcgagcaaagatcgaatccgagccattcgtggaagccctgtatctccatcgctatctggagcagtacaggtttggtcagtga

SEQ ID NO: 359344 - DNA, 1647 bp, Pseudomonas aeruginosa
gtgagcctgaataagcttttcaactcagccccgaaccttggggttgtcgccacgaagtggtttgccgacctcgaaaagaaattcgtcgcggcgggcattaagaccagcgtcaaaaccggcattgatggagcggcatcattgctggcgccggcagccctgatcgctcagctgatcgagctagaggggtgctcggtggatcgcccggttcgggtacttatgatcactgatgacccggtggctgtgatggatgaaggcgtatggcttagcttcgcctctgagcttgctggcgtgggggaggttgagtgttacagcacatgccatgaagttctccattccagcctgttcgacagcgcaacccggcttggcttgaaagggttctgccccgtaactgtggaaaatgctaaggcccaagcatgggatttggtagtttgggttcacccggctattgaggccggcgccagtgacgagcttgttcggctcgtcaaagggatgactgtggcgggcgtgccggtctatgcctgcatgtacaacgagctggacgcactgatccagagccatggggttaatccagaggggcttgagttcagttggctaaacggtcccctggagagcacggcgttcagccgcaagactgtgaacagattcggatactccacttccgaggttgggattgaaggggggtggggtgccgttctgacaaaggtgcagccggcctctgtgtcgtccagtgacgccgactgggactgcatcaagacagcaatggggttgttcaagttggacggctcgacctctggcccatggacctttgggcaggtcgttgctggtgtggcattcaaccagcatcagccggttgggctgataggcaatctcgccgttgatcccaagactggggtgcttctgaaagagtgcccgaatacgaaagtgctgatggtgataggtcatctgtggagcctgccgctgcaaacaatgccgcaaggcctttttgagctggtgccgtgggctgccagagtcaggctcttggcaacgagccacctgaccaaggaggacaagaagcgtgctgagtctatcgagcttctgacgaaggcctatgagtccggcatggttgaagcgggcattgcattggccagggggtatgaggcgataggcacagtcagtgcgaaggcgcaggcggcagcaatctacgatgagattggggctcggcacccgatgagcgcctattacctcgcgcataaagcactgggcgagggggatagggcgcagttgatcagcctgcttacagcctcatcgtgcgaaggctacgcgccggcaattactgatctgggttgcttgaggctcgacgagggcgacctgcaagaagcgattcgccttttcgagtcagcagaggctaagggcgatggtgaggcctcattccgtctcggtgagattgccatcaagaatggagagtacgagggcgctctgcggaagctcagggctgcgtggagcaaggggcatcaggatgcactgaacgtgtcccactggctttgcaaggaaatgctcacgcatggacttgggaagcccagccgactcaagcgcgaattgaaggaaatcaattttgcaataggcaaacgtctccggtacgagcaccaaacggagcgagccagtgcataa

SEQ ID NO: 359345 - DNA, 600 bp, Pseudomonas aeruginosa
gtgcataaacgcgctccaaggaaggtgctcattggcatggtgttggtggccatgtccggtttctcagtggcccaaccagagccagtgatcaacttccagatacgccactacgatgtgtctggcatgacgactgccgaaatctcgcagtcggtgttcaaaaatacccccgttaagatgaaaggcgggcgattcggcgcggtcacgcacaacagtttttccaccagctactcagctgtagcaacttcccaaggggggtgtgaggtcaagaacgccagggtggcccttgatagcaccatcgtcttgcctcggctgatccagggcggacaaagccctagcgtcttggctgaatgggagcggtacataggcgcgcttcgtgctcatgaacagctgcatgccaataacgggaaattcactgccgagacacttgcctccaggctgtatgccttcaagtccaacttgccttgcccgcaaatgagggctcgcctcgacgaggcggtagatcgcctaattcagaacatgggggcgtgggatcagcgcctcgatgctgaaacccagcacggcaaaagtcagggtgccttcttgcgtccagtgttccgctaa

SEQ ID NO: 359346 - DNA, 1269 bp, Pseudomonas aeruginosa
atgctccgacgccaagcctacaagttccgcatcgagccaaccggcgaacagcagcgcaagctgcgacagttcgccggagcctgccgctgcgtgttcaatgaggcgctgacgttgcagcagagaaaccgcgaagacggcggcaaatatatcggctatgtggcgatggccaagcaactcacagcctggcgcaacggtgcgctgttgccctccgggcggctggcgccctggctgaaggttgccccggtgcatcccttgcagcacgccctcaaagacctcgaccgggcctaccagaatttcttcgagaagcgtgccgacttccctcgcttcaagaagcgcggcctgcacgacagcttccgcttccccgactccaagcagttcaagctcgaccagggcaacaaccggattttcctgcccaagctgggctggctgcgctaccgaaacagccggcaggtgctcggcaccctcaagaacgtcacggtcagcctgagcgccggccactggtacgtttcgatccagacggagcgagaagtggcggtgccgctgcacgccgccccgctcgcggttggcatcgacctcggcgtggtgcgcttcgccaccctctgggatggggagcgggaaacggtgctggaaccactcaacaccttcgcccgccaccagcaccgactggccaaggcccagcggcagatggcccgcaagaccaaattcagcagcaactggaaaaaggccaaggctcgggttcagcgcatccagcgccagatcgccaatgcccgagccgactacctgcacaaagcgacgaccgccatcagcaaaagccacgcgttggtgatcgtcgaagacctccaggtagccagcatgacccgttcggccagcggcaccgccgagcaacccggcagccgggttcggcagaaggccgggctcaaccgctcgatcctggatcagggctggggcgagttcgcccgccagctcgactacaagaccgcctgggaaggtggctggctggaagcggtcccgccgcatcgcaccagtcaggaatgcccggcctgcggcttcacccatgccgacaaccgccagagtcaggccgttttcctgtgcctggcctgccgccaccgcgagaatgccgacacagtggctgcgaaaaacatccgtgagcgcggattgaaacagctcgaagggcaggaccatgcccggatcgcctgtggagtgaacggcgctgtcaggccgtcagcagcaggaacccaccgaagcgacgacgcggcgaaagccgcctag

SEQ ID NO: 359347 - DNA, 588 bp, Pseudomonas aeruginosa
  misc_feature (567)..(576): n is a, c, g, or t
atggaagcagctaaaactcccgaacagattgcgaatatacgcacggtgggtatccgcgctaatactcttggcatgtcttctgcccaagcatcaaaaacacaacaggatatcatcaacaggagggttcgcggtcgtgatgactatggtgtaaccagagagagtattcagtttgagcggcgtcaacgtgaagcggtcaaatttctgaaagatgaactccctattgctaacagccatataaccggggacatagggtacagaatccctaccgaaagctattttcgttccatgattgatgaggaaggcgggcttgatggcagttcttcccctatgtttaatagcttgtccacctcagactccaaatttgctgaaatgacaccgaatggtgcggctcaacctgctcttggcacagggactgactcatatttttatccaaaaaattgctacgagctttacctcgtagccaatgagacgatgaaaaaccttcgtcgtggagtttacggaagcgatcagagtacagaactctcaaatagtaataattatgaatctgcaaccacagcaaacattttnnnnnnnnnngggcataactga

SEQ ID NO: 359348 - DNA, 444 bp, Pseudomonas aeruginosa
atgcaacagcagacttggactaacccccttcttcgtctctgcgccggcctggcctgcgcgctgaccctggcagcgtgctccaccagcaaggaggagatgctgccccacggcgaggccaacatgctcgacgtctgggagcgaggtgcgaccagctcgataggcaacagccgtggccggctgctcctcgatgccaggcaaacgctgcggcgcccaatcgatccgcagcaggctgcctccgcgaatgaccaggccgactacacccgcacggccagcaacgagatccacagccagttcaaacgactgcccaatcccgacctggtgatgtatgtgttcccgcacctggccggcagcgatcccgccccggtcccgggctacaccaccgtgttccccttctaccagcgagtccagtacgccatgccgggcgaacgcacggaggactattga

SEQ ID NO: 359349 - DNA, 276 bp, Pseudomonas aeruginosa
gtgctggcacacgcagtctccggcaatgaactttggactgtcgtaaaacgaaccttccaccttgccggattctatttcggcaagccggccggtcactcgatcaccatgatcgagctgcacttgctggactgctcggccgggcaatggggctacaagaccattccggagaaagcaggcccgttctactacggctgtccgctggagttcctggacctggctcacgatgagatcaaccaggaatggcgagaccgtctgacgcaagaacaccaagcctga

SEQ ID NO: 359350 - DNA, 180 bp, Pseudomonas aeruginosa
atggacctggtggaccagttgatcaagacggacatcgacactgcacagtcgaagggcattacagcgaccccgaccctcgtcatccgggacaaccagacgggacgaagcgtgaagcttgaaggcatggccgacgagaccacgttgctgtcggcgatagactggctagccaaggatctctag

SEQ ID NO: 359351 - DNA, 222 bp, Pseudomonas aeruginosa
atgcaaaccatccagaacttcggctatgacggagcgatgctcctcgcactgctcatctgcgcggctgtctttctgggggtcgcttggcatacctacggcacctatcacgccatccatgacgggaagaagaagtggtcggatctcggcgcgggcgtagccgtaggtgtcggcctgctgatcttgatcatttatctcgtcaccaaagccaccgccatcatgtaa

SEQ ID NO: 359352 - DNA, 222 bp, Pseudomonas aeruginosa; identical to SEQ ID NO: 340273

SEQ ID NO: 359353 - DNA, 510 bp, Pseudomonas aeruginosa
atgagcaaacacaccgtacattcgtcctatcgcgaaaaactgttagagcacctgtttgttagtgagctgctcaagcgctcgtggtgtctcgatcgttgcgacctggaggtggccaagcctgaggtcgacaatgctggctacgacatcatccttgaggctcatggccacacccggcacgtgcagctcaaagcctcctttcagggctccagcacccctaagcaaaaggtcaacttacgcttggccgaaaagccttctggctgcgtcgtgtggatctactttgaggaggaaaccctagccctggggccttacctatacttcggtggtgagcctggccaacccctgccctccctcgcgggcaccaaggtagccaaacacaccaaagccgagcacaccgggaagaaagcagagcgtccaaacattcgcgaactcaaccgcggggaattcaccgcttttgacagcctggaaggcatctacaccgccctattcggtgcagcaccggcaccgctctaa

SEQ ID NO: 359354 - DNA, 1122 bp, Pseudomonas aeruginosa
atgtcgagcttcgctgaactactgcagcaaggtgcgtcgcacgcctggctgtacttccccagtgcgatcctacttggtgccctccacggccttgagcccggccattccaaaaccatgatggcggccttcatcgtcgcgattcgaggcagtgtgaagcaggccgtactgctcggcctggcggccaccgtttcgcataccgccgtcgtctggctagtggcgctgggtggtatgtacctgggccagaatctggatgccgaaaccaccgaaccctatttccagctagcttcggccgtcatcatcgtggcgatcgcgctttggatgctttggcgcacctggcgtggtgagcagatgtggcgtttcgagggcggtgatgatcaccaccatcacgaccacaacgagacgcgtcgtgtcgatacaggtcatgggcatgtcgagctgtcgattttcgaggacggcgttcccccccactggcggttgacggtacttagcggtcacgcgtggccagctggcgaagtcagtgtgctcaccgaacgtgctgacggcgaatcacgccagttccgttttgccgaccgaggtggctacctagagtcgctggacgcgatccccgagcctcacgagttcactgcccgactgagcctggggcatgcggggcattcgcatgactacgacttggaatttcatgaacatgaccactcccacgaccatgccgagaacgacgggttagagctgtcgtcggagggctaccaagacgctcacgagcgcgcgcacgccaatgacattcgcaagcgtttcagcaaccggaacgtcacgactggccaggtgatcctatttggcctcactggcggacttatcccctgcccagcggctattaccgtgttgctcttgtgcctgcaggtgaaagaggtggccttgggcgccgtgctggtggtgtgcttcagcattggcttggcactgaccctggttacggtcgggatcgctgcggcagttggcgcaagacaggcatcgaatcgctggccttggttgggaacggttgctcgccgcgcaccctacctttccagcgcactgatcatcgcggttggcatctacgtcggttggcatggctgggttggactagccggatag

SEQ ID NO: 359355 - DNA, 2148 bp, Pseudomonas aeruginosa
atgagcgcatcgttgataccactggaaagcgaagtcacggcctggctcgtaaaactgatcgaaagcgaaggtttacatgacgctatcgctggaaaggaggccttggcatcaatagccgaaggcgtgcgccaggcccacttcattccctcatttggtatcgactatagatccagattagcctccgcagaggcagctgagcatgtgctcaatcagctgacattgctagaaatcatctccattaatatgagcatctctcttacaactggagaggtgcttcgaccggacattctttgcttcaacccggaatcaagaacgctggttgttttcgagatcaagagagcggcagaggctgagcgccagacagtcactgagctgggaggctatgagcaggagttgagaaaccttctgccatttgtaggtgactacgacatctgtttcgtggtggtagccactgagtggtctacccttttgagccacgcagtgggcgcattaaatgcctggtcgggtaaaaggtgcctcgccctcaagcttgctctcgatgtacccggcaaggatttaagtctgagctgctacctcccggaagcttggcacctaaccggaagccctgcgctcgcccccgaggcattgcagaccattaatctttacttaatagaagatgaaccagacatggacgaagactggccaccaaggtcagttttaaccgccatggatgtgatggctcgtgctggtgatcgagccgggtctcacgggttcatgatgctatggaaggatgtcaatggcatggggagatgtgtctggggcctaaccctttgcggtattgatccatacgtgatgcatgcatggtggagagaccacggcctgcctcagcgcgattctgacatcgcccttttcttcgatagaaagcgagccgatatgcccggactcgtaccaggctccatttttgcgcatgtcgacgaagcgagagctctgctctctgatcgctacgatcttgagctagaggacgcatttagctgggagatgcaaatcaagactctgcgcatccaagccctgccgagacggttcgagttctggggcagccttggccaatacgctcagaagtttgtctgcaacccaagcgttcgtgaccggtatatgccctacattggtcacaatgatctggactggaccgacccagacgtcgcacttccgcttcttcaaaacctctcacaaggcactccgttcccaggtgggcagatacgctgtagcgacgcgttcaaagtaggcatggctatcggcacacttatcttagctttgaggaatgcagtggccagcgaagctgcggcgttgaaactagaaccgctcgttcgctggtcacaatacgaagcgcttcgctacgcgattgaaatgaagcagatcagtgatggaacagatgatattgaggagccaatacctaccctgacgaataataccgagaaaagactgcaggctgcggaggcgatgagactttggattttttcccacctccttggggatgatcatcccgtccatcagcattgctttgaactcggatgtagcgggccatttctgttcggtgacttggcattacaacttggctatcagcttccccaagagccccgagatcagatgcttggtgagctgcgcgaaatcatgaaacgagtgatctcgcaggttgcgtccagcgtggggtatcaagtccgtagcgactcctacaaggcgtttgcagactatctgtccccctacctggatattgggtcttgtcacgacgaaacgtcagtgaagactgcggtcgatgcaatgcccgatgatgagctgattgctcaatttcctacggagattttgaaaggtgtcgacagcattgtccctgtggtttttcaccatgcaaaagcgattccgatctctgccgttgactgggattggctcaaagcagggattcgagctttgtacaatgctggtaaccaacacggagcagtcatccgccatctggatggaaccattgggactggatgcgtcgacagaggcatgaccggcttgctagctcccatttcaaacccaagcgaggaagtgtacttctatgacaatctcgcaggacacgccatcatggcgaaaattacgtggcagaagctgattgaaacggttacttccgattaa

SEQ ID NO: 359356 - DNA, 660 bp, Pseudomonas aeruginosa
atgcaaaagctcccccaaaccctaattggcagcgcgctgctcggtgcctgctcactggcccaggcaggcaccgtggccgaagtattcaacggtgaaatgctcggcaccaaccagcgctacttcgagtccattgcgggcatccctcgcgagtcctttggcgacgagcacaagttccgcgttcagggctgcaacatcaccgccaccattactgaggacaccgtcagtgcgttgcgcctggaactaaccccccaatgccaagccgacctgacccaattcgttggcgactatgctccggcccctggccaacccctgactttcggtgctttcgaacaagcctctggcggcggcttgagctaccacgccgattgcctgagcggttgcggaaactcatacgacccatccgtttacggccactgggaaggcccgcgcgctgtcgattttatggaagtgctgctggaagccgtgcaggttgaggacgctgccattgaggccgccgatatctggcgtaaccagatgatcaaaaccatgggcgaggattgggttatggatggccagttcaactgcaaccgccagttcgacccgattgcccggcaagccctcaacactgttcaggtcacggccgtcacggttggccagcagctacgtgtacccggctgctga

SEQ ID NO: 359357 - DNA, 1188 bp, Pseudomonas aeruginosa
atgatcaaatccatgcgtatctcgaacttctacagctttgctggcgaaaccgaagtcgacttcaccctcggcaagaaacccaccccctccggcttcgatatcgacctggctgatggcagcaggctgaacaaagtcatagcggtggttggagccaatggttcaggcaagacacagctcatcaagccactggcgtttctcagttggttcatctgtgattcgtttctggagaacgacccagacagtgcgattttttaccgcccccatcgtctgcacgcctcagaagagacgctcatagaaatcgacttcctgctggccggcgtcgaacatcgctatcagctcgcccttcagtcggggcaggtgatccgagaagttctgctgcaacgaaccagcagccagttcagttacctgttccgccgcgagcgtaatggcgaaggcttcagcttcaagcaaaaaggctttcccttccccaaggcccaggccgaaagcattcgtgccaatgcatcgctgctagccgcagcccacagttacgacatccgcgaagcgcaacctttcatcgagtatttcgagcgggtgaccagcaacgtcaacgccatggggcggcgccatttccagcatggcgaggtgtttgtcgcagcgagggattatgagcaggtgccccagctcaaggtgcgtatggtggaagccatgcgcgagtttgaccttggcctgagcgacatcgccattcgccaacgcgtaattacccgtgaagatggcagcgccagtacgctacacgaagccttcggactgcaccgcaacaacactggccacgagttcgagctgagcttcttcgatgaatccagtggtacccagtccgctttcgtgctgctgggaaaagtcctgcacgctctggagtttggcggtatcgccgttatcgatgaaatcgacaacgaccttcacccgcacctgatgccacgcatgctcgactggttccgtttcgaacacagcaatccgcatcaggcgcaattgatcttcacttgtcacacaccggagttgctcaaccatcttcagaagcatcaggtctacctctgcgagaagcgtgaccagtgctccgaagcctggcgcctagatgaagttcagggcctacgagccgacgacaacctttatgccaaatacatggcaggtgccctcggcggggtgccggatctatga

SEQ ID NO: 359358 - DNA, 534 bp, Pseudomonas aeruginosa
atgaagcgagcagtacgcaaggggccgcgcaacatcatgcgcagcaccctgctagtggtgggtgaaggtgcagatgaccgagccttcgtaacccatatgaaacagctctactgcccgcgcgacagcggcatcagcgtcaaggtcgaagcgggtgatggcggctcaccgggcaacgtcatcacccacgccattcgcaagtaccagggcaaggactatgaccgacgtctgttcctgctcgatgccgacctgccacctgacgacgcggactacaaacgcgccgccaaagagggctacgaaatcattctttggcggccacagtgccttgaaggtgctttgctcgataccttgggcgagcaggtgggtgaacacgaaagcagccaacagctcaaggctcgcctgcatcctcgcttggatggtagacacactgacgcctgcgcctacgcaacgctcttcacccggcagatactggatgccgggcgaaatgccaccgtcacccaggtacgcacagcattacagccccccgctggtaactaa

SEQ ID NO: 359359 - DNA, 1398 bp, Pseudomonas aeruginosa
atgagtgagttgccgagtggctgggtaagtacaacgattggagagatcaacgattactccagtggcaacattgatccgttgaaagcgccagcacaggtttttgaactgtatagcgtcccagtttatccaacggggaaaccggaacatctgcttggtcaggacattggctcgactaagcaatgtgttgagccgggtgatgtacttctatgcaaaatcaaccctcgcatcaatcgagtttggatggtcggaccgaaatctgagttaccgcagattggctcatctgagtgggtcgtgattcgtcagccactaattcactctggttttctgcggtaccaactgagtgaaagcagtttccgcgacaagctgtgttcagaggtatctggggtgggcggctcgttgacgagagcgcagccaaagaaagtggcaacgtatcccgttgtgctcccgccattcgccgaacaaacccgcatcgccgccaagctcgatgaactgctggcccaggtcgacaccctcaaggcccgcatcgacggcatccccgccctgctcaaacgcttccgccaatccgtcctcgccgccgcagtttccgggcggttgacggaggagtggcgtgcacaaaattttggttgcgttgacgaaggaggtccaataacggagccagccagtagctcgcttccagttggctggtcgtcaaaaaccgcaggtgatatctgtggattcatcaccaaaggaacgaccccctcaaaagaaaagatgactgctggccacggtgaggttccatatatcaaggtctataacctgacatttacaggggcgctagacttctccattgacccaacgtttgtcgactcaagcacccactcgactgacttgaaaagatccattgtaaaacccggcgatgtcctaatgaatattgtcggcccaccgctaggcaaggtttcaatcgtcccagcaacttatcctgaatggaacataaaccaagctatcgcacggttcagagcaggcgacgaaatttccgctgcatatctggctctctgcctgcgtaccgaagaagtcctaagccatgcggtctcgcgcgcaaaagccacagcaggtcaattcaatctgaccctcgagatttgcagagagcttccacttccggttccgccggcggaagaacaaaccgaaatagtccgccgcgtcgaacaacttttcgccttcgccgaccaactggaagccaaggtcgcctcggccaaaagccgtatcgaccacctgacccaaagcatcctggccaaagccttcagaggcgaactggtgccgcaagacccgaacgacgaaccggccagcgtgctgctggaacgcatccaagcccaacgcgccgccgcacccaaggccaagcgcggcagaaaggcctcggtctaa

SEQ ID NO: 359360 - DNA, 720 bp, Pseudomonas aeruginosa
atgttctggatctcgatggtttccaggttctgccgtacgtcctcggtggcctggtcgatgttgtgctgcatttcctcctgggcgctctgcagcgtttccgccatgcggttgatgccagaggccagttcgtccagctcgttgctgcccatcggtggcaggcgggtttccatgcggccttccttgagctgggcgacgccctggctgatcagttccagcggcgcgttgatcgcgcggctcatgcgcagggcgaggagggcggtgacgccgaggccggcggcgatcagcaagaggctggtgaacaggctgcgatatccgcgcagcagagtcccgtggtgcgacagttccagttcgacccagccgagtacgcgctcgtcgtcaggctcggtggcgccggacaggctgtggtggcggccaagaaccggtagcaggaagtgcgtggtgtccagttcggtggacatgctcaaatggctggcgtcgccggccggggcgacggtgagcatgcttggcccggcatgggcgaggcgttcctggcgggcgtcgaggaaggtcaccgcgcgcacgtccggttggtccagcgcctcgttggcgatgcggttgagcacggcggtatcctttcgcgccagcgcggtggcggccagcggcgccagttgttcggcgatcagttgcccgcgctcgatcaactgggcgcgcatgtcggacagctggacccaggtgaagtaa

SEQ ID NO: 359361 - DNA, 165 bp, Pseudomonas aeruginosa
atgaaaacctattccgcgtttttgcagcgtgttgtgcccactgcgggctcgcgagccaacttcaaaatcacggttcaggctgtcagctcggatatggcccgagtaacggctgaagcccagtatcccggctacaagtgtttgaacgcaccgactcaagtgcgctga

SEQ ID NO: 359362 - DNA, 663 bp, Pseudomonas aeruginosa
atgtctcgacatgtaagcaacgccaacctccatctacactacgataacaccttcgaaggtttacccattatggaggcgaagggcccctttattgaacaatacctttctcgttgcaaatgcacgatcgagcgagccctcgagtgctattcgcgggtgttcgccttcagagtggacttaaggctgccgctttggatagagctccctgagtacgtctacacgaatttagtcatcagggagttcctcaagtcattcaaggctaagatcgagcatgatcggcagagagcgcagacacggaaccggtacgcgcatgacagcgatgttcattatgtttggactagagaggtgggtagtggagagcgaccgcattatcacctgctaattctccttaacgcggatgcctatttcagagtgggcaataagacctcatccaaacagaacatattcacccgtctgcaggaggcctgggcgcaagcattggggcttagggcagatgctgtcagtgggctggtagggattcccccagcggctgagtatcgactcactcgaaggcctggcgatgagagggcgctagtagacttgttctatcgggcgagctacctatgtaaggcggccaccaaggtctatggagatggccagcatggttttggaagtagccggcgctga

SEQ ID NO: 359363 - DNA, 1680 bp, Pseudomonas aeruginosa
atgaatgaacccgatagctcaaccttaaaacccaacgactctgtaggaccacgaatgcaagatggatggccgtgctatcacgagcacagtgtctttgaagctgcagtagtggaatcatcccgacgattggaagttcctcgagaaatgtccatgatgtgtgcactgggggcaatggctacagcttgccagcgccatgtagatgtagaaatgcctccgggaaatagatcaccggtgtcccttatactgctagcgatcgccgactcaggagagcgtaaaaccaccacacaaaattattttttcggatcaatcgataagataaatgaagaggctattgaagccaacgcgaaggagctcagggagcatcgaataaagcacaaactctggagtactgaactgcgccagctggagcgaaaatacattcggtgtgcaaattcggacgacaatgatgcggctaatgcggtgactaaagagattgaacagcacttacggctcgaacccgccccggctccttcagatagattcctctatgaagacacaactccccaagctttgattcagtctctctacgagaactcgaaaaatggctgcgtactgaccagtgaagccaatggtatcttcaatggaaaagggatgagtgagctcgacaagctaaatactctctgggacggaggtaccctaatcgtagatcgcctatccagggcacctatttcgctgaaaggcgcccgacttactatgtcgctaatggcacaaccaagtgtaatttccaactttatagggcgacgtggagacgaggcacgcggcaccggttttctcgcacgctttctcgtcgccaagcctaaatcaatggctggcgagcgaactaacagtgtgggcttagctacttggccacgcaaggaggccttcagcaatcgcattcgagaaattatggaagaaccactcccggcgtcccgacaagcccttacattctctgagccggccaagagtctatggtatgaaatcaatagctatctagaggaaaacatgaaagaagatggttactactaccacatgaaggatcacgcatcaaaattgctggaaaatatcagtcgtgtagctgctgttatgcatacattcgcgagaagctcgagcagcgaagtagaaattgacctcttcaccttacaatttagtttgagatttgctcaggcctgctcgaaagaattcgctaaaagcctagccaatgaaccgcaggttgttacggacgcatgcgagcttgcaaactacttgttaaaggctgcacataatgacactcgcaattatcacattcttgacgagggcgcacctggggcaaatcttcaaaaaaacagctctggtcttccgagccatttaagagatggattcaaaacagatataactctcactaaaatcaaacaacttggtccttatagacttcgaggccgagccggttcggagaggctacaagcagcgattgagctactagggaaactgggacacctcagcaaggacaaaggaaaatataaatttagcgaagccattcaaacagtggaaacgcccctattaagaaacggcgaaaccttcactattacggcacttccagcatataaggatcaagaatttgtgcatgacagtcgagtgactggcaggccgaaatccgggcgctactgcatcatcaacaacaagtaa

SEQ ID NO: 359364 - DNA, 2082 bp, Pseudomonas aeruginosa
atggctcacgtctggataacatccaagcttgccagcttggccatatgcatagcagggttgatgtcgacttctcacctagtggcttcaacacaagccacagaaaaacggatattcaaaaccgaagatatcgccagggtaaaagaactcggcgagctggccatttctcccgacgggacaacactaattttccaagtaaccgaactgaacggtgatggcgatcagcgggagggcgcgctctggaagatgagtctgaaggaacgacgcgcttcgaaacttttccctgatcagcatgatgacagcatgcctgcctggtcgcctgatggttcgaagctggcgttccttcgagccgatgagggagcgacgcagcttcatgtcctggatttgacacgaggcctggtctgctcattgaccgatctggagaacggcgttaacgactatcgatggtcacctgatggtcaaaacattgccttcacctcggctgtagccatcgctcaggcgcccgtgccgccgcctggggtcaggataatcacacgggccgatttccgatctgaagaagtagggggcggtactgcctctttgccccaaatttgggtggtggcggtcgactctcactgtggcacgcagaccccaagacagctgacgcaggcgtctgtagcagccacgttggcattctggtctgtcgatagccgctctatcctgttcaccacgaacgatacgatggaagcctattacggcgcaggcacgtctactttgcgcagtgttgccctaattgatggccagcagagcgtggttaggcctttcaaggtgccgggaaccagcacagacatggaagcggctccgcagctttacctcagccccaacggttcgaaggtcgccttttcaatgggcaatccagaagccccgtcggacttcgcccaagatgatgttttcgtgatggatatggttactggcgaaactaccaacataaccgtgggctatgaccgtgaggtgggcggtgatggattgatgtggcgggatgatcgccgactgatcagtatcaacagcgacgcgggcaacgccaatctgatcgagttggacatcctgacccagaaggttcggccactatggattggccgccacgtggtacagagttttcatctagctcaggaaagcaatcggctgattgctgtcgcctctagcttcgtaagcccgcctgagctttatgaggttgctgatggtaccggcatgcagatatccgagatcaatcggcatattcgagatgaattgctgctcactgcccctgaagaaatcacatacgaaggcccaggcggcgaaacaattcatggctacttgcatcagccaccgatgctcactgcctcgcagaggtatcccctgatcgtatgggcgcacggcgggccatatagctggtggagcagcgcttttgacggagatatccaggccatggctgctgctggctatttcgtcttgtatgtgaacccgcgaggcagcatgtcatacggccaagtttttgccggcagcctcgccggagaatggccagggcctgagtatgatgacacgatggcgggcgtggattacgtgcttgcccaccatgagatcgatgcagaaaaaatcggcatcgcaggtggttcagcaggcgcgatcctgacggactgggccataacccacacgaaccgattcggcgctgccgtttcgatcagtagcgttgcggataattcgctctattggttcttgggcgatcagcctgacatggcagaccccgataaatatccctggctggatgaaaaggataaggctcggtcgccgataactcatgggctcgacgtctcgacgcctacgcttttcatgagtggaaccagagactatcgaacgccttcatccgtaggcagcgagttgatgttccagttgcttaagcacctgagagtgcccactgcactgattcaattcgagggtgcggggcacgttattagaggaagtaatgacgcgcgccaccgtggtctcagcattcactacctgctgcgctggatggatctgcacctgaaaggaagagccgccccggagtttcaggtacgccccgcaggctag

SEQ ID NO: 359365 - DNA, 306 bp, Pseudomonas aeruginosa
atgcttttaccaggtgccgaagcgctgggactgacccacagccaatgcttggagcttctggaaagagcagaagacacactcgacttcctgacctccagcctgacctacctgatccatgcggagagccagcaggcgcagccagatactgacctgatcgccaaatgggaagccttggatcaggaggtattcgacgtgcagtattcgctaccgggctcggacgtgaagctctatcagcaggtcattgaggcttatggtcagcgcaaccgcgagctgcgccccgttgttgatcggtacatggcgaagtag

SEQ ID NO: 359366 - DNA, 2154 bp, Pseudomonas aeruginosa
gtgagtgagaaggaagatcggtgcctacggctttacctgctcgtctacagaaagtggctacttaacgggagtagtggccaagcgcttgacgaatgcttacaccacttcctggatcagcggcctgccggtaagtatttcacagcgcgcgatcgcgcggttggcctagcgacggcaccattctggtgggatccaacggccgtgcaaggctccgaactggccagtttggcgcttagccgagtgcttcatttcgacaacgccatcagtctcgatctgctggtacatctggctaaccaaaatcctgagacgctcaggtgggcaattcgctactcaaagctctttgagcgtacaggttcgcctctatggattggtcttagagcagcgctagaggaggaggggtggcagaccttcttcggtgtctgcgaacgcttgctcgagcagctgaaaccctttgatgagctaatccttcacgccgaagatcagctgaagcatttgccgctgttagagctgttgtcttacctcagcatccttgcctatcaggcgcttgctgacgaggctcaagacgacccatctgggagggagtgggaggtctacaaccgcatcattttgcgaaagttgcaaacctgccgagaagaggattttcgcctgagtgagctacggttggggcaatccctgaaacggcatctcgctccaatcctctttgcggaagcagggggggcagtttcggaagagtgtcgtgccaatcttgagtcgttggcagtgttgatcgccgcaacccaggaacgaatcgactatgaaggatcgatcaactggttctgctttgatcccgaatgccggtaccaactcaagccgggcgagcctgttctctataactgcactgaagagggtgcagagaggtggcgtcgaactggacgtaagcacgacttgttgtggcactactggatgaaccgcgctgtgggggcgttcattgattccggtatggccggggagctaattggctcagctgagaatcatgagctgaaccagcaggcttacatcaaggcgcttcgcagcaagctacaactgcagacgatctatggtgtcggggaatacctctccctcagcgatggttccaaggtgctgcttcagcacgtcctgctagccagcgagctgacctcggtattctttcagcagcaatttattcagccattccagaaacacctccgtgagtccggtgcagtcgtccatgctctgggtcgattggctgcggaagggctgcaggtaggggagaatcgatttccgatgacttggtccgagggggaggaaaagatccagaggatcaagggctggaccgtctgcgacgaataccccatgggcaattcacatgcggctaggtcgatcctcaagtttttgactagcgacttacagactttgtctcagcagctgaaggcgcagccgcaaatgccagcaccgaggctctatgagctccctttctacaaaattgggcgctacagctttcaatttccctggattgtcgcgcaccaaaacaatctgactgcagtcttgaacaatctgaggcgagtgggtgcgcgtagggcgaacgtgcaggcagagactcggcgggttgagcttttgctcgctgagagtttaaggcagcgtggcttcgccgttgaggtcggttaccgtccgttggctacggaggacgatgacgccggcgaggtcgacctgatttgccagctggatggcgtactgctgctcttggaggttaaatcgggatacatccgatcgaacgctcatgaggtatggcttcatcggacgaacacgttgcgcaaagcggcgtggcagttgcgccgtaagcgcgcggcggtcactggtgcgttgagagaagaccaaagcctacgatcaaggctgcattaccgtggcctgtgtccagagaaggatctgcgtgcctggattgtcgatacctccattgagctagatgagcagtcaatcgacggatacaaggttgtttctcgtgaggcgcttgaggtcatcctgcgggacgaaaagcacctcttacggtcggtggggcaggtagatacggatggccgatattcattgttccccgaggggttctcggctggcggattcgtcgagattgttgagtcaggggccctctggcgccacgtctgtaagtga

SEQ ID NO: 359367 - DNA, 477 bp, Pseudomonas aeruginosa
atggctaaatctacgtttgcacggaggcttgagcgtgcgcttatcaaggcattggttggcttggtggcagggctgctgatttggttcatcgcgatgaaggtgatcaccggtaccttcgccaatatgcagaaggaaatgctcgttaatactcaagccgcacaagagcgagctagggagcgcgtgcgtgatcttcaggggaagcaggaattggaacgtcagcaacgccagacgatgtcactggatgaggcgcaacgccagtctgcagacgcgcagcagcgaaatggcgatgctttaatggctcagctggagcagcagcgcaagaaagatgctgcttggcaggagttctacaaggagcccaggagttgtagcaactggcagaccgaccagcagatggtggagtgccagaatcagaagctacgcgccaagcgagaattcgaacggaagtgggcggctggggagttggccggcttgaagtga

SEQ ID NO: 359368 - DNA, 651 bp, Pseudomonas aeruginosa
atggtcgatctgcacgctgagtttgggaacagccgcctttttcatgagaaacgcatcgatcgacggtctgcagatgcactctcaggcctggccgcgggaatctctgcggatggctttatcaatcagcaggaggcggagtttcttgagaactggatcgccaccaacttggtccatctggacgatccggtgatcaacctgctttacagaaggctttcagacatgctttccgacggcgttctggacgccgacgaatccgctgagctgctagaaatgctccgagcatttgcaggactttctgcggagaggccacggccgagagacaacgcctttactccctcaaattttctgccccttaacaagcctgaaccgaagctggagtggtcggggcacctttacgttttcactggtgtgatggcctatggtccgagaaagcactgcgaggaagttgtggtgaatcggggtgggcagatagctccaacgattagtaggaaggttcattacctcgtcgtgggcgagattgggaacgagcagtggttgcacagcacctacggcacgaaaatcaagcgagctgttgagcttcgtgaagaagggcatcccatggccatcatcagcgagaagcattggcaagcatctgtcttcagccttgtctag

SEQ ID NO: 359369 - DNA, 582 bp, Pseudomonas aeruginosa
atgcgctgggcacataccgtaattctgatgcttttcatcgccgctttgggtgggtgcgcatctgcctttgacaagccatcgccgaatgcagactacggtgcggcacctgtccgttacgagcaatctatcccagaagcactgagccttgcgctgaaagaccctgactcagccaagtacaaatttctgcctccggtgaagggctaccagaataatggcttggtctatggcggccgagttacgtggatgggctacatggtcttggcattagtcaatgccaagaacagcatgggtggctatacaggctacgagtcgtacacattctactttgctggcgagagggtggtgtcttggcataagggcggcccaaataccgttctgacacatgttgtcgaaagctcggtgccaccgaccgcttcagctcagagttcgacgagcacgattacgccagctgtgaattcgcagcctgctcccgcgatgcccaaagctcaatggcaacagcaacagctcgacaagcttggggccgagacgggaatttcctacgacgagtaccagcgccgttataagcagatcatgggccagtag

SEQ ID NO: 359370 - DNA, 1086 bp, Pseudomonas aeruginosa
ttgagcaaaagatctgaaattcacttcattaagccttgtcgtaacccggaggaagatcatcgagtccttacccctcagcacgcaatggaaatgctgaagcagcgaaagattgtccagataaatcttgataactgttccctgcaaagaatggaggagctaccagccaatccgacgctagctgaggctgaagcggtcgggcttctcccccttgttgaaattttgcagagcgcccctgtcgccctgacccccatgggtatacatgaaatgcctgatcgatatgtcgaaaacgcgaggcgggcatatgaaagtttttgcgcaaccttctggccaacccacaaggatgatgctgacgctacatataggaccatcgacgagaactcgacagaccgctgggtcgacttcacgaagctgagcgacggtgctagatgtacctacggcggagcatacgttgctcttctacagatgcagaacatacagaaaacatatccatccttcgcgcccgaaaagaaatttgagctatatatccacagcatgatatctatgctcgatctgatcagcgcatttgagcttgagatagcaaaatatgcattctggtccacatcagacatcaacataaataggctcccaaaaagaataataaccagacgagccgacataaaagaaaacttcacaaaattaaaatcgacgtccagcaagtgcaagagatctgcatttaacggcgcaatggatatatactggctcagcggagccaatttatcggaatactttggagcgaagattaagaccagcgtgggagagctcacgcttgacaactgggtcggaaccaatgacgtcaagcttttccgtatatgcgaagacctgcattcggtgcctcataacgactcgaaaactatgcgcttcagcactactcgcgaacctgagctaacagcattaccttactggcaaaatgtagatcggttatccagagacgtgatgctttataggtacgagaatggctatcaatctctcgaagatacgctactacctcgtatcgacttagctgtgaaacaccttcatgaagagttacacagcgcgatgggcagttga

SEQ ID NO: 359371 - DNA, 999 bp, Pseudomonas aeruginosa
atgagccgcttgctgcgtgtcctactgaggattgtgcttgcactagttctgttgctaattactgcttggggatcgctggctctctactaccaaaccagtggggcggtgggctgggggatgatcgcggcttggtgtctacttggttgcatatcgcagatcctgctatggcgtggacggcccattctgtcgttcattgggcaatgtctagcctttgctgtgctgctggcctggtgggcggggctggaaccctcgaaccagcgcgtatgggccgatgatgtcgcgctgatgacccagggtgaaatcacgggcaaccaactcgttctgcacaatgtacggaacttcaactggcatagtgatgagctctacgatatcgcttgggagacccgtcgctacgatctcgaccggcttgcctcagtcgatctgatcacctcctattgggggatgcctgctattgcccacatcctggtttcattcggttttaccgatgggcgttttcttactttcaccgtggaggtgcgtaaagaaaggggcgaggcctactcagaaatcggaggcttcttcaaacagttcgagttgagcatcgtggcaacagacgagcgagatgcactgcgtgtgcgtaccaatgtgcgagatgaagacagttatctttaccgcatcggcatgtcacccgaggcgatgcatgcgttactgctttcttacgtggaacaggccaatacgttggtcgagcggccgcgtttctacaatacgattacggccaattgcaccaccattgttttcgacatgctgcagacgatcatcggcggtctaccgctcgactaccgactgctcctgacgggctacctaccttcctacgttatgtctgtgggtggattgcaggatggttatagcctcgatgagctacggcaacgcgggcgctttaccgcgcgtgcgaacgctgccggtgacgaagaagatttttcctggttgattcgccgtggtgtccctggctgggggccatga

SEQ ID NO: 359372 - DNA, 1962 bp, Pseudomonas aeruginosa
gtgagcttcttcagctatttctccacacccactatcggatgtcgtgcgctgcgttacccatctctcgccttgctgagctttgtacttgctgggtgcgccggggtgaaggtaacggcagtcagtagcaacgattacttgacccagcgtcgcggcgatgtgctgacgaccggaaatctcagcgcttcggccattgccgccctgcaggtcgcaggatttgacggaaagcgttgtctcgaagatttgctggcgtgtcgccaggtgctggatagcggtaaggggttggaagacgagcagcggctttctgcgttggccgagctatggctcaaagaggctcagagcggccgcaagtcagtagctgatgaggctcgaattgacgcttacttggagagtgccaggtatgcctacgcttacctgttcctgacctctcgtacaacgagccagcgagcactggaagaccggcagacccaggtgcgcgactactacaactactccgtgcagcagacactgaccgggctgttcgagcgttatcgtggaagtcccccttcccccgaggacaccttgggaaattttcgccttaagagcgggcgctggactatcagtgggcaaatgaatgacgttcgattggccggtgagcgacttcttcctaaggagctgattcccgcttcttccttgtccttcgacgggctgcgcaaccagtaccgccgggatgggctgggtgcggaacttgtggcggtcaccgccaagcgcgtggtgaataacggtagtgatgacgtgccgtggagcgaaacgccattcccagcgattaccgccgtggcgcgcttccctggggagacgttggagcaggtcctgtctactttccaggtggaggtggttggctatgatccctaccggcaggacatggtagaaatcgccggtgcgcaaataccgctggcagccaatttcacctcaggttatggcctgtggctggctcgctcggggtttgccaggcagtctctgttaaccctggttggtcgtggcgacgtgttggagcagccacatgtttacctattgcaacctttcgatcccgaccggcgcatcgtggttatgctccatggtttggccagcagtccagaggcttggatcaatgtggcgaatgaggtgctgggggatgagactctgcgccgtaactatcaaatctggcaggtctattaccctactaacctgccacttcccgttaacaaccaagctattcgtcaggccattgagcagacactggcaaatttcgacccgcaaggcacatccaaggctagccgggacatggtgctcttagggcacagcatgggtggggtgttgtctcgtctgatgctgtcttcgtccggtgatcatctgtgggatgccgtgttggagcgctacaagatcaaggggacgcgtctggaaatggccagagcgagtctcggcccctatctgtatttcgatccgttgcctcaggtcagccgggccatattcgttgccgctccgcaccgtggtacgccatttgccgaaaaccgcgtgtcccgatgggccgcggggctggtgaagttgccggtatcgatgctgggccgcctcaaggatgtcgctcagatactggtcgatcccatttctgccacgccaggggatctggtgcggccgctcaatagcatcgacaacttgagtaaccaggatcccttcataaaagcgacggcagatctgcccatctcgccgcaggtgcggtaccactcgatcattggcaaccacacccctgatctggaggtgctgctctcgagcgatggtgtggtgccatacgccagttctcacttacctagtgccgagtcagagctggtcgttccgtctgggcacagcgtgcaggaaacgccgcaggcaattgtcgagattcggcgtgtgctacatgaacatcttgatggattgcctcgagaatctcaggtggctgaggtgagggtgccatga

SEQ ID NO: 359373 - DNA, 1050 bp, Pseudomonas aeruginosa
atgtacaggatcagttccagctatgtcaggaccttggtggatatgctggaagcggaggggctgaataccgagcgactatgccgtgatgccggcatcgataggcgcctactaacgcagacggatgcgttcttctcacgcgccagtgcctatcgcctgatggacctggccgagcttgagtcaggcgaccctaacttaggcctcaaagcaggcgcacatttccaccctggcagtttccaattagtgggctacgtgatgatgtccagccccaacctgaaagaggcgctagagcagctggtgcgtttttttccactagttggcaacggcgccaacttagtcctgtctcctgaaccaggggagcgtttacgtttggtatgcctcgaactcctcgaagaaaacagtgttagagggcgtgcgttcgaggatgccggtgcggccgcattactggggttctgccgttggctgacggggagcagaccaccgcggccgctacaaattgagttcgtccatggagagccggaagatctcactgagtatctgcagctgtttggatgttcactgcgcttcggagttgagcacaacagtatcctgttcgatcaacaagagttgctgcgcccattgagtacggctaacgaggcactggcgatactgcatagccgctttgccgagttacggctggatcaattgggaggcgtctcgctggcagggcgagtgcgcggcttacttgccgaacgtctgggaaaggatggatgcgacatggagtcagtcgccccagcactgtgtatgagcaagcgcacattgcagcgaggtttggagagggagggggtgcaatttaaggacattctcagtgatgtacgccggcagtttgctgattactacctgcgccgcagctcatgcggtctgagcttggtggctgagtatctggggttccgagatcaaagtagtttccacaaggcttgcttacgctggtttggctgctcgcctgggcgctaccggttgcaagagggtgagcagagcacctccatggagagtgccttagatgaccctcagtag

SEQ ID NO: 359374 - DNA, 597 bp, Pseudomonas aeruginosa
ttggaggcgggctatcacttccactgcgtagactgcgacatcactgactgggagagcacacgcgaggccttcgaagtcgtacgccagaacgtcggccccattgatgtcctggtcaataacgctggcatcactcgcgacggcacgttccgcaagatgtctccagaaaactggaaggcagtgatcgataccaacctctcgagcctgttcaacaccaccaagcaggtgatcgaagacatgcttgccaaaggctgggggcgcgtcatcaacatttcctcgatcaacggccagcgcggccagttcgggcagaccaactactccgcggcaaaggccggcatccatggcttcagcatggcactggcccgggaagtaagtggcaaaggcgtgacggtcaatacggtttcacctggctacatcaaaaccaatatgactgcggcaattcgtacggacatcctcgaggggatgatcaatggaattcccgtcggccgtcttggccaacctgaagagatcgcatcgatcgtgtcctggctggcttcggatgaatccgcatacgccactggcgctgacttctcagtaaacggcggcatgaacatgcagtga

SEQ ID NO: 359375 - DNA, 1701 bp, Pseudomonas aeruginosa
atggataactcacgcactttcgccaattactggtcaggacaagccccctttattgctagtttcgtccttcagcaactgcgtctatacgtggcgcaaaatccctggttcaacgggcaagatcaaagcccatggttcgatgtcccgaccgaagcgctggagcaattgcagtcagactaccagcagcagtggttagagcttggccagcagttgctaactcgccaaccgttctccttcgaagaccagcgcttcgccagcaataactggagcgaaccgctattcggcgctctagcggccttctacctcctgaactccggctttttgctgaaactactggagctacttcccatttatgagccgaagccgcgccagcggctgcgctatctgatcgaacaggcaatcgctgccagtgccccaagcaattttctgctgagcaatcctgatgccctgcaacgcttggtggaaacacaggggacaagcttgctcagtggcctgctacacctagccagcgacctgcaggaaggcaagctgcgccaatgcgaccttggtgacttcgaagtaggtgtcaatcttgccaccacccctggctccgttgtgctggaaactcctctgtttcagctgatccagtacctgccccttagtgaaacgcaataccaacggccgctattcatcgtccctccggcgattaacaagtactacatccttgaccttagcccggagaactctttaatccggcatctcctggagcaaggccaccaggtcttcctgatttcttggcgtaacttcacccaggaacaagcagacatcacctgggaacagatcatccaggacggagtgatcagcgccttgcgcgccaccagggccatcagtggcgagcgctacctgaactgcctgggcttctgcatcggaggcaccatgctcagctgcgctctggctgttctggctgcacgtggtgaccatgacattgccagcattaccttgttcgccactttcctcgactatttagataccggccccattagcgtcttcgtggatgaagaactggtggccctccgtgagcggactatcggcgggcatggcggtaagcacggattgttccgtggcgaggacatggggaataccttctcgctgcttcgacccaatgagttgtggtggaactacaacgtcaataagtacctcaaggggcagaagccaaaagcgttagacctgctgttctggaacaacgacagcaccaacctgccaggccccctgtattgctggtacctacgccatacctacttgcagaacgacctcaagtcaggggaattggacctgtgcggttgcaagttggatctacgcgccatagatgcgccggcttacatcttgggaacccatgatgaccacatcgtgccctggcggagcgcctatgccagcacggccttgctgggcggcgcgaaacgcttcgtccttggctcctccggccatatcgcaggggtaatcaacccaccagctacgcgtaagcgccattactgggtcaacgaccacatcacacaggcagctgacgactggttgcaaggtgcccagcggcacgctggcagttggtggaacgactggttcacctggctaaccgagcacgcgggtacgcaccgtcccgccatcactcggatgggcaacgccgaatacccccccatcgaacaggctcctggtcgctacgtgaagcagtga

SEQ ID NO: 359376 - DNA, 1074 bp, Pseudomonas aeruginosa
atgaatccacaacagaaaaagatcttggtcaggacggcctcggtcgccgtaatagctgccctagcaacactcgcttggctggagctgcgtcctagcggcttaggggacggtttcgccagcgccaacggccggattgaagcaaccgaggtggatgtggccgctaaactggcaggccgcctgctgcagattgacgtcgacgaaggagactttgtcaaagccgggcgagtgctagcgcagatggacacccaagtactaaacgccgaactacgacaggcccaagcccaagtccgccaagcacaaaacgcaacccgtacagctcactctcaggtttctttgcgcgtcagcgagaaggctaccgccgaagcagtgatacgccaacgccaggccgaattaaccgctgcacagaagcgttacggtcgtaccgagacattggtaaagcgcaatgccttgccccagcaacagcttgacgacgacctagccgcgctgcagagcggccaagctgctctcagcgccgcgcgctcggaggctctatcgagccaggcagccatcgaggcagcgcagtcgaaggtgatcgagtccgagtccgccgtggaggcggccacggccagtgtcgagcgcctacaagctgatatcgaagacagccagctcaaggcaccgcgcagcgggcgcgtgcagtaccgcattagccagccaggtgaagtgctaggagcaggtggcaaggtactcaacctggtggatctcaacgatgtctatatgaatgtctttttgccggcgcaccaggccggccaggtagtcctcggtgcggacgtgcggctgatcctggatgccgcacctcagttcgtaattcccgccaaggtgaccttcgttgccagcgttgcgcaattcacccccaagacagtggaaaccgccaacgaacgggaaaaactaatgttccggattaaggcacggatcgatcccgaactgctgcagaaaaacctcgagctggtcaagaccggcgtgcctggcatggcgtacctgaaacttgatgccgacgctcaatggcctgaaaacctacaagtgcgggttacgccatga

SEQ ID NO: 359377 - DNA, 2745 bp, Pseudomonas aeruginosa
atgatcccgaacgagaccaacgtagcgcaactgttcgatgtcagcttgcactacggtaagacctgcgcagtggacaacgtaagcctcgatatccccgccaagcgcatggttggcctgatcggtcctgacggtgtcgggaagtccagcctcctggcactaatcgccggcgcacgcaaaatgcaggatggaaccatacgagtgctcgacggcgacatgaacgatgccggccaccgccgcgacgtgtgcccccgcatcgcttacatgcctcagggtctgggtaaaaacctctacccgaccttgacggtattcgagaacctcgatttctttggccgcctgttcggacaaagtgaacaggagcggaaggcgcggattgccgatctgacacaaagcaccggcctcgcatcctttacgcagcgcccggcgggcaaactatccgggggaatgaaacaaaagctcgggctgtgctgcgcattaatccacgacccggacttgctgattctcgatgagcccactacaggcgtcgatccactagcacgcaaccagttctgggaattgatcgagcgcatccgcgtacgtcgcccaggcatgagcgtattggtcgccaccgcttacatggacgaagcccaacgattcgattggcttgtggctatggacgacggcaaggtgctcgacactggcactcctggcgagctactcgaacgtacttgcagtgccaacctggaagaggcctttatcgctctgctgccggaaactaaacgcagagatcaccatacgctagtgataccaccacgcgagtctgctaccggcgatagcgcaatcgccatcgaagcccacggcctgacctgccgcttcggcgacttcgtcgcagttgaccatgtggacttccgcattgaacggggagagatatttggcttcctcggttccaacggttgcggcaagagcaccaccatgaaaatgctcactggactgcagcccgccaccgaaggcgaagcattcctgtttggcaaaccggtcgatccaaataacatcgatacccgccgccgggtcggctatatgtcccaggccttctcgctgtacagcgagctaagcgtgctgcagaacctcgacctgcacgctcgtctgttcgagattgcaccgcagcaacgccatgcgcgcattcaggaaatgctcgacaagttcgaacttcagggtgttgccgagcacctacccgacgacctcccgctaggggtacgtcagcgtctgtctctggccgtagcggtgattcaccgaccagagatcttgattctcgacgagccgacttccggcgttgatccggtggctcgcgacagtttctgggagctactgatcgatctgtcacgcaaggatggcgtgaccatcttcatttcgacccacttcatgaacgaggcgctgcgttgcgatcgcatgtcaatgatgcatgctggccgcgtcctggacagtgacacgccacaggcactaatcgacaagcgcggcctgaccacactcgaagagaccttcatcgcctacctgcaggatgccgccggcgaaagcaacacgccgccagacagtgcgcaacaggcgccagaggagtcggtattcgcctcccctagtgcatcaaaattacgttttagccctcagcgtctctacagctatgcccggcgcgaggccatggagttacggcgcgatccagttcgcgccactctggccttggtcggtacagttctgctgatgttcatcatgggctacggcattaacttggacgtcgataaccttagcttcgcggtgctcgatcgcgatcaaaccaccaccagcgccaactacgccgaaaccctcgccggctcacgctattttctggaaaggccggcattacgtaactacgaagaactcgcaagtcgtatgcgccagggcgatataagcctcgccatagaaatcccccctggcttcagccgcgaccttaagcgcggtgacgtgccgcaggtggggttctgggtagacggcgccatgccgacccgagccgaaaccgttaaaggttacgtgcagggcatccaccagggctacttgcagcagttggccgcaacgactcccggggataccaccaacagccagttcgacattgccctgcgctaccgctacaaccccgatgtggaaagcctgcaagcgatggtcccagcggtgatcccgatcctcttgatgatgattccggcaatgctcacggccttaggcgtggttcgggaaaaggagcttggctcgattactaacttctacgtcacaccggtgacccgcttggagttcctgatcggcaagcagctaccctacatcgccctgggcatggccaacttcttcatgctggtggccttttcgatttggttcttcggtgtgccggtgaagggcagcatgctaactctgacacttggcgcactgctctacgtgacatgcgccaccggcctcggtctgctgatgtcgtcggcgctcaacagccagatcgcggcgatcttcggcacagctatcgccaccctagtgccagccactcagttctccgggttgatccaccccgtatcggcgatggagggtgccagcgccttcatcggcaatctctacccaaccagccacttcctgatcatcagccgtggcgtgttctccaaggcgcttggtcttgtcgaactgtacccctacttcattcccttactgatcaccatccctgtactaaccctgctcagcatcgccggcctgaagaagcaggagaactaa

SEQ ID NO: 359378 - DNA, 1116 bp, Pseudomonas aeruginosa
atgcgcaagctgaacaacatcctgcagttgggcatcaaggagctgcgtagcctgtaccgcgatagggctctgctgctgctaatcctctactcctttaccctgagtatttactcccaggccaacagtgtgccggagtcgttgcaccgtgccacgatcggcattctcgacgaggatcgctcgcaactgtccacgcgaatcgtcggcgcatttcaaccgccctactttctcaaacccgcgtccgtcaatttggaaacaatggacagcggcatggatgctgggcgctacaccttcaccctgaacatacctcccaagttccaacaagatctgcttgctgggcgcaaaccgaccattcaagtcaacgtcgatgccacccaggttagtcaggcattctctggagccgggtacatccagcagatcctcaatgacgaggtcgctgaattcctcaaacgcttccgaggcgccaacacggtgccggtcgaagctgtggtgcgaatgcagtacaaccccaacttggtgccgtcctggtttggctccgtcaacgcgatcatcagccagatcaccatgctatcgatcatcctgactggtgcggctctgatccgcgaacgtgagcacggcactatcgagcatttgctagtgatgcctgtcacgccattcgagatcatgtccgccaaagtttggtcgatgggcttagtagtactggtcgccactgctgtgtccatgcgcgccgtcatagaaggctggttggccgtccccattcccggctccgtactgctgttcctctgcggtgtcaccctacatctgttcgctaccacttcgatggggattttcttcggaaccgtggctcgctcgatgccacaactgggcctcctaatcattctcatgctgatgcctttagagattctctctggcggcctgactccccgagagagcatgccggaggtcgtacagaacgtcatgctggcagcgcctaacactcacttcgtcgagttggctcaggccattctcttccgcggagccggtccgaccatcgtatggccgcagatgctggccctcggtctcatcggtggcgtgtttttcatcggtgctttgtcacggctgcgtaaatccctgcattga

SEQ ID NO: 359379 - DNA, 1422 bp, Pseudomonas aeruginosa
gtggaactaaccgcgaacttagccagcgtaggcctgacgcttgccatcaccctcactatctcggcacaaagctgggcaacatctatcgtttcctcgacgaagacggacctgataaccgtgtatcaagaggccgcaaagaacgacgccaacattgccgccgcacgcgccgattaccaagcacgccgcgaagtggtaccgcaggctcgcgccggcctgttgcccaatctttccgccaacgccacctacagtgatacccgcactgaattcgactcaccagacagcaccacctcacgtagcggtgcgacctaccaggccaatgtcgtacagccgctgttccgtgccgaccgctggttcaatctacgggcggcagaggccaccagcgaacaggcggcgctggagttatccgctacggagcaaaacttgattctgcagagcgccgagacctacttcgcggtactacgggcccaagataccctggcctccaccaaggctgaggagacggcgttcaagcgccaactcgaccaggccaacgagcgattcaatgtcggtctatctgacaagaccgacgtacttgaggcacaggccggctttgacactgctcgcgccaatcgcatccttgccgagcgtgcagtagatgatgccttcgaagcgctgaagactctaacccagcgcgactattcagctgtggaaggaatagtccatagcctaccggtgctggcgccaacgccgaacaatgccacaacctgggtggacaccgccgccgcacagaaccttagcctgcaagccagttatttcgcggtcaacgccgcagaggagacccttcggcagcaaaagtccggacacgcaccaacgctcgacgccgtggccagctaccagaaaggtgacaacgacaaccttggcttcacaaactcagactctcaactgtcgcctacttaccatggtgacgtttcgcagcgctcaatcggcctacaactgagcatcccgatctatagcggcggcctaaccagctcgcagatacgcgaggcctatcaacgactggaccaaagcgaactgctgcgcgagagcctgcgtcgccaagtggtacagaaaacccgagatctattccgcgcagtgaacaccgatgtggaaaccgtgcaagcacggcgacagtcaatcatctccaataagagcgcgctggacgcgaccgagattggctatcaagtaggtacccgcaacatcgtcgatgtactcgacgcccaacgtcagttgtttagcgcggtacgaaactacaacgatgcacgctacgactacatcctaaacaacctgcgattgaaacagatcgtgggcactcttagcccaaatgatctacaggtactgcagcagtacctgaaacccgactacgacccagataaagacttcctgccagtgcttccaaaggcctga

SEQ ID NO: 359380 - DNA, 780 bp, Pseudomonas aeruginosa
atgagcatcaaggaaagcctgtcactgactgggaagcgtggcctgttggttggcatcgcgaactcgcattccattgcgtggggctgcgcgcaggctctgtatgaaatgggggcagaactcgccgttacttggttgaatgataaggctcgggtgcatgtcgagccgctggcgcagcaagtgcaggcaagcgtgtgcatgcctttggacgttacccgggctggcgagctagaagctctcttcgaacgtattgcagagcaatggggatcgttggactttgttgttcattgcttggctagcgcgccaaagggggaaattcgagggcgtctactggatagctctaccaccggtttccagcaggccatggatatttcctgccactccttcatccgcatggcgcgcctagccgagccgctgatgtcccggggcggtagtctggtgaccatgagttatctaggcgctcaggaggtaattgacggctacgccctgatgggaccggtcaaggctgctttggagtctagcgtgcgctacctagcaaccgagttaggtccgcgaaacatacgagtacacgccatttcgcccggccccatgccgactcgggcggcatctggcctgaagaacttcgaccacctgttggaagcctcagcagatcgcgcacctctgcggcgtctggtaactctggaggaggttggggctctgtgtgtgtggctggtcagtaatgcgagccaggggcagactggcggcatccacttcatcgatggtgggctgaacacgctcggctga

SEQ ID NO: 359381 - DNA, 480 bp, Pseudomonas aeruginosa
atgggaagccgctgtggcgcattagatcctggcgtcatgctgtacctattggatcaggggatgcaggctcgtgagttagagaagctgctttatcaacagtccgggttgctcggcatctccggagttagcagcgatatgcgcaagctgcgcgccagcgacgatccgcatgcagctttggccatcgactacttcgcataccgcattgctcaggagatcggccggcttgccacctgcctgggagggctcgatgccttggtattcaccgccggcatcggcgagaaggacgccgcgttgcgagcccaagtactggagcatctctcaccactttttgggatgtccctcgatgacgcggcaaatcagcgtaacgccgaatgcatatccagtatcactagctctcggactgtatgggttgtcccaaccgatgaggaaagcgtgatcgctcgacatgcttggcacctgtaccaagggcaacacgtatga

SEQ ID NO: 359382 - DNA, 192 bp, Pseudomonas aeruginosa
atggaagccatagcgacggactccttgctcatacaacgagtaaggcaaaccaaagagctggctgaccttgctccgtccggtatgaaacgcggtatcgaagcaggcgacctgaggcaggtgcgcattgtgctcaagcgctgcctgaatggccgccagattgtgaggttggtgcagcggtgccaggggctctag

SEQ ID NO: 359383 - DNA, 240 bp, Pseudomonas aeruginosa
atgcactactcgatgcccgatcaacgtcggtgggcgatcctgcaattcttccttgagcgcgcgatagacctgctggaaagccgccttcatatcgccgacatgctccggcgcaaagacaacgttctgcaccaccgatccatcggccatgacaatctggaggcggggtgcgacgccaatcccatccagcttcccgcgcgccaacaaacgcggctgttcttcaccttggtgaccggcgaatag

SEQ ID NO: 359384 - DNA, 930 bp, Pseudomonas aeruginosa
atgagcctggatcactactcgggactgatgaaccgttgcgcggaaattggtccattacccaccatcgtcgttcatccttgcgaggctaacgcgttgcgcggggcgttggaggctactcaggccgggctgattaccccgattctggtcggccctgccaacaagatctctgcaactgctagagaggctggactgtgcatcgatggggtgatcgtggaggacgtaccgcatagccatgctgctgctgagcgtggcgtcgctctgatccgcgaaggacgtggtgatctgctgatgaagggcagcttgcacagtgatgagctgcttcatgcggtggctgatcgtgaaacgggcctacgcacggagcggcgcctcagtcatgtgtttgctatgagcgtacccaactaccacaaaacgttgttcatcaccgatgcggcggtcaacatctttcctggccttgaggacaaggctgacatatgtcgcaatgcagtccagatgctgcacgcccttggtatcagccaacccaaggtagccctgttgtcggcagtggaaaccgtcacggccaaattgccttcaactctggaggctgctgcactcgtggtcatgtctctgcgtggccagattgaaggcgcactgctagacgggccactggcattcgacaatgcgatcaatgctgaagcggcgagagtaaagggtattcattcaacggtcgctggcgacccagatatcttgctcgtgccggacatggaggcgggtaacatcctcgccaagcaactgatctatctagctggcgccgaagcggctggtatcgtcttgggtgctcgcgtaccgattgtattcaccagtcgcgctgatagccctagagcgcgtatagcgagttgtgggctggctgtgttgctggctgaagcgcggcgaaactgcttggggggcgcatga

SEQ ID NO: 359385 - DNA, 2547 bp, Pseudomonas aeruginosa
atgagtcaggaagatttttttgcaaagcaagaagacaggttttcctcgttccataatctgttcgagcacctcgaacgattgcagcatttgcactggaggctcttagtcgatgccttcgggcagcgccacgaagccatcctggcgccactgagcgaaggtcgtctgcgagcccccagtgctggtgaatgctgggaatacctcgttgattttgggcagcgtggactgctgtttttggacgcattgcgccagcgtggcgacaacacgctcgcccacgagcgagccggctatcctttgcttctcaagtttccccacgaagtgttgattgacggccgcgacctacctcgcccagtcaattattccctgctgcgcatcctcccaaaggacgatcagcccactgatacctcgcgccaaccagtcatcgtcatcgacccccgtggcggtcatggtgcgggcattggtggtttcaagcaggattctgaaattggcgaaagccttcgcgcggggcacccaacctacttcatcgcattcagtcatgcccccgccccaggtcagacgctgatcgacatcgccgaggctgaggcacgctttatcgaaacggtcagtgcgcgccactccgaggcaggtaagccggtggtgattggtaactgtcaggccggctgggcactgatgggattagcggcgtcacgtcctgagctaccagggcttgtaatcgtaaatggtgcgccgatgtcctactgggctggagtcaacggtcgcaatccaatgcgctattccggcggtttgctcggcggggcctggatgacccgatggggcagcgatatcggaaacggccgtttcgacggtacctggttggtcagcaacttcgagaatctgaatccagcgaacacgtactggaccaagtactacaacctgttccgcgacgtcgatactgaaactccgcgctttctggatttcgagcggtggtggggcagcccaactctcctcaacagcgaggagatcgaggtaatcgtcgatgatttgttcatcggcaaccgactggccggaggtaatgggcgtcagagcagcggtatcgacctcaaacgcattgaagcgcctgtggtggtgttctgttcatacggcgacaacatcacaccgccgcagcaagccctgaactggatcgctgatgtctacccgagcgacctggcgctgcgcagcgcgggacgtaccattgtttatttgcggcacgccagcatcggtcacttgggtatcttcgtctccggcaaggtcgcccggcgtgaacacagggagctcctcggtgcaatcgatgccatttccgtgctgtcaccagggctgtacgagttgatgatcgacgacctacctgcatcagccagcggcgaccaagcctatcaggtacattttgagcctcggagcattgccgacattctcagtgacgacgaggacggccgaagcgacgagcgtgaattcgcactggtcgaccgtgtctccggtgtcaatagcacactctatgattggtttgtacgtccctggatgcgcaatgcgatcaacgaaccactcgccgaatatctacgcaagagtcatcccttccaccagcagcaggttagttgcagcagcctcaatccatctctctggtggcttacaggttatgcggccttaacacgcgccaatcgccgtccagcatcacccgataatcccctcttcgcctggcaggacacggtatccagcacggtccaggctttgctcgatggttaccgtgatgtccgtgactcagcgcaggagatgctttttcacagtatctacggaggcttgagtaccttaactggaggccaggcaccgcaaccactgcagggccacattgagcagcgtgataaggctttgatcgaccatctgcaggactcacttctgcaggggggagagcagggtgcattcgtccgtattctgtgtttgcttgcgcatgcaagtgggagatttggtaaggagcgtatcgagcagcttgcccagcaggctcgggcgcttgcgcaacaactcgggatcgacccgacagccattcgtgagagcgtccgtttgcaggacctactggtcttcgcccttcccgaggaaagcctgagttcgctgcctttgttggttcctgaggctaagcagagagaagcagtgctgtcagcggcgattcaacttgtgcccgaactgctgtatgccgacggcgccgttggtgagctctggcgccgtttgcacgacttgcttgaacaccatttgccgacattcgcacagccgtctctgcctcacattgctgtgagcagtgactccgatcaaagtcaggcaacgctgagcctttccgatacggacacagagggtgcgcagcccaacgcaaggccaagggcgaaaaaagctactcagcccacccaagcgcaagtcgaacccggctcatcaaaagtggctgccaggagtaagagtccagtagccgcagagaagaaaactagtcgcagcaaagcgagtcgttcgaagcacgttcatgtgcccgcaagtcggggcaaaaagggtgatgctgaatga

SEQ ID NO: 359386 - DNA, 525 bp, Pseudomonas aeruginosa
atgcccgatgatgacctcagggctccacgcctgatcaagaagtacagcaatcgtcgcctatacgacactcatactagtgcccatgtcacccttgctgatatccgccagctcgtcatcgatgaagtcccgtttcaagtggtggatgcgaagagcggtgaggacttgactcggagcattctgctgcaggtcattcaggaggcggaaagcgacggcgaaccgatcttctccagcgacatgctcaaaggcatcatccgcttctacggtccatttcaaggcatgctcggcagctatctggaacagagtattcagaccgtgatcgacatccagactcaggctggagtgcagtcgtcacaggcttggaccgactttatgcgcaagcaagtgccggtcatgcaggatctgatgagtcagtacgttgagcagtcgaagaagctctacctggggactcagagcctgttcggtctgtttggcggtgttggaccgggtaacccgaagccgacaaaaaaagacggtgatgagcagtaa

SEQ ID NO: 359387 - DNA, 912 bp, Pseudomonas aeruginosa
atgctcaaaggcctggctattaccccgccagtgatcgggcggatttccatcggcaaggtcgtcgaaaagaacggcaaacgcctaccggagaaggacgaccaattcactatcaccactcaggttcaggtgcgggatcactggctgctccaccctatcgatgaagagctacgcaaagctcaaggcggcaagatccgcagcatccctatccgcctgctattcaatgctccagatctaaattttcgtgctgagtactacctgttcgatcgccagactggtcgtcctctctgcgtgggcaatggcgagacctgcaggcgccgcggcaaagacggagtcgagtcgatgccttgcccttcgcctgacggctgcccactcgccaagggcggcgcctgtaagccctacggccggctcaacgtcgccattggtgatgaggactcactaggcagttttgtgtttcgcacgacgggcttcaacagtattcgtaccttggcggctcgactgcagtacctccaggcaatctccggcaatcgtttggcctgtcttccgctggagctacgtcttcgtggaaagtcgacacggcaaagtcatgggctgccgatcttctacgtggacatcactgtgcgtaacggcatgtcgatagaagaagcgctgcaccatgctcgtgaagtcgatgaggcacgacaggctgcaggctttgatcagagctccctggacgcagcagcgcatttggggttagccaatggagccttcgaggacagcgaagatacgtgtgaagtcatagtccaggagctccttcctgaagccccaatcgccgtaggcacatccccagccacagcgggcacacctgacagcttaaccacacgccccacgctctcggcgctcctgcgtgatagggcccaagcacgcaatcagtaa

SEQ ID NO: 359388 - DNA, 183 bp, Pseudomonas aeruginosa
atgcttagcctcacacgcagcgtcggcaaaaccatccgcattggcgatgacattgaggtcgtcattcttcgcatcagaggcaaccaggtgcgagtcggtatctcagcgccgccccacatcacagtgcatcgcgatgaggtctatcgccgcatccaagctaacccggcaccgccctgctgctag

SEQ ID NO: 359389 - DNA, 180 bp, Pseudomonas aeruginosa
atgggtttgatgcgttttttaggcctgctgtttgtgttgatcagcatcttcgccggtagtgcagccgtagtggcgctgctgatcatcgcggtgcgtttttggccactgatgctggtcatcgtgctgacccttgtcctatttcaatttaggcccaagtcagctcacaaatctaagagataa

SEQ ID NO: 359390 - DNA, 516 bp, Pseudomonas aeruginosa
ttgacatctccgcccactcccagcgtccatcacgccgacattcactcgctgtatctcgatcaccacgcctggttactcggctggctgcgcaagcgcctgcgccacgcagacaatgcagccgacctggcccacgacacttttgtccacctgctcggcaagccaacgcaactgcaggaagtcaggcagccacgtgcttggctgagcgtcgtcgcccgcggtttgctgatcgaccgggtgcgccgtcagcgcgtcgagaaggcctatctggaagccattgcccatctccccgaagcggagatgccctccccagagtcgcagttgatcctgctggagaccctcgcgcgaatcgatgcggtactggatggcctggcgccgaaggtacgtaacgcgtttctgctgtcacggctcgagggcctgggctacaaagagatagccgagcgcctgaacgtgagtctgagctcagtggagaagtacatggccagcgctattcgccactgctttctggcacagcaatga

SEQ ID NO: 359391 - DNA, 975 bp, Pseudomonas aeruginosa
atgagcaccagggaactgccggacgcagtactcgaccaggccatcggctggctggtgcgtctgcaatcgggctatgcggacgagcaaacgcagacggcctgcctgctctggcggcaggcagatccgattcacgaaaccgcctggcaagccttgcagtccagcgagtcggccttcggacgcatggccgaactacccggcggtgtcgcactggacatcctgcaacgcctgcagggcaagcgtcacggccgccgccaggcactcaaggtgctgggctttggcgtggcaatcggcagcctcagtggctggggactgcgtgagcgcccgctagcaacctggggggcggactacgtcaccggtgttggtgagcatcagcagttcctcctgagcgacggcactcgtctgcagctcaatacctccagcgcggtggacgtgcgcttcaccgcacagcgccggacgatcgcattgctgcgcggcgagatcttcatcgactcgggcaaggacagcgaggcaccggcgggttatcgcagcctatgggtggagagccgccatgttcgactacaggccatcggcaccgcctttgcagtgcgcgatgaagccgaaggaacgcgcttgtgggtcgaggacgggatcgtcgctatccatcgcgcagacgcacagccgatccgggtgttggcgggcgaggaatacctgatcctcggctcaggcacccgacgggtcgaacacagcaccatgaatgccagtgcctggacgcgcggccagcttgtggcgaagcgcatgcgcatggccgacctgatcgaggagctaggacgctatcggcagggatggctcagctgcgacccgtcgattgctgcgctggaggtttccggcgtattccagctcgacaacatcgatgacgtcctcgacgccctggccgattcgatgccgctgcgcatccagcgcttcacgccgttgtggattcgcatcgtcgctcgctga

SEQ ID NO: 359392 - DNA, 2424 bp, Pseudomonas aeruginosa
  misc_feature (1206)..(1206): n is a, c, g, or t
atgccatccctttcctcgccgtcgcgagcattgcgtcgcaccaccctcgccctcacccttcgcggcattctcctcagcagcaccgccgtcgtctcactggccagcatcggcgtgcacgctgatcaaaacgggactcatcgctacgacctacacgccggcgcgctggaggattctctgaacgggtttgcccaggctgccgggatcacgctgcctttcgatccatcactgacccaaggcaagcaggcgccagcgctgcatggagaattcgacgtacagagtggcctggatcagctgctgagcggcagtgggctggcagctcgaaggagcgccggcggcaattggctgatccagcccattcccgccgccgaaggtgccctggaaatggatcctctgactatctcggggttgtccccggggtcggtgaccgaaggcaccggctcctacaccaccggcagctccagcaccgcgacgaagctgaacctctcactgcgggaaacgccacagtcggtcagcgtcgtcacgcgccagcaaatggacgatcagaatatgcagtctctggaggacgttgccagggctgccaccggcatcagcacagccaaggactttggcaccgagcgctcgcgttacttttctcgtggattccaggtaaaagacctgcagtacgacggcgtgccaacgagtatttccgagagttactcgatggatgtgacctcggtgaacaacatggcaatctacgaccgtgtagagttcgttcgcggcgcaaacggtctgatgcagggggctggcaacccctcggcagccatcaacctggtgcgtaagcgcccaacggacacctacaagttcaaagccgaaatcggcgctggctcctgggacaactaccacagccagatcgacgtgggcgggccgttgaacgaacagggaacactgcgcgccagagcagtgctgctgtacaacgccggcaacagttttgtagatcgcgctgacaaagagaaccagctcttttacgccattggtgaagccgacttgagcgaagccactaccgtaagcctgggtaccgtgctgcaaaaggattatcacggcggctatgactggggcggtcttcccactcaactcaatggcagcttctatccactgtcgcgctccagctcttttgcgccgagctgggcccacctaaacaaaattaatcgcacagtatttgctgacatnaagcatacgttcaacgacgactggaaactgacggtcaacaccaacctgacctggtcgaacgcagattttctcgggctctacggcaacaacattggtaatgaccagttccgcctgttcaccaacgacaccaaatacgacgatgagcaaatcagcctggatgcggcgctcaacggcgcgttttacctgcttggccaacgccacgaactggtgttcggcgctaacgcacgcaaggatcgcttcatcaacgaatcgcgctacaacaacaacccaagcgtggtcgacatccttgatttcgccccgtcgcaagtggcctcgcccacttatggctacgagcgcatccagtaccgtaacgtgcgcaaggacaagggagtgtatgccgccacccggttgaaccccaccgacgacctgcatgtgatccttggcagccgcttcagctgggtcgactacgcctctgccgactatgaggaccgcttcaaggaagacggaaaagtcattccctacgccggtgtggtctatgacctgactgacagcgcctcggtttacgccagctacaccgagatctatcaggttcaaaacaactacgacattgacaacaagctgctcgacccgatcactggcagtaactacgaaataggccttaagaacgagttctacaacgggctgctcaatacctcgctggcgattttccaggtcgaccagagccatatgccccaggcggttaccggcgcagcacgtatttgcgggccggggcgcacctcaacctgctatgaggaaggcggcaaggtacgcaatcgcggtttcgaggctgaggtgtccggcgagattctcaagggttggaatgcggtagtgggctacacctacagccaccccgaatatgtagctggagcccgcaagggcactgattatgcaactgaaaccgccccccagcggttgttcaaactggcgagcagctatcgtcttcccggagagttgagcgactggcgcgtgggcggcgacctctaccatcagagcaaggtctacctgggcaacgtggagcaaggcgcttacaacctagtcggtctgaacgccaactaccagatcagccgcaacctgagtgcgcaactgaatctcgacaacgtgttcgacaagaaatactacgcctcgatctataactcgaacctgggtaactactacggcgagccgcgcaacttcgccatcaccctgcgatacgagaactga

SEQ ID NO: 359393 - DNA, 921 bp, Pseudomonas aeruginosa
atgtccaacctgctcaagctgcaccgcctgaaactgatcgcactggtcgtgctcgccaacatcggcctggtgctctacctcgccgccgggcaaatcaagacctgggaccggatcgactggctcgacgtggtgggcgagggcggttcggcgctgctggccttctgctgggtctgcctggtgctcgcgcaccggccggccgggcgggtcaccacgttgctggcggtgggcctgggagcggtgttcttctccatgtggatggatgccctcgacgaattcatccagctgcctgcggagatttcctgggaccactggctcgaatcggtgccgatgcccatcggcctgctgctgatcacgctcggcctgtaccactggagcaaggagcagaaagccctcggccagcagctgagcaagcgcgagcggctgttccgagagcacctccaccacgaccgcctgaccccgctcaacggcgccgcctacctgcgccggcagatcgagctggagcagcgtcgctccggcgaggagcagcaggcgttctccctggtgctggtggacctggacgacttcgcacccttcaaccgcaaccatggccacgccgagggcgaccgcgtgctgcaggcggtgagtcagttgctgttgctcaacctgcgccactgcgacctgttgtgccggctggcgggtgatcgtttcgttgccctcctgcctggcaccggcgaggctcaggcctggcgcatcgccggggagctggagaacgccgtgcgctactacgcgcacaagagcgtgccccagggcgagagcctcgtcctcagcgccactgcggtggcctgcatggcgcgcgacgaatcgtcggacagcctgctggagcggctgagcctgtccatggcgagcgccaagtcacggccgcgcctggcccgcagcgcctga

SEQ ID NO: 359394 - DNA, 2514 bp, Pseudomonas aeruginosa
gtgatcgatcagcaattgccgcggacgctgcgtccgctgttcaaggtcagcgccctggcgctggcgattgccgccacgccgtcaggctgggctgaggaaaccaccgaggccggcgaaagcgtcaccgtgtacggccaagccgacagcctggacaaggccctgcgtcagcagcgccgctccgacagcgtggagagcgtggtgcacgcggacagcatcggccagttgcccgacagcaacgccgccgaggccctgcagcgcgtaccggggacgtccgtcgagcgcgaccagggcgaaggccgcttcgtgcgggttcgcggcctgggccccgacctcaatgccgtcaccatcaacggcactctggtgccctcgcccgaggccggtcgccgcgccgtggcgctggacgtgctgcccagcgaactgatccagtcactgtcggtggtcaagaccctgaccccggacatggacgccaactccctgggcggcaccatcgaggtggaaagcctctccgccttcgaccatgacggcctgttcttcagcggcactgcacagaccagctacgacgagaacaccaaccgcttcagcccgaaatactccggcgccgccagccagcgcttcagcttgggcgacggcaccgacaacttcggcgtggccgccgcgctcagctggcagaagcgcaagttcggatcggacaatgtcgagaccggcggcgactgggacttcgacgacggcgcccggctcaacagcctggagcaacgcgactacgacatccagcgtgaacgcagcggcggcgcgctgaacttcgactaccgcccggacgacgacagcaagctctggttgcgcaccctctacagcgagttcaaggacgaggaaacccggcagtccaccaagatcgacttcgaggacgccctggccgaaggcgaaagcggcgaagcggaagtcgagcggcgcctgaagagccgcgaggagacccagaccatccagtcctatgtcttcggcggcgaacagcggcgcggcgactggaccttcagcggccaggtcggctggagcaagtccgacgaggacagtcccggccacatcgacccggccgtttacagcggcggcgacatggacagtggctggtatgacagcgagaagccccgcctgaacatcgactcggccttctacgacccaacccggttcagcctggacaaggtcgagtggggcaaatcctacacctccgaccgcgagaagaacctacgcctggacctgaaccgcgactacgacctggccggcaacccgtcgaccttcaagttcggcggcaagctcagccgacgcaccaaggacaacgacgaggacgtctggaagtacgaagacctcgccgacgcgggcatgagcgatgaccagttgaacctctccaatgcgctggacggcaccgttcactaccgcctgcagaagtttggccagggcatctccgccgacgccatcaagcacctcatcggcgggctggacgcgtcgcagtactacgacgaggaggcctccaccatcaatgacttccgcatgcacgaagacatcgatgccggctacttcatgaacaccgtggacgtcggcgactggcgcttcatcgccggcctgcgctacgagggcacgcacttcgaggccagcggcaccggcatcgacaacggcgactaccaagccatcgagcgcaagcgcgactaccaccactggctgccgggtctgcacgcccgctaccagctggacgaccagacgcagatccgtgcggcctggaccaacaccgtggtgcgcccgaccttcgagcaactcgcgcccggctatgccatcgacggcgatgaagtcgagttcggcaaccccgacctcgccgccctgcgctcgcacaacctggacctggccatcgagcgttacctgggccgcgccagcgtggtttcggcgtcgctgttctacaaggacatcaagaacttcgtctacaacaccgacctcgccggcagcggcgcctgggtggacttcgacgaggcggccactttcgccaacggcgacaaggccaaggtctacggcctggaactggcctggtcgcagaaaatggtcatgctccctgcgccctgggacggcctgctgctgggcgccaacgccaccttcagccgctcgcgagccgagatcgcggatgccgacggcaacaagcgcaacatcgacctgcccagccagtccgacgtcaccggcaacctgctcatcggctacgagaaggaccgcctgagcctgcgcctgaccgccaactacaagtccgattacctctacgaggtcggcaacgtcagcgacaagcgctacgacagtcgtgtcgacgaccagacgcagatcgacttcagcgcgcgctactcgctgacggacaacctgcaggtgttcttcaacgccgaaaacctcggcgacgagccctactacatctacagcggccaccgtcgctacaactaccagtacgaagagtacggcccgacctacaccgtcggcctgaccctcacccacttctga

SEQ ID NO: 359395 - DNA, 1884 bp, Pseudomonas aeruginosa
atgaaacgccgctactccctgactccgctgctcgccggcctgctgctggccggttacgcctgcgccgaatccgtcgccctgcaaccctggccgacccatgccaaggcccaggccattgccctgctgcccggcgccggcagcgtcgtcgccagcaagcgcgacggcctcctgcagctggacgaggcaggcagcgaacgcggtcgcctcgccggccgctacgacttcctcgaccagcgcccctggggcgacggcagcctgctcgccaccttcgaccgcgaacgccagcagccgctgttgcagccgttggccggcaacggccactggggcgctgcgctgcgcctgccgagcccggacttcgcggtcaacggccagtgcctctaccgtgacgccagcgccaacctctacctgttcctggtcggcgagaacggccagggcgagcaatggctggtcggccacggccagaagcttgagcgcgaggcgcgcaaggtgcgtcgcctggccctgccgccgagcgccgagctgtgccgcgccgacgacagcgccggcaccctgtacgtcgacgaacccggcatcggcctgtgggcctatggtgccaacccggaggcagacggcagccgcctgccggtggacctaaacgcgccctatggcaggctcgccggatcggtcagcggactggcggtggtgtccggcggcgtgctcgcgctggacaagggccctgccctgcagcgctacgtgcgtcagggcgacggttgggagaacctcggcgcgatcgcactgaacggcccgaagaaaaccgaacaactcgcggccaccgaacagaccggcacgctgcgcatcgtcctgcaggacgacgccagcgggcactactaccacgccgaagtccctgccctgcccgcacgcgcggaagctccccgcacgctacccgaggtgatgccggcggagcagacgcaaagcgtgcagcgccacggcgacgccgccgatgacccggcgatctgggtcagcgcgaagaacccgaaactcagccgcgtactgggcaccaacaagcaggaaggcctactggtcttcgacctccagggccgccagttgcagagcctggctgccgggctggtgaacaacgtcgacgtgcgccacggcttccggctcggcaatcgccgcgtcgacctggcggtggcgagcaaccgcagcgacaacagcctgaccctgttcgccatcgagccggccgacggcaaggtgcgcgagatcggccgcgtgccaacgccgctggaggaagtctacggtctgtgcctgtacgcgccccgcgacggcgacatccaggccttcgtcaatgacaaggacggacgcttccagcagtaccggctgagcgctcccggcggccaggtgaaaggcgagctgctgcgcgaattccgcgtcgccagccagcccgaaggctgcgtcgccgatgaccgcaaccagcggctgttcctcggcgaagaagacgtggcggtctggaccctcggggcagagccggacgccaagggcgagccggaacaggtactggccgtgggcgacctgctccacgacgacgtagagggcctggccctctaccacggcgccaaggccagctacttgctggtttccagccagggcaacgacagctacctggtgctcgacgccgccgcgccctaccgcgttcgtggtgccttccgcgtcggcctgaacgccgctgccggcatcgacggaacctcggaaaccgacggtatcgaagtcacctcggccaacctgggcggcgcgttcggccaggggatgctggtggtgcaggacggccgcaagcgcctgcctgaaggcacgcagaacttcaagtacgtgccgtgggcggacatcgcccgcgccctcaacctcgactga

SEQ ID NO: 359396 - DNA, 705 bp, Pseudomonas aeruginosa
atgcaagccactctcgaacacaccagcatctgggcactggtcgaagccgccagcccgctcgcccaggccgtgctgctgatcctcctggccgcctcgctggtgagctggtacgtgatcgtccagcgcagcctgctgctgggcggcgcccgccgtcgcctgcgcgccttcgaagcgcgctggcgcgccagcggcgacctgcagcggctgttccgggaaaccaccgaacccggcgaggacgccggcgtcgagcgtatcttccatgccggttaccaggagttcctgcacctgcgtgacgagccgggcatcgatcccgctctgctgatcgaaagcagcgagcgcgccatgcgcgtggtcatcgcccaggaggaggaacgcctgcagcgcggcctgccgttccttgccacggtcggctccaccagcccgtacatcggtctgttcggcaccgtctgggggatcatgaacgccttcatcggcctctccggcgtacagcaagccaccctctccaccgtcgcgccgggcatcgccgaagccctggtcgccaccgctgtcggcctgttcgcagcaatcccggcagtcatggcgtacaaccgcttcgctgccagttccgaccaactgctgggccgctactgcgccttcgccgaacagctgcaggcccagctcaaccgtcgcatccacgccgccccggccatggccgcggcggcctga

SEQ ID NO: 359397 - DNA, 438 bp, Pseudomonas aeruginosa
atgcgacgcatacgcagcaagcacgcacccaaggcggaaatgaacgtagtgccctacatcgacgtcatgctggtgctactggtgatcttcatggtcaccgccccgatgatccagcagggcctgaaggtggaactgcccaaggtggccagcgaggcgttacccagtgagaccgagcgcccggtgctgacgctcacggtgcaggccgacggcggctaccactggtacctgggcagccaggtggataccgaacagcgcaccgacgccgccggcaacctggacgagctgactgccaagctcacccgcctgggcgccgacacccaggtgttgatccgcgccgaccaggcggtggactacggccgggtgatcgccgccatggccgccctgcagcgcggtggcgtcagcgatgtcggactgatcaccgaggcgccgcaatcgtga

SEQ ID NO: 359398 - DNA, 759 bp, Pseudomonas aeruginosa
gtgaaccccaggatcacccgccgcgccctgcctgccgccatcagcgccgggctgcacgcgctcgcgctggccggcctgtacatcggtttccacccttcggcgccggccaccccggcgccgaaggtgatgcgtaccgcgctggtcagcctgccgagccccgcgcccattgctccagcgccgccacccgtggtgcaaccgccagagcccgttacaccgcccccaccacaggtcgaggcgcctcgcccggcgccgcaacctgatgtcgcccaactgacacggcgcaaagtcgagcagcgtgaacgcgaagagcgccagcgcgaggaacggcgccaggagcagcagcgcatcgccgagcagcaacgtcaggaacaggagcagcgctcacaccagcaggccgagcaacgggcacgcgccgaacacgatcgccagctcgccgcacagcaggcagccgccgccgaggctgtccgcgccgcacagaactaccagccactggtgaagaaggctccgacctacccggacagcgccctcgaccgtcgtctggaaggcgactgcacggtggaatacaccgtcgcccccaacggttcggtacgcgacccgcgcgtggtccccggcgcctgcagccacagcgtgttcgagcgcccgtcgctgcaggccgccacccgcttccgctaccagccacgggtaatcgacggccaggccgtcgccgtggccaacgtgcgcaacaccttccattaccggatccaggaaacctcccgatga

SEQ ID NO: 359399 - DNA, 1974 bp, Pseudomonas aeruginosa
atgagtgccgagccgaccgatttccacgcccatctctccgccttcgacgaccaggcgatcaacccctccggcaacgtgccgatgagcgagatcatcgacgcttcgcgccgccgcctgttgaagaacagcctggtgctgggcgcggtcggcttcctcggcggcagcctgttccccggccgctcgctgttcgctgccgacgcgccggtgcccactgcgctgctcggcttcaagggcgtgccggtacagcaggacccgacgttcgaccgggtgatcgtcgctgagggctacaccgcccggccgttcttctcctggggcgacaccgtagtgaccggcgcgccggcctggaaaggcgacgccagcgaggactggaaagcccaggagctgcaggccggcgacaaccatgacggcatgcactacttccccttccccgatgcgccggacagccacggcctgctggtcatcaaccacgaatacatcaacccgacgctgcatccgaagggccagaccttcgaggatcgtcccgatggttcgcgcgggcgtccggaaggcgaggtgcgcaaggaaatcgcggcccacggcctgagcgtgatcgaggtgaagaaggacgccgggggccagtggcagcgcgtcgaggggtcgagctacaaccgccgcatcaccggcagctcgccgctggacctgtccggccccctggctggccacgatctgctgcgcaccgccagcgaccccgaggccaagcgagtactcggcaccctgaacaactgctccatgggcgtcacgccctggggtacctaccttgcgtgcgaggagaactggcaccagtacttcgtcaaccgcgacaaggacgacttcgccaaacgcgtttcgcacaagcgctacggactttccaacggccagttcagcaattactacgcgtgggaagcggtggatgagcgcttcgatgcgacgcccaaggccgaccagccccacggcggccacgtcaacgagccgaaccgtttcggctgggtggtggagatcgaccccttcgacccgacctccacgccgaagaaacgcaccgccgtcggccgcttctgccgcgagtgctcgaccctgtcgctgggcgccgacaaccgcatggcgttctattacggcgatgacaccaagggcgagtacatctacaagttcgtccccgcaggcacgtaccaaccggacaaccgcgcggcaaacgccgatctgctggacgaaggcaccctctacgttgcgcgcttcaacgccgacggcagtggccagtggctgcccctggtgcacggacagaacggcctgacggcggagaacggtttccccagccaggccgaggtgctggtcaacgcccgcgccgctgccgacaagctgggcgccacgcccatggaccgccccgagtgggtggccgtgcagcagaccacccgcgaggtgtacgtcagcctcaccaacaacgatgcccgcggcaagaagcagccggtggacgccgccaacccacgcaaagaaaacctccacgggcagatcctgcgctggaacgaggccggcggcgacccgaccgccaccagcttccagtgggacatcttcctgctggccggcgagcacaaaggctccggcgcgcctcagaacctgatcggcaccatcaacggcgacatcttctcctcgccggacgggctctacttcgacaccgccgggcgcctgtggatcgagaccgactacgacgacgatgtcccggcgatgcaggccatgggctgcaaccagctgctctgcgccgacccgcacagccgcgaggtgcggcgcttcctggtcggcccgcgcggctgcgagctgaccggcattacccagacgccggatggcaagacgctgtgggtgaatatccagcacccgggtatcagcttcccagccagcgacggcaagagcatcccgcgttcgacgacgctggtgatcaccaaagatgatggggacgtgattggtacctaa

SEQ ID NO: 359400 - DNA, 3846 bp, Pseudomonas aeruginosa
atgtcgatagaagtcacaggtcccgaacgatatgaatttcagtactgtgtcacgctggaggtggtgcttcggttctggggaagtggggtgcgggcagtcgttgatagcgggggtgaggactcgacactagaggtcgttatcgacggtagtgattttgaaattgaactacaggtgaagggagctgagagtcacaaaaaggctgtcgatattgaggtgctacgcgagtaccttgctcacttccctagtcggaaagcaaataatagcttgcttgaacgaatgctagaaagctccgaaagactagtgctactcgtttgcactcagcgtgctatggactttgcatcacctctgacggtcagatctgattggcaaggaaagttacatcgcgtgccccctctttccgtcgctgcggcgcagtcttttgttgatttagtcattgcatcgaaaccagctaagagtaccgaactagaaaaaagaagggcaaaggcattttccgatcttggaagtaagacctctgcggccagcctcaacgccgcttttcagcgtctcttcgtacaggaaaatgtcactaaggacggtgttatagcttgccttcatgcgcaattgcggactctcgggattcccaatgacagagtaatgctcgcaactctccagatgctgcaaaaagtacgagacagtaaaggtacagggctagatgtggttcctgcgctccgcgagatcctgaattcagagatatcgccctcgatgcggccgcttgattacgttgagcgcggcagtgaaacgatgtggacccaagaactctctagccagcgtgcgctcctactatcaggcccacctcgctgtggtaagacagaagcagcgaattggattgcaagtgaaatgcagggactcggctttgacgtcgtttctactggcttggttgaagaggctgaacgtgtccttttggacagcaggcacacagagattctggtcgttttggacgaccctctaggttctgatttcgataaaagctcgagagctgcccaggcattacgtaggctgcagagtttgattcggcgtattcaacccagcagacgattgatagtttcccaatcgcaggaggcgttgcttgctgaaagcgattgcaactctttgggcgatgtgcggacaggaggttttcggtggcatgacttgggcatatgcccgccgagtttcttgaccaaagtgtggaacgcgcaatcgcagagtaatcaagtcaccgagacagtaagagaggctgtggaggcggccatagccagcggggagatagatgttccagctggggtgctagcgcatttggcggcctaccaccaacaactggagggggcagatgtggttcgtctggctcagaacttggctagcgagtctgctgccgattttgcatcgaggctacgcgctggtggtatgcagcaagtcatgcgggcattggcaatcggatcgactgcggctgaaacctctgcggatcgtgaactcgcatttatattaggcgagggggcagagcttgatatgccatctgaacatgactactggtctttgtcgcctgacgaaaagctcgttgtgcccgagctggcgccggcatatgaagatgaacctcgattacctgaggatgcaaagcggcgccttatcagtctagaagagtatcgagttgttcgcaggaaaagaccggatcacttcgagttctctcatccgtactaccgttctgttgcccgtcatttcgtgaagcgagtagcctctctggagaaagacgacttactgaccgctatacggcgcgggcttttttctccctcggcgagcacctcaggggcgacagccaggaatctttggtggctacatcatgatctggcgtcgcgccttgatcttggtgagccgttggtacacctggcagagaaaggacttcgttggcattttccggccaccagagacctttgctatcaattcttgcttgaggtcgtcaaagcgaaaccagagagctacgaagataagctccagtcgtgggtcaactcaatgagccgtatcaggctcgacgatgtcatctgggagcgcggtgagccttacttccccgtagagaaccagcatacgaacctgtcgtttggaagagatgttcctgctcccgatatggcgcgagtagcgctaacagtagaaagcctacgctcaggggctgcgctacctagccctggacgtgcagtagaaatcttacggtacttcaagtctcggccaagtgaattggtctctgaggttcttcgacgccttttaagctattcagaggggttgattcgtgcagaggcggctcttatatggctgctgatagagcgggaaaatgacgatgaaattctggagcggctccagcgtgatacgcatccttctgtggtcagccgcattctggacgcatctatcgatacctggaacgagctcagctctggtcgaaaggagaagctagtagctacgctgcgctcttcccactctgagcctgaaactgcagcagtcgcagtgctaaggctgctgaatcacttccgtgaagctgattttgaggagccaagtaagactgcatcgaagccctgggaactagtcggggtggttctggcgccagcactaaggcgctatccaaattcattccggatgatcggacatcgtctctacgaagtcttcgacaccgcccttaaatatctctccgcttcgccttctgcagcggtgatggatgcttggatcgattggctacagattcgtgtcgccggcggacagctcccggatgactatatgctcggggcggtgacgtccctgctgcatgcccaggcgttttcttctgaggctagacgagcatgcatcgagcgattgcttgcaacacctagcacgggtgcagtgttggttttcgtggctgatcttgttgcgaactggtatgcattgagtgacgaagagcgcttgctcgtcagagcacgccttctgagcgttcgagaggacgatgtttgggtgaaggctgcagctctcacacgaaaaagcgttccgtcagagattgaagagctgctcctagggctgggcaaactgggtgtgccggctgctcaactgattgagcagttgccgccagaactgctcgctgcttgcgtacgtttacacaaggggagcccgcagcccttgtggtatttgggggcgcatcatgggggatcaccaatttggccaagggtgattcgacaaatcgcatgcatgccagagcacccactttttgaagagtgtctccttgaactcattggctctgagcatcacttcggcacccaagcgctaagcgaagttatccgtgcgcttgatgcatccagtcgtgaccgtttgtttggccttctcttggactggcagacgggagtgaccggagaatggcaccagctagagtttgacctgctgctggagctagcggccaatgacgatgtccgtggcgagatgattggtcgtatggtcgcgaaggctgaccaaattttggagcgcgtcgaggacgctgaagaatggtcgcatagatcggatgttcatgacgctcttcggggcgcattccctttcgactttttgattggagatacagagagcacggctaaagcaatcagctcggatgatccaaattggtcactagcagatgcctctgagcgattggtctctatggtagaagtggggagtcttcgattgccctcgtctcactgggaggtaactcgatacctgagggcgcttgatgcgggggaagatctatttaaaagggctgaggccgcgcggaacgctgcaattcagacctacagcgctttgcagttctcagacaaatcctctccggtggtgcgcttaccgaattggattggaccatag

SEQ ID NO: 359401 - DNA, 741 bp, Pseudomonas aeruginosa
atggggcagtttaatagaaagattgttcggagaaaggtccattgtggagattgcaccctggctgagctttgtctgcctttttcactggcgcatgatgaggttgacttgcttgataagttggttaagcgcagtcggccaattgagcggggagagtttttgtttcgccagggagaggcttttgaggcagtatttgccattcgcagcgggtcggttaagagtttttgtataactgacagtggcttggaacagattacaggttttcaatttcctagtgaaatacttggaatggctggtatggatgaaggtttttatccaatgtctgcgcaagcacttgagtccacatctgtctgcgaaatcccctttgagcaaatcgaggaactggctgaggaaattcctcagttgcggcgtcaattgatgcggacgatgagtcgcgagattagggtagatcagcaaatgatgttgctcctgtcaaaaaaggcttctgaggagcgaatagccacttttctactgaatttttctgctcgacttagcgctcgtgggtattctgcgaacgtccttcgtctaagcatgtcccgaagtgaagtcggtgattatttaggtctcgctatggagacggtctcgcgagcatttgcgaggctgcagcaacgtgggttgattacggtgcacggaaaagagctggagatagtcgattatacagggttgtgccagttggccggtggagcaggtgatggatctacatga

SEQ ID NO: 359402 - DNA, 1029 bp, Pseudomonas aeruginosa
gtgttcaggataagctcaggattgataagtcaactagtaaatgtcttgaagtgtgagggcttagatactgagcgtttgtgtcgggaagccggtgtcgaccgaaataagttgcaaggtactggcggcttcttcgattcggatgatcttgtcagactggcagacatttcggctaaggagtgtggggtggcccatattggattgcgcgcctatcaggatttccttccaggtgttttccaattagtaggctacgtcatgctatcgagccatagcctgatggaaggtttagagtacttggtgaagtactcggagctgataggaaatgggttgatagtcggaatggatgacgaaggaggaggggttcgaatttggtcggttgtttatcaggaagataaagtcgaggcttcccatgtcctgcaggatatagcggtttcctcgctgttaggtttcttgaagtgggttctaggaggtcgcgaggtactggttgatgaggttgttttctcttatgaaaagccgttggatatatctgaacacattcgtctcttcggtagtaatgtgaagttcggggcaggccgaaccagcattgttcttgataagaaagttcttttagagcctttgagtactgctgatgaaggcttattaatgatgcacgacaattttgcgagatcgcaactggataggctgcgccggctgacctatagcgattcagtaaggaaagtacttctggagcaattggcacaaggcgtgagtgacatgaagtcagtttcagtggctctaaagctcggggagcgaaccttgcagcgtggtctggcaaaggaggggagtaacttcaagattctattggatgaagttcgtaatcagttggctgaatattatctggctcatggttcgctagatatctctaagatatcggagttgctagcatttaaggaggttagcagttttcataaggcctgtcgtcgctggtttaatatgagtcctggagtgtttagagctaacaaactgaagaggatactgcctgcgcagaactag

SEQ ID NO: 359403 - DNA, 306 bp, Pseudomonas aeruginosa
atgaaaaagcgcgaattcctactgccgctcgccacgcttaccgctgcggtaaccgctaaccaagcatctgcatccactgccatcaccaataccgataaggctacggaagggaccgtcattgagaaccaggctgcggcactgcctatcgtcaacgtcggcgagcaagtggtcaccggccgccaaggtgagaacctcttcagcttcatccttaagcgtggtgaagacggccagatggttgctgctcactactcgcatagctcgcatgcatcccatagctctcacagctcgcactattcgagccgctaa

SEQ ID NO: 359404 - DNA, 1215 bp, Pseudomonas aeruginosa
atggggaagttaaccgctaagcaggtggagaaccttctgcaggcaggtagctatgaggatggagaagggttgcggataaccgtccaaacctcgggcaggaagagctggatattccggtatcaactaaatggccgtcgccgcgagatgggagtgggcgcctatccccaggtggggctgaaggacgctcgtctggcatgcagcgctcttcgccttcaaatcagctcgggtattgatcctttagaggctcgcgatgctgaacggcgagctcgtgaagatgccgagagagaaaggctggctcggctgaagacatttgagctaattgcaagggaatacttcgaagcgcatagcggggggtggtctgatcgttggcgcaaggggtggattcgcaagctagaaatctacgtctttagcagcatcggtaagctcagtcctagagacgtatcgaccgaagatgtcttaggtattttgagaccaatctgggctgtcaaaagccgtactgcggatgaggtgcgctcgcaaattgagcaagttctagatgctgctaaagcccggggtcttcgagacggtgagaaccctgcgcgctggaaaggccacctggacaatcttctgagcaggtctgataagaagaaggcacggaccagtaagagctttgttgctctaaagtggaaagacgctccagcattgatgcgcaagcttggtgaactgaatattaggaacgctcaggctttgcagttcctgctactcaccggtgcacgcagtcatatggttcggttcgccaaatgggatgagttcgactgggaaaagcggacctggaatctcgaaggctctcggatgaaaacacgccagccatttacagttcctttggctgacgaggttgtcgcgtttcttgaatcaatcccgagggtgaaagactccccgtatgtatttcctgggcatggtaggtctggggttatgcacgcaaatggcatgcgaaatcttctgctcgatgatttggggtatgaggatgtgacttgccacggtttccgctcgacgttccgggattgggcgggggagtgcaccaactatccgagagaggtctgcgagttgtctttggcgcatgatgagcggagtagcacggagagctcgtactcacgaaccgattttttagagaagcgccgacctttgatggccgactgggcgaggtttcttttggaggtgactgattcggtaaattga

SEQ ID NO: 359405 - DNA, 1161 bp, Pseudomonas aeruginosa
atgaatcagatacgctgcgccgttctagtaacccttatcgccttcctcacaatctgtgctcccagggcgttcgcatttcaagtgaacccttgttatcgcgtcctagagataaaaaatggccttccagaccagggcaggatccgagcttggttcatcaatacgtgttggctgaagaacgatttcaacaccgttcatgagcacctcaccaattttgctatcaatgagtaccttgagcctgcctactacctaaggaaccccaaggtacctttggtgaaccgtgctggtggtgactcagtgaatttcatcaccggtgctgagtggcccaaaggagcaaggccccagcacaccacctatgggatcatctatggcagttggtggaacgacgatccgctcatgttcacttggggcgagggcgcgaatttcaccactgggctgctcaagctaaggaggcaattcgaagacacccatgctgagtaccgaggcggtgtcagtggctgcagggtcaaggcagcagactatcttccctggcattcccacttcggcaggatgcaatacctgcacttcatgacaaacgaactcaacgctaaggatgatcaggcgaggttaagaaagaccacatccgaggcgctcctctggatggaattcgcctacaaagtagcgatcaagaacatcaaggcagacgaccctttgactgaggcagatgagatcaagcttgggatgcctcgggtcgacctcaactactgccttgaagacaagaagaacgagaaggttcggacgctctttgctcctgccggcacggactatgaggggcgcaaccttctcacgccggatgttgctcttgggagcatgctgcacgtcatgcaggactccttctcaccagcccatacctgtcgggtcgatgagtatgtagccggaaggccatacgctgtgctgacgaacgtctacaactatggcgaacaggtagaagcaaaccttggggactatcaccacgacaaggatgactatccggggtggctgatcacctatacccgaaccgggaagcacgtctacgaaaacgatcccattgtagtcggagcctggctgatcccctccgtcgtcatgctggccttgatggtggtgatcgaccgtctgctgggcaaaccccaggaagcgatggcctga

SEQ ID NO: 359406 - DNA, 1314 bp, Pseudomonas aeruginosa
atggatgcacatgagctatacagctttctgagagatccgcagctgcttgaactaattgaactaaataagatttctaataatattttcgatattattaagctcggcgaaaatcaaaattcaagcatgcttgcatggtgcatgaatccgaacgaaggccatgctcaaggcgatgcgctaatacgtgattttctcgaaagcgcatacgcagctagcgagggctgtacttacgacaataagaaattcttcgccgagtggacccctgggcgaattagaaccactagtttcggcgccgcgtttgtgacgcgcgaattaagtataaaagttgacgacggcagcgccaatggcaggcttgatttgttcctggtcgatccacagaacaaaattctcattactatagaaaacaaggtaaaagcatcactagatgccgctcagctcgaaaaatatgtagctgcagtaaagtctcagctatcttctcgaagggtattctctgagtatcaccttgctttcattgtactagacaaagacttagaatcttacacagaagaacagcttgacgcattaggtaaacgctgggctttaatggattatcaatggctagaactatctgcgaatcgagcacggcacaacctcactcggggaaatcaatctgcacagatgcttgccgcgtactgtcaaagtgtcacaaactgggaagatccagcgagaaaagaaatatccgaaataatggcggacttagtaatttctcacccgactgttatagagtgccttcgtaagcttagcggaaccgcaatggatcgctgggtttcatcaacgctggaagggcatgaaggtgagttgacccttttcttggcacaacacaaagttgtctgtcaaaagctaataagcattaaaggtgtctccagcctcttaccgaagttgaaaaaagcaatgccgtcgttatctgcggattgcattgaagaaggtggctattggtttaccataaagcctccgtccgcccagaaaattgaacgggaagaccattgggcgatttacattgacctatatcggctaaataaaatctcaacggctacagctcaaaaattcaatgtgaagctcgtctgggtgaaaagtgcgttcgatccatctacttgctctgaaattgcattgcgcaattactttgaatctgaattcaaaggacttagcaaacgcgccacttcggataaaaggcgtatcatgttggccgagcatgttacgcccactgaggccatagccgtggccgccgaaaccattggaagattagaacaagggctcaaggaatatctcaaggcaccatga

SEQ ID NO: 359407 - DNA, 165 bp, Pseudomonas aeruginosa
atgagtgtcgaaagtcgcctgcactggctggaggcacccggccaatttctgccggtgccgaccgactgcaatgagtcggtcgctgcccctcgcctgctgcagaaatcggccaaaagcttacatagccatgacgcgatccttctaagggcacagaggattgattga

SEQ ID NO: 359408 - DNA, 285 bp, Pseudomonas aeruginosa
ttggtcgagggcttatggttgcgactgatgtgcctggaagaggccatcctgctgattctaaggcactatcccttcgagctggtttccgaccgaattagggctcgaaacgacgtagacatgtcgctgaggatcgccttcggtagttctagtgcgaacacacaggagaccgtgatagtggctttggagagctacctgggtgacttggttcggttgacaggcagcaagtacaggtcgcttgctgaaaagcttgtgcccagtggccagccggccaaggaagacaggtga

SEQ ID NO: 359409 - DNA, 1032 bp, Pseudomonas aeruginosa
atgcaagatacgacccctatgtcggccaaggccgcgttcgaaacactcaaggccgcaggctatccccgagcctatatagagaagctgctcccagaatggtgggataacagcctgttcaaatccgcagctggggtgacgcagtttgcgctcatccttaagcagcgcttgggtttgagtgtgcacatcgataacgccggtaacttggtgatcgatgctaagcctgctcgtactcgtttcaagcacaggagtgacaccctagaggctgagctgaatgtggctgccagccttggcatcgctctgagcaagctagccctcttctgcgccaagcaaccgtactctgcattgccggctgatccgaaggttgttcgcgaaaagctcctggccgtctcagggcgaggccatgtcgatttcgaggggcttctcgatctctgttgggtgtcgggaatccccgtgctttttctgagtgcccttccaaagactagcaagcgaatgaccggcatggcgctgagcatcgagggtcgaccggtggtcgtgctgggcctgcatcacgaccagcactcccgtcagctcttcgtgcttgctcatgagcttggccacattctttgcgggcatctggagggagacagcgttctgattgatgaggacctggtcgaggtcactgactccctggcgggctccaggacagcccgtaaagatgcggaagaaaaagaggctgatgcgtttgccctctcactgatccgtaacggccatagcgatgctgctgtggcgatcagggccgactcagcagtggggctggcgtcagctgctgcaatcaaaggccaggagcttggagtagatccagggcatctcatcctttcctatgcaagggccaatgatgattggatgcgtgccaatatggcgcttgggtacggccgatcccagaccaatgcactgaaagtcattaaggaaaggttcttcgctaatacagatctgcagcttcttagcgacgagaaccgcgagcatgccctgaccatccaaggcttccacgggtaa

SEQ ID NO: 359410 - DNA, 588 bp, Pseudomonas aeruginosa
atgcgtgaagccgagatcaaacgagccctaacgtcccacttagagtccagccaggcctgtatggccaacctcttcctcgaggaactggagctcaatggcggcgaggtccgagctgatctggtcgatgtgcatgagatgcactgctacgagatcaagagcgaaactgattcactgagacgcctgattggccaaggctctcgttacgcccgcgtctttgaccgcatcacgctagtcacagcagagcgccacctgaagaaggcccttcctcttctgcctcactggtggggcgtcatggtggtacctgaagccgaaggtggcgaattcaaattggttcgcactgccaagcccaacaaacgccacgaatcgcaagttctagcgaccctactgaagcgggacgaggcactcagcctacttagcgagcttggcctgatgcgaggctggaagagcaaaagtctatacctcattcatgcccatcttgccgatatgctcagtgtggatgaactgcgaaacaaagtccgtagctacctaattcgccgggcagaaggcactgacttcgcagagccagacctcttcagtactgctctgtga

SEQ ID NO: 359411 - DNA, 693 bp, Pseudomonas aeruginosa
atgctgcagcaggctctgaagttttttcaggtcatcgcactacgagtgcgtgttccttctattggcgctgccgcaagcgtgctgaatcaggccaagaagtccctggaactcgctcgggagctgagtgcctcggttcgtctcatcgttgaccttggcgtcaccccgcaggagtggatgggcagggacacgaagcaactcacggaggtattgcgtgaattgcaaaaagtagggccgcaaagccttcacttggcctcaggtgcatttccaaattcgctggcacaggtccaggtgggagagtttgcccgacgggattggaagctccggaaagagattcaggacggtgctccggatctggttatcggatacgccgattacggagtgatatcgcccgaatggtcagaggacgcgctcaccaagcgtggtggcagggttgccattcgctatgcgcgtctggacgactggctggtgttgcgtgctgacggcaagagcaagaagcactctgaagacctgtctatcctgatggtcaacgtttaccgagacagcttcaaagggccgcgctactcaaccggggatcacatgatcgcagtgagagcggacaagttcgccgccgctcgccagaagaagagcgggacctaccacgtcactgaaggttggattcaccacgtcgctgtggtggtcacagagcagtactga

SEQ ID NO: 359412 - DNA, 774 bp, Pseudomonas aeruginosa
atggcgctcaccagttctcgcccacctgccctcatccaaattctcgagcttgttttgcaggacctacaagaagactcagactccacgcccctccccgcggacttaatcggatcgagcgaaccgtcgctaaatgaagaaccgttgccaggagaagatgcgaagggatccgatatcggagcactaggaacgcgagcccccactgctgaagaaagtgctatcggcaagcttgtactggatggaactcccaccgcctgtactcctttcgaagtggcgagctacttttgggcagttggacagggacatttcggtgaagacagaaaaccgtatgcgtcagcgtggccctcccgctggaaccccgtgattgtcgagttcttcaaagcaacgcaaaccaaacccgaaggcgacacaacctcgtggtgcgcggcctttgtcaattactgcatcacgcgaggcgcaagcgggcgcactctgcctacggactcatcccccccaactaagagtgccagagcactgtcattcaagacctggagcaagcccgcggtcgcccctcaacctggcgatattgtcgtattcgataacatcactgatggtgatggtggaaagggtcacgttgctttcttcttggccgatcagggagaccgtgtgctggtgctcggtggtaatcagcgcgacgggacgcccccgcgctctacaatctgccgcaagtcatacaccaaaaacggaaccatcctgaaagtcgttagctaccgtactaacccgcagctgcacccgtag

SEQ ID NO: 359413 - DNA, 1770 bp, Pseudomonas aeruginosa
atgagtgctcctgagcctgcttacgtacttgccgcgcaggacctgcgcggcaacgaggatcaatggaacgcctatgagtcgtctggcaattgcgtgatcttggccggtcctggcagtgggaaaaccaaaaccatcacgatcaaaattgccaggctgttagctgaaaccgtacgcccgccacagcgcattgcctgcatcacctacagcaacgcttgcgttggagaactcagagcaaggctcaataagcttggtgtagatgacggtcaccgtatcgttatctccacggtccattctttttgtttgactgagctagttctgccttatgccgccatggcgaacctagcggtaccaacgccattggcggtagctacaccagatgaggccagcaagctgttccgcgcagcctacgagtcaattcatggcgggaagatgagccgttcgttcaagacctcctgcgacaaactcagacgtaccatcccagatcggcgtagcgatgagtggcaaggttggagtcctcgagagaccagggttgtcgaggcttacgaggcattgctgctagcaaaggggctgatcgattttgacggtttggtgcttgccggccttgagctagtagagaagcatgaatgggtacgtcgtgccattaaggcgaagtaccctgttgtggtggtcgacgagtaccaagatctcggcttgccattgcaccgcatcgtacgcgttttgcttgatgcgggggtgcgggtgatcgcggtcggggaccctgaccagtcgatctatggcttcactggagcgcgaccagatctcctgaaatcgctagcgcgagatccgagaattgagccgataacacttcagctgaattaccgttgtgctaatcaaatcatcgcagcatccaggacgcttctgcctgatcccgcagcatttcgctcccatgacggcagagccggtgagatcagtattcacgaccgtcagacctcgttgcgtggacaggcacgttatgcgcttggaactttagtgcctgcgctccttgaggcaaatcccagttgggttccgggtgacattgccgttctctatcgctccctcaatgagggaaccgtgatcgcagaggtggcggacagtctgggaatgcgttacttccgcctggataacggctctcccatcaagcgcacgagactgactgagtggctaactgaagctgccaggtggtgtgctggaggatggcagacaggtgaggtgcagctctctcagcttcttaaagcttggcaacggctgaaccgatctcgcacaagtgaggctagtcgactggagtcccgcaaacggctgatagcggcactgttctcgctgcgtgatggcagtcttgctcttcgagtttggctgcaggccctacgtggtgccgtgctggctacgttgctcactgaagagcctggtcttgccgacgaggtggatactctcaatgccttgatccgcgcgacagagaaaggggaggttttggaagcgtttactgttcagatctttggtaaccaggggaagagccctgaccagatcaacctcatgacgctgcacagctcaaaagggctcgagtttcaggccgtcattatgccgggtctcgaagacgggacattcccaaatgactatgagaaaaagactcgagagcagtatcaggaggcggcgcgcctgttctacgtcggcgtgacacgtgcgaaggcgcaggttcatttgatgttcgactcggacgagtctccgttcattactggcattcgtgcggcgacgcaatga

SEQ ID NO: 359414 - DNA, 732 bp, Pseudomonas aeruginosa
ttggaggaccaggaccgggacgatcttgagcgctacatggatgtcacccgtggtgagctgttcttcgcgaagggtgtcattctggtcgagggcgacgcagaaaagtttctccttcccacactagccagacagcatgatgaggagtttgactttgatgcgctcggtatctctgtctgctctatcgccggtaccaacttcgccccctatctgaaattgctcgggcctcaaggcctcaaccttccggttgcggtgattactgatttggatccgaaggacgccgcggtcagccaggaagatgaggatccggaggagagcggtaccgtggacagctacggtgagaatcgcgtagtgaatcaaatcatgcgtgagctgctgacggaggagcattggggggagctctccttcagtgaggtgatgaagctcgctccaaggcatggcgtcttccttaacgagtatacgttcgaagtggacctgtttaaggcaggctccaagaagtactttcagaaagctgcgaaatcgttgtcgtcaaacaaggctatgcacaagcgcttcgacactctggctgcgaacccggcatcgttggatccgaagcaattcctcaaagacatcgactccattggaaaggggcggtttgctcagcgcttagcttcggtcttgattgaggaggacgctgacgtgtgtccagaatacattcgtagcgccttagagtacttgaaggagcgattgggatga

SEQ ID NO: 359415 - DNA, 750 bp, Pseudomonas aeruginosa
atggacgttagatcgggaaagtttaagcgacgccctattaattgtaaggactgtagtcacgcagatcgttgcttcccttctttgctcgatgatgatgaggaagttgaacaatttgacgcgatggttagacgtaaacgccctttggcgcgtggggaggttctgtttaggcaagatggaccctttcgttctctgtttgcgattcgtgcgggctctttaaagagctactatcttgcagaggacggggttgagcagataacaggtttcctattgcccggcgagcttatagggctgattggtatggttgccgatgcctatccggtctcagcaaagtccctagaagaaacattcctttgtgaagttttttttgatccattaggcgactcatatcagagagctccgaaactgcaaaaaaaagtgatgcgatcactcagtcgagagactcgggaggttcagcagttaatgtggcttctctctcgaaaaacttcagagcagagagttgccgcttttttggttaatttctctgcgagattaaggtctcgagggttttctacgagtaccatccggttgagtatgtcgcggactgagatttctaactacttaggccttgccatggaaacggtatctagagctcttgctcgtttgcaggaagatggattgatagttgttagtgggaaacggttggaagtgcttgattggcttggcttgtgtgggctggccggcggtagtaaagatcgcctagggttaaggtga

SEQ ID NO: 359416 - DNA, 1017 bp, Pseudomonas aeruginosa
atgagtatgataggtgccggtctagctgatcaaatggtgaatatcctcgcaggtgaaaagctcaatactgaggagctatgcaagaaggctggcatcaatctatatagatccggaacctcagaaaaatttatcccactcgatagcgttgttaaactaatgcagctagcagagttggagagcgggaacccaaatatcggtttaaaagcctatcagcacttccttcctgggacattccaactggttggctatgtaatgatgtccagcgccaccctaagagatgcaatccagtcaatgatgcgattttcagaactcctaggcaatggcgcaacatccggcttggcgcaagagaaaaatggtattcgcatttggtacaccggaaacaccgaagatcctccccaaaactccagagtcttcaatgacgccatcatgacctcaactctcgcattctgcagcttgattgccggtggaaaactccctggagtaaaagatgtcgagttcgcttaccccaccccaccagatatatctgagcatcagaaaatttttggctgccccctacacttcaatgcaggtaggtacagtattctgtttgacaaccaggcattatcgctccctctaagcacagcaaatgcagccctatctcaactccacgataggctggctgagcaccagaaagatattctgaagaacggctgctatagcgagcggaccagagcaatacttattaaacgcctcagtaatgccccttgcgacatggattctgtagcgaaagagctaaatatcaatccacgctcgctacagcgggaaatctccaaagaaggcgaaagctttaaggggattttaaataaaacaaggaaagagctagctgaatactatctgaagaacttccactcctaccctctggagcgcataagcgaactactaggatttaaggagctgagtagctttcacaaggcctgtttgcgatggttcaatacatcgccaggaaacttccgaaacctctttatcgatggaggctga

SEQ ID NO: 359417 - DNA, 372 bp, Pseudomonas aeruginosa
atgtcgcgacttgctgagtttcgtgctgcagaaaaagctcttcaagaacaattggctcacctggaggtcatgaaaaatgatgctggcctcaagcgcgaaataaaatttgaagaagaagtaaaagaattgatgcgggagtatgggaaaagtctgcgcgatgtcatcgccattctcgatccggagtctcattttagcagtgcaaaaaatctcgcgcgcggcactgcatcgcagcgcaaggctcgtgctgtcaaggtctacaaaaatccgaacaccaatgaggttgtcgagaccaaaggtggaaaccacaaggttctgaaggcgtggaaggcggaatatggaaacgaccttgttgagtcctggctgcaaagctaa

SEQ ID NO: 359418 - DNA, 195 bp, Pseudomonas aeruginosa
atggaagcacgacaaggcatgagccggcgcgatctgctcgcgttgatcggcaagactgcgggggccgcggcgatgtaccaagccatgacctcactgggcttcgccgcggagtccgactaccgtggcgaattacgcctacaaggagcgcccaggggggccatgtactggtgctgggggcgggcctggccggcatga

SEQ ID NO: 359419 - DNA, 1410 bp, Pseudomonas aeruginosa
atgacggccgcctacgaactccgcaaggccggttacaaggtgcaggtactggaatacaacgccaaggccggtgggcgctgctggacgttgcgcggcggtgaccgcttcactgaaatgggcggcgccacccagcactgcgagtttgaccccggcctctacctcaatcctgggccatggcgcatcccgtatcaccattacgcagtgttggattactgcaagcgcttcggcgtacatctggaacccttcgttcaggtcaaccataacgcggtgttccacgccagcaaggcattcggcggaaagccacagaaactgcgcgcggtacaggccgacttccaagggcacatcgccgagctgctgcataaggcagttggccagaacgcactgtcggccagcgtgacccatgaggatggcgacaaattgctggaagccttgcgcgactggggcgctctggacggtcaggggcgttacctgaagtcgccagcagcaagcctgcgccgtggttatgtctccgacccagccggcgggctgatgccgctggcgcaggattctgatccgctggacgccgcggagctggtgcgctccggcctctggcgacacctgatcgatggccaggaatacgactaccagaccaccttgttccagcctgtcggcggcatggacatgatcgcccaggccttcgcccgccaagtcaacgacctaatccgctacaacagcaaagtcaccgccatccagcaagacgacaagggcgtcaccgtcacctatgtcgaccgcgaaggcgccggcgcaccgatgcaggccaaggctgactggtgcgtgtgcaccctgccgctgtcgatccttggccagttgccgctgaacgtcagcccggacatgcaggcggcgatccgctcggtgccctacgacgcctcggtaaagatcggcctgcagttcaagcggcgcttctgggaggaagacgagcgcatctttggcggcatcagctacaccgacctgccgatcgagaagatcagctatcccagcaccgactacggcaagcctggaaagggagtgctgctgggtggctacgtctgggggccgaacgcctacgaattcaccgccatgagcccacaggagcgggtgaagaaggccgtcgagtacggcgcgcagatccacccgcagtacaccgccgagttcgacaacggtattgccgttggctggcatcgcgtgccctggaccaacggctgctacggcatgtggaccgaggaaacccgcgcccagcactaccgcaacctatgccagatcgacgggcgcatcgtcctggctggcgaacacgcctcgtacattccagcatggcaggaaggagccgtgctgtcctcgctggatgcgatcacccgactgcacacccacatcgtcgccagccagagcgccgcctga

SEQ ID NO: 359420 - DNA, 405 bp, Pseudomonas aeruginosa
atgacccgaccccgctcaccactcgccgccctggcgctctgtacagccctgtccgctggtgccgcccaggccgctgaacagccccccttctcgggccccgaccacttcgacgaaagcagcggagaggcgctgttccagggtatctgccagggctgccacatgccgcaggcgcaaggcgccgcaggggccggccattaccccgcgttggcccacaatccgcgcctggcagcggcggcctacccgatatacatggtcagccatggcaacggcggtatgcctagcttcaaggactacctcagcgatgaacaaatcgccgcggtggtgaactacgtccgtacccacttcgacaatcactatgccgacaccgtgaagattgacgacgtcaagaagatcactcagcgctga

SEQ ID NO: 359421 - DNA, 501 bp, Pseudomonas aeruginosa
atgaacaagacactgctcaccctcggtctggcatgcgcgacgttgaccgccaccgtaacgacccaggctgcggaagtgatccgccacaagctgccaggctcggatttccccatcgcactagcggtcgaaatcccggcatccgccactgtggtcaacctaagtggcgtggtgcccggggtgatcgacgtcagcgcgccgaaagacagcctcaaggcttacggcgatacagaggcgcaaacggtcaatgtgctgcagagcatcgagaagaacctgcaatccctcggtctgaaaatgggcgatgtggtgaaaatgcaggtgtacttggtcggtgatccagccaagggcggcaagatggatttcgccggcttcatgaagggctacacgcagttcttcggcggagcgaagcaacccaaccttccttcgcgctcggcatttcaagtggccggactggccaatcctggctacctgatagaaatagaggtggtggcagtgcgcccctaa

SEQ ID NO: 359422 - DNA, 1494 bp, Pseudomonas aeruginosa
atggacatcgacatcaagcggcgaactcaggagcttattcacgctcgtttgcacaatcccgcctggcaattgctggcggctcgtcgttctccccttgtgctcagctgcttgcaaaatctcttcgagaaaagccgagacggaattgctttcgaagatgctcagattggcctagcggatctccttgagctgcacgccaataacgacgacttcaatgacaatgaggatttcaccgcttcagcgcgtaaagagcttcgcgactggataaagcggggcctgatagtcgagcgagaaggaaatctgtacgccactgatgcgctagaagcagcaatgcgcttcaccgcgggcctgggcgatcgcatcatgacctcgaccgcctcgcgtctatccatggtccagcgcgaaatcgaaagcctgcaatccagcctcaatccagaccctcgtagccgcgctgaccatatcaagcgaaagatctccgaacttgaggtggaactagaagcggtaaacgcagggcacgtgcctgttcttcctcgcgcggaggccgcagagcgaatccgagagatttatggtctagcaaccagtctgcgggctgacttccgacgcgtcgaggattcgtaccgtgaagctgatcggcgactacggcagtcgattgtcagtgagaaaaataaccgtggcgatatcgtcgataaaatgctgaacagccacgacagcctgctcgaaacctccgaaggccgagtatttcaaagtttccagctgcagctctcgcgttcggtggaattgcagaacatgaaggtgcagctgcggaccatcgccactcatcccgtaacatcagccgcgttgaaccgccagcagcaaaccgaactgcgctggctaattcttcgcttggtcgaagagtcagctggggtcatccgcgctcgagcccgcagcgagcgtgatgtgaagggcttcctcaaaacagggctagccgcggaacaccatcgagtaggcgaactaatcaatgagatcctccaggaagcgctggatgtggattggagcagcgtagacattcgacgtgcctcctccccaattcctcccgttgcagtggctttcccaaacctgcctctgattgagcgattgagatttaaagcgctagctggagacgaagatcagtccctcgaactcgtcccggcaaccttggatctgacggacctcgatgaagacttctgggactcactggatggcctggacagacaggcactagtaacccagaccctcgaggttctggaagccagtgagcaccctatggggatcgccgagctagcagaacacctacctccaacgcacgatctcgagacactagcgttgtggctcagcatggctcgtgaagtcgaagcacccattttcgaggaacgcgagcaggtcaatattattgcccgtgagggtgtggacttacgtttcgatgttcctcgcgtacagctggaagcagcacggctaagggaaatggattgggaggtatga

SEQ ID NO: 359423 - DNA, 750 bp, Pseudomonas aeruginosa
gtgggaaacatcttcgatgagttggcagccaacggggaagcggaagatcttggtgagcaagaggaagatgcgccagcagtagctcactcccccatctcagaaactcctgatgaccaagcgagctacacgccaatccagttgagggagtgtagccaggaactgttgcgagtcggtttgcttgaggcgtcagcgaaacccaacttgtatcgagttgcccttacccaaaccgctgcactcaataccatcttcgaacccttcgatctggcactgcgcattgacgaaattcgggggctcgcctttctcatcgtgccccagcgggtctttgccgagggcgagagtgaatggtcccatcctctggtccgcaaacaacgactgacactagagcagtcgctgttgctcgccctccttcgccagcaatatgtcgtgtacgagcaagaagcaggaatcggtggcggagacgctaaggttgcgcttgaagagctgatgccacagctacagctcttccttggagcactaggtagtgatcagcgggaagatactcgcctacgcaccctactcgaacagctcagagcccatggcgtggtctcagagatcagtaagcatgaccaagtctcgattaggccgatcattgcccatcttgccaaccccgagaatctggtgagcctgcttcaggccctgaaagcaaagtcgagatccgcacaggaaggcagcgcgatagagagcgaggggatgaatcatgacgatgcctga

SEQ ID NO: 359424 - DNA, 3312 bp, Pseudomonas aeruginosa
atgacgatgcctgaagtaactaatctggtgctcaaggacctgatccctgactcaccttatcttctggcaggagtcgacctgttcaattggggctccttcggcaatcggcatacagcggagatcgatctgcgaggtaccgcgatcatcggacaaaccggtagcggtaagacgactctgatagatgccttcatgactctgatcactgctcaaccacgctacaacctcgcgtcgactggcggacacgaaagcgatcgggatcttgtgtcctacgttcgcggagtttccggggccgggcgcagtggtgacatggcccatgtaacccgtccgcagaaaaccgtaaccggaattgcggcacgctttaagaatgaagaagacaccttgtgcatcggtgccctgttcgcattcgatggcagcagctcatccccttccgacctggatcgaatttggatcttttcaaaggtcccgggaatgggattggatgattggcttgaacagcaccacgccggcggtaatcgcgctttaaaaagcctggcgaaggagactcctgggctgcttgtcaacgaaagcaaaagccagtatctggctcagctacgacgcttcttcgacgtgggtgagaacgcattcactctgctcaaccgggccgcaggcctcaagcagctaaatagcattgacgatctcttccgcgagctagtgctcgacgatcattcggcattccaacgcgcggccgaggtagcttcggagttcgacaacctaaccgccatccaccaagagctggagattgcacgcaagcagcgcgacctgctgcttccaatcgaacctgcatggcagtcgtacaacgaccttctagagcaaaaaaatcagtgtgccgagctgttgaggatcgtgcccatttggttcgcgacaaaggaataccaactctggggcaagcagctacaactcctgaatgaggagcggcgtaaaaaccaagaccaattggatgagttggagcctcagcggaatgcccaatcagcgctcgaacaaacgttgcgcgacgcctacctgcaaagtggcgggtccagcatcgaggcactgagggaagagatcgattggcagcaacgccgctaccagagtctagagacagcagctgatgagtaccggcgaattgcccgaaagctggagcttgatgaaactatttcaagggattcttttcacgccaataagctaaaggccgactcgctcacctcacatctcgagtcggaactaaaagcactggagcaagcagcttgggatcaggggctattgctacaggcacaaaacaaggctctcgacgacatagagtcagcgctacacgacgccaagtcccgcccccattcgaacatcccctctgaacccaaccaatttcgatcggcactagctgagcacctcggcctagacagcatcgccctgccatttctagccgagttggtggaggtcaaaagtgaggaaaaacaatggagaggagcaatagagcgcgcgattggtgctcaccgcttgcgcattctagttccaagtgagtcgctcaagcctgctttgaaatgggtgaacggtagacacaacagtacccacgtccgcctccttgacgctcgagatcctaagcaacctgcctccttctttgaggacggctttactcgcaaattaagcttcaatccgaagtcctcccatctggccgccgtaaagaaattcctgagcggtatcgatcgccactgcgttggctccgctgaggcgctagagggcattgaacacgggatgacttcgcaagggctcatgtcgggaaaggcggggttgttcgacaaacaggacaatgtccgcttggacaagggctggctcaccggcttcgataattcagaccagcttcgagagctcgcccagcaattgattgaggcgcgtgaacgctccaacgagctaaaggcagcctgcgaagcagctcgggccaaagtgaatctcgctaggcaaaagcatgggctaatcgagccgtttgtgaaattgcgctacgacgaggtcgacctgccgagtgcagacaaagcactgcagtcactgaaggaacgcttgagactgttagaggctcctgactcagataccgccaaggccaaagagaggtgggcagacgctcaatcggagctttctaagcaagatgaagcgctcaatggcctcaagatcaatgacagagtactcacgcaagaggtcaacgcctgcactgaaaatcagtcccatgcattcaggcgtatcggcgcagggctatcggacgcccagatattgctatctgagaagcacctcctactgccagcacactgcgaggcgagatcagtcacggatcacgagcagtccgcaatgagcaaatgggcatctcaacaacagaaattgagcgacaagattctggaaagctccaagactcttgtccgcctaatggaaaatgcaaagaaggaagatacggggccactcaccgatgtccgctctgaactggatgacgttccctcctaccttgaacggctcagggtactcattgaagaagcattgcccgagaaacaacagcgcttcctggactatctgaatcagtcctcagaccagggcgttacgcaactgcttcgtggcgtggacaaccaggtatccattatcgaagagcgcattggcgagctaaatgacacgatgtgccgcgttgatttccagcctggcagatatctgcggctcgaacctaagccggttaatcacgatttactgaaaggactgcacgctgctcaacgtgtactgctgaccgcagcactgaaggacgaccaaggcgagagccatttccgtgccttaactcagatcgtcaacatgctacgcgatgctagcgagcgaaagaccacgcaaggagccaaggctctccttgatccgcggtatcgactgcaatttgctgtatcagtaattgagcgtgagactggtgcaacaatcgaaacgcgtactggctcgcaaggtggaagcggcggcgagaaagagatcatcgctagctacatcctcacagcttcactcagctacgccctttgcccagatggaagcaataaacctcttttcggaacaatcgttctcgatgaggcgttctctaagagctcccaagctgtggccgggcgcatcatctccgctctccgagagttcggtttacacccgctctttgtcactccgaacaaggaaatgcgtctattgcgcgctcatacccgctcggcaatcctgattcatcgaaagggacaacagtcgaccatgacctcactgtcctgggaggagctggaagccgcaatgccaagaggttcagagcagcaatga

SEQ ID NO: 359425 - DNA, 1152 bp, Pseudomonas aeruginosa
atgaaatcgcctagcgactgctctcgcaagcttgcgaagcagtggcagcaagccgagttgcgtgtggagcgcctactgcaaccggcaggctggccattgaagctaaagatcggaaaacccagtgcagaggttttctcacaggaacctcagcgcgtccgccagcacatgcaagcatggcagcaggtgacaataggccatgtagagtatcaaccagaatcttaccgtgccggcagcgaacctgtttcgttaccgcatacgtggaaactgaccaccccttcggaatgggtacaagcgacccaggacgcagttattcaatcggagtttcaccgtctatcgcagttggtggcggcagttccctctagtcagttccggactctgatggtacgtcagaggcgcctggtcttagatcgcccagctgaagaggttgttcgcagcgccgaggtagcaatgctactcgagccaggctgcgcatcaggccggccgctgcgggcattagcgacagggaacaccgatagcaagttcttcgagcgtaaccgcacactgatcactcagttcctcgatctgcgctttgacggactgccctcctctatgggacttgaaggattccttggcgcagaggagttcattgatcactggctattactggtcccgcttgccactggccttctccccttcgatcaacagagagtccctatccaatcgttggtatcgatgcccgcatcgattagccacatcatcgtggtagagaacgaacgctgcgctcatcaactcccatcgcttccaggtacagctgcaatcctgggagcaggattgaatttagggtggatgaaagagcattggttaagcggacgacgaatagcctactggggggacatggatacttggggtcttacgatgttatccaaggctcgctcgtatcagccggagctggaatcaatcctcatgtcggtcgaactgttcgaacaccatcaagcttccctcgctgtcacagaacccacaacggccggtgcgacggcaccagcggaactcaatgatgacgagaagtctctctacaaacatttgctaggtagggctcgagggcgtcttgagcaagagtttcttcctgtggaacaggtcttcagcgccttgcacgcctggtatgaaaatgaatag

SEQ ID NO: 359426 - DNA, 987 bp, Pseudomonas aeruginosa
atgtttctgtcctcaaaaaattatctcgatcaggtacagagacttgtcgatggtgcccagaacctagatctggcagttgccttctggggccgcggcgctgagaagcttttcaagggttggaagggggaccgtttacgagtcgtctgtaacttgagaagcgggggtactaatccgtatgtaatccggcttttgagggcgatgccgggtgtgcaggtgcggagtttggacgatttgcatgccaaggttgtattgagtgaatctgctgcattgattggatcagccaatttttcaactaatgggcttggattcgaaggggaggaatgtagcggctggcgggaagctggcatatacacaagcgatcctcatcagcgggaagaggtccaggcctggtatgagctcgtctggagtgaggctgctccggtgcttgacgacgcactgcaagaggctgaggaaaactggcggaagcgtcgaaagcagcgcccgattatcggtgactctaagcgtctcgttgatcaatcatcggaggcaatgcgagaccggcaggtctatatggcaatatattgggagcctgcgagcgaacaggcattccagacttttgctgaggtgcagcacgaccttgagctgactagcgaggcgatgcgtaaaagcttcgacttcctagaaaattggccggatagaggggtgaatgctctgccggtaggtgttgatattatcctcacttactatggtcctaatggtgggatcaaagtccagaatgcttgggtgagagatactctgctcgatagagcgccaatcaagattctcaggaaaaggcaggaagtggccgatttcactttttctcgtcaggatcaggacctgctggcaaagcgactcaagccttggctccttgcacttaacgacgaaggattctttgagaatggtgctcgatgtgttcccttgtacaagtttcttgcttgggaagatcacaacctaattggcaagcgttga

SEQ ID NO: 359427 - DNA, 459 bp, Pseudomonas aeruginosa
atgtcttttgagaaaacgaccgacgcacttcgtagtgcgctgaatcgtggcccacaggggcgagaaaacgcatccaacactctggataggaccgagaacaccattttcggcgttcttgaaagcgacaatgcgaaagaacactgggagactaagctcctgcgcgattctgaaggaaaagtcgttgccatcgaaacgccattcggagaagcccgtgtcgtccggcgaaactatctcagcgaagaaggaacattcgcgaaggcagtgatcgagaagaagctcgaggacaagcatgggaatgcctactggaaacctgtttggtcccttgagggaacctcacgcggatattcacgcgttggcggcgataataccgatgtggaatttgatccgaactttcaccctggcgaagtgatgagggcagcagccgacattatcattgctatcggaaggtgtaccgagtaa

SEQ ID NO: 359428 - DNA, 753 bp, Pseudomonas aeruginosa
ttggccgaactgttcgagcaactgccggagcgcggcgatgccgacaagccggtgctggcactgttcttcgacgaggcccacctgctgttcaacggcacgccgaaagccttgcgcgaccgcctggaacaggtggtccggctgatccgctcgaaaggcgtcggggtgtacttcgtcacccagtcgccgggcgacctgccggacgatgtcctggcccagctcggcctgcgtatccagcatggcctgcgcgccttcaccgccaaggagcagaaatcgctgcgcgcggtggccgacggtttccgcccgaacccggcgttcgacaccctgggggtgctgaccgaactgggtatcggcgaggcgttggtcggcaccctggaggaaaagggcacgccggccatggtccagcgcgtcgcggtggcgccgccctattcgcggatcggcccgctgagcgacagcgagcgcgctgaactggtccagcggtcgccgttgaagggtcgctacgaccagccgatcgatcgcgagtcggcctacgaggtgctggcgaacaaggcgggcgccaagcccgaggtccagggccaggcgactgctcagcaggaaagctcgtccggcgtcggcggcatggccgggcagattctcggcagcctgctgtccaattcgacggtgaagagcgccatgcgccaggcggccaaccagttgagccgggagctggtgcgtggcctgctcggctcgttgatgggcgggaagaagcggcgctga

SEQ ID NO: 359429 - DNA, 612 bp, Pseudomonas aeruginosa
atgaacaagcacctgatgatgggcgcgctggggttgtccctggcgtgctgcctgcaaccggctatggccgaagagaaggtcctgcgcctgttcaactgggcggattacttcgcccccgacaccctggccaacttcacgaaagagaccggcatccgcgtcatctacgacgtgatggacagcagcgagacgctggaggccaagatgatggccgggcacagcggctatgacctgatcttccccggcgacaccgtcgccgagcgcctgatgcgcgccggtgcgttgcagaaactcgacgacagcaagctggagcacatggacgacatcgaagcgggcctgcgcgacctgcagaccaagtacccgtactcgcggcatgccgtggtgccctacacctggggcagcatcggcctgacctacaaccaggcaaagatcgagcagcgcatgcccggcgcgccggtgaacagtcttgacctgatgttcaagccggagatggccaggcacttcgccgactgcggcatctcgatgatcgactcgccggacgaagtgctcgccgtggtgctcaactaccttggccgcgacccacgtaggggtcatgccgagataaaggaaaattag

SEQ ID NO: 359430 - DNA, 903 bp, Pseudomonas aeruginosa
atgagcaagctgagcgtcgcggtgctgcagttttcctgcagctgggacctgccgcgcaacctcgccgaagccgagcgccaggtgcgcgcggcggcggcggagggagcgaaactgatcctgctgcccgagttgttcgccacgccgtacttctgcatcgagcaggaccattcccacctcgccctggcccagccgtatgacgacagcccgctgctgcagcgcttcgccagcctggcggcagagctgaacgtggtgctgccgatcagctggttcgaacgggccggtaacgcctacttcaattcgctgaccgtcgccgacgctgacggcagcctgctcggggtgtaccgcaagacgcacatccccaacgccatcggctaccaggagaaggagtacttcagccccggcgataccggcttccgtgtctgggacaccgccgtcggccgcctcggcgtgggcatctgctgggaccagtggttccccgagactgctcgctgcctggcgttgcaaggcgcggagatgctgctgttctccaccgcgattggctccgaaccgggcgccgagcagctggactcccgcgaccactggcagaccgcccagcgcggccacgctgccgccaacctgctgccggtgctggccgccaaccgtatcggtgaggaattggcgcccagtgatgacacgctgcgcatgcgcttctacggctcgtccttcatcaccgaccacaagggcgcgctgctgggcgaagccgggcgcaacgagaccgccgtgctggtccgcgagctggacctcgacctggcccgcgaggagcgcctgacctggggcgtctaccgcgaccgccggccggaaatgtacggcccgttgctcggcctcgatggccgccacctgcatccgcgctggcaaggagtctga

SEQ ID NO: 359431 - DNA, 1056 bp, Pseudomonas aeruginosa
atgcatcgcaatgacgataggcagaacggctggcgcatgcctgccgaatgggtcaaccacgcggcgacctggatggcttttccgcacaaccgtccgctctgggagggcggctggcgcgtcaccctggagcaggtgcaggaagacttcgcccgtgtcgccaacgccattgcccgcttcgagccggtgaagctggtggtggacccgtccgccgtggcccgcgccgccgagctctgcgggccgaatgtcgagctggtgccgctgcccatcgacgacagctggtgccgtgattccgggccgaccttcgtctgccatccgcagcagggtgtagccggcgtgagctggcgcttcaacgcctggggcggcaagtccgagcacaccctggacgaaggcctgggccgtcgcattctcaataacctcgggttcgactgcttcggtacgccgctgtccaacgagggcggggcgatccatgtggacggcgagggcacgctgatcaccaccgagtcggtgctgctcaaccccaatcgcaaccctggcgtgagcaagcgcgagatggaggaaatcttcagccgcctgctgggtgtgaccaagaccatctggctgccgggcgacccgcagtacgtcaccggtgacatgaccgacggccacgtcgatggcgtgtgcgccttcgcccgtcctggcgtgctgctggtggatgctacccacgatagctccagcgtctacgcccaggtcgcgaaggaaaaccgtcgcgcgctggaattggccaccgatgcccaggggcgctccttcgagctgatcgaactgttcgaagccagcgccgcggtggacccggaggcggaagtgttctgcgcctcctacaccaacttctacctggccaacggtgcggtgatcatgccggcctacggcatcgccgccgacgacgaagccgccgccgtgctcgcccgtgctttccccggtcgcgaagtggtgccggtgcgcatcaataacctggcccacggcggcggcggtgtgcactgcattacccagcagcagccggcctggccgctgggaggcctgtga

SEQ ID NO: 359432 - DNA, 864 bp, Pseudomonas aeruginosa
atgctcaaacactggccacccctgaatgccctgcgcggcttcgaagccgccgcgcgcctgggcagcttccacaaggccgccgaggagttgcacctcacccagtcggccatcagccagcagatccgcagcctggaaaacttcgtcgagcagccgctgttctatcgttcagggcgcaaggtcgcgctgaccgacgccggcgccgacctgctcagcaccacgcaatcgatgctgcagcaactggccgtgggcatccgccgcctggaccagtaccgcaagcccaaccaactggtggtcaacaccaccccggcctttgcccgccattggctggtaccgcgcctggccgacttccacgcacaccacccgcagatcgacctctggctgctgaccaccgacgaaaccccggacatggccagccagaccatcgacatcgctgtgcgcgacgatctcactgcccaggccgagtgccgcttccgcgtgctgctggaggatcgtctctatccggcttgccacccttctctgctgacgcagccggagcctgcgcgcaccacgctgcacggcgaacgggaaatggactgggcgcactggcaggtgcagggtggagcggacgtcggccagcgcagcgaggggctgaacttctctgatccaggactgctgctcgacgctgccagccaggggctgggtatcgcgctggtgagccagttgctggccggtgatgcccgtagcaatggcctgctcaccccactcagcgagcagaccgtgcgcggaccgaactggtcactgctggtgcaccagcagagcgagcgcaatgcccaggcggtgggcttctgcgagtggctatccgccgcgctgagcgcttccctgtag

SEQ ID NO: 359433 - DNA, 432 bp, Pseudomonas aeruginosa
atggatatcgctgacgtggccagacgctccggcgtgccggcatcgaccctgcgtttctacgaggagaagggactgatcgcttcgctggccaagcccggcgcgcgccgccagttcgcgccgcagattcttgaccagttggcgttgatcaccctggggcagtcggccggattcagcctcgaggagatccgctcgatgttttccggtgacggcggggcgaatatcgaccggcagatgctggaggccaaggcggacgagctggatgccacgatcaagcgtttgcgggcgatgagtcgcgggttgcgccatgcggcggcgtgcccggcgcccagccacgcggagtgtccgactttccagcgattggtaaagacggcggcggagagcgcgctggcggggaagaaggagcgagggcggttgaaaacggggaaggcctga

SEQ ID NO: 359434 - DNA, 591 bp, Pseudomonas aeruginosa
  misc_feature (33)..(33): n is a, c, g, or t
atgaaaagcatcgccatcgtctaccacagtgcnagcggccgcaccgagcgcattgccctgaccatcgccaacggcgctcgccgggtgcccggctgcgaagtgcagttgctccaggcccacgagctgatcgaacggccacaagcgctgcttgcctaccacggcctgatcctcggctcgccgacttacctgggcggcgtctcggcaccgctcaaagccctgatggatgccaccggcccgttgtggcgccagcagaggctgcgtggccgcctcgccgccggcttcactgtctcggcactgccggccggcgacaagcaatccacgctgatctcaatgttcaccttctgcatgcagcacgggatgctctgggccggcaacccgatccttcccgaacaacaccggggcgtgcccgagagcgaagccgccaaccgcctcggctcctggtccgggctgatggcccaggccgacaagactgctccggacttctgccccggcgacctgaagaccgcgcacctgttcggccagcatttcgccgaaaccctcagccgccttcagcagccagagctcgagcccgcgcaggagtgccacgcatga

SEQ ID NO: 359435 - DNA, 225 bp, Pseudomonas aeruginosa
atgatcccgcgccgttacgccccgctgctgtttgccctgatgctgtccggcgtgatgaccctgctggtctccggcctttccaccggccgcgccatcggcctggcacccgacttcgcccagttctggctcggcgcgtggcttgctagctggggcatcgccttcccgctggtgctggtcatcaccccactcactcgccgcctggtggagaagctggtccgcgcgtag

SEQ ID NO: 359436 - DNA, 1761 bp, Pseudomonas aeruginosa
atgctgtccgccggccccatggttccggtgcaggcggtggaagctgttctgcttagcgaactgcaggtcagcgaaagggaactggtactggttctggatgattaccattacctgggtggttcgggtgtccagctcctgatggggcatttcctccacaacctgccggccaacgtgcacctagtgttttcctcccgtaccgagcccgccctgaatctgacccggctgaaggtcaatcggcagttgctgcgggtcggggttgaggatatcaggtttgaccaaggggatcttggtctctttgtgcggaactcgctgagcttggagccaagctccaccttgctgagagacctctatgatgtcagcgagggctggattgccggtgttcagctcgccacattgtcaccccgtttcaagagcgaaccgcaactctacctgcaagagttctcatcaaagtcgaaggaccttcatgcctacctggcggaggtggtgctggacctgttgccgggggagctcgagcgggtgctgctacgttgtgccatccttgaccgtttcagcgccgaactgtgcgaagtggtcgccggagtgctggatggtaaggctctgctggacaaactgattaaggtcaatccgttcatttcggcactggatgagcaaggcgaatggtatcgcttccatcgcctgtttcttgagtttctgcgcaagcgtctgaagctcactccgaccgaggatgtcatggcgctgcaccgggtcgcatgcgactggttcgcggcccggagcctgtgggccgagggggtacaacatgctctggcctgtggtgacaacgaaaaggctcaggatttcatcgagcgctgcgccctagatatgctagggcgcagccgtaccgggaagctgctgagctgggggcggcgcttgccggaggaaatgctgcgcaaaaagccagagctgcggctggccatcgcccgcgcacaggtattaatgatggacttgcgtggcgccgctacgctgctcgaggggatggccgagaaccaggccgacctagacgccggcgccgaacgatttgctgttcaacagcagatcacccgggggctgatatttgctctggatgatcactttgacgccgcactggcgcaggcgctgcctcttgtcgagaggttgcagggtctcaacattaccgatcgggagatgctgctcaacacgttggccttagtctacctctatcagggcaggttcgatcagatcgacgccatgcagtcttggcaaatgccaggcccgggcatgcatttcggcgtgccctaccgccttttgctggaggggctcggctggatgtggcggggacgactggacaaggcggaatacatcttcaagaaggcgcggcagtattctgagcagtatgctgggcgccgctctatggttacgattgccagtattgtctgtcttgcggacctctactacgaacgtaaccagcttgaagaggctgaggaactgctgacgtcggtgcacaccgtcccgctggacttgggcatatcggaaattattcagagtggctacaggaccatgtcgcgtattaaccagattaatggcgcaaagactgaggcctgggtgctgctggatgagatggaggctgtggctttcaagcggcgctggcctcgtctggaggcgaactgtcgagcacagcgcatacagtcggaaatctggagcggtgatctgagctccgccaggaacgagttggggagcccgcagaattcggaaaaaatcgtacgctaa

SEQ ID NO: 359437 - DNA, 1050 bp, Pseudomonas aeruginosa
gtgacccgttctacattttctcaggtcgatccacctggtccgggtcactggactcagattagtgaagggctactctgggctcgtatgcggataccggcgaagttagaccatatcaacatttacctaatcgaggatgacgatggctggtttgtggttgataccggcccggatacctcagttaatcgtgacctgtggcgggaactggttacagggcttccgcgtcgggcgaagctgagtcgggtcctggttacccactctcaccccgaccatattggactggcgggctggctgcaggccgagttcggcgtgccgatctacatctcgtcgggggcgcatcactgggcacttcgtgaggcggaagagaggaagggcaggagcgcccaggcggtcgcagccttctatgggcgtatgggcgtgccttccgaggatgttgttcacctgcacgcggcgttgagccagatggacccgctgttcgggccattagccagcgaggtcagcctggtacaggccgatgggatgatgcggatctgcggtcggaactgggagccatgggtgggctccgggcattcgatagagcatgtctgcctgtatcagagggagtcgcggctgttaatcgccggcgaccagttactggagaagatcacgcctctggtaggcgtgagctatatgagtccggagtgcaatccgttagcggactggttcgcctctcttacggatatgcagtgccggttgcctaacgatgccttggtgttgccggcgcacggtcagcccttctatggcggcgctcggcgtatcggagcggtgctcgagcatcacgaaagttccttagcgaagttacgcggcagcctggtagactggtgtacagtccatgagctcagccacgtgctcggttggggggggctgacagggatggcgcgctatatggcgctggatgaaaccctagcccacatcacttatcttgtctgcagaggagaggtcgtcgggtcaccctctgcgattgatgacgcgtatcgctatcgccttgctcggcgaccttccgcgccatcctga

SEQ ID NO: 359438 - DNA, 1371 bp, Pseudomonas aeruginosa
atgaataatttcaaacaatggaaaatagctttacttgtgagcgcagtaataagctgttcctccgtgaacggcgcagtttctcaggaggaggctgtacggctgggcaatgaccttacaccattcggcggtataaaggcaggcaacgaagagggcaccattcccgcatggaccggcggtttgacgagcggcccgcaggggtacgcccacaagtcgggcgatttcctgccaaacccttttgtggatgaaaagccgctctttgctataaccgcgcagaacttaggtcagtatgcggacaagctatcggcagggcagcgggccttgctgaagaaataccccgatagctaccgtctggacatctatccgactcaccgtactcacgccgttcctgaatgggtggcaaggaacatccagcagaatgccattaaggcgaaactggtggacggtggaaacggcattgagggcgcctatggtggtgtacctttcccgataccctccagtggcgaggaggtgatgtggaaccacttgctacgctggcaagggggggattcagaatatcgctataatgcattggtggtacaacccaatggcaccataagctctggtgaaagtatcgcagtcgagcagtctgccttttatctgcccggcggctcggtcgagacctttggtggagactacttctcattgctggtcaactatttggctcctgcgcggcgcaagggcgaggtactgttaattgttgatccgatcaatcaggtgaaaaacccgcggaacgcctggctgtacctgccgggacagcgtcgtgtccgtagggccccgacggtcgcctacgatactccgaatcccaatttcaacggtgtggcgacatacgatgacacctacatgttttacggggcgcttgaccgttataactggaagctagtaggcaagcgcgaactctatgtgccctacaacaactacaagcaagattctcccgcccgttataccgaggtgatgaaaggtggtcataccaaccccaactatggccgttgggagctgcaccgggtctgggaagtcgaggctaccttgaaagatggtagtcggcatgtatatggcaagcgaactttctacgttgacgaggacagttggttagtcgttctatccgatagctacgatgggcgcggcaacctctggcgcacaaatacgatgcatagcctggcctattggactgctcccggggtgatgcgtggatcctttgtgcattacgatttggtgagcggtgtctacggtgtaaacgttgcggttaatgagcaggctaaggcaatagtgtttaccgagccacgtaaggcggagttctttactccggcctcgttgcgcagacaaagccttcgttga

SEQ ID NO: 359439 - DNA, 1284 bp, Pseudomonas aeruginosa
atggggctgtttgtccgtgcccgtggttggtatgacgatgtctataacaaaagcaatgataacaaccgcccgtcgacggttaatacggtaggtgatcgcagcaatagtttcgagaagaatacccgaaaggtgcatggtcgggacgctgagttgctcgatatgttcgcttatggcaatttcacgcttggcgacacgccggtaagtgttcggttgggccagcagacggtgagctggggcgagagtcttttcattctcaccggtatttcttcggcccaggggcctctggatatcaccaaggccaatgtgccaggcgtccagatcaaggagatcttccttcctgtacagcaggcgttcgcccagataggcctgactgaaaatctcagtttagaaagttatgtgcagttcgagtgggaggccaatcgactggatgaaagtggatcctatttcagtaccctcgactaccttggggacggagcggagtgcgtatatctcggacgccttccctgctctgccatccagcgtggaaaggacgagaaggccggtgactctgggcagttcggtgtcgcgctgcgttatatggctgaaagtcttaacaatactgagttcggtctctactacatcaactatcacgacaaactgccgcagttggtgctagaccctctggcgctgggtgttccaggctacccggagcctgccaattaccacctgcgttacaaggaaaatatcaacttgatcggcgccagcttcggcactgtcatcggcaataccaatgtttccggtgaagtgtcttaccgccgaaatctaccggtactgcaacaggatgccgcgctagtgttcggtgcgttgccagtaacaatctatacagaggcgcctgtcgttcaggcgcagctttcggctgtacatattgtcggcccgaccagcttcgccgataacgtgaccatcttgggcgaggcgggcatcaacaaagtgaatggccttgagcgaaatgagctggaaaaagacaagtggggttggggatataccgctcgtgtgtcgctcgactactacaacattattcccggaggcaacctttccattcctgtcacgtggagccaaaacgtcaagggccggtctgcggctggccagttcaacgagggtgacaaccgtttgggcatcaaggcggttttgaactatggcgaccatatggctttcgatgtcggctactcgagattcatgggtgacccggcggatagcgctctcaccgaccgcgactttatcgctgttagcgcctcttacagcttctaa

SEQ ID NO: 359440 - DNA, 1251 bp, Pseudomonas aeruginosa
atgaaaaagtccagttcggagcgtcatggcctgccggttattcatgagcgtgcagccggtatcgacatcggctcgcgcttccatgttgtggcggtgcccgccgatatcactgaagagccggtgcaaaccttcaaggcgtttaccgccgacgtggagcgcatggctaattggctggtcgatctcgggatgcccgcgcagttcctgggcgcaaaaccgacgttaacgatgcacagtggatccagcgcttacatgcctgtggcttactgcgtgccagttcccaccctgatcgggagattgccgcgttacgcagttctctacgcttgcgggagcgccaccttgaattacgcagctgcgcatatccagcacatgcagaaggcgctcacccacatgaatttgcagttgcaccatgtggtcgccgacattaccggggctacaggtatgcggatcatccgtgcgattgtcgccggcgagcgaagcgctgcgacactggcgaccatgcgcgatacccgttgcaagtcgagcgttgagaccgtacagagtgccttagttggcaactaccaaacggagcatgtcttggctttggcgcaagcgttagccatgtacgatgcctatcaggcacagctcgaaatctgcaatcagcagattgcccagacgttgctatgtctctcccagcagaagtccccgcccagcaagccgttaccaaaaccacgccaccgcactcggcagccgaatacgctcaacttcgatgtgcgtaccttgctctatcaactggttggcgtcgacctggcccagatccatggcatcggcccttacttggcgctgcgtttggtggctgagtgcggaactgacctgagtcgctggcgtactgcccatcacttcacctcctggctgacgctggcacctggctgccggatcagcggcggcaaggtactgtcagcgcatacgcgtaagaccaagaaccgggttacagcacacttgcgcttggccgcggtgaccatcggcaaaacgaatacggcattgggcgcattctaccgacgcttgtctgcgcgcatcggcaaggccaaggcggtgacggctaccgctcgaaagatcgccatcctgttctacaacgccatgcgtttcggcacggcttatcaggacccaggtgccgatcactatgaacagaagtatcgggaacgcgtggtaaaagggttgcaccgtcgagcagccgagtttggcttcacgctacaggctgtcgagggtgtttcttag

SEQ ID NO: 359441 - DNA, 1032 bp, Pseudomonas aeruginosa
atgcaagagaaagattcggtgtccgtttattttgttcaggccgcgctacatgggctgcgtgagcagccagagctcatggataccatcctgtcgaaagcaggcatcgagaaactgctgctagccgatagttccgcgcgggtatcggccgcagccttcgccaagctgtggctagccgtcgcccaggagttggacgacgagttcttcggctatgactcgcacggtatgccggtgggcagtttcgccctgatctgccggggcctgatccagaccaatacactcggccaggcactgtgccagtgcctggccagctgtcggttgttccttagggatatccagggaaatttagctctacgcggcaatcgcgcagtgatcagcctgcacacacgccaagaggatcagttcatccacagcattctcgaggaaaccttcttgaccatggttatcagcctgctgtgttggctggcgggtcgacgcattccgatcaatcgcacgcaattcggtcacccgcggcctgcccatggagacgatcacctgctgtgggggccggatctgacgttcgaggccacacataccgaaattgagttcgaagccgactacctgaagctgcccgtcgtgcaggatttggcctcgctcaaaacctttctgcgcacggcgccgcagtgggtgatcatccgctttagcaatcgagatggactcagcgctcaggtatataggcagctacgcaattgtcgctacgaacagtggccgaccctggctgacttggcttgcgaacgcaacttgagtgtcgccagctttagtcgccagctacaacgggagggcttctcttttcaggagatcaaggatgaagtacgccgcactattgcctttgactgcttgcgcaacactgagttgagtgtcgcggcgattgctgagcaggccggcttccgtgaaaccagcgcttttcaccgggctttcaaacagtggacgggagacagtccgggcaactaccggctaaagcagcgcgcaactgtgcaccattctggtggctgttaa

SEQ ID NO: 359442 - DNA, 1185 bp, Pseudomonas aeruginosa
atgcccagccccgaagtctacatcgtcagtgccgtaagaaccgcaatcggctccttcggaggtacgctcaaggataccccgccctgcgaactggccacgaccgcggtcagcgtcgccctgcagcgtagcggttgtgccgccgagcggatcggtcatgtggtgatgggcaatgtcattcccaccgagacacgcgatgcctatctttcccgcgtggccgcgatgaatgccggcatacccaaggaagtccccgcgttcaacgtcaaccgcctctgcggttccggcctgcaggccatcgtctcggcggcgcagagcctgctgctgggcgactgcgatatcgccatcggtgctggcgcagaatccatgagccgcggtccctacctgctgccgggtgcccgctggggcgggcgcatgggcgacatgcaggcggtggactacatgctcggcatcctccacgatccgttccagcgtatgcacatgggcatcactgccgagaacatcgcagagcggctgggcatcagccgcgaagaccaggacgctctggcgctggtcagccagcagcgtgcggctcgcgccatcgccgaaggccgcttcgccggtcagatagtgccggttgaaatcaagagccgcaaaggcacccagctgttcgaggtcgacgagcatgtccgcggcgacacctcgctcgagcaactggcgggcatgcgcaccgcgttcaagcagggcggcaccgtcaccgccggcaacgcctcgggcctcaatgacggcgcggcggcggtggtgctggccacaggcgcgacggtgcgggccgacaacctgcgcccgctggcccgtctggtcagctacgcgcatgccggcgtcgagcccgagctgatggggctggggccgattccggcaacccgcatggcgctacagcgtgccggcctgaacatcgccgacctggacgtgatcgagtccaacgaagccttcgccgcccaggcctgtgccgtggcccgcgagctcgacttcgacccggccaaggtcaatccgaacggctcgggcatctccctcggccatccagtcggcgccaccggagcgatcatcgtcaccaaggccatccacgagttgcagcgcacccagggccgctatgccttggcgaccatgtgcatcggcggtggccagggtatcgccgcgatcttcgagcgcgtttga

SEQ ID NO: 359443 - DNA, 852 bp, Pseudomonas aeruginosa
atgagcgacgaacgtatcggcgtcatcggtggcgggatcatgggcagcggtattgcccaggtgtgtgccctggcaggtctgtccgttgccctggtcgacatatccgaggccgccctggccaaggccagggcgagcatcgccagtgggcttgggcgacaggtggacaagggcacgctgaccgagcagcagcgcgccgccgcgctagggctcattgctaccagcaccgactatgccagcctgggcgatgccggcctggtgatcgaggcggccagcgagaacctggaactgaagcagcgcatcctcaagcagatcggtgcgcaggtcgcggttgacgccatcatcgccagcaatacctcgtcgctatcgatcagtcagctggccgcccaggtggagcacccggggcggtttatcggtctgcacttcttcaacccggtgccgctcatgagcctggtggaagtgattcgcggactggacaccgccgaggcgtgctacagccgtaccctggcgtttgccgaacgcatcggaaagaccgcgatcagcgccggcaaccgcccgggcttcgtggtcaaccgcatcctggtgccgatgctcaatgaggccatcttcaccctgcaggagggcctggccagtgccgaggacatcgacaccggcatgaagttgggctgcggccagcccatggggccactggcgctggcggacctgatcggcctggataccctgctggcgatcctggaatccctccagcagggattcggcgatccaaaataccgtccggcccccttgctcaaggaactggtggcagccggtcgcttggggcgcaagagcggtcatggcttctatcgctatggctga

SEQ ID NO: 359444 - DNA, 684 bp, Pseudomonas aeruginosa
atgaataccaagcgatcgctcacctcggcttgcccaggcgaaccaggcgaggcagtgccctcgcggcttgaacagatccgcgaaaaggcgctggaactgttcgccgaacggggctttgccgaggtgggcatgcgtgaactggccctgcacctggggataggcgccggctcggtttaccaccatttcgcaagcaaggagcagttgctgttcgagctgatcgaggagctctacgaagacctgctcgacgcggccctgctcaccgaaacgggcgttgtccatggccgcctgcaggcgttgttgtgggcccatatcggcttgcacgaacgccgcggcctgcatttcctgatggccgagcgggagtatcgctgtctctcgccgcagcaccagggtcagatccagcagatgcgtcagcgctatgaggaaaagctcctggctcgtctgctggaggctggcgccagcggttcgctggcggtgctcaaggccaccgtgcaaggcgtcgtcgcctggcttaacaacctgccggcctggctggatcagtctggtttgagccgggcgcagaggcaggaggtgatcggcgcgattgtcctcggttcgctgtccggcgttctcaagcagccggccgcggctgcagatagcacaaccgttgttacgttgcgcgtcccaggggcaagcccgcgcggctaa

SEQ ID NO: 359445 - DNA, 1779 bp, Pseudomonas aeruginosa
atgtctgattaccaagctcccctgcgcgatatgcgcttcgtgctcaatgaagtgttcgaggtttccaagctctgggccgagctgccggctctggccgaagtggtcgacgccgacaccgccgccgccatcctcgaggaagccggcaaggtcaccgccggtgtgatcgccccgctcaaccgcagcggcgacgaggaaggctgcagctggaccgatggcgcggtgacgaccccgagcggtttccccgcagcctaccagacctatgccgaaggcggctgggtcggcgtcggcggctcgccggagttcggcggcatgggcatgcccaaggtgatcggcgctcaggtcgaggagatggtcaacgcggccaacctgtcgttcggcctgtacccgatgctgaccgccggcgcctgcctgtcgatcctcaaccacgccagcgaagcgctgaaggcgcagtacctgccgaacatgtacgccggcgtctgggccggctccatgtgcctgaccgagccgcacgccggcaccgacttagggattatccgtaccaaggccgagccccaggccgacggcagctatcgtgtcagcggcaccaagatcttcatcaccggcggggaacatgatctcaccgagaacatcatccacctggtgctggccaagctgccggacgcccccgccggcccgaagggcatctcgctgtttatcgtgcccaaggtgatggtcaatgccgacggttcgctgggtgagaagaacgcgctgtcctgcggctccatcgagcacaagatgggcatcaaggcctcggccacctgcgtgatgaacttcgacggcgccaccgggtatctggtcggcgaagtgaacaagggcctggcggccatgttcaccatgatgaactacgagcgcctgggcgtcggcatccagggcctggccctgggcgagcgcagctaccaaagcgccgtggaatacgcccgcgagcgtatccagagccgcgcgccgaccggtccggtcgccaaggacaaagccgccgacccgatcatcgtgcatccggacgtgcgccgcatgctgctgaccatgaaggcgctgaacgagggcggtcgcgccttctccagctacgtcgccatgcagctggacactgccaagtacagcgaggacaaggacaccgccaagcgcgccgaggagctggtcgccctgctcaccccggtggccaaggccttcctcaccgacatgggcctggaaaccaccgtgcacggccagcagatcttcggcggccacggttttatccgcgagtggggccaggagcagctggtccgcgactgccgcatcacccaaatctacgaaggcaccaacggcatccagtcgctggacctgatggggcgcaagattgtcggcagcggcggcagctactaccagcacctggccgacgagatcaaagccttcgtcgccggcgccgatgcctcgctggccgagttcacccagccgctggccgccgcggtgcagaacctcgacgagctgaccgcctgggtgctggaccgcgccaagggcaaccccaacgagatcggcgcggcctcggtggagtacctgcaggtgttcggctacaccgcctacgcctatatgtgggcgctgatggcacgggccgcgctgggcaaggaggcgcaggacgagttctatgccagcaagctgggcaccgcgcgtttctacttcgcccgcctgctgccgcgcatccactcgctgagcgcctcggtcaaggccggcagcgacagtttgtacctgttgggcgcggagcagttctga

SEQ ID NO: 359446 - DNA, 1032 bp, Pseudomonas aeruginosa
gtgatcagtatggaaatgatgggcaaaattcggcggatgtatttccgcgaccagctgtcgctgcataagataaccaagcgcacggggttgtcgcgcaatacgatccgcaaacggatcagagcgcctgaagcgacccagccggtgtatcagcgacgcgctttgttcaacaagctcagtccgtttcacgccacgctggagcaggcactaaaagccgatgcgctgcgtcccaagtcgcagcggcgtaccgccaaagcactgttagcgcagatccgcgcagagggctacgacggcggttacagccaactcactgcctttatccgcgcctggcgcgggcagcagggcaagagtttacgagccttcgtgccgctgagctttgcacttggcgaggcgttccagtttgactggagcgaggaaggtctgctgattggcggtatttatcggcgcatgcaggtggcgcacctgaagctgtgtgccagtcgcgcgtcctggctggtggcttaccccagccaaggccacgagatgctcttcgatgctcatacccgttccttcgcggccttgggtggggtgccacgccgggacatctacgacaacatgaaaactgccgtcgaccgggtcaacaagggtaaaggacgcacggtcaatgcccgcttctcggtgatgtgcgcgcactacctgttcgatcccgacttctgcaacgtcgcttcgggctgggaaaaaggcatcgtcgagaagaacgtgcaggacagccgacgacgtatctgtcaggaggtgcagggcgagcatttctccagctacgaggcgctcaatgcctggctggggcagcgctgccgggcactctggtgcgagttgcagcacccgcagtatcacggtctcagcgtggctgaggtgctggaactggagcaggcggagttgatgccgatgccggcgcccttcgacggttatgtcgagaaggccgtgcgcgtttccagcaccgccttggtcagcctgggacgcaaccgttactccgtaccttgcgagttcgccggacgctga

SEQ ID NO: 359447 - DNA, 240 bp, Pseudomonas aeruginosa
atgtcccaagtgctggccgccgtgccggtcgcaggattggaggcggtgctggtcgctgtcgagttggtgctggaaagtggcgtcctgagcgccgagcacatcctcaatatcgtcgagcgtctgaccgcagcagcgccaccggccacagtggaaaaccgcctgccacttaaggaagcgccactcgccaacccagcgcgctacgaccgcctgcgggtggccaaggagcgcggccatgcgtga

SEQ ID NO: 359448 - DNA, 768 bp, Pseudomonas aeruginosa
atgattggcctgatgaccaatgctctgcgccgacatgatctggatatgcggcccaaagcaatccctctatcgctcatgacggttgtagaaaacgccctttcgatggcatggcgtcgcctattggatgatgtcgagaaaggtgcattttcgatttgtcagtctaccgaggatgtaatcactgagcggctatacatgattctcggcgagctcgactcggcgggtgatgacgctgtaccgggattgtctctgttgcaaaccccagcgcgcgaaggaaatatcagaaatttcaatggtgatcacctcgataagcagcctgatctgacgtttcgaccaattcggaatctgattccctccagtaacactgttccaaccgcgatttttatcgagtgcaagcccgttgattctgtgcatccgctaattagcacgtattgtcgtagtgggctcatgcgcttcattaatggtgattacgcatggggagtggatcgggcaatgatggttggctacgttcgaaatatctgcgctctaccaggcggtctatttaccgctttcagcgatcctctactcagttctgagcttggtttaaatggacagcttgaacccttgccgaataccgcagcaggggatgccgtccatcagtctttacattggcggtgctttctggtgccggaagcgagtgctccagcaggaaaaatcagcattaaccacctatggctctatccctctaaggcctgcgaacagagccgatgccgtgatatctctgcaagttga

SEQ ID NO: 359449 - DNA, 2874 bp, Pseudomonas aeruginosa
atggtcgatgcagtagttgaggagcagtcccaacctctcctttatgtcattgatgctgctcgtctagcggagcctttcgagtattctggaacgatcattgatctgcgccgccggttagcaatgcgaggagaccctgcttggcttggtgtattgctgcctggcaggttggacatatatgcaactgatttgcggcctgcagatgactctgagccagtgtctttctttgctgaattaccagaggcagttggggtgttgccaagactcgctcatggcgagaatttggccacgccatctcgtctactgttgcgagacgtgttgttcggactaatgacagacgcagggcaggagcttaaagaccttggcctgacgactgatgaaagtattgcgctgactggcagggccctgttttttcgctacctaatggggcgaaagattattgacgagagtcatttgcactgcatttctctgagcgctcaatctttggagtcgtgctttagtagtgagggcagcctggcggaaaccaatgcttggctgagccgaatatttaatggcgatctgcttaaacttccgacttataactattcggagtattttagccagctgttccggaagtacggtggtcgagttgctcgacctctagaagcaatcctggggatggatcagcccctagcgcctggtatctcgcaaaggccactgaactggggtgacttggattttgaccatgtcccggtagggttgctgagcgaaacttacgaggagctgatgtaccgctttgatgctgatggtcggcgtgatacaagcgtgtactacacaccagctcatatcgcagagtacatggttgctgaagccttaaacgatcaccccatgggatctcgtgcgcgagttcttgacccggcatgcggagctggagtgtttctggtggctgccttccggcaactggcagagctacgcttttccgaaacagggcagcgtccggggcgtcttgctttgcgggaaatattgaacgatcagttggttgggttcgacatcaacagccatgctagaacgcttgcagcgctggctttgtatcttactgcgctcgaacttgatccagctcccgcaccagtagaggcgctgaccttcgagaagttggaaggccgagtgttgattgatgtggctgatccaggttccgaaattgcggccattaggccgatgctcggaagtcttggaaagcatgtgccggcaacttatcaaggcgcttttgatcttgtaattggcaatccgccttggacaagtctcaagccagtttacaaggcaatcgacaaagcttttaccgagcgttgtcgagaaattgcagcacaacgtggtctttcagaaattgcacgcacatatagaaatccagaccacgtcactgatctgccgtttatctggggagcaatggattgggcaaagccggggggacgaatctctctggctctggctggtcgctggctatttaagatgtctgcagccggatctgctgcccgtaccgctatattcagggcgctgacagtcactggagtccttaatggggcgtccatccgacagagtcgtgtctggccgaatgtggatcaacctttctgcttgttgtttgcagacaactgcgtccctggaccggaggatcactttgttctggtcagcccggatgacgaacccgacctcaacggtaaggggcgcatgcgaattgacgcccatgatgcagtacccgtatcgcttaagctggctgctgagcagcctgacctgctcaaaacgctttaccgtggatcatccctggatgcaacgattgttcagcgcatccgtcaacgtgcgaagttgtctttgggggagttctgggcttctgagcctggattgtctcgaggacaggggtatcaggttgctaatcgctcagatgatgactctttcttagaaggactaccggagttagatgcgcaatattccgagcatccattcgtagtagtcgcttctacgttaccgctttatcaacccagtggtttgcagtttccccggcaacctgtgatctataaggctccgcttgtcttggtacgagaaggcaatcgagctgatcgcactcgagggcgagcattagtatctgacgttgatgttgcctatacgagatcctattacggattttcggcggcgagccacggccggggagagtttctcactcggtacgtgttggtgctaatgcatagtcaactgttcgaatattttgctttgatgacgagtggaagattcggtcttgagcgtgaagttcttcaggttagggatgtggaagctttcccctttatttccccggaagagctctctcaagctgatcgagctgctattgagctttcggcggcgcgtcttattgcagacgaggcaaattggaaagagcttgatcaaacggtactgaatatctatcaagttggcaggctagatgctgaggttattgccgacacgttggctactcgctctcctttccctgccgccaagaaacttgcgcgtgagccaatcactagcgggcaggaggaggatttttgcgtccgacttaaggatgagctggatggcgtgctaggaagaagcggccagaaagttaatgttcgagtccttccggcagacgtccggctgccttggaggtttatcgctatttctctaaatgagcattctttaccagctatactgcctgcgagctggatggagtacgccgatgatttggcggtcagtcgtatcacaatcatcgacgagcagaagtcgaccgtcactgttggcttgctcaaccggtatcgctattggactccaactcaggcacggcttctggcctccgacattatctggcagaacggagcaatgctggaggcgcgagtcgaactatga

SEQ ID NO: 359450 - DNA, 237 bp, Pseudomonas aeruginosa
gtgcttgccgccacgccacttcgtcatgtcgccgaggcgctcggcatcgctgaaagcccgctgggcaaacggaagtgccagtacgaagagcaaggtgacgatgcctttccgggcaatggcaagcagcgtgacgagagcgtggagcttcgtcgcctgcgccggcagttgacccaggtcaccatggagcgcgatgtactaaaaaagacgctcgccatcttctcgcagcccacgcagtga

SEQ ID NO: 359451 - DNA, 201 bp, Pseudomonas aeruginosa
atggccagccggattgcggccaattcgccgctggccgtggcgctcgcgaaagatgcggccttggccagctttgaaactccgctcgcgcagggcctggagcatgagaagcgcaatttcttcgtcgttttgcgttcggccgacaacctggaagggcaagcggcattcctggacaagcgtgcccccaacttcactggccaataa

SEQ ID NO: 359452 - DNA, 783 bp, Pseudomonas aeruginosa
atgaaactgaattccgacatttctgccgtcatcaccgggggggcttccggtctgggagctgccacggcccggctcttggccagccacggcgtcaaagtcgccatcttcgacatgaatgaagccgtcggccaggcgttggcaagcgagcttggcggcgtttactgcaatgtggacgtgacgtccgaggagcaggtggacgcagccttcgccaaggcccgcgccgcgatcgggcaggagcgcgttctggtcaactgcgccggcacggccgacgccgtcaagactgtcagccgcgacaagaaaaccggcgaaatccgcccatgcgcggcagatcgtttcaatcgcatcattcagatcaacctggtgggcagcttccgctgcatcgccaagtcagctgcgggcatgttgacgctcgcgccgctggccgatggcgaccgcggcgccatcgtcaacaccgcttcggccgccgcgcaggacggccaggtcggccaggccagctatgcggccagcaaggcagccatcgtgggcatgaccctgccaatcgcgcgcgacatgatggacgaagggatccggatcaacaccatcatgccggggatcttcggtacaccgttgctgctgggcctgccggacaacgtcaaacaggcgctggcggccagcgtgccctttcccaagcgtttaggcgaccccgatgaattcgcgcaggccgtcgagtttctcgttacttgcggctacatgaatgccgagtccattcgtgtggatggtgccattcgcatggcgccgcgctga

SEQ ID NO: 359453 - DNA, 759 bp, Pseudomonas aeruginosa
atggccgaaccgcaccacctcgcgcactggtatccgaccgccgcctacctctacgtcctgtgtctggacacgctcgcactggcctgggagtacctgcgccgccatcccgactaccggatcgactggctgcgccgtgcgcgctgccccgatgccgcgcatcgctggggcttgcgtctgctggaagacccggacgtggatgcgcgtgacgcgcatccggcctggcttcccggccatggggccgtggtgcagcttcaccccgatgccgatccgcctccggatgccaccgccttcgcgttctggcgcatccccggccacaagcagttgctgcacgacggcaagggtctggcgctgatcgcgcgcagccccagcctttgccagcgctatgcgctggcgcctggcctggaggacggcatggccgtggcccatgcctatcgtggccgtcacgccgcccctgcggcccctatgcctggtacgcctgcgtcaatggctcggcccaggccaccgcctgcggcgctgctggagctacacaccctgcaggcgctcgacgccaccctggcgggcgcgtccttgcgcgacgtcgccgagggcttgttcggtgcggacgccgcagccggctggtacagcgacggcggcctgcgctccaaggtgcgccgcctggtgcggcgcggcgatgcgttgatgcgcggcggctatcgccgcctagcacaactgccgccgcttgagaagggtcgttttgaagagagcgcaaaacgaccctga

SEQ ID NO: 359454 - DNA, 210 bp, Pseudomonas aeruginosa
atgacccgcaccaccaccaaccgcccgcgcatggcggcggtctatgcacccggcacggtgcgcgcccgccgctggcacggcgatggcgacgtgcgcggctaccgaccgccctcgggctggtcggcccgcgctgacctcaccgacatacatcccatcacgggccgcgccttgccgcgtgccgtgtggtggatcatcgaaacgaaggaatga

SEQ ID NO: 359455 - DNA, 465 bp, Pseudomonas aeruginosa
atgcagatcctcaatgtcttgcaggtggtagctgtcgatgccgcctgcccagaagattttgtctcctttggcctgtgcgatcagggctgtctcgatcacgccgatgactgtcctgcagagcacagcgcggtgctccagatccacaggcagagtcttggtcacgcgggtaggctcaccaaggcctaccagcgggcgcgactcccccttgaaatgcagaatcatgttcgccacctttgccacggcaggaccgaagcggaagctttgtgtgaggtagtgggtttccgcctggtcgagccagtttgcgtcaagcgcatcaaccgcgccccggaatcggtagagcatctggtggccgtcgccgcatacaaccacgcccattccgtagcgcgcctggtcagcgagaaagccggccagcagtggatttacgtcttgagcctcgtcacacataacaatatcgaagcggcttga

SEQ ID NO: 359456 - DNA, 1128 bp, Pseudomonas aeruginosa
atgctgcccaacgaagaacaactactgatccgcgacatggcacgccagttcgcccaggaacggctcaaacccttcgccgccgactgggatcgtgagcatcgcttccccgccgaggccatcgccgagatgggccagctgggtttcatgggcatgctggtgccggagcagtggggcggcgccgagaccggccacctggcctacgccatggccctggaagaggtggcggcgggtgatggcgcctgctccaccatcatgagcgtgcacaactcggtgggctgcatgccgatcctgaaatacggcagcgaggcgcagaaacagcgctttctccgcccgctggccgaaggcagcatgctcggcgccttcgccctgaccgagccgcaggccggctccgacgccagcgacctgcgcacccgcgcccggcgcgacggcgggcactacgtgctgagcggcgccaagcagttcatcacctccggcagtcatgccggcatggtcatcgtcttcgccgtcaccgacccgggggccggcaagaagggcatcagcgcctttatcgtacccaccgacacgccgggtttctccgtggtgcgggtggaggacaagctcggccagcatgcctcggacacctgccagatccagctcgacgaggtgcgcatcccggccgagctgcgcctgggcgaggagggcgagggctaccgcatcgcactggccaacctggaaggtgggcgcatcggcatcgccgcgcaagcggtgggcatggcccgcgccgcgttcgaggcggcgcgcgactacgcccatgagcgggtcaccttcggcaagccgatcatcgagcaccaggcggtggcgttccgcctggccgacatggccacccagatcgccgtggcgcggcagatggtgcaccacgccgcctgcctgcgcgaagccggcctgccatgcctgagcgaggcctcgatggccaagctgttcgcctcggagatggccgagcgggtgtgctccgcggcgatccagaccctgggcggttacggctacctcaaggacttcccggtcgagcgcatctaccgcgacgtgcgcgtgtgccagatctacgaaggcaccagcgacgtgcagcggatggtcatcgcgcgcggcttgtga

SEQ ID NO: 359457 - DNA, 1188 bp, Pseudomonas aeruginosa
atgtctgcaaccgatccggtcgtgatcgtcagcgccgcccgtacccccatgggcggttttctcggtgacctggccggcctgtccgccgccgaactgggcgccgccgccattcgcgccaccctggagcgcgccggcctcgcggccgaggcggtggataccgtgctgatgggctgcgtgctgcaggccggccaggggcaggccccggcgcgccaggcagcgctcggcgcgggcctgagccaggcggcgcagtgcaccacgttaaacaagatgtgcggctcgggcatgcaggcgctgatgctcggccacgaccagctgctggccggcagcgccgaggtgttggtggccggcggcatggagagcatgtccaacgcgccttacctgctaccgcgcgcccgcgctggctatcgcatgggccacggccaggtgctcgaccatatgttcctcgacggcctggaagacgcctacgagcgcggccggctgatgggtaccttcgccgaggactgcgcgcagagctacggtttcacccgccaggagcaggacgcctacgccttggagtcgctgcgccgggcgcagcaggcgatggaggccggccattttgccgacgagatcgtcgcggtcgaggctccggccgggcgcgagcggcgcctgatcgccgccgacgagcagccgcccaaggccaggccggagaaaatccccacgctcaagccggcgttccgcgacggcggcacggtgaccgcggccaactccagctcgatctccgacggcgccgcggccctgctgctgatgcgccagtccgaggctgagcggcgcggcctgagcccgctggcgcgcatcgtcgcccatgccggccacgcccaggcgccgaacctgttcaccagcgcgccggtcaccgcgatccagcgtgtgctggcgcgcagcggctggagcctggacgaggtggacctgttcgagatcaacgaggcctttgccgtggtgcccatggtcgccatgcgcgatctggacatcccccacgccaggctcaacgtgcacggcggcgcttgcgccctcggccacccgatcggcgcgtccggcgcgcgcattctggtgaccctgctcgcggcgctgcagcagcgcggctacaagcgcggcgtggccgcggtgtgcatcggcggcggtgaggccacggcggtagccatcgagctgtattga

SEQ ID NO: 359458 - DNA, 768 bp, Pseudomonas aeruginosa
atgcgtatcgaagattccgtatttatgatcaccggtggcggctctggcctgggcctggccgctgcccgtcagctgctgggccagggcggcaaggtgctgctgctggatatcaatgccgaagcggggcagcgcgctgccgcagagctgggcgagggcgcccgcttcgtgcaggccgacatcacccgcgaggaggatggccgtgtggccgtggcgcaggcactggaggcctttggcgccgtgcacgggctggtcaactgcgccggtatcgcaccggccgagaagatactggggcgcagtggcgtgcatggcctggacagcttccgccgcaccgtcgaggtcaacctgatcggcagtttcaacctgctacgcctggccgccgaggccatggcgcagaacccgccgaatgccgagggcgagcgcggggtgatcgtcaataccgcttcggtggcggccttcgacgggcagatcggtcaggccgcctatgccgcctccaagggcggggtggccgccatgaccctgccggcggcgcgcgagctggcgcgctcgggcatccgcgtgatgtgcatcgccccgggcatcttcgagacgccgatgatggccggcatgccgcaggaggtgcgcgactcgctggccgccggcgtgccgttcccgccgcgcctgggccgccccgaggaatacgccgcgctggtgcgccacatcgtcgagaaccccatgctcaacggcgaggtgatccgcctcgatggcgcgctgcgtatggcggcgaagtaa

SEQ ID NO: 359459 - DNA, 1041 bp, Pseudomonas aeruginosa
atggcagtggagaagggcaccatctcggtacaactggtcggcgaggcgttgctcgaggcgcgccgccgcgggctcgacgtggcggcgctgctggagcgcgtcggcctgcctgcacaggcgctggagcgcccctacgggcgtgtgccttcggcgctctacggccagctctggcgcgctctggcggcgagcatggacgacgagttcttcggcatgaacgcccggcgcatgaaggccggcagcttctccttcatggctgccatcgccctgcgcgagcccaccctgggcgcggcgctggaacgggtgctggccttctgcggcctggtcttcgacggcctcagcccgcgcctggtgcagcagggcagcctggccgaaatcgccctggacgagccggacggtcagcacagtcgggccttcgcctacttcaccctgtggctgatggtgcatggcctgctgtgctggctggccggccggcgcctgccgatcctcggcatcgacctgcgctgtcccgcgccgggctatctcgaagactaccgggtgatgttctgcgacaacctgcgcttcgagcgcccctccagccgcctgctgttcaacgccgactgcttggcgcagccggtgcgccgcagcgagcgcgaactgaagcgctttctggccggcgcaccagccaatatcctggtgcgctaccgcgacccgcaaagcctgggggcgcgtattcgtgcctatctgcgctcgctgagcgccgcacgctggcccgacttcgaggcgctcagcagccacttctacatggcgccctcgaccctgcgccgcaagttggcccaggagggccagtcgtaccaggggctcaaggatcaggtgcggcgcgaactggctatcacccgcctggatgccggcgagggcgatttcgtcgagctggccggcgtgctcggtttcgccgatatcagcgccttctacaaggcgttcaagaagtggaccggctctacgccggggcagtaccgcgcgttgatgcacccgacgcccgattgtccaaagcgctcagatcgatag

SEQ ID NO: 359460 - DNA, 1704 bp, Pseudomonas aeruginosa
atgggtaccgacatgactcagctcagctacacccgcggcccgcaggacaaccccctgctggccatgaccataggcgaagccttcgacgctacggtgcgcctgcacgcacgcagagaggcgctagtagtgcgccatcagaacctgcgttacagctggggcgaactagccgaggtagtcgagggctgcgcccgcggcctgctcgccctcggcctgctgccgggcgatcgggtcggcatctgggcaccgaactgcgccgagtggtgcatcgctcagttcgccatggcgaaggtcggcgcgatcctggtcaacatcaatccggcctaccgtcttagcgagctggagtacgtactgaagcagtccggctgccgctggctgatttgtgccgagcagttcaagagttccgactaccacgccatgctcgccgagctgatcccggagttggccgatagcccgcccggtgggctgcatgccacgcggcttgccgacctgcgcggagtgatcagcctggggcgcacgccgaccgccgggatgctcggctgggccaagctgcttggcctggccgggcagatctcgcgcgacgtgctgcgtcgtcgtcaggcccagttgcagttcgacgacccgatcaacatccagtacacctcgggcactaccggctttcccaagggtgcgacgctgagccactacaacatcctcaacaacggctacatggtcggcgagagcctgggcctgagcgagcacgaccgcctggtgatcccggtgccgctgtaccactgcttcggcatggtcatgggcaacctcggctgcctgacccacggcagcaccatgatctatccgggcgatgccttcgacccgctgagcaccctgcaggcggtggccgaggaacgcgccacggtgctttatggcgtgccgaccatgtttatcgccgagctggatcatccgcgtcgcgccgagttcgacctgtccagcctgcgcacggggatcatggccggcgccacctgcccgatcgaggtgatgaagcgggtgatcggcgagatgcacatggccgaggtgcagatcgcctacggcatgaccgagaccagtccggtgtcgacccagacaggcccgaccgatgatctcgagcgctgcgtcaccagcgtcggtcgcacccagccgcacctggagagcaagatcgtcgacgagcagggcaacatggtaccgcgcgggcagatcggtgagctgtgcacccgcggctacagcgtgatgctgggttactggaacaaccccgaggccaccgccgaggcgatcgacggggcgcgctggatgcacaccggcgacctggcggtgatggacgaggcgggctatctgaagattgtcgggcgcagcaaggacatgatcatccgcggcggcgagaacatctatccgcgcgagatcgaggagttcctcttcacccacccggcggtggccgacgtgcaggtgatcggcattcccgacagcaagtacggtgaggaggtggccgcctgggtcaagctgcacccggatcaggcactcaccgccgaggcgctcgccgagtactgcaaggggcgcatcgcgcacttcaaggtgccgcgccacttccgcttcgtcgaggagttccccatgacagtaaccggcaaggtgcagaagtttcgcatgcgcgaactgatgcaggctgagctggcaccgccgctgcgcctggtcggccgctga

SEQ ID NO: 359461 - DNA, 1491 bp, Pseudomonas aeruginosa
atggaaaccctaccgctacaccgcaaaaccctcgatttccttgcccgaccgcaacgcatgctgatcggcgcccagtggctggatgccgccaacggcaatagcctgcaggtgcgcaacccggccaccggcgagccgctggccagcgtaccctcggccagcgccgtggacgtggatcaggccgtgcaggctgcccgccgcgccttctacgactccgcctggagccgcgtgcgcccgcgcgagcggcagaacctgctgtggcgcctggccgaattgatcgagcgcgacgccgacgtgctggccgagctggagtgcctgaacaatggcaagagcgcccaggtcgcccgcgctatggacgtacaactgtgcatcgacttcctgcgctacatggccggctgggccaccaagatcgaaggcagcacggttgagccatctctgccattgatgccgaacgaggatttccacgcctatatccgccgcgaggcggtgggcgtagtgggcgccatcgtggcctggaattttccgctgctgctggcctgctttaagctcggtccggcgctggccagcggctgcaccctggtgctcaaaccggccgacgaaaccccgctgagcgcgctgaaactggccgagcttgttctggaggctgggtacccggccggggtgttcaacgtggtcaccggcaccggcctgaacgccggcgccgcgctgtccagccacccgggcgtggacaaactgaccttcaccggctccaccgaggtgggcaagcagatcggcaaggtggccatggacaacatgacccgggtgaccctggagctgggcggcaagtcgccgaccatagtgctggccgatgccgatttgcagcaggccgccgctggcgccgccagcgccatcttcttcaaccagggccaggtgtgctgcgccggctcgcgcctgtacgtgcagcgcaagcacttcgacaacgtggtggccgacatcgcagccatcgccaacggcatgaagctaggcaacggcctcgaccccagcgtgcagatgggcccgctgatctccgccaagcagcaggatcgggtcaccggctacatcaacctgggccgcgaactgggcgccaccgtcgcctgcggcggcgaaggcttcggccccggctacttcgttcagccgacggtgctggtagacgtcgaccagcgccaccgcccggtccaggaagaaatcttcggcccggtgctggtggccatgcccttcgacgatatcgacgaggtggtgcgcctggccaacgacaacccctatggcctgggcgccagcatctggtccaacgacctcggcgcggtgcaccggatgattccgcgcatccgctccggctcggtgtgggtcaactgccacagcgccctcgacccggccctgccgttcggcggccacaagctctccggcatcggccgcgagatgggcgccgccgccatcgagcactacaccgaactgaagacggtgatgatcaagctgtga

SEQ ID NO: 359462 - DNA, 1905 bp, Pseudomonas aeruginosa
atgcacagatcgagcgaccccgccgcgacgcccacctcggctaagcatttggtcgattcccaggtaatcgcccgttcctggcagcgttcgcagaattacggcctgtgcccgcgcgacaaactgctgttcgaggcgccgctggtggccactggcaagcagatcgccgagcgcgaccgcctgctgctggaatgcgccatgcccgagatgcagcagctgcacgcggcgctggccccccaggattggatgctggcttgcatcgacctcgaaggtgtggtgcttagcagcctgagcgggcgcggtagcgccagccgcgagctgaaacaggttttccgtgtcggcgcgcagctgtccgaacagaacatcggcaccaccgcgccgggctgcgcgctggctgagggcgattcggtgttcttcgtcggcgaggagcactatttggaggaggcccgtcagttctcctgcctggctacgccgatcttcggcctggacggcggcatagtcggggtgctggacgccagcagccggcagggtgcatcctcggtctatactctggagtcgctggtgttcgccgcccgtgccattgagaaccgcctgttcgcccagctcggagacgtgctgctggtacacctgcactatcgcctggacatactcggcacgccgctggaggggctgctggcctttgacccggcgggcaagctgcgttgcgccaaccgcatcgccggccagttgctgcgtatgggcgaggtgcgcgcgggcctggacttcgccgaactattcgacatgcccttcgcccacgccgcctgttttcgccgccatgacctcagtgcgccgctgcgcctgcgcagccaccacggcggcgagctgcacgcctgcatcactcagggcccgcctcagcgaacggcgccgatgctggccgaggcgccgcgcccgcggcgcagcgccgagccgctgccgacgccgcacagtggtgcctgcctgcaggacccggcgctgcaggatgccctggcgcgggcgcgcaaggccttcgcccgcgacatcccggtgctgatcaatggcgagacgggcaccggcaaggaggtcttcgcccgcttgctgcacgagagcagtgcgcgggccggcgaagccttcgtggccatcaactgctcgtcgattccggccagcctgatcgagtcggagctgttcggccatgtcgaaggcgccttcaccggcagccgcaagggcggcgccatcggcaagatcgagcaggcgcacaagggcacgctgtttctcgacgagatcggcgacatgccgctggagctgcagggccgtctcttgcgcgtgctgcaggagcgcagcctgagccgcctgggcagcaaccagctgatcaaggtggactgcgcgctgatctgcgccacccaccgcgacctgcagcagctcagcgccgagcagggctttcgcgaggatctctactaccgcatcaacggcctgcgcgtgagcctgccggcactgcgcgagcgacgcgacctggcggcgctgatccagcacctgctgcgcgccgaggccaccgcacagcagcctctccagctgagcccgccggcgctgcaggcgctgctggactatcactggccgggcaatatccgccagctctaccagtgcctgcgcctggctgcggcgctggccgaggacgacggcgagatcggcgtgcagcacctgccggacgaggtgcgcgcaggctgcggcgaacaggccgcgacggtggcgggcgaagggctgacgctggcggcggggagcacgctgcagcttgccgaggcgcgggccattcgcgccgcggtggaggccgccggcggcaacctctcggccgccgcgcgcagcctgggtatcgcccgcgcgacgctgtatcgcaagctcaagggtatggaacaggggtag

SEQ ID NO: 359463 - DNA, 909 bp, Pseudomonas aeruginosa
atgaaaatgagcatagatgcggctcggcccaaaccggcccggcagtggctgcatgcttcgctgttcggcctgctgagcagcttttgcgccggtgcctcggcgctcgacgtagacgccggcgattacaccgcaatgcctgccggcaccaacgtgggcttgctctactaccagcacgccgaacgcaaccgcctctacgccaacggcgacaagctgccgctggacgccggcctggattcggatatcggcatcctgcgcggcgtgcacttcatggagctgggcggctacatcgtcgacccgcagttcctcctgcccttcggcaacatgcgcgccaaggacgatctgtcctccctgggcagcgacagtggcaccggcgacctgatgctggccgccaccgtatggctggtgaaccagccggagcaacgccgctacttcggcatcagcccccacctctggctgcccaccggcagctacgacaacgaccgcgccatcaacctcggcgagaaccgctggaagggtgcactgcaggccggctacatcgagggcctgggcgacaagttcagcctcgacctggtgggcgacgtgaccttcttcggcaagaacgacgacttcggccccgccagccagactctcaagcagaagccgctgttccaggcccaggcgttcctgcgctaccacgtcaacgaacgcttcgacctgcgcgccggcgtctcgcgcctgtggggcggcgagacagaagtggacggcctggacatgaacgacaagccgaacaccagcaagttcagcgtcggcgccagctggttcgtcaccccgcgcgaccagctgatggtcaacttcggccgcgacatctcggtggacaacggattcaaggagcagggacgcgtcaacctgcgcctgctacacgttttctaa

SEQ ID NO: 359464 - DNA, 2088 bp, Pseudomonas aeruginosa
atgcctaacctcacccaatcacgccgtttcgtctgcctgctcaccgcgctgctggtcgccacaggcgcccaggccgccaaggtcgacgaggccgccatccgtgccagcgagcaagacggcagcgaatggctcagccatggccgcacctacgccgagcagcgcttcagcccgctcaagcagatcgacgccggcaacgtcggcaagctgggcctggcctggtacctggatctggaaaacaaccgtggcctggaggccaccccgctggtgtccgacggcgtgctctacgcctcgctgtcctggagccgggtgatggccgtggacctgcgcagcggcaagcgcctgtggcagttcgatccccaggtggatcgcggccgctcccgctacgcctgctgcgacgcggtcaaccgcggcgtcgccctgtggaacggcaaggtctacgtcggcgcactggacggtcgcctgatcgccctggacgccaagaccggccgcgaggtctggagcgagcagaccaccgacccggccaagccctacagcatcaccggcgcgccgcgtgtggtgaagggcaaggtgatcatcggcaacggcggcgccgagtacggcgtgcgcggcttcttctccgcctacgatgccgagaccggcaagatggcctggcgcttctacacggtgccgggcgacccggcccagccctacgagcaccccgaactggcggcagcggccaagacctggaagggcgaccagtactggaaactcggcggcggcggtaccgtatgggacagcatggcctacgacccggagctggacctgctgtacatcggcaccggcaacggctcgccgtggaaccgcgagatccgcagccccggcggcggcgacaacctgtacctgtcgtcgatcctcgctctgcgcccggacagcggcaagctgctctggcattaccagaccacgccgggcgaaacctgggacttcaccgccacccagcagatcaccctggctaccctggagctggacggcaagccgcgcaaggtgctgatgcaggcgccgaagaacggcttcttctatgtgcttgatcgcgccaccggcgaactgctctcggcggaaaaattcggcaaggtgacctgggccgagaaggtcgatctggccaccggccgcccggtggaggtgcccggctcgcgctacgagcaggagcaggtggtgatgtggccgagctcgttcggcgcgcacaactggcactccatgtcgttcaacccgcagaccgggctgatgtacatcccctaccaggaaatcccaggcgtctatcgcaacgaaggggccacgttcaagaagatcgacggcttgaacaccggtaccggcttcagcgacacccacgagatacctcgcgatgcggtgagcggtgccctgctggcctgggacccggtacgccagcgcgaggcctggcgcgtgccgcatagcttctactggaatggcggcaccctgagcaccgccggaaatctggtgttccagggcaccgccgacggccagctgcacgcctattcggcggacaaggggcagcgcctgtggagcttcgccgcgcagaccgggatagtcgccgcccccatcagcttcagcctggacgacgaacaatatgtggcggtcatggccggctggggcggcgcggcgccgctgatcggcggcgacgcggcgctggcgcccggggtgcgcaacctcagccgcctgctggtgttcaagctcggcggccagagcagcctgccgccgctgccgcaggcgaccacggccgccgtgcagcgcacgccgcaagcggtccaagcgagtgccgcggacctggacgccggcaagctgctgtacggcaactactgctcgatgtgtcacggcgtcggcgccgtcagcggcggcctgatccccgacctgcgccatacggatcaatggcgccgcgacaacttccagcagatcgtccgggacggcatcctccgtccgctgggcatgccatccttcaagaactcgctgagcgcggccgaggtggaacagatcaaggcctatgtgatgagccgcgagtacgaggaccatctcaaggcgcagcaagccgccagaccctga

SEQ ID NO: 359465 - DNA, 915 bp, Pseudomonas aeruginosa
atgcatattcggattctcggttccgccgccggcggcggttttccccagtggaactgcaactgccgcaactgccgcggcgtgcgcgccggcaccctgcgggcgcagccgcgtacccagtcgtccatcgccctttccgatgacggcggcgagtgggtcctgtgcaatgcctcgccggacatccgcgcccagctcgaggccttcccggcgctacaaccggcgcgccagctgcgcgacacggcgatcgccggcatcgtcctgctcgacagccagatcgatcactgcaccggcctgctgaccctgcgcgaaggctgcccgcaccaggtctggtgtaccgagatggtccatcaggacctgaccagcggctttccgctgttcaacatgctcagccactggaacggcggcctgcagcaccagctgatcgagctggatgccaagccgttcaccatccccgcctgtcctgggctgcgcctcaccgccatcgccctgcgcagcagcgcgccgccgtattcgccgcaccgcggcaatccgcatccgggcgacaacatcggcctgtttatcgaggacctgcgcacggggggaaccttgttctacgcccccggcctgggtcaggtggacgagccgctgctgggctggatgcgccgcgccgattgcctgctggtggacggcacgctgtggcgcgacgacgagatgcgccggtgcgaggtgggcgacaagctcggcagcgagatgggccatctgccgcagagcggcccaggcggcatgctcgaggtgctcgatggcctgccggcggcgcgcaagatcctgatccatatcaacaacaccaacccgattctcgacctggactcgcccgagcgtgccgaactggacgcccgcggcatcgaggtcgcgttcgatgggatgagcatccacctgtaa

SEQ ID NO: 359466 - DNA, 753 bp, Pseudomonas aeruginosa
atgagccagcctgccatgagccctgccgaattcgagcaggcgctgcgcgccaagggcgcgctgtaccacattcaccatccctaccaccgggtcatgtacgaaggccgggccagccgcgagcagatccagggctgggtggccaaccgcttctactatcaggtcaatattccgctcaaggacgccgcgatcatggccaactgcccggaccgggaaacccgccgcgagtggattcagcgcatcctcgaccacgatggggctccaggcgaggaaggcggcatcgaagcctggctgcgcctggccgagtcggttggcctggagcgcgagcaggtgctgtcgcaggagctggtattgcccggtgtgcgcttcgccgtcgacgcctacgtcaacttcgcccgccgagccagttggcaggaagcggccagcagctcgctgaccgagctattcgccccgcagatccatcagtcgcgcctggatgcctggccgcagcactacccgtggatcgacgccagcggctacgattatttccgcaagcgcctgaaggaggcgcgccgcgatgtcgagcacggtctgcgcatcaccctcgaacactaccgcacctttgatgcccagcagcgcatgctgcagatcctgcagttcaagttggacgtactgtggagcatgctcgacgccctgagcatggcctacgaactgcagcgcccgccataccacacggtgaccgccgaacgcgtctggcatcgggggatcgccctgtga

SEQ ID NO: 359467 - DNA, 279 bp, Pseudomonas aeruginosa
gtgagcggcttcgaccgtcgcctggtcccgcgcctgcgccccggctaccgcctgcaatgggaaccggcgcagcaggcccatgtactgctctacccggagggcatggtcaagctcaacgacagcgccggcgccatcgccagcctgatcgacggtcgacgcagcgttgccgccatcgtcgccgaactgaaggcgcgctatcccgaggtcgcggagttgggcgacgacgttgaacagtttatggaggtggcccgtgacaagttctggctgcaactcgcctga

SEQ ID NO: 359468 - DNA, 1152 bp, Pseudomonas aeruginosa
gtgacaagttctggctgcaactcgcctgacaccccgctcggcccgccgctctggctgctggccgaactgacctatcgctgcccgctgcagtgcccgtactgctccaacccgctggatttcgcccagcagggcaccgagctgtcgaccaccgagtggatcgaggtgtttcgccaggcccgtgagctgggcgcggtgcaactgggtttttccggcggtgagccgctagtgcgtcaggatctggccgagctgatcgcggcggcacgtggcctgggctactacaccaacctgataacctccggcatcggcctgaccgaggctcgcatcgccgagttcgccgcggcgggcttggatcatatccagatcagtttccaggccgccgacgaggaggtgaacaacctcttggccggctcgcagaaggccttcgcccagaagctggcgatggcccgtgcggtcaaggcccacggctatccgatggtgctcaacttcgtcacccaccggcacaatatcgacaatatcgagcgcatcatcaggctgtgccttgagctggaggcagacttcgtcgagctcgccacctgtcagttctatggctgggcggagctcaaccgcgctgggctgctgccgacccgtgcgcagctggaacgcgccgaacgcattaccaatcaatggcgtgacaggctcgcggtcgagaaccacccgtgcaagctgatcttcgtcaccccggattattacgaggagcgccccaaggcctgcatgaacggctggggcagcctgttcctcgacatcaccccggacggcaccgcgctgccgtgccacagcgcgcggcagctaccgatcgagttccccaacgtgcggcagatgccgctgcgacagatctggcacgactcgccgggcttcaaccatttccgcggcgacgcctggatgcccgagccctgccgcagctgcgacgagaagcacaaggacttcggcggctgtcgctgccaggccttcctgctcaccggcgacgccagcaacgccgacccggtgtgcagcaagtcggcccatcacggcgtgatcctcaccgcccgcgatgaggccgagcaggccgagcaagccatcgccgagctgacctttcgcaacgccgccacctcacgattgatcgcccgggttcgctga

SEQ ID NO: 359469 - DNA, 2361 bp, Pseudomonas aeruginosa
atgcccagcccaaacgtgcagcacctgcgcctgagcaatggcctgcacgtgaccctgctgcacgcgccttggctgaaccgctgcggcgccgccctgcgcatcgacgccggcagccacgacgagcctccggagtacccgggactggcgcatttcctcgaacacctggtgtttcttggcagccgccacttcactgcgcaggacagcctgctgcccctgacgatggagcacggcggccaagccaacgccagcacccgcgaacgccacaccgactacttcttcgagctaccgacgaccgctgtcgatgccggcctggagcggttgtgcgacatgctcgccgcgccggccctggacctgcgccagcagcacgccgagcgcgaggtgctgcacgccgaatacttggcctggtcgcgcgacgacctgagcgccgccagcagggccctggccgaggccgtgccggcgcagcacccgctggcacgctgccacgccggcgagcgcgccagcctggcgctgcagcaagaggggtttcagcaggccctgcgccgcttccaccgggatttctaccacgccggccaggcccgcctggtgctgctcggcccgcagccgccggagcaattgcgcgagctcgccgaacgcgagggcaatcgcctgcgtgccgctacgcccacgccgcgcccgccgccgccggccctgctgccgccgcgccacagccgcgtggcgatggcgcgccccggtctgtgcctgctgtttaccctgcagcaactgccggacggcgccgcgccggcgctgcagtggctctgccagcaactgcagcacgacgcccccggcggctgggccgccagcctggccgaacgcggcctgggcggtccggtacaggcgagcctggcctaccaccaccaggatcaggcactgctgcaactcgacctgggcagcatcgccgcggacggcgaaaccgcggtgctcgagctgctgttcgactggctggcgttcttcgcccgccaggactggggcgcgctgagtaccgaacatcggcgctggctggcgcgccaggcctgtgcggtggaaccgctgggcctgctgcgccactggctgcaggccggcgagacgccatcactggatgaggccgtgctgcgcgagatcctgccccagctgcatcccggcaacctgctgcgtctggttggccggtgcggtgcgctggcgccgtccgcgtccgccccgccgcactggcagctgccgccggccaatccctggctgcagcagcgcggcccgaaccgcgcgacggcctcgcccgaggccgccggcctgcgccgcgagcacctgcccggcggccatggccatggcgcgctgttgctccgctggcaggcagcgccgggctgctcgccgcccggcggcctgctgcagggcgccgtgcaagcgctcgccacgacgacccggcgcgccggcttggagctgggtctgagttccggcggcgagctgtgtgagttgcgcctgagcggacccgcgccgctgctgccggacctgctgcgcgccagcctggacgccctggacaatgccccgcttccccagccggcgccgacgccctcgccatccgcggcgatgttcctgcgccgcctgtggcaacgcctggaaagcgagctgacgcgccagctgcatccgcctggcgacccggtgaggttgagcgattgccgccgcgacggcctggccctgggcctggacgacgcgcagtggcacgcggtctgtgcgctgtggaacgcggcgccggggcaagccgggcgctggccgtcgcagcgcccgcgactggagcagcggctgtggctggaggtcgagccgatggccggcgaacaggcgctgctgctgttcgttccgagcggccagggtagtgccgccgaacaggcggccgcgcgcctgctcggccagtggctgcaggcgcccttccatcaccactggcgtcagcgactggggctgggctacggcgtgttcgccggtcatcggcgcctggccgggctggatggcctgttgttcgccgtgcaatcgccatacgccgacgcccacacgctgctcggtcatgtgcaggcctttatcgacgcccagcgcgtaccactggcaggtctcgacctggcgcgccagcgcgaactgctgctggcccgtctcgcccccgcaaaactagccccgggcgaggccgcgaccctgctctggcaacttggggacgacgctggacaactgcagcggctgcgcgaggcggtggccgcgctcgattcggaggccctggatcgggccctgctggcgctgggctcgcccgccgccggctgcttctgcctggccaccggcgcgcctgccgattcgcgctggcgcccgtcggcctag

SEQ ID NO: 359470 - DNA, 933 bp, Pseudomonas aeruginosa
atggagcgaatcaactgggacgacctgcgctttttcctcgaggtggcgcgcagtcgcaccgccagcgcggcttcgcgtcggctgggagtggactacaccacggtgtcgcggcgcatccgcggcctggaacagagcctgggcgcgctgctgttcgagaagtcacgcagcgccggcttcgtcctgaccagcgaggggcagcgcctgctggggcacgtggagagtctggagggcacgctgcaggtcgcctgcgaacaggtctccggcagcaccggcgggctcgccgggcatctgcgcatcggttgcaccgaggccttcggctcctgcttcgtcacggcgcagatgagccattttctcgaccactacccgaacatctcggtggacatcctgccggtgccgcacttcatcagcctgtcgcggcgcgaggcggacatcgccatcaccctggaacgcccggaacgcggcccctatgtctgctcgcggctgtgcgactaccgcctgcgcctgtacgccacgcccggctacctggccaaccacgcgccgatccgcagccgcgacgacctggccgggcatgccttcgtcacctacgtcgaggatctggcgttcagcttcaagctgctgtacctcaacgacctgctgcccggtgcgcacagccgcctgcgcagcaccagcgtggtcgctcagtaccacgcggccctggagggccgcgcgctggcgatactgccgtgttttctcgccggccccgatccgcgcctgcaggcggtactgccggacgaagtcgaggtgatgcggcagttctggatgtactacagcgaggatctgcgcaagctcaagcgagtcaccctggtggccgagtacctgcgtgcctgcgccgaactcaatcgcgacctgctgctgggcgagtcgacgcagatggtctacctgccgagtctctag

SEQ ID NO: 359471 - DNA, 327 bp, Pseudomonas aeruginosa
atgagcagccacgccaaccatgccctgacctgcgcactgatccgcagcaatcccaagttccagcgcctcgcccgccgccgcgcgcgcctcgcctgggccctgagcgccctggtgctggccctctactacagcttcatcatgctggtggccttcgctcccggttggctgcacctgccgctgtacgccggcagccacctgagcctgggcctgccgctgggagctgcgctgatcctgctgtgctggctgctcaccgcctggtacgtgcgcagcgccaacctgcatttcgacgccatcagcgcgcagatcctcgaggagtcccaggtatga

SEQ ID NO: 359472 - DNA, 1650 bp, Pseudomonas aeruginosa
atgaaacgtccagcccttctgctcgcgctctgtgcaccactggccgaggccgcccccctgacggccgagcaacagccgctcaacctgcacgccatcggcatgttcttcgtcttcgtcctcgccaccctggcgatcacctggtgggcggcgcggcgcacccgttcggccgccgatttctacagcgccggcggcggtatcagcggcttccagaacggtctggcgatcgccggcgactacatgtcggcggccaccctgctgggcctgtccagcctggtcttcgcccggggctacgacggcttcgtctacatcatcggcttcttcgttggctggcccatcgtcaccttcctcatggccgagcgcctgcgcaacctgggtcgctacaccttcgccgacatcgtctcctaccggctggaccagacccgcgtgcgcagcttcgccgcgctcggctcgctgaccgtggtgtgctgctacctggtggtgcagatggtcggcgccggccaattgatcaaactgctgttcggcctcgactacagcaccgcggtagtggtggtcggcgcgctgatgctggtctacgtgattttcggcggcatgctcgccaccacctgggtgcagatcaccaaggcggtactgctgcttggcggcggcactaccctggcagtgctggcactggcgcgtttcgacttcagtttcgagacgctggccgagcaggccgtggccctgcatgccagcggcgcgcagatcatgggccccggctccctgctggccgacccgatcaatgcggtgtcgctgtcgctcggcctggtcttcggcatcgccggcctgccgcacatcctgatgcgtttcttcaccgtgcccaacgcccgcgaggcgcggcgctcggtgctgttcgccacgctgttcatcggcttcttcttcctcgtggtctgcgccctgggctacagcgccatcgtcatagtcggcggcgacccgcagtacttcgtcgacggcaagctcggtggcgccctgatcggcggcggcaacatggtggccatgcatctggccaaggcagtgggcggcgacctgttcctcggtttcctctccgccgtggccttcgccaccattctcgcggtggtcgccggcctggccctggccggcgcctcggccatctcccatgacctctacgcctcggtgctgaagaaaggccgcgccaacgagaaggacgagatgcgcgtctcgcgcatcgccacggtggccatcggtatggtcgccatcggcctgggcattctcttcgagcagatgaacatcgccttcctggtcggcctgaccttcggcgtggccgcctcggccaacttcccggtgctgatcatggccatgtactgggacggcctgaccacccgtggtgcggtctatggcggcctggccggcctgatcagcgccctggccctggtgatcggctcgccctcggtgtgggtcggcgtgctgggccatgccgaggcgctgttcccctacgaccagcccgcgctgttctccatgccgctggccttcgtcaccatagtgctggtctccaagctggaccgcagcaagcgcgcccaggccgagcgcgccgcctacgccgaccagttcgtgcgggcccagaccggcttcggcgcagccgccgccagcagtcactga

SEQ ID NO: 359473 - DNA, 1701 bp, Pseudomonas aeruginosa
atgaaccgcaacagccaacccttcgtcgccgcacgcgacttcctcctggcccaccgcaccgactacgccgccgcggtgcgcgacttccgctggccgcagttgcaccagttcaactgggcactggactacttcgacgccatggccgagggcaaccaggcgccggcgctgtggatagtcgaggaagacggcagcgagcagcgctacagcttcgccgaactggccgagcgctccaaccgcgtggccaaccacctgcgcgccctcggcgtgcgccgtggcgaacgcatgctgctgatgctgggcaaccacatcgccctgtgggaaaccatgctcgccgccttcaagctcggtgccgtggtgatcccggccaccgccctgctcaccgccgaggacctgcgcgaccgtatcgatcgcggccaggtgcgccacctggtggtgggcagcgagcacaccggcaagttcgccgacctggccgcaggctgcacgcgcatctgcgtcggtgcaccggtggcgggctggacgccgcatcagacctacgcggagcacgccagcgcgttcactgccgagggcaccaccctggccaccgaccccatgctgctgtacttcacctccggcaccaccagcaaaccgaagatggtcctgcacagccaccagagctacccggtcggccacctctcgaccatgtactggatcggcctgcagccgggcgacctgcacctgaacatctcctcgccgggctgggccaagcacgcctggagctgtttcttcgcgccgtggaacgccggcgcctgcattttcattcacaacgtcgcccgcttcagcgctccggccctgctcggcgtgctggaaaaatacggcgtcaccagcctgtgcgcgccgcccacggtatggcgcatgctgatccaggaagacctggccagcctgaaaggccgcctgcgcctgcgcgaactggtgggcgccggcgagccgctcaacccggagatcatcgagcagatccagcatgcctggggcctgtggttgcgcgacggtttcggccagtcggaaaccaccgccctggtcggcaacacccccggccagccgctcaaacccgggtccatgggccgtccgctgcccggctaccgggtgtgcatgctcgaccccgacggccagccggccagcgacggcgaggtggccctgccgctggagccccatccgctgggcctgatgctgtgctacgaggacagcccggagaagactgccgaggtgatgcgcggcggctactaccgcaccggcgacaccgcgtcggtcgacgccgacggctacgtcaccttcgttggccgcgccgacgacgtgttcaaggcctccgactaccgcatcagccccttcgagctggagagcgcactgatcgagcacccggcggtgatggaggtggcggtcgtgccgagcccggatccggtacgcctggccgtgcccaaggccttcctcatcctcgcccacgacgaacccggcagcgccgcgctggcggaaaacatcctggccttcgcccgcgagcacctggcgccctacaagcgggtgcggcgcatcgagttcgtcaccgagctgcccaagaccatctccgggaagatccgccgggtcgaactgcggcagatggaagtgcagcgccgccagggcgaacgcggcgcgcaggaatacttcgaagaagacttcccgcagctcaagggctga

SEQ ID NO: 359474 - DNA, 774 bp, Pseudomonas aeruginosa
atgaactacgaaaccctgctggtcgaggtgcgcgagcgcgtcggcctgatcaccctcaaccggccgcaggccctcaacgcgctgaacagccagctgatcgcagaactgaaccaggccctcgaccgcctggaggccgacccggaggtcggctgcctggtcatcaccggctcggccaaggccttcgccgccggcgccgacatcaaggaaatggccgacaagggcttcccgcagatctacctcgacgacttcttcgccgccgccgaccgcatcgccgcgcggcgcaagccgatcatcgccgcggtggccggctacgccctgggcggcggctgcgaactggcgctgatgtgcgacttcatctacgccgccgacaacgcccgcttcggcctgccggagctgagcctgggggtgatccccggcatcggcggcacccagcgcctgacccgcgcgctgggcaaggccaaggccatggagctgtgcctgaccggccgccagctgcatgccgaagaagccgagcgtgccggcctggtggcccgcgtgctgccggccgccgagctgctggaacgcaccctggaagcggcccgcggcatcgccggcaaatcgctgccggcggcgatgatgatcaaggaatgcgtcaaccgcgccgaggagatcggcctggccgaaggcgtgcgtttcgagcgccgcctgttccactcgctgttcgccagtcacgaccagaaggaaggcatgcaggccttcgtcgccaagcgtgcgccgaacttccgccatcactga

SEQ ID NO: 359475 - DNA, 891 bp, Pseudomonas aeruginosa
atgcatatcggatttctcggcctcggcaacatgggcgcccccatggcccgcaacctgctcaaggccggccacagcctgaccgtcttcgaccccttcacccaggcggtcgccgcgctggtggaggccggcgccagcgccgccgcctcgcccaccgcggtggccaaggccggggtcgaggcgatcgtcaccatgctgccgaccgccgcccacgtgaaacaggtctacctgggcaaggacggcctgctggcccatgtcggccagggcgtgttgctgatcgacagctccaccatcgacccgctgagcgcccgcgaggtggcgaccctggccatcgcccagggcaatcccatgctcgatgcaccggtctccggcggcaccggcggcgccgcggccggtaccctgaccttcatggtcggcggctcggtcagcgtgttcgaccaggccctgccgattctctcggccatgggcaagaacgtggtgcactgcggcagcgccggcaacggccaggtggccaagatcgccaacaacatgctgctgggcatctccatggtcggcgtcgccgaagccatggcactgggcgtggccctgggcatggacgccaaggtgctggccggcatcatcaacacctccagcggtcgttgctggagctcggagctgtacaaccccttccccggcgtgctggacaacgtgcccgccgcacgcggctacagcggtggcttcggtagcgacctgatgctcaaggacctcggcctggccaccgatgccgcacgccacgcgcgccagccggtgccgcttggcgccaccgcccagcagctgtaccagaccttcagcctgcagggccatggcggcctggacttctccgcgatcatcaacctgttccgtcgggaagcctga

SEQ ID NO: 359476 - DNA, 1086 bp, Pseudomonas aeruginosa
atgagccaggagcaagcggtactggccgaggtgcgcaacggcatcggccatctgacgctgaaccgccccgagggcctcaacgccctcgacctgcccatggtgcgcctgctctgccgccacctctgggcctgggagcaggacccggcgatagtcgccgtggtcctgcgtgccgccggcggcaaggccttctgcgccggcggcgacatccgcatgctgtacgagagccagcgtgccggcgacaaccagaacgtgctgttcctcgaagaggaatacgccctcgacgaatacctgcacggctacgccaagccggtactggcgctgatggacggttacgtgctgggcggcggcatgggcctggcccaggccgcttcgctgcgagtgatcaccgagcgcacgcggatgggcatgcccgaggtcggcatcggtttcttccccgatgtcggcggcagctacttcctgccacgcctgccgggcgaactgggcctgtacctgggtgtcaccggcgtgcaggtgcgcgccgccgacgcgctctacgccgacctggccgactactgcctggccagcgaacggctcgccgagctggacgcccgtctcgaccagctgcagtggagcgactcgccccacgaggacctgcgcgcgctgctcaccgagctggccaccgtgcgcatccccggttccgagctgaaggccttgcgcccggcgatcgaccagcatttcgccctgcccgacctgctggcgattcgcgacgcgctgcgccgcgagagccgcccggagctgcgcgactgggccgaggagaccctgcgcgtactcgacagccgctcgccgctggccatggcggtgaccctggagctgctgcgccgcggccgctacctgagcctggccgactgcttcgccctggagctgcacctggattaccagtggttcgccaagggcgacctgatggaaggcgtgcgcgccctgatcatcgacaaggacaagcagccgcgctggaacccgcccaccctggatgagctggcgccggcgcgggtgcaggccttcttcaacggcttccgcccggcctccggcaagccccttcgcaccgcctga

SEQ ID NO: 359477 - DNA, 1152 bp, Pseudomonas aeruginosa
atgaacgatctgcaactgaccgaagaacaacgcatgatccgcgacatggcgcgcgacttcgcccgcagcgaggtggcgccgcacgcccaggcctgggagcaggccggctggatcgacgacgccgtggtggcgcagatgggcgaactgggtctgctcggcatggtggtgccggatgcctggggcggcagttacaccgactatgtggcctatgccctggccgtggaggaaatctccgccggcgacggcgccctcggcgcgctgatgagcatccacaactcggtgggctgtgggccgctgctcaagtacggcagcgcggcccagcaggacgcctggctgccggcgctggccagcggccaggccatcggctgcttctgcctgaccgaaccgcaggccggctccgaggccaacaacctgcgcacccaggcgctgctgcaggacggtcactgggtgctcaacggcgccaagcagttcgtcagcaacggcaagcgtgcgcagctggcaatcgtcttcgcggtcaccgatcctgcgctgggcaagaagggcctgtcggcctttctggtgccgaccgacactcccggcttcgtggtcgagcgcagcgagcacaagatgggcatcaaggcctcggacacctgcgcggtgaccctgcaggactgccgcattccgcaagacaacctgctcggcgagcgcggcaagggcctggccatcgccctggccaacctcgagggcgggcgtatcggcattgccgcccaggccctggggatcgcccgcgcggccttcgaggcggcgctgggctactcgcgcgagcgcgtgcagttcggcaagccgatcgccgagcaccagagcgtggccaacctgctggccgacatgcacacccggctcaacgccgcgcgcctgctgatcctgcatgccgcgcagctgaagagcgccggcctgagctgcctgtcggaggcctcgcaggccaagctgttcgcctcggaaatggccgaatgggtgtgttccaaggccatccagatccacggcggctacggctacctggaggacttcccggtggagaagtactaccgcgacgcgcgcatcacccagatctacgaggggtccagcgagatccagcgcctgctgatcgcccgcgagctggcgcactacccgctctga

SEQ ID NO: 359478 - DNA, 624 bp, Pseudomonas aeruginosa
gtgtctagcccggtggcacgcccggcgccgcgcagcaaggccggaatacgctatcaggatgcccagcgtgcggcgctggagctgttcgccgagcgtggtttcagtcgcgtcggcatgcgtgacctggccgcccatatgggtatcgccgccggctcgctgtacaaccatatcgagagcaaggaagcgctgctgttcgagttcatcgaggagttctacagcgccctgacgctgggcgccgaacaactgctcaagagccagcccgacgccaggagtcggctgcgcgcgctgctcgaacgccacttgcagttgcaccagagcatgcccttgcactttcgtctggccgaatacgagctgtgctgcctgccacccgagccgctggagcagatcctcgagctgcgcgagcgctacgaacagcactggctgcaggccgtggcgccgctgtgcggccaggcgccagacgctgtccgtcgcggcgcggtacgggccatcgtctcgctgctcaaccagctgccggcctggacccaggctgcctgcgacgagcccgccagccgcctgcgcctgcagcaggagatggtcctgggcgcgctggctggcgcgctcggcatggccgttcacaccttctga

SEQ ID NO: 359479 - DNA, 381 bp, Pseudomonas aeruginosa
atgcccaccacctactccatctccgacctggcccgcgaactggacgtgacgccgcgcgccatccgcttctacgaggagcaaggcatgctcgcccccgagcgccgcggccaggagcgcatcttcagcccccgcgatctggtcaccctgaaactgatcctgcgcggcaagcgcatcggtttttccctggccgagtgcaaggagctgatcgacctctatgaccccagcagcggcaaccgcaagcagctggaaaccttcatggaaaagatcgccgcacgccgcgcccagctcgagcagcagctgctggacatccggcagatgcagctggagctcgataccgccgaggagcgctgcctggcagccctggccgaaaccgacatgtag

SEQ ID NO: 359480 - DNA, 1362 bp, Pseudomonas aeruginosa
atgacgtttccctgttatccgaaatacagaacttcagggatcgagtggttagaccaagtgcctgaccattggagcagtgttcccattaagtatatggcgcttgaacgaaactcattgttcttagatggtgactggattgagagcaaggatatttcgtcagatgggattcgctacataacaacagggaacgtcggcgagggtgcgtataaagagcaaggtgctggatttatttctgaagagactttccatgctcttggatgcacagaggtttacgagggtgacgttctggtctctcgtttgaataaccctattgggcgtgcctgcgtggttccagacctcggcgggagagtggtcacatctgtagataacgtgatttttaggccggactcaaagttcgataagaaattcatcgtctatctcttcagtagcgaagagtatttcaagcacacaagcaatcttgctcgcggtgccacgatgcagcgtattagtcgtgggcttttaggaaacattcgagttgttactccttcgtttgaagaacaaacccaaatcgcccgcttcctcgaccacgaaaccgcccgcatcgacgcgctgatcgaagagcagcagcgcctgatcgagctgctcaaggaaaagcgccaggccgtcatctcccacgccgtcacccaaggcctcgacccgatggcgccgatgaaagactccggtgtggagtggctaggcgaggtgccggcgcattggacagtccgtaaagtatcagtcgattttctggcctcaaaaggcccaagaggagcgctactcacgaaggagtattgccatgaaaacgctggggaatatcccgtttacagtggccaaactgagaatggtggcatcctgggagaaattgcggactttgatatcgatcttggtgcagagggtgcaattctttcaacaacggttggagcaaaggcgatgtccgtgatgcatatctcgggacgtattagcctttctcagaactgcatgattattcggccgctcagttctgatgtgaaagtgaggttctttttttatcactttcaaccgctgttctccttagagcgacggatgatccctgatcatatgcaaccatctttccgcatggaggacctctactcatttagagtcgctgtacctccggtaagtgagcaaaatcagatagctgaatatctcgacgccgctgtaaatcgatttgatgagttgattggcgagggagacaacggcattgctctgctccaagagcgccgctccgccctaatctccgccgccgtcaccggcaaaatcgatgtacgcgactggcagccaccggccagcacccaaacccctgaatttgaagtagcagaggcccactaa

SEQ ID NO: 359481 - DNA, 1323 bp, Pseudomonas aeruginosa
atgctcctgcacctagaaatattagatcaagagaatcagtttcaccgatctctattcaaggtcatatgcggaaccctctcaacgcacagcctgcaatacaacgccaccattactattgcacttcgacagtggttctctctggagtcctgcgggcaggaagaaaccatccagattaatcacgtcagcttaatctcaaagataccaaactatgtagcctttatcattccagcactaaggcgaatcaaagaccaaaagctgcaaggaatgtcaccagaagtaattgacttcctaagcaacgaccacaagtgggaagaaaggggtaacggagcctactatacgctcataaccaacgaccctactagtggcgcattaacagatcaagagctgagtagcattcatagcgagctaaattacgcatattcccagggtacaataagccaagaaaaatataccctcgcatggttcttcattggcacgggagttcgccctgttcaagtttctcgaatgatcaactctgacgtgcagatcactgaagggcccgaggggaaagaggttactttacgaatccctctcgccaaaggcgagggaggcggcaaaacagaatattggctgcgacgcgcccctacaattcttgccgagtgcttgattaattacttagacagccgcaacaacaaatccagtgagtttaagctctttgatggcactccaaactcaattggtgtgcgattgatgaaaaccctgaaccagttgaatacctattcaaatcggctggagcaaagaatcccgattacgccttatcgcttccgctataccctagcgacacgggccctggcccatggcgcctccgacttcgaagtggcaaggcttctgacgcaccgaagtactagctgcatccaattctaccgtgcttccatgcctcagctccagaacccaatccgagaagccattgggaaggagatggagttctttgccagggccttccaggggcgccttatcacgtctctggacgagtctacgcgtgctggtgacgatgcctcggtcattgctgacttcctgcggctgacgggccagacagtgggggcttgcggcacccgcgctgagtgccatcagaacgcgcccattgcgtgcctgtactgccatcactttgagccactgatcgacgcaccttgggagacgctgatggcctcgctgaaggccgatcaaaacatggagaaagatgatcggattcgccagatcaaccacaacgccatgtcagcaattaacgaaatcattatcgcccgcgactcaaagcgcaccaccacggatgacgataccaatgggtga

SEQ ID NO: 359482 - DNA, 1182 bp, Pseudomonas aeruginosa
atgaatgaccatgaacccgtcatcgtcggtgcgctgcgcacccccgtgggcaagcgcggcgggcgcttgcagaaatggcaccccgttgatctgctgggtgagacgctgcgtcagctggtcgagcgctccggcatcaaccccgccgatctggacgatgtgatcgtcggttgcgtgctgcagtgggaccagcagcacggcaatctgggccggcatgccgtgctggcggcggggctgccagaatccgtcccggcggtgacggtcgaccggcaatgcggctccggccagcaggcggtgagctttgtcgtgcacggtattcaagcgggcgcctaccaactggccatcggcgccggggtagagtcgatgtcgcaggcgccgctgccgccgtcgttcaagcccggcgcgccgctcggcgcgcaatacagcccgcgtgagctggcgcgctaccagggcaacccgctgataccgcaaggcgtttcgtcggagttgatgaacaagcgcttcggcctcacgcgcgaggcgctggacgccttcgccgtgcgcagccatcggcgcgccattgaggcttcgcgggctggtcgtgtccaagaccaactcgtgcggctgcatgaggatccgaccgacccagacagcccgctcgtcaccgccgacgagggcatgcgcgccgaccccaaccccgagaagatggctacgcttaagcccgtgtttgccgcagacggcgctacaacggctgctaactcctcgcagatcagcgacggcgccgccgcgctgctgatcgccagccgcgcctacgcccagcagcacggcctgaagccgcgtgcgcgcttcgtcagcaccgccgtggccgccgccgatccggtgatccagttcaccgccgtgctcgattccacccgcaaggcactgaaggaagcgggcctgagcatcaacgacatcgatctgttcgaggtcaacgaggccttcggcggcgtgccgctcatgttccagcaggaattcggcgtcccggacgaccgcctcaacgtcaacggcggctcgatagccatcggccatccgctgggctccaccggcgcgcggatgctcaccgacctgctgtacgagctggagcgccggggtggtcgctatggcctgcagaccatttgtgaggcctcgggcacggccaacaccaccatcatcgagcggctggcatga

SEQ ID NO: 359483 - DNA, 1677 bp, Pseudomonas aeruginosa
atgaccgaaaccgtccagcccaccaagcctgtccgcggctgcccgtccaccacgggcaacgagcgccaactgaacaccacgacgctgatccgccacgctgcacgcacccatggggatcaggagatcgtgtatcgcacacccggcggcggctgggaccgctacacctatgccgactgctacgcacgcgtctgccgcagcgccaatgcgctgcgcgcgctcggcgtcgagccgggcgaccgggtcggcgtcctggactggaacagccggcgccacttcgagctgtactggtccatccccggcctgggcgcggtcatgctgcagatgaacctgcgcctgggccccgaggacctgggctacgttgtcggccatagcgacgtgtcctacgtttgcgtggacgaatcattgctgcctattgccgaatccgtcgcagcgaactcgccccagatcaagggctggatcgttatgaccgaaaagccgctggaccaggtcaagaccacgctggcgccgctgctgcactacgaagacctgctggccgccgccgacgccaagatcgactggcccgagatcgacgaaacctcggcttacagcgcctgctacaccaccggcaccacgggcaagcccaagggcgtgtactactcgcaccgcggcatctacctgcattccacgggcatggccaccaacatgggcatgacgctggacgactgcgtcatgctcatcacgcccatgttccacgggcagtgctggggcctgccgcaggcggccacgctgctgggcgacaagatcgtgctgccgggccgctacgccgccgaggacaccaagccattggtcgacaccatgatcgccgagggcgtgaccatcaccaacggcgcaccggccatcttccagcctatgctgcagtacatcgagacgttgccggtcaagccggacttcagccgcatgcgcatgctgtccggcgccaccgagccacctctgtcgatgatgatcggcttttacgaactgacgggtgccgaggtggtgcacggctacggcgccaccgaagccacgacgctggtggcggtcaaccgcctcaagtccacgctcaagaagcgcctgacccaggacgagcagtggaacctcaagcgcaagcagggcctgatccttaccggggtggacatccgcattctcgatgcagacgaccaggacctcccgcacgacggacagtcggctggcgagatctgcctgcgcggcccctggatcacgaccagctatcacgacatgccggattcaggcgaccgcttcctggagggcggctggtggcgctcgggcgatgtcggcacggtggacgagaacggctacctcaaggttaccgaccgcatcaaggacgtgatcaagagcggcggtgaatggatctcatccattgacatggagaacctgctcatgggccatccggctgtgcgtgacgccgcagtggtcggcattccgcatgctaagtggcaggaacggccgctggccctggtggtgctgaagcccggtcagcaggcgacccaggaacaactgcaggaacacctgagcagcgcgttcgccaagtggcagttgccggaccaggttctgttcgtcgaagccatccccaagaccagcgtcggcaagctcgacaagaagcgcatacgcgttgagcatgcggaccgctacgccgagtga

SEQ ID NO: 359484 - DNA, 1059 bp, Pseudomonas aeruginosa
atgccgcacacgtcgcacacgctgcagttgccgctgcacggcgtccgtgtggtggagtttgagggcatcggtccaggccctctggccgccaggatgctggtcgacatgggcgccgaggtgatcgcgctggcacgggccgagcaggctgctggggcgcagcggctgggcgggacggtggagaacccgctgcaccgcggtaagaaggtggaggtcatcgacctgaagtcgcccggtggcaaggcgcgcgcactggagctgattgcccaggccgacgccctaatcgaaggctttcgcccaggggtgatggagcggctgggctttggccccgcagattgcgcggcgcgcaatccccgactggtctatggccggatgacgggctggggccaggacgggccgcttgcccaggccgcgggccacgacctgaactacgtcgcgctgacgggcctgctgtcgctgtcggcgcacagggggcaggcgcccatcgtgccgccctcggtactcggggacggtgccggggcgctaggcatggcttttggcatcgcctgcgcgctggtcgatgcacgggctaccggccgtggccgggttgtggacgcagccatcgttgacatcgtggcaatgctgggcaccctggtgcactggattcgcgccaatgggcagatcgatggcgcgcagccgagtccgtttcacgattcgccgttttatgacgtgtacgcctgcgccgacggcggcttcatcagcctcggcgcgatcgagccgcctttctacgccttgctgctgtcgaagctgggcctggcggacgtggagcctgccgaccagtacgacacggcaacgtggccggcgctgaaagagcgcatcgcagccctcatccgcagccagccccgagcgcactggtgcgcgctgctcgaaggcagcgacgcttgctttgcacccgtgctcagcctcgccgagtcggtgcagcatccgcataacgcggcacggggcatctaccagatcaccccctccggcgccatcgaagcggccccggccccacggttccaggcactcgacacaactacctag

SEQ ID NO: 359485 - DNA, 1146 bp, Pseudomonas aeruginosa
atgctgccacagctgtatcgccacgcctggatggacggcgagatcgacgcctttcgcgagcaggtgcgccgctacgttgccgccgaatttactccccagctcgacgaatggcgccgccagggctacatcccgcgcgaggtctggcgtccgttcggcgagatgagctttctgctgcccgagatgcccgagacctatggtggtgccggcgccagcctcgcctaccagctggtggtgcaggacgaactggccaaggccgagatgccggtcaatatcgcggtgcacaccatcgcttcgcattacatcctggacttcggcaccgaagcgcaaaagcagcgctggctgcccaaggtgacgaacggcgagatgctggccgcaatcgcgatgaccgagccgggctgcggctcggatctgaaggccatctccacgcgggcccggcgcgacggcgaccactacgtgatcgacggcgccaagaccttcatcaccaacggcttcaccggaaacctgctgatcgtcgcggcgcgcaccagtggcgcgggtagcaaaggggtgtcgctgttcgtattggagaccgagaacctgccaggctttcgtgtgggccgcctgcttgaaaagatcggcatgcaggcctcggacacggcggagcttttcttcgacagcgtgcgcgttccagccgaccaactgctggggggcgttgaaggccaaggctttgggcaactaatgggcgcgttgccctacgaacgcatggtcattgcagtgccggcggcggccgtcatcgaccgggcgttggagctcaccatcgaatacacgaagcagcgcaagatattcggcgcgcctctgttcgacatgcagacaacgcgccaaaagctggccgagatggcgaccatcgcgcatgtggtgcgcagcttcgtcaacgactgtacccagcgactgctggacggcacactcgacaacgaggccgcctacatggccaagtggtggtgcaccgaacagcagtgccgcgtggtggacgagtgtctccaattgttcggcggctacggctacatggccgagtacccgatcgcgcggatgtatgccgcttcgcgagtgcagaagatctacggcggtgccaacgaggtcctgaaagacctggtttcgaggaagctgtga

SEQ ID NO: 359486 - DNA, 1041 bp, Pseudomonas aeruginosa
atgctgcaacccgtcttcaccgctcctatctttgccgtgcatggcctgctggacggcgcgcgcggcaaggggctggccacgcaagaatggctggagggcgtgctggggcgcgcaggcatcagcgaatcgctactggatctggaggattcgcgcgtaaccgtggagcagttcaacgcgctgtttatcgccgtcaaggacagcctgaacgacgagtgcctgggctacctgcatgggcggcccatgcgcccgggcagcttcgcgctaatggtgcgcagcgcgttcactgcccattcgttgtcatacgccctgcgtcgcctgagcgaatccttcgccctgctgcaggacgacgtggcgctggtgcccgtgaccgagggcgcgctggggggcttcgcgctggagatgcgcggcggcgcgggcgcacatgccgaattccttcacgcacatctgctgcgcgtgttctggcgcttgctgctgtggctgcacggcggccggctggtgccgcagcgattcgacttcagttttgcgcagccgctccatgcgatgagctacgggcgcatcttttccggtacgctgtgcttcgggcagccgcgcacggccgcctggttcgacgccgacgccttcaaacagccggtgcggcgcgatcgggacgcgctgcagtccttcctgcgcgccacgccgggcaacgtggtggggccgcacctgaacgagcgcagcgccagcgcgcgggtccgcatggtgctgcagcgggccagccccgaatggcccgacctggccgtcaccgcgcagcgcctgcacatgtcggtgagcgcgttgcagcggcacctggccaccgagggcacttccttccaggcactgaaggaccaactgcggcgcgacatggcgatcgtgcgcctgaccagcagcgaagcctcgctcatcgccatcgccgccgacctgggcttcaccgacagcaccgccttccagcgcgccttcaaggtctggaccggcagcgcgccgggagcctaccgcgcccgctcgcgcagcgggcagcaccctacatag

SEQ ID NO: 359487 - DNA, 1050 bp, Pseudomonas aeruginosa
atgaccaacgcagcctcggcactttcgtatccgttctcggacctcccactccctggccaagccacggaaatcaagccaggtgtgctgtggctgcgcatgccgctgccgttttccctggatcacatcaacctctgggcattgagcgacggtcctggttgggcggtcgtggacacgggcattcgcagcgtggacgtcaggaacgcgtggctcgccttgctcgctccgcaggggccgctagccggccgtcccatctcccgtgtgatagcgacgcacatgcacccggatcatgtgggcatggcgggatggttgacacgtcgcttcgaatgcgcgctttggatgacacgagacgagtatttgagctgtcgggtgatgcttgccgatacggggcgggaagcgccagtcgatggcgttcgcttctatcggagggccggatggagcgacaccgaggtggatgagtaccgcacccggttcggtgacttcggtaaaatgatccatccattgcctgacagctttgtgcggctcacggatggccagatgttgcggatcggggaccaggaatgggaagtcatcgtcggcacaggacattcccccgagcacgcgtgcttctactcgcgcgaactggatttgctgatatcgggggatcaggttcttcccaggatcagttccaatacctccgtgtacgccaccgagccgcatgcgaatcctctgcagggttggctcgattccatcgaccggttgatgcaacgcgtacctgggagcgccctgattctgcctgcccacaacgaacctttccatggcctgcacctacggttggagcaactgcgtgcgagcaccgtcagaggcaccgaccgcgtcaggcaacaacttgcgcagcctctgagggtcatcgacctggttcgcgccctgtaccgctcgtccattgttgcggagcaaatgcacctcaacctcgcgaccggagagacgctcgcccacctgaactatctcgaccagcgtggggaaatcgtgtctgcagaagacgaagacggtgtaatgcgctatcggctcgcctga

SEQ ID NO: 359488 - DNA, 558 bp, Pseudomonas aeruginosa
gtgcgccaagaggtcaagcgtcaagctgaatatggtcgccgcgtgcggctgatgttccagcacgaagggcgcttctgcctgctgggaacaccccggcagtgttgggcgcccaggggctcacgccccatcgtcggcgcacgcctgcaacgccaggacctgttcgccttcgccgccgtcagcacgcacgatggcgtgatggactctctggtgctgccctgggccaacgctgagacgatgccggtgtttctggccgagatggcgcgacgccatgccgtcgagttcatcatgatggtcatggatcagacgggttggcacatcgcgggtcacttggatgtgccacagaatatgcgcctagaatttccgccaccctacagccttgagctgaacccggtcgagcatctgtcgaaggtgccgtgccaggactggtttgcgaacacggtgttcaaagaactggaggccgtacacgacgcgctggcgcaaggactcattgctctcgaaacacatcagcaaagaacccagtcaatgacaggcttgattgggttacttctatatccttga

SEQ ID NO: 359489 - DNA, 1353 bp, Pseudomonas aeruginosa
atgccgaagctcgccgacgacgctcgcttcaaccgctttcatgccaaggtgcttctgtggtgcctgttgattctcatcatcgacggctatgacatcgccgtgatgggcatcgccctgccgtccatcatgcagcagatgggcgtaaacgcatcgactgccggtttcatggccagttcggccctgttcggcatgatgttcggcgccatggttctgggcacgctgtccgaccggattggtcggcgctgggccctctccattggcgttatgctgttcagcgtgttcaccgcggccgccggattcaccaaggatcccatcagcttcagcgtggtgcgcttcatcgcgggcctggggattggcggtgtgctgccggtcatcgtggcacagatggtcgagtactcgcccaagaagatccgcagcctgatgacggcgctgatgacttcgggctacgcactgggcggcatcctggccgcggtgctcggcaagcagctgatcggcgagtacggctggcaggtcgttttcatcgcagcgggtgtgccggtcctgctgattccgttcatcttgaagctggtgccggaatcaatgacctacctgatctcgcgcagccgcaacggcgaactggccgaagtggcccgtaatctccagccgggagtcaagcacccggcggacgcccagttcgtcgtgcccaccgccgaccgcgtggcgggtgcgccggtctcccggctgttccaggacgggcgaggcccgagcacggtgctgttctggatcgccttcttctcgggcctgttcatggtctatgcgctcagcagctggctgaccaagctgatggctatggctggctacagcctggggtctgccctcagcttcgtgatcgcgctgaacgttggcgccatcatcggtgccgtgggaggcgggtggctcgccgacaagttcaacatcaagtgggtgctggtggggatgtatgcgctgggcggcgtgctgctgtacctgatgacgttccagacctcgaccgagctgcgttatctgatcatcggcgcggtcggcgcctgcaccaccggcgcgcaattggtggcctatgcctactgcgggcagttttacccgatgtccatccgctcgaccggcatcggcatggcctccggcgtggggcgcctgggcgcgatcgcggcgccgctgctaatcggccagatcgttgcgcttgagctgccgctggagcagaacttcctggtgatcggggctttcggaatcatcggctcgatcgccctggcgttcatcaggcatggcggcccggcgtcggtgggcccgcaagaggctgcacgcgagttgcgcccgtcgcaacagacgccgcaaaacgcctga

SEQ ID NO: 359490 - DNA, 1782 bp, Pseudomonas aeruginosa
gtgtctgtctacatagcccccctgcgcgaaatgctgttcgccatgaaagaggtcggcggcctggacgcgatctgcgcccagcccgaccatgaagaaaccacgcccgacctggtcgaggccatcctgcaggaggcggctaattacgccgctggcgtgctggatccgctcaaccgccccggcgacgtgcagggcgcgcgctggcacgatggtcgggtcacgcccgccgacggctttcgcgaagcctgggccagcttctgcgagaacggctggaacggcatgcccgctgccaccgaatggggcggccagggcctgcccacgctggtctccaccgccgtgctggagatgtggaagtcgtccaacctcgcgttcagcctgtgccagatgctcacgctgggcgcggtggaggccattgcgcaccatggcagcgacgcactccagcgccgcttcctggcacccatggtcgagggccgctggacgggcaccatgaacctcaccgagccccaggccggctctgacctggccgcgctgcgcagccgtgccgtacacgagggcgaccactaccacgtcagcggcaacaagatcttcatcacctggggcgagcacgacatggccgagaacatcgtgcacctggtgctggcgcgcctacccgatgcgccaccgggggtgaaaggcatctcgctgttcctgtgcccgaagtacctggtcaacgacgatggcaccctgggcgaacgcaacgacttggcctgcacgtcgattgagcacaagatgggcatccacggcagccccacggcgtcgatgagttttggcgacagcggcggcgctatcggctacctggtcggcgagccgcaccaggggctggcctgcatgttcaccatgatgaaccacgcgcggctgaacgttggcctggaaggcgtgggcatttccgagcgcgcctaccagcgcgcacgcgcctatgcgctggagcgggtgcagggcaagccgctgatcagcggcagcaccgccatcgcaggccacccggacgtgcggcgcatgctgatggacatgaaggcccgcaccgaggccatgcgcgcgctggcctacttctgcgccggtcagatggaccgcgccgcgggccacgccgatgcgcaggagcgcgcgcaggcgcaggccctggtcggcctgctgataccggtggtcaaaggctggtgtaccgacagcgcgcagggcatcacgtccgacggcgtgcaggtgcatggcggcatgggctacgtcgaggaaaccggcgcctcccagcacatgcgcgacgcgcgcatcacgaccatctacgaaggcaccacgggcatccaggccaacgacctgatcggccgcaagctggcacgcgagggcgggcgcacgctgaaggcgctgctgggccgcatcgacggcgatgcgcgccggttggtcgaatcgcccgatgcagtgctggcgcagatcggccgcgcgttggcagccgctgcccaggcgctggacgaagcggtcgactggctgctggcccacgacggtcaacccgcgcagtgcgcggcgggcgccgtgcccttcctgcggctggcgggcaccgtgatcggcggctggctgtcggcgcgcatggccgaagccgctaccgcgcaactcgcggcgggcgcgggcgatgcgggctttctcggtaccaagcgcgccacagccagccattacgcggcgcatgtcctggtgcaggcgccgatgctgcgcgacatcgtcacgggcggcgccgccagcacgctggccctggcggacgatcaactctga

SEQ ID NO: 359491 - DNA, 750 bp, Pseudomonas aeruginosa
atgaaaatcctggttcccgtcaagcgggtggttgactacaacgtcaaggtccgcgtcaagagcgatggcagcggcgtggacatcgccaatgtcaagatgagcatgaaccccttcgacgagattgccgtcgaagaggctgtgcggctcagggagaaaggcgcggcaacggagatcgtcgccgtctcgtgcggcgtgtctcaatgccaggagacgctgcgcaccgccatggccatcggtgccgaccgcggcatcctagtcgagaccaatgaagaactgcagccgctggccgtggctaagctgcttaaggccctgatcgacaaggaacagcccggcctcgtgatcctgggcaagcaggccatcgacgacgactgcaaccagaccggccagatgctggcggcgctggccggtctgccgcaagccaccttcgcctccaaggtcgagctcgccagcgacaaggcagccgtgacccgcgaagtggacggcggcctggaaacccttagcctcacgctgcccgcggtcatcaccgccgacctgcgtctgaacgaaccgcgctacgtcaccttgcccaacatcatgaaggccaagaaaaagccgctggacaccatcaagcccgaagacctcggcgttcaagtcgccccgcgcctgaagaccctgaaggtgaccgaacccgccaagcgcggcgccggcgtgaaggtggctgacgtggccgccctggtcgaaaaactcaagaacgaagcgaaggtgatctaa

SEQ ID NO: 359492 - DNA, 933 bp, Pseudomonas aeruginosa
atgtcggtactcgttattgctgaacacgacaacgcatccatcaagggcgcaaccctgaacaccgtgacggctgcagccgcttgcggtggcgacgtgcacgtgctggtggccggccacaatgccggcgctgccgcacaagccgccgcccagatcgccggtgtcgccaaggtcatccacgccgacgccgcaggcttggcccacggcctggccgagaacgtggccgcccaggtgctggccatcgccggcaactatagccacatcctgttcccggccacggccggcggcaagaacgtggccccccgcgtggccgccaagctcgacgtcgcccagatcagcgacatcaccaaggtggtgagcgccgacaccttcgaacgccccatctacgccggcaatgccatcgccaccgtgcaaagcagcgacgccaccaaagtcatcaccgtgcgcaccaccggcttcgacgccacagcggcgaccggaggcaacgcagcagtggaaacggcaaccgcagcggcagacaccggcaagagcagctacgtgggcagcgaaatcgccaagagcgaccggcccgaactgacggcggccaagatcatcgtctccggcggccgtgcgctgggcagcaaggaaaaattcgacgaagtcatcaccccgctggccgacaagctgggcgcggccatcggcgcgagccgcgcggcggtggatgcgggctacgcgcccaatgacctgcaggtgggccagaccggcaagatcgtggcgccgcagctgtacgtggcggcgggcatctcgggggcgatccagcacctggcgggcatgaaggactccaaggtgatcgtggcgatcaacaaggacccggaggcgccgatcttcagcgtggccgactacgggctggaggcggacctgttcgcggctgtgccggaactcgtcaaggccttttaa

SEQ ID NO: 359493 - DNA, 915 bp, Pseudomonas aeruginosa
atggagcttcggcatttgcgttgctttatagcggtggccgaagaacttcactttggccgcgcagcggaaaagctgcacatcgatcagtcccctttgtcgcgcaccatcaaggagatagaggaagagctcggggcgcaactgttcacgcgaaccacgcgaagcacccgcctgacctttgccggaatggcattcctggagcgggtgccgcgaatcttcgaagctctgaaacaggcgtgtgacggcgtcaagtccgccgccagtgggtttcagggacagttgcgcatcgctttgtccgatggcatcacgccctcgcgaatgccgacgctgctggcacggtgccgagaggaagatccagagattgacattcggttatttgagatgccgttggaccaacagatcaagggtctgcacgatgacctgtatgacgtcggcttttcgatggccgaagaggtgggcgacggcattgtggtcaggcctgcgtgggaagacgagctgatggtggcggtcccagctcgccatcctgtgctggcccacaagcacgttccgttggaagaagtgctgcgctatccgctggcgctatgcgatccggcgatatgcgaaggccatgcacgccaagttgatcgcgttttgcagcgctacgagcaacagccactgatcgcccagcgcgtggcgtcctatgaggtgatgatgaccttagtctccgccggattggcacttggtttggcgggcgccgcgcacattgcatccggccgtgggccaggtgttgtggcccggcgcttggcgggcaagtcgcagatgctggccacgtatctgctgcaccgtgacgtggagccctccgaaatgctggctcggttcatcgcacgagtggactccattgattcggcggatggctccagcgccgccgaggactcctga

SEQ ID NO: 359494 - DNA, 231 bp, Pseudomonas aeruginosa
atgccccgattcctgtcgctgctgatggccgctgcactgacagcctcctgtgggccatcccaaccgacggaaaccgtggacttcctcgtggcccatcctgagcgtctcaaggaagtccagcgcctgtgcaaggaagagcgcgcgaaggccggcgaagaactctgccgacgtgccgccgaggccgcgaatcgccgcttctttggtgaccggccggagcagaagtcccaataa

SEQ ID NO: 359495 - DNA, 315 bp, Pseudomonas aeruginosa
atgcaacgcacgcccgtcgtgttcgctttcgccgttcatgcgcttgtgctggccggctgtgaccggccgcagcaggtgcaggtgaatgcgctcgccgccgacccggcccggctgcacgcgctgcgcgcgcagtgcagcacgggcgcgcacgacggcgcgttttgcgcgcaggtggcccaggccgacctgcggcgctttctttccggccaggccgagccgggcgagtaccaaacgctcgccgacctgccgccgattccgcccagcttcgatgaacccgccgatgccgatacgcctgggcaggaggactcgccatga

SEQ ID NO: 359496 - DNA, 324 bp, Pseudomonas aeruginosa
atggaaagaatcacctggtttgccgcagacaaccccgagaagaaacgcattccggaatggcgccgctcatgcggcttcagcgacaaaggaactgttttcgtgcccgccgccatggcaggagacgagacagaattcaatgtgatgctatgcgctcagggtgaccgacaacatgttgcgatacacctcgatcattacttcgtccccagcacctggctcaagcaggaatttcccaagcacctcgaactgatcgagatcatcgagaaccgtgtccatctggctattgcggaaatgtcccaacagcaagcgacatctgaaacgctctaa

SEQ ID NO: 359497 - DNA, 606 bp, Pseudomonas aeruginosa
atgggacgctcatcgcagtccaaagccaaagagaaccgtgctcagatagttcagacggcatcacgtatgtttcgtgaggcgggtgtcgagggtgtgtccgtagctcagataatggccgccaatggcatgacagttggtggtttctataagcactttgagtcgaaggacgccctgattgccgaggcattctccatcgcgtttgagcactctcttgaggcctgggatgaagttttcatccgagcggatcaagctgctgaagacagagcctcttcgttggttcgtcagtacctccgcaatagctcggcgaagaatcgctgccccctgttggcatttgcccccgacgtagcgactggaggggtggatcaaacaggcgcgttagcttacgaagcgggcgcgaaaagtctgctcgataaattcatggaagagagagtggatgaagtgggcgatctggctcagcccactgaagctgaaaacgaggcattggtgattttcgctgccatggttgggacgcgactgttggctcaatcggtcggccagagcctttgggttcgagcgatggaggccgctgttaacaaggctgcccgtaagcaaaaagcatgcagataa

SEQ ID NO: 359498 - DNA, 447 bp, Pseudomonas aeruginosa
atggcagagcccatctatctggaagacctggcggtgggagatgttttcctcagcgaccattacacgctggatgccgagcaaatcattcggtttgcgacggagttcgatccgcaaccctttcaccttgaccaccacgctgctcgtgacacatttttccagggacttgccgcgagtggttggcagacggccagcatcacaatgcgcttgttggtagcaagcctgccgctggcacgtggcatcattggcgccggtgcagagatggcctggcctcaagcgacacgccccggtgacgtgctgcgcgtcaccagtaaaatcatcagcatcacgccgtctctatccaagccagaccggggaatcgtggtggttgaatgcatcacgtctaatcagaaggatgaggtcttgcagcggatggtgaccacgatcttgtgcttcaaaaaatcaggatga

SEQ ID NO: 359499 - DNA, 384 bp, Pseudomonas aeruginosa
atgcctttggttcgtatcgacaccaagaaaaactccgaccctcagcacattcagaaggtgggccagatcgtgtaccaagccatgagggaagcgatcagcgttcctgatcatgacaacttccaggtgctgaccgaacatgagaacaatcggctggtgaacgatcccgagtatctgggtatcaagcgttcggatgggcaggttttcatccagatcacactcaatgaaggtcgcacgactgagcagaaaaagctgctctacaaaaccatcgcaaagggcctcaacgagcaggcagtcgtgcgcctggaagacgttttcatcagtctggtggaggtcaagaaggagaactggtcgttcggcaatggcatcgctcagtacgccgagtaa

SEQ ID NO: 359500 - DNA, 660 bp, Pseudomonas aeruginosa
atgaccagcttcctcaagtgggcgaaatggctgaaccaggacgaggtaaccgaggcagtcattcgccaggtgatctccccctccagccaggtcaagggcaacgtctataccgattacggcgggcaggttggcggcaccgtctggaacggcatcgcgagaaccgcaggaaccttcggcgttgccctgggcagcctggcctatttcccagcgatggatatggtccgccaagcgctgccaatggtgatgtcgttcctcaagatggccatggtcatctgcattccgatggtcctggtcatcggcacctatcaactgaaagttgccatgacgatgacggtcgtcttctttgcaatgatgttcgtcgacttctggtttcagttagccagatatatcgatagcacgatacttgatgctttctatggttcgggatcaccacatctttcattcgacccggtcatgggactgaatacggcgactcaagatgcaatcttgaacttcgtgatgggttctatgttcttgatactacctgcgctctggatcaccgccatcggatgggcagggcttaacgttggaagtgttgtggacgggctgtcaaaaggcacaaaagaggtacaaaaagctggaggagaagccgcagacaagattaaacagaaggcactctaa

SEQ ID NO: 359501 - DNA, 657 bp, Pseudomonas aeruginosa
atgaccagcttcctcaagtgggcgaaatggttgaaccaggacgaggtgaccgaggctgtcattcgccaggtgatctcaccctccagccaggtcaagggtaacgtctacaccgattacggcgggcaggtgggcggcaccgtctggaacggcatcgcgagaaccgcaggaaccttcggcgttgcgctgggcagcctggcctacttcccggcgatggacatggtccgccaggcactgccgatggtgatgtcgttcctgaagatggcaatggtcatctgcattccgatggtcctggtcatcggcacctatcaactgaaagttgccatgacgatgacggtcgtcttctttgcgatgatgttcgtcgacttctggtttcagttagccagatatatcgatagcacgatacttgatgctttctatggttcggggtcaccgcatctttcgttcgacccagtcatggggctcaatacggcgactcaagatgcaatcttgaacttcgtgatgggttctatgttcattgttttacctctgctgtggatgacagcgatcggctggtccggaattcaagcagggtctgtactgaacggattgagcagagggaccgaaggagttcaagccgccggcaaggaagcaggaaatagagttaaaaacgcggtttga

SEQ ID NO: 359502 - DNA, 402 bp, Pseudomonas aeruginosa
ttggcggagcagtgcgaagccctggagcagggattgcttgaacttgcccagggactgctggcccaggttcgtcgcccgcccttcactcttctgcccacccgactcatcgagcagcgcacatccgcacgcaccacctttcttcgctggcagcacattgcaacccggcggatgggcgtcggggtgtgggcggaaatgctgcgccaggacaagaccccggaatacctgctgcaagacctctacgagatggagctgcagcgcatcaccctcaacatgcagatcagcctgatccactccatcggcaagcaggccgccgagtgtgcggaaaagatgggccaggccgaggccgagttcatgggccgactgcagcagagtcagacccgccctggttccgtgggcatgtag

SEQ ID NO: 359503 - DNA, 528 bp, Pseudomonas aeruginosa
atgagcatcatcttaaatggtcacgtcctcaatcagcgccagctcgatgcgatcactccggtgatgaacgacctgatccaaggccgggttggccaggaagacctcgataaggctttcgagcgtgcgctcgagcaggccggctgcccactgggctacgacaccaccatgccaggggccggctccaccatcgaacagcgggcaaccaagtggctgcgcgacgggcaggtcggcgcgtcctctcgcgccatccacgatcacatgctgggccttactccgaagcgtggctactacgatcacccccacgacccggacgatctgaatcgctgcctgcttctgctggacctgatccctgaatggaagcctcgcatgcgcgaaatggcccagcacagtccggaatgggccgcactggcgagcagttgggaaaagctcgccaatctcttcctaagcgaagccggcctggactggcaacgcagcagcgaagccccggaaacctacgcggcgatgcgactcctacggggtgacgcatga

SEQ ID NO: 359504 - DNA, 270 bp, Pseudomonas aeruginosa
atgactactcacctgatcaccctggtcatcaagcagccgaacgacgctcaggcacgccaactcatgtaccgggagttgcttggcctgatctcacgctacggcggcgaagtgacatccacggccctcgaggacgaatctaccctctgcgagctgctggagcagatgctgcctgatgatgaggtagagcaagccaggaaacaggtgctcgaacgtcatgccaagcgccgccgaccggaccgcctgcaggcgccggcaagcctgaaggtgtaa

SEQ ID NO: 359505 - DNA, 249 bp, Pseudomonas aeruginosa
atgttcatgccggaagaagtcctccttctgcaggtgatcgccgacaatgtcccatgccgcgttgtccagcatcaggccaccgagtaccccttgctccgcctcgacggagtgcggcggcgtgagttccagaacactcacttcgagtcctcccggccgatctgcatgaacgtgcttccgcccggggcgccgatgatctccagcgctttcacctccactttggcggactcgatgatcaccgaacccacatga

SEQ ID NO: 359506 - DNA, 249 bp, Pseudomonas aeruginosa
atgagcatcgtgacagtaatcgttatgcctgccagcgaacttcctgaccatatcgaaggcatgaacaattcgatgcgccagtggaccgacagcgctgcgcgcggcgagtgcggttggatttgctctgactgctgctgctcagacccaaagggtatgcccgatgagtgcttccacggccacgcgtcctgcacggcgatcattaagcgggacaagatgcgcgcaatgtttgctgggagcgagcctcagtga

SEQ ID NO: 359507 - DNA, 774 bp, Pseudomonas aeruginosa
atgccgcgggtccagtccgctggccaccgagagcgtggcgaggccgcaggtggcggcgatcagggcgatctgcacggtctggttcaccggccagccgaacaggtggtgcaggccgctgttgatctgcagcacgccgtagccgagcgaagtcgccacgccgaacacggtgccgatgatcgcgaagatatccaccgcgtggccgatggggccgtagatacgttcgccgatcagcggatacagcgccgagcgcagggtcagcggcaggccgtggcgatagctgaagaaggccaggatcagcgcgacgatggcgtagatcgcccaggcatgcaggccccagtggaagaaggtcagcttcatcgcttccttcgccgcctgcacggtgttcggctcgcctaccggtggggtggtgaagtgcatcaccggttcggcaacgccgaagaacatcagaccgatgcccatgccggcggagaacagcatggcgaaccaggtggtgttgcggtagtcgggacgactgtggtcggggccgagcttgatgtcgccgtagcggctgacggcgaggaacaccacgctgatcaggatcagcgccacggccagtacgtagaaccagctggcgttggtgatgatccattgctggacgtggttgaacagcgattgcgcttcttcctggaggagcacggtgaacagcaccagggccaggatcagggcggcggaggtatagaagaccggaggattcagggtgctccggggggtagtgggtgtctccatgtaagctag

SEQ ID NO: 359508 - DNA, 945 bp, Pseudomonas aeruginosa
atggctaagcaagaactgctcaaccgggtatatgggactatttcagcgctccacagaggcggccgaaaaaaaatatccgtgatggaggttgctaaattatctggtgtcgctcgggcaacaatcaatcaaaagcatgatcctgactgggtgaaggtcagggaagtcataaaaagaacagttcattcggggggggatgtagaggattcaagtgtggttttcgaacaaccactcaaaaactctcaagaaatacatcatcgactgaaagagttggaggagcagttatccctactaagggagagagctaacaccacatataatcagttgatcgagagggtgcaatattactttgcgttggctagtgaaaagccagctaagcaagttgagaaggctaaggtccttcaagagctaactcatcagaagaatcagaacgcaattttgcgtgcagatctcaaggcggctcttgctgaatcattaactcctgcggtatcaggaattattacttcaaaaattattttggaagtgcctaatgcagtatcagaatctgaggccattctgaattttttggagaaactggactcgttatctaatcaaaatcgatcttcacttgttaccacagtctacataatgttcggtcttccaatgtgcggcaagtcatcttggattgaaaaccacaagccatctactccaggtgtatccttatatgttagtggagcaagtgatacagtttcaattcggagtttgttaatttctagaattaggaaggaatttaacgtgcctgtgcactgtgttcgatttagtataggccttgatgtctgtatctctagggccgaaaaacagttcaatggtgcggctcttgaattgaatattttatccattaaaggtgcggctgcgcggctcgaagaaatacaattcagcgaaaatttcgactcaatcattttggcatga

SEQ ID NO: 359509 - DNA, 198 bp, Pseudomonas aeruginosa
atgtcgaagtacagctatttcaatctgatcaaatcccaggcaaaaaaacttgctcaggagcaaggtctccagctttcggttgctcaagagcgactggccacttccttgaaattcaaggacttccatgaactaacaacggttgctttccgcaatccctacgatgctcgcctgatcagggctgctctagggatggtctga

SEQ ID NO: 359510 - DNA, 891 bp, Pseudomonas aeruginosa
atgaaaaatcaactgaatgaactgcgcgctttaaccgccaaggccgaaaatcgccgcaccgagacgggcattccgcgagtcgccatggttcagggcaagatccccgagcacatgctcgctgccgtctacgacccgatgatcaacctcatcctgcaaggcagcaaaacgatgacggtgggcgaccgcacccttcggtatgaccctgcaacgtatttcgtgatgtccatcgacctgccggcggtaggggctgtccacgccgctgagacaggcgagccctatctagccgttagcctgacactcgacccgactgtgctcgccacgttgctggctgaccttccgaaacctattggccggtatgaaagcgaccctggcttttcggtggctgccgtcacgccagatttgatggatgcctgggtgcgcatgcttcgactcatgggcaatcctgatgctattgccgcgctcgctcctgcgtacgagcgcgagatactgtttcgcgttctacaaggcccgcatggctggatgttgcgagagatcgccgcaccagataccgccatggcccgcgtgaacctggccattcagtggattcgacgggacttcgccgaacccatcagggtggaaaccctggcgcagaaagcggccatgagcgtctcagcgtttcaccggcatttcaaaaccgtcactacgctaagcccattgcagtaccagaaacgggttcgcctgctccaggcccgaatgctcatggtcgcctgcgccaaaagcgtcacggctgccgcgttcgaggtaggctatgaaagcgccacgcaattcacgcgggattatgcacgggtgttcggcctgcctcctgcgcgggatgctgcgagaatcttgagcgaaacgagagccgatttgtga

SEQ ID NO: 359511 - DNA, 744 bp, Pseudomonas aeruginosa
atgagcgtgatcgttatcaccggcggcagtcgtggaatcggtgccagtacggcacggcacattgcccagcgtggcatgggggtcatccttacttacaacagcaatgctcaagcggcggcagaagtcgtcagaagtatcgagcaggccggtggtagagccgctgcgctcgagctcgatgtcggccaagtgggcagtttcgaagtgtttcgagaatcggtcttgatgagcttgaagaacatttggggcatcaacacgctcgctggcttggttaacaatgcggggtatggcctgttcaacccgttgcagacggtcagcgaagcgcagttcgacggtttgttcaatgttcacctgaaaggtccgttcttcctgacccagacacttctgccgttgctggaagaaaacgccagcatcgtcaacctgaccagtgccaccacccgcgtggccactgctggtgtggcgccttacgcggcgttcaagggcggtcttgaagtacttacccgttacatggccaaggagtttggtgatcggcgtatacgggccaatgcggtttcacctggagcgattcgaactgaattgggcggcgggcttaacgacgagttcgaagcaatgctggcagcgcaaaccgcgctgggcagggtgggcgagcctgaagatgtggcgcgcgtcattgccatgctgttgtccgacaatggcgcttggatcaatgcccagaccattgaagtggccggcggctacaacatctga

SEQ ID NO: 359512 - DNA, 402 bp, Pseudomonas aeruginosa
gtgctggatcatgtttttctatcggttagcgacatcgagcgctccatccgtttttacgaagcggcactgttgccgcttggcatcactgcacgtctggactacgacggcaagaacggcccgccaggtcatccggatcttaaaggcttcggcgccaatggtcgggtgttcttctggctgcgcgagggtgtggttgaggggggcgcggctcacgtcgggtttgtcgcgagcagcaaggtcgaggtcgaggctgcctatgccgccgcgatgagcgagggcgctgttgacaatggctcgccgggtgcccggctgcattacgacccgaattactacgccgcgaacgtgctagacccggatggctacagcctggaattcgtctacaagaactggcagcacgcgcaatga

SEQ ID NO: 359513 - DNA, 429 bp, Pseudomonas aeruginosa
atgagcactcgcaacccgctgagcgacatgcatggccaggcagtccgtggggacaacgtcccagccgacgccaggcagaagcatcacacctgcctcgccagcctgagcacccagccgttccgcgagccggtagacattgatctcggccgtaatgtccaggtagtcgacaccagcctgcatgcacgcccgcatcagagcctcggcggtttgcgcgaagggtccggcaacgttcagcagtacgtctatcccatccagcgcccctgcggcctgagcatctgctccgaacacgcggtaaggaacattcagttgcgcagcaagatcttccagccgatcaaccgtacgccccgctatttcgaaattgagacccagtgctttcgcccgttctgcagccatgcgcccggtgtaacccgtcgcgccgtaaatcagtaa

SEQ ID NO: 359514 - DNA, 603 bp, Pseudomonas aeruginosa
atgaacgaaaaaccccggcagcgccgccccgccttcaaccgtgagcaaggaatagccatcgcacaggcgctatttcatcagcgcggcttcgacgcggtcagcctgaccgacctgaccgaggccatgaatatcaagccgccgagcttttacgccgcttatggcagcaaagccgagctgttcgagcgtgcgatgcatcgctacgccagcgaaaacgcgctgcctatggacaggctgctgggagcggatcgatcgcctgcagaagcattgaccgcactgctggttgccgctgcgaagcagtacggacgagaccgggttttgcgtggctgcctgatcaccgagggcatgcgtgcggacgatccgaccgcccgccacatggccgagaaactgggcggcgtcggcatccaggccatccgtcgttaccttgatcaggtccgcccggacgccgctcaggtcctggctgactacgtgcttatcaccctgcgggggctgtcggcggcggcgtgcagtggcatgtctctcaaacgcttgatggaaacggcgcagcttgccggcaagctgatttctcttgaattcgaggctagcgacagcgctacgaattcctga

SEQ ID NO: 359515 - DNA, 741 bp, Pseudomonas aeruginosa
atgctgtttgaaaataaggttgttctggtcactggtggctcttcgggcctcggtttcgccattgctgaagcgttcgccagccagggtgccaagctggttatcaccgggcgccgccagcctcagctcgacgaagccgttaagggcctcggcgagaacgcctctgccgtctgcgcggacatttcgaaccctgccgacctgaccgagctgttcagccacatcagcggggtgcatggccgtatcgacgtattgatcgccaatgccgggacgggtgaaatcgagcccttgggtgcgatcaccgaagcaggcttcgatcggctcttcacgaccaatgtcaaaggcacgaccttcaccgtgcaaggcgcgctgccgttgatgggtaaggggagcagcgtcatcgtcatcggctccaccgcctcgatcaaccccggccccggcctgagtgtctacggagccaccaaggccgcgctccgttcgcttgtgcgcagctggattctggacatcaaaggctccggcgtgcgtattaacctgctcagccccggccccgtggataccccgtccctgcgcaatgtgcttggtgagaacgcgcaagaggtaatcgatgcactcagcgagaagagcaccctcggtcggatcggccaggcatatgagatcggtcaagccgcgctcttcctggcgagcaatgcatcgagctatatcaatggggctgagctgttcgccgacggtggtgcatctcaagtttag

SEQ ID NO: 359516 - DNA, 144 bp, Pseudomonas aeruginosa
atgaagcctgatgcccggcgccccattgtcttgtccgccagcggctatgccagccgcatggaaagcatcgaccgcctcacggttctgcgcgatcagagctatgtgcgtcccctggctggggggaagcgccgcatgcaaccataa

SEQ ID NO: 359517 - DNA, 864 bp, Pseudomonas aeruginosa
gtgagatacgccttcgtcgctgtagaacgggctcagttcccggtgcgtctgttgtgccgggtaatgggtgtctcggtttcagggttttacgactatcagcatcgccaaggccgtccagatccggatgcacaaattcgcatcgatctacacaaggtttacgcggctagccgcaagacctatggccgaccacggctagtcgaggcgctacggcagcaggcctatgcagtaggtcacaagcgcattgaccggctaatgcatgaagaacatatacagggccgatccaagggcggtttcagaccgtgcaccaccgacagtcaccatgcgctgccagtggcgagcaatttattgggtcgtcagttctccgttcaaagctccaccccagcctgggtcagtgatatcacttacatcgctacgaaagagggctggctttatctggcagtggtactgagcatccaaacccgccaagtgctgggttacagcctggcggacaggatgcctgacgacttggtcgagcgcgctttcatgaacgcttggaacgcatgtttgggcgtctacggagtgattttccattccgaccaagggcgccagtacgcgagcagcaggtttcgtctcgctttggccaagaagggcttcgcgcaaagcatgagtcggagaggaaactgctgggataacgccgtagctgagagtttcttcgctacattgaagagagaggaagcctacgcggtctaccccacaaagaaacaggctcacctggcaattgccagctacatccatgggttctacaacagctgtcgactgcattcagcattgggttaccgttcaccgaacgaatacgcaaaaggcttaaggcagttggctctgtag

SEQ ID NO: 359518 - DNA, 2799 bp, Pseudomonas aeruginosa
atgcagggaggcgatgaaaaaagcactccagatgtgctagatgttactcaactgatacgcatcgaagcggtacacagaggattcttatatcagcacctgtataccgttggttgcttgctattagcgcaggcggccgccgtcgatgtggtgatggttgagcttgatgaggatattgagcttgttaccgatcagggacgaatctatgtgcaggttaagacccgttcaaaaccaatcattcccagcgatatttcaagcgccctagagcgttttgaaaacctgcgaaatgagcatgctgaggggatgcgcaaaggcgaggctgcctttgttatcgtcgcgaaccaagcaccgagcgttcagttccagcagactatcaacgataaaaaactcccccctgatgttcttttcgtttggccccaatctacttctgaacgccacccggcacttccgcccgcctgggagtcgctaactgatgcagcggcatggtgtatcgcccaagcggagaagctgaatttttcattgttgtccccggattccctgatatggaagctagccggactggcgcagcttgcagccacgggtagtgccccgaacaaacagcatgcgtttcacgccaaagacctacctgcgctatttgagcaactcatcgttcaactacaggatttccccgcacctccagcgttttacaggccacaaaaactggagccatctctcgcatccgacgagcgtgtacgtatcatttgcggattatccggtgcaggcaagacagcgtgggcagcgcaggcagctctacactgctctcagctgtgtgcctactatgacaccggcgaccttccgggccctgctctggcgagcacactggttcgtgagttggcagcgaaatttgcaacaccggatcgggatggtctgcgaaaaatcctgctgccgggcgccagtggttacgaggcactcagaacattcgacacatttctggatcagcaaggagccaccctgctgctgattttagataatgcgcatcgtgttcctgtagaaaatctgcgcgatacactgaatgcaaccaaatgcattcgtttcgtcctgctgtgccagccccatgacaacgtccgcgagctggaagctgttactggactgcagcgtgaggcacttttggggtgggatattgatacggtggccgcagcagtagacgatctcggtggctatgccaccgctcaaggctacgagcaactgcggacttataccggtggactgccgctgtatgttcagagcgctgcaaaaatagcggtcacagaatacggaggcaatgtcgatgtgctgtgcgctgaacttcagcagcaggaaaacagtgtcgagactgcgcaggaagtcatccttacccgtatttatcaggggtttgataagttaactcaggattcgctggcattgttcagcctgactgatgtggggttgagtcgcgaagaagtttgtgagcttctggtcaagtcactaaatgtatccacaggtggcgctgcctcaattcttaagaaaatgcgggccaccggcaccgttgagatttttgggaaccagatgctgaaggtacatgacgccgtcagagcactggggctgcagcacttggagcttatggatccggcggtggcaaataacgcacttatggcattgaaagagctgctggtcgtgagccttcacaaaactcgcgacacatcaagattcgcgttgttgacccaggtttatatcaaactcaacgatgtcatgacactcatcgcactttcaggcgaggagctattttatgagatgggtattaacgtcgacatactggcaagtctagaacgagcaacgaattcagatacactggaacctgttcataaattctgggcgttggatggactagttttctctgagcttcgagaaggccgtcctgataaaatcgtccagcgacttgaggccatggaagctcttcttattgagtataagtttgattttcgtgaacaaattgcatatgcaatgaaacggatattattctcagcagaaaatggtaacgcatacgaggttaagcggcttgtagagcaggccatcacgaagttgcccgatgctgagcatgaacgcatatttgactataaccatgccatagctctatggaagttaaagagatataaggaggcagaagcgctgtgctggaaggtcactgatggatattacgacctgttcggtattcgtccggcagatgtgatgggtaaaaatgcggatgtgctatggaaaattataaaacgcccagaaaatgttcatgaacatctcaaacatctcgccgacgcactagagttgtacgcaataatccttcaagcgcgtggaaaaccaacgccattcatccgtattcattcgatgaagttctacaacatggccggtgcgccagagtctatggtgcgggtcggccaggatttggcggatgaatttgtcgccaggaaagactatgaaggcgccagagaagtcatggagcagcacgttttgccgattgtaaatacggctggactggtgaacaggctggttcaggtacgaagccaatatgcggtgatactggcactatgcgggcggcacgatgacgcagatgctgaaatgacacgtttgggtccttattttgacgggttgactggcgagcaacgtcaggaagttgaaaatcaatcaaattacattgcccaactcgcctatgaggcgttgaaacctactatcgggcagatgttcggtgcggtaggaagaaatgatcgatgcccctgtggctctggcctgaaatataaaaaatgtcatggggcttga

SEQ ID NO: 359519 - DNA, 681 bp, Pseudomonas aeruginosa; identical to SEQ ID NO: 319135

SEQ ID NO: 359520 - DNA, 729 bp, Pseudomonas aeruginosa; identical to SEQ ID NO: 319136

SEQ ID NO: 359521 - DNA, 720 bp, Pseudomonas aeruginosa
atgatcctgcgcctgcacgaggtcgcccgcagccacggcgccggtcgccagcgctaccgcctgcgggtgccggcgctggaattgcgcgcgggtcgccagctggccatcgtcggccccagcggctgcggcaagagcaccctgctcgacctgctggcgctggccctggcgccggacccgggcgggcgcttcgaattcctcgccggggaacgcccgcaggacatcgccgcgctctggcgcgacggccgccaggaccgcttggcggcgctgcgccggcagcactgcggctacgtgctgcaaagcggcgggttgctcgagttcctcgatgtgcggcgcaacatcggcctgccctgcgcgttgctcggcgccccgtccgccgagcgcgtgcaggcgctggccgagcggctggaaatcggcgaccagctggacaagaaaccggcggcgctgtcggtcggccagcgccagcgggtcgccatcgcccgcgccctggcgcatgcgccgcgcctgttgctggccgacgagccgaccgcggcgctcgacccgctgaacgccgaacgggtgatgcgcctgctggtggagcaggcccgcgagcgcggcgcctgcaccgtggtcgccacccacgacgaacgcctggctcgcgccgccggcctggaagtcctggccatccgctggcaacgcgaggccgacgacagcgtcggcgcctgcctcgaggaagttggctga

SEQ ID NO: 359522 - DNA, 1200 bp, Pseudomonas aeruginosa
atgcgcgccggcctgctgctctcgctggcctgggccgactatcgcggcgaggcgcgcctgtcgctctgcgcgatcttcgccctggcggcggtgatcaccccgctgctggtgctgttcggcctcaagtacggcctggtcagcaccctcaccgagcggctggagcgcgcgccttctgtgcgcgagatcattccggtcggcggcgcccgctaccgtgccgaggacatcgccgccctggccgcacgcgcggacgtcgccttcgccgtgccgcgcacccggcagatcgccgccaccgccgacctcagcggcggcggcgagaccgccctgagcgtcgagatgattcccagcgccgccggcgacccgctgctggccggcctgccgcaacccgaccggccgacccgcgtggtgctcagccacggcgccgcggaaaaactcggcgcccagcctggcgagcgcatcgtcgcgcgcatcggccggcgcatggatggccaggcacagagccagcgcctggagctggaagtgctcgcggtgctgccgcaggagcgtttcgcccgcgacgcgctgttcgccccgctggccctgctggaagccgccgaggactatcgcgacggtcgcgcggtggccgcctacggctggccggggaaggccggcgagaccccgcgcgcacgcatctacccgggcttccgcctgtacgcccgagacctcgatgcggtggaagggctgcgccggcacttcgtcgcgagtggcgtggaagtcgccacccaggccgaggccatcgcccaggtgcgcagcctcagccgcaacctcggcctggtgttctggatcgtcgccgcgctggccatcggcggtgccttcgccgccatcgccgccagcagcctggccgccgtcgaacgcaagcgccgcgccctggcggtgctgcgtctgctgggcttcccgaccgccgcgctggtcggcttcgtcatgctcctggcgctgttcagcgccgtcttcggcctgttcctcgccgggctgctgtacgccgccacggccggcgcgctgaaccacctgttcgacaaccagagcggcgagttcgtctgccgcctgctgcccagccactacctgacggcgctgctcgccacgctgctgtgcagcgtcctggccgccgccagcggcggctggcgcgcggcgcggatcgaagccgcagagggattacgcgatgtttga

SEQ ID NO: 359523 - DNA, 1713 bp, Pseudomonas aeruginosa
atgtttgagaaagccattcttccgctcgcactcggcgcctgcctggcatttgccgcgccggcctgggccgaaggcgactcgccggacaatcccaagccgctggccgacgacgtcgccctgccgctgccgtgtggcggcgagatggtcttccggcatgtctacgtactcgccgaaggcgccctcgacgatcgcgaggtcaacctcggctacgccttcaacgaaggcgaggcgggctaccagcagtcgttcatctccggctaccggcgcgactacgtgaacggccagttcagcctcgccgacctggcaccggcctggcagcagaagctctccgccagcctgccgaagcctgccgccggcaccccgctgaagccgatgctgtacttcatcggcaagtacgaggtgaccgcccgccagtacgccgcggtgatgagccaggcggccgcgctctccggccagggcgaggcgccggcctgcgacgtgccggacgggatggccgcgcggctgcccaaggtcaacctctcgcgcttcgacgccgaacgcttcggcgcggtgtacagcgcctggctgctgaagaaccacccggaactgctgccggtcagcggccgcggcaagaatcccgaggacggcggcatcggcttcgtccgcctgcccaccgaggtcgagtgggagttcgccgcgcgcggcggccaggcggtaagccgccaggaactggaaggccggctgttcccgcgcaaggtcgagggcagcgaccaggaaggcccgctgggcgactgggcggtgtacaaccaggtcgccggcggtaccggccaggccgcgcgactgttgccggtagggatgaagcggccgaacccgctgggcctgttcgacgtgatcggcaatgccgcggagatggtccaggagtccttccaactggtccacgccggtcgccggcagggcacatatggcggtttcgtggtgaagggcgggaactatctcgaaggcgagatgactctattcaccgggatgcgccgcgaatacccgctgttcgccgccgacggcagcgaacagcgcaacgagaccaccggtttccgcgtcgccatcggcgcgctgtccgcgccgcgctcgcgctatcccgagctgttcgcccaatggcagaaggaaggccgactagcggcattgaccgatgccatcgatgacgctcaagatcccaccaagcaattggacggaatcattgccgccacccgcgacccgcagatgcaggcgcagttggcccagataaacgaggaactcaagcgtaacgtttcgttgatcgcccggcagcgcgaagaggccgccggaaacctgatacagtcggcggcactggtcgccgagacgatcaacaactacaacatacgcctgaccaacctcaagaaggacagggagaaagccgtggcagccagggatcaggcgaccgcccagctctatgccggcgccatcgccaacgggcgcagcgccctcgatggcgcattggccatctacatcgacaacctcgccaccggcacccgttacaccgacgcggtgatccaggcgcagttccagcgcatccaggaagaactcaatcgcaacccggttctgggcaagagcctggtcaagcgcgcgaccctgttcgtcaaacacgtcggagattatcgccagcagcaccgggccgagccggaggcggtattgaaggaattgctcgcgtccagcgggcgttga

SEQ ID NO: 359524 - DNA, 915 bp, Pseudomonas aeruginosa
atgagccaacccagcgaaaaccgtttgatcacctcggcgcgctacgcgctctgcctgttgaccgccagcggcgtgctgctcagcggctgcgccagcagcggcgtcggctcggtcgcccagaccacccgcgcggaatactacccgtcctgctacgagccggtgtcgcacctgcgcagcaccgataacgcagtgcgcaattcggccatcaccggcgccattaccggcggcctcctgggcggcctggccggcggcctggccagcgacgagaaccgcggccgcaatgccgccctcgctgccgcaggcggcgccctggccggcggcgcggcgggctactacatggagaagcagaagcagatcagcgatgaccgcgcgcgcatcggctcctacggtaccgacgtcgaccgcagcaccgtcgagatcaaccgtagcgtggcctacgccaagtcggcgcaaagctgctaccagagccagttcaaggctctgctcgacggtcgcaagaacaagtcgatcaacgaagccgaagggcgcaagcgcctggccgagatcgtcagcggcctgcaggagaccaacgccttgctggtcgccgccaacggccgtgccggcgagaacatcagcaactacacccaggcctacgagaaagacctgcagcaggtcggcgtaccgcgcgccgaggtgaccaaggtcgccgaggccgagaaccgcgccagcactacgaaaggcggcagcaagcccaagaccggcagcaatcccaaggtgccgaaggaagcggtcgccaccgagcagaccatccgcaaggcccaggacgcgcaaagcgaaggcaacaaggtggcctcccagggccagggcatgatccgggaagtctgcaacagcccggacatgggcgactgggcgccgccgagctgcgccaaggcctga

SEQ ID NO: 359525 - DNA, 1059 bp, Pseudomonas aeruginosa
atgagcgctcccctgcccccgcgcggtcgcggtaccgccagcaaccccctcaaccgcttcgccccgacccacagcgaggccttcgacgatggctgggagcaggacgtgccgccgatccagctcaccgaggtgcgcgaggagatcgcccgcacggtgatctcccgcaaccagtcgccggacctccctttcgatcgctcgatcaatccctaccgtggttgcgagcatggctgcatctactgctatgcgcggcccagccatgcctattgggacctctcgccggggatcgatttcgagacccggttgatcgccaagagcaacgtcgccagcgcgctggagcaggaactgagcaagcccggctatcgctgcgcgccgatcaacctgggtgccaataccgacccctaccagccgctggaacgcgaacgccgcctgacccgccaggtgctggaggtgctgctgcgcttccgtcacccgctgaccatcgtcaccaagggctcgctgatccttcgcgacctcgacctgctgcgcgaactggcggagcagaacctggtggcggtgatgatcagcctgaccaccctcgacgacgagctgaagcgcattctcgaaccgcgcgcggcggcgccctcggcgcgactgcgggcgatccgcacgctcagcggcaacggcatcccggtgggcgtgctctgctcgccgatgatcccgatggtcaacgacatggagctggagcgcctgctccaggcggcgcgggacgccggcgcgcgcagcgccgcgtacatgctcctgcgcctgccgcgcgaagtcggcccgctgttcgaggaatggctggcggcgcactacccgcaacgcgccgagcatgtgatgagcctggtccgccaatgccgtggcggcgaggtctacgacagccgcttcggccaccgctttcgtggccagggaccgttcgccgacctgctggcgcagcgtttcgcggtggcgatgaagcgcctcgggctggaccgccgcgagggcttcgggctggattgcagccggttcgccgtgccgggggcgcagatggcgttgttctag

SEQ ID NO: 359526 - DNA, 276 bp, Pseudomonas aeruginosa; identical to SEQ ID NO: 319143

SEQ ID NO: 359527 - DNA, 2046 bp, Pseudomonas aeruginosa
gtgagcgcgaatccccttctgcaggcctacgacctgccgcctttctcctccattcgcccggaacacgtgaagccggccatcgagcggatcctcgccgataaccgcgccgccatcgcccgcctgctggaaacccagcgcgagcagccgacctggaagggcctggtgctggcgatggacgaactcaacgaccgtctgggcgccgcctggagtccggtcagccacctcaacgcggtgtgcaacagcgccgagctgcgcgaggcctatgaggcctgtctgccggagctgtcggcctactccaccgagctggggcagaaccgcgccctgttcgaggcctacgaggcgctggcgaagagccccgaggcggccggcttcgacgtggcccagaaaaccatcctcgaacacgccctgcgcgacttccgcctgtccggcatcgacttgccggcggacaagcagaagcgctatgccgaggtgcagtcgcgcctgtccgagctgggtagccgtttctccaaccagctgctcgacgccacccaggcctggaccaagcatgtcaccgacgaagccgcgctggccggcctgaccgattcggccaaggcccagatgaagcaggccgccgaggccaagggcctggacggctggctgatcagcctggagttccccagctactacgcggtgatgacctatgccgatgaccgcgccctgcgcgaagaggtatacgccgcctactgcacccgcgcctccgaccagggcccgaacgccgggcagaacgacaacggtccggtgatggaagagatcctcgacctgcgccaggagctggccggcctgctcggcttcgccaactacgccgagctgtcgctggcgaccaagatggccgagtccagcgaccaggtgctcagcttcctccgcgacctggcggtgcgcagcaagccgttcgccgcccgcgacctggagcagctgcgcgcctacgccgccgagcagggctgcaccgaattgcagagctgggacgccggctactacgccgagaaactccgcgaggcgcgctacagcgtgtcccaggaggcgctgcgtgcctacttcccggtggacaaggtgctttccggcctgttcgccattgtcgagcgcctctacggcatccagatccgcgaactgcacgatttcgagcgctggcacgccgacgtacgcctgttcgagatcctcgagaacggcgagcacgtcggccgcttctacttcgacctctatgcccgcgccaacaagcgcggcggtgcctggatggacggcgcccgcgaccgccggcgcgacgcccagggccggctgatcgacccggtggcctacctggtgtgcaacttcaccccggcggtgaacggcaagccggcgctgctgacccacgacgaggtcactaccctgttccacgagttcggccatggcctgcaccacctgctgacccgcgtcgagcatgccgccgcctccgggatcaacggggtggcctgggacgccgtcgagctgcccagccagttcatggagaactggtgctgggagccggaaggcctggcgctgatctccgcccactacgagaccggcgaggcgctgccgcaggacctgctggagaagatgctggcggcgaagaacttccagtccgggatgatgatggtccgccagctggagttctccctcttcgacttcgagctgcacgccacccacggcgacggccgcagcgtgctgcaggtgctcgagggcatccgcgacgaagtggcggtgatgcgtccgccggcgtacaaccgcttcgccaacagcttcgcgcacatcttcgccggcggctacgcggccggttactacagctacaagtgggccgaggtgctgtccgccgatgccttctcgcgtttcgaggaagaaggcgtgttcaaccccgataccgggcgcgccttccgcgaggcgatcctggcccgcggcggctcccgcgagccgatgctgttgttcgtcgacttccgcggtcgcgagccgtccatcgacgccctgctgcgtcactccgggctggtcggggaggccgcatga

SEQ ID NO: 359528 - DNA, 543 bp, Pseudomonas aeruginosa
gtgaccattcgttcctaccagggcaaaacgccactgctcggcgagcgggtcttcgtcgatccctcggccgtgctcgtcggcgacatcgagatcggcgccgacagctcggtctggccgctggtggtgatccgcggcgacatgcaccgcatccgcatcggccagcgcagcagcatccaggacggcagcgtgctgcacatcacccacgccggccccttcaacccggacggttttccgctgagcatcggcgacgaagtgaccgtcgggcacaaggtcctgctgcacggttgcagcatcggcaaccgggtgctggtggggatgggctcgatcgtcatggacggcgcggtgatcgaggaccaagtgatcctcggcgccggcagcctggtgccgccgggcaaggtgctggagagcggcttcctctacgtcggcagcccggcgaagaaggcccgtccgctgagcgacaaggagcgcggcttcttcgcctacaccgccggcaactacgtgaagctcaaggacctgcacatcgccgaggactaccatgcgtga

SEQ ID NO: 359529 - DNA, 666 bp, Pseudomonas aeruginosa
atgcgtgacgccgcgctgcgctacccgaacatcctcttcgatctcgacggcaccctcaccgacccgcgcgagggcatcacccgctcggtgcagttcgccctcgcccgcctgggcatcgacgagccggacctggcgcgcctggagcacttcatcggccccccgctgttgcagtgcttcatgcagacctacggcttcgacgaagcgcgcgcctgggaggcggtgaaccactaccgcgagcgcttcagggtcaccggtctctacgagaaccgcgtgttcgacggcattcccgagctgctcgaagccctggtcggacgcggccacacgctctacgtcgcgaccagcaagcccggcgtgttcgcccgcgagatcgcccgccacttcgccttcgaccgtcacttcaaggcgatctacggcagtgagctggacggcacccgcacgcacaaggacgaactgatccgccatctgctcgacagcgaaggcctggcagcggagcattgcctgatgatcggcgaccgcatgcacgacctgctcggcgccagccgcaacggtgtcgcctgcatcggcgtcggctacggcttcggcagcgaagacgaactgcgcgcgcaccagccgacccattactgcgccgacctcgccgccctgcggcaggtgttggaatcccactga

SEQ ID NO: 359530 - DNA, 984 bp, Pseudomonas aeruginosa
atgaccgacaatcccttcgccacccccaccgccccggtgcagccgccggccagagaggtgcccgccaccacccagccctatgcgttcatcgcggtgctggcgctggtcacctgcctgtccttcgccgtgagcctgggcatccagtggtacaacgacatcggcgagatccgccagcgtttctccgagcacctgcaactgatggcgccgcactggttcaccggcctggtgttctacgcggcggccaacctgctggtgctgcatgcctaccgcgagaagcggcagctcgtcgagttccgcccgctggcgctgctgctgatcggctacggtctgctcaacctggtctgcggcatgctcgccgggatcggcctggcaccgctgacgctgccgttctaccagtgggtgacggcgcaatccagctacggcgtctggctgatggcgttcaacgaagcgatgagctgggtctacctgctcctgggcagcctgctgccgctggggctggtgctgctcggcagccgggtgaactcgccgcgcctggccgaaggggaagaagcccgcgtcgctgcctggcaggtcgccctgggcgccgcgctgtgtttcgccacgctgtgtttcaagctgatgcagttccttccctacgccctgctgcgctacgacgagccttggctatacggcctgtacctgagcggcgtggcgctacccgcggcgctgctcttcggcgccgtctgcacgcgcctgccggcgcgcctgcaacgcttcgccgccggccgcgcgctgctgctcgcggtggtcgccatgctgctctggagcgtcgcgctgctggcggtcggcggggggctggcgctgctgatgatcctcggcctggcgcccgctggcatcggctatacgctgctggtggcgctgctcggcgtcggcctgttggcgctgctctggccgatcggccggctggccacgcgctggtgctacgccgaccagctcgccgcctga

SEQ ID NO: 359531 - DNA, 1128 bp, Pseudomonas aeruginosa
gtgctggtagggcggcgggcggtccgcgtgctgtgctatgttccgcccatgccacgccgccttcgccatccgcttgctgaccttcgactgccccgttgggttccctgcctggcgctgttggcgctgagcggttgctcgaccgtctcctactacgggcaactggccagcggccagttcgccctgctgcgcgcccgcgagccggccgccgcggtgatcgccgacccgcagcgcgacgcgcgcttgcgcgaacgcctggcgaaggcggaaaaggcccggcaattcgccagcgaacgcctcggcctgccggacaaccgcagctatcgcctgtacgccgatatcggccggccctacgtggtatggaacgtgttcgccaccccggagctgtcgctgcagccggtcacccattgcttccccatcgccggctgcgtggcctaccgcggctactacagcgaggccgccgcgcgcgccgaggcggcgcgccagcgggcgctcggcgacgacgtctacgtcggcggggtgcaggcctactcgaccctcggctggttcgacgatccgatcctcagcagcatgctgcgctgggacgacgaacggctggcgaccttgatcttccacgaactggcgcaccagaagttctacctgcgcgacgacaccgccttcaacgaatccttcgccaccttcgtcgaacaggaaggcacccgccagtggcgcgagtatcgtggactgccgccggcggacggccgcgaggagaagcgccgcgagcagttcaccgcgctggtcctggccagtcgtgcgcgcctcgaagcactctatgccgggccgttggacgatgccgccaagcgtgccggcaaggctgccgaattccagcgcctgcgccgcgagtatgcggcgctgagccagcgcgaatggggtggcgagtcgccgttcaaggcctggatcgacgcgccgttcaacaatgccaagctgcttcccttcggcctctacgaccaatgggtggcggcgttcgccgcgctgttccgccaggtcggcggcaactggccggcgttctatgcgcgggtccgtgcccttggccagctccccctggcagagcgccaggcggcgttgcagcggctggccgccgcagcgccctga

SEQ ID NO: 359532 - DNA, 417 bp, Pseudomonas aeruginosa
atgcgtacgctgctgcttgccggtggcctgctcgtcctgagcggctgctcactgctgatgcccacccccgacccgaaccgcgcctgggtcgacctcgatacccagcccgacgccgatctcgccgccgtggaggtcgacgacaagagctgggaccgcacgcgctacttcgaggtcgatcccggcacccgcgaactcacggtgcgctaccagttcaccgtcgacccgaccaacatcggccccgtggacagcccgctctggcgcgattgccagctcaacctcaagttcaaggacttcagcgccggccagcgctaccgcctggaggccgggcacatcggcttccgtccctgggcgaagctctacgaccaggacaacagggaattggcgcgcggccgcgaggggcgctgcgcgaaggtctga

SEQ ID NO: 359533 - DNA, 438 bp, Pseudomonas aeruginosa
atgcgtccactcacccgtctcgtcccgctcgcgctgctgctcctcgccggctgcgccggaccgctgccgcagccggacccgcagatggcctgggtcgagctgcgcagcgcgccggccaacaccctgctggccgagcgcctggacggcgagcggttgagcgacgggcgctacttccaggtcactccgggacgccatgtgctggaggtgcgcttccagtacgaactctatggcggttccggcggcgggggcggcggcttcggcgagccggtgcagatcaactgctaccagcaggtggtctatgacggcttcgaggcgggccggcgctatcgcctggaggtgcgcccgcaattgcgcagggcgctggcgctactgagcgacgagcgtggcgaggtggtcgcccgttcgaacttccagaccagccgctgcccgccgtactga

SEQ ID NO: 359534 - DNA, 234 bp, Pseudomonas aeruginosa
atgaaaaccatcgggctggggattgccgccttgctgttcagcgccacggcgctggccgcgccgaagccgtgcgaggaactcaaggcggagatcgagaccaagatccagtcggccggggtgacctcctacaccctggagatcgtgcgcaacgacgaagtcagcgacccgaacatggtggtcggcagttgcgagaacggcaccaagaagatcatctaccagaagaacgacgactga

SEQ ID NO: 359535 - DNA, 426 bp, Pseudomonas aeruginosa
atgaagaagacggcatcggcggtctggcaaggcggcctgaaagacggcaagggcaccctttccaccgaaagcggcgcgctcaaggacaacccctatggcttcaatacccgcttcgagggcgcaccgggaaccaacccggaagagctgatcggcgcggcccacgccggctgcttcagcatggccctgtcgatgatgctcggcgaggccggcctgaccgccgaacgtatcgagacccgcgccgaggtcatcctcgacaagcagtccgacggtttcgccatcactgccgtgcacctggtgctcagggcgcgcgtgccgggggcggacgcgcagaccttcgagcagatcgccaacaaggccaaggccggttgcccggtatccaaggtgctcaacgcgaagatcagcctggacgccagcctcgacggctga

SEQ ID NO: 359536 - DNA, 705 bp, Pseudomonas aeruginosa
atgaacgacctcaccctgcattacctctacgatccgctctgcggctggtgctacggcgcctcgccgctgctcgccgccgcccgcgaggtgacgggtctggacgtacgcctgcatggcggcggcatgatgaccgatgccaaccgccagccggtcggcgccggtctgcgccactacgtgatgccccatgacctgcggatcgcccaactgaccggccagccgttcggcaaggactacttcgacggcctgctgcgcgacaccagcgcggtattcgactcggccccgccgaccgccgccgtgcttgccgccgaagcgctcgacggcctcggcgcggcgatgctggcgcggatccagcgtgcccactacgtcgagggccggcgtatcgccgagcgtccggtgctgctcgagctgggtgccgaactggggcttggcgagggcttcgccgaggcgttcgacgcctgctccggcgagccgctgcgcgcgcacttcgccgacagtcggcggctgatgaaccgtctcggcgccgctggcttcccgaccttcgccctggagcgcgacggccgcctgcaggtgctcgacaccgggcgctacctcggccagccggacgactggcgggctttcctcgaaacgcagctgcgccttgccggcggcagcggtgccgtgggcggggccgcggcgccgctctgccgcatcgacggttgcgcctga

SEQ ID NO: 359537 - DNA, 888 bp, Pseudomonas aeruginosa
atgtcgcgccatggattgcttcgttccctgttcgccgccgccgccctgctgggtgccgccggcgtcttcgccgccagcgccgaaccgctgcggctggaggtctacaaccccggcgagaaggcgatcttcgccgtgtcctcggaactgctggtgggccagcgcgaggcgatgctgatcgacgcgcagttctcccgcgccgacgccgagcaactggtcaagcgtatccaggccagcggcaagaccctcagcactatctacatcagccacggcgacccggacttctacttcggcctcgacgtgctgaaggccgccttccccgaggcgaagatcctcgcgacggcgcagaccgtcgcacacatccaggcgaccaaggacgccaagctggcctactgggggccgatcctcaaggacaacgcgccgacgtcgctggtggtgccggagccgctgaagggcgaccagttgaagctggaaggccatgccctgaaggtggtcgacctgaaggggccgagcccggaccgcacggtgctgtggattccgtcgctgaagacggtggttggtggcgtgctggtggaatccggttcgcacgtctggaccgccgatacccagacccaggcctcgcgccaggcctgggtggcgatgctcgaccggatcgaggcgctgcaaccgcggcgcgtggtgcccggccatttcaccggcgaggagccgaagggcctggacggcgtgcgcttcacccgtgactacctgaaggccctggaagccgaactgcccaagaccagggattccgccgcgctggtcgaggcgatgaagcgccgctacccgaacctgccgggcgaggaaggcctggagctgagcgccaaggtgctcaagggcgagatgcagtggccctga

SEQ ID NO: 359538 - DNA, 921 bp, Pseudomonas aeruginosa
atggaccgcctgaccgccactcgcgtcttcgtcgaagtcatcgacagcggcagccagaccgccgccgccgagcgtctggacatgtcccgggcgatggtctcgcgctacctcgccgagttggaggagtgggtcggcgcacgcctgctgcaccgcagcacccgccgcctgagcctgaccgacgccggcgcggagctgttgccacagtgccgcgagatgctcgccgtggccgacgccatgcaggccaccggccagacccgccgcgacagcccgcgcggcactctgcgcatcaccagcagcctgtccttcgcccaggcctggctgacccgtgccgccgccgccttcgtcgagcgctacccgggcaccgccatcgacctgcaggtcaacagccaggtggtcaacctggtggaggagcgcatcgacctggccctgcgcatcgccaaccagctcgaccccaacctgatcgcccgccgcctcggcgaatgccgctcggtgatctgcgccgcgccggactacctgcgccgccacggcactccgcgacgcccggaggacctggcgctgcacaactgcctgacctactcctacttcggccgcagtctctggcagttcgagcgcgacggcgagccgaccagcgtgccggtgggtggcagtctcagcgccaacgaatccaccgtgctgctggaggccgccgccgccggtgccgggatcagccagcagccgctgtactcggcagccccgctgatccgtagcggacgcctggtgacgctgctgccggagtggtcgccgcaggtgctcggcatccacgcggtgtacgcctcgcgccggcagatgccgccggcgctgcgggcgctgctggacttcctggtcgaacggatggcggccgatccgcactgggacgaggcgggccccctggcgctggcgtga

SEQ ID NO: 359539 - DNA, 507 bp, Pseudomonas aeruginosa
atgtccctgtcgatctaccaggcttcgatcccgaccttcctgcgcaccctcggcaacctctcggcgatcctgaagaaagccgccgcccacgccgaagcgaagaacatcgatccgcgcatcttcatcgacgcccggctggcgccggacatgttccccctggcgcgccaggtacagatcgccagcgacgccgccaagggcgccggcgcgcggctggccgggctggaagtgccgagctacgcggatacggaaaccaccttcgacgaactccaggcacgcatcgcccgcaccgtcgagttcctcgagggcatccgcgaggaacaactggacggcgccgaagagcgcaacgtgaccctcaaggtgcgcggccaggagatcagcttcaacggccgcgacttcctcttcggcttcgccctgcccaacttcttcttccacgtcaccaccgcctacgccatcctccgccacaacggcgtcgaactgggcaagatggacttcctcggcggcgcctga

SEQ ID NO: 359540 - DNA, 549 bp, Pseudomonas aeruginosa
atggatcggaaaaccctcgacgacaccagcaagttcctcagctatgtccttcgccaccagtccgaggccatcggcctgacgctggacggcgaaggctgggccgacatcgacgccctgatcgccggcgcggcgcgggacggccgcgccctcgaccgcgtgctgctcggcgcggtggtcgagaacaacgacaagaagcgcttcgccctctccgccgatggccagcgcatccgcgccgtgcaaggccactcgcatgccgcggtggccatcgcctacgcccccgcggtcccgcccgcagtgctctaccacggcaccgccagccgcttcctcgactccatccgcgagcgcggcctggttcccggcagccgccaccacgtccatctctccgcccgccgcgccaccgccctggaagtcggccgccgctacggcagcccggttctgctggaaatcgacgcgcgcgacatgcacctggccgggcacctattccaccaggcggagaacggcgtctggctgaccgagcgggtacccgtgcggttcatccgcgaggcttga

SEQ ID NO: 359541 - DNA, 429 bp, Pseudomonas aeruginosa
atggaccttcgccccagccacgtgcatgtgttcccacccagccgcgacctcccggccgcaaccagtccgcaccgcgaaaccctgctgcgcagcggctgcgcctggaacggctcgctctacctcggctatcccctcggccagccgcagctcaccgtgcagcgcctgagcctggccgcccacgaacgcctggactggcaggtccatccgatgcccagcgcgctctacgtgctcaagggcgaactgcgcctggagacccgcgacggtgcccagagcacgcgggtgctggaaggcgaggcggcgggctgcctgatgaacatcatccatcgcctgatagccggggccgaaccggtggaagccctgctgttccatgccggcgtggaaggcatgccggtggggctcggcgaacgcggcgagatgcccgacgcctga

SEQ ID NO: 359542 - DNA, 1833 bp, Pseudomonas aeruginosa
atgtgcggtctcgcgggttgggtggattacacgcgcaagctcgacgacgaatttccggcgatcttcgccatgaccgatacgctcgccttgcgcgggccggatgccgagggcatctggaagcaccgcaacgccctgctgggtcaccggcggctggcggtcatcgacctcagcggcggcgtgcagccgatgtcctatcgctttcccaccggccaggaggtcaccctcgtctacaccggcgaggtgtacaaccacgatgccctgcgcgagcggttgcgccgggccggacacgagttccgcacccgcagcgataccgaggtggtcctgcacgcctatctgcaatggggcgagcgttgttgcgagtacctgaccgggatgttcgccttcgccgtcttcgatggccgcgacggccacctgctgctggtgcgcgaccgcttgggcatcaagccgctgtattacgcgcggcaccgcgagggactgctgttcggctcggagatcaagtccatcctggcgcatccggaattcgccgccaggctcgacgcggtcggcctggtcgacctcctgacgctgtcccggggcacttcgcagacgccgttccgcgaggtccaggaactgctgcccggccacctgctgtcctggcgtcccaattcccaggcgaagttgcgccgctactgggaggtgcgccgccaggagcatgccgacgacctgcagagcaccgtgcagcgcacccgcgaactggtcacccgcgccctggggtcgcaattgcacgccgacgttccggtgtgttcgctgctatcgggtgggctcgattcgaccgccctgaccggcatcgcccagcgcatcgcgaaggcggagcacggcggcgacatcaattcgttctcggtggacttcgtcggccaggccgagcagttccgcagcgacgacctgcgtcccgaccaggaccagccgttcgctctgctggccgcgcagtacatcggcagccgtcaccgcaccgtgctcatcgacaatgccgaactggtctgcgagcgagcgcgcgaagaggtattccgggccaaggacgtacctttcaccttcggcgacatggatacctcgctgcacctgatgttcggcgagatccgccggcattccacggtggccatctccggcgaaggcgccgacgagctgttcggtggctacggctggttccgcgatccgcaggcggtggctgcggcgcgcttcccctgggcctccagggtgcgcttgccggccggcttcatcgacgccggtttcaaccgccgctgcgatctcctccagtaccagcaggccagctacgacgaagggctgcgccaggtcgaacacctggccggcgacagcccggaggagcggcggatgcgcgagttcagccacctgcacctgaagcgctggatggtgctgctgctcgaacgcaaggatcgcctgagcatgtgcaacggcctggaggtgcgggtgccctacaccgaccatgagctggtggagtacgtctacaacgtgccctggtcgatcaagagccgggacggcgaggagaagtggctgctcaagcgggcctgcgccgactatgtcccggaagccgtgctcaagcgccgcaagagcccttatccgacttctgccaacctcggctacgagcgtttcctgcgcgggagcgtgcggcgcttgctggaggacgcggcgaacccggtgttcggcatcgtttcgcgggagttcctggccgccgaactggagcatccggaggggtacttcaacacccaggtgagccgccacaacctggagaccgcgctggcgctggaaggctggctcaggttgtacgggctctccgcctga

SEQ ID NO: 359543 - DNA, 138 bp, Pseudomonas aeruginosa; identical to SEQ ID NO: 319160

SEQ ID NO: 359544 - DNA, 141 bp, Pseudomonas aeruginosa; identical to SEQ ID NO: 319161

SEQ ID NO: 359545 - DNA, 1662 bp, Pseudomonas aeruginosa
atgcgctacgcccgtcacgcaagccgatactccctcttcaccctggccgtctcggcagccctgctgcccggcgccggctgggctgccaacggcgacctcgccggcgcccgcaagccgcccagcgtcgcctgctcctggaaccgcgaggcagcgttgtcctacgaggagcgccggctcgacacgccgctgccgttcagcggcgccaacgtcgtcacccatgaccagacgccgctggccgagcgcatcgtcaagggcgccggcttcgacggcttcgaaccggccttcgccaagcgcctgtgcgccgccgacggccgcaccccggtcagcagctacgccaaggcactgaagctggtcaccgaagagggccgcgcgctgtggcgcgccgccgtcgaccgggcccaggggcgccgcgccattcccgccggcgcgctgccggccagcgatgaccgtatgctctactggacgcgcctctacatgacccgcaccctgcgccagtgggcgccatccttccacctcggcaaggcccaggcccaggcgctgcaatggcgcttcgaacgcgcctcgcgcggacagctggacatcgacctgccgcgccgctacgccgccgacggctcgcgctaccggcggatgatcatcagcggcttcgacgtcttcaccctgggcactcccgggacggcgaacaccggcctgcgcaacggcaacccctcgggcgccaccgcccttgcgctggacggccgcgagttcaggctggccgacggcagcctgctgcgtatcgaggcctacctgttgccggtcagctacgacccgttcaaccgcggcatgcaggaagacaccctgggcccctggttccgccccggcccgcgccgggtcgacgcctccatcaccatcagccagggcggcgccaaccagttctggctggaggcctggaacggccgcttccacggctcctccgccggcaacgacggcatcgtctactgccccgccgacagcgctttgcccaactacgtgcttcccctgggcagcgtgaccaatcccggcaccgcgccgatttccctgcggggctccggctgcaatatcaacccgccgcgccgctggctcggctacgacagcgccagccgctggcggcagaacctgccggcacagttctccaaggcctcgctgccggtccgccagttgctcgccgccgatacctggcgcggcatcgagcggccgccgggcgctaccagccaggccgcggaaggcttcgacgtcacctggcacaccaactacgacttcttccccgattgcgccaacccgcgcaccgaaaacgtgccgaccaacggggtgatgaacgccatgcccgatccctccctggtgctcccgccgaaccgacggatctgcgcgcgcaacggcggtggcggcgactacctgtccaacgagagcgcctaccgcaacacggtgctgcgcgacgcgttccgcctggagattcccgccgggcacatccatgtaccggtgatgaacaactactacaccggcgtaccggcgagcggcggcggcgcgcgcaacgacaacgccatcagcgacgcccgctacgaggcctaccgcagcgccatcgtggcgcagacccgggcgctgctggtgggcgtcggcaacgccctggcgcagggggcgcaagcggactag

SEQ ID NO: 359546 - DNA, 384 bp, Pseudomonas aeruginosa
atgagcttcgcgcagaatctcctacgcctacgccagcagaacgccctgacccaacggcagatggccgagcgactgggcgtcaccgtgagccagttgcggcacttcgaaaccaagggcgggcacccgtcgctggtggtgctgcaaaccatcgccggacgtttcgcggtgcccctcgactggctggtctgcgagcgcagcgagcggcaggcgctaccggaagacctgcgcctgcagttcgaggccatcggccgcctgcggctggacgagcggcgcgccatccgggcgttgctcgacgacctgatccgccagtacatggccaagcgcaacgcagcggccaagcccctcccggcggcttgcaccgaggccacggagacgtccccgtag

SEQ ID NO: 359547 - DNA, 666 bp, Pseudomonas aeruginosa
ttgaaactcgcccgactgtccggcctggtggccggtttcaccctgctggccctgctcggcggctgcgcgccgaccaagagcgtcgactactcggcgttcaagcaggccaagccgcgctcgatcctggtcctgccgccgctgaacgagtcgcccgacgtgaaggcgacctacagcatgctctcgcaggtcaccttcccgctggccgaggccggctactacgtggtgccggtggcgctggccgacgagaccttccgccagaacggcctgaccagcgccggcgacgtgcaccaggtgtccccggccaagctgcgcgagatctatggcgccgacgcggcgctgtacgtcacggtgagcgactacggcacgcgctacatggtgatcagcagcgcgaccatcgtcaccgccagcgccaagctggtcgacctgcgatccggcaccaccctgtggaccggctcggcgaccgcctccagcgaggaaggcaacggcggcaacaacggcggcctggtgggcatgctgatcaccgcggcggtcaagcagatcatcaacagttcggtggaggacgccggttatccgatcgccgggatgaccagcgcgcgcctgctctcggccggccagccgggcggactgttgtacggcccgcgctcgccgaggtacggcagcgactga

SEQ ID NO: 359548 - DNA, 354 bp, Pseudomonas aeruginosa
atgagcaagacgatcacatggacggcggcgctgctggggagcatggcgctggccgggtgcagcggaccgaagacgctgtaccagtgggagggctaccaggcccaggtccacgaatacttcaagggtgaatccaaggaggcccaggcgcaggcgctggaagccgacctcgagaagatccgggcgaagaacggcgcggtgccgccgggctaccacgcccagctggggctgctctattccagcatcggcaaggacgaccagatggtccgcgagttcgagaccgagaaggcgctgtttcccgagtcggcgacctacatggacttcctcctgaacaacgcccgtggaggtgcccgttga

SEQ ID NO: 359549 - DNA, 687 bp, Pseudomonas aeruginosa
atgagtcacagcgccaagaaaacactactgccgctcctcgccgttgccaccctggccggcctggcgggctgcgccaccgagacctccaccgcgttgccggtacagcaggtcgagagcgtcaaccgaccctacagcggcgtgcgttcgccgattgcggtaggcaagttcgacaaccgctccagctacatgcgcgggatcttttccgatggcgtcgaccgcctcggcggccaggccaagaccattctcatcacccacctgcagcagaccaatcgcttcaacgtgctggaccgcgacaacatgagcgagatccagcaggaagcggcgatcaagggccaggcccagcgcctgaagggtgccgactacgtggtgaccggcgacgtcaccgagttcggccgcaaggaagtcggcgaccgccagctgttcggcatccttggccgcggcaagtcgcagatcgcctacgccaaggtggcgctgaacatcgtcaacatctctacctcggaggtcgtctattcgacccagggcgctggcgagtacgccctgtccaaccgcgaggtgatcggcttcggcggcaccgccagctacgactcgaccctcaacggcaaggttctcgacctggccatgcgcgaggcggtgaacaagttggtcaacgcggtcgatagcggcgcctggaagccacagaaccaataa

SEQ ID NO: 359550 - DNA, 1374 bp, Pseudomonas aeruginosa
atgcatattcaatcatctcagcagaacccgtctttcgtggctgagttgagccaggccgtggccgggcgcctgggacaggtcgaggcccgccaggtggccactccccgggaggcgcaacaactggcccagcgccaggaagcaccgaagggcgagggcctgctctcccgcctgggggccgccctcgcgcgtcccttcgtggcgatcatcgagtggctgggcaaactgctggggagccgtgcccacgcctccacccaggcgccgctctcccgtcaggacgcgccgcctgccgccagtctctcggccgccgagatcaagcagatgatgctgcaaaaggcactgcccctgaccttgggcggacttggcaaggcgagcgagctggcgactttgacagcggagaggctggcgaaggatcacacgcgcctggccagcggcgacggcgccctgcgctcgctggccaccgccctggtcgggattcgcgatggcagccggatcgaggcttcccgtacccaggctgcccgcctgctcgaacagagcgttggggggatcgcgctgcaacagtgggggaccgcgggcggtgccgccagccagcatgtactcagcgcaagcccggagcaactgcgcgaaatcgccgtccaactgcatgcggtaatggacaaggtcgccctgttgcgccacgcggtagagagcgaggtaaagggcgggcctttcgacaaggcgctggcggatggcctggtggagcacttcgggctggaggcggagcagtacctcggcgaacacccgggcgggccgtacagcgatgccgaggtgatggcgctcggtctttataccaacggcgagtaccagcacctgaatcgttccctgcgtcagggacgggagctggatgcgggccaggcgttgatcgaccggggcatgtctgccgcgttcgaaaagagcggaccggctgaacaggtcgtgaagaccttccgcggcacccagggcagggatgccttcgaggcggtgaaagagggccaggtcggccacgacgccggctatctctccacctcccgggaccccagcgttgccaggagcttcgcgggcctgggcacgataaccaccctgttcggcagatccgggatcgatgtcagcgagatatcgatcgagggcgatgagcaggagatcctctacgacaaggggaccgacatgcgcgtgcttctcagcgccaaggatgggcagggtgtgacccgtcgggtgctcgaagaggccacgctgggggaacggagcggccacggcgagggactgctcgatgccctggacctggcaaccgggacggatcgttcaggcaagccccaggaacaggacctgcgcctgagaatgcgcggcctcgacctggcctga

SEQ ID NO: 359551 - DNA, 132 bp, Pseudomonas aeruginosa; identical to SEQ ID NO: 319168

SEQ ID NO: 359552 - DNA, 1254 bp, Pseudomonas aeruginosa
atgacgctttccctggatctgttgttgagcctgtgcacggccctggccatcggcctcctgatcggcgccgagcgcggctggcaggagcgcgaccacgaagatgcgcggcagatcgccggaatccgcaccttcagcctggccggcctgctcggcggcttcgccaccctgctcgcgggcgaactgggcagcgcagtctgggtagccttgctgctggccctcgcggcgctggccgtggccggctacgtgagcgatgtcaggcgtggcggcgaccagggcatgaccaccgagatcgccctgctgatgaccttcctcctcggcagcctcgccctcaccgaacagcgcctgctggctgccgccggcggcatcgtgctgaccctgctgctgagcctcaaggacaagctccacgccctgctgaagcgcctgaccgccgaggagctatcgggcaccctcaagctgctgttcatttccgtggtcctgctgccggtgctgcccaaccagggctatggtccctgggcgttcttcaatccctacctgacctggtggatggtggtgctgatcgccgccctcggtttctccgcctacctggccatccgcctgatcggctcgcgcaagggcctgttgctgaccgcggtgctcggcggcctggtgtcctccacggtgatgaccctgaccctggcgcgcctgcgcgagcgcatgcccgacgccctgttggcgtgcgccctgctggcgacctcggcgctgatgttcccgcgcatactcgtcgagatcggcgcgatccacccggccttgctgaaggagctggccctgccattcgccgccaccaccctcgtctaccttggcggcacgctgttccacgccctgcgcggcggccgcgccagccaggaggcgcccgacgagccaggcctgcgcaaccccttcgaactgctcccggccctgcgtttcgccgccctgctgagcgcgatcctgctgttggtggaggtcggccggcggctgttcggcgacgccggcatctatgcggtcgcgttgctctccggcctcgccgacgtcgacgcgatcaccctgtccctggcccgcgcggcgcagggcgaactcgatccaggcgtggccagccgcggcatcgcccttgccgccctgagcaacagcctggtcaaggccggcctggtcgtgctggtgggcggcaagcggctggccctgcaaacgctgcccttcagcctggcggggctgctggtaggagcgctgctgatcctgttgtga

SEQ ID NO: 359553 - DNA, 396 bp, Pseudomonas aeruginosa
atgccggtactggctctgagactcaccgccctggcggcccttgcgatcagcgtgtcggggtgcgtcatggaggcctatggcagtcgcgcgcgtagcgatgcgcaatcctggatcggcttgccgatccaggacgtgatcaagcgcttcggcgagccggaacgtgtgacgggggatgccgccaggcagaagtacgtgtggaaggagtacgagaactatagccacgactacgactacacctactacgagcagggccatggcaatacgcccaacagctcggtcctgaaccagaagaccggcacggccaaccagagcggctattacacctgcatctacgagttctttgccgacgcctcgggcagggtggtcgatgcgaccgcgcggggtgagtgccgctag

SEQ ID NO: 359554 - DNA, 156 bp, Pseudomonas aeruginosa
atgggtggttattcggcaaaatgcatggagcttgttatcgaaggcatcctcgaggttttgaggatcggagaggtagcgttggtagtcctcgtcctcggcgaataccacttggcgactgtgtccccgctggaccatgtgaagcggataattcggtaa

SEQ ID NO: 359555 - DNA, 10311 bp, Pseudomonas aeruginosa
atggacatccgcagcccgctgaaccagtgcatcgccctgtccctggccggcatcctgttcctcaacccgatcgtcgccgcggcggcggggctggcgctggacaaggccgccggcggcaacaccggcctgggccaggcgggcaacggcgtgcccatcgtcaatatcgccacgcccaacggcgccgggctgtcgaacaaccatttccgcgactacaacgtcggcgccaacgggctgatcctcaacaacgctaccggcaagacccagggtacccagctcggcgggatcatcctcggcaaccccaacctcaagggccaggcggcgcaggtgatcctcaaccaggtcaccggcggcaaccgcagcaccctggccggctacaccgaggtggccgggcagtcggcgcgggtgatcgtcgccaacccgcacggcatcacctgccagggctgcggcttcatcaacacgccgcgcgcgaccctcaccaccggcaagccgatcatggacggccagcgcctggagcgcttccaggtggacggcggcgacatcgtcgtcgaaggcgccgaactgaacgtcggcaacctcgaacagttcgacctgatcacccgcagcgccaagctcaacgccaagctctacgcgaagaacctcaacatcgtcaccggccgcaacgacgtccaggccgacagcctgcaggccacgccgcgcgccgccgatggcagcgagaagccacagctggcgatcgacagctcggcgctgggcgggatgtacgccggggcgatccgcctggtcggcaccgagcagggcgtgggggtgaagctggccggcgacatggccgccagcggcggcgacatccgcatcgacgccagcggcaagctgagcctggcccaggcctccagccagggcgacctgaagatcgcggcccaggccgtggagctgaacggcaagacctacgccggtggcagcgccgagatccgcagcgcggaggaactggtcaaccggcagagcctggcggcgcgcgaacgcatcgcgctggaggcggcgcatatcgacaacgccggggtgatcgaagccggcgtcgagccagacgagcggcgcaacgcgcgcggcgacctcgagctgcgcagcggcaccctgcgcaacgccggcagcctggtggccagccgcgcgctggaagcgaaggcgagccaggcgctggacaaccagggcggcagcctgaagggggcgaccgtccgggtcgacgccgggcacctggacaaccgtggcggcaagctgctcgccgagggcgaactgcgggtcgaggcgagcagcctggacaaccgccaggacggcctgttgcagagccgggaccgcgccgtggtcaagacccgtggcgatctcgacaaccgtggcggccaggtgatcggcctgaacgacctggaggtcggcgcggcgacgctcgacaacggccagcaaggcctgctcggcagccagcagtccacccgcgtcagcgcccaggcgctggtcaaccggggggacggcgaagtctccggcaagcgcgtcgaggcccgcgtcggcagcctcgacaatcgcggcggcaagctgatcggcgacgacctgctggtggtcgccagcggtgccatcgacaaccgcctcggcttgttctccgcggccaaccgcctcgacctgcgggcgcgcagcctggacaacagcggcaagggcacgctgagcagccggggcggcctggaggtcagcctcggcggcctgctggacaaccgcgatgaaggcaacctgctcagccagggcgcgcagcgcgtgacggtggggcaactggacaaccgcgccggcggcctgctgtcgagccgcagcgagttgaacgtccacggcgccagcctggacaaccgtggcggcgtgctggtagccgacgccggcctgagcgccacgggaggcgccttcgacaaccgcgacggcggcagcgccagcggcaaggctggcgtgcgcgtggaggtcgccagcctgcgcaacgaccagggtggcaagctgctcagcgatggccgcctggacctcgcagcgaacgccgtcggcaacgccggagggcgtatcgccgccaagggcgacctgcaggcgacgcttggcagcctggcccagcaaggtggcgaactggtcagcgaaaagaccctgaaggtcgcggccgacacgctcgacaacagccagtccgggctgatcgccgcgaatggcgacatcgctatcgaggcgcggcaggtcgacaaccgcgccggcgagatttccagcacctcgaaggtcgccgtgaacgcccgcgagcaactggacaaccgcggcggcaaggtcatcggcgacagcggcctgcgcctcaccgtgcagcgcctgctgaaccaggccaagggggtgctggccgggcgcgacggcctgagcctggacggcggcgaactgttcaacggcgacggcggtcggctcgacagccagaacagcctgagcgtgagcctcggcggcgtgctggacaaccagggcggcgcgctggtcagcgaaggcagcctgacggcgcgcgccgcgcgcctggacaaccgtggcgggaccttctccagcgccggtgcgctggcgctgaccagccaggccgcgctggacaaccagggcggcaggctgctcagcgatgccggcgtgacgctgaagggcgccagcctcgacaacagccgttccggcgtgatcagcgccaagggtgcggtggatatccgcaccggcgtgctggacaacagccgcaacggcggcatcggcagcaacgccggcatcaccctggtggccgcccggctggacaacggccagcagggccgggtcagcgccaagggcctgctcgacgccaacctgaaaggcctcgaccagcgcggaggcggcgtcctggtcagcgaaaccggcgtcaccctcgacctcaatggcggcacgctggtcaaccgcgacggcggcctgatcgccacgcccggcgcgctgctgctgcgccagctcggcgcggtggacaacggcgccggcggggaaatctccagcgaccgcgccttcaccctcgccgccgccagcctggacaaccgcggcgggcgcctgatcggcgccgacagcctgaccctgcgcatcgcccaggccctggacaacagcctgggcggggtgatctccggcgccgccggcctggacatcgcggccgctcgcctggacaacagcgccaagggcaccctggccagccgcgccggcatcgacctgcgcgtcgatggcgcgctggacaaccacgccgaaggcaccgtttccggcgcccgcctgacgctcgccagcgcctcgctggacaacagcggcaagggcctgctctccggcaacgccggcctgagcgtcgccactggcgcgctggacaacgccgagggtggccagttgatcagccagggcgtgctggacgtcagcagcgccgacctcgacaaccgtggcggcgccctcagtggcaagcagtcgctgcgcctgagcgccgccaacctggacaaccgtggcggcctgctcaccagcgacggcgaactggaactgacggcagggcgcgtcgactccgccgacggcggcgaaatctccgcccggggcgacctgcgcctgacggtcgagcgcctggtgcaacgccagggccggctgatcggcgagcgcggcgtcagtctcgacctgcggggtggcgacctggacaaccagggcggcctgatcagtgcccgcggcccgctgagcatcgagcggctgaacgtcctcgacaaccgccagggcggcgagatttccagccagcagggcttcgagctgctggccaggcgcatcgacaacggccagcaggggcgcatcatcagcgccgggaaactgcgcctggacgccgacgcgctgggcaacgccggcgccggcctgctctccggatggcagggcctgacggtgacaggcgggagcctggacaacagcgccggcggcaccctttcgagcaaggacggcgagctggccatcagcctcggcggcgcgctggaaaaccacggccagggcgcgctggtgagcaagggcgcgcaacggatcgacgccgccagcctggataacgcccagggcatcgtctccggcgaaagcgacgtgaccctgagcatcgtcgggaagctggacaacggccagggcggcctggtctcggcgcagcgcgcgctgagcttcgagcgcgacgatacgctgctgaacaacgccggcggccggatcaacggcggcagcctgctgctcaagggcgccagcctggataacagcgacggccagttgatcagccagggccggctcgacgccatcctcggcggcgccctggtcaacaccggcgcggcgcgcctggccagcggcggcgacctgctgctgcgcagcgccagcgtcgacaaccgcggcggcaagctggtcagccaggggctgctggagatcaccaccggcagcctcgacaacagcgcctccggcaccctcgccagccaggccggcatgagcctgcgcctgggcggcggcgccctgcgcaaccagcaggacggcctgatcttcagccaggccggcgccctcgacgtgcaggctggcagcctggacaaccgccagggcacgctccaggcccagggcgacaaccggctgcgtatcggcggcgcgctggacaaccagggcggccgcctggacagccgagccggcaacctcgacctacagagcggcagcctcgacaacggcgccggcggcgtgctcaacagcgccaagggttggctgaagctggtcaccgggctgttcgacaacagcgccggcgtcacccaggcgcagtcgctggagattcgcgccgggcaaggcgtgcgcaaccagcagggccatctctcggcgctgggcggcgacaaccgcatcgtcaccgccgacttcgacaaccagggcggcggcctctacgccagcggcctgctcagcctcgacggccagcgcttcctcaaccagggcgcggcggcgggccagggcggcaaggtcggcgccgggcgcatcgacttcagcctggccggtgcgctggccaaccgcttcggccagttggaaagcgaaagcgagctgcacctgcgtgccgccgcgatcgacaacagcggcggcagcctgcgcgccctcggccgcagcggcagcacgcggttggtcgctggcggcctgaacaacgcctacggcgtgctggaaagcgccaaccaggacctcgacctgcaactgggcagcctggccaacgccggcgggcgcatcctccataccggcaacggcaccttcggcctggattccgggcaggtgatccgcgccggcggggaactgaccaccaatggcctgctggacatccgcgccagcgaatggaccaacagcagcgtgctgcaagccggacgcctgaacctggacatcggcaccttccgccagacggccgagggcaagctgctggcggtgcagtccttcactggccgcggcggcgactggagcaacgacggcctgctggccagcgacggcagcttccgcctcgagctgagcggcggctaccgtggcaacggccgcgccaccagcctcggcgacttcgccctgaacgccgccagcctcgacctcggcgacgccgccagcctcgccggcggcgccaatgtcacgctcggcgcccgcaacctgctggtcaaccgtgggcggatcaccgccgccggcgacctcgtggccagcgccgcgagcctgaacaactacggcaccctgggcggcggcggcaacctgcgattgaacgcgcccgccctgctcaacgagcgcgggttgctgttcagtggcgccgacatgaccctgcgtgccggcgacatcaccaacctctacggggatgtgtacagcctcggcaggctggatatcgcccgcgacgatgccggcaaccgtgccgccagcctgcgcaacctttccggggtgatcgagagcggcaaggacttcagcctgcgtgccagcctgatcgagaaccgtcgcgccgtgctggaaagcaagtcgggcctgtacaccgcgaagatggagcagaccgcctgcatcgaaggcgtcaacgcgggcgactgcagcggcaagcgcaacgccatctggaccatcacccagcgcgacaagaccgaggtcaccgccagcagcgccatggggcaactgctggccggaggcgacttcgccatcgacggcggcaccctgaacaacctttccagtctgatcggcagcggcggcaacctcaccgccaacctcgaagtcctcgacaaccagggcctggaaaccggcgagctggaaaccatccgcgtgctgcgtaccgctcgcggcggcgatatcggcggcatcgaccagaagtcgcgcaacttcaccaacctctactggtaccagagcgccaatttcgacccggcgcgcgcgggcgagatccccgccgcgctcaacgcgatcctcagcgactggtccttcgagtacgaattcccgagcaaggggccgaccccgatcagcagtggcgaccagtcctacgcagcggtgatccaggccgccggcgacgtcacggtcaatgccagcacgcgcatcgacaacggcgtcacccgccccggctacaccttcgtcggcagcggccgccaggtgggcgacagcgcggtgggcggcagcggggtttcggtggtcgtgccgctgacctcgcaactgccgcccgacctggcgcagcgccaggtcaacccggttaccctgcccggcttcagcctgccccagggtgacaacggcctgttccgtctcagctcgcgcttcgccgaggatggcaacggcagcgccgcgctcggtgccggcgccgaccgcacccagggcggcagcggcgtctcggtcggccagcagggcgccggcaacgccgccggtacctggcagggccagggcgtgcgagtcgacggcctggctggcgcggccaacgtccagggtcagggcggcagcacgctcggcggtagcctgccgggcgtcgcccgggtccagggcgtgcccggcaacgccacgccgagcgccagccacaagtacctgatcgagaccaacccggcgctcaccgaactgaagcagttcctcaactcggactacctgctcagcggcctgggcatgaacccggacgctagcaagaagcgcctcggcgacggtctctacgagcagcggctgatccgcgacgcggtggtggcgcgcaccggccagcgctacatcgatgggctgagcagcgacgaggcgctgttccgctacctgatggacaacgccatcgcttacaaggaccaactgcacctgcaactgggtgtgggtctgagcgcggagcagatggcggcgctgacccacgacatcgtgtggctggaagaggtcgaggtgaacggcgagaaggtcctcgcgccggtggtctacctggcccaggcggagggtcggctggcacccaacggtgcgctgatccagggccgcgacgtgaagctggtgagcggcggcgacctgcataacgtcggcaccctgcgcgcgcggaacgacctctcggcgacagccgacaacctcgacaacagcggcctgatcgaggccggcaagcgcctcgacctgctcgccggcgactcgatccgcaaccgccagggcggggtcatcgccgggcgcgatgtgagcctcaccgcgctgaccggcgacgtgatcaacgaacgcagcgtgacccgctacgacagcgcgctcgacggccgcacctgggagcgcagcttcgccgacagcgccgcgcgggtggaggcggcgaacagcctgaacgtccaggccggacgcgacatcgccaacctcggcggggtgctgcagagccgcggcgacctcagcctcgacgccggacgcgacgtcaccgtcgccgccgtcgaggaccgccagggccagacccgctggagcacgtcgcggctacagagcgtgacccagctcggcgccgaagtcagtgccgggcgggacctgaacgtcagcgccgggcgcgacctcagcgcagtggccagcgccctcgaagcgcgccgcgacatcgccctctccgccgggcgtgacgtgaccctggcggcggcggcgaacgaggagcatgcctacagcaagaccaggaaggtcacctaccaggaagacaaggttgcccagcaaggcacccgcgtggacgccggcggcgacctggcgatcaatgccggacaggacctgcgcctgatcgcgagccaggccagcgccggcgacgaggcctacctggtggccggcgacaagctggaactgctggccgccaacgacagcaactactacctgtacgacaagaagaagaaaggcgacttcggccgcaaggaaacccggcgcgacgaagtcaccgacgtcaaggcggtgggcagccagatcagcagcggcggcgacctcaccctgctcagcggcggcgaccagacctaccagggcgcgaagctggaatcgggcaacgacctggccatcgtcagcggcggcgcggtgaccttcgaggcggtgaaggacctgcaccaggaaagccacgagaagagcaagggcgacctggcgtggaacagcgccaaggggaaagggcagaccgatgaaacgcttcggcagacccagatcgtcgctcagggaaatctggcgatcaaagcagcggacgggctgaagatcgatgtgaagcatatcgaccagaagaccgtttccgagaccatcgatgtcatggtcaaggccgatccgagcctcgcctggttgcgggaggccgaaaaacagggtgacgtcgattggcgcaaagtccgggaagtacatgacagcttcaagtacagccattcggggttgggcgctggcgcggcattggccatcgccattgtggttacctacctgacctggggtgcgggtagttcgatggcaggcgtcgcggccaaaagcgcaacaggcgtcgctgccaactccgtcgccagtgccgtagccaccaacgcggcgatcagcacggtgaataaccgcggcaaccttggcgcggtggcgaaagacgtgacctccagcgacagcctgaagggctacgcggtcgccggtatcagcggcggcttcatgcccagcagtctgggtgcccagcttgccgttcgctccgcgctgaacaccgtggtgaacggtggcaagttcagggacaacgtcgcgcaagctgccatcagtttggcggcggacgcgctaagcggcgcgatcttcgacaaggtcggagatgcgttggtcggcagcggccttcccaagaaggtagcggtccatgcgattgtcggcgggttgatcggcgaggctgccggcggcgatttccgtaccgcagccctggctgctggcgccaacgaggcattggtaagcctcgtcggtgaaaagatcttccctggcgaggctcatgagcgcgtgctggcgatgacctcgcagttgatagggatgacagtggctgcggcggccggaggcgataccaaggcccaagagaaagccgcttgggtggctcagcaggccacggtgtacaacaatctgaatcacgcggcggcggagagcctgctcaaggaaatcaaggattgtcgcgcggcaggcggctgtggcgaggagaagttgcaaggcatcctcggcaagtacgaaaagctgtcggccgagcgttcaaacgctatcggccagtgtgcttcgcgccagtgtgtggacgacatcgtcgacagttcgatccggatggacgatccggtttccaaagagctgctcagcctactgcggcaaaccacctacgacacacccggcttgttgcagggcaatcctgatgcgatcgtgtcgcagacgccgaatccaagtggctggggagatctctttgccctggacaagcaactggcgttcgccaagaacctcaaggaaggctggctgacaccggaggaaacggctgatctggatcgctggaatgcgtccacttcctggctggatcgcactgctggccgacaactggatcccaaggagaaggcttacctgctctcggagctggggggcgcggcggctatggcgcttcttggagggagagggagtgttggagcgggtgcaaaagggacaagctcggttgccgatgacttcttcgcaggtaccaaatacaccgataaagtcttaggtcagatcaagacaggtgatcttcatgcgttcccggaaagtgtcaaggcgtttcaaggggctggacaggtgacgaagatcacaggtggagatggtgttgtaagagatatgctgaaaattccaggcgagtatcgtgggaaacaaggtgtgtttgagttcataaaagagccagacgggtcaattaatcatcgcctgtttaggccgaatctggggcaataa

SEQ ID NO: 359556 - DNA, 1689 bp, Pseudomonas aeruginosa
gtggctctccatcgcctggcctttatcttcctgtgcctgccgctcatggccagcgccgcccccttcacctcccccggcgaccgcgacctgatccgcgaccgccagcagcgcctgctggacgaacagcgcaagcgcctggaggaactccagcaactgcccggcaagggagcgcccgccgctgcggatgcctccggcgacgacgagcgctgcttcgagatccgccgcatcgagctggaaggcgccgggcacctcgacgaaagcgcgcgtcgccagttgctggcgccctaccaagggcgctgcctgggcgtcggccagctcaatgcgttgctcaaggccgtcaccgaccattacctggatcgcggctacgtcaccacccgcgcctacctgccacagcaggacctggcctccgggaccctgcgcatcatcgtcgtcgaaggccgcctggagggcctggacagctccgcgctggccagcccgcgcgaactggcgatgagctttccgggcaggaccggcgagctgctcgacctgcgcgaactggagcaactggtcgaccagttgagccgcctgccgtcgcgccaggcgcaactggagctggtgcccggcagcgaggtcgggggcagccgggtgcgtctcaagggtgagcgcgacaagccctggcgggtctccgccacgcgcaacaacgacggcgacgtcagcaccggcgagcagcagatgggcctgggcctggactgggacagcccgctgggcctggccgaccagctcaacctgcgcgccaaccgcgacgcggtgaccgaccgctggcgccattccgacagccagagcctgttctacagcctgccctggggctggtggaccttcacctacggctacagccagagcgactaccgcacgcgcaacgaggccagcggcttccccttcaagctcgatggcgacagccgcagccaccagttccgcgccgaacgcgtgctgcaccgcgacggcgtgagcaagaccgccatgagcctggggctcagccaccagcgcaccaacaactatgtcgaagacacccgcctggaagaccagagcacgcggatcaccgagacccagctcggcttcaaccacggtcggcggatcggcagcggtttcgtcaacctcgacctcggctggcagcagggcatcggcgcccttggcgcgcagggtcgcggccacccgcacgcgggcgatccgaatgcgcgctacgacaagtacagcctgaccctcagctacctgcagccgttccagctatggggcgagcgcttcagcttcgacagcctggccaccgggcagaggagcgaggacgtgctgttcagcccgcagcgcatcagcctcggcggcaacagctcggtgcgcggcttcaaggaccagaccctgaccggcgacagcggcggctactggcgcaaccagttgcgctggcggcgtgcggtggaatgggcgccgctgcggccctggctgcaggaatacggcgtggccttcgcctacgacgtcggcgtgatccgccacgaccgctacaacgacggcgccagcgggcgcatgagcggcaacgccatcgaactggatgcccgcggccgctatttcgccgccagcgtcggcttcgcccgctcgctggagcggcccagcgccatcgagcggcgcgagcacccgatctatttccgggtcgacgcgttcttctga

SEQ ID NO: 359557 - DNA, 222 bp, Pseudomonas aeruginosa; identical to SEQ ID NO: 319174

SEQ ID NO: 359558 - DNA, 216 bp, Pseudomonas aeruginosa; identical to SEQ ID NO: 319175

SEQ ID NO: 359559 - DNA, 888 bp, Pseudomonas aeruginosa
atgagccgcgacctgccctccctgaatgccctgcgcgctttcgaagccgctgcccggttgcacagcatcagcctggcggccgaggaactgcacgttacccatggcgccgtgagccggcaggtgcggttgctcgaggacgatctcggggtggccctgttcggcaaggatgggcgcggcgtaaaactcaccgattccggcgttcgcctgcgtgacgcctgcggcgatgcgttcgagcgactgcgtggcgtctgtgccgagctgcgccggcagaccaccgaggccccgttcgtcctcggcgtacccggcagcctgctggcgcgctggttcatcccgcggctggaccagctcaaccgtgccctccccgacctgcgcctgcaactgtccaccagcgagggcgagttcgatccgcgtcgtcccggcctggacgccatgctctggttcgccgagccgccctggccggcggacatgcaggtcttcgaactggcgcccgagcgcatgggcccggtggtcagcccgcgcctggcgcaggaaaccggcctggcccaggcgcccgccgcgcggctgttgcaggagccgctgctgcataccgcctcgcgaccccaggcctggccggcctgggccgcgagccaggggctggcggcggaggcgctgcgctatggccaggggttcgagcatctctactacctgctggaagcggcggtggcgggcctcggcgtggccatcgccccggaggcgctggtccgcgacgatctcgccgcgggccgcctggcggcgccctggggcttcatcgagaccgacgcgcgcctggccctgtgggtaccggcgcgcctgcacgatccgcgtgccgggcgcctggcgcaatggttgcgggagcagttggcaggctga

SEQ ID NO: 359560 - DNA, 1209 bp, Pseudomonas aeruginosa
atgacttcctatcgcaacggccccgacgccaagggcctgttcggccgcttcggcggccagtacgtcgccgagaccctgatgccgctgatcctcgacctcgcccgcgagtacgagaaggccaaggacgacccggcgttccaggaggaactggcctacttccagcgcgactacgtcggccggccgagcccgctttacttcgccgagcgcctgaccgagcactgcggcggggcgaagatctacctcaagcgcgaggagctgaaccataccggcgcgcacaagatcaacaactgcatcggccagatcctcctggcccggcgcatgggcaagaaacgcatcatcgccgagaccggcgccggcatgcacggcgtggccaccgccaccgtcgccgcgcgcttcggcctgcagtgcgtgatctacatgggcactaccgacatcgaccggcagcaggccaacgtcttccgcatgaagctgctgggcgccgaggtgatcccggtgaccgccggcaccggtaccctgaaggacgccatgaacgaggcgctgcgcgactgggtgaccaacgtcgacagcaccttctacctgatcggcacggtcgccggcccgcatccgtacccggcgatggtccgcgatttccaggcggtgatcggcaaggaaacccgcgagcaactggccgagaaggaagggcgcctgcccgattcgctggtcgcctgcatcggcggcggctccaacgccatgggcctgttccacccgttcctcgacgacgccggggtgcagatcgtcggcgtggaagccgccggccacggcatcgacaccggcaagcacgcggccagcctgaacggcggggttcccggcgtgctgcacggcaaccgcaccttcctgctgcaggacgcggatggccagatcatcgacgcacactccatctccgccggcctcgactatcccggcatcggcccggaacacgcctggctgcacgacaccggccgcgtcgagtacacctcgatcaccgacgacgaagccctggaggccttccacacctgctgccgcctcgaaggcatcatcccggcgctggaaagctcccacgccctggccgaggtcttcaagcgcgcgcccaacctgcccaaggagcacatcatggtggtgaacctgtccggtcgcggcgacaaggacatgcagaccgtcatgcaccacatgcaacaggagtcgaaagcatga

SEQ ID NO: 359561 - DNA, 807 bp, Pseudomonas aeruginosa
atgagccgcctgcagacccgcttcgcccagctcaagcaggaaaaccgcgccgccctggtgaccttcgtcaccgccggcgacccggactacgcgtcttccctggaaatcctcaaaggcctgccggcggccggagccgacgtgatcgaactgggcatgccgttcaccgatccgatggcggacggcccggccatccagttggccaacatccgcgccctcgacggcggccagaccctggccaggacgttgcagatggtccgcgaattccgcagcggcgacagtgagacgcccctggtgctgatgggctacttcaacccgatccaccactacggcgtcgaacgcttcattgccgaggcgaaggaggtgggggtggacggcctgatcgtggtcgacctgccgccggagcacaacgaagacctctgcgacccggcccaggccgccggcctcgacttcatccgcctgaccaccccgaccaccggcgaccagcgcctgccgacagtgctcgaaggcagttccgggttcgtctactacgtgtcggtggccggcgtcaccggcgccaacgcggcgaccctggaacacgtcgaggaagcagtggcgcgcctgcgccggcataccgacctgccgatcggtatcggcttcggcatccgcagcgccgaacacgccgccgcggtcgcgcggttggccgacggcgtggtggtcggctcggcgctgatcgaccggatcgccaaggcccgcgacaatgcccaggcggtcaaggatgtcctcgccctgtgcggcgagctggccgaaggcgtgcgcaacgcacgctga

SEQ ID NO: 359562 - DNA, 624 bp, Pseudomonas aeruginosa; identical to SEQ ID NO: 319179

SEQ ID NO: 359563 - DNA, 366 bp, Pseudomonas aeruginosa
atgcgaacgttcgacctgaccgccgccctgggcgaccgcgccaaccaaccggagatcagccgcctgctcgtcgcgcagctgatgaccagcaacaatgaagacacccgcaagctgcggcgcgcccaggagcgcgagcagacccaggaactcaacgagctggcgcaccgcctggcgggcatggcctcgctgatccacgcccacgccgtggaacgcgcctgccaccaactggagatcgcctgcggcgaaagctccgtgcgcaagctcgccgatgccgtcgacgacctggtgacggcactgggcgagctgcaatgcgaactgcacgactggatgacgatgaccgcgcctcaaggcacggcgaagtcatag

SEQ ID NO: 359564 - DNA, 378 bp, Pseudomonas aeruginosa
atgaacgagtattccaccccccgcatccagggcttccatgctcacgtctatttcgatgcgcagagcatcgagcgagcccgcgccctttgcgaagaggcggcgcggcgctttccgctgaagatggggcgggtccatgagcggccggtagggccgcatccggactggagctgccagctggcattcgctcccgaggtgttcggcgagctggtgccctggctggccatccatcggcaggacctggtggtgttcatccacccggtcaccggcaacgatctgctcgaccatcgcgaccgagccatctggatgggagccattcgcccgctggacctgtcgatcctggacgaaggcccgcaacgctatgacttcgccgtgccttga

SEQ ID NO: 359565 - DNA, 900 bp, Pseudomonas aeruginosa
atgccgctgtccctcgacctgctccgggtattcgagtccgccgcccgccagctcagcttcaccgctgccgccgaggagctggggaccacccagcctgcggtcagccagcagatcaaacgcctggagaaggagctggcgacccctctgttccagcgcgttcatcgaggcatcgtgctcaccgacgctggccagctcctgctccgccacgtggccgccggcctcgagacgatcgatgccggcatcgccgcgctgggcgcgcgccagcgccacgaggtgctccaggtggccaccgactacgccttcgccgcctactggctgatgccgcgccttccgcgcttccaccaggcccatccgcacctggacgtgagcctggtgaccagcgagcgcggcctggccggccagcgcggcgatatcgacgtggcgatcctgttcggcgacggtcgttccaagcacggcgaagcgcaccggctgtttcgcgaggaggtgttcccggtctgtagcccgcggctggtcgagggattgcagttgccgctggccaaggcgcacctggcgcgcctgccgatgctgcatctgaagccggcgcagcacgcccgctggttcgactggccggcgttgttcgaagcgttggccatcgatcggcagccgattccggcggtgctcagcttcgacaactacaccttgctgatccaggcggccatcgccggccagggcgtggccatcggctggcgccacctggtcgacggcctgctcgaacaggggctgctttgccggcccattggcgagagctgcctgtcgcgatacgggtactatgcggtattgccggagcgcaagcggcgccagcggctggtcgacggtttcgtcgactggctgcaggccgagttgcaggccggcggcgcttga

SEQ ID NO: 359566 - DNA, 1512 bp, Pseudomonas aeruginosa
atgaagacctcgccgaacatcctgttcatcatggccgaccagatggccgcgccgctgctgccgcttcacgatccgcgctcggtgctgcgcatgcctcacctctcgcgcctcgccgaacgggccgtggtgttcgactcggcgtactgcaacagcccgctctgcgcgccgtcgcgcttcaccctggtcagcggtcgcttgcctacccgcatcggcgcctgggacaacgccgccgacttcgccgccgatacccccacctacgctcactacctgcgcaacctcggctatcgcacggcgctgtcgggcaagatgcacttctgcggtcccgaccagttgcacggctacgaggaacgcctgaccagcgacatctatccggcggactatggctgggcggtgaactgggacgagccggaggtgcgcccgagctggtaccacaacatgtcctcggttttgcaggccggtccctgcgtgcgcaccaaccagctggacttcgacgaggaggtggtgttcaaggcccgccagtacctctacgaccatgttcgccagcacgccggccagccattctgcctgaccgtgtcgatgacccatccgcacgacccctacagcatcccggcgagctactggaatctctaccgcgacgaggacatcccgctgccgcgccagcgcttcgcccaggaggagcaggaccctcattcgcaacgcctgctgaaggtcatcgacctgtgggacaagccgttgcccgaggagcgcatccgcgccgcccggcgtgcctacttcggcgcctgcagctacgtcgacgcgcagatcggtgcgctgctggcgaccctggaggaatgcgggctggccgacgacaccatcgtggtgttctccggcgaccatggcgacatgctcggcgagcgcggcctctggtacaagatgcactggttcgagatggccgcgcgcgtgccgctgctggtccatgcgccggcgcgcttcgcgccgcgccgcatcggcgcttcggtatccaccgtggacctgctgccgaccctggtggagctggccggcggccaggtcgatccacgcctgccgctggaaggccgctcgctgctgccgcacctgcgcgacggcagcgggcatgacgaggtgatcggcgaatacaccgccgagggcaccctcagcccgctgatgatgatccgccgcggcgactacaagttcatctactccgagcaggacccctgcctgctctacgacctgcgcaacgacccgcaggagcgcgagaacctcgccgccagtccggcccatcgcggaacgttcgaggcgttcctcgacgaggcccggcgacgctgggacatccccgcgatcacccgcgccgtactcgacagccagcgccgccgacgcctggtggccgccgcgctggcgcgagggcggctggccagttgggaccaccagccgtgggtcgacgccagccagcagtacatgcgcaaccatatcgacctggacgatctcgagcgccatgcgcgcttcccgcaaccctga

SEQ ID NO: 359567 - DNA, 924 bp, Pseudomonas aeruginosa
atgaaccggcttcccacctgcctgctggccgccaccctgttcctgggcagcgcctcgctatacgccgaagaccccgcctgtgcccgcgtcaggctggccgatccaggctggagcgatatcgcggtgaccaacgccaccgccgcgtttctcctggaaagcctcggctaccaggtgaagatcgataccctgtcggtgccgatcatctatggcggcctgcgcgacggccaggtggacgccttcctcggcggctggatgcccgcgcaccaggactatcacgacaagttcgtcgccagcggccaggtcgaacgcctcgctcgcaacctcgatggcacccgcttcaccctggcggtgccgcgctacgtctgggacgccggcgtacaccgcttcgaagacctcgccgcgcaagggcaacgcttcaaccgcaagctgtacgggatcggctccggcgcgccggccaatcagtcgatccagaagatgatcgacgccaaccagttcggcctcggcgactggaagctggtggagtccagcgagcaggcgatgctcgccgaactcggccgggccgagaagcgccagcgctggctggtgttcctcggctggacgccgcacccgatgaacatccgccatgacctgcgctacctggaaggcggcgagcagtacttcggcgaccgcggccaggtctacaccctggcacgcaagggctacgccgcgcagtgcccgaacccggcgcggctgctggccaacctgcgcttcgacctggacatggagaaccgcctgatgagcgacgcgctggaaggcacggcgactccggcctcggcgacccgcgcctggctcaaggccaacccgcgggtgctcgaggcctggctgcaaggggtgaccagccgcgacggcggcgacgccctggccgcggttcgcggccagccatag

SEQ ID NO: 359568 - DNA, 1554 bp, Pseudomonas aeruginosa
atgtggacgcgcttgctgccgttcctcgcctggctaccggggctgcaccggggcatgctcgggcgcgaggcctgggtcggcctgaatggcgcaatcctggcactgccgcaatcgatggcctatgcgctgatcgccggcctgccagcggagtacggcctgtacgcggcgatgctgccagtggcgatcgcctgcctgtggggctcgtcgcgctacctggtgagcggtcccaccgcggcgatctcggtgctgctgttcagttcggtggccccgctggcgccgctgggcagcccgcaatacgtccaggccgtgctgctgctgacctttctcgccggcgccttccagtggctgctcggcgtcctgcgcgtcgggtcgctggtcaatttcgtctcgcattcggtgatgctcggcttcacccttggcgcggcgctgctgatcgtcctcggccaactgccctatcttctcggcctggccgcgagcggggagggcgcagcgccgggaaacggctggcggctgctggcgcggttcgccgagttcgatggcccatcgctgctggtgggcggcttcagcttcgcgctcagcctgctggtcaggcgcctgcgaccgcgctggccggccctgctgcttggcttgctgggcggtgccacgctggtctgggcgctacccgggaccttcgcctcggtagcccatgtgcaggccttatcgagtgcactgccgggttggaatccgctggtcttcgattcccgatcgatcctcgacctgctacctgcggcggtggcctgcggcatgctcgggctggtcaccagcctgtcgatcgcccgcgccctggccgcgcgccagggagacgcgttcgatgccaaccaggaggtccgcgcccagggtctgtcgaacctgctcgggccttggctgtcggcgagcctgtcggcgggttccttcacccgctccgggctcaatctggaagccggtgcgcgctccccgctggcgggtgcgttttcggcgctctgggtggccctgctggccgtgctcggtgcgcgcctgatcgaacatgtaccgttgccggcgatggccgcaggcatcctgctgatcgcctggggcctgatcgaccgcccggcgctccgcgcgctctaccgcagcggccgcgccgaatgcctggtggccggcctaaccgccctggccacgctgctgttgccgctgcagaacgccatctacgcgggagtgctggcgtcgctgttcttctacctgcggcgcacctcgacaccacgcgtactgcgccagcgcaacgacgaggaagaagtgctacgcatcgaaggctcgatcttcttcggcgcctgcgactacctgcaacgcctcatgcgccaatgcgacaggccacggctggtgctggacgcccgccaggtgaacttcatcgacttcgccggcgcagtgctgttgcagcaggaagcccgccgcctgcacgccgagggacgccgcctggtattgcgccacgctcgcccgcaggtccgcgaagcgctgggccggcaggccgacgaaggctgccgcctgcactacgaaggctga

SEQ ID NO: 359569 - DNA, 603 bp, Pseudomonas aeruginosa
gtgaagcgctggctcggcgttgccctcggctgcagcgggctggcgatcgccctggcctgcgccggcgtgttgctggcgcccgccgatatggccgcttcctcgtcttctccgccgccagccaggacggttgcggcgctgcccgcggtcgacgaccgtccgccgccgctggcgccggtacgatcgcaagcggtggcaccggcgtacgaggcggagccgccggcggcggaactggatcgcgagcaggcgatccagttcatgcagatgctgcgcgacgagggcgacccgcgcagcccgccgctcggcggcctgcaaccacgccagggcgcgacggcgcaggagctggccgatccgaagcagtaccaggccttcgaggaacgacagacccgcgaattggtacaggcctacaccagcggcgtacagcagatcccggaaatccgcgcgcggatcgaggcggccgaacagggtggcgagcgcagcgccgaggaaatcgacgaggctcgcgccgcccttggacagttggagatgatgcgcgacaagctgcagcgggaatcgccgcaactgctgcccggcgacagcgcaccgacatcgccggcggcgccctga

SEQ ID NO: 359570 - DNA, 1287 bp, Pseudomonas aeruginosa
atgcaccgactgctctctgatcgcgcccggggctggcgtcgcgcactgtgcgggatcgtcctcgggctgctggcgtggagcgcccatggcgtccccgccaaggcgccgcaggatctgcggatcgacggcgaggtgctgccggggaaaagcgtcgacctgctcgagcaggccctgtcgcgggtcaagttcaacaccgacccgcagcagttgcgccgcggcctggtggaaaaccgcctgctggcgcgcgcggtggaagaccagctcaccgcgcagagccgcgccgatctcgacgccagcgtggagatcgaggccggcaacctgctcgaacaggtatacggcaggcgctaccgcgaggacctcgggccatacctgcgccagccccgggccctgagcgcggagcgtttgcgcgaggtgctggcgccgaggagccgcggcctggtggaaaacagcctgctgctggatgagacgcagcgccgcgaggcggccggggtcgagctgatcggctggcagtttcccggccagccggcacaggtcctcgacctgctatcgctgtacgaaggcgacaacgtccagggccaggtggaattgcaacagggcaacctcgcctacctggcgcgccaggtccagacccgcatccgccgcgactacctctggtaccgcctggcccgggacggcttcggcccggcagagcggcagggcgtgaggaccctggtgcgggacaagctggtgcgccatcgctatctgcaccagatcggcctctacagtgatttccaccatgagtccgaggcgctgcgggaactcgccggcaaggtcagcgacaaggacgccgaggcctactatcggcgcaacctggagcgttaccgcaacgtcgcgcaggtgcaggcggcgcatatccgcctggccgaccaggcgagcgcggacaaggtctacgccgagttgcgcaacggcctggccttcgacgaggcggtacgccgctattccctggccgacgacagggaccgcgacccgcccggcgacctaggcctgatacggccccaggacggccggctcgacctgctgcgcaagactgcgctgatccagaaggccgatacggtttcccagccgatgcgcatcgacggcgcgttcgagatcgtccgggtgcgtagccgcgaggatcgccagttgcccctcgacgaccgcagcgtgcgcttcgaggtgaaccaggcggtggcgcgcgagcaactggcagcacagttcgagacgcgcctgcgcaatctgctggccggcgccagggtggaaggcctgtga

SEQ ID NO: 359571 - DNA, 987 bp, Pseudomonas aeruginosa
atgaaaaccttcgcccgcctggccgccggtctctgcatctgcgccatcgccagccaggccaacgcctggtcgcaaccgacccacaagaacatcgtcaaggacgccctggccttcatgaactcctcctacgccaccgaggagatgcgtcaggcctaccggttctacgtgagcgccgccggcagcgaggcgcaggccggggagatcctcggccaggcggccttcgatgtggacgacttcaaggacacccgtctcggtggctggtgggtcggctacgaacacgcgccgctgtggggcgcggcttcgggcatcgtcaactacacctcgtactggcacttcctcaacctggcccgcgacggcgactcccatggcaacccccacggcggctacgactaccgctaccacaaggtcgacggcggcatcgccgacgtcgactggtacgccatggtctatctctacaaccgcgagctgaagcgcgaggacttcgacaccaccgaggcgcactaccgccagggcacccgctcggactggcaggagcactacggcgacttccagaccgccgccttccagccgatcgacaacctcgccacctactggttcgagcagttccgcgccgcgccttcgctgcaaaccatcggctatgccctgcacgccaccggcgacgtggcccagccgcaccatgtgtggatcacctcggccaacggccattccagctgggaaggctgggtcgacgaccactacgccagcgagaagctcaacgacccggcggcggtggccaacctggtggggcgctacgatccgagcaagagcatccgcgacctgctcacccagaccggccaggtcgcctacgcacgtcccgaaccgctctacgacaccagctacgagacgcgcctgcgggtggcgaaggagctgattcccgagtccatcgccctgaccgtcaccgtactgaccaagggcgccaacagcttcgatgcaccgactgctctctga

SEQ ID NO: 359572 - DNA, 825 bp, Pseudomonas aeruginosa; identical to SEQ ID NO: 337884

SEQ ID NO: 359573 - DNA, 918 bp, Pseudomonas aeruginosa
gtgaccgaccgtatcgccgctgtcaaaacctacctgctcgacctgcaagaccgcatctgcgccgccctcgaggcggaggacggcaaggcccgcttcgccgaggacgcctgggagcgtccggccggtggcggcggacggacgcgggtaatcggcgacggcgcattgatcgagaagggcggagtgaatttttcccacgtcttcggcgatagcctgccgccctcggccagcgcccatcggccggaactggccgggcgcggtttccaggcgctcggcgtgtcgctggtgatccatccggaaaacccccatgtgccgacttcccatgccaacgtgcgtttcttctgcgccgagaaggaaggcgaggagccggtctggtggttcggcggcggcttcgacctgaccccctactacgcccacgaggaagactgcgtgcattggcaccgggtcgctcgcgacgcctgcgcgccattcggcgcggacgtctacccgcgctacaaggaatggtgcgaccgctacttccatctcaagcaccgcaacgagccgcgcggcatcggcggcctgttcttcgacgacctcaaccagtgggacttcgacacctgcttcgccttcatccgcgctatcggcgacgcctatatcgacgcctacctgccgatcgtccagcgccgcaagcacacgccgttcgatgaacggcagcgagagttccaggcctatcgtcgcggtcgctacgtggagttcaacctggtcttcgatcgtggcaccctgttcggcctgcagtccggcggccgtaccgaatcgatcctgatgtcgttgccgccgcaggtgcgctggggctatgactggaaacccgagccgggcagcgaggaagcgcgcctgaccgagtatttcctcgccgaccgcgattggctcgccggccagccctga

SEQ ID NO: 359574 - DNA, 978 bp, Pseudomonas aeruginosa
atggccaagcgcatccagttcgctgcctacggcggccccgaagtcctcgaataccgcgactaccaacccgccgagccgggcccccgggaagtccgcgtgcgtaatcgcgccatcggcctgaacttcatcgacacctactaccgtagcggcctctatccggcccccggcttcccttcggggctgggtagcgaaggcgccggcgaggtcgaggcggtgggcagcgaagtgacccgtttcaaggtcggcgaccgcgtcgcctacgccaccggcccgctgggcgcctacagcgaactgcatgtgctggcggaggagaagctggtccacctgcccgacggcatcgacttcgaacaggccgccgcggtgatgctcaaggggctcaccacccaatacctgctgcgccagacctacgaactgcggggcggcgaaaccattctcttccatgccgccgcgggcggcgtgggcctgttcgcctgccaatgggccaaggcccttggagtgcaactgatcggcaccgtcagctcgccggaaaagacgcgcctggccaggcagcacggtgcctgggagaccatcgactacagccacgagaacgtggcgcggcgggtgctcgaactgaccgacgggaagaagtgcccggtggtctacgactcggtgggcaaggatacctgggaaacctcgctggactgcgtggcgccgcgcggcttgctggtcagcttcggcaacgcctcggggccggtgaccggggtcaacctcggcatcctctcgcagaagggttcgctgtacgtgacccggccgaccctgggcagctacgccgataccccggaaaaactccaggcgatggccgacgagctgttcggcctgatcgagcgcggtgacatccgcatcgagatcaaccagcgcttcgccctggccgaagcagccagggcgcataccgaactggccgcacggcgaaccaccggctcgaccgtactgttgccctga

SEQ ID NO: 359575 - DNA, 558 bp, Pseudomonas aeruginosa; identical to SEQ ID NO: 337881

SEQ ID NO: 359576 - DNA, 1089 bp, Pseudomonas aeruginosa
atgaagaaccattctccagccgaactggaagcacggctgcgcctgcatggcctgcccgaactgggacccatgcgcttcctgcgcttgatcgaggccttcggttcggcctcttccgcgcttgccgcgccagccggcgcctggcgcaccctgggagtgcctgccgaggccgccgccgcgcggcgcagcccggcggtgcgggaagcggcgggtgaagccctgcgctggctggaaggtccgcgcaggcacctgctgatgtgggacgacccgggatacccggcactgctcgccgaagtcgccgatgccccgccgctgctgtacgtcgaaggcaccccggagactctggaacggccgcaactggcgatggtcggcagccgccgcgccagccccgccgggctgggcaccgcccggagctttgcgcgcagcctggcgcagggcggcttcgccatcaccagcgggctggccctgggaatcgatggcgccgcccacgagggcgcgctggaggttggcggcgcgaccgtggcagtcctcggcaccggcctgcgcaggctctatccgcggcgccacgaggcgctggcgcggcgcatcgtcgagggtggcggcgcgctggtctcggagctgccgctggacagtccgccgctgccggcaaactttccccggcgcaaccgcatcatcagcggactctcgctgggtgtgctggtggtcgaggcaagtcccgccagcggctcgctgatcaccgcgcggctggcggcggaacagggtcgcgaggtgtacgccattccgggttccatccaccatcccggcgcacgtggctgccaccaactgattcgcgatggcgcgctgctggtggaaagcgtcgggcacgtgctcgaagcactgcgcggctgggcgcaggcggagccagcggaagcgccggcgcagcccctgccccaccctttgctggcgctgctgcgcgccgcgccctacaccagcgaaggcctggctgccgccagcggcatgacgctgcccgacgtgctggcgacgctcagcgaactggaactcgacggccgggtcgcctgcgaggccggcacctgggtgcatcgctccggctga

SEQ ID NO: 359577 - DNA, 1026 bp, Pseudomonas aeruginosa
atgaggaaatcactagtcgcccttctgctccttgccgcgagcggtctggcgcaggcccaggtcgacctcagggaagggcatccggaccgctacacggtggtcaggggcgataccctgtgggacatctcggggaaattcctccgccagccatggaagtggccggaactctggcacgccaacccgcagatccagaatccccacctgatctaccccggcgacaccctcagcctggtctacgtcgatggccagccgcgcctggtgttgaaccgtggcgaatcgcgcgggaccatcaagctgtcgccgaagatccgcagcacgccgatcgccgaggccatcccgaccatcccgctggacaagatcaacagcttcctgctggccaaccgcatcgtcgatgacgagaagaccttcaccagcgcgccgtacatcgttgccggcaacgccgagcggatcgtcagcggcaccggtgaccgcatctatgcccgcggcaagttcgccgacggccagccggcctatggcatcttccgccagggcaaggtctacatcgatccgaagaccaaggaagtcctcggcatcaacgccgacgacatcggcggcggcgaggtggtggccaccgaaggcgacgtcgcgaccctggcgctgacccgcaccacccaggaagtgcgcctgggcgaccgcctgttccccaccgaggagcgtgcggtgaattccaccttcatgcccggcgagccgagccgcgaggtgaagggcgaaatcatcgacgtaccgcgcggcgtgacccagatcggccagttcgacgtggtcaccctgaaccgtggccagcgcgacgggctggccgagggcaacgtgctggcgatctacaaggtcggcgagacggtgcgcgaccgcgttaccggtgagtcggtgaagattcccgacgaacgcgccggcctgctgatggtgttccgtacctacaagaagctgagctacgccctggttctgatggccagcaggccgctctcggtaaccgacagggtgcagaatccctga

SEQ ID NO: 359578 - DNA, 507 bp, Pseudomonas aeruginosa
atggccatcctgaacattctcgaattccccgatccgcgcctgcggaccatcgccaaaccggtggaggtggtcgacgacgcggtgcgccagctgatcgacgacatgttcgaaaccatgtacgaagccccgggcatcggcctcgccgcgacccaggtgaacgtgcacaagcgcatcgtggtcatggacctcagcgaagacaagtccgagccgagggtattcatcaaccccgagttcgaaccgctgaccgaggaaatggaccagtaccaggaaggctgcctgtcggtacccggcttctacgagaacgtggaccgaccgcagaaggtccggatcaaggccctcgaccgcgacggcaaccccttcgaggaggtcgccgaaggcctgctggcggtatgcatccagcacgaatgcgaccacctcaacggcaagctgttcgtcgactacctgtccaccctcaagcgcgaccgcatccgcaagaagctggaaaagcagcatcgacagcaggcgtga

SEQ ID NO: 359579 - DNA, 945 bp, Pseudomonas aeruginosa
atgagccaagcattgcgcatcgtcttcgccggaaccccggaattcgccgccgagcatctcaaggccctgctcgacaccccacatcggatcgtcgccgtctacacccagcccgaccggccggccggccgcgggcagaaactgatgcccagcgcggtgaagagcctggccctggagcatggcctaccggtcatgcagccgcagagcctgcgcaatgccgaggcccaggcggagctggcggcgctgcgcgcggacctgatggtggtggtcgcctatggcctgatcctgccccaggcggtactcgatatcccgcgcctgggctgcatcaacagccacgcctcgctgctgccgcgctggcgcggcgccgcgccgatccagcgcgcggtggaagccggcgacgcggagagcggcgtcaccgtgatgcagatggaagcagggctcgacaccggcccgatgctgctcaaggtgagcacgccgatttccgccgcggacaccggcggcagcctgcacgaccggctcgccgcgctcggcccgaaagcggtggtcgaagccatcgccggcctggccgccggcaccctgcatggcgaggtccaggacgacgccctggccacctacgcgcacaagctgaacaaggacgaggcacgcctcgcctggagccgtccggccgtcgaactggagcgccaggtccgcgccttcaccccctggccggtctgccacaccagcctcgccgatgcgccgctgaaagtcctcggtgccagcctggggcagggcagcggggcgcccggaaccatcctcgaggccagccgcgacggcctgctggtcgcctgcggcgaaggcgccctgcgcctgacccgcctgcaagtgccgggtggcaagccactggccttcgccgacctctacaacagccgtcgcgagcaattcgccaccggccaggtgctcggccaatga

SEQ ID NO: 359580 - DNA, 1305 bp, Pseudomonas aeruginosa
atgaacccgcgtctcgccgcctgccaggcactggccgcggtgctcgccggacgcgcctcgctgtctggcgcgttgccgccgcaactggacaaggtcgccccgcgcgatcgcggcctgacccaggagctggccttcggcgcggcgcgctggcaaccgcgcctgcaggccctggccgcgcgcctgttgcagaagccgttcaaggccgccgacaccgatatccacgccctgctgctgatcggcctctaccagttgctctacacgcggattccgccgcacgccgcgatcggcgagaccgtcggctgcgccgacaagctgaagaagggctgggccaagggcgtgctcaacgccgtgctgcgccgcgcgcagcgcgaaggcgagacgctgctggccgaggtcgaccgcgatccctcggcgcgcctgggccatccgcgctggctgctgaaagcgctcaagcaggcctggccggagcaactcgacacgctctgcgcggcgaacaacgcacacccgccgatgaccttgcgggtcaatcggcgccacggcgagcgcgatgcctacctggccgaactcgccgaagccgggatcgaggcccgcgcctgcgactacagccgcgacggcatccagctcgccgcgccgcgcgacgtacgcgaactaccgggcttcgcggagggccgcgtcagcgtccaggacgaagccgcgcaactggccgccgagctgctcgaaagcgcgcccggccagcgtgtcctcgacgcctgctgtgcgcctggcggcaagacctgccacctgctggaaacccagccgggactggccgaagtggtcgccgtcgacctcgaggagagccgcctggtaagggttcgggaaaacctccagcggctcggcctgcaagccagcctggtcgccgccgacgccagggccaccggggagtggtgggacggcaagccgttccagcgcatcctcctcgacgcgccgtgctcggccaccggggtgatccgccgccacccggacatcaagctggcgcgcaagccggaagacatcgccgccctggcgcacctgcaaggtgaattgctcgacgcactgtggcctaccctggaagtcggcggcgtgctgctctatgccacctgttcggtgatgccggcggaaaacagcgacagcatcgccgccttccttgcccgtacgcccggcgcccgcgaactggaccttcccggcccctggggcatgaaacagccccacggccgccagttgttgccgcaggtggaaggccacgatggcttctactatgccaagctgatcaagatatccgcccgttga

SEQ ID NO: 359581 - DNA, 1374 bp, Pseudomonas aeruginosa
atgaaaatcatcatcctaggtgccggccaggtcggcggcacactggccgagcacctggccagcgaagccaacgacatcaccgtggtcgacaccgacggcgaccgcctgcgcgacctcggcgaccgcctcgacatccgcaccgtgcaaggcaaggcctcgttccccacggtgctgcgccaggccggcgccgacgacgccgacatgctggtggcggtgaccaatagcgacgagaccaacatggtcgcctgccaggtcgcctacaccctgttcaacaccccgaccaagatcgcccgcgtccgcgagccggcctacctgacccgtaccggcctgttcgacaacgaggcgatcccggtggacgtgctgatcagtccggagcaggttgtcaccaactacatcaagcgcctgatcgaacatcccggcgcgttgcaggtgatcgacttcgccgaaggcaaggcgcaactggtcgggatcaaggcctactacggcggccctctggtagggcaggagctgcgccagttgcgcgagcacatgccgaacgtggatacccgcgtcgccgcgatctaccgccgcaaccggccgatcattccccagggcgacacggtgatcgaggccgacgacgaagtcttcttcatcgccgccaaggcccatatccgcgcggtaatgggcgagatgcgcaggctcgacgacagctacaagcggatcatcatcgccggcggcggcaatgtcggcgagcgcctggccgaggccatcgagagccgctaccaggtgaagatcatcgagcgcagcccgctgcgctgccggcacctctcggataccctggacagcaccatcgtgctcaacggcagcgcttccgaccgcgacctgctgctggaggagaacatcggcgagaccgacgtgttcctcgccctgaccaacgacgacgaggccaacatcatgtcctcgctgctggccaagcggctcggcgcgagcaaggtgatgaccctgatcaacaacccggcctatgtcgacctggtgcaaggcggcgagatcgacatcgccatcagcccgcaactggcgaccatcggcaccctgttggcccacgttcgccgcggcgacatcgagagcgtacactcgctgcgccgcggcgcagccgaagcgatcgaggtggtggcccatggcgacgccaagtcgagcaaggtgatcggtcgctcgatcaacgagatcaagctgccgccgggcaccaccatcggcgcgctggtgcgcgacgaggaagtgctgatcgcccacggcgacacccacatcgagagcggcgaccacgtgctgctgttcctggtcgacaagaaatacatccgcgacgtcgagcgactgttccaggccggcctgacgttcttctga

SEQ ID NO: 359582 - DNA, 318 bp, Pseudomonas aeruginosa
atgatgatcgaaggtctggaaaagatgctggccaaaggcgtggacaatgcgctgctgcgcttcggcctgggcaagggctacctggacgcgggcgacgccgaacgcgcgacggaacacctccagcgttgcgtagagcaggacccgaaatattccgcaggctggaaactgctgggcaaggcgcgccaggctgccggcgatctcgcgggcgcccggcaggcctgggagcaaggcctggcagctgccgcgacgcatggcgacaagcaggccgaaaaggaaatgacggtgttcctgcgcaagctcgacagggcgagaacctga

SEQ ID NO: 359583 - DNA, 273 bp, Pseudomonas aeruginosa
atgtcgaagcaagagcgttcagtcccatcctatgtcgaatacccatacgagcaagcgatcctctacgttcaccggaacgcctctgccaatgagttgctcgaatccgtacaggagcgcctgagggctctcctcggtctcctccaggccttggaaaggatcgaagtgcggacagggcagggcgttcccattcagcgcgtggcgcacatcctggtcacgctcggcggcgatgccctgacgctgctcacggccgcgcaccgggctaccacctcctaa

SEQ ID NO: 359584 - DNA, 654 bp, Pseudomonas aeruginosa
atgtcagcttcttctccggcggcctggcgcggcaccctggccggcctgatcgccttccacatcttcatcatcatcgccagcaactacctggtgcagttgccgatcaccctgtttggctggcacaccacctggggtgccttcagctttccgttcatcttcctggctaccgacctcaccgtgcgcttgctgggcaagggccctgcccggctggtcatcgcccgggtcatgatcccggcgttgatcgcctcctacgtggtctcggtgttgttccaggaagcggcgttccgtggtttctccgcgctgctggagttcaacatcttcgtcgcacggatatccctggcaagcttcctcgcctatgtgctcgggcagatcctcgacatccaggtattcgaccgcctccgtcgttcccggcactggtggaccgcgccagtcgcctcgaccatcctcggcaacctgctggacaccttcaccttcttcttcgtggcgttctggcgcagcgacaatccgttcatggcgcagcactggctggaaatcgccacggtggactacggagtgaagctgagtatcagtcttctgctgttcgtgccgctctacggcatgctactcaacggcatcctgaagatgctgccggggcggccgcagagcaacccttga

SEQ ID NO: 359585 - DNA, 267 bp, Pseudomonas aeruginosa
atggataatcaacgacaatacccacgaaccccgctcaagtgccgaatccgtatcagtcacccgttatttggcgagctgatggcgcagacacgcgacctctccgacaccggggtctatgtcaaacacccggagctgacccagctcccaacaggcagtgtcgttactggccaggtacaggatctgccgatcgacgcgccgatcctgcagatggaagtcgtgcgagtcgatgcggaaggcgtcggcctgcgctttctcagcgaagcctga

SEQ ID NO: 359586 - DNA, 888 bp, Pseudomonas aeruginosa
gtggagaaattcaaaggtgccctggtggtgggggccctacgcctgttcgcgctattgccctggcgtgccgtgcaaggcgtcggggccggcataggctggctgatgtggaaattgccgaatcgatcccgcgaggtagtgcggatcaacctgtccaagtgcttccccgagttgtccgaaaccgaactggaaaagctggtcggacaaagcctgatggatattggccgtaccctcaccgaaagtgcctgtgcctggatctggccgcctgaaaagtcgctgaggtacatccgcgaggtcgaaggcatggaggtgctggaggaagcgctggcttccggcgatggcctggtcggcattaccagtcacctgggaaactgggaagtactcaaccacttctattgctcttacgccaagccgatcatcttctatcgtccgcccaagctgaaggcagtggacgagttgctgaagaagcaacgcgtgcaattgggcaatcgcgtcgcaccttccactccggagggtatcctcagtgtcatcaaggaagtgaagaaaggcggttgcgtagggattcccgccgaccccgagcccgcgcgtaccgctgggctcttcgtgccctacctgggcaccactgcattgatcagcaagttcgtcccgcagttgctttcacgcggcaaggcgcgtggagtgttcttccatgcggtgcgcctgcccgatggtagcggttacaaggtgatcctcgaagcggctccggcggacatgtacgacaaggacctggaagtgtctgtagcagccatgagccgcgagttggcgaagtatgtacgagcctatcccagccagtacatgtggagcatgaagcgcttcaagaaccgcccggatggcgagaaaaaatggtactga

SEQ ID NO: 359587 - DNA, 552 bp, Pseudomonas aeruginosa
atgccacgctgcttctggtgcaacgacgatcctctctacatggcctaccacgacgaggagtggggtgtgccgcagcgcgatcccgacgcgctgttcgaacttctgctgctggagggcttccaggccgggttgtcctggatcaccgtgctgaagaagcgcgagcgctaccgccaggtgctgttcggcttcgatgtgcagcgagtggcacagatgagcgacgcggagatcgacgaactgatgctcgaccccggcatcattcgcaatcgggccaagctcaacgctgcgcggcagaacgcccaggcctggctggagctggatgacccggctgggttcctctggtccttcgtcggcggccagccgaagatcaaccatttcgctggtcgtgccgaggtgccggcgattaccccggaagccgaggccatgagcaaggcgctgcgcaaggccggcttcaacttcgtcgggccgaccatctgctacgccttcatgcaggccagcggcatggtcatggaccatacccaggactgcgaccgttacgcccaactcgtcggctag

SEQ ID NO: 359588 - DNA, 948 bp, Pseudomonas aeruginosa
gtgagccagactacgcccgccgtgcgcaccttccaagacctgattctcgccctgcagaactactgggccgagcagggctgcgtggtgctgcagccctacgacatggaagtgggcgccggcaccttccacaccgccaccttcctccgcgccatcggcccggagacctggaacgccgcctacgtccagccgagccgccgccccaccgacggccgctacggcgagaaccccaaccgcctgcagcactactaccagtttcaggtggtcctgaagccgaacccggagaacttccaggagctgtacctcggctcgctgaaagccatcggcatcgacccgctggtccacgacatccgcttcgtcgaggacaactgggaatcgccgaccctcggcgcctggggcctgggttgggaaatctggctgaacggcatggaagtcacccagttcacctacttccagcaggtcggcggcatcgagtgctatccggtcaccggcgagatcacctacggcctggagcgcctggccatgtacctgcaaggcgttgattcggtctacgacctggtctggaccgacggcccgttcggcaaggtcacctatggcgacgtgttccaccagaacgaggtggagcaatccaccttcaacttcgagcacgccaacgtgccgaagctgttcgaactgttcgacttctacgaaagcgaagccaaccgcctgatcgcgctggagctgccgttgccgacctacgagatggtcctcaaggcttcgcataccttcaacctgctggatgcgcggcgcgccatctcggtcaccgagcgccagcgctacatccttcgcgtgcgtaccctggcccgtgccgtggcgcagagctacctgcaggcccgcgcgcgcctcggcttccccatggccacccccgaattgcgtgacgaagtactggccaagctgaaggaggccgaatga

SEQ ID NO: 359589 - DNA, 2058 bp, Pseudomonas aeruginosa
atgatgagcgccaaggatttcctggtcgaactgggcaccgaagagctgccgccaaaagccctcaacagcctcggcgaagccttcctcagcggtatcgagaagggcctcaaggctgccggtctcggctacgccgctgcgcgtttctatgcggcgccgcgccgtctcgccgtgctggtcgagcaactcgccgtgcagcagcccgaccgtaccgtcaacctagacggtccgccgctacaggccgccttcgacgccagcggtaacccgacccaggccgccctgggcttcgccaagaagtgcggcgtggatctgcagcagatcgacaagagcggtccgaagctgcgcttcagccagaccatcgccggccaaccggccgccggcctgctgccgggcatcgtcgaggcctcgttgaacgaactgccgattcccaagcggatgcgctgggcagctcgtcgcgaggagttcgtgcgtccgacccaatggctggtgatgctgttcggcgacgacgtggtcgagtgcgagatcctcgcccagaaagccgggcgcgaatcccgtggccaccgcttccacaatccggacaatgtgcgtatttccagcccggcagcgtacctggaagacctgcgcggcgctcatgtgctggccgatttcgccgagcgccgcgagctgatcgccaagcgcgtggccgaactggccgccgagcaacaaggcagcgccatcgtgccgccgagcctgctcgacgaagtgactgcactggtcgagtggccggtgccgctggtctgctccttcgaggagcgcttcctcgaggtcccgcaggaagccctgatcaccaccatgcaggacaaccagaaatacttctgcctgctggacgccgacggcaagctgctgccgcgcttcatcaccgtcgccaacgtcgagagcaaggcgccggaaaacatcgtcagcggtaacgagaaggtggttcgcccgcgcctcaccgacgccgagttcttcttcaagcaggacaagaagcagccgctcgaaagcttcaacgagcgcctgcgcaacgtagtgttccaggcccagctcggcaccgtgttcgagaaggcccagcgcgtctccggcctggccgcctacatcgccgaacgtataggcggcaatgcgcagaacgccgcgcgcgccggcatcctgtccaagtgcgacctggcgaccgagatggtcggcgagttccccgagatgcagggcatcgccggctactactacgccacccacggcggcgaagcggaagacgtcgctctggccctcaacgagcagtacatgccgcgcggcgccggcgccgagctaccctcgaccctgaccggcgccgccgtggcggtggccgacaagctcgataccctggtcggtatcttcggcatcggcatgcttcccaccggcagcaaggacccctacgcgctgcgccgtgccgcgctgggcgtgctgcgcatcctcatcgagaagcagctcgacctggacctggtagccgcggtcaacgccgccgtcgagcaatacggcgacaaggtcaaggccgccggcctggccgagcaggtgctggacttcgtgttcgaccgcctgcgcgcgcgctacgaggacgaaggcgtggacgtggccgtgtaccagtcggtgcgcgcactcaagccaagctcgccgctggacttcgaccagcgcgtacaggccgtccaggccttccgccagttgcctgaagccgaggccctggccgcggcgaacaaacgggtgtcgaatattctcgccaagtccgaggacgaggttccgccgaacgtggatgccagcctgctggtggaagccgccgagaaggccctgggcaacgccgtggcgaacgccgaaagcgaagtcgcgccgctggcagcggcacgcgactatcgcgccgcgctggcccgcctggcggccttgcgcgagccggtggatacgttcttcgccgatgtgatggtcaatgtcgacgacgcggcggtacgcgccaaccgctatgcgctgctggccaagctgcgcgggtcgttcctcggggtggcggacatctccctgctcggctga

SEQ ID NO: 359590 - DNA, 1707 bp, Pseudomonas aeruginosa
gtgaaacgcctgaaaaagacactgcacctttcaagcttgtccctcgcttccctggcactttcttccaccgccctggcggccgctccggtcatgctcgaccagggcaaggaatggaccgaaagccaccgccaggacttctacagccgcgaccaaggctcgcaggtgatgcccctgccctggctcaaggcgttgcgacagccggatggaacgcctttcctcgccgacagcctggcccgctacggctatttgcccaatcccaaggcgcccgcggaaggcctgccggtgggcttcaccgtagccggcacgggcgcccggcagatggtcggcatgacctgttcggcctgccatacccggcagatcgaggtgaagggcacggcctatcggatcgacggcggtccggcgatcgtcgacttccaggcattcctcgccgacctcgatcgggccgtgggaccgctgaccagcgatgacgccgccttcgacgccttcgccaagcagatcctcggggccaatccgcctcccggtgcgcgcgacggcctgctcgcggcggtgaaggaatggtacgagccctatcacacgctgatcgagcgcgcgctgcccaaggacacctggggaccggcgcggctggacgcggtatcgatgatcttcaaccgccttaccgggctggatatcggcaccgcgccgccctatctgattcccgacaacatcaaggcggcggatgcgccggtgcgctacccgttcctgtggaacgcggcgcggcagaacaagacccagtggcccggcttcgccgccaacggcaacgacctgctcggcctggcgcgcaatgtcggcgaggtctacggggtattcgccaccttccacccgcagaagagcaagttccacctgctgggcatggactacctgaaggtcaactcggccaacttccacgggttgggcaagctggaggagctgatcaagaagatcggcccgccgaagtggccctgggcggtggacaagcacctggccaggaaaggcgcgctgatcttcgcccgcaagaccgacgagggtggctgcgtggagtgccacggcatccggatcaaggacctggtgctttgggacactccgctgagggacgtcggcagcgacagccgccagcacgccatcctcgatggccaggtgcagaccggcgtgatggagggcgcgcggatgccgttcggccagccgctgaaggcgaccgacggagccttcgacgtactcgccgtagcggtggccggttcgatcctgcagcacttcgtgccgatcctcggtgagaagcacgatgccaaggcggcggcggtcaagccggaaagcgtgatgaccgacgaaacccggcaactgctgaccgccttccagaagccagtgcgtacccaggccgacccctacccctacgagtcgcgggtcctgcaggggatctgggcggcggcgccgtacctgcacaacggctcggtgccgaccctggaagagttgctgaagccggccgcggagcgggtggaatccttcccggtgggctcggcctacgacgtggacaaggtcggcctcgccgcccagcagacccaattcggcagctatgtgctgaagaccaccggctgcgagcagcgtgattccggcaacagccgctgcggccatgagtacggcaccagcctgtcggccgaggagaagcgcgcgctgctggagtatctgaaggtcctgtag

SEQ ID NO: 359591 - DNA, 537 bp, Pseudomonas aeruginosa
atgtcccgttccctgctgattctcgaccgcgatggagtcatcaacctcgactccgacgattacatcaagaccctcgacgagtggatccccatccccagctcgatcgaggccatcgcccgcctgagcaaggccggctggaccgtcgcggtggctaccaaccagtccggcatcgcccgtggctattacgacctggcggtgctcgaggccatgcatgcgcgcttgcgcgaactggtcgcggagcagggcggcgaggtcggcctcatcgtctattgtccgcatggaccggacgacggctgcgactgccgcaagccgaagccgggtatgctgcggcagatcggcgagcactacggggtcgatctgtcgggtatctggtttgtcggcgacagcatcggtgacctggaggcggcgcgggccgtcgattgtcagccggtgttggtaaagaccggaaaaggtgtacgtacgctgggcaagcccttgccagagggcaccctgatattcgacgatctggcggcagtcgccagcgcattacttcagtaa

SEQ ID NO: 359592 - DNA, 774 bp, Pseudomonas aeruginosa
atgtcgacagtgcaggccatcagaaccgtcctcttttacctgctgctgtccgccagcgcgttcgtctggggcaccctcagcttcttcatcgcgccgatcctgccgttccgcgcccgctaccgcttcgtggtacagaactggtgccgcttcgcgatctggctgacccgcgtggtcgccggcatccgctacgaggtacgcgggctggagaacatcccggaaaagccctgcgtgatcctctccaagcaccagagcacctgggaaaccttcttcctctccggcttcttcgagccactcagccaggtactaaagcgcgagctgctctacgtgccgttcttcggctgggccctggccctgctcaagcccatcgccatcgaccgcagccagcccaagctggccctcaagcaactggccaagcagggcgacgagtgcctgaagaaaggcgcctgggtgctgatcttcccggaaggcacgcgtattccggtggggcagatgggcaagttctcccgcggcggcaccgccctggcggtcaacgccgggctaccggtactgccgatcgcccacaacgccgggcaatattggcccaaggccggctgggcgaagtacccgggcaccatccaggtggtgatcggcccggagatgcacgccgaaggcgaaggcccgcgtgccatcgccgagctaaaccagcgcgccgaagcctgggtcagcgagaccatggccgagatcagccccctccagcagcgggtcagccatccggagccgtcggtggtctcgtaa

SEQ ID NO: 359593 - DNA, 2421 bp, Pseudomonas aeruginosa
atgagcgagaacaacacgtacgactcttccagcatcaaggtgctgaaggggctggatgccgtacgcaagcgccccggcatgtacatcggcgacaccgacgatggcaccggtctgcaccacatggtgttcgaggtggtggataactccatcgacgaagcgctggccggttactgcagcgaaatcagcatcaccatccatacggatgagtcgatcactgtccgcgacaatggacgcggtattccggtggatatccacaaggaagaaggggtttctgcggcggaagtgatcatgaccgtccttcatgccggcggcaagttcgacgacaacacctacaaggtgtccggcggcttgcacggtgtgggcgtctcggtggtgaacgcgctgtcccatgagctgcgcctgaccatccgtcgccacaacaaggtctgggaacaggtctaccaccacggcgttccgcagttcccactgcgcgaagtgggcgagaccgatggctccggtaccgaagttcacttcaagccgtccccggagaccttcagcaacatccacttcagttgggacatcctggccaagcgcatccgcgaactgtccttcctcaactccggcgtcggcatcctgctgcgcgacgagcgtaccggcaaggaggagctgttcaagtacgaaggcggtctgaaggccttcgtcgagtacctgaacaccaacaagaccgcggtgaacgaggtattccacttcaacgtccagcgtgaagaggacggcgtgggtgtggaagtcgccttgcagtggaacgacagcttcaacgagaacctgctctgcttcaccaacaacatcccgcagcgtgatggcggcacccacctggccggtttccgttcggcgctgacgcgtaacctgaacaactacatcgaggccgaaggcctggcgaagaaattcaagatcgccaccaccggcgacgatgcccgcgaaggcctcaccgcgatcatctcggtgaaggtaccggacccgaagttcagctcgcagaccaaggacaagctggtctcctccgaggtgaagaccgcggtggaacaggagatgggcaagtacttcgccgacttcctgctggagaatcccaacgaagccaaggccgtggtcggcaagatgatcgacgccgcccgtgcccgcgaggccgcgcgcaaggcgcgcgagatgacccgccgcaagggcgcgctggacatcgccggcctgcccggcaaactggccgattgccaggaaaaggacccggcgctctccgaactgtacatcgtggagggtgactccgcgggcggttccgccaagcagggccgcaatcgccggacccaggcgatcctgccgctcaagggcaagatcctcaacgtcgagaaggcacgcttcgacaagatgctctcctctcaggaggtcggtacgctgatcactgccctgggctgtggcatcggccgcgaggagtacaacatcgacaagctgcgctaccacaacatcatcatcatgaccgatgctgacgtcgacggttcgcacatccgcaccctgctgttgacctttttcttccgccagatgcccgagctgatcgagcgtggctacatctacatcgcccagccaccgttgtacaaggtcaagcgcggcaagcaggagcagtacatcaaggacgaccaggccatggaagagtacatgacccagtcggccctggaagacgccagtctgcacgtcaacgagcacgctccgggcctgtccgggacggcgctggagaaactggtcaacgagtatcgcggggtgatcgccaccctcaagcgcctgtcgcgcctgtacccccaggagctgaccgagcacttcatctacctgcctaccgtgtcggtggacgacctggctaacgagtcggccatgcagggctggttggagaagttccaggcgcgcctgaccgccgccgagaagtccggcctgacctacaaggccagcctgcgcgaagaccgcgagcgccacctgtggctgcccgaggtggaactggtggcccacggcctgtccagctacgtcaccttcaaccgtgacttcttcgccagcaatgactaccgctcggtgtcgctgctcggcgaccagctgaacagcctgctggaagacggcgcctacgtgcagaagggtgagcgcaagcgcccgatcagcgccttcaaggacggcctggactggctgatggccgaaggtaccaagcgccacagcatccagcgatacaaggggttgggcgagatgaaccctgagcagctgtgggaaaccaccatggatccgaacgtccggcgcatgctcaaggtgaccatcgaggacgccatcgccgccgaccagatcttcaacaccctgatgggcgatgccgtggagccgcgccgcgacttcatcgaaagcaacgcgctggcggtgtcgaacctggacgtgtga

SEQ ID NO: 359594 - DNA, 1110 bp, Pseudomonas aeruginosa
atgtccctgacccgcgtttcggtcaccgcggtgcgcaacctgcacccggtgaccctctccccctcccctcgcatcaacatcctctacggcgataatggcagcggcaagaccagcgtgctcgaagccatccacctgctgggcctggcgcgttcattccgcagtgcgcgcttgcagccggtgatccagtatgaggaagcggcctgcaccgtattcggccaggtgatgttggccaacggcatcgccagcaacctggggatttcccgtgagcgccagggcgagttcaccattcgcatcgatgggcagaacgcccggagtgcggctcaattggcggaaactctcccactgcaactgatcaacccggacagcttccggttgctcgagggcgcgccgaagatccggcgacagttcctcgattggggagtgttccacgtggaaccgcggtttctgcccgtctggcagcgcctgcagaaggcgctgcgccagcggaactcctggctccggcatggtaaactggaccccgcgtcgcaagcggcctgggaccgggaattgagcctggccagcgatgagatcgatgcctaccgcagaagctatatccaggcgttgaaaccggtattcgaggaaacactcgccgaattggtttcactggatgacctgacccttagctactaccgaggctgggacaaggaccgggacctcctggaggtcctggcttccagcctgttgcgcgaccagcagatgggccacacccaggcgggaccgcagcgtgcggatcttcgcatacggttggcaggtcataacgccgcggagattctctcgcgcggtcagcagaagctggtggtatgcgccctgcgcatcgcccaaggccatctgatcaatcgcgccaagcgcggacagtgcgtctacctggtggacgacctgccctcggaactggatgagcagcatcgaatggctctttgccgcttgcttgaagatttgggttgccaggtattcatcacctgcgtggacccgcaactattgaaagacggctggcgcacggatacgccggtatccatgttccacgtggaacatggaaaagtctctcagaccacgaccatcgggagtgaagcatga

SEQ ID NO: 359595 - DNA, 1104 bp, Pseudomonas aeruginosa
atgcatttcaccattcaacgcgaagccctgttgaaaccgctgcaactggtcgccggcgtcgtggaacgccgccagacattgccggttctctccaacgtcctgctggtggtcgaaggccagcaactgtcgctgactggcaccgacctcgaggtcgagctggttggtcgcgtggtactggaagatgccgccgaacccggcgagatcaccgtaccggcgcgcaagctgatggacatctgcaagagcctgccgaacgacgtgctgatcgacatccgtgtcgaagagcagaaactcctggtgaaggccgggcgtagccgcttcaccctgtccaccctgccggccaacgatttccccaccgtagaggaaggtcccggctcgctgaacttcagcattgcccagagcaagctgcggcgcctgatcgaccgcaccagcttcgccatggcccagcaggacgtgcgttactacctcaacggcatgctgctggaagtgaatggcggcaccctgcgctccgtcgccaccgacggccaccgactggccatgtgctcgctggatgcgcagatcccgtcgcaggaccgccaccaggtgatcgtgccgcgcaaaggcatcctcgaactggctcgtctgctcaccgagcaggacggcgaagtcggcatcgtcctgggccagcaccatatccgtgccaccactggcgaattcaccttcacttcgaagctggtggacggcaagttcccggactacgaacgcgtactgccgcgcggtggcgacaagctggtggtcggcgaccgccagcaactgcgcgaagccttcagccgtaccgcgatcctctccaacgagaagtaccgcggcattcgcctgcagctttccaacggtttgctgaaaatccaggcgaacaacccggagcaggaggaggccgaggaagaagtgcaggtcgagtacaacggcggcaacctcgagatcggcttcaacgtcagttacctgctcgacgtgctgggtgtgatcggtaccgagcaggtccgcttcatcctttccgattccaacagcagcgccctggtccacgaggccgacaatgacgattctgcctatgtcgtcatgccgatgcgcctctaa

SEQ ID NO: 359596 - DNA, 1545 bp, Pseudomonas aeruginosa
gtgtccgtggaactttggcagcagtgcgtggatcttctccgcgatgagctgccgtcccaacaattcaacacctggatccgtcccttgcaggtcgaagccgaaggcgacgaattgcgtgtgtatgcacccaaccgtttcgtcctcgattgggtgaacgagaaatacctcggtcggcttctggaactgctcggtgaacgcggcgagggtcagttgcccgcgctttccttattaataggcagcaagcgtagccgtacgccgcgcgccgccatcgtcccatcgcagacccacgtggctcccccgcctccggttgctccgccgccggcgccagtgcagccggtatcggccgcgcccgtggtggtgccacgtgaagagctgccgccagtgacgacggctcccagcgtgtcgagcgacccctacgaggcggaagaacccagcatcgatccgctggccgccgccatgccggccggagccgcgcctgcggtacgcaccgagcgcaacgtccaggtcgaaggcgcgctgaagcacaccagctatctcaaccgtaccttcaccttcgagaacttcgtcgagggcaagtccaaccagttggcccgtgccgccgcctggcaggtggcagacaacctcaagcacggctacaacccgctgttcctctacggtggcgtcggcctgggcaagacccacctgatgcatgcggtgggcaaccacctgctgaagaagaacccgaacgccaaggtggtctacctgcattcggaacgtttcgtcgcggacatggtgaaggccttgcagctcaacgccatcaacgaattcaagcgcttctaccgctcggtggacgcgctgctgatcgacgacatccagttcttcgcccgcaaggagcgctcccaggaagagttcttccacaccttcaacgcccttctcgaaggcggccagcaggtgatcctcaccagcgaccgctatccgaaggaaatcgaaggcctggaagagcggctgaagtcccgcttcggctggggcctgacggtggccgtcgagccgccggaactggaaacccgggtggcgatcctgatgaagaaggctgagcaggcgaagatcgagctgccgcacgatgcggccttcttcatcgcccagcgcatccgttccaacgtgcgtgaactggaaggtgcgctgaagcgggtgatcgcccactcgcacttcatgggtcggccgatcaccatcgagctgattcgcgagtcgctgaaggacctgttggcccttcaggacaagctggtcagcatcgacaacatccagcgcaccgtcgccgagtactacaagatcaagatatccgatctgttgtccaagcggcgttcgcgttcggtggcgcgcccgcgccaggtggccatggcgctctccaaggagctgaccaaccacagcctgccggagatcggcgtggccttcggcggtcgggatcacaccacggtgttgcacgcctgtcgtaagatcgctcaacttagggaatccgacgcggatatccgcgaggactacaagaacctgctgcgtaccctgacaacctga

SEQ ID NO: 359597 - DNA, 135 bp, Pseudomonas aeruginosa; identical to SEQ ID NO: 319214

SEQ ID NO: 359598 - DNA, 408 bp, Pseudomonas aeruginosa; identical to SEQ ID NO: 337858

SEQ ID NO: 359599 - DNA, 1737 bp, Pseudomonas aeruginosa
atggacattcaacgctcgattctcatcgtcgcccttgcagtcgtgtcctacctgctggttctccagtggaacaaggattacggtcagcctgagctgcccgccgccagcgcttcgatgaacaccacgcaaggcctgccggacactccgtccgcctcgggcaccagcagtgacgttcccactgcccagagcagcgcggccggcagcgaagccgccgacaagccggttgcggtcagcgacaagctgatccaggtgaagaccgacgtcctcgacctggccatcgatccccgtggcggcgatatcgtccagctcggcctgttgcagtatccgcgccgcctggaccgtccggacgtgccgttcccgctgttcgacaacggtcgcgaacgtacctacctggcgcagagcggcctcaccggtgccgacggcccggacgccagcagcgccggccgcccgctgttccacagtgcgcagagcagctaccagttggccgacggccagaacgaactggtcgtggacctgagcttcagccacgacggcgtcaactacatcaagcgcttcaccttccaccgtggcctgaaagccgattgctcggacaaggaaaaggcccagaagaagatcgagtgcatcaatgaaaacgcctatcaggtcggcgtcagctacctgatcgacaaccagagcggcaagacctggagcggcaacctgttcgcccagctcaagcgcgacggcagcgccgacccgtcctcgactaccgccaccggggtgtccacctacctcggcgccgcggtctggaccccggattcgccgtacaagaagatctccaccaaggacatggacaaggaacagttcaaggagtccgtgcagggtggctgggtcgcctggctgcaacattacttcgtgaccgcctgggttccgaccaggggcgagcagcaccaggtcatgacccgcaaggacggccagggcaactacatcgtcggtttcaccggcccgaccctgagcgttccggcgggtagcaaggtggaaaccgacctgaccctgtatgccggcccgaaactccagaagcacctgaaggaactctccccgggcctggaactgaccgtcgactacggtttcctctggttcatcgcccagccgatcttctggctgctgcaacatatccacagcctgatcggcaactggggctggtctatcatcgccctgaccgtcctgatcaagctggccttcttcccgttgtccgccgccagctaccgttcgatggcgcgcatgcgtgcggtgtcgccgaagatgcaggcgatcaaggaacagcacggcgacgatcggcagaagatgtcccaggcgatgatggagctgtacaagaaggagaagatcaatccgctgggcggctgcctgccgatcctggtccagatgccggtcttcctctccctctactgggtactcctggaaagcgtggaaatgcgccaggcgccgtggctcggctggatcaccgacctgtcggtgaaggatccgttcttcatcctgccgatcgtcatgggcggcaccatgctgatccagcagatgctcaacccgaccccgccggacccgatgcaggccaaggtgatgaagctgatgccgatcatcttcaccttcttcttcctctggttcccagccggtctggtgctgtactgggtagtcaacaactgcctgtcgatcgcacagcagtggtacattacccgcaagatcgaggcagccgcgaagaccgcctga

SEQ ID NO: 359600 - DNA, 1368 bp, Pseudomonas aeruginosa
atgcaagccgccaccgaaaccatcgtcgcgatcgctaccgcccagggccgcggcggcgtgggaatcgtccgcgtctccggacctctcgccggacagatggccgtggccgtgagcggacgccagctgaaagcccggcatgcgcattacggaccgttcctcgatgccggtgggcaggtgatcgacgaaggcctatcactgtatttccccggcccgaactcgttcaccggcgaagacgtactcgaactgcaggggcacggcggccccgtggtactcgacctgctggtgcagcgttgtctggaactgggtgcccgccaggcgcgaccgggcgagttcagcgagcgtgcgttcctcaacgataagctcgacctggcccaggccgaagccatcgccgatctgatcgaggccagctcggagcaggccgcgcgcaatgcattgcgttccctgcagggcgaattctcgcgccgggtacatgcattgaccgagcaactgatttccctgcgcatctatgtcgaagccgccatcgacttccccgaggaagaaatcgacttcctcgccgatggccatgtactggggcttctggaaaaagtacgcacagaattatccacagtgcagcgcgaagcttcccaaggcgccctgctgcgcgacggcatgaccgtggtcatcgccggacgaccgaatgccggcaagtccagcctgctgaatgccctggccggtcgcgaggcggccatcgtcacggacatagccggcaccacccgcgatgtactgcgcgaacatatccacatcgatggcatgcccctgcatgtggtggacaccgcaggcctgcgggataccgaggaccatgtagaaaagatcggcgtggaacgtgcgctgaaagccatcggcgaagccgatcgcgtgctgctggtggtggacgccaccgccccggaagcagcggacccgttttccctatggccggagtttctcgaccagcgaccggaaccgggcaaggtcaccctgatccgcaacaaggcggatttgtccacagagtccattggcctcgaggaaagcgcggacggccacgtcaccatcaccctctcggcgcgcaccggcgccggcctggagctgctgcgcgaacacctgaaggcctgcatgggcttcgaacagaccgcggaaagcggtttcagcgcccgccggcgccacttggaagcgctacgcctggcagggcaggcgctggagcatggccacagccaacttatccacaatggcgccggcgaactgctggccgaggatctgcgccaggcccagcagcacctgggcgaaatcaccggcgcattcacccccgacgacctgctgggtcgcatcttctcgagtttctgcatcggcaagtaa

SEQ ID NO: 359601 - DNA, 225 bp, Pseudomonas aeruginosa; identical to SEQ ID NO: 337855

SEQ ID NO: 359602 - DNA, 1893 bp, Pseudomonas aeruginosa
gtggatttccctacccgttttgacgtaatcgtgatcggcggtggccatgcaggcaccgaagccgcactcgcggctgcgcgcatgggtgtgaaaaccctgctgttgacccacaatgtggaaaccctggggcagatgagctgcaaccccgccatcggcggcatcggcaagagccatctggtcaaggaaatcgacgcccttggcggcgccatggccgaagccaccgacaagggcggtatccagttccgcatccttaacagccgcaaggggccggcagtgcgcgccactcgtgcacaagccgatcgcgtgctctataaggccgctatccgccatacactggaaaaccagccgaacctgtggatattccagcaggcctgcgacgacctgatcgtcgagcaggatcaggtccgcggcgtagtgacccagatgggactgcgcttccatgccgacaacgtggtcctgactaccggcaccttcctcggcggacttatccacatcggcctggagaactactcaggcggacgcgccggcgacccgccgtccatcgcactggcgcgtcgtctgcgtgaattgccgctgcgggtcggccggctgaagaccggtacgccgccgcggatcgacgggcgcagcgtggacttctcggtgatgaccgagcagccgggcgacacgccgatcccggtgatgtccttcctcggttcgaaggaacagcatcccgagcaggtcagttgctggatcacccataccaacgcccggacccacgagatcatcgccgccaatctcgatcgttcgccgatgtattccggtgtgatcgaaggcatcggcccgcgctactgcccttcgatcgaagacaagatccatcgcttcgccgataaggaaagccaccaggtcttcctcgagccggaaggcctgacgacccacgagctgtatcccaacggcatttccacgtccctgccgttcgacgtgcaactgcagatcgtgcgttccatccgtggcatggaaaacgcccacatcgtgcggccgggctatgcgatcgagtacgacttcttcgatccccgcgatctcaggtacagcctggagaccaaggtcatcggcggcctgttcttcgccggccagatcaacggcaccaccggctacgaggaagctggcgcccagggcctgctggccggcgccaatgctgcgttgcgttcgcaaggcaaggacagctggtgcccgcgccgcgacgaggcctacatcggcgtgctggtggacgacctgatcacgctcggcacccaggagccgtaccgcatgttcacctcgcgggcggaataccgcctgatcctccgcgaggacaacgccgacctgcgtctcaccgagaagggacgcgagctgggccttgtcgacgatcggcgctgggctgccttcgaagccaagcgcgaaggtatcgaacgcgaggaacagcggctgaagagcacctgggtgcggccgaataccccgcagggcgacgccatcgccgagcgcttcggtacgccgctgacccatgaatacaacctgctcaacctgctgagccgccccgagatcgattacgccggcctggtggagatcaccggcgacgctgtggataacccccaggtggccgagcaggtggagattcgcaccaagtacgccggctacatcgaccgccagcaggaggaaatcgcccggctgcgcgccagcgaagatacccgcctgcctgtggatatcgattacctggggatttccggcctgtcgaaggaaattcagaacaagctgaaccaggcccgtccggaaaccctcggacaggcttcgcgaatccccggcgtcacgccggctgcgatttcgctgttgttgatccacctgaagaagcgtgcctctggccgccaactggagcagagcgcttga

SEQ ID NO: 359603 - DNA, 645 bp, Pseudomonas aeruginosa
atgtctgcggtaacccaacaccacgccgacgaactcgcgcgcggtgctgacgagctaggcgtcgccctcgacgccgacaagcaacgccagctgctggcctacctggccctgctgatcaaatggaacaaggcctacaacctgaccgccgtacgcgacccggacgagatggtttcgcgccacctgctcgacagcctgagcatcgtgccttacgccgaggctggggataactggctggatgtcggcagcggcggcggcatgcccggcgtgccgctggccatcctgttcccggaaaagcgcctgaccctgctcgacagcaacggcaagaaaacccgcttcctgacccaggtgaagctcgagctgaagctggccaacctcgaagtcgtgcacagccgggtggaagccttccgtcccgagagccccttcgatggcatcgtttcccgcgctttcagcagcctggaggacttcgccaactggacccgccacctcggtggccaggaaacccgctggctggcgatgaagggcgtgcatccgaacgaagagctggcggcactcccggaggatttccgggtcgaagccgagcacgcgctggcggtacccggttgccaaggtcagcggcatctgctgatactgcggcgcacagcatga

SEQ ID NO: 359604 - DNA, 789 bp, Pseudomonas aeruginosa
atggctaaggtattcgcgatcgccaaccagaaaggcggtgtcggcaagaccacgacctgtatcaacctcgcggcctccctcgtggcgaccaagcgccgcgtcctcctgctggacctggatccccagggcaacgccaccaccggcagcggcatcgacaagcacaacctggagcactccatctacgacgtgctcaccggcgagtgtaacctcgccgaggccatgcagttctccgaacacggcggctaccagttgttgccggccaaccgcgacctgaccgccgcggaagtggtgctgctggaaatggacatgaaggaaaatcgcctgcgcaacgcgctggcgccgatccgcgagaactacgactacatcctcatcgactgcccgccgtcgctgtcgatgctcaccgtcaacgcgctgaccgccgccgacggcgtgatcatccccatgcagtgcgagtactacgcgctggaggggctgaccgacctgatgaacagcatccagcgcatcggccagttgctcaacccgacgctgaagatcgaggggctgttgcggaccatgtacgatccgcgcatcagcctgaccaacgatgtctccgcgcagttgcaggagcatttcggcgacaccctctacagcaccgtcatcccgcgtaacgtgcgcctcgccgaagcccccagcttcggcatgccggcgctggtttacgacaagcaatcccgcggcgccatcgcctacctggcgctggccggcgagctggtccgccgccagcgcgccaaaggccgcgccgcaaccgcataa

SEQ ID NO: 359605 - DNA, 873 bp, Pseudomonas aeruginosa
atggcagccaagaaacgtggactgggacgcgggctcgatgccctgctgggcggctcgagtcccgccaaactgcaggaagaagccgtacaggccgaccgccgcgagttgcagcagatccccctcgacctgatgcagcgcggcaagtaccagccgcgtcgcgacatggacccgcaggcgctggaggaactggcgcagtcgatcaaggcccagggcgtgatgcagcccatcgtggtgcggccgatcgccaatggccgctacgagatcatcgccggcgagcggcgctggcgggccagccagcaggccggactggaaaagatcccggcgctggtgcgcgacgtgccggacgaagcggccatcgccatggcgctgatcgagaacatccagcgcgaggacctcaacccgatcgaggaagccgctgccctgcagcgcttgcagcaggagttccagctgacccagcagcaggtcgcggaagcggtcggcaagtcgcgcgcgaccattaccaacctgctgcgcctgatcggcctgccggaagagatcaagaccctgctttcccatggcgacctggagatgggccacgcccgtgcgctcctcggtctgccggcagaacggcaggtggaaggggcgcgacatgttgtcgcacatgggctgaccgtacgtcagaccgaagccctggttcggcagtggacgcatgccccgggcaagcctgcgggaccggtcaagagcgacccggacatcgcccgcctggaacagcgcctggccgagcgcctgggcgcttcggtgcagatccggcatggtcagaagggcaagggacagctggtcatccgctacagctccctggatgaactgcagggcgttctcgcccacatccgttga

SEQ ID NO: 359606 - DNA, 381 bp, Pseudomonas aeruginosa
atgccaagtcgcctgccggcattcagattgctgctcgtccaactggtagtagtgcttgttgctgcgatctccctgtggatttcttggggaccggtagccggatattccgggctgctgggagggatgatcgcctggttgccgaattgttatttcgcctacaaggcgttccgtttcagcggagcgcgggctgcccgggaaatcgttcgctctttctatgcgggcgaagccgggaaactgattctgacggcggtgctcttcgcactggcgttcgcaggcgtgaagccactgatggcgccggctctgttcggtgtctatctgctgaccctgatggtcagctggtgcgcacccctgctgatgggaaaaacatttacaagaccttag

SEQ ID NO: 359607 - DNA, 870 bp, Pseudomonas aeruginosa
atggcagcagaaaccgcttcgggttacatccagcaccacttgcagaacctgaccttcgggcgtctgcctaatggtgattgggggttcgcccacaccgccgagcaagccaaggaaatgggcttctgggcattccacgtagacaccctgggctggtcggtactgctcggcgtggtgttcctgttcatcttccgcctggcagccaagaaggccaccagcggccagccgggtggactgcagaacttcgtcgaggtgatggtcgagttcgtcgacaccagcgtcaaggacaccttccacgggcgcaacccgttgatcgcgcccctggccctgaccgtgttcgtctggatcttcctgctcaacctgatcgacctggtaccggtggactacctgccgatgctggccgcgaagatcaccggcgacgagcacctgttcttccgcgcggtggccaccaccgacccgaatgccaccctcggcctgtcgatctcggtgttcgccctgatcatcttctacagcatcaaggtcaagggcatcggcggcttcctcggtgaactgaccctgcaccccttcagcagcaagaacatcgtcgttcagatcctgctgattccggtgaacttcctgctcgagttcgtgaccctgatcgccaagccggtttcgctggcgctgcgtctgttcggcaacatgtatgccggcgaactgatcttcattctgatcgccgtcatgttcggtagcggaatgttcctgctgagtgccctgggcgtagccctgaactgggcgtgggctgtgttccacatcctgatcatcaccctgcaggccttcatcttcatgatgctgaccatcgtctacctgtcgatggcgcacgaagacaaccattaa

SEQ ID NO: 359608 - DNA, 258 bp, Pseudomonas aeruginosa; identical to SEQ ID NO: 319225

SEQ ID NO: 359609 - DNA, 471 bp, Pseudomonas aeruginosa; identical to SEQ ID NO: 337847

SEQ ID NO: 359610 - DNA, 537 bp, Pseudomonas aeruginosa; identical to SEQ ID NO: 319227

SEQ ID NO: 359611 - DNA, 1545 bp, Pseudomonas aeruginosa
atgcagcaactcaatccttccgaaattagtgaaatcatcaaggggcgcatcgagaaactcgacgtcgcctcccaagcacgaaacgaaggcaccatcgtcagcgtgtccgacggtatcgtgcgcatctacggtctggccgacgtcatgtacggcgagatgatcgagttcccgggcggcgtctacggtatggcgctgaacctggagcaggattccgtgggtgccgtggtcctgggtgaataccagggcctcgccgaaggcatgaacgccaagtgcaccgggcgcatcctggaggttccggtcggtccggaactgctgggtcgcgtagtcgacgcactgggcaatccgatcgacggcaaaggcccgatcgacgccaaggccaccgacgcggtcgagaaggtcgctccgggcgtgatctggcgtaagtcggtagaccagccggtacagaccggctacaagtcggtcgacgccatgatcccggtaggccgtggccagcgcgagctgatcatcggcgaccgccagatcggcaagaccgccctcgcggtcgacgccatcatcaaccagaaagacagcggcattaagtgcgtctacgtggccatcggccagaagcagtccactatcgccaacgtcgtacgcaagctggaagagaacggcgccctggccaacaccatcgtggtcgccgccagcgcttccgagtccgccgccctgcaatacctggcgccgtactccggttgcaccatgggcgaatacttccgtgatcgcggtgaagacgccctgatcgtctacgacgacctgtccaagcaggccgtggcttatcgccagatctccctgctgctgcgccgtccgccgggccgcgaagcctacccgggcgacgtgttctatctccacagccgtctgctggagcgcgcttcccgcgtttccgaagagtatgtcgagaagttcaccaacggcgccgtgaccggcaagaccggctcgctgaccgcgctgccgatcatcgagacccaggccggcgacgtttccgcgttcgttccgaccaacgtgatctcgatcaccgacggccagatcttcctggaatccgccatgttcaactcgggtatccgtccggccgtcaacgccggtatctcggtatcccgcgtaggtggcgcggcccagaccaagatcatcaagaagctgtccggcggcattcgtaccgctctggcccagtaccgtgaactggcggccttcgcccagttcgcctcggacctggacgaagcgacccgcaagcagctggagcatggtcagcgcgttaccgagctgatgaagcagaagcagtacgcgccgatgtcgatcgccgagatgtcgctgtccctgtatgccgccgagcgtggcttcctgcaggacgtcgaaatcgccaaggttggtagcttcgagcaggcgttgatctcctacttccagcgcgagcatgccgctctgctggcgaagatcaacgagaaaggtgacttcaacgacgaaatcgacgcgggcatcaaggccggcatcgagaagttcaaggccacccaaacctggtaa

SEQ ID NO: 359612 - DNA, 861 bp, Pseudomonas aeruginosa; identical to SEQ ID NO: 319229

SEQ ID NO: 359613 - DNA, 1377 bp, Pseudomonas aeruginosa
atgagtagcggacgtatcgttcaaatcatcggcgccgtgatcgacgtggaattcccgcgcgatgccgtgccgagcatctatgaagccctgaaggttcagggcgttgaaaccaccctggaagtccagcagcagctgggcgacggcgtggttcgttccattgcgatgggttccaccgaaggcctcaagcgtggcctgaacgtggacagcactggtgctgccatctccgtgccggtcggtaaagcgaccctgggccggatcatggacgtactgggcaacccgatcgacgaagccggccccatcggcgaagaagagcgctggggcatccaccgcgaagctccgtcctatgccgaccaggctggcggcaacgagctgctggaaaccggcatcaaggtgatcgacctggtctgcccgttcgccaagggcggcaaggtaggcctgttcggcggcgccggcgtgggcaagaccgtcaacatgatggaactgatccgtaacatcgccatcgagcacagcggttattccgtgttcgcgggtgtgggcgagcgtactcgtgagggtaacgacttctaccacgagatgaaggactccaacgtactggacaaggtagccctggtatacggccagatgaacgagccgccgggcaaccgtctgcgcgtcgcactgaccggcctgaccatggccgagaagttccgtgacgaaggccgtgacgttctgttgttcatcgacaacatctaccgttacaccctcgccggtaccgaagtgtccgcactgctgggccgtatgccgtccgcggtgggttatcagccgaccctggccgaagagatgggcgttctgcaggagcgcatcacctccaccaagaaaggctcgatcacctcgatccaggccgtatacgttcccgcggacgacctcaccgacccgtccccggcgaccaccttcgcccacctggacgcgaccgtcgtactgtcccgtgacatcgcctcgctgggtatctaccccgcggtcgacccgctggactcgacctcccgtcagctcgatccgctggtgatcggccaggatcactacgacaccgctcgcggcgtccagtatgttctgcagcgctacaaggagctgaaggacatcatcgcgatcctgggcatggacgaactgtccgaagccgacaagctgttggtggcgcgcgctcgtaagatccagcgcttcctgtcccagccgttcttcgtagcggaagtcttcaccggctcgccgggcaagtacgtttccctgaaggacaccatcgctggcttcaagggcattctcaacggcgactacgatcacctgccggagcaggcgttctacatggtcggcggtatcgaagaagcggtcgagaaagccaaaaaactgtaa

SEQ ID NO: 359614 - DNA, 426 bp, Pseudomonas aeruginosa
atggccataacagtccattgcgacatcgtcagcgccgaggcggagattttctccggcctggtcgagatggttatcgcgcacggcgctctgggtgacctgggtatcgccccgggccacgcgccgctgatcaccgacctgaaaccgggccccatccgcctggtcaagcagggcggcgagcaggaggtgtactacatctccggcggtttcctcgaagtccagccgaacatggtcaaggtcctcgccgacaccgtggttcgtgccggcgacctcgacgaagcggccgcccaggaagccctgaaggctgccgaaaaggcgctgcagggcaagggcgccgagttcgactacagcgccgctgccgcgcgtctggccgaagccgcagcccagctgcgcaccgtccagcaactgcgcaagaagttcggcggctga

SEQ ID NO: 359615 - DNA, 1365 bp, Pseudomonas aeruginosa
atgtcccttgaaatcgtgattctcgccgccggccagggcacccgcatgcgttcggccctgcccaaggtcctccatcccattgccggcaagccgatgctcggccacgtcatcgactgcgcgcgccagttgcagccggaacggatccacgtggtgatcggccacggcgcggatctggtgcgtgagcggatggccgccgacgacctgaatttcgtgctccaggccgaacagctcggtacgggccatgcggtggcccaggccctgccgttcctcagtgcagaccaggtgctgatcctctacggcgacgtgccgctgatccagctggacaccttgcagcgcctgctggcgcaagtcaccccggaccagttgtcgctgctcaccgtcgacatgctcgaccccaccggctacggccgcatcgtccgtgacgatcagggcgcggtgcaggccatcgtcgagcacaaggacgcgaccccggcgcagcgccagatcggcgagatcaacaccggcatcctcgcggtgccgggcaagcgccttgccgactggctcggccgcctgtccaacgacaacgcccagggcgagtactacctgaccgacgtgatcgccatggcggtcggcgacggcctggtggtagccagcgcccaaccgctggacgcgatggaagtgcagggtgttaatgaccgcatgcaacaggcccagctggagcgtcactaccagcgcctgcgcgcggaggagctgatgcgccagggcgtgaccctgctcgatccgcagcgcctggatgtccgtggcgaaatctcggtcggccgcgacgtgctgatcgacgtcaacgtggtgctggaaggccgcgtggtgatcgaggacgacgtgcacatcggaccgaactgcgtgattcgcgacagcgtcctgcggcgtggcgcggtgatcaaggccaacagccacctggaaggcgcggagctgggcgagggtagcgatgccggtccgttcgcccgcctgcgtccgggcagcgtgctcggcgctcgggcccatgtcggcaacttcgtcgaactgaagaatgcccgcctgggcgagggcagcaaggccggccacctgagctacctgggcgatgccgagctgggcgccaactgcaatatcggcgccggcaccatcacctgcaactacgatggcgcgaacaaattccgcaccgagctgggcgacgatgtgttcatcggctcgaacaactcgctggtggcgccgctgaagatcggcgatggcgcgacgaccgcggccggctccaccatcacccatgaggttccggcgaagaacctggccttcggccgcgcccggcagaagaacctggaaaactggaagcgcccggaaaaaatcaagaagtaa

SEQ ID NO: 359616 - DNA, 510 bp, Pseudomonas aeruginosa; identical to SEQ ID NO: 337840

SEQ ID NO: 359617 - DNA, 774 bp, Pseudomonas aeruginosa
gtgatctcgaaacgtaatacgccgcaacgtcgccatgccatcctcgcgctgctttccgagcagggcgaggtcagcgtggacgcactcgccaagcgcttttccacctcggaagtgaccatccgcaaggacctcgccgccatggaaagccacggcctgctgttgcgtcgctacggcggtgcggtgccgatgccgcaggaactgatcggcgaagccgcacagcccgtctcgccctacaagcaggctatcggtcgcgccgccgcggcgcgcatccgcgagcatgcgcggatcatcatcgacagtggcagcaccaccgcggcgatgatccccgaactcgggcacaagccgggcctggtggtgatgaccaactcactgaacgtggtcaacgccctgcgcgaactggagcacgagccggtgctgctgatgaccggggggacctgggatccgcattccgagtcgttccaggggcaggttgccgagcaggtgctgcgttcctatgacttcgaccaactattcatcggtgccgacggcctcgatctcgaacgcgggacgaccacgttcaacgaattgctgggcctgagccgggtgatggccgaggtcgcccgcgaggtgatcgtcatggccgaggccgacaaggtcggtcggcgcattcccaaccaggaattgccctggagcagcatccataccctgattaccgacgagcgcctggaaccttccgcgcgcgaacagataaccgcccggggcgtcacgctgatctgcgccccggtcgaggcctga

SEQ ID NO: 359618 - DNA, 1836 bp, Pseudomonas aeruginosa
atgtgtggaatcgtaggcgcgatcgccgagcgcaacatcacccccatcctcatcgaaggcctcaagcgcctcgagtatcgcggctacgacagcgccggcgtggcggtcttcgataacgaaggcaggctgcagcgctgccgccgggtcggcaaggtcgccagcctggaggaaggcctggccggtacgccgctgctcggccgcctgggcatcgcccatacccgctgggcgacccacggcgcgccaaccgaaggcaatgcccacccgcatttctccagcgacgaactggcggtggtgcacaacggcatcatcgagaaccacgaacctctccgtgagcggctcaagggcctgggctacgtgttcacctcgcaaaccgacaccgaggtcatcgtccacctgctgcatcacaagctgcagtccatcggcgacctgaccctggcgctgaaggacgcggtcaaggaattgcacggggcctatggcctggcagtgatcagcgcggcgcagccggaccgcatcgtcgccgcccgcagcggcagcccgctggtgatcggcctcgggcttggcgagaacttcctcgcttccgaccaactggcgctgcgccaggtgaccgaccgtttcatctacctggaagaaggcgatatcgccgagatccgtcgcgacagcgtgcgcctgtgggatgtccagggcaacgacgtgcagcgcgagaccgtgcagtaccacgaaggcgccgaagccgccgacaagggcgagtaccggcacttcatgctcaaggaaatccacgagcagcccagcgtcgtgcagcgcaccctggaaggccgcctcgggcagaaccaggtaatggtggaaagcttcggcccgcaggcggcggagctgttcgccaaggttcgcaacgtgcagatcgtcgcctgcggtaccagctaccacgccggcatggtcgcccgttactggctggaaagcctgaccgggattccctgccaggtggaggtcgccagcgagttccgctaccgcaaggtcgcggtgcagccggattgcctgttcgtcaccatctcccagtccggtgagaccgccgacaccctggctgccctgcgcaacgccaaggagctgggcttcctctccagcgtggcgatctgcaacgttgccaccagttcgctggtgcgcgaatccgacctgaccctgctgacccaggccggcccggaaatcggcgtggcctcgaccaaggccttcaccacccagttggtcgccctgctgctgctgaccctgggcatcggccaggtgcagaagcgcctggccgatggcgtcgaagccgagctggtggacgaactgcgtcgcctgccgacccggctgggcgaggcgctggcgatgaaccggacggtggagaaggtttccgagctgttcgccgagaagcaccacaccctgttcctcggccgtggcgcgcagttcccggtggccctggaaggcgcgctgaagctcaaggaaatttcctatatccatgccgaagcctacccggccggcgaactcaagcatggcccgctggcgctggtggacagcgacatgccggtggttaccgtggcgccgaacaacgagctggtggagaagctcaagtcgaacctgcaggaagtccgcgcccgcggcggcgaactggtggtgttcgccgacgaaggcgcgggcatcgaggccggcgagggcacccatgtggtgggcatgccgcacatcggcgacgtgctctcgccgatcctctacaccatcccgttgcaattgctctcgtaccatgtcgccgtgctcaagggcaccgacgtcgaccagccgcgcaacctggccaagtcggtcaccgtcgagtaa

SEQ ID NO: 359619 - DNA, 1206 bp, Pseudomonas aeruginosa
atgaaccagaaaattcccccgccttcacagaagctcgacggcctgttcctgctggccctgtcgatggccgtgttcttcgtcggcgtgaccgagttcatgctgtcctccatgctcgggccgctggcgcaggcgttccacaccaccaccagcggcgccgcctggctgatctccagctacgcgttctcctatgcgatcgccgcgccgttgctgggctacttctccgaccgcatgcaacgcaggaagctgctgctgctcgccctgatcctcttcgcggtcgatactctggccatcgtcatcgccccgaccctggaaattgccgtcgtcctgcgggtaatcgggggcatcgcctcggcaatcatcatcccgaccaccttcgccctggtcgcggaagtggtcgccccgcaaagacaggccggtgccatgggccaggtgatgctcggcatgaccctcggcattgccgccggcccggcactggccggcctcctctcggacttcttcggctgggcggcgcccttcctgatggtctcgtgcggttgcgtgctggtcttcctgatggcgcgccagcgccttcccgtgcaagccgtggcaccgcgcgccgagggccacgcgctgggctggtgcaggcaatggagcatcctcaggccactgatcgccaagggtgcctggaacggcaccggggtcgccggcctgcttctctcgggagaggtgctgcgccagcgctacggcttcagcaccgcgcagataggcatcagcatcgccgccttcggcgtgggcctggccgtgggcaacctcgccgcgggttacctgcggcgctacctgaagcgccacgaagacatgctcctgctggtgctggcgctcctggtgctatcgatgtcgaccttcatgctcctgccgctaccgttgcccgtggcactctgctgcctgggcgcctggggcgccgcgctgggcctgggcgcgccggcgggcacggtggtactcgcctcgcgctccgggccggacaagggcatggtgctgtcgttcgccgagacgttcaacaacatcgccattctcgccagcgtgcccctggctgtgcgactgttggagctgaaggggccgcccgccaccctgtgggtattgggcatcggcctggggatcggcgcctggttcaccgtgctggactggttcgccagccgcaggagcgacgaggcgctgccgttgcgcgattga

SEQ ID NO: 359620 - DNA, 624 bp, Pseudomonas aeruginosa
atgaacgagaccgtgtccctcgaaacacgcgaagtacgctttctctccgtgttcgacttcgacggtacgctgacataccgagacagcttcgtgcccttcctgcgcttcgccttcggcaaccgggtgttcgtccgccgcatgctgcgcatggcaggacccagcctggcctatctctgccggcgtatcggccgcgacgacctgaaggcgcgcctgatcgccaccttcctcaccgatgtgcccgtacatgtgctggaagagcgggcgctggcctaccagaaccgcttctgggaaacactgatgcgtccccacgcattgaccgcggtggccgaccaggtcagcagcggcagcaccgtgaccatctgttccgcctccccttcgctgctactcaggccgttcgccgagaagctcggcgtgcacctgatcgccaccgagctggaagtggtagacggcgtactgaccggcaggatcgtcggccgcaactgccggcgcgacgagaaagtctgccgcctggagcggcactacggtccgctgacccaatactccctgcgcgcctggggcgactcgcgcggcgatacggaactgctggcggcggcgctggagcgcttctggaaaccgttccgctga

SEQ ID NO: 359621 - DNA, 1185 bp, Pseudomonas aeruginosa
atgattgcacagctcccctctgagttgctgtccctgcaactgccgttgcggatccgcatcggcgatgctcaggcgttcgatctggggccggatccacaggtaaccatggtcattcgcgatccctcgctgctaaccgagatcacccatcccagcctcgatgcgctgggcaaggcctacgtcgagaagcgtctcgacatcgaaggaccgatcagccaggtcatcggtatcggcgatgccctcagcgaagcgctcggcgaacccgatggcggcgcgccgccggttcgcgaaagccacgacaaggacaccgacgccgaagccatccattaccactacgacctgtccaacgatttctaccagctctggctggatccggaaatggtctattcctgcgcttatttcgagaccggcaaggaagacctcgccaccgcgcaactggccaagctccgtcacctgtgccgcaagctgcgtttgcagccgggcgagaagctgctcgatgtcggttgcggctgggggggcctggcgcgcctggccgctcgcgagttcggcgtcgaggtcactggcatcacattgagcaaggagcagctggcgctcgggcggaagcgggtcaaggccgaaggcctggaggaccgggtcaccctcaagctgctggactaccgcgacctgccgcgcgatggtcgcttcgacaaggtggtcagcgtcggcatgttcgagcacgtcgggcacgccaacctggggctgtacttccagcaactgtacgatgcggtgcgtcccggcggcctggtgatgaaccacggcatcacctcgcgctacaccgacggccgcccggtgggcaagggggccggcgacttcatcgatcgctacgtgtttccccacggcgagctgccgcacctgtcgctggcggtggcgcggatgagcgaagccgggctggaagtagtcgacgtggaaagcctgcgtctgcactacgcccggaccctggacttctggagcgccaacctggaagccaggctgaaggaggcggctcgcctggtgcccgaggaaaccctgcggatctggcggctgtacctggccggatgtgcctacggcttcaagcgcggctggatcaacctgcaccagatcctcgccattcgcccccacgaggatggctcccacgagctgccctggtcgcggcgcgacctgtacgcctga

SEQ ID NO: 359622 - DNA, 960 bp, Pseudomonas aeruginosa; identical to SEQ ID NO: 337834

SEQ ID NO: 359623 - DNA, 2025 bp, Pseudomonas aeruginosa
atgagcgatcatcagaacgggctgcacctcgaggcggaaaactggccgcgcgcgctgttcgccgtggccctggccttttccgtgttccaggtcgtcaccgcggcctttcccctgatttccacccaggtcctgcgggcaatgcacgtcggactgctgttgctggtggtgtacatcagctatcccgccttcggcatacgtcgcccctggcagccgctggcctggttgctgggcatggccggcctgggcacggcggtctaccagtgggttttcgaggccgacctgatccagcgctccggagagctgacccaggccgacatggtcgtcggcgtggtgctgatcgtcctggtcttcgaggcggcgcgacgggtgatgggcatcgccttgccgatcatctgcgcgctgtttcttgcctatggcctgttcggcgaacacctgccgggcgacctggcccaccgcggctacggcttcgaccagatcgtcaaccagctgtcgttcggtaccgaaggtctctacggcacgccgacctacgtgtcggcaacctacatctatctgttcatcctgttcggcgccttcctcgagcaggccggcatgatccgcctgttcaccgatttcgccatgggcctgttcggccaccgggtcggcgggccggccaaggtctcggtattctcctcggcgctgatgggcaccatcaccggctccggcgtggccaacgtggtcaccaccggacagttcaccatcccgctgatgaagcgtttcggctacaagccggcgttcgccggcggcgtcgaggcgaccgcgagcatgggcagccaactgatgccgccggtgatgggggcggtggcgttcatcatggccgagaccatcaacgtcccctacgtggagatcgccaaggcggcgctgatcccggccttgctgtatttcggctcggtgtactggatggtccatctcgaggcccgccgggccgacctcaagggcctgccgcgcgagcagtgtccgagcgcctggggtgccgtccgcgagcgctggttcctactgattccgttgctggtgctgatcgcgctgctgttctccgggcgcacgccgctgttctccggaaccattggtctggcgctgaccgccatcgtcatcctcggttcggcgatcatcctgcgggtgtcctcgctcggcctgcgcatcgccttctgggtggcgctggggctgctctgcgcggggttcttccgcctcggcatcggagtgatcttcgttgtgatcgcggccctggccctggcctgctggttcgtccgtggcggccgggaaaccctgcgcatctgcgtccgcgccctcgcagaaggtgcgcgacatgcgattccggtgggcatcgcctgcaccctggtgggagtcatcatcggggtgatttcgctgaccggcatcgccaccaccttcgccagctacgtgctcgacctgggacgggagaacctgctgctgtcgctggtcctgaccatggtcacctgcctggtcctgggaatgggcatcccgaccatccccaactacatcatcaccagctccatcgccgcgccggcgctgctggaactgggggtgccgctgatcgtctcgcacatgttcgtcttctacttcggcatcctcgccgacctcacccctccggtggcgctggcctgcttcgcggcggcgccgatcgccaaggaaaggggattgaagatcagcttctgggcggtgcgcatcgccctggcgggtttcgtggtgccgttcatggcggtgtattccccggcgctgatgctgcaggaaggcggttggggggcgacgctctatgtcacctgcaaggcggtgctggccatcggcctgtggggcatggcttccatcggctacctgcaggggccgctggcctggtgggagcgcctggtggcgttcgccgcgggagccagcctggtcctggccttgccgatcagcgacgagctgggcttcgtcctcggcgcgctggtgatcggctggcacctctggcgccagcgtgcgcgcgaggcggtggcgtga

SEQ ID NO: 359624 - DNA, 1245 bp, Pseudomonas aeruginosa
atgcgtagctgtatatcagtcttccggccggccctgctggcactgttcgtctcggcaagcggctcggccggcgccgacgcggctgtggaaaacccgcggatcggccgtgccgccgatctctatgaactgatcccggaataccagccggacacctaccggaacatggacaaggtctatccgacccgggttatccacaaggggaccaaggtccgtccgctgccggcgggtgcggccatcgcgccgcgctaccggatcggcggcgaggaatacggcgtcgacgatttcatgcggcgcaaccgcgttggcggcgtgctggtcctcaaggatggcaaggtcgccctggagcgctacggcctgggcaacgacgaacgcacgcgctggacctcgttctcggtggtcaagtcgatctcctcgaccctggtgggcgccgccgtgcagcagggcctgctggctctcgaccagcctgtggacaagtacctgccgagcctggccggctccgcctaccagggggtgacggtggagcaggtcctgcagatgagttctggggtccgctggaacgagacctatcgcgatccgaagtccgaccgccggcagatgttcgacgcccagctcgccgaacgtcccggtggcatcctgcggctgctggcgagcctgccgcggcagtacccggccggtacccacttcacctacagcaccggagagtcgcacctgcagagcgagctgctgcacgcggcgacccgcattccggtgagcgactacctgtccgagcggatctgggcgcggatgggcatggagagcgacggcttctggcaactggaatcgccggccgggcaagagatcggcagcagcggcttgagcgcgaccctgcgcgactatggccgcttcggccagttcgtcctcgaggatggggtgatcgatggcgaacgtatccttcccgagggttgggtcgatcgtgccagtcgcgtcgaggcttcttcccacctggccccgggcaagctctacgatggcgaatacgcgctcggctacggctaccagtggtggaccttcccggtgggcgccaaggccctgcccgagcatgacggcggggccttcgaagcccagggcatcttcggccagtacctctacatcaaccgcaaggagaagatcgtggcggtggtctggagcgcctggccgaagccggagatggacgatcgcgaggaggagacctatgccttccttggcgcggcggtgaaagccctgcgctag

SEQ ID NO: 359625 - DNA, 1338 bp, Pseudomonas aeruginosa; identical to SEQ ID NO: 325007

SEQ ID NO: 359626 - DNA, 561 bp, Pseudomonas aeruginosa
atgatccgcaagaatccctccggcgacctgccggtgatcgacgaatcggcctatgtggacaagaccgcgatcatctgcggcaaggtgatcatccaggccaacgtcttcgtcggtccctacgcagtgatccgtgccgacgaagtcgacgccgacggcggcatgcaaccgatcgtgatcggcgccaactcgaacatccaggacggcgtggtgatccattccaagtcgggtgccgcggtgaccatcggcgagcacagctccatcgcccaccgctccatcgtccacggtccttgcgaagtcggcgaccgggtcttcatcggcttcaacagcgtgctgttcaactgccgggtcggcgatggctgcgtggtccgccacaacgcggtggtcgacggctgcgacctgccagcgggtttctacgtcccgtccaccgagcgcatcggtccgcgcaccgacctggcgagcatgccgcgggtcagcgtttccgccagcgagttctcggaagacgtggcgcgcaccaacgtcgacctggtacgcggctacaagtcactgcagaacgagttctga

SEQ ID NO: 359627 - DNA, 897 bp, Pseudomonas aeruginosa
atgaatgccttgacgcttcccgatatcgcccgccagaccaccaccgccgatcttcccctggactgggtcggcatgcagggcatcgccctccccgtgcagatcggcgggcagagggtcgccgccgaagccgatgccggtgtcagcctggacgacccgcaggcccgcggcatccatatgtcgcgcctctacctggcgctggccgaactggaacacggcgagctggacctttcccgcctgcgcgccgtcctgcaacgcttcctcgacagccacgccggcctgtcgcgtcgcgcctacctgcgcctgcgcctcgcgccgctgctgcggcgtccggcgctggtcagcccgctgagcggctggaaacgttatccactggtgctggacacgcgcctggaaggcgatgacttccaggccgaagtccatctcgagctgacctactcctcgacctgcccctgttcggcggcactggcccggcaattgatccaggagcgcttcgaccaggacttcgccggacagccgctcgatcatgccagcgtgctcgcctggctcggcagtagcgccggcatcgtcgccaccccgcacagccagcgcagcagcgcgcacctgcgcatcggcctggcggaagactgcatcggactgcccctggaagagctggcggatctcggcgaaagcgccctcggcaccgcggtgcagactgcggtgaaacgcgccgacgagcaggccttcgccctcgccaacggacagaacctgatgttctgcgaagacgcggtgcgccggctgcaccgcgccctgcagggttatccacaggcgagccggttctccgtacgggtcgtccatgcggaaagcctgcatgcccacgacgccgtcgccgaaagccactggcagcgaggtgccgcatga

SEQ ID NO: 359628 - DNA, 1194 bp, Pseudomonas aeruginosa
atgaagcgccgtcgcctcctgcaaagcctgctcgccggcctggccctccagccgttcctggccgccagcgccaatgtacgaatccgccaggcccgggcctggaattcctcggaaagctggcgcctggtgctggaactggacggcccgccgcgttatcgaaccttttccctgcaggcccccgagcggttgatcctcgacctgcccgacgcgcaattgctcgcaacgctctccgagctgccgctggacggccccgtgcgcgccatccgcagcggccaactgggtggcggcgggacgcgcatcgtcctcgacctgcgccaggcggtcaggccgcgcagcttcgccctggaaccgcaggcaggaaagggtcatcgcctggtcctggacctttatccacaggcgctggcggtgccccccgagccgatgctggcgctggcccgcccgctaccctcgacgggccgcgacatcctcgtggtggtcgatgccggccatggcggcaaggaccccggcgcggtcggtagcaagggcgagcgcgaaaaggacgtggcgctggctatcgcccgcctgctggcgcggcggatcgaccgcgagaaaggcttcaaggcgcgcctggtgcgcaacggcgacgtgttcgtcccgctgcgcaagcggccggaagtggctcggcgctacaacgccgacatgttcgtctcggtgcacgccgacgcggcgccgcgactgaccgcctccggcgcgtcggtatatgccctctccgagcatggcgccagctcgaccatggcgcgctggatggccgaccgcgagaacggcgccgacctgatcggcaacagcggcaacctgccgctacagggccgcgacaaggtactcgccggggtgatcctcgacatggccctgagttcgaccatcgccagcagcctggaccttggccacagcgtgctcggccagttgtcggacgtcaccgcgctgcaccagaagcgtgtcgagcaggccggcttcgccgtgctcaagtcgccggacatcccttcgatcctggtggagaccggcttcatctcgaatcgcggcgattgtcgccggttgatggacgaacgccatcgccagcgcctggccgaggcgatcttcgttggcgtgcagggctacttccggcaacgccctcccgccggcagctacctggcggcgctcagcgcgcagcctcccggctag

SEQ ID NO: 359629 - DNA, 417 bp, Pseudomonas aeruginosa
atgcgccgcgtcctccgcctttactgcctggccctcctgctgctcgctccggcggcacaggcgcagggctttcttcccggcacccgcccggcggaatgcgcctacctgcgcaccgttctggcctgcatggatcggctgggcaaccactacagcgtcgccaccggcggcaacgacacctggctgcgcggatacgacgcggcaagcggacgacgctgggcccagaccaatacgcgctacgggcgcctgaccttcttcagcggcatcgccagcgacggggaaatctgggtcggcctcagccgcaacatcggctggaccagcgtcagccgcctgagcagttcatcgggccagcgccaacgcctgacctgcgggcgggtcagcggctgcagcgaaggccctagccgggaggctgcgcgctga

SEQ ID NO: 359630 - DNA, 405 bp, Pseudomonas aeruginosa
atgaccgaacaggaactgcttgcccagcccgacgctgcctacatggacgaagcccagcaggacttcttccgcgacctgctgctgcgccagcgccaggaactgcaggcgcgcatcgaaggcgaattcggcgagctgcgcgatctcgaacgccccagcgacgaggccgacctggcttcccgcgaggaacagcggcaatggcaacttcgcctgctggagcgggagaagaagctgctcgacaagatcgacgaagcgctggagcgcctggcccgcggcgactacggctggtgccaggaaaccggcgagccgatcggcctgcgccgcctgctgttgcgtcccaccgccaccctctgcatcgaggcgaaagagcgccaggagaagcgcgaacgccatgtgcggcacaactga

SEQ ID NO: 359631 - DNA, 1203 bp, Pseudomonas aeruginosa
gtgaaccaacgcctacctgtcaccgtgctgtccggctttctcggcgccggcaagagcacgctgctcaaccatgtgctgaagaaccgcgagaaccgccgggttgcggtgatcgtcaacgatatgagtgaaatcaatatcgatggcagcgaagtccagcgcgatgtcagcctgaaccgcgctgaagagcgcctggtggagatgagcaacggctgtatctgctgcaccctgcgcgaagacctgctggaagaggtcggccgtctcgcccgggaaggccgcttcgactacctgctgatcgagtccaccgggatttccgaaccgatgccggtggccgagaccttcaccttccgcgacgagctggaccgcagcctgtccgacgtggcgcggctggataccatggtcacggtggtcgacgggatgaatttcctccgcgactaccaggaggccgccagcctggccagccgtggcgaaaccctcggtgaggaggatcagcgctcgatcaccgacctgctgatcgaccaggtcgaattcgccgatgtgatcctggtcagcaagatcgacctgatctccagcgagcagcgcgaggaactgctggcgatcctgcgccagctcaatgccgaggcggagatcctgccgatggtgatgggtcaggtgccgctggcgaagatcctcgataccggtcgcttcgatttcgatcgcgcggcgtccgcgccgggctggctgaaggaactgcgcggcgagcacctgccggaaaccgaggaatatggcatcgcctccatggcctaccgggcgcgccgtccgttccaccccgcgcgcttccacgccttcctgcacaatccgctgaagcaggggcggctgctgcgctccaagggcttcttctggctcgccagccggccccgcgaggccggcagctggtcgcaggctggcggcctgatgcgctacggcctggcgggccgctggtggcgcttcgtgccgaccggacagtggccacaggacgaagagggcctgcgggcgatcatgcggcactgggaggaaggcgtcggcgactgtcgccaggagctggttttcatcggccagaacctggacttcacggccctgcgcgcagccctcgatgcttgcctgctggatgatgccgagatgaacctgggcattccgggctggcagggcctggacgaccccttcgaggactgggggcacgccgcatga

SEQ ID NO: 359632 - DNA, 642 bp, Pseudomonas aeruginosa; identical to SEQ ID NO: 337823

SEQ ID NO: 359633 - DNA, 369 bp, Pseudomonas aeruginosa
atgcgtccgttcctgttcttcctgtcctgcctgccgggcctggccctggccgaagcctgcatcgtccatagccaggcgaagaatctcgatgtgaaggtctgccagcagaaccgcagcatcccggccaagctgttccgcgaaggcttctgccagccacaactgcagggccagaaggtcgaggtggcgttcgccgaggagtgtccgacgggcgccttcggtgtctgccgcgacgccagggtacccaacgcgccctatcggcaggacatcttctactacggcatcgcgaccgacgcacgctacctggagccgttctgcgccagccagagccaaggccgctgggaagagcctagcgccgcgaaaaagccctga

SEQ ID NO: 359634 - DNA, 969 bp, Pseudomonas aeruginosa
atgcttcgagagatatccacacacctgatcggcggccccctgggggccggcaagaccagcctgatccgctcgctgctggcgcagaagccggcgggcgagcgctgggcggtgctggtcaacgagttcggcgagatcggcctggatgccgcgctgctggccacggacgtcgacggcgtggccatcggcgaggtggcgggcgggtgcctctgctgcgtcaatggcgtgccgttccaggtggggctcggtcgcttgttgcgtcgggcacggccggaccggctgttcatcgaaccctccgggttgggacatccgctggcgctgtggaagcagctgcaggctcctccctggtccggcgtcctggccctgcaacccctggtagtggtgctggatgccgccgcgctggcctccggccaaccgctgccggaggcacaggaacaggcgctggaagcggccggcatgttgctgctgaacaaatccgaagcgctcgacgcgacgcagcgctgcgccgtgcgcgcgcgcctgccggtcctgccgttgcgctggagcgtgcgcggccacctggcattgcgcgatctgccgaccagcgttgccggggaaggtagcgcgacgacctgggcggccctgccggacgcgcctgctcagttgggaacggtgctgcccgccgagcgaccgctgcgcgccgtgcgcgagcaggacggccagttggccatcggctggcggctggcgccgtcggtgcgtttcgatcgggtcgcagtggacgcctggctgagccgtttgtccggactgcggcgggccaaggcggtgctgcattgcgcggacggttggtatgcagcgaatgccgcgccgtttgtggataactggggcaagtcctcgtggcgacgggataatcggctggaactgatcctcgccgcaggcgcggatgaagaggcgctcgaagaggcgttcctggcgtgtcggatggtcgcggaatga

SEQ ID NO: 359635 - DNA, 1029 bp, Pseudomonas aeruginosa
atgtcgccacagccttcacggtcgcctgaccgtttttcgctggccgcgctcgccgaagaccatcccaccgctcctgcccagggagacgaaagcgagtccctgccatgcgtgaatgcccagcgcggagaacccaacctgcgcgtggtggactgctccggtgcgcgccgcgacgaggaagtggcggtcgaggaagtgctgatcccctacgcccatggcagcgatcccgaagacgtccccggcgagccgcccaagtcgcgctggtggttgtcctccggcgcagcggtggcgatgcatgtggcgatcatcggtgcgctggtgtgggtgatgccgaccccggccgaactcaaccttggccacggcgaactgccgaagaccatgcaggtgaatttcgtccagctcgagaagaaggccgagccgaccccgcagccgccggctgccgcgccggaaccgacgccgccgaagatcgaggaacccaagccggagccgccgaagccgaagccggtggaaaaacccaagcccaagccgaaacccaagcccaaaccggtggaaaacgccattcccaaggccaagccgaagccggaacccaaacccaagccggaacccgagccgagcacggaagcatccagccagcccagcccgtccagcgccgcgccgccgcccgcgcctaccgtcgggcagagcacgcccggcgcgcagactgcgcccagcggctcgcaaggcccggccggcctgcccagcggcagcctcaacgacagcgacatcaagccgctgcgcatggatcctccggtctatccgcggatggcccaggcgcggggtatcgaaggccgggtgaaggtgctgttcaccatcaccagcgatggccgcattgacgacatccaggtgctggagtcggtgccgtcgcgcatgttcgaccgcgaagtgcgccaggccatggccaagtggcgtttcgagccgcgtgtcagcggtggcaagatcgtcgcccgccaggcgaccaagatgttcttcttcaagatcgagaagcgccgctga

SEQ ID NO: 359636 - DNA, 1308 bp, Pseudomonas aeruginosa
atggaaagcgccaacgccatttccgcgtctgcccagccccgcaccacttcgcaacgcatcaagtcgatcttcagcggttccgtcggcaacctggtcgagtggtacgactggtacgtctacgccgccttctcgctgtacttcgccaaggcattcttcccccagggcgacatgaccgcccaactgctgaacaccgcagctatcttcgccgtgggcttcctgatgcgcccgatcggcggctggctgatgggtatctatgccgaccgcaagggccgcaaggcggcgttgctggcctcggtgctgctgatgtgcttcggctcgctgatcatcgccctgacccccagctacgaaaccatcggcgtcgccgcgccgatcctgctggtggtcgcgcgcctgctccagggcctgtcggtcggcggcgaatacggcacctccgccacctacctgagcgagatggcgaacaaggaacagcgcgggttcttctccagcttccagtacgtgaccctgatctccggccagctcatcgccctggcggtgctgatcgtcctgcaacagaccctgaccgtagaacaactggaaagctggggctggcgcgtccccttcttcatcggcgcgctgtgcgcagtggtggcgatgttcctgcgtcgcggcatggaagagaccgagtccttctcgaagaagaaggaagagccgaaggaaagcctgctgcgcaccctgctgcgccacccgaaggaagtgctgaccgtggtcggcctgaccatgggcggcaccctggccttctacacctacaccacctacatgcagaagtacctggtgaacacggtaggcatgagcaagaccgattcgaccatgatctcggctgccaccctgttcctcttcatgctgctgcagcccatcgtcggcgccctctccgacaagatcggccggcggccgatcctgatcgccttcggcgtactcggcaccatcttcacctacccgatcctcagcaccctgcacagcgtcgacagctggtggggcgcgttcttcctgatcatggcggcgctggtgatcgtcagcggctacacctcgatcaacgcggtagtgaaggccgaactgttccccaccgagatccgcgccctgggcgtcggcctgccgtatgccctgaccgtgtcgatcttcggcggcaccgccgaatacgttgccttgtggttcaagagcgtcggcctggagagcggcttctactggtacgtcaccgcctgcatcgcctgctcgctgctggtctatgtgttcatgaaggacacccagaagcactcgaagatcacgaccgattga

SEQ ID NO: 359637 - DNA, 1758 bp, Pseudomonas aeruginosa
atgcatgccgtcgatttcatccaggacctcgccgtgatcatgctggtggccggtgtggtcaccattctcttccaccgcctgcgccaaccggtggtcctcggctacatcgtcgccggtttcatcatcggcccgcacaccccgcccttcgggctgatccacgacgaagacacgatcaagaccctggccgaactcggggtgatcttcctgatgttctgcctcggcctggaattcagcctgcgcaagctcttccaggtcggcgccacggcgttcatcgcggcgttcctggaaatcgtcctgatgatctggatcggcttcgagatcggtcgcttcttcgagtggagcaccatggactcgctgttcctcggcgcgatcctagcgatctcctccaccaccatcatcgtcaaggcgctcggcgacctgaagatgaagaacgagcgcttcgcccaactgatcttcggcgtgttgatcgtcgaggacatcctcggcatcggcatcatcgccctgctgtcgggaatcgccgtgagcggttcggtggaaaccggcgaggtgttctccacggtcggcaagctcagcctgttcatgatcgtcgcgctggtcgtcggcatcctcctggtgccgcgcctgctggcctacgtggcgaagttcgagagcaacgagatgctgctggtcaccgtgctcggcctgtgcttcggcttctgcctgctggtggtgaagctggagtacagcatggtgctcggcgccttcctgatcggcgcgatcatggccgagtcgcgccagttggtgcagatcgaacggctgatcgagccggtccgcgacatgttcagtgcgatcttcttcgtcgccatcggcctgctgatcgatccgaagatcctcgtcgagtacgcctggccgatcgccctgatcaccgtcgcggtggtgctcggcaagatgttttcctgcggcatgggcgcgttcatcgccggcaacgatggacgcacctcgctgcgggtcggcatgggcctgtcgcagatcggcgagttctccttcatcatcgccgccctgggcatgaccctgaaagtcaccagcgacttcctctacccggtggcggtagcggtctcggccatcaccaccctgctcaccccgtacctgatccgcgccgccgatccgctctcgcagcacctggccaacgccatgccgcagcgcatggcgaggatcttcggccactacggcgactggctgcgcagcatccagccgcagggcgaccgtgcggtgctggcggcgatgatccggcgcatcctgctgcaggtcggggtgaacctggcgctggtgatcgcgatcttcctcgccggcggttatttcgccgatacgctttccgcctggatgagccagtgggtcgcctacgatggactgcacaaggcattgatctggggcggcgcgctgctggtctcgctggccttcctgatcgccgcgtaccgcaagctcaaggctctgtcgatgctgctggccgaactcggggtcaagccggagaaagccggacgccatacggcgcgggtacgccgggtgatctccgaggtgatcccgctgctgtcgctggcaggcatgatgatgctgctggcggcgctcagctcgagcatcctgccgccgggcgagttgctgatcgtggtggcgctggtcgccggcctggtgatcgcagtgctctggcgctggctgatccgcgtgcattcgcggatgcagatcgccctgatggaaaccctagagcaggaaaagggcagccactga

SEQ ID NO: 359638 - DNA, 858 bp, Pseudomonas aeruginosa
atgcagcgtgttctcagcatcgccctcgccttctgcctggcgctgaccgtcagcctggatgccaatgccaagcgcttcggcggcggcaagagcctcggctcggcacccagccaccagacccgccaggcgcagccggccactgcgccgaacgccactgctgccgcccccaacgccgcccgtcccgccgctgccgccagcggtgcttcgcgctggctcggcccgctggccggtatcgccgccggcggcctgctcgcctccatgttcatgggcgacggcttcgaaggcatccagatgctcgatatcctgttgatcgccctggtggccttcattgccttccgcttcatcgccgctcgccgacgccagcagaaccaggggcagccggcgatggccgggcacgcgccgatgcagcgcgaaatgccggcccaggcgccgatcttcggtggcgccaccgccgctgccgccgttgcgccgagcccggtgatcaacgcgccgagctggttcaacgaggagcgcttcgtcggtgccgctcgcgaacacttcatgtccctgcagcagcattgggatgccaacgagatggacaagatcgccgagttcgtcaccccgcagatgctgcaatggctgaagcaggagcgcgccgagatcggcgacgcctaccagtccacctacatcgacaatctggtcgtgcaactggacggcgtcgacgaccaggccgacaagaccatcgccaccctgaccttcagcggtgtgtcgaagacctcgcgcttcgaccagggcgaagccttcagcgaaagctggcggatggagcgcgcccagggcgagaaccagccatggctggtggccggtatccggcagaactga

SEQ ID NO: 359639 - DNA, 402 bp, Pseudomonas aeruginosa
gtggaagacgtcatcgaaaaactgcgtgaactcaacgaaccggttccggtgcccctggaactgccggaagaagaactgctggtggaaatcgaggaagagctgctgatcggtattcccgccgaattccgcgaattcctcctgctggtcagcgatgtggtctacggccgcctggagccggtgaccgtgaccgatccgcactcgcacacctacctgcccgaagtggcggccactgcctgggacctgggcgttccgcgcgagctgatcccgctttgcgaggacgacggcagctactactgcgtggcggaggacggcgaggtggtgctctgggccgatggcgacctcaccgatgaaagctgggattcggtgtgggtctgggctcgcgacgtctggctggagagctga

SEQ ID NO: 359640 - DNA, 213 bp, Pseudomonas aeruginosa; identical to SEQ ID NO: 319265

SEQ ID NO: 359641 - DNA, 681 bp, Pseudomonas aeruginosa
atggccgagaatctccaggaacgactctaccaacgactgcgggaagacttgctggccggacgtttccagcccggcgagcgattgaagatccgcgacctggcgaaccagtggggaaccagcccgatgccggttcgcgccgccctgcaacggctggtggcggaaggggcgctggagggcgaggcacaacgctcgctcagggtgccgctgatgacccgcgaacgtttcctgcagatcctccaggtgcgcctgtccctcgaagggctggcggccgaaagcgccagcggccggctggacgagcaggcactggaagggctcgaaggatgtctgcggcgaatggaggacgccttgcgccgacgcgaggtacaggcctacctggaagccaacagcgaattccacctgacgctctaccgcgcctgcggcaacccggtgctgctgcgtctcatcgagacgctctggctacaggtcgggccgttcttcaaccggctgttcaccgaggccgacctgtccctacgcctgaacgatttccacgaggacgccctggacgcgctacgccgcggcgacggcccggccgcgcgcgcggcgatcgaacaggacctggcctatttcggccagtacctgctgaacctcctggagctggaggcccggccacgaaagcgacaccgctccggcgagcacgcctga

SEQ ID NO: 359642 - DNA, 783 bp, Pseudomonas aeruginosa
atgaacgattttccgaagtggacaggccaggtcgcgctcatcagcggcgccggcagcgaactcggcatcggtttcgccattgcccggcggctggcccgcgaaggcgtgcgcctgctgatcaccgccagcagcgagcggattcggcaacgagcggaggaattgagcgcatgcggtcacgacgtgcgcgccgcgagcgccgacctgaccgacgaagcccaggtgcagggcctgctggactgggccgaagcccagtggggacgggtcgacatcctggtgaacaatgccggcatggcccagttgaacagcgcggaacccttcagcgcagtggaagcgacctcgctgcgggattggcaactgtccctgtcgcgcaacctgaccagcgctttcctgctcacccgcggcctgctgccgggcatgcgcgagcgcggctacgggcggatcgtcaacgtcgcctccaccaccggaacccgcggcagcaacccgggcgaagccgcgtatagcgcggccaaggccggtctggtcggctggagcatgggtctggcgctggaggtggcgaagagcggcatcacggtgaacagcgtcgcgccgggctggatcgccaccggctcgagcaccgccgaagaacgccaggccgccctggccagccccagcggacgtgccggccggcccgaagaggtggccgccgcggtggccttcctcgcctcgcccgaagccagcttcgtcaacggcgaactgctggtggtggacggcggcaactgcctgatcgaaaacaaacggagctga

SEQ ID NO: 359643 - DNA, 1395 bp, Pseudomonas aeruginosa
atgaccgccagtggcatcgccgaagccgccgtggaaaccttcatggcccgcgagcagcaacgtttccttgcgcaaaatccacagtccgtcgcgctcgccgagcgagcccggcgtgcgttgttcgacggcgtgccgatgcactggatgagcgattggtcgacaccctgtccgctgttcgtggagcgtgcccacggcgcgcgtttccatgatgtggatggccacgtctacgtggacttctgcctgggcgacaccggcagcatgttcggtcattctccggcgccgatcgcccgggcactcgccgagcagggcgcgaacggcctgaccaccatgcttccgggggaggatgccatcgtcgcaggcgagctgctggcgcagcgcttcggcctgccgttctggcaggtagcgaccaccgccaccgacgccaaccgcttcgtcctgcgctgggcgcgcgcgatcaccggtcgcaaggtggtgttggtattcgacggctgctaccacggcacggtcgacgacaccctggttcgctgccgcgacggccgcaccgtgcatcgctccggcctgctcggccaggcccacgacctcacccagttcagccgcgcggtgccgttcaacgacctccaggccctggagcgggcgctggccagcgaagacgtggccgccgtgctctgcgagccggcgatgaccaacatcggcatggtcctgccgcaacccggcttccaccagaagctgcgcgagctgacccgtcgtcacggcacgctgctgatcatcgacgagacccacaccatctccaccggaccaggcggctgtacccgcgcctggaaactcgagccggacttcatcaccctcggcaagccgatcgccggcggcgtaccgtgctcggtgtatggttgcagcgcggcgatggccagcgccatgcaactggccagggcacgcgccagcgagcagagcgaaggccacggccacagcggcatgggtaccacgctgtcggccaacgccctggcgatgcgctgtatgcgcgccaacctggaagaggtgatgaccgatgccgcctacgcccacatgctgcccctggcggcgcgtctggccgagggcttccgcaggattatccacaagcacggcctggcctggtcggtgaccgagctcggcgcgcgcagcgagttccagttctgcccgcaccccccacgcgacggcgcggccgccgaggcggcgttccacgacagcctgcagatggccttgcacctgtatctgatcaaccgcggcatcctcatcacgccgttccacaacatgaccctgtgttgcccggacactcgcgaagaagacgtcgaccgcctgctctccagcctcgacgaggcgctcggcgagctgctcgccatacccggcgcgcgggaggcctga

SEQ ID NO: 359644 - DNA, 1368 bp, Pseudomonas aeruginosa
atgcatttcgccgatccgcgggaagcccgcgagttcctcgccgcacaccccgaggtgcgcagcatcgagctgttcctgatcgacgccaacggcgtgccgcgcggcaagctgctgcatcgcgacgagctgctggctgtctacgaaagcgggcggccgctgccgagcaccatcctcggcctgaccatcaatggcgatgacgtcgaggagaccggcctggtctgggacgtcggcgatgccgattgctggaccttcccgctgcccggcagcctgaccctgcaaccctggcggcagtcaccgaccggacaggtgcaggtcagcatgcatcccgagttcgggctaccggccgcggcgggcgatccccggcatgtgctgcagcgggttatccacagcctgcaggcggagggtttccacccggtgatggcggtggaactggagttctacctgctcgaccgcgaacgcgacagcgacggccggccgttgccggcgttgcagatgaatggccagcggccgcgggcgacccaggtctatggcgtctacgagctggagcagttgcagccattcctcgatgacttgtatgccgcctgcgaggcccagggcctgccggcgcgcacggcgatctcggagtacgcgccggggcaggtggagattaccctgcagcaccgcttcgacgcgctccaggcgatcgacgaaggcgtgcgctacaagcgcctggtcaagggtgtggcgaatcgccatgggttgcaggcctgcttcatggccaagccgttcgccgatctatccggcaacggcctgcacctgcacgtcagcctggccgacgccgctggcaacaatctgttcgccagcgaggacccggccgggaccccgctgctgcgccaggccatcggtggaatgaaggcgtgcctgctggagtctttggcgctgttctgtccgaacgccaactcgttccgccgcttccaggcgaacagctacgcgccgctggcgccgacctggggaatcaacaaccgcaccgtgtcgctgcgggttcccggcggcccgccgtccagccggcacatcgagcaccgcatctgcggcgccgacgccaatccctacctggcggcggcggcgttgctcgcggcggtgcgcctgggtattcgcgagcgactcgaccccggtgcgccgatcactggcaacggctacgctcaagccacccaggtgttgccgagcgactggctgaccgcgctgcgcgcgctggagggctcggcctgggcgcgcgaggcgctcggcgaggatttcctgaagatctacctggcgatcaagcaggccgaataccgtgccttcatgggcgaggtcggcgagcaggactggcgctggtatctcaaccaggcctga

SEQ ID NO: 359645 - DNA, 759 bp, Pseudomonas aeruginosa
atgagcacgcccgtcgttcttatcactggtgcagccggcggcttgggccgggcaatcgccaagcgtttcgcccagagtcattggcgcatcgccgccacggatgtggataaggagggcctgcacgcgctgaacgcgcaggtgccgttggacgccagcggggtcgccgacctgcgcagcgcggataactgccataccctgatgtcgaagattctcgcccgcaccggacgtctcgacgccctggtgaatgccgcgggcgtctggcgcgaggggcctgtggaaaacttcaccgaggaggatttcgacctggtcctgggagtcaacctcaaggcctccttctacatgtgccaggccgcgattccctacctgaaggaaaaccagggcagcatcgtcaacatctccagcgactccggacgccaggcctaccggggttcggcggcgtattgcgcgagcaaggcggcgctgaccatgctgagcaagaccctggcgctggaactggccgagcagggcgtgcgggtcaacgccgtgtcgccggcggatatcgccacgccgatgctcgactaccaggccgaacgctatgggatgggcaatccggatggctacaagcgcgcgctgctgaaggattatccacagggcaaggcggcacgcttcatccgcccggaagaagtcgccgagctggtctggtatctctgcggccctcaggccgaagcgatcacgggcgccgacctggcggtggacttcggcctgtccgctggccgctga

SEQ ID NO: 359646 - DNA, 744 bp, Pseudomonas aeruginosa
atgtctgccgccattcgcatccttctcctggccctggccgtgcttgccggcatcggtgccgctgccatccaggccgaggatacgccctgcgccacagccgcggaatgcaacacgcgcggcacccaggcttatcgacaggggagttatccacaggcgctggacgccttcgcctggcaattgcgtctggccgagcgccaggaacagggcggagccgactcggaacaggcgctgaacaatctcgcgctgaccagcctcaaggccggacaaccgggacgcgcccgcgcctggatgaacctggcgctggatcgcggctacagcggcaaggccacgcgccacaacctggaacaggttgccctgaaagtcgactacccgtccctccagggcctcgccgggcactacctgcgctacgccgggcaggccgaatgggaaagcctgcagatcgaaccggtgaagggcggctaccgggcgagcttcgccctgatgcgcatcggcaatccggagaaactgatggaatatgggcccgcggcggtcggcgagttgtccggtcggctggaggggcaaggcgccctctaccggctgcgcagcgaaggcctgggcgccggctgcagcctgctggtatggcaggaaggcatcgacctgcgagtggtggagagccttggcggggactgccagggttacggcggcatgggcatcgccgccgccggtaactgggtgaagatatccagtcaggccagggacgactga

SEQ ID NO: 359647 - DNA, 483 bp, Pseudomonas aeruginosa
atgcaacccggaaacaaccaactgtcgatgaccgtgctgatgaccccggacatggccaatttctccggcaatgtccatggcggtaccctcctgaagtatctcgacgaagtcgcctatgcatgcgccagtcgctatgccggtcgctacgtggtgaccctgtcggtggatcaggtgatcttccgcgagccggtgcatgtcggcgaactggtgaccttcctcgcttcggtcaactacaccgggcggacttccatggagatcggcgtcaaggtcatcaccgaaaacatccgcgagcagtccgtgcgtcataccaacagctgtttcttcaccatggtcgccctggatgacgagcgcaagccggtggccgtccgtccgctggagttggaaaccgccgagcagaagcgccgcttcgcccaggcccagcaacgccgccagctgcgcgcggagctggaggcccgctaccaggcgattcgcgaagacggttga

SEQ ID NO: 359648 - DNA, 1704 bp, Pseudomonas aeruginosa
atgcaccatacgccgttactcaccacactcgccgcggggttcgtcctcgccttcctcttcggggccctggccaatcgcctgcgcatttcgccgctggtcggctacttgctcgcgggcgtcctggccgggccgttcactcccggctatgtcgccgaccaggcgctgtcgcaggaaatcgccgaactcggcgtgatcctgctgatgttcggcgtcggcctgcacttctcgctcaaggacctgctctcggtgaaggccatcgccattcccggggcgctggtgcagatcggcgtcgccacgctgcttggcatcggcctggccaagctgctcggctggagcttcggcggcggcctggtattcggcctgagcctgtcggtggccagtaccgtggtgctgttgcgcgccctggagcagcgccagttgctggacaccaagcgtggcaggatcgccatcggctggctgatcgtcgaggacctggcgatggtcctgaccctggtactcctgccggcgctcgccggcaccctcggcggcaagaccgacggcggcgacgccggtctgctctggccgctgctgattaccctgggcaaggtcgccgccttcgtcgccctgatgatcttcggcggtcgccgggtggtgccctgggtgctggagaggatcgccgccagcggttcgcgggaactcttcaccctggccgtgctggccatcgccctgggcatcgcctatggctcggcggtgctgttcggggtgtccttcgcgctaggcgccttcttcgccgggatgatcctcaacgagtccgaactcagccacgaggcggcggagaactcgttgccgctgcgcgacgctttcgcggtgctgttcttcgtctcggtggggatgctgttcaatccaatgatcctgttgcaggagccgctgacggtcctggccaccttcctggtcatcgtcttcggcaagtcggtggccgcctacctgatcgtccgtgctttcggccatccgaacagcaccgcactggtgatcgccgccagcctggcgcagatcggcgagttttccttcattctcatcggcctgggcatcggcctcgaactggtgccggagcagagccgcgacctggtgctggccggggcgatcctgtcgatcctggtcaatccgctgctgttcatcgccatcgatcgcctgcagcaacgcaaggagcagcgcctggcggaggccgctggcggggtccgcgagatgccggcgcaggacctgccgccgccgatcctggagcgcgagcatgcggtgctgatcggtcatggccgggttggcgggttggtcagcgctcgcctgcgcgccgccgggacgcccttcgtggtagtggtggacaagcgcgacaaggccgacgaactgcgcgaacagggctacagcgtggtcctcggcaatgccgccagtcccggcgtgctggaactggccaacatcgccgaggcgcgctggttgctgatcgccattcccaacggcttcgaggccgggcagatcaccagccacgcccgcgcggtgaacccgccgctggacatcgtcgcccgggcgcatttcgacgccgaggtggactacctggagcagaacggcgccaacctggtgatcatgggcgagcgcgagatcgcctgcggcatggtccatcgcctgggactcgaccgtgacgagcgcggcgccgacgcaccgctgccgcagtcggcctga

SEQ ID NO: 359649 - DNA, 585 bp, Pseudomonas aeruginosa
atgttgcgccgtctctacgactggaccctgcgcctggccggccatccccgcgcggagctggccctgggcggggtgaccttcgccgaaagctcgttcttcccgattccgccggacgccttgctggtgccgatggtcctggccaaccgggccaaggcctggcgctacgcgacgatctgcgcgatcagctcggtgctgggcggcatcgccggctatttcatcggcttgctgctgttcgagagcgtggccatgccgatcctggcgttctacggcttgctggagaacttcgaacaggtcgccgaacgctacaacgaactgggctggctgatggtgctgctgggcggcggcttcacgccgctgccgtacaaggtgatcaccattaccagcggagtgacccagctcgacctctggctgttcgtcggcctcagccttgtcgcccgcagcctgcgcttcgccgctacctgcgctttgctgttctgggctggcccacgcctgaagaccctgatcgagcggcgcctgggcatggctttcgtgctgatggcggtgatggtggtcggtggggtgatgttggggaaatacgttctttag

SEQ ID NO: 359650 - DNA, 1203 bp, Pseudomonas aeruginosa
atgagccccaccagcgccctacctgccctagcctgcctggctgtggcgctcgccacctgtgagtttcttcgtcgccttggcagcgcgcgcctgcccgcttcccggttcgtcaccatcgacggcctgcgcggttacctggcgttcttcgtttttctccatcactcgtccatctggtactactacctgaaggatggtctctggcaactaccgccgtcccggctctacgcccatttcggccagaccagcgtcgcgctgttcttcatggtcaccggcttcctcttcgctcacaagctcctgcacagccgcggcacgccgatcagatggctggatgtctatgcatcgaggatcgcccggctgctcccagcctatctcctggcaatggcactgctattccttttggtgttcacggccaccggcttttccctgcgcgaggcgccctcggccctgcttggcaagatgctcgactggttgctcttctcgataccgagcaagcctgacatgaacggtttcatcgggacattccgcatcgtggcaggggtgacctggacgctgccctatgagtggttgttctacttctgcctgccattcctcggcgtcctgctcgggaaccgtccttccccagtagccatggccatcatggcgggcatgatctggctggtactgaaagcctggcagccgaactggacgctcgcctatatgttcgtcgctggtggggtgtcagcgctcgcggtacgctcgacgcacctgcagcgattcgccgcgagtattcccggcaatctcctatgcctggcgctcctgctcctacccggagtgctctttcccagcgcctatcaggaaacggcgatcctcattctcggcctggctttcctgctgattgcggcgggttcgagcctattcggcctgctgactcaagcactgtcccgcttcctcggcgaaatgacctacagcatgtatctgctgcacgggtgcatcctattcatcagcttcgaactgctgatcggcagggacaacgccaaggcgttttccgctctggaacactggctggtcataggcgcgatcactcccctggtggtgatcgcgtcgtacctatccttccgtttcatagaaagtccggccatgcaacgctccagacaactcagcgctctgctgggcaaaccgatgctggcgctcaagcgcctgggccgtcccccgactgctggctaa

SEQ ID NO: 359651 - DNA, 873 bp, Pseudomonas aeruginosa
atgccacgcacgccccacctgctcgccatccagtcccatgtggtcttcggccacgccggcaatgccgcggcggtgttcccgatgcagcgcatcggaatcaacgtctggccgttgaacacggtgcaattctccaaccacacccagtacggtcgatggaccgggcaggtgctgccgccggagcagatcccggcgctggtggacggtattgccggcatcggcgaactgggcaactgcgacgcggtgctgtccggctatctcggcagcgccgcccagggccgcgccattctcgacgtggtggcacggatcaaacaggccaaccctcgggcgttgtacctctgcgacccggtcatgggccacccggaaaaaggctgcatcgtggccccggaggtcagcgacttcctgctggaagaagccgccgcggtcgccgactacctgtgccccaaccagttggagctggacagcttctgcgaccgccaaccgaactccctcgccgactgcgtggaaatggcacggagcctgctggcacgcggtcccagggcaatcctggtaaagcacctgaactatccgggcaaggccggcgacaccttcgagatgctgctggtggccgccgatcaggcctggcacctgcaacgcccgctgctggccttcccgcggcaaccggtcggagtcggcgacctggcctcggggctgttcctctctcgcctgctgctcggcgacgacttgcgtaacgccttcgaattcaccggcgccgcggtccatgaagtgctgctggaaacccaggcctgcggcagctacgagctggagctggtgcgggcgcaggatcggatcgcacacccacgtctcaaattcgaagctcgctcactcgcaatgtag

SEQ ID NO: 359652 - DNA, 501 bp, Pseudomonas aeruginosa
atgggggctaattcacatggcgaaaacaccccccactcgctgcctgccgggagaacgggtaagctgaccttccccctacaccggattccgctcgtgaccctgggtaaccttttcgtcatgctcctgttgggcgccgccgcagcctggtggtggcgcgcccatggcgtgcgcgagcgggcgttgctgctggccaagcagcattgcgccaagcagggcgtggaactgctcgacgagaatgtcgcgcgccggcgcctgcgcctggcccgtgaccaccgtgggcagtggcggctgagccgcgagttcggtttcgaattcaccgtcagcggcgaggaacgctacgccgggcgcatcgtcatgtatggctatcacctcggcgccatcgaattggccccgcatcgcttcgaggcggccgccgaggtcgacaacccgccggtgcatagcgccgaggtgattcgcctcgacgagtggcggcagtcccggcagaaaaaggtcggcgactga

SEQ ID NO: 359653 - DNA, 789 bp, Pseudomonas aeruginosa
atgcgccctctcctcttcagtgcccttctcctgctttccgggcataccaaggccagcgaatggaacgacagccaggccgtggacaagctattcggcgcggccggggtgaaaggcaccttcgtcctctacgatgtgcagcggcagcgctatgtcggccatgaccgggagcgcgcggaaacccgcttcgttcccgcttccacctacaaggtggcgaacagcctgatcggcttatccacaggggcggttagatccgccgacgaggttcttccctatggcggcaagccccagcgcttcaaggcctgggagcacgacatgagcctgcgcgacgcgatcaaggcatcgaacgtaccggtctaccaggaactggcgcggcgcatcggcctggagcggatgcgcgccaatgtctcgcgcctgggttacggcaacgcggaaatcggccaggttgtggataacttctggttggtgggaccgctgaagatcagcgcgatggaacagacccgctttctgctccgactggcgcagggagaattgccattccccgccccggtgcagtccaccgtgcgcgccatgaccctgctggaaagcggcccgggctgggagctgcacggcaagaccggctggtgcttcgactgcacgccggaactcggctggtgggtgggctgggtgaagcgcaacgagcggctctacggcttcgccctgaacatcgacatgcccggcggcgaggccgacatcggcaagcgcgtcgaactgggcaaggccagtctcaaggctctcgggatactgccctga

SEQ ID NO: 359654 - DNA, 879 bp, Pseudomonas aeruginosa
atgtcgctatccccctggtcccattcttgctcggccggtttcaccctgcgcggctggcgcagcgaaccgagcggcaagccgttgctgcatttcctccatggcaacggcttctgcggccgcacctacgaaccgatgctgcgtctgttggcggaggatttcgacctctggctgtgcgacatccagggccacggcgaaagcgaccatggcggccgcttccacggctggaaccgcaacgccgagatggcggtggaggccttcgaggccgggcgcggtccctatggcgatgtccagcgactggcctgcgggcacagcttcggcggcgtcctcagcagcctcgtcctggcccgccatcccaccctgttcgcccgcgccgtgctgctcgacccggtactgttcaccccggcgatgatcggcgtgatggcactttccgagaccctcggcctgcaattgcgcggcagcctggcgaagaaggcgcgcctgcgccgcagccagtggcccgatcgcgcagccgcctacgccggcttgcgcggccgcggtatcttcaagggctggaccgacgaggcgctgtgggcctacgtggaatatgcgctgaaggagagcgacggcggagtcgagctgaagtgccggccaagccgcgaagcggagatcttcagttccttccccaggctgctgtggccgtcgctgggcaagatcatcacgccgacccgcgtgctctacggtgaccgcacctaccctttcgtcgccaagtcggtggcgcgctggtgctcgctcaacccccaggtcagcgcccacgcggtggtcggcggccactgcttcatgcaggaagacccggccgctgccgccgaacgcgtacgcgactttctcctgcccaatccatga

SEQ ID NO: 359655 - DNA, 1344 bp, Pseudomonas aeruginosa
atgagcgaccaggtgatcttcgtcgacgacgaagcgacgatccgcgaagcggtgcagcaatggctggagctgtccggcttcgaggtgcgcctgtgcctgcgcgccgaggaatgcctggaagcgttggacaagtccttcgccggggtggtcatcagcgatgtgcgcatgcccggcatggacggcctgcaactgctcgccaacctgcaggcggtcgatcgcgacctgccggtgatcgtggtcaccgggcacggcgacgtgccgatggcggtggaggccatgcgccagggcgcctacgacttcatcgagaaacccttcacgcccgagcgcctgctcggcagtttgcggcgcgcgctggaaaagcgccgcctggtgctggagaaccggcgcctgaaggagcaggccagtctcaaggaccaggtcgatgcgcgtctgctcggcgtgtccaagccgatggaagcgttgcgccggcaggttctggccctggcgccgaccccggtgaacgtcctgattcgtggtgagaccggcagcggcaaggaactggttgcccgctgcctgcacgacttcgggccgcgcgccgacaagccgttcgtggcgctgaactgcgcggcgattcccgagcaactgttcgagagcgagctgttcggtcatgagagcggtgccttcaccggcgcgcagggcaagcgcatcggcaagctcgagcatgcccatggcggcaccctgttcctcgacgagatcgaaagcatgccgttggcgcagcaggtcaagctgctgcgcgtcctgcaggagcagcaactggagcggctcggctcgaaccagagcatccacgtcgacctgcgggtgattgccgcgaccaagcccgacctgctggccgaagcacgtgccggacgcttccgcgaggacctggtgtatcgcctgaacgtcgccgagttgcgcctgccgccgatccgcgagcgtcgcgaggacatcccgctgctcttcgaacatttcgccagcgttgccagccagcgcctcggccgcgagccgcagcccgccgcgccggcggaactggcgcggctgatggcccacgactggccgggcaatgtacgcgagctggccaacgccgccgagcgtcatgtcctcggcctggagcgcggggacgcggaggaaggcggcggcctcacctcggggctggcggaacgcatggaagccttcgaggcggagtgcctgcgccaggcgctcggccagtgccgcggggacatcaaggcggtgatggagttgctgcaactgccgcgtcggacactcaacgaaaagatgctgcggcatggcctcagccgcagcgatttcgtcggcgaagagccggcctga

SEQ ID NO: 359656 - DNA, 1350 bp, Pseudomonas aeruginosa
atggccatcgaacagttcggataccggcaacagctgcgccgcagcctgtccctgagcgacctgatcatctacgggatgatcttcatgatccccatcgccccgttcggggtctacggctgggtccatgccgacgcccacggcatggtgccgatggcctacctggtgggcatgctggcgatgctcttcaccgccctcagctacggagccatggccaaggcctttccgattgccggctcggtgtattcctatgcgcagcgcggcatccacccccatgtcggcttcatcgccggctgggtgctgctgctcgactacctgctgatcccgccgctgctctacgtgttcagcgcactggcgctgaaccacttgttcccggcgatccccaagctggcctggatgctgctgttcctggtctcggcgaccctggtcaacctgcgcggcatcaccttcgccgcccgcgccaacctgttgttcctgatcggagagctggtggtcctggcgatcttcctggtggtcggctaccaggcgctggaaggcggcctgggcaacggccggctgaccctcgaaccgctgtatcgcccggaggccttcgatctcggcctggtgatgaaggccgcctcgatcgccgtactgtcgttcctcggcttcgacgccatctccaccctcgccgaggaggtcaagggcgatcccgcgcgacagatcggccgcgccgcgctgatcgcgctgttcatcatgggcggcatcttcatcgcgcagacctggctggccaccgacctcgccgccgggatgaacttcaagtcggcggacaccgccttctacgagatcgccgaagcggccggtggccagtggctgtcgatgctgaccgcggtagccaccgcgctggcctggggtgtcaccgtgtcgatcacctcgcaggcagcggtttcgcggctgctctactcgatggcccgcgacggcaggctgccgcgcgcgctggccagggtccatccgcgctaccagacgccgcacgtcagcctgtacctggtggcggtgctgtcgctgggaatcggctgggccttcctcgacgcaccggacgtgctcacctcactggtgaacttcggtgccctcaccggcttctgcctgctgcacctgagcgtgatcaaccactactaccgccgccagcgctccggccagtggttgcggcatctactgttcccgctggtgggcctggcgatcatcgcctacgtgctgtacagcatgagcctcgacgcacagttgctcggactggcctggatcgcggtggggctggtctacctggcgttgctgcaacgcggcgggcgccaggcgccaacggagttggccaaggatctctga

SEQ ID NO: 359657 - DNA, 753 bp, Pseudomonas aeruginosa; identical to SEQ ID NO: 337799

SEQ ID NO: 359658 - DNA, 1332 bp, Pseudomonas aeruginosa
gtgaaccgcctgcagccggtacgcctggtcagcttcgtcaccaccgacctggccggcatcacccgcgggcgctcgctgcccctggcgaccctggaagagcaactggccagcggttgcggctgggtaccggcgaacagctcgctgaccccgcaggacctgatcgacgagagcagcccctggggcagccacggcgacctgcgcctgctgcccgacccgaacagccgggtgcgcgtcgagcagggtcccgacgccgctgcgccggcgctcgactacctgcacggcaacctggtggaaaccgacggcacgccgtggccggcctgcccgcgcggcctgctgctggccgaggtggaacgctatcgcgacagcggcctgcaggtcatcgcggcgttcgaacacgaattcagcctgctcggcctgcccggcgagcgtccggccgcggcgttttcgctgcaggcccagcgtgccgccgggcagttccccggctggctggtcagcgccctggcccaggccggcaccgagccggagatgttcctccccgaatacggccagcgccagtacgaggtcacctgccgcccggcgcagggcgtggccgccgccgaccgcgcggtgaacgtccgcgaggtcactcgcgaagtggcgcggcagatgggcctgcgtacctgcttcgcaccgctgccggcacccggcgcggtgaccaacggggtacacctgcacctgagcctgcaacatgccgacggcagctcgctgctgtacgagcccggtcgacccaacgatctctccgaactcggcgagcactgggccgccggcgtgctcgcgcacctgccggcgctgtgcgcgctgaccgcgcctaccgccgcctcctacctgcgcctgaaaccccaccactggagcgccgcctacgcctgcctgggactgcgcaaccgcgaagcggcgctgcgcatctgtccggtggtgagcgtcggcggcaagccgctgggcaagcagtacaacctggaattccggccgatggacgccaccgcctgtccgcacctggcgatggccgcggtgctgatcgccggccgcctgggcatcgaacgacgcctgccgctgcgcgccctggccgatgtcgatccgcacggcctcagcgacgaagagcgccaggcccgcggcatccaggccctgccggcgaccctcggcgatgcgctcgactgcctgcagcgcgacgagacgctctgcgccgagctgccaaagccgctgctggacacctacctcgccatgaagcgccacgaactggcactgacggcgggcctttccgacgacgacctgtgccgccactatgccgagctttactga

SEQ ID NO: 359659 - DNA, 654 bp, Pseudomonas aeruginosa
atgttcagcctgccccaccactcgccgcgcgacctgccgttcggccgccggcagaccgccatcctgttcgtcgacatgcagcgcgcctgggtcgagccggggcgcgacccgcacgtcgatccgcaggcggccggctacttctacgagcgcgtgcagaaccaggtgatccccaaccagcagcgcctgctcggggccatgcgcgcagtggacgagaacgtcctgcacaccatcatcgagagcctcaccgccgatggccgcgaccgctcgctggatcacaagctgtcggagatgcacttgcccaagggcagcccggacgccagggtgatcgacgccctggagccgaccgccaacgagatcgtgctgccgaagacctcttccggcgttttcaactccaccgccatcgactacgtactgcgcaacctcggcacccgccacctgatcgtctgcggggtggtcaccgaccagtgcgtggacatggccgtgcgcgatgccgccgaccgcggctacctggtcaccctggtcgaggatgcctgtgccacccataccccggaacgccaccaggcctgcctggaagcgatcaagggctactgctggatcagcgacaccgagaccgtcctgcaacgcatcgccgccctcggccggagcaacctgtga

SEQ ID NO: 359660 - DNA, 858 bp, Pseudomonas aeruginosa
atgcaagaactaaaacaacgcctggcctccccgcccgccgaactgacgcccgcggagcgcaaggtggtgcgtgccctgctcgatgactacccgcgcctcggcctcggtccgatgacgcgcctggcccggcacgccggagtcagcgacccgacgatcatgcgcctggtgaaaaagctcggcttcgccggctacggcgacttccaggaagcgctgctggccgacgtcgacgaccgcctgcgctcgccgcgcaccctgctcgccgaacgccgcgagcggatgggccgcgacgacacctgggcgcgctacctcgaccaggctggccagagcctgcaacagaccctcggcctgacccgccccgatgacatccagcgcctcgccgactggctgctcgacagccgcctgcgcgtgcactgccacggcggacgcttcagccgtttcctcgccggctacctggtcacccatctgcgcctgctgcgcccgcaatgccgattgctcgacgacggcgccctgctccccgaccaactctacgacctcggccgccaggacctgctggtcctgttcgactatcgccgctaccagagccaggcccagcacgtggcccaggccgccaaggcacgcggcacacggctggtgctgttcaccgacatctacgcctcgccgctgcgcgaacacgccgacctgatcgtcagttcgccagtggaatccgcctcgcccttcgactcgctggtgccggccatggcccaggtcgaggcactggtagcgaccctggtggcgcgcatgggcgcgccgctcgacgaacgcctggagggcatcgaccagctccgcaacgcgttcagcagtcatcttctggaggaatga

SEQ ID NO: 359661 - DNA, 783 bp, Pseudomonas aeruginosa
atgaaaaaactgcttgctgctttctccgctgtcgcggcgctcggcctcaccgccgcccaggccgccgagaccctcaccgtcgcggccaccccggtgccgcacgcggagatcctcaatgtggtcaagccgctgctggccaaggaaggcgtggaactgaaggtcaaggagttcaccgactacgtgcagccgaacgtgcaggtctcggagaagcgcctggacgccaacttcttccagcaccagccgtacctcgatgagttcaacaaggccaagggcaccgacctggtcgccgtgaccggcgtacacatcgagccgctgggcgcctactcgagcaagtacaagaagctcgacgaactgccttccggcgctaccgtggtgatccccaacgacgccaccaacggcggccgcgccctgctcctgctggacaaggccggggtgatcaagctcaaggacaacaagagcatcaccgccacgccgaaggacatcgtcgacaatccgaagaacatcaagatccgcgaactggaagccgcgaccctgccgcgcgtgctgacccaggtcgacatggcgctgatcaataccaactacgccctggaagccaagctgaacccgaccaaggatgcgctggccatcgaaggcagcgactcgccctacgtgaacatcctggtcgcgcggccggacaacaaggacagcgacgccatgcagaagctggccaaggccctgcacagcgccgaggtcaagcagttcatccaggagaagtacaaaggcgcagtggtaccggcgttctga

SEQ ID NO: 359662 - DNA, 678 bp, Pseudomonas aeruginosa
atggacttcttcgaaaccatgagcttcgccaacatcgactggtacgaaatctggctggccagcgtcgacaccttctggatgctcggcggttcgctgctgttcacggtggtcctcggcctgcccctcggcgtcctgctgttccttaccgggccacggcagatgttcgagcagaaggcggtctacaccctgctctcgctagtggtgaacatcctccgttcgttgccgttcatcatcctgctgatcgtgatgatcccgctgaccgtactgatcaccggtacctcgctgggcgtcgccggggccatcccgccgctggtggtgggcgccacgccgttcttcgcgcgcctggtggaaaccgcgctgcgcgaggtcgacaagggcatcattgaggcaacccaggcgatgggcgccagcacccggcagatcatctggaacgccctgctgccggaagcccggccgggcatcatcgccgccatcaccgtcaccgccatcaccctggtctcgtacaccgcgatggccggagtggtcggcgccggcgggctgggcgacctggcgatccgcttcggctatcagcgcttccagaccgacgtgatggtggtcaccgtggtgatgctgctgatcctcgtccagattctgcaaaccgtgggcgacaagctggtggtgcacttctcgcgcaagtaa

SEQ ID NO: 359663 - DNA, 1008 bp, Pseudomonas aeruginosa
gtgatcgaattccacgacgtccacaagacctatcgagttgccggtcgggaaatccccgccttgcaaccgtcccgcctgaacatccaggccgggcagattttcggcctgatcggccattccggtgccggcaagagcaccctgctgcgcctgatcaaccgcctcgaggagcccagcggcggccgcatcctggtcgagggcgaagacgtcaccgccctcgacgccgaaggcctgcgccgtttccgccagcgcgtcgggatgatcttccagcacttcaacctgctgtcctcgaagaccgtcgccgacaacatcgccatgcccctgcgcctggccggcggcttcagccgtgccgaagtcgatgcacgggtttccgagctgctcgcgcgggtcggcctgtccgaccacgcgcgcaagtatccggcccagctctccggcggacagaaacagcgcgtcggcatcgctcgcgccctggcctgccggccgagcatcctgctctgcgacgaggccaccagcgccctcgatccgcagaccaccgcctcggtcctgcaactgctggcggaaatcaatcgcgagctgaagctgaccatcgtcctcatcacccacgagatggacgtgatccgtcgtgtctgcgaccaggtcgcggtcatggacggcggcgccatcgtcgagcagggcgatgtcgccgatgtcttcctccatccgcagcacccgaccacccgccgcttcgtgttcgaggccgaacgggtcgacgaagacgagcgtcacgacgatttcgcccacgtgccgggtctcattctgcgcctgaccttccgcggcgaagccacctatgcgccactgctgggcaccgtggctcggcagaccggggtcgactacagcatcctttccggacgcatcgaccgcatcaaggacacgccctacggccagttgaccctggccctggtcggcggtgacctggaagccgccatgagccagttgaacgccgctgacgtacatgtggaggtactgcgctga

SEQ ID NO: 359664 - DNA, 792 bp, Pseudomonas aeruginosa
atgatgtcgtccttctttcgcctgctgtccatcctggcggcggcgctgctggtcagcgcctgccagggcaatgcgtcgtcgcaaccgacgccggtggtcgcgccccaggcgcagcccgccgatccctatgccgaactgcaggaaaccctggccgccggcaagctcgaacaggccgagcaacaatggctggccctgcgcagcgccgccgccggcgacgagcgcgtcgaagcattccgccgccagttggccgaggcctacatgcagcgcggggaaaccgcgctgcgccaaggagacctcaacaccgccaccagtgccctcggccatgcccgcggactgatgcccaaggcgccggcgctgaccgccgggctggacggtgcgatcaaccgcgccaaggtcgatcccgcccgtgccgagcaggcccgacgcatgcagcaggcggcccggcagcagatgcagcagatcatccagacgccgcccgacggcgaactgaagccgctgcccggcgctccccacctgatcgatccgcaagcggccagcagcgccgtgcccctgccgatgctcgacggcaccggccagggcggcctcggtgcggtgctcgacgcggtggccgcggatgtcgtcgcctaccgttgcagggtgcatatcgaagtgcgccgggacagcgactatccgctggtttccgaccagctcctggcgcgggtgaagaagctctcacccgatttcgacctgcatctcagccatgtcgtacaggccgacaagccgacccgattgatacttaccccccggaattga

SEQ ID NO: 359665 - DNA, 789 bp, Pseudomonas aeruginosa
atggctgacttcctgctcaacgccctcctcgccggcctcgccctagccctggtggctggccccctgggctccttcgtggtctggcggcggatggcctatttcggcgataccctgtcccacgccgcactgctcggggtagccctgggtatcctcctcgatgtcagcccgaccctggctgtgaccgtcggctgcgtgctgctcgcggtgctgctggtgaccctgcagcagcgccagccgctggccgccgacaccctgctgggcatcctcgcccacagcaccctgtcgctgggcctggtcaccctgagcttcatgaaggaagtgcgggtcgacctgatggcctacctgttcggcgatctactggcggtgagcgccagcgacctgctgtggataatcgccggcagcgcgctggtcctggcactgatctgcttcctctggcggccgctgctggcgatcaccgtgcacgaggaactggcgaaggtggaaggcctgccggtcggagcgatccgcctggcgctgatgttgctgatcgccatcgtcattgccgtggcgatgaagatcgtcggcgtactgctgatcacctcgctgctgatcattcccgccgccgccgcccagcgccatgcccgcagtcccgagcagatggcggtcggtgccagcctgctgggactggtcgcggtgtgcgccggcctggccctgtcctggttcaaggatacccccgccggcccctcgatcgtggtcagcgccgccggcctgttcctgctgagttttgtcctgccccgccgcacggtgtag

SEQ ID NO: 359666 - DNA, 810 bp, Pseudomonas aeruginosa
atggacaacgcgctggtgcggctgacccaggtcggcgtgtccttcaacggccaggcggtgctgagcgatgtcgacctggccatcgagcccggccagatcgtcaccctgatcggccccaacggcgccggcaagaccaccctggtacgcagcgtgctcggcctgctcaagccgcacgtcggcgaggtctggcgacggccgcggctgaccatcggctacatgccgcagaaactccacgtcgacgccaccctgccgctcagcgtactgcgcttcctccgcctggtacccggggtcaggcgcgagcaggcgctggcggcgttgcgcgaggtcggcgcggcgcacgtgctggagcgaccgctgcaaagcatttccggcggcgaactgcaacgcgtgctgctggcccgcgctctgctgcgcaagcccgagctactggtgctcgacgagccggtgcagggcgtcgacgtcgccggccaggccgaactctaccgcctcatcggcaaactgcgcgaccgctacggctgcggtgtgctgatggtctcccacgacctgcacctggtgatgagcgccaccgaccaggtggtctgcctgaaccgccatgtctgctgctcagggcaccccgagcaggtcagcggcgacccggccttcgtcgagctgttcggccaggacgctcgcagcctggcgatctaccaccaccatcacgaccacgcccacgacctccacggcgaggtggtcaaggccggtcccggcgccttgcctccaggcacccgcttcactcctgtccacaagcacggccccgactgcaaccatggctga

SEQ ID NO: 359667 - DNA, 924 bp, Pseudomonas aeruginosa
gtgaccctgcgtccctttgccctgctgtccgcctgcttcgccctgttcctgctggcttcgccggcgcgcgccgaggtcagcgtgctgaccagcatcaaaccgctgcaactggtcgccgcggccatccaggacggcgtcggccagccggacgtactgctgccgccgggcgcctcgccacaccagtacgccctgcgtccttccgacgtacggcggctgcgcgaggtgcaattgttctactggatcggcccggacctggagaacttcctgcccaaggtgctcgccggccgccagggcaccagcgtcgcggtgcaggacctgccgggcatgcacctgcgcaagttcgtcaatttcgaggaagaggagcatgccgggcacgacgagcacgaccatgaccatcgtcccggcatgctcgacgcccacctctggctgttgccggccaacgcccgcaccatcgccgcgcggatggccgaggacctggcccaggtcgacccggccaacgccgggcgctaccgggccaacctgaaggccttcgaggagcgcctcggcgggctcgacgggaaactccgcgaacgcctgggcaagcttgccggcaagcctttcttcgtcttccacgaagccttcgactatttcgaggaagcctatgggctgcgccataccggcgtgttcgcggtatccgcggaggtccagccgggagcacgccatgtcgccgccatgcgcgcccagctgaaggccgccggtccggcctgcatcttcagcgagccgccgcttcgaccgcggctggccgacaccctcagcgaaggcctgccggtgcgcctggccgaactggacgacctgggcgtgaacgtgagcgtggacgccaacggctatgagaatcttctgaacaacctggcaggcgaatttgccggctgtctggaaaagctctga

SEQ ID NO: 359668 - DNA, 2205 bp, Pseudomonas aeruginosa
atgttgcgtacggtggccggcttcggacgccccaacaaccatcgggaggttaatcagcggatggccaagacagacgcacgcagtccccgcaccgaacgcgggaccatcgccctgcaggacgcgtcgcaggatatctgggacaagaagtaccggctcaagagcaaggacggtacgccggtggatgccagcgtcgacggtacctggcaacgcgtcgcccgcgccctcgccgatgtcgaggacaaggcctcccgcgaacactggtacgggcgcttcctctgggccctgcgcaacggcgccatcccggccggccggatcatctccaacgccggcgccctggggcacaagccggccacctcgaccatcaactgcacggtgtccgggaccatccaggactccatggacaacatcctcgagaaagtccacgaggccgggctgacgctcaaggccggctgcggcatcggctatgagttcagcaccctgcgcccgcgcggcgcctacgtttccggtgccggtgcctacaccagcgggccgctgtcgttcatggacatctacgacaagatgtgcttcaccgtcagctccgccggcggccgccgcggcgcgcagatgggcaccttcgatgtcagccacccggacgtccgcgaattcatccgcgccaagcgcgaggacgggcgcttgcgccagttcaacctgagcctgctgatcaccgaccagttcatgcaggcggtggaacaggacgccgactggccgctggtattcccggtgcacgtgaaggagcgcgacgagatcgacctcgacgaccccaacgcggtggtctggcgcgaatggccgatccaggacgactacgtccagcgcgccgacgggctggtcgcctgcaaggtctacggccaggtccgcgcccgtcacctgtgggacatgatcatggtctccacctacgactatgcggagccgggcttcatcctcatcgaccgggtcaacgaactgaacaacaactggtggtgcgaggcgatccgcgccaccaacccctgcggcgagcaaccgctgccgccgtatggctcgtgcctgctcggctcggtgaatctcacctgcttcgtcgagcagccatttggcgacgaggcgcgcttcgactgggaccgtttccgcgaagtggtgcgggtgtttacccggatgctcgacaacgtggtggaaatcaacggcctgccgctggaacagcaacgccaggaaatccttggcaagcgccggcatggcatgggcttcctcggcctgggctcgaccctgaccctgctcaagctgcgctacggcagtcccgaggcctgcgtattcaccgaggaagtggcgcgggaaatggccctggtgggctgggaagtggccctggagctggccagggagaagggcccggcgccgatcctggcgcaggactacgaagtcaccgcggaaatgcttcgcaagcgtccggaaatggccgccgatggctataaggccggcgaccgcatccgcggcagcgtgcttcacgccaagtattcccgctacatgcagcgggtcgccgaacatgctccggaactgatcgaggcgttggctgaaaccggcgcgcgcttcactcaccacagctccatcgcgccgaccgggaccatcagcctgagcctggccaacaatgcctccaacggtatcgagccgagcttcgcccaccattattcgcgcaaccttatccgcgaaggccgcaagaccaaggaaaaggtcgaggtctacagctacgagctgctggcctaccggaccctggtcaacgcccaggccctgccggacagcgacgacccggcgcgacgcctgccggactacttcatcaccgccgacagcgtcaccccggcgcagcacgtggacatccaggcggcggcgcagaagtgggtcgattcgtcgatctccaagaccgccaacgtgcccaccgactacccgttcgaggacttcaaggacatctaccgctacgcctggcaccagggactcaagggctgcaccaccttccgcttcaatcccgaggcgttccagggcgtgctggtcaaggagtccgacctggagaagacccgctaccgcttcgaactggaggacggcagcgtggtggagttcaagggcaacgagcaggtcgagtacgacggtgagatccataccgccgccaacctcttcgacgccttgaaagaaggctattacggcaagtactga

SEQ ID NO: 359669 - DNA, 690 bp, Pseudomonas aeruginosa
atgtcagcagtcaagatcacgcagaagatcaagggcttcaaggtcgtcaacgaagccgaggagcaggcccttgccgccgccgcggaagccgcgtcggtggtgcagatggacgagaccctggagcgcccggataccctgatcggcgccacctacaagatcaagtcgccgctgttcgagcacgcgctctacgtgaccatcaacgacatggtcctcaacgcgggcacggcgcacgagcagcggcgtcccttcgagatcttcatcaactcgaagaacatggatcatttccagtggatcgtcgcacttacccgcatcatgtccgcggttttccgcaagggcggcgactgcaccttccttgtcgaggaactcaaggcggtattcgacccgcgcgggggctacctgaagaaaggcggcatctacatgccttccatcgtcgccgagatcggcggcgtgctggagcgccacctgacggccatcggcctgttgcgtggccctgaactggacgaggaacagcgtcttttcctcgcggaaaaacgcgccgcctacgaggccgcccagggcaccagcaaggtcgagccgggcgaaggcttccccgccggcgcgcaactgtgcggcaagtgcaacagcatggcggtggtacagatggacggctgcgccacctgcctcaactgcggacactcgaaatgtgggtga

SEQ ID NO: 359670 - DNA, 3006 bp, Pseudomonas aeruginosa
atgacggctgccaagtcagcagtgaaaatgcccgaactgctggtatttgcccgactactcgccactggttttataggagcagaggttgggcgggccgccttctacctaggcacgagttttgcgccaacagtgtctggtgtagcgctatgcgccaaaatcggcgggatactcttcgggcttctcttatgtctgatctatgcagaggagcgtggggcatacgcaacggctgtaaaattggggcgcagtcttcgtattgatctgctgggggcgcttgttgtgggcatctggatcaacgacctgacctcgcccttactttccaatatccatgtcgtattgaagagtgcggaccctcattgggcccccgcgatcttctgtatgctctgcgtcgtgctgttgtcgccactgtttcaaaaatattggccgagacgaagtagagtcgctcctcagttgtatttcatggcggacgaagagatccgggataataacgaagacttgcttgcaaacaaggagcaagccaagtcattcgcagagactgtcctcgcgagtggcgctcatcctgggcttgtctttggggtcgacgggccgtggggggtaggcaagacaagcttcatcaatcttgctgagcgttactgggaaagcgctcgtgaccaagtaattgtttgtcgattcgaaccccttcgatacgcatccgaaccagacttggcagatcgcttaattcgcgatttatcttcagccattcaaaataatgtattcgcaccagagtttcggccgacggcttcacgatactctcgattgataaaggggaaagccgatttctcgttcctagggttcaagatctccttggagccttcgcaggaaaccgtagatgagctacttgatgacatagacgaagtccttcggcgtatcgggcgccgtgtaatcatcgttattgacgaccttgatcgtctagatgcaaaaactacgaacaatgtactgtttgcaacacggcgaaccttcaagctttcgcaggccacctatgtcctctgctatgacacagaggtacttgctggaaaccaagaggaaggctctcgggctagggaatttcttgaaaaatttgtgactgtcaagctaagtctattcgttgatagttcaagtgtgcgcgacttcctacgaagggactggcaaaacgcagatacccaactaggcacaattccttccgacacgatgctgaagctcagctctgtactcagcgagttagcagatatacttgacggtaacctggcggcgaagtacctacctcttgttggcaatatccgcaaggtgaagcgcctcgtaaacgcaatgctgctcatgcagcttgaaaaaagcgatttgcatcggacggactttaataagcgggatcttatcaatctcgtgctcttgcacctgaattacccagggttattcagacagatctatgcagaagagacagaggggcgtcacggaaccttctccgtaaagcgtaattacgaccaacgtgaatttacgaattcagctgagttctctgagctagtgggggctcaacaagaaccagctgcattccttttgacgcagcttttcgatataacagttctcgaactcaaagcgctgaacgaggcggacgaggcgttgctagcatcacgcgcctgtttcaatcaggactcatttagaaatctagagggatatttaaagctaattgtgcgcttcgttacaccggagccgcaggagacttttgtactgtaccaaaaggctgttgaggctgttcaaaacggggcctccattgcttccattttagcctcacctgaatttcagcttaagttaggagagcactcacatgaccaattctggagggtactcgtcaaccagtcctatgacttcactcaggctaccgccgacgattctataaacacgcttgtcgactgtctgccgctttacggggcaatcaaggttatggatcgcggcttgcggcagaggtctgtgtactccctactgcaccttctggatcgcgccggttggggccgtacagcaggtcgccggcgctcgaataccccggaaaacatcgtagaaattgcatggcgcatattcggcgaaggaccccatctcaatcgcggtctacttcagcgcattgctagcattgatcgtggtgttcttggctggtacgacctaatgctgtttcggctccaatgttcagcagatcgccaggggcaattgcacaacctgcattcagccctcattgtgaatcaggatatgagtgctgcaacaaccggttacgtcaccaacctcgctctaatgggcatgagaaaattgtctcaagaggttttcgcactgttcaagcgagattacattgccccccagaggaattttttctcagcggtcaactgcgtccgagatgaagatcttcttggccaagctgcgtcgtactctgctcagtcggagtcagagaaccaacagtctgagtgggctggagcctcgattggtatacggatttcctccgcacgttcggccattaagtcctttgtgatttaccaactgagtaacccgcaggctcctggtggatccggcgtgggctgtggttactacgacgagtgtggtgccaacgatggtggaggtatatcaagattgatgaattcatacgtatttgatgtttgcttcaaccccgccattgatgaagacaacatcttcttgttcattgaccactgcttggcgcatttgagcaattcatttttttcggctggagatggagatggagatggagatagctactttgcctctaggtcggaacttccaggaggtctcgatccggaacgcatgaagcgatactggcagcagcaccgagagttaattcgacagcgcgtcctaggtcaagaggagcggcaagtagttacgtctaactacatagcttattaccatgaaaatcttgcaggagtattcagggtgcttgatgagatgattgatgagcgagcagcggctgaagggggaggcgacgagctttcgtctacaccaccataa

SEQ ID NO: 359671 - DNA, 1389 bp, Pseudomonas aeruginosa
atgaactacaagcgtaaagccatttcagtaaatagcgtcttacttgactctgagaatgcccgacacggaaaaaaagagtctcaggaggagatctataagtggatgactagtgggagtgtaagaattaaagtcttacgccttgctagagaaatcgcaaataaagggcttagtcccatggagatcccagcggttattcccgcaacattgggacaaaaaaaaccatgggtagttgtagaaggcaatcgccggttagcagctataaaattccttaacaaccccaagctctgccccgacaaaggcacacgaagacagtacgagtcgattaagaaatcagcactggttagcatccctagcaggattgaatttgttctatttaacgacttcgagcaatccagctactggctaactattagacacggaggggaaaataaaggagttggcgtttcagactggggccctaaagaattcaatagtctttcagaacgccttggaaaaaaaacagtaaactcaccagcaatagccctacttgcatacgcactaagcaagggaattatagacgaagagtactaccataaaatccctgtaacaaccttagctcgtgtaattgggacaaaaggcgtcaaaagccaaatagggtgcaaaatctccagaggggtcatatcacgcatagttgatgaaaattactttgacctggcaatatccgacatactcgaagctcttgctactagcaagaaaaccgtatcagacttaaaaagagaggggcagcgtgtagattttgtcttacaactgaaaaaaaatggacattggggagactatactcccagcgaggaaacccctctgactgagtctccagaacaagaccagtcagaagacacacaagaaagtggggatgatgaggagaataacttcaagcctagtaccatggctaaaccaaggtccggcctgagagaaaaactattcactccaaagggacacggcttaaacataccaaacaatgaaatcaaggttcacgacattctaagagagctagcaacccttaagcattcagggaaaagcggaacgcctatatctgtcgccttccttttccgtgctttaatagaactaagttcagacaattacctaaagagaaatccggatgctattagaaagctggaaatgaacaccagcctaagagaaaaggtaaaatgctccgcaaaacacatgcatcatcataacagattatcgagcgaccacacggaggttgttctacgccattgtgacgaggaaggaggaatgttaaatataaataccttacaaagatatctccactcgactgcatacttccccaacggggaaactcttaattcgatgtggagtgaaatcaaggaatatgtaatagcatgttggtaa

SEQ ID NO: 359672 - DNA, 861 bp, Pseudomonas aeruginosa
atgtcttccgccccttcatttgttacccctctacgttatcctggcggaaaaggccggctaggagcatggttggccgggctgatcgagcacaatgggctaaaaaaaggatgctatgttgaaccatatgcgggtggggcaggggctgccgtttacctgctggtgaataatcatattgatagaattgccatcaatgatttggaccctgtcatttatgccttctggtgggctgtaattaatgatactgatcgactcgtaagtatgattttggaaacgccggtgactatggatacatggcaccagcagcgggaaatcgtggtgaatcagtgcgatgtcgaccggactacgttggggtttgctaccttctttctgaataggacgaatcgctctggtatcattacaggtggagtgatcggtggccagaggcaaacaggtaagtatctgattgatgcgcgatataacaagcctgaacttgtaagtcggattagaagaattggtagccagcgagagcgtataaagctgttcaatatggacgctttgcaacttctcaatcatccagggttggagctggatgctcagtctttgatttatcttgatccgccttattacgagaagggaagtcagctctatcggaatcactatctacccgatgatcatcagtgcattgctaatgctgtgatggatattcaagttccctggctggttacttatgataattgtgatgaaattaggcagctttatgctcaggcaagtggggtggagttctcactccactactccacgcacatgttaaggcccagatcaactgaggtaatgttttttggtaatatgagcttgcatcagcagccatggctaaagcgttaa

SEQ ID NO: 359673 - DNA, 198 bp, Pseudomonas aeruginosa
atggctcatctcatcgaacgtatggcctatgtcggcgaagcgccctggcatggcctgggcagtcgcctctccccgaaacaaccgctggaagtctggcaacgcgaagccggcatggactggcaaatccaggagagccccgtccacttcaaagcggacgcagtcggccatctcggcagtatccactccttccccgagtag

SEQ ID NO: 359674 - DNA, 387 bp, Pseudomonas aeruginosa
gtgctctaccgctccgacagcaaggcgccgctctcggtggtatcccagcgctaccaggtggtgcagccgcgggaagtgctggagttctaccgcgaccttacccaggtctccggctacgagctggaaaccgccggcgtgctcaagggcggtcgcaagttctgggcgctggcgcgcaccggccagaacacctcgctgaagggcaacgacctggtcaatggctacctgctgctggccacgtcctgtgacggcaccctggccactaccgccacgcctaccacggtgcgggtggtgtgcaacaacaccctgaccatcgccatcgacggtgctacccgggcgatcaaggtgccgcatagcacctgcttcgacgcccaggccgtgaagaagtaa

SEQ ID NO: 359675 - DNA, 1143 bp, Pseudomonas aeruginosa
atgtacttttacgtggatgaaagtgggcacacagggctaaatctgttcgacaagagtcagccgaccctttattacgggctgattacatcaaaggtgaatcttgatctagttgcgtcagattccatcaagagaatgcgaaatcgctttggtgttgaccgcctacactcaaacgaacttggtgttgcaaggctttccgagatcgctgaggaaataagcaaactaaagaagaagtatggaattacttttgatgttctaagggtaatgaagtcagatcacgctctaataagcttttttgatcagactttcgatcaggggctaaatccggctgttccatggaattggtactggacaccgttgaggtttcttctcttgcttaagttgcctggcctgttcgatgatgaacttcttaggaaggcgtggcaggcaaggataaatgtcaaggatacagaagcaaatcgattatacgtcgaggtttgtcaagagttgctcgtcaggatcgatcgcctgatcagagatccgcgagcaaaagagatccttgttgatgcgcttcagtgggcaatgacaaatccagaagaaattcactataacgcatatagtaaagacgacacgctgcagatatcgccgaatctaattggctttcagtcggtgatgcatactattgcacgtcgactaggtaaggctcgggcggacgcctcacgcattattgttgataggcagtctcagttcaataaggctcaagaatttatcgcgaatatttacgcccaggggaaggggtatgtattcccaggtggggcagggctaccggaaatggacctacgccatatgcctgttattccacttacaccaacccctggtgatcagagcgttgggcttgagttggtggacgtgtacctatgggtgtttaaacgatatttcgaaggcaaggacctttctcgcgaattgttctcgctgattctagggcaggcaaactgcggaaccaccgacgaggtatcgctcgaagggattcgcaatcgatgggggccgtggttcagaagtctccccgatccgactccagagcagttagaaaaggccagggaactgatggatatccaggaaggccgcaggcttgcacatgtcatacgcggcaatcagctggctcaatga

SEQ ID NO: 359676 - DNA, 1677 bp, Pseudomonas aeruginosa
atggcacttcctgcgataaattctctacaagatcttgcaaactttctttcggttaagcgaggtctacttgcttattatgctttctatgtcagtccaggcgatgcatatagcaatttctctataaagaaacgttcagggagtgacagatccattgatgcacctgtcaaagggctcagggatatccagactataatctataagaaattctcaggtgaaattgagtttaggaaatgcgctttcggttacatcccagggcgtggtatttttcaaaatagcgaaaggcatattcgccaacgctgggtactgcggattgatttaaaggatttcttcccaagcatcaccgcggtacgggttgcaggaatttttagcgcccaacctttcaacatcagctataaagctgctcgcacacttgccctaatcgccactaagaacggagttcttccccaaggcagtccgttaagcccatggatatcaaatgttgtttgtcgtgggcttgactataccttgcagaaactcgcctcgaggcacaagtgctattatactcgatacgcagatgacttatacttctcaaccagtaatagtgtctttccctcagctcttgctcacagatcggagaaagagagcattattgttattggcgacgaacttaaggcagctatcattgctgccggctttactcccaacgaagagaaaacatctttaaggcccgcctcgcaacgccaaatcgtcacaggcgtagtcgttaactcaaagccgaatgtacctaaagagttcgtgaaaggaattcgtgctgcactatatgcttgggaaaagcacggtttactttcggccgaggaaaattggcaaaagaatgttgacgttcgcaatcgctgggattccgcaaacccacgttttcgctggatgttacgaggaaagattaaccatttacggcacattaaaggtgaagcagacccggtttatataaagcttgcctcaaggttaaaaagcctggacaacacctactcattcgatcctaagctatcagcgctatcaatcactcaagaagttagtgtattttccgaagggattacagataaaaaacacttagaaatagctttcaagcatgctcaatcaaagggtctctacccagacttaaacttaaaattctacgttcctaatgaagcgggaagcagcaaccttcaaaagctttgctatggcttgagttcaacaccacagcgctgtttaactatctgcttattcgatcgcgatgaatcacagtacataaaatcaatgggaggatcctcaagcgactatttagaccataataacaatgtttacagtcttattctgcctcaccctgcattcagaacagagccagacatctgcattgaacacctatacgaggacaagtacctctacatgccagacagcaaagggagaaggttttactccaaaaatgaatttgacaaacacaactgtcacattaaggagcaaaatatcttcatcaaggcgacgtcaaaatctcttataattgactccaatgtcattgatatctcaaaaaaaaccagcatagctcttgcaaaaaatgaatttgcaagccttatttacacttccaccccgcctttcgacaagatatctttcgatggattcttgccattatttgataagattcgagagattaaaaacttgttcaagtga

SEQ ID NO: 359677 - DNA, 153 bp, Pseudomonas aeruginosa
atggacttcatcgcagacttcatagtccactatctggcgtatcgcatcggtgtccgcgtgttggggtttctgagcggtggccggttcaagggtgaaagcggctttgcctatggctgggcagaggttgtcggcggcttgattctcccttcgtag

SEQ ID NO: 359678 - DNA, 1710 bp, Pseudomonas aeruginosa
gtgagcgatttcaagctaaagaagcttactatcaacgaaccatcttttagaaaattaaaaaaaatagagatagagttcgctcaaagaataacactaattgctggccacaatggaattggcaagtcaaccatcctcgcgcttgtcgcaaatgggtcaggactaactgacttcgaacacaatagctatacgggaaaaacgttccaaggcaatcttaatgagataattcatttagattaccaaacggagttcgagtcccgaaaaaaagataagaacctcccaagccctattctagaatatgcattagacaacaatatattcctaaaacgctgcgccctaacaaagcgaactgtaccagccacagaaattaaagcaaaacgactagaggttcgagtcgtcccaagaaacatccctcccaaagatcaaacaatatcaagcattggactaactattggcagcgcctcaaaagttccgctgccaactatttatctgggcatgaccagaatgctccccatcggagaaagcgaccccgacatggtcgaaaactccccagacacccaaatacatcagctcgatgctgaattcatcacatcatttataaatagcataattggccttaacaagagcaactcaccagcaaacgctataacaacacaaaccattaagggaacaactaaaagcacaaaacaccccacatacggttatagcccgaaaaccatttcccttggacaagatagccttagtgctatagcaacagcattagcctcctttcaaaaattgaaaagagaatggaaagagtatcctggagggttattagtcatagacgagctcgacgcaggatttcaccctcacgcacaaaaacggctgatccagagcatcggaaatattgcaaaaaaactaaacatacaaattatcgcaacaacacactctctttgcctaatagaagccatacacccagacgccaatccgatcggcgaaaaaggccatcacgttgacaaagtagtatacattcgagacacaaatcacccaaaaataacaaattcatcattagatgaaataaaaaacgatatgaatctgactccgccaacccaacccacaaaggagcaggctaactatataaaagtctatctagaagacgcagaagccaaccgcttcattaaagcacttctaaccagaaagttacaaaacaaaataaaaaaagcatgcggatcactcttaaagccaataccaataagcattggctgcgagaatctacaaggcctacaaaaatttgacacatacttcaagactgtaataattgccgtagactccgattccactgtaaaaattggaaaaggtaaaaacaagattaaaaacgtagtaaaactgccaggtggctccgatctcagcggcagaggattcaatcctgaaagaacaatctacgagtttgttaaagaaatagtttatgacgaggaaaagcatctcgccgctcgcgcgtatcttgagggcttaggtgtaactagtgatcaactatactaccacctactagaaggtgacacagtaattacaaaacgcgagtccgcaaaaaaatggatgaaagcacgccttcaatttattgatgactggaatcttatcaatctctggctagaggaaaaccaggacaaggtcagaaaattcgaagaagacctattaaaggctgtctcttatacacatctccgagcccacgagacgtag

SEQ ID NO: 359679 - DNA, 789 bp, Pseudomonas aeruginosa; identical to SEQ ID NO: 357510

SEQ ID NO: 359680 - DNA, 378 bp, Pseudomonas aeruginosa
atgaaatctggcatcacggcccgtcgcctgttcatcaacgacaccaaggctttggtgcataccgtcgacgggaccgccatgctggtcacgccaggaatcttcaagcgttatgtccaggagcatccggaggttgaaaagctggcccaggccaaggagaccgccggctggaagctggtgcagcgcgcgttcgagaaacagggtcttcaccgaaagaccagtaagaacctgaatatctggaccatcaaggtttctggtcctcgcaagacgaaagagctcaaggcctacctgctccaggatcccaaattgctgttccctgtgcagcctctggacaacccaagcctcacggtcatcaccgatgccgaaggaggtgtggaatga

SEQ ID NO: 359681 - DNA, 378 bp, Pseudomonas aeruginosa
atgaaatctggtatcgcgacccgtcgcctgttcatcaacgacaccaaagccttggtgcataccgtcgacgggaccgccatgctggtcacgccaggaatcttcaagcgttatgtccaggagcatccagagctcgaaaagctggcccaggccaaggatacgaccggctggaagctggtgcagcgcgcattcgagaaacaagggcttcaccggaagaccagtaaaaacctgaacatctggaccatcaaggtttctggtcctcgcaagacgaaagagctcaaggcttacctgctccaggatcccaaactactgttccctgagcagcctctggacaacccaagcctcacggtcatcaccgacaccgaagggggtgtcgaatga

SEQ ID NO: 359682 - DNA, 1383 bp, Pseudomonas aeruginosa
atgagcacacggaccgcgatgaacgaacacaccctcaaacggctcaagtacgatccgcagaaagggcgtgtggagtacctcgatccacccatgccggggcacgggaccttcggcgtgcgggtcaacaagacatgcaaaagtttcatcttgctgtacagctttcatggccacccccggcgcctgaccctcggcaactacccggacctctccctctccgaagcgcgcagccaggcggcgcaggccatcgagttgctgaaacaggggatcgatccagggcagaagaaaatcgtcgcgctggtcgagtaccgcaccagcccgacctttgaagcggcggtcgagagctacctcgaatgggccaaggccaacaaaagctcatgggccgaggacgagcgcatgctgcggcgcgagttcgtgccgcacctagggcccatgaagatccgcgatgtcacgcgcaagcagatcgtgaccctgctcgataccaaggccaagaccgcaccggtgcaggccaaccgcctgctggcggtggtgcgcaagatgttcaacttctgcgtcgagcgcgacatcatcgctgcaacgcccttggtgcagatgaagaacgtggcaaaggagagcccgcgcgagcgcagtctcaatcggcatgaactggtgtggtttctgcaccggttgaccgagcccagcttgacccagaacacgcgattcgccttgttgctcagcctgatgctggcgcagcgctcgggacgcatggttgagatgcgctgggtcgacattgatctggtcgacgccatctgggaccggtcgggcaagttcgagaagaacaacaacccgattgccattccgctgtcggcggatgtcctcggcatcctgcagtacctgcgtgagcggcaggtggccaagctgatcgcgcgcgaccccgcgcgctgggggagcagccgggtgccgcctaacccggggcagtttgtcttcccggggcgcagccccgcgaaagcgcagacccagccgtcgctcaaccgggcaatgcgacgtttttacgacacttatgtggaggacaaagaacgcctggaggaagaaagtctgctgcgcgtggccgacggttacccgcgcccgactgtgcatgacctccggcgcacggcgaccacccacatgtccagccggggtctgggtaaggacttgcgcagccgcatcctcaaccacaaggacctctcggtggatgccatctacgaccgctactcctactttgatgaaaaggccatcgccttgactgagtggcaccaatttctgaaaggcttgctgcgccgagaatttggcgaggtggactgggtcgagatctacggtcgccggatggaggcggtcgttctggtggatgaggagggcgagagctcttga

SEQ ID NO: 359683 - DNA, 945 bp, Pseudomonas aeruginosa
atggaggtcaccgggctcggtcagtcggtcctgctggaccagctggcatttttgcaagaccatcgatacctcgagatcgtagaggtcgacggcgacccggtgccgaggctgactcagcgtggcgccaccatggtgaaggtcgagagcctacttcgggatttcgaactgaccgtatggctggatgcattcacattgcgtcggcatgcggtgcacctagcgttgttcgtcgaaccacctgtcgctgaagaaggagatgcgccagggggcatggtggtgcgtgtgccgcgtcgtcgtagaagccgctccggccgctttcacctattcgatgaagccaatcgcctgcgggtattgctcgataagggcgcgctgagattattgctcgaatattactggggcgacgactgcacgttgattgtcagtgagtccgatcactgggagtgcgagctccatgcgcagacggatgcgacagaacaggtccacttgccggcctgctttgctccaggggaactggtgctgtccccgcacacgcatagcgaaaatggcaaggcttcgacattgccatttgtgtcgctgccggtgctggagctcagccacgtgttcaagcccgtcgcggactttccttggccggtgagcgtaccgccagcggtgacccacaacatggagctggtcagttctacaaccttgcctcgttcggccagactgatggctgctgatggtgatgccggttgctactcagttatgtgtgccagtttgggggctgaagttcctagtggtattcctcagcctgtcgtaccgcctggcgtgtcgtgcgaggtcagtgtcaggcagctacagatatcgttcacgatggatgaagagcagctcagccagcacttgcaggcgtgtcttgacgcgctcgtgatgtcatacaacctgttatcggcagaggaggcgcaacccgcatga

SEQ ID NO: 359684 - DNA, 543 bp, Pseudomonas aeruginosa
atgatcgcgatcaacgtgttcgctgagttgttcgactgggacgagaaaaccacggagcggactcagcgcgcctatagcgtgtctcgcagcctgtatacgatggcgcgggtgggcaaggcgggagcaagccctttgattttcgtcgaggccgccatggcttttctggatgcactcggcgcatatgcggactatcggcaggctaaaagcaaaacccgcgaactggaagcggaaggccaggccttggcccagggcctcaaggagctggagaagcagtttcgcgtccaggcgcaggtgcgcgatcttaagatcagcgcacagatgagcgccatccgtgagcaactcgtggagcgggatatgaaattgagcatcggtgtggcacagctcgaaatcctggcacggcaaatcaagaaactgggcgaacacatcgccctgcagcggttggattccaccccaaactgcgtgccattgctaaaactggaacgcgcctactatcagttggtcgatgcgcaacttagtactgcgctgacgttggtggatgaatga

SEQ ID NO: 359685 - DNA, 462 bp, Pseudomonas aeruginosa
atgaaaaaacctactccctcccagggaaaaagtggcgatagcgaaaagctcaaaatgaaagagctcgacgtggccaaggaagcagtcaaggttcgtggcgaggctctcaaggtcgctggcgaggctctcaaggccgttggcaagttttccgactggggcaagcaggcacagatcaccaaggccgctgtgtccgcaagtcatgccaagatcgaggaagcgcgcgaaaaaactaagcaagccgagctggatgcaaaagcaaagatcgaggagaccacccgccttcgccagaaagacgcccagagccatacacaggaaatggccaagctgcaactccagtatgagcagatgatctccctcaaccgtgatcgtgagcgtgtgttggacaagatgctggaagatccggagaacactgagttgctggtgcagagctactgcgcgctgattccgccgcccaagtcctag

SEQ ID NO: 359686 - DNA, 3447 bp, Pseudomonas aeruginosa
atgctgcctttctacgtcgctgccggcattttcgcgcttggcgctacagcattggcgttgctgctggatcgccaaacggaagaggaatccgcgtggcacgatgagcttcgccgccgcaatgaccaagcgcgcgatgcctttcatacggctgcaaatgccaatagccgggagcaggagcaggtgcaagagctggcagccatgcagctcaaggccgagtatgaagcgtactgcgaacgatttctaactcgcctgaaagggccagcgaaggagtttgaagcgcttgccaagcgccttgatagtgacatggccgatggctccatcagcccttatcggcgtaatgccttgcgattgctgaaatgccgcttgcaagatgcgcagaaccgagtggccgctttttttgcctattgcgattggtatttggacacgctcacgaatctggcacagaagcggcgtttcaaggcgttgatagatatggcggcgcctcattcccgcctgcccgatgactggttctataacggcaaagtggttctggcatcggtcgcggaaatagatggtggttacaatggttacagccagaagctcgagttgcgggcggagaagcggggtgagatatacagcgacgctcaacagcgcgccctgatgatgcaatatcccgatcaggaagctataccggtccagatgttgggaggaaagaatccgcgctatttcaaggcgtgtgtgtttcgtggtgccttgcatgtcgagcacatcatgcaaagcgtttcgtgcctcgccttcatcgaaaggacgactacctcgccacgctatggcgacggttatgtggtgcgctgctacccgtctttctgctccgtggacgaacagcaggcggtcggtaatggtgtccgtgcatttctgcctcgtagtgaaaccagctttccgggcaagtactaccagcgcggtgagcggcttgaagtctatgtgcactattacgatctgttgctgagcggtagcgatgtcacagttacccaacacgctgattccctgcgctatggggagcagagtgccgcgcccgtgttcgtgcatgtcgataccgccgtgcatgacctgcaggcgttggaggaagagagcgcggactcgcagtggcagctgcgcggcatagtagatatgggcggcaccttgatcgtctcgctgcaactgggtgtttggcaggtcgatacccgggtgagcgccgaagacagccagctgcaagtcgtctctatcactcgtaccggttttgatagtgttgaattggacgctttgccctgtccggcacgcctgatcgatcaaaggctcaaggacagcgtgttctgcgatgtattgcagttcgagtcgttcctaggcttctgccgtcagcagtcgttgttcgcaggtgacgacttggcgcgtcagcgagccgggcagttctttgagcgctggaacgccgttacggagtacctgttggaggaggagggctatcacacatttattctggacaatgtggttgagcccgatgacagaagcctggagtgtggttgcgatcaggatctggaaaaaacgctgcagaagttgattgataaggcgcagaactcccggcgcctgttcgtggaggagctgtatttcggtaccaacggcgagcagcgctggttgcaggtcgccgagatactcggggttccggatgctatgggcggtgggcgttatcaggttgctcaccggggcatgttacgtcctgagccgggcagtggttacagcctggtagttcctgcgcagcagcgtctgaggtttcctaagattggtgagctggccaacctgaaccggcagaagcaggcgttgcaaggctttctgagtggacgcttggttaaccgtaacttgcagcagattttgttgatgcctgaccgctatgaacctcagccggatccgttctgggctcaacgaatcgcatgcggtctgcagtggcagaatccgaattggcaggattccgcgaaggcagtggcctccaagaggttgatagaggctgcactaatcgagtcaaacctctatctaattcaaggcccaccggggactggcaagaccacctgcattgtggagctgctgcatcaactgtttgccggcaagcgggatttgcgcgtgctggttgtttcgcagcaaaacactgcagtggataacgccctggatcgattcctggagcagttcccggagttcagcgacaacatcctaagattgggtaacgaccccgacaaggtacatgcgagtgtacgaccgcgcctgaccgaaaacgtgctgatgaattacctgcaccagcgccagcaagagtacagccgcgccaccctggaacatccgatcaaggcagagtggattggccagtggatggagagcatctaccgtacaggaaaggatgatcgctcccagttcgatgacgagctagcagagctggtggtgcaggatcattgcctggtgggcgccacctgcgtggggctatcgtcgcgtcgctatggcatggatcgcctcacgtttgacatatgcatcgttgacgaaggtgggcgggccactgtgccggaactcctgattcccctgatgcgcagtcgcaaggcgatcatcatcggcgatcactttcaattgccgcccagtatcgcaagtcgcctgcttgaggatgatgccaaggatgctctgccatttctggaagagacgttcctcaagaccagcttttttgagcagttgtatgaaaatctggcggtggcctgccatggtcggttgactgaacagtttcgcatggtggaacccatcggtgatctggtcgctgacctgttctataccttcgatggctcgcgtgggctttacaacggcaaggtccacgagcgtaaggactttctcgacccggggcattgcctgcgctgggtggaggtgccatatggcaagcaggaaaacgagtcagggaatggtcccagcctgctcaatcgggccgaggcccgtgagatacaaaattgcttgagggtatcgggtgagctgttaaccaggcgtcgggaggctagccccgagacctttgagcctaaaacagttgcgatcatcaccccctacggcgcacagaagagattgatcactaaacaggtcgatgcattgagaaagaaagtgccggcacttgatagcgtgttggacatcaagatcgacacggtggacagttttcaaggcagtgaagcggacatagtgctgtattcaaccgtacgtactgaggggcagatccgcttcttgctggaccgtcagcgcttgaacgtggcgtgctcccgtgcccgggaaaatctaattttcttcgggcatgcgcagttcctgtgtcggcgcgagcggaaggagggcatgttgtttacgcggattatcgaccgctgcacaaggactacggccgcaggcccaagagaattgcggacacttgatcagtcaaagatggttgcgccaatacgctga

SEQ ID NO: 359687 - DNA, 624 bp, Pseudomonas aeruginosa
atgggcgtgctagggatgagaaactgctttcgtgagccgattccggaaatcttggatactgcgcgctacctggatgcggccgtttctgcgcatctcacgggccatcgggagctggcgtcggctctgttcaaacaggccgattgcgacatgacccgagcctggctggagtccatctggggtgccaagagtccttatgtacagctgacgcctctgcctgatcagccgcttgatccggccctgcgcgtgcagtcgcgcatgccgagcaaagcacagatgaatcagttgcatgcgcgtgatgggtatcactgccgctactgcggtatcccggtgatccgccctgaggttcgcaagaaggcctgcctgctgtaccccgagcaggttacctggggctccaccaatgcttcacagcacgcgggtttccaaaccctctgggcgcagtatgaccacgtgctgccccatgcctacggcggcaccaatgatctggacaacctggtggtgagttgcgcggcctgcaatttcggcaagatgtcttaccggctggaagagctgggcttggctgatccgcgtgaatggcctcctgtgcagtcgcagtgggatggtcttgagcgcctacttggcgcctga

SEQ ID NO: 359688 - DNA, 621 bp, Pseudomonas aeruginosa
atgcctttgcaaaaccgaatgaatccgatgggtcagctgcatagcgtaaaggcaagaggcctgctgatgggcaatcgtggtcagctgcacaatgcagagaagcaaatcgttaggtcatggaggctaaagcgttggatcacctgcgctctggaatatcagggcatcaagcgtgagttgatggcgccaaacagctacaccgaactgttctttctggacgaacccaccagctatgccgctgggcaccgtccctgtggcgactgccgcaaggatcgttacaaagccttcaaggtcgcctgggcccaaacctttccggatcaggatcagtcagccgccggaatcgacaaggttttgcaggccgctcgcttgagcgccgataacagccagcgcatctggcaagcgatcctggcagacctgccggatggcacgatggtcatgcatgaaggtcagccggtattgctctggcgcggacgtcagtggcgctggagtttcgacggttacagcccgcttcctcagatgatgaccaacggggtggttaccgtgctgacttcggagccgattgtggcgctattcaaaaacgggttgtctgcagggttgcaggtgcatccctctgctgagggctga

SEQ ID NO: 359689 - DNA, 765 bp, Pseudomonas aeruginosa
atgaacacactcgtcatcctccaacctctgctcgacaccctgaaatggctgatcccggccatgttgctgatcggtctgctgaaaacaccctggttcaagggctggttcggtgagcggctggtcagggtctttgcacactatcaactggatcgtcagatttaccgccgcctgcatgacgtgacgttgccaacgcccgacggcaccacgcagatcgaccatgtgttcctctcgccctacggcctcttcgtgttggaaacgaagaacatgagcggctggatcttcggcagcgagcagcaggcacagtggacgcaacagatctacaagcagcgcttcaaattccagaacccgctacgccagaactacaagcacctcaaggcgttggaatcagccttgggcgtggcgccggagcacttgcattcggtgatcgcctttgtcggcggtgccaccttgaaaacaccgatgccagccaacgtcacacagggcatcggctttatccattacatcaagtcattccagcagcgggtgttcagtgaggtagaagtggatgccatgcagcgtgccttgcaaaccggtcggtttgcgccgagccgggttacccagcgtgagcatgtgcagcgcctcaagcagcgcagcgacccaaccgccgaacgtcagtgtcccaagtgcggcagcgccctgctggtacgcacggtgaaaagcggccccaaagctggccagcagttctggggctgcagcgccttccccaaatgccggaccactgattga

SEQ ID NO: 359690 - DNA, 1623 bp, Pseudomonas aeruginosa
atggctagcgaaactttttacggcctgataaaggtttatgtgtacttccacaatgctacaaaaaatgagattgcagcattttatgaacctgcaatgcgtgagctgcgaagtgagttggatgagcttcaacaggcgtttcgtgagaaaaaagtcgggtatgagcaatatgagaagaagcgactctatctctccaataagaaaaagcagcttgagcgcgacttgagctcattggccattacgcgagattcactgaaaagaattgcattctcaggcggcaagcagaatcctcagtttgaggatggcgtatatgcagagcttatgcgcttacttcagcccccattccattacgccaatgaaggaaagcccatcctctacacaaagccacaggtgcggctatctgagagcattgaaggcgcccgggccaaggtatgcggagtggcagggtcgggtaaaacctccgtcttggcgaagcgcgcggtgaatgcgcacaggcgacatggcgagcccgtgttgatactcaccttcaacctgacgcttcgcatgttcatcagagacaaaattagtgaggttcgcgaagacttcagttggagtgctttccatatagtcaattaccacaaatttatgagtgcggctctaagcagtgctggaatcgatgtgaaggttccagagggcttggtggacgccagtgcgtaccttgaagagcattattattcgaatgagtctgttttagataattatgttgctgataggtacaaaaccattctcattgacgaggctcaggactacaagcctgagtggcagcgaatcataagaacgaatttcctggccgaaggcggtgagatggttctgtttgcggatgagaaacagaatatctataagcgtgctgtcgatgaggagaaaagggcaagcattatttccggctttgggcgctggcagcgcttgtctaaaagtttcaggtatagccaggattctccggtattgcgtttgtctgttgcctttcaagagcagtttctttcagagaaatatacttttgatggggatgaatcttatcagcagaccgcatttctgccagggattggagtgagcgctgtagggacttggtcagctgataggctgcttgatgttgctgaggtcattgtcgctatcgcgaagcgcgaaggcattcacccgaatgacattaccattgtgtcgtcaaaggaagatgttctgaggggggtcgattttgcaatccggacagggtctcggcatcaggagcggacgattacaagctttgcttcgaaggaggatgttgagagagttcgcggtaaaaggcttgggcgtgcggaagaaaagaaggagttgcgcaagttgagcgccagccgtaagcaaggctttaatctgaatagcggcgtaatgaagttatcgactcttcatagttttaaaggttttgaatctcctacggtattcgtgctcgttaacgaattggatggggaggaactggtgtacacaggcttgaccagggcaaaagaaaatattgtcgtgctgttgccagatggtagtcgatattttgatttctttgcaggatatcttggtgctgttggttcatatacacagcgatcaagtgatctcgaaacgtctaaataa

SEQ ID NO: 359691 - DNA, 897 bp, Pseudomonas aeruginosa
atgcactccatattcgccatagagccagaggctatcgataactggaaagacttgaagtacgcactggagaaattcggctacagcaagggcttgttgatagcacgctttcctaagccctggccccgtttggtgattgaagcctgtgagcgtagcggtgtgggggatgtggaacgggcgcgtatcgttgagaagttgcgccaagcgcagaacgaccggttggtgcgcctggggctgtcatttgctggtgacgattggattgccaacgccaaacaagatggtgtgcgcgagcgtctgtcagcagtcttggtgcgagataagcacgatgcagagcgatttcattgtttagccgaggttgaagaggctctgtttgaaaatcgtcgtgatgtgcaggttaagcgtaatgctcaggctttggccgaggctgcgcggtatgtgttgctgagttctgatcgcattgttctagtcgacccgtattttcaggccatgcccaagtgctgcaaggttttgacggcaatggttgatctttgtcgccagcaggagcatcgcctagttgaggtgagcatctttaccgcaaaaagcacggatgaccgtcgccttgaccttattgctgccgattatggaaggatgcttgacgctgtactggggcaaggggtttgtatacgtattcatctattgtctgatgctgctttggatcaagactttcatgcgcgttatatattcagcccgcgtgctggtttgcgctttgatcgtggttttgttgaacccccggatcatgggcagcgcgagcacttgaccgatgttgtctgcttggatgagcgccgggtggctgagctgagaagtcgctatctggaaactgatgatggcctggctaacgcagagtctattgttctgccgtga

SEQ ID NO: 359692 - DNA, 1734 bp, Pseudomonas aeruginosa
atgcgcattacagaaatcgccctcaccaactttcgttcctttcaggccacccaagctatcccgctggcgccggtaaccttgatgtttgggcctaatagcgtcggcaaaagctcggtgctacaggcgcttttttatctgcagcaaatcctcgccaaaggccactgcgacccgcagcgcattgatgtgttgggtgaaaaacacatcggcggctttgccagcttggtgaatggcggtgatctgaataagcgcattgtcatcaagctgcaggtcgataagtccggcagcatcggggccagctacaaccagctgtatgagctgatcaacgaggactttggcctcactgtcgacatcccaaccgccgatgccgcaggctttgctgtggagttgcatatcgcctggtctaaatcagccgaaaccgcctatgtggcctgctacaagctgtggctggacgatacgctgatcgctgaactgaccagcgatgctgggatgaagcagccggtgctggcctggctcaattatcaacatcccgctttgctggccgaacttgatttggacgaagctccggagcgcaaagccgaaggctttgtaagcgtcttgcatgagctattgaacgctcagcgccccacccagctggtcagtcgccgcgactcctggcatacgcctgaaatgacctttgcccatgccgagctgggttttaaaggctttgctggcgccttaccgctgctgggcaagcgattggaaaccaccgtcgaacacgacgacccgcgtatcaccacacggctgcatgaaattctctcggatgtgttggtagctccgttagataacctgctgacactgcttaatcagagtctgtgcattggcccgctgcgcatggtgcccgatgccttgcgccagcctaatccttatcccgagcagaaagactggtacagcggagcggctgcatgggatgtggtcagctcgcttatccgtcagcatcaggcgccagccacgctggtccaggtcaaccagtggatgaagtacctcgggctcggctattcgctccgtaacaaatcggttgtgagcaaggtggtgtattccggcagcggcgacagcctgagcgacttgctagccatgctcgatgcgcatggcgataagctcaaactaagtctcagtgctgctgatgaagaaggaaatccgtcagagcaacaagcgcctatcgacatgcaaacggttaaggcactcctgcaggaactggcgcctgacagtaatgccctcaagggtgcggttattgagcagatacgaaatcaatggggcctatgggatgaagcgcggcagtgcgaggtagctttcaccgaggttggtgtggggatttcgcagttgtttccgctgcttgtggcggctgtggtcgctcgccaggggcttgtgacttgcgagcagccagagctgcatgtgcatccacgaattcaggtgggaataggtgatttgctaacccaggccaatcgccaatgcagcttcctgatcgagacccacagcgaacatttgatcttgcggattttgcggcgtattcgcgaaagcactgagggtgatttgcccaatagcctgaagcagctgaaacctgaggatgtgtcgattatctacctcgacacggcagcaggcggagtaaaggccacgcgtatcgaaattgatcgctatggcgagttcactagtcgctggcctaatggtttcttcgccgagcgtggcgaggagctgttctga

SEQ ID NO: 359693 - DNA, 1167 bp, Pseudomonas aeruginosa
gtgagctggccgctagttaagttgggcgatgtttgcgagcgagtttcagtggggcacgtcggcacgacatcagaattctatacagatggaactggcgtaccgtttttacggactcagaatgttggctctgatgggcttgtcctagaggatgtaaagtacatcactcatgagtttcataaggttctaagaaaatccacgttggctgcgaatgatgtggtgatgtcgagagtggtctctacatctgttaattgcgggattgtgccagagtatttggagggggctaattgcgcaaatataattttagccagaccaatcaaggataaattggtttcagagtacttggtgcattatttgaggtcttcagatgtgcaaggtaggcttttggcgaggcaggttggatctgctcagtctgtagtaaatacaggtgtattaaagtcttgggaaatccccctcccacccctgcccgaacaaaaacgcatcgctgccatcctcgacaaggctgactccatccgccgcaaacgccagcaagccatccagctcgccgacgacttcctccgctccgtgtttctggacatgttcggcgacccggtgaccaatccaaaggggtggccattaaagcgatttggagaagtcggcacatggtctagcggtggaacgccatcaagagctatctctgattttttcgagggagagattaattggtactctgcgggagagttgaactctcgctatctcgatggctcggtggagaaaatttcagagtcagcgataaaaaatagtgccgcaaagattttcaagaaagactctttgttggttggtatgtatgacacggcggcaatgaagatatcgatcctgaaggaagactcttcttgcaatcaggcttgtgcaaatgttgagtgtaatgagcttgcaagtgttgaatggctgtactcatacattgactacgcgaaagatagttatctttcgcgtaggcgtggggtccgtcagaaaaatctaaatctaggcatgattcgagattttttactgccgctgccaccgagagatttgcaagatgagtttgtgaggtttgtttccgctgtctttggcatgaagaagaagcaagatgaatgcaaagactttccggtttttgagtctttaagccttaaagccttctctggccagctgtag

SEQ ID NO: 359694 - DNA, 2124 bp, Pseudomonas aeruginosa
atgcaagccagtcaatggactaccgacatcattgtcatcacggcggtaatcgcgcttgcctgcgcgctgctgggatattgcgtgacagcattgcgccaagggcgacaagttagccaattggcagcccagcttgagctggctcagcaagcgcaagcgtcggcagttgcagctagcgcagcgctgagtgaccagctcaaggcggctgatgcgcgaggccacgagcttcaggtcgcagaaagcaaattgaaggcgcagctgcaggcagccttcgataacgtggcgcggctgaaccaggaacagcaggagagtaaggacgcaaatgcccggttgcagctgaagctggaagatgccggcaggcagcatcacgaagccgccaaacgcctggaaactgctcaagccgaagggcgagcgctacaggatcaagtcactgatctgcgtgatcgtctggctgttgcgcaatctggagtcacctcgttgcaaggcgagcgcgacaccctcaaggacgagctagctaaccttgatgccagcgccaaggtagcggcaacgggtgagcgtgaggcacgtgagcaactcgccgagattcgccagaagatggtcatccaggctcaggattacaacgagcttttgggccgctatcaaccgctcagcaatcagcatgcggagctcaaaacgtccttgcacaaacgtgaggagctggtggctgagctacgtgaccgactgaatacagctcaggcggccagtgcacaattgcaagtcgaccgggaccagttgaaggatgaactggccaatgaaggcaagcgcagcagggccctggaaacctctgagcgcgaagtccgtgagcaactactggacatcaaggctcagcaagtagctgctgccgagcgatacgaagcactccaatcccgcctttcggaactgaacagtgagtacaccaagctcaagacggaactggatgagcgagaggcaagtcatgctcgcgaggtagccaacttcgagcagcagaaagccagcctgagcgagcaattcaagcttctgtccaacgagattctggaggcgaaaacccaggccctgcaggagagcagcaagctcagcttgaacgcggtgatgacgcccttccagcagtccatcgacaccttcaagcgcgaagtgcaggagatccaccaccgcgaaaccacccaacagggtgagctgcgcaaggagttggagtcgctcaaggcgttgaaccagcagatcaccaccgaggcccatgagctgtccactgcgttgcgtggccagaagaagctgcaaggcaattggggtgagctggtgctggagaacgtgctggaccgttccggtctgcaactgggcaaggactaccagcgtgaagtcagcatcaccaccgaagaaggtcgccagcgtcccgatgccgtggtgtacctgccacagggtaagcacctgatcatcgacgccaaggtatcgcttaatgcctacacccgtttcgtcaatgccgaagacgagcgcgagcgggccgtggcgctcaaggagcatgtgcaggccgttgccagccgcatcaaggaactcgccgaccgcgactattacaagctgccggggctgaactcgccggacatggtgttcatgttcatccccatcgagtccgcctttgtcgaggcgctcaaggccgacgaaaccctgttccagcaggccatcgagaacaacgtgctggtggcaacaccgaccaccctgctgaccagcctcaacatcgtccgccagctctggcgttacgaggaccagaacaagcacactgccgcgctggccagccgagcagaggctgtcttcaagaagctcaacaccttcctcggcagcttcgagaagatcaaaaagggcctggaaacggcagcggaagcctatgtcaaggcggagggccaactggtcagcggcaagggcaacctggtcaagcaggttggcgaatttaagaacctggcgcctgccatcaaggcccagctaccggcctatttcgtcgacaaggctgcgctggaaatcgactttatcccgactgagcagagcatcgcggcgttgaccgacagtgccgatgacgatgacctgctggcagaaaccgacactgaaaccgaattcgagatgaactga

SEQ ID NO: 359695 - DNA, 216 bp, Pseudomonas aeruginosa
atgaagaaccccgacggcgatccggtagaacaagtcctcacggaaacgcccatgagccacttcctgcatcagatttcgatgggtagccgtgatcaaccgcacgtcgaccttaagctcctgcgtacccccaactggcgtgaacgtgccttcttggagaacgcgcaaaagtcgaacctgcacgtccggcgtcagctcaccaaattcatccagaaatag

SEQ ID NO: 359696 - DNA, 951 bp, Pseudomonas aeruginosa
atgccccagcccattaccctgcgccgttactgcactcgcgctcgcaacttctaccggaagcacctcggttccgacgcaccttcttcttcggcgcagatctgcgcggctctcttgtccgtcgcccctgaactcacaccagagtccttccgcgtgctgaagaatgccctggcttacgagcaactcgctcgcggcgatcaggactcagctgaacagattcgcaccctcagaaaccctgtcactgctgagggctcgcagatacttcgcaaaccccgcccgaagcaagtcaagtcagtatcggacgaggactttgaagccctggcccagcgcctcacggatggccagttcgaagatgagctagccgccctgatactggcctttcatttgggggctcgcccgtgcgaaatgcgcacgatcaccgtagcaggcaaccaggtgcatatcatcggcggcaagaagaactccaagcgtgaccgtggcgcggatcgcacgctggaaattgaagatttcggggtgctgggaatcgtcgaatgggcggctcgatgcctccgggagtccccgcgcagcaacacggcgattcgggatcggctacgggtcgaatgccgcaagctctggcggcgacggaaatcccatccgacgctgaagagttttcggcatcggctcgggtcggccctcaaggcctctggcgagagcccggcccagttggcatacatcatggggcatcagtccatcggttccattaccgtctacggcgaccgccgggcaggccaaggtctcaaggtctatgttcgccccgcaccgagcgctgatctgtccacgatcagaagtcccaagtcgcctgcacgctttgggaaaggacgccagattggcgagaccaccctaacccaggcaccacacggaaactggataaaccgaatgagtcgcctgcacgcttcacgaggccaaggcaagtaa

SEQ ID NO: 359697 - DNA, 486 bp, Pseudomonas aeruginosa
atgaaccccgtacccgaacaaccaactcaacaccagaattatccactgctttttgtccagcagagctccaccctttacatccagctcgagcatgttctagagcaaatcaatgtgagcgccaacaccagcgagccaacgctacgggcatggcaggcccaaaatttcacctggaatatgtacgggaaggagtacctgccgctgaaaatgatgccgaagctgctggccgaattggagccattgatttctaccgatggccaagttcgtgctcaggagttgaagcttctggcaaatcaccttcatgccgcccttctgcttctatgggcggtcaaccagcagggcgtcagttcaaaacccatcactttggcccctgagtgggccgaggtggtcaaggtagttgacgactccgcattgggaggtactccggggttcggctccagctttggctcaaataccagcgtgacctacaacagccaaaccatccattga

SEQ ID NO: 359698 - DNA, 264 bp, Pseudomonas aeruginosa
gtggaaaaatcgatctatcgagacgagaacctggtcctgcttaggctgatcaagcagtgtcgcgtcgagtccggcttgacccagggccaatttgcgcaggcgctggatcgcccccagtcgtttgtcagcgacattgagcgaggcctgcgccgacttgatttggtgcagttgcgcgatatttgccaggtgctggggattgggctcgtcgatttcgtgcagcgcttcgagactgagctctccaactcacaagcggagactccatag

SEQ ID NO: 359699 - DNA, 297 bp, Pseudomonas aeruginosa
atgcatccaaccgacatctctcaggaaccgattgggttcaccccactacacagcgccgaagtcaactgcttgctcggctaccgcagcactgccaaggcgggcgagctgtatgacgaagccatgctgcgccaacacgccgtgcttggccttctggacgcactcacaggcacgtccaatctgcacgaactctgcagcgaatcgctgcatggctgtattcaggcaatccgcattctgtgctcagacaccgttgcgctacatgcaggagcctatgaagcgatgcagcgagacactgcataa

SEQ ID NO: 359700 - DNA, 294 bp, Pseudomonas aeruginosa
atgagagttaaaaatgtatttatattcacgattggactcaagggctgcagcccaatacctagcgtacttggcatttaccacaagtatgcatcaagaagcgaagtcaaattcattggttggtaccacctttctgcgaagcgctcgcagagcgatatccaggaagtcttctcgaataatagcgatgagcctttgaaaggtttcgaagtgttggaggccgaagccgttacaaggcatgcactgaagacattcacactccagacttgtcaacacttcaaggagatgcgggcgcaataa

SEQ ID NO: 359701 - DNA, 1083 bp, Pseudomonas aeruginosa
gtgtttgaggattcggtcgagttccgggtccgcgaagtgctggaacagaagctcttggtgatcttcgacgagttcggtatcgataagaccggcgacgtgctcgactccgctcaggccggtgaactgtttgaggatgtgttcgcctcggccatcctcaatcctgacggtatagaaaccgctgtcgatcacacggtggctcggcttcgcgatgagattcagcaggtgcacgagtcttccgccatctatggaatctcggacgaaccggatgtgcaggcggccgagcgtctgcgttcccatccactgccccactgggtggagcggatgacggtcggctacctcaattcgcacggcggtttggccagccgcaaacgctcctggtgggatctgaattggccggacggccaagagcaccgcaaggccgtgttcaacgcccgggaagcgaatcgcctgaccgatgcaaccctgctcaatcttgaaaacagctgtgtccgtgggctggccttgaacctcccgcagatcgcggcgggccagctagtgccttgcgtgactgtgagcgggctaccggccaccatctcgggtttctgggggctctttgagatccgccttcaggccgggatgcaccagaaggctcaactcttgcgcatccccatggtgcggcgcggttatgtcagtgtgttcttgagcgaagaaggcaaactgtttctgcccacggcccggcatatctgggatgcgctgcagactgcggaagcccaggtgcaggtcaccctcgaacaggatgaatccattgccgtccatgagcggttgcaggaagcggccgaacaggtcggacaggagctgttcgacgcattacagcaggcgcatctcgcctctgtggctcgggaggaggaacgcggaatcgtctcctttgcctcgcgccgcaaggccattgagcgggctggattgccggaggtgcggcaattcaggctatctcgttgcgatgcggacgaatccgagtggcgacacgagttgcagtcagcgcggcagatcgtgccagaaatccggccgttgctgatgttgcgaattatcaagggaggcgctcaatga

SEQ ID NO: 359702 - DNA, 996 bp, Pseudomonas aeruginosa
atgcatacgctcactttcttcaatcacaagggcggcgttgggaagacgacgctcacggttaacgttgctgacgctctcgtagacgcagggcttcgagttctgatggtggacgccgatccacagtgcaacctgacttcgttttacttggaagagaagcttctagacgagcttcttggtgagtcggatgatgtgaatggcggaaccatttggtcagcaatcaagccagtggttgacggccgggggccgattaagccggtggatgcgtatgagattagggacggcctctacctttgtccgggagatgtacttcttgctgactatgaggaggagcttccggctgcttggacggggtcgtttgcaaggcgtgagcgtgactatgatgtgatgtgcgcgttgtcgcgggccgccagggaaatgggggcgcggtatgcggtcgacgtggtgatgttcgacatcggcccgaacgttggcccgttgaaccgagctatcattcttgactcagactacttcatcactccagtcgcagcggacttgttctcgctccgagcgttgacaacagtgggcagggctctaacgcgttggattaatgactggcgtactgttcgctcgcttgctgctactcccgcattggcagcaggtctgcttcacggaaatccaatctaccttggctatgttacttctgcctataaggtttcgtctggccgcaactccacgcgtccacatgagtattgggaagcgaaaattgcaccgcgagtcaaagcgcgggtagttgatttgttaatcggaattgaccctgctctggctccctttgcttcgcataataagcttgcggccattaagaacttccacagtctggcaccccaggcacaggaccttggcttagctattggtaagctaaaaggcttcgtcaactctgggtacaacgagcaggttgccgaggctaatagtgaattcagcagcttagctggactgattaagaagcggatggggctgtag

SEQ ID NO: 359703 - DNA, 510 bp, Pseudomonas aeruginosa
atggaaaagcgcgagactgacgaacaactcaaaagcctgagtttcgacatggacgaggaaatcgacgatcgcaacgagcgtcgaggccgaagagccttaccacttcgccacgcccacactcccatggaccccagccacgccatcatcctggccgcgatcatcatcgtcggaggcctttggggcgggaagcttctgtacgactacatccaagagcagcgcatcaaggccgccttcaacgaagccgccgcctacatgcagcagacgatgcagcaagccgagcaagacgccagtcgcgctcaagcagaaatgcagcagcaagtggcggctgaggaagaggccagagaacaacgactcgctgagcagcttgctcaattgcaggcagagcacgcccgagtggaacaggaaaaacgcttcaaatcatctcagtgccagttctggtggcagcagcatagtcagaaccctactgagcgaacagcacggaagaaatctgaagcgtgcgaagttaaatag

SEQ ID NO: 359704 - DNA, 801 bp, Pseudomonas aeruginosa
atggacttcgacttctctattctatatgacacagatgaaaaaaaatttgatggcctagatatgtattatgggtcacgatctctccaaggagttgcagaaacaattgtgattgcgacccatgggattgttaacgagaaatacatttcaaagaccacagcggcgaaaggctttaaaagcaccttcaaaaccagtttcgaaggttctttcaaacaacgcttcagaatcacattcactaacgaacggacaattagtaagatagtgaacatgggagcaaagagctacatagagcttctaaagcatacaatccatgaagcaataggctcgccgtttgacctgactcgccgcgcctccatcaagacatttgatcgcatgtactttagtgaagacataacccaccgtcttttcccttcactcaaggaagttcatgcaccgattaagcagcagggatataaggccaccctgtacgcagcacaaaccccgatagctatatttaataagagaagcctcgattatcttgaggaggaaatagttagtccggcacgagaggagattgtggttggaatcagccgctttaacgctcggactggtactggccggctaatcgccgacatcgacgaggagtcttatagcttcatccccgacgcaaaactttctaaggcggtaaaacgatccctgatcgacagccttcaaggagtagctgctgagatttttagacctgtcattgctgaagtaactcgagtcaccataaatgacggcagcaccaagttcttcatcctgcatggtgtaagaccggccccatga

SEQ ID NO: 359705 - DNA, 705 bp, Pseudomonas aeruginosa
atgaagcgcgtagttatagtaactgcgctctcaatcctagctgccctctattttatttatttctattttactagagatcaaatagatgcagggacactaggaactctgggggattttatcggtggcaacatcaacccagtactgaccctcatctctacaattttattaattgagacactcaaccttcagcgaaaggcaactaccgccgccgaggaaagtgccgatgaaaccaagaaaactgtagagcggcaaggcctgctgattagaacacagatattcgaaagctcatttttcaacctagtaaatctttgtttagatgaatacaaggggcaggagattgacgtccctaaagggcacctaaccggctctagagtattcaactttatcgagcaagaatttacaagaagaaagaagctaggtgaagaaccttctgaaattatagaggaaatagatagcgattttggggatataatcttcaataccatcaagtcattttcgagcatctttggattcgtccttgagaatgctcccgaagagaataaagaccgctatataagcttagcaacaaagctgacccccgtccccgtaatatatttaatttgcattgcaaggctgcataccgactgggcgttgctgaaaccgattgaaacctctggattctttaacaaaaaaggcatccaagacttaatggacggttttcgctga

SEQ ID NO: 359706 - DNA, 1440 bp, Pseudomonas aeruginosa; identical to SEQ ID NO: 332971

SEQ ID NO: 359707 - DNA, 1140 bp, Pseudomonas aeruginosa
gtgcgccagagtaagcttaaaaacacattgattgccctgtctgcgattattgccaccgaagctgtagccagtaacggcacgattatgtccggctacggtataaagaatataaccatgggcggggttggtaccgctctaccactcgactctattgccgccgcaaacaatcccgcgggcatggcaaaggtcgggactcgggttgacctaggcgtacgagtatttagaggaactgcgcataacacatttttaagcgaggataatgagaactcgctaaatatgacaacagcatttcctgaaatggggtttaattaccaaatcgacgacaggacaaccttcgggctttctatgtacggctcaggtagtttgtcggattacgataaaccgttgctgcctattcccggtctcgatgactttttcgcaaatgccactcagattacactggctccgactttgactcgcaagtttggagacagcgtttatatcggtatttcccccacgctcaattattcagtttttcaagcaaagggcgttcctggtattgatgacaaaaaagacaccgcccatggcttgggtgttcgcctgggacttctctgggatttaacaccgcagttttcgatcggatcaatgtatacgccccgaacgaaaatgagcgaatttgatcattacaaagataatctattggagcctgcgcgcggcaggtacgacttagcagagcagttctctattggctttgcatacaagccaacggatagattaacagtggctgctgactacttgaggatcttctggagtgatgtcgattttcttagcaaaaaaaacaacgtaggctacaagaatcagaatgtttggcgtgcgggtgtttcatacgacgtcacccgggatttgactttgcgaggcggatttagctatgcagacaacatcattgattcagagtttttaaacgccaattttaatggcccggcaatttcaaacaaaagctttggccttggcgctagttacaagctcgctggaggatatgaaattgcaggaggcattgagcgccacattccacgctcgatgcgcggcacaggccaaagcactggaacaaatttagacgttaactacggcttttttgtactggggatctctaaatcattttga

SEQ ID NO: 359708 - DNA, 843 bp, Pseudomonas aeruginosa
atgcgacaagaaaatgtagttacccctgatggcgcagttcttcactgtgaagttcacggccaaggccctgcgctgcttatggttagcggcgcaggtggggatgccggatattattcggctgtagctgagatgctctcagataccttcacagtcgtcacatatgatcgacgctgcaactcccgaagcactggcaattacgatgttaaaatgacggtccagaagcaggcagaagatgcctatcacgtcattaaaaaactcgccggcggcaaagccattgttttcggtaatagcggcggcgcgattattagcttggctcttgccaaatatcatcctgaagcagtggatggaatgattgcgcacgaaccaccgattgtgaagctacttccagagggcgacccgatgcggagttactttgacgacttgcgtgagttcgctattaaagaagggaatatcgccggagcgcaaaagtttgtttctggcgttcgaggtgagggtcaatatcagtggcccgctgatgtcactcaacgtgtatttgggaattttgatcagttctttaataacgaattcgaggcttgggggagctttgtccctgactttgacgcactcgctaacctgaaattcccgctcatcatggcggccggccgagaggatcgaggacttcactacgctcgtccgtctcaaattattgcagagaaactaggtctgccatggactgaattcactggctatcatttgccattcatggaacgtccggtggagtttgctgcatcactcaggattattgcaacccaacttgcaacccgctcaggagagatacctggcgagtggaaagtttctagatag

SEQ ID NO: 359709 - DNA, 1305 bp, Pseudomonas aeruginosa
atgaataaaatcgtcgcgcaagaagtcatacttaatgcaaggctaggtcttttccattataaattgctagtgatcactaccctggcagtagcttttgctggaaataatttattatcttacagcgttgcacttccgattcttattcatgactggggtcttactactctccaggcaggccttctcggcagttatgctcttgtcgggatgatgattggagatttctcgttcgggtacatatcccgcgttctgggaagtaaaaatacaatcgccttttgcctgttcgtactgggtgtagcttccttaatacaaggcacggtcacaggttacgaggaatttgcggcgttacgagttctctccggcttggcaatcggcgggctaatgccgagtataatatcgacgatgagcgagtactcgcctcgcaagcaaaaaaacgtcttaacagcaataatggtcagtggctattcctttggaggaattgtcgcctccgttatcggactgtctctgtcagagaaatatgggtggcgcgtacttttttatgcaggtggcgcccaactgttaattatcccttttgttttaagtattgtaccagccgacatcaactcacttattcattcgggcgacttggacgctgtcaacaccctgcttaaaaatgcaaatggagaatacaaacctgatattaacagcgtcgtaatttccaggcatcaaaagcacgaccagcactccgccctggaactcttcagtcaacggcgacgattcgcaactttaattttctggataattttcttcggctgccttttcgttgcttactcaatcataaattggttgccgaaaattatgctcacccgcggatttgctgttgattccagtattttgttctttgtaatgctgaatgtcggcgcaatcattggcggtgtattaggcggcatccttggcgacaaattctcaactgataaagtattgactctcttctttgtggtgtgcgcattctgtttagtgcttattagtcaggtagaaagcaagggggcactctatattcttgttattgctttgggggggacgacaataggcgcccaaactctagtttatattttaatcgctcataaccatgctgctccattaaggtcgacagccattgcttacgcctcaggtgtgggacgaatcggagcaatatcagggccagttgttggaggcattctcatcggaggctatctaactgttggcgcatacttggtgttaatttctatatgcactcttctggctgccttggcaactaccttagtccccaagccagaggctgagcactaa

SEQ ID NO: 359710 - DNA, 1809 bp, Pseudomonas aeruginosa
atgaacggctacccgttgatcaatctccaagccttagacatcgcacgccgccgcttatttgaaggcgaatcgcttccagatggcttgctttcgccggcggttgctcgctcatgggtccgttcgcgcgattccggcctgagcccttgggctcagcgtctgtctggccgcgatgatcaggagtttgagttgaatgatttggattttcagctccaagccagtgttcgccccgaactagagcgcctgtggcacgcattcggagggaagtcttggacgttattttgcatgaatacgcagggggtcattgttgatgcgcaacatgcggaggaagtcgggccactaaatagccttcggattggacgacgaattcaagaaaaagatattggcactaccgccccaagctgcacattgcttgacggcaagcctgcggttatatgcggcgggcagcattaccttgctgagttcaataatttcttctgtgtgtctgttccggtgcatggtgtatacggagatgtgatcggagcgctcgatataactggtttaggcgagcgtaatacaaaggcagttattgagcaactatgcatcgcagcaatgggtgcagaaaaccggttgtatgcaggattaactgattgcgagattctcgctgtacagcacgacccgcgtttgatcggaactccttttcaaggacttctcgcgattgactcgcgtggacggttggttgctgcaaactcaacagcacggaaactactcggagttcaagagaatatccgcttactctctgggtgggataactactttgaagtagaaccgttttcagtcgcttcacagcgatcccctagcttgatccgactcactgacggttcaggaatctatgctcatgccatttctcaggcgccgtctacacctaccataattattggaagaggctcgtcccaaacacccttggggcaggatacttctcttaatcgacagtttgatgctgcacaaaaggccttcaaggtgggtatacccgtcttgctacggggcgagagtggtactggcaaagaggtatttgctcgggcgttgcatgatgcatgtactccaggggcgccatttgttgcaataaactgttcggctattcccgagagcttgatcgagtcggagttgtttggctataccgacggggcgtttacgggtggaaagaaaggtggggcggcaggacgtttagaagaagcaaatggcggaaccctactgcttgatgaaattggtgatatgcctatttcccttcaaactcggttacttagggttctgcaggagcgtcagatcactcgacttggaagctccataccaaagccgttgaacctgcatatagttagcgcaactcattgtgacttggagcacatgatctccacacgaagcttcagagaagatttgtattatcgcctttccggcctccaggttaagctgccggcactacgtgagcggcaagatattgaacatgtaatccagtcccttctgttgcgatattcagttaatgatattgacgtacaatgccttgatcaactcagagcgaatgagtggcgagggaatgttcgcgagctagagcaggttatacggcttgccgcggcgttagcaggagatgaaggaaaggtcttgcctgaacacttgattggcctgtcctcccccgttgctgattcgctctctccattacttgcagcggagcaacgcactattgagcaagccttgcgctcccataatggaaatatatcggctacagcgagcgcactgggcatatctcgtactactttgtacaagaaaattcggccttcttag

SEQ ID NO: 359711 - DNA, 756 bp, Pseudomonas aeruginosa
atgttgctagatttcattctggctaactataaacaatacaaaaaagataatattatgattagttctatcgattctgcggtagctgcaaaggttatcacctcgatttatagaaggccattcactcatctaaccagccctaatcaagcctcgttacaccatagattgatgaatgtgatcggcgtttgctacgtgtactgcttggctgtcaccacattagtggccattgcatttagtggtaccgctagtgccgaccctgccccctcgccattcccgaatctgttttcttcttctaccaaacagctggtcctcaatggtgtcgccgaaagaaaatcccttagtggagtttctcagtacgcagtcgcgctatatttatttaagcattctgataatgctgtagaaatagttaattctgacacggatcgagctgtggttattcgttttagcatggacatgagcacgcaaagggctcgaacaatattgcttgaagatttatttgttaatttagaaaaaaaccaacttcaagctttattgccagacctcaataaactcatgtcacttgctcctggttccggatttacagctggagatactgcggtattttcttataccccaaagattggcacccaaatttctatgaatgggattcctctaggcactgtggaaggcaaggtctttatcgcatcctttctgacgcagtggctcggtccgcgcccgacaagtaggctgattaaaagtcgactactcggatccccttaa

SEQ ID NO: 359712 - DNA, 444 bp, Pseudomonas aeruginosa
atgatcaagacgaaacaccccatcaccgacgagttgctggatcagctcctggctaactaccagaaacctgaagacctaatcggcgcagaaggcatcctcaagcagttgaccaagaagctggtcgagcgtgcgctggatgccgaactgacccatcacttgggccacgacaaacatcagccggccagcaacctagctggcaatacccgctacggcttcagccgcaagaagctcaagggcgagttcggtgagctgcccatcgagataccccgcgaccgtcatgggactttcgagccgcagatcgtcgagaagaaccaaacccgttgggcgggcttcgacgacaagttcctctcgctgtatgcccgcggcatgaccgtacgtgagatctcattagagagctgtacgttacggcgcagctcggcaagggaggcggccgagccatcgtag

SEQ ID NO: 359713 - DNA, 927 bp, Pseudomonas aeruginosa
atgaccgtgaaagtctcccacactgccgaagtccaggacctgttcaaggaggccgccggcctcaacaacgaccagggcagcccacgggtcaagcagatcatgctgcgcatcatcagcgacgcggcgaagatcatcgaagacctggaaatcagcgacgacgaattctggaaggcggtggcctacctcaaccgcctgggcgggcgtaacgaagtcggcctgctggtgccgggcctgggtctggagcatttcctcgatctgctgcaggacgccaaggacgcccaggtcggtctcaccggcggcaccccgcgcaccatcgagggcccgctctacgtggccggtgcaccgctggttgaaggcgaggcgcggatggacgatggcactgagctggaccaggccaccgtgatgttcctcgaaggcgtggtgcgcgacaccgacggccagccggttgctggcgccgtggtcgacctttggcacgccaacacccagggcaactactcctacttcgacaagagccagagcgcctacaacctgcgccggcgcatcgtcaccgacgccgagggccgctaccgggcccgcagcatcgtgccgtgcggctacggctgcgccccggacggcccgacccaggaatgcctggacctgctcggccgccacggccagcgcccggcgcatatccacttcttcatctccgcgccgggtcatcggcacctgaccactcagatcaacctggccggtgagaagtacctgtgggacgacttcgcctacgccacccgcgacggcctggtcggtgaagtgcagttccgtgaggacggcgcgcgtggtatgccggggcgctatgccgaattgaacttcgacttccagttgcagaaagcctgggtgctagctgccgagcagcgtagccagcgcccgcgagctctacaggaagcctga

SEQ ID NO: 359714 - DNA, 291 bp, Pseudomonas aeruginosa
atgctgttccacgtaaagatgaccgtccgcctgccggccgacatggacccggccaaggccgcccagctcaaggccgacgagaaggaactggcccagggcctgatgcgcgaaggcaagtggcgccacctgtggcgcatcgccgggcactacgccaactacagcgtattcgacgtggccagcgtcgaggccctgcacgacaccctgctgcagctgccgctgttcccctacatggatatcgaaatcgacggcgtctgccgccatccctcgtcgattcacagcgacgaccgctaa

SEQ ID NO: 359715 - DNA, 1122 bp, Pseudomonas aeruginosa
atgagccaagtcctgatcgaaagcgtgtcggcggtaatcgtcgatctgccgaccatccgcccgcacaagctggcgatgcacaccatgcagcagcagaccctggtggtgatccgcgtgcgctgcagcgacggcctcgaaggcatcggcgagtcgactaccatcggtggcctggcctatggcaacgagagcccggagagcatcaagcagaacatcgacagccacctcggcccgctgctggtcggtcaggacgcggccaatatcaatgccgtcatgctgcgcttggacaaagcggccaagggcaacaccttcgccaagtccggcctggaaagcgcactgctcgacgctcagggcaagcgcctcggcctgccggtcagtgaactgctcggcggccgcgtacgcgacagcctggaagtggcctggacattggcctcaggcgacaccgccaaggacatcgcagaggccgagcagatgctcaatctgcgccgccaccgcatcttcaagctgaagatcggcgccaacccggtgagccaggatctcaaacacgtcatcgccatcaaacaagccttgggcgagcgtgccagcgtgcgcgtcgacgtcaaccagtactgggacgagtcccaggccatccgcgcctgccaggtgctgggcgacaacggcatcgacctgatcgaacagcccatttcgcggatcaaccgggccgggcaggtgcgcctcaaccagcgcagcccggcgccgatcatggccgacgaatcgatcgagagtgtggaagacgccttcagcctggccgccgacggcgccgccagcatcttcgccctgaagatcgccaagaacggtggcccgcgcgctgtgctgcgcaccgcgcagatcgccgaagcggccggtatcgccctgtacggcggaaccatgctcgaaggcgccatcggcaccctggcctcggcccatgctttcgtcaccctgcgccagctgacctggggcaccgaactgttcggcccgctgctgctgaccgaggagatcgtcagcgaggcgccggtctaccgcgacttcgccctgcaggtaccgcgcacccccggcctcggcctgaccctggacgaagagcgcctggcgttcttcgcccgcaagtga

SEQ ID NO: 359716 - DNA, 1341 bp, Pseudomonas aeruginosa
atgcgacagatagacgtacaccaagtcatcgacaacgcaggctttagccgctttcactggatggtcatggcgctctgcgcgctgttgctgatcttcgacggctacgacctgttcatctacggcgtggtgctgccggcgattatgcaggagtgggggctgaccccactgcaggccggcgccctgggcagttatgcgctgttcggcatgatgttcggtgccctgtgcttcggcaccctggccgacaagatcgggcgcaagaaaagcattgcgatctgcttcgcgctgttctccagcgccaccatcatcaacggcttcgccagcaaccccagcgagttcggtatctgccgtttcctcgctggtctcggttgcggtggcctgatgcccaatgccgtggcgctgatgaatgaatatgcgcccaagcgcctgcgcagcaccctggtggccatcatgttcagcggctactcggtgggcggcatgctcgccgccggggtcggcatttacatgctgccgcgcttcggctgggaatcgatgttcttcgctgccgccgtgccgctgctgctgttgccgctgatcctctggctgctgccggagtcggtcggtttcctggtgcgtcagggccgtcatgagcaggctcgcgcggtgctgaacaaggtcgagcccggcctgcaactcgatgaaacggcccatctgcatataagcgagaccaagggcaagggcgtagccatgttcgagctgttccgcgacggccgcgcgctgcgcaccctgtgcctgtggctggcgttcttctgctgcctgctgatggtctacgcgctgagttcctggctgcccaagctgatggccaacgccggctacagcctgggttccagcctgtcgttcctgctcgccctgaacttcggcggcatggccggtgccatcctcggcggctggctgggcgaccgctttaacctgagcaaggtgatggtcggcttcttcgtcgccgccgccgtgtcgatcagcctgctcggcttcaagagcccaacaccgctgctgtacggcctgatcttcatcgccggcgccaccaccatcggcacgcagatcctgctgtatgccggcgccgcgcagttctacggcctgtcgatccgctccaccggcctcggctgggcctcgggcatcggccgcaacggcgccatagtcgggccgctgctgggtggcgcgctgatgggcatcaacctgccgctgcaactgaacttcatggcctttgccatccccggcgccattgccgccatcgccatgagcctgttcgccatcagcgccaagcgcaggcagagcgcggtcggcgagctggtcggcgccaaggcctga

SEQ ID NO: 359717 - DNA, 771 bp, Pseudomonas aeruginosa
atgaacaagcgtttccaagacaaggtcgccgtggtcaccggcgccgcccagggcatcggccgtcgcgtggccgagcggatgctggaggagggcgcgcaggtggtcgcggtggaccgttccgaactggtccatgaacttgccgagcaactgggcggcaacgtactgaccctgaccgccgacctggaacaggccggcgactgccagggcgtgatgcagaccgccgtgacgcacttcggccgcctggacatcctgatcaataacgtcggcggcaccatctgggccaagccgttcgagcattacgaaacccagcagatcgaggccgaggtgcggcgctcgctgttccccaccctgtggtgctgccacgccgcgctaccgcacatgctggagcagggcagcggcgccatcgtcaacgtgtcctccatcgccacccgcggggtcaaccgtgtgccctacggcgcggccaagggcggcgtcaacgcgctgaccgcctgcctggcgttcgagaccgccgagcgcggcatccgcgtcaacgctaccgcccccggcggcaccgaggcgccgccacggcgcatcccgcgcaacagcgccgcgccgagcgagcaggagcaggcctggtaccagcagatagtcacgcagaccctcgaaagcagcctgatgaagcgctacggcagcatcgacgaacaggtcggcgccatcctttttctcgcctcggacgaggcctcctatatcaccggcgtgaccttgccggtgggtggaggcgacctgggctga

SEQ ID NO: 359718 - DNA, 1011 bp, Pseudomonas aeruginosa
atgagccacaagatcgcccttaatttcgaagacggggtgacccgcttcatcgacgccaaggtcggcgaaaccgtggccgatgccgcctaccgccagggcatcaacatcccgctggattgccgcgacggcgcctgcggcgcctgcaagtgcttcgccgaaggcggccagtacgacctgggcgacgactatatcgaggacgccctgagccaggccgaggccgagcagggctatgtgctgacctgccagatgcgcgccgagagcgactgcgtgatccgcgtgccggcttccagcgacctgtgcaagacccagcaggccagcttcgaggcggccatcagcgcggtgcgcaaattgagcgacagcaccatcgccctgtcgatcaagggcgaggcgctcaatcagctggccttcctgccgggccagtacgtcaacctcaaggtgccgggcagcgagcagacccgcgcctactcgttcagcagcctgcccaaggacggcgaagtcagcttcctgatccgcaacgtgccgggcgggctgatgagcagcttcctcaccggtctggccaaggccggcgacagcatgaccctggccggcccgctgggcagcttctacctgcgcgagatcaagcggccgttgctgctgctggccggtggcaccggtctggcgcccttcaccgcgatgctggagaagatcgccgagcagggcagcagccatccgctgcacctgatctacggggtgaccaacgacttcgacctggtggaaatggacaagctcgaagccctggccgcgcgcatccccaacttcacctacagcgcctgcgtggccaacccggacagccagtacccgcacaagggctatgtcacccagcacatcgagcccaagcacctcaacgacggcgaagtggacatctacctgtgcggcccgccgccgatggtcgaggccgtcagccagttcattcgcgagcagggcatcgccccggccaatttctactacgagaagttcgccgcgtcggcctga

SEQ ID NO: 359719 - DNA, 489 bp, Pseudomonas aeruginosa
atgagcctgacctatgacgccgtgcgcgacttcctctaccgcgaggcgcgctacctggacgacaagcagtgggacgagtggctggagctgtacgcgccggacgccgagttctggatgccagcctgggacgacaaggacgaactggtggaaaacccgcagaccgagatctcgctgatctggtacggcaaccgcagtggccttgaagaccgcgtgttccgcatccgcaccgagcgctccagcgccaccattccggatacccgtacttcgcacaacatcaacaacatcgagatcgtcgagcagggcgatgggctgaccaaggtgcgcttcaactggcacaccctgagctttcgctacaagaccgtcgaccacttctacggcaccagcttctacaccctcgatacgcgtggcgagaacccgctgatcaaggccaaaaaggtgatcctgaagaacgactacgtgcgccaggtcatcgacgtttaccacatctaa

SEQ ID NO: 359720 - DNA, 1362 bp, Pseudomonas aeruginosa
atgaacctgggactcgactacctgaacggcctgctgcaagaagacaaagagcagggcattttccgctgtaagcgggaaatgttcaccgacccgcgcctgttcgacctggagatggcacacatcttcgaaggcaactggctgtacctggcgcacgaaagccagatcccgcagaacaacgactattacaccacccacatggggcgccagccgatcttcatcgcgcgcaacaaggacggtgtacttaatgcctttatcaacgcctgcagtcaccgtggcgccatgctctgccgcttcaagagcggcaacaaggctacctatacctgcccgttccatggctggaccttcaacaacaacggcaagctgctcaaggtcaaagaccccaaggatgccggctacccggacagcttcgactgcgacggctcccatgacctgaagaaggtcgcccgcttcgaatcctaccgtggcttcctgttcggcagcctgcgtgaagacgtggcgtcgcttgaagacttcctcggcgagtcgcgcaagatcatcgacatgatctgcgaccagtccagcgaaggcctggaagtgctgcgcggctccagcacctatgtgtatgagggtaactggaaactacaggccgagaacggcgccgacggctatcacgtcaccgccgtgcactggaactacgccgccacccagcagcagcgcaagctgaaagaagccggcgacgacatccgcgccatgagcgccggcggctggggcaagaagggcggtggtttctactccttcgagaacggccacctgctgctctggacccgctgggacaaccccgaggatcgcccgctgttcgccgaccgcgaacgcctggctgccgagttcggcgaggcccgcgccgactggatgatcggccattcgcgcaacttgtgcctgtaccccaacctgtacctgatggaccagttcggctcgcagttgcgcgtggcccggccgctgtcggtggacaagaccgaagtgaccatctactgcatcgcgcccaagggtgaatgcgcagaggcccgtgcccgccgcatccgccagtacgaagacttcttcaacgtctccggcatggctacccccgatgacctggaagagttccgtgcctgccagcagggcttcgccggccgcgctatggaatggaacgacatgtcccgtggggccaagcactgggtcgacggcgccgacgagtcggccaaggaaatcgacctgcacccgctgatgagcggcgtgcgcaccgaggacgaaggcctgttcgtgctgcagcaccactactggcagcagcagatgatcgaggcgctgcagaagcagcaggaccagctgatccacgtggagggcgcgtaa

SEQ ID NO: 359721 - DNA, 957 bp, Pseudomonas aeruginosa
atggagcatcgcctgctgagcgagcgcagcgcggtattctaccgtgccgacccctatgctgtgtccgactatgtgaaccagcatgtcggtcagcattccatcggtctgtctaagagcacccatcctcaggccagtctcaatcaccgcaagtttgccgacctcgatctgtgccgtatcagctatggtggcagcgtgcgggttacgtccccagctctggaaactatctatcacctgcaggtactgctgcgtggtagttgcctgtggcgcgggtacaagcaggaacattacttggtgccgggcgagttgctgctgataaatcccgacgaccctgtcgacctgacctattccaaggattgcgagaaattcatcctcaaggtgccggtaagggtgcttgagggcgtgtgcgatgagcagcgctggcagcgtcccagcagtggcgtgcgcttcctgcgcaaccagtatcgactggaggagctggaaggtttcatcggtttgctggcaatgatctgtcaggaggccgaggtcggtgagccgctgttgcgggtgcaggagcattacacccagatcgtcggcagcaagctgctttctttgatgcagaccaacattcgccgcgaggcgctgaactcgcccagtgtcagcttcgagcgtatccttgattacatcgaacgcaacctaaagcaggatttgtctagcgagcacctggccgagcaggctagcataagcctgcgttccttctatgccttgttcgagcgccagctgggcgtgacgcctaagcagtacatccgccagcgcaagctggagcgtatccatacctgcctgagcgacccgaactgcatggtacgcaacctcaccgaattggcgctggactacggctttctgcacctggggcgtttctcggaaaactatcgccagcagtacggcgagcttccctccgacaccctcaagcgccgcacctga

SEQ ID NO: 359722 - DNA, 393 bp, Pseudomonas aeruginosa
atggatgagaaacaacgctatgaagccggcatgcaggtgcgccgcgcggtactcggcgacgcccatgtcgaccgcagcctgcaacacctgacaccgttcaatgaagagttccaggaaatgatcacccggcatgcctggggcgatatctggacccgccccggcctgccgcgccacacccgcagcctgatcaccatcgccatgctgatcggcatgaaccgcgaaggcgaactgcgcctgcacctcaaggcagcgaagaacaacggcgtgacccgcgacgagatcaaggaagtgctgatgcagagcgcgatctactgcggcattccggcggccaatgccaccttccacctggccgaggaggtgtgggacgagatgggggtggagtcgcttctctag

SEQ ID NO: 359723 - DNA, 789 bp, Pseudomonas aeruginosa
atgtctgccgtacaactcgccgatggcgaactcaactaccgcctcgatggccccgtggatgcaccggtgctggtgctgtccaactccctgggcactgacctgcatatgtgggatgcgcagatcccggccttcgccgagcacttccgcgtgctgcgctacgacacccgtggccatggccagtcgctggtgacggcgggcccctacagcatcgagcagaacggccgcgatgtgctggccctgctggacgccctgcatatcgagcgcgccgccttctgcggcctgtccatgggcgggctgatcggccagtggctggcgatcaacgcgccggagcgtatccagcgcctggtgctgtgcaacacggcggcgaagatcggcagcccggaagtgtggaacccgcgcatcgacaccgtgctgcgcgacggccaggcagccatgctggcgctgcgcgatgcctcgattgcgcgctggttcaccgtggaattcgctgcggccgaaccggcactggtcgagccggtggtcggcatgctggccgccacctcgccgcagggctacgccgccaattgcgcggcggtgcgcgatgccgacttccgcgagcaggtcgccggcattgtcgcgccgaccctgatcgtctgcggcacggccgatgcggtgaccaccccggaacatggccgtttcatgcaggaacatatccgtggcgccgagctggtcgagttccacgccgcgcacctgtccaatgtcgaggccggtgagctgttcacccgccgcgtgctggacttccttaccgcctga

SEQ ID NO: 359724 - DNA, 1131 bp, Pseudomonas aeruginosa
gtgagcaaccaactcttcgacgcctatttcactgcaccggccatgcgcgcgatctactccgatcacggccgggtgcagggcatgctggatttcgaggctgccctggcgcgtgccgaggccagcagcgggctgatcccgcaggcggccgtggcgcccatcgccagcgcctgccaggccgaacgctacgatttcgccgcgctggcccaggccatcgtcaccgccggcaactcggccattccgctggtcaaggcactgggcaagcaggtcgccgcgcagagtgccgaggccgagcgctatgtgcacctcggtgccaccagccagaacgccatggacagtggcctggtcctgcagttgcgggcggccatcactttgctcgaacaagacctggcgcaactggccacggccctggcccgcgaactcgacctgcaactgccggagcagccctggcatacccagcgcgaccgtctggtggagttcgccagcctgctcggcctgctcggcctgatcgccggcagcctgggcaagttcggccgcgatctcagcctgctgatgcaaaccgaggccggcgaagtgttcgaggcggccgcgccgggcaagggcggttcctcgaccatgccgcacaaacgcaacccggtcggcgccgccgtgctgatcggtgcggccacccgcgcgcccggtctggtcgcgaccatgttcagcgccatgcctcaggagcacgagcgcagcctgggcctgtggcatgccgagtgggacaccctgccggagctgtgctgcctggtttccggcgcgctgcagcaggcgctgcagctggtgccggggctggaagtggatgccgcgcgcatgcgcagcaacctcgacctgacccaggggctggtgctggccgaggcggtgagcatcgccctggcccagcgcattggccgcgatgccgcccatcatctgctcgaacagtgctgccagcaggccgtgcgcgagggtgtgcatttgcgccaggtgctaggcagccatgccgaggtcagcgcgcagctgtccgccagcgaactggatcacctgctcgatccggccctgtacctgggccaggcccgccgctgggtcgagcgcgccgtggccgaacaccggaatctttcgaattag

SEQ ID NO: 359725 - DNA, 1206 bp, Pseudomonas aeruginosa
atgagccgcgaggtcttcatctgcgacgccatccgcacgccaatcggccgcttcggcggcggtctggcagcggtacgcgccgacgacctggcggccatcccgctcaaggccctgctcgagcgcaacccgcagctcgatccggcggccatcgacgaagtctttatgggctgcgccaaccaggccggcgaggacaaccgcaacgtcgcgcgcatggccctgctgctggccggcctgccggagactattccgggcgtgaccctcaaccgcctctgtgcctcgggcatggatgcggtgggtacggcgtttcgcgccatcgccagtggcgagatggagctggccctggccggcggcgtcgagtcgatgtcgcgggcgccctatgtgatgggcaaggccgacagcgcctggagccgcaaccagaagatcgaggacaccaccatcggctggcgtttcatcaacccgctgatgaaggcgcagtacggcgtggacgccatgccgcagaccgccgacaacgtggccgacgattaccaggtcagccgcgccgaccaggacgccttcgccctgcgcagccagcagcgtgccgggcgcgctcaggccgagggtttcttcgccgaggaaatcgtcccggtgctgatcaagggcaagaagggcgatacgctgatcgaggcggacgagcatctgcgcccggacaccacggccgaggcgctggccaagctcaagccggtcaatggcgagggcaagactgtcaccgccggcaacgcctcaggggtcaacgacggcgccgtggcgttggtcctggcctcggccgaggccgtgcagaaatacggactgaccgcccgtgccaaggtactgggcatggccagcgccggcgtggcgccgcgggtgatgggcatcggcccggtgccggcggtgcgcaagctgctcgaccgcctgaagatcagcattcatgacttcgacgtgatcgaactcaacgaagcctttgccgcccagggcctggccgtgacccgcgagctgggcctggccgacgacagtgacaaggtcaacccgaatggcggcgccatcgccctcggccacccgctaggggccagcggcgcgcgcctggtgcagaccgcgttgcatcagctggaaaaatccggcggccgcctggggctggcgaccatgtgtgtcggtgtcggcaaaggcttggcgctggccatccagcggacatga

SEQ ID NO: 359726 - DNA, 783 bp, Pseudomonas aeruginosa
atgagcgcctacagcaccaatgaaatgatgaccgtggctgcctcgcgccgcctcggcaacagcgatgtgaccttcgtcggcatcggcctgccgtccaaggccgccaacctggcgcgcctgacccacgcccccgacgtgaccctgatctacgaatccggcccgatcggcgccaagcccagcgtgttgccgctgtccatcggcgacggcgaactggccgagaccgccgacaccgtggtgcccaccggcgagatcttccgctactggctgcagggcggccgtatcgacgtcggcttcctcggcgcggcccaggtcgacaagttcggcaacatcaacaccactgtgatcggcgactaccacaacccgaaagtgcgcctgccgggtgccggcggcgcgccggagatcgctggcagcgcgaagaaggtgttcatcatcctcaagcagggccaccgcaccttcgtcgacaagctggccttcatcacctcggtcggccatggcgaaggcggcgagcatcgccagcagctgggcctgcccggtgccggcccggtggcgatcatcaccgacctgtgcatcatggagccggaagccggcagcaaggaattcgtggttacctcgatccatccgggcgtgagccgtgagcagatcatcgccgccaccggctggccgatccgtttcgccgcgcaggtggccgagaccgcggcgcccgaggcctttgagctggaagcgctgcgcgccctggaagcacgtaccgccgcggcccatggccaggccgggggtgaggaatga

SEQ ID NO: 359727 - DNA, 864 bp, Pseudomonas aeruginosa
atggctgaaatcctctccctgcgcgaagccatccagcgcttcgtccacgacggcgacagcatcgccctcgaaggcttcacccacctgatcccgactgccgcggcccacgaaatcatccgtcaggggcgcagggatctgaccctcaatcgcatgaccccggacctggtctatgacctgctgatcggcgccggctgcgccaagaagctggtgttctcctggggcggcaaccccggtgtcggctcgctgcatcgcctgcgcgacgcggtggagaagggctggccgcagccgctggagatcgaggagcacagccacgccgacatggccaacgcctatgtggccggcgcctccggcctgccgttcgcggtgctgcgtgcctacgccggttccgacctgcccaaggtcaacccgctgatcaaaaccgtcacctgtccgttcaccggcgaagtgctggccgccgtgcccagcgtgcgtccggacgtcaccgtgatccacgcgcagaaggccgaccgcaagggcaatgtgctgatccagggcattctcggcgtgcagaaggaagctgccctggccgccaagcgctgcatcgtcacggtcgaggagatcgtcgacgagctcaatgcgccgatgaacgcctgcgtgctgccgggctgggcgctgaccgccgtgtgcctggtgccgggcggcgcccatccgtcctacgcccacggttactacgagcgcgacaaccgcttttaccaggcctgggacccgattgcccgtgatcgcgacagcttcaccgcctggatcgacacctatatccgtggcactgccgatttcgccgcctaccaagccgcgattgcccaatccaagactgcggaggccaactga

SEQ ID NO: 359728 - DNA, 873 bp, Pseudomonas aeruginosa
atgttgcgttattcccatggagcctggtggcagggtctggccgcgctgtgcgtgctgggcagcctgtggccgggcgcattcgccgtctgggcgctaggcgccgcgctgctgtgcggcctgctggcggccatcgcctatgcccggcgcccgccgttgcccgaaccgcagaccatctatgtcgaagtgccggtgcctgtgcctgcaccacccagcgcggtgccgccgccggctgcgccgccgctgcccaatctgggccagccgctgcacgagttgctcgacagcatccagcgcagcgaggcggacatgcagtacgccaccgaactggcccgcgccggcggcgagaaggtgcaggccagcgcggccagcatccaggccgcagcggccgccatcgagcagctcagcggctatatgggcgaggtggagcagctgttcaacgagctgggcgcgcagtccacgcgcatcgccgcgctggtcggcggcatccaggacatcgcccggcagaccaacctgctggcgctcaatgccgccatcgaagccgccagggcaggggagcagggtcgcggttttgccgtggtcgccgacgaggtgcgccacctggccagccgcgctaacgactccagcgagcagatccgccagatcgccggcagcctgcagcgttcggccgatgaggcgcggctcggcatgcagcaggccgccgattcaacccgcaacggcctgcacaccaccggcgcggccctgcaggccatggccgagatgcgcgccggggcccaggcgcgccaggagatcgtgctgcgcatcgtcgcccagctggccggccagcgcgaacgcaccctgcacctgcaagccctgtgtgccaccgacgctcctggctga

SEQ ID NO: 359729 - DNA, 360 bp, Pseudomonas aeruginosa
atgaccagctctgcccagatccccgccgtcgccaaccgggatgtccaggccttcatcaatgcccaacccctgtcgcgctaccagtggcgcatcgtcctgctgtgcttcctgatcgtcttcctcgatggcctggataccgcggccatgggctttatcgcctcggcgctgacccaggattggggcagcgaccgcgccagcctcggcccggtgatgagcgccgcgctgatcggcatggtgttcggcgccctcggctcggggccgctggccgaccgcttcgggcgcaagctggtgctggtggtggcggtgttcctgttcggcctgttcagtctgctctcggccaggactgggagcgcgacctag

SEQ ID NO: 359730 - DNA, 843 bp, Pseudomonas aeruginosa
atgagcgaagaaccccgcctgccgctggcgaccctggcgccgcctatcgtggcctcgccggccaagcgcattgaggcgctgaccggcgaccccaacttcatgacctcgctggcccgtggcctggcggtgatccacgccttccaggagcgcaagcgccacctgaccattgcccagatcagccatcgcaccgagattccccgcgccgccgtgcgtcgctgcctgcacaccctgatgaaactgggctacgccaccaccgacgggcgcacctattcgttgctgcccaaggtgctcacccttggtcatgcctacctgtcgtcgacgccgctggcggtcaccgcccagccgattctcgaccgcatcagcgagcagctgcacgaggcctgttccatggccaccctggagggcgacgagattctctacatcgcccgttcggcgacgccgcagcgcctgatctcggtcgacctcagcgtcggcagccggctgccggcctactgcacctccatgggccgcattctgttggccggcctggatgacctggccctggacgactacctggaacacgccgacctgcaggtgaagaccagccgcaccatccatacggtcgaaggtctgcgcgccaatatcgaggagatccgccagcagggttgggtgatcatcgaccaggagctggagatcggcctgcgctcggtcgccgtgccgctgaaggattcggccggccaggtgctggccgcgctcaacgtcggcacccacgtcagccgcgtgtcgcgccaggagctggaatcgcgctacctgccggtgctgctggaggccagccgcgagctgagtacgcggctgttccattga

SEQ ID NO: 359731 - DNA, 321 bp, Pseudomonas aeruginosa
gtgctgatcggcgacgccgcacacgccatgacgccgaacctggggcagggcgcggccatggccctggaggacgccttcctgctggcgcgcctgtggtgcctggcgccgcgcgccgagacgctgatcctgttccagcagcaacgcgaggcgcggatcgagttcatcaggaagcaatcctggatcgtcggccgccttggtcaatgggaatcgccctggagcgtctggctgaggaataccctcgtccgcctggtgccgaatgccagtcgcaggcgcctgcaccagcgtcttttcaccggtgtcggtgagatggccgcgcagtag

SEQ ID NO: 359732 - DNA, 489 bp, Pseudomonas aeruginosa
atgaacaccacaacacaaccctcttccccaagcccgaagcttcagctcacgttgaacaagcaaacgctagaaatccacatggagctgaacgctctactcacctcaatcggcgcaccaactggcttggcccaggttgccgctacggcatgggaaagcgacctcctgatcgaagatgacgctgaatctaaatccacgttgtactccctgccggtccggctgattccagcgttcattgatcagatcattgatcaactgagcattgagagccgcacggaggccgtccagttcagggatggcttccgtgcggtggcagcaagcaccaacaagctcattacgctgacgcagaccagcaggcccgaagtactcggcctcatgcagcagtggatgaaaactgctccggccagctatgcacttcacgaactcatcgctgcgcaatctaagcgcacgccagcttatgtcccaacccctgccagccaagggggccagtaa

SEQ ID NO: 359733 - DNA, 732 bp, Pseudomonas aeruginosa
atgcgcacatccaaaatcaaaattcaggggctgacgattccttatctgatcggcagcgacaatgagcgttactggcctatgcggccgatctgcgaagcgatggggctgaactggcactctcaagcggccaagctgcatccccctcgatacagccctcgtgagcatgatgtagcactgccaggccagcctcttatgaaacgggcgctgtgcctgccgcagtcagagttcgagttctggctgaaaagcttgagctcgcgcaaagtgtcccctgtcgttcggcgccaccttgaccagctgcgtactcacttctttggcggagcactgactgtggaggagcagtctgcagtgacagcaccagcggctgcgccagcagtcctgaaccgaattctgaactggcgagcgcaacaagcagatccagccaatcgtccggaactgctcaagcagattgccaaccaattccgtggggctaacggttttggaattgccgagacccaagaccaccaactacgtacagcagtcgcttctctcagctcgatcatctatcagcatgatcgctcaaagacgccgagccagatgccaatttcgctgcgggtcgatgcgatcataaaatccattgttgagacgcgcacacagcggatgcatttgcctgatgcggacttcgccgcgctgctctgcggcatcgacttggagcagcagcatcgtcaggcctgcagcatgcagcagacgctatga

SEQ ID NO: 359734 - DNA, 348 bp, Pseudomonas aeruginosa
atgcctggcagctccatgtccgacgaagatgcgctcagctatgcccgaaagaactttccgtttggaaatttctgtctggtacgtgactggctgtggctcgacatagagaccaccgacgcgcaacgccacgctctggagaaatcacaacgcgagccggccttgatttatgcgcaccaggtagttttcgacagcgagcgacgatgggacgtgggcgacttcgtgagaacctcgctactgcatcagttcagtaaggggtttcatttcaagacgctcaactcggtgtacctgctactgggtcctggctcccgcaagcgtgccagtgccgataccatcgcatgcctgatttaa

SEQ ID NO: 359735 - DNA, 1059 bp, Pseudomonas aeruginosa
atgcgcctcgatcagatgccgtaccactcgatgccaaccctggctgtactaccgttccgtcaattccgtatcggctggacatggcaactacgagcactgaagctcttccctgattaccagctggcttggaaacggtacttctacgataacggtaatgggcatgcgagggcggccgtgttcacctcctataaagaggctatggaggcggcggatgaatttaatcaactcaccaatgagcgcgcggcgcaggcagtagcggatccggtcctccaggcctcaaccctcttaaaggtcgacaaggctttgacggcggctcgccgcattcaagacgaagaaaagttgatggagcgcgaggcgatcaagcgaaatgctcatctgcccagtccagccatcgaggatctagagctgcccgaaaaaatggacatattgcggcaaccactgcacgagcagcttgagcgtgcgccctatttgcaagttgttgccctcccgacttttaacgtctgtcttcgccgtaccgaagacctcaaatgggaagagatcggtgctttgtcctcgaagcgctcacaagtatgtctcagagaattgactgccaggggctttggcctttctgggggagatcattggggtagaaccaaggcgcagattcgtgcgctgttacttccccgagccaaccagctccttcagttggccagcgtcagacaaatgcttgccgaggcgagaatgcgcggccagagggtattagtctgcgggggatttgtgttctggtttgaagatgatggggtacctcggtggattgtaaaaaactccggaggagagtccaacagcgatgaaggtacaaccctatggcacgagggcacgatcctgtccaagaaccatggtcggatcgtagtgctcccatacatcaaggaaaatggagaacagattcaaggccacacgaagaacgctccgcatgatggtaaggctctgcctcgccatcgagatcaatacgtcaccctcccgttcgagatcctggaaggggatctgatgatcggattgtttggtgaactgcactatgagtga

SEQ ID NO: 359736 - DNA, 1818 bp, Pseudomonas aeruginosa
atgatcgatgagcttcaagccagcaaatcctgttacttctatcgccaaaaagctccgatcacaacggtcgcgatcacggctttgttccgggcggttagaggtgcccaaacgtccccctcgaacaaccttttctctttcatacggcagtctcacggggcgtcaatctggtctgctctttgctttcaattcgacaagacaccagctttcctgcctggcgctgacgatgtgatcgaccgggtaaccgggtatttgctgatagtcgagcaccgtgattatgtggccatttttaaatcccagatcgacgtccctgccgatttcgccaagcggcatctgcagcgcatcggtgcgcaggatgtcgaccgtggactgactagcaaggactcggtattcgcccgggttcggctgaggcatatgacactgtcccgctttgctttgcgcagcaagacacttgaaggcgagaacctccagaacaacgtgggcatggcctcttcggctcgatttgcaccgttgggttacagcttcaccgaggcggacgaacacttttcaacgacgccacgaaccggacggatttcacttcggtcggatcgtgccggctatctagagttagtggactatgccagcagtattatcgaccgcctgcaccctcgacctggaagaccatcgtcttcccctttcctagcggctttcgcacgaccgctggagctatcggatctaacggctagccctacccaattcgcggttgataccgccatcctcgggcaggccatctttgacgacaaaatcatccgcttggtcaagcgtgacgaaaggggctatcgagagctggcaaaggcagaggtcgatctgatacttacagagctgacagatgtcttgggggtcgccaaaaacgccgccggcaagctcctggtgtcccagcttgcaacaggagtcgaggtaggtgagatagcgatcaacaaaacgcgaatcgccttgaaacgccttacgctacctctactcgctgatgtctacgtcgaggagacccagttcgccctcggggcggacggtgatcgcgcactgcttaagcagttcatcgacaaacaggacacgttcatcgtcctgttcgaccagccgcgttttgcctacctggacggcagcctttatcaggacgactccttggtcaacggtggcactcagttcttgggctacattttcggcaatgcagagctggcaactgtcacggatgagaaaggtacctttaccgctgcccatcgtacgtttgatccagactccacgttcggcgcggtactgtcgacggtcgcccccgaggatgacgtcatggtctgcgatgatcttggggatgagtgggctgacttcattggatttcgaacggatccagcttttcccagggtcaccttctaccatgctaagcatggcgagctgacactcggtgccggcgcgtttcacgtttctgtcagtcaggctatcaagaatctgggcaacctcacattgcccgcaccggctatcaccaagaagttcgctcgatggaatcggctttataccaatcgtaaggtaaggacaggtatccatcgcacatgccgaggcacacctgctgattccagagctgcggtggagttctgccggaatgcccctcacacgttcaaacgggtggccatcgtgacctcatcactgagcaaggccgcagttgagcaagcgtttcatgacatcgaagcaggccacactgccagcccctacttcgtccagctgtattggttactgtcgtccttctttgctgcctgtgccgaggtcggagccttcggatgcgtaatatgtcaggagtga

SEQ ID NO: 359737 - DNA, 1131 bp, Pseudomonas aeruginosa
atgactcgccatgcgctggacgcagcgcactacaccgagccgcagacgctcgcgctggagcgcgaaaggctgttcggcaggctctggatcttcgtcggcttcagttcgatggtgcgcgagcgcaaccagttcttcacccgcaagatcgtcggcgtgccggtcgtggtgcagcgtaccgagtccggcatccgggcctttctcaaccagtgtccgcatcgtctgtcggccatccagaccgaatgcaccggccagcgaccgctggtctgcccgtaccatgcctggtcgttcggcgccgaggggcagctacagggcattccgaactccagtctgtaccagttcagcgccgaggagcgggcgcagatcggcttgcgcaagctgcacctggaagaggtggggcaactgctgttcgtcaacctggcggacgacccgctgccgctgcgcgagcagttcgacgatggattcctggaaaccttgcgggaggtctcctcgcacctggatacgcggctgatctacagctgccacaaggtgcgctacaactggaagctgaacatggagaacgtgaaggactacaaccatgttcctttcgtccatccgaagaccttcctcccggtgatgaccgccccggtgcgcggtctggcacgcgaggctgcggtgccatccgaggtgctgcgcctgctgcaggaaggcgaaacgccggagctgcgttcgctgagcttccccaccaaggcgccgatccagccctacaagagctggttctccgacctctgtgagggctacggcgacgagcacgcctactacaactggttcatctacccgaacgtgaacttctgcagcgtccgtggcgagcacttcctgctccagcagtacgatccggtggcacccggcgagaccgactaccacttgtggatgatgactgcccggcgcaaggatccgaagaccgatttcagcgctttgctgagcaccctgattcgcggcgagcgtaacgtgatcggcgaggacaccctggtcctggaacgcctccaggaggggctgggcgcacattcgccgccgttcatgcacggcgactacgaggtgcagctggtgcgccagcacctgtggtatcgcgcgcaggtactgggggagagggcatga

SEQ ID NO: 359738 - DNA, 633 bp, Pseudomonas aeruginosa
atgaagaggatcatcatcctcggcgccggtgggttggggcgtcaggtgctggcccagctgcaggtcgactacggtcacggcatcgactgggtgatcggcgggtttctcgacgagcgcggccccgaagcggtcgcggagtcgctctactacccgtggctcgggtatccggagagcttcgtcgcggagcctgaccaactgttcgtcgccgcggtcggcgatccgctcagtcgccagaagcaggtcgcatgcctgctggcgaagggcgccgagttcgtcgctatccgcacccgctgcacccttggcgtgcggaccagctacggcccgaccttcttcggctacgacgtgagcagcggcgtggactgccgtatcggcgcctacggtttcatcgaccagcaaaccatgctcggccacgacgtggtcatcggtgactatgtacatatcggcccgcgctgcctgctggccggctacgtgaaggtgggcgatcgtgcggtgatcaactccggggcgatgatcgcccgcgacgtcagtatcggcgaagacgccgtggtgggcatgggcgcggtggtgttcaaggacgtggcggccggacagaccgtggtcggcaatccggcccgggttattttcagcaagtga

SEQ ID NO: 359739 - DNA, 675 bp, Pseudomonas aeruginosa
atgaaggagactggcatgacgccgagctggctcaatgagaaggacggtgatgagtggcgatgggctgccagctacctatcgagccgatgctcttcgtcgctgaaagccaagctagatttctttgcgaatcgcgacttcagccgcctcgtcaggtcgatccatgctctcgaatctgaggccgaaggcgtaaagctcatcgagcggttgagaaacgccatcagacaaaggcggtatcgcttgtccaacggcgggagaaagacctgctcctttacgctcccaagcgcaaccaagaccacgctcaaaaccctggcgaaaaggcacaaaaccactgaaacaggcctgatagagcgcctaatcgaagcagcctctaagcaagtcgcaatacaaaaagaggaaacgcggcacgaatctcaggcgatgaaagccatacgcaacgcgcgcaagctcgaacaagagctggccaaagtgcgtattgatgagaccgagaaacagctgcatcactgcctaaaacagcttgcacgatgggaagcctttttaaaggaagagcaactggtgctatcccccgaagatgaagctgccgcaacggccctcacaaagcagcgcctgcacgtaattcatgaggccatcgatgcagccgtggcaagacaccagttgaccagcccaagaaacgtctaa

SEQ ID NO: 359740 - DNA, 201 bp, Pseudomonas aeruginosa
atgagcgacctcgccccttcctggctttgcgagcagatcgagcaggtactgcgacacctcatattcctgcccgggacgcccgaccttatctacctgcttgtgggccaccagaagtccggcctcaaccagctcgcgcgtggcgtctctgaccaacctttctgtcaggcaaaggagctttgcaaccggcttgaccttgaatga

SEQ ID NO: 359741 - DNA, 372 bp, Pseudomonas aeruginosa
atgatcgctcgagaattggggcaactgaaggtcggtaacccgggacagagcaaggcgggttactactggtctgaagtgctcgatcatttctttgaggtggcgttcaagtgggcggagcatttgaagaaaaggctcaatggacaggcgtggcaggggtacaaaccccagttggtccggttgatacctgcgccggagccggaagagggtgatgatcgcttgaggatcgtttctttgatcgtctatccggcgcccaagaatcaggaaggctgcattgtgtgtcgggaggagggatttcttaaaagattcgaaagcgaggcggacttggatgtgcagtaccgttacaggtatggccttctaacgcctcccgactag

SEQ ID NO: 359742 - DNA, 201 bp, Pseudomonas aeruginosa
atggccaaggctgccaatctagttgtgcaatgcttggataatgaaggcgttgaatacgtcttcgggatttctggcgaagagaatctcgatttgctcgagtccctacgcaaatcaaatatcaagctgattctcaccccgcatgagcagtctgctggcttcatggccgcgacttacggcgcctcactggcaagacgggggtga

SEQ ID NO: 359743 - DNA, 921 bp, Pseudomonas aeruginosa
atggaactacgccacctgcgctacttcatcgccgtcgccgaggaacgcaacatcggccgcgcggcggcgcgcctgcatatctcacagccgccgctgacgcggcagatccaacagctggaagataatctcggcgttcaactgttcaaccgcacgtcccgcggcatggagctgacccccgccggcgagctgctgctggacgaggcaaagaacatttatgcggtaatcgagcaggccaccgagcgcacgcaacgtgccggtcaaggcaaggtcggccgactggatgtggcgatcttcggttcggcgattctcgataccattccgcgcctgctagccgatttcaggagggcctatccggacgtcaaggtcgtgctacatagcatgaacaaggacgagcagctggaagcactgcgccagcggcggatcagcgtgggcttcaacaggatacttacgccctcgccggacttcgcctccgaactggtcgaaaccgaatccctgttgctagccctgcctgaggatgatccccttgcccggcaatccagtatcgatttccagtcgctggtcaacgagccactgatcctctttcccaccggcagccgtcccagcttcatcgacaaggtaatcggcctctgccagcaggccggcttcgtgcccaacatcgctcaggaagtcggcgacacggtgacggccgtctcgctggtatccaagggtttcggcgtcagcctcgtctcgcagtccaccgccgcgctatcgctgccgggactggtctatcgaccgctgaacggcattcctgacaatgccagaatcgacctttcctgcatttataggcccgatgatcgctcccccattctggctgccttcctcaatgtagtgaggtcatacaggaaagcacacggtgtcgataaccccagaaaaccgaggtag

SEQ ID NO: 359744 - DNA, 1662 bp, Pseudomonas aeruginosa
atggtgcccagtaccagtctgccgacggttagtctgaagaagctgtttgtcgccatggctggcacccttgccggattcacggcgatggttcccgctcaagccatgcagatcgatatcggcaaccccgatctgcgcatgtcgtgggacaacaccatcaaatacagcgccgcctggcgcgtgcggggtgccgactccgatgtcgccgataactccgttggcgtgcaggccaacaccaacgatggcgacctcaacttcgacaaggggctgatctccaatcgcctcgacctgctgtccgagttcgacctgcgctacaagcgcgactacggactgcgtctgagcggtgcggcctggtacgacgatgtctacaacaagtccaacgacaaccccggggcgctgggcggcgcgttggtcaattcgcgcagcgtcgatcatgacgagttcacccgtgacaccgagaagctccacgggcgcaaggccgagctgctggatgccttcgtctatggccaattcacaccgggcgacatgggcctgaacctcaaggcgggtcgcttcacccagttgtacggtgagagcctgttcttcggtaataacgctatcgccggagcgcagagttcgctggatctgatcaaggcgctgtcggtgcccaactcgcagttcaaggaaatcctgcgtcccatcggtcagctttccgggcagttgcagatcaactccaacgtctcggtcggcgcctactaccagctggaatggcgcaagagccgtctgcccggtgcgggtagttacttcagctttaccgacttcgtcgatgagggtggcgagtcgatgattctcgggccggggttctcggtgttccgcgccggtgatatcgagccttcggactccggccagggcggcgtacaggtgaagatcgccgccggtgactacgagttcggtatctatgccgcgcagttccacgacaagatgccgcagttttatgtctacccggatgttggcctttatgagcaggtgtatgccgaggacattcgcacggtgggcttcagcgtcagtacggtgattggcgaaaccaacgtcgccgccgagctgtcgttccgcgatgacatgcccctggtggccagtggcaatacggtgattgcgcccggcgcttacggcgtcattgatggtggcgacgatgccgcctttcccaaaggccgcaccatgcacctgaacctgtcggcgatcagcgtgctggccgccacgccgttctgggatggcgcctcgtttatcggcgagttcgccttcaaccgtcgcctgagcgtcaccgacaacagggatcagctcgatccgctggccacccgcgatgccggtgcgctgcagttcgtcttcacccccgaatactttcaggtggtgcccggcctcgacctgcaggtgccgatcggtgtggcctacggcctgttcggccgctcctcggtcaacggcgtgctgttcccctccgagaatggcggcaacgtcagcatcggtctcaaggccgactacctgaagacctggcaggccagtgtgggctacacccattacttcggttcggatggctcgatcatcaagtacgacaccgcagtacctgagctctcctacgacaacttccacggcgaccgcgacttcatctcgttctcggttcagcgcacgttctga

SEQ ID NO: 359745 - DNA, 1356 bp, Pseudomonas aeruginosa
atgcacaagaaaacagctctatgcgcagccctggctgcaatcctgcttggcgcatcaagtgtgcaggccgcggtgagtcccgaggaagccgccgcactgggcaagacgctcaacccgttgggcggtgaaatggccggcaatgccgatggcagcattccggcctggacgccaaccctgagcgtgccgacttcaggcgagaaggtgggcgacattccgcgcaaggtgtttgccgatgagaagccgctggcgcaaatcaccgcgcagaacctggggcagtatgccgagcgcctctccgagggtacccaggcgctgctgaagaagtaccccgacagcttccgtgtcgacgtctacccgacccatcgcactggcgtggcgccgcagtacgtgtacgacaactcggtgaaaaatgccacgagctgccagaccaccaaccaaggcctgtcgctgcagggctgctacggcggcattccgttcccgattcccaaggcgggcatcgaggtgatctggaaccacctgctacgggtcgagaacgaggcgaccaatatcaccagcttcaagaatatcgtgctcaccgccgatggcacgcgcaccctggcgaccatgaacgatcaggccaaccagtacccctactactacaaggacggtagcgcggacaaatggagcggcgagtacttcctgatgcgtttcaccactatcgcaccgccgttcaaggccggcgaatccctggtgttccgtgacagcatcgacgtcaagcaggcgcgtcagtcctggcagtatctggtcggtcagcgtcgtgtgcgccgcgcaccgaccgtggcctacgacaccccggacttcgtctcctcgggcgccaactacttcgacgaagtgatggggctgatggggcatatcgatcgcttcgactggaagctggtcggcaagcgcgagatgtatgtgccctataacgccaacgaagtggtcaccgcgtcgctggatgaggcctacggcaagcaccacctcaatccggaccaggtgcgctgggaactgcaccgcgtctgggaggttgaggcgacagtggtcggcggcaagcgccacgcggtgcccaagcgccgctactacttcgacgaggactcctggatgatcctgttgatggatggctacgacagcgaaggcaagctgtggcgcaccacccagatcaccccgttcgtgctgccgtccacgccgatgctgggcctcaagcccgcgcacatcttcaacctgcaggccaacaccatgagcacctcccagtcgctcaacgaggccacctaccgggtcgtcgagcgcaagccggagatgtactacacgggtgatgcggtagccgccgacggcgtgcgctga

SEQ ID NO: 359746 - DNA, 1116 bp, Pseudomonas aeruginosa
atgcaggcgctgattccgctccaccggcgcgcggccctggccgccgccttgttctccctggtctgcctggcaggcccctcccacgtagcagccgggcagaccgtgcccgacctgctcgatctccccgcgcgggaaagctcgcgggcccagcacagcctacaactggcggtgacccgtgccggcgatcgcctggtggcggtgggcgaacgcggcatcgtgctgctttccgacgacgccgggcgcagctggcgccaggcccaaagcgtgccggtgagcgtggcgctgaccgacgtgcacttcgtttcggccagtcacggctgggcggtgggccacagcggcgtggtgctgcacagcggtgatggtggcgagacctggacgcgccagctcgacggcagccaggcggccgtggtgattcgcgatgacgccaagcgccgcgccgaagtcggtgaggaaggcgccgccgcggcgctgcgcagcgccgaatatctggtcagcgacggcccggacaagccgttcctcggtgtgcgcttcgccgatgagcggcgcggctatgtggtcggcgcctatggcatcgccctgcataccgccgatggcggcaagagctggcagtcgctggtcggacggattcccaacccgcgcggcaagcatctgtaccagattcagatcgccggcgatgcgctgctgatcgccggcgaacagggtgcactgttccgctcggtggatgccggagcgagcttcagcgcggtcgaaacgccctatgccggcaccttcttcggtgcgctcgagctgggcggcgatgccctgctggccttcggcttgcgcggcaatgcctggcgcagtgccgacggcggcgccagctgggacaggatcgcgctgggccagccgaccaccgtgaatgccgggctgaacctcggcaacggcgcgttgctgctggctgacgaaggtggccggctgttgcgcagtgaagatggcggcctgagtttcgccgcgctgccggtcgcggcggccaccagcatcagcgggatggtgcaaacccatgatggcgcactggtgttgtccggtacgcgagggctcacccgcatcgagcccgctgcatttgccgggggagtccaatga

SEQ ID NO: 359747 - DNA, 2403 bp, Pseudomonas aeruginosa
atgagccacatgccgtccatacctaccgatctggtcatcggtgacatcaaggacttcgaccgccagtccggcaccctcgccgagcgcgtgctgttcaacaaccgcctggtcatcgtctgcctgtgcctgttcgtcaccctggtgctcggctatcaggcgctcggcctgtcgctcaacgcggcgttcgagaagatgattccaaccagccatccgtacatcgccaacttcctggagaaccgcaagcagctggccggcatgggcaacacgctgcgcatcgcggtggaggcgaaagacggcagcatcttcgatgacgagtacctggacaccgtgcgcaagctcagcgacgaagtgtttctgctgcctggcgtcgaccgcccgtacatgaaatcgctgtgggcgccggcggtgcgctggaccggcgtcaccgaggacggcctcgacggcggcccggtgattcccgacgattacgacggctcgccggcaagcctcgaacaggtgcgcatcaacgttgagcgttccggcgagatcggccagctggtggcggccaactaccagtccagcatcatcctggtgccgctgcaggagcgcatcgccgagaccggcgagcgcatcgattaccacgcgctgtcgcagcgcatcgaggaactgcgcaacaagtaccagtcggaccagatcgccatccacgtcaccggcttcgccaaggtggtcggcgacctgatcgacggcctgcgccaggtgctggtgttcttcgccgccgctatcgttatctgcaccgcggtgctctattggtacacccgttgcctgcgcagcaccctgctggtggtggcctgctcgctggtggcggtggtctggctgctcggcctgttgccgactctcggctacgagctggacccgtactcagtgctggtgccgtttctggtgttcgccatcggcatgagccacggcgcgcagaagatgaacggcatcatgcaggacgtcggccgaggcacccacaagctggtggcggcgcgctacaccttccgccgcctgttcctcgccggcctcaccgcgctgctggccgacgcggtgggtttcgccgtgctgatggtgatcgacatccaggtcatccaggatctggccatcaccgccagcatcggcgttgccgtgctgatcttcaccaacctggtgctgctgccgatcctgctgtcctacaccggcgtcagctcggtcgccgcccagcgcagcctcaaggccgagctgatggaggccaacgacgccgagcaccgcaagcacccgttctgggccttccttgatctgttcactcgcatgccctgggccggcttggccgtggccctcggtctggtgctgggcgtgctgggcctgacgatcagcttccagctgaagatcggcgataccgatccgggcgcgcccgagctgcgcgccgactcgcgctacaaccaggacaacgcctttatggtcgccaactacgcggcgagcagcgacgtctacatcgtcatggtcaagacgccgcaatacgcctgcgcccactacagcaccctgagcgcggtggatgccctggagcgtgaactgcagcaactgccgggggtggaaaccaccagttcgctggccgggctggccaaggtcgcacatgccgggatgaacgagggcagcatgaagtggtacgagatgccgcgctcgcaggacatgctcaacgccatcatcacccgcgccccgcgcgagatgttcaaccagaactgcgacctgctgacggtctatgcctacctcaaggaccacaaggccgacaccctgaccagcgtggtcaacaccgtcgaagcctttgccgcccgttacggcagcgacgagatccgcttcctcaacgccgccggcaacgccggcatcgaggcggccaccaacatcgtggtgaagaaggccaacgtgcagatgctgctgctggtctacgcggcggtgatcgtgctggccttcatcaccttccgctcctggcgcgcggtgatctgcgcggtagtgccgctgatgatcacctcggtgctgtgcgaggcgctgatggtctggctgaacatcggcgtcaaggtcgccaccctgccggtgatcgccctcggcgtgggtatcggcgtggactacgcgctgtacgtgatgaccgtgaccctggcccagctcaaggcgggcagttcgctgtccgaggcctactacaaagcgctaaccttcacaggaaaggtggtggtgctgaccggcattaccctgggcatcgccgtcgccacctgggtctggtcgccgattaagttccaggccgacatgggcatcctgctggccttcatgttcatctggaacatgctcggcgcgctgatcctgctgccggcgctggcgcactttctgtttcgcccgcaaccggtggttgcgcagggctga

SEQ ID NO: 359748 - DNA, 1488 bp, Pseudomonas aeruginosa
atgctcagtgaattgaagctgcatccgcgggatttgctcgcgctgctgttgctcgcggcggccggtatcttctgcggtctggatgccctcggtctgcgcggggtctggctggcctcaacggtcgtactggcgctgtggctactaggcggaatcagccagcgtgagcgagcggtcgtggccgccgtggagcaaacccgcgccctgctcgacgatctggcgcccgtggccggcggcgccattggctcaatcgagcgcctgcaggcggtgttgcacgacaaggtggtggcggtcaagcgcatgagcgccctggcctgtgacctgacggtggctacaggcacgctggtgtcagggtttaccgacgcggtggccactgcggatcgtcagtcggcggtggcccgcaactccatggctgaagtcgaggccatggccgagcgtgcacggattacctcaagtgaagccctggcgctggcagatgccagtatcagcgcgcgcgatcaggtcagcgccggtggtgagcaggtgcagcaggtcgccagtgatatggtggatctctccgtggtagtggcctcggtggccgaagagttcgacagcgtgcgacagcaagtggcacgtatcggtgagatcgttgcgatcatccggggcattgccgggcagaccaatctgctggcgctgaatgccgccattgaggctgcgcgcgccggcgagcaggggcgtggtttcagcgtggttgccgacgaggtgcgcaagctggccgaaagcaccggcagcgctaccctcagtgttggagaaattatttccctgatcgatcggggcattgatcgcctcgatcagcgcttggcacgcacccgccaaggtgcggcggatggcgtggcgcgcgcgacccaggcctcggccgtgttgagcggcattgccacgacgtcgcacagcacgttgcattcagtgcaggagattgccgcgcgggccagtagcgagacgcaaaatgccagcaaggtgctggaggactccagcgtggtggcccatcttgccggggagctggacagcaaggtcaacgattgcaatgctggtttgcgagccttgatgctggggctggtagacctgaagagtctggccagccagatcgatgtcagtcgcgatggggtggcatccatgctggaagttattgaggaaacccgcgcccacaacatcatggtgttaaacgcccgtgccacggcgcagatgctgccacatattcagcgcatccacgcccttgaccgtgagatcgatcggctgctggggcatgcccagagcgatgccgatgcgctggacgaggtgcgtaaagcccatttgtcccgtctgcgtcatgcgctggacgcatatcggaaaatccgtgacgatttgctcggtgcagcccagggcggtaggcttgagcaggtgcgcgagcgcgcggcaccgctggttcgcgaggcctaccatcatgtcaaggaagcatgtgtcgcgctgactgcttaa

SEQ ID NO: 359749 - DNA, 1698 bp, Pseudomonas aeruginosa
atggcagagcaacccttggtcgaacgcttcaatttgcgttcacgactgcgcttcaatatcgagagcgggcagatctggctcgacgagaaccgcatgctgctggtgcacgctaaggcctttggcgccttgcgccaagaactgtttgaatcccttgggcccaagcacgccaagagtctgctgtttcgcatgggttttgcggccggccagcaggatgccgacctcgcgcagaaacgctatggcgagggtgacaactacgacgtgttcaagatcggacctgagctgcacgcgttcgagggtttggtgcgctctaccattaccgaagccaagatcgactgggaagcaggctccttttatggttcggtaaactgcgacaactcctgggaagcggaatcccatctccaattgttcggtggcagcgatgagccggcctgctggaacatggcgggttacgcttcgggttataccacccgcttcttcaagcgcgtcatcgtctttcgtgaaacccagtgcatgtgttgtggtggctccagttgcgtcctggaggggcggccggtcgaggcctggggcaatgaggctttcctggagcattgcctgccgcccaaagatcaggaaacctctttcgaacagttccaggatgagttatggcagctgcgcgggcaccagcgtgaacagcgtccgccgggcaaactggtaggcagctcgccggcattcagtgccgccttcagtctgctcagtagggccgccaacagtccgataaccgtgttgctgttgggtgaaacaggagtgggcaaggaagtttttgcccagtggctgcacgaaaatagtgatcgtgccgacaagcctttcgtagcggtcaactgcgccgcgattcccaacgacctgatcgagtcggagctgttcggcgtgcagaagggtgcctataccggagcgcagacttcacgccccggcaggttcgagcgcgccgatggaggcacgttgtttctggatgagctgggcgagctgtcgtctgcggcccaggtcaagctgttgcgcgtcctgcaaaccggcgaagtcgagcgtctgggcgatgacaagttgcgtaaggtcaacgtgcgcctggtggcggcgactaacgtcaatttgcatcaggcgattgccgatggccgttttcgcgccgacctctactaccgcctggccacctatccattggaaattccgccgctgcgcaagcgcaagtcggatattccggtgctggcctcggtattgatcgaaaaatacgcaccgctgtaccacaagagcattcaaggcatcagcgatctggccatgcagggcctgatggcctatgactggccgggtaacgtccgcgaactggaaaacctggtggagcgtgcggtgttgctggtgccgccaggcgggcaaattgaagtggaacacctgtttcccgggatggctccggttaccgcccgcggtgccgtgatcgaccaccagggcaaggtgggtaatgccgatgaggcgaagaaagaccagctttacgagaccttgctggaagacggtttcgacctgcaggcccacgaggcgcgcctgttgcagctcgccgtggcgcgggcgcatggcaaccttacccatgccgcgcgcctgctcggcatcactcgccggcagttggcgtaccgcgtcaagcagaccctgggagaggaagaagcgccgccgcatgacgcgtga

SEQ ID NO: 359750 - DNA, 336 bp, Pseudomonas aeruginosa
atgatccgcatcgataccatctggctcgccaccgagcccatggatatgcgcgccggcaccgacacggcgttggcccgcgtggtcgaggtgttcggtgcggcgaagccgcactgtgcttatctgttcgccaaccgccgcgccaaccggatgaaggttctcgtgcacgatggcgtgggcatttggcttgccgcacgccggctcaatcaagggaagttccattggcctggcattcaccgcggcctggaagtcgaactcgatgctgaacagctgcatgccttggtgctcggcttgccatggcagcgagtcggcgcgggcggtgcaattacagtgctctga

SEQ ID NO: 359751 - DNA, 1500 bp, Pseudomonas aeruginosa
atgacgcccgaacaactgcgtacgctcgcggcgcagttgctgtcccaggtcgacaccatgggcagaaagatccaacgcgatgagacgatcatcgagcagctcactcacgagattgccatcctcaagcggcacaagttcgccaagcgcagcgagcaaataagcccggcgcaaggcagcttgctggatgacctgctcaacactgacctcgaagccatcgacgctgagttgcaagcacttcgtcccgccccggcgtcggacgaaacacgccagcaacccaagcgtgctccgctgccaccgcaactgccgcgcaccgtgatcagccacgagcccgatagcaccgagtgtgcctgcggctgccagcttcagcgcatcggtgaagacgtcagcgagaagctggattacaccccgggtgtgtttaccgtcgagcaacatgtacgtggcaagtgggcctgccgccagtgcgagacactgatccaggcacctgtgccagcccaggtcatcgacaagggcatccccaccgccggcctgctggcccatgtgatggtggccaagttcgccgaccacctgccgctgtaccggcaggagaaaatctttgcccgggctggtctggcgattccccgctcgacgctggcgcagtgggtgggccaaaccggcgtgcagctccagccactggtggatgcgttgcgcgaggcggtgctggcccagcaagtcatccacgccgatgaaacgccggtacagatgctggcaccgggagagaagaaaacccatcgggcctatgtctgggcctactgcactacgccgttctcggcactcaaggccgtggtctacgaattcagccccagccgtgctggcgagcatgcgcgtaacttcctgggtacctggagcggcaagctggtctgcgatgacttcgcgggctacaaggccagcttcgagcagggcatcagcgaaatcggctgcatggcccacgcccgtcgcaagttcttcgacctgcatgtggcgaacaaaagccagctggctgagcaggcgctgcacgctattggcggcttgtacgagatcgaacggcaggccaaggacatgagcgatgaagatcgctggcgattacgccaggaaaaggcagcgcctgtcgcagagaaactgcatgagtggatgctaactcagcgcgagcgtgtgcccgaaggatcggccacggccaaggcactggattacagcttgaaacgctgggtagcgctgacgcgctacctggacgacggtgctgtgcccatcgacaacaacgcagtcgagaaccagatccgcccgtgggctctaggtcgctccaattggctgtttgccgggtcgctacgcagcggcaaacgggcggcggcgatcatgagcctgatccagtcggcgcggatgaatgggcatgatccatacgcctatctcaaggacgtactgacgcggttgccaacgcaaaaggccagcgggattgagcagctgttgccgcatcagtggatgccgggctga

SEQ ID NO: 359752 - DNA, 825 bp, Pseudomonas aeruginosa
atggcgatgacaggtgtattgcgtcccgggcacgttcaattgcgtgtcatggacctcaaggcaggtttacaccactaccgagatattctcggcatgcaagaaaccgggcgtgacgcccaaggccgaatctatctcaaatgccgtgacgagttcgatcatcacagcgtggtccttcgcgaggccgactgtgcgggcatggacttcgtcgggttcaaggtattggatatcgctaccttggatgactttgaacgcaaactgcaggcatacggtgtcgggacatgtcgtatcgccgctggcgacctcctggaaaccggcgaacgtgtgcgcttcaccacacccagtggccacgaagtcgagttgtatgccgagaagactttcgtgggaaacggatgcggtgagatcaacccggccccgtgggatcccaccgtcacgcatggcatctcaccaatacgaatggaccatctgctgctgtatgggccgaacgtctcgcagactctcgaactgttcatcaaggtacttggcttcacgctggtcgaacgtgtgctggggccggatggtgagaccaatatcattggcttcctcagctgctcaatcaaatcccatgacatagcctttggccactatgacgagcctgggaggctgcaccatgtgtctttcctaatggacagctgggagcaggtgctgcgcgccggcgacatcatggccatgaacagagtgcccgtggatatcggcccaacccgccatggcgttactcgcggccgaaccatctatgcctgggacccttccggcaaccgcttcgagacctttaaggatggtctgaagtag

SEQ ID NO: 359753 - DNA, 669 bp, Pseudomonas aeruginosa
ttgacggggaagcttacgctcgccgtcgccaccctggccggcctggcgggctgcgccaccgagacctccaccgcgttgccggtacagcaggtcgagagcgtcaaccgaccctacagcggcgtgcgttcgccgattgcggtaggcaagttcgacaaccgctccagctacatgcgcgggatcttttccgatggcgtcgaccgcctcggcggccaggccaagaccattctcatcacccacctgcagcagaccaatcgcttcaacgtgctggaccgcgacaacatgagcgagatccagcaggaagctgcgatcaagggccaggcccagcgcctgaagggtgccgactacgtggtgaccggcgacgtcaccgagttcggccgcaaggaagtcggcgaccgccagctgtttggcatcctcggccgcggcaagtcgcagatcgcctacgccaaggtggcgctgaacatcgtcaacatctctacctcggaggtcgtctattcgacccagggcgctggcgagtacgccctgtccaaccgcgaggtgatcggcttcggcggcaccgccagctacgactcgaccctcaacggcaaggttctcgacctggccatgcgcgaggcggtgaacaagttggtcaacgcggtcgatagcggcgcctggaagccacagaaccaataa

SEQ ID NO: 359754 - DNA, 354 bp, Pseudomonas aeruginosa
atgaaaatcagcccttcgaacatccccgttttcaagctgtgtggcgaagatctggactggccgatgggcatcgaactctacggcatgggcgtactgccaccacccggtacctatgggcaggtattcgtcggcaactggggcctggacaacggctgggtggtgggtgtaggtggccatgcctacaagcagatcagcgacggcaagcaggacggccacctggtcggcgacagcaaccgcgggagcaccttctccatcggtccggccgtgcagtacgctagcaaggacggctggctcctcagtgccaaatggcaggacgaatccggcgtgcgcaatccccctgaaggccaaacctag

SEQ ID NO: 359755 - DNA, 1821 bp, Pseudomonas aeruginosa
atggagggagacttcctcaggcacattctcggccggcaaaagagcctgatcgtggatcgcgccaatcagttcgatcccaaggggctgccgacggccgagcaactggctgaaaccgttgccttcgcccctcaggacgggaccatctggctgtgcggtcagcgggtgatgctgctgcagggctccgcattcggcgccatccgccgtgaactggtcgaggcgctgggcttcgacaaggcgcgcgggctgctaactcgtatcggctggcaggccggcgcccgtgatgccgctcaggtcagcgagcagtggccagagggcgaccacgccagcctgtacagcgccggtccgcgcctgcatatgctcgaaggcatggtgaatgtcgaggtggtgcgcttcgagatcgactccagcatcggccatttctattcagaattcctctggcacaactcgctggaggatgatgagcacatcgccacctatggcctgggtaacgagccggcctgttggatggaaatcggctatgccagcggttatgcctcgtcgcttctcggccggctggtggtctttcgcgagctggagtgccgcgcaactggccaccacgcgtgccgcatcgtcggcaagccgattgagcagtgggacgacatcgatgccgagttggcccacctggatgccgaaggttttcttggtcgcagtacctatgcctcggctaacgagacagcggtggctgcgcttcaggaggcccccgagggcaaccagatggttggcgtatccgccgccttcgtcgcggccagccagctgctgcagcgtgtggcgtccacccaggcgactgtgttgctcaccggcgagtccggggttggcaaagaactgttcgcccgcaccctgcaccaggccagcacgcgccgggaggcgccgctggtggccctgaactgcgcgaccctgccggagaaccttgtcgaggcggagctgttcggcgtcgagcgcggtgcctttaccggggccgagcgttcgcgccccggacgcttcgagcgggccaatggcggcaccctgttcctcgacgagatcgcgatgctcagcctcggcgcccagagcaagatcctccgcgctctgcaggagggcgagatcgagcgcgtcggtggcgccacgccgatccgcgtggacgtacgcgtggtggcggcgaccaacctggacctgcgccgcgaggtcgagtccgggcgttttcgcgaagacctgttttatcggctgaatgtcttcccaatccacctgccaccgctgcgcgagcgccgggaggacatcccgctgttgatgagctacttcctgcgcaagttcagcgcccgccacgggcgccgcctggcagggttcagcacgcggctggtgaactccctgctgacttatcgcttctccggcaatatccgcgagctgcagaacctcatcgagcgaggcgtgattgccgcgggcgatggcgaggtgatggacgtcaaccatctggccgaaggtggtgcgtcgccggtttccatgccggttggcctgactgcggaggggcgcctgagctccccgtcggagatgtccgggtggcagggcagcgcttctgcggcgcgggatgtcgagtccggcatggctgctcccgcggctgccggtgagccggagctggctagcctgatggccttcgtcagtgggcgcgaacaggcactgagcacctctctcgaggatatcgaacagcgcctggtgcagcttgcgctggaacgctccggcggcaacatcacggcagccgcgcagatgctcggcatgagccgcgcccaggtcagctaccgcctcaaggggcgctga

SEQ ID NO: 359756 - DNA, 1476 bp, Pseudomonas aeruginosa
atgagcagcaaccgccttgcctatgaaaacctgcagctgcaaccgattgccggccaatggcgcgccgggagcgccggacgccagcttgacgtgttcgacccctatacccaggacaggttgctgagcctgaccctggccaatcgcgaagatctcgatgcggcctaccgcaaggcccgagagtgccagagcgaatgggctgccaggccgccggccgagcgcgcccgggtgatgctcgatgcggtgaaaatcttcgacgagcgtcgtgaagagatcatgggctggatcatccgcgagtccggcagcacacgcatcaaggcgcagatcgagtggggcgccgcgcgcgccatcatcctggagtcggccagcctgccgaaccgcgtgcacggccgcatcgtcgcctccaacatcccggacaaggaaagccgcgtgtatcgcgtaccgctgggggtgattggcgtgataagcccgtggaacttcccgctgcacctgaccgcccgttccctggcccccgccctggccctgggcaacaccgtcgtggtcaaaccggccagcgacaccccggtcaccggtggcctgctgctggcgcggatcttcgaagaagccgggctgccggcgggagcgctcagcgtggtggtcggcgccggtgcggaaatcggcgatgccttcgtcgagcaccccgttccggccttcatctccttcaccggctcgacccaagtcggccgcaacatcggccgcatcgccagcggcggcgagcacctcaagcacgtagccctcgagctgggcggcaacagtcccttcgtggtcctggccgatgccgatgtggaacaggcggtgaacgccgccgtggtcggcaagttcctgcaccaggggcagatctgcatggcgatcaaccgcatcatcatcgagcagccgctgctggaagagttcagtcgccgcttcgtcgaacgcgtcagggccctcccctacggcgacccgcgccagccggaaaccgtggtcggcccggtgatcaatgccaggcagctggccggcctgcagcagaagatcgccaccgcctgtgccgagggcgccaggctgctgctcggcggtgaggtgcagggcaacgtgatgccgccacatgtgttcggcgacgtcaccgcggacatggagatagcccgcgaagagatcttcggcccgctagtcggcatccagtccgcgcgcaatgccgagcatgcgctcgagctggccaacagcagcgaatacggcctgtccagcgccgtgttcacctccagcctggagcgcggcgcgcagttcgcccagcgcatccatgccggcatgacccatgtcaacgacatcccggtcaacgacgagcccaacgcaccgttcggcggcgagaagaactccgggctcggccgcttcaacggtgactgggcgatcgaggagttcaccactgaccactggatcaccctgcagcacgcgccacgggcatacccgttctga

SEQ ID NO: 359757 - DNA, 336 bp, Pseudomonas aeruginosa
atgtccacactcccccacagcccagttgtgaaacgggcccttgcggcctgccttgccctgccttccgtcctgcttgccggtcatgccagtgccgatggcgacggggtctggaaaagcggcgagaacgtctacgcaaaagtctgcggtcactgccacgaacacagcgtgggaccggtgatcaagggtcgcgagctgccaccggagtacatcagcgcagtggtgcgcaacggtttccgcgccatgcccgcgtttcccgccagcttcatcgatgacaacgccctgaagcaggtcggcgagtacatcgccaagtcgccggctccggctgccaagccttga

SEQ ID NO: 359758 - DNA, 690 bp, Pseudomonas aeruginosa
atgaacgtcgaacgtcgctctctgctcaagagcatggccctgggcggactggccagtgccgccatgggcagctctggcctggccatggccaacgcttttatcgctccttcgtcacggcttcccgccaccctggtcctggtcaacggcgccgtggccggttccgcattcctccaggccataaacgccagccccgcgggccggcttgccgaggtgcagcgcaccgatctcggcctggacttcttcttggccctggagcagcgcctgaagaatggcaagccgccacgcatcatcggcctgctggatgatgccagcgccgcgctggtcatcgacctgtcccgcagcagcggcgccagggtgcagtggctcggccagcacactgcgagcgctgccggttcgcaacaccgcctgctgagcagcgaggccgcccatggctgcgcgttgcagctaggtcttcaactgaacgcttccggtgccggtttcaacctcacggagcaacgtctactcggccatcaaccgcccctgcaactggccgcaggcgctcgcaatggcgccgtttccgagcagtgggcggccacccttgggcacaccctggccatgctcggctccgatgccggcacacagccgccactggccgtcagccgccgctcgccgctgaccggcactttcgtttcgttctcgatcgaggcttga

SEQ ID NO: 359759 - DNA, 1569 bp, Pseudomonas aeruginosa
atgaccgagcaaaacaacagttccctgctcccgcgcggcgtggatgccgccaacttccagcaagccatcggcaagttccgcaaactgctgggcggggaaaacgtcctgaccagggacgaccaactgattccctacaacaagatcatgatggcggtggacaacgccgaacacgcgccatccgccgtcgttaccgccaccagcgtcgaacaggtgcaaggcgtggtgaagatctgcaacgagcacaggattcccgtgtggaccatctccaccggacgcaacttcggctacggctcggcggcgcccggccagcgcggccaggtaatcctcgacctgaaaaagatgaacaagatcatccacgtcgacccggatctgtgcaccgccttggtcgagccgggtgtgacctaccagcagttgtacgactatctgcaggagaagaacctgccactgatgctgtcgttctcggcgccatcggctatcgccgggccgctgggcaacaccatggaccgtggcgtgggctacaccccctatggcgagcacttcctgatgcagtgcggtatggaagtggtactggccaacggtgatgtgtaccgcaccggcatgggcggcgtgaaaggcgacaacgcctggcaggtgttcaagtggggctacggcccgacgctggatggcatgttcacccaagccaactacggcatctgtaccaagatgggtttctggctgatgccgaagccgcccgtgttcaagccgttcgagatcaagttcgagaacgagtccgacatcagcgagatcgtcgaattcatccgtccgctgcgcatcgcccaggtcatcccgaactccgtggtgatcgctggcgtgctgtgggaggccgcgacctgcaacacccgtcgcgcggactacaccaccgagccgggcgcgactcccgaagccatcctcaagcagatccagaaggacaagaatctcggcgcctggaatgtctacgccgcgctgtacggcaccgaggagcaggtcgacgtgaactggaagatcgtcaccggcgccttcgagcaactgggcaagggcaggatcgtcacccaggaagaagctggcgatacccagccattccggtatcgcgctcagctgatgtccggcgtgccaaacctacaggagttcggcctgtacaactggcgtgggggcggcggttccatgtggttcgccccggtgagccaggcccgcggcagcgagtgcgaaaagcagcaggcactggccaagaaggtcataaacaagcacgggctggactacgtcggtgagttcatcgtcggctggcgcgacatgcaccacgtaatcgacgtgctgtacgaccgcagcaaccccgaggaaaccaagcgcgccaatgcatgcttcgccgaactgctggacgagttcgagaagcacggttacgccgtctaccgcgtcaacaccgcgttccaggagcgcgtggcgcagagctacggcaccgtcaagcgcaaggtggaacacgccattaagcgtgccttggatccgaacaacatcctctccccaggcaagtccggcatcgacctcgccaacaagttctga

SEQ ID NO: 359760 - DNA, 657 bp, Pseudomonas aeruginosa
atgctgcgtcatcccgataacaccaaccttcatattcacactggcgacctgtttgaaggtcttccagtaatggtcgacaaggggccgtttttaactgagtatttggctgcattgaaacgcaccgttgaaaacgcgcttagccagtatccgagactgttagcctttagaatcgatttacgtctgccaatcggtatcgacttgcctgattacgcatacaccaaccaagtcatcagcagatttatcgaatcgttcaaggccaagatcgagcacaaccgactgaaggctcgtgagcagcattcctatgctcacggatgtaaggttcgctacgtgtgggccagggaggaggggacaaggcaacgtccgcattatcacgttctgattctgctcaatcgtgatgccttctacacggttggtaagctgcagtctgctaatgccaacatgatcagtcgcttgcaggaggcgtgggccagtgccttggggctgcggctcgatcaggtggcaggtttggtggagatcccggacaacccgacgtacagagtggatcgcggggacactggagcgttgtccggcctgttccaccgtgccagttacctgtgcaaggtcgcttccaaagcctatggaaatggccagcatggctttggatgcagtcgggggtaa

SEQ ID NO: 359761 - DNA, 297 bp, Pseudomonas aeruginosa
atgaacagacagtgtctgatctgcgagtctcgggcggtgctgacgcgggatgcagccaaagggctgaccctgctggccgggttgctcaatggtgcaataaagggagctcaatgcacacagaaggggagtggccatgccgatcttctgagcggactggcagcggttgcacctgcttatccggaggcccaaaaagcggcatcggatgtcgtgcggtttcactacgccggcttcgactgcctgtgcctgcgctgcggcgctttgttcgatgagacagcagaaaagtcaggagggccttag

SEQ ID NO: 359762 - DNA, 1059 bp, Pseudomonas aeruginosa
atgaatcgtctggacaagatcaagggctgcctactgggtggggcagtcggagatgctttgggagctccggtagagtttctcgactgggcgaccattgagcggaagtttggctcgaaaggcatccaggatttcagtgaggcctatggcatcacaggagcgattaccgacgacacgcagatgatgttgttcacggccgagggactgctgcgcgcccatgtccgacaggcatcgcgcggtctttgccatccgccgtcagtgatccatcacgcgctgttgcgctggtatctcactcagggcggcgagccggacactgaggtggcgaaagatgggtggctgatccaggaacaggcgctgtggtctcgtcgagatcccggtataacgtgtctatcggcgctgcgtgaatgcacgttctttggtgagctagcgcgtaacgacagcaagggatgcggtggcgtcatgagggtagcgccccatgcattcttacctgctcccttcgagttggcggccgagtctgcccatctcacccacgggcatccgaccgagtatctggcagcagggctatttgccgacattcttgctcgcctcatggagccttcctgttcgttgaaggaagcgatcctaggtagccttcgagaaaatggaaatcgcgaaggtatgaaagaggcacgcgagttcgtcgaactggtgctggcgctttatcagaagggaatccggccgactcccaaagtcatttcattgctgggtggcggatggacagccgaggaggcgctggctatcggattgtggtgtgcactgatggccgacaacttcgaacaaggcgtcacctgggccgtcaatcatggcggcgacagcgatagtacgggaatgatcgccgggcatttgctcggcatccaactcggctataccagcatacccgagcattggctcgcatcgctggagttgcgcaaagtgatcgaacaggtagcagtcgatatcgatgaggtgccacgcgtgtacgctggcgagtgcggcgaggatcgcatcgacgagcagatctgccagagatatccgggatggtga

SEQ ID NO: 359763 - DNA, 1773 bp, Pseudomonas aeruginosa
atggctgactacaaagcacccctgcgcgacatgcgcttcgttcttaatgaagtcttcgaggtttccaagctctgggctcaactgcccgggctggccgaggtggtggacgaagagacggctgctgccatcctggaagaggccggcaaagtcaccgccggcatcatcgccccgctcaatcgcagcggcgacgaagaaggctgctcctggaccgatggcgcggtgaagaccccggccggcttcccccaggcctaccagacctatgctgaaggcggctgggtcggcgtcggtggtgacccgcagttcggcggcatgggcatgcccaaggcgatctcggcccaggtcgaggaaatggtcaactcggccaacctgtcgttcggcctgtacccgatgctgaccgccggtgcctgcctgtcgatcaacgcccacgccagcgaagagctgaaagagcagtacctgccgaacatgtacgccggcacctgggccggttccatgtgcctgaccgagccgcacgccggcaccgacctggggatcatacgcaccaaggccgaaccccaggccgacggcagctacaagatcagcggcaccaagatcttcatcaccggcggcgagcacgacctgaccgagaacatcatccacctggtgctggccaagctgcccgatgccccggcgggcccgaagggcatctcgctgttcctggtgcccaaggtgatggtcaacgccgacggttcgctgggcgcgaacaactcgctgtcctgcggctcgatcgagcacaagatgggcatcaaggcttccgccacctgcgtgatgaacttcgacggcgccaccggctggatcgtcgacgcgccgaacaagggcctggccgccatgttcaccatgatgaactacgagcgtctgggcgtcggcatccagggcctgtccctgggcgagcgctcctaccagaacgccgtcgaatacgcccgcgaccgtatccagagccgtgcgccgaccggcccggtagccaaggacaaggccgccgacccgatcatcgtgcacccggacgtgcgccgcatgctgctgaccatgaaggcgctgaacgagggcggtcgtgtcttctccagctacgtggccatacagctggacaccgccaagtacagcgaagacgccgccacccgcaagcgtgcggaagaactggtcgccctgctgaccccggtggccaaggccttcctcaccgacatgggcctggaaaccaccatccatggccagcagatcttcggcggccacggcttcgtccgcgagtggggccaggagcagctgatccgcgactgccgcatcacccagatctacgaaggcaccaacggcatccaggccctcgatctgctcgggcgcaaggtcgttgccaacggtggcggcgcgctgcgcctgtttgccgccgaggtgcgcgactttgcccaccgccacaaatcgccctacggcgcccagttgatcgaggcgctggaacgcttggaggcggtcagcggctggctgctggagcaggccaaggccgatcccaacgaggtcggcgccgcctcggtggaatacctgcacctgttcggctatgtcgcctacgcctatatgtgggcgcgcatggtcgccgtggcgcagagccagcagagcgatgacgaaaccttctacggcgccaagctggccaccgccgaattcttcttcgcccgcctgctgccgcgcaccctgaccctggaggcgagcatccgcagcggcagccagccgctgtacggcctggccgccgaacagttctaa

SEQ ID NO: 359764 - DNA, 684 bp, Pseudomonas aeruginosa
atgaataccaagcgatcgttcgtctcaccgtgccctgacgcgtcaggtgaggcgccgctctcgcgtctcgagcagatccgcggcaaggcgctcgaactgttcgccgagcgcggttttgctgaggtgggtatgcgtgagctggccctgcatctggggatcggcgcaggttcggtataccactatttcgcgagcaaggagcagctgctgttcgagctaatcgaggacctctatgaggatctgctcgacgcggccctgctcagcgacacgggcgctaccgacagccgcctgccgacgctgatacgggcacatatcgccctgcacgagcgtcgtggtctgcatttcctgatggccgagcgggagtatcgctgtctctctccgcagcaccagagccagatcgaacagatgcacaggcgctatgaggaaaagctcctgacgcgggtgctggaggccggcgcgacaggtccgctgccagtgctcaaggccaccgtgcaagctgtcgtcgccctgctcaacaacctgccgacctggctggaccagtctggtttgtccccgctgcagagacaggaggtgatcggcgggattgtcctaggttctctgtccggcgttttcaagcagccgacagcggctgcagatagcgaaaccgtagttacgttgcgcgtcctagacgcaagtcagcgaggctga

SEQ ID NO: 359765 - DNA, 852 bp, Pseudomonas aeruginosa
atgaacgacgaatctatcggtgtcatcggcggcggcatcatgggcagcggtgttgcccaggtgtgtgcccttgcaggcctgtccgtcgcgctggtggatatatccgaagctgctctggccaaggcagtggcgaccattgatcgcgaccttggacggcaggtggacaagggcacgctgacggaacaacagcgcgctgctgcgcttggtcgcatcagcaccagtaccgactatgccagcttgagcgatgccggcctggcgatcgaagcggctaccgagagcctggacctgaagctgcatatcctcaagcagatcagcgagcaggtcagcgccgaggccatcatcgccagcaatacctcgtcgttgtcgatcagtcagttggccgcccgggtacagcgtcccgagcgctttatcggcctgcatttcttcaatcccgtagcggtcatgacgctggtggaagtgattcgcgggctggcaacggccgagctgttccatgcccgcaccctggcgttcgccgagcgcattggcaagaccgcgatcagcgccgctaaccgcccggggttcgtggtcaaccggattctggtaccgatgctcaacgaagccatcttcgccctgcaggaaggcctggccactgccgaggagatcgacaccggcatgcagctgggttgcggccagcccatggggccgctggcgctggctgacctgatcggtctggataccctgctggcgattctggagtccttccagcagggtttcggcgatcccaaatatcgcccggcacccttgctcaaggagctggtggcagccggtcgcctcgggcgcaagagcgctcatggtttttatcgctatagctga

SEQ ID NO: 359766 - DNA, 1023 bp, Pseudomonas aeruginosa
atgcaagagaaggactcggtggccgtgtatttcgtccgggccactctctacgggctgcgcgacaatccgcagcgcagtgcgcagttgctggcccaggcgggcattgccgagccgctgctggaagatcccaaggcccgggtcgcggcctcgcagctggccaagttgtggctggccgtcgcccaggaactggacgacgagtttctcggccatgattcgcacggcatgccccaaggcagctttgccctgatctgtcgcggcctgatccaggcggacaacctcggccaggcgctgcgccagtgcctgggcggcctcggcctgttcttgcgggatatccgcggcagcctgtcggtacgtggagaccgcgccgtgatcagcctgcacaatcgccagccagacccgctggtgcgcagcgccgccgaggaaatctacctgaccgtggtgcttggcctgctgtgctggctggcgggtcggcgcattcccatcgaccgctcgcaattctcccatccgcgaccggagcatggcgatgaccatctgttttgggggccgaacctgaccttcgaggccggccatagcgaaatcgagttcgccgccagctatctcgacctgccggtggtacaggatctggagacactgaaaaccttcctgcgcacctcaccgaaatggctgatcgtgcgcttcagcaaccgccagggactgagcgctgaagtctacaaacagctgcgcaattgtcgctacgagcactggcctaccctggctgacatggccgaagaacgcgcactgagcatcgccagcttccgccgtcagctgcaacgagagggtttctccttccaggagctgaaagacgaggtgcgccgcgccatcgccttcgagtgcttgcgcaacaccgatctgagtatcaccgcgatcgccgagaaggccggtttcagcgaggccagcgcgtttcaccgagcgttcaaacaatggaccggaaagagccctgggcacttcaggatgaacaagcaccttaaaaatcaacctgattag

SEQ ID NO: 359767 - DNA, 1002 bp, Pseudomonas aeruginosa
atgccgactgttgcgattctggggtttgacgactcctatgcctccgtcattggcggttttgctgacatgcttcaggtcgccaatgcgcatatgtccaagcaagggatgccagtggccgggctatttgaatggcatttcctttcaccgaacgggctgtcggtgcgtgcgagcaacgggcttgagcttgccatgcgccctttgccgaaaaaccgctattacgatctggtttttatacccagcctgtattaccgaggctggcagagtttccagcgcttcctggacagtcaggtgactgtgcgtgactggctgatcaggcaatggagacatggcgcatggctttgtgcgaattgcacgggcacctttctgcttgccgatacaggcttgctcgataacaagattgcaacgaccacttggtggttggaggggcattttcgcgcgcgatttccgctggtcgatctacaaatgcgtccgctggtcactgagtctgagcgcttggtgtgtggtggcgcacatgccacatttttgttgcaagccgttcatatactcggcgtgtttgcgggaaaggctatcgccatgcagtgcgctcgcagcatgctggttgatttgacccaaacgacgcagacgcccctgcaaccgcttatagccgacaagacacacaatgaccccttggttcaacgcgcacagaagtggctgcaggatcacttggcggaacaggtacgcatgaccgatctggctcagaagctggcagtcagcgagcgcaccttgatatgccgcttcaacatggtgcttgagcagtcaccgctaacctatttacagagtttacgcatcgacacggcgcgggcgttactggaggctggagacttgagtaccgagcaaattgctcagtatgttgggtacagcgacgtcagctcgttttcgcgcctgttccgtgaacgagttggatttacgcccggtgcctatcgagcccggtttcagttgcctgagtcgaatgagctgaaatga

SEQ ID NO: 359768 - DNA, 714 bp, Pseudomonas aeruginosa
atgcacattcaaattgtccaggcacacaacgagccgcagtcgttcaatgcagccatgaaaaatctggcggtcgatgaactatgtagccaagggcactcggtcgaagtttctgacctgtacgccatgaggtggaatccggtcgccagtgccgctgatttttgcagccgcgccaatcccgagtacctgacctatgccatggaacagcgccacaaccactctcatcactcgctcgcccctgatattcagggcgagctggaaaagttgctgaaagcggatttggtgatcttaaacttcccgatttattggttctcgatgtcagcgatcatgaaaggctggatagatcgagtactggtttcgggtgtctgctacggcggcaagcgctttaacgaccaaggcggcttgcttggcaagaaggccatgcttgccatcaccctaggcggtcaaccccacatgttcagcgaagatggagtgcatggagatctcaatgacatgctccgtcccatcctgcgcggaacgctggcctatagcgggatggcagtgctgcccccctttgtggctcatcacgtaccctatatctcccaagaggcacgtaccacactgctggagcagtatcgacagcacttgcgctcattggaaacactacaagcccttacgttcgtctcgctcaagcagttcgacgaaaagttgcatccggtccctgctccgaatgcgtag

SEQ ID NO: 359769 - DNA, 339 bp, Pseudomonas aeruginosa
atgaagcaccaaatcgtaattgaagacaccggtgagcagtatgcctgcgatgagcgagagtcggttctggatggcatggcgcgcctagggcggcgtggcattccggtcggttgccggggcggtggctgcggcgtgtgcaaggtccagattgtcaaaggcacctttgcagccagtgtcatgagccgggcccatgtcagcgcggaggaactcgccgctggcgtggtgttggcctgccgcgtcatgccgcacagtgacttgtgcgtgcaagtgatcggcaagatgaaaaaatcaatttgtaagggccgcggtgatttggactgcagcgcaggtcagctgtag

SEQ ID NO: 359770 - DNA, 471 bp, Pseudomonas aeruginosa
atgaaaactgaagagctgtataccaacgaagtagcaaccttgagctgggtcggcgcgtcccttgcggttgagtcagcgctaagtcgtgccgagcggctggggatcaaggtcaatgctgctgtcgttgatcgcaatggcaatacccttgcttatttgcgcatgagcggcgcatttctacattccgaggggctggcagtcgataaggcctataccgccgccagctttggctttgccactcgggagtggatggacaaaatcggtgacgatgcgcgactgcgcatcggcattactagccgtccgcgcctggtggtcctcggtggtggcgtgccgattattcttgatggcgtctgcatgggtggcgtcggcgtttcgggtggcacggaggaacaagacgagatctgcgccaatgccgccttggaagccctggggcttttaccgatggccacttctgccagtgagcgtgcgcgatga

SEQ ID NO: 359771 - DNA, 429 bp, Pseudomonas aeruginosa
atgcctgtcgtgaactttcatcttgtggacggttattgctctgccgagcaaaaggtccgcttgctcaaggacgcttcacaactctacagccaggtgctgcgctcacccatggagcgggtgcgggcatttattactctgcatgcggccgacgagttcgctgtggtcggtgaggtcaccggcgtcaacggcctgcatgcgccgttcttcgagttcatcgtgctggaagggcgaccgctggacgaacgtcaggcgttgatgagcggctttaccgaattgctggtcgagatcctcgcggttgagcgcagcgtggtgcgcggcagatgcatccgcgtcgaaccgcaggactggtccattggcgggcttggtgccgatgtcttacgagagcaagagatccgtgatcgtgctgccgggcttggtgttgccggatga

SEQ ID NO: 359772 - DNA, 756 bp, Pseudomonas aeruginosa
atgagcacgcataaagacttggccgtggtggtcggtgctactggctcgtttggtcggcatatcgttgcccggctgtgcaccagcaacctcgacgtcgtggcggtggcgcgtagcgcagaggcgctgagcgaactggctggcctgaattccggacttattccttgtgtggccgacatcgccagtgatgaagcggtggcgagaatacgcgcggtgctggaccggccggtacggatagttgtccatggtcccggcgtggcggtagtcggcggcattctcgatgcgcccactgcagcgctggtggatgcagtgaatatcaaggtcggcggcctgttgcgcctgacccgggcggtggatgagcgtctggtgaaaggctcgcggttggtcgcgattggcggtcactatggctttgagcccacggcctacgctgcatctgcagggattgccaatgcggcgctggtgaatgccgtgcgtcagctgagcctggcctatggcgcgcgcggcgttaccgcacacttgattgcgccggggccggcggacaccgagcgcttgcaccgggtggcggccgaccgtggccggcagcgcggcatcagtgcagaggcggtgttgcaggagatgtgcgcggagtcctcaatcggtgcctttaccacaccccaacaagtggcctgggccgtgagcctgctgctggcacccgaggccgatgcgatgaccggctccaccctgatgctggattccggtcggcgtcgcggcctgccgtga

SEQ ID NO: 359773 - DNA, 1056 bp, Pseudomonas aeruginosa
atgagccagtccaccagttcgagcctcaagggccgcaaagtaatcctgcatgacatgtgcctgcgcgatggcatgcacgccaagcgtgagcagatcagtgtcgagcagatggtcaaggtcgccaccgcgctggatgatgccggtgttccttacatccaagtcacccatggtggcggcctgggtggcaactccttgcagcacggttttgccccgcacaccaacgaggaatacatcagcgctgtagcaccgaagatgaagcaggccaagatttccgtgctgctgattccgggtctcggcaccatgcaggagctgcattcggcgtttgactgcggtgcgcgcagcgtacacgtagccacccactgtaccgaggcggatacctcgccgcagcatattgcctacgcccgcaagctgggtatggatacctccggcttcctgatgatggcgcacctcaacgatgccgccggcatcgcccagcagggcaagctgatggagtcctacggtgcgcagacggtgtatgtgaccgactcggccggttatatgctgcctgaggatgtgaaggcgcgcatcggtgccttgcgcgaggtgttgaacccggagaccgagatcggcttccacggtcaccataacctgggcatgggggttgccaactcgattgctgcgattgaggcgggcgcaagccgcatcgatggatcggtcgcaggcctgggcgccggtgctggcaatacaccgctggaagtcttcgccgccgtgtgtgagcgcatgggcatcgaaaccggcacggacctgttcaagctgatggacgtggccgaagacatcatcgtgccgatgatggagcacatcgtgcgggtcgaccgtgagtcgctgaccctagggtatgccggcgtctactccaccttcctgctgcacgctaaacgcgccagcctgcagttaggtgttcccgcgcgtgacatcctggttgagctgggtcgcaagaaaatgatcggtggtcaggaagacatgattcaggacaccgctttgaccatggccagggaacgcggaattctgctgcctacgtga

SEQ ID NO: 359774 - DNA, 915 bp, Pseudomonas aeruginosa
atgaaaaagatcagatgcgcactcatcggctcaggcaacatcggcactgacctgatctacaaaatcatgcgtagtccggtgcttgagccagtctggatggtcggcatcgacccggaatccgagggcctgctgcgtgcccgcgaaatgggcttgaagaccacccatgaaggcgtggatggcttgctgccacacgtgctggaagatggcattcagatcgctttcgatgccaccagcgcctacgtgcatgccgaaaacagccgcaagctcaacgctctcggcgtattgatgatcgacctgaccccggcggcgatcggcccgctgtgcgtgccaccggtaaacctgcgtgagcacgcagataagctggagatgaacgtcaacatgatctcttgcgccggccaggccaccattcctgtggtcaatgccgtctcgcgcattcaaagcgtcgagtacgccgagattgtcgccagtctctcgtccaagtcgattggtcctggcacccgtgccaatctggatgagttcacctacaccacctcgcgcgccatcgagaaagtcggcggtgcgagcaagggcaaggcgctggccatcatcaacccggccgagccgccgatgatgatgcgcaacaccatctactgtctgacggatgacaagccggatcgagtccgcatcaccgagtcgattctgcagatgatcaccgaggtacagaagtacgtgccgggctatcgcctggtcaacgggcctattttcgacggcaagaaagtctcggtgttcatggaagttgcaggtctgggtgactacctgccgacctatgcgggcaacctggacatcatgaccgcggccgccacccgcaccgcggaaatgtttgccgacgaaatcctcgccggcaatattcagcttaaagctccggaggtcgcgtaa

SEQ ID NO: 359775 - DNA, 213 bp, Pseudomonas aeruginosa
atgccaatcattgaaatgcacatggtcgaaggccgtacctccgagcagaagagccgggtggcgttagcggtcaccgaggcggtttgtaaaagtctggaatgccccgcagaagcagtgcgcatcctcatcaccgagcacggtggcgatgagttttaccatgctggcatgaacatggcacagcgcgccgcgaagaaggaggggcagctccaatga

SEQ ID NO: 359776 - DNA, 804 bp, Pseudomonas aeruginosa
atgagcagcaatctgacactttcgcgtgaggacatcgttcgtctgtgtgagcgcgttgaaggcgcacagacccgtgcctacgccatccccaagctaaccaatgaataccccgagatgaccatagccgatggttactcagtgcaaaacgaactgcgccggcgtttcatcgctcaggggcataaacaggttggctggaaggcagggctgacctcaaaggccaagatgcagcagatgggggtcagtgtcccttcgatcggctttctcaccgatcgcatggctcgcccggaaaactcggccatctccacctccgacctagtgcacccgcgggttgagtgcgaagtggctttcgtcatgaagagtgatctgcaggggccgggctgcaccgccgcagacgttctggcggcgaccgactacgtactgccggcggtggaaatcatcgactcgcggttttccggcttcaagttcgacctggccagcgtgatcgccgacaacggctcttccgcgcgcttcgtcggcggtggccgcgcccgttatgtcgaggatctggacctgcggaccctgggtgtggtgatggaaaaaaatggcgagatcgtggccatgggcgcctcggcggccgtgatgggccatccggccgaagccatcgccatgctggtgaatatcctggccgagatggacgagacattgccggccggtagcttcgtgatgagcggtggtatcaccgaggccattgcggtgaagccaggcgacagcattgtggcgcgcttccaggagctgggcagcgtatcgatgcgcttcgtcgaataa

SEQ ID NO: 359777 - DNA, 798 bp, Pseudomonas aeruginosa
atggacaagcaaaagatcgagcagtacggcgaagagctttatcaggcattcatcacccgtcgggcaattgcaccactgctcagtcgtgagccggagatcagcatcgaggatgcttaccggattcaggagcgttttgtcgcacgtcgtctggctgctggagaaactatcatcggcaaaaagatcggtgccaccagcaaaccggtgcaggattttcttggtgtctatcagccggacttcggcatgctcacctcggccatgctgttcgctgaaggcgacaccatcgacctcagccagatgatccagcccaaagccgaagccgagctggccttcgttctcaagcacgacctcaagggccccggcatcaccgccatggacgtgatccgcgcaaccgattacgtggtgccgtgttttgaaatcgtcgactcacgcatcaccgactggcagataaagattcaggacaccgtggcggacaacgcttcctgcggcgtttacgtgttgggtaaaaccaagggcgatccgcgcaagctcgatatcaccctggcgggcatggtgttggagaagaacggtgagcagttctccaccggtgtgggtgccgccgtgcagggttcccctgcgaatgccgtggcctggctggccaataccctgggtgccctgggtattccgttcaaggctggagaagtaatcctttcgggttcgcagtcttcgctggttccggtgcaagacggcgatgagttggtctgtaccgtcggcggtctcggtagctgtcgcgttaagttttccggggggagcgcagcatga

SEQ ID NO: 359778 - DNA, 1461 bp, Pseudomonas aeruginosa
atgcgccagattgaaaacttcatcgccggtgagtttgtcgccgctgccagtggcaagcggttcgacaaacgttccccgctggataaccgcatcatctgctcggtcagtgaagccggtcgtggcgaagtcgatgctgccgtccgcgccgcccgcagtgccctgcacggcgagtggggcggcctgagcaccgatcggcgcatcgagttgctgtacggcgtggccaacgaaatcactcgccgtttcgacgacttcgtcgaggccgagatgtccgacaccggccagcccgagcatgtgatgaaacatgtgttcatcccgcgtggcgcggccaacttcaaggtgtttgccgacgtgatcaagaacgtcgccagcgagtccttccagatggacacccccgatggtcgcggcgcgctgaactactcgattcgtcgccccaagggcgtgatcggcgtggtctgcccgtggaatgcgccgttcatgctgatgacctggaaggtcggcccggccctggcctgcggcaataccgtggtggtcaagccgtccgaagagtcgccgcaaaccgcggccttgctgggcgaggtgatgaacgcggtgggcattcccaagggcgtgtacaacgtggtgcacggtttcggcccggattcggcgggcgaattcgtcacccgccatccgcaggtcgatgccatcaccttcaccggtgaaacccgcaccggcaccgcgatcatgaaagcggcgtccgaaggcatgcgtgacgtgtcattcgaattgggcggcaagaacgccggcatcgtgttcgccgatgctgacttcgaggcggcagtggaaagcttctcgcgctcggtgttcctcaataccggccaggtgtgcctgggtaccgagcgggtgtatgtcgagcggccgattttcgagcgtttcgtccaggccctgaaggtcaaggccgaggcggtcaagtacggccgccccgatgatcatcaggccaactacggcccgctgatcagccaggagcacaagcagaaggtgctgtcctactaccgcaaggcggtggaagagggcgccaccctggtcaccggcggcggtgtgccgcagatgccgggcgagctggccgaaggcgcctgggtccagccgaccatctggaccggcctgccggaaacggctgccgtggtgcaggaggaaatcttcggcccgtgctgccacatctcgccgttcgatagcgaagacgaagtggtgcaaaaggccaatgccaccgattacggcctgtcgaccaccatctggaccagcaacctggcgcgtgcccaccgcatggctgggcgtatcgatgtggggatcacctggatcaacagttggttcctgcgtgacctgcgcaccccatttggcggctccaagcaatcgggcatcggtcgtgaaggcggcgtgcattcgctggagttctacaccgaaacccgcaacgtctgcgtaaaactctga

SEQ ID NO: 359779 - DNA, 1059 bp, Pseudomonas aeruginosa
atgagttacgaactggcgattgaaccgctgggtctgaccatcgagatcgaagaaggccagaccattctcgacgcagccctgagggctggcatctacctgccccatgcctgctgtcacggcctgtgcgcgacctgcaagatccaagtggtggatggcgaaatcgaacacggcgaggcctccagctttgccctcatggattttgaacgggaagaaaaaaagtgcctggcctgctgcgccaccgccgagagcgatctggtgatcgaggcggaaatcgacgaagacccggatgccgaaaacctgccagtgcgcgatttcgccggcacggtcagccgcatcgagaccctgacgccaacgatcaagggcgtctggatcaagctcgacggcgcgggcatgcacttccaggccggccagtacatcaacctgcagttgcccgacggcattggcagtcgggctttctcggtggccagcgcgccggcggatggcagcgaaatcgagctgaatatccgtatcgtgccgggcggtcgcggtaccgcgtatgtccacgagcagctgcgggtcggcgagcgggtgagcatcactgggccttacgggcgcttcttcgtgaagaagtcggcgcgcacgccggtgatcttcatggccggtggctcggggctgtccagcccgcgctcgatgattctcgatctgctggccgaaggttgcgagctgccgatcaccctgatctacggccagcgtaaccgtgacgagctgtattaccacgacgagtttctcgccatggcccgccagcatgcgaacttcagttatgtgccggcgctctcccatgaacccgaggactcggactggcagggcttccgcggtttcgtgcatgacgccgccaaggcgcacttcgacaacgatttccgtgggcacaaggcctacctgtgcgggccgccgctgatgatcgattcctgcatcagcaccctgatgcaggggcgcctgtttgagcgcgacatctacaccgagaagttcatctcggcggccgatgcccagcaggtgcgcagccccctgttcaaagccatctga

SEQ ID NO: 359780 - DNA, 357 bp, Pseudomonas aeruginosa
atgcctgtagtcgcccgtaaagagtacgtaggcgttgcccgcgatcgcgttgagaacttcaacggtaagcagctggtgtacgccagctgggatcaccacctgctgtttgctgccccgtttttgctgtgtctgccgccgcagaccacctttgccgagttgcttgaaagcgcgctcaaacccctgttgcaagccgatccggatgccgccctgatcgactggcacgcgatccagtggctcaagggcaaccagccctgggtgccgaacttcgaggccagcctggccgacaatggcatcggccataaagaccagctgcgcttcaagacgccgggtctcaacagcatctgtgcggtcaactga

SEQ ID NO: 359781 - DNA, 1521 bp, Pseudomonas aeruginosa
atggacatgaaaactgctaacaaaaagatgaatgcgaaagacaagtaccgcctgctgacgcgtgacctcgcgtgggagccgtcgtatcgcaccgaggaagaagttttcccctatatcgcctacgaagggctgaagatccatgactggaacaagtgggaagatccgttccgcttgaccatggatgcctactggaaatatcaggcggaaaaagagcgcaagttctacgctatcatcgacgcccacgcgcagaacaatggccacctgaatatcaccgatgcgcgttatctgtcggccctgaagattttcctgcaggccattagccctgctgaatatacctcgcacaaaggttttgcccgtgctggccgcgagctccgtggtgtgggtacgcaagtggcctgccagatgcaggcgattgatgagattcgccatgcacagacgcagatccatgcactgtccaactacaacaagttctacaacggtttccatgcctttgccgatcagcgcgaccgcatctggtacacctcggtagcccgttcgttctttgacgacgccatgtccgccggcccgttcgagttcatgatcgccatcggtttttcgttcgaatacgtgctgaccaacctgctgttcgtgccgttcatgtccggtgccgcctacaacagcgacatggccaccgttacctttggcttctctgctcagtcggatgaagcacggcacatgacgctcggcctcgagtgcatcaagttcatgcttgagcaagacccggccaacttgccgatcgttcagggctggatcgacaagtggttctggcgtggtttccgtgtactcggcttggtcagcaccatgatggattacatgctgcccaagcgcgtcatgtcctggcgcgaggcctgggatatttatggtgccgagaacggcggcgcgctgttcaaggatctggcgcgctatggcattcgtccaccgaagagctgggatgacgccgaagctgcgatcgaccatatttcacaccagttcatgctggggctttaccagtggagctttggtatctcgctccacgcctggattccctcggatgaggacttgcaatggctgtcagccaagtacccaacgacgttcgacaagtactaccgcccgcgctgggagcacatcaagaagcttgccgcggcgggtacgccgctgaagaactacggcctggccaagctgtgccagtgctgtcagttgccagtggtattcaccgagccggacgacccgagcctgatttgccatcgtgaagtggaatacaagggcgacaagtatcacttctgctccgatcactgcatgagcatcttcgataacgagccggagaaatatatccaggcttggctgccaatgccggcgctgtttcaggagccgaccaatggcgacctgggtgcctggatggattgggtgtcgctgaaagatggtcaggacaacggggactttgccgactcccaggatcgccgcaacttcgagatgtggcgcgggatggcaacgtccaaccagtaa

SEQ ID NO: 359782 - DNA, 270 bp, Pseudomonas aeruginosa
atgtcgactgtatttattgcgctgcaaaccaatgaagaaacgcgcccgattatcgaggcgatcgagctggacaaccctgaggcggtagtcaatcgcgaaccggcaatggtcaagatcaatgcgcctggccgtctggccattcgccgcgaaaccattgaagagcaactgggccgcagcttcgatatgcgagagctgaacgtcaatctgatcacgctctccggcaacgtcgttgaagacgaagactccttgaccctgacctggggcaactaa

SEQ ID NO: 359783 - DNA, 993 bp, Pseudomonas aeruginosa
atgcacatagatcttcgtacggtcagcatccagcccttgcggcagacgtttgatcatctggcccgtcgttttggtgacaaaccatcctcgcgctatcaggaaggcagctacgacatccagccagtggaaaacctgcactaccggccgacctgggatccggatcaggcgctctacgacgcaggtatcaccaagatcgtgatgagcgactggtatgccctgaaagacccgcgtcaattctactacagcacctacaccctggcccgggcccgtcagcaggaaaacgccgaagccaacttcaacttcgttgaaacccgcggcctggccgacatgctgccggacgatctgcgtcgcagcgcactcaacctgctggtgccgctgcggcatgccgcctggggtgccaaccttaacaacaccttcatctgcagctatggctacggcacggtatttacccagccgtgcatctaccacgccatggataacttgggcattgctcaatacctttcgcgcatcggcctgttgctcggtggcaccgaggccctggaggaaggcaaggccgcctggatggatggcgaggcctggcaaggcctgcggcgctacaccgaggattgcctggtggtgcgcgatccgttcgagctgtttgtcgcgcagaacgtggccctggacggcctgctgtatccactggtgtatgagcgcattgtcgatgaccagttcgcggccaatggcggctcggtggtggccatgctgtcgcagttcatgagcgactggttcgatgaaacccgcaagtgggtcgatgcggtgatgaaggtcgctgctgccgagtccgagcaaaaccgcgagcaattgcaggcctggaccagcgcttggcgtgaccgcgccgcagcagctttgttgccggtgatcgaacaggcgtttgccgggcaggcggatgaagtgatgggcgaacaactggcagccttcaaggcccgcctcgataaaaccggcgtcgtggtctga

SEQ ID NO: 359784 - DNA, 294 bp, Pseudomonas aeruginosa
atgaacttgcctgatgagtcactggacatgcagccggccgatctggatacgcgcaagcgtttcgtgcgggtcaccggtagccgtggcagcaactttgtcgagttcgacttcgccatcggcgaacccgagttgttcgtggaaatgatcctgacgcacgaagcgttcgacgagttctgtcgcaccaaccaggtcgagtcgatgccggcattacctgaggtcaatggtgaggacgacgaggcggggcaatgggactggcgcctggcggatgctactcaggttcgtttcaaaaactaa

SEQ ID NO: 359785 - DNA, 555 bp, Pseudomonas aeruginosa
atgatcgacccagcagacaagcaaacccaagccctccccctggagcagccgaagcgcgggcgcggtcggccagccaccggcaaagccctgtccgatgcagagcgggcgcggcgctaccgggcgaacaagaaaaagcgtgacgatcaaccgtcacgaaaagacaacgaggacgggaaagaagcgctgtaccggagaacagtgatccagcaagctgagcaaatacgggcgcttgaacagcaactggtgcagcagcgcgaggaatacaacgacctggtgcacaagctcatgactgaacgcgaccagctcaagcgcgacttggctgccaagccaaggcgtcaccgcgatcaacctgccgccgaactgccagagagcgcctacgaggacgaacccgaggcgaagacctggacgctccagggacgcagcggaagcggcaagtggcagaacctggccgcaggcctggaccgcaaagaagccagccggcaactggatcgagtgatcgacaacaagatcctaggcgctacgaaaggccgccaataccgcatcgtcgaagaataa

SEQ ID NO: 359786 - DNA, 618 bp, Pseudomonas aeruginosa
atggctagaaagacagcagctgaggccgcaatgacacgccagaggattctggccgcagccacagagcttttctcgcaggccggtgtgactgaaacaacgcttgagcacatcgcgcagcgggccaatgtcacgcggggcgcaatatattggcatttcaggggcaaggaggatttgtttaaaaccatattcgatgagcaaattctcccactggaaagcacagtacctaaagaccttcctctgtcgttggcgtggcagcagctgcaacagcgtctagtcgaaactatcagcgaagaaattcctcgacgcttggcagaaatcatgatgtatcagggggcttgcggtggggactcagccgttcatcagcaacgactggcacgtgtcagaggacgattcatgcagcacctcaaaacggtacttgaaaatgccgtgagtgctggcgaattaaccgcgtcgcttaatatacgacgcgttatggagttttttggtgttagtactgcaggcttactatttgattgcttgcaaaaagaggataatcccattgaatctgtttactcaacattgaacgttctttggcatgtgctgatgaacccgccagagaattttttagttgaggactaa

SEQ ID NO: 359787 - DNA, 798 bp, Pseudomonas aeruginosa
atgacggatatggaagaaagcattggaaagcatggcgggatacaggtcattgcccgtgccgcatcgatcatgcgggcgttgggcagcaatccccagggtctgagcttggccgcgatcgcccagttggtcgatctgccgcgttcgacggtgcagcgcatcatcaatgcactagcggtggaacatttggtggaagcactggggccgagtggtggttttcgactggggccggcgttcggccagctcatcactcaaacccagatggatatcatttcattggtcaggccacatctgaccgcgttgtcggagcaggttgaggagtcgacatgcctatcctccctttcgggtgataaggtttatgtgatggatcgaatcgtggctgagcgcgaattacgggtcgtttttccgattggcattcatgtaccggctagcgcgacatcaggtggcaaggtgctgcttgccgcacttcccgaagaggcccaacacgctttgctaccggatccattgccaatgtgcaccgctaaaagcctgaaacgtgaggtgttattggctcagttgaaagaggtcaaagtcagcggcgcggcaacggatgaaaacgaatatatcgagggtctgtgttcgtacgcagcgctgctcgatacctatttaggaatttattcaatctcgatcgtagcgcccacttcgcgagcaatgatcgcgggggagcgttttcagaaagcgctgcaggtctgcaaacggaatattgaagaggtgatcggtcggacgcctcgggcaattcccgggcaaggtgtcgatggctag

SEQ ID NO: 359788 - DNA, 1149 bp, Pseudomonas aeruginosa
gtgaagctcaacaaaaccttccccacaagacagttgatccccctggcagccctttggctgctggcgggttgcggtaaccaggaggccgcgaagaatgagcagccgccacccgaagtcggggtctataccgtgaaggcacaggcgctgacattgacgaccgacctgccgggacgtaccagcgcctaccgtgttgccgaggtccggccgcaggtgtccggcatcctgcagcaacggctgttcaccgaaggctcggaggtgaagaagggacagccgctgtaccagatcgatccgcgcacctacgaggcgcgcctggcgcgcgccgaggccaacctgaccaccgcgcagaacctggcccggcgctacgagcgcctgctcaagaccaacgcggtcagccggcagcagtacgacgatgcccaggccgcctggaagcaggcccaggcggaggttcaggtggcgcgtatcgacgtgcagtacacccaggtgctggcaccgatctccgggcgcatcggccgttcggccgtgaccgagggcgcgctagtcaccaatggccagacgcaggagctggccaccgtcacccagctcgacccgatctatgtcgacgtcaatcaacccatcacccgtctgctcgggctcaagcgcgcactggaatccgggcgcctgcagcgcgtgggtgaagaccgggcgcaggtcagcctgaccctggatgacggttccctctatccacttaagggcgtgttgcgcttctctgaagtcagcgtcgcccccaccaccggctcggtgactctgcgggccgagttccccaaccccgaccgcaagcttctgccaggcatgttcgtccacgccctgctcagcgaaggcgaacagcaggccgccatcctagttccgcagcaggcggtgggccgcgatgcccgcggtaccccgaccgtatgggtggtcacgcccgacagcaccgtcgaacggcgggaggtggaaaccttgcgcacagtgggcaatgcctggttgatcggtgacggcatcaaagatggcgaacgcgtgattaccgaaggtgtgcaactggcccgcacaggaatcaaggtcaagccggtggacgccaagaacgtcaacctggtcgccgatttcgcgccgcaggcggacacccaggccaattga

SEQ ID NO: 359789 - DNA, 3138 bp, Pseudomonas aeruginosa
atgtctcgctttttcattgaccggccgatcttcgcctgggtgctggcgatcatcgccatgctggcgggggcactgtcgctgatgaacatgcccatcagccagtaccccaacattgccgcacccgccgtgtcgatccaggtcacctaccctggtgcctcggcccagacggtgcaggacaccgtggtccaggtcatcgagcagcagctcagcggcctcgacggcttccgctacatgtccgccgagagcgcctcggacggaaacatgaacatcatcgtgaccttcgagcagggcaccaacccggacatcgcccaagtccaggtgcagaacaaactgcagctggccaccccgcgactgcctgaggaagtgcaacgccaaggcctgcgggtggtgaagtatcagatgaacttcttcctgatcatcggcctggtggacaagaccggcaagatgaccaacttcgacctgggcaacgtgattgcctcgcagttgcaggacccgatttcgcgtatcaatggcgtgggcgactacatgctgttcggctcgccctatgccatgcgcatctggctagacccgatcaagctcaacagctaccagctcaccccaggcgatgtggcccaagccattcgcgagcagaacgtgcaggtgtcctccggccagctcggcggcttgccgacccgctccggtgtgcagctaaacgccacggtactgggcaagacccgcatgaccaccccggccgagttcgaggagatcctggtcaaggttaaggccgatggctcccaggtacgcgtcaaggacctgggcaaggtcgccctggcttccgacaacttcgccatctcgtcgaagtaccgcggccagtactcggctggcctcgccctgcgcctggccagcggcggcaacctgctggagacggtaaaagcggtcaaggcggagctggaaaaacagaaagcctacctgccagaaggcgtcgaggtgatctacccgtacgacaccaccccggtcgtcgaggcatccatcgagtcagtggtgcataccatcggcgaagcggtgatcctggtgttcctggtgatgttcctgttcctgcagagcttccgtgcgacactgatcccgaccctggcggtgccggtggtgttgctggcaacctttgccctgctgccgagcttcggcataacgatcaacgtgttgtccatgtacgccatggtgcttgcgatcggattgctggtggacgatgccatcgtcgtggtggagaacgtcgaacgattgatgcacgaggaaggcttgtcgccactcgaagcgacacgcaagtccatgcagcagatttccggcgccctggtcggcatcggcatggtgctgtccgcggtgttcgtgcccatggccttcttcggcggctcggcgggcatcatctacaagcagttcgccgtcaccatcgtcatctgcatggcgctgtcggtactggttgcgctgatattcaccccggccttgtgcgccaccattctcaaggccccgcaaggtcacgggcacgaagagcgaaaaggcttcttcggctggttcaaccgcgttttcgaccgcggcaccgcacgcttcgaacgcggcgtgggcggcatactcaagcaccgtggccgctacctgtttatcttcgccgtggtcaccgccggcaccggctacctgttcactcagatccccaaggctttcctgccgaacgaggaccaggggttgatgatggcggaagtgcgcatgccactgaacgcctcggccgaacgtaccgaagcggtgctgcaggaggtcaaggactacctggttaacgacgaaagcgacctgatcgagcacgtcatgacggtcaacggcttcaacttcgccggccgcggacagaactccggcctggtgctgatcgtgctcaaggactgggctgtacgccaaggtgtggggcaggacgtgttcagcctggccaagcgcgccaatgaacgcttagcccatgtcaaggacggccaggccatagccttcgtgccccccgcgatcctcgagatgggtaacgcgatgggcttcgacctgtacctgcaagacaactctggcctgggccacgaagccctgatgaaggcacgcaaccagttcctggaactggcggcacaaaatcccaagctcaaggccgtacgccccaacggcaaggatgacgagccgcagttccaggtgcgcatcgacgacgagaaagcccgcgccctgcaggtcagcatcgcctcaatcaacgaaaccatgagcactgcctggggctcgatgtatgtcaacgacttcatcgaccttggccgggtcaagcgtgtgtacctgcaaggcgtcgacagctcgcgtatctcgccggaagacttcgacaaatggtatgtgcgtaacgctctgggcgagatggtgccgttctcggcgttcgccgccggtgaatgggtctatggttcgcccaagctggaacgctacggcggtatctcgtccgtgcagatcctcggcgagccggcgccaggctacagtaccggcgacgccatggtggcgatcggcgagatcatgcaacagctgccacccggtattggcctgagctacaacggcctgtcctacgaggagatcaagactggtaaccaagcgccgatgctctatgccctgaccgtcatcatcgtgttcctgtgcctggcggcactgtacgaaagctggtcggtaccggtgtcggtgatcatggtggtgccactgggcatcctcggcgccgtgctcgccaccctgatgcgcagcctggaggccgacgtgtacttccagataggcctgatgaccacggtcggcctgaccgcgaagaacgccatcctgattatcgagttcgccaaggaactgtacgagaaggaaggcatgccgctggccaaggcggccatcgaagcggccaagctgcgcctgcgcccgatcatcatgacctcgctggcctttaccttcggcgtattgcccatggcgctcaacaccggcgccggtgccggcagccagcactcaatcgcgaccggtgtcgtcggcgggatgatcaccgccacggtcctggccgtgttcttcgtccccttgttctacgtggtggtggtgaaattgttcgaacgcaagcaacgagtggcagcagcccaaggagagtcggcatga

SEQ ID NO: 359790 - DNA, 1428 bp, Pseudomonas aeruginosa
atgaagctgcgatacctctcgattgcgctgggcctgacctttccaggctgcagcctgatccccgactaccatcgccctgaagcgcccgtgcaggccgactggcctgggggcccggcctacgcgaaagaccaggcgcaagctgggcaagaggccacgctgagctggcaggagttcttccgtgaccctgccatgcgccagttgatcggcgtcgcgttgtacaacaaccgcgacctgcgccaggcagcactgaacgtcgaggcctaccgggcgctgcaccgcattgagcgctcggccctgttcccgacggtcgatgccaacgttggcggatcgcgccagcgggtgcccgacgacttgtccaccaccgacgatagcgagatccagagccaatactcggcgacgctgggcattgcttacgaagtggacatgttcggccgcctgcacagcctggaacgtgccgcgctgcagcaatacctggccaccgccgaaacccaacgcgccgtgcagattgccctggtcagcgacgttgccattgcctacctgacttggcgcagcgaccaggcccaactggagctggccagctccaccctggaaagctaccagtacagcctggatctaatccgctcgagcaacgaagtgggcaccgcctcggcgctggatgtacgccaggcgcgcagcctggtagaaaccgcacgcgtgcagaaggcgcttttcacccgccaggtcgcgcaggatgtcaacgccctgcagttgctgctcggcaccaagctgccgggcgacctgccggcccgcgcccccctggagcaacccctggcgtcgctgacggcgggcatgccagccgacctgctgctgcgccggccggacatccgtgcggccgaacaccggctgctggcggccaatgccgacatcggcgcggcacgtgcggcgttcttccccagcatcaccctcaccgcagcggccggtaccgccagccgcgatctcgacggcctgttcgaaggtggctcgggggtctggagcttcgtgccgcagatcaacctgccgatcttcaccgccggtcgcctgagcgccaaccttgattaccgcaaggtggtcaaggacatcaatgtcgcccagtacgaaaaaagcatccaagacgccttccgtgaggtcgccgacgggctggcagcgcacggtactttcggtgagcagttgcaggctcagcgcgacttggtcgacaacaaccgggagtactacaaactggccaaccagcgttacgacgaaggggtggacaactacctggtagtgctcgatgcgcagcgcgaactgtttgctgcccaacagcaattgctcgaggaccacctgagccagctcagcagcgaagtcagcctgttcaaggcgctcggtggcggctgggatgctcagccttccacgccacttgcaagcctgaagtga

SEQ ID NO: 359791 - DNA, 1509 bp, Pseudomonas aeruginosa
gtgatcagtatggaaatgatgggcaaaattcgccggatgtatttccgcgacaagctgtcgctgcatgagatagccaagcgcaccgggttggcgcgcaacacgattcgcaagtgggtcagagcacctgaggccaagccgccggtctaccaacgccgcgcgatcttcaacaaactcagcccttttcacgccacgctggagcaggcgctaaaagccgattcgctgcggcccaagcaacagcggcgcagtgccaaggcgctgttggcgcaaatcaaagccgaaggttatgacggtggctacagccagctcaccgcgtttatccgtgcctggcgagggggacagggcaaggcgtcgcaggcctttgtgccgctgacctttgctcttggcgaggcgtttcagtttgactggagcgaggaaggcttgctggtcggcggcatttaccggcgtatgcaggtggcacatctgaagctgtgtgccagccgtgcgttctggcttgtggcgtatccgagccagggccatgagatgttatttgacgcccatacacgctcgttcggctccttgggcggcgtgccgcgccggggcatctacgacaacatgaagaccgccgtcgacaaggtcaataagggcaaaggccgggcggtgaatgcgcgctttgcggtgatgtgcgcgcattacctgttcgatccggacttctgcaacgtcgccgctggttgggaaaagggcatcgttgaaaagaacgtgcaagacagccgcaggcgtatctggctagacgcccaggactgccagtttcactccttcgaggaactcaatgcctggctgggccagcgctgccgcgcgctttggaacgagctgacgcaccctcaatacagcgggctgagtgtggccgaagtgctggagttggagcgcgctgaactgatgcctgtgccagcgccattcgacggttacgtcgagcggcctgcgcgggtctccagcacctgcctggtcagcgtcgggcgcaaccgctactcggtgccgtgtgagtatgcgggtaagtgggtcagcagccgtttgtatccgacgcgaatcgaggtggtggctgacgacgcgctgatcgccagccatgtccgcttgctggatcgcgaccaggtcagctatgactggcagcactacctcccgctgatcgaacgcaagcccggtgcgctgcgcaacggcgcgccctttgctgatctgccggcgccgctgcgtcagcttaagcacggtctggggcgtcatgccggcggtgaccggatcatggcgcaagttctggctgccgtaccggtcgccgggctcgatgcggtgctggtggctgttgagctggtactggaaagcggcagcctgagcgccgaacacatcctcaatgtcgtggcgcgcctggccgcgaccgaaccaccacccagcgtcgaaacccacttgtcgctcaaggaagcccccgtcgctaacacggcgcgctacgaccgcctgcgtggccagaccgaggagatcggtcatgcgtga

SEQ ID NO: 359792 - DNA, 615 bp, Pseudomonas aeruginosa
atgttcgtccgcgcctaccttcgagccagcaccgccgagcaggatgccgcacgcgcccgttccgctctggaacagttcgccactgaccacagcaaggtcattgccgcacactacaccgagaacgcatcggggacccaagctgatcgtcccgagttgctgcgtttattagctgactcccgcaccggagacgttctgctggtggaaagcattgatcgactgtcccgcctgccggctgatgactgggcgaagctcaaagcagccatcgacaggaaggggctgcgaatcgtggctctcgatcttccaactagtcaccaaggtatgcgcgacactacgggcgatgagttcaccgcccgtatgctcggggcaatcaacaacatgatgctcgacatgatggccgccattgcccgcaaggattatgaacagcgacgcgcccggcaggctcaaggaatcgaaaaagctaaaatccaagggaagtatcagggccgtccggttgacgtggcccttcacgctcgcgttagtgagttacttgccgtcggactggggatcagggcaacagcacgacacgccaactgctcaaccaccacagtgcttaaaattcgggatcagagacaataa

SEQ ID NO: 359793 - DNA, 264 bp, Pseudomonas aeruginosa
atgcgcgtcaaggtcgaaggcagggcgatcatggaccgctggcccgacaaagagtcaggggaagaagtccaggcgctgaaggtcgaagcctcgcgcatttccatccttccgcatcgcctggccgaggtcaccctgttgccgtctaccaacggccagtcgacacaacatcagcagtctcggcaggtgccgccgcaacctgctcagcaggatgcgcaatcgcagcaggactacgacagcgccttcgacgacgacatccccatgtaa

SEQ ID NO: 359794 - DNA, 279 bp, Pseudomonas aeruginosa; identical to SEQ ID NO: 331795

SEQ ID NO: 359795 - DNA, 924 bp, Pseudomonas aeruginosa
atgagcgctgcctttcgtgaaattaaagctgccgtaacacgtagcaaaggtgcacctttcgtcatcgaatccgcccgcattcgagcgccccaggacgatgaggtgctggtgcgcatcgtggccactggtatgtgccacaccgacatgatcgtccgcgatcagtactatcccgttcctctcccggcagtgctgggccatgaaggcgcagggattgtcgaggctgtgggaccgcgcgtgagggggttggaaatcggagaccacgttgtactgacatatggatactgtggacattgcctaccatgcggcagtggtcatgcttcgtactgtcaggagttttttgggcgaaatttcagtggagctgatccgcatggacagtgcgcccttgaagacgcttccgggtcccaattgcacgaccacttctttgctcaatcatcgtttgccacctttgctctgagtcgtgaaaacaatgccattaaggtttcgaaagaagcacccatcgagcttcttggaccgttgggttgcggaattcagacaggcgcaggggctgttatcaactccctaaaagtcacggctggtagcagttttgcagcctttggtgcgggtgcggttggcctttccgccgtcctggcagcaaaggttgcaggtgcatcgaccattatcgccgtcgatgtcgtgccctctcggctcgagttggctctcgaactcggcgccacgcatgcagtgaatagtcgagaaacagatgtggtaaacgcaatccgcgtgattaccaagggcggagtcaattttgcgctggagtccaccggtcgaccagaagtcttgagaaatgcggtcgactcgctcggcggacttggttgccttggtgtcgttggtgcccccccacttgggaccgtaagcttccccgatccgcagacaccccataagtag

SEQ ID NO: 359796 - DNA, 1470 bp, Pseudomonas aeruginosa
atgagcggaagttcttcgctgctgcctttaaatctatggcaagagcgcctattcaatggggattgggtgactagtccgctatcaccaatggatgtaattgagcccgcgaccggtaactcccttggtcgtatcgccttggctgacgccaacgttgtcgctgtttctaatcgagcagctcgtgcggcgcaagccggttggtatggattgccatatgatgaacgctcttcggtgctgcgtaaggctgcacaaattgccgaaaactacttcgatgaaatagttagctggatgattcgtgaaagcggctccgtacaagctaaggcagcttttgaggtcagtctaagcattaaggcactgtacgaaagctcggcacttccctcccgaagtcaaggtgaagttcttccgtctactgcaggaaggctaagcatcgcccgcagacgtcctctaggtgtcatcggtgtcatatcaccttttaatttccccctttatttagcgatgcgcgctgttgcgccagcattagctcttggaaatagcgttgtgcttaagccggatccgcgcacagcagtctgtggtgggtttgccatagctcggatctttgagttagcgggtttgccgaaaggtgtcctacatgtactgcctggacaagcagatgccggtgaagcactcgttagcgactccaacatcgcaatgatccaatttactggctcaaccggcgcaggccgcaaggttggagaagccgcaggccgacatctgaaaaaagtatcacttgaactcggtgggaagaattcattaattattctggatgatgcagatttagacatcgcactgcgaaatgcaacttggggagtgtatctccaccaagggcaaatatgcatgtccacggggcgggttcttgttcagcgtggtatttatcagcgcttcctcgaccggttaattgagaaggctcgcaccctatcggttggtaacccgaccgacgctggcgtctctctcggaccactgatcaatgcacaacaacgagatcacgttcatcgggtagtcatcgattcggtaaaggcaggtgccaagctggaggtaggcggaagctacgaaggtcttttcttccagccaacggtgctcagtggcgtgcaaccgaacaatccagctttccatgaagaaatcttcggtcccgtcgcggtggtcgtcccgttcgactccgacgtagacgctgttcgccttgcgaatgacactgactatggtctggcagctgcaatcatctctaaggacgttggacgcgcactcaaactaggcgagcaactgcgaaccgggcttctgcatatcaatgaccaaacggtgaatgacgaggtggttaatcctttcgggggcgttggcgcctccggcaacggaacgagccttggcggcgtcgccaattgggaagagtacacccaatggcagtggctaaccctcaagggtgatgcgcctgcttatcctctctaa

SEQ ID NO: 359797 - DNA, 948 bp, Pseudomonas aeruginosa
atgcaaccgacaaccttgaagcggtatcagaccagagcacaacatttctatcggactcgctgcggcgaggacgatccatcttcggcgcagatttgcgcggctttgcaggcctgcgctagcgagtaccgccccaactcgttcagcacgctcaaaaattcgctgatgaacgatcagctcgctcgtagcaacagcaacgcagcagctgcaatcagaaagctgatcaatccggtcacagcgcctgatagcaagatgaccagaaaacccaagctgaaacagattcgtaaagtccccttcgaggacttcaaagcactgtacaagcaccttcatgccgggggtaatctcgatgaagccgcttcgcttgtcctggcgaactgcataggcgtgcgtccttgtgagatgcgcacgatctctgtcacagggaaccttgtgcaaatcatcggtggcaaaaaatccgcagagctacaccgcggcgccgaccgaaccctggtgatcgacaaacccaacattctgaaattgattgaatgggccgcacataggatgtcgaagtgcccgcgcaccaacacggctattcgggatcggtttcgccgggagtcacgatctctatggtcgagacgcaaacaggttccgacactgaagagcttccggcatcagatgggctccatccttaaggcttccggagaaagcccagaaacccaggcgtacgtcatgggacatcagtgcatcagctcgctgagcgtttacggggatagtcgactgggagcaggcatgaaggctcacgttcgtcctgccgacagtgctgacctgacaagcattcgccagccacataagcctccaagatacggacaaggacgcagtctggggatgatcgagtttcctgctgcaaccaggggacattggtatacggagatgaagcaacgacgaaacggtaagagccagcacaatccgtga

SEQ ID NO: 359798 - DNA, 2142 bp, Pseudomonas aeruginosa
atgaactacgaaacgatcaagaacaagctgacgaaactaggtgatgagggtgcatcgacgattgatgtgctgcaggccatcaacgccgtcgtcaacagaagtagctctgagtgggaaggccgcgacctagtgatccgagcactcgacaaactcaagcttttcgacgcagtcgaacagtcgttgctgctcaacatggtacgcgccgtcgggctattcccctacatcacgcctcacctcagtagcatggcgctttctgaccgcttagcttacgaggctcacagggttgaaggtgtagagcagggtatggtgtttcatcatctgcaggcccacgttttcagcttgatcatgcaaggccgaaacgtggtgctcagtgcttctacaagcgtcggaaagagcctcgtaatcgacgctgtactggcacagcggcgattcaaaaaggtggttgtgatcgttccgaccattgctctgatcgacgaaacccgtcgtcgcttggtcaaacggttcagggacttcaacctgatcacgcatcctagccaggaagcagagccagacacaactaacgtctacctcctcacgcaggagcgtgttatccagcgtccagacctttcggatgtggagttcttcgtcctagacgagttctacaaaatcgacttggcgaacgacacagacgaaagcacccgagccattgatctgagcctggccttccacaagctcgccaagactggcgctcagttctacatgctcgggccacacatccagaagatctctggcttggatggttacgagtaccacttcatcccgtccgactacagtaccgtcgcggtcgacatccagaatttcaatctgggtatgcgctccgaagagcgaaaggaaaagctgctggagctggtcgcaactctggactcgcctaccctgatctactgccaggccccccccagcgcgaacagagtcgccgagtatttgatccaggaagctgggctgacccctgtgccggaaacgaaagaaatcgccgcttggatttccaagcactaccaccctgaatggaacgttgccaaggcaatctctttgggtatcgggattcaccatggcggggtgccgcgtgcactgcagcagtacatcgtcaagctgttcaacgagggcataatcaagcggatcatctgtacgtcgacaatgatcgagggcgttaacacctcagcagaaaacgtgatcatttacgaccgtcgcctgaacacctcgacgttcgattacttcacgtacaaaaacatttccggtcgtgcaggccgcatgaacaagtatttcattggcaaggtcttcatgctcgaagcgcccccccttgagcaaggcctcaccgtcgagtatcccatcggccatcaggacgagagctccccgatggggcttctcatgcaactggagaacgagtacctgaccgacatctcgcgtggacggctccaagaagcgtacgccaaccccgtacttttgccgaccactctgatcgagaatcggcacattcctattgaacggcaagtcgaggtggcggaaacgatcattcgagacctgccgaatagtcgaaaactgctgggctggaaaggcatccctgagccgaaccaggtcaactacctgtgtgagctggtctacagcttggagggcagtaacctgatggattacgggatatcgtccagctcgcaattggcttggcacatcaatgagctccgaactcagaaagacctgccagcttacttaagagacgcggtggcgaatcggtggcaggagaacacacccagcgaagcgatcaacctacgcctaaaattcattaggaacatggtctgcttccgattgcctcgagacatcatggccgtcaacaaaattcaggctgacgtgctggcgaaaagagcgatcgagccgggcgacttcagcttctttgctgaacagttggaaaacatgttccttgacccgctactcaccgcattggacgaatacggaattcccactcagatctcgacccagatcaagaacctcatcttgccgtcggaacatctgaacgacctgctggcgaaacttcgggcactggctccaagagtagagcgccttcaactgaccggctttgagaagagcttaatgcgttgggcagtggccgaaatgtaa

SEQ ID NO: 359799 - DNA, 1632 bp, Pseudomonas aeruginosa
atggcgcgtattactagcccatccaatgcaggtgggcctgcagcaaggcaaggattcaagtatcaagaccacgtagccgtcagcttcatcttcaagatgctccgagatagcagctactcccaggtggaatgcgagacagcggacgatatagtcgcggtgttctactgttcgggggagctagtcaacgagtacatccaggtcaagacgaccgaaggtgacaacaaatggaattggcaagaagtaatcgcgctcgatggtatcaaggccgattcttccctactgcacaaatcactaaaatgcgacgtgcgccctggccttgcccgcttccggatcgtgactaagcgcgacgtcgcaaaaattcttgaaggcttcaaaaaagagctgaataagcgagctcttcctgataccaccacggcccgaggcaaggcactgctaaaggcgtttaagacgttcgcctccccgcaaaatcgagatttttcctactgggcgaaaaattgtgtctggcaggtatacggtgatgtcgatgcgctggaagcggtcaatatcaaggctttgtcccagctcgcggaagaactcggaaaccggcccaacttcacccagctgcaggcaatttacgacgaattcctggagattgccgacaaggctgccacggccaacgtgaaaacagctgctgcgtcaaagatcattctccgtggccctgcgctggctcacttgaagaagcttttggacgaggctgatgacaagtcaacggccacatccaaaccctataagaagcgcccggatccgttcttggtcgagtttcacgcgagcaccaaagacggtctgctgcattcattttctggctttgacgtgaagtattcgctaaaaaaatggcgtcacgagaactttgcgaaacatctcatcgaatggctgcctgagttttcccttaaggccagcgagatcgtcaacatacttgcgcacaacgcagaagcgattttggctcgatcaatcagtgccttcagcgacagtgagctcccgcgcgacaggctcatcgcggaacttattctccattccatcctgcgcagcagccaaaacagcgagcccgttgcatgcaaagtcttctacaaaaccgccggcaagctttcggagtttggcaacgctcatatcgttcagctacctggtcagggtgatcagttatggctaggtcttgctcgcctgatcgaagcaaacgatatggatgcaacgctggagcagatctgcgaagtccttgacggaacgatctcagaaacggtgctgtcggcagagcgcgaaatcatcatttctctgcgcgaacccttacaccaccagcctaaagcagatgccttaaaccaggctctgcatcgcaattcgccggtcgatgacatgctgaatgtcctcggcctccccatcctattgacctatgaaagtgaagcgctctcgtcaggctggcttgctgattacataaacaaactcaagacagagatcgagacccacttcagcacgttcaccacacaattgccggagaacatcaaacaggtgaaggtgatggtctttctggtgccaatggaaagcattgaactgctgatcaaggcgttcaacgctcgctgcaaaaagctggaagagttacaggcatga

SEQ ID NO: 359800 - DNA, 1629 bp, Pseudomonas aeruginosa
atgagcagctatacctctcgcctacagcgccatctcaagaatcacgccaagcagcttcgctctgttgccgatactaggcacagcgaagctttggacattgctgcggccgacttcggattctctggttggaagcaagccaccgctcatatggccatggctgaagttcggatacgagatgcgcaagcgtcgtttgccagcgaggttacccgcctggctgcagaactgcgtgtattacccggctatccgtaccggctagaagatcgtaccggtgtgagatttgaaccagctgacaagcaacaaaccgaagcagtagccaagcgcttggtgttgctccagctgttcgaggacattcatgctcccaaggggctctgtcattcagttagtgctcggctctggttccgggcgccgatgcttttcgatgacgccgcagagatctgccacggtgctccgtggaaaatcaggcgcatttcgaatgcactggtgaatgagcccaaagcttctgaaaatgcgtggctacacgtccagcctccaaccccagaagtcgcgcgcattacgattatcgagtacctgcacgcattgcattcaatatccgtgatccgttcgttgactgggtctcctgaggaagttgttgggcatccggggttcaaagagtttgccggttttgcgttgaatgccctgctggccggtaaggagtctaaagagactctcctcaagttgctggatcacgcgggaatcagcgcctgggtacaggcaacctctggtctcatcgatcccaaacgattgtattgggtcggccgtcaggaatcggagagcatgcaacccaatgaaggcgtgtcgatggtgattggtccccccttacacccacgcctgcgcaggccgctgaactcgctctcactcgaaaagcacgaagagctttctgctgctttggtgcgtgtcggcaagcttgtccatgggaaagcaggcttatcgcgcaacctcagcgaaatccgtgaaaccctggctggatggatggctttagagattggtgaccaggaaagggccaacaagtgctatttcgctatgtcccgcgcttaccgagcagtgccattccttgcgccggcagaggagaaagctgctcgcaccgccattcagactatccgagactgcactgaggcaggctacgaacattgcacgccacgatcgaggttgctgggccagatccttcagctgcaacagaagttcgaccgttggatggagaaaactgaaggtcactggcagaagaccactcacaagctaccgatggattccattggcctagtggccaccgaccctaagcacgagctttcgctcgactctgagtctgtctggaaacagacggcgatcatgggaggcagcagtgaggccaatctaatcgcagcgatccgaccccatctgttcaactcttggaaggaggacgaggaaggcctgggatatgatttcgatgcagccgacttcgatagcgagcagtccatccttgagcatttgcacgagcttgctttctatcgctacacgggcgaagcgctcacgcgttcgcaatatgaaaaagaggttcgcaaagccttctatttcgagcctgagcatgtctggttcaagcaacgaaagatcagatga

SEQ ID NO: 359801 - DNA, 768 bp, Pseudomonas aeruginosa
atgcagcggtcattaataggtaggtatttttaccgtagcccacagcgcagcttcggaagcttattcatgatcaaatctatccgcaatttactataccgcccgcccgcaatgcctaagtcaggagaagattttggcgaataccagacaaacttcgttaacgcaattcgctttactgagtcttgcgggctcttggtagaaaggcctgattggaagccgcacgagaggcttgaggttgagggcagcttcctcgaaccagcgctgcgagcggcaggggtcagagacctgaccaaagcagctttccaatgcctcaaatggtcccattaccttgcacctcacatcgaacagcagcttgggcgcaaggtatggttgaccatagggcagatctggagggaagaccaagcactgttctccccgacatggaacgacctacgcagttggagcaaacagggtattactattgaggaaatgcacaagcctggttcagcaggactaaacttgcatgcctggctcacggtagacagcggtgaggtcatcgagcccacgatgatgacctcgattgcaaccctgtacccagatacatactctcatttcttatgtgcaattggttggggccagcctgctgacattctgagcgagcacaaatacttcccaatggctgtgggtgctgaatttgcagaatgtcttcacagccgaagccagatcggtttgctagcaagcaatccacaggaactgcattccgtaccgatggcgattgtgttcggaaattaa

SEQ ID NO: 359802 - DNA, 741 bp, Pseudomonas aeruginosa
atggctactaaaaaagaacgcatcgccgataccgcctggatgaaagatgcctttgtcgatgtccaggcggagttggccttgaagctgaagcgagcagcccaatccatctcgcacgcaggaacgcacggcacagtggtcgaggatcattggattgaggtgtttagagcctacctgccgagtcgctaccaagtagcaaccggcctggtgatcgacagcctgggcaaccgaagtgatcaaattgatatcgtgatcttcgaccgacacttcacaccgactctgctcgaccaacagaaccaccgttatatcccggtcgaagccgtgtacgcgattttcgaatccaagccacatttcgataaaagctacatggaatacgcaggcaacaaagcggcgtcggtgcggaagctccaccgaacttcagtcccgattgcccacgctggcggaacctatgccgctaagcctctgttccccatccttgccggcattgtcgcccccaaatcaagctgggctgatggcttaggggagcattttctgaagcacctgccaacggatcaattagagcgattggattgtggctgcgcgctggatgacggggcgttcgatagcttcgatgaaaaactcaaagtagttggatcagagggctctctcatctacttcctatttagactgctctcccgccttcagtcacttggtacggttcctgccattgattgggcagcatatgcagcggtcattaataggtag

SEQ ID NO: 359803 - DNA, 936 bp, Pseudomonas aeruginosa
atgagcaagcccgcactggatgatcttttcgaataccgcgttaactatcctgactttgaaccccagggcagacttgccaagctggtgggccttgacgaccagaaagtccggctgaccaaaattctcggcctgctggttaactccgctggcctcaccgactgggcgaagaaattccatcccggttccgaggatctgcttgagacggtgttgcgccgcccacctctggtcgtcctagctggcgacgtgggcagtggcaaaaccgaactggccgagacaatcggcgatgctgtggcacgccaggaaaaaatcaatattacgcttttcccattgagcctttcgacccgtggccaaggccgagtcggtgaaatgactcagctgatatcggcggcttttgattacacgatcgaagaggccaaaaagctcaagtcgagtgatggccgcgcacgaggagctgtgatcctgctcatcgatgaggcagatgctttggcccagtctcgggaaaatgcgcaaatgcaccacgaggaccgtgccggggtgaacgctttcatccggggcattgatcgaatcgccaacgctcaactccctgccgccgtgatcatgtgtaccaatcggctcagcgcactcgatcctgcggtcagacgccgcgctgccgaagtgttgtcatttgaccggccaaacgatgcacaacgtcgcagtgtgcttacaagacgccttgcgcgcctcggtattccagacattgcgttcgacgagctggtgagagtaacgggacctagggaaggcaacatcccaggctttactttctcggaccttacacagcgcctgatcccgtcgatagttttggatgcgtacccgtcccaggccatcaatgcagggcgagcagtccgagtggctacggaaatgaagccgacaccagcttttcaggaccatcaaccctaa

SEQ ID NO: 359804 - DNA, 516 bp, Pseudomonas aeruginosa
atgtcgtcctacagctatgtggtagcggaaacccaaaccttcacactcactcacgcgaaacacatggcctcgaaggtggcagctgatctgatgcgccttcaacgcctgtatggtcaacccagcacccaacggatcctggacttcgaacaggaagtgaccaagctcttgaaggcaggctacctcggtaccgtgacctacggtttcaagcgtgacggaaactggatcgaacccaccctcagatacacagcgtcagacctttcggtagacggcgcagatgattcgcctggacgtattagcccaaatgcagatgtttctggggccagatttgcgagctacctgacctataacgctgcctgggatcttgcgtcgcagagtgatcgcgacgccctcgaaaaggatttgccatttagccgtaacggcgcacctgagccgggagtaagcggctacatgacgtctgaccgttcgtactcatctgggggccgcgcccttaatcgttcgactgtgaggagttactga

SEQ ID NO: 359805 - DNA, 966 bp, Pseudomonas aeruginosa
atgtccagagagcacgttgaccatcgtgacatcgcacggtttgcagaagaaaatgtgaacctgcccaaagagaaggctattgcgtaccgagagcaggccgggcgcttacaggaaaaactggagcgttatctctccgatcatcctgacttttcactgcggcgaatgctcgtttccggcagtctggcgaaaggcacctcattgcgctcgctcagcgacatcgatgtggccgtttacataagcggatcagacgcgccacacgacacaaaagctttgattgattacctggccgaaaagttgcgcaaggctttcccgaatttcagtccagatcaagtcgtgccccaaacctattccgtgacggtgtcgttccggggatcaggtctggatgtcgatatcgtacctgtcctttatagcggtcttccccagtggcgaggcaacctgatcagccaggaagacggatcgttcttggaaacaagtatcccgctgcatctggagttcgcgaaagctcgtaaacgcgctcagccgacccactatgcgcaagtagtgaggctcgtgaagtactgggcagccctgatgaagcgtgagcgggatggcttccgcttcaagtcgttcatgatcgagatgatcatgtcgaagctgtgtgacgacggggtcgatttctctgactaccccgaagctcttcagagcttcttcacctacatcgcccgctccgagttgcgcgagaaaatcttcttcacagacaactattcggcatcacaggtcgggaagttcaccgaccccttgcagatcatcgaccccgttaaccctaccaataatgtcgctcggctttatacgaagcagaacgtagatgcgatcatcgaggccgcactggatgcaggtgatgcgatcgatgcggcgcttttcgcgccaaacaagcagctcactgtcggttattggcagaaagtcttcggatcaaccttccaggtttga

SEQ ID NO: 359806 - DNA, 324 bp, Pseudomonas aeruginosa
gtgacgacccgtctcggtgagaagctccgcgagctgcgcaagcagcgcgggcttacgttggagaagctttcagacatggcaggtctgagtaaaagctatctctgggaactggaaaaccgtgaatctcaacggccatcagcggagaagctcactgctctggctgacgtgctgggcgtagcgacccagtacttttttgaagaagacgtacgagcacctgaggaacgccatctcgacgacgcgttctttcgcgggtacaagaacctggagccggacgccaaggagcaacttcggaagattttggaaacctttaaaaagggaagttaa

SEQ ID NO: 359807 - DNA, 666 bp, Pseudomonas aeruginosa
gtggcaacacccagctcgccgccggcgctggggtcggtccctggtggggtgattccagtggaatcacccaactcgtcgacggcgccgaggtcgatccttggcagagtgttgccagtggcaacacccaactcgccgccggcgccgaagtcagttcctggtggagtggttccagtggaaccacccaactcgccgccggcgccgaagtcagttcctagtggagtggttccagtggaaccacccaactcgccaccggcgccgaagtcagttcctggtgaagtggtgccagtggcaccacccaactcgtcgacggcgccgaggtcgatccttggcagagtgttgccagtggcaacacccagctcgccgccggcgctggggtcggtccctggtggggtgattccagtggaatcacccaactcctcgacggcgccgaggctggatcctggtgaagtggtgccagtggcaccacccagctcgtcgacggcaccgagttcgatccttggcagagtgttgccagtggcaacacccagttcgccaccggtgccgaggtcaggacctggcagagtgatgcgggccgcatcaccaaaaaacacgacgcccgaccgagactttctcatggctcatcaccccgctcggatggcacgctcgatccgtgcctgggccgaatga

SEQ ID NO: 359808 - DNA, 246 bp, Pseudomonas aeruginosa
atgaatgatgtcatccagttcgccatctggactgtagtcattgttgcggtcggtcacctagtgcgcaacagggaggtccgtaagtggcttgggatcgctgtgtttgttgcggcttgggtgcttattcttcgcttctcctcggtcaagttggcaggctttggtcttgacatcttggggatttgccttggcatcctcggggttgaccttttcgttcgtagagaccgcttctcgaaagctgacgagtaa

SEQ ID NO: 359809 - DNA, 1263 bp, Pseudomonas aeruginosa
atggacattcaacgcctcttcaaccactggcagcaggggcgtccgcgggatgaactggtagtgaacttcagggacatctgcgggactgcccttcctagcgtgtgggttcctggatccggtgacgatgagtatgactacgccctgacagccgtgcccggcgaggccctgcggttcctttacgaaaagtatggcccgcggatcctcgaagcaaacgtgcgctcctttctgggagttagcagcaagggagtcaataagggaatccgtgacagcctgcgcgaccaccctgaccgtttcatggcctataacaacggcatcgtcgttgttgccgaccaagccaagctcgacaccgcggcagatggctcgacaggcattctctggctccagggcatgcagatagtcaatggcggccagactactgcatccatctacttcgccaagaaaaagcatccggacatcgatcttacgagtgtgcgggttccagccaagatcatcgtgctacgctccggacaggctgacgatgaggaactgattgccaatatttcgcggtatgcgaacagtcagaacgttgtcaaacagtccgatctttccgccaacaagcccttccatcgcgagctggaaaaactgtccatgcgtacttactgccccgatggcgttggacgctggttctacgagcgctcagctggcagctacaaggtgatgctggagaaggaagcaactaccccaacgcagaagaaaaagctccaggcgacaattcccccttatcgcaaactcaccaagcccgacctagccaagtttctttttgcttgggatcagaagccacatatcgtcagtctcggcagtcagaaaaacttccaggcattcatggatgagttgatggaaagggaaagtgctggtgagaacgtgataccggatcaagagcagtacaaacagatgatcgcgaaggcaatcctgttcaagtcagctcacaagatcatccgccccatgttcccggcattccaagccaacatcacgtcctacacagtttcgattctagcgctcaagctgggagcgaccctcaatctgaaccgcatctggcaagaacaatcgatatcaccgcaacttcatcgccagatcgcgatatgggcggaagaggtcaatgacgcacttcatcgaggagccggcgggaaaatgatctccgagtgggccaagaaaatcgaatgctggtggagagtaagggacacctcctactcttctgagctaggtgatatcaccgaattatcctaa

SEQ ID NO: 359810 - DNA, 408 bp, Pseudomonas aeruginosa
atgaaacctagagaagtacagacgtacagcgagttggcagaagcaatatgggcggaagccgaggcgcggtttggcagggatgaacacaccgaagcacgggagtggtatgagcagaccttctgtctatcggccttgggtgacgcgctagctctggcaagaggatggaaattggcaggtttggaggccatcgagtacgcgctcattcagcgtcactcctggctgcccaatcagattcgacagctctcgcctcgtgataagtggctatcactgcatgaggagttggcaggattgaagacggccgacgatgcgaatcaagcatggtgggatcgggaagcagcagagctaagcgcaggagactcgtcggagtgcgtgtggcatgcctatcctcggggactccccattccataa

SEQ ID NO: 359811 - DNA, 171 bp, Pseudomonas aeruginosa
atggcggttcaggcagaccacctggtcggtggcactcatcaccaggtgcaggtcgtgggagaccatcagcacaccgcagccgtagcggtcgcgcagtttgccgatgaggcggtagagttcggcctggccggcgacgtcgacgccctgcaccggctcgtcgagcaccagtag

SEQ ID NO: 359812 - DNA, 183 bp, Pseudomonas aeruginosa
gtgcaaggtcaaggcgtgctgttggggcaggtgggtgtcgccttcggtatcgtgcttgccggcgtatggttcgccacccaatggacagccgccgccctgggctatcagctacgcctcggctcagcctggttcgatcttcttggcacgccggtctatcaccgctggcgcctcttcgagtggtga

SEQ ID NO: 359813 - DNA, 441 bp, Pseudomonas aeruginosa
atgtccacacttgaagctactcctaatagccatctgcccgacgccgcagccaaagccatcaacgattgcgtgactgtgtatgagttgtcacagcgttttttcttcgaggccgcccataccctgaatcgcagtatcgagaccgaaggcagtctgcgcatccatgggcacacctacgaagcagaggttacagtcgcaggtcaaccagatgccgtctccggcatgctggtagatctcggctatttgcgcagcgaaattgcccgagtccgagagatgcttgatcaccgattccttgatgaggtccagggactgggatccgccaccatcgagaatctatgtacctttatccgcgcacaattggaagattcagtacctggcctatgtgcggttatgatcgagcgtcgggccagcggtgaccgctgtgttttgcgctggagaaggtaa

SEQ ID NO: 359814 - DNA, 1467 bp, Pseudomonas aeruginosa; identical to SEQ ID NO: 357512

SEQ ID NO: 359815 - DNA, 312 bp, Pseudomonas aeruginosa; identical to SEQ ID NO: 357513

SEQ ID NO: 359816 - DNA, 1281 bp, Pseudomonas aeruginosa
atgctctatctgcgcaccggcctgccaggcgctggcaagaccctgaacgcgattcgggaaatcgacattgaacaccagccggacccggacgacccgaccaagcggttgcacaaggacccggacaatccagacctgccgcccaggacgatctactactacggcatcccggatatgaaacttgaccggctcaagtcgaagtgggtcgagttcgatacgcccgaagagtggtacaacctgcctgatggctcggtgatcgtgattgacgaagcgcaacgggtgttcggcaatgatggctccagggcgcgcccggagaaagtcacgcgcttcgagacgcaccggcaccagggcctggacattcatctgattactcagcatcccagcctgctgtgcacgccagtgcgcaagttggtcggcaagcacatcaacttcattcggccctatggccgggagaaaggcatcttccggcatgagtacgagttctgcatcgacaacccggagcggcgcagcaacttcaagcaggcccaggaagagcgggtcacgctggataaggcgtatttcggcgtctacaagtcgtcgacggtgcacacgcacaagccgatcacgcccagctacatgaagaaaatcccgctgatcatcgctctgatgctgattccgatcggcgtgcttgttgggcttgtcgtgaccgcgatgcgtcaagggaatgaggagaaagaagcggctctggcgaggagccaagcggctgaggcgtcagcaggtgttctgcctggggctggaaatgctgttcaggcagcccccagggcctccagtgggccgaaatcggccgatgagttcatcggtgatatgtcgcccagggtgcccgatctggtggcctcggcgccgcgctatgacgatctgaacaagcccagggatttccctcggccggtgtgtgcggccagctcggacccgaatttgatcggcaaggctcctgagcgtcggattccgctgggcacgtacaatggccgggtgatggtctgccagtgctacacgcaacaggtcacgcggatgcacacgacgttcgagttctgcatggacgtggtgaacaacggctatttcgacgacacgcggatgccgccgacctatgccagcggcaacagcacgcgaggcttgatcaccagtccgtcagttgacccggcgacggcgattgagcgagggcgcgcagcgacatcgccgacgccgggggatgcgttctcgacacgagtaaccatcgtgccggacagcagcaggatgcccaggacgctatga

SEQ ID NO: 359817 - DNA, 507 bp, Pseudomonas aeruginosa; identical to SEQ ID NO: 325553

SEQ ID NO: 359818 - DNA, 222 bp, Pseudomonas aeruginosa
atgctgacgcatgagcccgcccctctcgagctgagccaggccgatgctgtcgccctggcggaattgattgacgccgagctgcgctcggcctcgagcccccgccccttctgcctgggctgcggtcgcgacatcgacaaggctcgcctggcggttttcgccaaggcccgccgctgctcgacctgcgccggcatcccgtgcctggccaggaggcgcgcgctatga

SEQ ID NO: 359819 - DNA, 654 bp, Pseudomonas aeruginosa; identical to SEQ ID NO: 350315

SEQ ID NO: 359820 - DNA, 312 bp, Pseudomonas aeruginosa; identical to SEQ ID NO: 350316

SEQ ID NO: 359821 - DNA, 150 bp, Pseudomonas aeruginosa; identical to SEQ ID NO: 350317

SEQ ID NO: 359822 - DNA, 291 bp, Pseudomonas aeruginosa; identical to SEQ ID NO: 350318

SEQ ID NO: 359823 - DNA, 924 bp, Pseudomonas aeruginosa; identical to SEQ ID NO: 350320

SEQ ID NO: 359824 - DNA, 327 bp, Pseudomonas aeruginosa; identical to SEQ ID NO: 350321

SEQ ID NO: 359825 - DNA, 288 bp, Pseudomonas aeruginosa; identical to SEQ ID NO: 350323

SEQ ID NO: 359826 - DNA, 279 bp, Pseudomonas aeruginosa; identical to SEQ ID NO: 350324

SEQ ID NO: 359827 - DNA, 1020 bp, Pseudomonas aeruginosa; identical to SEQ ID NO: 350325

SEQ ID NO: 359828 - DNA, 228 bp, Pseudomonas aeruginosa; identical to SEQ ID NO: 350326

SEQ ID NO: 359829 - DNA, 213 bp, Pseudomonas aeruginosa; identical to SEQ ID NO: 350327

SEQ ID NO: 359830 - DNA, 390 bp, Pseudomonas aeruginosa; identical to SEQ ID NO: 350328

SEQ ID NO: 359831 - DNA, 2568 bp, Pseudomonas aeruginosa; identical to SEQ ID NO: 350329

SEQ ID NO: 359832 - DNA, 129 bp, Pseudomonas aeruginosa; identical to SEQ ID NO: 350330

SEQ ID NO: 359833 - DNA, 567 bp, Pseudomonas aeruginosa; identical to SEQ ID NO: 350331

SEQ ID NO: 359834 - DNA, 1167 bp, Pseudomonas aeruginosa; identical to SEQ ID NO: 350333

SEQ ID NO: 359835 - DNA, 201 bp, Pseudomonas aeruginosa; identical to SEQ ID NO: 350334

SEQ ID NO: 359836 - DNA, 246 bp, Pseudomonas aeruginosa; identical to SEQ ID NO: 350336

SEQ ID NO: 359837 - DNA, 621 bp, Pseudomonas aeruginosa
gtgagcctagagactcagatcgccgccttggtaacggcggccaataacctgacggccgccgtcaatggaaaaatcggtgccatcgacgcgcggatggacacggctgaagccgagttcgacgagtggcgcaaccagaaggacgtcgagggctccttgggtgtttttggcacaattcgccgcaacatgttccaaggctttattcagtctctcggaggccccgctggcgtcgctgttaactcgggtttcgataccgtcgatctcggaacgaatttaaacgtttatgcgcacttcaaggtgccgctaaacgttaacgtcaattcagaaatgttctggttcaacatcaagggttacagctacggcgcggcggcgatcgtcgacgaaaccctggtcggttactgctacaaaccagaactggcgctgaaaagcgttgcgacgttcgggagcatgacgccagcagtctacaaggatgccaatggcaacgtggtgttgcggatcctgttgacgaatgcctactacacgacgctgaggatcgacaccatgcgcgttggcaatgggcggctgttcaacgtcggcgatttacagacgaagttgtcattggccgatactgtggtctggaactga

SEQ ID NO: 359838 - DNA, 663 bp, Pseudomonas aeruginosa; identical to SEQ ID NO: 350338

SEQ ID NO: 359839 - DNA, 312 bp, Pseudomonas aeruginosa; identical to SEQ ID NO: 350339

SEQ ID NO: 359840 - DNA, 348 bp, Pseudomonas aeruginosa; identical to SEQ ID NO: 350340

SEQ ID NO: 359841 - DNA, 531 bp, Pseudomonas aeruginosa; identical to SEQ ID NO: 350341

SEQ ID NO: 359842 - DNA, 645 bp, Pseudomonas aeruginosa; identical to SEQ ID NO: 350342

SEQ ID NO: 359843 - DNA, 990 bp, Pseudomonas aeruginosa; identical to SEQ ID NO: 350343

SEQ ID NO: 359844 - DNA, 333 bp, Pseudomonas aeruginosa; identical to SEQ ID NO: 350344

SEQ ID NO: 359845 - DNA, 612 bp, Pseudomonas aeruginosa; identical to SEQ ID NO: 350345

SEQ ID NO: 359846 - DNA, 531 bp, Pseudomonas aeruginosa
atgtcctacagaccgcttaaccaggtttccgacctgttcttcgccatcggcgacgccatccacgccgcgggcctgggcgtcgacgtggccaactacgacgaatgggacggcaaggtgcgccatgcctcggtgctgatcgagctcgagcgcaccaccccggccgtcaggcaaaacgacgggcgttacacgcacgccgtcaccgtaaccctgcacgccgttgtcggccggtggcgtaagcattcggcgctcgaggcggtcaacctggctacctgcctggagcgcctggccgatcgcaaccgttggggcttccacggtcgcaactgcgagcaaccctgcgagatgcgcagcggcccctcgatgttccagcgaggagccgacggctacgacgcctggggcgtcacgctcaagcaggtggtgacacctggcgagccgacgcccgagatcctgctcaacaccgcccccttggttgcgtacagctggcaggtcgacgacctagacaacccggagaactaccaccagctggagacctga

SEQ ID NO: 359847 - DNA, 525 bp, Pseudomonas aeruginosa; identical to SEQ ID NO: 350347

SEQ ID NO: 359848 - DNA, 381 bp, Pseudomonas aeruginosa; identical to SEQ ID NO: 350348

SEQ ID NO: 359849 - DNA, 414 bp, Pseudomonas aeruginosa; identical to SEQ ID NO: 350349

SEQ ID NO: 359850 - DNA, 1875 bp, Pseudomonas aeruginosa; identical to SEQ ID NO: 350350

SEQ ID NO: 359851 - DNA, 1425 bp, Pseudomonas aeruginosa; identical to SEQ ID NO: 350351

SEQ ID NO: 359852 - DNA, 516 bp, Pseudomonas aeruginosa; identical to SEQ ID NO: 350352

SEQ ID NO: 359853 - DNA, 2013 bp, Pseudomonas aeruginosa
atggtgcaggcgccgccgccgaggactagcgacgagtgggcgcgcgacaagcgggtgatgccgccgagcgcgccgatacctgggccgttcaaccccgacaccaacccctatatgcgcccggtggcctgggccttcgcgcagccgtgcttttcccgggtgaccttcgtcatgggcacccagatgggcaagtcggtgacgatggagaacattatcggccaccggctcgacgaggatccgacgccgtgcctgtacgtggcgccgacgaagccgctgattagcggcacggtcgagcccaagttcatggccatgtttaccgagtgcgagtcgctggcggcgaagtatgaggcgcgcagcacccagacggttaagtggctgggcggtaccaagttccgcttcgcctgggcaggctcgccgactgagctcgccgccgactctgctggcctggtgatggtcgacgaggtcgaccgcatcgtgaacacgggcgaaggcgacaccaccgaaatcatcgaggcgcggggtgatgcctacgccgactcgaaagtgggctacaccgccacccctacggcgggcaaggtcgagcgtcgcgcggatccgcgcagcgggctctggcattgggtagtcggcaagacccaggcgatcagctcgaagatctggcagctctggcagagcggcacgcgccacgagtgggcggtaccgtgcccgcattgcggcgagtacttcgtgccctggtcggatctgctgtggtggcccggcaagggctcgccagatgaatgcacacccgacgaggccttcaagcatgcgcgcctggcctgcccaggtaacggctgcatgatcgaggacaaatggcgcccctggatgaatcagcgcggcgtggcggtcgccccgggcgagtcggtcagcaaggccggcgagatccgcggcgaagccgacaccgcgggcttcacccactactcgatatgggtctccgggctgtgctcgtttgccgtcaagaagtcctacgggtttctggccaagaagctgctggcggcgcaagtctccggcgaccctgccaagctgcaggcggtctacaacaccggcttcggcgagtgctacgccgaggcgggcgatgcgcccagctgggaggaggttcgcgcccagtgctatggctacgcggccggcgagctgctgctcgagccgctgcggatcttctgcaccgtggacgtgcagaaaagccgcctggtgtacgtgatccgcgcctggtacgccggcctcggctcgatgctcctcgagcacggcgagctctggggcgagaccgaccaggacgccgtctgggagcagcttagcgagctgatcgacaccgactacgacgggcacccgatcacccagaccggcatcgacatcggttaccgcgacgaccaggtctaccgctttatcaacgagcacaagggcagggccatggctctgcgcggtcgcgaccgcctcgacaagccgttccgcaaggaaatggtcgaggtcgaccgcaagggcaagacccgcaagcgcggcgacgcccgctgggccttcgactcgcccctggccaagcgctgggtgcatagccgtttcggtcgccctgacacccgcccgggctggtggcttctgcatcagcaggtcaccgacgactactgcaagcagttggtcggcgaggagtggcgcgaaggggagggcaagttccaccaggtcggcgagaaccactacctggactgcgaggctatgcaatacatcatggccatgcacgccaagctgcaccgccgcaagacgggccagttgaccaaggcgcagctgcgcgaggcgatcaaggccggcccgctggccgatcgcctgcccgacgagcccgccccggtcgctgacgcagaccagaaggagccggccgaggatctgcagggagccgaggaggccgccaagccggtggccaagcccgcggcggcccgcaaggcagatgccccgaaggccaaggccaagtcccgcttcaacatcatcaggaagccccggcggtga

SEQ ID NO: 359854 - DNA, 570 bp, Pseudomonas aeruginosa
atggccaagatcatcagcaagaaagacctggccgacctgctgggcaagtcagagcgctggatctcgaagctgatcgaggagggcctgcccacatgcggcggcggtggtcgcggcgtggccgtgcagatcgacagccaggctgccatcgagtggctgatcgcccgtgaagttcggcgcgagctgggcgaggagggcgacgacgacgagggcgccggctcggcctcgaccgaggagcgcctgctcaagcgcgcccgacgcgagaagctgcagatcgagatcgacaaagagcgcgggcggcttgtgccgatcgacgccgttatcactcttgccaccagcattgcggcggtctacgcgacccagctcgactccctgccaagccggtgcgcctctgacctggcggtgctcgatgaccctgccacaatccgagctcgactacttgaggagacgcggcgaatccgcgcggctacagccgaccgcctcgaacatcgcgcacgcgccttcgctgcagaagctggcgagctcgattcacttcgtcgcgacgatggtgcaggcgccgccgccgaggactag

SEQ ID NO: 359855 - DNA, 573 bp, Pseudomonas aeruginosa; identical to SEQ ID NO: 350355

SEQ ID NO: 359856 - DNA, 507 bp, Pseudomonas aeruginosa; identical to SEQ ID NO: 350356

SEQ ID NO: 359857 - DNA, 240 bp, Pseudomonas aeruginosa; identical to SEQ ID NO: 350358

SEQ ID NO: 359858 - DNA, 222 bp, Pseudomonas aeruginosa; identical to SEQ ID NO: 359818

SEQ ID NO: 359859 - DNA, 759 bp, Pseudomonas aeruginosa
atggttcgccgctggggtatttccgctggcagtgcgggttcatcatcatcccgcttgcggctcatggaggttggcctccttcagctcttggccgcctcaggggcgttgtccatcgctacgtcgacgcaacttttgagcttgccgagcagctcgctcagttcctgcagctccgtaaagccgatgtcctgttggactgttgccagtggcaacacccagttcactggcggcgccgtggttgatccctgctggagtgttgccagtggcatcacccagctcgccggcggcaccaaggccggttccttgctgagtgattccagtggaatcacccagctcgccggcggcaccgaggtcggctcctgctggagtgttgccagtggcaacacccagttcgctggcggtgccgtggttgatccctggtggagtgattccagtggaatcacccagctcgccggcggcaccgaggtcggctcctgctggactgttgccagtggcaacacccagttcgctggcggtgccgtggttgatccctggtggagtgattccagtggaatcacccagctcgccggcggcaccgaggtcggctcctgctggagtgttgccagtggcaacacccagttcgctggcggtgccgtggttgatccctgctggagtgttgccagtggcatcacccagctcgccggcggcaccgaggtcggctcctgctggactgttgccagtggcaacacccagttcactggcggcgccgtggttgattcttag

SEQ ID NO: 359860 - DNA, 177 bp, Pseudomonas aeruginosa; identical to SEQ ID NO: 330351

SEQ ID NO: 359861 - DNA, 639 bp, Pseudomonas aeruginosa
atgatcgtcgcgctgctcaaccagaaaggcggcgtgggcaagaccacgctcgccacccacattgccggcgaactggcaatgcgcggccagcacgtcgtgctgctggacgccgacccgcaggggtcatcgctcgactggacacagcgcagaagccagcaaggcttgccacggcttttcagcgccgtgggcctcgcacgcgaaacgctgcatcaggaagccccggagctggcacgccgcgccgatcacgttgtcatcgacggcccgccgcgcatcgccgccttggcgcgctccgcgctgctggcggccgagcgcgtgctgatcccggtgcagcccagcccctacgacctgtgggccagcgccgagatggtggcgctgatccgcgaggcgcaagtctttcggcctgcgctgcgcgcggccttcgtcatcaaccggcgtgtcagtaccaccgtgatcgggcgcgaagcgcgccaggcgctcgccgatcagccgcttcctgcgctgcgcgcggaagtgcatcagcgcatcgtgttcgccgacagcgtggccgctggccggcttgcacgcgagacggcgccggacagcgccgccgcgcgcgaaatcaccgcgctcgtggacgaactgctgcggtggacgacatga

SEQ ID NO: 359862 - DNA, 357 bp, Pseudomonas aeruginosa
gtgatccagcaagctgagcaaatacgggcgcttgaacagcaactggtgcagcagcgcgaggaatacaacgacctggtgcacaagctcatggctgaacgcgaccagctcaagcgcgacctggctgccaagccaaggcgtcaccgcgatcaacctgccgccgaactgccagagagcgcctacgaggacgaacccgaggcgaagacctggacgctccagggacgcagcggaagcggcaagtggcagaacctggccgcaggcctggaccgcaaagaagccagccggcaactggatcgagtgatcgacaacaagctgctgggatccacgaagggccgccaataccgactgattgaagaataa

SEQ ID NO: 359863 - DNA, 297 bp, Pseudomonas aeruginosa
atgcagaagcgctccgtccaacctggccgcccggccggtgccaccaccttcgatgccgaactggcgcaagccttcggcgcggcggtgcgcgcgctacggacggaacgagggatcgcgcaggaatcgctggcacacctggccggcatcgagcgttcgcacatgggcaaggtcgagcgcggcgaacacatgcccacgctggcacttatcttcaagatcgccggcgcgctcgaatgcagcacggcggtattgatgagcgaggctgaaagccagctcgcagcagcagcggcccagccgtag

SEQ ID NO: 359864 - DNA, 945 bp, Pseudomonas aeruginosa
atgcggatgaggcaggacgataacctcgggacgtgccagcaggatcagctcgcggagatcggccagcagattgttccaggtcgacaggccgtcggtatcgctggccaggcgcagacggttgaactggcggaacggacggatatcggcgagatcggcctcacgggacggcaccacctcgcccgggttcgcctgcatggcaggcaattgcaggcagaaataacccagttgcacgcagcgctcggccggcaccccaccccacgccggcacggcctggctatcccaggcgcgcaggcggcccttcaggcgcgccgcagctattccgtcgaggcccatgcggcggtaatgctcggtttcgatctcgccggcggtcagggtcacgatccaggcctcgcgtgcctggctgtagaggccgaaggcggccagctcggcgtcgtcggcatgcggagcgatgaccatcacccgccggtcacggtagtcgggatggcgcgcacgccacagggtcggttcgccgaccagccggcaatgccggccgcgcaggcgaatccggccctcgcccagcggcccggccagtcccgtcaggttcaggtagcgcaagccgttcaccccacgttcgaaagcctgggcatcggcctccgcgccaccttccagcagcaccgagggttcgaggaaacgccccagccagccagcgcgcacgccgatgccaagcaccagcgtatcgccttcgcgcagctcgccgtcgactcgcagacggccatccgccaggcgtaccggcagcgactcgaccccttccgcgaaacggtagcggtagtcctcgcccggcgaatagaacaggtgatcggcgaaccaggcttcgtgggcgacccacagggccacgaggaggatcggcaacaaccaggggctgaccagcagaccgacggccagcaatgccagcagcgcaaccagtag

SEQ ID NO: 359865 - DNA, 678 bp, Pseudomonas aeruginosa
atgattcgctgcttatttcatttctacaacataaacccaacccacaaaggctcagtcaagatatgcacggcaattaaacttgcatgcatgttcttcgagaaacacaacccccaagagctgaatctagttaaaagtaccgcatatagtctttgcaaagacttcttctgcagcagcacatatttaaccctagccgagcaaaaaggcaaagtctgcctagaagcactaaacatactcgttctactcaaagagctaggcgaaaactacagacttcctagagagacactatctgaggtggctaattttggctccaccacctctctctcttattttgaaatcatcgtactcctatattacataggcgactcgaatctctaccacccgattaaaaagcggattatacaaagtataaaagaaaagcttaacgaccttagagacattaaagaatgctcagagaaaatacaccttttacttgacgtattaacctgcccctatcttaccgaagacctaagaggcggattgattaagaagctatacaaacagacacatacaaaagagcccacaaaggatcaactggccttgctgacaaagcaattcgctaactccatatggtttgttaagtggaaagactttgacttaatcaccgtccttgagaagaaagagttgctatcagggtattga

SEQ ID NO: 359866 - DNA, 384 bp, Pseudomonas aeruginosa; identical to SEQ ID NO: 337981

SEQ ID NO: 359867 - DNA, 342 bp, Pseudomonas aeruginosa
atgtcaggttcagatggcaagcttttccgagactacacagctggagctccgacagagatcgcctgtgacaggctctacctgcagactcatctcgcctctccgaaggccgatgtggttgagcagttcgatgtcggtgacatcctgcaaatgaccgtgggatacgccggtagtgagctttctgcactcgctgtctggaacggccagactgcaggaggcatcgcatcgccaaaagcgatccggttgatcacctgcatccagaacggtaccagctacgaggcgcgtgtgacggccaaagttggcggccaggtagcgctcaagatctctccgatcaagcaggagtga

SEQ ID NO: 359868 - DNA, 648 bp, Pseudomonas aeruginosa
atgtggagtgagttccagaaggaggttgatcgggcgaagcaccagcgcactcgtgagtacatcattactgatgatgagtacgtcaggcgggaccaatcgctggccggggttaggtcatccagcgcattcgtcagcgaccaggactcctatctggatgatctcgatttcaacaagatattctcggagaagcgcgcagagatcgatttgaaggctagccaggtcattcaagccatgccgaacctcgaagggtacgatgctgaaactctggctagattgaaaagcgtactcgttgaggcagagaccaagcgcgcggccgagattatcgacccgaacctcgtggctaagcgccctgagattgcgaggaagcagcttcgagagatcctgaccaaaaaggcccaggatgaggtggctaccctcttgagcgatttgggcattcctgaaaaatcgtcgacgctttatcggaaattcgcgcagattttgccgatgattcagtccaatacgccgaatgacggtatactggttagctttatcaacacgaagcttgcgaagaagtttggtagggttgcggaccgtgacactggctcccttactaaatcaatcgagcatgttgccgtgatcatggtagagctgagggggatgttgagatga

SEQ ID NO: 359869 - DNA, 342 bp, Pseudomonas aeruginosa; identical to SEQ ID NO: 338967

SEQ ID NO: 359870 - DNA, 993 bp, Pseudomonas aeruginosa
atgaagcgtttcatccagggcgaatgtcgaggtcaaaccacgctactgcccgagagcctggatgactacgtcgcggacaccaacccggttcgagtagtcgatgtgttcgtcgatgaacttgacctcggtaggctgggcttcgacggtatcgtcccggcagaaaccggtcgccccgcttaccatcccagcgttctgctgaagctctatatctacggctacctcaatcgcatccaatccagtcgccggcttgagcgtgaggctcagcgcaacgtcgaattgatgtggctgatcggacgtctgacaccggacttcaagaccatcgccaattttcgcaaggacaacggcaaggccatccgcggcgtctgccgacagttcgtggtgctgtgccagcaactcggtttgttcgccgaagcgctggtggccatcgacggcagcaagttcaaggcagtcaacaatcgtgaccgtaacttcaccagtgccaagctgaaacgtcggatggaggagatcgagtccagcatcagccgctacctcactgcgctggacactgcagatcgtcaggagcctgccgttgctcaggtcaaagccgaacgcctccgcgacaagatcgagaccttgaaagccaagatgcaggagctcaaggaaatcgaggttcagctcaacgaaacaccggataaacagctctcgctgaccgatcccgacgcccgttcaatgaagacgcgtggcacgggaatggtcggctacaacgtgcaggcagcagtcgacgcgacgcaccacctgatcgtgacccacgaggtcacgaacgacggcgtcgatcgagaccaactgagctcgatggccaagcaagcgcgagcagccatgggtgtcgaggcactctcagcggtcgccgacagagggtatttcaaaggcgaagaaatcctggcgtgccaggaagctggaatcactgttctcgtacccaagacactgacttcgggggcgacagcggcggcccgatga

SEQ ID NO: 359871 - DNA, 144 bp, Pseudomonas aeruginosa
atgacgctgatccagtcagcccgcctgaacgggcacgatccgtacgcctacctgaaggacgtgctcacgcgcctgccgacgcagaaggccagcgccctggccgagctgctgccgcacaactgggtgcccgccggcaaggtgtga

SEQ ID NO: 359872 - DNA, 2478 bp, Pseudomonas aeruginosa
atgattttaaatttcgacaaactcaatgccggcacggcgtcgaagcagatagatccgcgcaaaatattcaccacgttgaagcgagatgctcggtttcgacgccctctggatgaacaatctgacatcctggacgcttggttcgcgcgaagagcagcacgcgacctgacactgaagatgaacaccggtggcggaaagaccgtggtcggccttctgtgtcttcaaagctcgctcaatgaaaacatcaagcctgcggtctacataacccccgacagttttctggtggcgcaggttctcgcagaagcagagtctctggggattgcagcaactgatgacgagaaagatccggacttcatcgccggtcgagccatcctggtggccaacgttcataagctgttcaatggccgttcggtattcggcgttggcgaacgcaagatccctatcggatgcattgtgattgacgatgcccatgcatgcctgggggttgtgcacgaccagttctgcataaagtcgaaggtcgacagcccggtgtatgacggtctgctagagctgtttgaggaagacttgaagactcaatctccgtcgggcctgctcgacgtgaaggcgcaagatgcgtctgtcgtgatgaccgtcccgtactgggcatggcaggaccacgaagatgaagtcctcgcgttgttgcatgcccaccgtagcagcaaagagctggagtggaactggccattgctgagtgactccatcccattgtgtacatgtgtcttcggtggtggccgactcgaaattgccccacgctttgtaccaatcgaccggattccagcattcgactcggccaagcgacgtatctacatgacggcaacccttgccgatgacacgattctggtcaaccacttcaaggccgacgcagccgaggttgcacagccgatcagacccaaaggcggcggtgacatcggggatcgaatgatcctcgcaccgcaagaaatcaatcctgattacaccgttgaacagatcaaagagctggtctcggaaattgccgaagacctgaacgttgtggtcattgtaccttcgaagccgagagctgagttttggggcgatgtggccgcccagactctggacaaagacagcattcaaaatggcgtggagaagctgaaggatggccatgtcgggctgacagtgcttatcaacaagtacgacggcatcgaccttccaggcaaagcgtgcgagctgctcgtgattgacggactgcccgaggtctatggtttgggcgaacggcttgagatgctgttgctcgacgggacaaagaggcaattagtacgtcaggtccaacgcatcgagcaagggatggggcgcggtgtcagatcaagcgatgaccattgcgtcgtgctcctgctcggtggaaggctgactcaacggcttcatgagcctgatgccgaggaaatgttttcctcagcgactcgcgcccagatcgcccttggtaaagaggtcgcagcccagattcgcggaaaatccatcgacgaactgaagcctattttggacttgtgccttaaacaggatgacgaatgggtcagggccggacgtaatgcggtcgtgaatgcggccccagcgatgggagggcatctggacgacaatcaggtcatgcttcgggccgccttcgatgcagtcagaatcgataggtatgacgtcgctgccgcgaaagcccagaaggccgtcaacggtactgcagaacccaaattcaagggttacctgatgcagcaacttgccgaatacaccaacctcacagaccctgcgggagctcaagagatacagttggctgctctgggccacaattcgcgtctgctgaaacctattgccggtgcaacctatacgaagctcagtgcaccggtccttggtcaagccaaggcagcgatagaattcatgaaccagttcctagagggcaatgacctcgtgatctgggtcaatgggctgctcgacgacctggagtggggtgaggaaggctccaaacgatttgaagccgcaatggctgcgctgggaagctttttgggctttggctcgcagcgacctgaggatcagattggccgcggccctgacaacctctgggcgctcggtgggctcaattacttcgtgatcgaatgtaagagcggggctgtctcagcgccaaagatctcaaaaggtgacactaaccaactcaacgggtcgatcatttggttcaacgataaatacgacaagacctgcaccatgacgcccatcatggttcaccccaagaccgtctttgagcacgccgcgtcccctcataaggacatcagaatcatacaccggacaggcttgaagaatcttcgagacgcagttcgggcttacgcggtgtcgctatcaactaccggtggctttaccgacgccaggatggtcgagaagcagcttctccaccacaagctctcggttgaaacaattcttgcgctctgtactgtcagccaaaattcaaaatcctga

SEQ ID NO: 359873 - DNA, 813 bp, Pseudomonas aeruginosa
atggatatagcacgctgtactttagacaaccgaaactacgacatccctaaatttgaagctctaggggatagagcgatagatgaatatcggagatatttggtttgcccagagtgtaatggtccaggcttctataggaaagagtcaagaagcgggcaagcagcatgctttggggctcgccctcatgaagctaattgctctatggctgcaggtgagccaagaagagcaggagggcttggtccaggtcaagatgaatttattaatcctggagagcgtatagaagttgacttcgcttacggggcgcatgagaacgttaaccctgatcctgctgagccaggcaatccaaacggacacggaggcagacatgttggtcgcggcgggagaaggaacgcagtattacatcggagacttagcactctgctacgcaatctaatatatagcgaagactttcgtcattcagatcagatcatcgcaattgcagaaggcgaatttagagtaagagacttctttgttgaattctccaatattgaaaataatgatattggccattacttggggtgctggggatttatttctgatgccggcttatcagctggagagtcgccaagtctctggttgaatagtggtggacgcgatgacgtaagcgttgttgttgacggcaatttggccggagaatttaaaaggcgcttcccttttgatgacttagaggactttgccgggacttatgcacttgtattttcagaggtgaaacaatctaggaacgggaagatttacttggcagttaatgatatttcaaaaataaccattagctattga

SEQ ID NO: 359874 - DNA, 1287 bp, Pseudomonas aeruginosa
atggccgcggagctgaccagccgactgcttcagcaggacagaattgacctggtgctgtgctttgcgccgtcctgccaggtcgtggagggttttcgttcgactttttcggaagtgctaggcagacgtctcgatggccagatgggtgccgtgggggcggcctatacctatcaggccatggaataccgtgatgagggattctggcagcttcttgatgactaccgggtgcttgtggtcttcgatgaaatccaccattgcgccggccacgatccgctcctcagcaatgcctgggggcagcagatactgcaccggatacaggatcgcgctgtcttcacgttggccctgtctggcacgccctggcgttcggacgacaaggccattgccttggctcgctattcgtcgcccgaagggcatttgatctgcgattaccgctatggcttgaaagacgccattgccgacggcgtgtgccgatcccctcgcattgtgttgctcgataatcagaaggtgaaactcactgaagaacttggcgcggatagctccgtcaggctgtttcccagcatcgccaagcttttgggggagtcacctgtcacctatgaggaactgctgcgccatgacgacgtgatcaatccaatcctcgaccttggctacagcaagctcaacgagctacgccagatcaagcctgatgccgccggcttggtggtggctaccgacatcgaacacgctcagcaaatagcccaggctctggaaacaatgggtgaagagtgccgtatcgtgaccaacaaaaccccggatgcgcagcaagtgatcaatgcattccgcagcaacacctgccgctggattgtcgccgtaggaatgatcagcgaaggcaccgacattccacgcctgcaagtgtgctgctatctcagccgtatccgcaccgaactgcattaccggcaagtgctgggacgggtactgcgacgcacaggtgaatcggatgaccaggcttggctattcatgctggcagaaccgaagcttcagggctttgcggagcgaattgcagatgacttgccggatgacctggccgttttgagagatgtgcagatgcctggatttaatccagactcaaggcctgaaccgatgggtgcttcgggccatgtcaagggtatcggcgatgctgggttaggtggcgcagaacctggtattgggtcgcaggctacgaacatcatttcgctgggtggctttgcaaatgagcccgcttaccaggtcagcttttcccagcattaccggcagcagctactggcttgtttctga

SEQ ID NO: 359875 - DNA, 1344 bp, Pseudomonas aeruginosa
gtgagtgttctggaactcacgccgccgcactccgtcgaggcggagcaaggggtactcggcggtctgatgctggacaacgcggcatgggacattgtcggcgatcacctgcagaaggaggacttcttccggcatgaacatcggctgatcttcaccgccatcagcgagttggccgcgaaggacgccccgtttgacgtcgtgacggtgtcggaagcgatcgaagaccttccagaagccggtgggctggcctacctcggccagctcgctgacaacacgccctccgtggccaatatcgaggcttacgcgcagatcgttcgcgatcgggcgcacctgcggcagttgatgtctctcgggcaccactgcaccagaaccgcctcgaaccaccaggcgaatccctgtgaggttcaggaggagatcgagcagaagctgttcgccctcggccaagatcagcacaagtccgactttgtcgatatcaacaagggcctcgcgaagatcgtcgacaccatcgattaccgcttcaacaacaacgtgacggtaacgggggtcccgacaggcctgaaggatctcgacgagctctccggcggactacagaagtcggatctcatcatcgtcggtgcccgtccctcgatgggcaaaacgtcgtttgccctcaacttgatcgacgccgcgctgcagagcgaccaacagaagtctgtccaggtttacagcatggaaatgccagcagagcagctgctgttcaggcttgctgccctgctcggccaccttgaccttggcaagctgatgaagggccaactgcaagaggaggattggcccaggctgaccgtcgcgatccagcgcataaacgactatggcagccgactggtcatcaacgaccagggcaacctgacgccgacagagctgcgcgccaaggttcgccgtgcagccaggaagtacggccaccccgtactgatcctggtcgactacctgcagctgatgcgctgcccaggcctggaaaaccgagccaccgagatctcggagatctcccgctcgctgaaagcactggccaaggagatggattgccccgtcgtggccctgtcccagctcaatcgcagcctggagaaccggccgaacaagcgaccgaacaacgcagacctgcgtgagagcggcgcaatcgagcaggacgcggacgtgatcatgttcgtgtaccgcgacgaggtctaccaccccaacaccgaggccaagggcatcgccgaaatcatcatcggcaagtaccgcaacggcccgatcggcaccgtccgcgccgccttcatcgccaaccagacccgcttcgccgaccttgcaccaacttggcagggagctcttgcatga

SEQ ID NO: 359876 - DNA, 756 bp, Pseudomonas aeruginosa
atgtcgaagtcgttgatcaatgaagcggtcctgacgcaggtgatcaaccacctgcgcaacggccagctcaggcgttgtgccgagatgggactgcggccggagatcctggcccagctccaacagcccgccgtcatgagcatcctgaccaataccccggtttcttgggtagacgtcagagtgaacatcgacgtcatggagaaaatcctggccacagccgagcgcagcgcgcaggaagagctgcagatcgaacgcgcactgaagctgggagccaccacaacgatgattcagagctttttcggtctgtcgccggaggacaccgccaccaagcgcttgatcctggagatccacccgcgccgcggtcgctggcggcaacttgacgaacagaccgaacgccagatttggttccgctgggagcacctgatgcaggaaaaccaggtccgcctcgaggacagcatggagttgctggacatcgcgatgatcctcaccgaggaagtcaacgccggagtcgaacaagacagtccagagttcatcagcctcgccatcgtttggtctctcatccagagctggttgaaagacagcctctaccaaccaaacaggaaagaacaggccaagcccgccaccctttacctggccaacgtcagcgctcacctcccctcgcctacggctcacccgccacagagcccccgcttggagattgagtctgcgcagcagcaactcctcaacctggttcagtccgaaggcgatacgacaccatga

SEQ ID NO: 359877 - DNA, 1158 bp, Pseudomonas aeruginosa
atgctggatgccgttgagatactgcttccagccattccaagcatgctgtactcgggcctgggagttgatcgtgtctctcgcattctctcactgcgcaaggcctctctgagctgctggaaacgcctttactccggcgagggtatcgacttcgagatgctgttccaggacaccctggcgatcttcgacagtagccctgacgagttcattttcgagcgtttccaggacgaactcatcgaccagatgaagcgtcccttgggccttcgctatgatcaaatcctgctcgagatcaccaacggtcagcaggagcagcgccgcggcactctggtcgacctgcccgcacctgccgcaccacctggaatcccagccgtagggcaggaaagtcctgctgcgtcgactactgaacaagcacaatcacagagccccgctgccggcctccaaacgtccaagatcaatagcctcccgggtaatccctctaccccgccagctccgccactacctgtacaacagcagcaactgaccgacgaggagcgtgctgagctcttggcaggtcatatcgtgagcccggtatccaccaagatccagcagactcgccaacggctggccagtcttgagggtgaacatctgcctgtcttcgaggaaacagctctgcaggcaatcccagtgcaagtcggcggcctgcacccgatcaccgatctctggtacatcgagcggtcgatcaatacccctgagattctgcgaaaacacatcgctgacttggtggaagaaattgcctttatcgtcggcgcccccggaacgatcgagaggattcaaggtggtgtgggctactcgtaccgggagccagcagaagattgcgaactttctgaggcagccctgcacctgatcaccttgtttcagtctctcagtggccaggtccaggtaatcctggacaaggtcgactcgcaaacttgtcgtgatgctctgggtgaattccagttctcagctggcctcgctcagctgctgctgggccaacccaccacaggcgatcagccatccagccaggcaggccgtctcaatgacgaagccctggtgaaactgttccggataattcgtcttgcccgacggctggttgaccttgagctgctgccggccgcctccgagcaagcagctaccgaccagtga

SEQ ID NO: 359878 - DNA, 342 bp, Pseudomonas aeruginosa
atgaaggcacacgccaacaaaggttttgccgcccgggttggttatgctctgggcacgcttgtgcgcttctgcctacatgatcgtcggcctgtcgcgcgctgggccaagcgagtcagcctgttggtggtgctgctagttgtgcttgtccacaactttacctggctggccagcgtctcactgtcgttgctgtgtatggggctggtaggctgggctttagtaagaagtgatatgaagttaatgtcggccgaaaataagataagcttatttgatcgcgagaatggatatcgtgatggcctatctggctatggtcattatataaatgggatgcgtgttgatgactga

SEQ ID NO: 359879 - DNA, 1035 bp, Pseudomonas aeruginosa
atgcagccgggtaagatcgcctcgcgcgaaaccatcgccaaggcactcaaggtccttcggttgacacgctggctcagtctcggccgtcgcctgcgcaacgacctcaacgggcaagtacagggcaacgtctacatcctccacgacgaaccggtatccccggcagaagccctggagctggaccccgactacatgcagttgctgagccagtccaccggcgacagcaaccgagccatacgcgaaatcggccaggtcacatggcgggagttcagggatgacccggacgttggtcgccggctcccaacccatctggagaagctcgagggacgcttgaaccaccagcaatgggctatcgatagtcagctcgaagcagatccagcggcagagttcggcatccgaactctgcccgatctacctcattcaaccccgagttcggatgccgaactcagtgaaatcagcggcaagcaatgcgctttaccgctgagttcggatgccgaacccagacagaatccgccgagtacacccttggttcggatgccgaactcatatagtacgtatacatacaaacaagattctgtatttaaaaaaccagtacaaccgcgaacacgcgaggaagcacatccgaactggcaggatctcctgaacggactggagggcgagcaacggttccaggcggtaagcgcgctccgacgggtgtccgaggagctgcgtcatccggtcatcgagcagtggcggcaccgatgtgcgggaggaactgtcggtaaccccttcggctacctcatgacgctcatccagcgtgcagtccagggaaagttcaacgcttcttgggctccggaagaaccggctgaacgaaccatcccagcagcggaacgccccagtcgtgcttcggcaccaccaagccccacaacgcctaaacagcaccaagttcagccgaagggtgatacccggacagggagcgaggtcctcagccggctcaaggacctcattcggcccaggcacggatcgagcgtgccatccgagcggggtgatgagccatga

SEQ ID NO: 359880 - DNA, 585 bp, Pseudomonas aeruginosa
atggtcatcgtggtgctggcctactgcgtctgggaagcccgcaaggacctctggatccacattccgcccgacttgcgttcagggagcacccggttgtggtgggacattccgccagagagtgtctatgcattcggtctctacatcttccagcaggtgcaacgttggcccaaggacggcgaggtggactacaagggaaacctgttccgctacgccgcctacctcactccctcctgcaaagtcttcctggagaaagacttcgagtttcgtcgtaacgccggcgagctcaggggacgcgagcgcaccacctcggaaatccccggtcgaggcattggcgagagcaatggccgcgtgatccagcactcgatcaatgactggaccgtcaacctggacatggacagcacggagtattacgccggcgagaaaatcaagcgcgcgctggcccgctacccgttgcacgtcatccgcgccgacgtcgacccagagaccaatcccttcggcctgcagtgggactgctactccgatacgcctcaacgtatcgaactcgaggagccggtcgcccccaccaagcgggagggaggtctatga

SEQ ID NO: 359881 - DNA, 186 bp, Pseudomonas aeruginosa
atgagcatttcccagcacctggtcacccaccagtgcatgaattgcggtcagcaccaccctctccacctggtgcgccaaatcctccctgcagagaacaccccggaaggtgaagccgaggtcttggtctgtccctgctgcgggagctacgacgtccatcagttggaggctgtccgtgatgaacactga

SEQ ID NO: 359882 - DNA, 306 bp, Pseudomonas aeruginosa
gtgctgacattcgtcgtgcgcctggtgatcctggtcatgacgatcccgttgttcctgatggccgcgttcaccggcctggtggacggcctggtgcgccgggacctgcgcaagttcggcgccggccgggagtccagctacctctaccacaaggcgcgcggcagcatcattccgctagcggtcgtcccttggaccctctacctggcgatccccatcagcatcaatcccctgctcatcctgctgccctgcgccgcgctgctcggtgcagcggtatgcatcacagcatccaccttcaagaaatacctctag

SEQ ID NO: 359883 - DNA, 186 bp, Pseudomonas aeruginosa
atgaacacttcccagcacctggtcacccaccagtgcatgaattgtggtcagcaccagccataccacctggtgcgccagattcttcccgccgagaacaccccagaaggagaagccgaggtgttggtctgcccctgctgcgggagctacgacgtccatcagttggaggctgtctttgatgaacactga

SEQ ID NO: 359884 - DNA, 228 bp, Pseudomonas aeruginosa
atgcgtcccatgctcggcgtcagcatcgagttgatgctgttctcgatgtcgctgaggatcgatgtcttcagctccgaactggtggtctgcttgctgccggagtcgccgctgatgccggagctgccattctgtccggtggatccggagccgtccccgctgatgccggcggccgtcgtcataccggaacgcacggtggagtccaccgtgttgacgtcgtcaaaggcgtag

SEQ ID NO: 359885 - DNA, 663 bp, Pseudomonas aeruginosa
atgactgaaagcagccgcaagaaatcggcaacgacaacgcgcaagaagccctcgtcatccgtcagcgtacgggcgacgaagaaagccaaagcagaagtgggaacgggcgataccgacctgaacaaggttcagcgacagaagcgccagagtaaggcgcgaaccaacatgctcaaaatgcgcgcccagctatggccggagctagatgtctcgatgctttgggataggaacatcaaggatggcttcagcactatccccaggacgctctcgctaatcgtcaatatcatcgatgatctggcaaagcgccacacagggaagtcgatccccgcaggaaaagcctatttcggcctgtggtgtcgtgtttgggatgaaaacatgctcgtcatagacaacgaggcatcttacgcaatcgaggctggatacatcggggagcggaatgtaaccacgtggcgtcagcagatgaaggtgctggacgatttgggattcatttctgctgttcgcggcgcttacggcccctacaacaatgtcctgatgtttaacccgtaccttgttctcagaaggcttcgcagcatgattcctgttgaaacttaccaggtactgctgcgccgggctatggagataggggcggacgcagacctaatcgagatcacgggagaggggcagtga

SEQ ID NO: 359886 - DNA, 2010 bp, Pseudomonas aeruginosa
atgcgtttgagtaaagtacgagttcaaaactatcggagcattattgatactggcgagtttgaagtcgaaagacttaaaacaatactggttggctcaaatgaagccggcaaaactgccattctgcaagcaatccagcagataaatgctccagagggagtcaagaagttcgatgctcttcgcgattacccaagggctctctactcccaaattaccaggggcgaggtagacgctgaagatgtagaggtggtgactgcaaccttcgagctagagcaggccgacttggatcgtgcccctgaaaaaatcaaagggcagccacttagctacacctatacccgctacttaggaaacaacgcgtcgcacagcttaaatggggctagatccccagtttacaacgacatcaaaaatgacctgataaggctaacggctcatttggatcgagcgaccgtcgagggtgcagcgaagatccacaccgatagccttaataagataactagtacttggggccaataccgatctctgtcgagcgatgctgtggctttgaaggcttggctggaagaaaagcttccacacgttgatgagggcgacgcgaaagaggttgcccgctgggagggcttagtcgccaccctcgatcacgcaactgaaatgcacggatttctttcgtatctcagcaagagcaggcctgtatttgtactctacagcaactacttccgagtcaagccgatcatccatttgggtaacctcgctacgcgattggcaaatggcagtctggatgacgatgcctacgattacggcaacagctgcctactgaagctacttgggtttaccgcccaagaattatccgatctggggcgaacgtctgacccaagctacaatacaaccgatatcgacaactttcgagaaaagctcgatcaacgtagctatcagctaaatgctgccagcgttgaattgacgcagcagatcatcaaggtctggaatcctgacgataacaaggcagaggccagtaggctcaggctgaccgcagatggtcagtacctaaaggtcgttgtagaggacaacgtcggcgttgaagtggagctcgatcaacgttccgaaggcttccagtggctggtctcattcttcatcgtgtttttcgctgaggccaaaggcaaacacaagaacaccgttctgctccttgatgaaccaggtgtgagtcttcacgcgttgaagcagcgggagttcagaaagaccatctcgttgctcgcggatgaaaaccagacgatctactcgactcactcgccatttctcgtggggccagatgaactcgatttggtcagggtggtggagctgacagatcgaactgtcggcaccaaggtacacacgaccgtatcgtccagcgatcccgcagcgctgttgccactgcaagaagcgctcggctacgacctcgcgcagagcctttttgccaatcagcgcaacttgatcctagagggcctgactgactattggtacgtagaggccatttccagcctactcaaggaagggggaaatgcctcgctgcacgacaagatcgcactggtgccagccaacaccgccagcaaggtggtgtacttcgcgaccatattgacctcgcacaacctcaaggtggcggcgcttctcgactcggacaatgcaggtgatcaggcagcccagcaggaagttttggtacaccgacttagcaacaaacgaatcctccgcacttcagactacgcagtgcctaagattgagcacgctgagatcgaagatctactgcgcgaaacgttggccgcaatcgctaaggctgacttgggctgggatatcacctcggcacttggcaatgccgccgacaagcccattgtcgatatcttccaaaaacaaatcggcaaggacttctcgaagtacaagctggccaaggccttcctcaggtggtcgcgcgaccacaccgcgaacgaactgaaggctcatgagatggaaggctgcgcgaacctcatcaacgccatcaacgctgccctgaagtga

SEQ ID NO: 359887 - DNA, 486 bp, Pseudomonas aeruginosa
gtgcacgactgccgcatcacccagatctacgaaggcaccaacggcatccaggcgctagacctgatggtccgcaagatcgtcggcagcggcggcgcctacgccaagctgttcaccgacgagatccgcgccttcaccgcttcggcgtccgctgagctggccgagttcaccggcccgctgaacgccgccgtgcagaacctggacgaactgaccgcctgggtcctggaccgcgccaagggcaacccgaacgagatcggcgcggcctcggtcgagtacctgcacgccttcggctacaccgcctacgcctacatgtgggcgctgatggcgcgcgcctcgctgggcaaggaaggccaggacgagttctacgccagcaagctcggcaccgcgcgcttctacttcgcccgcctgctgccgcgcatccactccctgaccgcctcggtgaaggccggcagcgagtcgctgtacctgctggacgccgcgcagttctga

SEQ ID NO: 359888 - DNA, 1359 bp, Pseudomonas aeruginosa
atgcacagcacgcatagcgtaggacatgccgcttctggcggctcggagaatttgcaggcggcaccgccgccgctacagcacggccagcacgcaggccaagggggtagcactggcgcggtgccgatcgcggccccagccgccccgcagcccgattggttcgaccgcgttctgcaacaggcagcgcaaccccacagcgacaaaagcgcgctcgtgacgatcacgcaatcgttcatcaacgcaatcgagcaacaagcgcagcaggtgcaggccgaagcgttcaagctcagtgggccaatctcgcagcacgaatgggatcacgcgcgctcaacgcagccagcagtgatcgacaaatggttctatgaggatgtgggcgtcttcgttgctccgggcggcactggcaagacgacgctcctgctgttccaagtgattcaccttgtgctgggtcttgagctattcggctacgaggtaatcaaccccggcacggtcatcatattgaccgccgaggacagccgcgaaacgctggtcgcgcgcctccgctacatgtgcgcccagcttcagctatcccctgctgacgtgcgcaaggtgcaggaaggcgtcatcatcaccgacgtgtcgggcaagggtatcaagctcgccgcaatcgaaagtgatgtggtcgtgccgagcaagttccttgaccgcttcatcgtcgatgcgtctgaggttcatccgtcgctaatcatcattgacccgatggtgtcgtttggcgttggcgagagccgcatcaacgattccgagcaggccatgattgacgcggcacgacgcattcggaacatgctgcgttgcgcagtgctctatgttcaccacaccggcaaggccaacgcccgcgacaagacgctcgaccagtacagcgggcgcggcggtagcgcactggcggacggtgcccggatggtgcatgtgctccagcgactcgaccctgaggcatggacggagcagaccggcgacacgcttgaaggtgaagaatccgggttcgtactggcgcgcccgaaaatgacatggtgcccgcctcagccgaatatctacctgaaacggcagcactaccttttcgagcggttctaccctgttgaatcgacggaaggcgctgggctggtgatcgacagggacgccgacaaggtcttccagttcgtgaaggacgaatacctgaaaggcaagaagcacagccagaacacgttgattcagtcgaagctgctttcgcaggcgcgcatccgtgccgcagtggagcggctgaaggctgacaaccggctaattgacgagaagataaccacaggtgggcagggaggcgcccggtcgtttttgcgcccgatggaactcccgcaatag

SEQ ID NO: 359889 - DNA, 486 bp, Pseudomonas aeruginosa
atggaagccaagacctacacgaaccggaacaacgcccgccgcgctggtgttgccgcaggggtgcccgctgaactggtggaaatcaccgtgcataagaacggtgacgaagtacgcttcggctggaaggcgaagcagccgcccgcaagcgctgtgcagggtgcggccaataccccagcggcgaccgctaccgaaagcgagcctgtagcgcccgctgtcgccgtgcagggggtgaccacaagcaaggcgaagaaggcagccgccccgaaggtggaacgcatcgagcagaacggcgtgaagcgtccaaaggatggcgggctgtgcgctgccgtctgggcatggctggatgcgaacccgggcgcaacgatcaaggacgcgaaggcggcggcaccggggaacggctggaacgagaacaacgtggcctgcgagttctacgcttggcgcaagttcaacgggatcagcaggcagaccggtagtgacgcgcgctaa

SEQ ID NO: 359890 - DNA, 648 bp, Pseudomonas aeruginosa
atggctaacaagatttacagcaccgacaacacgaaatatacgcagaaaactgtaagtcagagaattgaagctctgttcttgaacaatcttggcaaggttgtaacgcgccaacagattattgctgctgccactgacccgataacgaacaaagagccggaaaactggcatcagcggctctccgaactgcgcacggacaagggctacacgatcctttcttggcgagacagcaaaagccttgccaatcaagaatatttaatgccagacgcaaatcggcgagcaacggcagcaaagcgagtgctccccactgctgcatgctggggtgccgtcttgcagcgggcaaaccatcgctgcgaatggactgaggatggtcaaaagtgcggacttgccgagggtgagcaagaccccatcggaggcggcaccgtcaaactcactcctgaccatgtaacgccgcattccattaacccaaacaccgacacaactgatccgatgcaatggcaagccctttgcggtaggcatcaagttatgaagaaaaactactggtgttccagtagtggaaaaatcaatcttgtgggtatcttgcagtcagccagcaagccacagaaacaggaagccctgaaatttctcaagacttacttcggtgaggattga

SEQ ID NO: 359891 - DNA, 966 bp, Pseudomonas aeruginosa
atgagttttatgctgcctaggctggtgctgatgcacgctctgctagatgaatcgggggtggctgctatcagcattgatgactatgagtatgctcatctgaaaattcttctcgaccatgttttcggcgctgaaaatcatttgggcactttgattgttcataggagcaagaacggcaagggcagcaaggcgaatatcgctgtaagtcatgagcaagtgttgctttacggaaaaacaacaaaagcgaagattcacggactgccagagttagaccttgattcctactctaagcaggatgaacacggccgctataaggtcgatgggctattcagaaagaaaggcgaagcgagcaggcgggaggaccgccccaatatgtttttccctctgtattacgacgcctctggaaatgttttcacggaaaacgtggggggcaagctaaaggaggcgctgccgatcgatagcaagggagtggaacgacgctggttatggggtctagataaaacagcacaggagtcttggaagctatacgccagccccaagggcgtcatctacgtgaagaactacctcacggaagaaaagcgggtcaagattcgcagcctgtgggattctccgcgctacctgacggagcgtgccaccaatgagatcacggaaatctatggcgataaggtgtttgaaacgccaaagccgctgggcttgattgaggatttaatcaagtgctgcgctagcaaggacgccttaattctggactatttttgtgggacggcgaccacagcacatgcagcctacaatgtgaatcgtctcgatggtgggaagcgcaaagtagtcctagttgagcaggacgccgcgattagcaaagatcacattgcggcgctgaagggattccagcgcattgccgatatttctgagcggcgattggaagtcattgcgtcaagagatagcgactacacgtatcgagctcaagaggtctaa

SEQ ID NO: 359892 - DNA, 1272 bp, Pseudomonas aeruginosa
atgagtgggaataaaaaaaagccgttggtgccacggttgcggtttccggagtttctggctaactccccttgggagccaaaggagctagctcagctcctaacggcgatttcgaatggcattagcctgcctcagaacagttctgggcttggcctccgagtcacgcggattgaaacgattgccgacggaaagattaatctggaccgtgtcgggtatgtggattctccttcaaatgaaattgaagattatcgattgaaggcgggcgacattctgcttagcaatatcaatagcattacccatattggtaagtctgttttaatcaatgaggatcttgatgtttaccatggaatgaatctgctgcggctccaggtcgataccaagtcaaactaccctcaatttgtctatttctctattaatacaccagtggttcgtgggtccattcgcgagcgagcgaataaggccgtaaaccaagcgagcatcaaccagactgagttaggacgcactattattccgtcaccctcccgagtggagcaggagaaagtcgctgactgtctgtcctcgctggatgagctgatcacggcggaaacccaaaacctcgacaccctcaggatccacaaaaagggcctgatgcagcagcttttcccccgcgaaggcgaaactgtgccacagttgcggtttcctgagtttcgtaacttgggagagtggaaggagaaatccattagtgatttcggagatattattactggaagtacccctagtacggcacatccagagttctatgaaggtggcatcccattcgtctccccagctgacatttccgatctacgatgggtgaacgacacaaagaccactttgagtgcttgggggtttgaaaaaactcgtccaatcaaggcgaacagcattctgtttgtttgcattgggtcaaccatcgggaaagtgactcaaaatgctcgggattgcgcgactaatcagcagatcaattccgtaatcccaaattctgagcattcaagcggattcgtgtattacatcctcagcttgaacgcaaaacgcatcgccaaactcgcaggtattcaggctgttcctatcatcaacaagacccagttttcggcagtcagattgcttgtcccagaattttcagagcaagatcgtatcgccaaatgtttgtcttccctcgacgatttcattgccacccaaagccagaaagttgatgccctcataatttacaagaagggcctgatggaacagttatttcccgtcatgcccgaggtaaggtaa

SEQ ID NO: 359893 - DNA, 1074 bp, Pseudomonas aeruginosa
atgagtattgacgatattgcagagcagctaaaaaatctgggtgagaacattattctcatttatgcattcaatgccacaggaaaaaccaggttatcggtggcatacaagaatgcgactaaaaactctgatagtggtcaacacacaggcgtttactacaacgcgttcagcgaagacctttttgtctgggataatgacgaagacaatagtggtgcgaacataaagctaaatattttgcccagcagcttgaaccgcttccacagttttctgtatgagaacccggatgctgtcatggataaattggcgatgtattcgccaaaatttaattttaagctgaattcctacgaaaacattgaggacggaattgagtcgatcacttttgtcactaacgatgatgaagatgtgccgataaaaatctcgcgcggagaagagaggatttttgtttggtgctttttcttggctcttttggaagttgatggatggtccaatactcaggacgcacatattttcattgacgaccctgtatctagtcttgatgaacacaatatttacgtcaccgctgaaacagtttttcagcaaattgagcgccactatctcaagaaaaaaataataataacgacgcatcatataggactattttcaattttggtggatcgcttgaaaaaaggcgagaaaagcgataggtacaagaatttaaccaaggtttttttcctaaaaagcactgacaatgcatatgccttagggacgccaaggaatagtgtttttctatttcacttgcaccttcttcaaaggcttgaagaggctagtcgagaccagctttacacccatcatgtcgtcatgctgcgacaagcgcttgagaacatcgcctcattcttcgggagaggaaatattgggtacaccctcgctcaaataggcattgaagatcacgaaaatgctgctaacgttatcaactcactttcccataaagacgcttattactatcaaagcgatcttatgccgcccgcagttgaggcagtatttagagatgtcttcgctaagttgctggaaaaatacaaatttgcattgcagacgggataa

SEQ ID NO: 359894 - DNA, 1635 bp, Pseudomonas aeruginosa
atgactgaattcgaaaaacaaaggcttggcaaaaccctctgggccatcgccgatcagttgcgtggcgcgatgaatgcggacgacttccgcgattacatgctggcttttctcttccttcgctatctgtcggacaactacgaggcggcagctcggaaggagctggggtcggactatccgcagcagattgatggctcagtctctaccccgttacagctctggtacgaatgcaacttggacgatgtgccggaattcgagaagcagatgcgccgcaaggtgcattacgtgatcgaaccccaatacctgtggggtaacatcgccgagatggcacgcatgcagaacgcggagctgctcagcactttgcaagccggcttcaagtacatcgaagaggaatcttttgccagcaccttccgggggttgttttccgagatcaacctggcctccgacaaactgggaagagcctacccggaacgtaacgcgcgcttgtgcaagatcattgccaaaatcgccgagggcctgggccaattttccactgaccgagacaccctaggtgatgcctatgaatatctgatcggccaattcgcagcaggctccggcaagaaggccggcgagttctacacgccgcagcgtatttcagacattctgtcggccattgtcacgctggatagccaggaacctgccacgggcaagcgctcgcacctcgatagcgtactcgactttgcctgtggctcaggctccctgctgctcaacgtgcgacaccgcatggggccgcacggtatcagcaagatttacggacaagagaagaacatcaccacctacaacctggcgcgcatgaacatgctgctgcacgggatgaaggattctgagttcgacatcttccacggtgacaccctgctcaatgagtgggacatgctacgtgagaccaacccggccaagataccgaagttcgacgcagtagtggccaacccaccgttcagctaccgatgggagcctagcgaggcactaggcgaggacacccgctttaagaactatgggctggccccgaagtcggcagcagacttcgccttcttgctgcacggcttccacttcctgaagcaagacggcgtcatggccatcatcctgccccacggcgtgctgttccgcggcggagccgaggcacgtatccgcaccaagttgctgaaggacgggcacatagacacggtgatcggcctacccgccaacctgttcttctccaccggcatcccggtgtgcatcctggtgctgaagaagtgcaagaagccagacgatgtgttgttcatcaacgccgccgagcacttcgagaagggcaagcggcagaaccgactactcagaacagacgaaatgcctgatagtgaaatcgggcacatcgagaagatcatcgacacctatcagttccgcaaagaagagctccgctactcgcgccgagtaggaatggaagaaatcgaaaagaacgatttcaacctcaacatctcgcgttacgtaagcacggcgggaaccgaggaagagatcgatctggcggcagtgcatgccgaactgctcgccaccgagcagaagatcgccgatgccaagaaacatcacaaccagtatctagctgaactgggattgcctttacttccctga

SEQ ID NO: 359895 - DNA, 165 bp, Pseudomonas aeruginosa
atggtaggggacgccgcaaggaaaaacctcaagatgcaggacaaacgcgacagggaggctaatagaggcgtgcgtaagtccatgaaggaatgtattaagcccggaaatgttatcgatgatgacgtgaaagaatgcatggaaggattacgggtcaaagagtggtaa

SEQ ID NO: 359896 - DNA, 831 bp, Pseudomonas aeruginosa
atgcaactcgcatcccgtttcgcttcccgttccccctcgctgcgcagcgattacccgctgtccgatgaccagattcaccgcgtagccccatccatctttgcggacgccccgcacgaaagccgttcgcagcggtacgcctatatccccacggctgccgtgttgaccgagcttcgcaaggaagggtttcaacccttcatggtgacgcagacccgcgtgcgcgatgaaggcaagcgcgagcacaccaaacacatgctgcgcctgcgccacgccagccagatcaacggtgcggaggctaacgaaatcgtgctgctgaactcgcacgacggcaccagcagctatcagatgctggccggaatgttccggttcgtgtgcagcaatggccttgtgtgcggcgacaccgtggccgatgtgcgcgtgccccacaaaggcgatgtttccgggcatgtcatcgaaggcgcttacgaagtcttgcgcggcttcgaccgagtgaaggagtcccgcgatgccatgcgtgggaccacgctggacgaaggtgaagccgaagtgttcgcccgttccgcgctggcgctcaagtacgaccctaccgacagcaagcccgcgcccatcaccgaatcgcaaatcttgatgccgcgccggttcgatgaccgccgccccgacctgtggagcgtgttcaaccgcacgcaggagaacctgaccaagggcggattgcatggccgcagcgccaacggacgccgccagcaaacccgacctgtgcagggcattgattccgatgtgcgcctgaatcgcgccctttggatgctggccgatggcctgcgccagttgaaagcctga

SEQ ID NO: 359897 - DNA, 210 bp, Pseudomonas aeruginosa
atgacccgcaccatcaccagccgcccgcgcatggcggcgatctacaccccaggcacggtgcgcgcccgccgctggcacggcgatagcgacgtgcgcggctaccgcccgccctcgggctggacggcccgcgtcgacctcaccgacattcatcccatcacgggccgcgctttgcagcgcgccgtgtggtggatcatcgaaaccaaggaatga

SEQ ID NO: 359898 - DNA, 426 bp, Pseudomonas aeruginosa
atgggactcatcacgcgcatcgccgacaaaaccggcgcgcttggcagtgtcgtttccgcgatgggctgcgcagcctgctttcccgccatcgcgagcctgggtgcggccatcggcctaggcttcctgaaccagtacgaagggttgttcattcgtatcctgcttccggtgttcgccagcatcgcgcttctcgccaatgcaatcgcttggctcaatcaccggcagttgcgacggactgttttcggcctcagcggccctgtcctagtgttggcagcggtgtttttcatgcgggcatacggctggcggagtggctggttgctctacgttggcctggccttcatggtcggggtgtctatttgggattttgtctcgcctgcaaaccgccgctgcggcccggacggctgcgaaccgcctccccagcgcagataa

SEQ ID NO: 359899 - DNA, 276 bp, Pseudomonas aeruginosa
atgaaaaagatgcttgcttccctagctctcgccgttttcgttgcccccgtgttggccgccactcagaccgtcacgctagccgtgcctggcatgacctgcgcctcttgcccgatcactgtcaagcacgcgctttccaaggtcgagggcgtgagcaagaccgacgtgagtttcgacaagcgccaagccgtcgtcaccttcgacgatgccaagaccaacgtccagaagttgactaaggcgaccgaagacgcgggctatccgtccagcgtcaaacgctga

SEQ ID NO: 359900 - DNA, 351 bp, Pseudomonas aeruginosa
atgaacgctcccctcgtcaccgaggagcagcgcgccgcgctgctggagaacgggcggcgggtcgccgccggtgaaccgcacgacccattgccggtcgtgcggctgttcacccccgatgcgcacgccacctggctgctgacctcgctcgatcccactgacggcgacacggcctacggcctgatcgacctgggaatcagcatgcccgagttgggccacgtgaagctgtccgacctcgcttccatcgtcgggccgaacaagctgcccgtgatgcgggatcggtatttcaaagcggtgcgcccgctgtcggaatacctgcggctggcgcaggacaacggttccatcgtcgattga

SEQ ID NO: 359901 - DNA, 771 bp, Pseudomonas aeruginosa
atggtcgagcctcatcatgcggcgcactggtatcccaccgccgcttacctctacgttctgtggctggatgcgttcgcactggcctgggagtacctgcgccgccatcccgattaccggctcgactggctgcaccgtcatcgccggtcgcaggcggcacagcaggcggcgcaacgctggggcttgcgcctgctggaagacccggccctggatgcgcgcgacgcgcatccggcctggctacccggccacgccggcgtggtgcagctctatcccgatgccgacccaccgcaggatgccaccgccttcgagttctggcgcatccctggtcacaagcaactgatccacgatggcaagcggctggtgctgatcgcgcgcagccccggtcgatgcttgcgcttcgcgctggcccccggcctggaagacggcatggctgtcgcctatgcccagcgcggcggcgctgtcgcgcctgcgctcggccacgcgcccagcgccgtgcagaccagacccaggccgacaccggccgcgctattggagctgcacaccctgcaggcgctcgacgcgaccctgacgggtgcgtccttgcgcgacgtggccgaaggactgttcggtgccgatgccgtggccgccgactggcacgccgatggcgatttgcgcgcccgcgtgcgccgtttggtgcggcgtggcaatgcgttgatgcgcggcggctaccgccaactagcacaactgccgtcgcttgagaagggacgttttgaagggggcgcaaaacgaccctga

SEQ ID NO: 359902 - DNA, 588 bp, Pseudomonas aeruginosa
atgaccgccgtttccactgccggcaccgcgccgcgtcctcgctcgcgcctgcgcgctcgtattgtgctggcgggtctgtccgcctgcggcctcgctgcgctggcctgggcgtccttcgtgcatccgctgccgcgcctaatctacaacccgtccgacagtgtggcggtcggctggtatcgcgtcgatccgctgggccacggcaccagctcgctgccatgtccgttgtccgtgggcagcatcgtgctggtgccgctacccgccgaggctgccacgctcgctgcgcagcgcggctacttgccgacgcgcatcccgttgctcaagcgcgtaggcgcgatggcgccgcaagaggtgtgcatcgctgacggcaaagtccgcatcgacggcgtgccggtggccgccgtccgacctgccgaccggctggggcgcctgctgccatcctggcggcagtgccgccagcttcggcctggcgagctgttcttgctcagcgtgactaacccggcatcgttcgacagccgttattttgggccggtcagcgcagccgccgtgatcggcgttgcgcgcccggtctggctggagtctcgcccatga

SEQ ID NO: 359903 - DNA, 1080 bp, Pseudomonas aeruginosa
atgagttgggaggccgttctctacgattggggcggattgaatggcgccctgtttcagttcgtcaacgaggccacgccgccgattttgatgccgctggcctggctcttcagcaacgtcctgggcaactactggacggcgccgctggtcatgctcgggctgtgggcatggtcgagatcaacggcggcggtcgggcgtgccttggcgattcggcggcagcttcttcaattcgtgatcggcttcggcatcgcgtttgcgatcacctccatcttgaagctctggctcgattttccgcgaccggcggcggtatttggccagttggatcacgtgcttggcacggtggaggagcactatagcctgccgagcggtcattccacctacgccgcactcgttgccggggcgttgtggccgctggccggtgttcgccagcgactggcgttagttgcctacgtccttctggtcggctggtcgcgcattgctgcaggcatgcactttccagccgacgtgctggccggctgggggatcgcctccggcagcctcgtgtttgctggctcgctgttgacgacgctgcagggtgcagagaggctgacggggctgcgcacaaccggcatctggtacggcttggctgccgcagtgctccttggcgatcaagtcgcaaaggctgtcgtctcgcttcttttcgattatggcgatcaagtcgctgtaacccccttcttcaatctcgtccatttcaggaacaacggcgcagctttcagcctactggctggtgccggcggctgggcgcgcttcggttttgccgcgcttgcgctgggaatctcgctctggctgatccgcctgttgcgtcaaggagtctcgaaatgggaaggcgttggttattgcctgatcttggggggcgcgctgggtaacgcagttgaccgcctgttgcgaggggctgtagtcgatttcctcgatttccattggcagggagcgcattggccagctttcaatttggctgacgtcgcaatctcccttggcgcggtctgcttgcttgcagccgccgtgcaccaaggcaagcttgctgcacaggaccccggataccaatga

SEQ ID NO: 359904 - DNA, 915 bp, Pseudomonas aeruginosa
atggaattgcgtcatctccgctgcttcctggccgtggccgaagaactccacttcgcccgtgcggccgagcgcttgcacatcgaccagtcaccgttgtcccgcaccatcaaggagttggaggaagaactcggtgcccgtctattcgtccgcaccactcgcagcacgcaactgacccgtgcggggcgactgttcctggagcacgtgccgcgtgtcttcgcagcactggatcaagcccgcgatagcgtcaagtccgctgccaacggttttcatggccagttgcgcatcgccttgtccgacggaatcacgccgtcccgcctgccgtctctgctggcacgcagccgcgaagaagatcccgaggtggaaattcgactgtttgaggtgcccttggatcagcagatcaagggacttcatggcgacctgtatgacgctggcttctcgatggccgaagacgcaggcgatggcattgtggtcactcccgcatgggaagatgaattgatggtggcggtgccggcccgccatcctttgctcgccttcaagcaggttccgctgaaggaagtgctgcgctatccgttggtactgggcgacccggcaatctgcgagggccacgcacgccaagtcgatcgctttctccgcaagctcgaacaggagcccctgatcgcgcagcgcgtggcgaccttcgacgtgatgatgaccctggtttccgccggcttggccttgggtctggcgggcgaggcgcacatcgcttcctgccgcgagccaggcgtcgtggcccggcgcttggcgggcaaaccgccaatgctcacgacctatctgctgcgccacgatgcggagccatccgagatgctggcccggtttattgaacgagtggccttcattgattcggtagatgatcttggggccgccgatgattcttga

SEQ ID NO: 359905 - DNA, 315 bp, Pseudomonas aeruginosa
atgcaacgcacgcccgtcgtgtttgctttcgccgttcatgcgcttgtgctggccggctgtgaccagccgcagcggctgtcggtggatgcgctggccgccgatgcgtcccggctgcgtgcgttgcgcgcgcaatgccgcgcgggcgagcacgacggcgcgttctgcacgcaggtggcgcaggccgacctgcggcgctttctctccggccaggccgggccgggcgagtaccagacgctggccgagctgccgccgatcccgcccagcttcgacgaacccgccgaagccgacgcgcctgggcaggaggactcgccatga

SEQ ID NO: 359906 - DNA, 1473 bp, Pseudomonas aeruginosa
atgccggttctggccgtcgatggtgatgaactcgcggccttcggagatattgtcgatcaccgtctgctcgggttcgagctgatggcgcaactggtcgaagtaggccacttccagcttggtgcccacctcgatcttgcccgaggtcggctgcaggtcgccaagcagcagcttgagcaaggtggtcttgccggtaccgttggcgccgagcaggccgatacggtcgccgcgctgcaggaccatggagaagtcgcgtaccagcggctggccgccgggatgggcgaagctgacgtgctccaccacgatcacctgcttgccggacttgtccgcgctttccagctggaagctggccttgccctggcgctcgcggcgctcggcgcgttcgcgacgcatttccttcagtgcccgaacccgcccttcgttgcgcgtgcggcgggccttgatgccctggcggatccacacttcttcctgggccaggcgcttgtcgaacaatgcgttggcagcttcttcggcggccagttgctgttccttgtgcaccaggaaactggcgtagtcgccgttccagtcgatcaggtggccacgatccagctcgaggatgcgggtcgccagggattgcaggaaggcgcggtcgtgggtaatgaacagcaccgcgccgttgaagcccagcagcgcttcctcgagccaggcgatggcgccgatgtccaggtggttggtcggttcgtcgagcagcagcaggtccggctcggcgaccagcgcctgggccagcagcacgcgccgacgccagccgccggagagttcggcgagggtcttgtcggccggcaactgcaggcggctgagggtgctgtccaccagttgctgcaggcgccagccatcgcgcgcctcgagttcctgctggacccgcgagaggcgcgccaggtcgtcgtcggtatggatgttcaggctcaggtggtggtactcggcgagcagcttgccaacttccgccagaccctcggccaccacgtcgaacactgtccgttcgtcggcacgcggcagttcctggggcaattcgccgatcttcagcgccggtgcgcgccagacttcgccgtcgtcggcctgctgttcgcccttgaccaccttgaacaggctggacttgccggtaccgttgcgcccgatcacgcagacccgctcgccacggccgatctgccacgacaccttgtccagcaagggagtggtgccaaaggcaagggatacatcggtgaacttgagcagggtcatgggcgcctccggaaacagggcgcgcattttacgccggataggcatcggatggcacggcgctttcaccgccatgccgcaacggctaagcttaggcgagccatccgcccggcttcgggcgcgccccgcgacagcggtcgcgcgccagtcccgcgagcggtcgaaacgcccgtaggcagccgttgcggacctgccgacgttacccgacatcacctgcccggataa

SEQ ID NO: 359907 - DNA, 588 bp, Pseudomonas aeruginosa
atggaacaagcgccgaaggtcactcagaccttcggctggagaggaagcaaaccacctgtgggctgcaagcaggccaggccgtcgtcaaagccattcgctgcgtcagcaatctcacccggcccgtttcgtggctggggccggcatcctctggcgtgtatccacacacaaagggaacccgttttttcaccggcgggcaccggcaccgaataccgtcgaccgcaagcggtctcctggcacctcgcagccttgcgggccaaggcgtcaggagaccgctcgcggatggacgcgaacacctcgatcagcggaaccgcgtcgagcgcgattcgatggagcaatgaccttctcgccctgtggcggtctcgggccagcaggacgcgcacaccgttgcagaagggaacgcgcgctggggaatcccgcggggagcgggaggtttgccccgccgtcggcagcagccggcgtggcagagggagacgtgggcgtcagttcgccctggagcgccgacgcggcgtgctggatggtcggcgggaggcgccgcgcttgcctgccgcggtatcttcgaccggctgcgtgcccttgcagtccgggtag

SEQ ID NO: 359908 - DNA, 312 bp, Pseudomonas aeruginosa
atggcaaagaaagctttgggatatgtggtgcatcggtgggacgtgaatgggccattgccattgcggttcacgttagcgaatagcggcgaggaagcaggactgtatttccaggaggaacgagtcaatcagaagatcgaatgcgtgggccaggttttcgttcgaaccgaaagtgatccgagtcatggggtgatctttcttgcggattacaacggggaaacgtggtatttcgactatggccaccctgcattcaactttcttacccaacgttttggtagacagtaccggagtgagatcagcgcattagaagattaa

SEQ ID NO: 359909 - DNA, 195 bp, Pseudomonas aeruginosa
atggatatcgtttggctcggtgaaagcacctaccacggtatcacggtcacggagccgtttggccagactgatcgatggcggaggccaccaggtggtctgctcccgatgacgagcatatttcccatcatcgggagcagtgcgctgctggatgtggatgggaacgccggccgccttgctcgagatgaggatgcctga

SEQ ID NO: 359910 - DNA, 210 bp, Pseudomonas aeruginosa
gtgctggacaacctgatcggcgagatccgccccgcttcgcaacgtgacgacctgttgccggtgtacgccttcaatgccgagggcctctggctgcccggcgccgacggcggacgccggaccggcgacagcaagaagctgtcgcgctggcaggacctgctgaccaagatgcgcgccgaaggcctcgacctcgacgcacccaaggaggattga

SEQ ID NO: 359911 - DNA, 288 bp, Pseudomonas aeruginosa
atgattctggccccggcccgcaatcagcccccggcgtacaccgaggcttcgtccacgatctggaccatgacctgcatctcggccgccgccatcaccgaggcttcgcccatgttctggatctgggcccgcggcctggccaacggtgcgcacgaagcctccgtccatgattcaggtcccggtcagcctccggcgtacactcaaggcttcgtccacgatttgagtcatgccctttaccccttccgccggcgctgccgaggcttaccccacggtccagtaccgggtatgtag

SEQ ID NO: 359912 - DNA, 246 bp, Pseudomonas aeruginosa
atgagctacataaaaaacctgatggtcgtgatcatcgcgtccatcatgggtgcttctgcctcctccctgttcgtaggatggtctactaatgaacttcgcatagtctttgtggtttccatattgatgactgcactcattacgttgaactcaacggctcagggacggaagaagcgtcctaaaatgaagccgacgcgcacggtaaaacgtaaatcgcgtcgggcaaagaagcgtgcacgtagcccctag

SEQ ID NO: 359913 - DNA, 156 bp, Pseudomonas aeruginosa
atggaccacaagcttcccctgtttgatgtcccgaaggacccagctggagtgcttcgcggggtgttcgccgcgtccgctgcaaatgcgaaacatccgaagctcgatctggctgatctgccgtctccgccgcaaaacggcacactgcgcccccgctaa

SEQ ID NO: 359914 - DNA, 474 bp, Pseudomonas aeruginosa
atgccgctcgacggtgaaggtgcccggggtgtagtcgagcttctcgctgacgtcttcaccgatgcgcttgagctggcagccgcaggcacactgggtgctgtccggctcgtggagtatcagcgtgcgcggcagttcggccggcagcggcgctcgcttgggctgctgccgtggctcgcgcttggcgggctctggtcgggccgtttcaagctctgcctcgatggcggcgatgtcggcctcgatcatctcgtccagcaggttgagctggtcgccattgagctgctcgctgcggcgggcgaagcggtggcgccgcagcacggcgagttcgtggttcaaccgctggttgagcgtttccaggtgatcgacgcgctgactcaactgcgcggccagttgacgcagttgctcgggtgtcaggtgatcgaaagcggcaggactcatggcgccgagtgtgcggattgtcgcccccctcggcgatag

SEQ ID NO: 359915 - DNA, 348 bp, Pseudomonas aeruginosa
atgagcacccggtggctgcgcatgaggtggctgttcaaccggcgcaacgcgaaggcactggcatgggccatcgtcctgctgggcctggcggtggctgccaatgtgaccggcatttacctggttggcagtgtggcgggctgggaacgctggatgtctgcatcagctggctacttcctggcctggcggatctgcctttacgccgccaccgtctatggctggttatggatgcgtcggcggctgctcacgcgcgaggcatcttccgacgcgcgtcaccgtctggttcgcgtggaggtggcaggcgtgattgccatcgttgccctggaagccagcctgctactgcagacgtaa

SEQ ID NO: 359916 - DNA, 735 bp, Pseudomonas aeruginosa
atgactctcacatcgcatcccgttgccaagaaattccggcgcgcttggtggcttgctgcagcctgcgtagtctttgctgcgtcggcatggggattcctcgcatcgttccagcctgaaaatcctgtcgccgttgagcaggccgctgtcgagaaagcgccaggtccgccgtggcgctacggccccgtctcggcgcgcttcacgatcattgtctacgccgatttggagtgcccgttctgccagtcctacactccggtactacgagcctggatcgacggacatcccgacgtcaacctgcagtggcatcaccttccgctcacgacgcatgagccggctgccagcgagcaagcacgttgggttgagtgcgtgggagagacgttcggacatgcacgtttctgggaggctatcgcctgggtgtatcaacacacgcgtggcggcggccagggattgccgcctggcacggcctatcccaatgatgcagcggtgcaagcctgcctgaacagcgagcgacctgggcagtcggtgcgccaacaggcagatcaggcgcgcaaagatggactcaatgccaccccgaccattcgactagtcgaccgcagtattgatcggtcgatgacgctcagcgggccgatcgtgggtgatgccctgctgtctgccctggactatctggcctctgaccaacctgataaagcgcaggaaacccagatgccttcagaggccgtcgacacagacgcgaagtag

SEQ ID NO: 359917 - DNA, 903 bp, Pseudomonas aeruginosa
atgagaaagcaagtccccctttggctgagtgctgccgtagtggtcgcgatcgcacctctggttcatgcggtggagattcttcgctgggaacggctgccgctggcggtgcctctggtcgtgggccaggagcgaatcgtgttcatcgatcgcaatgtgcgcgtcggtgtaccggccaatgtgggtgagcgtctgcgtatccagagcgccggaggcgcggtgtatctgcgcgctatcgagcccatcgagccaacgcgactgcaactgcaggacgccgatacgggcacgctaatcctgctggacatcgctgccgagcccgcacgcgaaggtgcttcgccgttggagccggtgcgcatcgtggatggcaccagcgctgcaacgcgctatggcgagcaaacagccgaaagcggcaatgccgtgccagacaggacccaacccgcgcagagcctgcgtgaaaccccgattgccgtggtgctcacacgctatgcagcccagaacctctacgcgccgttacgtacggtcgaacccgctcccggcatcatgcgtgtcaacctgagacgcaatctggcgctcgacacgttgttgcccactttgccggtcaaatccaccgcgcttgcttcctggcgcctagaggaccactgggttacggcggtccgcgtcaccaacaccagcaacgtctgggtcgatctggatccgcgcacgttgcaaggcgacatcctgacagcgacctttcagcaccctgcactggggccgaaaggccgaccggaagacaccacgatggtgtatctagtgacacgacgccatggcctgccacagtccctgctgccagccatccaacgcttcaatccagcggtgaatctgcccgagccaaccacatcgacgcaaggagacgtccatgcgcagtaa

SEQ ID NO: 359918 - DNA, 444 bp, Pseudomonas aeruginosa
atggctacccgcggcgtccgcaacaacaaccccggcaacatcgactacaacccccgcaacgactggaaaggtcagctcggcctggagctgggcgtgccgaaaccgcgcttcgcccggttcgacaccccagagaacggcatccgcgccctgggcaagctgctgctggcgtaccgcggtaaggacggcatgcccggagtgggcggtcccggcatcgataccgttcgcgagatcatcaaccgctgggcgccgggcaacgagaacgacaccgaggcctacatcggcgcggtggccaaggcgctgggcgtgcagcccaaccaggtgatcgacgtcaggctgccggcgacgttgcgcgggctggtggtggccatcattcggcacgagaacggcggcgtgccgtaccagggcgcggtgatcgacgagggtgtgcggagggcgctggcgtga

SEQ ID NO: 359919 - DNA, 1188 bp, Pseudomonas aeruginosa
atggacctctggcctatcatcggccgtttaatccagatcaatcccaattcggagcccagccacgtggaaaatggcgaacagaacaggttgacgttcctagatggacttcgaggatgggctgcccttgcagtcgtcttctatcacctgattccaaattctttcttgacagctgagcaacagaactcactgaggtggctgattcccccaatcgacggcgctttagcggtatacgtattctttgtcgtatccggattttccctttcaatcgcttttatcagaagcgggtcgcggcagatcgttgcatccctcgccattcgccgatatccacgacttgcaataccggtactttccgcctccatcattggttatgcaatgatgaaaatgaacattaatgagctgccaactcttgctggacttacaggtcatacaaactggccagcgcaggcatttcaatttgaagcatcatttttcgacgcaatcaggtttggcttgtgggacgtattctttaactacaacaacgaccacacttacaacccagttctttggacgatgaccgtcgagatgattggcagcatcttaattctggcaactcttgctgtatttggcaggtcatccgtcagatgggcagcctacgctgctatttggataattttgatttacttcgactccccgctatcgtcttttgttgccggagtcgtactggcggagctccatgacatgccggcgatgggaagcatcaggacctcaggcatatcaacttgggcatccgcaataataattgcaggtgtatggtactttgcagcggagcacagatacttgtactacatgcctactgttatttcaattctagggacgcttctgactttcgccatctgcattaataatcgctgcataaaattgcttggttcaaaaacatctagaaagctcggacatctttctttcccgctttacctaacccacatcatagtcatatgcacactatcatcaagattggggatttacttattagaggcgggagtcgaccaatatgcagcctctctcattttagtctcctgcatcattcctataagcataatcgcagcatggatattctccccaatcgaggacttttcgataaaggtcggaagaagactttccgacctgatcgggatttcctctaccagcgcgagaaaccccgccggaatttga

SEQ ID NO: 359920 - DNA, 885 bp, Pseudomonas aeruginosa
atggcaactaatgatttcctgccgttcgccggcggggcgggttcgaacgtcctcacccaggccgcctacgcttcgctgagcgccagaactgctggcttcaccgctggggtggctaagtcagccgaattgaacaaggtctggcggcaagcctccatcatgtcagcagctctggcgcagctcatcgctgacaacactggccttgatgttatcgatgacggctcgatcgcgaccatcctggaaaatttgaaaacagctgtcggagggcggttgctgaacatccaggtattcaattcgagcggtgtgtacacaccgacccctggtacgaagtcggtaatcgtggaagtccagggcgctggtggcggtggcggcggggcggctgcgacggactctacgtcgacctccgtatccggcagtggcggcggaggttcgtatgcaaaggcaaggattaacagtggtttcagcggtgtaaccgtcacggtcggcgccaaaggcgcgggcggagctgctggaccgaatgccggtggaaatggcggaacctccagcttcggcgctcttgtttccgcacctggcggagcgggaggtctatcgcaggccgcgggagcaccaccaatgtctcgaggcggcagtacatacgcaacgcctccccgcgggggaaacatcgagtcgaggactggcactgcgggcggggggaacacagtgttctccggtagcctttccaactttaatccgggtgccagctcgaagttcggggaaggcggcattgtcgcacaggctgctggtggcccgggagctggagggggtggtgtggcgaataagttcagttccgctgcagctgctgggggcgacggtgggccaggcttggtaatcgtgtgggagttttcctga

SEQ ID NO: 359921 - DNA, 657 bp, Pseudomonas aeruginosa
atggccagcctttccgattacctcgcgctgatcacgacagagcactccgacaagccgaagttcatggcgatgctggcggcggtgattggcccaatggtcgacgcgctaaacgtatcggcagcccttcccgcggacttcgatctggaccaggcgatcggcgcgcagctggatgtcgtcgggttgtgggtcggcatcggtcgtcgggtcaacaagcccttggtaggtgtctactttgccttcgatactggcggcgttgggttcgaccagggtgtatggaagggcaagttcgatccggacagcggtgtagtggagcttgacgacgacacctaccgtatcctgatcagggcgaagatcggcgcgaatcgctgggatggaacgctgggcggatccaaggccatcctcgacctagtgttcagcgggaatacccatgtgtttctgcaagataaccaggacatgtcgatgaccatcggtgtgtctggcgagccgccctcggcaatcgccttggctcttctgactggcgggtacatcccgatcaagccggaaggcgtcagggtcgactactacatcgtcaccacggccgacgcaccgctattcggcttcgacgttaccaacgagtttatctccggcttcgaccaaggaagctggggcgctgtctag

SEQ ID NO: 359922 - DNA, 1179 bp, Pseudomonas aeruginosa
atggcctcttcgaccgcaccgatcatcgacgccaacggcatctctgcgcccagctatgccgaggtgctggactatctgcagcagcagttccgctcgatctacggcgcggacgtctacttgggcaatgacagccaggacgggcagttcctgggagtactcgcgctggccatcagcgatgccaacgccgcgaccatcgccgcctacaactccttctcaccgctgaccgggcagggcaacgggctgtccagtaacgtgaaaatcaacgggatcgcgcgtgcggtggccacgaactctcaggtagatctgaagatcgtcggccaggccggcacggtcatcattcagggcattgcccgggacgtgtccggcctcaattgggcgcttccggccacagtgaccatcccgcccgcgggcgagatcaccgtcactgccacctgcaccgagatgggcgcgatctccgccggtatcggccaggtgaatgtaatcgcaacgccgaccagaggctggcagtcggtcacgaacctgtccgcagcagaccctggcgctccagtggaaacggactctgcgctccgccagcggcagcaggtttcggttgcgcttccttctcggacggtgctggagggaaccacgggggcggtagcgaacatttctggcgtgacacggcttgccacctacgagaacgacacgaacgccaccgatgccaatggcatcccggcgcattccatctctctggtggtggagggcggtgacgctgccgcgatcgcacaagcaatcgcggacaagaagacgccaggcaccggaacctatggaaccacatcgcaaacggtcaccgacgtctacgggcgtccgctgacgatccgcttctaccggccaacgtaccaggccatgacggtcgcaatcacactgaaagcgctggccggctacagctcggtgactggcgccgccgtgcaacaggccgtctccgactacatcaacggtgtcgacatcggaggaggcctgagcggctccgtcgaatgggcagatgcaatcacggcggcgaacagcgtgccgaacaactcgaccttcaagatcaccggactggcgttgactgggccagggggagctggcagccccgacgtgcccttggctttcaaccaggcagcgcaatgcacgccagcctctgtatcaatcacggtgacttga

SEQ ID NO: 359923 - DNA, 354 bp, Pseudomonas aeruginosa
atgcgataccgcaagctcgatgccgatggcgactacaccttcggcggcggaagggccgacttcctcgtcgactcgcccgaggctgttggccaggctgtgctgactcgcctacagcttttcaagggtgaatggttcgtcgataccgccgacggtaccccctggcagaccgaggtactcggtgagcacaccagggcaacctacgacatggccatccggaaccggattctcggaacccaaggcgtggtgcagatcgatagctacgacagcgagttcgagcccaacagccggaagctgacgatcacctgcaccatcaccacggcctacggccagaccactatcagtgagacgctctga

SEQ ID NO: 359924 - DNA, 663 bp, Pseudomonas aeruginosa
atgggcgacccgatccgttggctttctgttgccctgggcggcttgcagtccaaattttggaccgcactgccagggattatccagagcttcgatgcggtggccatgacctgcacggtccagcctgctattcaggccctggtgcgggacgaggccggggccctgtcgcctgtcgacctacccctgctattggactgcccggtgcagttccccgccggcggggggtgcacactgacgttcccagtgaagcccaacgacgagtgcctggtggtgttcgcctcgcgctgcatcgactcgtggtggcagtcgggtggcattcaggcccaggccgagctgcgcatgcacgatctgtccgacgggttcgctctgctgggctttcggtctcagccgcgtgtcatcggcgccgtgagcaccaactcggctcagctcagaagcgatgacggtatcgcctttgtcgagatcaatccgagcacgcatgccgtgaacgctaccacgactggtccgatggcgctctctgcgcctctggtcacgatcaatggggacatgaaggtgaacggtcgcgtcgacaccaccggtgacgtaaaggccgggacaatcagcttgcagtcccaccgaacctctggcgttaccgcagggacgggcacaagcagcaccccggtaccgtaa

SEQ ID NO: 359925 - DNA, 984 bp, Pseudomonas aeruginosa
atgagcgtaccccaatacctgcggcagatcagcctgaagatcggcaacgaccaggaaggactcgacctatccaatctgcgcatccgtttctcggtgcgccggggagatgtttcgacgccgaacacggccgacattcgcgtctacaacgtcagcggcgaaacagccaggaaggctgacctccgggagttttccaggctggtcctgcaggccggctacgcggggaatttcggcgtgatcttcgacggcaccatcaagcaggtgcggcgcggccgggaaagccagaccgacacctacctggacatcacggcagcggacggtgacagcgcctacaactggtccgtgatcaatacgtcactggctgccgggtctacgccggaagaccaccttcaggctgccatgaaagcgatggagtcgcgtggaatcacgatgggagagcggccaccgttacccaccaacaagctccctcgtggcaaggtgatgttcggcatgacccgcgactacctggacgccctgggtcggacgcaggacataagctggagcttccaggacggcaagatgacgctgatcccgaataccgcctaccttcccggcgaggctgtggttgtgaactcggagacggggatggtgggcctgccggagcagacccagaacggcgtcaacgtgaagatgctcctgaatccatcggttcgctgcggtcgccgtctgcagatcaacaactccagcattcagcgactgcgttatgacccttcaccgctcggggagtccgatgtggttcgagcgaagatacaggtcgaccttgatagcgatgggttctacaaggtgctggtcgcaaatcatgtcggtgataccagaggaaacgaatggtatacggacgtgatctgtatcggggttgatgcgaccatcacgaactccggaatgattaaggctggaatcggagttcctggagcgatccagcctgccggccctgttaagccatacggctag

SEQ ID NO: 359926 - DNA, 312 bp, Pseudomonas aeruginosa
atggctaacttcgagattcccctgacaccagaggggcagcgcttcagcatcaccctcagcggcgtcgagtatcagctacgtgtgcagtggcgtaatgccgttgaaggtgggtgggtgctggatatcgccgacgccggcggcacgccaatcatcaacggcattccgctggtcacaggctgcaatctactggcggcatatgcgcacctgggattcaccgccgtgctgtgggtgcagacgaccgcagaccccgacgccgtgccaaccttcgaaaatctgggcgtaggctcccatctcttctggtggaccaattaa

SEQ ID NO: 359927 - DNA, 606 bp, Pseudomonas aeruginosa
atgcccaacttcgcaggcctgatctcgatcgacccgaagcgctccatcgggcccatcactgcgatggtcaccctggaggagctcagcaccgacaacctgcagatcaccgagcaccctgtggagctcggcgccaacatcaacgaccacgctttcaagcagccggctgaggtggtgattcgctgtggatggagtaactccagcctgggcaacctgatttccgggttgcgccaggcggtgtccaccatcttcggagactccgccttcggctcggactacgtttcgggcgtctacaaccagttgctggccctgcaggagtcgcgcattccgttcgatgtctcgaccggcaagcgcacctaccagaacatgctgatgcgcagcctggctctcaccaccgaccctcggaccgagtacgcgctgatgtgcacggtggtttgccgccaggtgatcatcgtccagacccaggcaacaacgctgccgccgcgcgatgcccaagcgaatccgcaggcgaccggtgaggtcgccaacatggggacgaaacagacggcacaggcatttccggcgccgggcggctggcttcctccagacgggagaggtgggaatggctaa

SEQ ID NO: 359928 - DNA, 1737 bp, Pseudomonas aeruginosa
atgtccgaatcctccgtcatcaaggagttcctggtcggacttggcttcaaggtcgatgagaaagggctgaagaccttcacaggcaccatcgacggcgccactacggcggtaactcgcctggtgactaccctggccggcgcttcgttgacagttgctgcgggtgtagcaacgttcgccaacaatctggagaacctttacttcgcgtcccaacgggttggcgcatcggccgccagcctgaaagcagctgactatgcggctcgtgaccttggtgcgtcggccaatgaagtgcgcggttcgctggaggggatggctagggctctacgccagaaccctgggaatgagccattcctgcagagcctcggtgtaagaacacgagatgccaatggccagttgcgcgacaccgccgacttgctcaacgacctgggaaaggtactgagcaagaaggactacttcgtcgcgattcgctatgccgagcatttcggcatcgatgagaacacgctgcgcgccatcatgagcggcgagtttggtcgaaagctcgaggagaaccgtaagagattcgctggagctggcttggataaagccaccagagatgctcaccagttcatgaatgaactccgtgatgtgggcatgcaattcgagagcatgtcgatcctggttcaggctgaactgatgcatcggattggtcctgaactggagcgcttctctgcttggttcgagaagaacagcccactgatcgcgaagcgcatcgtcgacgtcaccgagaagctgatccagctggctcaggactccgagccatacctgaagtcgatttacgaattctttgtagatttggatgaagccacggatggctggagcacgaagatcatcgtgctgctcggtctgatgaaggcgctcggtttaacctcaacagtcaccggaattcttaagcttgcctccgccttcttcagactcggtaccggcattactggagcttctgctgcggccggggcagccggtgctatttcgactctggctgtaggtcttggcgccgccgtctactcatcttctctcaacgagggagaggacgaagaggtggcacgcattcggcgcgagaggggcctccctgagcacgaacagcagaccgctgatcaggctgccaaggagagtgcgactgcgaatgcctggcgcatcctgcggggcgtggacaaggacaagtcgaccttcgcaatggacttcttcaaggcgcagggctggactgatgctcagtcggctggcttggtggcaaacctggctgccgagagcaatttggaccctacagcgaaaggcgactgggggcttactggtcctcaagcgcgcggtattgggcaatggcaccctgatcgccaacaggcgttcaagaaatgggctggcttccctatctgggatgatcgagccgatttcatgaaacaactggagtttgtccagcacgagctgactgacggggcggagcagaaggccggccgactgctccaagcctcgcagaacgcaagcgacgcaggcgccgtcgtctcgcgctactacgaacgtccaggcaaggatgaagcgattcgggctgccgaggccgcaaagcgcggccagatggctgtgcaactgcaccaaacaaccaacatcaatgtgtccggtggattcgacccaaattcaactgcgcgggccgtggctggagagcagggaagagtcaatgaggagctggtccgaagcaccagtaccgcggtgaattga

SEQ ID NO: 359929 - DNA, 441 bp, Pseudomonas aeruginosa
atggctgagttcagcgtaaacggccagagctaccgcagcgccaagatcgacgccatgcggcagttccacctgtcccgcaagatcgcgccggtgatcccggcgctgatcccggtcttcgccaagttggcggagagccagaaggccgagggcgccaagccgctcagcagcgatctggcggccatggcgtcgctgttcgagccattcgccgaggcggtggccagcatgtcggacgaaacggcggagtacgtcatgggcacctgcctgtcggtgatctcccgtcagcagggcaccacctggtcggcaatctggaacgaccggcaaaaggtctgcatgttcgatgacatcgacagtggcgtgatgctgcagctggcggcccacgttgtccgcgagtctctgggcccttttttggccggactcctgtcgacctcggcgcaggggtag

SEQ ID NO: 359930 - DNA, 441 bp, Pseudomonas aeruginosa
atgagcgcatacagtttcctcgatgtgaacgcgactctggtcggcgctggtgcggtgatcgacctgggcgccggctccgcgaacgcggaagagggcatctcgatcgttgcggcagccgacaagaacaccatgctaatcggcgccgacggcgagggcatgcactcgctgcacgccgacaagtccggtcaggtcaccgtacgcctgctgaagacctcgccgaagaacgcccagctgatggccctttacgacgcccagtcgctgagctcgtcggcctggggcaacaacgtgatcaccgtgaccaactcggccaacggcgacaccacggtggcccgctcctgcgccttcaagaagcggccggacctgaactaccggaaggacggcgatatcgtcgagtgggtcttcgactccataaaaattgacggactgctggggacctactga

SEQ ID NO: 359931 - DNA, 1482 bp, Pseudomonas aeruginosa
atgcaaactctcgccgtttcggacgtggtgaacgtccaggtcgtcatgtctcccaaggcggcagccacccgagacttcggcgcgctgctgatcctcggctcctcgccggtggtcgacgtcaacgaacgcatccgccaatactccagcctcgacggcgtggtagccgactttggcacctcggcccccgagtacctggctgcgaacctctactacagccagtcgccgcagccggaaaccctgttcgtgggccgctgggcgaagactgccacctccgcactgctgaagggtggcgcgctgtccgaggctcagcaggccctctcgaatttcaccgccgtcactgccggcggcatgaagatcaccatcgacggcaccctgaagagcctgagcgcgatcgacctgtcggccgtgacgaaccttaacggtgtcgcttcagctgtgaccaccaagctgggagcttcggggacttgcgtctggaatgcggaattcgaccgtttcgagatcaccagcagcaccaccggtgtgacctcgacgatcacctatgctgaggcgcccacctcgggtaccgacatctcggctctgcttggcctggtaactggtgtggcctccgcgccggtggatggcgtcgccgccgaatcgctggtggatgctgttgctgatctcgccggcatgtccaacgcatggtatggcctgctggtcgccgactcgaccctgagcgagagcgacgttctggccgtggcggccttcatcgagggctccggccagtcgcgcatcttcggctacaccacccagaacccgctggccctggatggcaccagcaccactgacatagccgcgaagctgaaggccgcgaactaccggcgcactttcgaccagttctccagcagcagcccgtatgccgcggcatcgatcttcggccgggccttcactgtgaacttccagggcaacaacacgaccatcaccctgaagttcaagcaggagccgggcgttaccgccgagagcctcaacgagacccaggctgccgcgctgaaagcgaagaactgcaacgtctttgtcaactacagcaacgacaccgccatcatccaggaaggcgtgatggccaacgggtacttcttcgacgaggtacacggcctggactggctgcagaacgacctgcagaccgccgtctacaacctgctctacaccagcaccaccaaacttccgcagaccgaccagggcatcaatcgcatcgtcaccgcgctgaatgatcgctgtgaacaggcggtcacgaacggcttgctggcgccgggcgagtggaccggcccggagttcggcgctctgaagaccggccagtatctgtctgccggctactacgtctacgccccaccggttgccgaccagtcccaggctgaccgcgaagcccgcaaggcgccggtcatccagatcgcggcgaagctggcgggcgccgtgcacttcgtcaacgtcatcgtcaacgtcaaccgctga

SEQ ID NO: 359932 - DNA, 552 bp, Pseudomonas aeruginosa
atggcgaacacctcagcatccggcgggtacctgacgccggcgggcactcctacgcccgctgatgaagcgctggaggacatcctgcagccgatggtggtcgggatcaccggcctgccgggcaagatggtccggccgcgctggcagccgggcaacccgaagcagcccgagccgacggtcaactggtgcgcctttggcgtgatgcacacgaagccggacgccaaccccgcaatcgagcacgacggcaccggagacggcgccgaccactatcagcgccaccaggacgtgatcctgctggccaccttctacggtcccaatgcccaggcctacggccagctgctgagtgacggcatgtacgtcccgcagaacggcgaggccttgcgcgcgttgaacatggccttcgtcgagaccggtgacctggtcgccgcgcccgacctgatcaaccaacagtgggtccgccgctacgacctgcgcatccggctccgccggaagatcgaacgcacctacccggtgctcaacatcctgtccgctgatacccctgtcatcaccggctga

SEQ ID NO: 359933 - DNA, 375 bp, Pseudomonas aeruginosa
gtggcccagctcgacgtcactgaaatcctcctcgatccggatttcatggacacggggctggtctgcaagcgctccgtccaaaccgttggcgacaacggccgggcgaccaatacagtcacctcgacacccttcgcgggcgtggtaaccagcgacaagggcgacatcctcgaacggatcgccggcggcgagcgcaagaaaggctccatcaccattcacacgatgttccggctcaccgccgggagcggcgaggacagcatcgccgacgtcgtcacctggcagggccgcgattacaccgtggccaacgtaaacgactacagccacttcggccgcggcttcgtcgccgcctcctgcgacctcctacccctggcgggataa

SEQ ID NO: 359934 - DNA, 564 bp, Pseudomonas aeruginosa
atgaaggtgacgaaggacaacgtcggccaggtcctggcgtcgatccggcgcctcgtcgggcaggaagtcctcgtcggcatccctgccagccaggcggagcgcagtgatgatgacccgcagccgatgaacaacgcccagctcggctacgtgcacgagaacggctcaccggcgcagaacattccggcgcggcccttcctgatccctggagtcgaagacacccaggagagctacaccaaccacctgcagaaggcagtgaccgcagccttgaacggcgacaacaccaaggtgcaggtggagctcaatgccgccggcctggttgcatcgtccggcgcgcgaaacaagatcaccaccggcgaattcgagccgctgtcacctgcaaccgtccgtaaccggcggaagaaccgcagcaccaagtcagtgcgcgcggccgagaagaagtacctggaactgatcgcgaacggcgccacgccggagcaggcccaggacgaggcgggcatccgaccgctgatcaacaccggccagctccgcaactcgctcacctacgtcatccgcaagaaggaatag

SEQ ID NO: 359935 - DNA, 384 bp, Pseudomonas aeruginosa
atggatgccaccaagttccgccaggacttccccgagttcaacgacccggtgaaatacccggattcggcggtgaacctctggctggacttggccagcaagacgctgccagctgaccgctggtgcgactatctggacatcggcatggagctgttcgcggcccacaacctggcgctggccgccggcaaccaggctacggctgcggttggcggtgcgcccgggcaagtgaaggggccgcttaccagcaaggcggtcgacaaggtcagcgccggctacgacagcggcgcagcgaccctcgaagatggcggcttcttcaacctgacaacctacggcatccagttcctgcaactggcccgcatggtcggcaccgggggcatccagctgtga

SEQ ID NO: 359936 - DNA, 177 bp, Pseudomonas aeruginosa
atggcaacccgaaacgtgatcaagccgttcaagctgaacaccccggacggcatcgtcgagtttgccgccggcacccaggacatcgaggacaaacacctcgaccactggttcgtgcaggcgcatctcgaacagccgaaacccaaagccaaggcagacgccgaaggcaagaaggactga

SEQ ID NO: 359937 - DNA, 870 bp, Pseudomonas aeruginosa
atggtatatgccgtctacggactcttcgatccagctgatcctgagaagcgcatcaggtatgtcggctgctcatccaagaccgtttctcgtcgaatcattgagcacatcagcgaggcgaaggagagagcaaacagccgtcatctctggatcatggaaatccttgatcggggagagcgcccgcaggcagtggtcctcgaagaggttcgcgatggcgactggcaggagcgtgagcgcttctggatcaaggagctatccgccgacctcgtcaattcgacagtaggcgggatcggacttattgggccagcggatgacgtcaggttccgaattcgcgaaaaggtgtcttccctacttgtaggcaatgacaggcgactcggaaggccccatgacgacgatgcaaggtctgctatttccgctgggctgcttgcttcagacaagaagaaagcttcggacgcgaaacgacgaggaaagcctgggcacaagctaagtgacgaggctaagcagaagatcagcgacgccaataaggggcgcaagaatcctagggccagggaactcgctgccgctatggctgaaggaaatgttggctcgttttgggtaaacgatggaatcagttcgaagctgatgcgcaaagggggtgaaattccgactggctggaatcgtgggcgattacctccacagaaagatgtcagagcaaagatatccgactctgtgagaaaggcttccaacacgatctacacgccagagcgcaatgccaagcttgccgccactaaaaagggcggtcgatggattaccaatggcgaaacccatcgctatctacaatctggcgaagttctccctgacggctggtcattcgggagaacgatgaggaaataa

SEQ ID NO: 359938 - DNA, 999 bp, Pseudomonas aeruginosa
atgagcaacctgattctgccgcgcgctatcaaacgtgcgcacacccgcgattcgatgatgaccttcgacgcggcaaccatcgactccaccggcgtgttcctcatcggtgagctggaacgtctggaccagaacctgcacggcccgctggcgtccgtgacctggtcgcgcgacatccagctccgcgaggacgtgtcgatcgcggacgagatgtccagcttcaccaacagcaccttcgccgccgtgggcggtaccagtccgaatggcaaggcgtggatcggcaaggactccagctccatcgcctcgctggcgctggatatcggcaagaccgccagcccgctgaccctgtggggcatggagttgtcgtggaccctgccggaactggcttccgcccagcagctcggccgcccggtcgactctcagaagttcaccggcatgcagctcaagcacaacatggacaccgacgagcaggtgtacatcggtgatgccgacctcggcgtgaccggcctggtgaacgcggccaccgtcaccaacatcagcaacgccgtcaccggcacctggggtaccgccactccggcgcagatcctggccgacgtgaacgagctgctgaacagcgtatgggccgccactggcttcgctatctgcccgcgcgagctgcgcctggacccggtgtcgtacagctctctggtgagccgcatcgtgtccgacgccggcaacatctccatcctagagttcctgcgcgtcaacagcctttccaactccatcaacggcgctccgctgaacatccagccgctgaagtggctgaccggccgcggcgtcagcaacaagaaccgcatgatggcgtacaccaacgagcaggaccgcgtccgcttcccgatggtgccgctgcagcgcactccgctggaataccgtggcatccgccagatcaccacctactacggccgcctgggcgtggtggaagtggtctatccggagacgattggctacagggatggaatctag

SEQ ID NO: 359939 - DNA, 495 bp, Pseudomonas aeruginosa
atgagcaacgcattcctgtaccgcatgccggcgggcattccgggtgatgtcacccgcgccagccaatccaccatcgagccggtattcctgaacccgtcgctgccgttcgccggcttcggcctgttcgggaaaatcgtcagcgagaagttcgtgcccttcggcgcaggcgacgtcgctggcgccgaatacgggcttctggttcgcccgtacccgatcaccggtggttccggttccgatccgctcggcacctccacgccgcccaccaagggtgtggccgacgttctccgccgcggctacatgaccgtgaagctgaacgccggcaccgccgcgaaggacggccaggtgtacgtccgtgtggctgccgctgccgccggcaaacctatcggcggcatcgaggctgcggccgactccaccaacaccgtggcgatcaccactgccaccttcatgggcccggcggatgcctccggcaacgtcgaaatcgcctacaacatctga

SEQ ID NO: 359940 - DNA, 1296 bp, Pseudomonas aeruginosa
atgcaggtaaggacgcaagacgatgccggccgctggttcacgccagagacgctcagcgcccgccagcggatgacgccggaagggttcctgctctgcgaggcggtccccatcgcccgcaccggaacgctcatctacgacgagagcgaaatccccgtggaaggcggccccggcggcctggtgaccatcgagcgcaacgccgacgaggtgttccgcgccgagacgatggccagtttcgaagggaagccggtgacgctgtcccaccccgacgagttcgtgacccctgcgaactggcgccaactgagcgtcggcattgtccagaacgttcggcgcggcactgacgtcgagcaggacctaatgctggccgacctgctcatcaccgatgctgaagccatcgagctggtgcgcagagacaacgacccaaacagcgagcgtttgcggcaggtctcctgcggctacgacgcggactatgaacagctggctcccggccgagggcgtcagaccaacatcgtgggcaaccacgtagcactggtagagcgtggccgctgtggcccgcgctgcgcaatcggagactccgaaaccatgagcaagaccaagaaacgcagcttcgccgatcgcctgcgcgcggccttcatgtccaaggatgccgaggcggccgaagagctggccaaggaagccgaaaccgccgacgaggatgaagacgacgaggacaaggagaaggccaagaccggcgactccgcgacactcgccgcgatcctgaaggaggtccgcacgctgtccggtcgcgtcggcgacatggagaagaagctcgaagagcagaccgaggacgatgacgaagaggagtccgaagagaccaccgacgacgtcctcgaagccgagaaggccaaggaaaaccccgaggccggcggcgaaacctacaccggcgacagcgccgcgctgaccgatctgcgctctcgcgcggagatcctggtcccgggcatcaccttcggtacccgcgacggcaaggtgaaggtcgccgaccacatctgcagctgccagcgccaggcgctgatcaaggcgatggccaccgacaccggcaaggccgtggtcgagccgttcctgttcggccgcgccctggacaagctgaccgccgaccaggtggccgcagctttcaacggcgcgagcgagctggccaaggtccgcaacaacgacaaggccgcgcgcaccgcttccgctacccgtgatttcggcaagaccaagtcgatcgccgagatcaacgccgcaaaccgcaagcactggcagggccagggcaacaactga

SEQ ID NO: 359941 - DNA, 735 bp, Pseudomonas aeruginosa
atgcgaacgatcgaccggaagaaaaaccggaatccggtccggaccagccgggcggagcgtgagtaccagcgcagcctgacccaggtggcccggcaggtcggcgcgatcatcaacggctttccgccaggtgatccgtcggccgatccgaccatcagccagattctgcgcaagtacgcggacgcgctgaacgactgggctatcgccactggcacccggatgatcaccgacgtcaaccagcaggatcgtaaagcctgggctgcacggaccgaggaaatgtccaaggccctgcgtgacgagattctgcacgccgacaccggcgccgcgatgcgcggactgctcgccgagcaagtgacgctgatcaagagcatcccactcgatgccgcccagcgtgtgcacgagctgactctgcagggcatcgaggacgccacccgggcgaacgagatcgccaaggagattcggcgctccggcgaggtcgctaccagccgcgcccagctgatcgccaggaccgaggtgtcgcgcacagctgcgacgctcaccgaagcccgagccaaggcaaccggcagcgagggctacatttggcgcaccgctcacgacggcaccgtgcgcagctcgcacaaggccatggaagggaagttcattccgtggtcatcgccgcccaccctggacaagctcaccggccacgccggatgcctgccgaactgcaggtgctggcctgagccagtgatccccgaatga

SEQ ID NO: 359942 - DNA, 1473 bp, Pseudomonas aeruginosa
atgagcaagaagaccgcacggcaacagcagcgcctggcagccaaggtgacccacgacaccgaccgggcccgcaagtcgttcgtcacccgcgacagcttcgaaaacttcgccgctcgtgtaggcctgcaggcgaacaaccaaaacgccgcgtcgcactacaccttcgacctggtcagccgcaaccgcgtgcagatggaggcggtttaccgctccagttggatcgccggcatggcggtggacctggtggcgcaggacatgacccgctccggcattgagctggtgtcggacatggagcccgaggacaaggacaagctgaaccaggcgctggagcgcctgcaggtctggaaccagctgtgcgacaacgtcaagtggtcgcgcctttacggcggctcgatcgccgtgatgctgatcgatggccaggacgtcagcacgcccctacgactggacacgatcaacaagggccagttcaaaggcctgctggtgcttgaccgctggctggtgcagccgtcgctggaggacctagtcaccgaatttggcccaaacctgggcaagccgaagttttacactgtgttggccgatgcccaggcgctgatcaaccagaagatccactacacccgcgtcattcgtctggagggcgtcgggctcccttactggcagcgcatcgccgagaacggttggggccagtcggtactggagcggctatgggatcgactgatcgccttcgacagcaccagctccggcgccgcgcagctcgtctacaaggcgcacctgcggacctacaaggtcgagaagctccgcgagatcatcgcgatgggcggcaagaccctcgaggccttcgtcaaacagatggagatgatccgtctgtaccagtcgaatgaggggctcaccctcatggatgcctccgacgagttcgaggcgcaccagtacagcttttccggactggccgaactgatgctgagcttcggcgagcagatatccggcgcgctgcagattcccctggttcgcctcttcggccagtcccctggcggcctgaacagtgccggggatagcgacctgcgcacctactacgacaacgtggctgcctggcaggaccgagacctgcgcccgggcgtgaccacgctgctccaggttgtctccctatcggtgctcggcaaggagatgcccgaaggctgggacttccagttccgcccactctggcagctcaccgacaccgagaagtcggatattggcagcaaggacacctcttcgatcgtcgaggcctacgacgccgggatcatcagccgggcgacggcgctgaaggaaatgcgccagtccagccagaccaccggcctctggtcgaacatcaccgatgaggacatcacggaggcggagaacgacccgccgcctggtgccgaagacctggacttgcccgatgcgaacgatcgaccggaagaaaaaccggaatccggtccggaccagccgggcggagcgtga

SEQ ID NO: 359943 - DNA, 1431 bp, Pseudomonas aeruginosa
atgaccgcctcggcagaagagcgctacgcggcgatccagctggctcgggccgacttctacttcttcgcccgctggatgttcctgcagcgcaagggcttcaagtggatgcgcgcggcgcaccacaagatggtctgtgactcgctgatgcgggtgttccgcggcgagtgcaagcgcctggtgatcaacattccgccgcgctactcgaagaccgaactggccgtgatcaactggatggcctggtgcctgggcaaggtgcccgacgccgagttcatccacaccagctacgccgcgcagctcgcgtcgaacaacgcctggcaggcccgcgagctggttgctcacgaggcataccgcgagatttttccggagacgcagctacgccccgacagcgcggccaagcacgaatggcgcaccaccaagggcggcatcgtttacgccaccggctctggcggcaccatcaccggttacggcgctggcaagcaccgacccggcttcggcggtgcgatcatcatcgacgacccgcacaaggccgatgaagcgaacagcgacacgatccggaaaggcgtgctcgactggttccagaacaccctggagtcgcgcaagaacgacccgcacaacacgccgatcatcgtgatcatgcagcgcctgcacgaggaagacctagccgggtggttgctgggtggtggcaacggtgaagagtgggagctgctctcgctgcctgcgctgggcgaggatggtgttccgctgtggcccgagaagcacaccgccgacatgctcgagcagatgcgctcagccaacccctatgtcttctccggccaataccagcagcgtcccagcccactgggtggcgggatcatcaagagcgcctggttccagcggtacaaacagctgccgcttctcaactaccgcaagatttttgccgacaccgcgcagaagacgaaggagcacaacgactacagcgtcttcgagtgctggggccagggcgaggatggcaaggcctacctgctcgacatgatccgcgggaagtgggaagcgcctgagctgaagcgtcgcgccgtcgagttctggaacaagcacctggccttcgacgcgcaccagttcggctccttgcgcgccatggctgtcgaggacaaggccagcggcacaggcctgatccaggatatccgcctgacctgcagcatcccgatcctcccgatcgagcgcgagaaggacaagttgacgcgcgtgctcgacgtagtcggctacatcgaagcgggccgcatctgcataccggaggacgcgccgttcaccagcgacttcgtcgccgagtgcgaagccttcacaccgaacgacacgcacgcgcacgacgaccagatcgacccgatgtgcgatgccatcaacgacatggtcgcctccggcaaccttattgaaatctggaacaggctggcaggctga

SEQ ID NO: 359944 - DNA, 555 bp, Pseudomonas aeruginosa
atggcgctcacgaacaagcagcgccgcttcgtcgaggagtacctcgtcgacctcaacgcgacgcaagcagcgatccgcgcagggtatagcgagcggcgcgcctccgagatcggctcgcagagcttgcgcaagcctgaagtcgccgccgcgatccaagaggcgatgcaagcgcgtgcaagccgcaccgagatcgatgcggactacgtgctgcgccggatggtcgagatcgaccagatggacgtcctggacatcatgacggacgagatgcagctgaagcccgtcagccagtggcccaaggtctggcgtcagtacctgagcggcttcgacctggccgaaatgttcgaaggccgcggcgatgaccgcgagatggtcggcctgctgaagaagatcaagtggccggacaaggtgaagaacctggagctgctcggccggcacttcggcatgtttacggacaacgtggcgctgagcggcaagggcggtgcgcccctgctggtcggcgctgtctcggatgagcaactggagcgcctggcgaagaagatcaacgacgaggtgtag

SEQ ID NO: 359945 - DNA, 300 bp, Pseudomonas aeruginosa
atgatgaactcgatcctcatgggcttggacgccgtgctgtgtattctggtggtagtggccgcgctggagttcctgcgcgccgtccacctgttcgagcatccaatcctgagcctgtcgttctacctggttgcggtcggggccttcggcttgctgctggagctggcaaaaggctactgggtcagcccctgggcggtggtgctgcacttgggcgtggtcacctacgcttggtcgcgccgcaagcagatattccgcgaggactggtcctgggatggcgtcgaccgccggcggcagcaccgataa

SEQ ID NO: 359946 - DNA, 261 bp, Pseudomonas aeruginosa
atggcgaacgcgcatgagttggcccgcggtcacaagaggctgaaagcgttgattgagtttgcactggctgaaggctggcatgtcaaacgcacacccggtggccacttgaaattcaccaagaccggctgctcgccgatctacaccagctcaactgcaagcgaccatcgcgcgggattgaatgcacgtgctcaaatccgacgcgcagagcgagaggcagtagaccacttacgggccgctgttccgggagccagccatggctga

SEQ ID NO: 359947 - DNA, 1419 bp, Pseudomonas aeruginosa
  misc_feature (1061)..(1070): n is a, c, g, or t
atggacaataagctaaatctcttccgcagttgcaaaacacctcgttctggcatgctgtgcgcgagaatcctgactgttgctgccctggggattttgagtggctgctctagctttcgcccctgggtcaatgtggcacagataaccgaggcgcagcaggacgactacagaacagggcctgtggtggttgcggtcacgctgtcgggaggcggagcacgcgcggccgcatttggtctgggcgtgctcaaggaattaaagcgcacagagttcacgctagacggacgaccaacgacgcttctcgatgaggtttcaatcgtcagcggcgtctcgggaggaagtattctcgcagcgcactacgctgcctttggtgatcaaaccttagagcgatttgaaccagactttttgttgaagcccttcgagtcgaccctgctcaaacaagtcttttatccaaataacttgttcaacctcacctctccttggttcggacgcacgcacatattggcacaccggttcgacgaactatacgaaggcatgacatttggtgatgtccgcaagaatccgaaagcgccgagcttactgatcacggcgacggacctaacaaccggcgcacctttcgacttcaccccagagcagttttcgctaatctgttcggatctgaacagtgtgccattgtcctttgctgtggcgtcgtcatcggccgttccgatcatcctgtccccgatgacgctacgcaatttttccgaccgatgcggtaaagcgcttttcccaccggatggcgaagcatccagtagcactgattttcgtattcagctgctgcggcaaagcacagatggctacctagatgccaaggcgcgcccttacattcatttggtagatggcggggtcagtgacaacctaggcatacgattgatgatcgataggctaatggctaatggctcaatctataactctttttctggtgtgcctcgacattcgattcgtcgcattgtcttggttgcggtgaactctgcccgcgatctggcaacaagggttgaccttagtgatgaagtgccgtcgaccggagnnnnnnnnnngaccggagaagtcctggagacgttgctctatggcgctggcgcgcgcgagactcaaataacgctttccttgctggaaaacgacatcaagcgaattgcagcggagcttgatgaaaatcgaaaccaggaagacagtccattctctcccgacgtcgaaatccatctcatcactgtcagcctgcgggaccttgaagaaccagacatacgcacttcactgcttcgtgtgccaacagcttttacgatcgaagcgcttgacgtacgtgctcttcaagatgcgggcgctgccgctctacgttcgtcaactgcattccaggggctgaagcaatcgttggaccatttggacaagcgctga

SEQ ID NO: 359948 - DNA, 618 bp, Pseudomonas aeruginosa
atgaatccactacgcagatttatccttgcgggatcaacgctatgcgtcgttggcctgatctccggctgcgcgactaacggcatgactcgctccccgtttctcggcgatcgcgagattctcgttccaacgcagtttgaaaatgttttgctatacagggcgcccggattcagttgggggtgttgcactgaagtagtcgtagatgatgccttggtcgcaacgaactcgggtgtcataacggggctagacgcggaacagcaacgagagatcctaggctatacctctgcagagctgcgatcgtactttgcggcatctcttgctactagtgcatcagatcgaatccgaatacgtgtggcgatcactgaactgcagacacctaacagagcagtcaatgcgcttacaacactacttgttgggcctgtgacaacgggtggtgcaagcctggagtttttggcagaggacgatcgaacaggtcaccgcgtattggctgccagctgctttgagcatggcagtccaattgcagattttgcttcttcctactcattgttgggccatgcgaagaattcaattcgtgcatgtatcgaacacgtcggtagcgtctggcgcgatgagagcccttga

SEQ ID NO: 359949 - DNA, 462 bp, Pseudomonas aeruginosa
atgtcccgaaccccctcctttgcgatagtcctcgaaggtggcctggtccaagccatcgtcgtacaagactggccacgccacctaccgctgccgccatttgttgtcgtggactacgacaccgagggcgccgacgatgacgagatcacgcggtttgacatcggccagagcacggccgaagccatctgtcgcagcgacacgccaacagtattcgaatctcttccagacgccctgtctcctcagagcatcctgacggcactgggcgagtcaatcgccgaaaaaatgcccgagcctctagccctcgcccgctcggtacgtgaggagatcgtcgacctggatgctcgcctgaatgccgccgaacagtcaccgacgggcgacgactacaaccaactctacgtcattgccaactgcggcctcatcgaggtgcagaaggcactgggcgacaccaccgacttcggcgactga

SEQ ID NO: 359950 - DNA, 660 bp, Pseudomonas aeruginosa
atggccaacaattactacgacgccaccggcgttctcgtcctcaaccaggtgacccccgtcatctccgcgctgttcggcggcttcaagctcgacgcttccttccccagcgagggacaagcctacatcgcgctcgttgccgaggaccacaacccgagttgggaagacctctgcgaaggactgtcggagctggccacctcgctcgacctgccgctacccgatgatccgctggcagtggaaccgctgctggagaccctgtctcgacatttcggaaccgaccaggacgaagcgctggcgcatctcatcgagcaccatcagtttgaggacgccgcagaccttgatgcgctgttcctgatcgccacgcgattcgatgacggccacggccttcaggaaatccgcttcgagggctgctggcactgcagcaagccgcgcctcttcaacttcggaggcgatgcgcagttctttagccgagagttcgaagcgtactgcgcttccggacaggcgctgcagtttggcgattcggttcgccaagcactactcaaacaagacctggaagcggtcgccaaccacttcacgcgcgaggtccaccgcttgcttgcaggcattcaggacgcatcggtgcgagctcagacgcaaaagcggatgtccgcactgctgcactga

SEQ ID NO: 359951 - DNA, 723 bp, Pseudomonas aeruginosa
atgatccagaagatcaatccctttgctcgcggctactacggcttcgagattcgacgcgtagcggtgatcagctatgacgatcgccatccgcaaattttcgttccgctgcacccctctcagcgccacctgcctgataaccaggtggccttgcatgccggcatattcaacgaggagtatgcgctggtcactgacgaccaggtggtagccgaagaattggatgccacctgcggtggcagcggaaccatcctggcggtttttcatagcatctacggcaagaatgtcgaaggatcgctcatccatattggcgacagccagacccgggaatctgcgcaggaggttgtgcgtacgcttgcattcgagaccggcttttacagccggtgctgggaaatcagcactgtgcacattaccgaggatgcgggtcgattccttttcgaactcgccgacatcgcaacaccgacggcgcttctcttcgtcgcatttcgcattccttacagcccggccatcggcatcaagctgatcgccaccccctggacggatacgaatctgcaacaggtcgaaggcctcaccgctaccgaactgcgtgcggaacaccgcgcaaagggtgtgccagaggaactggccgacctgttgcacctagctggccaggctgacgtgcgcatgttgatcctcgatgcggacgcttccattctggaaggactgtcggtcatcgaggaacgagcatag

SEQ ID NO: 359952 - DNA, 930 bp, Pseudomonas aeruginosa
atggttctaggaattactgcagcctactcctactatcttttccgtacgcagcgagcagagagaaaagctcggcttgaggctattggcgttgtgcgcgagaggaaaatagtctgggcgaatatggcgacgtcgcgcatatttgggtatgaaaacgggcagctggatgggcagccatcacggcatctgtacttgaacgatgaggatcatcagcgtattggaattgctgggtacacagcgctccgcaatgatggtcgatattcagtgcagctgcaaatgcagcgacagaatggtgacgctatttggattgatctaagtggtgcagcagtgtctgaaaaagaaagcttgtggatgatggtagacattgactccataaagcgcagtgaaaagaatgcccaggatttggcattaagcgacgcacttaccggaattgcaaatcggagatcgtttgatttacgccttgagggcgctttgtccaatgcccgccgcaacaaaaaatttattgcagtttgctacatggatcttgatgggttcaagaaaatcaatgatgtctacggccatgatgccggtgataccgtactgtgtcagacggctaagcgattgacggaagccatccgcggtaacgatgtagtcgcacggcttggaggagacgagtttgctgtcctgctgaactctgtcgaaggcactgccggagcaacggtagtaatacagcgctgccttgagcagattcgcgagagcattgagattgcgcctggtaagtacgtgcaaatcgacgcaagtattggaatagttgttggatccggggactctgctccgcaagacttgctgcgaagtgcggacgaaatgatgtattcagtaaaaaaaggaggcaaaggccggatccaggcggttgcgattaagtctattgctgcaaacacggaagaggctaagtga

SEQ ID NO: 359953 - DNA, 531 bp, Pseudomonas aeruginosa
atgtccattcctttaaacgaacgtttaatagtcaggaaggcccaagaaggtgacgcaaaatctctgcaaaactacatgcttaatttggccgccgagaaaaacccaaacatccctctcttagaaaatgaactcctcggggatatttcacttataagtcaaaatataaaaagaaccagcaatagcaaatcggacgctcttctcctacttgtcgatggagaaagaattgttggtaggcttgatataaacggctcgactagacacgcgtactctcatatagcttcattaggactatcaattgcttataacgatcgcaacaaaggcttgggtaaaaccttattggaatatggaattaactacctgcgtaattcaaaaacagtgcacagagtggagatattggttaacacagagaacaaaatagctatatcgctttatgagaagaatggttttaagattgaggccattcaaaaggacaaagttttttttatgggggaatattatgacgccagtctttacagccttctcttaaattaa

SEQ ID NO: 359954 - DNA, 933 bp, Pseudomonas aeruginosa
atggaactacgacaccttcgctatttccttgccgtagccgaagaattgcacttcgcccgtgcggctgagcggctgcatattgagcaatcgccgctgtcgcgcgccatcaaggagcttgaagaagaactgggcgtgattctgcttgcccgcaccactcgcagcacacgacttactcgtgccggaaagttatttatggatcatgtgccgcgcgtcttcgcagcattgcagcaggctcgcgatagcgtgcaagcagctgcgaacggcttccacgggcagttgcgcgtggctctttccgatggcatcaccccgtcgcgtttgccggggctcttggcgctgtgccgccaagaagagccagaggttgagcttcggttcttcgaggtgcctctatcgcagcagatcaagggactgcatgatgacctctatgacgtgggtttcgcgcagtccgacgaagtgggcgacagagttgtcgccatgccggcctggagcgatacgcttatggtggcggtgcctgcgcggcaccctctgttggtccacaagcgcatccctttggatgcgctgttgcgttacccgctagtgctatgcgatccacaggtgtgcgagggtcatgccaagcacgtcgaacgtgtgctgcgtcggacaggcatggagccgttgatagccgagcgtgtggcctcctgcgatctgatgatggcgctggtatccgcaggcttcgcgttgggtctgacgggcgaggcgcacatttccaccagtcgcgaagcgggcgttgtggcacggccgcttgcatcgcgtgtgccgccgctgacgacctacttgctgcgccttgagggcgatccatccgatgagatctcgcgcttcatcgagcgagtgaaggccatccagtcgccagagtctcccaagcatcgacctgattccccgggagcgcttgcgccatga

SEQ ID NO: 359955 - DNA, 834 bp, Pseudomonas aeruginosa
atgttgttcgagagcggaacaactaagtttatggatataggcaaaaccttccgcgaatggatgcttactgtaaaaattcctatgatgataaacggtgccgccatgctcgcggcactaatgggaattacattccccatctttgcagttttcggcatattctggtcgacgagggtaatcttcacctctgttaagattattgctttttgctttattgttgcattcgtgaatgatctttgcttaacaatggcttcaacaatgcttgcagttaatgctgagaccatgcaaggctacaacatgggcaactatgctcaaaactccaccctattaatatcggccggaactggccagtacattatctttgttgcgctgaccgttattgaaatcatcttcgctaaacttttgctctgggatgatgttaagagtcttggaggcttcaatcctgccggtgcaactaccggattggcggcaaccggcatggccgtagtgggagcagcaatacgacttgcgggggctgccttgcctggcggaattgcaggtacagctggggctctagccagtggcggcgccagtgctgcaggtgctccttctggaggtaatccaacacctggtggggggggcggtagtggcggcggtggtccagcgcagcagaaagtacaaactgcggcccaggttgcgggtggcatcgccggagggctgggaggaggtggcggtggacaaaatggcggtggcccaggttcatcgggtgccaacgcacgtttgggagtgaaaattccaactccgcaggcttctcagtcctccaaaggccagcgctcgagcctggacgatctcatctga

SEQ ID NO: 359956 - DNA, 507 bp, Pseudomonas aeruginosa
atgaaccagcctcccgccgactaccaaatcagcgccgccgacgcgcacgaactggccggcgccgtgcttctgccggcggacctgcgccgccaggtgctggagaagatggccgcccagcgagacccggccaccatgctcgacctgttcgcccaggtgctgggcatggccaacgccgtcgccgagaactgccgagcgatggtcgagttgatcctcatcgagcgcggcgaacatccgcacaccgcggagcaggcgaacctcccgacgatgttcggagcgctgcagggcgttgtcctggccgcaacggtgaaccctcgcgacacgtgcgccggctgcgcctatcgactcggcaccccggcgaacacctcgccggtcaccacctccgatgccatctactgccggcaggaactcagccggttctactgccacgccgacctggacgaccagggcaacccagtccgcacctgcgtcggccacgccaaagccatgaagcaagacgccacgaaatga

SEQ ID NO: 359957 - DNA, 417 bp, Pseudomonas aeruginosa
atggtttcccaggatctctatcgctctgtagtgagtggtgatgggatcatcgcggaactgcttcgacaagatccgaaacacaagccgttcgagcagtatctcggcacagtcgccgaattcgactccattccggaggcatctcagcgagatctaggcaagagaaatacggtaatcgcttgcctggccagcttcgcgcggaccacgcagacctggagccttgctcctccgctcaacgaagttccagggcttcattttgtcgcgatcgattggcaggcaaagaatggtgcacacgtacttcgttctggcctggcgattggcgacgcccccctaacgaaagaggacctggccgagatcgcttcgattcaactcggcttgcatctggcgcgctgcccccaagaatcaccgatcgacttctga

SEQ ID NO: 359958 - DNA, 2400 bp, Pseudomonas aeruginosa
atgagcaatgaaacattcaatacccagcagtggacctcgctcatgagcagtccctgggccctaacgcaggccgcagcatcgtatacggtcgatgcttggcaaagggcgatcctgtacagcgatgttcggcgacaacggggtgatcagtaccgcgcgcatttgctcgaagaaacccccaacgttctggacttcgctagcgaattcgtaatgtctggtctagatctaccgcggccggtcaattacgcgatggtgcgaatcctgccaaccatcgaccaaccgactgacgagggcaaacgtcctttcatcgtattcgacccgcgcgcagggcatggcccaggtatcggaggttttaaacccgacagcgaaattggcgcggcactgaaggctggccatccgtgctacttcgtcggtttccttccagatcctgtacctggtcaaaccattgaggacgtcactcgcgcagatgctgagttcgtgcgtagagcgagcgaactgcatcccgagagcgtagggaagcccgctgtgattggcaattgccaggccggctggcaggttctgatggctgccgcactatggcctgaccttttcggtcccatcatcgtggctggtgcgccactttcgtattgggcgggcaacaatccgatgcgatatgccggcggcttgttgggtgggagttggctcacggcaatgacaagtgaccttggtgctggccggttcgatggtgcttggctggtgcgcaatttcgaaagccttaaccccgcgaatacatggtggggtaagcagtacaacctgtacgcaaacgtagacaccgaggcttcacgctatctgagctttgagaagtactggggcgggtacgtttttctcaatgatgtagagatgcaatacatcgtggacaacttgttcattggcaacaagctgtcctcggcagagatgattacctctgatggcatgcgcattgatctgcgcaacattcgctcgcccattgtggttttctgctcgtatggggacaacataaccccaccaccacaggcgctgggttggatcacggatctttatcgagatgattcggacgtactaagccacgatcaaactattgtgtttgcaacgcatgagagcatcggccatctcggcatcttcgtgtcaggcagcgtaggaagaaaggaacaccgggaatttactgccggtatcgacatcatcgaccttcttcctgctggagtctaccgtgcagacgtggtggacgctgagacgccagaagttgctgccgatggcaaatacacgatgctcatccggcccagtagcgtggatgaggtgcggtctatcgttaaaccagatccgcaaagtgaccgccgattcgctgccgcggagcagatatccaatatcaatcttggtctctaccgtacgttccttcaaccttgggtgaaggcgtgctcgtcgagttattcggcgcagtggatgcaagcactccacccactgcgactgtcctacggatggtggtctagtgcccatcctttggcagaaacaatccagcaagctacgcggcaaattgaagagctacgctgccccgtggatgacaccaacccgttcttggtcgccgaaaaggagctgtcgagatccgttgtatttctactggacctttatagagatcatcgagaccaacttcaggcgtggatctttgaaagcatctatggatcgccatgggttcaggcgcttgcggcacagggtcactcaaataacgagagtattcggccgcatcctggcgactcccccgaataccgtgaattcatggagtatgagctaggccaagctcaagctcgtatgttgcaaggaggtttgctggaagctggcgtgcgagccttgttctatgtacttcgcaatcgcactgaaggcaacgcgacacgctatcgccatgctgcgcagctgcgcgacccgcgacatgagcatgaacgctacgacatggccgagtggcgccaccttgtacgcggccaggcgctgctgctggcatatgacatggatgcggctatctcagcaatcccaacattactcgcaagcgcgagcgcggatgaaatccgcttattggcttcatctgttgagcagatgattcatctcgctgaaaccgaactctccgacgacgaacgaacgtcgctcgcacgcatgcttaccgtatttagcgttgctgcggaacagcgcaacttaagtgctctaccttctgaaagtacgctatctgagacaactgagaccggggcgtttggcggagtgcagaaatcaaaacaacaggtcggttctaaacgaatagctgcgcaacctaaagctccaagatcacctgctcagcaaaaacctaaggctcaagtcaagcaacctccggccaagcgagtgccggtaaatcgcagaggacggtcgtga

SEQ ID NO: 359959 - DNA, 237 bp, Pseudomonas aeruginosa; identical to SEQ ID NO: 332089

SEQ ID NO: 359960 - DNA, 360 bp, Pseudomonas aeruginosa; identical to SEQ ID NO: 324725

SEQ ID NO: 359961 - DNA, 765 bp, Pseudomonas aeruginosa
atggacatccctcgaatattcagcattatggagagcgcgcaccggattcataatccgttcacctccgacaagttcgaaacgttgggtttggcgttgcgtcttgaacctgggacgcgagtgctcgatttaggtagtgggtccggtgagatgctgtgcacttgggcccgtgatcacggcatcgtcggtactggcattgacatgagtccgttgttcactgagcaagcaaagctgcgggcgcacgacctaggcgtggctcaacaggttgaattcatccatgacgatgcagctggctacgcctctgaggataagtttgacgtcgctgcttgcgtaggggctacttggataggtggaggagtcgccggcactatcgagcttctcgcgcaaagcctgaggactggaggagtcattctgatcggcgagccgtattggcggcagttgccaccgacagaggacgtggccaagggatgtcttgctaactcgatctccgactttcttgtgcttccaagacttatcgcctcgttcggccagattggctatgacgtagttgaaatggttctggccaatcaagatggttgggatcgttacgaagctgccaaatggatcactatgcgccgttggcttgaagcgaatcctgaggatgaactgactgaggtggtccgctccaagttgacctcagagccggagcgtcataccacatacacccgcgagtatttgggctggggggtatttgccttgatgtcacagcgtgcgttcgaaaataattaa

SEQ ID NO: 359962 - DNA, 345 bp, Pseudomonas aeruginosa
atggctactgtaaattctactgaaacccccgttttctctggctggcatatgttcgcgacaggtgcctgccatggggttgaacatgaaaaaatatcaagttcagccagcgttctaaatgcgatttcactcattgggaagacggttctggtcgagctggtgtgggaggatgactcggagacgctatggcgctgtgtgcgaattgccggggtagttcttgctttggagggtgtctatgaacatccgcacttcatggtgtttagcctgttcggaagcgagacctatccaagtgagatgttctggtcggacattcgtacgttgcgggtgttgaagcatcgggtggactaa

SEQ ID NO: 359963 - DNA, 297 bp, Pseudomonas aeruginosa
gtgctgatcgtcgtcggtctggcagtggtcggtacgctgctcagcctcttcgccctgaaccacttcggcggcatccagggcctggaggcctggcggcaaagcaactactggagtttgttctcctggagggcgctgctgtactgcgccctggccatcgcctggttccggctcaagcagcgcagggaactgagcgcgcatgagcggcagcgcattcggcggatcgagatcctggtgctgttgctgatcctgctcatcgaattcagcaaagcctacttccgcacgggaggcgcagcatga

SEQ ID NO: 359964 - DNA, 726 bp, Pseudomonas aeruginosa
atgaagaagcgccttatcgccgccgccatcgcggccatgctttgcactgccaccgcccatgcgcaatgggtggtgatcgaccccacgaacctcgtgcagaacacgctgactgcaatccgcacgctggagcagatcaacaaccagatccagcagcttcagaacgaagcgcagatgctgatgaaccaggcgcgcaacctcgccagcctgccgtccagcgtggtcggccagttgcgcgccaatctggcgacgaccgagcggctgatcgcgcaggcccgcggcttggcctacgacgtgacgaatctggatcgggagttcgcgcgcctgtatcccgagcagtacgccgccacggtgagcggcgaccagatgtaccgcgacgcgcaggagcgttggaagaacaccctcaacggcttgcagaccacgatgcagatgcaggcccaggtgtcgcagaacctgggcgaagacgaaagcgtgctggccgatctcgtgggcaagagccagtcggctcaaggtgcgttgcaagccatgcaggccatgaaccagttgctggcattgcaggccaagcagtcgatccagtcgcaacggctccagatcacgcaggatcgtgcggcctcgctggaactggcgcggcaggcggcggccaccgagcgcgcccgcgaggtgcggcgacgtttcctgggcgatggcacgcagtacacgccgcagcgcgtggatttctacggcaactga

SEQ ID NO: 359965 - DNA, 351 bp, Pseudomonas aeruginosa
ttgttccagagcgcgaatggcaccagcacgaatccggcgagcgtggtcagcttgaactcgatcagcgtgatgaacagttggatcgccagcacgaagaaacacaagaccacgaccagccacgcgaggaacatcaccacgatggggtcgaggttcacgaacacttcgggaaagcccgccatctcgccgatctgctccagaatcggcgccccggcgtcgatgccggttttcgccagccggcccggctgcaagaagttctccatcgtgatggccgagccggtggcggtgatgcccaatcccgcaaacgagcggaacacgatgctggccagccagttgaagttattgatgatgtag

SEQ ID NO: 359966 - DNA, 264 bp, Pseudomonas aeruginosa
atgagacaaaagtcgggtatcacctatacccgacttttcagccccgccaccctcgcccaccaccaccaaaaccgcaccagagagcgcgtaacgatgcgagcagaaagagacgacttccggcccgtcagaagaacagcagagcggcgactggcctacgagatagccctagggatatggctgggcggaatggctctaggcctcacatcgttcgcactgtggttcttcgcgctgagcgcaatggtcggagcactgaagttcggctga

SEQ ID NO: 359967 - DNA, 678 bp, Pseudomonas aeruginosa; identical to SEQ ID NO: 324683

SEQ ID NO: 359968 - DNA, 507 bp, Pseudomonas aeruginosa; identical to SEQ ID NO: 359956

SEQ ID NO: 359969 - DNA, 843 bp, Pseudomonas aeruginosa
atgagcaacatcagcagcaagaccgtttccaacaccaaagcccagccctccaccgaggtcagcgtcgagatcatcggcggcaaacccaccacgaccagcctcgacgtcgccaaacacttcggcaagcagcacaaggatgttctgcgcgcgatccgcaatttggattgctcgacggagtttcatgagcgcaattttgcgcccacgatccagaccgtgctggggcccaaaggggccaagcgggaggaacccgcattccgcatgacccgcgacggcttcaccttcctctgcatgggattcaccggcaaggaggccgcccggtggaaggaggcctacatcaacgccttcaacaagatggaacaggcgctcatcgagcaacccgagatcctcagtcacaaccacctgctccagttcgccatcaagaccctcgacttgatgcgcgaccacaccctcggcgagccggcccgccccaggacagaacaggtcgtatgcaactacctggccgtcgagtccttggacgcggcgaatcccgagcagatcaagcaggccctgaacttcctccagggtcagatcatcggtgaaggtgtggccgccaagtccttgcccagcgtggccggctcttccatcgccaaggatttgctctacggcttgctgcgctccgctcatgacgcggagctactgttcaactccctctacgacagtggcgtcgaaaagctggccagcgaagtgttcaaggagcacatggccaacaccttggctgcaacgtctcggcaaacccgtgaactgctcgggtacgtggccagccgcgccactcgctcccccttcaaaacacgctccacccactaa

SEQ ID NO: 359970 - DNA, 354 bp, Pseudomonas aeruginosa
atgatcggaaatcgactgagggaagaaaggcttcgactggaaatgagccaagacgccttttcacagcactgtggggtgacgaagaacactcaggtttcgtatgagaagggacggcgcagtcccgataccacctatctgcttaaagccatcgagatcggagtcgacgttctatacgtagtcactggccgacatgttccagcggcggtgaaagcgctcactcaagagcagctggatatcctcaattacatgtccggaatgtccgagcaaaaccgcgccgatctcgttcgcgtgggaagggcaatgtatgacgccaaccagtttcgaaggatggcgcctgcaaactccctgtcttaa

SEQ ID NO: 359971 - DNA, 489 bp, Pseudomonas aeruginosa
atggctacccccgtcttctgggaaggcaacatcggctcgacgccggagcaccgtagcttccccaacggcaacaatcccccgcggcagttgctgcgtctcaacgtgatgttcgacaactcgattcccgatggccaaggtggctacaaggatcgcggcggcttctggtgcagcgtcgagtggtggcatcaggatgcccagcgcttcgccgaactgttcgcgaaaggtatgcgcgtcaaggtcgaaggcagggcgatcatggaccgctggcccgacaaagagtcaggggaagaagtccaggcgctgaaggtcgaagcctcgcgcatttccatccttccgcatcgcctggccgaggtcaccctgttgccgtctaccaacggccagtcgacacaacatcagcagtctcggcaggtgccgccgcaacctgctcagcaggatgcgcaatcgcagcaggactacgacagcgccttcgacgacgacatccccatgtaa

SEQ ID NO: 359972 - DNA, 717 bp, Pseudomonas aeruginosa
atggatgacatcgacgcggtttggctgatcgtgcatccatgccaccggctgctgcctctccagctctgcgaccctggccagggcggcgtcatgtgcctcgcacttttccagcatgtagcgcagcgaatccagcagttcgcctttgtccgggttcataccgatgtcgtggccgatggcttcccacgcctccagaacggtgatcacctcggagcggaacccggaataccagagctttaccgcttcttccttgtgcagcgggtagccgagcccggctgcttcaagctcgtcctcggttggcccctccggccgctccgcctctgcctgctcaggtctgagcgcatcggcaggcgcttcgttgaacgcttccgcatgcggggcgaggttgagtgggtcgagttgctcgcgaaacgcctggagccgctcgatgcgctccgcctctttctccggagtggactcgaactcgtacagccgctgggcggcttcgactaccagccgagacgacacgccggcgctgaagcggacgccaccgaccttggctggctgttccagcttgggccagtggttgaatgctcggcgggcgagggcaatgtcgcagaccgcagccggaacaggctggccgtcctcgccctcgagttcgttggccagccactcttcgaagctggcttccgatcgagccggcgcctggtccttgatcagggccagcaggctctcggctga

SEQ ID NO: 359973 - DNA, 717 bp, Pseudomonas aeruginosa; identical to SEQ ID NO: 359972

SEQ ID NO: 359974 - DNA, 978 bp, Pseudomonas aeruginosa
atgttcggcttcttcgaactgcaactgccggctgccctgcgcgaccgcctcgacggtctcagtcgcggccgcaagggcggcagcctggccggcgccgctgcgctcggcgcgttgtccgggctgctggtgggaccgtgcatgaccgcgccgctggccggcgccttgctctatatcgcgcagaccggcaatgccctgcatggcggcctggtgctgttcagcctgggcctcggcatcggcatgccgctgttgctgctggtgacggtcggcagccgcttcctgcccaagcccggtccctggatgaacctggtcaagggcgtgttcggcttccttttcctcggcaccgcctggatactcctgcgtccgctgctcggcgaggcgctgtggatcggccttggcggcgcgttgctgctggtcctggcctacgccgcgctgcacacggcgcgaggcctggcgcggcacgcggtgctgttcggcgcggcgggctgcatcttcggtctctggggcgcggcgatgttgctgggcgccgcggccggggccgacgacccctggcgtccgctacaggtgtatgcggcggcgaaccggggcgctacgccgacggccagcgcccacgaggcgttcctcacggtgagccagccggccgagctggaccgtcagttggctgcggccaaggccgagggacaatgggtgctgctcgactactacgctgactggtgcgtgtcctgccggatcatggagaaacaggtgttcgccaagcccgatgtgctcgccgccctgcagggcgtgcgcctgctgcggctcgacgtgaccgcggataacgccgccagccgcgagctgctgcaccgctaccaggtacccggcccgccgagcctgatctggatcggcccggaaggcgaggagcgccgcgcgcgccggttgaccggcgaagtcgacgccggcggcttcctcgcccattggcaggcgacccgggagcgcggctga

SEQ ID NO: 359975 - DNA, 273 bp, Pseudomonas aeruginosa
atggacgaccagcaaccgcgggcgttctacgactacatccgtaacaaggactacggcctgtcgccggaaatcccggcggacaagcgcaccctcaaccagttccgccgcttcaccggccgcgccgagggcctgtcgatcagcttcgaggcgcacctgctgggctccaggatcgagtacgacgaggagcgcgacacgctgaggatcagcagtctccccactcagcttcgcgaccagctcaagcgccgcaaggcggagcaggagagcacgtcatga

SEQ ID NO: 359976 - DNA, 891 bp, Pseudomonas aeruginosa
atgaaaggggttcgtcgcccaatcctgcgctaccacggaggcaagtggaaacttgctccctggatcatccagcacctggcgccacatcacacttacgtcgagcccttcggcggcgcagcctccgtcctgctccggaaagcccgcagctacgccgagatctataacgacctcgacggggacgtggtgaacctgttccgagtcgcgcgggatcacggtgaggaactgcgccaggccctggcgcttaccccgtttgcccgggaagagttcgaagccagctacgcggaaacgtccgatccgctcgagcgcgcgcggcggatggttatccgaagcttgcaaggtttcggtaccgcagctgcgtccggcgaacgtacagggttccgctcaacctcgaccagatccggtaccggacctgcactggactggcgcaactaccccgacacgctgaccgcgataacagaacgcctgcagggcgtggtgattgagaaccgcgacgccctcgcgctgatggagtatcacgaccggccgaatacgctgcactacgtggacccgccctacgtccactcgacccgcagcacgaaggtgcgccacaacgccaccggcaagtcgtaccggtacgaactggacgacaaccagcacaaggagttggcggcattcctcaaacggctgcgcggcatggtggtgctctccggatatccctgccccctctacgacgagctctacagcacctggcacagagtcgaccgccacgcctatgcagacggctccagagagcgaatcgaatgcctctggctcaacagcgcagcgcttgaggggttggcacaactggacttcttccaggccagtaatgcgtctccatcgccctcattccagaccacggccgctcattactga

SEQ ID NO: 359977 - DNA, 237 bp, Pseudomonas aeruginosa; identical to SEQ ID NO: 332089

SEQ ID NO: 359978 - DNA, 354 bp, Pseudomonas aeruginosa
atgatcgggaatcgtctgagagaagaaaggcttcgactggaaatgagccaagacgccttttcacagcactgtggggtgacgaagaacactcaggtttcgtatgagaagggacggcgcagtcccgataccacctatctgcttaaagccatcgagatcggagtcgacgttctatacgtagtcactggccgacatgttccagcggcggtgaaagcgctcactcaagagcagctggatatcctcaattacatgtccggaatgtccgagcaaaaccgcgccgatctcgttcgcgtgggaagggcaatgtatgacgccaaccagtttcgaaggatggcgcctgcaaactccctgtcttaa

SEQ ID NO: 359979 - DNA, 489 bp, Pseudomonas aeruginosa
atggctacccccgtcttctgggaaggcaacatcggctcggcgccggagcaccgcagcttccccaacggcaacaaccctccgcggcagttgctgcgtctcaacgtgatgttcgacaactcgattcccgatggccaaggtggctacaaggatcgcggcggcttctggtgcagcgtcgagtggtggcatcaggatgcccagcgtttcgccgaactgttcgcgaaaggtatgcgcgtcaaggtcgaaggcagggcgatcatggaccgctggcccgacaaagagtcaggcgaagaagtccaggctctgaaggtcgaagcctcgcgcatttccatccttccgcatcgcctggccgaggtcaccctgttgccgtctaccaacggccagtcgacacaacatcagcagtctcggcaggtgccgcagcaacctgctcagcaggatgcgcaatcgcagcaggactacgacagcgccttcgacgacgacatccccatgtag

SEQ ID NO: 359980 - DNA, 717 bp, Pseudomonas aeruginosa; identical to SEQ ID NO: 359972

SEQ ID NO: 359981 - DNA, 315 bp, Pseudomonas aeruginosa
atgtcgacgagcaagttaacccccgagcaagagtcaagatcacgcgatttcgaggcgctgttcttgagccagcttctgtcggtgggccagaaagtcgtcgccgattcagtcggcttgagcgagtcggctatcaccgggtggaagaaggacggcctcatcgagcgcttctgcaaggccgcctcggtgcttgagcttcagatcgttccccagcatgcggtggtcgtcagcgcggactatctccgttcgctggagacgctggccgagttgggcctcaaggccgagaagaagcggccaggaccgctgggttgggactga

SEQ ID NO: 359982 - DNA, 234 bp, Pseudomonas aeruginosa; identical to SEQ ID NO: 356578

SEQ ID NO: 359983 - DNA, 735 bp, Pseudomonas aeruginosa; identical to SEQ ID NO: 358302

SEQ ID NO: 359984 - DNA, 576 bp, Pseudomonas aeruginosa
ttgcacctggccgcgcggatcaacatctccgagtggcgtaacaacaagcagtcgatgcagtacatctcgttcatcaagggcaagggcgggaagaaggtcaccgactacttccgcgatttcatcggctgccaggaaggggtggattcgccgagcgagacgcgcaccctgctgaaagccttcagcgagttcgtggagagcgagggcatggccgagcagcaggcccgcgagaaaaccgagacgctggtcgactacgccacctcgcaggcgcgcatcggcgagccgatgaccctcgacgcgctctcggaactgatggacgagcagcaaccgcgggcgttctacgactacatccgtaacaaggactacggcctgtcgccggaaatcccggcggacaagcgcaccctcaaccagttccgccgcttcaccggccgcgccgaaggcctgtcgatcagcttcgagtcgcacctgctgggctccaggatcgagtacgacgaggagcgcgacacgctgcagatcagcagccttcccactcaactccgcgaccagctcaagcggcgcaaggcccaaattggagaatga

SEQ ID NO: 359985 - DNA, 180 bp, Pseudomonas aeruginosa
gtggcgatcgccaacggcacgctggctgccgcggtcggcctgggcctgcaactgtggattcccggcgtggtgctctggatcgtcggccattcgctggcggtgtggggtgcgcgcgtcgatccgcagttcatgcaggtctttgcgcggcacatcaagcaccgcccgctgctggacgtgtga

SEQ ID NO: 359986 - DNA, 258 bp, Pseudomonas aeruginosa
atgggccagccggcccgtccggtacgcctgctcgggcttcatacgcccgccagcctgcgagccgctgcgctgcggatcgcattcgaccagcgcgacaaagccatcgtcggccagcttctgatgctcggggcacaggccccagccggtcgccgtgtggcgccccatgctcgcgcgcaggcgcttgtccagcaggatggcgccggtatcgaacgccgtgccgcagaccaggcaaacgtgctgttcgagggaaacgtgtga

SEQ ID NO: 359987 - DNA, 252 bp, Pseudomonas aeruginosa
atgacggcccctgccggcgagagcattccggaaggcatgttgatcctcgtcgacaccgggctcgagccgaggcctggcgatctggtggttgcgaagctggccgacagcaacgaggcaaccttcaaacagttcgtgtccgacgcaggccagaagtacctgaaacccctgaaccccgcatatcgcatgctatccatcgacgacaactgcgagatggtcggcgttgtcacccgagctatccgcaagttcaggtga

SEQ ID NO: 359988 - DNA, 264 bp, Pseudomonas aeruginosa
atggaatggtttctgaaatgcgtgaaggaacactacttcgacttcaacgggcgtgcccgtcgagcaaacgccccccagaacagccaagagaatccgcatcagcgcctctcccaacgttctcgccgaggaaaagactcggagcaggcaatgcaaaagcgtgcaaagaagcagcacaagcagggcaacgagccacagcacaagcttgccgatggcgcttctccactcctcgtagaagaagtcgaccatggagtcgaccgcccgtag

SEQ ID NO: 359989 - DNA, 2655 bp, Pseudomonas aeruginosa
atggccgccaccttgcagcgtgccgccggcattctcggtgcggccgcgtgtgtccacggccagtttgccgtcggtggagacgaccagaccgccgtcgcggttgtccagcataccggcctggatgccgaggtctgcggcactgacgagcttgccgccacggttgtccagcgtctcctggacggtggtggtcaacgggcctgcggcattgaccgcgccgccgcgattgtcgagcgaaccggcgcgcacatcggtcttgccagagctgacgatgacgccgttgccccggttgtccaggttgccggcgacttccacggccaggccggcgtcattggcggtttgcactttaccggcctggttgacgagttcgcccgccttgacggtggtggcgccggccgcggccagtgtgccgccggtgttgtccagggtgcgcgccacgtcgacacgggtggccgcatcgcccgccgcctgcacgctgccgtcgcgattggtcagcgaaccggtttggatatccagcgcgccattgccggcgatagtgccgccggtgttgtccacgctgtcgccggcgcggaccagcaacaagtcggcgccggtggcgatgagcttgccgccggcattgagcaagcggcccgtgtggatgcgtatacgctcgccgaacgtgtttccctgactgaggtcagtggtgttaccgctgatatcgagcgcaccgttgctggcgatggtgccgcccgcgccttgcaggtcgcccgcgaacagggtggcgctgccatcgccggcatgctggatggcgccgtcgcggttgtcgaggacggacgcgctgacggtcaggtcgctgtctgcggcgagcgtgcccttggcgctgttgtccaaggcgccatccacacgcacggtcaaggcggattggccggcagcggcaacggtgccgccctggttattcaaactgcccgccgttaccgtggtgtcgcccgcggcgatgacattgccgttacggttgtcgaactggcccgcgacagcgatgcggttgtcaccgttgcctgcggcctggattttgcccgcctgattgacgagcgctcccgtgcgcaggtccagcgcaccgttgctggcaagggtgccgttggtgttgtcgatgcgctcgcgcgcccgcacgaccagcgggtcagcgccggtagccgccacggtgccgtccacgttggtgagtgtgccggtgtcgatttggacctgtctggcctgcgtgataccgccgctgacgtcggtggtgttgccgctcagcgccagggtgccattgctgacgatggttccacctgcgccttgcaggtcgccggccgctattttcgcgatgccttcaccggcgtgctggatggcaccggcgcgattgtcgagcaccgacgtgctgacggtcaggtcgccacctgcggcgagcgtgcccttggcgctgttgtccaggcgattggcgacgtccacggtcagcgccacgtggtctgctgcgaggacggtgccgccccggttggagaggtcgcccgcagtgatgtgggtgctcccgccagccaccagttcgccgccgtcgttgtcaagcttaccgtcaacctccacgcgggtatcggcggaacctgccgcactgattttcccgtcccggttgccgagagaggcggtgtgcatatcaagcgcaccattgccggcgatggtgccgccggtgttgtccaggctgtcgcgggcgcggaccaggagcaggtcggcgccagtggcgatgagcttgccgccagcattgagcaggcggccggtgtcgatgcggatgcgttcgccgaacgtgctgccgtcgctgaggtcggtggtattgccactgatatcgagagcgccgttgctgccaatgctgccgccagcgccttgaaggtcagcagcgacgatggtggcactgccgtcgccggcatgctggatggcaccatcgcggttgtcgagcaccgacgcgctgacgttcaggtcgccgccggcggcaagcgttcctttggcgcggttgtccagcaggccgtccacggtgacttccagggccgcttgcccggcaactacgatggagccgcgctggttatgcagttcggcagctgtgaccttggtatctccagccgtggccagggtgccatcggtgttgtcgaagtcatcggtgaccgcgacgcgggtggccgcagaacctgccgccgacatcgtgccagcctggttgtcgagggaccgcgcctgcaaatccagtccgccgttggtggcaatggtgccgcccgtgttgtccacgtggtcgcgcgcacgcaccgtcagcaggtccgtgcccgtagccgtcaggctaccgcccgcagtggtcagcgaaccggtgtcgatgttgatgcgcctggccagcgtggttgcatcgtgcaggtcggtggtctcaccggacaggttcagtccgccattggtggcgatggtgccaccggcgcccagcagggcgttggcggtcagcagcagcgagccgtcgccagcgtgctgaatactgccttcgcgattgtccagcgtattggcggagacggtcatgtcgccgcctgcggccagcgtgcctttgccgcggttgtcgagcgtgccggccacatcgacggtcagcgcggattgaccggacgcgacgaccgagcctccccggttggttag

SEQ ID NO: 359990 - DNA, 1980 bp, Pseudomonas aeruginosa
atggtcgctatcacccaggcgcaaccgggccgcgccggccgtggccgtctcaccgcccgcaccgctgaatgtcccggcattgaccacaagaccaccgtcgcccgagtgggcgatttggccgtcggtgttgaccaactggccggcgtccagggtcagacggttggcattgctggccagcgtgccgtcgctgttgtcgaaccggccgctgaccttgatgtgggtatcggacttgtcgctgtgctggaaggtgccggcccggttggagaagtcctgtgcgctcaaggcgacggggccggccagttgcatcaggccggcgtcgttgttgagctgccccgcggcaatgcgcgcatcgccggcgaccttgatttcacccctgcggttactgacgtcgccaccgctcacgtcgagccgacgcgtgccgaggtgcccgccatcattgtcgaggccagccttggcggtcaggtcgacatcgccgccagccatgatgcggccaccatcgttgtcgaacgtggcggcaatattgagcgcgccattggccagcggcgcgacgccggtgcctggccggtcgccgccggtgcctccgttgcccgtcgagccgccgccggtgccatccgtaccggttcccggtgttccaccatcgcccggtggcatgccggtatcggccgccgccagaccaatgcggcctccctcacggttgctggcgtgcgcagcgctcagcaccaggtcctgagtgccggtctgctcgatggcgccgccacgattcttcagcgactgcgcgttggcctcgatgcggcgtgcgttgagtgtgccctggctgttgtcgatgtcctgcgcagtgttgaccagaagctcgcggcccgcgctgaccgtgccggcgttggcaaggccgccgctggcgtcaatgcgggtgtcggtcctggcctgcatcgtgccgctgttttccaggcggccatcggccgtgaccaccagttggccgaccccggcgccaatggtgccgacgttgcgcatcccgacaccgtgttcggtgccgaccagcacaatcttctggctgtacatgccgccgagggcacccacgtccagcgcgaaagcaggcgtgtcgccgctggcggcgattttctgcacctgtgtatggtcggcgctgacctcgttggtaccggtggtgacctgcaactgttgcgcccagatgccggcattggcttgcacggaacgggcaatcagatccgtgtagttcgtggtactggcatccatgccgttgccaccgatttggatggctccgccttccacgcggtagccctccagcgagccgccattgatgatgggcttgccagtggtgagagtggagcgatcggcattgatgaagccacaaccatcgcaggaaatgccggccgggttggcgataacgagctgcgcacggtcaccggccacttcgacatagccgcgcaactggctggggttgctggagttcacctcgttcaggatgacgcgggcggtgccgcgagcaagccacgggttgccctgtacccagccgcccagctcggtctgtgtattggcgcgggagttgttgaggatggcgccttgctggtctacgtcgaactgcctgtaggtgttgcgcgacacacccgccgcgctcggcgtctggatgttcaccagcggaacgccgttggccgcttccagtaccgtcgggcgctggttgccgggcgcactcgggtcggccacgacctgggcattcgccatagggacgacaaccgcctgaccgagcgcgagcgctatggcgaagcgcaagggtctgacggtggcaaggaaccggctgccggcagcagtggtgccgtcgcttccgcctggtccattacgccgtgcgatctctgcgacaacctggaacaggcccagcgcccggttgaatacgatgcggtagaggttcttgttcatgccatcacatcccttgcttgcgcattgactgcggaattcagtaggaccagctga

SEQ ID NO: 359991 - DNA, 726 bp, Pseudomonas aeruginosa; identical to SEQ ID NO: 341003

SEQ ID NO: 359992 - DNA, 132 bp, Pseudomonas aeruginosa
atgaacgtccaacccaatgaaaatcaaggaaagtccgggagctttccatgctggctcaagcaccttgcgaaacgtccgccgaagaaaagcggcggttcgcacgacgactactgcttcgtcatggtgcgttga

SEQ ID NO: 359993 - DNA, 345 bp, Pseudomonas aeruginosa; identical to SEQ ID NO: 345846

SEQ ID NO: 359994 - DNA, 402 bp, Pseudomonas aeruginosa
atggacgttaaatcacctgaagcggttcaggaggaaatcctgaccgcagcaatggccaagctgaaagatgaagccaaagccgttatcgacgacgtaatgggccagctttacatcgactatctcccgtacgtgattacggatacggaagtcaacatagcgaatcgcgcctctgaatgtgtgcgcaatctgatcgcagggaagttcgaagttcatgacaaccacgccgtggttagtgatgggcatgggcagaaccattacatcttcatgagcagctggtctgacatggttaagccgctttgcgaggctatgggcgagcagatcaaagacgcccgtatcgaacagcttgaacgccaagtagatcgcctgaaaaacgaactagctgaagcttggcgaaaccgctaa

SEQ ID NO: 359995 - DNA, 366 bp, Pseudomonas aeruginosa
atgtttggtgtttcgctgcgcactatcagctactggagatcaggaaaggaagaattcgccggcgcgctcaagctggggaagaacgaggctgacgatagagttgaacaagctctctacaaccgagcaatggggttcagccatgtcgacacggatatccgcgttgtagatggcgcaatcgttgagacgcccatcgtcaagcactatgcccccgacactaccgctgcaatcttctggctgaagaaccggcgccctgatgagtggcgcgacaagcatgaccttgagcattctggccagatcaagatggcggaaatgagtgatgaagagatccagcggagaatcgaagctctcagccgagaggattcgtaa

SEQ ID NO: 359996 - DNA, 1104 bp, Pseudomonas aeruginosa
atgcccagcaggtcgagacgcgtctccagcttcagcgtactcgcgccctcgctggtgaacgccaggcgcaacgcggtgacgctatcggcatcgcgctccagcggctcgctgcgcaagcccagcgcgctcggccgcaactcggccggcagcgcctgcaaccactcgccgtgcaactggctcaggcgcaagtcgctgcgcagctggcgtggcaaccaggcgccctcgtctccatccagttggacttgcagttcgccctgtacattacccagaccgggcagcggccaggcttgcggagcctgcaccagcagcgccgccgagccaccgccgtcgagcacccggcgcggttccagccagtcgctgccaggcgccaggcggatcgtccagtccgcttgcagacgcagggcttgcggtgcgtcgggcaggcgctgcgcttccggcaaccagcgattgagccagaccaccaggccacgggtgtccggcaggccgggcgcctccaggcgcccctgccagaggccgtcgccatcggacggcacgagctggctgtccagcgtcagcagcgcctgccggtcgagttgcgcgcgcgcgcgcaggcgccagccggtaggctcctcgaagagctgggcgtcgagctgggcctgctgcgcctcctgttgcaggcgcagttgcgcagccagcggaaacagcgctcccgacgggcggccgatgtccagtccgccttcctgctcgcagcggccggcgggacaaggcaggtcgagatggaagcgttcgaggtggatctgttccggcagccaggcgagggtctcgcgcagggacgtccagtccagcgcagcggagtcgtcgtcggaactcgcggcagccggttgccaggcgagcgccacttgctccacgcgcaggccgggtagacgcggacgccaacccgacagcccgggccagcgcagcagcgcgtgttccacgtccagtcgcaggctggcgccatccgcgccgcgccgctccagcgccagccgtcgcagcccgatgccttcggcggacaggcccaggccttgccactccaggcgctcgacaccctgctcgcgcaacaggctgcgccaggcatgccagccgtag

SEQ ID NO: 359997 - DNA, 591 bp, Pseudomonas aeruginosa
atgactaacgtctcagccccactgcgagcgcagacccagtggttccatgttttcagggcaatgattgatcagggcgatgtcgcccgaattgggccccatgcgtttacggtttatgccgtcatcaaggcacatgccaatttcgaccatggattatcgaaacccggcatccaacgaatttccgaacaatctggagtcagtcaggcacaggtcaaacgggcgttaggggttctcgaaaaagcaggtttcattgcaaagaaaaagctcggccgatccaatcactacatgctacgcgaaaaggtccaggtcacagaggccggcttaccacataccgtagtaacctgggaatacgtgccggaccgcgcccagcagaccgttaatgagcttaaaaaagccttgatcgccggcgatctcgcaagtacgcgaacactgaatatcgagcgtctgaatatacaaatcaatctggcaggtggtaattcccagatcgatttaggctcgttgcacaccgacctagatcgactgccagccggcattcgagaaacgctgcgcagacacctcaatcgccgtagcgatcttatacacagctcagagtga

SEQ ID NO: 359998 - DNA, 249 bp, Pseudomonas aeruginosa
atgaatgctcgtatcgaaatcacggtcaacccaggagaaaatgaacgctcggctatccttaaacccttacgggctcataatttttctaaagcgggtgatccaaaatcggagtcaatcgctctgctagtccgcgatgagcaaaccaacgacatcattggggggctttacggtgagatattttatcgttggttatttatcgagttgctagccatacctgtagtggtcaacccatcccggacagtgggttga

SEQ ID NO: 359999 - DNA, 489 bp, Pseudomonas aeruginosa; identical to SEQ ID NO: 336918

SEQ ID NO: 360000 - DNA, 738 bp, Pseudomonas aeruginosa
atgctgcttcgtcgtcttgtcagccttacgggtgtcaatgtgatagatcttgaccgtgccataatcgggcacctcaacgtccacgatagaaagggacgacttgctgatgtcggcaaacgaaatgggagtgccgttcaatatcactttgaaagaaggatttgcaagaaaccgaccacccaaaagttcacgtatctgctctacggacaggttgatctgacggatttcaccttcgcctgtgattgttgttccatgcccctccacaccgttatcaatgaactccacgagttcagtgataaggggcttgttgggtgtcctgctgactttgtagacgaatttctgaccttctttgatcgaagtgatctggtagttttgggtgaggcaaaagctggcgaatcggcctttaccattcttgccgaatacgtagcgcggattaccttctacacctggtggcggtgccgttgtggcgccacccttggtgatacgattataggacatggcccgccagatgtaatcaaactctgcacgggtcattccctttccattatcagagatggaaaattgcttgtttttcttcggctctggccaacttattttgacttcggtggcgtatgcatcccagcagttggcgacaagctcaacaatagccgtgctgggattagtgataatagagccagcccaactctcaagaaatctgtcttcatagaagagatcttcttgctgcaagttttgagtatttga

SEQ ID NO: 360001 - DNA, 237 bp, Pseudomonas aeruginosa
atgaacaatgtaaagaggctggacgacacctccgttatgctggtcagcatagtaggcggcagcatcagcatcattgaaaatcccattgaccccaactcgtacctgaccacccgaacctgcttgcatgttcgctttttcctctggcgacagtttgtgcactaccgcgtgtccaaactcgtcgaaaaccacctttccttctgcgttcagctctacacgataaattggatgctcatctag

SEQ ID NO: 360002 - DNA, 162 bp, Pseudomonas aeruginosa; identical to SEQ ID NO: 336412

SEQ ID NO: 360003 - DNA, 162 bp, Pseudomonas aeruginosa
gtgggcctggcagtgaacgtggccagcgaagcgcgcctgacggaaatccgggcctgggggaaaggacttcagatattgccagcgccggcggacgacctggtcgaccggctagggctgcggcactaccccgccctcatcacatccaccgccatccagcagtag

SEQ ID NO: 360004 - DNA, 519 bp, Pseudomonas aeruginosa
atgcacacgcccgcacttccttaccttgtcctgatgctcgcgctggcgggttgcaacacgtcgcctgccatcaccccaccgatggcgccagccaaggccgtaccagctccggctaccccctccaagccgttgtcagcgtcaccggcgtgggtccgccaggaccgctacaccctggtcagcacgcggccgacgctggagcaacgccagccattgttccagctcatcaccgtgcagattgcaccggcgctgcacgcgacggtcggtgatgccctgcgccacgtgctgcagcgctcgggctactccctctgcaccaaccgcgccgaggtcacgaccttgttcagccgcttcctgccggccgtgcagcaccaactcgggccgatggcgctgctggacgccttgaccatcctcggcggcccggcttggcggctcgtgatcgatccggtcgaacgcagcgtgtgctacgcccttcgcgcaccggtgcccgccccacctcagccgcccctggagatcgcgccatga

SEQ ID NO: 360005 - DNA, 216 bp, Pseudomonas aeruginosa
atgccggtcatccagtcctccatgatgtcgggcgccgactcctcgccggcggtagtggttcatgcgcggcctggcgcaaggtgggaattatccgacccttacattctcgacctggtcgctgtgctgcccgaggtaatcacgcaactgacggccgatccggctgcgtcgagcgtggtcggcggactggagaccctggaccaggtgctggagtggtaa

SEQ ID NO: 360006 - DNA, 1218 bp, Pseudomonas aeruginosa
atgggtcagcttttcgtctgtctatccaagaaggtgtccccgcagtgggtactggaaggtgacatagaaggatgcttcgacaacatcaatcacgactggctcaccagcaacgtccccatggaccgcaaggtgctccagaagtggttaaaggctggggcagtccacaaaggccagctttcggcaacggaagccggcacgcctcagggtgggatcatctcccctaccctggcgaacatcgcgctggatggtattgagtccgacctgaagaaacatctggggaagacccgagccaaaacgctgaaaatcaacgtcgtgcgctatgcggatgacttcgtcatcacgggagcaacaagggaggtccttgaaactgaggtccgcccctgggtcgagcagttcctagctacaaggggattgaagctctctcccgagaaaacccgcatcacccacatcgacgaaggctttgacttccttggttggaacttccgcaagtaccccgctgggaacaagcgaaagctactgatcaagccgagcaagaagaacgttaaggcgttctaccgcaaggcgaaggaggtcatcagcgacaacaaaacggcgcggcaggagaatctgattcgcctgctgaacccgatgctgcagggctgggcgctgtaccaccagcctgtagtcgctaaaaaggcgtttagcttgatagaccatctggtctttagagctctatggcgttgggcaacacgacgtcacccacggaaagggctcagctggatacgaaagaagtattttcgttctgacggtcttagaaactgggtgttcgccacgacacacgtggatgagaaaggtaacaaacggaacgtcgaactcttccgcactgccggaatcgacgtggtacgtcacaagaagatcaaagcggaatacaacccctttgacccggctgacgagcaagatggggagaaactgcgaatggcgcggatgctgaataagctgaagtaccggaagcaaatcacccgtctgttcgtagagcagaaaggcctgtgcgtactgtgcaacctccctatctccaaggaaactggctggcacgaccaccacatcgtctaccgctcacaaggcggtaatgacaccttggaaaaccgggtattattgcaccccgaatgtcaccaacagctccacgcacgtggactaaaggtgagtaagccggccccttcaaggggcttagtgaaggcttga

SEQ ID NO: 360007 - DNA, 723 bp, Pseudomonas aeruginosa
atgccgcccccacacctggagggcgccttcagggggagatggagagctacggtgcgaacagcagacaagattcgctggctgagaaaagagaacgccgaatggcagtgggtgtgcgactacatagagggtaacgccagcccggcgcttgccgaggacatcaggtgcatcctcagggacagggaacccagccatgaggtcatcgaagagatcattcgacacctcacaaggactgagcgcggtcgtgactttataaagcgcctcagaaatgccctgcgccagcgcaggtatcgttcatctgagaacggcaaaataatctgcacctttgccttgccaaccaaaaccaagaaggccctgcgtcaaaatgcagagaagctgagcaagagcgagagcgacctcgttgacgaagccctcaatcagtccgaaaagctgatagaggaacaccggcagcgggaacaacggcttgagaaagttcgcgaacttgaacgcaaacgagcaaagcagcgcatcgagctactcagggtcaaacaccacgaagcgatgaggcaaatccagatgctcgcgacacgcctttctatctgggagctggctattggggcggagcatcccaacatcagcgtggatcagaccatgctggccgacacagcgaaagaaaagaccaaggccgtcaagaaggccatcaaaacggccgtaactaagtgggacttcctgcagacgagggtatga

SEQ ID NO: 360008 - DNA, 1470 bp, Pseudomonas aeruginosa
atggctctgtattttgagcgagcttcaacggtggtttccgcgtgtggcgcggatgcccgctttctgctggaggtcatcattgctgaatcggagcacaggcatgagcaatggcaagacttcagcgtaaagtcgcttgctaagcaccttcgtttggatgaggcggtcgtttccgctgcgttgagcgagttggtcgatgcgggtgtgctggagcgatgtgtcgcccctcggaatggactcagagggcgggggaaggttacctacgcactatgcctgggtaatgagcccgaactagcagatcgcacgtatccgcagcacgctgagctattgcaggctttgttctctggagcggatatggtctttgctgttctcggaagcgaactgggcaaggcagaagaaaagagcaagtctaggaagtccagagagttcggcgaggaggcagccattgcacggcctgcgaagggaaggcgtcagcttctcggaagccgtgggcgattgagtatccgcaatcgcctgcttttcgcggtgctgctctcacgctcagatcagttcggtgaagtgcaggtagggctccctgaactggcgaagctcacaggcatgcaatctgagcaagtcaaaacacgccttgttcgcctaatgatgctggggctgattcggcgccatatccccggtctgtcgagcaaggtttttgccgcaggcaggatcgagagtacttactttctgaatatcgatgctgttgcaccacagggggccattgccgttcatgtaacccatgactgggagggcaagaagttcacccacgcggttgtgctgcatggcgattgtagtaatgccgtgaagggacagtcgaatgggctggaaacgccagccagtcttcttcgcctcttgatggggcagccggggaaagtctttttcctgtttcagcacctgctctgtcggtatgcctcacatctgctctcgcgacattggcagaaattggcttcggataagccgattgaggacgctgagttgagggcgtggattgagagggatttcatcaaggcgccaaaacctgctctggcaagcgaaatcgatcccgaactgaaggcgggaagaggtggcgaaacggccagtgatctgaaggatggcgcgggcggcgaggcagggcaaacctgtgcgtgtatctacgcattggcaatggagattgcgcgcgagtatcgagcgcgattcggtcaggcggactgggtagatttcgaggcagcggatattcgcattcttccgaacatgggcgatttcggttaccgcgcgatcacgatcctatttcagcccatgctcgtggggcttgggcatttttcggtgcttcgtgaggttaggcggggaatggtggatatcggaccggaagccacggaaacggagttcgacttgcagctccgcttggattttggcttggtttgtttcccgcgcaaggtaagaaaggcgctggggctgcggtaa

SEQ ID NO: 360009 - DNA, 1008 bp, Pseudomonas aeruginosa
atgaccaaacgaaacaccaacaccctccaatctcagtccaataccgcaatccgaattgagcgtctcatcaacgctattcaacgtaccgattgccaaccctacaaaatcacgtactccaagcacggtgatgagcagatcagggagaccaagctgtcaaaatacttcgataggatcgtgcagatggtcgcgttgttcgagggcaatgcagactaccggtacagttggcacttgaatctcttccaggaagcctgccagaccattgggatagaacgcagtccttttggtattacctgcttgagcgaggacgaaacgcgctatctgagcagctgcgagacgctgaacgaactgaccaagaccgtccgtactctccttacccaaaagcggtatacccgtcaggagcacgatcagcgttaccagacggctcagcaggagattgaggtcggtcgctatgtcgacgctgtgcttgatcgctacgcccgcacctgcgtagtcagggttgatctgtattatcgggcagaggtcggggcgaggttgcgtgctgagcatgtattcgatgacctggatcggctcatcgctgaacgtgaacgcaatccgatcttcgaccatcagaccggttacatctgctgtgtcgagcagggggaggatcgcgggtaccacatccatgctgcattcttcttcaacggtgctgcagtgagtgctgatatctacagggctcagcggatcggtgagttgtggaagcgcatcacccgtggtcagggttacttcaacaactgcaacctcgacaaggatgaatacccagataggctggggcttggcctgatccataggcgggacctgaatgcgcgggctgatgtgcattacaccatgcgttacctagtcaagaacgatcagcacctgcggctcaaaccagtgggtgctcgttgtttgcgtaaggggcaggcgaggaaggtgggcgagaaagtcacgccgccgattgtgccagggcaggcacggaacgacgacaggtag

SEQ ID NO: 360010 - DNA, 924 bp, Pseudomonas aeruginosa
atgaaaaccgatgtccttgcacagctggcacaagcgcagcgcgaccgcctcgcctatcttgaactgcgtctgtggtttgtgggggaggtgaagcggcaggatttgattcagcgctttggcatccagaccgctgccgccactcgcgacttggccacctatcgggagttagcaggcaataatctggcctatgaccgcagcagcaaaatctatataccggccaaggacttccgaccgcttttcaagttttcggctgagcgtgtattggcgtggctggcggaaggtttcggcgacggcgaacccacctgtagtgcaccagggattctttgcatgacccccggccgcttgacccagccggacctggatattctgggaatggtgacacgcgccatctatcaccggtatcccctgaaaatcgattactgctccattgatagcggcaagacccagcgtgagattgtgccctttgcactgattgataccggacttagctggcatgtgcgtggctatgatcgaaagcagggcgcgtttcgggattttgttattacccgcatccggaggcctaggttgctgctggactcggatgtcgccgattacgagcgccctgagcaggatgtccagtggagccgtatcgttgaggttgaagtggtgccccatccggataggtcgcatccggaaattactgagatggattacggcatgagcggaggtgctctgcgcctacgactgcgcggagccactgccggctatgtcttgcgcaagtggagcatcgactgctcgccagatcaccgcttgcgtgaccccgaatatcgcctttggttgaaagatccattgctgctctatggggtagaaacggctgtgatggcaccaggctatctagtgccgatgcatcacagccagaattcagaagagtttttaacaaagtga

SEQ ID NO: 360011 - DNA, 2130 bp, Pseudomonas aeruginosa
gtgtctcgacttactgatctgatcgcccaaatgaagaggaaagattcccagttgggcgccgacctggagcgcgaattcaaggttctgtcctctcgactgcctttcggccttaactttgagcgtcacaggccggaagcggtggaactaccgcttcgccctatccgtaagggcgataaggtgcgagtgctaccgccgcgtggttcgaccaagaaaggagaccagcgcctatggcaggtaaaggccattcacaaggcgagcagagtagctgacttggaactacttggggccacggagaatgagactcaatcggtggcgatggatgatctggtcgttgtcgccgaattccgcgacacgatctatccaggcttggccagtacggggaaagtgcaacgtggcggtgataagccctttcacactgtcatcaacggcgagaacttccacgtgctgaaagcgctgacctatacccatcggggtagggtagacgccatctacatcgacccgccatacaacactggggcgaaagactggaaatacaacaacgactacattgagaaagaggatctataccgccacagcaagtggttagctatgatggagcgacgcttgttggtggccaaggagcttctgaatcctgcagattcggtattgatcgtcagcatcgatgaaaaggaatatctgaggcttgggctgttgctagaacaagtgtttccggaggcggaaatagagatggtcacttccgtaatcagtgctaaaggagtggcccgattcggtcagttttcgcgagtcgaagaatttatctatttcgcaagattcggcaagtgttcagttaagcttggcgaacaaaacatgctggatgactctcgttcggcctctgcacaaattggaagtagtgttgagtggctgggcctccgccggagagagccaaccgcgaagcgcggggcgcgaccaaaccagttttatccgatattcgtggattcgaggtcagggtttattgaatctatcggtgacccgatctcagatggtgtcgaccgattgacggtaaaggccccttacggaacatttgccgtttggccgctgagaccgaatggtggcgagggtctatgggggataacaccagacacagcgaagcgatatctaaaggagggttttttacgttcccgcaactacaaacctgagagtgggaaagtagcagttcactaccttccgagtggaacagttgacgcaataaaggacgggcgtattgatgtggttggccgtgatccggatggggctgtccaagctgttcaccgtgagcgcaagggcgtgattccgaagcgtgtatggaacatggcgtcacataacgcagaaaacggcggatcgctgattttgtccagcttaattcctgggcgtcgttttccgttcccgaagtctctctatgcagttgaggatgcgttgcgcttttttgttgcggacaagccagaagctgtcattctcgacttcttctctggctccggcacgacggcccatgccgtaatgcgtctgaaccgtcaggatggtggtctacgccgatgcatttcggttaccaataatgaggttgcggctgacgagcaaaaaaaattgcgtgaacagggcttgcgcccgggcgatgctgagtgggaaaggcacggcatctgcgattacatcaccaagtcacgtgtggctgccgcaatcacggggaaaactccggatggggaacctatcaagggtgactacaagttcactgaagaattcccgatgaatgaaggcttcgcagaaaatgccgagttttttaccctaacctacgaggccaggaacgcagtcaaccacaacctggcatatgcccgtcttgctcctttgctgtggatgcgcgctggagcgtgtggccggcgcatcgatacgctgcctgtggagggctgggcggtagtggacacctacggtttgcttaccgaagtggatcaggctacgcccttcatcaatgcactgaacaaaacgaaaaaaatacgtgctgcctacatcgtcactgacgacgaccgtcgcttccaggcgatagccaagcgacttcctgaaggggtggaggcggtgcggctttacgagtcttacctgaacaattttagctttgccaacggggaataa

SEQ ID NO: 360012 - DNA, 2586 bp, Pseudomonas aeruginosa
atgaagtttaccctcaaggactaccaacgtgatgcggtacgcgatgccctggccaacctcagaaaggcccgtcgcctatggcatggtgagtcagataagactgcattctctttgaccgctgtgaccggtgcgggtaagaccgtcatggccgctgctgcgctcgaggctctatttcacggcgatgacgagttcgactttgatgccgatcctggagcggcggttatttggtttagtgacgatccatcactgaacgagcagactcgcttccgcttgatggaagctagcgaccgaatcaaccacaccgacctggtagtggtggaaaataccttcaaccggccaaagttcgaggccggaaagatctacttccttaatactcagaaattgggcaaaaacagccttctagtgcgtggtcatgacgctgaggaactggaagcaaaggcaggcaatctgctaccggaaacccgtccagatcttcgggcatacactatttgggatacgatccagaacacgatcgaggatcctgacctgacactttatcttattctggacgaggcgcatcgtggtatgggcggtgccacgacgaaggaaaaggggaccattgtccaaaggctcatcaatggtttcggaggggttccgggtatccctgcggtgtgggggatatcggctacggtagagcgttttaaccaagcgatcgcatcagcaggcaagcacatcaagctgacgaatgtggtggtagatgcagcgaaggtgcaggaatctgggcttatcaaagacaccatcctgctggatattcctgatgaagtcggtgacttcgatactgtgctggtaaggcgtgcaaccggcaagctgaaggattcaaccgttgcctgggctgaatatgccaagcaacaagaggaggcccatgtcgtcgttccgctgatggttttgcaggttcccaacacaccggactcgaacgaaatcggacgcgctctggatatcattatggagcactatccagagctgccaacagcctgcgttgcacatgttttcggcgaacacaccactcaaaaatttggcaactatgaagtgccctacattgagccgcagcgtgttgaagagtcaaaatgggtgcgtgtgctaattgccaaagacgccatcagtaccgggtgggactgcccacgcgctgaggtgatggtgtccttccgtgccgccagcgaccgcacacacatcactcaactactcggccgcatggtgcgttcaccgttggcccgccgtattccaggcaatgaccgactgaacgcagtagattgtctgttaccgaagtttaaccgtaagactgtcgaggccgtcgttgatagccttatgcagggcgacgacacggcaccaccttctgggcgcatccttgtcgactacgtagaagtgacaccccatcctgatgcgtccgcagctatttgggaagcattcgaggccctgccttctcaaacccgtccgcagcatggcgcaaagccggcgaagcggttgaccgcattggctcacgagttggcatcagatgacatccttccccgggctggaaggttggctcatgcgcacatgcacaaggtgctagatgcgttccaggaaagccagaaagagaaaattgacgcaaagcgtaggtcggtgatgaccgtggacggtaagacggtgattgccgatttgaagggcaaggaaaagagctttgataagttctgggaagatgccgacatggctgtgatcgacgacgcctaccggcgtgcggcgcgtatcctgagcccggatattgcccgtacctacgtcgagcatttagcgcagaaagtcgccaatgttgacgaagacccggaggattatctggaagctatcgtcgaggctcgggttaccgttgctggcttggggctggttacggaagtgcaggcgtactttgatacagaagctgacacgcttgcaaaggcctggctaaaagcttatacgccgcagataaaagtactgactgatgatcgtaaggaaacttatcgacagatcatcgaaatgagcactgaaccacagagtgtgaatttggctaagcccgagtcccgctatgaggcaaccagagcacgcgagaacggtaaggagattgcttttccaacttggaatagtcatctgctttgcgacaaggacggcatgtacccggccgagctcaacgattgggaacgtacagttgtggaggcagagtccgagcgaatcggcttccgcttttggtaccggaatccgcagcagccagggcaatcctctctgggtatcgcctatctcgaagacgagcaatacaaaattatccgccccgattttgttttctttttcgagctagacgacaacatggtggtagacctagttgacccgcatggtttgcatctggccgatgcgttgccgaagctgaaggggctggcggtctatgctgagatctatgccattgcctaccggcggatcgagtccattgcagaggttggcggcaagctgcgtgcgctggatttaactcgtcccgatgttaggacagcaatcaagaatgcaaaaagtgcgaaaagcctcttcgaaagtgcgttggcgggtgactatgcttga

SEQ ID NO: 360013 - DNA, 303 bp, Pseudomonas aeruginosa
atgaaactactcagcacctacgacgatcgagatgaagccgaagctgcagccgaaaagctcagcggggagaagcgtctagccagcgaacgcgacgccaccgtggttatctacaacctcttcggcattcccagttggggaaacttccatcgtctaaagatgtacaacctaggcgaactgaaaaagctgctagaccgacgtcattcctggcagtccagcgagcagacgcggcatgctgaaattctcgccacgctgaagaccgtagccaaaaactacgggatcgaaatccctgagcactggctttag

SEQ ID NO: 360014 - DNA, 306 bp, Pseudomonas aeruginosa
atgaacagagagtgtctgatctgcgactccagcgccgggctgacaagggacgcagccaaagggatgacgctactggccgggctgttcaatggtgccatcaagggcgcttggcgcccacgcgagggaagcgtctatgccgaccttctcagtggtatagcagcagtcgcacccgcttactcggaagcgcggaaggcagcagaggatgtcgtgcgatttcacttcgcaggcttggactgcctgtgtcttcgctgcggcgctttgttcgacgagacgactgaaaatcaggagggttttagccccggctaa

SEQ ID NO: 360015 - DNA, 210 bp, Pseudomonas aeruginosa
atgaagttactacgaatctttaccgccgtgttcgtgttcgccggcatcctcacgggatgcctggccctcatgctgctggtgcttctgctggtgcgctttccgctcctgctgatcgccgtactactagcgtgctggattttctgccgtctcgtgaaggtgttgccatccagaacagcaacggcagagcccactactgcgccaccgaactaa

SEQ ID NO: 360016 - DNA, 309 bp, Pseudomonas aeruginosa
atgcgcctgcacaagctgagggtcagtgaatcgaccggcacctatctagtcgaatcgccggtcaccgaaaccgacatcctgttgatggcccggcaggtggcggatctacgtctgcgccggaggcgcgcactggcctcaccgaagggtgtgctcagccacctacaggcgctgctgtacgattacgagcataaggtattcgccttgcttctgctcgacagccggcaccggctgatcgtctttcacgaattgttccggggcactttaaacagcaccagcatctatcaacgagagtcgtcaaggctgccctag

SEQ ID NO: 360017 - DNA, 765 bp, Pseudomonas aeruginosa
atgcctaccaatgaaaacctgagaagaaaatggatagacgccggatacaaatctgacatgggaagcgcaatttcctgcttaccaccagacgacccaaaaaaaatccgactctacaacctaacccattcaggctacgccctaaagaacttaaaaaactcacaaataaaaatatcaacctttcacgacctgaatgatcctttcgagctgttagcagcaaactttaaagaaagaaaaaatcgtaaattatttagagactggaaggacacaaccagtaaaaagataggtattctctgcttctctgccgactggtcagaacctttaatgtggagtcactatgcagacaaacataagggcatttgtcttgggtttgacgtaagtagagaaatagtcgaagaagtagaatacaaatcagatcgtttattagtagagttagaaaaagatatcgacccatcgcatctagacgctgaacttcagcagaaactactacgcaccaaatcatcaagctggagctacgaaaaggaataccgctccttcatagagctagataaatcaaccaccaacgaacacctttacttccaaaagttcaacaacagcataagactcacagaggttatcttaggccccctctgcgaggttcctatcgaaacagtccggaagttgacaagcgaaatgtaccctggtgttactgttttccaagccagactagctttcggatcatttaaggtcgttccacaagcacagagcgtccccaaagtggattgctaa

SEQ ID NO: 360018 - DNA, 276 bp, Pseudomonas aeruginosa
atggtcgcggcattgccggcggccatcgccacggtgccgaggcgggcgttgatcacgccgttgttggccacggacggcgcgacgaaggccgccaagcctttctccgcgacgctgatgctgccgtcgttgacgatccgcgcgtcggggtttccgggctggtcgaagatcagcttgccctggcggaagtgttcgtcgctgatgttcgccgtggtggtgatcagggagcccacgtcgaccttggccgagccgctgaagaccacgccgttggagttgtag

SEQ ID NO: 360019 - DNA, 657 bp, Pseudomonas aeruginosa
atgccgtggtttccacctgggctattcctcgacagaggcgggaagcccggccggcccctcccgccgggctttttcattcgaaggtcgaaattcggtagacggcagtctcacctgccacatcgggctgtaagcaaagtgacgggttaccgacccacaaggccttcatctttgataccgtaccagctttgcctctgggagattcaaggaatgaatagaatattcttagggctaatgctgggaatgagctttcttgcgggatgtacaagttttctaacagactcagagaaagagtctcagaagaataactttatcgatgagttttcccgctatttcagtaataagcttgtctacccaccgacacttgccgccttgaacatagaggggcaggcgacggtgttgttcaccttcgataagcagggattcctgactcgctgtgaggtgctggacactggatcgccaagtgacgggtctgcaaatctaaagaggctgtttggccaaagtgttattgatgtttgtaaagttggtggctttccagttgccccgttgctcatgaccggggacgagggctttcaggcaaagaagactttctactttcgaatgcgagagcctgaaagcggaacctccgagtcttcggctccaagtgatctcgtaaagtag

SEQ ID NO: 360020 - DNA, 552 bp, Pseudomonas aeruginosa
atggaaaagcgcgagattgacgaacagctcaaaagcctgagcttcgacatggacgaggaaatcgacgatcgcaacgaacgtcgaggccggaaagccgcgccacctcgccacgcccacactcccatggaccccagccacgccatcatcttggccgccatcatcatcgtcggcggtctatggggcggaaagcttctctacgactacatccaggaacagcggatcaaagctgcgttcaacgaagctgccgctcagatgcagcagacaatgagccaggttgagcagaactcaagacgtgcacaggaagagattcggcagcaaagagcggctgagaaagaggccagagagcagcagcgtgttgaacaactcgttcatgatcaggcggaacaagcgcgcgcagagcaagaaaaacgcttcaaatcatcgcggtgccagttctggtggcagcaacacagccaaaatcccacaccccgcactgcacagaagaaagtggaggcatgtggtattgaaattttgcttaatcttcgcgatctggaaacagtaatcgacacatga

SEQ ID NO: 360021 - DNA, 933 bp, Pseudomonas aeruginosa
atggcacatctcgtcgaaaccatggcctacgctggcgctactccgtggcatggcctgggcaatcagctcacgcagaaacagcccatcgaagtctggcaacgcgaggccggcatggactggcagatcctcgaaagccccgtgcatttcaagtcggatgccgtcggccatctgggcgcgatccactccttccccgagcagaaggtgctattccgctcggacaccaaggcaccgctctcggtggtctctcagcgctaccacaccgtgcagccacgtgaagtgctggagttttaccgcgacctcaccgaagtctctggctacgagctggaaacggccggcgtgctcaagggcgggcgcaagttctgggcgctggcgcgtaccgggcaaggcgcagcgctcaagggcaacgaccaggtcaacggctatctgctgctggccacctcctgcgacggcactctggccaccacggcgacaccgaccaccgtgcgcgtggtctgcaacaacaccctgaccatcgccctggacggcaccagccgcgcgatcaaggtgccgcataacacccgcttcgatccgaaggtggtgaagaaacaactcggcatcgccgtctcgcaatgggacgacttcatgtaccgcatgcgcgcgctggccgagcgcaaagtgcagtggcacgaggcactgggcttcttcatgaacgtgatgtgcgagaccagcccgaccggcgccctgccggagcaactgcccaacgagcgcgccctgcgcaaggttcaggagctgtacgaaggccgtggccgcggcagccagctggactcggcacgcggcaccgcctggggcctgctgaacgccgtgaccgagtacgtcgaccatgaacgccgtgcccgtagcaacgaataccgcatggactcggcctggttcggccagagggcgcagatcacctga

SEQ ID NO: 360022 - DNA, 330 bp, Pseudomonas aeruginosa
atgtcattgcagtgcccccgctgtcattcccccaaagtcgcttccttccatcacgccatgaaagtcggcgcggccatcggcaccgtgggcggtgttgcgcgcggcgtcagcgctgccctggcaggcggtcaggctggcgcagctatcggcgcattcgccggccctatcggcatcaccctcggctccgtgtcgggcgccatcctcggcggcctggctggtggggtcggtggttgtgcgctcggcgcgcagctcggtgaatcgctcgaccgccacgtcctggcccacaacctctgcctgctctgcggccatcgcttcaatctgccggcctga

SEQ ID NO: 360023 - DNA, 234 bp, Pseudomonas aeruginosa
atggcctgggacagaaacgatcctctcaacatcctggcgctacagctcgacggtgaactgcgcgccgcagccgacttctgtcatggctacaacgggccggcacagcgcgctttcgcccggcacatccagggcctgggcaagacgctcgacgagcttaccgtggcagacctgaaggcggcggccgcatttgcggacgcagaactgaacgacctgcaacagagagggctgatctga

SEQ ID NO: 360024 - DNA, 198 bp, Pseudomonas aeruginosa
atgaactggttgaaagaagccttcaggcgctggaaggcaaagcattgggataacgagtacttcccagaagaccggggcggaataacgccgcagcgcaagctctgggaagattggcgatggctagtcattgccgctgctcgcggcgccgctctcttggctgtcggcgccttgtttctgagggtgatcggccttggctga

SEQ ID NO: 360025 - DNA, 393 bp, Pseudomonas aeruginosa
atgattcgtcagttcttcgtttggttcggtggcctggtcaccatggctttgatctattgggcggcggtcattcttcatgccattggcggttaccggcttgagattacgccggccttggcggcgggagtcgccgccgggatcgttgctctgttctgccatgagttcggctaccgagctgggcgcgacaaggcgctggatgaccgcttctacccagatgcagacgcgccttacgtgcactttccccgaggcatgaatagctaccgggctcgcctggagttcctgaatcgagccatccagcggctgcacgagattgagtcagccaaggccgatcaccctcagaaacaaggcgccgacagccaagagagcggcgccgcgagcagcggcaatgactag

SEQ ID NO: 360026 - DNA, 423 bp, Pseudomonas aeruginosa
atgccgcccccttccttgcgcatcctgattgccgaaagtgagcatctgcaacacctgagtatcgagaagatgcttaaccaatgcggttatcaccggatagcccccatttcctccttcgatgagttgctggcaatcgtcgagtgcgcgctcgagccttttgacctgttggtgatcaacagtgtgttgacggtcgatagcggtgtccgcctcgaggatttctgccgttattgcccaagcatccgccatgcgctgatttatgaaggcgtccccgggccgcatgtactgtccgaagaggcaccctgctccgttatcagaaagctgtccggtgttcccgatagcgaatccatcaaggccctgatgcgccgtatcgatcccgaggacagaaaacgtccgcgggcattgattttcggccgtactcgctga

SEQ ID NO: 360027 - DNA, 1230 bp, Pseudomonas aeruginosa
atgcaagtgttgccccttcgtgtcctggtgctggaggaccagctttttcaacaaaccgtcgcagtcaacatgctcaagcagattggttgccaggaggtgttcagcgcctccgatggcgcccaggccctggaagtcctgcaacgggtcggaccggtggatatcgttctgtgcgacttacacatggagggcatggacgggctggagttcctacatcgcgtggcccgcgcgggcctggtcggggcggtgatcctcagcagttcgctcagcgaggacgtgcagcgggccgcacgcaaactggtgccgttgctgggaatgaccttgttgggcgacgtgggcaaacctctgctggtcgaagccttgacagtgttgctgaaaaaacacttggaccagtcagccgccgtggcgacgaacttcaggccgctggtgctggcggaaatagacgaggtccgctcggcgatgcaacaccagcagatggagacgtacttccagcccaagatcaacctgcttcgcggggacgtgatgggggtcgaggcactggcccgctggaatcacccgtcaggcggggtgacttcacccgcggtgttcatgccgaccctagagagctgtggcttgctcaatgatctgttgtttacccagctccaccatggcctggagttgcagcaccaagcctggagccgaggggtctggctgaacctcgcgttcaacctggaacctgtgcaactggccaacccagacctggtgacgaccatcaagagcgtcctggggaggtatggattgcatggttcatccctgaccttcgagctgaccgagagtggagtgttggaggtctcggcgacctgcctggaaagcctggtccgcttgcgcatgatggggtgccggttgtccatcgacgatttcggcgtgggtttttcttcgctgcagcgcctgtgccagttgcccttcaacgaaatcaagctcgacgccgaattcgttcgggggctcggcagcgagccgcgctgcctggcggtcatcagcagtaccctggcgctgggtaaggccctggggatgtcggtggtcatcgaggggatcgagaaacaagagcagtaccagcagttgctcgacttggggtgcacccaggggcagggctacctgttcgccaagcccatgacccggcaggacttgctggcctggctggatactcgggctgtccccgggaaaaaacacttgaacgactgttggatcgctccataa

SEQ ID NO: 360028 - DNA, 3645 bp, Pseudomonas aeruginosa
atgaaccgcctgcgattctgtatcgccgtctttgtgctgattttctgtgttttggcttatgccaacccggtcgcgcaggattatgtgccattaaccttgttgggacgttcccacgccgaagcttttgccgttgatctggataacgccgactggcgctggctacgtaataaaaagctgttggtgatcggtatctcgctcagtgattcgccacccttgaacctggtttcggaccatggcgattatgagggcgtgacggctgactatatagagctgcttggcgatttgctgcacatcgatatccaggtcaggcgttacgaaaatcgcgatctggcgatacgggcgctcaagcgtggcgagctggacctgctgggggcggccgggacacatgaggcggcggattccgggctgctcctgtcgcagccctatatcaacgaccagatggttctggccacaaattccgagcgtgataattctttgaataaagaccttgctggacagcgtttggcaatggctcgttattacgctgagccagagcggattcaggcgctctacccggaagctcagctcaatctctaccccacggagctcgacgctatcagcgccgttgcatttggccaggccgacgcctatgtgggtggtgttatcgcttctagttacctgaaggggcggaacttcttcaaggacattcgcctgaaggagttggccaaccagaagctcatccctatcgggtttgccttgaccgccgacaatgggcgcttactgcacatcgtcaatcatgcgctggcgagtattcccgccacagagagtttgtccatcacccgccgttgggggctccattccgtgactgcgtatgggctggacaaggttaatctgagcactgacgagctacgttggctggctgctcaccctcgactgaaaattgcgatcatcgaggacaacccgccgctttccttttttgatcacaacaatgtgtttcgcggtctcaatgccgacctgctggagaagatcagtcaacgtatcagtctgcggttcgaggtggtccgcgctcaatccatcggtgaattggccgatctggtgcatagcggaaaggctgatttgatggcggcgttctacagtgaaggggtatcggacaaactacgttatacccggccttatatgatcagcccctttgtttttgtcagtcgtgccggggagggggaaccccgcggctttgaggatatgtcgggtaagcgcctggctatcagccggagaagtttctggtatgacgagattacccggcggtatccaggcatcactctggtggcagcagagagtcgtgcggaacagatggcgttggtcgcgcagaataaggttgacgccacgatcaatacgctgatcagctcccggtatctgatttccactttctaccgtgatcgtttgcgtattaaccgtacggtgggagatcgtccggcgcagttggggctagggatggatcgcagtgctctggagctgtattcgatcctcgataaaaccctgcgcagtttttcaccggaggagctggctgaactgaccgatcgctggcgcagtgaggtcatgctggataatcgtggcactcgtgccagccagcggacctttatcaagtggctggttgtggcagtggccctgttactggtagcggctggctggatcatctacctgcggcgcctgatctacaagcgtgccgcagccgaacgcgcgctgaacgaacaaatggagttcatgcgggtgctgatcgacggcctgccgcatccgatctacgttcgcgactgccagacgcgcttgttgctgtgtaacagccgttatctcgagatgaccaagctctcacgcgaagagcttatcggtacaacgctcaccgaggctccgtttaccgaggtgcccgatatcaaggagctccaggagcaatatcttgagcttatcgagacggggaaaacgctgattcaagaccggcagatcaggttgcccaacggtcagagtatcaccgcctatcactggatcctgccgttccgcgacactcagggtgaagtcaagggcatcattgccggctggatcgacatcagtgagcgtgagcaactgctcggcgaactcaaggaggccaagcaggaagcggagcaggccaaccgggcgaaaaccaccttcctggcgaccatgagccacgagatccgcacgccgatcaatgccgtggtcgggatgctcgagctggcgatgaaaagggctgaccaaggcgttctcgaccgctttgctatcgaggtggcattgggcgccgcgcgagagttgctggagatgctgagcgatattctggatgtggtgcggatcgagtccgggcgcctgaccctgaacccgcaaagggccgtgcttaaggaactggtcgaggcggtattccgggtgcaagaggggatggcgcggcaaaagaacctggccctggtcctggagttcgatgagcaggccaaccgagacgtcctggtcgacccggtacggttcaagcaggtgctggcgaacctgctgagcaatgcgatcaagttcaccgtcaagggcgaagtgctggtcagcgtcaaggccagggtcgatgaggataaccagaccttagggatccggctgctggtgcgcgataccgggattggcatttccgcggaagaccaattgaagttgttcgccccgttcagccaggtcggtaccgacactcattcggcggctgggggctccgggctggggctgaacatctgtcgcaccttgtgcaccatgatgggcggggaattgaacctgagcagtgtgctgggcctggggacgcagaccgaggtgctggtcagtctcccgatccttgagccgctgcccatgagccaggcagagccggtagtgccgcagccgggcaaggaactgaatgtcctagtggtggacgactacccggccaatcgcctattgctgacgcagcaattgagctatctgggacaccgcgtcagggacgagcaggacggagcccatggcctgcgcacctggcgcaacaatcagttcgatgtggtgatcactgactgcaacatgccggtgatgagtggctatgaaatggccaaggcgatccgggccgatgaggcggcttctgggaagctgccttgccttatcctggggttcaccgccaatgcccagccggaagagatcgaccgttgcctggcggccgggatggacgattgtctgttcaagcccatcagcatgaaagacctgagcgtgcgcctctccggcgtcgaaccggcgttcaagccggtagccgagagtgacgaggccatgccagcggtggatgacatcgatctgagcagactcgagcaattgacctatggtgatcgggagtcgatcaacagcctgttgcaggatctgatcagcagcaacgaggaggatttgcagcgtttgctcaagctcttcagccagaacaatctgcctggcctcgccgacctagcccatcgggtcaagggcggcgcgcgtatcatccaggccaggcgcctgatccagtgctgcgagcagttgcaggctgattgcaatgggctgaatgccgttcgcctgacccagtcggtcgataccttgcaccaggaaatggaagcactggcgcaggtactgaagcgctacatcgagcagcctgtcgactga

SEQ ID NO: 360029 - DNA, 627 bp, Pseudomonas aeruginosa
atggttaaagcattgatagttgacgaccatccgtttattcgcgcgtcggtaaaaatgttgctcaaggccgagcagatcgaagtagtggccgaagccgataacggtgtcgaagcgctgcacctggcgcgtacccatgtaccgaacctagtcgtgctggatatctcgatgccattgctcgatggcatggaagtcataagtcgcctctgtaccttgaacctaccgatcaagattcttgtgctgaccgcccttgaggcggcgttttatgctcagcgctgcatgatgatcggggcctcgggttatgtctcaaaaagtggcaaccttgacgagctggtgcgcgcggtcaaagtggtcatggacggctaccactatttcccggttctgcccaacagctcggtgcaccgagtggagaaccagatgtccgagcaccaactgatccagcaactgtccaaccgcgaactggcaatccttcagcaacttgcccgggggttcagcaacaaggaaatcggcgatgccatgttgttgagcaacaagacggtcagtacgtacaagacccgtttaattgaaaaactcaaagtgaagtcggttgtatacttggccgattttgcaaaacgcaataagcttatttaa

SEQ ID NO: 360030 - DNA, 1146 bp, Pseudomonas aeruginosa
atgaacctgcgggttggctgcgtcctggcggccgacagcgtcgcgcaggccatcgtccatatgcgccgccagccgcatatcgacatcatctttttcgacctagccgatggctcgatcaataaccgtgagctcctgcaggtcgccagccagctgggcaatgtccagacactggtggtccacagcgaattgcaggaagacctgtaccgctccgtgatgcagatgcagacattgtccggcatcaagttgctgggggttctggacaagcctctgcaactggaggccttgcaacggctgctggcgtgtttcaggcgcctgcaatgcgccaccgcagagtcggttgtgacaaaacccgagctgattgccgaggaacaggtgcgtcagggcctggcaactggggcgttcctggcgtggtaccagcccaagttcaacctgcgggacggccatttgttcggcgccgaagtgctggtgcgctggcatcaccccacgcggggtctgttactgccccgggatctgctggcggccgtagtggcatatgacctgatcgacgagatgttcaagcagctcctggagcagggcatgacgctcctagatcggctgcgcaaacaaggcatcgaactggggctggccttcaacctgacagcctcccagttgatacgcaacgaattggtcgagcatattatccagaccctgcaccggcatggcgtgtcaggttcgaccttgatgttcgaggtcactgaaaacagcctgctggacctgccgacctcagccctggagaacctcgagcgtctgcatcagacggggtgcggtctgtcgatcgatgattttggcactggtttctcttcgctgaagtcgttggcgcaactgccgttcgaccaactgaagctggatggcctgttcgtccaggacctcgatgccccaggcaaccgtgcgttcatcgtcagcagcctggcactggcccggacactgcgcatggacctggtcatcgaggggatcggcagcccgcaaattctcgagcagcttatcgccctggactgtaccttcggccaggggtttcacctggcactgcccatggccgacgacgacttcattaactggcttgagcgctaccggagccggcgtagcctggtgggtttctcgggcggttaa

SEQ ID NO: 360031 - DNA, 4257 bp, Pseudomonas aeruginosa
atgatggcaaacgtgtttgtgttcgacaaaaaagatctgacccagaagttggtcgccggtcctgaggttgtgcttgagtccgcgtcagtcattgtgctcgaagtgtctaggtcctcaatcaagcagatggcccgtagcgggcagtcgctggtggttcagtttgccggaaaagaaagactggtgataaagcatttctttgacaagttcgaagggcagggcaactccctgacacttgatgagaacgggcagttggtcgaagtgaccatcagcgagtcgggccgcctgggagagtcgttggtggtgagctataagccgcttcaacaaggggtggtcgaggcagcgggagaaaactctattctggggaaaatgggcatagcctttgacggtctttcaccgctgggcaaaggattactgctggggggggcagcactaggcatttttgccttgacccaaattggtagtaaaagtggttccagcaaacgcggtggcgtcccagcagtagctgacaccaccgctcccgacgctccgctggttaaggtgagcactaagagcgatggctctcttgcggttacagggactgccgagccaggcagtcgtgtggactttactttccccgatgggtcgaagaagagtgtcactgtcggtgctggcggcagtttcagttttgccagcgatgtgtcgcaacccaatggttcctatagggcaacagcaacagatgcggcgaataataccagtaaacctgtgacgggcaattttgtggctgatccgacggtcgataccaccgctcccactgcaccgaccggcttgactgcggtgacggaggcggacggcaaggtcaaggtcagtggtaacgctgagccgaacagcctggtgaaggttacgctaccggacggcaccgtccaggaggtccaggcggacgccaatggtagttttgtgctgaccagcgacacgcctcagaaaaatggcacgatctcggtgacggccaccgacgccgcgggcaatgtcagcctggcggcgaccgtaccctttacggcgaacaacaccatcgacgtcaccgctcccactgcaccgaccggcttgactgcggtgacggaggccaatggccgtgcaacgctcaagggcaaggcggaacccaatagtttggtcacggttacattcaccgatggctctcaggaagacgttcgggtgtcatcgggcggtgatttcaccttaaccagtgccgtagcgcagaacactgccggtaacatcagcgcggtcgccaaagatgcggcaggcaatgtcagtactccggcaacgactgtgtttacaccaagccccgcacctgctgcgccggtgttcgcaccgaatgaggtgaccgatccgacgaccggtctggtgacgatcaccggcaccgcgcctgccaatatgaaggttcatctgacttttcctgacttgactgttaaggaggtcaccagcagtgccactggcgagttcagcgtcaccagtgacaaacctcaggaggccgggaacttcaccgcggtgtcgatcaacgacaacggccgttcgagtgctgttgccaacggcatttatgagggcaacccgagtacggtctatgacctcaccgtgggtggctacatcgatgatgttccgccaggaccaagtggccggcctgaggggcagcaggcgactagcaaaccgaccaatgactcgacaccaactttattcgggacatccgccggggtcggcgtgactggcaaggtggttattcgggagggcggcatgcaagttgcggtggcccaagtggatgcgaccggaaaatggactgctacgctgcccactgttacagacggcccgcacaattacacggtcgaggtcgtcaacgcactggggggcagtctaaagtcggtctcgaccagcctgaccattgatactcaagcgccaaatccgccgacaattaccgcaatcagcgttacccaacaagggggcacaacagaaactgttctgccattatcgggaggcagtaccagcgacaacacgccaaccttgagtggcaccgcagagtctggttcaaccgtgatcctctataatatgaacgctgatggccaggagagcgaaataggcagggcggttgccaccgctagcggagcctggcagtacaccagtatgcacctgcctaaccgcaagcatgagatttatgccaaggcacaggacgcagcatccaatctcagtggcaagtcgaatacggtgagcctcgatatcgccgggccgacagaagctccgaagaatgtttctgtagcggcaatctggtcagttgatggtgctggggatattgacggtgacggtttcgatgatgtggcctcaggcagttatgactcaaccggtggcagtttcttgggcggaggtgtcatcagggctgtgatgaggggggggccagacattgtcaccacggatgaacccagcttttacaacaatgtgtcaggtgtctggacctatcatcaggctggtgtaggtgataccaacggtgatggtttcaacgacatcgtctccatgtacggaagtagggatagcacttccaatgggcccgctcgccttttcctgggaggggccaatctgggaccagtcgacttgagaactaccgccctgctgggtagttccacttttgtcgcctccgccggcgatctgaatggcgatggcctgatggatatagtgatcggcggacggggagcctatggacagatcacgccttcgagtatccgctttggttcaacgggagatgcaggaaccggtgcagtggaacaaaattttgcattcggcgctgcgaacggtgtgaacaatgataactatagagctgcattctggagcggtgcgcagtatgtgacctcggccggcgattttaacggtgatggtataggggatatcgtcactgccagggggattacctttggtaaaaccacacaaggcgaaatcaataggtcggcgaacctgttctggaaaactgctaactctacatgggttgatcaggcccaggctgtcagcggtatcggcgatgccaatggcgatggatatgccgatgtcgccgtgcaggacgggaaacgcgtatatgtagtattcggtagcccgcaggcttctagctcgcagggcgatatccgcctagaggccaaatggttgcaggccaacaatcgggggtttgaattgaacacttcgtgggtcagcactcaaccgacgacttacggcgatgttcggggggtcggcgatgtcaacggcgacggcctggctgactttgtctataccacctatggcaatcgcctcaatggtggacctgattcagatgagactgctaccaagggtgctacccctcctgctaccccccagggagatactggtaactattccaactcgtacatcatctttggcaagaccggtaccgaaaccatcgatgtgaaaaacattagcggccagcaaggcatcatgattccgcgcgggcaggctgacggggcttcagtcgccggtcgtatcgacctcaatggtgatgggctagccgatatctacgtaggctcgtactccggcaatggcaaactttacatgggcggcgcgtctctcggggccgagccatcgggaacgccaatcaatggtgtggtcatgggggatcagaacagtaactttattgtcggtaccgccagccaggatactgtttttggcaacggaggcacggacatcatttataccggcgcaggtgatgacaccatcattctgaaccaagacaacctgacgcaactggcggcaggtttcaatactgctgccgggatcaatggccgtcttgcacgggtcgatggtggtagtggcatcgataccctggcctttggtaaggatgtcacgacagtcgacctgaccacgatctccaatgcaggtctgggcacgatccagacgggggtcggtctgtcacgcatcgccaacgtcgagaggattgacctgcaaggtagcaataaggccaagctgactctggaacttaaggacgtgatggacatgaacgcgggtttgagtacgttcaacaagcagaacttcagcagtggcctggacgacagtgcgatcaaacgccatcagttggtgatcgatggttcttcggaaaatagtgtcgaggtgagaaacagcagcgagtggctcaccgttaaggccgcaaccgtctattccggtgggcacggctacgatgtgtacaacagcgtaggtgacaacaagggccaattgctgattgagcaaaccgtcaacgtagcctggagttga

SEQ ID NO: 360032 - DNA, 2226 bp, Pseudomonas aeruginosa
atggtggttgttgatcataaaacgcaagaaaacgacgagttgagccatctggcggaagctgccgcggatcaggcggacacgttgctgtcggcagtctgttcattgtgtgagctttacaacaaggaggtcagcgaaaccgtgctgcatgcgggactgccccgtgacaagcggttgtcgccgattctggcggtgcgcatgctggagcaggtcggggtaaaggctggctgggtgcagcgtactctatcgcagttgtccgattatctgttcccggcagtgcaggcctgccaagacggcagttattgcgtggtgctcaagcgcgatgggctaccgggcaaggttacctacgaggtgatccttcccgaacacaagggccaggttacgctgagcgaagagcaactgcaggcacagtgttccggctactttctactgtccagcgtggcgcccaaactcgacgcacgtagcgaccatgatctgttggcgctggaccagggcaagtcacattggctgttcgcggtcctgtggcgctaccgcttctatttctatagtgcggccctcgcagccttgctggccaacattttgactctggccaccacgttcttcaccatgaacgtctacgaccgcgtggtgccgacccaggcctacgtgtcgttgtggtccatggccattggtgtgctgatagccatcagcctggagttctcatctcgacagattcgcgcctacctgttggacgtggccgggaagaaggccgacttgattctcggcgcgcgcttgtttcgccaggtcatggcgctgcgcctggaaagcaagccgggctcatccggggccttcgccaaccaattccgtgagtatgaaacggtccgtgactttattacttcggcgactctggcgaccctgtcggacctacctttctgcctgctgtttctgggcattatctatctgattggcggaccgttggccattattccggtgatggcggtgccagtcatcctgttgcttagtattgcctgccagtggccgctgtcgcgctacatgcaggaaaatattcgtgagatttccctgcgccagggcctgttgatcgaaaccctcgaaggcctagaggctctgaaagcgtcgcgtggagaaggtgtcatgcaaagacgctgggacgacttcagtgcgctggccacagcctcggcgatgaagagtcgtttcctgtcgagcttgatcaacaacttcgtgatgtttgtacagcaggcttgcacagtgttaatcgtgctctggggcgtgtacctgatccacaccggtcaactgagcatgggcgcaatgatcggcgtggtgattctttccgggcgcgcgctgcagccgttgggtgccgtggttggcctggccgtgcgttttcagcaggccaaggctggcatgaaggcgctgagcaaattgatgagtctgcccatggagcgtgagtccaacacggtgtttctttcggcgccgcgtttcgatggcagcctcagtctgcacaagatcagtttttcctatccggtgccgggcgcaattgttgtgcccaaggcactggataatatcaatctgaacatcaaggccggcgagcgtgtggtaattctcggcaatatcggcagcggcaaatctaccctgctcaagctgatggcccggctttaccgccagagcgaaggccgattggccatcgatggcatcgatgcgtcgcaggtggatccagctgactggcgggctgccgtcggctatgttggccaggactgccaactgttctacggctccctgcgtgacaacgtgatgatcggcaatcccggtgccagcacgcaacagttcctacgcattgcccgcatgaccggtctggaccagatcgccgctcgccatccccagggctttgacatgccggtcggggagatgggccacaacctatccggtggccagcgccaactgattgccctggcgcgctgcctgatgctggagccgagaatcctgttgctcgacgagcccaccagtgccatggacggtttgagtgaagcccggttcatccggcaactgagtgaactgagccaggaccacacggtggtgatcgttacacaccggatgtcgatgctcagcctggctgaacgcctgatcgtgcttgaggacggctgtgtggccgcggacgggcccaaggcacaagtcatcgccgcactcaatggcaacagccagcctcccgaggctcaagccatggggacgctccagtga

SEQ ID NO: 360033 - DNA, 1275 bp, Pseudomonas aeruginosa
atgtcattgaaaaaaatcaggcgtttgctcggcgtggataaaaccacccctgcgggcaagcgcggttatagcgtgcgcgccgaggacgaaacgttcatgcgcgatttgcagggtgccctgatcgagcagaaaaccccggccagtgttttggtgctgtggttgatggcgggcacggtggttatcggcttgctctgggcgcatttcgcccgggtagaggaagtgacccgcggcgaaggtcgggtgattccggccagtcgcgaacaggtgatccagagtctggagggcgggatcatgaaggaactgtatgtcaaagaaggtcaggtggttgagcagggacaggaactgctgaaaatcgatccgactcgggtcggggccgattacggtgaggcactgtcgcgggtgcaggggctcaagggcgcgattgcccggctacgcgcggaggcctacgacacgcccttggagtttccggaagatatccaacagatagccaccattgtccgtgatgagacccaggcctataacgcccggaaaaaaaccttacaggatagcgtcaaggcactgcgtcgcagtctagaactggcggaaggcgaggtgcgtctttcagcgcctatggcacggcaaggcctggtgtcggaggtagagatcatgcgcctgcgccgccaggccaacgacttcaatctgcagatcaccgatcgcctcaaccgtttccgttcggaggccaataacgagctgacccgctcggagagcgaactggcccaggcgctggaagtgctcaagggacgcgaggacgtgatgaagcggacttctatcacggccccggtacgggggacggtgaacaatatccgggttaccacccgtggcggggttatccagcaaggggctgagatcatgaccctgattccgctggaagaccgattgctggtggaggtcaagattcagcccgccgatgtggcgttcattcatccggggttggacgcgacggtgaagatcaccgcgtacgattattcgatctacggcgggctgagcggcaaggtcgagcacatcagccccgacactattttcgatgaagccaaggcgcgcacggggcgggagaacccgacctattacaaagtctatgtgcgcaccgaccgggctgcgctggaggcacgcggacgttcctttccgatcatcccggggatgatcgccagcgtcgatatcaagacgggggagaaaacgatcctggcatatttgctcaagccggtcttgaaggcacgtgaagccttccgggagcgataa

SEQ ID NO: 360034 - DNA, 1614 bp, Pseudomonas aeruginosa
gtgaacaatccattgatgaagtttataaaatgcatgctgtgctcggcggtgctgagcggcttgcaggtgggctgggtgggtaatgtccaggctgaagggagcgaggtgcgtaaacccgccctagatcagcagcaaatggctgatctggccgcgaggttttccattccgcagaagagcgtggtggtgcagaggacgttggtagccgaagtcaaacctgtgcccgagcccgtgtttgagtccgcccccggactcaagtcgaccttcacgcctgctctcgtggctggacccgcttcggcgctcaacggtatcctattgaccgcgagtcccgaacctgtgctgtcggggccgtcactgcgtgcactgattcgcaatggcgagactccggtcagccacgaactgcattcgctgttacgcactgcggttggtaaggctctggaacacagtccggaagtgcgggtggcgagggctaacgagtcggctgctgggtatgacctcgacgaggtcaagggacggcgctggcctcaggtcagtttgggcctgaataccgcgatgacccgacaaaaacggagcctttcttcggatcgttcttccggcgacacttcgggttcgctcaacgtcacgaccaatgtctgggactggggcaagaacgcgggtgaactgcgtaccgccaaggctgcattgggttcagcagagctgaccgggctggttgagcgtgaacaagtggccttcgataccagttccgagctgatcaacctgatgcgttatgagcagagtatgacggtggcggaggactatgttcagcaaatgagctcacgggtcgacatgctgtcgaaaatcgcccagagcgataagggccggaccagcgaactggtacaggcccacgccaagttgctgtcggcccaggctagccgcaagcagatcgaaaatcaacagcaagtgacccggattaaactccaccgcttgctgggggaagaggctccgacgattccaaagcggctcgcagtggtcggtgctccgatgatcgatcctgctgtcgccctggcagcactggacaaaaaccctatattgttacgtctgaaggaacaggccgaaatggaagacggccgggcccaggcggcgacagcacgaagcctaccagggttgaacctggtggtgcgcaaggagcagaacggtttgtcgggctccaataacgaccccaactataacaatgattggtacgtcggccttgaggtgcagtggcaagcttttagcggtggttccaacagggccgcacatagggccgccaatgcgcgtaagagtgcggcactggagcagtacaaaaaggtccatcaggacctgcgtcaggagataaatcgtctggtccagagtcgagcaagcgccgtgcaactggcagaggaataccagcgcctgtcgcaggagtccgaccgggtccgcaagatgttttatgagcagtggtacaacttgggcaagcgcaccttactcgatgtactggtggctgaaaacgatcactttaacagccagttgcaggccattaacaacacctgtgacagtctgattgccgacttgagcattctgtccagttcagcgctgttggtggagtacttgtcgttgtaa

SEQ ID NO: 360035 - DNA, 171 bp, Pseudomonas aeruginosa; identical to SEQ ID NO: 342422

SEQ ID NO: 360036 - DNA, 1809 bp, Pseudomonas aeruginosa
atgcgcttaaagagcttttcgatccagaatttccgtgcaatcaatggcgctggaaatcagttggtatttgatgaaaataatataatattcatatttggtaagaataatattgggaagtctagtgttctgcatgcgtatagattttttgcttcacctactcagtctgctgctataactgatttttatgggcagaatattagtaatagcattgttattgaggctgtatatgtaaaggaggagtctgatagtgagaatttcgaaagtaaggggcttgataagtgggtgtgcgaaagaactggggaagtaaaatttaagaaaacttggagtaagattggttctattgcagaaaaagaaacttttgaccctgtttctggagagtataagtctggtggttttggtgggcttgatcaaatcctgacaaatgcaattcctaatataatatatttggaagctatgcctagcgctaagcttttgactgactggttagagaaagaaattaaaagtaaacttttgaaaaagataaaggatagtcatgctgatgaatattctagggctttaactgcaataaagagtttgcagaacaaggttgagagtgatggttatttaggagagataaaggcgggggctaataaatatttttctaagacttttcctggtctggaacttaatatatgctctactccttataaagaagcagatttggttaaggcttttgagaaagattttagcgttacgattagtaataaaagtgagccagcggtaacgacggaaatgggggcattggcggaggctgttgaggctatagaagctcttgctgatgatcaacttattgaggctgatgggcaggtagatgaagaccctgtgggagacggcgagcctttggctaggacgtttgacctacatggtcatgggctaattcgtcaggcgataataaatatccttggaatatttaaagactcaagtgatgatcagaagcatataatactttttgaagagccggagttgtacttgcatccaagtaataagaggaagtttagagatactctttatgaaatcgcggagcaagaaaattatcaaatgatctgtgtttcccacgatcctcagctaattgaccttagtcgccctcatacatcgctagcgcgctttgttcttttggaaaatggtgaaacagcaatttatcaggctggtgataatatattttcgcaagatgaagatactaaaaatcgcattcaaatgttgaatagatttaatccacatgtttgtgagacgtttttctcagatgaagttgttttggtagagggggatactgaggcgattgtcgttagggagcttattcataagtgctctccggggcgagaggtttttgtattaaatacaggatctaaaaataatattcctttctttattagagtcttgcggcatttcaagattaagttgcacgtaatacatgactcggatgagcgttatctttataaagagggagagaggttggttaagtctgatagcactccaaggcttaatagcgcatgggcattgaatgggagcatatgggatgagctggtgcactgcaatgacttgggtgttcctgcttatcgatatgtgtcagttaggaactttgaacatgcgcacggttacaggcacgactcaagtaaaggtaagccactatcggcacatgagtttgcgaaagaaataaatatggatgatgaatctaaatgtatagttcgatttgttaagcagattttaggtttgttggagcgagaaggttttccgcctgaaatgttggatgcaattgttgaagagccttattaa

SEQ ID NO: 360037 - DNA, 303 bp, Pseudomonas aeruginosa
atgatcatcaagttgtcaccgtttgctccgctgccgggaagcgacgagcgcctgtcactgagcagggctggcgatgtactcactgtgaacggtgtagagttcgatttcacgccgctcccggaaggcggtgaactaccgtctgacgctattgaatcggagtggtttgaaggccccgtattgcggcgctctggccggttggaactgaccctgcgtttaccgctccccgtcgatgccagtgccgccgctcgcttccctgaaccgttgctggtcgaggccgatggcccggtggagttgccgcaatga

SEQ ID NO: 360038 - DNA, 408 bp, Pseudomonas aeruginosa
atgacagggtcaccccggcgagcgatggtgctctgtgccgatccaggacgcctgctcaggtatggggcattgttcaacagccttggttattaccacctgagcctctgcctggaccaacaggagctacggacgtccctgcagtcgggatttcgctatgactattatgtgcatgacgatttccgctgcacttcgctcgacaaggcaacgctgaagttgctcgtcaagaatgacagcgtcgaacactttctcttggtaggtgaagtaagctgccgggacagacgcatcctccatgagtgggcggcccgtaataggatgaccattcacgggatatacgccccccccctgcatgccggcatcctgtcggcgatcatcgaacaggcgatgcgtccccgatcactcccagtctga

SEQ ID NO: 360039 - DNA, 717 bp, Pseudomonas aeruginosa
gtgtccagtaaggccatactgcgcggggccctgctcggcctagcgctgctgaccgggctggacgcccagggcggagtcaccgccgagcgcacccgggtgatcgtcgccgaggggcagcgcgagacctcgctgctgctggtcaaccagaacccctacccggtcatagtgcagacctggatcgacgacggcgcccccgattcttcgccgcagaccgcccgcgcgccgatcatgccgctgccaccgctgtttcgcctcgaccccgagcagcagcgcagcctgcgtctgctgcggaccggccaggcgctgccgggggaccgcgaatcgctgtactggctgaacctctacgagatcccgccgcaagctaccggcccggcggccgagggacagtcacggctgaccgttacgctgcgcacccagatgaaagtcatctaccgccctcgcccgctggccaggggtgctgaacaggcgccacgccagctcaggttcgagcggcggggcgaaacgctgcgggtggagaaccccacgccctacttcatcagcctcgccggcgtcgagcttggcggagacatccgcctgacggcggccgaactgctgccacccttctccaggcacagtctggcgctccgccaggcgctgcccggcggccaggccgaggtgcgcttcagctggatcgatgacggcggcaatctccaacagggacggagcccgctgcgctga

SEQ ID NO: 360040 - DNA, 300 bp, Pseudomonas aeruginosa
atgtataaaacgcctgcgccccgcgatcctgacgtcagccaaaggaatacccttcatgctgcggcttcggtgccggtcctgctcctgactgttgtcggctccgccaccaagcctcctgccaatcccaacaacctttgcgaactcttccgcgagaaaccggaatggcacgaggcgacgcttaatatgcagaagcgctggagcgcaccagtccaggtgccgatggcgatgatgtaccaggagtattctttcaagcatgacgccctgccgtcccgctactacttcctcgacttcatcttctga

SEQ ID NO: 360041 - DNA, 189 bp, Pseudomonas aeruginosa
atggcggccgagactctgtaccgtgagggtggcctaagcgtcagtgccatcagcgagatgctgcatatctccaagagccccctgtacagctacctgcgacatcgaggcgtattgatcggtgcctaccagaagggggggcgaaaccaagaactgcgcctctctgccgcgccgccgaccttgcgcttgtaa

SEQ ID NO: 360042 - DNA, 1710 bp, Pseudomonas aeruginosa
atggtagagcatcgggaacaaccgacgtctgcgctttcccaccgaccgcaaaactggcaccagatcgactggtgccgtgtgcagcggacggtgcgggcgatgcagattcggattgcgaaggcttgcaagaatggcaactggcggaaggtaaaagccctccaacggatgctgacacgctcggcctcagccaggttactagccgtgcgtcgagtgacagaaaatcgaggtaacaggactgccggtgtggatggcaagcgctggaccacaccgcaatcgaagtggaatgccgcgcatgatctggagcgtcgggggtatcgggcatcaccgcttcggcgggtgttcatccccaaagccaatggcacacaacgcccgctgggaatcccaacgatgcgagaccgtgccatgcaagcgctctacctgctggctctgtcacccgtggcagaaactgttggtgatcccaacagttatggtttcagaccggaacgatcgactgccgatgccatgggacaactctacggttgcctgtgccgaaagcggtcgtcgcgctgggtcctggaagcggatatcaggggctgtttcgatcatatcaaccacgcatggttacagcgtcatgtacccatggacaaggacgtgttgaagaagtggttgcgcgcggggatcgtacataaagggacgttccaagcaacagaggaagggacgccgcaaggaggagtcatctccccgacactggccaatctaaccctggacggattggagtcgcagctcaggaaacatctaggcatcacgcgagccggtaggttgaaggtcaacgtggttcggtacgccgatgactttgtcatcacggctgagtcccccgatgtactggtggaagaattccgtccctgggtcgagcagttcctggcccttcggggactggagctagctccagaaaagacccgcatcgtatcgatagaccagggtttcgatttccttggatggaatttccgcaaatatggcgagaagctcctgatcaagccgagccagaagaacgtgcgagcgttctacagcaaggttcgggaaatcatccaaggtcaccatggggacagccaggatcgtttgatccaccggctaagaccagtgttgagaggatgggcgcaatatcaccagcctgtcgtggccaaagcgactttccatcgcctggacgcaaagatctggtacctgctgtggcgctgggcaaggcggcgtcaccagaagaaaggcgctcgatgggtgcgggagcgatatttccataccctgggtgcccggcgctgggagttcgcctatgagcaacgagatgcagcatccggccgtacggaacacatgaggctggagccgctgtcagccacacccatccagcgacatgcaaagatcaagggggagtacaacccgttcgatcctgcatgggagcgggaaagtgaaatgcttcgtacgcggagaatgatgaattcattgcagtaccgccgcgaagtctctcggctctaccagcaacaacgcgggcaatgcgctcactgccgccatcccatcacacgggagtcaggatggcaggatcactacctccttccacgcacacagggcggtaggaaaagcccgagtaatcgtgtgctcttgcatcccgagtgtcacgatcaagtccacaacctcggtatttccgtctgcaaaccggcccgcgaagcgggtttagtaaaggcttga

SEQ ID NO: 360043 - DNA, 852 bp, Pseudomonas aeruginosa
atgcgatccgacctgcacgaggccaaccggctgtcgtggaacgccgccacccgggcgcacaacagccacaaggccgaccaggccgccttcttccgcaacggcggttccacgctctatcccgaggaactgcaactgctcggccatctcgacggcctgcgcctgctgcatctgcaatgcaacgccggacaggacagcctgagcctggcgcgccttggcgcccacgtcaccggggtcgacatcgccgacagcgccatcgacttcgcccgccagctgtcccgcgacagcggcatcgccgccgacttccagcgcgacgacatcctccgctggctgcccgtcgccgccacccgtggcgaacgcttcgagcgggtcttcgcctcctacggcacgctggtctggctctccgacctcaagcgctgggccgacggcatcgcccaggtgctggttcccggcgggcgcttcgtcctggtggagttccatcctttcgccctgtacttcgacccacactggcaaccggcctacgactacttcagccgcgagccgatcgccgagagcggcgtcagcgactacgtcgccgagtccggcgccagcctggcgccctccggctaccgcgccggcgtcgagaacttcagcaaccctcatcccagctacgagttccagtggggcctggccgatgtgatcggcgccctgctcggcgccggcctgcaactcgaacggctggaggaatacccctacgccaacggctgggccggcttcgacggcatgcgcgacggcggcggcggacgcatgctgccgcccgccgatcgtccgcgcctgccgctgatgtacggcctcagcgcaaggaaaccacgatga

SEQ ID NO: 360044 - DNA, 1260 bp, Pseudomonas aeruginosa
atgttggaacatcatttcgggtcgctcaaggcgatcgaccgcgtcagagcccagtggctggggccacagattgaacgctacgtgcagtcgttggacgaactgcataccagtaatgccacagtgcgccagcatatccgcgcacttgggcacttcaatgattttgtcattggcaggggtgtcacgaagctggcagaacttcccgatcatgttgatgcctttgtcgagcattggcgcgccggccatggaagctggtgcaagaataaccaggaccgagccactgtcactgcacaaagccgtgtcccggtcgagcggatgctgtgcctggccttgccgggctacacacgcccgaacaaccggccagcgatgccgtttgccaatacggctcctggtttcttgcgtttcttgaatgatgagaagggtcttcgtcaggagtcgcagcatcgctacatctatacgcttcgtccgtttgaagcctatctgaacagggacggcattgctttgtcggcattggagcccgctcacatcagcggcttcctcgaagaacgtgccaagacactgcacaaggccggcatgcgcggcaccgccggtgcgctgcgcatcttcctgcgttatctgcatcgagaaggcatcgtggctacggatctcgtacgtagtgtgccgcgcggccgtatctaccgccaagcatccattccacgcgcaatcggatggcaggatgtcgagcggctgctggccagcatcgaccgtcgatccaacttgggcaagcgcgactacgccattctgatgctattggccagttatgggttgcgcgccaaggagatcgctgcgctgtgcctggacgacttcgactggatgcacgctcagatcagcatccccatgcgcaagggaggtcattcgacccgctatccgttgtcggccacagtgggcgaggctgtgatttcctacttgcaagttcggcgcagcgatgtccctcaccgccaagtctttctcacggccaggtctccctacattcccatgcgccactggaccgtttcggccatggttggggtacgcatgcgaggcatcggcatccaagtgacacgggcgggctcccatacgctgcgtcatgcctgcgtacagcatcttgtggaagccgacatgcccttcaagatcattggcgactatgtaggccatcgccatccgtcttccacgcttgtctatggcaaggtggcggtacacaagctgcgtcagatcgtcctctgccaaggggaggacgtgctatga

SEQ ID NO: 360045 - DNA, 993 bp, Pseudomonas aeruginosa
atgactacccactggaatggttatcacagtgcgctggccacgcatatcgaacaataccttcgagccaagcgcgctatgggttgcaagttcgcatgcgaagaccgtcaattaagactgcttgatcggttccttgtggactacggcattgacggaataggcacgattgataacgactgcctgcaggcgtttctggactcacgccaccggaccaatccgcgcagctacaacaatttgctcggagatgtccggcgattgtttgattggctcgtcggtcagcagatacttcccacatcgccattagcagcaaaggccaagccgcagagaacccggcggattccctttttgttttcacccgaggtgatcagacggctactggtcctggccaggaccttgccggataaccctcgcgcaccacagcgcggcatcacctacgagatgatcttcgcactgctcgccggccttgggctacgagtgagcgaggtggccggtttgcagtggggcgacgtggacctggagcgcgaggtcctgcagatatccaacaccaagttcggcaaggaccggttggtccccttcggccccaagctggcaatcaggctacgcgagtatcggcttgaacgcgagcggcagggccgtatctgcgtaggcacccaccatctgttttcatggaacggtcgcacaccgatcagcaccaatagcatccgcaacaccttcagggacgatctgctgccacagttgcacctcacggtgccgccgggctgctttggcccgcacgtccatggtttacgacattctttcgcggtgcgaacgttgctgggctggtatcgccaaggaatcattcccggtgaccgcctgcatcacctgtccacgttcctgggacatgtcaatcccaagagtacggcggtgtatctgaccatcaccaacgagttgctcgatgcggccaatgagcgtttcgagtcatttgccccactgttggctgcgggaggttcgtcatga

SEQ ID NO: 360046 - DNA, 1011 bp, Pseudomonas aeruginosa
atgaaggaattcaaccttccagcgatcattcaccgctactttctggagtatttgcctcggcacaaggggctgcaatcgagcacgatccgcagctatcgggatagcctgcgcctgttcctgatctttgtggcgggcacacgccggctcggcgtcagcgaactggtgttggagcaccttgactatcccgccgtacaggccttcctgtacggcttggaggccgatcgaggcaacgccatcagtacccgcaaccagcgtttggcggcacttcatgtgttctacgagtacgtcggccggaccgttcccgagatgctgccgaccagtgccaaggttgccgccatcccgatgaagcgctgcccacggccggagatgacgtttcttggacgtgacgaggttcaagccatgttcgcctgcatccctgcccggcaccgtctctcagcacgggatcgggcgctgttgctgctgctctataacaccggcgcgcgtgtttcggaggtcgcgcatctgaaggtcgaacaacttgacctgcgttcgcccgcgcgcgtcaggctattgggcaaggggtcgaagtggcgaacttgcccgctttggaaccagaccgccaaggcgttgcaggcgatgctggatgagcgcggcacgaacctgccccccgaatcgcccgtattcgtcggaacttcacaggcgccgatgacccggttcggcatttacaagcgcatccgtcactatgccaagctctgggaggcatcggggcagaccgcttgcgcagccaaggtaacgcctcacgtatttcggcacaccacagcggttcatctgctcgaatcaggtgtagaggtcaatgtcattcgaggctggctggggcacgtcaatctggagacgaccaatcgctatgccgagatcactattcgcatgaaggccgaagccttgaagttgtgcgatccgatcgttgcaggcgctccacgtaaacccgcttggcaggacgatgtctccatgttggcttggctgtcgtccctctga

SEQ ID NO: 360047 - DNA, 459 bp, Pseudomonas aeruginosa
atgcgatcacttggaatccgcgctgagcccaaaaaggctacgttcgtcatctacgatgatgaagccaagcaaattttgaacgtcgagttcttgatcattcctcagattttgaacaagccagagcagctcaaattcgctcgccacagcatcctcgacatcctccgggagtaccaagtcgacgcggcgggaattcgggtcgcagagggtaactcgcagaaccaagacgctgaccggttttacctagaggccgtgttcatggagtcgttcgcaagcagcagcatcaaaaactatttcgtgggacgaaagacaagcatcagtgcgcgactgggtatcacctctgatgagtttaactcgatcgtgaagtgcgagactgagcttgagggagtggaaggctggccggcagggaaggcacaggctgttcgagaggccattctcgtagccataggagccgccaaatga

SEQ ID NO: 360048 - DNA, 1035 bp, Pseudomonas aeruginosa
atgatcattccataccagacggcccaggtttcgttccagaggaaggagcgtattggcgagaatggagagaattccgaagtgtacgtcgtccatgacgagcatctggatgccgagcttgtggtgaagcaggtcaaaactgacggcttcaatgaagagatgtacctgcttgaggcgcaactgctctacaaaagcacgcatccgaatgtggtgcaggtactgtacgcctgcaaggatgcgcagcacatctacatggccatgccttactaccggaacggatcgctgcaccaggttgctgaggcacaagggctaacctgcaggcagctcattcgctactcaatccatttcctgagcgggctgaacaacatacactccaaagggctgctccacttcgacatcaagcctgacaacatcctgatctccgacagtgatgaggccctactgtctgacttcggcttcgccaagaacatggatgaagatggattcgctacgcctgaggcgacataccgctaccatctaccgcccgagagtgcccacacacgtgacttcaataatagtgcagacatctaccaggccggcttgaccctgtaccgtttactagctggtttggattcccttgaaaatcagagacgtgcattcgggaatggtgctgaattggcggctgctcagcgcagaggaacctacccggatttgtcgcagctccctctgcatgttccgaaaaaactcaagaccattatcaagaattgcttgagatttgatcccaactcacgctatcaatcagtaatagacttattgaataacctgtcgtccatagaagatataggcctggattggcgtttatctgtagacggtcatacacaacgctgggaaagcatttcgtcggacggaacgacccttttggtagaggtgtccgataatggccagtgtagagcccagaaaaagacggctggcggagcgtttcgcaggaaagccaatctctgcgacgccaacccaaccccggagcgaatccatgaaatcctcatgtcatcagactggtaa

SEQ ID NO: 360049 - DNA, 180 bp, Pseudomonas aeruginosa
atggcaaggtgccactttctcctgatgctgtccatgacaaggatggatctgatggtcggggcggctgagaccgctgggggatacggtggtctggcaaaaaaccaatcaattatctatgccgagataattcccgcgatccgtggcctgcttgaggaaagtgaatcgccccaggttttctag

SEQ ID NO: 360050 - DNA, 813 bp, Pseudomonas aeruginosa
atgattagtcggggttcagagtggcatcggtgggagccacatattcatgcgcctggcaccgtgctcaacaatcagtttgggtctgccgatccttgggaagcttacctctcaagcctcgagaggctaacgccacagatcgaagcaatcgccgtaactgactactacgttacggacacctacgaagaaattctcagacacaaagccgcaggccgtttgccgggtgtgaagctgattttccccaacatcgagctgcgcctcgatgtagctgcaaagtcggggttcgtgaacatccaccttttagtaagcccggaagacccggcgcatttgtctgaggtcaagcgccttcttaagcggcttcagtttccagctttcaacgacaattttgactgcacacgcgatgagctgatcaagctcggcaagcgcgcagaccagtcgatcattgacgatgaggcagctctgcggcacggcgcaacacagttcaaagtcaatttcaacctgctgagaaaggtcttttacgaaagtgaatgggcaaagaaaaatattctcatcgcggtagctggcgggtctggtgatggcacgtccgggttgcgccaggctgccgatgcaacggttcgccaggaaatcgagaagttcgcccacatcattttctcgagcagcccaactcagcgagagttctggcttggccagcgacctggtacgaccgcaactgacttgcgtatacgctcacagcggtcgagactgaatacgatcgcctcgtattgctggaacacgagacggatgatcctgagggaattagcacatctgcactgctag

SEQ ID NO: 360051 - DNA, 534 bp, Pseudomonas aeruginosa
atggaggtggcagatcggcaccctttctctggtacgggcaacctagccaagttcgctgaagggctcgtcaaaatcgatgtccacaaccgagttgtgtttctcttcgacaacgatgcagaagggtacgatgcgttccgcagcctgcagcgtttcaacttccctgtgaacatgtgcgcaatggtacttcctgacctagaggagctacgcagttttcccgcacgagggcccggcggggtctccaacgcggatatcaatggtagagctgcagcgatcgaatgctacctggacttgcgattgaaaggccgcaaactaccgcaagtaacttggacgaactacaaagataaattggatatctatcaaggctcactcgacttcaaggaaagttatgccgatgcgttctacgaagcgagtgcggaggccatctccaccaacgagtacgacgtgagcaagctgcgaatcgtgctaaacgcactgttacgccagtgcagccagatggctgaacaaatgcatccttttgtgcagcattcagagtaa

SEQ ID NO: 360052 - DNA, 135 bp, Pseudomonas aeruginosa
atggactacggaatatcgtccagtcgcaattggcagcacatcaatgagatccgaactcagaaaaatgcctgccgcatggtgccggcggtggaagggcgctatccggccaggagcagacagggctatttactctga

SEQ ID NO: 360053 - DNA, 519 bp, Pseudomonas aeruginosa
atgaaaatccgcttcgcactgtcgttggcaatcgcacttcttaccggcacagccaccgctggcgccgccgagttttctggcgcgctcggcatgaccggtcaaggtgacatgagctaccgcgccggcctggcgttcgactgggacaaaacctggctgaacagcggtaccggccagctgaccggctactgggacgccgcctacacctactgggaaggcggtgacgattacgcgggcgcgcactcgctgtccttcgccccggtgttcgtctatgagttcagcggcttcaaatacacgcccttcttcgaagccgggattggcgtggcattcttctccaagaccgatgtcggcgagcagcaattggggtcctcgttcaacttcgaagaccgcatcggcgccggcctgaagctgccgcacgagcaaaaggtcggcatacgcgccatccattattccaatgccggcatcaaacagccgaacgacggaatcgaatcctactcattgttctacaacaaagccttctga

SEQ ID NO: 360054 - DNA, 1431 bp, Pseudomonas aeruginosa
atgagactcaagcatctgaccgtcgcgatgacgctggcgctgtccggctgcagcctgattcctgactaccagcgcccggacatgccggtgcaggcgcagtggccggaaggcgcggcctatgaacagggcgcagcggcgagcaccactaccgccgagctgggctggagggagttcttcgtcgatccgacgcttcaacgcctgatcggcatctcgctggagaacaaccgagacctgcgccaggcggcactgaacgtcgaagccttccgcgcgcagtatcgcatcagccgttccgatctattcccaagcatcggcatcgacggcagcggccagcgccagcgtctgccggccgacctgtcgaataccggcgaggcggatatcgccagccagtacggtgtaacgcttggcgtcagtgcctacgagctggacttattcggacgcctgcgcagcttggaggaaggcgcgttggcgcgctacctggcaaccgaggaggtgcaacgcagcgtgcagatcggactggtcagcgaggtcgcgatggcctacctgacctggcgcaccgatcagggcctgctggagctgacccacgacacgctctacagctatggcaaaagcctgagcctggtgcaggccgcccacgacgttggcacggcatcggcattggatgtgcgtcaggcccgcagcctggtggagcaggcgcgcgtgcagttcgcccgctattcgcgcctggtcgcgcaagatgccaacctgctgcgtctgttgctcggcaccgagctgccggccgatatcacggatgaacccggcagtgatcgcatgttcgcagaattgccggtgggcatgccggccgacctgctgctacgccgcccggatatcatcgcagccgagtttcgcctgcatgcggccaacgccaacattggcgcagcacgcgcggcgttcttcccgagcatccgcctgacagccgccgccggcaccctgagcggtgagctaaatggcctgttcgagggcggttcgggcacctggagtttcatgccacagatcaacatcccgatcttcaccgccggccggctcaaggccaacctcgattacgccgaggtgcagaaggacatcaacatcgccgagtacgaacagaccatccagaccgcattccgcgaagtcgccgatggcctggccgcacgcggcaccttcgaagaacagctgcaggcccaggccgacctgaccactaccacccaggaatacctggaactggcgcagcagcgctatgacgagggtgtcgacaactacttggccgtgctcgatgcgcaacgcgaactgttctctgcccagcaacagctgctcagcgaccgactgctgcagctcaacagcgaggtgcagctgttccgagcgctcggcggcggatggacggagaacatcgcgcacagcgacgagtccgcgcaataa

SEQ ID NO: 360055 - DNA, 3141 bp, Pseudomonas aeruginosa
atgtcccgttttttcatcgaccggccgatcttcgcctgggtgctggccattgtcgccatgctcgccggcgcgttgtcgctggtgaagatgcccatcagccagtatcccaacatcgccgccccggccgtcgccatcgctgtgtcctatcccggcgcctcggcgcagaccgtgcaggacaccgtggtgcaggtgatcgagcagcaactcagcggcctcgacggcttccgctacatgtccgccgaaagcgcctccgacggcagcatgaccatcatcgtgaccttcgagcagggcaccgacccggatatcgcccaggtccaggtgcagaacaaactgcagctggctacacccaggctgcctgaggaagtgcagcgccaagggctgcgcgtggtgaagtaccagaagaacttcttcctgatcatcgggctggcggacagcaccggcaagatgagcaacttcgacctcggcaacgtgatcgcttcgcagttgcaggacccgatttcgcgcatcgacggcgtgggtgactacatgctgttcggctcacccaatgccatgcgcatctggcttgatccggccaagctcaacagttaccacctgaccccaggcgatgttgccgacgccatccgcgagcagaacgtacaggtctcctccggccagctcggcggtttgccgacccgcaccggtgtgcagctcaacgccacggtgctgggtaagactcgcatgaccactcctgccgaattcgaggagattctggtcaaggtcaaaaccgacggctcgcaaatccgcgtcaaggatgtggcccaggtcgcgctaggtgccgacaacttctctatctcgagtacccataacggcaagccttcggccggcctggccttgcgtctggcctccggcggcaacctgctcgagaccgttgaagccgtgaaggccgagatggagaagcagaaagcctatctgcccgaaggcatcgaagtgttctacccctacgacaccacccccgtggtagaagcctccatcagctcggtagtgcataccatcgtcgaggcggtcgccctcgtctttctggtgatgtacctattcctgcagaacttccgcgccaccctgattccgaccctggcggtgcctgtcgtactacttggcgccttcgcgctgctgccttatttcggactcagcatcaacgtgctgaccatgtacgcgatggtgctggccatcggcttgctggtggatgacgccatcgtggtggtggaaaacgtcgagcgcttgatgcatgaggaagggctgacgccactggaagccacgcgcaaatccatggggcagatccagggtgcgctggtgggcatcggcctggtgctgtcagcggtattcgtgcccatggccttcttcggcggttcggcggggatcatctacaagcagttcgccgtgaccatcgtgctctgcatgagcctctcggtgctggtggcgctgattttcaccccggcgctgtgcgccaccattctgaagaagcccaagggcgatgcccaccacgagaaaaaaggctttttcggctggttcaaccgtaccttcgaccacggcaccaaccgcttcgagcgcggtgtcggcggcatgctaaaacatcgcggccgctacctgctggcctttatgttgatcaccgccggcactggctacctatttacccagattcccaaggcgttcctgcccaacgaggatcaggggttgatgatggtggaggtgcggatgccggtgaattcctccgccgaacgcactcaggcagtcctgcaggaagtaagcgattacttaggtagtgaagaagatcatctgatcgaccatgtactgagcatcaatggcttcaactttgccggacgcggccagaactcgggcctgacgctgctcatgctcaaggactggagtgtgcgccaaggcgacggggaggatgtctttagcctggccgagcgcgccaacgcccgcttcgcccagatcaaggacgccactgtaatggcctttgtgccgccggcaattctggaaatgggtaacgccatgggcttcaacctgttcctccaggacaattctggcgtgggccacgcagcgttgatggacgcgcgcaaccagttcctgcaactggccaacgggcatccacatctgcgtgcggtccgccctaacggcaaggatgacgagccgcaatttcagctcaacatcgacgacgagaaggcccgcgccctgcaggtcagcatcgcctcgatcaacgagaccatgagcgccgcctggggctcgatgtatgtcaacgacttcatcgaccagggacgcgtcaagcgcgtgtacatccagggccaggacgattcgcgcatttctccggaagacttcggcaagtggtacgtgcgcaacgccctgggcgagatggtgccgttctcggccttcgccaccggcgagtgggtattcggctcgcccaagctggaacgctacggtggtatctcctcggtggaaatcctcggtgagccggcgcccggctatagcaccggcgacgccatggtcgccatcgccgagattatgaaggaactgcccccgggcattggcctgagctacaccggcctgtcctacgaggaaatccagaccggtgaccaggcgcccatgctttatgcgctgactgtgctaatcgtgttcctctgcctggctgcactttatgaaagctggtcggtaccggtgtcggtgatgatggtggttccgctgggcattctcggcgcggtacttgccacgctgatgcgtgaactgaacgccgacgtctacttccagattggcctgatgaccacggtcggcctgtcggcgaagaacgccatcctcatcgtcgagttcgccaaggatttgtatgagaaggaaggcatgccgctggtcgatgctgccgttcatgcggccaggctgcggctgcggccgatcgtcatgacgtccttggcattcacctttggcgtactgcctatggctctggccagtggcgcgggtgccggcagccagcactcgatcgccaccggtgtggtcggcggaatggtcaccgccaccgtgctcgccgtgttcttcgtgccgctgttctacgtcgtagtggtcaagttgtttgaaggacgcaagaaggctcaggccgatggcgaaggagaatccgcatga

SEQ ID NO: 360056 - DNA, 1149 bp, Pseudomonas aeruginosa
gtgaatcaccgaaaagctaaatcgcgcgtatggcattccattccgctggcggcactgctgctggccggctgcgtggagtcggacaagccgcaaaccgcggcgccgccgccggaagtgggggtctatcgggtcgaggcacaggcgttgacgctgaccaccgatctgcctgggcgcaccagcgcctaccgcatcgccgaggtcaggccgcaggtaaccggtatcctccagcagcgcctgttcaccgaaggcacggaagtcaagaagggccagcagctgtaccaaatcgatccgcgcacctacgaggcgcgactggcgcgcgccgaggccaacctgaccactgccgagaacctggcccagcgctatgaacggttgcttaagaccagcgcggttagccgccagcaatacgatgacgccatggctgcgtggaagcaggctcaggccgaggtgcaggtcgcgcgcattgacgtgcagtacaccaaggtgctggcgccgatctccgggcgcatcggccgctcggccgtcaccgagggcgcgctggtcaccaatggccaggtgcaggagctggcgaccgttacccagctcgatccgatctacgtcgacgtcaaccagccaatcaccaagctgctcggcctgcgtcgcgcattggaatcaggtcgtctgcaaagttctggagataaccaggccgaggtcagtctgacgctagacgatggtagcgcctaccggctgccgggcaccctgaagttctccgaggtcagtgtcgacccgaccaccggctcggtggccctgcgcgccgagttccccaatccggaccgcaagttgttgccgggcatgttcgtgcatgcgctgctcaaggaaggcacccagcaggatgcgctgctggtgccgcagcaggctgtgagccgcgatacacgcggcgttcccagcgtctgggtggtcaagcaggacaacagcgtcgagaagcgcgaagtcgagaccctgcgcaccgtcggtaatgcttggctgatcggcaagggcctcgccgacggcgaacgtgtgatcaccgaaggcacccagcacgcccgcagtggcgtcacggtaaagccagtggaggccagcaacgtccatctggttaccgagtttggcgagcccactgctgccacagcccactga

SEQ ID NO: 360057 - DNA, 711 bp, Pseudomonas aeruginosa
atgcgggccctgggcgacaacccccagggactgagcctggccgccatcgcgcagatcgtcgacctgccccgctccacggtgcagcgcatcatcaccgcgctggaggccgagtacctggtcgagacccttggcgccagtggcggcttccgcctggggccggcactcgggcagctgatcagccagacccagacagacatcatcacgttgctcaagccctacatgctcgagctctccgagcagttgggcgagtcggtttgcgtcagcacgctggtcggcgctaaagcctacgtggtcgaccgcgtcgtggccgagcgtgagctacgtgtcgtgtttcccattggtatcaaggcgccggcctacgcgactgcgagcggcaaggcgctgctggcggtcctggccgatgagtggcggcaacagctgctgcccgacccgctgccgatcgtgactccatgcacgcctgaccggattacgctgcttgagcagctcgaccagatcgctgagggcgccgttgccgaagaacatggcgagctgattgagggactcagctcgtttgcgatcacgctggaaacctatttgggtcggtactcgatcgcaatcgtcggaccgacagcgcggctagtgactcgtcgtgagctatttcaacaggcgctgcatcgctgccagcagagcgtcgagcgggcgatcggtcggcgcgccacgcatacatcctga

SEQ ID NO: 360058 - DNA, 621 bp, Pseudomonas aeruginosa
atggccagacgaaccgccgctgaagcggagctgacccgacgcaagattctcatggctgccaatgaagtgttctgggatgaaggggtcgataacgccgcgttggcgacggtggccaagatggcgggcgtcacacgcggtgcggtctattggcatttcaaagacaagcacgccatcttgaacgcgctgttcgacgagttatcgattccgcttcgacagccggtgcctcgcaatgcctgccttgacaacgcatggacgtggctggcgcgcgttctgctgaatacggttggcgacgacacggctcgaaagctctcgagcatcatgttccttcaaggacctacaggcgaatgcggaatcattcgggacggcttaacgcggctgcgcaagcagttcatgcggcaaattgcggccatcctcgagtccgcttctagaaatggcgaaatttctccagacataaatcttgaaatggtcgaggcgctatttcagagcgctatcagcggtcttttgtatgaatgtctgcaacagccagagaacaaagagtcgctaatacgttctgtgctcgaatcactgctatgtctgatcaagtcgccacctgagcatttgttaaaagtgtctgtggcatga

SEQ ID NO: 360059 - DNA, 744 bp, Pseudomonas aeruginosa
atgaatgttgaaacaacgcgagcggcttatatcgaaggacgccggcagacagaggccgagcgcaaggcccgtgccgccgaaaagctcaaaaatcaccagtacacctgcctggtgaagcagcccgacgttgaggtctggcgttgcaaggccgagagcaccaccgcctatgccttcgacatcatgatgacccggttcggaatcgccgttatcggcgatatcggcgacctgacgttcagtgtcggcctgggctatggcatatcgttccttgcgggtgatgacgtcacctactacctacacaccaagctcaacgagtcccacaaaaagcaggtattcagcacaaccctgttccgccaggtactgatgtcgagcatctgccgggaactgcaccacaactgctccgaggaaatctgggatgccctgccaggctgggcgcaggatgcggacctggttcgtggtgagcattggggggagttccgcgccctgaccgtgaccaaccgccgcgatctggagaatggcgatgatcgctggatgcactgggacgacctctttgatgctgccgaacagatcagctacaccgaggaagcgcaccagttcatgcgcgacaatgccgaggtgctttgcctgggtgaagagtggtacgagcatcggataacgaagacctgcgacagcctttatgctcagctctacatgatcaaccacgcagcaaaagcaatcatggcacagaccgatcaaacaattacatga

SEQ ID NO: 360060 - DNA, 462 bp, Pseudomonas aeruginosa
atgctagccattgcagctgcacgcagcgcgagaatcaaagcgagcgaccgtgaaatcgccgtcgcggtgcttatggccatggcggaaagcgataagccgtttggccggttctcgcctcgcgccatgtacgacgatgattcagatacggtcgagcgcattactgaattgctcggggagaaggtgccgaatggtgtttcctggagctaccagcatcggcggctaatgcgggtctgcaaccaccttgttgactacggtgtgattgcggggcgtgtcttcacaaatccagaccgtcagtacatcggcgaagagatacggcaaaaggagtttttctgggggaatgttgcctacgcctttcggatttgccccgagaagtacccgcactacacacccaggccgggtagtacgcctgagcgtgaaattgactggctgctgaggcatgcctaccccaatgaagagttatag

SEQ ID NO: 360061 - DNA, 690 bp, Pseudomonas aeruginosa
atgaaagtagtgagactgtcgcgggatattcctaccgagcttcagcagggcgcaatgagcatcgctttcgattgtgccaaggagctcacggttttcagcctggtcgagaacgacccttttgaagagctcgccaaagcagaggtttgcgctcggctccaggcagatttttatctgatcgccaaccccatgcctgtcaatggcgtgttgtcccgtggtgaggcgatattcgtacttgacgaaagcttcgatcctgcgcgggtcgttggcttcgcaacctataagccgcgttttccgacgtttacgtctgcatcaatttgctacatcgcggtagctaaaagccatcgtagacagggggttatgcgcctgattatgagcaaactgctggaacactatcctgttgtggcacttgattgtccaatcgaattggttccgctgtacaagaagttcgggttctatgtgtcaggtagccaaagttcccacataaccatggaaaccgggccaattaatgggcagatgctcagtatggatagcgaagatttgatggccgaaccgtctcttgtggaagccaagcaaagagtcaccaaagctttgggaagtgaagctaaggaaggctaccgaatatttaaccagcggaacgagcttgccattattagggctgccaattttgtaaaatcagaacgccctcgttaa

SEQ ID NO: 360062 - DNA, 840 bp, Pseudomonas aeruginosa
atgatgaagaaccgcagtatcacgatccgtaccgggctcctcgccgcggctattgctctcctggttgggtgctcatccgcgccgaaggcacctaccgtcgaactgcctgaccctaaggatgtgccgaaggaaaaatggtccgacgccatgcatgttctcaaagcgatggggatgtctggccagcgcgacgtgccacgcgaaatggccgagtcgttcgtcaactcaggattaggccccagtacaggtgctgcaagcgcagatgttgcccttgcaggtgctagcctcgcagccccccctaccggcttcagcggtggagcagcggcgggcgtaagcctcgggcttatgctgttgggcggatcgtcggaccctgcccgcacaacccaggttgtggcctgggtaccgactgacatggcctcttctcctgaagaagcctctgcactcgcgctccagaaggtggaggaagctcgcaagaaagtgtttgtaaaaggaatgtccaagctatcaatgcatgttggaaaatatccggatggccattcccgtgcttacgcatctttggccgacagctacgcggagcggcctatcccattcaccgacaaagcaaccccagcaccgaaatttatagaagcctcggaggcatacggccccatcttcatccgcgacaatcaatttgtccttgatgcatccaaaaacggcatgacggtatcacaagctatgctgctcgcctcccgtcagttaccggagtggatctacatctatcatcctggccaaaagctgcgtaagaactccattccggcggccatttttaaccaaggtgaagctaagtatttcgttggcaaatag

SEQ ID NO: 360063 - DNA, 123 bp, Pseudomonas aeruginosa
atgagcgacctcttaactttcttcagtaaagccctggacaccgacccacttaccttggccctgtgctgcatcctggtcatgagcattggcctggtcgcagtcgcctggagactctcgaaatga

SEQ ID NO: 360064 - DNA, 786 bp, Pseudomonas aeruginosa
atgacgaagacaaagaagaagagcgaatgggccaagcttccactgcgctggattcacaagggcgggctccagaccttcaccgatatgaaactgaagaagacgcgcgtgccggaggggcaggaatggactgaggccttgctgcacgacagggaagcccggaacacctgcatcgctgcgctccgtctgtacctggtcctgtgctgccgcgctgactacaagagtggcgaggccgctgtgacgtatccggagctgatgaagctcgcgcaaatgtcgcgacccatcgtcgccagatcaatcacgaggcttgtcacggcgggcctgattcggaaaaaggaacaaacccgaaaagagggatctgtgatcatcatcgagcgctggaacgatgattatgcgtggggaaagattcccaaactcaagctgtatgatggaaatgaagctggtcagatgctgttgcttgctcagttcaacttcagcaaatcaagtttccacgcgattaaggtctacatggcactcatggcctttcgcgaccgatcggccgaaggaatagctgtcgtcagctacgacaagatagcccaggttacggggatagcgcgctgctacgtcgcggaagccattaataggctgtatgccatggacctaatctcataccggccagggcacttcaactccggaagtacagacgatagaactaaccattatctggttaagggcttaagtgcacgctggcgaagtccaagccaagttgaatggtcagcgccagagtcttcccttaatggtaatttttag

SEQ ID NO: 360065 - DNA, 351 bp, Pseudomonas aeruginosa
atggttcagtgtcagtgctgtaagaagatgatggtccccaaggtgatcactagcgctcctttctacatcagcggcatccctattggtggccgtgacccggagaactcggtttgcccgttttgcctgtcgcccaagtggatgctgactgagcagcaggttctaactggggcaagggcaaatgctgagtttttcggcatcatggtgttgcttctgattaacatcgtcgtgttcgctcgcttgggtgctgaagcggtcggtgtgagtgttggtctgtctgttttgctgttcctgttccgggagcgagtcgcaaaggcggtaaagggtcggctggctgagatcttcaaggggtaa

SEQ ID NO: 360066 - DNA, 3144 bp, Pseudomonas aeruginosa
atggagttcactatctacacgacgggcagcgccgagttccttgagatcatgctcaatgcctgcgcaatgatcacaggaagcggtgatgcagaaggccttgcccgtattggggcgctattagggctctttctgttggcgttccaagcggttttcaataaccaggccattaccttcggaaaggcgggtcttatgctcgccctctacatgatgttctacggaccgacagccaccactgttatcgaggatacggtgtcttcgcaggtgcgggtggtggacaacgtgcctcttggccctgcctttgtcggctcagtcatctcaacggtggcctatggcatcacaagaaccgcggagcaggcattctctactccaagcatgaccgactacgggctgttctcaagcctgagcacattgtcgaaggtgcgcgatgcgcttcggaatccgatggctctggacggcttccaaaactaccgaaaagcggatgggtgggatctgcctcgaaccgtgaacgagtatctggccttctgctctctgaaccctgtggctttgagaacggacaagacgctgaccgagttgtaccgatcgcctggttgggcacaggtgatgtcaaatcagaacccatcaatgttcgtctacgtctatgacggtagtggtgccggcactttgaaaagttgtgcagaggcccggtcgttcctcaatgcccatctgcagaacgtctacacggatgtgctagaggacattctccagaaagggttcagcgaagaagttaagaccaatcgcatgaccagcggtgtccaggtgcaagctgctaccgaccaagctattcagagtctcgcactgagtagcaagtcggctcaggactacgttctgacgtcgctgatcgctccgatcttcaacagctcccgtgtcgatgccttgaaccattggcatgagaaacgagccgctatggctcttcgcgaagcgctcaaccagcaagagattcaatgggcggggaagggagacagctttaaacactacatgaggccgatgattgccttcttcgagggcatgctctatgcgatgacgccgtttatggcttttgctttgctcctgggcgggcccgggctttcaatcctcgggaagtacctggtgctgccactggcggtcggtctttggatgccgctgttgagtatcgtgaatgcctttactctttggtacgcaggctctcagatcgacgcggtattcagcggatacgatcccacgggtcctggtttcgcaatgcttcagctcttggacattgacaaggcgatcggcaaggcacttggcataggtggtctgctcgcagcatcggtgcccccattggcactattcatcgtctccggctctgccatggttgccaatagcgtcatgagccaaatgacggcgggcgacaaattcaagtccgaagacgttactcctcgatcccaaaatagcgctcccgtactcactaccgaagcaacctatgcatccgatcaattaacacaaggtgtcagcgtgacagggcaacgtgcctcagggccacagctttcagcagctcagggggctgatgcgatggttcagagcagccggcaggtcgcagaaactgccacgtctcaggtacaggaaacgctccaggcgggagtacagcagttggccgcgacctcgaccggtaggcagacaatggcaagcctaggatctcaagttgcgcagcagttgaacctatccagcaattctcagtacgcagaggcctccaagaagcttgagtcccttggttacagcaaggacgagatcgcggccggcgcttttgctgcgagcacgggcattcaagcgccgttcggactcgctggtactcggttggagcagtcagagaaataccagcaaatgtcttccacgcagcagaacgaagctagggaagctggcgcgcagctgacaaaggcggtgcaatcgagcaggtctgatggcaccacgttcaccgccggcgacacgttccttcgtagtgaacaagctatgagccagaccagtaacgctgaaaccatagctaagtctttgaccagtgctaaaactgccacagacgcttatcaaaaagcagagcaaagccgagattcctgggctcaacagcaaaacctggatctcggtacagctgctggccgtaccctagagaaaagtggcatggcccggccggatgctgcgcgagccatgctagatatggcagggcgcacagcagacgagcgcgatgcaatccgtgtactaatgcaatccgaaacaatccagcgaacctcaagtgataaacatgaacaacaaatcgcggcttcaactttgttcatgatgcagcaaggacgacttggcgagttggtaagctcaaacatgagcccattcgactttagcgttgccactgggaacgcaaatgcgaacgccggtctaagcgctccatcagttgattcaggtgctctcacatcgcgctacaatgcaataagtggtggtgcagttgctgcctatgcgggagcagccgatatggcaagcgccggctatgaagctacgatggctgacgctcccgtagttgttaatgcaaacgccgaagctgctgacaatagagtggctgaacatgcagatatgagcggtgcaagagttgaagccctcaaagatgacgactcatcaaaggcacctgtctcgattcaaacggtgacgccaataacagattcagggaaatcttttgtcgcagatgccccgggttttgtaggtcgtggaatccagcagcttgcgactcccttcacttatgtcggtgaaaaaatctcgcaaagttttgatcttggcggtgaagcccatgacttaccgcatccgactccggtgcagcccgctctggccaatgaagatgttcctcttggggagaaaccgcaggtggatgagagaagtaccgtcccggtaggagatcatggacaggcgggctcgcaaccggcccccgtccagggaaggggtcttcccgcagatccagctccccggcccagcctgagcaaagaggatgggccacaagtttcaacccaagctccggccccaaaacctgccagatctgttccaccacctgctccaccatcatcctcggcagaacctgccaaactcaaacctcagcgaccgacagggattaatgctgactag

SEQ ID NO: 360067 - DNA, 2610 bp, Pseudomonas aeruginosa
atgccaggattcgtggccgccgaactgatcgtttggctcagcgagcacaaaatcatccggcccggccacaccaccttacaagagctggtcagtgaagccctgtccaccgaacgcaggcgcttgggcggcttgctggcagaagtgttggacgaatcggccaaagctgcgctgggccagctcctggtgcgtgacgacaccctgtctcaactggcagcgctcaagcaggacgctaaagatttcggctggcgtcagatggcaggggagcgcgagaagcgcgccacgctgaagtccttgcacgggatcgccaaggcgctgctgcccaagctcggcatctcgcagcagaacctgctgtactacgcgagcctggcgaacttctataccgtccatgacctgcgccacctgaaggcggagcagacccggctctacctgctgtgctatgcctgggtacgttaccggcagctcaccgacaacctggtcgacgcgatggccttccacatgaaaaaacttgaggacgagagccgcacgggtgcgaaacagtcctttgtcgccgaacagctgcgacgccatcaggaaacgccgcaggttggccgcctgctgtcgctgtacgtggacgacagcgtggccgatccgacgccgttcggcgaggtgcgccaacgcgcctacaaaatcatgtccagggaattgctgcaaaacacggcgcagcgcatgagcgtcaagccactgaacaaactggcgctgcactggcaggcggtggacggcctggccgaacgcattcgacgccatctacggccgctgtacgtcgcgctcgacttcgccggcacggcccccgataacccatggctcgcggcgctgacttgggccaagagcgtgttcgccaagcagcagcgcctatcacaacggccactcgacgaatgtccggcggcaacgctgccgaaacgcttgcgtccgtacctgctgatgttcgatgccgaaggcacgccgacaggcctgcatgccgatcgttacgaattctggctttaccgtcaggtcaggaaacgcttccaggcgggcgagctctacattgacgacagcttgcagcaccggcatttgtccgacgagttggtttcgatggacgagaaagccgccgtgctcgcgcagatggacatccccttcctgcggcagccggtcagtgcccagctcgatgcactggcggccgagttgcgtgcgcaatgggtggcgttcaatcgcgagctgaaacagggcaagctgacgcacctggaatacgacaaggacacgcagagactgacctggcgcaagcccaagggggagaaccagaaggcgcgcgagcaagctctctacgagcaactgccatactgcgatgtcgccgacgtgtttcgcttcgtcaacggccagtgccagttcctgtcggcgctgacaccattgcagccacgctatgcgaagaaggtagccgacgccgacagtctgatggcggtgatcattgcccaagccatgaaccacggcaaccaggttatggcacgtaccagcgacatcccgtaccacgtcctggagagtacctaccagcagtacctgcgccaggcgacgctacatgtggccaacgattgcatcagcaacgccatcgccgcactgccgatcttcccgcattactcgttcgacctcgattcgttgtacggtgccgttgatgggcagaaattcggcgtcgagcgaccaactgtgaaggcgcgctactcgcgcaaatatttcggccgcggcaagggcgtcgtcgcctacacgctgctgtgcaatcacgtgccgttgaacggctacctgataggcgcacacgagtacgaggctcaccacgtgttcgacatctggtaccgcaacacgtcggacatcgtgccgagcgcgatcaccggcgacatgcacagcatcaacaaggccaacttcgccatcctgcactggttcggacttcgtttcgagccgcgcttcaccgacctcgacgaccagttgcaggagctgtattgcgccgatgatctggcattgtacgagaaatgcctgatccggccggctggccagatcgaccggcaactcatcgtcggtgagaaggcgaacatcgaccgaatcgtcgccacactgggcctgaaggaaatgacgcagggcacgctgatccgcaagctgtgcacctatacggcgccgaacccgacgcggcgcgcaatcttcgagttcgacaagctcatccgcagtatctacacactgcgctacctgcgcgacccgcaactggagcgtaatgttcaccgctcgcagaaccgcattgagtcctatcaccagctacgctcgaccatcgcccaagtcggtgggaagaaggaattgaccggccgcaccgacatcgaaatcgagatcagcaaccagtgcgccaggctgatcggcaacgcgatcatcttctacaactcggcgatcctgtccctgctgctgacgaagtacgaggcagctggcaatgccaaggcgctggcgttgatcacgcagatgtcgccagcggcctggcggcacatcctgctgaacgggcattacaccttccagactgacggcaagttcatcgacctggatgcgctcgtggcgggactggagctgggctga

SEQ ID NO: 360068 - DNA, 756 bp, Pseudomonas aeruginosa
atgatggtcaaatcttctcgttattctgcaatccattcccccaccagcgtgagccccaatggctatttcgcgaaatatggagccaatacttttggccgtgattttgtagttggcgatattcatggtgagtttagcaagttatcgaaactattatcatgcgctgaatttaacgaaagcacagaccgactattcgccgtgggtgacttagttgatagagggcaagagtctcgccaagtgggtcactggctaaagaaaccttggttcaaatccgtgatggggaatcatgactactggtgtgttgaaggcggacagggtaccgaaccagctggacaccggaagtacgggggagagtggttctactctctcacctccaaggagcagaggaccataggactcgccttgcatgctttacccatcgctattcaggtagacggtcgcaacggcgagaaatttggaattgttcatgccgaatgcacatgccttagttgggcgcgcttcgaagaggctctatcaggtgagttgggcgactcttatagggattaccatgccacgaacgcaatgtggcgtagatctcgtcatgcgaatcaaacaaccattcccgttgctggtatcgataggatatatgttgggcatacgaaagttcctgccgtcatagacttaggaaatgttcgatacatagatactggtggcgtgtttaaagatgggctattgaccatgattgaagtaggtggcttggaagccgtccactcaatctga

SEQ ID NO: 360069 - DNA, 1422 bp, Pseudomonas aeruginosa
gtgcaaccacatcacaacgacgcccaaaacaacaaccagttggtcatcgagggagacatcctcgatcagttctatgcaccaatccaattcgacgccctgaccctactatccagcgaatacgagcgcctacgcgaaaggattatcgaagtccacggaatcattacccaggaacgcgtcagtggagtaatgaatttcttcttcagcggcaacagccgcgacagttacggcagctatgcctccattcggcatacgaacgcattcgaggaagttttcaggatcgacggtgccctcaacgagcttacggccaccttctgggatcgtgctctacgtcagactgatctgatggagtacatgccccaagcacgccgctcgcagtggaccgagaccctcaatgcctggcgcactcacgggtaccagcgcggcaagaacccagagctggacatgcccgaattcaacctcgataaccttcgggccacggttcagagcctgctagcccgccgagcggagttcctggctgaaagggtggatggcatattccgagctctgtcccgccggcacgttaccaacgtgcccgagggcttcgccaagcgcatgataatgggcggcgtattcaacgactggggcagtactgaccatcacagcgagggagtgattcatgacctgcgaatggtcatagccaaatttatgggccgagatgatccatgccgcagatcgacaagccgtttgctagtcagcgcccgtgcggcccgcggcgagtggttagaggcggattgtggtgccttccgtgtacgtgcataccaggttggcaccgcgcatctggagatacatccggacatggcctatcgcctgaatagcattctggcgttcctctacccagcggccattcccgaggcattccgcaagcgtccggcacgcgctaaagcaactggcttcaagagcaagaagctattcgagcgcccgtttagcaatgcagtggcagccgcgctggccagcatgggacaagcgaccaaatttgtgaaaagcaccgattggcggcgggagtacgacaaaaaacccattcgtaatgcagttgagctgaactacgaactgcgcgataagtgcaagcatctcgcagcagaaatagacgccgtgatgcaggctctcggtggagtgtacacagtagattcagaacgtcgacatttcacctactggcagttcgactttgacgctctggatctcgtccaccaggttgcagcgctaggctatatcccagaccacaaaagccatcagttctacccaacacccgagccggttgcacagcgcttggtcgactggttggagattgggctgctagataccgtctgtgagccacaggctggccaaggcggcatgggttctaccccgttaacacggacactttcgagtaagctcacgccgagctga

SEQ ID NO: 360070 - DNA, 240 bp, Pseudomonas aeruginosa
atgagtcggcttgtactcatcaccggcaggcgccgctacggcaagcgcctccaggcactgttcctatatgccaaggagttcggctggacagccaccaagaccaacggcgggcatctgcgcttcaccaaaccagggaggccgatcatccacaccagcagcacaccgagcgactggcgcgcagtccgcaactcggtggccatgctggccaaggccgatcgcatggaggtggtgattgtctga

SEQ ID NO: 360071 - DNA, 411 bp, Pseudomonas aeruginosa
atggccaactcctacctcgagcaccacctcgccctactccagcacctgcgcaacatcctcggcgccctgggcgaggccgagcaggtgccggaagaaaaccacgggctgttcctcgagcgtttcgacgaactgatggacgaactgccgcgcgacccggaaggcgcccaatacctcggccaggacctgatttcccaggtcttccaccgctatccgcagatcgcccacctggtacctcgcgacctgctgtggttcttcggcggcgattgcctgcacttcatgccggacgaagagatcgacctgttccagcgcctcgacgagcgccgctacgaagccgaagagcgcggcgaaacgttcgactggaaccgcgaaaagcagttgctcgcgctgcccgaggacagcccgcggcactga

SEQ ID NO: 360072 - DNA, 1806 bp, Pseudomonas aeruginosa
atgctcaaaagaacactactcagcgccgctgtagcttcggcactgtttgctggagtcgcgaacgctgccggagtggttgctattgccacaagccccactctggaggcgaactcgcctggtgcaaccgagcagtacgggccaggacaggccaactatgtcgtcggcaagagtgtggaaaatggtgccaacctcgacagcaaggcggccaacatcaccctggctcaggagattttcggcaacaagtccgaagaaactacctttgacctacccagcgttacctacaccatcgatccagtgaaggctggaaatgccgctgcgggccacaccatcaagctgacccttggtcgtaccgtcgtgcgcttcgccaaggccgtgaccgccaaccagatcaagatcggcgccctggctgcgggtagcggcttcgtcatcaccagcggcactggcgccaccgacaacacgcttgagctgcgcctcgaccaggcgggtgccgacatgatcaagcagaccgcgaccggcggcaacgtggtgttcttcaacttccgcgagccgagcagccaggacagccagcctgccaaggtcaccaacatgcgcgctccgcttcagggcgatgccaccttcgtggctggatcctggaatccgaaagtgagcctgcagaacgacccgctgaacgaattgcgtttccaggtcacggtttccgcccagttcgataccaccactggcgccgatgccggcaaccctgcgaataacgattctgcaccgcccctgaccattttcacttcgctgcccgcggtttactgggacgttctcaacaccaaccagtatgggcagaatcgcgtcctgcatccgttgaacctgaacaatcaggatcgctccttcgataccacggtgtccgtcggtggcgataacaccgattattatggtgccaactatgcgcgtctgggcgccgtacggctcggcatcaatacggatgtgctcaacgaggcgggtcgaaccgtgtttggtttcgccggtggcgacaaggtgaccagcaccctgtcgggtaacttcaacgggatcagcgacatcggcctgaccaccgggaactgctccgcctttgccgccaatccggggtctgccgccaagctctggaattctgccgccatcgaaggtgtagtggatgcgcagggcaacggtactttgccggtatcgttcgacaactcgaatatcaaccagacctacaacgtctgcgtgaaggcttccggcaccgtgccgatgcaggcgctgcaacgtttcgacgtgggtgatctgaaggtcgacttcgagaacgtacgctatgtcgaccgtaccattgcaggcaaccgtctcgacgagttctggaagaacagttgcgtcgccagtctgttcaatctgcctggctccaatgtttccgaccagttcttcattcgtctgaccaacaccagcgacgatggtcgggacggcaaggtgcgcggggtactgttcgaccagaacggtaagcgttatccggcgactggcagcacctacctgaccgactcgagcgggaagaccgccctgaaagcgcacgaaaccggtgtgtacaccgtaaccgaagtagccaaggccttcggtatcgacggcaccaactggaacggtgccaacggtcgcgcacgtctggtcctggaaggcgagttcccaacttgcgaggcgctcggcctgatccgctctgccaatggcaccatcaccaacatgacctccaccacccaaggcaacttcaacgaagatggctcgtccacctcggagaaccacaaggctggtaacaaccgcaactaa

SEQ ID NO: 360073 - DNA, 585 bp, Pseudomonas aeruginosa; identical to SEQ ID NO: 324382

SEQ ID NO: 360074 - DNA, 1239 bp, Pseudomonas aeruginosa
atggcttctagtgctcatcaagagcaggtttgttacacatgtgtgcacgatgcttacctgggccgccagatcaagcgtactggcacctccaccatctgcaccctgtgcagcgccacaaaaaaatgcgtccccttatccagcgtcgtagcacgggtcgaggggatccttgatgcctacgtcattgagggcgaatactttcgtcgctttgctgattggggtgacagtcaggaaggggacagcctcgatacttgggtcagcgcgatcttcgactgtgacaacgtcgagccgatcgtggaggccgtatgcgatcgtctagacagctacagtctggacaccaactattccaagcggatttacagactggacgacatcggccaccagtggtttgagttccagcaagggatgaagcatggtcagcggttcttcaacgacagtgccaagacgttcctagactggattttcaaagatctgtacaagtactcagcctcctctgacgaagaggttgtggttcgcttgctcacgccggaggacgcgccacctatctatcgcgctcgcacctgtatgacctacacggacgtcggcgggattgcggccaatccggcgcgcaaccttggtgcccccccgaaagagagagctgcggatgggaggatgaaccctgctggggttccagcgttctacggcgcattcgagcgcgaaacgtgcatcgctgaattgcgccccccagtgggtgctaccgtcgttagcggtgagttcaggttgaacaggatggtcagggtcttggatttcggacggttcgagaaagcagatcttggcccggcgccgagcttcttcgatccgaagcatcacgccaagactggacgcagggagttcctgaaatacctgcacaacgagatcaccgtacccgtgctgccgggcgctgagcgtgactacctgatcacgcaggtcatcgcggaatacctggcaacccactgcaagcctcggatcgatggggtgatcttcaaatccgtgcaacagagtgccggaagtaacatcgtgctgttttcgcatgtagcctgtgctgctgcatcttcctttggacgattgcaggatcgctatggcattgggatgtctgaagggcctagtatcgagtatgtcggtgacagtcttgtccaccacgctatccgtgaggtcaagtaccaggccgatgatgagtccttgcctgagggcaagccaacgttgattctagagtccgacttctga

SEQ ID NO: 360075 - DNA, 477 bp, Pseudomonas aeruginosa
atgatcaacgtcaccttcgaatccggagacatcattgccaccctggctctgtttttttccgtgtacgccacctttaaaaccgtccagttcaacaaccggcagcaagaggtcatcaagagccaagcaaagctgaatgagctgctcctgaacaaagaggccgccggtgtagagctggacaagcaggccgacctaggggcgacattcctgaagctgggcaatagcaaatacaaattaagggtctttaacaaaggcaaagcccctgcgcgacacgtaacgattgactttcctgaaggcaatgaagtaatcccagagagcgacattgagagcaagttcccgcttcaactgctcgacgtgcaccaggcggttgagctaatcgcagccgttcatttgggtacaaagtcaaagcacttggtaaagctagagtgggacgatgggcggactggcagggcggcgaaggagttgtgggctaccttgtga

SEQ ID NO: 360076 - DNA, 273 bp, Pseudomonas aeruginosa
atgaatttggacaaacactcccgcacgatctccctccactgcccgacctgtgctggcacgacgttcaaaagcgagtcacccgagagtctcagcgtaacttgcactggttgcgaccgcgtgatcagcagggaagatctacgccgagaaaacgaagagaacatccaggcgcatcttggagagataaagaaagagatctcgaaggcagtggccgacgatctgcgtaagcgtcttcaaaacgcgttcaagggcagcaaagggttcaagctcaaatga

SEQ ID NO: 360077 - DNA, 138 bp, Pseudomonas aeruginosa
atgattctgcgtacaggccttgcgacctggattttgatggcaggcgaggcggcggcgggcagatgtgatatggctattggccacttgtccatcctggccaacctctccatcatcatgggctctttatcaaagagctga

SEQ ID NO: 360078 - DNA, 579 bp, Pseudomonas aeruginosa
atggaaatgacctcgctgaagctgctccaccgcagcatgattacgattggcagtgacatgcagcaattcctggtgagaacgggggcggcgagtttcgactgcctcttctccacgcgcgacacgcccttcgttctgacgctcactgcccgaggcaagacccgaggcttcttccggttcgacgtccttgcaggctatcggattcgtgattacctggttgatatgtacggcgatctcttggaggttctcaaggaggatggctctagtggccaacgcctgatacccaaggaatttctggcgcaactcaacgatgccattccgacgcaggctacggaaaaagggcatccaaagccttcagaaattgtgcgcttgcgccccgacatcgttgaggacagagaaaagccttacttcaattgctggtcatattggactcaaggtcagaaacctagtgcggagaaccagcagaaaactttacttctgcttgggccagatgccttgcgccacagccaggagcgcagcgcctcctctcgttggagctcaaccgacacgggcggatcatggactaaagatctttcgaagtag

SEQ ID NO: 360079 - DNA, 825 bp, Pseudomonas aeruginosa
gtgtcctacgcacccaccgaagccgttcaacactgcgaaactcttctgcgcgagatgatggaacgcttccgggccgacaatatttggcccaacgcacagagcatcatagaaagcgtgctcaagcgtcgtatcgaactgattgaggtctatgaggaggttcatgcttccctctctgagaagccccgagcgctttacatgttctgggatgtcttcgtccatgcggctgacggctggaatcccgagaagaaccgagcagcgcggcaggctcgggaagatttgatcagcgttaacacacaaatcagcgagctcgctgatcagctggccgcactgctcgatcgccgtgacgaccttcacaactactccgggtttagctccaacacccaatcccagatactggatatcgtgcacgaggcctcggagcacaatggtctctacgaaagctatgcgaaggaagacgttgagcgtctgcagtatcaatacgagcccaagtattggcccagcttaagtgaggtgattcaggctattggtaccgatgccgaaatggcggaagtgactgccaacgacccagctaccgaagctgcgactgcaagccgtaaatcgggccgttcagattttgtgagagcgtttctggctcgtatcgatgacaaccgcgtgcgcgagtgtggcttcatacccaacagcttcgcgctctctgacggcagcttggcttcgcttgtgaactgtggacttgggttagctgtggacgagttggtggacgctgatttcatcaagcgttttcgtcagcgtgagcgtcaggtcaagaaggctgaatctacatcagcatga

SEQ ID NO: 360080 - DNA, 2001 bp, Pseudomonas aeruginosa
atgaccacgctcagcgaactggtgcccgaaatcaccgacgaggacatcgaatggatctcgggccttatgaagctggagggcttggacgagcagcgcctggcatttcttcggtcgcgggaaacactagacgtgtcggcatgtccgggaagcggtaaaaccactctggtagttgccaagcttgcgatgcttgcccgcaaatggaaaagccgcacacgtggtatctgcgtgctatctcacacaaacgtcgctcgccatgaaatcgaacagcgcctgggtgacaccgaggttggcaggcgactgctgaattacccccactacatcgacacaattcatggcttcgtcagacgtttcctcgccacaccctggctcctctccgctcaataccgtttcaccgcgatcgacgatgagttgacccacaggatgcgttacaggtctttgtcagaagacgacaaacgatttctacgcaatttcctggcccatagaaacttcgacacctcactcctgcgcctagtcaatgccgattttgctgaccctcgcatcaaggtcaccaaaggcaagcttccgagcgggcccgatactcagagctaccaaatcatggccaaggcagtcgttgacacggccaaacgcggttacttctgttacgacgaaatcttcgtgctgggcagtgctcagcttgccgcgcggccaagcgtggccgaggggctgaggcaccgttttccatgcgtgttcatcgacgagatgcaggatacttcggcaatgcagaacgagtatctcggcgccatttttccccgcgacaacgcgggaatatgtgtaacgcgtgttggcgattccaatcaggcaatatttgagtcggacgcccaaaccaatggcagtgactttccagatcgaagtcgaggagtcgacatatccaccagctttcgcttcgatgagtcgattgcgatgctggcacatccctttgccctccatgcggtagcaggcaggcttacagggcgtcgcaacgtcggagtggaaggggcgctccgccacaccgtttttgttttccctgatgatgactgtggtcgcgtactggatgcctatgctcgtctggctttccagcagatccccgtttccctgcatgacaaggccatagtcacagcgcttggctatacccacaaagacatcgaccccgccgacaccagccaaatgcattacccgaagacggtcgggcattactgggagggttatgatcgcagcgcaggtctagtagcgtacaggccacctacgttgattgagcgcgttcgtcacgccaagcgtaatctcgccaaaagcgagactgctcacaacagcgtcgaagagatcgcgaaaggcctcctccatctggtgaacctctccaatctcaccaccaaaatcaaagtgggaagtcgacagcatgtccaggttcaacagttgctcgtcgacctgagcgacttggctagctatcaacagctagcggtagagttgctattcgctccaagtaccatcagcgccgagagctgggcatccttcgctcagcgcttctgggctttggcatcagtccttgctggagtggatgaacagcccgaggcagctcatgactacctcgcctgggtgccggagaacacagaagctctgcaggagggtgctgtccagcttgcagcgaataccttccgaagctctcaagatgagggcgctctggacatcaagctcggttccatccattcgagtaaggggcagacccatactgcgacgctcgtgctcgaaacctacagtcacgaacacttcatcgacagcctgctaccttggcttgctgggcaaaaaagtcacgggggtgtaaggccccggaagagaatcgtccagcgcttacttgccatgtacgtggcgatgacccgaccgacgcacttgctgtgcttggccataagcaagcgcacgctcggcgatggagaagtgttcgaggccaattgcgtgatgcttcgcgagcagggctgggatatccagcatctgtag

SEQ ID NO: 360081 - DNA, 2163 bp, Pseudomonas aeruginosa
atgtatttgtcagcactcaaggttcagaatttccgtcagttcggcgccgactcgaatggccttttcattgagttcaacaagggcgttactgcgctggtaggtgagaacgacgcgggtaaatcatcggtcatcgatgccctgcgattcgtcctccagacacgtgatggagagtacgtacgcttgcaacccgaggacttccacttccccgtggagggggctcaggcgagccaaatcacgatcgtggccaagtttgcagatttgtctgtcgcggatcagggcgcgctgtcggagtacgtcacgttcaacggtactgctgcggtcgtttatgttcactggactgcgcgaagactgtcggacgacgtcctggcgcgtcgatgggttgatattgctgtacgcagtggtcataacggcggtggcccaagcatcgacacaaacgtccgccaactactagcggctgcatacctgcgtccccttcgcgatgccacacgggagatgtctccagggcgaggatcgcgcctctcacaagtgctcagaaatttccccagcatcaaggatggaagtggcttcgatgtcgaacagccgcttgcaagccctgagtcactgagccttgccgggttggctgggtatctacggcatttagtgaacaagcatcctggagtggctgcagcccaagactcggtcaacgacaactacctgtcccacctctcactagacggtgatgagctacatggacgtatcaacttcgttgaggggagctcagagtcggctcggctaagacagatcctagagcgcatggaactgagcctgctcgatcaagggtcacatgaggctcgtggggagtacggcctaggctccaacaatctgctgttcatggcctgcgaactactactgctcggcaaggagcctgacggactgccgttactgcttatcgaagagcccgaggcccatcttcatccacagcgacaactgcgtttgatggagtttttgactgctgcggcgacacccaaaccagtgccacccagagccatccaaccgatgtcggaagatgagcgagaggaagagccactgccatggagcgaaggctccgaagctccatcagcagactcgtctgatgcagatggatcgactgcaaatgaagtcagccaggaaagggaagcgcggcccgtccaagtcatcctcacaacccattctcccaacctcagctccaagattgccctggacaatttagtgctcatgcacggtcgcaaagcttactcgctcggcaaacaacacacgaagctggatgaaggcgattatcgattcctcgcccgcttcttggacgtgaccaaggcaaatttgtttttcgcacggggcctcctcgtcgtcgagggcgatgctgaagccatcctgttgccggcactggcaaagctgctcggacgagacctgacccgccatggcgtctcggtggtgaacgtcggtggcgtcggcctgggacgatatgcccggatcctacaacgcgcacacccagagcaaggcactctcagaattcctgtcgcctgcatctcagacatggacgtcatgccggactgcgcaccacagattctgggtttggtagaaaatgatgatgatcccaaatgggctggccggaggaagtggcgagcgatacgcgacttcggcgttgatgaggaaacccggcttcaacggttggccgagtggagaggctcgcgcaaagcgaacgacgaacagaacgtacaaacgttcgtggcgggacaatggacactggagtacgacctggcctttagcggcatggcacgtgagcttctggtcgccgcccggctggcagcgaaggacgatgccattcatgctgttcgggaaacgcacgatgaggtgatcaaacaagccatcatcgagtatgagggccttcaaaactcgggtatgcctgctgagcaaatatgctcgaccatctatgacctattccaccgcaagatagcctccaaggcgatcacggctcagtacctcgtagacattttggagcagcgctttcagagggtggtagtgagccctgagggcttggaagagcggcttccctgctaccttgttgaggcaatcacatacgtgacctcgcgtttggagataccccagctccaaaccttgcagcagcaagcgcagagacaaattccatga

SEQ ID NO: 360082 - DNA, 1341 bp, Pseudomonas aeruginosa
atgagcacaccatcctcgctcccagagcgcgtcagcgttaccaagaccctgcccaagacactcaagggcatcaagaaacgagccaagaaaatctgcctgcccggccaaaagcatgctgaggcgcttgatatcgttgcacgtcaactcggttatcgtgactactatcaggcacagcagaagttggcatcaggggaggtattgccggaaacggcattgcgccaaagccagcactcggtcttcctctccgcctattggcgggacacggataccagacctcgttcggcgggttgtgaaacgctggaaatctttctcccgcgtccgctgaacagcatcgtgtcgaagcaccaggcaacctacgccctcaaccttcaggggttccggcaagaggcgtcggatcattttgagatgatctccaatgcgaacagccaggctcgggcttgggagctgctggttcgtgcggcgctcacgctgcagttcatggaagtaagtggactgcgcccggccacttcccaaaagcaaaggcaagcgcttgagctgctcaccgactttccattgaaagaccacgtttctttgtggatcgatcctgcatcgggcacgtgggtcgcgttggatgaaccctatgggcgcgtgaccaatgagtcgaatgtcatgaggcgcgctgcttggatctcggataaggccctacacctcaccaagccagtctgggcaggcctgtactacccggataacgcggtaccacatctgatctccccgagtgaggctttggtgaccaagatcactgaaagcctcgaagcgctatcgccaattgcgacggtgccctccaatgatcacccgtggtctggtacgtccgaaccctataacgctcggttcaccagtcctgcgagaaaagcgagcggtgttgttcgacgggctcgacctggcactacctatggctacagcaaaggtgcagtcgagtatcaccgggaagccggatatccattgctctggcgtcccgagaagccactgagccagcttgatcacaagcgggttggggcagagctccagtgcctgatgatctcgcctatgcccttcaaggcctatgacaagcttcgcacgtggtgctcgaccttggaaaactggatgttccaggagtaccgggaggacgaccgtgaggcgggtttctacgatacctattacggcggggagccttcccggtacacctccgcacgtgatcaggtttccgcccttcagcgtgtcattcagatccttaatgatgggtatggtgaatgcaagcctcgccgagacctgttgaaggatcttgaaggcgccttggcgatgatcgaaagccaagctgctcaatag

SEQ ID NO: 360083 - DNA, 933 bp, Pseudomonas aeruginosa
gtgattcatgatttgttttcaaaacgtcaacgccggcagcgcggtgagatgccagatgttttgcagtgcgacaccctgccgatcgatttgaaaaagcaggtggggatgttgatcgaagaagctctaggaaattcggaaacccccaacaaccacctagctgtgcatgtctatgcgcagataatccaagcccttgctgaggagtgggcaaggcctgatttattgccgctcaggtttgaacgctactttgaaaagcctctggtagacattttcgtcgacgagccagatgttgaacggtcgcttgacgtgattgagctggtgttccgaagtgcgaatcgacaagcagaaaatgctgagtactatccgggcttcgatgggcgaggccatgtcgatgattgcattgaggagctgaacactcgcttcagggagcacggtgttggttatgcctatgtaaacgacgagatcatccgagtcgactcagaaatgatgcacactgaggtcgtcaaacccgtcgtccacttcctcaatgttccgggctttgagggggcccaggaggagttttttactgcctactcgcactatcggcaaggtctgtacaaggaagcgatcactgcggccaataaggctttcgaaagcaccatgaaggtcatttgtgagcaaaagggctgggagtacaagaagagggatacagctagcaagctgatcatgatttgcatcgagaaagggctgttccccggctactaccaaagccacctctcatccctgttcaaccttcttgaaggtggagtgcctgccattcgaaataatgaaggagggcatggccagggcgttgaggtgaagaccgtagagcctcacatcgtgtcctacacacttcacatggccgcctcggcaatcctgcttctagtcaactccgccaccagcatggattcacggtga

SEQ ID NO: 360084 - DNA, 240 bp, Pseudomonas aeruginosa
gtgagcgtctttgccctggtcgattgcaacagcttttactgctcatgtgagcggatcttccgtccggacttggcacagaaggcagtcgtggtcctttcgaacaacgacggctgcatcatcgcacgaagtcgggaggctaaagcgttgggcctaaagatgggcgacccatacttcaaagtgaagcggtttctcgaccagaggggagtgacagccttttcgagcaactatgcgctatattaa

SEQ ID NO: 360085 - DNA, 468 bp, Pseudomonas aeruginosa; identical to SEQ ID NO: 331427

SEQ ID NO: 360086 - DNA, 624 bp, Pseudomonas aeruginosa
atggctgaacaaacagtgcatgttcccgccgggtaccgcatggacgccaaggggcgcctggtacctgaagaaatgatcaagcccattgacctggagcgcgaccgccttgtgcaggagatcgttgccaaggggaaggctctgaacaaggcgttgctggatttcaaactggcaacattcggcgatatcgaagccttcatcaccctgtcggccgagcagtaccaagcgaaggtaggaggcaagaagggcaacgcctctctggtcagcttcgacggtcgctacaaggtcattcgggccatggccgacaacatcgccttcgacgagcgcctgcaggcggccaaggcgctgatcgacgagtgcctccacgaatggacggaaggtgctcgcgcggaggtcatcacgctgatcaacgatgcgttccgcgtggaccaagctgggaacatccgtaccggcagcgtgcttgccctgcgccgcctgcagatcgatgacgaacgttggcagcgtgcaatgcaggccatcggcgaggctgtccaggtcgtgagcaccaaggcgtacgtgcgtatccaggagcgggtcggggacaccgaccagtaccgctccattcctcttgatatcgcgggggtgtga

SEQ ID NO: 360087 - DNA, 201 bp, Pseudomonas aeruginosa
atggctgatgttttggagatcgactgctccgagtgcagcacgccgtaccccgaaatcaccgcgcgctctgcagctcatgacccgagcctgatcgacctggtgatcacctgcagcaactgcggacacatcctgaatgcgttcgtctccctggctgagatgagcgttgtaccgaatcccgaagaggaaaactcccatggctga

SEQ ID NO: 360088 - DNA, 375 bp, Pseudomonas aeruginosa; identical to SEQ ID NO: 331490

SEQ ID NO: 360089 - DNA, 282 bp, Pseudomonas aeruginosa; identical to SEQ ID NO: 331489

SEQ ID NO: 360090 - DNA, 987 bp, Pseudomonas aeruginosa; identical to SEQ ID NO: 329579

SEQ ID NO: 360091 - DNA, 699 bp, Pseudomonas aeruginosa
atgtcgaaccacgcccgcctgcgccgcctgctcgaacgtttcctcgacgagcagggctaccgcgtccgcgcggtggagaacaccgagcagatggatcgccttctatcccgcgaactgttccagctggttgtgctcgacctgatgcttcccggcgaggacggcctcactgcctgccgccgcctgcgcgaacagaacaaccaggtgccgatcatcatgctcaccgccaagggcgacgagggcagccgcatccagggcctggaactgggcgccgacgactacctggccaagccgttcaacccgcgcgaactgctggcgcggatcaaggccgtgctgcgccgccaggcgccgctggtgcccggtgcgcctgccggtgccgacgaggtggtgaccttcggcgactaccagctgttcctcgccacccgcgaactgaagaagggcgacgaggtacacatgctgaccaccggcgagttcgccgtgctcaaggccctggtgcagcacgcccgcgaaccgctgacccgggacaagctgatgaacctcgcccgtggccgcgagtgggatgccctggagcgttccatcgacgtgcagatctcgcgcctgcgccggctgatcgagccggatccgtccaagccgcgctatatccagacggtctggggcgtcggctacgtgttcgtgccggacggcaacgcgcgcaaggcctga

SEQ ID NO: 360092 - DNA, 834 bp, Pseudomonas aeruginosa
atggaaggtgaaggcatagatgtggtacagcggcagcggcgcgatgaggatctcgcagccctcgttgaggttggcgcccatcagcgccttgcactgcaacatgttggccaccaggttgcggtgggtcagcatggcgcccttggcgaccccggtggtgccgccggtgtattgcagcacggcgacgtcgtcggcctgcggcgcggcttcctggaacgacttgccggcgcccctggccagcgcgtcggtcagcttggtggcttgcggcaggctgtaggccggcaccatcttcttgatgtgcttgaccacgaagttgacgatgaagcgcttcagcggcggcaggatgtcgccgacttcggtgacgatcacctgcttgacgccggtcttcggcagtacgccctcgaccaggtgggccatgttggccaggcagaccaccgccttggcgccggagtcgttgaactggtgttccagttcgcgcgcggtgtacagcgggttggtgttgaccacgatgaggccggcgcgcatggcgccgaagaccacgatcgggtattgcaggacgttgggcaactggacggcgatgcggtcgccgggcttgagatcggtgtgctgctgcaggtaggcggcgaagtcgccggacagcttgtacagctcgccgtaggtcagggtcttgcccaggttggtgaacgcgggcttggtggcaaaacgttggcaggactccttcagtaccgacaggatgttcgggtactggtcgggattgatctcggcagcaatacccgctgggtacttgtccttccagaagttttcgatcatggaagcccactcctaagcaacagctaa

SEQ ID NO: 360093 - DNA, 1008 bp, Pseudomonas aeruginosa
atggaaaccgcgcatgggtttgcagcccctgctgtaagcgcgctggcccggggcattcgcgagtactcgctgttccaggcggtcctgctggtcatggatcgcctgcgcgaggaatatcccggcctgggagacgaggcgctctacgatcagttggaattccaggccaatcctagcctcggcttcccgggcagcgatgtcgatcgggtggagttcttcgaagagcgtggcatgctgcgggcgcggctgcgtttcaacctgatcggcttgttcggtgccagttcgccgttgccggcgttctacagcgagcaggccctgggcgacagcgaggagggcaatcctacgcggaacttcctcgatctcttccatcaccgcctgcatcggctgctgttgccgatctggcgcaagtaccgttaccgggtgagcttccagagcggtgcgagcgatgcgttctccgctcagttgttcgccctcgtcggattgggcggggaagagatccgcaaggccagggaactgaactggaaacgcctgctgccctacctgggcctgctcagcctgcgggcgcactcggcggccttgatcgagtcggtgctgcgctactacttcaagcatgccgaactggtcgccgagcagtgtatcgaacggcgcgtcgcgatcctcgaagagcagcgcaaccggctcggcctgttcaacagccagcttggcgaagacgcggtgctgggcgaacgggtccgcgaccgcagcggcaagttccgcattcatatccgccagctcgactggcagcgcttccacgagttcctgccgatcggtcccggctaccagccgctttgcgcgctggttcgcttcaccctgcgcgacccgctcgactacgacatccggctggtcttgcgccacgaggaaatccgtgagttccgcatcggcgcgcagaacgcctgccgccttggctggaccagctggctgggccgggagcgcgcggatggcgtggtgacgctgggcagcaagattcattaa

SEQ ID NO: 360094 - DNA, 1305 bp, Pseudomonas aeruginosa
atgaaccgcttcgaggttgtcgatgaactgctgggcggcgtgctggaccagcgggtggatcattttcacccgcaggcggatgaagaattcgctgaccttgttgatcggctcccgctcggccttttccagcgagtagtcgaccatccgctggaagctcatgttgtccgcgtcgccgggaatcggcgcgtccggcgaatggtggacggcaaacttcttcaccagcagatccgccaattgacggatgtcgaggatgcctttttccaccgagtcttcgatatcggccaggcaataggagatatcgtcggccgcttccatgatgtaggccacagggtggcgagtgcccgggcgcatgccgaggactcggcgcagttcgtcgacgaaggcttcctcggaaagatagaagcccggcttcttgttcaggtagtggttcgccgccgccttgtccggcttcggctcgtaggccggacgcacgtacttgagcaggccggcggtctgcgtgtaggtgaggttcaggcgcagcagcttcaccaccaggcggatggcctgggcgttgccttcgaaatgcttgaggtcggtgagcatgcgctgctgcaacaggccgtcgccctggcccggcggtacgcggcgctcgaacagggcgtcgagattgcgttcgaaccaatcgttgatggcgtactcgccgaaatgaccgaacggcggattgccgacgtcgtgcatcaggcaggccatttccaccaggctttccagcgcgccttccagcccgtccaggccgacctccgcggcacgcgggcccagttggcggaacagcgtgcggacgatgaaacgcccggtctgctgcacttccagggaatgggtcaggcggctgcgcaccgccgcgttgcgctccagcgggaagacctgggtcttctgctgcaagcgacgcacggcggcggaattgacgatgcgcccgcggtcgctttccaactggtagacgatgtcttgcagatcggtattcccggcatgtccgtaggtttccctgtcatgcggacgctggcgggatatccgctccttgaaatccacggcccctggcatctggcgctgttctccactcggtcggctgcgaaccccgagcctagcgcgtggcggcggtttaaccaaggtcgcgacaatccgtcccactaccgttcgcgatccgccctcttccccgggcggcggcaactggcagaataccccgctcggcaccagcgatccccgccgcagaacgggggcgccgccgatcatgcgtgcgcccagagaaacaggaacgttcagggaggttccgcatga

SEQ ID NO: 360095 - DNA, 2019 bp, Pseudomonas aeruginosa
atgcccctatcgcgactcagccttgccatcctttccgtcctcgccggtgccccggcattcgccgacgacagcggcgtcgacctcgaccagggctggaaccagacccagaagaccgcctggctggaagccggccagggctcgcggatgctgccgctggcctggctggtggcgctggagcagcgcgccagcgaagaaccgctgatgtccgatgcgctgatccgccagtacggctatgtcccgcacaccctcggcggttccagcgtgaaggtggtgcagggctacgcggtcgaccgcagcgacgacagcgacctgaccttcaccaagctgcgctggaaagccctgcagggctccagggaaccctgggtcggaccgacctgcagcatgtgccacacttcgcacatcagctaccagggcacccagctgaccgtctacggcgggcagaccatgggcgacctcgccggcttccagctggagatcctcggcgccctgcagagcacccgcgccgacaccgccaagttcgagcgcttcgcccgcaaggtgctcggcgccgatggcctggtcagcggctacaacgacgccaacaaggcacgcctgcaggcagccctggacgccaccatcgtgcgcctgcgcgacggctcgcacttcaacctgccgcacgatcccgagttcggcccgggccgcctggacgccatcggttcgatcttcaactcggtgggctacgaactgcatgccgacgagcagatctacggcgccgaggacgcccccgtgagctatccgttcctgtggaacgtaccgcagctggaccgcgtacagtggaccggcttcaacccgaaccacatcaacgtggtcgagatcgacaaccgcaagttcgacgtcggcgccctggcgcgcaacgccggcgaggcggtcggggtattcgccgacgtcaaggtgctcagcccgatccagtcggcgctgcacatcggctacccgtcgagcatcaacgtcgacaacctgatccgcatcgaagaccagctcggccaactgaagccgccggcctggccgaaccagctgttcggcgccccggagccgaccagggtcgccgagggtcgcgagctgtaccggcaacattgctccagctgccacacgccgctggaccgcaacgacctgcggaccccggtgaagaccgtgctcacccacctgcaggcgcgcggcgaggtcgcgccgatcggcaccgacccgtggaccgcctgcaacagcatcgcccaactgaagaccggctacgtgcgcggcaagccctacctgtccttcgtcggcaccggccagcgcggtttctacggcaagcaggcctatgcggtggacgtgctccaggaagtggtggtccaggccctggccgcgcgcggcctgagcgtcgccctgggtgccttccagaccgccgccctgggcatcttcgacgggcagttgccgccgctgatcagtccggtgccggacagccccgacgccgacagcgccgaagcgaccgccgcggacgcgccaggcgccctgctcctggccgaaaacgtcgcggccggcagcgacaaggcccggcgcctggagcagtgcctggcgatgaccagcgacctgatggcctacaaggcgcgcccgctgaacggtatctgggccagcccgccctacctgcacaacggctcggtggcggaccttctataccggcagcgtcgagttcgacccggtcaacgtcggctacatcaccgatgccggcggcgccaaccgcttcctcttcgacagcggcaagccgggcaacgccaatggcggccacgactacggcaacgcgcagttcaacgagcagcagcgccgcgccctggtcgagtacatgaagaccctctgaagcccctcgcgcggccggcgctcccggccgcgtccctcaaccggcggcgacccgccgcgcggtctcgacgaagcattcgaactgggtgtcgctggcacgaagccgcgaagtcggcgacaccgccagccccaccggcaggcggaagccttcgttga

SEQ ID NO: 360096 - DNA, 372 bp, Pseudomonas aeruginosa
atgaacagcgggtcctcggcgcccatttccttgggtgcgcaagtgctgccggcaaccttcatcaggtcgtcgtaccagacgtcgcggtgctggttccacttgatctccgcaccggtacgcttgcagacgatgatcttctgcacgctggaggtttccgggttggtcagggcgtcgtcgacattggccttcagcggagtgcgcttgccgccgcgcacgccttcgtcggcggtgatcaccaccttcgacttgcaatcgatgatgcgcccggccagggcctcgggggagaagccgccgaagaccaccgagtggatcgcgccgatgcgggtgcaggcgagcatggcgaccacggcctcggggatcatcggcatgtag

SEQ ID NO: 360097 - DNA, 189 bp, Pseudomonas aeruginosa
atggcgttttccacggtgaccccggcagcgatcgacacattgcccttcaacccgccgacatcggacagcgccttctcgttgaggttgatcttctggttctggctgaagccggagaagtccagggtgtcgttgccgccggcgtcccacaccgagaacaccagcttggaactggacgaggtggcgctgtag

SEQ ID NO: 360098 - DNA, 1047 bp, Pseudomonas aeruginosa
atggcgatggcgccgccgttgacgttgaccttgctttccgccacgcccatgtccttcatgaacttcatcaccaccgaagcgaacgcctcgttgacttcgaacaggtcgatgtcttccaccttcaggccggccttggccagggccttgcgggtcgccggcgcggggccggtaagcatgatggtggggtcggtggaggtcaccgcggtagcgacgatccgcgcccgcgccttcaggcccagttcgcggcccttggcctcggagccgatgagcatggcgctggcgccgtcgacgatccccgagctgttgcccggcgtatgcacgtgctcgatgcgctcgacctggctgtacttgcgcagcgcggtggcgtcgaagcccatctgccccatcatctcgaaactcggtttgagcgcggcgagcccttccagggtggagtcggcgcgaatgaactcatcgtggtcgagcaggacgatgccattctggtcggcgaccggcaccagcgacttgccgaacagcccttcggcgcgggccttggcggccttctgctgggagcgcagggcgaaggcatcgacatcggcgcgactgaagccttccagggtggcgatcaggtcggcgccgatcccttgcgggacgaagctggtgtgcaggttggtttccggatccagtgcccaggcgccgccgtcggagcccatcggcacgcgtgacatggactcgacgccgccgaccaggaccaggtcctcgaaaccggagcgtaccttcatcgcccccaggttcaccgcctccaggccggaggcgcagaaacggttgatctgcacgccggcaacctgttcgtcccagtcggccaccagcgccgcggtcttggcgatatcggcgccctggtcgcccaccggcgtcacgcagccgagcacgatatcgtcgacctgggcggtatccaggtcgttgcgccgctggaccgcgcgcaacagcccggccatcaggttcaccggcttgacgctgtgcagcgcgccatccttcttgcccttgccgcggggagtacgcacggcgtcgtaa

SEQ ID NO: 360099 - DNA, 1344 bp, Pseudomonas aeruginosa
atgtctgcaatcacgcgttatctcgccatgcttcgcctgttcggcatgctgctctgcgccgccgcgattccctccgttgccaccgcgacggtgccggtcaccgtcgcggtggcagcgtccgatgtcgaggaggaggccgtggaggcatcggcggtcggcgccgaggccgaggcagcgcgcgatgcgggctacgagtccgcggaggttccagcgctggcgcggcgggtgaccgaccttaccgcgaccctcgacgccgccgagcgtgcccgcctggaagcttcgctggccgcgctggaggcccggaagggtgcccaggtagcgatcctgatggtgcccagcacctatccggacagcattgaggcctatgcgacgcgggtcttcgaggcgtggaagctggggcgcaaggggatcgatgacggcgtcctggtgctggtggcgaaggacgaccggcgcatgcgcatcgaagtcggctatggcctggaaggaacgatcaccgacatcgatgccgggcggatcatccgcgaatacatgacccctgcgttccgtcagcaagactacgccggcggcctggaagcggcggcgcagcgcctggtacgactgatcgacggcgaggcgttgccgccgccgccgcgcgacccgctggagcccggcgcggtacggcagaccctggctatcgcattcctgctcggcgctctcggcggggtggcgctgctggtacgtccgcgcgcctggtactggaccctgggggcggtagtggcgctcgctgcggcgctggcactggggcggcactggccggcaggggcgatggtggcgctggcggagatggtggcggtcctgggcgtcggcttcggcgcgttgctcaagtattcgcgcggtgcccgctggttcttcgccattcttgtgctctatgcgctggggctgttctgggcctaccgccgttatggcctgccggtgctccattacggattggccgtgccgctttcgctgggactgaccctgctgatgctggccggtgcctggcaggggctgcgcagaggacggcgctgggcctacctgccgggcctgctcggcctgctgctgaccctggccctggagtgcctgctgttgctggtggacgacccgctgaacagcatcgaggcgctgatcatcctgcccgccgcttgcctgccgctgctcatcggttgcaatttcagcgccggcggctcggggggagggcgtcgacgcggcggcgattacgctagctcatcgggttcctcgtcgtcgagttcgtccagctcgtcttcggactcgttctccggcggcggaggctcgagtggcggcggtggcgcctccggtagttggtga

SEQ ID NO: 360100 - DNA, 135 bp, Pseudomonas aeruginosa
atggccatctgcttgccgggcatggcatccagggtgaagcgcgcgctgacttcggaaatccgcccggcgcccttggtcaccaccacgaagttgatgatcatgaggatcgcgaacaccaccaccccgaccacgtag

SEQ ID NO: 360101 - DNA, 201 bp, Pseudomonas aeruginosa
atgcccggcacggcgcccatggcgatcaggatcgccgcggaaatcgccagcgccttgggcgaggcgaacatctgccggttgacctgctggcccatgtcctcggaactggagacccgcgtcaccatgatcgccgccgcggtcgacagcagcagcgacggcagttgtgccaccaggccgtcaccgatggtcagcagggcgtag

SEQ ID NO: 360102 - DNA, 246 bp, Pseudomonas aeruginosa
atggatcatgaggatcgcctccatcctgcgccgcagcccggatgtgtcctgcgtgtgaccaagttcttgcctacacgcataaaacagatcgctggcaccgaacaacagatctcgcagctccgacagggtgaattggttatacgaaaaaggcacatattgtcggctgcgaacgatatgagcctcaatggcctgctggctcagaagatctgcgacatacggccgttcgcagccatcatcatcgagtag

SEQ ID NO: 360103 - DNA, 855 bp, Pseudomonas aeruginosa
atgcaacgggaattcgtcagcggcgccgggctaggcctgcgtcgcgcgctgctggagccgctcggcgccggcgacgagggccgggtcgacttcctcgaagtcgccccggagaactggatcggcatcggcggccgtctcggccgccagttccgcgagctgaccgagcgcctgccgttcctctgccatggtctgtctctcaacctcggtggctacgccccgctggacatgtcgttgctgcgcgcgatcaagggtttcatcgagcagcatggcatccgtgcctacagcgagcacttgtcggcctgcgccgacgacggccagctctacgacctgatgccgctgccgttcagcgacgaatcggtgcgccgggtcgccgaacgggtccgggtggtacaggacgtcctcgagcggccgttgatcgtcgagaacgtctcggcgtatgcgcgcttgccgggcgagctggaagaggtcgatttcgtccgcgcggtactggaggaagccgactgccaattgctgctggacgtcaacaacgtctacgtcaacgcctgcaacttcggtttcgacgcccacgcctacatcgccgcgatgcccagccggaggatcgcctacctgcacatggccgggcacgacgaacagggcgccagcctgaagatcgacacccatggcgcgccggtctgcgatccggtctgggaactgctggcacatgcctatgcctgccatggcgaacgcccgacgctgctggagcgcgatttcaacctcccgccactgagcgagctgtatgccgaaaccgatcgcatccgcgagctgcagcggcgcagcggtgaagcgcaactgcgcagcctggggtacggcacatga

SEQ ID NO: 360104 - DNA, 852 bp, Pseudomonas aeruginosa
gtgctgatccccgctcccgactacccgctgtggaccgccgccgtcagcctcgccggcggcaagccggtgcactacctgtgcgacgagcaggccaactggtggccggacctggaagacatcaaggcgaagatcacgccgaacaccagggcgatggtgatcatcaacccgaacaaccccaccggcgcggtgtattccagggaagtgctggaaggcatggtcgaactggcccgccagcacaacctggtgctgttctccgacgagatctacgacaagatcctctacgacggcgccgtccacgtctccaccgcctcgctggcgccggacgtgctctgcctgaccttcaacggcctgtccaaatcctaccgggtggccggcttccgctccggctgggtggcgatctccgggcccaagcagcgggcgcagagctatatcgaaggtctcgacatcctcgccaacatgcgcctgtgcgccaacgtcccggcgcagcacgcgatccagaccgccctgggcggctaccagagcatcaacgatctggtcctgccgccggggcgcctgctggagcagcgcaaccgcgcctgggaactgctcaacgacatccccggcgtcagctgcgtgaagccgatgggcgcgctgtacgccttcccgcggatcgatccgaaggtctgcccgatccacaacgacgaaaagttcgtcctcgacctgctgctctcggaaaaactgctgatcgtccagggcaccgccttcaactggccgtggcccgaccacttccgggtggtcaccctgccccgcgtcgacgacctggagcaggcgatcctgcgcatcggcagcttcctcaagggctaccagcagtaa

SEQ ID NO: 360105 - DNA, 1518 bp, Pseudomonas aeruginosa
gtggacagcaccctcagccgcttgcagttgccggccgacaagaccctcgccgaactctccggcggctggcgtcggcgcgtgctgctggcccaggcgctggtcgccgagccggacctgctgctgctcgacgaaccgaccaaccacctggacatcggcgccatcgcctggctcgaggaagcgctgctgggcttcaacggcgcggtgctgttcattacccacgaccgcgccttcctgcaatccctggcgacccgcatcctcgagctggatcgtggccacctgatcgactggaacggcgattacgccagtttcctggtgcacaaggaacagcaactggccgccgaagaagctgccaacgcattgttcgacaagcgcctggcccaggaagaagtgtggatccgccagggcatcaaggcccgccgcacgcgcaacgaagggcgggttcgggcactgaaggaaatgcgtcgcgaacgcgccgagcgccgcgagcgccagggcaaggccagcttccagctggaaagcgcggacaagtccggcaagcaggtgatcgtggtggagcacgtcagcttcgcccatcccggcggccagccgctggtacacgacttctccatggtcctgcagcgcggcgaccgtatcggcctgctcggcgccaacggtaccggcaagaccaccttgctcaagctgctgcttggcgacctgcagccgacctcgggcaagatcgaggtgggcaccaagctggaagtggcctacttcgaccagttgcgccatcagctcgaacccgagcagacggtgatcgacaatatctccgaaggccgcgagttcatcaccatcgacggccagaaccggcatgtgctcagctatctcggcgacttcctgttcagtccgcagcgcgcccgcaccccggtgaaggcgttgtccggcggcgagcgcgcgcgcctgttgctggccaagctgttcagcaagccggccaacctgctggtgctcgacgaaccgaccaacgacctcgacgtggaaaccctggaactgctggaggaagtcctgctcggcttccagggcaccgtgctgatggtcagccacgatcgggccttcctcgacaacgtggtgaccagcaccctggtcttcgagggcgagggcaaggttcgcgaattcgtcggtggctaccaggactggctgcgccaagggggcacgccgcgcctgctcggcgtgagcgagtcgaagagcggcaaggccgagctgaataccgcgctggcgcccgccgccgaacccgcgccggctgctgcggcgccgagcgaggcgccggcgaagaaaaagctcagctacaagttgcagcgcgagctggaggctttgcccgggcagatcgacgcggtcgaggcggagctggcgggtgtccaggaaaccatcgcgcagcaggatttctatctgcgcccgcaggacgagcagcgcgaaaccctggcgcggctggacgcgttgcagcaggaactcgatgccttgctcgagcgctgggccgaactggaagactga

SEQ ID NO: 360106 - DNA, 447 bp, Pseudomonas aeruginosa
atgctgcgggtgcgcgagaccgccacggccgaacttctgaccaaccagctccccaaagtccagatctacaccagcacgccagcgagcggcgccaacgacgcgatcaacaacaagaaggcagccttcacctccagctcacacgaccaggtgcagatgaccagcgtgccgatgctcgagccggcccacatcgttggtctgcccaaaggacaagcgttcgcgctactcgagggcggcaatctctggaagatccgaatgccgctgccggcggtcgatcccgacgaggtgatgccgaaaagcctgcaggagctggctgccggtatgcgcaagggccaggccgcaaacagcgagtggtgggaggcaccgggatactccgccctgcaggatggtctgccccaggacctggtcgacgatttccgtcacctcggcgccggtgaggatgccgcctga

SEQ ID NO: 360107 - DNA, 1359 bp, Pseudomonas aeruginosa
atgcgctcgaccgacctggccgacgccaccagcgcccccctcgtcggcacccactcggcggacgtggcgatagtcggcggcggtttcgtcgggctctggaccgccatcaccctcaaacaactggagccggacgcacgggtcctgctgctggagcaggacgtctgcggcggcggcgcttccggcaggaacggtggtttcgtgatgtcctggtggccgaagatcggtaccttgctgggcttctgcagcgaggcgcaggcgcgcttccttggcgaaagcgcggagcgggcaatccaggaactcggggagttctgcgcgcggcatgacatcgatgcgcacttccagcagaagggctggctgtggaccgccaccacggcgcaccacctcgacgcctggaacgataccctcgccgcctgcgaacggctcggcgtcagtcccttcgaacgcctcgacgccagcgaagtggcacgccggaccggttcgccggtgcatctcgccggggtcttcgagcgcagcaatgccaccgtgcaaccagccttgctggtgcaaggcatgcgccgcgtggcgctggccctcggcgtggaaatccacgagcgttgtggcgtcagccagatcgttcccggccagccggcacagctgctgagcgccggggcccgggtccaggccaaggcggtggttctcgcgaccaacgcctggtcggccgccctgcccaggctctccaggctgatcgtgccggtgaacagttccatcgcggttaccgaggcgataccgcaacggctggagcgaatcggctggaccggcggggaagccatcaccgattcccaactgatggtggactactaccgcaccacccgcgacgggcgcatcgccttcggcaagggcaccggcgccatcagctacggctcgcgcatcggccgggtattcgacgtcgaccgggagagcctggccctgaccgaggccgacttccgccgcacctatccctcgctaggcgacatcccgctggtcgacggctggtccggccccatcgaccgtacctacgacagcctgccggtcttcggccgcctgcacgagaacatccactacggcatcggctggagcggcaacggcgtgggaccgagccgcctgggcgggcggatcctcgccagcctcgccctcggccgcgacgacccgtggagccgttgtccgctggtagaacgccgctgccggagcttcccccccgagccgctgcgctacctgggtggctccctggtgcgcaacgccgtcctgcgcaaggaacgcgcggaactcgccggtaccgcgccctcggccaccgaccgctttctcgcgcgcttcgcccccgccggccttgaagacaaatcctga

SEQ ID NO: 360108 - DNA, 348 bp, Pseudomonas aeruginosa
atgaacccttcgctcatccgtctcgacgacgaaagtcctttcacctcgcccacgcccgtcggccagcccctgggcgaaccggtagccctgacccgtaccgcggcccaccgcccgctcgccgacggcaacggcgtgaccggcatctgggaatgcaccccggggcgcttccgccgacaggtcgagcaggccgagtacagctacatcgtcagcggtgaaggtcgcttcacccccgacgaaggccaggccgtggagtttcgcgccggcgacgcgctctatttcgccgctgccacccagggcacctgggacatccgccagaccgtgcgcaagacctacctgatcttcgactga

SEQ ID NO: 360109 - DNA, 1233 bp, Pseudomonas aeruginosa
atgggtatgcgagaagcgaacgacaacgcatcgggcctcaaggcccatcccctgggctcgctcgagacgatcgcgatcatcatcggcaccaacatcggcgccggcgtgctgagcatggcctacgccgcccgcaaggtcggctacgtgccgttgctggtatgcctggccctgacctgcctcttctgcatcgtcaccatgctctacgtgaccgaagcctgcctgagaacccgcggcaacaaccagctcagcggcctctcccggcgttacctgggcccgctcggcggctggctgatcttcatcgcggtggcggccaacagctacggggccctggtcgcctacatgaccggcagcggcaacatcatgctcgagttcttcggccagtacggcctcacgcgccaggtcggcagcctgatcttcttcgtcccctcggcgctggtgctctacctgggcctgaaggcgctcggcgtgggcgagaagctgatcagcgccggcatggtggccatcgtctgcatcctcatcggcgctaccctgatgcacgacgacgcccgtctcgcccacctttggcagagccagtggcaatacgtggttccagtgttcaacctggcggtcttcgtgttcggcgcgcagttcctggttccggagctggtgcgcggcaacctggcaacccccgggcgcgtgccgcgcctgatcgtggtcggcatgctgctgaccttcctgctggtggcggccattcctgcctcggtcatcgccctggtcggccccgacaacctcagcgaggtggcgaccttgagctggggacgctccctcggccaatgggcctactacgtggcgaacaccttcgccttgctggcgatgctgacctcctactggggactcggcgggtgcctgttcaccaatatcttcgaccacttccgcctgggcagcgaaaccaaccggcgcaaacgcctggcggtgctcgccgcggtctcggtcccgccgttcctgctggcctatgcggggctcggcggcttcgtgaacgcgctgtacttcgccggtaccttcggcggcgtactgatgggcatcatccccatcctcctgctcaacgcggcgcggcgccacggcgaccaactgccggcattcagctgcggctggtatgcccatccgctgatacaggggctgatcgtcctggtgttcgcctccagcggggtctacgcgatcgcctcggcactggggatgctgcccgccagttggtga

SEQ ID NO: 360110 - DNA, 1548 bp, Pseudomonas aeruginosa
atgccgcagagcatccgccacctgatcgccctccccgaactccgttcgcgcctgctgagcggagccggcggcctcgaccgcccggttcgctgggcgcatgtctgcgaactcgacgaccccaccgaatggctcggcgagggtgacctgctgatgaccaccgggctgggcataccgagcgacgccgagcggcaacggcgttacgtccgaagactggccgaggccggcctggcaggcatgatgatcggcgagaacatggaagccccgagcgacctcgatgccctgcgcgagacggccgaggccctgggctttccgttgattctcacccactacggcgtccctttcgccgccgtgacccgggccatcgtcgatgcgggacagaaagacgaatacgagcgccgcaacgccctggcccggatatacgaaagcgcccggttgagcatgcagggactgggcctgccggcgctgctgcaacgcctcggcaaggacgtgcgaagcagcctctacctcatcgttcccgacaccctggcggcctggcagccaggcctgccagggctgcccgcggagttggccgacgcgctgcgcaaccgccgtcgcgagcaggcggagccgcagccaatggtccttcgccatccgctcgcggaaggcgaagcgctcagcatcggcattccttccgaccggaactgcctgctgatagccctgggcgagcggctgccggactacagtctcctgcaccacctgacggcagtgctcggcatagagatcgaacggctgcgcgtcgaaagcgaacgccacctgcgcctgggttcggaattgctcgacgacctgctgcaacgacggctataccgggaacaagccgaggagcggctggaggaactgctgcccgggctcgatctcgacgatgcagtcgtttccgtgacaagttccgaggggctcgcgaccgaccctatcggtcttttccggggccacgactcacgcctgctggttcgcgcgcaaggccaggaaatcattctgctgcaccaggccggcctcgcctcgacactgcaggaagccctggacagctcgctgggcgtgagcgccccgctccgtcgtgccgaacgttgcgccgaggccttgcgcgaagcgcgtctggccctggcccacagccattcccggcgaccgttgtgtcgctacgcggaactggacgacgaggcgccctggctacccagaagcctcgccgaggccgagcgggcgttccgtctggtcctcggcaccctccacgactatgacgcggccaatggctccgcactgctacacacgctgcaggtctttctcgaggaaaacaggtcctggttgaacgccgcgcagcggctacacatacacaagcagagcctggtctaccggatacgccgcatcgaggaaatcagcggtcgctcgctggacagcaccgccgatgtggcgaccctctggttcgccttgcaggcaacccggctgtcgccggaagcgaggggcaggacggcgaagggcagcctcctggagcagtccgcgcaccatggcggcgacatggactga

SEQ ID NO: 360111 - DNA, 192 bp, Pseudomonas aeruginosa
gtggtcgaccactacctggacagcgaatggaaggacaccccggacaaccgcgacagcaatatcggcagcatgcgccgacaactggtctgccacttcaacgtcgcccgcaacaagcccgagtggaacctggaaccctcgcggccgtacacctccaacgaggactccatcgccaagggctgcaataacacctga

SEQ ID NO: 360112 - DNA, 681 bp, Pseudomonas aeruginosa
atggctttcgatgccgcccgctatgtccaccgctactacgccagcctggcgcccgtcccgggcaacgaatacccgcgcctgagggcctgggagtacctctgggagtatgtctgggaccccagtcgcagctgggacgacctgaccgcccccgaacagctcgacaccaccgccctgcacctgggtttctacctggccaactggggcatgttccgtggctcctcgggactgctgcagaacagcaacctggacctgatgaaagcgctggcccggcagctcttcagcggtgccggagcggaactgttcgagctgtccctggtggatttcgccggcaacggcgcgcgcctggcgcacaaccgcaagctgctggaaacggtgctcgggtcgatggatgccctcagcagccgggtgagctggaccgacaccctgaagagcaagatcctgctcggcgtctggggcgagtttcccgccctcgaccgccactacctggccgcctgtcgcgcgctgtatccacgccggggcctgacgagcgtcaacggcgggaccctcaccgcgctgcaccgcctgatcggcgaagaaaggctgtcgttcccgcgcctggagaccgcccgcaaggggctcctctaccccaccgggcgcctggccgacatggctttcttccagtacggcctggaaaacgcctga

SEQ ID NO: 360113 - DNA, 507 bp, Pseudomonas aeruginosa; identical to SEQ ID NO: 321227

SEQ ID NO: 360114 - DNA, 951 bp, Pseudomonas aeruginosa
atgaacgccgcggacgaaggccggattccctcgccgatcctcgacgaggccgccgagtggctggtgcgcctgcaggacagcggctgcaccgacgacacgcgccaggcctgcgcccagtggcggcagcgcagcccgcagcacgcccatgcctgggagcgcgccgagcgcctgctgcaatgcctcggccgactgccgccggcgctggccctgccgaccctcggccgcgagcgcgggctggaccggcggcgcgcgatcaagcacctcgccctggtcctcggcggcgcctcgctggtgctcgccacccggcaggccgaaccgttgcgcgactggctggccgaccagcgcaccggcgtcggcgaacagcgccgcctgaccctgcccgacggcagcctgctgaccctgaacaccgatagcgccgtggacctggccttcgacgccagccagcggctggtacgcctgctgcgcggcgagatcttcgtcgatagccgcgccgacccgcgtccgttccgcgtcgccaccgccgaagcgcggctgcatgccggtgccgcccgcttcaacgtacgccaggagatggccgcgacccgggtcgcggtactcgccgggcgggtagaactgagcccgctccacggacgcgggcgctggctggaaagcggcgagtcggtgcgcctgggcgccgacggcgaagcgcgccggctggccttcgacggcctgccggacgcctggacccgcggcatgctgatggccgaccggatgccgctggccgaggtgctcgccgaactcgcccgctaccgtcgcggcttactgcgctgcgacccgcaactggccaggctggcggtgtcgggcgcctatccgctgctggacctgcggcgcacgctgggcatgctgcaggccacctatccgctgaaggtgcgcggggtgaccgactactggatcagcctggtgccggcatga

SEQ ID NO: 360115 - DNA, 2415 bp, Pseudomonas aeruginosa
atgcccgtacgcacgcttcgcccccgttcgctgtccctggccatccacgccgccgccatgaccctcgccctcgccggcgcggcccccgccctgcttgccgccgaggcgcccgccgccagctcggcgcgcagctatgacatcgcccccggcccgctcggccgtaccctgtcggccttcgccagcgacaacggggtatccctggcgttcgacccggcgctcaccgagggtcgccgcagcgccgccctgcgcggccgctacgcgccggtcgaggcgctgcaccgcctgctgctgggcagcggcctggagttgcagcagcgcagcgatggcagctacaccctggtaccggcagccaccgatggcgcgctggaactgcaatcctcgctgatcaccgcccaggccgccggtgccgagaccctgcccgccgagtacgccggcggccaggtggcccgtggcgcgcgcctgggcatgctgggcaacgccgacgtgatggatgcgccattcagcatcaccagctacaccgccaggaccatcgagcagcagcaggcgcgcagcgtcgccgacctgctacaggccaacgatccgtcggtgcgggtggtcggcgggcgcggcgacctggtggacagctacacgattcgcggcttcagcgtgcagaacgccgacgtcgccttcaacggcctctatggcctgctgccgttctggcgggtaccgatcgaattcgccgagcgcgtggaagtgctcaagggaccgaacgccctgctcggcgggatttcccccggcggcagcgtcggcggcaccatcaacctggtgcccaagcgcgccgacgaccagccgctgacccgcgtcagcgtcgactggacccagcgcggccagctcggcactcacctcgacatcggccggcgcttcggcgagaacaacgccttcggcgtgcgcttcaacggcgtctaccgcaacggcgataccgccgtcgaccatcagagccgcgagtttcccatgctctccctgggcctggacttccgtggcgagcgcctgcgcctgtccagcgacctgctgtaccagaaggaaagcctggaaggcgtggtgcgcccgctgctgaccggcccgggaaccacccacatcccccacgccccggactcgaagacacgcttcggcctgcgcgattcctacctggaccaggaggattactccatggtcaaccgcggcgagtacgacctcgccgacaacctgacggcgttcgccagcatcggcggccgccagagcaactacgaaaccatcgccgccaacagcatcctcgtcggcaaccagggcgatatcgtcaacagcctggcacgccagcgcggcgaccgccgcacctattccgccgaggtcggcctgcgcggcaacttcgacaccggcccgctccgccacgactggacgctcagcgccaaccgcctgcacgaacggctgggcatggtctatgccttcaccgggatgcagccgggcaacctctaccagacctcgccgcatacgccgctgccggacttctccagcctcgacgggagcattccgaagaccaatgaaaccgacctcggcggcgtggcgctggccgacaggctgtcgttcctcgaggatcgcgtgcaggtcaccctgggcgtgcgccgccagcagatcgagtcgcgcaactacgaccagaccagcggcgcgcgcaccagccacgacaagcggcacgtgtggacgccgatggccagcgtgctggtcaagccgctgcaggacctgtcgctgtacgccaactacatccagggcctcagccagggcgaggcggcgccgatgaccgcggccaacgccggccaggtgctggcaccgtacaaggccgagcaatacgagatcggcgccaagtacgacctgggcggcttcaccaccaccctggcgctgttcgagatcaggaaaccgaacgcctataccgacgccagcaacgtcttccgcgccgacggcgagcaacgcaaccgcggcgtggagctgagcctctatggcgaaccgctggacggcgtgcgggtgatggccggcgccacctacatcaagcccgagcagaacaagaccggcgaccctgccagcgaaggcaaggacgcgcccggcgtggcccgccgccaggccaacctgggggtcagctgggacaccccgttcgtcgacggactgaccctcgacagccgctggatctacaccggctcggcctatgtggacagcgccaacgtcctcgccgtgccgcactggaaccgcgtcgacctcggcgccgcctacgccttccaggtcgccggcaagccgctggtggcgcgcgccaacctggagaacgcactgggcaaggactactggaccgcagccaacggctacctgtcgatcagctcgccgcgcaccctttccctttccctcacggcggacttctga

SEQ ID NO: 360116 - DNA, 189 bp, Pseudomonas aeruginosa; identical to SEQ ID NO: 323615

SEQ ID NO: 360117 - DNA, 537 bp, Pseudomonas aeruginosa
atgcatatcccgcccgagctgatcatccaccagacccgccactggacgctgaaccagcggatcgactcggccctgcccggctactgcatgcttggctcgcggcaaccggcgacggccttccaccaattgccggaacaagccctcgccgaattcgggccgctgctggccagggtcgagcgcgaaatggacgcgctgctgcggccgcgacgcatctatgtcggccgctacggccacatgcccggcctgccggtgcatttccacctgattccactgtacgactgggtcgaggaactgttctgggaggacacgcgctaccggacgctccagcagttcggcgtgccgaccgccgaaccccttaccgatggcgccgagctgaccctgttcgtctggcgcgaattctgcgaacgcgccgatccaccggccgtgcgcggcatggatcggcaacaggcgatcgccggattgcgccgggcattcggctacggcgtccaaccccgaacatcgcctgggccggactccgagtccgcgcaggacgcatga

SEQ ID NO: 360118 - DNA, 306 bp, Pseudomonas aeruginosa
atgacgcgaaaggcgcccacaggcgcctttcgctataccagcttagcagttccgccggcggacggcccaggccatcaatcggcgaatgaacgccgatcagtggtggtgaccgccttcgccatggatgtggccgtgggcgatttcctcggcgttagcctcgcgcacgtcgactaccttgaccttgaagttcaggcgctggccggccagcgcctgaacttcaaggtcaaggtagtcgacgtgcgcgaggctaacgccgaggaaatcgcccacggccacatccatggcgaaggcggtcaccaccactga

SEQ ID NO: 360119 - DNA, 483 bp, Pseudomonas aeruginosa
atgagtgcctttcacgatctcaccctgcaggggttggatggacaggacctgccgctttccccgttcaagggcaaggtgctgctggtggtcaatgtcgcctccaaatgcggcctgacaccccagtacgccggcctggagaatctctaccagacctaccgcgagcgcggtttcgcggtgctcggcgtgccctgcaaccagttcgccgggcaggagccgggcagcgaggcggatatccagtccttctgcagcctgaactatggcgtcagcttcccgatgagcgccaaggtcgaggtcaacggcagcgcgcggcatccgctctatcgcctgctggcgggcgagggcgcggagtttcccggcgacatcacctggaacttcgagaaattcctgctcggtcccgacggtcgcgtgctggcgcgtttcagcccgcgcacggcgccggacgacccggccctggtgcaagccatcgagaaggccctgggttga

SEQ ID NO: 360120 - DNA, 591 bp, Pseudomonas aeruginosa
atgactagcaaccgactcgacaagcgcgaactgatcctggccaagggctccgaggtcatgacccgacgtggctaccacggcaccggggtgctggagatcgtccaggccgcgcgcatccccaagggctctttctatcactacttcgatagcaaggaagctttcgcccagcaggccctggagcacgtctacgcgccgcgcctggcgcgctacgcccaggccctcggcgatagccgcttcagcccgcgcgagcgggtgctgcgctactacggcgagctgctggagcacttcgcccgccaggaaaagcccgaataccactgcttcatcggcagcctgagcttcgagatggccgagctgtcgccgccgatcgcggccaaggtcgagtcgatcctgcaggcttccgcgcgaatcctccaggactgtctggagcaggcgcgcgaggccggcgaactggccgccgacgaggactgcgcgagcctggccggcttcatcggcttcgcctggcagggcgccctggcgcgcttcaaggtcggcgccggcctcgctccgctgaatgctttcatgtcgcgcctggagctgctgctccgcgcctga

SEQ ID NO: 360121 - DNA, 1113 bp, Pseudomonas aeruginosa
atgagtgcccccgtagaagccctgttccaaccgttccgcctcggcgccctggaactgcccacccgtgtggtgatggcaccgatgacccgcaacttttcccccggcggcgtacccaacgccaaggtcgtcgagtactaccgccggcgcgccgccgccggcgtcggcctgatcgtcagcgaaggcacaacggtcggccacaaggccgccaacggctatccgaacgtgccgcgcttctatggcgaggacgccctggccggctggaagcaggtggtcgacgcggtgcatgccgagggcgggcgcatcgttccgcagctctggcacgtcggcagcgttcggcgcctgggcgtggagccggacgccagcgtgcccggctacggcccgatggagaaggccaaggacggcaaggtgctggtccacggcatgagtaaggccgacatccaggacgtcatcgccgccttcgcccaggccgcccgcgacgcccaggcgatcggcatggacggggtggagatccacggcgcccacggctacctgatcgaccagttcttctgggaaggcagcaaccagcgggacgacgagtacggcggcagcctggccaatcgctcgcgcttcgccgtcgagctggtgcgggcggtgcgcgcggcggtcggcgcggatttcccgatcatcttccgcttctcccaatggaagcagcaggactattccgcgcgcctggtggaaaccccggagggcctgcgcgagttcctcgcgccgctggtggaggccggcgtcgatatcttccactgctcgacccgccgcttctggattcccgagttcgaaggctcggaactcaacctggccggctggacccgcgagctgaccggcaagccgaccattaccgtgggtaacgtcggcctggacggcagcgagttcctgcaattcttcggcaaaaccgacgaggtggcgcagccggcgagcatcgacggcctggtggagcgcctggacaagggcgagttcgacctggtcgcggtgggccgcgcgctgctggtggatccggagtgggcggtgaaggtccgcgaggggcgtatcggcgacatcaagccgttcagccgcgaggccctggccagcctggtctga

SEQ ID NO: 360122 - DNA, 1122 bp, Pseudomonas aeruginosa
atgcgtatcggcctggtggtcgacgcgacctgcgacctgccgcccgaattcctcgccgcccacggcatccgcgtgatgccgatcgggatccgcctgggcgagcagcggctcatcgatcgacgcgaccccgacaccaccctgagcttctaccgcgaccacctggccaaggtcggtagcaaggacggcagccagccgctctccgccgccgagttgcaacaatggttcctcgacgaactggtgaccgacttcgactacgtggtctgcctcaccgtcgacagcctgcgcagtccgatcttcgagcacgccacccaggcctccttcggcctgctccagcactaccacgagcgccgccacgcggccggcatcgccggtcccttcaccctgcgcgtactcgacagccactcggtgttcgccggcatcgcctgcctggcggccgagggcacgcgcctgctggcgcagggcagccaccccaacgcgctgcgtacgcgcctcgaacagctcagccagcagacctgcacctacctggtcgccgatgacctgggccacttgcgccggcgcggcttccagaagggtgatcgcagcggtttcgtcgaccgggtcaagggcgcggcgctggggttgggctcgctgctcgacgtcaagccggtgttcagcctggccgatggcgaggacaaaccggtggcgctctcgccgagcttcgagaagtcggcggagaagctgttcggctatgccctggcgcgggtacaggcgggtgagctgctggcaccgcaactgggtctcagctatgccggcgatccgaccgcgctgcgcgacctgccgggcttcgccgcgttggagaacgcctgccgcgagcgcgacatccacttgcacctaggcatgctcagccctaccggcggcatcaatctgggcgccggggccatgagcctgggcttcaccgaaagcctttgcctgagagctactcgcggctgcgtggcaaggccccgccatcctctgccggcggccgctcgggcttcgaccgagcgggctggaccagcggactggcgcaggcgtcttccaggtagttctggaagtgctcgacgatactgtcccaaccttgccggctggcgtgttggcgggcgttga

SEQ ID NO: 360123 - DNA, 1221 bp, Pseudomonas aeruginosa
atgagcagacctctaagcatcgccctgatcagcgaaacctacccaccggaagtcaacggcgtcgccaataccctggggcgcctgcatgccggtctccagcagcttggccatcgggtccaggtggtgcgcccgcgccagcccggcgacgacggccggcgcagcgacgccgagctggtgctgacccgcggctggccgttgcccggctaccccggcctgcaatggggcatgtcgagcctgcacaagctgctgcgctgctggaagcgccagcgcccggacgtgctctacatcgccaccgaaggcccgctcggcttttctgccctgcgcgccgcgcggcgcctgggcatcccggcggtcagcggcttccacaccaacttccagcagtacagcgagcactacggcttcggtccgctgacccggctggtcaccggctacctgcgctggttccacaaccgcacgcagatgaccctggtgcccagcggcagccagcgcatggaattgcagcggcgcggtttcgaacgtctcaacctgctctcccgcggggtcgacagccaactcttccatccctcccggcgcgatcccgaactacgccggcgctggggcctgggcgaacaggacatcgccgtgctgcacgtcggccggctggcggcagagaagaacctcggcctgctcggcggcaccttccgcgcgctctgcgccgcccatccgcagctgaagctgcgcctggtactggtgggcgacgggccggagcgcaggcacctcgaacgggacctgcccgaagcgctgttctgcggcgtccagcgcggcgaaaccctggccgcccactacgcctcgggcgacctgttcctcttcccaagcctgtcggagaccttcggcaacgtggtcctcgaagcccaggccgccggcctcgcggtggtcgccttcgaccaggccgccgccggccagcacatccgccatgggcacaacggcgtgctcgccgcgccgggcgacaagagcggcttcgtcgaagtcgccagttggctgctggacgaccaggaacgcctgcgccgggtccgtctcaacgcccgccaacacgccagccggcaaggttgggacagtatcgtcgagcacttccagaactacctggaagacgcctgcgccagtccgctggtccagcccgctcggtcgaagcccgagcggccgccggcagaggatggcggggccttgccacgcagccgcgagtag

SEQ ID NO: 360124 - DNA, 624 bp, Pseudomonas aeruginosa
atgagacctaccctgacctggaccttgctggccctgctgctctgcggcacggccatcggcgccgtcctgttgctttacccatcggagccggcgcccgtcgcgcccttcgcgtctcccccgcaggccacaccggcggcaaaaccttccattccttcccgagcccccgagatgaatacagccaccgctcccgacaacctggaacagcaactcggcgagttcggccgcaacgccgggcagatgtccgagatcgaacgcaagcaggccgccgaaggcctgatcgaacagctcaagcgcgaggtggcggtcggcgccgatccgcgccagaccttcgaggagatccagcgtctgacgccctatgtggaggccgatgtcaggcgccgcgaggcgctcgacttcgagatctggatggcgctcaaggacaacgcctccgtccagcagcaagcggcgacgcctggcgaggaagagcaactgcgcgaatacgcgcaagagtcggacaaggtgatcgccgaggtgctcgccagcgtcgacgacgaggagcagcgtcacgccgccatcgacgaacgcctcaaggccctgcgcaagcagatcttcggcgaggagaacccacgcctgctgcaacgctga

SEQ ID NO: 360125 - DNA, 2193 bp, Pseudomonas aeruginosa
atgaccgaaaactggaaattccgccgtcgaacctttctcaagcacggcgcccaggccgctaccctggccggcctttccgggctgttcccggagacgctccggcgcgccctggccatcgagccggacatccgcaccggaaccatccaggacgtccagcacgtggtcatcctgatgcaggagaaccgcagcttcgatcactacttcggccacctcaacggcgtccgcggcttcaacgatcctcgcgcgctcaagcgccaggacggcaagccggtctggtaccagaactacaagtacgagttctccccctatcactgggataccaaagtcaccagcgcccagtgggtgagttcgcagaaccatgaatggtcggccttccacgcgatctggaaccagggccgcaacgacaagtggatggcggtgcagtaccccgaagccatgggctacttcaagcgcggcgacattccctactactacgccctggccgacgccttcaccctgtgcgaggcctaccaccagtcgatgatgggcccgaccaatccgaaccgcctctaccacatgagcggacgcgccgcccccagcggcgacggcaaggacgtacacatcggcaacgacatgggcgacggcaccatcggcgccagcggcacggtggactggaccacctatcccgagcggctaagcgccgctggcgtggactggcgggtctaccaggaaggcggctaccgctcctcgtcactctggtacctgtacgtcgacgcctactggaaataccggctccaggagcagaacaactacgactgcaacgccctcgcctggttcaggaacttcaagaacgctccgcgcgattcggacctctggcagcgcgccatgctcgcccgcggcgtcgaccagttgcgcaaggatgtgcaggagaacacgctgccgcaggtgtcgtggatcgtcgcgccctactgctactgcgagcatccctggtggggcccctcgttcggcgagtactacgtgacccgggtgctcgaggcgctgaccagcaaccccgaggtctgggccaggaccgtgttcatcctcaactacgacgaaggcgacggcttctatgaccacgccagcgccccggtgccgccgtggaaggatggcgtcggcctttccacggtcagcaccgccggcgagatcgaggcatccagcgggctgcccatcgggctcggccaccgcgtcccgctgatcgccatctcgccctggtcgaagggcggcaaggtcagcgccgaagtgttcgaccatacctcggtgctgcgcttcctcgaacgccgcttcggcgtcgtcgaggaaaacatctcgccctggcggcgtgccgtctgcggcgacctgacttcgctgttcgacttccagggcgcaggcgatacccaggtcgcccccgacctgaccaacgtcccgcagagcgacgcgcgcaaggaggacgcctactggcagcagttctaccgacccagccccaagtactggtcctacgagccgaagagcctgcccggccaggaaaagggccagcgccctaccctcgcggtgccctaccagttgcacgccacgctggccctcgacatcgccgccggcaagctgcgcctgaccctgggcaacgacggcatgagcctgccgggcaatccgcagggacactccgctgcggtattccaggtgcagccgcgggaagtcggcaatccgcgcttctataccgtgaccagctatccggtggtccaggaaagcggagaggaactgggccggaccctcaacgacgaactcgacgacctgctcgacgccaacggccgctacgccttcgaggtgcacggccccaacggcttcttccgcgagttccacggcaacctgcatctcgccgcgcagatggcgcggcccgaggtatcggtcacctatcaacgcaacggcaacctgcagttgaacatccgcaatctcggccgcctgccgtgcagcgtgacggtgacgccgaacccggcctatacccgggagggcagccgtcgctatgaactcgaaccgaaccaggcgatcagtgaagtgtggctgttacgcagcagccagggctggtacgacctcagcgtgaccgccagcaatacggaagccaactatctccgccgcctggccggacacgtcgagaccggcaagccgagcaggagcgatccattgctcgacatcgcagcgacctga

SEQ ID NO: 360126 - DNA, 2013 bp, Pseudomonas aeruginosa
atgtcacgttccgcattcaccgcgctcttgctgtcctgcgtcctgctggcgctctccatgcctgccagggccgacgacctgccctaccgcttcggcctgggcaaggcggacatcaccggcgaagccgccgaagtcggcatgatgggttactcctccctcgaacagaagaccgccggcatccacatgcgccagtgggcgcgtgccttcgtgatcgaggaagcggccagcggacgtcgcctggtctacgtcaacaccgacctggggatgatcttccaggccgtgcacctgaaggttctggcccggctcaaggcgaagtaccccggtgtctacgacgaaaacaacgtgatgctcgccgccacccacacccactccggtccgggcggcttctcccactacgcgatgtacaacctgtcggtgctcggcttccaggaaaagaccttcaacgccatcgtcgacggcatcgtccgctccatcgagcgggcccaggccaggttgcagcccggccgcctgttctacggcagcggcgagctgcgcaacgccagccgcaaccgctcgctgctgtcgcacctgaagaatccggacatcgccggctacgaggatggcgtcgactcgcagatgagcgtgctcagcttcgtcgacgccaacggcgagctggccggcgcgatcagttggttcccggtgcacagcacctcgatgaccaacgccaaccatctgatctccccggacaacaagggctacgcctcctatcactgggagcacgacgtcagccgcagggccggtttcgtcgccgccttcgcccagaccaatgccggcaacctgtcgcccaacctgaacctgaagcccggctccagtcccttcgacaacgagttcgacaacacccgcgagatcggtctgcgccaattcgccaaggcctacgagatcgccggccaggcccaggaggaagtgctcggcgaactggattcgcgcttccgtttcgtcgacttcacccgcctgccgatccgcccggagttcaccgacggccagccgcgccagttgtgcaccgcggccatcggcaccagcctggccgccggtagcaccgaagacggtccaggcccgctggggctggaggaaggcaacaatccgttcctctcggccctgggcgggttgctcaccggcgtgccgccgcaggaactggtgcaatgccaggcggaaaagaccatcctcgccgacaccggcaacaagaaaccctacccctggacgccgacggtgctgccgatccagatgttccgcatcggccagttggaactgctcggcgcccccgccgagttcaccgtgatggccggggtgcggatccgccgcgcggtgcaggcggccagcgaagcggccggtatccgccatgtggtcttcaatggctacgcgaatgcctatgccagctacgtcaccacccgcgaggaatacgccgcccaggaatacgaaggcggctcgaccctctacggcccctggacccaggccgcctaccagcagttgttcgtcgacatggcggtggcgctgcgcgaacgcctgccggtggaaacctcggcgatagcgccggacctgtcctgctgccagatgaacttccagaccggagtagtggccgacgatccctatatcggcaagtccttcggcgacgtgttgcaacaacccagggaaagttatcgcatcggcgacaaggtgaccgtcgctttcgtgaccggacatccgaagaatgacttgcgcaccgagaagactttcctggaagtggtgaatatcggcaaggatggcaaacagacgcccgtgaccgttgccaccgataatgactgggatactcaataccgctgggagagagtgggtatatctgcctcgaaagcgactatcaactggtccattccaccagggaccgagcccggccattactacatcaggcactacggcaacgcgaagaacttctggacccagaagatcagcgaaatcggcggatcgacccgctccttcgaggtgctcggcaccactccctag

SEQ ID NO: 360127 - DNA, 585 bp, Pseudomonas aeruginosa
atgccgtcgtactcctacgatgcgccacagatcggcctggataaccagtacaccgtcgacgaggcgaacgtcttcttcggcaccatggaccgtttcgactggaagctgatcggcaagcaggagttgctggtgccttacaacgatttcggtgcctacgacactggcgccaaggtggagacgtttgccggcaacgactcgatcgcgccgcagtcgcgtcgctatgagctgcatcgggtctgggtcgtcgaggccaatgtccgtcaaggcatgcgccatcaggcgccgaagcgcatgttctacatcgacgaggacagctggaacccgttgctggcggtggactacgacaagcaagggcagatctggaaagtgcgcgaagggttctcgattcccgtgtacgagacaggcgcctgcgacgtccaggcccaggtccagtacaacctggcggatggccgctacctcttcgacatgacctcgatcggtgcgggcaagaacgatattcgctggctcaccgaagacaacggctccccccgcctgaagcgtgacttcttcacctccgacaatctgcgagccatcagcgagcgctaa

SEQ ID NO: 360128 - DNA, 282 bp, Pseudomonas aeruginosa
  misc_feature (113)..(122): n is a, c, g, or t
atggctctgaccaacgaagacatcatcaacgccgtatccgaaatgtccgtcatgcaagtggtcgaactgatcaaggcgatggaagagaagttcggcgttaccgctgctgccgnnnnnnnnnngatcaaggtcgttcgcgaactgaccggtctgggtctgaaagaagccaaggccgtcgtagacggcgctccgggcgtggtgaaggaaggcgcttcgaaagaagaagccgaagccgccaagaaagccctggaagaagcaggcgccaaagtcgagctcaagtaa

SEQ ID NO: 360129 - DNA, 708 bp, Pseudomonas aeruginosa
  misc_feature (615)..(624): n is a, c, g, or t
atgcaagcgctgtacatgctggccctgtctcccatcgccgaaacccgaggcgatccgaatagctacggcttcaggatcgaacgttgtacggcggatgcgatggcgcagctcttcctgtgtctttccaaacaggcttccgcctgttgggttttggatgcagacatcgaagggttcttcgacaacatcaaccatgaatggctgctaaggaatgctcctacggatacacggatgcttcagcaatggttaaaagctggggtcatccacaaggggcagttgcacgcaacggatgcaggcacgccacaagggggaataatctcccccgtgttagcgaatctggcactggatggtcttgaaacactccttaagcaacacctaggagtgacaagggcgaagaagctgaaggtgaatgtggtgcgatacgcggacgactttgtgattacaggtacctccccggaggtcctggaaaacgaggtaaaaccttgggtagaacaattcctcgctacgcgggggctgcggttgtctgccaagaaaacacgtgtcgtccatatcgatgaaggcttcgacttccttggatggaatttccggaaatacgaaggaacgttgctgatcaaaccnnnnnnnnnncgagcaaaaagaacgttaaagcgttctacggcaagatcagagaggcaatcgacacccacaggacgagtaagcaagaggatctaa

SEQ ID NO: 360130 - DNA, 303 bp, Pseudomonas aeruginosa
atgcgccggccggatctcctcggcgaaggcgagcatttcctcggtgacccccatctcgaagttcatccgcgtctgcagcacttccttgagcacccgcacgtcgcgttcctggatatgccgacggtcctcgcgcaggtgcacggtgataccgtcggcgccggcttcctcggcgtccagggcggccttcaccgggtccggatagcgggtgccccgggcctggcgcagggtggcgacgtgatcgatgttcacgccgagcagaattcgagtggcttcagtcacggggtgactccttacggttcatga

SEQ ID NO: 360131 - DNA, 1164 bp, Pseudomonas aeruginosa
atgcacctggaactcggcgaacagccccgttccgatgccgacgatcaccgccagcaccagcaccttgacgccggaggacaccacgttgcccagcaccttctcggccaggaacgcggtcttgttccacagcgcgaagggcaccagcacgaagcccgcgagcgtggtcagcttgaactcgatgagggtgatgaacagctgcaccgccagcacgaagaagcagacgatgaccaccagccaggccaggaacaggatgacgatggggtcgagattgacgaacacctcggggaaaccggtcagttcgcctatctgctccaggatcggcgcgccggcgtcgatgccggttttcgccagccgccccggctgcaggaaagtctccatgctgagcgcgccggttgccgtcaggcccagcccggcgaaggagcggaagacgatgccggccagccagttgaagttgccgatgatgtaggcaaaggcaccgacgtagagcaccttgcggatcaacttcgccatcacgtcctcgccctggccggtggcgtgaccgagcgaccagtagagcccggcaatcgtcatatcgatcgctataagcgtggcggtcaggtaggcgacttccccttgcagcaacccgaatcccgagtcgatgtagcgcgagaaggtatcgaggaagcggtcgatgaccgtgacatcgttcatggcgcgtcctccttgacgacaacccgccacgcaccgctttcggccacctcgtcgccaggctcatcgaaggtcggtggaatcggcggtaactccccaaggacgacatactcgtccgggccggagtggccggcgaagaagcggcgctggtacgccacggcggcggccctgcatattccctcgcccaccgcctgccagtcagccgcacactccgcacgcagagtcgcgagccgggcgggatgggtggccagtgtttcggccagaccctcgcaggacggccgatcgcaggctgccagcaaggcaatcgacagcatgaaaacactacgcatggcggccatcctcagttcccgtagaaccggaccggttgcggggtgtacggcgtgccctcgcccaggaagcgtcgccgaacctcgcgggcgcgctcggtcgcagccgcctgccgcgctagctccagcgaggccgcgcggccctgggtga

SEQ ID NO: 360132 - DNA, 516 bp, Pseudomonas aeruginosa; identical to SEQ ID NO: 321476

SEQ ID NO: 360133 - DNA, 2268 bp, Pseudomonas aeruginosa
atgccggcgctccagcggcaccagcaggtgcatgcccttgccgccgctggtcttgaggaaggcgcgcaggcccagctcgtcgagcaacgtcaggctcagctgggtcgcttcgagcatgcgcttccacggcagcgccgggtccgggtcgaggtcgaggacgaaacggtcgggccgctccaggttggccaggctggcgttccaggtatggaattcgatgctgcccatctgcaccgcgccgaccagcgcctcggcgctgcggatctgcaacagcgccggatgaccgggatcgagcgccgggtcgagctggacgatgccggggatcttcaggcgcgccgcgtgcttctggaagaacagttcgccgccgattccgtcggggccgcgcaccagcgacaccgggcgctcgcgcaggtcgcgcaggagcaggtcggcgtagcgcgcatggaactcggcgagttccagcttgctggcctggatcgacgggtcgatcagccgctgcggatggctgatgcgcacgccggcggtggccgcccgcgacgcaccggcgccggccttgcgcgcgccgcgcagcggcggcgggccggcgggacgctcgccggtcacctcacgcgccggcttgtcttcgcgcaagccgtggaacactgcctggcggatgatcccgccacgggtcatctgcgcataggaaacctcgcacagctgttgcgggcgcacccactgcaccgacccggtctcgcgcgccggcggcaccttcgccaatgggctggaacggaccgcgaggggttccaggcgctcacggaccttcttcaggctggccgcggtgaagccgctgccgaccttgccggcatagcgcagccggcgctcctcgtcagggctgtagaggccgagcagcaaggcgccgatatgccggcgagagcccttcggctcggtatagccgacgatcacgaactcctggcgcaactggcacttcagcttgatccagtcgttgctgcggcgcgaacggtaggcgctgcccagacgcttgccgatcacgccttcgagaccgagcttgcaggcgctggccagcaggtcgcgggggtcttccgcgagcgtcgcggagaaccgcagcgggtcttcgtctcgcccttccagcagcgcctccaggcgcgcgcggcgctcctccagggcgacatcgcgcagatcctcgccttcgtggtacggcaggtcgaagaggacgtacaggatgttctcgccgcgaccttcctcgaaggcgttctgcagggcctggaagtccggtcgaccctcctcgtcgaggacgaccagttcgccgtccagccaactgcgctgcagaccgagcccggccaaggccttctccaggtgcggcaggcgttcggtccagtcatggccgttgcgggtcagcaggcgcacgtggccgtcttcgatgcggctcatcagccgatagccgtccagcttgagttcgtaggcccactcccctcgcggaggctgctcgaccaggctggccagctcgggggcgatccattcgggcatcggcgtcttccccccgctcttgccgcgtcgcgccggcctggccgcgggcgtggcggcttcgccatggcggggcagcagcgtacgctcgctgagcacgctgtcgggacgctccttcagcacgtcgaagcgatccaggctgcgcgcctcgccgtccttggccttgaccaggaaccactggggctgcttgccgcgcaggttggtgcggatcaggtgccaacgcccggagagtttctcgccatccagggcgaagctgagatggcccttttccaggccctcgcgcggatcgtccagaggcgtccaggcgcctcggtcccagacgatgacatcgccggcgccgtagtgcccctgggggatgctgccttcgaaatcggcatagtccagcggatggtcctcaacctgcaccgcgagccgcttcaccgccgggtcgaggcacggccccttgggcaccgcccagctcttcagggtgccatccagctccaggcggaagtcgtagtgcaggcggctggcgtcgtgcttctggacgcaatagcggagcagcccggtgctgtccttgcgaggcttgcggccactgggctccggggtctggcggaaatcgcgcttgcgggcgtactcggcgagcggcttgctgctgggcatggtgggctcctcggtggtcagacgccggggcagaccggcgcgctgtgcaggaccatgtcgatggctttccccagttcctccagggtcaccggtttgagcagcaccggatag

SEQ ID NO: 360134 - DNA, 2304 bp, Pseudomonas aeruginosa
atgagtgatctgccaagtccgaagaaacacaagacctcgaactggtcggcgatctgggtgctgccgctggtagccctggccatcggtgcctggctggcgtggcgtgccttcgaccaggccggcgtggacatccaggttcgcttcgagagcggcgacgggatccaggccaacaagaccgaggtgctgtacaagggcatctcggtgggcaaggtgaccgacctgcatgtcagcaaggacatcaagggcgtggtcgcgaccatcgagatcaagaaggaagcccaggaatatctgagcaaggacacccgcttctggctggtcaagccgcgggtttccctggctggcgtcaccggcctggaaaccctggtctccggcgtctacatcgcggtcgatccggtgaagggcgagaaggaagaacgcaacttcaccgcgctgaaggagccgccacccctttccgacaagctgcccggcctgcacctgaccctcaaggccgatcgcctgggctccctggagcagggcagcccggtgttctaccggcagatccaggtcggccaggtgaagagcttccagctgggcgatgaccagaggaccatcgagatcaaggtgcacatcgagccggcctacgccgacctggtgcgcaagcacacgcgattctggaacgccagcggcatctccatttccggcggcctgtccggcttcaaggtgcacagcgagtcgctgctgaccctggtcgccggcggtatcgccttctccaccccggagaaccgcaccgacagcccgccgaccgatccgagcaagccgttccgcctgtacgacgactacgacgcggcccaggccggtctgcgcgtgaagctgaagatgaacgacgtcagcggcatcgatccgggccgcaccccggtgatgttcaacggcgtgcaggtcggcctggtcaagtcgatcgacatggacaaggactacagcagcgccactgccgacctggcgatggatccgcgggtcgaggacatgctgctggaaggcaccgagttctggaccgtcaagccaagcatctccctggctggcatcaccggcctcgaggccctggtgaaaggtaactacatcgacgtgcgcttcgccaagagcggcgcgccgagtcgcgagttcaccatccgcccgaaagcgccgccgctgaacaccgacgcgcccggcctgcacctggtgctgaccagcgacaagctcggctcgatcgatatcggcgcgccgatcctctaccgccaggtccgcgtcggcagcgtgcagagctaccagctgtcgcgcgaccgccagcgagtggtggtgggtgtgcacatcgagccggagtacgcgcacctggtgaatacctcgacgcgcttctggaactccagcgggatcaccctgaccggcaacctcagcggcgtgcaggtgaagagcgagtcgctacagaccctgatcaccggcgggatttccttcgacaccctcgatccgaaggcgccgaccgtgaccaaggtgcggcgcttcaccctcttcgacagcgaggaggcggcgatggcccgtggcgtggagatccaactgagcatcgacaatgccgatggactgcgcgaaggcacgccgatccgcttcaagggcctggacatcggcaagatcgaaagcgtcgagctgaacccggacctctccggggtactgatgaaggcccgcctgacttccgccggcgagcgcgtcgcccgcagcggaacccgcttctgggtggtgcgtccggcgctcggcctgctgcgtaccgagaacctcggaaccctggtcagcggcccctatatcgaggcgctgccgtcgagcacgccgggcgagcgccaggcacgcttccagactctcgccgaagcacccaacctgctgggtcgggaaaacggcctgcggctgaccctcagtgcgccgcgcaagggctcgatcaagccgggcaacctggtgacctaccggcagatcccggtgggcaaggtcgtcgacctggccttgggcgaacaggccgaccgggtgctgatcagcatcctcatcgaaccgcgctacgtaccgctggtgcgtaccggcagccgtttctggaatgccagcggcttcggcgtcgacgccagcctgttcaagggcctgtcgctacgcaccgagtcgatggaggcgctgatggagggcggcattgccttcgccaccccgaacaatgcgcagatgggcgagcccgccaagccggggcagaccttcgccctgttcgattcggccaatgacgaatggctggagtgggcgcccaggatcgccctgaggagcggggcccgttga

SEQ ID NO: 360135 - DNA, 786 bp, Pseudomonas aeruginosa
atgggcgcggagcgccggattgcgcagcaccacggcgatgccgccagcaagcagcaggacggcgaacgccagcaagccggaactctcgttgctccataccccgatgctcagcactgcccaggcaagccacgggagctgggcagtctcgttcaggagattggcgaatttcggaacgacgaagacgaacagggtcgccacggcgagcaccccgctgagcaccagaatcgcagggtagatcagcgccccttgcaactcggcgcgggttcgccgttcgtattccatctgcgtggcacagtccctcaaggctcctgcgaggtttccggtcatctcgccggccgccaccagttgatatacatagcgcggcaagtcgaggccggcgctctccagcaccacgggaaaggattgcccctggcgcaggccattggccatcgcctgcagggcggtaatcaacttcgggtggcgcgcgcctcgctcctgagcctccaccgcgtcggccatgctcactcccgccgcgagcatggtggccagctcgtggatggccatgttcaattcctcggccttgagccgacgtcgcgagcccaggttgcggcgtttcacctccaggctgagcggggtgagcccctggcgctgcaactgccgcagcgcatcctggcgcgtggggaggcagagttcgccacgaacgcgcctgcccttgcgatcgacggcctggtagatgaaattcatgggcttagccgctggtcacgcgatgcacctcgtcaagactggtcatacccaaccaggccttga

SEQ ID NO: 360136 - DNA, 1152 bp, Pseudomonas aeruginosa
atgaccgcctcttcgccgagtctctcgccgaccctcgaactcgcctgcgagttgatccgccgcccctccgtcacgccgctcgacgccgactgccaggccctgatgatgcgccgcctggaagccgccggcttcgccctggagccgatgcgcatcgaggaggtggacaacttctgggcacggcgcggcggcgacggcccggtgctgtgcttcgccgggcacaccgacgtggtccccaccggcccgctgcaggcctggcagcaccaacccttcgacgccctgatcgacgaccagggcatgctctgcgggcgcggcgcggcggacatgaaaggcagcctggcgtcgatgatcgtcgccgtcgagcgcttcgtcgccgaccacccggagcacaagggtgccatcgccttcctcatcaccagcgacgaggaaggcccggcccaccacggcaccaaggcggtggtcgaacgcctcgccgcacgcggcgagcgcctggactggtgcatcgtcggcgaaccgtcgagcaccagcctggtcggcgacgtggtgaagaacggccgccgcggctccctcggcgccaagctgaccatccgcggcgtacagggccatgtggcctacccgcacctggcgaagaacccgatccacctggccgccccggcgctggccgaactggcggcggaacactgggacgacggcaatgccttcttcccgccgaccagcttccaggtttccaacctgaactccggcaccggcgccaccaacgtcatccccggtgaactgaccgcgctgttcaacttccgcttctccactgaatccaccgtcgaaggcctgcagaaacgcgtcgaggcgatcctcgacaagcacggcctggactggcacgtcgaatgggcgctgtccggcctgccgttcctcaccgagccgggcgaactgctcgatgcggtggccgccagcatcagggcggtcaccggccgcgagacccagccctcgaccagcggcggcacctccgacggacgcttcatcgccaccatgggcacccaggtggtcgaactcggcccggtcaacgccaccatccaccaggtcaacgagcgggtcctggccagcgacctggagctgctcaccgaaatctactaccagaccctggtgaggctgctcgcctga

SEQ ID NO: 360137 - DNA, 402 bp, Pseudomonas aeruginosa
atgggcgatgccgctgtcgcggtcgcgccgcgcctgctgcatgccgttcagcgcctcgcgcaccgcgcggtcgccgatggcgtggacgtggaccagccagccgcgggcgtcggcggcgctgaccagttcgccgaagtgcgccgggtcgatcagcagttcgcccgtcttcctgctgttgcgatagggctcgaggagcgcggcggtctgcgccgggtattccggtacgccgtcggcgaacaccttgattcccggcagggtcaggttggggctgccgaggaagcgctggcgcaccttgtccagcacctcgaggtcggccggccggctgcgtggattggcgaccaggagggcggcgacgtgggcactgagttcgccgcccttggccagccgctggtagaccggtag

SEQ ID NO: 360138 - DNA, 369 bp, Pseudomonas aeruginosa
  misc_feature (334)..(343): n is a, c, g, or t
atgtcccgacccagggggaattcaaagacttcaaggcttatagatgggcagcagcgcctgacctcaatctacatcggcctaaaaggaacctacgcctataagcagccccgagtctggtggcccaatacgcgcaacgatcaggtccttccgccgcgccggctttatctcaatctgagcaagggtgttgaaggggaagacaatgagtcgatggctcagtacgacttccgatttctgaccgagaagcaggtagcaacgtataagagcgacagcacctcgttttggtttgaggtgggcaaggttttggaactgcccgatgtgcgatctgatgagatcnnnnnnnnnncgatgtgcaatctgatgagatcctga

SEQ ID NO: 360139 - DNA, 651 bp, Pseudomonas aeruginosa; identical to SEQ ID NO: 354110

SEQ ID NO: 360140 - DNA, 309 bp, Pseudomonas aeruginosa
atgggtaattctccggagcgtgaagagctcccggaaggtgaggtctcgtctgccggcacgttgctgccgagggcagagatcgaggcgatggtcgctgagcggtttcccaggaaggccatcttcatgtacgcccactgcgtcatctatgacgagcagggtcgatttccgccaggagggtgggtgcgctcgacgttgtgcaagacgttcgatggcgtatgcatgtttgaaacgcgcaacacggtctacgtgctcatggggcaaggacgcgagatcactgcgacgctgaaggcaattttcgctctatgttaa

SEQ ID NO: 360141 - DNA, 378 bp, Pseudomonas aeruginosa
atgaaagctggcatcgcggcccgtcgcctgttcatcaacgacaccaaagccttgatacataccgtcgacgggaccgccatgctggtcacaccaggaatcttcaagcgttatgtccatgagcatccagagctcgaaaagctggcccaggccaaggagacgaccggctggaagctggtgcaacgcgcgttcgagaaacagggtcttcaccgaaagaccaataagaacctgaacatctggaccatcaaggtttctggtcctcgcaagacgaaagagctcaaggcatacctgctccaggatcccaaactgctgttccctgtgcagcctctggacaacccaagcctcacggtcatcaccgatgccgaagggggtgtggaatga

SEQ ID NO: 360142 - DNA, 771 bp, Pseudomonas aeruginosa
atgacgaagccgtcgcgggcctggtcgaaggggcgcgaggcgcgttcggggctgtcgttgaaatcgctggacagggcgcgcgcggcggcgaagccggccaggctgacccggtggatggtcgcttccgcgccgccgcagagcgccacgtcgacctctcccgcgcggatcatccgcgccgcgtcgccgatggcctgcacgcccgccgcgcaggcggtcaccggggcgcccagcggtcccttgaagccatggcggatcgacacatgggcggccgccatgttgcagagaaaggacgggatggtgaagggcgacaggcgtcgcggtcccttgccgtcggtggtccgcaccgcttcggcgatggcatggaagccgcccaccccggaggcgatgacggtcgccgtgcgctcctgcgcctcggcgctctgcggcgcccagccggcctgggccagggcctcttgcgcggcggccagggcgaagaggatgaagcggtccatcttgcgttgttccttggcggccagcagcaggtcgggatcgaagccggcctgcgggtcctggacacggtcggggacctggccgccgatgctgatgggcaggtcgccgatcagctccgccgggagcgtggcgatgcccgattgcccggccagcaggcgttgccatatgggttcgactccgcagcccagcgggctgaccgcgcccatgccggtgacgacgatacgtttgctcatgagggtccgagtccttctgttccgttggaatagcagtcagtggacgtaa

SEQ ID NO: 360143 - DNA, 783 bp, Pseudomonas aeruginosa
atggggtgttcggaacggttctcgagggcggcggcgagggccaggcagcgatccgcgtcgagatcgcgcaggggtagcacctgcttgagcgtcaggcggccttcggtgagggtgccggtcttgtcgaagattaccgtgtcgatgtggttcagcccttccagcacgtgcccgcgcgtgatcagcaggccgagcttgtgcaggctgccggtggccgcggtgagcgcggtgggcgtggccagcgacagggcgcaggggcaggtggcgaccagcagcgacagcaccacccagaaggcgcgctggtggtcgacctgccaccacagcgcgccgaccgctgcggcgaccagcaggacgatgagcaggaaccactgcgccaccttgtcggccagttccgccaggcgcggcttgtccgcctgggcgcgttccagcaggcggacgatggccgacaggcggctgtcgtcgccaagggcgccgacctcgacggtcagcggcccctcgacgttcagggttccgccggtgacggcgtcgccggcctggcgtggatggggcaggtactcgccggtgagcagcgactcgtcgacactggactggccgtcgaggatcactccgtcggccggcagcacggcgcctggcggtaccagtacgcggtcgccgacgcgcagttcgctgagcaggatgcgctcgccctggttggcggcgtccaggcgcaggcaggacgccggcagcaggttgaccagttgcgcggtggaggcggcggtgcgctcccgcgcgcggcgttcgaggtag

SEQ ID NO: 360144 - DNA, 723 bp, Pseudomonas aeruginosa
atgggtatccacagcaagctggctggtctccagcttttcttggcggatgacaccttcaatggccacgcccgcctggcgctcattgagcacaaagggctgcgcatggaagatgccccaccggtcttttacatgggagtagattccaatggaaggtgtgttgcgccgaggatcaagccgggcttgccacacccgtttggtggtctccatggtcatcatgtcagaagatgccaaatcggaccgcccccaggtggcggcaatcgggtgtcgctgcatgaattccagcacagcctggcaggcctggctcagacgccgttcgtcccgcgcccagcgcatggcctggcgaatgctggtggcagacaattgcggaatcatgcgcgcgcattcgaccgcagtcagactggtgccgtgggccatgatgccggcatagaccatcagcagctcgtcggtagagcgcggctcacgtccgagcatgatccagctaaagcgcacctgggcgtcaacggccagaatcacttccggcaattgaacctcaccgatgcggtgatccaaagccgcgcgcagcttggtcacttctgggtcttcgtcctctgcgggcaatggcgacaaatggagttcatcatccacgcgcagtacgccactgcgggctgcagcggccaccgcatcgacaccggcagttactctggccagcaaaggcttcaagaaagtggcagccttgctgggtaa

SEQ ID NO: 360145 - DNA, 429 bp, Pseudomonas aeruginosa
atggttgggcctgcgctgctggcagggctctcccatgattacgagtcctgggtgcacctgcgagagcagattgagagtgtcaagaaatatatcgatgaagccttggcaaaagaacctgaccttctgaaagcactggcccagctctccgatgatcaatcgattcggatcctcactgtgcacaagagcaagggccttgagttcgacacagtagtattgctgggcgtggagaatcaagcctatttcggcaaggatcaccacgaagtgcagtgcacattcttcgttggtgtatcgcgtgccgagagacggcttgtggtgacgacggcaagtcatcgtcagaatctcgctcagcttgaatactggagatccgcccgcaccgttcaggcggaattccttgcgtacgtgaatctctggaagacccactccaactga

SEQ ID NO: 360146 - DNA, 756 bp, Pseudomonas aeruginosa
gtggacctcgccggcatcctcctgaagaccgccgcctacggcctgatccgcttcgccctgccgctgttccccaacgcctcggcggaattcgcgccgatcgccatgtggctcggcatcatcggcatcttctacggtgccctgctgtccttcgcgcagaccgacatcaagcgcctggtcgcctactccagcgtttcgcacatgggcttcgtgatgatcggcatctactccggcagccaggtagcgctgcagggcgtggtggtgcagatgatcgcccacggcctctccgccgcggcgctgttcatcctctgcggccagctctacgagcgcctgcatacccgcgacatgcgcaagatgggcggcctgtggtcgcgcatgccctacctgccggcgatcagcctgttcttcgcctcggcgtcgctgggcctgcccggtaccggcaacttcgtcggggagttcctgatcctgatcggcgccttcaaggtggtcccggtgatcatcgtgatcgccaccttcggcctggtcttcgcctcggtctactcgctgatcatgatccaccgcgcctacttcggccccagccagtccgacgagccgatcctcggcctcgatgcccgcgaactgagcatggtgctcggcctggcggtcctgctggtcctgctcggggtctacccgcagccagtgctggacatctccgcggccagcatgcacggcgtgcagcaatggctgggcgcagccctttccacccttgcaggacggtag

SEQ ID NO: 360147 - DNA, 174 bp, Pseudomonas aeruginosa; identical to SEQ ID NO: 330002

SEQ ID NO: 360148 - DNA, 1221 bp, Pseudomonas aeruginosa
gtggtggcgatccgcgcgcggcgcgaagacttcgcccgctggaacctgccgggctggtcctacgacgacctgctgccggcgttccgccgcctggagacccgccagggcggcgacccggccctgcacggcggggacggaccgctgccggtgcggcaactgagccgcgccgatctctcgccgatgcagagggccttcgtcgacgccaccctggccaacggtttcaaggccatcgccgatttcgacggcgccgacgccaacggcgtcgggccgtacccgatgaatgtcgtcaacggtgtgcgcgtcaacaccggcatggcctacctcgacaacgccgtgcgcgctcgcgccaacctgtcgatccgcggcgacgcgctggtcgaccgggtgctcttcgaaggcaagcgcgcggtgggcgtgcgcctggcctccggcgaggaaatccacgccggcgaagtgatcctcagcgccggcgcctacggcagcccggcgatcctgctgcgctccggtgtcggcccggccgacgagctgaaggcgctgtcgatcccgttgcttgccgacttgccggtgggccgccggctcaaggaccatccgttctactacaacgcctatgccgcccggccggagcgcatcggcgcgcagtcgccggtgatcggcgccaagctctggacccatagctcgcgggcgcagaacggcgagctggacctgcacatcaccgccacccacctgttccccgccgagatgagcccgactggggtcggcttcgtcctcgccgtggccctgacccggccgcaatcgctgggcagtgtgcgcctggccagccgcgacccggccgtcgcgccgctgatcgacctgaacttcctcgccgaggccgaagaccgcgcgcggttgctggaaggggtcaagctggcgcgccggataggccgcagcgaaccgctcgccgggctgatccacgccgaactcgggccggggcccgaggcacgcagcgatgcgcagattgaagcggcgatccgcgccaccctcgatacctaccaccacccgacctccagcgcgccgatgggccgcgccggcgagcgctgggcggtggtcgacctggagggcagggtgcatggcctgcaaggattgcgggtgatcgacgcctcgatcttccccgatgccatttcggtggccaccaacatcaccaccatcgccgttgccgagcacctcgcgcagcgcatcgcctga

SEQ ID NO: 360149 - DNA, 843 bp, Pseudomonas aeruginosa; identical to SEQ ID NO: 333836

SEQ ID NO: 360150 - DNA, 135 bp, Pseudomonas aeruginosa
atgaaccgtgcgattctcaagatcaacatagaacagaaggatccagagcgtctgctcggcttgttgatcgtcgatgaaaatctgtcgactgcgtcgctctacagggaacaaatcggcctgtcgggcgttgtatga

SEQ ID NO: 360151 - DNA, 945 bp, Pseudomonas aeruginosa
atgggcctggtgggcgttgtccgcctcggcctggtagcggcgcatgcggtcgctgacatcgctggcgaacttgaccaccttgtagagcttgccgtcggcgtcgtagaccgggttgtagctggcttccagccagaccggctggccgttgcggtggacccggcggaactgcccggtgacgtactcgccgcggttcaggcggcgccagaggtcggcgtactgcgggccgtcgcggtagcccggttcgcagaactgacggtggttggcgctggccagctcggcccggccatagcccatggtggcgaggaagttgtcgttggccgcgaggacattgccgtcgaggtcgaactcgatcatcgccatcgagcgggacagggcatccagcttgctctgcatctcgtgttcctggtggacgatggcatctatgtcgctggcgtacttgaccaccttgagcagtcgaccctgcccgtcgcgtacgggattgtaggtggcttccagccagagtggccggccctcgcgggtaatgcgcttgcagcggccggaaaagtgttcgccgcgccgcaggcgttcccagaagcgccggtagtcttccgattgcgcgtaggcgccgtcgcaaagctggcgatgcggtttgccgaggatctcgtcgcggcggtagcccagcagggtcaggaaattctcattggcatcggtgatattgccgtccggatcgaactccacgcgcgccatggagcggtccagggccgccatgtgcaggcgctcggcggcgagttgctgttgcaagtcggcgttcatctgtcggtacttgcgagtgaacatgagaaaaatccttggatagagagaggggctcatccctgtcttcggcgccgatgggcgggagttgagagggtgggacgattgtattttttcatcgaacgacaaaaattcgtcgttattcttaatgggtga

SEQ ID NO: 360152 - DNA, 393 bp, Pseudomonas aeruginosa
atgccctcacgcaacatactggtgatcaactgcggcagttcgtcgatcaagttcgccctggtcaacgaggcccactccctgtttcccctgcacggcctcgccgagcgcctgggcagccgcgatgcggtgctgcgctggaagcgcggcggcgacagcgacagcctgatgattcccaacgccgaccaccgcgccgccctcgcccagttgctgccgatggtgcagaacgccgcgggcggcaagctccacggcatcggccaccgggtggtgcatggcggcgagctgttcacccatgccacgcgcatcgacgaccgggtggtcgaggcgatccgggccaccgcgccgctggcgccgctgcacaacccggccatttccgcggctcggtggctgacgtag

SEQ ID NO: 360153 - DNA, 339 bp, Pseudomonas aeruginosa
atggaaaccgccttgttggccgcgatctgcatggttcgaaaccttttcgataaagaagatgaatgcgtaagtgtacgcatcaatagccccgaaagcgaccgcgcccctgatgaacggggcgcgcgagcgccgtcgcgggtgattgattttcatcaggacgaggaaggccattgggtggcagtcttgtcctgtggccatactcaacacctgcgccaccaaccgccctggcaatcgcgcgcctgggtccttgacgaaaacgagcggcacagacagctcggccgcgaatttcgctgcggctggtgtgcccgggaagaagaagagcagaccaaggagcagtga

SEQ ID NO: 360154 - DNA, 639 bp, Pseudomonas aeruginosa
atggcggccctttgcctgcctctaccggctcacagtgcgggtgccgaccgctttgcattccgcgacatccatcaggaatgggtagcgaatctgaccggcccgtcacatttggtagggacctcaaaccggcaccgagggctaggatcagcccgcttcgaaatgaatccggttctggaaaaaaggacttgtcatgaaacactactcagccaccctggcactcctgccactcaccctcgccctgttcctgccccaggcagcccatgcccacggctcgatggaaacgccgcccagtcgggtctacggctgcttcctcgaaggtccggagaatcccaagtcggccgcctgcaaggccgccgtcgccgccggcggcacccaggcgctgtacgactggaatggcgtcaaccagggcaacgccaacggcaaccaccaggcggtggtccccgacggccagctctgcggcgccggcaaggcactgttcaagggcctgaacctggctcgcagcgactggcccagcactgccatcgcgccggacgccagcggcaacttccagttcgtctacaaggccagcgcgccgcacgcgacccgctacttcgacttctacatcaccaaggacggctactgtctcttatacacatctga

SEQ ID NO: 360155 - DNA, 246 bp, Pseudomonas aeruginosa
atgtcggcccgccagcgaatcatgatgtaccgcttcatcgaatgggtcgggcgctggtcgatgctcgatatcttcgtcatcgccatcctcgtggcgctggtcaatttcggcaacctggcgagcatcgaggccaatctcggcgccgccgccttcgccagcgtggtggtgctcaccatgctcgccgccgtgacgttcgacccccggcttatctgggacaacaccaatctggacgacgagaatgagtga

SEQ ID NO: 360156 - DNA, 516 bp, Pseudomonas aeruginosa
atgcagaactgcccggcgaacaccgtcagcgacttctccagaacgggcaaggcggcgtccaggtcggcgtcgtcgaacaccaggtgcggtgtcttgccgcccagttccaggccgaagcgcttcaggtgccgcgcgccggcggcggaaatcgctcggccggtggcgctcgagccggtgaagctgatcaccggcacctcggccgcgtcgatcaatcgccgggcgccttcggaacccgattcgctgaagatgttcaccgccccggcaggcagcgacggcgcttcggcgatgatccgcgcgaccatggcgttggtctgcgcggtctgccccggcatcttcaccaccgtggtggtaccggcggccagcgccggcgccagggagcggatcatcagcaccaccggtgaattccacggcacgatgatgccggcgacgcccatcggctcgcgcagcaccagcgacaccacgtcggggcgcggcgtgccgctggcgccccgttcgctgcgcgccaggccggcgtag

SEQ ID NO: 360157 - DNA, 915 bp, Pseudomonas aeruginosa
atgagaaagtctcggtcgggcgtcgtgttttttggtgatgcggcccgcatcactctgccaggtcctgacctcggcgccggcggcgagctgggtggtgccactggcaacactctgccggacctggcctcggcgccgacggcgaactgggtggttccactggcaacactccgccaggaccaggcctcggcgccgccggcgagctgggtggtgccactggcaccacttcaccaggatccagcctcggtgccgtcgacgagctgggtggtgccactggcaccacttcaccaggatccggcctcggcgccggcggcgagttgggtggtgccactggcaccacttcaccaggatccagcctcggcgccgtcgacgagcagggtggtgccactggcaccactccgccgggaaccaacctcggcaccggcggcgagttgggtgttgccactggcaccacttcaccaggatccggcctcggcgccggcggcgagttgggtggtgccactggcaccacttcaccaggatccagcctcggcgccgtcgacgagcagggtggtgccactggcaccactccgccgggaaccaacctcggcaccggcggcgagttgggtgttgccactggcaacactcagccaggaaccgacctcggcgccggcggcgaactcagtggttccactggaaccactctgccgggaaccgaccccagcgccggcggcgagttgggtgattcggcccgaatcaccccaccagggaccgaccccagcgccggcggcgagctgggtgttgccactggcaacactctgccaaggatcgacctcggtgccgacggctatcaacttctcccactcaagaggaaccgaaatatgtgtgactcgatcttgtatgcccccatggacgagctcgaattcgagcggctgctag

SEQ ID NO: 360158 - DNA, 351 bp, Pseudomonas aeruginosa
atgcacgcaacgattgattggatagctgacgatgaacccaacacccctcgtggcgtggtttcctccttgaatatcggcccgaaggttgttgcattggggtttaggggggcggaagctggccaaggtacttcttggaccggttcaatcgtccttgagctcacagaggctgttcaaaccgtcacagcctattacgaagaaatccccggccccaagatgagcgcggcaatcaaaaaagtgccctacacagtcaccggatgcttttctgatgagtcctataaatcgttcacggggaagtggactgaaggtgtaggagcccagcacgtgtatgagttgaatatcgacatcgactga

SEQ ID NO: 360159 - DNA, 360 bp, Pseudomonas aeruginosa
atgactgactacatagtgatcagcctcaagcacacgaagcgacgccacaaggcaatcactctgtggcgttctgatgaccgcggctactgctggaagatggagagcgcaggcatctactccgaagaaagaatccttgagcatctgggctactacaacagcggctgctccaacatcgccgttccgttgagcctgatgccatttctcgttgacgacgtcgagtacgacacaaaagagtttggggtgtgcctgccgaacaatgcagccacctggaagaagcttcttgcctctgtcataaggccaacccagtacccatcgcatccggagtacccaggctccaggcgtaccaaggaggcagcatga

SEQ ID NO: 360160 - DNA, 477 bp, Pseudomonas aeruginosa
atggatgagccacttttcaacgaactgctggaaagcgtgaagcaggcggaccagatcatgaccgaccacgcagagctgcggaggctggctaaggcggcaacgccggggccgtgggaatatcaggcaccgctaaagatattggcagcagataggacatcgattgtccttatcgcgctatctcacgctaattatcgtgaggacgaagcgaacagccgattaatagccgccgccaaccccaagaccatcctcgccctgctggacgagatcgaccagctcaaggcggagagcgacaggctgcgtcaaggcatgaaaggcgactacgacattgacgcatggctggaatggacgcgagagaaagaccagatcaaggcggagaacgaggttctgcgtggggcactgaagcagttcgccgagatgctgaaaagcatcaatgtgccaatcgatcttgacgaaatcatcaaaggaaccaagccatga

SEQ ID NO: 360161 - DNA, 306 bp, Pseudomonas aeruginosa
atgtccgcacgcttcactgaggtttcggaataccaccacgttcacggcaagttctcgctgtgtttctgcattgcacccacgggtacggcaattattcgtcatcacgatgacgacgtggtctacacgctcgaccttgaaaccctggtggagcacaagcatcccgccaaagagtttttcgagtctactgtgcttatcccgatccttgtagacgatatgtattttatggccgatccgaagggtgcacaggatctactggataagcagcttcgcgccgaggaaaagtgcggtctgttccgccccaaatag

SEQ ID NO: 360162 - DNA, 636 bp, Pseudomonas aeruginosa
atgctggagtacaagctgacaccacatcatgctggcgttgccctgtggggtgactttgctgcgttagataaactccacgagttcattcatcacgtcgtggaggaaagcgtctacatcgaggacaaggaaggcttcgtactggggttagcgtacgatgttcgcaaggcgtttcaggggcagcgcactcaaggctatcgctcctactctgaagacgacaaatgtcgcatctacggtgtcgaggtcttgtggcctgtactcctagtgcaagtcggggtgctgcgccaagcaatggctttcataccgacaagcaaactcaatcaggctctcatgttcgagctggagcatgttgttgaatccgccttgcgaatggccgtaccggtcacggccgatgaagtcatccagcagattcgccacgtaggcagtacatcatacctgcaccttgatagcatgctggacagccgttgtcggtatttcatcagtcttccagccaatcaacggctgaagacactgccgaagctgatggagacatttaatcccatgtatggcttcttggcgaaaagcgacatgcggccaggcattatcccgccgagtgcctttgtcgaagacggacaagaatggccggatttcaaatggtaa

SEQ ID NO: 360163 - DNA, 390 bp, Pseudomonas aeruginosa
atgtaccagatccccccactgcttcacagactcaatgtcatccagaaggccctcgactatggccatccggtgagaatcgacgggtacgagtacatccagttggaccgactctactgccgcatggagcgacaccaggggggctcggtttccatcgtggcgttggctgccgaacacctggagaaccgaggccaactcatgacggccgtggcagctatgccccacgagcattggttggctgtcgcgactcggacagcgctgattgacactgcgaaggtgggtgctgtcgtcgagatggtgttcgaggcccaggccgcgcacgtcgaagcgctactcaacggggtgatgatcgacaaggggagcccgcagaattcggaaaaaatcgtacgctaa

SEQ ID NO: 360164 - DNA, 270 bp, Pseudomonas aeruginosa
atgggcctgccagaggtgtaccatctcatggccgatcgtctggagtatctccatgagcgggatgacagcgaaaaacgcggggttcaaggcgatctcatcggtaaccgttccatccactcggatgaatctgcgcgaactgaaataacccagggtggacttctcccgctggaacgtgagcaggcacgttggcagttgtccgccgaaaagatggcggttgtagaagtcgtacgccagttgcagttcctggtacgcctcttcggtcggacgtag

SEQ ID NO: 360165 - DNA, 219 bp, Pseudomonas aeruginosa
atgggtgcacggcgcgatatagagggtgccggcccccgcctcttcggcagcgacgcgtccatccaccagcaaggcgcgaacgccctcctccgaggcctgcaatcgtgcagctgcaagcttaatggcatcgtgttccgtgcggcccgcgccgtagatctgatcaccaacccgggcaacgatgtatccgagtgcagagagcatgtttcggtaccgttttaa

SEQ ID NO: 360166 - DNA, 234 bp, Pseudomonas aeruginosa
atgcctgtgacctataccccgatcaacaagtgcgcccctggcatgtggccgatgaactacgctgccaggctggtcaagggggccactgacgtgatgtttgccatcggcactgatgaccgcaaaggcgcgcgtgcgcgcttggatgaccttgaggtgtcgatcaagatgcttcgcgagagccttaaccagatggcaatagctgacgaaacagcggctggcatccctgacgactga

SEQ ID NO: 360167 - DNA, 162 bp, Pseudomonas aeruginosa
atggccgttggcggtttgagtggcctcgatgaaaaactcaaggcagagtatggatacagtgcgtctgacgttttcatgaaatcggtcagctccggtgagccgatggagcaaagtcatgcgcggctacacgccaagcattgcggcccaaagcgggtcaagtaa

SEQ ID NO: 360168 - DNA, 618 bp, Pseudomonas aeruginosa
atgccggagacaaagccgttaacccgtatgatcccgtcgggctacgatgacgggcagatcgagatcgacacctaccaacaaaagcactggccggaaaatcaagagttggtggctgagcgcttcccgctcaatcccatcttgcgtgactggttcgaccagaccccgaacgataagcgcgagcccttggagcttgagcactggtgggatttgccctttatcgtgaccgatgggtgggaagactgcgaggcgcacttccgcaaccaccaggcgcggttgcgtgccgaaggtttcgacggtgcgttgtctgccgcgcaggtagaggcggagatcccggcgcgcaaggcggaatggttcaaggcatggccaactggcacgcgctacgaagtgcgctgcttggacggtggtgcctgggaccgctccacgaactggggggatggtgggcaccttggaagaggccgtggcgaggtgcattgtcggtccgacctggagacgagcgttggatgcaatgggcgatgctcagctgtcctcggccttaggcctctaccgcaaagaggtgcgcggcgcccttggcctgccgccggcaccagggcccaccattcaagaggaatgatcctgtga

SEQ ID NO: 360169 - DNA, 303 bp, Pseudomonas aeruginosa
atgatcatcaagctgtcaccgtacgctccactgccaggtagcgacgagcgcctggtgctggccagggtcggcgatgtactcaccgtgaacgggcagccgttcgatttcacaccgctcccggatgccggggagttgccggccgaggctgtcgggtcagagtggttcgtcggctttgttgtgcgacgtgccggtcgcgttgagctgagtctgcgcttcccgctcaccgatgatgccagcgctgccgcacgcttccctgaaccgttgctgatcgaggccgatggcccggtggagttgccacgatga

SEQ ID NO: 360170 - DNA, 297 bp, Pseudomonas aeruginosa
atgacgaacgaaaccaagacagaccgccagcgccgcctggcgcgggaacgccaacgggcgaagcgcgagcgcgatgccctgcgccgcgctgcgctgggcggtcgccgcttcaacatggacatgtaccagggaacggctgatgcactcgatctgatctgcgcggccggtggcttcgccgagccggccgaggcggtcaccttgctcctacacaacgttgccgaaattgcagagcgtgacgcgtcacgctttgccgaattgatccaaaagagaagccatccagggaggaccaagcgatga

SEQ ID NO: 360171 - DNA, 309 bp, Pseudomonas aeruginosa
atggcacgcaaccgcgcgcaacagctgtgcatcgtcaccttggactatcagcgcttcctgttaccccaggctgatgcactcaagctgatagacatcatgagtcgagccgcagaggttcaggccgactacgcctctggagctggattcaagtacaccgtcggcgaagtgccggaagtcgagttgacgatagtacgccccagtcaattggtcatgccgcaggccgagccggccccagctacaccacgcgctcgccggaagtctccggcccaggtcacgcacgatgccattcggctgttggaggggctctga

SEQ ID NO: 360172 - DNA, 378 bp, Pseudomonas aeruginosa
gtgatcgaggcgctgcgtgacgagccggacaaggagctgctggcgcggcgcctggcatcggaggtcgcgctgtcgtcggtgttggagaaagcgttgctgctccagcgcacgctgctgaccggcaagaaggaacccaacgtggcggcgaaccagctggcggtcgcggcggtgaaccacgaaagcgacacgctcgaccaggagatccgcaaccttaagaccgaactggaactgcgccgcgagctggccaacaactcgccgatggccatcatccagcgccacggcacgcgcgcggccggctcgcgcggcatctacgaaggcgacccggtgcccgaccgcctcgaccagttgcagaagggcaacccagggagccggccatga

SEQ ID NO: 360173 - DNA, 1713 bp, Pseudomonas aeruginosa
gtgaccccggtgctgtggcgcctgctgcgcacctatcgctggcggctggcggcggccatggggttgcaggccctggccgggctctgctcgctgttgccctggatgcttctcgcctggctcgccgagccgctggcgcgcggccaggcgcagccggccctgctggccctggtgctgctggcggtgctggcctggctgggctgccaggcgctggccgcgcacctggcccaccgggtcgacgcggacctctgcaacgacctgcgcctgcgcctgctggcgcacctgcaacggctgccgctggactggttcggtcgccagggcccggacggcgtggcgcgcctcgtggagcaggacgtgcgggccctgcaccaactgatcgcgcacgctcccaacgatctcagcaacctgttggtggtgccgctcgtcgcgttgctctggctggcctggctacacccctggctgctgctgttctgcctgctgccgctggtgctggccgccgccggcttcctgctgctgcgctcggcgcgctaccgcgacctggtgctgcggcgcaatgccgcgctggaaaggctctcggcggactatggcgaattcgcccacaacctgctgctggcccgacagtaccccggggccggcatacaacagggcgccgagtcgtcggcggcggccttcggcgaagcgttcggcgcctgggtgaagcgggtcggccacctcgccgcgctggtctacgtgcagttgtcgacgccctggctgctggcctgggtcctgctcggcgcgctggccctggatgccctcggcgtgccgctggcgctcggccaggcctgtgccttcctgctcctgctgcgggccctggccgccccggtacaggcgctcggccacggcggcgacgcgctgctgggcgcgcgcgccgccgccgagcgcctgcagcaggtgttcgaccaggcgccgctggtcgagggccgctcgacccgcgagccggtcgatggcgcggtggcgctgcacggcctgggccatgcctatgaaggcgtggaggtcctggccgatatcgatctggagctggaggatggcagcctggtggccctggtcggtccctcgggctccggcaagagcaccctgctgcacctgctggcgcgctacatggacgcgcagcgcggcgaactggagattggcggcctggcactgaaggacatgcccgatgccgtgcgccaccggcatatcgcgctggtcggccagcaggcggcggcgctggagatatccctggccgacaacatcgccctgttccgccccgatgccgatctccaggagattcgccaggcggcccgtgacgcctgcctcgacgagcgcatcatggccctgccgcgtggctacgacagcgtgccgggacgcgacctgcaactgtccggcggcgaactgcaacgactggccctggcccgtgcgctgctatcgccggcgcgcctgttgctgctcgacgagccaacctcggcgctggatccgcagaccgcccggcaggtcctgcgcaacctgcgcgagcgtggcggcggccggacccgggtgatcgtcgcccatcgtctggccgaagtcagcgatgccgacctgatcctggtgctggtcgctggccgtctggtcgagcgcggcgagcacgcggcgctgttggcggcggacggcgcctatgcgcgcttgtggcgtgaacagaacggcgcggaggtggcggcatga

SEQ ID NO: 360174 - DNA, 1599 bp, Pseudomonas aeruginosa
atgcgaccacgctctgccctgcgctacagcctgctgctgctcgccctcgccgccagcgccgccatccaggcccagccgaagaccctggcggtgtgcaccgaagcggcgccggaagggttcgatccggcccgctatacctccggctacaccttcgacgcctcagcccatccgctgtacaacgcgctggccgcgttcgctccgggcagcgccacggtgatcccggccctggcggaaagctgggacgtctccgctgacggcctcgtctacaccttccgcctgcgccaaggcgtgaaattccacagcaccgactacttcaagccaacccgcgaattcgacgccgacgacgtgctgttcagcttccagcgcatgctcgatccgcagcaccccgcccacgacctttcgcccagcggctacccctacgccgacgccatgcaactgcgcgacatcatcgagcgcatcgagaagatcgacgaacatcaggtgcgcttcgtcctcaagcacccggaggcgccgttcctcgccgacctggccatgccgttcggctcgatcctctccgccgaatatgccggccagttgatcgccaggggcaagggcgacgaactcaacagcaagccgatcggcaccggcccgttcgtcttcacccgctaccgcaaggatgcccaggtgcgctacgcagccaaccccgactactggaagggcaagccggccatcgaccacctggtgctggcgatcaccctcgaccccaacgtgcgcgtgcagcgcctgcgccgcaacgaatgccagatcgccctgacgcccaagcccgaagacgtcgccgcgttgcgccaggacccgcaactgacggtgctggaagaagcggcgatgatcacctcccacgccgcgatcaacacccggcacgaaccgttcgacgacccgcgcgtgcgccgggcgatcgccatgggcttcaataagccgtcctacctgaagatcgtcttcggcgatcaggcccgtccggccatcggcccctacccgccgatgctgctcggctacgacgacagcatccgcgactggccctacgaccccgaacgggccaaggccctgttgaaggaagccggcgtcaccccggacacacccctgaacctctacatcagcaccggcagcggccccggcggcaacccggcgcgagtggcacaactgatccagtccgacctgtccgccatcggcatccgggtgaacatccgccagttcgagtggggcgagatggtcaagcgcaccaaggccggcgaacacgacatgatgctctacagctggatcggcgataacggcgacccggacaacttcctcacccacaacctcggctgcgcctcggtggagtccggggaaaatcgcgcgcgctggtgcgacaagggcttcgacgaagccatccgcaaggcgcgcatgagcaacgacgagagccaacgggtagcgctgtacaaggaagcgcagcggatcttccacgagcagatgccctggttgccgctggcgcatcctttgatgttcgacgcgcaacgcaagaacgtcagcggctaccgcatgagcccgatgtcggcgcgggacttttcgcgggtgaagctggactga

SEQ ID NO: 360175 - DNA, 1218 bp, Pseudomonas aeruginosa; identical to SEQ ID NO: 320835

SEQ ID NO: 360176 - DNA, 738 bp, Pseudomonas aeruginosa; identical to SEQ ID NO: 334368

SEQ ID NO: 360177 - DNA, 222 bp, Pseudomonas aeruginosa
gtgcagcctggcgcgcgcctgctactgcacgccgagggcgacgggcaagtgcgcgccgtgctggaacgcatcgacgccatcgaggcgctgggcatcgcgcctgtcgccgtctcgcccgcgtactggcgcacgctcgccaaccggctcgctgcgcgcctgccgctgcccgagtacaccgccgagcggcacgccgcctggttggccgggagggtgctgccatga

SEQ ID NO: 360178 - DNA, 420 bp, Pseudomonas aeruginosa
atggctagtgagcatgatatggcaattgaggcacgcagcgcgacatacgcagacgctggcatgggcggcacggcccccaagacgaagaagccggccgctgtgaagcgggccaccggcaaggcaaagaaaggcgctcccctgcgcaccatcgacctgttctgtggtgcgggcggaatcactgagggcttccggcaggcgggctatgtgagcctgtacggcaacgacgtgatgcccgaggccatcgagacattcaagctcaaccaccccgaggccatcgcggactgccgcccgatcgaggaggccgatcccgccgaaatccgggccaagctgggcttggagccgggcgaactggacgtgcttgtgggcggccccgccgtgccaaggcttctcgatcaacgcgcccgaacgcttcctcaatga

SEQ ID NO: 360179 - DNA, 1761 bp, Pseudomonas aeruginosa
atgagcgcaacgcagaagaacaacatcacccgccttgagcagctcgaccgccagtcgacgcagcctttcccgaactcgcgcaaggtctacctgaccggctcgcgcccggacatccgcgtcccggtgcgggaaatctccctcgccgacacccccaccgccttcggcggcgaaaaaaacccgccggtgttcgtctacgacacctccggcccgtataccgaccctgaggtccgcatcgacctgcgcaagggcctgcctgatgtgcgttcgcgctggatcgacgagcgcggcgacaccgagatcctccccggcctgacctccgagttcggccaggcccgcctggccgacgccagcctcgacgccctgcgcttcgcccacgtgcgcacgccgcgccgggccaagccgggcgccaacgtctcgcagatgcactacgcgaagaaaggcatcatcaccccggagatggaatacatcgccatccgcgagaacatgaagctgcaggaagcccgggccgccggcctgctcgaccagcagcacccggggcacagcttcggcgccaacatcccgaaggaaatcacccccgagttcgtccgcgaggaagtcgcccgcggccgcgcgatcattccggcgaacatcaaccacaccgagcttgagccgatgatcatcggccgcaacttcctggtgaagatcaacggcaacatcggcaacagcgcgctgggctcgtcgatcgaggaagaggtggagaagctcacctggggcatccgctggggcgccgacacggtgatggacctgtccaccggcaagcacatccatgaaacccgcgagtggatcctgcgcaacagcccggtaccgatcggcaccgtaccgatctaccaggcgctggagaaggtcaacggcgtcgccgaggacctgacctgggaaatcttccgcgacaccctgatcgaacaggccgagcagggcgtcgactacttcaccatccacgccggcgtgctgctgcgctatgtgccgctgaccgccaagcgggtcaccggcatcgtttcccgcggcggctcgatcatggccaagtggtgcctggcgcaccaccaggagaacttcctctacacgcatttcgaagagatctgcgaaatcatgaaggcctacgacgtcagcttctcgctgggcgatggcctgcgtccgggctcggtggccgacgccaacgacgccgcccagttcggcgagctggagaccctcggcgagctgaccaagatcgcctggaagcacgacgtgcaggtgatgatcgaaggtcccggccacgtgccgatgcaattgatcaaggaaaacatggacaagcagctggagtgctgtgacgaggcgccgttctacaccctcggcccgctgaccaccgacatcgcccccggctacgaccacatcacctccggcatcggcgcggcgatgatcggctggttcggctgcgccatgctctgctacgtcacgcccaaggagcacctgggtctgccgaacaaggatgatgtgaagaccgggatcatcacctacaagatcgccgcccatgccgccgacctcgccaagggccatccgggcgcgcagatccgcgacaacgcgctgtccaaggcgcgcttcgagttccgttgggaggaccagttcaaccttggcctggacccggacaccgcgcgggcgttccatgacgagaccctgccgaaggactcggccaaggtcgcgcacttctgctccatgtgcggaccgaagttctgctcgatgaagatcacctag

SEQ ID NO: 360180 - DNA, 1206 bp, Pseudomonas aeruginosa
atgaacgccaacaacaaagcgctaccagaaacaacagatgtattgatcgtgggcaatggtccggtgggtgcagcattagctgcgctgctcggccgttatggcgtacagacccttgtgatcgacaaggtccatgacgtcctgctgatgccccgcgccattgccctcgacaacgaggcactgcgtatcctgcagctggccggcctggcggaagacgccttcgagaaaatagtgatccccgaagtgcgcatgcactgccccatggtcggccagttcggccgcgccaacactgcgggcagcctcgacggccaccccaagctggtgaccttctaccagcccgacctggaaggtgcgctgcgcgtccagtctcggcgcttcgccaacgtggcgagccgcggggggtgggagctggaaagtctgcagcaggacgacgacggcgtgctcgcccggctgcgcagcgaactcggccaaagccatagcgtacgtgcccgttacctgatcggcgccgatggcgccagctccagggtgcgcggcctgatcggccaggaatttgaaggccacagctacgccgaggactggctgatcgtcgatgcctgcgggcgcgagcggcaggccatcgaccatgtcgagttcatctgcgatcaccgccgccccaccccgcacatgccggccccgggtggccgggaacgctgggagttcatgctgcagcccggcgagacgcgcgagcagatggaagacgccgagcgcatcggccaactgctggaacgctggatcgagcccagccagctgaacatcgagcgcaaggccgtgtaccgcttccacgcacgctgctgtgaacgcttccagaatggccgggtgttcctgatcggcgatgcggcccacatcaccccgcccttcgtcggccagggcctggtagccggcctgcgcgacgccgccaacctggcctggaaactggcctgggtgctgcagggccgtgccgcaccggcgatcctcgacagctacgacagcgaacgccggccgcatgcccgggagatgatcgacctggccaagttcatgggccgcctgatcatgccacgcaacgcctggctggcactgttcgggcatggcctgatgcgcgcgctcagcctgatcccccctgcccggcggcacttcgaagagatggatacaaatcatctgctttcttctccgagatatctgaagcagcaatga

SEQ ID NO: 360181 - DNA, 738 bp, Pseudomonas aeruginosa
atgccaagccttaccaacgaacaattgccagcccttgccgctgccttgatacgactgcgcggggaaacgctggggcggatcgccgaggccaccggtatccgcactgccaacctctcggtctggctgcgtggcaaggagcaggtgatctccgccaaacgactggtcggcctgttgcaccacctcggtgtggaaggcggccgcctgcgtaccgacgtgttgcacccatggcaggatcgcggggcactgaatgacagcaagctcgtgctgggcacgctgctggccatcaaccagccggtgtggttgtttcaggatgaacagtctgggctcattaagacgcgctttctgttggcaggcgatgtgctgatccgcatggagatcgagccgggtgtcgatcaagccctagatttggcgacagtcgtcagggtggatcgtgtcatcaccacgcctacggcattggcaggggtgccaatcgactcgatggcatcagcacacaacgtcctcgtggcgctggcggagcaggtggcggcggacgtgggtgacgaagagctgctggaagggctgatttatcgcctaaccgaaacagtaggcagtagtgtctcttcagtacagggctggcatcaactggagcaagcgctgcgctttgcattcaactcaggaacccagcctggcgacatcgcccgcgtggttgacgcccatttccgccgcagcggcaacgcggacatgccgccaactggttga

SEQ ID NO: 360182 - DNA, 2010 bp, Pseudomonas aeruginosa
gtgacccgcctggaaaacgacgctggcacgctgatcgccgaacgcggcctgaagctggcggccgatgaggcgaacaattccaaggggcgtatcgtcgccaaggatgaactgcgtgccaaactcggtgcgctggtgcagaacgggggagagctgacgactcagggcgcgctggccctcgacgccgacaaagtcgacaacggcgctggtcgcatcgccggcaaccgaggtgtggtcatcgatgcccggcaggtggacaaccgtgccggcgagattgccagccagggcgtggcgacgctgaatctcactgagcaactggacaaccgtggcggcaaagtcgttgctgacagtggtctgggcatcaccgcgccacgcgtgctcaaccaggacaagggagtaatcgccagccgcgatgggctgcgcctgagtggtaccgaattgctcaatggcaatgccggactgctcagcagtcagaggcatatagaggtcactctggacggcgtgctggacaatcagggcaagggcgcgctgctcagcgacggtaccctgacggtgagcgccgggcgcatacacaaccaggacgccactctgtccagcgccggtgcgctgagactgagcagccaggaggcggtggacaaccgtggcggcaagttggtgacggactccagcctgcgcctgaccagcgccagcctggataacagccgatcagggatcatcagtgccaacgctgcggcggagatccataccggggttctgaacaacagccagaaaggcaatcttggcagtaatgacgggctcggcctgattgctactgaggtggataacagccaggaaggccggatcactgccaaaggcatgatcgacgcaaatatcaagggactcgatcagcagggcaaagggcggctggtcagtaatgccggcatcatactcgacctgaacgagggaaccctggccaatggcgctcagggcctgatcgccacgcctggaaccttgctcctgcgccaactcggcatggtggacaacagcggcggggaaatttccagcgaccgagccttcacactcaccacctccgcgctgaccaaccagggtggccgcctgcgcagcggcggtgtactgacgttgcgcatcgcccaggctctggacaacagcctcgaaggtgttctctccggcaccggaggcctggatatccgggcgcttgccctggacaaccgcagtggctccatcggcagcaagggcgccgtcgatatcgacgtgtcccgtttggaaaacgatgacggcgacctgcttagcgaaggtcgtctgaaactgactgccgagcgagcgaacagtgtcaggggacggatcgcggccaggggtgacctgcacgccagcgtgacagcctttaaccaggcgggtggcgaattgagcagcgagggtgcgctgatgctcgaggctgatagcctcgacaaccgcagcggcggtctggtcagtgctgatggcaacctgaccgtttccgcccggaggatcgacaaccgtgcgggcgaaatcgccagcccgggccaggtgacactggacgtcgccgagcagttggacaaccgaggcggcaaggccatcggcgatagcggacttcgcctcgccgcgccacgggtactcaaccaggacggcggggtactcgccagtcgtgatgggctgcgcctgaatggcgccgaactgttcaatggcaacggcggcctgctcagcagccagcaaagcatcgacgtcattctggacggcgtattgggcaatcaggcgggcagcttgagcagccagggacgcctgagcgtgaagagcggtcggctggacaaccagggcggtgcagtctccagcgccgggaccctgtcgctttccagccagggtgcgttgaacaaccagggggggcagggtggtcaccgacgccggtgccgtcctgcgcagcgccagcctcgacaacagccagggcggcatcgtcagcgccaagggggccgcggagatccgtactggcagcctcaacaatag

SEQ ID NO: 360183 - DNA, 2430 bp, Pseudomonas aeruginosa
gtgatcggcctgaacgaactgcaggtccaggctgccgcactggacaatcgcagtgccggtctcctttccagcaagggagacatggacatcgaggtcgctcgtctggacaacagtgcgggcggcaagctggtcagcgagcgccgtacgctcttgaaggcggatcggctcgataatcgcagcggtcgcattgtcgccggccaggatctcgacttgagctctcggttgatcgacaaccgagcgggcgatatctccagcacgtcgagggtggtggcgagcgctcgcgaacagttggacaaccgcggtggcaagatcgtcggtgacagtggcctggacatcacaacgccacgcatgctcaaccaggacaagggggtactcgccagccgcgatgggctgcgcctgagcgctacggagttgttcaacggcgggggaggcctgctgtccagccagaagggtattgacgtctccctggccggtgcgttcgataaccaggccggcagcctggacagccggggcttcctgacggtgaagtcagcccggctcgacaaccagggcggtacgctatccagcgcaggggcattggcagtgaccagccagggcgccctgaacaatcagggcggcagactggcgagcgacgctggacttagcttgagcagcgccagcctcgacaacagccaggccggtgcgatcagtggcaagggggccgtggagattcgtaccggcaacctgaacaacagccggaaagccagtatcggcagcgatgcgggactcaccctggtcgccgctcgggtagacaacagccaggcgggccggatcgctgccaagggtgcgatcgatgcggatctccaagggctggaccagcatgacaggggcaacctggtcagcgataccggcatcacgctcgatctgaacaagggaagtctggtcaatcgcgctcaaggcctgatcgccacgcctggcactttgctcctgcgccaactcggcgtggtggacaacagcggtggggaaatctccagcgaccgcgcgttcactcttgccacctccgcgttgaacaaccaggggggacgcctgctcagcggcggagccctgaccttgcgtatcgcgcaggccctggacaacagcctcgcggggattgtctccggtgccggaggtctggatatccaggcattcgtcctggacaaccgtagtggctccatcggcagcaagggcgccatcgatatcggtgtgacccgcctggaaaacgacgctggcacactgatcgctgaacgcggcctgaagctggcggccgatgaggcgaacagttccaaggggcgtatcgccgccaatggtagcctgcatgccaaggttggcacgctgagccagaagggaggagaactgaccagtcaggactcgctgactctcgacctgggcatcctaaacaataacgctggccgtatcgctggcaaccagggcgtagacatcacggcccggcaggtggacaacagcgtcggcgagattgccagccagggcgtggtggcgctgaacctcactgagcagctggacaaccgtggcggcaagatcgtcggtgacagtggtctgggcatcaccgcgccgcacgtgctcaaccaggataagggggtactcgccagccgcgatgggctgcgcctgagtgctacggagttgttcaacggcgcggggggcctactgtccagccagaagggtatcgacgtctccctggccggtgcgttcgataaccaggccggcagcctggacagccggggcttcctgacggtgaagtcagcctggctcgacaaccagggcggtacgctatccagcgcaggggcattggcagtgaccagccagggcgccctgaacaatcagggcggcagactggcgagcgacgctggacttagcttgagcagcgccagcctcgacaacagccaggccggtgcgatcagtggcaagggggccgtggagattcgtaccggcaacctgaacaacagccggaaagccagtatcggcagcgatgcgggactcaccctggtcgccgctcgggtagacaacagccaggcgggccggatcgctgccaagggtgcgatcgatgcggatctccaagggctggaccagcatgacaggggcaacctggtcagcgataccggcatcacgctcgatctgaacaagggaagcctggtcaatcgcgctcaaggcctgatcgccacgcctggcactttgctcctgcgccaactcggcgtggtggacaacagcggtggggaaatctccagcgaccgcgcgttcactcttgccacctccgcgttgaacaaccagggggggacgcctgctcagcggcggagccctgaccttgcgtatcgcgcaggccctggacaacagcctcgaggggcttgtctccggtgccggaggtctggatatccatgcattcgtcctggacaaccgtag

SEQ ID NO: 360184 - DNA, 198 bp, Pseudomonas aeruginosa
atggccacgggcaagaccgccacgttgactttccggatcgatcccgagatcaaggaggcgttgcgcgctgcggcgaacctggagcaccgctccatcgccaatatggtggaggtgatgattcgcagctattgcgagcagcgtggcatcgcaatcccgacccccgaggaagccaaaaacaacgatggagtgcgctcatga

SEQ ID NO: 360185 - DNA, 3126 bp, Pseudomonas aeruginosa
atgatcaagacggtcaggcaggcctgccgcttcaacccgatcatccgggactaccggatgagtcaaggtatcgaaaacctggcagagctaatcaatgacgagggtgacggtcgcgagttcttctcgcgaaactacgtcactcacggcatggaacagctcttcagggaagggctgttgcgactgtctggcaagtcggatcaggcggtgttcgagctgagccaagccatgggtggcggtaagacccacatgatgatcgcactcgggttgctggcccggcatccgcacctgcgttcagaggtgctgccggaggatctgagcggacgaatcgactctggtcaggcccgtatcgccgcattcaacggacgcaacaacccggacaactacatctggggtgagatcgccagccagctcggggccgaggatgccatcaaatcccactgggtgaacggtcccaaggcgctcgatcagcgcaagtggaaggaaatcatcggcgacaagcccacgctgattctcctggacgagctgccgccttatctcgacaacgccagtacccaggtgttcggccagggcacgcttgccaacatggtggtgtacagcctttccagcctgatgagcgccgctctcgagctgcccaactgcgctatcgtcatcgccaatctgtccggtagctacggcgtccagaccaaggcgctgcgtgaggccatctccaacttacaacaggaaacgcgccgacaggcgatgaccatcacgccggtgcaactggccgggaatgagatctacgagatcctgaagaagcggctcatcgacgatctgcctgatgagcgcgtcattgccgacgtcgcggaggaactcgcccagcaggtcaagaaggcggaggacggtggctacatcgtcgccagcagcatcgagcagattgccgagcaggtccgtgagacctatccgttccatccttctttcaagcatctggttgcactgttcaaggagaacgaaggcttccggcaaacccgcggcttgatgcagttcacggcgcgcctcctcaagagcgtcgaggaccgagaagccgatgacgtcttcctcgtcggcacccagcacctcaatctcaacgacgaacaagtcaaggacgaaatcgagcgcatcgcgccgaagttgatccccgccgtgacgcgcgacatcgccgacagcggtagcgccattgccgagcgcatcgacgacgagctcgggggcgatgccgctcagcaggtcatgacgctgctcttggcgtccagcctctcccgtgccgtgggcggccggatcggtttgtcggaaagcgagctgaccgagtttctggccgcgcctcagcgcaagccggatgagttcctccaggcgctgcagcgtttacgtgagtcggcttggtacctgcaccgcgaggaacagcgattcttcatcaaagaaaccgagaacctgtcgcgtcagatcgagcgcaatgctaaagaggtgccccagccgaaagtcgatcaggcactcatcaaccggctgaccggcatcctgcaaccggaacgcaagattgcgtatcaggatgttcaggtactgccgaagctggatgaacttcggctcagcgggccgcgcacccttatcgtgatcaagcccgatggcaaggtgccgcccagccagttgcagaactttttcgactaccagcaagagaaaaacaatctgctggtgctcaccggtcaggacagtctgctggccgatgcggtcgaagagcgcctgcgagagctttatgccatcgaacagatccacaagcgcttgaagcctggagacactctgtacgaggaggcgcgtgaccgactggaagaggccgaggaccgcttcaccaaggcattgtcggcggcctacaaccgtctgtatttcccggtgagcgattccatggatggccgcgacgtgttggtcagcgtcaccatcgatcagggactgaaacttggcaaggaggagcagtcggcagaggcacagctcgaaaccctgctcgccagtccgcgcgccgattacaagctggtgcgcgaactgaccaaggacaaccagggcgaatacttcgcgatggcggaggaatacctctggccatccggcagggacaacaggcgcacgccatggaaggacgtggtcacccgagccaagtgctcccccatctggccttggatgccgggcgcgagcggtctggacgcgctcaaaacagaggcgctcaagcaggggcgttggcggctaggtgaagacggctacatcgagaaaggtccgtttccgaaggacaaggccacggtcaacgtttccgtcgtcaacgtcaaggcggatacggccgagaccgtgctgagcctgacgccacgtcacggtggtgatagccccgtcgtctactattccaccaagccggacgtctctgaaagggatcagaaggtcgaggatctggacaacttcgcgacgggtgaaggcactctgtacttctgggtcaaggaaccgaccggccagtacgacagtgcgccgccggtgcgctggctagccgacctcaagatccgccatcaggtggaacccgccgcagacaagcggtacgtgcgtctcgaagcggcgccgagggccgaactcttctacacgctggacggctcgaaccccaaggacggcatccgttacgacgatccgttcgagatcggtccgggaagctaccggctgctggtttatgcgcgcgccggcgacgccaacaagacagccgacttccagattcctgccagtggcgacaagacggtgcagatcgtcgatgccaagccggcaaggctccaaggcaagaaggtcgcgctcgacacgaccgaccgcgtgtttggtgtcatcaatcggttcagggatcaaccggcgacgctgttcaaaggtgtgcgcgtcgagatcggcgagggcgagaacaccgtcaccgtgcgtttccaggagcgtcaagtcactgccgcggtgatcgaaggtgtcgtcaacagcatccgggaggttctgaaggaaccggaggcactggtcaatatcgccatcgccgatggcattcacttcgacaccggcttcgccatgaaggagttcgccaagctcgccggcatcgaactcaagcccggtgatgtgagccaagaggaatga

SEQ ID NO: 360186 - DNA, 630 bp, Pseudomonas aeruginosa
atggcgcgagccaaggtcgccaacgacaaagctgaaccgaagcgtgtgcaatcacagcccacgctcggttttggcgtgcctgcgacctcggacccgcatcatttcaaggtgctcatccccaagaacagcataggcaaggttcagatctccgaatacctggggctgcaagcggccgccagcgacaacgcggtcatcgaccgcgtgctgctcgatcgttcccggtggacagccatccgtgccgaggtgcaacgagcgttcaatgcgagattggccgcccacagcctgaagcccagcgcctggaaggtcggggaaaacctggtcgaccgtctcttgggcaaagagttgtgtgtgcttgcctgggccgtggaacggatggatacggacaagattccggtggccgtgcgcaactggctggcgttgcggccggaggaacgctggtggctgttcggaatgaccgccatgaccaccggcggcgtgctcgatgccggcaagggctggcgtgcggccctgcagcatgccttgggcgatgttgcgcaaagcgagttgctggctccgcatgctcgccggggacgacacgacagcacggagtctcggcccacgctggatctattcggagacgataacaggtga

SEQ ID NO: 360187 - DNA, 2796 bp, Pseudomonas aeruginosa
atggtcgcaacgattgccgaacagccgaatgtttggccctatccgggctcccgctggtggaagttcgactttcacacgcacacgcccgtgtcgctggatacgccatggcatcggcaaaacctcgatctgtcgccagagcaatggttgctcagattcatggcggccgaaatcgactgtgtggccgtgaccgatcacaacagcggcgcctggatcgattcgctcaggacagcttacgagcaaatgcgagccaacagcccggaaggcttccgcgacttgaccctctttccgggcgtcgaaatttcggtgcagggtggctttcatctgctggccctcttcgatcctgcggccacgactggtgacatcgataccttgctcgggcaagtcagctacaacgggaccaagggtgacagcgacggcgtgacgcgccgcggtgctggcgaggtggttcaggcggtgttggagtcgggcgggcttcccatcctcgcgcatgccgatggcgacaaagggctgctggcagtgcgcgaaggcacgcgcgagtgccggctcgacgcgaatacggtcctggaggcactcgacaccgatgggctcctggccatggaatggctcgacatggcgaagccgctccccgagcgcgtcgagaaacgggcgagcaaactcgctcgcgtgctcggcagcgactgtcacagctttcaaggcaacggcggggctggctcacgctatacctgggtcaagatggccgcgcccaccctcgaaggactgcggctggcgctgctggacggcaatggcgtttccatccggcgtagcgatgaagggcccttcgaaccgtttaggacgccagcacacttcatcaccggcatcgaggtcgagtcggctcgcttcatgggtaacgggcaaccagagcggctcgcccttacgccctactacaacgccttgatcggggggcgcggcaccggaaaatcaaccgttgtccatgcgacgcgcctggcgttccggcgcgatgacgatctgaagcatctgaccgaaaagagcgatcctcggcgccaattcgaggacttccgaaaggcagtcaggggacgggatggcgacggcgcgttacgcgagaacaccgaaatccgcatcgaactgatctgcgatggtgttccacaccgcctgcgctggcgagcggacggtcaaggcgatgtagtcgaggagcgtggtgaaaatggtcaatggatggtctcggcgagtcaggccatccatgccgagcgcttcccgatccgtttgttttcgcaggggcagattgccgcgatggccggcgacagccgccaggcgctgctcgacgtcatcgaccaagcggccaacatcgcgccggtgcaccgcgcgttcgaggaggccaagcgcgcttacttcgcccaacgggcgaagctgcgcgagctcgatggtcacttgagcggtggccccgagttgcagcgcaagcatgcggacctgaaccgcaagatcgaggccctggcgcaatcccaccacgccgaggtgctcaaggcgcatcagcaggcgcaacgacagcaccgcgaagtggggcaggcgctcgaacagttgcgcgccttgcctgcgcggatcgaagccttggcacaggatcttctgctcgacgactggcccgatggtgccttcgacgtgtcgcaggatgccgatgtcttggcttggcgacatgacgccgaggctgcaatggcggaagtgcgcgacgcgctgtcccgtgcagcgactgcgttgcgtgggcggacggatgcgctaggtgcagatgaacggctggcgacttggcgtcggcgtgtggacaaggcgcgggaggcttatgaggcactccaagccgcattggcagcgcaaggcgtggccgatccgcaggctttcggccgcttggtacaggagcgacagcagctcgaagcgcaactgaagcagttggagcagatcggacgcgaccgggagcgcctgcaggcggagaacgacgagcaatggctgcgcgtggcgcaggcgcgtgccgccatcagccaggcacgttccgcctttctgggggatgcgctgcgtgccaacgagtttgtgcgcatggaggtggtgccgtccggcttcgacgcgaggatcatcgagcgcgacctgcgcgagctgctcgatgtcgccggcgaccgcttcgaaggggacatcctgcaattgcgtgacgatgaaccggtgggcggtttggcctttgatctggcgcaggcagatgaccgtgcgcgaaccttgcaggtcatcaagcagcggctgatcgacatcgatggcggtttcggcggtcatttccgcaactacctgcagcgcaagctggaaaagcccgagttcgccgatcacattcgctgctggttcccgacggacgacctgcgcatcgaatacggccgcaccggcaatgggcgagactgggccgccatatcgcagggctcgcaaggtcagcgttcggcggccttgcttgcgttcctgctcgccttcggcgatgaaccgctggtgctcgatcagcccgaggacgatctggacaaccacctgatttacgacctgatcgtgcgccagatccgggcgaacaagctgcgccggcaactgatcatcgtgacccacaatcccaacgtcgtggtcaatggcgacgccgagatggtccatgccttcgattttcgcggaggccagtgtcgggtcgtcgagcgcggtgcgttacaagagctgacggtgcgcgaagaagtgtgtcgcgtgatggaaggcggccacgaggcctttgcacgccgctgggcgcgcttgggccgggagctttga

SEQ ID NO: 360188 - DNA, 1272 bp, Pseudomonas aeruginosa
atgctggcgaccagaagcgaactcatcgacaagatccgcctcggcgaagacagcttcctgaagctgaaagaagtgcgcttcgccgggggcaagatcaggggacccgagcagaacgatctggccgacgagctggcggccttcgccaacagccgcggcggggtgttgttgctcggcgtgcatgacaagtcgcgtgaggtcctgggcatccccgtggaccgcctcgatgcggtcgaagccttggtgcgccaggcttgcgaagactccatccggccgccgctggcgcccgtcatcgaacgcacgaccctgcccgacgcggcgggcgtcgaacagccggtgctgcgcatggaggtctcgcccagcctgttcgtccaccagagccccggaggttacttccaccgggtaggctcctccaagcgccccatcccacccgaacagcttgcacggctgttccagcagcgcagccaatcgcgcctgatccgtttcgatgaaacgcccgtagcgcaggcaacactggatgagcaggaagaggcgttgtggcggcgcttcgcgagcagcgctacccgagagccccctgagcggctgttgtccaagctggcgatggcggcgcaggacgacgctggcacctggcggccgacggtggccggtattctgctggccagccgtgatccccagcgccatatcccgggcgctttcatccaggcggtcgcctatgctggcgtgggcgtcacgccgcagaccgcagccgcctaccaacgtgacgcgttggacatcaccgggccgctggaccagcaaatcttcggcgcctgcgatttcgtgcgcaagaacatgcgcatggcggcccgcaagggggcgggcggcggacgggaagatctgccgcagtacgacctgttggccgtattcgaagccgtgaccaacgcagttgcccaccgcgattactcgatggcgggcagcaaggtacggctccggctgttcgacgatcgtctagaaatctacacgccgggcatgctgcccaacaccatgacgccggaaagcctgccctaccggcaggccgcgcgcaacgaggcgatcaccagcctcttggcgcgctgcccggtggagcgagaagacgtggcggcccatcggacccacatcatggacaagcgcggcgaaggcgtgccgatcatcctggagcgcagcgaggcgctgtcgggcaagacgccggagtatcggttgatcgacgacagcgaactgctgctgaccatctacgccgcagcagaaccggaacaagagtga

SEQ ID NO: 360189 - DNA, 2970 bp, Pseudomonas aeruginosa
atgagcatgctcgatgaaaccttgatacaacaacccgaactaacggtgaccggagccaccttgcaacccttggctttgaaagatgcgcccgcgctgatcgagacggttttcccggcgcagaaggtttcgttcgaagcgcagaaggaacgcaaggcgaatctcggccagaccttgactggtctcggctcctactggaaaggccgcaagccgctgattctggtgcgcgccatcgtgttgggcagtctgctgccgcccaccgacgatgcggaagccgacctcgccatcttcgagaagctgatggccttcgacgacgaaggcttggcgcgccgcgcactggtcgccaatgccttctctgcggccaagttgcaggaactgatcccgatctccgatccggagcgctatttcggcgggcgcggctggcggcgcgacatcacggacgacgacaagctcatcctctatcggcaggcgctggcaacactgcccagctacgaagaaaaggcaggtatcagcaagcgcccggaagaattggatcaggattggctcttcgccccggtatggccggaagtcaatcgccactacgcgcacttgggcgtgaatgcgcattcgctgccggaactggtcgaacagctcggcatcctgcgctacggccaccgcccgcgcgtgggcgacaccttcagcggcggcggctccattccgttcgaggccgcgcgcatcggctgcgacgtctatgcctccgacctcaaccccgtcgcctgcatgttgacgtggggtgccttgaacatcatcggttccagcccggagcggcgagccgaaatcgagcaagcgcaggaacgtgtcgccaaggccgtggatgcggagatcacgaagctcggcatcgagcatgacaaacaaggcaatcgtgccaagtcatacctgtattgcttggaagcccgctgcccggagacggggtggatgattccgctgtcaccctcgtgggtgatttccaagggcaggaacatcatcgctcgcctgaagccggatcaccgcaacaagcgtttcgacatcgaaatcgtcagcggcgtttcggaccaggaagctgcagcagccgatcaaggcacggtgcaggaaggcgacatggtctatacgctggacggcaagacctatcgcacgcctatcaagacgctgcgcggcgactaccgaaacgccaatggcagcacgggcaatcgcctgcgccgttgggaaaagagcgacttcaagccgcgccccgacgacatctttcaggaacggctctacgccattcactggatcaccaaggcaacgctgaacaagtcgcggcaggaaacttggttcgccgcgccgaccgacgccgattgggaacgcgaacgtcaggtggaaacgctcgtcgccgagaacctgagccgctggcaggacgaaggcttggtgccagatatggccattgagcacggggacgaaacgacccgtctattccgcgaacgtggctggacgcactggcatcacctgttcaatgcccgccagttgctgctgatctcgcgttacttccagcatcgcacgccggaagactacgtgttcaacgcgaagtcgctggactggaactccagaatcgccaactggatgaaccattgggagaagaccaacaacgtcttctacaaccaagcattgaacacgttctacaactacggcatccgttgcttcgccagccacgaggcgggtcgctcattcggcttcgcaaacagtccactcccgaatattcacagccaagtcaggtgcctcgatgcgaccacgttgcaagatgacgcggacgtctggatcaccgacccgccgtatgccgatgcggtgaactaccacgagatcaccgagttcttcatcgcgtggctgcgcaagaacccacccaaaccgttcgacgaatgggtatgggattcccggcgcgcgttggcgatcaaaggctcggatgacgattttcgccgtggcatggttggtgcctacaaggcgatggccgagcacatgcccgacaacgggatgcagtgcgtgatgttcacgcatcaggacaccggcgtctggggcgacctgatcggcatattctgggctgcaggcctgcaagtggtggccgcgtggtacatcgccacggaaaccaatgccgccatcaagaaaggtagcttcgttcaaggcacggtcatcctgatgctgaagaagcgcgtcgcaggcgaacgcaccggcttcaagcagcgcctactgcctgccgtgcggcaggaggtggccagccagatcgaaaccatgatgcacctgaacgacacggtgaaggcgcatcatggcgagccggtgttcaacgattccgacttgcagatggcgggctacgcggcggcgctgaaggtgctgaccgcctacacccacattggcggcgaagatgtcaccagcttcgccctgcgcccgcgcgcgcgcggcgaagtaaccgtggtggacgaaatcgtgcagcaggcggcggagaccgcgtccggcctgttgattcccgaagggctgacggcggatacgtgggccaatctcgcagggatcgaacgcttcgtgctgcggatgctggacatggagactaccggcgcgcagaagctcgacaactaccagaacttcgccaaggccttccgcgtggaagactacagccgcgtgatgggcgacatgcggcccaaccacgcgcgcctaaagcgcgtcaccgagttcgcgtcacgcgatctcaccgagtccacggagcttggcgccagccgccttggtcgcctcgtcatggcgctgcagcagcgcctcaaggacgtagaggcccaggccatcatcgatcagatccgccatgagatggccgacttcctggaggtccgccccttgctcgcggacatgctcgccttcatcgaacgcaagtcgtcggaggacgaggtccgcaccgcagccgaggtgctgagcgcacggcttaagaacctgcggtttggtgcatag

SEQ ID NO: 360190 - DNA, 2736 bp, Pseudomonas aeruginosa
atgacgatccggcgcttctcctcgcgcatccaccggctcgatgccagcttcctgatggggcacctcgctggggcgcgcagctacaagcgcatcgcgggctatttcaccagctccctgttcgaggtggccggtgaagtgctggaaggtattcccgaggtgcggatcgtctgcaacgtcgatattcatccggacgacctcaaagtcgcccaattgcgcgagagcaatatgctcggccgctggaacgagcgggctctggaggccgaagcgttgctgcaccgcgaccgctaccggcggctggatgccttcctgcagaaacacggccaagccgtgcgggtggcgccggacgagatctgcggcttcgtgcatggcaaggcgggtgtcatcaccctggccgatggccgcaggctcggcttcatcggttcgatgaacgagacccgcagcggctggcagcgccattacgagattctgtgggaggatgaatcgccggagggtgtggcctggatcgaggacgagtttgagttcctctggaatgcggccaagccgctgccgcaggcggtgattcgtgaggtgcgccgacgcggttatcgccgcgaggtggtctttgacgagatcgacgaggacgagaacctcgcgcccgcggcgctgatcgaatccccgctctatcgcgagggccagcagcttcagccgtggcagcagggcttcctgaccgaggttctgcgccaccatcgtctgcatggctatgcgcgcctgctgcttgctgacgaggtaggtctcggcaagacgttgtcgctggcaacggcggcactgacgctttgcctgctggcggacaaggaaaacggcccgcgtcgccccgtagtgatcttcgcgccagccacgctgaccgagcagtggcagaccgagatgttggacaagctcggcatcccgaccgcgcgctgggaaacagtgcgcaaggtctggctggatgcggacgagcgcgccatctcgccccccgggcgcgagcagattgcccgctgcccgttgcgcatcggcatcgtgtccaccggcctgatgatgcgcgactcattggaaaagcagcacctgctggggctgcgttttggcgtcgtcatccttgacgaggcgcacaaggcccgtgtccgcaagggctttggccgggaagcggggacgcccaacgaactgctggccttcatgcgcgacatcgccgcgcgggcggatcacgtgctgctgggtacggcgacgccgatccagaccgatccggccgatctgtgggacttgcttggaatcctgcaccagggcagcgggcgcttcgtgctcgggcacgatctggcgctttggcatcgggcgggcgaggtgctcgatattctcgccgggaggcaggaggtcgtggaatctggccatgcctgggagctgctgcgttcaccgctgccacgaatggactcaaccgcagagccgcgcgcccgcaggctcttttcggccatccggcaggatctaggcctcaccgggagcgaatggcagaccaatcgcccactgtcggacatgacggtcgagacccgcgagattctcgacgaggaactcgaaaggcgcatcgcgggcgccagcttctttcagcgcgagaatcctgtcgtccgccatgtcgtgctgcgcaaacgtcagcaactggaagatgccggcctgctgacacgggtgggagtcgatgttcacccggatcgcgcgctggcaaaggagccacgccccttcgacgcgcttttcgaaagcaaggcgctgcgcaccaccgaggacttccgtgaggcctatgggcaggcgcgcttgttcggaaaggcgctggcgaaacgcggaaaaggtagtgggttcatgaagaacctgctggagcagcgcatctgctccagcatccacgccgggttggcaactgccagacgcttgctccaaggcgaggccgtgcatgaagaaggcgacgagttcgaggccgacttgactgtcgaaactccggaagagcgtgaagccttagagcgattgatcaatcgccttgagcggctggatgtggacccgaagatggaagccgtcgtccactatctggagaaggaaaggtggctggagcccggcgtgatcatcttcagccaatactacgagactgcgcgctggctggccgatgccctggccgcgcgttaccccgatgaggcggttggcctctatgcgggggctggccgcagccgcctttatcagcgcggcgacagcgttgccgtcgaacgggaaacgctcaaacgcatggtcgcagagcacgagatccgcatcatggtggccacggatgctgcctgcgaggggctcaatctgcaaacgcttggcacgctgatcaacgtcgatcttccctggaatccgacccgtctggaacagcgcatcgggcgcatcaaacgtttcggccagaagcgtgagaccgtggacatgctgaacctggtgtttgagcagaccgtggacgagaagatctacgagcgtctgtccgagcgtatgcgcaaccgctatgacctgttcggctcactgcccgacaccatcaaggacgagtggatcgaagacatcgagaccctcggggaaaagctcgaccagtacattgatgcgcagaagacagcgaccgggtttgacttgcgttacaccggcacgatggcaccgcccgagaaggactggcgcgattgttccgaggtcctgtcccggcgtgactttgcgacgctgatgagtgcggggtggggataa

SEQ ID NO: 360191 - DNA, 2625 bp, Pseudomonas aeruginosa
atgaaaagcgctgaaatccgtgaagccttcctccgcttcttcgaagagaagggacacacccgtgtcgcttccagttcgctgatcccggcgaacgatccgaccctgctgttcaccaacgcgggcatgaaccagttcaaggactgcttcctcggcctggaaaagcgcgcctacacccgtgcgaccaccagccagaaatgcgtgcgcgccggcggcaagcacaacgacctggaaaacgtcggctacaccgcgcggcaccacaccttcttcgaaatgctgggtaacttcagcttcggcgactatttcaagcgcgacgccatccattacgcctgggagttcctcaccggcgagaaatggctgaacctgcccaaggaaaagctctgggtcaccgtctacgccaccgacgacgaggcctacgacatctggaccaaggaagtcggcgtgcccgccgagcgtatggtgcggatcggcgacaacaagggcgcgccctatgcgtccgacaacttctgggcgatgggcgataccggaccctgcggtccctgcaccgagatcttcttcgaccatgggccggagatctggggcggcccgcccggttcgccggaagaggacggcgaccgctacatcgagatctggaacaacgtgttcatgcagttcaaccgcaccgcggacggcgtcatgcacccgctgccggcgccgagcgtggacaccggcatgggcctggagcgcgtcagcgcggtactccagcacgtgcactcgaactatgagatcgacctgttccagaacctgctgaaagcctccgccgaggccatcggctgcgccaacgacgacgcgccgtcgctgaaggtggtagccgaccacatccgttcctgcagcttcctgatcgccgacggcgtactgccgtccaacgagggtcgcggctacgtcttgcggcggatcatccgccgcgcctgccgccacggcaacaagctgggcgccaggggcaccttcttccacaagatcgtcgcagcgctggtcgccgagatgggcgatgccttccccgagctgaagcaacagcaggcacacatcgagcgcgtgctgaagaccgaggaagaacagttcgccaagaccctggagcaaggcctgaagatcctcgaacaggacctcgccgaactgcagggcagcgtgattcccggcaacgtggtgttcaagctgtacgacacctatggcttcccggtcgacctgaccaatgacatcgcccgcgagcgcgagctgaccatcgacgaggacggcttcgagcgcgagatggaggcccagcgcgagcgcgcccgcgcttccagcgccttcggcatggactacaacagcctggtcaaggtcgacggcgagacccgcttcctcggctatcagggcgtctccggcgccgggcagatcgtcgcgctgttcagggacggccaggccgtcgagcgcctggaggagggcgaggagggcgtcgtggtcctcgaccagacgccgttctacgccgagtccggcggccaggtcggcgacagtggctacctcgaggcggctggcgtgcgcttcgacgtgcgcgataccaccaaggctggcggcgcgcacctgcaccatggcgtggtcgcccggggcaacctgagcgtcggcggcgcggtcaaggccgaggtcgacgcctcggtacgccaggccaccgcgctcaaccactccgcgacccacctgctgcatgccgcgctgcgccaggtactgggcgaccacgtacaacagaagggctcgctggtggacagccagcgcctgcgtttcgacttcagccacttcgaggcgatcaaggcggaacaactgaaggccctggaggatatcgtcaacgccgaaatccgtcgcaacaccgaggtcgagaccgaggaaaccgatatcgacaccgccaaggccaagggcgccatggcgctgttcggcgagaagtacggcgaccaggtgcgcgtactgagcatgggcggcgatttctccgtcgagctgtgcggtggcacccacgtatcccgcaccggcgacatcggcctgttcaagatcaccagcgagggtggcgtggctgccggcgtacgccgtatcgaggcggtcaccggcgcggcggcgctggcctacctgaacggtgccgaggagcagctcaaggaagccgccagcctggtcaagggcagtcgcgacaacctgctggacaagctcggcgccctgctggagcgcaaccgttcgctggagaaggagctggaacagctcaaggccaaggctgccagcgcggccggcgacgatctttcggcggcggcggtggaaatcaagggcgcgaaggtactcgccgcgcgcctcgatggtctggacggcaaggcgctgctggcgctggtcgaccagttgaagaacaagctcggccgcgcagtgatcctgctcggcggcgagctggacgggaaggtcgtactggtcgcaggcgtgacccaggacctgaccggccaactgaaggccggcgagcttatgaagcaagccgcggcggcagttggtggcaaaggtggcggacgcccggatatggcccagggcggcggcaccgatgcagcgaaattggacgaggccctggccctggcccagcgcttcgtcgagcaagggctctga

SEQ ID NO: 360192 - DNA, 135 bp, Pseudomonas aeruginosa; identical to SEQ ID NO: 331915

SEQ ID NO: 360193 - DNA, 1158 bp, Pseudomonas aeruginosa
atggcagacaaccacacccaccacaacctgctgggacaaaacgccctgttcgccacgccggcctcgctcatgctcgatgcccgcctcacgccgctggagcgcaatggctggcaggttctgcgcatgctgcgctctgccgagggcatcagcccactggcgaatctggggcagttgcgccgctatctcacttccaccccgctggggcagcgggccgggtacgagacggcccggcgcgttctcatcgtgcttcgactgacggggtggatcagtctggtgggccagcagcgcgatcctctgaccggccatgtgctcagcgagctgtatcaggttcacgaaagtgtcctggacttccaacaagcctgcgcactcgatgccagtctgtccgcgcttctgcaagggtctatcggccacgcaaacaaccaggtggatcgggtagccgttcacattcagacaacgctggcgcaggcacctgaagccgcttccgtcgcagcccacgatcaactccgcgatgacgatgatttgcccccgacgtcgccgtcgcaggcgagcgaggcagacgacccactgccattgtctggcgactccgctggcagcacgcttgttccgcaacagaccgggcacgctcgccacatgacggcggagccgggcggtacgtataagacgtatatgtataaaaaagaacgtacgtaccgcgcgcgcgaaggcgacggccattcggcatcgcattcggtgagcttgccgccttgcctgagcaatgcccaagcagatcagcaaaaggacgtgcaggccgccttgcggcggctgccgccacagcatcgccaggaagtactcgacgagttgcaggcacgcagccagagcggcaccgtgcgcaatgtcgtggcttacttcttcgcgttggtgaagcgcgtttttgcgggcgagttccgtctgtgggcaggacgcagggatgtgacgcccgcccctcagcctgctggaagtcacgctgccgcctctgcccgcacggaagcccgctctgaatcgcccgcgcagccggcatcacgtgaaacggcgctggcgcacatcgccaatatccgcaagatgctccacgctccgatgaacgctggcgatcttgccgcacaggtaatgcacgcccaggggtggaagcctcgcccagcctag

SEQ ID NO: 360194 - DNA, 912 bp, Pseudomonas aeruginosa
atgacgcttcctgcgcattggactgaagagcaattagaagagcaacgattagccgctattgagatattccggcggcgtcgcatggaagagccgttagaacaatacattgccaactttgatgagtatcagggtgtaatcgaagagcttcttgagtccacccttgatctatccgatatagacagtcgtcttgtcgatgtcctgacggcaccaaagctattggaagcctttcgctatcttgcaggcccgcccatctcggacgacgacctgaaggttgttgcggaagcagtcttgtctcgacagcgaatcttgcgtgacccggaaatggtcggaaggatcaagcaagttgttttgagtgggctggatcgtcgacggtttccatgggtaattgagggtcgtgaaccgacggaaagtgagcgtgaagcagcgattgtcgcatccgctgcgttgatagcgactcgccggctggaaacgaggcggcgtagtgatggaaagcgtgagcaagaagccgccgtgcatgcagcccttcgagaaatgggattcacgcaggttgcatcgcgtaaggtctctgttctaagcgatgcccctgccccaggtgaattctgtgcagaaagtgatcttggagggcgcaaagcagatgtgcttgtaggtttatgggatcgtcgggtgatgcccattgagtgcaaggtttcaaattcctctaccaactcagtaaagcgtttaaataacgacgcggcggtaaaggccgagacttggcgaaaagacttcgggcagcttcaaatggtgccgtccgcagttcttggtggtgtgtataagctgcacaaccttcaagacgcacagcgccgcggcctctcccttttttgggcgcatgaccttcattctttgaccagttggatatcgagcacccgacgatag

SEQ ID NO: 360195 - DNA, 1599 bp, Pseudomonas aeruginosa
atggccaatcaatcaatgaccacagagtccgacctcattgcggcggcaattgcccttggtgccactgatgtcccaggtatctcctccgcagagattgatctaatcaatgacgtccagcccctcgggaaaacacacgcgcagaaactcaaaaaggaaattcgtgcgggtggcgaccctttgggtgcggccttttcgatcatccgtaatgctgaccagcgtagagagtctggagctacctatacccctgatggcattgtcaatgcgatgatggcttgggctgtaaaacagcccttgccagatcgcatagtcgaccctggcgttggttcggcaagattcctttgtgcggcaggtcgtcggtttgctaaagcacaacttcttgggttggaagttgacccactggcggcgctgatggcccgggccaatctagcggcgggaggctttgcggataggtcgtgcatcgaactcgtagactacaggagctcccggtcggaattcaaaggacgaactctattcatcggcaacccgccttatgtgcgccatcatctgatttctccggaatggaagcgctggttggttgagtccgcagctcgccataacctgaaggcaagccagttggcaggtctgcatgtgtattttttcctcgcgaccgttttgcatgcggctcctggcgattccggcgcattcattactgcatccgagtggctggatgtgaactatggccagttggtgcgagatctcttccttggcccacttgggggacagagaatcatcgtcgtcgagcccaccgcgacccccttccctgatgctgctacgacggctgctattacaacgttccaagttggggagaagccttcttcagtcaagcttcgccgtgttaaaaaaatggctgatctgacagacctgaacggggggcgtccagtacgtagagagcgacttgaggcggaaaccagatggtcacgtcttacgcatgctggtcgtggatgccctgaaggatttattgagctaggcgaattatgccgagtccaccgaggcactgtcactggggcaaacgctacatttatcgctactctggatgaatcagatattccagagcgctacaagctcaagagcatcaccaaggcacgcgaactcatagcagctggccgtgtccttactgacacttctagtttacgctgtgttgttgatctaccggatgacttagatgaactgatggccgaggagcgtgttggcgtggagcggtttttggcacgcgcaagagcacgaggtgctcacgaggggtacgtggcgaggaatcggcgcgcctggtggtctgtcggaatgcgagcgccggctcccatcctggcaacctacatggcacgccgagccccgtcatttgtacggaatgctgctgaagcgagacacatcaatatcgctcacggcttgtatccacgagagtttcttacagaggcccaaatgcttcgactggtagattatttgtctactgggatcagcgttttggatggacgtacgtatgcaggggggctgaccaagtttgagcccggtgagatggagcgtctttttattccgtctcctgccctgttggccgaggtaactgcatga

SEQ ID NO: 360196 - DNA, 273 bp, Pseudomonas aeruginosa
atgacagcgaagccaccgatacgcgcaaagcgcgtcggcatcggcgcgcgtccgcccgcgaatccgcacgccgaggcgtggattcgccaaggcgacgccgatgcgctgggcaagggcgacctctacaccgctcgcctgaccctcgacatcacgcccgcgctgcgcgcgcgcatcaaggtgtcggccttcacgcagggcgtgaccgtggccgatctgctgcgcggcctgctggagcgtgagtttcccgagcatcgcagggagaacacaccatga

SEQ ID NO: 360197 - DNA, 567 bp, Pseudomonas aeruginosa
ttgagacagttagagattgagaatgaactaagggatgtcgtcagcagaatcattaaccaggttgacctatcaactaaacaaggcaggcttgacatcaacctgtcgctggaagatgcgctgattccgatcctgaaagcagcctacaacctacccaacctgattaacctcaataggcggcagaaaaacttccccggcatcgatctgggtgatgaccatgaccgtgtcgcctttcaggttaccgccaccacttctctggaaaaggtcaaaaagaccttgacccacttcgtcgacaagcagttctacaacacgtttgatgaactgtacgttttgatgctgaccaacaagcaggcttcctacagccagtccgcgattgacgccatcacaaatggcgcattcgagttttcaacgaagaatcacatcattgatcttggcgacattctagccaaggtgtccgggcttcgaatccccgctcaggagcgggtgttgaatgacttcaagatcatcttggggacatcaaggcatatctggacttcaatgctgagggaaaccttcaatctcacacactga

SEQ ID NO: 360198 - DNA, 444 bp, Pseudomonas aeruginosa
gtggcgctggcctacatcgaaccgcgcttcaagctctatttgcgcttcggcgaacctgcgcgcacacaccaactcgaccgttggcggcgctgcgcggtgttcctgccgggcgccatgttgtgccgcatccgctggcaggccaacgactacggcaccgtgcgctggcagctcatggtgatgcaggcatgcacgccgctggacgcggcgcagcgtatccccggcgtccagccgggcgcgcgcctgctgctgcacgccgagggcgagaaccaggtgcgcgccgtgctggagcgcatcgacgccatcgaggtgctgggcatcgcacccgccgctgtctcgcccgcgtactggcgcacgctcgccaaccggctcgctgcgcgcttgtctctgcccgaatacacggccgaacggcacgccgcctggctgaccgggagggcgatgccatga

SEQ ID NO: 360199 - DNA, 588 bp, Pseudomonas aeruginosa
atgaccgctgtttcgactgccggcaccgcgccgcgtcctcgctcgcgcctgcgcgcccgcctcgtactggcgggtctgtccgcctgtggcctcgcggcgctggcctgggcgtccttcgtgcatccgatgccgcgtctgatctacaacccgtccgacagcgtggcggtaggctggtatcgcgtcgatccacaggagcacggcaccggctcgctgccacgtcctttgtccgtgggcagcatcgtcctgaccacgctgccgccagatgccgccgcgctggctgcgcagcgcggctacctgccggcgcgcgtgccgctgctcaagcgtgtgggcgccgtcgcgccgcaggaggtgtgcatcactggccgcgttgtccgcatcgacagcgtgccttcggccgccgtgctgcccgctgaccgctggcgccggccgctgccatcctggcagcaatgccgtcgccttgaacccggcgaactgttcctcttgagtgtgaccaacccggcgtcgttcgacagccggtatttcgggccggtcagcgcatccgccgtgatcggcgtggcgcatccggtctggctggagtcacgcccatga

SEQ ID NO: 360200 - DNA, 1446 bp, Pseudomonas aeruginosa
atggacagcccaggtgccgggctgcatctcgtcggccagacccaggcgctgcaagcgttgcagccggccgatcagcagcaggcgctggcgttgcagccgcggttcgttgaaccgttcgatctgcactcggacatcctcgccggcttcgcgttgcagcgtgcgatccaggcttgtccatcgctcctgctctacctcgcgctgcaaggtctgctggatctccagctcggtgcgtggccccagccattcggtcgccagttcagcggcgcgatggcggaagccatcggcgatatagtcgccagcgatgatgaggtctttgccggtgtcgtcgcgcccgcgcacgacgatgtgcgtgtgcgggttgtcggtgttccagtggttgacggccacccaatcaaggccggtgcccaggtcggcttccatgcggcccatcaggtgccgcgtgtaggtgcgcaggtcttccagctcggcgccgtcctcgggcgagaggatgaagcggaaatggtgccggtcatcggcgcagcgttccttgaaggcgtcgaggtcggcggcatcggtctgcggcccgtaggcttggcccggctcgccatcgcggcccacgccatcgcgctcgatgtagcgcaggtgcttggcgagcgactgcgggctgacctggcgctggttgaccagcagggtcttgatggtcacgcgccgcgacatgggcgtcagcttcgccccggcgaagcgcgccgccgtgtggccgcgccccaggcgcgagccgggccgctggccagtgcccctcccggtgcccccagccgtcccaggacggcgcaccgaggacttgccgctgctggccttgcctgcctgctggagcaccttggaaacgaagccctggcctcggttcttcggggcattggggcggatgcggaaatcgtcgtcgcggcggtcggtcatggctgcgctccctgcaagctctggcgcgcccggtcgtgcgaagcacgcggatatgcctgcattggcgcgggcctcgcgccccacacggcacggtggcgaagccgctccgtgccgcgccacccccatgtgcagacaggctttcgacgcggcccggtgccgcgtccttttgtcttgccttccgcttttgcccttcgccggcgctccgggcagcggcggcccggcggcgctgcgcgagcagccagcgcgccggcgaacgcgcgaacaagcgcgatgagggccgcaggccgggcgcgttcgaggcaagacgcctgcacatgggacggctgcgccggaggcagcgtgaagtgcggtaagaatgcacccgcactgcacgcgcgacgacacgccgacgaacagcagaacgtcacgcccgatggcacgacaagatgcacggcaacgtgcagcgagtcggcggccatcatgggcgtgactccagccagaccggatgcgccacgccgatcacggcggatgcgctga

SEQ ID NO: 360201 - DNA, 1065 bp, Pseudomonas aeruginosa
atggaaaacttcttgcagccgggccggctggcgaaaaccggcatcgacgccggggcgccgattctggagcagatcggtgagatggcgggctttcccgaagtattcgtaaacctcgaccccatcgtggtgatgttcctcgcgtggctggtcgtggtcttgtgctttttcgtgctggcgatccaactgttcatcacgctgatcgagttcaagctgaccacgctcgccggattcgtgctggtgccattcgcgctctggaacaagaccgcgttcctcgcggaaaaggtcttgggcaacgtggtggcctccggcgtcaaggttctggtgctggccgtgatcgtcggtatcggctcgggcttgttcgctcagttccaagtccatcccgccgagccgtctatcgaccacgcgctggtcatcatgctggcctcgctcaccttgctggcgctcgggatcttcggccccggcatcgccacgggcctcgtgtccggtgcgccgcagctcggcgctggcgcaatggccggtgctgctgtcggcgctgccggcacggccgtcgccatcggcgccgccgcgacgggcgtgggtggcgccgtggctgctggcgcgcgcatggccccggctgccgccaagctggccggtagcggtgcgcgcgccgccacgtcggcggccagcagtgcgaagtcggcgttccaggccgattccgccgccgctggcggcggcgcaaagggcgcgatggcgggcctaggcaacgtcgccaagaccggcgcgcagtccgccggacgcgccgcagcatcccgtgcttccgctgccgggcagcggatggccgctccgttccgtgctggctggaatggctcgacggccgacgctggcgcgtcaaccggtcaagcctccgcaggagaagcccccgcaggcggcgccgctgcacagaagccggaacaacccgcctgggccaagcggctgcatcgccgccagcaactcacccacgccgcgaccaccgccgcgcacacgctgcgcggcggcgacggtggcggctcggggcaaggcccgagcctgcgcggctccgacgactaa

SEQ ID NO: 360202 - DNA, 1071 bp, Pseudomonas aeruginosa
atggagaacttcttgcagccgggccggctggcgaaaaccggccttgacgcgggcgggccgatcttcctccagctcgacgacatgatgggatttcccgaggtgttcttgaacctcgatgccatcttggtgttgttcctcgcctggctggtcgtggtgctctgcttcttcgtgctggcgatccagctattcatcacgctgatcgagttcaagctgaccacgctcgcgggcttcgtgctggtgccgttcgcgctttggaacaagacctcgttcctggccgaaaaggtcttgggcaacgtggtggcctccggcgtcaaggtgctggtgctggccgtgatcgtcggtatcggctcgggcctgttcactcagttccaagtccatcccgatgagccgtcgctcgaccacgcactggtcatcatgctggcctcgctcaccttgctggcgctggggatcttcggccctggcatcgccacgggccttgtgtccggtgcgccgcagctcggcgcgggtgcgatggcaggcgctgccatcggcgcagccgggacggcggtggctgttggtgctgccgcgacgggcgtaggcggtgccgtggccgctggcgcgcgcatggcaccggctgccgccaagctggccggcgctggtgcgcgtgcggccacgtcggcggctggcagtgcgaaatcggcgttccaggccggctccgccgccgcaggcggtggtgcgaaaggcgcaatcgcgggcctgggcaacgtcgccaagaccggcgcgcaggcagccgggcgaggcgctgcatcccgcgcctccgctgccgggcagcgcatggccgctcccttccgcgctggctggaatggcgctgccgccgatggtggcgcaggtgcggcatccggtcagggtgccgcaggcgaggccgcatccggcgccgctaccgcgcagacgcaggaacagcccgcctgggccaagcggctgcaccgccgccagcaacttacccatgccgcgaccaccgccgcccacacgctgcgcggtggcgatggcggcggttccggccaggggccgagcctgcgcgattccgattcataa

SEQ ID NO: 360203 - DNA, 363 bp, Pseudomonas aeruginosa
atgtaccgcgacgcgcaggagcgttggaagaacaccctcaacggcttgcagaccacgatgcagatgcaggcccaggtgtcgcagaacctgggcgaagacgaaagcgtgctggccgatctcgtgggcaagagccagtcggctcaaggtgcgttgcaagccatgcaggccatgaaccagttgctggcattgcaggccaagcagtcgatccagtcgcaacggctccagatcacgcaggatcgtgcggcctcgctggaactggcgcggcaggcggcggccaccgagcgcgcccgcgaggtgcggcgacgtttcctgggcgatggcacgcagtacacgccgcagcgcgtggatttctatggcaactga

SEQ ID NO: 360204 - DNA, 795 bp, Pseudomonas aeruginosa
atgcggcccatcgcccaggtgcggcgtggtcatcatccggtgcaaggtcagctcgaacgggctggccgggtcggacaggaagttggcgacgccgcgcagcgtcttgtcctcgccggcgtagagcacatgcaagatcgcaccgaccaacagcgcgtggctggttttctcccaatggttcctgcgctccagcgcgccttcgggatcgaccagaatgtccgcgatgttctgaacgtcgcgcacctcatgcgcgccgcgccgcacctccagcagcgggttgtaggccgccgacttcgcatccgtggggttgaacagcaggcaatgagagaagcgcgagcgccagccggcggtgatctgccagttctcgcctttgatgtcgtggacgacggcggatgcaggccaggaaagcagtgtcggcaccacgaggccgacacccttgcccgatcgcgtaggcgcaaaggtcaggacgtgttccgggccttcgtggcgaaggtactggcggtcgtgctggcccaggaacacgccggccggcagcgtgaggcccgctttgcgaatgtcatccgcgttcgcccaacgggccgagccgtaggtcgtgaccaggcgcgactgccgcgagcgccagatcgacatgccgatggcgaccaccaccgccagcaggccgctgccgcccgcgatggcgccgccggtgtcgaacacgcgcggcgcgtaggcgtcgaagaagaaccaccactcgaacaggcgccatgggtggtagatcggcgtgccgagaagatcgaaccagggcgagccaaggcgtag

SEQ ID NO: 360205 - DNA, 279 bp, Pseudomonas aeruginosa; identical to SEQ ID NO: 323970

SEQ ID NO: 360206 - DNA, 273 bp, Pseudomonas aeruginosa
atgagtgccccagacaccttcgcggacggtttcgaggtgccgctgcatcgctcgctgaccgagccgattctgctgggcggtgcgccgcgcaccgtggcgatcgccaacggcacgctggccgccgctgtcgggctgggcctgcaactgtggattcccggcgtggtgctctggatcgtcggccattctttggcggtgtggggtgcgcgcgtcgatccgcagttcatgcaagtcttcgcccggcacatcaagcatcgcccgctgctggacgtgtga

SEQ ID NO: 360207 - DNA, 1443 bp, Pseudomonas aeruginosa
gtgctcgccgtccagcccgaggatcgtggctcgcatggagcggcccatgtcgaacgcgaagatgcgcgagccgcgatagcggcggaactgcattgccagcgtggcgagcagaaccgacttgcccatgccagtcggccccgcgaccagcgtgtggcccacgtcgccgatgtgcgtcaccagccggaacggcgtggcgccatcggtgcgcgtgacgatcagcggcgggccgtcgaggtggtcgttcttctccggcccggcccataccgccgacaccggcatcatgtgagccaggttcagtgtcgagacgatgggctggcgcacgttggcgtaggcgttgcccggaatggacgacagccacgcatccacggcgttgagcgtttcggggatagtcacgaagccccgcccctggatgacgcgctccaccatgcgcagcttctcgtctgcgacggcggcgtcctcgtccatgacggtgacggtcgccgtcagatagccgaaggcgacttgatcgcttcccagctcctgcagggcggcgtccgcgtcggcggccttgttgttggcgtcggtatcgaccagcgggctttcctgctggaagatcgtttcgcgcagcagcgcgatgacgttcttgcgcttggcgaaccactggcggcgcagacgggaaagttctttttccgcctcggctttgtccaggcagaggaagcgcgtactccagcggtaggcaaaaccgaggcggttgaggtcgtccagaatccccggccaggtcgaggtcggaaagccccgcaccgacaccacgcgcaggtgctggtcgcccagcatgggtgccaggccaccgaccagcgcggagtcggtcagcagcgcgtcgatgtggaacggcacttcgggcacgccgacgcggtagcgccgcgtcgagatggtggcgtgcaggtagctcagcgtctggctgtcatcgagccaggcgatttccggcatcacgccatcgagcaggtcgaacacgcgatctgtttccgccacgaaggccgtcaggcgctcgcgccagtccacgccatcggtgggccggttctcgtacagcatccccgccgcgcgggcgcgcgattcctcgggcggcaggtacaccagcgtcaggtgatagccactctcgaagtgattgccagagtcctcgaaggtggcgcggcgttcctcgtccaccagccacgacagcggctcaggaaactccgagtgcggatggtcggcagcgggacggcgctcggcttcaatgaacagcgcccagcccgatcccatacggcgcagcgcgttgttcaaccgcgccgatgtggcgatcagctcgccttgcgtcgcgctgtcgaggtcaggcccgcgaaaccgggccgtgcgctggaaactgccgtccttgttcaagacgacgcccggcgcgaccagcccggcccagggcagccagtcggcaagtaa

SEQ ID NO: 360208 - DNA, 273 bp, Pseudomonas aeruginosa
atgagtgccccggacaccttcgcggacggcttcgaggtgccgctgcatcgctcgctgaccgagccgattctgctgggcggcgcaccgcgcaccgtggcgatcgccaacggcacgctggccgccgctgtcggcctgggcctgcaactgtggattcccggcgtggtgctctggatcgtcggccattcgatggccgtgtggggtgcgcgtgtcgatccgcagttcatggccgtgttcgcgcggcatatcaaacaccgcccgctgctggacgcatag

SEQ ID NO: 360209 - DNA, 588 bp, Pseudomonas aeruginosa
atgaacgccgtttcgactgtcggcaccgcgccgcgtcctcgctcgcgcctgcgcgctcgcatcgtgctggcgggcctgtccgcctgcggcctcgctgcgctggcctgggcgtccttcgtgcatccactgccgcgcctgatctacaacccgtccgacagcgtggcggtcggctggtatcgcgtcgatccgctgagcaacggcaccggctcgctgccacgtcctttgtccgtgggcagcatcgtcctgaccacgctgccgccagatgccgctgcgctggccgcgcagcgcggctacctgccggcgcgcgtgccgctgctcaagcgtgtgggcgccgtcgcgccgcaggaagtgtgcatcgcgggcggcatcgtccgcatcgacggcgtgccttcggccgccgtgctgcctgctgaccgctggggccggccgctgccatcccggcagcaatgccgtcgcctcgaacccggcgaactgttcctcttgagtgtgaccaacccggcgtcgttcgacagccggtatttcgggccggtcagcacatccgccgtgatcggcgtcgcgcatccggtctggctggaatcccgcccatga

SEQ ID NO: 360210 - DNA, 672 bp, Pseudomonas aeruginosa
atgcccggttcctgcgcccttgccagctcccccaggacgacgcaccgacgacttgccgctactggccttgcccgcctgcttgagcaccttggagacgaagccctggccctggttcttcggggcgctggggcggatgcggaaatcatcgtcgcggcggtcggtcatggctgcgccccctgcaagctctggcatgtccggtcgtgcgaagcacgcggacatgcctgcattggcgtgggcctcgcgccccaagcggcacggcggcgaagccgctccgtgccgcgccaaccccatgtgcagacaggctttcgacgcggcccggtgccgcgtccttttgtcttgccttccgcctttgcccctcgctgtcgctccgggcagcggcggcccggcggcgctgctgcgcgagcagccagcgcgccggcgaacgcggacacggccgcaggccgggcgcgttcgaggcaagacgcctgcacgttggacggctgcgccgaaggcagcgcgaagtgcggtgcgaatgcacccgcactgcacgcgcgacgacacggcgacgaacagcagaacgacacgcccgatggcacgatgagatgcacggcggcgtgcagcgaatcgacggccatcatgggcgggattccagccagaccggatgcgcgacgccgatcacggcggatgtgctga

SEQ ID NO: 360211 - DNA, 1302 bp, Pseudomonas aeruginosa
gtggcgttcctcacggccacgctgatcgtcatcgacatgacgatcgccggactgtattgggccatgagccacgccaccggccagggcgaggacgtgatcgccaagctgctgcgcaaggtgctgtacgtcggcgccttcgcctacatcatcaacaacttcaactggctggcgagcatcgtcttccgctcgttcgcgggattgggcatcaccgccaccggctctgccatcacgatggagaacttcttgcagccgggccggctggcgaaaaccggccttgacgcgggcgggccgatcttcctccagctcgacgacatgatgggatttcccgaggtgttcttgaacctcgatgccatcttggtgttgttcctcgcctggctggtcgtggtgctctgcttcttcgtgctggcgatccagctattcatcacgctgatcgagttcaagctgaccacgctcgcgggcttcgtgctggtgccgttcgcgctttggaacaagacctcgttcctggccgaaaaggtcttgggcaacgtggtggcctccggcgtcaaggtgctggtgctggccgtgatcgtcggtatcggctcgggcctgttcactcagttccaagtccatcccgatgagccgtcgctcgaccacgcactggtcatcatgctggcctcgctcaccttgctggcgctggggatcttcggccctggcatcgccacgggccttgtgtccggtgcgccgcagctcggcgcgggtgcgatggcaggcgctgccatcggcgcagccgggacggcggtggctgttggtgctgccgcgacgggcgtaggcggtgccgtggccgctggcgcgcgcatggcaccggctgccgccaagctggccggcgctggtgcgcgtgcggccacgtcggcggctggcagtgcgaaatcggcgttccaggccggctccgccgccgcaggcggtggtgcgaaaggcgcaatcgcgggcctgggcaacgtcgccaagaccggcgcgcaggcagccgggcgaggcgctgcatcccgcgcctccgctgccgggcagcgcatggccgctcccttccgcgctggctggaatggcgctgccgccgatggtggcgcaggtgcggcatccggtcagggtgccgcaggcgaggccgcatccggcgccgctaccgcgcagacgcaggaacagcccgcctgggccaagcggctgcaccgccgccagcaacttacccatgccgcgaccaccgccgcccacacgctgcgcggtggcgatggcggcggttccggccaggggccgagcctgcgcgattccgattcataa

SEQ ID NO: 360212 - DNA, 726 bp, Pseudomonas aeruginosa; identical to SEQ ID NO: 341003

SEQ ID NO: 360213 - DNA, 207 bp, Pseudomonas aeruginosa
atgggaggcctgcagtgctgcttggtaggttcgggccagggcatcggcctgggcctgcgcctgggtgtcgcgctgggcctgctgggccatggcggtgatcgtctcggcggattgctcgacagcggcctggaggtcgtcacgctgagcggtcacatggtccagacgccagagcaccagcgccgcgaccagcgcgacgatcagccatga

SEQ ID NO: 360214 - DNA, 957 bp, Pseudomonas aeruginosa; identical to SEQ ID NO: 327662

SEQ ID NO: 360215 - DNA, 1302 bp, Pseudomonas aeruginosa
ttgttcgatcagcgtggcagccttgacgaccgattcgcacagcagcgcctggacctggcgagccagtacggcgacggctcgcgtggcatgagcctcgacgagtacaacgacaagctgcagaagctgcaggcgaaccacgcggcgatgaccgagcagctccaacgcaactacgcggccttgcagatcgcgcaggcagactggaccaacggtgcccgctcggcgttcgccgactatctcgactcggccaggaacgtcgcgggccagacctacgacctgttcagcaacgcgatgtctggcctggagaacagcgtcgtttccgccgtaacaacgggtaaggccagcctggatgactttctccgtacgctcgcggccgactccgctcgtatggcgaccaggcagctcggagcatcgttgctcagtagcttcggactcggcgagaccaaagacgctggcagcaaagacctggccgtaggtgcctcggcggtctcggcatcggccggcgccctggcaaccgcgggaggcactctcgtgaccggcgccgcggcgattcaggctgcagccgcatcgctagcggcagcgaacggtggccaggtgctgggcggcgcagcctctgcagccggacaagccggtccagcggctgctattgctgccgcgtcgaccgaaggcgcagccgcaatgggcagcgcgatcagcgaagcaaccacgtcgggcggtggcactctggcgagcgcgctggctggagtgtttggtcagggtgccagtttgttcggcaacctgttcagcagcctattcggtggcggtgctgctggcggcactggcggtggtggtggctggttgcaactgggcatgagtgccgccagtgcgtatttcggaggtggcttcgccgatggcgggcgtatccaaggaccaggcaccggcaccagcgacagcatcccgatcctggcctccaacgacgagttcatgacccgtgccgccgtggtacggcagcccggcgcactcgcgtttctggagcagttcaaccggtatggcatggctgccctgggcgcctgggcgaacccagtccgccacgctacgggcggcctgatggggactcctgctccggccatgcccgctccgggcctttctgcttcgcgcctgcaggagccctccaagaacttcagtacctcggtcgccaactcgatctacctgcacgccgttcaagacacggatcagatggcggccgacatgtgggccggcaaaggcggcgaacacttcctggtctggctgaacaagaaccgccaggccgtcaagcagattatctag

SEQ ID NO: 360216 - DNA, 1602 bp, Pseudomonas aeruginosa
atgcctcgggcgcttattgatgactgcaaagctgttgcttatgcttggtttaaaagaggaatgcctagatccaaacctcctatcgcacggggcattactactttcgccgtcgtcagcgcgatgccttttgttcgctggttaaacgatctaggagtttcaagctttgcagatgtccgtccgatccatgtcagcaattacgttcatcattgcaaatatgaattgaagttaaagcctctcccgctgtatgggcgattacgggttattgattttctttgggtgttttctgccgacacgatgtttcccattcagagttatccttggggtaattcgacattgtggcggatttgtggggtcgcgaatgtaaaagggttgggtgctgccactaaaaacgtcgggcgaacagatattattcctcatgatgaacaatctaggattttcaactattgcgaaagcattgtccgggagatgaaggccgaattggcagccaatggtattggatatcatcctagtgatgaacggatggcaattcgttgcagagatgctgttctgtatatagtttcaatcactagcggcatgcgcaatgacgaggcaattggaattgaggttggcgcttggcgcaaagagttaaaaaacggggttaccttttgctgggtgaccacaatcgagcacaagacaggtaaaggccaagtcgaatatcttgtaccagaactgacgattgaagctttaagtcttttggcaaaatattcagtacccatcagaaaagagctggatgaagagattagacagcttgcaagcaatcgggatttttcgtattcaactgaacatctccttaggctcgaaaaagcccgaaaagacgcgaataaactatttttgggacgaaacacacaaggagggaaagttcaggaaagccatcacgttgaggctctcagcgggcaagcatccaatgctgcgtttgaccgtatagctaaagccgctggaagcgattggccgttgaggacgcatcaatgcaggcgaacatatgcaagatgctttgtagaatcccgtatgggccgcacttcattgatctacctcaaatggcagttcaaacacagcagcatgagtatgacccaactctatgcatccaatccgcagcaagacctgactctctttgatgagatcttccagcagatgacagagtttaaaattgacctgatcgaatcatggctcgatgatcagccactggcagggggcgctggcgaaaagattgtggagttgcgggcgattccaatcaaggatagagctgctttgcttgcccagaccgccccacatgccaacattcgtgcgactggacacggctggtgcatcgccacagagcggggctgcggaggtgctggtctatacgaagccacacggtgtccagggtgcaaaaattcggtgatcgatgaagtcttcgccagcacttggcaggacatctacattcaacagcgagagctgataaaaattgaggatgcaggccccgctgttaggcagcgcgcagaacgcgacttgcaggttgcactagatgtaattaccagccttggcctttctccagttgaggaaatggaggaggcggcaaatgactag

SEQ ID NO: 360217 - DNA, 333 bp, Pseudomonas aeruginosa
atgcgcgacgagcaattggtgccactggtcaaggccgcgccggccgagccagaggtagacgacgcgctcgctagactgacgttggccgacctgcggcaactgccgcaggcgctcgcccagccgcaggctgttctcctggatgcatcatccaatgctctggtctacgtgttcgactctggccgacgcggaggctggctctccttgatcgtcaactatctcctgcagggcagctcgcgcagcaatgccgtccagtccggcagcgtggtcgacgtcgagcagctcgggcagcagttggccaacggacgtttggttctggtggagggtggactatga

SEQ ID NO: 360218 - DNA, 825 bp, Pseudomonas aeruginosa
gtgaaccgcaagcagtcgatcctcgatgcgatctcgcgcccggccgagcgggtcaagcagtggaaggaataccggccgatcttcatcagcgacgcgcgcatcagtcgtggtgtcgacttctggaacaagcatgccgaagacctggcgcgggcagagaaggaatacggcgtgccggccgagatcatcgtctcgatcatcggcgtggaaaccttcttcggccgcaacaccggcagctaccgggtgatggacgcgctgtccaccctcggcttcgactacccgccgcgggccgacttcttccgcaaggagttgcgcgagttcctcctgctcgcccgcgaacagcaggtcgacccgctcagcctgaccggctcctacgccggcgccatgggcctgccgcaattcatgccgagcagcttccgcgcctacgcggtggacttcgacggcgatggccacatcaatatctggagcgacccgaccgacgccatcggtagcgtcgccagctacttcaagcagcacggctgggtcaccggcgagccggtggtctcggtggccgagatcaacgacgagagcgccgagagcgcggtgaccaggggcgtcgacccgaccatgagcctgggtgagttgcgtgcccgcggctggcgcacccacgatgcgctgcgcgacgaccagaaggtcacggcgatgcgtttcgtcggcgacaagggcatcgagtattgggtcggtttgccgaacttctacgtgatcacccgctataatcgcagcgccatgtatgccatggcggtttatcagctggcgggcgagattgcccgcgcgcgaggtgcccattga

SEQ ID NO: 360219 - DNA, 1218 bp, Pseudomonas aeruginosa
atggacgatctattgcaacgcgtacggcgctgcgaagcgctgcagcaacccgaatggggcgatccgtcgcgcctgcgcgacgtgcaggcgtacctgcgcggcagtccggcgctgatccgcgccggcgacatcctggccctgcgcgcgaccctggcgcgggtcgcccgcggcgaggcgctggtggtgcagtgcggcgactgcgccgaggacatggacgaccaccatgccgagaacgtggcgcgcaaggccgccgtgctggaactgctggccggcgccctgcgcctggccggccggcggccggtgatccgcgtcgggcgcatcgccgggcagtacgccaagccgcgttccaagccgcacgagcaggtcggcgagcagaccctgccggtctatcgcggcgacatggtcaacggccgcgaggcccatgccgagcagcgccgggccgatccgcagcggatcctcaagggctatgcggcggcgcgcaacatcatgcgccacctgggctgggacgccgcgtccgggcaggaggcgaatgcctcgccggtctggaccagccacgagatgctgctgctcgactacgagctgtcgatgctgcgcgaggacgagcagcgccgggtctatctcggttcgacccactggccgtggatcggcgagcgcacccgccaggtcgacggcgcccatgtggcgctgctggccgaggtgctcaacccggtggcctgcaaggtcggtccggagatcggccgcgaccagttgctggcgctctgcgagcgtctcgacccgcgccgcgagccgggacgcctgacgctgatcgcgcggatgggcgcgcagaaggttggcgagcgcctgccgccgctggtggaggcggtgcgtgcggccgggcacccggtgatctggctgagcgacccgatgcacggcaacaccatcgtcgcgccctgcggcaacaagacccgcctggtgcgcagcatcgccgaggaggtggcggcgttccgcctggcggtgtccggctccggcggcgtggccgccgggctgcacctggagaccaccccggacgacgtcaccgagtgcgtcgccgattccagcggcctgcaccaggtcagccggcactacaccagcctctgcgatccgcgtctgaacccctggcaggcgctcagcgcggtgatggcctggtccggcgcagaagcgatcccgagcgcaaccttccccctggagaccgtggcatga

SEQ ID NO: 360220 - DNA, 780 bp, Pseudomonas aeruginosa
gtggtacacgcaactgatgttcgcccagcacgcggcgaacctgtcgccagtatggggccgcgcccagggcacggggcatcccggcatcacgatgttcaatcgcggcggcggcccgattacgttcgaccccttgaacaggttggatcggcagatgaatgcccatctgtttctatttggccccaccggctcggggaagtccgccacgctcaacaacctgctgaaccaggtgacggccatctaccggccgcggcttttcatcgtggaagccggcaacagcttcggcctgttcagcgacttcgccaggcgcctgggcctgaccgtgaaccgggtcaagctggcccccggatcgggcatcagcctggcgccgttcgccgacgcacgccggctgatcgaaacgcccagcgacgtacagacgctcgatgccgacgcgctggacgaagacctgccctccgatgcctcggccatggaagcggacgagcagcgcgacgtgctgggcgaactggagatcacagcgcggctgatgatcacgggcggcgaagacaaggaagaagcgcggatgacgcgggccgaccgctcgctgatccgccagtgcatcctcgacgccgccgaacattgcgtggccgaaaagcgcaccgtgctcacgcgcgacgtgcgcaacgcgctgcgcgcccgtggccaggacccgacgctgcccgagatgcggcgcgtgcggctgctggagatggcggacgcgatggacatgttctgccaaggcacggacggcgagatgttcgaccgtga

SEQ ID NO: 360221 - DNA, 1302 bp, Pseudomonas aeruginosa
atgctgatcatcatccactccgagaccaacaagaccaccatccggcagaacctcgggcgcccggagtacagctattacttcgtcctcaaggaattccgtccgctgctggaagagatcggccaggtggtcgaagtcagcgatcccgacgaactggtggaccgcctctaccacgactgccgcaagcgcggcgaaccctgcgtcttcctctccttctcgccgccccatcgcacgccgatccaccatgcctgcccgaccatcccggtgttcgcctgggagttcagcaccctgcccagcgaaacctggcacggcgaaccgcgccacgactggcgacatgtgctgcgccacagcggacgggccatcacccactccagcttcacggtcgacgtggtgcgcgccgccatgggtcgcgactacccggtactgagcgtgccggcgccggtctgggatcgcttcgccaaccgcgcctcgcagcaggcaggccgtcccgaagcccgggatgtgcgcctgcgcctggacggcctgctggtggacagccgccacctggacctggccgtccatgccgaccccgagccgtcggcggaggtcctggccctgccggaccgcgcggcgaaacaggtcgagctgagcctcgacggggtcatctacacctcggtgttcaacccctacgacgggcgcaagaactggcaggacatgatcagcgcgttctgcgccaccttccgcgacgagcccgacgccaccctggtgctgaaactgacccaccacaacgtcggcgaagcgctggccgacatgcttcaccacctgtacaagaaccagtcctaccgctgccgcatcgtgctgatccacggctacctcgccgacccggactacgagcggctggtcgaggccaccagctacgtggtgaacacctcctacggcgaaggccaatgcctgccgctgatggaattcatgtccagcggcaagccggccgtggctccgcgcaataccgcgatgatcgactacatcgacgccgacaacgccttcatcgtcgactcctcggaagaagccaccgcctggccccacgacccgcgcgcggcctaccgcacgctgcgctacatcaccgactgggagtcgctgtgccgggcctaccgggccagtttcgaggtcgctcgccaggagccggagcgctacgcacgcatgtccgcgcatgccagcgccagcctcgaacgcttctgcagccgcaagctggccgtggagcgcctgcgccgcttcctcgacgaagcggcacaaggcgaccccgccgccttgcaaagcatcccggcatga

SEQ ID NO: 360222 - DNA, 246 bp, Pseudomonas aeruginosa
ttgtgggatgagctggtcggcccgttcggcgccttcgcgctcgacgaagaagtcacgcaggcggcgcaggatctcggtcagagccgtcaccgcgtagggcgcttccgcgaactcgatggccagggcgccgtcatcctcggcgaagttcaagggagcatcgggaatgcctttgatggccggcggcacggcaccgaggaagccgatatggcgcaagtagtgcttgcccggaaccgggttgcctggtga

SEQ ID NO: 360223 - DNA, 225 bp, Pseudomonas aeruginosa
atgcagactcaccagcagctcgatcaccggagacttctggcgcggcagcaggcggccggccttgaccaggctttcggcgaactcggtgacctcgttgcgatgttcctgggctttttgctgggccacctgtgcttcgcgggtggccagcagttgctcgcgctcgtcgagctggcgttggcgctcctggagcgcagcttcgtcaggcatggtcgtgtcctgctgtga

SEQ ID NO: 360224 - DNA, 267 bp, Pseudomonas aeruginosa
atggctaaacaagttcgcagcactaacgccggtcattcgattagcgcttgggtgatcctgaacagcaaaggcgagcacgtcgccaccgtgaacgcccactattcgaacggcggccgcgtgtcggttgacgtgtggaacatcggcgacaaggcgacccgccgtagctatgactctgcaatgctgcgcctagcgccagaggcccgcgcggccgcgatggcaaaggcagagcgagacgctttgaaaaaaacgcgattggctcaagcctga

SEQ ID NO: 360225 - DNA, 378 bp, Pseudomonas aeruginosa
atgagaacggaagtttaccagcgcggcgcggcccgcttcgatatgagcggccggcgcctgccgtttaacctgagcttgaccggggaaagcatcactccgggcttagctgcccggctccaccgctacgccttcgaccgcctgcgcgccgctggcttcgccgatgctatccggcgtcccgcaggcctagcgaacggtcgtcccgcctggagtgaatgggattgcaccgtctacacaatggacgcggacgatagaccggccgacaggtcctattgcgtccgctggaaaaacccggccggcggatacctagaggttgccggaatcctaaccctcaagggctggccgaccttggaccacggtttagagattggggaggaatga

SEQ ID NO: 360226 - DNA, 435 bp, Pseudomonas aeruginosa
atgcaagctgagaccccctcctttcggcaaaagaatggcctgacccgatatgccttcgcatgcggctatatccagcgcgtcgaagtgaaacgaggcaacacggagacccgtgttgatttgtggcacgaaggggcttgtttccatgttcgcgcgcatgagttcaacggcgccggccgcctgttctgggaatcgttccactcgatcaccgatgctcgcgagttctggcatggcgaagtgtggcggatattccgggcggagctttgcgcggtcgcgcccgatcagcgatacagctaccgccaggaataccacggcgagcgtgacccgtcgcacgtcgtccgcttttgcggcgagtggatcggcaaatcggaaaccgtcgtcggcgccatgctgctggcgtggcagcacaagcaatcccgcaatggggagggtgcgtaa

SEQ ID NO: 360227 - DNA, 270 bp, Pseudomonas aeruginosa
atggatactaaagccccttcgacttatctagtggacccgcgcaaaaataatgggaacagtggcgagctttttaccgtagaagcgagcgacataggggcggcggcgactatcgccgcccgccgtatacttggtgggcagtttagcggtcttgtgtataggcagacgggggacgcgggcggcagcggcatgtttcaagcatacaaccatttggccggaacaaaccgcaccgaaacaaccgtcggccacccattccatgtgatggaatattga

SEQ ID NO: 360228 - DNA, 672 bp, Pseudomonas aeruginosa
ttggcctccctttcatccgtagccgacatcaccccacccgcagccgtcgccggacgaggcaatggcatagcgctgagtgcgctgctcgacgcgcgtaggatctggaaaggccagtccgccgtaccggccgactcttccctgcccaccgggcatgcgcgcctggacgcactgctgcccggcggcggttggccggagcatgccctgagcgaaatcctccatgcccgcgacggtgtcggcgaactgcaactactgatgccgaccctcgctcgcctgacccaggcgcaacgtcgtgtcgtcctggtcggcgccccctacgtaccttatccgcaggcctggctggacgccgcggtcgacctgcgccacctggtcctgttgcaggccagcggacgcgacgccttgtgggctgccgaacagtgcctgcgctcgggcagttgcgccgcagtgctgtgctggccgcagcaggccgacgaccgcgccctgcgccgcctccaggtcgccgccgaaagcggtcaggccctgggtttcgcctatcgccccctgcgcgaagcggtcaacccttcgccggcagcgctacgcctgtgcatcgaaacccgccccccacgcctgcgcatcctcaagtgccggggcggcctcgcgccggcgaccgccctgccggccagcgcctggcaatga

SEQ ID NO: 360229 - DNA, 357 bp, Pseudomonas aeruginosa
atgaaaccttcgcaatggacgcttcgctgggtgacgctctgtggctgcgggatgctggcagcttccgccgccgccgtggagttgccagggactgtacagccatcccagctcgatgaacgcttcaagccccgcagcgagccgcaagccaagcccgaggcgccgctggtggtgcccaagcaggtcgcgccgcaaggcagcgaacagatccgcttcaaactgcgcgagatacgcatcgaaggcaacacccgctatgacaaggcggtgctcgagtcctattaccagcatatgctcggcgagcaggtgtccctggccgaactggtctacctggccaaccgcctcaccgccaagtaccgctag

SEQ ID NO: 360230 - DNA, 1770 bp, Pseudomonas aeruginosa
atggaagcgcctaagaaaactagaaaagccagaaagcgaatgactgctgacgaaagagctagaatgcagttaaaaagagagcaaacacgtttcagaactggcgttcatgaaatttttcaaaagtcaggctttgaatttatcccctccgaagacaagcattttacactcaagactgcaaatgatggtgagcgaaccacagaacttgacggggtctatataacagaaaatataattgtcatcgtcgaggatactcatcgaaaccctgcaaaagaacacttagcgaagaagaggctcttcgctgagcttgcaacaaaacatacgaccactctagtagaaacatttaaagagcaccttcctgactttgataactatttcaataagaaaaattattcagaagaagactatgtaataagatacacctactttagcatgtaccccataggaatggagcacattgaagctgctaatcgcgccggaattatcgtagtagagagaccactagcaaattattttagtgcgctcgtgaaaactatagcaaaatctgcaaagtacgagatactaaagttcttgaaaatcgaatactctgaaataggcatggccagagtttcaggtagaggggcgggcaccgactctaaataccatggtttcttgctcccagaacggaatagtacttatccggacgggtataaggttatatccttttatgcggaccctagttcgctactgaaaaaaagttacgtcttgagaaagaatagctggacagaccctgacaagtcctatcagcgaataatagacactaagaaaattcgtctgatgagaaaatatttatgcgaatccaaaagagtttatgtaaacaacataattgccacactgccttctgaaaccaacattcaagaatttaagtctacacctaaagaagggaagccaagacaactcgcaccggacgaactgaaaaaggtaaaacctgtaaccattactcttccggatgagttcaacgtggttggtcttattgatggtcagcaccgcgtcttctcgtatcatgaaggttatgacatacatgaaaacgacatcagcaaacttcgagactgtcagaatctacttgttaccggaatcatttacccagaagaggtaacagaggacgagcgaattcaatttgaagccaaactgtttcttgagataaacgatagacagacaaaagtaaaatctgcacttactcaagaaatcgagctgatagttaatccctattcaactactgccgttgcgagagcggtcattgcaaagctagcgagaaatggccctctaaaagaccgtttagaagaacatgtttttgatgatgcgaaaaaattaaaaatctcttcaatagtcagctatggtctgaagccgcttataaaaagagatggggatgactctctttatagcgtttgggatgaacctaagttgaaagaggaaatatctaaacagccgaagaataaggcggcgttaaacaagtacattgatttctgccatgtagaaataaataaaatcttgcaagccgcaatggagtctaacccatcgcaatggcacatagatcatgaaagtaaaatgctaactcccacctcgataaacgggctcattcgctgtctacgccttatcattgaaaatgaagacaacatgtccctagaaacttacagagatagactaaagagatttggagactttgactttaatcaattcaagtccagccactggaaccttatgggcacatcaatatacgagaaatatttttcttaa

SEQ ID NO: 360231 - DNA, 921 bp, Pseudomonas aeruginosa
atgaatagtatggttgaacttaacattccaaagcctagagcggatttgcttcatggcaatagcttggatctgataaatcaatatggcgatggtcatttctctttgattgtgacgtcgccaccttactttattggtaaggaatacgatacatcgagatgtactaaagagtttcttaagcttcatgaggagctactgccgaagcttcttagaactttaaaacctggtggaagcctgtgctggcaagttggctatcatgtggcggatggcgctctcactcctttagattttcttgtgcatcaagcaatgtcgaagcatgaagagcttgtgctccgcaacagaattgtctggatgtttcgccacggcgctaattgccaaaaacgctttagtggccgccatgagactatcctttggtacactaagggggatgattacaatttctttcttgatgacgttagggttccgcaactctatcctggcaagcgtcattataaaggcgataagaaaggagaacatagcggcaaccctcttggtaaaaatcctagtgatgtatgggaagaagaactaaagtctgatgtatgggacatccctaacgtaaaagcacgccatatcgaaaagacagggcatccatgccaatatcctacagcgctagttggcagacttgtaaaagctctttgtccaaaagatggatgggttcttgatccttttgcaggttcagggtctactggggttgcagcaatcttagaaggacgaaattttgtagggtttgatactgatgaacaatatctaacttttgccaaggaacgaatcgatgctgcactagcaggcaatgcaaaggttcgtgaagacaaaccagttagaaagcctcagcctaatgaagcggtatcccaaagacctgatcactttaaaagctcgaaagattga

SEQ ID NO: 360232 - DNA, 1470 bp, Pseudomonas aeruginosa
gtgctgggtcacgttgcgccgcaggctgcgccactcttcctcgctcagcggacgtccgaggcgcgccggatcgggatcgtagaccgggtagccgtcgcgttcgccgagcttgcggcccaggtacaggtcgaggatcccggccgccggggtgtagcgggtagtgcggtcgctgcggtactcggagcgggtcgcggccagttcgtattcccaggaagtattggcgacgcggtcgctgtagccgagggtgccggtccaggacacctcgcgccacttgctgttgttgctgctcttgccgccgatctcctcgggcgagaacagccggtaccagcgctccaggtcgccgctggaggcattgatgaagtccggcgaggtgaaggacggcccgcgggtattgttctgcaggtggtcgaagccgaacagcaggtcggcgaacagcttgccgctgtcgctcaggtgccaggtgccgccggcgtagccgtcgtagttttccttcttggtctgcagggtccagtagttgttgtagtactggtcggtcatgcagcgatagccccccctggcgcccggcaccggcgccacgttgccgccgaacaggccgccgaggccggcgcaggaggcgtcgccgaggtagcgtccgctctgcgggttcagccggtagccgacgttgttgccgtccgggtagctgtccatgaaaccgcgctggttggcccagaccggctggcgctgctcgacctgcaggccgaacaggccttcgaagtcgcccgtcgcgccgccgccgaccagttgcaggcgctggttgtcgccgccgccgcgctcggtggtgccggcgcgcaggttgacgtcgacgccatcgaatttcttcttcaggacgatattgaccaccccggcgatggcatccgagccgtagatcgccgaggcgccgccgctgaggatctcgatgcggtcgatcatgaccgccgggatgttcgccaggttggtgaagttcaccgagccgccataggcggtcgggtagtcggcgacgcgccggccgttgatcagcaccagcgtgtggttggggccgagatcgcgcaggttgagggcgttggccgccggttgccaggtgttgccgtagtcctcgccctgggtcatgccggtgttctgggtctgcgtctgcaaggcctcgaagacgttgcggtagccacggttctggatttcctcgctgctgatcaccgtgaccggcgacggcccttcctgctgggcgcggggaatccgcgagccggtcaccaccacccgctccagggtctgctccgctttcgccgccagcggctgcaccttcgccgccggtacggccgcgcgcagcggcgcggcggaaatcaccgcgccgcgctcggaacggcggaactgcaggccgctaccgcgcagggcctgttccagggcctggtcgacactcagcggaccgcgcaccgccggcgcctgccggccgcgcaccagtga

SEQ ID NO: 360233 - DNA, 663 bp, Pseudomonas aeruginosa
atgcgtgacatcatcgacggctttctccgcttccagcgcgacgcctacccggcgcgctcgcaactgttcaagtccctggccacccggcaagcccccaaggcactgttcatcgcctgctcggacagccgggtggtccccgaactgctgacccagcgcgagcccggcgaactcttcgtgatccgtaatgccggcaacatcgtccccggctacgggccgcagcccggcggggtcagcgcctcggtggaatacgcggtggcggtgctcggggtcggcgacatcgtggtctgcggccactcggactgcggcgcgatgggcgccatcgcttcctgcgcctgtctcgaccacctgccggcagtggccggctggttgcaccacgccgaggccgcacgggcgatgaacagcgcccacgaacacgcctccgaggcggcgcggctggacgccctggtgcggcacaacgtgatcgcccaactggccaacctgcgcacccacccctgcgtcgcccgcgccctggagcagggtcggctgaacctgcacggctgggtctacgacatcgaaagcggccgcatcgacgccctcgacggcgccagccggcgcttcgtctccctcgccgagcatcccgaagtgcgcgcggtaggcggcgaacccgggcaggcggtcgcctga

SEQ ID NO: 360234 - DNA, 3048 bp, Pseudomonas aeruginosa; identical to SEQ ID NO: 324953

SEQ ID NO: 360235 - DNA, 696 bp, Pseudomonas aeruginosa
gtggccgccgaacacctgctggccgagcacgcagctctccaggccggtatcggtgaagaaggccttggccaccggggtcaacagggccaccagggcttcggcctggctgcgttcttcctggtcctcggcgtacttggccaggtcgagctgctgcccgacataggtggaaaaggcgcggccgccctcggtcagcgccttcatggtgagcagcatgcggcgcacgtcggggtgcacgatgatcgggtcggcggccttgtccctggccaccgggccggtcggcgcgcggctttgcaggcgctcgcgggcgtaggcgacggcgctctggtaggagcgctcgccggtggccaggccctggatgccgacgccaaggcgctcgtagttcatcatggtgaacatcgccgccaggcccttgttgacttcgccgaccagccagccactggcgccgtcgaagttcatcacgcaggtggccgaggccttgatccccatcttgtgctcgatggagccgcaacccaggctgttcttctcgcccagcgagccgtcggcgttgaccagcaccttcggcaccaggaacagcgagatgccgcgcgaaccggccggcgcgtcgggcagcttggccagcaccaggtggatgatgttctcggtgaggtcctgctcgccgccggtgatgaagatcttcgtcccgctgatcctgtatga

SEQ ID NO: 360236 - DNA, 126 bp, Pseudomonas aeruginosa; identical to SEQ ID NO: 352016

SEQ ID NO: 360237 - DNA, 1407 bp, Pseudomonas aeruginosa
atgaacgacccccagggcttcgaggccatctcgcgccgcgaacagggcctgcaacggcggctctcggccgcgcagatgagcatgatcgccatcggcggcgccatcggcaccggcctgttcatgggcagcgccttcgccatcggtttcgcaggccccagcgtcctgctcagctatgccatcggcgcgctgatcaccctgctgctgatgggctgcctggcggaaatgaccgtggcccatgccacccccggctcgttcggcgccttcgccgagcactacgtcggcccgctggccgggttcctggtgcgctacgcctactgggcggccatcgtcctggcggtgggcaccgaggtcacggcggtggccatgtacatgaagtactggttcgccggtatcccggaatgggtctggatcatctccttctcgaccctgctgatcggcctgaacgccagcagcgtgaaagccttcggcaacttcgaatactgcttctcgacactgaagatcgccgccatcgtcgccttcatcctgctcggcgcctacctggtgttcggctccgccaacccggcctacggcgtgcacaactacagcgcccacggcggcttcttcccgcacggcctgaaaggcatgtggatcgccgtggtggtgtcgatcttcagttatctcagcgtggagatgatcgcggtcgccgccgccgaggccgaacatccggaacaggcggtgaggtcggcgttccgctcgaccatcgtgcgcctggtggtgttctacctgctgaccctggcgctgatgctcgccatcgtcccctgggaccaggccgggcagagccagagcccgttcgtcacggtgatgcaggcgatcggcctgcccggcgccaccggggtgatgaacttcgtggtgctggtggccgcgctgtcggcgatgaacagccagctctacatcaccacccggatgatgttcagcctgtcgcgcgcggggcacgcgccgaagggcctcggcgaactgagccgccagggcgtgccgctgaacgcgctgctgctgtcgagcgtcggtatcgccctggcgaccctgctcaacctggtctaccccgagcagtccttcaccctgatgatggcggtgtcgatgttcggcgccctcttcacctggctgatgatcttcttcacccacctctgcttccgccgccaccgcgcccgccacggcggcgcgccgctggccttccgcatgcgcctggcgccctggtcgacattgctcggcctggcgctgatggcggcgatcctggtcaccaccttcttcaccgaggcgttccgcatgaccctggtcttcggcgtgccgttcctcgcgctgctcagtgcactctacctggtcttcgtccgcaagcccggcagggattgtccgatagaacgggcaacgccctag

SEQ ID NO: 360238 - DNA, 1650 bp, Pseudomonas aeruginosa
gtgcgacggcaccatgtattccggcaggcgctcgcgcagcgccgtcttcaactgcgcccggcactccgcctgcgcttccggcgaatccgcgaccgccggctcctgcgccaccacgtagcccaccaactgctggcccaccgcgcccggctgggccaccaccaccgcctcgcgcaccgccggatgctcgcgcaggcgcgcctcgatctctcccagttcgatgcggaagcctcggatcttcacttggtgatccacccgtccgaggtagtccaccaccccatccgcacgcccacgggtcaggtcgccgctgcggtacagccggctgcccggcgcgccaaagggatccggcacgaaacgctcggcggtcagcgccggacgctccaggtagccacgcgccaccccttccccgcccaggtacagttcgcccgccacgcctaccggcaacaggttcaactgcccgtcgaggatgtagccgctacggttgcccagcagcgtaccgatcggcatgtaggccgcgccgcaggcatcgcccgcccgtgctttccacagcagcggcgtcaccaccgtctcggtcgggccgtagccgttgaacaggtacttcggcttcagcgcccgccacgccaggtcatagctggcctgcgccaccgcgtcgccgccgaagcaatacacccgtaccggcggcggattgccgtcgcgctcggcatgctcggccagttgctgcaggtacaccggcgggaacacccccaccgttaccccgtggcgatgcatctcggcgtaggttcgttccggcagccacaggctgtcgtcgcggatcagcacccgcgcgccgttgatcaacgggtgcatccagccttcgtgggaaccgtcgaaggcgaacgacatgaagtgcagctcgcagtcctccggggtcatctcgtagcgctcgccggtagccacgatatgggcgatcagcggaccgtgggacaccgccacgcccttgggcatgccggtggagccggaggtgtagatcacataggccaggttgtcgccgtgcagcgccacctctggatcatgggcggggaagccggcccactcctcctcgcgatccacggacaggcaggacaacccctcggggatcggcagacgctccagcaggtggctatgggtcagcagcaggtgcgcgcgactgtcctgcatcatgtacagcaggcgctcgcgcgggtattcgatgtccagcggcacgtaggcgccgccggccttcagtaccgccaggaacgccaccatgatctccgcgctgcgctgcatggcgatcgccacccgcacctcggggccgacgcctcgggcgatcaacgcatgggccaggcggttggcccggctatccagctcggcgtaggtgagcttttcctcgtcgaagatcaccgccaccgcatccggcgccatacgcgcccgctcggccactcgctggtgtaccagcggcgttgccggatagcccgagtcgctgcggttccagatagcgccgatagcgctaagctccgccttctcgagcatctgcagatcgaccagacgtcgctgcggatgttcggcgaatgcctccagcagagtcgtcaggtggcgacccaggcgctcgatcgtagcggccgggaacagtccgcgatcgtagctgaattgcagtga

SEQ ID NO: 360239 - DNA, 303 bp, Pseudomonas aeruginosa; identical to SEQ ID NO: 324882

SEQ ID NO: 360240 - DNA, 585 bp, Pseudomonas aeruginosa
gtggctgagactgcgctccggttgcaaggcttccaccagttgctcgaacggcaagtcctggtgcgcctgcgcctccagcgagcgctggcgaacctggtgcagcaatcggtcgaaccccatctgcccatcgatgtcggccttgagcacctgggtgttgacgaagaacccgatcagtcgctcggtttcgacccggttgcgattggcgaccggcacgccgacacggatatccgactgaccgctgtagcgatacagcagcgcctggaacgatgccagcagcaacatgaaggtactcgcaccctgccgttgggcaagcgccttcagccgcctggcccgctcggcgccgagttcgaactccagccgcgcgccgcgaaagctctgctccgcatagtccggatactgtatcggcagcgccggcagggccgcttcgcgcccctggctgtaggcggcatagagctggaccagctcttcgaccatcaactgcatcgaccaaccgtcggagacgatatggtgctggaccatgaccagcacatggtcattcggagccacttcgaacagactgatccgcagcaacgcatccgtccgtag

SEQ ID NO: 360241 - DNA, 681 bp, Pseudomonas aeruginosa; identical to SEQ ID NO: 324917

SEQ ID NO: 360242 - DNA, 207 bp, Pseudomonas aeruginosa
atggcagttctcgaacagtaccgggagcgccctggcatcaagcaactgcgtatgcccttgcagtcccttatcctgaataaactgactgagttgcacccgcagatccatcgacaattcgacgctgtacagttccagctcatcatctacagggatgaagcgagtacccgggtaggtgtccagaatgaaatcggtcacataggcatgtaa

SEQ ID NO: 360243 - DNA, 1140 bp, Pseudomonas aeruginosa
atggtcggagtagatcgactgcggtgcgccgtagaaggggttgatcacccggtcgaacagccccgcgctgaaattcaccgtgtgcaggaaggtgcgcttgccgacccgctggctcggatcaggcgccttcgagcggagaagaatcgccggggtgttgatgccgccgccggagagcacgtagtgcctggcccggaccctgatccggcggccgttgggcgccacgcagcgctcatccatgcccaggcattcgaggcccgtcaccttgtcgccgtccagcagcagccggttggcgcgcgccaggtagagcagctcgccacccttgtcgagggtcgccgggatggtggtgaccagcatcgactgcttggcgttgaccgggcagcccatgccgcagtagccgaggttccagcaaccgaggacgttgcgcgggatgaccttccagtgatagccgagcttctcgcagcccaggcggatcacgtcgttgttggcattcggcggcagcgcccagggcgccacgtgcaggcgctgctccattttctcgaaccagggcgccatgtcctccgcgctgtggcccttgaccccgtagacctgggcccagtgctgcagggtcggttccggggtgcggaagctgctggtccagttgatcagggtggtgccgcccacggcgcggccctggaggatggtgatggcgccgtccttgctcatccggccgatgccttcctggtacagctcggggtaggcgtcggcctcctgcatcttgaaatcgctgctggtcttcagcgggccttcttccaccagcagcaccttcaggccggcggcgctgaggatttccgcggtggtgccgccgccggcgccggtgccgaccacgaccacgtcggcctccagctccaggtcgtcgtccaggcgcgagccgttgtaggttttccagccgcgggcgaggccctcggcgaacagatcgggtacaggcatgaatgcactctcaggctaggcggcttcgggctcttcgtattgttccgggggcggctcaagcgatcttcggcggtccggggtagccacaatgggcccacgcctcggggcgggcgtaccaggccatcatcgccagttgcatcagcgaactgtggcccatccgcaacaggccgatga

SEQ ID NO: 360244 - DNA, 1197 bp, Pseudomonas aeruginosa
atgcaccccgtagtacagctcggcgttgtactcggtgtcctgcagcggctggtacagcgggttgtcgtagtcgtcgatgccgttcacctggttcaccaggcgctggcgcttcttcacatcgtcgttgacatggatgcgcgcgatgcccaggccgatgtcgtccttcggccgcgcgtcgaacggacccttgtagaccaccccgagctgctggtagttgtccaccacgttggtcgccttgtcgtggaccgtcaggttggcgaacaggctcaacccgcgcgaggcatcgccgttgtgcgaagtgacctgctgctgcgccaccacccaccagccatgcttgctgccgcgcgacttgaagtcgttgccggtcagcccctgcggctggccgtcgacgtcgtcgtagacgtcatcggccttcgccgtgctgtagtagtaacccagccggtactcgcccggcagttgctcggcgccgaccttcggctgccagatcagctccaccggcagcaacgcgcccttggtcccgctgccgctcatcttgaagccgttgccggtctccaggttcgacgggttctgctcgtaggcgccgacctgcacgtaccagtccggcgcgaagttgtacttcacccgcaacgcccactggctgaccggccagttgtaccagatgctccccgcccagttgcccacctgcgagccgcagaaggccaggttctggaaatcgcaggggaagctgttgaagtcctcgccctcgccgaaacggccgaatttcacgtccagcgcgccgtcgaagtactgctgcttgagccacagctgggtcagccgccaggtctgcccgcggccccagacctcctgcaccgagctgatgtgcccggcacgcgggtcgccgatgcggtcgttggaaaggttcttgccgttgcgctcggtgacggtgaactggaactcggtggccttccagccgaggatcttctccaggtccatgtgcacgcccagagcgaactggtcggtgtagcgcccggtcttgtcgtcgtcatagccgccgtcgaggttggccgccgcctcgccgacgtactccagcttgaagtcgtagcccttctccagcagctcggtgcgcttgccgccccagtcgccgagcatccatttcgagttcggcgagaacgcctcggcggcgtgcgccgcgttgcacagcagggaggcggacaatag

SEQ ID NO: 360245 - DNA, 246 bp, Pseudomonas aeruginosa; identical to SEQ ID NO: 321502

SEQ ID NO: 360246 - DNA, 1725 bp, Pseudomonas aeruginosa
atgaacaccctggagcaggaatacgacatcgtggtgatcggcggcggcaccgccgggccgatggcggcgatcaaggccaaggagcacgaccgcgaactgcgcgtgctgctggtggacaaggccaacgtcaagcgcagcggcgccatcagcatgggcatggacgggttgaacaacgccatcgtccccggccacgccacggccgagcagtacacccgggaaatcaccgtggccaacgacggcatcgtcaaccaggcggcggtatacgcctatgccagccacagcttcgagaccctgcggcagctggatcgctggggcgtcaggttcgaaaaggacgagaccggcgactatgcggtgaagaaggtccaccacatgggcgcctatgtgctgccgatgccggaagggcacgacatcaagaaggtgctctaccgccagctcaagcgtgcgcggatccccatcgccaaccgcctggtctgcacccgcctgctcaccgatgccgagggcgcggtgaacggcgtactcggtttcgactgccgcagcggcgacttccatgtgatccgcgccaaggcggtgatcctctgctgcggcgcggcgggccgcctgggcctgccgtcctcgggctacctgatgggtacctacgagaacccgaccaacgccggcgacggctacgccatggcctatcatgccggcgccgagctggccaacctggaatgcttccagatcaacccgctgatcaaggactacaacggcccggcctgtgcctacgtcaccggcccgctgggtggctataccgccaacgccaggggtgagcgcttcatcgaatgcgactactggagcgggcagatgatgtgggagttccaccaggaactcgaaggcggcaatggcccggtgttcctcaagctcgaccacctggcggaggaaaccatccagaccatcgaggacatcctccatggcaacgaacgccccagtcgcgggcagttccacgccgggcgcggcaccgactaccgccagcagatggtcgagatgcacatttccgagatcggcttctgctccggccactcggcctccggcgtgtgggtcaacgagaaggccgagaccagcgtgaagggcctctacgccgccggcgacatggccgcggtgccgcacaactacatgctcggcgccttcacctatggctggttcgccgggcgcaacgccgccgaatacgtcgccgggcgcgccttcagcgcggtcgaccgcgcccaggtcgagcgcgagcgtgcgcggatcgaggcgccgctgctgcgcgagcatggcctgccggcggcgcaggtggagtacaagctgcgccggctggtcaacgactacctgcaaccgcccaaggtgacccgcaagatggaattgggcctgcaacgcatccaggccatcgccgaggacctggagcggatcaaggcggacaacccccacgagctgatgcgcgccctggaagtcagcgttatccgcgattgcgcggagatggccgcgcgcgcctcgctgttccgcaccgagagccgctggggcctgtaccaccaccgggtggactatccgcggcgcgacgacgctgcctggttctgccacgcgcacctgaagaaggacgagcagggacgcatggccagcttcaggaaaccggtcgaaccctacctgttcgccatcgacgagggcgaacagcaggcctaccagcgcctgcggctgaggaacgacgccgcctag

SEQ ID NO: 360247 - DNA, 750 bp, Pseudomonas aeruginosa
atgggcaaactgctcccgctttcccccgtgccgctgtacagccagctcaaggagctgctgcgcgggcgcatcctcgacggcgtctacccgccgctcagccgcatgccctcggagaacgagctgggcaaggccttcgacgtcagccgcatcaccgtgcgccaggcgctcggcgacctgcagaaggaagggctgatcttcaagatccacggcaagggcaccttcgtcgcccggccgaaggcgttccagaacgtcagcaccctgcaaggcctgggcgagtccatgacgcagatgggctacgaggtcatcaaccgcctgcacggcctgcgctacgtgccggccggcgcgcgggtggccgagcgcctgcgggtggaagagggcagccctgtgtgcgagatcaagcgggtgcggctggtcaaccgcgagccggtttcgctggaagtcacctacctgccgcaggcgctcggcgagcgcctggagaaggccgacctggtgacccgcgacatcttcctgatcctcgagaacgattgcggcattcccctcggccatgccgacctggccatcgacgcggtgctcgccgatgccgacctgacccgcgccctggcggtcgaggagggcgcgccgatcatgcgtatcgagcgcctgacccatgccgccgacggcgcgccgctggacttcgaatacctctactaccgcggcgacgctttccagtatcgcctgcgcatcgatcggcagaagggagagcgggcatga

SEQ ID NO: 360248 - DNA, 1452 bp, Pseudomonas aeruginosa
atgatcaggatcgacttttcccagttgcaccaggcccgcgaagatgccgcggcggccatgccgagcatcgccggcaagaagattctcatgggcttctggcacaactggccggccggcgccgccgacggctaccagcagggctcgttcgccaacatcgcgctggaagacgtgccgagcgagtacaacgtggtcgccgtggccttcatgaaagggcgcggcatcccgaccttccagccatacaacctgtccgacgcggagtttcgccgccaggtcggcgtgctcaacgcccagggccgcgcggtgctgatttcgctggggggcgccgatgcgcacatcgagttgcacgccgggcaggagcaggcgctggccgccgagatcgtccgcctggtggaaacctacggtttcgacggcctggacatcgacctcgagcagagcgccatcgacctggccgacaaccagcgggtgctgccggcggccctcaagctggtgcgcgagcactacgccgggcagggcaagcacttcatcgtcagcatggccccggagtttccctatctgcacaagaacggcaagtacgtgccttatctgcaggccctggaaggcgtctacgacttcatcgcgccgcagtactacaaccagggcggcgacggcctgtgggtccaggaggcgaacggcggcaagggcgcctggatcgcgcagaacaacgacgcgatgaaagaagacttcctctactacctcaccgagagcctggccaccggcagccgcgacttcgtgcggatcccggcgcagcgcctggccatcggcctgccgagcaacgtcgatgcggcggctaccggctacgtgatcgatcccgccgcggtgagcaacgcgtttcgccgcctggaagccgccggtcacgcgatcaagggcctgatgacctggtcggtgaactgggacgatggcctgaacaagcgcggcgagcgctacaactgggagttccgcaagcgctacgccagcctcatccatgacggcgagggcggcgaccagcgcccggcggcgccgcagggcctgcgtctgctggagcgcggcgagaccagcctggtgctggcctggaacgcctccagcgggcagcgtccgatcgattactacagcctctatcgcgacggcgccatggttggccagagcgccgcgctgggttccaccgacagcggcctgacggcggacacccgctacagctatttcgtcaccgccaccgatacccagggcaaccagtcgctgcccagcgaaggcctggaggtcagcaccagcggcggggcggtggatccgcaattcccgcaatggcgggagaaccaggcctatcgggtcgacgatggggtgacctacgaggggctgcgctatctctgcctgcaggcgcacacctcaaacagcggctggacgccgccggtagccttcaccctctggcggccgctgcgctga

SEQ ID NO: 360249 - DNA, 543 bp, Pseudomonas aeruginosa; identical to SEQ ID NO: 321506

SEQ ID NO: 360250 - DNA, 6378 bp, Pseudomonas aeruginosa
atgagtgcgtcagaagacctgcaatccgctgtgcaaccggccgcgagcgaagcgctcgaaggattcccgctgtctcccttgcagacccgcgcctggcgccgccatgccgagcggccggaaaatacggttgtcggcgtgcgcctgcacgccccggccgatcccgtggcgacgctggagcggctgcgccgggcgctggacggcgaggcgcaactgcgcgtggcctaccggacgatgccgggcatgagcctgccggtgcaggtactggatgggcgcgcggccgatctgctggtcgagcgcctgccgggagatggcgactgggccggacgcttcgcgcgcgaaagcgcgcgtctcgccgcttcgcccctgggcggggaaggccagccggtactggcgctcggcctgctgctggacgccgccggagagacgctccaggggctgttgctggcggcgccggcgttcgtcgtcgatgcggccagcctggtggcgctgctgcgccgcggcctggggccggccggccaggcgagcgcggacgagggagacgaggcgctgctgttccagcatttctccgagtgggccaacgaggcgctggccggcgaagacggcgaaagcgccagcggttactggcgagagcaggcggccgttgcggcggagagtccgctggcgctggcggacgacctgggcgaaggcgagtggacggcgcggcgcctgctgccgcgcgcgctgctcgaacgcctggcagccaacggcttgccggaggcggccgccctgctggcctggacccaggtcgccgggcagttccagggcgacgagggactccctctggaaatggcgcgactggtctcggggcgcctgttcaacgagttcgccgagctggccggaccgttcgccggggtcgcgccgctgtgcctggagaatgtccgcgcgggcagcgtcggcgagcggctcgacgccctccaggcggcgatcctcgcccaggaggaggcagcggccctgcgcgatccctttgcccccgactggccgctcgccgagttgggcttcgcctggctggcgggcgaactggatggcgccggggtggccgagctggattgccgtcagccgccgctgggcgggttcctcgagttgcaggtgctgccccacggcgaaggccggctggccagcctgcgggtccgccgcgaccatgacggaacgctggccgggcgcttgctcgacgcctgggtcgaatgcctggaaagcatcgccgccgacaggcaactgccactggccgggctgccgttgatcggcgcggccgagcgcgagcgctaccaggcctggcagggcgagcgcgtggagcccgcgccggtggaatccctggtggccgcgttcgatctgcgcgcctccctgcagccgcaggcgccggcgttgctggatgcccacggcagcctggatttcgccacgctgcgcgcgcgcagcgaagcggtcgccgaagcgctgctggctgccggcgtgcggcccggccaggcggtggcggtgatgaccgggcgcaaccgcgaggcgatcgtcgccctgctcggggtgatgcgcgcggcggcggtgtacaccccggtcaatccggagtttccggcggcgcgggtggagcggatgcgcgaagcgggcgggatcgtcttcgcccttgccgatgccgagtgcgccgggcgcgcccgcgaggacttcgccggggcctgcctggacctgtcgacgctgccgcttgccggcagcggcatgagcctgccggcgccgggcgggcgcgatgcggcctacatgatcttcacctcgggcaccagcggccagcccaaaggcgtggtggtcgagcacgccagcgcgctcaacctgtcccaggccctggcgcgcacggtatacgcgaacgtggtgggcgagggcctgcgggtgacggtcaacgcgccgttctccttcgattcctcgatcaagcagattctccagttgctctccggccattgcctggtcctggtgccgcaggaggtgcgcagcgatccgcagcggatgctggggttcctcgaagaacggcgcatcgacgtgctcgactgcaccccgtcgctgttccgcctgctgctccaggccggcctcgacgatgcccacccggcgctgcccgggcgcatcctggtagggggcgagcgcttcgacgaagcgtcctgggaggtcgccgccggctggcgccgctgccaggtgttcaatctctacggtcctaccgaagccacggtgaacgccagcctggcgcgggtcgccgagcatgcgcggccgaccatcggccgcgccctggccaacgtcgatctgcatgtggtcgatggcctcggtcgtcgcaagacccgtggcgccagcggcgaactgtggatcggcggcgccggggtggcgcgcggctatgctggcgacgccggcgaggcggccgggcgcttcctcgaggagggctggccgggcagcggccgcctgtaccgcagcggcgacctggtgcgctggcgcgccgacggttgcctggagttcctcgggcggatcgacgaacaggtgaagatcaacggctaccgcatcgaactgggcgagatccgcagcgcgttgctggaacacccggcggtgggcgaggcggcggtactcaccgacgaggccgatgcggccgaaccgggcgcggatcgccggatcgtcgccttcgtcaccgccgccggtgagaccgcggacgagtcctggctggaagtcgacctgcccagcgggcaccgggtcgccggactgaacctcaacgaaaccgagtacgtctaccaggaaatcttcgtcgacgaggtctacagccgcgacggcatcgtcctgccgccggacgcggtggtcctcgacgtcggtgccaacatcggcctgttttcgctgtacatcgccagccgcgcgccgcgcgcgcgagtggtcgccttcgagccgctggcaccgatccgccggcgcctggaggccaacctcggacgctacgcaccgcaggtcgaggtattcggcatcggcctgtccgacgccgagcgcgaggaaaccttcacctactatccgggctactcgaccttctccgggatcgccgagtacgccgacgccagcggcgaacgcgacgtcatccgacgctacctgagcaaccagggcgaggagggcggggccaacctgctgctggacaacatcgacgaaatcctcgacgaccgcctgcgcgccgaagcccaccgctgccgcctgcgccgcctcgaccaggtgatcggcgaactgggcctggagcgtatcgacctgctgaagatcgacgtgcagcgcgcggaaatggatgtgctgctcggtctcgacgatgcggcgctggccaaggtccggcagatcgtcctggaggtccatgacaagcgcgacggtgccaccgccggccgcgccgatgccttgagcgaccttttgcgccgccatggcttcgaggtgagcatccgtcaggacgcgctgctggagggtaccgaccgttacaactgctacgcggtgcgcccgggctatgccgagtcgctggctgagcgcatcgactggcgcgcgctcgcgccgcgccccgccgcggccctcggcggcgagctgagcgagcaggccctgcgtggcttcctcgaggcgcgcctgccggcctacatgctgccgagccggatcgcccgggtcgaacgcctgccgctgaccgccgaaggcaagctcgaccgtcgcgcgctgttggcggcgctggccgccgaggcggccgcgcagaccctggaagcgccggccaatgccaccgaggcggccctgctggagatctggaagagcgtgctgaaacgcccggcgatcggcatcagcgacaatttcttccaggtcggcggcgactccatccgcctgatccagatgcaggtcatggcgcgcgaggcggggcttgcctttaccctgcgcgacgtgttcaaccaccagagcatccgcgaactggcgcgcctgctggccgctccggcgagtccggcggatgcggccgcgagctcggcgccgcgggcgctggagccgttcgccctgttgtcggcggcggaacgcaagcgcctgccggaggggctcgacgacgcctatccgatgaccagcctgcaacagggcatgctcctgcaaagcgaggccagcggcgatccacggctgttgcacaacgtcgtcctgcacgaggtgcatggacgcctggacggcgagttgctggcgcgcgcctgggcgatcctgatcggccgccacgcgatcctgcgtaccggcttcgatctgcacggtggccaggttcccctgcaatgggtccacccggccgctgcggtcgccgccgaggtgccggtgcacgacctgtgtggcctcgatggggaaacacggcgcctgcgcctgcgtgcctggatcgaggaagagcaggccaccccgttcgactggagccgcccaccgctggtgcgcctcgccgcgctggcgctggacgagcggcgcttcgccctgggcgtcgccgaacaccatagcgtgctggacggctggagcctgcaaagcctggtggacgagctgctggcggtctacgccgaccttctcgccggtgtcgtcgcgcgggaagcggaagcgcccgcggtaggcttccgcgactacgtggcgctggagcgtgaggccgaggccaacgccgcctcggcgctgttctggctcgactacctggccggcgcccgctaccggccgttgcccggcctggcggaggagggaccccggcgcatggcggcggtccgcgtggacgtgccggccgacagcctgtcgcgcttgcgcgccctggccgaacgcagcggcttgcccttgcgttcgttgttgctggcggcgcatggccgagcgttgtgccgcttcagcgatgccgatgaagtagtcaccggcttcgtcagccacgggcgccccgaggagccgggagcggaccgcctgctcggcctgttcctgaacaccctgccgtgccggctgtcggcttccgtcgatctgctcgacagcgcccgtcgcgcattcgactacgagcgcgcgagcctggaacatcggcgccatccgctggcggcgattcgcaggcgcaaccgcgagttgcgcctggacagcctgttcaacttcgtcgacttccaccaggacgacgccgcgccgacggcgggagtaaggcacggcggcatcctcgaccaggtggtggtggacgtcgacgtgccgctggcggtggacttcgaggtggccggcgagcgcctcgaggtgggcttccagtacgccgccggacgtttccccgccgagcgcgccgaggcgctggccgacgcctaccgcgaggcgttgctggcgctgctcgaggacccggcgcagccgcccacggcggcccaggccgaggacagcgtggagctgcggcgggtgctcaaggtgttgtcccgggtgctcggccggccgctggcggccgaccagggcttcgccagtgccggcgggcattcgctgctgggcgtgcaggcgatcgccgaattgcgccggctgaccggcaggcaactgagcctggggctgttgcagggcgatccggatgcccgcgaagtggtgcgccgctgccatgccgccgacgcgccgccgttgccgcccgccaccgagcgcgcccgggccctgtggttgcagcgcagcgggagcgcgcagccgcgcctgcgcctgatcgcgctgccgcccgcgggcggcaacgccggcactttccgtggttgggacgcgcgcctgccggcggacgtggagctgctggcgatccagtatccggggcgccaggaacgccaggacgagccattcgtcaccgatgtagaggccatgctctgtgccatcgacgacgcgctcctgccattgctcgaccgtccgttcgccctggtcggcgccagcctcggcggcatgctcgcctacgaactggcggcacgcctggaaagcctgcacggcctgcgcgccaggcagttgttcgtgatcagcagccgcgctccggggccggacctggaatacccgcgcttccatgcgatgggcgacgccgagttgctgcgaaccctgcgcgagtacgacgtgctgccgctggaagtgctcgacgacccggagctgcgcgagatcagcctggctaccctgcgcgccgattcgcgcctggccgccgactatcgctaccgcccgcgcgagccgctggccataccgatcaccgcgatcctcggcgagcaggacccgggcgtctccagggcggccatcgacggctggcggcggcacgccagccgctacgagctggagaccctggccggcggccacggcctggtggtgacggcggcggaggaggtctgcgcgatcctgcggcagcgcctggcgcccgatgtgcctggcggcgtgccggcgaacctggcaacctga

SEQ ID NO: 360251 - DNA, 1020 bp, Pseudomonas aeruginosa
atgagcgcctcgttcagcgcgccgcgcctgcgcccccggcagctctcggccggcgacctggtggaggaaagcctgctcgacccggccaacgactacctgcgcatcgtccgcgcgcgccagccgggcatggacctgcggcaatggatcgccgccgccggcgcagggctgcgcgacagcctgctgcggcatggcggcatcctgtttcgtggcttcgcggtagacggagcggagggcttctcccaggcggtacaaagcttttcgccgaacatgctcgactacctggagcgcgcggcggcacgccaggaagtggcgcaccgggtgttcacctccaccgagttctcgccggacggctggattccgccgcaccacgagatgtcctactcgcacaactggccgagctatatccacttctactgccagacgccgcccgccacccagggccgcacgcccctggccgacgagcgccgggtcagcgctcggatacccgaggcgatcaggcagcgcttcctccgccatggggtgtgctacgtgcgcaactacgggccggagatcgacctgacctggcaggaaggcttccagaccgacagtcgcgccgaggtcgaggcctactgccggcagaccggtacccaatggacctggctcgacgaccagcgcctgaatacccgccaggtacgccaggcgatggtgcgccacccgctcagcggcgagacgctgtggttcaaccacgcgcacatgttccatgtctccaacatgccgccggccctggcccgggccttgctcgacgaggtcggcgaacagggcctgccgcgcaacgcctactacggcgacggcagcccgatcgaggcggaggtgctggacaccatccgcgccgcctaccgcgaggaaacccgcgcgttcgcctgggagcgcggcgatgtcctgatgctcgacaacttcatcagcgtccacggccgcgagccgtacaccggcgagcgcaaggtgctggtggcgatgaccgacctgcatgtccaccaaccctga

SEQ ID NO: 360252 - DNA, 1089 bp, Pseudomonas aeruginosa
atggaacgaacagctcccagtctcaccggtcgcggcttcgcccggccgcgcaatctcagcccgcgcagcagcgaggcgctggtgcggcgcccggcggcggagcgcgacggcctgccgctgctgatcgaggcacaggctcccggcctgtccctggccgactggattcgcgagcagggccagtccctgcacgacgacctgaacctggctggcggcctgttgctgagaggcttcgaggtcgactcggcggagcgcttccgcgcagccgccgctgccttcgccccgcaactgctcgactacaaggagcgttcctcgccgcgtagccaggtcagcggcgaggtctacacctccaccgagcatccggtggaccagccgatcttcctgcataacgagcagtcctataccgccgactggccgctgtacatcatgttccattgccaggtcgcgccgctcgagggcggcgccaccccggtggcggccaaccggctggtgctccgccacctgccggacgaattgctggaacgcttcgggcgcctgggcatcctctacgtgcgcaactaccgcgccggcctcggcctgtcctggcgcgaagcgttccagaccgacagccgcgccgaggtcgaggcgttctgcgctgagcaccggatcgcccatgcctggatcggcgacgagcacctgcgcacctggcagaggcgcgcggcgttccaacgccacccgtataccggcgagcgcctgtggttcaaccacggcatgttcttccatgccaccagtctcgagccgggcctgcgcgatgcgctgctgcgcagcgtcgccgaggaagacctgccgtaccagacctactacggcgatggcagcccgatcgaggcgcagaccctggcgaccatccgcagcgccatagaccgcgagacgcggcgcttcgactggcgcgtgggcgacgtgctgatcctcgacaacatgctcgcccagcacggccgcgagccgttccgcgggccgcgacggatcctcaccatcatgtccacgccgtattccagcctggcgcccgccgacgttccgccgacaccttcgcgcctggcgctcggaggtgccgcatga

SEQ ID NO: 360253 - DNA, 3750 bp, Pseudomonas aeruginosa
atgcaggagcgacatggcttaccgttacgcagcttttcgtcgggcaaggcgctgaccgcgggacgcgcagcgcggccggaggttgcgcaggagcggcgctacctgcaaggcgccccgctggggctggagttgccgggacgaatcgccctgcgcgacccgcattgcgcctggcaatggttcgagccggaggcggccgcggaagcgttcccggcggcgcactggctggcggcgttcctggtactgctgggacgctacggcaacgaagagatcaccctgggctttcccgagccgatcacggttcgcgggcggcaggcgcccgcgctgctgcgttccgcctaccgggcgatggagtcgtccgccgaacgtagcgcgcggctggcggaagaactcgatgacgcccggcggcagctatccgccgacggccaggagcgcgccgccctggccgggtgctgcgcggtccaggtgctggcggcgcggccaacggcgagcagccccggctggctggccctggtgctggcggcggacggcagcgtcggcctggctctgcgcgatccccagtacgacgaattgcggcgtatcgccggccatctcgcgcgcctggcgcgcggcctggtcgacgcccaggcctgcgtcggccggctgccctggctggacgccgacgaagagcgccgtttgcaggccctgcgcagcgagctccaggccgccccgtcgcgcggcgtactccaccatctgttcgaggcccaggcgcggcgcacaccgcagcgcatcgccgtgcacgccgccgaccgtagcctcagctatgccgagctggagcgcgaaagcgccgcgctcgccgtgcgcctgcgcgccgccggggtggctccggagcagcgggtcggggtctgcctgcggcgcgacagcggcctgctggtcggcctgcttggcgtgctccgtgccggcggttgctacgtcccgctggacccggcctatccggaggaacgggtggcctacatgctcgacgacgccgactgcctgctggtgctggtcgacgcgagcacccgcgagcgggtcgccgcgctgggccggccatgcctgacgctggaggagggcggcgaccaggcgaacgacctggcgctgcccgcgagcgaggtcggcgccgaccacctcgcctacatcatctatacatccggatccaccggacgccccaagggcgtcgccatcgagcacggcagcgcccatgccttcctgcgctgggccggccagcactatgccgccgaagaatggagcggggtactggcggcgacctcggtgtgcttcgacctgtcggtctacgagctgttcggcaccctggccgaaggcggcacgctgcacctggtggaaaacctgttcagcctgccggactacccgcgccgcgacgagatcagcctgctcaataccgtgccctcggtgtgcgccgcgctgctcgccctcggcgacctgccgggtggggtgcgcacgctgaacctggccggcgaaccgctgcgcggccacctggtgcgacagattcgtggccaaccccaggtacggcgcctggtcaatctctacgggccgaccgaggacaccacctattcgacggcgcacgaactggatctgcacgccgaagcgctcgacgagccgcccatcggccgaccgctgcccggcaccacggtggaggtgctcgacggcttcgaggcgccgctgccgctgggcgtggccggggagctgtacctcggcggcatcggcctggcgcgtggctatttcggcaagccggagcagaccgccgagcgtttccgcgtcgatccgggcagcggcgagcgccgctatcgcaccggcgaccgcgtacgcatgcgcgaggacggcgtgctggaacacctcggccggctcgacgaccaggtcaagttcaacggcttccgcatcgagctgggcgagatcgcctcgtgcctggcgagttttcccggggtgagcgaagcctgcgccatgctcaccgaggacagcgccggcctgcgtcggctggtcggctacctggcggcgccgttcgccccgccgctccaggcgctgaacgagcaccttgggcaaagtctgccgcactacatgttgccgtcagcgttcgtggtcctggcggagctgcccaagacgctcaacggcaagatcgaccgcaaggccctgccgcgtccccaggcgaccggcgccgagccgcaggcgctgcccagcgatccgctggagcaggcgctacaccaggcctggcaggcgcagcttggtgcgccgccgcgcgccggacagggcttctacgccgccggcggcgattccctgcgggcggtgcacctgctcgcgacgctgcgccagcgactgtcccgacgcgtaccgttgcaggcgttcgccggtggcccggcgacccccgaggccctgctggaactgctgcgccaggccgcgcccgagggcgacgagccggagccgagcgccggcgccgccgggctgagcctcgccgaacggcgcctgtgggtggcccagcaactggcgccggaggacacctcctacaacctgctggcccacctgcgcatagtcggcgccacggccgacgccatcgaacaggccttgcgccagttgctggaacggcatgtggcgctgcgccggcgtgtcgaaacgggcgtcgacgggccgcagccgcatgcgctggcggcgcatgcggtgcccctgcaacgcctgctggcgagcgacgccgtccacgccgagcggttgctggaggatggcgtgcgccgtgagggcgcgcgagtcttcgacctcgcccacgaggcgccggcacgcctgctgctggtcgtcacccgcgacagcgcgcgcgccgacctcctgctcagcgtccatcactacgccttcgacgatgtgtcgctggcggtctttgccgcggaactgaagacgctgctcgatggcggtcgcctgggcgtgctcgccagcacgccggaacaggttgccgcccgcgagcgcgcggcgttggcctcgggacgcctggaccgtgtcgccgagcgctgggctgagcgtttgttgccgctggcgaaggctcccggcgccgcgccggcgcgcccggaggagagcggcgggcgcgccggccaacgcctcgccctgccggtttccgccgccgtccatgccgcctgccgggcgctggccgaacgcacctcggtaagcccgttcagtgctgcgctacaggccttcgccgaagtgctcggcgccgaactgggcgtcgacgacctgctcgtcggcgtggccctggccgggcgttcgcgcctggaaatgcaggggctggtcggctgcttcgtcaacctcctgccgctggcggtcggcctgcgtccggagcagtccgtggagtggcgcctgcgccaggtcggccatgatctgctggaactgctcgaacaccaggacgtgcccctcgaatgcgtgacccaggccctgcgccagcgcggcgccagcggcctgccgatccgcatcgcctgcggcgcgcacaacggtcgggcggccccggcggtggatgccggggtgcgcgtcgaagccgacttcatcccggtgcctggcgcgcgcctggacctgacgctgtggctggaagaccagccgcagggttggctggccgtctggaccggggtcagcgcgatcttcgacctgcaccgcatcgagcgcctgcaccaggcctgggagcggcgcctgctggcgaatgccggcgaacctatctcgaaacgcatgtcgccggagggctgcaacgcttcctga

SEQ ID NO: 360254 - DNA, 618 bp, Pseudomonas aeruginosa
atgtcgctctccgtggatctgctgctggcgttctccctgttcgccttcgtcacctccgtcacgcccggtccgaacaacaccatgttgctggcctcgggggtcaacttcggtttcgtccgctccatcccgcacatcctcgggatcagttgcggcttcttcatcatggtgatggcggtgggcttcggcctgggcacggtgttcgaggcctatccggtgctgtacaccatcctgcgctacgtcggcgcggcgtacctgctgtacctggcctggaagatcgccacgtccggcccggccggcaacgacccggagggacgtggcaagccgttgagctactggggcgcggcggcgttccagtgggtcaacccgaaggcctgggtgatggcggtcggcgccataagcacctatacgccgttgcagggctacttcaccaacgtggtggtgatctcgacggtatttgccctgatcaacgcgccgaccatcggaatctgggccggtttcggcagcatgctgcgcaacgtgctgcgcgatccgcgctggctgagggtgttcaacgtagggatggcgctgctgttggtcgcgtcgctgtacccgatcctcgcggaaagccattcggcctga

SEQ ID NO: 360255 - DNA, 867 bp, Pseudomonas aeruginosa
atgagtcgagtcacgcgcgttcgcgaagaatacgaagtccagctcgaacccctgctggaggtctccctggagcggcgcctgcccctgagccagcgtctctggcaacagggctggctgcgcaaggggctgatcctggcgctgctggcgctggcctgggagctggcggcgcgggtccagggcaacgacctgctgctgccaggcttcctgcagacggccagggccctcggcgagggcctggccagcggcgaactgccggccaaggcggggatctccctgctggtgctgttcaagggctacctgctggggatcgtcctggccttcgttctgaccagcctggcggtctccacgcagttgggccgcgacctgctcgggaccctcacggcgatgttcaacccgctgccggcgatcgcgctgctgccgctggcgctgctctggttcggcctgggccagaacagcctgatcttcgtgctggtgcattcggtgctctgggcgctggcgctgaacacctatgccggtttcctcggtgtctcggagaccctgcgcatggcagggcgcaactacggcctgcgtggcctgcgcttcgtcctgctgatcctggtgccggcggcgctgccgtcgattctcgccgggctgaagatcggctgggccttcgcctggcgcacgctgatcgccgcggaactggtgttcggcgcgagcagcggcaagggcgggctcggctggtacattttccagaaccgcaacgagctgtacaccgacaaggtattcgccggcctggccgtggtggtgctgatcggcctgctggtggagaacctggtgttcggcagcatcgagcgcctcacggtgaagcgctggggagtgcaacgctag

SEQ ID NO: 360256 - DNA, 849 bp, Pseudomonas aeruginosa
atgaacgccgcctcccgccaaccttccaggctccccgccgacgccctgctggcggtggacggagtcagcctcgaataccgcacccgctcgcgcgtagtgcgggccacccagcgggtcagcttcgaagtcgacccggccgatcgcttcgtcctgctcggtccgtccggttgcggcaagtcgaccctgctcaaggcggtggctggcttcatcacgcccagcgagggcgagatccgccttcagggacaggcggtcagggcgcccggccccgaccgtatcgtggtgttccaggagttcgaccagttgccgccatggaagaccgtacggcagaacgtgctgttccccttgcgggtgtccggccaggtgacgcgcgacgaggccgagcgacgcgccgacgaatgcctcgagaaggtcggcctggcgggcttcgccgaggcctatccgcacacgctgtccgggggcatgaaggcgcgggtggcgatcgcccgggcgctggcgatgcagccgaagatcctgctgatggacgagccgttcgccgcgctggacgcgctgacccggcgaaagatgcaggaggaactgctgcgcctgtgggaagaggtgcgtttcaccctcctgttcgtcacccattccatcgaggaggcgttggtggtgggcaatcgcatcctgctgctctcgccgcacccggggcgggtccgggccgaagtgcacggccacccgttcgggctgcacagccttggcggcgagccgctgcaagccgcggcgcgacgcatccaccgcttgctgttcgacgagggcggcgaaccgacggcggccgcgaccctcgacttcgccgatatccggctggcccattga

SEQ ID NO: 360257 - DNA, 1023 bp, Pseudomonas aeruginosa
atgaaccgcattccccgtttcacccgcctggtcgccgcgctcggcctgggcctgagcctcgccaccacgctgctggccagccggccggcgcaggccgagggcgagatccgcatcgccgagcagttcggcatcgtctacctgctgctcaacgtggtccgcgaccagcgcctgatcgaaaagcacggccaggtcgagggcctgcaaatcaaggtcgactggacccaactgtccggcggcgcggcggtcaacgatgcgctgctgtccggggcgatcgatatcgccggtgccggcgtcggtccgctgctgaccatctgggaccgtacccgcgggcgccagaacgtcaaggcggtggcttcgctgggcaacttcccctactacctgctgagcaacgacccgcgggtcaggagcatcgccgacttcggcgccggggatcgcatcgccgtgccggcggtgggggtttcggtgcagtcgcgcttcctccagtacgccgcggcgaagcagtggggcgacaagcagttcgaccgcctcgacaagtacaccgtggcgctgccgcatccggacgccaccgccgcgctggtggccggcggcaccgagctgaccgggcatttctccaacccgccgttccaggaccaggcgctggccaacccgaaggtccacgtggtgctcgacagctacgagctgctggggccgaattcgccgaccgtgctgttcgccacggagaagttccgccaggacaacccgaagacctaccgggccttcgtcgaggcgctgaaggaagcggcggccttcgcccagaacgacaaggcggccgccgccgatacctatatccgggtgaccggggcgaagatcgaccgagccgcgctgctgaagatcatcgccaatccgcgggtggagttcagcgtcacgccgaagaacacctatccgctggcggagtttctctaccgggtcggtgcgatccgcaacaagccggcctcctggcaggactatttcttccaggacggcgcgccgttgcaggggagttga

SEQ ID NO: 360258 - DNA, 888 bp, Pseudomonas aeruginosa
atgtccgtttcccttccggcgccagcgcgcgccgacgttcctttgcagatccgtgccctcgatgccgcattcggcgccgaggtgctcggcctcgacctcgggttgcccctggccgccgaggacttccgccgtatccaccgggcgcacctggaccaccatgtgctggtgttccgcgagcagcgcatcaccccggcgcagcagatcgccttcagccggcgcttcggtgagttgcagatccatgtgctgaagcagttcctgctcccagggcatccggagatcctcatcgtttccaacatcgtcgagaacggccagcccatcggtctcggcgatgccggcaagttctggcactccgacctttcctataaggagctgccgagcctcggctcgatgctgcatgcccaggagctgccggaggagggcggcgatactctgttcgccgacatgcacaaggcctgggacagcctgccggaagccctgcgcaaggccatcgagggacgcacggcggcgcattcctataccgcccgctacagcgaaccgcgcttcgagggcaactggcggccgaccctgagcgccgcccagctcgccgaggtgcgcgaagtggtccatccgatcgtgcgcacccacccggaaagcgggcgcaaggggctgttcgtcagcgaaggtttcaccacccgcatcgtcggcctgccggccgacgagagcgcccaactgctcgccgagctgtatgcgcacagcgtgcgccccgagcacatctaccggcatcgctggcaggcgcatgacctggtgttctgggacaaccgctcgctgatccatctcgctggcggttgcccggcccacctgcggcgcaagctctaccgcaccaccatccagggcgacgcgccgttctga

SEQ ID NO: 360259 - DNA, 159 bp, Pseudomonas aeruginosa; identical to SEQ ID NO: 321518

SEQ ID NO: 360260 - DNA, 633 bp, Pseudomonas aeruginosa; identical to SEQ ID NO: 336081

SEQ ID NO: 360261 - DNA, 504 bp, Pseudomonas aeruginosa; identical to SEQ ID NO: 321520

SEQ ID NO: 360262 - DNA, 1254 bp, Pseudomonas aeruginosa
atgggacgccgcgaagcatttccggagaacgccggggccgctgcgtcggccgtggcgccgcggctgccgctgagtgcgctgctggcgatggcgatgtccggcttcgtcgccattctcagcgaaaccctgccggccggcctgctgccgcaaatcggcgcggggctggcggtcagcgaggcgctggccgggcaactggtcagcgtctacgccttgggttcgctactggccgcgctgccggcggcgagcctaacccagggctggcggcgccgccgggtgctgctgctggcgctgctgatcttcttcgtctgcaacagcctaaccgccgtttcctcggattaccgcctgaccctgctggcgcgcttcggcagcggcgtcgccgccggcctcgcctggggcctgctggccggctacgcgcggcgcctggtgccgccggagcagcaggggcgggcgctggcggtggccatgctcggtgcgccgctggcgctgtcgctcggcgttccgctgggcacctggctgggcggcctactcggctggcgctgggccttcggcctgttgtcgctgaccgcgctgctgctggtcggctgggtgctgcgcagcgtgccggacttccctggccagccggccgggcggcgcctgcgcctgctcggggtgctgcgcacgccgggcgtgcgtccggtattgctggtgatcgtcgcctgggtgctggcgcacaacatcctctacacctatatcgcgccgttcctcgccaaggtcggcctgggcgcctcggtggacctggccctgctggtattcggcagcgccgcggtggcgggaatctggctggtcggcgtgctggtcgaccggcacctgcggcggatggtcctggccagcctggcgctgttcgccgtggcggcgctggcgctgtgcctgggcgctcgctggagctggctggcgttcgccggcctggccctctgggggctgacgttcggtggcgcggcgacgctgctgcagaccgcctcggcggacgccgccggggagggcgccgacctggcccaatcgatgatcgtggtggcctggaacctggccatcgccggcggcggagcgttgggtggcatggtgttgcagcgctggggcagcgagatgctgccctggaccctgctaccgctgatcggcttggccgccgtgctggcctggggcaatgccgcgcacgctttccgcgtcggcccgcgcgacttccgcagggcatcgcccgagcaccggaaagcggcgcaatag

SEQ ID NO: 360263 - DNA, 612 bp, Pseudomonas aeruginosa
atgacccgcccgacgcgcattccggcgtcaaaagtttgttcggcgctcacctacgggcgccatacgcagggcaggggagtcgagagtggatcgcacgcaactgatcagcaatgtgcgcagcaacctggcggggctggggcgcggcagcctcggcgtgccgatcctgctgctggccatgctggcgatgatgaccctgccgatcccgccattcctgctggacgtgctgttcaccttcaacatcgccctgtccatcgtcgtcctgctggtatgcgtgtacgccctgcggccgctggacttcgccgtgttcccgaccatcctgctggtggcgaccctgttgcgcctggcgctgaacgttgcctcgacccgcgtggtgctgctccacggccacgacggccatggcgccgcgggcaaggtgatccaggccttcggcgaagtggtgatcggcggcaactacgtggtcggggtggtggtgttcgcgatcctcatgatcatcaacttcgtggtggtgaccaagggcgccgggcggatttccgaagtcagcgcgcgcttcacccatggatgccatgcccggcaagcagatggccatcgacgccgacctcaacgccggcctga

SEQ ID NO: 360264 - DNA, 1068 bp, Pseudomonas aeruginosa
gtgtccgtgggacccgacattctgcgcctaagttcgaaatccgctcaagcgcggcgccgaatatcgggagaatcctatccggcgcccgcccgctccatgccgtctactatcagttctgtagtgggtacttgccgccttccttccgcagccggcatgcttgcgtcagcctgtcacatggatgtgttagatgaacggaaccgccgccgataccctcgccgtatcgcccccgcccctgcgcaacctctgcgacagccacggccggctcgatccccgggcggtcggctggtccgcccggccgcgggtgctctgccacatccccggccacttcggccggcgcaagcgctggaaccactggtgcatcgtcagccccggctggatgctctcgctgaccatcgccgacctcgactacctgacctacggcgccgcctatttcctcgacctggacagcggccaggcggtagcgcacacgcagatccgcttcttcggcctcggctgccagttgcccgacgagccgcaggccagccatgccttcgagcatccccgcctgcaattgcgcttcgacgaacagcccgggcgcctgcgcgtcaccggccaggccccggacctcggtggcctgccgctggagctggcgctggaagtgcgacgaccgtcgcacctggagtcggtgaacctggtggtgccgatgggcgaacacaccttccatgcctgcagccgccagctcggcctgccgatcagcggctgcctgcagctcggccgccgacgctacgactgccaggcgggccagagcttcgccgcgctggacttcggccgcggtgtctggccgctgcatacctactggacccgcgccgccttcgccgcccccggcggcatcgccggcaacttcggcaccggctggaccgaagccagcgacctgcgcgagaacgccctgtggttcggcggcaagctcagccgcgtgctcgacgacgtgcacatccgcgagcctcgcgacccgctggccgaatggcgcctggacagcgcctgcggtcgcgtcgagctgctcttccgtccctgtctcttatacacatctga

SEQ ID NO: 360265 - DNA, 540 bp, Pseudomonas aeruginosa
atggtcgaccttgcggacgcagcactcatgcacgcccgggaagagctggccgggcagttgttcgaactgccgaccatctatgacgtggtcgacccagccagcgccgagctggttggcatcatcaccactgggacgtacctgcgccagaacagtatcgggccggcgccgcgtccctcgatcgaaggcctagtgcgctacaaccgcgaggggcagctcagcatggtgacgatgaccaccgacgacctcggccctattcgcgggctgacctggacgactcgccaggggcgcgtgctcaacctaattaaggtcggccagtaccagcaaggccgccggattccgtacctgcgggacctagagtcatgccgactggcgcaggatcaactggacgcactacgcgaagagggtctcgaccagacgtgtcaggtgctgcagcaggcactggcaatcgcgccattcggcctctgccccgcctgccgtgaccgattcgacctgcgcgaggactgcctgcgctgcgctggtgctggtatcgttcagcgataa

SEQ ID NO: 360266 - DNA, 420 bp, Pseudomonas aeruginosa
atgagcagcgaaaaggaaatagctatccaccaagcgtatctggatagctcaaacaggttcgatcacttcctcttaggcgcaagcctcgctgcatgcggttaccttgcacagacaaacccctacggaagaatcggttacaacgtcgaaaccatgtacttggtagcgttggtttcccttgcgatgagcgcgttttgcggtttccgacgactggaccgcattactggtgcgctcaaagcaaatgcccattttctcgccctacccaccaatatttcgcgggatgcacacttaagggctaaagccctggttcagcaggccgcggacgcaccagggaagtggtacagcttgaggaatggcttcctgtacgctggtttcgtcgcatatatcggcacaaaggtcttcgcccagtacctccagccgtga

SEQ ID NO: 360267 - DNA, 207 bp, Pseudomonas aeruginosa
atggctgaccaggccgaccgccagcacatgttgacatgcgaggcgcggtactggctccggcgtgggtataccacgccggagaaagtcaccgagctgaaagagtccctttacaagaagcgcggcgaggaggccgtcacccggctgatcgaggaaatgcgcaggcagtggggtagccgtcatgagtggcagggggggccgcatgagtaa

SEQ ID NO: 360268 - DNA, 237 bp, Pseudomonas aeruginosa
atgaagtctggcttcgacttttactttggcggtcgagttagctcccgccaggaaatgcaacagcgtctgcgcaatctcagaaccgagggtagcgttatgaatgatctggagaaagttctttcatccagaactccggctgagcaagtgcaggccgctgaggatttcaataaggcgaatcgttctaagttgatcagcagcaagaaaggcactctttatttgggggatgtattcgaatga

SEQ ID NO: 360269 - DNA, 231 bp, Pseudomonas aeruginosa; identical to SEQ ID NO: 350613

SEQ ID NO: 360270 - DNA, 990 bp, Pseudomonas aeruginosa
  misc_feature (13)..(22): n is a, c, g, or t
atgcccgggtcgnnnnnnnnnncccgggtcgtcggtcggccaggacgccaccaggccgctgccgccgcgcaggcggtcggaaagcagggcgatggccagcgcgtagctttccgcggcgttgtaggaatagatcgcatcgtagttgcgatagaccaggaaggccggaccctgggccccggtcggcaggagaatcgcggccttctcgtcgccgcccggcagcggctggccgtcgacccgcctcaccccacgggcgacccaggccgacagcggctggcgcttgccgcgcccggccaggctggcggggaagtcggccggcaccttcacttcatagccccacggctgtcccgtgcgccagccagccttcttcaggtagttggcggtggaaccgagggcatccggcacgctgcctaccaggtcgcggcgaccgtcgccgtcgaagtccacggcgatccgcgcgtaggtcgatggcatgaactgggtatggccgaaggccccggcccaggagccggtgatgccggcgtcgcggatgtcgccggcctgcaacagcttcagggtggcgaggaactcgccctggaagaacgactggcggcgcccgtagcaggacagggtcgacagcgaggtcagcagcggacgcttgccgaagatccgcccgtagtcgctttccacgccccacaccgccaccaccgtgtacttgtccacgccgtagcgcgcggccacctggtcgagcagcttgtcgtgctgggcgagcatcgccttgccatcgctgacccgctgctcgtccaccagaccggccaggtagtcccacagcggggtggtgaactccggctgcgcgtcgagcaggtcgagcacgctgaggtcggcctgcaggccgctggtgaagcgctcataactgtcggcggaaatgccctgcgcctgggccttcttctgcaggccggcgaggcaggaagggaagctcgaggcgtcgggttgcgccagggccagggcgggtag

SEQ ID NO: 360271 - DNA, 1077 bp, Pseudomonas aeruginosa
atgcgccgccgcccagcacgaacgccttcccccgccccatctgatacccaaattccatatcgacctgaagctgttttacccccgccccagcccttagattgcaggctccggccggcgccccgtctcccccctcgacggcggtcgccggctgttcatttctttcgggactgtacagatgaacaaagcaacgacggaacctgcctacaactacaaggtggttcgccagttcgccatcatgaccgtggtatggggcgtgatcggcatggggttgggcgtactgatcgcctcgcaactggtctggccccagatgaacttcgacctgccctggaccagcttcggccgcctgcggccgctgcataccaacctggtgatcttcgccttcggcggctgcgcgctgttcgccaccagctactacacggtgcagcgtacctgccaggtgcgactgttctccgacaccctggccgccttcaccttctggggctggcaggcggtggcggtgatcctgctggtcagcctgccgctgggcaacaccaccaccaaggaatacgccgagatcgagttcaccggcgcgatctggctggcgatcgtctgggtcgcctacgcggtggtgttcttcggcaccctgatcaagcgcaaggtcaagcacatctatgtcggcaactggttcttcggctcgttcatcctgaccaccgcgatgctgcacatcgtcaaccacatgtcgctgccggtgagctggttcaagtcctactcgatgtactccggcgccaccgatgccatggtccagtggtggtacgggcacaacgccgtaggcttcttcctgaccaccggcttcctcggcatgatgtactacttcgtgcccaagcaagccgggcgcccggtctactcctaccggctgtccatcgtccacttctgggcgctgatcaccctgtacatctgggccggcccgcaccacctgcactacaccgcgctgccggactgggcgcagtcgctgggcatggtgatgtcgctgatcctcctggcaccgagctggggcggcatgatcaacggcatgatgaccctctccggggcctggcataa

SEQ ID NO: 360272 - DNA, 840 bp, Pseudomonas aeruginosa; identical to SEQ ID NO: 357205

SEQ ID NO: 360273 - DNA, 1566 bp, Pseudomonas aeruginosa
atggacaaggacaacagcatgtctcgaaacaatccttcgcgtcattcaatactcgtcacttccaacataaacgcggccaatgatgcgaatcgtctttccgagctttgtcgacaactggaaatacgcggctatcggctcttccaggcgccaagccgcaaggtcgccctggattttctcggcaacgccgcgcaccccgccggcatcctcctgctcgtcgcggagccgacaggcgagaacgaggccgcacaattgtcggccctcgatgaactccgccaggtcgcgccgtccatcccgctgttcctgttgtttcgtcaactgcgcatcgagcagttgtccagccagctactggacgaggtccagggatgcttcaacctggccgccggccccgcacgcttcatcgccgagcgcatcgacagcgacctgcgcgaatggcgcgccccggcgggccccaggcggctgcgcgactatgccccgccggtcccgcgcacgccggtgagcgcccgctacaacggccgcgcacgcctcgatctggcgccggccaagcagtggcggatcggctcggagaacaccgcggagcacctggcgacgccgctgaacgacctctccacggcctaccgcaagacgtccgcaggagccccggcggcgcacgccggcgacatcgccgaggcctttcgccgggcgctctgggaagccgccgcacggctcgccagggaggatggcgatacgtggttcttcgagatactgcggggcaacccggggcctggcatcgaggccggccgggagacgccggcgaagcgctggcacgggctcgccgagacactcgacagcagtcctcggctggacccgctgcgcgtcgccctgagcgcccccggcctcgattcgcgcggtcgcccggccagcttcggagtacccgccgcggtggtctgccgctacctgcgccggcacggcatcgccccgttgcgcaccggcgactatcgcttcctgctgctgtttccccagggcgccagggcggaacacgcgcagccgctggtggacaggctgtgcgaattcaaacgccggcacgacgacgatgcgccgctgaagcaggtgttgccggagttgctcgacagctcgccgctgtaccgctacatcggcctgcgcgaactctgcgcgatgatccacgaagccagcctgcggctgcacctgaccgccctcgccgacgccgccgccagggctgccggccacgccgcgctggcgccggccacggtctatgggcacctggtcagggacgaaaccgaagcggtggcgatcgacaggctcggcggccgtgtggtcgccagcctggtcggcgtccatccggcggccacgccgctgctgttgcccggcgaacgggtggccgaggaatcgccggcgctgatcgactacctgctggccttgcaggccttcggcgagcactttcccggtttcgctcccgagttgcagggcatcgagatcgatgagcgcggccgctaccgggtccgttgcgtcaggccggccgccctcgcccgcggctccggcctgcgcctggccacgcgccggccggactga

SEQ ID NO: 360274 - DNA, 870 bp, Pseudomonas aeruginosa
atgaccccgccctcgccgatcgtcggcatcatcgccaacccggcctccggtcgcgacctgcgtcgcctcaccgcccatgccgggctgcactccagcaccgacaaggcatcggtggtgcaacgcctgctcgccgccttcggcgccaccggcatccgccatgcgttgctgccgccggacatgaccggcatcgccgccgccgtgctccgggccagccagacccgccaggcccgcgacggccactggccgttcctggagttcctcgacatgccgctgcgccagagcgtcgaggatacccgcctgggcggcctctgcgccagctaccggttgccgccggagatcggcctgcgacgcaacaagcgcctgctggtgcgcgagccgcgccgcgggctctgcgagtgggcgctggtggacgtcgcggtgtcgccgcagccgttcatcggcgcccgcgccatcagtcgcgccgaagacctcgccgaagtcttcgtcagcttcgccgaaccccacgccatcggcctttcggcgctttgcggactgtggtcgccggtgagccgcgaggagccccacggcgcctggatgcgcctgcatccggacgcccgcgagagcctgctggtgccgctggcgccgggcctgctggtgggctgcggggtctctgccgccggctacctgcaacccggcgtggcccacgcaccgagcctgtccagcgggaccctggcgctggacggagagcgcgagatcgagttcagcgccaccgaccgcccgagcatcaccctcgacccttccggcccgttcagcgtcgatgtgccggccaccctcgcctacgccgcccgccatcgcctgctggccggccagcgaaccccgatgaccccgtga

SEQ ID NO: 360275 - DNA, 936 bp, Pseudomonas aeruginosa
atgttagtaagaattagtgcttttgatattgatgttcagtcagaaaagattgacttggattctctaactttaaaaatggttgagctttccgggcggcaagagaataacaggtttttttattttgatcgtgagtcatttgctggtttttgcgttggtgtgattattacggtaaaggatcagcgtaaattttgtaccttgatgcaaggtgaagctggtgaaaacgttattaaggtcaatgggcttgaagagaatgaccaaataatggattttaacttttttgtaattaacttggataatgggattggtgtctatcagcagtaccaccattctgctgctttaagttgtttggcaaagaagatatcagaagatgctcgctctctaaaagaggaattagtagaggcgaaggtggcagaggaacgtgctcaaaaaaagagggagttgagtgcttcaagacttcgaagaattaataaagagcataaaacaaagattgttacttcgcctttggttagtagagcaaggctcgaagagattcttcgcggatatcataagataaaagcaatggagtatagctacactactcttgaagtgaatattcgtgaagccactccattaggagagcgggttcataagaaaagagagcatataagctttgttaatcctagtttggttgctattttgtcagcagaaatcgctgcagctatagaagagtttccttttgcaaaaggtaaagtgtttgttgaggatgcgcaaggaaagaatgagatagtgaagatgtttgatataccggaagttttatgggaggcggactatgatactgtcgttgcaatgataaataatattgatccggcagattttgcaaataatactttccttcaagatattgttgcgctttttgatcaccaagatttttcacctattttaagagctgctgtgtga

SEQ ID NO: 360276 - DNA, 1020 bp, Pseudomonas aeruginosa
gtggacttactcgccgaaataaacaaaaaaataaaagatactccactccaaaatagcgacagtggaatagaatcaattcttctccacatagagatagccgaacgtcatcataatcgcgccaaatctgaaaaagatgagcacttatacacagatgttatctacagaacgaatcatgcatttgaaggaatactaaaagaagcatactcaagacttgcagataagaaaccagactcactcacaccatttcaaattgaagaataccttctaacaaacaacatattaagaagcagagtctcagatcttctaacaaattatagaaaaaactggagaaacccatcaacacacgatcacaagctattcttcgccgagcaggaaagttttctagctatagtcacagtaagtgcttttgtcagcattctagtagatcaaataatcgacaaaatcacatatacaaaaaacctagaaaaatttgagaaatacgccataagaacaagagaaggctatactaaatacaacaaaatgtcatcaatagacaaattagccagactaatactaggattctctgaatattacatggagaattttgaagaaatgtcacaaaccccgcgaaactcagcaaatgcagctctagcagccttcattaaaaaagccgacccaaattttaacgtagaacaagagccaaatattaacaaaaacggcagctcaattacttttgacttgatagcagaaacaaacgaagaaaaaatagctattgaaactagagacccaagacccagtgggtcccatttttttgagtcagaagttgcggccaaacaactagcaattatgctaagaaaaacagaaatacgaagcgggataatttttcactatccagcagccccccatcaatccaccttaatcacgacgggaaacactgcatggcccactgactgccacttcagggaagtatatacagcagacccgagcgaagtacctattgacgagccctatatagagccagaggaaaccaactcactataa

SEQ ID NO: 360277 - DNA, 447 bp, Pseudomonas aeruginosa
atgcgtgctttcatcttcctggccgccttgttgtgcagcctctcctcctttgcggcggcgcgttgcgacgcacgcgtacctaccgagacggtcgaactgggcgacgtgcgcctggcctaccagagcatcggccgcgacagcgatccggccctgctgctggtgatgggcctgggcgggcaactgatccactggccggacgaggtggtcagcgccctgtgcgagcaaggcttccgggtgatccgctacgacaaccgcgacgtcggcctgtcggcctggaacgtgccggtgcccagttcgcggctgacctacgaagtggtgcgttatcgcctcggcctgccggtcagcgcgccctataccctcaccgacatggccggcgatgccctgcatctgctcgacgcgctggatatccccaggcccatgtgctcggcgccagcatgggcgggatga

SEQ ID NO: 360278 - DNA, 702 bp, Pseudomonas aeruginosa
atggagcagatagtcgtaaacggtgttttcataggtaaagtcgaagaaacctggggcggattggtcagcgcgatcgacaagctgccggtcgagcaggagttctggctgggccacgatggcctgcccggcgacgaacaggccgacatccgccaccacggcggcctcgagcgcgctcttcatcactatcccgccgagcactaccgctactggcgcaagcgccacccgctgaaccgctggcaactgccggcgttcggcgagaacatctcgacctacggcatcaccgaagccgaggtctgcatcggcgaccagttccattggggcgatgccctgctggaagtcagccagccgcgttcgccctgctatcgccagggccagcgctggaatcttcccgagctgcccgacgaattgcagagcggcggccgctgcggctggttctatcgggtcctgcgcagcggcatggtgactcccggggaccagctgaagctggtccagcggcattaccccgaactgaccgtcgcccgcctattgcagtggtatttcggcgatcccctggagcctctcgggttgcgccagatgatggcctgcgacgcgctctcccagcgttggcgcaagacagcggcgaaacgcctgtccagcggcgtggtggaagactgggggccgcgcctgcgcgggccgtcggattaccgggagcatgcctcttga

SEQ ID NO: 360279 - DNA, 996 bp, Pseudomonas aeruginosa
atgttcaagacgatggtacgggcgctgttgtgcgccctggcgatcggtggctcctccctggcgaatgccgcgcagccgatcgtcatcaagttctcccacgtggtcgcggaaaacacgcccaaaggccagggcgcgctgctgttcaagaaactcgtcgaacagcgcctgggcggccgggtcgaggtagacgtctatcccaactcgtcgctgttcggcgacggcaaggaaatggaggcgctgctgctgggcgacgtgcagatgctggcgccgtccctggccaagttcgagcagtacacgcgcaaggtgcagatcttcgacctgccgttcctcttcgacgacatccaggcggtcgaccgcttccagcgcagcccgcaggggcgcgccttgctgaccagcatgcagggcaagggcatcctcggcctggcctactggcacaacgggatgaagcagctctccgccaatcgcccgttgctggagccggaagacgcgcgcgggctgaaattccgcgtgcaggcgtccgacgtgctcaacgagcagttccgccagctccgcgcgatctcccggaagatgtccttcgccgaggtctaccagggcttgcagaccggcgtggtgaatggcaccgagaacacctggtcgaactacgagagccagaaggtcaacgaggtacagaagtatttcaccgagtccaaccacggcctggtggactacatggtgatcaccaacgcgaagttctggaatggccttccggcggacatccgcgaagaactgcagcggatcatggacgaggtcaccgtgcaggtgaacctcgaggccgagcgcctcaaccgcgacgcccgccagcgcatcctcgccagtggcgccagcgagatccataccctgagcccgcggcagcgcgccgactggcgccaggcgatgcagccggtatggcagaaattccgcggcaatgtcggtgccgatctgctccaggccgccgaagcttccaaccgtcccgattga

SEQ ID NO: 360280 - DNA, 828 bp, Pseudomonas aeruginosa
atgaaccgacagatcgtgcgcagcgcgctgttcgtcccggcgacccgcccggagcggatccccaaggcccttgccagcggcgccgaccgggtcatcgtcgacctcgaggatgcggtggaggaggggctgaaggtcgaggcgcgggccaatctccggcgtttcctcgtcgatacgccggaagcccgggtgctggtgcggatcaacgcggcggagcatcccgggcatgccgacgacctggcgctgtgccgcgaccacgccggagtgatcggcctgctcctgccgaaagtggagagcgccgcccaggtgcgccacgccgccgtggccagcggcaagccggtctggcccatcgtcgagagtgcccgcggccttgccgcgctaggcgagatcgccgccgccgcgggggtcgagcggctgtccttcggcagcctcgacctggccctggacctcgatctcaacagcggcagcaacgcagccgaacagattctcggtcacgcccgttacgcactgctcctgcaatcgcgcctggcaggcctggcgccgccgctggacggcgtctatccggcgatccagaaccgtgccggactggtcgaggcagtgcgcttcgctcgcgacatgggcttcggcgggttgctgtgcatccatccgagccaggtcgagccgatccaccagacattgatgccgagtcccgcggaactggagtgggcgcgtcgggtggcagaggccggcgcctccggtgccggcgtcttcgtggtcgacggcgagatggtcgacgcgccggtgctggggcgcgcgcgacgcctgctggagcgggccggggagggtggctga

SEQ ID NO: 360281 - DNA, 1203 bp, Pseudomonas aeruginosa
atgacacaatcccaccgaccgcgcccgctcgacggcatcaccgtggtcagcctggagcacgccatcgccgcgccgttctgcacccgccaactggccgatctcggcgcgcgggtgatcaagatcgaacgccccggcgtcggcgatttcgcccgcggttacgacgagcgggtcaacggcctgtcgtcgcacttcgtctggaccaatcgttccaagcagagcctcagcctcgatctcaagcaggccgaggcgctgccgttgctggagaagctgctggccggcgccgacgtgctggtgcagaacctcgcgccgggcgccgccgcgcgcctgggcctgtcctacgaggcgttgcgcgagcgcttcccgcgactgatcgtctgcgatatctccggctacggcgaaggcggtccctacgagaagaagaaggcctacgacctgctgatccagagcgagggcggcttcctttcggtgaccggcggcgccgggccgaacgagatggccaaggccggctgttcgatcgccgatatcgccgccggcatgtacgcctacagcagcatcctttcggccctgctgctgcgcgagcgcaccggcgagggcagccgcatcgacgtgtcgatgctggagagcctggtggagtggatgggctacccgatgtactacgcctaccaggacgcgccgccgccgccgcgcgccggcgcttcgcactcgaccatctacccctatgggccattccccgccggcgacggcggcacagtgatgctcggcctgcagaacgagcgcgagtggcgggccttctgcgacaaggtcctgcgccgcccggagctggccgacgacgaacgcttctcggcgaacttcaagcgctcggccaaccgcgaagagctgcgtgcgctgatcgtcgaagccttcgccgccttgccggccgccgaggtggtggcgcgcctggaacaggcgcagatcgccaacgcccacgtcaacgacatggccggggtctgggcgcacccgcagttacaggcgcggcaacgctggacctccatcgacagcccggccgggcgcctgccggcgttgttgccgccggccagcagcagcgccttcgttccgcgcatggatgcggtgccggcgctgggcggcgacagcgacgcactgcttgccgaactgggctgtaccgcggccgatatccagcgcctgcgcgcgaccggaacggtatga

SEQ ID NO: 360282 - DNA, 1353 bp, Pseudomonas aeruginosa
atgaccgactacacccagcaactcgccggctttctcgccggcctgcgctaccaggacctgccgccggcggtgttggcgcggatggaagaattgttcctcgactggctcggctcggcgctggccggcaagggccagcatccgatcccattgttcgagcgctacgccgaacgcatgggcccggccgatggtagcgcgcagatcctgcccagccggcggcgcagctcgccgtatttcgccgccctggtgaacggcgcggcttcccacgtggtggagcaggacgacctgcacaacagctcggtgctgcaccccgcggcggtggtcttccctgctgccctggccgcggcccaggacctcggccgcagcggcgccgagctgatcctcgcggcggtggccggctacgaggccggcatccgcatcggcgaattcctcggccgttcccactaccgggtgttccataccactgccacggtcggcaccctcgccgcggcagtggcggtgggcaagctgatggacttcgaccgcgagcgcttcgtcgacctgctcggcagcgccggaacccaggccgccgggctctgggagttcctccgcgacgccgccgattccaagcagttgcataccgccaaggccgccgccgacgggctgctcgccgcctatctcaccgccgacggcctgagcggcgcgcgacacatcctcgaaggcgagcaggggatggccgccgggatgtccagcgacgccgaccccgagcgcctggtggatcgcctcggcagccgctgggcgttgctggaaacctcgttcaagttccacgcctcgtgccgccatacccatcccgcggccgacgcgctgctggcgctgatgcagcgcgaagggctcgatcactcgcagatcgccgcggtcaccgcgcgggtccaccagggcgccatcgacgtgctcggccgggtggtcgagccgcagaccgtgcaccaggcgaagttctccatgggcaccgtgctgggcctgatcgccgtgtacggcaaggccggcctcggcgagttccatcggcatgcgctgagcgacccgcgggtcgcagcgttccgcgagcgggtcgagatgcgcctggacccggaggtcgatgccgcctatccgcagcgctggctcgggcgggtcgaagtgctcgatcgccaggggcggcgccataccgccgccatcgacgaacccaagggcgatcccggcaataccctcagccgcgacgaactggccgataagttccgccgcctgctggcgttctccggcgcggccaccgacgccgaggcggaaatcctcatccagcgcgcctggggcctgcgccaggcgccttccgtagcgccgctgatctga

SEQ ID NO: 360283 - DNA, 381 bp, Pseudomonas aeruginosa
atgcagatcgaccgtctcgaccacctggtgctcaccgtccgcgacatcgacgccagcatcgatttctacacccgcgtgctgggcatgcgcgccgttaccttcggcgcgggtcgcaaggccctcgccttcggtgcgcagaagatcaacctgcaccaggccgggggcgaattcgaacccaaggccgagcgacctacgccaggggccgccgacctctgtttcatcgtcgccacgccactcgaggcggtggccgagcaactgcgccagcaggccgtggaaatcctcgagggcccggtgcagcgcaccggcgccggcgggccgatcctctcgctgtacctgcgcgaccccgacctgaacctgatcgaactgagcaacccgctgtag

SEQ ID NO: 360284 - DNA, 1161 bp, Pseudomonas aeruginosa
atgaatccgaacagcgaagagctgaacgcgatccgcgagggcgtacgtgccctctgcgccgaattcgacgccgcctactggcgccgcatcgatgagcagcgcggttttcccgaggccttcgtcaaggccctgaccgacgccggctggctctcggcgatgatcccggaggagtacggcggttccggtctgggcctggccgaggcctcggtgatcctggaggaagtcaaccgctgcggcggcaactccggcaccgtgcacgggcagatgtacaacatgttcacgttgctgcgtaacggcagcgaggcgcagaagcgcttctacctgccgaagctggccagcggcgagctgcgcctgcagtcgatgggggtgaccgagccgaccaccggcaccgataccaccaagatcaagaccaccgccgtgcgcaagggcgaccgctatgtgatcaacgggcagaaggtgtggatctcgcggatccagcactccgacctgatgatcctgctggcgcgcaccacgccgctggccgaggtgaagcgcaagtccgaaggcatgtcgatcttcctcgtcgacctgcgcgaggccatcggcaagggcctgaccgtgcagccgatcgccaacatggtcaaccacgagaccaacgagctgttcttcgacaacctggagatccccgccgatagcctgatcggcgaggaaggcaagggcttccgctacatcctcgacggcctcaatgccgagcgcaccctgatcgccgccgaatgcatcggcgacggccgctggttcatcgacaaggccagccactatgcccgcgaccgcgtggtcttcggccggccgatagggcagaaccagggcgtgcagttccccatcgccgaggcgcacatcgaagtggaggccgccgacctgatgcgctggcgcgcctgccaggagtacgacgccgggctcaacgccggggccagcgcgaacatggccaagtacctggcggcgaaagcttcctgggaggcggccaacgcctgcctgcagacccacggcggcttcggcttcgcctgcgagtacgacgtcgagcgcaagttccgcgagacccgcctgtaccaggtggcgccgatctccaccaacctgatcctgtcctacgtggccgagcacctgctcgaactgccgcgctcgttctga

SEQ ID NO: 360285 - DNA, 828 bp, Pseudomonas aeruginosa
atgagtgagtccactttcgccccctggatcggtcgccaggaagaaacccacgatcaattgagccgcaacctggtcaagcgcatcgccgccaccttcggcgagccgaccccggcccacggcgaagcgctgccgccgctctggcactgggcgttcttccaggacccggtggaggccgccggcctcggcgtcgacggccacccggcgcgcggcggtttcctgccgccggcggacgatcgcaaccgcatgtgggccggcgggctcctggagttccaccagccgctgcgggtcggcggcgaggccagccgcacctcgaccatcctccgggtcgaggagaagcacggtcgcagcggcgcgctgctgttcgtcaccctgcgccacgactaccgccaggacggccaactggcgctgagcgaagagcacgacatcgtctaccgcgaaccgaccccgcccaagctcggcggtaccgaggccttgcccgagggcgactggcgcgaggcgctggagcccgatccggtgttgctgttccgctactcggcggtgactttcaacggccaccgcattcactacgactggccctatgtcaccgatgccgaaggctatccgggcctggtggtgcacggtccgctgatcgccaccctggccctgcgcgcgttctgccgggccaatccgcaggcgcgcctgcgtcgcttcgcctatcgcggcctgcgcccgctgatctgtcccgaaccgttcgaggtcggcggccgcctgctcgctgccggcaaggccgaggtatgggtcggcaatggcgccggcctggcccagcgcggcgacgtggaattcgactga

SEQ ID NO: 360286 - DNA, 897 bp, Pseudomonas aeruginosa
atgcatttcgatctcgccgacctgcgcctgttcatccatatcgccgagtcgcccagcctgacccagggcgcgcgccgcgccttcctttccccggccgccgccagcgcgcgggtcaaggcgctcgaaggccagcttggcagccgcctgctgtaccgcgacagccgcggcgtcgaactgaccccggcgggccagcgtctgctacagcacgcgcggctgatcatgcgccaggtggaatacctgaagagcgagttcaccgagtacggcagcgacgccgccgggcatatccgcatcttcgccaataccaccgcggtcaccgaattccttccggaaatcctcgccggcttcctcgccgctcgtcccggggtcaccgtcgacctgcaggaacgcctcagccgcgacattgtccgcggcgtgctggacggctccaccgacctcggcatcatcgccgggccggtggcggccaccggcctgcaggtcctgcatttcagcaccgaccgcctggtgatggcggtgccccagggccatccgctggccggacaggccagggtacgcctacgcgacaccctgcagttccagcatatcggcctgcccgagggcaccaccctgcacgccttcctgtacgaacgggtggagcagatgggcgagcagctatcgctgcgcatccaggtctccagcttcgaggcgatctgccggatgatcgagggcggcgtcggcatcggcgtgatcccgcagtccgccgcgcgccgccacagccggacgatgaagctggcgaccatcgaactcgacgagccctgggcgatccgcgagcgcagcctgctggtacgcgacctggaagcactgccgagttgcctgcgggcgttgatcgaggagttgcagagggtgggagacagcctgtag

SEQ ID NO: 360287 - DNA, 945 bp, Pseudomonas aeruginosa
atggatatcctgttcaatatgcgcgcgttcgtcagcgtcgcggagaccggcagtttcactgccgccgcccagcgcctggacctgacgaccgcctatgtctcccgtgcggtggccaagctggaggcccacctgcagacccgcctgctgcatcgcaccacccggcgcatcgcgctgaccgaagccgggcagcgctacctgatgcgcgcccagcagatactcgcctacatcgaggaggccgaggccgaggcgggcgacgcccatgcgcggccgtcgggcacgctgaaggtccacgcgatgaccggcatcggccagcactacctgatcaaggccatctcgcaatattgcgagacctacccggaggttggcttcgacctgaccctggccaaccggatcaccgacattctcgacgagggctacgacatttccgtggtgatcgcccccgagctgccggactccggtttcgtctccaagtgcatcggccagacctacagcatcctctgcgcctcgccgggctacattgccgcgcatggcttccccaagctgccggcggagctgtccgcgcaccgttgcctgcgcctggtgaactcggtgatgtcgctggaccgctggctgttcgacggtcccgacggccaggaactggcctgcatcaaccagacgcatttccaggtcaacaccgccgacgccatgaccgaggcggtggtctccggcatgggtatcggcgcgctgccggtgtacgcggcggtcaacggcctgaaggacggcagcctggtgcgggtgttgccgcgctatagcctgttccatctcaacgtctacgccctctacccctcgcggcagtacctggatgcgaagatccgcacctgggtcgagttcctccgcgagcacatgccggcgatgctcgccgcggacgagcgcagcctggcggagagcggtgggttggcgaactga

SEQ ID NO: 360288 - DNA, 2196 bp, Pseudomonas aeruginosa
gtgccccgcgccacccggaaaggtctccccctggttccaccggctcccctcgcgttttttcccagccccgacgaattgcgccgcgccctgctcgaatgggcgcgtagcgacggcgtcgcctgggtcttcgtgttcaaggccctgctcaccgccagcctcgccctgtggctggcctatcgcctggagctgccgcagccgagcacggtgctggtgacggtcttcatcgtcatgcagacgcagagcgggcaggtcctggccaagagcttctaccgcatcgtcggaaccctgatcggcctcagcgtgatggtcactctgatcgccctgttcgcccaggagcgcgtgctgttcctcgcctgcctggcgctctgggtcggcctgtgcaccgccggcgccgcgcgctaccgcgatttccgcggctacgcctgcgtactcgccggctacaccgcgaccatgatcgggattccagccaccgctcacccggaaggcgccttcatggcggcgctgtggcgggtcctggaaatatccctgggcatcctctgcaccggtaccgtcagcgccatcttcctgccgcagaccagcggcgccgccctgcgcaacacactctacgggcgcttccgcgacttcgccgggttcgccgccgaaggcctgcagggcagcctcgacggcgagcgcttcggcgagctcagcgcgcgcttcgtcgcccagtccgtgggcctggaaaacctgcgcagcgccactactttcgaagatccgcacatgcgcctgcgcagcggccggctgattcgcctgaacaacgaattcatggtcatgaccagtcgcttccacggcctccaccgcctgctcgaacgcctgcgcgggcgcggggcgcagaatgtcctggaggtcctggcgccctgcctggcggagcttgccgggctgctcgcgccgattcgcgaacggacgcccaccgacgccgacgccgcgcgcctggccgaacgcatcgaggcctacaagccggaactgatgcagaacatccgccaggcccgccagcgcctggtggagcagcgccccggcgagaacgacctgctggatttcaacaccgctgccgaactggccttccgtttcaccgacgacctgcacaactacgccctgacccacgcttccctggccgaacaccaccatgcccgcgagcaatggaaggaaagcttcgtcgcccgcgccaacccggtcgccgcgctggtcgccggagcgcgcagcgcgctgatgatcggcctgctcggcacgttctggatccagacctcctggccccacggcggcaccttcgccctcaccgcggtactgatctcggcgctctcctcgacctcgccgaatcccggccggttgtcgctgcaactcaccctcgggaccctcgccggggcctgcaccgggctgttcgtgctgctctacctgctaccccacgtggacggtttcccgatgctgctctgctgcctgctgccggtcttcgcggtcggcgccctgctgctctggcggccgcagtggaacggctacggcgtcggcctactggtgtggttctgcttcgcctcgctgccggccaacatggcgcgctacgacgccctggccttcttcaacgaatacctggcactactcttgtcgatggtcctcgccacggtcgccgccatggtgatcctgccgccgaaccggccgtggatgtggaagcgcctggagcacgacctgcgcgagcgggtggtgttcgccatcagcggcaagagcaagggcctggtctccggtttcgaaagcggcacccgcgacctgctgaaccaggcctacaccttctccgccggccgcccggacgtgcaacgccggttgctgggctggatgttcctggtgctggaggtcggccaggcgatcatcgagctgcgcctcgaacagcaacgcctgccccaggagccctgctacgccgaacgcaccgcctggcgccgggcgatccgcctgatgggccgggcgctgatccggctgttcctgcaacccgggccgagcaaccgccagcgcgccctgcacgcggtgaaccaggcgatcatggcggtacgggcggcgccggagccgcgcgcaccgcagttcgatacctcgccgctgcgacgggtgctcagctacctgcacttcattcgcagcgccctgctcgacccgcaatcgcccctgggccaggaaagaaacccgtga

SEQ ID NO: 360289 - DNA, 267 bp, Pseudomonas aeruginosa
atgaaggctttcgccctgatggccctgttcgcctgctcgccgctggtgatggcggctggcgcccaggatcaacctgccagccagcaggaaaacgctgttgaagaatatgcctatggcatgcaactggatgtggctcgcgttatatcttcaaccgacacttccaatgcctgcggcatcgttcccgcacgcatgacctacgaagattcgaacggccagaaacataccgtcgaatatcaggtctggggcaacggctgcactggcggctaa

SEQ ID NO: 360290 - DNA, 789 bp, Pseudomonas aeruginosa
atgaaaacgacgcagtacgtggcccgccagcccgacgacaacggtttcatccactatccggaaaccgagcaccaggtctggaataccctgatcacccggcaactgaaggtgatcgaaggccgcgcctgtcaggaatacctcgacggcatcgaacagctcggcctgccccacgaccggatcccccagctcgacgagatcaacagggttctccaggccaccaccggctggcgcgtggcgcgggttccggcgctgattccgttccagaccttcttcgaactgctggccagccagcaattccccgtcgccaccttcatccgcaccccggaagaactggactacctgcaggagccggacatcttccacgagatcttcggccactgcccactgctgaccaacccctggttcgccgagttcacccatacctacggcaagctcggcctcaaggcgagcaaggaggaacgcgtgttcctcgcccgcctgtactggatgaccatcgagttcggcctggtcgagaccgaccagggcaagcgcatctacggcggcggcatcctctcctcgccgaaggagaccgtctacagcctctccgacgagccgctgcaccaggccttcaatccgctggaggcgatgcgcacgccctaccgcatcgacatcctgcaaccgctctatttcgtcctgcccgacctcaagcgcctgttccaactggcccaggaagacatcatggcgctggtccacgaggccatgcgcctgggcctgcacgcgccgctgttcccgcccaagcaggcggcctga

SEQ ID NO: 360291 - DNA, 357 bp, Pseudomonas aeruginosa
atgaccgcactcacccaagcccattgcgaagcctgccgcgcagacgccccgcacgtcagcgacgaagaactgcccgtgctgctgcggcagatcccggattggaacatcgaagtccgcgacggcatcatgcaactggagaaggtctacctgttcaagaacttcaagcatgccctggccttcaccaatgccgtcggcgagatatccgaggccgaaggccaccatccgggcctgctgaccgagtggggcaaagtcaccgtgacctggtggagccactcgatcaagggcctgcaccgcaacgacttcatcatggcggcgcgcaccgacgaggtagcgaaaaccgccgaggggcgcaaatga

SEQ ID NO: 360292 - DNA, 816 bp, Pseudomonas aeruginosa
atgatcaacttcgcccacggcgaggtgtacatgatcggctcgtacatcgccttcatcgccatcaccctgctggcgatgatggggctggacagcgttccgctgatgatgctcgccgcattcgccgccagcatcatcgtcaccagtgctttcggctacagcatcgagcgggtcgcctaccgcccgttgcgcggcggcaaccgcctgatcccgctgatctccgcgatcggcatgtcgatcttcctgcagaacgccgtgatgctctcgcaggactccaaggaaaaggccatcccgaccctgctgcccggcaacttcgtgttcggcgaaagcagcatgaacggcgtggtgatctcctatatgcagatcctgatcttcgtcgtcaccttcctggtgatgttcggcctcaccctgttcatctcccgctcccgcctgggccgcgcctgccgcgcctgcgccgaggacctaaagatgaccaacctgctgggtatcaacagcaacaacatcatcgccctcaccttcgtcatcggcgccgccctggccgccgtcgccgcggtgctgctgggcatgcagtacggcgtgatcaaccccgggatcggcttcctcgccgggatcaaggcgttcaccgccgcggtgctcggcggcatcggcagcatccccggcgccatgctcggcggcctgctgctgggcgtcgccgaagccttcggcgccgacgtgttcggcgaccagtacaaggacgtggtggccttcggcctgctgatcctggtgctgctgttccgacctaccggcatcctcggtcgtccggaggtggaaaaagtatga

SEQ ID NO: 360293 - DNA, 255 bp, Pseudomonas aeruginosa
gtggtgtatctcggcgtggtggtcacggtgggcgcctacggcctgtacaacttcggcgtcggtcgactgccggccagccaggcctcgggcttcatcaacctgatcccggtcttcaccctggtattcgccgcgctgttcctcggcgaaaccctcaacggcccgcagatgctcgctgccggcctggtcttcatcggcgtcgccatcagccagtggcgcagcgctccgccgccgcctccggccggcgtcctgaactga

SEQ ID NO: 360294 - DNA, 1098 bp, Pseudomonas aeruginosa
atgaccgtcgaccaccgccaatgggcccgcgaggcgatccgcatcatcgaagcggatttccagcgcagcgccgatacccatttgatccccctggagactcccggcctgcctggcgtcgaactgtacttcaaggacgagtccagccaccccaccggcagcctcaagcatcgcctggcgcgctcgctgttcctctatgcgctgtgcaacggctggctcaggccggccgcgccggtgatcgaggcatcgagcggttccacggcgatttccgaagcctatttcgcacgcctgctgggcctgcccttcatcgccgtgatgccggccagcacctcgaaggaaaagatcgcccagatcgccttctacggcggccagagccacctggtggaggaccccacccagatctacgccgagtccgaacgcctggcgcgggagagcggtggccatttcatggaccagttcacctatgccgagcgcgccaccgactggcgggcgaacaacaacatcgccgaatcgatcttccagcagatgcgccacgagccgtacccgaccccgacctggctgatctccagccccggtaccggcggcaccctggcgaccctcggccgctacgtgcgctatcgccagcactgcacccgggtactctgcgccgacgccgagcgttcggtgttcttcgacgcctatgtcagcggcgaccgtggcctgaccctggattgcggttcgcggatcgagggcatcggccggccgcgggtcgaggcgtccttcctgccggaagtgatcgacgcgatggtcaaggtgccggacgcctggtcgctggcggccatgcattacctggcccgacgcctggggcggcgggtcggcggctccagcggaaccaacctgatcggcgccctggtggccgcacggcaaatggtcgcggccggcgagaagggttcgctggtggcgattctctgcgacggcggcgaacgctatgcgaccacctattacgatccggtctggctggccaggcagggctatgcgctggaacccctggtcgaggcgctggctgcctgcatcgagcggggcgtggcgttgcccgacgggctgctggtggctggactttga

SEQ ID NO: 360295 - DNA, 522 bp, Pseudomonas aeruginosa
atgcaccgtttgcgagctgccgaaaccggcgatatcgaggccatgaccgacctgttgctgcgccacgggccgaatccctggaaccatttgccggaggagggggtgcgtgcgcatctgcgagccatcgccgacggcgaggtacgtgccgtcctggccgagcgcaacgatcggctgctggggttcgccagcttccgtcgcaccgaggatttcgcccattaccagccgcagcgtgccgatgcgccgcgggcctacatctgcgaggcggtagtgcatccggcggcggccggccaggggctcggcagcgcgttgctggaggcggtgctggcccagctggccgacgaaggcatcgaggatgtctatatcgatcgtcacgaagagaacctggcgtcggcgggaatgatgcgcaaggccggcttcgtcgagctggaaacctacgccgatccggcgcggcgaccgaacggctcggggcgctcgacagtgtgccatcgcaatctttccctccagcgcagagccgtgcgatga

SEQ ID NO: 360296 - DNA, 252 bp, Pseudomonas aeruginosa
atgagtttcatccgcctcaaggtgcgcgccgccttcatggtccacggctacgacgcggacaaccgggaaatcgtcgagcagatcggcgaggaacgcttcgtcgagaaactgctgcgcatcgaacggatccagtcgatcagcgagaaatacctgctggtcagcgcctcccacgggcgcgtcgcctactgggagtacgagggcggcctgacggcgctgcggcggcgcctggagcaggccggattgctcttgtag

SEQ ID NO: 360297 - DNA, 666 bp, Pseudomonas aeruginosa
atgcgccctgcccgtctgctggtctacagcctgctccccttgttcgccgcctgccaggtgtggaagcccgaatcgccgagcaccagtgtagacacccgcttccagggcgaactggtgaagatcaacggcgcgctgcaattccgcccctgtaccgagaagcgcctgttcagcatcgaggacgtggccaataccggcctgcgccgcgaagccgacagcctgttcgacgacggcgcccagggcctgttcgtcgacctgcgcggcaccatgggaccggccaaggtccgcggtaccgacggcaagctggaggtcagccgactgtaccgcgtgcagaacgagggccccggctgcgacgacccgaacttcaagctgctgaccttcgccgccaacggcaacgaacccttctggagcgccagggtgaacaaccagggcctgcgcctggaccgcccggaacacgagaccctggccttgccttacgtcgccgaggaactgccgaacggcagcaccagctattccagcgaggcgaacggcaagaaggtcgaactgtggatcgccccgtcgtcctgcaccgacagcatgagcggtgccttcagcagctactccgccgaactgcgcatcgatggcgagacgctgcgcggctgcgcctatccgggcgcactgggcaagtga

SEQ ID NO: 360298 - DNA, 399 bp, Pseudomonas aeruginosa
atgatccaatgcaagcgtgtatacgaaccggcgtcgcccgccgatggccggcgcgtactggtggaccggctgtggccgcggggcatccgcagggaggccctggccatggacgactggctgaaggacgtggcgccctccaacgaggtgcgcaagcagttctgccacgatccggcactcttcgacagcttccgcgaacactaccgcgccgagttgcaggcgcacccggaacattggtggggcctgctcgacagcgctcgggagggcaccctgacgctgctctacggcgcccacgaccagcagcacaacaatgccgtggtgctggccgagttcctcgaggaggagctggaccgccagcagccgggcagttcgccgacctgctacgtcgaccgcctctcctga

SEQ ID NO: 360299 - DNA, 600 bp, Pseudomonas aeruginosa
atgaaaatcatcctgatcggcgccagcggcacccttggcaagggtatcgacaaagaactctgcgagcgccacgagatcgtccgggtaggccacagcagcggcgatttccaggtcgacatcagcgactcagactccattcgcgccctgttcgagaaaaccggtcgcttcgacgcgctggtcgccgcggtcggcaaggtgcacttcggcgccctggaggaaatgggcgaggcgcaataccagctcggcctgcgcgacaagctgatgggccaggtcaacctggtactgctcggccgcgagtacgccaacgacgggggctccttcaccctcaccagcggcgtgctcgccgagcagccgatccgcttcggcagttcggcgagcatggtcaactgcgccgtcgagggcttcgtccgcggcgcagccctggagttgccgcgcggcctgcgcatcaacgccgtcagcccgaccgtggtcagcgaggcgctgcccggctacgcgccctacttccgtggcttcaagccggttccggcggcggacgccgcgctgggttacgcacgcagcgtggaaggcgcgcagaccggccaggtgtaccgcatctggtaa

SEQ ID NO: 360300 - DNA, 915 bp, Pseudomonas aeruginosa
gtgaaggacctggacgatctcgccgccttcgccgtactccacgacctgggcagtttcacccgcgccgccgagcgtctcggttgcagcaagggccaactgtcgaagcgcattggcgtcctcgagcagaagctcggcgtgaccctcttgcaccgcaccacccgccgtctttcgctgaccgccgccggcgccgcgctgctgcccgaggcgcaggccttgctggtgcaggccgagcgcgcgcggcaggcagtggcgcgcttgcaggagcgagcggaaggtcgggtgcgggtgaccctcccggtctcgctgggcgagaccctgttcgatgcactgctggaggacttccaggaacgccatccgctgctgcgcgtcgagctggacctgtacaatggcctgcgcgacctggttggcgagggcttcgacctggcgattcgctctggggtcgagcaggacgcccggctggtggcgcggccgctgttcgtcctgcaggaaatcacctgcgccagtcccgcctacctggcgcgacacggcgagccgcaacgcccggccgagctggccgagcgcgagtgcctgctgaactcgcactacagtggccacgaggagtggctctatcaccgccaccatcggctggagcgggtacgggttgccggctttctcgccagcaaccactacagcctgttgaagaaggccgcgctggccggcaccggcatcgcccggctgccgtcatacatggtccacgacgaactgggcgacggccgcctggcctggttgctgcgcgactaccagacgcgcagcacgccgatgttcctcgtccatccgttccagggcggcctgccgcggcgcacccaggtactcgccgattacctgctcgactggttcgagcgcagccggcgacaattgatcggcctggagggttga

SEQ ID NO: 360301 - DNA, 1650 bp, Pseudomonas aeruginosa; identical to SEQ ID NO: 342775

SEQ ID NO: 360302 - DNA, 885 bp, Pseudomonas aeruginosa
gtgggctcggagatgtgtataagagacagcataggcgctgccgaccagacgctggcgcaggcggcggaacaccagctcgatgtcccaggcctccagttcggtgcgccggttcaggtagagggtgaagccgcaggccacgtagatcggctcccagactaccagcaccaggacgtagagcaggttcgacaggtgctccagccagagccactcgccggcttccgggtcgagcaggctctgccagttccagtcgatctcgttctgcgccgggatcagcaggtagagaagcatggcgaagccggcccagagcgccatttccaggtgcacgccgaccacggtcagccaggtcgcgccgccggcgttgcgctgggacaatacgatcaggcgctggctgcggggctccccggcgagcccttccagttgcaggaccggcaggtcgaagctgcgcgtcggactgaagcggcgccacagcaggctggccggcaactgcttcctcagcagggcgggataggcgcgcagggcctgcctcagggttggcgtatcgccgaacagggcgtgcgagagaatgtacagcggcagccgttcgaaggccggcttgagccaccagaagatcaggatcgccagggtcggatgctgccacagcaggaggctgagcacggcgaacagcggcagggtcagcaacgcccagctgcccatcagcaggcgcgcatggcgatgcgccaggaggatgccgaggtcgagcgcttcccaggcgctgcgcgggcggatcgccacgctggcgtcagtcaggcgcatggcggctccgtccggcgaacaggaagtagctgccgaccagcagccagaggaccgcgccgaccgcgtacttcacccgcggctcgaaatgactga

SEQ ID NO: 360303 - DNA, 648 bp, Pseudomonas aeruginosa; identical to SEQ ID NO: 354442

SEQ ID NO: 360304 - DNA, 1401 bp, Pseudomonas aeruginosa
atgaaactctgcgactttcctcttctgtcgggtgaacttgccaagttcacatgtgacgacctgggagccgattggcaaatcggtgaggccgtgtcagtacaggcacacggtaatgactatcttctccgacagggcaactccgtttgcgtcggcaaagtagaaggacgccaagatcgaactgcgcttcaggtacaacgaggcctgacgttgtgggtgttaagacaacggcatggcgaggttctccaccttcaatcgctggatttggtcgagcagatccagctggatatggcgatttctgttgatgaggccattgcggagcaattggccagcaggggtgagatttctgctccagacgtacccactgcagttggttggttgaatgagcaattcatctcagctgaaaaagcaccgaccgcagaaatggatcgtgtttttcttggccgtttcgacaacgcttccgatgagagcttcgttctctttggtgcaggctggcgcggcaacgccaaacgagatgctggcgtactgaaactgatgagcgtcactcgtctcaagggggctacagcacgtgtagcgatggccgttggcaagatctcgttccaagatgccagtgtcgccgtgcgtctccagagtacagagcaacgcgcacttttggatgccgcgctgcgcgacaacggcagctacctacgtttatggcaagagtatggtgcgctcgaatgggagcaggctcgagattgtgcgagggaactgggttctcttcgcttcaagagtgcggagctcgtcgaaggtgaactgtgggcctggtttctaaaagttgatgcggatcacctaagggatttccggaaacgatggaaagctttggggctggcaaacacaacgcaagtggagcttggggatcgggagcttgatcttgattccgaggttgaagacgtgccgggcagagctgaccgagcacgccgtcgcccggttcgtggtgtattgcggttcgagcgggatggcgtggtcttggttccgagccaggaccggcgctcagaacgtcccccaaccaaggggtttatctactactcactatcgggtgatgaagccgtacagacccgtcgtgcacgcgcaaggcaatctatcaatgaaggacggcgactgccgcaactgagctacttgctggaaggggtggctccgccaagcgcccggcgacgtcagctcgacggcttatccacctacgccaaatcttgcttcaagggtgttccgaccaagcggcagattgaggcgctggagaaggcgatcaatacacctgatatcgcacttatcgttggcccaccaggaacgggtaagactcaggttattgcagctttgcagcggcgccttgccgaaacactcggtaaaactcgctgcagcaccaagtgctga

SEQ ID NO: 360305 - DNA, 609 bp, Pseudomonas aeruginosa
atgcacgctgccgcgctcgccgcgcagcaggcggccgaggtggctgagcaagtcgtcgtcgccgatgaacggcgcctgcgcatcgggcacgccgtcgcggcggtagctgatcgccaccggctgcaccgccacgccggcttccagggcgctggccatcaggcgaccgtggaaggtgcgcaggctttcgccgttggtggtggtgccttccgggaagatcagcaggttgcgcccacggtgcagctgttcggccaagcgctggttgatcagccggctgtcgcccgagccgcgacggatgaacagggtgccggccttttccgccagccagccggccagcggccaggcacgcacctcggccttggacaggaaggtcagcggcgccagggcgccgagcagcgggatatcggtccaggacacatggttggctacccacagcatgggttgccggggcgcttcgccgctgaccctgacctcgaagggcagggccgcgcagaggcgcgccagccaccagcgggtcaggcgctggcgcagcggcgtgacgtcggcgccgggcagccgctcgcgcaggctgacccaagcggccaggcccagtccgagcgcgaccagccctag

SEQ ID NO: 360306 - DNA, 1008 bp, Pseudomonas aeruginosa
atgagcgaacagacgcccgaacaaccgagcaccgcgcccaacccggcgctccagcgccagcgcgccagccagctggcccaggccctgcgcaccgaactgcagaaagccctgatcggccagggcgcagtgatcgacgacgtgctcaccgcgttgctcgccggcggtcacgtgctggtggaaggcgtgccggggctcggcaagaccctgctggtacgcgccctggcgcgctgcttcgacggcggcttcgcgcgcatccagttcacccccgacctgatgcccagcgacgtcaccggccacgccgtatacgacctcgccagcgagcagttcaagctgcgcaaggggccggtgttcacccacctgctgctggcggacgagatcaaccgcgcgccggccaagacccaggccgccctgctggaagtgatgcaggagcgccaggtcaccctggaaggacgcgccctgccggtgccgcagccgttcatggtgctggcgacgcagaacccgatcgagcaggaaggcacctatccgctgccggaagccgaactcgaccgcttcatgctcaagctgcgcatcgattacccggccgaagccgaggaacagaccctggtgcgccaggtgacccgctccgcgcgcagcgacatgctcgacgtagccaacctgcggccgctgctgaaggacaaggacgttctcgccctgcagcggatcgccagcgacctgccgatcgacgaccaggtcctcgactatgccgtgcgcctggcccgcaccacccgcaactggccgggcctggccctcggcgccggacctcgcgcgtcgatcgccctggtccgttgcggccgggcgcgggcgctgctgcgcggcggcgagttcgtggtgccggacgacatcaagggctgtgccctggcggtcctgcgccatcgggtccggctgtctccggagctggacatcgaggggctgtcggtggaccaggtcctgcaacagttgctcgaccaggtaccggccccccgcgtatga

SEQ ID NO: 360307 - DNA, 621 bp, Pseudomonas aeruginosa
atgttgaccatctggggccggaagaactcgagcaatgtgcgcaaggcgctgtggtgcgccgaggaggctggcctggagtaccggacggtggatgccggcggggcgttcggcctggtggatgagccggcgttccgtgcgatgaatccgaacggtcgggtgccggtgatcgaggacgacggcttcgtcctctgggagtccaacgccatcgtccgctacctggccgcccgctatgcgccgggcgacctctatccgcaggacccggtgcgccgcgccgacgccgacaagtggatggactggaccacctcgactctcgccgggccgttccgcgacctgttctggggaacgctgcgtacgtcgccggagcaacgcgacgaggccctgatcgcaaaggcgttgcagacctgcggcgagttgctgcgggtgccggaccagaccctggccggccaaccctggctgtccggcgaacgcttcggcatgggtgacattcccctgggctgtttcatctacgcctggttcgagatgcccatcgagcgcccgccgctgccccacctcgaggcctggtacctgcgcttgcgcgagcgcccggcgttccgcaccgcggtaatgaccgaactgacctga

SEQ ID NO: 360308 - DNA, 2232 bp, Pseudomonas aeruginosa
gtgggctcggagatgtgtataagagacagagcgcacgctgccgtccaccgagcccagcgcggcatccatccgcgcgtcgccgaacatgcggcggaaattggcctcgtagtcggcgatctccagctcgtcgtcgaggaggacctccagcaccacgttcagcgcctggtagaacaggccgcgctcgacgctgttgtcgttgtactggaggaacgcctccacgccttccttggcgtcttcgaagcgcttcagggcgaggccgatgagcactttcagctcgaggatggtcagttggccccagaccgtgttgtcgtcgaactcgacgccgatcagcgtggtgatgtcggtgtagtcgtccacctcgcagtcttccaggcgctccagcaacgccccgagcgcagcatcgtcgaggcggtgcaggttgaggatgtcctcgcggaacgccagggccttgttggtgttgtcccagatcaggtcttccaccggatagatttccgagtagcccggcaccaggatccggcaggccgtagcgccgaggtgctcgtacaccgccatgtagacctgcttgcccatggcttcgaggatgccgaacagggtcgcggcttcctcggcgttggcagcctcgccctgccgggtgaagtcccactcgacgaacgggaaatcggccttggcgctgaagaagcgccaggacaccacgccgctggaatcgatgaaatgctcgacgaagttgttcggctcggtcagcgcatggctttcgaaggtcggctggggcaggtcgttcaggccttcgaagctgcgcccctggagcagttcggtcaggctgcgctccagggccacctcgaagctcgggtgggcgccgaaggaagcgaacacgccgccggtgcgcggattcatcagggtcacgcacatcaccgggaattcgccgcccagcgaggcgtccttgaccagtaccgggaagccctgctcttccaggccgcggatcccggcgaggatgcccgggtacttggccagcacctccggcggcacgtccggcagcgccagctcgccttcgaggatttgccgcttgaccgcacgctcgaagatctccgacaggcactgcacctgcgcctcggccagggtattgccggcgctcatgccgttgctgaggtagaggttctcgatcaggttggaggggaaatacaccacctggccgtcggactggcgcacgaagggcaaggcgcagataccgcgctgcacgttgcccgagttggtgtcgtacaggtgcgagccgcgcagctcgccgtcggggtcgtagatcgccaggcaatggccgtcgagcagtcccagcggcagcgcatcgtcgcggccgggcttgaaccagcgttcgtccgggtaatggacgaacgccgcattggcgatctcttctccccagtactggtcgttgtagaagaagttgcagttcagccgctcgatgaattcgcccagcgccgaggccagcgcgctttccttgctcgcgcccttgccgttggtgaagcacatcggcgactgcgcatcgcggatgtgcagcgaccagacgttgggcacgatgttgcgccaggaggcgatctcgatcttcatgccgaggccggcgaggatggccgacaggttggcgatggtctgctccagcggcaggtccttgcccgggatgcgcgtgcagccggcggcatcggtgccgggcatcagcagcgcctgggcgtcggcatcgaggttgtcgacctcctcgatgacgaactcgggtccggtctgcaccaccttcttcaccgtgcaacggtcgatggagcggaggatgccctggcggtccttctccgagatgtcggccggcagttccacctggatcttgaagatctgccggtagcggttctccgggtcgacgatgttgttctgcgacaggcgtatgttgtcggtggggatgttgcgcgtctggcagtacagcttgacgaagtaggcggcacacagcgccgacgacgccaggaagtagtcgaacggccccggcgcggagccgtcgcccttgtagcggatcggctggtcggcgatcaccgtgaaatcatcgaacctggcttccagtcgaaggttatcgagaaaattgacctttacttccacggcgagcaccaagagaaacggaaaccggccattatccgggaactccgggcaaaagtcccagctctccgccgtacgcgtcgctacttgccggcctccccaccgctctccggcacgtag

SEQ ID NO: 360309 - DNA, 1032 bp, Pseudomonas aeruginosa
ttgcttctcgtacagctcgcgctcgttctcgcaactggccacttcgtggatgcggtcggcgtcgtagagcagcacgccgaggtagcggatgcgcccgacgcaggtctccgagcagacggtgggctggccggcctcgatgcgcgggtagcagaagatgcacttctcggacttgccgctcttccagttgaagtagatcttcttgtacgggcagccggagatgcacatccgccagccgcggcacttgtcctggtcgatcaggacgatgccgtcctcctcgcgcttgtagatcgccccgctcgggcaggacgccacgcacgccgggttcaggcagtgctcgcagaggcgcggcaggtacatcatgaaggtgttctcgtactcaccgtagatgtccgcctggacctggtcgaagttcttgtccttgcgccgcttggcgaactcggtgccgaggatctcctcccagttcgggccccactcgatcttctccatgcgttgcccggagaccagcgagcgcgggcgcgccaccggctggtgctcggccttgggcgcggtatgcaggtgctggtagtcgaagtcgaacggttcgtagtagtcgtcgatctcgggcaggtccgggttggcgaagatgttcgccagcacgcggaacttgccgccgatgcgcgggcggatcgaaccgtctgccgcgcgcacccagccgcccttccacttctcctggttttcccattccttcgggtagccgatcccgggcttggtctcgacgttgttgaaccaggcgtactccatgccttcgcggctggtccagacgttcttgcaggtgatcgagcaggtgtggcaaccgatgcatttgtcgaggttcagcaccatgccgacttgcgaacgaattttcatggcgtctctcctcaaatgtcctggggcagcggttgcggcagggcgtcgccgccgagtccgccgtggcggggttcgtccagccagtcgaccttgctcatcttgcgcaccacgacgaactcgtcgcggttgcagccgaccgtgccgtag

SEQ ID NO: 360310 - DNA, 1020 bp, Pseudomonas aeruginosa; identical to SEQ ID NO: 331847

SEQ ID NO: 360311 - DNA, 1410 bp, Pseudomonas aeruginosa
atgcacgagataatctgtccacactgtgcgaaagcattcaaaattgacgaggctggttacgcagacatcctgaagcaagttcgagacgctgatttcgataaacagttgcatgagcgacttgaactggctgatcaggaaaagcgaaacgccgttgaactggcgattgccaaggcggctagcgagcgacagaaggcggccgcagccaaggatgcagaaatccaagaactacgatcgcgacttgatgctgaagaggtggcacggaaacttgcagttagtgaggcgctcattgctatagaaaaagagcgtgatgcgcttgccaacgcgcttgagcaagcacgccgtgaaacagaatccacctcaaggctggctgaggcaaagcttctgaacgaattgcagaagactgctgccaccaaagattccgaaattcaggatttgaaatccaaaattgagtctatagaagtagcaaaaagacttgcaattacagaggccattaactctgtagagaaagagagagatgagctgcgaaacagtctcgaaaaatccaagctagaaaagcttcttgcggagaagtcgctcaaggataaatacgagacgcaaatcaaagatcgcgatgatgccatcgagcgtcttagagatatgaaggcacgtctatcgacaaaaatggttggcgaaacactcgaacaacactgcgaaactgaatttaaccgcattcgagctacggcctttccgagagcatactttgagaaagacaatgatgcccgaacggggagcaaaggagactatatttttcgcgactcggacgacgcgggaactgagatagtttccatcatgttcgaaatgaagaatgaaaatgatcgtactgcgacaaaaaacaaaaacgaagatttccttaaggagctagataaggatcgcattgagaaaggatgcgagtatgctgtattaatatcgcttctggagcctgagagcgagttatacaacactggaatcgttgatgtttttcacagattcccaaagatgtatgtcgttcggccgcagttcttcatcccaatcataacgttgctaagaaatgcagcgatgaattctctgaaatacaagtctgagcttgcgcttatgaaggcgcaaaacatcgacattacaaattttgaaaatgagctcgagtcatttaaatcggctttctcaaaaaactatgaattggcttcaagacgatttcaaactgcaatctctgaaatagacaagtcgattgatcaccttcaaaaaactaaagaagcattgctcggaacagatcgcaatcttcgcctggcgaatgacaaggcacaggatgtcacgataaagaagcttactcgtggcaacccgacaatggctgaaaagttttcacgccttgagcagagcgctgaagagaaagaagaatag

SEQ ID NO: 360312 - DNA, 2055 bp, Pseudomonas aeruginosa
atgaacgctatcacccacaccgaaacgcaagccatcgccactgcactggaaagcgccgcccaggcgcagaacctgctgctggtgccgctgtcgcagcttcgcccctcgcgccgcaacgtgcgcaagaccgcaggccagtccatcgacgcgctggcggccagcattgcccgcgtggggctgctgcaaaacctgaccgtcattcttgccagcgatggcgagcattacgaagtcgtggccggtggccgcaggctggctgctttgaagctgctggcgaagaagcgccatattccgaaggactgggaggtgccttgcctgctggtgcaggatgccagcgcccgcaccgtcagcctgaccgagaacgtgcaacgcgaagcgatgcacccggcagaccagtttgaagccttcgccgcactggtggccgaaggccgacccatcgaagacattgccgctgattttgcggtcacgccgctggtagtgcagcgccgtctgaaactcgccaacgtatcgccgcgcctgatggccgactatcgcgccgatgccgtgagccttgaccagttgatggccctcgccatcaccgacgaccacgccgcgcaggaagccgcgttttacgacgcaccggaatggcagcgtagtccgcatgccttgcgcgaccgcttgaccgaacgtgagatagacggccagcacccgctggtgcgcttcgtcgggatggacgcctaccaagccgcaggcggtggcattcgccgcgacctgtttgccgaaggcgatgccggggtgtatctgaccgatgccacgctgctggaaacgctggtgcgcagcaagctggatgaacatgccgccaccatccgcgccgagggttgggcatgggtggatgccacgcccagcgtcacttatgccgacctgcaagccttccatcgtgcgcagcgagaacgccgcaccctcaacaagcgggaagcgcagcgcatggagaagctgcaagaaaagatgcaggccattggcgaagcggtggatgccgcgatggaagcagacgacgaggagaaggcagaagccttgcaggaggaaggcgaccgcctgggcgaacagttgcaggcgctggaagataccttgctggactacagccccaacgtcaaagccgcagccggtgccatcgtcacgctcgaccggcaaggccagatcgtggtgcatcgcggcctgctgcgcgaagccgaagccaaggcgctgcgcaccttggaacggttgcggcagggtttcggtagcgacggcgaagccgggaacgatgacacaggcgaggacggagacaacgaaggacaacccaaaatcgccgccatatccgacaagctggcgcagcggttgagcgcccaccgtaccgccgcgctgcaaatcgaggtggcacggcatccgcaggtggcgctggccgcgctggtgcatggcatggtgcagaccgtgttgcaaggaagctactacagtcacgacttgccgctgggcgtgagcctgaaagtgcaagaccggctggaaggcattgccccggacataccggatttgcccgccgccgtggcgttgcgcgaattacagcaggtagcaggcgaaggcttgccggaggacagcgccgaactgttcgccgtgctgctggcgaagtcgcaggatgaactggtgcggctgctggcggtgtgcgtggcggccacggtggatgtggtgacgcctcgcgccacggcgcagcaaccgggcgaagaaatggcgcaggccgtggggctggatatggcggcatggtggaagcccaccagcgaaggctatttccagcacatcccgaaggctgtgattctggatgccgtggaagattacgcgcccgagcatgtttcccggttggcgaagttgaagaaggccgacattgtcagcgaagccgagcggctggcggacggcaccgggtggatgcctgctatcttcaaggccgaaggcaccgacgacactacggcgcaggatgcgccgcaggccgtgacggacgatgagccggacgccatcgacaacgccgacgagcagcagggccacacactcgctgcctga

SEQ ID NO: 360313 - DNA, 891 bp, Pseudomonas aeruginosa
atgatctatatcgactcaacggacgatgcgcttgataaacgagtcaaatctgtttgcgcccctttattcgctactgggcaattcttgcacggcggtcacagcgagaccactatcaacgcaacagtgactttcatacagtttgagtcccgtatatatgcagtgacttgtcatcatgttctttcagcgtttttgaccgaagcactaagaactggacgccgaatcgtgccgtccatccattcgggccaatctattcatcaattccattggtacggcccacaaggacaataccgatggtcattcctgagttgccgtgatttcccatctaatgccaacattaacgatcaacaagcactctcagacatggagcgccggaacatggagcgccccgatattgcaatagctgaaataacaagcgtttggccggtaatgcaaaatagtcgaggtgcagaggcgatcaatctggatgactggacagaagcggactggtcatccattcaaccggtgtggctggcctatggctttcccgatggtcacaaatatcggacaagcgataaggttgccgcgccaatgccacgtgtggcggttgaactggcttcctcgaccccatcatcggaaagaccaacttatacactctgctcgaccttggcagtcgaacatggttgggggctcagcggcctcagtggcggccccgtattggttgcgcatatcgacgaagatctctatgcgtatgttggaattacatttgaaggtgctccgagcgcgaaagagctagaggagaacccggaatcgttcattggaaaacgagacatcgtgctaagaggctaccacctgactccgaacaactttcgggattggctattgcaactggcatttggcgttgagctttcctga

SEQ ID NO: 360314 - DNA, 246 bp, Pseudomonas aeruginosa
ttgagccaggaagcgttctccgacgtgtccagccgtacctatatgagtacgctggagcgcgacttgaagagcccgaccatccacaagctgatcgagctgtgcgaggtcatggaagtgcatccgctgacactgttgacactggcttacactgatggcgatgagcgcaaggtttcccatctgttggcgaacgtgcaacaagagctagcgtctctacttcccaagaatgaggatgccaagtccaaatga

SEQ ID NO: 360315 - DNA, 780 bp, Pseudomonas aeruginosa
atggcagacccgagcgccgaacaccacgagcactggtatccgaccgccgcgtatctttacacgctgcatctcgatggcccagccctggcttgggagtacctgcgccgcaatcctgattaccggctcgactggctgcgccgtcgtcgcaggccagatgctgccgagcgctgggggctacgcctgctggaagacccggctctggatgcgcgggacgcgcatccggcctggttccccgatcacgatgccgtggtgcagctctacccagacgccgacccgccacccgatgcggtggtgttcgagttctggcgcattccaggcaccaaacacctgattcacgacggcaaacgcctagtgctggtggcgcgatggcctggatgctgcctgcgcttcgcgctcgcacccagtctggcagacggtgtggcttacgcctatgccatccgcgcctgcgcactgccatgcgcccgctaccacgcactggttgctcagttgaacaagctgactagattaccggaggccccgcctgaggtgacgacccgagagcgtccaacaacggctgcgctattggagctgcacaccttgcaagcgctcgacgcgaccctggcgggcgcgtccttgcgcgaagtggccgaagggctgttcggtgccgatgccgtcgccgccgactggcacaaggacagcgccttgcgtgcccgcgtgcggcggctggtgcgccgtggcgaggcgctgatgcgcggcggctatcgcagcctggcgcagcttccgccagttgcatcgcagtaa

SEQ ID NO: 360316 - DNA, 591 bp, Pseudomonas aeruginosa
atgggccgaatacgaaactttgaccgcgatgcggtgcttgagagcgcggtggatgtcttctgggagcggggctatgacggggcaggcatgcaggagatctgccgggtcaccgggctcaacccgggcagcgtctacgccgccttcggtgacaagcacggcctcttcatcgaggctttgaagagctacatgacgtccatgtcgcgagagacgatcgcgcgcctgaacagcaatccgtccggccgggccgggattgccgactactacgcggcgctcatcgaggcgatgctgggcggcaaacggcgctggggatgccttgtgacgaactcgatcgtcgagttcgccatgaacgatccgcagatcagcgaagccttccaactccacctggccaggctagaaacggccttatctggtgcgatcgagcgggcaaagcaagcgggagaactatcgcgggacgtcgatgcggccgaagcggccgtatttctcgtatgcacgacgcaaggactcaatgtcctggccaagacccggcccgaccggcgcacgctggaggcgatcacgcggcatgcgttcgcggcggttggattcaaggcctga

SEQ ID NO: 360317 - DNA, 930 bp, Pseudomonas aeruginosa
atgaagatcgcgatcatgggcaccggaggcgtaggtggctatttcggggccaaactggccctcggaggcaacgacgtcagcttcattgccagaggggctcacctagctgccttcaagtcccaaggcctcactgtgcatagtccgcttgggaacatgcatgtccccacgcccagagcaaccgacacgccgtcggacgtcgggctagtcgatgtcgttctgttcggtgtcaagctttgggataccgagacggccgccaaagcgatcaagccgctgatcggccccgaaacgatggtgatctcgttccagaacggggtgatcaaggacgaattgctgagagccacgctcggagaaaggccggtagcaggtggcgtctgctacatcgcggcaaccatcgaggccccgggcgtcatcggtcatgccaacaacttgcagaagctggtctttggcgagtacggcggccatcgcagcgcgcgtatcgagcgcttccatcgggcctgcatccagtcggggattgatgccgaaatcagcgacgacatcgccagagtgatctgggagaagttcgtcttcctggttgggctgtcggcgaccaccgcgtccacgcggtgcccgataggcgtggtgcgcagtaatttggcctcccgcaagttgctcgaaggcgtcatgcaggaggtggtggacgtcggccgggccgaaggcgtcaacctcgccgccgactttgccctggaccgacttcgcttctgcgaccagctacccgccgacatgaccgcttccatgctgcgcgacctggaacgcggaaaccggctggaagtgcagtggctcagcggcgacgtcagcagcagaggccgacggctcggcgtgcccactccgcgaaattcagtggtttgcgaaatccttgcggttcatgcggatggggcgcagcgccatgaataa

SEQ ID NO: 360318 - DNA, 873 bp, Pseudomonas aeruginosa
atgcggatggggcgcagcgccatgaataacgaaaatcttgaaaatggctttcttgacgtggccggttaccgcatcgcctacacgcgccagggccacgggagtgccatcgcccttgttcacggcattcccacgagccgccatctttggcgcaacgtcatgccgcttctcgccgcatcaggccatgaagtgcttgcgatcgaccttctcggctatggcgattccgacaagccttcggacgcggaccttggaatccaggcgcagtccgaaatcatctttcaggcgctttcggccctggggtggaagcgcgcgaccatagtgggccacgacatcggaggtgggattgcccagctcgtggccatcaaccatcccgaaattctgaatcgcctcgttttgatcgactccatcctctatgactcgtttccagagccagggattgcccgcttgaaggagccggcttgggacgaaatccttcgcgcagcagatttcgatctgaagaaaggcctggcgaaaggcttttcacgaggcatgttccataccgatcgagttaccgctgaactggttgatgcctatgagcgtccgttccatggcatcgacgggaggcacgcatacctgcgtgcagcccgggcgttgaggacagaagagctttcctcgcgcatggaagacgtcgagaagttggccgtgcccacgctccttgtctggggcaggctcgactcattccagccgttgcactttgcagagcgattgagcggaaagatgcccaatgcccaaatcaaagtattcgatgaggctgggcatttcctgccagaggatgtgccggaagcattggcttcccgtatctcggaatttacaagctcccaacaggggacacgctga

SEQ ID NO: 360319 - DNA, 978 bp, Pseudomonas aeruginosa
atggcacgaaattcacacgctcctgcatccagccaggctggctttcttgtcacgcttttcgcatcgaccttcttgatggggtccagcttcgtcgcaggaaaaattctgctacagcagggcttcacgccgatgatcctggtcgggtggcgcttccttgtcgcagccttggcgaccttgccgctggtgctggcgggcgagcgaaatattgtggccgcgctcctgccagccaaagcagggctgcgtgatgttgcactggtgatcctgattggcttgcttcagacagccgccgtcatggggctgctgttctgggccatgcagttcatctccgcatcgaccgcggccatcctgcttttcaccaatcccatctgggttgctgtcctgggtcgcatctttcttggcgaaagcctgcaccgagcgaggctcgtcgggttgcttcttggcgttgtcggtgttgcgcttgccattggtgtcagcccatccatgttttctggcgggatgacgctggctggcgagatcatcggcatcgtctctgcgctttgctgggcaagcgcgacgctcatcaataagcgggcagcgttgccgctctcatcctgggccttgagtttctggcaaatgctggtgggcgcgatcgccatcttggccatcgcctatctcgatggcgaacaatggccgagcggtgtgacgcgagagcaatgggcttggtttctctggctttccatccccgcgtcaacaggctcatttggcctctggttcgtggctctgaaaagaggtggagcaacgaggactagcggatttctgttcctggccccgctcttcacggtcatccttgcgtatttcatcttgggcacggcaatttcctggatgcaggctgcgggaggagtactgatcggcctcgcgctttggctcgtcaaccgggaacttccagcaagaaatgatcgcgaaaaaatcgatgaggtgatcgcggaaggcgaaccgtga

SEQ ID NO: 360320 - DNA, 264 bp, Pseudomonas aeruginosa
atgaagaaatctttctggctcctgctggttctgctgttgactgcttgcggcccgtcggacacacccaagcaggccagcgtgcccaccgtggatgaactggctgccgatccggtatggttgaaggaactgagacagcaatgcaagaccgaccgcgtgacgcttggtgacgtgctttgcaatcgagtcgctgaagccacgcgccggcggttctatggcgatggaaagacgccctacacgccatcggaaacatcgccgaaattctga

SEQ ID NO: 360321 - DNA, 345 bp, Pseudomonas aeruginosa
atgcgatgcgttcccgttctgtcggtttcgctgctggccatgctgctgaccgcttgcggccagtcgtccgcccaacaaagggccgaagacgtggccgccaccttggccgccgatcccgtgcgacttaaggcgctgcgcgcccaatgcgcaaccgaccggcaagccgcaggcgaagacgactgccgcgccgccgccgaagccttccggcggcgcttcttcgccggccagaccggcccggacgaatacggctcgctggccgacctgccaccgatcccggcgagtttcgacacgcccaccgatgaggccggcgatgcaccgctctcggctacggaggacacgccatga

SEQ ID NO: 360322 - DNA, 246 bp, Pseudomonas aeruginosa
atgagcacgaccaagaaactacggcttggccctttgccgcgccatgacatgacgaagctgaccttttcctgcccgaccagcctgaaagccgacctcgactgctacgcggcgctgcacgcgcagacctatggcgagatggtcgatgcggccacgctgatcccgcatatgttggcggcattcatggccggggatcggggattcaggaagggaggtgcgggcaaggccgcacctccaacgccgagctga

SEQ ID NO: 360323 - DNA, 1776 bp, Pseudomonas aeruginosa
atgacgaatattcaaccaacttttttgggacttatcagctccgtctcgagctcttcggtggccgttgacctggcagcatcagtggagtcgggaattgttgtcttggagggacgaaattatagaatcggccaagtgggcagtttcgttaaaatcccattgggctacaaccatttgtatggtgtcatttctgaatcgagtgaaacgtcaactctagatgcagattcaaagatttcatctgacagaaagtggataaaggtggagctagtaggagagtccataggcggaaattttgatcgaggaataagcgagtacccaagtatcggtgatcatgtacattttgtcgttgatagcgatcttaaatccatctttaaaaacaacttaagcagtcactttcaggttggtcgtctgtctagctccgaaggaattgaggtaagtctcgatttggataagcttattgctcggcattcggcgatcctgggctcaaccggctcaggaaaatcaacgagcacagcaagcattctacgctcaatggttattaaaccagatggttctccattgccatcagctagagttctattgatagacattcacggtgaatatggcccggcacttagtgatgttgccaaaacattttcgattcttccctcgggagagaatcaactctacataccattttggtgcatatctccagacaagctaattgaatttctttgcaataatccaaacgattctcagcgctctcttttcatggacaaaactgttgatgagaagaggcttggtatcacatggaataacattaaaaatattgatccggaaaagatcacgagcaacacaccgctcccttatagattaaaaaagctatggtatgacctatgccacgaagatagcattaactacactgacaataccatgaccaccccggcctatgcacctaatggtgagggctcctttgacgatttgattgcccctaaatttttgccgcctggtgctggaacagcgcctcctaagaaaggcggaaccggtgcgatgaagaggcagctcgacctgatgaagtcaaggctcctcgacacccaatattcatttttgttagagccaggcgactggaatcccgataaagatggaaagatcaagaaggatctagatggactgttagaggaatggcttggccatgacaaaccgataacaatacttgatttatctggcatgccatcagcgcgattgacactccttctgggggctgttctcgatataatttttgaatcagccatttgggggcgcaacgtcgcagagggcatgcgtgaacgtcctctacttattgtgctagaagaagctcatcgttatcttggaaaatcggagagtgggcattcaaaggaaatggtgcagaggattgccaaggaaggtcgaaaatttggcgtcggtgccatgattgttagtcagcgcccctctgaaatcgacgagacgattctatcccagtgcgggactatcatatcgctgcgcattaacaattctacagatcgcggaatagttaaagctgcaatgtcagacggcttggccgggattgttgactcattgcctatacttagaaccggggaggccatcatagtcggtgaagcggcgcagcttcctactcgttgcagattcaatgttttgcctgatgacaaatatcccaatagcggagatcccaagattggagaaaaatggagcgcagcacgaagtgaagaagactactccaaactcgttagagcgtggagaaaccaagacagcacgcaacaatag

SEQ ID NO: 360324 - DNA, 717 bp, Pseudomonas aeruginosa
atgtgtataagagacagcggcggcgccggtggtcaacccgagcaacggcactacgctcagcggcaccgccgagccgggcgctaccgtgaccctgaccgacggcaacggcaacccgattggccaggtcaccgccgacggcagcggcaactggagcttcacaccgggcacgccgctggccaacggcaccgtggtcaacgccacggccagcgacccgaccggcaataccagcgctccggccagcaccaccgtggactcggtggcgccggccgcgccggtggtcaatccgagcaacggcgcggagatcagcggcaccgccgaaccgggcgccaccgtgaccctgaccgatggcagcggcaatccgatcgggcaggtcactgccgacggcagcggcaactggagcttcaccccgtccacgccgctggcggatggaaccgtggtcaacgccaccgctaccgacccggccggcaataccggcagccagggcagcaccaccgtggacgccatcgcgccggccacgccgaccgtcaacctgagcaatggcagcagcctcagcggcaccgccgagccgggcagcacggtgatcctcaccgacggcaacggcaatccgatcgccgaggtcaccgccgacggcagcggcaactggacctacaccccgtccacgccgatcgccaacggcaccgtggtcaacgtggtggcccaggacgccgccggcaatag

SEQ ID NO: 360325 - DNA, 552 bp, Pseudomonas aeruginosa
atgcagaacccgcagaacccgcagaaccttatctggatcgacctggagatgaccggcctcgatccggaccgggacgtcatcatcgagatggccaccatcgtcaccgacagtgacctcaacaccctggccgaaggaccggtgatcgccatccaccagccagaggaaatcctcgccggcatggacgagtggaatacccgccagcacggccagtccggcctgacccagagggttcgggaaagtaccgtgagcatggccgaggccgaggcgcagaccctggccttcctcgagcagtgggtgcccaagcgcagctcgccgatctgcggcaacagcatctgccaggaccgccgcttcctctataggcacatgcccaggctggaaggctacttccactaccgcaacctcgacgtctccaccctcaaggagctggccgcgcgctgggcgccgcaggtccgcgagagcttcaagaagggcaacacccacctggcgctggacgatatccgcgagtcgatcgccgagctgcgccactaccgcgaccacttcatcaagctctga

SEQ ID NO: 360326 - DNA, 135 bp, Pseudomonas aeruginosa
atgaaacgtactttccaacccagcaccctcaagcgcgctcgcgtccacggtttccgcgcccgtatggccaccaagaacggccgtcaggttatgtcgcgtcgtcgcgccaaaggccgtaagcgtctgaccgtctga

SEQ ID NO: 360327 - DNA, 981 bp, Pseudomonas aeruginosa
atgaacatgaagcagatgacgttggcggcgggtgcagatcaaggggcaggattcgagcaataccgcaagccaacgcgacgcgaggcttttctggcgacgatggagacgatcgtgccgtgggcagcattgtgcgccgtgatcgagccgtactatccgaaggcgggcaacggccggccgcctattggtctggaacggatgctgcgcatccactttttgcagcactggttcaacttggcggatctggcctgcgaggaggcgctatatgacagcgccagcctgcgccgcttcgtcgggattgacttgggtcgtgaaccggtgccggatgccaccacgctgctgaagtttcgccgcctgctggagaagcaccagcttgccgagaggctgtttgctgaggttggccgagtcctgcaggcaagtggcgtgaagctgaagaccggcaccattgtggatgccacgatcatcggcgcacccagctcgacgaagaacaaggagaaggcacgcgaccccgagatgcatcagacccggaaaggacagcagtggttctttggaatgaagctgcacatcggcgtggacagccagagtgggttggcccattcggcagtcgtgacgccggctaatgtccacgacaaacatgcgctgccccggctattacatgggcaggagcagcgagtctatggcgatagcgcctacgccagtcagcaggcgctgatcgcgtccaaggcgccccgcgccaaggacttcaccaatcagcgtacgcgcaagaacgggcagattgacgaagtgcaacgtgggaagaaccgcaacaaatcgaagatccgtgctcgggtcgagcatgtctttgccgtagtcaaacgcctgtggggcttcaccaaagtacgctaccgtggcttgaagaagaatgcgggccgggccttcacggccctggcgctggccaatctgtacctcagccgagggcatttgatgggagcagtccgtccgtaa

SEQ ID NO: 360328 - DNA, 327 bp, Pseudomonas aeruginosa
atgcaagttgaaattggtttgtgtaaaggcacgtcttctcggactcgtggcgactacgaagaaatttatgtgttggtggcggatgaaaagcccgaccagtacggccaactggttgccgtgacggtgggtatccgcatgtcgaaagggcagttggaagcgggattgcgcgacctttatgacacgctcgcgggtaagcaaatctgtgtacccaccttcgaccgcccttggcaatcgaaggataagaacaagtttggcgtagagaagtggctatcgcgtgatggtaaaccgttgccgttggtgagttcgaaacaagcagcggcgtcgtga

SEQ ID NO: 360329 - DNA, 258 bp, Pseudomonas aeruginosa
atggataagacgacccaccagcaccttcgtttcgacctggagcaggacatttcccgcgtgctcgatgacgagcacctggtgcgccaggtcctggacctggtcatgcgcagagtcgtccaggaacaggccgccgaggccgttcgccggcagcgcatcaaccgagatttcaagacgttccggcgctgcctgagcgtgacgccgcccgcctgggcgtttcgtgaaccgggcgaacgcccatccaccccttatttgaggtaa

SEQ ID NO: 360330 - DNA, 303 bp, Pseudomonas aeruginosa
atggacttcgtggcgtttctgcatgaacgcttggggcaggtggatcgctatttgtttacgtgccacaacccgaagaagcgtctgtatgcgctggggcgtttacttgagattgaacagttggcattcacgctgcgcaatgctgattgcctgacgctgtctcggttcgatgagttcgacgaatcctgtgagcgtgttcgccggcggcatcgtcttcatgcggactatcgcgattttgcgggagatcgtccttacaacggacgttttctgccactggaggcttcgccaccggagtacggccaatga

SEQ ID NO: 360331 - DNA, 192 bp, Pseudomonas aeruginosa
atgtcaaaggcgtaccgagtaagagaaaagtttgttgatgccgtgaaggaaaagcgggtcgcgatgatcatcgaaaccaaagaagacgtgcgggagtcggacttgatcaacgccacgctgtggcgctacctggactcaataacgaccaaggacgtgatcgaatttcgcgaggaatttggggccaaggaataa

SEQ ID NO: 360332 - DNA, 528 bp, Pseudomonas aeruginosa
atgaaatcgctactacttgccgccattgtggtggcggccatcttcatctttgcagttgctgcaaagtggaaaaatgcgcagccatggaatggcccatggccgttctacgccaagcgacctttgacgaagcctgagcagattttatatcaccgccttattcacgccctgcccaaccacatcgtgctatgccaagtgcaggtatcacgggtgcttggcgtcaagcgcggattcaagttcagccaatggaacaaccgcatcaaccggctcagttacgacttcgtcatatgcagcaaagacgctagcgtcattgccgccattgaactggatgactgcactcaccaaagagcaggacggcaggaagccgacaagaggaaggacaaagccacagcggatgctggggtaaagatgattcgctggaacgtgaaaaatctcccgaattcggtcgcgatacaggaggctgtagcacctatcgagactgatcaaaatatgatcgaaaattctcaccatgagacaagagtccaccattag

SEQ ID NO: 360333 - DNA, 270 bp, Pseudomonas aeruginosa; identical to SEQ ID NO: 327977

SEQ ID NO: 360334 - DNA, 255 bp, Pseudomonas aeruginosa; identical to SEQ ID NO: 327978

SEQ ID NO: 360335 - DNA, 312 bp, Pseudomonas aeruginosa
atgacctacgcactccgccaaccatcctttgtgcggctcaaggctcaactcagcctcaacggccgcttcaaccacaccctctacgacgcggaaacccgccaggcagtccacgccactcttgacattgagcgcggcgctgaacaggtcagcgtcgtcgctcgaatgggctccacgctgaataccctgggcctcccgatcgatgccccttccaacgccaacaccgtggccgactacctcgaatccatcgcaaatggccgcctggacacggcggacgacaccccggctcgccgccgtttcaaccaagcagcgtag

SEQ ID NO: 360336 - DNA, 783 bp, Pseudomonas aeruginosa
atgcacctgcaagactgcacatataatcatcttttcatgaacgagtgccttttgtttgatatttcttctcaggcaatattcttgagtaagactgatagcggcaccggtggaaacgtagtcgtaaccttcaacaactgcgtattcgaatcaatttggggcatcatgaatactgcaaacggacttacatcctcctcaatgcgaaacacagcagtatttaactcgtgcaatcgtgaattctgcggactttatggtccaactggaggaggaggagattttgcaggcagtccattgggttatgttggccatacagacattatgatcaatggtaactgggaacgcggtcaggctttcggagagacgacgttgccagcgatagatcctggagctgtcatttttgccagccgatatgtagatgtcattatgaatggcggccaagttggatctccagaatacgtcaacgttgttgacgtaagcgggacaattccagcatctggcagcctgactaagactttcaatgtgagcggatcgtttgtgttgaatgctgacgtcgcatatgacgacgggtttggcgggcaccagaatgtagttgcgtatggcaaccctactggctcaaaggcgcgggacgtgacagggacgatcatttctgctggtctatctgcgacctacggggacgggccgtcgggtgcggctttcaccgttacgttcaataacgggactgcatcgccgatcaatgtgaagatccgggtcacgaacaaagcagggttgatcgttactgtttcatga

SEQ ID NO: 360337 - DNA, 1818 bp, Pseudomonas aeruginosa
atgggcggagttgagtcgatctcggtactggacaacggagacgggattgacttcaccaggccattagacaactttagacgattcaatgattcgctaaagcgcaagtcccattcgatgcatggctcaaaggggcgcgggcggctagcattccataaaatatgtaatcgtgcaatctggttcacaaagttcaaaaaccaagatgcctatattgaggttgaaagctctcatctgcgcgacataaaaggcacaacaattccgacagagcggcaaaacgcgttactaacagacatgaagtccgggacctgcgtggagctgctgaatatatttagatcaatagaagagacagaaacgctgcttaaccaactgagtcttgaattcggctggcatctcgcactcaaccctgaaaagtgcatcaaattagatgggcaaatggttgtccctccagatcacacccgatttgagaaaaccgtctcagttgagaatgaagaattcaagatagaactgctacattggagccagaagctccaatcagagaagtcctacaactatctactggatagcaatggaaatgtaatattccacatgcccagcagcctaaaccacaaacccggatattatacgagcctcttcatttcctcagcatggtttgatgcttattcatcagagcatacgttgacgcaggaaatccaaacactgaccacaacaaaagtttggaagcaggtctttaaaagcattgttgactttgcgcaagagcactacagtgtatttctgatcgcacaagcagacaagcagataaaggaacttgtagaacaaggagactttcctgactacaaggaactcagcccggcctattcggagtggcgccttgatcacttaaagggcattgtcagggcgataataatatccgatccaaaactattcaaaaacagcaataaacgccaacgaaaaataatcataagattattggacagacttgctgtctcaaacgaaaatgacgcattgcttgatgtccttgaaagcgtactcgacctggacagtaacgctatgcaaattttctcagaccagatcaagaaagcaaagctaaacaacataattaagaccatcgaaactctacagaagagagagatggcaattgcccgtatttccgaaataatgcgaaaccactacaaggagacattggagacccctgatcttcaaggaataatcgagtccaacacctggctctttggcaaccagtatgaaaccatcggagctgaagaagatacattcacgaaaattgccgaacgcctgagagatagagtaaatggaattaatgagattgatatcggggacttggacgaaggagcgattctagaaggcgccaatcgacaggttgatcttttccttgtccgcagaaacttgcaatatgattcgctaaacaaaccatatttcaaatgcgttatcattgaaataaaacgccctagcattgcgctcaataaaaagcatctccgacaaatagatgagtatgctgccatcttgagtggcaatcccgatttcaatggtatcaatacgaaatacgagatagtccttgttggaagaaaaatctccgattcggactatgagatcaacagtcgcctggctgacctcgccgacagaaatgaacccggcctcatcgggagtggaaagattaaaaggtatgtcaaaacgtggaaaacaatcaccgaagaattcggtatcgcaaataacttcctactaggaattctccagacgcaaagagactctcttgaaaatgaatccagacaggagttaatcggcaatctccaaaagcagaccgcttaa

SEQ ID NO: 360338 - DNA, 327 bp, Pseudomonas aeruginosa
gtgcagaagaacacccaagggaaaggacagatctcgccggtagataaggtgcgtctccgggtatcagcgatgatcagtagcccgcgggctcaggtggagcgcagggcgtcgatctggaaggcgcagggggattcggaagaggcctggcagcaggtgctggaggagttggccgagacggaaggcttggagatgacgcggaacgaggatgggacggtgctgctgacctggcagtcatcagaggaggagggcaccgatgccggcggggaggagatttacatcgaggagatggtgatgcagcgcttccatgaggaatctgcgtcgttctga

SEQ ID NO: 360339 - DNA, 1308 bp, Pseudomonas aeruginosa
ttgctcgttgacctggagtatctccaagtccgcgtcggatttcttctgtgccttcaccatgttgttgcgggcgtcggcgatcttctgatcgaggctgatgcgctgtgcggcagtggtagtgctcttgctgcgcagcgcctccagcgcctggatctccgcttggtaggctgcggtgacctggtccttgttttggcggatcagttcgctgcggcgggcgacatagtcggcgtaggagagcagcccagcccgctgctgcgcctgcaagctctgctcagcgttcctgtagtcggccagcagctggtccagctggttcttcgcttcggtgacggtggactgatcgagtggagtactcggccccttcggggtcttcgggtctttgtacttctcgtcgatggctcgccgagcagcagcgatattctccgggcgcagccgctcgtcttccgggttcgtggcttgaatcgcggcgatgctccggtccagctccctgttgagcttgtcgcgcttttccttgttggtgcgcaccgactccagcagcttgtccatgctctgctggccgcgtattgcctcgtcctccaggtagcgatccaggcgcgccttctgcgccttctcgccctcgtcctggatttcctggagggcatcggtgaattgcttcccgcgctcgtcgtccgacatcgagctgcgctgatacgccttgcgcagctcgttgaaccagcccaacgggccgaagacagccccgctggccacagcgcggccaggctgaaaggcttgccccttggtcagctgctccagccgttcctcgggcgtctccgtccggcccacgccgagcatctcgtcccatgcaccttttgcgatgtcgccaatagttctccaggcgcgctccatcgtgcccaggttctcaacgatctggccagcccgctcatccatcgcctggctgtacgcatccatggcgagctgggcggcgcccaacgtgtccccctgcctctccagggcagtgatctgctcgtacaccgaggccgtcaggtagtgatagcggtcattgagctgctgcgacgccctgaccggatcatcggccagcttggagaactcggccacggtttcagaaacggccttaccagtcgcctcctgcatagcaatcgcagtggttccgacctgttcgatctgctcgaccgtgaacttacctgtggaagtgatctccgacagcgcggccacagcttcgtaccgtgtaccgttcactttggcaagcgatgcggccatcgctgccagctgcccagcgctggtgccggcatagttgccggtcaggatgattga

SEQ ID NO: 360340 - DNA, 1275 bp, Pseudomonas aeruginosa
atgagcacagcaatcagtcagactgcttataactataaggtggtccgccagttcgccgttatgacggtggtctggggggtcattggaatgggtctcggtgtcctgatcgccgcccaactggtatggcccgaattgaacttcgacctgccgtggacgagcttcggccgccttcgccccctgcacaccaacgcggtgatcttcgccttcggtgggtgcgccctcttcgccacctcgtactacgtggtgcaacgtacctcgcaagcccgactgatttcagacacgctggcggccttcaccttctggggttggcaggccgtgatcgtgggcgccgtgctgaccctgccgcagggtttcaccacctccaaggaatacgccgaactggaatggccgctggccatcctcctggcgatcgtctggatcacctacgcgatcgtgttcttcggcaccatcgtcaagcgcaaggtcaagcacatctatgtgggcaactggttctacggtgccttcatcctggtgacggcgatgctgcatatcgtcaaccacatgtcgctgccggtgagctggttcaagtcctactccgcctactccggcgccaccgatgcgatggtccagtggtggtacgggcacaacgccgtgggcttcttcctgaccaccggcttcctcggcatgatgtactacttcgtgcccaagcaggccgagcgtccggtctattcctatcgcctgtccatcgtccacttctgggcgctgatctccctgtacatctgggccggcccgcaccacctgcactacaccgcgctgccggactgggcgcagtcgctgggcatggtgatgtcgctgatcctcctggcaccgagctggggcggcatgatcaacggcatgatgaccctctccggcgcctggcataagctgcgcaccgacccgatcctgcgcttcctggtggtgtccctggccttctacggcatgtccaccttcgaaggcccgatgatggcgatcaagaccgtcaacgccctctcccactacaccgactggaccatcggccacgtgcacgccggcgccctcggctgggtggcgatgatctccatcggctcgctctaccacctgatcccgaaagtcttcggtcgcgcagatgcacagcatcggcctgatcaacgcgcacttctggctggccaccatcggcaccgtgctgtacatcgcctcgatgtgggtcaacggcatcacccagggcctgatgtggcgcgcggtcaacgaggacggcaccctgacctactccttcgttga

SEQ ID NO: 360341 - DNA, 939 bp, Pseudomonas aeruginosa
atggcgacggtgacggtttctccgattcatttcgaggattacagcggcatccagttcgagcgcctggtctttgcgtaccacgtgcgtgcaggctggcgcgacctggcctggcgcggccagtcgggaggcgaccagggccgggatatctccggtgtcgagccttttgatgaccggccggcacgcaagaccatcattcagtgtgccaatcgggacacgctgacgctggctaaggccaaggccgacatgaccaaggcggtcaatgctacaggcgggaggccggatgccttcaagttcatctctcgaggcactgtctcggacaccagcagggtgcggattgagcaagctgcggccgccctgggggttgtccatgtaacgatatggtcaggtgtagagttcgaggaaaacctacggcttcgtgctgagtacctgctacaccgatttgtccatggcattgagtttcctgatgctgaggcagaaatccgcaggttcgtggatgactttcccgacctctcggatgccgaggtactgcaactcatggcggccgtattcgataggcctgccttttacacgcctttccatcaggaaagctctttgcctgcttttcagcaggcaatcgaggacactattggtgccctcaacactggcatatggcggacgcgtgaaggtgacgagatcaggcgcatcccctcgattcatcaccttcgagatcaacgcatccgcgcagttctggaaaagttggttcgtcaggttgatgagctgcgtcgcatctttgtggctcgtctcaaggaaggggagatccagcactgtggatgcggtaatccggattgccccacgtacatactcacgcatcgcgttgcgtccgaactggatgaagccaggcggaaaatcctgacgacatttcggtcagtgcatacgtcctttgttttgggcctccggtag

SEQ ID NO: 360342 - DNA, 1050 bp, Pseudomonas aeruginosa
atgagcaagggccaacaacaagccttgcccaaagggccaaagatggaagagttgttgcgtagctatttccttaaagctggctactacgtggctcgtggcgttccgtttgtgtatgagggtttcgatgtcaccgacatcgatctgtggctttacagccgaacatcctcagtatcgcgcgaagtcgccttggttgatgccaagaacaagaaaactccccaagcgatagagcgtatcttctgggtgcagggactgcgcattgccacgaaagcaacaaacgcgattgtggcaacaacagaaaagcgtcaagaggtaaaggattttggcagagaacttggcgtgctcgttcttgatggtagcttcctaggcaaacttgcaaagtcggaagacccaaatgcgacgagactttctgacgaagaattctttgctcggataaatgactacactttgagcaagctggacggtgactggcgtggacggatagttctatccaagagcctactggccaagtcgctttcatttgatagttgcaatgaatggcttgggcaaggcaggttctttgccgaacagtccatcaccaaaggaacccagcgcgaaacagctctcaggtgtctttacttagtatgttcattcattgccattgcgattgactactccatgaaagagctttcgttccatgagcaatccgaacgcagcgaactaatcaaagatggatttacttatggttctagaggcagctctggattgaagaaggtactaaacgtcgcaatggctttggtcgaggagcatgcgaatgatgggccagcaatttctcggcaggtgagaacaagcgttgagaagcaattggctcaattaaacacctcgatattgggcgattttttctcgaagaatgatgtcactcggacattgtttagcgtcgctagggagttcgaacagcttgctatggctagagatttcaactctcatagtaccgcgagcatcgagcttcgcagtacgctattttgcctgctcgactactggggtgttgatagggttatgttttcggagctatga

SEQ ID NO: 360343 - DNA, 1263 bp, Pseudomonas aeruginosa
atggataagaagaccaaaggatcttggttgatccaccacactaataagctgcaaggtgtcactaatcaatcaggctatgaaaaaacctacttagcgggcaaggctggaatactcttatctgccatttctgccaacaaggaaatcacagtcaacaatgacagactggcggtcctggcgaaggcagccaatataaatgcaacatttgagcttcccaagctaatcgaagtgctgcagcaacaatctctgatcgacaagtcaccgggaggagttgccgtacttggtgtgaccacctctactgcgttgcaacacacttctgacctctttgactctctagcgccgacggccaatgaagttgcttcaatcgagcttgccgagcatgcctccattgcccccgtgctcgccaacgatatcgcagctaatttagctgacacatacaagctggcgactgcggacctaggccagttgttctcagatgcagagcaaattggtttcgtcgatacggagagacttgatggtaaccaaacgctgttgttcaacggaaacctatttcgccgcgataccactcaaaagatcaaagcagttctggactctctgaacccagcagagcaagtaaagctcaatgagctcaccgaaacactgaggaagcgagcgtgcgtcagcacagaccacgcaaagcagttcctgggtgacgcgctctttcaaaaagtgacggcgatcggcttgttcgacatcagtgtggttagcaattctaccgaagatgttggattcctgaccttgccgtcggcgttctccaagtacagcaactcgatgatcgatgatgccttcgacctcgcgaaagcctttgttagctctgtaacttatggcatgaccaaaagctactatgagcgtgggcagatccaaatggttgacgccctactaggtgcattggttcgcggagaaagcgttggcccagtacgcgcgattgctgaagattacaagctgcttgagttgaaaggtgtggttgaagtaacacacggatcaaagaaggggcgatctggcccgatgcttcgcctcctaaaaacagaggttggtgaattggctcttcaagcaatacgacaaggagatgtcagcgagcactctttgaatgccttaccaacggctgccgtaaccacattcaacggccctgagcacaatcgcgagaaggttcgaaggacacaaaccaagatgagcccgaaagcaacgaacgacatgctatccatcctccgaacagggggtggactatga

SEQ ID NO: 360344 - DNA, 1110 bp, Pseudomonas aeruginosa
atggcctttccgacacttttctcgcccttgaagatcgggccttacacgttgtcacatcgagttgtaatggcgccattgacccgcatgcgcgcaactgccggcaatgttccaaatgagctcgctcccgagtattactcccagcgtgcgaccaatgggggactgatcatctcggaggctactcaggtcaccccatatggccaaggctacccctccacaccaggtatccacactgctgagcaggttgccggttggaaaaaggtcactgatgccgttcacgccaaaggcggcctcattttcctccagctctggcacgttggtcggtcttctcattccagcttccaacctggcggagtactgccggttggaccatcggccatcgctattaccgaccaggtctcattgacgcccgaatggaaaacagttccctacgagacccctcgtgctttggagctggaagagatccctggaatcattgacgcctatcgacaaggtgctcgcaaggcaatggcggctggcttcgatggtgtggaggtgcacgcggctaatggctatctgctccagcagttcttggatagcaaatccaaccatcgcaccgacatctacggtgggtcggtcgagaatcgtgcacgccttctgcttgaggtcactcgcgcggtagtggatgtgtggggggcggaccgcgttggtgtccggcttatgccgttcggaacctacaacgacatgggggattccgacccaattggtctctacagctacgtcctgactcaacttgatcaactcgatatcgcatacgtcagcctgatcgaggctcgaaaaggtaactcgatggagatcgataccccgacagacatcggtgagcttcgcccgtactggccgaggacgttgctggtggctggcggtttcacgggcgagtccgctgagcaggccatcgtttctcgtcatgcagacgcggtggcgtttggccgtcaattcattgcgaaccctgatcttcctaatcgcctgaggctcggcgcgccgcttaaccattacgaccgctctactttctatggcggtggtgcggctggctacgttgactatccggcgcttgaagacacagcactggctgactga

SEQ ID NO: 360345 - DNA, 651 bp, Pseudomonas aeruginosa
atgaaagtcgttgtcttagcagcaaccggtaaagctggccgggccaccatcagcgaactgcttagccgtggccatgacgtaaccgccgttgcccgtagtcccgaaaagctgccgagcagcatcgccagtgttgccgatgacctgagcagcgctgagaggcttgcagagatcatcaaaggtgctgacgccgttgtaagtgcctttggcccctcgacggaagattcgaggtacttctcggacgtgagttacaccgaccagttggttagcgtcaccgagcgcgtgatcgacgctgttgccaaaactggtgtgccgcgtctgcttgttgttggtggcgcaggctcgctctggctctcgcctggcgtaactgttctcgactcggggcattggccagagcagtacatcccgattgcaaagtcgcatgtgaaggcgttctccgcactcaaagcatcgggcatcaattggacctacttcagcccgccgatgatgattgctccgggcattcgcaccgggaaattccgccttggtggcgacgatgtcattttcgatgacaaaggtaagaactggatttcctttgaggactacgcagtagccctggtggatgaactagagcaacccgctcacgaacgtggtcgcttcaccatcggttattga

SEQ ID NO: 360346 - DNA, 1374 bp, Pseudomonas aeruginosa
atggcctacagaactcttaacccttacaccgaagaaactatcgaatcatttgttgagcacaccgatccagaggtagaggctgcacttgcgaaggctaatgcgctgtaccaatccgactggtctcgtggtgacatcactacgcggctctcagtgttggagaagctctctacgctcttaaccgataaccgtgacaagctggcacggacgatggccaccgaaatgggtaagccgatttctcaggggcagaaagagatcgatctctgtgcttccataacccactactacgcgaccaacgccagagcactcttgcagcatcagccggcgccaagcgatgtgggcgaaggctggatcgagtttcatccgattggagttctgttggctgtcgagccatggaacttccctatctaccaacttgttcgagtggttgccccggcattggcgatcggtaaccccgtgatgtacaagcacgcgggcattgtgccgcgatgtgcagcccttttcgcggagctcgttctacaagctggagcccccgttggcgcggtgacaaacctctatgtatctgcaaaaaaagttgcagagcttctcggtgaccctcgaatccaaggcgttgccttgaccggttccgagggggccggcagcaaggtggcttcacgtgcatcggagatgttgaagaaatccacattggagctgggtggaagcgatgtcttcgttgtgctggacgacgcggatatcgccaaggcggtgcagtctggggtcgctgctcggatcgccaatgccggccaggtttgtattggagccaaacgattcattgtgcagcgcgatgtggctgaccagtttatcgaaggcttcgtggcaggcatgaagagtgtgcctatgggggatccgctggagcaagacactcagctcgggcctctggcctctcccgaagctttggcggatctccgtcaacaggtcgcggaggcggtgagcaatggtgcccgagttcttactggcggtaagcgagcggatcgttctggactcttctacgagcctacggttcttgcaggcatcactaaagacaatccggctttctatcaagagttcttcggccctgtcgctcaggtattcatcgtcgagaatgacgacgcagttgttgctctggccaatgactctttgttcggcctaggcggttcaatttattcaaccaacatcgatcgggcgcgacgcctggcatctcgtatcgacaccgggatggtgttcatcaacacaccgactacgtccaggcctggcctaccgttcggaggcatcaaacgctccggttatggacgtgagctgggggactccggcctgaaagaatttgcgaatcgcaagcttgtggtcgtagcaaagagctga

SEQ ID NO: 360347 - DNA, 1311 bp, Pseudomonas aeruginosa
atggccaacctcgatctattcagcgtcaacgttgcattgccccggatatcggaagagtttcgcggggcaacgctggaggacctgtcgtggatcctgaacggatatgccatcggctatgcagccctcttggtattcttcggacgattagcagagggataccgccgagaccgtagcttcatgctaggggttgggattttcaccttagcctcggcggcatctgtaacggcaagcggggtttgggaactggtggccttccgagttatggccgcggtgggagctgcgctcatgacaccggcttcgcttggcgtactattagcgtcatttcctgccgaacgccgaggcgccgccgtccgtaactgggccgggattggaggctttgctgctgcattggggcctctcgtagggggcatgcttgtcacgatcgattggcgttgcatcttcctagtcaacgccgtcgtcggcattgcagctgtcgctgtagcatggatcacattaccgcctattcctgggcaccacactgaacggcccagcgtattcgctgcgctgcttgtcactggcggcattggttcgctggttttcaccatcgtcaaagcaaacgcgtggggctggtactcggcgagcattggtgtcagtgcctttgtcgcactcgtactgctggctctcttcgtcgcgcactgtttgaagtctgcgaaccctctagtcgaccccacgctgttccaaatccgctcttttacaggggccgcactggcaatttttccttactccgtatcgtttggcgcaatgctcttttctatcgctgtctggggccagtccgcgtggggctggtcagcgctagaggctggtttggcgatgttcattgggccattgctcgtgcctattacatctctgatcttcttggggaaactcattgatcgatttggcgcagcttctatcgtggcgaccggagtgctgttggttgtattgggcttctgcctatgggccagctgtatcggtctggaggcgaataccacgctgatcgtagtgggaatggcaatcaacggagtgggcgtcggacttacattccccacactaatgggcgtcagcaccctgggacttccttcgtcgtcttttgcgacaggttcgggaatgttcaacatgattcgccagactgccatggcgatcggcgtggctgttttcgtcgcgatcattggctcgccgcaagatgctcaggagcggcttgaggcctttcgccttgggtggtgggtcatggcgctcatcaccctgatctctttgtttccaacatggtttgtcctgaggcctggtgtgcgctag

SEQ ID NO: 360348 - DNA, 303 bp, Pseudomonas aeruginosa
gtgccgtgccaggtgaaaaaacgccatgacattaatctggaagtttcgatccaggatggcgggatcaatctctatgaagttcccaaaggcgccaccaatggcgttgtgaacaacgacatctggtgggccaaagtcacgagcgatcagatccagcgtctcgctgaagcgtgccgtatcagtgacatcaactggctacgccttggtgtgggcaatgctggactcgacggattggagccgatccgagtttctcgcaatcatggcgacgtcgtagccaccttcggcgaatctgcgaacaatcgctga

SEQ ID NO: 360349 - DNA, 849 bp, Pseudomonas aeruginosa
atgtctgaaattggtgattcacatctaacagggttttcaagcctcattagcaaactcacgaagcacgacgaaaagtacgctatcgacctgccgcaagattggcttcagggtcgaactgcctacgggggactttccgcggcgttgtgcttagaagcaaccattcgctcgttcccctccctgccgcctttgcggtccgctcacttctctttcctcggaccggctatgggcgagctgatcgtctcggcagaagtatcgcgccaaggcaaatcgacggcgttcacccaggccgcagtggaaggtgaaatgggcattgctgctcaagctagcttctgctttggttcttcgaggttctcggagtacgactactgcaatactccctctcctgaggtatctcctccggatagctatccgacttacttcagctggctaaaccgtccgattttcatgcagcacttcgaaggccgcctggtctcgggagccaggccgtgtactgaaggcgagcaacctgaaatgcttgtgtggttacgtcacaaagatcgagcaattgatacaaatctggtcggactgctggcgttggcagacgcactacctccggcaatttttgtgatgttccgagagccagtccccattagcacggtgacttggtcagtcgatgtattggatgagtcgttcgagaacaaagagggctggtggctagtgcggtctgttgcagagagtgcacgtaatggcttcacgacacaggtgatcacgatctgggcggctgatgggcggccagttctcgcagctcggcagaatgtcgctgtcttcggtaatgctgtaccgcacctgtgccaagaggctacggcgtag

SEQ ID NO: 360350 - DNA, 768 bp, Pseudomonas aeruginosa
atgtctgaatacatcaaggtttctgagcatgacggtgtcctggaaatcatcttcgccagacccgagaagaaaaacgctctgtccaacgatatgtacaaggccgctcgggaggctctggagtacgcgcgagatagtaagagcgtaagagccatcctgttcggtgctgaaggggaggtttttactgccggcaacgacctctccgactttcagcaggtctccagcgggccccccactgagccgcaagctccgctattcatcagtgcacttggcgtaaccgaaaagccaatcgtcgctgcggttcaaggcttagcggttggggtggggacaactctcctgctgcactgtgatctggtcttcatcgcagataccgcgagactgtccgcgccgttcgtcaacctaggccttgtaccggaggccgcttccagcggcttgatgccggaccgaattggccatactagagccttcgctatgtttgctctcggtgagagcattactggaaacgaggcgttcactttcggtctggtcaataaagtgctgcccgcctccgaggtactccaagcagccagggctgcggcgaatgttttggcgcagaagccaattggtgcattggtcgcaaccaagaagctgatgcgcgactcagaatccatcaccacaaggatggaaaccgaaggggtcgtattcgcagagcgcttgagaagcgaggaggctaaagaggccttcgccgcctttgcagagcgcagagctcctgacttctcaaaattttcgtga

SEQ ID NO: 360351 - DNA, 942 bp, Pseudomonas aeruginosa
atggctctcgatccacatctcggaaaagttctgcaatccctcgctgccgcaggtcggaaggctccccatgagatcacgctgcaagaaagccgcggcggctactacgcgttgacttttggcactcgcacccaggaacagattgtccctgtcggcagcgtggaagacaccgaagtccaaggcggcgtcggaaagctcaaagcacgtgtatatcgtccaaaaggaagcgcccccaagccgacagtggtgtttttccacggtggcggtttcgtacttggcgggctcgatacccacgacaacatgtgccgtgacatctgcaagtccagcgacagcgtggtggtctcggtggactaccgtctttctcctgaaagtccgttcccggcagccgtcgacgactctctcgcagccactaagtgggtgattcagcacattgccgagttcggtggctcggacgctgttggcgtagccggagacagtgccggtgcaaacctggctactgtcgtagcccaacaacttgcctccgaaggtatcaaactggcggcccagttcctcatctaccccggtgttgatgacgtggatgggaattacccttcgagaacagaaaacgcgacggggtatttcctggagcaagacacgatgaactggttctttgctcagtacgtcggcgaatggagtgagttcaaagaccctcgccttacccctatcaatgccaccaacttctccgacctaccgccggcggttatcgtgactgcagagttcgatccgctacgcgatgaagctgaagtttatgcaggcaaactgcaatcggcaggtgtcgcggtagaggtagttcgtggtgcaggcatggtccacggcttcttcgatatggggcgttggtcgcccgctgctcaagccatcatcgacaagaccagctctcgcttcggggagctcttgcacaaagcttaa

SEQ ID NO: 360352 - DNA, 576 bp, Pseudomonas aeruginosa
atggcaagacataacgtacgtgagcaactgattgacgctggcctccagaccttacagttgagcggcttcaacggatgtgccgtacaggacataacccagacagctggcgttcccaagggatcgttctacaaccacttcgagagcaaagaggcccttgctctccttgtgcttgagcgcttctgggagagcggagccgagcgccgagcgctgctaagtgacgccgcggtcgacccagtcgagcgcctccggaagcacttcaaggctctgtccgatgccgtaatacttcaagagtttcgcaaaggctgcctgatcgggaatttcagctccgaaatggcaaagaatgaggaaatccggggccgcttggcatcgatttacaccatgtggagccgaaccttggcgacctgcattgatgatgcaaaagcagcagggaaagtccgccccgatctttctgcagatgccatcgccgatttcctggttagctcatgggaaggcacagtccttcgggccaaagttgagcaaactcgatatgctctggatcagttcgaacacgtagttttcgccagctttttcacctga

SEQ ID NO: 360353 - DNA, 621 bp, Pseudomonas aeruginosa
atgcgcaaccccttgaccgaacagcagattctcgattttcgccaacgcctatgcgagacagcggaggagttattttccgtccatggtgtggcgggtgtgtcgatgcggcaaatttcgcagcagttaggagtcagtcagatgacgccgtacaagtacttctccaacaaagaggagatactggcagcagttcgtgcatctgctttccggcgcttcaatgagcgcctggaacgagcaaggactggtgtcgatgcacgagcggatgctcgtgcggttggtcaggcctacttggactttgcagagcaggaagcggaggcctatcacctcatgttcgacacgtatcagccgcatgcctccgcctatcccgagtttgccttagccctgcatcaagccagagcctgcatgacgtcctacgtgcaggctttgattgatgaaggacatctctcgggagatgcagaggagctaggcgaaatgttctgggctgccgcgcatggcttagtgatgttgcacggcaagggattcactgagcctaggaagagcgtcagaaagttgcatgaacaactgatgaggtacctatggaaaggtgtgctctccgattctcggtcgtccaatgcgaaccactag

SEQ ID NO: 360354 - DNA, 642 bp, Pseudomonas aeruginosa
atgaagtcgctcgatttcttctttgacttcatctccccttttgcctacctagcgtcgacgaaaatcgacgccattgcgcaccaacatgggtattcggtgaactggattcctttcaggctaggtgtcacggttactaaggtcatgggtataaagccactggccgagacaccacttaaaggtccttatcttaaggacgacatccaacgactagccttggctttctctataccactcagcagcgacctgcacattttcgacccacttcctgcacaacgtgttttccacaatgcgcctaaggagattgcaggcaacttggccaagaaattcttgaatgcccgctgggctcaaggtcgtcgactagacgaactggaaagcctggtgcaaatctcggaagagtgtgggattgaacgagatgtggtcgaacaggcccttgtcgctaccgagacgaaagaggcgattacgcgatccacgggcctggctattgagcttggggtgttcggatcaccgacgtgcgtggtcgatggcaaactcttttggggggtggacagactatggctgctcgatagctatcttgcggctgaagggcactatgtaccacttgagacggagcggctgactgctctaggcatgccttcatactaa

SEQ ID NO: 360355 - DNA, 1881 bp, Pseudomonas aeruginosa
atgatcgtcataccaacgcctagcgcctcatatgaggtcgagtcatcccttttcgccagtaccacactgggcgactgggtacctgcctccagtacctatgacatgtttcgcctaagcgccttgcagtacggtacgaatacggcaattacgcacctcgaaacaggaagcacggaagaggtgactagtagcctgaccttctcccagctttatggcgaaataactcgtaccgccaaccttttagggctcagtggggcaagtcatgagagcagcgttgcgctgttacttccgaatctgatcgaaacacatctctgcatctggggggccggtgcggtttccagcgctctacccctgaatcacatgctttcggtgaaggttctggctgaactgatgcgatctacgaagacacgagtgcttgtcgctgcggggcctggtctcgacgacagtatttggcagaaagccttggaggtcaggacagagcttggtgatcagctgcgatgtatcgttcaggtcggaggtatgccggtcgaagatcaaggcgtggtgcatttctcgcaggtgaagaatgaaatgcccgcagaccgcttgctcgctgatcgagagcccgagctagatgacattgcagcctatttccataccggcggtactaccggcgccccgaaactggttaagcacactcatcgcaatcatctggcagcagcctttgctttcgccttccgacatgggctttccaaagcagaggtcttcgtgaatggactgccgctctaccacgttggcggcgtcctcccatgctcactttcccccttcatgtctggagcacacttactcaacctgtctgccactgggatgcgcaaccagagcattcaagcaaacatctggcgcatcgtagaacggtatggtgttaccagcctcaacggggttcctacatcgcttggaacagtcgctgaaattccgcaggacggcgcggaggtcggttcgatcaagaaaatctgggcaggagcagccttgttaccaagcactattgcgcaccgcgttgaagacttgttgggggtgccagtaagagaggtctacggaatgaccgaaacctctggggtcatctgcgcggacttagctattagcactcccgtcacaggctccgcaggattcccggtaccgttcgttgaggttcagattcgtccgatacgggcggacggctcactatgcgaacagacagtgaaggaccagccgggcgcattgttggtcaggggggcgacagtcactcccggctacatggacccggcacaaaacgccgatgcatttactagcgatggatggctaatcacaggggacgtagcagtacaatttcaggatggccgaatcacgctaaccgggcgcagtaaggatgtgatcatccgcagtgggcacaatatcgacccgcttatgattgaggaagccgcaatgagtcaccctggggtggtagcggcagcagctgttgctcaaccagacgcttacgctggcgagatccccgtctgttacgtcgttggtcgaggaggcagcccccttgaccttgatgatctacagcgacatttggccagggtagtcccggagaggcctgctgtgcctaagcaggtctaccaagtcgaaagtctacctgtgacgactgtcggcaaggtgttcaagccagcacttcgctcggatgcggccaaacgcatggtgacagaactcctatccgaccttggcgatctggtggtggaggcagaagaagatgggaagcaagggattcacgtaaaggtgaacatccaccctgcgctagcagccaggaccatgcgcacagctatcgcagatcggctgcgccccttcctgtttcgctggagtattcatcctgaagcagaggaacatgaatga

SEQ ID NO: 360356 - DNA, 330 bp, Pseudomonas aeruginosa
atgcgcagtgttctcgtgctctcggttgcccttctagcggcctgtggccggccgtcctgcgaggacctggccgaagcgctgaccaccaatccctcgcggctcaaggcgctgcgtgcggagtgcgcggccgactggcggagggtgggcgaggggatctgcagggccgccgccgaggcgtaccggcgccgcttcttcgccagccactccgacccggacgagtatgtcgtcctggaggagttaccgccgattccaccgagctttgatgagcctggcgatgaggtgaccgaaagcgctgcgcggctgattgtcgtcaaggaggacgcgccatga

SEQ ID NO: 360357 - DNA, 252 bp, Pseudomonas aeruginosa
atgaacacgacccgcaagctgcggctggggccgctgcccaagactgagagcatcaggttgacctttgcctgtccggccagcttgaaagccgatctcgaccgctacgccacgctgcacgcgcaagcatatggcgaggccgtcgatgccacggtgttgattccgcacatgctggaggcctttatggcaggagatcgagcgtttcggcggactagcaagtttccggccgcaaagcccaacgccagcgacgactga

SEQ ID NO: 360358 - DNA, 660 bp, Pseudomonas aeruginosa
atgagtagcttgctggggcgtagtggcaccaatctgcgcgcggcgctagattttgccaaacgcgtcccctgtgtcttattgctggatgagatcgacgcgatcgccaaacgccgcagcgatgatactgacgtcggcgaactcaagcggctggtgaccgtgatactgcaggaggttgatgagtggcctgcgacggggatgttactggcagcaaccaatcatccggaactgatcgatccggcgctttggcgtcgattcgacctcgtggtcgaattcaaggtgccagaggcagcagcggtcaaagaggcgatcaagcggttcttggggccggacttcgcgctgtttgggcgttggatcgagattctggccttcgcgtttcgtggccaatccttcagtgacatcgagcgcgagatacagcgtttccggcgtgccgtggcgttggggacgacaccggatgcagatttgatcgaagagttcatcaaggcgcgcgccctgtcgcttgatcgtcaggggcgcatcgatatggcggtgctgctggctaagcagacgcgtttatcccagcacagcatctcggatatcaccggcgtgagccgagacaccattcgcaagtacacaagcgacggactgaccgtcgcgcccaaaaaacgggggcgtgaggcatga

SEQ ID NO: 360359 - DNA, 2223 bp, Pseudomonas aeruginosa
atgaaccagaccaatttcctgatcggacgtggcgagttgttgacccacgaaatcaaggggccgaagcgcggcatggataaggccgaggtctacacgttgcagcaggcgaggagccgactgacaccgcagttcgtcgacgttgcagcaagccttgacagtttgcccaacaacgcctgtccgggggatttgggagtggcacgcctcgcacttaatcctagttacatcgcgcggtccttctttccggcggccatgctgcgtagcgcaggtcttgaatcggtcggtagtagggcggtcaaactgacgccggagagctggtcgaagaagggggcgccgcgggagtcgaccaccacagagctattcgtggtgggcaggcgccaggcctttcggcagttgaaggactgggcagggcaactggaggagggatcgtacgaagcgaaggatctgtcgcatatcgagcggatttccgcgttcgagccgaaggaccgtattgtttcgctcggcgaggaaaaggatcgcttcttcgaggttggcatccatctgcttcctggcgacaacgatcagtttgtgcagcgagcatttgccaagtacgcgactgatgtcggcgtgaaaatccatgccgacttggcgtttagcgctggcaatctgtggttcctcccggttgagggcgcgcatgacaatgttgtgcgtctggctgaattctcatttgtgcgggtgattcgttccatgccgaagttgcgtggcatgcgtcccgtacagcgctcggcgggtgtaacagtgccatgcagtctgccgacggaacagccgctatcgtccgaacctaaggtggctatcctcgatggcggcttgcctgagcagcacggtatcggtccatggttgcatacctaccgagttctcgatgaaacggcggccgacgatccgggcggcctggagcacggccttggcgtgacttcagcattcctgtttggcccaattgctcccaacagcatcgctgcgcgcccttactcttacatcgaccacctgcgtgtactggatcgcgagactgactcggaagacccattggagctgtatcgcacactggggctagtcgaggaagtgctgctgtcgcggcagtatcagttcatcaatttgagtcttgggccagacctcccaatcgacgacacggacgtgcatgcctggacttccgtgatcgacgaccttctcagcgatggcgagacgttgatgaccgtggctgttggcaacaatggtcaaatggatcggtcggtaggaaatgcccgtgtgcaggtgccttccgactgcgttaatgcgctatccgtcggcgctgccgacaacacgaacgcgtcatggtcgcgtgccgcctacagtgccatcgggccggggcgcagccccggcgtggtaaagccggacctcatggccttcggtggggatgccgccagctcccagtatttccatgtgctggcacctggtgcgaagccgacactggtgccgcagttgggcaccagctttgcgtcaccgtatctattgcgcaatgccgttggtgttcgagcgatcctcggagcagatttgactccgctggccatcaaggccttgcttgttcatgccgcggattcatccacgcacgacaagctcgaagtcggttggggcaaggtgccggaagacttgatggatgtcattacatgcccaaccggcgtggcgcgagtggtctaccagggcgagctgaagccggggaaatatctgcgcgcgtcactccctctgcctgccggtggtttgcaaggcaacatccgcttgaaggcgaccttctgctatgcgtctccgacagacccgcaggatgccgttgcctacacgcgggccggtttggaaatcgtgttccggcccagcgacaagaagatcaaggaaggcaagagcaatgcggacacgaagggcttcttcgatatgaagaagtacgctacggaagaggagcgtcgttccgacatgggcaagtgggagacggtcctacacggtaacaagtccatgcgtggcactagcctggataaccccgtgttcgacatccactacaacgcacgcgaggctggtgcgccgacgacgagtgcagaaaagattcgctacgcgctaattatcacggtcgaggcgcccaagcacgcggatctgtacaacgacattttgcgcgcttacgccaagatgctggtgcccattcagcccaaggtcaccttgccaatccgtgtgtag

SEQ ID NO: 360360 - DNA, 1800 bp, Pseudomonas aeruginosa
atgaaactcacaagaatttacgttagcaattttcgcaactttcgcgacgtggacatcgtcgtagatggaaatgtcgtcatcgtcggcgagaatcgcgttggtaagagtaacctgcttcatgctttgcgacttgttttcgatcccagcttgcccgacagcggtcgacagcttgggcagggcgatttctgggatggcttgggagagccactcgaagacgaagaaatcactgtcttcgtagagttgcaggagtttgaggacgacctggatcttctcgcccagctcacggattttcgacttgacgacgatccgcacacggtacggcttacctacaaactccggccgattcctggcttagagggggcgccagaatgcgacgacgactacgaattcatctgcttcggcggtgaagtcgagacgaagcggtttggccacgaagtgcgtcggcgcattgctatggacctcctgccggcgctgcgcgatgctgaaggtgatctagctacgtggcgccgctcgcctttgcggcccttgctcgaacgcgcctttgcaagcgtgtctggcgaagacctcgcaggtgttcgcaatgccgtccaggccgcgacgggacaactggcggatttcccttcggtgcagaacttggagcaggctctgcagcaactgttcgcagcgatgagcggtcccaagcaggatatcgaacccagcctagggttcgggacgaccgacgtgacacgcctgttccgcaatcttcggctactgatcgatggcggcctgcgcacaattagcgaggccagtctcggttcggctaatgtggcgttcctgaccttgaaggccctcgagcttcgccaactgatgggcgagaaccggcgcgaccacacgttgctggcaattgaggagccagaggcccacttgcacccccatctgcaacggtccgtgtatcgccatctattcgaaggtcttgcgggtgaggaggagaatgagccgctctcactactcctgacaacgcactcgccgcatattgctagcgtcgcacctctgcgctccctggtgctgcttcgcgacacggttgacgaggggactgtggccgcctcggccgcgtcgatcgacctcaccgatgaagaggaggacgatcttgcgcgctacctcgacgtgacgcgtgccgagatgctgttcgcccgggggattgtcctggtcgaaggggatgccgagaaattcttgctgccggtgtttgccgcctcaatggggcacgatctcgatcatctcggtattacggtgtgctcagtggcgggcacgaacttcacgccatactcgaaattccttgctgcccttggcatcccgttttcaatagtgaccgattgggatccacagggggggcgtatacctctcggctacaaccgttcctggcgactcgtaaaaactattgaggaagtacgaacgggcgaggatcaaggcgggctcattgaggaaatcaagaggatcgagcagtacagcgatttctctgaccgctgtgaggggtatggagttttcaccaatttcgacacgttagaggtcgacttgtttgaagatgaagacttcacggcggccatcatcgaaacactccgggagcaaaggttaagcgaggaaaggcaggcttgggtgagccagtgggaaggcgacccagagaccttggatcgggagaactacctgaagctgatcgaagccgtcggaaaagggcgatttgcacagcgtttggcgtctcgcattgagggtattgcaccgcccccctacattgcgcgcgcaattacctacgtggtcgaccgtgtctga

SEQ ID NO: 360361 - DNA, 1428 bp, Pseudomonas aeruginosa
gtggcgacccgagctgaacgacaggcagcactggccgaagcggtgaacctcacgatcgaagcgcccggcaatcctcaagattgggagttccggcttggcaactatcgccgatcaatcttaaatcgcgacagtcaagaatggcgtgataccgatccggagcttgcgcgccttgtggagacgtacgaagcacagcttcgtcgtcgtggcttgatcgacttcgatgatatgcccttgctcgcagttcgagcgctgcgtgacaacccgtggttgcagcgggcgctgctcgccaaataccccgtgctcgtcgtcgatgagtaccaggaccttggtgtcgcgctgcatcgcatggtgatggggttgtgttttcgagcgggcatgcggctctttgcagtgggcgacgttgatcagtcgatctacggattcaccggggctcgccctgatttgctccgcagattgtcggagcgcgaggacgtcgagactgtgcgcctgcggctgaattaccgcagtggaaaccgtatcgtcctggcgtcgcgcgtggccttgggtgaagagcgtgactacgaggcggctgatgctacggcgcagggaacggtttttattcacccgacaggcggtacctatgagcagcaagcggcctgccttgtcggcgagtttttgccccaggcgctgaggcgtcacccgcaactcagttaccgtaatgttgcagtgctctacccggccgcatggatcggcgatgctgtagccgggccggcgcaagctgccggcataccaatcgtgcgcacagatggcaacgccctgtacccacgttctagtcgcgtcatgcagtggttggaattgtgtggccaatggtgttgtggtggatggcgaacggggaagccgcgttttgctcagctagcgcgggaggggcggcgactgttcgcagagtccatacatagcgatggccaggcgatggactttcatcgccgattgatcgccaccctgtgggatagccgggatgcgaacctgaacctacatggttggcttgcaagactgtcgatggacgtgatccagccattcgcctccgaatgtcctgcgctgagggatgagatggacaccctggccgtcttcgctgctcggattgccccggcgggagatcgtgcagatatggttctggctgagttggctggcgacggtgagcatttgaatcggctaacactgtcgacgctgcacagcgcaaagggcagggagttcgatgtggtgtttatgtttggtatggaccgcgggcggttaccgcgcaacggtgttggtccgcaacaggtcgtcgaggcgcgccggctgttttacgtaggctttacgcgtgccaagtctgaggttcatctggtgcacaccgcggggcgttcatcgctgtttgtggaagaaattgaaaatcacttggccgagggtgcttga

SEQ ID NO: 360362 - DNA, 3246 bp, Pseudomonas aeruginosa
atgcaggccgcctggaatgatttcaaaaaccccaaggtgttcactagggataaggatgttattgcgctgatcacaggaccgctcagcgcgaccgatgcacacaatgtgcaatggttgctaaaccaggcaaggcacacaaaaaacgttgatgagtttttcagaaacgtccagcaggcgaatttcagctcacccaagagcaccgagaaaatggaggtcattcaacatcacctgaaggctgcaaacggcggcaacgatgtttcaagtgatgaactctatgacttcctgaaccacttccatctgctcggttacgatcttggtaacgagtttggtgttgttctgtctctactgcactcccacatttcccaattccagcagcagtatccgcaatgggtctggtcacgggttgtcgatattgtacaaacatggaatcaggatgccggcacgatcacacccggcaagctaccggacgaccttctggatgcctttaaacaaaaggccgtggcggagatgcccgaggagctcaaggcggcacaggagaaacctaaaaccaattggacccagcacccggacgccacctatctggctttggcgattttgctcggctcttggcaagacaaaagtcaatgcgaccttgaggcgataacccaactgctcggcatcagttatgacgaatggctaaagaaggctcgggaaatattgcactgccctgacagcccgttatatctcaaaaacggtatctggaaagttgttaatcgagccgagctttggagcatgctgggatcgcgcatccttgatcagaaactcgatacttttaggtcgcttgctgtttcagtacttaaggagccagaccccgcttttgaactgcccgccgaagagcgatacgcggcaagcattcacggcaaggtactgaaatgttcacatgtattgcgaaaaggcatttccgagggcttggccattctaggcagccaaccggaggcgtgcgctaactgctcgcaagggaaagctgaagcaacctgtgtattggtgatacgtgaacttctggctgatgccaactgggttttgtggggtagtctgaatggtctactgcccactttagccgaagccgccccgggtgaatttcttgatgcggtcgagaaggcgatgcgtctgacgccctgtccttttgatgagcttttctcccaggaaggcaacggcatcaccggcggcaattatctaaccggcctgctctgggcgttggaagggctggcctggaatgaacaatatctggttcgagtctgtgttgcgcttgctgaacttgccagccatgatcccggcggccagtgggccaatcgaccatccaattcgcttgcaaccattttgctgccttggctgccgcaaacgctggcatctgttgacaaacgcaaggtggcggtgcgaacgatcctaaatgaatggccggatattgcctggaatctgatcattcagcttcttcccggccagcatcagacctcttccgggtcacacaaaccaagctggcgcaaaaccattcccgatgattgggataaaggcgtgacgcatcaggaatactggcagcaggcatctttttacgcggaacttgcggtggctgccgctggtcatgataccgcgcggctttccgcattgattgatcattttgataacctgcctgaacccgcatttgatcaacttcttcaaggtcttgcctcccaatcgatttcagagctccccgaagagcaacgactttcgatttgggaccatctcacgaaattcacaaagaaacaccggcgtttctccgatgcgaaatgggcattgcccgacgaactgattacccgcattgaacacgttgccgggcaactcgcccccgccaaccctttcaatttatatcagcacctttttacaggcgatgactttgatctctacgtagagaatggcgattgggaggcgcagcgtaagaaactagacgcccgacgcgaaacggccatttcggaaatctttcagcaagatggtgccgagggtgttattagatttgccgaatccgtttcttcacccggccaggtagggcacgcgcttggcgttattgccgataacgtttttgaacgtgctcttttgccgcatttcctgaattcagcggacaacaagcgcaaggccttggtgagcggttttatctggaggcgttaccatctcaaaggctgggagtggtgcgacgacctcgatagatctgattggacacccgagcaagcaggacaatttctggcttgtttgccttttaccaaggagacatgggatcgcgcttcagaatggcttcaggcccacgagagtgaatattggacccgcaccggcgccaatgcctatgaggctgatggtgacttaactattgcgattgagaaactgattgagcatggcagaccacatgcggcaatcaactgtctggacaggatgcgccatgccaaacagccaatcgatagtaaccaatgtgtccgagcgttgctcgaagcgctttcctctagtgagccaagttacgccatcgacgggtaccacatcgtcgaactgatcaagtttcttcaggcagaacctgaggtgaatcaagacgatctctttcgggttgagtgggcatatgttccgttgctagaccgtcatagaggtgccgcgccccaactccttgaaagcagactggcaaatgatccagagttcttttgcgaagttattcgactgatctaccgttccaagaaagaagatcagccgtcgagagaaccctccgaggaatcaaaggcacttgcaacaaatgcatggcggctactgcatgagtggaagacaccgccgggagcacaacaagatggaacattcagcgaagagcgctttgctgaatggctccaaagggtaaaggaagcctgtacggactccggccatctggaagttgcattcatcaatattggcgaagtattgattcataccccacccgatccaggaggcttatggatacatcgcgctgtcgctaccgcattgaatgaccgtgaagctgatgacatgcgcgatggttacaggacaggtacatacaacgcacgcggcgtccattgggtagacccaaccggaaagccggagagagaactggctgaacagttccggagtaaagccgaggacatagagaacgccgggtttcagcgatttgccgttaccttgagaggtttggcggacagctacgaacgcgaagctgaacaaataattaatgatcacaaagacccggaagattag

SEQ ID NO: 360363 - DNA, 294 bp, Pseudomonas aeruginosa
atgcccaatagcggcggctcgggactggtcaccggcaagaaagtcctggctctaaccaagggtaccggccctgctgccaacgtcggcatcgccctgctcgtctcctacggccaactgatcgatctgagttcggccgccaccgccaagatccagagcgaggagtacggaaccggagctgcggacggcgataccatcttgaacttctccgccacctacgtaacatccggcgcagctgacactgccaccgccggtcgtggtgacaccaccctaccgttcatcttgcagtacgagtaa

SEQ ID NO: 360364 - DNA, 186 bp, Pseudomonas aeruginosa
atggcagatgcagagttcctttgtgcgactgatcctaagaccgtcctcgccctgctggacgagatcgacaggctcaaggcggagaacgatgcgctgcgaggggcggtcgagcaactcgccgagatgctgaacagcatccatgtccccatcgatcttaacgaaatcctcaaaggagccaagcaatga

SEQ ID NO: 360365 - DNA, 498 bp, Pseudomonas aeruginosa
atgagtaaggttcagcggttctggtgcgatgaggcgcggaacatccggtgcgtccgtgaggatgacttcgacgcactcgaagccgaggcccaggcgctaagggaggaagtcgccaagctgacgcagtacaacaagagtcttgacgaagaaaatacacgactgcttgcggattgtgagaagaccgacagggaagtcgcagccctgcgcgcaagggtggctgttgtgcctgatgcgagcacggtgtacgcggcgctcgatgctcgtgagcggttattcacaagtcctgagaacattcaggtagcgctggaagctcaatcgcgcctcaacggcctgacggtcagcgaatcagcgctcgacacgctgcgccggttcgctaccgggaacgtcaagcacatgaacaacggactgtgccccgattgccttgaggggcacgaagcgcgcgatccggactgcccggtatgcagggcgctacttgatacggagagcgacaatgtctga

SEQ ID NO: 360366 - DNA, 300 bp, Pseudomonas aeruginosa
atgaaatacggaatattcttcacgctttcgctagtagcaatggggtatttggcctgcatcccattgtggctaacgcacaacaaaaccttcgggctgacagcatttttcctgattttctggcctggaattttcttcatctgggaaatcacctccctcctccaggaggggcagctattcaggaagggggcgctgatgcaagcgctcagaaattcctccttgatgtttaaatcttgggcgttatcgatgcttggcctgatcgcagtgtcagcactcctagctcttctcagctgggctagataa

SEQ ID NO: 360367 - DNA, 339 bp, Pseudomonas aeruginosa
atggatgaactaatcgagcgtccgctgaccttcatccgggataaggcgggcgaattcgcggaagcaaagtcgaatcgtgtgtacctggagcagtttcgtaagagcaagaaggctcttctgatgcttgaggctgagcgtaatggcgtcaagacgattgctgctcaggagtcgtacgcctacgcacatgatgaatatctggagcttctgaaggggctgcaggtcgccgtggagcgcgaggaatacctggctatgcagattcgcgccgcgcagattcgcattgagctgttccgcactgagcaggcaaatcagcgcgctgagcgcaaggggtatggagcatga

SEQ ID NO: 360368 - DNA, 240 bp, Pseudomonas aeruginosa
atgaagatcacaaacgtcgagtggaacgaaggggcgcctgatctgctcgctaccgggatgatcattgaggacgaggacaatggtttccttgtcatcggggacattcttatcgacggcgcgccattctcaaattcacggcaaacgccagtcgtaaaacgttgggcatggctcatccagccccacgaactcgcctggctcgaagacatggcaaacaagcacaaagcgagggcgcggggatga

SEQ ID NO: 360369 - DNA, 1101 bp, Pseudomonas aeruginosa
atgaagctgctttcacgttctgaggccaaagccgcaggccttgtgcggtacttcaccgggcaagcctgcaagcacggccatatctccgagcgcttgaccgtcaatggctcctgcatcgaatgcacctccgaccgcatgaaggcgaagtactgggagaaccgagagcaaaatctgcgtcagcagaagattcgccgggattctgaccctgatctgagccagaaaaagaaagcccgcgctagggtgcgtgacccaggtctggccctccgagatgctgagagaaaacgcattgcagcgctgaaagcatctgctatagctgcgggcttctcaacatttgatcttggcaccccgtgcaaagcagggcatatggcgccacgattcgtccatgacggaaagtgcgtggagtgcaatcgcatctcctgcgcagaacgctataaaaagagagttggtccagagcgccgtgctgagttggacatgctccgtgctgatcaggcagcgcgaaaggagaagaggctggcgtcggccgaactgttccaggaagcagggcaggctaggagaagggccagagcatcaggcgctgtcacgtacttcagcaggaaaccatgtccacgtggccatgttggggctcgctatctctctacgggtatgtgcactaaatgtacggccattcaatcggcctctccgcagaagaaggcatacgacaagcaatatcaggtgctgaacaaggatcgtattgaaaagcgcactcgcgtttaccgagaggcaaatcgagagaagctgatcgccagagcgaaaaaatgggcagccaataaccctgagaaacgcaagatcatctcaaagaacaacaaggccaagcgccgcgcgattgaaggaaaaggcctcaccttctcggagttatccgcttgggaaaagggcacgccgaaggtatgtcactggtgcggcaaatcatgtaagagccgttaccacatagaccattaccagccgctttcaaaaggtgggctgcatgagatcagtaatctggtcatcgcatgcccaacctgcaatttgcgaaaaagcgctaaagacccttacgaatttgcagccagcatggggagacttttctga

SEQ ID NO: 360370 - DNA, 753 bp, Pseudomonas aeruginosa
atggacaggaacgagcagggcgtactaaccaatggtttcgtcgatcctattagctggtcttcgatatctaatacaccaaccacccttggtggctatggcataactgatgcctatccttcgagtaaccctagcggatatgttaaccagtctggagctaggtcatctatatcactgactaacgtcgggtccggtggctctccaagctatacggcatctactggcgttctgaatatcccgacctatggaacagtaaacagcattaccgcaggagctgggcttagcggtggaacaatcacaggtagtggcacgatcagcatgccaaataccgggaccgctggaacatactcaaatgtgaccacggatccccaagggcgagttacttctggaacctcgattacgcagtcgtctgcctctcgtagcctaaactctgcgtttcagataagtgcatcgagatcatcgcttgtaacgtacagtgtgcagatcactgttactgcgagcatagccggcggccagaatggagatgtcattctcgaaatagctagcgatattggattcacgtctaacgtccagacggtctccatcgccggacttggacagacttattctcttgcagtggcgctacaaggggttcagccgcagacatctgttgtctctggtgtggttcctgctggttactacgcacgactccgaaccgtaaacaacactggaacaccgtccttctcctatagagctggacaagaagtacttctgtaa

SEQ ID NO: 360371 - DNA, 378 bp, Pseudomonas aeruginosa
atgacaatagtcaatccgtacggcagaaaaacaacatatcactttcaatttatccaaggtataaaatacataacgtctatcgaaggagaaccctcgcccaactgccccagcagcaattccaccttcacctatgacgaacgcggactgctcaccagcaaacgcgacaacaacggcaacctgaccacctaccagtacaacgcccgtggcctggagacctcgcgcaccgaggccgccggcactgcgcaggcgcgcaccatcacaaccgactggcacccgaccctgttcctcccggtgcaggtcagcgagcccggccggatcacccgctaccagtacgacgccgagggacgcaagaccggcgagaccgtcaccacccgctga

SEQ ID NO: 360372 - DNA, 837 bp, Pseudomonas aeruginosa
atgagcgaggcgctcctcgacgctcgcgggatcgccctcggctatccgcgcggtgccggctggcaggcggtgctcggcgatttcgaattgcgcctgggcgccggcgaggtggtctcaatcctcggtcccagcggcgtcggcaagtccagcctgctgcgcgtgctggccggcctgcaggagccggccgccggcagcgtgcgggtactcggcgagcccctgcgcggaccgcatccgggcgtcgcggtggcgttccaggaccccagcctgctgccctggctgaacctggagaagaacgtcgccttcggcctcgatttcgcccgccagccgcacctcgacgcggccacccgccaggcccgcgtcgaccaggcgatcgccgcggtcggcctggagcacgcccgtgcccgctacccggcgcaactctccggcggcatggcccagcgcaccgcgctggcccgctgcctggcgcggcagccgaaggtgctgctgctcgacgaacctttcggcgcgctggacgaagtgacccgcgccgacatgcagcaactgctgctgcgggcgatccacgagcgcggcaccgccgtggtcctgatcacccacgatatcgacgaggccctgctgctctccgaacgcatcctgctactgggtgacagcccggcgcggaccctcggcgagtggcgcatcgacctgccgcagccacgcgcggagctggtcgaggaactgggcgcgttgcgcatcgagatcctgaaaaccctacggcgggcgagccgcacccatgcccatcccatcgctcagccggaggcctcccatgtgcctggacgacccgacccattcccgacgtga

SEQ ID NO: 360373 - DNA, 402 bp, Pseudomonas aeruginosa
atgaaccagggagcactccggccagaggtgctgtcggccgccgagcttatcgactgtctgtgtcccgcgaacggggcgccctattcggttgagcactatgccgagatctttggcctcagccctgccgtgtttgccggtcaggtcgcggcctatcgtcgcagccaaccaaatgcggccagcgcatccgatgccgaagcgacacaacgttttatcgcggatgtcctgcgggtgatcttggccgtagccgagagcggagtcgccgtcgagcgggcgatcacttggtttcgcctcgagcctttaccgaccttcgaacagcagaccgcggagcaactggtcagtcagggccaggttgaacgagtgctgcagtttctggcctcttggcaggcgggaagtcagggatga

SEQ ID NO: 360374 - DNA, 762 bp, Pseudomonas aeruginosa
atggctgtcaatgattacgaacctggttcgatggttattacacatgtgcagggtggtgggcgtgacataatccagtatattcctgctcgatcaagctacggtactccaccatttgtcccaccaggaccaagtccgtatgtcggtactggaatgcaggagtacaggaagctaagaagtacgcttgataagtcccattcagaactcaagaaaaacctgaaaaatgaaaccctgaaggaggttgatgaactcaagagtgaagcggggttgccaggtaaagcggtcagtgccaatgacatccgcgatgaaaagagtatcgttgatgcactcatggatgccaaagcaaaatcgctaaaggccattgaggatcgcccggccaatctttatacggcttcagactttcctcagaagtcagagtcgatgtaccagagtcagttgctggccagccgaaaattctatggagagttcctggatcgccatatgagtgagctggccaaagcgtacagcgccgatatctataaggcgcaaatcgctatcttgaaacaaacgtctcaagagctggagaataaagcccggtcattggaagcagaagcccagcgagccgctgctgaggtggaggcggactacaaggccaggaaggcaaatgtcgagaaaaaagtgcagtccgagcttgaccaggctgggaatgctttgcctcaactgaccaatccaacgccagagcagtggcttgaacgcgctactcaactggcaggcgatcgccaataa

SEQ ID NO: 360375 - DNA, 603 bp, Pseudomonas aeruginosa
atgagattcggtattccaagtggtattccaagccatccactggtaatttttggaataccgaaaccgttcttggaataccccatgtgcgcccaagccacccgcctctcggacctcaaggtcaaagccgccaagcctcaagagaaggactatgtcctgagcgatggtgacggcctacagatgcgagtgagaagcaatggctccaaactctggaacttcaactaccggcacccggtgacgaagaaccggatcaacatgggcctcgggaccttccccgaagtttcattggcgcaagcccgcaagcgcactgttgaggcacgtgagctcctcgcccacggtatcgatcccaaagagaaacgggacgccgtgcagcaagccaagaaagcagcgactgaacacaccttccagaatgtggcgacgtcttggtatgagctgaaaaggatgcggttacacaagcctacgccgaggacatctggcgctccctcacgctgcacgtcttcccagacttgggcaccactccgatctccgccatcaacgctcccaaggtcatcaacctgctccggccacttgaaaccaagggcagcctggaaaccgttaaacggctga

SEQ ID NO: 360376 - DNA, 1005 bp, Pseudomonas aeruginosa; identical to SEQ ID NO: 330629

SEQ ID NO: 360377 - DNA, 987 bp, Pseudomonas aeruginosa; identical to SEQ ID NO: 349512

SEQ ID NO: 360378 - DNA, 3588 bp, Pseudomonas aeruginosa
gtgaccctggcggcggcggcgaacgaggagcacagcttcgccaccggcaagaaggtgactgcgaagaacgatcgggtggaacaccaatcgaccgtggtcagcgccggcggcgatctcagcgtgcagggcggcaatgacgtgaccttcgttgccagtcaggcgaaggccagcaacgaggcctatttgtacgccggcaacgacctcaatctgctggcggctcacgacgaaagctattcctactacgcgaagaagaaaaaaggctcgttcgggcgcagcagtagccggatgagcgagagcgaaaccagtaccgtggtgtcgtcgtcgatccaggcgggacaaggggcggaactggtcgctaagcgtgacgtcaacgtcgaggcctcttccgcctccagcatgaagggcgagctgacggtcgtggcggggcgcgacgtgaacctcacggcagctgcgaacagctactccagcgcgtccgcgaaatccaagtccggaggcctggggctgtcatccaccagcaaggccaacgcccagtcctcttcctacaccagcgttcagggcgctacgttgagcggcgataccaccgtggtgcaggcgagaaggaacatctcggtggccgccagcaatgtggtttctaccgggaagactgcgctgcgtgccggcaacgacatcatcatcgacagcgtggcggagacgtcggaatcgcatcgcagcgagtcgaagaagaagtccggcctgatgagttccggagggatcggcatcacgctcggcacggcgaagaatgcctcgacgcaggacacccgtaccgtcgtcaaccagggcagcaccatcggcagtgtgttcggcgatgtcgacatgcgggctggcaagaacctgtctatcacggcttcggatgtggtggccggcaaggacatcaacctcgtcgggcagaacgtgagcattctcgctgccgacaaccagaacgtcagcgagcagacccgcaagaccagcaagagcggcttgacgctggccttgtcgggaacggtcggtagcgcaatcgacgccacctaccagaatgccaagcaggccaggaacgaagacgacagtcgcctttccgcgttgcaggggatcaaggccggcttgagcggcgtccaggcctggcaggcagctcagcagaacggcggcatgacgggcgagaacagcgcgcagttcgtcggcatcagcgcttcgctgggctcacagaagtccagctctcggcagcgccaggagcagcagatcagtcagggaagcacgctcaccgccggtggcaacctgaacattatcgccacgggttccggggctgtcggcgaagacggcgacgtgcgcgtgcaaggcagcaagctgcaggctggcaaggacctccaactgatcgccaaccgcgacgtcgtgctggaagcagcggccaatacgcagaagctcgatggcaagaacaagagcagcggcggcgctgtcggggtaagcgtcggcgttggttcgggcgaggctggcatcagcattttcgccaacgccaacaagggcgccggcaaggaaatcggcaacggcaccacctggaccgaaaccaccctggacgcgggccagaaggccagcttggtcagcgggcgcgacaccacgctgaaaggggcgcaggtcaatggtgaaagcatcctggcgaaagtgggtcgtgaccttaccctgcaaagcctgcaggatcgcgattactacgattccaagcagaagaacgtcggtggtggggcgagtctggccatcgttggccagggtggcggcgccaacttgagtctcagccagagcaagctgcattcgaagtacgacagtgtgcaggagcagaccgggctgttcgccggcaagggcggcttccaggtggaggtgggcaagcacacgcagctggatggcagcgtgatcgccagcaccgccgaagccgagaagaatcgcctgagcacaggctccctgggctggagcgagatccgtaacaaggccgagtacaagagccaacttcagagtgtcagtgtcagcagcgccaacgatggcgccggtgctttcgtcagcaacatgcctagcggcatgctcattgcctacaaccacggcgatagtgccagcggtaccacgggttcggcgatatccgaaggcaccctggaggttcgtgatccggcgcgccagcaacaggatgtggcgacgctcagccgtgacccgagccgcgccaacgatagcgtcagtccgatcttcgacaaggagaaagagcagaagcgtctccagcaggtccaactgatcggcgagatcggcacccaggccatggatatcctgcggacgcagggccaactcgacgccgacaaggcggcgcgggccgaactggaagcgcggggtatttccgcgccgggcgccggcgccagcgagcggcaagtcgaggactaccgcaaagcgcttctgggcacgaatgcctaccaggacatcatgggcaagtacggcaccggaggcgactaccagaaggccgcccaggcggtgaccgcagccttgcaagggctggccggcggcaacattggctcggcgttggcgggagcttcctcgccctatgtggcgggcgtgatcaagcaagtggcaggcgacaatgacacggcgcggatcatggcccacgcggttcttggcgcggtggttgcgcaggcccagggcaattcggctgctgcggggggtgcaggagcggcggggagcgaactggcggcgcaggtgatcagcgagcgactgtacggaacccgtgatagcgcgacgctgaacgaagcgcagaagcagaccatcaccgcgctggccagcctggccggcggattggcaggctccgttgtcgatgggagcagcggaggagccattgccggggccgcaggcgggaagaatgcaacggaaaacaacttccttggcggcggaactccgccgggcttgatcagctacggtcaagcagcgagttccttgaccgagtacatgcgcaagaacggcgcgacagccgaggagatcacccaggcgcaacgtgatctggcccagggacagggcttcgatggcgtacagccagcgaatgagttcatcaaggcctggggcgaggccatggttgcggaagctgccggccttgggattgttgcggggttgggtagatttgggttgtggggtgcaaagggagcgactcctgttgtaactgctgaggggcgaatcggtaactcagtatttacggatgttaaccagacggctagaccagcagcccaggcgaatcccaaccaaccgaccttgattgccgatcgagtggacgcaaagatagcggctaaggggacgcctcacccgaatgggaatatggcggatgctcatgcagagattggcgttattcagaaggcatttaatgaaggtaaaacggtaggctccgatatgaccatgaacgtagtaggtaaggatgtttgtggatactgcagaggtgatattgctgcggcagctagcaagtctggtttgaaatctttaactattcaagccaaggatgatattacaggtttgccgaagacgtattactgggaggtaggaatgaagtcaattagagagaaaaaaatatga

SEQ ID NO: 360379 - DNA, 192 bp, Pseudomonas aeruginosa
atggacctggtggaccagttgatcaagaccgacatcgacactgcacgatcgaacggcattacagcgaccccgaccctggtcatccgggacaaccagacaggaagaagcgtgaggctggagggaatggccgacgaaaccacgttgctatcggcgatagactggctggctcaaaatcgtaacgtcacccagtga

SEQ ID NO: 360380 - DNA, 390 bp, Pseudomonas aeruginosa
gtgcacgccggcgccctcggctgggtggcgatgatctccatcggctcgctctaccacctgatcccgaaagtcttcggtcgcccgcagatgcacagcatcggcctgatcaacgcgcacttctggctggccaccatcggcaccgtgctgtacatcgcctcgatgtgggtcaacggcatcacccagggcctgatgtggcgcgcggtcaacgaggacggcaccctgacctactccttcgttgaagcactggtcgcaagccacccgggcttcatcgtgcgcatgatcggcggtggtttcttcctcaccggcatgctgctgatggcctacaacacctggcgcaccgtgcgtgctgccaagccggccgaatacgaagccgccgcgcagatcgcctga

SEQ ID NO: 360381 - DNA, 702 bp, Pseudomonas aeruginosa; identical to SEQ ID NO: 347428

SEQ ID NO: 360382 - DNA, 1140 bp, Pseudomonas aeruginosa
atgtttcaaaccgctcacgagcagccatttctgctcaacctctatggatgctgcaacggccgtacgccctggccgctgatactggaaaatctctgcacacagttccaatgcaagcacgccatggtgcaaaagctttcacccggtcggacgcgcctggcgggcggtgtatggctgagcagcgatgacaacgacaccgcccggtataatcggcatatttcagatttccaaaatcctcgcttagagcgcaagcgcctgggtgaacgagcagttggcaagatcgttgtcgacgagcagttgttcgatcctcacgagcaggctgaaaaacagttattcctcgacaaactctccaacttgggcgtgcagagctttatgggtggactcgccccactggataacgaagacgcctatctcggtattgccctgcatcgatcagctcaggacaaacgccttttcacaccagccgagcaggcgcaactccagattctgttgccgcatattggacaagcgttccggatgtgggagcaactcaatactccctcgcctctcgaggcgatcctcaaggcccaggccgatcacttcccgttcggcatcgccatctgtgatgccagggctcgcctgcgctggatgaacgttacggcggagaaactgctaccgcagacacatggcatgagccctctaagccctgtgctgaggggctggagcattcagcagaccgaaaacctgcaacgactggttgccggcctcaagcccgacagtgccactggctacatcacgctgagaaacggcacgggcacggacgtccatatcgcgctcaaacctttccaggaatccgcctcaggcgaaacctactcgctactgattctgtcatcgaccaacatggtcaacgacattcctctcgaggcactgcagacactgttcggcctgactctggccgaggcccgcctgaccggccacctcgctagcggcggaagcctcgaaacgtatgcgcagcagcagggcatcgcggtaacgacggtacgctggcatgtcaaacagatcctctccaaaacggaatcaggcaggcaggccgagctcgtccagaagattctctgctcggtggcttacctgacgtcccggagctcggggatgttgccgctttga

SEQ ID NO: 360383 - DNA, 1380 bp, Pseudomonas aeruginosa
atgagcaaaatggctattgttggtgcaactctcatcgatggcacaggcgcccagccgatccccaacgccgttatcgtatttgaaggaaacacgatcatttcagtcggctccgggcatgtcgacaccttgccggacgacgtacagattatcgacgcaagcggaaagtacgtcattccgggcatcgttaacgccaatgttcacttgatcgatggcttcgccatcatgctgggcaacgggctcgaatacctggcccgtttcgagggccgctaccatgaggtcatcgaagagtccgcccagatcgcactgcgcagcggcatgacaaccgtattcgatacctggaatgcccatggcccggtgctctatgctcgggaccgcatcgcttcgggccaggtgccgggctcccgtgtttacgccgccggcaacatcgtcggtatggggggaccgttcagcgccgacttcagcaaggaaagccgcaatgtcatgacccggactttcgccgatcggatcgacaccttgttcgaggctggcgtcggacgacgcctcgcagccctgccgccggaagaggttcgcgcgatcattcgtgactacctcgattcaggcatcgatttcctgaaattcgccatcagcgaccacatcatgagcgaggcgatgaatccacatctcaccttctccgagcgcgtgcagcgcatcatcgcagaagaaacccgcgcagcaggcaagccactggtgtcacataccacctctattgaaagcctcaacaatgccgtggaactgggggtggatgcgatgatgcattgcaccctgacggcgcaagtcgtcatccccgatgacatcatcgagaagatgatcaaaaagtccgtgtggggtgagattcaacccgtgacgaacgagtatcagcgcatcatggaagcagaaggtcagttcatggcgggctacgccggcggcgctcatcgggagagcacgattcggctgatcaaggccggcgcgccgattctcatgggcactgacgcaggctgcaccgaccctgacaacctgtgcgaccacccccatcaccatttgcctgaccggccagtgacgctgggcaacgaccatttcctgtggcatcgctccatgcaccagttgggcatgaagccgatggacatcctcatggcctccacgctcaatgttgccaaggcgtatcacaagcaggacgtgatcggcagcatcgaggtcggaaaatgggcggatatactgattctcggcggcaacccgctggaagacatcgaaaatttccagtccattgataccatcatccaggctggtaagatcattgaccgtgacacactaccggttaagaaggtggtcactcaatatcctcggatggaagcccaccaacactaa

SEQ ID NO: 360384 - DNA, 597 bp, Pseudomonas aeruginosa
gtggtgctggaaaagaccgcgcgtgagctgcgcggcataccctgcctggagctggacggcgaggcaccgccgaagcaagagatttgttgcagccggatgttcggcaagcgcctgcacgagctgccgccgatccgcgaagcggtggccacctatgccgcccgggccagcgagaagctgcgcggccagggctctgtgtgcaagagggtgcgggtgagcatccgcaccggcatgttcaacccggatgaacccaagttcgtccgcggtgtgctgtgcgagctgccgtacccgagcgacgatactcgactgatcacccaggccgccctagccgggctggaacagatctaccggaccggctacgccttcagcaaggccgaggtgctgctgctcgatctctgtcagcgcggcgaatacaccgacgacctgttcgtctcgacccagccggaggcctcccgccaggtgatggcggtgctggatgccgtgaacgcgaagtggggcagggggacgctgcggccgggcgtggtaccaccgacgccggggtggggtatgaagcgggagatgatgagtcggagttttacgacggatatagatgctctctga

SEQ ID NO: 360385 - DNA, 279 bp, Pseudomonas aeruginosa
atgacgacggtccatgagcgcacccgtagcgttgttcaaacacgggacttcctacaggaactggctagggacaccagcctccctgaaagcctacggtaccaagcaaaaaatctgctacggcattacccgacagcagaagccatctggttggctggtcgagtggaagagcgatccaagctggagctttccctattggccgacaagcatggacctctacatccggtgttagtcagctggctgttaaatgatccgatgttttctgatcacggagccagctga

SEQ ID NO: 360386 - DNA, 351 bp, Pseudomonas aeruginosa
atgaaatacctctgcctgatctatttcgacgaagcgaagctggccgccgtgccggccgaggagcttgccgccatcgtcgacgagtgcatgacctactccgaccagttgggcaaggccggccactacatcgcctcgcacgccctgcagtcggtgcaggccgccaccaccctgcgccaccagggcgggcggctggcgatgaccgacgggccgttcgccgagaccaaggagcaactcggcggcttctacctgatcgaggcgcgcgacctcaaccaggccctgcagatcgccgcgaagattccgccgggacggctcggctgcgtcgaggtgcgaccggtcaaggaatgggagtga

SEQ ID NO: 360387 - DNA, 153 bp, Pseudomonas aeruginosa
atgtgccccctgtgcatcgcatccctgtccctgctgtgcgccggtggcgcttcgctggccggcttcgccctggcgaccgggcgccggcgccgctggcggaacgaccccgggcaggctggaaaaccgagaatttccgtggagaatcggcaatga

SEQ ID NO: 360388 - DNA, 750 bp, Pseudomonas aeruginosa
atgaatccttctttgcaggaccacccggtgagcaaccgggaacaatggctggacgcccgtcgccgcctgctggcgcgggaaaagcaactcacccgcctgcgcgaccaggtcgccgccgaacgacgcgaactgccctgggtcagggtggacaaggactaccgcttccagggcgagcgcggtgagcgttcgctggccgagttgttcggcggcaatagccagctaatcgtctaccacttcatgttcgcgccgggctggagcgaaggctgcgtcggctgttcgttcctcgccgaccacatcgacggcgccaaccggcacctggcgcaccacgacgtcagcctggtggcggtatcgcgcgcgcccctggaagagttccaggcgttccgccggcgcatgggctggcgtttcgactggtactcctcgtacggcagcgatttcaaccgtgacttcggggtgtccttcgacaaggcgcaactggccgccggcagcgtcgactacaactaccagccgacccccgacgccggcgaggaaatgccgggtgccagcgtgttcctgcgcaatccggcgggcgaggtgttccacacctattcggcctatgcgcgcggcctcgacatcctgctcaccacctacaccttcctcggcctgacgcccaaggggcgcaacgaggacgcgatcatggactggctgcgtcaccacgaccgctacgacgaggcgccgaaaagcgcctgctgccacgcgcaggccagccattga

SEQ ID NO: 360389 - DNA, 1212 bp, Pseudomonas aeruginosa
atgccatcctcgccatcctccctcccctccgcgctggtgctgctgttcgccgtcgcctgcggtctcagcgtggccaacgtctattacgcccagccgctgctggacgttctcggtgccgagttcgccatcggccaggccggggtcggcctgctgttcggcgcgacccaggccggttgcgccctggcgctgctgctggtggtgccgctgggcgacctgctggagcggcgccggctgatgttcgtccagctcctgctgctggtgctgtcgctgctgctggtgggcttcgccggcgataccctcggcctggcgctggggctgctcggactgggcctgctcggcaccgccatgacccagggactgctggcctacgccgcggcgctggcggcgcctggcgagcgcgggcgggtggtcggcgcggcgcagggcggcgtggtgatcggcctgctgctggcgcgcagcctggccgggctgctcgccgacctcggcggctggcgcagcgtctacctggtctcggcagcgagcatgggcgggctcggcctgctgctctggcgggtactgccggcggcgccgagcaacgaactggggctgacctaccggcaactgctcggctcgatgttcggcctgctggcgagccagcgcgtgctacaggtgcgcggcctgctcgggctgttgatgttcgccgccttcggggtgttctggagcagcctggtattgctgctcggcgcgccgccgtattcgctgtcgcacagcgccatcggcgccttcggcctggtcggcgcgctcggcgcgctgggcgcggcgcgggccggcagcctggccgatcgcggccacgcccaggcgctcagcggcggcgccctgctgctgttgctgctgtcctggctgccgctcgccctcggcgcgcattcgctggcggcgctgattctcggcgtgctgctgctcgatctcgccggccaggcgatccatgtgctcaaccagagcctggtcttcgccatcgacccgcgcgcccacagccgcctggtgggttgctacatgctgttctacgccgccggcagcggcctcggcgccagcgccggcaccgccatgtacgcctgggccggctgggacgcggtgagcctgctcggcgcggcgatcagcctggcggccctggcgttctggtggttcacccgtggcgttggcggcgaagcgcgtacggcctgcgccaacggcgcctga

SEQ ID NO: 360390 - DNA, 414 bp, Pseudomonas aeruginosa
atgcaaatcgtcccctacctgatcttcaacggtaattgccgggaggccttcagctgctaccaccagcacctgggcggcaccctggaggccatgctgccgttcggcgccagccccgagtgcggcgacatcccggccgactggaaggacaagatcatgcacgcacggctggtggtcggcagcttcgccctgatggcctcggacaatcacccggcctatccctacgaaggcatcaagggctgttccatcagcctcaacgtcgacagcaaggccgaggccgagcgcctgttcaacgccctcgccgagggcggctcggtccagatgccgctgggcccgaccttctgggcggcgagcttcggcatgttcaccgaccgcttcggcgtggcctggatggtcaactgcgagcaggaccggtag

SEQ ID NO: 360391 - DNA, 426 bp, Pseudomonas aeruginosa
atgagattcatggtgatcgtcaaggccacccaggcttccgaagccggcgagatgcccagcgaggaactgctcgcggcgatgggccgctataacgaggaactggtcaaggccggggtgatgctcgccggcgaagggctacagcccagcgccaagggcgcccgggtgcgtttctccggcaacgcgcggacggtgatcgacggccccttcgccgagacccgcgagctgatcgccggtttctggatgttccaggtggcctccctggaagaggccatcgagtgggtcaagcgatgcccgaacccattcgacggcgaatccgagatcgagatccgccaggtcttcgaggccgaggacttcggcgaggagttcaccccggaactgcgcgagcgcgaggagcgcctgcgcgccgagctggaaaaacgcaactga

SEQ ID NO: 360392 - DNA, 270 bp, Pseudomonas aeruginosa
atgccccgtatcgtcttcgccccggccatccagcggcacgtcgccatgcccgcgctggacgtcggcgccgccaccgttgccgccgccttgcaggcggccttcgcccgcgagccgcgcttgcgcggctacctgctcgacgaccagggcagtctgcgccggcatgtggcgctgttcgtcgatggcgtgcaggtccgcgatcgccggggattgggcgatccgctccaagacgatagcgagatctacgtggtgcaggcgctgagcggcggttga

SEQ ID NO: 360393 - DNA, 1107 bp, Pseudomonas aeruginosa
gtgagcgagcgactctatgtcggcacccgcaagggcctgttcgagctgcggcgcaacgcggcgggccagtggctgccgatggccagccacttcctcggcgagccgctgagcatgctcctcgccgacccgcgcgacggcgcgctctacgcggcgctgaatctcggccatttcggcgtcaagctgtggcgtcgcgacgccggcgcgacggactggaaggaatgcgcggtgccggtctatccgccgcagccgccagcggccgaaccgctggaaggccaggcggcggagccaccctggtcgctacagcagttgtggatcctcgagccaggcggcgccgaccggcccggcacgctgtgggccgggaccatccccggcggcctgttccgttccgacgaccgtggcgccagctggcgcctcaaccgcgaactctgggaacgacccgaacgcgcccagtggttcggcggcggctacgaccatcccggcatccattccatctgcgtcgacccacgcgacagtcgccacctcaccgtcgcggtgtcctgcggcggcgtctggcagagccacgacgacggccgcagctggacctgcaccaccagaggcatgcgcgccgactacatgccgccggagcagagcgaggaggcggcgatccaggacccgcaccgcctggtgcagtgccaggcgcgcccggagttcctctgggtgcagcaccacaacggcatcttccgttcccgcgacggcggcctgcattggcagggcgtggtcgccgagccgtccagcttcggcttcgccgtcgccgtgcatccgcggcagccggacacggcctggttcgtcccggcgaccaaggacgaatgccgcattcccagggacgcccgtttcgtggtcacccgcacccgcgacggtggccacagcttcgagaccctcgagcgcggcctgcccgatggcccggcctacgacctggtctaccgccacggcctggacatcgaccccagcggcgagcgcctggccatgggctcgaccaccggcggcctgtggctcagcgagaacggcggggaggactggcagcagctctccgccaacctgccgccgatctactgcgtgcgcttcgcctga

SEQ ID NO: 360394 - DNA, 477 bp, Pseudomonas aeruginosa
atgagcctcgaatccgtccggcggttcttcgccgagaaagccccggacctgcgcatcatcgagctggaaaccagcaccgccaccgtcgccctggccgccgaggcccatggcgtggagccggggcggatcgccaagaccctgtcgctgcgggtcggcgagcgcaccgttctggtagtggcgcgcggcgacgcgcggctggacaaccgcaagatcaaggccgccttcggcggcaaggcgaagatgctcggcgccgaggacgtggtcgagctgaccgggcacccggtcggcggagtctgcccgttcggcctggcgacgccgctggcggtgtactgcgacgtctcgctgcaagccttcgacgaagtgcttccggccgccggggcggtgcacagcgcggtccgcatcgccccgcaacggatggccgagctggtggatgcgcagtgggtcgatgtgtgccaggaagtcctccaggaagcctga

SEQ ID NO: 360395 - DNA, 399 bp, Pseudomonas aeruginosa
atgagcgcacgcgtacgacccttcctgatgttccagggggtccaggccgaggcggccatgaacttctacctgtcgctgttcgacgacgccgagatcctccagatccagcgctacggcgccgaggggccgggcccggagggctcggtgctgaaggcgctgttccgcctcggcgaccagagcgtgcattgcatcgacagccatgtgcggcacgccttcgatttcaccccggcgttctccttcttcgtcgactgcgagagcaacgcgcagatcgagcgcctggccgaggccctgagcgacggcggcaaggccctgatgccgctcggcgactacggcttcagccagcgtttcgcctggctggccgaccgcttcggggtgtcctggcagctcaatctggcctga

SEQ ID NO: 360396 - DNA, 600 bp, Pseudomonas aeruginosa
atgtgcactataatgcgcaaaaccgcgacagtgagcaatatattgcccaaccctaccgaacgccccagcgtcctcgaacatgtctccggcaacgtccgccgcctgcgcctgcaagccggcctcagccaggaagcgctggcccgcgcggccagtgtcagccggcggatgctggtgggcatcgagagcggcgacgtcaatgtcagcctgtcgaccctcgaccgtatcgccgccgccctcggcgtgctgttccccgacctggtccaggcaccggccaccgaccgctcgcggatcaatgcggtggcctgggtcggccaccaccccgagagccgcgccaccctcctcgccagcgcaccggcgcggcgcgaggtggaactctgggcctggtcgctgggaccgggcgagcgctacgtatcggaacccgacgccgccggctggcgggagatggttctggtcatcgaaggtcgcctgcgcctggaactggccgacggcgaacggcgcatcgaggccggcgacttccatgccttcgccagcgaccagccgtacgcctacgtcaacgacggcgacgaggtggtgcgtttcacccgcaacgtggtgagctag

SEQ ID NO: 360397 - DNA, 894 bp, Pseudomonas aeruginosa
atgacctccacctcccgcggcctcgccggaacgctgttgccggtcggcctgctattgatcgccatggcctcgatccagagcggcgcctccctggcgaaaagcatgttccccctggtcggcgcccagggcaccacggccctaaggctgttcttcgccgcgctgatcctgctgctgctcctgcgtccttggcgcaagcgcctgagcctgcaatcgctgcgctcggtggtggtctacggcatcgccctgggcggcatgaacctgctgttctatctctcggtgcgcaccgtgccgctgggcatcgcggtggccctggagttcaccgggccgctgctggtggcgatcctctcctcgcggcgcctgctggacttcctctggatcggcctggcggtgttcggcatctggctgttgctgccgctgggcaacagcgccgagccgctcgacctggtcggcgccgcctatgccctcggtgccggcgtgtgctgggcgctgtacatcctcttcggccagcgcgccggcgccgaccatggcgcccagggcgccgcgctgggggtgctggtggcggcgatcctggttgtgccgatcggcgtcgcccacgccggcgccgacctcctcgacccggcgctgatcccgttggcgctgggcgtcgcggtgctctccacggccttgccctacaccctggaaatggtcgcgctgacccgcctgccggcgcgcaccttcggcaccctgatgagcatcgagccggccttcggcgcgctctccgggctgctgttcctcggcgagcggctgagcccgacccaatggctggccatcggcgcgatcatcctcgcctcggtcggcactaccctcagcgtcaagtcgcgtggcgccgccccggcgctaccggccaaggactga

SEQ ID NO: 360398 - DNA, 1434 bp, Pseudomonas aeruginosa
gtgaacagccccgccctgcccctttcccgtggcttgcgcatccgcgccgaactcaaggaactgctgaccctcgccgcgccgatcatgatcgcgcaactggcgaccaccgccatgggcttcgtcgatgcggtgatggccgggcgcgccagtccgcacgacctggcagcggtggcgctgggcaactcgatctggatcccgatgttcctgctgatgaccggcaccctgctcgccaccacggccaaggtcgcccagcgccatggcgccggcgaccagcccggcaccgggccgctggtgcgccaggcgctgtggctggcgctgctgatcggaccgctgtcgggggcggtgctgtggtggttgtcggagccgatcctcggcttgatgaaagtgcgcccggaactgatcgggccgagcctgctgtacctcaagggcatcgccctgggcttcccggcggcggcgctgtaccacgtactgcgctgctacaccaacggcctgggacggacccggccgagcatggtgctggggatcggcgggctgctgctgaacatcccgatcaactacgcgctgatctacggccacttcggcatgccgaagatgggtggccccggctgcggctgggccaccggctcggtgatgtggttcatgttcctcggcatgctgttctgggtgaacaaggcctcgatctaccgcgccagccagttgttctcgcgctgggagtggccggatcgcgcgaccatcggcccgctggtggcggtcggcctgccgatcggcatcgcggtgttcgccgagtcgagcatcttctcggtgatcgccctgctgatcggcgggctcgacgagaacgtggtggccggccaccagatcgccctgaacttcagcgcgctggtgttcatgattccctattcgctggggatggcggtgaccgtgcgggtcggccacaacctcggcgccggcctgccgcgcgacgcgcgcttcgccgccggcgtggggatggccgcggcgctgggctacgcctgcgtctcggcgagcctgatgttgttgctgcgcgagcagatcgccgcgatgtattcgccggacccggcggtgatcgccatcgccgcctcgctgatcgtgttctccgcgctgttccagttctccgacgccctgcaggtcaccgccgccggggccctgcgcggctaccaggacacccgggtgacgatgatcatgaccctgttcgcctactggggcatcggcctgccggtgggctacagcctcggcctcaccgactggttccaggaacccaccggaccgcgcggcctgtggcaaggcctggtggtgggcctgaccggcgcggcgatcatgctctgcatccgcctggcgcgcagcgcgcggcgcttcatccgccagcacgagcgcctgcagcgggaggacgcggaggccgcctcagtccttggccggtag

SEQ ID NO: 360399 - DNA, 321 bp, Pseudomonas aeruginosa
atggctaaggccgatgatacgtcgaatcccgcaataaccgcacagtccccttccaccttcatccccctgcgacgcacctcgcaatgcaaccagcatcccggctgcgccaccctctacctagactgcagcgcagccagcgaagatctgttcgacaccgcccgcacccgtctggagtcggcgatcggaacgctgagcgtcctcgacctgctcgacgaaaccgaagaccggcgaaagcaccgccgcatcaccggctccttgctgtcgttgctcagcgacgccctgtcgctgttcgaggcggaatacgcacgcagacaccgataa

SEQ ID NO: 360400 - DNA, 2442 bp, Pseudomonas aeruginosa
gtgcatttttccctccgcagtcgccacctgcgtccttcattgctcgccagcagcctgctcctggcggtgtcggcccagggccaggaaaagctcgacgtggatctgcccgccgcgccgctcggccaggcgatcaacgccctcgcgcaacaatcctcggtacagatccttttcgccggcgatctcggcgccggccgccaggcgcccgcgctgaaggggcgtttcacccccgaagaggcattgcgccagttgctcagggatagcggcctgaacgcgcaggccagggacgaacataccttcatcgtcgttccggccagcgaagccgccgtgcccgctacgcaagcccgtagcgaaccgctggacatggagcagatggaaatcaccgcctcgcgcaccagcagcgacctggtctccgccacgcgccagtccaccgtcatcgagcatgcccagctggaagagctgcgccagggctccgacagcctggccaccgtgctggccaaggcggtgccggggatgtccgattccagtcgcaccatcaccgaatacggccagaccctgcgcgggcgcagcatgctggtgatggtcgatggcgtgccgctgaacaccaaccgcgactcctcgcgcaacctggccaacatcgacccggcgctgatcgagcggatcgaggtcatccgtggcagcagcgccatctacggcagcggcgccaccggcgggatcatctccatcaccacccgtccggccggcggcgagaaccgcgcggaaacccgcctcagcgccacctcgccgctgacccggctgggcagcgatggcctcggcggccagttccagcaatacttcgccggctccctgggggcgctcgactattcgttcgacttcggcacccgtcacgtcggcgcttcctacgacgcccatggcgaccgcatcgccccggaacccagccagggcgacctgttcgactcgaacgtctacaacatcggcggcaagctcggcctgcgcatcgacgagaaccagcgcgtgcagctcgccctcagccactacgacgcccgccaggacaccgactacgccaccgacccgagggtcgccaggctgccgccgggctcggtcccggccaacgcgatcaaaggcctggagctggacgagcagaaccgcatccgcaacaccctggcgaacctcgagtacgagaacctcgacatcctcggcagccggctctccgcgcagctctactaccgcgactatttcacccgcttcactccgttcgacgcccgcgccgtctccacccgcggcggcaatgtcgaccagatcatgcagaacagcgaagtgttcggcagccgcctgaccctgcgcacgccgctgggcgaaagcggcaataccgaactggtctggggcggcgactacaaccaggaacgcagcgacatgccgctcgacgtgttcgacccggcggcctacgacgccagcggcgggctggtcttcgacaagatcggcaagctcacctacatgccgccgctacgcacccgcagcgccggcgcgttcgcccagttgcagcatcgcttcgacgaacactggtcgatcgacggcggcctgcgctacgaatactccaccgccgaattcgacgacttcatcccgctctccgagtccaaggccgcctcgccggtgaccgtcaagggcggcgacctcgactacgacgcggtgctgtcgaacctcggcatcgtctattcgccggtggctggccaggaaatctatgcctccttcagccagggcttccagctgcccgacgtcggcatccagctgcgcaacgcccgccgtggcttcgatatcggctcctcgaacctcgaaccggtgaagaccaacaactacgaactcggctggcgtggcgccatcggcggcaacaccctgggcagcctggcgctgttctacaccacctccaagctgggcgacgtgcagagcttcaacaacggcctgatcctcacccgcaccaaggagcgcatccacggcgtcgaggccagcgccgactggctcagcgacgacgaagtctggggcgcgggcggcagcgccacctggatgcgcggacgcgagaagccggacggcaaggactggcaggacatgaccggctaccgcgtgccgccgctgaagctgaccgcctacctgcaatacaagccggatgccgactggaacaaccgcctgcaggccaccttcttcgactccaaggactaccgtctcgacggcgtggaaagcttcggccggcgccaggtcagcacctacaccacggtcgacctggtcagccagtaccgcatcacccccgacgaccagttgagcctgggcatccagaacctgttcaaccgcgactactacccgctctacagccagttgctgcgcaacaacaacaacaccagccacctgccggcgccgggcacggtgctgacggcgagctatacacacaactggtga

SEQ ID NO: 360401 - DNA, 771 bp, Pseudomonas aeruginosa
atgagtttcgatccctttggtgacttcgaaacgactggctacctgcgcaacagcttgggtctgaaagatccggcggaagtgaaggaaaacgaacacttctccttcgaaatggggctcgatgaagccctttcctatctcgaacgcacaaagaacctgaactaccaggcccttttgcaggtacacaggttgttgttcgagaaattctacccctgggccgggcgtgaccgtctcgagctggtccctcatctttctgtctggaaaggtcccaagggcgctcccagacgtaccttcttcgaaagtcccgcgatgatcgaacgcgcggtggactatgccctgagcctggcgagcaagaagcagggattcatgcagaagcccggtgaggtcatgggacttctttgctttgcgcatccctttctagacggcaacggacgctcgattctgctgttctacatggagctcagttatcgagccggctttgccatcgactgggccagcacacgcaaggacgactatctccaggccctggacgatgagattcacaatcctggcaagggtcacctggaccgctaccttgtcccattcgttgtgcctatccacagccgtgatcagtggcctgagatcatcgggcaaatcaacggactcgatggtatggatggtgagaacattacctacgaaaacctcgatgatcccgaggttcagaaagtctatgcggcgtatcacgccgagcatccctacccagccaaagatggcacacccgactccgaaccctaa

SEQ ID NO: 360402 - DNA, 261 bp, Pseudomonas aeruginosa
atgaaaaagagcaaaggcttagtcgcaaccgaaattcagagacttgcccaggccaatggcgttagcgcggagcgcgatggtctgagccggatggcgctcaccatcacgtgcctggccggcgactcggtatctctcgatagcgttgagcagatgctgatcaacctcaagcgcaaaggcgcactaagcaagtcccaggcgttcgatctccagcgccgctacgtcatcgagaagcgcaaggcgaaagagatacctggtggatga

SEQ ID NO: 360403 - DNA, 837 bp, Pseudomonas aeruginosa
atgccggtttcgttacccttcgagcaagtcgatgtcttctccgaacagcccttcaaaggcaacgccgttgccgtggtgattggcgccgaccgcctgagcagccggcagatgctcgagttcgccgcctggacccagttgagcgagacgaccttcctgctgcggccgaccgttgccgaagccgactatcgcgtgaggatcttcaccccgctgcgggagttgccctttgccgggcatccgacgctggggagctgccaggtctggctgaaccaggggggcggcaatgctgctgacgagatcgtccaggagtgtctggcgggcctgatccgcatccgccgcaagggcgccttgctgtcgttcgcggcgcctcccctgcttcgtggcggagcggtcgaagacgaggtgttgcgacggatcgagagcgggcttggcctgtccccggggcaggtactcggcagccaatgggtggacaacggacccggctgggtcgccgttcggctggccacgcgtgacgaggtcctggccatccgcccggactacgcgaagctcgacgggctcaacgtgggcgtggtcgcgccttggcaaggtccccaggcggaggcggatgtggaagtgcgcgccttcatgggcgaggaactcaatgaagaccccgttaccggcagcctcaacgcgagcctggcgcaatggctgatcggcacgggagtcatgcccgggcgctacacggcgagccagggcacggccttgggtcgccgggggcggataagcgtcgagcagatcggcggcgatatctggatcggcggcgaggtgcagccgggcatgtcagggcaggtcgtgttctga

SEQ ID NO: 360404 - DNA, 708 bp, Pseudomonas aeruginosa
atggaagagatcaagcccccacagatatctgtctccgatggctatacacgactcaagaaagacatcatccggggcgttttcgctgcgggtcagaagcttctgatgagtacgctgaaggatcgctattcgctcggggtggggcccttgcgggaagtcctgtcacaacttgtggcggaacatctagtcatcgcggtgaaccagaagggctaccgggtcgcgccgatgtcactcgaggaaatgaaggacatctatgacgcacgcgcgaacctggaggcaatgatcctcacactggcgatagagcgcggggatgattcatgggaagccctaatcctggcacgcgcccacactctctccaaggtcgtggaagtcaagacggccgagcagatgctggatatctgggacgcaaggcataaagcgtttcatagtgcgatagtctcgggctgcgcctccaaacatctcctccagctacgctcacagttgctcgaccaggccgagcgctatcgtcacttgtggctcaaatccacagtgttttcggaagaagcgctgaacctgaagcgcaaggaacatgccttgctggtggagacgatcatggcacgcgacgcgttcaaagcaagtcagatgatgcgcgagcacctactgaccccggtaccgatcatttctcagatcatgttggccgcgacacctgagaatgaggctatgcaggaatga

SEQ ID NO: 360405 - DNA, 987 bp, Pseudomonas aeruginosa
atgaacgccttctctcaaataaaagctccggtcatgcaacagccagaagagttcgtgggattctccgttacgccatccaggcaatcggatcggttgttggagctcaagtttccgaaatcgaccgtagacgcattcctgggccaggtggcagagctgccggtacaagcgctggagtacaagtcgttcctgcgcttccagttcggcaagattctggacggcatctgcaagggttcgttgcgcgcagtgctggtgaatacgttgatggatcgcgcgacgggaggcttcctaatcacaccggaaggactgaactcggttgcccaggccgaagagatggtcaagttctctactgctatcgctcaccttcttgggcgttcgaattacgatgcgatgagtggccagttctacgcccgcttcgtggtcgagaacgtggataattcggacagctacctgcgtgcgccacaccgtgtgatggaactgcacaacgatgggacgttcgtgaatcagatcaccgactatgtcctgatgatgaaaatcgacgagcagaatatggagggcggaaattcgctgattctgcatctcgatgattgggcggacctggacaagttctacaagcacccgatggctcggcgcaccttgcgctggactgcgccacctagcaagaacgtgaaagaagatgtgtttcactcgatcttcgatactgatgccgagggcaggccgaccatgcgctatatcgaccaattcgtacagcccgagaatttcgaggaaggtatctggttgtatgagctgggtgagtccctggaaggcagcccacaaaaactatcgatcccagtgccggtaggctcgttgctgttgatcaacaatctgttctggctgcatggtcgcgatcgctttaccgctcatcctggcctgcgccgggaactgatgcgccagcgtgggtacttcagctacccgaagctgagtcaccatcacgggcaaaccaataattaa

SEQ ID NO: 360406 - DNA, 1200 bp, Pseudomonas aeruginosa
atgcagatggctgctgaatatcctgacgcaaagattctcttgctggagaaggagagcagccctgctcagcatcagactggtcataatagcggcgtcattcatgccggtgtgtattacgccccgggcagcttgaaggctaaattctgcctggcaggcaatcgagcaacgaaagagttttgtgacaagcacgatattcgttatgactcctgcgggaagatgctggtagccaccaatgatgtcgaaatggagcgaatgaaggcgctctgggtgcgtactgaggccaatggtattgagcgtgagtggctgtccgctgaggaattgcgtgagcgagagcctaatatcatcggtcttggcgggatcttcgtgccctccagcggaatagttaattatgctgaagtcacccggcggatggctgtcgagttcaccaaggcaggtggcaacattcgctacgattcggaggtgacagggattgacgaacgtgccgacgaagttgtggtaacgactacgagcggcgttttccaggcgcgctttctaatctcgtgctccgggctgatggccgaccgcatcgtgaggatgctcggagtcgagcctggcttcacaatctgtcctttccgaggcgagtactacctgcttccaaagcagcatgaccagatcgtcaaccatttaatttaccctatccccgatccatccatgccatttctgggggtgcacttgacgcggatgatcgacggcactgtcacggttggccctaatgccgtgctcgctatgaagcgagaggggtacaggaaaaccgatttatcgctggccgatctttggtccgacgttctgaccaatcccggggtattgaaggtgctgaaggcgaacttcaagccagggctgattgaaatgcggaactcgtttttcaaaggggggtacctcaagcaggtgcagaaatactgcccctcgatagagaagaaagatctgactccataccctgccggcgttcgtgcccaggcggtgtcgcgcgagggcaaactgatcgatgacttcctgttcgtgaacacgagcagaagtgtcaacgtttgcaatgctccctctcctgcggcgacttccgccattcctatcggtgcccacatcgtcgagaaggttaaggaacagattggcgctagggcattcttcgctgttgctaaaccagcgcacgccccgcaaataccggcgtaa

SEQ ID NO: 360407 - DNA, 705 bp, Pseudomonas aeruginosa
gtggccccggttcacgcgatgacactaaatgaccattttgacctgtcgctcagcgccgaagtcgtcagtgattaccgctcacgtggccaatctcagacactcggcgatcccgctctgcaggcctcggcgacgctctctcatagcagcggcctgtatgcgggaatatggacatccaatgtagacttcggcttcgatgtaaagacccgccaggaaatcgattactacgccgggtacttctggcagattgaggatggcatcagcctcgatgtcggttatgccaaatacgcttacgagaaatccggaggcctgaactactcggaggtctacgcgattttcagcgcttacggcgtgaagttgggacatcagtattcagacaatttcggtaccggccaggaggactcctacagttggacctatctaggttatgagaccagcctgcccatggacagctctctcagcctgcgttacggccaagtggactacaaggatgacgtcctggtctctagctccggaaaagctcgctcgcgctacaacgagtgggaagcaagaatcagtaaggaattactgaacctcaagtggagtctggcctatatcgacaccgacagggtctccgaccgcgcgggatcagagcatgactggcgtataacgccatgctccgtgttgccttctgcttcgcttaacagcatcggcatcccgaattcctga

SEQ ID NO: 360408 - DNA, 1206 bp, Pseudomonas aeruginosa
atgaagaacttgcgtcaattcctaccggacaactggggactggtcttatctgcattcgcggctgcatatggcgtggggttgcttgccctgctcgcgctccccttcttgattagcgcgatcatgagcgatcttggtctcgacgctgctcaggccggtttccttatgtccgctgagttcatcttcaccatgctagcctctctcgtggtagctccagccatgggccgcgctccacgccgcactctcgcccttggtggcgctctggtcgtaatcggcgcaaacctggcttcggcctctatcagcgatgtctactggctgacagccgttcgctgtatcgccggaatcggcgccgggctgtgtctggcttgcggtaacgcttcggtatccagcgccaaggatccggacagagcagccggccatatgaacatcctgttcgtcggtctgatggccatcgtcatgatcgtgttcgccgacgccatgggccgcaacggtctgactggtctttactacgcgattgcagcgactaatgcgctaatgctgctgttgatcgtgttcatgccgcagaaagcgatcctgcacgccaacgcacctcacttccagcacggaaacaagcaccagaacctgttctcactggctgccgtgtgcatgatggccaccatgttcttcttctcgatgcgcgacaccatgggctgggcattcgtcgagcaggtcggggtcagtgtcggttacagcggtgaagaactaggcagtctgttctccttacaatcgctcatcggtctgctcgggccactggctgcggcgatgattggcaaacgttttggcatgagcacgccagtgatcatcggtatcctctccaccggtgccgtcagcctgggatatgtactgggtgaaagctccaaggagatgtacaccatctccgtcatgatgatttcaaccacatacttctatgccctggcctacctcaccgcgctggcggcgcagttagatagcgaaggccggattgccgccgcctcgggcgccttcctgaccctcggcatcgccgtaggccccgccttcaccggcttgctcgcggaaagcggtggcttcaccttggtcggctggggtattgccggggcagtcctgctgaccgtgcttaccgctcttgttccactggccgtcattcgtcaacagcacgccactgccgcgcctgcgaccagagccgctatctga

SEQ ID NO: 360409 - DNA, 759 bp, Pseudomonas aeruginosa
atgccagttccctttacccgtaccgaagccgacacgtgcgcggcaaatatcaatgcttcgatcggtaacgtattcgaccaattggccctcctcgccgatgaggtttcgaatatctggaaacataaagcggcactgggcaagaagcccacatctaaagacctttcctcactgaaaccgaaaatcgatgcccagcttttggctccccgctcctgcatccacggcactggcgtagtacttgagcctggcgaactcgaagatcgtgaaatgtatttggaatggttcaggctgggcacgggcggaaaagtcgttccgatgacactgaacttcaaccaacgcagcgagagtttctataactaccaagacaagccctggttctcccgccccagagctaccgggagcaatgtggtcgtaggcccctatgtcgatctctacggcgccgacacatacatcatgaccttttctctgccaatcctggtggatggccagttcatcggtattgccggggccgacatcgcgctgcatcacttcgaacgcattctgctggccagcctgatcaagatggaaaatgaagcgctcatcgtctccgaggaaggccgggtgattgccgccaacacagccaactggacggtcggtgacatggcaaaacataccatcacgcgccaagaggcagattgccaagtgctcgaactaggcgaagccgcagcccattggtcacttgtccggcgccccttcaaacgcaagatgcacagagcggcataa

SEQ ID NO: 360410 - DNA, 711 bp, Pseudomonas aeruginosa
atgaggctgcgccaggaaggccgaacagaagaagtcgctcgaagattgatcgaggttatcgacctaggcctctatgcggaaggcgaacaattaccgagtgaaaacgagcttgccatgcagtttggtgtggccacggtcaccttgcgtgaagcattagccttgctgcgtgagcgccgcgtgatcgaaacccgccgaggccgcaacggcggcagtttcatctgtgccgcagtcgaactaccagaaggacttctgcgtgaacgccttgcagagatgagcgccctggagctgcgcgacatgtgcgatgagcacagtgcgatctccggtgcagcagctcgcctggcagcaaagcgctccgccccggagcaccatgtaactcttcagcactatattgatgcattacccaccgccgcgacccgcaccgagcgtcgccgcgccgatgcccgtttccatatcgagattgccgttgctgcccagtccgtgcggttgacacatgcagaaatgagcctgcaagccgagatgggtgagctgctttggattcccggtgaaggctctatcacaacacaaatggctcaagcagagcatcaggctattgctgacgcaatcacagctggcgattcaaatcttgccggtgctctggctgaggcccacgtcgcgcgcagtattaagagacttatagatctaagattagattttttctctcaagcgacctga

SEQ ID NO: 360411 - DNA, 714 bp, Pseudomonas aeruginosa
atgaccgacaacatcacccaagcaaacgtcttgcgcgtcatttgtgcagacctaccagccccccctctgttctggaaggatgacaacggctatcgacacggttatgaatccgaccttgcacgtttgctcgcctccaccctgtcgctctcgacgacgttcgcttaccagaactgggcggacttctatcccgctctgcaggaggataaaggcgacttcattctctgcggccaaggcatttcggagctccgtaaaaccctcgccgacttcaccgagccctatgcagtatttgatgaagccgtgatgattcttcgtggaagtaacctacgaacccctggcgacctggtaggcaagaaagtcggagccatcgccagcagcctgaacatggccctggcagagacgttcaccggctgcataacagttcccttcggcggcgacagcgacgacgtcatgggcgacatggtcaaggcactgcgggcaggcgagatcgatgcttttgtcgatgatgatgtcgcactagttcccttggccgaggaggctgatctggagattggcttcactgtcgcgacccagaacaaatggggcattgcaatcaagaaaggcaatgagacctggctggccgaagttaacgaagcattggcaattatcaagaccaacggagcgctggagcagctttggcgcaagtggatgcccaccttgaattatcccttcgtatga

SEQ ID NO: 360412 - DNA, 1374 bp, Pseudomonas aeruginosa
atgactgcgctagacctgcacagagaaatcaataccagttcgaaggcatcccaggaactggttaaccgtatcaaacagtccggcgtcgagtacctgtactatcaggtagtcactctatcgggtcgtgttatcgccaaggtcgtcccggccaagcacctgctacgcaacctagaaaagggcgttcagtttcaccgcaccgcggtttccgacctgcaaacctctcgtgccggcgaactacttggcggcggggctcaggccgccgaattcaccgcgatcccggacatctcaagcttcaacgttttaccttgggacaagtcgatcggctcgtttttctgcagaatgtacgaacccgatcaccgcatgcaaaacggtggcgccccgctgaacacggatgcccggggtcatctgatccgcacccacgaggcattcattcaggaaaccggcttgcgtatgaagtcgggctgcgaacccgagatgacctggttcggcgataagctagaagttcaggtacgcccaggcgcgagcccggcttatcacatgggcaacctcgaattgatgcgcccgatctacaagcgcgtcatggagtatgcaattgcaatgggtctggacatgatcgaaggcgattatgaggatccaggccagttagaactgaactggatgttcgactcctgcgagctgaccgcagaccgactgatgacctaccgtttgatctgccgtcaggtcgccagcgaatttggcgtcaaggcgagcttcatgcccaaaccaagcaccggcagcatgggcaacggctgccaccacaacgtgagcctgtggaagggcgatcagaatgtgctggccgagccaggtcgccgtgaattgcacttgaccgaaattggcctgcacgccttgggtggcatgctttcccacgctccgggctccatgatgattatggcttcgaccgtcaactcttataagcgcttctgggacactggccagttcgctcctacccgcatcaactggggcatggacaacaagacatgcacggtacgcctgtcggcaaacggtcgcctggagtacaagcttcccgatgcaagcgtcaacccctacctgtcccacaccctgctgctcgctagcatgctcgacggcatccgcaacaagatcgacccgggcgcatccgagtccaaggatagctatgtcaacggcggcgagtcagtcggcatcccgctgactcttggcgatgccatcgcagctttcgagaaggacgaagtcgtccgttctgctttcccagaagaactctcgagcctctatcgcgacctgaaagccgatgagtgggcacgctcctgcggagtcgtgaccgattgggaacgcaaaatgtacctggactacctgccatga

SEQ ID NO: 360413 - DNA, 717 bp, Pseudomonas aeruginosa
atgaatcagaaaacaatcgggatctgcatcctagaaaatggacgcaccccggaagacttgatcgaagagttcggttcttaccctgagatgatagagaagtggcttagcccatttctgccagaagcgaaattcacctacatctccccggtacagggcgaaagcctgccagctccaggcgatttcgatggctacatactgaccggctccaaatacagtacttatgaacgcacgccttggatgatcgcgcttatcgcctttctccagcaggcgcgacaagagcatatccccctgttcggtatctgctttggccatcagatcatggcagacgcattcggtggagttaacgccaaattcgccaaaggctggggagttggcgcccagcgctatcaatacaactcgccagagttgccaacggctgtcgcctcattcgttttccaccaggatcaggtcaggaaactcccgcccgaagccaaacgcataggcggatcggcacactgcgagaacggcgttttcgagtactcctttcctgccatttcagttcaataccatccagaattctcggccggctacacccgcgcgctggctcagaagtttcgcggcattttgctacccgacagcgtgtcactcaccgcgctggagtccgtggactggattcccgtggactcggcccccatcgccacctgggtcgcccgctttttccgtacccatctggcgtga

SEQ ID NO: 360414 - DNA, 441 bp, Pseudomonas aeruginosa
atgaattttcacgtcctttacggcaccgaaacaggcaacgcagaaatggttgccgacgacatcgtcgacgtactccaaaacgatgtcagcatcgagagcacggacatgtccaaattttcgctgaccgatctgtcacccgaggttttctacttcgtggtgtgctcgacctatggcgacggagaactgccccattcggcgcaaccattcttcaccgcgttgaacgaaaccaagccagacctgacaggccttcggttcgcggttttcggactcggcgacaagttctacgaaacctacaacaagggaagcgagctgattgccaagaccctgaccgatctgggggccatccagatcggtgaacgcggtcttcatgacgccaccagcgggcagttgcctggcgacatcgccacgtcctgggccaaggaaattctgtcgcagatctga

SEQ ID NO: 360415 - DNA, 1299 bp, Pseudomonas aeruginosa
atgcactctcctactgtcgcggtgattggatcaggcccctctggctgctatatcgcgcaggccctgcgtcgcgaatggcccgaatcagaaattgccgtcttcgaccgcctacccgtcccctacgggctcgtgcgctacggcgtggcaccagaccatccgggcaccaaggcggtgaccaggcagttcgagcgcctgttcgaacgcgaaaacatcaagtttctgggcaacgtcgacatcggcgaagacatctcgcttcaggcactacgcgccgcgtacgacatcgtcgtggtggcgacagggctttgcggagacagaaaactcggcgtgaccggcgatactctatgcagcatctatggcgcggggcagatcacacgcttcctgaatgaccatcctgatgaactggatacggtgcctgccttcggcgctcaccccgtgatcgtcggtaacggcaacgtggcgatcgacgtgctgcggcttctggtcaaaaacgcggaggatttccatggctctgacatttctcaggaaaccctggctcacctcatagctaccccggccgaacacatccatatcgtaggtcgctccccggcagcgctggcgaaattcgacacagtgatgatcaaggaactcggcaagctcgaacatgtgcgctttgaactgagcggtgattgcgccatacctgccgacgcagatgccaccactcaagctaaggtcgaagcacttcaggcattggtcaaggccgatgagaaagctgcagcgcatacccggacagtgaccttccattttggctggtcgccagcctgggtagccggagtcgaccacgttgcggcactcggactgcgtgccaccagcgctccggagctacaacgaagcatttccgcgaccagcatcatcaccgctatcggttttgaagaacggaccggacaagacctctgccgtggtgacctggcctgcgccagcgccgatcttgccaatggttttcttgatgacgggctgtactgcactggttggttccgacgcggcccgaccggcaccattccggacaaccggtcagacgccaaacacgtcgccgaaaatattgtccaggcggtcaatagcggaacgctacagataggaaaacccggtctgccaggtataaccgatcaattgcaaaagcagatcgtcgcctacgaacagtggaagctcattgacctggccgaggttgcaaatgcgccagctggccgggttcgtcgcaagttccgcaacaccattgacatgttgggcgcagcccaagtccgccacgctggagaacaaataaaatga

SEQ ID NO: 360416 - DNA, 1215 bp, Pseudomonas aeruginosa
atgtcttccagttcccccaccacgcttgaagccgcgccatatctcgatgtggccaacccttcgttctccattcgctcgaaagaggttctcgaagccagagcgcaaagctggttcgcacggacgccttacggcattgcagttttgcgttatgacgaagtgaacgcactgatccgagaccagcgcctgcgccaaggcagctatgcgtggccagcgcataacaaggcaaccggcagcttcgccgactggtggattcgcatgttgctgagccgtgaaggggccgatcattcacgcctacgccggcttgcaaacccggcatttgcgccaaaactcgtgaaaaagctgaccccggtcttccaggaaatggcgaacgagatcatcgatggcttcgcaaaaaacggtacctgcgaatttgtcgcggacttttccgagccctacgccacccaggtgatttgcgccctgctcaacctgccgcgcagtgaatggcgaggactcgcagaacttgctgtagacatgggcctagcgcttggcgtgaccttcaagcaggacgaaacgaagatcaacgccgccaccgacaagctgttcggctacgccaaaatggcggtggacgccctaaaacagaacggcctgggcgatgacttcctcagcatgctggtcaaggccaatgaggaagacaaggccgcgctgagcgatcaggagctgtacgacatgatcgtcctggcgatcttcggcggcatcgataccacccgcaaccagatcgctcttgcaatggacatgttcgtccagtaccccgagcagtggaagctgctgggcgatgaccccgagctcgcacgcgcggcggtagaggaagtcatgcgtgttcgaccgacagtgacctgggtgacgcgcgaagcactcgtcgacttcaactaccaaggactcgatatccccaaaggcaccaccgtgcacctgttcagccaggccgccggcaccgacccgagcgttttcgagaacccagacttcgacatcacggcaaaacgccaggtgcatttcggctttggtgccggggctcaccactgcatcggccacttcatcgcccgcggtgacatgacggaggcgctggcactgctcgcaaaacgcatcaagaacccccgttttaacggcgaagttcagtggctgccagatagcggcaacaccggccccattgcaatgccactgacattcgatcccgaggtgtaa

SEQ ID NO: 360417 - DNA, 681 bp, Pseudomonas aeruginosa
atgaaaacgacacgtgccatcgcaatcattcattcggctaccgacgttcctgggagcttgcccgaactgttctccgaacacggtatagagctacaggtcatccctgtcgggcaagacctgcctgctcctgaaagtattgatatcgccgttgtgatggggagcccggagtctgcttatgaccatcgtttaccgtggatcgaaaacgagctggcatggctgaaggcgctccagcataggggcgtgcctacatggggtatctgctttggcagtcagatcctcgcgcgagcgcttggtgggcaggtctaccgaaacaaggctgccgaaatcggctggacggagttgcagacgctggagagtaactggtctcacaaggggccgtggctcaactttcatttcgatgccttcgcacccccgccaggcgccaccctgctcgcgcaaaccgacctcgctcctcaagcgtatcgtcaggggcgttcgatgggggttcagttccatccggagattgacacggcgatgtttgatacctggacggactactggagcaacaccgaggaaggccggcgctttctcgcgtccgcaggcgatttgcccgagcgtatgagggccgagattcagcagcgcgaagcggggaatagggagaactgccggctgctgctccgcgattttctggcaggggtctga

SEQ ID NO: 360418 - DNA, 1494 bp, Pseudomonas aeruginosa
atgcaaaagttaaccttgagcgattgggtgacccaatcggcacagcttgagattgagggccgtgccttcgtaaacggagtctatgtcgatgcgctagacggccaggtattcgagtgcctgagtcctatcgatgggcgttttctggccagcatcgccaactgcgaggccgccgatgcagaccgtgcggtcaaagttgcccgcgatacctttgactccggcgtatggtctcggctatctccggcctctcgcaaagaggcgatgctgcgatttgctgacttgcttgagcagcatgcgcaccagctcgccttgttggaaaccctagatatgggtaagccaatctccgattcgctcggggtggatattccctgcgcagcgtccgctattcgctggagtggcgaggcgatcgacaaaatttacgatgaggttgctgcgactcctcacgaccaactgggacttgtgacccgggagcccgtcggcgtggtcgcagcgatcgtcccctggaattttccgctgatgatggcgtgctggaagctcggcccggcgttggctaccggaaactcggtcattctcaagccgtccgagaagtcgccgctgacggcgattcgtattgcccagctcgcgattgatgcggggattcccgcgggtgtcctgaacgtcctcccggggtttggtcataccgtgggcaaggccctggcgttgcatatggacgtggatacgatcgtgttcactggttctaccaaaatcgccaagcaactcatgatctacgcgggcgagtccaacatgaagcgtgtgtggctcgaagctggtggcaagagccctaacatcgtgtttgccgacgccgcggatttgcaggcagcggctgagtcctccgctagcgccatcgcctttaaccagggcgaagtgtgtaccgccggctcgcgcctgctcgtggagcgctcaatcaaggacaaattcctgcctctgctcatcgaggcattcaagggctggaaaccgggcaatcccctggatcctgcaaccaatgtcggcgctttggtcgatcgacagcagatgaacaatgtcttgtcgtatatcgaggcgggccatgccgacggcgccaagctacttgtcggcggtaaacaggtgcttgaggaaacgggcggtacctatgttcagccgaccattttcgatggcgtgagcaatgccatgaagatcgcccaggaagaaatcttcggcccggtgctgtcggtaatcaccttcgattcagtcgatgaagccattgcgatcgcaaacgactccccatacggcctggccgctgcggtctggactgctgacctttccaaggcacacctcgcggccaaggctctgcgcgcagggagcgtctggatcaaccagtatgacggcggcgacatgactgcaccgttcgggggcttcaagcaatcgggcaatgggcgggataagtcgctgcacgcattcgacaagtacaccgaactcaaagcgacctggatcaagctgtga

SEQ ID NO: 360419 - DNA, 1443 bp, Pseudomonas aeruginosa
atgcttattaaaaatccctctctctttcgtcagcaggcattcatcgatggcgtctggctcgatgctgacagcaagaaagtgatcagtgtcagtaacccggcaaccggcgagacgatcggcacggttcctcgtatgggcgtggatgaaacgcgacgtgccattgaggctgctaacaaggcgctacccgcatggagtgcgctcaccgccaaggagcgaggcagcaaactgcggcgctggttcgagttaatgatggcgaaccaggaggatctggcggttttgatgacctccgagcaaggtaagccactggccgagtcgcgtggcgagattgcctatgcggcgtcgttcatcgagtggttcgccgaggaagggaaacgcatctatggcgatgtgatcccgggccaccaacccgataaacgcctgttggttctaaagcagccgatcggtgtgacggcggcgatcacgccctggaattttccggcggcgatgattacccgcaaggccggcccggccctcgctgccggctgcacgatggtgatcaagcctgcttcgcagacgccgttttcggcattggccatggttgccctggcgcaagaggcgggtattcccaacggcgtcctgagcgtcgtgaccggcagcgcgggggaggtcggcggcgaactgactgctaacccgctggtgcgcaaactgtctttcaccggttctaccgagattggccggcaactgatgtcagagtgcgccaaggacatcaagaaggtgtcgcttgagctgggcggcaatgcccccttcatcgtcttcgaggacgccgatctcgatgccgcggtcgatggggcactagcctcgaagtatcggaacgccggccagacctgcgtatgcgcgaaccgtctgtatgttcacgatgcggtctacgacgcgttcgtcgaaaaactcaaggtggcggtaggcaagttgaaaatcggcaacggactggagcagggcatcaccaccggccctctgatcgatgataaggctgtggccaagatcgaagagcacatcgccgatgcggtgtcgctcggcgcgaggattgttgccggtggctccagcctgggcggtctgttcttcgaaccgacgattctggttgacgtgccgaagcacgcgaaggtggccaaggaggaaaccttcgggccgttggctcctattttccgtttcactgatgaattcgacgtgatcgcccaagccaacgataccgagtttggccttgccgcgtatttctatgcgcgtgatctgagtcgtgtcttccgtgttggcgaggcgcttgagtacggcatcgtgggtatcaacaccgggatcatctccaacgaggttgcgccattcggcgggatcaaggcttccggcatcggccgtgaaggatcgaagtacggcatcgaggactacttggaaatcaagtacctctgcctcggcatttga

SEQ ID NO: 360420 - DNA, 1281 bp, Pseudomonas aeruginosa
atgagcgataccaacgaatccctgcaacagcgtcgcgtcgatgccattccgcgcggtgtcggacagatccataccatctttgccgagcgcgcggaaaacagcaccgtgtgggacgtggaagggcgcgagttcctggatttcgccggtggcattgcagtgctcaataccgggcaccttcatcccaaagtcgtcgctgccgtccaagagcagctcaccaagctgtcccacacatgctttcatgtgtttggctacaagccttacgtggagctgagcgaaaggctgaacaagctggtacctggcgacttcccgaaaaaaacgctgttggtcacgaccggagccgaggctgtcgagaatgcgctgaagatcgcgcgagcggcgactgggcgtgcaggggtcatcgccttcaccggtgcttatcatggccgtaccatgatgaccttgtcgctgactggcaaggtagccccgtattctgcaggcatgggcctgatgcctggccatgtgtatcgcgctcagtacccgaatgcctcgcacggtgtctctgttgacgacgcgataaacagcatcgagcggatcttcaagaatgacgctgctccctcggacattgcagcaatcattctggagcctgtacagggtgaagggggcttccacgtcgcccccaaggatttcatgttgcgtctgcgcgccctgtgcgatcagcacggcattaagctgattgccgatgaggtgcaaacgggcgctggccgtaccggcacattcttcgcgatggaacagatgggggtcgcggctgacctcaccacctttgccaagtccattgccggtggttttccgctggcgggagtgaccggccgtgccgagatcatggacagcgtcgcgccaggtggcctgggcggtacctatgccggtagcccgatctcatgcgctgccgcactcgcggttctggacatcttcgaagaagaaaacctgctcgatcgggccaagtcggtcggcgagattctagtctcgggtctcaagagcatccagacccgtcaccgcagcatcgctgaaattcgtgcactgggctcgatgatcgctgtagagctgtgtgaacagggtgacgtgcataaacccgcggcggtactggtaggccagatcgtggcccgggcgcgtgagaagaatctgatcctgctgtcgtgtgggacttatgggaacgttttgcgcattctcgtccccctcacggcttcggatgccagcctgcagcgaggtttggagatcatcggcgaatgcttcgacgaactggcgtaa

SEQ ID NO: 360421 - DNA, 1383 bp, Pseudomonas aeruginosa
atgaacaagacaaatctcacgcttgaacagaaagacgtcaaacaccatctgcatccgtacaccgatgctcgccttcatgagagcacagggccactgatcatcgagcgtggagagggtatccacgtgtttgacacgcagggcaagaagtacattgaagcgatgtcagggttgtggagtgtggcgctgggtttcagtaatcagcgtctgattgaggcggcagagaagcaactacgtacgttgcctttctatcacttgttcaccagtaaggcccatgtccccagtatcgaattggctgagaagctggtcgagatggctccggttcccatgagcaaggtgttcttcaccaactctggctccgaggccaatgacacagtggtcaagctgctctggtaccgcaacaacgcgctgggcctgcggggcaagaagaagttcatcagtcgggcgaacgcctaccatggcatcactgccgtgagcgcgagcctgacaggcctgccggccaaccagcgcggcttcgatgtgccgcttccagggttccttcacgtcagttgcccgcacttctaccgatacggcaagccgggcgaaacggaagagctgtttgctgaccgactggcccaggagctggacgagctgatcatcaaggagggggccgagagcgtggcggctttctacgccgagccattgatgggggctggcggggtgatcgtgccaccggcaacctactgggagaaaatccagaaggtgtgccgcaagcatgacatcctcatcgtcgcagacgaggtcatctgtggcttcgggcgcacgggcaatatgttcggtagcgagacctttgggatcaagccagacgtcatggtgctgtccaagcagctgtcttcgtcatatcagccgattgccgcaattctgatcaatgagcggatctaccaggacattgccgagcaaagccacgcgattggaacgctcggccatggctttaccggcagtggtcatccggtggcgtctgcggttgccttggagaacctgaagatcattcaggaggagaatctcgttcggcatgcggctcgcatgggggaaatcctgcagggcggactcagggcgtacacgggccatcctctggtgggtgaggtgcgtggtgtcggattgatcgcagcggtggaactggtcgctgacaaggcgacaaaagccccctttgatacggtcggtcggttaggccgttacctcgctgctcgggctcaggatctggggatgatcagccgggcaatgggtgatgcggtggcgttctgccctccgttgacctccagcgaagaggatatccaggccatcctacgttgtttcgagcaggccctcgaagacacctggcagtggtttcaggctagccaggaaaaatag

SEQ ID NO: 360422 - DNA, 1989 bp, Pseudomonas aeruginosa
atgctctctgagggattgcaaacactgttgctttccatggcgggcgaacaggcctcagtcgtaaaggcagagtttcaaaatgcctcgtctgtcgtagacacattgcatgagcaggttatgcaactttccgaattgaaggcgctgcctgctgggcccctgcgaactgagctcaatcaagtattggatgtggcgcttcagcataatcagaagctgttgggtgtgtggttggttatggagcctgacagactgcctgggggcgattacgattttgcaggcgatcttgcctatggtgcaaatgagtcaggccgctttgccagttactggagccgcacctccgcgacgggggccaacagtgcaatcagcgagtccgatctggctaattcggctcctggtataagcggagcaccctacaatgtttggtacacatgtcctgcgctcactaggaaggcatgtctacttgatccttacttggatactagtaccggacaacctttgctaatgactactgttgcgcgcccattggtcgtcgatggcgttgttataggtgtagtgggtgctgatatagccttgcaaacgctgcagagcacagccagtagtgccagtggcgcgctgtttgacggtgcaggaagcatggcgatcatctcggccagtggcgtcttcggcgcccacagccgcgagcctcagaatgttggtcagtcgttgaattcactgcctgctgccgatcaggacgatctgactcggcgtctggaacaccccgtgccgtcagtagccatacaggggccgatcattcgtgcaactcttccggtcattcccgtgacgggggcatcgccctggatggtcgtcgttgatcttccgatagcggtgcttgataaaagtgtccaccgcctacaaacgctgatggcatcagtcgagcgaaaaagtatcaatctcacgatcctgtatgcggttttcgccgtacttgcagggcttgcagtcatgtggctagtggcaaccggaattacccgcccgctcaatgctgtagcaatgcgcctgcgagatatcggcgaaggggagggggatttgacccagcgtttgagtcatcgtcagcaggatgagctaggcgctcttgtggacgctttcaatgggttcatgaataagctgcagccagtgatcgggaacatcaaggaaagtgtttccagggcaagagaaaccgcagatcaggtcgcagaggttgcgcgtactaccagccaaggtatggcaacgcaatttcgagagatcgatcaggttgccgcagcctcaaatgagatgagcgcgacggcttctgaagtcgcgaccagcgcatcgagcgtggctactgcggctcaaggtgccgaccgatcctctcaggaggggatcatggtcatcagacaaagcactcgaagcatcgaagatcttgccgatagcgtcagcaagtccgttcaggaagtggaaagtctggcgagcagtagcgagcatattggctcggttctggaagtcattaggggcatcgctgagcagacgaatctgctggcactaaatgctgccattgaggctgctcgtgcaggggaaagtggacgaggttttgcggtggttgctgatgaggttcgcaatcttgccaggcgtactcaagatgctgtcgaacagattcgaaccgttatccagcaaatccaggctggcaccctgacggttgtatccaccctgcaagtaagtcatgggaaggcacaagtcagtgctgagcaaatccgcgatgcgtctgctgcgcttgagcgtattgcacaggccgtttcggtgatcactgacatgagcatccacatagcgagtgccgttgaggagcagagtgttgtggcggaggaagttagccgtaatgtatctgcgattcgagaggttactgaaggactcagcatccaggccagcgagtcgtcccaggtcagtcagcagttgaatattctggctgatcagcagcttcagatggttgggcagttcaaggtctag

SEQ ID NO: 360423 - DNA, 1626 bp, Pseudomonas aeruginosa
atgatgaaaataagtggcaagctgagtacgctgtcattatcgattgcttcgatagttgctttcgatatacaggcgatgcaattggagttgggtgattcctctacgctggtacgctgggacaatacactgaagtacagcaatgcctggcgactgaaagaggcgtctgatcgattgaccgctgatgtcaatcatgacgacggtgacagggcgtttggccgagggcttatttccaaccgggtggatctgttttcggagttcgatgtcagtcgcaatggtttcgggatccgcttatcgggagccgcctggtacgacacggtctacaaccgctccaatgacaatcgcgctccggatactgcgaacgcatcgtcagtggcttacgatgaattcacccgaggcacggagaaactgcatgggagcaaagccgaattgctcgatgccttcgtgtttggccgctttgatctcggcgggcacaatacgacattccgtctgggcaaacatgccttgctctggggtgaaagtcttttcttcggatccaatggcattgccggtgggcaggcacctatcgatattgccaaagcgctctctgttcccaatacccagttcaaggaactgattcgccccgtgcagcaggtttccgggcaattccagttgacgtcggatatctccattggcgcttactatcaattgcgctgggagcaacatcgctttccggcagtaggcagttatttttccaatatcgatgtactgggcgacgggaatgaacgcttcattctcggcgacccacttattcccggcggcggcccgttggcacttttcgcgggcagggacatcaaggcgcgcgattccggacagggcggtgtccaggttcgtttccgtgtaggggaaacggactatgggttgtacgccattcaatatcacgacaaaacccccaagatgtatctcatgttcgatggtgttgatccagtatccggtcgaatgggggtgtacaagtgggtgtacccggagaacatccgcgcgtatggcgccagtttcagccactcgttggatatcgtaaatattgccggtgaagtatcgattcggcgtaacacgccactcgcaacggatggtcaatctgacctgacgggcaatggcgacaacaatggcaatgaactttatgcggtcggtaactcgctgcatgcgcagttttcatggctcgccacgtttggcccatcgtttattgcgcaagaggctgactttctgggtgaagtggcctggaaccggcgcacgagcataaccaagaacgcagcagcactgacgccgcgcgcagatcgtgatgcggccaatatccgcatgacctacgagccgaagtatcggcaggtgttttccggtgtcgacctgggtattcccgtcggtattggctacggcatcggtaattcatccgtggtcggtgcgttcaacggtgaccgggtaggtgatttcagcttgggcgttaatgcgacgtacatgaatgagtggcgcggcagcttcatgtatacgcactacttcgggcccgaggatacctacctggatgaccagttccgcagcacctaccggcagacgctgaaagaccgtgacttagtctcgttgtccattcagcgtaccttctga

SEQ ID NO: 360424 - DNA, 1362 bp, Pseudomonas aeruginosa
gtgaaaaaagtattcaactacagtgttttccttgcagccgttcttgcagtgaatcatgcatattcggcggtatcgcccgacgatgcgcaacggctaaaaaccgatttgacgcctttgggcgccgagcgtgcaggtaatgcgcagggcacgattcccgcgtggaccggtggattcacccaggcaatcgacggtgaggtgaaaggcgggcgtcgaggtgatccgttcaaggatgaaaagccgttgttcaccattaccgcagctaatgccgctgagtatgcggacaagttgaccgatggcactcaggcgatgctcgcgaaatacccggacagctatcgtctcgacgtctacaccacgcatcgcacggcggcggcaccggagtgggtttacgaaaataccgcgaagaatgcgaccacggccacgctcaagaataacggtgcgatcatcgagggtgccttcggtggcattccgttcccgattccgcaaagcggcgccgagatcatgtggaaccacaaccttcgctggcgcggtgaatccacgcaggtgcaatcgcgtcagtatcagttgctcgccagtggcaaggcggtattggttaccgatctcaaggccgatgttgaaatgccttattactttcaggacagctcgctcgaggagtattccaagcgtaatgagttctggatgatgcgctcttcgacctcggcgcctgccatgcgcgctggcgaagcacttgtcgggcgggccaacaacgacgccgacaaaggccaggcatgggtgtacttgaccggtcagcggcgtatccggaagttgccgaatatctgctgcgacacgccttctccgacaatgggcgggatcgccagtttcgatgaaatcgagggtttcactggccggctggatcgcttcgactggtcaatcgttggcaaacaagagttctacattccctacaacggcaacaagcttatgcagccgtcttccgatgaggcggtactgtctgcgcatcacttaaatcctgatcatgttcgctgggagctgcatcgggtctgggtggtcgaggccaatctgcgccaaggccagcgccatcaggcaccgaagaatcgctactactgcgatgaggacacttggatttgcgtgctgggtgaccgctgggacgccaaggggcaattgtggaaaaccacctgggcccaaaccgcgatcatcgctgagctgcccgcactcgttctggtcagctatggcttgaacgatctgatttccggagatgccttcgtaggcggattgtataacagcaagcaaagccaatatggcgttttgccgcgcttcccagcgagcaccttcaccccggatgcgctcatggcagaaggtgtgcggtaa

SEQ ID NO: 360425 - DNA, 1065 bp, Pseudomonas aeruginosa
atgaggtttaacctgggccggagttggctgacagccactgccctagcttatgtggcgatggtatatacgggagtggcggcttcggccagcgtcagcgacgcactggatcggccgtccattgccctcgcggcaacgctgcatccttttctgctgggcgccagccaggcgggatcacgcttggtggtagtgggtgagcgcggcgtcgtcatgttgtctgacgatggaggtgtgagctggcggcagtcaccgacaccgaccagcgtcacattgactggggtgagctttgcggatgatacgcacggttttgcggtgggccatggcggtgtcgtgctcgccacccatgatgccggcgcgacctgggagcgacggctggatggtcgggagattgccaggcagcttctggccgatgccgaacgcagtggtgacgagcgcaggatcagtcaggcgcaacgattcatcgaggatggtcccgacaagcctctgctggacttactcgtcctggatgcgtcgcacatcatcgtggtcggggcgtttggcctggcattgagctcctatgatggtggccgctcctgggtgtcatggaaggagagtctggacaatgcgatggaactccatctttacgccattcgagcgcgcggcgctctcctagtcgtggccggcgaacaggggctggttcgtatctcggacgatgctggcaagacgttttcgaccatcaccactccctataacggcagttttttcacgctcgagctgatgggcgacaacgagattctcctggccgggatgcgtggcaatgtctggcggtcgcgcaatcgcggccaaacgtggcagcagatggaaaccccagcgcctgcttcgatcgtcgccagtcgcctgagcccagagggtacgttggtgctggtgagccaggcgggccagttgctgactgagcggggcggggtgttgcatgaacgactccggcaaccattaccccaactcaatggcgtatgggtgaagcctgacgcaagcctgctgctgcttggacagcagggcgcacgtattgtcgaggctggagacctgaagtga

SEQ ID NO: 360426 - DNA, 2412 bp, Pseudomonas aeruginosa
gtgaattactctgaacattccctagtgatttcagatgaggcatttgaccgtaattcgggttcccttatcgagcgtgttctatttcataaccgcggactggtctgtttcatctgtctgatgctgacggcgctgctgggctggcaagccagtaagctcgagatcaatgccagctttgaaaaaatggttcccgcgagtcatccgtacattcagaattttgcccactatcaggccgaactttcaggcttgggcaatgcggtcagggttgcagtcgagaaccccacggggagtatttatgacgccgagtatcttgagaaacttcagcgcctgagcgacgccctgtttcttttgccgggtgtcgatcgcgtcaatatgaaatcgctgtggacgccgtccactcgctgggtgggtgtcaccgaggaagggttggatggcggcccggtggttcccgatgattatgacggttctgccgccagcctcgagcagcttgcccacaatgtcgcccgttcaggtgagattggccagttggtcgccttggacgcgaagtcgagcatcatcttcgtgccgctacggacgacggatggcagcggccagaagctcgactatgcggtctttgctgagcagctcaaccagttgcgcgagacctatcaggcccaggggctagtcatccatgtcacgggctttgcgcaactggtgggcgaccttatcgacggcgtacgttcggtgctggtgttctttgccttggccgttctgattgccgctgccgcggtctatggttacacccgctgcctgcgttcgacgatgctggtcgtcttcgtttcggtgatcgcggtgatatggcaactgggattgttcccggtgctgggcttcgcccttgatccttactcgattctggtgcctttcctggtgtttgccatcggcatgagccatggcgctcagaagatgaacggcatcatgcaggacgttggccggggtgccagcaagctgctcgccgcgcgtttgaccttccggcggctctttctcacagggctgacggccctgctggcggatgccgtcggctttgccgtgctctttctgatcgacatccaggtcattcgtgagctggcgattgccgcatccataggcgtggcgatcctgatcttcaccaacttgattctgctgcccattttgctgtcctacgcgggtgtcagtgcggtggcggcaaagcgcagcctgcgtgccgaggaggcggataaagcggggcatggcaggcatccggtatggagggcgttaggcctgttcacggagcgccgctgggctggcattacggttctgttcgccgcgctgatcggtggtggcggcttggttgcgagtacctacctcaagattggcgatctggatcctggagcgccggagttgcgtgctgatagccgctacaaccaggatgttgcgttcatgagcacgcgctacggggcttccagtgacgtactggcgatcatggtgagcacgcccgatgggcaatgcgccgggtacgccacgctgaacaaggtagatgcgctggaatggcaactacggcaactcgaaggggtcgagacgaccagcacgctggcgctgctgaatcgtcgggtgctcgcgggcctcaatgaagccaatcccaagtggtacgagtttctccctaaccagcacatgctcaacgcggtatccgccgatgcgcctcgcagcctgagcaactcctcatgcagcttgctgacgatgtacgtctacctgcgcgatcacaaggcggaaacgctgcagcgggtcgtcgagcaggtcgaggcattcgctcgggataacgacagtgatgaggtcaaatttctgctggctgcgggctcggcggggatcgaggctgcgaccaacatcgtggtgcaggatgcctggcgacagatgcttttcctcgtctatggtgcggtcatgctgctgtcgctgattgccttccgttcctggcgagcggtcatcgtggcggttttgccgctggcattgacgtcggtactggccgaggccttgatggtggtgttgggcatgggagtgaaggtcgcgacgctgccggtcatcgctctgggggttggtatcggtgtcgactatgcgctgtacatcctcagcgtgacgttggtgcagttgcgtgaagggaaaagtctggccgagtcgtattaccgtgcgctgctgttcaccggcaaggtggtcatgctaaccgggataacactggcgatcggtgtcatcacctgggtattcagcccgatcaagttccaggccgacatgggcttgctgttggccttcatgttcctctggaacatgctaggagcgttgatcgtgttgcctgctctggcgcatttcctgctcaaacccgccgcttgcagggaaccagacagtgtgtcgagcgcagcggcagtgctgccttag

SEQ ID NO: 360427 - DNA, 1725 bp, Pseudomonas aeruginosa
atgccggtcggttttctgactcaagagcaacgcgacggttttggccgctatgttgattcgcccagccgtgaagagctggaacgttacttccacctgagcgatgaagaccgtgaagccatccaggtgctgcggggtaaccataaccgtctgggttatgccgttctgctgaccaccgtccgcttcgttggcgttctgccggacaagcccgccgccgtgccggtggaagtcctgcaggtgctttgccgacaactggcgattccagaccccgactgcctccagcgctatagcgatcatcgcagctggatacatgccaccgatattcagaaccgctttggctatcgtcatttcaccgatccgggcatcggctttcgcttgagccgctggctgtatgccctctgctggacgggcaccgaccggccgggagtgctgtttgagcgagccacctcgtggctgttcacacagaaagtcctcctgcctggtgtgtctcaactagagcgctttatcgcccagttgcgcagtcgggtcgaagaacgcctctggtttacgctgggccgcagcgtgactgaggaacagcgattgcaactgcaagacttgctgacggtggccgaaggcaaccgcagctcccggctggatcaattgcgctccggcccggtcatggtcagtggccccgcgttgattcgggcactgcgccggctcgatgacgtgcgcggcatcggcatcaccttgccggcggcggcgcacatccctcccagccgtatcgccgccctggcccgcttcgccaacacggccaaggtcaccgcgattaatcggctgccggcgtcgcggcggatggcgacactggtggccttcgcactctgcctggaggcgactgcgcacgacgacgcactggaagtcctggaggccttgctgcgcgacctgttcagcaacgcggagaaggccgacaagaaagcccgcatgcgcagcctgaaagacctggatcggtcggccgcgacgctcgccgccgcgtgcaaggtcgtgctggacagctcgatcagcgatgacaacgtgcgcgcccggctgttcaacgacctgccgaggaccaccctggaaaaggccctggaagaggtcaacgcgctgatccgcccggtagatgacgtctattttcttgcattggaagcgcgctaccgcagcgtgcgccgcttcctgcccgacctgctcaagcacatccgcttcggcttcagcccggccggcaagggcgtggcggctagtctggagtggctgcaactgaacctgccgcgccggaagccagaggatgacgcgccgcaggagatcgtggccaaggcttggcagaagcacatcacccgcgaagatggctccctcgacatgggtgcctatgtgttctgcacgctcgatgcgctgcgcacggccctgcgccgccgcgatgtcttcgtcgcccagttggcgctatgccgacccgcgtcttggcctgctcgacggtgccgaatggctggcggcgcgaccgatcatctgccggtcactgggcctgaccatcgacgccaaaaccaccctggacgccttgtccgtcgagctggatgcaacctggctggcagtagccgcgcgcctgcccgacaacccggcgattcaactgagcgagaacaccgagggcaagaccgaactgtcgctcggggcgctggacaagctggacgagccctgctcgttgctgcaactgcgggcggccgtgtctga

SEQ ID NO: 360428 - DNA, 792 bp, Pseudomonas aeruginosa; identical to SEQ ID NO: 343267

SEQ ID NO: 360429 - DNA, 561 bp, Pseudomonas aeruginosa; identical to SEQ ID NO: 341232

SEQ ID NO: 360430 - DNA, 1065 bp, Pseudomonas aeruginosa
atgctgtacgcccacctgtctggggcaggcagcctcagagagctcgagtccagcttcaatagccagtccaatcatcactatcacttggggacgtctgcgatcagacgttcaaccctggccgaggccaatggtcggcgcagttcagaggtcttcgctcaagcggcgcactacctgatggcgtgcgccagccgacagcaacggcgggatgggaaagagctgctttacctactggattcgacctccatcacgctacagggccctggttttgatgactggacgttatcggatcgcacacgccgaacgcaggggataaaagtccatgtgcagtacgccagccactgcgctgctcctgtggattgccgtttcagcgcagccaatgtcaacgatatcgaggttggcaagtgcctggagattgagccccatgccacctacgtgttcgacaagggctattgcgattacaactggtgggcacacctggaggagagcaacgcccgcttcgtgacacgtttcaagtacaacgcaggcctcacggttatttcctcacgtgagattgcccgcgaggaacaggactcgattctgcaggatgagcacgtccggtttgcccatcgacatcctggcggaaaacgcatcaatcactacgaaaagcctttacgtcgaatcgtcgttcaccggccggagcatgaccggccgttgatactggcaaccaacgacctggaaagcccggcagcggatattgccgatctttatcgtcgtcgttggcgaatcgagttgttcttcaaatggatcaaacagcatttgaagatcaagcagttcctggggcgtagcgaaaatgcagtacgcatccagattctctgcgccctgatcagctacctgctgctgagtattcatcggacattgacgggcgagaagaagagcctgtggatgctcatggtagaggtgcgttcaacactgttacagcgtccagaaatagaggttgagcggtatcgaatacgacaggcacggaaaaaagaaatcgagcgaagacagggacagctattcccttgcatgagatatgccggacagtag

SEQ ID NO: 360431 - DNA, 303 bp, Pseudomonas aeruginosa
atgcgttcccgcttcagcaactggaaaaagctttccgcgaccgcgttgtcgtggcagttgccgcgtcgactcatgctgctgatcaggttgttggccttgaggaaactctgccagtccgagctgctgaactggctgccctggtcggagtggatcatcacttcctgcttgggctttcgccgccacaccgccatcaacagggcatcaatggccaggtcgctgcacatccgtggcttcatcgaccagccaatcacttggcgcgaaaacagatccagtaccaccgccaagtacaaccaaccctcatag

SEQ ID NO: 360432 - DNA, 513 bp, Pseudomonas aeruginosa
atgagcgaactcaacctgaccactgacgaagcccgtgtcagctacggcatcggccgtcaactgggcgaccaactgcgcgagaatccggttccaggcatgaccctggacgcagtcctggccggcctgtccgatgcgttcgcaggtatcgacagccgggtttccggcgaggcgctgtcggccagcttccaggtgatccgcgaacgcatgcaggccgaagcccaggccaaggccgaagccgccgctggcgaaggccgcgcctacctggccgagaacgccaagcgcgaaggcgtgaccgtgctgccgtcgggcctgcaattcgaagtgctgagtactggcgagggcgccaagccttcccgcgaggataccgtgcgcacccactaccacggcaccctgatcgacggcaccgtattcgacagctcctaccagcgcggccagccggccgagttcccggtgggcggcgtgatcgccggctgggtcgaagcgctgcaactgatgaacgccggctccaagtga

SEQ ID NO: 360433 - DNA, 414 bp, Pseudomonas aeruginosa
atgattgatacatggctggcacagtggggcttgagacttccctcgagcaacgatgccacgttgcggctgcaaccggcagagggaccggaactggttatggagcgcctcgagggcggttggcttttcgtcgtcgagttgggacttgtgccttcagggttaccgctgggtgtgatcttgcaattgttacaagtgaactctccattctcatccttggcaccggtgaaacttgcggcggacgatgccggtagacttgtgctctgggctgaggcacgtgatggcgttgacgatgtggatgcactgaaccgcttgcacgataggctgcgggaaggacattcacgattagtgccattgctagagcccacgggtgagttggttccagctcagatacaaaccagcgcgttagtgttcgtttga

SEQ ID NO: 360434 - DNA, 435 bp, Pseudomonas aeruginosa
atgttcaccatcgacacaatgtcttccgaagttatcaatagccttcctgatatactgaaggacgtgattgaaaaatttggctcagacaaggcaagcaacctagtaagtaagcttggcggcagaacttactgggtagccgaaggcaggacccccaaggcgcgagaaagacgaaaacagctcgccgaaatgataggagaagatgttgaggggtttatcaataaacgctatcaggggaaagaaatttacattcccagaatgaagaggatagagacgcttgccagacatagacggatcaacgtgaaagctgaagagttgttaggcgaaggaaagccaataagagctgtcgttacccagttggcgaatgagtttgccatgagcgagcgaagcctctggaatatcctcaagcagcatggttcggtcagcgagggcgcttga

SEQ ID NO: 360435 - DNA, 681 bp, Pseudomonas aeruginosa; identical to SEQ ID NO: 325982

SEQ ID NO: 360436 - DNA, 498 bp, Pseudomonas aeruginosa
atgaacctccagaaccgcaacaacctcatcctgagcctgatcgccgagacccagttcgacgcctacgtgcaaggctacatggccaaagcaggcgctgccgccggtgcttccgagaatctgcaaatcgaggctgaaggtgctgcgatgctgcagggccttgtcgctccggttcgcgctcagcagcgtgcctgtggacagcccctgcagaacgccctgctccaaatcgcccacgacctactgttgcagacgaagtcgcaactggccatcgcggccaatgccagctcgatccacgtgatccagcgggacatgaacagggctatctggaatatcgcgactgccatcgatcacctggccgaattcgcccaaccctcccaggacaccgtgaaggtcatcgaacggctgatgctcttcgtcggcagctcgcctagcccggaaggtcagcaactggccgcagaggcaagtgcagtgcttggcatgagcgagggggggctggcatga

SEQ ID NO: 360437 - DNA, 534 bp, Pseudomonas aeruginosa
atgcgaactgagccgatcggcatggccgtggccgtgctcttcctcctcgcgtccggccaggcctgcgccggcaccgttggcgaactggcggagatccaggcccaggccatcctcaccgaggccaaggtgcgtctggccacggcgcaacggcaactggagggcaaaggcgaaaccggccaggtcgtcagcgcccaggggcagacgttcgccatgccggtgccgccggcgccgccgacgatcacgcagccggttccgccggtggtgcggaccatctacggcgccggcggcaagatgactgccacattcttgttcccgggcgggtacgaggtggacgccgccagcggcgcggagctgccgggcaactaccgcgtcgagtcgatctccctggaccaggtcgtactcaccgacaaggacggcaaccgcgtgcccgtgggcttctccagcgttgcccccacccaagccgcctcctcggcccaaggcgcctccgttccgccggcgctgcccggggcggtaccgcagccgttcatccagtag

SEQ ID NO: 360438 - DNA, 351 bp, Pseudomonas aeruginosa; identical to SEQ ID NO: 352704

SEQ ID NO: 360439 - DNA, 345 bp, Pseudomonas aeruginosa
atgctcgctcttatcggcctgtgccagggctattactccgatactcgcaacgtcaataccgccaacggtccttcgcagattgttgagcactcggtgctcgtgcaggttgagcaaaccaataagttcggtatgccggaaaccaaggttattcaagtccgcatttcgaagcggcacatggatggcgggcttaataatgtctggaagatggagaagggcaaaactgtgtccgtcccggtatttatccaggcgtgggcgagtaagtccggtaacgccggattcgattattggctgtcgggcgatggcatgccgttgaaacttcaaatttcggcgaaaaaggacgggtag

SEQ ID NO: 360440 - DNA, 1440 bp, Pseudomonas aeruginosa
atgaggattaagacatgtatatcagccctgaagatatcgctttctatggcgtgcttattgccatcgttattctttgctcggggcgttaatgcagaacagttttattgggttgtggcctcgccttccgctgtcgccggggggagctacagctcaccgtcatcggcgtgcgctgttgtgtttgattattacaagccgactactaactggatcaaatctgttgagcctgtgcgaagaaatgacacggtatttgattgctttgcgcgcggcacgaatgcttctggaagtgcgcaatctggaaatattggagttatttctcgaagaggcaaatcgtgtcagccaggggctgaatatgattcggctgcgggagtttgtaaggagccgcccaaggagtgtgagattggtgtgcctaacttatttcgtagttcgaactatccgattatcgtgattaatgggaagaacacggttcctagttctccgccgtccggctgtttgagtggctgcgcctatgaggcggatagttctcggccaacatcctgttatcgcactccaggttccacaactgaggggttctgcaactacacgctcaagagcaacggccagaactgttcggcagactccggcaacctgggcggcaccggcccttcgctcagcgaaccgaatcagccgccagtgaccgacccgccttcggacccgaatgacccgggctgtccgaagggctacagctggtccggcaccacatgcgtgaagacgccgaccgatcccacggacccgaccgaccctggtggtgatggcggtggaactggtggtggcgatggtggtgatggtggcggtacaggcggtggcggtgatggtggaacgggcggcggcgatggcggcaccggcgggggagacggaaacggtggaactggcggcggtgatggcgatggcggcggcacgggtggcggcggtgatggcgggggagacgggcagtgcgatccggccaaggacccgaacaagtgcggcagtggctcctcgatctccggcgacggtgactgcaaggtggcgattcagtgcaatggcgacgcaatccagtgcgccatcgttcgccaggaaaagctcgcacgctgcgcggatgaagagttccgcacggtcgatgagaagaagattcaggacctgaaaaacacgctggccggcgagttttccgggcctgagtacgaacccatcaaggccaccggcgagaacacccatgacctgtcgaagctgctcgacactagcgggcgcttttccaaggcctgcccggtcattcctgacgtctcgttcccctggttcggcagtactcagacggtgtcgctcagtagcgtgtcgtccgatctgtgcacgtatctccagtggttcgggtatctgcttgtcgcgttcgccatgcgcgccgcggctgaaatcattgcgcgagggttgaactga

SEQ ID NO: 360441 - DNA, 1281 bp, Pseudomonas aeruginosa
atgctctatctgcgcaccggcctgccaggggctggtaagaccctgaacgcgattcgggaaatcgacattgaacaccagccggacccggacgacccgaccaagcggttgcacaaggacccggacaatccggacctgccgcccaggacgatctactactacggcatcccggatatgaaacttgaccggctcaagtcgaagtgggtcgagttcgatacgcctgaggagtggtacaacctgcctgatggctcggtgatcgtgatcgacgaagcgcaacgggtgttcggcaatgatggctccagggcgcgcccggagaaagtcacgcgcttcgagacgcaccggcaccagggcctggacattcacctgatcacccagcaccccagcttgctgtgtacgcccgtccgcaagctggtcggcaagcacatcaacttcattcggccctatggtcgggagaaaggcatcttccggcatgagtacgagttctgcatcgacaaccctgagcggcgcagcaatttcaagcaggcccaggaagagcgggtcacgctggataaggcgtatttcggcgtctacaagtcgtcgacggtgcacacgcacaagccgatcacgcccagctacatgaagaaaatcccgctgatcatcgtgcttatgctgatcccgatcggcgtgcttgttgggcttgtcgtgaccgcgatgcgtcaggggaatgatgagaaagaagcggctcttgcgaggagccaagcgactgaagcgtcagcgggtgttctgcctggggctggaaattttgttcaggcagcccccagggcctccagtggggcgaaatcggccgatgagttcatcggtgatatgtcgcccagagtgcccgatctggtggcttcggcgccgcgctatgacgatctgaacaagcccagggatttccctcggccggtgtgtgcggccagctcggacccgaacttgatcggcaaggctcctgagcggcggattccgctgggcacgtacaatggccgggtgatggtttgccagtgctacacgcaacaggtcacgcggatgcacacgacgttcgagttctgcatggacgtggtgaacaacggctatttcgacgacacgcggatgccgccgacctatgccagcggcaacagcacgcgaggcttgatcaccagtccgtcggttgacccggcgacggcgattgagcgagggcgcgcagcgacatcgccgacgccgggggatgcgttctcgacacgagtaaccatcgtgccggatagcagcaggatgcccaggacgctatga

SEQ ID NO: 360442 - DNA, 1116 bp, Pseudomonas aeruginosa
atgctgtactcgggcctgggagttgatcgtgtctctcgcattctctcactacgaaaggcttccctgggctgctggaaacgcctttactccggcgagggtatcgacttcgagatgctgttccaggacaccctggcgatcttcgacagtagccctgacgagttcattttcgagcgtttccaggacgaactcatcgaccagatgaagcgtcccttgggccttcgctatgatcaaatcctgctcgagatcaccaacggccagcaggagcagcgccgcggcactctggtcgacctgcccgcacctgccgcaccacctggaatcccagccgtagggcaggaaaatcctgctgcgtcgactactggacaagcacaatcacagagccccgctgccggcctccaaacgtccaagaccaatagcctcccgggtaatccctctaccccgccagctccgccactacctgtacaacagcagcaactgaccgacgaggagcgtgctgaactcttggcaggtcatatcgtgagcccggtatccaccaagattcagcagactcgccaacggctggccgctctcgagggtgaacatctacctgtcttcgaggaaacagctctgcaggcaatcccggtgcaagtcggcggcctgcacccgatcaccgacctctggtacatcgagcggtcgatcgacacccccgaaatcctgcgacagcacatcgctgacttggtggaagaaattgcctttatcgtcggcgcccccggaacgatcgagaggattcaaggtggtgtgggctactcgtaccgggagccagcagaagattgcgaactttctgaggcagccctgcacctgatcaccttgtttcagtctctcagtggccaggtccaggtaatcctggacaaggtcgactcgcaaacttgtcgtgatgctctgggtgaattccagttctcagctggcctcgctcagttgctgctgggccaacccaccacaggcgatcagccatccagccaggcaggccgtcttaatgacgaagccctggtgaaactgttccggatcattcgtcttgcccggcgcctggttgaccttgagctgccgccggccacctccgagcaagcagctaccgaccagtga

SEQ ID NO: 360443 - DNA, 1320 bp, Pseudomonas aeruginosa
atgaggctgtcgcgctttcccatctcgactctgctggattcggcctcgggacatctcgaggcccatttgtataagaagcggcttgctgccgagagcggcgaaccgctggctcaacagtattccggcatcattttcagcggcaacccgcatgagaccgttcctcggcgcctgctgctggataaacgcctcaccccgcttgagcggaactgctggcaagtgttccgcttgctcatcaacgacgacgggctgaccgcgttccctacttacgagcaattacgcccttatctcggcatgcagccgggcaagatcgcctcgcgcgaaaccatcgccaaggcactcacggttcttcgattgacacgctggctcagcctcggccgacgcctgcgcaacgacctcaacgggcaagtacagggcaacgtctacatcctccacgacgaaccggtatccccggcagaagccctggagctggaccccgactacatgcagttgctgagccaatccaccgaccacggcaaccgagccatacgcgaagtaggacaggtcacctggagggaattcagggacgatccggacgttggtcggcgcctgccttcccacctggagaagcttgaggggcgcttgaaccatcagcagtgggctctcgatagtcagctcgaagcggatccagcggcagagttcggcatccgaactctgcccgatttacctcattccaccccgagttcggatgccgaactcagtgaaatcagcggcaagcaatgcgctctaccgctgagttcggatgccgaacccagacagaatccgccgagtacacccttggttcggatgccgaactcatatagtacgtatacatacaaacaagattctgtatgtaaaaagccagtacaaccgcgagcacgcgaggacgcacatccgaactggcaggatctcctgaacggactggaggccgagcaacggatccaagccgtaagcgcgctccgacgggtgtccgaggagctgcgtcgtccggtcatcgagcagtggcggcaccgatgtgcgggaggaactgtcggtaaccccttcggctacctcatgacgctcatccagcgtgcagtccagggcaagttcaacgcctcttgggctccggaagaagcggctgagcgaaccatctccatagcggaacgccgtgctccggcaccaccaagccccacaacgcctacacagcctcagattcagccaaagggagacacccggacagggagcgaggtcctcagccggctcaaggacctcattcggcccaggcacggatcgagcgtgccatccgaacggggtgacgagccatga

SEQ ID NO: 360444 - DNA, 1281 bp, Pseudomonas aeruginosa
gtgggcattcagaaagcgaaagcctggtatgaggaggagaaaggcgaaccggtcggcatccgcgagctgtcacggaagctcaccgatgacggctatcctgtttcaccctcacacatcagcaggatgctggatgccgttgagatactgcttccagccatccctgtgatgctgtattcagggctcggtaaaccgcaaatcgaaaaactcctgtcactcagaaagtcggcatcctcctgctggacacgtctatacgccggtgaagggatcgacttcgaaatgatgttccaggacactctggcgatcttcgacagtagccctgacgaattcattttcgagcgtttccaggacgaactcatcgaccagatgaagcggcccctgggcctgcgttatgaccagattctgctcgagatcaccaacggccagcaggaacagcgccggggcactctgatcgacctgcccgcacctaccgcaccacctgaaattccaccagtagggcaggaaagtcctgctgcgtcgactactggacaagcacaatcacagagccccgctgccggcctccaaacgtccaagatcaatagcctcccgggtaatccctctaccccgccaactccgccgctacctgtacaacagcagcaactgaccgacgaggagcgtgctgagctcttggcaggtcatatcgtgagcccggtatccacaaagatccagcagactcgccaacggctggccgctctcgagggtgaacatctacctgtcttcgaggaaacagctctgcaggcaatcccagtgcaagtcggcggcctgcacccgatcaccgatctctggtacatcgagcggtcgatcgatacccccgagatcctgcgacagcacatcgctgatctggctgaagagatcgctctgcatgtcggcgccccaggagagatcgtcaggattcagggcggtgtgggttacacgtatcgcgagcccaatgaagaccctgagattactgattcagcgctgcacctcatgacgctgcttcaagcgctcagcggccaggtccaagtcgtcctgaactcacacgaccagcagacctgccgcgacgccctgggcgagtttcaattctcagctggcctcgctcagttgctgctgggccaacccaccacaggcgatcagccatccagccaggcaggccgtctcaatgacgaagccctggtgaaactgttccggatcattcgtcttgcccgacgcctggttgaccttgagctgccgccggccgcctccgagcaagcagctaccgaccagtga

SEQ ID NO: 360445 - DNA, 147 bp, Pseudomonas aeruginosa; identical to SEQ ID NO: 357000

SEQ ID NO: 360446 - DNA, 159 bp, Pseudomonas aeruginosa
atgagcaatatccaaatcgtagatctgcccgccctgccggaagttgaggaggtttgcctcaccgacgtcgaggacgagctgctgctcagcaggcatttctgcaacttcgcctggctgttcctggccagcaacaatgcccaggtatctgccctggcctaa

SEQ ID NO: 360447 - DNA, 552 bp, Pseudomonas aeruginosa; identical to SEQ ID NO: 227820

SEQ ID NO: 360448 - DNA, 957 bp, Pseudomonas aeruginosa
gtgagtgtgaacccgatcatccaggcccagttcgtcgacctctacctcggtgaaggcttcgccgacgtgaaaggcctggccggcgccggcgcgcgccgagtcgaagtgcctcgcgagtgggagccgcacgcccaggaactgctccagatctgcaggcaaacgctggaggagctgcaggatcctgagttcgccatcgtcgtcgacggcgtgctactgcgcgttacccaactggaagatgctttcaacggcgggagtgtcttcgtgctgcgccgatcgacggcccaagtcagaagcttcgaagacatcggctatccgagcgaagtggtctccgccctgatggctccgcagttgcaggggttgattctgttctgtggcgatatggcgaccggaaaaacctcctctgccgcctctctgatcctcgcccgactgcaaaccctgggcggggtgggcttcaccgtcgaagatccgcaggaaaccaatctcagcggccagcatggcctaggccgctgtatccaggtcaggacctcgcgacgctcgggaggctacagcgaagccctgttgcgcacgctgcgtaccggagccgacctggtgctgattggcgagatccgcgacgaagacaccgcctatcaggcttgcaaagcttcgctgaacggcaacctagtcatatcgaccatccacgccaagaactgcccgcaagccatcgaacggcttatcaccctggccaaacccctcgcgtccaatgcctacgatgttgtggctgaaggcattcagggcgtgatctgccaggaactggtaagcgatggcgcagctcgacgactgcatgcggaaccgttgctattcaccgggatggactccgtcgccatgcgcgacaagattcgccggcagcagattcacctgcttgaggacgacgtgaatcgccaggctcgcagaagcctgtgggagccaacctatgaataa

SEQ ID NO: 360449 - DNA, 387 bp, Pseudomonas aeruginosa
atgcccgaagaacatctgtttcaggatggcaccctcagcttcctaccgacccgtttgaaccggcaaccggtggtcatcggcggcctgaccgcagacgaaatgtggatcacggtcttcaccagcggagcagccgggttcgttcttggcatcccggctgccttggtcgcaggtaacgctgcctgcattccactgggcgcgctgctggtcggcgccctcggcctgggtatcggcagccgcgtcctgcggcggatgaagcgggggcggcctgacacctggttctaccgccaggtggagctggccctctcgctgcgccttcccgtcttcggcaatcgtcacctggtgacgcgctccggcgcctggaccagtcgacgcacggagtccccatga

SEQ ID NO: 360450 - DNA, 357 bp, Pseudomonas aeruginosa; identical to SEQ ID NO: 351483

SEQ ID NO: 360451 - DNA, 273 bp, Pseudomonas aeruginosa
atggcaactcgaaatgtcgtccttcctgacccgatggagcaggacatcaacgagctggtggagaccggccgctatcagaaccgcagcgaagtcatccgggcaggcctgcgcctgttgctgcaacaggaagcccagaatagcgccaagctcgaagccctccgcaacgcaacatccagtgggctgatgcaactggagcgcggcgagtacgacgagcttaccagcgacgacctggcccaatacctcgacgagctcggcaaccaggcgagccactga

SEQ ID NO: 360452 - DNA, 510 bp, Pseudomonas aeruginosa
gtgaagggtgacacctacaaggacaaggtctgcaagaccgaattcactgaggacgacgacggcaacatcaccgaggtgaggatcctcaccgaccgtttcatcccggtcatccgggcatgggaaatgacaccctcctcggccaatcagggccgcgtgctgaccatcagctcctcggccgcgaccacggaagaagctgaagagccccaacctgagccggcccccgcacccgcaccgctgctgatcagccctggccgggtcgtaatgaccgcagccgtgagccacctggtggaaaccggtcaactcaacccagcgcctttgctgaaacgccatctggcgggagactgggggacgctggaccaggaagactggaacaccaaccagagagccctgaagttcggcgatcggctgctgtcgtcctacgacatcgacgccggcgacgaatccaggctctggatcatcactgaggcagaccgcagctcaaccacgcttttgctccctagcgattactga

SEQ ID NO: 360453 - DNA, 270 bp, Pseudomonas aeruginosa
atgactactcatctgatcaccctggtcatcaagcagccgagcgacgctcaggcacgccaactcatgtaccaggagttgctcggcctgatctcacgctacggcggtgaggtgacgtccaaggccttggaggacgagtcgaccctctgtgagctgctggagcagatgctgcccgatcatgaggtagagcaagccaggaaacaggtgctcgaacttcatgccaagcgccgccgaccgggccgcctgcactcgccggcaagcctgaaggtgtaa

SEQ ID NO: 360454 - DNA, 162 bp, Pseudomonas aeruginosa
gtgggcctggcagtgaacgtggccagcgaagcgcgcctgacggaaatccgggcctgggggaaaggacttcagatattgccggcgccggcggacgacctggtcgaccggctcggactgcggcactaccccgccctcatcacatccaccgccatccagcagtag

SEQ ID NO: 360455 - DNA, 729 bp, Pseudomonas aeruginosa
atgttctgcatgggcgccgacggcgagatgttcaatcgcaaaggcacgccctggcctgaagccgacctcaccgtggtggatttcgcgacttacgcgcgcgaaggctacgccgcccagctcgggatcgcctacatctcgctgctgaacaccgtaaacaacatcgccgaacgcgaccaattcaagggccggcccatcgtcaagatcaccgatgagggacacatcatcaccaagcacccgctgctgctgccctacgccatgaagatcaccaagatgtggcggaaactgggcgcctggttctggctcgccacccagaacatcgacgacatcccagcctccggggcgccgatgctgaacatgatcgagtggtggttgtgcctgaacatgcccccagacgaggtagagaagatctccaggttccgcgagctgtcgccggcgcagaagtcgatgatgctctcggcccgcaaggaaagcggcaaattcaccgagggcgtgctcctggccaagggcaaggagtacctcttccgtgtggttcccccgagtctctacctggccctggccatgaccgaaaacgaagaaaagaaccagcgctacaacatcatgcaagccaccggctgcgacgagctcgaggcggccttgcaggtcgcagcggatctcgacaaggcgcgcggcctgccgcccttcccaattaatttcccagaccaaccggcagtggagtgccaggacgaatga

SEQ ID NO: 360456 - DNA, 348 bp, Pseudomonas aeruginosa
atgctgccccacggcgaggccaacatgctcgacgtctgggagcgaggtgcgaccagctcgataggcaacagccgtggccggctgctcctcgatgccaggcaaacgctgcggcgcccgatcaatccgcagcaggttgcctccgcgaacgaccaggccgactacacccgcacggccagcaacgagatccacagccagttcaaacgattgcccaatcccgacctggtcttgtatgtgttcccgcacctggccggcagcgatcccgccccggtcccgggctacaccaccgtgttccccttctaccagcgagtccagtacgccatgccgggcgagcgcacggaggactactga

SEQ ID NO: 360457 - DNA, 375 bp, Pseudomonas aeruginosa
atgaacgatcagactttgttgctgcgccaagtgcatccgagttttgctcccgatggcgaggtttccagtcaggcttttttccccttcccgaaggatgacggaaagctgtctgtttacgatggtgatcagactaccgcagaggcatcgcatcagcactacaccgtggatctcggtttggaatccgttggtgtatgggctgtcagtggagcggagaccgtatcggttggtttgctgcatcagcccgatcccatcgccgggaacccagcgcacgcgatcgttaattttggcgcgttctcagaaaaggagtgtcggaagctggcgaagaagctgaagaaatttgcggtggatcgcggtagtcagtaccgcgcagcgtaa

SEQ ID NO: 360458 - DNA, 1104 bp, Pseudomonas aeruginosa
atgaagatcgacttctcccaacccagatttaccggcgcacgttttgacgagcacaccctgcccgtcgatgtggcccgtgaccttgctgcttatgaacgcttgattgtcgagctagccaagcacctatatctattagagcacccggaaaggcagcgagtgcccaagggatttgaagctggtttccgtttggacatcgaacgcattgatgcgggtagcgccaagccgatgctagcgctagtcatggccggcgcgctagccctgcaaggtggcgaaaaggattacttcgagcgtgcccgtgacttggtggcagagtgcatcgccgcgccgattgtggcattgccggaagcgtttccgaaggagttgttgggccacttcaatcagttcggtcgttccttgcgtgccgatgaggctttggagttaccggttcaaggggatggaaatccggcccggctgacacaagaaaagcgcaagcaactggtgttggccgctgaccaggtctatgagcgagaaatttcgcttaacggctacatcgaagaggtagatttcgccaaatcctcatttcgtctgaaaccggcagacaatagtccagccgttgttattcccatgccagattcgtttcacaacatggctcgcgtctatggcggtcgccagcgtcatcagattagcgtggtgggcgtaggtgcctatgactcttacgaacgcctgcagaaagtaatttctatcgagtcactggaagtcaccaagaactacgccatatcggcgcggttcgacgaaatctcccagctcgaaaatggctggttcgagggggatgggctggcgccagatgccgacaggctgtctcgtgtctctgaaaaactgatcgctgattacccggataaattacccatacccctcattgttccaaagcaggatggcaatctattgctcgaatggaaagttgaaggtgacccatcgctggacatcgacttgaccaatttgcaagccagttaccatgcgttcggagctaatgacgaggacatggagagagacttcgatttggatacggtcggctggcaatccctgttcgcgttcttgaatgacaacatcaaggtgcagcaggcatga

SEQ ID NO: 360459 - DNA, 3120 bp, Pseudomonas aeruginosa
gtgagtgatcagttcttcgcccaacccattctgaattcgccgtatgagtatccggccaggcattgggaactggacaccagcggtcagccgacccaagaaatcatctccagccgccgccgcgccgacttcatcacaccgatccccaaaccgcgcaagaggaaaggtgagcaagagcagacggatctgttgtttgatgaaggcaagggcttgtccactgctaagcaggcttatgaccacaccgccatcatcaatgcggtccggcaggaagtggacgcctggcgtaagctgccctcgtcgcagtggcgcgtcacccccgaaacagcccgtctactggaacattggcgcaaccacaagttcgctggtgtgcgtccgttcttctgccaggtcgaagcggccgagaccgccatctggttgaccgaggttgccccgcagcttggcaagaacggcgaacgcttcctcgatcacttggataaggccagcaacgatgccaaccctggcctgctgcgtttggcgctgaagctggccaccggggctggcaagactacggtcatgtccatgctcatcgcttggcagacggtcaatgccgtgcgccatccgcagagcaagaaattcacccgaggcttcttgctggtcgcccctggcctgaccatcaaggatcgtctgcgcgtgctgctgcccaatgatgcggacagctactacgccagccgagagatcgtgccccgcgacatgttggcggatctggacaaggccaagatcgtcatcaccaactaccacgccttcaaactgcgcgagcgcatggagttgtccaagggcggccgccgcttgctgcaaggccgtaccggcagcgagctggacacgctggaaaccgagggccagatgctccagcgggtcatgccggagttgatggggctgaagaacattctcgccatcaacgacgaggcacaccattgctatcgagagaagcccgcttccgacaacgacttcatcgacgacaagggtaaccccctgaccggcgatgacctcaaggcggccaaggaacacgtcaaggacgagaacgaagccgcgcgcctgtggatttccggtctggaggctgtcaaccgcaagctgggcttgcaacaggtgatcgacctgtcggccacgccgttcttcctggccggttctggctacgtggaaggtacgttgtttccctggacgatgagcgacttttcgctgatggacgccattgaatgtggcatcgtcaaattgccgcgagtgccggtggccgacaacatccccggcgcggaaatgcccatctaccgcgaactctggaagcacatcggcaaaaagatgccgaagaaggggcggggtaagaacgcccagctcgatccgctggccatcccggtggaattgcagaccgcgctggaagccctgtacggtcactaccgcaaaacctacgaagcttggaaacaggccggcatcaacgtgccaccgtgcttcatcgtggtgtgcaacaacacggccacttccaaactggtattcgattacatctccggtttcgagcgcaccaacgacgacggttccatcacgcgcgtgccggggcggttggaactgttccgcaacttcgatgagcatggcgaacccctggcgcgcccgaacactttgttgatcgacagcgagcagctcgaatccggcgaggcactggacgacaacttccggggtatggctactgacgaaatcgaacgcttcaagcgcgagatcgtcgagcgcaccggcgaccgccgccaggctgaaaacctgagcgacagcgaacttctgcgcgaagtgatgaacaccgttggcaagcaggggcgcctgggtgagcaaatccgctgcgtcgtgtcggtgtccatgctcacagaaggctgggatgccaataccgtcacccacattctcggtgtgcgtgcgttcggcacccaactgctgtgcgaacaggtgattggccgcgccctgcgccgccaatcctatgagttgaacgagcaaggcctcttcgacgtggagtacgccgatgtcttcggcattcccttcgatttcaccgccaagccagtcgtcgtcacgccgcccaagccccgcgaaaccatcacggttaaggcactgcgcccggaacgcgaccctttggaaatccggttccctcgcgtgcagggctatcgcgtcgaactaccagaagaacaactcgaagccgagttcaacggcgaccttcaccttaccctgacaccagacatggttggtgcaacccagacacacaacgcaggcatcatcggcgaggcggtggtgctggacatcaagcatctgcaagatgtgcgtcagtccaccctgttgatggagctgaccaagcacctgttgttccagcactggcgcgatcaaggccaggacgccccgattgccttgttcgggcagctcaaacgcatcgtgcgccagtggctggacgaatgcctggaatgcaaaggcggcacctacccggcgcagttgatgtaccgtgagctggcggatatggcctgccagcgcatcaccaagggtattactgccaaggagttggagaaaggccggcaggtcaaggccatccttgacccgttcaacccgaccggcagcaccgcgcatgtgcgtttcaatacctctcgtccaggcagcgaacgctgggaaaccctcggcgtggagaaccagccgaagaaccaggtcaactgggtcattctggacagcggctgggaatccgaattctgtcgcgtcgctgaatcgcaccccaaggtgctggcctacaccaagaaccacaacctcggcctggaagtgccctaccgcttcggctcggcaaaccgcatctacatcccggacttcatcgtccaagtggacgacggtggcggcaagaacgacccgttgaacctgatcatcgaaatcaaaggctaccggcgcgaagatgcgaaggaaaagaagtccaccatggacacctactggattcccggcgtgaaccaccttggcacgcatggccgctgggcctttgccgagtttggcgatgtatacgaaatgcaggaagactttgccaaagaggtcgaggcaaagttcaaccaaatgattgaatcggctgtgcccacgccgggaaacaaggaacactga

SEQ ID NO: 360460 - DNA, 639 bp, Pseudomonas aeruginosa; identical to SEQ ID NO: 329528

SEQ ID NO: 360461 - DNA, 858 bp, Pseudomonas aeruginosa
gtgaacgctgtaatccttgcggccctcgcgggcatcctggatgtactggttgaacgggttgtcgacaccgttgtgggtgctgatcaggcggaccttgttaccccacatcgtgagcgccagggcggccttcagcagttcctccagggactcgtggaacgccgcctcgtcgatcaccacatcaccctgcaggccgcgcaggttgctcggccggctgctcagggcctggatcttccgccccgacttcgggaagcggatcatgtaggtcaggatctcttccttcttcccttcgtcccagaaggtctgctcgtagacgtcagcctcggccagctcgttgaaggcgcgggcgaacaacgcgcaggcggcgatgtactccagcgccatctcctgcttgctgccgacgtagaaggtgttgcagccacctcggcgccgcggcttggcggcattgatcacgttgcgcccggcttcggcccaggtcaggccggtgcggcgagacttctccgcgatcatgatcggactctcgtcctcgaaccagcgctgctggtagcccaagaagacggcgtcgttggagggaatcgcctcggatatctcctgcggcacgtcgacgccatgcaacgccatctcctcggccaggtcgatcttgcgcggcgcgctggtggccttgagcttggagcccaggttatcggacgttgcgtgcatggccatgtcaggctttccccagcaggatgtcgcggatacgttgttcgagctgctcgctcatgccatcgctgccacgcatctcttccaggcgctgctcctgttcctggagctgtttctcgcggccccgctgctcagcctctgcctggaacttcttcagcgtga

SEQ ID NO: 360462 - DNA, 201 bp, Pseudomonas aeruginosa
atggctgatgttctggaaatcgactgccccgcgtgcagcacgccataccccgaaatcaccgcaggctctgcagctcatgacccgagcctgatcgagctggtgatcacctgcagcaactgcggacacatcctgaatgcgttcgtctccctggctgagatgagcgttgtaccgaatcccgaagaggaaacctcccatggctga

SEQ ID NO: 360463 - DNA, 468 bp, Pseudomonas aeruginosa
atggagcgctaccactcaacggccggcgatccacctcggcgtgatgctgacgtaaagcggcaggaggcccaggagctggacgaactggttcagcagtttctggccggcggcgggcagatcgagaaagtcgggtacaagatgcgcgagctgccggacactttcgtcatcaatcccatgaagacgccggtatacaacggagccctggccgagaattcgtcgctcaaagcgaagcctgccgcgccacgtacgcaatccaagaccgagccccaacgctcaccagcgcccgtgccggctttgcagccggctcctggcgtaaacccgaaggtctggttgagccggatgatcgccgcccaggcgctgctggccgcgcagacggccaggctcgctcgcgaactgggcgtcagcgatgctgagctgcgccggctgggtcgtcggcatggcatggaggtgttccatggcactcgctag

SEQ ID NO: 360464 - DNA, 261 bp, Pseudomonas aeruginosa
gtgacccgcgacctcaagggccaggctaccgcgctggtggtgaacgcgcagaacaaggtcgagctgcgggtgatcaaggccgaccgggtgatcggcgacaagtggttggttaccgaaggcctgaacgccggcgacaagatcattaccgaaggcctgcagttcgtgcagccgggtgtcgaggtgaagaccgtgccggcgaagaatgtcgcgtccgcgcagaaggccgacgccgctccggcgaaaaccgacagcaagggctga

SEQ ID NO: 360465 - DNA, 984 bp, Pseudomonas aeruginosa
gtggatcttcgccccgcgggtgcagtacctggactactacctggtgcaggacggccaactggtgcgggaccagcacaccggcgagtcgcgaccgttccaggagcgcccgctgccctcgcgctcctacctgttctcgctgccggtcgacggcaagccgatgaccctgtacgtgcggatgacctccaaccatccgctgatggcctggttcgaccagatcgacgaagccggcctggtcggcctggagaagcccgcctacgccttcggcatgctgctcggcggcatgctcctgctgctgatgtacaacctgatccgcttcgcctactcgcgcagcgccagcagcctgtggctggcggcggtgcacgcggcgctggcggtctgcgccgcggcgaacctggggctggtggcgttctggctgccgggactcaagttcaaccagtcgctgaccgccgacctcggcgccctcggcgccgcggtgagcctgctgtggttcgcctgcagcttcttccgcggcactgcggaaagccgcctgaaccgcctcctgcaaggcgaggcgctgttgatcctggcggtcggcgcgatcatcgccttcacccagcaactctggttcagctggctgatctacctgctggtgatcctcagttcgctcagcgtcccgctgatcgcggcctggcactggtatcgcggctaccagccggcgcgcctgatcgttgccgggatgatcgtgttcaacgccggcttcatggtgttcctgccggtactgttcggcaccaagcaactcgatccgggctggctggtgctcggcgtgttcagcttcgccaccctcgccgggctggtcctgagcgtctcgctcaccgaacgccagcgactgatccagcagctcaacctgcaacagcgcaccagcgaggcggcgcacaccgcggaattgcagaccaaggccgagttcctggccaagatcagccacgagatccgcacgcccgcccatga

SEQ ID NO: 360466 - DNA, 1032 bp, Pseudomonas aeruginosa
atgttggtgatgcgccccgcccaagcggccgacctgccacaggtgcagcgtctggcggcggacagcccggtaggcgtcacgtccttgccggatgacgccgaacgcctgcgcgacaagatcctcgcttccgaggcctcgttcgccgcggaggtgagctacaacggcgaggaaagctatttcttcgtcctcgaggacagcgccagcggcgagctggtcggctgctcggcgatcgtcgcctcggccgggttctcggaaccgttctacagcttccgcaatgaaaccttcgtgcacgcctcgcgctcgctgtcgatccacaacaagatccatgtcctctcgctgtgccacgaccttaccggcaacagcctgctgaccagtttctacgtacagcgcgacctggtgcagagcgtctacgccgaactcaactcgcgcggtcgcctgctgttcatggccagccatccggagcgcttcgccgacgcggtggtggtggagatcgtcggctacagcgacgagcagggcgaatcgccgttctggaacgcggtcgggcgcaacttcttcgacctgaactacatcgaggcggaaaagctctctgggctgaagagccgcaccttcctcgccgaactgatgccgcactatccgatctatgtgccactgttgccggatgccgcccaggagtccatgggccaggtccacccgcgagcgcagatcaccttcgatatcctgatgcgcgaaggcttcgagaccgacaactacatcgacatcttcgatggcggcccgaccctgcacgcgcgtacctcggggattcgctcgatcgcccagagccgggtggttccggtgaagatcggcgaggcgccgaagagcgggcgtccatacctggtcaccaacggccagttgcaggacttccgcgcggtcgtgctggacctggactgggcgcccggcaagccggtggccctgagtgttgaagccgccgaggccctgggcgtcggcgaaggcgccagcgtgcgcctggtcgcggtcagaaggagccagtcatga

SEQ ID NO: 360467 - DNA, 354 bp, Pseudomonas aeruginosa
gtggacgatgaaaccgatctgcacatccaactcgcatacgatgtcgcatcgagtgccctggaggaagccaatgccgccaacgacctgctggtgatcctgctccaggccgttatggctacgcagcctgaagccacgaaccggttccaccaggctgtgcacgacgcgctgaactcgacagaactcattcgcagcgacgccttcgagaacaatgctcgccggctatgcgggctcatcgacggctcctgccccactccagacttcaactcgctgtttccgcgcagtagtggagcgccgaaccagcccaaacgacccaccctcaaggtcatccagaagttggaaccgaagccgaagtag

SEQ ID NO: 360468 - DNA, 726 bp, Pseudomonas aeruginosa
atgtgtgatggcgcagtgataacgttggggatagagttgggtggcccggcatggggccggatcaaggaggtatggatgggcaggcttgttccagagcggatgattcacttcacgctctgggccatgtggtggttgattattggttcggccggaatgtgggtgttagtgggctcggtcgcgttttgggtgaaagaaggttggttaccacccgactccgcaggttggactcaagccattggtgcagtctttgcggtttttgttgccttggctgttccttactatcagaacagaaagcagaacaatgatcggagagaagacgaactgcgtaagaggctagaggcaataaatgcagtttatgctttgatggcccatgtgcgtgaactatttgttcgtctatctgaaactaaaaagtataagattggttacgcagagaatgtgcgtggtgaaatgaaggattcactcggtcatgagttagttcaggcagccgctatgattcgggaagtgccgatagtctcgatgtcaaacgagatggttcacttcgttgttaacctaagagaggtggcaacctatggcgagtatgcaggaagagttttagaaaacttgcctattcgagattctgagttgccagtactgcgtaaaaggggcttggttaatgcagagttgattgagagatggatggatgaattggataagttagaggtcggtattagaagtggggagcggtaa

SEQ ID NO: 360469 - DNA, 798 bp, Pseudomonas aeruginosa
atgagcagtcaggtcgacatcatcaagcccgaatcgcgcatcgtggtccagttcagttgcggcgcggcctctgcggtcgccggcaagctggccctggcccagtacggcgatacccacgacgtccagttcctcaatgcctacctggccaacgagcatcaggacaaccggcgcttccttgctgactgcgaggtctggactggccggaaaatcacgttgctgcgtgacgaaaagtacggcgccgacgtgctcaacgtcttccgccgcgagcgctacatgaagggccgtaccggcgcgccctgcaccaagctgctgaagcgacgcctgctggacgcctggaagcgtcccggcgacgtgatggtgctcggcttcacggcagaagaagtacaccgcctggacgacttccgggagcggaaccccgaccgcccggtgatcgcgccgctgattgagcgcggcctgggcaaggaggactgcaaagccatcatcgcgcgcgccggcatcgaactgccggccatgtaccgccagggctacgagaacgcgaactgcatcggctgcgtgaaaggcggagaaggctacttccgggcgatccgggaggacttccccgagcagttcgaagccctgtgcatggtgcaggacgagctcggcccgggttcgtacctcttccgcaaccgccagacccaggaacgctactcgctccgcgaccttccctccgggccgatccgccgcaacgaagccattccggcgtgcagcttcttctgcgagctcgccgaggccgacatcatccataaggagccggcatga

SEQ ID NO: 360470 - DNA, 1944 bp, Pseudomonas aeruginosa
atgaactggcatatcacctacggctcggtttgcagcggcatcgaggccgcgagcgtggcctggcacatgctggggtttcgcgccagttggttcgcagagatcgaacccttcccgtccgccgtgctggcccatcgctggccggcggtacccaacctgggcgacatgatcaagctcgcccgcgaggtgctgctgggaatcatcgctgcgccgctgatcctggtgggcggcacgccgtgccaggacttctccgtagccggcatgcgcgccggcctggccggcgagcgcggcgccctgacaatgaaattcgtggagctcgcagatgcaattgaccatgttcgaccagacggagacgagtgcgtcgtcgtctgggaaaacgtccccggcgtcctgtccgacaaaggcaacgcgttcggcaacttcctcgcagccctggtgggcgaatccgaagcgctggagccgtcagggccccgatggacgaacgctggttgtgtgtatggaccccgccgagcagccgcatggcgggttttggatgcccaatatttcggactggcccaacgacgcaagcgtgtgttcgttgtcgcaagtgctcgagcagacttcgatcccgcagcggtacttcttgagcgcgagggcctgcgcagggatcatccgccgcgccgaggcgaggggcaagaccttgccggacacgctcctttcggccctgcgctccagtgcggttgcggatacctcttcgacctgagccttggtcagtggggctgcccgaactgcgagggcgacgaagggccggccgtcgaggtgatggccggcgtccctgccttcggcggcgagaaccagggtggctcgctgttccaggccggcgcgctgaccgcgcatggcgttcggaacgacttcgcatccgagacattctgcgtggcgccgaccttggcgggaggcgggcggaaatccggcggctacagcctggacgatatcccgaccgtcgccggcacgctccaatcgaacggaaaggcagccggcagcgcgacacaacaggacgccgagtccggcctgctggtcgtacatggcacgcaagatcctgacgtcgttcaagattgcgcccacacgctgggcaggaaccacggccaggaaaatgccgtattcgacccgaaccagatcaccagcgcgacaaaccgtagccaacccactcccgggctgtgccacacactgccggcatcgagtcagccacccattgccttcagttgcaaggactacggtgccgatgccggcgacgtttcgccaacgctacgcgccatgggccacggtgagagccacgccaatgccggcggccaggtcgctatcgcatatccactgcttgaggtcggcaagcggacaggtagaagcacatttgacccgcgcgccgggctgggcgtcggcgcggagaacgatccgatgttcacgctgcaggccagcgcgcagcacggcgtctgcgtcaccggcgacatcacccacaccctgaaagcagaaggcttcgacgccagcgaggacggaactggtcgcgggcagccgattgtcgcggatgtagcccccacgctccgatcaggcaatttcaggaaccacagcaacccggccaccgaggctgacagcctggtggttgcctcggcagtgcgtcgcctcaccccccgcgagtgcgagcgcctacagggattccccgacgactacaccctgatcccctgggcggcgtatcagaaggcaatgcgcgccgccgaggccagcctgccgcgcacagcgacgcaggatgaagtactgcgtgcgcggatcgccgcactgtacgcctgcgacgtgagcaaggaagcagccgacgagtgccctgacggcccgcgctacaaggcgatcggaaactcgaaggcggtccccgtcgtgcgctggatcggacggcgcattcaacagcaactggagagaaccgcatga

SEQ ID NO: 360471 - DNA, 303 bp, Pseudomonas aeruginosa; identical to SEQ ID NO: 351362

SEQ ID NO: 360472 - DNA, 135 bp, Pseudomonas aeruginosa
atgatcatcttgaaagctttgaccagccccagcagcccctcgcggatgatggtcacgaagcgcttggccgtcgaaaggaagttgttgatcaagaaggtgatcaggttgctcataaagccactgaccccgccctga

SEQ ID NO: 360473 - DNA, 1020 bp, Pseudomonas aeruginosa
atgttcgtttataccgtatggaacaataagggcggcactggcaaaactagcttgacatttcaggcagtatgccgtttcgcagagaatgccccaaaggacagaatcctagtcatcgatgcttgtcctcaggcgaatctttcggagctttttttagggggaatgtcgaacagcggtagcgctaaacttcttgagcgtcaaggcatggtgcctcgctgtagcatcgggggctattttgatgctcgactgccagcgccgtttgctgcgcctgcattcgatgcatgggactatataaccaatccgcatgattataatgaagagattcctaagaatatagacttagtttgcggcgatcccttgcttgagttacaggccattgcgatgaatactctagcaaacgctgacttgccaggggttaatacttggcttggagttattgattggctaaatgatttcttggctaaaatcgaggatgagtttgactatgtatttatagatactaatccgagtttttcgatgtatacccagctctcattagcatctgcggatggtgtaattctacctgtcatggctgacgactcttcgcgcagggcaattcagaatgcgttctccttaatgtatggattgaagctgccttcagaggtgtactccaagtacactttcgcgacaaaaatgaatgctgcgggaagggaactaccaaagatccacttgattcttaaaaacagattgacacagtacatgggtaaagcctctgcttatgaggcagtgctttccggaatcgacaaagacttaagggggctcattagaaactatccggattacttcactttccaaaaagtttcggatggaattgttgatgttagagacttcggtaccacaggagtggtagcctttgcccgaggctgtccgtttagtgtcatgcctactggaaagctcgatatcggcgggcatagagttcaagtaaaaccagagtatcgagaccaagcattggaagcaattgatgatatagttgagaagatttag

SEQ ID NO: 360474 - DNA, 2733 bp, Pseudomonas aeruginosa
atgaacaaccgcgttctacacgccgtcaccggtcgtctgtcccttcggccgccccaggcggattcgctcctcaaactggttcgcgcgctcgatgctgcgcctgaacttttgggccacgagcgagatgtcccggcgattctttccacgctgaaggccgagttcagcacgcttgaggatttcgagcgcgagtttccgtcactgtgctttgcgctggcaacaggcgtgggcaagacgcgcctgatgggggccttcatcgcctacctgcatctggcccatggcatcaacaacttcttcgtgctcgcgcccaacctgacgatctacaacaaactcatcacggacttcacgcgcaacacgccgaagtacgtgttcaaggggattgccgagttcgcacagcaaccgccgttgatcatcaccggtgataactacgaccagaccggcgcggcggtggatgatcagccacagggcttcgcccacgacgtgcgcatcaacatcttcaacatttccaaaatcaactccgaggtgcgcggcggcaaggagccgcgcatcaagcggatgaaggaagtgctgggcgacagctacttcaaccatcttgcgaacctgccggacctcgtgctgctgatggacgaatcgcatcgctaccgcgccagcgcgggtgtgcgtgccatcaatgagctgaggccgctgtttggcctggaggtgacggcgacgccattcgtggaatccagcaaagggccggtgccgttcaagaacgtggtgatggattacccgctggcgcgggcgatggaggacggcttcgtcaaagagcctgccgtggtcacccagcgcaacttcgacgccaaggcgcacacgcccgaggagatcgagaagatcaagctggaagacggtgtgcgcctgcacgagacgaccaaagtcgagttgctcacctacgcccgcgagaacagcgtcaagctggtcaagcctttcatgctcgtcattgctcgcgataccacgcacgcagggcaactcctggcgcttctggagtcggaagccttctacgagggccgctatcagggcaaggtgattcaggtcgattccagccgtaccggagcggaagaagaagagatgatcacgcgcctgctggccgtggagagcgtggacgagccgaccgagatcgtgattcacgtcaacatgctcaaggaaggttgggacgtgactaacctttacaccatcgtgccgttgcgcgctgccaatgctcgcacgttgatcgaacagtccatcgggcgtggcctgagactgccctacggcaagcgcacgggcgtcccggcggtggatcgcttgaacatcgtcgcgcacgacaagttccaggagatcatcgacgaggccaaccgcggcgactcgccgattcgcctgaagcaggtcatcctcgatgcgccgagcgccgacgacaagaaagtcagcgtgcaggtcgagtccggggcagccgcgcgtctcggtttgacggaagcgcccgtcgtgatcactggggcttcagccactgacagtggagcggaagtccccgcgcccaaaccggtgttcaccaccgaggcggagaagcaggccgcgcgcgtagttatggacgtcatcggcaagtacgaagtcaagcgcgatctggtgcccaccagcagcgcgctgctgaacccagaagtgcagaaggaaatcctcgcggaggtggcggagcggttgaagcccctgcaaggcgaattgctggcgagcgtggatgaatcagtccccgcacttgatttgtccgccgtggtggcgaagaccaccgaaatcgtggtgcagcagaccatcgacatcccgcgcatcgcggtggtgccgactggcgaggtcacgacggggttccacgccttcaagctggatgtgagccagctccatctccagccgggtgagcgcgagatcgtcatccataacctgcgcaccaacgagcaggacaccctggcctccgaagttgggctcaaggagcagcgcccagaggactacatcgtccacgcgctggtggacttcgacgacatcgactacttcacccacgccgatctgctctatgacctcgcaggccagatggtgcagcatctgcgcggttatctgtccgaggacgagaccgtcaacgtcctcgatcgtgaccgccgcctgatcgcgcgggagatccatgcgcagatgatggcccacttctgggaagaggcgacggagtacgaggtgcaggtcagtcgcggctttaccgaactcaagccgtgcaactacaccgccacggcaggccagacggcccaccacttccgggagaccgtgaccgagaccagtcgcatcaagcagatgctcttcggtggattcgcgcgttgtttgtacccgctacagaagttcgactcggacacggagcggcgcttctccatcatccttgagcgcgatgctgaaaagtggttcaagcccgcgaagggacagttcaaaattttctacaagatgggtaccgagcagccggagtacatccctgacttcgtggccgaaaccgactcgacgatcttgatggtggaaaccaaagcacgcggcgatatcaacacgcaagaggtgcaggccaaagctgctgctgccttgcagtggtgccagcacgcgtcggacttcacggcgagcgccggcggtaagccgtggaggtatctgctcgtacctcacgatgaagtcaatgagtcgcggcggctggccgactttttgaggtttgtgaagacttga

SEQ ID NO: 360475 - DNA, 1704 bp, Pseudomonas aeruginosa
atgagcaagcaaaaactagaactgacatggatcggaaaggagaagcagcctaagctggagccgcgcatcctgctcgaggaccctgagaagtcatatcacgccaagcatcgcgtgacggagggcgacatcttcgacaaccggctgatctttggggacaacctgctggccttgaaggcgctggagcaggagttcactgggaaggtgaagtgcgtcttcatcgacccaccctataacacgggcagtgcgttcacacattacgacgacggtctggagcactcaatttggctggggctgatgcgcgatcggttggagatcatccggcggcttctgtccgaggatggctcgctgtggatcacgattgacgacaacgaggcccactacctaaaggtcttgtgcgatgagatattcgggagatctgcgttcatcgcgtcaaatgtatggcagaaacggtactcccgcgagaatcgggaagcgataggtgatgctcacgactatgtgatggtttatgccaagaatgctgaccgcttcaaacaggttcgcaatcgagtcccaatcaccgaagcacaggccaagatttacaagaacccaaacaatcatccccgcgggcgctggcgcgcgattcccatgactgcgcaaggctatcggccgaatcagatgtacgagatagtcgctccaggtggagcagtacatgttccaccggaagggcggtgctggtcgacaattgagcctgaatttcgcaagctgttggccgaaggaagaatttacttcggcaaggatggcaatgggcagccgaacataatccggtttcttgacgaagtcgaaggcatggttccctggacgtggtggcctcatgacgaagttggacacaacgatgaggcgaaaaaggagatgcatgttctatttggcaaggacaacgcgtttgctacgcccaagccggaacgtttgattcagcgcattcttcacgtagccaccaaccctgatgatttagttctcgattcttttgctggctccggcacaaccggcgcagttgcacacaagatgggccgccgctggataatggtcgaactcggcgagcactgccacacacatatcatcccgcgcctgaagaaggtgatcgacggcgaagacaagggcggtattacagaagcttttggctgggagggcggcggcggcttccgctactatcgccttgcacccagcctgatcgtcaacgaccgctggggcaatcccgtcataaatccggagtacaacgccgcgcaattggccgaggcgctgtccaagctggaaggctttacctacgcgccgtcggaaatgcactggtggcagcacggccactccagcgagcgggacttcatatacgtcaccacgcagaacctgtcctccgagcagttgcaggcactttctgacgaagtgggttccgaccagagcctgctggtgtgctgctctgctttccggggcgtgacgggggcgaaggcggcggaacgttggccgaacctgacgctgaagaagattccgaagatggtgctggcccgctgcgaatggggccatgacgactacagcctcaatgtggcaaatctgccgatggcaaaacccgatctggaggagcctgcggcagccgccgaggccgacaacaagaagtccaagaacagaaaagtggctgctgcgaatttgaatcagggcggtctgtttggggagagcgaataa

SEQ ID NO: 360476 - DNA, 1794 bp, Pseudomonas aeruginosa
atggcagcccttgaaccacagcacatgaccgtcctgaagaagattctggcggagcgcttcgtgccctcattgccgccgcttctggacaccaccaaacctgcggcggaacaacaggccaagcagctctcacgcgccttcagcgccttcgtgctgcacaagttgctcgacatcacgccgcaggaagccgccgcgtcggtcgtagatgatttcaacgacaagggcattgatgctgtccactacgacgaggattcggaaaccctttacctgctgcaagccaagctgaaggagtccgaacagttcaagcaggaagacgcgctgccgttctgtgagggcatccgcttgttgatccgccaggagttcgccgggttcaacaggaacttcacgaaccggaaggcggacatcgaagcggcgctcgatgcgtgcagccatatcaaactagtcgtgccctacacgggcgatggcatttccaaaacggccagcgatgccttgcaggcgctgctcgatgatgaaagcctcgatgaggagcggctcgacaagcaagtggcgtactacactgcagccgaggtcacccgcgacctgctggcggaacaggtctaccagcccgttcataccgacatcggcttgcagaagcacgcgaaggtcgaaaccccgcgcacaacgtactacggcattgcccgcctgaccgatctcgtggcgctgcacaggaaagaaggcaaggcgctgtacgagcgcaacatccgctatttcctcggcagcagtaaatcggatgtcaacaaggctatcaagacaaccttgctcgacgccccggcagacttcttctatctcaacaacggcgtcactgccgtttgcgacctaatagaacccaaggccgcaaagaacggtttccggaaattcaaggttcgcggcttgtccatcatcaacggtgcgcagacggtggcatccgccgccgagttcgtggcccagcatccgggcagcaacatcgacgatgccaaggtgatgctcaccttgatcaaggctccggcggatggtccgttcggcaaacgagtcaccaaggcgcgcaaccatcagaacccggtgcagacggcgaatttcgcctcgctggatgagaaccaggagcggctgcggcaggaggtcgccttgcttggttttacgtaccactatcgccccgaagccctggccaccgactctcagtccatttcattggatgaagccttgcgcgcgctcgcctcgcagcagggtgatccgcgctacaccgtctggctcaagagcgaaccggcgcgactgaccaatccggaatccgccgagtaccaagcattgttccctgccacgctgaccggcgtggccatggtcaatgctgtactgtgccaccgcgccatccgcacgctcgtggtgagctacgagcagcgcgcggcggcgcgcagccaggaaaagctgatctaccgccacgccattcacgtcatcacggctgtgatgatgaagcgcctacgccaacgcatcggcgcggcagccgtcattgacgccacaacgattcccggcttgatcagccagccgctcgacgagctgcggcagcaaacctttgacctcaagcagcagcaactgctgggcgaggggccgttggcctacttccgcaatcagggcagcgtcgtctcgttcatggctgacctgatggccacacactttggcctgactgctgacccgacgctacccactctgcgcaatatcaacactgcggcggatgcctatccgcgcaagcgcctgctcgactacttgtcgggcaaggcaccccaactatga

SEQ ID NO: 360477 - DNA, 2943 bp, Pseudomonas aeruginosa
atgatcgaagcgatgaacaatgccgagccggctgtgttcgcgatcatggattactggacctttgacggctggcttgcactgcgaagacgcctcaaggacgaggatgcccccgccctaaaaaagctcgtccttccagggatcgaacttcggcttgccgcgccaatgaagggacgactgaatgcacacgtactgttctcgaacgaggtcgatgaacaggtgcttcgggatttcatatctgccttgcgcattgagttagtggacaggccgctttctgagtctgcgttgagagagcttgccaggaaggtcggcgaagataagttgaagcatcacggcttcaaaaaagccgatgtagatgcctccgacgagaaggctctgcttgctggggtggtgattgcggagatcaacgctgactcatacagggaagcgattcgcaaggttccgaacgagcacgcgatcggccttatgccgtttgatacgaatgacggactggccgaggtcgggtggcaagagcactacgcctatgccatgaacctctttcaaacttctcctatcttcgagacacgagacactgacctgcgcggcgcttttgttggcgagcagacagctggcaacaccaagtggttcaataactttcaagcgggtctgaataacgttccgcgcctggcagtctcaggaagcgatgcacactgcttcgttgggacacctggcgataacaacaagcgaggctatggcgactttccctccgggaaaaggacgtggctcaaggccgacccgacctttcacggcctcaagcaagccattctcgagccggcgaagcgctccttcatgggtgacaagccgcccaaggttcaagaagtcgagtccaacaagaccttctacatcgagtcaatcgagataagcaaaacaggggacaaggccggcgtcgggcggtggctgcacggctgtgacatcccgctgaaccccgatcttgtcgccgtcattgggaacaagggaagcggcaagagcgctttggcggatgtcatcgcgacgctcggcaactccaagcagtccaagcacttcagcttcttgaagaaggatcgcttttggggcaagaccggcgaacccgcgcgccacttcaccggaacgctgacctggcgagacgaaagcaccgagtccaggccgttgaatgagtcaccttcagaggagaaggccgagcttgttcgctacatcccgcagggctatttcgaagagctttgcaatgaacacgtatcgggtaagtcgaacgcattcgagaaggagctgaggtcagtgatcttctcccatgcgagtgaagaaatgaggcttggcgcgctcgacttcgatcagttgaccgagcagcaggagcagtcgctcaggaatcgattgggtgaataccgtaaggaactggcatcgaccaacgcagccatcgttcgcatcgaggagcagcttcaacccattgagctgaagaaactcactgatctgctcctgctgaagggcaagcagatcgaggaacacgacaagctgaagcctgcggaggtcgcggcgccttccgaagcaatgaaccccgagcaaaaacaagcggctgaaggcttggcggcagcaagtcaacaggcggaagccgccaggaagcgcagccaagagatcgctggtgagaccactgaactggccaaacgtcagaaggctatagggaatattcgcgagcagttgagattgctgcaacgttcttttgatcaagccgaaaagaccgtctccgatgatctcaaacttctcggtttcgcttggaccgatcttgctgccatcgacatcaagaccgccgtcctggacgagaaatcgaccgagttggcgacaaagcaaggcgagataaagatcgagtctgaaaagctggcggaagccctcaatgccgtcaccgcaacccagcaaggtttcaccgccaagttgaacgcaccgcaacagcagtatgaggcctaccagcgccagcttgcggaatggaacacgaagcgcgacgaactcatcggctcaatcaccgagcctgagaccaaggtcggattggaaaccaggatcgagcagatcaaggagcttccgcagcagctcaaggatttggaaacgaggcgtttgcagttgtccggggaaatcttcgacactctcgatgcacagcggcgtgcgcgcgcggaactgttcaagccggtgcaggacctgattcagaagaatgtcctgatacgcgaggactacaggctgcagttccaggcaacgctggcggcatccgctgatgctatcgccgaccaattgtttgctctgatcaagcagacctcgggtgattttcgtggacaggacgaagcactggcaaccattagaagactattcgatggccatgacctgaacaccaaggatggggcgctagccttcattgcatccttgcaggagaaagttttggcagcggcgaaagcctccggctcggatgccggaatattcagcttgcttaagaaggggcagccggctgcggccgtatatgacctcatcttcggcttgaacttccttgagcctcgctactcgctgcttttccaggatacgcagatcgagcaactgtcccctggtcaacgtggcgcgctcttgctgatcttctacttgctggtggacaagggaaagacccccatcattctcgatcagccggaagagaatcttgacaacgagacggtgttccgtctgctcgttcccgttctctccgaagccaaaaagcagcggcagatcatcatggtcacgcacaaccccaacctggcggttgtttgcgatgcagagcagatcatccatgcgaagttcgaccgagcgttggactccaccatcagctatgaatcgggcgccatcgagaacacggggctgaacgaagtcgtcgtgaccatactggaaggtacgaaacccgcattcgagaaccgatacgggaagtaccactga

SEQ ID NO: 360478 - DNA, 2877 bp, Pseudomonas aeruginosa
atgcaacagccccttacgcactatcaaagccagtactacgcatggcttctgacgcgccgcgcggcaggcgactccgtggagtcgctggcatcaacgctggtcgactcgcaggttgatctcaatccgcatcaggtcgatgcggccctcttcgcatgccgcaatcccctttcgcgcggtgtgctcctcgctgacgaagtgggtctcggcaagaccattgaagcgggcttggtgatctcacaacgctgggcggaacggcggcgcaagattctcatcatcgtcccggccaacctgcgcaagcagtggcaccaggagttgcaggacaagttcggccttcaagggctgattctcgaagccaaaagctataacgcgatccgcaagaaggatcgacagaatccgttcctctttgcctctggcccggtcatctgttcctatcagttctccaaatccaaggctgatgatgtaaagagcatcgactgggacttggtcgtccttgacgaagcgcatcgcctgcgcaacgtctacaagaccagtaacgtcattgccaagactctcaaggaggcgctatcgcacgttcacgccaaagtactactgaccgcaacgccgttgcagaactcattgctcgaactctatggactggtcagcttcatcgatgaccgcgtgttcggagaccttgacagctttcgctcgcaatttgctggccgggaacaggccttcaacggcctgcgtgaccggctggctcccatctgcaagcgcactctgcgcaaacaagtccagccctatgtgtcgtataccgcgcgcaaggccatcatccaggagttcacgccgtcgagtgaggagcaagaactgtccggactcgtcgctgattacttgcgccgtcccaacctgaaggccatgcccgaggggcagcgccaactgatttcactggtgctgtggaagctgctcgcgtccagctcgcacgcgatcgcgggcgcgctggagacgatggccaaacggcttcagggcgtgctcgatgaaaccaccgaagttcccgacctgaccgaggaactcgacgaggactacgaatcgctggacgaaaccgccgatgagtggagcgaccaagactccgcttctgcggcaccgaaccgctcagagcgaaatgccatcgcgcaggaaatcgaagagcttcgccacttcaaggcgctggcaaccaacatccgcgacaacgccaagggcaaggcgctgctcaccgcgctgaatcgcgccttcgccgaactggaccggttgggcgcggccaggaaggccatcatcttcaccgagtccaagcgcacgcagggatacctcctcaatttgctggctgacacgccatacggcgacggtatcgtgctttttaacggcaccaatagtgaccagcgcgcgcaagcaatctacaaggactggctgaagcgccacgaaggcactgaccgcatcaccggctccaagaccgccgacacccgtgcggcactggtcgagcacttcaaggagcgcggcaaggtcatgattgccaccgaagccggagccgaaggcatcaatctccagttctgctcgctcgtgatcaactacgacctgccctggaatccgcagcgtatcgagcaacgcattggtcgctgtcaccgctacggacagaagcacgacgtagtggtagtgaacttcgtcgatctcagcaatgaggcggacaagcgcgtttacgaattgctggcgcagaagttccagcttttcgagggcgtttttggggccagcgacgaagtgctgggtgccatcggttcaggcgttgatttcgagcggcgtatcgctgatatctaccaaaactgccgagagcccgaggagattaaatccagtttcgagcaactccgacttgacctttcgggagagatcagcgacgccatggtcaagacgcgtcagctcctcttggagaatttcgatgaggaagtgcaagccaagctccgtgtccgcgcggaagatagccacagcgcccggagcagattcgagcggatgctgatggagctgagccgcgcggaactgcgcgaatttgccagcttcgatgaccacggcttcctcctgcagcgtgtgccgcacggcatcgatgccagtgcacgcgctggaatcgagctgggacgttatgagttgccccgccgctccggcgacgcacacctgtaccgaatccatcacccgctggcttcatgggtcaccgagaaggccaaggcccgtacgcttgaaggtgcgaagctcgtcttcgactacgacgcatacggtaccagagtgagcaccctggagccttatcgcggcaaagcgggatggctcacactgaagctgatcgaagtcgatgcgttgggcaaccaggagcagcacctgctggtaacggccatcacgtcggatggcatcactctgctggaagacgatcccaggaagctactgcgcctgcccgccgttgcccagcctcccagcctgctcagcagctcggccgactccgcactgtcgtccgacgtcgaggcccgcaagaccgagctgctgcgcgagatcaatcagcgcaatctcggttacttcgagcaagaagtacagaagctggatgcgtgggctgacgacctgaagctgggccttgagcaggaaatcaaagagattgaccggcaaattaaggaagtgcgcagcactgccgccaccgcgccgacgttggaagaaaagctgtcatggcagaagaagcaacgggagcttgagggcaagcgaagcaagctccgccgcgatctgttctcccgacaggacgaagtggaagcacagcgcaacgggctcatcggccagttggaattgcagcttcaacagcaagtggaggagcacatgctgttcaccatcgagtgggaactgaaatga

SEQ ID NO: 360479 - DNA, 1215 bp, Pseudomonas aeruginosa
atgaacttcttcgagattgataaaaataccgatttggataccttgcatccaaagtttaatgacttgtgcaaccagtttggctacatgggggccaaggaggtaatctctggctggggacaggattttcatgacaaagataagaaggcaaaaactgaattccaaacaaccttccattcaacgttctgggagttgtaccttcatgctgtacttaaggaactaggttttactcaatgcaccttgcatagccggccggacttcatcattaaagagcctgccaatttttacattgaagccgtagtttctgaaattcgcaaagacggaaagtccgaagagcatagaacgattgaggatgtcgaacggaacttgcatcctatttctacccgcgaagaatttgctgagcttattgatgaagccattgtccggcactctagcgccttcttttctaagctaaataaatatcgtggatttgaaaataaaggcaaaaaaaccaagggttacgttgaatgtgactggatcgatcaaaacacaccgtatattatagcaatttcttcttatgatcaaatttcgtatggccgagaattcacctactcgatgaatgccttgctttacggtcagtatttcgatccactgactaaaaagtacgcaagtaaatcctcaattaaaaaaccaggaacaaatgcagacataaacctgggattatttactgacgcctcacaccatgaagtttccgctgtgattttcagcagcacgctaaccctgggaaagctcgtctctctctacaaatccaacaaccccaccttcgacagtatcttaaatgtcaggtatgttactgagcaacctcactttcggctacatgaggttacttcggacaacccggagaccttgctggacggcctgtatgtgttccacaacccatatgccagcaaccctcttgatatagagctattttcccagttggctcagttctccagggatgcctgtgggtgctaccagcaaggaaatcatccactcatagtctcgcgatttcacaccaatatcttacctcctttgttaatcgaccagttgaagacagagaccttcgagaggttcaaccccgaatactgtgcgaaagagctaaggaaagtggccaatatcaggaaaaaaagggagggcgcaaagtctcaaaaaaagcaaacgaggaaaattgcgaaagcctctcgcaaacgcaacagatag

SEQ ID NO: 360480 - DNA, 390 bp, Pseudomonas aeruginosa
atggacattcgtaaagtcaagaaactgatcgagctgctggaagagtccggtatcgacgagctggaaatccgcgaaggcgaagagtcggtacgcatcagccgccacagcaagaccgccgctgccgcggaaagcgccccggccgctccgaagctgaacggcaacgtggttcgctcgccgatggtcggcaccttctaccgcgccgcctcgccgacctcggccaacttcgtcgaagtcggccagagcgtgaagaaaggcgacatcctgtgcatcgtcgaagccatgaagatgatgaaccacatcgaagccgaagttagcggcaccatcgagtcgatcctggtggagaacggccagccggttgagttcgaccagccgctgttcaccatcgtctaa

SEQ ID NO: 360481 - DNA, 504 bp, Pseudomonas aeruginosa
gtgaagggtgacacctacaaggacaaggtccgcaagaccgaattcaccgaagacgaagacggcaacatcaccgaggtgaggatcctcacagaccgtttcatcccgatcatccgggcatgggaaatgacaccctcctcggtcaatcagggccgcgtgctgaccatcagctcgtcggctgcgaccacggaagaggctgaagagccccaacctgagccggcccccgaaccgctgctgttcagccctggccaagtcgtaatgaccgctgccgtgagccacctggtggaaaccggtcaactcaacccagcgcctttgctgaaccgccatctggcgggagattgggggatgctggaccaggaagactggaacaccaaccagagagccctgaagttcggcgataggctgctgtcgtcctacgacatcgacgccggcggcgaatccaggctctggatcatcactgaggcagaccgcagctcaaccacgcttttgcttcctagcgattactga

SEQ ID NO: 360482 - DNA, 126 bp, Pseudomonas aeruginosa
atgaaccagcggatcatcctcgagcgcggcgacgccctgcatttcaacgcacagaagccgcaccgcatccgctccctgggggagacccaggcggaattgctggtggtgatccacagcgacgaatga

SEQ ID NO: 360483 - DNA, 942 bp, Pseudomonas aeruginosa
atgagccgcaagctgcatatccacgcgcccgcgatccactacttcgacatggttcgccgctgccattcgatccgcgaagccgcgcgacgcctgaacgtcgcctcgtcggcggtgaaccggcagatcctcaagctggaggacgagatcggcgcgccgctgttcgaccgcctgcccggcggcctgcgcctgaccggagccggggagatcttcgcgcgccacgtcaccgtggtcctgcaggacatggagcgcgtgcgttccgaactggacgcgctgcaaggcctgcgcaccggccatgtggagatcgccaccatcgaggcggtgaccagcgatctgctgccctgcgtgctcaaggcgatgcgcgaacgctacccggacatcaccgtcggcgtcaccctgctcggttcccaggcgatacccgaggcggtgagcagcggcgcggtcgacctcggcctggccttcgccctgccgcgcagcgccgacctgcaacaggtcagcgtcggccatttccgcctcggtgccatcgtctccccgcagcacccgttggcgcgacaccaggccatcgccttcgccgattgcgtcgaacatggcctgatcatggccaagagcgagctgtccatccatcacctgctggcgccgctccagcgccgtttgcgcgaaccgcgccgggcggtgctggagagcagctccctggagctgtcgcgacaactggcgcggcgcgggctcggcgtcgccttccagacccgcctggggatcgaggccgacatcgcccagggcgagctgcgtttcctgccgctgaaagacaatggcggcatccacagcgacctcggcctctacgtgcgtaccggccgttacctgccggtggcggtgggcgccctggcccggcagatcgccgaggaagtgcgcctgcgcgagcgcgaggaagcgcgcctgaacgaggcctga

SEQ ID NO: 360484 - DNA, 669 bp, Pseudomonas aeruginosa
  misc_feature (39)..(58): n is a, c, g, or t
atgatctcgtatgccgtcttctgcttgaaaaaaaaaaannnnnnnnnnnnnnnnnnnnaccaccgagatctacacctaagccttcgtcggcagcgtcagatgtgtataagagacagctgcgggggtgggtgcatttcctgctggggtgcatttcctgctggggtgcatttcctgcgggggtgcatatgctgcgggggtcaccgagtacatggtcgacctgccctggcgctcctcgacgctcacaatccctacggaacgcagccacttgatggcctgctgcacagcgcgcttcgacaggcagcaacgcgtcgctatgctgtccaccgccggccaacacaccccttggtcgttcgcctggtctgccagcgagatcagtaccgccttctgcgcggggctcattccctggagaggccagcaggccgacatgatgatcgtgctcacctgcgcgtcctccgcgacactttcttgcgaatcgctatttcgtgtcgcgacacgctctcttgttggatggtggatacctgtgtcatattcggctccgttggatgttcggcaccgccttccggtgcctcctcagaaagcccggttgcagccgggctttttgctgtctgctctactggatgcctgaacaggggtcgtagggatctgaccagcgccagcacaagccagtag

SEQ ID NO: 360485 - DNA, 549 bp, Pseudomonas aeruginosa
atgcgtgtgttgatcctgctcctgatgctcctgctgccgggcctgtcccaggcgcaaccgggcgacgacctgttcgcgccgcgcggcgcgacgcagacggatttcctgccggtggagaaagccttccgcttcacctgggagcgcctcgacgacggccaggtgcaactgcgctggcagatcgcgccgggctactacctgtaccagaagcgcctgcgcttcgacggactcgacccggccttgcagccgcagctgccgccgggcgaaagccacagcgacgagttcttcggcgagtcgcaggtctatcgccagagcctggaactgaccctgccggcggccgccgccggacaactgcgcctgggctggcagggctgcgccgatgccggcctgtgctatccgccgcagagccaggcgctcgacctgggcggtaccggccctgccgccgccgtcgccgggacgagcggcgaagtcgccgaggaccaggccaggttgccggcttgcaggctgccggccctcgtcgcggcctgctgctggccggtagctacgtgctga

SEQ ID NO: 360486 - DNA, 1161 bp, Pseudomonas aeruginosa
atgagtttcttccacggcgttacggtaaccaacgtcgatatcggtgcgcgcaccatcgcgctgccggccagctccgtcatcggcctctgcgatgtgttcacgccgggggcgcaggcaagcgccaagcccaacgttccggtgctgctcaccagcaagaaggacgccgccgcggcgttcggcatcggctcgtcgatctacctggcctgcgaggccatctacaatcgtgcccaggccgtgatcgtggcggtgggcgtggaggccgcggagactcccgaggcccaggccagcgccgtcataggtggtgtcagtgccgccggcgagcgcaccggacttcaggctctgctagacggcaagagccgcttcaatgcccagccacgtctactagttgcgccgggtcattcggcccagcaagcggtggccaccgccatggacgggctggccgagaaactgcgggccatcgccattctcgatggtcccaatagcaccgacgaggcggccgtcgcctacgccaagaacttcggcagcaagcgcctgttcatggtcgacccgggcgtgcaggtttgggacagcgccaccaatgccgcacgcaaggccccggcttcggcctacgccgccggcctgttcgcctggaccgacgccgagtacggcttctggtcctcgccgtcgaacaaggagatcaagggcatcaccggcaccagccgtccggtggagttcctcgacggtgatgagacctgtcgcgccaacctgctcaacaacgccaatatcgccacgatcattcgcgacgatggctatcgcctgtggggcaatcgcaccttgtccagcgacagcaagtgggctttcgtcacccgcgttcggaccatggacctggtgatggatgcgatcctcgccgggcacaagtgggcggtggaccgcggcatcaccaagacctacgtgaaggatgtcaccgagggcctgcgcgccttcatgcgcgatctgaagaaccagggcgcggtgatcaacttcgaggtctatgccgacccggacctgaacagcgccagccagctggcccagggcaaggtgtactggaacatccgcttcaccgatgtgccgcctgccgagaaccccaatttccgtgtcgaggtgaccgatcagtggctcaccgaagttctggatgtcgcctaa

SEQ ID NO: 360487 - DNA, 219 bp, Pseudomonas aeruginosa; identical to SEQ ID NO: 337024

SEQ ID NO: 360488 - DNA, 624 bp, Pseudomonas aeruginosa
atggctgaacaaccagtgcatgttcccgccgggtaccgcatggacgccaaggggcgcctggtacctgaagaaatgatcaagcccatcgacctggagcgggaccgccttgtgcaggagatcgtcgccaaggggaaggccctgaacaaggcgttgctggacttcaaactggcgacattcggcgatatcgaagccttcatcaccctgtcggccgagcagtaccaggcgaaggtaggtggcaagaagggcaacgcctccctggtcagcttcgacggtcgctacaaggtcattcgggccatggccgacaacatcgccttcgacgagcgcctgcaggcggccaaggcgttgatcgacgagtgcctccacgaatggacagaaggcgctcgcgcagaggtcatcacgctgatcaacgatgcgttccgcgtggaccaagcagggaacatccgtaccggcagcgtgcttgccctgcgccgcctgcagatcgatgacgaacgttggcagcgtgcaatgcaggccatcggcgaggctgtccaggtcgtgagcaccaaggcgtacgtgcgtatccaggagcgggtcggggacaccgaccagtaccgctccattcctcttgatatcgcgggggtgtga

SEQ ID NO: 360489 - DNA, 300 bp, Pseudomonas aeruginosa
gtgctgtctttcctgggcgacttcgggatcggcaacctgatggagaaggacgcagcggtcgacagtgccaatcagcgcctgacccagttggcaggtgccaagatgcagcgtggctgcacctatgcctatgaggctgaggccccagctcagcagccgtacgcgccaccacgcgcctatgccccagacgggcccgcatcagcttctgcgcgttctgtcgacgcccagctcgacgagctgaaccgtatgcaattgccctacgaggagtaccagcggcgataccgagaaattacggggcaataa

SEQ ID NO: 360490 - DNA, 555 bp, Pseudomonas aeruginosa
atgaaaatcgccctgatcggcgccaccggtcacgtcggccactatttcctcaacgaagccctgcaacgcggccacgcggtaaccgccctggtccgcgacccgagcaagctggcggcgcgcgacggcctcggcgtagtgcaggcggacgtcagcgacccggcccaggtggccagcgccgtggcaggccacgaggtggtcatcagcgctttcaacggcggctgggttctcggcggcgccgggagcctggagatcgcccccggccagcgcctggtggacagcccggaattccccgagcagtggaagcagggcgccctcggcgccgccgacgccctcgaccaactgcgcggcgagcaacgactggactgggtgttcctcagcccggcgatgctcctcgaacccggccagcgcagcggcaagttccgcctcggcggcgaccaggttctgttcgacgccaagggcgagagccggatttccctggaagacctggcggtagccatgctcgacgaggccgagcagccccgtcatcatcgccagcgcttcaccgtggcctactga

SEQ ID NO: 360491 - DNA, 639 bp, Pseudomonas aeruginosa; identical to SEQ ID NO: 341596

SEQ ID NO: 360492 - DNA, 1227 bp, Pseudomonas aeruginosa
atgcgcctcgccggcctgcaggcgcagggcgagcaacagggccagcaccgccagggcggtgccggtgaggaagccgccggcatagccgatctgcgcggtgaggctgaccaggaacgaagacgccagcatctcgccgaggtctcgggtgctctgcaccgcggtgacatcggtgccggcctggccgccctggccggcgaagcgcatcgccgcggtgaggatcgccaccgaggtgatgccggtagccagcgagccgatcagcacgcaggtccacgccaatccttcgctcagtgccaaccagcgaccggcctgcagataccagagcagcgccgaacaaccggcgagcaccacgccaagggcgaaaccgcgccacaggccgatccgcctgaccagccaggcgccgccgccgcagccgaggaataccgtgaccaggccaccgctcatgcccagccggccgatgtcctgcaaggcccagccggcatcgctgaggtacagcttggacaggccgaagccggataccgcggtcatcgccgacagcagtgccagcgccagcagcgaaggcgccagcggccgacgcaggaagcgcagcaggctggccttggcggccggtgccggggggagttcgtgggggtcgccgcgccccagggcgagcacgcagcacaggcttgccagcggcacgcaggccatgaccaggaacgccgcgcgctggccgaaatgcccggcgaggatcaggctgccggcaccgccgccgaagaagccgatcatcaccccggcgatctgtaccgcgttgaccttggccagcagctcgccgctgaagtgctccgccgccatgccgtcggtggcgatgtcctgggtcgcgctggccagcgaagccagcgccagcaggccgaccgcccaaccggcactggccacgccgaggccgagcgtcgccaggccgagcaggcaggcgaggacgatgcattgcatcggcaggatccagctacgccgccggccgagacggcgcgaccaatggttgtcgacccagggcgcccagaggaacttgaccacccagggcagccccaccaggggcaggaaggccagcgcctgcaatggcgcgccatcctggcgcaggagggtgggcagggcgtccatggccaggccgatgggaatgccctgggacaggtagagcaacgccagggtgatgaccaggcggcggtggcgatacagctcaagcatggtggtctccggtga

SEQ ID NO: 360493 - DNA, 303 bp, Pseudomonas aeruginosa
atgtcggcctgctggcctctccagggcatgagccccgcacagaaggcggtgctgatctcgctggcagaccaggcgaacgatcagggcgtgtgctggccggctgtggacagcatagcgacgcgttgctgcctgtcgaaacgcgcggtgcagcaggccatcaagtggctgcgtggcgcagggattgtgagcgtagaggagcgccagggcaggtcgaccatgtactcggtgacccccgcagcatatgcacccccgcaggaaatgcacccccgcagcatatgctccctgtctcttatacacatctga

SEQ ID NO: 360494 - DNA, 411 bp, Pseudomonas aeruginosa
atggcgagagcctggatcaacaactggaagacgacgctgagcgtagggctgtcgcctggcgcgttgagcctgacggtgcctgatgctgccgccgcgctgctgccgctatccggaggaagctgggtgctgttgacgctcgcagatgacgccggtgcgcagcatgaaatcgtgaaagcaaccacccgcgccggtggggtggtgacgatcgagcgcgcccaggaaggaacctccgacggcaactggccggcgggaacggcgatctatgcagccgtcacggccggcgacctcatgacgctccaggcgcgcatccaggctctggagtccggggcgtctggcggcacccttgtcgacgaaaccggcgcaacgctggtcgacgacgccggcaacaacctgatcatggagaacatttga

SEQ ID NO: 360495 - DNA, 759 bp, Pseudomonas aeruginosa
gtgcgcgtgctgggtgtggagcaagagcagtcggaaggcttttatagagatctgcactcaaggtttatgcggttaattcgtgtgcctagaaaatggcaaaccttcaagaatgacgtattagcatgtcaagttcttggtgatgtgagtaagcatttagatgctaacggtgtttttcagacgccattactcattacttgggattctactcagcacgcacttagacgtatatacagagaaaaatttcctcatgatgagtgggttgtctatcctcctcatcgtgcttccgaacggctctctatgattgatcttaagataaatagcgaagatcttaaggatggagttttggcaatcattgatgaagattttttcaaagatgccaggagcggaagcttattggatactctcgctattttccttggggatgatcaggctgaaagtggagctgttgttagtctcttgacaaaacttagtcgaagaataaccgaagagcctgatgatgttaggcatacggatttcgatgctcagaatactttgaatgaagtattgatttttacgcagcgggagtttaggcgggagttttctacggtaagaaagctttttgcggaagaacgatttgtgggtgatatttatacattgctttcaaataccgttaagagtgagtttggtatgcgtcagaaagaagagtatgccgaaagtcttaggactctcatcgctcagattgagtctgaggagcgtgatgggagcgaggagagaagttga

SEQ ID NO: 360496 - DNA, 282 bp, Pseudomonas aeruginosa
atggccgtcctccagacccataaagtcgtggcgcaactgcccgcgtcgctggagccgaacgcgctctacttcgtccggcgcagcaccggctacgaccagttcgtgacaaacggcgcgggcgtggtggtggcctatccgatgaacgtgcgtatccccgcggctgtgccgggttatctcgccgatggctctatgctgcggctcacaatgaaccctgacagccaactgccggcgtacaccgccggcggcgtaactctccacctgcaggtgcttttcaatggctga

SEQ ID NO: 360497 - DNA, 291 bp, Pseudomonas aeruginosa
atggtggtcgaggcaggcatcgaagccgagcacctgcacggcgtggcggcatttttccgcaccgccggcgacgccgaccactcggcagcccttgagcttgccgatctgtccgacggtggcgccgaccggcccggtggcggcggccaccaccagggtctcgccggcctggggcttgccgatgtcgagcaggcccatgtaggcggtgaagccgggcatgccgagcaggcccagggcgtaggacggatgctccggcgactcgcccaggcgcgccaggccgctgccgtcggatag

SEQ ID NO: 360498 - DNA, 1455 bp, Pseudomonas aeruginosa
atggtccatgccgatctccgggcggtcggcaccgtaggtcgaactgaggtcccagtcccaggcgccgaacagctcgccgccacgggcgccgagggtcagcgaatagtcgtcctcgtcgctggtgatgcgcggggtgaagccgttcggatagagtcgcggcgccagggacggcaactggtagatctgcgccgaggacaccgagcgatgggtataggtggcgaagctgtacagctcgacgttgtcgtccagcgccacgccggcgttgtaggccagcgcctggcggtgcagcgaagggtcgccgatggacgggttgccgtagtgcccggtacgctggtcgatgccggcgcggatggtccgcgcctgttcgcggaactgcgcgctgaggttgaggaaaccgctctcgccgaaacgcaggccgccattcaccccgccgttctgggtcaggccgtcgccatcgccgtagcgaccgttgtcgtaggcgagccggccgccgtggtcggccgacttgaggatgacgttgatcaccccggcgatggcgtccgagccgtactgcgccgaggcgccgtcgcgcagcacctcgatgcgctcgatggcggcgagcgggatggtatccaggtcgaccccggtggagccgctctgcagcccgccgctgacattgatgttggcggtctcgtgacggcgcttgccgttcaccagcaccagcacgtggttgggactcaggccgcgcagcgactgcgcgttggtcagcgccgaagcgttgtaggcctgggcctggcgcgacagcgagggcagcaggcgcaccagggcgtcgcgcaggtcgccgctaccactgtcgcgcaattgctcggcgctgaccacatcgatcggtgccaggctctcgccggccttgacatcggccttgcgggtgccggtgaccaccaccgtggccagggtcccggcgggcttcgccgccggcagcgcggcatccggcgccgtggcgcgttgcaggctgagcacgccggcggcgctgcggctgtattccaggccgctgccctgcaaggcccgctgcagcgcctgctcgacgctgtaggagccctggatcgccggtgccggcaggccctccaccaggtgctggtcgaaggcgatcggggtgcgactctggcggactatgctcagcagtacctgggccagttcgccggccgggatgtcgaagcgctggatctcggcgctgctggtggcgcggacctcctctgccgccgactcgccgggctggccaaggcaggccaggccgaccgcgcagagcacggggacaagtcgaagacgtggcgaacgcgggttggacatggtcggttcatccttgatcggttgcggatgccaccgagtgcaattgcccgtaccgattttcagccgcgcggcagaccgattgcgcataaggttatgcctcgccctcccgagcccggcagcgccagacactga

SEQ ID NO: 360499 - DNA, 1215 bp, Pseudomonas aeruginosa
atgacgccgggcgagttcgagcatggccttctccaggttcggctcgccacggccgatgctgaccagacggccgccggcctggagcagggcatcgctgatctccagggtcaggtcgatgcctttctgctgcaccaggcgcgagaccaccgcgaacagcggccccttgcccggctccaggccgaaacgctcctccacgtagcgcgtgttggcgcgcttgccggcccattggcgggcgctgaagcaggcgaccaggtgcggatcgcagtgcggttgccagctatcgtcaataccgttgacgatgccgctgagctgacgcttctcgaccttgtacttgaggatgccgtgcaggccgcagccgtattccggggtagtgatttcctgggcgtaggtctcgctcaccgtggtgatgtggtgggcatgggcgatgccggccttgaggaacgacaggcgcccgtggaactccatgctttcgtggctcagcgcttcgtcggggaggcccagttcggcgctgcattgcaggtcgcagaggccctggtaggcgaggttgtggatggtaaacaggctcggcgtgcgcacgccgttccaggccatgtaggccggcgtcagcgccgacggccagtcgttggcgtgcaccaggcccggttgccagccctgggcgccgcgtccaccggcgatctcggcggcggccaggcacaggcgggcgaagcgcaggtggttgtccggccagtcgttgccctggtcgtccatgtacggcgtaccctcgcgctcgtagagcagcgggcagagcaccagcatgacttccaggccgtcgtcgagggtcaccaggccgatctcgcagggcgggatcgccgcccggccgggcaggctgccgatgatccgcaagtcgcggcagcgctccagcacctggcgatagccgggcagcaggactcgcaccgaatgctcgcgcttgaggaccctcggcagcgcggcggaaaagtcgccgagtccgccgaccttgacgaaatcgctgagctcggcggtaacgaagagtatccgatccctctgttgcggcgggtcctgcgggtgcagcagcgacggaaaagcggtcagtaccgcgggttcttccaggcaaacgcctgcaacagaatgtcccatgtcatcctccggtcgtacgttgtccttggcgttggtcggtcggactccgtcgcgccgtggcatgggcgaagtccttgctag

SEQ ID NO: 360500 - DNA, 576 bp, Pseudomonas aeruginosa; identical to SEQ ID NO: 341314

SEQ ID NO: 360501 - DNA, 588 bp, Pseudomonas aeruginosa
atgacgccggcctgtgtacccctgcgcgtagagcgcggggcgacgttccgcgacacgatgcggatcatgcaaccgagcctggtctaccggccgatcactcagatcgcgccgactgctcccgtccggctgaccatccctgggcacggattgcccgtcacgtggctggcctggatagatggcgtccagggcatgcccgaactgaaccgcgcccggcttcggcaactgcctcacctggtcgcgtccatcgacgacaacaccgtcgagatcaacctgctgtcagccgttgggctggcgcctgttggcgggcaactgatctaccagccaccggttgacctcactggcgccgaggtgcggatgcagatccgcgatgtgccaggcgggacggtgctgatgacgctggcgctcggctccggccttgagatcgctggcgccggaacgatctcgcgggagatatcggcctccgataccgcggcgttggcatgggcgtcggcggtctacgacgtggacgtgacatacccagatggcacggtccaccgctactacagcgggccgatcactgtgagccgtgggggagggtgcgatggatga

SEQ ID NO: 360502 - DNA, 1371 bp, Pseudomonas aeruginosa
atgtcgaatcctccccccaccgcagaacgaacccagcttcgcaagtccctcaagctgtggcagatcgtcatgatcgggttggcctacctgaccccgatgaccgtcttcgacaccttcggcatcgtatccgggatttcccagggacacgtgcccaccgcctacctgctggccctcgccggcgtgctgttcaccgcgatcagctacggcaagctggtccgccagttccccaccgcaggctcggcctatacctacgcgcaacgagcgatcaatccccatgtcggcttcatggtcggctggtcgtcgctgctggactacctgttcctgccgatgatcaacgcactgctggcgaagatctacctgaccgcattgttccccgaggtcgccccgtggatctgggtggtgatgttcgtgctgatcatgaccctcatcaacatcaagagcgtgaacctggtcgccaatttcaacaccgtcttcgtgctggtccaactggcgatcatcgtggtcttcatcggcctggtgattcacggcctgaacaacggggaggggaccgccacggtgctcagtacccagccgttcttctccgagcacgcgcatctctcggcgatggtggcgggggcgacgatcctctgcttttccttcctcggtttcgacgcggtgactacgctgtccgaggaaacccgcgacgccggcagggtgatcccgcgggcgatcttcctcaccgcgctgtacggcggggtgatcttcatcaccgtgtcgtatttcctgcagtcctatttcccgaccaacgtacgcttcaaggaacccgacgcggcgctgccggaaatcgccctgtacgtcggcggcaagctgttccagtcgatcttcctttgcgccaccttcatcaataccctggcgtcgggcctggcctcccaggccagcgtgtcgcgcctgttgtacgtgatggggcgggacaacgtgctgccggagcggatcttcggcttcgtccacccgaaatggcgtacgccgtcgatcaacgtgctcatcgtgggcatggtggcgctctcggcgatctccttcgacctggtgaccgcgaccgcgctgatcaatttcggcgccctggtggccttcaccttcgtcaatctctcggtgatcgtgcatttctatgtgcgcggcgggcgcaaccgcagcctcaaggagcatttccactacctggtcctgccattgctcggcgcggccatcgtcgcggtgctctggctcaacctggaaagcacctcgctggtgatggggctgatctgggccggactgggcttcggctacctgttctacctgactcgcagcttcagccgtccgccgccgcgcttccaggagagcgagctgagcccgacccagtga

SEQ ID NO: 360503 - DNA, 303 bp, Pseudomonas aeruginosa
atgatcatcaagttgtcaccgtacgcaccactgccaggcagcaacgagcacctgtcgctgagcaggactggtgatgtgctcaccgtgaacggtcagccgttcgacttcacaccgctaccggagggcggtgaactgccggctgaggcgattggatcggagtggttcgctggttccgtagtgcgacgcgccggccgcatccaactgatcctgcggttcccgcttgccgccgatgccagtgccgccgctcgcttccctgaaccgctgatgatcgaggccgatggcccagtggagttaccgcgatga

SEQ ID NO: 360504 - DNA, 162 bp, Pseudomonas aeruginosa
atggctccctccggctccagggcgtcgcgtgccgcgatatccgcaacgaacaggatcggcgcgccggtgccgggcaagctggccaacgcctcgttgatcaacgcattgatcatcgcgctgttgccgatcgagcgcgccacgccggcgctgttcgtcaggtag

SEQ ID NO: 360505 - DNA, 282 bp, Pseudomonas aeruginosa; identical to SEQ ID NO: 354062

SEQ ID NO: 360506 - DNA, 282 bp, Pseudomonas aeruginosa; identical to SEQ ID NO: 360496

SEQ ID NO: 360507 - DNA, 924 bp, Pseudomonas aeruginosa
atgctcgcgtacgccggccagggtgcgcgagtcgtccggcgcgatgcctgcgatgtcgcaatcctcgcagtagagcccgcccatccccgccagcagcggagaggtcgcagcccacagctgggtggcagccccctgctgcggggtcttgagcgtgtcggggctggccggattgccggcttcgtccatccagcccagggcgatcatctccgcccgtggaacatggcgttgcaacggtgtggcgatgctgcccggatgcaatgcgaaggcatgcacacccctctcgcgacccagcgcatccaactggatggcgaacagggcgttggcagtcttcgactgcgcataagccagccacttgtcgtagccccgttcgaactgcacgtcgtcccagcggatcgccgagtagcggtgcccggcggaggacacggcgaccactcgcgcgtcatccgcgagcgacggccacaagaggttcaccagggcgtagtggccaaggtgattggtcgcgaactgcgcttcccagcccgggcctacgcgggtctcgggacaggccatcacaccggcgttgttgatgacgatatcggcacgacggcgcgaggcggagaaggcctcggcgaaccgacgcacgctggccaactcggccaggtcgagcgcctgcacctcgacttcgtcgagcccgagcagcgcctcccttgccacatccggtctgcgcgccgtaacaatgacccgcgcgcccgcgtcggccagcgccttcgtggtttccaggccaagaccggagtagccgccggtcacgatggcggtctttccggagaggtctcgccccgccatcacctcgctggcctgcgttttcgctccgaatcccgaattgatgggggtttgcctgatagccatgagaactctcctcgcatgcggaagcggccaggcggatag

SEQ ID NO: 360508 - DNA, 675 bp, Pseudomonas aeruginosa
atgctccgaaatccgcacctgctggatcttcgccacgcggggctcggtgaagtcatcgcccttgcgtttgagcaaggtatcgcgctcggcggtcaaggcatcgacacccatgaaatacaggggtatctgctggttattcacctcggtgcggaaaacgctgcgcgagccatcctgcccgacctctcccagtgcgcccggggtcgtcggcttgacgatccccagccgggtggcgatctggatagcctcgttgagctgctggatacgcgaatcgcgcaccatcttcagccgcccgcgcaacgccttgagctcatcctccaggccggcccgccggatgctgtccgcttccagcaaccgggcgatcttgccctccttggtagcctggtaactggcacgcttgccttcgatatcctgctcgaggaattgcaggcgaccgtcgatacgtgcctggaggtcgtccaggattcgctggcgctcgttctcgatggtcgacgcgagcatgccgttgagaatggcggcaccatccatgccctggggatactgcatggacaagcggaagaaaggcgccgcctgggggtccttcttcaagtccgcctgctgcatgctgaaggcatcctggttgaacttccagaaagcctgctcgggggacaggccctcggcgttcaattgctggaatag

SEQ ID NO: 360509 - DNA, 582 bp, Pseudomonas aeruginosa
atgactaatgccacgaacgacgtccgccaacatatcctcgataccgcccggatcattatcgcgggaaagggcttcagcgccgtgggcctgaacgaggttctccaggcttccggcgtgccgaagggttccttctaccattacttcggctccaaggaggcctttggcgaagcgctgctggaggattacttcgccgattacctggcttcgctcgataatctgctgagtcgtcctgatctttccgcagcacagcgactgatcgcctatttcgagtactggctggagacccaggcagcctgtgacccgaagggcaagtgtctggcggtcaagctggctgcggaggtcagcgacctctccgaggcgatgcgtttagttcttgaacagggcaccacgcgagtgatcgcgcgtttggccagcgccatcgaggatggcgccagcgacggctcgcttccggttgagctggatgccagcacaacggcgaacacgttgtaccagttgtggctgggcgcgagcctgtgcgccaagctcacgcgcgaccgtgtacccatggggaggccgcgctggctgctacgcagggcctgctag

SEQ ID NO: 360510 - DNA, 1032 bp, Pseudomonas aeruginosa
atgaccactgcgatcctgcaaacccgcatcgtacttgcctcacgcccctcgggtgagccgacgccagacgacttccggctggaacaggaatcgctgcctgagccaggcaagggccagctcctgctgcgcacgctgtacctctcgctcgacccgtatatgcgggggcgaatgagcgatgctccgtcctatgctccacccgtagcgctaggcgaggtgatgaccggcggcgcggtgagccgggtggaggtttcgcacgacccggcattcaaggttggcgacctggtcgtcggcgacacgggttggcagagccatacgctttccgacggtcgtggactggtcgtgctcgattcccggaccacgaatccttcgctggcgctgagcgtgctcggcatgcccggcttcaccgcctaccacggcctgctgaacatcggccggccgcagccgggcgagactgtggtcgtcgcctccgccatcggcgcggtcggctcggtagttgggcagcttgcccggctaaagggcgcgcgcgccatcggcatcgccggcgggccggaaaaatgccgctacgcgcgcgaagcgttcggcttcgatgtctgcctcgaccaccgcgcgcccgactttgccgaacaactggctaccgcgacgccgcagggtatcgacgtctactacgagaacgtcggcggcacggtgctcgacaccgtgctgccgcgactgaacgtcggcgcccgcgtgccggtgtgcgggctgatcgcccactacaacgacaccgacctgccacctgacccggaccgcatgccgatgatgctggggctggttctgcgcaagcgcctgctgctgcagggtttcatcatcggcgaccactacgccgacggtttcgcggcgtttcagcgcgacatgggcgcatgggtcgccgagggcaaggtctcggtccgcgaagacttcgtcgagggcctggaacatgcgccccaggcgctgatcgacctgctcgccggcaggcacttcggcaaggtcgtggtacgagtcggcaccccctga

SEQ ID NO: 360511 - DNA, 678 bp, Pseudomonas aeruginosa
atggccaatattctcgtcatcctcacttcgcacgaccaactcggcaacactggcaggaaaaccggcttctggctggaggaactggctgccccctactatgccttcctcgatgccggcgcgaagctgaccctggcctcgcccaagggcggccagccgccgctcgaccccaagagcgacgaacccgacgcccagaccgaggcgacccgtcgcttcctggccgacgctgacgcggtcaaggccctggccaacacccgcaagctggccgaggtcgccatcggcgacttcgatgcagtgttctatcccggcggccacggcccgctatgggacctggctgaagacccggtctcgatcggtctgatcgaagcggcggtcaaggcgaacaagccggtcggaacggtctgccacgcacctggcgtgctgcgccacgtcaaggatgccgacggcaagccgctggtcgccggcaagcaggtgaccggtttcagcaacagcgaggaggctgcggttggcctgaccgatgtggtgccgtttctggtcgaggacgtgctcaaggccaatggcggtcattacagcaagggcggcgactggcagtcccacgtgctgaccgacggccttctggtcaccggccagaaccctgcctcgtccgccgacgccgccaaggcgctgctcgcccttctgtga

SEQ ID NO: 360512 - DNA, 306 bp, Pseudomonas aeruginosa
atgtccgcttacgtggttttcctgcgcgaacgcaccctcgacgccaccgaacttgacatctatgcgaggcaggctccagccgcgcgcgaaggacacgatctgacgccgctggcgttctatggcgatttcgaggtgctggagggaccggcgatcgagggcggcgtgatcctgcgcttttccgacatgcaggccgcacgcgcctggtatcacagccccgcttaccaggcagcacgggtgcaccggttcaagggcgcggactaccgcgtgctgttgcttgacggcatcggcgcgacacctgcggcctga

SEQ ID NO: 360513 - DNA, 831 bp, Pseudomonas aeruginosa
atgacttcccatcagatcgacccagcctccgcatggcaggcccgctatggcgaggccgccgccctgccgctgccccctgttcccgccgcgctggccgcgctgctggagcaccgatcagtgcgcgcctacaccgatcaaccggtcgacgacgaggcacttcaactcgccatcgctgccgcgcaatcagcctccagttcgtccaacctgcagccatggagcgtgatcgccgtgcgcgaccccgcgcggcgcgcccgcctggccgcgttggccggcggtcagcgccacgtggccgaggcaccgctgtttctggcctgggtcgccgactggtcgcggctgcgccgactcggtgccgcgcagggtgccgcgaccgacggtatcgattacctggagagctacaccgtcggagcggtcgacaccgcgttagccgcgcagaacgcggcgaacgccttcgaagccctggggctgggtatcgtctacatcggcggcatgcgcaaccatccagagcaggtcgccgctgaactggggctgccgcaggacagtttcgtggtgttcggcatgtgcgtgggccatcccgatccggcccgcccggccgaagtcaagccgcgcctggcacagccggcggtgctgcatcacgaacgctacgacgctgccggcgaggccgccgcggtggcgcactacgacccgctgatgcgccgcttccagcaggagcagcagcgtgacgaccggccctggtcgcaagtgtcggtgcaacgcatcggcagccccggcgcgctgatgggccgccatcgcctgcgcgaagccctgaacgcgctcggcttcaccctgcgctga

SEQ ID NO: 360514 - DNA, 1392 bp, Pseudomonas aeruginosa
atggcatacgccaccatcaacccctacaccggcgagaccctgaagaccttcccggacgccaccgacgccgaggtggaacaggccatcgccgctgcgcacgaagccttcctgtcctggcgcgagcgctcgttcaccgagcgcggtgccatcctgcagcgtgccgcagacctgctgcgcgccaaggctggcgactacgcgaaactgctgaccctggagatgggcaagatcaccgccgaggcactggccgaggtcgaactttccgcgcgcatcttcgagtattacgtgaagaacgccgaggccctgctggcaccggagaaactgaccgtggccgatcccgccgagggcgacgcgttgctggtacacgagccgctgggtgtgatcctggcgatcgagccgtggaatttcccctactaccagatcgcccgcatcctggccccgcaactggccgcgggcaacacgctgctgctcaagcacgcctccaacgtgccgcagagcgcggatgccttcgagaagctgatgctcgaagcaggcctgcccgcgggcgccttcaagaacctctatgcggcgcggcaccacatcgagatcatcctcaacgacccgcgcgtgcacggcgtggcgctgaccggctcggaaggcgcaggcgcggtggtcgccgcccaggctggcaaggcgctgaagaagtccacgctggaactcggtggcgccgacgccttcgtggtgctggccgacgccgagctggacaagaccgtgaagtgggcggtgttcggccgccactggaacgccggccaggtctgcgtgtcctccaagcgcatcatcctggtcgaggccatctacgatgagttcctgcgccgctacaccgagggcgtggccgggctcaaggcgggcgatccgttcgaccccgctaccaccctggcgccgctgtcctcgcagaaggccgccgacgacgtcaaggaacagatccgccaggccgtcgcccacggcgcgaccgcgaccgaggtggggcccaaggtgccggcgcaaggtgccttcgtgcagccgacgatcctcaccggcctgactccggacaacccggcctactactgggaattcttcgggccggtatcgctggtctaccgcgcccacgacgaggaagaagcgatcgccatcgccaacgactcgccgttcggcctgggcggctcggtgttcaccgccgacgccaaacatggcgccgaagtcgccaagcgcatctccaccggcatggtgttcgtcaaccacccgaccatggccaaggccgacctgccgttcggcggcgtacgccgctctggctacggccgagagttgctcggcctgggcctcaaggagttcgtcaaccacaagctgatcgacgtggtcgacatcgacgcgccgttctga

SEQ ID NO: 360515 - DNA, 1419 bp, Pseudomonas aeruginosa
atgagtacatccgatctgatcacgcgcctgcctggcgtcgtcgcggcgatgaagcaggcgcacctgagcgatggcccggcggacgccgaacagcggcgggatcggctcgctcgcgccgaacgcctgttgtccgataaccgcgcgcagctggaatcggccattcgcgccgattatggccaccgcagcccctatcagacactggccaccgatgtgcttgcgcccatcaagagcatgcgccacgcgcgcgagcaactcgaacattggatgcgacccgaagcgcaagacgccggtatgccgggcgtgcaggcacgcgtggaataccagccactcggtgtagtaggcatcatcagcccctggaacttcccgatcaacctctcgttcgggccactcgcaggcgtgttcgccgccggcaaccgcgcgctgctcaagccgtccgaactgacgccccgcacctccgatctgctggccgagcagattccgcgctatttcgatgcgctcgaattcggcgtcgtgctcggagacgccgaagtcggcgccgccttcaccgcgcaaccgttcgaccatctcatttacacgggcagcacggcagtggggcgtcttgtgatgcgcgccgcgtccgagaaccttgtaccggtaacgctggaacttggcggcaaatcgcccgtgctcgtcgacgtggacgccgacatcaagatagtggccgagcgggtgctcacatccaagacattcaacgccgggcagatctgcatcgcccccgattatgtgcttctgccgccgtccgcacgcgaggcgttcatcgagcacgcccgcgcgttcgttgcggccacttatccagatctgggaagcaacaccgattacaccgccgttgtcaacgatcggcacttccagcgcctgcaggtgttgctcgatgacgcccaggccaagggagcaaccgtcatcagtcttgcaccggacggcgaagcagatgccgatcctgcgacccgcctgctggcaccgacgcttgtactggatcccgacgatacgatgcgcgtgatgcaggaagaaatcttcgggccggtcctgccgctggtgaactgcccggatcttgaccatgccatcgactacgtcaatgcccatccgcgtccgctggccgcgtactacttcggcagcgacgcaacgcgtcaaaagcgcttcaccgaacgcaccacctcgggtgcagcagtgatcaacgacacgctgatccacgcttttatcgaggatctgccgtttggcggtatcggcccttccggcatcggcgcctaccacggcatccatgggttccggcgtttcagccacgccaaggccgtggtgatgcagagcccggacgggacctccagcctggcgctgcgcgcgccctatgccgacaagcagaaagcggtcgaggcacagctgagcgaatga

SEQ ID NO: 360516 - DNA, 411 bp, Pseudomonas aeruginosa
atgaagattttctacaagacccgcgccaccgccgtcggcggccgttccggccgcaccacgctggacgatggcagcctcgcgctggatatggccatgccggggtccggcaaggctggcgtcaaccccgagcaactgtttgccatgggttacgccgcctgcttcgacaacgcgctgccggtggcggccaagcaactgaagctggcacctactgccaccaagacctcggtcgaggtcggcatcggccagaacgccgagggcggctacagcctggacatcgacctgtatgtggaagtccagggcctgagcgaagccgacgcgcagaagctggtggaaaccacccaccaagtctgcccgtactcgaacgccacccgcggcaacgtcgacgtgcgcctgcacaccagcgtcgcctaa

SEQ ID NO: 360517 - DNA, 1056 bp, Pseudomonas aeruginosa
atgacagtaaaagcctatggcacccatgccgctgacacgccgctggcggcgctcgacattgttcgccgcgagccggggccgcacgacgtcaagatcgacatcgcctactgcggcgtctgccattccgacctgcaccaggcccgcaacgagtgggccaacacgctgtacccctgcgtgcccgggcacgaaatcgtcggccacgtttcggccatcggcagtgcagtgaccaagttcaagatcggcgacacggtcggcgtcggctgcctggtcgacagttgccatcattgcccggcctgcgacgcgggcctggagcagtattgcgagcacggccaggtcttcacctacaatggcccgacgcatgatgcgcccggccacaccctgggcggctattcgcagcagatcgtagtcaaggacgacttcgtcctgaaggtttcgcaccccgaggcgcaactggccgccgtggcgccgctgttgtgcgccggcgtcaccacctggtcgccgttgcgccactggaaggtcggtcctggccagaaagtgggcatcgtgggtatcggcgggcttggccacatgggcatcaagctggcacatgccctgggcgcacacaccgtggccttcaccaccagcgagagcaagcgcgccgctgcgctggaactgggcgccgacgaagtcattgtctcgcgtaacgctgaagagatggcggcgcacgccaacagtttcgacttcatcctcaacacggtcgcagccagccacgacctcgacgccttcactggcctgctcaaactcgacggcaccatgaccctggtcggcgtacccgagcacccgcacccgtcgccgagcatcgccaatctcatcttcaagcgccgcagcatcgccggctcgctgatcggcggcatcgccgagacccaggagatgctcgacttctgcgccgagaaaggcatcgtcgccgagatcgagatgatcgccatccagcagatcaacgacgcctacgagcgcatgctcaagagcgacgtgaagtaccgcttcgtgatcgacagcgcgagcctggccgccgcctga

SEQ ID NO: 360518 - DNA, 1014 bp, Pseudomonas aeruginosa
atgaaagccatcgtgacacgcagccccggcggcctggactgcctcgaactacgcgaactccccgaccccggccagcctggtccaggtcaggtccgtgtgaagctgcacgccagctcgctcaacttccacgatctgctggtcgccaacggcggcatccccgccgccgacggacgggtactactatccgacgccgccggcgtcgtcgaagaggtgggcgaaggcgtgaatgagttcaagcccggcgaccacgtcgtctccggcttctttccgcaatggaccgacggcctgccgttcgccgcggtcggcaactttcagggcacgccgggcgacggcatcgacggctacgccaccgaagtcgcggtgcgcgcagccgccgacttcaccctggcgccgcgcggctggagccacgccgaggcggcgaccatcaccaccgccgggctgaccgcctggcgcgccctggtggccgacggcccgctcaaggccggcgagagcgtgctggttctgggtagcggcggggtttcggtggcggcgctgcaaatcgcaaaagcgatgggcgcgagcgtgattgccacctcctcgtcggatgaaaagctcgaacgtctgcgctcgctcggcgccgaccacctcatcaattaccgccgcacgccgcaatggggcaagcgggtgctggagatcaccggcgggcgcggcgtcgatcacgtcgtggaagtcggcggcccgggcacgctggcacagtccattcatgcggtgcgcgtgggcggtcatatcgcgctgatcggcgtattgaccggccgaggcggcgaggtgccgactgccgtattgatggccaggcaggcacgcctgcagggcctgatcgtcggcagccggcgcctgcagcaggagtacgtggcggcgctggagcagaccggcatccacccggtgatcgaccgcagcttcccgttggagcagcttgctgaggctttccgctaccaggagagcggccgccgtttcggcaaggtcgtggtggatatctga

SEQ ID NO: 360519 - DNA, 585 bp, Pseudomonas aeruginosa
atgaccgaacacgtcctgtcggtcgcattggacgatgcctaccggctgatcacccatggtccgaccgtccttgtgtcggcccgccacagtggagtcgacgacgtcatggccgccgcctgggcctgtgcgttggatttttcgccacccaggctgaccgtggtgctggacaagatcacacgaacgcgcgaactgattgaggccagcggtgaattcgtcatccagattccaactgtcgcgcaagcgcggctggtgcacgaggtaggctcccggagcctgcatcaggatccggacaagctccagaactgcggcgtggagctcctgcgcttcgacggcttcgaccaacccttcgtggccggagcttcggcctggctggcgtgccggctcatcccggaagtgcgcaatcaggagacctatgacttgttcatcggcgaggtggtcggcgcctgggcggacgcgcgggcgttcagcgatggccgctggcgctacgagcatgccgacccggtctggcgcagcttgcatcatgtcgccggcgggcatttctataccatcggcgatgccctggacgtgcctttaacgcaacgctaa

SEQ ID NO: 360520 - DNA, 1110 bp, Pseudomonas aeruginosa
atgaagtcacgtgctgccgtcgccttcgggccaggcaaaccgcttgaaatcgtcgagatcgacgtcgctccaccaaaggccggtgaagttctggtcaagatcacccataccggcgtctgccacaccgacgccttcaccctgtcgggcgacgaccccgagggcctcttccctgtcgtgctgggccatgaaggcgccggtatcgtggtccaggtcggcgaaggcgtcaccagcgtcaagccgggcgaccatgtgatcccgctctacaccgccgaatgcggcgagtgcctattctgcaagtcgggcaagaccaatctgtgtgtggccgtgcgcgccacccagggcaagggcgtgatgccggacggcaccacgcgcttttcctacaacggccagccgatctatcactacatgggctgctcgactttcagcgaatacaccgtcgtcgcggaggtttcgctggcgaaagtcaatccgcaggccaatccggaacacgtctgcctgctgggttgcggcgtcaccaccggcatcggtgcggtgcataacactgcgaaagtgcaacccggcgactcggtcgcagtgttcggcctgggcggcatcggtctggcggtgattcagggtgcgcgccaggccaaggccgggcgcatcatcgccgtggacaccaatccgtccaagttcgagctggcacgcacctttggcgcgaccgattgcatcaatcccagggatttcgacaagcccatccagcaggtcatcatcgagatgaccggctggggcgtcgaccactccttcgaatgcatcggcaacgtcaacgtgatgcgcgcggcgctggagtcagcccatcgcggctggggtcagtcggtcgttatcggcgtggctggcgccggacaggagatcagcacccgcccgttccagttggtcactggccgacgctggcttggcaccgccttcggcggggtcaagggccgctcgcagctgccgggcatggtcgaagacgccatgaagggcgaaatcgacctcgcgccgttcgtcacccacaccatgcccctcgatgagatcaacgaagccttccacctgatgcatgaaggcaagtcgatccgcagcgtggtgcattactga

SEQ ID NO: 360521 - DNA, 1221 bp, Pseudomonas aeruginosa
gtggccgagcaggattgtatgtcccggctgggcagctgggaggggtatcgagtgcgcaagtggcgccatgagtctcgtggacaacagcgttggctggtgatcgagttggagcctgcacctggtgcgcagcggcattgcatgggctgtggtcaggcggtgacagcgattcatgaccgcatgatgcggcgcatccgcgagctgccgatattcgatgatcaggtggagctgcacgtgccgcgtctgcgcttggcttgcctatcctgcggcccccgcgtggagcgattggactggcttgaccggcattgccgggtgacgcggcggctggccgagagcgtggcacggctgtgcgcggtgacctcggtactgcatgctgctcgttggcacggactggactggaagacgaccaaggcgatcgacttgcagacattggagcgcaggctggggccggtggatctggacggggtgcggcggatcgcgatggacgagtttgcgatccagaagggccaccgatacgccaccgtcgtggtggatgtggagcgcaagcgggtgctgtgggttggccgaggccgctcacgggctgaggtgaggccgttcttcgagttgcttggtccccaacgctgtgccgacatccaggcggtggccatggacatgaacaccgcctatgacttggaagtgcgtcagcactgcccgaacgcacaggtggtgtacgacctgttccatgtgatctccaaatacggccgcgaggtgatcggccgggtgcgggtggatgcggccaaccaactgcgccacgacaagccggctcgcaaggtggtcaaacgctcgcactggctgctgctgcgcaacccggcaaacctggccgagtccgaacagatccgactgagcgaggtgctggaagccaatcagtcgctgatgacggtctacgtgatgaaggagcaactcaaggcattgtggaacgcacccagcgcctgggcttggcaccgtgcctggaaacaatggctgcgccatgcccgggagagtgcgatcccggccctgatgcacttcgccaagtgcctgcggccgtactggcgcggcatcctcagccgggtgcgctggcccatgcacaccggtctgctcgaaggcatcaacaaccgcatcaaagtcatcaagcgcatcgcctacggctaccgcgatgacgcctacttcttcctcaagatccgggcggcattccccggagttgggtga

SEQ ID NO: 360522 - DNA, 726 bp, Pseudomonas aeruginosa
atgaagccgtcgatcatcctttccgcactcctactggcttcagtccagtggcccgcgtgggcgcaacagccagccacagctccagcccgcaatgcgcagagccaggagcgcccgctggccgcccgcgtcctggacgaccgagtagcaagcaactgggggctccaaccccaggaatgggcgcgttaccgcgagctgatggatgggccgctgggcatctactcgccaaacctggacccgctgtctgccctaggcatcgaggcacgcaccgacgaagaacggcggcgctatgcagagctgcaggtgcaagtcgaggcacgccgcgtcgagaagctgctcgcctaccaacgtgcctacgacgaagcctggcagcgcctgaaccccggcatgcagcgcgtgaacctgcccgacgacgggccgggcaccggcaccgcgcgcggcagcggtcgcatggcggtgttcgtcaaggacggctgcgcggcctgtgggcagctcgtgcagcggctgcaatcctcgggtgccgagttcgacctgtatatggtgggcagccgccaggacgacgcacgcatccgcgactgggccaagcgcgcgcagatcgacccggcgcgcgtgcgcagcggcagcattaccctcaaccacgacggcggccgctggctgtcgctgggcctgcccggtgacttgcccgcggctgtgcgcgaggtgaacggccaatggcagcgccagccgtag

SEQ ID NO: 360523 - DNA, 1119 bp, Pseudomonas aeruginosa
ttgtgggatgcggtgcagtctggccgctaccgggcacagccgtcgcggagggtgtacatcccgaaggcagacggcaaacaacgcccactgggcatcgcggcactggaagacaaaatcgtccagcaagccgtggtggccgtcctcaccccgatctacgaaacggccttccttggcttctcgtatggctttcgacccgggcgcaaccagcaccaagcgctggacgccgtggtcgtgggcatgacgagcaagcgcgtgaactgggtgctcgacgccgacatccaggcgttcttcgacactgtcgatcacgcctggatgatgcggtttctcgagcatcggatcggcgacagtcgagtcctgcgattgatccgcaagtggctgaccgctggtgtagtcgaacacgggcgaaagacggaggtgcgggtggggaccccgcaaggggcggtgatttcaccgctgctggcgaacatctacctgcactacgtcttcgacctgtgggcgaatcgctggcggcgccgctgcgcgaacggggatgtgatgatcgtgcgctacgccgatgacagcgtcctcggattcgagagcaaggccgatgtcgaccggttcctggaggatctgaaggtgcggttcgcccagtttgggctgacgctgaacgaggagaagacgcgtgtgttgcagttcggccgcttcgcggctgcggcacgcgcgcgtcaagggcttaaaaagccgccgacgttcgacttcctgggcttcacccatatctgtggggtatctcggtcgaacggctggttccaactgaagcggctgacctcggcgaagcggatgcgcgcccgcctccaggcgatccgacaggcgctgaaccgtcgcatgcacgagccgatccccgtggtcggccgatggctgcggcgcgtggtacagggctacttcaactatcacgctgttcctggcaatgtcgacaggctggactccttccgcgaggaggtggcccgggcctggctgcatgcgcttcgacggcgtggtcagcgtggacgaatgccatggtcacgattcaggacgctggtcgagcgccacttcccgagggcacgggtgcttcacccgtaccctcaccaacgcttcgcgtcatga

SEQ ID NO: 360524 - DNA, 1434 bp, Pseudomonas aeruginosa
gtgaacagccccgccctgcccctttcccgtggcttgcgcatccgcgccgaactcaaggaactgctgaccctcgccgcgccgatcatgatcgcgcaactggcgaccaccgccatgggcttcgtcgatgcggtgatggccgggcgcgccagtccgcacgacctggcagcggtggcgctgggcaactcgatctggatcccgatgttcctgctgatgaccggcaccctgctcgccaccacggccaaggtcgcccagcgccatggcgccggcgaccagcccggcaccgggccgctggtgcgccaggcgctgtggctggcgctgctgatcggaccgctgtcgggggcggtgctgtggtggttgtcggagccgatcctcggcttgatgaaagtgcgcccggaactgatcgggccgagcctgctgtacctcaagggcatcgccctgggcttcccggcggcggcgctgtatcacgtactgcgttgctacaccaacggcctgggacggacccggccgagcatggtgctggggatcggcgggctgctgctgaacatcccgatcaactacgcgctgatctacggccacttcggcatgccgaagatgggtggccccggctgcggctgggccaccggctcggtgatgtggttcatgttcctcggcatgctgttctgggtgaacaaggcctcgatctaccgcgccagccagttgttctcgcgctgggagtggccggatcgcgcgaccatcggcccgctggtggcggtcggcctgccgatcggcatcgcggtgttcgccgagtcgagcatcttctcggtgatcgccctgctgatcggcgggctcgacgagaacgtggtggccggccaccagatcgccctgaacttcagcgcgctggtgttcatgattccctattcgctggggatggcggtgaccgtgcgggtcggccacaacctcggcgccggcctgccgcgcgacgcgcgcttcgccgccggcgtggggatggccgcggcgctgggctacgcctgcgtctcggcgagcctgatgttgttgctgcgcgagcagatcgccgcgatgtattcgccggacccggcggtgatcgccatcgccgcctcgctgatcgtgttctccgcgctgttccagttctccgacgccctgcaggtcaccgccgccggggccctgcgcggctaccaggacacccgggtgacgatgatcatgaccctgttcgcctactggggcatcggcctgccggtgggctacagcctcggcctcaccgactggttccaggaacccaccggaccgcgcggcctgtggcagggcctggtggtgggcctgaccggcgcggcgatcatgctctgcatccgcctggcgcgcagcgcgcggcgcttcatccgccagcacgagcgcctgcagcgggaggacgcggcggccgcctcagtccttggccggtag

SEQ ID NO: 360525 - DNA, 1347 bp, Pseudomonas aeruginosa
atggttgagacacagttccatcaggtccaggcgcagcttttcggcgatcgccaggtcggtttcgctccagggcgtggagtggccgcggaccacctcctcccaggcctcgaacgagccgcgcggggtcagccgcggaccggacgggccgatggtcaacagcttttccggcttgccgccccagcggatgcggtgcacttcctcgtggcggaaccagaagatccagcccgattcctggcggtggaaacggatcgccagcacaccgcagcagtcgccgccgtccggagagtccacgctgggctgcggccagttgtcggtgtggtagatgtcccgttccgggtcgcgctgcaggcgttgcaggacattcccggcctggcgctcgaagtcgccgcggatgctcagggtgcggccgccgagcatgaccagggcgccgtcgcagggaatcagtgcggcgatgccatcgtccgggtgggccagtgcgccgaacaggtcgtctgcgtcccgcgcgcggcgagccagggccagcctgcgctcggtggacacgcgcagcagttcggcgatacgcccctgctccaggcgctcgacgatggcgctgcagacctgggagaagatctggaacgacatgcgcaccgggtagggaatcagcttgggcgacatgtgatggcaggagaacagtccccagagcttgccgccgaccacgatggagatgctcatcgaggcgcgcacgcccatgttggtcaggtattcgcagtggatcggcgaaacgctgcgcagcacgctgtagctgagatcgaacgattcgttggtctccgggttcagcgcgggaaacacgcgcatcggcgtataggccacgtcggcgatcagcctgatcgggttctggatgtacaggcgacgcgcctgggccgggatgtccgaggccgggtagcgttgccccaggtagctttcgaggtcttcgcgacggctctcggcgaccacctcgccggagtcgtcatggcggaaacggtaggccatcacccggtcgtagccggtcatccggcgcagttcgtcggtgacgttgctgagcaggctggcggtgtcgttgtgcaactggacctgggcgatgatgcgctgggcgttgagggtgaaggaggtgatcgacagcgtgtccgcggtgcggatctcgaactccaggtagaacacttccttgtagctgtggccgatcacgtcgaacaggtgttcgccgatccgcgtctcgacgctgttcgaccatgggccgttgccggtcagtccctcttcgagcatgcgcaggacctccggccccacctgctcctgcgtcaggtaggaacccggcgaggcgacgaaacccagtag

SEQ ID NO: 360526 - DNA, 396 bp, Pseudomonas aeruginosa
atgttcaagaaaagcatgacctgcattgtcctgtgcattgccgcattgagcggctgcgcgactccaccacccccagctcccaaggtgcaggccccaaagccaaaaaccatatcgtttgatctgaacgaccagcagcgtgagcatgcaatggcgtccgttcgagaggtcttgaaagacccggactccgcaaagttcagtggattgattggcgttcgttcgatttcagccccgccagataaatactccatctgcggcaaggtgaatgcgaagaacagctatggtggatacacaggcttcactaggtttgccgtgcttgacagcagcgtgattcttgccgactcgactcgcttcaacagggagatggtcgagatcgcttgcagggttacagaaaagtaa

SEQ ID NO: 360527 - DNA, 369 bp, Pseudomonas aeruginosa
gtgatcccctggcgctgggtaaccatcgcgctggcctgcttgcttctggtcggcctcggtgccgccggcggtgtctggctcggcgcgcggcactaccggccgcagttggatgccgcgagcgcggatctggtcgcctgccgtgccgcccggggcagcctggaggcctcggtggtggagcagggcaggcaggtcgcagcgctgcgactggccggcgaacagcgggccagggaggcagcccatgcgctggagcagggacgactgcaggccgccgagcagtattccgccgccaaccgtctgctgcgtgatcgcaccgccggcgagcagtgcgcggccgccgaggcggtcattgatcaggagttgggtctatga

SEQ ID NO: 360528 - DNA, 420 bp, Pseudomonas aeruginosa
atggacaccaacaagctgaaggagctggcggaactggctacgcctgggccgtgggttgtcgatgcgcaacagagcggcgccatcttcaacatcgaaagcgaatccggcgacctatgcattgccatgtcgcaggagaatccggcgtcgacaaggctggagatgaacgagcagcgcagggtaaacgctgaattcatcgccgccgccaacccccaagccatcctcgccctgctggacgagatcgacaggctcaaggcggagaaagatgcgtttcgttccgctcttaaacctttcgctgactattgcaccgcaacggatggcaaggggatcaggctcgcgatcggcggatcttgcgggggcacggagatcgatagaactgaatggaaggccgcacaagcagccctggaaggagccaccaaatga

SEQ ID NO: 360529 - DNA, 1068 bp, Pseudomonas aeruginosa
atgacgccggccgaatatatcgccgtgaagcgcggcgacatcctgacccgtggcgggttgagcagcgccacgctgcagaccatcaacattagcgggctcgaaaccgaggcatgcaggaagctggcagatgcatgcatcgatgaacttgtttcagttgcaggcattagcgacgcacagcggcagtccgctctggccgaactctggctggcggtggcgcttgccacctgcaggcctgagcgcgcctgcgagcgggaaaccgaggccttcgccgcctggatggaagtcatccgccacagctacagctaccttttctttaccgggcaatcgatgaacacgcgcgcgttcgaggacaggcagacccaagtgcgcgactactacaacttggccgtgcaggaagcctcgcgtctgctcttccgcgggacgcacgatgggagggatattccagcggagggcgtcgtcagatttgccggctgggacgtccgcgtcgacatttcgaaactgcggctgccgggtaacgccgagagcccgagggaattggtgccggtgtcgtcgctgtcattcactggcctgcgtggcatctatcgccgcgacgggttcggggctgagctggtcgccgtcaccgatgacacaccggtgacgggaactcccgcgctgacagccctcggcggcgacggcaaaccgctccaatcacgatggggcatgggtgcatggagtgaagtgccgtcgatggtcatcaatgtactcgcgcacttcgacggcggcgacccggcacgggcacctgccacgcacgaggtgaccctgtcggtgcatgacgcctatggggcgacatcggtgcctcttgagggtcagcagatccccttggctgcgaatttcactgccggttacgggttgtggctcgcccgatccggattcaatcggcagtccgtggaaaacctgctcggccgcgagaaaggcatcgatcggccacatcgcccggcgatcagcgagcagcggctgtcgatctggggtcgtttgcgggagagggcgaaatcctacgctaaggctttggccaacgatattctccggtaa

SEQ ID NO: 360530 - DNA, 1092 bp, Pseudomonas aeruginosa
atgcacaacagcaacgagccattggatcccttgttcccgagccagccggatgaggctgacaagacagggaccgaacccatcgacaccgccaatgtggtgcccagcggcgcacgcgtgctgctgggtttgatcgaggagcgcggactgtcgcccgacgagatctgccgcggccttggattcacctaccaggagctggtccgccaggacgtgagcctgtcctacaagcagatgcgcctgctgatcgtgcgagcgcaacgcatgctgggcgagccggcattgggactgaccatgggagcgcgcgaaacccccatttcctggggactgccgggactcgcgctgctgacctgcgaaacctatggcgaagcggtgaagtacgggctgggccaccagcaatcgatcggcgcgctgctcatccatctggccgagatacgcgggcgcgagatccgcatggaagtcaggccgaaatggttcgacctgcagatcgaaaccgtgctggtggaagaagcgtttgccagcgtggtcgcggtgagccgctgcctgctggggtcgagcttcaatccgttgcgggtcgatttcgccttccagcgcccggccgatgaagagatatatcggcgattcttccattgccccgtgcggtttgaagcgggcatcaatcgattgaccatcgatacgcactggctgggggcgcgcctgccgggatacgaccgcatcacgtcgcggatggtgcgcgagaaactcaatacgctgctgccgatccccatcgggaggaatgacctggtcgaatcggtcgccaaccgcatgcgcacgggaatagaggagcaccgcagccagaaggaactggcgcagatggtcaatgtcagcgatcggaccttgcgtcgtcgtttgagccaccaggaagtcacctaccgcggcatgcgggacgaagcccgatacgaacgtgcccgtgagctgctggccaactccagcatgaacatcgcgcagatcgccgaagcagtcggctacgccgatgccagggcattccgtcgcgcgttcaagcgctggtcgggaagcctcccaaccgagttcagggcatcacgcgggctttctggctga

SEQ ID NO: 360531 - DNA, 1092 bp, Pseudomonas aeruginosa
gtgaagactttcagcacccggtcactggctctctgcctgacctcactcgtctcgatgcccgtgctgctggcgggctgtggatcggaggatgaaacagcggaggcggcacggcccgccttcgtgatccaggccagggatgccgccggcgccggggaatccttcatcggcagggtccgcgccacgcaacgcgcggaactggcgttcccggtttccggcaaggtggccgcagtgctggtcgaaccgggcgacgtggtgcgcgtgggacaagtgctggcgcgcctggatgcgctgccgttctcggcgcaggcagccgcgacctcgggcgatgtggtccgcgccgaggcggcttttgccgaggtccaacgccgcgccgagcgactggaagtcgcgcgcaaggccgatgcggtcagcccgggcgaaaccacggccatggccgccgaactcgcagccgcccatgcgcagctgcgcaatgcgcgcgcgcaacgcgatctggccggttggtcgcagcaacaggcggtgttgcgcgcgcccttcaatggtttcgtcgccgcccggaacatcgaagcgggacaggccatcggcccgggcgtgccggcgatggccatcgacggcgcgggccgcgaactgttggtggtggtgccaggcgacatcgcgctgaagtcggggcaggaagtgctgctgcgcaatggcaagaccgaacttgtcagccgtgtcctgcgcgtggatggacgactggatgtcagcggcgtccgcacggcatacctgagcgtgccggacaacgccacggtcggctccacctggtccgttgccatcaggcagggcaaggacagcgatgcatcggccgtggcgcaggttcccttgcgcgcggtgattcccgcggcaacggccggtcgcggccaggtgcttcgactggcgcgcgacggccgtaccaccgtgctcgccgatgtccgtctgggtgaactgcatggcgaatggatcgacgtgacccacgggctcgccgtcggcgagcgtgtcgtggtggccggcgccagggcgatccgcccgggcacgatcgtcgagccggttcccttccagccggggacgcaacaatga

SEQ ID NO: 360532 - DNA, 3048 bp, Pseudomonas aeruginosa
atgagcctcgcagcgaaggcgctcgcgcgtccacgattcaccctgctagcggtgctcggtgtggtgctgatcggcctgttcctcgcgctggattttccttcgacggaagaaccgcctgtcacgatccgtaccgccacagtgctcagtttcatgcccggtgccggcgtcgatcgcgtggagcagctgatcgcccgtccgatcgaggagtccatacgcggcatgccggaagtcaaacgcatccgcaccacggtgcggcccgggttcgccttcagctacgtcgatctctatccgaccgtgccgccggaaaagctcgccaacgtgtggcagcgcctgcgctcccgcatgggcgatctgcaggcgcagcttccggagggaacgatcggcccgatggtcgacgacgaattcggccgcgtcgcggtgatgacgctgggcctgactggcccgggctacaccgccggcgagatccgcgcgcaggcgcgccacctgcgcgaccaactgctcaagctacccggcgtcgagcgcgtatccctgcacggcatccgcgacgagcaggtgcagatcgtcctggacgtgcctgcactggccgcgaagggactgaatcctgacgtgatcgcgcaggccgtagccaagcgcaacgtgatcgcgccggcgggcttcgtcgaaatcggtggtgcggagatcgcactgaacgtcagcggcgacgccgacgatccttcgcaactgggaaccacgccgattccgctgcccaatggcggtaccgcgcccttgagcctgctcgcgcgcatcgagcgggtgacacaggatccgccgatgacgggcgccttcgtggatggcacgcctgccgcggtcgtcgccgtttcgatggcgccgggcctgaacgtggtcagcttcgcggaagggctgcgtggcgaagtcgaacgcctcggcggcagcctgccggccggcatggaactggtgcagatcaccgaccaggcggaagtcgtcggcgaccagctccacaaggtcggcaaggtcttcctggaaaccatcgtcatcgtgttggccgtggtggtgctgttcctgggctttcgcaccggactcatcgtcagcgcaatcgtgccgaccaccgtactgggcacgctcgcgatcatgaagctgttgaacatcgagctgcacatcatctcggtgggcgcgatcatcatcgcgctggggttgttcgtcgacaacgcgatcgtggtcgccgaagacatggagcggcgcctgtcgttgggcgaatccgcgaaggaggcctcggcagcggcaggcagcaccatgttcgtgccgctgctagtgtcgtcgctggcgatcatcctcgcgttcatgccgctggcgctgtcgaccaccgaaaccggcgagtacctgcgtagcatgggcatcgtcatggccattgcgctgctgttgtcgctggtcatcggcgtcacgctcattccgctgctttgccagcgcttcgcacatcaccacgccgaactcagtcgcacggcgcgtgcggtggagtccctgaccgattggtaccgcggcaaggtacgctggatcctgggccacaaggctctctacatcggtgccatggtggccttgctgctcgccgccttctgcttgttcagcaccgtgccgtcggagctgatgccggcatcggagcgccggcaactgcagatggcgatcgagctggtcccggataccggcaccaccagcaccatggccaaggcggaagagatcagccgcgtcctggcgaaccgcaaggaactgccggaaatcgccagccacgcgctttacatgggcgatggtgggccgcgcttcatccttgcgctcaatccgccgacgcccgccgcccatcgcgcctatgccgtgctgacactgtctcccgagacgacgcatgagcaggccatcgaacgcctgcacagcgtcatggcgaagcacttcccggacgtccgcttcgaacccaagcgtttctcgatgggatcgtccgatgccggtgtcgccacgttccgcctgacgagtccggacgggcacagccatcgcgccgccgcggaaaagctgctcgccgcactgctggcggagccgggaatggtgaacgtttccagcgatgccgaacgccaggtgatgcaactcgacgtgcaggtcgaccaggccaaggcgcaggccgcgggcgtgagcagcgccgacgtcgccaggagcatggacctgatcctcgccggcaccgcgatttcccgttatcgcgaaggcgataccgtgctcccggtgatcctgcgcggcgaagccgcactgcgcgcggacgtggcccagctggcggcgttgccggtccagaaaaccgatggaagcggcagcgtgccgctggggcaggtcgcgacactgcgcctggtgccgcaactgtcggtcgtccagcgctacaaccaggagcgcgcggtgaccgtgctggccaagcatgcggacatgacggcgcagggtatcgccgacagcatggagacgttgctcgcggagatccggcgcagcggcatcgaggtttcgctcggtggcgagatcgaagaaggcgtgagtgccaacgaagccatcggcaagctgctgccattgtgcctggcggcgatgttcgtcctgttcgtgtggcagttcgagagtatccgcaagagcatgatcgtgatggcgagcattccgttcgtatccatcggtgccgcgcttgcattgaagctgagcggcacgacgttgaccttcgtcggcacgctcggcctgctcgcgctcggcggcatcatcgtcaacaacgcgattctcttgatcgatgccatcgaagaagcgcgcgccacgggcgtgccgccgctgcaggcggtcgaagaagccgccgcaaagcgactgcggcccatcgtgatgacgaagatggtgtgcatcctcggtctggtgccgctgctgctgtttggcgggacggtctggacgagcctgtccgtcgtgatgatcggcggccttgcgctcggcaccttgatcaccctggggttgattcccgccctgtacgccgcgttttatcggctcaacccggcggaagcctga

SEQ ID NO: 360533 - DNA, 1497 bp, Pseudomonas aeruginosa
atggccacgacttcattcctcacgcgcatcgcgggcacgctcatgctcatggcgatggccggatgtacttccgttgccccccgcagcgaaattcccggtgccaccgatcgctacctcgtcggcgtgcagccaagccctgccgctgcagcggcaggcgtggcgcagggcacgtcgaagcggacctggtgggaggatttcgccgatccgtcgttgaacgcactgattgaactcgcgctgcacaacaaccacgacctgaaggccgcgctcgcggccgtggatgaagcgcgggcgatggcgggcgcggccaagcgtgaagcattgcctaccggcggcctggaagcgaaagcggagcagtcgcagttgtccgccatcgaggcggatccctatcggcaggggtttcctcgcccgccgtcacaccggctgctcaatgtcgggcagttcctgtcctgggaaattgatctcttcggtcgcatcgggaccgccaccgcggtggccgagcgccaggcggatgccgcgcaggccgatgtccatgcggcggcgacgctgctgcaaggcgaggtggcgcgtcactacttcgagatgcgccgcaaccagcaggcattgcgctcgctggagacggaagtcgatctgctcgaacgacgcgcggccaagatgaacgcacgctacgaagccggactcgtggatcgacgcgcaatgcttgccgccacaggcgaccacgcgcaccgggccgccgagaaagcgcagaccgcggccgcgctgcatgccgaagtcgcggcgttggcggtattggttggccgatcgcccgcggccagcgacggaaactgggaagcgttgatcgcccccgcgccgttgcccgatgcgcccgacctgacgacgctgacgcagcccaccgacctgctggcgcgccgcccggacgtggcccgcgccgatgcattgctgcgcgccagcctcggcaatgtcgtgctcgcggagcgtgcgcacctgcccaggctttcgctgaatctttttggcggcgtcctgggcccctttggcactaccggcgattcgagcgcacagcgttactccgccggaccgtcgctgcaatgggagtggctggatttcgggcgacgcaatgcgcgcgaggccgcagcccgtgcaggcagcgaggcggcctggcacaagttcgagcagaccgtgttgacggcattacgcgagagcgagacgtccttgcgtgactggtcggggtcgcgctccgcgtgggaagaagcgcaacgcagcgagtccgtggcgcgccgcgcgaccgattacgcgtcgacccgtgttgccgcagggttggagccgccgaccatggacctcgaacaacaggccgcgtacgaacaggtgcaccgcgaagcgatcgcggcgcaagcgaagctgctgcaggcacatgtgcaggtgcagctggcgctgggcgcctggcagccggatgacgaatccgctaccgcacaaggccaccccgggaatcgaagccatcaataa

SEQ ID NO: 360534 - DNA, 741 bp, Pseudomonas aeruginosa
atgtcatctcaatttctgcagcactattggggaagcgaaattctcgccgccaacgtcttcatcggattgaacctgttgggcgcgcagctgctcggcatgctgatcgggtacgagcgttcctaccagggcagggccgccggaatgcgcacgtatggcctagtgtgcatggcatccactggactcaccatcttcgccgggtttgcgcccttgtggtacggaggcagcgcgggtgcacaaaccatgatggaccccacgcgcatcacccagggaatcgtcactggcattgggttcctgtgtgctggagtcatcatgaaagatggcttgagcatcagaggcttgacgacggcggcttccatctgggcggtttcggccgtcggcgtcctgctcggaactggcttctatctcgccgcgcttctgttgtccctgctgtgtgccctgtccatgtcgttcctgcgtcaggtcgaagtccgcctgccgggacgtgcatcactggacgtcatggtcacgttccgcgaggggtatgcgccggggctggatgaaatcatccagatgggactggcgcggggccatcgcgtgctgagtgagagcgtcaccatcgcctacagcgagaagcaggcggtgtggcgatttggaatcgtggcgctcgaccgttctcgctcggtgtccccagcaagcctcgccgaggagctgacaagcgatcccgacgtggcgagtttcagcattacaccagtacgctactga

SEQ ID NO: 360535 - DNA, 813 bp, Pseudomonas aeruginosa
ttgcaggcgctggttctccgcgagcagttccgtcagcagtatctcccgttgctccaccgcctgcgcggcgatccacgccaggctgagttcctggcggatctgcaatcgctgcaaaaccagcgccgcgcgttctcgatccacacgcgcctgcgcgctggcgacctgggcgtcgcgcttggccctgttgggcacttcctgcatgagcgccaagcgctgcatcgtcatggattcgcgcgtcatgctccagcgatccatgccgctgatggggtagttttcgatgccgagcgagagcttggggtcgggcagcgagcctgctgccttctgcacggattcggcgacgttaacctgcaactgctgcgcgcttatgcgtgggctctgctgctccgcgataaggcgtgcctcagcaaaatcgagggcgtaggctacaggcgagacaagcgcactgcccgccaacgcgatgctgatagctttcagacgatgcactcgcatcgaggccggcgttgtgcctcggccgtacgccgacgggcgcccctcgggggcgccaaaaaagggagtaaacatggttgtcctcggaattggtattcacgaaatcacgtggtctgccgcatcggtgcgcggcgagcacggacacataaatcaattccgcaggacttggaacgtgaggtagatcggcggaaagcccgcgcggggattgggaggaatgtaggtaacgtgccgcctgagggctacccggtcgagaaccaacccgggcagcgagttggcgagccacatcacgtgcgccgcgagaaactgaatgtccagcccctgccatga

SEQ ID NO: 360536 - DNA, 738 bp, Pseudomonas aeruginosa
gtgaacaaacaccccaacatcatcattttggccggcaccaaagccggcgagtcgcatcatgagggcgatttcccctattacctcaccgaagcggacggcgtacccctgattcagtcgctgatcgaaaattgcgcctccctcaacccggacaaaatcgtctgcatgttcccggttgcggaggtgaacaagtatcacctgcgcaacatggttgcccagatgcacccggccgccgtagcccacccggttcacgaatccaccatgggcgctgcctgcactgctctgctggccagcgaggacatcgatagcgattccgagctgatgatcatcagcgccaacgaaatcctggatgagccgttccacaagatcatcacgagctttcgggccgaaggccgcgatgcaggtgtggtgatcttcaagtcccttcacccccgttacgcctttgttcggctgacggataccgctgatgtgatcgaggctgctgaaaagaacccgatcagccctcacgcggttgctggcctgtattggttcaagcagggaaaaatgttcgtcgaggcggtcaagcacatgatccgcaaggacgccaaggtcaacgattcgttctacatcgccccggccctgaacgagctggttctgcagcataagaaaatcggcgcttaccgtgttgagcccgctaaataccgcccgctgaaaagcgcagcacaggttcacgcctacgaatctcacgggagccgcgcatga

SEQ ID NO: 360537 - DNA, 885 bp, Pseudomonas aeruginosa
atgatccggaagtcgacaggctcgctcttgctaatgcttgccctacccacactggcccacgcggtggagattctgcgctgggagcgcattccgttggccattccattgacggtcggccaggaacgcattgtctttgtcgacagaaacgtgcgagttggcgttcctcgggatctgcagggcaagctgcgcgtccagagtaccggcggcgcactctacctgctcgccaacgagccgattcctccagcgcgcctgcgcctgcaggacgcgaccaatggcgagcagatgctcatcgatatcgccgcctccgaggcagcggccgatcaacagccgcgcgagccggtcaggatcgtcgccggcgagcccgtggctccgcactatggccagccccgggaagcccagccatcggcagcagcgaaacagaccgcgcaggcagaagcaccgaaggccgtgccgcgcgaaacgcccgtccccgtggttctgacgcgctatgcggcgcagatgctctatgccccacttcgcacggtggaaccggtggatggcgtcggtcaggtgcgcgtcaagcgacagctcgacctgaataccctgctccccagtctgcccatcacggctaccgccttgggcgcctggcggctggacgactactacgtcacggcggtgaagctgcagaacgccagcgcccagcacctggccctggatcccagggacctgatgggcaatttcatcgccgcaaccttccagcacccgtacttgggaccccggggcgacgcttccgacaccaccaccgtgtatctggtgacgcgcggccgcggccttgccgacgcgctcctgccctccgccatcagccagatcgatcccaaaggaggccgtcgtggcgctgaccggtaa

SEQ ID NO: 360538 - DNA, 207 bp, Pseudomonas aeruginosa
gtgtcgccactcctcattaccgccctcatcatcggcgggatcgccctcctcatcgccattggctatatcaaccacgtggtggaaaacagcaagctggagaaagcgcgcctgaaggccgaactcaacgaccgggtccggcgctgcgcgcagatttccgagagccttcccggccagttcgtgtgggatgaaaataaagtttcatcctaa

SEQ ID NO: 360539 - DNA, 1494 bp, Pseudomonas aeruginosa
ttgcccggcaaacgcatatcggatcatcaagtgaccaagtacaaggaactacgcggcaagcacagccaggaggtggcggctgccaaggccggggtaagcgtagccagcgcgcggcgcatcgaatcggcggtgctcctgccgtcccagaagccggcgcgcaactggcgcacgcgcgccgacccgctgacggaggtgtggacggcggaggtcgtgccgatgctggaatcggcccctgggctgatggcggtgacggtgttggaggaactgcagcttcgatacccgcagcgctttgacggcacggtgttgcgcaccctgcagcgccgggtgcggcagtggcgcgccgagcacggtggcgatcgcgagatcttcttcgcccaggagcatccgcccggccggcttgggctgtcggacttcacggtctgcgacgagctggccatcaccatcgtcggcgaggccttgccgcaccggctgtaccagttcgcgttcgcccacagtggttggcgccatgcctgcatcgtgctgggtggcgagagcttccaggcgctggcgagcggtcttcaggaagcactatggatggccggtggtgtgcccgaagagcatcgcaccgacagtctgtcggcggcgttcaacaacctggccgagcaggaggagctcaccgcccgctaccgcgagctgtgcgcgcactacggcctgcgcgcgagccgcaacaatccgggcgtgagccacgagaacggttcgatcgaagcgcgccagggcagcctgaagactgcgctggatcagtcgctgctgctgcgcggcacacgcgagttcgcgagcctcgatggttacggccagttcgtcgccgataccgtgcggcggctgaacgcgcgctgcgctcggacgtgggaggtcgagcgtgccagccttcggccgctgccggctcggcgaacggtggacttcgaagaggtcgacgcgagggtcagcaagttcggcctgatcagcatcaaggccgcccactacagcgtgccgtccaggctggtcggccatcggctgaaggttcggctctacagcgcgcatctcgaagcctggctgggcggagtgaaggtgttcgagtgcgagcggttgcgcagcagcgcccagaccaagcatcccaagcgcatcgactggcgccacatgctcccgtcactgcggcgcaagcccggagcgttcgcccgatggatgctgcgcgatgccatgttcccgcgcagcgaatatgcccaagcctgggaacgcatgagccagcgactgagcgagcgagaggcctgccggttgatggtgaacctgctcgatctcgcggatcgggccaatgtggtggccgagctcgccggaatcctcagcgccttgggcgagcgcaatgaaatccccgacatcgaggtgctgcgggcgcagttcgcgccgcgtccggcactgatgccgttcgtggaggtcatgttgccgacgaccgcggtgtacgacgacctgctggaggccgcatga

SEQ ID NO: 360540 - DNA, 804 bp, Pseudomonas aeruginosa
atgaacacgatcgcacccacgcggaccgcggccgatgctgcgcgcctgcccctgatgctgggagagctaaggcttcccacgatgaagcggctgtgggccgacctggccgagcagtccaaccgcgaaggctggccggcagaacgcttcttgggcgtgctgctcgagcaagaggtcaacgagcgcgagacgcgccggcttgcgcgcgcgcgcatcgacagccacttgccgccagacaagagcttggccagcttcgacttcgacgccgtgccagcggtctccaaggctcacgtcacggcgttggccgaggctgatggttggatcgcacaagggcacaacttattggccttcgggccgccgggcgtcggcaagacccatctcattgccggcatcggccatgccttgatcgaccacggctacaaggttctcttcgtgcgcacgagcgacttggtgcaacgcctgcaagcggcgcgccgggacctgcgattgccaggagaactcgccaagctcgatcgcttcgatctgatcatcctggacgatctgagctatgcgcgtcgcgaccaggccgagacctcggtgctgttcgagctgatcgcagagcggtacgagagaaagagcatcgccatcacggccaacgcaccgttctcagcgtgggacgaggtcttccccgacaaggccatgacgatcgccgcggtcgaccgcctcgtgcatcacgccacgatcctggagatgaacgtggacagctaccgccgccgcgctgcgttgccggctcgccggcaacgcagcgcaacgacaactactcaatga

SEQ ID NO: 360541 - DNA, 753 bp, Pseudomonas aeruginosa
gtgcaggcgctggagctggcctggcgccatgacctgcgccgcatcgacggcgtggacctgcccccctggcagagcctcacgctgcgcacggccgagccgctgcagggcatggcgcacctgcgccgcctgctggccgagcgcctggcgcaccagcgcctggccgcgcccgtgagccggctggcgctgcgcagcctgcaaaccgcgcccatgccacaggccagcgcggacctgctgccgccccagccaggcgacgcgggggcggggcagggcgagccctggcaccagttcgtcgagcgcctctcggcccgcctgggcgcggacagcctgcgggtgccgcggtcccaggcagaccaccgtcccgaatgcatgcaacagtggcaaccggctctggcggcccgcgccgcgccgccggcgcccgcacaggactgcacccttgcgcccttgcttccgccctggctcgtgcggcctccgcggccgctggccctgcgcggcagccggccttgcctgcacggccagccgctgcgcttgctggacgggccgcagcgcgtggaaaccggctggtgggaggccgtagcggacctgaacgacgacgagagcgatgtgcaaggcaatgcacacaatggcgcgcaggacggtggctcggccctggtgcggcgcgactatttcattgcccacaacccggcggcgggcaccgtctgggtcttccgcgaccgggcgacgggcggctggttcttgcagggggtgtacggatga

SEQ ID NO: 360542 - DNA, 252 bp, Pseudomonas aeruginosa
atgggcgcgcaccacgccggcgacggagcattcgtcggtcagcgccagggcgctgtagcccagttcgtgcgcgcgctgtaccagttcctgtgggtgcgaggcgccgcgctgaaagctgaagttgctcagcgcgtgcagctctgcgtaggcgggcagcatcatccgtacaccccctgcaagaaccagccgcccgtcgcccggtcgcggaagacccagacggtgcccgccgccgggttgtgggcaatgaaatag

SEQ ID NO: 360543 - DNA, 669 bp, Pseudomonas aeruginosa
atgaagaaaatcccgctgatcatcgcgctgatgttgattccgatcggtgtgcttgttgggctggtcgtgaccgccatgcaacagggtgatgaggagaaagaggcggctcttgcgaggagtcaggcggctgaggcgtcagcgggtgttctgcccggggctggaaatgctgttcaggcagcccccagggcctccggtgggccgaaatcggccgatgagttcatcggtgatatgtcgcccagggtgcccgatctggtggcctcggcgccgcgctatgacgatctgaacaagcccagggatttccctcggccggtgtgtgcggccagctcggacccgaacttgatcggcaaggctcctgagcggcgaattccgctgggcacgtacaatggccgggtgatggtctgccagtgctacacgcaacaggtcacgcggatgcacacgacgttcgagttctgcatggacgttgtgaacaacggctatttcgacgacacgcggatgccgccgacgtatgccagcggcaacagcacgcgaggcttgatcaccagtccgtcagttgacccggcgacggcgattgagcgagggcgcgcagcgacatcgccgacgccgggggatgcgttctcgacacgagtaaccatcgtgccggatagcagcaggacgcccaggacgctatga

SEQ ID NO: 360544 - DNA, 618 bp, Pseudomonas aeruginosa
atgccggaagatgcctttctcccggccatagggccgaatgaagttgatgtgcttgccgaccaacttgcgcactggcgtgcacagcaggctgggatgctgagtgatcagatgaatgtccaggccctggtgccggtgcgtctcgaagcgcgtgactttctccgggcgcgccctggagccatcgttaccgaacacccgttgcgcttcgtcgatcacgatcaccgagccatcaggcaggttgtaccactcttcgggcgtatcgaactcgacccacttcgacttgagccgatccagcttcatatccgggatgccgtagtagtagatcgtcctgggcggcaggtccggattgtccgggtctttgtgcagccgcttggtcgggtcgtccgggtccggctggtgttcaatgtcgatttcccgaatcgcgttcaaagtcttgccagcacctggcagaccggtgcgcagatagagcatgttggtcccctcctcgcttacttcggcccggtccagcgcatgccggacttgccgccagacttgtccataccccacagcacagctcgggcgatgtacgcggagaacaggatgttgatgcacacgtcaacttgcagaagccccaggacttga

SEQ ID NO: 360545 - DNA, 150 bp, Pseudomonas aeruginosa; identical to SEQ ID NO: 324378

SEQ ID NO: 360546 - DNA, 240 bp, Pseudomonas aeruginosa; identical to SEQ ID NO: 324359

SEQ ID NO: 360547 - DNA, 507 bp, Pseudomonas aeruginosa
atggatgatgactataccccgtatttagcctgccaagcgctcagggtcaaggaagtcacagcggtcatcttgggtaagtttaaccagtcgcgggccaaagttctttccattgggtacagcgagcttatgcctcccatctccgtttcacccagtgcacaccagtcgcagaagcgccttagagacaagcaagagcttcttaagaaaaaattacaatccctgaggccttccttcctcccggcggcaaaaatggagaggagtttcattgagttgtgctggttactgaacagggttaaaactcgggaaagagatctacacagattcctgaaggaaaattaccagatactggactctcacctggcggcaatcttcagcgaagtacccataggcaagtatcgggcagacctagttctgcagtatcaccagtctgacaagcgtgtggtgctggtcgaacttgagccacacgataagcaaatttttaccaaaaaaatcgccttaggcaccaggtga

SEQ ID NO: 360548 - DNA, 1416 bp, Pseudomonas aeruginosa
atgctctgggcttgcattctcctgccgcaactggccatggacagcgcgctgcgtcaacggagcaatccccacgcaccgctggcgctgctcggcggcccagcgcagcgccggcagttgcaggcggtcaaccctgcggcacgcgcgctcggcctgaagcccggtcaatcgctgatcgccgcccaggccctgagccgggacttcgccacggcggaatacgacctcgccgccgtggagcgctggcaggccttcctcgccgcctgggcctacggtttcagctcgcaggtcagcctgcactatccgcgtgcgctgctgctggaagtgcagtccagccttgccctgttcggcccctggccacgcttcgaggcccgcttgcgcaaggaactcacggcgctgggcttccgccatcgcctgtgcctggcgccgaacccggtggcggcgagggtcctggcgaacagccacgacggcctggccatcgaggacgagacagcgctgcaacgccagttgtccgcccttccgctggaccgcctgggactctcgcgggagctggccgtcgccctcggacgcatgggactgcgccatctgcgccaggtcctcgagttgccgcgcgccgccctggcccgtcgcttcccggccgaactgctgttgcacatcgaccgcctctgcggccgcagcccgctggcgctggagcactaccggccgccggacaccttcgacctgcgcatcgaactcaatttcgacgtggagtcgcaccaggccctgctcttccccctgcgacggctgagcgccgatctcgccgcctttctcgccggacgcgacagcggcgtgcagcgcttcaccctgcacctggaacatcacgggcgcgccgacagccaggtcacggtcggcctgctcagcgccgaacgcgaggcggccatgctcttcgaactgacccgcggccgtctcgaacagctgcaactgcccgcccccgtgcatgccgtgcgcctggaggcccgcgagctgcctcctttcacgccgcagcaccgcgaactgttcgacgagcgcccacagcagtatctcggctgggaacagttgcgggaacgcctgcgcgcgcggctgggcgacgaggcggtacagggcctgagcgccgtcgccgaacaccgtccggagcgaagctggcggccgcacagctgcgacagggcgcaatcgccggcagcctgcggcctccgccccggctggctgctggcggagccacgccccctcggcgaggccttgcccaccgtgctggccggcccggagcggatcgagtcgggctggtgggatggcgaagacatccgccgcgactattacctggtggaaacccgcagcggacaacgtgcctgggtctatcgcgaggtcggcagcgaagggccgctgtggctgcatggctggttcgcatga

SEQ ID NO: 360549 - DNA, 618 bp, Pseudomonas aeruginosa
  misc_feature (559)..(568): n is a, c, g, or t
atgagtagctcaactcgcttctctcgaaaagaatatctggccagcggaaatgattgtgatgcgtggagaagtatagatgtcgagctaattccggaataccttagggagcggacagaaaaccggatcaaggcaatacgtgctttcctaaaagaaggtgcatctctcggcgagatcgaagataagtacggaatcaatcgtgtctctttgtaccggattattgataaatgtctgtccttagacagtgatggtatcgccaccggctacaagggggctattccatatcggcggacgagtcctcaaaagtatcgccgtgaaaagcaactggggagttcgttgtcatcagagaggaaaggcgatgcgggcgcgtttagcaagttcatagatgatcatcccgacataaaggtctggctggataaggccgcaagaaagtacaagcctagaaagcaaggcggcgatagtttcgatgttttacatgctgcctttctgaaacaatgtaccttgctgaatattggcgacacagaatacccttataatcgaaagtccatggcgcgttctgcannnnnnnnnngcactgcgagaacatttaagatccaagaacagagaactgaaagccgctga

SEQ ID NO: 360550 - DNA, 3015 bp, Pseudomonas aeruginosa
atggcatccctcgaacgtaccgcctaccctgtattgtcgcgctcctattcgagggccgagcttcagcgtgaattcagcttctccgaggaagaagtcacgtgggtcaaaagtcgctctaatgcagcattccgactgaatctcgctgttctgttcaagacttttcaggtactccgatactttccagaaatcgctgaagtgccggagccagttgtcgatttcatccgcacacaaataggtctacgcagcaaggttgcgctatcaccctacaagtggatgcagctttaccgccatatgagtgccgttcgggaaaaacttggggttcgaccgttctacggctcggatggtcaagacatagcatccacgcatgcacagttgatggctcccctcctcgaacggcgcgctgacattattaatgcgatcattgacgagttgctgcgccaaaactacgagctgcccgcctattcgaccttgaatgacctagcagaagccgctcgtgcagaagcacaagagaaaatcttcaaccttgtggtagccagagctccaatcaaggtgatctataagctaagggatcttctcgacacggacttcgggcgtcggcagagtgacttcaacacactcaaacaggcacccaagaaaccctcgcgcaagcatctggaggtactgatcgaccacctagcctggctagagagtttcgggaaactggatgccatttttgatgggatcgtcgatacgaaaattcgccactttgctgcccaagctgcggcgtcggatgtatctgaactgaaggactgctcgctgccgaagcgttacacgctgatgcttgctttgatctaccgtatgcgggtgcgaacccgagatcacctggccgagatgttcatccgaagaatctccacgatccacaaacgcgccaaggaggagctggagcaaatccaggcacgtcaacgtcagaagttggaacaactggcggccaccctggacggcgtggtgcagattctggttcaagagccggatgaccaggaggctggtagcctgattcgagaatacctctcccccgatggcaacatggatcggttgcgagaggtttgtgctgaagttcaggccacaggaggtaataactacttgccgctgatctggaggcacttcaagtcccatcgttcactgctgtttcgcctcagccaccttctccagttggagcccaccacccaggatcgctcacttatccaggcgcttcagctcattcaggacagtgagaatctgcaccgtgaatggatcgatgagcatgtcgacttgtcgtttgcatcagatcgctgggtgaagatcgtgcgtcgccctaccagtgaagggccgcctaccaaccgacgttatctggaggtctgcgtgttctcctacctggccagtgaactgcgctcgggtgatctgtgcgtgcagggatcggaatccttcgccgactaccgtaaacagttgctgccttgggaagagtgtctccagcggctaccggcatactgcgagaaggtgggccttcctaccacagcgaaggagtttgtcgcctcgctcaagagccagttggaggaaaccgcgcaacagttagatgacaagttcccttcctgtcgaggggatgtgtcgatcaacgatgcaggcgagccggtactgcggcgggtgatggcgcgggacatcccgccttcagccatctcgctacagacggcgcttatgcagcgtatgccagccaggcacgtgctggacattatggccaacattgagcactggattcagttcacgcggcatttcggaccgatgtccggcaacgagccaaagctcaaagagccggccgagcgctacctgatgacgatcttcgccatgggctgcaatctcggtcccagccaggccgcgcggcatctggccggtaatgtcacaccgcatatgctgtcctataccaatcgccgccacctctcgctggagaaactggacaaggctaatcgcgagttggtggagctctatctgcaacttgacctgcccaagctttggggcgatggcaaagcagtggccgcagacggtacccagttcgacttctatgacgacaacctactggccggctaccacttccgctatcgcaagatgggggccgtggcgtaccgacacgtggccaacaactacattgcagtgttccagcacttcatcccgccaggcatctgggaggcgatctatgtgatagagggactgctcaaagtcagccttagcgtcgagcccgatacggtctactccgacacccagggccagtcggccacagtattcgccttcactcatctcctgggtatcaatctgatgccgcgtatccgcaactggcgcgacctagtgatgtgccgaccggatcgaggcgtatcgtacaagcacataaaccgactgttcaccgacactgccgactggcacctgatcgaaactcactggcaggatctgatgcagattgcgctgtcgatccaggccggcaagatttcctcgcccatgctgctacgtaaacttggctcttacagccggcgcaacaagctctacctcgcagcacagacgctgggcagtgttatccgcacgattttcctgctcaattggattggcagccgagagctgcgccaggaggtcactgcgaacaccaacaagatcgagtcctacaacggcttctccaagtggctctctttcggcggcgatgtaattgccgaaaacgatccggacgagcagcagaaacgtctgcgttacaacgacatggtggcttcgtcggtgattctgcagaacaccgtggacatgatgcgcatcttgcagaaactagcccgcgaagggtggcagtttaccgatgaggacgtgtcctttcttagcccctacctgaccagtaacgtcaagcgtttcggcgagttcaaccttaagctcaaccgaccgccggagccctggatcaaggattcggtattccaacaggctgccggctcgttgcgagtcaactcgaccagtaaggccgcggccgaggaggcaatatga

SEQ ID NO: 360551 - DNA, 624 bp, Pseudomonas aeruginosa
atggtccttcgcgctggccaacgtcgcggcgtcgccatccgcacgcgcctgggcctcggcatcgacccgctggttggtgtggtccttcgcgctggccaacgtcgcggcgtcaccatccgcccgtgcctgagcctcggcgtcgacgcgctggttggtgtgatcctgggcagttttcagcgtcgtcgcgtcaccatcttcccgggctttcgcttcagtcttgatcgcgctgtcagtgtggttgttcgcgctcgccaaggttgcagcatcgccggcgtggcgggcttgagcctcggccgccacttgctgattcgcatgatcgatcgcctccccgaggacacgtgcgtcctcttgtccgcgtgtttgcgcttcgttggcgacagcctggttcgtgtggttcgtggccgtgctgagaacccggttatcctcgtctgcccgcttctgcgcctcagcgctcacctgggtgtcggtgtagcccttggctgcggccagggtcgcggcgtcaccgtcctggacctggccgagattcgatgcatcggtccgcgcggatcctccggcaacgttggtgatctgtcgttcggcgccggcggcgccgacagatacggtgttgtcccggttgttctgtga

SEQ ID NO: 360552 - DNA, 267 bp, Pseudomonas aeruginosa
atgcgtcacggcgggtcactcggtgtcatcaccgtcaaggtccgaaaggctatcggcgaggtcgatatcgacctggtgctgatccgtttcgtcgacgacgacaaagctgcaagcgctgtcctgctctcctgcggcaatgcgcgtctggaaatagctgtcggcaacgaactgcgcagcgtccttatgatccccatcgacttcaacatcgatggtccaggtgacggtataagcggccatgtgcaactcctcattggtttgtttcaatga

SEQ ID NO: 360553 - DNA, 987 bp, Pseudomonas aeruginosa
atgctcccagtcaagaacctcttcgtgctctacaccggcggcaccatcggcatgctgcagacccctcagggactggctccggccggtggcttcgaagcgcgcatgcgcgaccacctgcaaagcctcggcgacgccccggacctgcgctggcgcttcgccgaactgcaaccgccgctggacagcgccaacatgacccagggcaactggctggcgatgcgcgacgccatcgtcgccgcgctcgacgccggccacgacggcgtgctgctcctgcacggcaccgacaccctggcctacagcgccgcggcgctgtccttcctgctcctcgacctgccgatcccggtgctgctgaccggctccatgctgccggccggcgcgccgggcagcgatgcctgggacaacctagtcggcgccctgcgcgtcctccaggagggccacgcgcgcggcgtacaggtctatttcaacgatgccctgctgcacggcgcgcgagtcagcaaactgcgcagcgacgcgttcgacgccttcgccgaactgccgcgaccgcgccacgccgagcatgcgccggtgcctgcggcgctcggctaccgccagccgcgccgggaagtgaacctcgccgtgctgccgctctatccagggctgcgcgccgcgcacctgcgcgggctgctcgacagcggcgtggaagcgctgctgctggaatgctatggcagcggcaccggcccgtccgacgacgaggagctgctggcgctgctgcgcgaagcccacgcccgcggcgtgctgctcgccgcggtcagccagtgcgcctacggccaggtcgagttcggcgtctacgccgccggcagccgcctgcgcgacgccggcctgctctcggctggcggaatgacccgcgaggcggccctgggcaagctcttcggcctgctcggcgccggcctcggacgcgacgaagcgcaacgctggttcgccctcgacctatgcggcgagaacgccgactga

SEQ ID NO: 360554 - DNA, 231 bp, Pseudomonas aeruginosa; identical to SEQ ID NO: 332051

SEQ ID NO: 360555 - DNA, 231 bp, Pseudomonas aeruginosa; identical to SEQ ID NO: 332051

SEQ ID NO: 360556 - DNA, 1197 bp, Pseudomonas aeruginosa
atgctcctcgatcaatggcatgatctacatgcgtggccaggcccgcgactacgaccagtgggtggccgaaggcaatccgggctggagctggagagagctgctgccgctgttccgcaggatggaggaccatttcgccgggaccagcgaaatgcacggcgccggcggcgaatggcgggtagaacgccagcggctctcctggaagctgctcgatgccttccagcaggcggcggcgcagaccggcatcgccagcgtcgaggatttcaacggtggcgacaacgaaggctgcggctacttccaggtcaaccagcgcggcggggtgcgctggaatgcctcgaaaggcttcctgcgcggcatcgcccagcgcgccaacctgacggttctgacccatgccgaagtccagcgagtgctcctcgaggacggccgcgccagggccctgtcggtccgttggcagggccgcgagcagcgcttcgaggcgcgccgcgagatcgtcctgagcgccggcgcgatcggttcgccgtgcctgctgcaacgctccgggatcggcccgcgggacctgctggagcagctcggcgccggggtcgtccacgagttgcccggggtcggtggcaatctccaggatcacctgcagctgcgcatgatctacaaggtcgacggcgttcccaccctcaaccagatcgccggcagcctatggggcaagctgggcatgggcctgcgctacctggcgagccgcagcgggccgttgtcgatggcgccgagccaactgggcgccttcgcccgctccgatccgcagcagccctcggccaacctcgaataccacgtccagccgctctcgctggatcgcttcggcgagccgctgcatgccttccctgcgttcaccgcgtcggtctgcgacctgcgtccgcacagccggggaacggtgcgcatccgctcgctcgacccgggcgaggcgccgtcgatccagcccaactacctgagcgatccgcgcgacctgaaggtcgccgccgacgccatacgcctgacccgccgcatcgccgccgctggccgccttccgtccgcaggaatacaagcccggcccggaataccgcagcgaagaggatctgcagcgcgctgcggcggagatcggcaccaccatcttccaccctgccggcacctgccgcatgggccaggggccgcaagcggtggtggatgcgcaattga

SEQ ID NO: 360557 - DNA, 1218 bp, Pseudomonas aeruginosa; identical to SEQ ID NO: 339240

SEQ ID NO: 360558 - DNA, 1437 bp, Pseudomonas aeruginosa
atgtcgttgggaaacctcgtcgctgtcgtcttcggcctggccttcggcggagcgctgctgatgctcagcccggccaaggccggcgccgccatggtcggcctggcggccgcggtcaccatcctgcgcttcccgttctgggggctgctgctgttcgccctggtggcgaccttcatgccctactccacggtcaacgtggggatccgttcgacggtcagcgaagcgatcctcgccctgacctggggcgcggtgctctggcacatcttcctctcgcgcctgccgccggcgccggcgctgcgctaccgctccaccgagcgcatgctgctgtggctgatgctgttcaccgtgctgccgttcatggtcggccaggtcagcatcaaggccgaggccagcggcctgtcgaactggctgcgctggttgctcaacctgtccatcgtgttcctcgccggacgcctgctggtggagcgcaagaaccgcgagaccctggtcatcgccctgctgctgggcaccctggcgatgctgctgatgtccatcgcggtgttcatccgctaccgctcggcgtcggggatggcgccgatcctggcgatgttcaactacgccaacctggacaccctcaagttcggcctggaggcgctttcctcgcggatgggctcgccatggatgcaccccaacgccaccggcgggatcatggccctgctgctgcccctggcgttctgctacggggtcgccaaccagggctggcggcgcggcctgggcctcgccgtggcggtcctcggcgccgccgcgatcctcctcgccagttcccgcggggcgatgctcagcctggcggtggtgctgttctggatgtccctgcgcaaggtgccctacaccggccgcctgctgttgctcggggtcggcctggtggtggtcctggtgctcagctacccgccgttgcaggaacgcctggcgaccatcttctcgccgcagaacgccagtaccgaggtgcgcttcgacgaataccggatgttccccaaggccgtcgcccgctatccgctgggaatcggcttcaaggtcgacccgccggtgccgggtaccgacctcctgggcatctccaacctgtggctgaacttcatgtacaaggtcggcctcggcggcatgctgctgttcatcgcggtgacctggcgctggtggcgcgaagcccgtccggagaaaggcccgatccgcctgacccgcgacaacgcgatctggctgggcagtacgggcggcatcctggcggcgctggtcagcggcctgttcgaccactacttcagcttcgccgtggtgatgatcggcctgttctggctgctggtcgggatcaacctgctggaagcccgccggctgttcccggaacgccagccgcaaccgcgggcggtgggttatcgcaagctcaagcgacagctcgagcgcggggccgaggcctga

SEQ ID NO: 360559 - DNA, 687 bp, Pseudomonas aeruginosa
gtgctcggcgcgatctcgccgttcagcgatgccacccgctacatccagttgcgcggcacgttgccgctgggtggcatgttcgccggcgataccctgcagatcatgggttcctattcgaaggtcaacccggacattccggactcggtattccccttcgacagcgtcagcaagagcaccgaaggcagcatttcctacaaccatcccttcatccgctcgcgctcgcagaacctgagcggcggcctggcgttgcagtggaaggataccgagacccgcctgcgcgacttcgccagcgacgcctcgaaccccggtcgtgaccatgtgcgggtgttccagcaacgcctgacctatgactgggtcgaccgctggatgggcatcaacctggcggaggtgcgcaacaacatcggcctggacatgtggggcgcgaccaagaaggacgatgaacgtcgttcccgcgaagtggccgacggacgtttcgtctatctcaacggcaacatcgggcgtctgcaagggctcggtggaccctggtcggtgtatggcgaattgcaatggcagtacagcttcgacccgttgctgccgagcgagcgcttcggcgtcggcggcagcgggatcggtcgcggcttcgccccgggcaacatgagagagggtgagaaatacctaggaggaggtgcgcgaaaaatcgagatatag

SEQ ID NO: 360560 - DNA, 603 bp, Pseudomonas aeruginosa
ttgaacgacgccgcctacgccgaggcccgctgggccgaactgcagaaccagggtgaccttgcctgggacctggatgccatcaccaaccgcagcgaggcgatcgccttcctcaaacgtttcgagaaccgcctgtgcatctactcggcctatgtcgagaagctctacagcaactacagcttcgtgattcccgagagcgaccatggcggcatcaccatcctgcccagcgagcaggcctggcacgacaccttccacgatatcccgctggccgcggtggagcccaccgggatccatatcctgccgggcgagaccatgggctatcgcgggctctacctgaagattcccggcgagcaccgcctggtggcgtcgaaggaattgccgttccaggaaggattgaaactgctgatccagcgttaccaggctcacgacgacgtgttcctgccgatcctggtcaagggcgacctgcgcgagtatgaagcgcgcatgccctcgctacacctgcaccggatcaaccccgcccgcctcagcgcacactccctgctcagcctcaacgccatcaagggcgccatcgccgaccatctgatcggcctgttccgccagcagtga

SEQ ID NO: 360561 - DNA, 1047 bp, Pseudomonas aeruginosa
atgtcccgtcgtctgcccttcctgctgcgttgcgcgctgttctgcggcgccggtctgctggctgccaccgcccaggcgaggatggagtcgctggacgacgaccagctttccgacgtggtcggccaggccttcatcaacctcaccaccgacgccgccaacggactgaacttcacccgcatcaacttcggcgccgacatcgagacccaactgaacatgaagaagctgcagttgggccagtacaaccgcagcggcgagcttgccggcagtgccgacatcgccatcgacaacttcgccctgggcacggtcaacgacgccaccggcgcgatcaacccgttcctcatcagcaatccctacatcgagttcgcctacgacggcagcaagatggtcggcatccgtatcggtttcggcgaagccaagggctacctctcgggcgatatcaaaaccctcaccggcaacgtgccggtggacctgtacggcaccggcagccaactgggaggcagcatttcctgcggcctgctggccctcgactgcctggcggcgaagaccgccatcactctcaccggcagctctcagtacaccgcccaggcagagctggtgaacagctccggcaaccccgacccgatccgcgctgccatgatcggcctgaagaacggcacggccctggacatgcacgacagcaccatcatcggcagcctggtgaacgtcctgctgcccttcctgacctccaacgactgcaagctgatgggcgcccagacatgcttcaacctggcccagtaccagtcgttcccgatcggcaccgtggatccgaacaacgcgcagaacttcatcgactcgtcgaaaggcttcttcatctcgatgcagagccagaacgtccagtggcgcgaccagcaggatccctccaagctggtcgccgcgctggccggtgccttcctcaacatgtcgcgcaacgccgatggaacggcgccgatcaaggtcgacttcggtcaggccttcaatggcattccacggcaggacacctgcctgggcggcctgaacaagggctgctga

SEQ ID NO: 360562 - DNA, 1020 bp, Pseudomonas aeruginosa
atgagtcgcgcctgcctgctcgcggccctgctggccgcccccttcgcccatgccgagatgacagcgctcgacgacgagcaactgtcggacgtgcagggtgccggcatcggcttcgtcctcgacagcgccatggtcgacggcaacaaggccaccatcgcgatcaatggcgtgaccaacaccgccaccgggcagaacgtgccgattacggtaaaggagctgtacgtcgccgccactggcagcaacaagggcagcaccctggcgccggtgactctcggccgtctcaatttcccgttcaagctgaatctggccaagggttcggtgctgaccacccagctcgacgacgggcgggtggtcagcaccttgccggacaccgcggacgtgatcgagctggctttccccagcctggtgagcggcgccggcggccagccgtgcatcgctggttacgccggtgccggcagcaactgctcgagccgggccagcgaaaaggtcgacgccggcatccgcttcgacttcggcgtcacttccacgcgcaccgatgtgctcaacctggacttctccgaactggcgatggacggttcctacctgcgcttctggggcgccaacgcgcgcagccaactggttggcgagatgcgcctgaacctctacgccaagactttcgagatcatgtcctgcggtgctggctcgcccagttgcgtcagcgccgccgagcaggccgcgcgcaccgtctacctgaccaacgcctatgccagcgtcgcgcttggctacgggaagtcgcagccgttgctgttctcggtcaccgccgacggcaacttcactttcgaactgcccaagctgaccctggccaacgccgctgacttctacgccaatgcgccgcgcaccagcctggtgatcgagaacctcaacatcggcggtacccggccaggctacgggcaggtaccgaccggcggctacaacatgggccgcaacgagatatccgggctcagcttcaactacctgaaggtgacgtcgcacaacctctga

SEQ ID NO: 360563 - DNA, 537 bp, Pseudomonas aeruginosa
atggccaagcagactcatccactggcaggcggcatcggcatcctcgcggcgctggcgctgctgttcagcgcttcggccggggccgagttgcgctcgctgggcgatagcgatctggacgacgtggtcggccaggccgggatcagcatcagcgcctcgctcaatctccaggaaaatccttcgcagacgcgctgcgccggcggctgcggcgcgcgcctggcgatccagccggccggcagcggcaacaactacctggtgatcgacgatatcagcggcaagttcagcttcgacgaagtcaccctggacgtggtgaccatcaaggacggtttcggcggcgacggcgccgccttcaaccgcccggtgctgcgcgtcggcctgaaggacaccagcttccaggacctgcgcttcaccatcgctggcgccaacaaggcgcgcggtaccgatcccgggctggtgcagaccaacctggtcagcgcacgcatcgacggcaccctcaagctgcagggcaacgtcaatatcttcaccgtcgccccgcgttga

SEQ ID NO: 360564 - DNA, 798 bp, Pseudomonas aeruginosa
atgcagataaccagttggctgccccgccagccgttgccgttcgccgcaccttcgcggccggagttgctggagaccccgccccgggaagagccggcggtgcctgtgcgtgcgcgcgccgcgatcgatgcgccgcaggcccgcgtcccgcaagccgaggcgccggccagcgcgccgagcgtggctcccgccgcgcccgcggaaggccgggggatcccgatcagcctgccgaagccgggagccccggcggcgaagaaagccgagctggtcgcgccggtcgaagaggccccggccgagccgccggcggtccaggccccgccgccgcgcttcgccttgcaactgctgcaggcgggctcctgcaccctgctggtcgaactgcccaccggcgaacccttcgccagccgtgatccgggttacctgctgctgcgcgacctgctgcgcgccgccggcctgccggacagcccgcggctgatcggcgaaccggtacgctggccgctgctggcgcgcggcaacctcgaccaggggccgcaggcggccctggagttcgtccagagcttcgtcgccgcgcgcatggaggagagcgagcgtagccgctgcctgtggctggtcggcctgccggcgatccgcttcgccggcgagggcgacgagggcagcctgttccgcgaactgcaggtggacggtctgggcgcaacctgggccgtgccgggcctggaagccctcatggaagaacccgccctcaagggcgagctgtggcgcgccatgcgccgtgtccgtcagcgctggtcgagcgagattcaatga

SEQ ID NO: 360565 - DNA, 453 bp, Pseudomonas aeruginosa
atgagcgatgcgatttccttccgcccgatgaccgaggcggacctcgatgccgtgctgaaaatcgaatatgccgccttcagtcacccctggacccgtggcatcttcagcgaaggcctgaagaactaccattgctggctgatgttcgagggtagccagcaggtcggccatggtgtcatccagatcatcctcgacgaggcgcacctgctgaatatcacggtgaagcccgaaagccaggggcgtggcctcggtctgcgcctgctcgaacacctgatgcgcgaggcggccggccaccaggctcgcgaatgcttcctcgaagtgcgcgcttccaaccaggccgcctaccgcctctacgaacgctacggtttcaacgagatcggccgccgtcgcgactactaccccgccgtcggcgggcgcgaagacgccctggtcatggcctgtaccctgctcgactga

SEQ ID NO: 360566 - DNA, 1239 bp, Pseudomonas aeruginosa
atgtgcgacaccctgatccttcgccaccagggccagacctggttcgccaagaacagcgaccgcgagcccgccgaaccgcagcgtctgctgcgcctgccggcggtgcgcaacgatccggaagcgcgcttgcgcaccacctacctcgacattccccaggccgcccagcggcatgcgctggtgatcagccagccgagctggatctggggcgcggaaatgggcgtcaatgagcacggcgtggccatcggcaacgaagcggtgttcaccaagctgacccgtcagcgcggcaccgcgctgctcggcatggacctgctgcgcctgggactggagcgcggcgccagcgcccgcgaggcgctagaggtgatcaccgggttgttgcagcgttacggccagggcggcccggccggctaccgcgacaagcgcatccgctacgacaacagcttcctcatcgccgaccccggcgaagcctgggtgctggaaaccgccggcaacctgtgggcggcgaagaaggtcgagcgctgggccatctccaacgccctgacccttggccacgaattcgacctgtgcagccgcgacctcgaggaccaggctcgccgccagggctgctgggatggtcgcggcgacttccacttcgcgcgggtcttcgacacccgcctgctaccctgggtcggcggcgcgcaccggcgctgtcggatcaaccagcgcttcctcgacagcctgcctggcgagccggactggcacgcgctgttcgccgcgctgcgccaccatggcccgcgcggggaccacttccgccgccacaacaaccgccaggtatgcatgcatgccggcagcttctggcggccttcgcagaccaccgccagtctggtcgcccgcttgcgcgacgacggcccgctgctggccgccaccggtacttcggcgccgtgcctgggactgttccagccgctgtccttcgatccggcctccggcgccgccgtgctcagccagccgcgcgaggcggtacaggagtctccctggtggcgcttcgaggcggtgcaccgccgcgcgctcaccgaccgcgccttccgccggctcctgcgcagcggccgcgattggctggaacgggaactcttcgccgacctcgaacagcccgactggccgcgcctggcagaggacgccgccgcctggcacgcctgttggcatgatcaggtcgccatgcagccgctggcgcagcagcgctggtggcgtagccacgccgcgctgtga

SEQ ID NO: 360567 - DNA, 648 bp, Pseudomonas aeruginosa
atgagcgacttgcagcaactgttcgagaacaacgtccgctgggccgaagcgatcaagcaggaagacccggacttcttcgccaagctggcccgccagcagacccccgagtacctctggatcggctgctccgacgcacgggtgccggccaacgaaatcgtcggcatgctgcccggcgacctgttcgtccatcgcaacgtcgccaacgtcgtgctgcacaccgacctcaactgcctgtcggtgatccagttcgccgtcgacgtgctcaaggtcaagcacatcctggtcaccggccactacggctgcggcggcgtgcgcgcctccctgcacaacgaccagctcggcctgatcgacggctggctgcgcagcattcgcgacctcgcctatgaataccgcgagcacctggagcagttgccgaccgaggaggagcgcgtcgatcgcctctgcgagctcaacgtgatccagcaggtggccaacgtcagccacaccagcatcgtccagaacgcctggcaccgcggccagtcgctgtccgtgcatggctgcatctacgggatcaaggatggcctgtggaagaacctcaacgtcaccgtcagcggcctcgaccagttgccgccgcagtatcgcttgagtccgctgggcggttgctgctga

SEQ ID NO: 360568 - DNA, 2229 bp, Pseudomonas aeruginosa
atgccccgctccatccctttgcgcccggctcccctggcgctttccctgtccctcttcgcttcgttttccgctcctgcgctggctgccgatccggtggagcagcagatggtggtgatcggctcgcgcgcgccgaccagcatcagcgagttgcccggcacggtctgggtgatcgagcgcgagcaactggaccagcagacccaggccggcgtgccgctgaaggaggcgttgggacaattgatcccgggcctggatatcggctcccagggtcgtaccaacaacggccagaacctgcgcggacgcagcgtactggtgatgatcgacggggtgtcgctgaacagttcacggggcatcagccggcagttcgactccatcgacccattcaacatcgagcgcatcgaggtgatgtccggcgccagcgcggtatacggcggcggcgccaccggcgggatcatcaacatcgtgaccaagaagggcgtcggcggcgacactcgcttcaacaccgagctgggcgcccgcagcggcttccagagccatgaggaccacgacctgcgcgcggcgcagtcgatcagcggcggcaacgacctgttcaacggccgcctggccatcgcctaccagaagaacggcgcggcctacgacggcagtggcgaccaggtactgacggacatcacccagaccgacctgcagtacaacaggtcggtggacctgatgggcagccttggcttcactttcgccaatggccacagcctcgatctcggcctgcagtactacgactccggctacgacggcgaccgcggcctcgatcttgggcgcaacttcgatgccctgcgcggacgggcaccctattcgatcaagggcggcgtcgacctcgaccgcgagccggagagcaagcgccatcagttcaacgccacctaccacgcgccggaagtgctgggtcacgacctctacctgcaggcctactaccgcaacgagaagatggccttcaatcccttccctaccatccgctacagcaataccggcgcgatcaactacggcacctcctactactcggcctcgcagcaggacaccgactactacgggatgaaactggccctggtgaagacctgggagcgcgccagcctgacctacggggtggacctggaccgggaaaaattcacgtccgaccagatgctcttcaacctgccgctcgccgccgccagcggcgggctggtagccagcgaacaggccaagctgggccgctacccggacatcgataccgacagccgcgccttcttcctccagggcagttggaaggccaccgacgacctgaccctgagcgccggcgtgcggcgccagtcgatgagcaccgacgtcagcgacttcgttgcggcgaaccagcagatcctcatcgccaacggcctcggcaagaccgccgacgcggttccgggcgggagcaaggactacgacgtcaacctggtcaacgtcggcgccatctacaagctgaacctgcaacaacaggtctgggccaactacagcgaaggcttcgagctgccggacccggccaagtactacggtttcggacgctacggcgcagccgacggcaatggccactacccgctgttgcagggggtcagcgtgaacgactcgccgctggacgggatcaagaccaagcaggtcgagctgggctggcggcacaccgacggtgccctggatacccaggtggcggcgttctattcctggtcggacaagagcatcaagtacgactcgaagaccctggcggtgctgcagcaggacaccaagaagcgcaactacggcctggagggccaggctacctactggctggacgatcactggcaggtcggcgtcaacggcctggccatccgctcccaggagaaggtcgacggccgctggctgaagcaggacgtgacctcggccagcccgtccaaggccggcgccttcgtcggctggaaggacgaccagcgcagcctgcgcctgcagggcgtgcgcaccttcaacctgaacgacgagccgggcaacaagatcgacggctacgcgctgttcgacctgctcggcacccaggcgctgccggtgggcaccctcaccgcgggcatccagaacctgctggacaaggactacaccacggtctggggacaacgcgcgcaggtctactacggcgggctcgcaccagcgggactgttcgactacaagggacgggggcggacctacagcctgacgtatagcgtggagttctga

SEQ ID NO: 360569 - DNA, 306 bp, Pseudomonas aeruginosa; identical to SEQ ID NO: 323392

SEQ ID NO: 360570 - DNA, 1101 bp, Pseudomonas aeruginosa
atgggattcaactgcggcatcgtcggcctgcccaacgtcggcaagtccaccctgttcaacgccctgaccaaatccggtatcgcggcggaaaacttcccgttctgcaccatcgagccgaacagcggcatcgtgccgatgcccgacgcgcgcctgaacgccctggccgagatcgtcaagcccgagcgcgtactgcccaccacaatggaattcgtcgacatcgccggcctggtggcgggcgcctccaagggtgagggcctgggcaacaagttcctcgccaacatccgcgagaccgacgccatcgcccacgtggtgcgctgcttcgaagacgacaacgtgatccacgtgtccaacagtgtcgaccccaagcgcgacatcgagatcatcgacctcgaactgatcttcgccgacctcgacagctgcgagaagcaactgcagaaagtcgcccgcaacgccaagggcggcgacaaggaagccctggcccagaaggccctgctggaaaagctcatcccccacttcaccgagggcaagccggcgcgttcgctgctgaagaacctcggtgacgaggagaagcgcctggtacgcagcttccacctgctgaccagcaagccggtgatgtacatcgccaacgtcgccgaggacggcttcgagaacaacccgcacctggatgtggtaaaggccatcgccgaggaagaaggcgcggtggtggtgcctgtgtgcaacaagatcgaagccgagatcgccgagctggaagacggcgaagagaaggacatgttcctcgagtccctcggtctcgaggagcccggcctgaaccgtgtgatccgtgccggctacggcctgctcaacctgcagacctacttcaccgccggggtgaaggaagtccgcgcctggaccgtccgcgtcggcgccaccgccccgcaggccgccggcgtgatccacaccgacttcgagaaaggcttcatccgcgccgaagtggtcgcctacgacgacttcatccagttcaagggcgaacagggcgccaaggaagccggtaaatggcgcctggaaggcaaggactacatcgtcaaggacggcgacgtgatgcatttccgcttcaacgtgtaa

SEQ ID NO: 360571 - DNA, 585 bp, Pseudomonas aeruginosa
gtgactgccgtacaactgatcgttggcctgggaaacccgggtcctgaatacgaccagacccggcataacgcgggggcccttttcgttgagcgcctggcgcatgcccagggcgtcagcctcgtggctgaccgcaagtatttcggcctggtcggcaagttcagccaccagggcaaggacgttcgtctgttgatcccgaccacctacatgaaccgcagcggccagtccgtagcggcgctggcgggattcttccggatcgccccggacgccatcctggtggcccacgacgaactcgacatgccccctggcgtcgccaagctcaagaccggcggcggacacggcgggcacaacgggttgcgcgacatcatcgcccagctcggcaatcagaattctttccatcgcctgcggcttggcatcggccatccggggcacagcagcctggtttccggttacgtgctcggccgcgccccgcgcagcgagcaggaactgctcgacaccagcatcgacttcgccctcggcgtgctgccggaaatgctcgccggggactggacccgggcgatgcagaagctgcacagccagaaggcctga

SEQ ID NO: 360572 - DNA, 615 bp, Pseudomonas aeruginosa; identical to SEQ ID NO: 322710

SEQ ID NO: 360573 - DNA, 942 bp, Pseudomonas aeruginosa
gtgtccaagatgatggtcttcacggggaacgctaaccccgatcttgcacgacgcgtcgtgcgtcagctgcacattcctcttggcgatgtttcagttggcaaattctccgatggcgaaatcagcgtcgaaatcaacgaaaacgtccgcggcaaggacgtattcctgattcagccgacctgcgcgccgaccaacgacaacctgatggaactggtggtgatggccgatgccttccgccgctcctcggccactcgtatcaccgctgtcatcccctacttcggctatgcccgccaggatcgccgtccgcgttccgcccgcgtggccatcagcgccaaggtagtggccgacatgctgaccgtcgtcggggtcaaccgtgtcctcacggtcgacctgcacgcggatcagatccagggcttcttcgatatcccggtagacaacatctacggttcccccgtgctggtggacgatatcgaagaccagcgcttcgagaacctgatgatcgtctccccggacatcggcggcgtggtgcgcgcgcgcgccgtggccaagtccctgggcgttgaccttgcgatcatcgacaagcgtcgtcccaaggccaaccagtccgaagtgatgcacatcatcggtgacgtcgaaggccgtacctgcgtactggtagacgacatggtcgataccgccggcaccctcggtcacgccgccaaggccctgaaagagcacggcgccgccaaggtcatcgcctactgcacccacccggtgctgtccggccgtgccatcgagaacatcgagaaatccgtactggacgagctggtggtgaccaacaccatcccgctgtccgccgctgcccaggcctgtggccgcatccgccagctggacatcgctccggtcgttgcggaagccatgcgccggatcagcaacgaagaatcgatcagcgcgatgttccgctga

SEQ ID NO: 360574 - DNA, 849 bp, Pseudomonas aeruginosa
atgagcgtgcgcctcagcctgccagccccggccaagctcaatctgttcctgcatatcctcggccgccgcgacgatggctatcacgagttgcagaccctgttccaattcctcgaccacggcgacgagctgcatttcgaagcccgccaggacggccaggtacgcctgcacacggaaatcgccggggtgccgcacgacagcaacctgatcgtgcgcgccgcgcgcgggctgcaggaagcctccggcagcccgcaaggcgtcgacatctggctggacaagcgcttgcccatggggggcggcatcggcggcggtagctccgacgccgccacgacgctcctggccttgaaccatctctggcaactcggctgggacgaggaccgcatcgccgccctgggcctgcgcctgggcgccgacgtgccggtcttcacccgcggacgcgcggctttcgccgagggcgtgggcgaaaagctcaccccggtggacatcccggagccctggtatctcgtcttggttccgcaagtacttgtcagcacagcagaaattttttcagatccactgttgacacgcgattctcccgccattaaagtgcgcaccgttctcgagggggacagccgaaacgactgtcagccggtagtcgagaggcgttacccagaagttcgtaacgctttgatcttgctaaacaaatttgtttcagctagattaaccggcactggaggttgtgtgtttgggagcttcccaaacaaagctgaagctgataaagtctcggcccttcttccagaccaccttcagaggttcgtcgccaaaggaagcaacgtctcgatgttgcaccggaagctggaaactctggtctga

SEQ ID NO: 360575 - DNA, 618 bp, Pseudomonas aeruginosa
atgcgtctacgtcttttcctcgccgcctccgcgctggccctgctcagcggctgcgccggcctgacctcccacgaagccctggaaggccagggcgatgcgcagacctggaaaacccacaagcagcagctcagcgagctggatgcctggcagatcgacggcaaggtcggcatccgcgccccgcgcgactccggcagcggcaccctgttctggctgcagcgccagggctactacgacatccgcctgtccggcccgctcggccgcggcgcagcacgcctgaccgggcgtgaaggcgcggtgagcctggaggtcgccgggcagggccgctaccaggcggagtccccggaagcactgctggaagaacaactaggctggcgcctgccggtctcgcacctgctctggtgggtacgcggcctcccggcgccggacagcaagagccgcctgaccctcgacgccgacagccgcctggcgcgcctggaacaggacggctggcagatcgaatacacccgctacgccgaacagaacggctactggctacccgagcgcctgaaactgcacggccaggacctcgacgtcaccctagtgatcaaggactggcagccgcgccagctcggccgctga

SEQ ID NO: 360576 - DNA, 1728 bp, Pseudomonas aeruginosa
atgaacaaatcccttgcactgctgaccgtcacgctgctgctcggcggctgccagtcacttatccacaagactcccgatggcaccccgccggtggaagacaccgcggtcgagaccaaggccaagccggaaaagtacggctccttcagcgaggacagcctgtattcgctgctggtggccgaactggccgggcagcgcaaccgcttcgacatcgccctgagcaactatgtggtgcaggcgcagaaaacccgcgaccccggggtttccgagcgcgccttccgcatcgccgaatacctcggcgccgaccaggaagccctcgacacctccctgctctgggcgcgcagcgcgccggacaacctcgatgcccaacgcgccgccgcgatccagttggcccgcgccgggcgctacgaggagtccatggtgtacatggagaaggtcctcaacggccagggcgacacgcacttcgacttcctcgccctgtctgccgcggagaccgacccggatacccgcgccggcctgctgcagagcttcgaccacctgttgaagaaatacccgaacaacggccagttgctgttcggcaaggccctgctgctgcaacaggacggccgcccggacgaagccctgaccctgctcgaggacaactccgcaagccgccacgaagtggcccccctgctgctccgctcgcgcctgttgcagagcatgaagcgcagcgacgaggccctgccgctgctcaaggccgggatcaaggaacacccggacgacaaacgcgtgcgcctcgcctacgcgcgcctgctggtggagcagaatcgcctggacgacgccaaggccgagttcgccggactggtccagcaattccccgacgacgacgacctgcgtttctccctggcgctggtctgcctggaagcccaggcctgggacgaagccaggatctacctggaagaactggtcgagcgcgacagccacgtcgacgccgcccacttcaacctcggacgcctcgccgaggaacagaaggacaccgcgcgtgccctcgacgagtacgcccaggttggtccgggcaatgacttcctcccggcgcaactgcgccagaccgacgtcctgctcaaggccggtcgcgtcgacgaagccgcccagcgcctggacaaggcgcgcagcgagcaacccgactacgccatccagctgtacctgatcgaagccgaggcgctgtccaacaatgaccagcaggaaaaggcctggcaggccatccaggagggtctgaagcagtacccggaggacctcaacctgctctacacccgctcgatgctggcggagaagcgcaacgacctggcgcagatggaaaaggacctgcgcttcgtcatcgcccgcgagccggacaacgccatggccctcaacgccctcggctacaccctggccgaccgcaccacccgctacggcgaggcccgcgagctgatcctcaaggcgcacaagctgaacccggacgacccggcgatcctcgacagcatgggctggatcaactatcgccagggcaagctggccgacgccgagcgctacctgcgccaggcgctgcagcgctaccccgaccacgaggtcgccgcgcacctgggcgaagtcctctgggcccaggggcgccagggcgacgcccgggccatctggcgcgaatacctcgacaagcagcccgacagcgacgtgctgcgccgcaccatcaagcgcctgaccggcgccgagactccttga

SEQ ID NO: 360577 - DNA, 1269 bp, Pseudomonas aeruginosa
atggccttcattgccctcggcatcaatcacaagaccgcctcggtggctgtccgcgagcgcgtggctttcactccggaacagatggtcgaggcgctgcagcagctctgccgcctgaccaccagccgcgaggcggccatcctgtcgacctgcaaccggagcgaactctacctggagatcgaccatccgaccgcggacgacgtgctcgcctggctggcggactaccatcgcctgactctcgacgagttgcgcgcctgtgcctatgtgcaccaggacgaagacgcggtgcgccacatgatgcgcgtggcctccggcctcgactcgatggtcctcggcgagccgcagatcctcggccagatgaagtcggcctacgccgtcgcgcgcgaggccggcaccgtcggtccgctgctcggccgcctgttccaggccaccttcagtacggcgaagaccgtccgcaccgataccgccatcggcgagaacccggtgtccgtggcgttcgccgcggtgagcctggccaagcagatcttcagcgacctgcaccgcagccaggcgctgctgatcggcgccggcgagaccatcaccctggtcgcgcgccacctgttcgagcaaggcgtgaagcgcatcgtggtggccaaccgcaccctggagcgcgccagcctgctcgccgagcagttcggcgcccatgcggtgctgctttcggagatccccgaggagttggccaacagcgatatcgtcatcagctctactgccagccagttgccgatcctcggcaagggcgccgtggagcgcgcgctgaagcagcgcaagcacaagccgatgttcatggtcgacatcgccgtgccgcgcgacatcgagccggaagtcggcgaactggacgacgtctacctctatagcgtcgacgacctccacgaagtagtggcggagaatctcaagagccgccagggcgctgcccaggccgccgaggaactggtcggcagcggcgtcgccgagttcatgcagcgcctgcgcgaactggccgcggtggacgtgctgcgcgcctatcggcagcaggccgagcgcctgcgcgatgaggagctgggcaaggcccagcggcaactggccaacggtgccgaccccgccgaggtgatggcccagctggcccgcggcctgaccaacaaactgctgcacgcgcccagcgtgcagatgaagaaaatgtccgccgagggccgcatcgacgcgctggccctggcccaggagctgttcgccctcgacgagggcgcgccgcgccactga

SEQ ID NO: 360578 - DNA, 1083 bp, Pseudomonas aeruginosa
atgaaagcttctctgctgaaaaagctggatgtcctcagcgatcgctacgaagaactgacggcgctgctcggcgacgccgaggtgatcagtgaccagacccgcttccgcgcctattcccgcgagtacgccgaggtcgaaccggtgatcctggcgttccgcgactaccgcaaggtgcaggccgacctcgagggcgcccaggcgttgctcaaggacagcgacccggagttgcgcgacctcgccgaggaggaggtcgccgaagcgcgcggccgcctcgccgccctcggcgacagcctgcagcgcatgctgctgccgaaggatcccaacgacagtcgcaacgtgttcctggagatccgtgccggcaccggtggcgacgaggcggcgatcttctccggcgacctgttccgcatgtattcgcgctacgccgagcgccagggctggcggatcgagacgctgtcggagaacgagggcgagcacggtggctacaaggaagtgattgcccgggtcgagggcgacaacgtctacgccaagctcaagttcgagtccggcgcgcaccgcgtgcagcgggtgccggaaaccgaatcccagggccggatccacacttccgcctgcaccgtcgcggtgctgccggagccggacgagcaggcagcgatcgagatcaacccggccgacctgcgggtggacacctaccgttcctccggtgccggcggccagcacgtcaacaagaccgactcggcggtgcgcatcacccacattcccagcggcatcgtggtcgagtgccaggaagagcgctcgcagcacaagaaccgcgccaaggccatggcctggctggcggccaagctcaacgaccagcagcaggccgcggcgcagcaggcgatcgccagtacgcgcaagctgctggtgggctcgggcgaccgctcggagcgcatccgtacctacaacttcccgcaagggcgggtcaccgaccatcgcatcaacctcaccctgtactccctgggcgaggtgatggagggcgcggtggaacaggtgatcgagccgctgctgcaggaataccaggccgatcaactggcggccctgggcgactga

SEQ ID NO: 360579 - DNA, 831 bp, Pseudomonas aeruginosa
atgaccactatctgtacccttctcaaggattcccaactgcccgattcgcccagcgcccggctcgacaccgagttgctgctggcggcggcgatgggcaagccgcgcagcttcctgcgtacctggccggagcgcatcgtgccgcgcgaggccaacgagcggttcgacgactggatcgcccgtcggcgcaacggcgagccggtggcctacatacttggccaccagggcttctggagcctggacctggaggtcgcgccacacaccctgatcccgcgcccggacaccgaactgctggtggaaaccgcgctggcgaccctcgcggcggacaccgctaccgtgctcgacctgggcaccggcaccggcgccatcgccctggccctggccagcgaacggccgctgtggacggtgactgcggtggaccgcgtggaagaggccgtggcgctggccgagcgcaatcgccagcggttgctcctggagaacgtcgaggtgcgccgcagccactggttctccgctctcgatggccgacgcttccggatgatcgtcggcaatccgccgtatatccctgccagcgatccgcacctgagcgagggcgacgtgcgtttcgagccgaagagcgcgctggtcgcgggtagcgatggcctcgacgatatccgccagatcgtcgcccaggcgccgcagcatttgctggacgaaggctggttgctgctcgagcacggctatgatcaaggggcggcggtgcgcgaactgctcggcgcccgcggcttcgccggggtacatacgttgcgcgacctcggcggcaacgagcggatcactctcggacaatgggcatgctga

SEQ ID NO: 360580 - DNA, 759 bp, Pseudomonas aeruginosa; identical to SEQ ID NO: 322718

SEQ ID NO: 360581 - DNA, 798 bp, Pseudomonas aeruginosa
atggcggttgagtcggccgcggtcggcgttttcgattccggggtcggcgggctcagcgtattgcgtgagattcgcgcgcgcctgccatccgaatcgttgctctacgtcgccgacaacgcccatgtgccctacggcgagaagagcgcggagtacatccgcgaacgctgcgagcggatcggtgatttccttctggagcagggcgccaaggctctggtactggcctgcaataccgcgacggctgcggctgcggcggaattgcgcgaacgttatccgcaggtgccgctggtggccatggagcctgcggtgaagccggccgcggcggccacccgcaacggtcgggtcggcgtcctggccaccaccggaactctgaagagcgcgcgtttcgccgccttgctcgaccgcttcgccagcgacgtacaggtcttcacccagccctgcccggggctggtcgagcgcatcgaagccggcgatctctatgggccgcaaacccgggcactgctggaacgcctgctggcgccgatcctcgaacagggctgcgatacgcttatcctcggctgtactcattatcccttcgtcaaacccctgctggccgagctgatcccggcggagatggcggtgatcgatacgggagcggctgtcgcccggcagctggagcgcgtattgtcggcgcgggcgctactggcctctggccaggccgcgacgccgcgtttctggaccagcgcgctgccggaggagatggaaaggatcctgccgatcctctggggaagcccggaaagcgtaggaaaattagtcgtttag

SEQ ID NO: 360582 - DNA, 522 bp, Pseudomonas aeruginosa; identical to SEQ ID NO: 322720

SEQ ID NO: 360583 - DNA, 1431 bp, Pseudomonas aeruginosa
atgaacctgatctggtttcgctgcgacctgcgaaccaccgataacagcgcgctcctcgccgccgccgatgggcgcccttgcctggctctctacctgctcagcccggcgcagtggcgggaacacgacgatgcgccctgcaaggtcgacttctggctgcgcaacctgggcgagctgcaacgccagctcgccgcgctgaacatcccgctgctggtgcgcgactgcggccactggcggcaagccccggaagtcatcggccggctctgtcgggagctgggagtcggcgcggtacacgtcaaccaggaatacggggtgaacgaggaacgccgcgaccaggccgtcggccaacgcctgcgtgaacagggcgtggccttccacagccacctcgaccagctgttcttcgcccccggctcggtgctgacccgaactggcggctatttccaggtgttcagccagttccgcaaggtctgccacgaacggctgtaccaggccctgccgggtgtccgcccgcgtccgcagccccagccaccgcacgcgctggccagcgacccgctgccggatgccgtgcccgccttcccgcggccggccgatagcttgcgccgcctctggccggcaggcgaagaggtagcgcaggaacgcctgcgcgacttcgccgaccagcacctggccgactaccatgaacggcgcgacttcccggcgcttcccggcaccagccaactgtcgccctacctggccgccggcgtactctcgcccaggcaatgcctggacgccgcgctggttgccaaccgcggcgagttcagcggcggccagcaaggcgccgcgacctggatcaacgagctgctctggcgcgagttctacaagcacatcctggtcggctacccccgggtctcccggcaccgccccttccgcgaggagaccgaagccctgcgctggcgccaggccccggcggaactcgaagcctggcaacaggggcgcaccggcataccgatcatcgacgcggcaatgcgccagttgctcgccaccggctggatgcacaatcgcctgcggatggtggtagcgatgttcctcagcaagaacctgctgatcgactggcgcgaaggcgaacgctggttcatgcgccacctcatcgacggtgacctggcggcgaacaacggcggctggcagtggagcgcatccaccggcaccgactcggtcccctacttccgcctgttcaatccgctctcgcagtccgaacgcttcgatccacgcggcgagttcatccgccactggctgccggaactggccggcctggagcgcaaggcgatccacgatccgtccagcctggggctgttcgccggggtcgactatccacggccgatggtcgacctgaaggccagccgcgaacgggcgctggcggctttccgcaacctgccgccgcgcgatggtcgcgcgtag

SEQ ID NO: 360584 - DNA, 900 bp, Pseudomonas aeruginosa
atgaactcgccccacctcgaacgcggcggcctgccgatccgcgaagtcactcgtctgaccggcgtccatccggtcaccctgcgcgcctgggagcgccgctatggcctggtggtgccgcaacgcaccggcaaggggcaccggctctacagcgaagagcaggtcgagcgcatccgccggatactcgtctggctcgagcgtggcgtcgccatcagccaggtgcgcgcgctgctggagcgtccggaggaaaccccggcggcggatgtcgaatccccctgggaacgcctgcacgaacagctgctggacgccatcgccgcgctggccgagcgacgcctcgacgatctgttcaaccaggccgcgtcgctctatccggtagcgaccctctgcgaaaagcttctgcaacccttgctgcagcacctcgaacgacgctggcagggacagttcggcgcgcgcatggagcgggccttcttcttctcctggttgcgcagcaagctgggcgcccgcctttatcaccagcaacggctgcaacagggcacgccgctgctgctggtcaaccagtccgagctgtcgctggaaccgaacctctggctgtgcagttggttgctcagcagcggcgaggtgccgctgcaggtcttcgactggccgctgccaccggccgaactggccctggcctgcgaacgcctggaagctcgcggcgtgttgctgtacgccagtcatcgcctcaatccggagcacctgccgcgcctgctggcaggggtgagctgcccggtggtgctggtcggaccggccgtggagatccagcgcgaagccttcgaaaccttggcgctaactggcctgctgctggcgagcacgcccctggaagcccgccgcctgctcggcgaacgaggcctgttgaacccatga

SEQ ID NO: 360585 - DNA, 957 bp, Pseudomonas aeruginosa; identical to SEQ ID NO: 340962

SEQ ID NO: 360586 - DNA, 984 bp, Pseudomonas aeruginosa
atgagcgtccccatcgccatcatcggtactggcatcgccgggctttccgccgcccacgcattgagatccgccggccagaccgtacaactgttcgacaagggccacggcagcggcggccgcatggccagcaagcgcagcgaggccggcacgctggacctcggcgcgcaatacttcaccgcccgcgaccggcgcttcctcgacgccttgcaacactggcgcgaggaaggctgggtggacgagtggaaacccgctctctaccaataccgcgacggccaactgagcccctccccggacgagcagccacgctgggtcggcatcccacggatgagtgcgatcacccgcgccctgctcaccgatctgcaagtggtcttctcctgccgcatcaccgaggtcttccgcggcaagcagcactggcacctgcaggacgccgagggacagaaccacggtccgttcaaccaggtcctgatcgccatccccgctccccaggccacgccgctgctggccagcgtgccgaaactggcggccaccgccgcgagcgtggtcatggagccgacctgggcggtggcgctgggcttccgcgaggtactcgacaccccggtgcagggctgcttcgtgcacggcagtccgatcgcctggctggcctgcaatcgcagcaagccggggcgcgacaccgccctcgacacctgggtgctgcacgccaccagccagtggagccggcagcacatcgacatggccaaggaagacgtggtcgagcacctgcgctgcgccttcgccgaagtgatcggctgcgccgtgccggaagccgccttcagcatcgcccaccgctggctctatgcacgcccggcggaggctcaccagtggggcgccctcggcgatcccgacctgggcatctacgcctgcggcgactggtgctccagcggccgcgtcgaaggcgcctggctcagcggccaggaagccgcgcggcgcctgctggaacatctctga

SEQ ID NO: 360587 - DNA, 918 bp, Pseudomonas aeruginosa
atgcacattctcttgaccggcggtaccggcctgatgggtcgccgcctgtgcgcccgctggcgacaggccgggcaccggctgaccgtgttcagccggcggccgcagcaggtggaatcgctgtgcggcgtcggcgtgcgcggcatcgatcgtttcgacgagtacggcgaccagccgctcgacgcggtggtcaacctggccggcgagccgatcgcggacaaaccctggagtcacaagcgcaaggccctgctgtgggaaagccgggtacgccttaccgagcgcctggtggaatggctggacgctcgcgagcagcgcccggaccttctgttatcgggttctgcggtgggttggtatggcgacagcggcgagcgcccggtgaccgaggagggggcggcggccggcgaggatttcgccagcgagctatgcctagcctgggagcagatcgcccgcgaggcggagaagctcggcacccgtgtcgtgctgttgcgcaccggcctggtgctggcccccgagggcggcttcctcgggcgcctgttgccgctctaccggctcggcctgggcggaccgctgggtgacggccggcaatggatgccgtggattcatatcgaggatcaaatcgagctgatcgattttcttttgcggcggcccgatgccagcggtccctataatgcgtgcgctcccaacccggtgcgcaaccgcgatttcgccaaggccctgggccgggcgctgcacaagccggcgcggataccgacccccgggttcgtcctgcgcctcgggctgggagaaatgtccggattgctgctcggcggccagcgagccttgccgcaacgattgcaggacgccggctaccgttttcaattcaccgacctggacgtggcgctggccgatgtcctggacgcccgacgaaaggatcaggcatga

SEQ ID NO: 360588 - DNA, 1023 bp, Pseudomonas aeruginosa
atgaccgagaatgccctgctgttgctcaacctgggctccccggattcgacccgggtggaggatgtccgccgctatctcgaccagttcctcatggatccctacgtggtcgacctgccctggccgctgcggcgcctgctggtgtcgctgatcctgatcaagcgtccggccgaatcggcgcacgcctacagctcgatctggtgggacgaagggtcgccactgatcgtcctcagtcgtcgcctgcaggaggccatgaagccgcactggccgcatgggccggtggaactggcgatgcgctacggccagccggccatcgagaaggtcctgctcgacctggcgcgccgtggtatccggcgggtgaccctggcgccgctgtatccgcagttcgccgacagcaccacgaccaccgccgaacaggaggtgcgccgggtgatcgccgcccatcgcctgggcctggaggtcagcacgctgccgccgttctacgaccagccggtctacctcgatgccctggtggaaagcgtgcgtccgtacctgcagcagccccacgaccatctgttgctgagcttccatggcttgcccgagcggcacatccgcaagctggtgaaggatcctgcccacgacctgctggccgagaacagccgcaacgtcagccccgaagccctcgccctctgctaccgcagccagtgcctgcgcaccgccgaggccttcgccgagcgcgccggcctggagcaggggcgctggtcggtgtcgttccagtcgcgcctggggcgcgccaagtggatcgagccctataccgacgccaagctcgacgaactggtgcagcgcggggtgaagcgcctgctggtgatgtgtccggcgttcgttgccgactgcatcgagaccctggaggaaatcggcatgcgcggccgcgagcagttcatcagtgccggcggcgaggacctggtgctgattccctgcctcaacgaccaccccgcctgggtcggcgccctggccgagatgagcgggcgcttggccaggccgctctga

SEQ ID NO: 360589 - DNA, 1374 bp, Pseudomonas aeruginosa
atgcataacaacaataacggctatccctccaaccttgcggcctggaccacggtggcgatcctcatggtcgcctatgtgctgtccttcatcgaccggcagatcctcaacctgctggtcggcccgatccgccgcgacctggccatcagcgatacggaaatgagcctgctgatgggcttgtccttcgccctgttctacaccctttgcggtatcccgctcggacgcatggccgacaaccgcagccggcgcggcctgatcctgttcggcgtgctggtgtggagcgcgatgaccgcggcctgcggtctggcgcgcagctattggcaattcctcaccttccgggtcggcgtcggggtcggcgaggcggcgctgtcgccagcggcctattcgctgatcgccgacagcttcccgcgcgagcgtcgggcgacggcgatcagcgtctactcgatgggcatctacctgggctcggggctggccttcctgctcggcgggctggtgatcaagtttgcctcggcccagggtgacgtgcatctgccgctgttcggcgaggtgcgcccgtggcaactgatcttcctcatcctcggcgccgccggcgtgctcttctgcctgttgctgctggcgatccgcgagccggcccggcgcggagtcggcgcaggcgtggcggtgccgctgggcgaggtcggcgcctacctgcgggccaaccgcaagaccgtgctctgccacaacttcggtttcgcctgcctgtccttcgccggctacggcagcggcgcctgggtgccgaccttcttcgtccgcacccacggctgggacgccggtcatgtcggagtggtgtacggcagcatcgtcgcggtgttcggctgtctcggcatcgtcttcggcgggcgcctggccgactactgggcgaagcgcgggcgcagcgacgcgaacatgcgcgtcgggctgctcgccgcctgggcggtgattcccttcactctggtctatccgctgctggacaacgccaattgggcggcggcgctgatggcgccgacggtgttcttcctgagcatgccgttcggcgtggccccggcggcgatccaggagatcatgcccaactcgatgcgcggccaggcctcggcgatctacctgttcgtggtcaccctgttcggtctcggcgtgggcccgacggcggtggcgctggtcaccgatttcgtcttcgccgacgacatggcgctgcgctactcgctgctgctggtgaccctggccgcggtgcttggtgcggtggtcctgctggggatcggcctcaagccctatcgcgccagcctggagcacctgaaggactggagcctgcgacgggaaggcgagggcggcgaggattggaaggcctcccggcagccggcctga

SEQ ID NO: 360590 - DNA, 948 bp, Pseudomonas aeruginosa
atgagccgccactccacgtccgcctgcctgctcggcttcgctacgctctgcgccagcccgttgctgctcgccgcctgcaccaccagctccggcaccggcaatttcggcagcctgagctcgttcaccgtggccagcaccgcccagaccatcaccggcaccaccggcttcaagtgcaccggcagcctgttgtcgatcctcagcaccaacaccatcgacgcgaccatcgccagcaccgccaatccgctgggcaccacgccgcggctgtacaacgccgccagcggcacctacctgccctacagtatctgcaaggacaacggctgcggcaccgtctacaacgtcggctcgacggtacgctggagcagcaccaccttcctcggcatcctcggcctgttcaacgccaccgacggcagcctgccgctgtacctgcgcaccgccaccggggtgaccctgccggccggcacctataccgataccatcggcctgaactgggcctggcacctgtgcgcggcgggcatcggcccagtctgcgtatacgacgacggcaccgccagcagcagcgtcaacgttaccctgacggtgctcaaggactgcttcatcgacagcgctccggacctcagcttcggcagcgccgcgctggtctcggccttcaccgcggtgaaccagaacattggcgtgcgctgcaccctgaacgccacctataccatcggcttcgacaacggcaacaacttcagcggcggctggcggcgaatgctcagcggcgccaacgcgatccagtacaacctctacaaaccgggagactcgacggtctggaccaccagcaacacccaggcaggcaccggtagcggcgccgcgcagaacgtgccgtaccgggccatcgtcaacccggcccagggcaacgtccccgccggtacctacagcgataccgtgcgggtgatcctcacctactga

SEQ ID NO: 360591 - DNA, 2373 bp, Pseudomonas aeruginosa
gtgcctcgcccgtgtcagcggcgctctcgccaccaccgctcgctactgatcggcctggcgctgctctcccctgtccatgcggcggactacctggccggactgccgccgccgcaacccgctccgtccggcggcagcaacgtcctctactacctggaactggtgatcaacggccgcgacagcggccaggtggtgccggtcaacgccggcgatggccattacctgctcgacgccgcggccctgcgcgaagccggcgtgcgcctgcctggcaaccccgccggacaggtcgcggtggacgccctgcccgaggtccgggcggactatgacagcgccagccagcaactgcacctgcaagtgccgccggactggctgccggagcagcgcttcgacgatcccggactggtcgcccgcgccccggcgcgcagcagcctcggcgcgctgttcaactacgacctgtactactcggaccccgccgacggcgccacgccctggctttccgcgctgctcgagcaacgcctgttcgacggcttcggggtgatctccaacaccggcgtctacacccgctatttcggcgacgccgacaacctcgacagccgctacctgcgctacgacacctactggctgtacaacgacgaacgcaacatgcacagctaccaactgggcgactacgtcaacggcgcgctgaactggaccaccccggtacgcatgggcggctttcgcttcgcccgcaacttcggcgtacgtccggacctggtcacctatccgctgctgcgcttcgacggccaggccgccgtacccagcaccgtcgacctgttcatcaacggctacaaggccagcagcgccgacctgcaacccggtcccttcgccatcagcaacgtgccgtacatcaacggagccggcgaagccacggtggtgaccaccgacgcccagggtcgacaagtggtgaccagcctgccgttctacgtatccaacaccctgctggcgcgcggcctgagcgatttcgacctgtccgtcgggcgcctgcgcgacgactacggcctgcgcaacttctcctatgccgacaacgccgccagcggcatctaccgctacggcgtcagcgaccgcctgaccctctccacccacgccgaggccgccagcgacctgcgcctgctcggcatcggcggcgacatcgccgtggccaccttcggcaccctcagcctggcggccagcggcagcgacggccagggcgacagcggccagcaatacctgctcggctactcctactattcgcgacggctcggcctcagcctgcaacacatcgagcgcagcgccggctatggcgacctcggcaccctggacggcgagtaccagttgagccggcgcaccgaccaggctaccgccagcctgaccttcgacgagcagggcaccatcggtaccggctacttcgacatccgcgcccgcgacggcagccgcacgcgcctggccaacctctcctacagccgcccgatcggcagccgcagcagcttctacctggcgctgaacaaggatctcgacggcgacggctacagcgcgctgatgcaactggtgattcccttcgacatcaacggcctgctgaacatcggcgtcacccgcgacagcgaccgacgctacagcgagcgggtgatctggagccgctccacgccgagccagggcggcctcggctggaacctcggctatggcggcggcgccagccgctaccagcaggccgacctgacctggcgcatgcagaacgtgcaactgcagggcggcctttatggcgagaccggcaactacacgcgctgggccgatctcagcggctcgctggtatggatggacaacgccgtgttcgccagcaaccggatcaacgacgccttcgtcctggtcagcaccaagggttatccacaggtgccgatccgctacgagaaccaactgatgggcagcaccgacgacaacggccacctgctggtgccctgggtcgcggcctactacccggcgaagttccagatcgagccgctggaccttccggccaacgtcagcgcgcccgaagtcgagcagcgcgtggcggtacgccagggcagcggcctgctgctggatttcccgatccgtgccgtagtcgccgccagcatcagcctggtggacgagcgcggcgaaccgctgccgctgggcagccaggccgaagaaaccggcagcggccagcgcgccagcgtcggctgggacggccaggtctatttcgaaggattgcaaagcgacaaccagctacgcgtggtccgccccgacggccgggcctgccaggcacgcttccgcctggacacgcgcaaacccaccgtcagccaggtcggcccgctgacctgctcggccccgatcggagatacgccatga

SEQ ID NO: 360592 - DNA, 789 bp, Pseudomonas aeruginosa
atgcccagtccacacctacctctccgccccggccgctggcttgcggcgctgctggcgctgttcctgggcggcccggcacaagccgccagtgcggtgctgatctggccgatcaacccggccatcgaagccgaccaaccggccaccgcgctgtggctggagaatcgcggcaagcaaccggtgaccctgcaggtgcgcgtgctcggctggtcccaggcggatttccaggacgtctatcgcaaccagcaggcagtgattcccagcccgcccttcgtcaaggtcgagccgggccgccggcagctggtccggctgatccgccagggcggccagcccagcacgccggaggacgcctatcgggtgctgatcgacgaagtgcccgacggcagcgcggggcagacgcaacgaagccccggtctcgccctgcagttccagatgcgctattcggtgccgctgttcgtcagcgccgacggcgtctggacccagccgcgcagcgatgtcgagcgcgacccggccgacgcgacccggccgaagctggcctggcggctggtcgaggaacagggcaagcgttacctgcaggtgcgcaacgagggtagcgtgcacgcccgcctcagccatgtccgctgggagggcaacggccgcagcctggcgctgctggacggcctgctcggctacgtgctgcccggccggcagatgcgctggccgctgccgccggggctgctgccggacgccggcatgaccctgaaactgcaactggcggacaacgacgcgccgatcagcgttcccggctactga

SEQ ID NO: 360593 - DNA, 543 bp, Pseudomonas aeruginosa
atgccgatgtccagccggcgtctattcctgtcgcttctcctgctcccgctgccgaacctggtcgcgcatgccgatccatcgccgatcagccgcgccttccaggtccaggcggtggtcgccaacggctgcgccttcggcaccgccatcagcaacaacgcctatgacctcggcaccctgagcttcggcaccctcggcaacctggccagtccggttaacgtcgccagcagctccggggccggctccatcgtcctgacctgcactccgggaatgaccgtctccgtcgccctcgactacggggtcaatggcggcagcagcagccagcgctacctgaagcgggtgagcggtaacgagaccctcgcctaccagctctaccaggatgccgcctactcccaggtctggggcaacggggcactcgcgcggaccatcgccaactttcccgccagcacccagacctacacggtatacgcgcgcctgttcgcggtcggcagcctgccgtccgccggcaactaccgcgataccgtcaccgtcaccctttcgttctga

SEQ ID NO: 360594 - DNA, 534 bp, Pseudomonas aeruginosa
atggtcctggggggaccgatgagcctgaaccgctacttcaccggaggactgctctgcctgctcggctgcaacccggcaaacgcgcagaccgccaccatcgtcctgagcgccacgctgctcccggcctgcgaggcaggtagcgtcggcagcggcggcgcgatcaccttcggcaccctcgacttcggccagtacgcctccctgaacaacgccatcagcgccaccagccagcaaggcgcaggctccatccgggtcaggtgcgtcagcggccagacctatgcgatcacgctcgacggcgggctctacggcagcgtcgccacgcggcgcatggcgaacatcgccaacaccgccctcaccctgacctacaacctgtacagcgaccgccccggcggcatcgtctgggacaacaccaccggcgttgccgccaccggcaacggcaacgaccagtggtaccccatctacggcctggtgccggcacagaccacgccggtcgccgggacctaccgcgacaccgtcaacgtgaccatcagttggtga

SEQ ID NO: 360595 - DNA, 549 bp, Pseudomonas aeruginosa; identical to SEQ ID NO: 322733

SEQ ID NO: 360596 - DNA, 1284 bp, Pseudomonas aeruginosa
atgggcgatgccttccaggagccgctctggcgccaggtgctgtcaggcgcgcagatgctgttcgtcgccttcggcgcgctggtgctgatgccgctgatcaccggtctggatcccaacgtcgcgctgttcaccgccggcctcgggaccctgctgttccaattggtgaccgggcgccaggtaccggtgttcctcgcctccagcttcgccttcatcaccccgatcatcctcgccaagggccagttcggcctggccgcgaccatgggcggggtggtcgccgccggcttcgtctacaccttcatgggcctggcggtgaagatcaagggcaccggcttcatcgataaactgctgccgccggtggtgatcggcccggtgatcatctcgatcggcctggcgatggcgccgattgcggcaaacatggcgatgggcaaggccggcgacggcagcgagttgctgccgtaccgcaccgcgatgatgatctcgatgccggcgctgctcaccaccctggtggtggcggtattcggcaagggtatattccgcctggtgccgatcatcgccggcgtgctggtcggcttcgccctgtcgttcgtcttcggcgtggtcgacaccgccgcgatcgtcgccgcaccctggctggagctaccgaaattcaccgcgccggaattcaactggcaggcgatcctgttcatcgtcccggtggccctggccccggccattgagcatatcggcggggtcatcgcggtgggcggcgtcaccggccaggactacctgaagaagcccggcctgcaccgcactctcctcggcgacggcctggccacctcggctgccggcctgttcggcggaccgcccaacaccacctacgcggaagtcaccggcgcagtgatgctgaccaagaactacaacccgaagatcatgacctgggcggcggtgatcgccatcaccctggccttcgtcggcaagttcggcgcgatcctgcaaagcatcccggtaccggtgatgggcggcatcctctgcctgctgttcggcaccatcgcctcggtcggcatgaacaccctgatccggcacaaggtcgatctctcggaagcacgcaacctggtgatcgtctcggtgaccctggtgttcggcatcggcggcgtgctgatcggcagcggtaccggccccgacgacatcggcctgaagggcatcgccctgtgcgccatcgtcgccatcgtcctcaacctgttgctgccgggcaacgacggctggcagaacaaggcgctcgacgaacaacacaaggattcacactga

SEQ ID NO: 360597 - DNA, 639 bp, Pseudomonas aeruginosa
atgcccgtacatgagatccgccaccccctcatccgccacaaactgggcctgatgcgccgtgccgatatcagcaccaagaacttccgcgaactggcccaggaagtcggcgccctgctgacctacgaggcgaccaaggacctgcccctggaacagtacgaaatccccggatgggccggcccggtgacggtggagaagatctccgggaagaagatcaccgtggtgccgatcctgcgcgccggcatcggcatgctcgacggcgtgctcagcctgattcccggcgccaaggtcagcgcggtcggcgtcgcccgcaacgaagagaccctggaagcacgcacctacctggaaaaactggcgccggacatcgccgagcgccgctcgctgatcatcgacccgatgctcgccaccggtggctcgatggtcgccaccatcgacctgctgaagaaggccggcagcaaggaaatccgcgccatggtgctggtcgccgcccccgagggcatcgaggcggtacgcaaggcccacccggacgtgatcatctataccgcctcgatcgacgagaagctcgacgagaacggctacatcattccgggcctgggcgacgccggcgacaagatcttcggtaccaagcagaaggaagcctga

SEQ ID NO: 360598 - DNA, 558 bp, Pseudomonas aeruginosa
atgtccgtcgatctcgcgcacatccgccaagtcatggcggaagccgactgcctgttcaacaacgacgaggtcgaggcagccatcggtcgcgtcgccgaggcgatcaaccgcgatctcggcgagaccaacccggtggtcttctgcgtgatgaacggcggcctgatcttctccggcaagctgctcccgctgctcgacttccccctcgaactgtcctacctgcatgcgacccgttaccgcaacgagacctccggcggcgaactgttctggaaggccaagccggaaatctccttcatcgaccgtgacgtgctgatcatcgacgacatcctcgacgaagggcacaccctctcggcgatcatcgacttctgcaagcatgccggcgcacgcgcggtgcacaccgccgtactggtggacaaggaacacgagcgcaaggcccggcccgacctcaaggccagcttcaccggcctctactgcgccgaccgctacgtgttcggctacggcatggactacaagggctactggcgcaacgccgcgggcatcttcgcggtcaaggggctctga

SEQ ID NO: 360599 - DNA, 474 bp, Pseudomonas aeruginosa; identical to SEQ ID NO: 322737

SEQ ID NO: 360600 - DNA, 486 bp, Pseudomonas aeruginosa; identical to SEQ ID NO: 322738

SEQ ID NO: 360601 - DNA, 291 bp, Pseudomonas aeruginosa; identical to SEQ ID NO: 324576

SEQ ID NO: 360602 - DNA, 414 bp, Pseudomonas aeruginosa
atgtacgtccagccctacgtctgcttcaacggccgttgcgaagaggccctgcgtttctatgaacacgccatcggtgccagggtgagtttcctgttccgtttcgacgaggcgcccggtccggtggtggtgcccgaaggctggtgcgacaaggtgatgcacgccaacctgcagatcggcgacagccagatcatggcctcggacgggcacgggccggcgttgcagccgatctccgggatttccctttcactgaatacccgcgacccgcagcaggcgcggcgctgctatgacgccttgctggaggacggcgggcgggtcgagctggagttgggcaagaccttctggtcgccctgtttcggtaccctggtggaccgtttcggggtgtcctggatgatcaattgcgaggccggcgcctga

SEQ ID NO: 360603 - DNA, 1524 bp, Pseudomonas aeruginosa
atggcgcaaaacgatcacgaaacagtcgacatgctgctggtaggcgccggcatcatgagcgcgaccctggcggtcctgctcaaggaactcgaccccaacctgaagatggaagtcgtcgaactccaggagtccggcgcgatcgaaagctccaacccgtggaacaacgcgggcaccggccacgccggcctgtgcgagctgaactacaccccgcagtcggccgacggcagcatcgacatcaagaaagccgtgggcatcaacaccatgttcgaggtgtcgaagcagttctggtcgcacctggtcgccaagggcaccttcggctcgccgaagaccttcatcaacccggtaccgcatctgagcttcgtgcgcggcagcgaaggcatcgcctacctgaagaagcgcttcgaatcgctgacgaagcaccacgctttcgagaccatggtctactccgaggacaaggccaccctcgccgagtggatgccgctgatgatgccgggtcgtccggccgacgaagcgatcgccgcgacccgcgtcgagggcggtaccgacgtcaacttcggcgccctgaccaaccagctcctgcaacacctggcgcaacagccgggcgcgcagatccgctacaaccagaaggtcacccacctgcgccgcgccgataacggctggcgggtcaccgtcaaggacacccgcaacggcggcgaccgcgagatccaggcacgcttcgtcttcctcggcgccggcggcggcgccctgccgctcctgcaactttccggcatcccggaaggcaagggcttcggtggtttcccggtgagcggccagtggctgcgctgcgacaacccggaaatcgtcaagcagcaccaggccaaggtctacagccaggccgaggtcggctcgccgccgatgtccgtgccgcacctggacacccgtgtggtggacggcaagaaatccctgctgttcggcccctatgccggtttctccaccaagttcctgcgccatggctcgttcctcgacctgccgctgtcggtacgcccgggcaacatcctgccgatgctctcggtggcccgcgacaacatggacctgacccgctacctgatcggccaggtcatgcaatcgccggaacagcgcctggaagccctgcgcaagttctaccccgaagccagggccgaggactggcgcctggaagtcgccggccagcgcgtgcagatcatcaagaaggatccgaagaaaggcggcatcctgcagttcggcaccgagctggtggccgcccacgacggctccatcgccgccctgctgggcgcctcgccgggcgcctcggtgaccgtctcgatcatgctcggcctgatcgagcgctgcttcccggagcaggcccgctcgccggagtggagcgccaagctgaaggaaatcttcccggctcgcgagaaagagctggaaagcgacgccgagctgtaccgcagcgtcagcagccgttgcagcgaggtgctggaactgaccgcgaagaacgacgtgcaggccccggtcaacgccgagtga

SEQ ID NO: 360604 - DNA, 588 bp, Pseudomonas aeruginosa
atgctgcatcgcctgttgctcagcctgatgaccgcaagcgccctggttctcggcggctgcgccctgagcccgcaacaactggacccgcaaccggtccttaaaggaccgttgaccgcagtcggccatggccagccggtggtggtcaaggtggtcgatggccgtcccggcccgtccctgggcactcgcggcggcctctacgccgataccagcaccctgaccgtccgtagcgaggacgtggtgcccaagctccaggcccaggccgagacggccgtgcgcctgctcggctacacgccttcggccaacgcctacaacgcgccgcaactgaccctgaccctggccgagctgaagtaccagtcgccgaaggacggcgtctacgtcacccaggccgacattaccgcgaccttccgcgccgacgtgcagaacagcagccggcgctacaccggtcgctatggcgcctccctgaaccagcgcttcggcatggcgccgaaccaggcgaccaacagcaagctggtcagcgaggtgctcagcgacgccctgacccgcgtgttcaaggacccgaccatcgctcagaccctcggccagcaatga

SEQ ID NO: 360605 - DNA, 207 bp, Pseudomonas aeruginosa; identical to SEQ ID NO: 322742

SEQ ID NO: 360606 - DNA, 279 bp, Pseudomonas aeruginosa
atgtccttgcaagccttgtgggcgctgttcctcgcccatcccgcccaggccgtgaacggccttgcgctgttcttcggtgtcgccggcgcctggctgctgctggccacccgcgcacgcgagcgtcgcgccctggcgcgctgggccgcggcgggggaggcgggggaggcggcattgccgatggacgaggcgaccctgcggatcaacctgttcttctaccgattcggcaccgcctgcctgggcctggcgctgctggtcagctgggccagcacgcggctctga

SEQ ID NO: 360607 - DNA, 1161 bp, Pseudomonas aeruginosa
atgatgggcgagttcgaagccatccgaccctacagtgacgccgaagtccccgcggtattgcaacgcctcctgagcgacgacgccttcctcggcgccctggtccgctaccgcttcccgcgcctggccggtcccctcggttggctgctcaaacctcttatagcccatcgcctggcccgcgaggtcaccggcatccgcagcgtcgccacgctgcaggacaagttcgagccctacgtcgaccacaccatcgagaaggccaccgatggcgtcacctactccggggtcaatcgcctcaagccaggctgcgcctacctgttcatcgccaaccaccgcgatatcgtgatggacccggccttcgtcaactacgccgtgtaccacgccggcctgccgaccccgcgcatcgccatcggcgacaacctgctgcagaaatccttcgtcagcgacctgatgcgcctgaacaagagcttcatcgtgcaccgttcgctgagcggccggcgcgagaagctcgccgcctaccagacgctctccgcctacatcaaccactcgatccgcgaggaccgccagtcggtgtggatcgcccaggccgaagggcgggccaaggacggcgacgaccgtaccgactcggcgatcctcaagatgttccacatgagccgcaaggacgaacccttcgccgaaatggtgcgcgccctgcatttcatcccggtgtcgatcagctacgaatacgacccctgcgacctggccaaggcccgcgagttgcacacccgcgccagcaccggcgagtaccgcaaggcgccgggcgaggacgatgccagcatcgccctgggcatcaccggctacaagggccgcgtgcacatcaacttcggcgccgagctggagggcgagttcagcgacgccaagcagctggccgccgaactggaccggcagatcctcggcaactaccgtctgttcccggtgcactacctggcctacgagatgagcgagaaccgcgacccgggcctcgccgtccccacggccgagagcctgttcggcagcgaggagctggagaaggcgcgcaaggaatggaaccgccgcctggagcaatgcccggccgagcagcgcccctggctggtgctgcaatacgccaacccggtgctcaaccaataccggatcaagcagcaatcctga

SEQ ID NO: 360608 - DNA, 183 bp, Pseudomonas aeruginosa; identical to SEQ ID NO: 323495

SEQ ID NO: 360609 - DNA, 264 bp, Pseudomonas aeruginosa
atgcagcgcgtatatgagccggccgacctgctggaggccgagatgctggtgggaatgctcgccagcgaagggatcgccgcccatgtcagcggccgccacctggtcggcgccatcggcgaactgccgcctggcggactgctggcgttgttggtggtggacgagcagacggagcgggcgcgagaactgatcctcgcctacaacgccgccgccccgttggccgaggagccgccggagccctgcggccccggcagcctgttgtgttga

SEQ ID NO: 360610 - DNA, 705 bp, Pseudomonas aeruginosa
atggattggaaagtatttctcctgcgcgtcgcggtcgcgctggtcctgggcgccctgatcggcgccgaacgccagctgcgccaacgcctcaccggcctgcgcaccaacgcgctggtcagcactggcgcctgcctgttcgtgctgatgacccagggcgtgcccggcctggccggcgacgcttcacggatcgccgcctatgtagtctccgggatcggcttcctcggcggcggcgtgatcatgcgcgacggcctcaacgtgcgcggcctgaacaccgcagccaccctctggtgcaccgccgccatcggcgtcctgtgcagcatgggcctgctgctggaggccacgctcggcagcctggtggtgctctgcgccaacatcctgttgcgcgacatcgcccaacgcctgaaccgccaggacgtgttgccggccagcgaggccgagcaacgctacgaagtgcagatcgtctgccgcgccgaggacgagatccaggttcgcagcctgatgctgcacagcctcggcagcagcgacctgcgcctgcaatcgctgcacagcgaggatctggacaacccggccaagctggaagtccgcgccgaactgctcggcacccccgaagctccggcgcagctggaacgcctggtcagccgggtcagcctggagaagggcgtcagctcggtgcgctggcaggtcttcgaactggcggccgactga

SEQ ID NO: 360611 - DNA, 615 bp, Pseudomonas aeruginosa
atgagtggtcgttacgccctgttccgctggaatccgtcgctggcggccctgccgggctttccggcggattggcgggcgcagtggaacatttctccggcgaaccaggtgctgatggttcgcgaggacgccggtgcgcgccgcgccgacctggcgcgctgggggctgaccccggcctggctcaccgacctgtcgcgtacgcccagccacgcgcgggcggaaaccctcgccgagcaaccgatgttccgcgaggcgttccagcagcgccgctgcctgctgccggccaacggcttctatgaatggcgcggggtgcgtaagcgtccgtactgggtctccaccggcgagcgcctgttgttcttcgccggcatctgggaggcctatccggtgcatggacaaacctggctcagcgtggcccaggtatcccaggcggccgccgagttccgccggccgctgctgctcgacgaggccgagcaggatacctggctggctccggacacgccgctgccggcgctgataagcctgctcgccaagccccagccgaacctgcgcagcgtggccctggccggcttcgtcaacaagcctgaaaccgacgggccggagtgcctgaccccggcctga

SEQ ID NO: 360612 - DNA, 2139 bp, Pseudomonas aeruginosa
atgaagctcaagtcgatccagttttctgtcgccgccctcgccggcgccagcgttctaagcgtcgtcgtggtgctggtgctgtacgccctgttcgccggcgcgcgaacgcaggagctggtgcagcaacgcacccagggcctgttggagaaggtcatcaacgagcgcctggtggccctggcccgcgcccaggtcagccagatccagcgcgagctggagtatccgctgacggtggtccacggcctggccaacagcacccgcctgctcggcgagccgggcgccgacggcatgccgcagctgaacgccagccgcgacgaaatctccgcgctgctgcgcagcaccgtgcagaacaaccccaagctgctcgacaccttcatggcctgggaacccaatgccttcgataccgacgccgccttcgccgggcaacccggcaagggctacggcccggatggtcgctacctgccctggtggtatcgcggcgccgacggcaagccgatcgtcgaggccatgaccgacagtatcgatagcgaaaagctgctgcccaccggggtgcgcgagaacgaattctacgcctgtccgaaagagaacaagcgtccctgcatcatcgacccggccccttacgaaatgggcggcaagaccgtgatgatgtcgtccttcaacgtgccgatcatggtcggagaccagttccgcggcgcagtcggcgccgacctctcgctggccttcatccaggacctgctcaagcgcgccgaccagcagctctacaatggcgccggggaaatggcgctgatcgccagcaacggccgcctggtggcctacacccgcgacgacagcaagctcggcgagcccgccggcagcgtcctcgacggcaacgaagtggacaacctgaagaacctcacggtcgaccagccgctctacgacatcgacgccgagcacggccacatcgagctgttcctgcctttcaccatcgccgacagcggcgtgcgctggaccctcatgctgcagattccccaggcggcggtattcggcgaactgcagcaactccagggcgagctgagcgaccagcgccagcaggatatcctcggcatgagcctggccggcctggtggtagcggccctcggcctgctggtggtctggctggtcggctacggcatcgcccggccgctgcgccaattggtcggcatgctcgacgacatcgcccagggcgaaggcgacctcacccgccgcctgagcagcgagcgcgccgacgagctgggctccatcgccaagggcttcaataccttccttggcaaactgcagaacatgatcggccaggtggtgcaatcggtgcagaaggtcagcgactcctcggagcacaccgccgacatcgccatccgcaccaaccagggcgtgcagcagcaactggcggagatcgaactggtggccaccgcggtccacgagatgaccgccaccgcccaggacgtggcgcgcaacgccacccacgccgccgaggcagccaaccacgcggaccaggccgcgcaccagggcaagcagatcgtcgaaagcagctcggcggcgatccaggccctggccagcgagattggccgcgcggtcggagtggtgcagaacctggccaaggacagcgaaaacatcaacgcgatcctggtggcgatccgcggtatcgccgagcagaccaacctgctcgccctcaacgccgccatcgaggccgcccgcgccggcgagcagggtcgcggtttcgcggtggtggccgacgaggtacgcaacctggcgcagaagacccagcaggccaccgaagaaatccagagcatgatccagcagttgcagcagggcacccgcgacgtggtgaaggtcatgcaggacagccaggagcgcaccgacgacagcgtgcgccatgcgcgccaggcggccgaggcgctggaatcgatcacccaggcggtatcggtgatcaacgacatgaacacccagatcgccagcgccgccgaggagcagagcgcggtggccgaggacatcaaccgcaacgtcgccaacatcggccaggtcgccaaccaggtggccggcggcgccgacgaggcctcgcaggccagcgccgagctgacccgcctggccgagcagcagcggcgcctggtgaatcagttcagggtctag

SEQ ID NO: 360613 - DNA, 822 bp, Pseudomonas aeruginosa
atggctcatcccttccgattcgccaccctcgccggcgcgctgctgctcgccggttgccaggcagtgaacaccaccagtggcggcgccgtcggcgtcgaccgcaagcaatacatgttcagcatgttgtccagccaggaagtcgaccagatgtacgcccagtcgtaccagaagactctcggcgaggcgaaaagcgccggcgtgctcgataccagcagcgccgacgcgcggcgagtcaaggcgatcgcccagcggctgatcccgcagaccgccgccttccgcccggacgccaccggctggaactgggaagtcaatgtggtgaagagcgacgagctcaacgccaactgcggtcccggcggcaagatcattttctacaccgggctgatcgacaagctgaagctcaccgacgacgagatagccgcggtgatgggccacgagatcgcccacgccctgcgcgagcatgggcgcgaggccatgtccaaggcctacggcgtgcaggtggccagccagatcggcgccctggccggcctcggccaggaaagcctgcaactggccaataccggcgtcgactacctgatgaccctgcccaacagtcgtgccaacgagaacgaagccgacctgatcggtctcgagctggccgcccgcgccggctacaacccggaagcggcgatcaccctctggcagaagatgggcagggccagcggcggcgccagccagcccgagttcaccagcacccacccctccgacagttcgcggatggccaatctccaggccgcgattcccaaggtgatgccgctgtaccagcaggccaggcgcggcaagtga

SEQ ID NO: 360614 - DNA, 705 bp, Pseudomonas aeruginosa; identical to SEQ ID NO: 199452

SEQ ID NO: 360615 - DNA, 399 bp, Pseudomonas aeruginosa
atgctgcaaatccctaaagcgctgctcgaaaaacgcatcaccaaagaaacccttcaccgctctggcaagcgattgctcaaagagatcgccggccgtttgaagcttccagaaacgagctacgaaattcggtcgtgtaaaggcgggaacgcagtcatgggggaggtgatcctgcacagcgatcatctctatctgatggttcatctaggttcagatcgagtgctcaaagtgctctaccgatcctgtgagggccgaaaggactattcaggcggaatgaaccgttatgagtcggtctctgagttggccagcaccactgcggctgagcgattcatcgcaaaactggacacccttaatgagctgggcaagcgccagcaacagcaacagcacaaccaagccgcttga

SEQ ID NO: 360616 - DNA, 300 bp, Pseudomonas aeruginosa
atgtcttcagttctgaaggaattcccggaagcctttgccacccgcatcaacaagattctggaaatgcctgatccggttcctggaaatcgcgagaatggctggttcgctggatacgggtgccgatggtgcaagttttcgaaagcttggttcaccgtcttgccgtttgaaatgcagccggtagccgaaactgtggcgagtatgttcaagaatgcaggactgcaagatgtgaccatcactcttgaagccggcgtgacgcaggctgaaggaggcaagggttaccaggtctctgctcgaatctaa

SEQ ID NO: 360617 - DNA, 855 bp, Pseudomonas aeruginosa
atggacgtaattgcaaacaacgcagctgataccaaagaaatggtcatgaccgaggtcctgccgaatggcgaggaactcaagcggccgtattcaccgtcggagatggctttcatgttcaacgacgtggagattcgcaacccctacttttcaccgtgcggaacaactgttgttgaccccgtacaggcgtatggcttcgaggtttatcacaccggaggcggttgcatggctttgcggaaggagttctgcaacggtcaatacctgcttctttcgatcgaggtgtccatcgctgaacctgaggagtgggatgagtgcacattgggcctgtatgacgccgatggcgatgagaaagcctactgtgagctccgtgatgttccatatgcacaagtcgacctgaccgggcatcttgatgccccagtgcgcttgttgtgcccgtgctgtggtgctcgtaccacaggtcggcaatggggcaatcaagatgctggtcacggtctgtgcagtgattgcatcgagaaggtgctggccaagatgacggcagaagagttttccaaacgctacgggctccagggagttcacttcggtctgtcgcagtgcgctccctctgctcagttgctcgatgagctcgctcaaaagaaactgctggcgcaagaagagccggatcagcaggcagtggactcgaacgctctcaaggaccggtaccgttcatgggcgctggacaacatcgccaatgatgatctgcaggtcaatgaagatgcccaggtaacgctgtgtgaagatggcgcatttgtcgcaacctggacatgggtgccgcgtgattccattccggacgttgctgatccggaagagtccgctgattaa

SEQ ID NO: 360618 - DNA, 693 bp, Pseudomonas aeruginosa
atggcaagcaaactagcacgcgcggtaccacccaccatcaagccactggcagaagcactgtgtgatggccaccggtatccgccggcggagatgtttcgatttttcctaggggcagtgatggagctttgggggtttcagccctggtatcccatacctgatgatgtccgcggtaaaataggacgagttatcacgctgtacgatcaggcggtggccaatgaagaaccgttcaaggacattttaggcccactctacgaagagctggccagccatggcggcaagcaaatgctggggcagttcttcacgccctggtcattggcaagcctgatggtcaggatgagcgatggtgacatcgacctgcctcgcgccggtgatctcaaagcttactcagatccggcttgtggcagtggagttatgctgttggcaaaagcaaactacctgctcgaaacgaaaggtcctggggagctccagcaatggctttttcacgcatgcgatatcgatggcatttgcgctcgcatggttgcgattcagctggccgcgaattgtgccattcatagagtcgaaatcggggagatcatagtgctccttggtgatacgctcagctcggaccccaagcagcagatcttgcacgcaacctctccgacgctgatgcgttcacgtcaaaattcaattccgaaacttgaggtcgcctcatga

SEQ ID NO: 360619 - DNA, 489 bp, Pseudomonas aeruginosa
atgaaacgctggtacacgatcgccgcggctttagccttccaggtgctaccgcatgcggcaagtgcttcggaggcttcagatgctgttctgtcggttgctgcctcaaaaatgtccaccgtagctcgcatcaacggcgccacacggccggtcatctacgtgggtaaatttgaaggctgcgactcggtctcgattcaaaatgcccccgggcgctttgagcacttccgtgtatgcggtaaccaggtcagtgctcgcaacaccgtttcacccagttggaccgaagacgatggcgccggggatgttctccgcgcagtggtcgataatgcggttctgttcggcgctgcatcgcaagtggaccccaacggttacctgatcgcagcacgtgctctgggaccttcccagcgctcgtgcagcaacgtggaggtcatcttgagttacgaaggtgacctggtcgacagggccttgaagagcatctgctctcatcgccgttaa

SEQ ID NO: 360620 - DNA, 630 bp, Pseudomonas aeruginosa
atgaattcgtccagcaccgcaaaggcctatatcgttgaaacccgcgccaccaacggcgcagaagatacgccagaatttgcatccttcagcatcgatctggctgcaactcaacgcatcatcaatctagctcgactggttaaagagaatgggcttcacaaagtggagacgtttgacagcactgcttcattccatcagtacgctcctggcactgaagaggcggaggagatcggctgcgacaacgatgtgttactgaaggccggctgtctaaatgtggatgcgtccagcttctggttctcgggattcatcagacattctgacgtcgaggttgtcagcgcacgtcagccgatcgctgaactgcagagtcacttccacttggccggaggcacaactgaacttgaagctggcggtgaacggcagtatctcgttacttggagtgctgatgttgaggttgagggggatcaccatgcggcagcccaggccgtcgcagaccggtacttccgcagccacattgccgccggtgaacaggacagcgcgtgcaccttcgtggtgaccgcaaaatctgaccaaaagccagtagagatcgatctctcgacttgtcactccggtgaacaaatcttggagtcggcatga

SEQ ID NO: 360621 - DNA, 474 bp, Pseudomonas aeruginosa
atggtcgagcgcacgagccgtttcgtgatcctggccaagttggatgcgcccaccgcagacgccgcgctagaggggatgacgcgagaactttcgcggatggcaccggcgctgctgaaaaccatgacccatgaccaaggcagcgagatggccaagcatcaagagctgacagctcgtacgggaatgaagatctacttcgctgacccgcacagcccttggcaaagaggcagcaacgagaacacgaacggcctgctccggcagtacttacccaagggcaccgatttgtcgctggttagccaggagcggctggacgagattgccgacttgctcaacacccgacctcgtcagacattgggctggaaattccctgttgaagtgttgacggatcatctgcaactgctggcaaccaatcggctcaacattatcaaacgactgttgcacttggaacctgaggccgccattccacctccctcctga

SEQ ID NO: 360622 - DNA, 792 bp, Pseudomonas aeruginosa
atggttatgacaagcaatgcgattccgtgggggccgatccgatccactctgaccgaaaagttcagttttggtgatatcaaacagatcgttggatacggcgatctggacatgtcccgtctcgcgcaccttgaacaaaagtcacagaatggcgcgtcgaagtctcagcttctgagcgagatcgacaaacaggtcggtgcgatggatgacaagcgccgtaacgctttcgtctccatctgttgcgaagaaatgatgcgccgcaggcccgatgtcgtagaggagctggatcgagtgctctctcgcgtaggctggaagttctccgggacgtccctcgtccccatcgagatattcgatatcgcagagctggccgaaatccccgaggtggcgcatgcggatatccagaaagcggcaagcaggttgcgcgatggcgacttgagtggcgctctctcggcagcctgtggagccctggatgctgtgaccagcgacatctatggtcggtatggcttaggcgatgccggaaaggcatcgttccaggagcgcatcaagaagtccatcgacgccttgaaggtgaaagacggtctggtgcgcgagctgaccgaaatcggatggtctgaatctgactacaagccactgtccgcgaacatcgaaggttcattgaatcaagcagcgttcgtaatgcaaaagctgcgttccgacatgggcgatgttcatggaacgaagcccgtcatcaacgcactggtttatgactccattaagtggtcatccttgctgctgagagtcttggcgctccgttag

SEQ ID NO: 360623 - DNA, 789 bp, Pseudomonas aeruginosa; identical to SEQ ID NO: 331878

SEQ ID NO: 360624 - DNA, 2157 bp, Pseudomonas aeruginosa; identical to SEQ ID NO: 331877

SEQ ID NO: 360625 - DNA, 198 bp, Pseudomonas aeruginosa
atgaatttcactgtggcgtttcggagtgacgataacaagattgtctatattgtaaagagcaccgccgctttccaaagggactacatggtgaatttcaaacttttctttgctacccagatgctcctctggcacagcataaggagcaaggccctgactgacaaagtacctattactgggggagaggttttcgataattaa

SEQ ID NO: 360626 - DNA, 1968 bp, Pseudomonas aeruginosa
atggccgatacgatccaggccctcccgctccgccaggcggaacatgaagtcctgcaacgccagatcgccgaagccttcctgcaagccgccctgcgccagcaaggcggcacgctggaaggccagggaacgaccgcagtaggggtagctgcgcagaaggtcgaggttgaagtcgggcttcagcaacggtgcctcgtagcgtccgtcgcacacatggtcttcatcgctgtagcagcacagcagcgcggtttccgtacggatcttttccgccagcaggagcaacgcggaacgcgccagttcgtctccggcatggatgacgatcagccagtcggcgtcgctggcggccgccgccaggttgatccgctcggcggcggaaccaccctcggccagccacgccaggcccttgcgcgcaaacgccggggctctgcccagtatccgcgtgcgccaggccggcaaggcctggccgtcgatgctcgccaggctgcgctggaggtctgcgtcctcggcctcctcggcaagcaccaggacttcgatccgcgagtcgcgtcgcaaagcgtcgatgaagggacggtagcgggccggctccacttcgcgcccgtgcagccaggtctcgtattcgctgcggaagtcctcccccgcctccgggctcgctgcgccggccgcgagggccgcgcaatagtctcccggcgccggctggaacgcggtctggagcagcagggagaccggcgtggaaacgccttcgaaagccggatagctgccgtcgcactccagttcgatcgtcatgccaccgcgttcgtcaccccggaacggcaggaccagcgacttcgctcgcgcgtcctcgacgctcacgcggctgaagagctggccgttgaggcacacgcgcaactggaacgggaagcggtcgtaaagctggctggcgaagggcgtgacctgcaggacgacctggcgctggcgcagcggcaggcccgacacgcaaggaaccgcgcgcagccgagcgcgcgcgcagagcatatgcacgtcgccctggcgcaacagtccctcttcggcgaacaggttcaactgcccgacgggccattcgaccggcgcctcggctgccgccacggcgcgcagccacaacggctgctccgcttcgtccggcaggtcggccagttcctcgcgcaacagcgcgggcgccagcagacgccaggccggcttcggctgcaggcgggcgagcaacctgtgcaggcggcgagcgctccagtcggtttcgccagcgggcccggcctcgcgctcttccaacgccagccgggcatgccgcaactggcccatggcgatggccggcaggagcgcgcttacctgatgcgcgctgcccggcagcaactggccgtcgtcttccaccagaagcaccgccgaagccctgcgttcgagcgtggcagcctccgcgtcgcaccaggcccgccacgaatcgaagcgccgcacgtcggccggcaatgccgcgccggacggagcgatcaggtcgatacggcgatgggcgaagcaggccgcataatgttcggccaggcgctgcccgccatccgcagcggcccgcgcgtcgagcacgatctgcaagcgcggcgcctcggcgatcgctgcggcgaccctctggacgctgcgtccgtcgcgaaaccggccgtacagctgctgcgtgcggttctcctgggtatcgcgactctccgcgtgccgggtaaaggcattggccagcaggtcgagcagttgctcgtcgtcggcgaactccagtccgatatcgcgccaggcgttccctggagcctccgggttgtaggcccagcgggcgatccgctgttcgcgggagaacagcaggatcggtcggtcgagcgtcatgaactcgaagatcagcgaagaacggtccgccagcagaatgtcggcttcggcgaagctggccgcgatgctcgcctcggggtcgtccaccagagtgaccagcgggtccgtgcgtga

SEQ ID NO: 360627 - DNA, 1515 bp, Pseudomonas aeruginosa
atgtaccagagtgagattagggatagcgagatagtaggtctcttcgaaaaggtgcagaagagaaattacggaaaatacctttttaaaatctctattggaaaagctcgtggctatgagaacaaggtcatcactttcgactttcctgtaactgcattgattggtcctaatggtggtggaaaaactactgtaatgggagccgctgcgctggcttacaaaagcatcaaaccttctcttttcttttctaaaagcggaagatttgatgaaagcatgcagaattggaagttcgagtttgacgtaattgaccgcgacgtcaagcagcaagactccattaagagaacggcgacatttacaaatttaaagtggagtcgagaggcactcacacgcgaaacgagagtatttggcgtttctcgaacggttccggcgaccgagcgaccagaccttgcaaaatgcatgtcaaggaaattcgatgtactacctgaccgcataagcactatccctgaagaggcggccagggcggttgcggcaatcctggacaaagatgtcgctgcgttccagttcttgaaagttgatagccgcggaaaggtaacactcttagctggacagacggccaacggagaaaaatactccgaattccatttcggcgcaggcgagtcgagcatcattcggatggtcgttgccttggaaaccatgtcagaccagtctcttgtgctgattgaagagattgagaacggcctccatcctctggccaccattcgattggtcgagtacttggtcgagttggccgtaaggaaaaagatacaggttatctttactacccactcgaacgacgcgctgaagccgctgccagacaaggcaatttgggcggcagtgagaggtagcctatatcaagggaagctcgacatcgcctcactcagagcaataagtggtgtaatcgacacaagactggcgatattcacagaagacaagtttgcaaaatcttgggttgaagaaatattgaggaatatcgattctgttgcattagatgccgtaggaatctacgcaatggaaggagacggaacggctcagcgagttcataaagaccacaatttgagtccggcgtctaagaacaaagcaatttgcatccttgatggcgactcgaaataccaagaaagcaagaacgacctaatattcaaactccccggcgaaagcccggaaagatacatatttaaccaagtactaaaaatactagacacatgcagtggagagctagctgtagctcttttgaagccttatgagaaagctgctgaagtcgctgaggttattgcgagcgttgcaaatacgaatcgcgacgagcatacgattttctcacagataggaaagaggcttagcttgattcccgagcaaagagttagagaggcgttcatgagtatctgggcgcgtttctacagcgacgaccttcaagcctttgcctccggctttgagcatctcttacccaaagagtctgagcaggtccatctcggcagcggtaagtactga

SEQ ID NO: 360628 - DNA, 297 bp, Pseudomonas aeruginosa; identical to SEQ ID NO: 329284

SEQ ID NO: 360629 - DNA, 1236 bp, Pseudomonas aeruginosa
atggccgagttcggaaactatgtgatttacctgatcatgctgggtgcggtacttggcgcgctggcttccatcctgcgcccggaaagcggtctgggccgcgagttcgtcaacggcatccacgccatcggtccggtgttcctcgcccaggccggcatcatggtagccattccctatctgtcgaaggcgatttcccatgccctcggcccgttcttccagaccctcggttccgacgtatccatcgccgcgctgtcgatcatcgcggtggacatgggcggctaccagttggccgatgccctgaccgccaaccgcgacatgtggattaccgccatgctggtgggctacacctccggcgcgaccatcgtctacctgatcccggtcggcctgaccatgctcgagcgcaaggaccacaagtacctggcgctgggggcgatggccgggttgatcagcattccgttcgcggtgctggcggcgttgctgctgattaccctcaaccacatcccggtgcgcgaactggtatcgaccggttcgccggccctgcactacctgtcgctggacttcctcggcatgcttcggctgctggcgccactgttcgtcttctgcttcctgctggccgccggcctgaagtaccgggcgacggcgatggtcaccgggttcctggtattcggcaaggtgatggacgcgttcatcaagatggccctggcgctttccatcgtccagcacttcaccggagtcttcaccaaggtcttcggcggctggggcttcgacccgatgttcgccgacgagaaagagttgttccgcgccatcgagatcgctggctacatcggcatcatgctggccgggaccttccccatctgctacctgttccagcgctactgcaagcgcccgatggcggtcctcggccgttacctggggctgtcccagccgggcgccaccgcctttgtcatggtgctggcgaacatcatcgccacctaccacctgttcaaatacatgaatgctcgcgacaaggtgctttgcgtggccctgggcgtctgcgcccaggccaccatcggcgatcacctggcattcaccgccaacttccagccgacgctgatcctgccgatcctgctcggcaaattgtttggcggcctgctggcggtattcatcgccatccgcatctcggtgcccgccgccgagcgctatgcccggcaggagcaggagcatgacgaggcggaaaaaagcgccctgcacgcagcctga

SEQ ID NO: 360630 - DNA, 777 bp, Pseudomonas aeruginosa; identical to SEQ ID NO: 329444

SEQ ID NO: 360631 - DNA, 801 bp, Pseudomonas aeruginosa
atgttcaaacttttgagtaagttattggtctatttgaccgcgtctatcatggctattgcgagtccgctcgctttttccgtagattctagcggtgagtatccgacagtcagcgaaattccggtcggggaggtccggctttaccagattgccgatggtgtttggtcgcatatcgcaacgcagtcgtttgatggcgcagtctacccgtccaatggtctcattgtccgtgatggtgatgagttgcttttgattgatacagcgtggggtgcgaaaaacacagcggcacttctcgcggagattgagaagcaaattggacttcctgtaacgcgtgcagtctccacgcactttcatgacgaccgcgtcggcggcgttgatgtccttcgggcggctggggtggcaacgtacgcatcaccgtcgacacgccggctagccgaggtagaggggaacgagattcccacgcactctctagaaggactctcatcgagcggggacgcagtgcgcttcggtccagtagaactcttctatcctggtgctgcgcattcgaccgacaacttagttgtgtacgtcccgtctgcgagtgtgctctatggtggttgtgcgatttatgagttgtcacgcacgtctgcggggaacgtggccgatgccgatctggctgaatggcccacctccattgagcggattcaacaacactacccggaagcacagttcgtcattccggggcacggcctgccgggcggtctagacttgctcaagcacacaacgaatgttgtaaaagcgcacacaaatcgctcagtcgttgagtag

SEQ ID NO: 360632 - DNA, 654 bp, Pseudomonas aeruginosa
atgagcatgccgctgccgatgaagctccggacccggttgttcctcagcatttccgcgctgatcaccgtctcgctgttcggcctgttgctcgggttgttcagcgtgatgcagctcggccgcgctcaggagcaacggatgtcgcaccaccacgcgaccatcgaggtgagccagcagttgcgccagctgctcggcgaccagttggtcatactgctccgcgaaaaacccgacgggcaggccctggagcgctcgcagaacgatttccgacgggtcctggaacagggtcgggcgaataccgtcgacggcgccgagcaggccgccctggatggcgttcgcgacgcctacctgcaactgcaggcgcacaccccggcgctgctcaaggcgcccatggccgacaacgacggcttcagcgaagctttcaataccctgcgcctacgcctgcaggacctgcagcaactggcgctggccggcatcagcgacgccgagaccagcgcccgccaccgagcctacctggtcgccggcctgcttggcctggtgggcgtcgccatcctgctgatcggtttcgtcaccgcccacagcatcgcccggcgcttcggcgcaccgatcgaaaccctggctgtagcgcggcgcgaaatttggcgcggatttgcgcaataa

SEQ ID NO: 360633 - DNA, 717 bp, Pseudomonas aeruginosa
atggaaagcgaactgttcgggcacagtcgcggcaccttcaccggtgccaccgaaagcaccctgggcagggtcagccaggctgacggcggcaccctgttcctcgacgagatcggcgacttcccgctgaccttgcaacccaagctgctgcgcttcatccaggacaaggaatacgaacgcgtcggcgatccggtgacccgccgcgccgacgtacgcatccttgccgcgaccaaccgcgacctgggcgcgatggtcgcccagggccagttccgcgaggacctgctctaccgcctcaacgtgatcgtgctcaacctgcctcccctgcgcgaacgcgccgaggatatcctcggcctggccgaacgtttcctcgcccgcttcgtcaaggactacggccgccccgcccgcggcttcagcgaagccgcccgcgaggccatgcggcaatacccctggccgggcaacgtacgcgagctacgcaacgtgatcgagcgcgccagcatcatctgcaaccaggaacgggtggatgtcgaccacctcggtttcagcgctgcgcaatctgccagcagcgcgccgcggatcggcgaatcgctgagcctggaagacctggagaaagcccatatcacggcggtgatggcctccagcgcgaccctcgaccaggccgccaagaccctcggtatcgatgcctcgaccctgtaccggaagcgcaagcagtacggcctatga

SEQ ID NO: 360634 - DNA, 2136 bp, Pseudomonas aeruginosa
gtgcatatttcaaggttacaactcgtcaactaccggaattttaaatgcgcgaatgtagttttcaacaagggcgttaacacgatcatcggcgagaacggatcaggcaagacaaacctgttccgtgcgttgcgtcttttactcgacgacacgctgctacgcgcggcatataggctcgatgagaaggacttccaccggggccttggcgactggcgcggtcactggatagtcattagcctcgagttcgatgaggtatcccaagacgaggcgattcagtccctctttctccatgggaccggtaacatcgccaacgcggcgatcggcaaggcgacctacaaccttattttccgccccaaggcggcagtccgacggaccctggccgaccttgccgccggtgatatggtaggacttgctgaggcacgttcgaagatcaccattttggattatgaaacgatctttaccggcaagagcaccgcaaacttcctcgatcccgaaacctataagcaactggctggcgacttcgacgcggtaatatttccccaagaactgacgaacccggctatcgggggcgtcatcccgggtatgctctctatctcgcgcgaagtctgcttcaccttcgtgcaagcactgcgcgatgtggtctccgacttccagaacaaccgcactaaccccctcctaactctgctcaagtgtcgaagcggtgagatcgatccgcagagcttcgaaccaatcaccgcgctcgtcaaagggctcaatgatgcaatcgagggcctaccagatgtgggaaccatccgcaccgatatccgcgacaccatcaccgatgcagcaggcgagacctactccccgcgatcactttcgatccgatcggatctgtccgacgaggccgaccgcctgttccagtcgctcaagctgtttgtgggcgaaagcgaggaagaatatgagggcgcgattcacgagctgagcctgggcggtgcaaacctcatctacctgacgctgaagctgctcgagttcaaatatcagaagcagaaagagtccttcgccaatttcctcgtgatagaggagccggaggcgcacatccacacgcatatccagaaaacgctgttcgaccggctgagctttgacgacacccagatcatctattcgacccattcgacccacatatccgaagtgaacaacgtcctgaacatcaacatcctcggccgacaccacggacgttgcgaggtgtttcagccatctgcgggacttgacgctggccagattggcaatatccagcgctaccttgatgcggtccgcagcaatctgctcttcgccaaaagcgtggtcttggtcgaaggcgacgccgaggagatcctcatcccgatactcgttaaaaaagtgttcgggctgagcctggacgagctggggatcagcttgatcaacatccgcagcaccggcttcgagaatgttgcggtacttttccataacgagcgcatccgcaagcgctgcgcgatcatcaccgaccttgaccgcgcgtttattgacacgaccaaggacatactcgacagtgacgataaggcggcagcaaagaagaaggcactgggggcacagatcgctggactccagcgcgaggcagcgcttaaggtgttgtgtgacgggaatccttggctgacggcgcacttcgccgaccacactttcgaggttgatttcgtctccgccggcaatgtcggcactgtcgtttcggtgctgggcgacgtctataaggatggcggcaccatagcgacatcgaaaatggagctggaatcgggcgacatcacacgtttcgggacgcgcgtgctgacgatggcacgttatgcaggaaagggatggttcgccatcatcctggggcgaatgataacgccagaaactgttattccggattacatcctcgacgctatcttccaagcacatctcccggtatccattcatacatgggcgcgagtgctggattatcgggtctcggtccttgccgagtcacaactacacgcggcagtggacatcgacgcgatgcgcgcgcaaatcagacgctactatagcggcgagatcgactttgctggggtccgcgccgaaatgctacaggcctttccggccgacggcatcaacacgatcctggctggcttctag

SEQ ID NO: 360635 - DNA, 1797 bp, Pseudomonas aeruginosa
atgtttgtctgggacaggaaagatctgaacgacgctcaagtcgcagccatcgagcatccaggcagcgtcttcctcgttgcctgcccagggagcggtaaaacgagaaccctcacctacaagatcgcccgcctgttgtcggagcttaagtcggacaaaaaacgcgtcgtcgcgatcacctacacgcaccgggctgctgatgagattcacgaacggatcgagcagcttggcgtcgatacgagccagctttggattggcacgatccactccttctgtctcgaatggatcttaaaaccctacggaatctatcactcggcgctaaagctcggtttccgggtgatcaatgcccatgataccgaactaatgctggaggagttctgcagcgcggtgcagggcactaagctcagcagcttcgactgcgcatattacttcgcgccgaacggctatgtcctgacatgcaacaagaccgacaagcatcaagcaattgagggagttttgcaggcatattggaaggcgcttgatgccgagcggcaggtcgattttgagctgatccttttctacgcctatcaactcatcgagaagaatccctcgatcagcgtgctgctcggctcgatcttcgaatgcgtgctcctcgatgagttccaggatacgcgggaaattcaatatgcgatcctcgcatcgatcctgaaagcgtctaaaggcggtgcctccgcctttgttgtaggcgaccctaatcaggcaatctatggctcgcttggcggctatgcgatcacggcggcggactttgggaggcagtgcggcatcgccttcaaggaaatggagctatcagacaattaccggtcgtcatcgcgtattgtgagctatttcggcaactacaacgtcttcccttcgaaggtcgaggcggtgggaaaagacaaggactacgcgagcgttgtgtcgttcgatcaccagacgcaccgcgacgcgctggaggaagagcttgtaaggctcatcaaattcaacgtcgaaacgctggggatcgctcagcatgaggtttgcatcgttgcgccttggtgggtccatctcgcgagcatgacacgccggttggtcgcagcgcttccgacctattcgttcgatggaccgggcatggtgccgttcgcgcgcgacattgacaatttctggtacaagctagcccggatcattctgacggaggcgtccccacagctgtatgtacgccgaatgcgatgggcgggagaggtaatcgccggcctcagcgatgcgggcgtcgaggttccagatctggaccgcaagacactgctgcgcgcctgcaacgccatcaccatcaccgagaccgatggcctggtctatctcagggcgttcttcgaccagctatgttccactttcgagatcgatcgccgcagttgtgcagcactccaagagcatcacgacgctttcttcgaatgctcgcagaagcgcatcgataaactcatcaaggaaggcgctgaggcgattgctgaattggcgatgtttaggaaggtctttgcgaatcgcactggtgtcaccgtatcgacgatccatggggtcaagggtgccgagtatgacgcagtgatcgcctatggtctgctagaaggcatggttccccacttcagtgatccgaaccaagccgagacggcgaaaaagctcatgtatgtggtgtcgtcgcgggccagaaagaacctacatctgatctctgagcgcggtcgcagtcgaggctggagcggagattatcaaccaactggcgtacttgctggatgtgcattccgatacgaccagttttcttga

SEQ ID NO: 360636 - DNA, 645 bp, Pseudomonas aeruginosa
atgatcgtgctcgctgacaatgatgtcctggtagcactggcccaatgcgatcttgttgacgaagcgttgacagtgctcaattgcggcttttcagactgctatgtgcttggcgaggcaccctattcactttacctgaacaatccggccaaatgccttgataaacggctgggtaatccgtcggcgtttgaccggctgtgcacaatggtcgaatcctgccagaaactgggcgcagctcaagagaatatcgagttgttggagcagctgatgcttctggacggtgttcatgacggcgagctgcagctgacactccacgctgaaaaccttcattcccagagcaaaagcttcaccctgacaactggggacaagacttttctgagcgctatctatgactcagactgcgagcttgcgaagaccatcctctaccagcgagttgaatgcttggaatcactgctggtgaaggcgattggactttacggccacgagcacatcaccacaaaggttggcatcgggaaggaaaccactaccaacgccaagaagttcgataccgtcttgagcatggcgtttggaaatggccgagctgagcagcacaccctagactgcctaagtaattacatgcgccctgcccagtattttttgcgtccttga

SEQ ID NO: 360637 - DNA, 987 bp, Pseudomonas aeruginosa
atgactgatattcagagcatctattccgccctccaccgtcatggattggccaagaagaatctggcgaatctcatgcctgagtggtggtctcctgaggtcgaggaaacccctggagctgcccagcgggccaagttctacttggctaaggcgctgagccttcagattcgagctttcagcgagaatccacctcgtgtggcgttcgatttgcctaccgagaagcgtttcaagctttcttctaggacctcagaagacgatgtagccgtggctgttgcattggctaagagtgcttcccgaatagctcttggatcgatggcgaacgattattctcctctcccaaagagcgcagctcagattcgctcccagatcctcgccgggggagcaaagtgggttggccttagacagattctggatctttgctggagcaatggcattcctgttctccacttggcttcgccgctgctgggcaagaagaaaatggatgggattgccatgtcgatcaaaggcaggccttccatcgttctgtccaatgttcgtaaacagggcttcctactcttccatcttgctcacgagcttggtcacatcgcattaggacatctgtcagaaaacggtgcgatcgtcgatgacgagatcacgaaggaagaatctgatgagggacgtaattctcaggagatcgaagcagaccgcttcgcgatagagctgttaactgggaatgcggatactcgtttggtcctgccgaggctcgtcaaagcgaacacgcttgcggatatcgccattcgattcggcaaagagcgtcagatagatccgacgcatgctgtgctgaacgttgcgcacaacaatcccaaactatttgggctttgtgtgaatgcggtcaaagcgatttcagggccactgaccgatcaagacgtggttcgtgaacgcgttttcggcaatttggccgatggaattgatcctgacagcgagcacctgcttcggaaccttatcgcataa

SEQ ID NO: 360638 - DNA, 1866 bp, Pseudomonas aeruginosa
atgtttggccttctaatcaacccccggcctcatcgtgatgaaagcctgtcgggttatctgcaccgcctcgcaaaggaaaatggattaaccggtactgacacactcaaagccttcaaatgggctgaggaatcaaaggttaaggagtggatccgacagtccgattcaccgcggagctgggatgaggctgcagtcgagcttcgtacacccaagacaaggccgttcaaaatttggtcggtgcgcagcactaggttctgtgtgcagtgcctggctgatggaggctattggcgggaaacttgggaaatcacgttggtcacctcctgtacttaccaccgaaccgagctcttagactgttgcccacattgctgcgcgaaaacttgtcaaagcgcgatgctcgataacagctgtaaagcctgcgggaggtcactctctggccgtgaatttgaggggtatgctcgttgcgctagcgaaccctgccagtggctgtcgctggcgttggagaattctttttactcaccgcatgtgccgaatgctcatggactgtcggggctgtcctacaaagatctgcatgagctggctgcgcgtttggcagtgcggcgcacgcgagctcaaaccttgatgcaactcagggttccggaaattgctgcggtgagtgtctcaaggaaactggcagatgctgcagccacgattctcatggattggccgactgcgttcaggcagttgctcagtgctctcaaaaacactcattccaataacggcgattggaaactgtctagcgcatttgggcccatttaccgggacatccatcatgacctgaatgcatcttgctttagctttgtccgggacgagtttgagtcctacctcttagaggaatggacggctccgctggcgaatcgaaatcggtatctcagtcacgacactgtcgaaagtcatcattgggtgcctgttcaaacgggtgctagagcgacagggctatcgagagctgcagtagtgactttgtgtcagcgcgggctcgttgatcaccgggaggtcgagaaaggttcccgatcattaagggtcgtccaccttccacagctgcaagaggtgtcgaaccaccgaaacgcggcggtgacgctggaaggtgccgctaagatcctcgctatcagcaagactcgcgttcgccagctcctttcggcaggccttctggaattttttggagaacacaagactagccgcagcccctggttggtggctagagcttcgcttgatgaactggttccaggtggagctgacttggtatctgattctgagctggtgtcgatcaacttcattgccaagcactatctacccgcgggcggtgggcttgttgaattgctccaggcgatcaattctggcgccttacgggcctatcgaaatgatgaagatgaacctgtagccttgggtcaacttttaatgaggcctgctgacattacgctgtggatggaggagcgcttccagggcagcgaccttgaatttgccggggtatctgttcccaaagccgctgtgatcctgggggtcaaggaggaagtcgcctacgcgtgtgtccgcttgggcctgctaaaaagtaacctcgcgaaaattggccggagtactcagcaccgggtgaccccaaaggcgatcgaaacgtttaggaggaagtacatcctgggacccgagattgcggcttatttgggaatgtcgccaaaagaatcgctcaggcacctatgggatattcgattcaggcccgttgccggtccgacattggtgagtgcttcctgccggcagtacgtatggtcacgaagcaaaaaattgatcgactacctcacgtggagagcagttcacggcagtgatgcggaggcgacgctgggatga

SEQ ID NO: 360639 - DNA, 939 bp, Pseudomonas aeruginosa
atgaccttcattcaacgagcggagatagccttctcattaactcaccgctttatccacactccacaagccacccgggctttgacccgtttgggtgagattcactcggatactcgacgaactggcgcgagtaaaggcctgcttatccaagggcccagtggtgtcggtaaaagcacgttgatcttggaatacaccaggcaattaatggaagagcgcggatctgatcaagacaatcgcgttgtgctttcggtagaaattccctcctcccctacgaaaaagaaccttgcggccgcgatgctgactgcattgagggaccctttcgccgaagcccgaggacactcagcggaggtcaagattgcccgggtgaaactgttgctgaaaaaactcggcatcgaggtgctagtgctcgatgaggcacagcacctggtggactaccttcgaaacggtgcgtacgaagccgctgattggatcaagagcctgatgaacgacaccaatattacctttgttcttcttggcttgtgtcggaccaatctgctcctagctaacgagcagctacggcgaaggttttcggcaaccgttgattatgagcgctttacctggacggaaacgacggcgcagcagttcgtgatgctactgggagcaatcgccggtcaaataccagtgcagtcgattgatttcacccacctcgaaattgcccagcggttccaactagcctcccatggtttgatcgattacctcatcaaaatcattgatcgagcggtttggctggttctgaacagaaatcttccaggaataacgctgccagtgcttgttgaggctttcgaggacgaggtgtggagccaagcgccggccacgcgcaatccatttggaccgagtttcgacttcaaacctttgattcagcatggagagccgttcgaggatttcgacgccaggaagcgctga

SEQ ID NO: 360640 - DNA, 777 bp, Pseudomonas aeruginosa
atgacacataacattcctggaacgaagttttcgaatgttcggcagcgtggcgattacccatcagagaaaaaagcgtgcttcaccttggcccagctggaggcggcaacagtgaagtggattgtagacgggtatcaccaaactccccatcacggtcttgatatgaggactcctgcgcaggtctgggcaaaggccgaagctaacaaaattatcagcctgcctatcgacttggatgcactcgaatgtattttggcgaaacgaacgtcagtctacgtccaccactacggcgttgaggttgcgacgttgttttaccactcgtctgagctagctgaactacgtttgcggttgaaggagggagaaaaggtaagcgttcggtaccgtgatgaagctggtcacgtatgggtctacgaccgattcaggaacgtgttcctgcaagtcccggcgaaggataagcggttgatcggcaaaagcagggagatgtggcaggccgctaaacaagctcttcgagctgcggacggtatcaaccctagctttgaagcgacccacaagtgctatcaggatctgatggaggagatagacgaagctcggcgttcgcagaagcgccgtcaaaggcgggaagcagtgctagccaagctcgacaaagagggtcgcaaaaaaaatgccgacgctcgcactccggccatcgctcagatttcgtggcctgacagctctatcccatctgcggatcttacgccgttcaaggtttcgtaccgtccgccatcgggaggtgaaaaggaatga

SEQ ID NO: 360641 - DNA, 1041 bp, Pseudomonas aeruginosa
  misc_feature (1014)..(1023): n is a, c, g, or t
atggtgctggagaggcggctcctcgatcgccagctgctgttttttgatgatttcggggagccgacgaagctcacagagagagagttttacgaaggatacgagaagcgtgagattcaggtctctcctgatcagccttacctcgggacggttccatacgtgcggaacgctccccgtgatatcgctagcttcccccaaaaggatagcgaggaggcgctcaggcgtcgcacgtacctcaatgccctgatggggcgcgaacattcaaagctgccgagtaacgatgtcgttctcaacgtcgtccgaactactgccgctgaaattgacgacccccgcccaccctccgtttctaccatcagacggtgggcctcaaaatatttggcttcggacgtaacggagctggtccccaagcatgctcaaaaaggtcgcaccgcttgcgtgcaaggcgaattgaagagcctcctggatgacgtgattgcacagttttatctcaagcctgagctacctactgccaccgtggtcgcgaggcaatatcgttcaagaattgaagagcgaaacaggacaagccttccttccgatcatttggcaactccaagcgagtcgaccgtccgaaggtacatcaagcgtcttgatccatttctcgtagatgaggctcgcttgggtaaatatgcggcgaaaaacaagcaccgtgcggcgatcaatgtattgatcgtggatgacattctggatcgctgggagattgatcacaccccgatggacgttcagctggtcgatgaggatacgggattggttatcggaactcccaacctgaccaccgtcattgatcggtactcccggatggtgatggggtatctgattcatttgtcaccacctaatactgagaccgtactgcgcgcgattgagcgagcaattcgtccaaaggctgagctgctcaaacgttttcccaaagtcaaaaatgaatggcttgctcacggcctcccagcgcgaattgtctgtgataacgcgaccgagttccatgcnnnnnnnnnngcacgcttttttctctga

SEQ ID NO: 360642 - DNA, 807 bp, Pseudomonas aeruginosa
atgtctgctttttcgaagctcctgtcaatcctctcccactttttcgaccaatgcgaggcctctcgacgggagagtgttgcctatcgaaaggtccccagcagcttgggtctgcgcaccacgatttctgcgcagcgtactggctcatttcgagattttcggagacatttcatgacggttcgtaaagtcgtcactcgcagatcatgccatttcagagggtatttcccatcgctaaaaaatgggatggcggtaccttgggagtctcagctcgaaggtgcttttttcaggctcctggagctgtctccagaggtggccagctacatcgttcaacccagcacggaacgcatccctcttaatgggagcactttcacacacattcctgatattcgtgttttccggagtgatggtagcgattggtggtttgaagtaaaacccgaaagcaaactgaaaatagcatctgtgagagctcggttagatgcagctcaggagtattttgctagaactgggcgtggttactctgtagtgtctgaatcacaaatcaagaagcagcatgtggagaagactcttgccgatttaatgtatcaccggcgaggccccctgctgtgtgatagaaagctggaagaagtttgtgagctacttgtaaagcatgagcctggtaacttgtctgagttactggcggtattcggtaaacctcaagggtggcgtcttttgggcttgggtgtcatcggcgtcgagcttgataagccgattaacgatgactctcgggtctaccttcagggagggcaccgtcatgcaaaccttttcgcttaa

SEQ ID NO: 360643 - DNA, 756 bp, Pseudomonas aeruginosa
atgcagaaacagcgggtggccgaccaggtcgcagagcgtatcgagcggctgatcgtcgacggcgtgctcaaggtcggccaggcactgccgtccgagcggcgcctggtggccaagctcggctgctcgcgctcggccctgcgcgagggcctgcgggcgctgcgcgggcgcggcatcatcgacaccgagcatggccgtgggtcgttcgtcgccgacctcgaccgcaacgccgacgccagcccgctgatgcacctgttcggctcccagccgcgcaccctctacgacctgctcgaagtccgcgccctgctggagggcgaggcggcccgcctggcagcgctacgcggcaccgaggcagacttcgtcctgctcgcccggcgctacgaagagatgctcgccagccacgaggaaacccagccgatcgatccccgcgagcacgcccgccgcgaccacgcgttccaccgggcgatcagcgaggcatcgcacaatccggtgctggtgcataccctgcaatcgctcaacgaactgctgctgagcacggtgttcgcctcggtgaacaacctctatcaccggccgccgcagaaacgccagatcgaccgccagcacgcgcgcctctacgcggccctccgcgagcgccagccggaccaggcgcaacgggcggcgcgtgaacatatccacagcatccgcgacaacctgcgggagatcgagcaggaagaacagcgcctggtccgcgccaccctgcgcctgaacggctgggggtga

SEQ ID NO: 360644 - DNA, 159 bp, Pseudomonas aeruginosa
atgaccttccgaatcgttgcccgccaacgctggtggttgaagttgtacctggccggcgtatccatcacatcggtcataaccggattggagccagacccgatgcgggtgagctactggacccggcgaggcatcaaaatcaatgtggttccaggcgagtga

SEQ ID NO: 360645 - DNA, 624 bp, Pseudomonas aeruginosa
atgggccccggtcagggcctttcggataggggtttaggaggtgaaatggcttggaaaatcgagcagtggatgcgggatgtgttccctggtgcagatagaatttacgaagattatcgaggactgccgagacgtgagctagctattactgccggcgcggttctcgatctcgcacttgtcgaaattctatccatgacgctgacagggccagagcaggaaatacattcgtttctaggcattaacggcgatggccgtgcaccgtgtggctcgtttggtgccaggatccaactcgcgttgctcctgtcgataatctctgaaagggatgccgcgatcctcagagcgatcaagaatattcgaaatcagctcgcccatcaggtcaatgtagattttgactcttcatcggttctacctctgcttaataagctcaatgacaattttcaagagctagcggatagcttgaaggcgtcagggagtctttcaagcgcatcccgttcagcgtattcaatcaagccttttttagccacggaagctgaggccggagctggattgttgctggtcactttttgcatctaccaggcatacctgcatcgcatttatgaacggttgtccaccactaaacagggctga

SEQ ID NO: 360646 - DNA, 1305 bp, Pseudomonas aeruginosa
atgtccaacgaaagcgccccaccagccgcaacctcttctgaagatgccgtagcccccccgccacctgctgacaaacctgtggagcttgatgccaaccgcaagggccttcaggcctacttggcaccaggggcatctgattgggcgcctttgaatgaagaagcctatatcgtcctcaagggcgcaccaccacctgaccctgcgaggatcgtttccaaccgcacagcgctgtcggacatgctcgctgcggcactgcaagttcccaatcttggctttttggcaggaagtgggacttcgcttggtgcaccaggcgggccaagcatgtgggatctatggaagcgctccatgtgcacacccggctcaggggatctcactgaagcggcagcgcgcgtgatggatgtggtgcggtacaaagaaatcatcaatccaaacatcgagcacttcctttctcagtgcgacgcctatctcgccttcaacaaagacgtgaccgttgaagggttcgtcagcgatgtcaaagcagtcatcctggatgcatgctcggcattcctgcgggccccgaacgccgaaatttctgcatacaggcagttgctgcagaagctggcgagacgacgagtccgagatcctcgcctgaaggtctttaccacaaactatgacatgtgcttcgagacagcagcctctgacctcgggatgatggccattgatggattttcctatacccgtaggcggcggttcgatggaaagcatttcagctacgacatcgtcaggcgagaggtggaaggtcatgagttcgccgaaggtgtgttccagctactgaagttgcatggatcggtcagttggagcagagagggaaaagacatctatgaggactcagcgcctacacctgcgaacgcgtgcctcatctacccagccaaaggcaaataccagcaggcattcctgcagcctcacctagagcttctgtcgcgctacctggagtttctgcgtcagcccaacagttgcctcatcgtggcgggctttggcttcaacgatgatcacctctccgagccaatcttctcagccatccaatctaacccgagcctgaaactcatactctgcgatttccaatgcatcacgcacctgcataaccggggacaccatggctcaagcgactattggggcagattccatgacctcgccaagcgtggcctggacatccacttcgtcagtggttcgttcagcgatctggtcagccacattccgcacctgagaacagcttcaccagcagagcagttggcgaatgccgtcaggcgcctggggagccaaaacgcatga

SEQ ID NO: 360647 - DNA, 1722 bp, Pseudomonas aeruginosa
atgagtgctctcgacgggattctggccagcaatctcaaaattggtgtggtatcgagtgtgagtgcccacctggtaaagacgaacctggcgcatgccgggaatgtgagcggccagtacttgggccacaaccgttacggcaaaggtgaggtcggcgagcttgtgctcgttgaaggccagcaagcagtgctgctagggcgcataactgaggtgacggtgcctgacagggatcgctcggagatttcacaggactttgccggtagccgccaaatcgatgcaatcggcttcatacgccttctgggctccgtaaacccgcattcattgcgagtcacagcaggagttagctcatacccacgacttggcgatcgggtctactccgcccccggagaatttatttcccagatccctttgttgacctcaacggggatagacggtgcgccacctgaggtagcgttgagtcttggtcacgttgccggggatggcggatttcctattgccgtcactcccgaaaaaatattcggacggcactgtgcaatcctgggttccacaggcggaggcaagagctggacgacatccaagctgatcgaggagtgtcgccgcttctcagccaaagtcgtgctgatcgatgccacgggcgaataccgatcgctcgttggcgatgacacggttcattgccaccttggcagccctctccacctggctggaggctctgtagaggtcgcgattccgccgacgagcttcaccgagtccgacttcatagccctcttccagccatcgggcaaaacccaaggccctaagctgagggaggcgatcaaaagcctccgactagtacatctcgcacctgatctgttcccgaagcacatcgtctggaaggtagaccaatcgaaagaggtctatcgcgaggccatgaacagaggcaacaatgcaagcctggtaggaaatccaacaacgccatttaaccctcgcaagctggtacctcagttggtgcaggagtgttgctacccgaccgctttcaacgactcagagcgttttgggggtgcaagtaacgagatctcacactgctcatccctgatgacccgcatcctcggcgtgatggaatcgccgtcgctgggctgcgtcttcagtcccgctgccggccttcccagtttcgtagatcaactggacaacttcattaacagcgacaagaaactgttcagggtctgcttgagctcaatcggatacgagttcaacgcccgtgaggttgtggccaacgttatcggcagacttctactgcagcgagcccgcggtgaggttttcaggaaaaggccgctaatcaccatcctagacgaggcccataattttctgggcaaaaccgtcggaaacgaggatgacctacagaatctggatgcctttgaactgatcgcgaaggagggtcgaaaatacgggctgaacatttgcctggcgacccagcgaccgcgcgacataaccgaaggcgtgctgagtcagatgggtaccctgctcgtccaccggctcacgaacgaccgtgaccgtgaagtcgttgaacgagcgtgcggtgagattgatcgctccgctgcagcatttctgccgaatcttaagcaaggcgaggtagcgatggtgggtgtggatttcccgatcccggttacgattcaaatcagtcgaccaacccaacctcccatatcggatgggccaagcttccagagtagctggggatcaccggggcactga

SEQ ID NO: 360648 - DNA, 987 bp, Pseudomonas aeruginosa
atgattttcgtgaagccttcacctggaagtgtctcgccgatccaatcgaattctaatggaccgaaatgggatgccggagaagctgtaagccagctttcctgggacgacttgcgtatcatcaaaacgctgagtgactgtagcaaccgcgcggccacggccaagaagctcggcatcaatgtgtccaccgtctcgcgccgggtcgcgcaggttgagaagacgcttggggtcgcgctgttcgatcatcgtaaggcggggtatctgctgactgccgagggtgccgaactgcgtgcactggccgagcgcgttgaactggacatcgtcagtgtcacccgcagggtttctcgcgccggccaaggcccgctggggaaactgcgaatcaccaccagcgactcgctgctgctgtactttctaacgccgatcatcgcggacttcaaagccctcaatgaggggatcaccgttgaggtattagtcggcaaccagacgttgagtttggcgagggacgagtcggacattgcgatacgtgcgaccaaaaaaccggcagataccctagtgggtcgcaagctcgccaacatcgcctgggcgccgtatcgcagcgtcaagcaggtagcgattgccgaccccttcgctgaggggcagtcgtgggtatcctactcgggaggcctgtgcggattgaaggcaacgagctacgtcgaatgtcgggtgccctctgagttcatctcctaccgcaccgattccgtggcggctgcgagcgcggctattgcagcaggtctcggttttggcttcctcccctgcatgctgggcgacattaccccaggattggttcgggcaggccaagtagttcaggagcttcaggatgagctatggttgcttacccaccaggacatcaggaaatcctggcgggtgaaagcattcatgacgttctgcgccgctgccgtggccgacctcaaaccgctggtcgaaggtcagcaggccatcccggtttcatag

SEQ ID NO: 360649 - DNA, 462 bp, Pseudomonas aeruginosa
atggccgcttcacgacctttcaacgacgacaccgcctactggggcgttccatgggaagagggctacggctatccgcaggcgcggcgagtcgggaacgaaattttcatctcggggcagttcaaccatgacgaagaaggcaacctggtagcgccggcgccactggatgctgacggtcgtccgagcgatttttcgtcaatgggcgaacagatgcgggtttcctacgacaacattgccaagttgctcgccctgtatggcgccacgatgcaggatgtcgttgaggaaacgctgtatgtgctggacatggacgctgcttttgcggtcgtcggcaaggtgcgtaaggcagcttacggcacagaacgcccgcaggcggccagcaatatcatcggtgtatcgcggctcgcccaacgtccccagctgattgagatcgtgtgtcgggctgtcatcggcgcccacgccaaatga

SEQ ID NO: 360650 - DNA, 687 bp, Pseudomonas aeruginosa
atgagcaatccacacactgaagtcctgaccccgctcaacagccaactgatcttcatcgatcagcaaccgcagatggcttttggcgtacaaagcattgaccggcagacgttgaagaacaacaccgtgggcctggccaaagcagccaagatcttcaatgtccccaccatcttcaccactgtagaaaccgagagtttctccagccatacctaccccgaactgctcgcggtattccctgatgcgccgttgctggagcgcacctccatgaactcctgggacgaccagaaggttcgcgacgcgctgaaaaagaacggtcggaacaagatcatcgtttcgggcctgtggactgaggtctgcaacaccaccttcgcactgtccgccatgcacgatgcgggctacgagatctacatggttgccgacgcttccggcggcacgaccaaggaagcacacgactacgccatgcagcgcatgatccaggcgggcgtagtgccagtaacctggcaacaggtgctgctggagtggcagcgcgactggaaaaaccgcgacacctacgatgcggtcatggaactggtcaaagagcattcgggtgcctacggcatgggcgtcgactacgcctacaccatggtgcacaaagcgccagagcgtgttcagcacggccctaccttggcgcccgaggccgcatcgatctga

SEQ ID NO: 360651 - DNA, 666 bp, Pseudomonas aeruginosa
atgcactacgaatccccgaaggatggaatgaacacattcaacgaggcatatggtcaggccgcgacaccgttgatcgaaagcctggcgctacagtacgaggccgtgactcagaaagcgcccgcctcgtggatcgttcagcagtatgaaaatggcctggtactgttgcgcgctatggccgatgatcacactcaccagcgccagctggatcgcctagactgcggtagcatgttcatgaaggcagccgctaacgtgtactcagtactgagcgagcacgacgaggaaactgatctgctcgagacactgcaactagctgtagaaagggccggcgagattcaggccaaaggaggtactgtgagcaaaaaccatcaaagcgaatccgacctgattgcaatcggcccgctggaattcacacacaaccaactcctgcttgtgcttgccgctctagcagcaatggcaatggcgatcgcctcttttcttagcccgctcgtatcgcctgcctcaaaggcgttggagcctcaattgatctgggcttaccaacttctggtgatcggtgccgggggcgcagcgctctttcaccgagctggcttcaacgcaactgcccggaactgtatcctcattgccggtggcgtgttgcttggtgctgcactgaaggcttttctggtttga

SEQ ID NO: 360652 - DNA, 417 bp, Pseudomonas aeruginosa
atgcaggatctgaaagcacttctggacgagccagaagacaagtacatggatgagcatcagctggcagccttcaagggtgtccttctatcgcggcaacatgagctgcgtgatcgactgaagcagcgccaggaggatattgccgctcgtgtggtcacccctgacgaagcggacatgagtgcgcttgaggaggagcgatcgcttaatctgcgctttatcgcccgtgagcaggatgagctgaagcagattgccgctgcgcttgagcgaatcgaagatgaatcctttggctggtgtgtgctcaccggcgagccaattggcctgaagcgtctaattcacacgccaactgctctgcgcagttttgacgcacaagcgctcgtcgaacagaagaaccgcaacatggcatcagggatggccatctga

SEQ ID NO: 360653 - DNA, 249 bp, Pseudomonas aeruginosa; identical to SEQ ID NO: 31917

SEQ ID NO: 360654 - DNA, 1059 bp, Pseudomonas aeruginosa
atgaaaaattttgatacgagagcctataatatatctgattttttagagtggcaacagacagggcttttagagttgtcgccaaagtttcagcgtcggtcggtgtggacggaaaaagctaaatcctatcttgttgatacagtgcttagaggaaagccaattcccaagattctgattacgcagactttaaatgcggggcgaaatattcggacggtagttgatggtcagcagaggcttcgtgcgatacttggctatgtcaatggagactttaaagtctctagggcacataataaggattacgcaggtttagtgtttgacgagctgcctgaggatgtaaagtctgagtatttgcagtatgaaattggcgtggacatgctttttgatctcgcctttgaggatatcttggacgtttttgctcgactgaatacctactctgtaaagttgaatcctcaagagctattgaatgcgcaatatctcggttattttaagcagtcggcatatgcattaggttttaaatatgcggcttattggattgaagcaggtgttctgtccgagaaggacgtcatgcgtatggctgaggccgagctttcttcggacttgttgggttccctaattgagggtattcagcctaaaaaggccatcccgaatatttacaagaaatatgatgataacgaggaggcaagcttagaagctgccgataggtttgatagggttatggccgtggtgggtgctgtttacccgtcggcggatcttaaggaaacaaattacagtcgaattcatttcttttatacgctttttgtttcaatagcacattgcttatttgatttgccgcatcttgaagatgtgccccggatagtcatttctgggaagaatattgggcaggttcgtaatgctctagatgaaataagtgcgcgctatgatgaggtgacagctaaagatgcattgccgccagatgatgagtatcgcgaatttattgaggcgtcacgtcgggcaacaacggatctctcggtccgtagatctcgtactaaatttatctgccaaaagcttcatgaggtcgtttaa

SEQ ID NO: 360655 - DNA, 516 bp, Pseudomonas aeruginosa
atgccctactccgaccctaggcattgccaccatcagcgcgtcacacaatggcttgcagcgatgcggcagcatgctgcctggctgtacgcagcggatgagcagtacctgtatctggtggccgaggcaaacgaactctatcagtgcggggtgataggactgcaagacaggcacgatttggtcaccgacgcgctcggcatgtactcctgggcgatcgagcacggcatcacgcgcgagacgcactactgcgccgactgctgctacgacgtgatcgacggcgggcgcgttgtcgggacggtgaacagcgaggggatctaccacggacccgcacccgagcgacagcgccagggctacatcagccgggatccattggatgggcaggtctatctgcgcctgggcaaggctcttgagcgcgccggcgttgtgcatggactggagatcaagctcgacgccggcggtacgctgctacttgtcgagcaaatccccagcgacttccgaccgtggcgttggccaccatag

SEQ ID NO: 360656 - DNA, 648 bp, Pseudomonas aeruginosa
  misc_feature (539)..(547): n is a, c, g, or t
atgcccgacgcgcccgcatccgccgccgaacgcctcgaacggctgccgctgagtccgtatcaccgactgatcttcgtgatcatcgcgctggcgttcttcttcgactcgatggacctggcgatgatgaccttcctgctcggctcgatcaaagccgagttcgggctcgactcggcgcaggccgggctgctggccagctcgagcttcttcggcatggtgatcggcgcggccctgtcgggcatgctcgccgaccgcttcggacgcaagccggtattccaggccagcatcgtgctctggggcctggccagctacctgtgctccaccgccggcgacctcggcagcctgaccttctaccgggtattgctggggatcggcatggggatggagtttcccatcgcccagtcgctgctgtcggagatgatcccggccagccgccgcggcaagtacattgcgctgatggacggcttctggccgctgggcttcgtcgccgccggctgcctgtcctacttcctcctgccgctgaccggctggcgcagcatttnnnnnnnnncacgtaaggagtcgtcggcagcgtcagatgtgtataagagacaggcattttcctggtgctggcgctgccggcggtgttcgtcctcgccatccgcttcctga

SEQ ID NO: 360657 - DNA, 1434 bp, Pseudomonas aeruginosa
atgtcaaaggaaatcctcgaggaactcgaagattggaagcttgaagcaaagcttgagcaaagcgggcgttacttctatcacacccgcgtggtggaacgcatcgcgagaggtaagaagtgttatgtaatcggaaggaaaggtactggtaaaacagctatcggcgagcaccttgcgcacctgaaagaaaaagaatatttcgccagcaaactaaccttcaaaaactttccttttaatattttatattcacagagagatgagtcttatactaggccaaaccagtacatatcgatctggaaatatctaatttatatctctgtttgcaagctttttgagcaaaatgccgatgtaggtatagagacaagactgaagttaagagagctctttaatcaagatattgaaaatgcccttccaaatgcagttacagaatggacgggctggaagtttgatctaaaaattctaggaagcggcttgggctttggagctgataagggtaaaaaagaaaaagccgaagttagcatttccgagcgaaatgaaatactagaaaactttattcgcggtcagctcggaaagtctacgtacgtgattctttttgatgaattggacgaagattacaagaacatgctggcgaaagaaaactttgagaactatacagagctacttactagcttgtttaaggctgttcaggatgtgcgggcacgcttcagcactttcaggctatacccggtcgtattccttagggatgacatctatgacatcctccaagacccagataaaacaaaatgggaggactacagggtcaacctagactggagtagagagtcgcttcagcagttgttggctttccggatttctcgcgcaattaaccctaccggcagagtattaccctttgcagaggcgtggggagctgtttttaccggaggcaaggtgcggtatggacaaaacaaccagacccagaccacaagctttgattatataacgcgaagcacacagaaccgccctcgagactatataagatatatccaggtgtgcgccgagcgctcactagagaaaaacaatgaaaccataactccggatgtggtaaaggcacaagataaagcattttccaactacttgaaatcggagcttcaagatgaaattcatggcgctattccagaaatcaaggatgtctttacaatatttactgagctaaggaagcagaccctaagcataggggaattcaaggagcagtacaacttagcggttaaatcgggaagactccctaaaagagacgtttcctttattcttgagatactatttatgttctcggtaattggtaatgtgccgaagcaatcaacctttcaggtctttaagtatacaaacccagatgcgcgattaaattttaatgaaaaaatatgtgtgcatcgtggtctttttaaggcattgcaaattctataa

SEQ ID NO: 360658 - DNA, 162 bp, Pseudomonas aeruginosa
atggccctcatgcgctgggaaccgcgcatccgcctgagccgtgtccaggtcaccggccagaacctggccggccaggtgctcatggagattgacgccaccctggtggacagcaacgagccgcacaacctgagcatccccctgcagatgggcgccagcgcatga

SEQ ID NO: 360659 - DNA, 162 bp, Pseudomonas aeruginosa
atggccctcatgcgttgggagccgcgcatccgcctgagccgtgtccagatcaacgggcagaacctggccggccaggtgctcatggagattgacgccatcctggtggacagcaacgagccacacaacctgagcatccccttgcacatgggtgccagcgcatga

SEQ ID NO: 360660 - DNA, 318 bp, Pseudomonas aeruginosa
atgtgggcaaaggagttcgtcgagaactcccttcaaacggtcatgttctccggccatgatgatgccagagagaaggctaaggctatcgttgagtaccttagtgacttcgactcaactcgccaccactccaggcacatcaatatcaatcggtgcaaggagataggcctgaagattgagcagatggaagacgacgacacgctgcaggacctcatcctcaccgtgcatcattgttacatccaagccatggacaacggacgggtggcgaaggtcgtggagaatgatcgcggcattgcgcacgttcggctcaatgtgaattga

SEQ ID NO: 360661 - DNA, 978 bp, Pseudomonas aeruginosa
atgaccctatcgcatgagatacgggtcggggattgcctggacgctctccgggcaatgcccgaccagtcgtttcactgctgcataaccagcccgccctatttcggcctgcgcgactacggcatggccagccagatcggcctggagcagacgcccgacgagttcgtgtcgcgcctggtcgaagtcttccgcgaagtccgccgcgtgctgcgcgatgacggcacgctgtggctgaacctaggcgacagctatgcgaacgacggtaaatggggcggtagcagcggcggcaagcacgccaacgcgctacacggcaacaccagcgtcggcagaacgaagacacgcaccgggctcaagcccaaggatctgatcggcatcccgtggcgcgtagctttcgccctgcaggttgacggctggtttcttcgccaagacatcatctggcacaagcccaacccaatgccagagagcgtgcgagaccgctgcactaaggcgcacgagtatgtcttcatgctcaccaagtcgccccggtattactacgaccatgaggcagtgaaggaagatgccgtaagcgaacaccccagcggaaatggcttcaagcgcgacgcgcgcgagtcctacaaaaatctggatggcacagcgcgcggcaatgacgagcagtggacgggcgtaggcggcaagcgcaaccgccgcagcgtctggaccgtgcccacagccggtttcaagggtgcgcacttcgctactttcccgcccgacctgatccgaccatgcgtactcgccggcgcgccgcggggaggcctggtccttgatcccttcggcggcgccggcaccaccgccctcgtcgccatgcaggaaggtcgtcggtcggtgctcatcgaactcaacccggagtacgccgccatcgctagaaaccgattggatacggcttggctggaaggggccgctcaacttgatctactccacgaccagaaggagtccgtcgcatga

SEQ ID NO: 360662 - DNA, 1386 bp, Pseudomonas aeruginosa
atggttcaaattagagactacccttttctcgataatcgaatcccccttgctgacggtgacaattacttcgaaaactgtttcaccgtactcctagggaagaatggagttggaaaaagcaggctactttccgagttagtatcagagttcgcaagatcttatagaaacgattattcatcgtcagcagcggggcccttcgctgcgaatcctctgccatcaaagattatcgcggtatctacaagcccttttgacaaattccccccggtacgacgtagcgccaatgctccggagtatagttacattggaatgcgttccagtggcggagcagcaacaaaccaaatggcgctcatcctatcagcagccaaagggctgatgagtaaatacctagagactgagcagcacgaaaatcttgcagaaatattcgaattactctctcttgatccatcgctaagctttatattcaagataaatataaagccaaaaatagaaattaaaaaacagaatggtggctcggtaagattctcatttgacggcctagttccggatttcttcgatgacgactccgatgtttttaaagaaattctggaatacccaatactgcagaactatctgaatgaaaaccaagaaaccagattaaaaataaggcaggccctttcctccatatgggatgagttagaaaacaaaaaaggaatgttcttcactctacactttgactattccagcaaatataaaacaggcttcattagccctaaagttgtttcggcactactgactctgcttgagcacaatttagttagattatacgaccttaaaataacaaaaaagacctggaggaacgatcctcttgaaatgtcactacgtcgtgccagctcaggcgagcaatgcttgttagttatgattctagggatcgccggccaaattcgcgataactcactaattctaatagatgagcctgaaatcagcctccatccttcttggcagtcaagatttatatatttaataataaatacattcaccaaatatcaaaaatgccacttcattattgcaacccactctccacagatcgtttccagactgtcacacaacaattgtttcatcacaactatggatgacaacaaactacatcgggcgcaagacttccataatcgatcagccgactaccaactgacggagctattcgatgcccccggaatgatgaatgaatacgtatccaggttagcattcacgttactttctaaagtaaagtcaaataaagacacagacataggagacagaagaacgataactagactagaaaaaataagactaaaattagagtttggcgacccaaacatcgaactgatcgactctgtattggaggtgtgcgaatactatgcctctaataactga

SEQ ID NO: 360663 - DNA, 660 bp, Pseudomonas aeruginosa
atgcctctaataactgaagcatatatttttcctccggaagaaagacgggcaatcgacaatctattagctgctggattcacctatcgcgactggggatgtgaagagcttcaagatatccgatcaaacatccgaagattttacagggatgcgcaacgaggccgctgcccatactgcatgaaagagacgtccattctcgcagcaggaaatgcacatattgaacacatccttccaaagtcgcttttccaaggctttatatttgagccaagaaacctctgcgtcatctgcgcagactgtaacactgcaaaaaacaacggaaaccctataaacgatgaggaagaggacacctgcaatgggccagctagaatttatccccgctcagaactacgctttaaaataattcacccgcactttgacaactacgacgaccacatactacgtgcggggatattttatatagacaaaactgacaaagggcatttcactatagggatttgcaagctgaacattgccgctcgccggtatgggcacgacgaaggtgctctagatgactttagctttttccagttaatgcagaaacttcagaacggggatgagcgagatcaacgcgaagtttttagtacgatcagagcactgatacctagaccactgggtagaggatga

SEQ ID NO: 360664 - DNA, 816 bp, Pseudomonas aeruginosa
atgttggcactcgcgactggtttcggcggcaggtctcctggctcgcagcccggcgttccacccgggggaggaacctccgcttcgcgccgccttcccggtaatccagtggcgaatggcgcgaatacaggctgcatacagttgcgggggcagccacggctaggcccgggcttcgaaaagaccgcggctccgtgttccctcttcggccctcgttggccccgcgctaacgcgaaagggccgggcaccgacgaacgcgctattatgccgcccagcccggggccgggaaaacccattccgtccggaagccgtcgcgggcccttcacagacgcatttcaggagtatcggaaccgtgtcatcggcagactcgacgccgccctggctgaccctggtgggcatcggcgaggacggttatcccggcctcggcaagcaggcccggcgtgccctgctgcaagccagccggatcgtcggcgcggcgcgccagctggaactgctgccgccgtgcatcggcgccgcccgcgaaacctggccgacgccgttctccctggaaccattgctggcccggcgcggccagccgacctgcgtgctggccagcggcgacccgatgctgttcggcgtcggcgccagtctcgcccggcaactgccggcgaccgaactgcgggtcctgccggcgccttcctccctctcgctggccgccgcccgcctcggctgggccctgcaggaggtcgcctgcctgtcgctggtggcgcgcccgctggcagcgctgcaggcacaggtccacgacggccggcgcctgctggtcctcagcaacgacggcgatag

SEQ ID NO: 360665 - DNA, 948 bp, Pseudomonas aeruginosa
gtgaataacttagctacagcaccgactgcaaacgacagttacgtagagcaagtaaaaacatcccgaaatcgaccggccacactaaaattaaagcttgtaagcctaaaatcatccaccccaaaatctttgatctttgtatttgaaggaaaagatgacaaagtaatttattacaattggataagacgcataaaagatgaaattcgatacgagccattcccctgcgaaggaaagaaatacgtccttcagcttattggaatagtgaggcgcgacctaaacaatctcgaaaatcaagtttacttctttttagacagagacttcgacgaaaacactgatatcgaaaacgcacaaaatatatacattaccgacacttactccattgaaaacagcgtaattaactcagaggtcgttgaggaactactgaagaatgactttcactgccatgctgagccagaaataagaagagaaataatagagctattcaatacgaattacgccgaattcctagaagcaacaaaagacataaaccttagattgtacacagcaaggaagctaggcatcgaactaaccaagcagcttcctgacaagataaatcaaattgcaaaggtagaaattagaagcaccactgccaccacagttccggcaaatgacatagttagactttcacgcgagcctgacgcgattgaaagcgctgctgccgcagcggcctttgctcaactggtaccaaacaagcactatcgcggcaagtttgcaatgatgttcttcaagagatggctacaaaacctagtggatgacaaaaacaaaccagttgaaaatcgcgagttatttacaaaacttaacaacaaatccacaaccagcccaataacactagacagtatggcatcaaaatccaacccgcctccttgtctacggagcttcattgctggaattcccatcccaaccactgagtga

SEQ ID NO: 360666 - DNA, 1548 bp, Pseudomonas aeruginosa
atggaatattctgaggaaatggagaactgcccaagagcagccaccccctcaataattcaagaattcaagatagaaggacttcatggttatcgaaacatttccttatcatccaactatgccgccacaattataattgcaaagaacggctcaggaaagacaactctcttaggtgcgcttgacgcctttttaaaaggccaatttagccgattatttcaccttcaattcgagcgaatcacttgcaggatacaggggatcgaagagcctttaattatcaacagacatgaaatcgaccgaatatacagcccaaacaccgaagaaagcgatatatccgtatattcaaaacgcttatctattgatccatttacccttatagagttcctcgaatcaagcactgatgaagagccgtatgatgacgaggtctttgacaagatcagatcagcagttggccataaccgcctagaagcaagaaagctctgcgagcgactaaggtattccctctacgcgcggagcccccaattacatgagatactaaaaagattaaaatgggcccttgctgacatcgaaatagtctacctgccaacctaccgcaggatcgagttacctttaaatctagatggagaagatagaaaaaggtacggatacccgcgaaggaggagaaaccttcaatcacggttaggcatcacaaaacacagtctacataacgcagacatccaattcgggctctctgacatctcagaccgcctatccgggcttaaccaagagatactgtacagttccaaccagggctatagggaaatcagcgcaaacataatcaacgaactaatagatggcgattttgaaaaaatcaaccctagcgaagaccagctcccagatagagaagccttgagcttatttttctcaagaataaaagataatcgacacatatctccatattccgatgtatccatccccaacatggataagatctataacaacgagataccatacgagtccaataagtttcttacatatttcctcagcaaattaaactcagttgtcgaggcaaccagaggcatcgagttagtagttgaagaattcattagcaactgcaatcgatatctctcagcacaagatgaaagcaccgcacttcactcttcagaagaccgcgagatgagcatccctccatcaatggatgacaaaaagctaactctagatcgccgaactttaaaagttaacgttgagagcttgataacaaagcgaagactaccattggactcgctctcttcgggcgaaaagcagatgatatctctcttcgccaggctatacctatatcccaaaaagaagattttcttaatagatgagcctgagctttctctttctttagactggcagagcaaaatcctcgttgacgcaatgaatgcaccgtcttgcgtgcaaataatagcaattacccactcccccttcgtctttgacaatgcactcgaaccatttgcaaaagcaatcgatctcgaaattacaacagggagaatcgacgattatttcattgacgaggaagatctaagtgaataa

SEQ ID NO: 360667 - DNA, 285 bp, Pseudomonas aeruginosa
gtgctgacagcagagatggtacggcgcgtgcgggtcttcaccggccatggccttctcgccgtaaagcgtgccttggaggcctgtgatggcgatgagctgctggcttgcggttacctccggtatgaagggagcttgatcaatctgaaggggggagacatgggggcatggctgcttgatcaagctcgtgcctacgccgaatacctggaaacgggcccgaatggagaaattcgctttcgagatgcggatcctcccccccaatcctggcagttgagcggcccggaatga

SEQ ID NO: 360668 - DNA, 495 bp, Pseudomonas aeruginosa
atgcgcggctacacgccaagcattgcggcccaaagcgggtcaagtaagttcgaggaaaccgacatgccaaagctccccccggtgaagatgagtgagtgtgacgaaatcacctactgcttctactgctcgcacgcgatctacacagatcgctactacgatgagctatccggctgggaatggaacggtacatgcccgagttgttgccgtgatgctcttggccgtgacaggttatccccggacgagttggccgatggcgaattggttggaacacttcgctccatcgctactcaatggcgggcagggagtaaggggcactctgacggtgtagtgctgatctggcaaggcacggtatatggttggaaaaactgccttcgggacgctgctcacgaacagcctggggcatatgcggtagatgaatctggccacgtattcattgccaagggcggcaatgaatatgacggcgcaaaggcctgggtcgctgtcgccacaaactga

SEQ ID NO: 360669 - DNA, 483 bp, Pseudomonas aeruginosa
atgaccgaccgcgcagagctgcggaggctggctgaagaagtgatccgaattgagcggagcgaggatgagccgatctcctctgcttgggaattattcgattccgccgccaacccaaagaccatcctcgccatgctggacgagatcgacggcttgcttgctcagcatggccgcgatagctccgaacttagggcgctctgccaagcacgcgatgatgctaggaaagagcgggacaggctcaaggcggagaacgaaaggctgctcgacgaactatccgcatgcaccgagcatcctggcggatgtgggtattggcgcgaggccgccaagcgtagaactgaagaacgcgatcagttcaaggaggagaacgaagccctgcgcgagagcctgcaagcgctgattcatatttcagacgctacaggctgggaagaccatacctgcggtgagatagccaaggcgcgagcggccctggaaggagccaagccatga

SEQ ID NO: 360670 - DNA, 1230 bp, Pseudomonas aeruginosa; identical to SEQ ID NO: 96872

SEQ ID NO: 360671 - DNA, 825 bp, Pseudomonas aeruginosa; identical to SEQ ID NO: 96871

SEQ ID NO: 360672 - DNA, 192 bp, Pseudomonas aeruginosa
atggacgtcgagctcaactgggacgcgatcaacgggcggccgacctcgactccggcgcagatcgacactgccgtttcccaggcgcacacgcacgcgaacaagtcgacgctcgacaagttcagcgaggacggcggcctggttcgattcggcgggcagcctattccggctgagtggaacggggcggcctggtaa

SEQ ID NO: 360673 - DNA, 153 bp, Pseudomonas aeruginosa
atggaactcggtcgcgttatcacagacaattcgcgctgggaggccgtgagcaagccattcatttttgactttgggaaaacgtttgagcagctcagcctttggacgaattgctcgctcaatcgcgcgcagtacggtctcagtattaggtggtga

SEQ ID NO: 360674 - DNA, 1038 bp, Pseudomonas aeruginosa
atggagcggacagccctgccggatccacagctgcgttttcccattcatttcctggaaatgctcgaatcgctggttcgcaccgccggcggcgacgtcgtcggggtgcgcgcagcctgcggcctgggtcgcgaaggcggcgaggaagcgctgagcctggcgcagttcgaacgcctgatgcgccattgcctgctgcacctgaagccgcacgagccggcctccctgcaactgctgcgacacctgccggtcaccgcccacggcatgatcggcgtcgccgccatgacctcgcgaaccctcggcgaagcgctggatgtggcactgcactactttcccctggtgctgcctacccatgagttgtaccgggtcgcccagggcaaacgggtccacgtgcatatccagcgcctgcatcgtttcggctcgccctacgacgagatcctcagcgaaatgattcccggcggtttccaccagatgctcgccttcgccaaccaggccacccgcgaagccggcagcctccaaggctcggagctgcatttcagccacgccgccggcgaccgtcccgaacgctactcggtctactaccggggcgtggtgcgtttcggttgcgccgacgaccgtttcgtcgttccccgcacgctgctggagcgctcgctgttcacccacaaccggaccacccaggccatggccgaggcggccctggagcgtcagttctcgcgcatcgcccgggaacagccggtgtcgcgacaggtatggcgtttcctcagcgtttcgctgttgcgcgaacgggtgccggacaccacggcggtcgccgagcaactggcaatatcgccgcgcacgctgttgcgccgcctgcgggaggaaggcacgaccttcggcaccctgctggaagccgtgcgcagcgagcgcgccgagcggctgctgcaaggcagcgacctgccgctggtgcgcatcgcccggcaactgggctacagcgacctgtcgagtttctcgcgggcattcaagcgcgctcgcggagcgccgccgagttcgctgcgtcgacgctga

SEQ ID NO: 360675 - DNA, 855 bp, Pseudomonas aeruginosa; identical to SEQ ID NO: 320334

SEQ ID NO: 360676 - DNA, 498 bp, Pseudomonas aeruginosa
atgaccgtgggtgttggcgggagtacccctgcgcaggcgctggagcgtctgcggaacatgatggacggcgcgcagccgatcggcctggcgtcttaccgtgcgcgaatcgccgcggcccaggcgtggatgggcgagcatggcatcgccgcggcgtacctgcatgcaggcagcaacctgcgttactttagcggcgtgcaatggcaccccagtgaacgcctggtgggtgcgctgctgcccgccgagggcgctctcgaataccttgcgccggccttcgaggaaggtacggtgcgcgacttccaggtggtcgatggcgccatccacacctgggaggaacaccaggatccctatcgcctgctgctcgatcgcctggaggcgctcggcgtgggtgagcgcagcacggtcgcactgtgtccgagcctgccgttcggcatgttcgagcgcttgcgccaactggcgccgggcaggaacttcgtcagcgccgcgccgctgatcgactag

SEQ ID NO: 360677 - DNA, 714 bp, Pseudomonas aeruginosa
atgcgcaagtcggccgaggagctggcgctgatgcagcgggccaaggacatgaccctggaagtgcagaaggccgcggcgagcattctccgtgaaggcatcagcaccaccgaagtcgccgagttcatccaccaggcgcaccgcaaggtgggcgcgcccggttcgaccttctgcatcgtcctgttcggtgccgccagtgccttcccccatggggtgaagcatgcgcaggtgctgaaggatggcgacatggtgctgatcgataccggctgccaggtgcacggctaccagtcggatatcacccgcagctatgtgttcggcacgcccagcgcacgccagcgcgaattctgggggatggagcgcgacgcccaactggcggccttcgaggccgcgcgtctgggccagccctgcgaggcggtggacgccgccgcgcggcgttcgctggaggccaacggcctggggccggactaccgcctgcctggcctgccgcaccgcaccgggcatggcatcggcatggatgtccacgaaggcccgtacctggtgcgtggcgatcgcacgccgctggatgtcggcatgtgcttcagcaacgaaccgatgatctgcgtgcccggcgagttcggcattcgcctggaggatcacttctacatgacggaggaaggaccgcgctggttcacccaaccgagcccgtccatcgacgatcccttcggcctcggcggctga

SEQ ID NO: 360678 - DNA, 2805 bp, Pseudomonas aeruginosa
atgggtattcctctgcccaacaccgggagcaagaatggcgccacgcaggctgaagcgtcacgcctctacgatcacgacccatcgttcgtcgacctgctgccctgggctgagtacctgcccgacgagcaagtgatgctcctggaggatgggcgttcgcgcgccgcgttcttcgagctggtgcccttgggcaccgagggccgcgatcccaattggatgcagaacgcccgggacgcattgaaagaagccctgcagaactccttcgacgagcacgaaacctcgccctggatcgtccagttctacgcccaggacgagatcagctgggacaatttccaggagcagttgaggcagtacgtccatcctcgagcgcgaggatcggccttcagcgagatgtacctggcgctcatgaagcatcacctggagggcatttcgaagccgggcggactgttcgtcgacaccgccgtcagcaagctgccctggcgaggacaacagcggcgcgtgcggatggtggtctaccgccggatccgcaaggcggatgcgcagattcgcggacaggacccggcggcgtatctgaaatccatctgcgagcgtatccaaggcggcctggcgaacgccggtatcgtcgcttcgcgcatgagcggccaggagatcaggaactggttgatccgctggttcaacccgcacccggatcacctcggcaagaccgatgcggatctacgtcgtttctacgaactggtctgccggccggacgaaccgatcctgcaggatgaattaccactggccgacggcaccgacttctcccaaaacctgttctatcggcagcctgtttccgatgccacccagggcgtatggctcttcgatgccatgccgcaccgagtgatcgtggtcgaccagttgaacaaggcgccgctgacagggcatttcaccggtgagacgctcaagggcgatggcctcaacgccctgttcgatcgcatgcccgaggacacgctgctgtgcatcaccatggtcgtgacgccgcaggatatgctggaagggcacctgcagcagctctcgaaaaaggccgttggtgacacccaggcatcgatccacacccgagaggacgtggccaccgtaagacgcctgatcggccgagagcacaagctctatcgcggagcgatcgctctgttcgtgcgtggccgcgaccatacccagttggaggaacgctgcatcaccctgagcaacgtgctgctcggcgccggcctggtgccggtcgaaccgcagaacgaagtcgcaccgttgaacagctacctgcgctggctgccctgcaatttcgatccgaacgagaagcgagccctggagtggtacacccagatgatgttcgcgcagcacatcgccaacctgtcgcccatctgggggcgcaccaccggtaccgggcaccctggcttcacgctgttcaaccgtggcggtgcaccgttgaccttcgacccgttcaacaagctggaccggcagatgaatgcccacggcttcatcttcgggccaaccgggtccggcaagtcagcgtccctgaccaacctcatcagccagatgctcgccatgtacctgccacggatgttcgtcgcggaagcgggcaacagtttcggcctgctggccgacttcgccaagcggtttggcctctcggtccaccggatccgcctcgccccgggctccggggtcagcctggcgccgttcgcggacgccatcaagctggtcgagagccccgacctgatgaagatcttggatgccgaagacatcgaggactcggttaccgtccagggcaacaagaccgacctcgaggacgaccagcgagacatcctgggcgagatggagatcgtcgcgcgcctgatgatcaccggcggcgaagagaaggaggacgcgcgcctgacccgtgccgatcgcagcgccatctgccaggcaatcctggcggcggccaggacctgcgccgccgcgaaccgcacggtactgacccaggacgtgcgcgatgcactctaccaggcctccaggagcgatggcaccgcgccagaacgacgcgcgcggctggccgaaatggcggaagccatgcagatgttctgcatgggcgccgacggcgagatgttcaatcgcgaaggcacgccctggcctgaagccgatctcaccgtggtggatttcgcgacctacgcgcgcgaaggctacgccgcccagctcggaatcgcctacatctcgttgctgaacaccgtaaacaacatcgccgaacgcgaccagttcaagggccggcccatcgtcaagatcaccgatgaagggcacatcatcaccaagcacccgctgctgctgccctacgccatgaagatcaccaagatgtggcggaaactgggtgcctggttctggctcgccacccagaacatcgatgacatcccagcctccggggcgccgatgctgaacatgatcgagtggtggttgtgcctgaacatgccccccgacgaggtagagaagatctccaggttccgcgagctgtcgccggcgcagaagtcgatgatgctctcggcccgcaaggaaagcggcaagttcaccgagggcgtgctcctggccaagggcaaggagtacctcttccgtgtggttcccccgagcctctacctggccctggcaatgaccgagaacgaagaaaagaaccagcgctacaacatcatgcaagccaccggctgcgacgagctcgaggcggccttgcaggtcgcagcggatctcgacaaggcgcgaggcctgccgcccttccccattattttcccagaccaaccggcagtggagtgccaggacgaatga

SEQ ID NO: 360679 - DNA, 432 bp, Pseudomonas aeruginosa
atgaacactgagcagttcattcgggagtccgccgcgcgcgggctttcccggcgcgccacccggctggccttgggcatcggcccctgggtgttccgcgaaatgctgaccctgatgccggatatcgagtggccggcgaagggccagtcgctggaccacaagcgggccaactcgcagaaacgaggttactgcacgccggcactcgcccgcgcactggaccatgcccgccaggcccgaaaggacaagcatacccacaccgtgcgcggccggaccggaaccatagaggaactggtggggacgctgccgagccctgtctcggctagcaccgtccgcaggcggctcgccggaggcatgccgcttgaggaagccctcctcaccccagcgactccgccgttcagcaaatacaaacgggagaatcccgatgatcacgaataa

SEQ ID NO: 360680 - DNA, 927 bp, Pseudomonas aeruginosa
atgcccggtgatggccgggaacatcagcggcatcacgtcgcgcagcttgagctggaggtgctcggcgacagcctggatgcagccggtgatgcgttccttctcccactggcgcagggattcgagtttccacagcaccagttgcaggacctggcggacctgggtcggatcgagcttcttgtgttcgaacagcgaagcgtccagcggcaccccgccgctgaagaagaatccggccagcggctcgatctggctgaagttctccacccgtccctgcacgtgcggagcgatcttcatcaggtattcgggattcaacgcccacttctgcacctcacgggcgaactcctccacggactgctcgcggatccactgcccgttcagccaggagagcttctccaggtcgaagatcggtccgcccagggagacgcgcgacaggtcgaaatgctcgatcatctcggcgagggtgaatttctcgcgctcgtccggcatcgaccagcccatccgcccgaggtagttgagcagcgcctgcggcaggtagcccatgcgctcgtagaaggtgatagaggtcgggttcttgcgcttggacagcttgctcttgtccgggttgcgcagcagcggcatgtagcacagctgcggctgctcccagccgaaatactcgtagagcttgatcagcttgggcgccgacggcagccactcttcgccgcgcaggacgtgggtgatgcccatcaggtggtcgtcgaccacgttggcgaggaagtaggtgggcaggccgtcggccttcatcagcacctgcatgtccatgcgatcccacggaatctcgacatcgccgcggagcatgtccggcaccacgcagacaccctcggtcggcaccttcatgcgggtgacatgggactcgccggcggcgacgcggcgctgcacctcatccttcggtag

SEQ ID NO: 360681 - DNA, 957 bp, Pseudomonas aeruginosa
atggccaacgacaagcagacttcgactcccggcccccgacaaccggccaagggcggcgcggcgggcaagcgccaggggcgtgcagcggagggcgcgcgcaagccgcgtgcgcgcggcgaggagcggaaagagaaaccggccgacggacgttcggccacggcgctgaccgccaacgagcggcgggagatcgacgacaagcagccaccgcgcgccgctgtcctgcacgaggtgattcgcgtccagggcgaacacgagctgcagcgcacgctggcggcgctctggtggtcggcggtggcggcgggactgaccatcggcctctcgttgatgggcatgggcctgttccgcgcggccctgcccgagcaggaatgggcgatcatcgtcagcagcttcggctatcccatgggcttcctggcagtgatcctcgcccgccagcaactgttcaccgaaaacaccctgaccgccgtgttgccggtgatgaccgagccgaccctggaaaaggcctggcaactgttgcgtctctggagcgtggtgctgttcggcaatatcgtcggtacgctgctgttcgcctgggcggtgctgcatctgccgatcttcaatgaagcggccgacgcggcgttcctcgagatcggccgcgaggtgatgcacaacgacctggcgcagatgttcgccaagggcatcgtttccggctggatgatcgccaccatggtctggctgatcccggcggcggagggcgcgaagatctggatcatcgcgatggtcacctacctgatggcgctgggcagcttcacccacatcgtggtgggctcggcggaggtaggctacctggcgttcgccggggaaatcgactggtccgagttcctgctgaagttcgccctgcctaccctgggcggcaacatagtcggcggtagcctgatcttcgccctgatcagtcatgcgcagatccgtagcgaaggttga

SEQ ID NO: 360682 - DNA, 348 bp, Pseudomonas aeruginosa
gtggtggactacgccaccgaccgcatgggcggccagctgaccatcaaggcgccgaacgccaaggtgccgatggtcaacgaggacagcccgatcaccgaacgcatcaactactacctgcagaccgagatcaatcccggcctggccagccacggcggacaggtgagcctggtcgacgtggtcgaggacaacatcgccgtgttgcgtttcggcggtggttgccagggctgcgggatggtcgacatgaccctcaaggatggcgtcgagaagaccctgatcgagcgtattcccgaactgaagggcgtgcgcgacgtgaccgaccacagcaacaaggagaacgcctactactga

SEQ ID NO: 360683 - DNA, 351 bp, Pseudomonas aeruginosa
atggccaagtaccgcatctcccatgatgcccaagcggacatcgtcgatatcctgcgcttcacccacaaccgcttcggcgatgccgcgcgccgacgttaccaggcactcataggggcggcgctggaagcagttgcgacagacccacaacaggtaggcagcatcagccgtgaagaactgggagctggcctgcgcagcatccacctcgtttactgccgctcgatgcccaacatcggtaaggttgttcggcccaggcacttcgtcttctaccgggttgcgacagaccaggtgctcgaggtggttcgcgtgcttcacgactccatggatctggatcaacacctgccccaacgatga

SEQ ID NO: 360684 - DNA, 2211 bp, Pseudomonas aeruginosa
gtgagtaaagccttggacgaagtgctgaatcagcttcgagaccatggaattgaacccttcaccaagcggagcccgagctgggtgttcgggaagttggtgcgctgcaaggtcgagggcgaccggaacggggaggctaccggctggtacgtgctgcacgaatacaccacggccagcggcaagaccctctatttcgggcgcttcggcaactggcggcaggatctcaacgagaaattcaagctcaagggtgttcgcctgactgccgaggagcgcgagctgatgcacgcgcggcaggaggaggccaagcgcaaggcggcagcgaaggccgcctatgccgcccagcgtgccgcccagggcgccgcgcggctgtgggagcggttatcggagaaaggcaaggcgccgtatctcgaccgcaagcagatcgtcgggatcggcggtcgctacggttacggcgggcgtttcatggtgcccatgcgaacgctcaaggggctggtggggctgcaaatcatctaccccgagaagcagcccgataccggccgggacaaggcgtattggccctacggcatgcagaaggaaggcgcgttctgcctgatcggtccgcgccccgaaccgggcgagccggtgttgatcgctgagggctacgcaaccggcgtcagcctgtatatggcgacgggctgcgcggtggctattgccttcgatgccggcaacctgctgccggtcggcaaggcgatgcagaccgagtacccgtcgcggccgctgatcttttgcggcgatgacgactggaagaccacccgcccggacggatcgccttggaatccgggcgctcaggctgcggagaacgccgccacgatccttggcggccagttcgtactccctcgctttggcagcgagcgggaggagggctggactgacttcaacgacctgcactgtgccgaggggctggaggttgtccgcgcccaggtcatggcggtggtccggccgccggcggaagggggctggcgtgactgccttctgcggatcaagggcggcggcctggcagcgcacatggtgaacatcagcctcatccttcagaacgacgaacgatggcaaggcgtgctcggctatgacgagttcagcgccaagaccatgaagctgcggacgccgccctatggcggtggtacgggggagtggacagatctggacgacatgctggcgtgcgagtggttggcccagcaatacgggctgctgacgaaggtgccgcccgtgcttgaggcggtgtcggtggtggccagcaagaacagctttcacccggtgcgggcgtaccttgagggcctggagtgggacggtacgccgcggatcgagcattggctgaacagggccttgggcgtggaggagaccccgtactcgatgaaggccggcaagcgctggctgatcggcgctgttgcgcgtgttatgcgcccgggctgcaagatggatacggtgctgatcctcgaagggttgcagggcgaaggcaagtcgaccgccatgtcggtgctgggcggcgagtggttcatggataccccgttcgtgctcggtgacaaagagacgttccagatgttgcgcggcaagtggatcagcgagctgggcgagctggatgcgttcaacaaggccgacagcaccaaggcaaagcagttcttttcggcctcggtcgataccttccgcgagagctacggtcgcagaacccgcgatgtgccacgacagtgtgttttcgtgggtacgaccaaccaagacgagtacctgaaagacaccaccggcaaccgtcgatactggccggtcctctgcacgaaggtggatctggacctgctgcgcgagatccgggaccagctatgggccgaagcgctgttctgctaccgcgccggggatcagtggtgggtctcgcgtgaagagcgcgcgctgttcgaggaggagcaggacaagcgctacaccgtcgacgcatgggagcacaagttgatcggttggctggaggggtacgtcggcgagaccgtcaccagtgctgacctgctggggggagcgctcaacctcgatttcgggcattggggcaagccggagcagatgcgagtaggccatatcatgcatcgtctgggctggcggcgcagacgcctgcccgcatccgggcgatcgccggtgcgaccgtggggctacgagcggccgccgtcgtggaaggggcggccaacgcagaaggaggccgcattttga

SEQ ID NO: 360685 - DNA, 378 bp, Pseudomonas aeruginosa
atgaaatctggtatcgcgacccgtcgcctgttcatcaacgacaccaaagccttggtgcataccgtcgacgggaccgccatgctggtcacgccaggaatcttcaagcgttatgtccaggagcatccagagctcgaaaagctggcccaggccaaggatacgaccggctggaagctggtgcagcgcgcgttcgagaaacaagggcttcaccggaagaccagtaaaaacctgaacatctggaccatcaaggtttctggtcctcgcaagacgaaagagctcaaggcttacctgctccaggatcccaaactactgttccctgagcagcctctggacaacccaagcctcacggtcatcagcgacaccgaagggggtgtcgaatga

SEQ ID NO: 360686 - DNA, 825 bp, Pseudomonas aeruginosa
gtggataatgagtacggtttaagcaagcgagccgcagaagagcatctccaagtgctaggtgaggatattggttgtcctgtctacatatttcgccttcctaatgtattcggtaaatggtcgcgtccgaattataattcagcggttgcgactttttgtcataatattattcgagatattccgattcaaattaacgattcctcggcagagatcactcttgtatacatagatgatgtggttcgcaccttcatgaaagtcatggatgggaagctatccaatgcagtttcactacaggtcgagccccagtatcagatttctgttggtgagctcgcagaacaattgtatgagtttcgtgatagtcgaaagtcactgactaccgcaagggttggctcgggattgacgcgcgccttgtactcgacttatctaagtttcttgccagaagatagttttagttacgacgtgccaatgcattcggatccgcgtggcacattcgtcgagatgctgaagaccgcggactctggccagttctcgttttttacggctcatccaggtgttaccaggggcgggcattaccatcactcgaaaaccgaaaagtttctggttatcaaagggatggcacgtttcaagtttagaaacatcctgaccggggcattttacgaaatttgcactaatggtgaaaaggcagaaattgtcgaaacagtacctggatggactcatgacattactaatgtcggaactgacgatatggtagtcatgttgtgggctaacgaagtatttgatcgggaaaatccggatacctacgcttgttcagtaggcgaaggtgcgtaa

SEQ ID NO: 360687 - DNA, 177 bp, Pseudomonas aeruginosa
gtgaacaagcaccttccgccgcccatcgagcgggtggtgcgcttgcattacacggactacgacatgtcggacccgatgaaatgggaagcgtgcgggtgcggtagaacccagtattaccagcgcctgcacctggcccatgcggccattgctgaaatcctgctgcggcgggcggcctga

SEQ ID NO: 360688 - DNA, 420 bp, Pseudomonas aeruginosa
atgattgactctttacttaaagtggcgctgaaggaagaggagtctcgaaaggaaaagcttgctaaaaggcgcgctaagataaatagtgcaaaagccaaccctcccaaccctagaaaaaagctatccgaagtagaaaatcttaaaaaccaagtttcgatactaacaaaatcaaacaacgatctaaaaaaaagaatttccgatattcttttcggtaactcagaaaaagataagaaagaaaagatagaaaaattactaaacaaagccctacaggagataagagaagttaaaaagaggaacaaggccctagaggtggagaacgaaaccctccgtaagatgctaataaaacattatgcaaagacgcttgacctaaaaaaggaaactgtgttttacgggggacaatattccgatccagagacatag

SEQ ID NO: 360689 - DNA, 597 bp, Pseudomonas aeruginosa
atggctaagaactggcttcctgaagaactaattaatgtatggcttgttgttagggagtttggtactgtctcaagagaggctcataatcgaatattctcactgttgattaatatggtctttatgttgtgcgggtgtggggtcggctatagcctgagtctctcggcacaggataaggtacttgactcaataataagtttttgtggaataattattggttttgttattactgcaatgctcttttctgggcggaaccctgctgctgataagttgaggtatgagcaggcaaaggtatatgctctgaagacaaaatatatattgctctctcagacgcagaccttaattgctttcctgttttgtgtggggttttgcttgctaacaataatgattaagaattcaagggttaacttgcttgattcgttattgcttttttctttggcaatggggtacttttctttaggcgtttatcggacgatatttcttccttttcaaatatacgatgttcattcttttgcgctggactctctagtactggagaaagaggagcaagctaaagataaggtaaaaaatattatggacggatttaaagaagtgcagtga

SEQ ID NO: 360690 - DNA, 666 bp, Pseudomonas aeruginosa
gtgtatttcggcgatgaaacatttacagtaagtaaagatcgcaccttggatatttgtagcgcccttaagaataatggaagtataagatatgatattcaaacgcggctcaactgcttgaatgatgacgaagtgctgaaggcgctgaaggaaagtggatgcagttgggttgaaattggaatagagactgtaaatcaagatagccaaaatattcacaagcaaaaaattaaactaaaagagctcgagaacaccctttctagggttcaggatgcaggccttgctacctgttctttccttgtgaatggttttcccgatcagaccattgatgatatgaagcgttctactgattatgcctgtggcttaatcgataggggcttattgcaagcatcttatctttttggcctggttccatatcctggtagcgaattattttcctctcctgagtcatttggcatggaattactgcataaggatttcaggctttatcatgaagagttggcccccgtatataaaacacatcacgcagggccggatgagatatacgaggtttttctatctggtattacggcgttagctgaggcaatggggaagacctcgaatatattagattattctttctattcggattcattcgaatacggaaagttttggtctgagtctcatgtctaa

SEQ ID NO: 360691 - DNA, 1488 bp, Pseudomonas aeruginosa
atggaattccttgttaaaagcgtacgcccggaaaccctgaaaaccgccaccctggtgctcgccgtaggcgaaggccgcaagctcggcgccagcgccaaggcggtcgacgacgccaccggcggcgccatcagcgcagtgctcaagcgtggcgacctggccggcaaggtcggccagaccctgctcctgcagagcctgcccaatctcaaggccgagcgcgtgctgctggtcggcgccggcaaggagcgcgaactgggcgaccgccagtaccgcaagctggcctccgccgtgctgtcgaccctcaagggcctggccggcgccgatgccgcgctggccctcggcgatctcgcggtgaaaggccgcgatgcccacgcgaaggcgcgtctgctggtggaaaccctggccgatggcctgtacgtgttcgatcgctacaagagccagaaagccgagccgctgaaactgaagaagctgaccctgctcgccgacaaggccgacagcgccgccgtcgagcaaggcagcaaggaagcccaggccatcgccaatggcatggccctgacccgtgatctcggcaacctgccgccgaacgtctgccatccgacgttcctcggcgagcaggccaagggcctggccaaggagttcaagggcctgaaggtcgaggtcctcgacgagaagaaactgcgcgagctgggcatgggctcgttcctcgccgtcgcccagggcagcgaccagccgccgcggctgatcgtcctgcaatacaacggcgcgaagaaggaccaggccccgcacgtgctggtcggcaagggcatcaccttcgacaccggcggcatcagcctcaagccgggcctgggcatggacgagatgaagttcgacatgtgcggcgccgccagcgtcttcggcaccttccgcgcggtgctcgaactgcagttgccgatcaacctggtcggcctgctggcctgcgccgagaacatgcccagcggcggagccacccgtccgggcgacatcgtcaccaccatgagcgggcagaccgtcgagatcctcaacaccgacgccgaagggcgcctggtgctgtgcgatgcactgacctacgccgagcgcttcaagcctcagtcggtgatcgacatcgccaccctcaccggcgcctgcatcgtcgccctgggcagcaacacctcgggccttatgggcaacaacgaagcgctggtcaggcaactgctcaaggccggcgagttcgccgacgaccgcgcctggcaattgccgctgttcgacgaataccaggaacagctggacagcccgttcgccgacatcgccaacatcggcgggccgaaggccggcaccatcaccgccggctgcttcctctcgcgcttcgccaagaaataccactgggcgcacctggacatcgccggcaccgcctggatcagcggcggcaaggacaaaggcgccaccggccgcccggttccgttgttgacccagtacctgctggaacgggccaagtga

SEQ ID NO: 360692 - DNA, 780 bp, Pseudomonas aeruginosa
atgtgtataagagacagggctgacgtcgcgcgcctgtaccttgaagcgcaggcgcttgccgggggccagcggggcgtgggcgacgcgcatttgcagcgcgctgccgggcaggaccagggtcagcaggccgtaggccggctcgtggtcgctgaccgtgccctcgatcaccacaccggcgtcgtcgtccagcgccagcggcaggtcgactcgcgccagggtttcgccgatcggcccgctggcgcggaccttgccgttctccagcagcaccaggtgatcggccaggcgcgccacttcgtccggcgagtggctgacatagagcaccgggatgtccagttcctcgtgcaggcgttcgagatagggcaggatctcgcccttgcgcttcaggtcgagggatgccagcggctcgtccatcagcagcaggcgcgggctggtgagcagggcccgggcgatgccgacgcgttgctgctcgccgccggagaggcgttccggcatgcgttccagcaagtgctcgatgcccagcagggcgcaggcctgttccagctcgacgcggcgttcggcggcggcgatgcgcttgagaccgaaggccaggttgcgccgcaccgtcaggtggcggaacaggttggcatcctggaacacgtagccgagggcacgtcggtggggcgcgacgaagaggttgcggcggctgtcctgccaggtctcgccgttgatcgtcacctcgccctcggcggccttttccaggccggcgatacagcgcaggcaagtgctcttgccggagcctga

SEQ ID NO: 360693 - DNA, 327 bp, Pseudomonas aeruginosa
atggccttcctgcaggagctgcttgagctggaggcgatctacgtcggcgaagcacggctgaacatcgcccggccgggacagaacccgagcctgattcgggcctgggggccgcatgcgtccttcatctatcgcgaccgcctggccgatacccgcaacggcaccaccttcggcttgaccggccagtggggcgatcgcgtgtccggttcgatcgccgacccgaacatcggcctgcgcggtggtcagcgcgtccgtgttggtgaatcggtcaaggaactggtcaccgcaccggacctcggcttcttcttcgagaacgccgtcgcggcttaa

SEQ ID NO: 360694 - DNA, 195 bp, Pseudomonas aeruginosa; identical to SEQ ID NO: 326749

SEQ ID NO: 360695 - DNA, 327 bp, Pseudomonas aeruginosa; identical to SEQ ID NO: 326750

SEQ ID NO: 360696 - DNA, 516 bp, Pseudomonas aeruginosa
gtggctgtgtacatcacgttaccggagctggccgaacggcctggggcggaagagttgtcccaggccgcgacgcctcagcagtaccgtgcggtccagaccgagctgctcgatgccttgctgcgcggcttgccggtggaccagtggacgccggaggagatcgaggtcggcaacgccgctgtagaggtcatcgacagtgcggtgagcgatgcccggtccttcatcgacggattcctgcagcaacgtggttacctgccgctgcaacagcgttttggcatcgtggtcggctggcaccgggcgatcacgcgctacctgttgcataaggaccggttgggtgaaggcgcggagaaagacccgatcgttcgtgactaccgggacgccctgaaatttctgcagctcaccgccgagggcaagttctccctggggcaggacgacccggtggccaactccaccagcggggctccccaggtggtgactccgggccgaactttcagcctcgatcagttgaaggacttctga

SEQ ID NO: 360697 - DNA, 684 bp, Pseudomonas aeruginosa
gtgccgggcggcatcaccgacaacggaattatctgttccggcgatccgcagtccgatcagttcatcatcaccgcgccggccgacctcgatgtcgcgctgctgtacaaggccaaatcgccgagtaatgccatcgatctggtcgtctacgacatgcactacggcgatgtcgaggcagcggtttcctgggtgggggagattggcgacgtggactggccgaccgtggacagcagtcgcataacgtgcgtgtccgaagacgagctgatggaccagccaggcttgatcgataccagttgccgcacctgcacggcgaccttgggcgaccaccgctgcaaggtaaacctcattccgtatcgagtgacgctgacaccgcagagcgtgtccgcgtgggtgatttccagcggagtggtcgccggctatgccgacggctggtttaccggtggctatgtggagtggcaggtggacggcgacaactacgaccgccgctacatcgagcggcacgccggggccgatctgcacatcctgggcggcaccgagggcgtcccggcgggggggcaactgcgggtctatccaggctgcgatctgctcgatgaaacctgcgccggaaagttcgacaacatcctgaatttccggggctttaacaagatgcaaggcaagtcgccattcgatggcgaccaggtctggtga

SEQ ID NO: 360698 - DNA, 240 bp, Pseudomonas aeruginosa; identical to SEQ ID NO: 328651

SEQ ID NO: 360699 - DNA, 219 bp, Pseudomonas aeruginosa; identical to SEQ ID NO: 345817

SEQ ID NO: 360700 - DNA, 570 bp, Pseudomonas aeruginosa
atgagcggcgcacgtatcgagctggagttcgacagccagcaggtgacacaggcactgagcgcggcggctgcgactctgcgcagtcccaccaagatcctcgaagatctgatcgagccactactggatatccaccaggcgcgcttcgtggctcagagggctccggatggcacgccctgggcggcactgtcgcctcgctaccaggctcgcaagagaagaaacagggacaagatcctcaccgccagcggcgacttgcgcaaactggcggggcaggttgaaggcgataccttgctgttcggtacaaaccttccttatggcgctatccatcagttcggcggcacgatccaacgtcaggagaggcagagcacggtttacttcaggatgaatgaacgtactggcgaggtcggtcgacagttcgtcccgaaacgccgtagcaacttcgcccaggacgtgcgcatcggcccctacacgatcaccatgccggccaggccctggctgggcacgtcggacactgacgatgccaaactgctgcagcgagtcatgagcctcataaactcaaccttgcagaattag

SEQ ID NO: 360701 - DNA, 774 bp, Pseudomonas aeruginosa
gtggacccgctgccgggaggtttcgcgcccgcgtccagcgacggcgcgagtgaatgtgccggccagcagtcagcggaacgcatactgagccccgctctgcgctacctcagcagcgcggccaccacccgcaaagcgttcaaatcagcctacaacctgccgcccaatgcgctggaggcgctacgcaccgctatctggcagtcagtcaaggatgacacccagcgccgcctgcctcattaccaggaacggtggatgcaggcctttaatcgtcgaatgagagagcaaactgctcgcctactggaacctcttattgactctgcggagtttcgggatctggtatcgcaaccatattgtccggagcatccgaagaaagactcagttccgcagtgttcgaaaccaagcccagcccaccaatcagaaccgacctttttgacgccacagggactggctgctgaaacagagcggttgaaggctcagttttcgtctcctgcgccggcgcagtatgccgaacaaccgaccacaccggacaccctgcaatacatcgggctttcagggccacagcgtgccttgctggaccagttggcgcagtactggctcaggatcgccgcggtgtcgaagcgcgatgctgatgcgaaccccaacccggaccgaaagcgggaactggagctgaagtacatggcgcactacaactgcgcagcggaattacagaatctgctcaagaccggggagcttccgagccatctcggttttcaagtactcgcgcagaagcctgaatga

SEQ ID NO: 360702 - DNA, 957 bp, Pseudomonas aeruginosa
atggccaccgaattcggaaccgccacgaaccaccagaacctagtcgagcgcctcgtccagttcctcactgccagccccgacctggtcgcggctggacaggcttacgagaaggttttcgacaacaccatccccgcgtccggcacggccatcgccgtgcgccaggtgacactgcgcgcccccggcctgggcggcgaagacagcatcttcatgggcatccagtcctacggcgacaccgcgctcgactactacaacgtccggctgatgggcggtaccgcgttcaatcctggcgcgctgccgccgggtggcgacttctggacggcgttcgtcaactacagcccgcgagtgcagctgctggcctggaaccagcccatgccgtactggttcttcgccaacggccgcaggttctggctggtcgtaaaagtctcgacgatctacgagtcggccggcgccggcttcatcctgccaccctgtccgccgtcgcagttcccgtacccgcttgccgtcgtgggctcctaccgtggtgacgttgcaactcgctggtcagacgtcagcgaccggcacagaggcatcagcagcccctacgagcgtagctgctatctccgcgatcccgccgggcgctggctcggtttcactgtcgcaggtgggtcagccaacgagtccgactacagcaatcggaccctcctgccgcttggctgcggtcgctatgcgggtggtagcgacactgtgatcaaccagctccgcgactctttcagcaagttcccgctgaaagctttgcagttcgtcacccgcgaaaccgaggggcgccgctatctgggcgatttcgacggcgccttctacgtgccgacgctcaactccggcgccgaagacgtgattgtcgaggacggtgtggaccacgtcgttttccaaaccgcttggcgtagcggtaacccttggctctacgcgatcaggaaggactga

SEQ ID NO: 360703 - DNA, 957 bp, Pseudomonas aeruginosa
atggccaccgaattcggcaccgccacgaaccaccagaacctgatcgagcgcctcgtccagttcctcactgcgaaccccgacctggtcgcggctgggcaggcctacgagaaggttttcgacaacagcatccccgcgtccggcactgcgatagccgtgcgccaggtaacgctgcgcgcccccggcctgggcggcaccgatagcatctacatggggattcagagctacggcgataccgccctggactactacaaccttcgcctgatgggcggcacggcgttcaatcctggagcaatcccgcctggcggcgactactggaccgcgtttaccaactacagcccgcgggtccaggcactgctgtggaatcagccgatgccctactggttcttcgccaacggccgcaggttctggatggtcgtcaaagtcagcacgatctacgagtcggccggcgccggcttcatcctgccaccttgtccgccatcgcaatatccgtacccgctcgccgtggtgggttcctaccgtggcgacgtcgccacccgctggtccgacgttagcgaccggcaccggggcatcagcagcccctacgagcgcagctgctatctccgcgatcccgccgggcgctggctcggtttcactgtcgaaggaggggctgccaacgagtccgactacagcaatcggacgctcctcccgctgggctgcggccgatatgcgggcagcagtgacaccgtggtcaaacaactgcgtgactcgttcgggaagttcccgctgaaagctttgcagttcgtcacccgcgaaaccgagggtcgccgatacctcggtgacttcgacggcgctttctatgtgccgacgctcaactcaggcgctgaagacgtgatcgtcgaggacggactggaccacgttgttttccaaaccgcctggcgctccggcaacccctggctctacgcaatcaggaaggactga

SEQ ID NO: 360704 - DNA, 846 bp, Pseudomonas aeruginosa
atgagtaacgcagtacccgccgagatttcggtacagctatcactggctctcaacgccatcgagcgtcatctggaatcaacgttgctggccgtgcatttgtacggctctgcactggacggtggcctgaagccatacagtgatattgatttgctggttactgtggctgcacggctcgatgagactgtccgacaagccctggtcgtagatctcttggaaatttctgcctcccctggccaaagtgaagctctccgcgccttggaagttaccatcgtcgtgcatggtgatgttgtcccttggcgttatccggccagacgggaactgcaattcggggagtggcagcgtaaggacattcttgcgggcatcttcgagcccgccacaaccgatgttgatctggctattctgctaactaaagtaaggcagcatagccttgcattggcaggttcggccgcagaggatttctttaacccagttccggaaggcgatctattcaaggcattgagcgacactctgaaactatggaattcgcagccggattgggaaggcgatgagcggaatgtagtgcttaccttgtctcgcatttggtacagcgcagcaaccggcaagatcgcaccgaaggatatcgttgccaactgggcaatggagcgtctgccagatcaacataagcccgtactgcttgaagcccggcaggcttatcttggacaaggagaagattgcttggcctcacgcgcggatcagttggcggcgttcgttcacttcgtgaaacatgaagccactaaattgcttagtgccatgccagtgatgtctaacaattcattcaagccgacgccgcttcgcggcgcggcttaa

SEQ ID NO: 360705 - DNA, 225 bp, Pseudomonas aeruginosa
atgctcaatgcccaggccctggcagagccgatccacttcagcgaggaggtaccgtttctcctgctcgacatgcagtgccgccaggattgccgtgagctgatctggcttcttcagccaggcgaccttggccacgccgaacatctgctttgcgatcttgtcggcgtaactccagggcagcctcatctcggccaactgcgcctcgatgacctggacctcggcgggtag

SEQ ID NO: 360706 - DNA, 531 bp, Pseudomonas aeruginosa
gtgacacaggcactgagcgcggcggccgcgactctgcgcgatccctccctgatcctcgaagacctgatcgaaccgttgctgcgcattcaccaggcgcgcttccgtgcccagcaggctcctgacggcacgccctggacggcactgtcgcctcgctacctggctcgcaagcggagaaacagggacaagatcctgacatccgagggattactgcgagggtcactgcgcggccaggttgaaggggatatcttgttgttcggtaccgatcgcccgtacggtgccatccaccagttcggcggtacgatccagcgtcaggagaagcagagcacggtttacttcaggatgaatgagcgtactggcgaggtcggtcgacagttcgtcccgaaacgccgcagcaacttcgcccaggacgtacgcatcggcccctacacgatcaccatgccagccaggccctggctgggcacgtcggatactgacgatgcccaactgctgcagcgagtcatgagcctcataaactcaaccttgcagaattag

SEQ ID NO: 360707 - DNA, 1053 bp, Pseudomonas aeruginosa
gtggaacgggtcggcctggacgacaacttcttcgaactgggcggtcactcattgttgctgctgatgctcaaggagcggatcggcgatacctgccaggctacgctgagcatcagccaactgatgacccatgccagcgtcgcggaacaggcggcatgcatcgaggggcaggcgcgtgagtcgttgctggtgccgctcaacggcaggcgcgaaggttcgccgctgttcatgttccatccgagtttcggctctgtgcattgttacaagaccctcgccatggcgctgcgggatcgccatccggtcaagggtgttgtctgccgtgccctgctgggcgctggtcgcgaggtgccggagtgggacgatatggttgcggaatacgccgagcaattgctgcaggagcaccccgaaggggctttcaacctggcgggatggtcgctcggcggcaacctggcgatggatgtcgcggcccggctggagcagcgtgggcggcaggtggccttcgtcggctggatcgatgcgccggcaccggtcagggtcgaagcgttctggaacgagatcgggccgacgccggaggcagtcccgaacctatccgtgggcgagatgcgggtggaactgctcggtgtcatgtttccggagcgggccgagcatatcgaacgggcctggtcatcgatctgctccgccacgacggacgatgagcagcgctggacgaggatgagcgactgggcggaagcggagatcggcgccgagttcgcgacactgcgcagcgaaatcgcacagagcaacgaactggaagtgtcctgggagttgaaacagatcctcgacgagcgcctgaaagcgatggattacccgcgtctgacggcgaaggtcagcctctggtgggccgcgcgcagcaccaatgccatccagcggagcgcggtggagcgctcgatggccgaggcgatcggggctgagcgtgtcgaaccggtgcgggtgctggatacccggcacgacaagatcatcgaccaccctgagtttgtgcagagcttccgggccgccctggagcgtgccgggcgctga

SEQ ID NO: 360708 - DNA, 2403 bp, Pseudomonas aeruginosa
atgcgccgtgccttccaacgcaggatgcttccccactcgctcgccatggccctgagcctgccgctggcgggatatgtccaggcgcaggaaatcgagttcgacatccctccccaggcgctgggcagcgcactccaggagttcggccgccaggcggatatccaggtgctgtatcgcccggaagaggtccggaacaagcgtagcagtgcgatcaagggcaagctggagccgaaccaggcgattaccgagctgcttcgtggcaccggcgcatcggtggacttccagggcaatgcgataaccatcagcgtcgccgaggcggcggacagcagcgtcgatctcggcgccaccatgatcacctccaaccagttgggcaccatcaccgaggacagcggctcctatacgccaggcactatcgccacggcgacccgcctggtcctgactccgcgcgagacaccccagtcgatcaccgtggtcacccgccagaacatggacgacttcggcctcaacaatatcgacgacgtcatgcgccatacgccgggcatcaccgtctcggcctacgacactgaccgcaacaactactatgcccgcggcttctcgatcaacaacttccagtacgacgggattccctcgacggcccgcaacgtcggctactccgcgggcaatacgctcagtgacatggccatctacgaccgggtggaagtactcaagggggcgaccggcctgctcaccggtgcggggtccctcggcgccacgatcaacctgatccgcaagaaacctacccatgaattcaagggccatgtcgaactgggcgcgggcagttgggacaattaccgctccgaactggacgtcagcggcccgctgaccgagtccggcaacgtccgcggccgggcggtagccgcctaccaggacaagcactcgttcatggatcactacgagcgcaaaaccagcgtctactacggcatcctcgagttcgatctgaatcccgacaccatgcttaccgtcggcgccgactatcaggacaacgatcccaagggatcgggctggtcgggcagcttcccgctcttcgacagccagggcaaccgcaacgacgtctcccgctccttcaacaacggagccaagtggagcagttgggaacagtacacccgcaccgtcttcgccaacctcgagcacaatttcgccaacggctgggtcggcaaggtgcagctcgatcacaagatcaacggctaccacgcgcccctcggcgcgatcatgggcgactggccggcaccggacaacagcgccaagatcgttgcgcagaagtacaccggcgaaaccaagagcaactcgctggatatctatctcaccggccccttccagttcctcggtcgcgagcacgagctggtggtcggcacctcggcttccttctcccactgggagggcaagagctactggaacctgcgcaactacgacaacaccaccgacgacttcatcaattgggacggcgatataggcaagcccgactggggtaccccatcccagtacatcgatgacaagacccgccagttgggcagctacatgaccgcccgcttcaatgtgaccgatgacctgaacctgttcctaggtggacgcgtggtcgactaccgggtaaccggcctgaatccgaccattcgcgagtccggacgcttcattccctacgtcggcgcggtctacgacctgaacgatacctactccgtctacgccagctataccgacatcttcatgccgcaggacagttggtatcgcgacagcagcaacaaactgctcgaacccgacgaaggccagaactacgagatcggcatcaagggcgaatatctcgacggacgactcaataccagtctcgcctacttcgagattcatgaggaaaaccgcgcggaggaagacgccctctacaacagcaaaccgaccaaccccgccatcacctacgcctacaagggcatcaaggccaagaccaagggctacgaggcggaaatctcgggtgaactggcgccaggctggcaggttcaggctggctatacccacaagatcattcgcgacgacagtggcaagaaggtttccacctgggagcctcaggaccagttgagcctctacaccagctacaagttcaagggcgccctggacaagctcacggtcggcggcggcgcccgctggcagggcaagagctggcagatggtctacaacaatccccgcagccgctgggaaaagttctcccaggaagactactggctggtggacctgatggcccgctaccagatcaccgacaagctgtcggccagtgtcaacgtcaacaacgtcttcgacaagacctactacaccaacatcggtttctacacctcggcatcctatggcgatccacggaacctgatgttcagcactcgctgggacttctga

SEQ ID NO: 360709 - DNA, 1650 bp, Pseudomonas aeruginosa
atgaccaatcccaagcgcggcgccattcgcgaactgctcgccctgctcaggccctttcgagcgatcgtggccgtctccatagcactgggcatggccggcggccttgccatcaccctgctgctggccagcatcaacaacgccttgcactcggaaaacggcctcggccaaggcgtactgctgtcgttcggcggactctgcctgctggcattggtcagttcgatcgtctccgacatcggtaccagctacgtcggccaacacatcatcgcgaagctgcgcaaggaactcggcgagaaagtcctctcggcgcccatcgagcagatcgagcgctaccggacccaccgtctcattccggtactgacacacgacattgacaccatcagcgacttctccttttccttcaccccactggccatagccctgaccatcactttcggctgcctgggttacctcgcctacctatcggtcccgatgttcctgctgacagtcgtcgccatcgtcatcggcacggcagcccagtacctggcgcgctcccgcggtttcaaagggttctatgccgcccgcgatctcgaagacgaattgcagaagcactacaccgccatcgcttcgggcgcgaaggaactgcgcatccaccgcccccgtcgctatcgcatgcacaccggccgcatcagcgaaaccgcgaacaacatccgcgacctccacatcagctccatcaatatattcatcctggccaagaccttcggctcgatgctgttcttcgtggtgatcggtctggcgcttacgctccaggcctactggccttcgtccaatccggccgccatcactggcttcgtgatggtcctgctgtacatgaagggaccactcgaacaggtggtgaccatccttcccatcgtcagccgcgcccaggtcgccttccagcgggtcgccgaactttccgagcgtttttcctctcccgaaccccatcttctgctcagcgaacaggaggccccggacaagaccgtcgacagcctggaactgcgcgacgttcgctacagcccccccgccgtcgaaggcagcgaaccgttccatctgggccctatcaatctgcgtatcgcccaaggtgacatcgtcttcatcgtcggcgagaacggctgcggcaagacgaccctgatcaagctgctgctcggcctctatcgcccgcagtccggcgagatccttctcaacggagaaccggtcagcgcggagacccgcgacgattaccgccagctcttcagcaccatcttcgccgactactacctcttcgacgacctggtccagggcaagcaggcttcgttgcagaacgcgacccaatatctgcaacgcctggaaatcgcccacaaggtcagcgtcatggacggcaacttcagcaccaccgatctctccaccgggcagcgcaagcgccttgcgctgatcaatgcctggctcgaagagcggccggtcctggtcttcgacgaatgggccgcagaccaggacccggctttccgcagggtcttctacaccgaactgttgccggacctgaagcgccagggcaagaccatcatcgtgatcagccacgatgatcgctatttcgaaatggcggaccagttgataaggctctcggcaggcaaggtcgtcaaggaaaccgagacggcgtga

SEQ ID NO: 360710 - DNA, 828 bp, Pseudomonas aeruginosa
atgacgaaaaggaaactggcctatatctggtccctgagaaacgccgcggccgacaaggccggccagtacgtgccgtacaagggcgaacagcggtacatgaagtcggtactggagtccttggtggaggcgctgaaccagactgcgctgggcgatgcctacgagctcgtgggcgtgatctacgacgacgacgcggagctgcctcgcgaccagggaaaaatcaaggactacggtttcgcctatcgtcccgggcagcaatggttctatccggcagagctgcaggtgcaaggcaagaccctgaacgacctcttgctcagcgtgccgtccacctaccgccggtacccgcggggtacccccgagcatgtggccggcaagagcgatttcgagcgacgcctgcatgacaccctggtggagctgggcgccgatgtggtggtattggacgggctcctggtcatcctcgatgagctggtacgcccgggcgctccgttcgcacggcggatcatgaatatccatcctggcgtgacgcgcgaggactcgccttacgagcgtcgtggcgcctatgcgaccctggacgcgttgtatggagcgcggggcgagaaggtggtggattgggcgaccatggaaaaggtcgcggtcgagccgctgtactggaccggagcatcgttccactatgtggacaatggcatcgattccggcgaagtgttccatgatgtgctgaaaacggagatttcacccgacgacaccatcctcgagctgcgctggaacaacttcaacaacagcctgttcccggccttgcacgaagggctggcgctgctcgccgagaagctctga

SEQ ID NO: 360711 - DNA, 855 bp, Pseudomonas aeruginosa
atgcacgcattatcgcccctggccctggccgcactgatcgtcgccaccgcccccgccttcgccgacgaagcgaagaaacccggcacggtgttcaaggattgcaaggactgcccggagatggtcgtactgcccgccggcagtttcaccatgggcaccccggacgacgaggtcggccgccagcccgacgagggcccgctgcacgacgtgaccttcgccaagccgttcgccatcagccgctaccaggtcaccgccggcgaactggacgcctacctgaagaccaccggcgtcaagctggccgacggcgatacccgccccggccgcgaatgcatcgccggcaagccgcgctaccagcaaggccctcgccagccggcggtgtgcgtcgactacaacgacgtgaagaactacgccgcctggctgtcaaagaagaccggcaaacactaccgcatgctcagcgaggccgagcgcgagtacggcgcccgcgccggcagcgccggccccttccccttcccgttcgacgaaggcaaggaatacagcatcgccaagcacgccaacacctacggcgccagcgatggctacaacttcacctcgccggtgggcagcttcccgcccaacgccttcggcgtctacgacatgcacggcaacgtctacgagtgggtcgccgattgctggcacgaccactacaacggcgcgccgagcgacggcagcgcgtggatggaggacaagtgcgagctggtgcagatccgcggcaacgactggggcgagccgccgatcttctcgcgctcgggcaaccgcaacaatgcggcccccagcgaccgcggcgactggatcggcttccgcgtggcgcgcgaactctga

SEQ ID NO: 360712 - DNA, 1284 bp, Pseudomonas aeruginosa
atgaacgaccgtcgtacctttctcaagcaggccggcattctcgccgccggcctgccgctgctttccgctgcccagtcgctccgcgccgaaggcgcaccgagcgacgccggcaataagtggaaagcgctgcgccagcaattcgatctcgacccgcagtatctgcacttcgccaacttcctcctcacctcccaccctcggccggtgcgggaggccatcgagcgcctgcgggtccgcttcgaccgcaacccgggcgaagcggtggactggcatcgcgaggaaatctggaaatacgaggacgaggctcgcgcctgggcaggtcgctacttcgccgtgcaacctggccaggtggcgctcaccggcagcaccaccgacggcctggcggcgatctacggcggcctgctggtgcagccgggcaaggagatcctgacctcctcccacgagcactactccacctacaccaccctggaataccggcacaagcgcatgggtacccaggtccgcgagttcccgctgttcaaggacccgcatcgggtttccgccgacgagatcctgtccagcatcgccgctcagatccgcccgcagacccgggtgctgggcatgacctgggtgcagtcgggcagcggcgtgaagctgccgatccgcgagatcggcaagctggtgcgcgaactcaaccagaagcgcgacgaacaggaccggatcatctacgtggtcgacggcgtgcatggtttcggtgtggaagacgtcagcttcgccgacttcgactgcgactacttcatcgccggcacccacaagtggctgttcggtccgcgtggcaccggggtcatcatcgcccgctcggaacagctccaggagcacttggtgccgagcatcccgaccttctcccgcgccgacaacttcggcaccctgatgacccctggcggctaccacgccttcgaacatcgcctggccctgggcacggccttcgagctgcacctgcagttgggcaaggccgaggtccaggcgcgtatccaccagctcaacgcctacctcaagcagcgcctgggcgagcatcccaaggtccgcctggtcacgccgaccagccccgagctgtcttcgggcttcaccttcttccgcgtcgaaggccgcgattgcgaggcggtcgccaaacacctgatggcgcaccgggtaatcagcgacgccgtggatcgtgatgtcggcccggtggtgcgcctggcgccgagcctgctgaacgacgaggcggagatcgaccgggtgctggaaatcctcgccccgcaactcgcctga

SEQ ID NO: 360713 - DNA, 1347 bp, Pseudomonas aeruginosa
atgactagaacacgcacacgcaaggccctctacctcggcttgccgatcttcctcatcctcgtcggcggcggcctgctggcctggaagaccttcggcccgagcgaagcgggctacccgcgcaaggtcatgaagcacgccgaggagttgcatgagcgcatcctctccttcgatagccggatcaccatcccgccggacttcggcaccgaaggcaacgagttcgacaaggacggaccgaaccagctcgacctggtcaaggcgggccgcgggcgcctgtccggcgctgccctggcgatcttcggctggccggagatgtggaacggcccgaacgcgccacacaagccgaccccgggattcgtcgacgaggctcgtcaccagcaggaaattcgttacaagattctcaccggcatggtccgcgacttccccaaccaggtcggcatcgcctactcccccgaggacttccgccgcctggccatggaaggcaagttcgccatcgtcatgagcatgctcaacgcctacccgctgggcgacgacctgtcccagctggacaaatgggccgcccgcggcgtgcgcatgttcggcttcaattatgtcggcaacaacgactggtccgactcttcccgtcccttgccgttcttcaacgacacggcggatgccctgggcggcctctccccgctaggcaagcaggcggtcgaacggctcaacgatctcggggtgatcatcgacgtctcgcagatgtcgaccaaggccctggaacaggtcgccgccctcagccgcgcgcccatcgtcgcctcgcactccgcgccgcgcgccctggtggacatcaagcgcaacctcagcgaccacgagatgcaactgatcaaggacagcggcggcgtgatccaggtggtcggcttccccgcctacctgcgtccgctgagcaaaccgaccctggacaagctcaacgccctgcgcgcgcgcttcgacctgccacccctggaaggcctggactatgcgctgatgccgggcgatccgatcatcaccatctggccggaacaacgcttcggtgaatacgccagcgccctctacggcatcctggaggaggagcccaaggccggcctcaaggaactggtggacgccatcgactacacggtgaagaaggtcggcatcgaccacgtgggcatcagctcggacttcaacgacggtggcggcgtggacggctggaaggatgtcagcgaaatccgcaacgtcactgccgaactgatcacccgcggttattccgatgccgacatcgccaagctctggggaggcaacttcctgcgcgcctggggcgaagtgcaaaaacgcgccaagccgacagctaccccctga

SEQ ID NO: 360714 - DNA, 1635 bp, Pseudomonas aeruginosa
atgacggtttctcgacgcggattcatggcgggcctggcccttaccggggcggcggcgctgccggtggcttactacacacatcgtcatctgacccgcgaagaggagccgcagacgcctgacgaggcttcgctcgacctggcggctaccgatggcatacgactgggcgaccgcctgcgcggtctctgggatctgcgcctggtaggcggtgatgccgaactgcccgggctgcctcgggagggcttgcaactggtgctggacgtggcacccaagggacgcggcctgattggctacctggatactcctgaacgtctcctcgcggtggagccgccgcgctttcgtgtgcttggcgacttgctcggagccagttctgcaagcatccgctggcgtttggtggaccaggcgagcggttccgtggcaccgactcacgattgctcggcggtgttcgacgaggtctgggcagactatgcgaacgcgggcgacggaactctgagcggacgcatacagcgcctggagcgttcgccgctgtcgccgaacgaggattttcgcttcgttgcggtaaagcgtcacttccccctggcccatgagcgcatcgtgctcaacgagaaacttctcggttggctggtgtcgccgcagcaccgactgttccaccagctatggcacgcttcgcgggacaaatggcatcggctttcggaaaaacaacgcaatgcgttgcgcggagtcggttggcagcccggcccgctggaccgcgaacgcgatgcgcgagggccacgcaaggatcgcaacgcctcgggtatcgacttctttttcatgcaccggcacatgctgcatactgcgcgttccatgcaggacctgccgtcctgggagcgtctgccgcgacctgtggtgccgctggagtacgatcgtcccggcttcatccgttacttcgacaatccggacgggttttccgtgcctccggcctgggtggcagtggatgacgacgagtacagcgagtggctgcatggcctgaaaagcgccgaggcctaccatgccaatttcctggtctgggaatcgcagtaccaggacccggcgtacctggcgaagttgaccctcggccagttcggttcggagctggaactgggcatgcatgactggctgcacatgcgctgggcctcggtgacgagggacccctccaacggcgccccggtcatgaccgaccgttttccggccgattttgccccgcgctggttccgcccggagaacgacttcctcggcgacccgttttcctcccatgtgaatccggtgttctggtcgttccacggctggatcgacgaccgcatcgaggactggtatcgcgcccacgagcgtttccatcctggcgaagtgcagcgccgcgaagtggagggcatccaatggttcgcgcccggtcgatgggtcgaggtcggcgatccctggctgggcccggcgacccatggatgcgggctttcggatgtccaggcgagcagcaactcggtggagctggacgtggaaaccatgaagctggctttgcgcatcatcttcagcgaagaagatcaactgagcggctggctcaagcgtgcgccgcggcggccctggtacgcgcgcaacctgaagctggcgcgcgaccagctcaggcgctga

SEQ ID NO: 360715 - DNA, 1419 bp, Pseudomonas aeruginosa
atgaagaatctttccctgatttccgcctgcctgctgctcggcgcctgcggcagcacgccggcgcccctcgacagcggcctggccgcgccccctcagtggcgctacctggcggccgggcgcagcgatgccagcgacatccgccagtggtggaaggccttcggcgcgccggaactggacagcctgctgcaacgcgccctgctgaacagccaggacctcggcgcagcggtggcccgcgtgcgccaggcccaggcctcagcggtgatcgccggcgcgccgttgctgccggagctgaatgcgacgctcggcgccagccggcagaaactcctgcgcgactcgggctacagcggtaccgacgcgacctccgacaacgatgccgtcgactccttctccgccggcctcagcgccagctacgaagtggacttctggggcggtcgccgggctgcctaccgcagtgccctggaaagcctcaaggccagcgagtacgaccgcgccacggtagagctgaccctgctctccggcgtcgccaacagctacctgcaggtattggcgctgcgcgaacagcagcgcatcgccaggctcaacctggacaacgccgagcacgtcctgcgcctggtggagacccgccatgccgcgggctcggccaccgccctggaggtcgcccagcagagcagcctggtcgccagccagcgcaagcagctgccgctgctcgagcagcaggcccatgaggcgctgattaccctggccaccctgatcggcgagccggtgcaggcgctacaggtggccgagcggcctttcgacagcctgcgctggccggagaccggagcgggcctgccgagcgaactgctcagccgccgtcccgatatcgccaacgccgaagcgcaactggccgcggcccaggccgacgtgcaggtggcgcgcgcggcgctgttccccaagctgaccctgagcgcctcgctgtcgtccggcgccaaccgcgccgccgacactttccgcaacccctattacaacctgggcgccaacctgctcgccccgatcttcaaccacggccgcctgcgcgccgagcgcgaccgcagcctggcgcgccaggaagaactgctggaaacctaccgcaaggcgatcctcaccgcctttgccgacaccgaacgctcgctgaacagcatcgacggcctcgaccgccagttgcactggcagcagcaggagctggagcaggcgcagcgcgccttcgatctctccgacagccgctaccaggccggcgcggaaaccctgctgacggtcctcgaaacgcaacgcacgctgtacgcggcgcaggatgccgccgtgcaactgcgactggcccgcctgcaggcctcggtcggcctgtacaaggccctcggcggcggctggcagagcgaccgccagggtctcgcgcggaaagactga

SEQ ID NO: 360716 - DNA, 1992 bp, Pseudomonas aeruginosa
atggaaaacgccacgcaacccgtccccctgatcgaactgcgcgacatccgcaagcgctacggcggcaatggcactccggaagtcgaggtactcaagggcgtatcgctgtcgatccacgccggcgagttcgtcgccatcgtcggcgcctccggctccggcaagtcgaccctgatgaacatcctcggctgcctcgaccggcccagctccggcagctaccacttcgccggccacgacgtcgccgaactggacagcgacgagcaggcctggctgcgccgcgaggcattcggcttcgtgttccagggctatcacctgatcccctccgcctcggcccaggaaaacgtcgagatgccggcgatctacgccggcaccccggcgagcgagcggcacacccgtgcgcgggccctgctcgaacgcctgggcctggccgagcgcaccgccaaccgtccgcaccagttgtccggcggccagcaacagcgggtgtcgatcgcccgcgcgctgatgaacggcggccatatcatcctcgccgacgaacccaccggcgccctcgacagccacagcggcgcggaagtcatggcgctgctcgacgagctggccagccagggccacgtggtgatcctgatcacccacgaccgcgacgtcgccgcccgcgccaagcgcatcatcgaggtgcgcgacggcgagatcgtcagcgacagcgccaacgacgagcgcccggcgcaaccgagcgccggcgtcgagcgccacctgcaggccgacgatctcagccagcgcctcgccgagggcagcagcgaaccctcgggggcctggcgcgccgaactgctggaggcggtgcgcgccgcctggcgggtgatgtggatcaatcggttccgcaccgcgctgaccctgctcgggatcatcatcggcgtcgcctcggtggtggtcatgctcgccgtcggcgagggcagcaagcgccaggtgatggcgcagatgggcgcgttcggctcgaacatcatctatctcagcggctactcgccgaacccgcgcgcgccgatgggcatcgtcagcagcgacgacgtcgccgccatcgccaccctgccccaggtgaagaaggtcatgccggtgaacggcggcgagctggtggtgcgctacggcaacatcgactaccacgcctacgtcggcggcaacaacaccgacttcccggaaatcctcaactggccggtggccgagggcagctacttcaccgagcgcgacgaagacgccgccaccacggtcgcggtgatcggctacaaggtgcgcaagaagctgttcggcagcgccaacccgatcggccgctacatcctcatcgagaacgtgccgttccaggtcatcggcgtgctcgccgagaaaggctccagctccggcgacaaggatgccgacaaccgcatcgccatcccctactccgctgccagcatccgcctgttcggcacgcgcaaccccgagtacgtgatcatcgccgccgccgacgcccagcgcgtgcaccaggccgaacgcgccatcgaccagttgatgctgcgcctgcaccgcggccagcgcgactacgagctgaccaacaacgcggcgatgatccaggccgaggcgaagacccagaacaccctgtcgctgatgctcggctcgatcgccgcgatctccctgctggtaggcgggatcggcgtgatgaacatcatgctcatgaccgtgcgcgaacgcacccgcgagatcggcatccgcatggccaccggcgcccgccagggcgatatcctccgccagttcctcaccgaggcggcgatgctctcggtggtcggcggcctggccgggatcgccctggccctatgcatcggcggcgtgctgctgctcggccaggtcgcggtggccttttccctgtcggccatcgtcggcgccttcagttgcgcgctggtcaccggactggtgttcggcttcatgccggcgcgcaaggccgcccagctggacccggtggccgccctggccagccaatga

SEQ ID NO: 360717 - DNA, 1176 bp, Pseudomonas aeruginosa
atgagacgaacccgtagtactcgtcgcgcactgctcgtcgcagtctgcctcagccccctgatcgccctcgccgcctggcaggcctatccgttccgcagcaacagcttcgataccgtgagcgtcagccgcggcagcatcgagagcagcgtctcggcgctcggcaccctgcaaccgcggcgctacgtcgacgtcggcgcccaggcctccgggcagatccgcaagttgcacgtcgaggccggggatgatgtgacggaaggccagttgctggtcgagatcgacccctccacccagcaggccaaggtcgatgccggccgctattcgatcgagatgctcaaggcccaactggccgagcaacgtgcccagtacaccctcgcccgccagcagtaccagcgccagcagcggctggctgccggcggcgcgacgcgtaccgaggacgtgcagagcgcccaggcgcagatgctcgccacccaggcgcggatcgagatgtaccaggcgcagatccgccaggcccaggcctcgttgcgcagcgacgaagccgaactcggctatacccgcatctacgcaccgatgtccggcacggtggtggcggtcgatgcgcgcgaaggccagaccctcaatgcccagcagcagaccccgttgatcctgcggatcgccaaattgtcgccgatgaccgtctgggcccaggtttcagaagccgacatcggccgggtcaagcccggcatgccggcctacttcacgaccctcagcggcgaaggccgacgctggaccggcaaggtccggcagatcctcccggtgccgcccaagccgctggaccagagcaaccagggcggcggcagccccaccagcggcagcggcgggcagagcggcagcggccgggtggtgctgtataccgtgctggtcgacgtggacaacggcgaccaccaactgatggcggaaatgaccgcccaggtgttcttcgtcgccgccaccgcggaaaacatcctcaccgcgccggtcgccgccatccacgacgacggcaagggcggccaggtcgcctgggtggtcggcagcaacggcaagccgcagagccgccagatcaggaccggcatcagcgaccgcctgcgggtacaggtgcttgccggcctggaggaaggcgaccgcctgctgatggccgctcccgacggcagcgacagctga

SEQ ID NO: 360718 - DNA, 996 bp, Pseudomonas aeruginosa
atgaagacaccctctcccgccgacagcgacacccttgtgcaggacgccgcgcattggtgcatgcgcctgcacgccgaggacttctccgaggaagagcgtggcgagttccagcgctggctggcagccgatccccggcacgccgccgaatacgcagaaatggaggagatctggtcgctcagcgaactgctgccgcgaacgccggcgcccgagcttcgcaaccacgccgcaacccgcccgttcagccgtcgccgcaggggctggaagagccaggcacgcgccgccgccctcgccctgcttatgttgccgacggccggctacctcggctggctgcaaggctggattccttccaactaccagcgctacgaggccgagggcaacgtcaggcatgccgttcttcccgacggcagcgaggtcgaactggacctcaatacgcagctgagcttcgccaatttcaaggacatccgccgggtttccctggacaggggcgaggcctacttccatgtcacccacgacagcgcgcaccccttcgtggtcaaggccggcaacggctcgatcaccgtcaccggcacccgcttcaacgtctggaagtaccaggacaacgtggtagtcaccgtcaccgagggctcggtgaaggtccgcagcgaaggctcgggcaacgacagcagcctgactcccggcatgcaggccagctactatccgggcctgctgcaaccgttggtcgaagccgtggatacccgccagacgctagcctggcgcgagggccgcctggtactcgacgacctgcccctgtccaaggccctgccgctgatcaaccgctacctcgacgctccgctggtcctgggcgacaggagcgctgcgaaactgcgcattggcgggatctacagcacccgcgacatccgcagcctggtcgacgccctgccgaaagtcctgcccgtggacctggaacatcgcgaggacggcagcatccgcatcagcagccgttacgcccagctctga

SEQ ID NO: 360719 - DNA, 480 bp, Pseudomonas aeruginosa
ttggaaaaccattatcgggagctgctgcgattcctcagtgccaggctcggggatcgacacgcagcggcggatgtcgcccacgacgcgtatttgcgcgttctggagcgctccagtcaagcgcagatcgagcatccgaaggcttttctgtaccggacggcgctcaacctggcggtggacgagcaccgtcgcagccgggtgcgccgggcggaacccctggaggtcctggacgacgaggagggcctggccagtccctcgccgcagacggtggtcgaccaggggcagcgcctggacaacctgcagcgcgcgctggccgagttgccggccatctgccgcagttccttcctgttgcgcaagctggacggcctgtcccattcgcagatcgccgaacatctcaatatttcccgcagcctggtggaaaagcacatcgtcaacgcgatgaagcactgtcgggtgcgcatgcgcgaatgggaagccgactga

SEQ ID NO: 360720 - DNA, 1332 bp, Pseudomonas aeruginosa
atgactcaggcaactgcaaccgccgtggttcacgatctcatcggtgtcggcttcggcccttccaatatcgccctggcgattgccctccaggaacgggcccaggcgcagggcgccctggaagtgctgttcctggacaagcagggcgactaccgctggcacggcaacaccctggtgtcgcagagcgagttgcagatctccttcctcaaggacctggtgtccctgcgcaaccccaccagcccgtattccttcgtcaactacctgcacaagcacgatcgcctggtcgacttcatcaacctgggcaccttctatccctgccggatggagttcaacgactacctgcgctgggtcgccagccacttccaggagcagagccgctacggcgaagaggtcctgcgcatcgagccgatgctgagcgccggccaggtcgaggcgctgcgggtgatctcgcgcaacgccgacggcgaggagctggtgcgcaccacccgcgccctggtggtcagtcccggcggcaccccgcgtatcccgcaggtgttccgtgcgctcaagggcgacggccgagtgttccaccacagccagtacctggaacacatggccaagcagccctgcagcagtggcaagccgatgaagatcgccattatcggcggcgggcagagcgcggcggaggccttcatcgacctcaacgacagctacccgtcggtgcaggccgacatgatcctgcgtgcctcggcgctcaagccggcggacgatagcccgttcgtcaacgaagtgttcgcgccgaagttcaccgatctcatctacagccgcgaacatgccgaacgcgagcgtttgctgcgcgaataccacaacaccaactattcggtggtggataccgacctgatcgagcgcatctacggcgtcttctaccgccagaaagtctccggcatcccgcgccacgccttccgttgcatgaccaccgtggagcgcgcgaccgccaccgcccagggcatcgagctggcgttgcgcgacgcaggtagcggcgagctaagcgtagagacctacgacgcagtgatcctggccaccggctatgagcgccagttgcaccgccaactgctcgaaccgctggcggagtacctcggcgaccacgagatcggccgcgactaccgcctgcagaccgacgagcgctgcaaggtggcgatctacgcgcagggcttcagccaggccagccatggcctcagcgacaccctgctgtcggtgctgccggtgcgtgccgaggaaatctccggctccctgtaccagcacctgaagcccggtactgcggcccgcgccctgcacgagcacgccctggccagctga

SEQ ID NO: 360721 - DNA, 2289 bp, Pseudomonas aeruginosa
atggggatgcgtaccgtactgaccggcctggccggcatgctgttgggttcgatgatgccggtccaggccgatatgccgcggccgaccgggctggccgcggatatccgctggaccgcctatggcgtgccgcacatccgggccaaggatgagcgcggcctgggctatggcatcggctacgcctacgcgcgcgacaacgcctgcctgctggccgaggagatcgtcaccgcgcgcggcgagcgggcgcgctatttcggcagcgagggcaagtcgtcggcggagctggacaacctgccgtccgacatcttctacgcctggctcaaccaacccgaggcgctgcaagccttctggcaggcgcagacgcccgcggtgcgccagttgctcgaaggctacgccgccggtttcaaccgcttcctccgcgaggccgacggcaagaccaccagttgccttggccagccctggctgcgggccatcgcgaccgatgacctgctgcgcctgacccggcgcctgctggtcgaaggcggggtcggccagttcgccgacgcgctggtggccgccgcgccgcccggcacggagaaggtcgccctgagcggcgagcaggcgttccaggtcgccgagcagcggcgccagcgcttccgcctggagcgcggcagcaacgccattgccgttggcagcgaacgttcggcggacggcaagggcatgctcctggccaacccgcacttcccctggaacggcgcgatgcgtttctaccagatgcacctgaccattcccggccggctcgacgtgatgggggcctcgctgcccggcctgccggtggtcaacatcggcttcagccgccacctggcctggacccacacggtggatacctccagccacttcaccctgtatcgcctggcgctggacccgaaggacccgcggcgctacctggtcgacggtcgttcgctgccgctggaggagaagtccgtcgcgatcgaggtgcgcggcgccgacggcaagctgtcgcgcgtcgagcacaaggtctaccagtcgatctacggcccgctggtggtctggcccggcaagctggactggaaccgcagcgaggcctatgcgctgcgtgacgccaacctggagaacacccgggtactgcaacagtggtactcgatcaaccaggccagcgacgtcgccgacctgcgccggcgcgtcgaggcgctacaggggatcccctgggtcaacaccctggccgcggacgagcagggcaacgccctgtacatgaaccagtcggtggtgccctacctgaagccggaactgattcccgcctgcgccattccgcaactggtcgccgaaggcctgccggccctccaggggcaggacagccgctgtgcctggagccgcgacccggccgcagcccaggctggcatcaccccggcggcgcaactgccggtgctgttgcgcagggacttcgtgcagaactccaacgacagcgcctggctgaccaacccggcgagcccgttgcagggcttttcgcccctggtcagccaggagaaacccatcggtccgcgggcgcgctacgccctgagccggctacagggcaagcagccgctggaggcgaagacgctcgaggaaatggtcaccgccaaccatgtcttcagcgccgaccaggtgctgccggacctgctccgcctgtgccgcgacaaccagggcgagaattcccttgcccgtgcctgcgcggccctggcgcagtgggaccgtggcgccaacctcgacagcggcagcggcttcgtctacttccagcgcttcatgcaacgcttcgccgaactcgacggcgcgtggaaggaaccgttcgatgcgcaacgtcccctggatacgccgcaaggcatcgccctcgaccggccgcaggtggcggcccaggtgcgccaggcgctggcggacgcggcggcggaggtggagaagagcgggattcccgacggcgcgcgctggggcgacctgcaagtgagcacccgtggccaggaacgcatcgcgattcccggcggcgatggccatttcggggtctacaacgcgatccagagcatccgcaagggcgaccacctggaggtggtcggcggcaccagctacatccagctggtgaccttccccgaggaagggcccaaggctcgcgggttgctggctttctcccagtccagcgatccgcgctcgccgcactaccgcgaccagaccgagctgttttcccgccagcaatggcagaccttgccgttcagcgacaggcagatcgacgccgacccgcaactgcaacggctaagcattcgcgaatga

SEQ ID NO: 360722 - DNA, 324 bp, Pseudomonas aeruginosa
atgacccattcgcccgtcaaacagatgttgaaggaggccggcctgaagatgagcctggcccggctgaaagtgatcgatgcgctctgggaagcctcgggggagcagggtcgggtgccgatccgcaccctgcaccggcgtctctccgaaaccggtaccccgctgtccctggtgagcatccgccaggtcctcgggcgcctggtggaaagcggcctggtgaccctcgacgaacaggatgtctacagccccggcaaggcttcctggggcggtgccgccggttccgcggcgcccgagcgccgcgccgcggccaacgagcagcggctctga

SEQ ID NO: 360723 - DNA, 921 bp, Pseudomonas aeruginosa
atgctcaatcccgacgatttccgttttccttccatcgaagcgttgcaggcgttcgaagcggctgcccggctgggtaccttcgagcgcgccgccgaactcctgtcgatcaccggcagcgccgccagcaagcgggtttccggtctcgaggggatgctcggggtgagcctgttgcagcgcgacggccgctcgctggcgctgacctcccacggccgcgagtacctcgaacagatcgcgccgatcctcgcccagctcgcggcggttccgctgcatcgtcgccaggtccagcgccagcagcggctgaccctgcgcacgccgccgaccttcgcccggcagatcctgattccgcgcctggcgtccttcgccgaggcctgtccggaaatcgaactggagattctcctgtcgagtccttcggacggccaggacctgccgctggccgacgtcgaggtgcgcggcgacagccatggcgtggcggccggcgagcggctgctggaggagcgcgtgctgccgatggccgcgccggggctcctgctcggcctgccgcggccctggacgccagccatgctcgccggcctgccgttgctgcgctcgccgctggaaccctggcagccgtggttccgcgtggccgggctggactggccggagccctgcgccgggccgcgcctgctcgatttgggcatgaccctggaagccgccgccaacggccagggcgtggccctcgcgcgaccctcgctggcgcgcgcctggcttgccgaggggcggctggtggtgctgttcccgctgcgttcggcgccgacccaccattaccacctgcgcagccaccaggcctcgccggccagccagcgtttcgctgcctggctggcggcgatctgccgcgaggcggtggtccagggcagggaattccttccggcggcggacgactga

SEQ ID NO: 360724 - DNA, 1152 bp, Pseudomonas aeruginosa
atgagcgtcatcaccgatatcgaagacctgcgccgcctggcgcgcaagcgcgtgccgcggatgttctacgactacgccgactccggttcctggagcgaaggcacctaccgcgccaaccaggacgacttcgccgcgatcaagctgcgccagcgggtcgcgcggaatatcgagaaccgctcgctgcgcacccgcatgctcggccaggagatggccatgccggtggccatcgcgcccaccgggctggccggcatgcagcatgccgacggcgagatcctcgccgcccgcgccgccgccgagttcggcgtgcgctacaccctgtcgaccatgagcatctgttccctggaggacatcgccacggaagtcggccagccgttctggttccagctctacgtgatgcgcgaccgcgatttcatcgaacgcctgatcgaccgcgccaaggccgccggctgcgacgcgctggtgctgaccctcgacctgcagatcatcggccagcgccacaaggacctgaagaacggtctctcggcgccgccgcggccgaccctggccaacctgctgaacatcgccaccaagccgcgctgggcgctgggcatgctcggcacccggcgtcgcggtttcggcaacatagtcgggcacgtcaagggcgtcgacgacatgggctcgctgtccgagtggaccgcccgccagttcgacccgcggctgaactggggcgacgtcgaatggatcaagcgccgctggggcggcaagctggtgctcaagggcatcctcgatgccgaggatgcgcggctggccgccgactccggcgccgatgcgctggtcgtcagcaaccatggcggacgccaactggacggtgcgccctcgaccatcagcgcgctgccggcgatcgtcgaggcggtgggcgagcgcatcgaggtctggctcgacagcggcatccgttccgggcaggacgtgctcaaggccatcgccctcggtgcgcgcgggaccatgatcggccgtccctatctctatgggctgggcgcgctggggcaggccggagtgacgcgggcgctggagatcatcgctcgtgagctggacctgaccatggccttctgcggccataccgacatccgcgaggtcggccgggacatcctgttgccgggaagctacccgcgatag

SEQ ID NO: 360725 - DNA, 243 bp, Pseudomonas aeruginosa
atgaaccacactgcatcgatccccgccctgcccacggcctatgacctgctgaacacccgcatccagcgcatcatccacgccccggctgcgcaacaggcctgtcaggcctgcatttcccgattgcccggcgaagacgagggcgactgggcccacctgctggaaagcttcgaccgttccaaccagtggctgctcgacccgcagcgcgacggcagcatcgtcctgcgctggagttccgccgcctga

SEQ ID NO: 360726 - DNA, 237 bp, Pseudomonas aeruginosa; identical to SEQ ID NO: 321205

SEQ ID NO: 360727 - DNA, 471 bp, Pseudomonas aeruginosa; identical to SEQ ID NO: 335087

SEQ ID NO: 360728 - DNA, 2316 bp, Pseudomonas aeruginosa
atgaagcgctcgttccccgacgatctgatcatcggcaatctcagccgccgcggtttcctcaagggcgtcggcgccaccggcgtgctgctggtggctgccaactggggctggcgcgacgccctggccgccgagaagaaggccttcggcgccgacgccatgccccacggctgggtggataacccgaagatctacgtgagcatcgaccgggacggcacggtcggcatcgtctgcaaccgctcggaaatgggccagggcgtgcgcaccagcctggcgatggtggtggccgacgagctggaggccgactggagccgggtcaaggtgatccaggcgcccggcgacgaagcgcgctacggcaaccaggacaccgatggctcgcgcagcatgcgccattggttcgaacccatgcgccgctgcggtgcggcggcgcgacagatgctcgaacaggccgcggccaaccagtggaaggttccgctgggcgagtgccgcgccgaacagaacaaggtgctgcatgcgcccagcggccgttcgctgtccttcggcgaactggccgaggccgccgcgggcctcgaagtgccggcgcgcgacaagctgctgctgaagaagcccgagcagttccgctacatcggcaaggacgtggcgcgcgccatcgacggcgccgatatcgtcaatggccgcgccggcttcggcttcgacgcgcgcttcgacgacatgctctacgccgtggtcgcccggccgccggtctacggcggcaagctcaagcgctacgacgccgccgcggcgctgaaggtgccgggggtggtcaaggtgatcgagatcgagggccggccgatcccgtccgagttccagccgctgggcggggtcgccgtggtggcgcagaacacctgggcggcgatcaaggggcgcgaggcgctggtggtcgagtgggacgccggggtcaacggcggctacgactcggtggcctaccgcaagcaactggaagaggccgcgcgcaagccgggcaaggtggtgcgcgacagcggcgatgccgcggcgctgttcgccaagggcggggatgtcgtcgaggccgagtactacctgccgcacctggcccaggcgccgatggaaccgccggtatccaccgcctggtacaaggacggcgcctgcgaggtctgggccccaacccaggcgccgcaagtgacccgcgagcgcatcgccgagcgcctgaaactgccgttcgacaaggtcacggtcaacgtgaccctgctcggcggcggtttcggccgcaagtccaagcccgacttcgtgctggaagcggcgatcctggccaaggcgttccccggtcgctacctgcgcgtgcagtggacccgcgaggacgacctgcatttctcctatttccacacggtctcggtggagcgcctgcaggccgtgctcggcgccgacgggctgccgcaggcctggctgcatcgctcggtggcgccgagcatcaccgcactgttcggcccggacagcaagcaccagggcgccttcgaactgggcatgggcctgaccaacctgccgttcgccatccccaacgtgcgcctggagaaccccgaggccccggcgcacacccgggtcggctggttccgctcggtctccaacatcccccacgccttcgccatccagagcttcgtcggcgaactggcggcgaaggccggccaggacccgaaggactacctgctcaagctgctcggcccggcgcggcgaatcgacaccgccgaactcggcgacagctggaactacggcgagtcgccggagcgctacccgctggatgtcggccgcctgcgcggggtgatcgaggaggcggcgcgccagtccggctggggcggcgagctgcccaggggcagggcgcggggaatcgccgcgcactacagcttcgtcacctacgtggcggtggtgatcgaggtggaggtgaaggacgacggcgcgctgctggtgcacaaggccaccatcgccgccgactgcggtccgcagatcaaccccgagcgcatccgttcgcagctcgaaggcgcctgcgtgatgggcctgggcctggcggcgctgggcgagatcagcttcaaggatggcaaggtccagcaggacaatttccaccagtacgagctggcgcgcatgccgctggcgcccaaggcggtgtcggtgcatctgctcaagccggatggcgacctgccgctgggcggggtcggcgagcccggcgtgccgccgatagcgccggcgctgtgcaacgcgatcttcgccgccaccggcaagcgcatccgcgagttgccgatccgcaatcagttgcaggggtggcggaaggcctag

SEQ ID NO: 360729 - DNA, 1206 bp, Pseudomonas aeruginosa
atgatcgacagggtgaagccgctgatggcggcatgggttctggtcttcgcatcttcttcgttcgccggcgaaacggcgggaaaattgccacgaaagccagctctagggccggaaaccgcgggggcgaccctggtcattcccggcgagaccgacaggctcgcctcgctctacgcccgcgcacggggcgaaggcggcaagatggtgctctgggccggcggcgacgcgccgaaccagatggactggttgaagacggccttcgagagccgctttcccggcgtgaccctggacgtcacggtggacctctccaagttccacgacctgcgcatcgaccaggaactcgccgccggcaccctgacgccggacgtggcgatgctgcaaaccaccttcgatttcgacaaatggaaggcccgcgacgtgctgctgcgctacaagccggtcggcttcgcccggcagaagaaaggctacgccgatcccgacggcgcctatgtcacggcctacaacaacgccttcgtgccgacctacgcttccgtccggctgccagcggagcgctatccgatgcgcttcgccgattacctgaagccggccttcaagggcaagctggtgctgacctatccccatgacgacgatgcggtgctgtacgtctacgacaagctggaacggcgctacggcagcggtttcctgcgcgccctggcggcgcagaaaccgaacttcctgcgcggcacggcggcgccggcggcctcggtgggcaccgactccatcggttcgctgggcaacctgaccggctatgcgaccgacagcgatacgccggccggctacttcatcccgaccgacgagccgttcatcgtctggaaccagcgcgcggcgatcttcaaggccgcccgtcatccggccacggccaagctgctgctgtcctacctgggctcggccgagttccagtccagctacggcggctggcgcgcccgcgccgacgtcggcgaagcgcctgggctgccaccactggagtcgctgaagaacgtcgatgtgcacgatttcacccgctggatggccgatcgccaacgggtggccagcctgcgcaggcacatggcggaaatcttcggcccggtacgcggcgagtcgccgttgcgcgacccggcgctgatgagcctgctggggctgacggcgaacgacatcgtcgccttgcccgaaccggacctgccgatctactga

SEQ ID NO: 360730 - DNA, 642 bp, Pseudomonas aeruginosa
atgcctagcacaagaagcctccccgcacgggtcatcgtcgccgatgactatcccctgttccgcgatggcctgagacgggtcgtccgccgctacctcccgcaagccgccgtaagcgaagcgggcagcttcgacgaggtgctgcgcctggcttcgagcgtctcgccggaacctcccgccctcttcctcctcgacctgctgcttcccggcttcgccgcctcccagtccatcgagcgcttgcgccgcgcctatcggcacagcgcaatcgtcatcgtctcgatgctcgacgacccgcgcctggtggacgaggtgctggccgccggcgccgacggctacctcggcaaatccctggaggccggggagatcggcacggcgttgcagacgctcggcagcggcgaaccggtggtgcgcctgcgcggcgggtcgagcgccggcagtcggcaacgcgccctcctggacgccctgaccccacggcagcaagcggtactgcggctgatcgccgatggcctgtcgaacaaggaaatcggccgcgcgctgtcgatctcgccgttcaccgtgcgcgtgcacgtttcctcgctgctgcgcgccctggaagtgaacacgcggacggccgccgcggcgctggcggtgaaggccggcttctag

SEQ ID NO: 360731 - DNA, 396 bp, Pseudomonas aeruginosa
atgggctgcccgcaggtctgcgccggcgccaccctgcaatgcagcttcggggcggcgccgacggtgctcaacgtgttgccgcagaaccgcaccctgaccagcgggatgccggcggcgaacatcatggaccacatcccgctgctgaacattcccaccttcggcctctgccagagtccggccaaccccgtggtggccgccgccaccgccgccaccctcggcgtactgacgccgatgccgtgcattcccgccaccgccagcccgtggatccccggcggtccgccgaccctgctgctgggcgggatgcccgcgctggacgccaacggcacgctgatctgcacctggggcggggtgatcaagatcagcgtgccgggacaggtgcagatgctgattccctga

SEQ ID NO: 360732 - DNA, 537 bp, Pseudomonas aeruginosa
atggcggcatccggcaagctcgacctggttcgtggcgacagccatctcgctggtaacctgctcgacggcagcctggaaggtccgttgcgcatcgacgagcacgacaggccgcaggccagcctcggctaccggcagggccagttgcacggcgccagcaccctgttccatcccaacggcaaggtctccgcgcaactcgccttcgtcgacggcaagctgcacgggccggtcagtttccatgccgcggaaggctggttgcagcgcaaggcgcactaccgcaacgggctgctccacggcgaagcgctcacctatttcgccaacggccaggtggccgagcgcgagcattaccgcgacggcgtgcgcgacggggtctaccagcgcttccatggcaatggccaactggccttcgacggacgctacctgaacggccagctactggacggcgcccagccgttcgccgatgacggccggccgctggacagcgagggcagacccatggcgcgctggcgctggtggtggatcaggctggcggagccctag

SEQ ID NO: 360733 - DNA, 2007 bp, Pseudomonas aeruginosa
atgccccgtcccaccgacaccaataccaccctctccctcagcgcctccaccctgggtgatctttacccccagacgctttccgggggcgaggcgttgaacgagctgggcagcctgacgctcggcggctacagcgccaccgcgctgacgttgagcaatgcggtggccacccatctcaccgccaccctgcacaacgacgccgaccagcgtccgctcgacggcctggtcgcggagatccgccaactccccggcgatgccagcgccgagcgctaccaggtgctgttgcgcccctggctctggtggctgacgctggccagcaacaaccgggtgttccagaacctggccaccagcgacatcgtcacccaggtcttcgaccagcacggcttcagcgactaccagttgcagctcagcggcagctaccagccccgcgaatactgcgtgcagtacggcgagagcgacctcgccttcgtctcgcggctgctggaggaagacggcatcttctggttcttcacccatgccgccggcaagcacaccctggtgctggccgacagcaacgacgccttcccgccgattcccaacggcccgcaagtggcctacctgggccaaggaatcggcgtgcgcgagttgcagggcgtgcgttcggcgcagtacagcctccaggcggtatccgggacctacagcgccaccgactacgagttcaccaccccgggcacctcgctgtactcccaggccgaggcggtttccggcgccgccggcgtctaccagcaccccggcggctacaccgccaaggcccagggcgacagcctgaccaagcaacgcatcgacggcctgcgcagccaggagacgcgcctgatcggcgagagcgactgccgctggctggtgcccggccactggttcaccctcagcgggcatgacgacgattcgctgaatatcgactgggtgctgacctcggtcacccatgacgccagtcacgcgcactaccgcaaccgcttcgaggcgatccccaaggccaccgcctaccgccccgcgcgggtcacgcccaagccacgcatgcacacccagaccgccctggtggtgggcaaggccggcgaggagatctggaccgaccagtacggccggatcaagatccagttcccctgggaccgcgacggcaagaacgacgagacctcctcctgctgggtgcgcgtggtgctgccctggagcggcaagggcttcggcatgcagttcgtgccgcgcatcggccaggaagtgatcgtcaccttcatcgacggcgacccggaccgcccgctggtcaccggctgcgtctacaacggcgacaacgccctgccctacgcgctgccggacaaccagacgcagtccgggatcaagaccaactcgtcgaagggcggcggcggtttcaacgagctgcgcttcgaggacaagaaggacgccgaggaagtcttcctccaggcgcagaaggacctcaacgtcaacgtgctcaacgacagcaccgccagcatcggccacgacgagaccctgacggtgcagaacgcccgcacccgcacggtgaaggaaggcgacgagaccgtcaccctggagaaaggcaagcgcacggtgaccatccagaccggcagcgacagtctggaggtgaaggacacgcgcacggtgacggtgggcgccgaccagacccacagcaccggcggcaactacagccacaaggtcagcggcaacttcgagctgacggtggacggcaacctgaccatcaaggtcagcggcaccctcgccctgcagagcggcggcagcctgaccctgaagagcgacgccgacctcactgcccaggctggcacctcgctgaccagcaaggccgggacgtcgctgaccaaccaggccggcacctccctcaccaacaaggccggcaccagcctgaccaacgatgccggcgtcagcctgaccaacaaggccggcgccgaacagacggtggacggcggcggcatgctgaccatcaagggcggcctggtaaaggtcaactga

SEQ ID NO: 360734 - DNA, 426 bp, Pseudomonas aeruginosa
atgtccggagccctgccgccgctgttcgagcgcctcagcgccgaggccgacgaacgtcccgcgttcgacgaccgggcgctggccgagtcggtccgcggcgagctgctgcgcctgctcaacacacggcgcccggcgcatgcgcgcagcggcatcctcgcctacgggctcgccgactggaccgccgtgcaacgcctgcgcgccgaggaccggcgccagctggcacgcgaggtgcgggcggcggtcgagcatttcgagccgcgcctgcaactggccgaggtcgaggtcgaacctgacccgggcaatccgcagcgcctgcgtatccagctcggtggccgcctgcgcagcgggtcgcgcctgatgcctgcgctattcgtcatcgaacagggcaacgatggcctcgaggtgcgccatgagcgattcgattga

SEQ ID NO: 360735 - DNA, 498 bp, Pseudomonas aeruginosa
atggatgcgatcattctcgatttcggcagcgacatcaaaggcgacagcctgctcgtcggctacgaaaacaagatcgaaatcatgtcctacagccacaacgtggcgatgcaggtcaccaacgacgtcagcaactcggagcgcacctccggcaaaccccacgtcggcgaattcaccctcaccaagttcatcgacacctcgaccccgaccctcaacgaatactgctgcgccggcaagccgatcgccgaggcgaccatcaccatcggccgcaacgccgccgagggcaacgggcagatcatgcccttcatcgtctacaccctgaacaacgtggtgctctccaacgtcagcgtcagcggcggcgccggcggcaagccggtggagaccctgtcgctgaacttcaccaagatcaagtgggagctgaccgcgcagaaggacgacggcaccaaggaaggcacggccgcctcgacctgggacctggccgccaaccagctggtcaagtga

SEQ ID NO: 360736 - DNA, 1485 bp, Pseudomonas aeruginosa
atgcccaagtcatccgccgccgaacaatccggcgagagttcgacccagaccctgtccctgctcgacgagatcattgccaagggccgcatggcccacgacgacagccagcaggactacgcccgcgacatgctcgcggaattcgccacccaggtcctcgacgagggcatggccgtcgacaaggacaccgtggcgatgatcaacgaccgcatcagccagatcgatgcgctgatcagcgaccagctcaaccagatcatccaccaccccgagttgcagaagctggaagcctcctggcgtggcctgcaccaactggtgagcaacaccgagaccagcgcgcggctcaagctgcgcctgctgaacgtcggcaagaacgaactgcagaacgatctggagaaggcggtcgagttcgaccagagcgcactgttcaagaagatctacgaagaggagtacggcaccttcggcggacaccccttcagcctgctgatcggtgacttcaccttcggccgccatccgcaggacatcggcctgctggagaagctgtcgaacgtcgccgcggctgcccacgcgccgttcatcgccgccgccagcccacgcctgttcgacatgaacagcttcaccgaactggccgtgccgcgcgacctgaccaagatcttcgagagcctggagctgatcaagtggcgcgccttccgcgagagcgaggattcgcgctacgtgtccctggtgctgccgaacttcctcctgcgcctgccctacggcccggagacgcgaccggtggaaggcatgaactatgtcgaggacgtcaacggcaccgaccactccaagtacctctggggcaacgccgcctgggtcctggcgcagcgcatcaccgaggccttcgccaagtacggctggtgcgcggcgatccgcggcgcggaaggcggcggcgcggtcgagggcctgccggcgcacacgttccgcaccagctccggcgacctgtcgctgaagtgcccgaccgaggtggcgatcaccgaccgccgcgagaaggaactcaacgatctcggcttcatttccctgtgccacaagaagaacagcgacgtggcggtgttcttcggcggccagaccaccaacaaggccaggctctacaacaccaacgaggccaacgccaacgcgcgcctgtcggcgatgctgccgtacgtgctggcggcatcgcgcttcgcccactacctgaaggtgatcatgcgcgacaaggtcggcagcttcatgacccgcgacaacgtgcagacctacctgaacaactggatcgccgactacgtgctgatcaacgacaacgcaccgcaggaaatcaaggcgcagtacccgctgcgcgaggcgcgggtggatgtcagcgaggtggccggcaaaccgggggcctaccgcgccacggtgttcctccggccgcacttccagctcgaggaactcagcgcgtcgatccgcctggtcgccaacctgccgccgccggtagcggcgtga

SEQ ID NO: 360737 - DNA, 546 bp, Pseudomonas aeruginosa
atggccgagagtacgcagcacaagctggaccgggtgcgcccgccgcgcgtgcagatcacctacgacgtcgagatcggcaacgccatcgagaagaaggaactgcccctggtggtcggcatcctcgccgacctctccggcaagccggataccccgccggcgaagctggtcgaacggcgtttcgtcgacatcgaccgcgacaacttcaacgagatcctctcctccatctctccccgcgccaccctgcaggtcgacaacaccatcagcggcgacgacagcaagctgaacgtcgagttgcgcttcaaccacatcgaggacttcgacccggtcaacctggtgaagcaggtggtcccgttgcgtcgcctgttcgaagcgcgccagcgcctgcgcgacctgctgaccaagctcgacggcaacgacgacctcgaccagctgctgcaggacgtggtggccaacaccgaaggcctgcaggaaatcaaagcggcccgcccggaagccgaagcggccccggccggtgacagcgaacccccggccgaccagccggcctga

SEQ ID NO: 360738 - DNA, 477 bp, Pseudomonas aeruginosa
atgaagcacggatgtttcaccatatgtcggaaattctccctggggctggcgatcctggcgctggccggctgctcgtatttcttcgcgccgcgggtcgagttgcagcggctgaccctggatgtcgccgcgcgcgccaacgacgactcgccgatcgccgtggacttcgtcgcggtgaaggatgcggagctgttcaaggaactggccggactgccagccagccagtggttcgccaatcgtgagcagtaccgccgcgactaccggcagcagttcgcggtatggagcctggagctggtcccagggcagttcatcgagtcggagtccttccccttgcgcggcgaccgcgcaactggacttttggtcttcgccggctataacacacccggcgcgcaccgcttgcgcctcgaccagcagcagcgtgtctggctgcgtctggatacccgggaaatgcgactggtcaacgatcccgccacgcgttag

SEQ ID NO: 360739 - DNA, 1332 bp, Pseudomonas aeruginosa
atgagtgttctgcctgacgcggtgtgctggcacgaagggatgcaactgcttccccagcatttccagttgcagggattgcgtgccgaggcgctggcggcgcgcaccggacaggcctgcaacccttggttctggggcgtgaccgccctggaactggacccctcggcgttatgcgccggccaggtgcgggtcctgcacctcgaagcgatcctgcccgacggcctgccggtgagcgtgcaggctggtgtcgacgcaccgctggagttcgacctggagactgcgctggcggccgccgaagggccgctgctgaacgtccacctggcggtcagtccgctgtggcgggcgggtcagttgctgccgctgaagggccgtctgcaatcgcgggtcggcgcgccgctgccggacctggccagcggcgagcaccccgagccgatcaccgtctggcgagcgtcgctgcggctggtcggcgacgacggcaaggccgactccgtgtgcctgccgttgctgcgcgtggcgaaggagggcggcgcctatgtcagcctgccctacgtcccgccgacgccattggtgctgccggagtcgcccctgggcaggcgcgtgcagtcgctctgcgcgtgggcccgggagaaggcgctgttcctcggcgggcgcctgcgcctggcgcagcaggcgggtaaccaggacgacgccgtggaagtccgtcgccagctcgccgcgctctggacccgcctgccggaggtggaaggcctgctggcaagccgcgcggcctcgccgctggccctgcacggcagcctgctgggcctggccggggcctgggcggcgctcgatccgctggccggcgtgccggccttcgaagcgctcgacttcctcgacctgcggcgtggctacgagccgctgctggactggctggagcgcgccatcgagtcgatccgcgcgggctaccgctgcctgccgttcgagcaggaggaacaggtgttttccgtgcgcctgcccgatccggcgccgcgccagcgcctggtggtcggcctgcggatgcccgccggcgccggcgaacaagcggcggctgactggctggagcgcgccatcgtcgcctccgacccgcacctgccgttgctcgcccggcaacgcatgagcgggctggcgcggcagccgatgaatcgccaggaacaggtggcctacagcgtcggcgacgacacccgtttgttcgtcgtgcagggcgccggcgactggttcgatgccggccagccgctgcgcatcgtcgcgccggtcagcggggtcgccagcagtccctggcagatcgtgctgttcgtcgccgacggcagcgacaacacctag

SEQ ID NO: 360740 - DNA, 3816 bp, Pseudomonas aeruginosa
atgagcggcgcgacgctgttcatgctggttctcctcctggtgctgctggcgctgctgctgggggcgctgggctggtggtggcggacccggggcggtacggagatccgcagcttctacgcggcggtccggcagatggagcgcgagcagggctggcagggccgctacgaagcgccgtggctgctgatgctaggcaacgagaccgagggcgagcagttgtgcgccacctggcgcctgctgccggtggcgcgtccggcctggttcggccgctggtggtcggacggcgagggggcgatcctgctggtgcccgagtcggtgttcctgcccgacgagggcctgcgccggcaaagcggcgcctggctgcgcctgttgcgtctgttcctgcgcctgcgcggcaggcgcgcgctggacggagtggtctggaacattccgctggcgcggctgcaggatggcgagcaggcggccaacctcggcctcgccgcccgtcgtcgctacgtggaactgacccagcgccttggcctgagcctgccggtttacgtggtgatcactggcctggaagacctgccgggtttccaggagcttctcgcggcgctgcccgaggaggcgcgcgagcgcgccctcggctggtcctcgccgttcgccgccgaggcggcctggcagtcgcgctggtgcgagcaggcgctggaggaaatcaccgccaccctgaccgagtcgatcgtcgaactcggtaccttgcgcggccaggtgaacaacgacctgtattgcctgccgccacgcctggaaagcctccgcggttcgttgcaggcgctgctcgaaccggtcttccagggcaacgccaggggcgaggcgccgcgctttcgcggtctctacctgagcggcagcgaggcggcgggggcggcaagcgacgaagccctgccggcggtcgacgcgccgcgtcggcgcagcagcttcgccagccaactgtgggcacggcggatccttgccgaggaaggcctggcccaggcggtgccgcgcatcctccagctgcgccagcgctggcaacgcggtatcggcctcgctgcgctgtgcctgtgcctgctctggggcggcctgatgacctgggtctggcgtgacgcgctgcgcgacgccggcgaactgtcgcaactgctgcatggcgccagcgagcgctaccagccgctcgacgacgacacccggcgcgccgcccaggtccggcagaacgtccaggcctggtggcaactggtggcacaggcgccgcgctggcgcttcacctcgctggcattccccagttcctggttttcctccctggacgcacgcatcgacagcgcgtatcgccgcgtttccgagcgcctgctggtacgcccgctgcgcagcctgctggaaggcgaggcgagcgacctgcgggcgatccgcagcgacggccagcccggcctgaaggagggcgacgaccccagccagtggaaggactacctggcggcgaaggacctggtcgcccgcgccaccaccctggagcgccacaatcgcctgttcgcccaggccatcgacaaccgcaagacgccgctcgacgatctcctgcaactgagcaacgacgccctgggcagcaactacaacggcggcagcctggcgcgcctggcctattacaaccgcacgctgttcgccgagcgtccggccgatctcgccgccctcgacctgggccgggtcggcgccacggcggcggataacttccatgacctgatggcccgctggctgaacgcctacttcctcaccgacagcctggaacgcaccggcaatgccctgacccaggaactcacgcagctcggccaggaacgagatgccacggcggcccagttgctgggggtcggcgaattgatcaaccacctgcagcagcaggtcaaccgcatcaacctgatctggggcaatggcgtcggccaggatctcgtccctggctaccagaacctgctcaagagcgcccagcaaagcagcctgctgggagaccgcgtggaggaactgcagaacctcacggtgcagttgcagcagcagttccgcagcgaatggatcgcgcctccggaggctgccggcgacggcctgctggtgaagcagggggcgacgctcaagctggccgatgacctgctcggcctgaaacgcgccatcgatgacctgaagaccaaggacttcgtctccgtggccctggccggcaagacgctggcggagcactccctgctgagcatcgacgacatcggcgtgacccaggcgttgagcttcttcaacgacttcagcggctactacgagagcaccctgccgtcgctcaacccgcgctatcgctactcggtcctgcacgccgccgccagcgcgacgaccgaggccatgtggcagagcctcgggccgcgcagtcgcagcctgaccagccgcaatgcctcgcgcttcgacgtgcaggtcaagcaggtccaggcattgcaggcggcgctgctggagttgcaggacatgcaggccggctcgcgcctgctggccagcctcaacgcgctggccgtggccgatatcggccaggccctgcgcgacatcgacgagcaggcggtgctgcgcgagccggtcgatttcagccgttggtcgggcgcgccgaatttcggcctgcaggcgttccgcgcccaggacagcgccgagctgaagcagagcctgaccagccagttcaatgccatggccgcggtcgccgagcgccacgccccggcgctggagtggctgcaggcgcagcagtccagcctggccaccgccgactacaacgcgttcgtgcgcttcagcgcgctcaacgccgaactgcagaaattcaaggccgacaacccggcgagcactgcggcgcagctggcgaagctggtgggtaacgatttcaaccagatggacatcggcagttgcgccgacattctcaacggcgtgctcctgccgtccagccgcagcgacctggcgacgcgcctggtggacctgcgccagggcgcgctcgggcgctgccagtcgttgcaacagcagcaggcggcgcaggcctggaaggacctcgccgactacttcaaccagtacctcgccggacgcttccccttcgcctacagcctggaagcggccgatgccgagccggggcgggtgcggcacctgctgaagctgatggagacgcgcttgccgcaggtgcgcgaagggctggcccaggttcgctcgccggacctgccggccgccgaggacttcgtccgccgcctggaacaggcgcagggctggctcggcccgctgttcgagcgcgacaagtcgggcctgctcggcgtcgccctggacatcgactggcgcagcgaccgcagcctggaacgcggcgccgaccaggtgatcgcctggagcctgtactcgggcgaccaggaaagccggttccccggcgcgcaggacaagggcctgacctggaacgtcggcgatccgctgaagatcatgctgcgctgggcgaagaacggctcgcagcgtccggcagacgacccgcgccaggccagcctggcggtggccgacctcgaggccggctggagctaccagggctcctgggcgctgctacgcatgatgcgcgcgcacttctcccggcagcgcccgccgaacgtcgactacacggagtttccgctggtcctgcaactgccggtgtatgcgccctacagcccggaaaacgaggctcggatgttcctccgcctgtcgttgatgagcctgggcggcaagaccccgctgtccatccagccgctgccggtgcgcgcgccgcaatcgccgttcgcgacgctgttgccggccaccgtcgccagcaacggaggtaccccatga

SEQ ID NO: 360741 - DNA, 1101 bp, Pseudomonas aeruginosa
atgaccctgcctctttccggcaacgccctgcccctggaagtgctgctcgaaccgatcgaccccggacagccgtgtggccccagcctgcgctacgacccggactacgaccgcctgcgcgagttgcgccgggaggacgacagcagcctgccgaccggcgtctggcaggcggaagccaagcgcgccgactgggccgcggtggagcagttggccagcgaactgttgcagcggcgcagcaaggacctgatgctcgccgcctggctcggcgaggcctggctgcaacgcggcgggctgggcggattgcagcgcgcgctggtgctgctggcggaactctgcgagcgctaccccgaggaggtgcatccgcaagcccaggacggcgatcagtcgtggcgggtgccgcccatcgactggctgttgcgccgctatgccgagctgctgcacacgcgcctgccgctgatggggcagggcgccttcgccgagatcaccctctatgcctggcagaggttgcagcgccagcaggtcgccagcggcgacagcaagagcgccaaggcggcgctggaagcggcgcaacttcagcagaagaagctcgacgaagcgttgcgcgcggagcccctggtgcaatggcagcgcaagcaggccagcctgctcgcctgccagcagcaactgcaacgcctggaacagtggtgcgaccgctgcctaggcgaactcgcccccagttgccagccgctgcgcgaggtcatcgcgcaatggctggccttgctcaaggagttcatcgccatgcacccgcaagcgccgctgcccgaagaacagccaccggtcgcggaggcggacgccgccgaaggcgacgcggacggcgaggaaagcgtcccggcgagcgcgccgagcgggccggctggcgcgccgaccagtcgcgaggacgcctatcggcaactgctgctgatcgccgactacctggcgcgcaccgagccgcacagcccggttccctacctgatcaagcgcgcggtggaatggggcaacaagccgctgagcgagctgctggcggagctgatcaatgcggactcggaggcgcgccgggtctggtcgctgcttggcgtactgccctaa

SEQ ID NO: 360742 - DNA, 1086 bp, Pseudomonas aeruginosa
atgtccgtcatcacccatccccacgcccgcgagctgaccaaatcggtgcgcgccaccgtgctggtgttcaacgacccccgttcccgcgagctgctggagcgcatcgagcgcctggcgcccagcgaggccaacgcgctggtcatcggcgagaccggcaccggtaaggagctggtggcgcgccatatccatgccctcagcggacgcagcggcggcccgttcgtcgcggtcaactgcggtgccttcgccgagagcctggtggagagcgagctgttcggccacgagaagggcgcctttaccggtgcgttgcagagcaaggccggctggttcgaggcggccaacggcggcaccttgttcctcgacgagatcggcgacctgccgccgagcatccaggtcaagctgctgcgcgtgctgcaggagcgcgaggtggtgcggctcggttcgcgccggccgatccccatcgacgtgcggctggtggcggcgaccaacgtcgacctggccgacgcggtggtcgccgggcacttccgcgaggacctgttctaccgcctgcacgtggcgaccatccaactgccgccgttgcgcgagcgccgcggcgatatcctgccgctggccgagtacttcatcgtcgagcactgccggcgcctcggctacaccagcgcgagcctgagcccggaagccgagcgcaagctgctcgggcattcctgggcgggcaatatccgcgagctggagaacgccatccaccacgcgctgctggtctgccgcaaccgcctgatccagccggccgacctgcacctcatcgacatgcgtgcgcgccaggagccgagcggcttgcgccgcgcccccgagagcgccgccggctcggcgctggaagcggcgctgcaggcactgttcgaggaaaaccgcgaggatctctacgagcacatcgaggaaaccgtgttccgcgccgcctatcgcttctgccacggcaaccagttgcagaccggacgcctgctggggatcagccgcaacatcgtgcgcgcccgcctggagaagatcggcgagctggaaacctcgccacgacacaacgtggtctcgctggtgggcaagtga

SEQ ID NO: 360743 - DNA, 267 bp, Pseudomonas aeruginosa
atgccgtactgttcgccggaacaactcgccgacctcggcccgctgctggattgcctgcgccgctggccgcgcatccgcgagccgcggccgggggtgttctacctgggcgaccagccgttctgccagttccattcgcgcaatggccagcgctgggccgacgtcaagcgccgcaaggggcgcctgccgccgttcgtcctgccgccgggcgaccagtattcggcgcgggcattccagatattcctgctccaggcctacaagctgaactga

SEQ ID NO: 360744 - DNA, 561 bp, Pseudomonas aeruginosa
atgaccagccccttcaaagtcgtcgccgtctccggcggcacctatcgcccgtcccgcaccctggtactcacccaggccctgatcgccgagcttggccagtcgctgccgatcgacagccgagtcatcgagctgaccgacatcgccgcgccgctgggcgctaccctggcgcgcaaccaggcgccggcggaactgcaggcggtgctcgacgagatcgaaagcgccgacctgctgctggtcgcctcgccggtctaccgtggctcctatccgggcctgctcaagcacctgttcgacctgatcgacctcaacgccttgatcgacaccccggtgctgctcgccgccactggcggcaccgagcgccacgcgctggtcctcgaccaccagttgcgcccgctgttcagcttcttccaggcgatcaccctgcccatcggggtctacgccagcgaggccgacttcgacaactaccggatcgtcagcgagccgctgaaggcgcgcatccgcctcgccgccgagcgcgccgcgccgctgttcggcggacgctccgaactgttgaagatcgcctga

SEQ ID NO: 360745 - DNA, 1146 bp, Pseudomonas aeruginosa
atgaacgtgttctggttcctcccgacccacggcgatggccacttcctcggcaccagccagggcgcgcggccggtctcgctgccttacctgaaacaggtggcacaggcggccgatagcctcggctaccacggcgtgctgatccccaccggacgctcctgcgaggactcctgggtggtggcctcggcgctggcgccgctgaccgagcgcctgcgcttcctggtggcgatccgtccgggaatcgtttcgccgaccgtctcggcgcggatggcggcgaccctcgaccgcctgtccggcgggcgcctgctgatcaacgtggtcaccggcggcgatcccgacgagaaccgcggcgacggcatccacctcggccacgccgagcgctatgaggtcaccgacgagttccttcgggtctggcggcgcgtcctgcagggcgaggcggtggacttccacggcaagcacatccacgtggagaacgccaaggcgctctatccgccgctgcaacggccgtatccgccactgtacttcggcggctcctcggaggccgcccacgaactggccggcgaacaggtggacgtctacctgacctggggcgagccgttgccggcggtggcggcgaagatcgccgacgtgcgccagcgggcggctcgccatgggcgtacggtgaagttcggcatccgcctgcatgtgatcgtccgcgaaaccgccgaagaggcctggcgcgccgcggacaggctgatcgagcacatctccgacgagaccatcgccgccgcgcagcagtccttcgcccgtttcgactccgaaggccagcgacgcatggccgcgctgcacggcggccgccgcgatcgcctggagatccagccgaacctctgggccggggtcggcctggtgcgcggcggcgccggcaccgcgctggtcggcgatccgcggcaggtggcggagcggatcggggagtacgccgagcttggcatcgacagcttcatcttctccggctatccgcacctggaagaggcctaccgcttcgccgaactggtcttcccgctgctgcccgaaccctacgccagcctggccggccgtgggctgaccaacctgaccgggccgttcggcgaaatgatcgccaacgacgtgctgccggttcgcgccggcgcttga

SEQ ID NO: 360746 - DNA, 1185 bp, Pseudomonas aeruginosa
gtgaatgcgaagacccgccccgaggcgcaaacgccgttgcagattgcccggcgcctggccgccgatttcgccgagaacgccgccgagcgcgacgtcgccggcggcaccccgaaggccgagcgcgacgcgttgcgccgcagcggcctgttgtcgctgatcattccgcgcgaatacggcggcctgggggcgagctggagcgaaaccctgcaaaccgtgcgcgaactggcccgggtcgacagctcgatcgcccacgtctacggcttccagcacctgatgctggccaccgtgcgcctgttctcgcggcccgagcaatggcagccatggttcgagctgaccgcgcgcaaccgctggttctggggcaacgcgctgaacccgctggacaaccgtaccgtggcccggcgcttcgacggctggcgcgagttctccgggaagaagagcttctgctccggcgcccgcgattcggagatgctcatcgcctcggcgctggacggcgagggcgggccgctgctgatcgccgccatccccaccgcgcgcagcggtatcagcctgggccaggattgggacaacatgggccagcggcagaccgacagcggcagcgcgatcttcgagcgggtgcgggtggaggagagcgagttgctgctcgatcccgggccgctgagcacgccgttcgcctgcctgcggccgctgatcgcccagttgatcttcaccgaggtgttcctcggcatcgccgaaggcgccttcgaggaggctcgccagtacaccctgcgcgaagcgcgaccgtggttccgctccgaggtcgccgaggccaatgccgacccctatgtgctggcgcgctacggcgaattctgggtcggcctggaaagcacccgggcgctggtcgagcgcgccgcgcaacgccttgacgccgcctggtccgagggcccggcgctggacgccagcgagcgcggccagttggccctggccatcgccgccgccaaggtcgccgcgacgcgcaacggcctcgacctgtgcaaccgcatgttcgaagtcaccggcgcccgctccactcacgccgccctgcgcctggaccgctactggcgcaacctgcgcacccagaccctgcacgacccgctggactacaagatccgcgagctgggcgactgggcgctgaaccagtcaccgccgcaaccgaccttctactcatga

SEQ ID NO: 360747 - DNA, 1131 bp, Pseudomonas aeruginosa
atgaacgcttctacccatactcccgaccggctgctgacgctgccacgttcgccgaacctggcgacctcgatccgcgccaccgcccaggtcttcgaggacccgaagtcccaggccctgctcgaacacctgcgccaggtggcgccgagcgaggccagcgtgctggtgatcggcgagaccggcaccggcaaggaactggtggcgcggcatatccacaacctcagcgcgcggcgcaacggcccgttcgtggcggtcaactgcggggccttctccgagtcactggtggaagccgagctgttcggccacgagaagggcgccttcactggcgccctggcggccaaggccggctggttcgaggaagccaacggcggcaccctgttcctcgacgagatcggcgacctgccgatgccgatccaggtcaagctgctgcgtgtgttgcaggagcgcgaggtggtgcgcctgggttcgcgcaagagcatccccatcgacgtgcgcgtgctggcggcgaccaacgtgcaactggagcgggcgatcaacgccgggcacttccgcgaggacctgtactaccggctcaatgtcgtcagcctggagctgtcgccgttgcgcgagcgacccggcgacatcctgccgctgacccgccacttcatcgccgagtacagccgtcgcctgggctacggccagagccagttgagcccggaggcggcgcagaagttgcgcgcctattcctggccggggaacatccgcgagctggagaacgtcatccaccataccttgctgatctgccgcgacgggctgatccgcgcggatgacctgcacctgtccaacctgcgcctggagcgtggcgaggagctggcgcgcggggtcccggcgagcggcgccgccgagcacttgttgcagcaggctttccagcggctgttcgaagagcagggcgagaacctccatgggcgggtcgaggatgccctgctgcgcgcggcgtaccgtttctgccatggcaaccaggtgcataccgccaacctgctgggactcagccgcaacgtcacgcgcacgcggctgatcgccatcggcgagctggtggtgaacaagcgcggtggccagcggatcgatggcgagcgggcggtgcggttgtcgatctga

SEQ ID NO: 360748 - DNA, 1155 bp, Pseudomonas aeruginosa
atgcccgatacctctcccgatctgccggccatgtcgccgctcgccgcctatcgtcaggccgtggaacagcgcggtttcgctcccgacgaggcgcagcggcgcgccgccgaggcgctggagcgttgtttccaggccctgcacgagccgcaccgccacggcgcgatccagggcgtctacctgtggggaccggtaggacgcggcaagacctggctgatggatcacttctaccagtgcctgcgcgtgcccgcgcggcgccagcacttccaccacttcatgcaatgggtgcaccagcgccagttcgaactgaccggtacagccgacccgttgcgcgccctggcccgcgagttggcgcgggacgtgcgggtgctgtgcttcgacgagctgttcgtcagcgatatcggcgacgccatcctgctcggcagcctgctgcgcatcatgttcgaggagggcgtggtgctggtcgccacttccaaccagccgccggagcagttgtacgccgacggcttcaaccgcgaacgcttcctcccggcgatcgaggcgatccagcggcacatggcggtggtcgcggtggatggcggccaggaccaccgcctgcatcccggccgggccgagcaacgctactgggtggtggaggcggggcaggcgggcggtttcgccgaactcttcgcgcgcctgagcgccggcgaagtggtgtccgcgcagcccatcgagctggggcaccgcccgctggcggtgcgccggcacagcgagtcggtgctctggtgcagctatgcgcagctctgcgaggtaccgctgtcggcgctggacttcatcggcctttgcgaccgctaccgggcgatcctgatggacgacctgccgtgcctgagcgccagccagcgcgaaggccgcatagcccgtggcaccgaggacggcgcgcaactggtggaggcgggggatcgcgaattgccgcagttgtcggtgcacgacgacggcgtgcggcgcttcatcgccctggtggacgaatgctacgaccgcaaggtgccgctctacctggaggccagggtgccgttggaggcactttataccgagggctacctggccttcgccttccgtcgcaccctcagccggctgcgcgagatgcagctggcacgcttcggcagcgacagcgccggctag

SEQ ID NO: 360749 - DNA, 1128 bp, Pseudomonas aeruginosa
atgcggcaaagattctggcaaggaacattcaagaccctgggcctcctcggcctgacggcggggctcgccgcccaggccgcggagccgtccggcaaggccctcagcgccgccgccggcgtgccctggccggcggtcatcgcccaccgcggcgcctcgtacgacgcccccgaggaaaccgccgcggcctacctgctggcccgcgacctcggcgccgactacctggaagccgacgtgcagcgcagccgcgacggcgtgctggtcgccctccacgacgacaccctggagcgcaccaccgacgtcgccgaggtcttcccggggcgcgccaaggacccggtgagcagcttcaccctcgccgaactcaagcgcctggacgccggctcctggttcaatcgcgccttccccgagcgcgcccggcccggcttcgtcggcctgcgcatcctcaccctcgacgagatgctcgatatcgccgagggcggcgccaacaagccgggcctgtacctggagaccaaggtaccggcgcaattccccggcatcgaagacgacctgcgcaagctgctggaacgccgcggctggctgcaaccccgcgagcgtgccgccgccgggcatgtcgacgtggcccacggcaatggccgggtgatcctgcagaccttcgagaagagcagcctggaactgctgcaggaaagcatgccgcaagtgccgaagattctcctgctgtggctcggcgacggctacctggaagcccgctcgccagtgactttcaaggaatccggggaaaccgacaaggcagccttctacgccaggcaggaagtgaagtccgaagccgagttcggcgcctggctggactgggccaaggcccacggcgcgctgggcaccgggccctcggcgaccctcagcgaacgcggcgaacagagctatgccgacctggtgaaaccctggatgaaccgcatgacccacgcgcgcgggctgttcatccatgcctactcggtggactcggcggaagacttcaaggccctaggcgcggccggcgtcgacggtttcttcaccaaccgcacctcggaactgctgaagttccagggccgcccggcggcgcaagacatggacgcgctgctgcgccggcacggctattga

SEQ ID NO: 360750 - DNA, 654 bp, Pseudomonas aeruginosa
atgtcgcccatgcttgaacggctctggcaaggtttcctcgatacgctgctgatgatcggcgcgtcctccgccatcgtcctgctggtgggtatcccgctggccctggtactggtcaccaccgggccgggcgggatcttcgaggcgcgcctgctcaatcgcatcctgggcggcctggtcaacgtgctgcgttcggtgccgttcctgatcctgatggtggcgctgattccctttacccggatgatcgtcggcaccagctatggggtctgggccgcggtggtgccgctgaccatcgccgccacgccgttcttcgcgcggatcgccgaggtcagcctgcgcgaagtcgaccacggcctggtggaggcggcccaggcgatgggctgcgaacgccgccacatcatctgcaacgtactgttgccggaggcgcgaccgggcatcgtcggcggcttcaccatcaccctggtgaccatgatcaactcctcggccatggccggcgcgatcggtgccggcggcctgggggacctggcctaccgctacggctaccagcgcttcgacacccaggtgatgctcaccgtgatcatcgtccttgtgctgctggtcacgttgatccagttcggcggcgaccgcctggcccgcctgctgaacaaacgcctgtag

SEQ ID NO: 360751 - DNA, 1101 bp, Pseudomonas aeruginosa
atgaccgttcccccgagcctgctgcccctcgaaccgttcccgacggcgcccgacacgcgcgcctccacgccgcacatccgcctccacggcctgggcaagcgctaccccggcggggtccaggccctgcgggagatcgacctggagatccgccgcggcgaagtgttcggcatcatcggccgcagcggcgccggcaagtcctcgctgatccgcacccttaatcgcctggagcgtcccagcgaggggcaggtgctgatcgacgacgaagacatcggcggctacgacggccagcgcctggtcgccctgcgccgacgcatcggcatgatcttccagcacttcaacctgatgtcggccaagaccgtgcggcagaacatcgccctgccgctgcgggtggccggggtgccccgggcacggatcgaggagcgggtcgccgggctgctgcaactggtcggcctggaggaaaaacgcgacgcctatccggcacagctctccggcggacagaaacagcgcgtcggcatcgcccgcgcgctggtgcaccagccgcagatcctgctctgcgacgaagccacctcggcgctggacccggagagcacccaggcgatcctcgcgctgctgcgcgacatcaaccgccggctgggcctgaccatcgtcctgatcacccacgagatggcggtcatccgcgagatctgcgaccgcgtggtggtcctcgaatgcggccgcatcgtcgaacagggcgaagtctgggaagtcttcggcgatccgcgccatgccgtcacccgaagcctgctcggcagcctgcgcgccgccctcccggccgacctccaggcgcggctgcgccaggctcccggcgccggcgacccggtgctgctcgatctccagtacaccggcgccagccgacgggtgccggacctgctggccatcgccagggccatcggccagcgcgtcgacctgctccacggcggcatagagcggatccagggccgcgccctggggcgcctgctgctacaggtcggcgcgccgcccggcgaactgcccggcgtgctggcgaaggccgcgctggtggcggacaaggtggaggtgctcggccatgtcgcccatgcttga

SEQ ID NO: 360752 - DNA, 795 bp, Pseudomonas aeruginosa
atgctgaacaccctgaaaaccctgagcctggccgtcctcctcggcagcggcccggtccaggccgccgacgccccgctgaagatcggcaccaccgccgccttcgccccgccgctggaagtcgccgtgagcgaagccggcaagcaggggttgaaggtcgaactggtcgagttcagcgactggaacgcccccaacatcaccctcgcccagggcgacatcgacgccaactacttccagcacgtgcccttcctggaaaacgccaaccgcgaaggcggcttccggctgaagccgttcgcgccggggatcatcaacaacgtcgggctctattcgaagcgctacgccagcctcgcagagttgccggaaggcgccagcgtggccatcgccaacgacccgatcaatggcggccgcggcctgcaactgctacagaaggccggcctgctgaagctcagggacggcgtcggctacaaggcgaccctcgacgatatcgtcgacaacccgaaggacatccgcatcaccgagctggaggcggtgcaactggcgcgcgccctcgacgatttcgacctggcccagggctacccgcactacctgcgcctggccgggaccatcgacccgacccgggcgctgctgttcgacgggatcgacaaccgggaatacgtgatccagttcgtcacccgcggcgactaccaggaccgcgacggccgcctggcgcgcttcgtcgacatctaccagcattcgccggtggtccgcgccgcgctggacaaggcccatggcacgctgtaccagccgggctgggagtga

SEQ ID NO: 360753 - DNA, 1389 bp, Pseudomonas aeruginosa
atgagcaagaagcagattctcctaaacgccttcagcatgaattgcgtcggccatatcaaccacggcctctggacccacccacgcgaccgctccagcgactaccgcaaactgcgccactggaccgagctggcccggctgctggagcgcggcctgttcgacggcctgttcatcgccgatatcctcggcgtctacgacgtctaccagggcggcatcgaggtgaccgcccgcgaagccgtccagttgccggtgaacgacccgctgatgctggtctcggccatggccggggtcaccgagcacctgggtttcggcgtcaccgccaacctcacctacgaggcgccctacccgttcgcccggcggctctcgaccctcgaccacctgagcgacgggcggatcggctggaacatcgtcaccggctacctggaaagcgcggccaaggccatgggccagtccgcgcagatcgagcacgaccgccgctacgaccgcgccgacgagtacctggaggtcctctacaagctctgggagggcagctgggaagacgacgcggtgctcgccgaccgccagcgacgggtctacgcgcggccggagaagatccacaagatccgccaccatggcgagttctaccaggtcgagggctaccacctcgccgagccctctccacagcgcaccccggtgctgttccaggccggctcctcggagcgtggcctggccttcgccgcgcgccacgccgaatgcgtgttcgtctccggacagacccgcgaggccacccgccaactggtgcagcgcatccgcgcggcggtggtcggcgccggccgtcgcgccgaggacatcaggatcttcatgggcatcaacgtgatcgtcgccgccaccgcggccgaggcccgcgacaagcatgccgagtaccgccgctacgccagccccgaggccggcctggcgcacttcgccagctccagcggcatcgacctgtcgcgctacgggctcgacgaaccgatccgctacgagaagaacaacgccatcgagtcggtggtgaagaacctcaccgtggcgcgcaccgactccaccgtgcgcaagctcctcgatcagttggccctgggcggccgctacgtgaccctggtaggcgacccgcgccaggtcgccgacgatctcgaaggctggatcgccgataccggcctggacggcttcaacctgacccgcaccgtggagccggagagctacgccgacttcatcgacctggtggtgcccgagttgcaggcacgcggcagctacaagaccgcctacgcccccggcaccctgcgggagaagctcttcggcggcggccgcgcgcgcctgcaggcggaacacgccggcgccgccttccgccagcccccggccgcgcaccagcgccaggcctga

SEQ ID NO: 360754 - DNA, 1236 bp, Pseudomonas aeruginosa
atgcagagcgctaacgcttcagaactcaccaccgacatcgccgtgatcggcggcggcgcggccggcatcggcgtgatcgccagcctgctgaaacgttcgccggggttgcgtatcagcctgatcgagccggcggacacccactactaccaaccgggctggaccctggtcggtggcggcgcctacgcccagggcgacaccgcgcggccgatggccgggctggtcccggccggcgtggagtggctgcgcacccgtgtcgagcgggtcgaccccgaggcgcgccggctactgctggagagcggcggcagcctggaataccgcaacctgatcgtctgccccggcctgcgcctggcctgggagcgcatcgagggcctggaggagaccctcgggcgcaacggcgtcacctccaactaccgctacgacctggcgccctatacctgggagctggtgcgcggcctgcgcggcggcaaggcgctgttcacccagccggcgatgccgatcaagtgcgccggggcgccgcagaaggccatgtacctgtcctgcgaccactggctgcgggagggcgtgctgcaagacatcgaggtcgagttcgacctggccggcgcggcgttgttcggtgtcgccgatttcgttccgccgctgatggaatacgtgcgcaagtattcggccgagctggcgttcaattccaacctggtgaaggtcgacggcgcggcgcgcaaggcctggttcgaggtgaaggacgccgacggcaacaccaatctggcggaaaaggacttcgacctgctgcacgtggtgccgccgcaactgccgccgaccttcgtcgccgccagcggcctgggcgacgcggccggctggtgcgaagtcgacccggagaccctgcaacatgtccgccatggcgagatcttcgccctcggcgatgtctgcggcaccgccaacgcgaagaccgcggcggcggcgcgcaagcagatcgtggtggtggccgagaaccttctcggcctgcgcagcggccgtggcctgccgctgcgctacgacggttacggcggttgcccgctgaccgtcgagcgcggccgggtggtgctggcggagttcggctacgccggcaagctgctgccgaccttcccgctggagcccaccgcggccagccgcttcgcctggctgctcaagcgccacgtactgccctgggtgtactggaacgccatgctcaagggccgggagtggctggcgcggccggggcgctag

SEQ ID NO: 360755 - DNA, 933 bp, Pseudomonas aeruginosa
atgtacctggtgtgtggcgaggcccttttcgatgtcttcagcctggaaagcgctgcgcgcagcaacgagctgggcttcaccgcgatcgccggcggctcgccgttcaacgtcgccgtcggcctgcgccggctgggcgtggaggcggcgctgttcggcgggctgtccagcgactacctgggcgcgcggctgcgccgggtgctcgaagaagaaggcgtggactgcggcttcctggtgcccagcgacgccccgaccaccctggcgatggtcggcctcgacgccagcggctcggcgcaataccagttccgcggcgagggctgcgccgaccgccaggtgcgcctggaacacctgccgacgctggatgggcggatacgcgggctgcacgtcggctcctacaccctggtggtgacgccggtggccgacaccctgctggcgctggtccggcgcgagagcggccggcgcctggtcagcctggaccccaacgtgcgcctcgacccgcagccggacatcgacctctggcggcgccgggtcgaggccttcgccagtcatgcgcacctgatcaaggccagcgaggaagacctggccctgctctaccccgaccgcgatcccggcgaggtggcccgcggctggctgaacccgcgctgccggctggtcttcgtcacccacggcggcgccggcgccagcgtgcactgcgcccacggcagctggagtcgcccggcggataccgccctggcgctgcgcgatacggtcggcgccggcgataccttccaggcggcgaccctcgcctacctccgccgcctcgacgccgacagcccggccaggctagccgcgctgtcgcgggaagcgatcgacgcgatgctcgccttcgccatccgcgcggcggcggtcacctgctcgcgggtggggccggacctgccgttcgcccacgagctttga

SEQ ID NO: 360756 - DNA, 1491 bp, Pseudomonas aeruginosa
atgcacggattgttcctcggcatcgattgcggcacccaaggcagcaaggcgctgctgctcgacgccggcagcggctgcacgctgggcctgggcagcgccgcgcagcgcccgccggaaggccgcgacggacgccgcgagcaggacccggcggactggctggaagccatggccagcgcggtacgcatggccctggaagaagccgcggtggacggccgcgaggtccgcgccctggcggtttccgcccagcagcatgggctgctcctgctcgacgccgagggccgggcgctgcgcccggccaagctctggtgcgacaccgagagcgcggcggagaaccgcgagctgctggaagccctcggcggcccggccggctcgctggaacgcctggggctggtgctcgcgccgggctacacgctgtccaagctgctctggagcaggcgccgctttcccgagctgttcgcccgcgtcgcgcacatcctcctgccccacgactacctcaaccactggctcaccggccgcgtctgcagcgaagcgggcgacgcctccggtagcggctacttcgacgtgcgccggcgcacctgggccagcgacgtgctggagctggtcgagccgggcggacgcctggcggcggcgctgccggagctgatcgagcccggcgcctgcatcggcaacctgcgccccgaagcggccgccgccctcggcctggctccccacacgcgggtcgccggcggcggcggcgacaacatgctcgccgccatcggcaccggcaacatccgccccggcctgctcaccgccagcctgggcacctccggcaccctgagcgcctatgccgagcggccgctggtcagtccgcacggcgagctggcgaccttctgcgcctcgtccggcggttggctgccgctggcctgcacgatgaacctcaccggcgcctgcggcctggtacaggacctgctgcacctcgacctcgacgaattctcccggctggccgcccaggcgccggtaggcgccgagggtctgctgatgctgccgttcttcgacggcgagcgggttccggcgctaccgcacgccagcgccagcctgcatggcatgaccgcggccaacctgagccgcgccaatctttgccgggcggtgctcgaaggcaccgccttcggcctgcgctacggcctcgacctgctgcgcgccagcggcctgccgggcgaggaaatccgcctggtcggcggcgcggcgaagagcccgctgtggcggcggacgctcgccgacctgctcggcctgccgctggtctgtccacggcagaccgaggccgccgcccttggcgcggcgctccaggcggcctggagcctgggccgcgaaagcggcgccggtgaaagcctggaagccctgtgccggcgctgcgtggcgctcgacgaggcgacccgcacccagccccaggcgcgacgacaggcagcctacgaacaggcctaccggcgttacctggagcacctgcctccgcgataa

SEQ ID NO: 360757 - DNA, 834 bp, Pseudomonas aeruginosa
atgctgacactcaagcaatcccgccgcctgcgcaacggcctgctcggcctgctctgctggggcatcgccctgctgctgttcttcccgatcttctggatgctgctgaccagcttcaagagcgagatcgacgccttcgccacgccgccgcagttcatcttccagccgaccctggagaactacctgcacatcaacgagcgcagcgactacttcgcctatgcctggaactcgctgctgatctcctcctcggcgaccctcctgtgcatgctcgtcgcggtgccggcggcctactccatggccttcttcgagacccgccgcaccaggcgcacgctgctctggatgctgtcgaccaagatgcttccgccggtcggcgtactgatgccgatctacctgctggccaagcagttcggcctgctcgattcgcggctggcgctgatcatcgtctacaccctgatcaacctgccgatcgtggtctggatggtgtacacctacttcaaggacatccccgtggacatcctcgaagcggcgcgcctggacggcgccggcacctggcaggagatcgtccgcgtactgctgccgatcgcccgcggcgggctcgcctcgaccctgctgctgtcgctgatcctgtgttggaacgaggccttctggtcgctcaacctgacctcctcggccgccgccccgctgaccgccctggtcgcctcctattccagccccgaaggactgttctgggccaagctctcggccgtctccaccctcgcctgcgcgccgatcctggtcttcggctggatcagccagaagcagctggtacgcggcctttccttcggcgccgtgaaatga

SEQ ID NO: 360758 - DNA, 933 bp, Pseudomonas aeruginosa
atgaacacctcggccctcgataccccgctcccggcccgtcccgcccaccgtcgcctccagcgccgccggcgcggacccggctggctcctggtcagcccctcggtggcgctgctgctgttgtggatgatcgtgcccctgggcatgaccctgtatttctcgctgatccgctacaacctgctgtatcccggcgagaatgccttcgtcggcctggagaacttcaccttcttcgtcaccgacgccggcttcctgcccggcgcgctgaacaccctgctgctggtgggcagcgtgctggcgatcagcgtggcgttcggcgtgctcatcgccgcgctgctggaggccggcgagttcttcggtcgcggcgcggtgcgggtgttgctgatctcgccgttcttcatcatgccgacggtgagcgcgctgctctggaagaacctgatcttccacccggtctcgggcatcctcgccgccgtctggcgcctgttcggcgccgagccggtggattggctggcgcactatccgctgctgtcgatcatcctcatcgtctcctggcaatggctgcccttcgccatcctcatcctgatgaccgccatgcagtccctcgaccaggagcagaaggaggctgcccgcctcgacggcgccggtccgctggcgatcttctggcacctgaccctgccgcacctggcgcggcccatcgcggtggtgctgatgatcgagacgatcttcctgctctcggtgttcgccgagatcttcaccaccaccagcggcggccccggctacgaatcgaccaacctcgcctacctgatctacaaccaggcgctgctgcagttcgatgtcggcatggcctcggccgggggcctgatcgcggtgctgatcgccaatatcgccgccatcgtgctggtgcggatgatcggcaagaaccttaccgagcgcagctga

SEQ ID NO: 360759 - DNA, 1311 bp, Pseudomonas aeruginosa
atgaacgactcgatcaaggcctgcctggccgccgcctgcctcgccctgccgctgctggcccagggcgccgagaccctgaccatcgccacggtcaacaacaacgacatgatccgcatgcagcgcctgtccaaggtgttcgaggaaagccacccggacatcgcgctgaaatgggtggtgctcgaagagaacgtcctgcgccagcgcctgaccaccgacatcgccacccagggcggacagttcgacctgctcaccatcggcatgtacgaagccgcgctgtggggcgccaagggctggctggagccgatgagcgggctgcccgccgactacgccctggacgacctgttgccctcggtgcgcgacggtctctccgtcaagggcacgctgtacgccctgccgttctacgccgaagcctcgatcacctactaccgcaaggacctgttccagcaggccgggctgcggatgcccgagcaaccgacctggacccagctcggcgagttcgccgccaggctcaaccgcccggaccagggccagtacggcatctgcctgcgcggcaaggccggctggggcgagaacatggcgttgatcggcaccctggccaacgccttcggcgcacgctggttcgacgagcgatggcagcccgaattcagcggcggcgaatggaagaaggcactggccttctatgtctccaccctcaagcggtacggcccgcccggcgcctccagcaacggtttcaacgagaatctggcgctgttcaacagcggcaagtgcgcgatctgggtggacgccagcgtcgccggttcgttcgtcaccgacaagagccagagcaaggtcgccgacgccaccggcttcgccttcgccccccgggaagtcaccgacaagggcgcctcctggctgtattcctgggccctggcgattcccgccagctcgcgcgccaaggacgcggcgaaggccttcgccacctgggccacctcgcaggcgtacggcaagctggtggcggacagggaaggcgtggccaacgtgccgcccggcacccgcgcctcgacctacagcgaggcctacctggccgccgcgccgttcgcgcgggtcaccctggaatcgctgaagcgcgtcgatcccaaccatccgacgctgaagccggtgccctacgtcggcatccagttggtcaccatccccgagttccaggccatcggcacccaggtcggcaagctgttctccgccgccctcaccgggcagatgagcagcgaccaggcgctcgccgccgcgcagcagagcaccgcccgcgagatgaagcgcgccggctatccgaagtag

SEQ ID NO: 360760 - DNA, 906 bp, Pseudomonas aeruginosa
atgcccagagccagcaaagtcaccgatccgtcctacgagctgatggacgaccacgaaggccattcgctgatctaccgccagcacggcttccccagcccgctggtgcgctggcacttccacaaggaatacgaactgcacctgatcgtcgccagctccggcaaggtattcatcggcgactacatcggcaacttcgcccccgacaccctgttcctcaccggccccaacctgccgcacaactggatcagccaggtcgagcccgacgaggtggtggcccggcgcgacatgctggtgaacttcactgacgaggtgctggaggacggcagcggcgtattctccgagctgaaccgcctggccccgctgctggcgcgggcgcgctacggcatcgagttccgcgacccggcgctgatcggcgaaagccggcgactgttgcaacgcatcgccgacagcggcggcatgacccgcctgggatacttttttatcctcatggaacagctcgccgaatgcgaggactaccagttgctctccaccgtcacttcctcgcaactggccgacgagcacaacgtcgaacggatcaaccgggcggtggactacatcttccagcactacgcccaggacctcacccaggagcaggtcgccgcccacctgggcatgacccccacctacttctcgcgcttcttcaagcaggccgccgggcgcggcttcgtcgagttcgtcaaccgcctgcgcatcagcaagtcctgcgagctgctggcccgcagcgagctgccggtgaccgaggtgtgcttcgagtcgggcttcagcaacctgtccaatttcaaccggcgcttccagcagctcaagggcatgacgcccaccggctaccggcgcctggtgacccagcggctgaccgagcagaacctgctctga

SEQ ID NO: 360761 - DNA, 906 bp, Pseudomonas aeruginosa
atgaattcgtccaacccgcttgtcgattggttattagacagcctcgaagtcgacaccagcctgttccacgtcggtcgctactgcggcggctggcatgcctccacccacggtctggcgcgtgccagcttccacctggtggtgcagggacactgctgggcgcacgtcgccggaagcgcccggggctggcggctggacagcggcgacgcgctgttcttcctgcgcgacgtcgagttccgcctgtccagcgaggccaccgccgaggccgcgcgctgccagccacgcggcgaaatgcaggcgctggagtggaacgcggcggacggtgccggcctggtctgcgggttcttccacttccactcgggattgtccgggctgatcgtcgacgccctgcccgactggctgatcctgcgcgccggcgatccggcgctggacgcggcgcgacgcctgttcgccctgatcgtcgacgagtgccgccgccagccggcgccgtcgccggtgctgctggagcgcctcagccacctgctgttcctctacgtgttgcgccagcaggtgctcgacaacccgaccctcggcggcctggtggcactggcccgccagccgcagttcgccggcctgctggaagcgctgatcgaggcacccgaacagccctggagcctggagcagatggccgagcgcaccggactctcgcgctcggccttcttcaagcgcttcaacgaactcagcggtcagtcaccgggacaggtcctgctggccctgcgcatgcaccgcgcctgcgccctgctgcgcgccgacgccagcgtcgccgaggtcgcggcggcggtcggctaccagtccaccgccgccttcacccgtgccttccacaaggccaccggacagcagccgggggcctatcgcaaggccagccgctga

SEQ ID NO: 360762 - DNA, 561 bp, Pseudomonas aeruginosa
atgtcacgcgttcccgtgctcaccctggaaaacgcccccgaggcggcgcgtccgttcctccagaccgcgctgaacaactcgggttatatcccgaatctgctcggcgtgctggccaatgcgccggccgccctggaaacctacctcaccgtgtccgggctgaacgccaaggccagcctcggcctgcccgagcgggaagtggtgcaactggtggcggccaccacccatggctgcgacttctgcgttgccgggcacaccgcggtggcgcgcaacaaggcgcgcctgccggagccggtgatcgaggccctgcgcgcccgcggcgaactgcccgatgcccgctacgaagccctggccgacttcacccgcgcggtgatcgccagccgcggtgcggtcaccgacgagcagttcgaagccttccgcgccgctggtttcgaccaggcccaggccctggaagtgatcctcggggtgagcctggcgacgctctgcaacttcgccaacgtgttcgcccgcacgccgctcaatgccgagctggagcaatatcgctggaccaacccgcaggcctga

SEQ ID NO: 360763 - DNA, 765 bp, Pseudomonas aeruginosa
gtgaggcagaccctgcgccagggcgctctgggcgttgccgggctgctggcgctgttcgccctgtggtggctcggcgtggccctgttcggcgccgccgacggcctttcggcacgcttctcgccgcaggcgacgttgctcagcctgggtgaactgctggagcgccgcgaactctacgagcatgtgctggtgagcctgaaacgggtcctgctgggcttgttcctggcgctgctggtgggagtgccgctggggctgctggtgggcgcctcgcgtaacctggaagcggcgaccactccggcgttccagttcctgcggatgatctcgccgctgtcgtggatgcccatcgcggtgatgctgatgggcgtgggcgaccagccgatctatttcctgctggccttcgccgcgctctggccgatcctgctgaataccgccgccggcgtgcgccagctcgacccgcgctggctgcaactgagccgcagcctcgccgccacgccctgggaaaccctgcgccgggtgatcctgccgggcatcctcggccatgtgctgaccggcgtgcgcctggccatcggcatcctctggatcgtcctggtgccctgcgagatgctcggcgtcagcgccgggctcggctactacatcctcgacacccgcgaccgcctggcgtactccgagctgatggcgatggtgctgctgatcggcctgctcggctatctgctcgacgccgcggcgcgcggactctaccggcgctgggcgcacggagcgctcgggtag

SEQ ID NO: 360764 - DNA, 645 bp, Pseudomonas aeruginosa
atgctcccggctgtagcccaggtaatcgatggtggccaccgtcttcaggccggtgagttgcagcttcatgatctggtcgagctgcgcgccgctgccggtgaatatcgccccggccgccacgccgagcaggcgcttcttgaactcgctggccgccgcgacctgggcgctggtgaaggtgttcttcacgctctcgtcgtcggggcgatcgatgcggaagtagtaccagctctcgtctgtgacctcgttgcgctggaagtacagggcctgggggaagcagttggcgatttccacgacgccgccggcttgctgcagggccttgtcgcgcatctgtttctggttcagcaattggtcgtcgtggttgtcgctgtcctccaggctttgcatggccttgttgaacttctcgatatccagcttgaaccagtagaggcggttggcgaagcggaagtggaattcaccgcgcttgccccagtcgtacatcagcagggccttctcggcggcactctcggcgatcagcagcgcgccctcatgacgcgcggtcttgaggtctttctcgatctgcacgacgcgctcggccgcgtcatcgatgaacatccagcgctggtgcaggtcgttccagtcgaatttgcggttgttgcgctgcggtag

SEQ ID NO: 360765 - DNA, 141 bp, Pseudomonas aeruginosa
atgccggcctgcttcagccgcacgatacccagccaggcgaagcacagcgcggccacgatgccgaacagcggagtgagggcgaacgtccacggcgcgacgatgcagagcgcggctgcggtgaagcacacggtggtggtgtag

SEQ ID NO: 360766 - DNA, 312 bp, Pseudomonas aeruginosa
ttggcacacatccgccagtcgatcgccgacatcctcaccactcgcatcggtacccgcgtcatgcgacgcgaatatggcagccagttgccggagctgatcgatgctccgttcaacgacaccacccggctacaggtctatgccgccaccgccatggccctcatgcgttgggagccgcgcatccgcctgagccgtgtccagatcaacgggcagaacctggccggccaggtgctcatggagattgacgccatcctggtggacagcaacgagccacacaacctgagcatccccttgcacatgggtgccagcgcatga

SEQ ID NO: 360767 - DNA, 195 bp, Pseudomonas aeruginosa
atggacagcacggagtattacgccggcgagaagatcaagcgggcgctggcccgctacccgttgcacgtcatccgcgccgacgtagacccggagactaatcccttcggcctgcagtgggactgctactccgacacgcctcaacgtatcgaactcgaggagccggccgcccccaccaagcgggagagaggtctatga

SEQ ID NO: 360768 - DNA, 348 bp, Pseudomonas aeruginosa
atggacaaaaaaaaggccgaccaacaggccagccctcaaaattcgcaacgtaatactatcacagtcgccaacgctcccaccaagctgagccgcgtgctcgccttcctggtggccggcggctccctcaatcgcttcgaagccgagcgcatcggcgaccactgccttaactccaccatcagcgctctggcccacaactggggcatcgagttccagcgccagccagagcgcgtgcccacccgctggggcaaaggctgcgacgtcatccgctatagcatccccgcatcccagctcaagcgtgcccagcgtgcgctggcgatgatggtcatcaaccggagggctgccgcatga

SEQ ID NO: 360769 - DNA, 234 bp, Pseudomonas aeruginosa
atgcgtaacctggtgaagctctccaactccatcggcgataacctgaccggcgcgggcttggccctggaaaccatcgccaacctgcttggcgccgacggttgcgaacacttcctcaacaagggccacatcaacggtctggtccacgcggtcctgacgatctcggtctacgtcaaagacgctggttacgacctgtgtgaagccgcggaagcagagtcagaaggaggggggcaatga

SEQ ID NO: 360770 - DNA, 306 bp, Pseudomonas aeruginosa
atgatcacttactactgcatccaagtccttgggcaagcaaagtttccctatggtaaagctggccctctccgtactccggctgaggctcgtcgcgctctgggcattttgcgccgcgaacaccccaatcaggaactgagcatcttcgaatgcaccttcttcgtcgacatgccgggaatagattgggatgtgcgctacacccgcaagcatgctgaacgcaaagcgccagtgccaaggcgtgcaaccagggagaaagtcaaaactcccaatgccatccgtaacctgaccaataccgcacagggaacttaa

SEQ ID NO: 360771 - DNA, 696 bp, Pseudomonas aeruginosa
atgaaaccttttaactggacttgcccttactgtaatcatgcagtcactgttacggatcatgcttatagctatagtcttcatcagtttgctggtggcaataaaactggaggttggctcggcttagccacgtctgtgatagtctgtcagaatccgaagtgtggcgagtattcaattgatgcagtactttggccaggggagttctctccaagcttcactcgttctggagcgaatattcaggagtggcggttgcgtccgtcttcaaaggcgaaagtttttccgggctatattcctcttcctttacttaaagattatgaggaggcatgtcttattcgcgatctaagtccaaaagcatctgcaacactgtctcgccgctgtctgcaaggaatgattagagacttttggaaggtctcggaggcaaatctatttctcgagattaatgctattaaagacaaggttgatccagttacttggtctgctatagatgcgatccggagtatcggaaatattggtgcgcacatggagaaggacattaatcttgtagttgaggttgagccagaggaagcgcagttgttgattggacttatcgagatgctattgaaagattggtatgtggttcggttcgagcgacaaaagcaacttgaggatatcgttactgcagcgaagcagaagcaaaagctgcgtaagtcaggtgactag

SEQ ID NO: 360772 - DNA, 252 bp, Pseudomonas aeruginosa
atggcccgcaaagcgctcgtgcaacacaccccttccccttatgagctactcgccctgcggatccagacgcaattgctgacgccgcgcgcgcaactggagcgccggtcagtcatctcgcgcatgccgggcgaaccagaggacgcctggttgcagttgctcgacgagctggcccaggaagattcgctgacgatcacgcatcgcctggatgggtccgtcgagctagcctggccacaccctgccaccgactggtaa

SEQ ID NO: 360773 - DNA, 1302 bp, Pseudomonas aeruginosa
atgccgacgcttaacgtgcctcaggcgaagttcctggccctgccgcacaagttctgcggcttcgtggccgggttcggctctggcaagacctgggtgggctgctctggcctcgcccagcacgcctgggagtggccgcgcatcaacgccggctacttcgcgccgacctacgcccaaatccgcgacatcttctatccgacgatggaggaggtggctttcgactgggggctgcggaccaggatcaaccaggcgaaccacgaggttcacctgtacagcggtagcgcctaccgcacgacgatcatctgccgctccatggagaagccgcagaccattgtgggcttcaagatagggcacgccctggtcgatgagctcgatgttctgccagcgctcaaggccgagcacgcctggcgcaagatcattgcccggatgcgctacaacgtgcctgggctgaagaacggcgttgatgtgacgacgacccctgaggggttcaagttcgtctaccagcagttcgtgaaacagttgcgcgagaagccggccctgcagggcatgtacggcctggtgcaagccagcacgttcgacaacaagctgaacctgccgcctgactacatcccgtcgctgatggagtcctacccggcccagctcatcctggcctacctcaacggccagttcgtcaacctgaactccgggtcgatctaccacgcctacgaccggaagctgaattcctgcttcgacaccgtagagcctggagagcccctgttcatcggcatggacttcaacgtcggcaagatggcggcgatcgtccatgtcaaacggcctgacggaaagcccagggccgtggatgagctgatcgacggcttcgataccccggacatgatccggcgcatcaaggagcgctactggcggcacaacggcagggactatgagaagacctgcgagatcaggatctatcccgatgcctcgggaggatcgcgcaagtcggtgaacgccagcgagacggacatcgccatcctgcgccaggccgggttcagcgtcatcgcccccgacgccaacccgcccgtaaaagaccgcatcaacgccatgaacgcgatgttctgcaacgcgaacggcgagcgccgctacctgatcaacccgctgcgctgcccgacctatgcggatggcctggagcagcaggtgtgggccgccaacggtgagcctgacaagaaatctggcgtggaccacgcgaacgacgcgggcggctacttcattcaccacgactacccgatcagcaggccggttacccacgtaccaatcacgttcactttctga

SEQ ID NO: 360774 - DNA, 1425 bp, Pseudomonas aeruginosa
atgccgaacttcattccccgggcagagtactcggaggccttgcccggctggcagctggtcaagcgctgcgtggccggcgcccgtgaggtgcgcaagcacgacgaatacctgccgatgccggacccggagaacaaatcgccggagaacctggcgcggtacaagcagtacaagaagcgagcgatgttcctgaacatcaccgggcgtacgcgtaccggcctgctgggtgcggtgttccgcaagacagccgaactgcagctacctgcgggcgtggagtacctgaaggagaacgccagcggcgacggcacgagcctggagcagctttccaagcgctccgtgggtgagtgcctggacactgggcgtggcggcttcctggtggacttcccgccagttgaaggcgtgtcctccatggccgacatgcagggccggcgtgcgctgatccaccactacggcgcgacctcgatcatcgactgggaagagcaggtcattgatggcgtgctgcgcctggtctacgtgtgtctgctggaatgcgtgtccgagttcagccaggagaacctcgaccgcatcaaggaagagcagtaccgggtgctgctgctggtagatggaaagtacgtccagcgcctctacagcaaggacggcaagacctacaccgagacccagccgctcgacaagaatggccggccgttcgatcacatcctgttcagcttctacggagccgaggacaacgacgccagtatcgacaagtcgccgcttgaagacctggccgatgtgaacatcctgcactatggcaacagcgccacggtggaggagagcgggttcatcagcagccagcctacgctgttcatcaccaccgacatcagcgcggacgatttcgccaagctgaaccccaacggcatccacatcggctctacccgcgggttcaacctcggcaagtccggtgacgcaaagcttgtccaggcgacagagagccaactggcccgcacgctgcttaaggacaaggaagagcagatgctgatgatcggcgctcgcatcgtccagaaggcgggcggagccgagacggccgaggccgtgcgcatccgctacagctcggacaacagcgtgctgggcacaatcgcaggcaacgtgtccgaggccctgaaacgggccatcctcgacgccgagcgcttcatgatgggcgagccggacgaggaggggacggtgttctggctcaaccagtcgttcttcgacgagacgatgaccgcccaggacatcctggcccaggtccagctctggcagcagggcatcatcgcgaagtccgacctgcgcaccaaccttcgccaaggtggtgtgctcgaggcagaccgtaccgacgagctcatagacgatgaactggccgagcagccgccggtgaccggcaacgataccggaggcggcgaggatgagcagtga

SEQ ID NO: 360775 - DNA, 1044 bp, Pseudomonas aeruginosa
atgagcagtgatggctacctgtcggacgcagcgactcgccaccaggtgcacgtgcagcgctacgccgggggaagcctcaagcgcctggccaagttcatcacgaaggccatcagcaccgccaaatcgcgcgtatcagagggattgagccgttacggcacccaacggtacgagaaacagattcaggagctacagggcgagctggcgggcgtatacggcgagatgaagcagcaggccgtgctcgacctgacggaattcgccgggtatgaggccgagttcaacatgaccctgctgggcaaggtcgtgaagacggtcgtgcagttgaacaagccgagcattgagcaggtcgccgccgcagcgctggccgatccgctcgacctggaggtcggcaaggggcggcagcgcatcagcattgccggcgcgctcgaccagtacggcaccaagaagagcgcagagatcatcagcgagattcgcgtgggctcggcgctgggtgagacgacaagtcagatcacccgccggctcacatcgctcggcgtgcagcagcgcgaccaggccggggcgctggtgcggaccatgaccaaccatatcgccagttcggcgaggtcgcaggtcatggccgacaacgacgacatcctgaagggaaagcgccgggtcgccaccctggacggcaggaccacgccgctctgccgagcgctggatggcactgtggtgcccatgacggcgccatcgccgccattccactggaactgccggaccaccgagataccagtgctcaaggacgagtttgcccgggatatccccggatcgactcgcccagcggtaggccctgacggcgtcgaacaggtcagcagcaagaccacctacggcgaatggctcgcacgccagcctgcagcgttccaagaggatgtgcttggcccggctcgctacaagctgttcagcaagggccagctcaccatcgaccggtttgtcgacgacgacgggcggaccctgactctcaagcaactgcgcgagcgcgagccgacggctttcgacttggcgggtagatag

SEQ ID NO: 360776 - DNA, 711 bp, Pseudomonas aeruginosa
atgaccttgaaattccaactagacagcctcgaaggcgtcgaagaatcggtagcagccctgtacgtcgagaaggacggcaagttcgtccttggcatcgatggtctgccgcagcaggaggatgtcaccggcctgaaggccaaggtggaagagctcctgggcgagaagaaggccgccgagaaagcccgccgcgaggccgaagaaaaggcgcgcgccgaggccgaagaggctgcccgcaagtcgggcaacgtcgaagaactcgaaaagtcctggtccgagaaatacaaccgccgcgaagctgagctgaccggcgccctcgaaagcgagcgcgccaccctgcaaggccagatccgggatctgaccgtgggccgtaccgccaccgagatcgcgactgctctggccgttccaggcagcgccaaggcattgcttccccacatcgaacgccggctgagcgtcgagcagcgcgacggtaaaccaaccgttgtcgtgctggacgcagccggcaagctctcggcggcaacgctggacgagctgaaagcagaattcaccaacgatccggcctttggtccgctgatcgctggtagcaaggcatctggcggcggggccgggggtgctggaaagggcggcggggccgcaaaaggaaacatcggcggcaccaaagaggaacgtacggcagctatcgctggccggttcccagacctcccactgaaataa

SEQ ID NO: 360777 - DNA, 969 bp, Pseudomonas aeruginosa
atgtccctgacccaaatgcaggtcttcaacgagtacatcatgccggcgaccatcgagacgctggatcagatgctcgttgcgttcaacgccgccagccgcggcgccatcgtgctgtccccggacggcttcaccggcgacttcctccaagagtcgttcttccagaccctggccgcagcccagcgccgggtggatcgctatgccgccaacggcgacgctccgatcacggacctgaccgagctgaaaaacacctcggtgaaggtggctggcggtttcggccccgttcgctacgagccgtcgcagatgacctggctggagcgcccgactgctcaaggcgtcgaggtagcatcacgggcgttcgctgagatcctgctgaaggaccaactgaacaccgccatcgccgcgctggtggctgcgatcaccgcccaggccgcggccgtcaacgacgtttcggcgaccgccggtatcagtcaggtcggcctgaacaacgcccacgcgaaattcggcgatgccagccagaacctggttacccaggtcatgcagggcacgacctaccacaagctgatcggccaggccctgaccaacagcgagcaactgttccaggccggaaacgtgcgcgttgtcgacatcctgggcaaggtgtcggtggtcaccgatgcgccggcgctgatgcagactggcaccccgaacaaggaaatcatcctgtccctggtgcagggcgccgcactggtgcacgacggccgcgacatgatcagcaacgtgtcgaccaccaacggcaaggagcgtatcgagactaccctgcaggtggattacaccttcgggctgggcctcaagggttacacctgggatcaaaccaacggcggcaagtccccgaccgatgccgagatcgccaccggcaccaactgggataagaccgccaccagcatcaagcacaccgccggtgttgccctgatcggtgacgcttccaagtaa

SEQ ID NO: 360778 - DNA, 219 bp, Pseudomonas aeruginosa
atgaccgaaaagaatatctggtacctccctggtccattccaccgctatgaagatgacgtcaaggccatcgccaaaaagggcggcctgcgcatcatcgacgccaacgtgaccgatagccgtgatggcgagtgcgagaagccgcccaaggcaaagctcaaggcggaatacgagccggccaaggccgacaaggctccggacagcggtccggccaaggcgtaa

SEQ ID NO: 360779 - DNA, 393 bp, Pseudomonas aeruginosa
atggctacctacatcaccgtggccgacgtggacgccatcctcggaccagactgggcgcccgaagaggacaaggctgaggccgtcttcgaggcgaatgcctacctgactgcgctcaacctgatcggcatcgatatggacgacatccctgacgatgtgaagcaggccggcgccaggctggccaaatgcgcctcgcagggcaagctgtaccagcagcagaccgagggatcgcttgaggcgaagaccgtcaaagctgggtcggtttcgactagcaagaccttcggctctatcgacaagaccagcactgccgcacagccgacctgtgtgcaattggcactggccctgctcgcgccatggcgcagcaacccgttcgcctttgccgtgaaacgggggtag

SEQ ID NO: 360780 - DNA, 381 bp, Pseudomonas aeruginosa
atgggcattcgtgatgaaattcaggccgacctggccgaagccttcgacgaagacctggccgacgcggtatctgcttttaccggtacatacatggggcctggtgtttgggaccctgtgagcgagacgaccacggcccaacccgtgacatacaccgggcgtggcgtgctcgacagctacgacagccggcgcatcgacggcctgaatatcttggttggtgatgtgttgctgatcgcgctgaccaacgaggtcaccgataagccggcggtggggcaccagatcttggcgcccgacctcatcacaggcgagcaggtgacataccgcatcgtcagcccgggcatcgatccggccaaggcgcactacgagatacagatgaggaagtga

SEQ ID NO: 360781 - DNA, 561 bp, Pseudomonas aeruginosa
atggccaaaggcaaggggagagggtggagcacgccaccgacgatgttccgcgaggaggtcgacgaagcggtcgctacccgaacccgtgtcattgccatggctatgctgcaagaggtggtgctgcgatctcctgtgggcaaccccggcctctggaaggtgaatcaggagctcaaggccaggaacgtcgccttggcggatgcctacgacgccaaggcggcgcaacttggcaacaagaagctgacgaagcgtgagcgggagcagaactttttcgttgggcaggttgccgcgggccagggctatgttggtgggcggttccgggccaataacatcgtcactgtaggcgctgccagctacgcgcagctcgataccgtggacccatctggcgcaaccacaatcagcaacggcggggccgtgctccagtcggtcgagccgtacgctgtcgtctacatccagaacaacctgccgtacgcggagccgctggaagatggtcattcgacccaggccccgggcggcgtctatgccgtttcgttccacggcgtctcccaggcctacagcaaatga

SEQ ID NO: 360782 - DNA, 408 bp, Pseudomonas aeruginosa
atgaccttcgaacagatccgcgcaatcatcatcgggcgaatgacgcagtgggcgggtattcccgccgacgctgtcgattatccgaacaacccacaggggcccttcgatccggccggcaaacccatctgggccaggctggcggacgttccaggtctggccagcgcgccggaggtcggcattggcccatgcgtgcgccggaccggcatcatcatggttcagctgttcgtgctcagcaataagggcaccctggccatcaccaaggccgccgacacgctggtccagcacttcgagttctacagcgacccgaccgggccattcgagtgctacgcggcctcggccagtaccatcggtgatgacgggcacggctggtaccaggtgaacgtgtcgatcccataccgggctggttga

SEQ ID NO: 360783 - DNA, 1482 bp, Pseudomonas aeruginosa
atggccaaccttgatcatcttgatacttttttcttcggtggagaggcggaagccgaggccgatatccggaatgacattttcgtcgaaccgggtgcaattgatgaccttctaagcttccgccgatccagatacaaggttttgattgccccgaaaggagtggggaaaaccatcttactgtcggtactgaatgagtcgatattggagcatgaccagatttcgatgctattgacgccgcgcgatctggattgtaaggatatattcgataaagatgcgatcgcggatcgaataagctgtgcatatagacagttattgctcgccgccgcaagccatgttggatccttgagtaaggatattggcatctcagatgctgttgttaatttgcaggcgctaagtgttgatcaggggcttacacgtcctgatctgatgtccagggttgctactttcttaacagctgttacacccaaaggaaaagatattgctgaggctgcaagggggatccagcgtctaaataagtcggtgggtattcttaaaggtgatgtgcagtcagtgctggcgcgaaataagaacaagctctggcttctgatcgatgatatcgatcttgccgctgtggatgacggcggtaagtacgactattcggcatgctgggcgattataagtgcggcaatggatttggctaatgattttgacggggtgcgatgtatgatctccgtccgctctgacatttggcatgtgatgactaaagtaaagcgattgggctcagagcggcttgataagattaagaagaatacagtggttctctcctttaatgaggaagagttacgaagcatgtttattcgtcgagtcgagctggcgagccaagcagcaggagcaaaaactatcgagacggatatgttcttcgctgatcggtggctagtattacctggtgtgcaggaggagagaaggacgtgggatcagtggattgcaaaaaattctcgggacaaacctagagatatggtccaactcgttcagtctctcattgaagaagcacgacgagaaaagtccgaaaaaattggcgactctcatgcgcacaaaatcgtcctggagtactcaaaggatttagtgggaaatatatctgctgaatatcagcaaatctgtcctcagattgaaggtttaatgaggtttgtttctcgcaaaacactatttgactttgaggaaattattgatttgctaaagaggtcgccatcagctcaaggcattgaaattgacggaattagaatgaaggcgaatgacaaaggaagtgcgataaaattgcttgccatattgcatatggcaaatttcatgaatcctagggtgcagaatggtgcacgctatgaccacctaccgttctcgacttttccagatttcgtaagcgaagaaaactggaacgagatgcaaaaggcacagtgggaaatacatccggccttccatgcgttcgtcaatgatacaaagtcgagtcgacgatag

SEQ ID NO: 360784 - DNA, 333 bp, Pseudomonas aeruginosa; identical to SEQ ID NO: 336959

SEQ ID NO: 360785 - DNA, 363 bp, Pseudomonas aeruginosa
gtgacattcagtctgtctccgggacaggtgcacgatgcccccgagggcaggaagttgctccagagcctgggcgccgccagtcgccccattcacttgctgatggatcgcgcctacgaaggcaatgagacgcgtcaactggcactggatcttggctttatccccgtggtgccaccgctgaagacgcgcattgaaccctgggagtacgaccgagagatgtacaagcgtcgcaatgaagtcgagcgcctgtttcgccgactcaaaggcttcaggcgcatcttctctcgattcgagaaactcgacgcaatgttcctcggctttctctgcttcgtgctggtggtcgatggccttcgcagtttgtgttaa

SEQ ID NO: 360786 - DNA, 423 bp, Pseudomonas aeruginosa
atgacactgctgaccatggagatcacacccgagcaattcgcccttatcgaacattgtttgcccaagcaacggggcaacgtgagcatgaccaatctgcaggtcgtcaatgccatgctttacgtggctgaacatggctgcaagtggcgcggacttcctaagaaattcggcaactggcacacggtctatacgcgcatgcggcgctggactgaggccggggtactggacaagatgttcgaggagctgcagcgcgagcaggtggtgcgtatcaaaatcgaggcggtctcgctggacagcaccagcatcaaggtgcatcccgacggcgctggtgctctaaaaaaaacggcccacaggccatcggcaaatctcgcggcggctggaacaccaagattcatatggttgccgcggatgctcgaacggccgtga

SEQ ID NO: 360787 - DNA, 843 bp, Pseudomonas aeruginosa
atgcagtcggccattgacgtcggtctcgcgctgcaaggtgcgatccaggctcgtccaccgctcctgttccacctcgcgccccaaggtctgctggatctccagctcggtacgcggccccagccattcggtcgccagttcggcggctcgatggcggaagccatcggcgatgtagtcgcctgcgattatgaggtctttgccggtgtcgtcgcgcccgcgcacgacgatgtgcgtgtgcgggttgtcggtgttccagtggtcgaccgccacccaatcaaggccggtgcccaggtcggcctccatgcggcccatgaggtgccgcgtgtacgtgcgcaggtcttccagctccccgccatcctcgggagagaggatgaaacggaaatggtgccggtcgtcggcgcagcgttccttgaaggcgtcgaggtcggccacgtcggtctgcggcccgtaggcttggcccggctcgccgtcgcggcccacgccgtcgcgctcgatgtagtgcaggtgcttggcgagcgactgcgggctggcccgctggtgattcaccaacagcgtcttgatggtcacgcgccgagacatgggcgtcagcttcgccccggcgaagcgcgccgctgtgtagccgcgccccagtcgcgagccgggccgctggcccgtgccacccgtcgcgccaggacggcgcatcgtggacttgccgctgctggccttgcctgcctgcttgagcaccttggaaacgaagctctggccttggcccttgccccggttcttcggggcgctggggcgcacgcggaaatcgtcatcgcggcggtcagtcatggtcgttctccctgcaagctctggcgtgtctga

SEQ ID NO: 360788 - DNA, 333 bp, Pseudomonas aeruginosa
atgggcttcgtcagcaaaagggaaaacctctccgagctgctgctcgccgccaaggccgtgctggccggctacatccacttccccaccggggcgttgcgcagcatcaaccagcagagccgcgacaacgaggcccgcatgctggaaagcctttccgaccgcgagatgaccgtgctgcagtacctggccaacggcaataccaacaaggccatcgcccagcagctgttcctcagcgagaaaaccgtgagcacctacaagtcacgcatcatgctgaaactcaacgcccattccctggccggcctgatcgatttcgcccgccgccacgagctgatctga

SEQ ID NO: 360789 - DNA, 1206 bp, Pseudomonas aeruginosa
atgacccatccgaacgctcttctcactcctcgtgcccgtctccggttagctcggctgattgtcgaagacggctatccggccacgatcgccgcaaagatgttcatggtctccccgatcactgcccggaaatgggcaggccgctaccgggaagagggtgagtttgggatgcaggatcgctccagcaagccgcaccggatcccaggcaggacgcccgagcatgtcaagaagaagatcatcaacctgcgctggcggcttcgactggggccagcccagatcgctgcgcgacttggtctctcgacgtcgactgttcacgcggtcctcgtccgttgccgcgtgaaccgcctctcgcatatcgatcgtgtcactggcgagccattgcggcgatatgagcatcctcatccgggatcgttgattcatgtcgatgtcacgaagttcggcaacatccccgacggcggtggacatcgttacgtaggtcggcagcaaggcgcacggaacaagctcgcgactccgggattaccacgaggaaaagatcacaagccgcgcaccgggacggcgttcgttcacacagtcatcgacgaccactcccgcgtcgcatacgcagaaatctggtcggatgagcaggcgagcacagcggtgggagttctcgaacgcgccgtggcctggttcgccgaacgaggcgtgaccgtcgagcgagtcctatccgacaacgggtcggcatacagatcccacgcatggagggacttctgcgctcggctcggcatccgacacaagcggacacgcccctaccggccgcagacgaacgggaagatcgagcgattccaccgcacgctcggggacggctgggcctatgccaggttttacggttcagaggccgaacgacgcctggcgctgcccggctggctccacttctacaaccaccaccgacaccactctgcgattggcggcgtacccttcgaccgactcaacaacgtccctggacatcacattcggaggctcctcgctgtccattcgctcccctggcgcggtatgaaccgccgcctcatagtgcagtttgatcctgacgagcccagcatgtctgcgcccaccttcgcggaacctgaccagggtccgctagcgggcggccggaaggtgaatgctaggcatgatctaaccctcggtctctggcgtcgcgactgcgaaatttcgcgagggtttccgagaaggtga

SEQ ID NO: 360790 - DNA, 1044 bp, Pseudomonas aeruginosa
atgaaacgcattgcaattgatttggccaagtccgtttaccaagttgccgaaagtatccatgtcggtcgggtggatcgtcgcaggcggctcgatccggaggcgttctggcgttatgtacaggagcagccggcgcctgtcgagtgggtgatggaggcctgcggcacggctcaccactggggccggttgatgcaggcggcggggcatcgcgtggtgctgctgcatccgcgctacgtgcgggcctatcgccggcgcagtaagaccgatcgcaacgactgcgatgcgatcctggaggcggctcgttgcgagggtatccgtccggtgccggtcaaaagcgtgcagcagcaacaggtgcagcagctgcacaaaatgcgcgaggcctggaagaagacccgggtccagcgcatcaacctgttgcgcggcatcctgcgcgagatgggcgtggccgcgcccaacggcacccaggcgtttctgcgccaggcctgcgcgttgatcgagcagcccgaggtgcaggctctgcgtggtgtcctgcaagtggtactggctgaaatcaacctctacgaacagtcgatgcgtgagtgcgaagaccaactggcgcgctggcatgccgacgacgacatcgtgcacaagctcgatgaagtcagcggcatcggcctgctcaccgccagcgccctgaaaaccgctgtgggcaaacccgaacgctttgccagcggccggcatctgagcgcctggctgggcatgacgcccaacgaatacagcagcggcgagcgccgcaagctcggccgcatcagctgcaagggcaatgtttacgtgcgaacgctgctgatccacggcgcccgcgcggcgttgctggccgccaagcgctgccaggcacgaacgccgcaacgcctgacccagctgcagcgctgggccctgcagacggccgaacgcatcggccacaacaaggctgccgtggccctggcgaacaaactggtgaggatctgctgggcggtgtggtgccacgaacgccgcttcagtggcgactggcagagtgcaaggcccgcctga

SEQ ID NO: 360791 - DNA, 429 bp, Pseudomonas aeruginosa
atggccgagcagatcctgcacggttcgaatgtcgtaaccgctgcggagcaaggccgtcgcgaacgagtggcggagggtgtgcggtgtggcgggcttcgtgatgcctgcttgttaggcctcatgaaagtcattagcgcatcaccgcagttctggcatttgctcgaagagcaaagcgatctaatcctcaccgtgagctgcgaacacagcttcatcggctatgacttcacgatgaagctgaaccccgatgagcgatccaagtatgcccagggcggggactcctatatcagtcagctagctgaagctatcaactactcttgcccgattgcaagaggcagcgcatctgtgtacaaggatcgaaacattgacgcccagtacagtaaggcgatcctgcgtactatcgaaaagtggagcggtaagcggcatggctaa

SEQ ID NO: 360792 - DNA, 318 bp, Pseudomonas aeruginosa
atgtcggaatcgaagtggatcgagcattaccgggccggagcgtggacggtcggcgaagtgatcgaggcgggcgcggcgtggatcgtggcgatggacccggaccattaccggctgcgcttctttccgcaccgggacgcggcgaggttcaccgttggcattgatgccgagtggagcgacgagaagcccggcggactggcgaactacacgccgagctatgagggcggcaacgacgcttgccagcccggcgaggtggcgatttccgatttgctcgcccgatccccatcgtggaagtcgctgcggaggccgacgccatggtga

SEQ ID NO: 360793 - DNA, 1533 bp, Pseudomonas aeruginosa
gtgccgcgcctcgccacatcccggcggcaagccgcgggatgcgcgccactgccgtccgcccacaccggttcgcggtacgcgcgccacgcgcccgagcgcacgctgctgtacgcgttggtagaggcgcactacccggacttcattgcacggatcgaagcggagggccgctcgctgcccgggtatgtccgcgaggcgttcgatgcctacctgcgttgcggcgtgctcgagcacggcttcctgcgggtggtgtgcgagcactgccgtgcagagaggctggtggccttctcctgcaagaagcgcgggttctgcccgagttgcggcgcgcgacgcatggccgagagtgcgcggcacctggtcgaggaggtgttcggcccgcggcctgtgcggcaatgggtgctgagctttccgtaccccttgcgtttcctgttcgccagcaagccagaagccattggcccggtgctgggcatcgtgcagcgcgtgatcgccggctggttggccgatcaagccggcatcgaccgcgccagcgcccagtgcggcgcggtgacgctgatccagcgtttcggcagcgcgctgaacctgaacatccacttccacatgctgtggctcgacggcgtgtacgtggaagccaccgagctgccgcggcgcgaactgcgcctgcaccgcgcccgtgcgcccaccaccgcgcagttgacccagctggcagctaccatcgcgcaccgggtgtgtcggcacctgacgcgcaaaggctggctcgaaggggagggcgaatcggccttcctggcagacagcgctgcaggcgacgacggcatggatgggctgcggatgagttcgatcacctaccgcatcgccaccggccgcgacgctggctgcaaggtcgtcacgctgcaaacgctgcccggtgacgccggttcgctggagggcgaagccggcaaggtcggcggcttctcactgcatgccggcgtggcggccgaagcacacgaaagccacaagctcgaaaagctgtgccgctacatcacgcgcccggcgatcagcgagaagcggctgtcgatagcgctccagggcagggtgcgttaccagctcaagaccccgtggcgcaatggcaccacgcatgtggaatgggatccggtggatttcatcgccaagctggcggcgctggtcccgccaccgcgcgcccacctgacccgcttccacggggtgtttgccccgaacgccgccctgcgcgcacagttgacgccatcggggcgcggcaggaggcatgacgccgctgtggagccggcggacgcaagcgcgaacgacgcgccgcgcagccccgaggagaagcgccgttcgatgagctgggcgcaacgcctcaagcgggtcttttccatcgacgtcaccgcctgcgtccactgcggtggcaccgtgcggatcgtcgccagcatcgaggaacctgccgccatccgcgccatccttggccacttcgtgaagcagggcgcgcgggaagaagcgcactacaggcccgcagcgcgcgcaccgccagtgcaagccgcgtga

SEQ ID NO: 360794 - DNA, 1086 bp, Pseudomonas aeruginosa
atgaagtatttggataccgccgcgggcagcttgccgcttccggcgtttttcccggatgcgacgtacggcgcgattcgtgcgggcacgtttgaggacgtttaccgcgcggagctgtacggctgcgagatgaacagctatcatctgatgaacaaaccgggggcgaagctgatcaaatcgctgggcggcttgcacggctttaccggctataaaggcgcaattcttaccgattccggcggctttcagctgtattcgctgattcgcgaaaacgcggaatacggcgagatccgcgacaaagagatcatcttccgccccgaccgcggcaaggaaaagatcacgtttacgccggaaaagtgcattcaggtgcagttccagtatggctcggacatcatgatggcgctggatatgtgcacgcacccgggcgacccgattgacgttcagcgccgcagcgtcgagctgaccgtgcgctggggagagcgctgcaaggcggagtttgaaaagctgatcaagcagacgaagccggaaaagcggccgctgctgttcggtatcgtgcagggcggtgcggatcctgaattgcgaatggaatgcgggcggcggctggaggagatcggcttcgatggctacggcttcggcggctggcctttggatgcagacggttcgttccgcgcggacattctgaaaatggcagcggacgcgatgcccgaccacaaaatcaaatatgcgatgggtcttggcaagcccgaggaaatcgtcgagtgcgtgaagatgggttacggcttgttcgactgcgtaattcccacgcgcgaggcacggcatcagcggctgtatgtgtttgcggacggcatggaaacgccggagggcgtgcgttcgggtgcgaaattctatcgtttccattatgcgatggacgaaaagaatgtccgcgacccgcgtccggtggatgagcattgcaattgcgagctctgcaaaaaccattcgcgcgcgtatctgcaccatttgttccgcgtcaacgatccgcaggcgatgcatctggcgaccgcacacaatctgcgctttttcgggcgattgatgcagcttttgcaggaaaagtaa

SEQ ID NO: 360795 - DNA, 744 bp, Pseudomonas aeruginosa
atgagcgaactgaaggaaaaactgctcgcttcgaaaaaatatcgcgacgtttgcccggacacgatcgagcgcatatggcgtgaatgcagcgcgaaattcaaaaaggaaaaggacgtggacaaggcggcgcgcgaagcgcttcacggcgtgaccggcgcgttcatgaccgagcgcgaatacaaacgcgcaatggaaatggcggcggcacgcgattgggaagcgctgcttggaatgcacgcgtccacgcgcgaacggctgcctgtggaatcgatggatcgcgtgttcgatcagctgtttgaagccagcggaacgccggcgcgaatcctcgatctcgcgtgcgggctgaatcctgtctacctcgcgcatcgattgccaaatgcggcgattaccggcgtggatatcagcggtcagtgcgtaaacgtaattcgtgcgtttggcggcgcggaagcgcgtttgggcgatttgctgtgcgaaatcccggaagacgaggcgaatgcggcgctgctgtttaaggtgctgccgcttttggagcgccagcgtgcgggcgcggcgatggatgcgctaatgcgcgtgaatgcggaatggatcgtcgcatcgtttccgacgcgttcgctcggcgggcgcaacgtcggcatggaaaagcactattccgaatggatggaggcgcacgtgccggaaaatcgcgcgattgccgcgcggctgaccggcgaaaacgagctgttttacgtgctgaaacgaaaatga

SEQ ID NO: 360796 - DNA, 384 bp, Pseudomonas aeruginosa
atgaaggtggaagatttccggttcgaactgttcgagctgcgcgatttggcgcgcgcgaaaggcgtcgatcgcctgaaacgggtgggcagattgctccgcaaacatccggatacagggaaaagcgcgctgatttgggcgggcgtggcgattcttctgtgcgtctgtacgatcgcgcaagggcgaagcggcagccttcgcgcatgggagcgctggctcgatgctattgtgtgcatttgctacatggtgccgatcgttagtgcatacatatgcagcaggattggcagcctgatcgccgcgtccaaacggctgaacgagcgcgcggaaatactgggcgagaacgaattcaagcgcgtttcggaatcgttggagtatgtgcgcgtatag

SEQ ID NO: 360797 - DNA, 768 bp, Pseudomonas aeruginosa
atgcgatcctggttccacttcctgcccatctgcctgctgctggccctttccggcccggcagcggccgtcccgacagaacccctggtgctcggcgccgaagacgactggtatccctatactgcctacaaggacggccgcatccagggcatgagcgcggacatcgtgcgggccgccttcagggctgcggacacgccggtccagctcaatccctacccctactcccgctgcatgaagctggccctgaaaggcttgatcgccggctgcttcaatacctcgccgaacccgcacatcctcgccgactaccgtctgccccggcatccgttgttccgcgcggagatccagctctgggcgcgacgcgacgaagcgcggccggtgaatgcggagcaggcgctgagcggacggaaagtcgcggtgaccctcggctatgaatacggcgacggcttcgatcgccgccacgacctggtgcgcatcccggtgcgcaaggactactacggtttcctcatgctccagcgcggccgcgtcgactacgccctggcctaccgcaatacggctcgccagttgttcagcgaacatcccgaactggaaggccagttccagccggtggccacggtccaccgcccggagctgtacctgtcgttctcgcgccgccacccgcaggccgagcatctgctcgaacgcttcgacctcggcatgcagcgcatcctcgccagcggcgagtaccagaagatcctcgacggctggagccaggccgccgacgctacgccctag

SEQ ID NO: 360798 - DNA, 234 bp, Pseudomonas aeruginosa; identical to SEQ ID NO: 334916

SEQ ID NO: 360799 - DNA, 315 bp, Pseudomonas aeruginosa
atgaccggcagtgctcgtgacaaagaggccacgatgctggaatgctgtgccctgatcgcgacgggcgcgctggaggcgccccgcacgccagcggaagcaaacgtctgccgcgtcgccgggatgatcctgggccgacacctgcaagacgctcgccagcgtctggcgcagtccgccgccgtgtacttctcggctcaccccgacgagctgcttgagtccgccgacacggtgcgtcgtggctggatcagtaacctgcctcggctccgtgaccgcctggagcggcggctacgagaagcagggcagggagcatcgccatga

SEQ ID NO: 360800 - DNA, 729 bp, Pseudomonas aeruginosa
atgatctacctgtgcggcgacacccacggcagcttcgatcacatcattgacgtggttggccaggatcgcccggccgccgtcgttttcctgggcgacttgcaggcgcagcgccccttggagatcgagctggccacgatcctcgacaagacggaggtgtggttcattcatgggaaccacgacaccgactcggaggccgactacgacaacctattcggctcggccttggccgaccgaaacctgcacggccgcgtggtggagatcgacgggctgcggatcgcgggcctgggcggcatcttccggggccaggtgtgggcaccgcctagtcagtggctgcatgaacgacccgaggactttgccgctcggtgtggcaagggcaacctctggcgcggcggcctgcctcgcaagcatcgcagctcgatcttccctgcggactacttcggcctggtcggtcagcgcgccgacatcctggtcacgcatgaggcccccagttcgcaccctcacggcttcgacgccatcgacgagctgggccgcagcctcggcgtaaccaaggcatttcacggccatcaccatgatcggctggactacagcagccaccgcgagcggcttgggttcgatgccttcggggtaggcttctgtggcatcacagacggaaacggcagcgtcgttcgccctggagatttcgacgaggcacgggcgagccgccaacaacatcagggagcaatttcttga

SEQ ID NO: 360801 - DNA, 342 bp, Pseudomonas aeruginosa
ttgagcacacgctttggacgccgtgcggcagacggcacattcgagtaccacgggagcaaagagtcgctgatcgcagcgcagcggcgcgaaaacagcgagacacgctccggtcttttcggcttgatcgggctgctggttggtggcgtgctgacctacgtcgcgctgctcaaggtcggggccgactggcccaaatggcttcggttcggcctggtcatcgctggcggcggtggcctggcctacatcctggccaagttcgcagacatcatctggggcatcttgatgtcgctgctcttgctcgccatcctgtggggcgtcggctcgtggatctggaaggccgtctag

SEQ ID NO: 360802 - DNA, 417 bp, Pseudomonas aeruginosa
atgtgcccttctgactggttgcgcggcgtggcctgcgcgctcatggtgatggtgagcggtcaggtcatggctgctgatggtgccgaccaggcggcgaagtcggtgcgcagcttctggcgcgcgggccagctctacgagctgtgtaccagcaaggccgacaacgagcgtgcgcactgtgaggggttcatcaccggcctggccagcaccttgcaggatgcgcagctctcgcgtgtgccgatctgcattcccaagggcacgagcagccaggacgtggtgagcaaagtcgtctggtacttgcgagagaaggccgacgccgatgacttgaagctcccggccgcaaacctgctggggccggtgttggccttcctctacaactgcacgccgggccagccgcccaagttcacgcagccccgataa

SEQ ID NO: 360803 - DNA, 585 bp, Pseudomonas aeruginosa
atgccgaagcagccgccacccttcttcgcgcagatgcgcgcgagcgagcacgctgagtcgatctactacgccgacctcttccgcatcaatggcaaggtctgggcgctgacgggaacgggcaagagcgatgccggtagagcggcaacggccaagaggcgcgatgacgacctggcccgcgactccgttgccttcgttcgcgacggggcgatgttgatgggccgctatgaccctggcgcgctcaatcctgacatgctgaacgacctccacgcgctgcatccgttggtcgccgtggtctattgcctctcggagacagagactgccaaggcgttcgccaatcgcccgcttgagctggtcgacgtagaccctgaaaccgtgggactcatgctcagcaagagcgtctatcccccgccgatggtgcagcactttttcgacgacaacgagctggcccacctgtacaacgacgagcgccgcctgcggcactggctcaagctcacggcgggcacttccggcgtgcggtggctgctggccccttggatgcccactgcggccgacaagggagcgctctacgcctcattggtggtctga

SEQ ID NO: 360804 - DNA, 918 bp, Pseudomonas aeruginosa
atgagcaatctacccccacgctggacaacagccgaactcaccgaagcagcagcaatatcgtccaaccagttccgggctgagcgcctggcgtcgagcgacgcctgggagcagcagtacacgcaggcgcgtgccaagttcgagaaactgttcgaggtgctgggcaacctcgcgcccggtggcgtgaacgacacccagctcgcagcggcctacaccaagggcctcggtgaggccttccgctacttggccgggccgccgatctccgacgacgacttgcaggtcctcgcggatgtcgaatcgatcaccccgagcgtgctgtcgaagaacaacgattcgctgcgcaaggtgttccaggtcatctcgactgtcattgatccgcaccgctttccgtggatcgccaacggcgcggccccgaccgagcagcagcgcgaagctgccttgctggcgtcgtccgttctgctggccgcacagcgcattgcgaccgagcggcgcaacgatggcaagaccacccaggagtccaaggtcaaggactacctgacgagccttggcttcacaggcgtgccgcccgtcaccatcacgaccatcgtcaaaggcccagggccgatgcagttctgtgctgagtgccaacttggcgagcgcaaggcggatgtggtcgtgcggctgcatgacacgcggctgctggccatcgaatgcaaggtgtcgaacagcgcgacgaacagcgtcaagcgcctcaacaacgatgccgccgtgaaggccgaatactggctcaagcagttcggcacggctcaggtggttcctgctgccgcgctcgctggtgtctacaaggtgctcaacctggagcaggctcagacgcggggactcgccttgttctggagccacgacctggacgcccttggtgctttcatcgaaagcacgaggtga

SEQ ID NO: 360805 - DNA, 1629 bp, Pseudomonas aeruginosa
atggcctcgaaccgtgtccctcgcaagctgcttgccgctggcatcggcagtgagtcggagctggtgtccctctgcgttgccctgatcggtggcaccaagggcttgtctcaagccgagcgcgctttggccgccaagaccggctcgcatgtgctcccggccgccgtggtggagacgacccggcgcgcgatcgccaaggggcttgatccgctgggcgatgcgtttgccgtggtgcgctcagcgctggcccggcgtagtgccggtgcggtctacacccctgcccccatcgtcaagtcgatgatgacttggctggccagccaaggtgcgcccgctcggatcgttgacccaggagcggggtcgggtcgcttcatcctggccgccggcgaggccttcccgaaagcgcagcttgtcgcagtggaacttgatccactcgcagcgctgatgcttcgcgcgaatctggctgttcgtggctggtcggggcgcgcgactgtccacgtcaaggactaccgcgagctgacgctgccgcgatgcaatggaacgacagccttcatcggcaatccgccctatgtgcggcaccacgacatcgccgaggcctggaaggcgtggtactccgagcgcttcgcctcgatggggattcgcgcaagcgccctggcgggcctgcacttgcacttcttcctgcaaacgcgcttgttggcaaagcccggtgacgttggcgcattcatcacctcgtctgagtggatggatgtcaactacggttccgccctgcggcgactgcttttggatgagctgggcggcattgcgctgcatgtgctggagcccaaggtcgaagcattcccaggcactgcgacgacggccgccatcacctgcttccgggtcggcgaaacagtcgagcccgtcagggtgcgttcggtcgacgagctggctcacctcaatgggcttgccaagggcgtcgacgtgccgcgtgctcaactccacagcgcgccccgctggtcgatcatcgtgcgccctacccttccggccgccgagggcgacatggagctgggcgagctgttccgtgtgcatcgtggccaggtgacaggcgcgaatggaatctggatcgcgggcgagcatgctgacgggctccctgaacgggtcaagattccctctgtcaccaaggccaaggacttgctccaggccggtgatcgcttggcatcggcggcagcgctgcgccgtgtggtcgacttgccgcccgaactggatgacttcacggccgccgagcggaagcgcatccagtcgttcctctcctgggcgcgtgctcagggcgtgcatgagggctacatcgcccagcaccgcaaggcatggtggtcggtgggcctgaaagacccggcaccgatcctttgcacctacatggccaggcgtccgcctcagttcacgttgaacgattgcggcgcacggcatatcaacgtggcccacgggctctatccgcgccaagcacttcccgctgatgtccttgctgggctggtaagctggctgaataacaacacgacacaggggagtgggcgtacctatgcgggcggactgacgaagttcgagcctcgcgaggtcgagcggttgcgcatccccagcgtcgaccgactacgagcccttgcatga

SEQ ID NO: 360806 - DNA, 1524 bp, Pseudomonas aeruginosa
gtgccgcagctcatcgcactccggcgcgagcccgtcgtgcgcgcaccggcgttcgcagcggcaccgctcacgccgcgctacgcgcgccacgcacccgagcgcacgttgctgtacgcgctggtgcaggcgcattacccggacttcctcgaacggcttgcgcaagaggatcgcgccgtgcccgagtatgtgcgcgaggagctcgacgagttcctgcgctgcggcgtactcgagcacggattcctgcgcgtggcctgcgagcactgccatgcggaacgattggtggcgttctcgtgcaagaagcgcggcttctgcccgagctgcggcgcgcggcgcatggccgagagcgcgaaacacctcgtcgaagacgtgttcggcccgcgcccggtgcggcaatgggtgctgagcgtcccctatcccttgcgcttcctgttcgccagcaagcccgatgccatcggcccggtgctgggcatcgtgcagcgggtgattgcgggctggcttgcggatcaagcgggtgtcgagcgcagcagcgcgcaatgcggtgcggtgacgctgatccagcgcttcggcagcgcgctcaacctcaatgtgcacttccacatgctgtggcttgatggcgtgtacgcgtcgggtgccggcacgccgcgcctgcagcgcgcccgcgcgcccacgtccgcgcagttgaccgcgctggccggaacgattgcccgtcgcgtgtgccggcacctgatgcgcaagggttggctcgaagaggagggtgaggccgccttcctggcggacagcgccgtaggtgacgagggtatggacgcgctgcggatgcattcgattacctaccgcatcgccaccggtcacgacgccgggcgcagggttgtcacgctgcaaacgctgccaggggacgacggcatgctggaaggcgaggcgggcaaggttggcggcttctcgctgcacgcgggtgttgcggccgaagcacatgagggccgcaagctcgaacgcctgtgccgctacatcacgcgaccggcgatcagcgagcagcggctatcgatctcgccgcacggccgggtgcgctaccagctcaagacgccgtggaagaacggcaccacgcatgtcgagttcgagccggtggagttcatcgcgaaactggcggcccttgtcccgccaccgcgtgtgcacctgacccggttccacggcgtgttcgcaccgaacgcgaactggcgcgcgcagctgaccccatcggggcgcggcaagcggcctgccaccgatacagagccgaaggtcgacgaccacgaccgccgcacgcccgacgaacgtcgccgtgcgatgacctgggcccaacgcctcaagcgcgtgttcggcatcgacgtgagcacctgcgtccactgcggtggcgccgtgcggatcgtcgccagcatcgaagaaccgcacgccatccgggccatccttgcgcacttcgaaaagcatggcgtgcgggagccggcgtactaccgcccagtgccgcgcgggccaccggtcgcggtcgaggctgcgtga

SEQ ID NO: 360807 - DNA, 303 bp, Pseudomonas aeruginosa
atggaagccccgctgcgcgagatcgtcaccaatgccggtgaagagccctcggtggtgctgaaccgcgtggccgaaggatccggtgcgttcggctacaacgccgccaacggcgagttcggcgacatgatcgagttcggcatcctggacccgaccaaggtcacccgcaccgcgctgcagaacgcggcctcgatcgccggcctgatgatcaccaccgaagcgatggtggccgaggccccgaagaaggacgagccggccatgcctgccggtggtggtatgggcggcatgggcggcatggatttctga

SEQ ID NO: 360808 - DNA, 831 bp, Pseudomonas aeruginosa
atgaactcacctaaatcgagagccctgcttggattcatgggcgcgttttgtttgttgctcgttgcgggagcgccattgtctgcaaaaagttcggatcatgtcgacttgccctacaatctaacggcgaccaagattgattcggacgttttcgtcgtcacagaccgcgatttctattcttcgaatgtcttagtagcgaaaatgcttgatgggaccgttgtcattgtctcttcgccgtttgaaaatctgggtacgcaaacgcttatggattgggtggctaagactatgaagccgaagaaagtagtagccatcaatacgcactttcatttggacggcacgggtggaaatgaaatttacaagaagatgggcgcggagacgtggtcgagcgatctgacaaagcagttgcgacttgaggaaaacaagaaagaccggataaaagcagctgagttctataaaaacgaggatctgaagcgaaggattctgagttcccatcctgttccagcggataatgtttttgatttgaaacaaggcaaggtcttctcgttttctaatgagctggttgaggtttcatttccaggaccggctcactcgcccgataatgtcgtcgtatattttcccaagaagaaactgctgtttggcggctgcatgataaagccgaaggaacttggttatctgggagatgccaatgtgaaggcatggcccgattcagctcggcggctaaaaaagtttgatgcgaaaattgttatacctggacacggcgaatggggcggaccggagatggttaacaagacgatcaaggtcgcggaaaaggccgttggcgaaatgagactgtag

SEQ ID NO: 360809 - DNA, 1524 bp, Pseudomonas aeruginosa
gtgccgcagctcatcgcactccggcgcgagcccgtcgtgcgcgcaccggcgttcgcagcggcaccgctcacgccgcgctacgcgcgccacgcacccgagcgcacgttgctgtacgcgctggtgcaggcgcattacccggacttcctcgaacggcttgcgcaagaggatcgcgccgtgcccgagtatgtgcgcgaggagctcgacgagttcctgcgctgcggcgtactcgagcacggattcctgcgcgtggcctgcgagcactgccatgcggaacgattggtggcgttctcgtgcaagaagcgcggcttctgcccgagctgcggcgcgcggcgcatggccgagagcgcgaaacacctcgtcgaagacgtgttcggcccgcgcccggtgcggcaatgggtgctgagcgtcccctatcccttgcgcttcctgttcgccagcaagcccgatgccatcggcccggtgctgggcatcgtgcagcgggtgattgcgggctggcttgcggatcaagcgggtgtcgagcgcagcagcgcgcaatgcggtgcggtgacgctgatccagcgcttcggcagcgcgctcaacctcaatgtgcacttccacatgctgtggcttgatggcgtgtacgcgtcgggtgccggcacgccgcgcctgcagcgcgcccgcgcgcccacgtccgcgcagttgaccgcgctggccggaacgattgcccgtcgcgtgtgccggcacctgatgcgcaagggttggctcgaagaggagggtgaggccgccttcctggcggacagcgccgtaggtgacgagggtatggacgcgctgcggatgcattcgattacctaccgcatcgccaccggtcacgacgccgggcgcagggttgtcacgctgcaaacgctgccaggggacgacggcatgctggaaggcgaggcgggcaaggttggcggcttctcgctgcacgcgggtgttgcggccgaagcacatgagggccgcaagctcgaacgcctgtgccgctacatcacgcgaccggcgatcagcgagcagcggctatcgatctcgccgcacggccgggtgcgctaccagctcaagacgccgtggaagaacggcaccacgcatgtcgagttcgagccggtggagttcatcgcgaaactggcggcccttgtcccgccaccgcgtgtgcacctgacccggttccacggcgtgttcgcaccgaacgcgaactggcgcgcgcagctgaccccatcggggcgcggcaagcggcctgccaccgatacagagccgaaggtcgacgaccacgaccgccgcacgcccgacgaacgtcgccgtgcgatgacctgggcgcaacgcctcaagcgcgtgttcggcatcgacgtgagcacctgcgtccactgcggtggcgccgtgcggatcgtcgccagcatcgaagaaccgcacgccatccgggccatccttgcgcacttcgaaaagcatggcgtgcgggagccggcgtactaccgcccagtgccgcgcgggccaccggtcgcggtcgaggctgcgtga

SEQ ID NO: 360810 - DNA, 537 bp, Pseudomonas aeruginosa
gtggccaagctggccggcggcgttgcggtgatcaaggtcggcgcggcgacggaagtggagatgaaggaaaagaaggcgcgcgtcgaagacgcactgcacgccacccgcgctgcggtggaagaaggcattgtccccggcggtggcgtcgccctgatccgtgccaaggccgcgatcgcgggcctcaagggtgccaacgaggaccagaaccacggcatccagatcgccctgcgcgccatggaagccccgctgcgcgagatcgtcaccaatgccggtgaagagccctcggtggtgctgaaccgcgtggccgaaggatccggtgcgttcggctacaacgccgccaacggcgaattcggcgacatgatcgagttcggcatcctggatccgaccaaggtgacgcgcaccgcgctgcagaacgcggcctcgatcgccggcctgatgatcaccaccgaagcgatggtggccgaggccccgaagaaggacgagccggcgatgccgccgggcggtggcatgggcggcatgggcggcatggatttctga

SEQ ID NO: 360811 - DNA, 1188 bp, Pseudomonas aeruginosa
atgtctgataaaaatctgcccgcatgggcgtactcattgccatcaaccttaatgttgatggttccgtttgacattcttgcctcgctggcaatggatgtgtatctgccagtagttccgcagatgccatcagagctgtctacaactacagctctgattcagttgactctgagtagctatatcctagtaataggactaggccagctcatttttgggccgctatccgatcggattggccggcgctccgttgtgctcggaggagcaacgctttttgctattgcatctttcgcgcttgccgctacaagcaatggtgcagtattccttgcttttcgcatacttcaagccttgggcgcgtcggcagcattggtaggcacatttgccactgttcgtgatgtctatgccgacaaacccgaaggcgccaccatctatggcctctttggctccatcctggcattcgtacctgcattggggccgatccttggtgcaatagttgcactcgcattcggatggagggcgatctttgccatgcttggcgtgatggcagttctggcccttctgcatgcatggttccgatggcgggagacttgcccgagcaatggacagcggcgaagtcctgccatttcttccatcttgagcaatcggccattttgggtctataccattggcttcagcacggctatgggggcttttttcgctttcttctctatttctcccatggtgctaattgatggagctggatggggcccggtctccttcagcctgtcctttgcctcggtcgcactggtgatgatcatcactacacgctttattggcaaagtcgtaaagaaatgggatgtatcgggttgttttgctcgtggcgctctcaccatggccgcgggtgcagtcgtcctggccgctctatccatctcgatgaggccaggtttcataagtttcgtgatgccgatgtggctaattgccattggcattgttctcatggtttccgtcacggcaaatggagcgcttcgtgatttcggagacgtagcgggtaccgctgttgcgatgtactactgcattcagagtttgattgtcagcggcttgggtacgctggcggtcttggtgctagatggttccacggcttggcctttagtagcttatgtcctcgctatgtgtgcggccagcatggtcggatatgcggctttgaagcagaaatga

SEQ ID NO: 360812 - DNA, 231 bp, Pseudomonas aeruginosa
gtgtgctgggataacgctgtggcggaatcgttcttttccaccctgaaactgcatttactctacgagcggaaacagttcgtttccaaactcgaagcgcgaatcagcgtaggcgaatggatcgaggcctactacaaccgccgacgcatccacaccagcaccgaagaaatccctaagaaagcaatggacgacttcctgaccacacctgtgactaccgccgcgcaagcggcctaa

SEQ ID NO: 360813 - DNA, 288 bp, Pseudomonas aeruginosa
atgccaaaggcttatccaccacagttcaagcagcaatgcgttgatgcagtgctagtgctaggaaagactcgggaagaagtggcccgggaatatgaggtctcagcatcagcgttaggccgctgggtagctgctgcacaaggcacgcaaggtaccggctccggctcgcacctacgcaaagccgatcccaactcgcaggattcggccgagttatctaaacgagttcgtgaactggaactggagaacgagtttttaaaaaaagcgaccgccttcttcgccaagggcatgtag

SEQ ID NO: 360814 - DNA, 228 bp, Pseudomonas aeruginosa
atgaaagcgcctctgcggtttctgctgggctgggttgtcttcatcgccctgttcgcgatgttgacgcccattgtggccgccattttcgagttctgcgcggcgttcccggtgctggccatggtgattgccgtctgcgccctggtggcgttcctggcgttgttcttcgcgttcttccggcgcttcgtgcgctggctcgacgagccgaggagggcgcgcagcgatggataa

SEQ ID NO: 360815 - DNA, 822 bp, Pseudomonas aeruginosa; identical to SEQ ID NO: 340458

SEQ ID NO: 360816 - DNA, 1680 bp, Pseudomonas aeruginosa; identical to SEQ ID NO: 10332

SEQ ID NO: 360817 - DNA, 993 bp, Pseudomonas aeruginosa; identical to SEQ ID NO: 96021

SEQ ID NO: 360818 - DNA, 1341 bp, Pseudomonas aeruginosa; identical to SEQ ID NO: 328067

SEQ ID NO: 360819 - DNA, 780 bp, Pseudomonas aeruginosa; identical to SEQ ID NO: 165881

SEQ ID NO: 360820 - DNA, 123 bp, Pseudomonas aeruginosa
atgcagaacaagatcgtgaaagaatttatgattatcttgatgaaagaaatccaattgctgcaattgaattcaaacatcgacccacggcgtaacgcgcttgctgcttggatgcccgaggcatag

SEQ ID NO: 360821 - DNA, 357 bp, Pseudomonas aeruginosa
atgctgaaattcaccctccagaaactgtccaccctctgccggcgcctggcagccatctctttggcattcccaggtgtcgccttggctgcactccccaaacccgaggcacctacccgtggggagggctcggggatcatgcaaaccatccagaacttcggctatgacggagcaatgctcctcgcgctactcatctgcgtggctgtctttctgggagtctcctggcatacctacggcacctatcacgccatccatgatgggaagaagaagtggtcggatctcggggcaggcgtggccgtaggcatcggcctgctgatcttgatcatttatctcgtcaccaaagccaccaccatcatgtaa

SEQ ID NO: 360822 - DNA, 357 bp, Pseudomonas aeruginosa; identical to SEQ ID NO: 351483

SEQ ID NO: 360823 - DNA, 567 bp, Pseudomonas aeruginosa
atgaagaatattcaagagcgccgttcggcgctgacgggatcggcttgcccggaaaaagccaacgacacttcgcaccagtaccagagcgcgagccatgacggctacgtcgcgccgcagcgcacctgtcgtcatgtcggcgaccgccagtgcatccaggtcggcgacttcggcacagcggtagccggtgagcgtggtcatgccatggcgggcgaaagtggattcgccctggccggtgatcgtggtacggcgcgagcgggggacttcggcaccgccatggtcggcgagttcggccaggcggtcgctggggatggtggtctggcttccactagtgacttcggtactgctcaggcagggttccagggtattgccaggggcggctatcgcgcttccgtggcggcgggaatgctgggcgagattcaccttatccactgggacagcgctgggaggcgctggcgcaccgctgtcggctacatcggtgaggacggtttgctggcggacaccttctacaccctcgacagcagccaccagttcgtcccggccaggccggaccaggaggtggcccgatga

SEQ ID NO: 360824 - DNA, 570 bp, Pseudomonas aeruginosa
atggccgctcagaaggtcggtccggattaccacttgtatgtgttgaatcacgcttattcggtgccctggcggctggtgggcgagcgcgtggagattcgcgtcagccccttgaccgtcgccttctttcacctgagcaagcgggtggccctgcaccctcgcgacgactcgcccggcggcacgacgactaaccctaatcaccggcccgaagcccaccaagcctatgcctctcggaccgcgcaccactacctcgaatgggcctatggtcttggtgcggccaccgcggaagtcgtgcaagcccaatttcatggcaagccggactactccattgcaggcagcaaggcctgtcagcagctgcagcacatggccaagcgcttcggcaacgccagggtcgaagcggcttgcaccagggccttggctgtccaatcgccgacgatcaagagcctgcgctccatcctgcagcatcgtcttgatgaggtgcaccggcccgcgcataccgtagccgctctgattccgccccacgccaatgtgcgcggctccgattattacgcgggggagagccgccatgaatga

SEQ ID NO: 360825 - DNA, 750 bp, Pseudomonas aeruginosa
atgaatgagcagcagactctcgagcaactgaaagcactcaagctgctaggtatggcgaacgccatggcggtgcagctggaaagccccaacattcagagcctccccttcaatgatcgcctggccctactggtcgaggccgaatgccatgagcgtgacaatcgccgacagcaacgtctgatgacgcaggcgaagctgaagatacgcactgcctgcctcgaagacatcgacttcaggacgcgccgtggtctggacaagcctcaacttatgtcactggggcagtgccagtggattgggcgccaccagcacctgctgattactggtcctaccggtgtgggcaaaacttggctcgcctgcgcttttggcatgcatgccattcgccgcggacagtccgttgcgtaccaccgcgtcagccggctgctggaggaaaccgaaattgctcgggccgacggctcactgtctagccttcgcagcaagctcgcgaaatgtcagctgttgatccttgatgactggggcatgtcgccgctcaccgatatcggccggcaggacctgctggaattcgtcgatgatcgtacgggatctggtgccatcttgattgcctcccagctgcctgtggccaagtggtacgagtacatcaacgagccgaccctggcggatgccatcctggatcgcatcgttcaccgcgcgcacaagatcgagatgcacggcgactccatgcgcaagaagcgcggcctcaacgatggggaggactag

SEQ ID NO: 360826 - DNA, 855 bp, Pseudomonas aeruginosa
atgtatgaaccccatcagatccaacatcaggatgtgctggtccatcagccaatcacccgctgcgcttacaacgacggcatggcggataacctggtggtcaatcaggtgctcgattactactcggagaccttgcgcagccatacgaaggccctggcctatctgcagggccggggcatctgccagcctgatcttctggcgcagttccggcttggttttgcggaccgttccttgggagtgcagctgcgcacgctgagccacttagaggaggagacggtcaggggtgcgttgatgcgtgtcggtctgctgaggggctctgggcatgagctgtttcgtggctcgctggtgtttccgatgctcgatcaggacgggaacatcctggggtgctatggacgtcggatcacgcccaagctgaccgcacactcggcctatcacgtgcactggcacctcgagcacaacggcttcttcaaccagaagtcgctgtttgaatttcccgagttgattctctgcaaaagcccagttgaagcgctgacctggtggtcccgcggatataccaatgtggccgccatcatgggtttttctagcttcgacgaagagcacctgagcatcctgcagagcagtctggtcaggctgatctacatcgccttcggtacttctcgccccgagctggatgaggtgcaccggatcgcctatctgcttgcgagcagtggcatcaaggtgcgcttggtcttgttccctcagggcttggatgggaaccgctttgtctcgacggttagcgatgctgacaaggctctctcgctagttctcaaggacgcgttggtgttgccagaaaacacgggaggtgatcatggctgctga

SEQ ID NO: 360827 - DNA, 978 bp, Pseudomonas aeruginosa
atggctgctgagacttatccgaccagcctgtcagcgtgcgtacccttctacatagaggattgcttagcgcgtggacagagtgatgcaacggccaacaccaagacagcactgctgcagatgttcgtgaagtggagcgagcaccaaggcatcagcgaggtgacacaggtcgacctagctcttctggagcgctaccgcatatacctgcaccggtaccgcaagcatcaagacaatgcacccttggagctctcaacgcagcgcatgcgattgatggccgtgacaggcctgctcaagcgtttgcactactacggcattgtgctttcggacgactacgccaagtttccgttgcccaaggttcatcgccagatacccaagcagattcccgacgaagacgagatcgatccgatcctgcaccagacactcacgaaaggtcgtatgggattgcgggatcgcgccatcctggaggtttactacgccacgggaatacgccgggccgagctggccgggctggatatccgggacgtggactttaaacaccagatggtcactgtgcgcaaagggaaaggtggcgatgatcgacgggttcccattgcgcagcgagcactcgattgggtggagaaatacctgaacgagctccgcggccgtttggcgacgatggccagcggcgaggctctcttcctgggcgagacgggcaaacgcatccaggacagcaaactgaccacgctggtgggtggctacatccggcgctccgggatcggcaaaagtggctcctgccacgcgcttcgtcacgcgacggcgacgcacatgctgcgccatggtgctgatattcgttatgtgcaggagatgctggggcatcagtgcatcgagagtacccagatctacacccatgtgacggccacggatctgcagggcgtgtacaacaggacgcacccggcagctcagggctctggccgcttaaagcgattaaggaggaagcgttga

SEQ ID NO: 360828 - DNA, 402 bp, Pseudomonas aeruginosa
atgaaatgcccatcttgcgcagcggcgaaactggtgcgcgacacccgcgacctgccgtacgcctacaagaacgagtcgaccaccattccggcagtaaccggcgacttctgtccggcctgtggagaggcacttctggatgcaggtgagtcggcacgcgtcagcgcggcgatgctggggtttaacaagcaggtgaatgcctcgatcgtcgacccgagcttcatcgccaacgtccgcaagaagctcgctcttgatcagcgagaggcggccgagattttcggcggcggcgtcaatgcgttctcgcgctacgagaacggtaaaaccaagccgccgctggccctggtgaagctgctcaaattgctcgatcgccaccccgaactgctgaacgaaatcagaacggcctag

SEQ ID NO: 360829 - DNA, 450 bp, Pseudomonas aeruginosa; identical to SEQ ID NO: 334228

SEQ ID NO: 360830 - DNA, 258 bp, Pseudomonas aeruginosa
atgtacttggcgaccatgtgcgagcgtggcaggaccttttccgagcggtccgaggattcggtctggaacaggcgcatgccgccgatccgcagcatcggcaggatcgccacggccatggcgatgaagccgatgccgcccagccagtgcagcagcgagcgccagatgaggatgcccggggacatgtcgtccagcccgctgagcacggtggagccggtggcggtgatccccgacatgctttcgaagaaggcatcggtgtag

SEQ ID NO: 360831 - DNA, 1056 bp, Pseudomonas aeruginosa
gtgcagttcgtcgagcagcgactcgaactcgtcgtcgctgatctcatcgccgcccgcggcggccggcgccttgccctgctccgccggcgcagccgctggagccgcggcagccggtgcggcgggtgtgccggcggcttccgggacatcgccgaacttgcccttgccgtgcagttcgtcgagcagcgcctcgaactcgtcgtcgctgatatcgtcaccagcggcagccgcggccggctcgaccgcctcggcggggacttgcgcaggctcggccgagaccgccggcgggacgaacttgcccttgccgtgcaactggtcgagcaacgcctcgaactcggcgtcgctgatctcgtcgccagcgggagccgcgggcgcttctgcaacggcggaggccggcgcttcgtcgccctggagagcatccagcaactgctcgaactcgtcgtcggtgatatcgctggagacactctgcgcgggcgcttccggcggcgccgcaggctcggctggcggaacggccgccggcggcgcttgcacaggttccgcaggcgcggcgccctcaggctcggccaggcgggcaagggccgccagcagctcgggcgtcgccggggtcggttcggactgctcgcgcacctggtcgaacatcgcgttgaccgtatccagcgcctgcagcaccacatccatcagttcggagctgacgcgccgctcgcccttgcgcaggatatcgaagacgttttccgcaatgtggcagcattccaccagcgcgttcagctggaggaagccggcaccgcccttgaccgtatggaacccacggaaaatggcattgagcaggtccatgtcgtccggccggctctccagctcgaccagttgctcggacaattgctcgagaatctcgccggcctcaaccaggaagtcctggaggatttcttcatcggcgtcgaagctcattcggctgctcccagagacgtgttactcgaaaggatcggcaggaccgctgtcctgccggaaataccggcccggctttccggaccgacttcagcccgcccgccgggatcaccggcatga

SEQ ID NO: 360832 - DNA, 129 bp, Pseudomonas aeruginosa
atgaccttgcggcaccaattgctctaccttcagcaatggccggaacggctcgaccgattgcccctgctgcagggggtcaatcagtgtcaactctacttgacctactggcaaagcctgcagcaaccgtaa

SEQ ID NO: 360833 - DNA, 540 bp, Pseudomonas aeruginosa; identical to SEQ ID NO: 334809

SEQ ID NO: 360834 - DNA, 816 bp, Pseudomonas aeruginosa
atgctcaagtctgtaatagccattcgcagcaagtactatgtgagcgtactgctccaaaggctgaaaattgcgagggtttcgcaaatcacccctgcgcttgcagaggtggcaggtcatgggaatacaactgattactctgcatttcgtgctgacttctatcggtataaagccggtgaaaatataaaaaatgacagccttttaagggaagtcgatagactacttcctggcacggctagagttgtcagtcaccccctatggttgctgctgtcgaatcgcggagccggggagctagagctgatagagtatgctcagaggcttgagccaagtcttagccagtaccttataaaatatgatgaatgcacgcgcgctatagccttcagaaggctttccaagaatcatggctgcttcaagcctggatcaaaatttctgcgaaaaattgatcggcgcggactggatgaactcgccgctttgctgattggaataaagtctcatgaattacgttgcgaatactgcgtgtcctggcctttaagagagcttgtaatgcggttttttattgagattagcgtgatgcctgagtttaatagcgtcatcgaggatctatataaagaagcgcatggggtgcttgcggagttctcatatgtaggaaagtacgatggggaagtttgtttggcgtttgctcaacaatgggctagacaggagcttgggcatatgctcgacattattaaaaatgtttcatccggtcgcgtaagtcgtggaagtaaatatagcgagatactgcagtgtgatcgggctgtcggctgcacatctgacgactga

SEQ ID NO: 360835 - DNA, 387 bp, Pseudomonas aeruginosa
atgcaaaagctctatgatcggctaggtttgccaaaagctcattatcggatgcatcaggcggtgctggccggacttccggttacgctggctgcggatctggcgcatgaactagggctgccccgcacgcaggtcgcaaggtgggtgggaacctcgtttcgacactccgtgatgtctgcacgggcaggcgaggtgttttgtcgtctcgtcgagaccttggacgtcctcttggtactccatgagggggacctcgatggcgcgcttcgctggctgacctcaccggttctgacgctagcctccgagcggccgattgatctgctcgttactgagccgggccgcagggctgtactgcaagtgattcacgcgctcgagcacggcttgccggtgtag

SEQ ID NO: 360836 - DNA, 468 bp, Pseudomonas aeruginosa
atgactaccgcagaactcaaccgcaccatgctccccgatgagaaggagatcgctgctgccgtggagtcacgccgtcagctcgctgccttcctatcgacaaagctggaaactcagcgcatcgagatcctggacgatgagcaacgctcccacacggtccagttgccagcctttgcgctacgcctgctcgatgaaattttgagcgagctggcgatggggaacgctgtaaaagtcgtaccgattcatgcagagctgaccacccaggaaggagcagacctgctcaatgtctcgcggccgcacctggtaaagctgctggatgagaacgtcattccacataccaaggtggggcgtcatcgccgggtgaaattcgccgatctgatggactacaaacagcgcaggactgccgaaagccgccaagctatggatgagctcgcagcacaagcccaagagctggggatggggtacgaatga

SEQ ID NO: 360837 - DNA, 1119 bp, Pseudomonas aeruginosa
atggatgtaaaagtaaactttgcagttgttcatgaacttaaaaaggaacaacacaaagacattcaagattccgatattagaaagatcgtactgaagaaggataagccagctgtaagcaagctgatcgatggcgccacttccatatacgggaagaaaaataatgctgcgcattatggtattttcgcgaaaaagaccgctagcgacttccccaaagattttgatgcctattcaaaaatagtagtttctgaaaagtcctttctcgaaataacagagtcagcgatgggggagctgcatactgcagctaaaaaagcaccggcctcgtcgggaggctacatcctttttgtggactatgagaatccacagggtcgcttcttgctgattgcgatgctcaagaaaagagacggcctcaggctggatgaaaacttagagcccgaggagttgattgagctggacttgaatagtctgtatcacgctgctcgcattaatttcaacaaatatcaagagcacagtgctgccgacgaggaggctaggcaagaactgaattacctaagcttcctgagtcaaagtgcagctcgctcagcggctggatactttgtcacggcgctcggctgctctgtaggaacagcttcggctgctgcgacaaagaatctaatcaccgagagtgttaaattctttagagaccgacctaatcttcgtgataagcgcattgctttcaaagatgaggttttgcggtatttagagcgccaaagagactctggtcaatccgtgaagttgtcagaggttgaggcgattgcccgccagttcttccctgctgagcttgatgggcaagcagacgatttagctaatgagttcactgggcaccttaacagtgaagcagtgggggttcccgttgagtttcctctcaataaggttgtgctcgacaagtacacgcatgttgtatacaaggccgacaattggcagcttaaatttgaccggaactctcttggcgagggggttgatgcggaaattcgcttcatcgagcaagatcgcaagctgataatcaacaatctttctgaagaggctattgaggtcattcgtcaggcaatagcggataagaaagatatggttgaagttgagtaa

SEQ ID NO: 360838 - DNA, 1332 bp, Pseudomonas aeruginosa
atggcgaatgtcgtcgagtttgctcacgcataccggctgctggggcgccctgcgctcacaacaaacaactcgttctcatacaagatttctgctttcaggggcgaagtaagcgaggctgtgcaaaagctgagggactccaagaccggacggtttgatgaactgctaatcgatggggtagacgtagatcctaaaaaattggacccttcccaaggctggacagatatagagttcagcttcctgctggatacatctggcactgtcccggtattcaggaatttcgaccaactgatggcgcgctcgaaaagcttcgtgcgcgagcctcttcctcctcatatttatcttattgatgatgatgtcctatcatctgaagagcctgccgatcgccggattaatgcgctccgagctatttgtcagctcattgtatacttggcagatctggctcattttcatgatgagaaagagctgagtgatgaatacaagctcgtttttgtggcagaggattctgccaagggggagcgcgctatcacactgtatccatatttagatcaggacttaattgcttgtgacgtgggtacggaattggttgatagcctgcaaggggggaatctagatgaaaaccctcatctcctgaaagaacgctcaattttccgagccagtctgatcgagtacttgtcgggttatgttaacggcaaggagcgcttcaaggcccttataactacctgggcgcagtttttggcgctctacgaaaataatctttcaacataccttagcggattctcatttcataaagccaagcaagaggtggccacagcacagctagctatagcggatcaaatgtcgaaagttgttggtgatatgagcggcaagatccttagcgtgcctatttccctggctgcaaccattgcaatttctaaagcggataatgtactagagagatcaatattggtgctggggatagctgtaacctctgcgctgttggctgagactctagccgctcagaggctccagtatgagcgagttaggcattctcgcacgatgatgttttccgcccaccaacaaaagatccatcactatccaaaagatctccgtgattatctcagtgaagcaatagctgggctccgtgctaatgagcgaaagctaaggctatcgctgcgatcgcttagatttatctcttggacgcctgcgctcatggcaactacgctacacgcatacatctatcgcgaagacttgcaagagacagcgattagagtctacggctttctagaaggcagaatgtggtgtatttacgaaagattaatcgatgctcttatcatgatgcagagctttctatag

SEQ ID NO: 360839 - DNA, 813 bp, Pseudomonas aeruginosa
atgctaacggcgattgagctttctaaattaattgatcgagagttggagcatcggcttgagtgcctagagtttgtcgattggcatgaagaccatatctctcttgttctagtagatgctcttcgtcaaactcttcgcaacacaaatcgcattgttgtgcatcccactgggtggggtgaggaggagcacttcttctttgacgttgaagcgtataaggcgactggcgcccttgagaggagtcacggagatatcgccatagttgttcaggacttagacctaggtagagtcggcacggggttctacgaggctaaagcagaaggaccggatggcgggtatcctgcattcaacatgcggcagctcagaaggctaagctcttcaacgccccagcttgctctgctgttatatgagcgggtcggaaaggctgtctctaacgacgagtactcgttctgcagccggcaatatggacggtcccaccccatgagtaggttgcgagttattggggcgagtattgtaaaaaaatattcacgcccagaatctatacctgatttgcctcgctcgtttgggcatcactttgttagtcgatatctcacggggcgtgatttagactacgcgcgcgatccgcttttgacgatccagcgatggttaaaatttacacgaagagcatcgcccgtcgtagttagcgtaagaatttctagggctccactgccgcctgccgatccgatgctcataccattcgatgagccagggctggctttgataacccccgccgttgatctgaagtaccttctagaacttcgtccaagggtcgagagctaa

SEQ ID NO: 360840 - DNA, 639 bp, Pseudomonas aeruginosa
atgagatttgacgttacgaataatataatcagggatgaattggctaaggttggagttacagtatctagaataaagtccggggaggttttttataccgggttctatcgaagcggtgaggaaacagataatcatgctttcttggagagcagatacgcaatttggctgtcgaggtatctaccatatgcaggcgaatatagttatagacaaagctcttacccgataaagaaaattgccaagataaaaatcacagaagaaattttagtcatggaatttcctctgaatttccatcctgccgactgctttttcgaatggaatatgcagggcgggcgatatgtcgtggattatatgtcgcataagccgggcatgatcattgacggttatcagccggatcatcacttcgataagcacttctacagcattgtgtcgcttcttggtattcaagaaagattatctggattcataaggcgcgccctgcctggggaaagaagatttgcggctggggaaatcgtagagttcgccctgaccgactataaatgcaaggaaattgtggcgatagctgatgcgccaaaagagaagtctgacttcatggcgcttgtagaggagcacggggacagtttagagagcataattttcggatag

SEQ ID NO: 360841 - DNA, 897 bp, Pseudomonas aeruginosa
  misc_feature (800)..(809): n is a, c, g, or t
atgagcaaacgtatcgtcgtcaccggcatgggcgcggtcagcccgctgggctgcggagtcgaacccatatggcaacgcctgctggccgggcaatcgggcatcgccacgctcccagcggagctgatcggcgacctgcccatcagcatcggcggccaggtccccgaccgtgtccaggacccgcaggccggcttcgatcccgacctgctgctggccgccaaggaacaacgcaagatggaccgcttcatcctcttcgccctggccgccgcgcaagaggccctggcgcaggccggctgggcgccgcagagcgccgaggcgcaggagcgcacggcgaccgtcatcgcctccggggtgggcggcttccatgccatcgccgaagcggtgcggaccaccgacggcaagggaccgcggcgcctgtcgcccttcaccatcccgtcctttctctgcaacatggcggccgcccatgtgtcgatccgccatggcttcaagggaccgctgggcgccccggtgaccgcctgcgcggcgggcgtgcaagccatcggcgacgcggcgcggatgatccgcgcgggagaggtcgacgtggcgctctgcggcggcgcggaagcgaccatccaccgggtcagcctggccggcttcgccgccgcgcgcgccctgtccagcgatttcaacgacagccccgaacgcgcctcgcgccccttcgaccaggcccgcgacggcttcgtcatgggcgaaggcgctggcctactggtcatcgaggaactggagcacgcccttgtctcttatacacatctccgagcccacgnnnnnnnnnngtggatggtcgcttccgcgccgccgcgcgcgccaggcccatcgccgagctggtgggctacggcaccagcgccgacgcctaccacatga

SEQ ID NO: 360842 - DNA, 222 bp, Pseudomonas aeruginosa
atgagcgccaacgacgccaccaccatcaactgctgcgtgtgctgcaaagaaattccgcttgatgctgccttcaccccggaaggggccgaatacgtcgagcacttctgtgggctggattgctatgcacgctttcaggcccgagccaaagccgagcccgaatccaacaccacacctgcggctggcggctcaactctggtcaggttgaagcgtactctatcctga

SEQ ID NO: 360843 - DNA, 774 bp, Pseudomonas aeruginosa
atgagcgccgtcccgcccgcctggacggcacaactggcgcaggccgtcgagcgtggacagcttgagctgcactaccagccgattgtcgatctgcgcagtggcgagattaccggcgcggaagcgctgttgcgctggcggcacccgagtctcggcttgttgccgccgggtcagttcctgccggtggcggaatcatccggcctgatgccggaaatcggtgcatgggtgctgcgcgaagcctgtcgccagatgagcgattggcagccactgcaatggcagccgttccgcctggccgtcaatgtatccgcacggcaagtggggccagacttcaacgatcaggtacagcggatattggcggaggtgggcttgcccgccgagtatctggagatcgagctgaccgaatccgccgccttcggcgatccggcgattttccctgtcctggatgcgctgcgcgccatcggcgtgcgcttcgctgccgatgatttcgggacgggctattcctgcctgcaacacttgaagtgctgcccattcaccacgctcaaggtcgatcagtcgttcgtcgcccggctcgccgacgatgcccgcgatcagaccatcgtgcgcgcggtgattcagctcgcgcatgggccgggcatggacgtggtggctgaaggcgtggagacaccggccagcctcgcgcagctacgccaagcaggctgcgacgcggtgcagggcttcctgttcgccaggccgaggtgttcagcgatttcgtcacccgcaggaggagtaccaccatga

SEQ ID NO: 360844 - DNA, 237 bp, Pseudomonas aeruginosa
atgaacagtcctgagcatgtccccgttgagatacgcaagccgctcaccggctacctgtggggtgcgctggcagtcctgacctgcccctgccatctgcccattctcgctgccgtgctggccggaacgaccgccggcgctttcatcggggcgcactggggtgttgccaccatcgcgctgaccggcttgtttgtcctgtccgtagcgagggtgctgcgggcgtttaagagtagagcatga

SEQ ID NO: 360845 - DNA, 366 bp, Pseudomonas aeruginosa
gtgaacgcctacacggtatctcatctggcccatgatgccggtgtgagtgtgcatgtggtgcgcgactacatgctgcgtggattgttgcggccggtggagcgcaccgctggcggctatggcttgttcgatgcggaggcattgcagcggctgtgcttcgtgcgggccgcctttgaggccggcgtcggcctcgacatgctgacgcggctatgccgggcgctggatgccgcaaacggcgatgaagcgatggcgcggcttgctgagctgcgccgactcgtggagcgtcggcgtcaggcgctaacagacctggaagcgcagttgacctcccagctcaccgaactggcacacgatgcggaggtctcgtcatga

SEQ ID NO: 360846 - DNA, 642 bp, Pseudomonas aeruginosa
atggaagccccaaccttcgtcgaaatcgctgaacgcctctcggctgccaacccgctacgtaaagacggctcggatgatctcttcatttcgcttcttcgcgagatcgccaagggaagccccgtctcgcgggaaaagctcgccgcggtgctcggttggcctcttggcagggttgcagcggcactcgatcagacccccaacaccgagtatgacgatgacgggaacatcctcggcattggcctgacgcttcgtgaaactcctcatgtctttgaaattgatggccgtcgtctttacacctggtgcgcgctcgacgccttgatgttcccggcactgatcggcaagaccgcacgcgtcctatcgcgatgcgctgcaacgggtgcgccggtttccctcacggttaccccggacggagtacgcaatgttgagccggaaggcgcggcggtgtccctggtgctaccagacgcgtcaccggacgtccgcggttctttttgctgccatgtgcacttcttcgcttccaccttagcggcagacggttgggccgcgaagcatggagaagtcgtcgttgtaagtgttgaagacgcgttccgcctcgggcaaaagctcaatgaaacgctgtcacaaagtacgcaatcgagaccattgtga

SEQ ID NO: 360847 - DNA, 639 bp, Pseudomonas aeruginosa
atgatgagtaacttgtttagatgcgcaccttcatccgtcgtaagcgggcttctgatgttcatgagcgtcggtgcgttggcctacgacttcaagaggatggaagcggccatcgaatcgctctcccctgccacgcaaggccaatgggagcgcaaagccacggcgggtgaacccattgcgcagaacgtcaccggcatggcgtataagtacggcatcggcgtcgcgcaggatcaggcagtctcgttgaagtggttccactcagcggcggaacagggagaggcggacgcccagttcaacgtcgcgcgcatctacgagagcaatgccaacgacggcttctaccgtcgtcacgcgcggcctgtgccagccgatgacagcgaagccctgaagtggtatcgccgctccgcggagcagaaccatacgcaggcccaagtcaagctcgcgcagctgtacgcgaagggcgccgcaccggtcgcgctcgatccggtccaggcatacaagtggctcggcatcgccgccacccggggcgacgcgacggcggtgaagctgcgcgccgaccttgcggtcggaatgacacatgagcagatcgcagagggcgacgctcaaacgatggaatggacaagcaggtccagcgttaagcagtga

SEQ ID NO: 360848 - DNA, 276 bp, Pseudomonas aeruginosa
atgaaaaaactgtttgcatccctcgctctcgtcgccgtcgttgcccccgtgtgggccgccacccagactatcactctgtccgtgccaggcatgacttgctcggcctgcccgatcactgtcaaacagtcgctcattaaggtgcccggcgtgagcaaggcggatgtgagcttcgacaagaagcaagctgtcgtcaccttcgacgatgccaagaccagcgtccagaagctgaccaaagccaccgaggacgcgggctatccgtccagcgtcaagcagtaa

SEQ ID NO: 360849 - DNA, 261 bp, Pseudomonas aeruginosa; identical to SEQ ID NO: 133429

SEQ ID NO: 360850 - DNA, 369 bp, Pseudomonas aeruginosa
atgggcaagaaagaaactgaagaagcgattgcagatagccgcgccggccgcgttgccgggcggttcggctcggtcgatgagctgctagccgatctgaacgctgacggcacgccaggaattcaggaaggcagcacgaacgtctatgccgacctgggctaccccgacgccgacgaaatgctggtgaaggcccagctcgtgaccaagatcggcgaggccatcaaggctcggcagtggtcgcccgagcaagcggctacggcgctcgatgtgacgccgaccacgctgcgcgagctgctggccggtcgcttccgtagtcgttcggtcgatgagctggaacgcctagcggcgctgctcgatgaggcccgccgatga

SEQ ID NO: 360851 - DNA, 348 bp, Pseudomonas aeruginosa
atgaccgacccgaagagtctggaaacctggctgcatgaaaaggccggcccggctcatgacgctctgaaagccgacccggcccgcgccgttacggctgaccgtgtgcgctacacgctcgatgagctgctggccgaggccgaagcatccggccagtatccattgccaccggagcaacgtgaatgggtgaatgcgccggccgttggccgtgagctgctgcccgaggacttacaaacctccgaagctatagccgcgttcctggccgacgccgaagctaccgccgacccggcctatatcaagcacgcccgcgaagttgtggcacgtgcgcgggccatgcacggcatcaaatag

SEQ ID NO: 360852 - DNA, 279 bp, Pseudomonas aeruginosa
atggcgacgacagaaagcagctaccccgaggagctggccgcacggctggctcttcagcagaagacctcgcaaacaaagcgcagggactacctggccgctttcatggcggtgcgctcggacgtgaaggaagcgatggaggccggctacgcgctcaagatcatctgggagcacctgcgcgaggtcgggcgcatccctttccggtatgagacgttcctgaagtacgttcgccagcacatcaccaatgcgcggcctggctccatggggcagggtacgaagtaa

SEQ ID NO: 360853 - DNA, 981 bp, Pseudomonas aeruginosa
atgaagaacgacccaaccattgtcatctgggaaggctgcgatcccactgtctcggaagccatcgagcagtttgaggatcgctggcggccgtattccgcctcctcgcggcgctaccccatcgttgggctgatacaggaactcattgaccccgccgtggctgcatacacggcgacgctgccgcaacgctacttgggccacatcccgggagcaggaacaggggtgggcttcagcggaatcattcgactggtgggacttgatgcgatggttcgcatgcagcggcaattgctgcgccagttcatcaaaacggaggacaggcagaccccaaaggatcggcggtttgttgcgacactcgaatcgttgatcgggcttgtatgggactgcgcctgcaaacggccaacgaagtcaaaggtgcgcgacacccggctgaatggcgaacgccttcaggggttctgccggttctgcggatcactcgccgagctaacctcattcgccggcgggagcgatgatccgaaggcggacgatccagaggaaaagcttcgactaagcagcctgtattgcctggatcatcggcctaaattgccgagcggcgcatggaaccctgtctacagacaagcaaggcgatccctcgcgcaattcgacctcgaactggcaagactcaaccagcaatgcgcgaagccggccactgcccaagtgaaatcgggcgatcaactggttgacagctacttcttccactatgtcgcgggccagaccttacagccggcggacaaggcagagctgcgcagtcaagcacgactgatggtggactcgaagctatcggatcgcaaaaagcagatgctgatgctccagtggtctggactcaatcagtcggagattgcgcgaaagctcggcatcgagcgccaagcggtatcgaaggcgctggcggcgatccccgcaatgttccacttgagtacaaagccgcgctcacggcgtcaacctaattga

SEQ ID NO: 360854 - DNA, 585 bp, Pseudomonas aeruginosa
atgaaagcacctctgatcaacaccaagaacctgaacatcacgctgaacttcttcgcccccgatgacattcccggcctggttgctggtgagtcggtggaactcaagccggccacctgtgcccacccaactgatgtccctgccatcggagagtactgggagggccagggcggaatttacgccggccgggtaccgcctaaggacggtcagtccagctactacctcatcgtagcgggggatgatgtaggcagatgcgcttggagctcacacagtcatgagataagcgcaaggcgcaaatgggacgggatggccaatacagccgccatgctggaatccgagagtcccgcagcaagagctgctgttgctttcgtagcagatggacatgaggacttttacctgccggcccgggcagagctggcgatctgtgaactgaacgtgcctgaagtcttcgcaaatgaccggtattggagcagcactcaggtggccgcaggtatttcgttctgcgtcggtctacacgacggcagctcgttctacgggaaaaaacacgagaccttcctagtccggccagtccgcagggtgctgatttaa

SEQ ID NO: 360855 - DNA, 747 bp, Pseudomonas aeruginosa
gtgattgctctgtcatttggagataaaaatatagctatgaggggtttagctctgtccctggcttcgattggtgcgttggtttcggggtgtgcgctcaacgagcagagtgcggatgctcagcaaatcgatatcggcatggaggggtatgctagagcgctatcaattgaagtgtcttctgataaagtgaagagcttgggctcggcttcttggctgtcatctgatcttgtgattactgcttcccacctgtttctaaatatgcctgaggatagtcaagtcagggtcgggaaaagaggggcctgggtagaggctgaggtagtggccattgacgaccctgcgattcttgatcttgcaattctccgtgttcgaaatggcagagatattcagccgacagtggttgggttggcttcggtgcggatatgtgaaaaacaaattaagcctgctcaagaagtgcttgtggtctctgagtttcataatggctcatctcgctcgtatggctcgccggactatatgagctattctcaaggagctatgtggacaagtcacctgacgggctattaccccgaagggacaagcggtggtgcgctgtatgaagtgaagagcggatgtttggcgggcgtgataagccgtcgacgtgaaagctttgcgacggggtccccatctatatattcgactgaattcgttactgcgaaagagataaatcagttcttgcgtgataatggagttaggcttcctgagaacgcgctctag

SEQ ID NO: 360856 - DNA, 1392 bp, Pseudomonas aeruginosa
atgaccgccgtcagactaaagatcgttcgggctgcttggcttgaagagggcggtcggagactcgattgcaacccttacatgtcgggcgcgttggaagcgagggatgccctgaagcgacttgcgtgccataaggacaagttgcgagatgtgacactggggatgttcgactctggtcgcgagagccggaactgggtagatgatgaaaggttcggcgtgcgctacatgggtagctcggcgattaacctcgctgactttgccaacttacctcttatctcgaacaagcaagtggcgcgaaaccccaagctcctcattgaggagggctggtccctgattactcgttcagggactatcggtcgcatggcctatgtgcgaccggacatggctggcctcgcttgctcagaagacgtcttgcgagtagtccctgacttggagcgtattccaccaggctacctgtacgccttcctatccagccgctacggcgtgcccctggtcgtctcgggcacctacggtgccatcattcagcacatcgagccggttcatattgcggacttgccggtcccgagatttgacactccgacggagcatgctatcgccacaaaggtggacgctgctgcccttgcgcgcgctgaggcagtggagttgctgcgtgaagcagccagtcgcttgcacaagaggctcgggctcaagaagccaacaccgatcgcctctttgccaaagccagacgttgccacagtttccagcgaggcctttaaggatcgaggggatgcgtactactacagcgccagaaacgcagagtctcgtggcgctcttgatgatgtagctgtgaaccgtccgctgggagaagtcgcggaggttttcattccgggcatctttaagcggctttatgcatctgatcctcagttcggcagcccctacatcactggtggggatgtgttcgagttggctcctacgtctgacaagcacctaatgaaacgcgtcgctgcggaatatcgcttgctactcaagaagggaatgatcgttgtgcaggaagcgggtcagcttggtggtttgatcgggcgttcggtgatggtgggcagctatctcgatgggttttcttgcagcaacaacatgattcggatcgttcccgaggacgacatcgacggaggctatctattcacgctgctggccagcgagcatggagttcgattgttatctcgtgaagccgccggttccagcattccgcacacagatgaacaacgagtcaagcgaattcatgttccgtggccctcgcgcgccgaccgcgaagagattggtgcaccagcgattcgagcccgtgaattgagggatcaagcttgcatttgggagcgtgaagcacgcgacatcctggaagcaagaattttgggaggggaatga

SEQ ID NO: 360857 - DNA, 2523 bp, Pseudomonas aeruginosa
atgccagatacatccaatcattcgaagagtatggaccagccacacatcagccctgactcacggcatgcacagctgctagcgttggctgcagatgctgggcgtgatgttgatgtgatagcggagatgctgaggtttctggatgtacaccctcagctgattgatttccctagagtcatccagggactcgtgaatacgcttgaggcaatggacgtaccgccagtgctcagcctaagcgcgtgcgatctcagaatctggcgggacgagtgccgttggattatttcaatccgagacaagcctgattttattgcggctttgggcccgatgttttaccagggggatgagcggcgtacacgtaacccggtcatcggtaaaggtgtacaagaacacgcgttcccatacgcgacgctgtggcacgaacctgctgattcagaaagcgagcaggattactaccgtcttattgggcaactgctcgtggcctatcagcaaagggctaatggcttgggccttcgaggtcagagatacaccgcgtacttggaactccgggcactctgcgcactgcagatactgtccataccagatgatctcaatatatggtccagccctgctgtatttgctcagggctgccgtcaattcgacgccggcaattcaactaattatctagcagagtacttcgcaccgatcgttcgtctcgcccgctacctaggtggtgaggagccgcctgagcgtcacggtggcggcggccatcgtcaccatggcggttcaaacagcgcaggcctaggtgtactaattagccaaggtgctaccgagttcccgcttgatgatccagacgacccagatttgctccctggatatataagtttcgtggcgtctcaaccgctagacgatgatttagatgaagcactgccgccgggcgaaataaccgcagcgcgtgaaatatgtttgatcgatacaaggggtgaggtcagaccatatgtagctgaattgctcagccatgagggcatgcttgctcatattgctcgcagtaggcagtttttgccttttggctaccacctgctcacgcagtatgaactagcaaacctattgttcggtgtcactgatgaatttctgttctgtcgggaacgaattcgtaatgctcctggccaggagcagatacagatacggaggcgcttggaggcactgctggtacttcatctcatgctctggttcggtcgctcactcgaggactgcaaaaaactacggatagctgagcgcaatgcgcgcccgaactcggtgctggagttggttctggctgatgaggcagggccggcggagttcagattttttgcaccgacaccggactatgcagcggaagagcacttgcctcgagaggccgttcgagcatctcagccaacaatctcggtaccggacatggttggggcagctgcgctcgttatggcaatccgggacctgtcaccggtgagtggctctgccgttatcaattgcaaggtcaaagacctagagcgtgaaatccgaaccctgttgaacgagcttgggggcgaagatcctcgctacacgatgcacaaggttcgttcctatctacatcgccaaatcatcgcggacactcacgatgtggttgcagccaccatgctatcggggatgccttgtctatcggccaacactccactgtattacagccagtacagcatcaaccatctacgacgcctgtattgccaatcagttcagcgggtgttggctgcggtatatgccaccgtgggcctggaggctcctagtgccccgattcccgctgtttcggaggcggctgttggtgcccgaaactgccttcggctggatgcggtaaaagctaatcttgaggcgttgctggtagtgctgcgtaaacgccctcgaaaaggccttcagcagcttgttcattggcacaactgcctgtcgttgtggactgtgcagatgctttttatggcaactggatgtcgagccattcgtaacccgttgaagcaggcaggcgtatttgaatcgcgcggggcatgcggcgcgctgggtgataaaggcgcagatgatgggcatatgagtcgctttgtggtgttgcctgacctgttaaaacggcagttacaggcctataaggctcactgcagtgcaattaccgcacaacttgagcctcatctaccccagctgccggcccctactaacggtttttttctccagttagccgacggggcatatctttcctacgaggaaattcggccgatccatatcaaagctgtaatgcgccagattgagggtttcacacctcatccagtgaatggattccgcaaactgttaagaacggagctcgccgagcgaggatgcccacctgaaacactgtcggctttcatgggccattggctgagtggcgaagagccacaagatatttactcgagcttttgcccgcgtacctatgtccaaggccttcatacctacttgttgccactcatgcgggagctcggttggacggttcgcaacagccacctggttgtggaggctgatgcatga

SEQ ID NO: 360858 - DNA, 1167 bp, Pseudomonas aeruginosa
gtgagttggccgcaagtgaagctagagagcatttttgacattgctcgtggcggctcgcctcgccccattgatgattacattaccgatgcagatgatggtctgaactggatttcgattaaagatgcatcgaatagtaataaatatatcgaaacaacaaagcttaagattaagccggaaggtctttcaaagactcggcaggtaaagccaggtgattttctgctgacaaattcaatgagttttggtcggccatatatcatgaaaacaacgggctgtatccatgatggttggttggtgctttctggcgatcctgagaaggttgattcggactatttctatcacttgcttggtagtgatcttctaaagcgccgtttttcagccttggccgcaggtgcagtggtaaaaaatctgaacattgacttagttaagggagttgaaatccccctcccacccctgcccgaacaaaagcgcatcgctgccatcctcgacaaggccgacgccatccgccgcaaacgccagcaagccatccagctcgccgacgacttcctccgcgccgtgtttctggacatgttcggcgacccggtgaccaatccgaaggggtgggatctgttgccgttttcagcggtcggcactctagatagaggtaaatcaaggcacaggccgagaaatgatccagctcttttgggaggtattcatccgctaatccaaaccggcgaggtggcgaactctcgggggtatatcaaagagcactccgcaacatactccgatcttggcttggcgcagagcaagaaatgggatgccggcacgctatgcataacaattgcggcgaatattgctaaaacgggaattttgacttttccggcttgcttccctgatagcgtggttggatttattccgaataagcatgtgactgttgagtatgttcagcactggctgggctttttacagaaaaacttagaagagaatgcccctcaggctgctcaaaaaaatatcaatcttgaaattctcagggcacttttgattcccgttccgccaaagtcagaacaagaaaagttcagttcaatggtggccggcattcttaccattgaggagaagatagccagctccagcgatgcattaggtaatgcattcgatgcgcttagccaaaaagccttttccggccagctgtag

SEQ ID NO: 360859 - DNA, 1710 bp, Pseudomonas aeruginosa
atgctcgatacgcaaaaggttcttctcaattatctaaattctttggcgcaggtcatcgaaaacgttcgtacggctgagctggatatcaatggcgagcctgcacagacgcaggcatttgcgcaggcagtagcggaacgcgaattgctggtacctgtagtgggagcgttcagcgccggtaagtcttcactgctcaacacgatcatcggcagcagcatcctgccgatggatatcaagcccgaaaccgctatcccaaccgagttgcgccacgatacgcaggagcggctggaggctctgtttaccgatggccataccgagcgattcggcattgagcagttgcctgccctgcaggagcgggcggaagagcttcagctattgcgcctgtacatcaaccgtccggcgttgaaggggctggcgccgctggtgctggtggatatgcccggtttcaattcgccgctcgatgcccataacaaagccatcgcccactacatcggcgaaggggcgcactatctgtttgtggtcagtgttgaagagggatcgttgcacaagcagatcctgcgcaatatggatgaagtcactctcatggggcgcaacttcagcgtttgcgtgaacaaggcagatctcaagcccgttgctgatgtgcagggcatttgcgactacatcagcgagcaactagaggatgagggctttccggccacggtgtgcgctgtcagcaaaaacgatatctcctccgtcaacgccatgctgggcagcttcaatccagaggagctgttcggctcaattttccagcctgaactgctccagcaaaatttcgccatcgaaagcaccctgagtacggcgctgaatgggctgaacagcgacaaggaaagtaacgagcagaaaattgctgagatagaagatgccttgcgcgccttggaacaagagcgtgagcagcaaacccaggcaaacagtgccgggaatctggagcgcattgtcgatgaggtattgcgcagcgtgcacacacgccttgccggctctatagatgagatggcccgcgcggccttgcgcagccaggatgagatgactcggatcatttccgatgaagtgcgcagcggtctgactgtagggcttaagcgagctacggacagtatgtctgcccatatggtgaatgagttcagccagcacgtcagcggctccctgcggccggagctgcatctgacgcagaacaactggacagacagcttgctgcaaacactgcaaacgcagctgctgccaggcctgctttcggctattggcggccaagccggcggcgcagccagtgggttgttgaccactgcgatgtcaagcatggcagcggcgcgtcttatccccaatcccatcctccaggtcgtggttaccgtcctgcccagtctgctcggcgcgcttttcagtcgcattagcgaggggcaaaagctggagcaggccaaggacgctattcgcacacaggtactgccggatgtggagcgcggcctgcgcccagaaatcagcagcttcctgctccaggcgcaggaagaaatcgtgcgagctgtctctgatgcttttgaccagcagatcaaagcgcaaaaagacattttggaaaaaatcaatcagcaagccgagagcggcaatcttgaggcgcggatccgggtattggaagaagcgcttgccgaggtgcgtgcgctggctcatgcgcatttgcaggccgcgaagcagtaa

SEQ ID NO: 360860 - DNA, 2244 bp, Pseudomonas aeruginosa
atgctcgtcgagcaacgcatcgaaaaactcgtgaatggcatgcaaaagctgaatgccattgtctccaaataccccggtcccggtttcactgacggcgtttatggcgattcagcgccgcttaaaccggaaacggtacagcgtgatgcgaacgcaatggctcaggaagggcgcaatctgcgcgttggcatcattggcagggtcaaggcaggcaagtcttcactgctcaacgcgttgatgttcgccggtaaggatgtattgcccaaagccgctacgccgatgaccgcttcgttgacggttctgcgctacagcgagcaggccaacccctatgccgaggtggagtatttcctcccggaagatgttaacgatatgcgcctgctggcagaggagtatgacgagcgcttccgaattgccttggctgaaaggcagaaagccgccgaagaaaaggcggcccgcccaggtgcccgcgctttgccaaaaccagacccggagcgtctcaaggcctcggtaaaacgtgagttggatgccgacccaagattgggcggtgctaaggatatgtatgaacgtatccgcgttgccggtggcttgccagccaatgaaactcagcgcatcgaagggcgcgatctggcggacctgcaaaccaagctggccgattatgtcggtgcaggagggcgcttcacgcccttcaccaagtgtctgtcgctgtatttaccgctaccggcgctagaaggcgtggatgtagtcgatacccccggcgtgaatgaccctattcgctcccgtgaagagcgtaccatggaggaactgcacaattgtgatgtggttttcgtggtcagcccttcggggcagtttctgaaccaacaggatctggagctgatgggccgtctgacctacaaggatggcgtgcgcgaggtctttcttgtcgccagccaaattgacggtcagttgtttggcagcgagcgtgataaacacgaaggccgccttcccgacgtgttgcaagggctgcggcgcaccttggcaagccaggccggaagctccctcggggctatcccaggcggcaatcggggcctggacacgcttaaaagccaactggcagagcgcctcgttgtcacctccagcgttgcctatgccctgttgacccaccccgaatccgattgggatgacaacgcacgccatacctggtcgctgctgagtacaggttatccggcggagtgcgtgcaagtggccagcgctaagagccacctcgaggctatggccggcattgcgcaaaccgagctcatgcttgagcaggtgcgtgggcgtaagcaggccatcactgaagaaaagatcaacgcttttctggatgaccaagccaaggccttgcgcggatacctggacggcgcaccagaggctgtacggcgtaaccgtgaagagatcgtcaatgccaaggccggcgacctggaagaaaagctcagcgccatgcaaagcttccgtgaagcggctgttcgggcaaccaatgttgccgtgggggatattgcagaggacgccggggagagcttgcgcaggcaattaaacagtaagatccaagaacttttcagcggtgctcaaaatacggctgagcagtcgaaagactatgaggtcgaatacacagatccaagtactttacgcaagttcgctagcctccttactttggggttagttagtgccgagcgcacatcaaaaacagtccagaccattgattccactaaaattcgcagtgcgctcgagggttttcaggcgtcattcagcactcaaataaccacacttgtcgataacactcgtcaagggctgcgcaagaaaatcgaagcaggaattctggcggctctgcgagagcacaaagttgtcaacgatcgggatatcgatactacccgtctcgcgcaagcgtgcaggtccgccttggccatggtccgggacttcgatgatcctgagctgccttcactgccatccaacctgatgcaaaacggcacattgaaaggcagtgacgccagcagttatgaaagcgctgccctggaatatctggcacaactgaaaaaattggccgccaaagaagcgcgtgttctgacaaagagtttcgaagagcgcttaaatgctgccgatgtgggtaatgcgctgtttgcgcattacgaagagcatctcaatggaatcaaagcgcagatccaagacagggataaaaccttgcagcgctacgacgagctgttggtcgagctccaggagctgcaaagttatgtctga

SEQ ID NO: 360861 - DNA, 1617 bp, Pseudomonas aeruginosa
atgtctgacttattgctcacgcctcagttggagcctgcgcttacgcgcctgaaaagcatctggccatggggccgcaaggggctgatcgagcagcttcagcagcacatcacagccgccgatgagcatacggtgcgcatgcaggccttgcgccaaagcatcgaggctgagctggctagggtcaatgccgagctcgccagagctgaaagtgatcttgagcaatggcaatcgcagcatgagcagttacaggcagcgcactctgcgcaaacgcagcagctgctagagcgctcaatcgcctatgaaacgctacaagagacgcacaagcagctccagctcgagtacgaaacgctcggcaacacggcggctttaatcgagagccgctacaacttggtttgcaatatcctcaattccaagccggccgaaaatgctgccctgagcgagctaaagggttggttggcaggcgagttcgcccgagacgtgcagaggctcgagttgcctgccgatgtcaccagtccggctttggagcaggcgaacgctatcggattgcatgcggaacttattagtgactcgcctgcgctgcgcaccaagttcctggtagcagtggctggtggtttcagcagcggcaagtcatctttcgtcaccagttttatgcgcaaggagtattcgcagttgctggcaaagggtattcaaccggtaacagcgattccaacctatgtgatgcctggctgcgaactctcgatttatgggcacaccagcaaaggcgcacacgttgagttatcgaaggatgaatatgctcaactgacgcatgacttcattgcgaacatgggctttagcgttaaagagatcatgccgcatgtggtgatcgaatcccccatgcccgggctgaagcaccttgccttcatcgatatgccgggttacgacccggcagcgtctgatacagtagatactgccgctgatcatggaatcgccagcgccgccttgagcgaagcggatgctgtgatctggctggttgcgctggacagtaacggcaccttacccgccaatgatctcgagtttttgctgcagcacgccgatgacagaccgttatacgtggtgctcaacaaggcagatctgcggcctctcgccaacctggaagcagttattgaggaaatcaaagagcatttggaggacagcggcattcaattcgagggtatttgtgcttacagctcaacgctcgcaaaagaactgctgcatgagggcaaaagcctcagcgaagtcatgaatgagtgggatcatttgtctgacgcagcgcttgttctccataaagacttcgacaccttggttacaacattggagaaacactccagccaacagctccataaagtcgaaatggtcggcgaactggctcactcgctcgaactagatatcttagagatagcaggctctgaatcgacagtttttcagacggcccaaagtagaattaaacagttgaaagagctggcagagagtattttcggtaccgagcgaagcgaagtatcccgggcgcttgaaaatatgcgcctgtgtggccacaaacttctgcaggcaaacttcggacagctcaccgctccttcccaaaggaatgaagcgtttacggattaa

SEQ ID NO: 360862 - DNA, 231 bp, Pseudomonas aeruginosa; identical to SEQ ID NO: 334743

SEQ ID NO: 360863 - DNA, 255 bp, Pseudomonas aeruginosa; identical to SEQ ID NO: 327978

SEQ ID NO: 360864 - DNA, 207 bp, Pseudomonas aeruginosa
gtggatgtgatcgaccaggccaacgaacgggccgagaacatgatccaggccgccctggcccagcggacgaccactcgcccggcgcccagcgccctctggtgcgaagactgcggcgagcaaatacccgaggctcgccgccaggccgccccaggctgcgagtgctgcatcagctgtcaggaactgcgcgagcaccccgcgcggcgctga

SEQ ID NO: 360865 - DNA, 237 bp, Pseudomonas aeruginosa
atgcgcacggtgagcttccagggcgacggcctgtcggccagtcagtaccggtcgatccagcttcgccagcaggttagggcggcggtgaatcaatccgttctgcagcagcaagtggcggccacgctcaacgccctggagcagcacaaagagcagggcggtaagcccgaaaaggtctggtccacgatctccaacgaaaagggcacgccgttcctgggcgacgtgttcgggtggccgtga

SEQ ID NO: 360866 - DNA, 885 bp, Pseudomonas aeruginosa
gtggcggtgctggccggcgccgcgtacctgatctatcgcaattgggacgccgtcaagacgtacctgctggggctgtgggaagagatcaaggcaggtttcgacggcggcatcgggggcattctttcaaccctgatgaatttcagccccctcggtctaatctaccgtgcgttctccggcgtcctgggctacctgggcatcgacctgccggcgcgcttcagcgacttcggcaacatgatcgtccagggcctggtgaacggcctgctcgccggcatagggcagatcaagcgcgccgtccagcgcgtcggcggtgccgcgatcgactggttcaaggacaagctcggcatccattcgccgtcgcgggtattcgccgacctgggcgggttcaccatggccggcctagcccagggcctcggcgccggccaggccggcccgctgggcgtaattgcgcgtatcggccagggcctggtcaacgcagggcgccaggctgtcgcgggcctggacagtgagctgacccgaagcgcccgcccgacgatcaccccgccggcagcggtgaccgaactggtcgcggcccagcgccaacgctcgccgacgttcgaccagccgctgctggccatgctgggcgacctgggcaagagcgccggcgccatcggtgccctggtgctcggcgccagcgccccagcgcaagccatcaccatcgacaaccgtcccccggtcagctcggcgccagcggcagtcagcatcggcggcgacacctactacatcaccatccaggccggcccgggcagcgacgccgcagacctgaaacgcacgctcagccaactgctggacgagcgcgaacgcaacaaggcggcgcgcctgcgcgcccgcctgcaggaccgggagtaa

SEQ ID NO: 360867 - DNA, 951 bp, Pseudomonas aeruginosa
atgcagcatggtcatgtcgcccttgaggttgtccagctgagtggacgcgacccgggcggcctctccctcggagttgttcaggctttcgcgcatggtctggaactggccgccctcgacggcgcgcatcagggtgccgaagctggtaaccgcgtactgcccggcgatgtccttgaagatcgcgcctctctgtacgttgcccatgccggcggtcttcttgttgatgtccttcaggatgtccagcatgtcgcgcatgttgccgttggcatccttggtctggacgcccagcttggctaccgccttggacgtgcccaggcgggtcagaacagagcgcatcgaggtgccggccatgctgccctggacgccggcgttgccgagcagggcggtggcggtggtgaccgtctccaggctctggccgtactcgcggccgacgccggcggagtacttcagcgagtcgccgagcatgcggatgtcgacgttgttccgggtgaatgccgcagtcagtacgtcggccacctggtccatcttctcggctggaatacccatcgccgtctggatgttcgaggcgatgtcagcagtgtcgccgaggtccatgtcgcccgcggcggccaggttgagcatgccgggcattgcgccgaggatctgcttcgcgctgtagccggtgcggcccaggaagtactggccctgggcgacttccttgtctgtgaacttgctggacagcggcagggtgcgggcctgttgccgcagcgcctgcatctgcggatcgtccttgcgctcgatgcgggtcaccgcctgggtggccgacatcgttgcgtcgaactcgtagcctacgccgagcatctgccgcagcttgtcgccggtgtacatgcccgtcgcgcgcgccgccatgccggtgccggccagcgcggcggcgctctggatgccacggctgtaggtgttgcgggcgtgggttag

SEQ ID NO: 360868 - DNA, 840 bp, Pseudomonas aeruginosa
gtggcggtgctggccggcgccgcgtacctgatctatcgcaactgggacgccgtcaaggcgtacctgctcgggatgtgggaagagatccaggcgggcctgaacggcgggatcggcgggatcatccgcatcctcctcgacttcaacccactcggcctgatgtaccgcgccttcgcaggcatcctgggctacctgggcatcgacctgccggcacgcttcaccgatttcggcaacatgatcgtccagggcctggttaacggcctgctcgccggcatcgggcagatcaagcgcgcggtccagcgcgtcggcggcgccgcgatcgactggttcaaggacaagctcggcatccattcgccgtcgcgggtgttcgccgacctgggcgggttcactatggccggcctggcccagggcctcggcgccggccaggccggcccgctgggcgtgattgcacgtctcggccaaggcctggtcagcgcgggccgtcaggctgtcgccggcctcgacggggagtttgcccgaggcccccgccctgcgatcacgccgccgacgttcgaccagccgcagctggccatgctgggcgccctgggcaagagcgccggcgccatcggcgccctggtgctcggcgccagcgccccagcgcaggccatcaccatcgacaaccgtcccccggtcagttcggcgccagcagcgatcagcgtcggcggcgacacctactacatcaccatccaggccggcgcgggcagcgacgccgcagacctgaaacgcacgctcagccaactgctggacgagcgcgaacgcaacaaggcggcgcgcctacgcgcccgcctgcaggaccgggagtaa

SEQ ID NO: 360869 - DNA, 237 bp, Pseudomonas aeruginosa
atgcgcgcagcccccaaggacggctactggccagcgggcgagctgaaagagggcgatgcctcgaccggcaaatggcaggagctgaccccgtccctgagcctcaattgcgcggtgtttcccaactcagggccgaagacccaggccgttgacggcgattacgcctgggcgctctggcgtccctactcctgctgccagcgcaaggggcaaatcttcctcggcagtatcgacttccaataa

SEQ ID NO: 360870 - DNA, 237 bp, Pseudomonas aeruginosa
atgcgcgcagctccaaaggacggttactggccggcgggcgagctgagagagggcgatgcctcgaccgggaaatggcaggagctgaccccgtccctgagcctcaactgcgcggtgtttcccaactcagggccgaagacgcaagccgtcgacggcgattacgcctgggcgctctggcgaccctactcctgctgccagcgcaaggggcagatcttcctcggcagtaccgacttccaataa

SEQ ID NO: 360871 - DNA, 207 bp, Pseudomonas aeruginosa; identical to SEQ ID NO: 349205

SEQ ID NO: 360872 - DNA, 540 bp, Pseudomonas aeruginosa; identical to SEQ ID NO: 332562

SEQ ID NO: 360873 - DNA, 357 bp, Pseudomonas aeruginosa
atgcgcaagatattcctagcctgtccctacagccatgccgacgccgaggtggtcgagcagcgcttccgtgcctgcaacgaggtcgcggcgaccatcgtccgcgccggccacgtggtattcagccaggtctccatgtcccacccgatcaacctgtgcctggccgatctcgaccgcgcggcgatcggcaggttgtgggcgccggtggacgccttctacatggatcacctggaagagctgatcgtcctcgacctgccgggctggcgagacagcgccggcatccgccgcgagatggagttcttcgaggccggcggacagcgggtgagcctctggtccgaggtggagcacgagtttcgctga

SEQ ID NO: 360874 - DNA, 735 bp, Pseudomonas aeruginosa
atgaccgagcaacgaaccctcctcctcaccggtgcgagccgtggcatcggccatgccacggtgaagcacttcaacgctgcgggctggcgcgtgtttacggcctcgcgacagaactggaccgaaggctgcccctgggctgaaggcgagttgaaccacatccacctggacctggaagacatcgacgaagtgcgccgcagcctgccattgatccgggagaaactcggcggacgcctcgatgccctggtgaacaacgccggcatttcacccaaaggcgaagccggcgcacgattgggcgtgctggaatccgattacgccacctggctcagcgtgttcaacgtcaacctgttttccacggcgttactggcccaagggctgttcgatgagctcaaggcggcgcaaggctcggtgatcaacgtcacctcgattgcaggttccagggtgcacccgtttgccggggtcgcctacgcctgctcgaaagctgcactggccgcactgacgcgggaaatggcccatgatttcgggccacacggtgtgcgggtcaatgcgattgcaccgggtgagatcgagacgtcgatcctgtctgccgggaccgaactgatcgtcgatcagcagatccccatgcaccgcttgggcaagccggaagaagtcgcatccctggtgcatttcctctgcacccgaggcgcgtcgtacatcaacggttcggagattcatgtcaacggtggtcagcacgtctga

SEQ ID NO: 360875 - DNA, 1032 bp, Pseudomonas aeruginosa
atgaacagcaaaatcgcaactgtactgatgcttggaatgcttgccggccctttgagcgccgctgaaaaactgaccgtggtgtccttcggcggcaacaaccgccaggcccaggaaaaagccttctacaaacccttcacctcggaaaagaaagtggcgatcacggccgatgactacaacggcgaaatggccaagatccgggtcatggccgacaccgggaaaaccagctgggacgtggtcgaggtcgaatcccccgagctgttgcgcggttgtagcgaaggcctgttcgagccattggactggtcgcgcatcggcaagaaagaagatttcatcccggccgccgtcagcgattgcggggtgggtatcttcatctggtctaccgttctgacatacgacccgaaaaaactcgccagcgcgccacagggctgggcggatttctgggacgtgaagaaataccccggcaagcgcggcctgcgccgtggcgccaagttcaccctggagttcgccctgttggccgatggcgtggccaaggaagatgtctacaccttgctcggcaccgaggagggcgtgcagcgggccttccgcaaactggatcagatcaagcccgacatccagtggtgggaatccggcgcgcagccgttgcaatggctggcggcaggcgacgtggtgatgacttcggcctataacgggcgtgtcacctcggcgcaggcggagggacaatcgtttgaaatgcagtggaatggcagcctgtacgacctggatcactgggccatcgtcaaaggctcgccgaagaaggccctggcggaaaacttcatcgcgtttgccagtgcaccggttcagcagaagcactttgtcgaggccattccttatgggccaagcaacaccaaaaccgtggcactggtcgatgaggcggtgggcagcaaactgccgacttcaccggataacctgaagaacgcccgggccacggatgccgagttctggatcgaccacggcgaagacctggaagagcgtttcatcgcttgggccaacaagtaa

SEQ ID NO: 360876 - DNA, 1068 bp, Pseudomonas aeruginosa
atgccgcttgagaaagtatcggcgcaaccctgtctgctggaggcggcccctgcccgtgtcagtgacgggcaggtccttggggtccttgcgcagcactacgcgatcagcggaaaactcgagcaactgggcggcgagcgcgacctcaatttccgggtcatgctcgcggacggtacgtcgcgtctgttcaagttgtcgcatccattggaaaacccgcaggtcgtggacttccataaccaggccatgctccagatcgagcgtaacgatccggcgttgccggtgcagcgtgtctttgcatcactcggcgggcgattcgtggagccggtcgaaatcgaaggccagcgcatgttggtccgtctcctgtccttcgttgacggcttgccgctgcaccgcgtcgcccacacatcggtgaatttcaggcagaacctgggccaagcgctcgcccggttcgacctggccctggacggcttcagccatcccgctgccgggcacgtcctgctgtgggacatgcaacacgcccagcgcctcaggccccggctgaaacacatcgagccgggcgttcgtcgcgaccggatcgaacacagcctggaccgcttcgaatcccaggtactgggcaagtgcgccacgctgcgccaccaggtgatccataacgacatgaacccgcacaacatcatcgtcgatccggatcagcccgatgtgttgcgcaacatcctggattttggcgacatggtccacgcgccgttggtcaacgaggtcgcggtcgcggcatcgtaccaattgggggtggcgggcgacgtcctggccccggcgctggacatgatccgcgcctatcaccaggtcaatcccctcaccggcgaagaattgcaactgctgccggtgctgatctccacacgcctggcgttgtcgttgtgcatcaattattggcgggccgacctgcacccggacaatcgcgagtacatcctgcgcaactcataccgcgcccaggatgccctggcgggattgtccgcaatggcacccgccgagatccacgacagaatccttgccgcttgcacccaggaggttggcgcatga

SEQ ID NO: 360877 - DNA, 1323 bp, Pseudomonas aeruginosa
atgagcatgatcaacggtttcacttctgaagatgccgatcgcctgtcagacaaggaaaaacgccttgtcgaacgccgggcacggttgctcggcccggcctatcgactgttctacgaacaccccttgcacacggtgcgcggcgagggcgtgtggctgtacgacgaacaaggccggcggtatctggatgcctacaataacgtggcgtcggtggggcattgtcatccccgggtggtcgaggcgatcagccggcaggccgggcaactcaacacccacactcgctacttgcaggagggcatgctcgattacgccgagcaactgctgggcacctttcccgagtacctcgagcgggtcatgtttacgtgcaccggcagcgaggccaacgatctggcgttgcgcatcgccaaacagtttaccggcggcaccggcgtgatcatcacccgcttcgcgtatcatggcgtcacgggtgatatcgccgagctttctccgtcgctcggcccgagcatggttctaccaccccacgtgcgcaccgttcgcgcccccgatgcttatcggctgggtgcggatcaagtggcctcgaccttcgtggctgacgtccgtgcggccatcgatgacctgcgcaaacacggcattcgtccggcggcgatcctgctcgacggcattttcgccagcgatggcgtctttgcgggcccaaccggctgcatcgccgaagggatcgcattggcccaggccgaaggcctgttgtacatcgccgatgaagtccagtccggcttcgcccgcactggcctgaacatgtggggtttccagcggcacgacgtgcgccccgacctcctgaccctgggcaagccgatgggcaacggccaccccatcgccggcctggtcggtcgagcgcaagtggtcgatcactttggccagaacatgcgctacttcaacacctttggcggcaacccggtgtcctgcgcagcggggcaggccgtgctggacgtcatccgtgacgaacagttgcagcagcgctcgcacaccctgggtgaatgtctgttgacggggttgcgggagctggccgagcgttacccgatcatcggcgatgtgcgcggtgccgggatgttcctgggggtcgagctggtgaccgatcgcgccacaaaagcgcctgccgccacgcagacccgtcaggtggtcaacgcgatgcgcgagcagggcgtattgatcagtgctgccgggccgctggaaaacgtgctgaagattcgcccgctgctggccttcgaacaggagcatgcgcacttgctactggaagcggtcggcacggcgctggaagggctgcagccgtag

SEQ ID NO: 360878 - DNA, 756 bp, Pseudomonas aeruginosa
atggtaacgatccagctgcaagacctcggcgccagctatggccagcgcacgatcatcagcggtgtgaccaccaccgagtttgtcggcggccaggtggtcgccgtggtcgggcccaatgccgcaggtaaatcgaccctgttcaaacgcatggcagggctgatcgacgggcccggcgaggtaaagctgcaaggcgcggaaaaaggcatgaaaggcatcagctacatgccccagggcctcaacgccagcgcccgtttgaccgtgtacgaatcggtgctgctggcgcgcaagcaactgacaccgggttgggtggtccacgatgacgaactgaaactggtcgatgagatcctcgacgccctgggcattacgccgctgtcattccgcaacctgggtgaactcagcggcggccagcaacaactggtctcaatcgcccagacgctggtgcgcgaaccgcagatcctgctgatggacgagcccaccagcgccctcgacatgcaccgccaggtccaggtgctgaacttcatgcgcgacctggcgcgaaagcgcgaagtcatcgtgttcatcgccatccatgacctgaaccaggccttgcgcttcgccgatcaggtgctggtcatcgccgatggcaccgctcagggcagcggcccgagccatgaagtgatcaacgagcagatgctgcgcgcggtgtacaaggtcgaggcgcgcatcgaacgctgcagccgtgggcagcaccatatcctgatcgacgatatcgtctga

SEQ ID NO: 360879 - DNA, 1059 bp, Pseudomonas aeruginosa
atgaatgcgatcaacgatacgatggtccagcgcgacacctaccgccgcctggtggtgcgcaaacgcctgatcctcggcgccctgacgctgctgttgttgggcagtgtgttgcttgacctggccctgggcccggccagctacagcctgggcgaagtgctcggtgcgctgctttcaccggacagcgccgcgccgcaggtgcgggtggtgatgtgggatattcgcctgcccgtggcactgatggcggtcgccgtgggcgcggcgttatcgctggccggggcgcagatgcagaccatcctcaacaacccgttggccagcccgttcaccctgggcatttccgcggcagccagtttcggcgccgccatggggctggcgttcggtgtggcgctgtttccgctggcagcgcagtacatggtgccggccaacgcgttcatcatggccatgctctgcgccctgctgatccacttcttgagcctgcgccgtggcgtcaccgccgaaaccatcgtgctgctcggcattgccctggtgttcacgttcaacgcgttgctcgcactcgtgcagttttttgccaccgagcaagccgtggccgccgtcgtgttctggaccatgggcagcctgaccaaggcgacctggcccaagctgggcgtgatctgtgtggtgatcctgatcaccctgccgattttcgccaggcgcacctgggcgctcaccgccctgcggctgggggatgacaaggcggccagcttcggtatcaacgtgcgcagcctgcgtttccagacgctgatcatggtcagcctgctcgctgcgtttcccgtggccttcgtcggcaccatcggctttatcgggctggtcggcccgcacatcgcgcggatgctgattggcgaagaccaacgtttcttcctgccggcctcgttgctcaccggcgcactgatcctgtcggcgagttcggtggtcagcaaaaccctgatccccggcgcgattttccccatcggcgtggtcacgtccctgatcggcgtaccgttctttatctctctgattctcggcgcaaagaaaaactcatggtaa

SEQ ID NO: 360880 - DNA, 1170 bp, Pseudomonas aeruginosa
atgctcaccattgttcgacgcagccacgccctggccgcgctgctgtttgctggattgctgggggtttcactggcgtcattggccaacgaagcggttgacacacgcagcaccgtgaccgatttgctcgggcgcaaggtcaaggtaaacctgccagtcaaacgggtgattctcggcgaaggccgccagttgtacctggtggcggcgctggacacgcaaaaccccatcgagcgtatcgtcggctggcgcaaggacctcatccagtccgatcccgacacctacaacgcctacctgcgcaagtttccgggcattgccgacatccccaccttcggcgggtttgaagacggcaccttcgacatcgagcaagcgatctcgcagcgccccgatgtgattgtcctcaatatcgaggcccagcacgcgaccgaagatgcgcgctacatcgagaagctcgacgccctgggcattcccgtggtgtacgtcgactttcgcaactacccgatgcagaacaccgagccgaccatgcgcctgttcggccaattgttcggcaaggagcaacgcgccgaagcgttcatcgcgttccgcaaccagcagattcgccgggtcaccgacgtgattgccgcgcaccaacctgcgcgccccaaggtgttcatcgagcgcatcggcggctacaccgacgattgctgcctgagctttggcaacgagaactttggccgcttcgtcgaaatggccggcggcgacaacatcgccagggacatcatccccacgaccttcggccagttgaacgccgagcaggtgatcgtcgccaaccctgaccagattgtcgtgaccagcgccaactgggaagccttcgccccgggcgggcattgggtgggtgtgggtccgggcgcggacatggccgaggcccgacgcaaactggcctggtacaccggtcgcccggcctatgccggaatcaaggcgcaggacagccaggccttccacgccatctggcaccagttctacaacagcccctatcagttcgtggccatccagcaactggccaaatggtttcatccgacgctgtttgcagacctcgatccgcaagccgcgtttcgcgagttgcatgagcgcttcctgccggtgccctacgagcctggctatttcgtcagcctgggcgaacccgagatcaagccatga

SEQ ID NO: 360881 - DNA, 423 bp, Pseudomonas aeruginosa
atgtcgggcgaaattgcccaaggcacgcgcctgctcggtggcgtgacgctgttggacggacaactgaccaggaccagcgtggcggccaaccgtggtaacaaaccggtgggcgtgcccgacgtgcaagccaacctctgggccgagtgggacacgccctgggccgaagggctgacactcaccagcggcgcgatctacaccgccagccaatacgtcaaccaggccaacacccaggaactggccccgtggacgcgcatcgatgtcggcgctcgatacgccacgcgtatcgctcagcgacccacgacctttcgcgccacggtgcaaaacgttttcgaccgtgaatattggtcgggagtcgcctcctacggcgcattttcccagggttcaccacgcaccctgctcctgtcggccacggtcgatttctga

SEQ ID NO: 360882 - DNA, 285 bp, Pseudomonas aeruginosa
atgatcagtggcggacttatttctgagcagcaagccgtcatcggcttgaaggtggcactgcggatcatcagtggctgggaagctacgcaaagccaggcgtgccggattctaaggatctcgccctcgacctaccgtcgggcttcgcgcggcattcccgcggggcagcggcttgataaggatcagcagcaacgtattgggctagtgttaagcatccatgcgtcgctgcgcacagtcttttccgacaaggcaaacgtgagggggcttccctggtttcaaaatcgataa

SEQ ID NO: 360883 - DNA, 843 bp, Pseudomonas aeruginosa
atgcttcaaaaaagcaatcacattggctatttctgccataggtgcagaacgtacggacttttgcctagccatgtgtttcagcattttattgagagctttaacgtacagccaatagcacccaatattgatcaaggcttcacaggtgagtgctctacctgtagaagcctagccaaaattggcttctcccccagcacatgccaaccgacaacgacacaaataagtcgagctcctagcatactagaaactattagagagcagtcattaaagggcggcactgactcaagcattatcctgcttcaagacaaggatttgatttttccggagcaggaagatatttatgtacctaatcagcgaattatcacagacatcgctgaaattcgcggcacaatcccaaaactgatagagctgataaaagaagaccaaagctatctttatcggatcaccacaagagaattcgagcagattatagcggagattttttcgtcccacggtttcagcgtggaacttaccaaaaagacaagagatgggggaaaggacgtaattgcaattacaaaacaatgcacgcttggaatcgaaacaaaatactttgttgaatgcaagcgacatgcgattgacagcaaagtagacgtatcaattgttagagaagtatacggagttcataacgaacgagacgggccaaataagtccatcatcgtaacaacttcaaccttctcccccgacgccattaaattcgcagaggaaaaagcaacaagcaaatgggcactatctttaaaagatgtgtcagatgttatgcaatggataagaagctacaagcctctggacattctaaaaggcactccttga

SEQ ID NO: 360884 - DNA, 417 bp, Pseudomonas aeruginosa
atgcaaacaccgcaaaaagaacaaaacgcaaaacgcttcaacccccttccagcccctggcgacttcgtttggtgctggttcccctacgaggacggcgagcgtggccccaaggcccggccggcactcgtaattggtgtctttgatcatgaccataaggtccgggtctgctacggcaccagccagagaacgaacgaactctacccgggcgagtttgccctcgacccagccgatgacggctttgcggtgagcggcctcggcgcggcgacgaagttcaacctcaacaagcactttgacctgtcgttcactgagttctggttcaagaaacaccttggctccagcatcgaagtccccctgcctaaactgggggcattggctgcgagttactacccagtccttgtgaaggcgctgggtaaatag

SEQ ID NO: 360885 - DNA, 273 bp, Pseudomonas aeruginosa
atgccacaaacaacagccgaaacgaaagtcctgctgcggctaagaccgcaggacactcccactgggatcagcgccgacaccttggacgcgctggtatcacagaccggcttaaacaaaaccgaagttatccacttcgcgctacgcaggctcgctgatcagtgcctgcccaagtacgagctggacgacggtcccctaaccgacgctcagatggcccgcatccgcgaactcagtccggatatgccagaggagcgcatgacaagaaggcttttttaa

SEQ ID NO: 360886 - DNA, 1215 bp, Pseudomonas aeruginosa
atgcccaaacctctaccacagcccatgcccctatcaattcccgagtatcgtctcaaggcctgcatgacaaaccaattcccacagacccctgagggattccagcaactgaagtttggctacttcggtgaggttggaggcttgctgtctgcagtcaagaaatcaggacgcgacaacctggccgccacggtgactgaactcgctgctgaagagctcggagacgccctctggtatttgatcaacgtcgcggcccttgtcgatgtcgaccacaaccagattggcgatcactgcctgatagccttgcgcaggcaatatggtgaagcagagcaagagttagttgagccggttaccttccggcatattgatagcttgatggaggtccgcagaacgccagactcgattgaccgatccacgcaactggggaagctcgccaaccacgccggatcgatggcagcaacgacgtttcaggcatacaaagccttggcgccgcacaaacgcgccgaaaatctcggtatgcacctggcagagctcgcgatcgcctgcgcgagctttgatctgaggctagaagacgttgctcgggccaatcttgaaaaaattcacagccgttggcctggcgatgagaaaaaatacccagaacctttcgataaaggctttcccgagcatgagcagtttccaccgctcatcgcaatggaatttatcgagcgtggaacagggcaaaatgcgcacgtcgtccaaagcttgcacggtgtgttcattggcgatcgtctaacggacaatagcaatgaacccgatgattaccgctttcacgacgtgtttcacctagcctacctggcccacttgggctggtcgccagtcctccggggcctcctcaagcgcaagcgaaagtcggaccccaggaaggatgaaaacgaggatggggcgcgcgccatgatcatcgaagagggtatcgcgacgtggatcttcaaccatgccaaggtgcaccgcttcgacagcaaagagaagcatggggggctcgactacaacgttctcaagcagatcagaagcatggtcgacggctacgaagtcgatgtatgccagctctggcaatgggaaaaagccatcttggaaggctttgaagtgtttcgccaattgcaggagcaccgcagcggtatcgtgaccgtcgacgtactcaagcacacaatgcgttttgatccaccaatgaagaatcagcagccatga

SEQ ID NO: 360887 - DNA, 681 bp, Pseudomonas aeruginosa
atgaatccaacagccttcgtgaaggcactgtccgaattgaaactggacaacgtcttcaatccctatgccgatacctgcccggtgcacgatcgagctgatgccgtggccgcgcgtcgacgcaacctgcgaggctacttgaaagccgcatccgagattggcgtagacaccatctggatgggccgagatctgggataccgtggcggccggcgcactggtttggctctgactgatgaataccacttgccggagatgacccaccgttaccccggttcaaatttcaagcaggccaccctcggcccagccctggccgagcgtaccgcttctgaaatttggtcggtactgcggtcggtggaacttcccccgctgctttggaacgtcttccccttccacccgcacgagccgggcaatccatttaccaaccgcaaattcacctcacgcgagctccaacaggtcgacctgctcaacgaaacgctgatcaaatggctgaaagtgcggagagtcgttgcgatcggacaggatgcgttcaattacgccagtcgtttcggaatcgaagttgtggcgatcagacatccaagctacggcgggatcaaagacttccggaaggggatgagtgccctctatggcatcccagtcgaaaatctcgatcccaagcgacagtcagcgcaggccacgctgttctag

SEQ ID NO: 360888 - DNA, 798 bp, Pseudomonas aeruginosa
atggcagttctgattcacggtgatcgtatcgttccggtttggttggaggctgcacgccaccttgcccaatgtgcggacaatgtcgaaagaaacatcgtcttggagattgcctcgccaggtgttttgaatgccctggatcgcgacgtcatcggggcggttgacgaggcacttaaaacgcagctacctggattgagcgtccaaacagttgccagcacgatattccccaaccatctatacaagctggacaagcgaccagcgttctatgagtcgtatttgaacgcaatgagcaaggggaagaaaaagggtacgtggggcacatacgccttgcggatgatacgtcgggttgcacgtaacgggacgacgacctataacccgttggaaacccttgtacgaaaactgcaggcctccaaagaggggcgatgctttcaggctgtctacgaactgggtctggtagatgttgagctcgacttgcaggacgacgggttcggctttgagattccgttgtacgaccccgccctggaccgtaatctaaccttgaacatgccgtgcctaagtcatatcagtttcaaggtgacgaagggcaagctcgatctcacagccctgtatcgctcccattggtattgccagagggccctgggcaacctcatcggtctcaacaatctgtttaactttgtggcgaccgagtctgggtttgagcgtggagtcctgacctgcctttcaacccatgcttatctggacacgcaaagctttggtggtgcccaagcgaccaaaaaactcttggaaagcttcgataaatga

SEQ ID NO: 360889 - DNA, 291 bp, Pseudomonas aeruginosa
atgagcgtcgtagcccagcccgactgcaactactgcgtgcatcatcgcgcccggcagcacggtaggactgaatgtgatgacgccatagacaggccgatagaaatctacggtaagccgcagcgccaggcccacaggaacaagcgtctgcattctgccgatcagatcacctacatcggcagcaaaaaactcaattggacgcccatgcatcgcgagatcatctggaagatcttcaagcgggatctggggctcatcgtcgcggtacggaaactcacgctcagtggggtgccctaa

SEQ ID NO: 360890 - DNA, 1017 bp, Pseudomonas aeruginosa
atggctcgccgcaacatagcgctaacgacagcgaagatggctgcctcagtaatcgaaaactcccgcgctatggagcgtatcgagcaggacgggtatacccgtgtggatccattccgtgttgcagactccgagggcatttcggtggcgctgcgtcccttggacaagttacttggcgcattcatccgtgatcagcagtcgggcatcttgttgaattcggctcggtcggctggattgatccacatgacctgtgcacacgaacttgggcactactttatggggcatgacacgaccgcagatgagaccattgagtatggctccaaggcggctgagatggagcaggaagcggatgcgttcggtcatcacctcctggtaccgcgtgcattgctcatgaatatttgccgacgcaagggttggaacctcaagtccatccaagatcctttcaacctctaccagctctccctgcggctgggtgtgagctatgcggcggcggcatggtctttgatgcgccacgactatatcgactatgacgctgtacaacgattgctcaaaacccagcccgcatcgatcaagcaatctttgctcaaaagccccctcccggattcaacgaaggaagtttgggtctttgatgagcgcgaccagtcctcggtacttgagcctcggcctgacgatcacctgattattcgactcaagagccatgccagtgctggttacctgtggctcgctgactcctctgaccaggtcaaggctgaaggatttaccttgcagcccgctccaaacgcgcctgtcgatcctaggactctgacatttggagcagagacgtctatggactatctgctgaccggcgcatcggacaacttcactgatccgcacgtggttgcgcttgcggaagtgcgtccgtgggaaaggaagcagcctggcgatgcctcttacgtttccaaagctcattttgagccgatcgctgaaggcctgacgcgagagtccaaaaaggcactcattaaagaggtccttaattcgtga

SEQ ID NO: 360891 - DNA, 282 bp, Pseudomonas aeruginosa
gtggatgtcaaggtcaagaatgcaatcgagaagctgctcggtgacttctgggacaaacgtgctttagagatccaagacgatcctctggcgactgaggacatgggggcgcctatggattcgatcgccgcctgtgacgccttcgtcgggatcgacaagctggtcggtcaaaagattccagttgagctgatcgttcgccacggtggttatgaatctaaaactcagttcgttacagaaatcaccaacggggtgatcaaccacgtcgaaggaggagccggtggctga

SEQ ID NO: 360892 - DNA, 684 bp, Pseudomonas aeruginosa
atgaaagcacccaaggcaactctggctcaacagtgtgaagggatcggctggtcgatcactaacctagtagcatacaagcacgacaagcgcagttggtcgatcaatggtgggccagttggactgccagaagaggttgttggccagacatacgccaccggcggcgcgcgagtgagctactgtgagggcggctccgtcttgctcctgctgaaggccgctgctctggaaactctggctaggctcaacaccttcaatgaccgagacgatgctatcgtccggttcctggaagcgcagatgaccatcctggccgggcatacggacgagattgtcgacaccgttcggtcaattacgccagatggagtggcgcgcaatgtgcgcgagttggccgctaacgccaggctcagcactttcttcccgcgtgtacgtgccgacttcatgctggacctgtaccagcagatgggtaacgagatgctcgctaagattctggaggccttctcggtcgcaccttatgactaccgggcaggttggcctgacttgatcgtgctcggcgatgatgcgatcaagtttgttgaggtgaagaccaatgaccggctactcgatacgcaggtacggttcgcaaccggtatcgggaatccgatgggctttgactgtggagttgtgcgccttactgcgatcaagggcgcctag

SEQ ID NO: 360893 - DNA, 402 bp, Pseudomonas aeruginosa
atgaaccagggagcactccagccagcgccactgttggctgccgaactgattgactgtctgtgtccaacgaccggagcgccctactcggttgagcgctatgttgagatctttagacttagcccagccgaatttgccggccatgccgcaacctatcgtcgcagcaaacaaggagtagctagcgaatccgataccgaagcgacgcaacgctttatcgcggatgtcctgcgggtgatctcagccgtagtcgagagcggagttgccgtcgagcgggcgatcacttggtttcgcctcgagccgttaccgacgttcgaacagcagaccgcagagcaactggttagtcagggccaggttgaacgagtgctgcagtttctggcctcctggcaggcgggaagccagggatga

SEQ ID NO: 360894 - DNA, 249 bp, Pseudomonas aeruginosa
gtggaatacgacaagggatatcgcttggaggtgactaagctgggcgagcggccgcttctggctttcatgtatccagagggagctgaggcgtcgccagcaattcacccatggagcaacgatacgttcgcgttcgagattgagattttgctgaacgacaacggttatcccggcactccggcctgggcatacgaaatgaggcccatgactcccgagcaagtcagccacctgatgcaaagaaagctggactaa

SEQ ID NO: 360895 - DNA, 1173 bp, Pseudomonas aeruginosa
atgagccgggggcatggaggtccaaatggcattggatccttcaataaagttgaccaactccgagctaagcgaacacccatgcggaaaaggattatccagatcttgagtggtaccccagagctaaaggctcgggaaatcgcaaagctattgaatgtcgagcgaagggaagttacgaaatttctctacgacaaccttggagagtttataaaagacgagaactctacttggtcattgaagaaagacgcgcgcctccaaatcgaattctctgcgactagcacttggatcacgcaagagcatttcgagcggtcactggccaagcatggatcacctcttgactgtggccacggtcacataattttgaagatcccaaaggagcgtaaggttcttttttgcgctgcagccaggatccttgcactcgctaaccagctcgcaaaagttaaatcactagttgagctcgacttcagcgaaaactctgaggcaatgtcctaccttaggagagcttttttcttcgagcgcctcgacaaaagtgtcaaagttcttccccgtcgccccgctagcgtcaatgcagaagggttgaaagctaacaacaagcgattggttgagcttctcccaatcgaggccggcggcgaagagaacgtccccgagcgcttcaagttcagttttatagaagcttttggcgagcttcacgctaataagctacatacagtacttggtgagctcattggcaatgcggaagagcattctgagacgatcatccccgggtttgctgggcttcagagctacaactggaaaggctcaccgcgtatcgtcgcggtggtttctgactccggaaaaggcatctgctcgacactgagaccggccttggacgagcactaccctgaggttgcggctcagttcccagaaacacttgaagcctcaaatgccaagcttatcatccatgctatgcgcaacggcggattgagcaaacgcggtaaaggtggtgggggtactggtttaaataggagctcaggttatgctgagagccttgacgcaaaggtcagtattagacaggaagacttttccgtcgagctaacctatgaaaaaccagacttgtataaacatagctggcgtttaggattacctaggcttttaggtactcacatagtatttgaattcaacttgacagataaatag

SEQ ID NO: 360896 - DNA, 177 bp, Pseudomonas aeruginosa
atgtccaatcactcggttaccacgacgcaggttgcccaagcgctcgagatgagcgttcagaacgccagcacccgcctgaagcgactgtccgaggaagggttcatcacccgcgtggaaatgtccgccggcagcggaggtaaggaattcgtgtacaaggtgatcggcaattctgcttaa

SEQ ID NO: 360897 - DNA, 330 bp, Pseudomonas aeruginosa
atgaaagcgaggttcgaagttcgcaggccgaacggaggagactggtacttccagttcgtgctagctgataaccaggtgatgctacgtagcgaagcccacaagagcctcgccaattgcatcaacgggatcgaatcgtgcagggagcactcgccgtatgatcgtttttacagcagattggacgatgaatcgggtttctcgttccgcctgagggcttctaacaacaaggccatcagccacggaccaagatgcgcttcggctgaggaaagagaaaaagtcataaacacagtgaagcggtacgcatccgctgctcagatcacagacgtgaagtag

SEQ ID NO: 360898 - DNA, 1092 bp, Pseudomonas aeruginosa
atgcaaaatgatcaatcgtgtcacccaacccctttcaccgttgaggtggcaggccatgatctggagttccgccaggtccgtctcgatgaccgcaaggttaacggtgctcagatcgccgctgcagctcgcttcaagcctgaccagatgccgatcgtgctgcagttgctcgactcgggggctcaggaagatatccgccctgaggaactggtcacgctgcaggacggcgtaaaccgcttcatcgtcatcgagtccgaccgcaaatacatcctgactgtcgatggagctcgcctggagtggccatgcgcaaaaatctccggacataccgtccgcaagctcgccgaggtcgacccggctaaacgcctgctgttggagcgggaggaagaggccgacctggaagtcgaagacaaccagctcattgacttggatgaggctggtatcgaacgcttcatcacccgcaaggcgatctggaagctgaacatccagggcgagaactacgacttctccaaaccagtcatcacggtacgtgaggccatctcggccgcaagcctggacccgaaccataactggcaaattttcttgatcgttcgtgatcagcccaagcgcgctctgaccatcgacgacgagatcgacctgcgcccggcaggcatcgagaagctgcgcctgacgcaaaaagacgtgagcaacggcgaggctgctgagccgattcgccgcgagttcaagctgcttgaccgcgacgagcaacacctgaacgccgtaggccaccactgggaaacccggttgtccaccgacggtggtcgttggttgctgatccacgaataccagctgccacccggcttctccgaagaagccgttcaactggcactgagcatcccctcgacctacccaagcacggccatggacatgttctacctgcaaccagcggtccatatggctgacggcactctgataccgcaaacagaagcgacggtaaacgttgacggggttcccttccagcgttggtctcgccaccgtgcgtggaacccagcaaccgacaacgtcatgacccagttggcgatggtcgatggctgcctccacaaggaggtcgacaagtga

SEQ ID NO: 360899 - DNA, 1377 bp, Pseudomonas aeruginosa
gtgaacaacggatctcgcctcgtagtgacggccgggatctataccgcactccgggaacacctgttcccgggggacggtaaagaggccgccgctatcctcatctgtacccgcaccccaggggccgcactcaagctcctgtcgaaggagctgattctggtgccctacgaggagtgcgcgctcagacaaccccacgcgatcacctggccaggcgattacctcgagcaagcgattgatcaagcgctccctcaacagcgttcgatcatccttgttcattctcacccaggaggattgttccagttctcccaggttgatgatgacagtgactcgggaacgatggtgtcgctgtaccaaggggtcgaagcaatccacggctcagcgattatgacgcctaatggggccatgcgggcgcggctctaccacaacggcggggctcccgaaaacatcgaaatagtgactgtcccgggtgatgacatttgttactggttccctgacggctctgatcagcagccaccattggctttcacctctggtatgacctccaggctcagtcaccttaccgcagcagtcgttggcgtgtcgggcacgggctcaattgtggcagaacagcttgcccgacttggcttcggccggctgattctgatcgaccacgaccaggtcgaatccaagaacctcaaccgcatcctcaactccacgcttgaagacgccgagaactgccggcccaaggttgacgttttcgcagatgcggtcgaacggatccgcggtcccaacatcgtcaaagccatcaacgatacggtgatgagcagggaagctgtactggctgtggccgatgccgacgtactcttctgctgcgttgactcgcatcagggaaggctgatctgcgaccttatggcctcgagcttcctgctccctctgttcgatgtcggcgtaactatcccgactcgcttgtccaacaagggcatacggagaatccatgatgtgctggggcggattgactacgttcagccaggcggctcaacgctctgcgccagagaggtctacaccgctcaatcgctgagtgccgaggagctgaagaacacggaccccaaggcccacagtgagcaggtaaagcaggggtacatctcgggcatcccggaagaggcgccgtccgttattaccttaaacatgcgggcagctagcgcatgcgtgaacgagttcgtcgctcgagccttccccttccgtgaggaccccaaccacaagtatgcacgcatacggttttcgctctccgggggctacgaggagtacgaagccgaacgcgacctcccacggtccgagtctcctactcttgcgcaaggtgacgctgagcctctgctgggccttcccgccctgggagcggcttga

SEQ ID NO: 360900 - DNA, 345 bp, Pseudomonas aeruginosa
atgagcttgttcaagaccttcgcacgcaaagtcgttctgaagtttgatcacttgcttccccctcggcgactcatagtcgtcaagggggactccctaccccctgaaatgccaatccgcgcgattgttttagctagggatggcagcgaggactggtgtgtcgggatgcagtgcccctgtgggtgcggccgaacgatcgagcttctggttatcgatgaggccaagccgcggtgggactacaaggtcgacgctgatggcctcccttcgcttcacccctctgtctggctgaacaacggctgctgctcacatttctggctcaagaaaggccgtatccattggtgccgttaa

SEQ ID NO: 360901 - DNA, 558 bp, Pseudomonas aeruginosa
atgcgcatgaatggattggaacgactggcgcacagcatgcgagcgctggatgtcgatatgcagaaatttctcttcacaaatggagcagccagctttgactgcttgttctccatgcggggggactacgagctctcgctgacctcacggggagtcaaccccaggttcttcctgttcccgatctccgatgattttcatctgtcgagctatctgagtaagcacaccctcaatgagctactgggcgtcctcaaaacccatgggctatcaacccaaggcttcagtacctcacgtttctttcaggctctggacctcgctgtgccgcaccaggcccaacaagcccgcgtacctaccgcacaagcgatcttggaccttcgccacgatcttgaagaaagagatcgcccatttttcgacgcatggatctactggacggaaagaggcccccgaatcgaaaacctggagaagacaatgaagctattggggccacaagcacgtgaattcagcatcaagaaccgggcgtcctccaggtggagcgcaattgatctgggcagggcctggagataa

SEQ ID NO: 360902 - DNA, 825 bp, Pseudomonas aeruginosa
gtggataatgagtacggtttaagcaagcgagccgcagaagagcatctccaagtgctaggtgaggatattggttgtcctgtctacatatttcgccttcctaatgtattcggtaaatggtcgcgtccgaattataattcagcggttgcgactttttgtcataatattattcgagatattccgattcaaattaacaattcctcggcagagatcactcttgtatacatagatgatgtggttcgcaccttcatgaaagtcatggatgggaagctatccaatgcagtttcactacaggtcgagccccagtatcagatttctgttggtgagctcgcagaacaattgtatgagtttcgtaatagtcgaaagtcactgactaccgcaagggttggctcgggattgacgcgcgccttgtactcgacttatctaagtttcttgccagaagatagttttagttacgacgtgccaatgcattcggatccgcgtggcacattcgtcgagatgctgaagaccgcggactctggccagttctcgttttttacggctcatccaggtgttaccaggggcgggcattaccatcactcgaaaaccgaaaagtttctggttatcaaagggatggcacgtttcaagtttagaaacatcctgaccggggcattttacgaaatttgcactaatggtgaaaaggcagaaattgtcgaaacagtacctggatggactcatgacattactaatgtcggaactgacgatatggtagtcatgttgtgggctaacgaagtatttgatcgggaaaatccggatacctacgcttgttcagtaggcgaaggtgcgtaa

SEQ ID NO: 360903 - DNA, 312 bp, Pseudomonas aeruginosa; identical to SEQ ID NO: 49033

SEQ ID NO: 360904 - DNA, 831 bp, Pseudomonas aeruginosa; identical to SEQ ID NO: 36219

SEQ ID NO: 360905 - DNA, 186 bp, Pseudomonas aeruginosa; identical to SEQ ID NO: 28362

SEQ ID NO: 360906 - DNA, 1455 bp, Pseudomonas aeruginosa
atggtctccactgatttgggcggtgacttgggttgccatgaatgcggtcgtgccatggtgaaagccaagaaggtgcacaaccactgccgctattgcgagacctgctacgcacgccttttcaaaccccggctatgccctggctgtggtaactcggctcgtcttcctgtttttgaccaggcggtgtgctgcagtacctgtaaccgggcgaagccatgtgtgcgatgcgccaagaccgaatttgccatcggtatgtggtcggattacgggcccgtctgcaaatcctgtgttccatactttcgcgaacctgaggtctgtgagacctgtggaaagctttcgcagcgtttggccgtaagtaccaagacagggcgccgcagctgcaacaagtgtcgagagccggcgaaagccacatgcgcgagttgccggcgccaccgagtgctgatcacggatgctgacggcatatcacgatgcaagatctgtatcactgaaggtgagcgcaaatgtggaacctgtggaggcgagatgccggctggtcgcgggcagtgctgtgaaagctgtacttggacggccgtgttcgctaagcgctctacgcagaactcggcaggcttcagcagtccgcgcattcagcagcatttcgaagcattttcgcagtggcttctgaaccgaagtggcccacacaaagccgcattgagcatcaatcagcactaccgattttttgcgcagatggatgctctttggggtgacattccaacatacgacatgctgttgaagcatatcggcgcagcagggctacgtaaggccgagaaccctatgcgttggcttcaggggattggtgctgtaacggtaagcgatgaagcgcgtgaagcgaacacggagcggcgtcggctgttggagatgttgtcggttttgcccgacttttggtccaaccagttgttgcatgggtatcacgactatctagctgtgcgggttgagagcaaggagacagatttgcgctcgatgcggctagctatgcacgcggcactcaattttctcaagcttgcagcgttggcacctcaagcgctaccgacgcagaaaacaatcgaagctttctggcggagttcgccaggacaggtagcggcggtctcgggattcgtgggctacctcaataagacgcgtaacacctccataaaggcccgtcctgagaaacgatggcttgagcaagccaggaaacataaggccgagcgcgaattggtggatctcctgaagagcgatgatcaagacctgactgagacagtctggatcgtcaagggaatggcttattttcacgagatctatcgggccaataggaagaagctcgtgtaccagaaggagagcttcaacggtatggccggtttcgcggttgagcatgaaggggaaactctatggattccctcagcgaacacctatcgtagtgagcgagatatcaaacagtttctgtga

SEQ ID NO: 360907 - DNA, 1122 bp, Pseudomonas aeruginosa
gtggaagcgtcctacacgtggcatccgggagctcattgtctaaatcccagatggccgctgaccccgcagttgttgcctgacgagctgttctcctcgtggttagtgagaacagcgttgttgcatggctgcacgcctgaaacgctcactaatcacgcttggccagggtctcgaatctggtccattgacatagaccgaacttgcgacgaaacacgcctcgcgaatttggctcatttgacaggcatcagcgtcgagagattgatcgccagcaccctgcttccggtgtcccggtccctccatcctcaaccttttctgcgtaccagtagcttgtggccatggatcatggttctgggctgccggcaccaagttcatgctggtggtcttcagtgctgtccggaatgcatggcggggtcgacgcctcactattcagttcatgatcgattcgcatggcatacctgctgtccgcttcatcgcgtactgctggttgaccgctgtcctcattgcttctcggcgctgcaacctggtttgctggatcagagcggtagcatcttcaaatgtcaccattgtgaggcgtgcctgaattccgcagcttcatttccttgctcgaaagatgcgttggcgttccaggcgtttgcagatgggctttatgggcaaagtacaatgttcggcggggataggttgagcttcgcagactggatgttcgtagctcgtgtgatcatcggcctgcttttaggtgtggcgcgacatcccacgtcctcgactcgactcttctgtgaactgatgcaggtcgacgcggctgcatgccagccatcctccttggggctacctctcgagtatctgagcccggccgagcgctcagctctaatggggcagacgtgggtgataatgcaagccggaccagaacgcttcgtcgagtgtgcgctgcgcgctgttcttccctgttcagccctccctttgcccgctcgagaagccccgcaagttttgaatcagatggcttcggctttaagctgtagctcacggtgcccaaggcacaagaaagagcagaatcacatccgccgtcctctgggcgtcttgaggatgtggttgcgactgcagagaaggattcgcagagatggtctccactga

SEQ ID NO: 360908 - DNA, 891 bp, Pseudomonas aeruginosa
atgacggactatgcccacctacatgcagactttcggccggttttgcatttatcagatcgcgagcggatcctcttcatgggcgagccgcggtggatcgcctacaagtcggcagtgaagattctggataccctgggttcactgcttgatgctcccaagcgcccccgaatgccaaatctgttgctggtaggggactccaacaatgggaagacaactctgatccaccagttcgtaaaaactcacggacagggctacgtcaacgaagaaagtgagcctgtaagacccattattttggccgagtcgcccccgttggccgacgagaaagagttgtacgtggcgattttggagcagatgtggatgccctatcggagtactgatcccaagatcaaactcaggtaccaggtgattcacgcactgcgcgagttgaaggtcaggatgctgatcatcgacgagattcactcgatgctcacagggtcggccattaagcagagggaggttatgaacgctctgaagctcttgtgtaacacgctgatgatcccaatcgtcggcgtcggtactccagacgctgttcagattctccacatcgaccctcaacacgcgagccgtttcgacaccgtcaagcttgagacctggaaactggacgccgattttcagcggttactgaaggctttcgaactggtgcttccgttgaagaaaccgtccaagctgtttgagcctcaactggctcaactccttcactccatctctggtggtaacaccggcgacctacatggccttttggtagagtgtgcaaaggaagcaatcacgtccggtaaggaatgcatcgaccgacagctcatcgagagtaagtcgtggaagcgtcctacacgtggcatccgggagctcattgtctaa

SEQ ID NO: 360909 - DNA, 1929 bp, Pseudomonas aeruginosa
atgaacatctacgagactggcaacgacgagcacctggagccatttgagccctctcgggcccgtgtgccgattgaggttggcgcgatggttcgccgggaaaaagatgttttccgcatagtccagattctggattttcaaacggtgattggccttgaggtcgaaacgggcaaatgctcatccctgcgggtgcccgaccttaaggcggtcgagcaagaaaaggttgaaggtctttacgttaactacgacgtctccactatcagttctgacgagtgggcgattgctcaacaacggttctccgcgatccaaccattcgtcaatgactcgataattcagcgtgacagcgtcgaagcacgcgcaaaggaagtcggtgtcgacaccgcaacgctctatcggtggctcaagcgttatcgcaattggcacgaagtgctggcattggtgccgcggaaaagaggatggaaggcgggcagcagccgtctgactactcaggccgacaagctgatcagcaatgtaatcgatgagttctatttgaacgaaagccgaaagtccgtgcaatccactatcaaggagatcgtggagcgagccaaggagataggcatagagcctccaggcgcgtcggctattcgggcaagaatcaagaacattccagagaagattgttctgcggcggcgtggttacgcagacaaggctcgaagccgccatacgccttcggtaggccagttcccgggcgcagattacccattagcgtatgtgcagattgaccataccccgatcgatctgatcatcgtggatgatcggcaccggaagcctatcggacggctttggctgactctggcgatcgatgtctactcgcggatgatcactggctactacctcgctctggaggatccttcggccatttccgtaggtatgtgcttggcgcactccatactgccgaaagagaattggcttctactgcataaggtcgagggtgagtggcctgtctggggtttcccacgcgtcgttcactcggacaacggggccgatttcaaagctgaagacattcggcactcatgcttgaaccacaacattgagaccaatttccggccaaagaagaatccaaaatatggtgggcgtatcgagcgcctgttgggcacgttcatgagaatgttgcatgagctacctggtaccaccttcagcaacactgccgagcgtgagggttacgattcagaaaagcgtgctgcaatgacgatggatgagttcgagcgctggttggtgatcaccatcatcctttaccacaacacctaccattccgccctgtacatgagcccggctcgccaatggcacttgggcttctttggtaaccgagagctggatccgttggtttgcataccgccccggcctgctgatccacacacgttacagctggacttcatgccgatgtatgagcgcactgtccaggcctacggtgtgcagatcgacgtgttctactactccgacgccttgcggcactggatcaacaccaaggatcctgagaccgggctggcgcggaaatttgtgttcaggcgtgatcccagggacatcagtgtcatctggttctacgatccagttcttaagcaatacttccgcgtgccggtggcgaatcaggctttccctgcggcgacggtgtgggagtatcgagcggctaagcagcaggcggtagacgaggggcgtacgaacatagatgaagcccttatcagtagccttatcatcgagcggagggtgttggtcgagcagtccatcaaagacaccaaaaaggcccggcgcgatgctcagaaactcaaggtgcatgccaagaacaaaacgcctgcgcagccggataggccgttttcgcaacctgtaccaccgccagcaatgcccgttctagagggactgttgcttggcgatgttgaatttgatggtgatatccaatga

SEQ ID NO: 360910 - DNA, 189 bp, Pseudomonas aeruginosa
atggtgctcaacaccctcaaaggcatgggggtagcgccagtccactatctcttggcccgtcacttcaacggtatctacagggggcgcggggtagcgctgctctggcacatggttgccgtaggcttggttcagtgcgacatcaacgagccgttgaatgactacctcgagctgtgggtgatgacgccatga

SEQ ID NO: 360911 - DNA, 360 bp, Pseudomonas aeruginosa
atggccaagggcgacgaggcgcgttatttcgagtacctggaggcgatgaagggcaagcggcaactgttctggtcgcctgggctcaaggggcgctgtggcctggatgacatcagcgacgatgacgccgcgcttggtggcgatgacctcgaccacctgggcaacctcaaccaggacgaatgggatttcatcaggagccggcgcctggctgctcaggtgctcgatgctgccgaactcggcggctttgacctgatcctgcgctacctgaaacgccaggggtacaagcccccggattttggtaccacttccgctgaccaggacgagcatcgacaccctggattggcaccatattccgtgacgtaa

SEQ ID NO: 360912 - DNA, 282 bp, Pseudomonas aeruginosa
atggctaagccctatcctatccttcccctgtccttcctggacgacatgaacaccctgaacagctcgctgtttgcctaccacttcgctgtcgaggcgatgattaagagcatcgctaccgatggcgctccgtacgattacgagagccttctgtgcggcctagacaacctgtttcagcccatccttgatggctacaagtccgtagccgatcaggctatgcagttccgcgaaatgggcgttgtaggcgtctgcacgttggctgaatccgaccaggaaaaaccgtaa

SEQ ID NO: 360913 - DNA, 306 bp, Pseudomonas aeruginosa
atgactaaagagaaccaggaactggaaccagtagcgaaataccagcggactatcacgctgacccaggacattgccgaccgcctacaggccgtctgtgagcatctgggggttacggcaagcgcgtacatcaagcaggcgattggggagtctgtctcccgccacgaagtgtcgctcaagccgcagcagatggttatcaacgccgaggcgatcatggccaaggcattcgagcagcttgcttcagatgctcagcagatagaggttcagcaggatgggaagaaacgaccaggtgcggctaaagccaagtga

SEQ ID NO: 360914 - DNA, 375 bp, Pseudomonas aeruginosa
atgaccagagatgctgaagagcttctgacccaatggggaaaatgggtttggcaagagaccggcgtccctcgctgcgggtcgccaatgctcgcgatcatgcgggacaatgttgcaatggagcgctgcctgtccgcatcgatatccgacgacgatgcaatgctcattgacgggattatcgcaaggatggggcggagagacgaagagatggctaattgtgtgcgggtgtattacgcaacggaaatgacaatgcagcaggtggggaaggtgttaaacctgaatcgcctgaaagttcgagagctgctaatcgctggcaggtgttatgtagaggctgttcttgatatgcgggagagaatagctattcgcgatgccgcctga

SEQ ID NO: 360915 - DNA, 234 bp, Pseudomonas aeruginosa
atgagccgcagcttgttcttccgcgccatgcggagagttcctgttcggccaagagcgctcattgtcctgatgatcatgatcgcctttggctgggtgccgcttgtggtggccgtatgcgaggcagtcggcgaaggggttcgggcctgccggcaggaatcgtccaggctctacggtgacttcagcaaagctttcaccgactgctggaaagccttggtttcgggggagcctcaatga

SEQ ID NO: 360916 - DNA, 594 bp, Pseudomonas aeruginosa
atgggtaagctgcttttgggctatgcccgcgtgtccacggacgatcagaccacggccctgcaagccgatgcgctggccaaggccgggtgttcgcgcatctacaccgacaaggccagtgggaagtcgacggccgcgcgccctcagcttgaggaatgcctcgctgacctgcgcgagggtgacacgctggtggtgtggcgcttggatcggttgggacgcagcgtgcctgaccttgtgcgcatcgtcggcgagctggagcgcaaaggcgtgggcttcaagagcctgaccgagagcatcgacacgagcacggcatctgggacgctgatctttcacatgttcgcggccattgccgagttcgagcgcaacctgatccaggagcgcacgcaggcgggcctagcagctgccagggcgcgggggcgggttggtgggcgcaagcccaagctcgatgccaagcagatacggcacatcaagacactgctgcgtgaccccaataccagcgtggcggaactggcgaaagactacggtgtgtcgcgcacgaccatctacaagcattgcggcgtggtgccgccgaacaaattgatcgaggagagcgcatga

SEQ ID NO: 360917 - DNA, 303 bp, Pseudomonas aeruginosa; identical to SEQ ID NO: 360807

SEQ ID NO: 360918 - DNA, 1524 bp, Pseudomonas aeruginosa; identical to SEQ ID NO: 360809

SEQ ID NO: 360919 - DNA, 192 bp, Pseudomonas aeruginosa; identical to SEQ ID NO: 346350

SEQ ID NO: 360920 - DNA, 228 bp, Pseudomonas aeruginosa; identical to SEQ ID NO: 360814

SEQ ID NO: 360921 - DNA, 258 bp, Pseudomonas aeruginosa
atggataaggtggcccatcagtcgctccgctgggatctggagcaagacctttcccacctcgtccaggacgagcacctggtgcgccaggtcctggacctggtcatgcgccgagtcgtccaggagcaggccgccgaggccgttcgccggcagcgcatcaaccgagacttcaagacgttccggcgcggccggagcgtgacgccgcccgcatgggcatttcgtgaaccgggcacacgcccacaagttgaacccctgaggtaa

SEQ ID NO: 360922 - DNA, 201 bp, Pseudomonas aeruginosa
atggcggcgctggtcaccacggtggcaccgacagtgccgtcgccggtgttccctgccgccgcggttgcggtcagcgcattggcggcggtgatgggggcgatcaaggtacccgccaccagccggccggagccggcggtgatgacgatgttttcgcggctgcgcgagccgttggcctccgacaggaggaactctccggcgtga

SEQ ID NO: 360923 - DNA, 171 bp, Pseudomonas aeruginosa
atggaggccggcgccctggatcgctaccggaccattgcgtgccgcaaggccgagttgcagccccttgatcgcaagggggctttcctcgattccgatggccaggtctggcgcatcgacggcatccatgccgatgacggcgactggatcactttctacgtggtgcccgaatga

SEQ ID NO: 360924 - DNA, 978 bp, Pseudomonas aeruginosa; identical to SEQ ID NO: 319456

SEQ ID NO: 360925 - DNA, 246 bp, Pseudomonas aeruginosa
atgaaagccctgctcgaccgccgtaccgatcccacctggatgctctacgccgcaatcatcgcctggctggccttctccggtctctggccggcaggccgctggcgcctcgccctgccattccaagacgctccggcgtcccgcctttctccggtgaaataccgagctttcgtcgccaacatcgccaggcgaggcctgcgcaaacgtttcacccgttcgctgtcaagaaaaccttgtcaaaaaagctga

SEQ ID NO: 360926 - DNA, 699 bp, Pseudomonas aeruginosa
atgggcccagatgaaccgcacatgcgggtgattgcgcaggggctcctcgatttccgccaggtacagcgggttgcgttcgcgcttggaagtgacgttggcgtgcagcaacaccggcaggtcgaattcggcggccaggtgatagacccgcgccagcgcctcgttgttggccctcggcacgtcgccgtaggtcagcgcggtgaggtcgtcgtgacgggtaaagatctcgccgatgccctgccagagtcccgggtccagctccagcatgcgacggatgtgcgcgtcggcgttcttgtcggtcgggttgaaaccggtcaggaacggatgcacgcgccgccgctgctcggctggcagggatttcaccgccgccgccacgatcacgtcggtggcgctgtaccaataggctccggcatcgtcaccagcgtagtagcgcggccgcttcggctcgtcctcgtgccatttcttggcgaccgcgacgccgctgagcatcacatggtcgacccggcctttgtccatcgcctccagcagccgcggcatgccttcgctttcctggaaaaaatccacatagtgcacgtgagcgtcgctgtagcgataatccctggcatgggtcaaggatgtcaccagggacagggcgaacaatgtcgaaaacagggcacgcgtacgggggccagccatggcattcctcctgataggcctgagtga

SEQ ID NO: 360927 - DNA, 147 bp, Pseudomonas aeruginosa
ttgattcccgagcaaagagttagagaggcgttcatgagtatctgggcgcgtttctacagcgacgaccttcaagcctttgcctccggctttgagcatctcttacccaaagagtctgagcaggtccatctcggcagcggtaagtactga

SEQ ID NO: 360928 - DNA, 393 bp, Pseudomonas aeruginosa; identical to SEQ ID NO: 332450

SEQ ID NO: 360929 - DNA, 507 bp, Pseudomonas aeruginosa; identical to SEQ ID NO: 342406

SEQ ID NO: 360930 - DNA, 774 bp, Pseudomonas aeruginosa
atgcacatcctgccagggcatgcgcggctggtcggcggccagccgggcgttgtccggcgaggccaatggctgaggcgcttcgtccaggtagcgatagggttgctggtggcctccggcgcgagcctgcatcagcctgtggagtgtccagaacagcgagccggccaactcgccggccttgccgctcaggttctgcgggatatcttcgaagcccttgccgctgatcagggtcaggacctggcccagttcggtttcgctcatccactggttgatcaggagcaggctcttgatccgcagggcttccggcaggttgagcgcggccgtgcgcagttcctccagccaggcgcgcaggcggcgttcgagttcaggctcgatgggcagggcgtcgaggttgtcggcgatcaggttggcaatggcgcggatgctgctggcgaccatctgccgcctgagcgcatcgagccgttcgaagccttcgtccaggccttctttcgagctgttgtaggcgcggccgagccattgcagggagggcagcatcgggctgcggaacaggtcggaaaggtaggcggcgccgttgagggcgcgggcgcggctgggtgcgaggggaatgctcagcagcggttcgtcgctggcggcgatgtgcgggaagggcgacaggcgaagggtgggcgcatgcagcgtcaggctggcgagcggcctggaaaggtcgaacagggtggccatcatcaggcccatggagctgacgtgttcgtcctccgccatccagccaagatgcggtag

SEQ ID NO: 360931 - DNA, 831 bp, Pseudomonas aeruginosa
atgcttcttccacaaattcacccgcaactggtggatggccttgccgacgatggcgtcgttcttgccgtccagcctgaccgtcagcggctcgctgtcgcgcaccatcaccgccagctcggagtcgcgctcgccttgcaggctgcggtcgttgatattggcgctgccgaggatggccacccggtcgtcggcgatcagcagcttgctgtgcacgtagatctgttcggtgaccacccgcccgccgagcaccgcccaggtgcgcaggttgagcagggtcaggtagcggctccagtcctgctgttcgtagaccgggcgaccgcgagcgtccttgcgctcgatgatttcccgggcctgggccgggtcggacttgccttccagggccttgagcgccatctgccgctgaatgcgcttgaccaggctctgttcgccgaacaccaggctctgctgggtcaggtgcacctggtgcatgatgttcggcacgttcagcgcgccctccgggtgcaccggcaggaccaggtagacgtggaacgggtgctcgcgctggatggcccgttcgatgcgccgcgccagggcttcgccgatctcgttgagcaggccgtgctgggcttcgccgagcttgtgggtgagccagccctgggcgttcacgccccacatggcgagcatcgacttgaggaactggcgggcctcggtgccaggctcctgggcgatcttctccacttcggcccagtccagcagccagaggtcgcgctgctccagggcttcctccaagcgtatccggacgacgaagtcgcgtcgcaggctgccaacgtcgcgcagactggccatggggcctga

SEQ ID NO: 360932 - DNA, 402 bp, Pseudomonas aeruginosa
atggatgagttgatggaaagggaaagtgctggtgagaacgtgataccggatcaagagcagtacaaacagatgatcgcgaaggcaatcctgttcaagtcagctcacaagatcatccgccccatgttcccggcattccaagccaacatcacgtcctacacagtttcgattctagcgctcaagctgggagcgaccctcaatctgaaccgcatctggcaagaacaatcgatatcaccgcaacttcatcgccagatcgcgatatgggcggaagaggtcaatgacgcacttcatcgaggagccggcgggaaaatgatctccgagtgggccaagaaaatcgaatgctggtggagagtaagggacacctcctactcttctgagctaggtgatatcaccgaattatcctaa

SEQ ID NO: 360933 - DNA, 618 bp, Pseudomonas aeruginosa
atgacaggcaatggtgtttccctggtgaccctcggggtcgccgatctggcccgctcctctctctcactaccaggcgctgggctggcagccctcttcggacggcaacgagcaggtggtatttctcaagggccgcaacctggtcctcggcctctacggacgcagcgccctcgccgaggatgcgcaggtggaagatcgcccgaccggcttcgcggctatcaccctggcctgcaactgcgcctcgcgggacgaggtggaccgtctgttctccgcagctacggcggccggcgggcaggcgaccaagatgccgcaggaagtgttctggggtggctactccggatatgtcgccgacccggatggacacctttgggaaattgcctacaacccgttctggccgttcgacgagcagggcaacctggtcttgccctgagggcgctacggatggaaaaacgccccgctcggcggggcgcattccttggcggcggtcagccttcgttcggctggcgggacggtgcgcgcggcgtcgttggcgcgggtcgtccggcctgggctacctgctgcccggcgtcggccttgtccagcggcagcttgtcgaagtcgcgcaagccattgtgggcatag

SEQ ID NO: 360934 - DNA, 720 bp, Pseudomonas aeruginosa
atgaaatatctatatctagggcacccaccccattgctatgacgacgatttggggcatatagccgagagattcgcgcaagaggtatctgaagataccggatgggctgtgcgttcgtgtccgtacgagggcttcaatcagtctcttaatgtgcagcagttttcctcattagtgctccagaaccccggccctattttgctgctgaggcctgtgcaagcaagaacggttgagctcatcaggaacaaactaggaggccgccttcctattgaagtgcgcgaaatcgagacctctgagaccctacgcgatgcggtgattgctgccgagcagaggttcgatgccggagagcccttcctttctctggacctgattgtcggacttctactgatcagaaagctcgacaaagaacgcatgtggggcggtaacgccaaggggtacatgtgggtcgaggatattcctaacggaagagggctcgacgaaaaatatgccgggcgcgttccccacgtgctgaacgttctgcttcagcaagagctgcttatctccaagaagagcgggagctcaaaaaagtacgccctgaaccctgacatgcgggaagcaatttatgacgctttgcggagccgcatacttcctggaaaggcccaaggctacctgaccaggggtgacactgaagagtccatcagagcgctggatctgcttgatgagtatcttgaggagggcgagggttaa

SEQ ID NO: 360935 - DNA, 891 bp, Pseudomonas aeruginosa
atgcgcctaatgggcagactttgcttaataggggaaaaaatgagctacctcgaatatttggagtttgtgctccaaaccgcgaccagcaacatcaagcctggtcaagcgcaaatcactgcagccgctctcggcacccttcttctccagtcctcgcccaatgtcacgtggaaaggattcgacaagcgctctctcaccgagcttctaaacgacccctggtttcagggcaaacttgaacttggcgaaacagataaaggcgcccttgccgtatcaccggtaggccaccaggttcatagtggcccctccttgatcgaaacgttcaacccactacgcaaagcgatgtgggaggtctttgttctaacgagcccctcaggccgtcgatacgtcagccgcattgatggctccattcgacttggccaagagattgcccccactcccgctgataactgggtggaggttcagccagtcagcaacgaccagcagtttgagtgggcctgcgaattctccaaagaccatgctgaccaactcaaaacggaacctgagcggcaaggctggacgcctcacgtattcaattcgatgctgaaacaagagcacgagtctcttgcgccactatggaatcgctatcgctccgcccgagtatcccaagttgtccaggagtggctgacaaagcattccctcccacgtgattttgccttccaacgaagcggtggactgggggcaaagaccaagcaaactgctgcaagtgcaggccatcatcagcttgagctttctccagaagaaacaaagcaggtcctgctctgcgcactgtcgtcgcttcccctcgataagcttctcgacatcccccttcctcctcgcctgatcttcgaagctctctctaaaagcaagacgcgctga

SEQ ID NO: 360936 - DNA, 1746 bp, Pseudomonas aeruginosa
atgtcagttgagcaggtacgttcggcattagagaaatttatttctgggcaggaagctaaggctattgtgctaaagggggactgggggacagggaaaacttacttgtgggattctatgctcaaacaaaagaaagagaaaatttcacggagaaaatattcctatgtctctctttttggactaagtaatctttctgatttgaagcgtgggatatttgaaaatgtggtttctagcgagactgctgatgtcagcggtgattttagaagcttgatggataatgttgcaggggtcgggcaagctttagatagagcttttcggaagggggtgagggtcactgcggaggcagcctctattccctttgttaaagggttggggggggttgtagatgccgtttcatttgccagtgtttctgattcattaatttgcattgatgactatgaaagaaagagttctggtctttcggggagagagatattaggtcttatttctcatctcgttgagaagaaaaattgcagcgtaattctgatactgaatcaagggcaggtgactggtgatgctgctgagtatttacaatttagtgagaaggtttttgactatgaggtagagttttctcctaccccggaggaggcagctaatatcgtttttaactatgaggatgactatgaaagaaaggcaattgaaaaatcccttgctttaggtatatcaaatatacgcctcttgaagaaagtgaagtatttttctggagctttaagagatgtgcttgtggggtatcctgatgctgttgttaggcaagttcttaatactcttactttggcagtttggtctatatattcgagcgatccggataaggttgctattacagctatcagggagtttgggggtggagggttcgaaaagtttttcgaagagggtttagaggatgagggtggtgctgctcaaaatcttaaaaataaatcatcgaacttgcttcgtgaatatgggtttattaggtgtgatgagttagatgaggcggttatttctctcgttgagaaaggctaccttgatgaggctggacttagaatgcttgcagaaaaagcagctgagaatgttaagcacaatgaggatgttcagctgctgcaagaggcgtggagagtatataggtgttcgtttagggatgatgagggagagataatagcaggatttgaaagggctatagctgcttgtctaaataagatgagtgttatggatctggattctatttgctttttttataggggtgtggggcgcatagagcgtttggaacaagtggttgatagttattttgtgggcatgagggagcagggagtggctataagcaggagggagatttttagatggcctggggatgtgtttttgtctgaagcgctaacggcttatatagaaagttctagaattgtaaaaaaatttgaggattatattattccgtatgcgggaactaatggcttggatatagatgattatctgagtttgtcttgttgtgaggtggaagagttttataatttcttcgctggttcggattccgaaaatcttcactcttggatttctttctgtttgggttttgcaacgattagagcatcagatgaggagtcgcagcgggctttcgagcagatatttgtaagagcatttgaagcgatactaagagtaagggcagaatctaatctgaatgctcttagaacgaatgtgtatatgagttatcaggacgcttatgacacattggttcggaagagttaa

SEQ ID NO: 360937 - DNA, 1002 bp, Pseudomonas aeruginosa
atgaagcagttactcaaaacaatattcgcaatcagcggcatcacattcatgaccactggctgcagtgatccgacactggattatcgaaacgctcaaatttccaatggcatgatttacgacacgcaggccaacgccccatttaccggcttggtcacaaatcttccaacccaacgcttggccttcgatgcgaagctgcaagacaccttggcggcattcaacaagaccgtggagcactacggagggcaggcacagacgttctactaccggagcctcacctgtgatagcgaagtcagagacggatacctcaccggtgtcagcacatgcttcgtaccgagctcacgcaccaagcgctacaccgccaactacagcggtgggcggctggacggagaatttgaagtttacgcagcggatggatccacagtactcgccaaaggccggttcaaagatggcaacccggagggggagctgaccatatacggacctaacaatggccggctagtcaggcgtagcaacacagtgaatggggtattagatgggcttcaagagcagtgggatgaaaccaccggcaagctcgtctcccgagcgacggcggtcgatggccaatatgtcggcctgtatgagacctggagcgtggatggagtcaaaacctcggaaatcccctacgcaaatggaatgcgcaacggaattgcacgcgcatgggacgccacaacaggagcgctcgtagaagaggttacctacgtcgacaatgccatgcacgggccggccaagaaatggacaagcgatggcaagctgatcaagtctggaacgtataagcgcaatgcgtactatgaggatccgacttcggccgtagcctcctccagccaaacccccgatgacgagcctatcgagtgcatcgacctttggatccaagcttatcgtacggaaaaaggagaggacgctttaatcagcagcgcgcagttgaacgagtggagcaactggtgtgatgaggacaaaagaccttaa

SEQ ID NO: 360938 - DNA, 348 bp, Pseudomonas aeruginosa
atggtctgtacagatcagaaggcactggccgaagccgtggggcgcgccattgctaaacagcgggtgcgttgccagatgacccaagaggaggtcgcagagcggctgggagtgggtaatgaagcggtctcgcgaatagagcgggggatcgtgatccccaatatcgcgcggctgttcgacttcgcttcgatcttcaattgcaatgccgccgaattgctgagtgaggccagcctacgtcccgatgaccaggccacccgaatcagtgggttgttaggggcattagatgagagcgaccgtcaattggtcgtggagatggtggagcgtttgagcgaacggcttggtcgtgactga

SEQ ID NO: 360939 - DNA, 324 bp, Pseudomonas aeruginosa
atgagcacacggtgcctgatctgtaactcttccgtagtgctgtccaaggatgccgccaaggcgctggcccggctattgggcacgctggacggttttttgcgcggtatccaacaatcgtccgccaagctgcacgaccttcgttgcgaaggcccgctagaacatgcattcaacctgatgctggatggcatttgcggtgcggcggcgaactggaacagtaccagcgacttcattcacgacgtgcgccgattccagttcaaggagtacgactgtctttgcctacgctgtggcgcaaagtacaacgagcaacctacaccccgaagctga

SEQ ID NO: 360940 - DNA, 189 bp, Pseudomonas aeruginosa
atgaacctgctgcgcttcattggactgttgttcgtgtttatcggcgtactagccagttgtacggtgaccatctcgctgttggtgctcatgttgcgcttctggccgttactgctggcggtcgtcctcgcactggccatgcttcaaaaactcatccactgggccggcatacgcatttccgcctcagcataa

SEQ ID NO: 360941 - DNA, 1734 bp, Pseudomonas aeruginosa
atgagcataaaaatctcttaccccgcaattaaaatccagcaaagtgatagctcgaaaccacttgttttatttgctgctccagctacagagataaatgaatgggctggggttccgcaaaaagccagaatctcaaaggatgaggctctagatgcggagttgttagggttccagcgagatgatgatgaagataggatagtaaaaatatcgaaattctattctgatccgaggaatgtcattcaaaatcctctgctttgtgcaataagaaataaattgggtgttagtatagagtttgctccgcgtgatgaaggcgaaatgcctgtggtggatggggagctaacaataacctatccggatctttccaaactctccatgttggagttgtttaaaggtgcgaaagagcacttggaggaaagggttcctgacctaaaagagcaagaatccccgaaaaaattagccgcgaaattgagtaagctgatcgggcacgacttctttcctgatgatgaagagctagacgagatagaagacgagcaaaataatccagacgaagaagaaccgttagaagaggctgtgttgtcgcagtctcatgtggtcgatttttggaaagagctcgcggcgagagtgttgatcctagagaagctgggcgtggcgtatgatgaagatgagtttcttggcttttcaagagaggccatggaggtatatctgaagcctgtaatattggtagatggtcagcatcgtctaaaaggagcaatcaaagcagcggaaatagcattggactcagatgatgggcgatgggggcggatcgcagccttgacagataacggcttgtcacctgatgaaattagcaggtctttactgtcagagaagtctcgcaatcttcctatttcattactgctcgatgagaaagcagatgagcacgtttttcagtttgtggttgtgaaccaaaaagcaactcccgtaagagcagctttgcttggaacaatcatctctactagcttagcggacaacgagttgcaaaggattgcagatcgtttagaaagcgcaggcattcctctgcagagttccgttgctgcaacttatcttgcaaagaatcaagaaagtccatttgctgggcttgtagcaagaggcctcaatggcgatggggccgacctactgccctggtctgttttgagccaacttgtatccatgtttagaaatttgcgtggggctaggtactttcacgattcaaaaattgattatgctgatctttggaaaaggaaatatttggaccaatctgcggtttgcgataactggaatgcggcagactttaaaaatagagaggagtattggtcgagtccagaaggaccgtggcgagacgtatttattgagttttggaaggcggtaaaggataagcttgctaaggccgactatcctaaagccccgaattattggggtaatcccaggacttcaaatatatttaataagccgactctatttacattggcaacggatttctttgcgtatctggttgagtccagacagcctattgataattcggtagcagtaaaggaaatggttgatgagtggttgcaagacataaaggaagaatacttctctcgcgattggaagcttgatggcgtgaagaaagactcgaccggtactcgtaaacaatggtcgaatctgtggttttgctatcgtagagatccaaaggccctgcctagcgtgaagagttactcggtgctttataagggtaactag

SEQ ID NO: 360942 - DNA, 999 bp, Pseudomonas aeruginosa
atggcgcttgaaaatataaatcaattcataaaagaaactgcggagcttgcgctaaaaaatatctggagtaatgaggttgctaaggaggtctgcgggaaaaaggttccggatgggatatttcacgataatcagagtattctgcaggccgatgcggcgacgctttggctaagatggtttgttgaaagcgtttgctcgccaactaactacatagaggatctctcaaaaaacgaggttcacatttatcaggatgcgttaagaaatataaatagcgcattttcaaatagccccaagccttatagggaagagctggcctctttaatctcaaagaggatatatagtgatgttaagatagagcgcgctatcgggcgaacatttgcgacaaaagagcagaggcttaagcttgtcgcctccagcaacgagccccgttgctggatttgtggttataaatttactgaagaggctttagatcagttcaccggaaagaaaggaagaaatccgatagtgttgccacagctggttgatatctttaggcctagaggtattcataaagacgacctcagaatcgatgtagaacacatcgtgccggtgagtcaaggagggcagggggatgagaatctagctttagcatgtgggtggtgcaatcgttataaaagctcaaggacgtccatctacgatgtaacgtcaaagccatatcgagttaaattcaagctaggagaaaatacacgctttgagcttcccaatcctttttggatcgttaggatgtctgccacacatcaaaaatgtcaacatggtgacggctgtgaaaaaagcgtaaaaaattctgagctttttatagctcctgtgaatagcattggttcaccaaaccctacaaatcttaaagtcttttgtggtagtcatgatccattagcattcgagcgctcagtgtcccgcgagtcagccagggagatttgggccaataagcgcaagaaattaatattcgattttgaggaggacgattaa

SEQ ID NO: 360943 - DNA, 1986 bp, Pseudomonas aeruginosa
atggcgaagctaactattaaccagatttccatcgagaacctcggcccgtttcgtgagcagcagagcttcgacctcagcgtacagaacatacgccccgtaattctgatcaaagccctcaatggtagcggcaagaccacacttctcaccgcattgcagatcggcttatatggctacaaggccatcaacgtggcgcgacgttctgaatacgaacagctgattacgggcttgcaacgcaaagacgccacaggacctgcacgaattgagatgcagctcagcattgaggtcggcgattacatccaggctctgaccatccgccgtgagtggatccccaaggagaagggatatcgcgagcatttccgcgtatttgcagggcattttgaagacttagcgcttgccgaagattgggatgattttatcaacggtattttaccggtagagctggtgcatctctttctcttcgacggcgagaagattgaggccttggctaacccggaacgcctcccggcattgctacgcagggctacagaggtttttctagggttaggcggtatcgatgccttggcaaacgaccttaaggccgtagagcgtcgctccaacaagaagccactgtcaggcgacaccggcgacgaccaacaactggccgatgactacgagctccaactaaaggcgctagagcagaacatcgaaatgttactgcagcgccgggcacatgccagaactgaactagatgatgctcagcgcaggctggaaagcttttccgtcgaagcacagcgcagcggactccaggcttatcagcaggcagctgagttgcgcgcacaggtagacctatgtgagcaacagcataagcaggcgcgcgccgctctagtggcgacgttggaagatccaatactgccgctagcttggttggggcccctctgggaacactacaaagaacaatggcagctagaacagaaagccaagaatgctcgtcttatggctgatgagtttgcaaagcgcgatcagcgcattttagaactactagcccgcgaagtgccgcaagctcaatctgcagtagcagagcttctgtcggcggatctacagaatctgcaatatactaagcaacatctaccgatactactttcgggtggtgatccggccgaaatagagcctcgcctgcaacaagccaaacaacgcctgaaggaagcgcaaaatgccttagctgcgacccaacaggcaatggcaaaagcccaatatgcagtggatcaaatcccagcgtacgagcagctcagtgcggtcttcgaggccatgcagcagcacacccaagtcgtatcgtctgctgagttgcaagtgcaggaactgagtcgcgaacttgaagaggctcgcggcaagcaggcccacattgaaactcgttacaaagcagcactatctcgcgcgcgcgcagagctaaaggaaaatgccttccagctcatggctcttgaggctgcagaccgagctaaggcggcactggatatattcagagatcgcttgctggcttccaaagcacagtggctttcagagatgatcactgcggagttcaagcaactgctgcgcaaacgtaatctaattgctcgcgtactagttgaaccgcagacttatgcagtttccatcgaagatgtaaacggccatagtttaccaatggagcgtctatctgcaggcgagagacaaattctggcaatcgcagtacttagcgccttaatccgtgagcgaaaaggacggttcccggtagtagtagatactccattggcacgcctagatcgaaagcaccgtgaggcgctgattcataatttctttgctagaatttcgcatcaagtgcttgtgctttcgactgatgaggaggttgagggtagcgttcatactgccttggagcagcatatggctcgcgaatacgcccttacctttgatgacgaaagccgccgaagtattgttagcgtgacggcacaccaactccaactggaagccactttgtga

SEQ ID NO: 360944 - DNA, 1014 bp, Pseudomonas aeruginosa
atgcgcgcagtaactcgcaaagaggtcaagacgcctgatgcgatgggaggggaggactctcctgctgggcgagagctcaataaactaagagagtatttcgctcagcccgcagggaaggccccagcgttctccgtatacaagtcagacagtgtaaaaaaacagctcgatgcgctgtttcatggcaagtgtgcctactgtgaaagcttttatgcgtcaaccgcaccggttgacgttgaacactatcgccccaagggggccgtctacgaggatgcaaaccatccaggatactggtggttagctatggattgggacaacctgctgccgagctgcatcgattgcaatcgcaaacgcaaacagaaggtccccaaactgtcagctcagttgctgacgctgcaggaagagcagcaaggcttcagccacagcatgctgatatccagcggcaaaaaagacagctttccagtgctcggtactcgcgctatgactgagggcactgccatcactgatgagtacgctcttttgctcgacccatgtcgagacgatccgcaagagcatctgcgctttcacattgaccggagcaatctgattagcctagttgtgcctgtctcacatccaggagcgggactgccggttcaggcaggtacaggagccgatgaagtaacgaggtccgtcattgagcaagccttggaagcgggcctgagcctcaaaggtgcgctatctattcacgtctatggcctcaaccgccttggcttggtacaggcgcgcacgcgcatactgcgacagctggagttccttgagttgctcgccatcgagatcgcttctatggctgacgccctagagcctgatccggcgaatcctaacgaacacactgatcgtgatatgagcatcgtacagcgactgtatttactccaggaccacatcctgcaggagatgaaacgcatggcgaggccggaggcaccttattcagtcatggtgcaaacctggattgagggcttcaaggcgcgcctgctgagctga

SEQ ID NO: 360945 - DNA, 2307 bp, Pseudomonas aeruginosa
atgcaacgctttgatcgcagtagtgagccgccaccctctacgttgcaaagtatggaagccttaatccacaggaaggagctagctgactacttcctcatggatgcagtgaaaaggtcgcaaacccgggcacctgatttcggcgccgggctggatagagagtccatgaatgcgggattacgcagactttttcgcggaaaatgcgcattctgcgaaagcatagttgccactataccttaccgatttcgcccccctagcgacgctactccaacagggcgtaactcagactctcacctgtattactcgtggctgagtggagcttgggagaacttctacccaatctgtgcaaagtgccttcctacgcagagaactgattattttccagttcgaggaaatcgagctccgttacctacgaaggaacagctacaaaactatgcgagcgagcaactcggattgtggcgtgaatatccgctcaaggaaaagccagtcctcctagacccttgcgacagaaacgactttccccgccatttcaaggtcgatctctatggagtcctattcgcgcgctcagaacgcgctcatgcaacaatagagcatttcgagctcaatcgggatgagttgtgtgaagcgagagcaagtcgcttaactggataccttgatcgcctgtgcaactacactctccgccagatacaagaaagcacgaatgatggccctggaatttttgactttatcgaccttgagtttggtggctcgtggcatctcatgtgccgtgaagtcattttgttcctgtcgccaggtaacccacagcagctctccctatccacgaagaaaattcctctgacctttcagaaagtcgcccggcatctgggtggtaaatttgaccgtgcgcagctagaagaatggataaacgatcctatacgagatgtactgacccatgactcatatacacgcagagggattacagatagcacccccactttatctaccgtcagtctgacaaacttcaagggcgtagagcgcttggagctcactatgccaatacctcaagagcccactgaagagctaccaccccagcgacaacccgccttgctgattcttggagaaaatgctgctggaaaaagctccattcttgaagcgatagctcttgcactttcgacggatgaagggcgaaacgagctacgcctagatgtatcatccttaccactagacccgagtttgctgggagcagactcagcactacctaatacatcggcccaagttactttgatattcgacaacggcactactcggactctcacaatcgccgacggaaagtatctaatttcgggatccagtgaagttccacccgtattcgcatacggagcctttcggcaatatcagaggaaaggtagtcgtagttactcccccacaaaatcgatcattagcttgttccaatccgacaaactgcttcccaatccagaacaatggttgttggggttggatgaaaccgatttcaacagtgtgatacgagttttacgcgacatcttgtctattgaaggcgagtttgaggttatagagcgagactttgataatagacggtgcctgattgtaaccgccgctgccggtaattctcgccatctcacccctttgagtctggcgtcttcgggctaccgatcaatgctgtcgatgatctgcgacattcttcagggactgatgagcggtcgtctcaatgtcatcattgaaagcttggagtcagcccaagcggtagtgctcatcgatgagatcgaggcacacctgcaccctcgctggaagattcaaatcatgcacgccctgcgtagggctctacctaaaatcacctttatcgccacgacccacgatccgctctgcttacgcggcatgcacgatggtgaggtagtggtaatgcaacgaatagtcagcgatgcggccagcagcgatttacctgtaatggttgaacgaattacacacctgccaaacgtgagccaacttaccatcgaacaattactgacttcggatttcttcagcttatcgtccactgatcagccagaaaccgagcgtgaactagcgttgttcgcggacttgttggctgcgcgagaagcggggcagcgcttaactgcggctcaggaccgcgcttggaaagcattcgagcgcgacgtccgcgatgccttgccggtagggtctacagaagttcaacgcttggtgcaggaagctatggtggaatatctaaaggaacgcagacaggcctcttctagaacacttggcaatctacgcagcgctgccaagactcgtatcgtcaatatcctcaggacgctttga

SEQ ID NO: 360946 - DNA, 1032 bp, Pseudomonas aeruginosa
gtgagggcttacggggaacatgacgagagttttgtggcaacgctcaataaaggtgcaatggcatgcggagaggatgcgctattcaatgcgggaggtgtagatataggaaccattcttcgcttgaaatggttctctgagagtgtcaggaagtttctgaaaagccgtggtgtcgcttttaggttaactaagggtaaggtcgttagtactcgtgtagggaagcagttttccgatctaattgaaagggggtgtggagatattaatagcgtctatatgttggagccatattcgcagcttattatggatagcattgactggccaagcgtgtccgggctattgcgcggggtggataagtgggaggattgcgaacaggtgatgaataccctgaacagcattgctgaccgagttcgggagagggctcatacgtcggaatttaaagctcgtgtgaatagctatcatcgttcagcaaataaaaattaccgggagcttgttaagtatgaacgagctttgtttgattcttattcaaggatgctcataattcgcgtggatctttattatcgaaaggaacattgcaaggtcgcccaaagggtagcgcttgaacatcgtaagcgactcttcgagaatgcgaggtcgaataagatattcaaacatatgcttggctatgtcaccaagcttgagcatggagtggaaagagggtttcactttcactgcttgtttttctttgatggggctagggtgcgggaggatattaatctggcaatgcgagtgggggagtattgggtgacggttattactagggggaagggtgggtactacaactgcaattatgcaaaagaaaaatatagaaggtgtggtattggaatggtgagtcactctaacgcggaaatgcgggaaggcttgaggcttgcgatgatttacatagcgaagacagatatttttctgaagcttaaagccgaaggtcgtgctctgaccagaggcattatgcccgctgctcgtagtggtcgcgggcggccgagagtgatcgatatttcataa

SEQ ID NO: 360947 - DNA, 807 bp, Pseudomonas aeruginosa
atggcgccgcacctgctcaaacaacgcatacttgatcgccttaaaaatattagcaacgtctcgcttgaaaaaaatttagaccgcctcagagcgcaattgaaagacttctacgctaacaccccaaccgagcacgacagggcggcaaccgaaatccgcaaagtattagataacgaacaagccctagccacactaataattggctgggagaaggcgattgagcacgagaaagaaaaactcaagagggaaacaagcgaaaaagagaaagagcaacaccaaaaagaaatcgaaagattgaagttttctttaccaattaaacataccacgctctatattgaactagcactcaaagccaagagcgcaggtaagacagaacaagcctgggcttatgcccttgaggccgcccatctctgcggggagatatcttcacactcaataatcgaatttgacacactcaccatagaaaaaacaagcaagcagaacagcaataatgcaaaaggaataaacagaaaactcctactactaaaggaatatattgccaacctcataatagaaaatacccctcaagaaggctggcgcacaaaaaacgatgcaatcacaactatagcatcacttaaatccaccaataaaaccaacgaaaaaccaaaaacgctgatcgaagaatttattgagaagaacgatattaaaagagcgaaaccctccaacataataaatctcttactgaaaaactggacaaatgaacctggagcaattcaagacgcgctaaagaaagccatatcccagaaaatcaatgaaaggacaaccccataa

SEQ ID NO: 360948 - DNA, 1209 bp, Pseudomonas aeruginosa
atgggcaagctaaactcgaagcagattgacaacctcaacaccccaggcacttatgaggacggcgaagggctgcgcctcgtcgtcaaacccacaggtcgcaagtcttgggtcctgcgcttccaactcaacggcaagcgccgtgaaatgggtctgggtagctaccccaaaatcagcctcaagactgcccggctggaagccagtagcaaacgccggcagctcgttgatggcatcgatccccttgccgcacgagatgccgagcgcgcggcacaactagaagctttacgcctggaaactgccaagaagttcaccttcgagactctggcacgggaatactgcgaaacccatggcgccgcttggtccgaaaagtggcgtagagggtggcttcgcaagctggagctatatgcgttcgaccagattggcagtctggtgaccgaccgaatcgaaacagaccatgtgctggacgtcctgcggccaatctggagaagcaaaacacgtactgcggatgaggtacggggccagattgaacaggtactagacgcagccaaagctagaggttttcgtcatggagagaatcctgcccgctggcgtggccatctggaaaacctgctaagtagggcagaaaaacgaaaagcccgtaagcgcgagcacttcgaagcaatgccttggattgacctaccagccttcctagttcgcctgcaggactctactcatttggcctcgtatgcattgcagctgttgatcctaaccggagctcgttcgcacatggttcgcttcgcacgatgggatgaattcgacatggacgccagcatctggtcccttccagccgagcgaatgaaaatgcggatcgcgtttgatattccactggctccacaggtaattgctctgctgaagcaaatccctgtagtcggggacagtccctacctgttccctggtcaaggaaagaccggagttctgcacgccaatgccatgcgcaatctgttgcacgagctgggctatgagcacattactcggcatggctttcgatcgaccttccgcgactggtcaggcgaatgcacgcactatccgcgcgaagtgtgtgagatggctctggcacatgacgagcgcaatcaaaccgaaggcgcctattcacgcactgacttcttcgaaaaaagaaaggcactcatgattgactgggcttcattcgcggcagggtcagaacaaaacaattga

SEQ ID NO: 360949 - DNA, 843 bp, Pseudomonas aeruginosa
atgacccagccctcgaaacggaatgggcaggttccgctggacgacgccctggagcgccatcgcgacgcgctgaaggacctgttcccgctgccgccctcccggccgaaatcgcgcaaggcaagcaaggcggccggcgtcgcgctattgctggcgctggccatcggcgccctggcctggctggacccagcctacaagcgcgagcgcttcgccaccgccatcggtgagcggcgcgacgtgaccctggccgacggcagccagctcctgctcgacagcggcagccagatcgaggtcagttggcacccgctcagccgccgggtcgcgttgcgcgcggggcaggtgcttttcgaggtatccccggcgcgctatcggcgcttcgtggtgtccgtgggttcgaccgacatccgcgtgctcggcacccggttcaacgtgcgccgcctggacgacgatgtccgcgtgaccctggagcgtggccgggtggaggtcggcacctcggctacggcgcaagcgccagtcgtgctcctgccgggccagcaggtcgatgccattggcgggcaactgatgccgctggccaaggtcgatgccgccacggcgatggcctggaaagacgaccgcctggtcttcgagcgcacgcccctgggcgaagccgtcgcgctgctgcgccattatcgcaaggcgcccattctcctggacgaccccagcctggcctccctccggctgaccggcgtcttcgccgcgcacaacgccgaccggctgctcgacctgctgccgagcatccttcccgtggccgtgtcgcggcaggaggacggcagcgtcgagatccaacgcaaatcgacgcgaaaataa

SEQ ID NO: 360950 - DNA, 1017 bp, Pseudomonas aeruginosa
gtgcgctgggcacggcacgcagtaaaatcttcaagatttttcttacaaggcaataggactcgtccaagttacctcgcccatagctcccggtaccctcgcccgttacacctttcaagcaccaacgggatctccagggcttatgcttcttcgaaccatcagtgtggaaactgccgagcagacggaactgaatgcggccttgttgtgtggtttcgccattcccgccagcgaccgcaacttcatcgcctacagcctcaacgaacaggtcgacgaaaacgactcgcgcgtctacatcgcctccctgttcaagaccgacgacggcttccgcctgggccgtctcgacaccgacgaggcctgcgaggcggccatccaggtgttccgccaactggtccgcgaagccaccaccggcaaccgccggaccagcgatctggcctaccacctcatcgacctgcaggacgcggccatcgccccctcgcggcgggaagaacaccgctccctggtgctcgaacgcgaatgggtgatgaagctcgtcaccttcgagtccccccatggctacggccccgccctggatggcgaggaaccctgcgcggaagtcccgccgctcgtccaggaggcccttttcgaagacgccgctcccgatgtcctcgccgaagacgatgcggacgagaccacggacgggccggcggagcccatcgacgagcccgaggcggcggaagacgaaaccgtcaccgaggccggatgcgtcgagcccgagccgcggccggaggcggaaacggcagcgcccgagggtggggcgccagccgagttcgcggcgaaagcggagcagtccgccaaggtagcggatgccgaggccatcggcgccttcgtcgacaacgccagtcatcttcgcgaggagcttgccgacctggcgcagatgctccaccccgcgctgcacgccgccgacgccacgggcagcgccaaccttccgtctccagacgccgccgaggaatcctccatgccccgtctcttatacacatctga

SEQ ID NO: 360951 - DNA, 585 bp, Pseudomonas aeruginosa
atgatcgacccaaccgacaagcaaacccaacccctccccctggagcagccgaagcgcgggcgcggtcggccagccaccggcaaagccctgacggacgcagagcgggcacggcgctaccgggcgaacaagaaaaagcgtgacgatcagccgtcacgaaaagatgccccatcgatccccgcagatggcgtaaaggaaatcctcgacggatggcagcgctcccaagaccagctcgaaaaagcgctgcaacggatctccgagctggaaaccgaattagcctcacgcgtcgagaaacacaacgaccaggtgcacaagctcatgactgagcgcgaccagctcaagcgcgacctggctgcaaaacaaaagcgtcaccgcgatcaaccagccgccaaactgccagagagtgcctacgaggacgaacccgaggcgaagacctggacgctccagggacgcagcggaagcggcaagtggcagaacctggccgcaggcctggaccgcgaagaagccagacggcaactggatcgagtgatcgacaacaagctgctgggagccacgaagaaccgccaataccgactggttgaagaataa

SEQ ID NO: 360952 - DNA, 585 bp, Pseudomonas aeruginosa; identical to SEQ ID NO: 360951

SEQ ID NO: 360953 - DNA, 801 bp, Pseudomonas aeruginosa
atgtgtataagagacagccagcgccagatgctgccattgcccctgcgccagggcctggctggcggcagcgcgctgaccgttcagctcgacgaagggcgcgccctgggccaggccgaccaacagggcgttgccgccttcgcggcgcgacagcaggacctgttcgccggccagttggtcgggacgcacccagccgctgaagctgaaggtgccaccggcgctcaccgccagcgatgggctggccggcagcagcagcggctggcccagcagttgcgcggagcgaccgatgacgccctccaccggactgccggcggcggtctgcgcattgttggcgtaggcggtggagtcccgcggcggagtgcccggcgcaccgtcgaagtgatagaccagggtgtagtccgggtcgaacaccgactggccgttgccgctctccggcgccttggcgttgccgtagtacatccagatgtcctggcgctggccaccctccacccgcggcacgtcgacccagatcagggccatgcccatcagtgggtcgaagctctcgacctggtggcgcaacacggtcttgtcgtcggcggcgacgaagcggatgtccgagccgttctcgttgaccccgtcgaaggtgaagttgccggtatgcaggcgcaccagcaacggcaggcgaccgagactctcgttgatcgccgcgccttgcggggtggtatcgaccgagacctgcttgcggtactgccagtcgtcctgccaccaggcactggcgctggccggggccagcaggcccaggcagatcagcgatgtcagcaataa

SEQ ID NO: 360954 - DNA, 1635 bp, Pseudomonas aeruginosa
gtgaagcgttcgctgttcaattgtgcgcacccgtttcgccagcgctggtcgatcggttgcctggctgtcgcattgtcgtgcgcttcgctggccgacgaggcccctcccgccgcggcgggagccgagccccagcgtctggtggacatcaacgagtacgtggtacgcggcaacaccgtgctggacaaccgcgccatcgaggcggcggtgtatcccttcctcggaccgcagcgcagcctgggcgacatcgagggggcgcgcgatgcgctgcaggccgcctaccaggagaagggctaccagtcggtctacgtcgagctgccggagcagcaggtgagcggcggggtggtctacctgcaggtcaccgagaccactatcggtcgcgtccgggtggtcggcgccaagcactattcgccggtggagttgcgcgaggaagtgccggccctggaggagggcaaggtgcccgacttcgcccaggtccagcgcgagctggcgcaggtcaaccgcacccccggccgccaggtgctgccgatggtgcgcgagggccagcggcccggcaccatggacgtcgacctgcaggtggaagacaagaatccctggcacgccagcatcggcctgaacaacgactacagcgccgacacccgtcacttgcgctcggtggtttcgctgggctacgacaacctctggcaactcggccacgccatctcgctgacctatttcaccgcgccgcaggaccaggacaacgccaaggtctggtccggctcctataccgcgccgctgagccagcgctggagcgtgcagttgtccggctaccagtccgacagcgacgtggccacggtgggcagcatgaatgtggtcggccagggccactcctatggcgtcgcggcgatctacagcctgccggtcaccggcctctggtcgcactcgttctccttcggcgtcgacttcaaggacttcgaggaacagacccggatcggcggcaacaacgacagggtgccgatcaagtacgccccgctgaccctcggctacaacggcttccgctacaccgaacgttcccagttggcccttggcctgagcctggtggccggtaccggcagtctcctcggctacggcgacgacgacgaggaattcgaccgcaagcgttatcgcgccaagtccggcttcggcgtgctcaagggcgatctcaaccacaccctgaccttcggcggcgactggcaggtggcgaccaaggcggccttccagctcgcctccgggccgctgatttccaacgaacagttcgccgccggcggtgccaccagcgtgcgtggctacctggcggcggagaacaccgccgacgacggctacctgctctcccaggaatggcgtacgccgtccctcggacgcttcctcggcaagcgcgccggcggctacgtcaacgactggcgcttctacgtgttcgccgagggcgcgcaactgcgcctgcaggatgcgctgcccgaacaggacgacgacttcagcctggccagcgtcggcatcggcacccgcgcgcaactcgccgactggctgtccggcagcctcgactgggccttcccgctgctggaagggacgaacaccgacaaacacgactcgcgcctgcatttcagcgtgcaggcgagcttctga

SEQ ID NO: 360955 - DNA, 957 bp, Pseudomonas aeruginosa
atgcgcgtcaggccgatgacttctgttctacgacgcattttccagtcaaatgaaccttcagttttacgcaacgctgcatctatttctcgtcaggtcgctaggcgtaatccagcattagcggtagagctgatctgcacagccaacctgattgcttgtccttccgccacccatgacttcttcatgctcctggcgcatcgcagtacccttccggcagggaacatcagctctgttcagtggcggatcctattgggagcgttagagcggctgcttgaactcgatgatcattgggtgatcgagtttctcaagcaagctattgagacggttccggcagacgttgttgagatgctgaaacgaagattgcaagacgttggccgctgcctcgggtataggtcgatgcgcagggatcgtaacggtgctgggcttgggttgctgtctcatcctgacggacgtcgactattgcaggagcttcttacatgggctgtggatagccaggcagacgaaaagctagcgatggatataggggcctgtgtatcggggctttgcggtaagtatggttctgaggttctcgatttactgctgaaccttctaaaaggtggtggccaggctcacgtgaatgtcatcgcgagtacgctacgaagtgcttatcaatcgttcgtgattgatgagacaccgtttgttcgggagctactaagtcaagcggaactcatcagcgataaagccgtaaaagatatctcctcggcgttatggtcgtccgcagtctcaggtgggcgtactgggcttgccggagagcctttcagggaggatgtgctattgcaggagtacgcagaaaaaactctcaagggaatgagcaggatggacccggcttaccgactctacggctggcttcttcagtacgcaaaggacaacattgagcggcaggcagacgagaagcgctcgatggaacttgaggatgagtag

SEQ ID NO: 360956 - DNA, 645 bp, Pseudomonas aeruginosa
atgagcaagaagaagcaccacctcattcctctcctcgactacctgcgcattcaccgcgtaatccgcagcgttttagactctgccggtgcaacaactgaccgtgcatgctggttcttcagcgtcgcaggagcagcaatccttcgtcatcactacggaaaagatgcccaaccacttgctggagctgtttgtcttatggtcaatgaaaagggggctaatgttttgtgtttcgccacaatcgatggcggcgaaatacatagctccagcgacgcttttcatgcaatggttgcctgcggcgaccatctaatcgatttcatgagcccgatttttaacgagcacgccatctcttcagaactcgaaataattcccccgtcaaaatctttccagcgccttataaagtctatgaatggctctcataatacgctgagattcgacggagattttttctttgatccaaatatcgagttgactgaacacctgataaaccagatcgctcaaagccagtttcagaacgatttgatacaggcatgcattgcctggtatcgaaggcccccgaagcccattccatcagcacttacggtaggcgatgagaagggggaaattcggatggtgaaactcaaggatgcagctgtcgaagggggttggtag

SEQ ID NO: 360957 - DNA, 450 bp, Pseudomonas aeruginosa; identical to SEQ ID NO: 356560

SEQ ID NO: 360958 - DNA, 681 bp, Pseudomonas aeruginosa
atgaccagcttcctcaagtgggcgaaatggctgaaccaggacgaggtgagcgaggcagtcatccgccaggtgatttcaccgtccagccaggtcaagggcaacgtctacaccgattacggcgggcaggttggcggcaccatctggaatggactggctcgtgccggaggcaccctcggagtggcaatgggtagcctggcttacttcccggcgatggatatggtccgccaggcgctgccgatggtgatgtcattcctgaagatggccatggtcatctgcattccgatggttctggtcatcggcacctatcaactgaaagttgccatgacgatgacggtcgtcttctttgcaatgatattcgtcgacttctggtttcagttagccagatatatcgatagcacgatacttgatgctttctatggttcgggatcaccacatctttcgttcgacccagtcatgggactgaatacggcgactcaagatgcaatcttgaacttcgtgatgggggcgatgttcattatattgcccatgctgtgggtaactgctgtaggctgggcaggcgtccaagttggagctctcctcagcgatctcagtaatggagtcaaaggggtccaacaggctggggcacagggtggtggcgtagctaagcaggcaatatcgtcgttctcacccaaaggggactaa

SEQ ID NO: 360959 - DNA, 774 bp, Pseudomonas aeruginosa
atggcgtacctgtatagatacatagaagataataaaatttctgatgcagccaaccttagcgatttactctggaacttaaactacggagtaaaagactacactattgaattcagccctgtcagaaaagacatatttgacaaatacctgaatacaaagaagctaggcgctgctgctctgaaggacgcagaagatgtacaagatcttgacgagagcgataagaaaattctccaagcgctccgaagccttgagtcactcatagatacagaagtaattcaagccctcccgtactttgtagactacttgcttggcaaggttagcctaatagacatttctgtcggaagtgagtcagaagcacacaaagtatttgtgagcatgaatgacagagggcttcgtcttggacctatcgatctgctcaaaggccagatcctatcgaaaattgacctaaacgatgacgcgcgtgcctgcaacgctatctggattgataaggtaagcaagcttcgagcggatgacgcagaaggtgactctatatttattcgtactttattcagagcgcagtgggcggacacaatgcgcggaaagaataaaggggatcaggccggcgactttgatttaataggcgatgcatatcatcgctggtttcaagacaactcagccaagcttcagcttcaaaatggcgatgactataaaaaattcattgagaagactataagcaaatttgcagatatttacagattcattaagactccgcgagaagatttagccttcagtcgatga

SEQ ID NO: 360960 - DNA, 786 bp, Pseudomonas aeruginosa
  misc_feature (366)..(375): n is a, c, g, or t
atgattcttttggcatgtacaggcgttgatgaccttgaagccgactggaagcacaaaatctctcaagcctcgaaacttctggatcttatcctcacatccagatccatcgaaggcaagcaaaataactacgacaatttaaaagagatctctttccagataactaaggatataagaggaaagtcgaaggtagagctagatgcatacgttaaacaggagtggccaaggtactatgcggctctgaacggccttgctggcgtgaaatataccaaggcagataggagcgacattctctactatctagcaagaatctcctgctacatcgaaaatgacttcgatactgccaacaaaacagagttctctgtatannnnnnnnnngtatattggcagcgggatcgtggcgcaaaaactttcgacatagagcatttgcttaagaaaacctacgacgttaccagtctaccggcaaaccacggcttcgcagatgccaaagaatacgatgacaggcgcaatttacttggagcacttaccctgctccctcgtgcgagaaacagatcacttcaagatgaacgctactctaataaacttgccgtctacagcacagaaaacaccctcgcaaagtcgttctgcgatggattttatcaaaacaacccaaagctaacggcttttttggctgcgaatcccgaagtgcagctaaaagcaattggtgacttcacgtcagccgatattgacgagcgcgcaaatgtctatatggctgtggcgaagaaaacgtggagatgccccattgtgtag

SEQ ID NO: 360961 - DNA, 687 bp, Pseudomonas aeruginosa; identical to SEQ ID NO: 360559

SEQ ID NO: 360962 - DNA, 639 bp, Pseudomonas aeruginosa
gtggtatgccggggaaatacatggctacttcagaccatccctaaggacagccaggactacgagaacgccttcatcgtcggcaactacccggccgcctggcgcgagcattacgaccgggctggctacgcgcgggtcgacccgacggtcagtcactgtacccagagcgtactgccgattttctgggaaccgtccatctaccagacgcgaaagcagcacgagttcttcgaggaagcctcggccgccggcctggtgtatgggctgaccatgccgctgcatggtgctcgcggcgaactcggcgcgctgagcctcagcgtggaagcggaaaaccgggccgaggccaaccgtttcatggagtcggtcctgccgaccctgtggatgctcaaggactacgcactgcagagcggtgccggactggccttcgaacatccggtcagcaaaccggtggttctgaccagccgggagaaggaagtgttgcagtggtgcgccatcggcaagaccagttgggagatatcggttatctgcaactgctcggaagccaatgtgaacttccatatgggaaatattcggcggaagttcggtgtgacctcccgccgcgtagcggccattatggccgttaatttgggtcttattactctctga

SEQ ID NO: 360963 - DNA, 939 bp, Pseudomonas aeruginosa
atggcgcagggcatacaggtggcggccgcaggggctgacgcaaaggtcggcgtaggccgcgtcgtccagcgtcagccgcgtcacgctgcggcgggcgggatcgatggcgaacaccggcgcgcggccctgatgatcggcgctggcgtacagatgctggccatcggggctccaagcgagggatgcgggacaaccgtcccaatccggagcaatacagcggggttcgcttccgtccagcggtacgctgagcaattgccagcgcggcgcctcgctcggcgtaccctcgctctccgccacgaccgccagagccgcgccctgcgggtccagacaaaagagtgggtagtgccatccgggcaggtcgagcagcatccggcgcgcgccgctcagggtatcgatgaccaccagctggctttgctgattgccaccggccctggcggacagccagtcgctcaccagcaggcggccgtcagcgctcaattcgaagcgggcgttgcgcagcgcctcgccggcgtcgtcggtcagcccgtggagttcgagccgggccggcggcgtgccggcgccgtcgctgtcgacgatcggctcggcccggtacaggcgcggctgttccgggcccaagtcggtgtcccagaagcgcaccgggtaacgctcgtggaggatggcgtcgaccttgccgtccttgcgcaacgcgcgcaggcgtttttcgtcctcagggtccttcgccgacggcagcgcctccgccatcagcaccagggtgccgctctggcgcgcgacgcgcaggccgaacaacccgccctggcggcgcaaccattgctgcgcctcgccgccggcggccggcaggtgccagagcgcggagtcggcgtcatcctccttgccttccagcggcgctcgcgaggaactgaacagcaagtcgccattggccagaatcccaggccccaactctag

SEQ ID NO: 360964 - DNA, 276 bp, Pseudomonas aeruginosa; identical to SEQ ID NO: 325094

SEQ ID NO: 360965 - DNA, 351 bp, Pseudomonas aeruginosa; identical to SEQ ID NO: 331798

SEQ ID NO: 360966 - DNA, 435 bp, Pseudomonas aeruginosa; identical to SEQ ID NO: 325092

SEQ ID NO: 360967 - DNA, 426 bp, Pseudomonas aeruginosa
atgaccgagctggtgcgggccacgatgcgcctgcggcctgaccgcgtgatcgtcggcgaagtgcgtggcggcgaagccctggacttggtgaaggtctggggcaccggccaccccggcggcattgccaccatccatgccggctccgccttgggcgcactgctgcgtctggagcaactgatcctcgaagtggcagtgaatccgccccgcgccctgatcgccgaggcggtcaacgtggtgattcacatcgcaggccgtggccgcaaacgtcacgtcgaaaccatctcccgtgtcgtcggcttcgacggtgcgggctatcgcctgacagatgcgctggaaacgccgtttcccgagctgccgccggttcctcttgcagccgctgccgctgcgccttcctcgacccctgaccaacctggagaactgccatga

SEQ ID NO: 360968 - DNA, 489 bp, Pseudomonas aeruginosa
atgaagcgccggaattggaaacactgggtgccgcgctcgccggccgaagcgctggacggctgtgcgcagttggccatgcagcgctacaaccgcgggatcgagcggcttgccacagaccatctgtgccagaacaacgccagcaccctctacaaatggatgggcaatggccgcctgccgttgaccatggtgctgtcattggagaaagcctgcggcctgccgctgatcacccgctacctggccgccgctcacggcaagctcctggtcgacatcccggttggcaaggcctgcaacgccaacgacctgcagcaactgcagggcgtgctgcacaacgccaccggcgcgctgatggccttctacgacggcaagcaaaccgccgaacagaccctggacgccatccgcgccggcctcgaatccctcgcttggcaccacggcaacgtcgcccaggcagaaaccccgcaactggactttggagtggctgacgatgagtga

SEQ ID NO: 360969 - DNA, 741 bp, Pseudomonas aeruginosa
atgtgtataagagacagcggccgccgcgccggccgcgctgctgctatgggtgcacggcggcccgctcggctcctggaacggctggtcctggcgttggaatccctggctggcggtcgcccgcgggtatgccgtgctgatgccggacccggcgctatccaccggctatggccgcggcttcatccagcgcggctggggcgcctggggcgacgcgccctatcaggacctgctggcgatcagcgacgccgcgcaggcccgcgacgacatcgacggccagcgcagcgctgccatgggcggctcgttcggcggctacatggccaactggatcgccgggcacaccgaccgcttccgggccatcgtcagccatgccagcctctggaccctgagccagttcggtccgaccaccgacgcctaccactactggcggcaggaaatcggcgcgcagatgctgcagcaccattcgccgcaccgcttcgtgcgggatatccgcacgcccatgctgatcatccacggcgacaaggattaccccgtgccaattggcgaggccctgagcctgtgggcgcagctcgccgagcaattcgccgacgagcagggccgcatgccgcacaaattcctctattaccccggcgagaaccactggattctcgcccgcagaacgccaaggtctggtaccagacggtgttcgccttcctcgccgaacacgtccatggccaagcctggcaacgccccgaggcgctgggatga

SEQ ID NO: 360970 - DNA, 180 bp, Pseudomonas aeruginosa
atgaagccgctgccggaacggctggaaagcgaccggctgtcgatccgctgcgccgcgcccggcgacgctcgcgcgctgtacgacggcgtgctggagaccctcgccgagctgcgcgcctggggatcgtcgctgccgtgggcactggccgagccgtctgtgcaggggggtatgccgagataa

SEQ ID NO: 360971 - DNA, 495 bp, Pseudomonas aeruginosa; identical to SEQ ID NO: 345400

SEQ ID NO: 360972 - DNA, 1437 bp, Pseudomonas aeruginosa
atgtcgttgggaaacctcgtcgctgtcgtcttcggcctggccttcggcggagcgctgctgatgctcagcccggccaaggccggcgccgccatggtcggcctggcggccgcggtcaccatcctgcgctttccattctggggactgctgctgttcgccctggtggcgaccttcatgccctactccacggtcaacgtggggatccgttcgacggtcagcgaagcgatcctcgccctgacctggggcgcggtgctctggcacatcttcctctcgcgcctgccgccggcgccgacgctgcgctaccgctccaccgagcgcatgctgctgtggctgatgctgttcaccgtgctgccgttcgtggtcggccaggtcagcatcaaggcagaggccagcggcctgtcgaactggctgcgctggctgctcaacctgtccatcgtgttcctcgccggacgcctgctggtggagcgcaagaaccgcgagacactggtcatcgccctgctgctgggcaccctggcgatgctgctgatgtccatcgcggtgttcatccgctaccgctcggcgtcggggatggcgccgatcctggcgatgttcaactacgccaacctggacaccctcaagttcggcctggaggcgctttcctcgcgaatgggctcgccatggatgcaccccaacgccaccggcgggatcatggccctgctgctgcccctggcgttctgctacggggtcgccaaccagggctggcggcgcggcctgggcctcgccgtggcggtcctcggcgccgccgcgatcctcctcgccagttcccgcggggcgatgctcagcctggcggtggtgctgttctggatgtccctgcgcaaggtgccctacaccggccgcctgctgttgctcggggtcggcctggtggtggtcctggtgctcagctacccgccgttgcaggaacgcctggcgaccatcttctcgccgcagaacgccagtaccgaggtgcgcttcgacgaataccggatgttccccaaggccgtcgcccgctatccgctgggaatcggcttcaaggtcgatccgccggtgccgggcaccgacctcctgggcatctccaacctgtggctgaacttcatgtacaaggtcggcctcggcggcatgctgctgttcatcgcggtgacctggcgctggtggcgcgaagcccgtccggagaaaggcccgatccgcctgacccgcgacaacgcgatctggctgggcagcacaggcggcatcctggcggcgctggtcagcggcctgttcgaccactacttcagcttcgccgtggtgatgatcggcctgttctggctgctggtcgggatcaacctgctggaagcccgccggctgttcccggaacgccagccgcaaccgcgggcggtgggttatcgcaagctcaagcgacagctcgagcgcggggccgaggcctga

SEQ ID NO: 360973 - DNA, 1872 bp, Pseudomonas aeruginosa
atgcatcagccgctcgacgtcgccaagccgggcgaacgccgccgcgtagttgcccaggcgcccttccaggctggccaggacgcaatagccgatcaccaggctgacatcccggcagctgcgggtttcctcgattccctgcttgatccatttgcgcgcttcgtccggctgcagcgccaggctgcgcaggtagccgcggtacagcaggagccgcccgcgcaccgcgtagcggcgttgcgccggcaggtgctggaggcgttccaggccctggcgcacctcctcctcggcgcgcgccacctcgccgcgcgcctggaggacgcgggcgcggtcgtaatggaccagtgcctcgaacagcgggttgccgtagcgctgggcgaactccagggcgtcgcggttgtagttgcgcgcctgccagaagtcgccacgggtcaccgccaggttgctcagcgtcgacaggcattgcaggcgggtgccgtagcgctccccggcgaggtcctgcaaggcctcgcggcagtgcgcctcggccttgtcgatgtcgccgcggccgcgcgcgatcaccccgctcagggcctgccactgggccagcaggtcgcgttgcgcggactcgtccggcgccggcaggaaacgcgccagttggccggccagctcttccgcggcatccagctggcaggccagcgccagcgcccagccgtacagcaggatcaggcgcggcgtgctcgccaggaggctgtccggcaggtccatcttccagcgcagcagggtggcgatgttctgctccgccagcagttgctcttccgacaggttctgcaccaggctcgccgccacgtccggctggccggcgcgcagcgcctgttccaccgcctggtcgagcaggccatggcggctgaaccagccgcaggcgcgcaggtgcagggagccggcggacggaccgaagtcgggcaagggacgcgccagcagcaggtcggagaacaggtggtggtagcggaaccactggccgttttcgtccagcggcacgaggaagacctggtgctgctgcaggtggtcgaggatcgccgcgctgtcgccggcctcgcgcacggtatcgcagagttcggcgcagaagcgctcgaagcgcgcggtctgggcgaggaacgcctggacctcgggcggctgccgctcgatcacctcctccagcaggtagtcgcggatcagctcgtcggcgccgtgtaccccggggctgacctgctcctctggatcgccgcgcgccagcagccagaggcgcagcccggcgacccagccttcgctgcgctcgagcagcgcgtccagcgcgtcctcgtcgagttcgaggccgctggcggccatcagcgccccgctctcctcggcggtcaggcgcaggtcctgttcgctgagttcgagcaattgccgcgacaggcgcaggcgcgccaggtgccagtccggccgctgccggctggtgaccagcagcaccaggccctcgggcaggtggttgaggaggaattgcaggcagcggtcgagcaccgcgccctgggccaggtggtagtcgtccagcaccagcagcaggggacgctgcgggtccaggcaggggccgagttcgtcgagcaggtcgtcgagccaggtctcgaaggcgaacggctggtggcgctggcgcatcttcagcaggccgagggcctcttcgcccagggtcgggtggtactgtcgcaagccatcgagcaggcgttcgaggaaacgtccgggatcgctctcgcggctgctcagtcccagccagaggctctgccagcgcgggtcgaggctttcgcagaactcgatggccagggaactcttgccgaatccggcgggcgcagcgatcagcagcaggcgaccgtccagtccgtcgcgtag

SEQ ID NO: 360974 - DNA, 1056 bp, Pseudomonas aeruginosa
atgcgaatggaagtggacaacacgcgcgtgaacaacccgctgctggcacaggaaatcgccgacttctccaaggactgctatggcccttcccgcgcacggctgttcatgcggcaacccgatctgggctccgtcgccgaggacaacaaggcgctgcaggacctgaactggatcggctcccgattcctgttgaacaccccagggtactacgacaccgactactccaagactccacggcaatcgtggccctacaacgccacccgcgacgccgggctgccccaggtgggcggtggtggtggctaccctacctgcaagcagtggtgggctgactcagggatcggtttgcgtgatcggatcaaggaccaggtggatccggacctgatgaccagcttcctcaagtgggcgaaatggctgaaccaggacgaggtgagcgaggcagtcattcgccaggtgatatccccctccagccaggttaagggcaacgtctacagcgattatggcgggcaggtgggcggtaccgtctggaatggactttcgagaacagccggcacctttggcgtggccctggggagcctggcctacttcccggcgatggacatggtccgccaggcgctgccgatggtgatgtcgttcctgaagatggccatgatcatctgcattccgatggtcctggtcatcggcacctatcaactgaaagttgccatgacgatgacggtcgtattctttgcgatgatgttcgtcgacttttggttccaactggccagatatatcgatagcacgatacttgatgctttctatggttcggggtcaccgcatctttcgttcgatccagtcatggggctcaatacggcgactcaagatgcaatcttgaacttcgtgatgggctctatgttcttgattcttcctgcactctggatcactgccatcggctgggcaggtcttcagattggaacggtgctcagtgggctcgagacaggagttaaaagggtagatgcagccgcagcccaaggtggaggtctagctaaacaaggaattagttctttccagtcaaaagactaa

SEQ ID NO: 360975 - DNA, 273 bp, Pseudomonas aeruginosa
gtggtcggtacgctgctcagcctcttcgccctgaaccacttcggcggcatccagggcctggaggcctggcggcaaagcaactactggagtttgttcgcctggcgggcgctgctgtactgcgccctggccatcgcctggttccggctcaagcagcgcaaggagctgagcgcgcatgagcggcagcgcattcggcggatcgagatcctggtgctgttgctgatcctgctcatcgaattcagcaaagcctacttccgcacgggaggcgcagcatga

SEQ ID NO: 360976 - DNA, 612 bp, Pseudomonas aeruginosa
ttgattatcccagtcgatgtcgcgcttgcggatgcacagcagcgcattcaaccggatgccggtgtagtagaagacctcgaacgtgcaaagccagaaccaggcgggcgtgatccgtgcgcgttcgccggtgccgcgctcggcgccgacctgcatgttgagccaatggcgggcgcgcaggatggcttcggcggcgacggttttgcttgctcgcctgggggggatgacagtggtctttctgaacgggttgacttgggagtgcgtcaccaactcgtgctcgatggcatagccccagatcgtccgcagatgattcgagtacgtgttccagctccgcttcgacaggccttgttccagtaccttgcgccgccatcccaggacagcccggtggtccacgtcctgtacggttgccgtaggaccaaagtgcttgagcagcgccttggtcgcggcgcggtagatcttcgcgctggcttcccggagatcgtgcgcgaagatgtactcctcggtgagctgctgcggcgtcattccacacctccttcggcatcggtgatgaccgtgaggcttgggttgtccagaggctgctcagggaacagcaatttggggtcctggagcaggtaa

SEQ ID NO: 360977 - DNA, 612 bp, Pseudomonas aeruginosa
ttgattatcccagtcgatgtcgcgcttgcggatgcacagcaacgcgttcaaccggatgccggtgtagtagaagacctcaaacgtgcaaagccagaaccaggcgggagtgatgcgtgcgcgatcgccggtgcagcgctcggcgccgacctgcatgttgagccaattgcgggcgcgcaggatggcttcggctgcgacggttttgcttgctcgcctgggggggatgacggtggtctttctgaatgggttgacttgggagtgcgtcaccagctcgtgctcgatggcatagccccagatcgttcgcagatgattcgaatacgtgttccagctccgcttcgacaggccttgttccaagaccttgcgccgccatcccagcacagacctgtggtccacctcctgtacggttgccctagggccgaagtgcttgagcagcgccttggtcgcggcgcggtagatcttcgcgctggcttctcggagatcgtgcgcgaagatgtactcctcggtgagctgctgcggcgtcattcgacacccccttcggtgtcgctgatgaccgtgaggcttgggttgtccagaggctgctcagggaacagtagtttgggatcctggagcaggtaa

SEQ ID NO: 360978 - DNA, 123 bp, Pseudomonas aeruginosa
atgtatgtgttcccgcacctggccggcagcgatcccgccccggtaccgggctacaccaccgtgttccccttctaccagcgagtccagtacgccatgccgggcgagcgtacggaggactactaa

SEQ ID NO: 360979 - DNA, 207 bp, Pseudomonas aeruginosa; identical to SEQ ID NO: 344410

SEQ ID NO: 360980 - DNA, 372 bp, Pseudomonas aeruginosa
atgatccttggtctgcttcgcggcgcgcgttacctgcgtgaacagggcgatccgatggacgccggactgtggctggccctcgtttcggtcctggtcctggcccaggtggacggcgtgttcgtcatgcccttcacccagaccgtattggccttgctggtaggcatcgccatggcacgctggtcgaagccggtcgcgccgtcccccgcacagcgctggctctgtcggggcctggctgtcgttgtcattgtcgtgctggggcgcgtgctgctgctcgaagtgccggggctgaccgcggccgaggagcgctacctggaaatccacggcggcggtgaggcgccacgtttctggattcagggctggattcccatgtga

SEQ ID NO: 360981 - DNA, 561 bp, Pseudomonas aeruginosa
atgtccactctgttggccctggatacctccaccgaagcctgctccgtcgccctgctccacgaggggcgggcgctcagtcactacgaggtgatcccgcgcctgcacgcccagcgcctgctgccgatggtccgcgacctgctcgacgaggccggcgtcgccctgtccgcggtggacgccatcgccttcgggcgcggtccgggcgccttcaccggcgtgcgcatcgccatcggcgtggtccagggcctggccttcgccctgcagcgcccggtactggcggtctccgacctggcgatcctggcccagcgggcctaccgcgagcagggtgcggagcgggtcgccgcggccatcgacgcgcggatggacgaggtctactggggttgctaccagttgcaacagggcgagatgcgcctggccggcagcgaagcggtactgccgcccgagcgggtcgccgtaccgtgggacgccgctgccgcggactggttcggcgccggcaccggctggggctacgtcgagcgcatgcctgtccgcgacaacgtggcgacgccgaaaaaagcgccctga

SEQ ID NO: 360982 - DNA, 144 bp, Pseudomonas aeruginosa
atggcatacctgcccaacatcaatgcggccattcgcggcgacacaaagaaggctttttgcgctcgccggccgggcatgacccccaagaaacgccgcctgatgaagctcgctcgttacctgtcgcgcgcgattcacggcaagtaa

SEQ ID NO: 360983 - DNA, 375 bp, Pseudomonas aeruginosa
atgagtttttcccgtttcgcccaacgcctgtccaactgggccggccgcccgccaaccttcgtcgttgccctcggattgatcctgttgtgggcgatcagcgggccgttcttcgacttcaacatggtcttcctcatccagaacacccagaaccgcgataccgacgcgctgcatatcaagatcgacgaactgttgcgcagcacccgacgtgcccacaatgcgctgctcggtctggacgacctggacgccgatacccttcgcgaactgcgtcagcgctaccagcacatgggcgagcaggacggcgagacgccggaaagcgtcgccgccgaggaagagcgccagtgcggatgcggcgaggagcgacggcgcgccgactga

SEQ ID NO: 360984 - DNA, 594 bp, Pseudomonas aeruginosa
atgcagggacgcttggtattcctattggaagagccctccatgaagagccttctggatgcgcttttaccgcgcttgtttcctggttgggagtcaggtatgcacttcctctgtgtgccgcaccagggcaagagcgacttagatctcagtattccgcgcaagctgagcgcctggcgcataccgggtgatcgttttgtgatcgtgcgggataacgacaacgctgactgtgcacagatcaaggctcggttactgaaggtgtgtgcccaaaatgggcgtccggataccttggtgcggctggtttgccaggagctggagggctggtatctgggtgatcttggcgcgttgtcagcggcctacgatgacgcacgcctagatactccggcattgcgcaagcgctacagcgtcccagatgactggcagaaaccctcggtcgagcttgaacgtctggtgccctccttccagaaaggtagtggagcaaggcggatgggacgatggctaggggatgagcggtcgaaccgctcgcggagctatcaggtgtttttggagggagtgatgcgactggcgacggaaatgggctgggcgccggttgccgagtaa

SEQ ID NO: 360985 - DNA, 1185 bp, Pseudomonas aeruginosa
atgcagattgaatccatcgaaatcaaaaactaccggttgttccgcaatacgcggctgaagaacattccgcgtctgtgtgtgctggtgggggctaacggtacgggcaaatcgacccttttcgatgtgttctcgttccttaaggatgcgctgagcatgacggtggcaaaggccattgccaagcgcggtggttacaaggaattggccagtcgcgggtttgcccatgagcccatcgagctgactctgcaatttcgtctggaaattactggcaaggatcgtttagtcagttatctgttgaaaattgcaccgggggcggatggtcgtccggtagtggagcgcgaagtcctgcgttacaagcgaggtcgccatggtaagccctatcactttctcgacttcaccaagggcagtggctacgcgattaccaacgaggaagactttaccaagcaggatgaggagctggacaaggaatttaacgagctggatgcgccggatattttggccatcaaggggctcgggcagttcgagaaattcaaggcggccagtgcctttcgcctgatgatcgagaactggcatatctccgacttccatgtttccgatgcccgcccaagccaggaagatgggtttgccgagcatctttccagtcgtggcgacaatctgtcgctggtagccaattttctgtttgaacatcaccgctcggccttcaaccgcattctcgactctatgcgcgcccgggtgccgggcattgccgtcgtcgagccgaagcagaccgaggacggacgcctggtgctccgatttcaggatggcagcttcaaggacccatttatcgcgcggcatgtatccgatggcaccatcaagatgtttgcctatctggtgctattgaatgatccacaaccataccctttgctggcggtcgaggagccggagaatcagctctatccagaactgcttcccgagttggccgaggagttccgtgattacgcgaggcgtggcgggcaggtgttcatttcttcgcattcacctgactttcttaatgcgctccaactggatgaaatctactgcctgcgcaaagagcagggctttacccggattaccaaggcaagtgattcggagaacctgcgggcactgaccgaggcaggtgacttgccaggctatctgtggaaacagggtttgttcgagggcctgaactga

SEQ ID NO: 360986 - DNA, 1332 bp, Pseudomonas aeruginosa
atgagttttgatagctgtcgtttagctgatatcgcagacgtacagggtggctacgcattcaagagcgcagactttgggagcgccggtgttgctgttgtcaagattgcaaacattcagccaccaaacgtgacgctggattccgcagatcgagtggagcaacacaagctagaaggccttgctcgcttcgaactggctgatggcgacatcctcatggccatgacgggggcaacagtcggtaaagtcgctcgatttcgaaagactgagcgcgcatttctgaaccaacgagtcgcaagaatttcagcgaagggtggtccagagttcaatgactttatctatgcgctcgtttctcttccgggctttgacaaacaaatagagaatgccgcagcaggtagtgctcaagcgaacattagtgccgcaggtatcggtgcggtagcgattccatcgctgggccgagatgctcagctcgtgattggctctatcgctcggagtatcgacgaccgcatcaccctgctacgcgaaactaacaccaccctggaagccatcgcccagtcgcttttcaaatcttggttcgtcgatttcgaccccgtgcgagccaaggccgaaggccgccagccggaaggtatggacgccgccaccgcgaccctgttccccgatagcttcgaagaaaccgaactgggcttggtgccgaaggggtgggaggtcaagactgtgggtgatgtggttaacgttacggactatgtagcgaatggaagttttgcggcgctcaaagaaaacgtaacccttttggatcagcggtcttatgctctatacgtgagaactactgatcataattcagggttctctggtgggttccgctatgttgataaggctgcatacgaatttctgtcaaaatcttcattgcttggtaatgaagtaataatttcgaatgttggtgatgttggtacggtttttaggccgcccagatggctaggcattccaatgacacttggtagtaatgcagttgcactcaaggctccccggatgtctgcatttttgttttttcatttttctggagctaaagggcagcacgatatccatagtgttgttactggaagtgctcagcttaagttcaataagacgaattttagatccctgaagctattgcttcctaacgaaagctgcctatctgaattcgaggaaaaagccagcttgctcttagaggcctctgataataatcgggcaaagattgaaaccctcactcaactccgcgacaccctcttaccccgcctgatctccggccaactgcggctacccgaggcccaggccatggtggagaatgcctatgtcgtctga

SEQ ID NO: 360987 - DNA, 2091 bp, Pseudomonas aeruginosa
atgacttccctcaagaagccctccccgctcgacttcaaaacccagtacggcctggccctggacgacaccgacgacgcgatcatcgtcgacctgttcgccggcggcggtggtgccagcaccggcctggaaatgggccttggccgcaaggtcgacctggccatcaaccacaacccggcggcgatcagcatgcacgaggccaatcacccgcacgccgagcatctgccgaccgatgtctggggcatcgaccccatcgaggccaccaagggcgccaccgtgggctggctgcacgcctccccggactgccgacatcacagccaggccgccggcggccagccgcgcaagaaggaaatccgggatctctcgtgggtggtggtgaagtgggccggcaagctgcacaagctcggccgcgggccctgggtgatcagcctggagaacgtgaaacagatcctgcaatggggcccgctgatcgccaagcgcgacaaagcgaccggccgcgtcgtgcgtctcgacggcacggtggccgagccaggggagcgcgtgccgcgccacgagcagttcctggtgcccgatccgaagcgcaagggtcgcacctggcgccagttcgtccagaccctgcgcggcttcggctaccaggtggactactgggtcgagcgcaactgcgactacggcgacccgaccacccgccagcgcctgtacctggtggccaccgacggcggtttcgagccagtggcggcggagaagacccatgccgcgaaacccagcaaggggctgaagccgtaccgcacggcagcagagtgcatcgattggagcgacctcggccagtcgatccgcaaccggaagaagccgctggcggaggccaccatgcgccgcatcgcgaagggtatcgagaaagaagtgctccagcgcgccaagcccttcatcgtgccgatcgcgaactggtcgcgcgaagccgtgcatccggtggaccagccgctgaacaccatcactgcctggccgaagggtggcgctttctccgttgccaccccgacgctgatccaagttggctacggcgagcgcgacggacaggcaccgcgcgtccttgaactggatgaaccgctcggcaccgtggtcgccggcggcatcaagcacgccgtcgcggccgcccacctggtcaagttccgcttcgacgccaccggcgcaccggtcgaccagccgatgccgacgatcaccagcggcggagaatgcaagcggcctgctggtgctgcgcacgcgctgggcttggccagcacgatcctggtaggcgtcggcggccgcgccggccaaaccgagccgcgttcggtcgccgagccgatgtacaccatcaccgcgaaagctgactgcggagtggccaccgcgttcatggtccaggccaacggcggctacaacaccacccacagtcgcccggccgatgccccgatcagcaccatcaccaacaagggcagccagcagcagctcgccacggcacacctggtaacgctacggaagggatcgcatggcgcaccggtggacggaccgctgggcacgcaaaccggcacggaccaccacggcctggtcgccgcccacctgctgcatctgcgcggcaactgcgacgcgcgcgccgccgacgagccgctgcacacggtcagcgccggcggcacgcaccacggtctggtcaccgcggaaatggtcgccagcagcctgaccccggagcaattggacggcgcgctgtgggtgtcggcattcctgatgcgctaccactcaactggtgggcaatgggcgaagttggacgatccgctgaccacgatcaccaccaaggaccgcttggcgctggtcacggtctggatcagcggtagcccctacgtgatcgtcgacatccgcctgcgcatgctgaaaccgcgtgagttgtaccgcgcccagggcttccccgacagctacatcatcgagcggggccacaacgggcagcggttcactctgtctcagcaggtccacatgtgcggcaacagcgtgagcccgaacacgatggccgcgtacgcccgggcgaacgacccatggaagcggcggctacgcccgagtccgcagcaggtggcggcatga

SEQ ID NO: 360988 - DNA, 381 bp, Pseudomonas aeruginosa
atggatgccgtcgatgcgccagacctggccatcggaatcgaggaaagcccccttgcgatcaaggggctgcaactcggccttgcggcacgcaatggtccggtagcgatccagggcgccggcctccatgcgctcaacaccttcctcaacgatcaccgcagcattgccgacctgacgaccggtgcggtccaggtagccaaactcaccatcgccgaggacgtcggcgatgatctcgtccatgtcggcgaccagttcagagaaacccgccacggtcagagggtcagttcgcgcaccgccaacgggcgggtgcataggtgcagcgggttcgattgcgcttccccagccacgcctttgtcgaagggcagacgctcaagcttggcgtag

SEQ ID NO: 360989 - DNA, 612 bp, Pseudomonas aeruginosa
atgagtaaatggactttcttctcatcaacactgctcggatcaatactctgcacgctgttaggcctagtattcatactcgctatcattctgtactcgccgctgacggaaatactaacccaccatagcagttttgttttgatgcgcccttacacagagctagaccagtacgagcaggtacttgtgagcagaatgattagagagaaaacaatattaagtgccgacactttatggtcacttcaatcctcattctaccagacaatagttagtgtgttgattgctttaaatgcggcaattcttgcgattgcctttttcatcatcagaacctcatctaaagaagaggctaagcgcgaagcctcagctaagtttgatgagtatatcgcaggaagagacttctcgagccttgttaaaaaatttgccagaaaagaaattgataaaatcaactctacatatggcgacctgctcgaccaaagtgaccagctcaaaaggaggctggacgcgcacgatacagaacttgattatctcgatgaagacatcgagcacatctctaaaaagctatctttgctagactcctctgaagattcccacgatagcaatcagaaaattattggttag

SEQ ID NO: 360990 - DNA, 309 bp, Pseudomonas aeruginosa
atggatgaggaatggtttgttgcgcgggtgtttgagttggctggcgagcaaggcctgctcattcaggagcgaagacctgggcggagcatttgcttcaatgagaccagcaagaagtggcttcacgaagggcacattcggcagctctaccgcgagggggttctagctgacgggctcgaacgagccgatctcaaccgaatgatcgagggggtggcgcccggaagaccttgcacccatgtcggaatgcgcaagctcgtttgcttggttaagtccggagttagcggtggaagcacagacgagggtggcggctga

SEQ ID NO: 360991 - DNA, 828 bp, Pseudomonas aeruginosa
ttgaggcatcgtcatccgctggcgctgctgctgcgagccgccaggctctcgcgcagcacgttctactatcacttgaaggcgcagggcctggcggacaagtccgctgagctcaaggccaagatcggtgcggtctatcagcgccatcagggccgctatggctatcggcgtgtcacggcggatttgcgcagtgccggtgagtgggttaaccacaaacgggtccagcgcctgatgcaaatgctcgggctgaaatccgtggttcgccggaaaaagtaccgctcctatcgcggcgaagttggccgcgtggcgccgaatctgctggatcgccagttcgaggcgggcggtcctggtcagaagtgggtcaccgacgtgaccgagttcaacgtcaacggccagaagctatacctgtcgccggtgatggacctctacaacggcgagatcgtggcttacgagacgagcaggcgccccgtgttcaccttggtcagcgccatgctcaagaaagccttccggcggttgtcgcctggcgacacacccatgctgcactccgatcaaggctggcagtaccagcagccggcctaccgacatctgctggcccagcagggcttgatccagagcatgtcgcgcaaggccaactgcctggacaacgccgccatggaaagcttcttcggcacgctcaaggccgagttcttccacctggcacgcgtcgaaagcattgagcagttgcaagcagggatacggcagtacatccattactacaaccacgaacgcatcaagctcaagctaaaaggcctgagcccggtgcagtaccggacccaggccttgaccgcctag

SEQ ID NO: 360992 - DNA, 174 bp, Pseudomonas aeruginosa
atgccacacaagcacccgcccgagttggcgcccaaggacatgacagagaagcagttgcgcgaagagaatgcgtatctgcgtgcggagctcgactacctaaaaaaactcgatgccttgatccaagcggagcggaccgaagcgctggtgaaaaagcgcaagtggtccaaggattga

SEQ ID NO: 360993 - DNA, 1668 bp, Pseudomonas aeruginosa
atgacatgggcggacgtacaagcgctccggaaatcggggcgtttccaggaagccatcgacctcggtcttcaagatctggccaatgatcctgacgacttcaaactgaggacgcagattgattgggctttctatgggctcgtcaagaccctggtttccatggtgggcgcaaagctgaaagcctcgcagcctgtcccaatgcagaccattagccagatccatgcggaacttcgccgattcgcaagacagccgaaacgtcgcccagacaatgcactctcgaacatcattcgagaggtgtgcaaaattgcaccgcattttcaaacttttccagggttcattcggtgggttggtaacgatggtttaggcacagaagattggcaatacagccagcgcgatgagaatcgctacccaccgatcgcacttggcgtcgcacgtgcattggccaaatgggttaaagccttccacgatgccacgccagaagacatcgatcttgcgcttgagtggatagaccgaattcggcctgtggctgagggtgatgatgctctttggctggattgggacaaggtttttttgctgaggcgcattcatcgacacgcggaggccaccagcattcttggctctgtgatcaaggccaagagaaatgagttctgggtatgggcagaggcggcgcgcctatacgctgaggatcaacccgatctcgcgctcgcgtgcgcctgccgcgcactggaatgtggctctgatccaaaattcaccgtcaatgtccatcgtgagctggcgcagatgttggcagagcgaggagacttctcccaagcaagtagtgagctcgtcactgccatcaacattcggcaggaacaaggctggggagtcgacaaagagctgcaagagctgatcagcagtagttggtatgacccgtcagcgcccgaagccgagaaccagaaagagttctacgctcggcactcccaggaagcgttggtgctgtgcttcgattcggttgaagtgaggtctgcgacctatctgggcgtgatcgtgccacaccagcaaaaggaagcaccagctggtcgaaagataagaccccttccgaggttctctgttcgagcgaacggcggcgcctccgtcagcatcgttggacggggtgcacgtgtctcttcctttaagattggcgaccctgtaactctcgttgttggcaagcagttggaaagcaatcgcgaggatatagtccaaattgcagcgcgtccggaaggatcaaagtgggactgcacagatgccggatctggcgtcgtctcgcgcgtggaatcagaagaaaaacgtacaaagattttcgttaatcgcgacatcgaagttggagtcaacgacagtgcttgggtcggctctcaacctccgtcgttaggccaaggcgtttcttttcgaaccacgcaaaatcaaaagacgggtcggacggatatctttgccgttgcgcccggcccgcgtccagatgttgatgtacgggtggcgagtggtcacctgaggcgtaacgccaaaggatttgcgttcgtcgacgatggctttgttcctccgcatctagttgaaagcatcccagcagatgttaatgacgtaaccgcagtactggtttatgccaagcatcctaaggaagagcgatatggatggcgcgccgtggcacttagcgcgggatga

SEQ ID NO: 360994 - DNA, 2688 bp, Pseudomonas aeruginosa
gtgaccatcctcgtttacggtgagaaggccagccgcactcatgaaaaccagatgctccacgtttttttggatcgactcgaagagcgttgggtaaacagcaccgactggattattacgattgcgaacgcgatgtggaacggcgcggaaatcgacttggtctgtatcctgccgtcagcaatcatcgtggccgatttcaagagctatggcggcaagctgactggcaccgagaacggtccgtggcaagctgatggcgtgatagtcaaaggcggacggaaggccaacccctaccagcaactgcgcgacaacaagttctccgtgcttgactggctgcaatcaaaggcgttgttgtccggacgcaatctcggccacatctctgctggcgtaatattttcagaccgcatcgaagatcatttggagcttccatccaaggttcgctcctggttctacccgacggatttgaccagctgcgcagccatgctcgatggcctctcctcgccagaattaaggattggcaaagacgaagcgctagaaattgtccgcaggctcggggttcagccgattgaatgggcttccagacgcccgcaggtccgcgatattcattcgcatcccaaccttccgcaggcccgcacaccgttgaccggacatcaacgagaggctttgcagacgctgtgcaactttatcgctgcagacgatttcgtaagtttttcggtgctgggcatgacttcgactggcaagagccgcttgctggccgaggtggccgacgaagtcaagaaggccggtaaacaggtcatcgtcctggagcctaaccggcgccttgccgatggatctgagatggagtcaaacagcatctacgctcatctctacacgagcagcgtgaacggcgatgatgagcttgataatgtggatgagcagaagaaggtcaaagtcattccattgcgcgcatgcgatgacgcaacggacagtgtttacctgctggatgactcgcatctgctgggtaactcgcgcttctcgactcctgacggcaagcaatatggcagtggccaactgctatcggatttcttcgatttcgccgaaatcggaaaaacgaagcgcaaggttgtgttctttggcgatccctaccaaattcagcgtggcagctccgaggagtcggtgctttctggtgatttccagaaagcacgcggacttaagcaccaatctctcgagctgactcagatcatcgatactactggcggctcggccaaactggccaatgcggtcaggctggtatctgccataggaacgcagaagttcgctgcactggaactgtcgacagacgacggtttcaggattgtcgaaaagaaggatgcagctagcgagatattggatcactttcgtgcagacccaggttctgtctggtacttggccgagacacatggtctagcaaatgcactgacgcaatgggttcgggagcgcttacacggaaagagctctttggactcagtggaggtcggagacctcttggagatatacgtcagccctgatgtgcgcgacgcattcggctcacgcgtgtcgatgcaatccggtgcgcgcatctccgtcacgagtgtcggcaagcgtgctctgtatcagcaaggcttaagttgggtaaagagcggccctatcaaatttcattccatcaggtgtgggattcatagccgagatgaggttgagctcgaggtgttcgaggaatttctcaaggcggaaaaaccagagctggacaaagagactgctgtcgctgaaagcgtttggagaaatgccataaagcgtgaccgagagaaggcattcgacgggaaacaggccacgctccaaggaatagaaggccggtcgacgccaccgcccgcaccagatttcacctacgcacgttatggctatgcatcgaccgttcaccatgctcaaggcatgtcacagccagtttgttacgtgaattgcgaccatgcggccggccggcactcggaaggattcttccgctggctgtactcggcgctcactgtcgctgaacgtgagttggttcttttgaatttcagcgatatccacccatttgacgctgctgtatggaatgcgggggcagccaaagaggcctcggacatcgcagtaggcgctggctgggcattccagcccaacggaatcgcgtccgagaaagaccagcaacgcggcctgcctgagggtctagaccaatcaaaagatgttctcaagtcggtagcaatttggctccgtgtcgtcaacgcagtagagcggttgggctggcgggtcgtaaaggcggcctgccacccttaccaagagcagtacgatctatctggaccacaagaagaacaatgccagctgcggatcgcctacaacggaaagaacgtcgtcaccgccatgcacgtaaaagatccggcgcagtggcctttacttaccgacttggccagcacatgcgtcgaaacgactggatattcacctgaggctgaaaccttgcttcgctctgctcgcgcgcgtttggaccggattggctggaagatcgtatccgctaccgagacgccttaccgactagcaactaccgttgctcgcaaccaggatgaacgcgtcggtcttgagattaacttcgacaagcaggggctggtttcgagcttgcgcccgctgacatacagcaactccgaggctgttgaaacaataaggtcggctttgcaatga

SEQ ID NO: 360995 - DNA, 870 bp, Pseudomonas aeruginosa
atgaacacagagacccaaaatgcataccgctcactagccagccacttctacgctacccgtttgcctgacatcccggtcagtgagctaaatgagttcagtatcgttggtgctttattgcgtgctgcgcctgaatatcggcccgactatttcaggcggttgcgcaatgcactcgcgctggatcagaaactccgtaatcacttctggattgcccaggaaatcaatcggacactcaaccctgttaccgttttgggcttgcctcgcaaacgcaagcaggctcggcggcagagaatttctgatgaagagtttgggcgctgggtcaataagctgttagcgaaggagcaggtggttgaggctggggcccttttgttgatcagtatgactggcgcgcgcccttgtgaactcagtggcatcagcgtcaatggcaatcgcatagtgattcctggtgcgaaacacagccatggtggtttgcgtggtgctgaccgagtgcttgaagccagtgaggatttctgcaggctggtgagcaatgctcttgaggcttttcattctcagggcaggagcttggactcaatccgcatagcgatccgtcgcgcggctctagagacctttcctcgtacaaaggtgcctagtatgtacacgttgcgccaccagtttggatcaaacctcaaggcatcgggcttgtcgcgggtcgaaattgcttatgtgatgggtcatcaagcgacggactctattgcacgatacggcgataaacgattcggccgcgccgaggctgtccaggtcaaacctgcgtgcgaagcagacttatcgagagttcgaacaacacatgctgcatacgctcgatctcgttcgaaggtcttgcgcattgattgctga

SEQ ID NO: 360996 - DNA, 438 bp, Pseudomonas aeruginosa
atgagcaatgccctgatcctttttccccttcaaccaagcgccattcacctaccgtactttgacgcgcgtattccggcgggcttccctagcccagcgctggatcacatggagcacaagctctctctggatgagctgctcgacatcaacgcgccccacacttacgtggttcaagtctgtggcgacagcatgaccggggccggaattttcgatggcgactatctgatcgtcagccgagcacttgaagccaagccaggcgatatcgtggtggcttgtctaaacggtgaagtgttcgtcaagcgcctgaacaaagcccatggtgggtatgtgctgcaatccgagcatgctgactatcctccacgctatgtcctggaaaatgacgaattgatggtctggggcgtcgcgacccatagcctgcggcaccacctccaccatgcctga

SEQ ID NO: 360997 - DNA, 1641 bp, Pseudomonas aeruginosa
atgtccgtcccactaccgcccgagctctactacctcagcaatttccgcacggcactcgcctgggtaggtgagcgctatgccgacttgctgtcggatgaagagcgcgcctttctcgacaccttccacagcctggcctggccatcccaggctttgctggtacgtatggtcatgcgcaagggctgtcattttcgcctgagcaagctcgtctacccggaaataggcgactgcctggcggcagccggcccactgcttgaacagggctggatcaccgaacaagcggcgctgaccgtggatgaggttgccgagctgctgcgcaaggatgaggtgctgactcacctgccgctcaccgaccgccgcgccacgcagaagaaggccgagctgctcgaacaactgcgcagcacggagctacccgcccagactttcagggactggtgtcctgggctggatgatcagttactcagcctgatggtgggcgagttatgtgatcgcttgcgcctgatgttcttcggcaatctggcccaggactggtccgagtttgtgctggcggatctgggtatctaccgctacgaatcagtggacataagcccggagtcacgcggcttccagtaccgtcaggatcttgaggattacctgcacctgcgccagttgcgcgtcagcgttgagcaaggcgcggatctggcggacatcgtgccgccgttattggcgttcagttcaagcaacccctacctgtgcagtcgccagtcgcgcctgctgtttcagatcgctcagcaattagagaagagctgcgagccggagcaggccctgctgctctatcaggaaagcaatcatggcgaagcacgctggcggcagattcgcgtgctggaacaactggggcgggatagcgaggcccatgataaggccctggcctttagccaggccccgagcagtgatgaggaaagtcagcgcctggaacgggccctcacccgcctgcggcgaaagctcggccggccgacgatgaagcgcgccaaggcagtgggcgaaccccgtatcgacctggtattgccgatgccggtacatggctgtgtggaaatcgccgtgcgtgatcatctgcagcaggatgatgccccggtgcattacgtggaaaacacccttatctgcagcctgttcggcttgctgtgctgggaggcgatcttcgcaccgttgccgggggcgttttttcacccattccacagtggcccggtggacctgcacagcccggacttttatgcgcgtcgccaacacctgttcgaacgctgtctgcagcagcttgaacaacccaactacagacaactgatcaaggctcggtatcaggaaaagttcggcctacagtcaccgttcgtgttctggggcatgctcgatgaggagcgcctggaactggccctgcagtgcattcccgctgcacacctgcacgcctgttttacccgcctgctgcgagatctgaaaaccaaccgcgccggcatgcccgatctgatccagttttatccgcaggaacagcgctaccggatgattgaggtaaaaggccctggtgaccgcctgcaggacaaccagaagcgctggctggcgtttgccgccgagcggggcattccggtcgaggtctgttacgtgagctgggacgtggcatga

SEQ ID NO: 360998 - DNA, 2280 bp, Pseudomonas aeruginosa
atgggcattgccttgtttcgagagggattgaaggtggagacagaccacgaccgcccgctgctcgcatacgcatatctcgctcagactggatcgcaagacgacatcctgagtggcctggttccaatcgtctcgccaatcgctcaagccaacgccggcaaggcatttgatgcgcaagagttatgcaagaagcttaaggagctttacgggatcgagattcatccatgggtaacggatgagctggtgccaaatctggtgctggcaggcgtattaatcccttccgagctgaacggaagcgtggttaagcactattacgctcctgcagagcgtttcgaaagcatcagtccagtcgaggatgaggtaaaaaccctagttgatcaattttcggcctactgcggtccgctgcttcctcaaggcgaggcgattgatccggcactcgttgaaagcgtctttctaaatcagcttgtttccctggactttcacgctcaactgctaaagcctggtgttaagtcaaaggaggagccgcctgcaggtcgcattctccgcttgagccgagctaagggtacagatgctgccgttccagatctagccgatactgccaagcaagatcggctcaagttgctttgcgcatcatttattctgaagcttaaggatgagggaagtcagcttttccctgtgcttgtcagaatcgccagtggtgcaattgctgcagagtacatcctgaatttacgtgagccaaatacaacttctagcttgaaaggtatgaagttctaccttgacggccctttggtgatgtcgtacctagatgtcagtgatccgcttgcatgcgaatatgctactttgttgattgaagggctggctagcaagggtgcaatcctgtgcattttccagcatcacgtagaagagattcgcgccaacttgaaagcggctcttgcacgctctgagcaaggagatgggcatagagcgacctatcgacgactcagagaccgaaattttaggacatatgttcagtctctcattgggaatttggattcgtcgattcgcggaaagaagatcgcgatcatacgtacccctgagaatgccgagcgttatttctctgcagatgaagaaagcaacttagtatcggcacttgggagctataacatctatgcacggtcgcgagatgctgcggcagttgcggccattgttaggcttagacaaaggcgcccttctaatcgcagtgacttccaccaagcacagcatatttttgtaactgaaaacgcccaggtcgctcgtcgttctgcacgattcctccatcaggaaggtatctatcgagcagaggatgtgccagctgcagtgactgaccgtcacctagcggggctgatgctggttctgtttggggctcagggatcatttgagcttgctcaccaccgcctgatcgccaactgcgcgtcagctttagagccgagtcaagagctgctgactcgcgtcacgagtttcttggaaagccttgactccgtaagggccgaacactttcgcgcgatcatgactacgcagcggtcagctcaatacatgacccgattcatgcttgagcagcgaatgagtctggataatgtggacgatgcaactcgcgttcttgagcatctggaggatcagtggagaacggcgctcaaggaagaatctgcagcagaaatcaagaagctgcaggaggagcatagcgagacattgcgccttgccgaggaggctagggcccaggcagctcaggatacgcagcgtgtcgcggcagagttggctgagcaccaggagaaagcggcagagcaacagcgagagagtcgcgctcagattgatgcgcttactactggcctcttgactctgcaaaaccagcaccaagaagatcttcgtcgagatattgagacatcccgggctcatgtccaagttctgcttaaaaaatattccggtgaaagtaagtctcgagtaaagtctgcgacagtaattatcttgctcgctactgtgtttgctgcggatctcagtgcctatttggcccttgaccccgactcgctcgctaaaaaatcttggattttgattttagcttccgcggctgtaattctgagttctgggttgattggcgaatatgtggctaaaaaaagtaagagtaaatccaagcgaagatttttcgagcagttccactctgatctctttgtgcagcgatatgctgaataccttgaggttgattacgaaaactctagcgtgaatataagggagttgcctgagtctggtgaggagttgctagctaagcgcaattga

SEQ ID NO: 360999 - DNA, 243 bp, Pseudomonas aeruginosa
atgggtgtgctggagtgtttgcgcgagtgcttccctggtgcagtcgatggcgccgggctagtgtccctgtcttggtatgagggcattgagcagttgatggagtcggtcaatcttcacccctttgaagatgcggccggctacatgcctaccggtcaccgtctgagcattccgggcgtacatatacgcctggaagagggctgcgtattggcgcgctgcgagcgcatcagcctgacgcgacattga

SEQ ID NO: 361000 - DNA, 1491 bp, Pseudomonas aeruginosa
atgagttttgacctgcccaagctgccagacggttgggaatatcagccactcgatcaattatcaaagcctagctctgtgacttacggtgttgttcaacctggagcggctctgagtacgggtgttcccatcatccgcgtgaacaattttcgcgatgggcgaattgagttggctgacttgatgcgtatcgaccctgctattgaagggaagtacggccgtacgcgtctaaaaggtggagaggttctgctgacgctagtggggagtgtggggcaagttgcagtcgcccctaaaacagtcagcggattcaatgtcgcgagggctgtagccgtaattcatccagaagaccgtgtagagcctgagtggattgccctgtgcctccgatcaccgctatcacagcatctgcttggcagtcgtgcgaatacaaccgtacagacaacaatcaatctcaaagaccttcgagcactcccaatccctctgcctcccgcgagtgaacggagggaaattgcttctgcaatgttggctctcgacgaccgcatcaccctgctacgcgaaaccaacgccaccctggaagccatcgcccaggcgctgttcaaatcctggttcgtcgatttcgaccccgtgcgcgccaaggccgaaggacgagcacgccaggatggcgagcgcagcgggcaaccaaggatgccgcaggcatccgacttgcccaggcctggagcggaggcaggagccgaagcgcaaggacagccggaaggcgctatacagggaagtatgagtgccgctgaaggcaggatgccgaaagcggccatggacgccgccaccgccgccctgttccccgatagtttcgaagagtccgaactgggcttggtgccgaaggggtgggtagttaggtcaatcggtgagcttgttgaggggatttacgacggtccacatgcaacgcctgctgagtcggcagatggtcctgtttttcttgggatcaagaatctaactggcaccagccttgatctgtcggatattcgccatatcagcgagagcgattggacgcagtggacacgccgtgttgagccaaggcatggagatattgtgttcagctacgaggcgacacttggtttctttgctttgattcctccaggtgtacgttgttgcttgggtcggcggcttgcgttggtgcgtccgcatgcagaaaacggtgcagggctgttctggtttcaccagttcatctcagcaccatttcaacaactacttgataagcacacgatccacggcgcaacggtcaatcggattgctctcaaggctttcccaagctacctggtactcaatccgcccgaacctttaaagtcagtattcgttgattcggtggctccgctttgggccgctattcacgagaaccaagcgcaagcccaaaccctcacccaactccgcgacaccctcttaccccgcctgatctccggccagctgcgcctgccggaagctgaaaccttgctggagaaagccctgtga

SEQ ID NO: 361001 - DNA, 1269 bp, Pseudomonas aeruginosa
atgaatgcactaaccccctcccacatctccgtcccaatcactcacggcctatcgttagcatttgctgggcatgatccgaaaatcttggaactggctatgccacacctcgccaagatttctgaatcgatttatcggcaccacaactcgccgctgctgtccgagttcatggacagcgtgctgaatcgcttccttcgagagaatcctcgcaacgcaaaatcggcataccaactcagagccaggatggccaaaatcaaggccgtgcttactcaagatgatcccttgcgccgagtagccagccttagcaatcgcgatatccaaacgctaaaggatgagctcccaaagctgctcagaaagaacaacacatccagcagccagggcgataacctccaagcctactacaggctttttaatcgcatgctggatcaagcaaccaatgaccattgggttgatgaagacctcaagatcaaaggctgccagaccaccaaatcgaagataaccaagtcattcttggactccaatctggtcagcctcttcaatagctggccatatcagacctacgccccaggcacaccggcagcccaggtgcgccaagatgctcatagcttttgtttttggctgatgccgcttggactcttcaccggagccagactcaacgagctctgccagctacgcattcacgacatctttcatgacgcgcatggcgtgccccttatcagcatcaacgacaacggcttcaaaaagtcgctgaaaaatgagcaatcaaggcgcgagatcccgatttgctcgaagttgatcgcaatgggttttctggacttcgtggaggaacgccgtcaggccgaaggccctgatgctttgctgttttcagagctgcgctttgacgaaaagcacctatattcacgcgctgcaagccgcttcttctgcggccccggcacaggagccggcttcatcggacagcattgcccggttgcactgagtggaggcttcaattttaaaagctttcgccgcactttcgcggtacagcttcagaagtccggcgtgccagcaaccgttattgcaaacctgctgggtcatgacagcgatatgctcgaagtcacccgcgagcactacctcgataagccgcaatccgtgtttttgctggataccttggagcgttccctgagctacaacctgcccctaggtgccataaactggcagcatttcaagaatttgatgagcagccagaaaggacgtagcaagcgaggccggaaagccaagaaaacgctgcactag

SEQ ID NO: 361002 - DNA, 1134 bp, Pseudomonas aeruginosa
atgcgttccgagttctccccgctgtttcaatccttcacctttgacaatggtttgcttctgcgtaaccgcattgtgatggctcccatgactacatggtctgccacttccgatggcagcatctccgatgaggaactgttgcattaccgcagtcgtgcccaagaggtgggcctggttattaccggctgcacgcacgtgacagcaaatggcattggattcaccgacgagttcgccgcttacgatgaccgcttcatacccagcctgcgtcgtttggcagaggcggccaagagcggcggagctccagccgtcctgcagattttccatgcgggaaataaggcagtggtggaagccgtgccaaacggggaattggtaagcgccagtgcaataaatgccatcggcggccccttcaaccgcggcgacgtgactccgcgcgccttgtcgcaggatgaggtggcagagatggtactggcgtttggagaggctacgcgccgagcgatagaggccgggttcgatggtgtggagttacacggcgcccatggcttcctactgcagaacttcttctcgcctcgctacaaccagcgcaacgacacctggggtggttcgctggagaaacgcatgcagtttcccttggcagtggtgcgggaagtccgacgtgtcattaccgcccacgccaatcggccgtttctcgtgggttaccgaatctcccccgaggagcgtgacgagggtggctaccgcttgccggacatgcttgcgtttgtggataccctgattgccgaagggatcgattatctgcatgcctcactgcacgaagtgcttgtatcacgaccgcagggcagcagctccctcctcacggtggagcacctcattgcgcatgtcggcgaccgcgtccccctgatggcagcaggtgcgcttcgcacgccagagcaggcggagagtgcactggcgcttggtctttcagcggtcgctgtaggcaaggggctggtgatgaatcaggactgggtggcgttagccagatcgggaaatgatgctgcgattcggcaggccctggatgtggatcgacgtattgagctggccatccctgaagggctatggcgtgcggtcgaggcatcgccaggctggatacccgtcagtcagtag

SEQ ID NO: 361003 - DNA, 921 bp, Pseudomonas aeruginosa
atggatccgtcgctcttaccgtccctggcctggtttgcccatgttgcccaccacggtagcttcaccaaggcggccgcggagatgggggtttcccgcgccaatctctcgcagaacgtgaaagcacttgagcgtcgcctgaacgtgaaactgctttaccgaaccacgcgcgatatgtcgctgaccgaagcagggcaacgactctacgatgtgtggtatcccgcgctgatttctgtggagcgggccgtgcgtgacatgaatgacacgcgcaatgacccggctggcgtggtgcgcgtcaacacgtcccgcgttgcggccaagaccctgatcgagccgcatatcgaagagttctgtagccgctatccacggctcaacctggagctggtcaccaacgatgcattggccaacatcgtggccgaaggttgcgatgttggcatccgcgtgggtgaaagcctggccgagcatatggtggcggtgcccatcactccgccgctgtcgttggccgtggtggggacgccggcctatttcaaacgacacagagtgccatccacaccggctgacctcgcgcaacaccactgtctgaggttccgcaggccaggtggcgcgattctgccgtgggagttcacatcacccgaggatggccacttcttcagcgtggagcccagtggcggcattaccaccaacgacgatgacagcatgatccgctgtgccttgcagaatgtcgggcttgtgcaacacatcgatatcgccgtcagagagcaactgaaatcaggcgaattggttcgagttctggagcattggtgcaagccgttcgcaggcttttacatctatgcgccgacgcgtgcgcaaatgcctgccaaggtgcgggcgctgatcggcttcctggtggagaagcgtgaggcgatgacgccactgaatgcataa

SEQ ID NO: 361004 - DNA, 921 bp, Pseudomonas aeruginosa
atgaaaagcatcaagatcaagcacacctactgggacattgccgcagacctgtactacccgcccaacttcgacgagaacaaaaagtacccggcgatcatcagcgcccatcccattggcagctgcaaggaacaaacctccggcaacgtctacggccaggcactggccaaggaaggtttcgttgtgatcgctttcgatgccagcttccagggtgccagtggcggtgagccacgctttaccgaagatcccacactacgcgtcgaggacttccgcgtggtttgcgattacctggtcacactgccttacgtggatgaggatcgcatcggcgtgttgggcatctgcggtggtggcggctacgccattaatgcagccatgaccgaacgccgcatcaaggccgtaggcacggtcacgggtgccaactatggtcgcttgatgcgcgagggcttcagcggcttcgaccctatcggcgctttggaggccatggccaagcagcgcaccgctgaagctcgcggcgaagctctgcgcgtcgatgacttgctgcctccgtcgcccgatgcagccaaggcagcgggaatcaaggaaatcgacgtgctgggtgccaccgaatactaccgatctgatcgcggtcgtgcgcccaacggtctgaaccgtgccctgtattcgcaccaggcggtagccatcggctgggatgcattccacctgtgcgaaaccctgctgactcaaccgctgatggtggtggtgggcgatcaggtgggtgcgttcggtgcttatcgcgatggctgcgaaatcatcggtcgtgctgcatcgaagaaaaaggagttggtggtcatcgaaggctggtcgcactacgacctgtacgacaagccggagccggtgggccaggcgttggccaagctgattccgttctacaaggaaagcctctga

SEQ ID NO: 361005 - DNA, 636 bp, Pseudomonas aeruginosa
atgaccaaagtattgatcctgggtgccagcggacagatcgctagctgggcagtccagatgctgggcgaacacaaggagatcgagcagaccctgctggttcgcgatcccaagaaactgcccagccaggaaccggcaaacgcccgtgtggttatcggcgatgtgatggacaagaggctcctggctcgggtgatgcagggtcaggatgtggtttacgccaacctcgcgggcgaggtggatgtgcagacaggacggatacttgaggcgatgcaggccgaaggcgtaaagcgcctgatcttcgtcaactcgctgggcatctatgacgaagtaccaggggcattcggcgagtggaatcgccgcgagataggcctgtacctgcctccttatcgcaagtcagccgacctgatcgaagcgtctgataccgactacaccattctgcgtgcggcctggttgcaggacgaggacgaggtggatttcgagaccaccacccgcaaccagccattcaagggcacggaagtctctcgcaagagcgtggctgcacttgtaacggagttagtgctgcaccccgataggctggtacgggccaacgtgggggtgaacaagccgaacacagatggcgagcgccccgcctttgtttga

SEQ ID NO: 361006 - DNA, 678 bp, Pseudomonas aeruginosa
atgacccagcaagaatggagcagcctgtttccattccactttggctccgtcgccgagcgacaagctcgactgaccttgcgccgcgagggcgactttgaccgcgaggagcttgaaaccttcatccacgagcgtttcgagtccatccaccacgctgacgtccatcactttctgcccgagttgatcggtctgcaggatagccatgggcggctcatcgccgccgccggcattcgtccggcctcccaggggccgctgtttcttgagcgctacctggacgagccgctggagggcgttgtgtcgcggcttgcaggtcatgtcgtcgggcgtgagcagttggtggaggtaggcaaccttgccgccctgagcgctggcagtgcgcgcgtgatcatcaccgccgtgacctggctgctggctgcgcgcgatctgcagtgggtcgcctttaccggcgcctccaccctggtcaatagcttccaccgattaggactggagccaaccgtgatcgccgaagctgacgccagccgcctgaacggcgagctggccagctggggcagctattacgcgcagcaccccctggtctacgcaggaaacatcggctacggccatgacgaactggagcgcgcgggtgtgtacaagcgcatgggtttcccgatgctgctacaggaggccggccatgccgcatga

SEQ ID NO: 361007 - DNA, 1467 bp, Pseudomonas aeruginosa
atgccgcatgaactgaacgcctttcgtgaggtgctgcaagcgcatgccacggagcatgcctcgaaagtggctgtacgcggaatcactggcaacgtcacctatgcgcagcttctggctgaaattgaacgtcgcgaagcatggctgcgagaacaacccgaagggtcgtttgccctcgcattggagaacggccccgaagcgctcttctgggatctggccgccctcttcgctgagcgcccttgcgtcatcctcccgccctttttcagtgccgcacagcgcctgcattgtttgatgcagacccaggcgacactggccgtcgccaacgactccttcgcagaagatctgcgagcagctggtttcacaccaggcgagcgcttctgggagcggccggccgttgtcagcgccgacttacctgcaggcactgccaagatcacctacacctccggtagtaccgggtcgcccaagggcgtatgcctgagtgcccctgctctgctgtgcgttgcacaggaactcgaagcggcgagccgcgccgctgagcccacgaagtacctcgcagtacttccgctggccgtcctgctggagaacctcggtatttatgctgctctactggcgggagccagcatcacgctctatccgcaagcgcagatgggtatcggtggcgccagtcaggtcgactggaaacgcttccttggcaccattgcactcagcggcgccgagagcctgatcctggtgccacagctcctgcttggcctggtcacagccatcgagcgcggaatgatgaaagtcggccccctgcgtttcgtcgcagtgggtggtgccaaagttgcgagcagcttgctggagcgcgccgaagcagtggggcttccggtcttcgaaggctacgggctctccgaatgcgcctccgtggtttgcctgaaccgccctggcgatcaacatccaggaagcgttggccgtcccctaccgcacgtccaggtgcgtatcgcggacgacggggaagtgctggttcgcggttccaccctgctgggctacctcggcgaaccttctttcgacggggaatggtggccaaccggcgatctcggccatttcgacgctgctggattcctctacctgggtggccgcaagaagaaccagttcatcaccagcttcggtcgtaacgtgaatcccgagtggatcgaggccgagctttcccagacgggcgtaatactccaagccttcgtccatggagaggggctgccgtgcaacttcgcattgctctggcccatcgacccaagcatcagcgacgaagtcatcgagcaggctgtgcagcaatgcaacgccggcttacccgattacgcccgggttcatgcatggagacgcctaccctgcccctttagcggtgctgacggaacccttaccagtaacggccggccgcgccgccaggaaatcctccgtcgccaccagcccctcatcactgaactctcgcaatcctga

SEQ ID NO: 361008 - DNA, 642 bp, Pseudomonas aeruginosa
atgaaacgcctgatactcgccagcctcattgccctcactccgcttacctgggcgctcgatcaggctggcagccagcacctcagcgcgatccagcaacgttgggcgcaaatccaataccaaatgcccgaagcgcaacgcgcagccgctttcgaaaagctgtcgagcgacgcagaggccttcacccacgagcagccccaagctgcggaagcctggatctggaacgggatcgtcaccagcagttgggccggcgccacaggcgggcttggcgcgctgggcaaggtcaaggctgcccgggcaagcctggagaaggccctggctctcgatccaaacgctctgcagggggcggcttacaccagcctcggcgcactgtatgaccgagtgcctggctggcccatcgggttcggtgactcggacaaggccgatgagctgctgcgcaaggcgctgcggttgaatccagaaggcatcgacagcaactacttctggggtgaccatctttatcgccaagggcattacgtcgaagcgcgtgcggctttgcagaaagctctgcaggcacagccacggcctggccgtgagctggccgaccagggccggcgcggcgaaatcgatgctttactcaagacgatcaaggacaagcaggactaa

SEQ ID NO: 361009 - DNA, 1368 bp, Pseudomonas aeruginosa
atgagctcgttgcgccaacgcacgctttggcgagtcatgctgctgttgctggtcggtaccagtctgcttgcgctctacaactatcacgacagcagccacgagatcgacgagatctacgacgcccatctcgcgcaaaacgcgcgcctcttgcaaggcgtcatgagcatgccgctggacgacaaggatcgccatgcgttgtacctggcattcaatgaagcactgagtcaggcgggcaagcatcgcgtcggtcacccctacgagagcaaactcgccttccaggtgtggcgcatcaacggtgaagtactggtacatacggtcagtgccccgagcttcactcgtcctctgaccgagcccggcttttcaaacatcatggtgggggagcagcaatggcgcagcttcgtgcttcccgtgccagagcgccagttggtgatctgggttggtgaacgcaacgatgtgcgcaacgacctgatcggtcgcatcgtccgccacaccttgtttcccttcttgatcggcagtctcgcgttggcgctgctggtatggctggccatcggctgggggctgcaaccgctgcagaacatggcacgcgtcatccgagcgcggcatgcagagtcactggagccactgcaactcgtgcctctacctcgggagctggaacctatgcaggcggcgctcaaccggctgctggggcagattgatgagctgctgcgccgtgaacatcgatttatcgccgatgccgcccatgagatgcgtacgcccctggcaatccttcggctgcatgcgcagaacgcgctcgaagcaagcagcgatgccgagcgagataaagccttggagtttctggttggtggtgtggatcgtctcagtcgagtggtaaaccagctactgaccatggcgagaatcgagccgcgactcgggcaacgcaactgggtgacggtcgatgtcgctgcagtggcgacggagacattggcggagatgacaccctggattttggatcaaggccaggaaccatctctggaaatcaccgagggcgactatcagcttcaaagtgatgcaggcgctttgggcattgctctgcagaacctggtcgcaaacgcagtaaatcactcaccagttggcggtcgagttaacgtcacgctacaccgtgaaggcaacgccatcgtactgaacgtggaagatcaggggcctggcatcgaccaggaagacttggagtgtgtcttcgaacgtttttacagtaaaggttctgagaacggcgccggactgggcctgtccattgtggcgatgatcatggagcggcttggaggcagcgtacagttgagcaatctactctccggcggacttcgcgcaacgctgagggtcattcctgcttcctga

SEQ ID NO: 361010 - DNA, 1080 bp, Pseudomonas aeruginosa
atgggcgaagagaagaagaaaaagttgcgtctttctgacttgaaaatcgaaaagcaacaagtcgagaccagcatcggcgtgctgtttgttcgacactacaccatgcgcgatttggcattcctttccgaaactctcaacggcaatggaccagagaggatcggcgctttaactcttcagaagctgacatcccatgatgaaaaggactttcaacatgcgggcctctctgatcaagagtttgagcaactcaacgagcacgactatcaggtgcttctgcctgccgccttcaaatgcctgggatatcaggtgccggcttcagagcagaacctcgaggggctcggcaggcaagttgaggagaagatgaagggcgtgctggaggccacgaccaaaatcgcggactccatcaagtcgtatttctccagcgagacattaaagggcttcgagaaaagcctggatggccttcgggatataacaacgaaaattcagggggcttctacgaggtggtcggcattcccgtcggacatgcataaggaaatgatcgtcgaaactccaaagattccggatcttgacgctttggttagaaattcgccggatgctcgggcgatgagggctgcagagaggacagaaaaaaccttgacggaaatgtcagggatgcttctgcaaatggctggagccattggagatgtttcgagccaactaatcagtaaggttgtgccggagtttttgaacagcttggcgggtcagaaggcggcagagaagaaggccttcatattgaccattggaggcctagccttctccgcgttagtgtccatcgcactgactggttggcaggtgtacctggctaaggaggccgctaaggacgctgacaaacagtctagggcagtagtcgcgatactcacgaaacagcttgatcaatcaaatgcagcgcaggttgccttgtcggcggagtttgatgccttgcggaggcagaatgagagcttgaacttgcggttggctcaaacgatggaggtgttcgcgaagaatacccatcagcggcctgcgtctaaaatatcgcagaaaaagcaagtcgaggcgcagcgctaa

SEQ ID NO: 361011 - DNA, 639 bp, Pseudomonas aeruginosa
atgcatccgacttccgcaataccctcgattccttcccttaagaagcaagccgacgcactcgtacgtgctaagggctccgatagagcacatggtgatcgtgcacgcgcactggatcacctcgccaatcactacggattctccaactggagcggccttctccgggcaaaggagcaagccgcgaaggaaaaagccggcgaatggcaatgcgtcgactgccaatccatgttccgttcagggcagttcgaagcgcacaccgaggtgagtaaccagcggctctgcatctgtacgcgatgtcacgaggcgacgatgctcaacgctcccgagtcaggcctcgcccccgtttcctcgccctttagcaccacagcaactgctggcttcgaagactggtatttgacggtgcgtggctggctttcttccgaccaggtggaccaggccgaggcaatgtcccaccgggaagttttcaaggtggcctccgccgccagcatcctcggggtgaagaggttgagggcgacttggttcctggaatacccagacgaagaaactgcacgaattggccaggagctggagctgctgtttggcacggtgccgctggagcagtacgcacgatggtgtgcatctctggataggcgcccctcttaa

SEQ ID NO: 361012 - DNA, 1164 bp, Pseudomonas aeruginosa
atgttcccaagccacgacgcgccccacaagaactacaagttttactatgacgaatcaaacaatcaccgcgtatttaagctgcattcgagtgaagatgcttacaacatagataaagacaaacaaagaaagaccccaactccaacaaatttcatgcttgcaggtgttgcatatcgatgcatgcccggcatccctagccaaaaggaattgatgctcaaaatagggctttctgaggatgagaaagagatcaaatttggcaagctagcatctggtgatttctggacttgtctaaagtccgagaaacttcgtaagttccttggctggctatgcgagtcaaatctatttattcacacatcgcacttcaacctggagtattggtcatttcttgacattatccaggactgcattgagcatgcattaaatctggatagaattgttttccatgatggtgagcaccgccaaagaaatgatgctgagttgaaggatgcacttcatgacctggtgctcaatagaaagcaggaattcattgcgatagttaagtctcacgactacccaaagatcgatggtcatgaggccgcactggtggctgagattaaagcccttgtagagtcgcgaatggaagacgaatgcatcgacaaacgcgtatccgcgaaccttaagaagctgaaacttttgcttgcgcggtgcggtgacattgaagatatgttgcttacaagaaactcgactccgggcttgttggttgatgacttctcaagcttttacatctatcgactctcatcattcccattctcagagcatatctttgacaatgaagagactatcaaggacgcaatatctggctttgcaatgcgcaatgtgccaccagtaacagcttcctttgtcgattcaaaagaaagcatccttaatcaggtttctgacgtagttgcaggcttgttcgccaagtactttgagatgttgaatcttgccagctatgaagaagttgagtcaaaactcaccagtctcaacaaatttcaagaagaatgcttctctgcaattcgcaaactggtcgagaaaagcgatagcgaatgtgagttccttcttcactacgtgcttccgcagagcgagatcattaagcaccgcaagctaatgtttgatatagacgcatataaccaatcggtaagatattaa

SEQ ID NO: 361013 - DNA, 1221 bp, Pseudomonas aeruginosa
atgcgagacccagagtcgaaccacgtctgggagcgcaacggagaaccggtagaagaggccatcgagagcgcggccagcattccagcccaggcagctcatgatgtgctgggcatactgcgcgccaggcatgccgacatcgagaacgatcagatgcacgtggagtctgagttcggcccaggtacgcactacgaacaaaagtactcggcggccttgctctggcaaattgcttggcagaatttcgaaaccgccttgaagaccgaagctcggtacttcagccgctttgcctccgaacatctggcagcaatcttcggaggcatcgatcagctgaacacgaacgatcatcgccaactggtggcagaaggtggccctggtacggatattgagacgttgttccgcgcaagggtttttcagtctcgcccggcgttggaagccgcgatctcccgtcccgacctggaagtaggccctcccccttctagatacgcggcggcaggtaggatgaacgcgcgaggaatatctgtgttctacggcgcgacagaccgcgccgttgcgttagcggaggttcgcccccctgtaggcagcgatgtggtggttgctgagttccgaatcacccgtcagctgcgcctgctcaatctgcccgcactccaggcggcagttgaccacggaagcgtcttcgatcccacgctgctcgcgagactggagcgtgtggagtttctacggacttttggaagcaaaatgacccggccagtcatgccagacgatcaagacttcgactacctggccacgcaggcggtagcggatttcctggcaaccgaaaatacgccagccctggacggcatcattttcgagtcgacgcagtcggggggaggttccaacgtcgtccttttccataaggcctcacgagtgaaagaactcgaactgcccaaaggcacaagccttcgtgcaagcacctcggatgaagatgaggacgggccatatgtagaatacagagttgtggagttagtcccgccagaaggcgagatacaggccgagaccgctgaggatgatgactggtctatggacgacttttcccaaccaccacggcatcgtgatccgcgacctttgacgcttcaggtgaatgaagagtcggtgcaagtccaccacgtcaaacgggtcgccgtggaatgcgaagcgtacccggttgaccgaactcgacgcgtcaaggtcgaaaaccacaggttctag

SEQ ID NO: 361014 - DNA, 525 bp, Pseudomonas aeruginosa
atgtgcagcagatacgaggcacctaccgcagcgcagctgctcgacgtgttcggggtcgccctaaaggagccggccaagacggaactctggcctggctatcgtggcccattcattcgttcagctgctggtggcgatggacttgaggcgcatgccggcgtgttcggcttactgcccttctgggccaaggacgacaagctggcccggcggacctacaacgcccggtctgagacggtggccagcaagccctcgtaccgggacgcctggaagcactcacgacactgcatcataccggcgaccgctatctacgaaccggactggcgcagcggcaaggccgtgcctacacggatcagccgcgccgatggcggcctgctcggtatcgctgggttgtgggagcactggcgaagcccggaaggcgaagacgtgctcagctacacgatgctgaccatcaacgccgattaccacccgctgatgagcaactaccatcggcccacggacgagaagcgcatgtgtgacaattcgaaatag

SEQ ID NO: 361015 - DNA, 1311 bp, Pseudomonas aeruginosa
atgggacatatcccgcattccgttcaggccctttccctcaagggcatcaagcgtcgcgcgaaagcactcggcaaacagcagcagatcccccacacgcaggcgctcaacctggcagctcagttggaaggttacgagagcttccaccacgccaggcgctccatcgcccggacagaagccagcctccccgcccactcccggctgacatacagcatctatctctctgcgtattggcgcgactcctcggcctcccctcggaaagcggggctggagaccatcaagatcgaacttccgcgtccgctggccgagttcttgaagcgccaccagatccaccgcgctcgcaacctcgaaagctttttcctggagagcgaagatcacctcgaaatgcgctccaacctggattcgcaggaccgtgcgcgcgagctcctccaacgcgcagcgctgacgctgcagtttatcgaagccaccggccttcgccctgcaacgaaccagctgcagcgcgagtccatggaacagatggaccagatgcctaatagggaccatgtctcccgctggatctccccgcacggcgactggctattcctggatgaaccctacagccacgccaagctcaagcatgaaacggcggcgcgccaggcttggctgtccgccaaaggcctgcacggggcctggccggcttggggcgggctttattaccctacggagtcccttccgcatttcagcgcgtccaattcctccctgctcaagcatgtggtacaggtcgtcgagaacctgccgccggtcatcgccggcgcttggcagcagtggccgtggatctccgactcctactatgcgcagttcatcagccctgcccgggaggcctcgggaagaaagcgcaaagcgcgtcccggcaccacctacagctggagcaaaaacgcagtcgcgtacaggaccatggtgggccacggctctacctggcgacccaatcacgccatgagcctcgacaaccaccgcgtcatcgcggatgagttgaaacgcctcggttcggcccggcttcattacatggcctacaacaaactccaggaagttcgcagcgaattggaaaattggctctttgccgaagtcagtgggctcaaccgtgacccgacagacgactatcacaatctctactacggcggtgaaagccccaaaggctatctacagctggaagaaaaacttgccgcgatggatcgagtgcgcgccatcctggttgccgcctatcccgactgcaaaccgttgcgcgacttgctgaaagtgctcgatgcggcacgcaaggcagcggccaaggttacctag

SEQ ID NO: 361016 - DNA, 771 bp, Pseudomonas aeruginosa
atggacttctcccctgtcatagctccgctctggggcacgctcggctggctcgtcccgctggcactgctgatcggcctgctcaaatcaccttgggccaaagggtatgtcggcgagttgctggtgcgactctttgcccattggcaactagacaagttgatctaccgccgcctgcacaacgtcacgctgaacacgcctgacggcaccacccagatcgatcacgtgttcctctcgccttacggcatcttcgtgctggaaacgaagagcatgagcggctggatcttcggcagcgaaaagcaggcgcagtggacgcagaagatctacaagcgcacctacaaatttcagaacccgctgcggcagaactacaaacaccttaaggccctggaggcctccctgaacattgcccccgatcatctgcactcggttatcacctttgtcggtggcagtaccttcaaaaccgaggtgccagcctgcgtgacccagggcatcggcttcattcgctacatcaaatcattccagcagccggtattcagtgagactgaagtcgacgccatgctgaaggccttgcaaaccggccgccgcgcgccctcattcgcaacccaccgagaacatgtgcaaaacctcaaacgccgcagcgacccgacagccgaacggcaatgtccgaaatgcggcagcacgctagtgattcgtacggttaaatccggcccgaaggcgggacagcagttctggggctgcttgggctatccccgatgccgaatgatgcaaagcctctag

SEQ ID NO: 361017 - DNA, 318 bp, Pseudomonas aeruginosa
atgaagaagtacctccccctgctcctgatcgtcgctgcactgaccggttgcgactccaagccccccattaccgttgaactgggacaaaacgaaatgtggggcagcccccaactccaaatcacctccaagaagaacgaggtcaccatcaacagcgtggaagtgaaccgagggaactgtaagcgctacgtctgggaagacctgccgcacaagatggccttcggcgaagtactgaaagtcgattcgcgctattgccagaaggtcgtcgagatctccatttccaccagcgagggcgactacgacttcagcttcgacagctaa

SEQ ID NO: 361018 - DNA, 786 bp, Pseudomonas aeruginosa
atggctagagaatctgaatcattcgcagtatggatgtcaaaaaaacttctaacgaattccgatatcgcctgggcacaaaactacctgcatggaaaaggggaaatatatctccgtgggcctgtagatttagatcgacttcttaaagcaggagtacaactagagagaaccgactcaggaagaaattcccttagtcagttaaaggcagcctataggacaaggaaaagcaggagtgcggaggaaagatcaagtacaggagacatcagccccgcagagcaaaacctctcttctcaaaacagaaactataaggctctaataaacttatccgccgaagtattaaaatacgaagaagcgtttaaagcaaaactaaaacactcagagaaccagataaaagaattaaaagagaggatatctaaatctaaaaaaatcacacaaaaagccctcaataaatcaaaaaaagcagcaaaaacactgaataactttcggaaaagccccctaaaaaactcagaaatagaaaaaatcatacaggacaatgaagagatcaaagaactacttatagacacattaaacattctagacccactcccccctcaaaagcgcaccataagagaatcagacatcaacagatataaaaaacggccaacaaccaaaacaacagaaacaacagaaacaacagaaacaacagaaacaacagaaacaacagaaattcaaaatacccctcaaaagaaaacgccaacaacaattttcgaactaacagagaagataaacaaattatttacagaaaactaa

SEQ ID NO: 361019 - DNA, 720 bp, Pseudomonas aeruginosa
atgactgtagaacaccaccggcaggcgagcggaatcgtcgcgcagcggggcgtccggataggaattggtgcgcaggtgcttgaggtaggcgagcaacggcggaaagccgagtatttcaccgaagcctcgcgcggtgctgcgcgcctcgcctggatcgaaatagtgacgcggcgcggcgccggcgatcgggcgtgccgggtaccaggcgcgtaccagcaggcgccgcggttgtccggccggggcgccgagcaggccgggtcggctggggtcgtccagttcgaaatcgcgcacgccgaccgcataggggccgctcggcgccggcagcggcgcgaccgggaacaggtacagcgcggcgattgccagcagcaccagcaggccgtacagcgaaccggtccggaacggcaggccgcgcacgggcttccggcgcaggcaggcgccgagcagcagggagaaaccggcgaaggcgccgacggaggcttgccagcggtcgtcccatgcagcgtacaggccggcgccgagcgccagcgtcgaggcgagcgccagcaggccacggcggccgggcagggcgggtatccaccaggcgagcagggccgccagcagggtcgcgaccagcagcaggtcgacagcggtcatggtgcttcgctcctcgtttccacggggcgcgtcggttggctcggccagaacgccgccagcgccagcagcagaccgaccagcgcgtag

SEQ ID NO: 361020 - DNA, 249 bp, Pseudomonas aeruginosa
atgggcgcgctcatgagaacggtcagcttccagggcgcgaccctctcggtcagcgaacgccgctcgcttgagcttcgcaagcgtgccatggcggcggtaagtcaaaccgtcctgcaacagcaggttgcggccactctccaggccctggagcagcacaaagagcagggcggtaagcccgaaaaggtctggtccacgatctccaacgaaaagggcacgccgttcctgggcgacgtgttcgggtggccgtga

SEQ ID NO: 361021 - DNA, 261 bp, Pseudomonas aeruginosa
atgcttgtcaaactccccgatgaatcccccgacttcgtagagaaactcaaggaacagaccggtgcgaccacggctgccggtgcctatcggttcgccgctgagcggtatggggcgctgacctatcagctcaagcaagccatggacgaactggcgaggttgcagacccggtgcaacgtccagcagcagatcatcgacaatgcccgcgcctctgcatcttcgctgcttgaccacgtcgctcagggcgatcttctccagggctga

SEQ ID NO: 361022 - DNA, 309 bp, Pseudomonas aeruginosa; identical to SEQ ID NO: 342596

SEQ ID NO: 361023 - DNA, 255 bp, Pseudomonas aeruginosa; identical to SEQ ID NO: 327978

SEQ ID NO: 361024 - DNA, 762 bp, Pseudomonas aeruginosa
gtggctcccgttgttgtagtacttacgccggaacagcgtggccgactcgttcagcagggcactctgcagggcgcagaaccactccggcactccgtagatttcctgattgatgtcggcctcgcgcagctggatcacgctgcccttctcgaattcgtgctcatccttccagctgcgcacctggtagaacgtctccagatcggtgccgcggcgcatgtacttggccagcggcgcctgcagcggcatccgcgtacccaggcgcgaacgaggctgctcgaggtaggccgagccgaatgtcagccagtccagggagaactgctcgaacgtcgcccggctgagcaggcggtgcgggatgaaggtcttggccagcatgttgcgtttgaacttcaggcccgactgcaggtaaacgctcgaccccaccgctttggccaacccctccatggacagcggcggctcgtaccaccgcccgttcgaccagcactcgagatagtcgaggatgccccggccgtcgagcacaggcatcggatcaccgaaggtgaacgcctcggcacggccgacctggcgcgggatgaactcgccttcctgggcggactggactgtaaccggctgctggcggcggtggctgcgacgtttgctcatcagaaaatctccatgcgcccggtattcgcgggggtctgcccctcgagcggctcgttctgcaatgcgtggaatagcgcccaggccagatcggcgtggccggtgttgtcgttgcggccggcggtgtag

SEQ ID NO: 361025 - DNA, 384 bp, Pseudomonas aeruginosa
atgaccatcaccatcagcactgatacctggcaaggccgtctcggcatgggtctcgctccgcgcgaactggaggccaccctgcatgcggcgagcgacctgaccgcaaaggagatcgcgaagctgatgggcatcgcgcctggaaccgtatccaagcggttggatgatgcgcggttcaagctcggcgccaagactatccgcggcctggtgctggaggcgtacaagcgccagattatcagccccctgtgcgttggcatcctcgccctcctggcggcagcacaacccctcctcgatgaagacccggccatgcgggcgcgccgtggcggcgaaaggaagatcgaaactcgtctgactgctcgccgcgatggcgtggcctgggtggcgtga

SEQ ID NO: 361026 - DNA, 804 bp, Pseudomonas aeruginosa
atgaaaaccatagccgcatatttagttctagtattttttgcaggcactgcactttcagagtctatttctgaaaatttagcttggaataaagaattttccagtgaatcagtgcatggtgtttttgtactttgtaaaagcagtagtaattcctgtacaacaaataatgcaacacgtgcatctacggcctatattccagcatcaacattcaaaattcccaatgctctcataggccttgaaaccggcgccataaaagatgcgcggcaggttttcaaatgggacggcaagcccagagccatgaagcaatgggaaaaagacttaacgctaaggggcgctatacaagtttctgctgttccggtatttcaacaaattgccagagacattggcaaaaaaagaatgcaaaaataccttaaccttttttcatatggcaacgccaatataggcggaggcattgacaaattttggctagaaggtcagcttagaatctcagcagtcaatcaagttaaatttttagagtcgctttacctaaataatttgccagcatctaaagcaaaccaacttatagtaaaagaggcaatagttacagaagcaactccagaatatatagtgcattcaaaaaccgggtattccggtgtgggcacagaatcaaatcctggtgtcgcttggtgggttggttgggtagaaaaaggaactgaggtttacttttttgcatttaacatggacatagacaatgagagtaagttgccgtcaagaaaatccattccaacgaaaatcatggcaagtgaaggtatcatcattggtggctaa

SEQ ID NO: 361027 - DNA, 213 bp, Pseudomonas aeruginosa
atgcccgacgaagcccgcgcgaagctctatctcgccgccggccatgccactctggaaggcctttctgtagagagccccggccaacccgggcaggtgcaagccggcatcgatctactcaagcgcgcgatccaactgcacgacaagtgcggcgggaagaaggatttggaggccgccgaacggctccagaagaaactgaccgcctctggcggttga

SEQ ID NO: 361028 - DNA, 207 bp, Pseudomonas aeruginosa
atgtaccaggggttgctcgacctgatctcacgctacggcggtgaggtggcgtccaaggccttagaggacgagtcgaccctctgcgagctgctggagcagatgctgcctgatgatgaggtagagcaagccaggaaacaggtgctcgaacttcatgccaagggccgccgatcgggccgcctgcaggcgccggcaagcctgaaggtgtaa

SEQ ID NO: 361029 - DNA, 402 bp, Pseudomonas aeruginosa
atgaccgacgccgcacagaacgaggaagacatcgacgcgctgcgcacggcgctgaagaccgcgaaggggccgggcaatttccgcaacctgttcgtctacgcgccgaacgggaagaaggaggggatccaattgattccggtcagcgaggttgcggccaaggacgagttcggctcaatcaagaacatcagccgcgacgaccagctcgccggtctgcgggtctatccgcagctgatgggggtggtgccgcagaacgctggtgggttcggatccatcagcgacgcggcagcggtctgggccagcctggaactggagccaatgcaggcgcgcctgcagcaggtcaatgagctgatcggggaggaggtcgtgaggttctcgaagttcgaggcgccaggcggccagtag

SEQ ID NO: 361030 - DNA, 864 bp, Pseudomonas aeruginosa
atgcaaaccgctcaaataattccgttccagttcgaagctcgcgaagttcgtaccatgctgatcgatgaccagccttggttctgcgtcgctgacatctgccgcgtgctcggctatgcaaacagccgcgacgccctggccaagcattgccgggaaaagggtgtagcgaaacgcgacacccttaccaccaaaggcaagcaggccctgaccttcatcgacgagggcaacctctaccgcctgatcatcaaaagccggaaggaagaggctcagcgcttcgaggcctgggtgtgcgacgaggttctgccctctattcgccgcagcggtcgctatgaggactccagcaacaagatggcaaccctagttggagaaaccatcggaaccgatggcttccacatgctcggcgcgctgatcaagggcaaggtggccgccctcccggtcgaagtccgccgccgcgccagcatgaaaatctggtcacagacccatgccgcattcggggttcgatctgccgcagacattcccgccaatcaattggatgcggcacgaaacttcgtcgccgcctacagcgttcacgaaggcgaatggcttccgaagccggagaagcagcgcggcaccctgctcaacgaccaccagctatacgacgtgtacttcgtctgccaccacttccaatacctattcgaaatcttcaagcgccacagcctctacaacttcctcgggcggcacggctcccgcgcaggggtagagatgatcgaccacttcaaggatggctacatgggcgtctggcagctcaggaaggatttcgacgccgagttcgaagctgtgcagcgtcggctcaggctcaaccggtattctgagcacagcatccgctag

SEQ ID NO: 361031 - DNA, 444 bp, Pseudomonas aeruginosa
atgactgcggcaacttgcggatgggtcacaatgagcatgcgggagctggatcgcctcaaggtcatcgaggcaatcatcgagggtcggttgaaacctgccgctgcggcgcagcgtctgcgcctgacgacacgtcaggtgcaccggctggttctgcgttatcgcgaggacggcccagccggcctaacatctcgtcgacgtggtcagccgagtaaccggcagctgtcgccaggtctggagaatcgcgccattagcttgattcgacggaactatagcgactttggtccaactctggcccaggaaaaactggtcgagtgccacggccttaagctggccaaagaaacggtacgacggatcatggttgatgccggcatgtgggtaccgcgcaagcaacggccgcccaaggtctatcagccacgcaaccggccgcctgttgcggcgaactga

SEQ ID NO: 361032 - DNA, 243 bp, Pseudomonas aeruginosa
atgaaggtaaaagatctgatcgatcaactctcgaagctggatccagaactgctcttggtaggctattcggaggatgaagaggtgcgcgaagtcggccagctcgttcggcttttcgatatacgggccgtcaccgccgaacagtgcaaccgcagtcgcgatgagagcgggaaagcgaggatcgagcttaccgggagcgacgcaggccacccggttgccctgctggaactgacgacagacatttga

SEQ ID NO: 361033 - DNA, 273 bp, Pseudomonas aeruginosa; identical to SEQ ID NO: 357064

SEQ ID NO: 361034 - DNA, 891 bp, Pseudomonas aeruginosa
atggacgtcctctcacttatttcgaccaagggcggcgcaggcaagaccaccgtcgccgccaacctgggcggtgtgctcgccgatgccggccttcgcgttctactgctcgatctggacagccaaccaacgctgtccagttacttcgccttgggcgagtcccgggagggcggcagctacgagctcattgcccaacggctcacggcgcatgagcaggtcatctccaccaccgtcattcagcacctcgatttgatcgtctccaacgaccgcgccggacatatcagcaccctgctgcttcacgcggccgatggccgactacgactgcgtaacctgctgcctgccttcgaggatcattacgatgtgctgatcatcgacacccagggcgcacgcagcgtggtggtggagatggtcatcctcgcctccgcttgcgctctgtgcccggtcccaccggaaatgcttgccgcgcgcgagctgcgtcgcggtacgcttggcctgttcgaagaactggagccctaccgctacttaggcgttgccttgccgtcggtgaagctgctgctcaaccaggtaaacgccaatcgccgcgatacccgcttgatcatccggagcctgcaagcctcttttcaggatgacccgcatgtcagcgtctgtagcatggtgattcccgaccgcgtggcttatccgaatgccgcctcgctcggcttgcctgtgcaccgggtagaaccagttccaccgcccggcagccgcagcccttgtgccgccgagatcatgcgcggcttggccattgagctgttcccacaatgggccgagcagctcggtactcacgccgcgcctgtagctggccgcccggccactgccgagcgccaggctgatccatcgcggctgaccggagaatga

SEQ ID NO: 361035 - DNA, 1500 bp, Pseudomonas aeruginosa
atgaagccgccaacctccgaagacatcacgcgccaactgcagcagtcgcactttccgcagaaacacggacgcgacctcacagcagtccccgttggcgatacaccgatggtagtcagtctcgagcaactgcggccctacgagctcaacccgcgggtggtgcgcaacccgctgtatgaggacatcaaggcctcgatccgcgagcgtggcctggatcagccaccctccatcacccgccgccccgatgaaccgcacttcatcatccgcaacggcggtaacactcgcctgagcatcctcggcgagctgtggcaggaaacgcgcgaagagcgattcttccgtatccattgcctgttccgcccttggcaatcggaagcgcatgccttgctcggtcatctggccgagagtgacctgcacggccagttgacgtttatcgagcgggcgctggccgtggcgaagctccaggacatgtttcagcccagcgacgcccacctcacccagcgcgaactcgcgacgcgcttgagtgagggtggctaccccatctcgcagtcacacatcagccgcatgttcgacgcactcgagcacctgctacccgtcatcccgcaggtgttgtacgcgggcctgggcaaaaacgccatcgggcgccttatcagcttgcgacggcgggctgaggctatctggaaccggtacttcggcagccccgagcagttcccgctgctgtggtttgaagtgctgtcagcgttcgacggtgaaaagcccgagctggattccagtgagctgcaggacgaattgattgccaagatggcagcgagcctggaacagacacctcgcctgttggctctggagctccaccaggggcaacgtccgccgctttcagccctgtctgaggattcccctgcggcctcgccaacacctgtccatgcgccgggaagaaagaccacggcgcccaagccagagcctgcagagcccctccagccactgcaggcaccacgcttacccgatatacgccaagcactgcgtgaagaaccgttgcctgaaaagcaccaggaagagctcgaggatactccgagcccgatcggctcagcaccgtcatgctccgggtcgctggacgatatcagcgacttgcgcgcgagctgcgccgccctagccgcagaccttgccgcttacgcagacgccagcgacatggtcagcccgatcgtggacggcctgggcttcacgctttcaccggggcatggcgagcgactcagctcgcggcgcaccggtatccagctgctgctctcggccctgctgcgcctgcaggacgacgtggcttggaaggaacgtcagcagttgccggcagcgctgtttggtcagctgctgatcggcgtctacgacctgcccttcaccgaccgcccagccctgacggtgggccttgaacggcttcctgatgaccagctggagcagctgttcacgctgatccgccacgcccggcagttgatcgaactgacgctgtcgtccactcgataa

SEQ ID NO: 361036 - DNA, 1218 bp, Pseudomonas aeruginosa
atgctgagcttttacgaggtcgactggcaggacgtggtgcgtcagtgctacgacgcccttcggcgccgaaatgagtggtacgcagcgaacggcaaactggttgtccccaccgaggagcccgcggtgcggacgatctactacggcgacaacaacccgctgccgcagaccttgctgctggatcgccggctgacgccactggagcgcaacacctggcaggtactgcgctggctgatcaccgaaggtaaggtcaagacgccacgctaccgggacctgcagccctacctggcgaccagtccctgcggtacccaggcctcgcgggaaaccatcgcccgggcgctcaatgtcctgcgcaccacccgctggctcagtttggtggagcgctcacgcgatgccaacggctgcctgcgtggttgcgtctatgtgctgcacggtgatccgttgaccgcgaccgagcaactggagctggacagcggctatgcggcgctgctgcgacagaacctctctcatgccaccaaaggggtccgggacgtggcgaagcatgtgatcgcggaaatccaagcggacccgcaggtagctcagatagacaaagacagcctcggctcgctgccgctagtccaacagcaaacactgccgctgatgaacgatgaaacaaagacagaggatcccgaacctggcgcactcgacctcgttcgggattctccggctggcgcaacagattccgaaccctgcggcaatgcagcggatttggctgtggttcggaatgccgacgctggccgtacagtacagaaagaccaaagcaaaaaaagtacggtactggggcaggtggagttcggtcgagcgcgatggcccgaagatttaccactgaacccgaacgagcggcgcatggcctcccaggcaatgcgtcagctcgagccggaacagcaacaagcggtgatcaatgaagcggcggtgcgctgtgcccgcggtgagatccgaaaacccgtcgcgtacttgatgggtttgatcaagcgcgcctgccagggcgagttcaccctgtgggccgcgcgtaccgaggatgaaaaatctacaacccctccctcacgcacagccaagcctgcgtcggaaagtccgccccgcgagcgatccaagcgcagcggtcagcgcaccgcgtcgccacttgccctctcctgcctggaggaactgaaacaacgctgccgagggatcactgcggctacatag

SEQ ID NO: 361037 - DNA, 756 bp, Pseudomonas aeruginosa
atggtcgatcactaccaactcaacctgggctccctgcgcagcagcatcaccctgaccctgcacacccaccatgcggcacgcctgtggcaggggcgcagcggtcgcgacggggtacatccgattctcggaatgcccggttacatcagtgtcaccaacctgctcaagcaggcctgcagccaaggcgatccgtacgcggactggttcatgctgcagctggaggaaaagctgctgcaggccaggttagacatggccgcgctgacgcagcaaatgagccgagtggaacgagccctgcccacgcaggtcgatgtcggtgacaacctcaatatccaccccgtcaccctgccgctgttcatcggcagccagctgggctttctcgcgatctacctgctcaccgactacgacaccctggtccggcgggtgctgcttgcccaccacacggcgctgatcggccggggcgacatggagtcctggatcgatggcggcgcccatctgctgcgcagcctgttcggcctggcgcagcgctaccgcctggccggggtgagccgcgacgacatggccgccaacaacgcccgcgcccgcgaagccatcgacaagttcggcaccctgccgcaggacattctcgaagggacacgccgctcccagttcgccccgccaatcgcccgcagcaaagcgccgtccgagatcgaaggccctaatccggccgaaggtgaggaacagcccacagccgacaccccgaacgacgggggtgaggcatga

SEQ ID NO: 361038 - DNA, 495 bp, Pseudomonas aeruginosa
atgaccctggctgaagccatcgcccggcgtttgtcagccgatgcctatcgcgagttcgcacaaggtgcctccctaaaaggccttttaaagccttttaagggtaagggggagctgcagcagttcgccgagacgatcctgcatctgcgcacccaagtcgccgagttgatggcggtgatgctggcgatcatggcccagccacccttctcgttgctggacctgcgactagtcgtccagcacagcgcgacgggcaccgatttcctgcgctggcgcagcccggattttctgcgcatgggcgtgcaggtgtggcaggaggcggtggttcagccgcgtctgcaccctgagctgcggcaggcgctgtatcagctggagagcaatcgcgtggtgctgaacctgcagatgagcagcctgcagtcgctgtatcgccaggccatcactggtgccagcaagctcgaggccgccgagctcgtcctaacccgttcccccaccgaggagtaa

SEQ ID NO: 361039 - DNA, 228 bp, Pseudomonas aeruginosa
ttgcacggaacccaccagagtgaggcagatgcattagcgatcaaggcctatgagctgttcatggccacccatctggaaccggacaaggagcaggctcgggcccggctagtcgcctgggttcaggagagtccactgcactggcgggcattccttgccctagaccagtacttggcggaagtgaagcaaatgctggaacatgagcggcgcaagagcttccggcgagagtga

SEQ ID NO: 361040 - DNA, 345 bp, Pseudomonas aeruginosa
ttgcccgtgaaagagcctagcccacatcacattggtcgccagttggcggcttaccgccgtgcctgccgcctcactcaggcgaaggtgggtgagtacctgaagatttccggggaagccgtatcgcgcctcgaacgaggcgaggttgagctttccgtaagcaagttgctgaaattggccgacctgtatggctgccctgccgatgagttgctgctggctatcagcccccgcccccaggatcagggccagcagatcacgtcgatcatcaaggagctgggtgaagcggataagcagttcgccctggagtttctgcaaacgctggcgaaccacctcgcacaacgcaagtaa

SEQ ID NO: 361041 - DNA, 1968 bp, Pseudomonas aeruginosa
atgcgcctgttcatctgcgagaaaccttcccaagcccgcgacatcgcccgggtgctgcaggccagccgccgcggtgatggttgcctgacgggtcagaacctcaccgtcacctggtgcgtcggtcatctgctggagaccgcgcctcctgaaacctatggcgattacaaacgctggtcgctggacgacctgccgatcattcccagccgctggcaactggtggccaaacccaaggtcgctggccagctgaaggtgatcagccagctgctgcgcacttgcagcgaagtggtgatcgccaccgacgccgaccgcgaaggcgagatgatcgcccgggagattctcgaacgatgccagtatcaggggccgattctgcgcctgtggctgtccgcgttggatgaaacatcgatccgtcgagccttgagcgcattgcgcccgggggagcagaccttgccgctgtaccactgtgcactcgcccgctcccgtgccgattggctggtcggcatcaacttgagccggctgttcacgctgctcggccgccgcgctggcttcgatggcctgctgccggtgggacgtgtgcaaacccccaccttgcgcctggtggtcgagcgcgaccgggcgatcgccagctttgtgccgctaccattctggaccgtcgatgcgcacctggaacaggacgggatccgttttcacgcgcgctggcaggccccgaacgcggtcagcgatgcggttggacgctgtatcgacgaaaccgccgcgcagcaggcgctcaggcgcctcactcaagctggcagcgcacagatcgacagcgtcgaggtcgagcgggtgcgggaaggtccgccactgccgttcgacctgggcacgctgcaggagatctgctcggccaagctcggactcggagcacaggagaccctggccactgcccaggccctgtacgagacccacaaggtgacgacctacccgagaagcgactgcggctacttgccggagagcatgctcgatgaggtgccgcgcgtccttcacgccttggccgccgccgcaccatcgctgggggaaatcctcaaggaggtcgaccccagccgccgctcccgtgcctggaacagcagcaagatcaccgcgcaccacggcatcattcccaccgccgtcacgctggatttggcgcagctctccgagcgcgagcgtgcggtttacacgctgattcgcgcacgctacctcgcgcagttcatgcccgagcacgagtacctgaaaacccaggcgcagttgcacagccaggcagatcacctggtggcgcgcggcaaacagatcctggcccgcggctggaaggcagtgatcaacgaggccgacggtaacgagccggccgaacaggcgcagcgattacccacgttgcgtgaatccgcgacggtggcgctgatcgacgccaccctcaacgcacagcgcacacaaccgcccaaggcctacaccgaaggcaccctggtcagagcgatgaaaaccatcgccaaccaggtggctgattcgcggctcaagcagaagctcaaggacagctgcgggctcggtaccgaggccacccgcgcggccatcatccagggcctgatcgatcacggttacctgaccaagaagaaacgcagcctggctgcctccgcggcggcgcataccttgatcgaagcggtgccaccagaggtggccgacccggtcatgaccgcactgtgggagcaggcgctggaccgtatcgagtcgggccaactgagcgtcgagacctttctcgccaagcagacagaatggctgactcgactggtgcgcagtaacgcgacgctcaccctgcgcccgccccccagcaaggggcccttctgcccggtctgccgcagcgccatgcgccaacgcaaaggtcgcaccggcagcttctggtcgtgtatccgctaccccgaatgcaagggcaccaaaccggtggcaaaaaccaagcgggcgaaaaacacatga

SEQ ID NO: 361042 - DNA, 531 bp, Pseudomonas aeruginosa
atgactactgcaagcaataacgcccccaccacctacttcaacctgcacacccaaggcatcggttacctgaaccgagttcgcgaagtcccggttcgccgcggccaagcgttcatggcctgtgacatcgctgccttgcacggtgcctcggacgacgtcgagtacacccgcttcgactgcaaggtcgccagcggtgaagccgaccggctgatccgtgaacacctggaagacgtccgcgcggaacgcaaggtcctcatcgcgtttcgcatcggcgacctctgggtcgatccgttcatgtacgagaaaggcgaacgcaaggggcaacccggcgccagcctcaaaggccgactgatcttcatcgagtggatcaaagtcgatggccaattcagctaccgtgcgccagctcgcaccgacaccgccgcccctgaggctgctgaatcagcagagtcggaaccggctgacggtgacgctgaccaaggccagccaaccccacccgctgcacgtaaatccaccgccgcacgtcaatctgcctaa

SEQ ID NO: 361043 - DNA, 258 bp, Pseudomonas aeruginosa
atggaaagcttctggctctgcgaggactgcctgcaggcggtcgcctacgacgatttcagtgcgctgtcgctgtactacagcgaggctgaaatcgaacaccgcattgctcacatgcgcgcacaactgcaggccctgctaccgctgagcgccgatttcgatccgcataccggcgccggtatcgaaaccttctccatgcaaccgtgcgtgggctgccaaagcccgctgcatggcacgcgacatcgcttcacgcgcctttga

SEQ ID NO: 361044 - DNA, 495 bp, Pseudomonas aeruginosa
atgaacactgccttgaacctggtcgatccgctcgatcccgtactggcccaacgcgcccgtgaggacgcgctgatcaccggggccctgcagctgctggaccagcgtcacttccagcgcggcgaggtgctgataacccccgccgatgctgcggcctacttgaaactgcaactcgccccctaccaccacgaggtgtttgccctgctctgcctggactcgcgccaccgtgtgctgagcttcgacatcctcttcaccggcagcattgatggtgcctccgtgtatccccgccaggtggtcatcaaggccctcgaacgcaatgccgccgccgtgatcttcagccacaaccacccctccggttgctctgaaccgagcggcgccgatcgggtactcaccacccgcctgaccgaggctttggccctggtcgaggtgcgtgtcctggaccacatcatcgtcggcgaaggaaccccgctttcgttggccgagtacggctggatgtga

SEQ ID NO: 361045 - DNA, 717 bp, Pseudomonas aeruginosa
atgcacccttccctgcccaatccgtttcttcgcggtttccaagacctgcgctatgagcgcgtcctgcagatcagctatgccgacgattgcctaccgtgctaccgcacgctgcacccggctcagaaccagctgcccgatgaagccatcaacctgcagccgtgcctgttcgatgacgacgtcgcggtgatcaccgatggtgtgtgcgtacccgagtttctgcgcatgcactgcccggccgatggcctggtgaacacggtgctctaccagatcctgggcaatcagctcggacgctcgatgcatatcggcgacctcggcaacgtcgaggctgcgcgtaacctgatcgagcaactgtcctttgccaccggacactacagccgcagttgggagatcagcagcgcgcacctccccgcagacgagttcgagttcctgcaggtgtgcacctggtgcaattcgccagcgggctttttcgagtgcttcgagctcaacagcaaccatgccatggggtgcaagctgtactcgacaccgtgggtagcgacacatgaagccagcaggatcggctggagcgccagcgaagtctgtgcgcgcatgcgcgatgaccatgtcccgccggtgctgctccagctgctgatgctggcaggccaggcagacacccgcctgctgatctttgaccctgacgccgcaccactggcggagctaccgctattcactgaagactga

SEQ ID NO: 361046 - DNA, 516 bp, Pseudomonas aeruginosa
atgcacacacccacactctccaccttcggactgatgatcgccctggcgggctgcagcacgccgccaccgcctccggccccggctcccgtagcaccacccgcattaccggcggtattgccaaagccgaaaggccagctgccgggttgggtgcgccaggaccgttacaccctggtcaccacccggccaacgctggagcagcgccagccgctgtatcaattggtcaacgtacaaattacgccagccctgcatgccaccgtcggtgaagccctgcaccacgtgctgcaacgctcaggctacgcgctgtgtgccgatagcgctgcggtggatcgcttgttccgtcgccctctgcccgcggtacagcaccggctcggaccgatctcgctgctggacgccctgaccatcatcggcggcccggcctggcgactcgacatcgaaccggtcgaacggaccgtgtgctatgtcctgcgcgtgccttcgcccgcgccccccttttcgaccctggagcttacgccatga

SEQ ID NO: 361047 - DNA, 672 bp, Pseudomonas aeruginosa
atgaaggtccttcattttcaggccctggtggtcggtgccctgtgcctgagcgccgccgtgctcgccgccgaaacctacaaccatcatcagcaattggccgagcttcaggctgccgcccgcaatgccccggccgatccagcaccagccttacgccgcgatatcgatgcgttggccgataagctcacgacgctacaaccgcaggtcgtggcgctgggcgagtcgcaaggtcgacacaccacggcgcaggtcgccctcggccagcagcaggatgagctggccgcctcgctcaagacgctccaggcagcaccgccaggtccaagccgcaccgatctgaaggcgctggaacatcggctggccacggcagaggcgacgttagagaaattgtcggcacgccttgctgtgcctacggccgacaccacgcagccaaaggcctcaaccagtgaaaaagccaaggccaagcctctagccccgcccttcaccctgctgggtatcgagacccgaggtgaagtcaggttcgtgtccgccctgcctgctggtgcgcactcgctgaaaactgtgcacttgctacagcccggcgacagtttgaacagctggcagctacgcgcgatccgcgcggatcaggtggtgttccatgtcccggggcatggcgaccacacactgccactgccgtga

SEQ ID NO: 361048 - DNA, 720 bp, Pseudomonas aeruginosa
atgactcggctctccattctctcgctcatcctgctccccggctgcctgtttgcaggactggcgtggagcgcgcccaagctggtcgactcggccccgcagttcagcgaacagacgccgctagatcggcaggcatccgctgcggctcgggccaaggcctgggggctgaccgaggatgagtgggccaagttcgagcgcctgcaggctgggccccgcctctattggtcgccgcagctcgacccactcaccaccctcggtgtggaggccgactcggaccaggaacggcaacgctacgccgagctgcaggtccgtctcgaggccaagcgcgccgagcgcgagttggcctaccagaaggcctacaccgccgcctgggcacgcctgttccctgggatgctgcccgtacagggtatggccgacgattctgcggctaccgctgccggccgctttgccctgtttgtggaagaacgctgcccgccctgcgtctccaacacccagcagtggctgcatggcggcgcgcgcctcgatgtgtacctggtcggcagccagggtgacgatgggcgtctacgccagtgggcacgcgatgccggtattacccccgcccaggtcagcagtggccagatcaccctcaaccatgaccgcggccgctggttcgccctgggcgccagccgccccttgccagcgcgcttccagcaggtggacggcaaatggcagcgtatcgactga

SEQ ID NO: 361049 - DNA, 555 bp, Pseudomonas aeruginosa
atggcagcgtatcgactgatcctggcgctggccttgaccggcactacggccgttcatgcgggctcgctgccgccgccggcgtatcaactggccgccgagcgcgctggcatcccagcgtcagtgctgttcgccatcgccctgcaggagagcggtacgccgctgcggggtcacctcatgccctggccttggaccttgaatgtcgccggcacaccgctgcgcttcgcccgccgtgatgaggcgtgtgctgcactcaagcaggcgctgatccgccacgaccccaagcgcatcgatgtcgggctggggcagaccaacctcggctaccacctggaccgctatcacagtgcctgcgaggccctcgatccacgcgccaacctggctgtgactgccgagctgctgcgcgcccactatgccgacagcggtgactgggtcgtggcggcaggccgctatcaccgtcctgccggcggtaaacccgcagcgcagtaccgccgacagttcagccagcactggcagcgggttcaggcagttgtgggatctccgagagggccacggccatga

SEQ ID NO: 361050 - DNA, 420 bp, Pseudomonas aeruginosa
atgaaccgtcggcgctgggtaacgctgtgtatttgtctctggtggacggttggcgcgctcggtgcccccagccagctacccgatccccgcgcgctgacatgggccctgcccgtacacagcacacgcctgtcacccggtgccgtgtcgccaaggacattgaagctgccagggttcacgccgctgttcctggtcgggcacgacgccgcctctctggaatggttggccaagcatgcgcagaccctgcaggacctgggcgccagcggcctggcggttgaagtggccgacgccccagccttgcgccgcatccaggcggcagccccggggctggacatctggccggtgagtggtgacgacatcgccgaacgcctggagctggagcactacccggtgctgatcacgcccaccggcctggaacagtga

SEQ ID NO: 361051 - DNA, 669 bp, Pseudomonas aeruginosa
atgctcgagctgtgtctgcggctgctcggcctgctgttcgcttcgctgtttttttccatcgtgctggagctggtgggcatgctctggttctggcccgagcagggctggcatcacagccatgccatgtggctaagcgaattgggctggctcagcaatcacttcaagagttcgttgctcgtgcaagaaccggcgcaagcgaccgccaaggtcctcgaacagctgaaccactggttcgtggtgcgctctggttgggcgcaatccgatacccagctgaaactgctcagtcgagaaacgtcaatgcaggggcagttcgcgcaggtctacgttgtgatgcaggactacctgctggcggccctgtttacagtatttactttcgtagtgcgtctagccgttttgaccctggccaccccgctgttcttgcttgcggtgatcaccggcgctgtcgatgggcttatgcgtcgcgacctgcgcaagttcggggcagaccgcgaaagcagcttcgtctaccatcgcgcaaagagggcaattttcccgctgatggtgagcccatgggtgatctatctctctctgccttggacactcaatcctatatgtgtgttgctgccttgcgcagtcctacttggtttcacggtggcgatcaccactacgacgttcaaaaaatatctctga

SEQ ID NO: 361052 - DNA, 543 bp, Pseudomonas aeruginosa; identical to SEQ ID NO: 351601

SEQ ID NO: 361053 - DNA, 336 bp, Pseudomonas aeruginosa
atgaaaacgacctctacctccctgctgcttttctgtctggtgtcgctcggtgtcgccgctcaagacgtgagcgagcgcttggcgctggaccttgtgcaacgccagctcacggccatcggacgattagctgaccgcgaaagtagcagctcagtaggtgctgctggggcccgctatcgcttcgactatccgaggttcgcttcggaccttgagcgcatgcgtcaaggcatccacagatacctgtcgccctcccgcgcgcagccagcggatctggtcgagctgaccggtgattaccgtgccgaagcgccccagtcgagcccctctcatgagcatgactga

SEQ ID NO: 361054 - DNA, 456 bp, Pseudomonas aeruginosa
atgaccgccatccgcaagctgcaagaagcgtatgacgctgtggtgccggacgactctggcgccatggcgatggacctgattcgccacatcgcaggcctctacagcggcaaggcgatcaagggtgacttcacccagatctacatcaccgggaacgaaatctggatggcgcagcaagtccttgcgcaacacgcccagctaacggctgagcgcaacgccctccagtcgatcatggaatggactgctgcagagaacattcctgcggatcacaagctgtgtctgatccgcaatgcagccatctctggtcttggcctggatagaccaggaattccagctaactgcccgcagtgtggcgggtcaggcgaggttgactctggcggaacttacccatggggagagcctgcactgatcccgtgtggctgccagagcgagacagagaacccgagggacaagtcatga

SEQ ID NO: 361055 - DNA, 315 bp, Pseudomonas aeruginosa
atgacttacacagtgagcatcgagcagtacgaactgaaagtgaagattacccacatggaagttgtcgagggtaactcaagctcctgggacagcgactgggactactacggctaccgcgagatggagtttgaggttgtttccggccttgtctacgacgaggacaacaacgtcgaggaccttggcgccaatggctgcgcggcacttgccgagaagtacgcagagttcatcgaggaagagctttggctcaaggtggatgacgagcgagatgacagtgacttcgaccgcggcgacgactacggatgggaggcagcatga

SEQ ID NO: 361056 - DNA, 207 bp, Pseudomonas aeruginosa
atgacacggtacgagttcatcaagcgcgaaatagagctatgcgccacgtcacatttcccagctgatcaactagcgtacacccgcggcctgttggccatggctgaaatggactgcaccgtaacccctggcgaatccattcggctgatggccgacatcatggcccaggacaaggcgcacaccgacaagattctagggagggcgacatga

SEQ ID NO: 361057 - DNA, 678 bp, Pseudomonas aeruginosa
atgacccagcctcactggagcactctgctcccgctacccattggtagccatgccgaccatcacgcgcacctgacgcttcacattgcaggtgatccggcacgcgaagccttgcagcatttcatccaccagtgctttgccaccgtgcatcaggcagatgtgcagcattacttgccagaactgctggcattgcatgacagtcgtggccgactgattgctgccgccggcatgcgaccggcgagcgacggtcctctgttcctcgagcgatacctggatgcgcctgtagaggcgaccatctcgcaggtcgccggcgtttccctggaccgggcatgcatggtcgaggtgggcaacctggcgtcatccagcgccggcagcgcgcggatcatgatcattgccgtgacgtggttgttggccatgcgtggtctggagtgggtcgcattcacgggtgcggcgacgctgatcaacagcttccagcggctggggctgatgcccacggtattggcggcggccgacccggaacgtctagagggccaggtggatcagtggggtagctactacgatcaacgcccccaggtattcgccggcaacatcggctttggcttcgatgccctgacccgcgcgggtgtgtttcagcgccttgggtttccctgtctagcccaggaggccggtcatgccgcatga

SEQ ID NO: 361058 - DNA, 1464 bp, Pseudomonas aeruginosa
atgccgcatgaaccgagcgcctttcgggccttgctgctccagcatgccgagcacaaagctgatgctgtagctgtgcagggccccgttcagcgttatacctaccggcaactcctcgacgaggttgagtcccgtatagcccgcttgcagagccagccaccgggcgcgttcgtggtggtactggataacggtcctgaagtgctgttctgggacctggcggcactgttcgccgagcgtccgtgcgtgatcgtaccgtcgttcttcagcgcggctcagtttcgacattgcctgaagcagagtggtgcgacgattgttttgtgcgaaccaccatggacggcccagctccttgagcaaggctttgcccagcagccagggggcttctggacgcgaccgcacggcgccattgcgatgccggcgggcacggcaaagattacctacacctctggcagcaccggggcaccaaagggcgtgtgcctgggagcagaggccatgttgcgggtggcgcgtgagttggaagctgccagccggccagccgagcctcagcgttatctggccgtactgcctctgggcgtcttgctggagaacctgggcgtgtacgccgcgcttatggcgggtgcctgcgtccagctctatccacagcaacaactgggcatgggcggggcaagccaggtggatttcaagcgcttgctgggggccattgcgctcagtggcgcgcagagcctgatcctcgtgccgcagttgctgatggggctggtcaccgccgtcgagcgcgggcttatgcgtgttggcccgctgcgcttcgtggcggtgggcggcgcgcgggtgtcacccagcctgctggcccgggccgagacggtgggcttgccggtgttcgagggttacgggttgtccgagtgcgcctcggtggtggcgctgaaccggccaggggccgtgcgcgttggcagcgtcggcaagccgttgccccatgtgcgggtgcgcatcgcgggggatggcgaggtgctggtggccggctcgaccttgttgggctatctggaggacacaccggtcagcgacaagtggtgggcaacgggtgacctcggtcacctcgacgaagagggttacctctacctcgacggtcgcaagaagcaccagttcatcaccagtttcgggcgtaacgtcaacccggaatgggtggagtccgaactcacccagggcggtgtgattgcccaggcgtttgtgcatggcgaaggcctgccgcgcaacctggcactgctctggccactggaccccacggccaccgacgaggccatcgagctggccgtacaacactgcaacgcgcaattgcccgattacgcccaggtacatacctggcgccgtcttcccgctcccttgagcgagcgcgacgaaaccctgactgccaacggccgcccgcgacgcgaggcgatcctgcagcgctatcacgccctgttatccgacatttcgctgtga

SEQ ID NO: 361059 - DNA, 681 bp, Pseudomonas aeruginosa
atgtcctttttcgacaccctgcaaatacaaactactcaggaacgtcaggcgctgttcgccgtgccggtcatccgggacgcgctggccggccaggtcagcctggacagctacatcgccttcctgacccaggcctatcaccatgtgcgccataccgtcccgctgatgatggcttgtggcgcgcggctgccttcgcgcctggagtggctgcgcggcgcggtatgcgaatacatcgaggaggagtacggccacgagcagtggatcctcaacgacatcaaggcctgcggcggcaattgggaggccgtgcgtgatggtcggccagcgcaatcgatcgagctgatggtcgcctacctctacgacttgatcgcccgcggcaacccggtcgggctgttcggcatggtcaatgtgctcgaaggcaccagcatcgccttggccacccaggctgcgggcaccatccaaggcacgcttgccctgcctgataccgccttcagctacctgagttcccatggtgcgctcgaccaggaccacatggtgacctacaagcagctgatggaccgcctcgacgatgacgctgaccagcaagccgtcatccacgcggccaaggtcgtctaccgcctgtacaccgagatgttccaaagcctgccacgcgccgggcagcacgaggtgcgccatgcgcttgcctga

SEQ ID NO: 361060 - DNA, 807 bp, Pseudomonas aeruginosa
atgcgcttgcctgaatccgtggtgattctcaccggtgccagtggtggcatcggcctggagctggccgaacaattgtgcgcagccggtgcccgggtgctggcggtcagccggcacatgggcaagctggcaggcctgatgaaccgctacccggaccggctgcgttggcagaccgccgacctgcgtaaccaggaggggcgcgagcaggtggtcgctcgggcccgcgaaatgggtggcgtcaatgtgctgatcaacgctgccggggtgaaccgcttcgccttgctcgaccaactggacgagcacgcgctcgacgagttgctggacatcaacctcaaggcccctctgcaattgacccgtgcctgcctgccgttgctgcgcgcccaacccaaggcgttggtggtcaatgtcggctccacctacggctcgatcggctaccccggctatgccacctactgcgccagcaagttcgcgttgcgcggcttctcggaagcgcttcgccgcgagctggccgataccacggtgaatgtgctctatgcagcgccccgggcaacgcgcacggcaatgaacagcagcgctgcaacagcgctcaaccaggctttgaaggtcggtatggacgacccggcggatgttgcccgtgcagtgctcgaggcggtgcagtccgagcgcagcgagctgtacctgggttggccggaaaagctcttcgtgcgcatcaacggcatgttgccgggtgtggtcgaccgagcactgcgcaaacaactgcctgtcatccgccgctacatcggtagccattccaaggaatcgatcaaatga

SEQ ID NO: 361061 - DNA, 642 bp, Pseudomonas aeruginosa
atgaagcgactgcttatcgccagcttgctggccttcgcccccttcacctgggcgctggaccaggcaggtacgcagcacctgagcgatctacaacagcgctgggcgcagatccagtaccagttacccaaggaccagcgtgccgacgcgttcgaaaaactggcaggtgacgcggcggcattcgttcatcaataccccggcacagcagagccactgatctgggagggcatcatcaacagcagctgggcgggagccactggcggccttggcgcactgagcaaggtcaaggcggcgaaggccagccttgagcaagccatgaaacttgaccccaatgccctgcagggctcggcctataccagcctgggcacactgtacgaccaagtacccggttggccgatcggtttcggcgatgcgcagatggccgacaagctgctgcgcaaggccttggagataaaccccggcggtatcgacagcaactatttctgggctgatcatctgtatcgacaaaaacactacccagaagcaactgcagccctgcagaaagccttgcaggctccgcctcggccggggcgtgaattggccgatcagggtcggcgtgccgatatcgatgctttactcaaggccatcaaggacaagcaggactga

SEQ ID NO: 361062 - DNA, 663 bp, Pseudomonas aeruginosa
atgcggctgttgctggttgaggatgacattgcactgggggaagggatctgcgacggcttgcgccaggagggctacaccctcgactggctgcgtgatggcgtcagcggcttgcatgcgttgcagcacgagaccttcgatctggtgattctggatctgggcttgccccgtatggatggcattgaactgctgcggcgggtacgcgccggtggtgacagcctgccggtgctgatactcaccgcacgggacgccctcgacgatcgtatcaccggcttggacgccggtgccgacgattatctggtcaagccgttcgacctcaacgagttgaaggcgcgcctcagggctttgctgcggcgcagcgccgggcgcgccaaggtgttgatcgaacatgccggggtcagcctcgacccggccacccagcaggttcactaccacggcgttgaagtggtgctgaccccgaaggaatacgtgctgttgcacgaactgctggcgcaacccggcaaggtattcacccgtgaacggctgacccagctgctgtatggctgggacgaggagcccgagagcaataccttggaggtgaacatctaccacctgcgcaagaagctgttcaacggcctgattcgcacggtgcgcggtattggttacctggtcgaggccaaagcatga

SEQ ID NO: 361063 - DNA, 1365 bp, Pseudomonas aeruginosa
atgagctcgctgcgccaacgcaccctgtggcgggtgatgctgttgttgctgatcggcaccggcttgcttgccttgtacaactaccaagacagccgccgcgaaattaacgaggtgtatgacgcccatctcgcccagaacgcccgcctgctgcagggtgtcatgagcatgccggtgcaggaaggtgcgcgtgaggcgctgtaccaggcgttcaacgatgccttgggcaaagctgggcgacaccaggtgggccacccctatgaaagcaagttggccttccaggtttggcaggacggcgctggcctgctggtgcacacccccagtgcaccgaccatcgagccgccaccgactacacctgggttctatgacttttccaatgctggtgagcagtggcgcggtttcgtgctgccggtacctgagcggcactgggtgatctgggtcggcgagcgcgacgatgtccgctacgacctgatcgaccgcatcgtccgccataccctgttcccgttcctgctcggtagcctggctttggcgctgttggtctgggccgccatcggctgggggctgcggcccttgcagaacatggctgatgtcatccgcgggcgccacgccgactcgctggaaccgttgcaacttgtgccgctaccctcggaactggagcccatgcaagcggccatcaatcgcttgctggcacagatcgaggacctgctgcggcgtgaacatcggttcatcgccgatgccgcccacgaaatgcgtacccccctggccgttctgcgtctgcatgcgcagaacgcgctggaggccggcaacgatgccgagcggcagaaagcgctgggttttctgatgggcggggtcgaccggctcacccgggttgtcaatcagttactcacgctcgcccgtgtggagccgcggctggggcagcgcgcgagcacacaggtcgacttggccgaggtggtcaccgataccttggctgacctgaccccatggatactggaccgtggcctggaaccttcactggatatcggtgaaggcgaccatcacctggcaatcgatgccggcgccctgggtatcgctttgcagaacctggtatccaatgcggtagagcattcaccgcctgccggacgtatcaccgtgtcactcaggcgccagggcaatcacttcgagctggtcgtcgaggatgaggggccaggtatcgatgaagcgagcctgtcgagggtgttcgagcgcttttacagccgtaacagtccgaatggtgcaggccttgggctctccatcgtagcgaccatcgtagagcggcttggcgggcaggtgcgcctggacaaccgggcaagcggcgggctagccgccactttgctttttccaacgggctga

SEQ ID NO: 361064 - DNA, 543 bp, Pseudomonas aeruginosa
atgaagcgcgattcaactactgaccgatatggtcgactgtccatcatcatgcactggagcatggtcatcttgttcatcggcatttatgcctgcatcgagttgcgtggcgcattgccgagagggagtgcactgaagagcccattgcttgggattcatgcgctgatggggatcgccgtattcgcattggtatgggtacgcctgatcggtcggcttagccctcgtcctcccattctgcccaagccacctgcctggcaggcggcgatggccagcgtcacccacctggccctgtatgggttgatgatcgtcacgccgctgttggcctggctgatgctgggcgctgagggtaaaccattgccgtactggggcatgattctgccttcgccgctgcctgtcgatccagctttggccaggacgctgaaggactggcatgaactcattggcaacgccggctacgccttgatcgggcttcatgcctgtgcagggcttgcgcaccattatttgatcaaggacaacaccctcaagcgcatgctgcctggactgtag

SEQ ID NO: 361065 - DNA, 546 bp, Pseudomonas aeruginosa
gtgacggctgctggcgtcggcctcaccccgctgatccaggagacctacgacaagaagctccagtcgctgcaggagctgctgtcgaagagcaaaccactgactgcagagaacctggctgcggccggcaccgatgctctgccaattacccgcggcgtcatcgaggcgctgcgcgacgagcgtgaccaggacgtcctggcgcgccgcctggcgtccgatgtctccctgatggacgtgctcagcaaggcactgctactgcagcgcctgatgttcgccggcgccaaggagcccaacgtcgccgccaacggcctggccacccaagccgtcgatcagcagaccagcctcctgcagcaggagatctccaatctcaagaccgaactggaactccgtcgcgagttggccagcaactcccccatgcgggtcatcgagcgcgggcaacaacgcgcctcagggtccagtggcgtgttcgagtcggcgcccgatgccgatcgcctcgatcgcctgcaggccccctctgccgccggcggtaagtcgggagggagaccgtga

SEQ ID NO: 361066 - DNA, 1059 bp, Pseudomonas aeruginosa
gtgtctacgaaaccaggggcgattcaaaacataaactacgaagaagtagaaattcacaacaagcttaggattagcgaaactcaaaaatttaacgaaaacctagccaatttgggacttccaaaataccaaacaagcaacactcttctcaatttttcttataattacttcaaagagtatgaatcacaactaggagtgagctcactgttcaagagaaaattcaacaatagcgagacaaaagtcttaatcttgattgccgcatttggcaaggctgacttcgcacaagtccatgcaataaatgaaaatttcgacataaataactttatatccaataacgacagattgcttgaggctgtttccaataaaggctccaccgcaactaatgtaatagtatgcaactccagctcttggttattgcaggaaatgcaaatctattttggaaaaccagcagtagctagaactttagcagacatcatatcgtcccttagcaaagagggattcaaagtaacagcaaagaacctaattagctttgacaaattaaatgaagtatcaggtgggaaaggcttccatcaatatattagagaaatgtataaactaatccaggccaacttccaagatgacaaccattattggattcaaagggcaaagtgcgagctaatttcagggagcacagtagaagacttcaaaaatggcatgctatgggtcagcaaaattagagttgaaaatagcacagcaaaaaaccaaacctattacagcgcaactcttgttaaagctcaattacacgctagagcatacaaagcaggagcagacaactccgacctcctcgcattcctagagaacatgcacgagtcagcccagaactatcaaaacaacaaaacccatatagatagattgctagacaacgccaagccagacacactacacgcggtaaaatcattagagtccgttagcgacgcccgattccttacacgacggacagaagttacggagctactggcactattccaaagtagcaaagaaaatagaaaaagagccagaagtgtgcaagccaaaaaaaggtga

SEQ ID NO: 361067 - DNA, 3300 bp, Pseudomonas aeruginosa
atgttgcagaagaagccctacaacggcctccacgaaaaggaactcaaccagatcaaccagcaggatggcagcccctgcgtagccatttccgcaccgggctgtttcatcaaggggtccaacctcttttccgaaaagcgggccggtaaccgggtccgcttcttcaccaccggccgggactacttcagcgacctggccagcgccctcgacagcgccagttcgagcatcttcatcaccggctggcaggtcaactacgacgtcctcctcgacggccgccgcagcctctggcagtgcctgcgccaggcgctggagcgctcgcccgcgctgaaggtctacgtgatgccctggctcagcccttccggcagcctcggcacctatgacttcgaaaccatgctcgcggtgttccagctcaacgccggactcgagggcggcgcgcgcgccttctgtacgccggcgatccagcagagcgacatgcagggactgggcgtcgccttctcccaccaccagaaatccgtggtgatcgacaaccgcatcggctatgtcggcgggatcgaccttgcctatggccgtcgcgacgacaacgatttcagcctcgacgcctccgggcgccggggcaacgacgcctataatcccggcctaccgcatcttggctggatggcggaggacgaacacgtcagctccatgggcctgatgatggccaccctgttcgacctttccaggccgctcgccagcctgacgctgcatgcgcccacccttcgcctgtcgcccttcccgcacatcgccgccagcgacgaaccgctgctgagcattcccctcgcacccagccgcgcccgcgccctcaacggcgccgcctacctttccgacctgttccgcagcccgatgctgccctccctgcaatggctcggccgcgcctacaacagctcgaaagaaggcctggacgaaggcttcgaacggctcgatgcgctcaggcggcagatggtcgccagcagcatccgcgccattgccaacctgatcgccgacaacctcgacgccctgcccatcgagcctgaactcgaacgccgcctgcgcgcctggctggaggaactgcgcacggccgcgctcaacctgccggaagccctgcggatcaagagcctgctcctgatcaaccagtggatgagcgaaaccgaactgggccaggtcctgaccctgatcagcggcaagggcttcgaagatatcccgcagaacctgagcggcaaggccggcgagttggccggctcgctgttctggacactccacaggctgttgcaggctcgcgccggaggccaccagcaaccctatcgctacctggacgaagcgcctcagccattggcctcgccggacaacgcccggctggccgccgaccagccgcgcatgccctggcaggatgtgcattgccgcatcgaagggccgtcggtgtacgacctggcgcgcaacttcatcgaccgctggaacggccagcaggcctacctggccaagacgccggcgctacaggatacggcgctggtacgcagcgccctggaagccgtgatgaagtggctgaacagcctggccgccgccgcgggattggagaactacctggacgagaagcgcaacctccggctcgaactggacccacccacgccctgctggatcaacgcgccggaacagttgccgcaagagccggaggtgcgccgcggcggcatgaccgtacaggtactgcgcagcgccgcggcgcgcatgctcgaacaggagcaggccggccgcctcggcgcgggagtgaacctgcctttgcaggtcggcgtctccaccgaaggagtccagagcaactgcaaggacgccatgctcctggcgatttccggggcgcagcagttcatctatatcgagaaccagttcttccagagcgagttcggcaaggaaggcgaagttttcaaggatctgcccctttcaggccccatggccagtctgcgcgacgttggcagcctgcgacgcgacttcgtcgtccggatacgcttggaggaagccctggagcagcgcgacctctggctgctggactgggccgaagtggagaagatcgcccaggagcctggcaccgaggcccgccagttcctcaagtcgatgctcgccatgtggggcgtgaacgcccagggctggctcacccacaagctcggcgaggcccagcacggcctgctcaacgagatcggcgaagccctggcgcggcgcatcgaacgggccatccagcgcgagcacccgttccacgtctacctggtcctgccggtgcacccggagggcgcgctgaacgtgccgaacatcatgcaccaggtgcacctgacccagcagagcctggtgttcggcgaacagagcctggtcaagcgcattcagcggcagatggcgctcaaggccctggaaggcaagtccgacccggcccaggcccgggaaatcatcgagcgcaaggacgctcgcggtcgcccggtctacgaacagcaggactggagccgctacctgaccctgctcaacctgcgcacctgggcggtgctcggcgggcgggtggtcaccgaacagatctacgtgcacagcaagctgctgatcgccgacgaccgggtggccatcctcggcagcgccaatatcaacgaccgcagcctgcaaggcgagcgcgactccgagctggcggtgatggtgcgcgacagcgagccgctgacggtcaggctggacggcaagaacgacgccatcgtcggcaaggccatccaccagttgcgggtgaatttgtggaagaagcattttggcttgagccaggggccaggcggtttcgtcaagccggccagcgagttgagtgcttatctgtccatcccggcggctcaagaggcctgggaagctatacaaacattagccaaggagaatactcgtgcctatgaacggactttcaattttattccccaaaatatcagccagactcaactgcaactgactccagagccgcctaaaggatttgaggacggatttcccgcctccatatggccaacctgggcatacagaaaacctggcgagttaagggcgggcggacaactgatggagccgatgccatatcaggaaatcttctggcgctcatctaatctcacttcggtgaaaaccttcccaccacccaacggggtttccggtttcatcacggctctaccaaccagttggacccgtggtgagcgcaatgattctggcttgaatctaagcatcctggcacatcaggacagcagatcgcttcccacccaggtcgccatgaatggagatagctcggcacaaggaaagcatcgcacatga

SEQ ID NO: 361068 - DNA, 1251 bp, Pseudomonas aeruginosa
atggctaccgcggcgacgtatggcagcctctcgtttcgcgagcagatcgctttctttgaggcgaagaacccctcggtcaactacgccacggtgcgcggtgccgcccatgaccagtcgtttgtgagcgcaggcgcccatcgtgcggacctggtcgcagatctctacgcagtggtgcgtcaggcgatccgcgatggcttaaccctggaggagttccagaaggactactacgccgtcctggacaactacggctgggagccggccggcggtcgcgcctggcgtgcccaggtgatctaccgcaccaacctgcgtaccagctacgcagccggccgctacgcccagctgcaggcagtgaaggcaacgcggccgtactggggctatcaccacagtgacgctgtcgagcacccgcgcgagctgcacttggcatgggatggcctgcacatccatgccgacaacccgtggtggaagacgcactatccgccgtcggggttcggctgcgagtgctacgtcacggcctacagcctggatgagctgcaggcgatggggaagtcgggaccggacgaaccaccgcctggccgcctgcgcaacatcgttttccacggcgaggtggtccaggtgccggaaggcatcgatccgggctggaactacgcacccggtcgagccgccttcgagaaccaggtgcagctgaccctggagaagaccgcgccgctgccggccgaaccggcggcacgcatgaacaggcaactgctggacgagcagcgtgtcgaggaggcgctgcagcgctcctggacaagctggctggatgaggtcgtggccgagccagtggtgcgtggcagcgctcgcaacgtgggcacgctgagccccgagacggtcgctggcatgcaacgggcgggcgtcacgccacagaccgcgttgatcagcatgcgcgacgagcaattggtgccactggtcaaggccgcgacgaccgagccagaggtagacgacgcgctcgctggactgacgctggccgacctgcggcaacttccgcaggcgctcgctcagccgcaggcggttctcctggatgcatcatccaacgctctggtctacgtgttcgactctggccgacgcggaggctggctctcaatgatcgtcaactatctcctgcagggcagctcgcgcagcaatgccgtccagtccggcagcgtggtcggcgtcgagcagctcgggcagcagttggccaatggacgtttggttttggtggagggtggactatga

SEQ ID NO: 361069 - DNA, 231 bp, Pseudomonas aeruginosa; identical to SEQ ID NO: 340426

SEQ ID NO: 361070 - DNA, 687 bp, Pseudomonas aeruginosa
atgaccaccgtcgcccacgcgcccgcgttgaaaacggttttgctgccgttggagcagcacagataccgcgtaaccccatccgcgccggccgagcctgtagttgtctgcgatcccgcagtcagaacggcggtgaagaactcgaccccgtatcgggacactgacgtccacgtccggcccattgccgcgagcagcgcctgcacccgcgcattgagcgccggcccggccccgccgttcgtgctgttgtcgaaggcgaacttgcccccatctgcaacggtggcgccgttccagccgttgagaaacgagcttggagtccatgacgttgtgaacatcgtagccagagggttggctgcggttcccgcgaagcggcccatgtcgggcatcaggttcatgaacggcagaacgttgagcgccgatttcgcggccgatcccagctccgtccacgcgccgctttcgcgggcatacgcttttccgtcgctcggcgcatccgacataccgcccaccagctcgacccacgccgtgccggaatactcgtatgtcttgacctggccagcaggcgtggcctcgttcgccacctgcacccgccagcccagcctgggtggcatgtactcccaaatagccgtggtcgcacccgttgcccaccaccgggccaggcggttctggttcgccccggccccggtgaaaatgtaa

SEQ ID NO: 361071 - DNA, 687 bp, Pseudomonas aeruginosa
atgacgacagtcgcccatgcgcccgcgttgaaaactgttttgctgccgtttgagcagcatagataccgcgtaaccccatccgcgccggccgagccggtagttgtctgtgtccccgctgtcagcactgtcgtgaagaactcgaccccgtaccttgaaacggatgtcaaggtgcggcccatcgcagccagcagtgcttgcacccgcgcattgagcgccggccctgccccaccatttgtgctgttgtcgaaggcgaacttgcccccgtctgcaaggctggcgccgttccagccattgatgaaggtgcttggagtccatgacgttgtgaacatcgtattcagcggattggctgcggttcctgcgaaacgccccatatcgggcatcaagttcatgaacggcagaacgttgagcgccgatttcgcggccgaccccagctccgcccaggcgccgctttcgcgggcatacggctttccgtcgctcggcgcgtccgacataccgcccaccagctcgacccacgccgtgccggaatactcatacgtcttgacctggccgctcggcgtcgtctcgtttgcgacctgcacccgccagcccagcctgggtggcatgtactcccaaatagccgtggtcgcacccgttgcccaccagcgggccaggcggttctggttcgccccggccccggtgaaaatgtaa

SEQ ID NO: 361072 - DNA, 534 bp, Pseudomonas aeruginosa
atgcactacggcgatgtcgaggcagcggtttcctgggtgggggagattggcgacgtggactggccgaccgtggacagcagtcgcataacgtgcgtgtccgaagacgagctgatggaccagccaggcttgatcgataccagttgccgcacctgcacggcgaccttgggcgaccaccgctgcaaggtaaacctcattccgtatcgagtgacgctgacaccgcagagcgtgtccgcgtgggtgatttccagcggagtggtcgccggctatgccgacggctggtttaccggtggctatgtggagtggcaggtggacggcgacaactacgaccgccgctacatcgagcggcacgccggggccgatctgcacatcctgggcggcaccgagggcgtcccggcgggggggcaactgcgggtctatccaggctgcgatctgctcgatgaaacctgcgccggaaagttcgacaacatcctgaatttccggggctttaacaagatgcaaggcaagtcgccattcgatggcgaccaggtctggtga

SEQ ID NO: 361073 - DNA, 201 bp, Pseudomonas aeruginosa
atggacgatctcgcgttccacccggatgacgcgctggcggaggtccaggaactgcgccgacaggcataccgggacgaggcagacccgctgcgcctggaggccgagtatgacgccatcgctaccggcacagcgccggacctgtcggcctgggtcgaagctgtcaaggcgatcaaagaacgctatccgctcccccagtcctaa

SEQ ID NO: 361074 - DNA, 597 bp, Pseudomonas aeruginosa
atggctgatgtacgaccgacgaagttgcagaacgacggaaacggctacggcagtctccgcgagttcgccgacggcgacacggtgccgcttgccctgggcggcactggcgctgcaaccgctgctggcgctcgcacatcccttgggcttgggagtgctgcagttagagctgccctgggttcaactggggctttgtactcgcgagacagcatccttggctcggtttcgcagtcgagcggggtgccaactggcgcggtgatccagcgcgggagcaacgcaaacggtgagttcgtcagaatggccgacggtacgcagacttgttatgccgtgatcagtcttctgtactcggcaaacaatctgctatctgcgacgtggaactacccggccggcttctcttctgcgccgattgtgggttgcacgccgatacagaaagtggctgctgatattgctcccgtagcgttcgcagatctgggggcttgcttggccgctgcggtgggaacctcggccgccagccccaggatatttcagcgcggtacagcatccttcccttcgggagctgttatggaatgccatgtcgtcgcaacggggaggtggttctaa

SEQ ID NO: 361075 - DNA, 441 bp, Pseudomonas aeruginosa
atgggagcccaagtatctttccacccggaaaccttctcaaaattcttcgcgccaatcgacaagctgtatccaggcctgtctgctgatttgctgcgagatttcgccagctatatcgactcggatcgtatagctgtaccggaatacttcggccgggatgctccttacacgcagccagtcgaagcatccaacgcccacttgatgcacatccacatcaagctgcctcccgggaaattcccgaaaaaccgcgctcaatactatcgagtctgtaatcagggaaagcctgaagaagatgcttgcctggtctatgttcgcggcgagctagaggaagacatgtacatgatactggcgttcttctggccggacgcgcatgagatggcgcgcgacccgaagcaaatgaaatatctggccaggcttgcaaaagacttccgcgataccaactga

SEQ ID NO: 361076 - DNA, 471 bp, Pseudomonas aeruginosa
atggccgcccttggtctcgttggagactattcggccgctccgatgagcgctatccaatcagccccaatcgagcgcgccgtggctcagcataagctgaccagcattaagcgcgtgctcagagagctgatcactgggtgggcggaggtggatgaggtgtatgcgcgcgcgattcgcacaacccttaagcgtgactcgtttgacaacgactatttcagcgagcttcccgaatacatcagccaaattcgtgggctagagacggcgctgaagtcagctgcagctcctgaggaggtagcagctgaacacatagccctgcggagagcagtagctagcgcgcgtagccgaatcgttgagcttaacagtctcatcagccaggccaaaggatcgcctagctacgtcaaaagccaaatcaacacggacggtctgaaggctcttgcccgccataccgatcgcgagcttcgtcagctcgcgtaa

SEQ ID NO: 361077 - DNA, 1152 bp, Pseudomonas aeruginosa
atgagtcttaccatggggccgaacactggcctactgatcaacggcgcccccggtgaggggcattacagcgaactgatccgcatgttgcgctgggatgacttcctgcgccaaccggtcgtcaaggggcgcgtcgccacgttgcccacaagcggccaggtcgagggcgacacttacattttcaccggcagcggcgcgaaccagaaccgaattgcacgctggtgggcaacaggtgcgacgacgcccatttgggagtacatgccgccacgactgggctggcgggttcaggttgcgaacgagacaaccccggcaggccaggtcaagacctacgagtattccggcagcgcctggactgagctggtaggcgggatggccgacgcgccgagcgacggcagcaactacgcacgcaacaacggggcgtgggggaagttgggaaccgctgccggagcagacctcaacggcatgccgttcctcaatctgatgcccgatagcgggcggtacgcaggcagtatcaacccgctaatcctgcgattcactgaggctttttccagtacgttcctgacgccatggaatggcgcgtcaatcgctgacggcggaaagtacatctacgacaacactacaaacggcgggaaggctggcaatctgaatcaacgtgtccaggacttgctggtggcgatggggcggtccagtggcagcttggcgcgctatggcgtggaattctataccgctgtgctgaccgctggccccaacgcaacgaccggctctacgggcgccgacggcacgacccgttatctccagatgacgaactcgtcgagggcgctcttcatcgccaacggctggtgtactgcggttctttggatacgcgcggaggccggatcgcttcacttcatgccggcaacggccccgacgactgactacaagatatggctgaatggtgcgcctgtactgccggggcaggtgctgaccccggccgatggatggaagcacgtcaggatttccaaaaagagcgcgcagggctacgacaacggcttcccgttcctctatatgtcgctgggcgccagtgcagctatggcctgtccggcattcttcggcggcctggtcgatcccggcatccacgtcgcgcctattgcaaccgtcaactcacagagcgcatga

SEQ ID NO: 361078 - DNA, 870 bp, Pseudomonas aeruginosa
atggcgcgcgggatgtcgcgttgcgggtcgcgggtttcctcggccagggtcgaagccgaggaacgacaggcacagcaccgccgcgccggccatcaacggggcgaagcccggctggctgccgtcgccgacgaagggcaggctcaggtccagcgaggggatgccggccaggtgcttgaccgccatggcgacgaacaccacggcgaagacgaactgggcgccgacgatcacgttgctcatgccggccaccgagctgatgccgatcacgttgagcacggtgaccaggccgatcgccgcgagcacgaagatccaggccggcaccatcgggaaggcgatgttgaggaacaggccgatgagcaggtagttgatcatcggcaggaacaggtagtcgagcagcagcgaccagccggcgaggaagccgacgcaggggccgaagctgaggctggtataggaataggccgagccggcgatgggatatttcttcaccatgaagctgtaggaaaaggcggtgaagagcatcgccgccagggtgatcaggtaggcgctggcggtgcgaccgccggtgatctcggtgactaccccgtaggtggtgaacatggtcagcggaaccatgtagaccagcccgaagaagaccagggcggggagcccgaggatgcgccgcaggccggtgccctgggcgctgtggacgtactcggggcgcttgccgccgatgaggatgccgttgttgcgttggctggccatgttccgctcctcgcgaaatgccgtatcgatcccgcaggcggccgcgtgggcggacctttcctgcgccgggtgaatggacgggctagtggaaaaccgctggggtttccgtcgggtcggtggaaatggcagtga

SEQ ID NO: 361079 - DNA, 972 bp, Pseudomonas aeruginosa
atgaacaaccgcaagcacaacacccacctctcacagtccgacatagccctgcagatcgaatcactcgtccaggctatcgagcgcagcgatacacccgcatatcggatcacgcacaaacggtctggctatgagcaggtcgagcagaccaggctctcccggtacttcacccacgtccagcagatgtacaacctgttcgatgaccgagtgccatacgactacagcgagcacctgttagcgttccgggaagcctgtgatgacattggccttcagcgctcacccaatggccctgtctgcatgagcgagacaggtacgtactggctcagtcatcaacagagcatgaacgtcctcaccgaacggatccgtgagttgacccgtcagcaacggtatcggcgtaggcctgggggacgagcctatgaggcacgcaagcaggaggcggagatcatcgcgtacacggatgctgtgatgagcctttactcccgcactacggtcatcagactggacctctactaccgacctgaagctcaggccaggcagcgcgtcgagcaggtattcgatcacctggatgatctgatctatgagcacagccgtaatccgatcttcaagcaccttatcggctacatctacgccgtggagcagggggatcgaaatgacagtaggggttaccacatccatgcagcctacttcttcaatggcaacatagtgtgccgggatgcgcataaagcgattgagatcagcgaactgtgggaggaggtcactcgccgtcagggctatgcccatagctgcaatcacgacaaggatcagtacggcgacaagctaggcattggccagatcgagagggacgatcagtcgagacggccccatacgcactacgccatgaaatacctagtcaaggacgatcagcacctgcgcttgaagcctgcgggggctcgctgtctgcgtaagggcgcactgcggcggttcgtgcggcgatga

SEQ ID NO: 361080 - DNA, 864 bp, Pseudomonas aeruginosa; identical to SEQ ID NO: 324093

SEQ ID NO: 361081 - DNA, 717 bp, Pseudomonas aeruginosa
atgaagaaaatcatcaccaccacactgctgtccatagtcttcagcctctatggccaggtagctatggctatcggttaccagcacggctcattcccagacgaactgagtccgcaaggcttgcccgaggcgatcccctgcagtttccagcgcaaaacgcacctgaccaatgagggcaccctgaactgtgtctggctgatgtccagtcggaacatcaccgaatggagtgcacagcaaggccggaatctcaactatcccaacaagtacgaggctgtatgtcgtaagggtacctgccgcgcccaaggcacggtcgttggcaatcaccccaaagatgaaaacgtcaggctgtccatctggtactacatgggacaaagcagcgatggcaagcctgtagcttatctgaagggctttggccctgctttcgatggcgaggcggtcagctacgccgaggccgggcagatgctcgtagagttctatgagaactcgggtatcgataaccagaaggcgatccagttcgagctgagtcagcactatgacggcggctgggagcaattccaggctgacctgaatggtggaaacgccagcgcaagcaccaatccagagcaatgtctaaatgcctggatcaaggcattccgtgatgacgtgggcgaggacgcgatgatcgtcggcgagcagctggatgagtggaagggctggtgcagcaaaggcaaactgccgtag

SEQ ID NO: 361082 - DNA, 207 bp, Pseudomonas aeruginosa
atgacactactgagatttttgctgtgcctattcaccttcatcggcgcgttggctgcagcaggcgcgctggttatcagcgtgctgctgatgctgcgctttccacctctgcttgtcgctgttgtcctgtcctgctggatcctctgcaaactgctgaaagtctttcgcaatccggaccaaaccaaagccaccaagccttcggcgcagtga

SEQ ID NO: 361083 - DNA, 1173 bp, Pseudomonas aeruginosa
atggacgcagtggagctccggcagcttgatacggttattgagcgcgtcacagagatggccgaggacagatactcgggtcgtgaagccgaaatcatcaagcatgttgcctatcactttctagagttaactctggccaacagtactgaggagttcagacatgcttgccagataaaagtgcctccactggacctggctagtgagatgatagaggctgttgagagctataaccgttcttaccagatggctttcatgcatgtgataactgaaatgtctacgggcgttgatgccagttacgcatgggaaattgccgaaacgttgagggaggagtttttaggctgctcggctttggttcggcgcgatctgctcaaacgctgcttcgtccgcgagttcagagaagtctccgtagacgtgtattgctggttgattgttgcaggggtgctccccgtgacaaaaaacaggcctgatcggatacgccgagaatttgatacgaggcttaaaatacgtcttatcttgcttgctgattacgaaatgattacccatcacttgagtatgtgcataagcaaggatggctctgtgttggtatttcttgaaaatccgaagtttaacttaaaggaagcgactgttgaacgccttctggatatccaaaagcacttcattgacgccgtcgctaagcccagcttgcgcggtatcccgctgctacatctcagagatttggcgagcaatgagcaggtgcaggatttcttcgagcagtggggtagcagaaaggtccggtttcgtatgcacggggggacgctggccagttggctgggtgtcttgggggctttcatggtgtgccaggaaaggatgcgccatgcagttaacgctgttcagaaaaagtatcctaacggcaccggctccgtttgcatctctgatttaaagatcccagcaatctacaatgaattttgcaacaaaggcacagtaaccgaaatcgtgacgaaacggctttctgagtgcggtctcagagtcggccccagaacgctttattgtgcgcacgcagagatggaaaatattactctgaagttgctgagggagtattgcaaaaagacgcggcaagctggaattgccatgccgtcctcttgtgaggatattttctacagattgacttttattcatgccggaaaactaaaaagctaa

SEQ ID NO: 361084 - DNA, 954 bp, Pseudomonas aeruginosa
gtggtgataaataacaagctcacaagggttggtgtcttttatgatggaaactacttcctgcatgtaagtaactactatgcattcaatcatcagaggagggctcgaatagatgtgtctgggctccataattacattcgtcggaaagtgtccgagagtgaaggggttgatgagcgatactgtcagatcgttgatgcgcattattttcgaggaagactgcgcgccagagatgcagatgagcgcgatctgctctttaaagaaagggtgtttgatgacattcttagtcatgagggagtcactaatcactacttgccgctcggcccatatggagaaaagggtattgatgtctggttggcgctagaagcctacgagcttgctattcataagcgattcgatgtcagtgtcctgatagcgggggacggagattttctgccgctcgtgcgaaaactcaacacgatcggtaccagggtgatgctgctggcatgggatttccagtttgtggatagaaatggcgcagagcgtgaaactaagacctcgcagtctctgcttgaagaggtcacatatcccgtcctgatgcaccaagtcattgacgataggtcacttcgtaatgatccggctattaatggcttgtttgtgcgcaagagcgaatatgccgttagagcggaacgggcttctgagcctgtatcagtaccaaattcaacaggcgtcccttctgtctcggtcgcaaaggaagatggtgcttcatctaggaagggatgtattcagaagcttaaggagggatttggtttcataacgcctgacgatggcgggcagaacttgttcttcttccattcggaagttatgaatgctgaatttaatgaactgaatgttggggatgtagtcgattatcatcttggccagaacgacaaggggtcatgcgctgtgaaggttcgtgtcggggagtcgggtcagggctaa

SEQ ID NO: 361085 - DNA, 279 bp, Pseudomonas aeruginosa
atgagtaacgtacaaccgatggcaccccgtaaggtcatgaccaggctggagcgggagtttctcaaggtggccggccaggagctggcgcaggtcaaggtgggcggtgctgctgccttggctgcgctgttggtcatgatcgccaactggcacggcgaccgcggcacgctgggctttcacgactacggccggctctggctgcaggacggcaacgcaaagggcgcagcggtggaaacgctgctgcgtgatctgttcggcctgaacggtccgggggcggcatga

SEQ ID NO: 361086 - DNA, 780 bp, Pseudomonas aeruginosa; identical to SEQ ID NO: 239573

SEQ ID NO: 361087 - DNA, 504 bp, Pseudomonas aeruginosa; identical to SEQ ID NO: 339230

SEQ ID NO: 361088 - DNA, 1800 bp, Pseudomonas aeruginosa
atgagagtaacgataaacaaaaaatacaaatccatacctcaaggcttggagtttcagctaccaagattctcagtaataaccggaaaaaatggcagtggcaaaagccatttgcttgaggctattggaaataaagacgtaagcaacgttacagacgaagctggaaaggctttgaaggtgatttatgttccatttggagccttatcaccccaaatatctgaaacaagcaaccccatccaggtcaattcaaatctcaagtctatctggcagcaatttgaaggaatagcaaatcaagccagaacttacgcatcccaaaatagctggcagaaaaccgatgcggaaaactggataataagcaacctccagtctccgctaaaggagatcattgaaaaattattatcattaacttccaaagcccccctcgacttaaaagaggctgatgtaataaacaacctcagaatttccgacataagcggaaataacggcaacggaattttcttcgggcagctcgctgaaatatttcaatcatatcaaatgagaaaatacaagaacgacatgattgaactaataaacaataaatacaatcaaaaaaatccattcttatcagaggaagagtttgaagaaaaatacggaccaaagccttggcttctaatcaattcaatcctatacaacgcaggcctttcatatactgtcaacgaccccgaagggctagaccttgactctgacttcaaacttcgtttgacagacaaagtaaatggcgcggaaatatctgcaaatgacctatctaccggcgaaagagtactaatgtcacttgctcttgcagtctacaacactaaggacggaggcaatcgacctgatttaataatgcttgatgagcctgacgcccctctccaccccgagtattcaaaacttctaataaaaaccttaagcgagacaatctcagaagacgccaatgtaaatataatcatcacaacacactcaccctccactgtagcgatgtgcccagacaattcgctttatcaaattgataaggcatcgaaaaccccagagatcataagcattgccgacggactaacgatattgacctctggaatacctcatcttaaggtttcaattgaggaccgacttcaagtttttgtagaaagcaaatttgatgtatcttactatgaaaggctttacaacttactttcaagaaaatacacctacaaccacaagctactattcctccccccccatagtgggacaagcaactgtacagacgtcattaccataacaaacactctagcagagcttggcaatgatcttgttagaggcataattgatcatgacaatcgcaacaacagcactgataagatttttgtacttggcctagggaatcgatactcagtagagaattatattctagaccctattttcatctgcctagccttggtccgagcgtcgaagttaaaattccaggatttcggaatccatgacgtccttaattatatggaatctcaaaaactccaagctgcgcaactccagcttctagctgattttatttttggaaagctaggaattcacagaaacgatgagaaagactgcgagctagattgtggacataccatttcgtacccaaaagaatttctaaaaatgcaagggcacgactatgaagagaaagtatgcaatgcaatacccgagttaaatgcactaaagaaagggcagtctgactccgccctcaagatgagtatgctcacagtaatcgaagagctgccacagttcctgagcgctgacgtacacagaacgttctcatcaatcagataa

SEQ ID NO: 361089 - DNA, 1296 bp, Pseudomonas aeruginosa
atgaccaagccaaagcatcaagtccgtgtcacggttaagtccgctggcgagatttacgagtcgcccgaggggcgcctgttcttcgacgacaagctggccaagttcactgatctgtccggcgtgcgcctgctgcgctgcggcgtcgatacggtccgtcagttgtacaacggcatgatccggttggaagtgatggcgctgttcgatgagccggaagacatcgtcgagttcgctggctaccagtgggtcaagggcagggtagggcgcgactccggctatcagtaccgcctgcagaacgccgacacgggcctgatcctgctgatcaagaatcacaacgtgaagctggagaacatcgggccgcacctcaagattgaggtgtcgccacacgccctggacggggctgatccggcggcgctgcaaggcatgctcgatgacctggctagtgccgtgctcgctcactgcgaaacgaaccagtgcgccgtgcatctcgcgctggatgtgcagggctggacgccttccgcggacatcgtggagcgcatgcgctgtcgttcgactcgtgtgcggcagatcagcggcatcgaccgtatcgagttccacggcaacgcctcggtgtatgggcgtggtgagaccttcatgttcggctcggccaacggcatgcagctctgcatctacaacaagacgctccaggcgcgcgccaccgacaagctcgattactggagcaacgtatgggcgtcactgaatggcgatccgtttggtgatggggagcccgcctacaacccggaggaaacggtgtggcgtattgagttccgcttccatcactcgatagtccagcagttctccgaaggctccaaactgtcctctggtgaggtgatcggttgccgcacctattcgggcctatgcccacacctgcaaggcctgtgggaatacgcctgcgacagcttccggctgctgctgaaagatccgaagtggtacgacccgttctggtcgctgatcaccctggatgccaaggtccaggtggaggccgatccgctgattgagcgcaccgaatatcgccgctactacaagaccgcacagggcttctccgggaagaactgcgagatgttcctgggccagttcgccagcctgattgcgcgggagcgcatcccctcaaaaaaggcacttgaggtcgggagaacgcttcccttctggcatgtgatcgaagaccactacacggccaagggctacagcactcgcgacctcgaaaagcatatctgcgggctgatcaatgatcgctacttgagacgtggatacgccatctga

SEQ ID NO: 361090 - DNA, 1077 bp, Pseudomonas aeruginosa
atggacgccccgaaagacttgacgctaatggaagtatttggcgaaaaacatcaagcctatgaaaagctctgtaaaacttctgccgacctcatagagcgtctactagaccacagcaatataaaagtccattcaatatcatggcgctgcaagaacaaaaaaagccttgagaagaaaatagaaaagaaaaagaaatataaatcactcgacgaaataacagatatcgctggaattagaataattacaaattattctgacgaagttgatttaattgcagccataatagaaaaagagttcaaagtagacaaagagaacagtatagacaaaagaattgcaatcgaccctgagcgattcggatatctttcacttcactatgtcgtcgagctctcaaacaacagatcaaaactagtagagtacaaagcttttaaaggcctaaaaattgaggtacaaataagatcgattcttcaacacacctgggccgaaatagaacatgacatagggtacaaaagccaatttgaagtacccaaacatattaaaaggaaattctcgcgactagcggggctccttgagcttgcggaccaagagtttatatcaataagaaatgaacaacaaaaatacaatgaggcactggctagcgaaatcgatctaaactctgcacaaatcgggcttgataaaaactcattcgatgcattcgccaagaaaaactctcaatgcatagcacttgacgagaatatttccttaattttcggcagagtgctaactgacacaaccacaacaacaaccttaaaacaactacaaacttcgggaataaaaacaataaaacaactcgaggacagcctcataaagcatcaagacaagatagtatctctagctcaagatatgcacaggttgatgatgactcactacagcaactcagaagcaaccttcagaagaggtgtctgcacagtatatctctcccatgtcctagtggcccacacaaaagaccatgacataatagagagctatctatctgaaaactcctgggacaacaataaaatctctgatgagttcagagagatattacgaaacatgtttaattag

SEQ ID NO: 361091 - DNA, 249 bp, Pseudomonas aeruginosa
atgaacgaccacctccgcgattggctcggcaaaacgccggccgaagagcgtgaccgcgtagcgaagaatgcaggaaccaccgtgggccacctctggcaactcgcgggtggccaccgcaaagcatccgcggagctcgccgagcgtctgcaggatgcgtcctcaggtgaaatcacaatcgcaggactccgtccggatctcgtgccgctggctgagaaggtgctgaagggcgcctctcggcctgctgcctga

SEQ ID NO: 361092 - DNA, 858 bp, Pseudomonas aeruginosa
atggatatctaccagatcagaaagcagaacctgattgcgctcatcggcgagcgtaagaagggagcctgcgcccagaaatgggagatggcgccggcgcacctcagccaaattctttcgagcaagaccgagaagaatctgggggatgacgtcgcacgccgcatcgaaacgatcgagggtctggagcgcggctggatggacatcgtccacgctgccaaccatcaggaatcagcacctgtcgcccaggaagaagccaagaccagcgctgcggctatcgtcttggacatgctgaagaagcacgcagcaaaaggtatgagcggtaccactcaagagaaaatcgcccaggcagtcgccgacagcctggccgagaaaaacgtgatggcggcacccgcctcaaatgtgatcccggcagacttctcccgcattcggccgcgccagggtgagctgctggtgccgcaatacgatatccgcgctgcgatgggtgtcggccagctaccgcccgactacgtcgagacggttcgcaacctggtggtgaacgaggcgcacctgcgcgcccatggcgtcgattacactgcgcccgagaacctggccatgatcaccggctggggcgacagcatgctcggcacgatcaacgacaaagacccagccatgatcgacaagggcgtgcgggacttcatcggcgagggtatttacgtcctcacctggcatggccacctgttcatcaagcgtgtgcaaatcctcgatggcgagcactaccagctcatctcggacaaccccaagtacccaatgcagaaagctcggatggacgacgtgatcttccacgctaagattctgctgatctggaatgcacggaaagcctga

SEQ ID NO: 361093 - DNA, 345 bp, Pseudomonas aeruginosa
atgaatgaccttgaacgcgcgtttcgcctatacgcccggccagtcttgcttgtgatcatcggcttgttcgtcatgggactcgtcgcgatgacacctgagtcagctggagtgtttgaccaggtgctaatgcccatcaaacgcgcgatcttctatggcgcactggtggtcgggggagctggtttcctgtggctctgctggagtgcctatctggagtaccgctgggctcgtggcgaactggacgggggctgccacaactgcggtggcccgatgcgccatctatccggccgctggggaaactacagcaagtgcctcatgtgcggatcgacgcgagaagggtggcactga

SEQ ID NO: 361094 - DNA, 345 bp, Pseudomonas aeruginosa
atgagccagcagatgaaggtgaaaggcggtcgtgaagagcgcggaatgtccgatatagacaggctgcggctgcgcgtttcggcgatggtgaactcgccgcgtgcggcctcactgcgccaggcaacgatctggcggctggagagcgatacggatcaggcctggacccaggtgataggcgagctgcaggaaacggacggcctagagatgatcgagaatgaggatggaaccatcacgctgcactgggaggcgatggtggaggaggggccggaaatcgaagccgatgatatggacgtgctgcctggaatggtggtgcagcacctgcatgaggagccggcgccgttctag

SEQ ID NO: 361095 - DNA, 687 bp, Pseudomonas aeruginosa
atgctccagtgcgtattcctagaggaatggaaccttggttattgcttgaaaggtgggaagggtaataagatggctaaaagccatttcttgggaatatctatggatatttggcaggttgacaaactagtcttatttattacgtttgtagttcctgggtttatcagcattaaattttatcaactattcttccctggtacttcgcgacctgtttcagatcagttgatcgatgctgtggcttatagctgtatcaactacgcagcgcttttttggcttgtggcgcaggttgaggcttcgtcgttaaaacaggtccactcctggctgtattacctattttatctttttgtgctttttgttgcccctggactgtgggtcttgttgtggaagtggctgcgtactcacgatcttttccaaagaaacgctcctcatccaatccaaaagccttgggactttgtgtttaagcagcgtcgctgctactgggttattgtttatctcaagaacggagagagggttgctggtaagtatgctgagcgttcattcgcatcaagcgcgcccgcagaggaacaaatttatttagaagaggtatggttggagaaagatggtatattggaacgtcctgtaaaaagatccgaaggcgtattagtaatggcttcggagatatctcgtgttgaatttctaagatttgaataa

SEQ ID NO: 361096 - DNA, 483 bp, Pseudomonas aeruginosa
gtggtccagttcattcacgagcggcgcaagcgcttcgcgttgcagcagcctgctggtccatggcggtgggatgcgatagcccattggggcggcagtctgggcaacttcgccacctacgccaataccgggattgagtttcggttcggctacttgctgccggacgacttcggtacggcgccattgcggccggcgggtgaaaacacatcgccgatccgcacgagcccgacacagggctggcacggccacttcttcgtcgctgccgatgcgcgttgggtcctgcgcgacatcacgcttgacggaaataccttccgctccagccacagcgtggacaagcgcccactggttgcagacatcggcttcggtttcgcatttacccatggccactggcgtttcgccttcgcgcgctaccaccggacccgcgagttcgatggacagcgcgagcgaccggcctttgggagcttcaccattggcaggcggttctga

SEQ ID NO: 361097 - DNA, 1179 bp, Pseudomonas aeruginosa
ttgaaaacaatactgtttgatagacgggtcaagtgttggtcgcttatgaccacaatggctataagagattatttgagtcttgtcgacaatgcttattcgagacgaggagggctcgatcaccagcgagatgcattaaaaaccacatcaggtcgtcgtattagatctagaatggtaaaggatataacagaaggagcaatattgccgccagtggtgcttggcgtggttgtatccttagaggactacaattccattgatgtaaatgattctaaaagaatagagaattctctgctggcagagtggcgtgaaaatatatccatcattgatggaatgcaaagaactaccgcattaatggatgcggttaaggaaaatccagagatatcgggccaggatgttagagtggaatgctggatttcagacaagactgatagcttgatttataggatgttggttcttaataccgggcaggttccgtggaatctaaagcgtcaacttctagttgtatactctcctttggttgaggagctaaaagctcgggtaaaatttgagcgtcttcttgatataaataagtctgagcgaagattcaaaggaggagagtttagtgctgaaagcttaattgagtcttatctggctttcggtttgaggaaaactgatattgatacgcaagaaagcctcgcggaggagttttctcgcttagatatggctgaggcaatatcgacagggaaatattctgagtactttccaccagtagtacagttaatggtggatctcgacaaggctttctctagattggatgaagtaagcgaggaaggttcaagtaatagttcaaaattcttaattggtaggaacatctttgatagccagcctgcacgtgtcggtttagtagttgcgtgtgccctgaaaattctaggtcgactagggaatgatcgaacaaaagaagaaagtgatgcaagcctaaaattgataaggtctggagctgacaactttataaacaagttgaacggatttagcaaagaggagctaagagattttctcggattggaaatattgggggagagagtgcatggtcaaaaaagatcggctataggtagatatgagagaagcttctttgagactgcatttaaagttttactagaagacaattttgaggtcgcatcacttgaggtttgctggagagcgtga

SEQ ID NO: 361098 - DNA, 1104 bp, Pseudomonas aeruginosa
atggcaagccgcaatagaatggatatgagcagaaggctatttgaaaggattttactctgtgcacaacagcgcggcgctcaaatagagaatattgaaaaagctcgatatattacgcgtctcgatgaaaatgatgcatcgctaatgagtagtgcggatgctgaagttttgaatatctccaggcatactaagttaataagaattaataagggtgatgactgttttttttgtactattgggatacacgagccaaatgtgcttccagcagggcttgaattagcgccgataaccccagctctctttgcagtattcgtgttggaggctgagatttacccctcaagctctgtaactggctatcaaataaaggacgctattgaaagtgaatatatgggagtgcaagattataacggacatgcattgcaagaggtgacacctttatttcctagcattcaagtttataaagtttcatcgaatgaaccttttcttgaaaatgatttatacagagtcttgggatctttgatatcgaggtcgtactttgatgggcctatacatatttcacctgaaacacttgaaagtttaaaggaggtattcgaggtcgggtcaaattacatccccttcagaaatttagtgcaaggaatgctgtctatatcatgggaaggacttttccttgaagtgtaccggtgcctggagcagttatatgcagagcctcacatttcagctttgaaaaaaaactggccttcatcgctgcctatgaaagaacttgcctcctacttagaggagcatctctcttggcgccctagagaagatgaggctctaaggaaaatcatagagacatgcgaagaagaaataattgataatttatttgaggcgatgaagattggcgatggcggagagagtgagaaagtaaattccgcatcaaaggctgtatatagtctgcggaatggtattgttcattataggccaatacataatgccattaagaaaagcgatgatcaatggaacaatataatcaactgtctactaaaagtcgtaactcatgtatacgacttgcgtggagagccattttttgtaggcgataagaggcacagcgcgttgctagaccgttaa

SEQ ID NO: 361099 - DNA, 1542 bp, Pseudomonas aeruginosa
atgagttccctgtccgccccatctgccgcgattgccgctgcccccgcgccggccgcgcctgcgcagactgcgttcggcctgcaggtagtggtcgggctgttcggtgtgctgctggccgtgttgtgcgcgggcctcaacgagtcggtgaccaagatctccctggccgatatccgtggggccatgggcatcggtgccgacgaaggcgcctggctgctggcggtctacagcgccgcctcggtttcggccatggccttcgcgccatggctggccaccacgttctcgccgcggcgcttcaccatgagcgccatcggcctgttcgccgtgctcggcctgctgcaaccgttcgcccccaacctgcacagcctgatgctgctgcgtgtgctccagggcttcgcctctggcgccttgccgccgatgttgatgagcgtggccctgcgcttcctgccaccgggcatcaaggtctatggcctggcctgctatgccctcaccgccaccttcggccccaacctcggcacgccgctggcagggctgtggaccgaatacgtcggttggcagtgggcgttctggcagatcatcctgccctcggcgctggccatgttctgcgtcggttggggcctgccgcaggacccgctgcgcctggagcgcttcaagcagttcgactggcgcggcgtgctgctcggcctgcccgccatcagctgcatcgtgctgggcctgtcgctgggtgaccgctggggctggttcgattcgccgctgatctgctggctgctcggcggtggcctgctgttgctggtgctgttcatgtacaacgaatggtccgagccgctgccgttcttccagttgcgcatgctgtcacggcgcaacctgagtttcgccctggtgaccctggccggtgtgctgatcgtgctctcgggcgttggcagcattccgtcggcctatctggcgcagattcagggataccgcccggcgcagaccagcccgctgatgatgctggtggccatgccgcagctgatcgccctgccgctgacggcggcgctgtgcaacatccgcgcggtggactgccgttgggtgctgggcatcggcctggcgatgctggcggcgtcctgcgtcggcagcagcctgctgaccagcgagtggatccgtggcgacttctacccgttctacctgctgcaggtgttcggccagccaatggcagtgctgccgctgctgatgctgtccaccaacggcatgaccccgcaggaaggcccgttcgcctccagctggttcaacaccgtcaagggcctggccgcggtgatcgccggtggcctgctggacgcccttggcaccctgcgccggcacttccattccaaccacctggtggacagcctgggcaacgccccgctggtcgacggtaacgcagccggcctggccaggcgcatccacgaccaggcgctggtgctgacctcggccgacctctacctggtcatggcctgcattgccgtggccctgatctgcctgattcctttcgtgcctacccgggtctatccgccgcgcgcggtggcctga

SEQ ID NO: 361100 - DNA, 1062 bp, Pseudomonas aeruginosa
atgaccaacaaccgcaaaaccctgttcatcggctcggtgcttgccgtggccgtcctggccggcatcgctggcccctggatgttcggcagtgaccaccgccagagcaccaatgacgcctatgtgatcgccgactacaccgtggtcgcgcccaagatcgccggcttcatcaaggaggtgctggtggaggacaaccagcaggtcaaagccggccagttgctggcgaccatcgatgcccgtgactaccaggccgcgctggatgccgcgcaggcgcagttgctggtggcccaggcgcaaagcgcctcagcccgtgccaccctcgagcgccaggcgtcgctgattgcccaggctgaggccgcagtgaaagcggcccaggccgaagctgcgttcgccgaccatgaggtcaaccgctacagccgcctggccgagcagggtgccggcaccgtgcagaacgcccagcaggcgcgcagcggggtcgaccaggcccgcgcacgcctggccaatgcccaggcggcgctggtagcggcacgcaagcaggtggatatccttgccgcccaggtggccagtgccgacggccagctgaagcgggccgaggcagggctggaaaaggcccagctcgatctgtcctacacccgcatcaccgcgccggtggacggcatggttggcgagcgcgccttgcgtgtcggtgcctacgtcaacccgggcgcccgcctgctgtcggtggtgccgttgcagcaggcctacgtggtcggcaacttccaggaaacccagctgacccacgtacagcctggccaggccgtgagcatcagcgtcgacacctttgccggtgagaagctgcaaggccatgtggaaagcatcgccccggccaccggcgtgaccttcgctgcggtcaagccggacaacgctaccggcaacttcaccaaggtggtgcagcgcatcccggtgaagatcgttttcgatgacggccagccgctgcttgcccgcctgcgcgtgggcatgtcggtggaagcgaccatcgacacccgtggcgacaagctggacggcaaagaggtaagcgcacgatga

SEQ ID NO: 361101 - DNA, 1452 bp, Pseudomonas aeruginosa
atgaaaccggcattacgcttgagcccgttgctgctggccgtactgatggctggctgcaccctggggccggacttccagcgccctgacagccaggcaccgcaacagtgggcgccgctgcaaggtgaggcggcggccagccagccgcaggccgaaccgctggaactgcgctggtgggagagcttccacgatgcccgcctgagtgccttgatccagcgcgttgccgagcgcaacctcgacctgcagatggccagtgcccgcctgctgcaaagccgcgccctgcgcagcaccgtggctgccgacgaagtaccgtcggtggatgtgaacgctggctacagccgctcgcgcaacagtgccgaaggcctgagtgacccgtccggcaaggcgggcaaggaagccttcaacctctggcagggcgacctggtggccggttgggagctggacctgtggggccgtgtgcggcgccaggtcgaggctgccgatgccacggtcgaagtggccgagaacgaccgccgcggcgtgctgctggcattgctttcggaaaccgccggcaactacatccagctgcgcgccgtgcagcacaccatcgatgtgacccgcgacaacctcaaggtcgcccagcacagcctgaagttgtccgaaaaccgccaggccgaaggtgtcgccacgcgcctggacgtggcccaggccagtgcccaggtcgcctcgatcgagtcgcgcctgccaagcctggaagcgcggcgcgatgacctgatcaacgccctcagcctgctcgccgccgaaccgccacgcagcctgcaggccgagttgctgcagggcggcgaactgcctgcgccgcagcagacgttcgccattggcctgccgtccgaactggccgagcgccgcccggacattcgccaggccgaggcccgcctgcatgccgccaccgccagcattggcgtggccaaggccgacttctaccccagcatccggctgtcgggcagtgtcgggttccaggccatgcagctgtccgatttcggcgcctgggattcgcgccgtttcgccttcgggccacagctgtcgctgccgatcttcgagggtggccggctcaagggcaccctggaactgcgcgaggcgcagcagcaggaagcggcgctgaactaccgcaaggtggtgctgggtgcctggcatgaaatcgacgatgtgctacgcctgtacaacgccagccagctgcgccgcgaccacctggccgaggcggtgcggcagaaccgcatcgccctggaaactgcccagcgccagtatgtggaaggggcggtggactttctcaatgtgctgacggtacagggggccttgctggccagcgaggaacagtggatcgacagttcggcggcggtgtcgcaggcgttggtggggctgtacaaggccctgggtggtggctggcaggcgtttgatgagcagcctgtgaagaaagtgtga

SEQ ID NO: 361102 - DNA, 795 bp, Pseudomonas aeruginosa
atgcacatttccctgaacggcaagcgcgccatcgtcagcggctccaccgcgggcatcggcctggccatcgccatcggcctggccgaggcgggggccgaagtggtcctcaacggtcgcacccaggcccgggtcgacgaagccctcaaagttgtgcgcgaacgcctgccgcaggcgcgcatcatcggcatcgctgccgacctgggcacccaggccggtgcgcagaagttgttcaaccaggtgccgcacaccgacatcctggtcaacaacctgggcatcttcgagcccaagccgttcttcgagatcgcggatgaggactggcagcgtttcttcgacgtcaatgtgctcagcgccgttcgcctgtcgcgccactatgcccaaggcatggccgagcgcaaatgggggcgggtggtgttcctgtccagtgagtcggcgctgcagatcccgaccgagatgattcattacggcatgaccaagactgcgttgctggcggtgtcgcgcgggctggccgagaccctggccggcaccggggtgacggtgaattcggtgctgccggggcctacgcgttcggaaggtgtgggcgacttctttgccaagctggccgaggagcagggggtgtcgactgaagagctggaagccaacttcctggctgagcaccgaccgacctcactgatcaagcggctggcgacggtggaggaggtggcgaacatggtggtgtacctggcatcgatgcaggccagtgccactaccggggctgccttgcgggtggatggcggggtgctgcgttccattgcctga

SEQ ID NO: 361103 - DNA, 657 bp, Pseudomonas aeruginosa
gtgaacgacagcgaggcgctggcccgcctggccgaggaactggtaaacctcgatatcctgatcaacaacgccggctacggcgccatgggcccgctgctcgatggcggtgtggatgccctgcgccagcagttcgaaaccaacgtattcgccgtggtcggcgttacccgcgcattgttcccacagctacgccgctcacggggcctggtggtgaacatcggcagcgtatcaggcgtgctggtcacgccgttcgccggcgcttactgcgcctcgaaagcagccgtgcatgccctgagcgatgccttgcgcctggaactggcgccgtttggtgtgcaggtaatggaagtgcagccaggggcgattgcctcgcagttcgccagcaatgcccagcgccaggccgagcaggtgctggcggcggattcggcgtggtggccgttgcgcgagcacgtgcaggcacgggcacgggcttcgcaggacaagcccacctcggcggcagtgtttgcccagggcgtgttggcggcggtcgggaagtcgccggtaccagcggtggtgcggttggggaacggcagtacggcgttgccgttgatggcccggttactgccgcggcgggtgctggattgggcgttgcgcaagcggtttggcctactgcgcccactctga

SEQ ID NO: 361104 - DNA, 123 bp, Pseudomonas aeruginosa
atgcccaccgtcctgatcaccggttgttccagcggcatcggccgcgccctggccgacgccttccgcgatgccggccaccacgtctgggctaccgcccgcaacctgaggatgtcgagcaactga

SEQ ID NO: 361105 - DNA, 1650 bp, Pseudomonas aeruginosa
atgaccgcgttgctcaccgacaacctgccgctgctggcgggtgcaccgaatggcatcaagaagctgcgtgagctgattctggagctggcggtgcgcggcaagctggtgccgcaagatccgaatgatgagccggccagtgagctgctaaagcggattgccgaggaaaaggcacggttggtggcggagggcaagatcaagaagcagaagccgctggcggggattgaagaggaagagaagccattcgaactacccaatggttgggtatggaggcggtttggagaggttttctctcttgaatacggagataacctgccagctgacaaaagatcaaatactggcgaataccctgtatatggatcaaatggtgttgtcggcactcacagcacttgctttgtggactcaccatgtattgttgttggccggaagggatcagcgggtgcactgaatctttgtctttccagaggctgctgcgttacagatgtcgcttactactgcatcccaccatctgctttttcacttgattatgcattcaagctatttcacacccttggcctggactctctagggaaggggatcaagcctgggttgaatcgtaatgaagtatacgagctagttgtagctgctcctccgatagccgaacaacaccgcatcgtcgccaaagtcgataagctgatggctctgtgcgaccggctggaagcccgtcaggccgatgccgacagcgcccatgcccaactggtgcaagcgctgctgggcagcctgacgcaggccagcgatgccgcagactttgcgcaaagctggcagcgcctggccgagcacttccataccctgttcaccaccgaatccagcatcgacgccctcaagcaagccctgctgcaactggcggtgatgggcaaactggtgccacaagatccgagcgatgagccggccagtgagctgctgaagcggattgccgaggaaaaggcgactttgattgcagaaggcaaaatcagaaagcagaagcagcttgcagagatcactgaggaagagaagctgtttgagctagcaacggggtgggagtggagccgcttgggtgagcaggtgattgaaagtggtgctggttggagtcctagttgcgaaccgaggccaagggaaggaaacgactggggggttctgaaagtcagtgccgtttcatggggtgtttaccgccccgaggaaaacaaggcgcttccagtgagcttggaagcccgacccgagcatgaggttgcagaaggcgatttcctagtttcccgtgccaacactgcggagctcgtagcacgtagtgtcgtggtggattcgacaccgagccgtttgatgctaagtgacaagatcgtacggctgcggctgacaaaactttgtgatgcccattatttaaacttagtaaacagtgccacacatgctcgccagtactatgcccgggtagcaggaggcactagcagctccatgaagaacgtttcgcgcgagcagatccttagcttgccaattgctgtacctccgctcccggaacaacatcgcatcgtcgccaaagtcgatcagctgatggcgttctgcgaccaacttaaagcccgtcttcatcaggcccgccaggtgcatgagcaactggccaatgccctggtcgagcaggccgtggcctga

SEQ ID NO: 361106 - DNA, 816 bp, Pseudomonas aeruginosa
gtgccggttgaggagtggtattcgcttcatcgtcacgaactggccgatgtgctgttgatcactcagagttacggcaagatcaaccgtgcaattcgtgaccttgtccaggtcgtgtatcgctgtaagaaggccacggctttcggcaccaatgatcgctatatccgcaaggtccaggacggtctgcgcggcgaggtcgtgaatacaagcatccgggagtatcagaaacagttctacggattctggaagtcgcatacgcggtcctcggccgcaggccaggaactggccgctaatgacattgtgccgatctggaagcgctggccgttcaaaggtgctgcgctgtgcttcctgatcgtcatctgtctgtcgacgtggaacgtcacgcgggaaaagaagcatgcgccgccgcctagggttcagccggtggctgcgagtgtcgattctgcgcctgtaggtgcggctccagcggctccagcggctccggtgatcgaggccaagcctcggggacctgagcagaagctacacccgttccaggggctgtcgatgcatctgatcgcaaccatgcgtggtaagcgctttcgggatggtgtcgaggaagagtttctgggcggttttatccagctcgcgaacaacgggcagccggtcagtaaggtgtcgtttgacgacctacgcaccgcgggttactcgatcacctgggaatcgccgacggtcgtttcgctgacgtacaagggcttcgatatcggttacgtggtaacggatatgccgctggtatccgcagcaaaggacattgcagtaaccacgcctgtgcaggcgccttga

SEQ ID NO: 361107 - DNA, 1152 bp, Pseudomonas aeruginosa
atggcaacgcctgctggccgggcaatcgggcatcgccacgctcccggcggagctgatcggcgacctgcccatcagcatcggcggccaggtccccgaccgtgtccaggacccgcaggccggcttcgatcccgacctgctgctggccgccaaggaacaacgcaagatggaccgcttcatcctcttcgccctggccgccgcgcaagaggccctggcccaggccggctgggcgccgcagagcgccgaggcgcaggagcgcacggcgaccgtcatcgcctccggggtgggcggcttccatgccatcgccgaagcggtgcggaccaccgacggcaagggaccgcgccgcctgtcgcccttcaccatcccgtcctttctctgcaacatggcggccgcccatgtgtcgatccgccatggcttcaagggaccgctgggcgccccggtgaccgcctgcgcggcgggcgtgcaggccatcggcgacgcggcgcggatgatccgcgcgggagaggtcgacgtggcgctctgcggcggcgcggaagcgaccatccaccgggtcagcctggccggcttcgccgccgcgcgcgccctgtccagcgatttcaacgacagccccgagcgcgcctcgcgccccttcgaccaggcccgcgacggcttcgtcatgggcgaaggcgccggcctactggtcatcgaggaactggagcacgccctggcgcgcggcgccaggcccatcgccgagctggtgggctacggcaccagcgccgacgcctaccacatgaccgccgggccggaagatggcagcggcgcccgccgggccatgcagcaggcgctgcgccaggccggcgtggaagcggccgcggtgcaacacctgaatgcccacgccacctccacccaagtaggcgacaagggcgaactggccgccatcaaggccgtgttcggcgccggcagcgggctcgccatcagcgcgaccaaatccgccaccggccacctcctgggcgccgccggcggcatcgaggctatcttcacggtcctggcactgcgcgaccagctcgcccccgccacgctcaacctggaaacgcccgacaccgacgccgagggcctcgacctggttcgcggcgaagcccggcgctggccgatggaacacgcgctgtccaatcgtaa

SEQ ID NO: 361108 - DNA, 813 bp, Pseudomonas aeruginosa
atgctcggccttggcgattcgatttactcgcgcgccttcgtgaagaactatccaggcgcgtttctcgaaacgccatggccgcaattgctgaaagacctcccggtcaagtgcgtgcgccccgacacgaaactgcgcacccagcttcgcaacgtaaaccgagagcatgaatggcacgccccggtcggcggcccgcaactgcgcatcgcctacggccgcgacccgatcatccaggggctgcgcaaggcgttccgctgcgagccggcggagttcgatctgccagatttcggccatgcgccggtcgaaggtcgctatgtgctggtccgcccagccacggtacggacggaatggcgtgccgacacgcgcaaccctctgccggagtacatcgcccaagcggccgccgagatgcgcggccgcggctaccaggtcgtctcggtggccgacctagagcacggcaaggaatgggcgctcgacccgctgccaccggctgatatccggttccaccatggcgaattgccagttgaacaactgctgtccctgctgcagcacgcggatgcggtgattggcggcatcggctggatcgtgccggccgccatcgccgcaaagcggccggcctggatcatctgtggcgggcagggcggctacaactcgccggaacacatcaccgacaaatgcatggacctgtcccgcatcacattcgcggttcccgacaggttctgccgctgcacgttgaaacagcacaactgtgacaaaaggatcgccgatcatgacgcacgctttgccgcctgggctgaccgactgcctgctctggtctga

SEQ ID NO: 361109 - DNA, 1275 bp, Pseudomonas aeruginosa
atgaaacagtcgacgctttggcgtaacagcgagaccttcatcctgactcgcttggaactatacaactggggcgggttccaggaccttcaccatgctgagatagaccctgccggcactgcggtgatcggccccaccggcagcggcaagaccaccctggtcgacgctctgatgacactgctctgcgccaacccacgatacaacctggcctccaccggaggacatgaaagcgaccgggatctggtgtcctatgtccgcggtgtttccggcccaggcgatggcggccccggtcaatcccatatcgcccgccccggaaaaacagtaactgcgatcgccgccacgcttgagcgcgacggtcagttggtacgtctgggcgccatgctctggttcgaaggcatcagctccagcgcaacggacatgaagaagttgtggctatttagcgaggcacccgaacaaaccctggagcactggctgcacctgcatcacgaaggcggcatgcgcgcactacggcagatggacaaggacagcaccggcatctggacctactccagcaagaaggccttcctggcccggctgcgcgactacttcgaggttggcgagaacgccttcactctgctcaaccgcgccgcgggcctcaaacagctcaacagcatcgacgaaatcttccgcgagctggtgctggacgacaactcggccttcgagcgcgcagccgaagtcgccgccagcttcgacgaccttaccggcatccatcaggaactggaaatcgcccgccgacaacaacgctcgctgcaaccgatcgccgatggctggcaacgttatcaggcgcagcagctacaactggaggaccagcaggcgctcgatgccatcctgcccgtgtggttcgccgaacaggcccatcaactgtggcaggcagaaaccagcaggctggacgctgcattcagacaggcaaagcaggagcaggaccaatgtcagcagcgcctggatgaacagaaagggctggtcgaccggcaacggcagctttacctgaaagccgggggggctggcatcgatcagctcagagggcgcatcgccgaatggcaaaaattccgtgcccgacgagagctccaggcaacccaatatcagcggctggccagaaacctcaacctggcggacgagctttccgcgacggccctgcatgccaaccaggaaaaggccgtgagcgactacagagcctggatgcgcagatcagcgcagcacaggagcaggccttcaaggcgggggttgccgaacaggcgctga

SEQ ID NO: 361110 - DNA, 246 bp, Pseudomonas aeruginosa
atgccaaaccccaagcaaacgtcctcgggcgtcgccaagcaggcggcggaaacgctgcggaacccgaatgcctcggccatcgccaagagtctcgctgggtctgtcctttctcagtccacttcgtcaaaagaaactggaaaggccatggaggcgaaagcgtctaaggtgctccagtccgagaagtacaacgagaccaccaaggctctcgctgcctcagccctctctcagtccaacaagaaactctga

SEQ ID NO: 361111 - DNA, 267 bp, Pseudomonas aeruginosa
atggctgtatatctcatcacctatgacctcaataatcccgggcagcggcatagccagattctgaaggctgttaaggaatacccttgggcccggctctcagaatcttcatatgccatcgaaagcacagcctcacctcaacaggttttcaactcgctatccagttatctggacaagaacgacaccctgtacgtgatcactctgtcttgtccttactacgggcaaggtcctcaagacgttaacgactggctatctaagaagctccgctag

SEQ ID NO: 361112 - DNA, 750 bp, Pseudomonas aeruginosa
atggcaattagtcaggctgaattgctgcgtcgcatgcgtgaagcgcaacgcaaagcacagcagcagttcaatcgtgaggttgatcgggtaaatcgtgagaacaagcggcaagttgaagctcacaatcgtcagattgctgcacacaaccgaaaggttcaggcgcagataaacacccataaccacaaggttgaagtgcacaatcgccgtgctgcacagcacaatgcaaagctcattgctgacctcaaccgcagcttacgctcgtccacgggctcgctccaatacaccgactcggagaggcggttagcggatcgggtacatcaggcggttgcactcgccgacccgagggaatacgactcgttcttgagctatgcccgaattgatggtgcccaggtggcgggtgagctgcgggcttatttggaagagcttggggtcgctgtttggtttgatgaggtagccattgttccaggccggagccagtcacttcagatggatgcaggcttgaggaaagctagaaccggtatagcgctgttgaccccggcatatctgaccgggaggttctggaccgagcgggagctgggggctctgctgaacaagtctactcttattcccgtgcttcacggcgttacgtttgaagacgtcaagcagtacagcgggatactgcctgatctcgctggctttacgactgcccatgattctgttgctgatattgccgaaaaaattgcagcggctgttcttcctattgaggaatag

SEQ ID NO: 361113 - DNA, 378 bp, Pseudomonas aeruginosa
atgccctcgttcagccgcccgcgtgtgagcaacgacaacgcctatgccgaggccttgttccgcacggcgaagtactgcccgctgtggccggagcggcccttcgacacgctggagcaggccaggaactgggtgaacagcttcgtggcctggtacaaccatgaacatcgccacagcgccctgaagttcgtgaccccggcgcagcgacatactggccaggcggaagagttgctgcgcaagcgtatcgagctgtacgaggcggcgcgtgcacggcacccggagcgctggagcggcaacatcaggaactgggtgctggcaccaatcgtgtgcctgaacccggagcgggaagcggtactgcagcaaacatcaaaggcagcgtga

SEQ ID NO: 361114 - DNA, 186 bp, Pseudomonas aeruginosa
atgatcaaggacgtctacagccggaagctggtggccaacgaggtgcatgaaagtgaaagcgccgagcaggccgcccagctgctacgccaggcctgcctacgtgaacagcgggcaggccagccgctggtactgcactcggacaacggcagcgcgatgaagggctcgaccatgctggcggccatgtag

SEQ ID NO: 361115 - DNA, 840 bp, Pseudomonas aeruginosa
atgcgccaacgctcccgtacaagtgcgctgaaggtgcccaagccacgcttcggcaaaacgggacttcgagactatctctactacctgttcaaccagggagagagtctcgaaagccccaaagctgcgctcgaccagatagcaggtcaagaagcgccccacctggatacttacgaagttgggcttatcgcctctacacaagcggaggctgatcggtttatggggcttgttgaaggagccatgcacaagcacctatcccgcccgacaaggcagcgctttacggcttacgggctggatcaggcatggcgaccactgcggctatttgatgaggcccattggattcatggcggccccacctgcccactaccacaggagctcctggcgagcctaggcagcatcgtgcacatccatctgctagagcaaaacgatacaagactaccgtctcgatttcgcgcctatcgctggagctcagaaagtgacttggtagagttttgggcaagcctatacctctcccgcgaaatgagctggttcttagagctggactgggaaagctactttatgtggcagccacatgttgatcgcatcgccacagtgagtgtcggctggggggcggcacctagcgcagctgtgaatgctctgctggcatcagcagagacgacgaatccaggccacttcgatggtgagatcttgatcattgaaggtggtatcaacacacgcatcggagattacgtcgatatcgtggatacgctggagcgaagcctcgaactggactttgtcaccactggctgggtaagcctgaactattcgggctatggtcttaaactcctgaggtttagccattga

SEQ ID NO: 361116 - DNA, 1020 bp, Pseudomonas aeruginosa
atgtcgcacacgaacaaggacagaagtgtggaacagctgcttcgccatgaactcattcttggcctactcccgaacaaggaaagcgctctcgatagcaacgccattcaccaacgagtagccaaccagggcgtcctggttgataagcgcaccattcagcgtgacctgagcgagttagaacagaaatttccccatgtgcacagcagacccaggggcaaagccaagttgtggtgggcagaaaagtcactatcgcgactgagcatgctgccaacagatgcaatgaacctcgtcatgatcatggatcacgcggctaaattcggaatggcggtgcaggtagcaaacctggcccccctgagggattacgcgatatctctgttgaaaggaaaccggcccagccaagactgctcaggcaaggtcatcagcaacacccgcttcgttgtcctggaaccaggccaggtgaagccagaggtactggaggttgtccaacaagctcttctggatgacgcatctatcgaagcgctctacctcaagcgcggcgccagtgagccacgaacgctacatatcaaaccactgggtctttcctaccaagactccaatatctatctcgtatgtattttcaaaggcttgcacgatggaaagctggcatccctccccctgcatcgctttcaatctgccaagactacatgggaagacctaaaggctcctgacggttttgagatgaactcgttcgaggtcaagcgcagcctgatatcccagaaatctgagcatccaattcaactgaaactccgcatttctcaaacgctctacgaacgcttggacgagaatgcgctcacttccgatcagcagctacaccccgctgctgacggctggtggctgatgacaggcagcctgcatctcagtcagggactggacctatggctgttaagccaaggcgaacacctagaggttctcgaacccattgagctgagagagcaaatcgctacttcggcgaaacggatggcggcgctgtacgaacaaggttaa

SEQ ID NO: 361117 - DNA, 762 bp, Pseudomonas aeruginosa
atgccgtcgctgagagcgatggagctgagtgggcaggcgggtgttacctatcacgagatcagggcagccaatccgcttcttggattggttgatccgatcagaattcgaaatcgctatgtggagctgcgtgagcaggctctgttgggcgatgcggatgcgctcaatgatcttggttggtggtggctcaacggtttgcggctgaaagcaaatcctgcgctggccaggcggctattcaagattgctgcggtaatgggttccgctgaggcgttattcaacctcgctgagcaagccttttacggcaaaggcttggcggtcaatccaggcttggccatcgactattacgagcaggcgttcgagtcagggattatctgttctgcagaggcattgggtagcctgtatgagcgcggggatgaggatgtcattgccgatcatggcaaggccataagttggtacaagcgaggtgcggcagaaaatgactcgatggcgtgcttctcgcttggtaggttggcactggatgaatcatcgcctgagtatgatcccgcgcttggcttgtattggttacagtgggccgcgatgaaggggctggtgctggcgactgaacgacttgccgagttttacttctctacctttgagttcccgccggaccctgatggactgctgttccgcttctggagggatttggctattagtcagggcagtgcttgtgcaatggagctccatgatatgggttctgatccccaatcaacatgcaaccgcgcttaa

SEQ ID NO: 361118 - DNA, 1533 bp, Pseudomonas aeruginosa
atggaagtagggggctatttggaccgaaataaatttctcgcacagccggatgttcgtgggttcatcgattggttatgtctgaatcttgctgaccttaatgtgcacctgcgcttcaacccaagccgattcgtaagaggagggattgataggcaggtggtcgggatcgaggaggttcatgctctctactgttgggaaacaagctggagtgactatcagacggggcggttggtaaggtctgacgactggaagagtacgagcatctccctcaatcttctgcgagaccgactgctgactgccatggccaatggctgcgaggccaccacttacaaggcctgccgagcagtgctgaactggggtggcgtccgtggtgcggttccttttctgaatcgtttgcagcaacagggaaaactggtgcagtacctcgatagctgccgttcgttgtttgtcctaaatggcagccaaacgctctctcagttgaataaacacagcatttggcgcttcgatgcgggtttgaccaagattcattcgctgctcgatgccactggctcacccatctacgacagtcgggtcggtgcagctatcgcaatgctctacgccctttatcgccagagtgcgacagagagttctgtgttgaactttccaacgggggcggcgcgaggagatcaggtccgtgatccgggtgaacttggatttgcaaaggctcctcagttttttacccgcagcgtgcctggtgaacgctgggctcagagtcaagttgagctcggttggattgtgcgcgaagcgcttcagcgagccccccatctattctctggttcactggaggagcgttgtcgctcgttcgaggctgcattgttcatgattggctacgacctgcgctgccttgcactgccttgcattgcgactgtctcggcagacgtcattaccacagatccctgcagccgagagacggggcactctgaatcaaaaagcagctgcacttgggttccaactagttttcctttcccacaggttctagatgaatacctcgtgtgcagccgcatggagggacgtgctattgatttgtccgtttttcgtcagtggcagatcacagagaaaagtcgaaccccagagacggctaggtcctattgctttcctttaaggagcaccgagtttgatctcgtcagctacagccttgaagatcttgagctgattgcccgcggcggagaaactggtttgaaagtactcaatgcgggtgaggccgaattcgttgcaggagacgagcgtgagcaggtgtgtatggtatgtgcattcctttgcggtcgatcaaagcaattggccactcagtaccagatatctccccttgatattctggtgaaggcagggtttgccggcataggcagttcggcgaagctgcttcgtcgcatcgggcaggcagtggggcagcattttgacttgcttgacggtgaacagcccaccgagttgttcacggcattttttggtcagacgctggctgatctagatgagcagcttcggcgcactgtcgacctgctctga

SEQ ID NO: 361119 - DNA, 225 bp, Pseudomonas aeruginosa
atgtccgatgctcaaagcattgcgaaccagtggttctatgaggaaaaaggtgaacgcaagggcggcgccagcgaacaggagatgatcgagctgattcgctcggtcgcctcggctatggtagctcagtgtgggcacatggctttaccgagtggacgaagctggaaaacaccccgctgcggcaacacctgcagcacaccccgccaccgctggttggcagccaggtga

SEQ ID NO: 361120 - DNA, 201 bp, Pseudomonas aeruginosa
atgccaataccaccccctccgcttaccaccatctgcccccactgtggctggaagcgcaccagctttccaaccagcgacgccctcaagctgaatgtcgactggttctgccgctgccccatctgccagtacaccgaactggaaacccgtccggccagccgcgtggaaatcatgcgagagcgactgcggcagttcctccgctaa

SEQ ID NO: 361121 - DNA, 672 bp, Pseudomonas aeruginosa
atgtacagcgactaccgacgtcatgaactggagcagaaatccagcaagctgggaatagtatttgacgtaatggtcactggcgctaccggcgcgggaaagtccacgacccttaacaccgtttttcaaaagaaggtagcgcaagtcggtagcggcgttgaaccacagaccatgggtctgaacagttacaggctcaacaacgcattcaggctttgggacactccaggcctgggtgatggcagggttaatgacaagaaccacgccaaactcatcatcgacctactctataaaagctatggcgaaaataatgggttcatcgacctggcactcgtcatcgttgatggctcaaatcgagatatgggaacgatttacaagctcttgaacgacgttatcgttcccaactttccgaaagagcgaatcctgatagcaatcaatcaggcagacatggccatgaaaggtcgccactggaatccttacagcagacagcccgatgaaacgctcagggcctttctggaagacaaggccaaatcgctgctcgaccgggttcacgaagctaccggaataaaattgatcaagcccgtctattactcggcagagcatgattttcagaccgacaaactactggatctgctgatcgacaacatgccgactgaaaagcggcgcttacgactgtag

SEQ ID NO: 361122 - DNA, 981 bp, Pseudomonas aeruginosa
atgcaaaaagaaaccatcttccagaagctgcaaagatccattgagagtctacagataggcgactccgaaaagcagaaactgcgcgacagaatcaatcggctgaaaaaccaaaagacgaatctgctgatcacaggtgcaaccggcagcggcaagagttccacgatcaatgcactgttcggcaccgacaccgccaaagtcggaatgggcgtcgatccggaaacgatggacatccagaagtatgaactagataaccttgttctctgggacagtccaggcctaggtgatggcaaagaaaaagatcagcgtcatgcgaaaggcatcatcaagaagctcaacgagctggacaaagatggacgcccactgatcgatcttgtgctcgtcattctggatggtggcagccgtgatctgggcacgtcatatgagctcatcaatcaggtcatcatccccaatcttggcgagcatgcccaggaacggatcatcgtcgccatcaatcaagccgacatcgctatgaaaggccagcattgggaccacgaaacgaaccagccgaagccaaaactgatcagctttctggatgaaaaggtacgatccgtcaaagagcggataaaagaagcaacaggcgtagacgtagatcctatctactactgcgcaggctacaaggaagatgacgaacaacagaaaccttggaacctatccaagctgcttttcctcattgttaacagcacgcccctagaaaaaagactgccttatatggacaacatttctgctgaccaggaaatgtggaaggatgatgacggcctgaaagactataaaaaggaagttcagcgaagcttccaggaggttgccagccacgtagcaaagaatgtggttgcaggcgcagcagctggtgcggcgctgggctcagttgttccggtgatcggcactgcgatcggagctgcagtaggtggcgcggccggtttttttgccggcctcctgggattctag

SEQ ID NO: 361123 - DNA, 1104 bp, Pseudomonas aeruginosa
atgagcacaccagaaatccagaaacaaattgatgatgcgatcaaagatgctgtaagaggatctggcaaagtgaacgtaatcgttgcaggcaagaccggggttggcaaaagcacattgatcaacagtgtgttccgtggcgaactggcaaaaactggctccggacaaccggtcacacaacgaatagaagaaatttccaaggaaggccatccgattgtaatcattgattccaaaggtctggagctcaaagattacgaaaagatcatcagcgaactgcgcgatgagatcactgagcgctcacagcaccatgacgaaaacaaacacattcatgtagcttggatttgcatacacgaagacggccgcagaattgaagaggctgagcaacacctgtgtgagatgctcaaagagaaaggcatccctgtcattgtggcaattaccaagtcgcgctcagacaacggcttccgcgagcaggtcagggcagcactgccgagcgccaaagccgtcgtgccggtcagagcgatccccgagcaaattgaagatgacggcgaagtcatcacgctcaaggaaaaaggcatcaacgaactgataaccgaaacagccaaactcctgcctgatgcaaagcagagagcctatgccaacgctctcaactctcggcataccgcatcgaccaagctgaaaatcgaacaagccgaacgtgaagtcaatattgctgccacggccgccgctgcagctggcgcaacccccattccctttgccgacgccgcacttctggtaccgatccaggtcggcatgctggcgaaaatcggcattacgttcggcatggaaaccagcaccaccgcactaacgaccctcgtaacctctgcactgggtgctggagctgccaccctggcaggccgcactgtagtaactgggatactgaagatgatccccggcgtcggaaccttggcgggcggcgctattgccgcgacgactgcagcagctcttaccaaagggctgggcgctgcctatatctcaattctgaccagtttcatcgagaagaacccagggaaaccgctggacatggatctgattgccagagaactgaagaacaagctctcgttctcctag

SEQ ID NO: 361124 - DNA, 768 bp, Pseudomonas aeruginosa
atggacacgcccacggcactggcactgtatctcgcggaaagccacctaaagacactattgccacagagcgttctggatcagctcggcccccaattccgcatggcccgcgattacctcgacaacctagaaaacaatggcctggcgcactgggctcgcagggttcgagcccacccaaatggcaagtccttgcaacctgcacagatcgcctcgcaggtctgggagcaaacctccaccgccctgctggaacacaaacagctgcagatcagctacctgagccgcagcaaaaccgaactcaagcagttattgatccaccccgctggactagtgtcacgccacgccatcagctacctgatcggcagcgtcgacggctatgacgacctgcgacagttcgccctgcaccgcatccaccaggccgaatgcctggaggcagcggcccactcccaccacgacttcgagatcgacagctacatccgccaagatctcaacaccacagcacccattgagcaggtagaacttgtcgcggatgtatcaccgcagattgcctggctgctcggtgaaaccccgttgagcccgaaacagagtctggagccgctacccgatagcgactggcaacggctccgcgctgtcgtgccggatgatcaggagacactgtggtgggtgtttgggctgggggagaacgcgagggtttgggagccgcaggggtggtgtaaagctatcagcgacaaagcaaataagctgggggccttgtatgcgcatcaacggtcataa

SEQ ID NO: 361125 - DNA, 993 bp, Pseudomonas aeruginosa
atgagcgcagatgcccccaatcccaacgctccgcagccctgccctatctgctctgagactcgagcgctctccgagcatttaattgaattagcactcgcggcgaactacttagggaataagtctacttatacaggtgatcacggcacagcgacgatccggacagagacaatcggagattggttccagttagccgcgcagctagaaagcgttaaaatcaatacatggaagtttgaatctccctacgcagcccttcactgtgaaacttgggcagataacatcgacgaccattcgaagcactatacaaaacacgcgacagcgctcacgcgattcatctttgtctgcaatgcactggaagaggcttatcgcttcattgatcacctctatagccctatggcggctactaagggtatagccaaacgccagctcaaaaacagcagcagcttgcgggcagtcacgctggtggatgagctctttgaaaaaatcggcactgcagcgctccctctgcatttcgagcaccactgtggaaactttatagcgctattcaatcgatacaaaacggagcatagcgctacagtaggcggaatcaatgccggcgcggagaaacttccgacctacgcacttcaactcgtgcgcaatcttcgaaaccatgtcgcgcatggcacgtttccccttggccctcccgaggactacggtggctatgaggacagcgaagaactggtgctcatgctcaggcatgcgtgtcgagtggcggctctctacatacagattatccttaggtggttcagccccggatttgagtcttgggactaccattccatccaggatgcccaaagcaaagaatttgatcgctttcttgaaaaatgcacactcgaatacgttttggatctacatctgaaaagcgatttcgctcttcaccaagacccttacgtttgcggagaggaagatgacgacatagaagtcgtcatccatcaaccaggttcaagtcagaagtag

SEQ ID NO: 361126 - DNA, 297 bp, Pseudomonas aeruginosa
atgaacgaccgcgaactactcgaactggcggcgcgggcggcggggattgatcgtgtcctggctgaaccgatcaatttcagtactggggttgaatattactggaacccgctcaccgacgacggcgacgcgctgaggctggcagttctgcttaatctggagatccatagcccaaagagcaatccgacagtcatgtttagaactgctgaaaacgatgtcttctatcaggacgcgtgcattcgactagccatcactcgcgccgcagccgagatcggcaagtctatgggaggtgtggaatga

SEQ ID NO: 361127 - DNA, 555 bp, Pseudomonas aeruginosa
atgagcattgactggagcaaggcgaacggcagcgcagtagcagcactgatcgccaagaagaacaacatccactacccaggttttgagtttgtttctggttatcaccggaccggctgcatgattcgcgcgacatccgcagatgatgggagcccactttctgccccagaggatgtatgggaaatagtcgagcgccctgtcacatggaacggccagggcctgccgccggttgggacggtgtgcatagtcgagccgcacaacaccatgtgggggttcagttcgacctccggctatgagcgcaagatcctggcctactacggcgaatatgtatggctcgggcacgctgaaactccgctcgaaaccacgcgaattgacaaggtcgatttccgccccatccgcatccccgagcagatagccgccgaggagcgcgaagcggccatcgtcgcgatgctagatctcgacccgccgcacgaaaacggcctcggccttacctcgcgtaggcagttctgcgaaacgctctacgacgccggctaccgccgccaggaggaagggaaatga

SEQ ID NO: 361128 - DNA, 1275 bp, Pseudomonas aeruginosa
atgacccaatcgtcatcaacccccgtatcggctgagcagtcggcgctcaagcgctttctggccagcgaggcggccggtggcgtgctgctgatgatcgccgccgcggctgccgtactggtggccaacagcccattggccagcgcctatcagcacctgctgcacatgcccatcggcccaacgctcagtgacaagctcggccccatgacgctgcacctgtggatcaacgatggcctcatggcgatcttctttctgctggtggggctggagatcaagcgcgagttggtagatggacgcctgtcgtcctgggagcaacggcgcctgcctgcgctgccggcgctgatgggcatggcagtgccggcgctgatctacctgacgctgacccagggcgacccggtactcagcaatggctgggccatccctgccgcgaccgatatcgccttcgccatcggcgcgctggcactgctggggcgccatgcgccgctgtctctgaagctgatgctggtctcggtggccatcatcgatgacatgggggcggtggcgatcatcgcggtcttctacacgtcgtcgatcaacctggccgccctggtcgcggcagcggcgatcatcggcgggttgtacgtgatgaaccgcatgcgcgtgatgacgctctggccgtacctgatcggcctagcgctgctgtggtacgtgacgctgctgtcgggtgttcatgccaccatcgccggcgtggtgggggcgttcctgatcccctacatcccgacgccaggccaaccggatgcagcgaattcgcccttgcacaggctggagcacggtatcgcgccgtgggtgggcttcctgatcgtgccggccttcgggtttgccaatgccggggtttcgttcgccggtatttccctagcggaaatcgtggcgccgttgccattggggatcgcggccggcctgttccttggcaagcagcttggcgtattcggcggggtgctgctggcggtgaagtccgggctcgcgaccaagccccgcggctgcacctggctgcagatttatgcgatttcgatgctctgcggcattggcttcaccatgagcctgttcatcagcggcctggccttccccggccacccggaactctttgaagagtcgaagatcggcatcatgctcggctcgctgctttccgcccttgtggcctgcctgattctgcgtttcgcccccaaggcgcacgaccaggttcaggaagaagcagggcaggaggcggagattcttcaggacggtgacgtcaagcgcatctag

SEQ ID NO: 361129 - DNA, 780 bp, Pseudomonas aeruginosa
gtgtacgccgtgagaaccatcaccctccttggcgtcggccccgacaaaaagccgctgcgcttcggcgccaaagggaagctgctgaacgtgcctggctggagaaaactgctgcagggcgatgatgccgaggagcaaaagaacgaaacgccttcaagccccatcccggcgctggagccaggccagatactcaaggtctacagcggcgaggtcctggagaagaaaaccacccctcccaaacgcttcaccgatgccagcctggtgggcgagatgaagcgccgcgggattggtcggccatcctcctacgcctcgatcgtgaagaacatcatcgacaaaggccaggtgcagatgaaggggcgaagcctggtccccggcgagctgggcgaggccaccatcgcgctcctggagcacaacttcagcttcctcagcctcgatttcacccgcaacctcgaggtcgccttggaccggatcgccaacagcgaggacacctacatgaacgtggtccagcagttctaccagctcctgcagtcagagctgcagacgctgcgcgcgcatcccagcgcacagggcgacccgcgagcaagctctaccgccagcgctcccacggcgccggccagtgacttcctctgcggcaagtgcggtctgcccctggtccaccgcaagaaagccggcaagggcggcttcgacttctggggttgcagcggctaccgcactaccggctgcaaggtcagctaccccaccaaaaaaggccaacctgacgtcgatagcccccgtggtctctag

SEQ ID NO: 361130 - DNA, 597 bp, Pseudomonas aeruginosa; identical to SEQ ID NO: 323044

SEQ ID NO: 361131 - DNA, 288 bp, Pseudomonas aeruginosa
atgccgggagagtcggaaaagatcgctcctagtgaactaggcgcctactacgacgcgtcattatttctcgtcgctgcatcgctcagacagagcatcagccttggcgcgttgttccatagcgaaagcgtgctccgccgggagcaagtcttcagccggttggccgtcatctcttacaggaatttgcttttgcacccgatgggcatactccaaacagcgagcattctctcccttttcagcactgatcatggcaagtgtgttcgtcaagtatatcttggcaggataggctag

SEQ ID NO: 361132 - DNA, 891 bp, Pseudomonas aeruginosa
atgaaaggggttcgtcgcccaatcctgcgctaccacggaggcaagtggaaacttgctccctggatcatccagcacctggcgccacatcacacttacgtcgagcccttcggcggcgcagcctccgtcctgctccggaaagcccgcagctacgccgagatctataacgacctcgacggggacgtggtgaacctgttccgcgtcgcgcgggatcacggtgaggaactgcgccaggccctggcgcttaccccgtttgcccgggaagagttcgaagccagctacgtcgaaacaaccgatccgctcgagcgcgcgcggcggatggttatccgaagcttgcaaggtttcggtaccgcagctgcgtccggcgaacgtacagggttccgctcaacctcgaccagatccggtaccggacctgcactggactggcgcaactaccccgacacgctgaccgcgataacagaacgcctgcagggcgtggtgatcgagaaccgcgacgccctcgcgctgatggagtatcacgaccggccgaatacgctgcactacgtggacccgccctacgtccactcgacccgcagcacgaaggtgcgccacaacgccaccggcaagtcgtaccggtacgaaatggacgacaaccagcacaaggagctggcggcactcctcaaacggctgcgcggcatggtggtgctctccggatatccctgccccctctacgacgagctctacatcacctggcacagagtcgaccgccacgcctatgcagacggctccagagagcgaatcgaatgcctctggctcaacagcgcagcgcttgaggggttggcacaactggacttcttccaggccagtaatgcgtctccatcgccctcattccagaccacggccgctcattactga

SEQ ID NO: 361133 - DNA, 633 bp, Pseudomonas aeruginosa
gtgaacgaatcgctggaggtcaccccgtcgcgtcacctggacctcggccagttgcacctggccgcgcggatcaacatttccgagtggcgcaacaacaagcagtcgttgcagtacatctcgttcatcaagggcaagggcgggaagaaggtcaccgactacttccgcgatttcatcggctgccaggagggcatcgactcaccgggcgaaacccgcgccctgctcaaggccttcagcgacttcgtggagagcgagggcatggccgagcagcaggcccgcgagaaaaccgagacgctggtcgactacgccacctcccaggcgcgcatcggcgagccgatgaccctcgacgcgctttcggaactgatggacgaccagcagccgcgggcgttctacgactacatccgtaacaaggactacggcctgtcgccggaaatcccggcggacaagcgcaccctcaaccagttccgccgcttcaccggccgcgccgagggcctgtcgatcagcttcgaggcgcacctgctgggctccaggatcgagtacgacgaggagcgcgacacgctgcggatcagcagtctccccactcagcttcgcgaccagctcaagcgccgcaaggcggagcaggagagcacgtcatga

SEQ ID NO: 361134 - DNA, 165 bp, Pseudomonas aeruginosa
gtggactctgagagtcaggtgacgatgaacatcatgaccttcatggccactgagctcaaaaagagcccccgacaggcctgtgtgcgggaacagggtgtcgggggcggggaacacgccggggatatacacgtaagcttccccgtcaagcaggcatttcaaaagtag

SEQ ID NO: 361135 - DNA, 207 bp, Pseudomonas aeruginosa
atgctgttgctgtcgctgctgcaggccgtggtcgccgctgcgctggtgacttcgccggtgatcgcggtaccgctgttgatcttggtctgctcgaaggtgttcttcgcgatcttggtacttagggtgatgcaggcgtccttgggcaacttgctggtggtgatcgagaagcccatgccggtggacgagacagtgaccgatccgccgtag

SEQ ID NO: 361136 - DNA, 327 bp, Pseudomonas aeruginosa
gtggaatactcctacatcgactgcaaagtggtcggcgcccaggctgaaaagcttgtccgccgttgcaaggaagcagtcgaggccaagaagaaggttctgatttccttccgtatcggcgatatctgggcggatcccttcatccaccagaaaggcgagaaacaaggcaggcccgacgcaagtctcaaaggccggctgctcttcatctcctggatcaaagtagatggcaccaccgtctacgatgcgaaggaagaagctgaaaaagcccagcaaggccaaggcgaaccgcaaggtgaacccgcagcccctgctgaacaagccgctgcttga

SEQ ID NO: 361137 - DNA, 255 bp, Pseudomonas aeruginosa
atggcccgagaaaccgaagataagttcgttgtccgtatgcccttgggcttgcgcgatcagctaaagcaaaaagccgcgcataaccaccgctcggccaacagtgaaatcgtctaccggctggagcgcagcaacgagctcgaagaagaactcgcgcgagcaaaccgaatggtcgacgagctcttcgccaagaaccagcgtctgcaggcagagctggctgcggcgaacacgcctcaggttcaggtggcggaggcatga

SEQ ID NO: 361138 - DNA, 177 bp, Pseudomonas aeruginosa
atgttgctgttcttcatcccggcgctgatgagcctgctcgactacggcgcgctgctacgcagcgagggctggcgcatcctcctggtgatcatgctcagcaccctgctggtgatgctggtcaccgcggtgtcggtggagtggatgtgccgctggagggcgcgccatgagtctcgataa

SEQ ID NO: 361139 - DNA, 687 bp, Pseudomonas aeruginosa
atgagtctcgataagcaagccctgttctggttggcggcgaccgtcggcggctacctgctgagccgccagctgtaccgccgggtgaagtggtactggctgtcgcccatcgtgttcgtcccggtgctgctctacgccctggcgattcccacccatacccgctacgccgactacgcccgcgacaccaattggctggtggcgctgctcggtccggcgacggtggccttcgccatcccgatctggcagcagcgcgagctgctgatgcgccactggccggcgctgctggccgggatgttcgccggcaccgcggtggccatcggcagctcctgggcgctggcccaggccctggcgctggacggccaggtcacgctgtcgttgctgccgcgctcgatcaccacgccgttcgccatggagatgtcccacgacctgggtggcgtgccggaactgaccgccgccttcgtgatgatcaccggggtgttcggcgcggtgatcggcggcaccctgctgcgcgtcctgcgcttgcgcacgccgctggcccgcggcgcgctgttcggcgtcggcgcgcacggcgccggcaccagtcgggcctacgagttcggcggcgaggaaggttcggcggccggtctgctgatggttctcaccgggctgttcaacctgctggtcgcacccctggtcgcccactgcctgtag

SEQ ID NO: 361140 - DNA, 780 bp, Pseudomonas aeruginosa
gtgaccgccgttcactccctgcccgccgatgtgcaagcccaggtctccgccgccgaatggcagacccgcgtcgatctcgctgcctgctaccggctggtcgccctgcacggttgggacgacctgatcttcacccacatctcggccaaggtgccgggcaccgaggacttcctgatcaacccgttcggcctgatgttccacgagatcaccgcctccagcctggtgaaggtggatgccagcggcaagaagctgatggacagcccctacgagatcaacccggccggctacaccatccacagcgcggtgcacgaggtccgccatgacgtcgaatgcgtgctgcacacccatacctccgcggggatcgcggtgtcctgccagaagcagggcctgttgccgctgtcgcagcaatcgttgttcgtgctctccagcctgtcctaccacgcctacgagggcgtcgccctgaaccatgaggaaaaggcccgcctgcaggccgacctggggaccagcaacttcctgatcctgcccaaccacggcctgctcacctgcggcggttccatcgccgataccttcctcatgatgttcaccctgcaacgcgcctgcgaggtacaggtgatggcgcagagcggcggcgccgagctgatccacatcccggggcagatcctcgccggcgcgcgcgacatgatcgccggggtgatgcgcagcaagaccggcatgggcggccagctcgcctggccggcgctgctgcgcaagctcgaccagcagaacccgggctaccgccagtga

SEQ ID NO: 361141 - DNA, 897 bp, Pseudomonas aeruginosa
gtgaccgcggcgctgcccggcattcccctggaggcctggcggaggcgcggccgcaccctggatttcaagggcttcccgatccgctactgggaagccgggcagggtcggccgttgctgctgatccacggttttcccagcgccgcctgggactggcactacctctgggagccgctggcgcagcgctaccgcgtgctggtctgcgacctgctcggcttcggcgattcggccaagccgcgcgcccatcgctacagcctgctggagcaggccgacctgcaacaggcgctgctcggccgcctgggaatcgacgagccgctgcacgtgctggcccacgactacggcgacagcgtcgcccaggaactgctcgcccgccatcacgaaggccggctgcggctcgcctcctgcgtgttcctcaatggtgggctgttcccggaaacgcaccgcccggtgctcagccagaagctgttgctgagcccgttgggcgggctgttcggccggctgttcgaccgccgcgccctggcgcgcaacttcgccaaggtcttcggcccgcgcagccagcccggcgagaccgagctggatgccttctggagcctgatcgaaagcaaccaggggcagcgggtgatgcatcgcctgatccgctacatcgtcgaccgccgcgagcagcgtgagcgctgggtggcggcgttgcagcacggcggggtgccgttgcgggtgatcgacggcgccgtcgacccgatctccggggcgcacatggtcgagcgctaccggcaactggtcgccgatgccgactgcgtgctgctcgatggcatcggccattatccgcagatcgaagcgccggcggcggtgctcgaacattacctggcgtttcgcgcccgactggatgattcagagttttcttaa

SEQ ID NO: 361142 - DNA, 294 bp, Pseudomonas aeruginosa
atgcacgatcccgtttctcccttgcgcgtgttcgacgagggctcctggttgttccgccagatggtgcaggcgcaaccgttcatccgccagtccgggatggtcctcgccgaactcggcctgctgctggcgctcgggctcggctacctgtgctggcaggaaggcagtcgctggtacgccgtcggcgccggcctcgcgttgctcggcagcctgctgctggtggtggtccggcacaactacgactggtggctgttcaagctcggcccgcgtggccggctgtacattccgttcgactga

SEQ ID NO: 361143 - DNA, 912 bp, Pseudomonas aeruginosa
atgagcgatgccctgcgtttcgacgaccaagtcgtgatcgtcaccggagccggcggcggccttggccgcgcccacgccctgctgttcgcgaagcatggcgcccaggtggtggtcaacgacctcggcggcagcacccatggcgaaggcgccagtgcctcggcggcggacaaggtggtggcggagatccgtgccgccggcggcaccgcggtggccaaccacgactcggtcacggacggcggcaggatcgtggagaacgcgctggacgccttcggtcgcgtcgacgtggtggtcaacaatgccggcatcctgcgtgacaagaccttccacaagatggaggacgccgactgggacctggtctaccaggtgcatgtcgaaggcgcctacaaggtcactcgcgccgcctggccgcacttgcgcgagcaggcctacgggcgggtggtgttcacctcctcgacctcgggcatctacggcaacttcggccagagcaactacggcatggccaagctcggcctctacggcctgacccgcaccctggccctggaagggcgcaagaacaatatcctggtcaacgccatcgcccccaccggcggtacgcggatgaccgaggggctgatcccgccgcaggtcttcgagcagctcaagccggagctggtcagcccgctggtggtctacctcggcagctcggcctgcgaggatacctcggggctctatgaggtcggcggtggctggatcggcaaggtacgctgggaacgcagcctgggcttcggcttcgatccgaaggccggcttcgacgccgaggacgtggccgcgcactggcagcagatctgcgacttcgagaacgccgcgcacccggcggacaacgtcgaggcgctccgtgaaatgatggccaacctgcagaagcacgcgctctga

SEQ ID NO: 361144 - DNA, 771 bp, Pseudomonas aeruginosa
atgagtgtcatcgtcgaacgcaacggcccggtcaccaccctggtcatcgctcgcccggagcggcgcaatgcggtggaccggccgaccgcccaggccctggccgacgccctgcgcgagttcgaagcggacgatacggcgcgggtcgcggtactcaccggcagcggcggcaatttctgcgccggcgccgacctggcggcggtagccgaggatggcgagcggcgcaatcgtctggaggcggagggcgacgggccgatggggccgagccgcatgcagctcggcaagccgctgatcgccgccatcgaaggctatgcggtggccggcgggctggagctggcgctgctcgccgacctgcgggtgatggccgaggacgccatctgcggagtgttctgccggcgtttcggggtgccgctgatcgatggcggcagcgtgcgcctgccgcggatcgtcgggcagggccgggcgctcgacctgatcctcaccgggcgtccggtgaaggccgacgaagcgttgcagatcggcctggccaaccgggtggtgccgagcggttcggcgcgagccgaggccgaggagctggcggcggaactcgccgccttcccgcagacctgcatgctcgccgaccgcgccagcgtatacgcgcagtgggaactgtccttcgacgtggccctggccaacgaattccagggcgggctggcggtgatcgagagcggcgagaccctggagggcgcgcagcgcttcaaggacggcgaggggcgccacgggcgcttcgagtga

SEQ ID NO: 361145 - DNA, 345 bp, Pseudomonas aeruginosa
atggccctgacccttctgaaaaataccgccggcgccgatcttggcgccgccagcccggtcgcggtgccccttggcgagccggtcgcgcagacccgcgcctacgccgtggagcgcaccgaccaggtggaaaccggcatctgggaatgcacccccggacgctggcggcggcagatcgtcgagcaggagttctgccacttcctgcaaggccgctgcaccttcaccccggacggcggcgagaccatccgcatcgaggccggcgatgccctgctgctgccggagaacagtcttggcgtgtgggatgtgcaggaaaccgtgcgcaagagctacgtgatcatccaccgctag

SEQ ID NO: 361146 - DNA, 1407 bp, Pseudomonas aeruginosa
atgtcggcctggcgccacctcagcctgtggatgaatcaactggacgatccgctcgaagcgcgcccgtccctggaagaatccctcgaggtcgacgtggccatcgtcggcgccggctacaccggcctctggaccgcctattacctgaagcgccgggcgccgcagttgcgcgtcgccatcgtcgaggcggaaaccgccggcttcggcgcctcggggcgcaacggcggctggctgatgggcaacctgctcggcgaggacggcctgctcgccggcttgccgccggaacggcgccgggccggctacgacctgctgcacgggattcccgacgaggtcgcgcgggtgctgcaagaggaaggcatcgactgcgactaccgcaagggcggcgtgctctactgcgcggcgcgctacccggaacaggaacgccgcctgcgcgcctatctgcatgatctctatgccgaaggcctggacgaaagcgactaccgctggctgacgccgcaggaactcgaccagcagttgcgcatccccggcagctacggggcgatccattcgccgcactgcgccaccatccagccggccaggctcgcgcgcggcctggcccgcgcggtggagcgcctgggcgtgcggctgttcgagaagagccgggtgctgcactggcaacgcggcctgctgcgcaccgagcgcggcgaactacgcgccgaatggatcgtaccggcagtggaaggctacgccgccagcctgccgccgctgggccactaccagttgccggtgcagagtctgctggtggccaccgagccgctgccgtcgtcggtctgggcggagatcggcctggagcgcggccaggccttcagcgaattcagccgccaggtcacctatggccagcgcaccgccgacgaccgcctggccttcggcgcgcggggcggctaccgcttcggcggcaagctgcgcagcgacttcagcctcgacgacgaggaagtcggcctgcgtcgctacctgttcggcgaactcttcccgctgctcaaggacgccaggatcagccacacctggggcggcaacctcggcatggcccggcgcttccgcccgcacatgttgctcgaccgcgccagtggcatcgccctctccggcggctacggcggcgaaggggtcggcgccagcaacctcggcggccgcaccctggccgcgctgatcctcggtgaggacagcgagctgctgcggcagccctgggtgctgggcgagcgtccgctggacagcctggcccgctgggaaccggaaccctgccgctggctcggctacaacgcgatcatccgcagtttcgtccatgaggaccgggtccttgccgacccgcacagcgcgccctggcgccgcagcctggcgcaaaccctcgcggccggcatggaaagcctgatgcgctga

SEQ ID NO: 361147 - DNA, 807 bp, Pseudomonas aeruginosa
atgcagcccgaacagaccattcccgccgaccgcgatctcgccgacgccacccgcgagacggtcatgcgttatcacctcagctggaagcaccgcgacatcgacgcggtgatggcgctctatcatcccgaggtcgaatacaacgacttcttccagaaccgccggatgcgcctggccgatctccgcgagtacgtcgaggcgaccatgcccaagggccccgacgagtcgctggagcacaccgaccgtatccgcttcgacggcgataccgccttcatccagtaccgcctgcgggtgaccctcagcggccgcctggcttcgttccgcgccagcgaggcgatcaccgtgcgcgacggcctgatctggcgcatcaacgaatacgcctcgctggtccacgaaagcggcggcggagcccaggccggcggcgacggccggccgccggccagccgcctggggctttcggccaagcagctgagcctgctggcacgcgacctggagcactacttccaacaggcccagccctatctcgatccggacctggacctgacccaggtggccaatgccaccggctatacgcgcaaccagatttcctacctgctcaaccaggtgctcggcctgagcttctaccagtacgtcaaccagacccgcctgcaacacctgctcggccagctttccggcgagctgcccggacgggtcgacgaactggccttcgccgccggcttcaattcgctgtcggccttctaccgctgcttccgccagcacaccggccagtctccgcgcgaatacctgaagcgcctgtcgtcgcgccgctga

SEQ ID NO: 361148 - DNA, 1758 bp, Pseudomonas aeruginosa
atgacaacaacaaaaaggcgcggaatcttccctctgcacgcactcgctgcggccacagccctgggttgcgccacccaggcctcggccgtgtcattcaacatcggggagatcgaagggcaattcgactcgtcgctgtcggtgggggccagctggtccatgcgttccgccgacaaggactacatcggcacccgcaacggcggccacgcctcgtcgcagacctccgacgacggccggctgaacttcaagaagggcgaaaccttctcgaagatcttcaagggcatccacgatctcgaactcaagtacggcgacaccggcgcgttcttccgtggcaagtactggtacgacttcgagctgaaggacgaacaccgcctgctctacgacatcgacgaccacaatcgcaaggagggcgccaagtcctccggggcgcagctgctcgatgccttcctctaccacaactacagcatcggcgacctgcccggcagcgtgcgggtcggcaagcaggtggtgagctggggcgagagcacgttcatccagaactcgatcaacagcatcaacccgatggacgtcgccgcgttccgccggcccggcgcggagatcaaggaaggcctgatcccggtgaacatgctctacctgtcccagggcatcagcgacgcgctgaccgtcgaaggtttctaccagttggagtgggaccagacggtgatcgacaactgcggcaccttcttctctaccaccgacgtggtcgccgatggctgcgagcggatggtctacgccggcagcgacttcgacccgaacccggccaacggctaccgctacctgccgcgcgccggcgatcgcgatgcccgcgacagcggccagtggggcctggccctgcgctggtacgcggcggagctgaacgacaccgagttcggcctgtacgcgatgaactaccacagtcgcaacccgtactacagtgtgatcgccggcaacggcctggccacctccgacccggtcaccgggcgctccaccggctattacttcatcgactatcccgaggacatccgcctctacggcctgagcttccagaccaacatcggcagcacctcggtggccggcgagctgagctaccggccgaacatgccgctacaaatcaacagcaccgacatgtcgatcgccgcgatctacccgaccaccctgttcggcaacccgatctacgacagcggcttcgccaccccgcgcgccggcgaggtgatcaacggctacgtgcgcaagccggtgacccaggcacaggtgaccgtcacccagttcttcgaccgggtactggcggccgaccgcctgaccgtggtcggcgaagtcggctacaaccacctcagcggggtcgacggcgacgacctgcgctacggccgcgacgccatctacggcatcggcgaactgccgaacaacgccttgtgcaccggcgcgctcaacgtggccaacccgcaggagtgcaacagccacggcttctacacccgcaactcgtggggctatcgcctgcgcgggatcctcgaatatcccaacgtgttcgccggggtcaacctgaagccgaacctggcctggtcgcacgacgtcgagggctacgggccgaacttcagcgagggcgccaaggccgtcagcgtcggcctcgatgccgactaccagaacacctataccgccagcatcagctacaccgacttcttcggcggcaactacaacccgatcaacgaccgcgacttcctcgcggtgagcttcggggtgaacttctga

SEQ ID NO: 361149 - DNA, 1371 bp, Pseudomonas aeruginosa
atgaaaacagcacgactcctgtcctccggggcgctggccctcagcctgctggccggttcggtgacggcggcggtttcgcccgacgaggccgccaagctcggcagcagcctgacccccatcggcgcgcagaaggaaggcaacgccgacggcagcatcccggcctggaccggcggcctcgcggccagcgccggcaaggtcgatggcaagggcttcctttccgatccctttgccgacgagaagccgctgttcaccatcaccgcgcagaacgtcgagcaatacaaggacaagctctccgacggccagttggcgatgttcaagcgctacccggaaacctaccggatcccggtgtacaagacccatcgcacggtggccctgccggccgagatcgacgaggcggtcaagcagagcgcgctgaacgtgcagccgatcaacgacggcaacggcctgtcgaatttcgagaagagccgctactacgccttcccgatcccgaagaacggtgtcgaagtgctctggaaccacatcacccgctaccgcggcggcaacctcaagcgcaccatcgtccaggccaccccgcagaccaacggcagcttcacgccgatccgcttcgaggagtcggtggcattcccgcagaacatgcccgacctcgatcagagcaaggcggccaacatcctcaccttcttcaagcagcaggtgaccgcgccggcgcgcctggcgggcaacgtgctgttggtccacgagaccctcgaccaggtcaaggagccgcgcctggcctgggtctacaacgccggccagcgccgcgtgcggcgcgccccgcaggtggcctacgatggcccgggcaccgccgccgacggcctgcgcacctcggataacttcgacatgttctccggcgccccggaccgctacgactggaagctggtcggcaagcgcgagatgtacatcccctacaacgcctacaagctcaacgacccgaccctgaagtacggcgacatcatcaaggccgggcacatcaaccaggacctgacccgctacgagctgcaccgggtgtgggaagtggtcggcacggtaaagccgggcgagcggcacatctacgccaagcgccacatgtacatcgacgaggacagctggcagatcgccctggtcgaccactacgacggtcgcggccagctctggcgggtcggcgagggccacgcgcagtaccactacgaccagaaggtcgccggctacaccctggaggcgctctacgacgtgatcgccggtcgctacctggcgctgggcatgaacaacgaggagaagcgcggctacgagttcggcttcaaggcctcgtccgccgactacacgccggccgccctgcgcaacgcaggggtacgctga

SEQ ID NO: 361150 - DNA, 2484 bp, Pseudomonas aeruginosa
atgaccgagccgaccgagctgcccgccgccttgccgcggctgccgccgcagcacctgccgcggccccgtttgcaccagccgctgctgcgcggcgaatgccgcctgcgactgctctgcgcgcccgccggcagcggcaagaccgtcctcctcggagaatgcgcgcggcgggcgccgcctggcgtgcaggtggtctggctggcgctgggcggggaagcgctggaccccgcgaccttccgccgccgcctggccggcgccctcggcttgcccgaggaaagcgacgaagcgcagctgtgccggcggttgcgcaacgcatccgcgctgtggctgctgctcgacgattacccacggcaccccgaccccgccctcgacgcctgcctcgatcgcctgttgagcgcggcctcgccacgggtgggctggtggctggcgagccggcggcggccgcagtgcaacctggcgcggttgctgctggaaggggagttgctggaggtcgacggcggcctgctggcgttcgatgccgacgaggtcgccgaactgctccgcctgcacgggcgcagcgccgatgccgctacggccgggacactgctggaacgcagcggcggttggtgcgccgcgttgcgcttgcgcctgctggtcggcgaagagacggccggaccgttgttgcaggaatacctccagcacgagttgctcgacgagctgccgccgccgctggccgacgccgcgcgtgccctggcctggctgccgcaagtcggtccggagctgttccgccggctgttcgaggagctgccccacgggctggacgacctgttggcgcggggcttccccctgctggccgatgcgaaccagcgctacagcctgccaccggcgatccgcgaggcctggcgcgaagcgccgcagcgcccgcagcgggacttccaccgggaagcctgcgaatggttcgccgaacacggcgagacccgcgaggcggtcgaccaggcgctggccgccgacgaaccggaaaccgccgccggattgttgcagaagctcaccgaggagcaattgctgcacggccacaacatcggcatggtcctggccctgcgcgacgaactgccggcggcgctgctggccagcacgccgcgcctggtgatcctgaatgcctgggcgctgctctacgccggacgcctggccgaagccgaggactgcatcggccagttggcgcgcttcctgccgatgccctcggcgtcccgccagcgggtgctgctggcgcaatggcagggcttgttcgggatcctcctgcactgccgcggcgagcgcggcgccgccgactacctgcgcgatgcgctggagcaactgccggaggacgcctggtcgcagggactgatctgccgctcggcgctgatgcaactggcgatgatcgaggggcggatggaccaggcgcggttgatcggccgcgatgccttgcgcctggcgcgcgagcacgacagcctgatcttcgaggcgctgatcgaactggagcgggcgcagtggctggagcagcgcggcgaactgctgcgcgcggaaggcgtcctcgatcgcgcccagcgctacctggaggacctcggccagcagggcagcccgatgctcggccggatcgccctgcgccgcgcgcgcctgtgcctgcagcagggccgcgaggtcgaggccgggcactggtatcggctggggctggagcaggcacgggagaatctcgatccctgggcgctctacggctacctgggactggccttgctggaggccgggcagggcgacctggacgcggcgttcaaccgcctgctggaggtcgagcggctgatgcagcagcgccatgtccccgatccgctgtatcgcggcgcgctgctgctggtcagctccgccctgaccctgcagcagggaaggccggcgcaggcgcgggagatcctgctgcgggtccgcgcctacttccagccgggacgggcgcgcctgtcgccgccctccgaaccggagctggaagcgcgggtagagcaccaattggcactggccgaactctacagcggcgaggcagccgccgccgaagcgcggctgcgcgggctgctcgccattctcgaggcgcaggggcggcagacgctgctttgcgaagtgcgcatgggtatcgccgagtgccagttcctctccggacaattgccccaggcccagcagaccctgcgcagcggcctggagctggcggagcggctgggcctgcaactgccgcagcggcgactgcgggatcgccagccgcaactgttcgccgccctgccgggggaagaagaggaggggctcagtccgctcagttgtcgggagctggcggtgctcggcctgatcgcccagggctgctccaaccaggagatcggcgagcaactgttcatttccctgcacacggtgaagacccacgcccggcggatcaacggcaagctcggggtggcccgtcggacccaggcggtggcgcgggccaaggccctcggcctgctcgcctga

SEQ ID NO: 361151 - DNA, 813 bp, Pseudomonas aeruginosa; identical to SEQ ID NO: 319325

SEQ ID NO: 361152 - DNA, 1026 bp, Pseudomonas aeruginosa
atgttcgacatgatggacgcggcccggctcgagggtctccacctcgcccaagacccggccacgggactcaaggccattatcgccatccacagcacgcgactcggcccggcgctgggtggttgtcgctacctgccttaccccaacgacgaagccgccatcggcgacgccatccgcctggcccagggcatgagctacaaggcggccctggccgggctggagcagggcggcggcaaggcggtgatcatccgcccgccgcacctggacaatcgcggcgcgctgttcgaggccttcgggcgcttcatcgaaagcctcggcggacgctacatcactgcggtggacagcggtacctccagcgccgacatggactgcatcgcccagcagacccgccacgtcaccagcaccacccaggccggcgacccctcgccgcataccgccctcggcgtgttcgccgggattcgcgccagcgcccaggcgcgcctcggcagcgacgacctggaaggcctgcgggtcgcggtgcaggggctcggccacgtcggctacgcattggccgagcaactggcggcggtcggcgccgagctgctggtctgcgacctcgatcccggccgggtgcaactggccgtcgagcagctcggtgcccatccgctggcgccggaggcattgctctccaccccttgcgacatcctcgcgccctgcggcctgggcggcgtgctcaccagtcagagcgtcagccagttgcgctgcgcggcggtggccggggcggcgaacaaccagttggagcggccggaggtcgccgacgagctggaggcgcgcggcatcctctatgcgccggactacgtgatcaactccggcggcctgatctacgtcgccctcaagcaccgcggcgccgatccgcacagcatcaccgcgcacctggcgcggattcccgcgcggctcaccgagatctatgcccatgcccaggccgaccaccagtcgccggcgcggatcgccgaccgtctggcggaacggattctctacggcccgcagtga

SEQ ID NO: 361153 - DNA, 1098 bp, Pseudomonas aeruginosa; identical to SEQ ID NO: 337714

SEQ ID NO: 361154 - DNA, 1002 bp, Pseudomonas aeruginosa
atgaatgagcgcaacggcgaagcgaaacgcctggcccttctggaggcggtcaacctggcgttgcaccgggccatggccgaggacgagacggtggtggtgctgggcgaagacgtcggggtcaacggcggggtgtttcgcgccaccctcggcctgcgcgagcgcttcggcttcaagcgggtgctggatacgccgctggcggagaacatgatcgccgggctgtccatcggcatggccgcccagggcctgaagccggtgatggagatccagttcatgggcttcatctacgccgccatggagcaactggtgtcccatgccagccgcctgcgcaatcgcacccgcggccgcctggcctgcccgttggtgctgcgcacgccgatgggcgcggggatccgcgcgccggagcaccacagcgaggcgaccgaggcgatgttcgcgcacatccccggcgtccgcgtgctggtgccgtcgtcgccggcgcgggcctacggcctgctcctggcggcgatcgacgatcccgatccggtgatcttcctcgagccgacccggctctaccggatgaacccgcagccgctggcggacgacgcccggcgcctgccgctggacagttgcttcacccttcgcgaaggcggcgacctgaccctggtcagctggggcgccagcgtccacgagacccagcaggccgccgagcgcctggcgcagcgcggcatcgaggccgaagtgatcgacgtcgcctgcctcaagccgctcgacctcgacaccctcgaagcctcggtgcgcaagaccggtcgctgcgtgatcgtccatgaggcgccgaagagtggcggcctcggcggggaaatcgccgcgagcctctacgagcgtgtcctgttcgacctgcgggcgccgatccagcgggtcgccgcggccgatatcccgccgccgctgtaccgcctggaagcgctgtacatgcccgccgtggaggacatcctggcggcctgcgacaccgtgctcggctacgcctga

SEQ ID NO: 361155 - DNA, 1113 bp, Pseudomonas aeruginosa
atgaagcacttcaagctgcccgacctgggcgagggcctgcaggaagcggaaatcgtcgaatggcacgtcaaggccggcgacagcgtgcgcgccgaccagcgcctggtctcggtggaaaccgccaaggcgctggtggacatccctgcgccctacgatggggtggtgggcaagctgttcggcgccgagggcgacatcctccacgtcggcgaaccgctggtgggcttcgagggcgaggaggcggacgccggtaccgtggtggggcgcctggagggcggcggtagcgccctggaggaccgtttcttcatcggcgccgcaccgtccacccgcgaacacctggcaccgcgcgcgaccccggcggtgcgccagttcgcccgccagcagggcgtcgaactggccggcctgagcggctccggcccggatggcctgatcacccgcgccgacgtcgaggccgccgcccagggcgcccgcgaacgcttcggcggcgagcgcttgcgcggggtacggcggagcatggcgctgaacatggcgcgctcgcatgccgaggtggtgccggtgacgatctacggcgacgccgacctgcatcgctggaagaccgcacgcgacccgttgatccgcctggcccaggcgctggccgaggcctgtcgcgccgagccgaccctcaacgcctggttcgatggcgcctcgttgtcgctgaaactgcatgagcggctcgacctggggatcgccgtggacaccccggacggcctgttcgtgccggtgctgcgcgacgtcggtgcgcgttcggcggaggacctgcgcgccggtatgcggcgcctgcgcgaagacgtccaggcacgctcgatcccgccggcggaaatgctcggcgcgaccctgaccctatccaacttcggcaccctgttcggccgctacgccaaccccgtggtggtgccgccgcaggtggccatcctcggcgccggcggcatccgcgacgaagtagtggcctggcgcggcgagatggcgatccacccgatcctgccgctctcgctgagcttcgatcaccgcgccgccaccggtggcgaggcggcgcgtttcctcaaggtactggtgaacgccctggagcagcccgacggctga

SEQ ID NO: 361156 - DNA, 399 bp, Pseudomonas aeruginosa
atgcccgctctccccgcctcccccgtccgctcccgacgctggcgcctggaccggcgcagcctgctgctggcactgctgctgttcggcctgctggtcctgctcgccaccctgggccggcattggggctggatacgcagcttcggcggcgacctgctggcggtggtctggctctactacctgatgggcagcgcgctcagggcgccggccgcctggctggcatccgccgcctttgccgtcggcgcgctgctggaactgggccagtacctggcggcgcaactgcattggcaattttccagtcccgtgctgcgcatcgttctcggtagcaccgccgacggcttcgacctgctcgcctatgccctcggcgcgctgctggcatggtggctggagcgccggcgctga

SEQ ID NO: 361157 - DNA, 585 bp, Pseudomonas aeruginosa
atgccgcgacaacttgccggcctgctgtgcgtcctcctcggcctcgccggtgcccctgccctcgcctgcccgttccgggccacggacgccgagacaccggcagtctctgccggcgccgcgcaggtcctggccctgggcggcgccggcaggctgcaactcgacctgcaacgggcccccgccaccctgctgcacagcggcgacctgctgatcgcccgctacgccgagggtcactacctcgcccaccgcctgctcgaaggcaacgagatgggcgcggacgagggtgaacggctcgaccttccgcgacaggttcgcctgctgttcggagccctgccgctggacggcctgcccgacgccgagcgcgagcgtctccaggcgcagcgccaggccctcggcctgtgcgaccggcgcgccagcgtcagccgctaccgcgtggccggcaccgaggtctatcgcctgcgcggcagccaggccggcaagccctaccacgcgctctacctgctcgacggtccccaggtgcactacctcgacagctccggcagcgacgccttcgtcgagcagttgctcgccagcctgcgacgccgctga

SEQ ID NO: 361158 - DNA, 267 bp, Pseudomonas aeruginosa
atggccgtcgaagtggtgtaccgcagcagccgggatcaggagcgtttgttcatggacaaggctgaagccgatcgttacgacaagatgctggagctggcggaaacgctggccgaggtgctgcagaaggcggtgccgtcgctgaaggaggaacaggtggaagaactcggcatcttcatggcaaagaaccgcgacgccttcgcccgcgccttcaagaaccagccggacgccctcaacgaactgttcgaggaaaacgccgcggacgaatga

SEQ ID NO: 361159 - DNA, 270 bp, Pseudomonas aeruginosa
atgagagtgatcccgttggcacttgtcgcgctgctcggcctggcgccgctggcccaggcgcagcagcagccctacggacccaacccggactcgaaatcgctccgccagcactacgtggaagggcgcctggacatcgcccgggtgatctacaagaccgacctgtggagcgcctgtgggatcgtcccggcgcgcctggtctacgaggactcgcagggcgagcggcataccgtcgagtacaaggcctggggcagcggctgcagcggcaattga

SEQ ID NO: 361160 - DNA, 219 bp, Pseudomonas aeruginosa
atgcaagacttcggtttcgcccttctgctcatcggctacgtctggtccgtggccagcggcggtcgccgttcgatcccctgcgcattgctctgcctgctgctgtttccgctggcgcaactggccttcgccatcaacgacgcgccgatgcgcccgccgctggcgctggcggcccttggcgcgggcctggcctacctcggcggcggctcggtgttcggctga

SEQ ID NO: 361161 - DNA, 516 bp, Pseudomonas aeruginosa
gtggatgcgccgttggcggagcaggatctcaaggcactgtttctcaggcatgcccggcagttgcagtcgtatctgttgcgcaagacccgtgatccacacctggcggcggacctggcgcaggaaagcttcctgcgcctggccgagcagcggcacaaggagccgatcgagcatgtcgacgcctatctctaccgcaccgcgcacaacctcaccatcgaccattaccggcaggaacggcggcgccgcaccgagacccggcccaacgatgacctcgccgggttcgtcgccgaccagcccggccccgaggagtccgcggtggatgccgatgcgcttgcccgcctgcgcgagatagtcgccgaactgccgccgcgcacccgtgagatcttccgtctcaaccgtctggaggggctgacccatgccgaggtggcgagacgcctggaaatctccgatagctcggtgcagaagcacctggcccgcgccctggcccatgtgatgcaggcactcgaggattcccgctga

SEQ ID NO: 361162 - DNA, 987 bp, Pseudomonas aeruginosa
gtgaacagcccccaggaacaacagcagatccgccagcaggccgccgaatgggcgatccgcctggacggcggcgacctcgaccggacccggcgcgaagcgctggacggctggctggcggccgacccccggcacccggccgcgctggcgctggcgcaacggacctggaaacagctgggatcgctggccgaaccgcggacgatggctccgacgccggtcgccagcgcgccgcgccgcgccggggggcggcgcaagggctggcgcggctgggccgcggcggcggcggtgctgctggccctgggcagcgcctggagcgaacgcgacgccggcgtgagctggctggccgaccactctaccggcaagggcgaggtacgcatcctgcggctggtggatggcagcgaggtcgagctggacgcacagagtgccatcgatgtcgcctacgacagccgcgagcgacgggtgcgcctgctcgaaggcagcgcgatcttccgcgccgccccccgcgcgggccgggagacccggccctttgtggtggaaagcgccggcggcagcactcgcgcgctgggcactcggttcctggtcagccgcaacgacgacggcagcgtccaggtcggggtgctcgaacaccgcgtcgcggtggccctggcgcatccgcgcacggggaccgtcgggcgccgcgagctgggcgagggcgagagcctgcgctacagcgcggagggcggcgtcgaggcgccgctgggcggtcgcctcgacgacctgaccagttggcggcgcggcctgctggtcttcgacgagcagccgctgggcgaggtggtggcgcggctcaatcgctaccggccggggcatttgctggtggctcccggtgcgttggcgcagcggcgggtcagcggcgtattccgggtcgccgacctggaggcctcgttgcagtcgatcagcgatgagctgggagtgcgcagcctgggcctggcgggagtgacgctgctgtactga

SEQ ID NO: 361163 - DNA, 618 bp, Pseudomonas aeruginosa
atgagcatttcgatttcctacagcaccacctacagcggctggaccgtagcggattacctggcggactggtcggcctacttcggcgacgtcaaccatcgtccgggccaggtggtggacggcagcaataccggcggcttcaaccccggtccgttcgacggcagccagtacgcgctgaagagcaccgccagcgacgcggccttcatcgccggcggcgacctccactacaccctgttcagcaaccccagccacaccctgtggggcaagctggacagcatcgccctcggcgacaccctgaccggcggcgcctccagcggtggctacgccctggacagccaggaggtgagcttcagcaacctgggcctggattcgccgatcgcccagggccgcgacggcaccgtgcacaaggtggtctacggcctgatgagcggcgacagcagcgccctgcaggggcagatcgacgcgttgctgaaagcggtcgacccgagcctgtcgatcaactccaccttcgaccagttggccgcggccggcgtcgcccatgccaccccggctgcggcagcggcggaaatcggcgtggtcggcgtgcaggaactgccgcacgacctggccctggcggcctga

SEQ ID NO: 361164 - DNA, 1791 bp, Pseudomonas aeruginosa
atgaagctccggccggcctcgccgcgcaatgaaatcctcgccaccctcggccgcttccgcccggcgctgcgcagcgtcgcgctgttcaccgcggtgatcaacctgctgatgctggcgccgtcgctgtacatgctgcaggtctacgaccgggtgctcgggtccggcaaccacatgaccctgctgatgctgaccctcatggtgctcggcctctacctgctgctcggcgccctggagtgggtgcgcagcctggtggtgatccgccttggcggccagctcgacatgcaactcaaccagcgcatctacgacgcctcgttccgcgccagcctggagcgcggcgagcaggccgtcgggcaggcgctgaacgacctggccagcctgcgccagttcctcaccggcaacgccctgttcgccttcttcgacgcgccctggttcccgctctacctgctggtgatcttcctcttcagtccctggctcggcctgctcgccctggttggggcgctgctgctggtgctgctcgcctgggtcaacgaaagccgctcgcgcgaaccgctggccgaggccgggcaactgtcgatcctcgccacccagcaggcctcggccaacctgcgccaggcggaaaccctggcggcaatgggcatgttgccggccatgcgcgcgcgctggttcgcccagcaccaggccttccttgcccggcagaacctcggcagcgagcgcagcgcggcgatcggcgcgacctccaagggcgtgcgcctggccctgcagtcgctggtgctcggcctcggcgcctggctggcggtggaaggcctgatcaccccggggatgatgatcgccggctcgatcctgatgggccgcgtgctcagccccatcgaccagttgatcgcggtctggcgccagtggagcggcgcgcggcaggcctaccagcgactggcgcggctgctcgaggagaatccgccggccgccctaggcatgccgctaccggcgccgcgcggcgcgttgcgcgtcgagcggctctgcgcggccgcgccgggacgcgagcaggcattgttgcaggacctcggtttcgccctggagcctggcgaagcgctcggcgtgatcgggccgtccggttccggcaagtcgaccctggcacgcttgctggtgggcgcctggcagccgctgtccggcgcggtgcgcctggacggcgccgacctgcggcagtggagtgcggcggcactggggccgcacatcggctacctggcccaggacgtgcaactgttcgccggtagcatcgccgagaacatcgcgcgcttcgccgaggtggatgccgagaaggtggtggcggcggcgcgcctggccggcgtgcacgacctggtgctgcgcctgccgcagggctacgacacgcgccttggcgacggcggcgccggactctccggcggccagcgccagcgcatcggcctggcccgcgcgctgtacggccgaccggcgctgatcgtgctcgacgaacccaatgccagcctcgacgaggcgggtgaggcggccctggccgaggccatcgcggcgatgcgccggcacggcagcagcctggtgctggtcacccacaagccggcggtgctggcgctgaccgacaagctgttgttgctgcatggcgggcgcctgcagcgtttcggcgcgaccgccgaggtgcttgccagcgcctcgccgccggccgctgcggccccggcgccgacacggccgacgccggcgttcggtttcggctaccggccgggaccggggatgccggtcggcggtgtgccgggaggagcggcgcgatga

SEQ ID NO: 361165 - DNA, 1332 bp, Pseudomonas aeruginosa; identical to SEQ ID NO: 345523

SEQ ID NO: 361166 - DNA, 1356 bp, Pseudomonas aeruginosa
atgaatcgcctgcgagcctgcctgctgtcctccgtgctgctttcggcctcttcggcccaggcgctgggcctgctggacgcctaccaactggcggtgcgccacgacccgaccttccaggcggcgctccacgagcgccgcgctggcagcgaaaaccgcgccatcggccgtgccggcctgctgccgagcctgcgctacgactacaacaaggcgcgcaacgactccaccgtcagccagggcgacgcccgcgtcgagcgcgactatcgcagctacgcctcgaccctcagcctggagcagccgctgttcgactacgaggcctacgcgcgctaccgccagggcgaggcccaggcgctgttcgccgacgaacagttccgcgggcgcagccaggagctggcggtgcgcctgttcgccgcctacagcgaaaccctgttcgcccgcgagcaggtgctcctggccgaggcccagcggcgcgccctggaaacccagctggcgttcaaccagcgtgccttcgaggaaggcgagggcacccgcaccgacctgctggagacccgcgcccggctgagcctgacccgcgccgaggagatcgccgccggcgatcgtgcggcggcggcgcggcgtacgctggaagcgatgctcgggcaggcactggaggatcgcgaactggccgcgcccatcgagcgtttcccggcgttgcgcctgcaaccggcgaccttcgagggctggcgccaggtggccctgcaacgcagcgccgagctgggcgcccagcgctatgcgctggaggcggcggcctacgaggtggagcgcaatcgtgccggccacctgcccaggctcagcctctacgccagcagcagcaagacgcactcggcttcggaaagcacctacgagcagaaatacgacaccgacagtgtcggcctgcgtctcagcctgccgctgttcgagggcgggcgggtgtcggcggcgacccgccaggccggcgacaagtacgcccaggcccaggccgagctggatgcccaggtggccagtgtgatcaatgacctgcacagccagttcgacctgaccgccagcagcctggccaaggtgcgtgcctatgagatggcggtggcggcggcgcgcgaacaggtgacggcgacgcggcgcagcgtcgccggcggggagcgggtcaatcgcgacgtgctggacgccgaacagcagttctacggcgcccgccgcgacctggcggaagcgcgctacgcctacctcaacgcctggctgcgcctgcgccagctggcgggggtgctggaagaccgcgacctggcggtgctggccgcctatttcggcgccggcgaaggacgcgcgcaggtcgccgctgccatcagatag

SEQ ID NO: 361167 - DNA, 288 bp, Pseudomonas aeruginosa
atgaccgacagcagccctttccagctcctcaccgaggccttccaggccgagtaccgggtcaacctcagcctggagcggccggacggcagcatcgtcctcaccctctccaacgaacgcggggtcgccgccaagcgcctgatccgaccggcgcaactgcatgacctggaacagttgcagcggatgatcgagagcatccgcttcggcatcgccatcgaaaacggcaccagcgcgccgcaactgttgcaggagatgacccaaggcaaggcacgctggccgatagctatctga

SEQ ID NO: 361168 - DNA, 486 bp, Pseudomonas aeruginosa
atgaaacagaattgggccgagcgcctgcgcgcaagtatgcaccaccaggcggagagcctcggcaacctgctggtggaggcgttccactacctggccctgttcgccatcggcgccacggtgttctcggcggcgggcgcggccttcctggggatggtgaacaaggggcatgcgtcgatcgacgacatcctcctgctgttcatctacctcgagctgggcgcgatggtcggtatctacttcaagaccaaccacatgccggtacgcttcctgatctacgtggcgatgaccgcgctgacccgcctgatgatcgccgacatccagcacaaccatacgccggacgatggcatcatcctggtctcggtggcgttgctgctgctggcgctggcgatcctggtggtgcgcttcgcctcggcgcgcttcccttcggcgaagtccgacggcgccgccgcgcggcgggtggcgagcgaggacgccgaaggggaagcctga

SEQ ID NO: 361169 - DNA, 972 bp, Pseudomonas aeruginosa
atgaagggatggaaactctttaccccgttgctgatcctcgcgatcgtcgccatcaccctctacctgcgcctgcacaatccgcccctgctgttgcagggcgaggcggacgccaccaacgtcatcgtttcctccaaggccaagggccgggtccaggtgctgcacgtgcggcgcggcgacgaggtgaagcagggcgacctgctgatcagcctcgacagccccgagctggaagcccagctcgatgccctgcacgcggcgcgcaaccaggcccaggcgcagctcgacgagtcgctccacggtacccgcgaggagagcatccgcgcgctcaaggccagcctggcacaggccgaggccgagttgcgcaacgccgagtcggatttccagcgcaaccagcagatggtcgagcgcggcttcctctcgcggacccagttcgacctctcgcggcgtgagcgcgatgtcgcccgcgaccgcgtcgccgaggcgcgggccaatctcgacgaaggcctcaagggcgaccgcgaggagcgccgccaggcgttgcaggccgcggtgcgccgggccgacgcgcagatcgccgagcttcaggcgcagatcgacgacctgcaggtgcgcgcgccggtcaacggcgaggtcgggccgatccccgccgaacagggcgaactgatcaacgcctacagtccgctgctgacgctggtgcggctggacgacagctacttcgtcttcaacctgcgcgaggacatcctggccaaggtgcgcaagggcgaccgcatcgtcatgcaggtgcccggcctgggcggcgccgaggtcgagaccgagctgcgctacatcgccccgctgggcgatttctcgaccaggcgcgcgacccgcgccaccggcgatttcgacctgaagaccttcgagacccgcttctacccgttgcagccgacacccggcctgcgcccgggcatgagcgcgttgtggcgctggacgaactga

SEQ ID NO: 361170 - DNA, 1173 bp, Pseudomonas aeruginosa; identical to SEQ ID NO: 319345

SEQ ID NO: 361171 - DNA, 1134 bp, Pseudomonas aeruginosa
atgaagaactacctgcagatcctccgggaaaccctgaaggccatgctgtccaagccgatgtggctgatggtcgtggcctcggtgtgcatcacctcgctgccgtacatgaaccacaccgccctcgacctgccggtggcggtggtcgacgaggaccacagcgacgtgtcgcgcgagctggtccggctgctcgattcggcgccgaaggtcgccgtggtcggctacgacagcctgccgcaggccaagcgcgacctggcctggcgcgagctgtatgcgatcatcgtgatcccgctgaacttcgagaagcgcctgctgcgcggcgaggcgctggtgatcccgtacttcggcgatgccaccaaccgcatggccaacggccagatccagcaggacatctcggcggtctacagcgcgctgaccaaccgctacaacgctgccctgctggaacgcgaaggcttcaccgcgacccaggcgcaggtggtgctgagcccgctggtagggcaattgaccgacctgttcaaccccggcatcagcttcgccgccatcgtccttccggggttgctgtcgctgatcctgcaacacagcctgctgctcggctgcacccgcggcaacatcatgctgcgcggcggcaccccgcgctacatgcgccagccgctgtcgacccgcttcggccgctacagcgcgcaactgctgatctggaccgtgctggcgatgctcttctacgtgatctggccgcacctgctgggctatcgccagtcggcctcgttcttcatgctgctggggatcgtcctgccgttcctgatcgcggtgatcgccctcagcgagttcatcgccgagctgctgcccaccgaggaatcggtgtacctgaccatgaccttcatcaccctgccgctgttctacatggccggctacagctggccggaacaggccatgccggactgggtacgctggctggccgacgcgatcccctcgacctgggcgattcgcgccatcgccgagatgaaccagatggacctgccgctgcgcgaagtcagcgaccatgccctggtgctgctgggcatggccgccacctatgcgttgctgggtacgctgctgtaccagtaccgcaactggcgctgggacaacgtcaagggttggtga

SEQ ID NO: 361172 - DNA, 342 bp, Pseudomonas aeruginosa
atgtttcgttcggggctttctttgctggtgcttctggggctcgccacgctcggcgggtgcggttccgtcaacacgctggtgcgcgacgacgccagcgccgcccacgacctgcgcctgaaggcgaccgcctgcaccagcctgccgcgggtgtacagcggggtcagctacaccttctgccggctcaacgtgaagaccgggtcgccggtggcgccggcgcaagccgacggcatcctcgaggtgctggccctcgacttcgcgctgtccggggtgatcgacaccctcgcgctgccctatacctcgtaccgccagtaccgcgacggcaacctgtccctggccaactga

SEQ ID NO: 361173 - DNA, 927 bp, Pseudomonas aeruginosa
atgaaattcaccctccgccagctcgaggtgttcgtcgccgtggcccagcaggagagcgtctcccgtgccgccgaggggctgtcgctgtcgcagtcggcgaccagcacctcgctcggcgagctggagcggcagttcgactgcaagctgttcgaccgcgccggcaagcgcctgaccctcaatgccctcggccgccaactgctgccgcaggcggtggcgctgctcgaccgcggcgaggaaatcgagaacctgctcaacggcaagaccgccttcggctccctcgacctcggtgccaccctgaccatcggcaactacctggccacgctgctgatcggcgccttcatgcagcgccagccggactgccgggtgcgcctgcacgtgcacaacaccgcccaggtggtgcagcaggtcgcccactacgagctggacctgggcctgatcgagggcgactgccggcatccggacatcgaggtgcaaccctggatggaggacgaactggtggtgttctgcgccccccagcatccgctggcgcggcggggcggcgccgacctggaacggctgacgcgggaggcctggatcctccgcgagcagggctccggcacccgcctgaccttcgaccaggccatgcgtcatcacccgcggccgctgaacatccgcctggagctggagcacaccgaggcgatcaagcgtgccgtggagtccggcctgggcatcggctgcatttcccgcctggccctgcgcgacgctttccgccgcggcagcctggtgccggtggaaacgcccggcctggacctgcgccggcagttctacttcatctggcacaagcagaagtaccagaccgcgaccatgcgcgagttcctcgacctgtgccgcagcgagaccgccgggatcagccgcagcgacgagatcgtgctgccgctgattccctga

SEQ ID NO: 361174 - DNA, 777 bp, Pseudomonas aeruginosa
atgagcaatctgtacaccgagcgcgttctcagcgtgcaccactggaacgacaccctgttcagcttcaagaccacccgcaacccgggtctgcgcttcaagaccggccagttcgtgatgatcggcctggaagtcgacggtcgtccgctgatgcgcgcctacagcattgccagcccgaactacgaagagcacctggagttcttcagcatcaaggtcccggacggcccgctgacctcgcgcctgcagcacctgaaggaaggcgacgagctgatggtcagccgcaagccgaccggcaccctggtgcacgacgacctgctgcccggcaagcacctctacctgctcagcaccggcaccggcatggcgcccttcctcagcgtgatccaggacccggaaacctacgagcgctacgagaaggtgatcctggtccacggcgtgcgctgggtcagcgaactggcctacgccgacttcatcaccaaggtcctgccggaacacgagtacttcggcgaccaggtgaaagagaagctgatctactacccgctggtgacccgggagccgttccgcaaccagggccgccagaccgacctgatgcgcagcggcaagctgttcgaggacatcggcctgccgccgatgaacccgcaggacgaccgtgcgatgatctgcggcagcccgagcatgctggaagagaccagcgccgtgcttgatagcttcggcctgaagatctcgccgcgcatgggcgagccgggcgactacctgatcgagcgcgccttcgtcgagaagtag

SEQ ID NO: 361175 - DNA, 537 bp, Pseudomonas aeruginosa; identical to SEQ ID NO: 319350

SEQ ID NO: 361176 - DNA, 828 bp, Pseudomonas aeruginosa; identical to SEQ ID NO: 319351

SEQ ID NO: 361177 - DNA, 1911 bp, Pseudomonas aeruginosa
atgagcgacgacacgaaaagcccccacgaagaaacccacggcctgaaccgccgcggcttcctcggcgcctcggcgctgaccggagccgccgccctggttggcgccagcgccctgggcagcgcggtggtcggccgcgaggcccgggccgcgggcaagggcgagcgcagcaaggccgaggtcgcccccggcgaactggatgagtactacgggttctggagcggcggacattccggcgaagtacgcgtgctcggcgtgccgtcgatgcgcgagctgatgcgcataccggtgttcaacgtcgactcggccaccggctggggcctgaccaacgagagcaagcgggtcctcggcgacagcgcgcgcttcctcaacggcgactgccaccatccgcacatctcgatgaccgacggcaagtacgacggcaagtacctgttcatcaacgacaaggccaacagccgggtcgcgcgcatccgcctggacgtcatgaaatgcgaccgcatcgtcaccattcccaacgtccaggcgatccacggcctgcgcctgcaaaaggtgccgcatacccgctacgtgttctgcaacgccgagttcatcatcccccatcccaacgacggctcgaccttcgacctgtccggcgacaacgccttcaccctgtacaacgccatcgacgccgagaccatggaagtggcctggcaggtgatcgtcgacggcaacctcgacaacaccgacatggactacagcggcaggttcgccgcctccacctgctacaactcggaaaaggccgtcgacctcggcggcatgatgcgcaacgagcgcgactgggtggtggtgttcgacatcccgcgcatcgaggccgagatcaaggcgaagcgcttcgtcaccctcggcgactcgaaggtgccggtggtcgacggccggcgcaaggacggcaaggacagcccggtgacccgctacatcccggtaccgaagaacccccacgggctgaacacctcgccggacggcaagtacttcatcgccaacggcaagctctcgccgacctgcaccatgatcgccatcgagcgcctcggcgacctgttcgccggcaagctggccgacccgcgcgacgtggtggtgggcgagccggaactgggcctcggcccgctgcacaccactttcgatggccgaggcaacgcctataccacgctgttcatcgacagccagttggtgaagtggaacctggccgacgcggtgcgcgcctacaagggcgagaaggtcgactacatccgccagaagctcgacgtgcagtaccagccggggcacaaccacgccaccctgtgcgagaccagcgaagccgacggcaagtggatcgtggtgctcagcaagttctccaaggaccgcttcctgcccaccggtccgctgcacccggagaacgaccagttgatcgacatttccggcgaggaaatgaagctggtccacgacggcccgaccttcgccgaaccgcacgattgcatcctcgcccgccgcgaccagatcaagacccgcaagatctgggaccgcaaggacccgttcttcgccgagacggtcaagcgcgcggaaaaggacggcatcgacctgatgaaggacaacaaggtcatccgcgagggcaacaaggtccgcgtctacatggtctcgatggcgccctccttcggcctcaccgagttcaaggtgaagcagggcgacgaagtcaccgtgaccatcaccaacctcgacgagatcgaggacgtgacccacggcttcgtcatggtcaaccacggcgtctgcatggagatcagcccgcaacagacctcgtcgatcaccttcgtcgccgataagcccggggtgcactggtactactgcagctggttctgccacgccctgcacatggaaatgtgcgggcggatgctggtggaaaaggcttga

SEQ ID NO: 361178 - DNA, 2148 bp, Pseudomonas aeruginosa
atgcgcgcccttcgtttttccgccggatcgtggcggtgtgtcttcgcctggatgctcctgctggtcggcctcgccgcccagggtgccgaactcagcaagttggagcgcctgcgcatcgcccaggtattccccgcggtcgagcggatcggcgaccccgaaggcgactacggcgtacgccgcctgagcaagggcgaggaaaccctcggctacgccttccagaccctcagcgtcaccgacatcccggcctactccggcaagccgatcaacctgcaggtgatcctcgatccgcaggcggttatccgcgacgcctacgtcctcgaacaccacgaaccgatcctgctgatcggcatcccggaagagaagctgcacgccttcagcgccaggtacgacggcgtgcgcgccgaccagcgggtggtggtcggccgctccagcgacccgcaggcggttaccgtcgacgcggtgagcggcgccacggtgacagtgatggtggtcaacgagatcgtcatgcgcgccgcacatacggtggcggtttccctcggcctgatcgaggaccgcggcaatgtgcggcccaagccggcgcaggtgcgccagcaaccggcagcgacggcgagctggagcgaattgctcggcaacggcgcgatccgccgcctgcagttgagtcgcgggcagatcgacgacgccttcaagggcagcgaggccgaaggcatcggcgaagccgacgcggcgcaccgcgacgagccgttcatcgatctctacagcgccctgctcaaccctcccgcggtgggccgcagcctgctcggcgacaaccagtaccgcgaactgatggcgtcgctgaagccaggcgaatacgccttcgtcgtgctcggcgacggcgagtattccttcaagggttccggctacgtgcgcggtggcatcttcgatcgggtccaactgcgccagttcggcgacatcatcagcttccgcgacctcgactaccagcgcctgtcggacgtctatgccgaaggcatgccggagttccgcgagatggcgatcttcgtcgcccgcgccagccagcgtttcgatccgggctcgccctggaccctggagttgctcgtgcggcgccagaccggcccggtggcgggggtattcaccagcttcgagctggcctgccagacgcccgaggaatacctggagcggccgcagccaacggccgaggaactggccgccctggaagaggctgcccggccgctgtggctgcgggtctggtaccagaagagcttccagatcggggtcctctgtaccgccctcgtcctgctcctggcgatcctcttcctccaggaccgcctggtgcgacggccgcgcctgatgcagcgactgcgcaccggctacctggcgttcaccctggtctacctgggctggtactgcctcggccagctatcggtggtcaacgtgctgaccttcgtccacgcgctgttcgaaggcttccgctgggagctgttcctcagcgacccgctgctgttcatcctctggaccttcaccgcagccagcctgctgctctggggccgcggcgtgttctgcggctggctgtgcccgttcggtgcgctacaggaactgctcaacgaactcgcgcgcaagctccgcgtgccgcagttccaggtgccgttcgccgtgcacgagcggctctgggcgatcaagtacatcatcctgctggtgctcttcggtctctccctggaatccctggcgctggccgagcaggccgcggaggtggagccgttcaagaccgccatcaccctcggcttcgaccgccagtggtggttcgtcgcctacgccgtcgcgctgctggtggtcaacctgttcacccgcaaggtctattgccgctacctctgcccgctgggcgcggccctggcgatcccggccaaggcgcgcctgttcgactggctcaagcgccgcgcggaatgcggcaggccctgccagctgtgtgcccgcgaatgcgagatccaggcgatccatcccgacggccgcatcgaggccaacgaatgccactactgcctcgactgccagatgacctaccacgaccaggacaagtgcccgccgctggtgaacaagcgcaagaagcgcgcgaagagcgcgccggcggacaacgcgcggatacccgcggagaacctctga

SEQ ID NO: 361179 - DNA, 414 bp, Pseudomonas aeruginosa
atgtccgaccgccctgcccgcccctcccgcctcaacggcctgcgtcacctcgccctgctggtgcccaacctggaagaatgcgagcgcttctatgtcgacgtactgggcatggaagtgctgaaccgcgccaacgaagacctggtgtatctcacctgcggcaacgacaacctttccctcggccgcgcccacgctgccagcaacggcctgcagaccatggatcactacggcttcgtcgtcgacagcgtggaggaactggaggcctggtaccgttacctgaaggcgctgggcgtgaccctgctcgaccaacccttcgaccacggcgacggcgcgcgcagcttccacctgctcgacccggcgggcaacaaggtgcagccgctgtaccatccagcggtatccgggcaacgcctggcctga

SEQ ID NO: 361180 - DNA, 303 bp, Pseudomonas aeruginosa
gtgtactgcatctttatcaagacccgcctcaggcccggctgcgccgaggctttcatcgatgccatccaggtcaacgccgccgcttccgtgtccaccgagcccggctgcctggtgttcgacgtttcccgcgaccgacaggatcctgacctggtctatctctacgaggtctatcgcgatgacgcggcctacgaggcgcacacccgcaccgcgcatttccgcgacagccggccgttggtcgagccgctgatcctcgaacaggaagtcttcgaaagcgacgcgctggcgctcaatccgctgcgctga

SEQ ID NO: 361181 - DNA, 696 bp, Pseudomonas aeruginosa
atgacccacagcgtttctcccatcggctacatccgctcctgcttcatggagaagttcgccatcccgcgccagccgctgctcgcgccggcggcgcgggggaccctggaactgctgccgccgttcgaccaggtggaagcgctggaaggcctggagcaggtcagccatgtctggctgctgttcctcttccaccaggccctggaagacaagccgcgactgaaggtgcgcccgccgcgcctgggcggcaaccgctcgctgggagtcttcgccacccgcgccacccatcggccgaacggcatcggccagtcggtggtgcgcctggagggcttcgaagcggggcgcctgtggctgtccggaatcgacctgctcgacggcaccccggtactcgatatcaagccctacgtaccctacgccgacgccgtggccgacgcccgcaacggcatcgccgacgcgccgccgccgggcatcgccgtggagtggagcgagcaggcgcggcgccaggcccatgagcacggccagcggttgcggcagccggtagccgagctgatcgagcaatgcctggcccaggacccacgcccggcctaccagaagccagagcccgggcgccgctacggggtgcgcctgtgggacctcgacgtgcattggcactacccgcgcccggacctgatccgcgtgctggacgtcgccggcggcgattga

SEQ ID NO: 361182 - DNA, 771 bp, Pseudomonas aeruginosa
atgcatccctatttcagtctcgccggtcgcgtcgccctggtcaccggcggcagccgcggcatcggccagatgatcgcccagggtcttctcgaagccggcgcccgcgtcttcatctgcgcacgtgacgcagaggcctgcgccgacaccgccacacgcctctcggcctacggcgactgccaggcgatccccgccgacctttccagcgaagccggtgcccggcgcctggcgcaggcgctcggcggactcagcgcgcggctggatatcctggtgaacaacgccggcaccagttggggcgcagcgctggaaagctatccggtgtccggctgggaaaaggtcatgcagctcaatgtcacctcggtgttttcctgcatccagcaactgctgccgctgctgcgccgctcggccagcgcggagaacccggcgcgggtgatcaacatcggctcggtggcgggcatcagcgccatgggcgaacaagcctatgcctacgggccgagcaaggccgcgctgcatcaactgtcgcggatgctggcgaaggaactggtcggcgagcacatcaatgtcaacgtgatcgctcccggacgctttccgagccgcatgacccgtcacatcgccaatgacccgcaggcactggaggcggacagcgcgtcgattcccatgggccgctggggtcgcccggaggagatggcggcgctggcgatcagcctggccggcaccgccggcgcctacatgaccggcaacgtgatccccatcgacggcggttttcatctctga

SEQ ID NO: 361183 - DNA, 366 bp, Pseudomonas aeruginosa
atgagctatcgcctggccgccgatgccctggtctggctgcacctgggcttcatcctgttcgtcctgttcggcggcctgctgccgttgcgctggccacgcctggcctggctgcacctgccggcggtggcctggggctgcgcggtggagtttctcggcctgccctgtccgctgaccccgctggagaatcgtctgcgccgggccgccggggacgccggctacagcggcggcttcgtcgagcactacctgttgccgctgatctatcccgccggcctgaccccggcggtgcagtggatccttggcgccatcgttctgctgctcaacctgatcgcctacctgtatctgttgcatcgccgcggtagccgctga

SEQ ID NO: 361184 - DNA, 327 bp, Pseudomonas aeruginosa; identical to SEQ ID NO: 319361

SEQ ID NO: 361185 - DNA, 837 bp, Pseudomonas aeruginosa
atgagcgcggtgatccgtgtcgacagcctgaacaagacctttgcccgcaagcaggcgcttttcaacctgaggctggagatccaggcgggcgagatggtggcgttgatcggtgcatccggctccggcaaatccacgctcctgcgtcacgtcgccgggcttgcccgctgcgaccgcgacaacggcggcagcatcgacgtgctgggtcgccgcctgcaggcgtccggccgcctgagcggcgaagtgcgtcgcctgcgcgccgacatcggctacatcttccagcagttcaacctggtcaaccgcctcagcgtgctggacaacgtcctgctcggcttcctcggtcgcatgccgcgctggcgcggttcgctggggctgttcagcgccgagcagaagcgccaggccctggaagcgctggcacgggtcggcctggccgatttcgccgggcagcgcgcctcgaccctttccggcggccagcagcagcgcgtggccatcgcccgcgccctgacccagaaggccgaggtgattctcgccgacgaaccgatcgcctcgctcgacccggagtcggcgcgcaaggtgatggacatcctcgccgatatcaaccgccacgacggcaagaccgtggtggtgaccctgcatcaggtcgactacgcgttgcgctattgcccgcgcgcggtggccctgaagggcggccggatcctcttcgacggcagcagcgagcacctttccgaaggcttcctcaacgaactctacggcgccgaaggggacaccccgctgctgttttccgaccgtgcccggcgcggggcggagagccagccggaactgaccctcgcgcgcgcctga

SEQ ID NO: 361186 - DNA, 1005 bp, Pseudomonas aeruginosa
atgttgaaacgcttcagtcgtgtgctcgcggcttccgccctgctcgccggctcccttgccgggatggcgcacgccgaccagccggtgatcaatttcgggatcatctccaccgagtcgtcgcagaacctcaagagcatctgggaacccttcctcaaggacatgagccagcagaccggctaccaggtgaaggccttcttcgcccccgactacgccgggatcatccagggcatgcgtttcgacaaggtcgacatcgcctggtacggcaacaaggccgccatggaagcggtggatcgcgcccacggcgagatcttcgcccagaccgtcgccgccagtggcgcgccgggctactggagcctgctgatcgccaacaaggacagcaagatcgacagcgtcgaggacatgttggcgaacgccaagagcctgaccttcggcaacggcgatccgaactccacgtccggctacctggtgcccggctactacgtgttcgccaagaacaacgtcgacccggtcaaggctttcaagcgcaccctcaactccagccatgaggtcaacgccctggcggtggccaacaagcaggtcgacgtcgccaccttcaataccgagggcatggagcgcctggaattgacccagccggagaaggccaggcagctcaaggtgatctggaagtcgccgctgatcccgggcgacccgctggtgtggcgcaacaacctgagcgacgagcagaagaacaagctgcgcgacttcttcttcaagtacggcgccaacgccgagcagaagaaggtcctcgccgacctgcaatggtcgaagttccagccctccgacgacgaccagttgctgccgatccgccagctcgagctgttcaagcagcgcaccgacgtggcgaacaacgccaacctcggcgccgaagagaaggccgccaagctgaaggccctcgacgaggagctggccaagctggagaaacgcatggccgagcgcgagcagaaaaccgccgccaacgccggctga

SEQ ID NO: 361187 - DNA, 795 bp, Pseudomonas aeruginosa
atgagcactctgagcaccactgccgcggcggccgccaccggcaagccatcctggggacgcctggtcggctggggcctgttcctcgccatcctcgcctggtcctggaagggcgcggaaatgaacccggccgtgctgttccgcgacgccggcaacatggcgaccttcgccgccgacttcttcccgccggacttcggcaactggaagctctacctcagcgagatgctggtcaccgtgcagatcgccctctggggcacggtgctggcgatcgtctgcgccatcccgctgtcgatcctggcctccgagaacatcgtgccctggtgggtctaccagccggtgcggcgggtgatggatgcctgccgttcgatcaacgagatggtcttcgccatgctcttcgtggtcgccgtcggcctgggcccgttcgccggcgtgctggcgctgttcatcagtaccaccggggtgctcgccaagctcttcgccgaggcggtcgaggcgatcgaccccggtccggtcgaaggcgtccgcgccaccggtgccagcgccctgcaggaggtcatcttcggggtcatcccgcaggtcctgccgctgtggatctcctattcgctgtaccgcttcgagtccaacgtacgttccgccaccgtggtcgggatggtcggcgccggcggcatcggcgtgatcctctgggaggccatccgcggcttccagttcggccagacctgcgccgtgctgatcgtgatcatcgtggtggtgagcctgatcgacgttctgtcacaacgcctgcgcaagctgttcatctga

SEQ ID NO: 361188 - DNA, 723 bp, Pseudomonas aeruginosa
gtgcgccctttccaaaccatgcacttgtctagacaaagcgaaccgctgtaccgcgaactggccgaacggctgcgccaggaactgctggcctaccgccccggcgactacctgcccggcgagatccagctggcccagcgcttcgcggtgaaccgccataccctgcgcagggcgctcgacgaactggtgctcgaaggccgcgtgctgcggcgccagggcaagggcacccaggtcctggaggcgccgacgatctacccgatgggcgccgccaacgcctacaccgagtcgctctcggcccagggccaccgggtcgaggcccggctgctggaggcgcgccagcgtccggccggcgccgccgaggccacccacctggggatcggcgagggcgggcgggtgctggaactgaccaccctgcgttacctcgacggacagccagtgagcctgatccgccattgctacgccgtttcccgcagcgagctgctcgccgactaccagggcggttcgctgcgtcgctacctggccgacaaaggcctgccgctgacccgcacctacagcctgatcggtgcgcgcctgcccaatcgcgaggaggcggcgcgcctgctgatgccccgccatgcgccgttgctcaccgtcctcaccctgtcccgcgaccgtaccggccaaccggtggaactggcccagtcgatcagccgcgccgatcgcttccagtaccaggtcgccccctag

SEQ ID NO: 361189 - DNA, 459 bp, Pseudomonas aeruginosa; identical to SEQ ID NO: 319366

SEQ ID NO: 361190 - DNA, 630 bp, Pseudomonas aeruginosa
atgaccagcgcttcgcttcccagcccggcggataccgccgcgctattgcaaccggcgttccaggacccggtcctggatgcccagcggagtttccgcgcggcgctcaaggccctcgccgaaccggggctggtgcgcaacctcgaccgcgcaccggcgctggccgcgttgcaaccggccagctacgcgctgtgcctgagcttcctcgactccgacaccccgctgtggctggcgccgggtctcgacagcccgacgttgcgcgccaacctggccttccattgcggctgcccgatcgtcgccgagcgtgagcaggcgctgttcgccttgctcgacgaaggcgagctggacgacctgagcggcttcgacagcggcagcgaccgttatccggaccagtcctgcaccctgctgatccagcttgccggcctcgatggcggcgcctcgctggagtggcgcggaccgggcatcgccgaggtgcgccaggtggcgttgccggtgagcaccgggttctgggcgcagcgtgccgcacgcaccgaattccccaggggcctggatgccttcttcgccgccggcgagcgcatcctcggcctgccacgcagtacccgggtcagcgaacccgtcgaggaggtggcctga

SEQ ID NO: 361191 - DNA, 1101 bp, Pseudomonas aeruginosa
atgtacgtagccgtcaagggtggcgagaaggccatcgacaacgcccatcgcctgctggcgcgcaagcgccgcggcgataccgcgctgccggagctgtcggtggagcagatccgccagcagatgccactggccgtgtcgcgggtgatgaccgagggttcgctgtacgatgagcaactggcggcactggcgatcaagcaggcggccggcgacctgatggaagcgatcttccttctccgcgcctaccgcaccacgctgccgcgcttcgccgccagcctgccgctggataccgccgggatgcgcctgcaacggcggatctcggcgacctacaaggacctgccgggcgggcaactgctcggtccgaccttcgactatacccatcgcctgctcgacttcagcctgctcgccgagggcgactaccccggccccgaagtggagcggggcgcgtccctggagccttgtccgcgcgtgctcggcctgctcgaccgggaaggcctgatgacgccggagtacgaactgcccggcgcggtgccggatatcacccgcgagccgctcgacttccccaccggccgcgcccagcgcctgcaggccctggcccgcggcgacgagggcttccttctcgccctgggctattcgacccagcgcggctacggccgcaaccatccgttcgccggggagatccgcatcggcgcctgcgaggtctggctggagcccgaggaactcggcttcgcggtgccggtgggcgagatcgaggtcaccgagtgcgagatggtcaaccagttcgtcggttcccgcgaggagctgccgcaattcacccgtggctacggcctggccttcggctacgccgagcgcaaggcgatgggcatggccctggtcgaccgcgccctgcgcgccgaggaatacggcgaggaggtggtgtcgccggcgcagcaggaagagttcgtcctgatgcactgcgacaacgtcgaggccggcggcttcgtctcgcacctgaagctgccgcactacgtcgatttccagtccgagctggagctgattcgcaagctgcgtcgtcccggcgtcgccgaatccgcgcaacccactgaccaggagaagcgcgcatga

SEQ ID NO: 361192 - DNA, 885 bp, Pseudomonas aeruginosa
atgagcctttccccgcaagccagcgccgcgccggagcagggctacaacttcgcctacctcgacgagcagaccaagcgcatgatccgccgcggcctgctcaaggcggtggcgatccccggctaccaggtgcccttcggcggccgcgagatgccgctgccctacggctggggcaccggcggcatgcaggtgaccgcggccatcctcggtgccgacgacgtgctcaaggtgatcgaccagggcgccgacgacaccaccaacgcggtatccatccggcgtttcttcgcccgcaccgccggggtcgccaccaccgaacggaccccggaggcgacggtgatccagacccgccaccggataccggaaaccgccctgagcggcgagcagatcatggtctaccaggtgccgatccccgagccgctgcgcttcatcgagccttccgaggcggagacccggaccatgcatgcgctcgacgactacggggtgatgcacgtgaagctctacgaggacatcgccaccttcggccatatcgccaccagctatgcctacccggtgacggtggacgagcgctacgtgatggatccctcgccaattcccaagttcgacaaccccaagctggacatgagcccggcgctgatgctgttcggcgccggtcgcgagaaacgcctgtacgcggtaccgccgttcacccgggtggcgagcctggacttcgaggaccaccccttcgaagtccagcgctgggaggaaagctgcgccttctgcggcagccacgagtcctacctggacgaactgatcgtcgacgaccgtggcggcaagcgcttcgtctgttccgacaccgattactgcacgcagcggcgtgcctgccaggaagaaggggaggacgcgcaatga

SEQ ID NO: 361193 - DNA, 816 bp, Pseudomonas aeruginosa
atgaacgcggtctgcgaatccatcgatgcgaacctcgacgcgcgcgatcggccgctgctctcggtgcgtggcctgacccgcctgtacgggccggaaaagggctgccaggaggtcgacttcgatctctaccccggcgaggtgctgggcatcgtcggtgagtccggctcgggcaagtcgaccctgctctcgttgctctccgggcgctgtccgccggacgccggcacggtcgcctaccgcgacgacggcgaccgctggctggacctctacgccgccagcgaagccgagcggcgcaccctgctgcgcaccgagtggggcttcgtcgagcagaacccgcgcgacggcctgcgcatgggcgtgtccgccggcgccaacatcggcgaacggctgatggcccagggcgtgcgccactacggtcggctgcgccaggccgggctggactggctggaacaggtggagatcgatccgctgcgcatcgacgacctgccgcgaaccttttccggcggcatgcagcagcgcctgcagatcgcccgcaacctggtctcggcgccacgcctggtgttcatggacgaacccaccggcggcctcgacgtgtcggtgcaggcgcgcctgctcgacctgctgcgcggcctggtgcgcgagctggacctggcggtggtgatcgtcacccacgacctggcggtggcgcgcctgctcgccgaccgcctgatggtcatgcgccgttcgcgggtggtggaagccggtctcaccgaccagattctcgacgacccgcagcatccgtacacgcaattgctggtgtcgtcggtcctgcaaccctga

SEQ ID NO: 361194 - DNA, 717 bp, Pseudomonas aeruginosa
atgaacaacctgatcgaggtccgcgacctcagcaagaccttcaccctgcaccagcaacagggcgtagtgctcaatgtgctgcgcgggctcaacttcaatgtcgccggcggcgaatgcctggtgctccacggacgctccggcgccggcaagagcaccctgctgcgcacgctctacggcaactacctgccggccggaggcagcatccgcctgcgccacgccggcgactggttggaactggtcggcgccgagcctcgcgaggtgctcgccgtgcgtcgccagaccctcggctacgtcagccagttcctgcgggtgatcccgcgggtggcgaccctcgacgtggtcatggagccggccctggcccgtggctggagccgcgacagcgccgaactgcgggcgcgcagcctgctggcccggctgaacatcccggaacgcctctggcaactggcgccgggtaccttttccggcggcgagcagcaacgcgtcaacattgcccgcggcttcatggtcgagtggccgatcctgctgctcgacgagccgaccgcgtccctcgacgaagccaaccgccaggtagtgctggagctgatcggcgaagccaaggccgctggcgccgcgttgatcggcatcttccacgaccgcgccgcccgcgaggcggtggccagccgctacctggacatgagccaggagctttcccgccaggagcaagcccatgtcgtctga

SEQ ID NO: 361195 - DNA, 1164 bp, Pseudomonas aeruginosa
atgtcgtctgaacgcgttctcagcaatgcccgggtagtcagcgccgagcgggtcttcgtcggcagcgtgctgctgcgcgacggcctgatcgccgcggtcgacgaaggccgcagccacctggccggggccgaggacctggggggcgactacctgctgcccggtctggtcgagctgcacaccgacaacctggagaagcacatgaccccgcgtcccggcgtcgactggccatcggcctcggcggtgctggcgcacgacgcgcagatcgtcgccgcgggaatcaccacggtgttcgacgcgctgtccatcggcgacgtcaaccccaagggcaagcgcatgcagcagctgccgaagatgctcgaggccatcggcgaggccgccgccagcggcgacgcgcgcgccgaccatcgcctgcacctgcgttgcgaggtcagccatccgcagacgctggaggtgttccgcgaactggtcgagcatccgctggtgcaactggtctcggtgatggaccacgcccccggccagcgccagttcgccaggctggagaagtaccgcgagtactaccagggcaagtaccacctgagcgatgccgagatggacgccttcatcgtcgagcaggtagccaactccgagcgctacagcgacgccgcccgtgcggccatcgtcgatgtctgccagggacgcggcctgtcggtggccagccatgacgacgcgaccctcgcgcatgtccgcgagtcggccggctacggcatggccatcgccgagttcccgaccaccgtggaggccgccagggccagccacgagcacggcctgcaggtgctgatgggcgcgcccaacgtggtccgcggcggttcccactcgggcaacgtggcggcggcgcaactggcgggaatcggcgtgctggatatcctttccagcgactactatccggccagcctgctgcatgcggccttgctgctcgccggcgagcacagcgagtatgatgcgatccgctacgacctgccgcgcgcggtggcgatggtcagccgtaccccggcgctggccgccgggctgaccgatcgtggcgaaatccgcgtcggcctgcgcgccgatctgctgcaggcgcgggcgctcggcaacaaccagccggtggtgcgtcaggtctggcgcggcgggcagagagtgttctga

SEQ ID NO: 361196 - DNA, 558 bp, Pseudomonas aeruginosa
atgacaggcagactgatttatctgatggggccttccggctcgggcaaggacagcctgttgcaggccgcgcgcgagcccctggcgctgcgcggctgccgtatcgtgcggcgggtgatcacgcgctccgcggaagcggtgggggaggacgcccaggcggtgactccggcgcagttcgacaccctcgagcgggcctcggcgttcgccatgagctggcgcgccaacggcctttgctatggcatcccagtgcagatcgacgagtggctggcgcagggctacgacgtgctggtgaacggctcgcgcggctacctggcgcaggcccgccggcgctatccggatctgctcgcggtcctgctcggggtgaaacccgaggtgctgcgccagcgcctgctggcgcgcggccgggaaagccccgaggaaatcgaggcgcgcctggcgcgcaacgccgagttcgccgccggcctggagggcccgctgttccaactggacaactccggtgacctcgacgacacgctacgcaccctcctggcccgtctcggcagcgaccgcgcatgcgcctga

SEQ ID NO: 361197 - DNA, 771 bp, Pseudomonas aeruginosa
atgcgcctgaccctgctcggcaccggcgacgcccgccaggtgccggtctacggttgcgattgcccggcctgtcgcaacgcccgcgccgacgccggcctgcgtcgccgtccctgtagcgcgctgctggagtgcgccggccagcgctggctgatcgacagcggcctggtcgatctctgcgagcgcttcccgccccatagcctcgatggcatcctccagacccattaccacgccgaccacgcccagggcctgctgcacctgcgctggggccagggcctggtgatcccggtgcatggcccggccgacccggagggcctcgccgacctctacaagcatccgggcatcctcgatttcagccagcccttcggcgccttcgagcggcgccagtggggcgcgctggcggcgaccgcgttgccgctggtccactcgaagccaaccttcggctacttgctggagggggcttccgaggagggaacgatacggcgcctggcctacctcaccgataccgtcgggctgccggcggacagcgcctcgcgattgctcgcggcgccgctggacctgctggtgctggactgctcgatgccgccgcaggagcggccgccgcgcaaccacaacgacctcacgcgggcattggagtgcatcgactcgctgcgtccccggcaggccgtgttgactcacgtcgggcatacgctggacgcctggctgctggaccaccccgctgcgttgcccgaaggggtggaactggcgcgcgacggcgtgtgcctgccgctatga

SEQ ID NO: 361198 - DNA, 186 bp, Pseudomonas aeruginosa
atgtcacgatccgccgtcattcttctgttcgtagtgatcgccagcgcgatcctggcgctgagcctgccgcccgaggccaccctcctcgcctggtgcgcctggggtctgctgggcatttccggcgcatggctgctgtttgcactggtggtaggtcggcgaatccgcttcgatccaagcctggactga

SEQ ID NO: 361199 - DNA, 147 bp, Pseudomonas aeruginosa; identical to SEQ ID NO: 319376

SEQ ID NO: 361200 - DNA, 279 bp, Pseudomonas aeruginosa
atgagcagctcacgcaacctggtcggcaccggacttctttccctgctggctctcgtagtcttccagaacagcgcactgggcgacgagaacaggacgcaggaacgcaacggcgaaaggccggtagtgctggacagcaacgcaacgccgcagtgggcacccgctgcgcaacaactggtgatccaggcgcccgacgaatccccgcgcatcgtcaccgtaggcgaggacgagcgcggcacggcgctggtgaccgcggccgacgaacaggcctggacattctga

SEQ ID NO: 361201 - DNA, 546 bp, Pseudomonas aeruginosa
atgaaccagaccgtcgccattcccgccgcacaggacctgccggacgccccgcgccagccgcggataccggactcccccttcgccagcttcgacgtgcggatcgccagcgagcacgacgcgccgcgcctgtcgttgctgctacagcaactcggtagcgccgatccgcgcccggacccggcgttgctggccatccagctgcaacgaccgcgcggcgaccgggtcaccctggtggccgagcgcggcgagcgcctgctcggcacctgcaccctgcatctgatcgaacacctggcgcacgatttcgcccgctcggcgattctcgaagacatggtggtcgaccgccacgcccgcggccagggcgtaggccgcgaactgatcggccgggccgtggagcgcgcgcgcagttggggctgctacaaactggcgctttccagccaccaggaccgggaaaccgcgcagcgcttctatgccgcgctagggttcaccagccacggcgtaagcctggcgctgcaactgggcggacatcatcatgcattttgcaaccggtaa

SEQ ID NO: 361202 - DNA, 1149 bp, Pseudomonas aeruginosa; identical to SEQ ID NO: 323712

SEQ ID NO: 361203 - DNA, 2658 bp, Pseudomonas aeruginosa
atgcgcatccccccatacttcccccgtcttggcgccctcgccctggcctgcgccctggccctgcccgcgcaggcggccgagcgcgcctggagctacagctacaacgccctcggcctgatcgagcgcgccgacggtccgcgcaccgatgtgcaggacgtcaccctctatgcctacgacagtcgcggcaacctgacccaggtgaccaacgccctcggccaggtcacccgcctcggcgactatgacgagcgcggcaagcccggcagcatcaccgatgccaacggcgtcaccagcagcctcgcctacaccggcgtcgacggctggctggcctccgtcagcaccgccggcagcaccacccgcttcgactatgacgcagtcggccagatcacccgcgtcacccgcggcgacggcagttggctgagctacgaatacgacgacgcacggcgcctggtggcgatcggcaacaacctcggcgaacgcctcgaatacgacgtcgacaccaagggcaatcgcaccgcccagcgcatcaaggacgccagcggcagcctggtgcgccagcagcaatgggcctacgacgagcttggccggctgctccgtgcggtcggcgccggcggccagacacgcaccttcgcctacgacctcaacgacaatccggtcggcgaaaccaacccgcgccagttcgcccacagccaggccttcgacgccctcgaccggctggtcggccagagcgatcctctcggcggcaagacccaactcgcctacgacgcccaggacaacctcaccgaggtcaaggacccgcgcggcgtcaccacccgctacgaatacgacggcctcggcaacctgacccgactggtcagcccggacagcggcaccaccaccttcgagcacgacgccgccggcaacgtcatccgccgcaccgacgctcgcggtgcggtcaccgagtatcgctacgacgccctcaatcgcctgatcgagcgccactcgccgagcgacccgagcctcgacgtacagtaccgctacgacctcaccgccgacggcaacaagggcatcggccgcctgggcgccatcgaaggtgcccgcgacagcctggtgtaccgctacgacgagcgcggcaacctggtcgagcaggtacgcagcatccgcctcgaccagcagaccctgctcgaccgcgtgacctaccgctacgacgcggccaaccaactgctggagatcggctacccctccggcctcgccatcggctacccgcgcaacgccggcggccaggtcgccagcgtgaccctggcagtgggcgacaaggcgccgagcaccctggtcgggcagatcgcctacctgcccttcggcccgctgctgcgcctgacctggggcaacggcatcactctcagccgcgagtacgaccaggactaccaactgctgcggcagaaggtcggcccctggcagagcgactaccagcacgatgccaatggcaatatccagcagcaccgccacagcctctggggcaccctggactaccagtacgacccgctggaccgcctgaccgaggaacgcggcgtccagggcgggcgcagctatgcctacgacgcggtcggcaaccgcacccaacgcagcgacaaccccgcctcaggcggcaccgccagcagccaggactaccagtacgcgcccgacagcaaccgattgaccgccatcggcgcgcaagcggtgaccagcgacgccgccggcaacctcacccaggaccgcgccgcgcgcaaactggcctacgacgcccagggccgcctgcaaagcgtcagccgcgacggccagcaggtcgcccaataccgctacaacgccctcggccaacgcatcgtcaagctcacccccgagagcatcaccacctacctctacggtcccgacggccagttgctcggcgaagccgaacacgacggcagcggccggaaactgcgagcccagtactacctgtggctggacagcctgccgctggccaccatcgacgccgactacgacgcccagggcaaggtcggcaacccgaccctgctctacctccatggcgaccacctcgacaccccgcgcctggctaccgacgccagcggccagatcgcctggcagtggcagtccgacgccttcggccgcggcgaagcgctgagccagggcagcacccaggtcaacctgcgcttccccgggcagtactacgatgcggagagcgggctgcactacaactacttccgcgactatgatccggagactgggcggtatgtggagagtgatccgattgggttggccggcggcttgaatacgcttggatatgccggccaaaatcctgtaatgcaccaagatcctgatggcttggcatttatgcttttagctctcccctttgcaggtggaaccagcctaggctctgcgctcacatcagctacagcattaggaataggggcttgggggctaaccacccttggtgactcccccgtgcaaatggctgctccagggaacgtagctgattcgcaaattgttcgagattacggcgaagacgcatctcaagcacgccagtgtggaggtaaagcccctgatcgatgtgaatggcttgagcaaaacaaaaataactatcgccctgaccaggttaaggcaacccaaaaagcatggggatgtcgtagaagtaggcatggtcgttaa

SEQ ID NO: 361204 - DNA, 339 bp, Pseudomonas aeruginosa
atgaaattcggactcttcgcctcgactgccctcttcctcctgtcggtctgcgcacttccggcgctggctgccaatagcccctgctcgggaaagaaaggcggtatcgccggttgcgacggcgatatcttcctctgcaacgacggctccatcagcgcctcgaagcgcagttgcgcggcctacttcggcaacgccggaggacgtaccggacaacccgccgtacagcgtctgcaaggcacgacgcagggctgtgcctgtggcagcggctcgttctgcacaggcccgcgcggaggggtgtactgcctgacgccgggcggcaagaaaagctatcggagaaagtga

SEQ ID NO: 361205 - DNA, 1041 bp, Pseudomonas aeruginosa; identical to SEQ ID NO: 319380

SEQ ID NO: 361206 - DNA, 1116 bp, Pseudomonas aeruginosa
atgccttttctgagcgacatgcttgaccagtcccgccggcagcaggacgaggaacaggccctggcgcgggagaatcttgccgaggcaagtctgctccaggcccacctgagtcaccgcagcgccctgcacagccgtttccgtttcgacccggcggcggtgatggactgcctgcgcgccgaggtgctcggccaggaaccggcgctacaggccgtcgaggacatgctcaaggtggttcgcgcggacattgccgacccgcgccgtccgctgttcagcgcgctgttcctcggccccaccggggtcggcaagaccgagatcgtgcgcgccctggccagggccctgcacggcgacgccgaggggttctgccgggtggacatgaacaccctgtcccaggagcactatgccgccgccctcaccggtgcgccgccgggctacgtcggggcgaaggagggcaccaccctgttggagcaggacaagctggacggcagtcccgggcgccccggcatcgttctcttcgacgaactggaaaaggccagcccggaagtggtccatgcgttgctcaacgtactcgacaacggcctgctgcgggtcgcttccggcgaacgcacctaccatttccgcaataccctggtgttcatgaccagcaatctctgcgcccatgagatccagcgctacgacgagcgtcgccagcgcctgccctggcgcctgctgccggtcggcggcgagcgccggcggcgggacatcgacgggatggtccgggcccggctgctgaagactttctcgccggagttcgtcaatcgtctcgatagcgtggtcaccttcaactggatcgaacgcgacgtcgtcgcgcgcctggtcgagctggaggtgcagcggctcaaccggcgcctggagaagcatcgctgtcgcctggaggcgacccccgaggtgctggcgaagatcgcccgcgctggcttcgaccggcagttcggcgctcgtgcgttgcgccgcagcgtccgtcatcatctcgaggtaccgctggccgagcatctgctcgaccaccaccagccgggcgacgggaactgcacgacctacctggcgagcctggagcacgagcgggttcgcttcgtgcggcgctga

SEQ ID NO: 361207 - DNA, 1158 bp, Pseudomonas aeruginosa
atgggatcgcaccaggagcggccgctgatcggcctgctgttctccgaaaccggcgtcaccgccgatatcgagcgctcgcagcgctatggcgcattgcttgcggtcgagcaactgaaccgcgagggcggcgtcggcggtcgcccgatcgaaacgctgtcccaggaccctggcggcgacccggaccgctatcggctgtgcgccgaggacttcattcgcaaccggggggtacggttcctcgtgggctgctacatgtcgcacacgcgcaaggcggtgatgccggtggtcgagcgcgccgacgcgctgctctgctacccgaccccctacgagggcttcgagtattcgccgaacatcgtctacggcggtccggcgccgaaccagaacagtgcgccgctggcggcgtacctgattcgccactacggcgagcgggtggtgttcatcggctcggactacatctatccgcgggaaagcaaccatgtgatgcgccacctgtaccgccagcacggcggcacggtgctcgaggaaatctacattccgctgtatccctccgacgacgacgtgcagcgcgccgtcgagcgcatctaccaggcgcgcgccgacgtggtcttctccaccgtggtgggcaccggcaccgccgagctgtatcgcgccatcgcccgtcgctacggcgatggcaggcggccgccgatcgccagcctgaccaccagcgaggcggaggtggcgaagatggagagcgacgtggcagaggggcaggtggtggtcgcgccttacttctccagcatcgatacgcccgccagccgagccttcgtccaggcctgccatggtttcttcccggagaacgcgaccatcactgcctgggccgaggcggcctactggcagaccttgttgctcggccgctccgcgcaggccgcaggcagctggcgggtggaagacgtgcagcggcacctgtacgacatcgacatcgacgcgccccaggggccggtccgggtggagcgccagaacaaccacagccgcctgtcttcgcgcatcgcggaaatcgatgcgcgcggcgtgttccaggtccgctggcagtcgcccgaaccgattcgccccgatccttatgtcgtcgtgcataacctcgacgactggtccgccagcatgggcgggggagcgctcccatga

SEQ ID NO: 361208 - DNA, 591 bp, Pseudomonas aeruginosa
atgagcgccaactcgctgctcggcagcctgcgcgagttgcaggtgctggtactcaacccgccgggagaggtcagcgacgccctggtcttgcaactgatccgcatcggttgttcggtgcgccagtgctggccgccgccggaagctttcgacgtgccggtggacgtggtcttcaccagcattttccagaatcgccaccacgacgagatcgctgcgctgctcgccgccggaactccgcgcactaccctggtggcgctggtggagtacgaaagccccgcggtgctctcgcagatcatcgagctggagtgccacggcgtgatcacccagccgctcgacgcccaccgggtgctgcctgtgctggtatcggcgcggcgcatcagcgaggaaatggcgaagctgaagcagaagaccgagcagcttcaggaacgcatcgccggccaggcccggatcaaccaggccaaggcgttgctgatgcagcgccatggctgggacgagcgcgaggcgcaccagtacctgtcgcgggaagcgatgaagcggcgcgagccgatcctgaagatcgctcaggagttgctgggaaacgagccgtccgcctga

SEQ ID NO: 361209 - DNA, 519 bp, Pseudomonas aeruginosa
atgatgctgggactggttctgctgtacgttggcgcggtgctgtttctcaatgccgtctggttgctgggcaagatcagcggtcgggaggtggcggtgatcaacttcctggtcggcgtgctgagcgcctgcgtcgcgttctacctgatcttttccgcagcagccgggcagggctcgctgaaggccggagcgctaaccctgctattcgcttttacctatctgtgggtggccgccaaccagttcctcgaggtggacggcaagggcctcggctggttctgcctgttcgtcagcctcaccgcctgcaccgtggcgatcgagtcgttcgccggcgccagtggtccgttcggcctgtggaacgcggtcaactggacagtctgggcgttgctctggttctgtttcttcctgctgctggggctgtcccgcagcatccagaagccggtggcctacctgaccctggccagcgccatattcaccgcctggttgcccggcctgctgctgctcgggcaggtgctcaaggcatag

SEQ ID NO: 361210 - DNA, 348 bp, Pseudomonas aeruginosa; identical to SEQ ID NO: 319385

SEQ ID NO: 361211 - DNA, 1059 bp, Pseudomonas aeruginosa
atgactcccgatcaacgatttgcccgttgggttcaagtcgctatcgcggtattcgtgttgctgttcgtctacttcctggtcgccgacctgtggatgccgctcaccccgcaggcccagttgacccggccggtggtgcgcgtcgcgccgcgtgtcagcggtcaggtcgccgaggtgctggtgtccaacaacggccacgtgcagcccggcgaagtattgttccgcctcgatcccgagcctttccgactggccgtgcgccaggccgaactggcactggaggaagccgagcgcaccaaccgcgagctggatgccgccatcgcctcggccaaggccgacctcctggccgcgcgcagcagcgccggcgagctggacagcgaggcgcgccgcaccgcccaactggtgcagcgccaccatgtgtcgcagcagatgcacgagcaggtcagcgcccaggcccaggccgcccgtgcccgggtcgccgcggcccaggcgcggatcggcgagctgaccgcgcgacgcggcacggccggcgaggacaacctgcgcctgcgccaggcgcgcaatgccctggcccaggctcgtctgcaactgcaatacagcagcgtccgggccgaccgcgccgggaccctgagcaacctgcaactgaccccgggcacctacgttccggccggaacgccggtggcggcgctggtggacgaccgtatcgacatcgtcgccgacttccgcgagaaatcgctgcgctacgtgcgccctggcgaccgtgcggcggtggtgttcgacgcgcgtcccggcgaagtgttcggcgcgcgggtggcggccatcgacgccggggtcaaggagggccagctggacgccaacggcgacctcgccgcgccggtcacctccgaccgctgggtccgcgacgcccagcgccagcgcctgcacgtggtgctcgacgaacttcccgaaggcctgctgcccaccggtgccaaggccaccgtgcagctctatcccggcgacggcctgagccatctgctcggtcgcgcgcagatcgtcgccatcagcctgctgcactacgtctactga

SEQ ID NO: 361212 - DNA, 1029 bp, Pseudomonas aeruginosa
atgccggccaagctcgcgatgtccgccaacgacctgcgtcagtgcctgcgcatcgccggcggcggcaccctggggttcttcgtctgcaagctgatgaactgggactacggctcgttcttcggcgtctacccgatgctgctgctcggcctgacgccggtgatcaacctgcacatcgtccgccagttcctcgccaactcggtggtgatcagcgtcgaggtactggtgctgtacgggttgttcggcgaccggccgctgctgatgacgcctatcgtcttcggcctcttcgtctaccgcttcgccctgatggcgcgcggcccgctgttcttcttcggcgcactgagttcggtgttcctctcgatgctgctgcactttgccagctatccggacgtcgatctgttcgacatgctcgccagcaacatggtcgccacctggctgacggtggccatcgccgtgctgatgttctacctgttccccgacgtcgaaccgcggtcgccgcgccaggcgccggccaaggacgcccccagccggcgccacgagacgctgctcggggccacggtggcgaccctgtccttcgtggtcttccagaccttcgacctgaaggactcgctgtcggcgcagatcgcctcgatcctggtgttatttcccatgcactggaagggcgtgcacttcgccgggcgcatccgcgccctcggtacgctgctcggctgtgcgctggcggtgggcttgcaggtgctgctctacgatcactacgacatcctgcccttcgtcgccctgttgctgtggatctcggcgatgttctgcgcgcgcatccacatgctggagaacggcgtaccggggatcggtttcggcgcgctgaccaccctggcgatcgtcctcggccagtacctgacgccaacccacgacatgatgtacagcgtgctctaccgatttacctcggtgtgcttcgcggtgctgatcacgttgatgacggtgctggtgatccacctgttcctcaaccgcttcgccgccacccggcactacagccactga

SEQ ID NO: 361213 - DNA, 879 bp, Pseudomonas aeruginosa
atgcgcacacccgcctggctcggcagcggcatgccgctgctcttcgtgctgctctggagcactggattcctcggcgccaagttcggcctgccgtacgccgagcccttcaccttcctggccatccgcctgctcctcgcggccgccctgctggccgccttcgccctgctcagcggtgcgccctggccgggctcggcacggctggccgggcatgtcgcggtcgccggcctgctggtccatggcctgtacctgggcggggtgttcctcgccatcgagcacggcatgtcggccggcctgacctccctgttggtcggcctgcaaccgctggctaccgcggccctggccggcatctggctcggcgagcaggtcagccgccggcaatggctgggactggcgctcggcctggctggcgtagccctggtggtactcggccgcatccacggtggcgccgacggcctggcctgggccgcggtgctggtggcactggcggcgatcacctgcggcacgctgtaccagaagcgcttctgcggcggcatggacctgcgcaccggcggcgtcgtccagtacctggccagcggcgccctgctcggcctcgccgccctgcttttcgaaagccgcgaggtgcagtggagcacgccgttcgtgctgaccctcggctggctggtgctgggactctcgttcggcgccgtcggcctgctctacacgctgatccggcatggcgccgcgtcgaaggtggcgagcctgttctacctggtgccgccagtgaccgcgctggcctcctggctgctgttcgacgagcgcctggcgccggcggcgatcggcggcatgctgctggtgatgctcggcgtcgcgctggtcaactggccgggccggcgcgcctga

SEQ ID NO: 361214 - DNA, 1347 bp, Pseudomonas aeruginosa
ttgattctcggaacatccaaggccgactggctcgccgaattcccgcgcctggccgacctcatcgccctgcgcccgagcgagtggttcaacccggccatcgcgccgagcgccgaagccctggccgacgtcggcctcggcgccgccgacgtggccgacgccagcgcccgcctgcagcgcttcgccccgctgatcgcccggctgtttccggaaaccgccgccagcggcggcatcatcgagtccgacctggtcgaggtcgccaccttccacgatgccctgcgccagcattacgccgccgaactgcccggccggctctggctgaaacgcgatagccacctgccgatctccggctcgatcaaggcccgcggcggcatctatgaagtgctcgcccatgccgagcgcctggccctggagcacggcctggtcggcctcgacgacgactactcgcggctggccgaggcggattgccgggcattcttcgcccgccaccggatagcggtgggctccaccggcaacctgggcctttccatcggcatcatcggcgccgcgctgggcttccaggccagcgtgcacatgtccgccgacgcccgccagtggaagaaggacaagctgcgcgcccacggcgtgacggtggtggagtacgcctccgactacagtgtcgcggtggaacagggccgccgcgaagcggccggcgatccctacacccatttcgtcgacgacgaaaactcccgcgacctgttcctcggctacgccgtcgccgccgagcgactgcgcggccagttggacgccgccggcatccgcgtcgacagcgagcacccgctgttcgtccatctgccctgcggggtcggcggcggtcccggcggggtggccttcggcctcaagctggcgttcggcgacgcggtgcactgcctgttcgccgagccgacccattcgccctgcatgttcctcggcgtctataccggccgccacgagcaggtttcggtgcaggacttcggcatcgacaaccgcaccgccgccgatggcctggcggtggggcgtccgtcgggcttcgtcggccgcgccatgcagcgcctgctcgacggctactacacggtggacgacgacgagttgttccgcctgctcgccttgctcgagcgcagccagggcatccgcctggaaccctcggccctggccggcgcgccgggcatcgcccgggtcacccgtgagccgcagggctatcgcgaacgcatggggctgacctcggcgcgcctggccaatgccacccacctggtctgggccaccggcggcggcatggtgcccgagacggaaatgcgcgcctacctggagcgaggccgctcgctgctggactga

SEQ ID NO: 361215 - DNA, 1344 bp, Pseudomonas aeruginosa
atgactatcgaaggccaaggctcactcgccgaacggctggctggagttgaagaaatcgaatgcgtcacccccgacctcaacggggtgccgcgcggcaaggtgatgaccggcgagggcttcctcagcggccggcgcctgcagctcgcccgtggcgtgctgctgcaatgcatcatgggcggctacccgccggcgcgcttctatggcagcgacgatggcgacctggcgctggtcgccgagccgacccaggtccatcgcctgccctggagcaacactccgcgcgccttcgccatctgcgatgcgcaggaactggatggcacgccgtccgggctgtccacccgcggcctgctcaagcaggtggtggcgcgctacgccgcccacggctggcaaccggtggtggccaccgaactggagttcttcgtcttcgccccgaacaccgatcccaacgagccgttccaggccccgctggggccggatggccggcgcgagctgggctattcggccttcagcgtgtcttccaacaacggtctgcggccgttcttcgaggacgtctaccgctgcatggatgcgctgggcctggtgcgcgacaccttcatgcacgagatgggcaccagccagttcgagatcaacttcctgcatggcgacccggtcctgctggccgaccagaccttcctgttcaagcacctgctcaaggaggtcgcgctcaagcacggcctgatcgtggtgtgcatggccaagccgctggcgaagacgccgggcagctcgatgcacatccaccagagcatcgtcgaactggacggcgggcgaaacatcttcagcgaagccgatggcgagccttccgccgcgttccgccacttcatcggcggccagcaggcctgcctggcggacttcacgcccttcttcgcgccgcatgtgaactccttccagcgcctctgccatccctacgcttcgccgaacaacgcctgctggtcccacgacaaccgcgccgccggcctgcgcatcccggccagcggagcctccgcgcggcgcgtcgagaatcgcctgccgggcgccgacgccaacccttacctggccatcgccgccagcctggccgccggtctctacggcctggagcacgaactggagccgagcccggcgatccagggcgagttcgaggtaccggaggaactgaccctgccctgcaccatgtacgatgccctgcggcgcctgaaaggcagcgcgctggcgcgcgaactgttcggcagcgagttcgtcgaaggctacgtggcgaccaagagcatggagctgaccagcttcttcgacgagatcagcccctgggagcgtcgcgtcctggcagcccaggcctga

SEQ ID NO: 361216 - DNA, 1305 bp, Pseudomonas aeruginosa
atgcggcggattttcttctcttttcgcgctctctatttcgctaccctgctgatgctcaccggctccggcctgctcagcacctacctggcgctgcgcctggcggcggacaaggtcgacggcctgtgggtcggcgcgctgatggcagccaactacttcggcctggtgctgggcggcaaggtcggtcaccggctgatcgcccgggtcggccacatccgcgcctacgtcgcctgcgccggggtggtcaccgccgcggtcctcggccatggcctgctgccctggctgccggcctggatcgccttgcgcatggtgatgggcctgggcctgatgtgccagtacatggtgatcgagagctggctcaacgagcaggccgatgccagccagcgcggcgcggtgttcggcggctacatggcggcttcctacctgggcctggtgctcggccagatgatcctggtggcgcatccgcaactggggccggagttgctgatgctggtggccttctgcttcgccctgtgcctggtgccgctggccctgacccacaagatccaccccgcagcgctgcgcccggcgccgctcgaaccacgtttcttcatccgccgggtgccgcagtcgctgaccaccgtattggtctcggggctggtggtcggctccttctatggcctggcgccgctgtatgccaaccagttggggttgcccaacgagcaggtcggcctgtacatgggcgcctgcatcttcgccgggctgctggtgcagtggccgctcggctggctgtccgaccgtcgcgaccgcgcctggctgatccgcgcctgcgccatcctgctgtgcctgttcgccttgccgctggcattgttgcaacagatgccgctggcgttgctgctggccctgggaatcgccgcgagcatgttgcagttcaccctctatccgctggcagtggccttttccaacgaccatgtggagaccgagcgacgggtttcgctgaccgccatgctgctggtgaccttcggcgtcggcgcctgcatcgggccgctggcggccggcgcgctgatgcggctgtttggcgctaacatgctatatgcgttcgtcagcgcctgcgcgctgatcctggtctggcgggtccatccggagaaggtcagcggcctgcaccgggtcgacgacgcgccgctgcaccacgtgccgaccccggacaacatgaccagctccccgctggtcgcggcgctcgatccgcgagtagacgaacaggcggtgcaggagcagatggtcgatggcgagcccgacgcgccgcaggccgacggtgcgacgcagaactga

SEQ ID NO: 361217 - DNA, 750 bp, Pseudomonas aeruginosa
gtgcccaacccgttcgtcgaagaagcggggccgcaacccccgaaggtgctcaaggcccccgtggaaatccaggccaacctgcgcctgctgcaggatagccgcgactccctgctgatcacctttgccgatcgcaaccagcgcttccagagcttcctggtggacatcgaccgcgaccgcgggatggtcgcgctggacgaactcatccccaacaccggcgaacgtttcctgcagaacggcgaggcgtttcgcgtcgaagccttccacgaaggcgtgcgtatcgcctgggaatgcgagcgcccggtgcagttcggcgaacacgacggcgtcccctgctactgggccgcccttcccgccgaagtgctctaccaccagcgccgcaacgcctaccgcgccagcatcaagcagagccagccgatcgccgcggaaatcgccggggagaaactccgcgcgccgctgagcggacaactgctggatatctccgccaccggcgccaagctgcgcttcgccggcaatgtcgccgaacgcctgcatcccggcgagatctacgaagacttcagcgcccagctgccacagggcgcgatcagtagcgcgatcgaactgcgtcacgtgcgcttcgacgaaaagctcgacgcgaccttcgccggcgtccgcttcagcgagatgagcggcctcgcccagcgtcaggtggatcgcttcgtctaccagttacagcgcgaagcgcggcgcttcgagaaagacgaactgttctga

SEQ ID NO: 361218 - DNA, 471 bp, Pseudomonas aeruginosa; identical to SEQ ID NO: 319393

SEQ ID NO: 361219 - DNA, 324 bp, Pseudomonas aeruginosa
atggtcatcgacttcaaccggctgaatcccggcagcacgccagccaccaccggccgtaccggcagcaccgccgcaggtcgccccgacgccactggcgccgacaaggcaggccaggccgcgacttccgctccgaagagcggcgagtcggtgcagatcagcgaaaccgcccagaacatgcagaaagtcacggaccagctgcagaccctgccggtggtcgacaacgataaggttgcccggatcaagcaagcgatcgccgatggcacctatcaggtcgacagcgagcgtgttgccagcaagctgctcgacttcgaatcccagcgctga

SEQ ID NO: 361220 - DNA, 738 bp, Pseudomonas aeruginosa
atggcatgtagccatacttctctacggtttttacccgttttgctcgggctcggctacctgtgcgcggctaacaacagccaggcccagggttttaccgctcccgaggtacttatcggctccacccaggggtttcttgaattcaaggtagaagaatatctgcagaatagcggactcgacgggcgctaccagattcaggtcaatcgcgtcgacccgcgcttgcgcctggccgaatgcgacagggacttgacgctcagccaggaaagtccggcacaaccgatcggcagggtcaccgtgcgcatcagttgcgaaggcagtgcgccctggaccatcttcatgccggcgcaggtgaaactgttccgccaggtagtggtcgcggtgcagccactcaagcgcgcgcacgtgctggaggatgccgacatcgccctggtcgagcgcgacgtcggcctgctgacccagggctacctgaccgatccggcccgcgtcgtcgggcagaagctgcgccgaccggtggtcaacgaccaggtgctggcgccggtcttcctagagcaggccgaggccgtgcgcaagggcgaccaggtggtgatcctcgcacgcaccgccaccatcaacgtcaagatgcccggcgaggcgctgtccgatggcgccccgggccagcagatccgcgtgcgcaacctgcgctcgcagcggataatcaaggcccgcgtgatagaacccggcacggtcgaggtgaatatgtag

SEQ ID NO: 361221 - DNA, 933 bp, Pseudomonas aeruginosa
atggccggtgttttggattcagtcaaccagcgtacgcagttggtcggacagaaccgtctggagctgcttctgttccgcctggacggcaaccagctctacggcatcaacgtgttcaaggtgaaagaggtgttgcagtgcccgcgcctgacggtgatgcccaagtccagcccggtggtgcgcggggtggcgaacatccgcggaggcaccattccgatcctcgacctggcgctggccaccggccgccgcgggttgcaggacctgaccaacagcttcgcgatcatcaccgagtacaacaccaaggtgcagggcttcctggtgcgctcggtggagcgcatcgtcaacatgaactgggaagagatccatccgccacccaagggcgccggccgcgagcattacctgaccgcggtgacccgggtggacaagcagttggtggaaatcatcgacgtggaaaaagtgctcgcggaggtcgcaccgacgtccgaggaagtgtcccacggagtggtggacgccgagacccagagccgcgcggtgaccaagcgggtgctggtggtggacgattcgtcggtggcgcgcaagcaggtaatccgttgcctggaggcggtcggcgtggaaatgaccgcgctcaacgacgggcgccaggccctggagtacctgcagaacatgctctccgagggacggcgtccggaagacgagctgctgatgctgatctccgacatcgaaatgccggaaatggacggttataccctgacggcggaaatccgtagcgatccccgcctgcagaaactgcacattctcttgcatacttcgttgtccggggtcttcaaccaggcgatggtgaagaaggtcggtgcggacgacttcctcgccaagttccgtccggacgatctggcggcgcgggtggtggagcggatcaaggcggtggacgcgggctga

SEQ ID NO: 361222 - DNA, 825 bp, Pseudomonas aeruginosa; identical to SEQ ID NO: 319397

SEQ ID NO: 361223 - DNA, 306 bp, Pseudomonas aeruginosa
atggccatcactgcgctgccctcggccgatgggcaagagttgaccatccagatccaggggcgcttcgacttcggggcccatcaggatttccgcgacgcctacgagcgcgtcgcgatcactccgcgacgctatgtcgtcgacctgcgcaacgccacctacctggacagctcggccctcggcatgctcctgctgctgcgcgaccacgccggcggcgagaacgcgcagatcagcctggcgaactgcagcccggaagtgcgcaagatcctcgccatctccaacttcgagcagttgttcaagatcagctga

SEQ ID NO: 361224 - DNA, 1716 bp, Pseudomonas aeruginosa
atgaatcccccggcggcgcggatcgagagcctgacgattctcatcgccgaggacaacgcggccgaccgcctgctgctgtcgaccatcgtcagccgccaggggcatcgcgtgctgaccgccggcaacgggctggaggcggtggcgctgttcgagaccgagcggccgcaactggtcctgatggacgtgatgatgccggtgatggatggcttcgaggctgcccggcggatcaagcagcaggccggcgaggagttggtgccgatcatcttcctcacctccctcagcgaaaccgaggcgctggtgcagagcctggaggcgggcggcgacgacttcctctccaagccgtacaaccgggtgatcctcgaagccaagatcaacgccatgggacgcctgcacctgctgcaacgaacggtgctggagcagcgcgacctgatcgtccggcacaacgagcacctgctcaacgaacagcgggtggccaaggcggtgttcgacaaggtggctcattccggctgcctgaacgccagcaacgtgcgctacctgcaatcgcccctcgcgctgttcaacggcgacctgctgctggccgcctacaagccgtccggcggcatgcacgtgctgctcggcgacttcaccggccacggcctgccggcggcgatcggcgcgatgccgctggccgaggtgttctacgggatgaccgccaagggctatccgatggccgacatcctccgcgagatgaacgccaagctgaagcgcatcctgccggtcggcgtgttctgctgcgccaccttgctcaacctgagcttccagcgcgaactggtggaggtctggaacggcggcttgccggacggctacctgctgcgcgccgccagcggcgagcgggtcgccctggtgtcccgccacctgccgctgggaatcctcgaaccggcggcgttcagcgaccgttgcgaaacctatccgctggatatcgaagatcggatattcctgttttccgacggggtcctcgaggccagcaacaaggctggcgagatgttcggcgaggcgcggctgctccagctgttcgagcgcaatcgccagccgtccgcgctgttcgacgagatccagcgcagcctggcgcagttccgcggcgcggtgcaggacgacgtgagcatgctcgaagtgcggctgcagccggatagcggcctgcaatgcccgccgctggcgttttccgatagcggcgtgagcagtccgctggactggtcggtaagcttcgaattccgcgccgaaaccctcaagcatttcaacccgctgccccatgtgctgcaactgctgctcgaggtccacgacctgcgcgcgcgcggcggcgcgctgtatacggtactcgccgaactctattcgaacgccctggaacatggcgtcatcggcctcgattcgacgatgaagagcgacgcggcgggattcgcccgctattaccaggagcgggtcagccgcctgcaggccttgcgcgacggctacgtgcggctgcacctggacctggcgccgcatggcgcgggggggcgtctgctggtgcgggtcgaggacagcggcgaaggtttcgacgtggagcgcgcgctgaatgccgtggagcgccaggaacgcctctgcggcaggggtttgcgcctgatccgcgaattgtccgatcgttgccagtggtcggccgacggaaaggtggtgtccgtggagtttttctggtcgcctcaggcataa

SEQ ID NO: 361225 - DNA, 351 bp, Pseudomonas aeruginosa
atgtccgcgccgcatctcgatgatcgtgttctggcttcgctgcaggaggtcatggaggacgaatatccggtcctgctggataccttcgtgctcgactccgaggagcgcctgcgcagcctgcatgccgcccttcaggccggcgatgcccaggctttgcggcataccgcacacagcttcaagggaggcagcagcaacatgggcgcggtactcctcgccggctactgcaaggagctggaggaaagcgccaggcgcggcgacctgcaacgggcgccggcgctgatcgaacagatggagcgcgaattcgccatcgtccgcatccttttcaaacaggaacgtcagcgctatcgctga

SEQ ID NO: 361226 - DNA, 2139 bp, Pseudomonas aeruginosa
atgcgcgagcaagccctacgcatcctcaaagacgttttcggttacgacgccttccgtggcaaccaggcacggatcatcgagcgggtagccgagggtggcgatgcgctggtactgatgcccaccggcggtggcaagtccctgtgtttccaggtcccggcgctgctgcgcgaaggcctgacggtggtggtgtcgccgctgatcgcgctgatggaggaccaggtcgccaccctggacgaactcggcgtgccggcggtggcgctgaactccaccctcaaccccgagcagcagcgggacatcgccgagcgcctgcagcgtggcgagatcaagctgctctacctggcaccggaacggttggtccagccgcgcatgctggccttcctgcaacgactgccggtcggcctgttcgccatcgacgaagcgcactgcgtgtcgcaatggggccatgacttccgtcccgaatacctgcagctcggccagcttgccgagctgttcccgcaggtgccgcggatcgccctgaccgccaccgcggacatgcgtacccgcgaggagatgatccagcgcctgcacctgcagaacgccgagcagttcctctccagcttcgaccggccgaacatcttctaccgcatcgtgcccaaggagcagccgcgcaagcagttgctcggcttcctctccgagcggcgcggcgatgccggcatcgtctactgcctgtcgcggaagaaggtcgaggaggtcgcggaattccttggcaaccagggcttccccgcgctgccgtatcacgccggactgtccaacgaactgcgtgcccaccaccagaagcgcttcctcaacgaggaaggcttgatcatggtggcgaccatcgccttcggcatgggcatcgacaagcccaacgtgcgtttcgtcgcccacctcgacctgcccaagagcctcgaggcctattaccaggaaaccggccgcgccggccgcgatggcctgccggccgacgcctggatggcctacggcctgcaggacgtcctgctgctgcggcagatgatgcagagttccgagggcgacgagcggcacaagcgcgtcgagcggcacaagctggaagccatgctggcgctctgcgaggaaacccgttgccggcgccaggcgctgctggcctatttcgacgaggagatgccgcagccctgcgggcattgcgacaactgcgtggacggcgtggaaacctgggatgccaccgaatccgcgcgccaggcgctgtcggcgatctaccgcagcggccagcgctacggcgtcggccatctggtggatatcctgctcggccgcgagaccgagaagatccgcagtctcggccaccagcacctggcggtgttcgggatcggcaaggggcgtggcgaagacgaatggcggaccctgttccgccagttggtcgcgcgcggcctggccgacgtcgacctggacggcttcggcggcctgcgcctgaccgaggcctgtcgtccgctgctgcggggcgaggtgcggctggagctgcgccgcgacctcaagccacagcgcgccaagggctcctccagcggcggcgccagcgccgccagccaattggtgcgcagcgaagagcgggaaatgtgggaggccctgcgcgcgctgcggcgcaagctggccgaagagcattcggtgccgccctatgtgatcttccccgacgcgaccctgctggaaatgctccgcagccagccgcgctcgctatccgacatggcccaagtcagcggggtcggcgcgcgcaagctggagcgctacggccaggccttcctcgatgtcctcaccgactcgccggcggcgcccgccgcgccgccgcaggacctgcgccacgaattggccagcctggcctgtgcggggatgaccccggcgcagatagcccgccagctcaattgcagcgagaagaacgtctacgcgatgctcgccgaggccatcgccggtcagcaggtgagcctggagcaggcgctggatctgcccgaggaactcctcggcgaaatccaggacgccttcctcgaggaagacggcgaactgccgccggtggcggcgctggaggagcgtttcggcaagcgggtgccgagtggcgtgctgcactgcgtgcgcgccgccctgcaggtggaactggagtcgtga

SEQ ID NO: 361227 - DNA, 1164 bp, Pseudomonas aeruginosa
gtgacacagaaggaccggttggacgactcccgttccaatctctatgccgaccaattgaaccgcggtttccgcggtctgcgtttccttcccgaactggagcgtgactaccggcgctacatgctggaggacagcttcgcgctgaaacgcatcgccctcagcgtcggcatgctcgtctggctggcgttcatcggcatcgacctgctgttcctcgctggtcccccgctgtggggcgtactggcggtgcgccttggcgtgctggtcctgctactggtctgcggctgcctgatcatgctgcgccggcacatccagctgatggtgccgctgagcatcgcctgcgtcctcgcccttggcgtcggtgcggcggcggtggtcggcctggcgcatcgggcggatcccggctatccctacgaaggcctgctgctggtcagtttcgccgcctatttcctcgccggcctgcggttgtcgcaggcattgagctgtgcgttggtcgtgctgctcgcctacctgggtttcgagtggtgggcgggtacccaggagccgctgggcaacaacctgctgttcctgctgttcggtaacctgatcggcgcggtcggctgctacctgctggagttcaagtcgcgcgagcatttcctcatcagccgcctgttgcgggtgatggccgaccacgacagcctgaccggcctgcacaaccggcgcagcttcaaccagcacctcgaccgcctctggcgtcaggcccagcgcgaacagaagaccctggcgctgctgctttgcgacgtcgaccatttcaaggcctataacgaccgctacggacaccaggctggcgatgcggtcctgcagcgcatcggcgcggtgttcgaggcgaatgccaggcgtccgctggacatggcggtgcgcctgggcggcgaagagttcgccctgttgctgtacggcgccaacgagcacgaggcgaggctgcgcgcggaagcgctgcgcgcacaggtgcaggcgctgcgcatggagcacgaggcgtcggacacggcgcgcgaagtgaccctgtcggtcggcgtgtcctgcctgtggccgaccccgggcaacgacctgaagcgtctctacgatctctacgagcatgccgatcgcgcgctttacgaagccaaggcgttcggccgcaaccaggtggtggcctga

SEQ ID NO: 361228 - DNA, 1017 bp, Pseudomonas aeruginosa
atgcagcgcttgatccaggccaacggccaaccgcactacggcatcttcccgagtgccccgcagcacatcaattaccgcgatttcgacttccgttcgccgatgggccggcgcgtgggggccctgggaaaatggcgacgcttccatcagttccagtacttcggcctgatcagcccggagctgatcggcggctgcgccctggcccagctgagcttgcttggcgtcggcttcgtctacctctaccagccttccagcggacgcatgctggagcggcgcttcaagctgccgctggggttcggaacccggttttcccagaccccggacgacggcgtctgcgaactgcgccaggggcgcaacctgctacgcctggagaaccgtatggctcaccgggagaaacgcctgctggtggaactcgacgatggcacccgcatcgacgcctgcttcagcgaggaggcgccgagcttccagccgatgtgcctatgtacgccgaccgcggtgaacggctgggtctacgcgcagaaggtggccggcgtgcgctgtcgcggcgacgtgcgcagcgccctcggcgaccacgacctgcaggcgctggacgccttcgcccatcacgactggtcggcgggctacatgcgcccggaaaccttctggaactgggcttgcctgtccggcgaggcggacggcttgcgggtcggcctgaacctgtcgtgcggagtcaacgagaccagcttcaccgagaactgctactggctggacggcgaactgctgaaggtcgacagcgtgcgcttcgacttcgaccgcgaccagccgctgcggccctggaccatccgttcatacgatggccaggtggagctgcgcttcgaggctcacggcatgcatcaggagcggctgaacctcggtctgctggcgagcaacttcaagcagatattcggttgtttcagcggtgtgctgcgtccgcgaggtcgtgccgaggtgaggatcgagcggctctggggcttcgtcgaggaccagtacgcgaagtggtag

SEQ ID NO: 361229 - DNA, 435 bp, Pseudomonas aeruginosa
atggctcagacagacaagcactatttcggcaccttgctagcccagacttcccgtgcttggcgcgctgaactcgaccgccgcctcagtcacctcggcctgtcccaggcgcgctggttggtgttgttgcatctggcgcgccatcgcgattcgcccacccagcgcgagttggcccaatcggtcggggtcgaaggcccgaccctggcgcggctgctcgacggcctcgagtcccagggcctggtacggcgcctggcggtggcggaggaccggcgggccaagcacatcgtgctgactcccaaggccgatgtgctgatcgccgatatcgaggccatcgccgccagcgttcgcaacgacgtactgaccggcatcgacgagtccgagcaggcgctgtgccagcaggtgctcttgcgaatcctggcgaacctggaaaagcgctga

SEQ ID NO: 361230 - DNA, 2049 bp, Pseudomonas aeruginosa
atgcccggtaaagccttgcgtgtcatgttgtgtgcctggtcgtgcctgttggccgggcaggcgagcgccctgggagtgggagacatcaccctgcattcggcgctcaaccagccgctggatgcggatatcgaactgctcgacgtcggcgatctcggcgcggacgagatcgaggtccgcctggcgggcgccgacgtcttcgccgcggccggggtggaacgcttgcagttcctcaacgagctgcgtttcagtccggtgctccaggggcgcggtggcaatcgcatccatgtgtcctcgagccgaccggtgcaggagccctacctgaatttcctggtggaggtggcacgccccaacggccgcatcgtgcgcgaattcaccgtactgctcgatccactcggttatacgacgcgcatgcttccggccgcgcgcagcgggatcgagccgcagcggcaatcctcgacgctggcgcccgcgccgcgtagtgccgcggccgtcgtagacccggcactgctggagccgggcgacgaatacctggctcgccccaacgacaacctctgggccatcagcggacgcctgcgtggtgccggcaacgccgatcgcgcgcaactcatggaggccctgtaccagctcaatccgcaggccttcgtcaatgccgaccggcaccggctcaaggccggcgcgcgcctgcgcctgccggccggctaccagccggagcgaggcgcgcccggcgccgtgaaggaggcggccgtggaagtcctgccgccagccgatgccgccgtggtggaaaacgctccggcggctctcgtcgaggcgcagcgccaggcggatgccgaggccgaggcgttggcccggcaacgggaggaactgagccagcggatggacgatctgcaacgccagttgcaggccttgcaggaacaactgcagcagcgcgatcaccaggtcgccgaactgcaacagcaactggcccggcgccaggcggtgcggcccgcggcgccgccgcccgccgcggccgcgccttcggttgcgcaaccggttgaaacgccgacggactcgcagtactggcgctggatgatcgtcctgctgctggtcctcgctctgctcggcgtgttgctgttgcgtcgccgccgcgaagaggctcctgtcccggcggtcgaaccgaagcgccgggtcgccctgaacctgccgctgcggcgtgcgccgcgccccccggcggccgcaccggcgccggcaaaggtcgaggaacaggccaggccgccggtcgccgttccctccagcccgccgccgtctcctccgcctgctccggccgccgctccgcgcgccgccatggctgcggcggacaagctggacggcgccgacatctatatcgcctacggtcgctacggacaggcccgcgacctgctgcgtcaggtactcgccgagcagccgcagcgcctgagcgcgcggatgaagctgttgctggtgctggctgagctgggcgatgcggccggcttcgacgcgctggccgaggaaaccctggccagtggcggcaacccggaggccatcgacgagttgcgcggacgctacccggcgctgctacagatgccggcgaccgagacgccagcggcaacaaccaaggacgacgactggagcgacctgccgctggccgagccgcccgttttgcagcaaccggatgcgtcctcgggcgccgacggcttcggcgacctcaacctcgatctcgatctcgactggggcgccctggagaatcccctggacaaccccgacctgccgcgccgcgccgctgccggcaaggcggaaccggcggaggagcccctggcgttcgagagcaatctccatgaactgccggatgtcgccgagtacgaacacctcgaactcgaccagccagagccggccacggtgccgccggaggaggcctcggccagcctggaccgggcccgcgcctgcatcgacagcggcgatctcgaccaggccagccgcatcctgcgcctggtggtggcgcacggcgacccgtggcagaaggccgaggcgcgcgagttgctggcgctgatcgcctga

SEQ ID NO: 361231 - DNA, 2187 bp, Pseudomonas aeruginosa
atgcgccgcctgctgctcgtactgctgctcctgcttcccctgtccgccctcgccacggaggcccggccgaagatcggcctggtcctctccggaggtgccgcccgtggcctggcccatatcggcgtgctcaaggccctcgacgaacagggcatccagatcgacgccatcgccggcaccagcatgggcgcggtggtcggcggcctgtacgcctccggctacacccccgccgaactggagcgcatcgccctggagatggactggcagcaggcactgtccgacgcaccgccgcgcaaggacgtgccgttccgccgcaagcaggacgaccgcgacttcctggtcaagcagaagatcagcttccgcgacgacggcaccctcggcctgccgctgggggtgatccagggccagaacctggcgatggtgctggaaagcctgctggtgcacaccagcgacaaccgcgacttcgacaagctggcgatccccttccgcgccgtctccaccgatatcgcaaccggcgagaaagtggtgttccgcaagggccacctgccccaggcgatccgcgccagcatgtcgatccccgccgtgttcgccccggtggagatcgacggcaggctgctggtggatggcggcatggtcgacaacatcccggtggacgtggcgcgcgacatgggcgtggacgtggtgatcgtggtcgacatcggcaacccgctgcgcgaccgcaaggacctgagcaccgtgctcgacgtgatgaaccagtcgatcaccctgatgacccggaagaactccgaagcccagctggccacgctcaagcccggcgacgtgctgatccagccgccgctgtccggctacggcaccaccgacttcggccgcgtgccgcaactgatcgacgccggctaccgcgccaccacggtgctcgccgcgcgcctcgccgagttgcgcaagccgaaggacctcaacagcgaagcgctcgacgtggcgcgcacgccgaaccagcgcaagccggtgatcgacgcgatccgcgtggagaacaactcgaaggtcagcgacgaggtgatccgccactacatccgccagccgctcggcacgcgcctcgacctcggccgcctgcaggacgacatgagcaccctctacggcctcgactacttcgaccaggtgcagtaccgggtggtcaaggagaagaagctcaacaccctggtgatccacgccaccggcaagaaaggcggcaccgacttccttcgcctgggcctcaacctgtccgacgacatgcgcggcgaaagcaccttcaacctcggcggcagctaccgcatgaacggcctcaaccggctcggcgccgagtggctgacccgggtccagctcggcgaccgccaggaactctacagcgagttctaccagccgctcgacgtcggctcacgctacttcgtcgcgcccttcctgttccacgaggcacagaacgtcgacgtcaccgagaacaacgacccgctgctgcgctatcgcctggagcgctacggctacggcctcaacgtcggccggcagatcgccaacaacggcgaaatccgcctgggcgcggtgcaggcctacggcaaggccgacgtacgcatcggcgacccgagcctgccggacatcgacttcaccgagggctactacgaactgaagtactcgttcgacaccgtcgacgacgtcaatttcccccacgagggcgaggagatcggcctgaccatgcgccgctacgacaagtccctcggctcggacgacagctaccggcagtgggacctgcggctgaacaaggcgctcagcttcggcgccgacacctgggtgttcggcggcggctacgggcgcaccctggacgacgccgaggtggtcacctccagcttcaccctcggcggcgcccgcgagctgtcgggcttccgccgcgacgcgctgtccgggcagaactacagcctgggacggatcgtctattaccggcgcctcaccgaacgttccttcctgccgctggacttcccgctgtacctgggcggcagcatcgagcgcggacgcatctggaacaacgacaacgaatacgacagcggctacatcaacgccgccagcctgatgatcggcttcgatacgccgctggggccgctgaccttcagctacgggatcaacgacgagaacttcaaggcgttctacctgaacctcgggcagaacttctga

SEQ ID NO: 361232 - DNA, 291 bp, Pseudomonas aeruginosa
atgcccaccgccaagcccgaaatcgtcatcacctattgcacccagtgccagtggctactgcgtgccgcctggctggcccaggaactgctcagcaccttcgccgacgatctcggaaaagtctgcctggagcccggaaccggtggcgtcttccgtatcacctgcgacggcgtgcaggtctgggaacgcaaggccgacggcggcttccccgaggccaaggcgctcaaacagcgggttcgcgaccgcatcgacccgcaacgcgacctcggtcacaacgatcgtccttcccgctga

SEQ ID NO: 361233 - DNA, 993 bp, Pseudomonas aeruginosa
atgagcatcatcgtcaccggcgccgccggcttcatcggcagcaatctgctgcaggcgctgaaccggcgcggcgagaccgacatcatcgcggtggacgatctcaccgacggcgagcagttccgcaacctggcggacgccgatatcgccgactacctggaccagaacgacttcctcgagcgctacgcccgcggcgacttcggcacggtccgcgcgctgttccaccagggcgcctgcgccagcaccctggaaagcaatggccgctacatgatggagaacaactaccgctacagttgccgcctgctggaaagcagcctggaactcggcgtgccgttcctctacgcctcgtcggcggcggtctacggcgccggccggaccttccgcgaggcgcgccagtacgagcggccgctgaacgtctacggctattccaagttcctcttcgaccagcgtgtgcggcgggcgctgccgcaggcgcgcagccaggtggtcggcctgcgttacttcaacgtctacgggccgcgcgaggaacacaaggggcggatggcctcggtggcctaccactgctaccagcaattgcgccgcgacgggcgggtcgaactgttcggcgaacacggcggcttcccgcccggcggccacctgcgcgacttcgtcgcggtggaggacgtggcgcgggtaaacctgcatttcttcgaccatccgcagcgttcgggaatcttcaacctcggcagcggccaggcacggaccttcaacgaggtcgccctggcggtgatcaatagcgtccgcgccaacgccgaccagccgcccctgtcgctgcaacaggccgtggaaagcggcctgctcggctaccgcgagttccccgagtcgctgcgggcgcgctaccagagccatacctgcgccgacctggagctgctgcgcgaggcgggctaccgcgacgatttccagagcctggaagagggcgtcgccggctactgccgctggctggcgcgcagcgcctga

SEQ ID NO: 361234 - DNA, 1167 bp, Pseudomonas aeruginosa
atgcctttgattgtctacgtgctcggtgccgcgatcttcgccctgaccaccagcgaatacatggtcgccgggctgatgccggcgctggccgccgaattcggcgtgtccttcgccgcgatcggctacctggtcaccttctacgccggtgcgatggccgtcggcggcccgctgttgaccaccgccctgctccgggtgccgcgcaagaacgccctgctcggcctgatcgcgctgttcgtggtcggccaggtcatcggcgccctggcgccgggctatgcggtgatggtcgcggcgcgactggtcaccgcggtcgccgccgcggccttcttcggcgtggcgctgaccgcctgcgccgaactggtcgaaggcaaccagttcggccgcgcgtcgtcgctggtgctcggtggcctgatggtcggaaccgtgctcggcctgcccgtcgccacctggctgggcgaatggtacggctggcgcgcgagcttcttcgcggtggcgctggtggcggtgctggtcggcctgctggtgttgcagctgatgccggcgatcccggggtcggcgggcagcggctcgctgcgcgaggaactgaaggtgttcaggaacgcccatctatggtgggtctacgccaccagtctgctgctgatcggcgccaccttcgccggcttcacctatttcgtgccgatcctcaccgaggtcagcggcttctccgcctcgaccgtaccgctgctgctggtggtctacggcctggcgacgctggtgggcaacaacatcgtcggccgcctggccgaccgccataccatcgcggtcctggccttcggcctgctggcggccatcgccgcgatggtggccttcgccctgttcggacaggttccggcggtggcggtggcggcgctggtggtgatcggcctgaccggggtgtcgatgaacccggcgctggtgacccgcggcgcacgtgttggccataacaacatgctggtcaactcggtgcacaccgcctgcatcatgctcggcgtgatggccggttcctggatcggcggcctgggcatcgccggcggattcggcctgcagggcgcgctctgggtcggcgcggccctcggagtactggcgctgctgaccctgctgccggagctgcgcttcgcccgcgccccggtaggcggggcactgggccgctga

SEQ ID NO: 361235 - DNA, 813 bp, Pseudomonas aeruginosa
atgggaacgcgcatcgccttcgatcaaccaacaccagagcgagattcgctggaggaagaggtgagtcagaacatggatctcacgatcgggacgcatcgggagtcggctttctacgagctggagttcggaccgaggacgataatgaccctggccaactttccggacgacgtgctgccgttgttgcaaatggaaagcctgatgaccttcgaggcgatggcctacctgcgctgcgacgcactggtcgagctaggctgctacgacggccgggcgctggaaatcgcgcgcctgctcaatgcccgctatctcggcgtcgacctcgaccagcgggcgatcgagacgctgcgcacgcggatcgagcgcgagggcatgagcgatcgcgcggacacggtggtcgacgacatcctcaaccacaccaggcgcggtgcctcggtcggctcgcgcgcgctgtacctgctgccgttcaacctgctgggcaacttccgcgagccgaaacggctgctcgactccctcgccgagcgcagcgtggcggcggtggtctcggtgttcggcgacagcgccgaggccacccgcgtccgccagagctactaccgccgttgcggggtgcagggcctggagttgcacacgcgggacgacggcaccgtgttcaccggcagcgacggcttctactcgcgctcgtattcacgcgcctgcctccacgccctgctcgccgagtgcgggctgaccgtggtgcgcagcgcttcgaacctgttcgcccactgcgtgacggtgctgcccgaaggcgccgaccagggcttcggttcgtcggcggcatga

SEQ ID NO: 361236 - DNA, 240 bp, Pseudomonas aeruginosa; identical to SEQ ID NO: 319411

SEQ ID NO: 361237 - DNA, 993 bp, Pseudomonas aeruginosa
atgccgcgcgccgccgtggtctgcggcctgggcagctacctgcccgaggccgtgctcagcaacgacatgctcgccgccgagctggacacttccgacgcctggatcagcagccgcaccggcgtgcgccagcggcatatcgccggcgacctcggcagcggcgacctggccctgcgggcggcctccgccgcgctcgcctcggcggggctggagcgagtcgatgcggtggtgctggcaaccagcaccggcgacttctgctgcccggccaccgcgcccagggtcgcggcgcgcctggggttggtcggcgcgctcgcgttcgacctgtccgccgcctgcaccggcttcgtctacggcctggccagcgtcggctcgctgatcagcgccgggctggcggacagcgcgctgctggtcggggtggacactttcagccataccctcgaccccgccgatcgctcgacccgcgcactgttcggcgacggcgccggagcggtggtgctgcgtgccggcgatgccgaggaagaaggcgcgctgctggccttcgacctcggcagcgacggccaccagttcgacctgctgatgacccccgccgtgagtcgcgccgaacgcagttccggacaggcctccaactacttccggatggacggcaaggcagtgttcggccaggcggtgacgcagatgagcgactcggtgcggcgggtgctcgaccgggtcggctggcaagcttcggacctccatcacctggtcccgcaccaggccaacacacgcattctcgcggcggtcgccgaccagctcgaccttcccgtcgagcgagtggtgagcaacatcgccgaggtgggcaataccgtcgccgcctcgattcccctggccctggcccacggcctgcgccaaggcatcctgcgcgacggcggcaacatggtcctcaccggtttcggtgccggactgacctggggttcggtcgccctgcgctggccgaagatcgttccgacaatggactga

SEQ ID NO: 361238 - DNA, 426 bp, Pseudomonas aeruginosa
atgaatgccaaggaaattctcgtccacagcctgcgcctcctggaaaacggcgatgcccgtggctggtgcgacctgttccatccggaaggcgtactcgaattcccctacgccccgccgggctggaagacccgcttcgagggccgcgaaaccatctgggcgcacatgcgcctgtttcccgagcacctgaccgtgcgcttcaccgacgtgcagttctacgagaccgccgaccccgacctggccatcggcgaattccatggcgacggcgtggccaccgtttccggcggcaagctggcgcaggactacatctcggtgctgcgcacccgcgacggacagatcctgctctaccgcgacttctggaatccgctgcggcacctcgaggccctgggcggggtcgaggccgccgccaagatcgtccagggagcctga

SEQ ID NO: 361239 - DNA, 1257 bp, Pseudomonas aeruginosa
gtgcctgatcgcaaactgagactgggcgaggaactgatctcgccactgcacgcgctctacgacggcctgcaggtggacggcgcgccgcgtcccgcgcatcgcgccgccgagcatccggtgtgggtggtgacgcgctaccgcgacgcgcgcaaggtcctcaaccatccgggcgtccgccgcgacgcccggcaggccgccgaactctacgcgaagcgtaccggcagcccgcgcgcggggatcggcgagggactcagccaccacatgctcaacctcgaccctccggaccatacccgcctgcgctcgctggttggccgcgcgttcaccccgcgccaggtggagcgcctgcaaccgcatatagaacggatcaccgaggcattgctggacgccatggccggccgcgaacaggccgacctgatggccgacttcgcgatcccgctgaccatcgcggtgatcttcgagctgctgggcattcccgaggccgagcgcgaacacgcccgccagtcctgggagcgccaggcggaactgctgtcgccggaggaggcccaggccctggccgatgcgcaggtcgactacctgcgcgtgctgctcgaggccaagcgccggcagccggccgacgacgtctacagcgggctggtgcaggccgccgacgagagcggccagttgagcgaagcggaactcgtctccatggcccacctgctgatgatgagcggcttcgagaccaccatgaacatgatcggcaacgcgctggtcaccctgctggtcaacccggagcaactggcgttgctgcgggcgcagccggaactcctgcccaacgccatggaagaactggtccgccacgacagtccggtgcgcgcctcgatgttgcgcttcaccgtggaagacgtggaactggacggggtcaccattcccgccggcgaatacatcctggtctccaacctgaccgccaaccacgacgccgagcgcttcgacgatcccgaccgcctcgacctcacccgcaacaccgatggccatctcggctacggcttcggcgtgcactactgcgtcggcgcctcgctggcccggctggaggggcggatcgccatccagcgcctgctcgcgcgcttccccgacctccagttggcggtcccccacgcggagctgcagtggctgccgatcaccttcctccgcgccctgatcagcgtgccggtgcgcaccggatgcagcgccccggcgaacaccgcctcccacgccaacccgatcgagaggatcgcccaatga

SEQ ID NO: 361240 - DNA, 915 bp, Pseudomonas aeruginosa
atgttattcaccagcaaacctctctcgccccagggccgccacgtactgatcaccggcgcctccagcggcctcggccgggaaaccgcgctgcacctggccgaacagggtttccaggtgatcgccggggtgcgccgccaggaggatggcgagcgcctggcgaacgcctgcccgtccggccggatcagcacgctgctgatcgatgtcaccgacgaggaatccattggccgggccgccgcgcaggtggcggagaaagtcggcgataccgggctctggggcctggtgaacaacgccgggatctgcatttccgcgccgctggaatgcgtctccagcgacctgctgcggcgccagctggaagtcaacctgatcggccagctcgcggtgacccgggcgatcctgccgctgctgcgccgtggcggcgcggcgcgcctggtgaacgtcacctcgggcctcggctcggtcgccattccctacctgggcgcctactccgccgcgcagttcgccaaggagggagtgagcgacgccctgcgccgcgagctggcacccatgggcatccaggtctcggtggtcagccccggggcgatctggacgccgatctggggcaagatcgccagcgagggcgagcgcgccctggccgacgcccccgacgccgtcgccgacctctatcgcgatacctacctgcgcttcctccaggccaacgaggacggcgcgcgcaacagcgcgaccaagcccgccgatgtcgccgccgcggtgcatgccgcgctcaccgcggccaagccgcggacccgctaccgggtcggcgccgacgtgcgccgcggtaccctgctggcgcggctgctgcccgatagcgtgatcgacgggatgttccgccccatcgtcaccgccgccccggcggcgaaggaggagcaacgtgcctga

SEQ ID NO: 361241 - DNA, 1326 bp, Pseudomonas aeruginosa
atggccgagatacgacgcccgctgtccgcggtggaacgctggtactggctcagcgaccagttctccgcgctgaacgtgatttcccgggtgcgggtccatggccggttgtccatcgacgacctgcgccgcggcctcgacgcgctgcaggcgcggcatccgctgctgcgcgcgcggatcgagcacgatgccgggctcgatccgcgctgggtgccctgcgagcggcccatcccgctgcgcgaggtgcgcggcggcggcgaggagcaatggctgcgggaaatcaacgagcgcgaattgccggaacgcatcgatccggacagcgggccactgatccgtaccgtggcgatcgccaccgacgccggcgcccacgacctgctggtcgtggtaccgcacatcatcgccgacggcactaccgtgctgaccctcgccgaacaatggctgaccctggccgccgaccccgccgcgcaaccctggaccgccagcgccctgccgccggcggaggatctgcgtccgcgccgcttcaccggcgacgaaggcgcggcgcgcctggccgagcagaccgcccaggacgaagcgctggtcggccgccaccgcccgggccggatcgagccgagcaacccggtgccgctggaagcgcggcgtacccgcctgctgcaccgggagctggacggcgcgcagctggaacagctgcaacgacgcgcccgcgaacacggcaccacggtacacggcgcgctgaccgcggcgctggccatcgccgccggccacgaccaccagcgccgccctagccacatcgccatcggctcgccgatcgacttccgcgacgaactggagccgccggtgcgccccgacgaagtaggcacctacgtcgccacggtaccggtggtgctggacatcgcccggccgttctgggaggtcgcccgcgcgctcaccgacgacctcggcgaacgccgtcgccagggccatcatttcaacctggtcaccctggtcgccagcgctgcgccgcgctgcatggccgacgcgcggccattcatggccttcatggaagccgaagggccgatcaacctgtgctcctccaacatcggtcgctatccgttccccgagcggatcggcgccttgcgcctctccgacgcgcagttcctcaccggcatctcggtgaacggctacttcgtggccgccatcaactccagccatggccggctgttctggaacttcacctatatcgacgaagcggtccccggcgaacgcgccgaacgcctggccgaagattgcctgggcaccctgctgtcggcgatccacgccccccaacgatccgccctcgaggagcaatga

SEQ ID NO: 361242 - DNA, 1167 bp, Pseudomonas aeruginosa
atgagcagacaccccctgaagatcgtcatcgccggcgccggcatcggcgggctcgccgcggccgcctgcctgaaggccgccggcttcgaggtcgaactctacgagcgggccagggagctgcgcgcggtcggctcggcgctgtcgctgatgcccaacgcgctgaccgccctggagagggtcggcgtgcgccctgaccttacccgcgcccaggccttcgactcgctacggttcctcacccggcgcgggcgaccgatccgcgccatcgacttcggcggcctggcccgtcagctcggccagccgagcctggcgatccaccgcgcgagcctgcagcaggcgctgctggaacaggcccgcgactgccgcatcgaactgggcgtgagcgccaccggctacctgcgccacgccgacggcgaaggcgtcaccgtgctctgcagcgacggccgcgaagtgcacgccgacgtgctgatcggcgccgacggcttcaactcggcgatccgcgccaccatgaccggcccggagcgtcccaccgactggcactacgtgatctggcgcgccacgccggcgttccgccatccgaaggtgacgccgggctacgtcgcccattactggggtcgtgggcagcgcttcggtctcgccgacatcggcgaaggcaacgtctattggtggggcacccgcaacatgccggccgaacaggcgaaggactggcgcggcggcaaggcgggcatccagcgcctctacgccggctgggccgacgaagtgcaggcggtcatcgaggcgaccccggaggccgacatcagcagcctgccggcccaggaccgaccgttcctggagcgctggggcgacggcccggtgaccctgctcggcgatgccgcgcatccgatgctgaccagcctcggccagggcgccgccatcgccatcgaagacgccgcggtgctggcccactgcctggccaccatcgacgacccgcaagccgccctgcgcgcctacgagaaccgccgtcgcgaccgcgccagggcgatggtcgagacctcgcgggcgctgagccgcatcgagcagttggagcatccgctgcgcaccgtcgcccgcgatctctacttccgcttcgctccggagcgaaccttcgcccggcagaacgaactggcactgaccttcccaggagtcgaatga

SEQ ID NO: 361243 - DNA, 7059 bp, Pseudomonas aeruginosa
atggttcgtttcgctcgcttgccgctatcgccctaccaacgggacatctgggtcgccgccgcgcagtttccggaactcgaccagtacaccatcttcagctacgaccgcttcaccggcgaggtcgatacccaggccctggaacgggcgctgctgcaggcggcgcgagacaccgaggcgttccgcctgcgcctcggcgagacggacggtacgccgtaccagtggctggacacggatgccgagttcgaggcgcgccacgtcgacctgcgcgccgaccgcgaccccgaggccgccgtgcgatcctggctgcgcgacgccttccgccacgcctacccgctggacggccgcagcctggtggacctggccctgctgcatagcgaccaggcgctctacgtctacgtgcgcacccaccatatcgtcagcgacgcctggggcctgcagctattcctcagccgggtgcgcgccggctacctgggcgagctaggcgagccacaggcgcagatgccgacggcttccctcctggcgcaactcgagaccgacgactactccggttcggaacagtaccgcggcgaccgcgcctatttcgccgaggccctggagggcctggagccggccctcttcacccgcaggcgcccggccgggctgcgccgcaccgcgcgccacaggctgacgctggaacgcacactgctcgatgcgatccgcgatcgtggcgaatcgcccttcctgttcctctccgccgccgtggcgctgtacctggcgcggatccaccagaacgacgacgtggtcctcggcgtaccggtgctgaaccgcgccgaccgcgcggccaagcaagtggtcgggcacttcgccaataccctgccgctacgcatccgcaccgcgccggaacagaccgtcgacgaattcctggcgcagttgcgcgaggcgacccggacgctgctgcgccaccagaagatgcccctcggcgacctgttgcgcggcgcctcgccactgttcgacaccaccctttcctacatgcgctggcccgccgcccaggcgatcccgagcgccagcgtcgagaccgtggcgcaaacccacgcccatgacccggacgcgctggccatctgggtctccgagttcgacgggcacagcgacgcgcaggtggatttcgaatacgcctgcgatgtgttcgacgccgacttccccatggacgccgcggcgcggcatatcgaaaccttcctgcgcgccctggtggagggcggcgagcgccgcctcggcgaactcgatccgctgtcggccgccgagcgcgaggaactgatccacacccgcaacgccaccgaccaggcattccccgagcaggctaccctgcccacgctgttcgccgagcaggtggcacgcaccccgcaacgcaccgcgctgctggaagccgacggcggcacgctcagctatgccgagctggacgccaaggtccaggccgtggccgacgccctgcgcgcagcgggtgtgaggaccgacgagcgggtagcgctactggtcgcccgcggtccccacctgctgccggcgatcctcggcgtgcagcgcgccggcggcgcctatgtgccgatcaatcccgaccatcccctggagcgcgtccgcctgctactggaagactgcggcgcccgcgtggtgctggtggacgaacgcgcggcgacactcggcgagagcctcggcgagacgcgcgtgctgcacctcgaacgcctgccgcagagcaccggcgacctgccggcggccaacgtggcgcccggcgacctggcctatgtcatctatacctccggttcgaccggcatgcccaagggcgtcatggtcgagcaccgctcggtggtcaaccgcctgaactggatgcagcgtcgttatccgatcggcgaacgcgacgtgcttctgcaaaagactccggtgacgttcgacgtatccgtctgggagctgttctggtggagcttcaccggcgcccgcctgtcgctgttgccgcccggcgccgagaaggacccgcgggaaatgctgcggagcatccagcgcgacgcggtcacggtcatccacttcgtgccgtcgatgctgacgccgttcctcgacctgctcgacggcgacccgaccgcccgcgcggcggcaagctcgctgcgcctggtgttctgcagcggcgaagccctcgcgccgttgcaggtcacgcgcttccgccggctgttcggcgacgccgtgcgactggtcaacctgtacggaccgaccgaggccaccgtcgacgtgtccgaccatgaatgcgccagcgacaaccccacgcgggtcccgatcggccggccgatcgacaacctgcgcctgtacgtcctcgaccgcgcgctcaggccgcagcccctcggcgccgtcggcgagctatatataggaggcgtcggcgtcgcccgcggctacctgaaccggccggagttgaacgccgagcgcttcctcgccgaccccttcgtcgccggcggccgtctctaccgtaccggcgacctggcccgctggctggccgacggcaacctcgaatacctcggccgcgccgacgaccaggtgaagatccgcggcaaccgggtcgaacccgacgaagtacgcgaccgcctcgccgcgcttcccggcgtacgcgacgccgcggtcgtggcacgcgattcggcggtacgcggcacgcacctggtcggctactacgtggctgcggcggaactcgaccccggtcaattgcgcgccggactttcggcgacgctgccggacttcatgctgccagccttcttcgtgcgcatcgacagcctcccgctcagcgccaacggcaagctcgaccgccggcaactgccggcaccgccggaacaggtggcggcggttgcgccgcgcacggcgaccgaggccgaactggcggcggtgtgggccgatgtcctcggcgtggcggaggtcggcgtgcacgacgacttctacgccctcggcggcgactcgatcctgatgctgcgcatccgcgccgccgcacagcggcgcggcctgggcttcgaactcgccgacctgatgcgcaacccgacggtggcgggtcttgccgagcgcctggtgcgtccgctcgcggagcgaagctaccagcccttcgaactggtttccgaagtcgacaagccgcgcctggaagggctggaggacgccttcccgaccagccggctgagtctcggcctgctcttccatagccgccagcgccccgactcgtcggtctaccacgacgtgttccactaccgcttcgacctggcctgggacgaagccgcgttccgccacgcgctggaccgggtggtcgccgcctatcccgcgctgcgttcgtcgttcgacctcagcggtgcatccgaaccgctgcaactggtgcatacccaggcgcgcagcgaaccgctgatcctggacctgcgcggcaacccggaggccgggacggtgctcgacgagcacatccgccaacgccgcttccatcgctattcgctgcaacagcccgggctgttcctgttcgccgcgttcgtccgcgaggacggcctggacctggtgttcagcttccaccatgcgatcctcgacggctggagcgtggccaacctgatcgtcgcgctggtcgccgcctaccgtggcgagccgctgccgggccccgcgccggcgctggcctgccatgtccgcgaggagctggccgcgctggcttcgccggccgccgtggggtactggaccgggctgctggagggcgcgaggatgacccgcctcgacggcttcggcgcccacgagccgcaagccgcgcaaggtccggccagccatcgcgaagcgctgccggacgggctgctcgaacgactcaaggccactgcggcgcaacgcggactaccgttgaaatcgctgctgctcgccgcccattgcctgaccctgcatctgttctcccgcagcgacagcgtggtcaccggcgcgatcagcaacggccgccccgaactgcccgacgccgaccgcatggtcggcctgttcctgaataccgtgccggtccgctcggagattgccgggaatagctggatcgaggtagccgatgcgctgttccgccaggagcgcgacggacacgcccatcgccgctatccgctcagcgccatccagcagatcgtcggcgacgaactgagcagcgccttcaactacgtcaacctgcatgtcctcgaaccgctgtggcaactacgcgacttccgcgtctgggaagaaaccaacttcgccctgctggtcaacgtgatcgccacgcccagcgacggcatgtacctgcgcatcgacagcgacggccgcggtatcagccgcagccaggccgcgctgatcggcgcgaccttcgtcgagctcctgtggcgcctcgccgagcatcccgacgaagccgccgacttcgccttcctcgcccctcgccgcgacgccgcttcccagcccgagccgctggtcgacgtcgtcagcctgttcgaacgccaggtcgaggcgctgccgggcagcgccgcgctggccttcgaggagcaacgctggacctatcgcgacctcgaccatgtggcgcgctgcgtggccacccgcctggtccgcgccggcgcgcgccgcggcgatgcgatcggagtggcgctgaaccgttcgccggagatgatcgcgacgatctggggcatcctgcgcgccggcctggtctgcgtgccgctggacgtcagctatcccgcgcagcgcctggcgctgatcctggagaccgcacagccgttccgggtggtcgcgcatcccgagcacgcccatgtcgccgcggcggaacgggtgctgccggtagaggaactggtcgccgacatcgagcccgagaccttcgccgcgccgcagctcgacgagctggccatgctgctgttcacctccggttccaccgggcggccgaagggcgtcgagcttagccaccggatgtgggccaactacacccagtggcaattgcgcgtcgccagcggcgtaccggggctgcgcaccctgcagttcgcgccgctgagcttcgacatggccttccaggagatcttctccacgctgtgcggcggcggcgagctgcaactcatctccaaccgcgagcggatggacccctccgcgctgctgcatgtcctcgaacgccgccaggtccagcgcgtgctgttgcccttcgtcgccctgcaacgcctcgccgaggcctccaataccctgggcgtgcgccccggctccctgcgcgtggtggtgtcctccggcgagcagttgcgcatcaccgaagacgtccgcgcgttctgcgcggcgatgcccgggctgctgctggagaaccagtacggtcccaccgagacgcaccaggtcacctaccactcgctgagcggcgatccggcgcactacccggacctgccgccgatcggccggccgctggacggggtcgaggtgcaggtgctcgacgccgcgctgcgcccggtaccggtcggtgttaccggcgagctgtacttcggcggcgactgcctcgcgcgcggctaccaccgcgcccccgaactcaccgccgagcgcttcgtcgaacatccctggcgccccggcgccaggctctaccgcaccggcgacctcgggcgcatcctcggcaacggcgagatcgtctggctcggccgcgccgatacccaggtcaaggtccgcggcttccgcatcgagccggccgaggtcgagctggcgatcatgcgccaggccgagcgccagccgggcctgcgcggcgcggcggtggtggctcgcgagcgccagggcaacgatgcattcctcgctgccttcctgctcggcgagcccgaggcggtggatctcgccgaactgaagcaggcactgcgcagcgaactgccggaacacatggtgccggcacacttcgcctgggtcgacggcttcgccctcacccccagcggcaagcgcgacgacgccgccctgcgcgcactgccgctggagcacgggacgaacatcgagtacctggccccgcgcgacgactacgagcgcaccctggccggactcctcggcgagttgctggatcgtccccgggtaggcatccgcgacagcttcttcgacctcggcggcacctcgctcagcgcgatgcgcttcatgctgctgatcgagaagcgctatggcgtcgacctgccgatggccgcgctgatcgagacgccgaccgtggagggcctcgccgaacgcctgcgggaacgctcggcggtgcgcgccttcgacccgctggtaccgatccgtgccggcggcagccgcccgccactgttcctcgtccacccgctcggcggccacgtgctctgctacctgccgctggtccgcgcactgccgccggaccagccggtatatgccctgcaggcggccggcaccggccagggcagtacgccgctggcggtcctcgaggacatcgccgccagttacctcgcggcgatccgccgggtgcagccggaaggcccctattacctcggcggctggtcgttcggcggcttcgtcgcctacgagatggcccggcaactgcgcgcgctcgacccgcaggcggtcgcccaactgatcgtgctcgactccatcaccgtcgaccgcaaccacgccggcagcgccagcgacgaagccctgctgctgttcttctactgggaactggtctggttcgagcgcagcgacgaggaggtcgagccgctgcctgaaggcgcgagcctggagcagaagctcgaccacatcgtcgaacgcgccatcgaggccggcgtacttcccgccggcaccccgcgcgccaccgtgcagcggctctacgagctgttccgggcgagctggcaggcactcatcggctatcgcccggaagtcagcgaccaggacatgaccctgctgcgcgcggacggcccgctgccgctggcgctgaagccgatgcacgacgccgccggcacccactacggcgacccgaagaacggctggcagcactggaccagtggccgcctcgatgtgatcgacgtccccggcgaccacctggtgctgatgaaagaaccctatgtcgagacggtcgcggcagagatcgccgcgttgctcgaaccctccacctccagcgaacggacccgcccatga

SEQ ID NO: 361244 - DNA, 606 bp, Pseudomonas aeruginosa
atgaaaaccgatgacaaggaccgcgaaggcggcgactcccacggcgccatcggcgccaagctgatggagtacgcgctcaaggtcaggaaggtgttcgtcaccggcggggtcgacgagaagatggccaaggacgtcgtccagcagctgcacatcctcgcctcgatcagcgacgatccgatctacatgttcgtcaattccccgggtggccacgtcgaatccggcgacatgatcttcgacgcgatccgcttcatcacaccgaaggtcatcatgatcggttccggcagcgttgccagcgccggcgcgctgatctatgccgcggcggacaaggaaaaccgctattcgctgcccaatacccgcttcctcctgcaccagccgtcgggcggcatacaggggccggccagcaatatcgagatctaccgccgcgagatcgtgcggatgaaggaacgcctcgaccggatcttcgccgaagccaccgggcagacgccggaaaagatcagcgccgacaccgagcgcgacttctggctgaacgcggaggaggccgtgcagtacggcctggtcaacaagatcatcgtttcggaacgggagatcacgctgcctggccagtga

SEQ ID NO: 361245 - DNA, 888 bp, Pseudomonas aeruginosa
atgagcgaattccaccacaagctggtccagcgcaaggtccgcttcgacttcagcgatacccccctgcactgggttcccggcgaagcggaagcgtcccaggtgatgaacgtcctgcacatgctcctgccttccggcgaactgtggttctgccgcctctacaacaaggccctgccgctggttagcgacgcccgcctgcgcgacgacgtgcagggtttcatccgccaggaagcgatgcattcgcgggcccacgacggcgcgatccagcgctacctgagcaggttcgacatcgactccaagccgttcaccgacaagatggatttccttttcgaacgcctgctctgcgactacccgctggggcagaacagcctgacccgcgccctcgacggctggtggctgcgccagcgctgcgcgatcatcgccgcggtggagcatttcacctgcgtgctcggcaagtgggtgctggaggcccgggagctggatcgccgcggcagcgacccggtgatgctcgacctgctgcgctggcacggcgccgaggaagtagagcaccgcagcgtcgcccacgacctgcacgtgcatctgggcggcagcttcgtcacccggcaactgaccatgctgttggtcatcgcgatactggtctacctgctcgccgacggcacccgcaccctcctcgaccaggacccgagcctgcgcggcgccaagcgccagggattcctacgaacctggtggcggctcggcaagcagggcctgctgccgaacctcgcgcgcaccttccgcgacgtcgcccgttacttcaatccctggtaccaccccgagcacgaggcgaatacccaggaagccctggaatacctggccaactcgccggcggcccggcgcgcggcgaacgcctga

SEQ ID NO: 361246 - DNA, 1779 bp, Pseudomonas aeruginosa
atgaacgcgctcctcgccctccccgacctgcagccggaacggctgttcgtgcagtccggcgacgtgcgcctggcggttcattgctggggcgcgccggacaacgacaagccgacgctgctgatggtgcatggctacccggacaaccacgagacctggctgccgctgatccgccaactggctgggcgctaccgcatcgtcgcctacgacgtgcgtggcgccggcgcttcggacaagccacgctggagccgcgactaccacctgcaacggctcagcgaagacctgcaggcggtgattcgcgccaccagcccggatcgcccggtgcacctgctggcccatgactggggctcgatccagacctgggaaagcgtcaccgatccgcagtgccgaccgctgatcgcgtcctatacctcgatctccgggccctgcctggaccatgtcggtttctggatgcgcgaacacctcaggcagcgcagtccgaaggccctgaaagcggtattcggccagttgctccactcctggtacatcgccttcttccatacccccgtcgtacccgagctgctctggagcgccggcctggcccggctctggccgcagttcctgaagcacgccgaaggcgtccgccatccgcaggtcaacccgacccaggccagcgacggccggcacggggtcaagctgtaccgcggcaacttcatccgcagcctgttccgtccgcgcaagcgccacaccgaagtgccggtgcaactgatcgtaccgacccgcgaccgttacgtcggcgcccagctgttccagcacctcagcctgtgggcgccacgcctgtggcggcgcgaggcgagcgtcggccattggcaactgctggccgagccggagcaactggccggctggctcggcgagttcatcgacgcccaggaaaccggcgagtcgtcgccggccctgcaacgcgcccaggtccggcccgacgcgcgctcgatgagcggcaagctggtggtggtcaccggcgccggcggcggcatcggccgttcgaccctgctcagcttcgccgagcgcggcgccagcctgctcgccgccgatctcgatctggaagccgccgaacgcagcgccgaactggcccgcgcccttggcgccacggcccatgtctaccaggtcgacgtcggcgatacccaggccatggagaccttcgccgagtgggtgcgcgacaccctcggagtcccggatgtggtagtcagcaatgccggcatcggcatggccggaccgatgctcgacacctcgcccgcggaatgggagcgcctgctgcgggtcaacctgtggagcgtgatcgacggctgccgcctgttcggccggcagatgatcgcggcgaacaagccggggcacctggtcaatgtcgcctccggcgtggccttcgcgccgtcgcgcaactaccccgcctacgccaccagcaaggccgcggtagtgatgctcagcgaatgcctgcgggcggaactggccggacgttcgatcggagtcaccgcggtgtgcccgggcttcgtcgataccggcattgtccaggccacccgcttcgtcggcatggacgccgaacgccaggcacggcgccaggcgaagatccagcgcttctacaagcgacgccggctcagcccggacaccgtcggggaaaagctggtgcgcgccgtggagcgcaacaaggcggtggtctcggtgggcagcgaggtgcacctcggcgccctgcaatggcgcttcgcgccctgggccacgcggtttctcgcgcgcttcgacctgacttcctga

SEQ ID NO: 361247 - DNA, 876 bp, Pseudomonas aeruginosa
atgtcccaaggcgcctgggtacccactcccgacgatctcgatcacttccgccaggtccagcgactggcctatacctgctgcgaaaccatccacggcgaactgcgcgccggcatcagcgagagggaagccgcggcgctgatgaagacctggctgcaggatcatggcgtcgacgactggttccaccagcccttcgcctggttcggcagccgcacctcgttcaagggcttcgacggcctgcgtcatctcggtggcttcaacctggccttctaccccggcaagcagcgcctggaggaaggcatgccgttcatcctcgactgcgcgccgaccctcggcgcctataccgccgatgtcggctactccggcgcactaggccacaacctgttgcaggagcggctgatggacgacctgctgatacaccgacgcaccatccttgacctggtccgcgaacggcgccccctggccgaagtcagccaggcggtcgaccggctctgcgtgatccagggcaccctgccacggcacaaggcctatcccttcgaagtgctcgcccatcgcgtggaaaagctcggcaaccgccgcggtccctcggtggcgcgcttcggcgtgcgcaacctgtacaccctgacgcgcaacgcactggtcaccggcaagcgcgaaggctggtcgccgctgtggtccagcggcaagcgctccgagcacccgccgacgcccggtctctgggcggtggaaccgcacctggggctacgcggggtgggcgccaagttcgaggaactgctggtggtcaccgaagacgacgcctactggctcgacgacgacctgccgcacgtccgccgctggcaggcgcgcggcctgctgccgcaagcacgggaggccgcatga

SEQ ID NO: 361248 - DNA, 813 bp, Pseudomonas aeruginosa
atgagcacacccctgaccctcctgcagcgcctgctgcaacgtggcgagcagccgtccgccgaggatgcccgcgaatacagcgtcgacgaactggctcgcgcggccggcagcagcgtgcgcaacgtacgcgcctaccaggaccgcggcctgctgccgccgccggagcggcgcggccgggtcggcgtgtatttcgacagtcatctcaagcgcctgcggctgatcagccagttgctcgagcgcggctattccagcgccaacatcaaggaactgctggaagcctgggaacagggccgcgacctcgaccatgtgctcggcctggaccaggcgatcatcggcgagtggaacctggagacgcccggcagcatcggcttcgacgaactccaggcgatcttcggcgacgaactgaacgaccgggtgatcgacaaggcccaggcgctgggcctgctgctgttcgacggcgagcgcatgaagatccccagtccacggctgttccaggccgggctggaactgtaccgcagcggcatcccgctggaggcgctgctcgatcaactcggcgagttgcgcagcgacaccgagcatctggcggcgggaatcgtccgcctgatcgtcacccacctggtggacggccgcggcaccgacctgctgcccggggcgccggacctgcaggagctggccaaggtgttcctgcgcctgcgcccgctggcggaacacgtggtccaggtggaactggcgcgcggcctcaagctgtcggccaacgaaatgctcggcgagcgtgtcggcgagatgctgcgcaagctggaaaagccttcctga

SEQ ID NO: 361249 - DNA, 915 bp, Pseudomonas aeruginosa
atgcagcagattcatgacctacgccgtatcgacctcaacctgctggtggtgctcgacgcgctcctcagcgagcgccacgtgtcccgcgcggcgcagcgcctggccatgtcgcagccggcggtcagccacgccctcgggcgtctccgcgaactgttcggcgatccgctgctggtgcgggtgaaaagccgcatgcagttgaccagcctggcgctggagctggcgccgacgctccaggccagcctcgaccaggtgcgcggggtgatcggcgggccggccttcgagccggtgcgcagccggcgccacttccgcctgggcatgtccgactacggcgcctgggtggtgctgccggcgctgctgcgccagcaacaggcgctggcgcccggggtgagcttcgggatagtccaggaaccgcgcctggaaaccgcccgtcaggtcgccgaaggacagctggactgcgcgctgggggtattccccctgcttccggagggcgtgcgcgccaggcgcctgttcgaggagcgtttcgtctgcgtctgtcggcgcagcctgttcgaccgccccgacggcctgtccctcgaccgctacctggcggcccgccacgtgcgcgtctcgctacaggacaacccggccgaggaagtcgacagcgccctggaaaaacgcggcctgcgccggcaggtggcgctgaccctgccgcacttcaccgtggccccggcgctgctggccggcaccgacctggtactgaccatcgccgaacgcaccctcgaaaggttgcggctacccgaggaactggcgctctgcgagccgccgctggcgatcccgcgcttcgactatgtgcagatctggcgcggcgacgccgagcgcgaagcggccggcgcctggctgcgggaacagatccaggcggcggcgcggaagatctga

SEQ ID NO: 361250 - DNA, 456 bp, Pseudomonas aeruginosa
atgcccaattatctgatggtactgatggcagtttcggtgggcggcatggtggtgctgcaggccggcagcaacgccttgctcgggcgcctgctcggccatccgctgagcgccagcctgacttcgctgggcgtcagcctcggggcggtctgcctgggcctgctgctggtgcgggtgccgctgccggctaccgccagcctcggcggcgcgccctggtggagctggctcggcgggctgttcggcgcggcctacctgacggtggcgatcctggtcgcgccgcgcctgggcgccgccactttcatcgcgtgcgtggtggccgggcagatgctggtctcggcgctctgcgaccagttcggctgggccggtttcccggtgcgccgtttgtcctgggagggctatctcggcctggcgctggtggtggcgggggtattgctcctgcaatggcggggaagagtgtga

SEQ ID NO: 361251 - DNA, 2079 bp, Pseudomonas aeruginosa
atgatttcgaaaagcagaagaagcttcatccgcctggccgccggtacggtcggcgccaccgtcgccaccagcatgctgccgtcgagcatccaggcggccctggcgattcccgcgcaccgccggcatggcaacctcaaggacgtcgagcacgtggtgatcctgatgcaggagaaccgctccttcgaccactatttcggcaccctcaagggcgtccgcggcttcggcgaccgcatggcgatcccgctgcccgatggccagcgggtctggcaccagaagggcagcaagggcgagatcctgccctaccacttcgacaccagcaccaccagcgcccagcgcgtcgacggcaccccgcacacctggccggacgcccagcaggcctggaacgaagggcgcatggacaagtggttgccggccaagaccgagcgttccctgggctactacaaggagcaggacatcgccttccagttcgcgatggccaacgccttcaccatctgcgacgcctatcactgctcgttccagggcggcaccaaccccaaccggctgttcctctggaccggcaccaacgacccgctcggccagcacggtggtccggtaaccaccaacgaccacgacagcaacggcccggtggagcagggctacacctggaccacctatcccgagcgcctgcaggctgccggcatcacctggcgggtctaccaggacatggccgacaacttctccgacaacccgctgatcggcttccgccagtaccgcgccgcggcgcctgactcgccgctgatcgtcaacggcctgagcacctggaagctcgatgcgctgaagcgcgacgtgctggccaatagcctgccgcaggtgtcctggatcgtcgccccggccaagtactccgaacaccccggcccgtccagcccgatctggggggccgagtacacttcctgggtactcgacgcgctgaccgccaacccggaggtctggagcaagaccgcgctgctggtgatgttcgacgagaacgacggcttcttcgaccacgtcgccccgccggccgcgccgagcctgaacaaggacggcacgctgcgtggcaagaccaccgccgacgccaccctcgaatggcacaccaagggcgatatccgttatcgcaaccagccctacggcctcggcccgcgggtgccgatgtacgtgatctcgccgtggagcaagggcggctgggtcaactcccaggtgttcgaccacacctcggtgatccgcttcctggagcagcgcttcggggtcatggagccgaatatcagtccctggcgtcgtgccgtctgcggcgacctgacctcggcgttcaacttcgccaacccgaacaacgagccgttccccgaactgcccgacaccagccaggccgacgccatcgtcgccagccagatcaagctgccgaagccgaagccgccggcggtggccgccatgcccaagcaggaaatgggcatccgtccggcccgcgccttgccctacgagctgggcgtgcatgcgcgctaccgcagcggcggagatgcgctgagcctgaccttcgccaacaccggcaaggccggcgcggtgttccaggtgttcgacctgctcgacagcgagaacccgccgaaacgctacaccgtcggcgcgcgcaagcgcctgcacgacagcttccagggcgacgccagcggcgactaccacctggaagtgcacggtccgaacggtttcctccgggtctttcgcggcaacctgcggcgcgacctggcggagcgcaaggcgccgctgccggaagtgcggatcgactacgagccgctgttcggcaacctgcgcgtgcaactgatcaaccgtggccgccatccggtcaagctgacggtcaaggacaacgtctatcgccagggcgagcggcgtaccgtcaacgtgccgccgggacagcgccgggaagtccgctattcgctgcgcagcagcggcaactggtacgacttcagcgtcagcgcgcagggggcggacagcttcctgcggcgtttcagcggtcgcatggaagatggtcgctccggcttcagcgacccgggcatgggcctgggcacgctgaccttctga

SEQ ID NO: 361252 - DNA, 501 bp, Pseudomonas aeruginosa
atgaaccgcttttcactgccccgccccgacgcacgccagtgcgtcgccggcctgggtttctccgcccttctgctgctggcctcctcggccaacgccgccgcctgccgcgacatcaccagcgtgcagcaaagcgccgacgccacgcgcaatacctcgatgggcggccacgtgacccagcacatctacgggatgacgccgccgtccggctcgtcgcagaaagacaagaccctgttcaagtcgagaggcaactacgacgcggcctggcgccagtacggatacatcgacaatccggtggcctgcagcggcaacagcaagttccaggtggtttccctggagaagctgcacatgggcaagatcgatgcctactcctgcaagcaggccgacggccagggcgtctgcacgcgctgggatacgtacatggccaaggagatttcgtacggtttcgtcctgaaggacggcaagtggatcctcaataccctctacccggttcccctcgactag

SEQ ID NO: 361253 - DNA, 729 bp, Pseudomonas aeruginosa
atgcgcaaaccactgctatccgcattactgctgggcctgctggccctcggcggctgcagcctgccccaacagcaggccggcgcgccgaccgagcagcggctcggcacccaatggggcgaaggcgtcgcctcgccggtcacctcggtggccctgcgacgtctatcggagcaaccggtcgatcgccgccaggtgttctacagcgcgagccgcttcgatggacgtgccatcaaggaactgcccctggccaagggcagggtgggcttcgccgtactcgacgaggatggcggcaagttcgacctcgtgcagcaccgcagcaccctgcaattgcagggtcgtgaaggccagcgctaccgactgtggctgaacaacctcggcagcgcgacctacgaggtggtctccacggtagacggcctggacgtgctcaacggccagccgggcagcctgaagaaccgcggctatgtgctggaaccgggcgagagcctggtgatcgagggcttccgcaagaacgaacgggaagtcgcggcgttccgcttcgccagccccgacgatgcctacgccagcaacagcgcggccggcgacagccgcaacctcggcgtgatcggcgtggccctgttcgagctggacgctccggccagcggtcgcgcggcgccggccgacggaccgcaggcatttcccgccgacgcccggaacggcggcggctacgcgccgccaccacgctatcgcgactga

SEQ ID NO: 361254 - DNA, 771 bp, Pseudomonas aeruginosa; identical to SEQ ID NO: 319429

SEQ ID NO: 361255 - DNA, 834 bp, Pseudomonas aeruginosa
atgctgaacgccgcttctccgccgcgcgaccccgccgccctgccgcgcctgctgctgaccctggccgcgttgctgctgctctggccggggctgcgcctcagcgaactggatatccccggcctgttcagcggcgacaacgcgcgcaccatgggcggtttcctcgccggcttctggccgccggcacacgatcccgggttcctcgccctgctcggccgcgccaccctggaaaccctcgccatcgccaccgccggcatggccctggcctggctcctggcgtttcccgccgcactgctggcgacccgcgccctgtcgctctcggcactgccgcgcggcggcctgccggcctggtgggcacgggcactgcgctggccggtgcgcggcctgctgatcctcctgcgcagcgtgccggaaatcgtctgggcgctgctgttcgtccgcgccgtgggcctgggccccaccgccggggtgttggccatcgccatcacctatgccggcatgctcggcaaggtctacgcggaaatcttcgagtcggtggatccgcgccccacccgcgccctgctgctgggcggcggatcgcggctggcggcgttcgcctacggggtgctgccgaacgccgccggggaaatgatttcctacactgtctatcgctgggagtgcgcgatccgtgcttcggtggtgatgggcttcgtcggcgccggcggcctcggccagcagatcgacctgtcgctgcggatgttcgccggcggcgaggttgccagcatcctgctgaccttcctcctgctggtcctcctcgccgacctgctgagccgcttcctgcgcgggaggctggcatga

SEQ ID NO: 361256 - DNA, 804 bp, Pseudomonas aeruginosa
gtgagcctgagcctcgacggcgtggacctggtccacgccgacggccaacgcgcccttgccgacatccgcctgcgcctggccgctggcgaacgggtagccctgatcggaccttccggcgccggcaagaccagcctgctgcgggtgctcgccagccaatggcggcccagcgccggccgtgtcgaactgctcggcgaggagccctgggcgctatccgccgccgcccgccaacgcctgcgcgcgcgcatcggcctggtccaccaggcaccaccgctgccgccacggcagcgggtggtcagcgcggtactggccgggcgcctcggccagtggccgctatggaagagcctggtcagcctggtctatccgctggaccgcgccggcgcccacgacgcactgcaacgcctggatctcggcgacaagctgttccagcgctgcgaccagctttccggcggccagttgcagcgggtcggcatcgcccgggtgctctaccagcgcgccgagctgatcctcgccgacgaaccggtctcggccatggacccggtgctcgccggccataccctggccctgctcaaccgcgaggccgccgcgcgcggcagcaccctgctggccagcctgcacgcggtggacctggcgctgcaacacttcccccgggtgatcggcctgcgcgccggacgcatcgccttcgacctgcccgccggcgaagtcgaccgcgccgcgctggacgccctctacgccaacgaacaactgcaggccgagcgcgccagcccggccggcgaacccgccgtggtgcacatcccacgatgctga

SEQ ID NO: 361257 - DNA, 858 bp, Pseudomonas aeruginosa; identical to SEQ ID NO: 319432

SEQ ID NO: 361258 - DNA, 891 bp, Pseudomonas aeruginosa
atgtccgcttccctgccttcccttgccttcgccggtctcggcctgatgggcgtgcccatgtgccgccggctgctggccgccggctatccgctggcggtgtggaaccgttcgccgggcaaacgcgagttgctcgcggccgagggcgcgaaagccgtcgaggtcccggccgagctggccgccgacgcggaaatcctgatgctttgcctggccgataccgcggcggtgcgcgaagtggtgttcggcgccggcggcatcgtcgagaacgccaggcccgggcagttgctggtggacttctccagcgccgagccggccgccacccgcgagatggccgccgagctggaggcgcgctgcggcgtgcgctgggtcgacgcgccggtctccggcggcacgccgggcgcggaaagcggcagcctggcgatcatggccggcggacgcgcagcggatatcgaacgcctgcggccggtcctctcccggcttggccagcgcctgacgcgcatgggcgaggtgggcgccgggcaggtgaccaaggtctgcaaccagatgatcgttgcctgcaacgccctggtgatcgccgaagtggtggcgctggcggagcgggccggggtcgacgccagcctggtcgctccggcgctggcgggcggcttcgccgactcgaagccgttgcagatcctcgccccgcaaatggccgagagccgttacgagccggtcaagtggcacgtacggaccctgctcaaggatctcgataccgcggtgaagctgtcccgcgagcaaggcgcggccaccccgatgagcgggttggccgcgcagttgatgcgtctgcacggcagccagggctatctcgaacgcgatccggcgaccctggtggagcaataccggaccgccgtcgagtga

SEQ ID NO: 361259 - DNA, 2181 bp, Pseudomonas aeruginosa
atggattggcaaggcctgcgcttcctcggagagtctcccatcgacggctacgtgctgcagaactgcacctattcgccgtcgctggtggcgctcgccttcctcgtcgcctgcctcgccgggtacacggcactggacatggtcgagcgggtcggcaacagcctgagccacccgcgcctctggcaatggatcggggcgttctgcctgggcagcggcatctgggccacgcatttcgtcgccatgctcgcgttccacgcgccgatcgccctgcgctacgacctgccgatcaccggcctgtcgctgctgatcgccgtcgccgcctcgtacctggcgatgtacatgaccgcccgcccgcgcttcggcctgctgccctgcctgctcgccgcctgctgcatcggcctgggcatcgctgccatgcactacaccgggatggcggcgatgcgctcggtggccacccagtactaccagccatcgctgttcgccctttcggtactgatcgccatcggcgccgccttcaccgccctcgccgcggtcccctacctgcgcggccggcgcagcgcgcgctaccgctacatgaaactgatcgccagcctgctgctggccggcgccatcgccgccatgcatttcaccgggatggccgcgctggtgctcagcgtacccgccggcacgccgctggaactgcaagccagcgccgactcgctgcgcctgggctggctcaccggagtgctcgccagcgccatcgccgcctgcggcatctgggccgcatggtcggagaaacaacgggagcgccggctcagcgaaaacagccgggtcaacgccctgctcaaccagctcgaccacgcccacgcctcgctgcgccagatggctcgctacgacagcctgaccggcctgcagaaccgcacggcattcaacgaagtgttcgtccagcacctggagaactgtcgcctgagaggcaagggcctggcggtgatgttcctcgacctcgatcacttcaagcggatcaacgattccctcggccacgactctggcgaccaactgctgaagatcgtctccgaacgcatccgcagcgtgttgcgcgatagcgacgtggtggcgcgcttcgccggcgacgagttctgcgtgctcgccgacctcacccaggaccacgaggcgcacatcctctcgcaacgcctgatgcagaagatgaaggaacccatcgccctggacgggcgcaccctggtgatgaccgccagcgtcggcgtcagcctctacccgaacgacggcgagcagtgcgaggagctgctgaagaacgccggcctggccctgcaccagtccaaggcctgcgggcgcaacaacgcgcagttcttcagccggcaactgctggtgcgggcgacccaggaactgcagatggaggaggaactgcgccaagccctgcgcgacgaccaactggagctgcactaccagccgatcctcgccctcgccgacggcgaggtacaccagttggaggcattggtgcgctggcgccatccgacccagggcctgctcggtccggaccgcttcatcggcctggccgaagccaacggcatgatcgaccagctcgacgactgggtgctgcgacgcgcctgccgcgacctgcgcagcctgcacctggccggccacgaacggctgcgggtggcggtcaactgctgcgccagcaatctcggccgggccagcctggtcgacgaagtccgtcatgcgctggagcaggccgggctggcggcgtgcttcctcgaactggaggtgaccgaggacgcgctgatgtacaacatcgaccagaccatcccgctgctcgaacgcctccgcgagctgggcgtcagcctgtcgatcgacgacttcggcaccggctattcgtcgctcgcctacctgcggcgcctgccgctggacgcgctgaaggtggatcgctcgttcatcatggacatccccgcctcgcagcgggacatggaaatcgcccaggcgatcatcgcgatggcccagaagctccatctgaaagtcgtcgccgagggcgtggagaccccgcagcaactggcgttcctgcgggagaaccattgcgagctggtgcagggctacctgttcagccggccgctgccgctggcggccctggaagagttcctccgcgcctaccgcttcgacgccgcgccgccgctgcgcagcctgaaccaggcctga

SEQ ID NO: 361260 - DNA, 1656 bp, Pseudomonas aeruginosa
atgggtgggggtatcaagcgtttcttgccggctatcggttcgacccggctggtgatgctgttcgcgctggttctggtggtgttctacaacgcggcgacctggaaggccctgcatggcctggtgccgctgcaaggcttgaagggcttcgcgttcttcgcctcgttcgcggcgttcctgtgggccgccttcacgctcctgctgaccctggtttccttccgcccgctgctcaagccggccttgaccctggtcgccctgtgctcggccggcgcgacctacttcatgggcagctacggcatcagcatcgacacggtgatggtgcagaacgtcttcgagaccaacgccaccgaggccggcgacctggtcaacccgaccctgctcggctatctgctgttgctcggtgtcctgccttcgctgctgatctggctctggccggtacgctaccggccgttcttccgcggcctgctgaacaagatcctgacgctgctcggctgcctgctgatcgtcgcggtaatggtaggcagcttctattccacctacgccccgatcttccgcgaggaagacaagctgacccacttcatcaacccgaccaactacatctatgcggtgggcaagtacgccaagcagcgcctggtgatcaaggagcacctggtggtcgagccgatcggcctggacgcccgccaggcgccggctgcgctgcagcgacagaagaaatcgctgctggtgttcgtggtcggcgagaccgcccgtgccgatcatttctcgctgaacggctacgcccgcgagaccaacccggagctgagcaagcaggacatcgtcaacttcacccaggtccgttcctgcggcacttccaccgcggtctcggtgccctgcatgttctcccagtacccgcgcgaggactacagcgacaagaaggccaagacccacgaaggcctgctggacattctccagcgtgccggcgtgcaggtgttgtggctggagaacaacagcgactgcaagggcacctgcctgcgggtgcccaaccgggacatcccgaagacccagccgagtccgttctgcgacggcaagaactgcctggacgagtcgctgctggtaggcctgcaggagtacatcgacgggctgcaggacgacgccatcatcgtcctgcactccgatggcagccacggtcccgagtactacgagcgctacccgaaggagatggagcgcttccagccggtatgccggaccaaccagctcggcagttgcagcaaggaagagctggtgaacgtctacgacaacaccatcctctataccgaccacttcctgacgaaggtgatcgaattgctcaagcggaatgccgacaagcgcgatacggcgatgatctacgtgtccgaccacggcgagtcgctgggcgagaatggcgtctacctgcacgcggcgccctattcgatcgcgccccaggcgcagatccacgtgccgatggtcatgtggttcgccccgcaggcgctgggcaactggggcatccagcgcagttgcctggacggcaagcgcgacgacaaggacctgagccacgacaacctgttccactcggtgctcggcctgctggacgtacagacttcgttgtaccagccggcgctggacatcttcgccagttgccgcgcgcccagggcagcccagtga

SEQ ID NO: 361261 - DNA, 456 bp, Pseudomonas aeruginosa; identical to SEQ ID NO: 319436

SEQ ID NO: 361262 - DNA, 2847 bp, Pseudomonas aeruginosa
atggcgcagtatcaaccggggcaacgctggatcagcgacagtgaagcggaattgggcctggggaccatcctggcccaggatggccgcctgctcaccgtgctctatccggcgaccggcgatacccgccaatacgccttgcgcaatgcgccgctgacccgcgtgcgcttcgcccccggcgatgaagtgacgcacttcgaaggctggaagatgaccgttcgcgaggtcgaggaaagcgagggcctattggtgtaccacggcctcaccgcgcagaacgagcagcgcaccctgccggaaacccagctctccaacttcatccagttccgcctcgccagcgaccgtctgttcgccggacagatcgatcccctgccctggttctccctgcgctaccacactctcgaacgccgcagccaactgctccagtcctcgctctggggcctcggcggcgcccgcgcccagccgatcgcccaccagttgcacatcgcccgcgaagtcgccgaccgcatggcgccgcgcgtcctgctggccgacgaagtgggcctgggcaagaccatcgaggccggcctgatcatccatcgccagttgctctccggccgcgccgggcgggtgctgatcctggtcccggaaaacctccagcaccagtggttggtggagatgcgccggcgcttcaacctgcaggtggccctgttcgacaaggagcgcttcgccgaaagcgatgccagcaatcccttcgaggacacccagttggccctggtcgccctggagtggctgaaggaagacgaacgcgcccaggacgccctgttcgccgccggctgggacctgctggtggtcgacgaagcccaccacctggtctggcaccaggaccaggtcagcgccgaatacgcgctggtcgagcaactggcggagatcattcccggcgtcctgttgctcaccgcgaccccggagcaactcggccaggacagccacttcgcgcgcctgcgcctgctcgatccgaatcgtttccacgacctcgaagcgttccgccgggagagcgagcaatatcgccgggtcgccgaagcggtgcaggaactgctcgaccacggcagtctttccgccggcgcgcgcaaggccatccacggcttcctcggcagcgagggcgacgagctgctggccagcgtcgagggcggcgatgaagaagctcgctcgcgcctggtccgcgagctgctcgaccgccacggcaccggtcgcgtgctgttccgcaacacccgtgccgccgtgcagggcttcccccagcgcgaactgcacgcctatccgttgccgatgccgagccagtacgaggaattgccggccggcgaacacccggacctgtatccggaagtgaatttccagcagcagtgggaagacggcgacgacaacaaccgctggtggcgcttcgacccgcgcgtcgagtggctgatcgataccctgaagatgctcaagcagttcaaggtcctggtcatctgtgcccacgccgagacggccctcgacctggaagacgccctgcgcctgcgttcgggcatctccgccacggtgttccacgaaggcatgagcattctcgagcgcgaccgcgccgccgcctacttcgccgacgaagagttcggcgcccaggtgctgatctgctcggaaatcggcagcgaaggccgcaacttccagttcgcccaccatctggtgctgttcgacctgccggcccacccggacctgctcgagcagcgcatcggccgcctcgaccggatcggccagcgacacaccatccagttgcacgtaccgcacctggagaacagcgcccagcagcgcctgttccagtggtaccaccaggcgctgaacgccttcctcaatacctgccccaccggcaacgccctgcaacacgagttcggcccgcgcctgctgccgctgctcgacggcggcgaggacaaggcctgggacgcgctgctcgccgaaggccgcgcccgtcgcgaagccctcgaagcggagctgcacagcggtcgcgaccgcctgctcgagctgaactccggcggcgccggcgaaggcgaggcgctggtggaggccatcgaggaacaggacgacgacttcgccctgccgatctacatggagcgcctgttcgacgcctacggcatccacagcgaagaccattcggaaaatgccctgatcctcaagccaagcgagaagatgctcgacgccggcttccccctcggcgacgacgaaggcgtgaccatcacctacgaccgtgcccaggcgctggcccgcgaggacatgcagttcctcacctgggaacatccgatggttcagggcggcatggacctggtgctgtccggctcgatgggcaacacctcggtggcgctgatcaagaacaaggcgctgaagcctggcaccgtgctgctcgaactcctgttcgtcagcgaggccgtggcaccgcgcgccctccagctcggccgctggctgccgccgcaggccctgcgctgcctgctcgacgccaacggcaacgacctggccggccgggtgtccctggaaaccctcaacgaccagctggaaagcgtgccacgggtcagcgccaacaagttcgtccaggcccagcgcgatgtgctggccaagcagttcgacgtggccgagggcaagatcgtcccgcgccacgaggaacgcgtggccagggccaaacagcagttcgccgccgccatggacgaggaactggcgcgcctgaccgcgctcaaggcggtcaacccgagcgtccgcgacagcgagctggacagcctgcgcacccagcgcgaggaaggcctggccctgctcgacaaggcctccctgcgcctcgaggcgatccgcatcctggtcgccggctga

SEQ ID NO: 361263 - DNA, 309 bp, Pseudomonas aeruginosa; identical to SEQ ID NO: 319438

SEQ ID NO: 361264 - DNA, 603 bp, Pseudomonas aeruginosa
atggacctgttcgccgacgcacccctgaccctgccggacgccgacctgcgctatctcccgcattggctggatgcgccgctggcgagcgcctggctgttgcgcctggaacaggaaacgccctgggaacagccgatcctgcgcatccatggcgaggagcatccgaccccgcgcctggtggcctggtacggcgaccctgacgccgcctaccgttattccggccaggtccaccggccgctgccatggaccgcgttgctcggcgagatccgcgagcgcgtggagcgcgaggtcggccagcgggtcaacggcgtgctgctgaactactaccgcgacggccaggactccatgggctggcacagcgacgacgagccagagctgcgccgcgatccgctggtcgcctcgctcagtctcggcggcagccgccgcttcgacctgcggcgcaagggccagacccgcatcgcccactctctggaactgacccatggcagcctgctggtcatgcgcggcgcaacccagcatcattggcaacatcaggtggcgaagacccgccgctcctgcatgcctcgtttgaacctgaccttccgcctggtgtacccccagccatga

SEQ ID NO: 361265 - DNA, 162 bp, Pseudomonas aeruginosa; identical to SEQ ID NO: 319440

SEQ ID NO: 361266 - DNA, 1995 bp, Pseudomonas aeruginosa; identical to SEQ ID NO: 331324

SEQ ID NO: 361267 - DNA, 204 bp, Pseudomonas aeruginosa; identical to SEQ ID NO: 319442

SEQ ID NO: 361268 - DNA, 858 bp, Pseudomonas aeruginosa
atgcgtgcatcgcttcgcgtcgtcgtcaccctgctggtggtcgctgccgctgtcctcgccggcatctggctctggcgctactacatgctctcgccctggacccgcgatgcccgggtgcgggccgacgtggtggtggtggcgccggacgtgtccggctgggtgaccgacctggaggtcaaggacaaccaggtggtcaaggtcggcgacgtgctgatgcgcatcgaccaggaacgctaccaggccaacctggagcaggcccgcgccgtcgccgagacccgtcaccagcaatacctgttgcgccagaacgaggcggcccggcgcagccgcctgggcatcggcgcgatcagcgccgaggacaaggaaaacgcccagatcaatgctgccatcgctcgcagcgagtaccaggaggcgctggcccaggtgaagatcgccgaactcaacctcaagcgcagcgagctgcgcgccgcgcgcaacggccaggtgaccaacctgcgcctggcccagggcaactacgccacggcgggccaggcggtgatggcgttggtcgaccagcagtccttctatgtggtcgcctacttcgaggaaaccaagctgcccggcatccgcgtcggcatgcgcgcccaggtccgcctgatgagcggcgatcagccgatcgacggcacggtggagagcatcagcagcggtatcaccgaccgcaactcgacgccggacggccagttgctggccaatgtcgagccgaccttcaactgggtgcgcctggcgcagcgcattccggtgcgcatccgcctcgaccaggtgccggcggatgtccacctgagcgccgggatgaccgccagcgtcaccgtgcagggggactga

SEQ ID NO: 361269 - DNA, 1176 bp, Pseudomonas aeruginosa
atggaccttcgcttgctgttgctatccctgaccaccttcgccgccggcctggcggaaagcatcctgatcggcatcctgccgcccctggccgaagacctgcgggtctccatcagcctggccggccagctcaccaccctgttctccctcggcttcgccctcgccgcaccgctgctcggctggctgacccggcgcatcgaacgccgccgcctgctgctggcgaccctgctgctgttcgccctcagcaacgcgctcgccgccctcgctccgggctatctcggcctgttcctggctcgcctgggaatgtcggcctgttgcgggctgctgatcgtcctcgccagcctgctcgccgccgagctggccgccccggcccagcgcggccgggcgatcggcctgatcttcatgggcatcagcggttcgctggtgttcggcgtgccactgggcgtacagatcagcgactggttcggctggcgctggatcttcgccggcatcgcggtctattcgctgcccttgtgcctgctgctctggcgctacctgccgcaacgccaggccggcgacctgcccggccgcgaaggctacctgcggcagttgcgccagcccgcgctgtggctcgcgcaactggtatcgatcctgttgctcggcgggcacttcaccctgttcgcctatttcaccccgtacctggcgagcatggccggtattcgctcgcccagcgagatcagcctgatcctcctgctgatcggcctggcagcgctgagcggcggctatatcggcggctggctggccgaccgcctcggccaccggcgcgccctgcgtctggtgccggcggccttcgccctggcgctggcggcggtgccgctgagcctgggcagcatcgggttcctgccggtactgatggtctggagcgcgatcagctggatgatctcgccggtggtgcagagcttcctgctgcgcagcgatccggccagcggttccgccggcgtcgccctgaacacctcggccatgcacctgggcgtgggcctcggcgcggcgctgggcggcctggtggtggcggcactgggagtcgccgcgacgccctgggtcggcctcgccctggtgctggcggcgctggcctgcgcgcttggcgccagcacgctggatggcgccacgcaagcgctgccgttcagtccccctgcacggtga

SEQ ID NO: 361270 - DNA, 471 bp, Pseudomonas aeruginosa
atgagccaggtccagaacattccctacgccgagctagaggtcgggcaaaaggccgagtacaccagcagcatcgccgagcgcgacctgcagttgttcgccgcagtctccggcgaccgcaacccggtgcacctggacgccgcctacgcggccaccacccagttcaaggaacgcatcgcccacggcatgctcagcggcgccctgatcagcgcggcgatcgccaccgtgctgcccggcccaggcaccatctatctcggccagaccctgcgcttcacccgtccggtcaagctcggcgacgacctgaaggtcgaactggaagtcctcgagaagctgccgaaaaatcgcgtgcgcatggccacgcgggtgttcaaccaggcaggcaagcaggtggtcgacggcgaagcggagatcatggcgccggaagagaagctcagcgtcgagctggccgaactgccgccgatcagcatcggctga

SEQ ID NO: 361271 - DNA, 951 bp, Pseudomonas aeruginosa
atgcccgccgctgcctactggctccccgccagcgacgaaaccccgctgtacacccgccactggccgagcgcaacggccgtcggcgcggtgatgctgtcccacggcatggccgagcacgccggtcgctacgagcgtctcgccgccgcgctgaacgctgccggctaccacttctatgcgatcgaccagcgcggccacggccggaccgccgaagccgacgagctgggccacttcgccgaccagggcggctggggcaaggtggtcggcgacctggccagcctgaaccaccatatccgccagcagcacccggaactgccgatcttcctgctgggccacagcatgggcagctacatctccatggcctacctgctgcaccacagctgcagcctgcaagggacgatcctttccggttccaactaccagccgcaagcgctctaccggatcgcccgcctgatcgcccgcttcgagcgctggcgccaggggccgctgggcaagagcgcgctgatcgacttcctctcgttcggctcgttcaacaaggcgttcaagcccaatcgcacggccttcgactggctcagtcgcgatccgcaggaagtcgacaggtacgtggccgacccgctgtgcggcttccgctgcagcaaccagttgtgggtggacctgctcggcggcctggccgatatcaccccgcccacccacctgcggcagatcgatgccgacctgccgctgctgatcatcggcggcgaacgcgacccggtcagccagggcaagcgcctgggcgacctggccgacgccctgcgcggtgccgggctgcgccaggtgaccctgaagacctatcccgaggcccgtcacgagctgttcaacgagagcaaccgcgacgcggtcacccaagacctgatcgactggctggaacaggccctgcgccaccgccgggatcattcgacaaaggagagaacatga

SEQ ID NO: 361272 - DNA, 1689 bp, Pseudomonas aeruginosa
atgcaacctgaattctggaacgacaaacgcccggccggcgtacccgacagtctcgacttcgccgcctaccgttccgtggtcgaggtcttcgagcgctcctgcaagaaattcgccgaccgcccggccttcagcaatctcggtgtgacgctcagctacgccgaactcgatcgtctgtccgccgccttcgccgcctacctgcagaaacagaccgatctccagcccggcgaccgcatagcggtgcagatgcccaatgtcctgcaatatcccatcgcggtgttcggcgccttgcgcgcggggctggtggtggtcaacaccaatccgctgtacaccgcccgcgaaatgcgccaccagttcaaggacgccggcgtgcgtgcgctggtctacctgaacgtgttcggcaagctggtcgaggaagtgctcccggatacgcggatcgagtacctgatcgaggcgcgcatgggcgacctgttgccggcgctgaagggttggctggtgaacagcgtggtgaagtcggtgaagaagatggtccccgattatcgcttgccccaggcgctgccgttcaggcaggccttgaagcaaggccagggccatgccctgcagccggtcagggtcggcctggaggatgtcgccgtgttgcagtacaccggcggcaccaccggggtctcgaagggggcgatgctcacccacggcaacctggtggcgaacatgctgcaggtccacgcccagctttcccagctcggcaaggatggcctgccgctgatgaaggaggcgcaggaggtgatgatcgcgccgctgccgctctaccacatctatgccttcaccgcgaactgcatgtgcatgatggtcagcggcaaccataacgtgctgatcaccaacccgcgcgacatccccggtttcgtcaaggaactgaagaagtggcgtttctccgcgctgctcggcctcaacaccctgttcgtcgcgctgatggagcaccccgggttcaaggacgtcgatttctccaacctgaagctcaccaactccggcggcaccgcactggtcagcgccaccgccgagcgctggaagggcgtcaccggctgcaccgtggtggaaggctatggcctcaccgaatgctcgccggtggtgaccaccaacccctacggcgagcaggcacgcctgggtacggtggggataccggtcgtgggcacggcgctcaaggtgatcgacgagcagggcaacgagctgcctgtcggcgaacgtggcgaactctgtgtgaaaggtccgcaagtgatgaaggggtactggcagcgtcccgaggccaccgaggagattctcgatgccgaaggctggctgaagaccggcgacatcgcggtgatcgacgaggacggcttcgtgcgcatcgtcgatcgcaagaaggacctgatcctggtctccggcttcaatgtctaccccaacgagatcgaagacgtggtgatggcccatccgaaggtggccagttgcgcggcggtgggcattcccgacgagaagtccggcgaggcggtgaagctgttcgtggtggcccgcgaccccagcctgtcggtcgaggaactcaaggcctactgcaaggaaaacctcaccggatacaaaattccgcgacagattgtgctcaaggatgcattaccgatgacgcctgtgggtaaaatcctccgtcgtgagctgcgcgaaatcgcctga

SEQ ID NO: 361273 - DNA, 201 bp, Pseudomonas aeruginosa
gtggcagagcaggtccggcaggttgccgcgctgcgcatggccgacgagcatcgcgcccgggatgccgcgcaggctgtggagcgggggcggcagcaggccgcggagcagtatgccggagcccaacgcctgctgagtcagcgaaccgccggtgagcagtgtgcggccgccgaggcggtcatcgatcaggagctgggtctatga

SEQ ID NO: 361274 - DNA, 126 bp, Pseudomonas aeruginosa
atgtgctcggccatgccggcgagctcgtttgccagttcgcctagcatctccagcggggaggcggagcgcttcggctcggactgggtttcgatcttcttcgcgggctccgccatcttcggctcctga

SEQ ID NO: 361275 - DNA, 495 bp, Pseudomonas aeruginosa
atgccgtcattgctcaagggcatgcgcgccgcgttgctgaacctcgccacgctgctgttgctgctcgacctggtcctgctcatctacggcgtgttcgcccgctacctgctcggcagctcgccgatctggatggacgaactggcccgctacctcatcatcggcgcagtaatgctggcgctcggcgcggtatggatggaaggcgggcacatgcgcgtcaacctgttggaacaacgcctgccgccgcgcctggcgcaggccctcaggctctaccagtggctgctggcgctggccttcttcgccttcgccgcctgggtcagcacccgctacgcgctgaacgccgggcgcttccgcagcctcggcctgggcgtcagccgcacctggccgttgctcagcctgccgctcggcttcggcctgctgaccctcatgctgttgctccaggggccctggccgcggcagccggccagcaccaccgtcgagggagggtcgcaggcatga

SEQ ID NO: 361276 - DNA, 1044 bp, Pseudomonas aeruginosa
gtggttggggttgatgctgtagccgtgacgggcggcgaagctgcgcgcggtgagcatggcgctgcagaagctgaccaccgtgatgccggtggcgtcgcgcagcaggcttttcagttcctccaggctggtctgcggccagctcagttgcggcagcccggccggtacctcgccaagcagttccacgccgtagcgatccaggcccagcagcgccgcggcgaggctggccaggaggacgccgcagagcgccccgggcaactgcgggaagcgccgcggcagcagcaccatcagcaagagcgagaggctgccgaggatcagcgtcggccaatggatgtgcagcaggttctccagcagcgcgaggatgccggcgacgaagccgctggtcgccgcctcgtagccgaacagcttgcccagttgcccgaccagcaggctaaggccgatgccgttgaggtagccgaccaggatcggtcgcgagaggaagctggcgatgaacccggcgcgggccaggccggcgacgatggagaacagcccgaccatgatcgcgacgatcatcgacaggtccaccaggcgctgcggatcgcccgccgccagcggggtgatggcggcggcgaccatcgccgcggtcgccgcgtcggggcctaccatcaactgccgcgagctgccgatcagggcgtagatcagcatcggcaggatgcacgcatagaggcctacctggggcgggaagccggcgatctgggcgtaggcgatggcggtggggatctggatcgccgctaccgacagcccggcctggacatccggacggaaccaggcgcggcggtagtggagcaggctatcgagtccgggtacccagcgggcgagtggcatgcggctgattccttgcaggcgcggatgccgcagcttagcccgaaggacaggcggcaggattgccgggaatcattatttcttcagtgcacacgctcttcgaggcgaggcgctatccgccgcttcttcgcgccggcggcggacctcagaccttcaacaccaacttgccgaagttttccccgctga

SEQ ID NO: 361277 - DNA, 1143 bp, Pseudomonas aeruginosa
atgttcggcatcgcgcaactgggcgatcacctggcggttgtgctcgtcggcgaagaagttgtggatctcgtaggccacctcggcgccgacgtccggcaggtaggtcaacacttccggcagcgccttgccgatccgctcgagcgaacccagcgaacgcgccagcagcttggcggtttcctcgccgacgtcgggaatccccagggcgaagatgaagcgcgccagcgaaggcttgcggctgtcggcgatggccgccagcaggttgttggtggacagctcggcgaacccttccagctcgaacacctgttcataggtcagggtatagagatccgccggcgaggcgaccagcccgcgatccaccagttgctcgacgatcttgtcgccaagaccgtcgatgtccattgcccggcgcgatacgaaatggatgatcgcctgcttcaactgcgcctgacaggagaggcggccgacgcagcgatagatggcgccctcgctgatcgactccttgcccttgctgcgcttgaccaactgggtccgctccacggccgagccgcagaccgggcaatgctcgggcacctcgatagcctgcgcatccgccgggcggcgctcgagcaccacctgcatgacctgcggaatcacatcgccagcacggcggatcaccaccgtatcgccgatgcgcaggcccaggcgggcgacttcatccatgttgtgcagggtcgcattggacaccgtgacgccggccacctgcaccggcttgaggcgtgccaccggggtcacggcgccggtgcggccgacctggaactcgacacccagcagctcggtcaactcctcgcgcgcggggaacttgtgggcgatcgcccaacgcggctcgcgcgcgcggaagcccagttcgcgctggaaggcgatgcggttgaccttgaacaccacgccgtcgatctcgtaggccagcgcatcgcgtcggcgaccgatgtcgtcgtagtagtcgcggcaggcctgggcgcccttgaccaggcgcagctcgcgactgatggggataccccagccgcggaacgcctcgaggatgcccacctgggtgtccggcagcgtcccgctgacctggccgaagccgtaggcacagaattccagcgggcgactggcggtgatctttga

SEQ ID NO: 361278 - DNA, 291 bp, Pseudomonas aeruginosa; identical to SEQ ID NO: 328687

SEQ ID NO: 361279 - DNA, 855 bp, Pseudomonas aeruginosa
gtgctgggccaggtcgggctgttcgccgacggcgtggcggtggcgcagatcggccagcacaccttcgacatctgcaaggaccacgtcgacgaagtgatcaccgtcagcaccgacgagatctgtgcggcgatcaaggacatctacgacgacacccgctcgatcaccgagccggccggcgcgctggcggtggccgggatcaagaagtacgtcgagcgcgagcgcgccgaggggcagaccctggtggcgatcgactccggcgccaacgtcaacttcgatcgcctgcggcatgtcgccgaacgcgccgaactgggcgagcgccgcgaagcgatcatcgcggtgaccattcccgagcggccgggcagcttcaaggccttctgcgaggcggtcggcaagcgccagatcaccgagttcaactatcgctaccacagcggcagcgaggcgcacatcttcgtcggcgtgcagacccacccggagaacgacccgcgcgaggcgctggtggcctatctgcgcgagaagggcttcccggtcctcgacctgaccgacaacgaactggccaagctgcacatccgccacatggttggcggccatgcggtgaaagtcagcgacgagatggtgttccgcttcgaattccccgagcggcccggcgcgctgttcaacttcctcaccaagctcggcgggcgctggaacatctcgatgttccactaccgcaaccatggcgcggccgacggccgggtggtggccgggttgcaggtgccggaagacgagcgccacctgatcccgcagaccctggaggcgatcggctatccgtactgggacgagaccgccaacccggcctaccagctgttcctcggctga

SEQ ID NO: 361280 - DNA, 468 bp, Pseudomonas aeruginosa
atggaacattttatccagatcaagattctccacggagtcgccaccgtgctgctgttcggcggcctgctcggcctggcgttctacgcctggcgcagctggcggacgggcgacgcggcgcgggtcgcgcgcggtttcaagcgggtccgcctgatcggctggccgctgctggggctcagcctgctggccctgccggtcagcggctggtggctggtgcacctggccggctggccgttgggccagagctggctgctgttcggcgcctgcctctatctgctcggctgcatcttctggctggtcctcgccggccgcctggcgcgggtccagcaccaggccggcgccgccgagacggcgggggccgcgctgggcgagcaggccctgcgcgagatcaaggtgggcctggtcatggccctgctcggtgcggccagcttcatcgcggtggcggtactgatggtcagcaagccgctctga

SEQ ID NO: 361281 - DNA, 999 bp, Pseudomonas aeruginosa; identical to SEQ ID NO: 320779

SEQ ID NO: 361282 - DNA, 411 bp, Pseudomonas aeruginosa; identical to SEQ ID NO: 320778

SEQ ID NO: 361283 - DNA, 648 bp, Pseudomonas aeruginosa
atggcaccacgcatcaagacccgcgatcgcatcgcccaggccagcctggaactgttcaacgcccagggcgagcgcagcgtcaccaccaaccatatcgccacccacctgggtatatcgcctgggaacctctactaccactacccgaacaagcaggcgatcatcgccgagctgttcgccgagtacgaaagccacgtcgagagcttcctgcgcctgcccgaagggcggggtctgacggtggacgacaagaccttctacctggaagcgctactggccgcgatgtggcgctaccgcttcctccatcgcgacctcgagcacctgctggaaagcgacccggagctggcggcgcgctaccgcgccttcgcccagcgttgcctggtcaacgccaaggcgatctaccggggcttcaccgaggccggcatcctgcggatgaacgagacccagctggaggccctgaccctcaacgcctggatcatcctcacctcctgggtgcgcttcctctgcaccaccctcgatctcgacggcgacctcagcgaggcgcaactgcgtcgcggcatctaccaggtgctggcgctggagagcgggcacatcgaggcgcaggcccaggatgcggtggacgggatttccgagcggctctacgtgccgctctga

SEQ ID NO: 361284 - DNA, 1596 bp, Pseudomonas aeruginosa
atgcctgtacccgatctgttcgccgagggcctcgcccgcggctggaaaacctacaacggctcgcgcctggacgacgacctggagctggaggccgacgtggtcgtggtcggcaccggcgccggcggcggcaccaccgcggaaatcctcagcgccgccggcctgaaggtgctgctggtggaagaaggcccgctgaagaccagcagcgatttcaagatgcaggaggccgacgcctaccccgagctgtaccaggaaggcatcggccggatgagcaaggacggcgccatcaccatcctccagggccgcgcagtgggcggcaccaccctgatcaactggaccagcagcttccgcaccccggaaccgaccctgcagcactgggcccaggtctacggggtcaagggccacagcgcggaggacatggcgccctggttcgagaaaatggagcagcgcctgcacgtggcgccctgggcgctgccgccgaatgccaacaacgacgtgatccgcctgggctgcgagaagctcggctatcactggaaggtcatcccgcgcaacgtcctcggttgctggaacctcggctactgcggcatgggctgcccggtcaacgccaagcagtcgatgctggtcaccaccatcccggcgaccctcgacaagggtggcgagctgctctacctggcgcgcgccaaccggctgctgctggacggcgacaaggtgacgggcctcgaatgcctgggcatggatgagcgctgcgtggcgcccaacggccgccggatcagggtccgggccaggcactacgtgctctccggcggcggcatcaacaccccggcgattcttctccgctcgaaggcgcctgatccgagccagcgggtcggcaagcgcaccttcctgcacacggtgaatttcagcgcggggctgttcgaccgggtgatcaaccccttctacggcgcaccgcagtcgatctactccgaccatttccaatgggacgacggtgtcaccggacgcatgtcctacaaactggaggtgccgccgctgcaaccgtcgctggcctcggtgctgctcggcggcttcggcagcgacaacgccctgcgcatggaacagctaccgcataccaacatgatgctcgccctgctccgcgacggcttccacccggacagcgcggagggctcggtcggcctgcgcggcgacgacaccccggtgctcgactaccgaatgaccgactacacctgggacggtatccgccgtgccttccataccatggcggagatccagttcgccgccggcgcccgggaagtgcggccggtgcacagcgacgcgcgtagagcgaagaacctgcaggaggcgcgcgggatcatcgacggcctgcgcctggagatctaccgcacgcgcctgggcagcgcccacgtcatgggcggctgcgccatgggcgaagacccggccgtggcggtggccgacagcctcggccgccatcaccacctgcggaacctgtcgatccacgacggctcgctgttccccaccagcatcggcgccaacccgcagctctcggtctacggtcttaccgcgcaactggccagcgcgctggccgaacgcctggccagggcctga

SEQ ID NO: 361285 - DNA, 480 bp, Pseudomonas aeruginosa
atgaaccgagtgctgtacccaggcaccttcgatcccatcaccaagggtcacggcgatctgatcgaacgtgcttcacggcttttcgaccatgtgatcatcgcggtcgccgccagccccaagaagaaccccctgttcaccctggaacagcgggtggcgctggcccaggaggtcaccaagcacctgccgaacgtcgaagtggtgggcttctccaccctgctggcgcacttcgtcaaggagcagaaggcgaatgtcttcctccgcggcctgcgcgcggtttccgacttcgagtacgagttccagctggccaacatgaaccgccagctcgcccccgacgtggaaagcatgttcctcaccccgtcggagaagtattccttcatttcctcgacgctggtccgggaaatcgccgctctcggcggggatatcagcaagttcgtgcatccggccgtggcagacgccctggcggaacgtttcaagcgctga

SEQ ID NO: 361286 - DNA, 252 bp, Pseudomonas aeruginosa; identical to SEQ ID NO: 320772

SEQ ID NO: 361287 - DNA, 1734 bp, Pseudomonas aeruginosa
atgtccttcctgaacctgcccgtccgtaccctggtcgccgcctgcggcctgtccctgctcagcctcgcggcgcatgccgacagctttcgcggcaacgcccacgcaccgcagcaggccgccgtcgccacgccacatccggccgcgaccgtcgccggcctggaaaccctggccaatggcggcaacgccttcgacgctgcggcggccatcgccgctgccctggcggtagccgagccttacggctcgggactcggcggcggtggattcttccttctgcgccaggccggtgcgcagccgacctatcgcttcctcgacgcccgcgagcgcgcgccgaaggccgcctacgccgacatgtaccggcgcaatggcaaggtcgaccccaggctgtccgtcgacggcccgctggcggcggcgatccccggcctgccggcggcgctggtcgaattgagcagccgctacggacgcaagcccctggccgacaatctggtgccggcgatccgcctggcggtggatggcgtatccgtcgaccggatctaccgtgaccgcgccgccatgcgcctggaagcgatgcgcaaggacccggaaaccgcgcggatcttcctcgacaagggcggaatccccgacgaatggaacctgctccgccaaccgcagttggcacgtaccctggaacgcctcgggcgctacgggcggatcggtttctacgaaggcgagacagcggacaagctgctcaccggggtccgcgccggcggcggcatctggagcgcggccgacctgcgcgactaccgggtgatcgaacgccgcccgctggaggtgaagctggccaacggccgcgaactgatcagcgcaccgccgccctcggccggcggcgtcgccctggcgcagagcctgcagatgctggaacagctgccgtggcagaaggccgagccggtacagcgtgcccattacgtgctggaggtcctgcgccgtgcctaccgcgatcgaggcctgctcggcgacccggacttcgtcgccaacccgctgcccagtttgctggcgccggactacctgaagcgccttgccgccggcatcgacccgcgccgcgccacgcccagctcggcgctgccggaggcgccggcctggcgcgaaggcgaccacaccacccacttcgcggtgatcgatgcccagggcaacgcggtggccgccaccctctcggtgaacctgccgttcggcgccgccttcaccgttcccggtaccggcgtggtgctgaacaacgagatggacgatttcgccgccgacacccagggcgccaacagctacggcctggccggcagccaggcgaacgcggtggcggccggcaagcgcccgctgtcgagcatgagcccgagcttcctggaaagcccgaccgacttcgccgccttcggcacccctggcggcagccgcatcccgagcatggttctgatctccatgctgcagtacttcgacggtcgcccggtcggccaatgggtcgccgcgccgcgctaccaccaccagtacaagccggacgtcgtcgagtacgaaccgcgcgccttcagcgatgccgaggccgccgaactgcgccggcgcggctatcagctcaaacgcctggagcgcagctacggcaaccagcaggtgctctactgggacaagcgcagcggccgcgtcgacgccgccagcgacccgcgcgggatcggctactcgtctctgtccctggaggcgcaagcgcaacctcggccgcactga

SEQ ID NO: 361288 - DNA, 987 bp, Pseudomonas aeruginosa
atgttcagtcagtgggtgttcctgtccgtccttgctcttgccgtaccctcgttcgcctgggcggaggatgcggtgtccgacctcgccaaggagcagtccaaggccgagcagggcgacaagcgcggcgatgaactgttcgccgaattcacccgcctccgccaggccgccgagacgggggagccgcaggctctgttcgatttcggcgcctacttctaccagcaacagaactacgccagcgcgcgcgaatggtggggcaaggcggccgctgcggggatggtccgcgcgcagatccaactggccatgctctatcgcgatggtgacggcgggccacaggacaagaccgaggcggcacgctggttccggaaggccgcggagcagggggatgccgccgcccagaatgaaatgggcgttctctactggagaggcgaaggggtcgaccaggaccgggtgaaggccgggacctggttcgaacgcgcggcggccagcggtagcgaagacgccgaaaccaatctgggatggttctacctggacgactcgcaaggcgtctattccgccacttcagacgaggaagccgccctgctggaccgttatgccggcagccgggaaaaggccttccagtggttctgcaaggctgcgacccagggagatgcccgtgcccagttcaaggtgggcgaggcctactggaacggttccggtgccgggatgaacaagctgcaagcgcggctctggctggaaaaggccgcacagcagcaggatgcggatgccatcgcctggttggagagcgccgcgaacgcagcctggtacacccgcctggaaaactggattcacgctgcgctggatggagagctgtccggcgtcgccgactgctccggtgccgccgatcgccggcactccggccgaggcatggatggcgccccgtctgacccggaggcggtggaagccagtgcggaggatgcgcagcaggcggttgaagcggcgagccagtga

SEQ ID NO: 361289 - DNA, 345 bp, Pseudomonas aeruginosa; identical to SEQ ID NO: 325299

SEQ ID NO: 361290 - DNA, 579 bp, Pseudomonas aeruginosa
atgtccggcaattacctgcctcgcaacaccctggtcgagtcgctcggccatgccatgctgaaactctccggctggaagatcgagggccaattgcccgcgctcgacaagttcgtggtgattggcgcccaccacacctcgaactgggacttcgtggccttccttgccgccaagttcgtcctgcgcctgaacgcccgctggttcggcaagcacaccctgttcaacggcccgctgggcggcctgatgcggcgctggggtggcatcccgatccagcgccacctgaagttgaataccgtggaccaggcgatccaggccttccgcgagcaccgcgagttcatgctgatcatcgctccggaaggcacgcgcaagaaggtcgaccgctggcgcatgggcttctaccacatcgcccgtggcgccggcgtaccggtggtgccggcggcgctggactacgaaaaccggcggatcgtcatcggcgaacccttctggccgaccggcaacgaggacgccgacctgtgcagcctgatcggcttctaccggccgttcatcccgaaaaagccgcactacgcattcctcggcgattga

SEQ ID NO: 361291 - DNA, 813 bp, Pseudomonas aeruginosa
atgcccgaactacccgaagtcgaaactacccgccggggcatcgccccctacctcgaaggccagcgcgtcgagcgcgtgatcgtgcgcgagcggcgcctgcgctggccgattcccgaagacctggacgtgcgcctgtccggacaacgcatcgtcagcgtcgagcgccgcgccaagtacctgctgctgggcgccgaggccggtacgctgatcagccacctgggcatgtccggcagcctgaggctggtggagagcggcaccccggccagtcgccacgagcacgtcgacatcgagctggcctcgggcatggccctgcgctacaccgatccgcggcgcttcggcgccatgctctggagcctggcgccactggaacacgagttgctgcgcaacctcggcccggaaccgctgaccgacgctttcgccggccagcgtctgttcgagctgtcgcgcgggcggagcatggcggtcaagccgttcatcatggacaacgcggtggtggtcggggtcggcaacatctacgccagcgaagcgctgttcgccgccggcatcgatccgcgcaagcccgccgggagcatctccaaggcgcgctacctgcgcctggcggaggagatcaagcgaatcctggcgatcgccatcgagcgcggcggcaccaccctgcgcgatttcgtcggcggcgacggccagcccggttacttccagcaggaattgttcgtctatggccgtggcggggagttctgcaaggtctgcggcagcagcctgcgcgagatccgcctaggccagcgcgccagcgtgtactgcccgcgctgccaacgctga

SEQ ID NO: 361292 - DNA, 879 bp, Pseudomonas aeruginosa
atggtccaagaacttaccgccgagcagatccgccaggccctgcaaggcatcagcgtgccgccgcaaccccagatcatggtcgacctgcagatggagcaggtcatgcccaatccggacctgaagaacattgccaggctgatcagccaggacccgggcctttccggggctctcctgaaactggtgaactcgccgttcttcggcctggccaatcgcatcacttcgatccagcgcgcggtgaacctgctgggcagtcgttcggtgatcaacctgatcaacgcccagtcgatcaagggtgagatgagcgacgacaccatcgtcaccctcaaccgtttctgggacaccgcccaggacgtggccatgagctgcctgagcctggccaagcggatcggctacgaatcggtggacgaagcctacgctctcggcctgttccacaactgcggcatcccgctgatgctcaagcgcttcccgcactacatggcggtgctggaagaggcctacgccgccgccagcgacgaacgccgggtggtggacaccgagaaccgcgtgctgaacaccaaccatgcggtggtcggctactacaccgcgcgctcctggcgcctgccggagcacgtctgcgaggcgatcgccaaccaccacaacgcgttgtcgatcttcggcgacgaatcggcacgcgatacccaactgaagaacctgctggcgatcctgaagatggccgaacacatctgcggttcgcaccgggtcctcggcaaccagccggaagaccacgaatggaacagcatcggtgcgctggtgctggactacgtcgggctcaccgactacgacttcgagaacctcaagggctcgatcctcgagctgggcgtcggccagggcagctactga

SEQ ID NO: 361293 - DNA, 540 bp, Pseudomonas aeruginosa
atgacccaatccctgcacggcaaggtcgtcgccgccctggtgaccgacggtttcgaacaggtcgaactgaccggtccgaaaaaagccctggaagacgccggcgccacggtaaggattctttccgacaaggccggcgaggtgcgcggctggaaccatcaccagccagccgaggccttccgcgtcgacggcaccttcgaagacgccagcctggacgactacgacgccctgctgctgcccggcggggtgatcaattccgaccagatccgcagcctggccaaggcccaggaactggcgatccgcgccgaacaggcgagcaagccggtggcggtgatctgccacggcgcctggctgctgatctccgccggactggtgcagggtcgtaccctgaccagttggccgtcgctcaaggacgacatcaacaacgccggcggccactgggtggaccaggaggtagcggtggacggcaagctggtgagcagccgcaaacccgaagacatcccggccttcaaccgtcgattcatcgaaatcctcgccggctga

SEQ ID NO: 361294 - DNA, 1197 bp, Pseudomonas aeruginosa
atgaccctgcccagcttgcgtctcaaagccaacgccgagcgccgcctgcgcgccggccacctgtgggtctacagcaacgaggtggatgtcgccgcgacgccgctgaatgccttcgccgccggcgaccaggcggtgctggaaatggccaacggcaagccgctgggcatcgtcgcgctgagcccgaacaatctcatctgcggccgcctcatttcccgtgataccaagcacgttctcgacaaatcgctgctggttcatcgcatcaacatcgccctcagcctgcgcgagcggcttttcgacaagccgttctaccggctggtctacggcgattccgacctgctgcccggcctggtggtcgatcgctttggcgacgtgctggtggtgcaactggcgtccgcagccatggaactgcgcaaggacgaggtgctcgccgccctgctgcaggtgctcaagcccgccgccgtgctctggaagaacgactccagcgcgcgcgacgccgagggcctggagcgctacgtggccaatgcctacggcgaagtgccggagtgggtcgccctggaagagaacggcgtgaagttcgaggcgccggtgctggccgggcagaagaccggctggttctacgaccaccgcatgaaccgtgcgcgcctggcgccctacgtgcggggcaagcgggtcctcgacctgttcagctatatcggtggctggggcatccaggccgccgccttcggcgccagcgaagtgatgtgcgtggacgcgtccgccttcgccctcgacggcgtcgagcgcaacgcggcgctgaacggcgtggcggagaaggtcgcctgcgtcgagggcgacgtgttcgaggccctgcgcgagctgaaggccgccgacgaacgcttcgacgtagtgatcgccgacccgccggccttcatcaagcgcaagaaggacctgaagaacggcgaggccgcctaccgccgtctcaacgaacaggccatgcgcctgctgagcaaggacggcatcctggtcagcgcctcctgctcgatgcacctgcccgaggacgacctgcagaacatcctgatcggcagcgcccgccatctcgaccgcaacatccagctgctcgagcgcggcggccagggccccgaccatccggtgcacctggcgatcgcggaaacccgctacatcaagagcctgacctgccggctgctgcccaacggctga

SEQ ID NO: 361295 - DNA, 1386 bp, Pseudomonas aeruginosa
atgagttccctgcaaagcccgtcggacgccagcgcccgcaacgacctggtctatggcctggacgaccgtcccagcgctcccatcgccctgctcgccgccctccagcacctgctggcgatcatcgtgccgatcgttacccccggcctgctgatctgccaggcgctgggcgtatcgccgcgcgacaccaatctgatcgtgtcgatgtcgctggtgatctccggcatcgccaccttcgtccagtgcaagcgcttcggcccgttcggcgccggactgttgatcgtccagggcaccagcttcaacttcgtcggcccgctgatcgccggcggggcgctgatggtcaagcagggcacgccggtggaaagcgtgatggcggcgatcttcggcgtggtcatcgccggctccttcgtcgagatgggcatctcgcgcatactgccgttcgtcaagcggctgatcaccccgctggtgaccggcatcgtcgtgctgatgatcggcctgaccctgatcaaggtcggcctgatcagcatgggcggcggcttctcggcgatgtccaacggcaccttcgccaacggcgagaacctgctgctgtccggcgtggtgctgggcatcatcgtggtgctcaaccgcatcccggtggtatggatgcgcagttgcgccatcgtcatcgccctggccgtcggctacgcgctggccggctacctcggtcgcctggacttcaccggcatgcaccaggccgagctgttccaggtaccgaccccgctgcacttcggcctggacttctcctggccgctgttcatcccgatgctggtgatctacctggtcacctccctggaagccatcggcgacgtcaccgccaccagcaaggtgtcgaagcaaccggtggaaggcccgctgtggatgcagcggatcaagggcggcgtgctggtcaacggcgccaactcgttcctcgccggtatcttcaataccttccccagttcagtgttcgcccagaacaacggggtgatccagctcaccggcgtggccagccgctacgtcggcctgtggatcgccgccatgctggtcctgctcggcctgttcccgagcgtcgccggggtcatccaggcggtgccggaaccggtactgggcggcgcggcgatggtgatgttcggcgcggtggccgcttcgggcatcaacatcctcgccggcatccagctggaccgccgtgccctgctgatcatcgccgtatccctggccctcggcctgggcgtttcgcaggtgccggagttcctcgcgcacatgcccgcggcgctgcgcaacgtgctggaatccggggtcgccaccggcggcatctgcgccctgctgctgaactggttcctgccggaaagcccggtccagaaggccggacactga

SEQ ID NO: 361296 - DNA, 474 bp, Pseudomonas aeruginosa
atgccccagtcccgccgcccgttgcgcatcggcctgatcgccgacacccatggcctgctccggcccgaggcgctggaacggttgcgcggctgcgaccagttgatccatgccggcgacatcggcaagccggaaatcctcgccgagctggaacgcctggcgccgctctcggtggtgcgcggcaacaacgacacccaggactgggcggcggacatccccgagcgcctgctgctgaagatcggccggctgaccctctatgtgctgcacgacctcaagcgactcgacctcgacccggccgccgaaggcatcgacgtggtggtcgccggacattcgcacaagccactgaaggaagagcgcgacggcgtgctctacctcaacccaggcagcgccgggccgcggcgcttcagcttgccgatcgggatcggcgtgctggaagtggcggggaagaagatcgaggcggagctgatcaccctctga

SEQ ID NO: 361297 - DNA, 507 bp, Pseudomonas aeruginosa; identical to SEQ ID NO: 320760

SEQ ID NO: 361298 - DNA, 1041 bp, Pseudomonas aeruginosa
gtgagccggcgtccgtggggcgtactgcttggctgttgcctgttggcggccagcgcggcccaggccgaaagcgccatcgaccggcagcagcgcgaactggccctgctgcgcgagggctggtaccggcaggtcccgccggcgccggtgccgctgcccatgcgtacggccgggccggcggattccggccaggatggcgtcggcatactgctgcgcaacgtggacatgtacctgcgcggcaacatcggtttccacgtgcccgaggtgaagggctggctggtgccgaaccgggccggccagccggtggacttcgaccgtccgcaggacatgcatttccaggtgatggagggcgaggtgctgctcagcccgcggcaactggccaacctgttcaacgagcacatcctcgcctacgacgggaccatgttgaaggacttccgcatgagcagtgcggcgggacgcctggaggtggaggggcgggtgcgtccgctcggcgtagggccctggctgccgttgcggctgggcggcggcgtggaggtggacgcggccagcggcgcgctggtctatcggcccgaccagttgagggtgatcggtctgccgctgtacggggcgatgagcctggtcggcctgccgatgtcggcgctggtcagcctcgatcggccgggggcgagcctggtgggcagcgccatgcgcctggactaccgcaaggtcttcccgctgctgggcatcgacggccacgtacaggaggcctggctcgacgaccaggggctgcacctgcgtttctcccaggcgcccggccagccgtcgccggtgttcagcccgccggccgcggcgggcccatccttcctctggctacagtcgggcgacctgaagatcttcgaaatcctcatcacctacgcccaggtgctgctgaagaccgagaccccggaccaggtgctgaccttcaacctgcaggactaccgcaaggtgctggcgaccggcaccacccaggtcaacgaggatggcaccttcttcatgcaggtgccgccgtatgccaatcccttgtag

SEQ ID NO: 361299 - DNA, 1095 bp, Pseudomonas aeruginosa
atggcttccgcgcaacctgcctccgcgtttccctgcctgtcgttgcaactggcctgcctgttgctgggcgcctggctggccttcgatgcccacggcggcggccaggccgtggcgccgccggcccgtgtcgaagcgcgtgtgccgacggccgctaccgatgactggggacgccagccggacagcctgatgagcgccgtgccgccgcgcacgctggaggcgagcgtcggcgcccgcggctcgggatcggcgagttcgcgactgtggatcgccgataccgacttccgcctgcacgacgacatcggtttcttcatccagcgcatgctgatccgcatggagccgactcgtcccggcgcgcccttgtcgctcgacgatccgacggcgatggtggcgcggatccaggccggcgagatattcgtcagcgacgccaccctggcgaccctgctcaaccaggacctcgctgcgtcccgcgcggccgtgcgcaacctcagtatgaacacccgcaaggacggccaggaagtgcgtggcgagttgttgcgcaaggggcgctggcggccgctgcggatgctcaccgagatcgagctgagcggtccgctggaggtgaccctggtaccccggcggattttcgtcgacggggtcgaggtcacttcgtcgctggcggcggcctcgatcgagatgtccgaggtgctgaagctgaagacccggcacatggaattggtcggcaaccgcatccgcgtcgacctcgacggattgttcccgccgccgcgcctggacttccgcgtcagtcgcctggccctggccgacggcggcatgcaactcgccctcggcgactccctggccgacctgcaatggccggcattacgggcgccggacagctacatgttcatcgagggcggcgatatcaagatggcgcgcaccgtgctggtcaaggcctatgccctgttcaccagcctcagcccggggcagccgctgctgttcaatctctacgactaccggcggcaactgcagaacggcgtgatccgcctgcgcgaggacggcatggtgcagatcgccgtgtcgccggtgaaggcgccggcgccgctggaggcacggctgtga

SEQ ID NO: 361300 - DNA, 1152 bp, Pseudomonas aeruginosa
atgcaaccagccttcctgcgccgccacctcggcgccgcctgcctgatgctcgccgctggcctggccagcgccgcccacgccgacaccggcaacgtacaacgcgccatcgactgggcccagggccaggcctccgttcgccacccggccagcgacgaacgctcgccgctggtcatcgcccaccggggcgccagcggttacgtaccggaacacaccctgggcgcctacgccctggcggtgatgatgggcgccgactacgtcgagccggacctggtgatgacccgcgacggcaagctggtcgcccgccacgacaacgaactgggcctgaccaccgatgtcgcccagcacccggaattcgccgaccgcaagcgcacgcagaaagtcgacggagtggaactcaccggctggttcagcgaagacttcaccctcgccgaactgaagaccctgcgcgccatcgagcgcatccccacgatccgcccgggcaatgcgcgcctggacggcaccttcgagatccccaccctgcaggagatcatcgacctggtgaaaagcctgcagatcagccagcagcgcaccatcggcctgtaccccgagatcaagcacggcacccacttccagcgcctcggcctggccatggaacgcccgctggtgaagaccctgcaccgcaacggctacctcggtccgcgcgcgccggtattcatccagtccttcgaggtgaacaacctgaaggaactcaagcgcctcaccggcatccgcctggtgcagctctacggcagcggccagccctacgaccagcaggctgccggcggcagcctgacctacgccgagatggccaccgccaagggcctgcgccaggtggcgcgctacgcctacggggtcggtccggacaagagctacgtgattccccgcgatgccaacggcaacctcggccagccgacccgcttcgtcggcgacgcccacgccgccgggctgaaggtgcatccctacaccttccgcgcggaaaacagcttccttccggcggagttccgcagcgccgacggcaacccgcagtcgcgcggcgacctggccggcgagatcagggcctacctcgacgccggcatcgacggcctgttcagcgaccagccggacgtcgccgtgcgcctgcgcgagcagcgctga

SEQ ID NO: 361301 - DNA, 363 bp, Pseudomonas aeruginosa
atgaaggtagtacgccgataccccctggcgctgttgctggggatggcgggcgcgctggccgacgagttgcccgatggctccttgctgcaacgctatggcgtgcaggccgaccagttgccgaccctggcggcggatccgccgtcgcgcaaggaggagaaggaaacgccgtcgcgcttccgggtggagccggagcagcccttggtgacctttggcgtgaaggaccacaagggcatggaacccactggcaacccgtcgatcgacgccatgcacgagcgcgatcggcggatctgccggaacatcaggcggcaggcactggagaaaggcaaggcacagcccttcgacggctacatcgagtgtccatga

SEQ ID NO: 361302 - DNA, 1386 bp, Pseudomonas aeruginosa
ttgagtcacacgacgcatcccggcctcgacgccctctggctgaccgaggccgttcgcctgcgcgaggagcaggccggtccgctggaagacagcgaggcggttcgccaggcgctggcccagggcggttccctgccgcgccgtattctcacccgcgcccactggctgggccgccgcgagggcctgctcgacgcccagcggacctggcgccagggttcgcggctggcgctggccctgctgctggtgctggccctggccagcggcgccggactggccttcgccgcgctcggcgatggccagcgcccggtcaacgtgttctgggcgctggccagcctactcggcctgcacctgctgaccctgctcggctgggccctcggcctgctcgccggcggcgaggccgcgggcgcgctcggccggctctggctgtggctcagcggcaagctggcgcgcgatgcccgcgccgcgcacctggcgccggcgctattggtcctgctcggccggcgccggctggcgcgctggggcctcggcgcgctggtccacgggctctggctgctcggcctgctgaccgcgctggccatgctcctcggcctgctggcgacccgccgctacggtttcgtctgggaaaccaccattctcggcagcgataccttcatcgcccttacccaggcgctcggcgccctgccggcgttgcttggcttcccgttgccggacgccgagctgatccgcgccagcggcgacgccgccctggccagcgaagccgcacggcacgcctgggccggctggctggtaggcgtactgctggtctatggggtcctgccgcgcgcgctgctcggtctgctctgcctgtggcgctggaaacgcggcctggcccacctcgacctggacctcgacgacccaggctacagcctgctgcgcgaacgcttgatgccggccagcgaacgcctcggcgtcagcgacgcggcaccggactggctgccggagccgcagggcggccagtccagccaggaagccgccggagcggtgctggtggcggtggagctggacgatcgccggccctggccgccgaagctcgccgaaggcgtcgccgacgccggcatcctcgacgacggccagcagcgccgtcgcctgctcgaacaactgacccgctacccgccggcgcgcctggccatcgcctgcgacccgcgtcgctcgccggaccgcggcaccctggcactgctcggcgaactcgcccgctgcgccgccagcacccgcatctggctgctccaggctccgcccggcgaagcgctcgacagcgaccgcctgggtgactggcacgccgccctggaacgcctgcaactgccgcacggcgagacctcgccgctggcctggctggagaccggccatgactga

SEQ ID NO: 361303 - DNA, 1380 bp, Pseudomonas aeruginosa
atgactgagccgctgatcctggccgtggtcggccacaccaataccggcaagacctcgctgctgcgcaccctgactcgcgaccgtggattcggcgaagtctcccatcgccccagcaccacccgccacgtcgagggcgccaggctgtcggtggacggcgaagcgctgctggaactctacgacacgcccggcctggaagacgccatcgccctgctcgactacctggacgccctggagcgccccggcgagcgtctcgatggcccggaacgcatggcgcggttgctggacagcaacgaagcgcgcgggcgtttcgaacaggaagccaaggtggtccgccagttgctcgcctccgacgccgggctctacgtgatcgacgcccgcgaaccggtgctggccaagtatcgcgacgaactggcggtgctcgccggctgcggccggccgctgctgccggtgctgaacttcgtcgccagcccgcagcatcgcgaggaggagtggcgcgccgccctcgctcgcctgggcctgcacgccctggtgcgtttcgacagcgtggcgccgccgctggacggcgagcggcgcctctacgagagcctggcgctgctgctggagcgcgcccggccgcaactcgaccggctgatcgccgaccatgagacccaggccgccgcgcgcctgcgcgccgggcaacggctgatcgccgaattgctggtcgacgtcgccgcctgccggcgcctggtgcccggcggcgaaagcgccgtgcaggaagccacccgcgacctgcaccagcaggtgcgcaagcgcgagcaggcctgcgtggaagcgttgctgcggctctacgccttcgccagggacgacgcccgcgccgccgacctgccgctgctcgacggccgctggggcgacgatctgttcaatccggagaccctgcgccaactcggtatccgcctcggcggcggggttgcggccggtgccgcggccggcgccggcatcgacctgctggtgggcggcgtcacccttggcgccgccgccgccctcggtgccctcgccggcggcgcctggcagaccgtcggccactacggctcgcgcctgctcggcaagctcaagggcgcccgcgagctgaccgtcaacgacgccgtgctgcgcttgctcgcgctgcgccaacggcagctcctggcagccctgcaaacgcgcggccacgcggcggtcgaggcgatccgcctggaaaccccggaggacaagcagtggcgcgaaggcaagctgccggaagcgctgcgcaaggcgcgcgcgcatccggagtggtcgtcgctgaacggcaggcgggtgggcggcagcgaccgccaggaacagatcgacgcgctggccgaattgctggagagcgggcgcggggaatga

SEQ ID NO: 361304 - DNA, 798 bp, Pseudomonas aeruginosa
atgcccttcgtttcctacgcgcagaacctggaagacgtccgactctggcgggccctgaaactcttccccagggggttctacatcgacgtcggcgccaaccacccgcggatcgactcggtcaccctggcgttctacgagcgcggctggcgcggcatcaacatcgaaccgctgccccacctgcaccgcgagctggagcgggaacggccggaagacctcaacctgaacctcgccattggcgagcgcgaaggccgcgccacgctctacgagatggccgcctcgggtctctccaccctggaccccgagctagcccgccagcgccaggccgagggctgcacggccaccccgcgcgaagtgaaggtcagcaccctggacgcgatctgcgcggcccatgtcgaagggccgatccacttcctcaagatcgacgtcgaagggctggaaggcgcggtgctccgcggcctcgacctgaaccgctggcgcccgtggctgatcctcgcggaaactccattcgaccacgaccccgagtggaaagcgccgctgctcgccgcgggctaccgtttcgtccacttcgacggcctcaacggctattacctggctgaggaacaggcccgcctggaaggcgccttcgcgctaccgccgaacctgctggacgacttccagctctgccatggccatgccatgagccatccggtcgctccgctggagcaggccctggaacaggcgctgcaacgcgcagaagatgcggagcgggctttgcgggactggcgcgcgcttccctggtaccgtcgcctgttcggttga

SEQ ID NO: 361305 - DNA, 795 bp, Pseudomonas aeruginosa
atgaaacagtacctcgacctgatgcgccacgtgcgcgagcacggcaccttcaagagcgaccgcaccggcaccggcacctatagcgtgttcggccaccagatgcgcttcgacctggccgcgggcttccccctggtgaccaccaagaagtgccacctcaagtcgatcgtccacgagctgctgtggttcctcaagggctccaccaatatcgcctacctcaaggagcacggcgtctcgatctgggacgaatgggccgacgagaacggcgacctcggcccggtgtatggctaccagtggcgctcctggccggcgccggacggccgccacatcgaccagatcgccaacctgatggcgatgctgaagaagaatccggactcgcgccggctgatcgtctccgcctggaacccggcgctgatcgacgagatggccctgccgccctgccacgcgctgttccagttctacgtcgccgacggcaagctcagctgccagctctaccaacgttcggcggacatcttcctcggcgtacccttcaatatcgccagctatgccctgctgaccctgatggtggcgcaggtcgccggcctgcagccgggcgagttcatctggaccggcggcgattgccacctgtacgccaaccacctggagcaggccgacctgcagctgacccgcgagccgctgccgttgccgagcatgaagctgaatcccgaggtgaaggatctgttcgactttcgcttcgaggacttcgaactggtcggctacgaggcccatccgcacatcaaggcaccggtcgcggtctga

SEQ ID NO: 361306 - DNA, 801 bp, Pseudomonas aeruginosa; identical to SEQ ID NO: 320751

SEQ ID NO: 361307 - DNA, 804 bp, Pseudomonas aeruginosa
atggagtttctcctctatatcgtgctgggcgcctgtgccggcgtgctggccggactgttcggcgtcggcggcggcctgatcatcgtcccggcgctggtcttcagcttcaccgcgcacggtttcggcggcgacgtcctgacccagatggcggtcggcacctccctggcgaccatcgtcttcacttcgatcaattccattctcgaacaccatcggcgcggcgcggtgcgctggccggtgttcgcctggatgaccctcggcatcctcatcggcagtgccctcggcgcgctgaccgcggcgcagatcaaggggccgctgttgcagaagataatcggggtgttcgccatcctggtcgctttgcagatggttctcgacctcaagcccaagggtagccgcgaggtgcccggcaagggcggcctgaccctggccggcgcggtgatcggctgggcctcggcgatcttcggcatcggcggcggttcgctgaccgtgcctttcctcagttggcgcagcgtgccgatgcagcaggcggtggcgacttcctcggcctgcggccttcctatcgccatttccggcgctctgtcgttcatcgcggtcggctggcacaacccgcagttgccggagtggagcctgggctacgtctatctgccggcgttggtcggcatcgccaccaccagtatgctgttcgcccgcttcggcgcgcgcctggcgcatcgtttgtcgccgcgcgtactcaagcgactgttcgccctgctgctgttcagcgtgggcataagtttcctgacccccgatctcgcttttctgtcgtag

SEQ ID NO: 361308 - DNA, 756 bp, Pseudomonas aeruginosa
atgtgcctgatcgtcttcgcctggcaaccggggcacgccctgccgctgctggtcgccgccaaccgtgacgaattctatgcccgcccgagcctgccgctggcggcctgggaggacgccgagggggtattcgccggacgcgacctggaggccggcggcacctggctggggctcggcccggccggccgtttcgccgccctgaccaacgtccgcgatccgtcgcaggctctcggcaagcgctcccgtggcgaactggtggcggacttcctgcgcggcggcggcaacccggccgactacctggcgcaggtcgccgggcgcgccgcggactattccggcttcaacctgctcattggcgatcgccatcagctctggcactacaacccccgcgtagggccaccgcgcctgctgccggcggggatctacgggctgtccaacgcggccctcgatacgccctggccgaagctgctcaaggctcgcgccgccctcgccgagcggcttgccgagccgcatccgcaggccctgctggagctgctggccgacgcagcgccggccgccgacggccagttgccggataccggcgtgggtctggccacggaacgcctgctctccagcgtgttcatcgccagcccgagctacggcactcgcgccagcagcgtcgtacgggtacacgccgacggcacgcgggagatgatcgagcgcagcttcgggccgtccggcgcccggctcggcgaggtcagcctggtgctgccgccaggctga

SEQ ID NO: 361309 - DNA, 1038 bp, Pseudomonas aeruginosa
atggacgaacgggcgtcgaagccgccaggtcttcttccgctgtcacgcgaagaccttgagaaaaccctgcgatatgccctggagatcgtcagcgacgggatctgggactggaacatcgcgaccaaccaggtcagccgcagcgccggctggtacctgatgctcggctatccgccgcatagcctgccggagagcgtggagacctggaagagcatcatccatcccgaggactatccgcgggtgatggccagcttccaggcctacctcgacggcgaaagcccggaatactgcgaggaataccgctgccgcacctacagcggggattacctgtggatcagcgatcgcgggcgtttcgtcgagttcgacgagcgcggcgagccgcggcggatgatcggtgcgcaccacgatatccatcagcgcaagctggtcgagctggagttgcagcagcgcaacgaggaactgttcgactggaacctgcgtctcgaggaactggtggccgagcgcaccgaggcgctgcaccgggtcaaccaggcgctggcctcgaagatggccgaggcccagcgcctgagcgaaatcgatccgctcaccgagctgtacaaccgacgcaagttcgagcagtgcctgcaccatgaatggatgcgccggcagcgccatggacgcgccacggcactggtgatgatcgatgtcgatcacttcaagcggatcaacgacctgttcggccactccaccggtgatcgcgtgctggtcgccttcggccgcctggttgccagcgagctgcgcgaggtcgacgtgctggcgcgctggggtggcgaggagttcatcctgctgctcccggaaaccggcctggaggccgcggcggccttggccgaacgcctgcgccagcgggttcgctcgcagtccttcgagatgggcgagcggttgaccgccagctttggcgtcggcgtgctgaatgatggcgagaccctcgacctgctgctgtgccgggtggacgacgccctctatcgggccaagcagcgtcgcgattgcgtggcctgttgctga

SEQ ID NO: 361310 - DNA, 2280 bp, Pseudomonas aeruginosa
atgctcaacacgctgcgcaagatcgtccaggaagtgaactccgccaaggatctgaaggcggcgctgggcatcatcgtgcagcgggtcaaggaagccatgggtacccaggtctgctcggtgtacctgctcgacaccgagacccagcgtttcgtcctgatggccaccgaaggcctcaacaagcgttccatcggcaaggtcagcatggctcccagcgaaggcctggtcggcctggtcggcacccgtgaggagccgctcaacctggagaacgccgccgcccacccgcgctaccgctatttcgccgagaccggcgaggagcgctacgcgtcgttcctcggcgcgccgatcatccaccatcggcgggtgatgggggtgctggtggtgcagcagaaggagcgccgccagttcgacgaaggcgaggaagccttcctcgtcaccatgagcgcccagctcgccggggtcatcgcgcatgccgaggcgaccggttcgatccgcggcctgggcaagctcggcaagggcatccaggaagccaagttcgtcggcgtgcccggcgcccccggggtcggggtgggcaaggcggtggtggtgttgccgccggccgacctggaagtggtgccggacaagcaggtcgacgacatcgacgccgagatcgccctgttcaagcaggccctggagggcgttcgcgccgacatgcgcgcgctgtcgagcaagcttgccagccagctgcgcaaggaagaacgcgcgctgttcgacgtctacctgatgatgctcgacgatgcctccatcggcaacgaggtcaagcgcatcatccgtaccggccagtgggcccagggcgccctgcgccaggtggtgatggagcacgtgcagcgcttcgagctgatggacgacgcctatctccgcgagcgcgcctccgacgtcaaggacatcggtcgccgcctgctcgcctacctccaggaagaacgcaagcagaacctgacctacccggagcagaccatcatcgtcagcgaggagctgtcgccggcgatgctcggcgaggtgccggaagggcgcctggtcggcctggtctcggtgctcggctcgggcaactcgcacgtggcgatcctcgcccgtgccatgggcatccccacggtgatgggggcggtcgacctgccgtactccaaggtcgacggtatcgacctgatcgtcgatggctaccacggcgaggtctacaccaacccctccgccgagctggtgcgccagtacagcgacgtggtcgccgaggagcgcgagctgagcaagggcctggcggccctgcgcgagctgccctgcgagaccctcgacggccaccgcatgccgctctgggtcaacaccggcctgctcgccgatgtcgcccgcgcccaggagcgtggcgccgagggcgtgggcctgtaccgcaccgaagtgccgttcatgatcaacgaccgcttccccagcgagaaggaacagttggcgatctaccgcgagcagctcagtgccttccacccgctgccggtgaccatgcgcaccctggatatcggcggcgacaaggcgctgtcctacttcccgatcaaggaagacaacccgttcctcggctggcgcggcatccgcgtcaccctcgaccacccggagatcttcctggtccagacccgcgccatgctcaaggccagcgaaggactggacaacctgcgcatcctgctgccgatgatctccggcacccacgagctggaagaggccctgcacctgatccaccgcgcctggggcgaggtgcgcgacgagggcgtggacatcgccatgccgcccatcggcatgatggtcgagattcccgccgccgtgtaccagacccgcgagctggcccgccaggtcgacttcctttcggtcggttcgaacgacctgacccagtacctgctggcggtcgaccgcaacaatccgcgggtcgccgacctctacgactacctgcatccggctgtgctgcatgcgttgaagaaggtggtcgacgatgcccacctggaaggcaagccggtgagcatctgcggcgagatggccggcgatcccgcggctgccgtgctgctgatggcgatgggcttcgacagcctgtcgatgaacgccaccaacctgcccaaggtgaagtggctgctgcgccagatcaccctggacaaggcccgggacctgctcggccagttgctcaccttcgacaacccgcaggtcatccacagctcgctgcacctggcgttgcgcaacctcggcctgggtcgcgtgatcaacccggcggctaccgtccagccctga

SEQ ID NO: 361311 - DNA, 480 bp, Pseudomonas aeruginosa
gtgatcgattccgatggttttcgcccgaatgtcggcatcattctcgccaacgaggcggggcaggtgctgtgggcgcggcgtatcaatcaggaagcctggcagttcccgcagggaggcatcaatgatcgcgaaacgccggaagaggcgctgtatcgcgaattgaacgaagaagtcgggctggaggccggggacgtgcgcatcctggcctgtacccgcggctggctgcgctaccgtttgccgcagcgcctggtgcggacccacagccagccgctgtgcatcggccagaagcagaaatggttcctgctgcggctgatgtccgacgaggcgcgcgtgcgcatggatatcaccagcaagcccgagttcgacggctggcgctgggtgagttactggtaccccctgggacaggtggtgaccttcaagcgcgaggtctaccgccgcgccctgaaggaactggccccgcgccttctggcgcgggactga

SEQ ID NO: 361312 - DNA, 804 bp, Pseudomonas aeruginosa
gtggttggcggtgatccgctcgctggccgccaggttgaccgtggcgaagcccagcgccaggcgctggtaactgtcgatggcgctgggctggctgaagggaccgtagccgaactccaggcgttcgctgcggatgtccagcgtgccctggccactgccggcgccgccggtgatgaccccggcggccggcgtctgcgcgccgttccagatcaggttggaggtgcggatcgaggcgacgctgtcgctgtcgccgtagccatagatcgccggggtgcccagcaccaggcgcgacaagcgggagcgaccgctgctcggatcgtaggaatcgaggctgacgtcgccgtagaagttgaacgcgtcgcgggcgttcagcaccagcgtctccaggggcggcgcgccctccgacgcatcaccctgcagcaggcggtcgagcacttgctggtcgagcgccaacccggtcggcagcacaccgcgctcggccagttcggccagcagcgcctgctcgccgacattgaagccgcccgccgccagggtcaggttgcgggtgccgtaacgcacgctgccgtcgagcacgaagcgcttgtcggtggccgcgaccagactgccctcggaatacagccgggtttcgccggccacaccatcggcagcgggaacgccaagcaggatgtcgccgggaccactgtccggcgttccggcttccggtggcaagacgttcagcacgccgttcgacagggcgagcatggaacgccctcccgacgcatacaggaagccatcccgtgcatcgtaggcagcagccccccgccctag

SEQ ID NO: 361313 - DNA, 993 bp, Pseudomonas aeruginosa
atgtgtataagagacagcgccggcgctgggcgtgaccggcggcaactggatcgataccggttgcaggccgccgaggtcggcgggcggcatgggcgcgggttcggccggcggcgggttgctcgctcgcggcgagccctgcggcgtcgccagcggacggatctgggtggcttccagggcgctcggcgccaggcggtcgagggcggcgatcagcgcgccggcggttgggaagcgctcggccgggtccttggccagcaactggcgcaggatgtcctggtagcggccctgttcgatcggcagttccggcagcggctcggtgaggtgggccagggcggtggagagcgaatccttgccgttgtagggcagcttgccggtgaggatctcgtagagcaccacgcccagcgcgtagaggtcggcgcggccgtcgatctcctgcccgcgggcctgctccgggctcatgtagctgggggtgccgacggcgaagccgacctgggtgaactgggtattgtcctcgatcgacttggcgatgccgaagtccgagagcaccgcggtgccgtcggcgcggaacaggatattggccggcttcacgtctcgatgcaccaggccctgggagtgcgcgtagccgagcgcggcggccacctgccgtacgtagaccaggcccagctcgggatcgaggccctgctggatgcgctccttgagcgtgccgttgggcaggtattccatggccatgtagtagcaactgccgacgttgccgatgtcgtggatggtcaccgtgttcgggtgcgacagccgcgccagggtccgaccttcgcgcaggaagcgttcggcgaagctcgggtcggcggccagcgccgcggccatcaccttcagcgccaccttgcgctgcagcgagcgctgggtggccaggtagaccgtggccatggcgccttcgcccagctcgcgttcgatgtcgaatcccggaagttctatgtccatgtccgtctcagaaggccctga

SEQ ID NO: 361314 - DNA, 777 bp, Pseudomonas aeruginosa; identical to SEQ ID NO: 329971

SEQ ID NO: 361315 - DNA, 465 bp, Pseudomonas aeruginosa
atggaccagctcggcctggcgctggtcgccgaagtcgacgagaccttccgcgccaccctgcgcgcggtgcgccgcaacgagttcgaactgggcgggctgatcgacgcctcggtgcgcatcttcctcgacgcggtcggcgccaaccgctcgcagttcctcttcctcgcccgcgagcaatacggcggctcgttgccgatccgccaggccatcgccagcctgcgccagcgcatcaccgacgatctggccgccgacctggcgctgctgaacaagatgccgcacctcgacggcgcggccctcgacgtgttcgccgacctggtggtgaagaccgtcttcgccacccttccggagctgatcgacccacccgccgccgatctgccgccgcacctgatgccggccgcgaagatcacccaccagctgcgtttcatcatgatcggcggcaagcactggcacggcctgcccggctga

SEQ ID NO: 361316 - DNA, 771 bp, Pseudomonas aeruginosa
atgcaaagatatggctggattccgaaaacacgttcaccggcaagaaacttaattaattgccttaatttttttgatgtttccagcgttgattcttggagagaatcttatagaagcacaccggagctcgcaaaatttagaacctctcaagcatttagccctcaattaggggctgttgctgcatggataaaacaatgcgagacagaagcagatttcttggattgcgccccttggaacaaagagaaatttgctgaatctctccatgagataaaaaaactaacacttgaaccagatccaagtatttttctaccagagttgcagcgcatttgtgcaaaaaatggcgtcgctgttgttattgcacgaacacctagtggctgccaagcaagcggagccacaaaatttatatcaaactcaaaagcacttctaatgcttagttttagatatttatccgacgatcacttctggttcaccttctaccatgaggccgcacatctaatccttcatgataaggatagtgtattcgtagaaggagggaataataatgaagatatccgcgaaacagaggccaataccttctctcaaaattttcttatacctccaaatgtttcacctgagttacccgcattaaaggataacatgaggggtgtacttaagctttctaagaggcttggcatatccccgggaatcatcgttgggcaacttcaacaccgaggtataatcaaacagaatcacatgcaaaagctaaaggttagataccgctggacagaagaatag

SEQ ID NO: 361317 - DNA, 936 bp, Pseudomonas aeruginosa
atgcggaagagagatatagaaaccgctcgtaatttggacgttcaattattagcatattcaaaagaagtgaggggattgcctggggttgagtttcctgagaacagagaaactctcattgctcagctaatagatagtattagaaggatcaaatacgttgaagtgattcggcaaagaaggctgagccccctaagaggagaagctggaagtgatatgtttgatccgattaaagcggcggtaattcatactaaaaatggaaatatagacgaagctagttggttgatattcctggcaactcatttcggtaagagtggtaaggatggatggtcacttgcgcaagtcttttatagtgctctcgggcaaggtttcacctgggactggaaaagagcaacctataatcctgatagaatggttgagtggcttgagcggaattaccaggaaatttcggatagaaaatatcgttttggaaaccatagaaaatacgaatcgatgaatccagcgcggaggagttttactggtattgttttaaggagttatgttcattgggttcttgcgagcggctctcacatagatttgttcggcaaggcacttgaacgtcacaatcaagacccgagacaggcatttcgtgatctatataaatcgatgagtgctgtttgtcgtttcggcagaacaggtcgatttgactatcttacgatgatcgggaaagtcggcgttgccaatatccaggccgactccacatacatgggtaatgctacaggcccttatgatggggctaagctgctttttttagggcgcactaatggtgaagcgtctaggagaacacttgatcaatggatagtgagcctagacacttatcttgatgtcggtatgcaagtcctagaggacgctctctgcaattggcagaagtcccccgggaaatatattcaatttcgcggctag

SEQ ID NO: 361318 - DNA, 798 bp, Pseudomonas aeruginosa
atgcgtaaaataataatagagttaatagacttactaagagatcagagattactagcctctgacgttgtaccttgggcggctccgataccatcgtttggtgatccatcgctagcggcagtagcgaccttaggcttaaatccaagtaataaagagtttgttgataatcaaaatcaggagatccaaggtggtgagcggcggtttcatacactgaattcgcttggtctagaaaagtgggagcagatttcagaaggacatattaagcttatcgaggagtcttgtagggagtacttttctagaaatccatataacacttggtttaagtctcttgatttattaattagtggaacttcgacatcttattacaataagctttttcatgcagttcacttggatttgattccttttgcaacgcatacaaagtgggctgctttaactagtactcaaaagagagctcttcttgatgcctccatcaatacgctggggcagataatgaagggtactccgataagggttctagttcttaatggaaagaccgttgtggaaagatttgaaggtatgattggtcgcaagctaaacatgcagaatgtttcagattgggacctaaagaggaataacattgcgagtgtaaaaggcttttcgtatcagggggttataaatagaatatccgatgttagtttggataatccgattttggttctcggatttaatcataacattcaaagcagctatggggtgacgtcgaaggttagggcgtcaattagagactggatagccaagcaaactgctgaggtgctctga

SEQ ID NO: 361319 - DNA, 222 bp, Pseudomonas aeruginosa
atgaaaaacaaagtcaatcgagccaagcatttctggcaagctttggagattactttcacgcgtaaaggttacaacctcgacatccccccgctcggccagatgcgcggtgagattctttcctacgaaaccatttgcgccggttatcaagaccctcatgatctactcctcggggtttgcctgctcaccccgttgtatcgcacgaacaaagtcaagcttcaataa

SEQ ID NO: 361320 - DNA, 681 bp, Pseudomonas aeruginosa
atgtgtataagagacagggcgacgagcgccctgcctgacctgcagcatgagcgacgccgcttgccgggccagggaggcggtgagcgaaccgcggtcatcggcgttgctcatgacaatggcggcgaggcgctgttccggcagcagaaccaggtgggcgctgaatcctggggtggcgctggcgtactcatagtgacggatgcccccttccagcagcgcggagccgcacgggctgaggaaccaggccaggcccacctggcagtcgaagtccagggcattgccggcgttctgctggcggaacatctcctcgacggagtgtttccggagaagctggcgctccttgtggcgcccgttggcgaacagcatgcggacgaagcggctgaggtcgaccgggctgctccacagatcgttgaccgggaggtcgctggcggagccggggcgaccgccgccgctgtagccgtgggcgcgttgcgcctggggcagggcgttcctggcgaagctggagcgggtcatctgcaaaggctccagcaggtgctcgcgcatgtgctgctcgaagtgctttccggtgttgcgctcgatggccgcgccgaccagttcgtagccaaggttggaataggcgacctgggttcccggcggattgctcagccagacaccggatactttcgccggcagttggccgagtga

SEQ ID NO: 361321 - DNA, 1437 bp, Pseudomonas aeruginosa
atgtcgttgggaaacctcgtcgctgtcgtcttcggcctggccttcggcggagcgctgctgatgctcagcccggccaaggccggcgccgccatggtcggcctggcggccgcggtcaccatcctgcgctttccattctggggactgctgctgttcgccctggtggcgaccttcatgccctactccacggtcaacgtggggatccgttcgacggtcagcgaagcgattctcgccctgacctggggcgcggtgctctggcacatcttcctctcgcgcctgccgccggcgccggcgctgcgctaccgctccaccgagcgcatgctgctgtggctgatgctgttcaccgtgctgccgttcgtggtcggccaggtcagcatcaaggccgaggccagcggcctgtcgaactggctgcgctggttgctcaacctgtccatcgtgttcctcgccggacgcctgctggtggagcgcaagaaccgcgagacactggtcatcgccctgctgctgggcaccctggcgatgctgctgatgtccatcgcggtgttcatccgctaccgctcggcgtcggggatggcgccgatcctggcgatgttcaactacgccaacctggacaccctcaagttcggcctggaggcgctttcctcgcgaatgggctcgccatggatgcaccccaacgccaccggtgggatcatggccctgctgctgcccctggcgttctgctacggggtcgccaaccagggctggcggcgcggcctgggcctcgccgtggcggtcctcggcgccgccgcgatcctcctcgccagttcccgcggggcgatgctcagcctggcggtggtgctgttctggatgtccctgcgcaaggtgccctacaccggccgcctgctgttgctcggggtcggcctggtggtggtcctggtgctcagctacccgccgttgcaggaacgcctggcgaccatcttctcgccgcagaacgccagtaccgaggtgcgcttcgacgaataccggatgttccccaaggccgtcgcccgctatccgctgggaatcggcttcaaggtcgacccgccggtgccgggcaccgacctcctgggcatctccaacctgtggctgaacttcatgtacaaggtcggcctcggcggcatgctgctgttcatcgcggtgacctggcgctggtggcgcgaagcccgtccggagaaaggcccgatccgcctgacccgcgacaacgcgatctggctgggcagcacaggcggcatcctggcggcgctggtcagcggcctgttcgaccactacttcagcttcgccgtggtgatgatcggcctgttctggctgctggtcgggatcaacctgctggaagcccgccggctgttcccggaacgccagccgcaaccgcgggcggtgggttatcgcaagctcaagcgacagctcgagcgcggggccgaggcctga

SEQ ID NO: 361322 - DNA, 591 bp, Pseudomonas aeruginosa
atggctgtcgccgcgcacctcgacatcggccagcggcaggtcctggccgtccgaaggactcgacaggagaatctccagttcgatttccggacaggcctcggcgaaggacgccaggcgcggaatcaggatctgccgggcgaaggtcggcggcgtgcgcagggtcagccgctgctggcgctggacctggcgacgatgcagcggaaccgccgcgagctgggcgaggatcggcgcgatctgttcaaggtactcgcggccgtgggaggtcagcgccagcgagcggccgtcgcgctgcaacaggctcaccccgagcatcccctcgagaccggaaacccgcttgctggcggcgctgccggtgatcgacaggagttcggcggcgcgctcgaaggtacccagccgggcagccgcttcgaacgcctgcaacgcttcgatggaaggaaaacggaaatcgtcgggattgagcatggggcagactttacccgctgcccgagatcagggataccgcgtcagagccgctgctcgttggccgcggcgcggcgctcgggcgccgcggaaccggcggcaccgccccaggaagccttgccggggctgtag

SEQ ID NO: 361323 - DNA, 714 bp, Pseudomonas aeruginosa
atgagccaaccgcaaccgcgcatcgaggtggccgccatcgacagcttcgtcctgcgcctgttcgagcgcatcgacgaagccaacatgccctggctgctggcggcggaggaaaacctgcgggcggcgttcggcgccgccctgctcgacctggtgccgtcctacaccaccctgctcctgcaatacgacctgctccagctcgaccccggcgaagcccgcgcgcggatcgccgcggcgctgtccgacttgcgcccgaaacgccaggacggcggccgcctgcacgtcctgccgacctggtacgacccgcgggtcggccccgacctggaacccctggcgcggcgcaagcagctcggcgtcgccgagctgatccgccgccacagccagcacgagtaccgggtcttcgccctcggtttcagccccggcttcgccttcatggggctggtcgaggaagccctggcggcgccacgcctggcgactccccggcaacgcatcgccgccggcagcgtcggcatcgccgagcgccagacggcggtctatccgcaggcctcgccaggcggctggaacctgctcgggcgctgcccggtgcgcctgttcgacctcaccctggacggctacagcctgctgcgcgccggcgaccgggtgcgtttcgaacccatcggacacgccgaattcgtccgcctcggcggcgacgacacgcccctggaggtccaggcatga

SEQ ID NO: 361324 - DNA, 780 bp, Pseudomonas aeruginosa
atgtgtataagagacagccatgccccgctgccagttcggccatgcgctcttcgccaatgccgaagccgtctccagcttgccggccagttcggccacctgttcctgggtgcgcgcctggcacttggcgaccctggccagttcctcgcgggcctgctccggctccagctcggccacgcgggaccagaattcggacttgattcgcagttgccgggactgggtctccagctccaccagcgacaggcgccagccggggatcgcctggtcgagcaggctttcccaccagccatagaccggcagcaggacccaatcgatcatcgactgcggcacggcgaggttgacccggtcgcccagttcggcgcaccagccgtcgtcgtcctgcgccgcgcagaggagaatctgccgcacctcttcgcgccccagtgccaggccgcgcgccaggcgctgctgcaaccattcgcagcggaacagttgctccagccgcaggcgcggcagcatccgctgcagcaacgccagttgccgcgcactgatgattccggactcacgatacaaactgctcgatgcgtaacccggcacccgaccccgcgagcgggcgtccgagcccaccacggatacccgcctgccggcgaacaccgcttctcgggagtactgcttatcgtcttcctgctccattctctgccttggcttcctcactacattgcgcgctcgtcagagcctgcaatttgggccgattctactcatgcagccgctaccgggctttcaaaaaacgtcagttatttttag

SEQ ID NO: 361325 - DNA, 657 bp, Pseudomonas aeruginosa; identical to SEQ ID NO: 320995

SEQ ID NO: 361326 - DNA, 2100 bp, Pseudomonas aeruginosa
atgcggcggctacgaccccgaggccttcgccaagaaccgcgccatcgaggaccgccgcaacgaggaccgcttccacttcatcgactggaccaagcaggccttccgcaacgtcgacgtgatcccgccgggcaacggcatcatgcaccagatcaacctggagaaaatgtcgccggtgatccaggcgcgcgacggcgtggccttccccgatacctgcgtgggcaccgacagccataccccgcacgtcgacgccctgggcgtgatcgccatcggcgtcggcggcctggaagcggaaaacgtgatgctcggccgcgcctcctggatgcgcctgccggacatcgtcggcgtcgagctgagcggccgtcgccagccgggcatcaccgccaccgacgtggtgctggccctgaccgagttcctgcgcaagcagaaggtggtcggcgcctacctggagttctacggcgaaggcgcctccagcctgaccctcggcgaccgcgcgaccatctccaacatggctccggaatacggcgccactgcggcgatgttcgccatcgaccagcagaccatcgactacctgcgcctcaccggccgcgacgacgagcaggtcgccctggtggaggcctatgcgcgcaccgccggactctgggccgacagcctggtcgacgccgagtacgagcgggtactgaagttcgacctgtccagcgtggtgcgcaacatggccggcccgtccaatccgcacgccagggtcgccaccagcgaactggcggcgaaaggcatcgccggcaacctcgagcgggcccgcgccgaggaagccgagggcctgatgccggacggcgcggtgatcatcgccgcgatcaccagttgcaccaacaccagcaacccgcgcaacgtgatcgccgccggcctgctggcgcgcaacgccgaccgcctcggcctggtccgcaagccatgggtgaagacctcgctggcacccggctccaaggtggtcaccgaatacctgcgcgaagccggcctgctgccgcacctggaagccctcggcttcggcgtggtggcctacgcctgcacgtcctgcaacggcatgtccggcgccctcgacccggcgatccagcaggagatcgtcgagcgcgacctgtacgccaccgcggtgctctccggcaaccgcaacttcgacgggcgcatccacccctacgccaagcaggccttcctcgcctcgccgccgctggtggtggcctacgccatcgccgggaccatccgcttcgacatcgagcgcgacgtgctcggcgtggtggacggcaaggagatccgcctgaaggacctctggccgagcgacgaggagatcgacgcagtggtcagggcggcggtgaagcccgagcagttccgccaggtctacatcccgatgttcgacatcacccacggcgagcgcgagaaggtcgacccgctctacgcctggcgcccgacgagcacctacatccgccgcccgccgtactgggaaggcgccctcgccggcgaacgcaccctgcgcggcatgcgcccgctggcggtgctgccggacaacatcaccaccgaccacctgtcgccgtccaacgcgatcctcgccgacagcgcggcgggcgagtacctggcgaaaatgggcctgcccgaggaggacttcaactcctacgccacccaccgcggcgaccacctcaccgcgcaacgcgcgaccttcgccaacccgaagctgttcaacgagatggtgcgcaacgccgacggcagcgtgaagcagggttcgctggcgcgggtcgagccggaaggcaaggtgatgcgcatgtgggaagccatcgagacctacatggagcgcaagcagccgctgatcatcgtcgccggcgccgactacgggcagggttcttcgcgcgactgggcggccaagggcgtgcgcctggccggggtggaggcgatcgtcgccgagggcttcgagcgcatccaccgcaccaacctgatcggcatgggcgtgctgccgctggagttcaagccgggcaccacccgcctgaccctggggatcgacggcagcgagaccttcgacgtgctcggcctgtctcttatacacatctccgagcccacgagacgtag

SEQ ID NO: 361327 - DNA, 1449 bp, Pseudomonas aeruginosa
atgccgcttgccagtcatctgcgttgcgtggcgctggcgctggggatctccaccgcgctgggctgcgcgaaccgcaaccaacccgcgccacgcgcggaaagcctcgaccctggcctgtcgagggtggcgggaacccgcggcgacgcgctgcccgcccagtggtggacgctctaccaggaccctgggctgaaccacctggtggccgccgcgctgcgccacaaccgcgacctggccgcagccgatgcccatgcccgcgcgctcctcggccatctgcgcggcgcacagggcgaacgctggccacggaccgaggtcggctatggctaccagtatgggcgcgacggcgacgaccagaccctcgccgaagccaccgacgaggagctgcgcagccagtggaaacacaccgcccgcctcgacctgtcctaccagttggacctgtggggcgaagtccgcgcccgcatcgccgcggcgaaggcggatgccgaagcggcgcaagcggcgcgcgacctgctcagggtcagcgtggccagccagaccaccctcgcctacgtccgcgcctgcgccctggcgcgacgggcagaggtacaacgccgatcggtcggcctgctcgacgcgagcctggcgctgagcgaacgccagctcgccgccggcctttccagcgagctgcagcgacgccggctgctggccttgcgcgagcggacccgcgccgcgctgccgatgctcgaggcgcggcggcgcgcggcactctacgaactggcgctgctcagcgggcgctcgccgcgccagttggacgctcctgccgcgacctgcgccggcataccgcaactgcgccgtgccctgcccaccggcgacggctggagcctgctggcgcgccgcccggacgtccgcgcggccgagcgccggctcgccgccgccgacgcccggcgcgcgctggccgaagccgagctgtacccgcgcatcagcttcgccgtcggcgccgaaacctccgcagtgaccctcgccggcctcggcggcagcggcgcgctggcctacgcggccggcccgctgctgagctggcgcttccccaaccgggaaagcgcgcgaggccgcctggacagcgcagcggcagagcgcgacgccgccctggcgcgcttcgacggagcggtgctcggcgccctgcgcgaggtcgagcgtgccctggcgctgtatgccggcgagcgccagcggcgtgccgacctccagcgtgccctcgacgagcagcgccacgcctaccggttggcgcgcagcaactatcgcgccggcgccctcgatgccctcgagctgctcgacagccaacgcagcctggtcgccgaccgggcgcgcctggtcgacgccgagatgcgcgtcgccgagcgccaggtcgaactgttccgggctctcggcggcggctggcaagccgctcccagcccctcccaccaggaaaacggacaatga

SEQ ID NO: 361328 - DNA, 378 bp, Pseudomonas aeruginosa
atgcacaggatcctggctatcgcgctctgcatgctatggagcgtcgccgggctggccgaggatgcggcgatgccggcgcagagctgtgcaagccttgacgaggcgacggccggccccgaggtcaacttccgtccgcccctggagggcgaggtgatcgacaaggggcgcgcctatttccacagcgcgccgcgtgccgactgtgtcaccggggtcttcgtgactcccggcgacttcatcactgtctacaagccgagcggcgagtggctgaacgtcatgtacgtggctcgagacggcaaggaaaccagcggctggctgctggagaagcgcgtccgcttgcgccaggcctatggcgccccggacgagccggcgcagccataa

SEQ ID NO: 361329 - DNA, 603 bp, Pseudomonas aeruginosa; identical to SEQ ID NO: 319843

SEQ ID NO: 361330 - DNA, 540 bp, Pseudomonas aeruginosa; identical to SEQ ID NO: 334809

SEQ ID NO: 361331 - DNA, 945 bp, Pseudomonas aeruginosa
atggcccgacaggtccaggtcgccttgcaccaccagatcgccatcggccgtggcgctgacgatctccagcccggggcgcaggtggaaagcttccgcgtaggcggcattgttcaaaccggccagcttgccgtcgagcagggcgctattggccaacgccgcctgcatgaacagttcgctctgctggtgcttgccatccaggtaggcctgggtgatctcctggtacggccggccgttgctcgccggcagcgcggcgaccggcgcgtcgtcgtagcgctgcacggcgctgagggtgatggcgcgggcaccgaggatctgcagcggccccccggcgtcgatggcgatatcgcccgccgtcgccccgcccagacgcggcgcgtacaggtcgagggtgccgcgggcgacgccgtcgttctgcccgggcgcgcttcccgctgccgcctcggtgccgtggcgcaggtcgatacgggcaccggcgccgaggctgagcagcccgtctccggcgttcagctcgatcagcgcgcggttcggcgaatcgatgatcttgccgtagctgtccacccgcagccgccgcccatgggcatcgagcagcgcctcgccaccgatgctcaggccctgcttggcggccaggcggatactgccgacctgctcgccgctggcgtcaagcacgccgttcacgctcagatggccaccatccagcgacacctcgatcgtcgaggccctgacgtcgttgccgatgttcaggtcgccctgcttgatctggaaactgcgcgcaccgaacacctgaccggcattcaggcgctggttgagagcggcgaaccggctgtctggcgtaccgtcctcgcccagccgctgggcacggatctcgacgctgcccgcggcgtatggcaccagggtgccgccagcgtcgtattcgccgctgctcgccgccaggatctgcccttgtag

SEQ ID NO: 361332 - DNA, 621 bp, Pseudomonas aeruginosa
atgggttgggaggcggcgaccaacgtccgggtcatccctgaactcccgccaggtgatctggccgatttcgcgtatggctcggttgctgtggccggtggactggctcagcaactgcatgtagtcggtgtccaactccaaggcttcggctggagagacaggctcgtcgtgaaggatgtagacgttgccctgtacttgtccgttgaggtcgttgcgcaggcgtcggccgaggctgagccagcgggtcagacgaaggaccgtgagtgccttggcgatggtttcgcgcgaggcgatcttgcccggctgcatgccgagataggggcgcagttgctcgtatgtcgggaacgcggtcagtccgtcgtcgttgatgagcaagcggaaaacttgccagcagttccgctccagcggagtgagacgcttatccaggaggaggcgccgtggaacggtttcatgaggattgccgctgaaaatgatgccggaatattgttgagccagcggttcgccgctttcggcagcaagccgcttcttatacaaatgggcctcgagatgccccgaggccgagtccagcagtgtcgagatgggaaagcgcgacagcctcatggtgctgtgtcgccttccgactga

SEQ ID NO: 361333 - DNA, 180 bp, Pseudomonas aeruginosa
atgctggccgaggttgcgcgtgctgatgccggcgttgctgaggcgcgtgcgcagttgctgcagggcttggctctgctgcgcgtgctgctgcttgaggaaaccggcttcacggattgcccggttgtagtcgcgggtgagcgcacgggtggggttgccggcggcggccatctgctgggctag

SEQ ID NO: 361334 - DNA, 936 bp, Pseudomonas aeruginosa
atgcatcgggttaatccatggcatgaccggcccctggtagaccgccgcgtagagagtgcggtgatcaacgtcggcgggcaggcgctccttccgagccaacaggtacatctgcagccaggcccgatagaccggccggcaccagtagtcgatgaactcgtgctgcagcaggtcgtagcccagccagccctctaccagttcctggcgctgcgccgagtaggtgccgtcgtaggccctggataccgaggagtaggtgctgcgagtgccggccccgatcatccgcagttggccgttgcggaaaccttcaaggaaggggttcggccggttgctctcgatcatcccaacgtcttcgcctggctcgaggtcgtcgaagaccatgccgggggcgatggggatcgttcggttcttccggtccttgccgggctccaccgagtagctgtcggggttgcccttcttgatatacatcgccagggcagcactgatgcgcgccgccacccgctcgctctcctcgtagtccttcaagtcggcaaggcggataagcactgcgtgcaacatcggcacgcctcggttctggccgatccgcttgcggtaggcgatgtggatgatccgttccgcttcgacgcgcttcaccgccaggctgccgcccagcgtctgcaggttgccggggtgatccttgagaaggtgataggcccttttccggcgccaggtgtcacgctcgataccctggacaatacccttcgacaggttgttgtagctgaagggcaagtagtcgggctccagcagctccagggcgaaaggcaccgacgtggcgaacgtgtagttcgggactcgtcccatcagcttctgcgccaggccctcgccatcgcgcagccaggtgcggcacatcagccgctctacctggggcctcgtcagctcaccagaggtttccggcgagagtga

SEQ ID NO: 361335 - DNA, 912 bp, Pseudomonas aeruginosa
atggctccatcctctcaagagttggagcctccgggaaagccggggcggttcaacaccgactactcgaagagtccccgtcagtcgtggccctacaacgccacccgcgatgccggcctgcctcaggtgggcggtggtggcggctacccaacctgcaagcagtggtgggctgactcagggatcggcttgcgcgatcggatcaaggaccaggtggatccggacctgatgaccagcttcctcaagtgggcgaaatggctgaaccaggacgaggtaaccgaggcagtcattcgccaggtgatctcaccctccagccaggtcaagggcaacgtctacaccgattacggcgggcaggtgggcggaaccgtctggaatggactggctcgtgccggaggcaccctcggagtagcaatgggtagcctggcctacttcccggcgatggatatggtccgccaggcgctgccgatggtgatgtcgttcctgaagatggccatgatcatctgcattccgatggtcctggtcatcggcacctatcaactgaaggttgccatgacgatgacggttgtattctttgcaatgatattcgtcgacttctggtttcagttggccagatatatcgacagcacgatacttgatgccttctatggttcgggatcaccacatctttcattcaacccagtcatggggctgaatacggctactcaagatgcaattttgaacttcgtgatgggggcaatgttcgttatattgcccatgctgtggataactgctataggctgggcagggataagcgtaggctctgtcttaagtggacttcaagctggaacagacgctgttggcaaagcgggagcaagggcaggagaccttgctgagacaggtataaaaacagtatctagcggcatccagaaaggtaactaa

SEQ ID NO: 361336 - DNA, 1113 bp, Pseudomonas aeruginosa
atgaccaggcagttgaccactctcacgctgtgcctgctgctcgccagctgcacgacccacaaggctgagccggccaggccagccttcgacagcagccgcaatccagacctgctctccccggacctgtatccaaacggcgtgcagccggagaaagagcccgtcgtgcgctacgggcgctacaccctggtcagcacccagcctgatgccggtcaacgcgacctgatggcccagatcatcgacgtaaccatcccgtcgagcatgaacccgagcgtcaaggacgccatgcagtacgtgatgagccgctcgggttactcgctatgcccggcagacgccggtcatgtgaacatcctctacacccggccgctgccggcagctcagtacaagcttggcccgatgaccctgcgcaacaccctccaggtcctctccggcccagcctggcaggttaaggtcgacgaggtcgcgcggcaggtctgcttcgtgctgcgcccgggctatcaacttcccccggcgccgaggccgataccggtccagcaactgtatgcgaagcccgctgccccaactccgccggcggtagcgcaaccctcctccacggagaaagtcagcacgctggagtcgcccatcgtggtcgcctcggtgccgatcacaaccagccacgctccggccaagaagcctgaatccaccactgtgctccccccagccgcaccggccaaggatggccacccctcttctcctcccgcggcttcggcaccgaccaagcctgcggcctccgccgtgaagtccacgccgcccactccacccaccgtgccttccgccccaccggtcaaggtgctcacgccgacggaaccgagccggccgctggcacaggcctggtcagccgagacgggatcaaccctgcgcgacaccttggaagcttgggcaaagcgcgcacgctggaccgtccgctgggagccgcaggatctcaactatccgatcgaggctcctctgaccttccacggctccttcgaggacgcggtatccgagctgttccccctgtatgacgctgccgaacggcccttcctggtgaacgccagccgcccgcagtccctgatcatcatcaaggagcgcaagaactga

SEQ ID NO: 361337 - DNA, 957 bp, Pseudomonas aeruginosa
gtggcaaagaaaggcgttcgagactccggcaccttctccaccaaggccgaggcggtggcctgggcgactcagcgggaggccgagattctggcgggagttggaagccctaaaggggcatcgaacttcactctgaaggaggcgctggagaaatacaaggatgaagtctcacccactaaggccggcaaacgctgggaagagatccgactcgacaagctggtcaatgacttggaattcgtcggcgagcgcatctgtgatatcggcgccgatcagatcgcagcatggcgcgatcaccgattgaagtcggtggccacgtcgtctgtgcgtcgcgaaatgacgttgctgtcgagcgtgttcgagcaggcgcgccgggagtggagatggtgcccgaccaaccctgttcgcgaggtgcggcgcccgaagagccggccgccgcgggacaggcgcatttcggctgccgaggaaaccctgatccttgaggggcttgggtatcaggagggggtagcgccgaccggcaagatgcaggagcttgcctacgcttttctgatcgccctggagacggctatgcggcagggcgagatcctcggcctcgttgctgcccgggtccacttgagggcccgctacgtcgaacttgacaagacgaagaacggcgatgcccgtaaggtgccgctcagttcccgtgcggtaaccttgctccaagttctggtagatgctgctgggaagcgccagaacctgtttacgctgacgtccggctcggccgataccctctttcgaaaggtgcgggacagacagaaaatcgacgggctgaacttccacgacacccgtcacgaagccaccaccaggctcgccaggaagctcgatgtgctcgacctggccagaatgacgggacatcgtgacccgcggtcgctcatggtctactacaacgcgactgcaaccgaggtagcgagccggcttgattaa

SEQ ID NO: 361338 - DNA, 528 bp, Pseudomonas aeruginosa
atgccgtccctgaaacagggctacgacctggtgctgatcgacacccaaggtgcgcgctccgctttactcgaaatggtcgtgctcgcatcggatctggttgtttcccccctgcagcccaacatgctcactgcccgcgagttcaaccgcggcaccatgcaaatgctcgatggactgcgcccctacgagcgcctcggcatgcggatccccaaggttcagatcgtcatcaactgcctggaccagaccaatgactcccgggcgattcacgagaatgtgcgtgccatcttcgatgagcatcaggatatttctgtactcgaaacgactgtcccggatgccgtcgtgtttcgcaatgcagcatcgcgcgggctaccagcgcaccgcctcgaaacgcggcaaccctcgaatcgcacatcagcgcccgcgctggaaatcatccgtaacctggccatcgaggtctttcccgagtggactgaccgtttcctcgcgctgacgccggaggcggtagcagcactggtcaagggagggcgctga

SEQ ID NO: 361339 - DNA, 714 bp, Pseudomonas aeruginosa
atgaagggcgcaacgttgcacaggctgatcgatatctacgccgacagtcgccgtaacctgcgcgtccgtttggcggccctccggatgttcgtccgcgcggtgtgcgccgatcgcaacaccagcttcgccgagtatcgccaggtgtgtcggaggctcctcaagggcatgccgttcaccgagcaggcgcttgagcgcgagcgagcggcatatctggatcgcaccagagctgcgagacaagccatggaggagagcggtgcttggcttatcggaaactcagcaatgatcgagcaggccctgtcgtttgacgacctgtgcgatctcctgggggtgaatcatgcccaccgtgccgaggctgccgaggcctgcgcgggcgacgccggagtcgttggcggcctgctctggattggtggggagttcgaggacagcgcagaccacaagagcggccgctccaaccgagggaacacgggaccccttaccgcagcggtccagaacctgttccagaggttcctgcttgagaatccgtcggcaattcccgatccgttcgccccgggcggccctttctacggtgccccgcggcaggagatggcgccagatggaacggtgcagattcggcgaccggcactcaccgtccacagccaggacggatcaatccgcacagtcgagcgaaagcctgaagtctgcggcgcggtgcgcaatgaaaggagtaagacatga

SEQ ID NO: 361340 - DNA, 648 bp, Pseudomonas aeruginosa
atggatggagttgcggcgcatgcgttcggcccgggtgatgatctccaggttgtcgataacgacgttctgcttgttgttgtccttgaagcagacgcaatggccggttgggatggggccgaagtgttcttcccagagcaggatgtggatgcccttccagtcccgggggggatagccggtatccgagatctttcgttgcaggtagccatcagcgctgacccgcgtgctgccgactgggagccatgtgtggggcttttgccccttcttgaactgcgtttctggtgcgcgtcctcgcgcgggcagccccttcatgccgcagttccatggggtgtttcccttcttgaaccgagttgcgctgccccagtcctgccggatcttcttggagaactcggggctttttttcagcccgagccgatacgctttggagcagatctgctggagcgttttgttcaacctggctgccaggacctcgttcggcatatccggatacaggcgcagcagcaccagttcctgttcggcggtccaggtttcgcggatgcagcgctcctctcggttgctgaatttgcggcgggcacgcacaagggcctcgtaggcgatggtcgagagagcagagcgagtcatcgggaacctccctgctcgagcgccccctga

SEQ ID NO: 361341 - DNA, 363 bp, Pseudomonas aeruginosa
gtggctgccgatcaagaaccgagcgccgagaccatgacaatcgccgcaaatctcaagaaagcacggaagacaatgggactgacgcaggagcaggttgccgaaaaaacagggatacccctagcgacaatcaagaaatacgaagcaggaaaacagccgccaccaggtgaccgcataggagccctggcaagagcactcgccgtatcggcagacgacatagtgttagaggaaagcgagcgtcagctttccgaagagctgcgggcaatattcctgcgcttcgaccacttgccggacgacatgaagcggcaggtgaagctagcagtacgcggaatcctgatgagctacgagcaagagctactcggctag

SEQ ID NO: 361342 - DNA, 528 bp, Pseudomonas aeruginosa
atgcccgctctgaaagaaggctacgacctggtgctgatcgacacccagggtgcgcgctctgctctcctcgagatggtggtgctggcatcggacctggttgtttcccccctccaacccaacatgcttaccgcccgtgagttcaaccgcggcaccatgcaaatgctcgacggcctacgcccctatgagcgtcttggcatgcggatccccaaggttcagatcgtcatcaactgcctggaccagaccaatgactcccgggcaattcacgagaatgtgcgtgccatcttcgatgagcatcaggacatttctgtgctcgaaacgactgttccggatgcagtcgtttttcgcaacgcagcatcgcgcgggctaccagcgcaccgcctcgaaacgcggcaaccctccaatcgcacatcagcgcccgcgctggaaatcatccgcaacctggccatcgaggtctttcccgagtggactgaccgcttcctggcgctgacgccggaggcggttgcagcactggtcaagggagggcgctga

SEQ ID NO: 361343 - DNA, 270 bp, Pseudomonas aeruginosa
atgactactcacctgatcaccctagtcatcaagcagccgaacgacgctcaggcacgccaactcatgtaccaggggttgctcgacctgatctcacgctacggcggtgaggtggcgtccaaggccttagaggacgagtcgaccctctgcgagctgctggagcagatgctgcctgatcatgaggtagagctagccaggaaacaggtgctcgaacttcatgccaagggccgccgaccgggccgcctgcaggcgccggcaagcctgaaggtataa

SEQ ID NO: 361344 - DNA, 270 bp, Pseudomonas aeruginosa; identical to SEQ ID NO: 329849

SEQ ID NO: 361345 - DNA, 336 bp, Pseudomonas aeruginosa
atgtggcttgtcgaagccaccccctccttccccgcgctgcgttcgtcgccgggctatcagaagcttccgagcggcctgattctgcagttcggcagcgtcagcattccacctggtaccggtgaaagcaccggctgggcaacgttgcccatcgcattcccgaatggtcccttgactgtcgtgccgtcgctgcaatacggcgggaccagctcgagctggtacgggttcagcgtctggtcagggagcattacgcccactgcaatcgcctgctcactgaacagcggttcgacgccgcgcgaggtggccggcaccgtgaactacgttgcaatcggatactga

SEQ ID NO: 361346 - DNA, 336 bp, Pseudomonas aeruginosa
atgtggcttatcgaagccaccccggcattccccgcgctgcgctcgtcgccgggctatcagaagctgccgagcggcctgattctgcagttcggcagcgtcagcattccgcccggcaccggcgaaagcaccggatgggccacgctacccatcgcgttcccgaatggtccattgaccgtcgtgccgtcgctgcaatacggcgggaccagttcgagctggtacgggttcagcgtctggtcaggaagcattacgcccacggcgatcgcctgctcactgaacagcggttcgacgccgcgcgaggtggccggcgccgtgaactacgttgcaatcggatactga

SEQ ID NO: 361347 - DNA, 390 bp, Pseudomonas aeruginosa
gtgaagaacaccccaagcgccgcgaacgctgatgagtacgcccggatcatcaagcagcggtcggtggcgcgccgggtgatcgccgcggccgaggtgatgagccagcgtctgcaggatggcgaaccgctggacgaggtgctgagccagggccagcaggcatgggttgccctcgaggccgaggggctcgactcccggcgccggtaccgcttcatcggcgaggtgctgccggaggccatcgacggcatcgacaggcgctttaaccgtgaggtgaagctggggtacgacaccggcctaccctcgttggacgccttcatcccgggtatctgtcccggccacatggtggttgtggccgggacagatacccgggatgaaggcgtccaacgagggtag

SEQ ID NO: 361348 - DNA, 237 bp, Pseudomonas aeruginosa; identical to SEQ ID NO: 360869

SEQ ID NO: 361349 - DNA, 270 bp, Pseudomonas aeruginosa
gtgatcggaccacgctaccgcgatcaggaagcgctggaccaggtgctagccagcctgccggcccaggacatgcaaaaccaggccgatagcctggtcgcaccgctcctggatgtgatcagccgcggaggtagcgaggccgagctgctcggcgcgctggccgaggcattcccggatatggacgacagcgccctggcggatgccctccaccggctgctgttcgtagccgacacctggggccggctcaatggcacgctggatcggatcgactga

SEQ ID NO: 361350 - DNA, 207 bp, Pseudomonas aeruginosa
atgcaaaagatgaaacaactgatggttcgtggtggcgttgttctcggctcgctgggtctgctggctggccaggcgatggctgaagttccggctgaagctacttcggcgttgaccgaggccaaggccgatggtgttgccattggcggcgtcgtcctgggcgtgatcatcgcgattgcggcgtttaagtacatccgccgcgcactctaa

SEQ ID NO: 361351 - DNA, 207 bp, Pseudomonas aeruginosa
atgcaaaagatgaaacaactgatggttcgtggcggtgtcgttctcggctcgctgggtctgctggctggccaggcgatggctgaagttccggcagatgctactgcggcgctggccgatgccaaggctgatggtattgctatcggtggtgtcgtcctgggcgtgatcatcgcgattgcggcgttcaagtacattcgccgcgcactctaa

SEQ ID NO: 361352 - DNA, 351 bp, Pseudomonas aeruginosa
atgaacggcagcaacgactatcgcagcaccatgcaacaggccgccgcagcctacttgcggagcaacgcgaaccagtacctgtcctccggctccgaccggctgttcggcgcctgcgtcaatcatctggtcaagggcctcgaggttccccagttcatggccgagcgactcgcccagcgcgcctgggaccaggtcttcgcaggtccggagccgatctggctgggtatcgactggggcgagggtgacaacgaagtggtctacctgatcgacacccgcagccactgccgcttcccgatcccggcccgctacctgccggaccatctgcttaagcagcgcccgcagcacaccccgtaa

SEQ ID NO: 361353 - DNA, 1158 bp, Pseudomonas aeruginosa
atgaaactttattttcatcccacagctggccagcggatggcggctgagggtgaacgtccgcggctcgccgcgtacccgcagcggcagcaactcgctacgggtctcgccgtcgccaccggcgtccgtcagccagcctggctcgaggtccggcagcaggcccagcaggtgatgctggcgggcctgggccgaactgatgccgaagaggcgttcggcctggggattgaggtagctgaggcggccgtcggcgcgggtcaccagcacccgctcgtcgatcgccgccagtgccgtggccgcctggcgcaggctgcgctgcgaggccagggtcatggcgcgcaggccttgctgctcgcggtgcaggcgcagcagcatgtacacggtgacgccgaccagcaggaggaagatcgccagctcgccgccgattcccggcagcaggccgagccgcactcgcgtgctgtcgtagagcccgcgaagctgccagtcgctgttgcgcagcggttccacgccgagggtctgcatgtcgtcgagcagcgccgtgctccctggggtatgccagagcacccgcccggcgtattggtcttccaggcgccagagcaggttgccggtggggaggtcgggactccactgggcgaggctgtcgctggccaggtgcaacagccagaagccactgtcgcggcggctgccgggttcgcgcagggtcaggtagagggattcgccgtcgcgcgggtcgaggcaatagtggtagaggccggagccggcgtgctggcgcaactgctcgggcagcgtcgtttccggcgacgggctgcccgtctgcggggcgctgtccacccattgcaactggcgcacctgtggcagcgcatcgctgatgcgtggcaacagcctgttctggatctcgccacgctcgctggggggcacgcccgggagcagggcgagggcggtgcgcgccttgagttcgagggtcagggacaggcggtcgttgagacgatcgagctgggccgcggctcgctcgtgttcgaagccttcctgctggcgcagctcctggctcatctgccagagcagcaggccgagcatcaacaggaccagcaacagcaggccagccttggctgccggtcggtcgggtacggtcagtgggtcgccggcgggaggcggcgacggggttag

SEQ ID NO: 361354 - DNA, 3363 bp, Pseudomonas aeruginosa; identical to SEQ ID NO: 341661

SEQ ID NO: 361355 - DNA, 363 bp, Pseudomonas aeruginosa
atgggcatggattggcttacccacggggcgccctcctttgaagtcgagctggtagccatccgctacatcctgcaagagctgatccacagtcacgccgacataaaagccgtctaccagctccacatcgccgaccgtaacggtatgccggacaccccgctcaaacaggacataggacagctcccgagccactcggaagcacataccaggcagcacgtcagtgtgcggaaggaactccgaaaagtcctgcgcgatggcagagaccactgctggcagatcaatgaccagtgctgggtcaatgtcgagtgggtagttcgacatcccccttgtaagcgcattggtccggtccatagcccgccgaaatga

SEQ ID NO: 361356 - DNA, 831 bp, Pseudomonas aeruginosa
atgagcaagagcctgattgccgcagcagtcatagccgctggccttattgccagtgctgggcaggcgtccgccgcagcgacctactctggcaatgccgctccagctttgctggtgattcaggatgaagaggtcttacgggatctcaccggcaagatcgggagcagcaccgagcagcgcgtaaaagcaggccaaattggctacttcgccaatccctcagccgagtttgttgccagcgtatggttccaacagtcgctgaaacatgccggcaccgactaccacgttgctttcgtcaagctacgcgaaattgacccgcaaactggcgagccctacgaggcccatgccgctggagcatcagtcagcgcaatcacctacaagaaggtcggctacgactgggaaatcgtatcgcgtcaaagcagcccattcacagaggcaggaacctggggtgacgctacagtacctgagaaggtcggccaactggagttgagcaacaccagcactgccctgttggttcctaccttcgagagcggtcaaggaacagcttacgagggcgagcaaatcatcgccttcgacggtgtgcattggacatcactagggattatcaatactagcggcaacaatgagggggcctgtgacgataccatccctgacatgccagcctgctggtcttacaccggaacaattcatgtagccccaagcaaaaacgccagaatgcctgaccttctagttgtacgcacggggaccgattactcggggtatggcagtaagccagcgccaacagaaaacgtcgtctacaggctcaaggacggcgcttacacctcgctctcagaatag

SEQ ID NO: 361357 - DNA, 1680 bp, Pseudomonas aeruginosa
atggcgacggacaccccacggattccagaacaaggcgtggccactctgcctgatgaggcttgggagcgtgcgcgccgtcgtgcggagatcatcagtccgttggcgcagtcggagacggtcgggcacgaagcggccgatatggcggctcaggcgctgggcttgtctcggcgccaggtatacgttctgatccggcgtgcccggcaaggcagcggcctcgtgacggatctggtgcccggccagtccggtggaggtaaaggtaaggggcgcttgccggaaccggtcgagcgcgtcatccacgagctactgcaaaagcggttcctgaccaagcagaagcgcagcctagcggcctttcaccgcgaagtcactcaggtgtgcaaggctcaaaaactgcgagtgccggcgcgcaataccgtggccttacggatcgctagccttgacccgcgcaaggtcatccgccggcgggaaggccaggatgccgctcgtgacctacaaggtgtgggcggcgagcctcctgccgtgaccgcgccgctggagcaggtgcagatagaccatacggtcatcgacctgatcgtggtcgatgaccgcgaccggcaacctattggccgcccgtacctgaccctcgccatcgacgtgttcacccgctgcgtgctcggcatggtcgtcacgctggaagcgccgtctgccgtttcggttggcctgtgcctcgtgcatgtcgcctgcgacaagcgcccttggctggaaggactgaacgtggaaatggattggcagatgagcggcaagcccttgctgctctacctagacaacgcggccgagttcaagagcgaggccctgcgccggggttgcgagcagcatggcatccggctggactatcgcccgctgggacagccgcactatggcggcatcgtggaacggatcatcggcacggcgatgcagatgattcacgacgaactgccgggaacgaccttctccaaccctgaccagcgcggcgactacgattccgaaaacaaggccgccctgacgctgcgcgagctagagcgctggctcacattggcggtcggcacctaccacggttcggtgcacaacggcctgctccaaccgccggccgcgcgctgggccgaggccgtggcgcgtgtcggcgtaccggccgtcgtcacacgcgctacttcgttcctggtcgattttctgccgatcctccggcgcacgctgacccgcaccggctttgtcatcgaccacatccactactacgccgatgcgctcaagccgtggattgcgcggcgtgaacgctggccgtcctttctgatccggcgcgatccgcgcgacatcagccgtatctgggtcctggaaccggagggacagcattacctggaaattccctaccgtaccttgtcgcatccggctgtcaccctctgggaacaacggcaggcgctggcgaaactgcggcagcaagggcgcgaacaggtggatgagtcggcgctgtttcgcatgatcggccagatgcgcgaaatcgtgtccaccgcgcagaaagctacgcgcaaggcgcggcgtgacgcggatcgccgccagcacctcaagacatcagctcggccggacaagcccgttccgccggatacggatattgccgacccgcaggcagacaacttgccacccgccaaaccgttcgaccagattgaggagtggtag

SEQ ID NO: 361358 - DNA, 1035 bp, Pseudomonas aeruginosa
atggatcgcttcattctgttcgcactagcggccgcgatggaggctcttgaaacggcgggatggcatcctacgtgcgactacgaacgtgagcgcacggcgacaattattgcctctggtataggcggatttcctgcaattgctttagcagttcgtataacggatacacggggagcacggaggctatcaccctttaccgtgccatcgtttctggccaatctcgcggcaggacatgttaccatcaggcatggatttacaggtcctattggcacgcctgtaaccgcctgcgctgccagcgttcaagccatcggcgacgccgcgcggctgatacgctctaacgaggccgacatcgctctgtgcggcggggcagaagcatgcattgataaggttagtcttggggcatttgctgccgcgcgagcactatccaccggctacaatactaccccggaactggcgtcgaggccgttcgacaccgggcgcgatggtttcgtaatgtctgaaggggcgggtctgatcgtcatagaggaattagaacatgccctcgctcggggtgccaagcccatagcggaattggtgggatacggcacaagcgccgatgcacatcatatgactgccggtccagatgacggccgaggcgcggcccgtgcgatgggaattgcactccacagtgctgggttgaaaccaatcgatattcaacatttgaacgcacattccacctccacccccgtaggagatcgaggagaaattgccgcgatacaatccgtgttcggcaatcatgatgtggtcgtaagcgccacgaaatcggctacggggcacctacttggtgccgcaggcggtattgaggcaatcttcacggtgctcgctttgcgcgatcaaattgctcccccaacgagaaatttagaaacccccgatcctgttgccgctggtatcgacctcgttcgccaatctgcgcggcccattctcatggaacatgccatttccaacggattcggctttggcggtgttaatgcaagtgtcgctttccggcgatggcagtaa

SEQ ID NO: 361359 - DNA, 1572 bp, Pseudomonas aeruginosa
atgtccgcatcacgactgtgggattgcccaatagaactctccaaaaaagaaaaatttatttgctctaagctcaaaaattccggcaaattgttcgtgtttcttcgtgagcaacgccatcgtattttcgatgaacacatggagcaaaagctgttaaaactgtatgccgatcaccccgcaggtaaaccccctgtgcctgcggcgctgctggcaatggcttcgttgctgcagtgttacgaacaaaaatctgatgcggcagccgcccttgaagccatgtttgatgtacgttggcgtatggtcctcaattgcctctcccttgatgatgaaacagcgcctttttctcagggcacgttgtgtgattttcgtcatcgcctggtccggcacaatatggatgaagtcttgttagaacataccgtaactatcgccagagactttggtggtttcggtcatacacaacttcgtattgctcttgattctgcaccgttacaaggggctggccgggttgaagacaccttcaacctgattggccatacattagaactgttggtcagttgtgctgcacggatccgaatgacgacagaagctcacatcctgaccgaagccggaacacagctgataggcaaaagcagtgtgaaagcagctctggacattgactggtcagtcgaagctgagaaacagaatgcaatcaataccttgctcaaggatgtgtcgcagcttcagcagtggcttagcactcagccttctacagtgacggagcataaggaactcaaagcctgtttgaccttacttgaaaccgtattatcacaaaacattgaacccgatcctgatgggggtggcaagataacgcagggagtagccgaggataggctcatctccatccatgatgattcaatgcgccatggcagaaaatccagttcacgcacgatcaatggttttaagcaacatattgccattgatatggacacaaagctgatacttgctacctgcgtgcggccagccaatgaacctgaacataaagcggcagaatggctcaaacctaaggtgctcagagccggagaagtcaaggaactaagtatcgaccgtggttatctggccgcgctgtggacagccgaacttgataaacagggacatcgggtgattgccaagccatggacctcaaccaacaaaggtaaattcagcaaaaaagaatttgaaattgactttatcaaccgacgtgcaacgtgtccggccgggcatagtgcctcgttcagccgcgcaaaacctactcaaatcaagtttggcaaagaacgctgccagagttgtattctacagggacgatgcacagactcaaaaacaggaaaaacactgacattacatgcgaatgaagagatgttacaggggttgagagcatttgtagaaacaccagagggccgagcacaagcaagagaaagaacgaaagtagaacatgcacttgcatccatttgtaatcgcaaaaaacacagagccagatacatcggagtaagattaaacgaatatgatctaaaccgaactgcagccatcaccaatctacatatcggcatggctatggctgcttag

SEQ ID NO: 361360 - DNA, 828 bp, Pseudomonas aeruginosa
atgccctatgttaaaaatgacgacgttctcgtgaggtatgagacgtttggtgatgaaacgaacctgcctcttgtcctgatctttggcatcagcatgacctgtgaggactggttagaacttggctacatctcaggattggctaaggaatttcatgtcgtatgtgtcgaacctcgcgggcacgggctaagcacatgccccacgaattcgtcctcttacgcattgcccaaaatggcttctgacattgaaacggtaatcaacaccctagatctagtaaatccattagtctggggatactcgctcggcgcaaaaatagcgctcgctgccgccgttcaaaatccagaggcttatcgaggattgattcttggggggttcgagcttcactctgaagtcgatttggcgacagatatggttgccgaaacattttccagtggagcacaagcttggcttgctgtttggatgcaaatgttcgatgtgccggacggcatggccacccgtcttgctcgcgtcaacaccaacgcacttcatgcattacgcaccgctgaagctgaatggccgcccttgggtgcggcttctgagtcgttcactgcgccagttttactttatgcaggcgaaaagtgcttttttcggaatgcaacagccgccgccgtcgcacatttcccatcagcacggtatctcgaacgccctgggcgaaatcactttgatctgatgcctgatagcgcgtggataaccggagaggtagttcaggaattcggaagctctagagcaccgatcagtttaaaaatcatacagggatcgactttaccacttttccatgatcaaatactctga

SEQ ID NO: 361361 - DNA, 267 bp, Pseudomonas aeruginosa; identical to SEQ ID NO: 149119

SEQ ID NO: 361362 - DNA, 378 bp, Pseudomonas aeruginosa; identical to SEQ ID NO: 149122

SEQ ID NO: 361363 - DNA, 318 bp, Pseudomonas aeruginosa; identical to SEQ ID NO: 149126

SEQ ID NO: 361364 - DNA, 399 bp, Pseudomonas aeruginosa; identical to SEQ ID NO: 149128

SEQ ID NO: 361365 - DNA, 1647 bp, Pseudomonas aeruginosa
atgaacattcacagcccaaccactaccgcccgcgccgcgctctacctgcgcgtttcgactgcccggcaggcggagcatgatatttccattcccgaccagaagcggcagggcgaagcctattgcgagcagcgcggctatcagctcgttgagacttatgtggaaccgggcgcaaccgccaccaacgacaagcgccccgaattccagcgcatgatcgaggcgggcacgtcgaagcccgcgcccttcgacattgtcgtggtgcatagcttctcgcgcttcttccgcgatcacttcgagatggagttctacgttcgcaagctggcgaagaacggcgtcaagctcgtgtccatcacgcaggaaatgggcgacgatcccatgcaccagatgatgcggcagatcatggcgctgttcgacgaataccagtccaaggagaatgccaagcacgtcctgcgcgccatgaacgagaatgcccggcagggtttctggaacggcgcacggccgcccatcggctatcgcatcgtcgcggccgagcagcgcggatcgaagatcaagaagaagctggagatcgacccgctgcacgccgacaccgtgcggctgatctatcgcctgttcctcgaaggagacggcacgtccggcgcgatgggcgtcaaggccatcgccacctatctcaacgagcgccgcttcttcacccgcgacggagggcgttggggattggcgcaaatccacgccatcctgacccgcaccacctatatcggcgagcacaggttcaacacccgctcgcacaaggatcgggagaagaagccggagagcgaggtcgccatcatggcggtgccgcccctaatcgagcgcgagacgttcgacgcggtgcaagcccgcctcaagtcccgcaatcccatggtgacgcctgcacgtgtctccagcggcccgacgctcctgaccggcatttgcttctgcgccaagtgcgggggagcgatgacgcttcgcaccggccaaggcagcacgggcgcgacataccgctactatacctgctcgaccaaggcccggcagggcaagaccggctgcaagggtcgcacgatccccatggacaagctggaccatacggtcgccgattatatcggggaccgcctgctcctgcccaagcggttggaaaccgtccttgccagcgtcatcgaccgccgacaggaacgcaccgagcgccgccgcgagcatcttgccgagcttcaaaggcgaatcacggaagccgaccagcggctcggccgtctctttgacgccatcgaagccggcatggtggacaaggacgacgccatggcaaaggaacgcatggtgagcctcaaggcattgcgggatcaagccgccgccgacgcggagcgcacgcagctcgcgctcgatagttcaggcaatcagggcgtcacccccgatatgctcaaggggtttgcccgcaaagcccgtgaacggatcaggctcaacgatggcggctaccgccgcgaccatctacgcgcgctggcgcagcgtgtcgaggttgccgacgacgaggttcgcatcatgggatcgaagtcggaactgctgcgaacgctggtcgccgcttcaagcgtagaaacggcggcgttcggcgttcatagttctgttctgaaatggcgcgccatttgctga

SEQ ID NO: 361366 - DNA, 342 bp, Pseudomonas aeruginosa
atgagccgctatcagttcctcgggatcaacgacgataaatcgcactgcgaatgctgtggcaagcaaggcctcaagcgtgttgtttggatcgaagacacagagaccaatgagattcgtcacttcggtacaacctgcgctatgtctcctgcaaaaggcttcatgctcgacgccgctatcaaggctgaaatacgccgcctggaacaagtgcagaagtctcgtatggctcgcgctcactatgcctatcgtcaaaagggcggtcgctgtgtagcaaaccccgaaaagcccggctacttcgttcgcgaaaatcctgaactctggctcgaatgcctggctgctgcataa

SEQ ID NO: 361367 - DNA, 1335 bp, Pseudomonas aeruginosa
ttgacagatctttccgtaccgcagtcgcttttgcacccgctgaaagccagcgttattggctttcaggaggaggagcacgactaccacttccaggtggagtaccccgatccggacgcctgccacacctgcggcaccatcggccagctcgtgcgcttcggcaagaagcaggtgaagtaccgtgacgtgcccatgcacggcaagcgcgtgaccttgtgggccgtgcagcggcgcttccagtgcaagagctgcgaatcgaccttcacgccgaagttccacgagatggccgaggatcaccgcatgacgcggcggtgctacgactacatcatccgcaaggcgctcatgagcaccaacgccaaggttgccgaggagataggcttcgatgaagccgtggtgcgcggcgtcatcaaggcgcattgcaaggtcaaggagtacagctaccggccaaccctgccgcgcatcctcggtatcgatgagctgtatctgaaccgccagttccgctgcgtgctgaccgatatcgagcgcggcaccatcatcgacattctggagtcgcggcaattcgatgtggtctacaactacttggccaacatgcgcggacgggacaacgtgcagatcgtctgccaggacatgtggaagccgtaccgcgacgtagcgtccaagctgttccccagggcgtctatcgttgttgaccggttccacatccagcggatggccaacgaatcgctggaggtgctgcgcaagggcatcaagaaggatctgacgcagcaccaacgccggcagctcaagggcgaccgcaagctgttgctgatgcggcgtcgtgacctgaacccaatgaacgagctggtcatccacacctggttggatcagttccctgagctgggcacggcctacaagctcaaggaagcgttcttcgacatctgggagtcagccaccgaagccgaggcgcggcagcgctacagcgactggctagccatgatgccggacagccagaagcctcactggaagcccctggtgacggcgatgagcaactgggagaagcagatcttcgactacttcggcccggcccagcgcaacaccaacgccttcaccgagtcgatcaaccgatccatgcgagacctgaaccgcgatgccaggggcatgtccttcgagatgttccgggccaagacgctgttcagcctggagcacaaggtgacgaagcccaagccgaagcgggagtctccgttcgctggctacgcgacggtgatgaagagcgtcctcgtcctggacgagagcgaattgccaatcgatcacggcgtaccaatcgaagcgatcatcagggccatccaaggcctgcgctaa

SEQ ID NO: 361368 - DNA, 213 bp, Pseudomonas aeruginosa
atgcaactgagcgacatcaagcaagtgatcgaggtctccggcgaaatcgaagcgcaagaacggctcgacgatgggtgggttcttctcgccgcagccggcggaactaaccaggacaaagagggctacatcatctactccctgggttccacagaagagcccaagccgatcaaggccggagcggtattcagcccccgcatggaacctcaaaagtaa

SEQ ID NO: 361369 - DNA, 1233 bp, Pseudomonas aeruginosa
atgctcgacaagttgcacctcttcgttcctttccgtctcgagcacatcgaactgctcggggtggaagggcgtgcggacccggtgcatgtcgttgatctggagagcctgggcgtgccgctccaggggcagatcagccgaggggagggcggagagttacaggccgactacctgcggcatgtttgggagtcgctgagcacgggcttcacgccgcttgcgttcaaggtttttcaccagtcgctgggcaagcgtctgatgcccggcgtagagctgaaagccagcccggcgaagttgctccaggggcacaacgtgttcggtccgacctgtatccagaagggggccgaggtgatgttcaagtggctacacgccacgtatcccgacctgttcgccaagctcgatgttccggcgactcaggtctacgccctggactgcacgtattccagccggttgccggatgagcgcaccgcgctccaggtcatccaggcgctgaccaacgtcagcaacggccacaccaagagtcgcggcgacaactaccagacatccgcttactggggcgcgaaagaatcccgcctgaagcgcctgaaggcgtatctcaagcacaccgagtatcaggcccaactggacgaattgaagcgggcagggcgggccgatctgtcggccgctcggtctgttcgggtcatgtctgacccacggttgcaggagtgggtgcgctacctgctccgcatggaggccacggtgatgcaccggtggctggaacgccggggcatcccgtctcggcttgttgatctgatcgcctaccagcagcggctccaggaagaggggcgctgcctgattcaggagtgctggcaagcggttacagcggatcttttcgcggcctttgagggtatccagatgcgtgtgattgatgatgaaaaagtgctggccgcactgactgagcgacacctgaagtacgaccggaagggcaagcccaacgatagccacgctcggaacctgttccggacgtaccgcagcctcaaggactacgggtggcaggaaacgatggagtcaatggcgcgccggactttctacaagcacgtgaacgacatctgcgaggccggcctgtcgaaagccgccctgcagaagctccacgaagccgaccgggcgaacaacgtcgtaccgctgctgcggttcgtgcaagtcgatttcagcgcccagcgccccgactggtacgtcgagccgaccgtggaggccgcttga

SEQ ID NO: 361370 - DNA, 1269 bp, Pseudomonas aeruginosa
gtgtataagagacagcttaccgacaccgcactgcgcaatctcaagcccaaagccaagccctacaaggcttccgatcgtgatgggatgtacgtgacggtatcgccaggcggtaccgtcacctttcgctatgattaccgtctcaatggacgccgggaaacgctgactatcgggcggtatggcccagcaggtatttcgctggccatggctcgcgaaaagcttctggatgccaagcgaatggttgcccagggcatatccccttccttggagaagcaacgagccaagcgccgtctgaccgctgccaaatcgtttggtgacatgctgaaaagttggctggctgatgcgcgtatggccgacagcacgcggtccatgcgcaagagcatcatcgaccgcgacatcctgccggtcttcgagaaccggctcctgaccgaaatcacccctgacgatctacgcgcgctctgtgccaaggtgaagggccgtggtgcgccggccacggccgtccacattcgcgacatcgtgaagcaagtttttgcgttcgcaatcctgcatggcgagaaggtcgagaatccggccgacgatgtgaaggctgcgtcgatcgccaccttcgtgccaaaggatcgagcgctgaccccgaccgagattcgcctggcttttcaccagttggagtcgattgctgcatatcccaccattcggctggccttgcgcctggtgcttctgaccctggtgcgaaagagcgagctgattgaggcgacctggaatgaagtggattttgagaacgccacctggacgatctccaaacagcggatgaagggacgtaatccccatgtggtttacctgtcgcgccaggctctggacatcttcgtggcgctgcacacttgtgctgctggctcgaggttcgtgctgccctcgcgctatgacatccaccgctgcatgtcacacgccaccttgaaccggatcacccaactcattgcatcacgtgctaaggaagcggggctgccgttggagccgttcacggttcacgacctgcgcaggactggctccacgctcctcaacgaagtgggcttcaatggtgactggatcgagaagtgcttggcgcatgaggacgggcgttcctcgcgctcggtctacaacaaggccgagtacgctgagcaacgccgccacatgctgcaagagtgggccgatatggttgatgcctggggcgatggtcggactcatgtgcctaagctgctgcccgacaatgtgaccgtgccggtgttgagtgccgccgtttag

SEQ ID NO: 361371 - DNA, 303 bp, Pseudomonas aeruginosa
ttggagactctgcagaacgtcttgggcatcgaggagtatctgatccccgctatcggtgagcgactagcggctgctgagtacgacgttttattcctctccggcatcggtgaggtgttcccctacatccgttcacacaacgtgctgaacaacctgcaaagcactgccaagttcaagcctacggttatgttcttccctggtgagtaccggtactcgctggagcagggggcttctctggagctgtttggcttgctgcatgacgacaagtactaccgcgcattcaacatttttgagactcaggcctga

SEQ ID NO: 361372 - DNA, 1707 bp, Pseudomonas aeruginosa
atggctcggctcatttcttacgttcgtatgtctacaagcgagcagttgaagggcatttcgcttgaaaggcaacgaaatcttatcgctgattttgcttcaaaaaatgactttcaagaagtcattatttatgaagacgtaggccgttcttctttcgcagaagacgaaaatcaaaaagaattgaataaattctttgaagaattagaaaaagataattttgataaaggcgacgttttcgcacttgaaaacattgaccgattgacacgccggggcgcaattgacgcactaattaaagtcaataagattattcaaaaaggtttaaaaatcgcaatcataagcgataaagagcaaagaattcttgaagagattgacatttattcaattattactttgtcaattgacgcttcaagagcgaacaaagaaagtgaagtaaaaagccaaaaagggcttataaattgggagcataaaagaagacttgcagcgactgaaaaagtcgcaatgacaaagcgagcgccagcgtggatagatacagaaatctatcattattttgacgaagaaaagaaaaaagaaataaaaagaagaagatatattttaaacgaagaaaaagcgcaaacagtgcgcttgatatttgatttatttttaaatggcaatggctcgcttaaaatcaacaagattttgaacgatagaaaaataaagcttttaaatgacaatgtagaattttgggagccttcaagaataaacaaaattctaaaaaatccagcagtctatgggctttatcaaccccaaaaacagcgcagcggcaagcgtgatttagtagacgcaggggaacccatagaagactatttccccgcagtcataacaaaagaaatctatgagcaatgcaggcttatcgctgagaaaaatctcagcgaaagaaaaggccgtaaaggcgaaaattttactaatgtttttactggtcttctcaaatgtgaaaagtgcggcagtcccgtacatttattaaattgcggagttgataaaagaaataaaagtcaacacgctttgatttatttgatttgtaaaaaagcaaaatttacgaagcaatgttcaacaaaaagaatgcactatgacgcttttgaagcgtcaatttttagagcagtaaacgaaataaatctaattgaagtattgaacgagaataatccgctcaatgatttagtgaaaaaacaaagagaaattgaaacagcaataaacaagaaaaataaactacttgaaaactatgaaaagtcatttttagaaaatgacggaaatgtcccagcgtttatgatttcagcagcaaaaaaagcagaaatcgaaatcaaagaacttgaagaacaaaaaagagaaatacaaaacgagatttcgagcttaaattactataatgctaatgtcgagaactcaattgaagatattaaaaacaattcaagttatgagaaaagagcaaaaataaatttgctttttcacgaaatcattaaatcaatttctattgatttagttgagaagtattcagtaatcacatttaaaaatgacataacacgaataatagacaaagatggttttgtcataaatgttgacagagtaaacaaacttgaaatagttgaagaagacacaacaactatcagcgcagagattgcgaacaatccaaaattgctacttgaatacttcgaaaaaatgcgaagagatttagaaagcgattaa

SEQ ID NO: 361373 - DNA, 246 bp, Pseudomonas aeruginosa; identical to SEQ ID NO: 102671

SEQ ID NO: 361374 - DNA, 729 bp, Pseudomonas aeruginosa; identical to SEQ ID NO: 50969

SEQ ID NO: 361375 - DNA, 1020 bp, Pseudomonas aeruginosa
gtggatagagaattggatcagccccttcagcgcaatctggagcggctatacaattacctagaaaatccagaacgagaggaggcacagcgtgttctgctcgcagcggaaccagagccgatccgaattactcacggaattcctgacctctataccgactggctgtcatcccccagctactcagcacaaggtggattgacggggcaactgacgcaggtcataagccagactgccgggcggcccgttctagtgttcgacgactacttcaaggttcatgaggtcactattcgtacggtcgccgaaaccggaggagccaacagtatttcggtgagcgacctccaggtgcaattgaaccagcagatcaatacctttatccaagaccgcatcgatggtgacaaagccgataaggtcagccgcctccagtccaatatttcctatctgattgaaatgggtattaatatcgatttcaccgcccgtcatgagcttccacctggtgggcgaggcaacagagctactattccgacctctgaccccaacggtgaatcaggtgtaacgattggctatggcttcgatgtcggccagcacgatgaatccggcattcaggctctgaacatcgctgaatccacgcgcaaaaaaattcgccccgccctcggcttgaaaggagcgaacaccgcgaccttccaggcattagcccaactcatcccggtactcacagatgaagacgggctgtccctctttaccgccaagatgatcaaggtcactgatcggatgaaggtgaagttccagcagtggagcaccttacctccggcggtcaaaaccatagtgacagacctgtattaccactatggtgagtattcctcgttcccaaactttgagactgctatttctcagagcgactggccagccgccattagggagttgaggaactggaatggtactcccaacagtaccgatccgagcgatggcatagccaggcgattgaacaatcgcgcggactatctccaacgatccctggaactctag

SEQ ID NO: 361376 - DNA, 807 bp, Pseudomonas aeruginosa
ttgtcctacgccgattgccaggatgaagccaccgacttggctaagcgcatcgctagctggataaatgtagaaggtatcgctccggctaaaatcgctgtgctaccgcgtaatcaaccggaggcgtattgcattcgacttatggctgagctcgacaattggggcatcagctatcgtaacgaaaacaaggcgcaggacatttctaccgagcctatcgcccaggttatcgtggattacctgctgtgcatttacggcctgagagagcccaaagcctggactcgtctgacgcgtcgaatcatccaagtagaggatgatgcagagagcgaactaaagaccaattggattgaccagcgatggacgctactggaggagttcctcaagatggttgggcctgcgctgctggcagggctctcccatgattacgagtcctgggtgcacctgcgagagcagattgagagtgtcaagaaatatatcgatgaagccttggcaaaagaacctgaccttctgaaagcactggcccagctctccgatgatcaatcgattcggatcctcactgtgcacaagagcaagggccttgagttcgacacagtagtattgctgggcgtggagaatcaagcctatttcggcaaggatcaccacgaagtgcagtgcacattcttcgttggtgtatcgcgtgccgagagacggcttgtggtgacgacggcaagtcatcgtcagaatctcgctcagcttgaatactggagatccgcccgcaccgttcaggcggaattccttgcgtacgtgaatctctggaagacccactccaactga

SEQ ID NO: 361377 - DNA, 912 bp, Pseudomonas aeruginosa
atgccagtgggacaaggcccgcgccggtggacgcagcgtctgctgcgcggcccccaactgcgtatcccgcgacggccagaggccttgcagtctgccaacctcatcggcgaactgctccggctccatcgtcacgcggaagaaatgccccggctccgccggactggctgggacgatgtacggcaggaacggccattcgcccggcagctcctcggcttcgacttcgccaagcccaacctgcagcagcagattgcgcacggctttgacgccatcgggtgcctgctcacgctggcgcacccgccgaccgaagatcaccacctgcttgaactgcgtttccaccgctcggtagatccgcaggtcggtgtagtggcgcgtcagccagccgaccagctcggcgtcgagcacgtagccggggatgatgaagaccagcacgccgccgtactgcagcaggggcagcgtgcgctggtagaacagcttttcgaggcgggcacggccctgaccctgatagccaatgttgccgttgacgtccttggacaggtcgccatatggcggattgagccagagcagcccaaaggactgcttggagatcatcgtgtccatcagatccgcgtgcaggcagtgatcgaccaggccgcgggcatggcgcgcccgctctgcgtcgaactcgacggcgaacgccctggcctgctcgcgcccgagggcatgagcagcttcggcaatcgccacgccttcgccggcgcagggatcgaggatgcacatcggcccattggattcaggcgcactgggcatcagtgcattgagggctctttcgagcgtcggttcatcggttgggaagtacccgttcttcacgaagttgcgggcaagccgcgggaacatgagagccatggaagtctcctggttggcggggatgaatag

SEQ ID NO: 361378 - DNA, 441 bp, Pseudomonas aeruginosa
atgggacaaggcccgcgccggtggacgcagcgattgctgcgcggcccccaggtgcgtatccagcgacggccagaggccttgcagcctgccaacctcgccggcgaactgctccggctccatcgtcacgcggaagaaatgctccggctcggccggactggcggggacgatgtacggcaggaacggccattcgctcggcagctcctcggcttcgatctcgccttgcccaacttgcagcagcagaatgcgcatggccttgacgccatcgggggcctgctcgcgctggcgtacccggcgtccgaagatcaccacctgcttgaactgcgtctccaccgctcggtagatccgcagatcggtgtagtggcgcgtcagccagccgaccagctccgcgtcgagcacgtagccggggacaatgaagaccagcacgccgccgtattgcaatag

SEQ ID NO: 361379 - DNA, 663 bp, Pseudomonas aeruginosa; identical to SEQ ID NO: 323748

SEQ ID NO: 361380 - DNA, 399 bp, Pseudomonas aeruginosa; identical to SEQ ID NO: 338988

SEQ ID NO: 361381 - DNA, 1404 bp, Pseudomonas aeruginosa
gtggtccctcatgaacgccatggcggccgacgtcatgctgccgctcgtggtcgggcggtagccgtcttcgatcatccgcccaggcaaggcgcggaacagcagataaaagaggtcatccccgtagccgcccatcagcgtgccggtcagcagcaaggtcttgcgagccttcgccgccagcacgcccatggcctgaccttgggcactgccaccgttcttgtactcatgcgcttcatcagcgatgagcagatcgaacgtgccttgcggcaagtaccgcttgatgaactcggacggctgatagccgccctcgccaaagccgaactccatgttggccatcgcacgttccatgcgcgtggcctgacggtcagaaaacaccagatcgccgttgccgtccatcaagttgatgaaatcgtggatgttgtcgccgagcatcgaggccaggaagccgtcaccgaacttctgcatcagcttctgcgcggtgacttccccgatggtcgggatgcgcttcaaggctttgagcacggccgaggactggtcgctgccggacaggctgcgcgggcggatcagtgtccacaggggcgcggcgcagtggccgcacttcctgcgggactcctcggcttggagcgcgaccgggttgaccggctcgccgtcgaggtcggtaatgaccgtgccgcagtccgggcaagccgccacgtcgccgtggcgggtgcgtcgctgggtgaagaccggcttccagttaaagcccatccgcatccgcacgcgccccaggacgaagaactcctggcccgtgggctgcacgcccaactgctcgcgcagcttgatgagcttgacgagcgtatccggcccgttgagtacccacaccttggcaccggccaccgtctcctggatctcgcgccgccacttgtaaaccaggtgcggtggcgacaggaccagggtgcggcggtagccttcggcgttgagcacggcagccgcggcgatgccgacggtcgtcttgccgcagcccatctcgccattgacgatcgcggcgcgttcaccacggtcgatcagcagctcggcggcggcgtggacgacttcggcctgggctgggaacagcttgcgcttgaggctggcgacgatgagctgccggtgcgcctgcggttggccggtatagaccggtgggttggcgctgttgagggcgtcgagcagttcgtcgccgaactcgccgacgaaatcctgaaggctcagggtcagaggggaagattccgcgtcgagcagttcgccttggacgggcacggcgtctgcggcagtggtttcgagatcgagggacatggtgatgctccaaagaaaatggggcatgcaccacccccagcggggcaatggcatgccccgtggtgggaagagaatcgacgcgtggccgaaggtggttga

SEQ ID NO: 361382 - DNA, 279 bp, Pseudomonas aeruginosa
atgaaactcaagcgtttgatggcggccctgacgttcgtcgccgcaggcgtaggcgccgcttccgcggtagccgcgatcgacccggcgctgccggaatatcagaaagccagcggtgtgtcgggcaacctgtcgagcgtcggctccgacactctggccaacctgatgaccatgtgggccgaggagtacaagcgcctctatccgaacgtgaacatccagatccaggctgccggttcttccaccgcgccgccggccctgactgcggatttcggagcatcgtga

SEQ ID NO: 361383 - DNA, 351 bp, Pseudomonas aeruginosa; identical to SEQ ID NO: 335823

SEQ ID NO: 361384 - DNA, 207 bp, Pseudomonas aeruginosa; identical to SEQ ID NO: 344410

SEQ ID NO: 361385 - DNA, 1341 bp, Pseudomonas aeruginosa; identical to SEQ ID NO: 328067

SEQ ID NO: 361386 - DNA, 135 bp, Pseudomonas aeruginosa
atgaccaccgttgctgacatcgtctccaccatgaaaagcaagttcaacgccagcgcggccgccggcctggatctggtgttccagttcaacatcgaagacggtgaagggaacatcatcgtgttcccaactcgttga

SEQ ID NO: 361387 - DNA, 876 bp, Pseudomonas aeruginosa
atgaaccctccgcaaccacgcctcatcgataacggcaacggccatccgctggccagccattggtaccggcctgccggggagccgcgcggctatctcctgatcgtcccggcgatgggcgtggaacagcggttctacgcgcccttcgccgcctggctggcagagcgcggctacctggccatcaccttcgactacctgggcatggggcaatcgcgcaacggctcgctgcgcggtctcgaggtcgatgtgctgggttgggcccgtcatgactgcagcgccatgctcgccgccgcgctcgccgagagcgggagcaagcccctgtactggatcggccatagcctgggcggccagatcctgcccttcgtcgaagggcgcgagcgtatcgagagggtcttcagcatcgccagcggcagtggctactggaaggaaaacagcccgcggttgcgcaacaaggtctggttgttctggtacctcgtcgcgcccctgctgacgccgctgctcggctattttcccgggcgccgcctgggcatggtcggcgacctgccgcgcggggtgatcgaacaatggcgacgctggtgcctgcatccgcagtacgccctcgcggatggcgaggctatccgccgcgccttctccgccgtacgcacgcccatcgtgtcgctgtcgttcaccgacgatgaaatgatgtcccgacgcagcatcgagtcgctgctgggcttctaccgcgaagcgccgaaaaccgcctggcgcatcgctcccgaggaaatcggcgcccgccacatcggccatttcggcttcttccggccgcagttcgccgaatcgctatgggcgggctacctgttgccggagctgggctccggcaacgccctcagccgaggttga

SEQ ID NO: 361388 - DNA, 186 bp, Pseudomonas aeruginosa
atggagccgagcctgccgaacaacctgcgcgacgccctgcgcgagctggacgaaagcgagatcatggcgaagtacatcgacccgaagtacatcgacatcttcgtcgcctgcaaggaaagcgagctggaggagttcgagcactcgatctccgacctcgagtacaactggtacctgcataccgtctga

SEQ ID NO: 361389 - DNA, 264 bp, Pseudomonas aeruginosa; identical to SEQ ID NO: 341674

SEQ ID NO: 361390 - DNA, 207 bp, Pseudomonas aeruginosa; identical to SEQ ID NO: 361028

SEQ ID NO: 361391 - DNA, 207 bp, Pseudomonas aeruginosa; identical to SEQ ID NO: 348690

SEQ ID NO: 361392 - DNA, 786 bp, Pseudomonas aeruginosa; identical to SEQ ID NO: 325089

SEQ ID NO: 361393 - DNA, 267 bp, Pseudomonas aeruginosa; identical to SEQ ID NO: 336912

SEQ ID NO: 361394 - DNA, 879 bp, Pseudomonas aeruginosa; identical to SEQ ID NO: 325179

SEQ ID NO: 361395 - DNA, 351 bp, Pseudomonas aeruginosa
atggagcgcttacgtccctcgtcgggaaacgggtcgaagctgtggttggcccgctccaccacgcgcagcggcgaatgcagggccatccagtggatcaggttgctcagttggcagatgccgccgccgattccgctgcgcgcctcgccgaaggacaactccataccttcgacgaagccacgccgggcgctgggccgaccgaccagccggcagaacgagaagtactcgccggggccgatgcgcacgccgttcatgcagtccaccgccaggcgcaggttgaccaccttgttgcgttgcagggcgaggtcgctgtcgccgaggcggcggatcaacttcgaggtgtgcttgatgtag

SEQ ID NO: 361396 - DNA, 678 bp, Pseudomonas aeruginosa
atggtcacgcgccgtgacataggggtcagctttgcgcctgcgaagcgcgccgccgtatggccgcgtccaagccgtgagccgggccgctggccggcgtgctggccgctcccgccagcggtaggacggcgcaccgccgacttgccgccgctggccttgccagcctgcttgagcaccttggaaacgaagctctggccctggcctttgcctcggttcttcggcgcgccagggcgcacccagaaatcatggtcgccgcggtcggtcatggctgtgctccctgcaagctccggcgtgtccgagcgtgcgaagcacgcggacatgcctgcatcggcgcgtgcctcgcgccccacgcggcacggcggcgaagccgcgccgtgccgcgccacccccacgtgcagactggctttgcgggcggcagagtgccgaacccttttgtcttgccttccgcctttgcccctcgctcccgctccgggcatcggcggcccggcggcgctgctgcacgagcagccagcccgccggcgaacacgccaatggccgcaggccaggcgcgttcgaggcaagacgcctgcacgttgggcggctgcgccgaaggcagcgcgaagtgcggtgcgaatgcacccgcactgcacgcgcgacgacacggcgacgaacagtagaacgacatgcccgatggcacgatga

SEQ ID NO: 361397 - DNA, 318 bp, Pseudomonas aeruginosa
atgaaacgatcaacggtcgtcgtcgccctcttggccagcctggcactggtaggcaccgcagaagcccgtgacccgtgcaagaccatgatgtgcatggcaggcaaagcaggtctcaagggcggctcgctggcagacagcgattgcagcggggcggtatccgacttcttctcaatcgtcgtcaagaagaagggcaaattcaaacccgaggcaacagcccgggccagggaagaattcttgaattcttgcccaggttcggacaaaaaccaaggcaccatcagcccgataatttcaatattcggcatgaaacgttcggcataa

SEQ ID NO: 361398 - DNA, 417 bp, Pseudomonas aeruginosa
atgggcgaagtcgttgaactgcccgcaggcagaaagcggaaccgccaggtgcagaagatccgcactgtggccacgaaggatcgagcagcgaacggtaagcaaccgtcgttcttggcaaaggctgcctcgggcgctaaacgcttcgccatcgatgctttgcgtatcaccaccggcaacctattcggcctcgcaggcaggctgctttggcttgtgcgccgtcccatcagcctagtgctgacgttcggcgccgtgtcgatgctagtggtgttcgtgatccaggccttcaatggctggcctgatccaaagctggttgtgctgtccatagtcggtttgatcgccttcctggccgcctcgggcggctacgaccgcctggcccgcgcatttttccacatcgagcacagactaaaaggagagtag

SEQ ID NO: 361399 - DNA, 873 bp, Pseudomonas aeruginosa
atggctaaccatcaaaccttcaccgcagtcattgctcttgcgctcgtcgccgccggtaatccattgctggctaatgcgaacggtaaattgtcgatgagtgtcatggctttagcaaagcaatgtgcgccgaacgtggcgcctgagacggtcgggtatgtggttagccatgagtcgagaaacaacccatttgcagtccatgtaaacggcgtgccctggagtaagcagccaaagacagaaaccttcgaggacgcgaaggcagtagtcgaaaagcttgctcgtgaaggcgccagtttcgataccggctacgggcaaatctggtcggggaacttggcagcgttaggggtttctgctgtggacatgcttgagccgtgtaagaatctggccgccctggaccgaatcttgtcggactgctaccgggccgctgttgcgactaatcaggacgggcaggctgctttgcgaaatgcccttagttgctacaacaccggtaatcagagggacggtttcacaaatggatatgtgggaaagattctggcggtggctcaagccaataacactatgagagtgcctgcgctgcgcctcgatggagtggagagtgaaggcggccaagtggggagtagcgttgagcaggagaacgcgctacccgctgagaacgcaaggctgggccggtctgatgggttcgacgattcaaccccggacggatttgccaatagcactcaagacggcttcgaggtgatggcgcggcaacatgacggagcgccaaatgaaggtctttctcatccagcaaaaacaattagaggaaatgagcagcaagaagaaattaatacggacatggattcagaggttggaagaaaagaaatggcttccactctttga

SEQ ID NO: 361400 - DNA, 300 bp, Pseudomonas aeruginosa
atggacaaactgaatgttggtgtaaacggcaaacaactgggcatggtctgcatggttctgctgtgcatcttcgggtcgagtctggcccaagcagcaggggttgatacggcaaactcttcgctgacctcgatgaaaacctggctcgatacgtggattccgcttgcctgcgccgtggtactggcagtgctgtgcatcctctggtgggcacacgttgttcgcgctgacttcgctacccgtggcgccctggcaatgatcggtgctggttctgccagctacatcgtcagtttcttcttcggctga

SEQ ID NO: 361401 - DNA, 2649 bp, Pseudomonas aeruginosa
atggccgtaacagcccgtgatgtaaagagcgtcaaaaaattcacgaaggaacctgccttcaaaaaattcctaccctatcagcaccacatcaccgaccacgtaatcagcacggaaaacggcgagctgctgacgattttcaagcttcgtgggcgcacgcacgattgcgcctcggatctcgacctgatccgctggcaccgcgacctgaataccatgttcaggcagatcagcaccgagcacgtcaagtactggacccatcagcatcaccgcgaggtcaacgactacccggaaacggagtggaacctggcgttcgcccagcactttgacgacagctaccgcaagagcttccaatccaagccgctgatggtgaatgatctctacctcacggtggtttacaaccccgtaggcgacctggcgcaaaaggtcttttccaagatggagcgcccaacccgtgaggagttggtggacatgcgcaacgaggcgttgagcgccttggaagagatcagcagccgtatcatgcacacgctcaagccttacggtattgagcgactgggcgtctactatcgcaacagccgcggcgaagtcaccaatgccgagaatcaggacgatgacacctggctggctgatgaaaccgggcttgaggctgatgccttcgatatcgatcctgacgaccttctggccgatacggtgacgaccgcgccggcgccggcagttcctgcgccagaaagtgccgggagccttcgggcattttctactgccctggaatggctgtcgttcctcatcaacggttactggcagccagtacccgtctgccgctcgcagattcgcacgtatttgatggaaagccggcccgtatcctctgtttggggcgacatcatccagcgccgccgcttcgatggtgttgattacttggcaggtgttgagatcgtcgattacgacgatgagacggagcctggccaactgaacctgctgatggaagcagattttgaatacgtgctgacccaatcctattgctgcatgtccctgggagctgctcagtcgttcctgtcaaaccagcagaaatcgatgctggaaaccaaggacaagggcaagtcgcagattcggcagttggaagacgccgaggacgatgtgacctcgcggcggttcgtcatgggcttccatcacgcgaccatccacgtttgggcaagcacctcgaaaggcgtacagaagctagcccgcaaggccaagggcatgatgaccgactgcggtatcaaggctgactcagttggtctcgcttccgaggctgccttttacgcaatgctgccggccaaccatgcgtatgttccccgcccggtcccaattaatagctggaacttcctgtgcttctcgccgtttcacggcttcatgactggcaaggcgaacaacaacccatggggagcagcagtcacgttgttcaagaccacggcaggtacgccgctgttcttcaactggcacgtttcgccgatggaagaacagtcgttcggcaagcgcccgccaggccacaccctgatcctcggccagaccggtgccggtaagacgaccctgctcaatgcgttgattacccagtccagcaagttcgagccacgggtaatctgctacgacaaagaccggggcatgatgcccctggtgacgtccctggaagggcgctataccgtgctgcgcgagggcgaatcgacgggctggcagccggcgcaaattgagccgactaccgccaacgttgccatggttaagcgtctgatcaggatttgcgcggaaaccacgaacggcggcccgattgaacagaccgacgtggaactcatcggcaaagctgttgaccatgtgatggtcagtggcctggtcgccaaggagctgcgttcgttctatgcgatctggcggcagattccggcagcggcgcgagtcaacaaccagcagaaattgaccctggctgaaatgctcaagccctggtgccgtggtggcgaacatgggtggttgttcgataacccgtccgacgccttgaccttcgacacgcacaaggtgtttggcttcgacctgaccgactttatcgtggccccggatcagccggccccacaagcccgcacgccgttgctgatgtacctgttttatcgcgtgcgcctggccatcgatggtagctgccgcgtgattcaggtattcgatgagttcgcccaatatctggacgatccctacatggacgtggaagtgaagcgcggtttgaagaccgaccggaaaaaggacgcgatctacgtcttctccacgcaggaaccaaacgacgccctggaaagccggatcggcaaaacgatcatgcagcagtgcgtgaccaagatcctgctggaaaacccggaagccgatccagtggactacatgaaggggcttaaactgaccgaggcggaatatcaggcgctgcttaacatccctgaattcagccgccagttcttggtcaagcagggcagtcaatcggccattgccaccatggatctgcgcgggatggagaaagcgatcagcatcctttcgggcaccccggacaatgctgatcgactggaaagcatccttgccgccaatccaaacgccaaaccagaggtgtggctgccgaagtattgggaagcggttttacccaagcaacagaacaggagcaactga

SEQ ID NO: 361402 - DNA, 774 bp, Pseudomonas aeruginosa
atggaaaagtacgttttcgccgctacggatacccaggacgtaatgcgtctgccgacgttcaaggcaaaagccattgtgcgtagttgcacgatggccatcttcctgggggtcgcaagtgtctcgcatgcacaggtcattgtcgaagaccccggcgtgctggccaacacggtgcttcaagtcgagaacatggttcagcagctggccaacctcaagtcgcaactggaaacccaagaaggcatgtacgcctcgatgaccggtgcacggggattcggtgggatgctgccaggcagcgctggggagctgcaaaagaacctgccggctgactggggcaaggtttactccgacgcgatgaacagcaattcgagcatcacaggatctgtgcgcgacatgctcgggcagttcgatagcgaggtcgagaacatgggccgcactgaggccctggacctggtgaaccagcgcctcaaggagaaaggggcgtatgaccgcgtaatggcgcagcaggcctacaacaaccagatgcgcgaactggaagatatccagacgctgaccaaccagatcgacacaaccacgtcgcagaaagaaatcgcagacctgcaagccaggatctcaaccgcccagggcgcgatccagggcgagcaagccaagctgcaactgatggccatcctccagcagtcgcaagacaaggtgctgcaacaacagcaacagactgccgttcgccgctatgtcattggcgatcaaaacgacaatctcgaagcccctaacctcacggaatga

SEQ ID NO: 361403 - DNA, 246 bp, Pseudomonas aeruginosa
atgaaaaagatcgtatgcctgctgccactcttcgctgccctggccgcttgtggtgaggccaacaccaaagagtggtacatgcagcatgacaaggaacgggcggttcgcgttgccgagtgccgtaacgatgccaaagagcaggtgagcgctgattgccagaatgccctggccgccgaggctcaagtagtgaccatgggcaaggggcagtcggattacagcatcgacctcaagctcgataagaagtga

SEQ ID NO: 361404 - DNA, 1065 bp, Pseudomonas aeruginosa
atggcttataacgcaacgactcagatattcagctacatggacgaagtgtccaaggagctggtggcgtcgaacgtggcgaccatcattgccgctgtgacaccgttggttgccctgggtttaaccattgttctcatggtcgaaggcgcctttaaactctacggcggcgacggcgagccgctgacagacatgctcaagaagttcgcattctggggcctcattctgagcatatcgtcggcaggcggttggtatcagaccgaactcgcggatgtagcgctgaaaacacccgatgagttcgcctcgatcctgattgtcgatggcaagtcgggttccaacgtgcagaacgaagtcgccagtaccatcgacaaggcgctggaaaatggcttgaaaaccgcgcagcgcgcctttgataacgcaggtgtgaccagtggcgcaggccttgcgagtttcttgctggctgctgcggtgcttctttccacggtgctggtctgcggtattggtgcggccctgattttgatggccaagttcatgctggccatcgcggtctgtttcgggccgatcttcatcatgtgcctgatgttcgactcgctgcgcgacctgttctcgaagtggatcggttcggttatcaacttcgggctgataaccatcctgttgtccgccaccttcggcctgctgatgaagttttacggcaaggcggtggcggcggcggctgatccggcatccaactcgccgatcttggtaccaatcatcacctgcggccttctgaccgtggtgacgtggttcgtcctcaagaagatccccgacttggcgtcgtcctggggcagtggcgtttcggtgcagttcgtaccgggccgtcaacgcccaggcaagggtggcggtggtaacggtggaaaaggcggcggagccggcgctggctccggtgctggtgcaggtggggcggcaggtgccggtgggggtgcagctgctggagcagcagcaggtgcggcagcaggccctgccggcgcagcggcaagcgctgttggtactgccatgcagggcatggccaggggttcacgccgagcaggctaa

SEQ ID NO: 361405 - DNA, 723 bp, Pseudomonas aeruginosa
atgagtcgggctgataagaacgaggcgatcaccaaggccgacatggccacgttccaagaagaacgccagaacctggaaacggatctgctcgatgaggtgctgaaatcccgtcgcgccgcctggtgggtggcaactgggctgggtgctctggccggcgtggcgttagccgtgaccggcttcaccatgtaccgctacagccagccggttccggcgcacatgctggttatgaatactgacggcactatccagcaggtgtcgttgctgacccctcaatccagctatggcgatgtagcagatacctactgggtatctacgttcatccgccattacgaaagctacgagttcaacacggcgcaggcggactatgacgctactcgcctgatggctgcccctgacgtggctgaggattaccagaagcgctacaagtggggcaccaaggaagccatggacaagaccgtcggcgaccgcaagtctgtcaaggtcaaggtttcctcggtcatcctcgaccgtgaaacaggtatcgcgacggttcgtttctcaaccactgaaaagtaccgtacacgcggtgccgatgaggccccccaatactggatcgctaccctgtcctatcgctacgacaacatggagctgacagcggcgcagcgttacatcaacccggctggattccgcgtctattcgtaccgagtcaatgccgaatcggttgccaatgggggaagtcgataa

SEQ ID NO: 361406 - DNA, 879 bp, Pseudomonas aeruginosa
atgaatctcaaattcgctattgcaactgccttggctgcggcgctggtatcggcgcctgccctggcgctcaacgagaagacagacagcccctacgactatcggatcaagacggtgatctacaacccgatggacgttgttcagattgacggggtggtgggcctgcaaacgctcatccagtttgccccggatgaggtctacgtgacgcataacttcggcgcgagcaaatcctgggagctggtcaacaaggacaacaacgtattcatccggccaattgacgaattgagcgacaccaacctgaccgtggtgaccaacaagcgaacgtatttcttcctgctgcactacatcggcagcaataccgtcaaaggccctgatggacagctgaaagaagagttcatcaagacgccctggagcatgcgcaaagccacggtaggcgtcatcttcaaatacccgttcgaagacatgaaggtcgctaacaagaagctcgaagaacgtcgcgttcgcgaggcgctggccaagggcaataacgggccagtgaacatcgcctatacccgctccgatgaagaaaacagcttggagattaggccgacccatacctgggatgatttccgctttacctacttcgagtttccggccaatgcagcgttgccaaacgtctacatgattggcccggatggcaaggaaaccatcccgcagacgcacatcgagggcgagtattccaacatcatcgtggccgagacaacggcgcgtgaatggcgggttcgcctgggtgatcgcgtggtgggtgtagtcaatggtggttacaacccggcgttgggcgctagcaagaccggcaccaactcgcccgaggtcaagcgcgtgttgaaagggggtgaggaatga

SEQ ID NO: 361407 - DNA, 1158 bp, Pseudomonas aeruginosa
atgagccgcgacgttaatatcgacgaactggacacgttcgaggacgaccgaggcgggttcgatggtgggccgaaaaagaaagtgccaggcctgcgagcgttcatcggcgtgctgctgctgattgccctgtgtctcattagctggatcgtctacaaaaacgtgattgtgccgaaactccagcagcaggagcaggccgaaaaagccacgcccaacagggccaagagcctgccggatgtgagcttcgcaaccacgcctgggaacgccgaagacgaacctgctgagcagcccgccgagcaggcgcaagccgccagtacccaccagcagccggcgcaaccgacccagcccggacagcagggcaaggtcgagctgacgcctgagcaaaaggccatgcagcgccggctcagtgcgtcgagcgccacggagcaaatgcgcggcgtgggtgcagccgccacgcctactcgcggtgagaaggccgagccggtacaaaccagcagtggcagttcggagctggccacgcgcatgaacagcgcccggtacaccgcatcgagggcgacactgatgaaaaacatgagcatgtcgatagccgctggcacgatgattaactgcggtacgatcactgagctggataccactgtccccggcttcgtttcctgccaagtgtcgaaggaagtccgttcggctgatggttcggtggtgctgatcgacaaaggcgcgaagatcacaggcgaagtcagtggcggcattctgatgggccaggccagggcctttgtgttgtggtcacgggtccgcaaccgcgacggcgccacggcctacctcgatgcacctggcaccaaccgcctcggcagtgccggcattcctggccaggtcgatacccacttttgggatcgctttggtggtgccatgttcatttccgtgttcagtgacctgagccgtggtctgatgcaggccctggtgaactccaccgacaagtccgacagcgacacgacggtgaacctcgacaacacgtccaacacctccgattcgctggctcgcgaagtgttgcgcgccacgatcaacatcccgccaaccctgaccgtcaaccacggcgaggctgtgtcgatcttcgtgccgcgtgacgttgatttcagcgatgtgtatggcctggaaatggtggagtga

SEQ ID NO: 361408 - DNA, 1032 bp, Pseudomonas aeruginosa
atggatattgcgaccgagcgcgacctggctttagcagacatggacatggccctggcggcggcgaacttcgccccgctgcggcagtacctcgatgatcctgaagtgttcgagatccgggtgaacaagttcggccaggtggtatgtgacacgcccaaagggcgtgtcttgcacgccgacccacggatcacctacgactacctgtgggccttgaatgaccatctactgagcctcaacggactcggccgcacgcctatcagctacgtgaagttgccggatggatcgcgggggacattctgctggccccctgcgactgtcgaagggaccatgctcatgtcgatccgtaagcatttgcccgtatcgaaaagcctggcccagcttgcccaggaaggccgctttgccaaggtgcgacaccgtaagcagtctgagcaattcactcttgagccgttcgaggaagaactgcttgagctgttggaaaagggtgacgtggaaggcttcttgacactggccgtcaagactaagcggaacattgccgtagccggtcctaccggctccggcaaaaccacactcacccgctcgctgatgggtgcggtgccgaagattgagcgtgtgctgctgatggaggatacgcacgaaatcgacgatgaccgtctcgatgaggtgggctatctgatgtacggggaaggcgatggccgaatgtcggcccgcgaatgcctcaagctgtgcatgcgcctgtcccctgaccggatctttctgaccgagctgcgcgacgatgccgcatgggattacctggccggcgcgaacacggggcaccctgggggcattttctcgacgcacgctgacagcgcggccagcactccagcgcgtattgccacgttggtaaaggcctcggaaatcggtcgggcgctcgactacgacgtaatcatgaagaccatcaacaccacgttggatgtagtcgtgtacatggaaaaacgtgaagtgctggaaatcctgtacgacccgatgttcaagaaacaagcaatggcagcggtgtag

SEQ ID NO: 361409 - DNA, 552 bp, Pseudomonas aeruginosa
atgaccgaagcaaccaatatatggaccgccaccgcttccgagatcaccaaggcggtacgtgaaagccttatcgccatgaattgcggcgagccaggtccaggcgatgtctatgaccaactgatgctgcttggtcgcagtggcctggaagagctggtgccgtccgtgcgcgagattggcgcccgagagttcgatagcgtcatggctgtagtagtggacctgctgggcggcgatggcattgccgtccacggtgagctgcctatctggctccgtgtttaccctaacgtagaaggtcggctcccagcctacagtgccgatgactggcgatggattcgcctgtccactatccaagaggttcagccgcgccgcgcaatcgccatcggcgatgattcgcgtacctggcagttcatggtcaacgttgttgccaacggccaggtatacagcgctacccagcgcctgttcctcggcgcgtcggtagaaaagccggtagaccgtctgttgacgttggttagcgccgctgtgagtgaagaacagcgacgccggatgcaactgtga

SEQ ID NO: 361410 - DNA, 741 bp, Pseudomonas aeruginosa
ttgaagcaaacaaactggacggttattggtgtggcccgatggtacgactggaagctgggcaagctttccgaccgggacctggccaaactggtcggaaccagcgagggcagcatacgccgccgacgtgttcagttcgggatcgaggtttactcggtcgcggtggccatcgccccttaccagcacctgctgggcgtggagtcggacaggtctgtctcggccaaatgtggtgtatcggtgaagagtgtcaaagcttaccgcgagtcccagggcatcaagcccaggtccaaggccacacggcgcattcagcgccttccgctcgatcatcccgtcaggccgtacaaaagcgcgctgggcctggttcccgatgaggacattgcccaggcctcgggcgtggccgtagaagtcgtgcaggcgctgcgcgaggcgttcggcctggatgctgtggcgccctcccctgacctggccaggccggcgcctgtcgaggactaccacggccccggactcggttacgaatcgctcctgggcaccatgtctgccgccaaaatcagccgcgaagtgggcgtgcccattggggttgtggaagctcgccagcagtacctgggcattgcaccctatcgccgggtatcgcgtgcggagcggtacgcgcatttgttcggtctggtcccgaataacgtgctggccaaactcgcaggcgtgtcgcatgagcgcatcgcagacatgcgccggtcgagaggcgtctag

SEQ ID NO: 361411 - DNA, 2955 bp, Pseudomonas aeruginosa
atgctcgatatcacgaccatttctcggcaatcactgggcaaagtcgtgtcgtactacgcggatggtgcggatgactactacgcgaaagacggcggcgccatgcaatggcaaggtgcaggcgccgaggcattgggcctgtccggggaggtagagcaggcccgattccgcgagctgttggatggccggattagcgacagcacgaagcttatgcggaccgtcaaagaggcggatggcaaagtggtcagcaaggaaaggctggggtacgacctcaccttttcggcgcccaaaggtgtgtcactccaggccttggtccacggggacgccagtatcatcgaagcccacgacaaggccgtggcagcggccattcgtgaagccgaacggctgtcccaggcccggataacggtcaacaagaagaccggcaccgagaacaccaacaacttggtggtggccaagttccgacacgaaacgtcacgcgccctggaccccgacctgcatacccatgcgttcgtgctgaacatgacccagcgtagcgacggcgaatggcgggcgctgaaaaatgacggcgtgttcaattcgtccatgttcctgggcaacgtctacaaggcggaactggcccgcgagctggaaaaggccggcttccagttgcgctatgagcgcaacggcacattcgacctggcgcatttctccgacgagcagatccgcgaattcagttcgcgcagccagcagatcgaggcagcgcttgcggcgaaaggcctggaccgcagcacggcgtcgtatgccgaaaagaaccaggctgcgctggccacccgcgacaaaaagcagggcgggatcgaccgcgaagagttgcgccaggtttggcttgaacggtcgagagccttgggtatcgactaccacagccgcgagtgggccggcgtcggcgccgatgcccagggcggcagggagcgaaacagcgcggccacaccgcagatcgagaagcccctggagtaccgtgccgaccaggtgatcgaattcgcgatcaagagtctgaccgagcgccaggcggtgatcggccagaaggagctgatggataccgcgctgcgccacgggtacggcgccctcaccatcgacgacgtgcgcgccggcatcgagcggcgagccgcatctggccacctgatccgcgaggaaccgctgtactcatcacagaacccagccgatgggaagaagggcaaggccgccgagaaggcccgtcaggaggcgccacagcttagccgcaaggaatgggtggcaaaccttgtccgcgctggcaaatcgcgctcagaggccgccaggctcgttgacgagggtatccgcaccggacggctgcgccagggtgaaaaccgtttcaccacgcacattgcgcagaagcgcgagcgcgaggtgctgcaaatcgagcgaatggggcgcggcacggttcagccgcggatctccaaggaagccgccgaagccttccttgccgatcggggcttgaaggcggaacagcaggcctcggtgatgcggatcgctcgcacgcaaaaccagttcatcggcgtccagggctttgccggcgtcggcaaaagctacatgactgttgcggccaaggatctgctggaggcgaacggataccgcgtcaccagcctggcgccctatggtagccaggtgaaggcgctccaggccgagggcctggaggcacgcacgctgcaatcgttcctcaaggcccgcgacaagaagatcgacagcaacaccgtcgtgttcatcgacgaggccggcgtaattcctgcccggcagatgcacgaagccatgaaaaccatcgaggctgccggcgctcgcgttgtcttcctgggcgacgtggcgcaaaccaaagccatcgaggccggcaagccattcgagcagctgatgaaagccggtatggaaacgtcccggctcaccgacattcagcggcagaaagacccgcaattgctggaggcagtgaagctggccgccgagggcaaagccaagcaatcgctgccgctggtgaacgagatacgcgagatcaaggaagacggggcacgttaccaggcgattgtcgacgcctacgcctcgatgccgaaggccgagcgtgaccaggctctgattatcaccggtaccaacgccagtcggatcgagatcaacgaaggcgtgcgggaggcgctgggcctgaaagggcagggcgcggagtatccattgctcaatcgcctggacacgacccaggccgagcgccggcacagcaaatactacggcaagggcagcattgtcgtgcccgaggtcgattacaagaacgggctgcaacggggcgtgcaatacgtcgtactcgacaccggccccggcaacaaactcacggtgcgcgggccggaaggcgagacgctgcaattcacaccagcgcgttgcacaaagctgtcggtctacagcgtcgagagaacagagctggcacctggggatcaggtgaaaatcacccgaaacgacgccgaaaaggacttggccaacggcgaccgattcgtggtgaaggagatccacagcgaccgcgtcgtgctcgaaggagaaaaaggccgccaggtcgagctggacaccgcctcggccatgttcgtcggcctggcctatgcctcgaccgttcacagcgcccagggcctcacctgcgacaaggtgctcatcaaccttgaaacccagtcgcgcacgaccgccaaggacgtgtactacgtggcgatcagccgcgcacggcatgcagcggaaatcttcaccgataaccggcagaagctgggggccgcgatcagccgcttgaacgccaaggccggcgccctggatatcaagcagctccagcggcacgcgctcgagcgcaaaggccacgaccaggccggcaaacagaaggatgccgcgcagaagcagcagcaaggccagcagttgccgacgaaacagcccaaagaaaagggcagggcattcggtctgtaa

SEQ ID NO: 361412 - DNA, 1539 bp, Pseudomonas aeruginosa
atgaacgagcgccaacgatctcaaatctgcctcgccgtcatggtgctggtgccactgttcgcgtggttctttaccgccaagctgatgtatggaattgaaaagcaaggcgcccgagacagggtgttttacctggcaaaaaacacgttcaccttgtggccgcttgcggttgctttagttggtgggctgatactcgcgattgcgttgtgtgtgcttatcgtgaagttgagcaagacgacttttgccggcgctcacttcgataagtatttccgtggtagccaacttgtttcccagcgtgagcttaaaagactgacaaaggagaaagaggaacaaataactattgccggggtgcctgttcctattgctgccgaggcgacacacttctcagttggcggcgccacgggtacgggtaagagtacgattttccgcgaaatgatgtacggctgcatgcagcggaaagatcgcatggtaatccttgatccagatggggaattcttatccaccttctatcgcaagggggataaaatcttgaatccctatgacgcaagaaccgaaggttggaacttctacaacgaaatccgtagtcactacgatttcgagcgctacgcaaaatccattattcaggtgtcggacagtaacgattcggaagaatggaaccagtatggccgcctgttgttcgcagaggtggctaagaagttgtacaacaccacgcgcaatcctggcatgcgaaatgtatttcgatggactaacgaatgcagttcggaagcgctccaggggtttgtaaaaggcacccgcgccgtatcgttgttcactgaaaacgagcgagctacaggcagcgtccggtttgtcctcagtaataaacttcctgcgcattttgatatgccgcctggcaatttttcgctgcgccagtggtgcgaagatcctaacggcggcaacttgtttatcacctgggacgagaacatgcgcgaagcgctgcgcccattgattagttgctgggttgataccattttcaccagcattcttgggatgaagtccaaccccaagcgccggatctggacgtacctcgacgagctggagtcgctgcaacgtttgcccaccctgggcgacatgttgactcggggccggaagaagggcggttgcgtggtatcgggctaccagtcctacacccagctcgaatcggtgtatggcgagaagctggccgaaaccatgctggccaaccaccggacgatggtcgccctggccgttggccgcatgggtacggccaccgccgaacgcatgtccaaagccttgagcgagcatgaagtgctgcgcacaaaggaaggtcgcagctcgcgctggggtgactggggcactcgcagcgagaacgaggatgtgaaacccgagcgcatcgttatgtcgtcggaaatcatggccttgaacaacctcgaaggcttcctgtcgttccctggcagcatcccgattgcacgggtggccatcgagccgatcaacttcacccgcacgaacccggtaccgggcatcgtcccaaaccttgagatcatctaa

SEQ ID NO: 361413 - DNA, 330 bp, Pseudomonas aeruginosa
gtgcccacagtgagctttcgatgcaccgaaacacagaaaatcgagctggaagagcggtcccagggcgatatttcggagtatgtacgccggcagcttttccggcagatggagcaggaggacacgctagaaatcatcctccagcgcctcgaacaacggcctggcagtgacggccaaccgaccgctggaatggaccgtcagtcgatggccatcttgatcgagctgctgttgctgctacgcaccgcgtccaaaccggatgctaagagggaagcccaggccgaggtcgagcgcctgggcttcgacgtatgggattcatcacagagggaaagctga

SEQ ID NO: 361414 - DNA, 705 bp, Pseudomonas aeruginosa
atgaaacgagcgatcttgaactacagcggcagcatcggcaaaaccactattgcagcgcacctgctctaccctcggatgccaggcgcggcattctttgccatcgagtcgattaaccagtcggccctggacttgggtattgccgaagtggttacgatgcgaggccgcgaagcgggcgagctgattgaggatttggtacttgaagacatcgccattatcgacattggcgcttctaacatcgaatcgttctttgaggctggatcgcgctatcacggtttcattgacgaaattgaacagttcatcattccggtaactcccgagcaaaaggcctggcaggaaagtttgaaaactgttgaggcgctggcgaccatcggcgtttctcctgatcgcatcattctgctgccgaaccgaatccgtgataatcccgaggccgaaattccgtcgatctacaactatgtaaagaaaaccaagaaggcgaccatcaaaccgggcgcgttcctgtttgacagcgatgtttatggttatctcgcggccaacaaaatgtcgttcgatcaactgattggcgaagataccgactacaaggctatggccaaggccgaaactgatgttgagaaggccaaggaatatgcacgccttcaccgttggacaagttacgcgaagcccgttcgcgctaacttggacgaatgcttcgccgctttgacggcctaa

SEQ ID NO: 361415 - DNA, 384 bp, Pseudomonas aeruginosa
atggattctaggaaaccgagagaagaagtattaattgagtggttcctgggcgactcgaaagagatcctggccgatctccagggcgcggtcgcggcggcccgtgaggtccaccagtcgatgcaggaggccggcgcaagcctggcctccacggtcgaagacgcacgcgccgagctggtgacggccaatcgggagctgaccgccgcgattcgggaaaccgaggcacgtcatgacaaggccctggagaagctggaccgccaggccaagagcctgttggccgcgacccagcggcggacggtatgggtggcggcgatctgcgccggcattgccggcctggccggaggcctgggcggtgccctgctcttctaccgcctggttgccggctag

SEQ ID NO: 361416 - DNA, 780 bp, Pseudomonas aeruginosa
atgtcgctactgccgactcatgaggtctatgccgagctgcaactggcgtatgaacacttcaacgtccagctgttcgacggccagctaccggactgccttatcaccctccagcgtgaacgccgaacctacggctacttctcgcgcaagcgcttcgcccgtcgtagcggtgaaatgaccgatgaaatcgccatgaaccccggctacttcgcgattcgctcattgcgcaaaacgctgtcggtgctggcccatgaaatggtgcacctgtggcaattccactttggcgcgcctggccggcgtggctaccacaacaaagagtgggccgcccgcatggaagccctgggcctgatgcccagcaataccggcgcacctggtggtaagcgcctgggcgaacaaatggatcactacatcatcccaggcgggcgctttgacgtgagctgcgcggagctgctgacgcgggacttctccctgtcgtggtacgaccgtttccccccggagcgaccgcaaattgacccgccgaccggctcgaacggtcgcgggtttgtcgatgacgtagacggtgaggacgaaggcgaggggcaagcggtggatcagggcggcgatgaactggggccgctcggtgagctggtcgagctgccgcccgaggtgccgccgaaccggtcaaaccgggtcaagtaccggtgcccgaagtgcgctacgcaggtatggggcaagcctgagctggcgattctctgcggcggcgagcactgcgccgggtcgccattccagccggtagcacgatga

SEQ ID NO: 361417 - DNA, 261 bp, Pseudomonas aeruginosa
atgcgaagcgaaccggagttgctgcctggcctgatcctgccgccgagctatcaggttgtgttgcgcaggcgcctggccgaagtgaacaccgccaccagcgcggccaattgtttgattgcccaggcccgcgccgagggcatggtggaggccctggagttgctgaaagcgcttgaacaacagcaagttgagcgcctgtatttgttgatcgagcaggccgccacagcgcgcttgctggagctggaacagggtgccggcgagtga

SEQ ID NO: 361418 - DNA, 309 bp, Pseudomonas aeruginosa
atgtccagtgattacgatttcaaggttgtgagcaaggaagacgcggtgcgttatctgctggtgtgggagtcgaaaggctataaccgcctgctcgatgttgtgcggatgttcgacatggaggatggcggcgtgaccgttggtttcatggactacggcaacccggataccgtggtgatcgtgcccgagcacatgaaccgcacgtacaccaagcaacagcacgccttggcggcggtcggcgcgatgtttgatgcggtcgatgagtggaacaaggtcatggccgaagtgcgccaggtcgtcggcgaaaactga

SEQ ID NO: 361419 - DNA, 813 bp, Pseudomonas aeruginosa
atggccagggcgcgtattcacctaaccccagcagaagcggaggccaacggctggctttgctgccgcgatctcaaggcacgccaccgactaatgccggggtatagcacccggcctgccggcagcgtctggcaaggccgcggcgcctacgatgtatacgatcctgctgattgcgtgccctggaagtgggagccaagcgcggcgcagcttcgccgtaaagccgtggccgcccgcgcccaggcactgatcgggggtgattgcctgctgctggacactgaaacaacgggcgtgggtgatgacgacgaggtgtgcgaaatcacgatcctcgacgccagcggcacccccctactcaatacgctggtgcgcccgactcagccaatcccagcggagggcacagggattcaccgcatcaccaatgacatggtggccaccgcgccggcctggccggagatcgcagagcaatacgcctctatcgtttcgggccgaacggtcgttgcctacaacgcctcctttgacgtgcgcctgctatcgcaaacccaccagtgccacgggcttgtcgcgccaacgctggccaccgcctgcgccatgctgctgtatgccgaatggcatggggaatgggttgagggccgctatgggtgttggcaatggcgctggatcaagctgatcgaggcagcccgtgcatgcggcgtgctggaggatggcgcccaccgttccctggccgatgcgcgcatgaccctgggcgtgctgcgttacctgcacaagcgcaccaatgggcgcaaaccttctaccaaacggagtaccgaacatgtccagtga

SEQ ID NO: 361420 - DNA, 528 bp, Pseudomonas aeruginosa
atgactgagctggaacaagccattatcgattgcgcccaactgcacctcactcagttgaaaggtgcgcttaccctgcccgatggccccgaacggagcgacggctttacctcggcatggtggcagctcaccggcctggcccagcttgccgagttccacagcgggcttagccagcccgcccgcgatcagttgcgcgctatcgaccgtgaggccgcccaggccgtcagcagcaaccgcgagtcgtccggtaccgcgcagtttgccgacagcatcgccatcacactggccgaccccaccgcctcgaactggctcaaacagagcctcaaaggtgccttggaacgggatagcgcggacgccgccaatgacgcccatgtgcttttcgagctgctggcccaccgcagcgagaaagagttgcgcgccgccgtcgccggcacaccggaaacgaccctagctgtgcgctttgcagacggtcgcactggcacgctggacgtgtcccaggcccgtcacacgatcatcactggcgacaactga

SEQ ID NO: 361421 - DNA, 435 bp, Pseudomonas aeruginosa
atgagcaaaaagacgtacatgctcgatacgaacatctgttcgttcatcatgcgcgaacgccctgacgcggtactggccaagctggaacaagcagttacccaccagcaccgggtagtcgtttcggccattacctactccgaaatgcgtttcggggccgccaaccccaaggcatcgcccaaggtggctgcgatggtcaatgccttcgtggagcgcctggacgccatcctgtcttgggacgccgccgccgtggatcaaacaacacagatccgcaccaccctcgcccgcctgggcacgcccatcggtaacaacgacgcggcaatagccggccacgccctggccgctgggtgtgtgctggtcacgaacaacacacgcgaatttgcccgcgtgcctggcctagtccttgaggactggacccaacccaccaccaagagttga

SEQ ID NO: 361422 - DNA, 237 bp, Pseudomonas aeruginosa
atgcgtaccgtttccattttcatgaacagccgaaaccaggcgatccgcatccctcgggatatggagtaccagggcgtttccgagctggaaattatccgcgacggcgaaaccctgatccttcggcctgttcgcccttcctgggcttcgttgcgcgacgtggcacccgcagatcctgactttctgaccgagcgaaacgacgtgatcgaggaaggccgtttcctgggtgacttcacatga

SEQ ID NO: 361423 - DNA, 426 bp, Pseudomonas aeruginosa
atgctcaaccgctgcttacctgcgttgcttttgggggccgtgctcaccacgccggctcatagcgctgactgccggttgtcgttccagaatggcgcgaccctcgacctacccgtggccaccaccgaagccgcacaggcgcagggcctcgccggtcgggcagatccagggcgcggcatgctgtttctctggactacgccggcagtgcgatttgtgtggatgaagaacacccccgccccattagaggcggcttggatcggtgcagatggggttatccagagcgtgcaggagctggagccagacacaaccgccaaacattcatcattgcggcccgccctcggcattatcgaggtgccacgcggccagtttgcaaacctcggcatcgagcgcgggagcaccatcaccgcctcaacgtgtttcaacttgtag

SEQ ID NO: 361424 - DNA, 312 bp, Pseudomonas aeruginosa
atggatagcactgtgcaaactacgcaacgcaaagccctgtatgcctgggcctgggcaatctggattggctttgccgcgtggctggcttatcacggcctcatgcaagagacgggcttcgattggctactgttcgcctttgtcgtagtcattcccaaaggctttcggggcgctctgtacgcctcgacggcgcctcaaaacagattcagcgagggttacagcgccaaggataagcgcctgccactgtactgggttttaaccctgctcttgttcgctatcaacctgggccgaaccatcaccgacttaatgagttga

SEQ ID NO: 361425 - DNA, 651 bp, Pseudomonas aeruginosa
atggcactcaccaaggaaatgatctggaaggccgccgacgaactggacgctgacggcactaagcccaccctggccaacgtgcgcaagcgcctgggtggcgtcggcagctttacgaccattcaggaggccatgagcgagtggaagaaccgcaagcagcaagaggcccagccactcatcgacccaccaccacctgccctggcccagttgctggagaacttcggcgccgatatctggaacctggcccgtgttgctgccgaccaggccctggacggaaagcgccgagtgatcgaagagaatgccgcgcagatccgcgagcaggccgaggaagcgattgccctagctgatagcatggatgcagagctgcacgacctgcgcgccaagatcgcgggcctggaggaaaccgcagcgctgtaccgcgagctacaggccaactatcacgccctggaagaacgtgccgagctggagttgaagcaccagaaggaccacagcgcccaggagatccaccgggctgtctccagggccaacgaaaaggactccgaagctatcgaggcacgcaagagcgaacgccaggccctggaccgcgcagcacgcgccgaaggtcaggtagaggctctggaaaaacagcttggcctggctaagaaggacaagtaa

SEQ ID NO: 361426 - DNA, 264 bp, Pseudomonas aeruginosa
atgtatgacgaccagccacccttcgcaccgttgcctcctaatgagcagcaggtgcgcttggaaaaagttctgctggaaaccctcaacctgatgaatgactgcccggacggcatgagccacgaccgcacggtctactacggcatggcgcagggcttgctgtcggccctgttcgtttcggggatcatcaagccgtttgactatgagcaacgccgcgctggactggtgtgggagtaccagtggggcaatcaggacaacccggagtga

SEQ ID NO: 361427 - DNA, 1137 bp, Pseudomonas aeruginosa
atgtcgtccaatgagttgtttgatatcgatcccgacctggccacctcgccactgccgaaacgtcgctcagcggccaaagcccccttggtcgggcaggacgcaatcaacatcgacaagtggcgcaagcgcattgaggccgaagcccggccaggcgaaacctaccagcaggcggcggagcggctgaaacgcgaagaggcgaagcagccgaaggacaagacaccagggcgcgaggcggtgaaggcctcagcgggccgcaagcaagttgtggtgctcgaaacgcagctcgatttctggattgcgaccggcctgccggcgatccccaaggacgagcggcctacaatggagcacccgatctacgccgtggaagacggagacaccaggcagatcacctacgagcacaacgggaacaagatcgagatcattcccagcgttgccggtcgggcgacccagcatgacaaggatatcgtgctgttttgcgtgtcgaagctggtggccgcgatcaacgccggcatagccgtatcaccgactatcgagacgaccgctcacgaactgttgagcttcacgcgcagcagtaccagcgagcgcggctatgagctgcttagcaaggcgttcgacaggctcaccggtactcgcatgcgggccacctttgaatcgacgaaagaccgtgacggtagccggcgctgggtgggcctgctcgatgacgtggagatcatcaccaggggcgccaagaaccgcatgtgcgccattcggatcaaggtatccgacaccacatttaacgctgcgaaagccatggatgtgttgaccattccgggcgactatttcgggctacgcagcgccatcgccaaacgcatctatgagctttgccgaaagcattgcggcgaccagggccaatggaagatcggcctgactctgctgcaaaagaaggtcggaagcgcccaggcggaaaagaagtttcgcgccaaggtcaaggagctggccgaggccggcagcttgctcgactactacatgacctacctgcccgacgaagacgcggtgttgttcttcaacaagtccgacgccggcaaagcggccttgctcaaagccacgcgcaacggtatcaagacgccacgcaaagcaaaggccgcacccgctgcatga

SEQ ID NO: 361428 - DNA, 618 bp, Pseudomonas aeruginosa
atgcgtaacggcaaagactcttcaaccctggacatattgaccggaggcctgcgcattgggtacgcccgaaccagcaagcaggaccagaacctggacctacagcgagacgcgcttgtcgccgctggttgtacgaggatctatgaggaacagatcagcggggccagggccaaccggcccgagctggagcagatgctaaaagcactccgcccaggggataccgttgtcgtgtggcagctttcccgcttcggtcgcagcctctcccacctgctccagctcatggcgcaactggaagccatgcaggttcgctttgaatcgctcaccgagcacatcgacaccagcacggcgggcggacggatgcagttgaacgtcttcgccaccctggcggagtacgaacgcgagctaaaccgcgaacggaccatggccggcctggaggccgcccgcgcacgtgggcgcaaagggggtcgcaagccgacgcttggagcgaaggagatccgcgatatcaagatcctgctggccgatcccttgacgaccgtcagcgacgtggccgccaggttcaaagtcagcagaaccaccatctacaagtatctgagcaaggaggcccagcatgtcgtccaatga

SEQ ID NO: 361429 - DNA, 261 bp, Pseudomonas aeruginosa
atgccgaaaccaatgcgcccaaatatgaccctgcgcgagcaggaggatgcagccaagatccagtgttacgactggaacgcccagcacaaagaaggcgtcaccgtgacctatgaagagttgcttggctcgggcgagacgatccagaccaaaacctgtggccgtgcatacgtcatgtgctgccaggcggtcatcagggtggaggatgtttcgggcgcggtgtccctggaccactgcaccgttgtcgcagagaaagccgcgtag

SEQ ID NO: 361430 - DNA, 1089 bp, Pseudomonas aeruginosa
atgctcagtacgcagatccgcccagcacaacctgggctgttcatcggccagaccctgggcgttgacgatttcgagctaagccagatcgccgccgagttcagcaccatgagttcgggcgaactggaacaccacttgttcgacgcgcccaggccgtccgagatcgtgcgtctggccgacaaggtggcccgccacacccggtcacacggctggcttgaccaggccgccgcccaagcccgcattgccgaatggaagcgccacgccttcgcccagggcgaagggcgggccaatgccgacaaggtagtgctgtcgctgttcgaccacaccgggcactggtcccagccgtgggaggatgccggctaccaggtcctgcgcttcgacatacaggacaaccctgttaccggcgacgtaaacgagttcggcgccggcttcttcggtgactggtttggcgacttcgacggcctagatatctacgccattcttgccgcgtgcccgtgcacagagttcgccaccagtggcgcccgacacttcgcagccaaagacgcagacgggcgcacggttgccgccgtgcagctcgttcaccagaccttgcgcaccattgaatatttccggccttccgtatgggccatcgagaacccggtaggccggatcgagaagctaggcggtctaccgccgtggcgcctggccttcgacccgcaccacctgggcgacccgtacacgaagaaaaccctgctttggggccgcttcaatgcaaacctgcccattgccccggtcgaggcctcggacggttcgaagatgcaccgcaaattcggcggcaaccgcctcgctaccaagaacgcccgcagcgcaaccccggaagggttttcctacggcttcttcatggccaacaacgcccaggacaacccggcgctggccatggcctacaagtacgaccgactcgacgccggcctgctacgcgccgcgctcgatgctaatgtgagcgcccgcgagatcgacgagctggtggcggatgcttactacatggacatggacgatagcgctgccgagtcagcgctacgccaagcgatctctacacagaacccacctacatag

SEQ ID NO: 361431 - DNA, 348 bp, Pseudomonas aeruginosa
atggcccccgccacccagcacgtagcgcccatgtggcgctactcccttcggtggtgcctgccgcaccagccctgccctggcgactttgaattgctggtgatcgaggccccagcggggacgcggatgccggaagaaatgcacaaggcatggcagcgccgccccgagggttacggtgtttgcctggacttcccccagtcccgcgccgtcaagcgctggagtgccgaggccaaaggccgggtacgcaagcagaagatggccaagcgcatcgagaaggccgcgccgctgttcgcagacgagttgatcgcccgcgagctggagcagcgccccgactacttcaagggggagtga

SEQ ID NO: 361432 - DNA, 369 bp, Pseudomonas aeruginosa
atgagcgcttacgttgttgatcgtttccacatttcggccatcctcatgttcacctgcaccggcaggcctggccgcgaagcccgcgagatccttgagactcagggccagcaattgctggatgaaaacgtgcgttctgtgcgggtccgctacccccgcgaaaacgtccccgacaagctgttcctgctggataccgacgtgcgccggctctctgccctggaagtgctcaagctgatcgaatgcctggagcaccagtcgagcgaggccagcgactactactcgacccctgcgtttcgcactctgcacgccattcgccagtcggcacagcgcaagctgcccggttgggaccaggccaattgggattacgcctga

SEQ ID NO: 361433 - DNA, 240 bp, Pseudomonas aeruginosa
atggccagaatggcaagcagtaccgacttgcccatgccggtcggcccggcgaccagtgtgtggcccacgtcgccgatgtgcgtgaccaagcgaaaaggcgtcgcgccatcggtgcgggtgacgatcagcggcgggccgtccagatggtcgttcttctccggcccggcccacaccgccgacagcggcatcatgtgcgccaggttcagcgtcgagaagatgggctggcgcacgttcgcgtaa

SEQ ID NO: 361434 - DNA, 657 bp, Pseudomonas aeruginosa
atggaacggtacttcgggtacgccgagccggtagcgccgcgtcgaaaccgtcgcgtgcaggccggtcagcgtgtcgtcgtcatcgagccaggcgatttccggcatcacgccatcgagcagatcgaacacgcgatcggtttcagccacgaaggcatcgagccgaccacgccagtccacgccgtcgccgggcgagttctcgtagagcagcttggcagcgcgggcgcgcgattcctccggcgggaggaacaccatcgtcaggtgataaccgctctcgaagtgatggcccgattcctcgaaggcggcgcggcgttcctcgtccaccaaccaggacagcggctcgggaaaatccgagtgcggatagcccgcagccggtcggcgctcggcctcgatgaacaaggcccagcccgaacccaggcggcgcagcgcgttgttgagccgcgcggatgcggcgatcaactcgccttgcgtggcgctgtccaagtccggcccgcgaaaacgtgccgtgcgctggaaagagccatccttgttcagcacaacgcccggcgcgatcagcccggcccagggaagccagtcggccagcagcgcgggccgctggcggtattcggcaaggttcagcatggcatcgtcctcacacgtccagcagcggcttgtgcttga

SEQ ID NO: 361435 - DNA, 387 bp, Pseudomonas aeruginosa
atgtatatcgccttcaaacacttgcacatcttaaccgccgttttatccatactgatgacgggaatttggtcactcttggcatggaagggggatgctactggtagtcgcggtatgaatagtagagcgaaagcgatctacatctcccaccgggcagtcgccggcttagtagccattaccggtttggcaattacgttcattggcccctggcgaaccatgatatttccctacgtgggtttggtggtatttgtctttcatggcatcgctgctactgtgtccaaacggactttcaccaaacaagatcaaaccgccatccggcggatcgcattgatagctcagatcgcgcttatcctgctggtaacgtacgcgatgcgtgtaaagaatttctag

SEQ ID NO: 361436 - DNA, 138 bp, Pseudomonas aeruginosa
atgcagatggaaaggattcgggtcttcgcccgtttcgtcgctccaatcgttgggcacgctgacgacaatacgcccacccggcgaaaggagacgatgaaattccgtcaaaagcgcttcagggtgctcgacatgctctag

SEQ ID NO: 361437 - DNA, 1017 bp, Pseudomonas aeruginosa
atgccgggtgtaggtacgcaggtcgtccagctcggcgccggcctccggggagacgatgaagcggaaatggtgccggtcgtcggcggcccgctccttgaaggcgtcgaggtcggcctcgtcggtctgcggcccgtaggcccggcccggttcgccatcgcggccggcgccgtcgcgctcgatgtagcgcagatgcttggcgagcgactgcgggctggcattgcgttgattgaccagcagggtcttgatcgtcacgcgccgagacatgggcgtcagcttcgccccggcgaaacgcgccgccgtatggccgcgtcccaggcgcgagccgggccgctggcctgcgcgctggccctggccgccggacgcggcggaatggcgcatcgaggacttgccgccgctggccttgccagcctgcttgagcaccttggaaacgaagctatggccctggcccttaccccgattcttcggggcgctggggcgcacgcggaaatcgtcgtcgcggcggtcggtcatagccgctctacctgcaagctctggcgtgtcccgtcgtgcgaagcacgcggacatgcctgcattggcgcgaccttcgcgccccacgcggcacggcggcggagccgctgcgtgccgcgccacccccatgtgcagacaggctctcgacgcggcctggtgccgcgtccttttgtcttgccttccgcctttgcccttcgctgtcgctccgggcgtcggcggcccggcggcgctgcgctgcttgcaacccgcccgccggcgaacgcgccaatggctgcaggccgggcgcgttcgaggcaagacgcctgcacgttggacggctgcgccggatgttgcgcgaggcgcggcgcggatgcgcccgcgctgcacgcgcgacgacacggcggcagccaccggaacgacatgcccgatggcacgatgagatgcacggcaacgtgcagcgaatcggcggccatcatgggcgtgtttccagccagaccggatacgcgacgccgatcacggcggatgcgctga

SEQ ID NO: 361438 - DNA, 225 bp, Pseudomonas aeruginosa
atgaagaagtcccgtttcaccgagacccagatcgtctcgatcctcaagcaggccgacgccggcgtgccggtcaaggacatctgccggcaggccggcatcagcgttccgacctactacaagtggaagtcgaagtacggcggcctggaggcctccgagctgcggcgtgtcaaggacctggaagcggagaacgccaggctcaagcggatgtacgccgagctggcgtaa

SEQ ID NO: 361439 - DNA, 1653 bp, Pseudomonas aeruginosa; identical to SEQ ID NO: 325132

SEQ ID NO: 361440 - DNA, 213 bp, Pseudomonas aeruginosa
atgcttacaccaacagaggaaaagggcgtgctcgattacctggcctgccttgaatgggtcgccagcgccgaggttgcagagatccgccagcgcctggaaacagcgaccggccaagtccgcgaggatctggtgactgcgataaagcaacaaatgggcgggggccgtcccgaattggcctggtacttccaccacctggccagcgagaaaatctag

SEQ ID NO: 361441 - DNA, 351 bp, Pseudomonas aeruginosa
atgcagcccacccagccgaaatacaccgccgaacaatggaccgcttccctgcctgcgctccggggcatgtccaccaaaaccctggacattgccagggcggtgctggtggagggcaaggaacctatcgaggtggccaacgagatcggccagtcgcggcagcttgtacacgctgcaatcaagcgcgttaccgccgtgctggaacgccaaacagtcggccttgtgcccgtcatggtctggctcacccccgaggaagccgagcaggtcaagcagatggccgccaagcatgagcagccaaaggaggcccaaccagggaccacaaagaagacacctaaccgacagaaaaaggcctag

SEQ ID NO: 361442 - DNA, 504 bp, Pseudomonas aeruginosa
atgacttacgaacgcacgttggaagcctaccgatcgttactcaaggccaaccctgggcatggcctgctcatccctggggattgcgtggcgtttctgctcgactctgaccagctttacgcctgccaggtgcaggacggtcggccacttctggcgtggatgtttccgatcaccgccgaagcctgggacgatgacgacgaagcgtggttgtgcgatgcgggcggcctggagacagccgacgcgatcaacgacccgcagtttgtgcccctgctggtatgggaccgccagacactggaaagcgaaaccgtggcggcagtcgccgccaaggttggtaccagtgagcagggcgttgccattagtatcgagcgcaacaacgaggggacgttttacgtcatctggaaagccaccgcccagggcgtcaaacggcaccggctccatgccggttccacagatgcccgccgcctggaagcgcatgcgcggggcttcatcgagcaaatgaaccagtag

SEQ ID NO: 361443 - DNA, 429 bp, Pseudomonas aeruginosa
atgtgcaaagtcttctatgtccctggccataccgcgatcatcgactatgcccgccagatcgcgccgaacatgtggatggcccagcattccgggctgatgctgcccgagctgcgcgtgcgttaccccggcgccatcctgggcgacgaagaggcgtttttgatcgatcaagaacgcgcctatggcacgccaccggcacgcacgaccgccgcccgtttcgagttcaacctttcgcagcggcccgtcatcgactaccacgccgacgagctgggcgcgtcgttcaagctggccgacctggaccacggcaacatgacgaccatttttgcccagtggggcgggcgctactggaccttgacgggcctggccaccctgccccacctgctcatcatgcgccgcatcgctacccactccctggccgtggccaaggcctaa

SEQ ID NO: 361444 - DNA, 837 bp, Pseudomonas aeruginosa
atgcgtctttccagcaacttccgtaacccgtgcatgatccgcagcgatgcccctctgaccaatgacgagattgcccgcgtggcgccttcgatctttgccgaggaagcgcacgacagccgttcggaacgttacctgtacattccaaccgtgaaagtgctcgatgcgctgcgcaccgaaggttttcagccgttcatggcgtgccagacccgcgtccgcaacaccgacaaacgcgagcacaccaagcacatgattcgcctgcgccatgccagcaacatcatgagcaaggaagcgaacgaaatcattctgctgaacagccacgacggcagcagcagctaccagatgatggccggcaagttccgtttcgtgtgcgctaacgggctggtcctgggcgacatggcgatggatcagaaagtgcgccacagcggccgcatcgacgttgtaaacgacgttatcgaaggtgcctatgaggtgctgggccagttcgagcagatcgacgccaaccttgacgacatgcagcactaccacttgcgccaggaagagcaagaagcgttcgccatggcggccctggcctaccgctacgacccatccgaaggccctgccccggtcacgccgtcgcaactgctgatgccgcgccgtgccgaagaccgcgcaagcgatctctggaccacgttcaaccgcgtgcaggaaaacaccatcaagggcggcttgcgtggccgcaacaagcaaggacgccggacaactacccgcgccgttaacggcattgaccaagacgtgaaactcaatcgcgccttgtgggtactggcccaggccctgcgcagcggtcaagccgccgcgtaa

SEQ ID NO: 361445 - DNA, 1155 bp, Pseudomonas aeruginosa
atggtcacgaccggggttcgaggcgtcgctggcgaagtcgcgcaggcgggtctcggtatccttccactgcaacgccaggccgccgctcaggttctgcgagcgcgagcggatgaagggatggttgtaggaaatgctgccttcggtgctcttgctgacgctgtcgaaggggaataccgagtccgggatgtccgggttgaccttcgaataggaacccatgatctgcagggtatcgccggcgaacatgccgcccagcggcaacgtgccgcgcaactggatgtagcgggtggcatcgctgaacggcgagatcgcaccgagcacgtcgatctgctcgtagaagcccaggcgggagaactcggtggcgccgaaggccagggtggtcgggtcggtgtagtgcgaaccgcggttgtcgaggctgacgaagccttcgtatcgctgctgctgcaaggccacgtcgaggttcgacgagcccagcgcctgacccgggctgagcacgctctgcacgttgacccccggcaggtcgccgaccagcagcaggccgcgctccagggtatcggcatccagcggacgtttttcggtcagcggtgcgagcagttcctccacccgcacccgcggcccatcgacggttcccttgatctgcacgtgttcgaggtaaccctcgatcacctgcaggcgtaccttgccgccctcgatgctctgctccggcaccactacctgggtcaacaggtagccgtcctggcggtacttggcggtgaggcggttggccaggtcgaccagttcggccagggacacctgcttgccgagcatatgctggtaataggactcgagcaccgccttgtcatagcgggtgttgccttcgatgcgtatctcgcgcagttcgaagcggatctgttcgctgccttgcggcgcgacctgcttgggcaccaccagcggcgcctcgggcttggcctgcggctcgctgcggggcttgaagcgttcatcgagctgggatggctgtacagtccctggcaactccacggcggcggcggaagctgccagcatcccgcagccacagagcgtcacccagcgaagcgtccattgcgaaggtttcatcattcacctcgggcagatgacgcactaccgcccggagacgatagtgcgcattgcgaaaagggttag

SEQ ID NO: 361446 - DNA, 756 bp, Pseudomonas aeruginosa
gtgtctacgaaaccaggggcgattcaattgaagaatgaaatcgtgatccatttggaggtgggagtagaaaagaaaataaaggaaattcggatgctcgcgcgccctgaaattttcggaatgaatattccgaaacttcttgatgacgggcggttcatcctgcttcaatttcctggaatggaacatccagtgggaattaatatccacgagtttttgatgatgcactgcatcaacattggcgtagacacagaagttctctatgtgggctcaactgacgaccctgcccggcggccacttaaacgaaatcatcgtggctatagcgattcaatctatggagtcaataccaccgagaaagatgtgtttgtttactataatttattcaaggcaatttctatttctcagcgtagccctcacaaccttcaattcatgcttggcaattcaatgattgatgaggtgcaaaagaaagatgaagggatgctgcttgaacatggtctaatccattattttggagcaaagagccaggaaaaaagcaaagggctggagtatggcaggcttcggagtgggctaaggaaactaaagcaaaaatacaacatttcctcagtaaactatcacatagaagctgaaacttcgactgaatactggaatctgtactcaagagaagtttctcgttccggtcgccatgaattttcgttggtactgcaagagaatcgggtgttgatcggcaaggcaaagggtaccatgactgatccacttggttag

SEQ ID NO: 361447 - DNA, 360 bp, Pseudomonas aeruginosa
atgatgcgtcccgaccccaaggtcaaagccgtttacctttaccccaagccggtcgatttccgcaaatccatcaacggtctggccgccttggtcgagttggatatcaaggtggcggtgttcgacccggcgttgttcgtttttctcaaccgcacgcgcaaccaagtgaaaattctgtattggcatcgtaacggtttctgtttgtggctcaagcgcttggaggccgagcggttcaagaccaaaccggatgccggtgacgaagcgatcgagctgacggtgcgggaattgaaccagttgctggagggcatcgacctctggggcaatcaaccgcacaaggtgctgacaccacgtttcgtgacttga

SEQ ID NO: 361448 - DNA, 1368 bp, Pseudomonas aeruginosa; identical to SEQ ID NO: 328458

SEQ ID NO: 361449 - DNA, 576 bp, Pseudomonas aeruginosa
atggccttcggctgcctggtgctcgcgctactgatggccggtggcctggtatggcgctcggcgcagtccatcgtgacgccttacgtcatcgaggtcgatcaggccggacaggttcgcgccgtgggcgaggccgccacgccgtaccggcccgccgatgcgcagatcgcgcaccacctggcacgcttcgtcagcctggtgcgctcgctgtccatcgaccccatcgtcgtgcggcaaaactggctcgatgcctacgactacaccaccgaccggggcgcggccgtgctcaacgactacgcccgcaccaatgatccattcgctcgcatcggcaaggaatcggtgacggtgcagatcaccagcgtggtgcgtgccagcgacacgtctttcaacgtgcgctggacggagcaacggttcgtcaatggcgcacccgctggcaccgaacgctggaacgccgtgctttccaccgtcctgcaaaccccgcgcaccgaacagcgcctgcgcaagaacccgttgggtatctacgtcaacggcctgtcgtggagccgcgaactggattcttccgaaggagccaagccatga

SEQ ID NO: 361450 - DNA, 576 bp, Pseudomonas aeruginosa
atggccttcggctgcctagtgctcgcgctgttgatggccggcggcctggtgtggcgctcggcgcagtccatcgtgacgccctatgtcatcgaggtcgatcaagccgggcaggtgcgcgccgtgggagaggccgccacgccgtaccggcccggcgacgcgcagatcgcgcaccacctggcgcgcttcgtgacgctggttcgctcgctgtccatcgaccccatcgtggtgcggcagaactggctcgatgcctacgactacaccaccgacaagggcgcggcggtgctcaacgactacgcccgcaccaatgacccattcgcccgcatcggcaaggaatcggtaacggtgcaaatcaccagcgtggttcgcgcgagcgacacgtctttcaacgtgcgctggacagagcagcgctatgtcaacggtgcgcccgccggcaccgaacgctggaacgccgtgctttcgaccgtcctgcaaaccccgcgtactgaacagcgcctgctcaagaacccattgggtatctacgtcaacggcctgtcatggagccgcgaactggattcttccgaaggagccaaaccatga

SEQ ID NO: 361451 - DNA, 978 bp, Pseudomonas aeruginosa; identical to SEQ ID NO: 336088

SEQ ID NO: 361452 - DNA, 141 bp, Pseudomonas aeruginosa
atgccgctggccaagctttcaatggatgaccgcgcctacatcgaccaggtgctgagcgagaccctggcgcggcgggtggtactggagcgcgtacgggactatttccgtcaccggaaaccaggagaagagcatgcgagctga

SEQ ID NO: 361453 - DNA, 396 bp, Pseudomonas aeruginosa
atgccggtactggctctgagactcaccgccctggcggcccttgcgatcagcgtgtcggggtgcgtcatggaggcctatggcagtcgcgcgcgtagcgatgcgcagtcctggatcggcttgccgatccaggacgtgatcaagcgcttcggcgagccggaacgtgtgacgggggatgccgccaggcagaagtacgtgtggaaggagtacgagaactatagccacgactacgactacacctactacgagcagggccatggcaatacgcccaacagctcggtcctgaaccagaagaccggcacggccaaccagagcggctattacacctgcatctacgagttctttgccgacgcctcgggcagggtggtcgatgcgaccgcgcggggtgagtgccgctag

SEQ ID NO: 361454 - DNA, 363 bp, Pseudomonas aeruginosa
atgcaaaccgaacccgccttcaccgaaacggagcttgcacgtcggtggaacgtcagcatcaagaccctgcaacgctggcgcagtgaagaacgcggcccgccgtacatcaagctctcaaaggccgtccgctacccagtggatgagatcgtcacctatgagcaggcgatccgcctgggcatgtccaacgaagcgccgttgccatctttatgcgacgcgcagcccgttgtcgaatctccaacgcccgtcgcccccgaaccaaagcggtactacttgagcgaggccttcgcgctcatcgcgcagtacggcagtcttgaagcggccgaggccgcgctgacggaggcgcgcgatgaaacccaaggttga

SEQ ID NO: 361455 - DNA, 549 bp, Pseudomonas aeruginosa
atgaaacccaaggttgatgccgatagacagggtgttgtgtccagcccggatgagccagtcatcacgtatccggtcctcgatgaaaaccagttgtcctcgaggtggaatctctcacccaagacgctgcaaaagtggcgctcggaaggaatcggcccgcctgcctggcacctcaacagatctatccgttatcttctgatggaggtcgaggccttcgagcgcaaggctcgggtcacttggaaatccccaaccggacgccctttgtccgaatcgtctcccacggcacgtgaagatgccatcgagcagatgatgcagaaacggcctgagcgccgtgatcgggttttctactccgccaaggatgtggtcgacatcactggcttgcccggttactggattcaccagaatcaggaacgcctgcggctcggcattccgttctaccggatcgcaaacggtgacgtcatccgcttcagcatcgaggaactcttcctctgggagatgcatcacctgcgcccatgccggtacccgatgaaagggaatgctgatgccccgtag

SEQ ID NO: 361456 - DNA, 630 bp, Pseudomonas aeruginosa
atggaacacactccatcaatgctctccgagacccacacccagcgcatccttgatctggccagccagagagggctgctgcgtgccagcgacttggacgccatcggctcgccccgggtcatcctgacgcgcatgactgcagcaggactgctggaacgggtcgggcgtggtctttaccgtctgccaggcgcacaggtgacggaatttgagagtcttgcccttgtcgccaccagggtgccacaagccgtgttctgcctgctcaccgcactccagtttcacgggctgaccacccaactaccgcgtcaagtctggatcgccatgccacgcggcagccactcaccccggatcgactatccgccgatccggatggttcagatggccggtagggcccatctgtcaggcgtcgaggagcacttgtgcaacggggtgaaggtgcggatctacagcccggccaagaccgtggccgattgcttcaaacatcgcaacaagatcggtctggatgtggcgctggaggccttgaaagacgcctggaggatgcgcaaggcgtccgcagacgacctgtggcgctacgctcaggattgccgcgtcgccaccgtgatgcgcccctacatggaggcagtcgcccacgagtga

SEQ ID NO: 361457 - DNA, 1080 bp, Pseudomonas aeruginosa
atgattgcagatcgcattcgtcaagcacgattggcggcaggactgaccctgggtgcgttgggcgaacaggtgggtgtttctcacaccgccatccagaagtacgagaaggggctgctgacgccgtcgtcgactcaactgctcaagctggcccgcgcctgcggcattcggaccgaatacttcttccgtacgcacacggttgaactgctgcagcccgagttccgcaagctctcaagctttggcaagacggcacaggatgcgctgaagatcaaggtcgtcgagttggtggaaaagcgcgtggagttgctcggcgcatttcccgaactgccgttcccggcttttgcgccgcccgcgaatctgcccgagcacatcacctcgctggatgagatcgatgcgttctcggattcggtccgcaacgcttggcagttggggctgaatccgattgctgacctcaccgacaccctcgaaggccttggcttgctggtcatcgtggtcgatgaagagaacccaggcttctctggcttgacggccaaggcacggaccgaagatggccgggagtatccggtcgtggctgtttccaaacgctggcccggtgatcgacagcggttcacgctggcgcatgagctggggcacctgctgctcgaaggacgactggctgacggcatcaacgaagaaaaagcctgcgaccggttcgccggtgccttcctggctccgcgtgtcgcggtgttgcagttgcttggggcacaacgccatgcgctggaatggcaagagctgtacgtgctcaagcacgagttcggtctgtcgatgactggatggctgcagcgcgcgaaacagtgtggcgtgatcaccgaggccgcttacctctccatgttcaagcggttttcggccaagggctggcgcaagaccgagcctggcgaaccactgccgaaagagcatccccgactgtttgatcagttggtgtaccgcgccttggccgagcaatacatttccgaaggcaaggcggcggaactgctgggcatcccgatgatgcgcttccacaaagaacgccagctggagtcatcggatgcggttgctcatcagtga

SEQ ID NO: 361458 - DNA, 510 bp, Pseudomonas aeruginosa
atgcggttgctcatcagtgatgcgaacatcttgatcgatatggaagcgggagcgttgatggagacgctcttccagcttccgatgcagttcggcatccctgatctgctgtactacgaagaaattgaaccgggcagtccgggccttgaagacctgggcttgcaggtcatggaggtcaacggcgatttcgtggcgtatgccgagcagttgccaggccagcacaaccatctgcttccggcgaaaaacggtcccaagcccagtcacaacgactacttggcactggcgcttgcgaagcaggagacctgtaccttgctgaccggcgacgccaatttgcggattgttgccaacaaggagcaggtcaacgtcatgggcaccatcgggctgctgtgcgccatgatcgagaaccaactgcttacagtcgacgacgccttcaaggcacttgaccgaatgaagtctggcaagcgacggctgccctggccggaagccgaaaaagtactgaacgcgctgcgttga

SEQ ID NO: 361459 - DNA, 1518 bp, Pseudomonas aeruginosa
atgcccacactttttgcctggcttggtaactcagaccttcgcgcctcggaagatgcgtcgggcgcagactttggccccattctgatggcgctggagacgggggtttatgaccgcctggtgctcctatcagatcacgggcaacagaaaacgcagaacttcctggcgtggctgggcgagaaatttgcaggcgctatagatgtgcgttacgcaacactgcgaagccccaccgatttcgaagacatctacaaagcagcgaacggggcggtgtctgagacgatctcgtcttcgccgggtctgaaagttaccttccatgtgagcccgggcaccccagccatggctgctgtgtgggtcctgctggccaaagccaagtacggagccgacctcatagagtcatctcgtgagcacggcgtgcgtcctgtcgtcgttccattcgacctggctgctgagtttcttcctgctgcaagcaaggaggccgatgaggcgcttgcgcaccttgtgcagggattgcctccggccgcgccggagttcggcagcatcatctatcgctgcggcgcaatgaagcgcgcagtcgcgatggcgcagagactggctcaacgcgatctgccggtgctgattcaaggggagtccgggacaggcaaagaactctttgcacgcgcgatccacgcttccagtcagcgaaaagacgcaccctttgtcgcggtcaactgtggggccatcccgctcgaactgatcgactccgagcttttcggtcatgaaaagggtgcgttcaccggtgcccatgcaacccgtgctggctactttgaggcagctgatggcgggacgctttttttggacgaaatcggtgaactgccgctgcagtcacaggttcgactgctgcgcgtactccaggagcatgaggtgacgcgcctaggggccagtaagtcccgaaaaatcgatgtgcgcatcgttgcggctaccaaccgggttctgccggaagaagtccgggcggggagattcagagaggatgtgtttcatcgaatcgcggttggcatcttggcattgcctcccctgcgcgctcgcgagggggacctcaatctattgatcgacgctttgctggcgcagatcaaccgtgaagcaacttcacagccgggctttaagcataagcttttgtctgttggcgcaagaaatcttcttcttcgtcacgcctggccgggcaatgtgagggaactgcacaacgcgcttttgagggcatccatctgggcaccaggagatgaaatagcagccgaggatatcgatgaggttctctcgctcacatccaccggaacagacgatgccattcttggggcctcgcttggcgaggggttctcgctgcctgatctgatggcagatgtggctcgacactacctggatagagcgatggagcagagtcgtggcaacaagactgaggcagcgaagctgttgggtcttggcagttaccaaaccttgacgaattggttgctcaagtaccagtccaaaaaagctggcacggatggtgcataa

SEQ ID NO: 361460 - DNA, 1326 bp, Pseudomonas aeruginosa
gtgaagctagtcgcgcgtgactgctcgccgcttgtcccgcaaccgacagcggcagaggcgaactggctccgtaagctcgcaacaaatgtccgagcatcggatcttgtcgttcccatctctggcgagagggatgaggacgaacccatcgtctactgtgaatgggacggcacctggtgggctggcaggtacgttggctcgatttccttcgaggggcacagcctgaccattgagccacgttttggtctggccacgcttcggaattggctgtttgaagcaacctcggtcgtgctgaccgacgcgcccggaaaactccgggaggacgaatcgttcattgcccaacttctggcgtccgtttgggcccatggcttcatcgaggcggcacggcatgggctgcctgcgcttcgccgtgaagtggccacgaaaggcgcgactgtcaggggacggcttgatgtcccggcatctctgcgcttgatcgccacgggtggtggacaggtcgtgtcaatccgttcggagcgttcgttggatcacgcggcatccgatgccatcgtcgccgcctacgaggttctgcgacggtggcttggggtatcggacgaaaaatggctgcctacacgtgccaaggagctccttcccaatctgatggctgtcaccggtgcgcgaccacgcgtgcctacgaaggccgaactggaccggattcgctacacaccgatcacggcgggcttcgcccccatcgcggagctttcgcggcagattgcaaaccgaagggggctcgctgccgatattgatgccagcggcgatacgaaaggtgtgctgctcgacgtagccgagctgtgggagatgtacgtcctcagcattctgcggaaggccgccgcaccgctgacggtgactcacggcacccgagataagtctgtcaccaagaaactgctccacagcgatgtctcaggtcaaggtttgggcactttgatacccgacgccatactgttctcaggctccaccatcagaggggtcgttgatgccaagtacaagtccctccatccatctgccagctcaccaaatgggccgcagcgcgacgacctgtatcagatggccgcctatctgggacgctttcagtctcctgccggaatggtgacctggggccttttggcgtatcccttcgacccatcaaaacctggtacgcccaatgccgagcagagcagcccatggagccttgatgaccgaaagaagatcggctttgccacgttgccccacaatcccgccgacgcagtggccaagttgcgttcattgctcatgcaagtagccactactgctgcttggtctgcaagagcttga

SEQ ID NO: 361461 - DNA, 1791 bp, Pseudomonas aeruginosa
atggctcgctattcggaacacgacacaaacaagatctaccgagcagcagactcatttcgcgccaactgcctcctgcgtgacggctcgctactgttcgccgacgattctgtttggcgtcccgacgtgctggagcgcatccacaaagccttcgttgccacccccgacgagggcgaccggacgttcatcgacaagttcaaagaccaagtcggaaaggccggacaggacgtatcacgtcttgcggcagagatcttgagcgtgtatttcctgtttccgtccagtgtcggtggcgtgcgcaagcggcaggtcgtgaacgaggtgctcggctggggcggcgacagcctgccggactcacaccctgtctccgcagcattcgccaacgggatcggtagcggcggtcagggctacaacacccgccgccccttcgagatcgcctttctgatcgaactcgccatcgcgtggaagaagttaccgcaggatcggcaggtagaggtggcggccgatccgtggctctttcaagaggttgtggacagcattgaggatgcggagtcgaagcagcttcggcacatgcttcttcatctcttgttccccgaacacttcgaacgcatagcaagtggaaatcacaagcgcagagtcatcaaggctttctcgggactggtcacggccgacgcagaggatgatgaccgggcgatcttggccatccgccaggagctcgaacagctgcttcccggccaggagctggacttttactggtcaccgctggtcgaggcttggtacgacgatagcgagggcgcatctgaaggcgcgccgctggagatcatccagcacaagaagcagatcgtcctctatggcccaccgggtactggcaagactttccgcgcaaagaagctggctgagcgggtcatccgatctgcggcactgagtcagatggggccggctcgctacttccagtctcaatctgttgtcgaatccgcgatccgcgacaacgtgcatcgactacagctgcacccggcctacagctacgaggacttcatccgcgcacttcacatttcgaatggcggtggcacggaatatcgagctggctaccttccgaaactgattgaggacatcgagcgacagccacgcgcggaacgtctgccgcacatcctgatcctggatgaaatgaaccggacggatctgagtcggatgctcggcgagtgcttctccttgcttgaagatcgcaatcagacaattgagcttccggcacgcaatggcgacggggtatcaatgaagctgcgcatcccggacgatctgtacgtgatcggaaccatgaacctgatcgaccagtccatcgagcagatcgacttcgcgctgcgccgccgtttcctgtggctactttgcccgtttgacgcagaggctctagtgggtgccgccgaatccaagtggcaggttctgaaatcgggcctggagtgggatcgcatcgaaccggacttccgcaaattggctgcagcggcggcggcgttgaacgggcagatccacgacagcccgctgcttggctcgcagtacgagatcgggcacacctacctgctagatgtggtcgtgttcctgcgcaatttcctcggtgctcgacctacacgcaagcagaactacctttggaacaaaaagggtgaagcgctggagcctgtcgtgcaggtgtggaatctatcccttcgcccgttgctcgagcagtatctcgccggactggacgcgactgcgcgcaacactgagctcgaccggctctccaaggttcttctcaagccgtcggtggccgagtga

SEQ ID NO: 361462 - DNA, 2553 bp, Pseudomonas aeruginosa
atgaccgaaatcattactaacgagaagcgccctgtttcctcttgcacagaaatgcttaggggatctggtgacgctaattgctctagaaaattcaagaacaaatcgaatcaaatgcaactcagtttatctggcctggaaacgttagctgccgcacaagtaacccatcaaggtggtaaaggagagccctttcatgactggtacccatacctagaaggattttcatcagaatttgtcaagtttgttcttgcgaaatacatgccgaatgccaaaaagataattgagccttttgctgggacagggacaacccctgtggctttggctgcatttggcattgattgtggctactgcgaagtgaatcccgctatgcggctcgtcgtcgaagcgaagatggcgcttggctctgccacaatgacgcgtcgaaagaaaattgcctcaagacttcagggtattgccgaaaacctccgagatctcgtaaaagcagcgcaaccggacaaagctttacaggatgactacaaagttaactttgagggaagtcaattcttcaacgatgtcggcatggctgcagtgctttctctcaggactgtcaatgatgatgttgcaaaagaagacgagttgattggaaatttattcaccattgcagtgatggcgaaactcgtcatttgctcaatgttaaagcggtctggtgacgttagatacaaaacagaaaaagagcttcagaaaggcattccagatcttatcggtgaggtctcaagccatctccttctcatatcgggggattgtttggccgccgaccatctgacggcgtcggttggcatcattacagccaacgctcgcgatcttttgaagacggcatcatttgatgctgatggggtcattacttcaccgccttacctaaatggaacaaattactttagaaatacaaagctagagctttggtatgggcgctttctgtcaaacggaacgactctaagatcctacagggatgctgcaattacttccggcattaatgatgttggtgtggcgcagggtagaaagattgtccacaaatcgattcagatgctggttgataagctctctgagaacgcctacgaccagagaattcctagaatggtggcaggctatttcgaagacatgaggcttgtccttcaggggctaatgcatagctgcaaaccaggagcgccgatctgcattgatattggcgatagtcgatatggtgggatacatgttcccacgcatgagattcttgagtcgctgggagttgatattggccttgagcacatcgagacgttgcatctgaggaacagaatatcaaaggatcgcagcgtattgtctcaatcgctgattgtgttcagaaaaaaggatagcgcaggcttaaagccagatccgtctttaacaaatgagcctttccatgaagcggcagataaaggagattttctttctcgatgggaaaatttcaaagatgtattgccacaccagaaggagccgtactcaaaacggaactggggtagccaactacactcggtttgctcttatcaggcaaaaatgaagcctgccttagcgcaccatttggttgatgtattcagtcgcagaggtgacaaggtcctcgacccatttagtgggtctggaacgattccatttgaggcatgcttgatggggcgcgagggatacggcttggaaattagtctgctgggcactgccgtatccaatgcaaagctaatgcgtgctgacgaacaaaaggtgcgccatttaatcgataagctagatttgtggattaagaataacaaggctacctccggcacactgcggcaagcggaggagattaggttcaatggggctcttgcggagtatttccatcctgatacgtatcaggaggtgctatctgcacgcgagttctttgcggcgaaccagagtgattcgccggagtggcatctggtcatggcctgcatgcttcatgtcctgcatggcaacaggccttacgctttaagtagaaacagccaccctataaccccatatgcgcccacaggagatttcataaaaaaatctgttgtagaaaaggtcagggcaaaagttgagaaaagcttggcctctcagttgacagacgacctccccactgggcgatgctttcaaggtgatatttgttctgaatggccggcagaactccgagatatagatgccatcatcacatcgccgccattctacgactcgacacgcttctatataacaaactggatgagattctggttctgcggatgggcaagaagtgattacgatacccgcgcgaatgaattcgtcgaatcgcttcagaagaaaaccttcgatgtatatcgagggatttttgagcagtttcatgcccgcctaaagcctggcggattggctgtgctgcaccttgggctaagtcacaaatgtgacatggcaatggagttgaccaagcaggtcaacggactttttaatgtgctggacatcgctaccgaatcagtaggacattgcgagagtcatggcattcgcgacaaaggaaccaccacaggacatcagtaccttattcttcagaaataa

SEQ ID NO: 361463 - DNA, 1407 bp, Pseudomonas aeruginosa
atggttaagcttccggggaaaactgcatattccggcgtacggcgtccaatgacaagagagtctggattctcatcgcaccctgattcaactggtggcgagtggaaaaaagaaagctctaaaacccttaaactccaagccggggaaactgtggaaattgttttcacaatcccggatcacacaccaaatacgtggatagcgttcggcggatggtattgtgcagataaatgcttggcgattgaaattacctccccaaatccaaagcacacattatcagagccagcatcgccgaattggtcgaaatttggaagcatgtggcagggagatggcaaaggagttactgccaccgtctctatgactgcgaataaaaacgcaagtatctctctttggaatctagcttgtgggctcgttgaacagccgggctgccataccggcgggaagttcgaagtatgtactgctccgggatatctaagcaatttgcacctgctttcaccggaggcgcacttttggagcaccaaaggggagactgagatcgcactgcttgggtcgacagaagtactggaactgagcgacgctggtgagcatatttttctaaaaacttgcaatcgatgtgcacgctttcttccgataaatgtaaatgacgagcgcattcaactaagcttctccaatcattgtgttgctcgccgaccgtgcatacacacaggctttggaaaactaaagaatgcagaaacccaggaagtcctccagcttaactacggataccagcttgagtgtagattctgcaagaagtattgcgtcaatgcagcccataataaaaatagaactggcgctcagatgaaggaagacggcgctcgccgtaggcattttgaattgttggttaccgagctctatcaaatgagcaggcagatggcgttcaagcaccgaaccggtgttgaactgtctgattacatctggaaaaaatttagctgcaagtgcttcaattgcaacgcagatcttccgactgtgaagtcgatggcgctagatcacactaggccactagcactgctttggccgcttgatgaaactgcgactgcattatgcggatcatgcaacagctccaaaagcgatcgctatccgagggaattttactcggatgatcagttagtgaggctcagcgctctaactggcattcccgttgaccaacttaacgagcccactccgaacgtcgaggtcataaccgagcttgttaagcgcttagattggctttttgatacgtttctaatgcgagctgaaatgatcagagttcgagatggaaagataactggcgagttagtggtaaaggcactccagaaagcctttgatgctgcccctggaggcgcgccggtcgatcttgttgcggaatatgaattacgacggcagaaaaaatcatag

SEQ ID NO: 361464 - DNA, 498 bp, Pseudomonas aeruginosa
atgaacctgaatccgtggccataccgctggctggccgtcgctgctctggctgtcgcgctcattggcttcggctggatcaagggcgcgggccacgttcaaacgcagtgggataccgccacccagaaacaaaccctgcaagccaccgccgtccgccagcgtcaggccgaggccaccgtcaaggtcgtcacgcagtacatcgaccgcgtccgcatcgtccgcgagaagggcgaagccatcatcaaggaggttcccgtctatgtgcccgttcaagccgatgctgcttgcactatcaaccgtggctttgtgcgcctgcacgacgctgccgctgccggtgagctgcccgagcccgcccgagatgctgatgcggccgccgcaggcattgcactctctgccgtcgccggaaccgttgccgccaactaccagacctgccacgaaaacgtcgagcaactgagggcgctgcaggcgtgggtcaatgagatgacaacgagcatcaagtag

SEQ ID NO: 361465 - DNA, 228 bp, Pseudomonas aeruginosa
atgaccaccacccgcaaactctgcctgctcgccgactggcgaaagatcgcgcgccgcgcctggagcgtccgcctgtctatcgtcgccgccatcttcacggcggcggaagtggtggtgcctgtgttcggggacgtgctgccgcgtggcgtgttcgtgctgttggccttcagcgccagcatcggcgcggccattgcgcgcttggtcgcgcagccggagatgcaccgatga

SEQ ID NO: 361466 - DNA, 621 bp, Pseudomonas aeruginosa
atggaaccgccagtagaaccacgcatcgatgttcacctgctgacgctgaacgagcccgccgaatggcgctcggcttgtattgccagtctcgacggagcaccgattcagttgcacgtcctgccgggtatcccgagccgcatcggcgaagcacgcgccgctggttacgcccagggcaatttgccgctggtgtccttcgtcgatcccgacgatctgtacgacgcaagcgccttcacgcaactagccgatgcgctggatgcctgcccgaaagccgtgatggcctacaccgacgaagcgttgaccgacgaaaacggtcgcgacattgccgtgcgtcgtctggcctacagccgctggcaacacgccaacagcgccagccatgtgcacggcttgatcgtgatgcgccggtctgccgtggaagtcgcgcttgcggaaaccaccgacctcaacaacttcgccgactggctgctgaccctgctggtggccaagcgtggcggcgtgctgtacctgcccatcgtcgggcgtcattggcgacagcacccgcagcaaagccaccgcaccggcgaccccggcgctatccagcgcatacgccagaccaccggccaagcatcgaatccctggagataa

SEQ ID NO: 361467 - DNA, 213 bp, Pseudomonas aeruginosa
atgagcacggatgtgaccgtcaccattgacgatgtgcgcgccgtcggcctgtgcgtgaacggcacacgggtctggttcgcgcgccacgatatggacttccgcgcctttctgcgtgacggctgcgctgccgacaccttgctggccaccggcgacgcgatggccttgcgggtggtcgagcacgcccgtgcgcacatccggcaggagcagcactga

SEQ ID NO: 361468 - DNA, 789 bp, Pseudomonas aeruginosa
atgagccagcaagcgctgatggaagtcgagctctacgccttcgccagcagcagcgcgaatttctacctgactccgcacgaattcgacgtcgatctcgacggcacgctgtacaccagcctgtccatcgagcgcaacgaactggcgctgggggccgaagcggccaagtcagcgctggatctcaagctgccacccgactgtgaacttgtgcgccacctgctggccacgtcgctcaccggcgacaccacctcggtcaccttgcgcatcgggcggcgcgatacctggggcgattactggtggttgtcgggcacgcgctggatgggccgggtgctgggtgtggaaatcgacgccgatgctgcccgcatccgctgcgaatcggcacaggtcagtttgaagcgcatcggcctgcgcaggctctacagccgcaactgttcccacgttctgtactccagtgcctgtggggcgtcgcccatttccgagagcgccttcgtctatgaagcctatggccgcagtgtcgatctcgatggcggtgtgccgggtggcgtcagcggtggcttggccggtggctggctgcaaacgccggatggggcacgccacatgatcatccgcgactacggcagcggcgtcgaactgctctatccagcggccattgaaccgggcacgcaagtgttgttgacggtcggctgcgatcacagcacgcaaacgtgcgcctcgcgcttcggcaacctcgacaactacggcggctttcccgtcatcccgagcaagaacccgttttcgacgggcgtgttctga

SEQ ID NO: 361469 - DNA, 1569 bp, Pseudomonas aeruginosa
atgacggatcgcgtcgtcattcaagacattgcggaggtttccagcaagcccacgcccggaagtgaactgctggaaattcagggcgaagtgctgtcgcgtgcatcgttcggagccagtgcggctaccttcatgcccgaaacggccattgcgccggttccgcccaacttggctgcgacttggcttgctgagtctctggcgcacccgtggccacccatcgatggcccggtattcctcgtcgaggtgctgcgccgggacaccgcatccagcaccatcgtcgccactggcatggacgccttcggggatcaaccctggccggatgcgcaacgcggtgtgtttgccttccgccacgactgggccgagcccttggtcgaacggcttgagtggcagaccagcgtcacacggctggccagcggcaacgaatcccggcaagcacgccgccgcgttcctcggcgctggctcacctacaaggtgggcaatgcccgcccgaccgatgcgctggtcgccgactggctggccgatcatctgggccaaaccgcgtggtggccgctgccacagtacgccgtccacctcgtcgaaaacgctgaggagggcgcgctgaccctggcggtatcggaggccgactggcggcgcttcgctcctcctgctgctgcgctccgcttgacctacgacggcgtgcaaggctgggagggcggcgaacgttgggtgctgatcattgcgccggaaggctggcaagtcgcccaactcagcgacgtggaaaccgatctgctgtggctggccgatccgctggcccgcaaagcggcggctggtagcgccgtgctgccgctggtgtggggcaaggccgttgatccggccgatctcacgcaatgggtgccgggaatggtcggcggcagcgtcaccgcgagcgtcacgcccgaacaaacgccggacatggatgtcctcgatgacccgtggctcgacgagatcccggtctggcccgatggcaactggcgcgatgatcccacggccagcgcgcaggcgacgatcacgcgccaggatttctcacccgcagatccgtgggtgcggcgtgacgatccgtgggcgacgacgacttaccagcgccgctatctggccagctcgctcgatgaaatcgacatctggcgggcgcggctgtggcgcacccaaggccgcttggaagccttctggctgcccgatggcttggcaccgatcctgtgggtgagcgtcgaagctgatcccgatgacggtttcctgcgtgtcgatggcaaagacctctcggcattctggcatcgccccgctgcctgtttgatcgtgcatccggacggctatcggcagtacgccctgacagccacctgccatctggatcagggcggtgtgctggtgctgcgctcgggtctcgacgactgggtgcccgcaggcagcgggattgttcgccttgcgcgctgccgcctcgaccacgacgccatcgacctgtactggcatagcccgcagttggtggagatcaccctgaccgcgcgccagttgcccgagccacgcggcaacgaccgagaaacgtatggagagtacgccgtatga

SEQ ID NO: 361470 - DNA, 360 bp, Pseudomonas aeruginosa
atgagcaccatgatcatcaccatcgagcgcagcccgcgcaccctgcagcttggcgacaccgtcctgcaagtcgaagagttgagcgcccgcctgccattcgcccgcaagcctgccgacctaagagaattgggcagaggcgatcagtgcaaggtctacgtcaccgaaaccaaggaactcactgccgccgaatttgacgccttcgcgcgcaggctgctggtgtcgcgcgactggcttcgtggcaagggcggcggaaccggcgatggcttcctctgcgtcgaggtcacagcgcccggccgcccctacctgtacatcaacccggagggcggtgattacgcccgctacgtggcccgtctcgggtga

SEQ ID NO: 361471 - DNA, 366 bp, Pseudomonas aeruginosa
atgaccaacaccaacatccccgccacccgcaacgaaggttggggcttctggggcacgatgggcggacacgcctgcatcgcgtggcctctggccatgaccgccgtcaccgacgccacgggcgaagacctcgacaccgtccgcgcctttctcgacagccgctttggccgccacttcgcagacgaagtccacaacggcctctttgaaggcaagagcatgaaggacgccatcgacgccgccaccaccaagtggatgggctggacgattggtcgccagaccagcaaggactacggcatcccgcgcggtctgccttacctcacgggctacgtgatccactgcggcatcgtcgaagaacaagaagccgcctga

SEQ ID NO: 361472 - DNA, 225 bp, Pseudomonas aeruginosa
atgaaaaccctcgccgccgaacgcgaacaggcgctgcgttggctgatcgccaaccggcgtccggatgtctccatcgaacaggcagtgcgcgtgatgtgtgccgcgctgccccgcgatctcgccacgatgcaactgctgcggcgcatcgccgaggaagaagaagccaaagcacctgcgcgcggattcaactggcgcacacctcctggtctgccgcctcgcggatag

SEQ ID NO: 361473 - DNA, 399 bp, Pseudomonas aeruginosa
atggttgaccgtcacgccacctggacgattgatgacgtggcggcacgcttcgaggaagccgccagtaccggacgacgcctgccacccgtgcgtgtgcagggctacttcaactgctggcctgccatcgtgcgccgggagtgggagacgttcgctgccgaagagaaggtctaccgcccattcccgcccgcaccggacgccatcgaccggatgctggagacgatgaagtgggtgcagtggctggaggtcgagcagcgccatctggtgtggatgcgcgccaagcgctacggctggcgtgatatcaccatccgctttgcctgcgaccggacgacggcgtggcggcgctggcagcgcgccttgcagacggtcgccgatcagctcaacggtgtcgtcgtcgcgtag

SEQ ID NO: 361474 - DNA, 228 bp, Pseudomonas aeruginosa
atgagccattctccaatgagccagttgcttggcgaacaactgatcgactcgcgccaagcggcgctgatgttcaacctgccgacctactggttctcccaagccaaggaacgccagcagcgccgcattccgcattaccgcgtcggcaagctcgttcgcttcaagcccaacgaactggaagcgtggatcgtcgcgcagcagccctccggcggggagtctgcggatgcttga

SEQ ID NO: 361475 - DNA, 738 bp, Pseudomonas aeruginosa
atgctggatttcaattcatcttcaagcctatctgatcgtgtcacgacgctgatccacatcggcatgcagcacgttcgtgggcagcaggccgcacgcgactatctcggcgcgtcgcgtctgggcgtggcctgcgagcgtgcgctgcagttcgagtacgccaaagcgccggtcgaccacgggcgcgacacccaaggccggatgctgcgcatcttcgagcgtggccatgtcatggaggactgcatggtggcgtggctgtgcgacgcgggtttcgatctgcgcacgcagaaacccgacggcggtcagttcggcttctccgacgcgcacggtcgcctgcgcggtcacgtcgatggcgtgatcgtcggcgggcctgacggctttggctatcccgcgctgtgggaaaacaagtgcctcggcgcgaaatcgtggcgtgaactggaagccaaaggcctcgctgtcgccaagccggtgtacgccgcgcaggtggcgctctatcaggcccacctgcaactgcacgagcacccggcgctgttcaccgcgatcaacgccgactcgatggacatctacgtcgagctggtgcccttcgatggcgcgctggcacagcggatgacggatcgggcggtgaaggtcatctccgcgaccgaggccggtgaactgctgccccgcagctttcaagaccccactcacttcgaatgccgcatgtgtgcgtggcaagaacgctgctggaggaaaacagcatga

SEQ ID NO: 361476 - DNA, 216 bp, Pseudomonas aeruginosa
atgagccggttacacaaaatttcggacaccctccgggtgatcgccgcaggcgactcctacaacgacaccaccatgctttccgaggcccacgccggcatcctgttccatgccccggaaaacgtgatccgcgagtttccccagttccccgcggtgcatacctacgaagacctcaagcgcgagttcctcaaggcttccagccgttcgctgagcctgtag

SEQ ID NO: 361477 - DNA, 624 bp, Pseudomonas aeruginosa
atgcagtcacgcctgatcgatggcctggaatgggacctggacgaggatggcagcggcggcctgtgcaacgtccatggcgacaaggtccatctgcgccagggcgacatggacggcgcctgcgggccctactgcctggtcatggcgatgctggtccgcggccaactgcgccggcgccaggccaagggcctggagcgggtcgacagtcgcagtcgctacgggcgcctgatgaaggcgctggaccagcacggcccgctgctgcgcgtcggcaccaccggcgtcgacctgctggagctgctggccgagatcaacgataccgagcatttcgccctcaagggcgaggggcgcaggttggtccggcacacccgcgaatacctggaggccggctttccggtagtgctcggtttccacggccgcaagggcagcgatatccgccattggggcctggccatcggcatgagcgagcgcgccttcctgctcctcgacccagcccacgacctgccgcgcgggcaggcctggaacgcggtgatcaccagcgaggcgcacggttcccggttcggctatcgctatatcaatgccaagggcacctgggcggtgactctcaaggaaatggtcgccttgctttga

SEQ ID NO: 361478 - DNA, 1149 bp, Pseudomonas aeruginosa
atgccgggcctgtctttgaatgccatcctgctgagcgccgtcgcgctgctcgccccgtcggccgaggcggtggacgccggtcgccacgacagcgagctgggcgccgtcgaggtcactccggtggttggcggtctggcctatccctgggccgtcgccttcctgccggacaaccagggcatgttggtcaccgagcggcccggcagcttgcgtttcgtcagtcccgagggacagatgtcggcgccgctggaaggcgtacccagggtcttcgtcagcggccaggggggactgctcgacgttgccttgtcgccggggttcgccgaggaccggctggtctacctgacctatgccgaggccggcgaggacggccgcgccggaacggcggcgggacgcggccggttatcggcggacaagcgacggctggagggtttccacgtgatcttccggcagttgccgaagctttccagcggccatcacttcggctcgcgcctggtcttcgacggcaagggccacctgttcatcgccctcggcgagaacaaccagcgcagcacctcgcaggacctggacaagttgcagggcaagatcgtccgcctgtatccggacggcggcgttcccaaggacaatcccttcgtcggccgtacagacgcgcggccggagatctggagctatggccaccgcaaccagcagggcgccgcgctgaatccctggaccggccagctctggacccacgagcacggcccgcgcggcggcgacgagatcaacataccccaggccggcgggaactacggctggccgctggcgacccatggaatcaactacaccctgctgccgatccccgaagccaggggcaaggtcgtcgacggtaccgaggcgccgcaccatgtctgggagaagtcgccggcgatcagcggcatggcgttctacgatgcgcagcgcttcccggcctggcagcacaacctgttcatcggcgcgctggcgacgcaggaactgatccgcctgcaactggatggcgaccgggtcgtccacgaagagcgcctgctgggcgatctcggggtgcgcatccgcgacgtgcggcagggcccggacggctatctctacctgctcaccgaccagaaggacgggcaattgctgcgcctggggttggcgcgctag

SEQ ID NO: 361479 - DNA, 222 bp, Pseudomonas aeruginosa
atgcctggccatcccgatccactgcacggcgtcaccctggaaaaactgctcaccgaactggtcgcccaccacggctgggcggagcttggcaaacgggtcgacattcgttgtttcaggaacgacccgagcatcaagtccagcctcgccttcctgcgcaagacgccctgggcccgggaaaaggtcgaggcgctctacgtccagctcaagcgcaaccaaggctga

SEQ ID NO: 361480 - DNA, 192 bp, Pseudomonas aeruginosa; identical to SEQ ID NO: 318339

SEQ ID NO: 361481 - DNA, 1767 bp, Pseudomonas aeruginosa
atgccagccattctctcctcccgccaacgtatcgccctgcgcctggcctggcgcttcatggcgccttaccgctggcgcatgctcggggccctggtggcgttgctgttcaccgcggcgatcaccctgtccctgggccagggcatccgcctgctggtggaccaggggttcctcaccgcctcgcccgaattgctcaatcgctacatcctgctgttcttcgtgctggtgctcggcctggccgtgggcaccttcgtgcgcttctacctggtgtcctggatcggcgagcgcttcgtcgccgatatccgcaagcgcgtgttcgaccacctgatcgagttgcatcccggtttctacgaaaccaaccgtagctccgagatccagtcgcgcctgaccgccgacactacgctgctgcagacggtgatcggttcctcgctgtcgatggccctgcgcaatgccctgatgctggtcggcggggtgctgctgatgttcgtcaccaacgccaagctgaccagcatcgtggtgctggcattgccgctggtgatcgccccgatcctgctgttcggccgccgcgtacgcagcctgtcgcgggaaagccaggaccgggtggccgacgtcggcagctacgtcggcgaaaccctcggccagatcaagaccgtgcaggcctacaaccaccaggcgcaggatcgccagcgcttcgccggcaccgtcgaacgcgccttcgacaccgcgcgcaagcgcatcgcccagcgcgcctggctgatcaccgtggtgatcgtgctggtgctcggcgcggtcggcatcatgctctgggtcggcggccgcgacgtgatcgccggcagcatctcggccggcgaactggccgcgttcgtcttctacagcctgatcgtcggcatggccttcggcaccctcagcgaggtgatcggcgaattgcagcgcgctgccggcgccgcagagcgcatcgccgagctgctcagggcgcgcagcgagatccgcccgccagcgcaaccacgcaagctggcggcgcgggtgagcgggaggatcgaattgcaggcggtgcgcttcgcctatccgacccgtcccgaacactgggccatcgacgacatcagcctggccgtcgaaccgggggaaaccctggccctggtcggaccttccggtgccggcaagtcgaccctgttcgatctgctcctgcgtttcttcgatccgcagcagggacggctgctgctggacggacagccgatcgtcgaactggacccggccgacttgcgccgcagctttgccctggtgtcgcagaaccccgcgctgttcttcggcagcgtcgaggaaaacatccgctacggccgtccgcatgccagcgccgccgaggtcgaggccgcagcgcgtgccgcgcatgcccacgagttcatcctgggtctgccgcagggctacgccacccacctgggcgagggcggcatcggcctgtccggcggccagcgccagcgcctggcgatcgcccgggcgttgctggtagacgcgccggtgctgctgctcgacgaggcgaccagcgccctggatgcggaaagcgagcacctgatccagcaggccctgccaggcctgatgagcggacgtaccaccctggtgatcgcccatcgcctggccacggtgcagagcgccgaccgcatcgcggtgatcgaccaggggcggctggtggcgattggtagccacgcccgtctgatcgccgagaacccgctctatgcgcgcctggcggaactgcagttcgccgtcggcggacgctag

SEQ ID NO: 361482 - DNA, 336 bp, Pseudomonas aeruginosa
atgaagcacctggcattcctcgccctcggcggactcctgctggcgcccctggccgaagcggccagcttcgattgcgaaaaggctgagcgagcggacgaaaaggccatctgcgcgaaccgggcgctgaacgacaaggacgtcgagatgaacgtcaagtaccgcttcctccgcggcctgttcgccatgggcggccgcggcgccatgcaggaccggcagcagggctggctgcgcgagcgccggcgctgcggtggcgacaccgactgcctctcccgtgcctacgcgcagcgtatcgacgagctggacaagcagtacgcgggtatcgacaagccgctctga

SEQ ID NO: 361483 - DNA, 2325 bp, Pseudomonas aeruginosa
gtgcgtccactcagccgttggctctcatcttgcggctcgcttctggcgctggccgcgctgttcctggtcgttcccctcgccggccgctactggctcggctggtcgacgccgttcggctatctctcggacctgaccctcggcagcctgctggtgctgctcctgcatcgacgctccctgtggttcgcgctcccggtcatgctgctctggtgcctgttcctgatcggcaatgccgaactggtcggcgcggtcgggcgcatgccggagccttccgacctcaagtacctgctggatccgcagttcgtcagcagctccacccagggcggcggcctcgcccacctgccactggcgctcggcctcggcggcgcgacattgctttgcgtgctgctctggcgccgccgcggtccgcgcctgccgcgctatgcctacgcgctgccggcggcgttcctggcggcgcatgtcggcctgcaatacctgcgtccgagcgatgccgaccaatggcagcagtacaacctgccgcacaagttgctggccagcgcgctcagcagtggccaactggcggtcgaagactggctcgccgacgaccgtccggacaccccgccggacgtcgccgggctcaaccaactcgacctttccggaacgccgctgctggccggcggagggcgcgcgcgcaacgtcctgatcgtggccatggagggaatccccggcgcgtatatcgccgccaaccgcgccgccatcaacagcagctaccacgaagcgccgatgcccaggctgagtggctgggccgaacgggcgatgaccaccccggactacgtgctgcacagccaccagaccatccgcggcctctacgccatgctttgcggcgactacagcaagctcgactcgggcacgccgaagggcgtcgaactgctcaacaacccggcccgggccagggagtgcctgcccgcccagctgcgccagcacggtttcagcacgcacttcctgcagggtgccggcctgcgcttcatggccaaggacaaggtcatgccgcagatgggcttcgacaagaccctcgggcgcgactggttccgcaacacgtcctacctggagtttccctggggcatggacgacaaggccttcttcgagggcgccgcgacctacgtgaagcagctgcgccagcagaagaaaccctggatgctgaccctgctcaccgtcggtacccaccagccctactcagcgcctgccgactacctggcccgctacccgaacgccaagcaggccgcggtggcctatctcgacgacgcgatcggcgccttcctcgccgacctggagaaacagggcgtgttgcgcgacaccctggtggtgctcacttccgacgaatcccacggtgtcgaccaggtgcgcctcgcctcggcctggggcttcaacctggtgctggcaccggaacaggcggcgctgccgccgatcaagagcggcgtctacggccacgtcgacctcgccgcgtccgtcctcgactatttcggctaccgcgtgccggcggggatttccgggcgctcgctgttccgcgactacgccagcggtcgcgaaatgatgtcctacaccaacggcatgctgcgccaccacgacggcaaggccaccttcgtcgagtgcgatttccagcaggtctgccggcgctaccgcagcgagggcttcatcgccgacgaagccgagttcctcggtcgcttcagcggacgccaggcacgcctggtcagccagcgcgccgccgtcctcgaccactccgtgcaacaggccggccagttgggccaggagttccagttcgccacccacgaacgcatccgcctgaagccggaaacccacaacgactggaccgacaacctgatcggcgcgcaatacctggagatgccgaagaacagcaggaccacggtcaccctgaagatccgcgccttgcagatggaccgcaacggcgcccgggtgacgctgaagaccaaggagttcgaacgcgacgttcccataccggtaccggacatcccgcgcctgctcaaaggcaagccgctggacatgagcttcaccttcgacaacccggaagcgcgcaaggccttctccttccacttgctcgccgagggccgcgggatcatcgagatcagcgacttccacgtggtcacggcggccaacccggaacccgtggaaagccgcagccaggtcgccgaagcggcgaaggaacagccgctgctgagcaccctgaaaagcctgttcgccaaccgccccgaaaccgaggaagcggaacgcgcggacgcccctcgggagcgcaccgtcatccccgagcagaaggccctgatcctttcgcactga

SEQ ID NO: 361484 - DNA, 840 bp, Pseudomonas aeruginosa
atggcggtcatcgggcgtttcaattcactgcaggtggtcaagcacacggagttcgggctctatctcgacggtacccagcacggcgagatcctcctgcccaagcgctatgtgccgaaggaccagcccagcgaagtgggcgactggctcaacgtgttcatctacctggacagcgacgaccgcctgatcgccaccacccagacgcccaaggtccaggtcggcggtttcgccagcctgaaggtcgtggagatcaaccggatcggcctgttcctcgactggggcctgcccaaggacctgctgctgccgcattcggaagagaagcgtccgttgcaggtcggcgactactgcgtggtctacgtctacctggacaagcgcaccaaccgcatcaccgccaccgcgcgcctggaccgccagttggacaacctgccgccgcgctacagcgtcggccaggcggtcgacctgctggtggtggagcgtaccgagatgggcttcaaggcgatcatcgagggcaagcactggggcctgatccacaagaacgaggcgttcaagttcctccgcagcggcatgcgcgaacagggctacatcaaggaattgcgcgcggacggcaagatcgccctgagcctgcagccggtcggcgccgaggccgccgtcgagctgagccagcagattctcgcccggctgctggaggccggcggcagcctgccgctcagcgacaagagttcgccggaagatatccaccggctcttcggggtcagcaaggggaccttcaagaaggccatcggcggtctctacaagaaaggcctgatcctgatccacccggaacgcatcgaactgccgcgctga

SEQ ID NO: 361485 - DNA, 375 bp, Pseudomonas aeruginosa
atgaaactcgataaagcggcagccatcgcacagctcaaccaggccttgggcatgtccgtgctggatgccggcaacaccctgctcgcccgcttcaacaagagcaagaacgtgtggtggttcgatattccgctcagccaactgaaggccggcaagttcctcaacctgctgctggcgaacccggccggcgatgcagtggagcacctgaaggtgcccaccggtttccttcgccagcagcaggacagcctggaactgcgcgacaagaacgcccgccggccgaccctcagcctggagctgagcgcggaccccggcaagcgcctgcgcgacgtccgccccggcggcgctggcctggacttcgccccgttcctccagccctga

SEQ ID NO: 361486 - DNA, 555 bp, Pseudomonas aeruginosa
atgaaccggcattactacatcagcgacaacctcgacgagctggaacggctcgaagccgaactggaagccagcggcatcgccaccgagcagatccacgtcctcagcgaaaaggacgcggagaccggccagcgccatctgcacgaagtctctccgttcatgaagaaggatgtggtccgctccggccgtgtcggcctgttggtcggcctcgtcctggccatcgtcgccgtggccttcgcctatgccagcggctggacggaaaccgccgccggctggattccggtgatcttcctcggcgccgtgctctgcgcgttctgcctgtgggaaggcagcttcttcggcctgcagcgcaccaaccgcgccttccgccccttcgaagaacgcctgcaccaggggcagcacctgttcttcgtcgatgtgaagaacgcccaggagccgatcctggtcaacgtggtcagccaccacccgcgcctgcaggacgccggcaccggccccgcggtctctccgctgctgctgggctggcagcaacgctggcggcagttccggcggatggtctga

SEQ ID NO: 361487 - DNA, 507 bp, Pseudomonas aeruginosa
gtgctaccccagaggctccacccaagtagattgctcgccctcgccctgttcagccttgtgctgggcctggccggttgccagaccaagccgccgcagaccggcctgagcgccgagcagatcgccgtgctccaggagcagggcttcgaactccgcgacgaaggctgggagttcggcatgtcgagcaaggtgctgttcggcaacaatctcgaccgtctcaatcccgacagccgcaacaccctgacgaagatcgcccacgccttgctcgcggtagacatcgacaaggtccgcctggaaggccacaccgacaactacggcgacgaaggctacaaccagaagctctccgaacggcgcgccgaatcggtggccgcggtgttccgcgaagccggcatgccggcggccaacatcgaggtccgcggcctgggcatgagcaagccggtggccgataacaagacccgcgccggccgcagcgagaaccgccgcgtcgccatcatcgttcccgccgagtaa

SEQ ID NO: 361488 - DNA, 1308 bp, Pseudomonas aeruginosa
atgaaccgtcgtcgtcgctatacgggttccaatccatcgctgcgccgggtgctctatcgcgcgcacctgggcgtggcgctggtcgcggtattcaccgccgggctggcagtgaccctggtcggcctgctgaccctgcgcgcctacgcggaccccaaccagcaactgatcgcccgttccatcagctataccgtcgaagccgcggtggtcttcggcgatgcccaggccgccgaggaatccctggcgctgatcgcctccagcgaagaggtctccagcgccatcgtctacgaccgccaggggcagcccctggccagctggcatcgggaaagcaccgggccgctgcacctgctggaacagcaactggcgcactggctgctcagcgcgccgaccgaacaaccgatcctgcacgacggccagaagatcggttcggtggaggtgaaaggctccggcggcagcctgctgcgcttcctgctcaccggtttcgccggcatggtcctgtgcctgctgcttaccgccctgggcgccttctacctgtcacggcggctggtacgcggtatcgtcggcccgctcgaccaactggcgaaggtcgcgcataccgtgcgccgcgaacgggatttcgagaagcgcgtaccggaagccggcatcgccgagctgagccaactgggcgaggacttcaacgccctgctcgacgaactcgaatcctggcaggcgcgcttgcaggacgagaacgcctcgctggcgcaccaggcccaccacgacagcctgaccagcctgcccaaccgcgccttcttcgaaggccgcctgagccgggcgctgcgcgatgccagcgagcaccgcgagcaattggcggtactgttcatcgacagcgaccgtttcaaggagatcaacgaccgcctcggccatgccgccggcgacaccgtgctggtcaacatcgccatgcgcatccgtgggcagttgcgcgaaagcgacctggtggcgcgcctgggtggcgacgaattcgccgtgctgctcgcaccgctggcgtccggcgccgacgccctgcgcatcgccgacaacatcatcgccagcatgcaggcgccgatccggctcagcgacggcagcacggtgagtacctcgctgaccatcggcatcgccctctatcccgagcacgcggataccccggcggcgctgctccacgacgccgacatggcgatgtacatcgccaagcgccaggcccgcggcagccggcgcctggcggaactcaacgacccccgcatccttcaggaagaaaaggagatagacagtgctaccccagaggctccacccaagtag

SEQ ID NO: 361489 - DNA, 573 bp, Pseudomonas aeruginosa
ttgccttcgttgcccaccttgcagcccctcgacctctacaggcgcaccctggcctgcctggtcctggcggtttcctgcctgggcggcggaggcctgtgggcggacgacgcacggacgtcggtcgagcaacgcagcaacgcggtcagccaggttctgctgggcatattcagctacgtgcgctggccgaaggaaccggcggttctgcaactctgcgtggtcggcccgaccgagtacgccgacggcctgctccgcggcatggtgcaagccaatggcaggcgcgtgcatgcggaacgccgcgcggtggacaacccggacctcggcacgctctgcaacgtgatctacctcggagtggtcgacgagcgcgagcgccagcaggtgttccacagcctggccgggcatccggtcctgtccatcagcgagcgtggcaccgaatgcagcgtcggcagcatgttctgcctcaacgtcggcggtccgcgcatcaccttcgaggccaatctcgactccatcgcccgcagcggcgtacgcgtgcacccgagcgtattgaaactggcaaggcggcaggccactccgtga

SEQ ID NO: 361490 - DNA, 540 bp, Pseudomonas aeruginosa
atgatccgggaaatcctcaagatgggtgacgagcgcctgttgcgcattgcgcagccggtgccgtccgaactgctcggcagcgaggagctgcaacggctgatcgacgacatgttcgaaaccatgcatcacgtcggcggggtagggctggccgcgccgcagatcggcgtcgacctgcaactggtgatcttcggtttcgagcgcagcgagcgctatccggacgccccggccgtgccgccgaccatcctgctgaacccgcggatcaccccgctggacgacgagatggaagagggctgggagggctgcctgtcggtgccggggttgcgcggcgcggtatcgcgccatcggcgcatccgctaccagggcctggacccgcagggacagccgatcgaccgcagcgtcgaagggttccatgcgcgggtggtgcagcacgagtgcgaccacctgatcggccgcctgtatccctcgcgaatcaccgacttcagcaagttcggcttcaccgaggtgctgttccccgacctggaccccgccgcggacgattga

SEQ ID NO: 361491 - DNA, 321 bp, Pseudomonas aeruginosa
atgagcatcacatccaccgacatctgccaggccgccgatgccctcaaggggttcgtcggtttcaaccgcaagaccggccgctacatcgtgcgtttcagcgaagactccttcggcatggacgtagccgacgacagcatcacgcccaccagcgagttcgtctggagttcggtacgcgacgacgtcatgcgcctgggccgcgagcagttgcagatcctgctggaacagaacatcaacgaacgactgaacatcggcgagccgctactggtctatctgcgccgccaggacctgccggaaatcaccgcacaacgccagttgcgctga

SEQ ID NO: 361492 - DNA, 1497 bp, Pseudomonas aeruginosa
atgccaggggccgtggatttcaaggagcggatatcccgccagcgtccgcatgacagggaaacctatggacatgccgggaacaccgatctgcaagacatcgtctaccagttggaaagcgaccgcgggcgcatcgtcaattccgccgccgtgcggcgcctgcagcagaagacccaggtcttcccgctggagcgcaacgcggcggtgcgcagccgcctgacccattccctggaagtgcagcagaccgggcgtttcatcgtccgcacgctgttccgccaactgggcccgcgtgccgcggaggtcggcctggacgggctggaaggcgcgctggaaagcctggtggaaatggcctgcctgatgcacgacgtcggcaatccgccgttcggtcatttcggcgagtacgccatcaacgactggttcgaacgcaatctcgacgccctgttcgagcgccgcgtaccgccgggccagggcgacggcctgttgcagcagcgcatgctcaccgacctcaagcatttcgaaggcaacgcccaggccatccgcctggtggtgaagctgctgcgcctgaacctcacctacacgcagaccgccggcctgctcaagtacgtgcgtccggcctacgagccgaagccggacaaggcagcggcgaaccactacctgaacaagaagccgggcttctatctttccgaggaagccttcgtcgacgaactgcgccaagtcctcggcatgcgcccgggcactcgccaccctgtggcctacatcatggaagcggccgacgatatctcctattgcctggccgatatcgaagactcggtggaaaaaggcatcctcgacatccgtcaattggcggatctgctggtgaagaagtttgccgtccaccattcgccggacgcaccgattcccggcgacgcggacaacatgagcttccagcggatggtcgactactcgctggaaaaggccgagcgggagccgatcaacaaggtcagcgaattcttcatccgcctgcgggtgaaaatgatccacccgctggtccagcacgccgcccagcagttcatcgacaacctcgaagcggttcatgccggcaccctcggccgcgcgctgatggaggacggcagcctgccgcacgccatcgtccagacgttcaaggacgtggccatggaatgggtgttctgccatccggaggtggaaaccctggaattgcagggctaccgcatcatccagggcctgctggatttctacgcgccgctgctgcgcctgccggccgaggagttccaggccctcgccgaaggtcgccaggccgccgcgccgcatccgcaactgctggttcggcgcctgccgagccagcagatcaaggcttacctggaggccatgaaaggtgtggcggaggacccgttgcagcggcagtgggagttctaccaccgctgccgcatgctccaggatttcgtcagcggcatgaccgaccagcatgcccaggacgaataccgcgcgttgtccgcgctgtaa

SEQ ID NO: 361493 - DNA, 192 bp, Pseudomonas aeruginosa; identical to SEQ ID NO: 339055

SEQ ID NO: 361494 - DNA, 543 bp, Pseudomonas aeruginosa
gtgctgggtgtccagccgaatcccgcgcaccgggcgattgccgcattgagcggacggatcgccgacacccggttggtcacccagaacgtcgacgacctgcatgaacgcgccggcagccgcgacgtccttcacctgcatggcagcctgcacgcgccgcgttgcgcgacctgcgcggcagcctaccgggacgccttgcccgattcggtcgagccggaagagggacgacggatcgagccgccgcgttgtccggcctgcggcggacaggtccggccgggcgtggtctggttcggcgaggcgctgcccgaggcggcgctgcgcgaggctttcgccgcggcctgcgagtgcaacctgttgctcagcgtcggcacttccggcgtggtgcagccggcggcgcggatacccggactggcgctggaacacggggccagcgtcgtgcatgtgaacccgcaaccggtgcgcacccgccatccgcgcgaacactgtctcgtcggtccggccggcgaggtgctgcccgaactgttgcgccgggcgtttcccggctga

SEQ ID NO: 361495 - DNA, 588 bp, Pseudomonas aeruginosa
atggaaaacgtctacaagaccccggaagcgcccctggtggaaacccgcggcgcgaagcgggcgcatttcttcgtcacttccctgggcaagatgagcgtgctcttcctcgtcaccctggggctgtacggcgtgtactggatgtacaagcactggaaggcccagcaaccgcagatggagcggcggatcagcccggtatggcgggcgatcttcggcatcttctttttccacgccctcgcccggcggatccaccaggccctgccggaagagcgccaggcactatggagcccgagcaaggatgcgacctgggcggtgctgctgacggtcgcggcgaacctgatcagccacctcaccgacgtggtccccgcgctggagccctactcgctgccctcgctcctgctgctgctcacgccgcttatcccgatgcgcaacatccagcgccaggccaacctcgccagcggcgacccgcagggcacgggcaacgccggctattcgggctacaacctgctgttcatcgtgctcggcgcgctctactggctgctgatcctgatcggttccgcggtgatcctcttcggctcatcccagggctga

SEQ ID NO: 361496 - DNA, 990 bp, Pseudomonas aeruginosa
atgagcgttgaaagcattcgcatcgagggtatcgacacgccggtctcgcgcatcggcctcggcacctgggccatcggcggctggatgtggggcggcgctgacgacgcgacgtcggtggaaaccatccggcgtgcggtggaatccgggatcaacctgatcgacaccgcgccggtctatggcttcggccattccgaggaggtcgtcggcaaggccttgcagggcctgcgcgacaaggcggtgatcgccaccaaggcggcgctggagtggagcgacgcgggcatccaccgcaacgcctccgccgcacgcatccgccgggaggtcgaggactcgctgcggcggctgaagaccgatcgcatcgacctgtaccagatccactggccggacccgctggtggcgcacgaggagaccgccggcgaactggagcgcctgcgccgcgacggcaagatcctcgccatcggcgtgagcaactattcaccggaacagatggacgggttccgccagttcgctccgctggccagcgtgcagccgccctacaacctgttcgagcgcgccatcgacgccgacgtgttgccctacgccgagcgtaacggcatcgtcgtgctggcctacggagcgctgtgccgcggcctgctttccggacggatgaacgccgagacccgcttcgatggcgacgacctgcgcaagtccgacccgaagttccagcagccccgcttcgcccagtacctggcagcggtcgcgcaactggaggaactggctcgcgagcgctatggcaagtcggtactggccctggccatccgctggattctcgatcgcggccctacggtggcgctgtggggggcgcgcaagccggagcagttgaacggcatcgccgacgccttcggctggcgcctggacgacgaggccatggcccgcatcgagcggatcctcgccgagaccatccaggatccggtcggtcccgagttcatggcgccgcccagccgcaacgcctga

SEQ ID NO: 361497 - DNA, 912 bp, Pseudomonas aeruginosa
atgccggctttcacccgttccgaactcgccgacctgaacgtcttcatgaccatcgtccggcgccgcagcttccgtcactcggcccaggaactgggtgtcagtacctcggcgctgagccacagcatgcgcaacctcgaggcgcggctcggggtgaagctgctcaaccgtaccagccgttcggtggtgccgaccgatgccggcagcgcgctggcggccaagctggaggatggtttccaggtgatcggcgaggcgctcggcgagctcgatgcctatcgcacctcgccggtgggccggctgcgcctgaacgtgccgcgcgatgcctcgcggctgctgctggggccggtcctcaggcgcttcaccgaggcgtatccggacctgcaactggaactttcggtggaggaccgcatggtcgacatcgtcgccgacggctacgacgccggcatccgttacggcggcacggtgccccaggacatggtcgcggtgccattgaccggggagctgcgctgggtggtggccgcgtcgcccgattacctggcgcgccacggcgtgccccagcggccggacgacctgttgcggcacgcctgcatccgcatgcgcctgggcgacaactcgttctacaaatgggaactgggcgacggcgagcggatggtcgaggtcgacgtgcccggccccttcagcgtcaacgaaagcaatacggcggttgccgcggccctggacggtgtcggcctggcctactgcctggaggtgggaatcgccgaggagctgcgtagcggccggctgcaactggtattgccggactggacctcgatgggcgcgccgttctgcctctactatccgagccgacgccagccgcaacccggcttgcgccaactgatggaaatgatccgcggcgactggctgggacgtgcctga

SEQ ID NO: 361498 - DNA, 408 bp, Pseudomonas aeruginosa
atgcttaccggtctcaatcacctgaccctggcggtcgccgacctgccggccagcatcgccttctaccgcgatcttctcggctttcgcctggaagcgcgctgggaccagggcgcctatctcgaactgggttcgctgtggctgtgcctgtcccgggagccgcagtacggcgggccggccgcggactacacgcactacgccttcggcatagccgccgcggacttcgcccgcttcgccgcgcagctgcgcgcgcatggcgtgcgcgaatggaagcagaaccgcagcgagggcgattcgttctacttcctcgacccggacggccatcgcctggaggcccacgtcggcgacctgcgcagccggctcgcggcgtgccggcaagcgccctatgcgggaatgcgtttcgccgactag

SEQ ID NO: 361499 - DNA, 978 bp, Pseudomonas aeruginosa
atggaccggatagacatgggcgtgctggtggtgctgttcaatcctggcgacgacgacctggaacaccttggcgaactggcggcggcgtttccgcaactgcgcttcctcgccgtcgacaactcgccgcacagcgatccacagcgcaacgcccggctgcgcgggcaaggcatcgccgtgctctaccacggcaaccggcagggcatcgccggcgccttcaaccaggggctcgacacgctgttccggcgcggcctgcagggtgtgctgctgctcgaccaggactcccgtcccggcggcgccttcctcgccgcccaatggcgcaacctgcaggcatgcaacggccaggcctgcctgctcggtccacggatcttcgaccggggcgaccggcgcttcctgccggccattcacctcgacgggctggcgctcaggcaactgtccctggacggcctgacgaccccacagcgcacctcgttcctgatctcctccggctgcctgctgacccgcgaggcctaccagcgcctcggccacttcgacgaggaactgttcatcgaccacgtggacaccgagtacagcctgcgcgcccaggcgctggacgtgcccctgtacgtcgacccgcggctggtcctcgagcaccgcatcggcacgcgcaagacccgccgcctcggcggtctcagcctcagcgcgatgaaccacgccccgctgcgccgctactacctggcgcgcaacggcctgctggtcctgcgccgctacgcccggtcctcgccgctggccctgctggcgaacctgccgaccctgacccagggcctcgcggtgctcctgctcgaacgcgacaagctgctcaagctgcgctgcctgggctggggcctgtgggacggcctgcgggggcgcggcggcgcactggagcgcaaccgcccgcgcctgctgaagcgcctcgccggtccggccgtggcgtccgtagcttccggcaaggccaaggcctag

SEQ ID NO: 361500 - DNA, 1269 bp, Pseudomonas aeruginosa
gtgtccacgaccagcctctgcccctccgccacgcgggaacacggtcccggcgcgaaacgcgtcctgcctctgctgttccttacctgcctgctggatgccgctggcgtcggcctgatcgtgcccctgctgccgacgctgatcggcagcgtggcgccgctggcggtccgcgacgcggccacctggggcgccgccctggtgatgaccttcgcgctgctgcaattgttcttttcgccggtcctcggcagcctcagcgaccgcttcggacgccgccccgtcctggtcctggcgatgctcggcttcgccctcagctatctgcttctggcgttggccgacagcctctggatgctgttcctcggtcgcgcgctggccgggctcaccggcgccagcgtggccaccgcgatggcctgcgcggcggacctcggcacgcacgggcagcgcacccggcacttcggctggctgtacgccggcctcgccctgggcatgatcctcggccccgctctcggtgggctgctggcgatgcacggcacgacgctgccgctgttgctggccgccggcctgtgcctgctcaacgccctgctcgccggcctgttcctcgaggaaaccctgcccccgacgcgacgccgccgcctggatccgaggcggatgaacgccttgcgctcgatcagcggcctggctcggcaaccgggggtcggacgcctgctggcggtgcttgccctggtattcctcggcttgcaggcggtgatggtggtctggcccttcttcgtgatcgagaagtttcactggagcagcgcctggatcggctactcgctggccctctacggcgtgctcgcggtgctcgcccagaccctcggcgtgaacctctgcaagcggcgcctggacgacgcccgcctgctgcgcctgggcctcgccctgcaaggctgcggcctgctgctgttcgccctggtcgactcgtcattctggctggtctgcgcgctgctgcccttcgcgctcggcagcctcgccaccccggccatgcaggggctgctctcggcccgcgtgccggtcgatcgccagggcgagttgcagggcgtgctgagcagcctgatgagcctcgccgcgatcgtcggtccgccgctgatgagcggcctgttccactggggcagcggtccgctcgcgccagtacccctggccggcgcgccattcctcgccggcgcccttctcgttctggccgggctggtcctggcctggcaacttcgacctacgggagaagaacgatcatggaccggatag

SEQ ID NO: 361501 - DNA, 780 bp, Pseudomonas aeruginosa
atgacgcccagaaaaggaaagctacctgccgtgctcgcctgcatggcagcgctggcgggctgcaacatcaacccggcgaaccagggctcggtgtcgtcctggttctccatgcgcgccggcgatccgcccagcttcgtcaccggcgtggtcggcttcgagaacaccggcagcaacgacccgtccacccgcctgaccctgcgtttccgcgatcccgcctccaagacccatgcggcccacgtcaccacctcgtcgtactccgagctgttcagcctcgcactgacgccgcgctactacgagctttacgagttcgaggtgaggtacctgtcctataccgtcacccgcgagaccggtgcgtacgaggagcgctgcgaggccaacggcgaggcgctggagaagacggtccagaaaaggaagcgcagcgtcacccacacggcggtgaacgtggagtccaactgtcgttctacgccgctgaccaagaccgactactactacgagacctatacctccaagccgttctccgcgccgttccgtgccgagagcttcgccaccaactacatcggcgacttccgcgtgcagtgcagctacaaggagaagaagggcaagaccctcgtcgatagctgccgtctcaactacggcgccgtcagccgcgatcgggtggatgcctgggtggcgcagatgaacgaggcagacaaggacaagcgcgagccgctgccgccggtacgccagcaggcggtcgacacgaagaaggccggcaagctcatccattcggtatttcgctga

SEQ ID NO: 361502 - DNA, 351 bp, Pseudomonas aeruginosa
atggcccttgacccgagccaacgccgacgactgcgccacgcgctatccgacgccttcgtcgacactctcctggagcccgaggatatcgcccggcggataaagggcgtcgacccggcgttgctggaacggttgttcttcgaggaggtggcgccggtctgccacggcaacctgctcagccccgctccggcggtatggaccgccttcgacgaggcctggctggaagaggccatcgagcgacgcctggcgcggctaaggagcagcgccctgcgacgctggcacgagcgctgcctggtcgcctggctgcgatggcgatacgccgacatctggcgcgcgatcgccggcgctctttga

SEQ ID NO: 361503 - DNA, 414 bp, Pseudomonas aeruginosa
atgtcactgccgccgtacctcaagcccggcgacaaggtcgtgttgtacgaccagcactgccgcttctgcacgctctggagcggtttcctggcacgccgcgccgaccaccggctgaagctgcttgccgcgcagtccgccgaaggcctggcgattctcgattggttcgggctggcacccgatcatttcgacacctggctgttcgtcgacggcgcctacgcctgcgacgacaacgatgccctgctcgaggtgctgcgcctgttgccgggcccctggcgtcacctgcgctggctgcgcctgctgccagcctggctgcgcgacgagtgccacgaggcgctacggcgcaaccgctggcgctggttcggccgccagcgccagcccctccgtcgtcgctcctggcgtccccgtcgggcctga

SEQ ID NO: 361504 - DNA, 876 bp, Pseudomonas aeruginosa
atgagcaacgagcgcgacaccagcagaaccccgacgcccgaccacgccgagcacaacgcgttctttccctcgccctattccctgagccagtacacctcggcgaagaccgacttcgacggcgccgactacccgaccccgtacaagggcggcaagaaggtgctgatgatcggtaccgacgaacgctacatcctgatgcagaacggcagcatgttctccaccggcaaccacccggtggaaatgctcctgccgatgtaccacctggacaaggccggcttcgagttcgatgtcgccacgctctccggcaacccggtgaagctggagatgtgggcgatgcccggcgaggacgaggcggtgaagagcatctacgcgaagtacctgcccaagctgaaagcgccgcagaagctcgccgacctcctggagcaggccgtcgccgacgactcgccgtacgccgcggtgttcgttcccggcggccacggcgtgctggcgggcattccgcacagccgggaggtgaaacggctgctcaatgccttcctcgccaaggaccgctacatcatcaccctttgccacggtccggcctgcctgctggcaccggcggtcgacgagaagccggaggactacccgttcaagggctacgagatctgcgtgttccccgacgccctggacaccggcgccaacctggagatcggctacatgcccggtcccctgccctggctggtgggcgagaacctgcagaagctcggggtgaagatcctcaacaagggcatcaccggccaggtccaccgcgaccgcaagctgctcaccggcgacagcccgctggcctccaacaaccttggcaagctggccgccaagacccttctcgaagcgttcgcccgctga

SEQ ID NO: 361505 - DNA, 789 bp, Pseudomonas aeruginosa
atgggcttttgccggcaagccggggatcatgcgggaaaagccaggaacgtccgctccatgaccgactacgccagccttctcttcgacagcgtcgcccggctgcgtaaggccgctaccaccgaggcggtctgccgcgagatggtggagttcgccgcacgcctgggcttcgaccgggtgatcgtctgcagcctgttcccccgccccggcgaggacgaactgatcgacgagctgttcttcgtccatggcgactgggccgaggggcgcagcgcccaggagcgcgacgcctatcttctgcactgtccggtcacccggcacatcctcgaactggacgagccgttcttctggtcgaagagcccctcggaggatcccgagcgcatgacctaccgcatcgtccgtggggtccgcgacctcggccaggtcaatggcatgcaggtgccggtgttcggccgcaacggtctggagggcgcggtgtctttcgccggcgagcggctggacctgaatgccggttgcaagctcgccgcccaggccttctgcccgatcctgttcttcgccctgaagcgcctgcgcggccctgtgtcggcgggcgatgcgcaagcgctcagcgagcgcgagcgggaagtcctgcaatggatcgccctgggcaagcagcaagcggaggtggcggcgatcctgatgatttccgagcgcaccgtggagaatcacctgcgtgccgcccgccgccgtcttggcgcggcgtccaccgcccaggcggtggcgcgggcgctgcgcctgggcgatatcgaggtctga

SEQ ID NO: 361506 - DNA, 1017 bp, Pseudomonas aeruginosa
atgagcagcacgaaccgatttcccgaacgaatgaccgccatcgagatcgcccggcccggcggccccgaggtactggtggcgaccagccggccgctgccgacgcccggcccgcgcgaggtcctggtcgaagtccgcgccgccggcgtcaacggtcccgacgtgcttcagcgcaagggcgtgtacgacccgccgcccggcgcctcggacattcccggcctggagatcgccggcacggtgcgggcggtcggcagcgaggtcagccgcttcgccgtcggcgaggcggtgatggcgttgattcccggcggcggctacgcgcagttcgcggtggccgacgagcgcaccaccctgcacctgcccgacggcctgggcatggaggaagcggcggcgctgccggaaaccttcatgaccgtctgggtcaacctgttccagcgcggtggcttcaaggccggcgagacgctgctggtccacggtggcgcctccggcatcggcaccgccgcgaccatgctgggcaaggccttcggcgcggcgaagatcttcaccacgatctccagcgaggcccagcgcgaggccagcctgcgcctcggcgccgacgtggcgatcgactacaccgagcaggacttcgtcgaggaagtgctgcgcggcaccgaaggtcgcggggtcgatgtgatcgtcgatatcgttgccggcgactatgtgacgcggaactatcaggcggcggcgatgaacggacggatcgtgcagatcggcgtgatcaagggcaaggccgccgaagtcgacctgttcccgatgctgagcaagcgcctggtccatcttggctcgaccctgcgctcgcgaagccacgacgagaaaggcgcgatcatcgccgaactggagcgccaggtctggccgcatgtgcgcgccggcactgtccggccgcaagtgttccgcaccttccctctggaacaggcgcgccaggcccacgaactgatggactccggccagcacatcggcaagatcgtcctcacgtccgctccctga

SEQ ID NO: 361507 - DNA, 876 bp, Pseudomonas aeruginosa
atgaattgggacgacacccgcgtcttcctcgcgctctgccgcgagcacaccctgcgcggcgccgcccgcgcgcttcacatcgaccaggccacggtgggccggcggctggcgtcgctggaggcggcgctgggctcgaccttgttcctgcgcacctcgtccggctacctgctgaccccggccggcgaggcggccttcgaactggccgagaagatggagtgctcggccctggagctgctgcggcggacccgcgggatggaccaccgactgtccggcgaggtgcggttgtccaccaccgactccctggccgtcgacttcgtgctacccgccctggcccgcctgcaccttgaacacccggatatccgcgtgctgctcgacagcgcttcggccgtggtcgacctgcccaagcgcgagaccgacatcgcgattcgtaccctgcggccggaaaatcccgatttgatcctgagaaaactcgccagttggcccatgggcctgttcgcttccgcggactacctgcgacgtaacggcgtgccggtgcccggcgagcgtttccgcggccacgacctggtgatgtacgaaccctattggcacagccagcgcgaactgaccctgggcggcgagccgatccgcgacggccgggtggtcatcgcggtgaattccaacatgatggtgcgccaggccctggcgcgtggcctggggctctgcgagctgccgctgtacatgggcgagcgcgacggactggtgcgggtctggccgcagcgcgagcgacgccggccatacgaggtgtggatggttacccacaaggacctgcgccacaccgcgcgggtccgcgcggtgatcgagcggctggtggaggcgttcgccgaagcgccggcctga

SEQ ID NO: 361508 - DNA, 849 bp, Pseudomonas aeruginosa
atggcaatcccaagcatcccgcgtttggccgtactgacgctcggactggcgctcgcagcggccgccagtgccgccgacgaggcgcaactggtcgaggcgatcaacgcctaccgtggccaggtgcagtcctgcggcgggcaggccagcggcgaactgccgccgctggccgccgatccgcgcctggccttgccggtgaatgccgccggcgacctgcagcaggcgatggcgcaggccgcctacccgatggtcaacgtgcagtcgatcagcctttccgggccgcgcgatgccggcgcggcgatgaaggcgctgcaggaaagcttctgccgcgtggtgctcgacccgcaattcgtcgacgtcggcgtcagccgccaggaccgcgactggcgcatcgtcctcgcccggccattgctgcgcggcggcatgggcgattggcaggcggaagggcagaagctcctggaacggatcaacgccgcccgcgggcaagcccgccagtgcggtggcaaaccttacgcagcggcccagccgctggcctggaacgccacccttggcggcgccgccgaagcgcattcgcgggcgatggccaacggcaacttcttcgaccacctcgaccgcgacggccgcacccccggcgaccgcgccgagctggccggctacagcggcgggctgatcggcgaaaacatcgccgccggccaggacggggtggacaaggtggtcgacggctggctggccagcccgggccactgcgccaacctgatgaaccccggctaccgcgagctgggcgcggcctacgccaccgatccgaagagcgacgcgggaatctactggacggccatgttcggttcgccctga

SEQ ID NO: 361509 - DNA, 837 bp, Pseudomonas aeruginosa
atgtccaagtccagctactacgcgccgcacggcgggcacccggcacagaccgagctgctcaccgaccgggcgatgttcaccgaagcctatgccgtgattcccaagggggtgatgcgcgatatcgtcaccagccacctgccgttctgggacaacatgcgcatgtgggtgatcgcccgcccgctgtccggcttcgccgagaccttctcgcagtacatcgtcgaactggcgcccaacggcggcagcgacaaaccggagcaggatcccaacgccgaggccgtgctgttcgtcgtcgaaggcgagctgagcctgaccctgcagggccaggtccacgccatgcagccgggcggctacgccttcattccgccgggcgccgactacaaggtgcgcaataccaccggccagcacacccgcttccactggatccgcaagcactaccagaaggtcgacggcgtaccgctgccggaagccttcgtcaccaacgagcaggacatccagccgctggtgatgccggacaccgaaggccgctggagcaccacccgcttcgtcgacatgagcgacatgcgccacgacatgcacgtcaacatcgtcaacttcgagccgggcggcgtgatccccttcgccgagacccacgtgatggagcacggcctgtacgtgctggaaggcaaggcggtgtaccgcctgaaccaggactgggtcgaggtggaggccggcgacttcatgtggctgcgcgccttctgcccgcaggcctgctattcgggcggcccggggcgcttccgctacctgctgtacaaggatgtcaaccggcacatgcgcctgactctcaatgcgccgcattga

SEQ ID NO: 361510 - DNA, 903 bp, Pseudomonas aeruginosa
atgagcgacagtgaaaaatcgaatagccgcctgttcgacctcgacctgctccgcgccatcgtcacggtggccgactgcggcagcttcaccactgccgccgcgcgcctgcactcgacccagtcgaccgtcagccagaaggttcgccgcctggaggaaatggccggacaccgcctgctggagcgcggcaaccgcgacgtgttgccgaccgacgccggcgatacgctgctcggctatgcccgccgcctgctggcactgaacgacgaactggccgaggcgctgtccggcgccacggtggcgctgacggtgcgcatcggcgtgccggacgacttcgccgccggccgcaccaccgagcgactggcggccttcaaccggcgttatccacaggtcaagctggaagtcaccagcggcatgagccgcgacctcagcgccagctacgaccgcggcgaactggacctggtgctgctcaagcagcgccgcgccagccgcgaagcactggcctgctggccggaaaagacatgctgggtggacagcgccaggaacccctgcatcgacctcgacccactgcccatcgtcaccttcccgccgcgcggggtctaccgcgacgagatgatcgccgccctggaagcggtcggccggcgctggcacatcagcttcaccagttccagcctcagcggcctgcaatcggccatcgccgacggcatgggtataggcctgctgccgttgcgcgcggtgagcgcaggccacgcggtgctgccgaagaacgccgggctgccggcggtggacgtgttcgaagtggcgctgctgcaccggccggcggcggatccgatggtgaaggcgctggcgcgcgtgctgtcgcgggtgctggcggaagatacccggagccggcccgcattcgaaaaatga

SEQ ID NO: 361511 - DNA, 717 bp, Pseudomonas aeruginosa
atgcgcgacgagccgtcccgacccctgacggtgatctaccagtccctgcgcgagcagatcgagcgcggcctgctcgcgcgcggcagcaagctgcccagcgaacggcagttgagcgagctgttctcgaccacccgcatcaccctgcgcgaggcgctcggccagttggaggaccagggcctgatctaccgcgaggaacgccgcggctggttcgtctcgccgcagcggctgctgtacaacccgctggtgcgcagccacttccacgcgatggtcgccgaccagggccgcgtgccggagaccgaggtgctcggcgcggcgatgatcccggccagcgtcgacatctgccagcgcctggagctgtcggcgctgtcgcgggtgttccagatccgccgggcgcggcgggtcgacgggcggctggtgctgtacgtcgagcactacctgaatcccgcctactttcccggcatcgagcgcttcgacctgactcgctcgctgaccgatctctacgccaaccactacggcatccgctacggccgggtgcgcttcgagatggtcccgaccatcctcccggcggaggccgccgggccgctgcgggtttcggtgggcagcccggcgctgcagatcgtgcgggtcaaccgcgaccaggcgggccgcctgatcgactgcgacctggagtactggcgccacgacgcgctgcaggtcaacgtcgaggtgcccgagtag

SEQ ID NO: 361512 - DNA, 903 bp, Pseudomonas aeruginosa
atgctgagaaacgtcaccgacctagacctgcgtctgttgcgcatcttcgcctgcgtggtgaagtgcggcggtttcaccgcggcccaggccgagctgaacatgagccagtcgaacatcagcatgcacatcgccagcctggagaagcgcctcggctaccggctctgcgagcgcggcaagggcggcttccgactgaccgccaagggccgccgggtgctggaggcttcgcgaacgatgttcgacgccatcggcctgtttcgcgaccaggcgcaggcgttgtccggacgtttggtcggggagctgtacctgggcctggcggacaatctcgcgaccttgccccaggcccgtttcggcgatgcgctggcgcgcttccagcggcgcgaccaggatgtccaactgaaccttttcgtcaattcgcccatcgagctggaactggcggtgatcgaaggcgagctggacctggcgatctcctatttcagccgttcgcggccgagcctcgaataccgcccgctgtatcgtgaagagatcggcgtgttctgtggcgatcaccatccgctgttcgccgaggcgcagccgactctggagcggatcgccgcctgcgactgggtgatgcacggcttcctgccggaaaacctggtcctgccgctacgcccgtcgcgcagccgcgccaccgcctaccacatggaagcggtggcccatgccgtgctggccggcacccacctgggctacctgccgacccattacgccgaagcctggatcgagcgcgggcggatgcgcgcgctgttgccggagcggctgagctatccggtggagcacagcatgatcgtctatgccgggcgccccctcagcgaagccgcccgcgccttcatcgacgacctgctgcaggtccacggcctggcgtcctga

SEQ ID NO: 361513 - DNA, 1182 bp, Pseudomonas aeruginosa
atgagcgacctgcattactggaactaccccaccgatatcctctgcggcgtcggcgccctggaacaactgccgaggcgttgcgcgctggcgggcgcacgccggcccctgctggtcaccgatcccggcatgctcgccctggagcccctgcgcctggtgcgcgagtgcctggaacgcgccggcatcgaccatgacctgttccacgaactgtcgagcaaccccagcctcgctgaagtccagggcggcgccaggcgcttcgaggccggcgggcatgacgcgctgatcgccctcggcggcggcagcgccctcgacgcggccaagggaatcgccctgctcagccgcgatccgcacggactcgaacgcttcgaatggacacagacgctgcgcagctatccgaccctcgccgactacccgccgctcggcctgccgccgctgctggcgctgcccacgaccgccggcaccggctcggaactgggacgcgaggcggtgctgaccgacacgcaactgggcatcaagcgggtcgtcggccatcgcgagctgctggccgcctgcgtattcctcgacccgcgcctgacccgcgggttgccgccggcgctgagcgccgccaccggcatggacgccctcacccatcacctggaggcgctgttctcgccgctctaccatccgatgtcggcgggcatcgccctggaaggcgtgcgcctggtcaggcagcacctggaaaacgccgtgcgcgacggcaacgacctcgccgcccgggaaggcatgctggtagcctcggccagcgccgcagtggcattccagaaggggcttggcggggtccacgccctggcccacccgctgggcgctcgccatcacctgcaccacggcctgctgaacgccgtgctgctgccctacgttctgctggccaaccgcccggcgatagaagccgacgccgcgcgcctggcgcgctacctggaactcgacgaagcgagcttcgacggcctgctggcgtggatcctcgaactgcgcgcgcgcatcggcatcccggcgaacctcgccgccctcggcctggatggcgaggacgcgcaatgggtgggcgagcaggcgctggccgacctgtcgtcctcggcgaccaacgccctgccgctcgatgcccgggattatgcgcgcatctaccgccaggcggtggccgggactctcgcctga

SEQ ID NO: 361514 - DNA, 1491 bp, Pseudomonas aeruginosa
atgactgatctccgcgatgcctcccgcgacgaacgcctgctggcggcccacggctatcgccaggaactggagcgcgggctgagcctgtggtcgtccttttccgtcggcttcgccaccatctcgccggtggtgggcatctactcggtgatgtccctcggcgccatgagcatgggcccctcctgggtctgggtggtgccgctgtgcctgctgctgcagttcggcgtggcgctggtctacgccgagctgtcctcgcagtttccgctggccggcggctgctaccagtgggtgcgacgcctggtgggcgaccgcctggcctggttcaccggcttcctctacctggcttcggcgctggcctcgctgactaccgtggcctacctcggtggcttctggctcggcctgctggcgaccggcgcgccgccgtcggccaacggccaggtgctctgcggcgcgctgctgctggcgctgggactggcggtgaacctgctggggatcaacccgctgaagtacttcgtcaatgccgggatcgtcgccgaggccatcgcctccatcggtatcggcgtgctgttgctgctgttcttccgcaaccatccgctcgacctgctgttcagcggcccgggcggcacaggcggtgcggacggcgcctacctggacggcgtgctgaccgcgctggcggtgggcggctgggccttcctcggcttcgacgcctgctcgcagatttccgaggaaaccaccgatgcccgcgtctccactccccgggcgatcctgcgctcgatgctggtggtgggactcaccgtgatgctcaccgccttcgccgtgaccctgtcctaccaggacatcggcgcggtggtcagcggccaggtggtcgacccggtcaccccggcggtggtggacgccttcggcgcctgggccgagcggcccttcgtcgcagtggtgctgatcgccttcgtcgcctgcgtggtgtcggtgcagacctacatcggccgggcgatcttcggcatggcgcgcgacgccatcctgcccggctccgccctgctgcgccgggtcgaccggcgcaaggtgccgatggcggcgatggtctgcagcacgctgctggccagcctaggcctggccctggggctgaacgccacggcggtcggcacgctgatcgcgttcggcagcggcggtttcttcgtggtctttctgatcgtcgccgcctgcgccctctgggcccgcctcgtcggccgctgggacccggacaagggcgccttgcgcctgggacgcgcggggctggcggtgaacgtcctggcagtcgcctggctgtcgttcgaggcgctcaacgtcgcctggccgcgggccagcctcgccccgcccgacgcgccctggttccaggtctgggcggtggtcgtggtgttctccgcgctggccgcgttcggcctgctctacatggtcatcgccaagccgcatcggcgcatcgccaccagcctcagcttcgccgctccgccggcggactga

SEQ ID NO: 361515 - DNA, 1917 bp, Pseudomonas aeruginosa
atgcacctgataccccattggatccccctggtcgccagcctcggcctgctcgccggcggctcgtccgcgtccgccgccgaggaagccttcgacctctggaacgaatgcgccaaagcctgcgtgctcgacctcaaggacggcgtgcgttccagccgcatgagcgtcgacccggccatcgccgacaccaacggccagggcgtgctgcactactccatggtcctggagggcggcaacgacgcgctcaagctggccatcgacaacgccctcagcatcaccagcgacggcctgaccatccgcctcgaaggcggcgtcgagccgaacaagccggtgcgctacagctacacgcgccaggcgcgcggcagttggtcgctgaactggctggtaccgatcggccacgagaagccctcgaacatcaaggtgttcatccacgaactgaacgccggcaaccagctcagccacatgtcgccgatctacaccatcgagatgggcgacgagttgctggcgaagctggcgcgcgatgccaccttcttcgtcagggcgcacgagagcaacgagatgcagccgacgctcgccatcagccatgccggggtcagcgtggtcatggcccagacccagccgcgccgggaaaagcgctggagcgaatgggccagcggcaaggtgttgtgcctgctcgacccgctggacggggtctacaactacctcgcccagcaacgctgcaacctcgacgatacctgggaaggcaagatctaccgggtgctcgccggcaacccggcgaagcatgacctggacatcaaacccacggtcatcagtcatcgcctgcactttcccgagggcggcagcctggccgcgctgaccgcgcaccaggcttgccacctgccgctggagactttcacccgtcatcgccagccgcgcggctgggaacaactggagcagtgcggctatccggtgcagcggctggtcgccctctacctggcggcgcggctgtcgtggaaccaggtcgaccaggtgatccgcaacgccctggccagccccggcagcggcggcgacctgggcgaagcgatccgcgagcagccggagcaggcccgtctggccctgaccctggccgccgccgagagcgagcgcttcgtccggcagggcaccggcaacgacgaggccggcgcggccaacgccgacgtggtgagcctgacctgcccggtcgccgccggtgaatgcgcgggcccggcggacagcggcgacgccctgctggagcgcaactatcccactggcgcggagttcctcggcgacggcggcgacgtcagcttcagcacccgcggcacgcagaactggacggtggagcggctgctccaggcgcaccgccaactggaggagcgcggctatgtgttcgtcggctaccacggcaccttcctcgaagcggcgcaaagcatcgtcttcggcggggtgcgcgcgcgcagccaggacctcgacgcgatctggcgcggtttctatatcgccggcgatccggcgctggcctacggctacgcccaggaccaggaacccgacgcacgcggccggatccgcaacggtgccctgctgcgggtctatgtgccgcgctcgagcctgccgggcttctaccgcaccagcctgaccctggccgcgccggaggcggcgggcgaggtcgaacggctgatcggccatccgctgccgctgcgcctggacgccatcaccggccccgaggaggaaggcgggcgcctggagaccattctcggctggccgctggccgagcgcaccgtggtgattccctcggcgatccccaccgacccgcgcaacgtcggcggcgacctcgacccgtccagcatccccgacaaggaacaggcgatcagcgccctgccggactacgccagccagcccggcaaaccgccgcgcgaggacctgaagtaa

SEQ ID NO: 361516 - DNA, 369 bp, Pseudomonas aeruginosa
atggacgccaaagccctgctcctcggcagcctctgcctggccgccccattcgccgacgcggcgacgctcgacaatgctctctccgcctgcctcgccgcccggctcggtgcaccgcacacggcggagggccagttgcacctgccactcacccttgaggcccggcgctccaccggcgaatgcggctgtacctcggcgctggtgcgatatcggctgctggccaggggcgccagcgccgacagcctcgtgcttcaagaggggctgctcgatagtcgccaggacacgccgcgcacgctgaccctggcggcggacgccggcttggcgagcggccgcgaactggtcgtcaccctgggttgtcaggcgcctgactga

SEQ ID NO: 361517 - DNA, 1989 bp, Pseudomonas aeruginosa
atggctgtcaatgattacgaacctggttcgatggttattacacatgtgcagggtggtgggcgtgacataatccagtatattcctgctcgatcaagctacggtactccaccatttgtcccaccaggaccaagtccgtatgtcggtactggaatgcaggagtacaggaagctaagaagtacgcttgataagtcccattcagaactcaagaaaaacctgaaaaatgaaaccctgaaggaggttgatgaactcaagagtgaagcggggttgccaggtaaagcggtcagtgccaatgacatccgcgatgaaaagagtatcgttgatgcactcatggatgccaaagcaaaatcgctaaaggtcattgaggatcgcccggccaatctttatacggcttcagactttcctcagaagtcagagtcgatgtaccagagtcagttgctggccagccgaaaattctatggagagttcctggatcgccatatgagtgagctggccaaagcgtacagcgccgatatctataaggcgcaaatcgctatcttgaaacaaacgtctcaagagctggagaataaagcccggtcattggaagcagaagcccagcgagccgctgctgaggtggaggcggactacaaggccaggaaggcaaatgtcgagaaaaaagtgcagtccgagcttgaccaggctgggaatgctttgcctcaactgaccaatccaacgccagagcagtggcttgaacgcgctactcaactggttacgcaggcgatcgccaataagaagaaattgcagactgcaaacaatgccttgattgccaaggcacccaatgcactggagaaacaaaaggcaacctacaacgccgatctcctagtggatgaaatcgccagcctgcaagcacggctggacaagctgaacgccgaaacggcaaggcgcaaggaaatcgctcgtcaagcggcgatcagggctgccaatacttatgccatgccagccaatggcagcgttgtcgccaccgccgcaggccggggtctgatccaggtcgcacaaggcgccgcatcccttgctcaagcgatctccgatgcgattgccgtcctgggccgggtcctggcttcagcaccctcggtgatggccgtgggctttgccagtctgacctactcctcccggactgccgagcaatggcaggaccaaacgcccgatagcgttcgttacgccctgggcatggatgccgctaaattggggcttcccccaagcgtaaacctgaacgcggttgcaaaagccagcggtaccgtcgatctgccgatgcgcctgaccaacgaggcgcgaggcaacacgacgaccctttcggtggtcagcaccgatggtgtgagcgttccgaaagccgttccggtccggatggcggcctataacgccgcaacaggactgtacgaggttacggttccctctacggtcgcagaagcgccgccactgatcctgacttggacgccggcgagtcctccaggaaaccagaacccttcgagtaccactccggtcataccgaagccggtgccggtatatgagggagcggccctcacaccgttgaagaccggcccggagtcctatccgggaatgctactggacctaaacgatctgatcgtgattttcccggcggattctggagtcaaacctgtttatgtaatgctcagtagtcctcttgatagtggtatcttcacacggaggcaactacagaaaaaatttgatagccacaaatatgattttgggctgggtgaaaaaagcgccaacaatggaacgcttgcagagtttagggataaaattcttgagcaccttgctgatcctgcaaccgtagaaaaagggacttaccactccgaagtaaactcaaaagtacattacaatgccaggactaatattgttgttatcattggagaggatgggatgtttgtttctgggtggaggattgagtctggcacggatcaatacaatttttacatgaaaaatgaggtgctttaa

SEQ ID NO: 361518 - DNA, 498 bp, Pseudomonas aeruginosa
atgaacctccagaaccgcaacaacctcatcctgagcctgatcgccgagacccagttcgacgcctacgtgcaaggctacatggccaaagcaggcgctgccgccggtgcttccgacaatctgctggtcgaggctgaaggtgctgcgatgctgcagggccttgtcgctccggttcgcgctcagcagcgtgcctgtggacagcccctgcagaacgccctgctccaaatcgcccacgacctactgttgcagacgaagtcgcaactggccatcgcggccaatgccagctcgatccacgtgatccagcgggacatgaacagggctatctggaatatcgcgactgcaatcgatcacctggccgagttcgcccaaccctcccaggacaccgtgaaggtgatcgagcggctgatgctcttcgtcggcagctcgcctagcccggaaggccagcaactggccgcagaggcaagtgcagtgcttggcatgagcgaggggggcctggcatga

SEQ ID NO: 361519 - DNA, 231 bp, Pseudomonas aeruginosa
atgagcagaaaaaaccaatgggtcgtacccgtcaacggcggtgatcagtggggcgtgcgcggtgaaggcaacgaccgcctcacctccgtccacgacacgcagcaacaggcgattgaccgtgcgcgggacatcgccatcaaccagcagagcgagatgttcatccaaggtcgtgacggccagatccgtgagcgcaacagctacggtcatgatccgttcccgcccaagggctga

SEQ ID NO: 361520 - DNA, 963 bp, Pseudomonas aeruginosa
atggcgacgcacgacgcttgggccttgatctgccgcctgttcgcgggtggcacgcctgtactgcgcgccatgttgtcgccgcgcgaggcagtggcgctgtccatactcggcaaggcggtcaagccgacggtcatggatcagtccttcgtgctgtgcccgcactgccaacagcatcgggcgcaggtgtggagcgatggtcgtggcggacggatgtgccgttgcccggactgcgggccagtgaccgtcgaggccgccgatggtgcggcgctggtcttggatgaggattggctgcgccagaagatgcgcctcgcgctcggtattgaaagtcgcgatggcatcgatgacctcggcgacggagcgtggcggctgggcgatgcccggcggtcgccggtgctgctggcgcgcgatctcacacgggtgctgcacgaacctgcgctgctggagcgggtgcgcgtagcgggcagtgacatccgggtgatcacgccaaggccgagcacgacgcgcggagcgcccttcggcgcgggcgtcgagtggttggcgctggaggagcgcttcgcgttctatggcggcgggatcacgttcatcgccacgccgtcacccgtggcgcaagcagtcgccgatccggccacgccagtgaacggaccgttctcggcggacttcaggtgggcgacgctgccggatgttcaggccacgccgatccagttcaccaaaggtcaggccagcgtgttcaaagctctctgggaactcaagggcgtcgaggtggatggcgaaagggtcatgcagcgcgccggccagaagagcgacaagcccatcgacctgttcaagatcaaagcgaaagacaagggcaatcctctgcatgcggcacggcttgcggcctacggcgcactcgtggtcacgcagcaacgcgcggggctatatgcgatgccgtgtgcggcagcgagaaaggaggttgtcatgacgtga

SEQ ID NO: 361521 - DNA, 1236 bp, Pseudomonas aeruginosa
atgaagaaaacctttgtcgacgtgatgctcgagctgccggtggatgccacgctgcgcgacttcctgacctcacatggcctgcccgtgccgaacgggttcgcgtgggacgatacgccagagaccagccagttcctggtggaggcaatcaaggtttggccggatgctgatgcccgtgaccgcatggcagccaacctcaatgccagcgtccagttgggtgatgcggcaggcaagcaggcgatgtttgaggcggccgtcgatgatgcggccgccttgtccggtctggccttgtgctccagtgatctgcaccgttcgttctggctctatgctcaccacccggcgctgttcgagcgcgcctgcgatttcgaccattgggaacaccacggttcacaagcgcaacactatgacatggggttgaagcgcaagcccatcggtagcgacactgcgctggccggattgcgccacagcatctcggccttttacaagcgcgaactgcaatgcggggacggcagcgtggcctatctggtgacgcgcacgcccggcatccacttgctgatcgttcacgtcaaggattcggccatgctgcggctggagttcgaaggcgtgacgctgacacgccgcatcggcaatcccaacatcccgctggcgctggaatattccgagaccaccggcgtcgtgcgcgcactggtgcgtggtggggcgaaataccagcagatgctgatcgatgccttcgccgagcatgtgctgggtgtcaaagcccatgcccagaaaatcaaaccgccgaccctggatttgtcgatgttgcgcaccggcttcgacgtgccggaggtgttcgaggatgggttttcgctggtgcaactcaaggcgctcactctcctcagcccgggcggtgatctgaaaatcgagtgcaccgcgatgcaggccagtcagcagcgttcggtgcatgagttgctgaaggaacaactgcccggcccgttggaaggcaactgggcggtgacggcggcgcaggtcaatctgtactacccgccagagccaggacgcacacggcccaaggtggtcagcatcgaagtgaccagcaaagggcggctgaacctcaacaaattcgacgccaagatgcaggcgcaactggaaggctatctggtcgcggtcggcatcttgcagaagggccaaaccctgagcgcgcacgaaatgccgccggaaacggatgccgttggttcaaccccagtgatcgaggactga

SEQ ID NO: 361522 - DNA, 342 bp, Pseudomonas aeruginosa
atggcttcggcattcggggcacgcctgcggcgcttgcgcgaggcaaagaatctgacgctgcaacaggtcgccgacgcggtcggctgcaccaaggcctacatctgggaactggagatgaaggacgggcagcgtccctccgccgagcggattcagaagatcgctcaggtgctcggcgtgacgatggaggacgtgatgggcacgcccatgcagcaggcaccggaggccagccccgaggacgtggccttcttccgtgagtacgccgggatggccgatgaggagaaggatcgttaccggcaggcgctcaagatcatgttccccgataagagcgacggcggggactga

SEQ ID NO: 361523 - DNA, 930 bp, Pseudomonas aeruginosa
ttgagcacgccgcaagctctcactggttcgattgccgccagccacgtcatcaagtggctgcgggcgtggtacagcacaggcatgcccgacgccatcgacctcgagatcgtgcggcagatgctgccgagcacgccctacggcagcggcgttcgggagatcaaacagccggtgcagttcaacgacgatgctttcgaggggatgctggcgcgcgaccccaatgaccacgaggtgtggggcatcgcttacaacggcaaatcgcgcccggaacgccaacgcttcaccatcgctcacgagctgggtcacttcattctgcatcgcggtcaacagcagaacttcaactgcgacaagcagagcgttcacaccggcatcgagacgctccgcgacatcgagcgggaagccgacgacttcgccagcaacttgctgatgcctggcgatctgctgcgcgcatggatttccaaccagcgcatcgacttccgcgtcctcggtgacatcgccgagcgtttcaacgtctcgctcgaggcgctgtgcatccgctacatcaagttcacgacggaacgcgccatcctcgtgtattgggacaacggctacatgaagtacgagtggcgcagcggcagcgcgagacggacgcgggcgcgcattcggcgcaacggcgagccggtggaacccatgccgggcacgctggccgctgacgccagcatcgcgcaggagtgggacggtacggagatgtccgccgcgatctggtgcccggaagaagcgccgcacatgaggctgcgcgagctcaagcacaccttcgccgggcgtgaccgtgtcctcacgctgcttctgctcgaaagcgccgaaccgcgttcgtgggatcggtcgtggcacgatgaagatgccgaagactgcgccgacagattcgcatccagcggtcagttcccggttcgatga

SEQ ID NO: 361524 - DNA, 855 bp, Pseudomonas aeruginosa
atgacgacattgcctgccgatgatgcattgacagcgcagcaacgtgaggttcagcgatttctgggccgctgcttgctgcgtctgcagcagtacgaaaagttgatgaaggccatcgtggcccaccacgaaatctctgccactggattaccgctggcgtcgaatcaggagcagcgcatcgcggatgctgccagcaagacactgggcaccttggtgggtgcgctcttcggttcctatgtcactaccgacgagagcgatggggctacttccgagtcagatgagcgcgacgacgtcatttcgttcaaattcaagatgaacctgcgcatgtctgtcgaggactacgacaggacgcagagcgatctcaaggagctggtgctgctacggaacaacctggtgcaccacttcattgaccagcacgacctgtggagcttggacggatgccgctgtgcgcaggacaccctgacggcagcctacagccgcattgatcagcacttcgaacaactgcggggttgggcagaacacatggatcaggcccggcgactggcagcagagtttgcccagtccgatgccttccgcgatctggtgatccacggcatcgctccggatggctcagtggattggccttccgcagggattgtgcgcgcactgcgggacgcagctgccgaactggccatcgacggctggacgccggtcgcttcggcgggacgctggatcgcagaacggctccccgaacatctgcctgccaagtacggctgcagcagttggcggcaggtcgtacacgagtcgcgcctgtttgagcttcgataccgtgatgtgggcggccagcgtgcggcttggtatcgggccaagcagaactga

SEQ ID NO: 361525 - DNA, 216 bp, Pseudomonas aeruginosa
atgacagaactcgaacctatctccatttccccgtcgcctgaccagcctcggcatccgcagcaggaaatcgccgacctgctggccgctgcgttgctgcgcctgcgcgcacaccccggacgcaacaccatcgaaaacagcgagcgcgttcgccttggcttctgcggccaccagcgcgtgaatgcgaaccccgatcacaaacacggagttcgtccatga

SEQ ID NO: 361526 - DNA, 471 bp, Pseudomonas aeruginosa
atgacggcacacgcacaacccaccatcacctcggtcgccgcccgcgtcgccggacttccccatttatcgatgggcgatctctggaagctgtgggatgagcatttcgatgaacggcctgctcatcatcaccgcgtctggctggagactcgactggcctacaaaattcaggagcgcgccttcggcggcctgaaaccttcgctgcgcaagaagctcgaggacatcggcgaaaccggcctcctgccgaagcagttgcgcaacgatgctctgcgcctgttaccgggcaccatcctgacgcgcatctacgatgacattgagcatcgtgtgctggtgcgcggcgcgaacgacttcgagtaccacgggcaacgcttcaagagcttgtcctcgattgcgggccacatcaccggcagccactggtcgggccctgtgttcttcggcctcaaaaagcccgcatcgaagaaggtgacgacatga

SEQ ID NO: 361527 - DNA, 1404 bp, Pseudomonas aeruginosa
atgagttcaccgcgcaccaatccgccagtgacggtcacgccgaagaagcgctgcgccgtctacacccgaaagtccaccgacgaggggctggatcaggaatacaacagcctcgaagcccagcgcgacgcaggcctcgccttcatcgccagccagcggcacgaaggctggattgccatcggcgacggctacgacgacggcggctactccggcggcaacatggagcgccctggattgcgccgtctcatggtcgacatcgaagccggaaagatcgacaccgtggtggtctacaagatcgaccgcttgacgcgcagcctgccggacttcgccaagctggtcgaggtattcgaccgcaacggcgtgtccttcgtctccgtcacgcagcagttcaacaccaccacttcgatggggcgactgacgctcaacattctgctgtccttcgcgcagttcgagcgcgaggtcaccggcgagcgcatccgtgacaagatcgcggcaagcaaggccaagggcatgtggatgggcggtgtcccgcccttgggcttcgatgtcgtcgagcgcaagctcatcgtcaacgaaagtgaggcggcgctggtgcgcgacatcttccggcgctacggcgagcatggatcggccgcgcggttggtgcgcgaattggagatcgaaggccacaccacgaaggcgtggctgacgaaggccggacggcaacgtccggggcgcaccatcgaccagcagtacctgttcctgctgctgcgcaaccgcatctatctcggcgagatctccaacaacggccagtggtacgaaggccagcacgaagccatcgtcacacccagcctgtggaatgcggcgcatgctttcatcgaacggcgcaaacaggcaccgcgcgagcacgcagccaaacatccggcgctgctgacgggactgctgttcgcgcctgatggccaacgcatgctgcattcctttgtcaagaagaaaaacggcaagcaataccgctactacgttccctacctgcacaagcggcgcaacgcgggcgcgaccctgtcgcccggcgtggccgatatcggccatctgcccgccgccgaaatcgagaacgcggtgctggcgcaaatccatgccgtactgtcttcgccgcagatgctgatcgcagtgtggcgatcctgccagcagcatcctacaggcagccagcttgacgaagcgcaggtggtcgtggccatgcagcgcatcggcgatgtgtgggcgcagttgttccccgccgagcagcaacgcatcacgcggctgctcgtcgagcgcgtgcaattgcacgaccacggactggacatcgtctggcgcgaggatggctggcttggcctcggccccgacattggcgggcatccgctggtcgaggaacagattgaggagacgctggcatga

SEQ ID NO: 361528 - DNA, 468 bp, Pseudomonas aeruginosa
atgacgggagcgaccgacaacccgcgcaagcgcgccgtccgaatcgaagtcggtgccgatgcgcgcagctatgtcagcggcggccagcgcgtgacactggtgccgttgaccatcaaacgccgccagaaccgcaagttgctgatcccgcccacgcccgatgcctatggcgcggtgggcggcttggatgcgccgatgatcaagacgctcggcaaggcgttccactggaagcggctgctcgacgacggcgagtacccgacgatggtagatatggcgcgcgcgcggaaactggaaccgggctgggtatccgaagtgctgcgcctgaccatgcttgcaccggacatcgtcgaagcgattgtcgaaggccgccagccccggcatctgaacctgcatgtgctgcgcggtcgtccggaactgctgccgcgtgactgggcagagcagcgccggttcttgggctttactgacgcctga

SEQ ID NO: 361529 - DNA, 264 bp, Pseudomonas aeruginosa
atgcagacatcagcgagcagtatcccccggtcgtcgcagcaggcgatcaacagcctttcacccggcgaccgccgggtgctcaacgaaaacgaactggcccagcggtggggcgtcagccccaagacactgcaacgttggcgcagtgaaggtcgcggcccgcgctacctgaagctgtccaagcgcgtcggctatcccgtcgacgcggtcatcgagttcgagcgcgacgcgctccacgactcgacgtccgaacgcgcggcggtttga

SEQ ID NO: 361530 - DNA, 282 bp, Pseudomonas aeruginosa
atgagcaccaatctcatcgcttcactgcgtaagcaactgccatccatctacggcgaacaccttcccgacgaaatccggtatcgcctcgccgacggccaggatgtcgttgtcccgttcgatgccgccacggtggatgaactggccttcgctatccagacggccaatgcggaatcgctggcgctcggtcgccgtcgcaccgcgctggaagaactccacacggaggtgcgcaagcgtgctgcccgtggagccgaccgtattgccgacgtgtcgtgggagggctga

SEQ ID NO: 361531 - DNA, 210 bp, Pseudomonas aeruginosa
atgcttcgcaaacatctccttgaactccaatcgagcgacaccgagttgcagctcgaaggttatgtgcgcaaacagctcaaatatctgcctttcgaaaccttcgccaaccaagctttcggctgccagcacgggctgggtaacgacgagcctcgtctcgccacattcatcctcagcatgtcgatgaacaaagggcggcgttgcagcctctga

SEQ ID NO: 361532 - DNA, 1731 bp, Pseudomonas aeruginosa
atggccaagatcaacccgcaagatctgaaagaccggctacttgcccctggtttcaccgcgccgcccgttcttgaacagttgtcggacccgatcagcgacacgcccatggtgctgacactcgaccaggtcctcccctggcacgacaacccccggaccactcgaaacccgaaatacgatgagctgaaagaatcgatccggcatcgaggcctcgatacgccgccaccagtgactcgacgccctggggaagacaaataccgcattcgcaacggtggaaacactcgcctggaaattctcaacgagctctacaaagagaccggcgacgagcgttacttccgcttcaactgcctgttcaggccctgggacaagcagcgcggcgaaatcatcgcgctgactggccacctggctgagaacgatctgaagggtgacctgaagttcattgagcgagctattggagttaaaaaggcgaaagtcctctatgaacaagagagcggcggtgaaagcatttcccagcgtgagctggcacgtcggctaaaagcggatggctacccagtatctcagtcccacataagcagaatgctggataccgttgagttcctgcttccagccattccaagcatgctgtactcgggcctgggggttgatcgtgtctctcgcattctctcactgcgcaaggcctctctgaactgctggaaccgcctctactccagcgagggtatcgacttcgagatgctgttccaggacaccctggcaatcttcgacagtagcccagacgagttcattttcgagcgtttccaggacgaactcatcgaccagatgaagcggcccctgggcctgcgttatgaccaaatcctgctcgagatcaccaacggccagcaggaacagcgccggggcactctggtcgacctgcccgcacctgccgcaccacctgaaatcccaccagtagggcaggaaagtcctgctgcgtcgactactggacaagcacaatcacagagccccgctgccggcctccaaacgtccaagaccaatagcctccggggtaatccctctaccccgccaactccgccgctacctgtacaacagcagcaactgaccgacgaggagcgtgctgagctcttggcaggtcatatcgtgagcccggtatccaccaagatccagcagactcgccaacggctggccgctctcgagggtgaacatctacctgtcttcgaggaaacagctctgcaggcaatcccggtgcaagtcggcggcctgcacccgatcaccgacctctggtacatcgagcgttcgatcgacacccccgaaatcctgcgacagcacatcgctgatctggctgaagaaatcgctctgcacgtctgtgccctaggcgagatcgtcaggatccagggcggtgtgggttacacgtatcgcgagcccaatgaagaccatgagattactgattcagcgctgcacctcatgacgctgcttcaagcgctcagcggccaggtccaagtcgtcctgaactcacacgaccagcagacctgccgcgacgccctgggcgagtttcaattctcagctggcctcgctcagttgctgctgggccaacccaccacaggcgatcagccatccagccaggcaggccgtctcaatgacgaagccctggtgaaactgttccggataattcgtcttgcccgacgcctggttgaccttgagctgctgccggccgcctccgagcaagcagctaccgaccagtga

SEQ ID NO: 361533 - DNA, 819 bp, Pseudomonas aeruginosa
atgcaacactatattcaacgattgattattagcaactttaaatcctgccagtcactaaacatcactctaaccccctttgtccctcttgttggatataataatgcagggaaatccaacatcctatcagcattagagtgggtcttaaagaaccgcctattaaatgatagtgaattttataacagatcgaaacctatagaagtcgaagctgttatagttggcatatcagacgaaattctaaaacttctaggtgaagaccatagaaacaagatagagccgtatattgtcgatggcactatgaaggtcaaacgcattcagcctattgaggcaacaaaagcaacagatgttcagctgcatgtatttcatccagagacaggatacaagaaaaacccaacgggcatacctaatgctattaaacaattattccccgacccaatacgcatagcagcaatggataatgcggcagacgacgcagcaaaagcaaagtccactagcacaattggaaaacttttagcagagttctgcgatgctgttcgagagaaaaacgccttacgtattgaccgacacttaggagctattacgcgaaggatgtctgccgatggtaatcgaaggctaacagagctatccgaaatagatgaatcaataaacaaaaaaatacaagacctctttccgggaattagtttaaagctacacttcgacgtaccaacatttgatgaaatattcaaggccggcacagttcgtgtttatgaagaaagcagtgagatctctcgagacttctcagcatatggacacggagcacagagatctattcaaatggcatag

SEQ ID NO: 361534 - DNA, 240 bp, Pseudomonas aeruginosa
atgatcgactggagcaagttaaagaccgctgaacagcaggcgcaagaacgctggcaggctgagtgcgatgccgccgccgcagcgcgggcgaatgcctaccgtctagagagtgacccgctcaagaccgaggccgagttcgatgctatcaaggccggcgtggaaccgaactactctgcctggatggccaaggtcgaggagatcaaggcccgcttcccgttgcctagtccactagctgaatag

SEQ ID NO: 361535 - DNA, 216 bp, Pseudomonas aeruginosa
atggacgaggagcaatcgaaagacgccgcgcgccatcccgacaccgcccaggcggtgcaggacgaactggccgacgtactcatgtacctggtgcgcctcgcctcggtcctcggcgtcgacctggatgccgccgcccggcagaagctggagcagaacaaccggaaatacccggtagaaaaagcccggaatagcagcaagaaatacgaccagttctga

SEQ ID NO: 361536 - DNA, 1260 bp, Pseudomonas aeruginosa
atgttggaacgtcatttccggtcgctcaaggcgatcgaccgcatcaaggcccagtggctggggccgcagattgagcgctatgcacagtttctggacgagttgcacacgagcaactccacggttcggcagcatgttcgcgctctcgggcacttcaacgacttcgtgattggccgaggtgccacctgtctggacgatctacccgaccatgtggatgccttcgtggagcactggcaggccgggcacggacgctggtgcaagagcgcgcaagatcgggccgccgtcgttgcacaaagccgtgtcccagtggaacggatgctcagcctggccgtgcctggctacacgcggccaagcaaccggccggccatgccgttctccaccagcgttcctggcttctttcccttccttctcaaggagaagggtctgcgccagacctcgatacacaactacaccttcacgttgcgtccattcgattcatatttggcacaagcaggtatttccctggacaagctgactccagcctgcatcaccgagttcatcaatgaccgggcgaagacgttgcacaagtccggcatgctcaatacggcgggggccttgcgtgtcttccttcgctatctgcaccgtgaaggcatcatcgccaacgatctggttcgcagtgtgccgcgcggccgtgtctaccgccaggcatccattccgcgcgccatcggctgggcggacgtcgagcgattgctggccagcatcgaccgccgcagcgacctgggtaaacgcgactatgccatcctgacgttgctgaccagctacggattgcgtgccagggagatcgtagccttgtgtctggacgatctggattgggcccatgggcagatcggcattcccatgcgcaaaggcggccattcgacccgttatccgctttcggcggcggtgggcgaagcgatcatcgcctatttgcatgtccgaagaaccgatatagacgaccgccgaatctttctcacggtccgctcgccctataccccgatgaaccactggacggtttcatccatggtggctggccatctgcgcagcatcggcattcaggtagcacgcgccggttcccacaccttgcgtcactcctgcgttcagcacttggtggaagccgacttgccattcaaggtcattggcgactacgttggccatcgccatcctgcatccacactggtctatggcaaggtggcggtgcacaaactgcgagagatggtcattggccacggggaggacgtgctatga

SEQ ID NO: 361537 - DNA, 1110 bp, Pseudomonas aeruginosa
atgaccgccctctggaacggctttcacagcgccttggctcctcacatcgaacagtacctgcgcgccaagcgcgccatgggatgcaagttcgcctgcgaggatcgtcaattgcgactgctcgaccgatttctcgatgaccgcggtgtcgaatgcatcgaggcgatcgatggagagtgcttgcaggcatttctggattcccgccatcgcaccaaccctcgcagctacaacaacctgctcggagatgtccgacggctgttcgagtggatggtcggtcagcaggttctggtgggctccccgttgacggccagggctcaacctcagacagctcgccggcttcccttcctgttttcagacgacaccatccggcgcttgctgatctcggccagagcgttgccagacaactcacgcgctcaactgcggggtgccagctacgagatgatccttgcactgctcgcgggtcttggcctgcgggtgggtgaagtcgctcgcctccaatggggtgacgtggacctggtgcgagaagtgctggagatccgcaacaccaagttcggcaaggatcggctggtgccctttggccccaagctggcggccaggctgcgtggctaccaagcccaacgcgagcaacgaggctacgcctgcgcgggcgcccactacctgttttcctggaacggccgcacgccgatcagcacgaacagcatccgcaacaccttccgcgatgacttgctgcctcagctcgccctggtgaccccgcccggtgtctttggtcctcacgttcattgcctgcggcactcgttcgcggtgcgcaccttgctgaactggtatcgccagggaatagcaccgacagaccgactccatcacctgtccacgttcctgggacacctcaaccccagtagcactgcggtgtatctcaccattaccagcgagcttctcgatgccgccaatcagcgcttcgagtccttcgtcccgatgctctccggtggaggcgaatcatgtaacagcagggtcttccgtcggccatccatcgctacttcttggagtatctgcctcgccacaagggcttgcagtccagcacgatccgcagctatcgggacagcctgcgcctgttcctga

SEQ ID NO: 361538 - DNA, 942 bp, Pseudomonas aeruginosa
ttgcagtccagcacgatccgcagctatcgggacagcctgcgcctgttcctgatcttcgtcgccgatgccaaccggatcggggtcagcgaactggcgttcgagcacttgggctacgccgctgtgcaggacttcctgaacaacatggaggttaaacggggcaacgccatcagcacccgcaatcagcgcctgaccgccctgcacatgttctacgagtatctcggccggacgacccccgagatgttgccagccagcgccaaggttgctgccatcccgatgaagcgctgtccactgccagagatgaagtttctcgcgcgcgatgaggtcgaggcgatgtttgccctcattccggcccacgatcgtctttcgcagcgggatcgcgcgcttcttatgctgctgtacaacaccggcgcgcgcgtctcggaggttgcacagctgaaggtggggcaacttgatttgcagtcgcctgcccgcgtcagattgctgggcaaaggatcgaagtggcgaacttgccccctctggagccagaccgccaaggccttgcagagcatgctggatgaacggcccgagcgtttgccaccggatgctccggtgttcgtcggagtggctcaagaggggatgacccgcttcggcatctacaagcgcatccgccactacgccaagctctgggaagcttccgtcacagcatcgtcacccacccacgtgactcctcatgtatttcggcacaccacggcggtccatcttctcgaatcgggtgtggaggtcaacgtcattcgaggctggttggggcacgtcaacctggagacgaccaatcgttatgccgagatcaccatccgcatgaaggccgaggccctgaagctttgcgagcccgtcgcggtggcgccaacgcgcaaatccgcgtggcgcgacgatgctgccatgctggcctggctgtcgtccttgtag

SEQ ID NO: 361539 - DNA, 285 bp, Pseudomonas aeruginosa
gtgcctgacatgagagaagagtttgaaaaatgggctgccagccatttcattgacgtaggcagcggaaatcctctgaagaaaggtccgaacgggcattacggcttctatgtagtagccactgcctggaaatcctggcaagccagccgcgcggctctgagggtggagttgccggcaaaacgctcatacagcatgtatgcaacgaagcatgaatgtcatgcgttcaacgatgcgatagagaaggctaacgaagccctccagcaagccggaatagaggtgaagcaatga

SEQ ID NO: 361540 - DNA, 213 bp, Pseudomonas aeruginosa
atggatcagtcatcgttctggatggtctggaaccctcaaggaaaccagcctacctaccagcacccgacccgggactctgcgattgctgaggctgagcgcctcgctcgcaagtgcccagggcatcagttctacatccttgcagcaaccgatctacgcgtctgcgacaacatgcagcgcgtggccctctggccggaacaagaaatccccttctaa

SEQ ID NO: 361541 - DNA, 891 bp, Pseudomonas aeruginosa
atggaagcgttctttgtggtgtgcgttatcgctgcggttgcatggttcttcgtttctcggtcgaaatatcgtgccctgggagaccggcggcttacgccaaaaggagcccggagggcttccgcatcaaagggtgaagccaggcaaaggcagagcgaggaggcttcacgactagtggtaaggccgccatcactctctctcgtaggagatggatcgtactcattccctgtagtcggtgagtctcattatcagggagcgcttaggcgaatatcaggcgcagaaggcacaaaagggaagaggtatgaatgcgacgccgtggtcgtccaccagccacacaacaagcacgacaagaatgcatgcgcggtgacgatcgacgggcaactcgtcggctatctgccaagggacgagtcaaaggctgttgtagcgcttatgcaatcgagagggttgcccgaggggttttcggttggttgcaaggcggtcatcaagggcgggtggatagccacggatggttacaagggcagctatggcgtcgatctcgacatagacaccggtgaatttcctgctaccgcaattcagaaggaaatggtgcgataccttgggcagagggctccgcgaggactatcgcgcggccaggccgagagtctgcgcgccaaggcgtaccaagaggccggtagccgttacatgcagtgggtcgtgctggaagaaatcattgagcatctccattctgaagatggacgagatgaattcttcgagatcaagaagccaagcatcaaggcaatccgggaagcttttgagcatttcctgggcgaagggaaaagcctgaacgaaatacgcgacgaccttgatgaattggtcgagcacatgatcgaccaaaacccgaatctcgaaaaataa

SEQ ID NO: 361542 - DNA, 891 bp, Pseudomonas aeruginosa
atgcaaactgctcaagtaattccgttcgagttcgaagccaacaaagtccgtactgctgtcattgatggccagccatggtttgccgccaaggacgttatcagtgcgttggagtacgcgaagtcgagcgctccggcgaagctgatcgaccacgtaccgacccagtggaagggtgtgaatccgattcacacccctggcggaactcagcggctgctgatgctttccgagcaaggcctgtactttttcctggggcgctccgacaaagaaaaggcgcttcccttccagatgtggctggctggtgaagttctgccctcgatccgccgcactggccgctacgaagacagccagaacaagatggccaccctgatggacgaactgatcggcatgaccgaggtgaacgtcatcaagggcctgatccgtgacaaggcaaaggtggtccctattgatcgccgtcgtggattccaactggccatgcacaaccgtctgcacacccggttcaatgtgccgcgagtcgaactgatcccggcggcacagtttgagtcagcctgcaacttcatagcctcctacgctctggaaggcgagtggctgccgaagaaagagaaggagcccggcaccttcgtgctggacgaataccaagctcagttcgtgcacaacctcatccattacacccattgggtgtgcttccgctgggatcagggtatcggagtagcagtgaaggcgttgaatccgaaattccacgcgaagacatgggagttcttccgcgaatctagggtgtgcgcggagatgctcgagagtgcgctgcccgaactagttgcgcacttccgcagccgtggaggtctgcgcccgcatgacggcattgcgacaggctatcccgtaggccatccggaagactga

SEQ ID NO: 361543 - DNA, 516 bp, Pseudomonas aeruginosa
atgtcgctgagcagacgcttcggtcttttcacgcttgccgcaacggtgaccttcagtaccgtggtctttgccgcgccgaccttcatcaatatcctcaccggcggcaccagcggggtctattaccccataggggtcggcctctcgcagatctacgggcacgatatccagggcgcgaaaacctcggtgcaggccaccaaggcttcggtcgagaacctcaacctgttgcaggccgggcgtggagaactggcgctggcgctgggcgactcggtcgccgacgcctggaacggggtcgccgacgccggcttcaaggcgccgttgaagaagctgcgggctatcggcaatacctatccgaactatatccaggtagtggccagccaagcctcgggcatcaagaccctggccgacctgaaaggcaagcgcatttcggtgggcgcgcccaagagcggtaccgagctgaacgcccgggcgatcttcaaggccgccggcctgagctacgaggacatgggcaaggtgtag

SEQ ID NO: 361544 - DNA, 423 bp, Pseudomonas aeruginosa
gtggagctgatcaagaaccgccagctcgacgctacgctgcaatcctccggcctgggcatggcggccatccgcgacctggcctcgaccatgccgatcaccttcgtcgcgatcccggcggacgtggtggcgaagatcgacagcccggcctaccacgccgcgagcattcccgccggcacctacgacggccaggagcaggacgtgccgacggtggcgatcgacaatatcctggtcagccactccggggtcagcgacgagctggcctaccagatgaccaagctgatgttcgacaacctgccgcgcctggtcaccgcccatgctgccgccaaggacatcgccctggacaaggcggcgaagaacctgccgattccgctgcatcccggcgccgagcgcttctacaaggagaagggcgtactgcccgagtga

SEQ ID NO: 361545 - DNA, 1911 bp, Pseudomonas aeruginosa
gtggtctatgtctcgccgctgaaagcgctgtccaacgacatccgcatcaacctggagcaaccgctggctggcatccgcgaggaactggcgcgtctcggcctgcccgacgtcgatatccgtagcgcggtgcgcaccggcgatacgccgcaggtcgagcgcggatcgatgcgcaagcgcccgccgcacatcctggtcaccacgcccgaatcgctgtacatcctgctcggctcggagtcgggccggcagatgcttgccggggtgcgcagcgtgatcgtcgacgagatccatgccctggccggcagcaagcgcggcagccacctggcgctgtcgctggagcgcctgcaggcgctgtgtccgcgaccgctgctgcggatcgggctgtccgccacgcagaaaccgatcgagaaggtcgcgcgcttcctcgtcggcgccagcggcaatccgcgcgatccggcctgccggatcgtcgacatcggctatacgcgcccccgcgacctgggcatcgaggtaccgccggtggcgctggaagcggtgatgtccaacgacacctgggagctggtctacgaccgcctggcgcacctggccggcgagcaccgcaccaccctggtgttcgtcaacacccggcgcatggccgagcgggtcacccgcttcctcgccgaacgcctcggcagccgccaggtggcggcccaccacggcagcctggccaaggagctgcgcctggatgccgagcagcgcctcaaggccgggcaattgaaggtactggtggcgaccgcctcgctggagctgggcatcgatatcggcgacgtcgagttggtctgccagttgtcgtcgccgcgctccatcgccgccttcctgcaacgggtcgggcgttccgggcacagtgtcggcggcacccccaagggccggttgttcccgacctcccgcgacgacctggtggaatgcgcggcgctgctcgacagcgtgcgccgtggcgagctggacagcctggtgctgccacgccagccgctggacgtgctggcgcagcagatcgtcgccgaagtggcctgccaggagtggcgcgaggacgacctctatcggctggtgatccgcgccgaaccctacgccgggctggagcgcgagcgcttcgacgaagtcctgcggatgcttgccgagggctaccactcacgcctcggcgtgcgcggcgcctatctccatcgcgatgcgctcaacggcctgctccgtggccgccgtggcgcgcggctgaccgcgctgacctcgggcgggaccattcccgataccggcgactacagcgtgctgctggagccgcagggcctgctggtggggacggtcaacgaagatttcgcggtggagagcctggccggcgatgtgttccagctgggcaacacctcgtaccggatcatccgcatcgagccgggacgggtacgggtcgaggacgcccagggccagccgccgaacattccgttctggctgggtgaggcgccggggcgcagcgacgagctgtcggccagcgtggcgcgcctgcgcgacaccctcgacgagctgctcggcgaaggccaggcattgccggaagggcagcggctggagccagccatcgcctggctcggcgccaccctcgggctggacgatggcgccgcgcggcagatcgtcgagtacctggcccgcgcccgccaggccctgggtggcctgcccgggagccggcggctggtgatggaacgcttcttcgacgaatccggcggcatgcaactgatcatccacagtccccacggcagccgcctcaaccgcgcctggggcctggcgctgcgcaagcgtttctgccgcagcttcaacttcgagctgcaggcggcggccaccgaggacgcgatcatcctctcgctgtccaccagccacagctttcccctcgacgaggtctag

SEQ ID NO: 361546 - DNA, 366 bp, Pseudomonas aeruginosa
atgaaaattctgaaagggtacgtcctgggcgtagtggacaagggggaaggggacaagcgttgggccatcgttggcatcaaggcgaccgacagggaccgtgacggctttgacgtggacactacgtacaagcttcgtgtcttcggcgatgccgtgaagaacggcctgcataacgcctatcgcaacctcgctggtgtcgaggtctacgcgccctataacgacgagttcgacgagaaatacaagcgcattagctactcgctggcaggcgtgcccttggccctgatggaaaagcccctggggaccgcccagccgaagccggctgctccggcccagccgcaggcggcgcagcccgttaagcaggcttcctga

SEQ ID NO: 361547 - DNA, 237 bp, Pseudomonas aeruginosa
atgagcgcctacagcctccagggcgtgtccctgtcgtccagcgagcgtcggtcgctccagcttcgtcagcaggcccgcgccgctgtcgatcgcagcgtgttgcagcagaccgtcgcccaagcgctccaggcgctcgaaaagcacaaagaggagggcggcaaggcctccaatccttggatcactgtcactaacgaaaagggcacgccgtgggtcggtgatgcattcgggtggtcgtga

SEQ ID NO: 361548 - DNA, 1170 bp, Pseudomonas aeruginosa
atgtcgcctctgatcaatccggccccccggatgttctacgactacctcacggtagagcaggtattcccgtaccagctcccgcaggttggcgacactggcatctgctactacgaccggaagaccggcgagcaactgcgcgacacgtctcctagcttcaaggttgagggcagtcactcgacgtcgattcgggttcgggtcgatgggaacaagctccgcgtcgaagggaatccgagtgcagtcaaccgcttggacaacctgcatggattccagtccatcgctgagtgtgtcgcggtctataacgacatcctccacgagatcaaggacgacaagggcaaccgtctgccgtcgttcacggcttgcactgattggggccacctccagaccgaggacggctcgaaaactcggatgatcggcaacggtgcgcgcctgcgccgggttgacttgacgacgaatcggacggtggggaagggcaatgaactggcctacatccgcgccctgagtactcagcgtgtgggctacaagaatggccacctctacgaagatggttggacctgcgactggcaggcccgcgaccactactacaaggcctacggcaaggctcaggccatccgcaagttcctgtttccgaagtgcaaacgcaactttggcgaagactcccccgaattccgctacctgctcgacctggccgcgtactgcgatcagcagggcgttgtgcgcatggagcaggaactcaagagtgagtatctggcccgtgagcggctggagtggtggggactttttgatgaaggccgctttgcggcgatccatggggagtttttgaggggattcgacaagctcgaggtgatggcgatggattacgagacgattgcggaacggctgctttctgaagaagttgtaggcagcactcaggcggcgaatgcgaccgccaatattgcgatgaagtggatgcactgccctggtattagcttcgactttacgaagtcgcaaatgaagacctaccgggcgcgcttgaaccggatcggcatcaacatcgcccaaccctacgacgtgacccgtcattcggtcgtgatgatccgtcgtgctgaggaaatcgtcaccagcgacgtgctggagctgccggagttctatcggcatgcaccgcgcccgcgtcacctgcggttggtggcctga

SEQ ID NO: 361549 - DNA, 525 bp, Pseudomonas aeruginosa; identical to SEQ ID NO: 353307

SEQ ID NO: 361550 - DNA, 759 bp, Pseudomonas aeruginosa
atgagcctgatcaccacaaccaccactgtcaccatgaccagtttggaaatcgccgagctgaccggaaagcgccatgacaacgtgatgcgtgacatccgctcgatgctggtcgaactgcacggcgaagggggtgtcctcagttttgaggatacccaccgcaatccgcaaaacgggcaggaataccccatctttcgcctccctcgccgcgaggtcgaaatcctcctgacgggatacagcattccgctccgcgcgaaatgcctggatcgactgcacgagctggaggcgcgggccaagcaaactccccctgccctccccggcgactacatctcggccctggagcacctgctggaatccaagcgctctgagcagaaggccatcgaagagcgcgaccacgccgtcgccaccaaggcggagatcggttctcggcgagaggccacggcaatggcatcagcttccgccgccgtccgcgaagcacgtcgccttgctgatgagctcgggcgcggcaccaggcaggcgacggtcaaggcagtagagaacctcaccaagacacaattcgacccgcaggcctggcgcaaattgcgcacatggtgcgatgcccacggagtccaacccaactatgtcgaagaccctctctatggccgtgtccgggcgtggcccgcggaggcttggagggaggtgtacaacatcgacctggacggactgttcggttatcaccagcaccggatcaccgaagggggtgcaagttcggcatgcccttga

SEQ ID NO: 361551 - DNA, 282 bp, Pseudomonas aeruginosa
atggacgagatcatcgccgacgtcctcggcgatggtgagtttggctacctggaccgttctggccggcaggtcggcaatgctgcggtgatcgtcgaggaaggcgtggaacgcatggaagccggcgccttggatcggtaccggaccattgcgtgccgcaaggcgttcttgcagccccttgatcgcaagggggcgttcctcgattccgatggccaggtctggcgcatcgacggcatccatgccgacgacggcgactggatcactttctacgtggtgcccgaatga

SEQ ID NO: 361552 - DNA, 438 bp, Pseudomonas aeruginosa
atgagcgacgtgatcgatgtacagaccgcggtcatcggccaactgctggacctgctgtccgcggtaccggcgttcggcgataccgtccgtgaggactgggtggccggggtgctcgacgccgaggacagcgacgagcccgaacggctgatcatcctgcaggaaggggacaccgtggaacgagaccggtcgccgggtagtgtcgtggaggagtggaccgtgaacatcgtcccgatggcgcgcggcagggacgccgcccaggcgttgcgcgaggcgcgcctggcgatcaagcgggtgctcaagggccacaaggccgggctgacggtgcccggcctggtgcgtgtcgattttccggcatccgctgtgcgcctgcccgagcccggccggcgctgggcctatcgagccatccctctgcaggtcagctactcgcagcagttgtaa

SEQ ID NO: 361553 - DNA, 201 bp, Pseudomonas aeruginosa; identical to SEQ ID NO: 322328

SEQ ID NO: 361554 - DNA, 225 bp, Pseudomonas aeruginosa; identical to SEQ ID NO: 327942

SEQ ID NO: 361555 - DNA, 123 bp, Pseudomonas aeruginosa; identical to SEQ ID NO: 330689

SEQ ID NO: 361556 - DNA, 336 bp, Pseudomonas aeruginosa
atgaagcaagccctcaccagctccgcggtcagcctgctgatcagcgcgtgcctgtacttcggacatggctccatccaccagttcgccttctatgtgtcggcggcactaaacgtcctctgctggctgctgatcttcgccggcggcatcaaggggcaaggagccgcgaacatgctcgcccgcccttggctctccatccctactggcgctctgcacgtggcggccctggccctcacagatcaccccgcactcgcggcttcgagcctgctggtgcaaatggcttgctacgccctcgcctaccaggcggtgcgcaccgccgagcaagggggtgatctatga

SEQ ID NO: 361557 - DNA, 135 bp, Pseudomonas aeruginosa
atgaccaacaccatccagattcatcgccacgccctgcctatcgttgagttccgctgcaggcgcgatctgaccacccgcctcaagcgcaagctgcggaccttggtgcagcgccttgagagggagggcttggcatga

SEQ ID NO: 361558 - DNA, 366 bp, Pseudomonas aeruginosa
atgctcgccgactacaacagccccaacgagaaatccgcgcagatccgctacgagaccgactggagctactacggggtccccggcctgagcaccggggtgtggtacgtgaagggctgggacatcgacggcacccactacgacggcgaccgcaacggcgcctacggcaactatgccgaggtgcgcgcccaggacggcgagaaacaccacgagctgggcctgatggcggcctacaaggtgcagaacgggccgatcaaggacagcaccttcaagctcacctacatgatgcacaaggccagccagaaccaggtcgacggcagcgtcaacgaactgcgcctggtcagcaccttccccttcaacctgctgtaa

SEQ ID NO: 361559 - DNA, 1437 bp, Pseudomonas aeruginosa
atgagcatgaacctggtcaccctcctgtacctcatcgcctcggtctgcttcatccaggccctgaaaggcctgtcgcacccgaccacctcgcgccgcggcaacctcttcggcatggtcggcatggccatcgccgtggccaccaccgtcggcctggtgttcaagctgggcgcggagatcgccaccaccggcgtcggctacatcgtcgtcggcctgctggtcggcggtaccgccggctcgatcatggccaagcgcgtcgagatgaccaagatgcccgagctggtcgccttcatgcacagcatgatcggcctggccgcggtgttcatcgccatcgccgcggtggtcgagccgcagtcgctggggatcgtcgcgcacctgggcgacaccattcccaccggcaaccgcctggagctgttcctcggcgcggccatcggcgccatcaccttctccggttcggtgatcgccttcggcaagctctccggcaagtacaagtttcgcctgttccagggcaccccggtgcagttctccgggcagcacctgctgaacctggtgctcggcctggcaaccctcggcctgggcctggtgttcatgttcaccggcaacctcaccgccttcgccgtgatgctggcgctggccttcgtcctcggcgtgctgatcatcatccccatcggcggcgccgacatgccggtggtggtgtcgatgctcaactcctattccggctgggccgcggcgggtatcggcttctcgctgaacaactcgatgctgatcatcgccggctcgctggtcggctcctcgggcgcgatcctctcctacatcatgtgcaaggcgatgaaccgctcgttcttcaacgtcatcctcggcggcttcggcgccgaagccgacgccggcggcccggcgggctccaaggagcagcgtccggtgaagtccggttcggccgacgatgcctcgttcctgctgaccaacgccgacagcgtgatcatcgtccccggctacggcctggcggtggcccgcgcccagcacgcgctgatggaactggcggagaagctgacccatcgcggggtcaccgtgaagttcgccatccacccggtcgccgggcgcatgccggggcacatgaacgtgctgctggccgaggccgaggtgccctacgagcaggtgttcgagatggaggacatcaactccgagttcggccagaccgacgtggtcctggtgctcggtgccaacgacgtggtcaacccggcggcgaagaacgatccgaagtcgcccatcgccggcatgccgatcctcgaggcctacaaggccaagaccgtgatcgtcaacaagcgctccatggccagcggctacgccggcctggacaacgagctgttctacctggacaagaccatgatggtgttcggcgacgccaagaaagtcatcgaagacatggtcaaggcggtggagtga

SEQ ID NO: 361560 - DNA, 741 bp, Pseudomonas aeruginosa
atgaagaaattatttgttttatgtgtatgcttcttttgtagcattactgccgcaggagcggctttacctgatttaaaaatcgagaagcttgaagaaggtgtttttgttcatacatcgttcgaagaggttaacggttggggggttgttactaaacacggtttagtggtgcttgtaaacacagacgcctatctaattgacactccatttactgctacagacactgaaaaattagtcaattggtttgtggagcgcggctatgaaatcaaaggcactatttcatcacatttccatagcgacagcacaggaggaatagagtggcttaattctcaatctattcccacgtatgcatctgaattaacaaatgaacttttgaaaaaatccggtaaggtacaagctaaatattcatttagcgaagttagctattggctagttaaaaataaaattgaagttttctaccctggcccaggtcacactcaagataacctagtggtttggttgcctgaaagtaaaattttattcggtggttgctttattaaacctcacggtcttggcaatttaggtgacgcaaatttagaagcttggccaaagtccgccaaaatattaatgtctaaatatggcaaagcaaagcttgttgtttcaagtcatagtgaaaaaggggacgcatcactaatgaaacgtacatgggaacaagcccttaaagggcttaaagaaagtaaaaaaacatcatcaccaagtaactaa

SEQ ID NO: 361561 - DNA, 1116 bp, Pseudomonas aeruginosa
gtgcacatcgccgatatgaccatgttctacgcgcctgccagcgggggggtacgcacctatctcgaagccaagcatcgccatctctggcactatcccggcattcgccacagcgtgctggttcccggcgccagctaccgccaggcgaacggcatccacgaggtgccggcgccgccgctgccattcggcaatggctaccgcttccctctccgtcgcggcccctggcgcaaggtgctgcgcaatctgcaaccggacctgatcgaggtcggcgacccctacctcaccgcctgggcggcgctcgacgcacggcgtcggctggacgtgccggtgatcggtttctaccactccgacctgccgctgctggtgagcaatcgcatgggcgcctggctcggcaccaacgcggacaactacgtcagcaagctgtacggccacttcgaccgggtcctggcccccagccgggtgatggcggaaaagctgatgcgcctgggcgtcgccgacgtgcatgtacaaccgctgggcgtcgacctggtcaccttccatccgagcaaccgcgatccggggctgcgccaggaactcggcctggacgaggaaacccgcctgctggtgttcgccgggcgcggttcgcgggaaaagaacctgccggtactgctcgacgccatccagcgcctcggcgacggctatcacctgttgctggtgggttccaacatgccgacccgggtaccgcgcaacaccagcgtggtcgaccatttctgcgacagccgcgaagtcgcccgcctgctggcgagcagcgacgcgctgctgcacgccggcgaccaggagaccttcggcctggtcgcactcgaagcgatggccagcggcattccggtggtggcggtgcgcgccggggcactggcggaaatagtcccggagcgttgcggcgtgctctgcgcgccgaacaacggcgacgccatggcctgcgcggtgcgcgaactgttcagccacgacgtcgagctgcgcggccagcgcgcccgccgtcacgtcgagcgccagcatgcctgggacgcggtggtcgccggtctgctcctgcactaccacgcggtactcggcgacagcgaggcgaggttcccgcgctatggctga

SEQ ID NO: 361562 - DNA, 888 bp, Pseudomonas aeruginosa; identical to SEQ ID NO: 357970

SEQ ID NO: 361563 - DNA, 156 bp, Pseudomonas aeruginosa
atggctgaagtcggtcggggaaaggaaagccccaacaacctcgcacagttccggtttcttcatcagcgcgccaagcacaccctgctcagcttccatcgctacgcagcagaagcccttgcacagtatcaggaacagaacatggaggacgcagcatga

SEQ ID NO: 361564 - DNA, 2112 bp, Pseudomonas aeruginosa
gtgcaaattaagaaattcgtcatttgcggaaacgcttcggccaagggcatcagcgacgatccgaagaacgacattcgccttcggctttctggcgtgcagggtgaaggcaacatcacgctgcgcatcgaggacatccacagcaagatgttcagcagcgtgccggccaagttccacgacctgctggagatcgccacctacgtctacagcgcggatcaggtgattctgcgcggtgcagacgatgttgataacttcggctatggatggcggcgcgacctgcatttcgtggtgccggtgcgcaacccggatttctggaacagcgccgagatgaagagcgcactgacctcgacgttgggctttctgtcggacgacaactacgagttcaccttcgtcaagctggcgcaggatcattcgatccaggactatctggagttcaacgacgcgcaggccatctacggcaagccggagcaagtggtgatgttctctggcggcctcgactcactggcgggtgcgctcgacgaggtgttgagccagcagcgacgcgtggtgctggtcacgcacaaggccacgcccaagctcaacacccggcacaagacgcttcgagacctgctggcgcagaaggccggagacaacgcgccgcatcagatcagcgtgcgcgttcacaagaaaaagccgatgaaccgggaatacacgcagcgcagccgctcgttcctgttcgtctcgattggcgcgaccatcgccaagatgctcggcctgagcagcgtgcgcttctacgagaacggcgtgatcagcctgaacctgccggtgtgcgctcaggtcgtcggcggccgcgccacccggacgacgcaccccaaggtgatgaagggcttccaagacatcttgacgctggtggccgaagcgccattcacggtcgagaacccgtacatctggaaaaccaaggccgaagtcgtcgaacagatcatcaaggtaggctgcgccgatctgatcaagcattcgatgacctgcacgcacacgtgggaaatgacgaaccagcacacccactgcggcctgtgttcgcagtgtatcgaccgacgctttgcggtcatcgccgccaaggccgaccagtacgacccgattgatcactacaaggcggacgtgttcacccagagccggaacaaggacgacgacaagatcatgtccgcgtcctacttggagcgggccaaccaagtgggagcgctggagaacgtcgggcagtttcttgccaagtacgccgaggtgaaccgggtgttgcgcttcctcggcggaagcacggcgcaggctgcccagcgcgtgttcgatctctacaagcgccacgctggcgaggtgaacgccgcgtcggacgagatggttcgccgccatgcgacggccattcgtgagcgcaccatgccaggcgacgccttgctgcgcacggtgcatgagtccgcatcggtgatctcggtgccagcggtgtcgtcgaaggagaagcagccggacaacttcttccgcaagcgcggcggcggttgggaggctcggttcaatcgcgggaacagaatcaacatcgtcggcgtggacaagggcgcggagtacatcaacctgctgctggcgcacccggatcgggaggcatccgtctacgaggtcgtttgcggctacgcgctgggcgtcgccgagcaggtgagttccggactggagcacgatgacatcgaggagggtttccaggtaacgaccggagcgccgctgggcgacgcaggcgtcgtggtggacaggaaggcagtcgagcagtatcgagccaagtaccagtcacttgtgaccgagaaggcggaagccgagcaagacggcgaccaccagcgtgtggaggaaatcgaggacgagctggcccagatcgccgatgcgctcacggcgggcgtcggcaagggcggcaagctccgcaaggcgggcgacaagcgaaaaaatgtccgggacgccttccgcaacgccgtcaaccgggcgatcacggccatcgggaagtacgacaaacccctggccgagcacctgaagtccagcatcaagcacggcaacgaggtggtctaccggcccggaacgcccatcgtctgggacgtccgccccatcgtcaacgagtag

SEQ ID NO: 361565 - DNA, 789 bp, Pseudomonas aeruginosa
atggggcatgttcggctcggggtactgccaagaaccaaggcgtggaaggaggtcgtcggtctgatcgccgctggcgctgacgtgtcccaggtcgccaacgccaccatcaccgctgccgaaaaggccttcaccttcgtgatggatgacaagggctacacggaagctgtgtggctgatgacgcaactggccatcgctgccaagaaggacgatccctacgcccatcttcgatccgtcggcatttctctgccagacgatgcaaccctgtctgacgtgacggtgggcatctctgatgccttggatcgtgtcgtcgacagttcctataggcgttccgatctggctgaaatctccgggcgcgcgctgatcagcgcagtggccgacgcgcttcagcctcacttgaacgggctttttccgaacgacaaggacacgatgcgcgcagcgctttccaatctcggaaagcaaaaggagttcggcgacctgtcgcgctcgttctttgaccggctcaccaacgagagccttcagtattttttgtccaagacgctgtcgacccaagtgggtgaaggaatgcgttttgcgacgatgaaccaaaagtcccaattcgatcatgcgctggacacgcatacgcgggaagcatcgttgatcgtccgcgactactcgtccgactggttctcaaagcaccgctacgaggaaggcggcgacatttcaagaaaatcgtccgatggctttgctggctatgcgctgaagaagatgaaggatgaattgcaagcgggagcgcgcaccagtgcaaattaa

SEQ ID NO: 361566 - DNA, 234 bp, Pseudomonas aeruginosa
atgagcaagcgaaaaaccgaaggcattacggaaccgcagacaagaacgttgagagcaatctgccaaatcctggacagcacgggcctgccgcccaccgtcaaggaattggcagaagcgctggggatcagccacgccagcgctcatgaacaaatcgcgcagctggtgcgcaaggggtacttgaggaaagaagaaagaaaggcgcggagcatcgtgatcgtgaagcgcaacgagtga

SEQ ID NO: 361567 - DNA, 462 bp, Pseudomonas aeruginosa
atgaacgcatcaaccactgccccgtcgctggcggcgcaaatcgccagcctgcccaacttggccatgaaggacttgtgggtggtctgggacaagtatttcccgcagcgcccaccccacaacaaccgggcctatgtcgaaggccgcgtcgcctacaagattcaggaggaggcgctgggcaccaagctcgtcgtgcaggcgcaaatggcgcgaatcggcgaagcgcagtccaacatcaagacgcagcgcggcgtcgaagtgcaagtgatccccggcacggtgctggtgcgggaattcgacaaccgcgaacaccgcgtcaccgcgcaggcagatggctccttcgagtacgaaggtcgccgcttcaagagcttgtctggggtcgcccgccacatcaccggcacccagtggtcagggccgctgttctttgggatcaccaagaacaagccgaagcgaggtgcccaatga

SEQ ID NO: 361568 - DNA, 477 bp, Pseudomonas aeruginosa
atgaaccgctcgtccaagacgctggtcggcgatggcaaaccccacgagcgccgccacccgctggaagacggcggtgtccggatcaccacgttcgtgcccttccatttcaagaagcgcggcatcaagaaggtgatcgtcgcaccggaaggcgtcagccagccaattgccgtcaccgataccccgatgctcacccccgaacaggatcgcccgctgctcagggctatggggcgcggcatctactggcaacagctgatcgacagcggaagactggccagcgccacggagatcgccgagcgggagtgcatccaccgctccacggtcagcgatctgctacggctggcgcttctcgcccccgacatcgtgcaggccgcctacgaaggacggcttcctcgggccgtgtccttggaggcgctcctgcgggccaaggtgcccttggactggaatgagcaacgccggttgattgcgtccctcgggtag

SEQ ID NO: 361569 - DNA, 312 bp, Pseudomonas aeruginosa
atggcctattcaatggcactgtcccctggcttcggtggctcaccgagtcagcattccggcgtcgatttcagctcgacgtccgcccccaaatcctcggaattgtccgagcgacgcttcctcaatgagatcgaactggccagccgctggggcatgtcgcccaagacgctcacgcgctggcgcggcatgggtcgaggccctgtcttcaacaagttctcgaagaaggtggcctatcccctcgatggcgaaaacggcgtgctcgatttcgagaagcgccacgtctacgcctccacgtccgaacgcgtgccggtttga

SEQ ID NO: 361570 - DNA, 483 bp, Pseudomonas aeruginosa
atgagcgatctgaccatcttccccgccgatctcgcggccatgagcatcgcccaactggcggcgctgccgatcaccgacttcgttgatgccgagcgcaatgtcgatgaagccgtcacctacctcaagcagcttcgcacgaagctggatgtcgccaagctccagcgctacggcgaacaggcccgtactgcgctgcgcgattccggccgcgacttcggtaccgcccacgtcaacgacggcgcactgcacgtcaagtacgaactccccaagaaggtgacctggagtcaggccatcctcaaggagatggccgagcgcatcgttgcctccggcgacaaggtcgaggactacatcgacatcaagctgtcggtgtccgagtcgcgctacaccaactggcccacggcgctgcaagaacagtttgccgctgcgcgcacggtcgaggaaggcaagccgagcatcaccctgacgctggatgggggtgtcgcatga

SEQ ID NO: 361571 - DNA, 213 bp, Pseudomonas aeruginosa
atgaaccatacccaaccaagagcactggcagtggagccgatggtgggcgcgcgtcacgccgcccatctgttgaatctcccgctgtactacttcaccaagccgcgatctcgcatctcgaagcgcattccgcactaccggatcggccagatggttcgcttccggatgtcggaactcacggcgtgggcggccacgcaaggaggcgcacatgagtga

SEQ ID NO: 361572 - DNA, 198 bp, Pseudomonas aeruginosa
atgcacatcgaactgctcaaaccccacacccacgcaggccagcgccgcgaggtggatgaacgcctcgaccttgctgatgccagcgcccgctggctgatcgcgcagggcgtggccaaggcggcgacgcctgccaccgacctcaaacccagccgccgtgaggccacgtccggcaccgccaacatttcccaaggagactga

SEQ ID NO: 361573 - DNA, 516 bp, Pseudomonas aeruginosa
atgagcctggtcccctggccgtaccgctggttggcgctcatcctgctcgccgtcgccttgattggcttcggctggatcaagggcgcgggccacgttcaggcgcagtgggacgccgccgtccagcaacaaaccctgcaagctgccgccgtccgcgagcgacaggcgcaagccaccgtcaaggtcgtcaccgagtacgtcgaccgtatccgcgtcgtccgcgagaagggcgacaccatcatcaaggaggttcctgtctatgtgcccgtacaagctgatgctgcttgcactatcaaccgtggctttgtgcgcctgcacgacgctgccgccgcaggtgagttgcccgagcccgcccgagatgctgatgcggccgccgcaggcattgcgctctctgccgttgccggaaccgtcgccgccaactaccagacctgccacgagaacgccgagcaactgagggcgttgcaggtgtgggtcggggagatggggatggcaaagcaaacccatccacccacgccgtga

SEQ ID NO: 361574 - DNA, 432 bp, Pseudomonas aeruginosa
atggctctcaaatctaaagagtggttctacaagcaatgtttgaatgaaataaagaaccacacgcctaattctcatatggcttgggtcgtggttgaaaaaggggtcggccagtccgacggtactcgtgggcatgtgacgcaagcggtgggggtggcacagcagttcttggaggctcaccctcagcatattgatcgcatcaagtcagccgatcccacaaaaccttatgacgtggcgcatgatgccattcttagaaacgatctaacaacttggatcgcaaaccaaaatggttctttcgggcgttctgcctatggttacagctacgactcctttaagaaaaacacgactgcgaccttgggcggaacgcgcaccggtggcggcggagcggacgacgagttcaagagagtaatcaggttgatggcggaatacctgtga

SEQ ID NO: 361575 - DNA, 231 bp, Pseudomonas aeruginosa
atggcagagcctgaaggcgacatcctgaccctggacgaggtcgcggcctacctgaaggcaggcaagcgcacgatctatcggctcgcagcgagcggggaaatccctgcgttcaagctcggcgggacgtggcgcttctcgcgcagcgacatcgagagctggatcaagcagcaatcggcgagcagtcctgagcgcgccgcgagcaaggcatcgaacaagggggatcggaagtaa

SEQ ID NO: 361576 - DNA, 435 bp, Pseudomonas aeruginosa
atgccccgaaattgcgcgcactgcggccaagcctttcagccccgcccacaagtcccgaaccagacctactgctcatccgccgaatgccaacgcgctcgcaaactgcgctggcagcaggacaagctccgcaccgatccggattaccgcgacaaccagcgtgacgcccagcgcgcgtggttcgcccggcatcccggctactggcgcgcctatcgtgccgccaatcccgatgcggtggaacgtggtcagaacggaagcgccaatggcatgggcaatggccttgcaaaaatggacgtgtcaattctgccgtccggcctgtaccggctgcggcgaattcccgcgcctttcccagaggaaggcgatgcatggctggtcgagatcacgcccgtgagcatcgactgcgtctgcaaaaaggacgtgtgcaaagagatgacttga

SEQ ID NO: 361577 - DNA, 855 bp, Pseudomonas aeruginosa
atgagtccaaatctggtcgcctccgtccgcgcccgcctgctcaacgtcgccaaggcgcaggcgtcggacttcaatcaggtgctcgtgcgcttcgcgctggagcgcattctctaccgcctgacgcaatcgccacacgcggatcgctttctgctgaagggcgcgctgctgttcacgctctggtacgacatgccgcatcgggccacgcgcgacgctgacctgctgggcttcggcgcgagcgatctggaatcggtggcgcaggtcttccgcgagatcgccgctgtcgcggtggacgatggcatcgtgttcgacccggcttcggtcaccgtcgaggaaatccgcaaggaagcaggctacggcggcgtgcgcgtggtcattgcgggcgagctggcgaaggcgcgctgcaagacgcagatcgacgtcggcttcggcgatgccgtcacgcccggcccggtggattcggtctatccggtgctgctcgacgacttgcccgcaccacggcttcgagcctacccaacgtacacggtcatcgcggaaaagctccacgccatcgccctgctgggcatgacgaacagccgcgtgaaggactacttcgacctgtcggtgctgctggagcgcgaaatcctcgacgccgatctgctggcccaggcaatcaaggccaccttcgagcggcgcggcatgaccgtgcccgccgaattgccggtcggcctcacggacgagttcgcgcacgatgcgtcgcggcaggtgctgtggcagtcgttcgtcaagaagaacgaactcgatcccgaaccactggccgccatcgtgggtcggctgcggttggccttggaaccagcgttgaaccgagccgcccgatga

SEQ ID NO: 361578 - DNA, 606 bp, Pseudomonas aeruginosa
atgctcgccgacacccacacccagcgcgtcctcgatctggccaaccagaaggggctgctgcgcgccagcgatctggacgccatcgaagcgccccgtgtcgtcctgacgcgcctgaccgccgctggcctgctggacagggttgggcgcggcctctaccgcctacccagccatccgggttcggagcacgaaagcctcgcaacggtggcgaccaaggtaccgcaggccgtgttctgcctgctgaccgcgctccagttccacgagttgaccacccagcttccccggcaggtctggatcgccatgccgcgcggcagccacgtcccgcgcatcgactacccgccgatcaagatggtgcagatgacgggcgacgtctacgccgagggcatcgagacggtcgaacgcgacggcgtgaagctgcgcgtgtacggcgtcgccaagaccgtggcggactgcttcaagcatcgcaacaagatcgggctggacgtggcgctggaggcgctgaaggacgtgcgcgccaagcaccgtgcatcggcagacgacctgtggcgctacgcgaagatctgccgcgtcgccaacatcatgcgtccgtatctggaggccgtcgaatga

SEQ ID NO: 361579 - DNA, 3141 bp, Pseudomonas aeruginosa
atggcggaagaaagtcgcctctcaataatcatcgactcccggggcgctgagaagaacgcgaccagtcttagcgacgcactggaccgagttgagcgcagcggggacgaagccgccggcagtacctctcgcctcagtgaggtgactgtccgcctcggctcgaatatgagtaaggctgcggccgctaccgttgcgtcgctatcgcgtatcgagcgcgcgacggagtcgaccagttcgcagatgacggcgcttgtctcccgcgccgttgccctggaaaacgccatgtcgtcggtgggccagggtatcggtcggcttgacaccggcatcacccagtcgaacgcgcaacttggacagttgaacacccagatgtcgcacctggtgtcgacgttcagcacgttttcccaggggcagagcgcgatcaacgcgcagttgtcgcgcatcgcggcgaacatgtcgcgggcagcggacgagacccagaacctggatcagtccacaagtcgagcgggccgcggcgcgcgcgaagccgcgagcgaccttgacgcagagcgcgccggcctggcgcgcctgctcgggcagatcaatcccactgtcgcggcgctcgaccgcctcgacgacatgcagcaacggctcacccgctacaaaaacctgcgcctggtcgatgctgagacggtggcggagtacaccgagcggctgacggcgatgcgtaatgccctgggcgacgccgagggcggcatgaaccgcactgggatgtcggccaaagcgctgtcggcgaacatgcggatgctgccggctcagataacggacatcgttgtcggcctgtcctctggccaggcccccttgaccgtgctgctccagcagggcggccaactcaaggacatgttcggtggaatcgggccggccgcaaaggcgctaggcggttacatcgccggcttggtaaatccgctcactctggccgccgccgcagtagcaacgctcggcgtggcctactaccagggcagcgaagaaacggaggcgatgaccaacgcgatcatcgccaatggcaatgccgcaggcacgtcggcctctaagctcgctgcgctggctcagcagattgggcagggcaacgcgaccgttggccaggctgcggaagcactcaccgcacttgccgctggcggaaatcggctcaccgatctctatgagcgaattgcgactggagccatcgcctggtcgaaagccacggggaagtcaattcaagaggtcattgccagcttcaacgatctctccaaggatcctgtcggcgcggtgaagaagctcgacgaagagctgaacatcctcaccgccagccagtacgccaatatccaatcgctacaggaacgagggcagaaggaagaagctgcacgtgtcgctaccgaggcctatgcggacgcggttaccacgcgctccagccagatggctgataacctaggaatcctcgaacggtcctggaactctgtggctggggcggccaagggcgcttgggattcgatgctcaacatcgggcggaccagctcgatcgacagcgaaatcgccgatattgagcgaagactggcgcagccgaagtttggccttctgacctcggatgcggagttcgcgcgtagcaaggaaatgctccgcgagcagttggattttctgaaggctcgcaaggaggctcagcagtacgacgagaagtacttcgccgagcagagcgcgctccaggcggccggcaagaaaggcatcgacctgatcaattcgacgttcgccgccgcgcagacgcagaccgagaagctccagaagcaactggtggaactcgacaaggctcgaaaggccgctatggaggcgggcggattcacagccgaggaggagaccaagttcgcggtcgcacgcaagaacatcgagcagcagatcgccgacatcaaggagcgtgaggcgaagaagagcgcgccgaagacccgcggccagaatgtcggcgtgcgtgaggctgacaatacagcctcccgcttgctggcccagtacgacccggccggccaggctgtgcgcaccctgaccaaggagcagcagcaactcgacctcgcttggcgcaagggcaaaatcacgctcgacgagtacggcaaggccctggcgcaggcgtcgcttaactacgccgcggctatcaagggcgcccaaggcctcaccgcagccgagcaataccaggcgcagatggagcggcagttgttgctccagcgtgagcaatacgctgcgcaggcggccgccgtaggcatgggcggtcttgaagcagagcgctatcagcagcgcattcagcttgagcagcaatcgaatgaccgtgtcctgcaactgcagacggagctggcccaggctacgaccgagaagcaacgtcaggagcttcaggcgcagatcgatctggagcgtgaataccttcccaagcggattcaagcgcagaaagatggctaccagcagatggataaggcccgccaggactggctggctggtgcagcatctggggctcggacctggttcgaacagatcgatgacacggcgagccaaacccgttcggcgatgatgcgcggcctggatgggttgaacgatgagctccataccttcgttacgacagggaaggcctcgttccgtagcctcaccacttcggtgctgagcgacttggcgagaatcgcgcagaacaagttcattacgtcgctcatctcgtccatgtctggcagcagcaacggtgtgatcagtgcgatcggcagctatttcaccgcgaacgccaaagggggtgtctacagttcgccaagcctctcggcattcagtaacggggtgtacaacagcccgcagttcttcgccttcgcgaaaggggcgggcgtgtttggcgaggccgggccggaggcgattatgccgctcaccagggcggcagatggcagtctcggagttagggctattgggagtggtggcgcgaagagtgctggtggcaatacgttccagatcaacaccaatgtcacggtgacttcgggcacgacttcgcagtccgtcacttcggacaccaatgacaactacgccatgcagctatcgaagatgatcgccgatgtggcgcgtggcgtgatagcccaggaatctcaacccggcggcatcatctggagaatgcagaatggccgttga

SEQ ID NO: 361580 - DNA, 585 bp, Pseudomonas aeruginosa; identical to SEQ ID NO: 324382

SEQ ID NO: 361581 - DNA, 249 bp, Pseudomonas aeruginosa
atggctttcgccgcatccgtgattcgcaccgtttccggcctcgaagtcgaggtcatgcatgcctatgccaggatcgtcgagggcaccgacccggaagcgctgcacgatctgcgcgtcgccgccaggcgcctgcgcagcctgttgaaaccgttgcgcctgggggctctggccgaggacctggatcgcgcggcgaaagccctcgggcaggccaccaatccgatccgcgacatggaagtgatggcggcctag

SEQ ID NO: 361582 - DNA, 1782 bp, Pseudomonas aeruginosa
atggccgtgtctgccgtcatcacccagcgcctggttgacctcgaccggcagctacagagcgccggtcaggggcagcgcacggcgctatgcaaagcagccgcggcagagctgggtctgtcgctggcatcgctgtaccgcaagctgaaggatgtacaggtgcgtgagcgcgcaccgcgtaagcggcgcaaggactcggggcagagccgcctggggcgtgacgaggcactggtgatcagcacggcgctgatccactcggctcgacataacgcgaagcgcctgtattccgttgctgatgcggtcgaggatcttcgcgccagcggcttgatccgtgcggagtctgtcgaccgacacaccggagagatccgcccgatgtcgatcagcgcgatcagccgcgcgctgcacagctaccgcctgcatccgtcccagctattggcgccggagccggtcaccgaactgcgcagcctgcatccgaaccacgtctggcagatcgatgcgtccctctgcgtcctctactacctgaagcctgggaccaacaagaaggctagcggcctgcaggtgatggatcgcaaggagttctacaagaataagccagcgaacctggatcgcgtggccgctgaccgtgtgtggtcctacgagatcaccgatcactacaccggctggatctacgtccgctatgtgatgggcgccgagagtggcgagaacttctgcacggtgctgattgaggccatgcaagagcgcggtggagccgacatgctccacggcgtgccacgcatcctgatgatggaccctggttcggccaacatctcggcgatgtcgaagaacctctgctgctccctgggcatcgaggtcatcgtgcacgcgccaggcgcggcgcgggttacaggctcggtcgagaacgcccggaacatcatcgagcgcaagttcgagtcgaagctgaagttcgaaccggtcaacgacctggacgaactcaacgcccaggcgaagaagtggcgcgcccacttcaatgcgaccgccgtccacagccggcataggcgcaccaggtcagaactctggatgaccatccgggctgaccaactgatcaaagcgcccacggtcgagctgtgtcgggagcttgcagtgagggcaccagagtctcggaaggtcacggccaaacttcgcgtctcgttcggagggtgcgagtacgacatttcggttgtcccggacgtgaacgtcaacgaccgcgtgcttatcacccgcaacccctggcgcgaagatgcagtgcaactggtcacggtcaacgagcagggccgtcaggtcttctatgtccttcccaaggtcgagaaggatgagggcggctacgcgaccacttcaccggtgatcgggcagacgttcagccgtcaggctgagactccggcgcagaaggcccgcaaagccgttgaccaactggcctatggcgtcgaaagcgaaatggaagtgcaggctgcgcgcaaggccaagtccgttccgttcggcggtgccttgaagcccttccaacatatcgacgacacccaactgcccaccttcatgccgcgacgcggcacggaacacggcttggtagcccccatcgtagaggttccgctccttccgcatgtcgaggcggccaaacgcatacgcgcgcagttgggtgacgcctggaccacggactcgatggcctggctcaagaagacccaccccgaaggcgtgccggaagaccagctcgacgccatcgccaaccagttgcgcaagccggcccggcctggcctgcgcgtcgtaggaggcaactga

SEQ ID NO: 361583 - DNA, 429 bp, Pseudomonas aeruginosa
atgctcgatgccgacgcgatcaaacgcttcctgcggccgttcggcgcgaccctggataagccggccgtcttccaggatgtagtcggtcagcgcgtagtggtggggcgcgagatgtttgtcagccgagccggcggtgatctgctagtagcggaatccggcatgtcgaagaagtggttgatgctggcggctgaagcactgcggcgtccggcagagatatgggtacggctggattgggtcgaatctctgaaaaaggctgtggtccgtcgacgttacctggccagcctgcaggtaagcggcgaagcggctcccgtccaggttgttgtcgagctggacgccaacggctgggcggcgagcgccgcggtcgtccagccagggcagcaaccgctggcaccatatcgccaaggtgttcggctgtaccaggagacgtga

SEQ ID NO: 361584 - DNA, 219 bp, Pseudomonas aeruginosa
atgatcgttacggctcagcacctgcataccgtgccgacctggaccactcggcagggctactgccatcgccaggcgagggagttcttcaagcgccatgacctcgactggatggcgttcctacgggacggcatcgaggccgacgtgctggtcgcgaccggcgacgcgctcgcgctcaaattggttgaacatgcacgccaggagatcgcggatgggcgctaa

SEQ ID NO: 361585 - DNA, 180 bp, Pseudomonas aeruginosa; identical to SEQ ID NO: 329552

SEQ ID NO: 361586 - DNA, 180 bp, Pseudomonas aeruginosa; identical to SEQ ID NO: 328933

SEQ ID NO: 361587 - DNA, 180 bp, Pseudomonas aeruginosa; identical to SEQ ID NO: 329552

SEQ ID NO: 361588 - DNA, 801 bp, Pseudomonas aeruginosa; identical to SEQ ID NO: 360631

SEQ ID NO: 361589 - DNA, 1083 bp, Pseudomonas aeruginosa
atgaccccatccctctctggcctgcctccgatccgcaccgcgctgatcggctacggcttcgccggcaagaccttccacgccccgctgatccgcgcggtaccggcgttgtgcctggagcacgtggtctcccgcgaccctgggcgggtgcacgccgacctgcccgaagcccgggtcagcgccgatccggatgaggccatcgaggccgccgacatcgacctggtggtcatcgcctcgcccaatgccacccacgccagcctcgccgaacgggccttgcgcgccggcaagcacgtggtggtggacaagccgttcaccgtcaccctggccgaagcccggcgcctcgccgacctcgcccgcgaacggcctggccaggtcctctcggtgttccagaaccggcgcttcgacagcgacttcctcgccgtggaggccgccctgcaggccggcagcatcggcccggtgcgctacttcgagtcggccatcgagcgcttccgtccgcaggtccgcgaccgctggcgcgaacacgacctgcccggctccgggctgtggttcgacctcggcccgcacctgctcgaccaggcactgtgcctgttcggcataccgcagcgtatgcacggacacctgcgccggctgcgcgagggcgcgctgaccgacgactggttcgaggtcctgctcgactatccgcactgccaggtggcgctgcgcgccagcatgctcgctgccaatccggcgccacgcttcaatgtgcacggcgaccacggcagcctgctaaaggccggcgccgacatccaggaagcgcaactgctgcagggactgcaccccggttccgccggctggggccgcgatcccgacctgttgcagcatatcgacggccagggcctgcgccagtcgctggtcaccccggctggcgaccagagccgctactaccaggcgctggccgccgccatccgcggtcagtcgcgcaacccggtgtcggcgcaacaggcctgcgcgctgatggccctgctggagttggcacgacgctccgccgaggaaggccggagcctgccggtggagctgcgcgacgaggaacgccaggcctggaactga

SEQ ID NO: 361590 - DNA, 840 bp, Pseudomonas aeruginosa
atgcaactcatccagcaccaggaactcaagtccctcgcagtgttccaccacacgccgatccacttcgtcgaagcgcgtgaggatgtactccagcatcatgaagttagtgagcaggatatcgggcgggtcatccgcgatggcgctgcgttccgccttgctttcctggccggtgtagcgcttgacggtgaagggacgaagctctggcgcatagccatgcagaaacttgtcgagttcttccagctggctgttggccagagcattcatcggatagatgacaatggcactggtacgtgctttgccatcagattgcttggccttgagaatgcggtcgatgatcgggatgaaaaaggacagggacttccccgaccccgttccggtcgtgaccacatagctttggcgttcctggcctttggccaaggcttccatctggtgcttgtaaagatgcaggggttctggcgaaccttcagacttcccgacctggaagatctctgcgcaggcagcatgcaagaccccctgcgccaccagtttctgcaccgtgccctggcgttggtaattcgggttgatctgcaccagcggctcaggccaatagcggccttgcgcatattgatgttcgacctcggcttggatatcaggcgcagcgatgcgaacgaaactgcgggaaaagctgccgtatcgttcgatgagctggtcgcggaattggaaaacgttatccatggagagtcctcactgatccatcttgtggccaatcgccagaaccgctgtactaccggaggtgcctgctgtgatgcgcttccatttcgcacctcgccccttgccagtcgattcgatcaactcctctga

SEQ ID NO: 361591 - DNA, 255 bp, Pseudomonas aeruginosa
atgcaatcactagcagaaattcagcagcgcattgaaaaaacgaagttgttaaccgaagcaatccacaggtggaactcaatgagcgagcaatttgcagacctgcagaaacagattgatgagatccgtttccgcagggagggactgagacatcagatggctgagcaccacacgcgtcttgatgggctccagaaagaattgcggccatccggacctgagatcgtttggcacgaaattctttacggcaccaaaccatga

SEQ ID NO: 361592 - DNA, 288 bp, Pseudomonas aeruginosa
atgagccaaatatccatcgttggttatgaaagtgaatgcaactgcgagcactgcggacgcgccctgaagcacggcattcgcttgagcgatggccgcctggtcggagccacctgcttcgacaagaagctgaccctgccgcgcacctatcacggcaagtccttccgctttggcgccgagcacatcgtgaagatcgcgaaggtcgtgcagttctactcgccgtccaactggacgcggttcggtgtgtctgcgtcatctacgacgttcgaggaggctccatgcaatcactag

SEQ ID NO: 361593 - DNA, 606 bp, Pseudomonas aeruginosa
atgaaacggatcatgacttttgctgccgcactgactctaggcgggtgcgcagcaggaccaacctggcaggcgaccggcaccacagacgagttcaccgacaaaacgaccatgatggttacgactagtgatttcccgtcttctgggtcaatcgtcaccaggtcgctgcatttctatccggtggttcgcaaggagggcaacgagatatatgtgggcctgatgtcaggaggtcgcttcaaaatcccggtcggcacagtccagatgcgcatcgatcagaatgaggcctggactattactccacaggaaactcccgttgggctggtcccagcagtgccacagtattcaatgaatttgccgccagagcaggcagcaattgttaaaagcgcccaagatcaagcaatgaccaatgcggcgcaaatgatgagcccgtacactgtcactggcggcgataaggccaagaagatcctcaagcagatgttgtccgggcgaaacctgaaataccggactgtcggcatcaatcaggccgcctcaaccacgggggagaccgtgatagacccatcgctagctgagtctctccggctgattggtatcgacccggcctctttataa

SEQ ID NO: 361594 - DNA, 876 bp, Pseudomonas aeruginosa
atggcacgacaaagcgcgcaaccgaagaccgcagaggtcattcctattcggaaaacaaaagccgtaattgagtgccaagataacctcgatttcatgcgttctctaaaaaagggcagtatggatttgatagtcacttctcctccttataatatcggcaaggagtacgagaagcgaacctcgcttgatctttacatcgaaagccaagcggcgaccatcgcagaagctgtccgccttcttcatcctcaaggatcgatatgctggcaagtcggaaatcacgtcgatgacggagagatatttcctctcgatgtgatactttaccggatattcaaagaccacggcctacggttacgaaataggatcatctggacattcgggcatggactacattgccagaatcgtttttcgggccgccatgagacaattctctggtttaccaaaggcgatgattacacattcaatctcgaccccgttcgcattccctcgaaatatcctgataagaagcactttaaagggcctaataagggcaagttatccgggaatcctctgggtaaaaatccgtccgacgtttgggacattcccaacgtgaaatcaaaccacgttgagaaaacggaccacccctgccaatttcctgttggtttggttgagcgcttggttctcagtatgacaaatccggggggcaacgtgctggatccatatctaggcgtgggatcgagtgctgtcgcggctttgaaaaatggccgtaacgcttacggctgcgatattaccgaagaatacattgatgtggcgctcgaccgcatcgcgcagctagaagccgggacgctccgaaccagagccatgaatcagcccatctatgagcctcctgtgcgagaagattga

SEQ ID NO: 361595 - DNA, 462 bp, Pseudomonas aeruginosa
atgcaatttgctgaagcttattcacaccacaacgggcgcgatcaatgggcgcaaagggaactcgacgcttggctgatggacgtgttccagaagccggatttgaccgtgggtcctggctcaacaacggccatccgcgatcatgtgaaagccgagcttgccgccgagggctggcccttcgatgtgaaaattgatcaaagttatgatctgacagtcttcggagtgaaggacgatctctcctttcatcttcaaaccggcaatgccagtcgcgctccctatgacctgttgaagctgcaacatctatggagcattcggcggattgaggctgccgctttggcgctaccgacgaagcaagctgcgtcgagcattgggagcaatatcgccagtttcgagcgcatcatgaacgagttgcgattgttcgatcgcacaataaccgtaccgatcttcctgatcgggtttgaataa

SEQ ID NO: 361596 - DNA, 1323 bp, Pseudomonas aeruginosa
atggcgtataccgtaaatgtggaaccggctcatatccgcgaagcacaaattgccgagcgtgccacggaatccaacaaaactgagccgttctatgagtatcagagccagccttacgatttgccggtaatcttcgtgccgttaggcttgccgatatatcgcatggcgaattttcggacacgcactgcccagcaggcttatgcgcgccgcgaaggcaagccagccgactactttgcatccggcgaggaaaacgaagcggcgcagcagcgccagcatgagtttttgctgaaatatgccagcaccgggcgggaaggctcgattgcacctattatcgacgtgctgaaggcggaacgccagcggcaaccgatcctcatcacgcggcgtggcgttgtcgtcaacggcaaccgtcgattggcagcgatgcgcagtctcttcgaggaagacccgaacctctaccgcgaatttgcgaccgtaaaatgccagcttctgcccgcgaccgctaccgagaaagatattgtcgaagtagaagtgcgcttgcagatgaagcagcgcacagaactcgattatgattggatcaatgagtgcatcgccatccgcgaactgcgtgatagcggacggccaatgaaggaactcatggccctcatgaacaagaaaaaggtcgagatcgacgatgcgatcaacgcgctgacggaggctgatctttatcttgttgaatggctcaatcgtggtggcgactatgaagctattgaggatgccaagcagctgtttttcgacattggcgaaaacgtgaaagccaaaacaggtgacgcccaagaggttagccgcaggattgcatggctgttggccgatcggcgtagcaagctgaaacggcgcgtatatgatttcaaacctatgttcgggaaaaaagctgacgaggtggcggcaaaacttgccgagcgctttggggttgaactggacgaaagcggcccatcggatgatggagacgacgacgatttcgctgtcgatcttggcggcaatacggggccaacgcttcgtccgctgatttccctcatggacgatgccacgcgcagggacgaggtgtcagaccagctcgtcgaggtgtgcgaagggatcatcgagatcgagcgcgacaagcgcgatggacagatgccgcttaatctcattcagtcagcaaatggtaagctgtcggaagtcgatatgacgcgggcagcttctgggagcttggacgcgatcggcaaacaactcgacgccgttcaatccaacgtggaccggcttcgtggatttctcgaacgtcagcgcgccgagatgaaatctggcgcggcctga

SEQ ID NO: 361597 - DNA, 1905 bp, Pseudomonas aeruginosa
atggaagcaagtgccgcccatcagcctctgcatatcgtcgtccgttatgacgaccagaatcggcgtggtattttgctggtcgaagccccgaccggcaacaccgtatgggagcggctgaaacagtcagcttcggtgatcggcagtgatgctagaattacggaactggcaatcgagttaagctggccaagcgttctcgacatattgcgcgactacggcacacgcgaccaacagcgggcatataatttcaggttcaaacccgatgccgaggcgcagaagcgtatccaagattttgcggccgcgcgaaagaaagtgcaggaagcccaaggtagcctgactcttaccgtcacggaagacgaggtccgcagccgcctgcgcgcgcttggcttcaagcgtgatctcaaatggtttcagatacgggatatccggcacctgctttccatccaaaatggtgcgaatttctcggttccgggcgcaggaaaaacgactgtcgccttcgcgttgcatctgctgacaagccatgcaggcgctcacgtcctcgtcgtttgtccgaaagcggcctttcctgcctggaatgagatcgtcaacgacacgatggatgcagacggcccggacacggaagcgtttcaggttctaagcggcacaagtcatgccattgaggcgatgctgaccggcggcggcaggcgcttcgtcatcaattacgatctgctaattcagcatccggggatcatcggtgcatatctggcgcgacagcctgtccatctgatacttgatgaatctcatcgcatgaaggctggcgaggcttcacagcgcggcgcgctgctgttgagcttggctccactcccgatccgccgcgacgtgttgagcggaacccctatgccgcagtcgccttccgacttggtttcccaactcaacttcctgtggcccggtcaggggcttggtctcgaaatcaaccgggggactccgccgcgagaggttctgggaagtctgtacgttcggaccacaaaggaggagcttggtctcccggctcgctatacccacttccatcaggtcggtatgggtcaggggcaaatggctctctatagcttggtgcgcagcgagagcctgcgccagttgagcaatattagatccggcgcgattgatttcgcaggtgcgcggaaatcggtcatgcggttgctgcaactttcgtccaacccgttgcttgccctgcgcgcgatcacgtcggatatcgccggcatcaattccggtctcgtcgatcaagttgtcgaagacggcccctcgccaaaaatgctggccgtagcagccaaggctcgcgaactcgcgcaacacggccggaagtcggtgatatggacgatattcaccgacaccattgaacagatgttgctgatgctggcggatctcaatccggtcgcgctctacggcgctgtcccttctgggaacgcctccgatccggaaacccgagaagggaggctgcggcgcttccatttggacgatgattgcatggtcatgatcgccaatccggctgccgctggtgaagggatcagcttgcacaccgtctgccatgaagccctgtatctcgatcggagctatgtcagcacgcatttcctccaatcaatcgaccggatacatcgcctcggcttggatcccaacgagatcacaaacgtccatattttccagacacgcgcgccgcaagggctgggctgcatcgaccattccgtcagtcggcggttagctaccaaagtccgggcgatgcagcagcttctcgatgacagggatctgcatcaaatcgccctcgacgaggaaaatgcggaagagccaatcgattacgacgttgatatgcaggacatcgttgatctggtggaggagttggaaggccgcgcacattttgacgaagacgagggcggatag

SEQ ID NO: 361598 - DNA, 804 bp, Pseudomonas aeruginosa
gtggacgaggaccgcatcttagcgatgagcgcttttgaagcggcctacctcattcgtacctttcgggagaaaaatcccgaactcagcactcccgatctcatcgctaccgtccgtgcagtaagagcggacttttatccgcacgactacgatgccggggccgatatcgaaggccgcatcccggctcggcttatcacgccgctagaagctttctttacggcagcgattgaggcgatcatcgccgaacggtcgccgatttgggcgcgtctcgcgccagcaggacgtaatcatgtgttacaggcaatcggcgtgaacggcgtgcaatgtcttcgctcagcgggccttctcggctcggatgcacgtgcgaccgattggtgggatgctcttgcaactgtcaatcgcggcgagcgtgatgcaagattgcttgcccaaggtcgggagggagagcgcctttcgctggcatatgagaatgcccgcttgcagcaggaaggtatatcccgtgcgccagagtgggtcgcgatcgacgacaacactgtaggatatgacattctctcatacgcttggcatgagggcagccaagttaaccgccttatagaagtgaaaacgacacagacacatcctccgcgcatgatcctatctcgcaatgagtggagaacagcgcaacaatatggtggggctttcgagtttcacctttggaatctcaacgacgaagcgttgacaatctatacggtcgagcagctcaaggttcatatcccgacagataacggggcgggcaaatgggaaagcgtcgagattcatcctaattag

SEQ ID NO: 361599 - DNA, 528 bp, Pseudomonas aeruginosa
atgaccaacatacccgacagcagcccccgcatctatgttgcctgccttgcagcttacaataacggctatctgcatggggcttggatcgacgcggatcaggatgccgacgcgatcagggacgagatcgccgcgatgcttacccgttctcccgtcgaggacgcggaggaatacgccattcacgactgtgagggcttcgaggacgtcagcatctccgaatatgccggcatcgacagcgtggcgcggatggccgctttcatcgcaaagcatggcgtactcggcgcgggcctgctgaagcagttcagcggcgacatggagcgagccgaaaccaccttggaggactgctatcatggtcagttcgctagccttgctgactacatggaggagctgaccaccgaaagcgtcaccatccccgaggcgctgcgctactatgtcgattgggattcgatggcgcgcgacgccgagttgggcggcgatctgttcaccatcgagacggcgcacggcgaggtgcatgtgttttccaacagataa

SEQ ID NO: 361600 - DNA, 594 bp, Pseudomonas aeruginosa
atgacgcgccgccgcaccctcacgatgacggcgctcgccgtcatcggcatcgccgcagcaatcgccgtcgattggcctttgaggctcatctggaacgcgacggcgagcgcgccggtcgggttctataccgtcgagccggctgagcggatcgacgtgcccgagctggtcgccctcatgccacccgaaccgctcgccgccttcatggtcgagcgcggttatatcgcgcgcggcgtcccgctgttgaagcgcgtcttgggcctgccgggacagcgggtttgccgcttgcgatccacgatcacggtgaacgggatcgagatgggcgaggcgctggagcgcgacagcctcggccgcgatctgccggtctggcagggctgccgcatcgtcggcgacgaccagcttttcctcatgaattgggaagtccgcgacagcctcgacggccgctacttcggactcacccccgcagcttccgtcatcggccgagcggtcccgctctggaccgatgaggaaggcgtcggccgctacgagtggcgcgcaccgacgcacttaaaccatccccgaaagccaatcacaggagatttcccatggcagaaatag

SEQ ID NO: 361601 - DNA, 933 bp, Pseudomonas aeruginosa
atgacggccgcgcgcgttcggcccgccatccggttcaagatcgtcatccctttgttcgcggaaaagccgtctcatcccttcgtcccgctcggcgatcggacggccggcgtgcgcagcgcgggtcaggggcggccatcggccggcgcttgcgccttgcccttgaccgcagggagcacgctggcaggctggtatcgaagcggagacaggactgcatggcattgtgccgtcctgatactggtcggcacgctttcagtctgcgccggatcgggcgtcgcggtcgcgcaatccgcgcccgtcgagcgtccagccgccgcccatccctatgcggcgcacatcgccgaggcgtcgcagtgtttcggcataccggagcattggatcgtcgcggtgctacgcgccgagagcgcaggcgatgtgcgcgcggtttcatcggccggcgcgatgggattgatgcaggtgatgcccgacacatgggccggcctgcgcgtccgctacggcctcggccgcgatccctacgacccgcgcgacaacatcctcgcaggcacggcctacttgcgcgaaatgttcgaccgctacggcaatgtcgcggcaatgctggcggcctacaatgccggtcccggccgctatgacgaatacctggcgaccggccgcgcgctgccggccgaaacgcgggcctatgtcgccgcgctcgcaccgatcctcggcggcgcgactgcaaccgaaccaccgtcatcggcaccgccagcgccgccagattggcgcgaggcaccgctgttcgtcatgcgtccgggcggcgcgcgggcagtcgccgcgccgccgtccgacgcacgatccggcgacggccgcgcgaccgtttcggcgcgcgatcccggcgatgcggagtcgcagagcgatagcattttcgtcgccgacgcgagcggttcggcaacgccatga

SEQ ID NO: 361602 - DNA, 1041 bp, Pseudomonas aeruginosa
atggtgatgctcggcgtgggccaggtgatttttggtccgctctcagacagcatcgggcgacggccaattctacttgcgggcgcaacggctttcgtcattgcgtcgctgggagcagcttggtcttcaactgcaccagcctttgtcgctttccgtctgcttcaagcagtgggcgcgtcggccatgctggtggcgacgttcgcgacggttcgcgacgtttatgccaatcgccctgagggtgtcgtcatctacggccttttcagttcgatgctggcgttcgtgcctgcgctcggccctatcgccggagcgttgatcggccagttcttgggatggcaggcgatattcattactttggctatactggcgatgctcgcactgctaaatgcgggtttcaggtggcccgaaacccgccctctggatcaagtcaagacgcgccgatctgttttgccgatcttcgcgagtccggctttttgggtttacactgtcggctttagcgccggtatgggcaccttcttcgtcttcttctcgacggctccccgtgtgctcataggccaagcggaatattccgagatcggattcagctttgccttcgccactgtcgcgcttgtaatgatcgtgacaacccgtttcgcgaagtcctttgtcgccagatggggcatcgcaggatgcgtggcgcgtgggatggcgttgcttgtttgcggagcggtcctgttggggatcggcgaactttacggctcgccgtcattcctcaccttcatcctaccgatgtgggttgtcgcggtcggtattgtcttcacggtatccgttaccgcgaacggcgctttggcagagttcgacgacatcgcaggatcagcggtcgcgttctacttctgcgttcaaagcctgatagtcagcattgtcgggacattggcggtgacgctgttaaacggtgacacagcgtggcccgtgatctgttacgccacggcgatggcagtgatggtgtcgttggggctggtgctccttcggctccgtgggaccgccaccgagaagtcgccagtcgtctaa

SEQ ID NO: 361603 - DNA, 984 bp, Pseudomonas aeruginosa
atgcggcgcactaaccatcgaaacctcgtgaatggcggtatcctgtctggcaggataccgctcatttcccttgttcagttcatcgccgtcgccgagcatctgaattttcggcatgcggccaaggcactcggcgtcagccagtcgagcgtcagcgcgcgtgtgaaagcgctggaggataaccttggtgtccttctgtttgagcgccatgcgcggggcgttcggctaacagacgcaggcaggcacttcatggagcgtgtcacggcgggtgtcgatcaactcgatcacgcggtgaagaccgccggcatgacagctcaaggagaatgcggccggcttcgcatcggtatccatgccttgatcccacgcagctttctcacggagctgatccgtcattatcgggaagcccatactggcattgaggtcgagatcaccgaaggcacggcccgcgatgcggtgatgcagcttcgtgctgaccagctcgacgtggcgttcgtcgcgggcaagcccgagatgcccgactgccatactcgaccgatctggaccgaaccgctggtggccgtgctatcggataggcatcgtctcgccgggcagtccgcaatcacttggtccgatctggtcggcgagactttcattgttcgctatggtggcaccggcccgcaggtccacgaccatatcgtgctgcgccttgccgggcgttggcccgcaccgtctatcctgcgctttgatgtggggcgcggcacgctgctatctatggtcggacaaggcttcggcattaccatcgtcggcgaggccacgtcattgttgccgacgaccggcatcgtcttcctgcccttcctcgatgaaccggagccggttgcctttacagccgtctggtcgccgttcaatcgcagctccgcgctgaaaaatctgctcagcctcgcaggcaaaatgaagcgtgacggcgattcgcccaatcgtttcctcgatggcactcgaccggcacgataa

SEQ ID NO: 361604 - DNA, 318 bp, Pseudomonas aeruginosa
atgtgcgcacagcgccgccgcgcccgcaaagggcgaccgcgacagtcgatccccgagccacttcccgacgatcttttcgattacgccgacgaacccacgccggacggccggacgcgagctgacgacacgccgcttctaggcccggacgggcaaaagatgcgcgtcaccgacgattggccggaagacattcccgtcaccgaggtcgagatcgacgtgttcgagcgttggttcggcgatgtgttcgacgaactcctgaatccgaaaaagccggatgatggcttgccattcctatcacaaactgatagggaaaagacgtga

SEQ ID NO: 361605 - DNA, 351 bp, Pseudomonas aeruginosa
atgacccagccgctcgtcaccgctgaacagcgggcgcaactgctggccgtcggcgcggcacgcaccgctggccggagcatcgacccgatgccggcggtgcgactgttcacccctgacgcgcacgccacctggctgctagccgcgcttgacccggacgacggtgatacggcctggggactgatcgacctgggtatcggcctgccgacgttgggaacggtgaagctatccgatctggcatccatcgtcgggccgagccagcatccggtgatgcgtgatctctactttctggcagagcgcccgctgtcggagtacgtccgacgggcgcaggagaacggctcgatcacggattga

SEQ ID NO: 361606 - DNA, 609 bp, Pseudomonas aeruginosa
atgctgtcgaaacgaaggactccccccattcgcaccagctccaggccgttccgccttggagctggcggtcaagaatccgggcgcggcggtagccgcgctcggattcaaggcccaagccaaaacgccccttcgccgccttcgggcaggcggcgaaggggccgcgcacaagcagccttgtgcgcgagaaacccaagaagccggcaagtgcgccggcgcatcgcgccgccggtgcttagacagcgccccgctgcaatgggcgaggcttgtagggctacgctcaggtttgctgcggcaggttgtgcgaaagcgtgccgtccccgacgctggcagttcgctgcctggtcgtcacgaaggacggttcaccgacacgccgcacggccatgcctatggagcttccacgccacgcctcaagcacgttgccgcctgcgacggcaggcgcgttctcgcccttgtccttggtggttggccttgcccgcgtcagggcgcaagccggtgaagccgtcgcgcggggatgccgagtcggccatgtctccattcgggggcggtcggcctgtacgtccttgtcttgttgtgaatcctggcgggggcgcggctgcgccttgggcttga

SEQ ID NO: 361607 - DNA, 2046 bp, Pseudomonas aeruginosa
atgaacgccatcccccaaagcgaagcccgcgccatccaagtccccgcgctggaaactgtcgacccgaccaagaacctgattctggttccgctgtcgcggctggtgtcgcgcccgactggtcgcaacgtgcgcaagaccccgcgcatgtccatccccgagctggccgcgagcatccaacgtgtcggcctgctgcaaaacctcatcgtcaccgcgaccgctgacgacgaaccttatgaagtcgtcgccggtggccgtcgtcttgccgcgttgaagctgctggcgaagaagcaccgcatcagcaaagaatgggaagtgccttgcttgctggtggccgatggcaccgcccgcacggccagcctcaccgagaacgtgcagcgcgaagccatgcacccggcagaccagtttgaagcctttgccgcgctggtggccgaaggccggcccatcgaggacattgcagcggatttcagcgttacgccgttggtggtgcagcgccgcttgaagctggcgaacgtatcgccgcgtctgatggccgactatcgcgccgatgccgtcacgctcgaccagttgatggcccttgccatcaccgacgatcacgccgcgcaggaaaccgccttctacgatgcgccgacgtggcagcggcacccgtcccaattgcgcgaccgccttaccgagcgtgagattgacgcctatcggcatccactggttcgctttgtagggctggatgcctacgaagctgcaggcggcggcatccgccgcgacctgttcgcggatgatgatgcaggtgtgtatctgaccgatgccgcgctactggagaagctggcgcaagacaagctggccggtattgccgccgaggtgaaggccgaaggctgggcatgggtggatgccacgccgagcgtgacccatgccgacttgcacgccttccaacgcgtcccgagggaacgccttgcggcgaacaagcgcgaagctgcccgcatcgagaagctgcaagccaagctgcacgacctggcagaagccgtggatgctgcgctggatgccgacgacgaggaaaaggccggtgtcttgcaggagaaaggcgaagccttgggcgaacagttgcaggccatcgaggacagtttgcaagactacagcccgaacgtgaaggccgcagccggtgccatcgtcaccatcgaccgcagcggcgaagccgtgattcatcgcggcctgatgcgcgaagccgaagccaaggcgctgcgcacgctggaacgctttcggcagggtttcggtggcgcagacgctgaaaacgaggataaagccgaggacgacgagcagcccaaggccgccgccatgtccgaccggctggcacagcggttgagcgcccaccgcaccgccgtgctgcaaatcgaagtcgcccggcgtccgcaagtggcgctggctgcgctggtgcatggcatggtgcagaccgtcttgcagaaaagccactacggccacgacctgccattgggcgtgagcctgaaggtgcaagaccgactggaaggcatggccccggactggccagaatcgcccgccgccgtcgcgctgcgcgaactgcaacaggtagcaggcgacgccttgccggaggacagtgccgaactgttcgccgtgctgctggcgaagtcgcaggatgaactggtgcggttgctggccgtgtgcgtggcacccacggtagacgtggtgacgctccgcgccaccacgctgcaacccggcgcggaactagcgcaggccgtggggctggacatagccgcatggtggaagcccaccaatgagggttatttccggcatgtgccgaaagccgcgattctggaagccgtgggcgagtttgcaccggagcatgtgacccggctggcgaagttgaagaaggccgacagtgccagcgaagccgaacggctggccgatggcaccggctggatgcccgccatcttccgcaccgaaggcccgcaagaggtaatgccggaagcaggcacggagcaggacggtacgggagaagctgccgccgtggcggatgaaccggccgaggcattggccgcgtga

SEQ ID NO: 361608 - DNA, 2649 bp, Pseudomonas aeruginosa
atgtcgatactgcaagaaattctggcttggactcagggattgccagcttggcaaagcgatgccgtcgcacgcctgctggcgaagcagacattgacgatggatgacaacgaagatctattcgcgctgcttaagctggcacatggaattcccgatccgaagggccgtcagcctaaacccctaacggccgaccagattcctgcgcccgttgcggtggcgacgcacatcgagctggtcgcaatgaagaacatgagaaacgtcaatgcgattgcagagaatcagcgcttgcctttcaatgcaacaggtatgaccgtcatctacggagataacggttctggcaaatcaggatattcgagggtgctcaagcgcgcctgccgcgctcgcgaccgaactgaagcgatccatcccaatgcccacctccccgctggtcaagccggcgtcccagaggcgacctttgaaatcttggtggacggtgttgcgaaggacgtgcaatggacgcatggcaaggtagctccccctgaattgtcgtcattggcagtcttcgacacgcgctgtgcacgcgcctatctggacagtgaagacgatttctcttacgtaccttacgggctcgatgtatttgaggcgttggcgaaagtctgcaagcagttgaaggctatggtcgaagctgagcagatgcagtccgctgccgaccttactgcattttccccgttgcagggcgatactctggtcggcaagctgatttcctcactgtccgcaaagacaactcaggcccagatcgacgcgctagccaacttgaccgcagaagaattggcgcagcacgccgaattggaaaagagcctgcaagagaacaatccgaaggataaggcagctcaactgcgcttgcaggctcgccgtgtcacaaccatcgcgacaagcgcgaccagcaaaggcgcgctggtagaccatcccgtcgtcgaaaagctgcgcagtttggcggacagctatcgcacagcgcaggcagcagccgcgcttgctgccaaagaattcaaggaaggcgaagatcttctgccgggcaccgggggagaggtttggcgcgagctgttcgacgccgctcgcaagttttccgtcgagtcacatccggacaaggcgtttcccgacctaggcacagatgcaccttgtccgctatgccagcagcccttggccgaaggcgctactcgcttgctgcgttttgaggcattcatccagcaagaagccgagaagacttcacagacacgtcgggccgcactgtatgcagagtacaagcctttcatcgcgcagaacctgacgttgaatctcgacgatgtgacctatggagagattgaagcgttggacccgaagttggcagcggacgtcaaggcattcgagccgctgctggcagcccgccaagaggctatcaaggcggctgtgctctcacaccagtgggaaggcgttgctcaagccctagaaaatcccgcgccgcgacttcaagcgctggccgacaagctgaacactgcggcagaaacattggaaaaggcctcagacgagaaggcccgcgctaccctccagaagcagttcatggagctgaatgcacgggtcaagctgcgagaggtcagagacgcggtggtcacggccgtgggcaagctcagccatcaagcgaaacttgcgcagtgcctatccgctgttaagaccaatgccatctcgctgaaggcatcggacatggccgagaaggttgtttccaaggaactcgccgaagcgctgaatcgcgagttcaaggcattgggggttggtgcgttgagcgtatcactgcagagccgcgccgacagaggcaaggcgttgcacaagctgaaattggaacttcctcaaagtcgaagccccggtgacattctgagcgagggcgaacagcgcgccgtggcgatcggctccttcttggctgaagtcgggttgagcggtggcaaaggcggcatcgtctttgacgatcctgtgtcatcgctcgaccatcgcaggcgagagcgcgtagcaaagcgcctggccaccgaagccgcgtatcgtcaagttgtagtgttcacccatgacatctacttcttatgtctcttggtggaggaggccaaaactgccggcgtggcgatttcgactcaaagcctgattcgccgcgctgaggggtttggcgtcgccgatccagaactcccgtttgaagggaagaatgcaagtaagcggatcggcgcgctaaaggcccaacagcagtccatcgccaagctgcacaaggatggtgaggagcaagaacaccgaaagcaaacaatcgatgcctattttcgtttacgcatggcgtgggagcgtgctgtcgaagaagtcttgctgcgtgaagtgatcctccgattccgtaagggcgtggaaacgcaaaggctcgctggcgtcgtggtcgatgacgacgactatgcccaagtcaatgcaggcatgacgaaatgctcgaactatgcacatgacaaggcgctgatgggtggaatcgcagtccccgatcccgatgagcttctcgccgacatcacagcgctggaaatgtggcgggcgcagattgagaagcgcggtgtggagacggctaagaagcgcaaggctgctccaaccgttagtggggcgcccgcagtggccgcaacacctgggtga

SEQ ID NO: 361609 - DNA, 711 bp, Pseudomonas aeruginosa
atgtcggaaatcatcctgcgggcaaatactccagcggagctaaaggacaggctagccgagttggacatcgatgttcccccgcggtcggaggggcgccggaaccaccatgcagagcgctattgcatcgcgcatctgcttgcgacgctaccggttgaacagctctcgttcccgctgaccttgacccattctgacaagccggatttccttttggcgatgttccgggccgatgtgggaatcgagcacactgaagctgtgccggagaacatcgcccgcgctgactttctccgtgaaaaggagggcttggggccggacgtctacttcactccccatgtgttgcctggggaacccagaaagacggccggtgaactccgccgtgagatcgaggccgacgagtcaggcccagggtggtgtggcgattcgccggagcgcgaatgggccgccgcgatggcccactacgtcaaagaaaagatgccgaaggcgacggccgacggcttcgttcgataccccgccaactggttgatcgtgtatgacaactggccgctgccagccatcaactgctccaaagcggcatcgtatttggccccgcttcttgctgaaatgggcgctttttcagtgttcgataccatctttatccatgacgattcgcacatgtgggaatttcgtgaaactccactcacccaggtgttgcggccactgcgggcgccccactaa

SEQ ID NO: 361610 - DNA, 384 bp, Pseudomonas aeruginosa
atgacgagcatcctcaagcgcagggacttcgcgcggtggcaggcgagtgagaagctgcccgatgctgccttgtgcaaagcggttcaggagatggaaaacggtctgatcgatgcggacttgggcggctccctctacaagaagcgggtggctcgccccggtggcggtaagagcggcggctaccgcacgctgctgtcagccaggataggtagccgctatgtgttcctgcacgggttttccaagagcgataaggcgaacgtcacacaggacgagaagaaggcactgcaattcgccggcaaggtgttcatggaactgtctgccgaagccttgtcgatggcgttgcagtccggtctgttattggaggtgcattgtgagcaagatcattga

SEQ ID NO: 361611 - DNA, 1431 bp, Pseudomonas aeruginosa
atggtcgccgatatcgcctacctgcagcagagccagcaggaaatcaaccagctcgaagccctcttcgcccgccagcgcgccgcctacctggcgcagccgatgcccgacgccacgcagcgcgtgcagtggctgaaggccctgcgcgacctgctgttcaaggaacagcaggcactgatcgaggccatcgaccaggacttcagcgcgcgctccgccgacgagaccctgctcgccgagatcatgcccagcctgcacggcatccactacgccgccaagcgcgtgaagaaatggatgaagcctgcgcgccgcgcggtcggcctgcaattccagccggcctcggcccaggtggtgtaccagccgctgggcgtggtcggggtgatcgtgccttggaactatccgctgttcctctccatcggcccgctgaccggggccctcgccgccggcaaccgggtgatgatcaagatgagcgagtcgaccccggccaccgggcgcctgctcaaggacctgctggcgcggatcttccccgaggaccaggtcgccgtggtgctaggcgaggtagacgtcggcgtggccttttccaagctgccgttcgaccacctgctgttcaccggcgccaccagcgtcggcaagcacgtgatgcgcgccgccgccgagaacctgaccccggtcaccctggagctgggcggcaagtcgccggcgatcgtctccgacagcgtgccgatgaaggacgccgccgagcggatcgccttcggcaagagcctcaacgccgggcagacctgcgtcgcgcccgactacgtgctggtaccgagccggcgcgtcgaggaattcgtcagtcagtacaaggaggtggtccagggcttcttcccgcgtctttcggacaaccccgactacaccgcgatcatcaacgagcgccagctcggccgcctccggggctatctcgacgacgcccgcgagaagggcgcgaccctcgtcccgctgttcgccgaaggccagcaacggcgcctgccgcagacgctgctgctgaacgtcagcgacgacatgaaagtgatgcaggaggaaatcttcggcccgctgctgccggtgatcccctacgagcgcctggaagacgccctggcctatgtcaaccagcgcccgcgaccgctggccctgtactacttcggctacgacaaggcgcaacagcagcgcgtgctgcacgagacccactcaggcggtgtgtgtctgaacgacaccctgctgcatgtcgcccaggacgacatcccgttcggtggcgtcggtccctccggcatgggccactaccatggccacgaaggcttcctcaccttcagcaaggccaagggcgtgttcagcaagccgcgcttcaacgccgcgcgaatgatctacccgccctacggcaagtcgatccagaagctcgtctacaagctgttcgtgcgctga

SEQ ID NO: 361612 - DNA, 1680 bp, Pseudomonas aeruginosa; identical to SEQ ID NO: 10332

SEQ ID NO: 361613 - DNA, 993 bp, Pseudomonas aeruginosa; identical to SEQ ID NO: 96021

SEQ ID NO: 361614 - DNA, 237 bp, Pseudomonas aeruginosa
atgcgcacggtgagcttccagggcgcgaccctctcggccagtgagcgccgctcgcttgagcttcgccggcgtgccatggcggcggtaagtcaaaccgttctgcaacagcaggttgcggtcacgctccaggccctggagcagcacaaagagcagggcggcaagctcgagcgcgtctggaccactgtcaccaccgaaaagggcacgccgtgggtcggcgacgtgttcgggtggccgtga

SEQ ID NO: 361615 - DNA, 237 bp, Pseudomonas aeruginosa; identical to SEQ ID NO: 361614

SEQ ID NO: 361616 - DNA, 177 bp, Pseudomonas aeruginosa
atgaacatgaaaactcgcatcttcctgcgcacgctccgtttcgttgcctacaactggtggctgccgttcctgctgggcaatgtttccgcgctggtcggctttgccttcactgctgatctgatcaatgacgcgttcgtctcgtcgctcgaaacggtggtgcagtcatgcgcacggtga

SEQ ID NO: 361617 - DNA, 288 bp, Pseudomonas aeruginosa; identical to SEQ ID NO: 336187

SEQ ID NO: 361618 - DNA, 531 bp, Pseudomonas aeruginosa
atgagtgaaattgatcttgatgaggccagcctgcgtgacctggtaatggtcaatgacggccaggtcgtaacgacatcgctgaaggtggccgaacgcttcggaaagcggcacgacaacgtccttcgggctatcgacaacttggattgctcggctggtttccgtctcctcaattttgaggagacggtcatgtggcgggaaaatccgagcggcggagaaccgatcaagagtcgaagcttcgacatgaccaaggacggcttcatgttccttgtgatgggctttaggggtaaagccgcagctgcctggaaagaagctttcatccatgccttcaactggatggccgagcagttgttcaaacgctcaatggacttcaacaccatgcgcaacgagctgatggcggagtaccgacaggagcgagggattgccagcctggctggcaagaccctgcgtcgatggcagatcaaggcacccgtcatcgaacagaagatcatcgagatcgagcgcgaagggcagttgcagctgtttcacgcctga

SEQ ID NO: 361619 - DNA, 759 bp, Pseudomonas aeruginosa
gtgaaggagcagcttgagctaatacctcgaaatgtcgagggggcgcttatccaccagcgtgcagcggatggctatgtcaatgcgacagccatgtgtaatgcgtcgggcaagaacttctatgactactccaggttgaagaacactggagattttcttggggaactttcgaggtccacgggaattcccgctgacctcctcgtgtacacggtgatgcatgggccgaacgaagcgcgcggcacatgggtgcacccagatgttgcaatcaacttgggccagtggtgctccccgagatttgcggttgctgtgtcccagtgggttcgcgagtggcttggtaacaaagggcgaccgccggctcttccgtaccatatgcgccgatacatggccaaccgagatcaggtgccatatacccacttctcaatgctaaacgaaatgatcctggctctgatcggcccaatggaagactccggctacacccttcctgaccgaatgctgcccgacatttccgaagggcggatgttctgcagatggctccgagacgaaaagggcatagatactgatgccctcccgacgtaccggcacgtctttgaggatgggcgggtggtgtttccaaaactctaccccaatgatgtcttggccgacttcaggcggcattttcacaccgtctggctcccgcagaaagctgagaggtacttcgcagagaaagaccacgcagcgctaccccacttgaatagggttcttgctcttcctgttacaaggtga

SEQ ID NO: 361620 - DNA, 129 bp, Pseudomonas aeruginosa
atgcccaaatcccatctccctgccctgctctaccgcctcaatctgaacatcaacgccatcggttcggccgtcgaggaactggcggtctgggtcgagcagcgagatcgaccgaaacctccgatgccgtga

SEQ ID NO: 361621 - DNA, 390 bp, Pseudomonas aeruginosa
atggctctgaccgttgaactgagcgatttcttcagtgcctgcttcaaaaactactccaccgatgatcagttaaaaatcgtcgagttcattcagcattgtcaggcaaatggccttagcggcttgcctggcaagctgaagccctctactgatgtgcccggtaccgatccggaatattacgctaaggtccagtacgcccgggaccactacctctggcattaccatatcggaatccctgactatgagaggctcaaccctttctccaaggtgctgacctcccgctacgtcctccatttccagcgctttcctggcaacaaggtcatcagaatcgtcgaccttgacgaccatcgacccatgacgctgccgaagcgcgatcacatggtcaggtcctga

SEQ ID NO: 361622 - DNA, 180 bp, Pseudomonas aeruginosa
atggacaagcacaagcgccatggtgcaggccagcacgagaaaggcgaaaccagctttaacctcgccaggttgcgcaaatccatcaatggcggtcacagggcggtcccgaccggcctgtccacggaagagctgatcgaatggatctctggaccgaccgccaaagatggctctgaccgttga

SEQ ID NO: 361623 - DNA, 288 bp, Pseudomonas aeruginosa
atgagcaagcacacgcctgggccgtgtaccgtggacttcatcgacggtgttgatggcgtatttgcggaatgcgacaaacgaatttgccaagtggatgaagtagacatcgttggctggaatgcgcggttccgagatgaatccgaggcaaatgccaaattgatcgctgccgctcctgatcttctcgaagcactccagcaggatgtcacatcgatgcaggacagtggatatccgaatgacagcttagttattcgagccgcacgtcaagctattaccaaggccaccgcctaa

SEQ ID NO: 361624 - DNA, 960 bp, Pseudomonas aeruginosa
gtgaggaaccttgcgctgagcgatcagggtgatcgcctgcttggcgcattcctcgggcatgccaccggcgataagagccgccagcgcttcgttgttgatggctttcttgtgcgccttgtcggcttcgcgtgcagcagcctcgcgttcgatgcgggcctgctcatcggcctgccgtttgcgttctgccgctgcggcttcttcagcgcgacgttgcgcatcacgctctgcttgttctgcgcgctgcttggcttcaatggcttcgcgttcggcgcgctcggcggcaagcttaagttcaagttcgcggcgctctgctgcggcctgtgcttcggcttcacggcgtactgctgcgtcgcgttctgcctgggccttggcctcttcctgacgccgtgtctgctctgctgcttcgcgggcaatgcgctcctcgcgctctttctgctcgcgtgctgctgcttcggcgcgcaggcgttccagttcggcctgctcggcttcgaacttctcacgggcaaccagggcttctcggagagcgatcaaagccttatctttggcgcgagcagcctctgcctcgaactcttcccaggcttcacttatggccaggccttccaaccaagcgatgttggctttgagttcattagagtccagatcgcggcattccaggcgaaggtttatcttgtcgatctcgccctgatgacgcgcaacccgcgccgcttcagcctcttcccactcggtcaacggactgcgcacttcggcctgccaggaatccaacagatcgcgcatccgcttacgctcggcatcgatcttcttcgggacctccttcagctcagcgaccaattccttacccacgttgtccagcgccgtcttggagcgggctaccttgtaggcgatggaagcgattgcctctcggcccttgcgagtggtcacatccggcacgaagccgtcgatctcttcgcgaatcttggctag

SEQ ID NO: 361625 - DNA, 606 bp, Pseudomonas aeruginosa; identical to SEQ ID NO: 334369

SEQ ID NO: 361626 - DNA, 738 bp, Pseudomonas aeruginosa; identical to SEQ ID NO: 334368

SEQ ID NO: 361627 - DNA, 903 bp, Pseudomonas aeruginosa
gtgcgcacggtcaaggctcccggcttcggcccgaaaggggtcttgcgttgcatcctgccgttcaccatatttctcaagctcaaggacatcggtggcaacgtcctgccaccgtatgacgaggagtttcgtgaagtccagatggacgtggcgcaagctgcggcctaccgcgatttggcgggtcggctgaccgcagagctgaaacaggctctggcgcgacgcgatacgaccttgctgggggtggtgctcaacgtgctgctggcctggccggattgctgcttccggtcggagaccgtggtgcatccacgcacgcgcaacaccttggcgtttgtcccggctcagttcaatgagttcgagatcagccccaaggagcgtgagctgatcgagatctgcaggcaggagaagacacagggccgcaaggttctggcctacacggtctataccggcacgcgcgataccacgtcgcgcctgaaggggctgctggagcaggaaggcttcaaggtggcggtgctgcgcgcaagcgtggatgccagccgcagagaagactggatcgccgagcaactggaccgtggcatcgacgtgctcgtcaccaatcccgagctggtcaagacggggctggacctgctggagttcccgacgattgtgttcatgcaaagtggctacaacgtgtactcgctccaacaggcagcacgccgctcctggcgcatcgggcagaagcaacccgtgcgcgtgatctacctcggctatgccggttcctcgcagatgacctgcctggaactgatggccaagaagatcatggtctcgcagtccacctcgggcgatgtgcccgaatcggggctggatgtcctgaaccaggacggtgattccgtcgaagtggcgctggcccggcaattggtcaccgcctga

SEQ ID NO: 361628 - DNA, 645 bp, Pseudomonas aeruginosa; identical to SEQ ID NO: 330051

SEQ ID NO: 361629 - DNA, 600 bp, Pseudomonas aeruginosa
atgcacgcggcggcgcagctcgacgctttgcagccagtccaggatgaacagtgtgcgctcgatgcgtcccagctcacgcagggcgacggccaggccgttctggcgcgggtagctgccaagcttcctgagcatcagcgaggccgtcgccgtgccctgcttgatcgaggtggccatccgcaggatttcatcccaatgggcgcggacgtgcttgatgttgagcgtgccgccgatcatcggtttcaacgcctcgtaggtggcatcgcccttcgggatgtagagcttggtgtcgcccaggtcacgaatgcgcggggcgaagcggaagcccagcaggtgcatcaacgcgaagacgtggtccgtgaaccctgccgtgtcggtgtagtgctcctcgatccgcaggtcggattcgtgatacagcaggccgtcgagcacgtaggtcgagtcgcgcacgccgacgttcacgaccttggtgtggaacggcgcgtactggtcggagatatgggtgtagaacgtccgccctgggctgctgccgtatttcggattgatgtggccggtgctctcggccttgctgccggtgcggaagttctggccgtccgacgatga

SEQ ID NO: 361630 - DNA, 903 bp, Pseudomonas aeruginosa
atggaaccaaaaagagcccacattgccaagacaatcctaagcaaaaagaacaaagctggaggcatcacgctacctgacttcaaactatactacaaggctacagtaaccaaaacagcatggtactggtaccaaaacagatatatagaccaatggaacagaacagagccctcagaaataatgccgcatatctacaactatctgatctttgacaaacctgacaaaaacaagcaatggggaaaggattccctatttaataaatggtgctgggaaaactggctagccatatgtagaaagctgaaactggatcccttccttacaccttatacaaaaattaattcaagatggattaaagacttaaacgttagacctaaaaccataaaaaccctagaagaaaacctaggcattaccattcaggacataggcatgggcaaggacttcatgtctaaaacaccaaaagcaatggcaacaaaagccaaaattgacaaatgggatctaattaaactaaagagcttctgcacagcaaaagaaactatcatcagagtgaacaggcaacctacagaatgggagaaaatttttgcaacctactcatctgacaaagggctaatatccagaatctacaatgaactcaaacaaatttacaagaaaaaaacaaacaaccccatcaaaaagtgggcgaaggacatgaacagacacttctcaaaagaagacatttatgcagccaaaaaacacatgaaaaaatgctcatcatcactggccatcagagaaatgcaaatcaaaaccacaatgagataccatctcacaccagttagaatggcaatcattaaaaagtcaggaaacaacaggtgctggagaggatgtggagaaataggaacacttttacacgttggtgggactgtaaactag

SEQ ID NO: 361631 - DNA, 732 bp, Pseudomonas aeruginosa
atgaaacggatcgatatctccgggcttcgctatgggcgccttttggtggtcgcctacgactctcccgggaaaaacggaggatctgtctggctctgccggtgcgagtgcggagccgaggtaaaggtgaactcgtcgaacttgcgaagcggctcgacacgttcatgcgggtgcctcgccagcgaatgggcttcagcgcttggctcaaacagggaattcgtcaggaagcgtacagccaaagtcaccgcgcacgggcacagccgtcgagggttgaaaaccccggagtacagaacctggctaggcatgaaacgcaggtgctacgacgagaagtacaaggacttccctaactggggcggtcgcggtatcaaggtctgcgaacgttggaatcagtcgttcgaggctttcctcaaagacatggggcctcggcctgctgggaggtacagcatcgatcgaatcgacccagacggtgactactgtcctgaaaactgccgatgggccacgatccatcagcaagcgtccgagaaccagcgacgcctgaccggagtcgagatcgacggcactcagttcgccagtattgcccaggcctgtgctcacttcggagtcaacgtctctaccgcccaccagcgcatcaaagccggaataccggtcgatattgcggtaaggacctgcgggcggctcgccgctcggcgggaaagggagtcttacctccgcagggatcggcgaggtactgcgtga

SEQ ID NO: 361632 - DNA, 162 bp, Pseudomonas aeruginosa
atgtggcacatatacaccatggaatactatgcagccataaaaaaggatgagttcatgtcctttgcagggacatggatgaaactggaaaccatcattctcagcaaactaacacaagaacagaaaacaaaacaccgtgtgttctcactcataagtgggagttga

SEQ ID NO: 361633 - DNA, 753 bp, Pseudomonas aeruginosa
atgaaaacctaccgcgtcggccagatcgtgccgagttccaacacgacgatggaaaccgaaatccccgccatgctgaacgcgaggcggcgtttttttccagaagaacatttcacgttccatgccgcgcgcatgcgcatgatgcacgtcacgcccggcgagctgaaggcgatggatcagcaaagcgttcgctgcgcacaggagttgagcgatgcgcgttgcgatgtgctggcttacgcttgcctggttgccatcatgtgccaaggtcctggttaccaccgccaatccgaaaagcgccttggcaaggccaccgaggagaaccaggcccctacgccgatcatcagttctgccggggcactgtgcgacagcatcaaggccatgaacttcaccaaggtggcgatcctgacgccctacatgaagccactgacgcaacaggttgccgcttacatcgagagtgaagccatccgcgtgacggactccctcagcctggaagtgtcggacaaccttgctgtcggccgaatcgacccgatgagcctgcttgaacacgtcaagcgcctcgacatcagcgaggcggatgccgtcgtcctgtccgcctgcgtgcaaatgccttcactggcggctatccagcgtgttgaggacgcgctggccaagccggttctttcggctgcggtggcgaccgtctatcagatactcaaaaccctgggtttggcagcgcatgtacctgatgcggggtatctgctttccgggcggttttga

SEQ ID NO: 361634 - DNA, 636 bp, Pseudomonas aeruginosa
atgcgactcatcagtcacaacttccaggacggccaggccattcctggcgaattcgcgttcgcggtccccgacgccaccgcacacattgcactgtcatcgaacaggaatccgcacttggcatggagtgacatccccgaaggtacgcagtccttcgtgatcatctgccacgaccctgacgttcccagcaaaggtgacgacgtgaaccaggaaggccgcgaagtgcctgccgaactgccacgcatcgacttcttccattggctgctgctcgacattcccgctagcatcaagcagatcgaggctggctcgcattcgaacggtgtgacgccacgcggcaagccaggtccgaatgctgccgacggcttgcgtcatggcaccaacgactacaccgtctggtttgccggcgacgcgcagatgaagggtgaatactatggctacgatggcccatgcccgccgtggaacgacacgctggttcatcgctacatctttacggtctatgcgctggccacgcctgcgcttgccgtggacgcgccgctgacaggcgttagcgtgcgcgcggccttggccaccgcgccggtgctggggcaagccagcctgaccggcctgtatcgcctcaacctatccgtgccccttgattga

SEQ ID NO: 361635 - DNA, 264 bp, Pseudomonas aeruginosa
atgaagaagtccattacgctcttgctagccgtggcattgaccgcttgcggtcaatcggagacgcccaagcaagccgacgtgccaaccgtggaggaactggccgccaatccggcacggttgaaggagctgcgccagcagtgcaagaccgatcgcgccgggcttggcgacgtgttatgcaaccgcgtggccgaggctacgcgcaagcggttttacggcgatggcaaggtgccctatacgccaccggagcagccgccaaagttctga

SEQ ID NO: 361636 - DNA, 759 bp, Pseudomonas aeruginosa
gtggaattgaacttaagaggacgaacggcgcttatcaccggcgcaagcagtggcataggtgcgggtgttgcacgcctgctcgccgatgaaggcacccgcatagccgtcaccgcgcgcagggacgatcagttggaacgggttgcttcacaaatcgaagcctccagtgagcaagttcccattgtcgtcagcggtgatgtgacagacgcagccgatgtcgcgcgcattgccgccgaagcggcgacagcccttggtcacatcgacatcctggtcaactgcgctggcggttcacgcccaacggaattgtcagcatctgatgaggactgggaagaagcgtttgcgctcaacttcaccgctgcgcggcggttgacccaagccatccttccaacgatgcgtgtacgtcagtggggtcgcatcatcagtatcagcggctcgatggagcctcgctcgctgaatgctgccacggctgccaaagccgccctgcatctttgggccaaaggactttcctgcgacgtggccgcgcagggagtcacggtcaatacgattgctcctggacggatcaacagcgcccaagtgttgagcaggctccatccaaccgaggaaagcagacgggacttcattactcgcaatattcccattgggtatttcggtgaaccggaagatataggccatttagtggcgtttcttgcttcacctttggctcgttacatcaccggcgctgtgattcccgtcgatggaggaatgcactttttcgctcattag

SEQ ID NO: 361637 - DNA, 894 bp, Pseudomonas aeruginosa
atggatctgttggacagcatgaaggtgtacgtccttacggtggagaaaggcagtctgagcggggctgccgctacgttgggcgtctccgcaacaatggcaggcaagcatctgcggtcactggaagcgcgcctgggaatgcagttgcttaaccgaacgacgcggcggcagcatctaacctcgttcggtgaggactactacacgagatgcaaagagattctgcgcttggtagcggagacagatgcgcaggcccagcaccagaaattagcacctgctggcaagctgcgcatcacggcgcccgttatcttcgggacacacgcattgatgcctgccttggcgatctatatggcgcgttatccagaaatcgcactcgatgtagtcctttctgatcgcgtggtggatttagccgaagaggggttcgaggccgccattcgcattggagagttaccggagaatgcgcctctggtcgcaaggccgcttactccatacagcctgacgatgtgcgcttccccggggtacttggcgcatcagggcataccggaaacagtggaagacctgcagcatcacgaatgcctatcgttcagcccgacagccttgtcctattggcttggcactggtgaggacgtgcgtcgtcgatcagtgtcgggaagattgcagataaacaacggccaggcactccgcattgctgcactcaatggcatgggcatcgtcttgcaatccacccttctgttggaagaggacattcaagctggccgtttgattcaattgtttcccgagcaaggtctgccgagccgaccgatgagcgttgtttaccttcctgaccgctaccattcgaccaagctacgtagttttgtggcgtttctcatggagcacttcccgccaatggcccgcgtgtag

SEQ ID NO: 361638 - DNA, 1161 bp, Pseudomonas aeruginosa
atgggggtgttggcagccaaagcacggaagacgctgctgctcaccggcacattgatgggcggctatggtgacgacattttctacctgctgttccgcgccttgcctgggcggatgatcgaagacggctaccggccgaccaaaagcggcagcatgacgtcggcggcaatggcgttcatgcgcgaccacggcgtgctcaaggacatctattccgagagcatgggcacggcgcacaagaccgccaagggctgcaaggtctcggtgcgcacggtcaaggcgccgggtttcggtcccaagggcgtgttgcgctgcatcctgccgttcacggtcttcctcaagttgaaggacatcggcggcaacgtgctgccgccctacgacgaggagtttcgcgaggtcgccatggatgacgagcaagccaatgcgtaccgcaccctgtcgtcacggctgagtcaggagctgaaacaggccctggcgaaacgcgacacgacgctgttgggcgtggtgctcaatgtgctgctggcctggccggacacgtgctttcgcgcggagaccgtcacgcatccgcgcacgcgcgagctgttggcattcgttgcctcccagttcaacgaactggagctgatgcccaaggagcgcgagctgatcgatatctgccaaaaggagaaggcggaaggtcgcaagaccctggtctacagcgtctacaccggtacacgcgatacgacatcacggctcaagctgttgctcgaacaggaaggcttcaaggtagcggtactgcgcgcaagcgtggatgcctcacgccgcgaggactggattgccgagcagttggaccgaggcatcgacgtgctcatcaccaatcccgaactggtgaaaaccgggttggatctgctggagttcccgacgattgtgttcatgcagtcgggctacaacgtgtattcgctgcagcaagccgcacgccgctcctggcgaatcggccagaagctggcagtcaaggtgatctacctgggctacgcagccacctcgcagatgacctgcctggcgctaatggccagaaagatcatggtgtcgcagagcacctcgggagacgtgcccgaatcagggctcgatgtcctgaatcaggacggcgactcagtggaagtggcgctggctcggcagcttgttgcggcctga

SEQ ID NO: 361639 - DNA, 330 bp, Pseudomonas aeruginosa
gtgaatgggctgcggctgcgccgcacgggcctggtgctgctgggcgccctcctcgtcctgctggccgccgtcgccaccaatgtcatcggcatccgcctggccggcggcatcgacggttggcaagcctggctgaccgcgcacagcacgcatttcctggcctggcgcctgttgctctatgccggcaccgtctatggctggctctggatgcgtcgccgcgtactggcacgcgagccggacaccggcactcggcggcgcctgctgcgggccgaactggccgctgtggtcgcggtcgccgcgctggaactcagtccttatctgcaggcgggatga

SEQ ID NO: 361640 - DNA, 384 bp, Pseudomonas aeruginosa
atgaacacgaaagcccgcatcagcaacgcagaacgcttcggccgtcggatcggcgggatgtggcggggcttcgttcgtcgcgaacgtcaggtcgccggctggctggtggcgcacggactgtccgcaggcgcggcgacggcgctgctgtggggcgtgaagctggcggtgctgggcgtgctgctgtatgtcgcgttctggctggcgctgttgttcggatttgcaactgctgctgcctggatggcacgtgaatccgatcaagatgagtcagaagagtgggcggttggtgaacaggccgaacacaaaaacaaccctggctatcatccggccctgtacaacgatgcccctgattcgcgttatgcagacccgcgttatgacgatgagtga

SEQ ID NO: 361641 - DNA, 1893 bp, Pseudomonas aeruginosa
atggggccaaggggaaaggccctacccgaaaaggccaaaaggcccctgaacagcccgtcatcggggttcgccatgctctcgctgctccagcgcaaaaggggttcaccgaccaccggcgtgccgccaactccagccatcgaacccgccccgggcctgacgccgccacagtcggcgtcctcgctgctggccacaccccgccggcaacgcctgctggaacacatctggcagcgcacctcgctgtcacgccagcagttcaccgcgctgtacctcgcaccgctggaacgctacgccgagctggtccaactattccccgcctccgagagccaccaccacgcctaccccggcggcatgctggatcacggcctggaaatcgtcgcctatgcactcaagctgcggcagtcatacctgctgcccaccggcaccacgccggaggatcaggtcatccaggcggaagcctggaccgccgccatcgcctacgccgcactgctgcatgacatcggcaaggtagccatcgaccttcatgtcgagtatgccgacggcagccaatggcatccctggcacggcccgctgacccagccctaccgattccgttaccgccagaaccgcgaataccgcctgcacagcgccgcaacgggcctgctctaccgacaggtgctcgatgacaagattctcgactggctcaacacctatccccagctctggtccgcgctgctgtatgtcctggccggccagtacgagcacgccggcacgttgggcgagctggtgattcaggccgaccgcgcttcggctgcccaagctctgggcggcgatccggcacgggccatggcggcaccgaaacacgccctgcagcgcaagctgctcgagggcctgcgctaccttttgaaagaagaattgaagctcaaccaacctggggcttcggatggttggctgaccgaggatacgctgtggctggtcagcaaaacggtctcggacaagctgcgcgcccacctgctggcgcagggaatcgacggcatccccgccaacaacaccgccgtgttcaatgtgctgcaggatcacggcatgctccagcctacgctggatggcaaggcagtctggcgagccgccgtcacaagcggcaccggctggtcgcacaaattcacgttgctgcgactggccccagccctgatctgggaaggaggcgatcggccagagccgttcactggcaccgtcgtgatagaggtcgagccaagcgacgcacccgcggaaccatccaccgatagtggtgttagctcaccggcggcgagcgctacacctgcactgcctgcagcgcccgctgccgacggcatcgacgacctactggcattgctcggccccgacgataccgaggtgaccacgcagaagctggcggttgagccgtcaccagcaatcgccctcgatgagccgtccgcgcctgcctatacggacgattcaaaaccactgcccgcctccgcgcatctacctagcttgaacaacgaaaactcgcgggaaccaccttccggcgaacacttcatggcctggctgcagcagcacatacagagccgcaaactcatcatcaatgacgccaaggccctgatacataccgtggctgacaccgcctttctggtcagcccaggcgttttccagcgctatgcacaagaacacccgcaaactgccgtgctcgccaaacaggatcagatcgccgattggcagtgggtgcaaaagcgctttgaaaaattgcaactgcaccgcaagcaagacaacggtctaaacatctggacgtgtggggtaacagggccacgtaagtcgcggcggctacatggctatctactgaaggagccatggcacttgttcggggatgtaccatccaacaacccgtacttacagcttcgctgttga

SEQ ID NO: 361642 - DNA, 741 bp, Pseudomonas aeruginosa
atgtccatcgcgtgcagcgttgccggtggcgaccttatcggccttgctcccgcgcgcactggtcgtgtggtctatctggccggcgaagatccaccgtcggcgcttgtgtgccgggttcatgccatcggcaagcacctgagccagcaggcccgtgaagccatcgcagaaaacctgacccttgagccgatcttgggcaaccgtctgaacgtaatggaagatcggcacctagcccgcgttatcgagttctgcgccgatgcccggctgatcgtgctggacaccctgagccgcattcacagcttggacgaaaacagcaacagcgacatggcgcggcttgtcgccacgctggagtacgtcgcggccagcaccggggcgtctgtcctttacctgcaccacgtcagcaagggcagcgcccgcgagggccagaccgaccagcagcaggcagcgcggggcgcgtccgcactgatcgacaacgcccgctggtgcggtttcgtcgaaaagatgaccgagaaagacgcggtagatttgagcgaccgcccctatgaccgacggcctatcggcaaagacaggcgcggcttctttgtccggtttggtgtcagcaagcagaactatgacgccaccccgcttgaccaatggtaccgacgccatgacggcggtgtgttgctgccgacggaactggttaaggtgaaaccggagaatgaagaccggacccgaggcaagggttatgccgcagccgcgtattag

SEQ ID NO: 361643 - DNA, 198 bp, Pseudomonas aeruginosa
atggaagtcaaattcagccgctacgacacggcggactatctcaagaccgaggatgacattgcggcctacatcgacgccgtgatggaggaaggcggagacgatccggcctatgtcgcccgagcgcttggcgctgtcgcccgcgctcgcaatctgagagggctggacaagactctgccggacggcaacaaacaaccatga

SEQ ID NO: 361644 - DNA, 948 bp, Pseudomonas aeruginosa
atgacggaagcgaacgaggtcgcactgatcctgccgcagatcatcatcgatgaatttgcccggaaccgagaccgagtgatggcggcgagcagagcgagcctttcaagccactttaagcgggttagagaggcaatcgtacagttcgctcccgaggagggacgagaagcgacgctcaagcagctaaacgagatcgaccaccgcatcgccactggtggtgaggcggtgaacgaggctgtgggtctgattgagaagctgttcaccacgacggagcccgtgccgatcagtgacagtatcaaggcacgcgctgctgaccgcgctctcgccaaggtcgcaccttttcaccgtcagatgaacggcattggggatgccatcatcatcgagacttatgttgatgcgctggctgagcggcaggatgacgacgtgttcgcgttcgtgacccacaatgtccacgatttcagtcagaagggagcggacacgcgcttaccgcatccggatctagaagcgctcttcgacggggcgcgctctcgatattcgactaacttgggcgcgctgcttaatgagtttgcgagcgacctgattgaggagatcaagtttgatcgcgaatatagccaggaaccacgtcagctatcggagttgctggaggcagaggagcagctgacccagcaggtctggtacaacagaaagtggggcatcattgatcgcgtcgaacgcggagcagaaagaatagtgtccaaagaagagtgggaaaaggcgactccgaaagagcgccgaggcctcttggtagacacaatttgggaagggatgcttgctgcgatgaagcggaccgaagacgagcttggcaaggacaatttaggcccctggaccgacttcgagtggggaatgattaacggtaagctgtctgcaatacgctgggtgctcggcgatgagtgggacatgctggatacgtag

SEQ ID NO: 361645 - DNA, 387 bp, Pseudomonas aeruginosa
atgggcatgctccacgaaaaactgggtttgccgaaaggccactactatctgcacgtcgctgtgctggcgggactgccggcttcgttggtttctgatttggcaagcgagctggagcgatcgccagcgcagatcgcggagtggatcactgtgtcccacggcagtgccgtaatgtctatacaggctggtgaggtgttctgtcgtcttattgagaccctcgatgctctattggagctgcacgagggggatctaggaggtacgctccgctggctaacgacgccgaatgtggtgctgtccaatgaggcgccggtcgagctgctggtaaccgaatttggtaagcgcgctgtgcggcaagctattcgtgcgattgaatatggactgccagtttga

SEQ ID NO: 361646 - DNA, 675 bp, Pseudomonas aeruginosa
atggccttactgttgttgcttgaccctagtggagttgatttcgctttggcagaactgttttacgagccgggccagggctttatcggtcgtcacagcttctggctggaagacatactccatgaccgggcgaagcaagctgttattttcgtgggcgtaatggccattttcggtttcgtactaagtctgatgccaaccaggttaagtccccttcgtcgtcaactaggttacctggtactggcattggctttatcaaccagtattgtcactccgctgaaaacactgactggcgtgcactgtccatggagtttgagcgagttcgggggagcagaaacttttacacctttgcttagtgagcgcgcgccaaccgaaaagccagggcgctgttggccaggggggcatgcctcggcagggttctctctgttggctctgtttttcgcactgcgcgacaggcgtcctcgcaccgctcgcattgctttagttgttgcgttgggactgggagccgtgttttcgctaggacgtatgatgcagggcgcgcatttcctctcgcataacctgtggaccttgttgttcgactggctgatcggagtgctgtgctaccggtggattctctataaagcgccacaaccaatgcaactgtctcagcttgcgcctgatttagcgggaggacagaactga

SEQ ID NO: 361647 - DNA, 666 bp, Pseudomonas aeruginosa
atgcaaggtcttctatggtttcttcgcctgtgccttgcagcgctggtattggtcgctgcattggtagcactgcctgttagcatggcctggagtgccgcgcctacaattcagagcctggctggcgagactcggccacagagttgggcggagccgctagatgagcggctgaacctgtatcggatacagccaaatctctatcgcagtgccttgcctgataatgaggctgaaccgatgctcaaagaactgggcgtcacgacagtgatcaatttctatcaacgtagcgactcagcttggctgcatgatccaaaaatgcgccagattcacctgccattccatactgacagagttgatgatacggatgtgatcgcagcattacggagcattcgacagtcacaagagctcggttctgtgctgattcactgtaagcatggacaaaatagaactggcctgattgcggctctatatcgcatcgtttatcagggctggagcaaggagcaagctctggctgaaatgcgcggtggcggctttggcggtgagcagcgattagacgatgccgaacgatacttgcaacaagtcgatatagagcaacttaagattgcacttgagggtggagcttgtagtacaatgaatcgcccctggtttcgtagacacctccaagcctcataa

SEQ ID NO: 361648 - DNA, 801 bp, Pseudomonas aeruginosa
atgcgtgatcttacagaggaactcaaagacttacgcctgcacggcatggccactgcctgggcagatctggccgcacaaggtgaatccaccaccgcctcatcgaaatggctgatcgagcatctcctcgatcaggaacacgccgaccgggcagtgcgctcggtacatcatcagatgaatatggcgaaactgcccatacaccgcgatctggctggcttcgacttcggtgtatccagcgctgatgcccggctgatcaaggaactgtccactctgaccttcaccgacacagctcaaaatgtggtgttcatcggcggccctggcaccggtaaaacgcacctcgccaccgccctggcggtggccagcatcacccaacacaacaagcgtgtacgcttccactccacggtcgatctggtcaacctgctggagcgtgagaagcacgagggtaagacagggcgtatcgcccgaggactactgcgtgcagatctggtaatccttgatgagcttggctacctacctttcagccagagcggcggggccttgctgttccacttgctctctaagctttacgagcacaccagtgtgatcatcaccaccaacctcagcttcgccgaatggtcgagcgtatttggcgacgccaagatgaccacggccttgctcgaccgattgacccaccactgccacatcgtcgagacggggaatgaatcgtaccgcctgcaaaacagcaccttagtggccaagaccaagatccaggcgagggagcgcaggcgacaggatatcgaggaggcggagaacgacccgttttga

SEQ ID NO: 361649 - DNA, 1863 bp, Pseudomonas aeruginosa
atgactaaccaaaaagccacgacgatcaatccatcggtaacaccctctcaagtcactcttcctaactggcttcacccagcctccactaaaatggaatggtatgttccgaaaaccggcacaagagtatctgcttcagaagaccctaataccaggcactatgtgaagatcagcttcgattaccagctatttgacggctcatctacaacagacctggtgtggaatctctttattaaagacttacagtcatcagctattgccctaattgaaagttcgaagtcaaaacgaccaaatgcactcgctccctttgtaaggacagcctttgagattgccgatcatgtgtatgaggctcggcatcgctcaagccaggcccccaagatcctcacattggctgacatcaaactagacgacatcaaaacattccttgaagctcacgacttaacactcatgggcattaatatcgctgagcttgactcacagctaggctcagcatcgagagggctgaaaaatatagtgccgctaatttcagaaatgaatatccccccgattaccaaaaagatcctaatccaaaaactcaagagcagcaatatagacatctgccgcgaattcatctgcacctacactgccgatgaagatgaagaagcagacagccttagcatctctacaatacaaaacaagtgcacgaacctaacctatttgcacgccaccaaagaacaacaaagtcaacgctttgaggttggaacccatgaaatctccgacgcattcaacagcgtctctggaaggtttctggagaaaacccagactcctttaatgcccgcaaacatagcatttcactacattagtaacgcgattgtttttcaccgcgacctttggccacacattcgagagtacattaagaagcttgacgactactacgccagggaaattattggaaggtatgccgcgagcacaatcaggtcaaatgtggatatcttcaagacacaaacatttgaggctgtgcctatgcctaaggcactgcggcacctaaacatcaaaacatatggaaaatgcggcagctccagaggcggcatcacccgcaactcgattctcagagaacacatctccaccgacgaactgatcgatttctacgctattacaacccgcatcttgattcatacattctccgcatgccgtgtattaagcgccgctctactggatgcagactgcctcactatatctaaactggatggcctatgggacttaaaactaaaaacccccaaagccagcaatagccatgaactggaaatcataaagcgcccaatccctaaagtcatatgggacttcatttacgattatattgagttcatggagagtcggcacccaggcatgaacacaatttggccctctggcgcacaaaaaggaaaagaccgaaacgagacaacctttcgtaaaatactcgatcaatactcagattggattcaagtaccaacaacaggtgaaacgcgatggtatgcgcgcccccatcagtttaggcggttctttgctgcttttttcttctacctgagcggaaacactgagattgaaccattgcgttggatgatgggccacgttgaaccgagtgtcacgctctactatgctgacatctcaaaccaacctgactgggagcgagatactctcgaatttctaaccgacttcctggagggaaatgtgggcaaggatgttttggttgacgaagatttactggaagaactggctatgtgcgagccagatgtaaaactcggtgaccatgcacttttgtccgagcaccttaacgaactgaccaaccaccgcgacatcaaacttaaaatcatgaacaacgaaaaaatctttgtatacgcgagcaaataa

SEQ ID NO: 361650 - DNA, 1749 bp, Pseudomonas aeruginosa
atgagcaggaagccagaaaatttcattgatggtatcagaacctgctgcccaaaagacatccttgcctgggtggaaaagcatcccccgaagaggcgggcacccttcatccgcgatttcttcctcatcgctcatcagctcgacccagagtggcatcagaatcccgtagtaataaccaatgcatgccgtatatttctctctgatagacgtaatgcagtatcagaaactaccggcaagcccgtcaaagaagtaaccgttatttctgactactcgactgttcgtcattacttgaacaggcttcaaaaagctaaaaagctgcctagcaatgcgctgatcttaccgaaccctgattcatcagatgtgttctcagaaaaagaatgtaacattctaggttatctgaccttggaagatgccgtaaatgcaccatccatggaaatggctctgaatgagattgctcaacaaatcgaaaaacatagaatcattatcctatccaaatgcaaacgcatggtagcagagggctatgctcggtttttgaaagctccagacatgatttgtaaaagcgatttggctgccattcgactcacaacggacaacctggatcccaacctccgagcatttggatcaggccaacacataagctttttctctccatcacacccaaacggcttcattaattccgttgcgtacctagcccaagaacaagatggtttatttacccgcaagtcttttcctggcgcacaccatatatactcttggtcttcgatggaagttaagtcttatttaggcattaccgaagattttgctgtagccgccatgtgcatcattatcgatgaactcggaatcaatgtttcagacttggcaaacgctcaggtcaagaaaacgaaagacgggcaatttgtcacgattcgagaggacggcgggatcactgtcaccaccctaaaacccagggcgaacaagctgattactcgccacgcacccaagactacagatgaaattgagatcgaagcgaaaaatatcgacgctaacactgcgttatggatgcttctacaaatgagagctcaacattcaaaagctttgaactctaattatctttttgtcatggatggttctagccccactcgtcaaggggatgagcaactctaccgcatcctagacacgagacggaagaacactttcaaagcaattattgattcactgccctcctgggtaggtgacgctgaacccacaatgcccaaaatcagggtatcacgcggcctcctgaagtggatcgaaagcggtggggacactttggaaacgagcctatatcttgggaattcgttacttaccgccttgcgaaactacgtccccccgtcaatacaagagttcgtataccgcaagagagtacgcgaccatcaaaatattcagctacttatcgcggaagggaacgttcccactgaaaccaatcaccaaggagaaggttgctcaatcgcaatggcccaactcattgacggtgtaaagaggctcagggctgatagacccggaaccgcagcgagcaattcaagccagatgctgtattttctatgctcgccccaaacggttgaactaatcgtttcatatgcgacatacggcaaagatgaaagcctcatttcgacatgcaagacgattattacaaagatccaggatgagggcagccgaaaaatgatcaagctgcttgctgacgccaagcctaagcatcttaactttgatctccttgaggtatcagttgatgactaa

SEQ ID NO: 361651 - DNA, 1161 bp, Pseudomonas aeruginosa
atgggcgtgctggcggcgaaggctcgtaagaccttgctgctgacaggcacgctgatgggcggctacggggacgacctgttctacctgctgttccgagccctgcctgggcggatgatcgaagacggctaccgcccgaccacgagcggcagcatgacctcggcggccatggcgttcatgagggaccacggggtcctcaaggacatctactccgaaaacaccggcacggcgcacaagacggccaggggcaccaaggtatcggtgcgcacggtcaaggctccgggcttcgggccgaagggggtcttgcggtgcatcctgccgttcacgatcttcctcaagctcaaggacatcggcggcaacgtcctgccgccgtatgacgaggagttccgtgaagtcgcaatggacacggcacaagccgcggcctaccgcgacctggcgggtcggctgaccgcggagctgaaacaggctcttgcgcgacgcgatacgacgctgctgggtgtggtgctcaacgtactgctggcctggccggactgctgcttccggtcggagaccgtggtgcatccgcgcacgcgcaacaccttggcgttcgtcccggctcagttcaacgagttcgaggtgacgccgaaagagcgcgagctgatcgacatctgcaaggaagagaaggcgcagggccgcaaggtcctggcctacacggtctataccggcacgcgtgacaccacgtcgcgcttgaaggtgctgctggagcaggaaggctttagggtggcggtgctgcgcgcaagcgtggacgccagccgacgcgaggactggatcgccgagcaactggaccgtggcatcgacgtgctcatcaccaatcccgaactggtcaagacgggactggacctgttggacttcccgacgatcgttttcatgcagtcgggctacaacgtgtactcgctccagcaggcggcacgccgctcctggcgcatcggacagaaacagccggtgcgcgtgatctacctcggctacgccggttcctcgcagatgacctgcctggagctgatggccaagaagatcatggtgtcccagagcacgtcgggagacgtgcccgaatccgggctcgacgtcctcaatcaggatggagactcggtagaggtcgctctcgcgaggcaactcgtggcggcgtga

SEQ ID NO: 361652 - DNA, 363 bp, Pseudomonas aeruginosa
atggcctggctgaaacaggccgtccagacccgcaagctcatcatcaatgacgccaaggccctggtacataccgtgtccgacacggtttacctgatcagccctggtgttttccagcgctacgcacaagagcatccaaccattgggccgcttgcgaaggacgcggccctgcaggactggcagtgggtgcagaagcgctttgaaaaactcggactccacaggaaacagccatcgggtctgaacatcaggacgtgcgaggtcatgggaccgcgcaaaacgcgccaggtgcatggctatttgctcgaagacccatcgcacatattcgatgccgttccaccgaacaatccttatctgtcgctcaaatag

SEQ ID NO: 361653 - DNA, 1467 bp, Pseudomonas aeruginosa
atggcgactgtcacgcctgaggaaatggccggccaattgctggccgaggggttttcccgctccggccctgccgcacaggtgttgagcgacccgctgaccgacacgccgatggtggtcacgctcgatgacctgcgcccctacgagctggatccacgcctgacgcgcaacccgctctacgacgaaatcaaaacctccatccgtgagcggggcctggatgccccgccaccgattacccgacgcccgggtgccgagcacttcatcattcgcaacggcggcaacacccgcctggcgatcctgcgcgagctgtggtcggagaccaaggccgaacgcttcttccgcattccctgcctgttccggccatggccggagcgcggcgagatcatcgccctgaccgggcacttggcggagaacgagctgcacggcagcctgacgttcatcgagcgggcgctcggcgttgagaaagcccgcgagctctacgagctggaaagcggcaaggcgctgtcgcagtcggagctcgcccgccgcctcagcgccgacggttatcccatccagcagtcgcacatcagccgcatgcaagacaccgtgcactacctgctgcccaccatccccaacgtgctgtacaacggcttgggcaggcatcaagtcgaacgcttggcggtgttgcgcaaagcctgcgagctcacctgggaaaagtatgcgggcggcaaggcgttggccgtcgatttcgagacgttctttcacgacgtcctcgccctttttgatgttcagcccgactgctttgccattggccgcgtccaagacgaactgatcggccagatgtcgcatctgctcgatatcgactacaacgtgctggagctggatgtcgacagcaccgagcaccgccagcgggcggtaaccagcccaccccagctgccggttgaaaccgcaaccgtcgttcaacctggacgtgcagccactccatcgccagatgccactcagagcaatggcactgcagcaggcgcttccggagccgtaccgaacaacgacaccgccccgccgccagccccagcgccgacaccagtgtcaggcgcttcctccggtgaaggtgatcccgacgcgcgcctgcagggccatattgtctcccccgccgacaacaccgagcgcctgcaaaccatccaacacatgctcgccgagcacaccggcgagccgctgccgaccttcgcggacagggtactgcaggccattccggtgcaagtcggcggactgttcccaatcaacgacgtctggtacatcgaaccgggactggatgcgcctgatcgcctgcgcatccacatcgcccaattcgcccaggagatcgccgagcaagccgagttgatcgactgcatcgaagcgaccgagacccgcataggcttcacctgcagtgccccctggtggacgtgtcaccaccggccttcggccaggtggtgttggcgttgttacgcgccttga

SEQ ID NO: 361654 - DNA, 999 bp, Pseudomonas aeruginosa
atgacgcatagccttctgctcggaaatggcattaatcgggttgcaaaacagcgacagtggactgatattcttcaagaactcgcaatccagttcggtgccgatgacctacttccacagatcaacgctaaacctctatctatgtttatcgaagagctatgcgctcgctcgtcggaacgcttcattaaggcagaacgcacggtaaaaatcgagttcgccaagcttctcaggcagatcgagcctatagaagctcatacacgggtgtgcagcctgtttaaagtgatcttgacgaccaattacgacttcacgattgaggaagctttcgctggggtgctacatcaccgagcatttctcgcccccgagtcaagatacagcctctttcgtagacaccgagctgccgataaggatatctggcatatacatggtgatatcgctagacccggctcgatgttgctcggtttcgaccattacgccggaaaccttcagaaaattcgcaactatgtgaccgatgggatcgacgtcaaaagcgtacattatcgagtttcttcacctgtgaagaatggcaatctcgacttcaccatcaaccggcaagtgtattcttgggttgattatttcctccgtgaccacatccatattgttgggttggggatggactttactgagattgatttgtggtggctcttgctgcacaagcgtcgcaggctccatcaaacaggcaaggtgtttttttatcacaccaccactgaatctcagacgaccgatactccagttacgtctctcctgaaatcactcaacgtggaggtggtaccagtggtagcagctagctacttggattgctacttgaaggttgcagacatgattgaggagaagatagccctataccctgctctctttccaaagccagagtgtaaagctgatgaaactcagtgcttgagtacgctggaggagttacatacctcacggcctaaacaagccagcataaggttctccaggtcgcactag

SEQ ID NO: 361655 - DNA, 582 bp, Pseudomonas aeruginosa
atgggcgtttcgtcgctgcagcccctggtcatgccggcttatccccttccaccggcctggatgggcgcctccgatctgccacccgacacgttgctgttcgagtcgttggatctggagtatgcgcaggagcagatcggcagggtgtaccgcccctaccacttcaatgcggactaccggaaacggatcgggccagccagcatgtttcgcctgctgggagaagggatacaggtatcctggttctccttcggaaccgaaatatcggtcgaacccgagatctccgacgatttcatcctggtcctcacgaccctcgacgggcacgcggacatctgcagcggccgcctgcggcaccgcagcaatttcggctccaccgtggtgatcgccgcagacgcgctgtcgcgctgtcgcgctatcgcttcagcgcggacaacacgcagatgggcgtgcgcctcgatgtacggcgcgtcgaaacgctttggcaacgcctttccgggtcgtccggagcttgcaccctgtcccgtctcctgccgccccggcaacaagagcgctggctggcttcggtgggaatgctcaaacagttgctga

SEQ ID NO: 361656 - DNA, 774 bp, Pseudomonas aeruginosa
atgcatgaagagctgccagcttcaaaggtgttctatcgtccgattgaggccgccatacgctgggcaggattatggcgttactcgcaagaaatcctgtcctccatctcgtcgcctagaaatctgccgagaacgctcaattgcccccgatgggatgaactgcgactctgcacggaacgcatctacgatgccatcgtcaacggtgagcttccctatggtcgaaacggcatcacgttgaacgatgaatccctgcttgattcccatgagttgaccgtgcgccacctcgatctcaaacactggatgcaaacccactacccagggcatcgacctgcttttcttttcagtcgcatcgagcgcatcgcgcaccccgtcatcacgctggaagccggacaggccatgttggtggaacgccaagccatgaaggcggagcttgagctttgtcgtcgcgaactgcggaacctcaaggagcgtcacgaagaactgctcaagcaatctggggcaatcccagcctgcggccagtgttctctcagtgatcgtgcggaggccacctacctgcacatcattggcagcatgttggagctgatgctgagcagatctccttcgggcaagccgtactcttgcttcagcacccaggaggccatcgtcagtgcgttgatcgctcatcgtggcggcatcatgggcatcaccgagcgcacgctgaacggcaagttcgccagcgcacggaggaagctgggcagcgcacggaggaagctgggcagcgctagcgtagttgcttga

SEQ ID NO: 361657 - DNA, 240 bp, Pseudomonas aeruginosa
atgtcgcagcccactgcactgctgcccggcgagcgccgcatcctgcggctggacgaagtcgaggccaaatccggattcaaacgcgcgcatatctactcgctcatgaaaaagggtgagtttccccaatcactgcgccttggagttcgcgctgtcggatgggattccaccgagatcgatctgtggatcaccgaacgtctcaagaaccgcgcgcagcagccagctctcccgagcgatgtctga

SEQ ID NO: 361658 - DNA, 864 bp, Pseudomonas aeruginosa
atgcaggtcgtatccatcatttcgaccaaaggcggcgtgggcaagaccaccgtcgcggccaacctcggcgcattcatcgccgacgcgggtctgcgggtgctgctgctcgacctggacatgcagccaaccctgtcgtcctactacgagctgaagcatcgcgcaccgggcggcatctacgagcttctggctttcaacgaacgcgacctggcgaacctggtgtcgcgcacagtcatcgacaacctggatctggtgctgtccaacgacgagcaccggcagctcaataccttgctgctgcacgccccagatggacgcctgcggttgcgcaacctgatgccaaccttccagccgcactacgatctggtggtcatagacacccagggcgcgcgtagcgtattgctggaaatggcactgctggcgtcccagcaggccgtgtcgcccgtcacaccggaaatcctggctgcacgcgaactgcggcgtggaaccctgcaattggtcgaggacatcacgccgtaccgaaagctgggcattgaaccgcccgcactgcagttgctgataaaccgcgtccccgccgtctcgtccaacgcgcgcctgatccagcagacgctacgcctgatcttccaggagcaggccagcatccaggtactggccactgaaattcctgcgatcgaagcttttccgcgcgcagccacccgaggcctgcctgttcatcgcgtcgagcatcgacggccttcgggccgtcaggcattggccgcgttggagatcgtgcgcggcctggcaaatgagctatgccctcagtggcaggaacggttcgcagcggtcaccggcaaggccggagggaggttcgcccatgtcgaacgcccatga

SEQ ID NO: 361659 - DNA, 261 bp, Pseudomonas aeruginosa
atgtcgaacgcccatgaactggcccgcggccacaagcggttgctgccgctgatcgagtatgccctgagcgaaggatgggaggtcgttcgtaccccaggtggacatctcaagttcacccggccgggactgccaccgatcttcaccagcgccaccgccagcgaccaccgagcggggctcaacgcccgcgccatgctgcggcgagcccagcgtgggctcgaaccctcggagcttcctacgcaggaaggagatggccatgcctga

SEQ ID NO: 361660 - DNA, 1740 bp, Pseudomonas aeruginosa
atgcctgacatctccccccaggacgttgcaaacaagctcctgagcgatggcttcacgcgcagcggccccgtcgcgaacagcttgagtgatccgattgaggatacgccgatggtcgtgacgctcgatgagttgcgaccgtatgagcttgatccgcgcctcacccgcaacccgctttacgacgacatcaaggcctcgattcgcgaacgcggactcgacgctcccccgcccatcacccggcgtccgggcgcggatcactacatcatccgcaacggcggcaatacccgtctcgcgatcttgcgcgaactgtggagcgagacacgggacgagcgcttcttccgcatcgcgtgccagttccggccgtggccggagcgtggagaaatcattgccctgacgggccatctcgcggaaaacgagctgcacggcggcctgtcgttcatcgagcgcgcattgggcgtgcagaaagcccgggaactgtatgaagaggaaaccggcaaacccttgtcccaatccgagctggcacgccgcctcaaggcggacggctatcccgtgccgcaaccccacatcagccggatgcaagaggccatccaatatctgctgcccgccatcccgaccgtgctttacgccggcctggggcggcaccaggtcgagcaactgaccagcctgcggcgcgccgccgacagagtctggtcggcccgcaatcgccaggcccactcccacctcgatttccccacgttgttccaggacgtgttggcactgttcgacagtgcggcgggcggcttcagcgttcagcgcgtccaggacgaactggtcggccagatggccgatctgctcgacatggaatacgacacgctgctcttcgagattaccgactcggatcggcgctggcaggtcctcagcagcgagcctgccggcgaacccgaatcacctcccgcaccagcaccatccctgtcgtcgccatcgacagcgtcgaccgggcagccatcttcgcccccgccaccggagcaggcatcgacgacgccttcggcaccggctgtcgcgccacccgccaacgatacgccgtcggccgctgctgctccccaagccccgactgcaccgggtacgcaggaatccgacgatgcgcagcgtgccaccctgttgcaggagcacatcgtatcgccagccggcacaaccgagcggctgcaatccatccagcgcctggtcgcggatcacaccggcgagacgttgccggatttcgagcgcaacgtcttgcagtcgatcccgattcaggcaggaagtctctatccgattaccgacgtctggtacatcgaacccgcgctggacgaccccgatcgcctgcgcacgcatatcgcgcagttcgcccgcgagattgccggcgaagccgctctgcaagacctggtcgaggcgtgccaggaaggcatcggttttcgatgccggcagcccgaggccgagccaacacccgatcggcacgcccaggcgacgctggcactgctgcatgccctgagcacgccttacttggcgaccgatcagtcggtcacgagcatcgatctttcgattctcaccgaaatgctgggagcgcttctacaaggtaccccggcagtcaccggagcgcagcaaggcttgccacacaggctcagcgacaacgccctggtgaaactgttccgcctgctgcggcttgcccgtcgcttgagggacatcgagtccggcatcgccgatggcgaccatgccatcaccggatcatga

SEQ ID NO: 361661 - DNA, 561 bp, Pseudomonas aeruginosa
atgtccggacctcacccacttaaccaggcagtgatcgcccaggcacttcatgatctacgcaacggccagttgcgccgggccaagtcgatggggttcgacgacaaggatctggatgccctcaagcatcccgcgatggccagcgtgctggccaacgccaacgtgtcgtggtgctcggtagtcgtcaaccgcgatgtgctgcgtcgtctgctgcaccaggtagaagacgtcaccgaggaggtggtgaagatcgatcggctactgcgcctgggcgccagcacggagctgatcagcaaattcttcggcttgacccaccaggagatcgccttgcgtcgcagtgtcatcggcctgccgaaacgcaaggggcggcatccggtattgaccgaggaacaggacaccgacctgtggaagcgctggtcctcgacagtgaaggagcaggaagtcgacagcaacgacgacatgggaatgctgggcgtcgcggcggatctcgccgaggccactgggctgcctctgtccgtgatctggaatgccttgcgcggatggatcgatgaagggctgacctga

SEQ ID NO: 361662 - DNA, 1206 bp, Pseudomonas aeruginosa
atgacggatgggccacaccctacgcgcggccccgtccggctgggcgagctgttcgagcaggcgctcggccaactggcacctcaacagccgccgccggccccatctgcagtctcaccaccgaccgacggctttctctatagtggcaatcgacacgacagcgtgccgcgtgcattgctgctggaccggcgcctgacaccgcttgaacgcaacggctggcaggtgttccgcctgatgctggcggacgacggcatcaccgccatgcccacctacgaccagcttgcgccttggctggcctccatgccttgtgccgagagggcatcgcacgagacggtggcccgagcgctgaccgtgctgcgactgacgcgctggatcagcctggtgcggcgccggcgtgatcccagaagcgggcgcattcagggcaacctctacgtcctgcacgacgaaccgctcaccccttacgaagccatccagctcgatgccgattatctggagttggtcagccaggcactgacgcatgccagcaaatccgtccagcgcgtgggcgcgaccaccctgcaggagttgacgcaagaccccatgctcagcggccgagtgctgccgagtcgcctggagattctgtcacagcggctgtcagcgcagggctggaacggcacatcgagttatccacagggcggcggcgaacacgattccgaagacggctccgacgaccgtcttcggaatctggcgaacctctcttcggattccgaagcaggccggaaaagcccggaaaacggcgcacttcggaatccgaagtcggaccgtacagtacgtataaaagaaagtattaaagaagtacgtacagtaccgcgcgcgcaagaagaacgtcagcaactgcagttgcccaggcgcttcctggcgctgaaggcggagcagcagaacggcgcgctggccgcgatgcagtcagtggatcacgatctgcggcaagccctgctggacgaatgggatgcacgctgcgcctccacgacggtccgcaatcccaccggctacctgttcggcatcattcagaaggccttacggggagaatttcgcacctgggctgcacagaaggcgcctgcggcgccagtcaacaggacaccagagcccgatccgccgcccgccacacctgctgatgcggaagtcgcgaaagctcatctggcgcgcctgcaggaactgttgcgctcgacctga

SEQ ID NO: 361663 - DNA, 789 bp, Pseudomonas aeruginosa
atggcccaagagaacaatgccaccgaatcccttcagttgaacctgggatcgctgcgcagcgcgatgtccctgaccctgcacacccaccatgcgtcccgcatctggcatggccgcgccccggccgaaggcaggcccggcatcatcggccttaacggctttgtctccatcatgaacaagctcaagcgcggcgccgaacaggacgacccctattcggactggtggatgctgcgcatcgaggacaagctatccaccaccaaggaacagctccagaccctgcgccagcaagtagaccaggcactggccggcgtgccgcctgcgttgagcctgggcgagaacctcaacgtccagccggtcaagctgccgctgttcgtgtcctcgcagttgggcttcatggcggtgtatctgctggcggactacgacgatcttgcccgacgtctgatcctggcccaccacaccgcgctgatcgatcgctcgacgctcgaacgctggctcaacgacggcgcgcactcattgcgcagcctgttctcgctggcgcagcagtaccggtattccggcaccacgcgcgacgacttcgcggcgaagaatgccgcagcacgggcggcgctggaaaagtacggtgaattgccccaggacgtgctcgaaggtacccggcgcagccgcttcgcgccgccgatcgcacgccgtggcctgcagcagcgcaccgcccccgaaaccgaaccagccggcgagccggatgctgcggcagaccccgccgaagcggcgtcatccgacgagggtgagccgacatga

SEQ ID NO: 361664 - DNA, 531 bp, Pseudomonas aeruginosa
atgacgatgcgcgatccgaaccagaaccggcacttccagtccctggaacaggcggacttcatccagttggaacaggcgggctatctaaaaggccttttaagggcttttaagggtaaaggggatctcgaagactgggccaaccggtgtcacgcgctcagggatgagctgattgacctggcgcagcggcgcgtgctggcgcaggcgcgaggctatcccttccgtctgctgtccattgaactggcccagcagcgtactggcgcaggcacgacctttctgcgctggcgcaagcaagaccgctcggcgatgggcgtcgccctctggcaggaggtcatggcctccacggccacgccggtgaatctgctggaggatctgctcgcgctggaacagcagcgcatcgcgctgaacatgcagatcagtctactgcacaccctcggccggcaggcccaggactgcgccggcaagatggcccaggccgaggacgcttatctgcgccggctcaaatccattcccgccgcaatgcacgatcggtga

SEQ ID NO: 361665 - DNA, 2010 bp, Pseudomonas aeruginosa
atgcggctatttctctgcgaaaaaccttcgcaaggcaaggacatcgggcgcctgttgggcgcaaggcagcgcggcaatggttgcctcaacggccccggcgttgtcgtgacgtggtgcattggccaccttgtcgaagccgcgccgccggaagcctatgacgaacagctcaagcgctggacgatcgagcagcttcccattattccccagcactggcgggttgaggtcaaacccaagaccgcagcgcaattcaaggtcatcaaagaccttctgagcaaggcgaccgaactggtcatcgccaccgacgccgatcgcgaaggcgaactgattgcgcgcgagatcatcgatctctgtggctatcgcggccccattcaacggctgtggttgtcagcactgaacgacgcctcgatccatgccgcgctcgggaagctgaagccttcgggcgacacgctgcccatgtatcactcggcgctggcgcgctccagagcggactggctggtggggatgaacctgagccgcctgttcaccctcctggggcgccgggccggctatgacggcgtgctgtcggtcggacgcgtgcagacccccacgctcagactggtggtcgatcgcgatcgtgaaatcgcggccttcgtctccgtcccgttctggtccatcgaagtggcgctgtcctgcacaggccagacattcaccgcgcagtggctgccgccatcggccagtaccgacgatgcaggccgttgcctgcaggagcctgttgcgcagcaggcggcgcagcgcatccgcgccgctggcgctgctcaggtgatttcggtcgagaccgaacgcatgcgcgaaggcgcgccattgccgtttgatctcggcaccttgcaggaagtgtgttccaagcagttcggcctcgatgtccaggagacgctagagatcgcccaatccctgtacgagacgcacaaggccaccacctatccacgcagcgactccggctatcttcccgaaagcatgcacgccgaagcgcccacggtgctcgacagtctgctcaagaccgatccgagcctgcgcccgatcatcgaccagctcgaccgcacccagcactcgcgcgcctggaacgacgccaaggtgtcggcccaccacggcatcatccccacgctcgaaccggtgaatctgtcggcgatgagcgaaagagaactggccgtctaccgcatgatccgcgcccactacctggcgcaatttctgccgccgcatgagttcgaccgcacgacggcaagactctcctgtggcgaccaggcactgcaggccgtgggcaagcaggtggtcgtgccgggttggcgcctggtgctggccgaaccacagccagacgatgccggcgatgacacagcaccccgcagccaggtgctgccagcgctacaccaagggctggcgtgccaggtggccggggtcgatctgaaggcgctcaagacgctgccgccgcgcccgtacacccaaggtgagttggtcaaagcgatgaaaagcgtcgccaaactggtgtcagacccacgcctgaaacagaaattgaaagacaccgtgggcatcggcaccgaagcgacccgcgccaatatcatcggcggcctgttgagccgtggctacctgatcaagaaaggacgggccatccgcgcctcggatgccgccttcacgctcatcgacaccgtgcccgccgcgatcgcagatcccggcacaaccgcggtgtgggaacaggcgctcgacatgatcgaaaccggacagctcgcgctcgataccttcatcgacaagcaggcggcctgggtcacgcagttgattgcgcagtaccgtggcacctcgctgtccatcaagattccccaggggccagcatgcccgcagtgtggcggtgccacgcgccagcgcagcggcaagagcggtccattctggtcctgcgcgaaataccccgactgcaagggaacgctgcccatcgaatcgggcaagcgtgccgcgccgcgcaagcgccgcggtggcccgaagacctcctga

SEQ ID NO: 361666 - DNA, 1578 bp, Pseudomonas aeruginosa
atgagaacccttcgtctcaagaccaaccagcacagcctcattgccaatctgcgccatgcgttcaaccagggctcgatgctgggcgaactgttacagaacgcccgccgcgcccaggccagcgcgatccacatcacggtgaaccaggacagcctgaccatcaccgacgatggcattggcattaccgacctgcagaccttgatcttcatcgccgaatccggctgggacaagcaactcaaggcgcgcgagaacgccttcggcctcggtgtgctctcgaccttgtactttgccgagacgctgacggtgcattcgcgcgacaagctgttcagcgcgcaaaccgccgagatcattgccggcaagccaatcaaggagatcatcgcagatttccacctggaaggcaccgccatccacctcgaaggtgtcaagccggtgcaggccggacaggatctgccgacctgggtggagcacgagcttcagcgcctgtgcgaagcctttccggtgccggtctggctcaacggcgtcgaagtgccgcgcccgctggcgaaacccgatcggcactggcgcgagacgcccatgggcaaggtcttgatcaatctgtccggtacgcgcacgcaatggcgctgcttcctccagggactgcccatcggaaggctacccacaagccaggatcgccagatcgtcctgctgcctgacaacacgctggcgaagctcccggatcgacagcacctgctgaacgagacggaagatcacccacgcatccaggctgctgtcgaccaggcctatcgcgaggcactgatcgagaagaagcaggcgctcgccgccagcgacttcattacgcactacgcgcatgtctgcctcaacgcgtcaaacgctgacctgctcaacgacgtaccctttgttcctctggcctggttccgggactgggacgaagagccggctggctatcggcagtactggcggcgttatttgggcggaaacggcgtgatcgcccgacaggccctggaagtgctgggggtctggcagatcgagaccgacgacgaaaccgcaccgaccgccgagatctatctggaagcggccaaggcgtttgtgctcgacgagcctggtctggatgatggccactggctcaagcatctggtcagagttgtcagccccgaacaggttcgcgtcagcaccggcgccaccttgcatcgggaagccgatcccggacttgccgactacgaagtggaactggaattggtcgacactctgcgtgtcgggctggagggccatcccggggcggtggagtatgcagtggaggccgtgcgcaaggagcacacgctctacctgaccccctcggcgggggccagaaccgggctggtgtccgactatgtgttcgacgatcgctacgatgaggatcgtgaggacgaggacgcacggcggatcgaaaccttcatcgccgtaggctgctcgccatcggccgatcgcgtagtccaggcgctgctgccgtatccgctgcgccacggcgtgcaacccaagctggctggcgccaccgtgcagctggtcttcgacgacaccggaaaattgcaggcggtcaccgcctga

SEQ ID NO: 361667 - DNA, 564 bp, Pseudomonas aeruginosa
atgaaaaccatcaccacccaagaccgcatcaccctgaaacacctcaaggtcgcggatttcgccagcgaagagaagttgtgcttcaacgccaccgtgctgttcgatggtgtcgccatcgccgaggctcgcaacgacgggcatggcggctccaccttcatccggtcacttgacggccaggctgcgaggttggccgaagccgaggccttcgccaggagcctgccccccgatacgctggagggcggcatctccggcgaggacgacgacccgcaggtcatcgacatcacactcgactacctaatcgatcatctggccgaggcacagcatgccgagcgcaagctgcgtaccgcctacgcccgcgacattgccaacaaggtgctgttcatcaagaacgggaagctcttgttcctgaaaggcatcaagctcaaggccatcgccgaccgcgccgggtacttcgcggcgctgcgcgcacggcaggacacccccatcgtcatcctcgccgagctgccgccggacgaggctttcgccttgtggaagcagcacgtcctgggcggcgaatcgtcctga

SEQ ID NO: 361668 - DNA, 213 bp, Pseudomonas aeruginosa
atgttccagcaaagcccattcggccatttggccctgatctacgcaggcaaacgcctgcccctcgaagtgcttcacagcgcggcaggccactacatcggcacgcgcgacatcgaaggcccggtgtcccgcgagtcgaccgagtacttccgcagttcggcggaagcccagcgagccctcgaccgaggtggctggacccagttgcccaccccttga

SEQ ID NO: 361669 - DNA, 393 bp, Pseudomonas aeruginosa
atgaatcagcttctaccaaccgacgtcgtcgatcagatcatgcgtgaaacgcgccatttcgagcgtgcgcccgaggcctttttcgaggcttggaaacgcggtgcggaaatcgccgggcccgagtggtttggcgatggcacccgcgaaggcctgcgccgtgccgccagcaagtgggacttgcgtccgaacctgctggaactcaacgacgccctgggcgttttgagcggcggacagcgcatgttcctgtccgcgatggtgagcttctacaactcgcgcgagggcgccgcgatgctcaagcgctgcggcttcgaggggctttccgacctcggtggcctggatctggagcggcgtcaggtgatcgccgatctggtactcaactacagcggctggtag

SEQ ID NO: 361670 - DNA, 462 bp, Pseudomonas aeruginosa
atgtcccgaaatccatcctttgccgtcgtcctcgaaggaggcctggtgcaggccatcgtcgtgcaggactggcccgatcatctcccgctgccgccattcgcggtagtggactacgacaccgaaggcgcggccgacgacgaaatcgtctgcttcgacatcggcaactccgaagccgaagccctgtgccgcagcaacacccccacggtgttcgagtccttgccggacgcgctgtcaccacgggttgtgcttgccgcactgggcgagcccgtcctggatgacgcacccgaaccgctggcgatcgcccgccgggtgcggcagaacgtcctcgatctggatgcccggatcaacaccagcgagcaggcaccgacgggcgacgactacaacgcgctctacgtcctggccaactgcggcctgatcgaactgctgaagtctctgggcgaccccaccgacttcggcgaatag

SEQ ID NO: 361671 - DNA, 663 bp, Pseudomonas aeruginosa
atggcaaacaactactacgacgccaccggcgtcctcgttctcgaccaagtcaccccggtgattaccgcgctgttcggcggtttgaagctggatgcctcataccccggcaacggcgaggtctacatcgcccagattgccgaagacagcggcgcgcattgggacgatgtctgcgaagacctcgttgcactggcccagtcgctggggctgtccgtgcccagcgagggccctcccacgatggacgacgttctggccgtgctttccaggcatttcggcaccgaccaggacgaagatctgcagcatctgatcgaacaccatcgtttcgaggatgactcggatctcgacgcgctgttcctgatcgccacgcgactcgacgatggtcacggcctcaaggagattcgcttcgagggttgctggtattgcagcaaaccacgcctcttcaacttcggcggtgacggttctttcatcagccgcgagttctcggtcttcggtgcctccggtcaggtgctcgatctcggcaaccgtatccggcaagcccttctgattcagaacctggaggctgctgccaatctgttcgcccgggaaacacaacgcctgctcgccggcatcaccgacgaaacgcagcgccggcaattgcaacaccgcctgtccgagctgttgagctga

SEQ ID NO: 361672 - DNA, 744 bp, Pseudomonas aeruginosa
atggaccattcatccaatcctttcgcccgcggctactacggtttcgagattcggcgccttgccgtcatcagctacgacgagcgccacccgcaaacctttctgccgctgcatccatcgcaggctcatctacccgatgaaaaggtggcgtaccaagcgtgcatcttcaacgatgatttcgtgctgatcaccgaaggccaaacggtgcccgccgaactcgatgccttgtgcggcggcagcggcgccgtgcaggccgtgtaccacagcatctatggccgaaccctcgatagaggcttcatccatgtgggcgacagctacacactggaatatgcccaagcggtggtgcgcaatctgcagttcgagacgggcttctacagccgtgcctgggagatcagcacggcccacatcaccgaagcatcgggccgctacctgtgcgaactggcggatatcgccacaccgagcgggttcctgttcgtcgcctttcgcatcccgtacagcccagccatcggcgtcaagctgatcgccacaccctggacggatgagaacctgatgcacgtcgaaggcatcaccgccgagcaactgcgccgggagcacctgtccaagggcatgcccgaggatctggccgacgtactggcgctggccggacaggctgacgtcagggtgctggtattcgatgctgatgccaacgagctggacggtctgaccgtcttcgaggaagaggacgacaccccctctgtggacacctga

SEQ ID NO: 361673 - DNA, 813 bp, Pseudomonas aeruginosa
atggaccatcaactcattcgtcaacaactcccgacgctggtttccggccatgtgccgtccaatgcccgcggcttcaagttcgtcatcttcgacggtgagcccaaggtatcgacgatgggcttccatatcgatcccaagccttttgaaggcaaggtcatcgcgagcacagacgaggccattgtcgtcaagaccggacgcacccagttcatggtgctcgaccggtcgcgcgtgaccgaggaacccgacgaaggtgccaaggtacaggtcgagccttatgccagacgccgcttcgacggcttgcgagcggatacccccgaggaacgcaccgagtacacccacgacggccagccctacaagctgcagacgttcgtgctcggttcggctccggcgaaactgccggtcccgcagccgcgctgcctggaactgcagcaactcatcgagcagttggaaacgctgccggcgcccgacggctaccggcgcatcacgcacctgttggtcgatgctggcgcgtgcgacttcacttgggtcgatccactgcccaaggacatcatcgccacgccgccggccatcagtttcaacgtggtcacggcgaagttccaggggcgcgtcaccgtgctgtacgaacgaggcgacgatctctatgcggtggaactgcaccgcgacggtgagctggtggagcgcgtggatgaggtgttcttcgatgacctcggcaacacgttggaacgcctgatcgacgatggcagttggcgccagattcgcgtcagcaccgtgcagaagcccgcacggcgcaagccgcgggcggtatccgcatga

SEQ ID NO: 361674 - DNA, 915 bp, Pseudomonas aeruginosa
atgaccaatacgacttccaacgcgaagagctacttcgatcttcacaccgagggctacgcccgcttgcagcgtgtccgggaggttcctgtccgtggtggccgccgtgcgcagccgttcctggcttgcactgtcgccgcactcgtcgggtccgccaaagaccccgtcacccgctacttcgacgtcaaagtctccggtgccgacgccaagaaattggtcgagagttacatcggcgtcgatgacccgaggcagcgtccgctggtcaagttccggatcggcgatctctggggcgatgccttcatgcgcaccagcggcgaccgcaagaatcagccggcggccagtctcaagggccgactgttgaaagccgaactgatcgatcgtgccgaactggcgcagatcgagcagtacgagctgatcacccggggtatcggttatctcaaccgtccgcgcgaggttacgccgaaggatggcgatccgttcctgtcgtgctccatcggggcgctggccggcccggtcgatgagccggattaccggtacatcaacaccatcgtcgccactgcggacgcccagcatctggtgcgccgctgcgtacaggccatcgaggccgagcgcaaggtgctgatcgccttccgtctcaacgacatgaaggccgatgcgtacctccgcaccaagggcgagcgtgccggcgaaccggcggcgagcctggaatccaagctgatccacatcggcctgatcaagatcgatggccagcaggtctttccggccgccgcaccggcgcccgtttccgaggacgctgcggcgaccgaggatgcggataccgccgatggcaccgtcgaggcgccgaccgccgagtccgttcaggacgaacccgtgccggcacccgaggccgaggaacccgcactcgcggcttccttctga

SEQ ID NO: 361675 - DNA, 828 bp, Pseudomonas aeruginosa
atgtctctcgcatcccgtttcgcaccgcgctcaccggtactgcgctcggaccgtcctctgttggacgaccagattcgcgccgtggtgccgtcgatctttgcggaaacaccgcacgaaagccgttcccagcggtacagctacatcccgacggccaccgtgctgtcggaacttcgtcaggagggattcctgcccttcatggtgtgccaaacacgtgtccgcaacgaggaccgccgcgagtacaccaaacacctgatccgccttcgccacgccagccagatcaatggcgacgaagccaacgagatcatcttgttgaactcgcacgatggcaccagcagctatcagatgctggcaggtcagtttcgattcgtctgccagaacgggctggtctgcggcgacacgttcgcggacatccgcgtgcctcacaagggcgatgtcgcgggccaggtcatcgaaggtgcctacgaagtcctgaaaggcttcgagcgggtgcaggaagcgcgcgagagcatgcgcgcgatcacgctggaggctggggaggacgacgttttcgcccgttcggccctggcgctcaagtacgacgatccggacaagcccgcgcctgtcacggagagtcagttgttggttcccagacgctgggacgatcgcaagagcgacctctggtcgatcttcaaccgcgtccaggaaaacctcgtcaagggagggctgaccggacgcactgcgaacggccgccgccagcgtacccgccctgtacagggtatcgatcagaacctgcgcctgaaccgcgccctctggatgctcgccgaaggcatgcgccagttgaagtcctga

SEQ ID NO: 361676 - DNA, 687 bp, Pseudomonas aeruginosa
atggctacagcagccgttcaatccgatccgcccctcatcgtccgcggccaactcgccatccgcaccatcccgggccgcaacggtcggttcacggtcggtcgcctcacgacccgccttggactgttccatgtgaaagacccggaactggagcagtaccccgaagggaagtacgacggtgagttcgtcatccgctacatctatccgaaggcctatccggttggcgatggcatgcgctttgaaatccgcgccaacctggacggcatgaccctgtcgggcatcgacaagctgagcaaggccgaggctcgcgccttcgccgcacaggacgtcgatccgctcgatgaagagctgggcacgccaccggcgacaacgccggcaacagccgagaaatccaagtcccggtccaagccggagcctgcgcccgtgcaggcatcgaaggacccgctggtcgataccacgccattcggcgtcgatacgccgtccgccaccgtggccgcttcggatagtcccgagagcgacgacgcggcgctgttcggcattctctggccgttggaagagtcggtgaaacttgactcgaccatcgatcgccgcaccctgcgtctgcagatcgcgcggctcaaccagttgggctatgccttcgacgccacggcccagcaatggaacctgcaactcgaaccgcaggctgcctga

SEQ ID NO: 361677 - DNA, 342 bp, Pseudomonas aeruginosa
atgagtcggcactacttcgacacatttcacaaaggattttccgtcaccgtactactcggctgggatcggccgatgaactacttcttcttggtcatcgagaagccaaccgagttgatcgacgacaccatgaaggtcgagagcgacgacttcttgtacagcaatctgcacgagagcgatccgttcaaccatgacctggactactaccgtgaggtcttgcgtcattttcagatccttgtgccggaaagcctgttcatcgagatccagcacgacgctgaaaggaatgtcggcaaccgcgtagtcaagcatcaggccgacggttcgttcaccgaacgtgaactctga

SEQ ID NO: 361678 - DNA, 657 bp, Pseudomonas aeruginosa
atgtctgcatcttcatccccacagctgctgtaccgcatcgacgaatgcggcgacgtgatggccgatgcctgcgtctgcggcgaagacggcgatctggtctttctgtcggtctgggcgcgggacaccgcgatccagcagtttctcgcccggctcaccttgggccgcgacgaggatggactggaccagttccatctcatcaccgaccagggcggctccgtgcccgtgttcgttccctcggtcgagcgtctggaaaagcgcttgacccgcagctatcgccgcaccctgttcgggtcgctcgtcaatctctggctgttcgatcggcgctgcatcctgccggacaaggccaccaccagcgcgctcgcactgttgccgcgcgcggcggccgatcctacgtcgcgcctctggctgctcgtcaaggagacgtgcccgctgcccttgctggatcactggcaagggacggtgctggcactgctgcgagaccgcgacatgctccgcgacctgccgacggccctcgggccgctgcgtggatttcgtctggggctggacgtgccagcgctcaccgaagcgctgggcagcctgatccgccagggcgtactgaccgcccatccgctcccgcagccggcgaccacccaacggtcgctggaagcggtggcctga

SEQ ID NO: 361679 - DNA, 1110 bp, Pseudomonas aeruginosa
atggcactcatgttcccgcggctcgcccgcaacttcatcaaggctggatattttccgaccgacgagcccacgctcgaaagagcgctcagcgcactggcgcccggcgacgggccgatgtgcattctcgatccttgtgcaggcgaaggcgtcgccatcgcggaggctgcgcatgccctcgggcgtgaccaggtcaccgcctatgcggtggagttcgacccggagcgcgccaaccatgcgcgtctgctcgtcgatcactgcatccagggcgacctcatggacaccttgatcgcacgccagagcttcggtttgctgtggctcaacccgccatacggggatctgtccaaggatgcgaacggcaacatcggctacgacggcaagggccgcgcacggctggaaaagctgttctatcagcgcacgctgcaactgctgcagtacgacggcatcttggttttcatcgtcccgcactacgtgcttgaccaggaactggtcggttggctcacgcggcactttgccgatctgcgcatctaccgagcggtggatacgcagttcaagcaggtggtcgtgttcggtcgccgggtccgccagcgcgagctggtgggcgatgaggtcaagaacgtccgtgctcgcctgttgcagatcgggcaaggcgacctggaagcggaggaactgccacccgcgtggccatcgcttccgtatgccgtccctgtcgcccagcacgagccggagcatttctaccgtctgagcatggagccggcgcagttcgccgacgaagtgcagcgcctgcatggcctgtggccgtcgttcgagacccatctgggcgccgcccagcagtccttgcgccgcccggcgcgcgcattgtcccagtggcacctggcactggccctcgcggccggcgcgatctccggtgtcgtgcagtcgaagaacggccgcaccctggccgtgaaaggcgacacctacaagcagaaggcgacgaccaccgaatatcgcgagcgcgatgacggttcaatcgcagagacacgcatcctcaccgacaagtttgtccccgtgattcgtgcctgggacttgtccccggactcggccaccctcggccggattctcaccatccactga

SEQ ID NO: 361680 - DNA, 321 bp, Pseudomonas aeruginosa
atgctttcgcgtttgttcgcgcggcgcgagccgcaagcccgtccgttgttcgccctcggttcgctgaggctgagcgagaaggtgcactggttggccagcaaaggcctcatcgatcccttgccttatgtgcagcgccatgtgcgaggcgattggggcgatgtcgacgagaccacccgccaggtcaatgatgtggcactcgaccaggacaatcccatgatctctcgctacaggatcacgccgcagctgctgctgatcgtgatgaccagcgaggatcaccgcaccaccgtggtccaactgcccgaagagcagtcctcgatctag

SEQ ID NO: 361681 - DNA, 309 bp, Pseudomonas aeruginosa
atggcaactgtaatgtccatcagcgcggcccccaatctgcgcttctcgccgggtgcgacggtcatgaccgtcggcgtggccaatctggtcgaacagggacggctcaacccgagcccgtaccttcgccgccacctcagcggcgactggggcgacctcgacgaggacgatcggcgatcgaacgatgccgcgcgggcatcgggcgaggcccggttgctctcttcgtaccaggtcgatcccgatctgaaactctggatcatcactgagtgggaccgcagcgtcacgacgctgttgttacccagcgagtattga

SEQ ID NO: 361682 - DNA, 1065 bp, Pseudomonas aeruginosa
atgaccatgcaactcgaagcggcccccgccgcaccttccatgcccgccacgggcgatctgttcaaccctgcggacagcgaaagcgatctgtctttcagcctgcaggatttcgtcaccgagtttggggatgagttactcgactccctcaaccgggccaacccgcccgtttacaacggtgtgccgcgcgccaaccgccagctcgtcctcgccagcctcaagcggcagctgttccccgcccaggccgaggtcgtccatgcggccgccgaactgctcgtcaatcagggcgagcgcgcggccatcgtcaatggcgagatggggacgggaaaaaccaccgtcggcatcgcgctaggggcggtgctcaacgcggaaggctatcgccgcacgctcgtcctcagcccgccccatctagtctacaaatggcggcgcgagatcctcgaaaccgtcgccggtgcgaaagtctgggtgctcaacggcccggacacattgctcaagttgatcaagctgcgcgagcagttgaacgtgccggccgaagggcaggagttcttcatcatcggcagggtcagaatgcggatgggattccactggaagcccgccttcgtccgcaaacgcacccgttacggcatggtcggcgcctgcccgcactgcgggacgatggtcactgatctcgacggcgagccggtcagtgctctggagctggaggcggaagaaacccgccgcaagtgccatgtctgcgacggcgcactctggacgctgatgcggccacgtagcctgtcgggcagtgatcagtcctcggcggtgctgcgtgcgctgaagagaatcccgaccatcggcgaggccacggccaacaagctgatgaagaccttcggcgattcgttcctggcgtcgatgctcggcgacaacctgcacaacttcatcaacctgatggacgagcgcggggagttggtgttttccgaccggcaggcgcagcgcatggaacgcgccatgtcctcaatggagttcggcttcggagaaggcggctatcagccctcggaatatgtgaagcgggtgcgacgtgaagtcgcctga

SEQ ID NO: 361683 - DNA, 2820 bp, Pseudomonas aeruginosa
atggtttctgataattttgccccgctgaagtctcgctggcccgagctgtatatgcacgcctcgcttgctgagcgctatgtgtttgccgacccgcacactgctgtcataaaactccgctgctttgcagaggttctggttggcgttctctacagagatttgagcctgcccagtgaaccgtccgatgggttcttcgagaagctcaaatatcctgcctttcaggaggtagttggcgacatcgtgctgcagaagctgcacgccctgcggatgatcggtaataaagccgcccatggcagtttaatcgacgccagcgtctcgcttgccctgattggggatgcgtatttgatcggccagtggttcttcaagacctacagcggtgagtctgccgacacctatccgcctttcacggctcctgtagaagtctcggagcagggcggccctgcagaagactctgccgagcagttggccttagcgaaagacgagttgagccgcctggaagctgcagagaaagactctcaggctgtagctgcgtcaataaccccaacacctgatcaggccaggcttgatgatttcaagtgcgcctcggctcatgccttgggtagcatcgatttcagcgccgcgaacacgcgccggcatctcagcattcacgatgcctttgccggttatacgctgaccagcggccagacggagctggtcaatcagctcgagcatttcctcgccagcaatacgcagaacgtcttcctcctcaagggctacgccggtaccggtaaaacctttatcaccaaggggctgaccgaatatttccgggcgattggccgcaactatgtactggctgcgccaaccggcaaggccgcgaaggtgatcgccagcaaaacccagtcgccggcttacaccctgcacaaaactctctatgcgtttgacgatatggacgagtaccgcgatgcagacaccgagggtaccgagaccttcaagttctacgccaagctggcggtgaacacgctttctgtggatacggtgtacatcgtggatgaggcgtccatggtggcggatatctaccaggaggcggagttcttccgcttcgggtctggctatctgcttgccgacctattcgagttcgtcaatctggaccataacgatcaccgcaagaaggtcatcttcatcggtgacgatgcgcagttgcctcccgtgggcatgagcttttcgccggcgctggatgcggagtatctgttgcgtcatcatcgcgtccgttgcagcgaatacgaactgtctgaggtggtgcggcagaaagcgcagagcggcattctggccaatgctcagcccctgcgacagtcactgcagagcaaggtgttcaaccgcctgaccatggaactctcctatccggacgttgagaaggtcgaatatcaggcgctgttgcagcgttatcttgactcctgtggcggcaagatcaacggcgagtccatcgtaattgctcactccaacgctgacgtgtgcgattacaaccggctaattcgtgaacacttcttccccggctgcgcgcaggtgatgccgggagacaaggtgatggctgtcgccaatagtaatgcgcacggattctttatctcgaacggtgatttcggcctgattcgtgaggtgctcggagaggttgaagagcacagcgtcaagctgaggcggagaaatcccgaaactgcagtggtcgaggaaattgttgtgccactgcgcttcagggacgtgctggcaggcttccgtgaccttgatggcacagcgcatttcttcccggccaagatcatcgaggatctgctttacagcaaggagccaacgctctcgtcagatgagagcaaggcgctctacctcgacttctgcatgcgccacaagcacttgccaaggcggactaaggccttcaaggacgccctgatggcggatccgtatttcaatgccttgaggctcaagttcggttacgccatcacctgccacaaggcgcagggcagtgaatggaaccatgtgtttgtgaaatgcaaaagccatcaaagccagctcacggctgactacttccgctggctctacacggcgattacgcgcacggcgcaccacctttatctgctcgatccgccgaaccaccagccgtggagtggtattcagatggtggccaatccggcgctggagatgcttggcgcggcgcccagcatgtccgcggctccggctccggctcccagcgttgcagcgccagcatttgcagcggttgcccctgcgccgcaggacgaaacattcggcatccccgccagtgcaacagtgctgctcgcgttgctggccgaggtacgtcggttaattgccgggcgggggatcagtatcgatgacgttctccatcaccagtaccaggaggtttatctcttcagccgtgatggggagtcttcccgtatagacattgcctataacggcaagagcaaagttaccggtgtagcggctccttatctttccgagttgagcggcgaactgagtgctgtgctggccgcgctcaagggcttgccgcttgcggatggggggacggcaggggttgccgatgttcatttcgccaagccgttcctcaatgagtttcacgccaaggtgctgaacctgtgtgcgggcagtggtatcacgcttcacaaggtggttgagcagctgtggtgccagcgctacagctttacccgcgatggtgctgtggccgtttatgacatctggtacaacggcaaagaccagttcacgaaatgccagcccgtggtcgcagcgtgctccccgggccccttgcccgctgaagtggggcagcttcttacggcaggtatgcaggcatga

SEQ ID NO: 361684 - DNA, 1908 bp, Pseudomonas aeruginosa
atgattagcaacaaggaggtttttgccaagcgcagggaaggggcgattgacgaagcctacaagatggcgcttgagttgatggctgcgccgcaggccgatgaatgggaccgcaaggcatttgcctggtgcttgatcgacctgatcaagcgtgacgtcaaggatgggcagttggggagcctgccgcactatcgcagtcagctggagagcattgttgtcgatcctgctgacgatgtgctgagtaaaggcgttcgccatacgctctcgatgtgcaatccctttggtcagcagatcagcgaggccaaggcactcagcaagagcgggcagcacgcgcaagcggctgcaatctaccgcaaggtatggatgaacggcgctgccgatcaggatatccagaccagtttcggctgggagctttaccagcacaccaaggcactgatggccggggaggacttcaacgttggtgaggccaagcgtaatttaagtgactacctcaagctggcgatcgaaaagccctcttcgctccactctcgcatactgcagttagccgccaagctggccgggcaggacaagctgaaaatgctggccttttcccgccattggaatcttcagcatctgcgcgaggaagactatgagcgctatcgcgccgaggatggcagggagtttccgtcactagctgagaaagtcatccagcaggctggcaaggaagcggctgctgccgatgatgcggacgggcaggcgtacatgctgcccttcattgatggtgctatggggcgcttttcggacaatgtatttctcaagctgaacaaggccaagctgctgctcgcgctgggccggcatgacgaggcgttggctttcgggattgcagtgaccaaggccaagtcaaacgactactgggcctggggactgctgggtgacattgtctcgcagaaggatccggacgctgcgttgggctgttactgcaaggcgctgacctgtccggcagaagacaagttcactgggaaaattcgcctggaagtcgccgagcgcatgctggaggccaacgactatgcagcagccaagcacgaagtcgaagccattattcgagccaaggagcaggagggttataagatcccagaggctgttgccagcattgccgcgcaggattggtttgccggggtgcaggccaaggcgtccaaccgtgactactacaggcttcatgcaaaagtggctgaggcgctgctgttcaatgacttgccctggattgatgcttgcctgggcgagatgttcgtcgtgccgggcaaagaggacaagccaaaacccaagcccaggcgcaagattttcctgaaaacggacgccatccccacggaggtagcgattcctgagtcaaaggtcgcacggatgagtctggcgaccggggatgccgtcagggtcaagggcgagtttgatgagaatcagcgcttcaacctgtttgtgctggagcgccgggctggcgctactgcgtgggatatcgcgcccgagcttttaggggttgtgaaccaggtgaatgaggacaaacaggtcattcgctacatcgttagccgggagattaatggcgagatcccgatgtcggcattgccgtgtgggtttgccgagggcgatgccatcgaagtgcagctggttcgctacgtttcgaagtgggggccccagtaccgagtgattgccgcgaaggcgagtgaaaaaataccgggcgatttgttgcgcaaggacttcaccgagccggttcgcatctccaacggcatgggctttaccccgagcgaaatctttattccgccgtcgctggtggagcgctgcgcgatcgaagacggtcagcaggtttctggtacggcggtacaggtctacaacaagaagcgtgaaagctggggttggaaggccgtatccattcaaccgctgtag

SEQ ID NO: 361685 - DNA, 183 bp, Pseudomonas aeruginosa
atgccgtttgatatctggctggcgctccacccagggatattcaatcagcacctgaagctctgtctgtttgcgcagcgcttcaagccactcatcaacaggctggttttctattcgcgcaataccgaccaggctctcaagatgagcaagcaagcgatcatcctgctcaatcgcttgaagaagtga

SEQ ID NO: 361686 - DNA, 3393 bp, Pseudomonas aeruginosa
atggaacttaaagactttcccatgctgtccgaggatgtgctgattctttccacggatgagcgcattgaccgctttcaaatcggccaggcgattttcatccaggcttatcaggatgaatggctggcagtgcagggcgacgaacgcgtcaaggtaagctgctcttccgccgatcaggatctttttagccggctggctctgcgagatcaggtgcgttggctactgaccagtaagcagggcagcaataggcttttgctgcagtactgtgcgccggttgaagtgtcttccatgcagctcgagattggggtcgatgagctgattgccgatgacctcttcagcaagcaggaaatcgcagataagaacatagacctggcttgccgctggttagccgatcagttccttgtacgtggtcttgaagaaggcgactggcttacagttgctagattcagcaatagcacctcaaaaggtggtttccagttgctgggcaagggctggcgtgcggatattgagcaactgcaagatcgtggtcttctgatcaaacgcattgcacgtcactcgcgtcgtgacggcgcctattcgttactgatcggtcagttcgagtttcgtgatgcctccgttgctgcagttctccaaagtgcaagccagcaagcattgctggaggctgccctgcgcgacagcgccagttatcttgagttgtggaatctctacaacgataaagaatggcagggcgcattaaagacggctgagaccttgcgcgcactgcgcttcgttcaatgggagggcgttgaagaagggcgtgagaatgtatggcggttgaccccgaaatcgctggatgactatagggcgtttcgtgagcgttggcgctcacttgaactgccatcaaacacacaagttgatctcggtgtggagcctccagattgggcggaggagcttgttacagaagaagcgaaggccgatcagaacactccgcgaggcagtatacgttttgagcgtgacgctattgttttcaagccggcttcaaccaggcccggagtccgtccaaaaaagccggaaggctggctctacctgtcactagctgggcaccgtactgttggtaaaagacgtcttgctgccaaacagtcgattgattcgggcaagcgcctgccacaactaaaatggttgctggaaggtgtaactgtgccagcttcaaggcgtcggacaatgaatgggttgacgccctatgcgctggaaaccttcaaaggcggaaagccgactgagaagcaggcgctggcgttggatgcagcactcaatactcctgatatcgccatcattattggtccgcccggaacagggaaaacgcaggtcatcgccgcacttcagcgtcgccttgcggaggaaacccaagatagaaatatcgctgcacaggttcttatcagcagtttccagcacgatgcagtagacaatgcgctggatcgtagcgatgtatttggcttgccgggtgctcgtgtgggcggcaagcgcggagcacaagatgaggtgtcggtaattgatccctggctggatcggcaaggcactcatttgcaggagaagatcgctgagcaatacagcaagtatcctgaactgcaacttatccgggacctgtcgacccgattagccctggccagaatggctggtatttcgccaagccatcaagcgcagaccttcaccggtattttgagtgcactgcgtgagctggatggtaacggtttgatcctgccgccaaagcttgaaacccgacttgaagactacatcgagcacttgcatagacagagcccggttgccaagacgaatggacaacaggttttcgctttgaggcgaatccgagcattgcgggtagaacgaaattctttcagcgacgacgggcctgatcgtgcctgggacttgctgagttggttgaagcgcgacatcgctgacgcgagcaccgactgccttgcgttgctgcaagaagcggcagacagctcgcagccctcggatgcgctgttgcatgacctagcggccttgaaagatacactgctcgatcagttcatgcccgattaccgaccggcgcaactcaggcagcaggcagaccctgaggccctcgctttactcgatgaaattgatcgctatgttgagcacaggctgcgccaacgaaagcagggcgtggcgtgggtactggaacaacttgctgacagcctggaaatggaccgaagggctgcgcaggcaattgtttatgagtattccatggtagtgggtgctacctgtcagcaggcagcaggcaaacagatggcaagccttaaggctctccctggtctggatagccctggtgtcgaattcgatactgtagtgatcgatgaggcggcccgagcgaaccctctagacctctttatccccatgtccatggccaaacgccgtgtggtgttggtcggggatgaccggcagttgccgcacatgcttgagccagacatcgaaggacagctacaagaagaacatctgctcaccgaactgcagttgatggcttttcgctccagtcttttcgaacgcatgcgggtcaagctgcaagacttggaaaaggtagacaacattcgccgtgtcgtaatgctggatacccagttccgtatgcatccattactcggtgagtttgtcagcaagcagttttatgaatcggttggcctgggccagattcacacccttcgctgtgccgatgaatttgcatttaccgaagcatttctcgccggtcttggtccgttggccgctgattatcgtgaccgaatttgccagtggattgatgtgcctgcatcgcaaggcaaagatcagcgcagtggtacaagccgagtcagagaggctgaggcgcaacgcatcgcggatgaggtggtcaggcttctgaaagcagggggcgacagcctttcgatcggcgttattaccttctatgcagcccagcgcgacttgatcatggaaaaactcgctgagcagcgtatcggcgataccccgctgatggagttccgcaatggggccttcgagccgcacgagcatttcaagtgggcaagaaaggtgcgtggggacggctcagaaagtatggaggaaagattacgggtcggatcggtcgacgccttccagggtaaagaatttgatgttgtgctcttgtcttgcgttcgtacctatacccccgcaaagcctctgcataacgccgacgataatgccgagcgtgaaaagcaactaaatcggcagtttggttttttacgcttacccaaccgaatgaacgtagccatgagtcgtcagcggcaaatgctgatttgcgtcggtgatgcggctttagccactgcacctgaggctagtgaagctataccagcgctggttgctttccatcagatgtgcggaggtgaacgtggccgcattcgttga

SEQ ID NO: 361687 - DNA, 1431 bp, Pseudomonas aeruginosa
atgaccgcgaccacaaaagcggcgggtaaccgcagcgtaaaggacaccgaaggctcagtttatgaattgcgtggagagctgagcaggggtgggcagggtatcgtttaccacactcagtatccccaagttttgatcaaaggctttaccaataaggatgcccatgcgcgcttgcgttggagccgccatattgcctggttgactcgcgcggagctcagcgggctgaaattggcgaggccgctaaagttgctggctgagccacgctgtggctatgtcatggagcttatggatgggttggtgccactgcagagtctgtttgacagcttcgtcgctgctgaagacgaggcatcagccgattacctgcgccaaggcggcttgcggcgtcgcatccgcattttgagccaacttgcccgcacactgaaccaactgcatgcccgtgggatgctttatggcgatctctctcccagcaatatctttgtgtcagatgatcctgaccatgcagaaacctggttgattgattgcgacaacatcagccttgagtctcacagtggtttgaccgtgcatacagcggactatggtgcgcccgaggtcgtccgtggcgatgcgcttctgtccagcctgacggacatttggagttttgcggtcatcgcctatcagttgctgactcataaccatccgtttaagggtgagatggtcagtgacggcgagcccgaggaagaagaagctgcgcttcgcggcgagcatccctggatcaatgacacgcaggacgatgccaatcagtgctttgccaacttgccgattcagttgcttgaacacagcaagctacccgagttgtttggccgttgttttgaagcgggcctgcgcaatcctgttgagcgtccaagcatggctgagtggcttgaggctttggcagagattgatgagcgcatttattgctgctcaggttgtggcggcaccactttgctcccagctgggcttggttcagctgaagatgctgagtgttttttctgcgacaagcctgttgatatccggctggtcttgcttgaagagttcatctccttgccggcagaagaagattctgcggaaggtgagaggtatgcaaccgggcgcaaggtctggcttcagcctggtgttgagattgagctgaagcgtctgatgccaacttataactatgaccaatggcctgcagatcatatccggatcgaatacaacgaaaagggtctggttattcatccgctagcaaaggaaaaacctcaacttcaactacagcgaggagaggccaaaaagcctttggagcgtcaacaagggttacccgaagctctgcgtgggcagcataaagagccgtatctgattcacgtgggtctgccggaaaaatccagccttggtgcaaccgagcttgggaagtcctatgtcatttggcagttcaggtggtga

SEQ ID NO: 361688 - DNA, 690 bp, Pseudomonas aeruginosa
atgcgcttgttggcaagcggggcttcggtgcggggccctgctcattttttggatggctcaccgaatcaggatgccctgtgcgtcagcggcctcacaggcgggtggtgcattgcagtggctgacggactgggcagccgcccgctgagccatctgggttcacgtaaagccgtgcaactgttcaggcagctcgcccgccaacagcgtggcatagcccatgagtcggtagcccataacctgcgtgatgcctggctggctcactttggtgagcgctatcggctgcatgaaacaacctgcctttgggccagggtaaacgatcaggggcacggcgtggcgggccaggttggcgatggcttattgctggtcagaagtcagggtgtattcagggtcgtaactgaagtgcggcgaggctttggcaatcagaccacgaccttggtgcaggctgcagaggccgactgcagcctaactttcgcgctgtgcctgcccggcgacggcgtgttgctgatgaccgatggcatctcggatgacctgattccggagcagctggaaccattcttcgatgcgatttatcaacgtcagctgagcagtagcaaacgccgcatgcgccagtggctgacccgggaattaaacgggtggtccactccacgtcatggcgatgacaagacaatcgctggaatattcagaacggattga

SEQ ID NO: 361689 - DNA, 864 bp, Pseudomonas aeruginosa
atgagcgatcacagcaaattactcgaagatgcactgaagcaagatggtcaaatcggtgctgattttatcgggaaaatattcagtcgggtcaatagcgttctaagttaccagccggtagtgggtgtttttggtaagaccggcgcgggcaagtccagtctgtgcaatgcggtattcggcaaagacgtgtgcgagatcagcgatattgccggctgcacgcgtaagccgcaggaagtcatcctcgatatcggtggtaaaggcattaaactgctggatgtgcccggcgttggtgaaagcaatgagcgggacaaggagtatgttgagctttaccgttctttactgcctgagcttgatctggtgctgtgggtaattaagggcgatgatcgggcgttctcatcagatgaaactttctataagaatctggttaggccttatattgataaagggcgtccatttattattgcgctcaatcaagtcgataagattgagccgtttcgcgagtgggatgaaagcgctcaaaagccaggggccaagcaggcagaaaatatcgaacaaaagcgtatgagtgtggcaaagatttttgatttgccctactcgtgcgtgatcccagtatcggccaatgaaaaatatgggcttgttcagctggttgaaaagattattgaggtcctgccggcggataagaaagcaattgttcttgattctgttaaagctgaaaatcgctctgaaaactcaaaaacagaggctaaggatggtttgattagcgagctgtttaatatagtgactgacattattcctgttgcgccgatcgcgaaggctgcagtaaaactggtaacaaaggtgttcagcaaaatattcagctggtggtaa

SEQ ID NO: 361690 - DNA, 1212 bp, Pseudomonas aeruginosa
gtgagttggccgcttgttactcttgccgatgttggtacttttagggctggctttggctttccaaataaatttcaaggaaagcagtcgggcgattacccctttgcaaaggtcggagacatatctgtcatagcgagagcaggggggaaatatatttcaaaagctgggaactacctagatgacgctgagttaaaggaagttaaggcaaagccggttccggctggagcgattgtttttgcaaaaattggtgaggcaattagtcagaatttcagagcaattacttctgttgagatgctgattgataataatgctatggccttggtgccggatttggataaggtggatacggactatctgtatcattttatgtgcaagctggacctgtacccatatgccggtgcaactacggttccatcactaaggaagtctgtacttgagggaattcaaatccccctcccacctctgcccgaacaaaagcgcatcgccgccatcctcgacaaggccgatgccatccgccgcaaacgccagcaagccatccagctcgccgacgacttcctccgcgccgtgtttctggacatgttcggcgacccggtgaccaatccgaaggggtgggacgtgaaaccgctatccgccggtataaggtcaatctcctcggggtggagtgcgtctggtgaaaaccgtccttgcagcgatggtgagaaaggcgtccttaaaattagtgcagttacaagtggcgttttcaagccagaagaaaataaaaccgtcccccttgaccagatccctgaggggaaaaagcttttattccccaaaagaggggatcttttgttcagtcgggcaaatacaagggagttagtggctgcaagttgtattgttatgactgatgtagaagatgtttttctgccagacaagctgtggttggttgaaaccgatcaaaaggaacttctgccggaattccttaactacctactttggcagccaagatttaaagaaaggttgacatctcaggctactggtacgagtggttcaatgttgaatatttcaaagtcgaaattcgaagagacagatgcgttttttccgaatatggagcttcaggaaaaattcaagcgtatttattgggctcttcaagaaactctcgacgcatctgcttcttcaagggaggcgggagacagtttatttgaatcgctaagccaaaaagccttttccggccagttgtag

SEQ ID NO: 361691 - DNA, 1086 bp, Pseudomonas aeruginosa
atggccccggtaaccctggcattggcggacgatgatcgtttcgaggcgagggtatgcgttaccggccagcatcgtgagatgcttgaccaagtcttgaatctcttcaagatcgtccctgacttcgatctcaatatcatgcgttcggggcaggatctgactgatgtaactgttgccattctgcaaggaatgaaagacgttttctctcagttcaagcccgatatcgttcttgtccatggcgatacagccacgacgttggctgctagccttgctgcttattatcatcagatcccggttgcccatgtcgaggcgggattgcggacagggaacatgtattctccgtggcctgaagagggcaatcggaaattaactggtgccttagcctgtcttcactttgctccaacggagacttctagggacaacttgcttagggaagggatatccgccgagcgaattcgtgtgaccggaaatactgttatcgatgccttgttaaatgttgtgcaacgcttggagcaagatatggagcttgccagcgaggcggcggctccgactgagtttcttgactcctcacgcaggttcattcttgtcactggccatcgccgtgaaagctttggcggaggtttcgaacgcatctgtcaagcactgggcgtggttgcaaggagtcacccagagatcgatattgtttatcccgttcatctgaatccgaatgtacgagagccggtcaatcgtctactttcagatgttcagaacattcatcttatagagccgttggactatctccctttcgttcatttgatgagccgtgctcatgttattctcaccgattccggtggtattcaggaggaagcgccttcgttaggtaagcccgttttggtcatgcgggagacgacggagcgcccggaggctgttgccgcaggaaccgtcaagttggtcgggacagaaatcaagaatatagttaatgagcttgagcgtttactggtagatgaatctgcctatcgaaaaatgagttttgcccataacccttacggtgatggaatggcgagtaagcgaatcattgacagcctcttggatgcgaagagaagcgagtaa

SEQ ID NO: 361692 - DNA, 7263 bp, Pseudomonas aeruginosa
atggcaggctccgataccttgaaaggcggcgcaggccgagactatctagagggaggttcggacaacgacaccctgataggggggagtgaaagcgacaccttgatcggggggcttggcaacgatcttcttgagggcggagagggcaatgaccttctggaaggtggcctcggtgacgacagctacgagtttagcggccagttcggtaccgataccgtcattgacctggatggaaaagggcgcctgcgcgtcgatggcctgattctggccggaggcacccggatctccaccgacacctatgccgacgaagagaccggctggacctattcgcgtgatggcgaagacctcgtgatcggcaaggcgctgtccggcaacacgatattggtcaagggatggaagcctggtgacctggggatcatgcttaaggatgctccagcgccgacgccggaggcgccggtgatcaacggtgacttcaagaagaaggtcgatggcagcggtacctcctatgtaatcgcggaaacggggtacgtttccgatggtgtcgaagcaggcgcccaggactatctactaggtactcaagccagcgaggtgctgaacggactgggtggcaatgatgccctactcggcggggaaggcgacgatacgctcgacggcggccagggcgatgacatgctgtggggcgggaagggcgaagatcacctgatcggcggcgatggagcggactatctgtttggcagtctggccggacacttgatcaccgtgagtcggaccgactttctgccgccagaggcgcaaggccccgaactggcgcgtggattcaactgggtcatctaccggaacggcagcagtatcacagtcaccggagacaatggaggagaccagagcagcgagatgctgatcgctctgcaggatgagcggaacattctggaggggggcaagggaaaggatcatatcgaggccggcactggcgacgacattgcccacggcaacgaggacaacgacgatatccaaggcatgggcggcaacgatctgctgttcggcgacgacggcgacgacctcctttatggagatggcgtcttggatagcaagttcttttcttataccccgctggaacgacatgggagcgacactctctacggaggaacggggcatgaccggatcgaaggacagggtggcaacgatttcgcggtaggcggatcgggcaacgacacactgtacggagacagcagcaactgggatgaggcgacgaaaggagcgactccggcagccctgagagggaatgacttccttgatggcggtcagggtaatgacctgctcgagggcggtggcggcaacgacaccctgctgggcggggaaggggccgacattctgtggggcgatgccgcactcagccgtctgggcgcgggcggccatggtgatgacgtcctggagggaggtagcggtgaggacacattgattggcggtgcaggcaaggatctgctgaggggcggcgatgatgctgacgtcctacatggcgatgacacccaggcgcctgccgaatcgcatggcaacgacacgttggatggcggcgcgggcaatgaccggctttggggggaagggggcgacgatgtgctgctcggcggggccggcaacgactggttggcaggagaggaccaactgtcctccgcagcgggctccacgttgacgggcaatgatctcctggatggcggtgaaggaaacgataccttgatcggaggcaatggccgcgacacgctgctcggaggcagtggtgacgattctcttgtgggtggtgccgaagacgatgtgctgtatggtggggcgggcgcggataccttgcagggaggcgccggcgatgaccgctacatcatcagcgcaggcgacttgcctgtcgccggcttggacgcgatcctcgattccgaaggtagcaacacgctggttgcactcggcgatctttcggtcgccaagactcagagttttgccggtgatgtgttcctgtccgagggtagtcaatccgaggggcggcgtctgctgatcaaggatggattacggggcagcatggcctacatcgagaaccgggagggcgtaaagaccactttcaagcagtgggtgcaggacaatttgcaacaatcgatccaggcaagcactaacggtatcgatgaaatcctgttcagtggtcgtggcgacgatgtactacgcgccgaacactcgcgcgtcacactcgatgccgggcgcggcaacgacaccatcgacttgagcatgaccggcgtttctggcgtgacggtgcaattcagttccggggatggtctcgacagcgttctcggcggcaattccgctgggagtttacccgcgcgccaggaaaacgtggcgcgcttcggcacagacatcgaagcgacgagcctgcgtctggttgcgacaccgggcgatgccctcaaggggaatctcttcatcgcctacggcagcggaaatgatcggatcaggatagatctggagcgcaggggcgaggatgttctccggcctttcgaccatttcgagttctccgatggtagccgcttgagttgggaagaactggccggtcgaggtgtgagttatgcgctgccggaaggaggaaatgttccagccataggaacattactcgacgatacgatcctggggagcaccggtcacgatacgctcgatggtggcgtggggagtgatcgcctggatggtcgtggcgggaatgatcttttgcgtggagggaacggtgcggacacctatgtctttgccggcggatatggcagggacaccatcgacaacgcagatacggatgcaccgggaaccgctgccgatacgatcctgctgggaggtacgttgcaagcctcgcaagtccagtttcgtcgtgtcggtattgatttgcagatcgtcatttccggtggcgaggacgtgctgacagtaacccgctattttgccgatgatgcacgcaccagcagtgccgtcgaatgggttcgcctggaggacggaacggaatgggacatcgaggcgatcaggcgcgaagtgacgcaaggcaccgacggccgagacgttctccatggatatgacagcgacgaccatcttcgcggtggcgctgaggatgaccagctctatggcggtggcggggcggatcgtctcgaaggtggcgagggcgatgaccggctcttcggcggcgacggtgacgacgtactgatcggcggcaccggcaacgactcccttgtcggtggtacgggaagcaatgtctatgaattcgcccgcggtttcggccgggatacgatcgccaacggaaattacactgagggcaagcaggatgttgtcaggttcctcgacatcgctcgcgaggatgtttcgctctcccgctccgacgacaaccttctgattcaggttggtcaggaagatgccgtcaccatcgaacatttcttcgaagaagacgctacctctggttaccaagtcgagcgcatagagttttccggcggaaagtcctggggactcgatgaaatcaaacgacgcgtgcaacagggcacggaaggccacgaccgcctatacggttatgcttctaacgacgtgctatccggcggagctggcgtggataggctgtacggccgtgccggcaatgatttcctcgacggtggcgagggtaatgactacctctacggtgacgaaggcaacgataccctggtcggtgggttggggggcgattggctgagcgggggagaaggcaacgatacctatcgtttctccaggggctttggcaacgacaacatcgaatccgccgcaacgcgggcgggcgaagtcgaccggatcgagttgctggacatactcccggacgaggtcatggtctggcgcacaggcaaggatctgaatcttcgggtaaccggactggacgggcgggacgacacgcttgctgtgcggtcgtacttcaaggaaagcgcaggttcggatggcacaaccgatatcgtcttcgcggacggaacgacctgggactatcggcagctccttgagctgatccggactgccacccccggcaacgacaccatgtacggagatatcgaggccgaccgcctcgacggtctggcgggcaacgattcgatcaatggcatgcaaggtcacgatacgttgctcggtggggatggggacgatacgttacagggtggtgagggcaacgacctgctcatcggaggaatgggtaacgatacgctcgtgggcgggagcgggagcaacgtctatcgattcgagcgcggcgatggtagcgatgaggtggcattttctgcggaggaaagtgcgtccgtcatcgaactcggcgggggtatcgctccaagcgatgtcagcctggccagggtgaaatcctatgccatagaccacctctacatcacggtaaaaaatcagcaaggcaagcaggtcaatctcattcgtatcagcgactatttttccaggactgcagtcgacaacatccgcttcgcggatggcacgatctgggatcgggcatacgtgttcgcccgcattctccagggtggcgctggaaatgactccctcacaggacatgagtccgatgaccgcctggacggccactcagggaaggacagcatcgccggtggtggtggcaacgacaccttggcaggtggcgacggcgacgattacctggagggcgatggcgcctacaccacccgacctggcaacgatgtactggagggtggctggggatacgatcgactcagcggaggagacggggacgacatctacctctacaacctgggcgacggcaaggatgtcattgtcgaaaacaacgatagccagaggggcggcaatgacgtcttgcgcctgggtccgggaatcacggaaagcgatctttccttccacgaagtgaagaaagaaggtgggctgatcatccgcaatgccgtggatggaggagagatcctcatccgaggctttttctggggcgacaactccacacgtatcgagcgtattgagttgagcgacggtacagcgctgggactgcaggatattctggctcgggtcgagcggggacaggccgacactcaggtcggaacgtccggggacgatgtattcgtggtcgatcatgaggacgacgtgatccaggagtccgtgaacggtggcatggacacggtgcttgccagccgcagttacatgttgccggccaatgtggaaaacctcaccttgactggcgggctcagtatcgatgctaccggcaacgtgctgggcaacatgctggtgggcaacgatggcgacaacgtgctgaagggcaaggagaagtggtcgggggcgcgagacacgggcatcgggggcaacggcaacgatacctacatcaatatcgagaacgtcatcgagcaagaggatggcggcatcgatacctggtatagcttcatcggcggacggctgccggaaaatgtcgagatctaccacctcggagatggctcgtcctcccactacatcaatgccatcgaggcttacggtaatgcgctggacaatatcctctataccagcaacaccgggagtggcatctacaacgacactctcgatggcgggctgggggcggataccatggtcgctctcggtcgcgactcagcggtgttctacgtcgacaacataaatgacgtggtggttgcttcggcattggggtcggactacgacgaggtacgtacagatctcgactatcagttgggcgatcatgtggaaaacctcgttttgctggggcagcaacgaaccaaaggcattggcaacgagctgaacaacacgctggatggcgcgcagaacaatgcggaaaacactctgcagggcggtttgggcaatgaccgttaccggatagacgcgcgcgacaaggtcatcgaactgggtggcgaaggcaacgacaccatcgagttctgggccgccagcgacgcaccatttgccctggctgactatgccaacgtagaaaatgccgtattgcagaaaggattccgagcggcaggcctgatcggtacggatgaagacaactggcttgacggcaatgaattcgacaatcgtctgatggggctggcaggtaacgatacgctgcgtggtgatcgaggcaacgacaccttgaacggtggcgtaggcaacgatcttctcatggggggagagggacgaaacacctatgagtggggaaggggatatgggcacgacacaatatctccagcagggactggcgacaccgttcaactggctaccgatgtatcggccgagcagctctggttctctcggcaagactccagtgatgatctactcgtgacccatctggacagcggagagaccttgactcttgagtactggtactccggcgcttccagcaatatcgaaaatatcgtcctggccaatggaaagacgcttgccccacagcaagtcgacgccttggtggcggggctcgcgactatcgcaacgaagcccatccccttttcccagcttggagacgaacagaagctgctgttctccacattgctatctgatgcctggcgggatcaggtcttgtacctggaaggcagcgatgtcgccgatcatcttgccggaaaggataacgacgataccctgcttggcggtctgggcaatgacactctggaaggaggtaggggagatgacatctaccgcctctatcgcgggactgggcgtgacacgattatcgattacgaccggaaggggtcggccaatcgcctggtgttcgccgacgatgtacgggaagagcaactgattgtactgcgtcagggtgatgacctgatcctgcgagtggacggcgaggtggaacctgtcatcgtcaagggacacttcgcggcagaacaatcggtaagtggaacaccctatgactggggcattgacttcatcgagctgagtggcaatgtcacgctggatcgtatggccatacaagcactggtcgaccgtgcatcgagcaatcatgcacccatcggccaagatatcactgaagtaattcgctcaaggggaggggacgccttccattatcagattccaacggaaaccttgcgcgacccggacaacggagatcgcctgacttaccgaatgacgttgaaggatggttcgacgctgccagagtggattcgtttcgatcccgaaacactgacgcttgctggccaaccagcgtccacagacaagggacggattgaactgcttttgacgggtacggacaggtatggcttgtctgcagaggccaaccttgccctagaggtctttgtccagaacagagcgccgagtctgatacagggcggttgcaggagctga

SEQ ID NO: 361693 - DNA, 744 bp, Pseudomonas aeruginosa
atgcttcttttcccgcgtgacgttccacgtcgacagacagatgacgatcaggaagcacagcgcagcacctttgaacggccagcgcttccagatcggcacaatgtcattagcggccagttcctggcctgcggccgaggaccgcgtatgcgacttccagaatccgtagaactgtttctgatactcccggatgcttgtattcacgacctcgccgcgcagaccgtcctggaccttgcggatatagcgatcattggtgccgaaagccgtggccttcttacagcgatacacgacctgaacaaggtcacgaattgcccggttgatcttgccgtaactctgagtgatcaacagcacatcggccagttcgtgacgatgaagcgaataccactcctcaaccggcacaggcgtgccgcgcagcggtatcgaaagatggcattcatcgatcacatacaacggcccgaagccttcatcgggatgccgccaagggtccgcataatgatcaacccggctaaacgggcgtactaccctactctcctcctccccattctcattgtcgaagacctcaacagtagagtcccgaagttcgatcagatgccaagactccgggaaaaacgctttgaacttgtccatatccaaggccaagttcgtgatgacctttcgcccttgattcaacgccggaacaacatgataaacaacagcctcatgagactttccgccaccaggctggcccaggatcaaattaatcattaa

SEQ ID NO: 361694 - DNA, 240 bp, Pseudomonas aeruginosa
atgaccttgattaacagccttcagggtgtgcgtctttcgccgagtgaacgccgctcgcttgagcttcgccagcgtgccatggcggcggtgaatcagtccgtgttgcaacagcaagttgtggccacgctccaggccctggagcagcacaaagagcagggcggcaagcctgagcgcgtctggaccactgtcaccaacgaaaagggcacgccgttcctgggcgacgtgttcgggtggccgtga

SEQ ID NO: 361695 - DNA, 357 bp, Pseudomonas aeruginosa; identical to SEQ ID NO: 324377

SEQ ID NO: 361696 - DNA, 351 bp, Pseudomonas aeruginosa
atgagtttcttcgaagacaacgtcgctgacgggtcgcattgcatgagctgctgccaatacatcggcgaagacgtcggctatccgagagcgtgccgtgaatgcggcggggagccaaccggcgccggtgtcggcggaaaggtgacgaagacgctgcgcatggtcatgttcaacgactggctgaagcagacaggcgtcgctcatacccgccacaacaacggctatcacgtagtcctgaccctgaaagacggtcgcaaggtcgacgtttggccaagcactaaaagatggcaactgcggggcggaaggatgagccgcgatggccatgctttgaaccgcctggtgcgcggccagtag

SEQ ID NO: 361697 - DNA, 936 bp, Pseudomonas aeruginosa
ttgccgattggttcacggcggccagtcagttcgaagtttccaaggccttcaccattgtcaacgcagtgcattgatttatcacagcacgttctcggcgccatttatctccccttgatccggccccatgccgggccccccaactctagccccaataacatcactgcgccatcacgcatggcgccgtgcgtcctcacgttcgcgaaaaggaacccgccgcatgacttccctcaagaagccctcctcgctcgacttcaaaacccagtacggcctggccctggacgacaccgacgacgcgatcatcgtcgacctgttcgccggcggcggcggtgccagcaccggtctggaaatgggccttggccgcaaggtcgacctggccatcaaccacaacccggcggcgatcagcatgcacgaggccaatcacccgcacgccgagcatctgccgaccgatgtctggggcatcgaccccatcgcgagcacgaagggcaagaccgtgggctggctgcacgcctcaccggactgccggcaccacagccaggccgccggcggccagccgcgcaagaaagagatccgcgacctgtcctgggttgttgtgaagtgggccggcaagctccagaagctcggccgcgggccctgggtgatcagcctggagaacgtgaagcagatcctgcagtggggcccgctgatcgccaagcgcgacaaagcgaccggccgtgtcgtgcgtctcgacggctccgttgcccagcctggcgagcgggtgccgcggcacgagcagttccttgtgcccgatccgaaacgcaagggccgcacctggcgtcagttcctgcgcgccctggaaggcttcggctaccacgtcgactattgggtcgagcgcaactgcgactacggcgacccgaccactcgccagcagcccaagcccgggcgcggccaagcgcgtag

SEQ ID NO: 361698 - DNA, 546 bp, Pseudomonas aeruginosa
atgagtgaggtgaagcggttcgaccatgtgaaccatgctcacattgatgactgtgaacatgttgagtccagcgaaggggcgtgggtggcggcctcagactacgacgccctagctgccaagctagccatggctgaggacgcagcagaaaagggagatgctgctcgccagcaatgcggcggaatggagatggagatcgaggaacttcgcgctgaactagcggaactgcgcgcaagggtggtggttgtgccggatgtgactggatattgggatgggctgtacccggctcagctgcgcgcaccacatggcggcccggtaggcttctacacgattccgatggtgcgcaccgacgaactggcgcgcctcaacggcaaggtggtgagcgaggggctgttgcgcgaggcaaggcgacatctcggaaactggctggaactccacgagtgcgagtgcgaaggcggctttcattactgcgggcgcgaacaggtggcgaagacccatcgggaacttcgctccctgctcgacgaggggaaggagaacggccatgcctga

SEQ ID NO: 361699 - DNA, 294 bp, Pseudomonas aeruginosa
atgaccgacattcgagaagagtttgaagcgtggcatctggccaagcatggctatatcacccggggaaacgaggacctgggcgaaggtgcctatgggcaaggccaatgctcgcagcgctgggaaacctggcaagccagccgcgcggctctgaaggtggagttgccggagcgtcgcgatccgttgaactcgaccggagacgatgagaatccaagatctgccggcttcaacgactgccttgagcgcgtgaccgaagccctccagcaagccggaatcgaggtgaagcagaatggatga

SEQ ID NO: 361700 - DNA, 273 bp, Pseudomonas aeruginosa
atgagcaacatccgcaacgtccagtggaacgaaggggctcctaaacaactggagccaggcatggtgatccgctcggcctcgtacgagggcgttttcctgattggcgccgtcgatgcagccggcgaaagttccctcgccactccattgacaagaaaggagcttgacgaagatcagcgatcggccgtgatcgcatgggcatggctgatcaagccccacgaactcgcctggctcgaagacatggcaagcaagcacaaagcgagggcgcggggatga

SEQ ID NO: 361701 - DNA, 396 bp, Pseudomonas aeruginosa
atgaacgagctgatgcctcttcacgatgaagaactgttcttccagatcgtccaatcaactcccgatctcatagaggctatggacatgtgccgtcgcggtgttcacgcagtgcgccgcgtccaactggtagccaaggcggatggtgacgcggaggttgatttcaactgcgctcgtactgtggagcggcttagaaacgagatcacctatatcggcatgatctacgaccaagtccagcttctccgggggatcaaggaagtactcggcattgacgctctgatagaggttgaggagtggtgcgctgagttcactgaaatgaagctcaaagaaggaatccagcgtgatgcagggaagaattctgcgaaaccactaagcagttattcaggggagcgcaaatga

SEQ ID NO: 361702 - DNA, 222 bp, Pseudomonas aeruginosa
atgctcccgagtaaaaccaccaacctgctggagtacgtgcaggaccaactgaacgagagaaagggtatctggagccagatcagcctttcctccggcgttccgtattcgacgattgcccacattgcccaaggggttaccgctaacccgcgggtgaagacgattcaggcgctgcttgagtacttccacgccaagccaatcaaacccgccaagaaagccgcataa

SEQ ID NO: 361703 - DNA, 666 bp, Pseudomonas aeruginosa
atggcggatagcaggaaaattctggcgaacaacctaaaatacctcatgaactgtagggatgatcttgacaaccaggggaagctttcgaagcggtcaggggttgctcaatccactatcagtaggattgtccgtggcgacagcgacacaggcgtcgacacactggatgctatcgctagggtgttcaaggttgactcgagcgatttggtcgatgccgggctgatcgacaagcttcagggacagaatacaaatatcaaagggacatccggcctgacggacccggtgcctcttatctcttgggtacaagccggaatgttcacagaagccattgacaacttcgccccaggcgacgctgaagagcttttgccatgcccgttccctcacagcgagagatcctttgcgctgcgcgtgcatggggagagcatgctgccagactacagggatggagaaatcatactcgtcgacccggacctggcctataagcatgggtctgatgtagttgttcgaactccagacggatcaaccaccttcaagagaatccagatcacccaggacggaacctatctgatggcgctaaacccttcttttccaagcagatacatagagattcctgaggacacaaggatctgcggggttgtcatcgcatcctggactgacagacgcatctga

SEQ ID NO: 361704 - DNA, 417 bp, Pseudomonas aeruginosa
atggagacacccactaccccccggagcaccctgaatcctccggtcttctatacctccgccgccctgatcctggccctggtgctgtttaccgtcctcctccaggaagaagcgcaatcgctgttcaaccacgtccagcaatggatcatcaccaacgccagctggttctacgtactggccgtggcgctgatcctgatcagcgtggtgttcctcgccgtcagccgctacggcgacatcaagctcggccccgaccacagtcgtcccgactaccgcaacaccacctggttcgccatgctgttctccgccggcatgggcatcggcctgatgttcttcggcgttgccgaaccggtgatgcactgtggggaggtgactgttttgacacatgccaaaagagggatggataggctagagcccctatag

SEQ ID NO: 361705 - DNA, 153 bp, Pseudomonas aeruginosa
atgccgaccaaactccgtgagcatcaactggaggggcatgcctgcggcctttgcagcaagaacaagcaatttgtcgtctacgttcatgtctctaacctctttgctgcgtgcatgcggcagcgttccgaatcgctgtcgtcatacaggcggtag

SEQ ID NO: 361706 - DNA, 1389 bp, Pseudomonas aeruginosa
atgaccaaagcaaatgaatgcacctgcccttccggagacggctccctccgccatccgtgcccggcacatccggcaccggtagagctggcgggcgtagctgccacgctgaccttcatcaacggaaggcccgccatgtgcgggtgccaggtggaatacagcagcggtggaggcgagtactccgacgtgatctacgtgacgctgtgtgccaagcactctggcagcgcgattctggacctggtggcgaccaaccgaatcgctctgacgccggagtacgaaggccagtggcacgcggacctctacctggatcgggagattcctcttgcgaaggccgagggcgcgactccggccgaggcggtgcttgccctcatgtcggcagagcgcatcgatcccgaacaggaatcggtagagcaggcaggcggggatgagcgcgacttgcagggcacgcagggggagcgggacggctggggcccgttcccgattgtccaggttccgtggaacgtattcgaccgagccgtcatgtgggttgaggatcgccggcgctatggcgatgacgggaccatcgtagacgactggaaagcgctgaagacgatccagcgcgccgccctggcgcaaccctctggcgaggttgttgtcaccaagaacgaatccggcaccatcgtatcggtaacccgccaggataaagaggggcgcgtgcttagcgtaatcgctgaatcgcaaccatccccggcgcaggccgagcaggcagaggcggagcggccggaggtggtggcgtggcgttacggcttcagcggcggaatcgtcagcgacaaggcatgtctcgatgaatggaaatccggcggcgaatatcaatcgctgatgaccgtcgcccagcatgagcgcatcgtcggggagctgcgggcggtgatcgcccaactccgccagcacaagaacgattacatggattccggccagcaaacttaccgagccttgcagaacgaaatccgggagcgggaagcggaaattgctcgtcttgatggtctggtttcgggccgcacggcagagcgcgacgccgccctggccagggtcgcggagctggacaagcagtgtcgcgatgacgtagcgcgtgcgctcggcttgcgcccgtcccaggagcgcggtttcgcatggtcctacctgctggcctcgatcaagtcatgcgtgaaggcgtccgaggataccgcccaggctcagcacagcgtgccggaggggtatgccctagttccgctggaaccgacagacgacatgttggtcgctgggcaagaggcatggacgcacaagatggaacggcgcggagcgctcgaagattgcgaagaggccggcgacgtataccgcgccatgctcgccgccgcgcccggcaaggagggggtgtga

SEQ ID NO: 361707 - DNA, 729 bp, Pseudomonas aeruginosa
gtgctgccgctgttccgggtcgcggcgctgctgatgaccatgccggtgatcggcacccagctggtgccggtgcgggtgcgcctctacctggcgctgggcgtctgcgtggtgctggtgccgaacctgccgccgatgccgcaggtggacgcgctgagcatgaaggccatgctgctgatcggcgagcagatcctggtcggcgccttgctcggcttttccctgcagttgctgttccacgccttcgtgatcgccgggcagatcatctcgatgcagatgggcctgggcttcgcttccatggtcgacccggccaacggcgtctcggtgccggtgctcggccagttcttcaccatgctggtgacgctgctgttcctggcgatgaacggccacctggtagtgttcgaggtgatcgccgagagcttcgtcaccctgccggtgggcgagggcctgagcggcaaccatttctggatcatcgccggcaagctcggctgggtgatgggcgcggcactgctgctggcgctgccggcgatcaccgcgctgctggtggtgaacctcgccttcggcgccatgacccgcgcggcgccgcaactgaacatcttctccatcggctttccgttgaccctggtgctgggcctggtgatcctctggatcggcaccgccgacctgctcagccagtaccaggtgctggccggcgaggccctgcaattcctccgtgaactggtgcgggcgaaatag

SEQ ID NO: 361708 - DNA, 618 bp, Pseudomonas aeruginosa
atgaacgacgtacatatccccgagggctaccggatggacgggcaaaagcgcctgatcccggaggccaccatcaagcccgttgacctggcccgcgaccagttggttatggagctggtgggcaaggccaaggcagtccagagcgagctggcccgcttcaaggcttccgcgttcggcgacatcgacgctttcgtcgatctgtcggtcgagcagtacggcaccaagcttggaggcaagaaagggaacgtctccctcctgagcttcgatggccgctacatgatcaagaaagcgatccaggaaaccatccagttcgacgagcgtatccaggccgcccgcgagctgatcgaggaatgccttcgcgactggacccagggcgccaggcccgaagtggtcaccctggtaaccaacgctttccgcactgacacgaagggcgaaatccgtaccgcccgagtgctcgccctgcgccgcctggacatccaagacgagcgctggctgcgagccatgaatgcgattggcgacgcctgccaggcggtgggttccaaggcctacatccgcgtctatgaacgggtcggcgacagcgaccagtaccagcagatcagcctcgatatggcgggggtgtga

SEQ ID NO: 361709 - DNA, 921 bp, Pseudomonas aeruginosa
atgtccttcgatctcgaaaccactgccgctgacgccgcgcccgtacagggcgaactgctcgacgcggaatcatcccctctgaccctgagccttcaggatttcgtcggcgagttcggcgacgaactgctcgacgccctcaacagcgccaacccgcctgtctataccggccaaccgcaggcgcaccggcagctcatcgtcgccagcctcaaacgcaagctgttcccggcccaggccgaagtcgtccacgccgccgccgagctgctgatcgaccgtggcgaacgcgccgcgatcgtcaatggcgagatgggctgtggtaagacgaccgttggcatcgccgcggccgccgtgctcaacgccgaaggctaccgccgcactctggtcctgtcgccaccgcacttggtttacaagtggcggcgggagatccaggagacggtggccggcgccaaggtatgggtgctcaatgggccggatacgctcgtcaagctcctcaagctgcgtgagcagttgggcgtgcagcccacgggccaggagttcttcgtcctggggcgcgtcaggatgcggatgggtttccactggaagcccgtcttcacccagcggcgcacccgccacggcgacgtggcggcctgcccggactgcggcacggtcatcaccgacctcgacggcgagccggtcaacccggtcgcgctcgaagccgaggagtaccgcaggaagtgcagccattgcgctgcgcccctgtggacgctgatccgcccgcgcagcctgtccggcagcgaccagtcctcggccgtcctcaaagccctgaagcgcatcccgaccatcggggaagtcactgcgcagaagctgatgcagaagttcggtgacggcttcctggcctcgatgctgggcgacaacatccacgaggtgcgacctgaagtcgcgtaa

SEQ ID NO: 361710 - DNA, 1491 bp, Pseudomonas aeruginosa
atgtcgcaagcgaatgagttgttgatcggcgctggccccgatggccagccggtagggcaggcctggcgcctggccaaccgtcatggattgatcgccggcgccaccggtaccggcaagacggtgaccttgcagcacctcgccgaatccttcagcgatgccggtgtcgcggtgttcgccgccgacatcaagggcgacctgtgcggcatcgccgcgccgggcaacccgcagggcaaggtcgccgaacgcatcgccagcatgccgtggctgaactaccagccgaaggcctacccgaccacgctctgggacatcgccgggaagaccggccacccgttgcgcaccaccatcagcgagatgggcccgctgctgctggccaacctcctggagttgaccgatagccagcaggccgcgctgttcgccgccttccaggtggccgaccgggaaggcctgctgctactcgacctgaaggacctgaaggcgctgctcaaccacctgaaggacaatccggagatcctcggcgaggaccgggcgctgttcaccggcgcttccgggcaggcgctgctgcgccgcctggccactctggagcagcagggcgccgaggccttcttcggcgagcctgccctgcaactggaagacatcctccgccccgagccggacgggcgcgggcgcatccacctgctcgacgccagccgcctggtgcacgaggcgccgaaggtctacgcgactttcctgctctggctgctggccgagctgttcgagcaactgccggagcgcggcgatgccgacaagccggtgctggcactgttcttcgacgaggcccacctgctgttcaacggcacgccgaaagccttgcgcgaccgcctggaacaggtggtccggctgatccgctcgaaaggcgtcggggtgtacttcgtcacccagtcgccgggcgacctgccggacgatgtcctggcccagctcggcctgcgtatccagcatggcctgcgcgccttcaccgccaaggaacagaaatcgctgcgcgcggtggccgacggtttccgcccgaacccggcgttcgacaccctgggggtgctgaccgaactgggtatcggcgaggcgctggtcggcaccctggaggaaaagggcacgccggccatggtccagcgcgtcgcggtggcgccgccctattcgcggattggcccgctgagcgacagcgaacgcgccgaactggtccagcggtcgccgttgaaggggcgctacgaccagccgatcgatcgcgagtcggcctacgaggtgctggcgagcaaggcggacgccaagcccgaggtgcagggccaggcgcctgcacagcaggaaagcgcgtccggcgtcggcggcatggccgggcagattctcggcagcctgctgtccaattcgacggtgaagagcgccatgcgccaggcggccaaccagttgagccgggagctggtgcgtggcctgctcggctcgttgatgggcgggaagaagcggcgctga

SEQ ID NO: 361711 - DNA, 384 bp, Pseudomonas aeruginosa
atgaccaccgccaccatcaccgcacacggcttcaccggcttcctcggcaaaggcctatccctgcgtgagcttcagtgcgtcctgggcatcgcggctggtcgtaccagcaaggagctggcccgcgacctgggcatgcagccgggcacggtgggtaagcgcgttctggcagcgaccaccaaactcggagtcacccgccgtgccgccctggtggccgaggctatgcgccgcgggcttatctcgcccgccgtaatcgccctcgccttcctcgtcgccggtcagccactgctcaacgatgaccacatgatgcgcagccgccgtggcggcgaaaggaagatcgaaactcgcctgactgctcgccgcgatggcgtggcctgggtggcgtga

SEQ ID NO: 361712 - DNA, 705 bp, Pseudomonas aeruginosa; identical to SEQ ID NO: 8686

SEQ ID NO: 361713 - DNA, 1533 bp, Pseudomonas aeruginosa
atgaccttcatgaccaatgactacctggagtattacctcaccctcctcggttggatcatcaacaacgggatctggaacatgatctcggatacagggctgttcgcggtgcccttcgtggccattgtgatgcgtgagtggctgaaagttcgcggggaaggtgccgacgagggcaacaaaggcgtgctgtctctggcccgcatcgagacgcatatctacgtcggctacatcgtcgtcgccctggcgggaatcccggtcgtcaacgtgagcttcgacaccatcgagttcgaccaggcccgcgcccagcagtgccagtacaacctgccggcaccggcagacaccggctggtcgacctccttcagtagtctggccggcaagagcgcacagatgccgctctggtgggcgatgatgcacgctctgtccaagggcttcaccgccggcgcggtcgcggccattccgtgcggcacggatctgcggcagatgcgaatggaagtggacaacacgcgcgtgaacaacccgctgctggcacaggaaatcgccgacttctccaaggactgctatggcccttcccgcgcacggctgttcatgcggcaacccgatctgggctccgtcgccgaggacaacaaggcgctgcaggacctgaactggatcggctcccgattcctgttgaacaccccagggtactacgacaccgactactccaagactccacggcaatcgtggccctacaacgccacccgcgacgccgggctgccccaggtgggcggtggtggtggctaccctacctgcaagcagtggtgggctgactcagggatcggtttgcgtgatcggatcaaggaccaggtggatccggacctgatgaccagcttcctcaagtgggcgaaatggctgaaccaggacgaggtgagcgaggcagtcattcgccaggtgatatccccctccagccaggttaagggcaacgtctacagcgattatggcgggcaggtgggcggtaccgtctggaatggactttcgagaacagccggcacctttggcgtggccctggggagcctggcctacttcccggcgatggacatggtccgccaggcgctgccgatggtgatgtcgttcctgaagatggccatgatcatctgcattccgatggtcctggtcatcggcacctatcaactgaaagttgccatgacgatgacggtcgtattctttgcgatgatgttcgtcgacttttggttccaactggccagatatatcgatagcacgatacttgatgctttctatggttcggggtcaccgcatctttcgttcgatccagtcatggggctcaatacggcgactcaagatgcaatcttgaacttcgtgatgggctctatgttcttgattcttcctgcactctggatcactgccatcggctgggcaggtcttcagattggaacggtgctcagtgggctcgagacaggagttaaaagggtagatgcagccgcagcccaaggtggaggtctagctaaacaaggaattagttctttccagtcaaaagactaa

SEQ ID NO: 361714 - DNA, 561 bp, Pseudomonas aeruginosa; identical to SEQ ID NO: 328154

SEQ ID NO: 361715 - DNA, 834 bp, Pseudomonas aeruginosa
atgctgatccgtggaatgctcggcctcggcgactcgatctattccagggcattcctgaggaagtacccaggcgcattcctcgaaacaccctggccagagctttacctcgacctcgacgtgaagtgcgttcgcccggcgacgcagttgagaacccaggccaagaacatccagcgcgagcacgactggcaccgccctgtcggcggcggccaaatgcgcatcgcctacggccgagacccgatcattcaggggctgcgcaaggcgttccgttgcgaacccggcgagttcgacctgccggactttggtcctccgccagtcgatgggcgctatgtgctggttcgcccagccacggttcgcgctgagtggcgcgcagacacgcgcaacccactgcccgagtacatcgccagcgctgcctcagagatgcgccgcaggggctggaaagtggtttccgtggcagacctggagccgggcaaggaatgggcgcttgatccactcccgccggcagacatccagttccacaagggcgaactgccggttgaacaactgctggcgctgctccagcacgcagatgccgtgattggcggcatcggctggatcgttccggccagcatcgccgccaaggtgccggcctggatcatctgcggcggccagggcggctacaactcgccggaacacatcaccgacaagtgcatggacctgtcccgcatcaccttcgcggtccccgacaggttctgccgctgcaccctcaaagaacacaactgcgacaagagaatcaccgactacgaaagaaaattttcgaagtgggctgacgcacttcaaatcgagatgacaccatga

SEQ ID NO: 361716 - DNA, 318 bp, Pseudomonas aeruginosa; identical to SEQ ID NO: 337711

SEQ ID NO: 361717 - DNA, 210 bp, Pseudomonas aeruginosa; identical to SEQ ID NO: 340416

SEQ ID NO: 361718 - DNA, 480 bp, Pseudomonas aeruginosa
atggccaagaaagacatcggcaagttcaccggcgaggcggtcaccttccagatccccaatccggctggcggggtgaagatggagacgttcattccgtggacgttggtcaagcgcggcgtgcgccgcaagatcattacaccgctcgacacgccacaggcgttcgcggatgagtctgcgcaggaacgcgaggcacgcgcagcggcgcaggacagcgccttggtgcgggcgctggggatggcgcaccactggcaacgcctgctcgacgacgggcggttcacctcgatgaccgagatcgcgcaggccgaaggactcaaccccgggcgggccagcacgattgcgcggctggtgcatctggctccggacgtcgtcgaggcctgcctgagcgacgacagcggaatagccctggagcacctgatccgcaacggcagcctgccgctggactggcagcagcagcgcaggatgatccaggccagaagctga

SEQ ID NO: 361719 - DNA, 369 bp, Pseudomonas aeruginosa
atgaacgactccggcaccctagaaaccttcgtgccgctggtgttcaagcgccggggtatccggcgtctggccgacaccggcgcggtggcacatgatccgacgatcatcgaggcggtggcgcgggcgttccactggcagcacctgctggacgctggcgagtttgaaagcggcgcggccattgcccgtgccgaggggctgcaccccagcaccgtcaatgaactgctgcgcctgaccctgctggccccggacatcgtcgagcaactgctcgcaggtcgccagccccgacgcctcacgctgatctggtttcagcgcaaccccattccggtcgactggcagcagcagcgccagatcatccagtcctttgagtag

SEQ ID NO: 361720 - DNA, 1371 bp, Pseudomonas aeruginosa
atgaacgacgtgccccacaacaagccgcgccagcgttgcgcggtctactgccgggtgtcctcggacgagcggctcgatcaggaattcaactccatcgacgcccagaaggaagcgggccacgcctacgtcgccagccagcgcgccgagggctggattccggtggccgacgactacgacgaccccggcttctccggtggcaacaccgagcgtccgggtttgaagcacctgatggcggacatcgagcgcggcctgatcgacatcgtggtggtctacaagatcgaccgcctgacccgcagcctcgccgacttctccaagatggtcgaggtgttcgagcgccacgacgtgtccttcgtgtcggtcacccagcagttcaacaccaccacgtcgatgggacggctgatgctcaacgtcctgctgtccttcgcccagttcgagcgcgaggtgaccggcgagcgcatccgcgacaagatcgccgccgccaagcgcaaagggatgtggatgggcggcgtcccgccactgggctacgacgtcgagaaccgcctgctggtcatcaacgacaccgaggcggcagtggtgcggcgcatcttccaggagatgctgaccatcggctcgccgacgcagatcgccgccaacctgaccgccgaaggcatcaccaccaaggcctggacgacgcaggaaggtatcacccgcgcaggcacgcgcatcgacaagaagtacctgcacaagctgctgcgcaaccgcatctaccttggcgaactgtcgcacaagggcacgtggtaccccggcgcacacccggccatcatcgaccacggtctgtggggcaaggtgcatgaactgctggccaaggacggccacgcccggtcggtagaaaccaagattcgctcgcgcaccgatgccttgctgcgcggactgctgtatgcgccgaccggcgagcggatgtacccgacctactcacgcaagaacgggcgcaagtaccgctactacgtgtcgaagtcggaagtgcgctacggggctggcggcaaaagctacgagcgcattccggctgacgaggtggagtctgcggccatcgcgcaaatcaaatcggtgctggccagccccgaggcgatcacggcggtctgccagttcatccagcgcaacggcgcgcagatcaccgaggacatggcggtgatggcgatgcaccgcttgggcgatgtgtgggagcggctgtatccggcagagcgccaccgcatcgtcaacctgatggtcgagcgcgtggatctcgtccccggtggcctgaaagtgagctggcgcgagctgggctggaaggcgctgatcggtgagtttgccccggacagcatcggcgcagaactggtcgagatggaggcgcaatga

SEQ ID NO: 361721 - DNA, 456 bp, Pseudomonas aeruginosa
atgaacgaccaacacacatcggtggccgcgcaggtggcggctttgccatccttggcgatggccgaggtctgggcgctttgggatcgatttttcccgcgccgcccggacaagaccaatcgcgtctatctggaatcccgcatcgcctacaagttgcaggaagaagccttcggcggactcgatcccgacacccgcaggcggctggccaacatcggcgtgcgccattcgaagatcaagcagccgcgcaaggcccgggacatcacgctggccccgggcaccgtgctggtacgcgaatggggcgaccgggatcaccacgtccgggtcactgctgacggcaccttcgactacgagggcaagcagttcagaagtctgtctgccgtcgcgcgccacatcgcaggcaccccgtggtcggggccattgttcttcggcctgcgccgcgctggggagggttacgaatga

SEQ ID NO: 361722 - DNA, 816 bp, Pseudomonas aeruginosa
atgccggttctgaccctcgactaccggcattgcgaccgcaagcgccccaaatacgtcaaacacatcgaaattgaaggcatcgccgcgctggcccgccatcaactggtcggctcgggcgtcgatgccatccccttcgacgcattgcgtgagatcaaccgtctgaagatcaacggcatcgacttctcacttgaagtcagcacggattgcgaagtgcatgacgacgagggccgtcacgtctttggcatctgcgagtacgaccccggtgttccggataccgcgatggtgtgcgtttctcctgtcggcgaaaaactcagcgaactgctggcgctcagtaccctggcccacgaactgggccacgcggtgttcgatgcgccaggctggatcgtcgatggcagcagagggccaggattgttcgatgccctggagccagctgcgcagcgcgcttatcgcaccaccacgccggacagcgaccacttggcgaaatcacccacagccccggcgcaggcggcactggccacggagattcacttcgccgagctgcgcgccaacgagttcatgggttcgctgctggtgccgcgccaacatttgaacgcggcagttgaggagcttgctccgcacttcaacattgcgctgcaccgtggcccatccctcgatccggagattcccggcaccagcctgcatctctcgtctggcgacacaagcgatctggagttcttcgagaaggcgctcgccgcccgctttggcgtcaaccggcgctttgtgcaagtgcgtctgcaacgctacggcctgatccgaccggagggtgccgtgcgctga

SEQ ID NO: 361723 - DNA, 1422 bp, Pseudomonas aeruginosa
atgcctaccggtcacaccaccgcccagcagaagaaagtggtcaacccgaagccgtccagcaagcgtgcgcgcgaacagcggtctgatgacggccccgtcatcctgcccgggatggaacatttcgtcgatctggtgcgcaaggtcaagcgtccggcgctggtggtgcgcctgcttgaacgcgccagcggcggcacattgtcagagttgctggcgctggccgactctgccaagggcaagttgcctgtcgaatcacggcaagcattctttcactgcgccgccaaactggatgccgccattcggcaacgtatcgaagatgcagtggaacgggtcatgctgctcggcgatgactatggtgcgcaggccgttcaatcgctactcgacgaacggcgcgacgatgatgccgccgttcttgaaatgcctagcgaccgtttcagtcgcgcgctgcacctgtgcatccttcaggaatttcccgaggccggagcacgccgtgaagttcgctttgatcaggctgagcatgaacaggtgatgcatcgccagtggaaaagcgagcacttctccagccactaccttggccccaagggggtgaagccaaagaatgacggcgacgtccaggaaacgctgcgcacacggatcgccgaactgttcccgcacgtgccgaaggatcaaatcctgatcgaacagtttgtgcgacacggcctgtcgcacgcacagcgcgacgatgatgacgatgcagagggggaaccactgaccctgctgcacaccgtatgcgccaccttcaatggctcaactgcacattaccggcaagttgaagatggtcatgtggtcgaccacgaagagccagcggccatgtcggcgcatttctcatgggaaccggccaccggcgcgttgaccgtgttctgcgaaaaccgcgaagcgcggcgtgaactcgccaccatcttccgagacgtggtgctggcgcacgaaggggcgattgatgacatgccgattcgccagttcgatctgttcgggttctccacctcggccatgctcaaacgactggaacaggaccgcatcgcagatatcgagcgcgtcgaaatcttgcagatcaaagtggccaaaccttttgaacagccgctggagttgggcggaaagtcggtcgtccgccaactggcgagcaagatggaaatcacccgcgaccggcgcgacggccgcaacatctatcaggtcgcctacgaggattacagcgctgaggatctgacccagtacgcactggcgcaggtcaagttggtgatgcgcatggccaagcagccccaccgcaaggcgcacaacgttgccgtgcagatcaccgcccccaacggcctgaacgacaagagcaaaaccgaagatgaccgcaagcgcgtgctggagcaactgatccgtatcggcgtattgagcgaattctga

SEQ ID NO: 361724 - DNA, 930 bp, Pseudomonas aeruginosa
atgtcgattcacctgcgcttcctcgctgccatcgacaggctgcaacgcctcgatacgcctgtgctggcagccacactcgaccgtgattggctgcagttccggcaacgaggctggattaccgaggaaggccatctgacgcatgtaatggtgccgttcctcgattccgaatgcgaggttgaagtcgaaaccgatccggatgcgggctgctatcgctaccgcagtccacagaacggcagaaccgtcgtacagccactgcgggacatcgcgctgtgtggcattcagatcaatccgtggctgtcggatctggcttcactgatcggcattgaggatcgacggcgatcacaccgcccctgccgaacaccgaatcatctctggcatctgggcgaactacgcatcaccggaacgcatgactttgtgccggtgttcgtaggccgggcatggaagcgtgcgccaagcgccgatacctctgcggtgctggccgacccggcgtggctgcgcggcggcgtggtgttgctggcacaacgatcagatgcagccttgcctcgagaccatgcattgcgcggactggatgagttcatccatacctcgaatggcatggaaagcttcgacgtcgatgctcttgatcgggtgctgcgtggctatgtcacggccgatggtgagcctgaaccattgcaattcttccaaggcgaccgcttgaagttgccgcacttcgatcggtcgcgcgaactgtctgcggaacgggccaagatcatcaagcagatgtggggcgtggaaggcaaaccctcaccagaaatgtcgtgggcagaggccaacagaattccgaacactggctaccagtcgttcgatgacgccttcggcggtaaggcagaacgtgaggatgtaatcgccaaagtttcccgtgggaaataccgggtgagacgcaacccataa

SEQ ID NO: 361725 - DNA, 738 bp, Pseudomonas aeruginosa
atgctggatttcaattcatcttcaagcctctctgatcgtgtcgcggtgctggtggacatcggcatgcagcgcgtgcgcgaacagcagacggctcgcgattacctcggcgcatcgcgtcttggcgtggcatgcgagcgcgcgctgcagttcgagtacgccaaagcgccggtcgatcacgggcgcgacacgcaggggcggatgctgcgcattttcgagcgcggccacgtcatggaggactgcatggtggcgtggctgcgcggcgcgggtttcgatctgcgcacgcagaaacccgacggcggccagttcggcttctccgatgcacacggtcgtctgcgtggtcacgtcgatggcgtgatcgtcggcgggcctgaaggtttccgctatcccgcgctgtgggagaacaagtgcctcggcgcgaagtcgtggcgcgacgtggaatcgaaaggtctggccgtcagtaagccggtctatgccgcgcaaatcgcgctgtatcaggcgcacctgcaactgcacgagtgcccagcgctgttcaccgcgatcaacgccgacacgatggagatctacgtcgaactcgtgcaattcgatcccgcgctggcgcagcgcatgaccgaccgcgcggtgaaagtcatcaccgcgaccgatgccggtgaattgctgccgcgcgccttcaacgaagccactcacttcgaatgccggttctgcgcatggcaagaccgctgctggaggacgcaagcatga

SEQ ID NO: 361726 - DNA, 246 bp, Pseudomonas aeruginosa
atgactgacaacaacattccggcgaatgccatcgaacccatgatcgacgccaagcaggccgctgccgcgctgcgcttgccgtactactggttcgccgatcacgcgatgcgcagcaagtaccgcatcccgcattacctcatgggtggtctggtgcgttatcgcctgtccgaactgtccgagtgggccgcacgcagctctgccgtgcaagggcgaaacgatgacgccgatggcgtggaggtcaaatga

SEQ ID NO: 361727 - DNA, 207 bp, Pseudomonas aeruginosa
atgagccagatcgacaccatcctcagcctgatcgcccagaagcatctgggcctcgacaccctgaaaacccgccacgccgacagcctggacttccacgacacggcggtgtggtgcatccggggcgcgctggaagcagccttcagggcaggcgttgaactgggcgcggcgatgccgaaggccacggaagcagaagtcgccaagcgctga

SEQ ID NO: 361728 - DNA, 267 bp, Pseudomonas aeruginosa
atggacatcagcaacctcgacaccctggccaaaaaactcgccgatgccgcactgaccgtgctggtgcgcacctgccgtgaggaggtggccaacgcaagccgcgatgaactggaaacagcctgcgccgcgatgcgcgccaaaagcgccagggtgatcgaccagatgctcgacgacgttcgcatcgcgccatgggccgcagaaaacgctttccgctgcgctgcgcttgatctggcacaggttggcattgccaccttgcgcaagaactga

SEQ ID NO: 361729 - DNA, 3036 bp, Pseudomonas aeruginosa
atgcaaaaaacaacaatcactctcacgcccttggccctgaaagatgcgcccgcgctgatcgaaacagttttccccgcccagaaagtgtcgtttgaggcacagcaggagcggacttcggtgcaaagccagacgttgactggcctgggttcgtattggaaaggccgtaagccgctgattctggtgcgtgccattgtgttggccagcctgctgccgccctctgacgatgcggaagcagacctcgccctttttgaaaaactcatggccttcgacgacgagggcttggcgcgccgtgcgttgatcggcaacgccgtatcgccagccgagattgccgcgcgaatccaactcgaaaatccgtgggactactttaaggccacgctcaggcgaggtgatgtcacaggtggagatgttcgctggatgcgctttccacttgacgcggatgcagaaggcatctctctgcgctggcagcgcagcctgagtgacgacgagaagctggtgatctatcgcaagttgctggccacctgtgctagctacgaggaaaaagccagtctcggcaagcgtccggaagagttggatcaggaatggctgtatgccccagtttgggcagaggtcaatcgccactacgcccatttgggcgtgaacgtgaaatctatctcagagctggtggagcaactgggcatcctgcgctacggccatcgtccgcgcgtgggcgacaccttctcgggtggtggctccatcccgttcgaggctgcgcgtatcggctgcgacgcctacgcctccgacctcaaccccatcgcctgcatgttgacctggggcagtgcagaaatcatcggcgcgcccagtaagcggcgtgaggaaatttcgcaggcccaatccaccttggcgaaggcagtcaaccagcgcatcactgagctgggtatcgagcacgatgcagatgggaatcgtgccaaggcgtacctctggtgtctcgaagcacgttgcccagagaccggctggatggtgcccttgtcccccacctggacggtgtcgaagacgcgcaacgccatcgctcgcttgaagcccgaccccaggaacaagcgcttcgatatcgaaatcatctcgggcgcgtccaaggcagagatgagcgccgccgagaagggcacggtacaagacggcgacatggtttatgcattggatggcagaacctaccgcacacccatcaagacactgcgtggcgactttaggcagggcgatggggtgacgggtaaccgcctacgccgttgggaaaaatccgacttcaaaccgcgcccggacgacatttttcaggagcgcctgtacgcgatccagtggatcagcaaggaaacgctggatgcgggccgtcaggagatctggtttgccgcacctaccctcgccgatcttgagcgcgaacagcgcgtggagcaacttgtcgctaaaaacttagacagttggcagaccttaggcttggtaccggacatggccatcgagccgggtgatgagactacgcgcctattccgggaacgaggctggacgcactggcatcacttattcagtccccgccagattttggtggccgcattggtgcatgagcaaatccagcggatgcctaccgacgtgcagccagcactctgcctttcgctggccaagatgctggattggtcgagcaagctgtgccgttatggcaccggagcggcgcgcgagtcgattacgcagactttctacaaccaagcctacaacactaatttcttctacggcgttcgctcattcgtcaccgggcagaactacctgttcctcaccgattcatcgagcagcatcgcgggtgacctgaccgtcaataacaaggaagcctccacgctccagcacgacgccgaattctggatcaccgacccaccgtatgccgatgcggtgagctaccacgagattgcggagttctttatcgcctggctgcgcaagagcccgcccaaacctttcgatgactgggtgtgggattcacgccgcgcgctggcggtcaaaggctccggcgaggacttccggcgcggcatggtcgccgcctacaaagcgatggccgagcacatgcccgacaacggcatgcagtgcgtgatgttcacgcatcaagacaccaccgtgtggggcgatctgatcggcatcttctgggcagcgggtctgcaagtggtcgctgcttggtacatcgccaccgaaaccacatccgagctcaaaaaaggcggctacgtccagggcaccgtcatcctgatgctcaagaaacgcgctgcgggcgagcgcaccggcttcaagcagcgcctgctgcccgctgtgcggcaggaagtggcacggcaaatcgaaaccatgatgcacttgaatgctgccgtagaaacgcattacggcgagccggtgtggggcgattccgacttgcagatggccggttatgcggcagctctgaaggtgctgaccgcctacacacgcattggcgatgaggacgtcaccagcttcgccctgcgcccgcgtgcgcgtggtgaagtgaccgtggtggacgaaattgtccagcaggcagcggaaaccgcatccagcctgctggtgcccgaggatctcaccgccgacgcctggggacgcctcaccggtatcgaacgctttgtgctgcgaatgatggacatggaaaccgcaggcgcgggcaagctggacaactaccagaactttgctaaggccttccgcgtaacggactacacccgtgtgatgggcgacatgcggcccaacaacgcacgtctcaagcgcgtcagcgaatacgcctcgcgtgatctgaccgatgccaccgagatcggcgtgacgcggctgggacagctcatcattgccctgcagcagctgctcaaggacaccgaggcgcaagtcatcgtcgagcaactgcgcgccgagatggcggacttcctggaagttcgctccctgctggtggacatgctggctttcatcgagcgcaaagcacccgaacctgaggtgcgctctgccgccgaggttttgggcgcgcgcctgaagaatctgcgctttggcgactga

SEQ ID NO: 361730 - DNA, 645 bp, Pseudomonas aeruginosa
atgaacgccgtgcccccgcagccgaagatctaccacattgcccacgtagatcgtctgccatccatcgtggcaacaggtggcctattgtcggacgcaatggtgcaagcgcaggcgctgggcggaacgatggttggaatgaaccacatcaagcagcgtcgtttgactgagcttcagcttgcaagtcatcccggcttgttcgtcggtgcctgcgtgccgttttacttctgcccgcgatccgtgatgctttatttgatccaccgacgcaacgcagaactggcttaccaaggtgggcaagcgtccatcatccacttgcaggcggatttgggcgcagttgtggcctgggccaacgcgcaacccgctcgctgggccttcacgctatcaaacgccggatcgtatttttttgaagaccgcaatgacttggcgcgtcttggtgaaatcaactgggcggcggtgcaggcgaacaactggagtggcggcctgaaagagggcaaacaagccgagttcctgttggagcaacattttccgtggcacctgatcgaacgcatcggcgtgcagtcggccacggtctatcgacaagtcgtcaacgcccttccggcgcacggacaccggcctccggtcgaagtgcgcccggactggtattactga

SEQ ID NO: 361731 - DNA, 627 bp, Pseudomonas aeruginosa
atggctaaagccgcaggtaacacaccatcgcccaaggcgcgtgcgcaagtgctgcacacgctgggttttggcgtgcctgcgacttctgatcctcatcacttcaaggtcgttattcccaaggcaagcacgggcaaagttcagatcagtgaacacctcggcttgcagtcagcaagcaacgacaacgcggtgattgaccgcgttttgctggatcgacctcgctggaccgccatccgcgccgaagttcaacgagcctttaacgctcgtctggccgcgcatggcatcaagcccggtacgtggaaggtcggcgacaaccctgtggatcgcttgctcggcaaggaattgtgcgtactggcctgggccgtcgagcagatggagatggagaagattccagtcgccgtgcgcaactggctggcgctgcgcccggaggaacgctggtggctgtttggcatgacggccatgagcaccggcggggtgatggatgcgggcaagggctggcgcgcagcgctcaaacacgccttgggcgatgtggcacagagcgaactgctcgctccccgtgccagacgcggcaagccggaacaggaagttgcccaggcctcattagggctgttcggagacgaagcgccatga

SEQ ID NO: 361732 - DNA, 198 bp, Pseudomonas aeruginosa
atggccacagtcaagactgccacgctcacatttcgtatcgaccccggactcaaggaagcgcttcgcatcgcggcggatcaggagcatcgatccatcgcgaacatggtcgaagtgctgattcggggctactgcgagcggcacggcattgcgattccgcactccgaggaaaccaagaacaacaacggagcgcgttcatga

SEQ ID NO: 361733 - DNA, 258 bp, Pseudomonas aeruginosa
atgcgagacctgaaacacatccacacgcaagaccttagcgatctcttcaattcgttcatgaactgcttcgacgagcggcgaaactcgatactgctcgagatgttcaagagtcagttcggcgctctgttctgtgagcccggcgcgattttcaacgaaacgtaccaggcctatggggacaacaaacatcgagtcccgattgtaatggcctcggtcgccgaggagcttgagcggcgcgacattgagttgagcgcagcctga

SEQ ID NO: 361734 - DNA, 198 bp, Pseudomonas aeruginosa
atgaaattcaaagccggccaattcgtagaagtgaagctgatcgggtttgccaaggttgacgctgtagaaggcgacaattaccgcctgttcttcacagacggcaagcgcggcggcggctggaaggatcacgacattgccggcctggcgactgaaaagaagttctgggccgagtggcgccgccacaaacagtacgcctaa

SEQ ID NO: 361735 - DNA, 1341 bp, Pseudomonas aeruginosa
atgaccgactccttagctgatttggacactctggttctcaagtgccgagcggagcgttcgagggactatgtttcagagtcaattcggtgctacaaggccggcgcgtacaggtcgaccattgttaacgtctggattgcaatcgtattcgacttggttgataaaattcgtgatctcgcccttgcaggcgatgcaaaagcacagcgcatcaatagtcgttatgagacctacatcgaccagatcaatgcaggtaatgaccaaggtgtgaaaaacgccttggaatttgagcgtacgattatcagtacttgtgggacggagctaggcttctttgaccaccagcagatgcgtgaccttcagcgccttcgcgaagatcggcaccaatgcgcacatccttcatttcagtctgccgggattccccatcggccaaatgccgagcttgctcgccttcaccttcgtaatgcggtagagcacgtgttgtcacagccgccgatccaggggcgcgccgctatcgccgaactacttactacagtcgcctctgactatttcccgacggattaccatcaagcatcaatcgccctgcgccagaccccattggcgaacccgtccgaagctctcattcgtggtctggttgactcgctcatcttcggatttgctcagccagaaagtcctgtggctgggaaaatccaagtcggtgctgtgctgtcggtgctgctcaattctcaccgagcgactgctgaaccaaggatctcccagcagttgagcacgctgattagacaggtggaagaccaaggattgccaggcgttgcccgactggtagcgacgacacctgagatggccggtttgactgacgatgctgctcgtgttcggctgaatgaattcctccgtagtggggccgaagctgaagtaatgccggccttggcggtggggagacatcccgcgtttgctaccgtagcgaaccagcgaattcattccttggagaccgaacgtctcgctgtcgcaatacaggaacatgacttaggcgagttggcgaaagaacgggcactccagctgctttcggagacgcgcagctggcacacttcaaacgatgttatcgagaagttgatcattcctctcttcgataacctcacgcccacggatgtgaaacgcatcatcagaatgcctgcggataccaatgcagacctgcccggctccactatgtatggccgattcctcagtcaggttgatcgcttaggagtgctacctgagcaggagcttgatcagttagtggccgagtgcaatggcgaattcatcgcagcgcaactcaagcgagctcgcgagagaacggtagaggttactagagggtag

SEQ ID NO: 361736 - DNA, 1581 bp, Pseudomonas aeruginosa
atgcttgatgatatggaaattgttgaccccagcggcgtgcgcctgtgcaacacgatttcgctgctgatcccagcctacagctaccacatcaactgcgcttggacgcaggaagtcccgctgccagcaattgaagagttcacttgtcggcttctcatcgcccttcaggaggtactccccggcgagatccaggagtacttcggcctgagcaagcgggagtgtgaggtactgatcgagacactgctcaggaacaagctggccgcctatactaatgaaggtttgctggcgccttccagcattctcatggaccgaaccaaaggtgatcccgagattccgcccaggctcaccaagtacgaagaacgcacggaaactgtcgtttttgaggcattgacggtttcgatcatgccgtccagttcgtacaaccgcagtcgcttcggactgcgccaactccccattccggccgaaaaccagagcccgggaccagaagccatcaccgaagccttcggccgccagtaccgggcgttcttggaccattcccgccgccaggagcatgagattaagaacacccgcctgtacaaggtgggcggctgcagtaccggccgattcgtacagattcccatagatctggagatctggctgcgtcccactaaagaaggtgacgtcgaggtgctgaagaaggttgccgagagggtcagcggggcacgccagcggccgctatcgatggaggtcgaggcgaagatttctgactacctcaacagcgtgaaaatgccttccaaaggcatgagcctcatacgctactgcacactgttcgacgaccatgttctggacaaatacattgatgagcgaggtctggatctcaaccgctggcttatcgatcacgccaaccgcaagacggggtatggtagtcctacgacgcgttccttaatcgggccgattttcagcctaaacaataaaataaccctcgatcgcatgcttgacgacctctccgccaattggaaaccaggggaagatcatcgcgcctactggctttccagttccgctccgttctggggggcaaacgggtacctgctaaacgagttcggcaatgaagtcgccaagcgcctgactgaggaccgaaaggggcgtgggatcatcgctgcgatcatgccttttgaaggcaaggaagacctcggaactctgaagcagagcttccacacaaggttgccgaatggcatagcgtacgagggtaacgacctgcagacgcaggtggagatcttcttggttcccggccaactcgccgtcgtgcagtaccacgttcagccggatgttgagagcgccattacggtgccgatcggctatatcaccatcgacaaggaccggatcaccaagattgaaacctacttggacaatctggtgaaaagcagaggtaagcctgttttggcttggacagacgccggtttgaccgtcgaggagatcctcggagactgccattcgaatttctgcgaagccaaccgcaagcctgttctgtccttaggcaaggccagtttggagcgtcgagctcaagcaaaacagaatgacggagcgggcggagagttgccgagctaa

SEQ ID NO: 361737 - DNA, 4971 bp, Pseudomonas aeruginosa
atgaaggtaatcgtcaaaggcagcggactgcacagcagcgaaacaaaggcgctaagccgcatggagtcggagcttcgggattcatggcacgcttatgcctccgtcctgatgatggaccagcaggggtcgatggaattcgacctcatcatcgtcacccacgatcgcgttctggttatcgagctgaagaactggcgcggcaagctgacatcctacgacggcaactggtacatcgacggaaagtaccgctcgaagagcccctaccacaccaagcgagaccaggccctccgcctcaagaacattctccaaacacacctatcgcacgacctcggttacgtgccgttcgttgaggctcatgtggtgctctgcggggaggcgacccctgatcatctgccatccagcgaacagctctacgtccacaggctggatgatttcctgaagatcagtgacagcgctgtttacgacgccatagtgcagaaagtcagtctcaggttcgatggcatcggacgccagcgaccgaatcatgctgacaatctgaaatactttgatggcttcttccgcggtcgtcgcgtcgaactggccaaattcaaggtcaagggatacgaggctgccgaaacccctgatcaccagcacgagctcaagctattcgcggagtaccccgccacgcatgaagaatctcgcgtccggcgagctatgatccggcggtgggacttggatatcttgggcatccttaaccgcgaagacaacatctggaagaaggtgataagccgggaaaactatctttacaacaatgcctcagcgactaatagcctactgcagcagtacatgctgcgtcctctggatgcccccgacgacgacaacatcgccgtcgattgtgtggcgatgtatgaagtcaaacagaacacgcgccggctgagcgagttcataaccctcaactcgcacaaatggagtccagatcgaaagctggatatcgtccgggcgttgctggcaccatttgcggaactgcacagcttgggcagcgcccatcgggatatccagccgcagaacttgtggtactccgaagatagcgcctacatcctcaccagtggctaccacgctgcattcattcccgaaaagggtactgtgaaggaactgagtacccttctgagaagctcttcaaccctgattccggaagacgtttatggtggagaaggggagccggtgaacccgttcgccaaggacgtttatctgctggctctcgttgcccacaagatctgcttccctgaccagaaactggctgaggaggaaggcatttcgatctggaagccggttgagaacgatccgttcgacggcaagctcaatgcattcttcgaaaaggcgatggacctggagtaccagaaccgattcgcgaatgccgccgacatgctcgcggaattcaatgcgatctccatcggcgatgatcgctcttacgatgatacagcagaggttatccaagcgctgagcgcgggcggcttcataaatagggagctcaacccattcactcttcagggagttttcccccctgtacagggcgagcaggtctccttctttggagagaagattagctatcgctgcctagtcaatggcgagcaatgtttgctgaagctttggcaacatgcccgcatcgacctccagaatcccgcttccaaccggcgcttgctacgcatgcggcggagaattgagaaggccgtcgaagccaagctccccatttcgactgttgttcaatacggcctgttcggcgagggcgccgggctcttcatagttacccgctacgaagatggcatcacttggcgagagtacgcgacaacactcgctacgccagagcaaaaactgaaaagtgctctcgcactttgcgatctcgctatccatgtccataccagcaacttcgcgcatggcgaccttcaccccgacaatatcctggttcgcagcggagacgggaaggatggccaaaccatcgacatgctgctgatcgacgctttggactacggcgacaccagcgatccctacaacgtggagtatggcccggctaacccaacagcgaccgacggtttcgggcgcgacaggtttgccgtctaccgcatggtggaggagctatttgtcgaaaatatttctccggagctggcgatggagctccaagccgcagcagctctacccgatcgcgttccagttgatctggcactgcttcgggcggccctgaaaagcgacctggatcgccagattacgccgccgaaggcagcacagcctgcgttgcgtctgatccacccattcgcgcaactctcagaaaaaccgaccctgctgcagaaggagggggctgaatatcatctgtctgtccaacgggcgaatgacaatccaaggctactgttcttcaccatcacagcccacgagaagacattgcggctcaagctcgatcccgaggccagggttatcacgacagcttgggtcaaggattcagggctaggcgactacgccagtgacggtcagcgatcgcaatgcagcttcaccacccccatcactatcgaacgcggcgtcatggcaggtgataaacccaactcgtttatcgaattcttgatgaaccaggatgtggttctcgaccttctcgttgagatgtttgagcccaaagagggcgctgaggaacgcgaagctctcctggatgagagcattgagcagacgatcaatccccaccagatctggcgggcccttctggaaacagaaggggagcagcgtcaaaaactggagttgtgcagcgctgacatcgttgagagcaagtcgggcggctggctgattccctgtatgctcaaggccggcaacgaactggaatttcctgcagatgatattgaggaaattggcgtttacctgggtgatgagattcaggcattcggctgggtaatacccgaagagactacggacgaaaccttggcggtcaagcctcggggtgagtccctttcctccttcaaaaagcgggtcagcgagggatctgacctgttccttgaatccaagcggagtcacgcatctcggttccgccggcagaaagccctggaccgggtgttgtccggcaactctagaattcacagcctgccagggtacttcaatgaagaaggagatgtgcgcgccgccataacgcacgaggtgccagacgaagcggcaatccgcgcccggtacgatcgtcggaacggctcggacgaggtgcttaattcaaagcagatccaggcattccagcgggtgatcagtcagtcgcccatctccgtactgcagggaccacccggcactggcaagacggcatttgtcagcaagcttattcactatctgttcgagaacaagcttgccaataacatcctgctggtggggcaatctcacacgtcagtggataccgtgaccatcaaggccaaggagttgtgtcaggagctagatactccgctcagcctagttcgcttgggtcgcgagcaccagattgatgagaagctgctgcaatgccactccagctccattcagagcaagatgcgctacaagttccagcgtgaatacgaaaatcgtatcaacgcgctggctggccgtctcatggtggaccaagggttcgtcgatgaggtcgccaagctccaccgcagcattagcccgctgctatcgaacatcgccgtgttgctgggtagcatcaacgaactgagcgatggtcgagagttaagccctgaacggcaggctcatgtcgatcagctgaagcaaatcctagcgtcgtctaaagagcacattcagctcaacatcgagactcggggatacgatttcgacttgccggaagtcacggatccctcgtactggtcggaactcacgaaccacatcgcgatgcgccgtggggtgaccaaccagattgccattcgccgactgaaccagctcataggtatcagcaaggactggattgacgttctcgcgtcagcgtcgtcaagcttcgatcggttcttcgttaaatcgagtcagttggtcgccggtaccttagtgggcatgggcgccaagtggctgagcctggaagagcaggaattcgactgggtcatcgtcgacgaagccgggcgagcgcaggcttctgaactcatgattgctctgcagtgtgcaaaacgggtcttgctagtaggggaccactgccagttgcccccgttctatgagcaagcgcatgtccggcacgttgccagaatgctcggtatcaccgaagccgaggtgagaaaaaccgatttcgaacgagcattcatcgtcaacgatggcctcaccctggatacgcagtaccggatgatcgagccgattggcgacatcatctcccattgcttctacaaggatcagctccagagccaccgcaagaaggcccccgaatggtgcgaggatcttccttaccccctgaacaagccagtcacctggatcgacagcggcagtggggctcgggctgttgatgaagacaacgatggcaaggggatggtgaccaaccggcatgaatatgaggtatgcagggacattcttagacagttggcccggtctgagtcgctggaaagcctccgtgcgaagaagacggaaaaacagccattcccgatcggcatcatcgtcatgtaccgggcgcagaagcagctgcttgagaacgaactgtccagggccgagtgggccgcccccatccgggatctcatcaagatcgagacggtggacgcctaccaagggcaggagaacacgatcatcattctgtctctggtgaggaacaacccggaagggaagcaaggctttttggtcgaagcctcgcggatcaacgtcgcgttgtcccgtgcccaagaacgccttgtagttatcggctccaagcacatgtgggagagttcaaacgcgaactcctccctctccgaggtcttggcattcatcagcgagaagagcgccgcaggcaacgaaaactacgaatttgtggacggaaccaccgtgattgaggccgccaaacatgcttga

SEQ ID NO: 361738 - DNA, 246 bp, Pseudomonas aeruginosa
gtggctgagcaggttatcgcgctgattgactgcaacagcttctactgcagttgtgagagggtttttcgccccgacctgatccgcacgcctatcgtggtgctgtcgaacaacgacggctgcgtggtcagccgcactccggaagccaaggggctcgggatcaagatgggcgagccgtggtttcagattcgccggcgctttgaggcagccgggggcgtggcgtttagctccaactatgcgctgtattaa

SEQ ID NO: 361739 - DNA, 216 bp, Pseudomonas aeruginosa
atgatcaataacctgcaacgggctgtggtactggagcgcctgaccatcgaggtcgaagccgatgatccggatgactcgtttttgctggccatggccttggcgggcgatgcggactacctggtaaccggtgatcgccgcgccggcctgctgcaacgcgggcacatcgaacgcacgcggatcgtcacgcccgccgtgttctgcgtcgaggtgctgtga

SEQ ID NO: 361740 - DNA, 2244 bp, Pseudomonas aeruginosa
atgcagataagttacctggcgtcgtcactggtgcttgctggggtgggcgtcgtgcttactctcggcgcctgcggcggaagcaatacctcgtcaattgtcgcaacacctcgagggactttaagttcgttttctccaagatccaatgcggtggttggctctgaggcgctgctgcaactgtctggtgtggatagcccaggcagtctgacaattgctgtaaatggcgcgaacgttgatgcacagtttcgcagcgatgcggagggcagaatgcttgcgttggtgccttcgttaagaagcggagcgaactccgttgaggtgacacagagcggcaggagcgtcgccaagctggagctcgagagctatccaactagtggcccaattttttctggcccacaccaacagccttggatatgtcagacaaattcatttgttctccccgatggaacaaagttgcctgcaagtaactcgccggattgcaccgtggctgccgtggtgcaatatgtctacgttgatgagtctggggcagtaaagcccttgagcaagactaattccacaccacctgatgttgcgaagacgacaacatcgactggatcctccgttaactttatcgttcgagttgaaaccggaacgataaatcgcggtatataccagacggcgattttgcatgatcctgtaaaggattctcctctaacgcctttcacgcgcccggcgggatggaatggcgaggtcgtttatccattcggtggcggttgtaatccgggctatcgtcaagcaacggctttaggtggcacttacaagactagcctctacgaactgagtcaaggttacgcggtggcgtcttctacgctcaatgtttgggcaaacaattgcaattccacgttgtctgccgagaccgcgatgatggtgaaggagcgtttggttgaggtctatggtgtcccacgcgcagtcattggtaaaggcgggtcgggaggtgcaaagtcgcagttcatgattgctgataactacccaggtatcctcgatgggattcttcccggtatccaggctggagggccggatgggatcacggctaacccgtctactgtcgattgttcgctgttggtgaactactttaatgagaaggccacccactcatggacctacgctcagaagaccgcggttgcgggatgggcgggatggaataactgtgaaaagcaggctgctgatcctgtgagtgcgcgtccatggcatacgaattactcgccgtactatatgcagccgacctcgcacatgccccagaacttcatcgggtgcaatgcagatgttattcccgtaggtctgttgtatcaccccacatctaatccaacaggtgcgcgctgtgatctttactcaaaccagatcaatatcttcggcggaagcgcatctaaccctaggctagttcggcggccaatggacagcgtggggattcagtatggattgatcgcattcaacgaaagcatgatctcggttgatcagttcattgagttgaacgagaagatcggtggctacgacgaggacggaaactatgtgcgcccgcgcacggttgcggatgttgacgctttgcgaattgcgtaccagacgggccaagtactcaacggaggcggggggcttgccgctactccgatcatcgaccttcgcatgtactacgaggcgaccccggatctacacgaccggcttggttcgttcataacgcgggagcgcctgatagctgccaacggtaacgctgaaaacatggtcatgttcacgtatccgctgaatctgcctacgggcccttatggcagcaacatcgtcgagagcgaggctttgtctcagatgagcgcatggctagcgaagatccgcgcggatcgcaccattgagtcagcgtcggctaaggtccgaaggaacaagcctgcgaatgctatcgacacatgctgggacaacagtggaaagaggattgccgaaaaagctgttttctcgggcccgacgcagtgcaatgcgctttacccggcgcacaagaacccacgccttgcagccgggatgccgctgaagcacgatgtcttgaagtgtcagctcaagcccgttgacgtttcagactatgcccaggcaatgaccccggcgcaagtcgctaggctgaagcaaaccttccatgatggagtctgcgacttctccaaacctggaattgagcagcaagggttggcgggatcttggttcggctttccctccccgggggctccctcagttttcgggagctaa

SEQ ID NO: 361741 - DNA, 954 bp, Pseudomonas aeruginosa
atgccatatatttccaccgaagcaaaaaaaatactcgctctcatgagtgaaagcggcgcgccagaattcggagctccgccgctatcggtcgcgcgccaggtctatgcaggccttggctcaaagttgggcggggaggttatcgagatggcctctgttgaggatctttcgatggctgggccgggtagtactttgccgatgcggatctatcgcccccttgaaaactctggtcaaaatggagctttaatttattttcatggtggcgggtggattctggggggcatagagactcatgacagactctgtcgacaaatcgcaatgagatcctcttgcgtagttatctctatcggttacaggcttgcgcctgagcacccgctgccagcggctgcagacgatgcgatcgctgcggtgcgttgggttgtggacaaagctgatttcctgcgaatctcgggcgccctagccgttggcggtgacagtgcaggtggagggttggctgcgtatgctgcgctcgctgctcgtgacgaacaattgcccgtccgcgctcaggtcctaatctatcctagcgttgataaccgggaatcggcacacgagcgatatgcatcacgaaaaacgaatgcagaagtgcctcctcttacggtgcaggcaatgcgcaacgttgccgcatatctagcgcatgagaaagcattaaacgaagatattcgcctgtcgcctattcttggtgtgcaaagccggacatcggtgcctgccttaatactgaccgcgggagctgacgtgttgagggatgaaggattgcgctatggttgcgaattgctcgatgcgggtgcctcggttttaattagaaactatcctggtgcaattcatggtttcctcgagatgccagctgccctgcaagtcgcacaagatgcgcacgaattgattgggctttttcttcggcagcaattaattcaaaagccatag

SEQ ID NO: 361742 - DNA, 1191 bp, Pseudomonas aeruginosa
atgcccactacaacttcactgataaaaccggtcccgaattcaaatcgcggaatggttgtgcttgcgctgacgctagcagttttctttgcagcctcaactgctcccacaccgttgtacggtatctatcagcacgagtggagcttctcgcctgtgatgctgacactggtttttgcggtgtattctttcagcttgctggtagcactgttgaccatgggcgcgctctcggaccacgtcgggcgaaagccagctattctgctgagcctggttcttgtaggtgtgtccatggtgatctttgcacaagcgcagggtctagctgacttattgtgggctcgcagtttgcaaggcattgcaactggcaccgcaactagtgcagtgggcgccgccatgctggatcttgatcgagaaaatggaactttgatcaatacgctatctccattgctcggcatggctgccggtatttttggggccggtgaatatgccacgcgatacccgttggcgattcaaaatgttttctgggctctgctgatagtatttatcgccttggcctgtggcgtggcggcgatcagggagagcggccaccgccgacctggagttttggaatcgttgaaaccaaaggtgcgcgttgcagctcacattcgcggggcatacgcacgcatggccccgatgaacgtagcggtatgggcacttggagcgttttacctgtcgctaggaccgtcggtcatcatcatggccactggcctgccgagtctcggcggtcgtgcggtgtgcttgaatatgcttagttccgccgtggtcatttggtttatccgccgatggcagcctagtgcgatggagcgtatggctggactcgcactgatccttggtatgctggcgttgatttcagcagtctatttctctagtgcgacgctgatacttgctgcgtcgattgcgggcggcattggctttggtgcgggtttcattggatcactgcgtagcgtgatgtcgctctcggctcctcatgaacgcggcggtttgttgtcggccatctatgtaatgaattatatcgcttttagcttgcctgccattgcagcaggccaattggctaaacacattgggcttgcgtccactacgtatatttacagctgtgcgataataattctttctttgtcggcactctgggcgtcaaaaggcaccaagagaaaagattcttaa

SEQ ID NO: 361743 - DNA, 1860 bp, Pseudomonas aeruginosa
atgctccgactgttccgacgcaagatcgcagcggctgcgtctccaccaccggcgaccacccctgaaacggtaaaagggttcacgccaccccagactgcagaagtactcctggcgacaacgcgacgccagaggctgatggagcatatctggcagcgcacctcactctcgcgcgagcagtttgccaccctgtaccgcgcgccgctggaacgttatgcagagttgacccagcagcttcccgcgtcggaaagccaccatcacgcttaccccggcggtatgctcgaccatggcctggaaatcgtcgcctacagcctgaagctgcggcagtctcatctgctgcccagcggagccagtcccgaggaccaagcggcccagtcggaggcctggacagccgcagttgcctatgccgcgttgctgcacgacatcggcaagatcgcggtcgatctgcacgtcgagttggctgatggcagcacttggcacccatggcatggcccgctgaaccagccgtaccgcttccgctaccgtgaggatcgggaatatcgcctgcatagcgccgctacaggcttgctataccgacaattgcttgatcgagagctcctggactggctgtgctgctacccggcgctttgggcgccgttactttacgtcttggccggtcaatacgagcatgcaggcgtgctgggcgagctcgtcgtgcaagcggaccgtgcctcagtggctcaggagttgggtggtgacccctctcgcgctatggccgcgcccaagcacgctctacaacgcaaactgctcgaggggctgcgctttctactcaaagaagaactaaaactgaatcgggcggaagcttcggatggatggctcacagaggacacattgtggcttgtgagcaagacggtctccgacaagctgcgcgcgcacctactgtcgcagggcatcgatggcatcccggcaagcaatacagccgtgttcaacgtattgcaggagcacggcatgttgcagcccacacctgagggtaaggcgatctggcgcgcgaccgtaatcagtgccaccgggtggtcttactcgttcaccctattgcgactggcacccgcattgatctgggaggctggcgcccggccagaaccctttgctggcacagtgactatagagacagcaacaaccgagaatgaccacgatgcgcccgccagccaacctgcggtcatcaacaaatcatccccggaaggctgggagccactaccacaagccgccgacagcatagcggtctttgctccgccggccgcggcacgggctgagcctgatgtcatggaggacatgttggcaatggtggccctggccggcttggccgtaccccagcagggcgtggataccgtagtgagccattcgcctgctgaaggccaccaagcacagcaccagacgtcatcagcggagtcacgtccgttgcctgtgcacctagctgtgtcaatggttccgaaagcacaaccgtccggcgaacacttcatggagtggttgcggcagggcgtaacgtctcgacggctccttatcaacgatgcgaaagcactcgtgcataccgtgagcgacaccgtctatcttgtcagcccgggcgtgtttcagcgctacgcgcaagagcatccacaattggatgccctcgccaagcaggaaaagcagcaggattggcagtggatacaaaaacgattcgagaaactgcagcagcatcgcaaacaagcgaatggcctgaatatctggaactgtgtagtaaccggaccacgcaagtcgagaaggctgcacggctatctactcgttgaccccaggaccctattcgcagatattcgccccaacaatccgtacctgagactagttgatgaatag

SEQ ID NO: 361744 - DNA, 759 bp, Pseudomonas aeruginosa
atgaatggattttccagacatcaggtaatcaagcgtctgcaagcggatcttccccggggagcaccgttcgatctgcaggtactcgaaaccttcggggtctcgccccagcttgccgcccgctacgtggagagtggctggctggtgcgcatcggccatggaatctatgcatttcccaatgacaacttcgatgtcaccggtgcgctgcggttccttcaacagcgtgttgctggcttgcacgtgggcggtaagagtgctctagcgacgcaaggtgtgcggcacaacctgagcacatgcgagcccctggtgctgtggggagaggcgcgctttagcttgcagccatggttcagcgaacgctttcctgccaggtacgtcaacgcgcggcttttcgattggcctgacacaggcctggccgacacaacgctgcacacgcctccgggacagccgaggggcctgcaggtggcggtgcccgagcgcgccgtcctagagatgttgtacgaagccggaactcgccagagccttgaggaggttcgcaatctcttcgacggcctgcgttcgccccacaaggatctgctgggccaactcctggcctgctgcaccagcgtcaaaaccgtacgcctgttcctgacctgggctcgcgagaccggcgtcattgatgtcgatgcactggtgcagcagttcccggtgcgcgctggcagcaccaaacgctggatgagtcgcatgctcgacggtaccttgcttagcctcaagacctacggatag

SEQ ID NO: 361745 - DNA, 381 bp, Pseudomonas aeruginosa
atgaacgcaaggacccatcgcagcatccccgaacgcgttggccgctcgctcggccaaggctggcgtggtggcgtgcgcatcgaacggcgcgtgtcgatatggctgatgggccaaggcgttcccaaggcgttcaccgcggtgttgctgtggacggtgaagctggcttgcctgggcatgttgctatatgccgcgttttgggtggcgttgctgctggtcgtcgccctggttgtggtacggagcgtctccaccacagccattggcgacgatgaaagtgcagacttcctcggaagcacggctgagctccgcgatcaccgggatggcttgttttaccatcccgcctcttacaacgatgaccctgaccctcggtttgaggacgattga

SEQ ID NO: 361746 - DNA, 348 bp, Pseudomonas aeruginosa
atgagtacccaatggctgcgcatgaggtggctgttcaatcggcgcaacgcgaaggcgctggcatgggccgtggtgttgctgggtctggcgattgccgccaatgtggtcggcatttacctggtcggcagcgtggccggctgggagcgctggatgtctgcgtcggccggttacttcctgggatggcggatctgcctctatgcggccaccgtctatggctggctgtggatgcgtcggcgcctgcttgcacgcgagtctgcgcccgacgcgcgtcgccgcctggtgcgcgccgagatcgcaggcgcgatcgccatcgttgccctggaagccagcctgctgctgcaggcgtag

SEQ ID NO: 361747 - DNA, 423 bp, Pseudomonas aeruginosa
atgcgaacctcccatcgctttctcggacaggccctgctcggcctggcaatgcttgtttctggcgcagtgggcgctcaggaagtctgggtgatcaccgattccagcaacccagtgacgggcaaagctgccttcactcgcctcatcgagctggacgcgcctcagcgattcgaggcggaactggccgtgcaattgcccagtgatccccagcgtgccgcggccttggttcagcagcgcctcaagcaaggcagccagccactgcaaacacggatgcgcaacgcctaccaaggcgtggccgatgcctggagcctggggatcaccacgctccctgccattgtcgtggaccagcgctacgtggtctacggagagcccgatctcgacaaagccttggcgcgcgtcgcacaacatcgcaaggacaaaccatga

SEQ ID NO: 361748 - DNA, 738 bp, Pseudomonas aeruginosa
atgaccgccacaccctctccctatcaaaaaaaatcctggcgtgtctggtggctagctgctgccagctgcgtagcacttgcgatgcttctgtggggattcttcgactctcctcaacctgcagatcgtgttgccgttgatcagggcagtgttgagcatgcgtccggaccgccttggcgctacggccccgctacggcccgattcacagtcattgtctacgcagacctggaatgcccgttctgcaagtcctacaccccggtgctgcgttcctggatcgatgggcatcgcgacgtcaacctgcagtggcaccatcttcctctcgcgatgcatgaaccggcagctagcgaggaagcacgctgggtggaatgtgtgggtgaagcttctgggcacgcgcgcttctgggaggccgtagcatgggtgtaccaacacacccgcggtggcggccaaggactagcgcctgggactgcgtttccagacgatgccgcggtacaagcctgtctgaacagcgagcgcgctgggctggcggtacgtagtcaggcggaccaagcgcgaaaggatggcctcgatgccaccccgtcactccggctgatcgaccgggacaccgatcgctcgatgacgttgaccgggccagtagtgggtgacgccttgttgtctgctttggatctgctggcatcaccagaacaggaagatactcacacaaccacgctgcctggggactcctctgtcagcactccacgatag

SEQ ID NO: 361749 - DNA, 2892 bp, Pseudomonas aeruginosa
atggcctggacgctaccgtggcgccgccgcaaagtgcccggcgcctcacccaccgagcaagcacagcccgatggctggcagcgccatgtgcaggcgctgcgtgatgccggtctgctgatgcccggagaagccgttcagggactgcacgccgccacgacggccgatgagcaggccctctacgatgtagcgccgtcgttcgtctcactgctgccgtgggtggaattcctgcccgaatcccagtgcatgctgctcgaagacggtcaatcggttgctgcattcttcgagctcaggcctctgggcaccgaaggccgcgaagctgcctggctggctcaggcgcgcgatgcgctggaaaacgcgctgcaagacagcttcgacgagctcgacgaaaacccctgggtcgtccagctctacgcccaggacgaagcaagcttcgaccactacttagatgcgctacgccactacatccagccacgcgcgcagggctcacgcttcagcgagttctacctgaagttcttcgcccaccacctgcgcgccgtcgccaagccaggtggcctgttcgaggacaccgtggtaacccgtctgcgctggcgcggccaaagccggcgtgtgcgtatggtggtgtaccgccgcgcgatgggccaaagcagtcggcgcggccaaacgccagaacagaccctcaacacagtgtgcgatcgcctgaccggtggtctgagcaacgcaggcattcaggcgcgccggttggatgcgcccgcaattcacggctggctgctgcgctggttcaacccccgtcccacaacgttgggttctgaagcgcaggaccgtgagcgtttctaccaactggcaacgtaccccgagaccatcgaggccgacgagatcgagttggccagcggcacggacttcagccagcgcctgttcttcggccagccgcgctcgaacgtcgatcaggggctgtggtacttcgacggcatgccgcatcgggtcatggtgaccgaccgactgcgcacgccaccggtcaccggccacctcaccggggaaactcgcaagggcgacgcgatcaacaccctgttcgaccagatgccggaagacaccacgctgtgcctgaccctggtcgccacgccgcaggacgtactcgaagcccacctgaaccatctcgccaagaaggccgtgggcgaaaccctcgcatcggaacaaacgctcaaggatgtgcatgaggcccgctccctgatcggcagttctcacaagctctaccgcggcacgctggcgttctacctgcgcgggcgtgatgaggccgagctggaccgacgcggcctgcagcttgccaatgtcatgctcaacgccggcctgcagccggtgcgcgaagaagacgaagtcgcgccgctcaacagctacctgcgctggttgccctgcgtctacaacccaggtgcggaccgcaggcagtggtacacccaactgatgttcgcccagcatgcggccaacctgtcgccggtctggggccgcagccagggcacggggcaccccggcatcacgttcttcaaccgtggtggcggcgtgatcaccttcgacccctttaaccgtctggatcgacagatgaatgcgcatctgttcctgttcggtccgaccggatcgggcaagtcggccaccctgaacaacatcctgaaccaggtcgccgcaatctaccgcccgcgcatgttcattgtcgaggcaggcaactccttcggcctgttcggcgacttcgccaagcgcctcgggctcacggtcaaccgggtcaaactcgcgccgggatcgggtgtcagcttggcaccgtacgccgatgcccgccgcctgattgagacacccagcgacgtgcagaccctggacgccgacgcgctggatgaggagcaaacgcctgcggtcgaagccaatgaggctgacgagcagcgcgacgtgctcggcgagttggagatcaccgcccgtctgatgatcaccggcggcgaggacaaggaggaggcgcgcatgacccgcgccgaccgctcgctgatccgtcagtgcattctcgaggccgcacagcgctgtgttaccgacaaccgcaccgtgctgactcgcgatgtgcgtgatgccttgcgcgagcgcggccgcgacacgaccctgcccgagacgcggcgctcccgcctgctcgaaatggccgatgccatggacatgttctgccagggtaccgacggcgagatgttcgaccggccgggcacgccctggccggaggccgacatcacggtggtagatctggccacttacgcccgtgagggctacaacgcccaattgtccatcgcctacatctcgctcatcagcacggtcaacaacatcgccgaacgtgatcagttcctggggcggcccatcgtcaacgtgaccgacgagggccacatcatcaccaaaaacccgctgctgtcgccctacgtggtcaagatcaccaagatgtggcgcaagctgggcgcctggttctggctcgccacgcagaacgtggacgaccttccaaagtccgccgagccgatgctcaacatgatcgagtggtggatctgcctgtcgatgccgccggatgaggtcgagaagatcgcacgctttcgtgagctgaatcctgcgcagaaggcgctgatgctctcggctcgcaaggaggccggcaagttcagcgagggcgtgatcctgtccaagtcaatggaggtactgttccgcgcggtcccacccagcctctatcttgcattggcccagacggagcctgaagagaaagctgagcgcttccagctcatgcagcagcacggcgtcggcgaactcgaagcggctttcaaggtcgccgaaaagattgatcgtgcacgtggcatcgatccgttgccatacgacgacgttttcccctcccagaggccatga

SEQ ID NO: 361750 - DNA, 1425 bp, Pseudomonas aeruginosa
atgcgcagtaacggtctactcaagtggttgatgattccggtggccctggtcgtgctgttcttcggcatccggctgttctccaatggcgggagcaaggtacccattggcaccgacgccagcgcccaactcacaccggatgaaatgaaggcgctgggcatccagggcgacacgccacgcgacacggtggccactctcgtcgcccaggtaaagcaactgcgtacggagctgcagacagccaccacggacaacaagtcccagcgcgaagaaaaccaacgcctgcgtcagcgggaatcggcgattgatcagcgtatcggcaccgccctggaatccgagcgcgccgctctgcgccgtgaccaagaccagatcgccagcgagcgccagcagaccgaaggcctgctgcaagacctgcagcgccgtctggagagcatcggcagccgcggcattggtcatgctgatctgccggtgggtctaggcctaggcgacggcgattcgaatggcatgccaggcacggccaccggcgtgcgttgggtagagcctgacgacgccaagcagaccgatggccggggccgcagcagcggcggcggcgcgctcagctttcccaccagcttcggcccggcccaacgcacgctggaaaccgccgccgacacggtcgcccatgccggcgccaaggcggcaggagttagcaaggctaaggcggtctacaccgtgccgaccaactcgacgctgatgggctcggtggcgatgacggcactgatcggccgcgtgcccatcgatggcaccgtcaacgatccgtatccgttcaaggtcgtggtcggcccggacaatctgaccgccaacggaatcgacattccggacgtggccggcgccgtgttcagcggtaccgcagccggcgattggacgctctcgtgcgttcgcggccaagtgcgcagcatcaccttcgttttcaacgacggcacgatccgtaccatccccgaagaccgtgacggcaatcagcaaaacaacaaccagcaagatggcctgggctggatcagcgacccgcacggtattccttgcgtcagtggcgagcgccgcagcaatgcccagcaatacctgggcacccaggccttgatcacggccgccggcgccggcgccgcctcgctgatcgaatccgacagcggccgctcgtcctacgtcggcgccgatggctcgatcggtaccgtcggcatcaccggtcaggaagcggttggccggatcctggcaggcggtgtccaagagatgtcgagctgggtcaacaagctctacgggcaagcatttgccgcggtgtacgtgcaaccaggcgccaaggttgccgtccaccttgagaagccactcgccatcgactacgaccccgaaggccgcaaggtcgaccaccgtgcaggagaagcccatgcgctcgaactggactaa

SEQ ID NO: 361751 - DNA, 906 bp, Pseudomonas aeruginosa
atgaagaaacgagtcgccctttggctgggagcagccttggtcatcgcgatcacgcccctggctcacgcggtggagattctgcgctgggaacgtctgccgctggccgtccccctggtcgtcggccaggagcggatcgtgttcattgaccgcaatgtgcgcgtcggcgtacctgcccatgtgggtgagcgcctgcgcatccagagcgcggggggcgcggtgtacctgctcgccagcgagcctatcgagccgacacggctgcaactgcaagacgccgacaccggcacgctgttcctgctcgacatcgcggccgagcccgcacgtgaaggcgcaccgtcgctggaaccggtgcgcatcatcgatggcaccaacacggcgacgcgttatggcacgcagacggccgagatcggcaatgccgaacccgacggtaagacccaagccgcacagcacaagcgcgagactccggttgccgtcgtgctgacgcgctacgcggcgcagaatctctacgcaccgttgcgcacggtcgaatcagccccgggcatcatgcgcgtcaatctgcggcgcaacctggtgctcgacacgctgctgccgaccctgcccgtcaaagccactgcacttgcttcctggcgcctggaggaccactgggtcacggcggtccgcgtgagcaacaccagcagcggctggatcgatctggatccacgcacgctgcagggcgacatcctgacagcgaccttccaacaccccgctctggggccacgaggccagccggaagacaccacggtggtgtacctggtgacgcgtcgccatggcctgccagagtccctactgccggccatccagcgctttgatccagcggtgaacctgccccagccagccatccccacccaaggagacgaccatgcgcagtaa

SEQ ID NO: 361752 - DNA, 378 bp, Pseudomonas aeruginosa
atggtgctgccaatccgtctctgcgctgcgcactgcggcgcgccccttctgttgatgggcctcctgatggctggcctgcctctgactgccagcgctgacacaccggcgcagcgccaggacattgccgccgctgctcgccagcttgacgcgctggaacgcctggtcgcccacagcgcggccaacacgacggtcacgcctggcgagcgctaccacttcgactacgtccggctacgcgccgacctggcccgtgtgcgcgccggtctgcaggacttcctcgcccccccacgtgcccagcccagagatcccgccgagcttgccggtcagtaccgcaccgagcaagccgccgatcaatcgcgcgatgccgagcccaagccatga

SEQ ID NO: 361753 - DNA, 942 bp, Pseudomonas aeruginosa
atgactatgcacggatacccccctcctgtcgttcgtcacagtgacgtatcgttcgcgagcgagacaccgtcttgtgcgtactttcgcgaagttgatgctcggctattgggcgagtcggtcttggcgagcgagcaggtgtttgtgcagcagttgtaccggaggagtgagagttccggggtgcgttggcgatttcgccaaggacagcatgctctgctctatttcaaggaggcaatcaatgcctacgatggccttttggatggccggcaatcgcgccgcagccttgaattcaaagacaggctttttttcattcccgcaaactccgaaatagatggctttgtaaaaatcacaggggactattcatatttcgtgacgctaatagatgacgggatcatcgatcaagagccgacaatcgtagacacactaaggtcttcctcattgcagtttggctttaatgatccagtgattgtggaaagtgtgggcaagctcgagagtgagcttttacatcccgacgaatcttcccgcttgataattgaaggctgggctattcagctgcttggattactgtaccgaaggatcatcaaacgccaatcggacggcagcgaggaaaagttcggattaaatcaaaaagtcctcagtctcgtaatagagggactaagagaggggatcgcggaagacacccctcttgcacaactggccgctatggccgggctaagtaatcgacagtttcttcggcgcttccacaactctaccggtacaacgccaggtcgcatgcaacttgatctgcgcatggagcgtgctgcaaacctacttgtcgagtcctccttttcaataacggagatttcggcgcagtgtggtttcagtcaacctcagcatttggcgacggcctttcgaaaacgttacagcctgaccccaaccgaatttcgcaggcatagattgcgctga

SEQ ID NO: 361754 - DNA, 993 bp, Pseudomonas aeruginosa
gtgccaagaaccatgatgagccggcgacagatcgctttggccgcgtttatatcccccttattgctttcaacctcggcgtcgttcggggccgatatttatccttccaggcctataaagatcattgtccctatcgcggccggcggcgcaaacgatgccaccgccagggcgctagcgcttgatctgcagaagaagcttggcgtgccagtcattatagataaccggcctggggggaatttcgtcattggaactggggctgccgccagcgcgccgcctgacgggtacacattgggatgggcactttcggcggcgttgtcattaaacccccttctgtatgactcactgccgtacaaacctaatgatgttgagtacattgcagctatctcgaagagctatcaagtcattgcagtgcctggcaatgcgaaagcaaacacccttaaagagtggattgcggaggtgaagaaaagcgacgggcccgcggctattggtgtgtccagttttggtggcactgttcaccttatggctgaggatctgggtgacagggcaggatttcgagttgagccggttgtttttcgtggagaagcgcccgccagcgtcgatctggcggcagggcaactcccggcgatgtccgggatactcgccaatctcctcgaatatcaccgagtaggaagagtgaaaattcttgcgatatcctcagaatctcgattgccgctgattccagatgttccaaccttcattgagctggggtatccaatcagtgctgtttactggaatggggtttttgcgccgaaaggcacaccaaagagcatcgtcgcccggctttccgaagctattcgggaaatagtcgagactccggaatttagagcccgtttggctgcgattcccgacgtgaactatatcaatggatcgtcggacgtcatgaaagctctggttaaagctgatcaggactattacggtcgaataatcacaaagcgcaagatcagcttgaaaaactaa

SEQ ID NO: 361755 - DNA, 924 bp, Pseudomonas aeruginosa
atgagcaagataatcattacatgtgccgtcacgggggcgattcacacgccatcaatgtcgccttatctgccggtgacacctgacgaaatcgtcgatgcagcggttggcgctgcggaggcgggggccgcaatcatccatctgcatgctcgtgagccagagacaggaaaaccagatcagacccctgaggctttcgagcgattcttgtcgaaaattaaagcccgaaccaacgcagtattgaatctaacaagtggcggctcgccgtacatgggcatcgaagaaaggatccaaccctcgcttcggtttgcacctgagctcgcctccttaaatatggggtccatgaattttggactctttccaatgctgaaacgcttcaaggagtttaagtacgcctgggaacgtgaggccttggagaacagttcaagcttgatctttcggaacacattcgacgatatcgagtacgcgctttcgcagctggaaccatctggtacccgatttgaattcgaatgctacgacaccgggcatctctacaatttggcgcacttcgtcgatcgtggtctggtgaaaccacccttcttcgttcaaacggtgcttggcatcttgggcggcattggtgcacatccagaagacctaacccacatgaagcgcacagcggacaggctgtttgggcgagactattgttggtccgtgcttggaacggggaaaaaccagttcaaggctgttgcaatggcggcgggtatgggcggcaatgtgcgcgtcggtctggaggacagtctttggatgggtcaaggaagacttgcggaaagcaatgcatcacaggttcagcaagcgcgcagaattctcgaaggtctggggcttgaagttgccagccccgatgaggctcgccagatactgaagttaaagggtggcgacgcagtgcatttctag

SEQ ID NO: 361756 - DNA, 543 bp, Pseudomonas aeruginosa
atgaaccgttctcaccttgcggccgcacacggcctgctcctgttgctgacctcactggtcaacccgctacacgcagccgagccattgatcgtcgtcgaagatcgtggtggcgcgtcggcgctgtcgtactacgaagccctcaacctgctgccgcgtacccccggcgctgcaaagcctccgctctatctgccggcgccgccatccaaggctgttggtgaggcggacatgctcccggtgcgcagtgccaagctgacaccaggaacggtcactcgtcgggtcatcgaggcgccggggctgcagccgttcttcctggtcggtgacgatgaagcctcacatgcctggttgcgccgccatgcatcctcactgcgtgagcgcaacgcagtgggcttggtcgtgaatgtcgagtccgctcaggggctcgcccgtctgcgggcgctagtgccaggcgtccagctggcacccgtagccgccgacgacctggctggccggcttggcgttcggcactaccccgtgctgatcaccagcaccggcatcgagcaatga

SEQ ID NO: 361757 - DNA, 660 bp, Pseudomonas aeruginosa
atgaacacatcccaccccattcctgcgggaaagtcatcgcgcgccccttcggtcgctcacatcttgctgtgggcatggcttgtgggactgacggccctggtcttggttgcgttccaagtgacaggcgatctcgccggacagtcgcagctcgatagctccgcgcagcgactgcaggcactggagtcacgtgtggcagagatcgcggatgccaatcgtgttctgcaagaacgtccggcgcccgcgacggccgctgcgctgcaggaactgcgccaaacactggattcccgcgccgctcaactggatcagtcactggccacacgtgccgcccaggaggacctgatcgcactgcgtgctgaccttgagcaaatcagagtgcgccagacagcagctcggagcaacgcaacgagcaaaccccgcgctgtgctgcagacgacagcaaagcccgtcgaagttctcatgcccttccgcgtgatcggatcggagctgcgcgcaggacagcggacggtgtcgatcgcgccggcaagtggcgatctgtccgcttcccagattctggtggtcctgcccggcgagagcgttggcccatggcgcttggaggacatcgatcgaaacactgcggtgtttcgcgccggagagcaaacccgccgtctggccattccttga

SEQ ID NO: 361758 - DNA, 573 bp, Pseudomonas aeruginosa
atgcaaacactcagtcccttctcgcgcttgaccgggtgcggcttggtggccctcgccaccctcgttggtggctgcgccaccaactcagcacccgtcggcatcgagtcgcccccgatcgaagagacggtcttcgctgcgcaggcggagccggagatcattccggtggcacgctacggtcgctacaccctcgtcgagttggctccgaccatcgcacagcgtgacctcctcctgcaggtgatcgatgtgaggatgccggaagacgcgagagccagcgtcggcgatggtctgcgccacgtgctcaaacgcagcggctaccagatgtgcgagacggcacacggggtcatcgcactctattcgcgtccgatgccggcggctcatctgcagttaggccccatgacgctgcgtgatgcgctgctcaccctggtaggccctgcctgggatatcgaggtggatgacagcgcacggcaagtgtgcttcgtccgccccggatccaggactgatcacccccctcagaacctgcctgccttcgaggcggctcagcccattccccttgcgaacggtacccagccatga

SEQ ID NO: 361759 - DNA, 1248 bp, Pseudomonas aeruginosa
gtgccactcggcacccttgtctacgtgcgacagggccggcgcgaacactgcgccttcgcctatgaagagtcgtggctggtcaatcccgagcgtttcaatgtgtcagccgacctgcaattgacggcggtgcaccaggctcacaaggccctctcaccgcatgactcggttttccatggtgcgattgcggacacgacgcctgatgcttggggccgccgcgtcattgcccgggaccacgccaaacgccgcaaagctgatccgcatctcgcggcactctcagaattggactatctactggctgtggacgatttcagccgcgttggcgcgctgcgcttgcgcgatcagacgagggggtggctgcgcacggtgcccaaaggacggcgtgcgaccccgcctttgatcgagttagagcgcatctacaacgccagccgggccgtcgagcaaggtcaagaaactgccgacgatctgcgctacctgcagggcaagggtacttcgctgggcggcatgcgccccaagtgcaccctggtagatgacgatggacgtctggccatcggcaagttcccgagcgtggccgacgcccgcagcgtcacgcggggcgaggtccttgcattgaagctcgctgcgcaagcaggaatcgatgcggcgccggcacgtatcgtcttgctaggtgacaagggcggcgaaattccagtggcagttattcgccggttcgatcgtgacggtgatgacggccgcattccctatcagtcggccgcatcgttgctgcaagcgtctcgcgatgaggaccgcagctacacggagattgccgacgccattcgttcgcacagcaaccagccaaccgaagacgtgcgccaactctggcgacgcctggtgctcaatctgctgatcaccaacgtggacgaccatctgcagaaccatgggttcttgcatgttgagcgtggcttgtggcggcttgcaccagccttcgacatcaaccctttcccggacaaagatcgggagtcgaagacttggctctccgagcaggatggcccgatcaccgatgtgcacatgctggtggcccgcgcgcagtacttcgcgctggacgagacacaagctttggccgtgctgggcgaggttcacggcgccgtggcgaactggcgccagacagcggtcagcacggatgttggactgcgacccgcagagttggacgatttcgccccggccttcgagcatgagcagatggcggcgaccgcagtattgcttggcagatag

SEQ ID NO: 361760 - DNA, 1056 bp, Pseudomonas aeruginosa
atggattgctttcacatcgacgagagtggctacaccggattcgatctgctaaacccggagcagcgctttcaaggtgccactgccgtgtccatcaccgaggctgaggctgcgcggctgatccgtgcgtacttccccaagttacaggcgccggaattgaaataccacgcactggcgcgtcggccgggctaccggcaaccgctgctggagctgcagcgggcagtgttgtcgcagtacccgtgcgtcacctacgtctgcgacaagcgctacctgctgatgctcatgtttatggactacgcggtcgagcccttctactacgagcgcgggatggatttctacgaggacggccagaactacacgctcgcctcgctgctgcacacggttggccccagcatgctcggccagaccgggttcgaccagctgctggtcgccttccagcgggcgatcaaggaaaagacgccacaggccttgcaggacttggtgcgcgcggtcaggaaggtggattggcagcagttgcccgaagcactgggacctcttgcactggccgcgcccgaatgcctctctgccattgccacacctggtgtcacgaccgacgccgcgattgtggtgctgcagtcgctgatcagcaggatggaggtgatggcacctgggccataccgtgtcgagcatgaccagtcgaagaacctactgacctaccacgtgctgctccagcgctacatcgatcatcaggacgagatcgagttcaggcagtcgcagatcgccgcagtacgcttcccgctcaaactgacttcggtcacccaggttgactcgaagaacagccctgctgtgcagatcgcggacgtcatgattggtgcggccatcgaggccgccaacggactgaccggcttgcgcgccccgctgcttgacccgcaggaggtgatgtcgctctacgccgaggatcagttcattcatatggtgccgtcgttggactttgagcagcagaagcgcttccgccagggcacgcaggcgtcggaaatgatcgaatactttgctaagaattttggcgccaaaaccatatag

SEQ ID NO: 361761 - DNA, 1419 bp, Pseudomonas aeruginosa
atgggtcccgctgaggtggatctgcgtgcgatcacgcgtggcaccgtcacggccccggccggttgcggcaagactcaactgatcgcccacacactggccggtcatcggggagcgaagccgatcctagttctcacgcacacgaacgcaggggttgcggccctgcgggggcggctagaccgtgagggtgtgccgcacagcgcctatcgtttgagcacgatcgacggctgggcgattcgcctgatcgcaagttttccggtacgcagcggccacgacccggaaatcctgcggctcaccgcacctgcgcgcgattacccggcgatacgtgaagcggcctggaagctgctgcaagccgggcacatcagtgaggtcctgaaggcgtcctatgcacacctcatcgtcgatgaataccaggattgctcggtaccgcagcactccatcgtctattttctgtcgctgatcctgccgacctgtgtgcttggcgatccgatgcaggccatcttcggcttccgcggcaacgcgctggcggattggaatcagcaggtgtgcgcccattttccggtcgtcgcggagttgtcgacgccttggcgctggcgcaacgcaggtgccgaagcgctcgggcagtggctgctggaggcgaggcgcctgctggccgcagggcagcaggtagacctgcgcactggcccgccagcccacctcacctggatacagaccgtaccgcccaatgatcacccacagcgcttgattgcggcgcggacacttccgcccaccccggatggacgggtactgctaatcgccgacagccgcaatcgcgcggcgcagcagaactttgcaagccagaccccgggggcttcaactgtcgaggctgttgacctgcaggacctcattgccttcggcagcagctttgacgtgacgtcgactcacgccttgggccatttgcttgggctggcgcaaagcgtcatgaccaacgtgggagtacccgagctcatgcgacgtctggattcgctggtgcggggaactgccagaaatccgccgtcggtggcggagacctgcgcattggcatttcagcgcgcgccgtccatcgccaccgccgcctcgtttttgtcggagctgcgtgccatgcctaacgtacgcgtgcaccggcccgccatcctctacagcgtgctgaaagcgctgagagacgctgcgccgggaatcgttcccttggctgaagctgctagacgggtgcgggaagaaaaccggatgctgggacggccgctgccaaaacgcgcagttggcagcaccttgttgctcaagggtttggaggctgaggttgcggtggtattgaatacggatgggatgagcgcgcagcacctgtacgtggcgatgacgcggggctctatgcgtctggtggtgtgcagcggcacaccgaccattggttag

SEQ ID NO: 361762 - DNA, 870 bp, Pseudomonas aeruginosa
atgacagcaacgacagacatcggagacctgcaggcaccgcaatgggaagtgcagcggctattgggtcgatgcctgctgcggattcagcagtacgagcgcctgatgaaggccatcgtggcgcaccatgatctgtccggccctgccgcagcgctggaggccattcgcgctgcccgcatgcaggatgtcgcgacgaagaccctgggcaccctggtcggccagctattcggctcctacgtagtgaccgattcgggcactgaagatgaactggctgatcctggagatggtgaggttgcgacggtgcgcatgcgacttcaactgagcatgggtgacgaggactaccagcgcacgcaggctgatctgcgcgacctggtggcgttgcgcaatggcctggtgcatcacttcattgatcggcacgacctatggtccgtacagggctgtcgcagtgcgcgggaagcattggtctcggcttacatgcgcatcgatcagcactttgagcaactgcgcgggtgggccgagcacatggaacaggcccggcgcctggcggccgagttcgtgcagtccagcgccttccatgagttggtggtcaatggcatcgcgccagatggctccattgactgggcggcgtcgggcattgttcgcgccttgcgcgaagcgatggacgagcttgccgaagacggctggacgcccgtagcaattgctggccgctgggtccaagccagatatccggaccaagtgccaaccaagtatggctgcagcagttggcggcaggtggttcacgagtcacgcctgtttgagcttcgctaccgggatgtcgatggtcggcgcgcggggtactacagggcacgtgacgtctacgtccccaaagagtga

SEQ ID NO: 361763 - DNA, 723 bp, Pseudomonas aeruginosa
atgatccagaagatcaatccctttgctcgcggctactacggcttcgagattcgacgcgtggcggtggtcagttatgacgatcgccatccgcaaacgttcgttccgctgcacccgtctcagcgcctcttacctgatgaccaggtcgccctgcatgcctgcatattcaatgaggagtatgcgctggtcactgacagccagctgatatccgaagaattggatgccaactgcggtggcagcggaaccatcctggcggtttttcacagcatctacggcaagagtgtcgaaggatcgctcatccatgttggcgacagccagacccgggaatctgcgcaggaggttgtgcgtactctgacattcgagaccggcttctacagccggtgctgggagatcagcactgcgcacatcaccgacgaagcaggccgattcctctgcgagctcgccgacatcgcaacaccgacggcgtttctcttcgtggcatttcgtatcccatacagcccggccgtcggcatcaagctgattgccaccccctggacggacacgaatctgcaatacgtcgaaggcatcaccactgaagagctgcgtgcagaacatcgcgccaagggcgttccagaggaactgatcgacctgttgcatctggcaggccaggcggacgtgcgcatgctggttctcgatgcagacgcagcagttcttgagggtcttccgatcattgaggagcaggcctag

SEQ ID NO: 361764 - DNA, 660 bp, Pseudomonas aeruginosa
atggcaaacaactactacgacgccaccggcgttctcgtcctcgaccgggtcacccccgtcatctccgcgctgttcggcggcttcaagctcgacgcttcctaccccggcgaaggacaagcctacatcgcgctcgttgccgaggacaacaacccgagctgggaagacctctgcgaaggactgtcggagctggccacctcgcttggcctgccgctacccgacgattcccagacagtcgaaccgctgctggcgagcctgtccctgcatttcggcgccgaccaggacgaagcactggcgcatctaatcgagcaccatcaattcgaggatgccgcggatcttgatgcactgttcctgatcgcgacccgattcgatgatggccacggccttcaggaaatccgcttcgagggttgctggcactgcagcaaaccacgtctcttcaacttcggaggcgacgctcagttcttcagcaaggagttcgaggcatacagcgcttcgagccaggccctgcagttcggtgatgccatccgccaggctttgctcaagcaggacctggacgctgtcgccaaccacttcacgcgtgaagttcggcgcttgcttgccggtatccaggacgaatcggcgcgtgctcaaacgcaacaccggctatccgcactgctgcagtag

SEQ ID NO: 361765 - DNA, 696 bp, Pseudomonas aeruginosa
atgacccagcgcattcttttcgtcctcactagtcacgaccgcaaggggctcaccgatgccgccgacgcggcgcccagcggcttctatctgtccgaggtaacgcacccacaccgggtactcgccaatgacgggtatgccgtcgatttcgtcagccccaagggcggcaggacgcacgtggatggcctcgatctggaagatccggtcaatgccgagttctggaacaatgcatcgctgcgcggcgccaccgaaaccacgctggcaccgccccaggtcgatgccgatgcatatgccgcgatcttctatgccggcggccacgcgaccatgtgggacttccccgacaatgcagaactggccgcgattgctgccaacatctatgagcgcgggggcgtggtcgcagcggtgtgccacggcccggccggcctggtgaacctcaagctgtccgacggccgatatctggtcgatagcaaggacgtgtcggccttcaccaacgacgaggaacgcgcggtcggcctggttgacacagtgccgttcctgctcgcggacaccttgcaggagcgcggcgctcgccacattcccgcaccgaacttccaggcgcaggtggtggtgagcgagcgactggtgacagggcagaacccggcgtcggccaagggcgtcgccgaagcgatgctgcagctgttggcggcagggcgggcctga

SEQ ID NO: 361766 - DNA, 1956 bp, Pseudomonas aeruginosa
atgcgattgccgttcgagctggacccgcagatcattcatcacatcatctacagccaagccggatccatcggtaaagccatcatcgagctgctgatgaattcggtcgacgccaacgcctcctccgtgcagttgtcactgagccgtgagggcttcgtctgctgcgatgacggccatggcttcgccagccgggacgacgtcgtacggtactttggccgctttggcacacctcacagcgatggcgacgccgtctatggccgctttcgccttggtcgtggccagatcatggcgcacgccaagacggtctggcgctctgcggcgtggatgatgacggtggacacccgcaccatgggttatcactacgatcttgaggatctggacgcggcgctacacggctgcgaaatctccggcgagtggtacgaacgcctcaccgacatggaacttatgaccgccattcaggaagttcgcgacctcgtccgctacaccagcgtgcgtgtcgagttgaatggacagcagattacgcgtgatcctcgtgccgagcattgggatgccgaggacgaattcgcctggtatcgcgcgaaggcggacggtgccgtctcgatctacaacctcggcgtcctcgttcgccatgaccccggccacatctggggagctgggggtctaatcgtctccaagcaggccatcagcctcaacgtctcccggaccgaaatactgcgcaaaacctgcaaggtctggaagcccattgccaagaacttcgggcggatggcgaatcagatggcggcgcgtctcggcaaccaccgcaagaccgaagcccggcgcgaacgctgcgcccgcgcgctactcgcaggggagaccggcatggcaaacgcctactgcgaggaagaagtcgtcacgctgttgccaggcaagcggcacgtgtcattggcggagtttctgcgtaaatgccgtttcagccacaacaaacaacaaggtggccagttcgcggtcgtcgatagcgccctcgatgtcccgaaaggtgaatccatcgcccgcgaaggcatcgccgtgatcgttcatcccgccaccctggatcgctttggctgctacaacgctcaggactttgtggattgcatcgacagaatccacgccaacctgcatcgtgacatcgagcagaagggaaccactttctggggactgagcagtctctatgtaccccggttgattgcgttctcgacacttcgcgacgccttcgtcgaacgcaccttcatcgtgaccgagaccgaagcactggatcgggagacaaggcgcgcctggacggcgctgcgctggtgcctgcaacactatggcgcgctatgcaccggtgctcgcgcaacccgtggcggccatacgcgcggcggcaagaccatgcacattctcctgggcagctccaacgctgccgaggcctggactgacggcagcagctacatcgcgatcgacgtcaccatcgtgcgccgactcaaatcgagcccaatgaggactgcctcgtacatcttctcattgttggagcacgagatatcccacgaaggtgacagccttgactgcggtcatgatgaggcgttttaccagcgctttcacgacctcaatctgcgctacagcgagcagcggcaacgctacatgcacatgtggacgatgaagtacaccacgagcctggaagccgatggcaagcgggcccgcggcgagatctggcggcagcgctatcttgtcgatcgcgccggcaacggtcgagagcaacgcgggctgccgcgacttatcgaagacgtcagcggtgaccccgtcgtactcgattcgccacccgacgaaaacatggccttcatcggcagggtcaacgcaagcctgtcggggctaggtgctgcgaccacacgacctgattggtcaactgtcctggagcgcgccgcatccgatcaagcgttgattgccggtccgcatctagccaagccgtga

SEQ ID NO: 361767 - DNA, 546 bp, Pseudomonas aeruginosa
atgacggaacccagcctggggcagcacgcccatttccgtccgctggaacaggcggacttcatcaagctggaacaggcagcctatctaaaaggccttttaagaccttttaaaggtaaggggcctctcgacgactgggccagccaatgccacgcgcaaagggaccaactcatcgccctggcgcaacggcgcgtgctgcggcaagccaccgggcatccctttcacctgctgcccgcggaactggcccagcagaagactggcgcaggcacgacctttctgcgctggcgcaggccagaccgctccgccatgggcgtggcgctgtggcaggaactcatcgccagtcccgccacgccggtcaacctgctggccgacctgtatgcgttggagcagcagcgcatcgtgctgaacatgcagatcagcctgctgcacacgctcggtcgccaggctcaggactgcgccaacaagatggcccaggccgacctcgcgtacctgcgccgcgtccagggcgccgctaccgcggcacggccaagccatctgccacaaccttga

SEQ ID NO: 361768 - DNA, 1200 bp, Pseudomonas aeruginosa
atggggagtagtgccaagctggttttgaatggtgagcagcgatctcatgcggatgccgtgctggagatgctcgggcgtgcccatcatttcgagtgcatggtggcgtttgcgaaggtctccgcgctaccagggttgctgacaccgttggagcaggcgctggaccgtggcatgtcggcccgggtcgcggtcggactgagcttccatctcagcgagccgccgctgttgcgcaagctgttcgatctgtcgaagcgcagcgctatgcagctctacttgagcaccggcgatgcgacgttccatcccaagatctacgcgacccaggagcccacgcggtgcacagtgatcgtggggtctgccaacctgacggctggtggtctcggcgacaaccacgaagcttcggtacgggtcgacggcccggaccccacgttgtttgcggaggtccaggcgcacttcgatctgcttgtcgccgagaaatcgattgtcttggcgaccaagaagcgcattgatgcgtacgcgatcgaattcgcgatccacgatgcttggcgcaagatggcaaggaagcgggccgatcgcgttgcccgcgatgacgtgcaggacctgacggtgttggcggaccaactggcggaaatgaaactcgacgattcaccccatggatttgctgcgcagcaggtactgcgtaagtccaacctgaggttggcacgacgccagatcaaggccatggccgttcccgtcaacggcggtgctcggggtttccttacgcggtacgaagcattgatcaacacattccactcgggagggctgcaccgcgccaaaacccgggttgccacagcgcctgcgagattcctgacagccattgcagatattgcaggccagcctggcctggcgccggccgaggctttcgaggtcttgcacgctcactttgagaacatcactggggctggtatcaacctgttgaccgagatcctgcatgcgctggacaaccggcggtacgcggtgatgaaccaaaatgcggtgacaggtctcgctgtcgcagggttcggtggctatccggaccacccgacaaagtccaacgtcgatggcgagctctatgcacgctactgcctccaagcccgatccgtccaatccgagttggggctggccaacctcaccgaactggatgccttgttcaactacgtgtactggcaggaagaacccgaggcgtag

SEQ ID NO: 361769 - DNA, 1149 bp, Pseudomonas aeruginosa
atggcgctatcagacctgttcgacggcgccttgaagacccttgcggcccaacaacaggccgcgcccgcccccgtcgccacggatgggttcctctacagcggcaaccgtcacgagagcgtgccccgcgcactgtttctggatcgacggctcacaccactggagcgcaacgcctggcaggtgtttcgcttgctgctcaacgacgatggtctcaccgcattccccacctatgagcagctccggccctggctggcgtccatgccctgtggcccgcaagcctcgcacgaaacagttgcccgcgccttgactctcctgcgcctgacacgctggctcagcctcgttcgccggcgacgcgatgccaagaccggccgcatccagggcaacctctacgtcctgcatgacgagcccctgacaccattcgaggccatgcaactggatcctgactacctcggtctggtcagccaggccctgggccattcggccaaggccgttcaagtcgtcggcgtccagacactcaaggacattgccgaagacccgatgctcagcggccgcgcgcttccgacccgcctgcaggtgctcacgcaccgcatggccgagggcggctggctccctgaaagttatccacaggacgacatccgccacgattccgaagaagggccgaatcgccctcttcggaatgtcgatgccccgtcttcggaatccgaagcaggagcgaaacccgcgcaaaacgcctctcttcggaatccgaaggaggaccgtacagtacgtaaggaaagtattaataaagtacgtactaccgcgcgggcgcatgcgttgaacgacctgcaagtgcccaaacgcttcaccgacctcaaggctgagcagcaagcgggggctatggtggcactccagcaggtcgaggagtccatgcgccaggccgtcctcgacgaatgggacgcccgctgcaacggcagctcgatccgcaacccggccggctatctgttcggcatcgtccagcgcgccatccgaggcgagttcaatgcgtgggcgggccaggcgaagccggccacagctcctgctccgacgccaccgcaggagccgcgcaacgtcgttccaccggaagtggcccgccaacacatcgagcgactgcgcaacttactgagcaagagctga

SEQ ID NO: 361770 - DNA, 561 bp, Pseudomonas aeruginosa
atgtcgacaccccatccgctcaatcaagccgtcatcgcccaggctctgcatgacctgcgcaacgggcaattgcgccgctgcaaggcgatggggttcggcgatgacgacctggacgcgctcaagcacccgggcctcatcagcgtgttggtcaatgcatcagtgtcctggtgctccgtgtccatcaatcgcgaggtgctgcgtcgcctgctcgtccaggcgctcgacgtggagaaggaaatcgcgaccgttgatcgcatgctgcgcctgggcgcgagcaccgagatggtcagccgcttctacggtctgacccatcaggaagtcgccctgcgccgcgagatcctgagcctgcccaaacgcaaaggccggcatcctgtgctggacgaaacacaagacacggagctgtggcaacgctggaaagtgctcactgcgcagcagcctgtgggacgcaccgatgaggcatcgctcctggccgccgccatggatctcgccgaaggcatggccttgcccctgtcggtggtctgggccaccatcaagtcctgggtcgaccagggactggtctag

SEQ ID NO: 361771 - DNA, 1689 bp, Pseudomonas aeruginosa
atggctgacatgactccgcaggacatggccagcaaactgctcgccgcgggtttccagcgcagcggtccatccgctacgacgctgagcgatcccattgccgacacgcccatggtcgtgacactggaccaactgcggccctacgaccatgatccgcgcgtcaaacgcaatccagcctacgaggacatcaaggcctcgatccgcgagcgcggcctcgacgcaccgccggccatcacccgcaggcccggcgccgagaactacatcatccgcaatggcggcaatacccggttggcgatccttcgcgagctctggtcagaaaccaagcaagaacgcttctatcgcctctcctgcctattccggccctggccggagcgcggagagatcgttgccctcaccggacatctggccgagaacgagctgcgtgggggcctgacctttatcgagcgcgccctcggcgtcgagaaagctcgcgagttctacgaactggaggtaggcaacccattgagccagtcggagctggccaggcggctgtcggccgacggctaccccgtacagcagtcgcacatcagcaggatgcaagatgctgtgcactatctcctcccggccatcccgagcgtgctctacggcggattgggacgacaccaggtggaacgcattgcagtgatgcgcaaagccagcgagcgcatatgggatcgatacgcagcctcgcgcaaaccgacattgggcttcgatgacttcttcctcgacgtgttggcacagttcgatgcgcagccggacgacttctccgcccagcgggtccaggatgaactgatcggccagatggcagagcttctgggcgtcgactatgacaccctgagcctggacctcaatgagagcgaaagccgccagcgcgccttgatcagtgacccgtcttcagcccaacagcaagctgcggcgactcagggacaggcaggggcatcaagtccgccgcgcaattcgccacccgaggaaacacatcagccgactaagagctcaccgtctgctccgcgcgcagccccaggcgttgcgggccgatcgcccgagccgacgccggtatcgcccaccgccgcatccaacactcaatcagccgacgacgaatctcccaatgcaagccccgctgctggagttctggtacaggaccacatcgtctcccccgcgccgacgacagagcgcctgcaatcgatccagcgcttggtcgccgggcaactcggcgatacgttgccgccggacttcgagcgcaacgtgctgcaggccattcccgtccaggccggcgggctctacccgatctccgatgtctggtacatcgatcccagccttgaccttcccgagcaccttcgcgttcacatcgcgcaatttgctcgcgagattgcggacgaggtatcgctcgccgatcggatcgtcccatgcgacgacggcatcgggttccagtgccaacccgcatctggcgcgtcccggaccggcgcagatgtcctgatgcttctggcatccctcagcgggcaggggtctgccgcggagttggcgcgcctcccccattccctgccgcagcttctgcacggcaagggtgatccgaccaagcggctgagcgatacggctttggtcaagctgttccggctgctgcgcctggctcgacgactgctggatctcgaatccggcagtagcgatgcaggctcatga

SEQ ID NO: 361772 - DNA, 261 bp, Pseudomonas aeruginosa
atggcgaacgcgcatgagctggcccgcggtcacaaacggctgaaagcgttgatcgaatttgcggtcgctgagggctggcatgtcaaacgcacgcccggcgggcacctgaagttcaccaaggtcggctgttcacccatctacaccagctcgacagcaagtgatcaccgcgcaagtctgaatgcgcgttcgcagatccgacgggccgatcgagaagccggtgaccgtgcgttgggcgatcgccaggggaatcgccatggctga

SEQ ID NO: 361773 - DNA, 870 bp, Pseudomonas aeruginosa
atgaaggtcatctccgtgatttccaccaagggcggcgtcggtaaaaccaccaccgcggccaatcttggaggactggttgccgacgctggcttgcgcgtgctgctgatcgatctcgatgtgcagccaaccctatcgtcgtacttcgagctgacgcaccgggccagggggggcatctacgagttgctggctttcaacgagcaacgccccgagcaactgatctcgcgcacagtgattgaggggttggatctgattctgtcgaacgacgaccgtggcgagctcaacaccttgttgctgcatgcgccagatggacgcctgcgcttacgccaccttttaccgacgctagcccctctgtatgacctggtgctgatcgacacccagggcgcccgcagcgtcatgctggagatggcgctcctggcctcgaacatggcgctctcgcccgtcacacccgagatcctggcggcgcgagaacttcgccggggcaccttgcaactgatagaggacatcgcgccataccgtcaccttggcatcgagccgccggtactgcatctgctgatcaaccgcgttcaccctgtctcgtcgaacgccaggctgatccagcaggctttgcgcgagatgttccaggaacatgtgggtgcggacgtcctggacaccaacgtcccggcgatcgaggcctatccgcgcgcgtcaacgcgagggctgcctgtgcaccggatcgagtaccggaagccacccggccgagtcgctcctgccgcgctggacaccatgcgcgccctggcgagcgaactgctgccgacctggcaggaacgattcacgctggtcacaggcaagtccgccgacatcagagggggcggtcatggcgaacgcgcatga

SEQ ID NO: 361774 - DNA, 240 bp, Pseudomonas aeruginosa
atgccgcagacacctgcactgcaacctggcgagcgtcgcattctgcgactcgacgaggtcgaagccaaatcaggcttcaagcgcgcccacatctacgcccttatgaaaaaaggacagttcccccaggctttgcgcctgggggtgcgcgcagtcggctgggactcggccgaagtggatttgtggatcagcgagcgtttgaagaaccgggcgcacccgcctgctctcacgcacaacgcctga

SEQ ID NO: 361775 - DNA, 750 bp, Pseudomonas aeruginosa
atgcataaggacccgccaagatcgaaggtgttctaccgccctatcgaagctgcaatgcgatgggcaaatcttcttcgccacgagcaggcgatcttatctgcaatatcatcgtttcaatgcctgccagcaacgctagactttccgcgctgggaagagctgaagctatgtaatgacaggatatacgatgccgtctacaacggcgatcttccctatgggcgtgacggcatcactctcaatgaagaggctctcttcagctccggtgagttgactgttcgccatgtcgatctcaagcgctggatgcgcgcgcaataccctgaacaacgcccaagtttcctctttagccgagaggagcgagttgcgcaccctgtcatcacgttagagtccggccaggcaatgctggttgagcgccaagcgctacaggttgaactagcacaaagacgccagcaactggaggatctacaggagcgtcttaataggttgctcaccagctccgccaacactcggagtgatagccaggaatgtcttaccgaacgcgccgaatccacatatttgaatattattggtggaatgctcgagctacttctaggtcaatcaccaggtggaatgccctactcaaacttcagaactcaggaagctatcgtttcggcactcattgcacaccacagtggagctatgggtatagctgagcgaactcttaatggtaagtttgccctagctcgccgaaaaatccggaattcgaaagaaatttag

SEQ ID NO: 361776 - DNA, 6297 bp, Pseudomonas aeruginosa
atgatacgtttctgccccaactgccagagcgaacgctcgctttcggaaattttctgcgaaggctcgatccagggccagccctgcggctgggacctttccgccgaagccatccatcccgccggctggcgaccgcaaccggtgctgacccaggaagccatcgcgccacccgccagcgagccgccagcggcgtccgccccgctctgcgccaacggccacccgctgcaacccggcgacctgatgtgcctggagtgcggcgccgcgccggccgaaggcccgctgccgatgcaggccgaggccacgccgcagcccgccgtcacggaaaccctgatcgacggctggcgcctgctgcggcagatcgtcagcagcgacggcgtgcgcgagcgctacctggccgaacatgcggaaagggcccgtcaggcggtgctcaccctgtatcgcccgggcgccgagccggacccggcgatctacgacgtgatccgccgcctgccgcgcgaacacgtgccggaaatcctcgccagcggccgctgggacgagcgcgcctacgaagtggtcgaggaactcaccggcggcagcctcgccgagctcggcaccgtgctggaggaccgcgaggcggtgcgccacgtggtccgcgagctgggccacgccctgcacgtgttcaacgaagccggcctgcgccaccgcgacctgcgcccggccagcctgctggtgcgcagccacgagccactggacctggtgatcagcggcttcggctcggcccgcctgtcggagttcgacctggatatcgtctcgccgctggagaccagccgctacatggcccccgaggcgatcgccggcggcgtggcggcggcttccgactggtggagcctgggcatgatcctgctggagcagttgacccgcggcgcctgcttcgaaggggtcaacgccaacgccttcctgatccacgtactggccaacggcgtggcgctgcccgacgacctcgacccgcagttgcacctgctgctgcgcggcctgcttgcacgcgaccgccaccagcgctggcagtggccgcaggtacaggcctggctgaacggcgaggcggtggacgcgccggcctcggcggacagcgaaaaggacgacgccgaaggcgccagcatcgccctcggcgcccggcgcttccgcaagccgacggtcttcgccctggccgcggcccaggccgagcactgggcggaggccctcgaccacctgctgcgcggggcgatcgtcacctgggccgagcacatcggcctgtcgcccaggctgctcgccggcctgcgccaggtggcccagcacgaggggctggaggacgacttccggctgatgctggcgctcaagctgctgaacccggaaatcccgctgatccagcgcggcgagatcgtcacccccggctggctgctggagcatccgctggagggccaccggctgatcagcggctcggtgcccgacctgctcgaacagttgcacaccgaaagctggctgtcgcggctcaagacccgcgccgagaacgtccgccagcgtgccctgcaccagcacatcgaactcgcagaagaacagttgcgcatctacctgctgtcgacctcgcgggcgcgcctcgccgcgcagtggcaggagcgccagcgcctcctgccggacaccgagcaccccggcctgctggccctggccgagcgccgggtgatcgccgaggaagacctgatcgtcctgctcagcgccaacatcggccagttccgtgccgccgaggcgatcgtcgaggaagccaccggcctggcccgcgacgccgatgtgcacctgttcgacgcggagaccgcgcgcggcctgttgcagcactcgcggcaggagttgtaccgccgcgtcgacgaacgcatcagcggcttcgcccgcagcggcgtgcccagggtcgacgaatgggccgagcagttccgcctggagcggcgcatgccgttggcgagggtcctggtgctgctggcgatcccgccggaacagtggctggaaccgcagaagcagcagtacgtgtcgcagatcctcgatttcttcgagaagaaagtggtcgccgcagtgatgcgcgggccgctggtgcgcatgagcatcggcaagagcactccacgcatcgacctcaacgaactggatagcgcgcgacgccccgccgccgctctgctcgaccacctgctgcaacgcaacgcccgcgcggtgagcctcgacccggacagcttcctcgccaacccgcaactggaagtgcggctcaacgcgctgtcccggcaaagctcgctgtacaagcgcgacaccggcatcgacggcctctacctgggcttccccttcctgctcaaccgcgacccgcgcggcaccacccgcacgcgcatcgtgccgctgctactgtggccgctgaagctgcaactggaagtcggcagccgcggccaggtggcgctggccttcgacggcgaacgcgaggaagtgcgcctcaacccggccctggaaagcctgctcggccccgagccgtgcaagcgctggcgcaaggtcgccgacgaattgctcggccgctccgcgctgcgcgccgccgacgtgatggatgccttcggcctgctcgccaccccgcgtgcgcgggtgctggaaggattgccgccgagttccaccgaggtcacgccctaccaggaccaactggcctgcgccgcggtgctgttccacgtcaccttcatgggccaggcgatcggcgaggacctgcgccagctgaagagcctgccgccctccggcaccggcctggagaccgcgctgcgcctgcgcgagaacgacgagccggaagcccgcgagagcccgccggagttgcagcgctacttcaccgtggccagcgacccgtcccaggaggccgccgtgctgcaggcccggcagagcccggggctgctggtggagggcccgcccggcaccggcaagagccagaccatcgtcaacatggtcgccgacgccatcggccgccagcgcagcctgctgatcgtctgccagaagcacgccgccctggaagtggtgcacaagcgcctggtggccgagggcctgggccagcgcatcgtcatgctcaacgacgtcaaccgcgaccgcgaaccggtgatccgcaacatccgcgagcagctcgaagcgctgttcgccgacgccggcggcgcccagggctgggagcgccagcgcgagcgcctggcggcgcgtatcgaggcgctggaaggcgaactggaccgctaccaccagagcctgcaccgcgtggacgaggccaccgggctgagctaccggcgcctgctcggcgaactgatcgagctggagaaaggctcgccgccgctggacttcccggccctgcgccagcgcctggcggcgctggacatcggcagcctggcgcgcctggaggaaaactgcgcgccgctggtccgcctctggctaccggcccgctacgaaggcagcccgctggcgcaactgcgcgccttcgccaccgatcaggccaccctgcaagccttcgccgacagcctgcgcgccttcggcgaagcggagaacgcccggcagaaagccctcgacgaacacccggcgagcttcgaggtcgacgacccgacgccctaccgcgcctggctggcaagccaggtcggtaccctgctgaatttgcgcgaggagcagcgccagcgcctggcccactggctgccgctgttccgcgacgccacgccagggcagccgagccgtggcgacggcctgttggcggaggccgagcagatcgaacggcaactgcgccagctcgacctcgaacggcatgcgccgctgctgtcgccggccctcgccatgctcgaagagaacaacctcgaacgcttccaggcccacgcccgccaggtgctcgaggcacgcacctggctggctcggctcaacccgctgcgcctgctgcggcgcggccgcctgcggcgcttcctgcgcgagcacggcgaggccgacgacgacagccgcctggccgccctcctcggcgcctgcgacctggagcgccagtggcggccgctgcgccggcaactggcggcgctgcaacagagcctggggctggcgacagtcgccaccgatgccggtccggaactgaccggcctggccggccacgccagccagcagctgcgcgagatccagaccctggctcgtggcctggcccaagcgccgcgcgccgagcagctcgacgcggtgatcctcaccggcgagaaacagcgcttcgaagcactgctcggcgacctcgacgccgcgctgatccgccaggccgcacgccagctcagcctggacaaactgaaggtgctcgccgactggctcggcgacgaactgctggaacagctgcaccgcgccatcgccggcaaccagagcaacctgccggccctcggccgcctgcgcgaggcgctaccgcaactggtcgcctaccagcgcttccgtggccgcgccggccagctcgaagccgccgagctggaattcctggccctgctgcgccagcgccaggaacgactcgacgcgattcccgccgaagcactcgaagccacggtgcgccgcatgctcaatcgcgaagcgcggctgggctggaagcagcgcctggaacaagacaatccggaactgctgttcagccaggacgaagccagggccagggtcgccagcctcgccgaagccgatgtgcagatgcgcgcgctgaaccgcgaactgctcggcaagggcatcgacgccgcgcgcctgggcagccgcaagcaatgggaagacgtcacccgcctgaccggcaagcgctcgcggcgcctgcgcgagttcatcgagctgggcgccgaactcggcctgatgagcctgcgcccggtctggctgatgaaccccgacctggccagccgcgtgctgccgctcaaggccgggctgttcgacatggtgatctacgacgaagcctcgcagatgccggtggagttcgccctgccgaccctctatcgcgggcgggtcacggtggtcagcggcgacgagaagcagatgccgccgaccgcgttcttctccagccgcgtggaaagcgacgaggccgaacttttcgacggcgaagcgcccgacgaggacgccgacgaggagcagcgcgaagcctacgaggacacctggaaccgccgcgagatcaaggactgcccggacctcctgcaactggcgcgcaacgccctgcccagcaccaccctgcagatccactaccgctcggcctaccgcgagctgatcggcttctccaacgcctcgttctacggcaaccgcctgagcgtgccggtacgccatccgcaggccaacatcctgcgcatcaagccgctggaactgatccaggtgaacggcctgtaccagaaccagagcaacgagcgcgaggccgagcgagtcgtcgactacctcgccgaactctggcgccaaccctacgcggcgcggccgtcggtgggcgtggtcaccttcaaccgcaagcaggccgacctcatcgaggagcgcctggaactgcgcgccgagcaggacgagacgttccgcgccgcctacagcgaggagcgcgagcgcagcgaagacggcgaggacatgggcgtgttcgtgaagaacgtggagaacgtgcagggcgacgagcgcgacgtgatcgtcttctcctccaccttcggccgcaacggccagggcagcttccggcgcaacttcggcgtgctcgggcagaccggcggcgagcgccgcctcaacgtggcggtgacccgcgcgcggcgcaaggtggtgatgatcacctcgatgccgatcggcgacatctccgacatgctcggcacccagcgctcgccgagcagcccgcgcgactacctgcaaggctacctggaatacgcccgcgcactgtccgccggcgaattcgccggcaccggccagctgctcgagcgcctgcaaaccgaccgcagcgaccagcgccgccagcactaccagcggcacgacggcttcagcgagatcgtcggcgagtatatccgctcgctgggctggtccgccgcgcccgccagcgaaggcgacgccttcggcctcgacttcgccatcgagaacccggccaccggcctttacgccatcggcatcgaatgcgacgccccctgccacccgctgctggaacgcgcccgcgcccgggaaatctggcgcccctcggtgctgcggcgggcgatcccgtacctccaccgggtttcctcccagggctggtaccacgacggcgacaacgaacgcgcacggctgcgcgccgccatcgagaaggccctggcgcccagcgcggaaacccatcccacggcagcagcggaggcctcccaatga

SEQ ID NO: 361777 - DNA, 1227 bp, Pseudomonas aeruginosa
atggcgcccgagtaccgggagccgtgggtgctgcgagcgatcagtgcctctggtcatgctgcgctcaagggcaagcccgaaacgcaggcgctttcactgccatcattgctcgggccgcggctgttgacgctcgttcgcgagcgcttcgcacacgaccacgaactgcggcgcaggttcaggggcctggcgcgctcgatgattgcggatgcgcaggacacaacacggccgccagaaatcgtgctccagcaattggagatgggcctcatccgacgctctgcggtcaaaggggaacttgagcccgatgatctgcaatggctgatcggtcatggtttcgttcgtcctggcatgcacgatatagcaggtgcgacggttctggttcggctgccggagctgctggccagcgagatggcgcacgcgctggccgatgaagtcgtgaaacgctcgaaagaagatctgcatgagaccgctgcctggatcgccggcgccgcaagtaatcttccgcttggcgaggtggtggcagcgcaagccattgtggatgcctccaaacgtccgaacggcctgcctgtcggccttatcaacaccctggtgaagatgcctcccgagcgcgaagtgctcgacgcgggcggccactacgcgatggtgctacccgatggcgccatggtggacattgagttccagtccgatggcaaaggcgtggtcatcatcgatggggagcagcacgaaatcgacctcggcgatgaggaacaggtcacctacaagaacatccacccatggctgatcctgtctcacgttgcgtcaacgccgttcgaggtggtcggggaacatggggccactagagaagacccgaacctgctgctgcagattgggacgtgccctgtgcctctacgtggaaatcgggggccgcaatcgctgcgcatgcttccgacgctggacatgcccgatggcacatcaatcgtgcattcggacgccggggtcatagagcccgtcacgctcggcatactcgactatctttccgcgaccgaggatcaggcagacagttgggtcgcgactgcggccagttccggctcagttgctttgctctcccgggtccatgtcgcgctgtgggttctggccagcttcgagactcacgcgagaagcgaatgggcgaaggctcaactcaaaggcgtgattcgtccaaaactgcgggaggccataggtgatgcggaagaaccgccatcacaaggctaa

SEQ ID NO: 361778 - DNA, 3156 bp, Pseudomonas aeruginosa
atgatcgaaagcaggatctacagcaagctctctttactctccgccgcagttctgatggcactcgctgcctcagactcgaacgccaacaacgccaatgcggccaagactcactatggaccacagaccggcggctctaaagcaaaaatcgcacagattcaccgacacccacaatcggaaaaaaccgcaagcaactattcgcagatgcgccactcggcgggaggccgcatctcgctcgccaaccacggcatcgctcacagcaatcgcggcacaggcaccgtactctacgatcagacagcttcgctgacttcgaacggaactccggcaatcaactgcacgaccaaccgctgcggttgcgcgtccagcagctgcagtgaactcacgactcccagcgcggatgccgcagacgatttcgtcgtcggtgtcggcggctggaccgtcaccggtttcggtatcctgtcgttcaacttctactcgacggaagtcaccgaatctgcagacgtctacgtctacccggatgacggcggactgcctggcgcgacgccggtctgtacgtcgctcgcgtcgacgaacaacccgagcatgtacgactcccacacgacgctggccggcctcacgctgaacacgccgtgcgatctcgacgccggcacctactgggtctccgtcgccttcatcaacggcgtcggcgacacaaactggccgttctactggctgcagaccacgaccgcgaccggggccgaaggcgcctggcgcaatcccggcggcttctaccccacggatacggcctgccccgattggacctcgctcggaacctgcgtcaccgcctttgccggccgtgatttcggattccaggttctcggcaccacgggcggcggcggttcggacctcgaactctctctgacgctcgcgctcgacaacggcgatcctgcgcagtgcggcacctcgacgaacctcagcgtcgtcgtcggtgaccaggtcaacttctgctacacagtcaccaaccataccggtgtcgacctcagctaccagatgctcaccgacacgctcggcggcacgctgttctcgctgacgcgtgaagacctgtccgatggcggcagcatccagttcaaccgcaacgtcaccgcgggaccgtccaacaacggcaccgtgacgacgacctggacgtcgcaggacggcacgctgggctacggctacgacgacaccggcgcgtccaacttcgtcgacatctcggcaacgggcacgccgctgaacctgtccgacgacggccacaccgacgtcaccatgccgttctcgttcccgttctacggcacgacatcgaacgtgctgacgatcggcaacaacggcgcggtcaacgtgggttcgccggggtctaggatcacgtacttcaacaccgcgttgccgggcgcaatggacgacttgaacgcgctgccgtcgctgattccgctgtgggacgacttctacacgtccaacccgggacaggtctactacgccacgctcggcaccgcgccgaaccgccagttcgtcatcgagtacgacgcgcagttgcattacgatggcgcaccggacaacaccgacagcgcgacgttcgaagtcatcatcaacgaagcgacgggcaacttctcgttcgaatacaacgacgtggagtacaccgcgaacggcgcgttcaatggtaccgacccggccgtctgcgacgggggcctctgcgccaccgtcggcgtccagcagaacgcgtcgatcgccaaccagtattcgttcatgaccgcttcgctgcatgacggccagtcgatcgcatggtcgccgagcgtcatcaacaacctgttcaccgcaacggcgagcgcaacgctcgatgtcggcgcaccggtcatctcggtcaatccgggcacgctcagcgcgatcgtcgacgctggcggcacctcaaccgcctcgctgacgatcggcaacaccggcaaccgcgacctgaactggaccatcgacgaagtcccgagcaccggcaacgtgcgcgcgcacttcccgaccacgccctaccacgcacgggcattgactgaggaacagcaccagaagctgtccggcaagcgggcaccggttctgcgcggcaaggacggcaagccgctgttcacgcacatcggtccgcatccggcgggtatcgcccaggttccgtcctacggcgacggcggcggcaactacgactcgttcgatgcggcggctcccgatccgttcaccaccatcggcccgattggcggcgactactacggcggctcgttcgcgaacaacgatttcagcaaggaatacctgatcggctacagcaccggcggcttcgcgtcgatcgacacgaccaccggcgcggttaccgtcatcaatccggatccaggcaccggctttggttgtagcgcgctgcgctgggatgcgtcgaccagcacgatgtacggcctctgcacggatcgctccggcccgacgacgtacctgtacacggtcgatctcaccaccggcgcgttcacgcaggtcggcgagtcggacggcgtcttcctggtcagtgcggcattcgaccaggcgggcaacatgtacggcctcgacatcacgggcgatcagttgctcgcgatcgacaagaccagcggcgccttccaggcgatcggcccgatcgggttcaacgcgaactacgcgcaggacatcgacttcgatccgtccaccggcgtgctgtggtacgcgggctacgacgggaacgccctgggcgtcatgtacacgctggatacgtcgaccggcctcgccactgaagtcgctccgttcccgaacggcaccgaaatctcggcattctcgatcgccgttccgtcccgtggctgcgccgctccggaagatgtgccgtggttgtcggtggctccggccagcggcacgaccgcaggtggtgcctcgaccgcgacgaccgtcacgttcaacgcgaccagcctgacgcacggcgtctacgatgcccacctctgcgtccacagcaacgatgcgagcaatcgcctcattgcggttcctgtggagctgacggtcggtggcggcgatacgatcttcaaggacggcttcgacggttcgggcggcggcaccaatccgaacgtcgcgtcagcggcgtcgtcaatctggatctcaccgactagttcgatggcctctatgtcaacagggtga

SEQ ID NO: 361779 - DNA, 270 bp, Pseudomonas aeruginosa
gtgggagcgccgggcggccgcgacttgtccgcattgccggcgcgtaaacgtggtttcggcatcgtgttccagtcgtattcgctatttcccaacatgacggtggccgaaaacgtcggctacggcctgcgcatacgtggcgaaagccgcgaccgcatcgccgcgcgggtgacggaactgctggcgctgatcaagctgcccgactacgcgcatcgctatccgcaccaactgtccggcggccaacaacaacgcccagcagcgcctcgtagctga

SEQ ID NO: 361780 - DNA, 786 bp, Pseudomonas aeruginosa
atgacatcagaaagtaaatcttgggtacttgtgaccggggcatcaagtgggttcggagctgagttcgccaaacaatatgcggcacagggtcggtcgctcgttctggtagcacgcaccctgagtaaactcgaatcactcgctgaagagttgcgcgaaaccgcgaaggttgacgtgatcgtagagcaagtagatctatcctcgatttacgaggtcacagacctccatcagcgtcttcgtgagcgtagcattgtggtcgatgtgttgatcaacaatgcaggccatggattaaatggctccttcctggatcagcctttggactattcattagcaatgatcgatcttgatattgctagcctaacagcgatgacgtacctcttcggaagagacatgcggtccaggaaaacaggaagcattttgatggttgctagcctactttcctatcagggcgtcaaaaactttgccgtctactccgctgccaaagcctacgtgctgagaatttcagaagcgcttcatcgcgaactaaagagcgacggggtgatcgtaacggcgctttgcccgggcatgtcggacactgggtttgctgagcgcgcgaagcaaacacttaccccggcactaaagatgatcatgatggatccccagcccgttgttcgtgccgggatccgagcattacaagcaggccgcatgagtgtggttccgggatttagcaacaaggctatcacggctttgacctgggctactccgcgctggctgcaccagtccatcatgtctgcagtaatggggagataa

SEQ ID NO: 361781 - DNA, 1071 bp, Pseudomonas aeruginosa
atgctgagcctcctgcaagccatgctccaagcacattgcgctgcattgccttcggggttgacacagcgtcgacatatccgtcgcgccatggcgtacgacaggtgcggccaggggcgcaggaacgcccggctgaattttctacgccagtctccggaacataaggaaatggaccttcgccacctgcgctactttatcgccgttgccgaagaactcaatttctctcgggctgcctatcgtttgcatatcgaacaatcgcccttgtcgcgagcaatccaggaattagagctcgaattaggggtgcaactcttcgaacgaaatcgcagagggacacgcctgctgcctgcaggtacagctttattgcaagatgcccgaaggcttttcgccaatctcgaagttgcacgtgaaaacgtcagagcggtcgcaagcgggcatagcagcacactccgtatcgctatttcagatggagcaatcgacctatggctgcccacgcttctcgcgcgatgccgcgaggaagaacccgaggtgggtatcctgctgactgagatgccgctgtccgagctattgcatagcttgcgagtgggtgattgtgatgtaggtctcgcgcgttccgacgaggtcggcgacgacatcgttcctgaactactcgggaaggatgcgttaatggtggccgtcccatctcgacatccagtgttgattcacaaaaagatcccgttgaccgaggttggtcgttatcccctcatagcatgccatccgaagatcttcgagggtaagacgagacagattgatcgtttattaaggacgctggacaaagatcccgtgatcgctcagcgcgttagctctctggatctctttctgacactggtggccgcaggatatgggctaggactcgtaccggccgctcagggcgtaatgtgtcgtcatcccgacgttgtgcttcgacctctagactggcctgatgcgaccctcgctacatacttactgcgtcgggattcacctatatcagaacccttagatcgcttcattgctcgcgcacgcgatttggcgtctagaagttgcggcgaagaactctga

SEQ ID NO: 361782 - DNA, 1461 bp, Pseudomonas aeruginosa
atgttctccccacgctctcttgccctagttatgagcgccagcctcatgacaggttgtgcggttggtccggactaccaccgcccagacgctccgctctcggcgggatacgtggctcagccggcagttgagcggcgcgctgcggcgacacccgccgaccttgccgtttggtgggaaagctttggagatcccatgctgagtcatttcgtcgcccgggcgcttgcgcagaaccttgatcttgcacaagcgtcggccagagtcagccaggcgcgcgccggactcggcgccgccacagccgcattattgccttcagccagtatcaatggccaggctggacgtgcttatcaatccattgaaaccccgctcgggcaggtgctcaacactaccccggactttgaccgatacgggaactcgtacgaggccaacctaggcgcaagctgggaactggacatattcgggggactgcgccgcggtcgccaagccgctctcgccgagtaccaggcctcggaggccggagcagccgctacgcgactggcggtcgccgcacaaaccgccgacatctacgtcaccatccgcggactgcagacccggctggacattgcgaaccgacaggtcaagactcaacaggatctcctggaaaaagtccagctcttgcacagcaaaggattggctgcggagtatcaggttcgacagaccgacggttcgctcgcacaagtccaggcgactatccccgtactccagaccggcctggatgccgcaatgaacgccctggatgtgatgctgggcacacctccgggtactcatcgcacagaactggcagctattggtgaaattccgagggctccgcagatcagctccgctggaacgcccgctgatctgctacgccgcagaccggacctcatcgtggccgaacgccgccttgctgcgtccaacgcgcgcatcggtgttgcgatctccgagtattacccaaagttctccctcaacgccctgctgggtagtgcaacatctatttctagcggcaacctgctctccaatggcgccagccagtcgtcagccgtgctgggcttgcgctggaggctctttgacttcggtcgtattaacgcacagattgatcaagccaaaggccaggaagctgaagccttggcggcttaccgccaatcagtattacgtgcgaccgaagatgttgagaatgcattctcgtccctcgtcaaccgagaaattcagacggccacacttgctcgcggcgaagcttctctgacccaagcacgccaatcttcgttcatcgcttaccagaagggcacagccagtctgatcgatgtcctccaggctgacggcactcttctacagacttctgacgccagggcgcaggcgcagacggagtctgctcaggcagtgatcgcggcctttaaatcactcggcggtggttggcaggcacctggctccgagtctgtggcgattcaatga

SEQ ID NO: 361783 - DNA, 615 bp, Pseudomonas aeruginosa
atgactgaaaacagcaatacatcccactcgcgtgggccttcggagcacagcgtccgcgatcagatcgtggacgctgcgacagagcatttcggtcactatggttacgagaaaaccaccgtgtctgatttggccaaggccattggcttctccaaggcgtacatctataaatttttcgattccaagcaggcgatcggagaggtgatctgctcgaatcggctcgctaccatcatgcaggtcgtcgactcggtgattgccgactctcctacggcctcagagcggctaaggcggctttttgtggcgttgatcgaaacgggtagcgatctgttctttcgtgatcgcaagctctacgacatcgctgctgttgctgcgcgggatcagtggcctgcggtatacgagctcgaagcgcacatgcgccaggtgatccagaacatccttttggaggggcgcgagtccggcgagtttgagcgtaaaactccgctggatgaggcggcaaatgccatctatctagtgatgcggccttacgtcaatcctgtgcaactccagtacaaccttgaaatggcgccagtgtcggccgtccagctatcagcgctcatcttgaggagtctgtcgccatag

SEQ ID NO: 361784 - DNA, 1110 bp, Pseudomonas aeruginosa
atgcttcggctacgacctgcctccattgccgtttgcttgctgcctctcgtcctgacggcgtgtggcaagtcctccacggccgatgatccccgcactcactctccgctggtgagatcagcgccggtctccagttcttcagggtccacccgttccttcactggcaccgtcgccgctcgcgttcagagcgacttaggctttcgagtctcgggaaaagtgcttgagcgcctggtcgatactggtcaggccgttaagcgcggtcagccattaatgcgccttgacccgatcgaccttgagttgcaggcgcgcgcgcagcaagaggcagtgacggcggctcgggcacgagccaagcagaccacggacgacgaggcgcgctatcgcgatttggtcgccgcaggcgctgtttcagcttctgcctatgaccagatcaaggcggctgccgactcggccaaggctcagctaagcgctgcgatagcgcaaggcgatgttgcccgcaatgcctccggctatgccgttctgttggcagatgctgacggagtggtgatggatacgctggctgagcccgggcaggtcgtcagtcccgggcagccggttgttcggctggcgcgggcaggccagcgagaggttgtcgttcatctgcctgagacgctgcggccggcctcaggatcgacagcacaggcgacgctttatggcagtggcacaagcgctgtacccgccaagttgaggcagctttcgaactctgccgatcctctgacgcgtacctttgaggcgcggtatgttcttgatggtgcgttggctagcgcgccgctcggtgcaaccgttgccctacagatcgcggagggagcggcgaacaaacaggtgctgcaggtgccaatcgctgctgtctacgacccaggaaaaggaacaggcgtttgggtcattgcgggcacacccacgaaagtgacttggcgtccggttgaagttctgagtctcgccgatgattccgcacgcgtgtccggtgatctcaaggttggcgagcagattgtggcgttgggagcgcacttgctgcaggacggtgagcaggttcgactggcctcgcagagtgacgtcagtgcggccgggagtcgtccatga

SEQ ID NO: 361785 - DNA, 1107 bp, Pseudomonas aeruginosa
atgagcgaggggcgtttcaacttctcggcgctcgctgtgcgcgagcgctctatcaccctattcctgatcttcctcatcggcgcagccggcatcctggcgttcttcgggctgggtcgtgcggaggatccgccgttcacagtcaagcaaatgacggtcattactgcttggcctggtgctacagcgcaggaaatgcaggatcaggtggctgagccgctcgaaaagcgcatgcaggaactgaagtggtatgaccgaacggaaacctatacccggccgggtatggcttttaccgtagtgtcgctggccgatagaacgccgccatcggaagtccaggaagagttctaccaggcgcgcaagaagctcgatgatgaatcgcgaaaattgccagcgggtgtaatcgggccgatggtgaacgacgaattttcggatgtcactttcgcgctctttgcgctcaaagccaaaggtgagccgcagcggttgctggtgcgagatgcagaggcgttgcgccagcgcctattgcatgtgccgggagtgaagaaggtcaacatcatcggtgagcaggctgaacggatctttgtgtccttctctcacgatcgcctcgcaacgctcggggtatctccgcaagacatcttctccgccctgaacaaccagaacgtccttacgtctgctggatcgattgagacgaaggggccgcaggttttcctgcgtctggacggtgcattcgacaagctggagaagatccgaaatacgccgattgtggtgcaggggcgtacgctcaagctatcagatattgcaacggtagaacgcggctatgaagacccggcgactttcctgattcgtaacaacggtgaagaggcccttctgctcgacgtcgtgatgcgcgaagggtggaatggactggatctaggcaaggcactcgacgccgagacggccaagatcaacgagaacatgccgttgggtatggctcttgtgaaggttaccgatcagtctgtgaacatcgcatcggctgtcgatgaattcatggtcaaatttttcgtcgcgctgcttgttgtgatggttgtttgcttcgtcagtaggtcgcaagcgcacgcttcttgggcacatcgatga

SEQ ID NO: 361786 - DNA, 279 bp, Pseudomonas aeruginosa
atgcgcacactgatcactattggactgctggttgtctccggcatggccgccgcccaacctcagatgggcggcggcgccatgcgtggccgcatggcaaacgtactggaaagcaggctccagcaggccgacgccaaccacgacggaaagttgacaaaggaagaggccactaagggcatgcctcgcgtggcccagcatttcgctgagatagatacagatggaaaaggttacgtgacgctggatcaactcaagacgttcatggcgcaatctcaaggccagtga

SEQ ID NO: 361787 - DNA, 633 bp, Pseudomonas aeruginosa
atgccgacagaaaaaccacaaggaattcgggcccagaagaaggcagagcgtccaggcgagatcctgcgggcggcgttcgccgaattcgtcgacaagggtttcatcgccggacgagtcgaggacatcgccaagcgcattggtgtcaccaagggtacggtgtacttctatttcgagaccaaagagcggttgttcgaggaggtcatggtaagcgtttcggcagccatagcgagcgatattgcatccattccgctcgatacgcggggaacctatgtcgaccagttgaagaatttcattctttccgtctatggcatgttggccaagcacccggaaggtcgcgaaatggttcgacttctcattgctgaggcgccccgcttcccggagttgactgaaaagcatcacgatcatttcattggcccgggcgtggccgctatcaaacgaattgtcaccaatggcatcgctgcaggtgagttcactgattcggcgttggctgactttccgcagttagtgatgagccctatcctggtgttgacctttgggcagttgcgttttgcagggcgtaggcccattgacccaagaaagttcatcgaagcccaccttgagttggtgatcaacggattacgggtgaggtgttga

SEQ ID NO: 361788 - DNA, 1023 bp, Pseudomonas aeruginosa
atgaaagtaactctagttgagcggtcgccgtgcatgcgcactagcgggaatcctgtagatgtgcgcggcgaagcattcgccacggcagaacggctaggaatcgttccaagcttgcgcgcagtcgctactcgcgtggagcgatttgcctttattgatgcgcgaggacgaacgcgcgccgaaatcaacagtcgagccccaggcagcagccgtgaagtagaagtgccgcgcgccgatctagcaacagctctactgaacgcattgccagacgacgtggaggtccgatttgccgacacaatagtccgaatcgaccaagatgaaaccggcgtaaacgtaacgtctgccagaggcatagaccagcacgtcgatctattgattggctgcgatggtcttcattcttccgtgcgcgcgctcgcacttgatggcaacgagcgtcatattcaagcgttgggcctctatgtcgccagcgtccacacaaccgaaatagccaacgatcccacccgcgtactcatctataacgagccagatcgtgcactcgtcgtacaccctgccctagggtctgcattagcgatgttcctgttccgcagtggagcaagggtaggacacaccgatgtcgatgcgcagcgcatgctgctgcaggactgctatgccggtggacggtggagaaccgaggagctgctcaaagcttatgcagataccgaggatgtctacttcgacgcagtatgtcgcgtgagcctgccccgttggcgagaccgaagagtcgcactcctgggcgatgccgcgtcatgcgcttcgctattcggcaacgggtctagcctggcgatgctgggcgcggagacgctggccgacgcactggatagaaatcgcggcgcccccactacagccctggcactgtatgaggcccaacatcgttcacgtgtagatccctatatccgccgcatgggaatgacagggcggttcatggtccccagaaccagagctggcatccaactgcgcaacttcgcgctgcagctggtaggacggtag

SEQ ID NO: 361789 - DNA, 426 bp, Pseudomonas aeruginosa
gtggacgacgaagagcggatcgcgagccaggaagcgctagaagagttcctgcagagtgatgtaatcgtcatcggagctccgatgtacaacttcacgatcccgagccagctcaaggcctggatcgatcggattgtcatacccggccagactttccactataaggatggtcgagcgcaaggactgatgggcgacaaacgagtgatcatcgccttgacccgcggcggtgtttttgagccctcagcgccaagtgctgcctttgaatacgcgagccgctatctattagccattctctctttcatcggtatccatgcgccggatgtgatcgtcgccgaaggcctacaactgggtaccgatcagcgcgccattggcctcgaacaggcacacgctcatattgacgccgccgtcagcaaactggccgcagcttaa

SEQ ID NO: 361790 - DNA, 408 bp, Pseudomonas aeruginosa
atggatttgaccgtgctcggcacacatagtcctgaagattgcgggcgggttagccgtgttttggcacgcgtgggtgacaaatggagcgtgctgatcgtgatcttgctacgtacgggacctcgccgtttcaatgacatcaaacgcaacgtttcagggatatcacaacagatgctaacgagggtcttgcgtggcctggagcgcgacgggatgctgacccgaaccgtttacccgacagtccccccccaggtcgagtacgctttgaccgcgctcgggcaatcacttggggagccagtcctggccttggggctgtgggcgcagcgacacatcgatagcatcgaggcggcccaagcagcgtttgacgataagcagcgtgatgctcagccgcgtatgacaagccaagccacctaa

SEQ ID NO: 361791 - DNA, 1581 bp, Pseudomonas aeruginosa
gtgatcgccgacaacgacatcgactcgctggacccgcaggcactgcgggaggcactgcgcgctgcacaggcccgactcgttgtcacctcggagcgggtcgctcggacagagcgtgaggtgacgttcaagcagttcgtcatcgacaagctcacgcatgagatggcggtgctcaaacgactcaagttcgcggccaccagcgagcgcttcagtcctgagcaagcgagcctgctggaagaggccatcgatgaagacatcgaggccgtcactcgggaagtcgaacaactggtccctgagagcagagaccgccacgacaagggccaagccaagcgacgcgcgctacctgcgagcttgccgcgacgcgagttcgtgcacgagcccgagaacacgacatgcagctgcgggtgcgagctcaagcgcatcggcgaggacgtggccgagaagctcgattacacgcccggcgccttcagcgtagagcgctatgtgcgcggcaaatgggtctgctcgaagtgccagacgctggtccaggctcccgtcgccccgcagatcatcgacaagggcctggccaccgccgggctgatggctcacgtgacggtggccaagtacgtcgaccatcagccgctgtaccgtcaggagagcatcctcgcgcgcgccggctacgcgatcccacgctccacacaggccgagtggatcggcgccatcggcgtgcagttggcgccgctggtccaggccatgcgcgacgacttgctgagccggcgcgtgttgcacgccgatgagacaccggtggcgatgctcaagccgggcctgggcaagacgcaccgcgcttacctgtggagctactgcacgacggcctgggacgacatcaacgccgtcgtcttcgacttcgcagagagccgcgccggacgacatgctcggcgcttcctgggtaccgaggaagatggcagcggcggttggcgcggcacgctcatctgcgacgactactcgggctacaagcagaccatggctgccggcgtgaccgaggccggttgcatggcgcatgctcggcgcaagttccacgaactgtgggccaaccacagcagcacgctggcggagcatgcgttgaagctagttggcgtgctctacgacgttgagcgcgacatcaaggacttgcctgccgacgagaggcatcgaatacggcagctcagatcccgcccggccgcggacttgttgtacgcgtggttgatggctcatcggcagaaggttccagacggcactgccacggccaaggccatggactacagcctcaagcgctgggcagcgctgaccctgttcgtcgacaacgccggactgagcatcgacaacaaccgggtcgagaatctgatccggccgatcgcgttaggcaggaagaactggttgttcgccgggagcctgcgcgccgggcagagggccgcggcgatcatgagcttgctgcacacggccaggctcaacgggcttgagccattccagtatctcaaggacgttctggaacgactgcccacgacgccagctagccgcatcaccgagctgctgccctaccgctggaggcccgagggacagcccgcctga

SEQ ID NO: 361792 - DNA, 996 bp, Pseudomonas aeruginosa
atggaaattgaaggcgcagcacgagcgagccaattggggcgacaaacgcctagccaacttctaaccggaaaaattgtggcgctcttggctggattggctgccattggcatgctgtccacgaacatcattcttcccgccttccccgaaatcagccaggacctgggcgtgagcgcacgagagcttggctttacgctatcaagcttctttattgcgttcgcactgggacagttggtagtgggtcctctggctgatcgctacgggcgccagaaattagtgcttggagggctctctgtctttgtggggggcactgcgctgggcggtttggccaccacgttggagatactgatcgtcgcacgagtaatccaagctctgggggtgtgcgcggtatccgtgttgtcacgagcaatagcacgtgatttgttcgagggagaaacgctggcacgtgcgctgtcgttgaccatgattgctaccgctacggcgccggggttctcacctttggcaggcagtattctgtccgccacgctcggttggcgagcgattttcatcctggtcggcttagcggcggtcttcctcgcggtcttctacgttcgggagcttggcgaaacccatcccgctgatcgccgagcatctcattctgccggccaggtcgtacttgcctacggcaagctggtgttagacaagcggttcatcctgcctgcgctctcgatgagcctactgatgagcggactattcgcatctttcggcgcggcgccaatcatcctcatggaagggttcagcctttcagccgtacaagctggtctctactttgctgccaccgtatttgtcgtgttcgcggccggaatggccgccccacgcttggcccatcactacggcccagccaacatcactgtactgggcattgcctgcgccatgatcggcggcatccttctgttcgcaggaccggcgaatccgagcatgtggtcgtatgtgcgtgtgcgtccggtgaagtcatcttga

SEQ ID NO: 361793 - DNA, 801 bp, Pseudomonas aeruginosa
atgtctgaatttatcccagaaggaaaggtcgttatcactggggcatcgtccgggattggggcggtctacgccgatcggttggcggcgctaggtcacgatctaatcttggttgctagaaacacggagcgacttgaggcgttggcggaaaagctgcgcggtagaacgcaaagaaacatcgagattatttctgcggacctgacgagcaaagtcgacctcagacgagtggaggatattctgaaaaatgacgatcagatatcgacgctaatcaacaatgctggcttcggcggagcctcttcgttgctcacatctgatgtggatcggatggagcacatgatcgaccttaatgtaaccgccccgacgcggctgacatatgccctcgttccgcgcctcgtggagcgcaagaatggtgtgattattaacatagcatccattgccgccgttgcgcccgaaacattaaatggagtctatggcgggacgaaggcatttgttcttacatttacgcggtccctccaccacgaattgtccgataagggaatcagagtccaggccgtattgccgggtgcaacgcgaactgatttctgggatatcgccggtcagccggtcgagaatctgccagcgtctatggtgatgtctgctgaagatatggttgatgcagcgctgactgggctggggatgaatgaactcatcactatcccgtcgctgcctgatgtccaggattggcaagccgtggataactcgcttaaggcattgcgcgggaaactctcgctatccaagcccgcaaaccgctacctcaaaatctaa

SEQ ID NO: 361794 - DNA, 936 bp, Pseudomonas aeruginosa
atgggtccattagataaaggggtgagcgtgaatattgataggcgcgatttcataattggtgcaggctccgcgttggcgatgagtactgtttcaggggctgtccctgcggcgcaattgaaagccgcagatggtattaacgaaagaagagatatggcaatagatcctttgtcgctattaatcactggcgctggtagtggttttggtcgcgatttgtcactcaagcttgcggctcgtggtcatcgggtcatcgcgacagttgagcttccggcacaagtgactcagttgcggcaggcggcgcagacactcggaatcgagttgcaggtcgaaaagatagatatcttgaatgagcgagataggcatcgcattgcttcttttgaggtcgacgtccttatcaataatgccggcatcggtgagtctggggcagtggtcgatatccccgtcgatgtcataagatctcagttcgaaacaaacgtgttctcggcatttgatttaacccaaaaattcgctaagaaattgatttccgaaaagaggcgcggaaaaatcatctttatttcttcggttgttggaatattttcccaacaatacgctggcgcctacagcggatcaaagcacgccattgaagcgttggcccaagcactccagcaggaattgaaatctcatgggattcaagtgcagtgtataaatcccgggccgcatgcgacgggctttaatgacagaatgatggagagctataagagttggtttgatccggccggcgcggttattgaccaccgaccgttggcagtggactttaaacaatttgatccccagacggctattggtccaatgatcgagatcatagagagcaaggggggcaactttagaaatgtggttccggagtcctttgtcgcggctaccaaaagcctgcaagcaaaagtttgggacctgaaggtgtag

SEQ ID NO: 361795 - DNA, 600 bp, Pseudomonas aeruginosa; identical to SEQ ID NO: 325099

SEQ ID NO: 361796 - DNA, 1383 bp, Pseudomonas aeruginosa; identical to SEQ ID NO: 82647

SEQ ID NO: 361797 - DNA, 951 bp, Pseudomonas aeruginosa
atgaacacccataagaatgcccgattgacctacttgcgtcgcctggagatggtccgagatctcaaagaacgtggcatgagcgcatcagatgcaggcgccaagcatggcgtcagtgccgtgacggcacgcaaatggctggcacgctacctggcagacggggccaatggtctgctggacaaatcttcgcgccccgagaagtcaccgcgcgccatcgaaccgcatgtggcgctggccatcgtggagctgcggcgcaagctgtgcttgcaagcctacatcgcctcgtacatgggcgtgtccaaggcgacggtcagccgtgttctacgtcgagccgggctgtcacggctgagcgatcttcggccccaagagcccgtgcaacgttacgagcgcgagaaccccggtgagctgctgcacatcgacatcaagaagctcgggcgcttcgagcaggtcggtcaccgcatcaccggcgatcgctcccagcgcgggcgaagggtcggctgggactacgtctttgtggccgtggacgaccacagccggctggccttcacgcaggtctaccccgacgagacgaagatcagcgctgaggcattcctgcgggccgcggtaggctacttcgccagtctgcgtgtacccatccaacgcgtgctgacagacaacggcatgtcgttccactccgcgctgtttggtgaggcttgcctggagctgggcatcacccaaaagttcacgcgggcctatcgcccgcagaccaatgggaaggccgagaggttcatccagtctgcgctgcgcgagtgggcctatgggcacacctacgagaactcacaacagcgctgcgcggccctgccgatttggacgcatttctacaactggcacaggccgcaccacggaatcgatcttgtgccgcctatctcgcgtctctcgatgtctccaaagaacctcttgacactccacagctag

SEQ ID NO: 361798 - DNA, 699 bp, Pseudomonas aeruginosa
atgcaagcactttactctgaatatttagaggcccttcgcgacatctcagaaatcttagcttcaggtcgtcgtatatccatcgatgaaagcggatctttgattgttttggtagatcaattttcttttgctagtaaagtggtttatttgtcgacaaggcttccgagaaatatcctttcaaatataaattgggggtggagggggattagtacaggggaaatggcttacacccatcttttctccgagacatataattgcgcaaagaagtcaagaaaagcaaactatataatagtaattgacgaggccgatctttatctgcaccctgagtggcaacggggctttcttgactcctatcttgggttgctagataggttggattggaaaggcgcgctgccacagataatcatcactacccactctcctattattgtaagcgattttttacctaaagatattgtgtcattagtaaaagacgctggcggcaaggttgagattaaagagtcgcttggctttggaaccaatattacaaacttgtttattgatggaatgcaccttactgccacggtcggcgagcactcgaggaaagccatcgtctcgcttgtagaaaaatccgaatcccaaacattaagctccttggataaggcgctaattaaagggatgggcaacaagtttgtcagggagtaccttttgcaaaatgattaa

SEQ ID NO: 361799 - DNA, 1098 bp, Pseudomonas aeruginosa
atgatcggcctcgaagatcgccaagaacatgcccgcaacattgaagccgcgcgccgagccggagcccggctgcaccaggcctgcgaggtggtcggtatcaccgcacgcaccctgcagcgctggaatgctcaccagggcctcgaaacgggcgatggcaggcccgccgcggtgcgcccgacgccctcccacgcgctgagcgaggctgagcgcgccgaggttctgcgcgtggccaacgagccgcgcttcgccgacatgccgccggcgcgcatcgtgccgatgctggccgacgagggcgtgtacatcgccagcgaatccaccttcgcacgcgtgctgcgcgcccagggccagatgcgccatcgagggcgggccaaggcgccgcgcaagagccggccgccgaccacgcacatcgccaccgcgccgcgacagctgtggtgctgggacatgacgttcctgcccacgcaggtcgccgggcgctggttcttcctgtacctgatcctggacgtctacagccgcaagatcgtgggcttcgaggtgcacgaggacgacgacagtgatcacgccgcgcggctcgtgcaacgcaccgcgctggcggagggcatccacgccctgccgcgcgacgacaggcccgtcctgcacggcgacaacggcgccacgctcaaggccaccacggtgctggcgatgctgtggtggctgggcgtgaagccctcgtactcccgtcctcgcgtgagcgatgacaacgccttcgtggagtcgttgttccgcacggccaaataccggccggagttcccggacaagggcttcgccgacctcggcgccgcgcgcgaatgggcgcgtgagttcgtgcattggtacaaccacgatcaccgccacagtggcattcgctacgtgagcccggcgcagcgccacgacggcacggacgtcgcgatcctcgcggcccggcacgacgtgtatctcgaggcccgccagcgaaacccggcgcgctggtcaggcaacacgcgcgactggtcgcacatcgaggtggtcatgctcaacccggagcgcgactctgtcgtcgctgcgacccggcccagcaaggatagtcagccattggctgcataa

SEQ ID NO: 361800 - DNA, 438 bp, Pseudomonas aeruginosa
atgctgccgccggagagcgcgccgccggaggtggtgtcgcgtgagatcggcatcggtgtggacacgctggagcgctggcgcgcgcagtcgctgtccaagccgctgcaaaagcgcgagtggacggccgccgcgcggctggaggcggtgatcacgaccgcggccatggacgaggccacgcgcagcgcctggtgccgcgagaacggcgtgtacccgcagcaattgctgcagtggcgcaccagtgcgacgcaggccctggccgcccccgaggaagcgcgcgcgagcccgtcgcagacgaaggcggatcggcgccgcatcaaggagctcgagcgcgagcttcgccgcaaggaagcagcattggcggagacggcagcgctgctggtgctatcaaaaaaaacggcggcgatcttccaaagaaacacgcagggcgagggcgaatga

SEQ ID NO: 361801 - DNA, 609 bp, Pseudomonas aeruginosa
atgaaacacgaaatactcgagaagaacgtcggcctgctggcgctatgcatggccgtggccgtgagcatcggcggcctgacccagatcgtgccgctgttcttccaggacgtgaccaacaccccggtcgaaggcatgaagccctataccgcgctgcaactggaaggccgcgacatctatatccgcgaaggctgcgtcggctgccactcgcagatgatccgtccgttccgcgccgagaccgaacgctacggccactactcggtggccggcgagagcgtctgggaccaccccttcctgtggggttccaagcgtaccggcccggacctggcccgcgtcggtagccgctactccgacgactggcaccgcgcgcacctgttcaacccgcgcaacgtggtgcccgagtcgaagatgccggcctacccgtggctggtggagaacaagctcgacggcaaggacatcgagaagaagctcgaagtgatgcgcaccctcggcgtgccctataccgacgaagacatcaagggcgccaaggactcgctgaaaggcaagaccgaaatggacgccgtggtcgcctacctgcaggtgctcggcacctcgatcaagaacaaacggtga

SEQ ID NO: 361802 - DNA, 513 bp, Pseudomonas aeruginosa
atgacgttgtacgccaaggcgaaagcctacgaggccggcgagaaggtgacgcttggcggccgcgagttcgcaccgctctacacgcccaagaacgacaccctcatcagcctgttccagatcaccgacgacgagcagcgcaagctacgcacgctcatcagctcggacatggcgaaggagcgcgatagggaacgccatacggcccgccggcgggctgctggggcggtagatcgggaaacctacctggacgcggccgaggcgaagcgtgcgcaggcccaggcgctcaaagccgaggggctttccgtgcgtgccatcgcgcagcgcatgggcatcagcaagtccttggcggccatgtacgccaaggaggcggccgagtgtccaaagtccgtgcgtattacagccgaccaggccatgccggtggccagcatcgccggaagtgacgagggcggccgcgaaggtgtccaaagtccgtccgtattactaatggcggagcctaccggccggggggcggtgtga

SEQ ID NO: 361803 - DNA, 1893 bp, Pseudomonas aeruginosa
ttgatctgggcagggcctggagataatttagaacgctcaaaaatcaagagtgagagctcgataaaacaagcgagctcccagcatcactcgcgtcagccacacccagccagcgctggcttacgttgcagggagcaacacgcattgaaggcccccatcacacgaaccgaattcaaatacaaacgccctgatattcggcacccgcacagctcagtggctaatttcaagggagagaatatcgtttggtggtatagcttcatacgcaataatcgccagggtgaaaggtcaatcccggaagtcgaggtgatatttaaaacgctctatggcgatgtccctggctcaattaccagtgcaatcattcctcttgccgcgctgcctcattaccaactaggaagtgtctggagcgacggagagtgcgtatccgacacaggcatggcccaagaagagttcaatgtaaatttttcacctaaaggttacggcatcacatctcgaaatgagcttaggaaaacagggcaaggccatatatttcatgatgccgaatatgagcttccgctgcgctgctggtccagcaagctaatcaactttagattacctgacaacaaaaaccttctagtcccatgcacagaatacttcgtgcgagcatacgcacacaacatgataatatgcagatccatatgcaccctactattcgacgaggtactttcagccttgttcgaatgcaaaacccccgatgcctatcggtggcttattaagcccaagagaaacatcccagattctgaagccgtattcttggcgcatttgctatacgacaatttcacacataatgaagtccgccgactgaacagtaatttcacttcttcggctccgggtggaaaagtatttccagaggtaaggccctggttcgagggcagaggtaaacttctctgtcgtggacgatggattaatgaagggaatacgtttttgtgcctagatctgtgtaaatcatccaatcctgcaggcccaaggattgagcttttccgggatgaatttgacaacactaacggagaagctgacggccgcactattatacctcaacccactaggctcccaaaggacggcgaacctgtaaacgaagagtcccatgtacccccagacgcccaagccgaaaaaatcgtagtgaatctacggccctttggaaccctaggcccagaacggaatgtaaaaatattaaaatatatcaatcaaacgaagaggggttggcgtgggcctggtccttccaaggctgatactttttccagcggtgatggtaccggcactggcaaaaatgtcgggaagtcagagcacgtgtccgatgtggcattagagtctcatggtttcttattagatatctggaacgcttttctctcaatcaagcgggacaaccctaagcagttcaaagatctgagctggcacgcctctaatggatttggagtttcttccccacctattattaatctgttcgaccctaatggtctttcaaagggcgcacgcaactggattcacctttaccgaagcatcaattgggatgacaaacggtgccgcggcctcatggtactgcgcttgattatcgacaaccaaactttttattgctttgagatagagcgccaggaagctagtgatcaggttcatgaccctaggggttattccggagttttgtttagagcgcccaccattgaccccgaagcatttaagaacttcgtaaaatctgtaatgaccaagatcataaagaacaagggggtatttaaaggcatgatggatcaattcccagaggatgccctgcttatcacacatcacattaaagacccatatgtgcgctatcgcaccgcgctgcttaagactctcgctcaggcaggcattgatttcacagaaactgtttga

SEQ ID NO: 361804 - DNA, 1335 bp, Pseudomonas aeruginosa
atgggtcacgtccgcagaaagaccgcccaggggcgtgttgaagccgaggcccaggttggtggcattgtacttcttcgcagccagcaggccgccaaagccggtaaccctgtcggacaagccatacacagccgatccctggagcaggttgaccgacggctggccgtcattatggtattcaccggcggccaggccatagcgcaggttccccttgcgggtcatgaccggcaggtaggaataggactgcttgaaggaccgctggcgtccgtccgcctcgatgatcttgatctccaggtcaccattggagccgctgggatagatgtcggtgatctcgaacgcaccgggcggtacgttggtggaatagatcacgaagccattctggctcacctcgaccgtcgcattggtttcagcgataccgcgcaccaccggggtatagctgatctcgttgtcgggcagcatgccgatatcggattgcagttgcacgccgcgcatacgcacgctctcgaaagcatccccctgagcggaggtatacaactcaccgagggacaaggtccccttcagggcacgaatgtcacgttccacataggtacggttgctactgaacttgttgcgcatgccggtacctccgctcagggaagagtcgttgcgcaggcgccagccaaacaggttgaagccgttgcgcagacccaggtagcggtaatcgctgttctggccaaaattggtgttgcgcgtgaagttggcctggtagttggaaaacaacgcggtgacgccgtcatcccaaagagagggatccacatagccacgcgagtgccgctgtacatacagctgtggaatgctgaccagcagggaaaggctgttgacgtcgaactctacggatgcaccggggatgagttcggcgacattcaggggcgtattgttttccaggttggccggaatgagcttgtcccgagtcagccgggcgatatcgaccccaatctccttgagcaggcccatccgaatgatcgggcgaacgcttccggtgtcgggatcggcactgaacacgacatcttcgcgtcggatcatgatctggttcaaatgaatgtcgacgctgtaagtgccgggcgacaccgagttgccgttctcgaaatacttcagttcaacgggcgccccgccctcgttgttcaggaactcggcgttgaattccaccgcggaagttacggcaggcaaagccaatcccaaggccacgagacaggaagacctggaatagacggacaccttgaggtcgaaccttttcctaaatatggccacgcgaatattccttggactaatttccgacaaaccggaaaaacccatccatag

SEQ ID NO: 361805 - DNA, 1443 bp, Pseudomonas aeruginosa
atgtccgctgatgcttatcacgctccgaaaacttcgccgcgcctggaaaccctggatgtgctcagcataggcatgagcctggatgtgtttcgccagggccaggtatggaaggccttgcaggagcagaatgcggtgcaggccgaggccttgcatgtcggcagcatcctgccgatggacccgaagaagtatccgacgtctgcggatgacaaggatatggcgtatgaaaagcgccaagcggacgccctggaactggggctgaaaaactttctggagaaatggccgataccaacggtgacggtggtgcgtagttgggatccgagcactcctaacctacgcttcactccggaggagacgcgggaaagcctgtcagtaaaagtcaatgatctccgtgttccggctggactgcattggcatcggattgccaatttgcaggatggcattatctgtaacgatacgcctgaaggagtactggaggcgttgttcagtttgttcgaacgcaacccagacttgccagcagtgttggtgtacgccaacgaaggcttcaatatggccggttccttatcgagtcgggatgtacctttaaaatcattagggggaggttctggcccacgtgtaccggggaccttgacagacaccatggtcgccctgatcgtcggccgccccgagcgggtcgactggctacgccagttcgccccctacaccaaggtcaacgaaaaccggatcgaccccgagttccgtggctggggctggcgcaagccaccggttgagttccgccccacgccgttcattccccagccctggaccgagcgggctctggagcagtgggatgcgttgccggtgctggccaggctgcatcggccggtgagtgtgccgctgacccgcccggataccggcgaacggctcaagcgcgaagctctcaccgcacaactggccgctgcctggaagacggccagtgccgggctcaggccggcgcccgcccggctgttctacgacggcgggttgaacgccacgccgctggccgaactcaccccggcgctgggcgccgcgcagagttcgctggacctgctggactcgcgggaaagctacgacctgacccagcgcctgggcgacaccggcgcggcctcgcccttcgttggcatcgccctggcgaccatggccagctacctcaacagcgacagcagcatggtgatgccgttgcggcgcaaggaccaggcgaccctgatcggcatcagctcgccgacgccggggaagaagcccgctcacgacccgttcggcgtcgacctgctgccgcagaccgccagcggcgacggtccgccgccatcggccgacccggtggcgcccgccagtcggctcacgacccggttgccgcccggcgaagactatgccctggaagagttcctgagcagcctcaaacccagcaccgactggcaggacgatttgtag

SEQ ID NO: 361806 - DNA, 816 bp, Pseudomonas aeruginosa
atggcacgccatccagcgcccgcgggctggccaaggcccgctcgcttccagctgaacgaagcgtttcgccaggtggtcggaacaacagttccccgctacggaagccgagcccatgccgctgcatcgcgccgttttcgccgtcctcctcgcgtctctcgccggccctgccggcgccgccgaaacacccttgcgcctggagcgtctggaacgctgcggcgacctcctggccagcgagtaccaggactggtgcctgcgggcacgcggcctgggcgccggcctgccgcgcctgctgctgggcggccgcgagctgccggcgagcgccctgcgccgcgagggcgccggcctgcggctgcgcctggagcgccagggacacgccagcggcccgctctggctggaggagggcggccgcgccagcaatccggtgtggctgaccctgaacggcagccatgtgctcgccgcaggccccgacgaggtggcgaagaacatggatggcctgaccacctacgtcgacctggtcagcctgctgatcgaggaagaccgcgacggtcgccgcgaggccgaacgcctggcggacaagtacggcgcgcgggtggtcggcgccatcccgccgctgaacctctaccagttgcgcctgccggtgcgcgacctggtccagcgcgacgccctggtcctgcgcatcggcagcgaaaccagcgtggacgccgtggtggtggaggaatccgcgccggaaaagggcgaggaggccgaggcgcccggcggacaagccggacagcgactccgacgagtgggcggcgaaccgcttcatggatgcggtga

SEQ ID NO: 361807 - DNA, 804 bp, Pseudomonas aeruginosa
gtgagcaagctaagcaagtttaggagccacattagatttgatgaggccgccgcactcttgtcgagactaattgatgagccagtttcaatagatcagttactttctctccatgaacaaggttggctttctgtgtacaggccgtgcttccatgagctagtacatttaaggccagccctccccaaagaagagcatgagcagcacttgcgcgacggcaggctattcatggagcccggcaacgacagaatgcttatatgcggcgggtttcattacccatattctgaagcatacctatacgaaaaaagagtagtgatactgcatacaaaaaacaacgaaatatacgccctccgggatattcaaacacaagaatacctatcacgctcagacattgaacaaggaccacagccggaagagctattcatagaaacaaaagatatctatgcaatggcagaatttgcaaatagcgacagactagagatgcaaaagccaagcttagttcgccccgcaacctgcactactttagacggcatggaactctacaatcttccaccacatatactccctacagagcatggagtcatttcgcaagaaaagtacaccgaagacaacagccaaccatcagtcctacttgccatatctgcacttctagagcttgccatgaatgcaggcgaaaggaagaaaaaccaagaaagagtaataactgatataagagacggacacccagactggaaattaagccaaagtaccctgcagaaactatttgcagcagcaaacaatgcggcgcgagagcaagggcgctccccatag

SEQ ID NO: 361808 - DNA, 882 bp, Pseudomonas aeruginosa
ttgaaaaagagcctcctggtgaccggtctgaacggattcgtgggccgtcatctgcggcagcgcatcgaaagccacgatttgccttggtcccttctgcctcatcccgccttcgatctggcggtccccgagtcgctggaaagttggcgatgcgaagtgcccgacgcagtgatacatctcgctgggcagaccttcgtgccggactcctttctcgatccgcgtcggactttcgaagtcaattttctggggacgctttctcttcttcaggcactgaagcgtaacggtttcgccggcaccttcctctacattagctccggcgacgtctatggccaggtgcccgaagcgacgttgccgatccacgaagagttcctgccccacccacgcaacccctatgccgtgagcaagctggcggccgagtcgctgtgcctgcagtggggcatcagcgaaggctggcgggtgctggtggcgcggccgttcaaccacatcggcccggggcagaaggacagcttcgtgatcgccagcgccgcgcggcagatcgcccggatgaagcaaggcctgcaggctcatcggctggaagtgggggacatcgacgtcagccgtgatttcctcgatgtccaggacgtgctgtcagcctatctgcggctgctctcccacggggaaccgggggccgtctacaacgtctgttccggtcaggagcagaaaatccgcgacctgatcgaactgctggcggatatcgcccaggtcgagctggaaatcgtccaggatcccgcccggatgcgccgggcggaacagcgccgggtctgcggcagtcatgcccgcctgcgcgacgccacggggtggaagcctgaaataaccataaaacgggtatccggaatttctggttga

SEQ ID NO: 361809 - DNA, 663 bp, Pseudomonas aeruginosa
atgactgatgccattagtgctgcgcaggatcaaaatatttatgtggcgcctggcgcctcgctaaccacgctgtacaaggggctgtataatatctgcacccctggcgcagcatttcccgaggctgagacgacagaggcttgggatattcctttaaggttgcatccagattttgttccaggtggagatgtaaatgctgttaaccaacagtatgtgacggctcttgctcaggaaacatccaatattttgctattggggtttcagatgtctcaaaataaaggtgtagtgtgtggcgatctggttccgctcattcaaagtactagggctaatctggtttctgtgaaagcaaaatatggggcaggactacttggggtgttaggtcaaacgacaaatattttgcctaatagtgtctcgataactcccggtacaggaggcggtgcaaccgatagctcaggcctcctagttggctatggtgtgaacttagggacccttacggctgcacagctttcagcaatgaatctgccacaaagtatcaagtcgctcatcactcccggagtaggtctgcacttaggtgctgtaaacttcagtgcagtcttcaaccagattcgcgatggagtgcgttatgtgacgggcatggctctaactctggcctaccatgctctctag

SEQ ID NO: 361810 - DNA, 381 bp, Pseudomonas aeruginosa
atgaagccgaaagagaaatccccggcctggtgcatcgcgatcacattcgttgatgaagagaacaacgggtttgtcacccttggcggcgctggctgggaatcccaagcagagtgggaagcgcaatgggcccgagtgcctgtttctccgctcggcgatcaagagccgacgaagctgatccttgacaagctggatcgagatggcgatcggatcgatgaaaaactcatcaccgccgaaacagcagagtgtcttctgggtcgcccgcttgccgagttgatagccgaaggacgggccaacacgccgttcacggtacgccaggccatggagcgcaatcctgagctggcagcagcattcccgcgcctcgccgctagcctgaatgattga

SEQ ID NO: 361811 - DNA, 513 bp, Pseudomonas aeruginosa
atgagtgaaagataccgagtagagcagacaggaaaagggttctggccctattgcgtcagggccggaaatggcacgcgcgatctgtatgtggggcacaaaaagacctgtgaccgagttgcggcggaactgacaactgcgttcagggatggagaatttgttggcaagggactctacgacgccctcgccgccgaggcccaggcgctcagggatgagcgagacagccagcagcgcgtcgccatcaaggcgatggaagaactggcagccctgcgcgcaagggtggtggttacgcctgatgcgagcacggtgtacgcggtgctcgatgctcgggagcggttattcacaagtcctgagaacattcaggtagcgctggaagctcaatcgcgcctcaacggcaagacggtcagcgaggggcttttgcgcaggctgtgcgagccactactttcgcatgctgattacgtcgtagctcgcaacgaactccgcgccctgctcggcgaggagaaggagcatgagtga

SEQ ID NO: 361812 - DNA, 306 bp, Pseudomonas aeruginosa
atgaatagcaaaagcgacaattcccagcaggcaactgttcttcccgacggcagtgcattctccgtcttgtctttcccgctacctaaagaccactggctgtatgcggatcgcgaatacgaaggcgatgctattgagccgaaggagcttccgaagccaattcttaatcatgccgagcatcggtctgtggttatagctgcggctcgctatgcgattcgctccgcaaccatgtgcgggaacgagcaagacttcgaccctgacgcaatggtgcagaacttcgtgtacgcactctgcggatcataccgctga

SEQ ID NO: 361813 - DNA, 258 bp, Pseudomonas aeruginosa
atgagcaagcacacgccggggccttggcaatggagccatggccggcttctgcacaatgtgccgggtgaatacagcgacacaatcctggacatccaggacaaggtctggcggcctacagaagaagacgcccgcctgatcgccgccgcgcccgatcttctcgaggctcttcaagcctgcatccagcagatcacggcgctctgttctgcggacgatgttcccgatcaggccagagccgcaatcgcaaaggccaccgcctaa

SEQ ID NO: 361814 - DNA, 405 bp, Pseudomonas aeruginosa
ttggtcaacaagaccctgcgcctcctgatcgccgaaaactgccatgctcagtcgctgctcctcgaacggatgctcaaccggctgagctatcaccgaatcgcaattgccacgtcgttatccgaggcctgcctgctgggaccttgcaccgggcatccgttcgacgtactgatctgcaacgcgcgacttctcgccagcgaaccgctgggtgatgcctcgctcgccgggatctgtcacagcgcgctggtctaccggagccagcatctacccaccgagcgcgcgctcctgcccgtcgcagccaccctggcacgtctgcccggcgcgctggatgcagccagccttggcgccttcatgatgctgatcgatccccgggccttgccaccgaaaaaaacgatacgcagagcttga

SEQ ID NO: 361815 - DNA, 1254 bp, Pseudomonas aeruginosa
atgccactcaccgacacccagtgccgtaccgcgaagcccaaggaaaaaccctacaaactcaccgatggcaatggactgtacctagaggtaaaacccaatggcgttaaggcctggcgctatcggtttgagctgagcgatggcaacaccaggaaggaaagcgttttcgccattggggactatgtgattgtcgcgaagggggaaacacccgagcaggcacaggagcggcgaaacggacgtcgattcaccctatcagaagctcgtgacgaacgcgtaaaagcacgctcacttgtcgtgcaaggaatcaatcccgcccatcaccggcaattagagcgggtcaagcgtgatcacgagagaaccattacctttgaagcggttgccaacgaatggctggcattgaaggactgggaggaaatcaccaagtcaaggcgactcaagatgttggagcgggtcgtgttcccgagaatcggggatatgcccatcaaagccattacatccgcccacatccttgacgtgctgaagggagccgcacaggacaatgggccatcggtcgccgctgaagccaagagaaccatgtctggcgttttcgaactggcaatctctaccttacgcgccaacagtgatcccgttcaccctgttcgccgggcactgcccacaaacaaaacccagcacaagcggccgctttctaaagaagaaattggccagcttttacgagacgtagaaactcacgctggacgccatgaaaccctctgtgccttccgcctgatgtggttgactctgtgccgcccaaatgaagcggtagaggctcgatggtcggagtttgacctgggaaaggccatctggcgtattcctgctgagcgaatgaaaaagcggaaagaacacactgttccgctccccgcccaggcagtcagaatgctgcaggcccttcacggaattacaggtcaatacatacatgtatttccgcatcgagacatgcgcactcagcccatggtggccgcctcattccgtcaaatgctcaagacgttaggttggggaggcaagtacagcccacacgccacacggacaacagggagtactaggctcaatgaaatgggcttttcagcagactggatcgaaaggcaactggcgcatacagaacagaatgcagtccgtcgcacctacaaccacgcggaatacttgaatgaccgcactaggatgatgcaacagtgggccgacatgctggacgcatgggtaatggcggaaaagaacgtcaattga

SEQ ID NO: 361816 - DNA, 309 bp, Pseudomonas aeruginosa
atgtcttcgaacggccaatggaagctggccccggcttacgatgtgaccttctgcgaaggggagggcggataccaccagataggcgtgatgggcgagtcgcttcgcatcacgcgcaagcacctgctcaagctcgctgtggaggaggcggatctctcgcccagggacgccgacgacatcattgagctgatctgccaggtagccagcggttttaccgccagcgccaggtgccagttccctcgtagcatcacccgtgacacgttgcgcacgattcaggcatgtatcgacgacaacatcgcgcggctcagttag

SEQ ID NO: 361817 - DNA, 180 bp, Pseudomonas aeruginosa
atgcaaagcctcgccgcctttaccggcgcggacttccgcgcagctggtgcgctggattacatcaatttcctatgggcgacccagtttggtagcaacgacgtgtgggagaaggcgatcgccttcgagctgatcgtgcaatgcggtgttcaacagctgcgactgacctgcccccagctttag

SEQ ID NO: 361818 - DNA, 270 bp, Pseudomonas aeruginosa
atgaacccgaacgccgccattcccgccgctcaggacccgccgaacgccccgcagcggacgcggataccggactcccccttcgcccgcttcgacgtgcggatcgccagcgagcacgatgcgccgcgcctgtcgctgctgctgcagcagctcggcagcgccgatccgggtcccgacccggcgttgctggcggtgcagttgcagcgcccgcgcagcgaccgggtgaccctggtggccgagcgcggcgaacgcctgctcggcacctgcacctga

SEQ ID NO: 361819 - DNA, 768 bp, Pseudomonas aeruginosa
gtgaacgaaggcaacctgcgaggcaacggcaaggtcgcgctggtcaccggggcggcccgtggcatcggcctgggcatcagcgcctggctgatcgccgagggctggcaggtggtgctcgccgacaatgaccgcgaacgtggcgccagggtcgccgaggcgctcggcgagcaggcctggttcgtcgccatggacgtggcccaggagagccaggtggcgatgagcgtggccgaggtgctcggccagttcggtcgcctggacgcgctggtgtgcaacgccgccatcgccaatccgcgcaataccccgctggaggcgctgaccctcggcgaatggacccgtaccctggcggtcaacctgaacggcccgatgctgctggccaaatactgcacgccctacctgcgcgcgcacagcggcgccatcgtcaacatcgcctccacccgcgcccaccagtcagagcccgattccgaagcctacgcggcgagcaagggcgggttgctggcgctgacccacgcgctggccgccagcctcggccctgaaatccgcgtcaacgcggtcagccccggctggatcgatacccgcgacgtggccgaacgcgaggccgcgccgctgaccgagctggaccacgaccagcacccggtcggccgggtcggcagcgtcgaggacgtggcctcgctggtggcctggctgctgtccgaggacgccggcttcgtcaccggccaggagttcctggtcgacggcggcatgacgcggaagatgatctacctcgactga

SEQ ID NO: 361820 - DNA, 702 bp, Pseudomonas aeruginosa
atgatcacgctcttccagttccccgccgcattcaacgttcccaatgccaatccctactgcctgaagctggaaacctggttgcgcctggccggcctggagtaccaggtgaaggtcgtccgcgatccgcgcaaggcacccaagggcaagctgccctacgtgcgtatcgacggcgaggcgatcggcgacagcgaaatcatcatccgtaccctcgacgagcgttacggggtcaccctcgacgccggcctggacgcccgcggcaagggctgggcacgggcgatcacgcgtctgtgcgacgaacacctgtactacctgatgctgtatttccgctggttcgacgaggacagctggcgggtgctcaagccggtgttcttcggcgcgctgccgttcggcgtgcgcgacgcggtggcggcgctgatgcgccgcagggtgggccataccctcaaggcccagggcctcggcgcccacagccgggacgaactgctggccttcgcccgcgacgacctcgatgcgctggatggcctgctcggccaggtcccgtactacggcggcgaacatccgtgcagcgccgatgccgccgcttacggtatcctcgccaacctcatcgaggcgaccctggataccccgcttagccatgtggcgcgcggctatccgcgcctggtggcatattgcgagcggatgcgggagcgggtctggagtgagtga

SEQ ID NO: 361821 - DNA, 651 bp, Pseudomonas aeruginosa
atggactaccaagtactcaagacccgtcaccgccaggaacgtgaaggtcatcaccccaacctcaccttgcgggttcatcgcgccttgagctggctgaaccgcgccgagcaggcagacgatgtcgacgggcgcttcatcttcctgtggattgccttcaactcggcctatgccaccgacatcgatgagcagtaccgtctttccgagcagtccaccttcaaaaccttcctggacaaactctgctcactcgacactggcaacctgatcgagaacctggtgtggtccgaattctcgggcagcattcgcgtgttgctggacaacccctacgtgttccagagtttctgggacaaccaaaacggcaagatcagcgaacaacagtggaccgaacgttttgcgaacggccgtcgggtagcgcaacaggcgttggccagccgcaataccgcggctgtgctcggcgttgtgttcaaccgaatctatacgctgcgcaaccaaatgatgcacggaggggcgacctggaacagcagcgtgaaccgtgaccaggtgcgcgactgctccaacctactgagtaagctcgtgccggtgatcatcctgctgatgctggacaacccagaaacactatggggcgacgcctgctacccggtgatcgaggcgtag

SEQ ID NO: 361822 - DNA, 210 bp, Pseudomonas aeruginosa
gtgagtgacgagcaagaacgaggtgacccggatgccattcccgcagagccggttgcagatgaagacgcgccggaatacagcgacgagtttgccgcgatgatcctggcgcaagaagacagcgacttcgaagaaattgttgccgatgacctgttggcattgcttgaccagatgctcgaagaggcctggagtttggggcatagtcggcagtga

SEQ ID NO: 361823 - DNA, 1131 bp, Pseudomonas aeruginosa
atggcaagtatggaaacgcgattcgaagagcagttcgacaatgagatggcccaggttaaacgaccgaacctcatgatcgtcggtggtaccggggtaggtaaaagcagcctgatcaaccacatcttcggcaagactatcgcccaggttggcaccggaaagccgatcacccgtggttgtcaccgctacgaagaccccaaagtgccgttggttatcttcgataccgagggctacgaggtaactgaaggcaaagcttcggcgggcaactttcgggaaaaaatcatcccggaaatcaaacagcggaaacaccaggcgctgaatgagcagatccacctcatttggtactgcctgtccgtcgccaatcaccgcatcacggattttgacgtggacaacctgcgcttgctcactggcgaactggatattccggtggccgtggtccttacccagtgcgatgccgagccaatcgacgagcagggtaacggtgagacctcccaggcgtttcgcaaagtcctgcgcgaaaacggtgtgaactgcgaggtgttcgagacctgtgccaacaatcccacccttgacccagagctgaaactggaccttgaaaagctgatcacttggtcgagtacatcgctcaaggatgatgcactacgtcagtcgtttgtggctgcgcagattgcctcgctaccggccaagcgtagcgaagccatgaacatcatcatgacctacagcgccactaccgctgccagtgccgggctcaatccggtgccgatgtcggatgcgctactcatcgtgccgcagcagatcgccatggctgcctcactggccaagctctatggcttcgattcgatgggtgaaatcgccgtcagtatgctaaaggggcagatcctgagcttgattgggcgccagctggcggccagcctgaccaagttcatcccggtgtttgggcaggtcataaacgctggtgtggcgggggtaatcaccggcggactggggttggccctggtcgaggtgtatgaacgcgccatcgacggttacctgaaaactggcaagtcgccggattggacaaagctgctttccagcgagctcttcatgcaggctttcaatgccggtatgtcaaagtggaaggccaacaaggcctga

SEQ ID NO: 361824 - DNA, 1131 bp, Pseudomonas aeruginosa
atggatcaattcgcgatcaacctcatcgtgttgggcaaaagcggtgtagggaaaagcagcttttgcaactatctgttcgaccagcccggcctgtttgaaaccggaagtggcaagcccgttaccacctgggaaaagaatttccagtcccacacgtttgcccacatggggcacctcctgaacgtgttcgacagcgttgggctagaggccgacaactatgggcgttggcttgagcagttcgaccgtttcatgcagcaacggcgcgaacgtcccatggagccggaaacctggatacatggtgctttctatgtcatcaacgccagctcggcacgtctggaaccggttgatctcaacctgatcaagcgtattggccaggatgcacgcattcccctgcaagtcatcctgaccaatgccgatgtggcgggtgataaagtcgcagccttgacgcgggaaattcacaagctgtgcccgggtgtatcggtgacaccgctgtgttcggtgtcggtacgcaagcgcggcggccagtcgacgcaggcctttggccgggaagaagtgctttcactgtacctggagcaatctcacgccttcctgagcaagcgtctggcagcaatgagctgcttgaacttcaaacgtgtgctcatggaaatgcgcaacactgtggtcagcaagattgaaaaggcggatctgagcctgttcaaaatcgctgacctcgatttggacagagaaatcgagctccccgactttgatgaagtgttttccgatttacgaagcttcgatgactacctctcgtcctttggcttcgtgggtgactgggagaccagcgatgagctggaaagcgcagtcactcgagtattcgacgacttccagagcgagatggaagggcgtttcaaagagatcgaagacgggtttgaatcagacagtctgatgcgcaaggtgggggcactgtttgaggcggcaaaaattatactgaccctgaaagcgaccttgatcggctggctcgatgaaggctttgatcgggtcaatctcgagctcgaccgcttgttcgacaagtatgccgagcaagacaacttctttgccagctgcctggttccgtctggtctggtcgtcaagtcgaagctgtttggtattttctaa

SEQ ID NO: 361825 - DNA, 813 bp, Pseudomonas aeruginosa
atgggtttcgaagcaatcaacgcggtgctgcccgatcagactgatcagatcaaccgtttgcaatacctattggccgaagcgcgactgccggtggtgtccgtgatcggcaagtacaaccatggcaagagctccttgctcaacgcattggtcgagtgcgagcaatttgctgtgtccgatgcccgggaaacgacggcgctaagcgacttcgagtatcagggcgtgcggtggttggacacccccggactggatgccgacgttgcccgcaacgatgatcaagcggcgatgactggcgcttggcagcaatcggatatccgcctgtttgtgcactgtgtgcgagagggcgaactcgaccagagcgaatgcgacatgatcgataccttgcagcaggacgcgctcaagagtgggcgtcagaccttgattgtactgacccagatcgagcaggtcgaagagcagaccttggcgaatgttcaggcgctgatgaagcagcaagcaccgaagttgccaatcattccggtgtctgcccatcgttatcgtcaaggcctggagagcgcaagcgcgctgaaaatcaaaaaaagcggcatcaacgagctgcgccaggctgtgcaatcagcactggcttatgtcgagcaaacgcgtaaggacgaagtgctggcgctgggggaaagcctggaaggcctgatcgatcaggggctgaccaacttgcaggcgcgacttttacatcagcaggccaaacggcaagcgctgctggcaaattttgtcaccgagtaccaaaacctgcacagcaagctccataaacaactcaataaggcctga

SEQ ID NO: 361826 - DNA, 1710 bp, Pseudomonas aeruginosa
atgcaggaaaaagcatttatcgaggcgctcaaagggttcgagtatttgacccagcgggtggaagccgacgaaagcaaactgaagcattggcaatctcatctgacccgcgcgttgagcgcccagccctcgctgggcaagttgaaccgtgacggtcacctggcgcgccaggccgaaggtgtacgcgaagttgtgcggttgtgcatcgaggactggggacgcacctgggcgcgtaatcagccttcggcacagcttgccgaaacgtttggcgacaaagccgtgatcctggtgtttggcaaggtcaatgccggtaagagttcgttctgcaactttgtcgccgaacgcttcgctgccaatggagaggcggtgcagtactttcatctggccgacaacgcgatcgtcgagcgcgatgagccctttgccgaaggtgagacagaaaccacctcgcagatccagggcatccgcctggggcaaaagctgattctcatcgacacacccggattgctttcggtgacaggtgtgaatggtgaactgaccaagcgttacaccgacagcgccgatgcggtgctgtggttgagcagttccactgcgccaggtcaggtgcaggagttggctgagctggagggggaactcaagcgcaataaacccctgctgccgatcatcaccaaaagtgacttttacaacgaggatgaggttcccgggcaggacacgctaatcaaggtgctgtgcaacaagacgacggccaatcgttcactgcaggaaggcgatgtgtggaaacgtgctgcacaacagctgcgcgcgtctgacctcgatgaggcgctgcttaaacctgtggtgtctgtgtcggtccggtatgcccgtaagaacgcagagcaggacgattgcctgcaggcggctggttttgagcggttgttcgctcagttgcaggtgattgcccaggaggcccgcgtttacaaggaaagcaaagccacgcagctcatggttagccaccttgagaacaacgtgctgagcagtttgcgcagtaccgtgctgcccaggctggacgaactgcgagacgccactcgcaaggcggttcagggcctcaaggtacgtagcgatcagatcgcttcggcggtgcttgccgatgtgctgctcaaactcgctgacctgctggaaacgcacaagtccacgcaagatgttcaagcgctgaccaaggatgtcaatgcgctgtgccagagcaccatcgagcattacctgacgcgtgagttgaaagactacgtcagcgagctcaaaggtgtgctggtcgacatgtccagtgatgacgtcggcagtttcgaagacctgggtgttgatgtcgagttggttaccgggcgaggtaagcaagcggcggcgacagccactggcacggcgatcggtaccgcaatcggcactgcgttcggcgggccgattggtgcaatcgctggcgggcttctgggtgggctgctcggtggcgctgccggtaactacatggtcgaaacgcagatggtccggcaagtggtcggggtcagctatgcacgcttgcatggcaagctcgaagccgacttgcgcgcgcgtttgcccaaggccgttggcgctgcggtagatacctgcatcgagtcgatcgacctggtggacgtcgaggccatgcgcctgttcgacatcattgcgagcagtgagcaggatctgaaatgtttgaaggagagcgttgcccgatga

SEQ ID NO: 361827 - DNA, 1566 bp, Pseudomonas aeruginosa
atgtttgaaggagagcgttgcccgatgaacccctttgagcagtacaaaacgctgattgccagttcctgtagcatcgcttcgcgctacctgccggatgcgcctgcgcgtatcgatcagctgatcgaacagattgacgagcgcaaagtgcacgtcatgttgttcggtgcctacaacgctggcaaaagcacgctgatcaatgccttgctgggtgaagagcgtgcggtggtgggtgatattcccaccaccgacaccgtgcatcacttcgattgggacgggcatgtgttgctcgacacaccggggatcaacgcgccgattgagcatgacgaaatcagcactgagcaactgaagcgcgccaacttgattctgttcgttctgcgccaggaagatcaggatgcgcagaacatcgttgaacgtattttcacgctgctctcccagcgccgtcagttgttcatcgtgctcaattatgaagacagcgaccctgctgtcatcgagcggattcaggccagcttctcgcgcaccttgctcaactatgcgcgaacccatgctctggatgaggcatgggtcgaacagttgccggtgattctgatgaacgtcaggtcggccagtcgcggacgccttgagggcaaagcgaagctgcttgagcattcgggttacgacgtcttcatcgctcggttcaaacagtggctgcagcgctttgatggcgaagagcagttgcttgagcaaacctgcacgatgattgagcgggcactgctcacgccggtctccgttcaacttgaacgcgaaatgcccccggcacagcaattgggcgcgatcgatgcacagttggagcacatggcacgtcagcagcaacagctgagaaacagcgccaggcatctggtgcgtcgcgagattctggcagcacggctgacgatcgagcgtgcccttgatcagagtggtgactctgcttcgctgacgcgagcgctggaagttctggcccagggcattgccgagaagctgcagcaatggctcgaaagcgaactgcagatgatgcgcaaagcgcagatcgacgacttgctgctcgatgccggggtagatcccaagctctacgctaatgccgaagaaagcgagctgctggacaagttgtccgggccagtattcgcccagctcaaaggtatcaaccaggatcacctgacttcgctgcttgttctggggcgcaagctgaagattccactgttgaaaggccgttggctgtcgacattgcaaaagtgggcgggacgcgcggcgcctgtggtgcagctggtgtttgcggttgcagaaatttttctggcggcgcgcagcgaagaaaaagagaacgagcgcaatcatagccgtgccctccagcgtatccaatggatcgaagagaccggtgccgagttggaaaatgccctggttcagagtgccggcgagttgattgaccagctcttcattgatcagagaaaaccgtatgagcagagcctagtggccctgcaaagcgctgccagccagcttgagaaagactgcagtgactggcgcgagttgacacgtaccttgcgggcggtggagttctga

SEQ ID NO: 361828 - DNA, 720 bp, Pseudomonas aeruginosa
atgaatcaaatgttcgtaagcccatggttgtcggtctcgcccaacggcccggtgacctgtgcgcatcctcacgcgcacgactacgtccacctgcgccaaggggaaatggacggcgcctgtggtccttattgtgtcgtgatgatcttgattgcactgggtgtcatgtcccgagaccaggcgcgatcactcgacagtttcgatggtcgcacgcgccttggccgctttcgcgaaaacttgatggcctttggtgccttggttacagaaggtaccgacgactttgatgtgagctggctggtggatgtgttcaagcatgcgggtgtcgtgaccacagtgcttgatgtcgccccacgacgtaaaacaaccattcgcaacattgcagatgctgtcgataaccgaaaaatcccgatcgtgggtgtcgaatgggactgcgggcaagcggggcattggctgctggttatcggctatcaggggtataaggcgaatgatgacgatgagttgcagatcactcatttgctgtgcctggaccccaccagtgatgcgccgcgggtatcactttggaatgccgtgatcgaagtattcaccgaagagggcgaggcggttaacgaaggtcgttattactgtcggcattggggggtgaatgacgcgccgacggcctgtcgaattgaccagagtgttgtggtcggtctcgataaaaaggctgaatccaattacttctactga

SEQ ID NO: 361829 - DNA, 141 bp, Pseudomonas aeruginosa
atgacgcgaacggccatcacggtgtcgataggcctgcaaggcgaacgtgtggccggacacatcgaagaactgctcttcaatgtgggccagcaccgtcgactggaacagtgcgtgcaggtcaatcggcgcgtgaccaggtaa

SEQ ID NO: 361830 - DNA, 3084 bp, Pseudomonas aeruginosa
atgtcaaatagggaaatggctcgtggttcggcttggcgccagtgggatctgcacgtacacacgccggcctccttccactggacgggcaagaagttcgagggcgatctgtcatcaccggaaaatcgggcgctgatcgatgaaatgatcaatgcgatgaatgctgccgaacctgccgcattcgcaatcatggactactggacgtttgacggatggttcgcgctcaagaaccggctggccgaagctggcgcgcctgtgctgaagaagacggtctttccgggaatcgagctgcgactttccgccccgacaactaagcgcctcaacgcacatgtcattttcgcggagactattcccgaccaccatctgcgcgagttcttgtctgacctgaagcttgagcgtacggacaggtccgtgtccaaggagtctctgatcgacctagcgcgcggcacctccgacgacatgctcatgaagaagggccacaagaaggttgctgttgatagcgatgctcaagaagccctgatggcagggtacaagctggcggaagtgaaggccgatagctacaaggccgccatcaagaaggttcctgacggacaggccatcggcttcatgccgttcgatacgagtgatggcctgacggaggtgaagtgggaggaccactacgcctacttcctcggtctccttgagtcgtctcccatctttgagtcacggaatgccgacctcagaactgcgttcctctgcgaggaaacgccgaagaacaaagcttggatcggcaacttcaagcatggcctcaagaacatcccgaggctcgtcgtctccggcagcgatgcgcactgtttcgtaggcgtggcaggtgacaacgaccgccgcgggtacggcgacttcccatcaggtaaaaagacctggatcaaggctgacctgtctttccacggactcaagcaagcaatcctggagccggccaagcggtcgtttattggggagaagccccctaagctccaagccgtggagaagagcaaaactcacttcattgagtcaatcgaagtcgccaagacaggcactaaggctggtatcggcaactggctgcacggttgcgatctgccgatcaatccggaccttgtcgccatcatcggcaacaagggcagcggcaagagcgctttggccgatgtcatcgcgacccttggacattcgcggcaagcaaagcacttcagttttctcaagcgtgatcgctttctgggcaagagtggagatcccgcacgtcaatttacgggcactctgacctggcgagatgagagtatcgaggctcgtccacttgacgagcctccgacagaagacaaacaagagctggttcgatacatccctcagaactactttgaggagctttgcaacgatcacgtctctggcaaatcggacgcctttgagcaggagctgcgggccgtcatcttctctcacaccaatgatgagatgcgtcttggcgccctcgatttcgatcagctgactgagcagcaggagcaagcgctgagaaatcgacttggtgaataccgcaaggagctgaggatcgtcaatgccaccatcgcgcggattgaagatcagctgcagccgattgaggagaagaagttgacggaccagctgctgttcaagatgcgggagatcgaggaacaccagaagatcaaacccgcggaggttgcagcaccgcctgaaacgatggagccggagcagaagcaagcagctgatgcgcttgaggccacggctcagaagatcgacgcctccaccaagcgcacgcaggatattcaggcggaactcatgtcgatcgccaagaaacagaaggctctcgccaacgcgaaagagcaattgcgactacttcagcgctccttcgatcaaacccagcagcaagttgcccaagacctcgagctcgcgggcttgaactggaccgacgtcgcgaagttggatatcaagactaacttgctcgatgaacggtcctctgtcctcacagaacagcagtcgactcttcaggccgaggcgggcactttggccggcgccctcgagaccctcggggaagagaagaaggcccacgctaccaagctcaacgcccgtcagcagcagttcgaaacataccagcaccagctcgctgagtggactaagatgctggatgccctggccggcacgccgacggatccagacactaaggtgggcttggaaaccagactggcccagatcaagaagctgcctgccaagcgtgaggaactgcaagctgcacgacttcagctgacggccgagatattcgactccttagatgcgcagcggaaggcgcgagaagaactcttcaagccagtgcaagacttgatcaaggcgaatgacttgatccgcgaggattaccggcttcagtttcaggcgacgctggccgcttcggcagaggccatcgcagagcgcctcttcgccttgatcaagcagacgtcaggggtgctgcgtggccaagacgaggcgctgttaacagtcacgaagctctttgatagtcacgacttgaacatcaaggagggcgccttggcttttgcgaaggccttacatgaaacccttgaagaggcggccaagggacctggtgctggggtcggtattgccagcctactgaagaaggaccaatcggccgtttcggtctacgacttgattttcgggctcgattttctcgagccaaggtattcactgctcttccaagatacgcagattgagcagctgtctcctggccagcgcggcgcgcttttgctgatcttctatttgctggtggacaacggcaagacgcccatcatcttggaccagcccgaagaaaatcttgacaacgaaaccgtgttccgtctcttggttccggtgctaaccgaggccaaaaagaaacgacagatcatcatggttacccataacccgaacctggcggtggtctgtgatgcagagcagattattcatgcatcctttgaccgagcctcaagctgcagcatcaactatgtgtctggctcattggaaaacccactactgaatagtgcagttgtgaccgtactggaaggcaccaagcctgcattcaataatcgctctgggaaataccactaa

SEQ ID NO: 361831 - DNA, 177 bp, Pseudomonas aeruginosa
atgaaacgcaagcaatccatcgaacaggttcgctgggacctagaccttcgctatcgcctgattgaaaccgtagcctggtggggaggccggctgaccacgggacacctgatccagagctttggcatcagtcggcagcaggcatcgaaagacatcaatacctaccggttcgctggataa

SEQ ID NO: 361832 - DNA, 1707 bp, Pseudomonas aeruginosa
atgctcgaaagccagaaagagttcgccacttacttgaagaaaatgcaggtgctgctcaatgaccaagcgttttcattcgatcagtcattgcttccaaaagtgatggaaaccgagcttgtagtgcccgtgatcggggccttcagtgccggtaagagctcgctgttgaacgcgctgatgggcaaggacatcttgccggtcgggattgcgccagaaactgaactggcgaccgagcttcgttattcctccgagccttatctgctggcgatcaagcccgacggcgtgcaggaacgtttgcctgttgaagcactgagtaccatcaaccgtcgttccagcgagttttctcacttgcgcctgtacctcgacagtgaggcgctgaaagccattgcgcccctggtgctggtcgacatgcctggctttggctcatcgctggaaaaccacaacaaggccattgcttactacctgccgcgcggtgtgcacttcgtggtgctgaccagtatcgaggacggcaacattacgcagtcgatgctgcgtaaactcgacgagctgaaaacctacaacaccgacttcaccttcctactgagcaaatgcaacctgcgcgccgccgaccaggtagaagacgtacaagcctacatcgacgaccagctcggggtgtatttcggcgagcattaccgcagcatccccctcggcaaccggggtggcgaggaactgacgcacgcgctgaccgccttgcagcccgacgcgttgttctcgcgtctgttcatcgacattctcaaagaccagaacttcgaagtgctagcgcagatcaacctggcgttgagcatgctgaaaaaggacaaggccgagagcgagcaaaccgcacgcgcactcgaacaggccctggccaagctgctggagcagcgcaaggacgtcgagtcggacctgaaggatcgctactcgggaaaaatgctcgaccgtagcctccgcggcctggacaactcccttaacgactccctcgacgagctggtcaccttgggcagcagtaagaacccgagtgccctgtcgaatgcactctccgacatcatccgcagcagcctgtccagcacgatcaaatctgaagtgcaggacatctccaccaacatggtcgaccgaattgccagcaacctcagtgccaccagcagccagatgtccgtgctggacattagcggcaactggagcgaggagctttccaacaaggtcaaattctcgctggagcgcaccacggaaatgctcagcgactggtcgacacgcctgagcaatcgtgccgaggaagacaaaaacagcggcgtcatgctctaccgcagcctctctaccgtgctcgctgtcaccactaccgtagtcaatccgctggtagagctggtgatcatcttcttgcccgaaattctcaagatgtttaacggtggcggtaacgagcgcgagaagtttcgccagaagctgaccggcgaagtgttccccaacatcaaggcggaactgcgcgggaaaattccggcaatcatcgacgagcagctcaacgccatgctgaagaaaatcagcgacggtttcgaagagcagatcaccaagcaaaagcacgttatcgactcaattgcacaggaaagcctgcagcttgaagcgcagatcagcgagaagaccactgtgctggaaaaccttgccaccgcagtaaaagccgctgcaaacgaacacctctacaagtaa

SEQ ID NO: 361833 - DNA, 2244 bp, Pseudomonas aeruginosa
atggattaccaatcactcgtcgcttttagcgaaagcctgcacacgctggcagcaagcaaccaggacctgtttgagcgcgaaatcgagcagttcaagcggctgaacggcatcgaccaaccgcaacagctcgcgcaagcatgccagacgctgcaggaccagaaccggctgatgaacatcggtattgttggccgtgtgaaagccggaaagtcatcgctgctcaatgcgctgatttttaatggcgagccgatcctgcccaaggccgcaacgcccatgaccgctgcactgaccaccattacctggggcgaagtgttccaggccaaggttgagttctacagcgaaacggacatcgccgcgatccgcttcaaatcggaccagttcgagcaacgcctggccacgcgcaagcgcgaatgtctggaagaactggtgaagcgtcgaagcgcccaggccaatggcgcgcccctcgatatggcgcagctgacgagcatggccgataaaaaagccttgagcgaactgcaacgcgaagaaggcttgttcgcggcatacgaccagttccagcgcatgaagaagtcagagctcgatgcagccaccctgcacctgcacagcgagattcaggcaggtaacccgaaagagctggcggcgcttttgcacaactatgtcggtgccgacggcacatacatgccgttcaccaagacggttcatgtcgccatgccgctggaggcactgcgcgatatatgcatcatcgatacccccggcatgaacgatccggtccagtcgcgcgaagagcgcacggtcgaattgctgaaaacctgcgacgtggtgttcatcgtcagcccggccggccagttcctcaacgagcaagaccttgaggtgatggggcgcattacccagaaggagggcattcaggaactggtactggtggccagccagatcgacacacaactgtacggcagcgaaaaacgcgcgcgcttgagcgatgccgtggaagccatccgtgcccagctgtcggcacgggcacagagcacccttgcagacctcaagatgagcagcccggaagtgggctcggtgttcgacaacctgatcggatcagtacaccgtaacctgctgcatagctccggcttgtgccacagcctcaaccgccgcttcgaaacgcccgaaacctgggactcgaacgagcaggtgacctgggacaacctgtccaccgattacccggattacttcactcgtgacaaccaggcactgtcgttgagcagcctggacagcttggcaaacattgacgcgatcaacgccatgcttgcccaggtccgcgagaagaaaatggagatcacgcgggaaaaaatcgccaacctgatggttcgcaaacaaaagaaccttgaggcattcaaggcgctgatcatcaccctggcacgcaaccaggtcatccagatcaagaacgccaacgtcgatcagctggacgaacaactggcttcgctggaatcgaagcgactggatctctcgctggaactggatgtcagcttcaaatacaccatggccgactaccgccagaagttgcgtgacgacatgcgcaagacagctgcgcaattgcttcgcgagacgcagtccactgtcaaagacgcggaaggctctttcagtgaaaccattgtcgtcgacaaccctggggttggcagctggtttgcccgcaagctttggggcggcggcactaccgagaaaacggtcgtccgctccaagatcatcagtagtcaggtcatctccaccatcaacgagttcatgaacgacatccaggatgagctgggcgccaaggtggagagctctcatcgcgggttgaacgaagaactggcccggaccctcacgccgaagatccgtgaggtgcttgaacaggatgccaatgcgcaaatgatcaagctcgcgattctttcgatcattcaatcgattcctgacgatgactttgatttgggcattccgttgcctgactccctgaaaagcaacggcacgctcaagggctacgaggccgaacgtttcaaggatgccgccgatgacttcatcggctcgttgggtagcaaggtcaaaagcaagatcagttcgttcatcaacgatgttgaacgcaacgcaccttccaccatctccaactccttcgtcgatgagattcaacgccggatcaatgtgctcaaggatcaggtcgacaacgcggctcaaaccattgaccggcttgaacgtctggcacgcaaggccgaagaggtcaccctgtga

SEQ ID NO: 361834 - DNA, 1053 bp, Pseudomonas aeruginosa
atgaacagagttgaacggatcaaaggctgcctgctgggtggcgctgttggagacgcgcttggcgcccccgtggagtttcttgagtggcccgtcatcgaggccaggttcggtgcgcagggcatcactgatttttcccaggcttacggcaccatcggtgccatcagcgaccatacgcaaatgatgctgttcaccgcagaaggcctgctgcgggcttttgtgctcggcagctcacggcaggcatgccatgtgcccagcgttattcaccacgcattgctgcgctggcttacgacccaggattacccctcgcggactccggtcgtcacagatggctggttgatcaagcaagtggagctgtggtcgcgccgcgcccccgacgcaacctgcctgaatgcactcaggagcagcgggcggctgggtgcgattgccgaaaacgacagcaaaggctgcggtgccttggtacgcgttgcaccctgtgcgttctttgccaacgcattcgactacgcagcgcagtctgggcgactgacgcacgggcatccgactgcctacctggcggctgggctgttcgccgacatgcttcagcgtattgtcgatcggcaaggcagcctggaacacgccgtaacgcaaagtttggcccggtacgggaaagtgcctgggatggaagagatttgcagccttgtcgagcgcgtgttgttcttcttttacgagggctatgcacccaccccgcaacgcattgacgattttgccggtggctgggctgccgaacaggtgctggcgattgccctgtggtgcgcgctgacggcacgctcattcgaagaaggggtgatcatggcggtgaatcacagtggcgatagcaacagcactgggcttgtcgccgggcacttgttgggtgcccagtatggtgctgctgccattcctgcccgctggttcgaacgcctggaactgcgccaggtgatcgtgcaggtagccgaggatcttgagcgtgttccacgtgattactgcggggttggtggcgcgttcgacgagcagatcgaattggcttatccgggcagttga

SEQ ID NO: 361835 - DNA, 1791 bp, Pseudomonas aeruginosa
atgcccatcaggctcgacaggccaattagacgtgtgagccgggtcatccggctcaaaagcaacctaggtaagaatgacaccgacatgatggcgtggtggtactgcggcatctacaagaatcctgctgccgactcgcagccacatgcccttgttgcattcagagaaattggaatgaacggccttggggatgaagtcatccttcgccgcatcccgctcaccacgcttggccaggtacgcattgggagcatttggaaagatcagaaatgtcactccgaagctgtcttcgaggtcgccaagttcgacgtgatgatcagcaataacacctggcgcgtggtttcattcaacgatgcgctacagcacagcaatgcgccgccatatccatttgaaattcacccattgcagttcgaaagggacaaaaactggatgatcgagtttgatcttcagtcgggcggtaagctgctcatcccatgcctcgagttctttgcccgctgctatggccgatcagcagaacttaagcgcgtgcttgctacctacccgtggaacggtcctgaagatatccataacagcaggctgtacgcgccgcttgatgatccagaggaacctgggcgatggaaggtgaagctgcgtcgcaggatgactaacggcgatatcgtctttcttgcacatgccaagtaccaccgttacacagagtctgcagcaaagagcatctacgcccaaatcgaaacccagcatgaccctatgggacgaattccagcgttcattaaagtggccccatggttccaagggcctacgcagttgaaggtttccggcatcagcttcgacaacggcagatcgttcctcgccctgcaagtgattggatgctccaacccgcagggtgtagctatccttcgggatagagaaaactccaatctcgtaaatgaggcagccgatccgggcgccagtgaagcttgggcgggcactcctgaacggagactagccaaaccgccggagattgttgatctcacgagtgacgaagagccagatcacagcaccggtccaattgaagttcaggacccggactttgaggagttgggcgagccacgcttaatcatcgaccgccgccgtcaaaaggccgctagtacggcagggccaaagcgacccggtgccggcgccgagcaatactccagtggcgagccgagtggggatgggaaaggcgtaggctatgcctcaatacacgccaagccagtgcttgagtcgcagggaaccctacgcgatgtatggaacgctatgttgttcctacaaaaaaggcatccagagaagattaggaaggtccaatggttcacgtgggacactggattcactggcgatccagagcccaagttgattgggctgactgaattcgacaaggacgaagatattgaaaccggaattcggaattggctgtacgccgaccctgctatcgaagcagtgcgcggtatattggttgcccgcttgatgcttgaagataggtgggtgtgcattctggaaattcagcggcgaccgcggatgaagaaagacaaggatggcgaacgcaagccagccgaggagtctttcaaaggactcgtttgcatcccgcctaacatgggccagttcaaagattggttgaccaacacactatcgtcgattcggtacgtaaaagggattgtgcagcgccttgaaggtgagcacatcgagaactgcgcggcgttctcccattcgcgcaccaaggacgaacaggttgccggcgaagccgcagtgcttaatgccctggagaaggtgaatgttcgcctgtag

SEQ ID NO: 361836 - DNA, 291 bp, Pseudomonas aeruginosa
atgcccatgttcaaccccgtccacccaggcgccctgctacgcgaagacattctcccggcgctcaaatccgagcaccggattggcatcaccgagttagctcaccgactcggctactcgcgcccgtacttttctaccgtgctgcacgaaaagtcgcccattacggcagacctcgcgttacgtctagagcgggccggcattgggtccgcgcggcattggctggcgatgcagtccgcttacgacctgtggcgagcggagcagcgcgagcaaccgggaattacccgcatccgctga

SEQ ID NO: 361837 - DNA, 1494 bp, Pseudomonas aeruginosa
atgactcaaggaaccttagtactgctcaacgatgttcagatcgccgaagtgcgtcgcagatggttacgagatccaagctttctcgggtttccagacgcggagcgagacgagtcactttccgaatggtacgaccagctattagtcaggccagaatggtttaacccggctacagccagcaaggcaacggtaattattggtaggaaaggtgccgggaagtcagcagtaaagttggctgcgatgcgccaaaggcaagcaggctcagatgccgtttgcatagaagcatctgcagacgagcttgcatcagttcatgcgtcgaaacttaccgaggcatcaagtcgcggctttggggctgttaatgattggatgcggattttcgccgatctaattgtgcgccgagttgctcaaaatctaagcggaaagctaattaccagcgatgacgatattgccttgcgcacttgggcaaagatagagggaatcagcgagcgtgacttcggcgagcgtctcgccgacgtcgtaaaaaccctcgtgccgtgggcgcaaaagctagcctccgaacggcaggagcttaagacagtaactgatgagcggatcgcgcgaataactcaggcgactgggttttctctttatatcgatgatttcgacaacctgcaggagaatgctggatctgcaaatataaggttaattagagatgccgtagaagcagcagaccgcataacccatcagaacaagtcagcggaagtacaccttctcatgcggcaggatttgtggctgaggctccgccccggttggcactatgccgataaggtcgctggggttgtgcacctcaactgggagcaaggtgaccttcggaagtgggcagaaaggcgtctccgtcgtgccgtagcaatcgcacttggcgttgaagcgagcaaagtgagagtccgcttcgatgagctctggaaaatattcttccctgaagaagtcgtgcttcgaaacgaaaaagaaagttcttcatttcactatttggtgagaaggacgatgtacacccctcgtggcctaaggcaattcattgctctggctattgaagggggcgaaaggtttccaattacacttgccgacatcgaaaacgctgagtggacgttctctagcgatcagttggagttccttaaaacagagtttggtggtctttgtgagggcctggacatctgcctccaatcatttactggaaagccactcgagtggatagcttcagatctttatcgccacctgcgaggcttgcttggcaatgggcaagttcgcttagataaaggggtttcggacggcgaacctgatgtcgctctagcacgctttctgtatcgaattggttttttagaggtcagatatcctcaagaagagaggttcgaagttagggatgttatgcgttacccagatcattggaaaagcattcggaaagacgatgccgtgagatgggcggtaagaagcgcattctttagtgctcttcgttcccaccgctga

SEQ ID NO: 361838 - DNA, 306 bp, Pseudomonas aeruginosa
atgttgttacccgacgccgagacccttgggatgagccaccgccaatgtctggaactactggaaagcaccgaggacacgctcaatttcctgacctccacgctcacctacctgatccatgcagagagccagcggcctcagtcagatgctgcgttaatcgccgagtggaaggcgctggagcaggaagttttcgaggtagagcaatcgctgccaggtgccgatgtggtggcttatcagcaggccattctgacctacgggcagcgtaatcatgagctgcgtccgcacgttgatcgctacatggccaaatag

SEQ ID NO: 361839 - DNA, 2157 bp, Pseudomonas aeruginosa
  misc_feature (19)..(28): n is a, c, g, or t
  misc_feature (285)..(294): n is a, c, g, or t
atgctatgcatccatcgannnnnnnnnngtctaaattgtgtttatgaaggacagtgcaacctctgggtgacgattgaagcacccagcgtgcaagatcatgtgctccttgctgaattagccaagatggtacgtacgtgggttgggcggattggcgaggcagttgaagctattgacgggcggagagtatgcaagtccgtgaaggtttacctgcactttgagggtgacggcgacattagccgattctttgatgagccgattcccaatgacctaaataccttctggaannnnnnnnnngtattgctcaaagacggatatctcgctggctttcgagcatcggacaaccgtgcggagcgcgctttagtacgcgcactcggcactgcatttgccactcttctacgtatcgatgcaccgacagacaaagggctcgaaattgagcgtatagcggttcccaataacgctgcgcgtagcttccatattatggaaacgttcgactttgttgatcacgtgcagggctccttgagccgacagcttttggccatcgagaataccgagtggggtgcggccataattggactcggatggcgttcagttgcggtcgatgcgccagctcaatatcagggtaagaaagcagtcggcaagctcctcaacgacgtagtagatatgctccttcatgacatgcagggggagctttctcgctttgatcgcctgaaaactctcactcgcttgcttcaaaactgcgaacgggcgcgaagtgaggaaaaccattggcatcggacggccgctgccgtcctaggcctgcatgctggcgaagttggggtcgaggatacgatcgccaagcagttagggcgttttgccggcgcagcattgacctctcggttagtaatcgagctggccttatgcgcttgccctactaccggagggatggagccctcagacatggcgctcggccggctcctggcacaagcatcattactctttcgtatcggcggcatgtctgacgcggtgcgctttggagcactgccggccgaggttcaaatatctcccttaggtgaccttctcttccgtgacgagcttggacagatggtgctcgaacctctgctgtcaaaggcgactaacgagcggttcgaagcccatgctgcgcgattcaagcagcattacgcaaaagcggacgagcttgaggagttgactgatgaggaaggccgttctgaggccgctacggtcgatgatgacaccgaggccttcctggcattctggcaggcggagatgggctttacgctcgaggaaggcctgcgcttcatccatgcacttgagtcgattggtatggagaaacagacggcaatactcatgatggagcgaagccagttggagatcgtcggtaagtccgctgggctcgaccataacgtcgtttccgcttttcttgaccaattcatactcagatctcgcccaaagtgggacgaggtgacagacgagtttgaactttctgatatctatccttggcgctttgggcgacgcctgtcagtagtatcccgccccttgttgcaaatagaagacagtcaagatccgctggtgatcgtatcaccgggacaactgagcaactctctgcgctacgtcttcaacggggctcacacgggacgactcaaacgggagttcttcaggacggaggggatgagggacgaatggctgggggaagctcgggagggacacactttcgaaaagtccttagaaaaagaattgctagatgcaggatggactgttcggcgcggcatcggtttcccggagctattgaggcgaaatctgccaacagacccaggcgatattgatctgcttgcgtggcgttcggatcgcaaccaagtgctcatcgtcgaatgtaaggacctttcacttgcgcgaaactactcagaagtcgcgtctcagctctccgagtatcaaggtgaagacataaagggcaaaccagacaagctcaaaaggcatctgaggcgtgttgctcttgcgcgggagaaccttgctgacctggcacgattcacgtcagtcaaagatcccgagctcgtgtcctggcttgttttcagtggagtgtctcctgtcgcttatgcgcaggcgcagatcgctgcactgcagggtacacatgtcgggcggccaaacgaccttctcaaatactga

SEQ ID NO: 361840 - DNA, 1662 bp, Pseudomonas aeruginosa
  misc_feature (1647)..(1656): n is a, c, g, or t
gtgaacgactccctctctcaaccagatttgcaatccttgcttgaggcgatggctgataaggctgcctgggcaagttccagtcactcgttgagtgatgtcgcaaaggataacgctggacttgtcgctgagttcgccaactttgaacgggacggcacagtggctttgctggccagcttgctaacccttcctgcgcatcagtcccaatgcttgcgattagagttgctagttgcccttgccctaactcactgtcagggctcacaggttgccactgtcgacgatgcgtgccgctggtatacgtccatcggcacgtcgaatagtgtcattggggaagatccagcagaggatgtgttcgtctccattgttggtaacgtgaagggcgattaccgcattctggaaggcttatgggaggccgcaggcttttatacacagctgatggtcgacatcgtctttgctatgcccgaagagggctacttcatcccacttaaacgggccacgcaggcgcttctaaggctttcagacctcatctgcgctaactctggtttacgacggttcgagccaggtggtgacgctaacaccggttcgcttgagactggtggtcttgacgcgagcgagctccggtcacgtgtcactttgacgaagcgcatgctacagacggctggtgtagcaattgcagacctttccctcttcattcttgaccacacgcagatctctaccctcaatagtcaggcacccagcgcggggctgctggagcagcgcccgctgctgcgcatacgtgatggccttgtagtcgtgctgcccactgcgctatccgtcgcgctccgccacgcggtaatagcgttcgctgtgcagaagaaagaattgagcaacctcgacagggcattagccaacgcccatgcgcgcactttgtcccaaatgccggcgtttggtaatggcaagcggattaggttgtcctgggatacgaataggacaacccgatcggcgatcgtctactcctcagtagatgtgggccatttcatgctgctccagtttgtcttgccttctatgcagcagcactcggctgaaggtttcagcagcatgctccggctcgatacggaaaccgcgagcttccttgacgctcgagctgcagataccgctgctgatcttgctaatcaacccgacttccaacgcggcatagtcgtgcgtgtgggctgtggctggggggcgggctttgccggctcaatgcccaaattgcctgaagcgtggcagtttgagtggatgtctagcgcagattttttccgcttaagttcgctgcccgagatgtccccacttgccttttggcgtttgcaggatgccgtagaaagaattgcgcgagccggtgtgcaattaatcaatgtcaacggcattctcaacctccttggctggtcactcgccaatgacggccatatggtcccgcacaatcaattaccagaagggcgaatcacaccagagcgccccctgatgcttacaattccgacagatctcatccgtgatgtgcgactagcagcagacatggggtatgactggcaccgtatttgtgacaacagtggcaggtggcaccgtgttatgcgaccgtcagcgggagacttcttccccaccgaacgcgaaagcaaatgctatgcatccatcgannnnnnnnnngtctaa

SEQ ID NO: 361841 - DNA, 672 bp, Pseudomonas aeruginosa
  misc_feature (657)..(666): n is a, c, g, or t
atgaaaatcaacgccggcactctgcaggattacttggccgcaacctttgaaaatgcccaggatcatgcatccgaaccgcctcaactgatgttcatggttgagcagatggatcagatatttcagcgtgagatattcgctcctaacttcgaggcggacccaacggcctgcctgttggctatgaacgcctataccatgctgttgagcgctgtacggcaggcgctgtcgggtcatctggtgtcgacgtatccgatcgcccgcacagcattagagtcggcctgttatggctttctcatcgctcgtgacgacgcgaaggccgatatctggcttcatcgccatgattctgagaaagctctcagaagctgccgggttacgttcacagtcgcgaagaccgtaaaagaactcaggtcgatctccccagagatggctgagtatgtccaggcacactatgacgcttcgatcgacttcggcgcacaccccaatcggaaatccgtgtttgatcatctggagtacgccggcccagccgaagacgagatgtacggttttgagttgacgggtgtctatgggcgaaacagttggcatgtcaacttggggttactggtatgtgttgaggtggggcaggcaattgcgtttctggttgccgcatccgccgagaaccannnnnnnnnnctctaa

SEQ ID NO: 361842 - DNA, 1167 bp, Pseudomonas aeruginosa
atgaaatcggcactccaccagatcggcaagacctcgctggccgccgcgctcagcggcgccatcctgctttccgcccagaccacccaggccgccgcgctgtcggtcagccaacagccgctgatgttggtccagggtgtcgctcccaacctgctggtcacactggacgactccggcagcatggcattcgcctacgccccggacagtatctccagctacagggactccacgttcttcgcttcgaacagcttcaacccgatgtacttcgatccaaacaccgaatacaagctgccgaagaagctcacgctggttaacggccaggtacagatacaggactatcccgcccccagcttcacctacgcctggcgcaacggtttcacgcgcgcgggaggtatcgatctatcgcgcaactacaaggtcaccgtagagtacggccgaggttatgaccgggaatcgactatcaggcccgccgcagccttctattacgagttcaccggctcgtccaactgcagccgcaccaaccagaactgctatacccgtcgctccgtgagcacagaacagcgacagaacttcgccaactggtactccttctaccgcacccgcgccctggccacccagaccgcagccaacctggcgttctacagtctgccggagaacatccgggtaagctggcagatgctgaacaactcctcctgcaaccagatgggtagcggttccagcaatggcaattgcttcaacaactatctgagggacttcaacggtcagcaccgagtgaatttcttcaactggctggaaaacctctcagtagagggaggcacgccattacggcgtgcgatgactcgtgctggcgacttcctgcgcagaaccggcgtgaacggcccctacgcttaccgccccggcgaacagaccgcaccagaatatagctgccgcggttcctaccatatcctgatgaccgacggtctctggaacagcgattccgctaacgtgggcaatgcagacagcaacagcaggacccttcccgacgggcaacattacagcagccaggcgccgtacaaggacaatgcctccaataccctcgccgatctggcatttcactattgggccaatgacgccaggcccgatatcgaagacaatctgaaccctttcagggtatccggaatttctggttga

SEQ ID NO: 361843 - DNA, 282 bp, Pseudomonas aeruginosa
atggccgtcctccagacccacaaggtcgtcgcgcagttgcctgcggcgctggagccgaacgcgatctactttgtccggcgcagcaccggctacgaccagttcgtcaccaacggcgccggggtggtggtggcctatccgatgaacgtccgcatcccagcggctgttcctgggtatctcgccgacggctccatgcttcggctcacgatgaaccctgacggccaactgccggcctatacctccggcggcgctcaactcaacattcaggtgctgttcaatggctga

SEQ ID NO: 361844 - DNA, 1476 bp, Pseudomonas aeruginosa
atgagtattgctggcgagacaccctcgacttgctgtagcggttgtggccgcgtgatggaaaaggctcatcggagatataacgccgagcgcttttgtgcgacctgctatgcacgcttgtttaagcgccgcttgtgtccaacatgtgggtgctttgctcggctgccatccgatgaggtagccatatgccgtaaatgcgaaagcgcgcgaccttgtgtgcgctgtggagagagtgggcgcagtgtcggcttgatgacgaaatatggcccggtgtgcaatgcgtgccgacctcatttcgtcgctccaaagccatgtggcgaatgcggtaagccatccaatcggctgacccgggtttcgcgcttggggctgaaggtgcaagtatgccccttatgtgcgcggcgggattttgccacctgccaggggtgtcgacgacatcgacttttagccaaggctgaggatggccgcatgctgtgcaacgcgtgcctttctgtcggcactgtgagctgcccggcttgcggtgaactgatgcctgcagggcgagggagcaagtgcgaaccctgttattggcgtggcgtacacaacaagcgtgtgcaactcgatcaggctgcgttcgtctcaccacgatttgcggagttgttcgccagcttcggtgcgtggctgcaagggcacgcaggggggcaacgcgcggcgttacgcattcaacgatatttgccatttttcatcgagatcgagcagcgctggggagagatcccgacctatcagatccttttagcgcacttcggagcggaaggtttacggcgtgttcggttgccaatgaagtggtttgttgaaagccatctgataacggtatgtaccgtggcacgcgaagcagattcagagagcagacgtgtcagtgcgctagtcgcctctataccggacggtaccgttggagcaaatgcgctcgcagcctatagagaccagttgcagtcaaagatcaaggcgggaaagttaaccatacggtctatgcgcctagcgcttcgcccggctgcgagcctactgcttgctgctgatgcttctgggcacacgttgccagaccaaatcaccgtggatcacctgctacgcgaggctcctggtcaacgttcagctttaagcggtttcattcactttctcaaccataaatatgcgctggatctcttggccatcgtcgatgagaagtttgctgccacccgacgccggaggcacttagaggcgaccctgatcgccttggcaaagactggagatggcagcgacagctttctgcgtgaatggattggaatcggcctggtgtatttccatgggctgccaaacacggtaagcaggcggatatcaaatgatgcgatcacgattgatgccgatgggtaccgtgtctacattgacggccaagagtactggttacccactccggagtccgtaaccggtgctgcagtgcgtgatcagtcggaaatgctagtgatctactga

SEQ ID NO: 361845 - DNA, 1056 bp, Pseudomonas aeruginosa
atgctctccactcctcgcctccaagatgaactgctatcttcgtggctggttcgcttggctatggtgcaaggctgcgatccgctagtactgacctcgttcttttggccgcatcgccgtgtttggaccaccgatttggatcgtggaacgattgggcctccagctgcttgcgcaggtctttcagcgagtgatttctccgagctcaccttagggtggatcgcatcgagggttgcccaccacaatggccggagcgacgctgtctggccatggatacttgctgcaggctgccgtaatcgccgcaggcatggcgggctgcagttttgcccagcatgcttagcagcagatgccaggccatattatcgtcgtcgctggcggttggcatggcataccagctgcctcaagcacaactgctcactgatggatagctgtggcttgtgtggcgttgtccctgagccgcaccggctgacgctagcgagcccacacattgcactatgcgccaattgcggagctgactttcgcactcaaatatcgcggccctgtaacgtgcaggcagtgtgctttcagcagcgtgcagatgaggctgtggagcgtggtgaggcgtgctatggcaacgctacgattctgacggcagagtggttcaggttggcgcgctttgtagtggctttgcttcgggcagcgggccgaaaaggacaccagcctttcagtcgactgtttgcgcagcttggcgtggagcaagggcgtctgcgggtttcggtaactgggcttccgttggagcttctgccaataggcgaccgtatgggtttgctggcgctcacatgccagattctcgatgtggaaccaggcctattggtgaacgctgcgttgtcttcaggacttacacgcggcgcactgctgttcgttggcggccaggtgccgtcctgtctcgaaccattgattgctgcgcttccgcagagcgccacacggcgtccgagaaaggcatcagctaaacggcgccatccgcgccctcggggcgtcatcgagcaaatggtggcgcggctcaagagaaagataaggccgtga

SEQ ID NO: 361846 - DNA, 891 bp, Pseudomonas aeruginosa
atgaccaagtatgagcatatccatcccgactttcgtcatgtgatggccctttcggacaaggagcggattgcctttctggatcttccacgttggattggctatgcaaaggcgcagcaaatcctggaaacgcttcaagggcttttgcataagcctcaacgaccgcgcatgcccaatattctgatcgtgggagagccgaacaatggcaagactacgatcgtgcgccgctttgtcgatctttgtggaaagggttatgtgaatgaggcgtcggaccccgtaaaaccggtcatccttgcagaggcaccgccgagtgccgatgaaaagggactgtacatctccatcctggagcagttcttcacaccgtatcgagctactgatccgtgtgccaagctgcgctaccaggtcattcacctgttccgtgcctgtcatgtgcgcatgttagtgattgatgagttccattccctcctgactggcacaccgatcaagcagcgcgaggtcatgaatgcaatcaagctgttatgcaatgagctcgcgattcccattgttggtgtaggtacgcgtgaagcagtgcgtgtactgcatacggatccgcagcacgcaagcagattcgatgtcttcagtctccccacttgggggctggataaagagttccaggcgctgctggctagcttcgagcgcatcctgcccttacgccagccttcgcggctacatcagccagagattgcgttgaccttgcattcaatctgcgacggcaatatcggtaacttgcatcgcttgcttgtcgcatgtgcttgtgaagcgatccagaatggacgtgagtgcattgacaggcaagtgatcgaggccaaggcctggatgcgtccaacgagcggcatccgcgaattcatcgcgtga

SEQ ID NO: 361847 - DNA, 1035 bp, Pseudomonas aeruginosa
atgtgcgtcgcccattcggtactgcctaaggaagactggctcgctcttcacaaagtagatgcgcaatggccggtgtggggcgtaccgaaaacaattcatgtcgacaacggggcggacttccgctcgaacaatttccagcagtcgtgcctgatgtacggcgtcaatttggagttcaggcctgtaaagcaaccgcgttacggtgggcacattgagcgaatgctcggcacattattgcgcgaaatccatgctcttcccgggaccacattttcatcggtaaaggagcgtgacggttacgatgccgagaagcatgcggcactgaccaagtctgagtttgaagagtggttggtgactctcatctgcaaggtgtaccaccagcgcctccattcggccttgatgatgccaccatccaggaagtgggagatcggcatttttggaaacgccgaaacgccgggtgttggcattccgccgcgcccggtggcccggcacagcatcttgctagatttcctgccagcgttcaggcgcaccgtacagacgtttggcgtgacaatcgatggtatgagctactacgccgaagcgctgcgcccctggatcaacgcggtcgacagagaaactggcgcgaagcgcgagttcacgttccggcgagatccgcgcgacatcagcacgctgtggttcttcgacccggaaatcaagcagtacttcaagattccattcgccgaccaggcgttgccggccatgagcatttgggagtaccgccaggccaaggaaaagctcaagcaggaagggcgggccggcgtcaaccaccatcagatactgcgcgcggttacagagctgcgtaccaaggttgatgaggctcaagaaaagacgaagcgtgcccgcaagcaggctcagcggcgcaaggatcacgcgaacaaagtgtctccgggggcacccttggctggagtaccaccgcagccttcatcccccacgccgacaccggccaacccggccgtttccggcctattggatgacattgatccatacggagatatcgcatga

SEQ ID NO: 361848 - DNA, 696 bp, Pseudomonas aeruginosa
atggatgacaatagctgcgatcagatagttgtccggcaaacccgacgcattggcccgacaagacgaagcgtttccggcatctacgtatttcgccgggagacgccgatcccgtttgaatcaaccttggagcgggatttcctgatccgggccgaattcatgctggatgtactcgcggtgacagcccaaccggtcggtattccgttcatcgatgcgcagggacgtgccaacgtctacacgccggactttttggtccactatcgtctcggcaatcgttcctatgatgattacccacggccgttgctggtcgaagtcaagccagcaagagcatggcgtgccaattggcgagcctggtcaggcaagtggaaagctgcgcgccgatttgcacactcacagggctggcagttccgaatttacgatgagtcgcgtattcgtgatcagactcttcaaaacatccgtttcttggaacgctatcaacggatggaatttgccgcggaagagtctcgctggatcgtcgataaccttcaccagatgggcgccaccccctttcattacctgctgtccagacacttcatgggcgcctaccgcgtaaatggtgtagcgcacatttggtacctattagcgagccggcaaatcgagtgtgatatgagccgaccgcttagcgaccagactgaactgtgggtgcccagctatgcatga

SEQ ID NO: 361849 - DNA, 279 bp, Pseudomonas aeruginosa
atggaactgaaacaagccataggccaagcattcaaggagttgagggtcagcagaggtctgcctcaagaggctgcaggggccagccagagctacatcagtgatgtggagcgggggctcaaaagccccacgatcgagaaattcaacgagctagccaccaacatcggcgtccaccccctcatcattctcgccaagggctacatattggctggtgcccctgaaaccaccgaagagctcctagccttgttaaaaaaagaactcttagacctaaaagataattag

SEQ ID NO: 361850 - DNA, 1221 bp, Pseudomonas aeruginosa
  misc_feature (1167)..(1215): n is a, c, g, or t
atgcacccagaacactttgatttatctagctctccattcctaccggttgcgactgaaacctgcttaagtttgttaggtgctaatggcgcaaaatctcttaccgatctgacggatccagagctggctgcgatcttggtgatccagaacttggcgagtgaggcagcggagcagctcacctctcattgggtagaaagtgttctggccaagctcattgcttgggcagttgacactcggaaaacagaggccccaggattattgtcggaggcacaacgactttttgagccgggtaagttctactctggttgcaaggttgctaaacgtttgaatctgcgatttctcctccctgatgaagtttcagcacgggattacttgttgccaaatggaaaatgggatgtcacatttaaggcccgccactgcagaaataaaagcccgtttagcgagcaggtagttacgccctggcaccgtgagcgatggttgacccctgcgcaggacaaattgatcaggactttccgcgccaatctggatgaacacctgcatattcaaggttatgcagggataggcaagagccatctgttaggcgccctgagagagtgcctgcgccccgaaaacacgttggtgctggcacacacagagggaaagctggaagctcttcgcagacgcatgggcggagcgcatgccaaggaaacgagctttaccttcatgaggttcgcacagagtcttctgcccgtatacagacctcaatctgggagcgcgccggccaggaacccaagcaagttagcattgtcgcaggagctgagtatcctcggtcttgctggatacgataagcttgcgacgctgaatatctgtttgaaggtgatcgagcgctattgccagtctagagacgtcttgctatcagccaagcatctacctaagtttcagccccccctgtctaacttggataccagggtgcttctgcaatattcaagtcgtctatggatgtacgttgaggcaaatccaaccttggacaaactggttgggctcgagacgttactgccgataaagcgcgcaagtctagcgggctgtgtggttccggcgcgttattcccacgtcctcatcgacgaaagccaggacctccctgaatcgctgcttcaaatcattgagcgtggccgccaagtgctaattaccctnnnnnnnnnnnnnnnnnnnnnnnnnnnnnnnnnnnnnnnnnnnnnnnnntggtga

SEQ ID NO: 361851 - DNA, 621 bp, Pseudomonas aeruginosa
atggtgtctgtcaaggtccccggcacacgtgggccagaacctccccctaatgattttaaaggtacatcccgactcgataaggaaccggccatattgaagccttcgttggcgtacaccaacactgctggcaagtctgggttgcgttcgaacaaactgaacaacgcctccagtactccttcaggcgtatcgttacagataatgccatcctgcaaattggcaatacgatgccaatgcagtccagccggcgttcttagattattgaccttgaccgataagctacgcttcgtcctttctgcggagaatcgtaagttcggcgtgctcggatcccagccacgcaccaccgtcaccgtcggtatcggccatttctccaggaagtttttcagccccagctctaaggcgtccgcttggcgcttttcatatgccatatccttgtcatccgcggacgtcggatacttcttcgggtccatcggcaggatgctgccgacatgtaacgcctcggcctgcgcggcattctgctcctgcaaagccttccacacccgcccttggcgaaacacatccaggctcatgcctatgctgagcacatccagtgtttccaggcgtggcgaagttttcggagcgtga

SEQ ID NO: 361852 - DNA, 246 bp, Pseudomonas aeruginosa
atgcaaggcctcgggctgcgcagcgttctgctcctgcaaggccttccacacctgcccctggcgaaacacatccagactcatgcctacgctgagtacatccagtgtttccaggcgtggcgaagttttcggagcgtgataggcatcagcggacatggcggcctccttggccggggcgtaggcagtaacgggcgccgccggactggcgaagcagcgcatcgcggaaaagtccgtaccattcgcctgtga

SEQ ID NO: 361853 - DNA, 453 bp, Pseudomonas aeruginosa; identical to SEQ ID NO: 350924

SEQ ID NO: 361854 - DNA, 1302 bp, Pseudomonas aeruginosa
atgaatgccgctgatgagagcctgggcaacgtcctgctggtcggtctgggcgcggtggcgatccaggtcgcgctggacctgcgccgccacggtgccggtcgcctcggcgcgctgaaccatcccggccggcgcagccagcggatcgccgaggccctggcgcgcggcgcctgcctgcagctggaagggcaggggcagcatcgctggctgtccggcaacgccgcgctggacgtcttccaccaggaccccgctgagcttcgcgacgattggcagaccctggtgctctgcgtgccggccgacagttacctggacgtggtccgcgggttgccctgggagcgactcggcggggtgcgcacgctgctgctggtgtccgccttcatcggcgccaacctgctggtgcgcagcgccctgccggcggggtgccaggcgaccgtgctgagcctgtccagctactacgcggcgaccaaggtgatcgacgagacacaaccgctgcgggccctgaccaaggcggtcaagcgcagggtctacctgggttccagccggccggactgcccggcgcgggagacctggcggcgagtcctggccggcagcggggtggaggtggtacccctggcgacgccggaagcggcggagggccgcaacgtcaccacctacgtgcacagtccgttctttctcggcgagttcgccctcgcccggatactttccgagcaggggccgcccggtttcatgtacaagctctacccggagggacctatcacccccggggccattggcgccatgcggcggctgtggtgcgagctgagcgaactgttgcggcggatgggcgccgagccgttgaacctgctgcggttcctcaacgacgacaactacccggtgcacgagacgatgctgccgcgcgcggccatcgacggcttcgccgaggccggcgccgagcgccaggaatacctgctgttcgtgcgctacgcggcgttgctggtcgatccgttctctccggccgacgagcagggtcgccacttcgacttttccgccgtgccgttccgccgcgtcagtcgcgacgaagacggactctggcggctcccgcgggtgccgctggaggactatcgcaagctggcgctgatcgtcgcgctggccgcccacttcgacctggccatgccgcaggcgcgcagcctgttggcgagctacgagaacgccgtgtcccgattcatcgattgccaaggagcgagccagtgccatccaagcctgtatccgatcgacagccgtccggcggcggacgccatctatcgccaatggtgctcgacctgctga

SEQ ID NO: 361855 - DNA, 279 bp, Pseudomonas aeruginosa
atgatcatcagcttccagcacaaaggccttcgcctcttcttcgaaacggaatcgactaaaggaattcgggccgatcatgcaaagcgcctcaaacgcatgctggccctgatggatcgcgccgccgtgcctgctgaccttgatatccccggctggcggctccaccccttgaagggggaacttggagggttctggtcactcaccgtaaacggcaactggcgggtgaccttccgcttcgtcggcagtgatatagaactcgtcgactaccttgactaccactga

SEQ ID NO: 361856 - DNA, 177 bp, Pseudomonas aeruginosa
atggaacaccacgaattgctggaacccagtatcaccgaggagtcactgcctgatgatcagatcagcgggttggagtgggtgctgctacgccgcttccgagcactgaaccccaaagatcaggtagtgctattcaaaatgatggaggggctaacggcactcgcggcactggagaactga

SEQ ID NO: 361857 - DNA, 873 bp, Pseudomonas aeruginosa
atgacagcatatgctttctggaataacaaaggtggagtgggaaaaacctatctctcatttattgctgcgtcagaatacgcgcacacttatcctgactccgatgtatatgtaatagacctatgccctcaagcaaatgtttctgaaaccttacttggaggaaacattgctagctcgaaagctatcaatcaacttaccacccacacccctaggaaaacaatcgcaggatacctagaagcgagattaaactcaccattctccccactggagtgggtaaaggatttggtaagcactttaaaaatgcgaagcgggaatagagactgcatattcataatagattgcaaccccagtttctccatatatacacaactcgctcttgttgctggtgaaaaattgatcatcccctatacagcggatgatagttctagacgtgccatagaaaatatttttgctctactttatggcgttggcgacgcaagaacagaggcttatgcacgcctgatattcagcaaaaaatcacaagaaaacgctgtagaaacccctaaaatacatacatttataagcaatcgacagactatatttgacggcgaaccaagtaaagcattcaaaggcataaacaaaataattaaagacatggtaaacacttaccagaagaaacataaaagccttttctcttcaaagtcaaaaaatgcttcagaaaacttcatcgaaatcccggactatcatggtgcctgcatcgtatcagcctttacgggaacacctttattcaaactaaaagccggccccaaaactattggggaagagcgggtacaactcaaccctgagcccttaaagaaatacaaagcagcactttctgaatttgttgagcttctataa

SEQ ID NO: 361858 - DNA, 339 bp, Pseudomonas aeruginosa
atggaagcacacgcttacaaaggtttcgcctctcggatcggatttggtctgggtacgtttgtgtgcttctgcctgcatgatcgtcggcctgtcgtgcgctggatcaaacgagcctgcctggtcgtggtgctgttcgttatccttgttcagaactttacctggctggcaagcgccttcatgactttgttgtcgtttgggctgatgagtttggttttggtaaaaggaaacttagatatttcaaaagacaatagtcaaatctcgtatggtactggatacggtccggagggatatggctactatagagccggccgtagggtggatgacgatgatgacgagtaa

SEQ ID NO: 361859 - DNA, 258 bp, Pseudomonas aeruginosa
atgcagaagttcattttcgaaagcgagatcgaaggtcatgaccgggctgactgggatgtggtgggcctcgtgcagacgcgagatgacttcgagtacgtggaggcctactgcgcgaaccggcttgcgccattggtgagcgccatgacgcctgcgccagactcaactcgtcgtgcccttctggtaatcgtggaaaaacccgatgacccggaaacggcgaagcgcgtgcggaaccgatacctcggcctggccgtccagtag

SEQ ID NO: 361860 - DNA, 843 bp, Pseudomonas aeruginosa
atgattcagtccccagtcatccgctaccacggagggaagttcaggctcgcgccgtgggtgatcagacacttcccgccgcacacctgctacgtcgaatcgttcggcggcaccgccggcgtgctgatgcagaaggagcgggcctacgccgaggtctataacgacctggacggcgacatcgtgaatctcttccgcgtgctccagctcgaggagacgcgcgagcagctgacccgcctactcgtcctcacaccgtatgcccgtggcgagttcgatcgtgcatgggagccgacggcggacccggttgaacaggcgcgccgaacaatcattcgcgcgcagatgggcttcgggtctgccggcgccaccaagggccggaccggattccgcatcgacaccaagcgccagtacggcactgcccaggctctgtggcaggagtacccggagcaggttgccgagattggccagcgcctttccggcgtcctcatcgagaaccgcccggcgatcgaggtgatgaaggcgcacgacggcccagagacccttcactacgtcgatccgccctacgtcttcgccaccaggcacgccagcgccagcagtcggcagtactaccggcacgagatggacgatgggcagcaccgcgaccttctggacgaactgctcgagctggaaggaatggtcgtgctgtccggctaccccagcgagatctacgacgaccagctcaagggctggtcgctgaattccacgaactcccgaatcagcgcaggtcgcggcacagccgtgcgccaagagtgcctttggctgaacccggcgtgcatgaccgcgctgaaccagacgggcctgaacttcggctga

SEQ ID NO: 361861 - DNA, 246 bp, Pseudomonas aeruginosa
atggacctcccacccaagtttcaatgcgcggcgaacttgctgaaggaagctcgttccgaagtccgagtcattgccgtcgccagtaacgagaaccaaggcttgaggcgcgtcaaagtcgagaagagcgttggcaatcttgagatggacaatttcatccaccccctgctcggccacgcgcccatcgtcacgatcgacgcgatgcagaagatcagtgtcatagcccttattcctcgcgtgatcccatag

SEQ ID NO: 361862 - DNA, 4158 bp, Pseudomonas aeruginosa
atggcaaaagtcatacccatcgggcaacccgcgaacgaatctgaacgccaggccattggtttcctccgggatcatcttcccgatggctggctgatcttccataacttcgagatgcgccaagggcaggaggtgttcgaaatcgacatcgccatcctcgcgcctcatgcggtgtatctggtggatgtcaaagggacgcggggcaacatcgatgtgtatggctccaagtggtatccgcaggggcggcaaccgtttcactcgcccctcgcgaagcttcgtcaccacgcgaaggtgatggccagcttcatccgcgatagcaatcccggacagatcgagctgcgcaaggctcatgtccatgccgccgtgttgctcactgccgatgacgccgccgtgttcgatcaggcgggcatcgacagcccggacgtgaccgacttcaagcactgcctgaaatacttccgcgatgcgagccgcatccctgacaaccggctggataacatcacccgcttccactcccagatcgccaaggctatcaccggcaacgccaagcccaagagcgcggcgctggtgttccgcgactggcaggtggaagagaagctgggcggcactgaccgctacaccgagtaccgcgccaaacacaacctgttgggcaagagcggcggcatggcccgcctgcgggtctaccaggccgacccgtaccaggacgaggccgcccgcaaggaagagttcaagaagatcagcaacgcctatcgcgccgtggcgcacatgccgacccacgccaatgtgctggcggtgaaggatctgttcgtctccgacgatgaagacaaggtggtgctggtcactgaggatctgcctggccaggccctgcgcctgcacatcaacaaggtctcgatggcgctgaccttcgatcagaagctccaagtgatgcgcgacgtgctgtcggccctggaccacgcgcaccggcatgaggtgatccaccgcaacctgaccccggacgccattctgctgatcaagggcggccaggcccgggtaaccgatttcgatttcgccagggtgggcaagaaccgcacctctaccatcgccgatcaggtggtggatgatctggatgctacttaccaggctccagagtgcttcaaggacccgacccaggccagcattgcctccgacctctatgccgccgggctgatcttttttgaactgctgaccggcgagctgccctttgaaagcgtcgaccagatgatggaggccgatggcaagttccccatcaagccctcggagcacaagccggacctgcccaaggggatcgacgagtggttgcagaagttctgcgagtttgaccccgaggaacggcacacgagcgcagccatcgctcgcaaggccctggatgacctgattctgcccgaggccaagaacgactccggcccggatgtgagcggcccggccgtggttgtgccacagctcccggataacctgatgaacttgccgcaggatttcatcctggcggatcgcttccgcattcagaagaagttgggcagcggcggcttcggcgtcgcctacaaggtgttcgattccctgggcgatgtggtgcgcgtcatcaaactggtgaccaaggaccgccgcagcgtgtacgaacggctgcgccgcgagtacaagaccctgaccaatctccccgaacatccgcatgtggtgaaggtgatctgggcggatcgcatggccgatgctaagcagacgccttacattgtctttgagtatgtggaaggtttggatgtttccgatctgatcgatgccgaggcgttgtcgctggatgatgccgtgcgcatcgtgcgcgaggccgccgaggggctggcccatctccacaagcacggcgtttaccatcaggacgtcaagccctccaatctgctatggacggacaaaggcgtccgcatcatcgatttcaacgtcgcggtctccgagaacgatgaggttcaaggtggtggcggcacacgccgttacctgccgccggattacgactactcctccgagccggatgcttcggatcgaatggaccgtgacctctatgccttgggcatctccttctatgagtgcctgaccggcaagtatcctttcgacgatcccacgccgccgatcaagactcagcccagggaccccaagcagttcaaaggctgcgccgacctcagctcgtcgctggtcaatgtgctggcgaagatgatcgcgccggagcgcaaggatcgttttgcgtcggcagaggagttcttgattaccctggccgaggtcaagcgcctgcgctcggtgctgacgaccggcgagattggtgccggacccaaggtggtggccaagctgggtttcgagccgaccaagcccaacaccaacccctttgtcacccacctgctgacgctctacagccagagccaggtgtccaacgcaggcacccgtggcctcgacgaagttggcaaggccacctacgtgccgacttatctggacgaaaagctcaagcccgcgctgctcaagggcgagttccgtttggtcatcatcagcggtaacgccggcgacggcaagacggccttcatccagcagttcgaggcctttgccgagagcaagggcgcacagatacagcgcggcgcgaacggggctgtgttccagcttaaggggcatacctaccaaagcaactacgacggcagccaggatgaaggcgacgagcgcaacgatgccgtgcttcagaagttcttcgctcccttcgcgggcaaggatgcctccggctggcccgagaatcagacccgcctgatagccatcaacgagggacggctggtcgacttcttccttgagcatgaagaagagttcccgttgctcgccaagcagatccagcagggcttggccggagctgctccggaaggcggtattgcagttatcaacctcaacctgcgctcggtggtcgccgaacccgaggaaggtcagccttcgattctggagcggctgatcgcccgcatgacgcagcaggaatactggcaggcatgcgacaagtgcgatctcaagggcaaatgctacgcctatcacaacgcccggaccttccaggacccggttgccggtcccaaggtgatcgaacgcctgaagatgctctacaccatcacccacctgcgcggccgactgcacatcaccatgcgcgaccttcgttcggcgctggccttcatgctggtaggcacccaggattgcgacggcattcaccacctctatcagaacggcggagaagaaacccagaatcgcatccttgacggtttctatttcaactcgtggcttggtggggcggaaggatccaatgaccggctgattgccttgctgcgcgagattgacgttgccgaagtcagcaatcccgatctggaccgcgagcttggcttcctcaatcccaagaccaaggccatgagccgcttctcgttcgcggagcgggctgggtacgacgatgaacttgtggcgacgctattccgcaatctgcctcgcgattactcgtcgaagaaccgtgctcgactgatcgccaagcaccgcaattatctatcgcatatgcgccgtcgccatttctttgagcgacgcgacatcggctggaaggagatgctgccatatggaagcatcgatcccttcctggatgccattgagcagccgggagcgaaaagtgtagatgaggttaccgccattcttcgagccatcaaccggggcgaaggtctgagcgatccggcgcgtttgggcaaccagttggcgctgcgtgttcgccaggtggataagggcaccatccgcagttaccgtctctttgacggcgaccatttcacgctccgcaccgagcaggaaaatgcggctcatcctttccttgaatgcctgtctcaggcgctggtgctgctttacgactccggcgacgggcacaaggccagcctgcgcatcaatcttgacatctatgaaatgctgatgcggctcaacaacggctaccgtcccagcatcgaggagcaggaaggtttcctgttaagtctggcggtattcaaaaacctgttatctgctgcactctatcaagaagttctgctgacggaaaatgggctccggttctaccagataaacagaaaagaggatggcgtattggcattgggtgtttctgaaaagggggctgaatatcatgtcaatcaagggtag

SEQ ID NO: 361863 - DNA, 1644 bp, Pseudomonas aeruginosa
atgtcaatcaagggtagagacaaggaattcagaacacctaaggtcagttatttacattggcagcacacggaaatggatcgtgtgctgaccatgctatttcctcgcctcaaattcaatggctatggcagtcgcaagccgccacgcgcaaatattttgcagccagaagaatttgcagatgaaatgatgctgtccgaagaggttaagcagtattttgagggctttgacgaacatccctccattgtccacaagtgggtagaaaccgaacttcttgatgtggtaaatcggggcaagtctaaccaagctgtcgcctctccgcgcccgcttcatggagagacctacaaatttcgaaatgcgaagcactgccgtgactatggggcagccgagcagatttattggatgctctactatgcccgcaaaggcaagggccaggccgcccgagacacgctaaaacgcttctttttccctgggattgatcatgtaaccggtaggcatgaatccggcacggtcgttgatgtagaaacccaagcgctacttcgcttcgattctcaagttactcaggacacacaggactccaaggagcccgagcgctttccaccacttctgattgatcaggccgacaccatggccgacgacattctgcggctattggcctatgagccctatattcctcgctcggtgctggtggattacctcaagaccctgatggcattccatctggcgctctaccacctcaagctgttgcagatactgcccaagctggtgaagcagcgctcggccaatgcgctggcgagttcacctgatcccgtggcgctggtcgtggatatgggggacgtcaataatccgcatatgggcgagctggctcgcaagtccactgaccggctctatcgccagattcctgcctttgtgcaggccaatttcgtcgtcaagaagctcgatgagatggcggaatacctgagcaagaagacgggcaagctgactactccagggggcggcgtgtttaccgtcggcgatctggtttctctactgaagcccgagcacgacgccgagcggcaagcctacttcaagttccgcctggccagcctgatcgaggagtcgacctctggaaacgaggacatcgatccggagatccgggaagtcaccgccatgggccttggcgagttcgaatccttcatagaaatcctgatggcatatcgcggcaagtatcaccgccagtacatcactgagtgcctggactcactgctgctgaagaacaaggagaacggcctgttggcccaatcccgaaccaagggaagtcctcggcggtttgtgctgggaagcaagcttcttgaagtgctccttcaggtggctgtgctcactcaggatgacgggcgtttcgtgacccgcgaggttcgcatcgaagagttgctggcctttttaagaagccgctacggccttcacatcgaccggctgccggaaggagcacaggccaacagcagcatcctcgacagacgcgccttgcgcctcaacctcgaagccttcaagcgtcgcctgcgtgaaatcgggttctacgaggacctgtcggatgcctacgtgacccagaaggtatcgccccgctatgcgattgagagaaatgacggaacagataagaacgggaggcacgcatga

SEQ ID NO: 361864 - DNA, 5460 bp, Pseudomonas aeruginosa
atgagtaatgcgtttaccaagctttcccaggataagttgaacgcggcggtcgcttgtctgctgtgcccccgtatcgaagcgatcgtgggtgaccgtggcccaggccactgcatgcgggtcaccgatctcgatgacgaggtaatggagtcggtctgcaaggaactacgtcggacccggcccgacggaaacatctttatcctcggcagccatgatcaggagggccagcccttccgagtcacttccaccaaactggtggagttgcgcaacccggacgcgaacggcgagctgcgtcagcctttgctggtcttcataccgacttcgcttcgcaccagcgccgaggactctttcggtgtggcgaccttcgaggagctgaccttcgccagtatctacgaggaccttatcgactcgctgcttgatcagctcccgacaacactagttggccatgctcgcgatcttttgggcatgctcaccgaggaggagtggctgtttgctgaccatgtttcccgtgtgcggtacctgctcactgcgctcgaaaacgggattgatggagaaaccctcggggccagcctgtatgaattgacgttgattccagacttcaagctctttgccgatcccggcatggtcaatggcaagattcgccgtaacctcggcagcgtccgcagtctgatggcctcgcacaagtcggttcgtggtcgtatcgctgatctgggactcagcgacaaggcattggagtcgcgactattcacctactttgaaaaatacgatgtccaggagcccgaatcctggacgccgcccatcgcgaccgacaagagctggtggagcatttctttcgataaatgggcgttccaggaagagctttcgctggacaaggtcctgctgacagtgctggagaccgacttgccggtcgttcaggaggatgagaccgacgaccaactctccggcctcatcgggcaacaggttctggtgccgaacgaccgccgcaaaatgaacgtggtgttcgaggttagccctcaccccggcaaggtcagcgggcttgatcattttacggttcagatcatttcgcagaatgacggcccggtaggaaaatccaaaaagatcaaagcctggacgccgaaccgtctgcaatgcacgaccaacctggccaagctcaataagatcgaattcgaggaaggatggcatttcatccgtgtaatgccttggacggccgatggcgatccgattccgctggaagcgggctccacctcccagggcgctaagcgctcctacgagagtgaacctttctacgtactgcccggtggcaacatcgaggaagaaccaccccaacgcgccatacccattgagcagagcctggagcatgcgcgtttccggctgcaactgactgccctgggcgatgaacgcgatcctgatgatatcgccatcactggtgtcgcctgggccgagggcggtcgttccaagaagacctctcgccaggaaaccctacacgcaaaattcggtcgtgagggcgcggttcagatcccgctttcgcgtatgctcaaaaccatcgagcagcgcatcttggcggagcccaagcacccgtcaggctggcgaatgcagatcaatctggataccgccgagccgccttccgaggttggactcacgctgccatcttccgccgcgatggcttccttcctggctgcccgcgaagagttttttgcagcagtgcgcaaagacactgccgagctgatcatgcaggggctttcgttccgcgactcggaaagggaatgcctcgcgtatgctgaaagctaccttgacttggtcaggaacctcatccgtcaggccgagacgacttctggtgccgagcgtcagcaacacttgcaagcgctcagaaatgtgctggccgtcgattccattcatgtcatcttgaccgacttcggtggaaggcaccgggaggctgttttggtctccccaacccatccgctccgtgccttgtggctgagcagttgggtcgccctaggtaaggattggattgagaagatcaagtcaggcgggaaggatcacattcctcacgtccgttccgcgctgttggatggccttgtgccctctgcctatccggtcggtattcccgtcgaggatggccgcatcttcactccggtggacaacctgaatgctttctgggcgctctacgccccgacgaccgaggaaaattcccgtggtctgatggcggaaatctgttcagctctcggcttggccgagccctctgcggcgggagcagatatttccggacaggtcattgcggacaagatcgagcgctatctctctcagcatccctatgttcgagagttatcactgaacatcttcaaccccggggccggatcggtgattgcggaggctctgctatcgctccagcagaagcgcgagcatgccgatttgcgctatgacgtgcggctctttaccaccgatcccgactcacctgttttgggcgaggcacttgagtcgatggtccgtcccggagccacggtaaacgaggccgccgacgcatttgcgacctcaacgggcagccatctgttctccaagttgaacttggccaagcacccactgaatgaattccatgcaaattccaagaagttcccggcgcacatcagtgttcttctggatgtgtttcccgccgaggagctttctattgcagagaagccgatgggggtgaccccgctgcatgggctgatacaggacttcgacactgagttcgttgatgacgattcggggaccttctggaacaagcggccgattgtcgggcgttccctcggcgcggacaaccatgcggcgtgcttcgatttgctttcgtccctgagccggcacctctgttttgctacctcagcggttgctgcttctggtgccagcttcaaagctgtgcctgtggtgacccttggcctcgatgtggcccaacgagaactgatctacgaggttcaccagatcagcgattgggtgttcaccatcgaccgaaatatggggattgagttcttcgaccatggcggccggaagaacagaccggactatctgattgactatgtgccgggagccagctcccaggcgacacacaacctgatcatctcgtcgcgctcgaacgatgaactggaggcgatgctgaagccggtgctgcttgagcatggcttgtccgccgacggcgagcagtcggttcagatcctggcaaatctgcggtcgctgtccggtcagctcgctctgaagctgatttctgctcgcacacaacaggcggaagcacttggcctggctttggctcggctctacctcgaatatcagggcgcattgagcaatcaggtcattgtgccgttggatgcgcacacggacctttaccgctcaagcggtgagtcagacggtgtcaatgatgcaatcagcctgcaacgcaccgacttgggattgttcgatttggatttgaacaccagaacgatcacttgcaacctggtcgaggtgaaatgctattcgcaagttggcgactttgcggccttcaaccaactgaaggaacggatttccgcccagatcaatcagagcgagcgcatcctccagcgccactttgacccggccttgaagaagccggaccggccggataggttgctcaagagccgggagttggctcagatccttcgtttctatctagagcgctcactgcgttacgggatctttgatgcgactgctgcgcaggaagcacgagggttacttgaatccatcgagcagggctactcgcttcagttcagacgctgcgccctgatcttcgacttcgacaagaccggaaccgaggccccggacaacgaggttggcattgaattccaccgcatcggtaaggatctcattcgcgccttactggagaactgccgcaagcctgtttcgggcgagattgaggaggaaccgaccgtgcacctcctgagcgagcagtttataccgagcgtaccgaagctcgagacagccgctttcatcgcacccaagagagcccggtcaacgtcctggacggtggatgagctgtgggacgaagagccgaaggcaccaatcacccagctaacaccacctgctggagaggaaacgcccgcacctgtccaagaggaagaacaggctgaacctgtcaagcaagcatctcgaacttccaccattgcgcctgaagaagaaaaagaagacgagcagcccgccgccgttgctgttgacccggcggaacctgttcaacccaagtatgaagcgccggaacatccgacacccgagcctgcgcttcaagccgaggtcagctatgacattatgctgggcgttaatggtgactcaccccagtacggattgctcggagaggtttccggcaggaaaatcgcgctggacctcaaccatacccacacaatcagtctctttggggttcaaggcggcggcaagagctacacccttggaacagtcattgagatggtctccatgccgcttcagcacatcaatgtgctgccaagcccgctcgccacggtcatcttccattacagcccgacgcaggattatgcgccggagtttacctcgatgatcaatgccaactcggtggacgaagagatccgcatccttcgtgagcgttacaaggccaacccggaagccctggaggatgtcctgattcttaccccggcaaacaaggtggatgatcgccgggccgagtacccggatatcgaagttaagccgctcgctttttctgcctccgaactcaaggcggcgcactggaaattcctgatgggagcgattggcagccagagcatgtatatgcggcaaatcaatctcatcatgagggggctgcgggacaacctgaccttggatgccctgcgagcaggcatcgataactctagtctatccgatcacctgaaagagctggctcagacgcgtctgctgttcgccagcgaatatatcgatgataaccagcggctccaggatctgattcgtccaggcaggttaatcatcgtggatctgcgagatgaatacatcgaaaaggacgaggccctcggactgttcgtggtgatgctgcaaatcttctcggaagcaacctatcaaggaagtgccttcaacaagctcgtggttttcgatgaagctcataagtacatcgagaacgatgacctggtttccggcctggtagaggttgtccgtgagatgcgacacaaggggaccagcatcatggtcgcctctcaggatccgccatcggtccctgtctccctgatcgagctgtcatcgcagatcatcatgcataagttcaactcgcccgcctggctgaagcatatccagaaggcaaatgctgcccttggcgagttgacctccgacaagatgagccatctcggaaccggcgaagcctatgtgtggtcgagcaaggcctcggacgactccttcacccggggcgcggtgaagatcaagtgccgtcctcgcatcacgcagcatggtggcagcacaaaaacggccgtggggcggtaa

SEQ ID NO: 361865 - DNA, 1023 bp, Pseudomonas aeruginosa
ttgaacgccccccaggaacttcatcgctttatcctcgagccgttcgacgcccgcagcttcgcgacactttgcgggcagttcgacgagcatctccaccagatcgagaaacgcctcgacatcgagatccgcaaccgcggcaaccagttcgaactggccggcgaaccgcgccggaccaaggttgccgaacgcctgctgcagcgtctctaccgcgaggcgcagaacggcaccgatctcactcccgacaccgtgcacctgtacctgcaggagtccggcctggaagacctcgaggaattgcagagcgcgccgcaggtcaccctgaaatcgcgcaaggcgcacatccgcccgcgcggcgccaaccagcagcgctacgtcaaggcgatcctcgaccacgacatcaacttcggcatcggcccggccggcaccggcaagacctatctcgccgtggcctgcgccgtcgacgccctggagcgcgagcagatccgccgcatcctgctggtgcgcccggcggtcgaggccggcgagaagctcggtttccttcccggcgatctgtcgcagaagatcgacccctaccttcgcccgctctacgacgcgctctacgagatgctcggcttcgaacacgtggccaagctgatcgagcgcaacgtcatcgaggtcgcgccgctggcctacatgcgcgggcgcacgctgaacaacagcttcatcatcctcgacgagagccagaacaccacagtcgagcagatgaagatgttcctcacccggatcggcttcggctccaccgcggtgatcaccggcgacgtcacccaggtcgacctgccccgcggcacccgctccggcctcaagcacgtgatcgaggtcctgcaggacgtccccggcatcagcttcacccacttcaagcccaaggatgtggtccgccacccgctggtgcagcgtatcgtcgaagcctacgagcgtcacgagagccgccagcaaggccaggtgcggccggtcgagggaacgggcaagggcggtcacgatgccgcttga

SEQ ID NO: 361866 - DNA, 636 bp, Pseudomonas aeruginosa
atgtccgatcctgctgaagtccccacagccagccccttgctggaaaccgtcgggctcgcctgcgagcgcgactggcgcatgctgttcgagcgcctcgacctgcgcctggccgccggtgagatgttgcaggtggtgggtcccaacggcctgaacggccggccgctcgccgaacagcgcggcgaactggcccgcagcctgctgtggatcggccacgccgcgggaatcaagggcctgctcagcgccgaggagaacctcacctggctctgcgcgctgcaccagccggccagccgcgaggcgatctggcaggccctggccgacgtcggcctgcgtggcttcgaggacgttccctgccacaccctttccgccggccagcaacgccgcgtggcgctggcccgcctgtacctggacgcaccgcccttgtggatcctcgatgaacccttcaccgccctcgacaaacagggggtggcgcaactggaaacgcacctggccgggcattgccagcgcggcgggatggtggtgctgaccacccaccacagcctgcagcagatgcccgccggctaccgcgagctggacctcggtgcgctcaaggcggccagcggcgcgacggtcgagccggcgctgggcgacccggcatga

SEQ ID NO: 361867 - DNA, 201 bp, Pseudomonas aeruginosa
atgagcacaaaagaacccggatctctggaaaccgtggcgtcacaggccgcgaaagagttgggttcggtgttggcaattggtggagctctcagcatcggcgatttaccgataattcgccgtcgcttggatgaagtcatccaggcaacgaatgctgccattcaagcgtgcgaagagcatcaatccggccaaaccgtagagtag

SEQ ID NO: 361868 - DNA, 603 bp, Pseudomonas aeruginosa
atgagattccggtgcttcgttagccatgagctccgcggtctcgatcacgaagtcccactgcagctgggtaagggatttcccgccacttcgtttggctgtggtcctaatccaacgacttttgcccttgatcgccttgaaggggtttccttgagccaggtcctcctgggtcaaaaattcgaagaacgaactacagatggaaaagacctgccggatactgccctgagccattttgtaaccagacacccccaactcctcgccggcttccttggctctctttcgatcgcttttcgaaattttgatgccgaaggggcgccagccagggttcggttcgtagacgcctccccttggaaggaacctctggcgcacagcatctccaatccagctcgcaggcggagccacgttgaaatccatgaatctctcagcgtcagaccggcgcaagtccagaatcgatttccctgcgatgatccaggaccacaacaggatgcgctctacctgcgtgcgataggccttaaacgtggttgcttggccgctataggacttcaaaaacgcccgagcatgggcgaggtcgtttgctgccggaatatggggagcgaaaacctttag

SEQ ID NO: 361869 - DNA, 183 bp, Pseudomonas aeruginosa; identical to SEQ ID NO: 356331

SEQ ID NO: 361870 - DNA, 285 bp, Pseudomonas aeruginosa
atgaacaacgactatctcaagcgcgtttctcagtggatcgtaggagaagatacggggctttcagcgattgcgatttggtcgagcatgatgggagtccagcccgagtggaaggcgcgaatctcggagatggccatccacggacgcgaatgggctgctctcgtttcgcactgggaggaactccatcagctgatggacgatgaggtggggatcgactggagtaaggggaacagtgccctgcgcacctacgaacgaatgaaggccattcaaggacatcatcgaacctga

SEQ ID NO: 361871 - DNA, 192 bp, Pseudomonas aeruginosa
atgcaaagccctacgccccactcggtggcgcttgcctatgacggtagcgatctctatttcttcgatcccaactccggcgttcacgaattgacgaacctcgcctcggcagctacggaactggagaaccacctgacgacccgctatgcagtcccctattgcgttcacgccaatatgttcaagttgaaccactga

SEQ ID NO: 361872 - DNA, 2709 bp, Pseudomonas aeruginosa
atgaacggcatcccacccctgtcttcccgcgacgcccatgccagcccgccgcaacgggtgctggaacgattgcacagctccgccgccggtctggacgcggacgaagccgcccgccgcctggcggcgcacggctacaaccgattgcccgcgccgaaacgccaggggccgctgctgcgcttgctgcggcagttccacaacgtcctgctgtacatgatgctgttcgcctcgctggtcaccgcgctgctcggcttctgggtggacagtgcggtaatcctcctggcggtggtggtcaacgcgctgatcggtttcgtccaggagggcaaggcggccaacgcgctggacgccatccgcgacatgctttcgctgcatgccctggtcctgcgcgacggccagcgccaggcgctggacgccgaacgcctggtaccgggcgacgtggtgctgctggcctccggcgaccgggtgccggccgacctgcggctgttcgaaacgaagaacttccatgtcgacgagtcggccctgaccggcgagtcggtgccggtggagaagggctgcgtcgcggtggccatcgacgcgctgctcggcgaccgccgttgcatggcctattccggcaccctggtgaccagcggccaggcgcgcggagtggtggtcgccaccgccggggataccgaactgggccggatcggtacgctgttgcgcgaagtccgcaccctggccactccgctgctgcgacagatcgccagcttcagtcgctggctggccctggcgatcctgctgctggccggcgccactttcgtcctcggcaccctctggcagggccagccgatggtggacatgttcatgctggtggtggcgctgaccgcctcggcgattcccgagggactgccggcgatcatgacggtgatcctcgccctcggcgtacagcgcatggcccggcgcaacgccatcgtcagccgcctgccggcggtggagacgctgggttcggtgacggtgatctgctcggacaagaccggcaccttgacccgcaacgagatgaccgtgcagcgtatcgtcaccgccgaccaggtaatcgaggtcagcggcgccggttacgcccccctgggtggtttcagccacaacggcgaaggcctcgatcccgccggacgcgacgatctgcaggagatcggtcgcgcggcgctgttgtgcaacgaggcgcgcctgcaccaggagggcgaggcatggcaactggagggcgaccccaccgaaggcgcgctgctcagcctcggcctcaagctgggcctcgatccgcaggcgctggcggcggaacggccacgcagcgatgcgattccgttcgagtccgagcatcgcttcatggccaccctgcaccacgaccacgcaggccaggcgatggtctacctgaagggcgcgccggagcgcatcctcgacatgtgcgaggctgaacgggtgggcgactcggtgcggccgctggacccggactactggcggcgcctggccaccgacaccgccgctcgcggcctgcgcctgctggccatcgcccgacgggcgatgccggcggagcagcgcacgctggatttcgccgacgtggaacatggcttcaccctgctggccctggtgggcatcatcgaccctccgcgcgaggaagccgtggccgcggtcgccgaatgccaggcggcgggtatcgcggtgaagatgatcaccggcgaccacgtcgacaccgcgcgggcgatcggcgccatgctcgggatcggcatcgaccggccggcgctgaccggcgcggagatcgagttgctcgacgaccagcgcctgcgcgaagtgctgccgggcgtcgatgtgttcgcccgcgccagccctgagcacaagctgcgcctggtgcaggccctgcaggccagcggcgaggtggtggcgatgaccggcgacggggtcaacgatgcgccggcgctgaagcgcgccgacgtcggcgtagcgatgggcaacaagggcaccgaggcggccaaggaggcggccgaggtggtcctcgccgacgacaatttcgccaccatcgccaatgccgtgcgcgagggaagggcagtctacgacaacctgaagaaattcatcctcttcatgctgccgaccaacggtggcgaggcgctgatcgtgatcgccgcgatcctgttccagttgaccctgccgatgacgccggcgcagatcctctggatcaacatggtcacctccagcaccctgggcctggcgctggccttcgatccggccgagcgcggcctgatgcagcgtccgccgcgtccgccggcggagcccctgttgtcgctgttcttcgtctggcgggtgctgctggtctcgctgctgatgatggcgggcgccctgggcctgttcctctgggagctggagcatggcaccgggctggagagcgcgcggaccatggcggtgaacagcgtggtggtgtgcgagatgttctacctgctcaacagccggcatatctacgattcggtgctcagccgcgagggcctgttcggcaaccgccaggtcttgctggcgatcgccgcctgcgtggtgctgcaactgctctatacctacgcgccgccgttgcaggcgctgttcggctcggtcggcctggccccgggcgagtgggcgcgggtgctgctggccgggctcggcctgttctgcgtcgccgaactggaaaagtggctatgtcgccgggtccgtgcccggcaggcctga

SEQ ID NO: 361873 - DNA, 420 bp, Pseudomonas aeruginosa
atgaggacgatcttcaggaaagagccggtcgaggtcaccctggggctgaagcaattcccaaaaaggcccgcacaggctgtccagtcgatacatattcaaagcattgggatcgatctcaactccgccataagtcagggtggacttaagagccaggaactgctccatcgacgcatcgggctgcccggctatgatttccatctgctcagaggccatctggtggaatgcgtgattagcggcccccagatgcgcctggatcagttcgttcgcactcaacgggatgtcacgacagaaagtgaattgctggcgtgttttttctacgcgctgaaagtggtcattgagccaggcaacaccattgaggaatccgcgctcatcgcttccctggcccctagtccattcatatgcctgaatccagctggataa

SEQ ID NO: 361874 - DNA, 993 bp, Pseudomonas aeruginosa
atgctaggggttcggttcttcgaatccgcgctcccgaaagccaagactctgctgcgaggcatcccccaggcagtcgacttttctattgtcactaacttggtgacccaagaagcccttgaggtggcccgtctgttcgataaggtgtccaccagctacgaacggtcaacgagattcaacaagcgtaagcaggaagaaatctggcggcgcaacgtggttaccctgatggcggaatccaagatgccgggggtttcggggccgaaagatttctctgtcaccacggcacttgtacggccggtcgttcaagccggagcagcttcgatgatcgaggagctggtcgaccttgggttcaccaagatgcacttcgggttcttcatcccgtcaggtgacggcgacctcaatgcgaagctcatccaaccaaagcaccgtgagaccgctcagttctatatcgaggcgcttgactggtacctaaagcatcgcgaaaccataaccgacctctggatcaacccatgtgagtcctggttggaggcggtctaccgcggcgagagcttagatgacgtggtttgcccgattgtccatggtgcgcttgatatcgactccgatgggcggactatcagctgcatcgagaaaggcggtacgaacgattacaccagccatgggaacatctttgaaacgcgcgaggtgattcaagttgacggttccaaggccgtggaattcgtcaataccattcatgacgtcctcacctcgccgagctacctgaaagaagtggccaatgctaggcgacttcccgctgcctgccgggcttgcgatgagaggatgctttgccaggccaactgcggcgttcttcacgagcagtggaatcagcaggacgagtgcccgggcttcaagaccttcatcaagagggttcgcttcctggtagaggaagagggagtgcgaccgaagtccgtattgcagggcgcaaaccagctgcctcagaacctcattgcggtgggctga

SEQ ID NO: 361875 - DNA, 192 bp, Pseudomonas aeruginosa
atgaacgtatatcgcaaggtttcccgcagtgccgcgacttggctgtgcgccgcgctgctggccgcatccggccatgcctgggccgaagactggtgggtggtacacaagggcgacgaccctgccgagcttgacgtgttcctggccgatgccgattcgctggcaccggtaccgggtatcgaaaacgcctggtag

SEQ ID NO: 361876 - DNA, 531 bp, Pseudomonas aeruginosa; identical to SEQ ID NO: 347587

SEQ ID NO: 361877 - DNA, 210 bp, Pseudomonas aeruginosa
ttgcgactactgccgggccatcgactgcatgtccgcgaggtgttcgtgctgtactccccgcggcactacctggacgccaagatccgtacctcggtggacttcctcagggaacgcccgcccctggcgttcgagcgtgaccgggcgatcctcgacgatcgacgctactgggcggaaagcccaaccggcgtagcgcgcgagaccgctacctaa

SEQ ID NO: 361878 - DNA, 351 bp, Pseudomonas aeruginosa
atgaaaaactttggtgaaaccatacgcgaccttcgagccgcccaggaccttggcctgcgcgagacggcgaccaagataggcatctctcccgcctatctcagtcgcatagaacgtggcaaagagcgcccaccaaggccagaggtgatcaaggcgctggccaaggtgctggcagccgatcccgatgtgctgttccgtttgtcctcatccacggacccggaagtagtcgactaccttcatgatcaccccgaagtcatgaacctgcttcgttatatcaaagaaacaagctttaccgaagatgaaatcaaaaaccttattcaggcagccgaaagcattaagaccgagactcattag

SEQ ID NO: 361879 - DNA, 207 bp, Pseudomonas aeruginosa
atgagtattgatgaggtcctgaagctgaaggacgtcgctgcgttacttaaggtcggcgagaagacggtctattccatggcccaggccggggaactgcctgctttcaaggtccgaggtcagtggcgattctcccgaaaggacatcgacgcatggatagagcaacagaaacacacaagccaagatttcggcgaggacaaccagaaatga

SEQ ID NO: 361880 - DNA, 2073 bp, Pseudomonas aeruginosa
atgagcagcaagaagaacagccaagtcgagaacaccatcccggcgggatatacgcttgactacgtttccggcaagcagatcaaggaaacaaagaaggagctggtccgtcagcgcgtcgttcgtgccttgatccacgaatacggattctcgccggaagacatggaactggatttttccattggcgggcgcaagaaggtggatgtggccatcttccaccacggcaaggaccacacgattgagaatctcagccgcgccgtgatttgccgccaggaaccgaacgtcggcaaaaatgccatgcgcatccgcgacttcgagcaggccgccaaagacctcgacgagatcgaaaccatcatgcgcgaggtcgatgccgttcagtacggcttgtggaccaacggcctggagttcttctttgtcgagaaagagcaaaagcgcttcgaaaccaagtgcaaccccatcggcgactggccgatggccgaagagtcggtcggcactaaggaagtcatctccgatgcccatacccgtgtcgccgacaacgagatgctgaagatcaccttccggcgttgccacaacttcattcatggcaacgagggcatgcccaaggacgccgccttctggcaattcctgtacctaatattctgcaagatgcacgacgagaacctgcgtgccaagcagcggcaggcctggcagcgccgtttctgggctggacccagggagcagttcgagccacaagggcgcaaagccatccgcgtccggatcgaggagctcttcaccgaggtcaagaagcagtacaagaatattttccgaggcaacgaggagatcactctctccgaccgggcgctggcctttatcgtttcggaactggccaagtacgactttacccgaactgacgtcgatgccaagggcgtggcctaccaggagctagttggcgttaacctgcgtggcgaccggggccagtatttcactcctagaggcgtcgtgaagctggtcattgagatgctcgaccccaaagagaccgagactctgctggacccggcctgtggcacgggcggcttcttggtcgcgaccctcgggcacatgttgaagaagttccgcgaagagcaaaacatccaggccggaaacgagaacaccaccgagttcctgaacatccacgaacggctgaaagagtatgccgccgccaatgtcttcggcaccgacttcgacccgttcctgatccgcgccgctcagatgaacatggtgctcgcgggcgatggccgtggacatatctacaacatcaactcattggagtttccgctggggcatctagccgacctgcccagcgtcaagaaggagatcccgctggcgtcggtggatatcatcgccaccaaccctcccttcggctccgacatcccgattacggacaagcacattctggagcagtacgagctggctcatggctgggagccggacggcgaaggtggattccgcaacaccggcgttctcaagggcagtgttgcccccgaaattctctttatcgagcgctgcatcaagtggctcaagccggggaccggccgcatgggcatcgttcttcccgacggcgttctcggcaatccggccgcggaatacatccgctggtggatcatgcgcgaaacgcaggtgcttgcttccgtcgacctgccggtagaagccttcattgccgaagccaacgtcaacatcctcactagcttgctgttcctacgccgcaaggacgaccaggagaagcatcgcgaggccctgggtagtgccgaggaatacccagtcttcatggccgttgccgacaaggttggcttcgaccgccgtggtaacaaactctacaagcgcaccccggacggcgaagagattgtcgagcccaagcagcatatcgagcgcatccgcatcggtgggcgcttcgtggaacggaccctgacccgcagtgaaaagatcgaggacaacgatctgccggtcatcgctgagaagtaccgtgaattcctaagcgaacatgatgggcggacacccaccaagagatcctcgcccagccggacgcatgaacgccccgcgaataaggtggcaagcagatga

SEQ ID NO: 361881 - DNA, 2031 bp, Pseudomonas aeruginosa
atgagcgacgacaacgacgacgacatcatcgaggccccgcaggatgctgccgaagagagcggcccggataactttttcatcgacatcctgaccggcaacaaggaaagcgcctcagccaagaagctgctggtgcagaaggttctgcgccagctcatcgaaagctacgggtttgatcggaacgacctggaggtcaactacaacccgcagatccccggccaggggcgcaagcgcatcgacatcgcaattttccgtcccgatgccgagcacaacaacgacaatctgcagcggatcatcgtctgcaagaatcagaaaaagcgcgacaagctccgctccattgccgaggccgacgccgacctgcgcgagctcaaggaactgctggagctgatcccgggcgcgacccttggcatgtggaccaacggtcaagaagagttcctgttccaggtcgagcgcacccgttttgaagtccggcccaaaccgctgggtgtctggccggttccgggcgaacgcaccaccgatctcgatcgcaccggcggtgtcattcaggtcagcgccgaagcggaagatctggaagacgccctgatgcgctgccgccaatatctgaaccgcaaccttggtctcgatcacaaggattccttcaagcagttggccgtgctgatgctggccaagatccacgacgagaccctgcccaccggtgagcgcaggttctggatcaggggtgacgagcctttcaccgaggcgggccaacaggccattgcccagcgcatcaccgaatccattgccgccgccaaggcctggcaaccaaacctgctgacccgtggctgggatctgacgctggaaccccacgagaccgcccgcgtggtcatggagctggcccgttactccctgagcgaaacccagccccgttaccgtaccggggccttccgtgcggttgcccgcagcgtgatggacggccgtgagggtcgctaccccacgccgctcaacgtggccgaaatggcggtggagatgctcgacccgcaacccggtgaacgcatcatggactgctccagcggcaccggcaccttcctggccatgaccgccgcgcacatcttcaagaaaaaactggcggccgtgggctccacgcctgaagaggccaccaacgaacagatacgtcaggcgcaaaacgaaaccgccgcctgggcggccagcaatgccctgggctgtgacatcgatcccttcctggccgtcgccagccgcatgaacctgctgttcaccaccgggaatccgggccgcgtgttccgcattgatgcccgcaccttcccggacggggatcttgacggtgttgaggatgcttgtcgcgcgatgagccggaacctaggagatatggatatcgtcctgcttaacccctggttctccacccaagacaccgtgagcgacacctccatcctggagcgctacgacctgggcaacaactgggagcgcgacgaggaaggtggattccgcaacaccggcaatctaaacatcggcggtgtgccgcccgaggtgctgtttatcgaacgcgccctgcaatgggtgaagcccggcaccggccgcgtgggcatcctgctgcccgacggcttgctgggcaatcccggcgatgagtacgtgcgctggtggattctgcgccactgcgaggtcctggcctcggttgacctgccggtggagccgttcaaggtcacggtgaaggaatatggcctgacgcccgccttgccgagccttttggtattacgccgccgcagccaggaggagctcatcaataccgaacacccggaatacaaggtcttcatggccgtggtggaccgggccggtgtcgacgcccggggcaatctcctgttccagcgagcccccgatggagaggaactggttttcgatgaggaagtgatcgagcgggttcgagaaggcggtgaagtggaaatccgtcggaccacacgccgtaaccgccgtgttcatgacgagctgccgctggtggcagagaaatacaaggaattccgcgcaaccggcgaggtgacgttatga

SEQ ID NO: 361882 - DNA, 204 bp, Pseudomonas aeruginosa
atgtgcagccactatgaggccccggaatctcagcggttgatcgctggatttggtgtagctcccgaggcgcagttcaggatcgatctctggccctgctacgaaggtccatttatccgcttgcgcgacacggaatctgatgaggaagggccggaattggaggcgctagtcggacaatttgggctcttgcctttttggggcgaatag

SEQ ID NO: 361883 - DNA, 1542 bp, Pseudomonas aeruginosa
  misc_feature (1474)..(1483): n is a, c, g, or t
atggccaaggtaaaaattgacgacctgcatctctacgacactgagttggctggcctggctcgccgcgggtatcagggcggcatgcccatccagttgctttccgatgcattcctgtacgagaagcatggcagctatttccacaccatcgatggtcgcttcgccaaaatctggaagctacgaggtatggatgcctcgctcctgaacaacgatgacctgtggtccctcagtaaaggtcttggtgatgtactgaacaagtatccatctggatcggccggtcaattcattcgtcacacccatcgagatattcgcgaagttcttgggatctaccgtgcaggtattgaaggcggagaagatgagttcgctctcgaaatcgcgaactcgatcgtcgaacgacagatcgttgcggcaagctcgcctgaaggtttcttcacaaagctctccaccgaggtccttgagcgcatgcgtgaggactctctggccgagatcgaggatgagaagcttcgaaataatgttcggactcttctcatgggcggtgacccctgggcggaagagggagaggatgacgtccgggccaatgtcaccgagcagattgagcgcgaagtaagccaaggtcgctatccctttgtaacggacttctacctggtcttgctctggagtccggattatctcttcggcaaattcatcgacaacacagcgaagaacgcactggcttcgatggggcttatcgacgccaacaagctggctcataaggaatacacgaagcacgcaagacgctttggccaactctgtcatgagatcggccaggctctggccacgttcgggttccagccgggctcgcttaacggccaaggcctcatcaaccttcagtaccagcttttcaaccccgttcgctgcttcaaggtcgacccgcccaagtaccggcctgacttgcccatcctggattgcttgaagaacccgagccaagtcgcgtaccgggaaactctcaacaatgccccgatgttcgcctctgtcgaaaccgaggagaaaggctggacgattcacgattctggcgtcccctacttcatccgcccagtctcggtactaggtaaaccaacctcgagcttcccgggcatgctgcaggtggccatgtcgggcatcgagagcgaatcgctgatcaccatcaactggagcgtgccctcaccagtagcgatgatgagccgcctatggactcgtgggcgcatgcaatccgggaaagaagccatgaaaattggcgacaaggatctgctggctcagcagcgcaatgacctggagaaggtcaaatccaagatcagtgcggaaaacgccaacaaccgcgagcagttttttgacgtgtcgcttcacatcaacctgatggggttcgtcgaggcccaggtcgatgatcaagccatgcagttggagaacatgctttggcgtgtggggcacaaagaatcccttcgcggcgacgctgctgtcaggnnnnnnnnnngtcaggaacagcatgccgttgaacttccgcaagagcagcatgaagctcttccgtcgtga

SEQ ID NO: 361884 - DNA, 537 bp, Pseudomonas aeruginosa; identical to SEQ ID NO: 348431

SEQ ID NO: 361885 - DNA, 597 bp, Pseudomonas aeruginosa
  misc_feature (460)..(469): n is a, c, g, or t
atgaagatgaaatccattgccctggctctgctggttgccaccggcctgttgggatgtaccagcagcttcgacatttccgaagaagcgaaaaatgcccccctgcgccccgaagcgaaagatgctcttcaggctgcccggggtaacactttcgtacgcgagatcaggactgaagatatcgcgaaagcccgaccgatcttcctaactgcacagagcaagccgcttcgaagcgtgctgcaagacacgctgcctgggtacgcgatcattccgaagggcaaggtcaacctcaacgatccaatcgatgtagctgctgctgggatgacccttgcagatttcatcgaatacatcgaagggacccgggacctgaacatcgagatcgtaggcaagagagtaatcgttagcgatttcgaaacccgagaatggaacctggccactttcgcgtcgacccggaacgtcaacaacnnnnnnnnnncaacgtcatcgcatccactcagactcggggggctaaagcaggcgacgacgactccaacaaccaacaggattccaacgtctcgactggcacaaccatcggccttcaactctcggaagatgaatggctga

SEQ ID NO: 361886 - DNA, 1107 bp, Pseudomonas aeruginosa
atgaagttcactgtccaggctgcacctttagctgccattctcaaacagtgcggtcgtgtcgcatctaagaaggccggggatatcaacggcaatttcctgatcgatgttcaggatggccacctcaatgtaacggcgaacaatggccaccagcagatgagccttcacctgcaggacccaagcctgatcgttcgtgaagctggctctgtctgcatctcggcatccaaattcgaacaaatcgtttcgtctcttcccgtagatcgtgatgtgactgtatccgtgggcgaggagaaagccactgtcacctgtggacgctcacgattcagcatcgccaccctacctgcgtcttctttccccaaggctttgcattccgatggccaggtccaaacggcactgactatcgagtcgcatgctttgagggacggcatccgtggtatcgcattttgcgttgcccggaacgatgtgcgtcagtacctgaacgggatgctgttcgaggcctcggaagggaagctgacgctcgtgggcaccgacggacacagaatgggcatggtagaactccagatcgagaaaagctcatccatgaagttcattctgcctgttgcatgccttgaggacgttgccagttttgccagccacggctacgtcaccatcacccactctggcaatctggtcagttttaccgcagtcaatgggaccatgacctcccgccttgtcgacggggccttccctaactactgcgctctcattgagcgtgcagagactggtcaactgatcaacttgaaccgtgatgcgattacgagcgctgttgctcgtgtcagtctcctctcggatggtaagtcccaggcagtccgcctcaagttttgccaacaaacggtcgaggtcgtctctgtgtcgaatgatgccctttcagaagccgaagacctgctgccgtgtgacttcgatgcggcccctttcgatgttgggttcaacagtcgctacgcacaggaagcttttaaagctgtatccagcaccgacctgcaacttttttattccggccctgcttctggcacgctcattaaggccaaagactgcccccatcagaaattcgtactcatgccggttcgcctgtaa

SEQ ID NO: 361887 - DNA, 612 bp, Pseudomonas aeruginosa
atgtggccggctgtcgcctcgacctgccaggtcacgtcgggacgaatggaggggagaagggaccgcagctttttcagcttgcccggggcttcaatgattacaaggtgcatcggcggagtctctcggaacagtcggtcgaactgtcgcggtcagagagcgggccaacaatgcgaaatggacggtacgctgttgcagttttcgggaggtgctgtagtgagggatcgatcagaaggcgtccaagatctagcttggcttgtgtcaggacaccattcggcgggccttcgaggtcgcgctataaagccattttcgtatatcccattgacatatcccgagaggtggatactatgggatatacgtttggtatatcccgcgaggtgtgtcatggaacaaggttctgtttttcagagcaatcgtagccaggccgtaagactgcccaaggcagtcgcgcttcccgatgacgttaagcgtgtggatgtggtcgctgtggggcgcgccagaatcatcacgcctgccggcgagtcttgggatagctggttcgatggcgagggcgttacttccgactttatggcagagcgtgaacagcctgccgatcaggagcgcgagactttctga

SEQ ID NO: 361888 - DNA, 411 bp, Pseudomonas aeruginosa
atgctcaagttcatgctcgacaccaacatctgcatcttcaccatcaaaaaccgcccgcaagaggtgcgcgaggcgttcctgcgccaccacgatcagatgtgcatcagcaccgtgacgctgatggagctgatctacggcgcagagaagtcctcgaacccctcgcgcaatcttgcggacgtggaaggcttcgctgctcgtctggaggtgctcaagtacgaccaggaagctgccgcccacactggccagctccgcgctgaactggcccgcctcggaaaacaaatcggcccctatgaccagatgatcgccgggcacgcccgctctcagggcctgatcgttgtcaccaataaccgccgcgagttcgaccgcgtacccggcttgagagttgaggattgggtcgccccaatcgtgtag

SEQ ID NO: 361889 - DNA, 198 bp, Pseudomonas aeruginosa
atggacaagttcacaagcgtacccgagatcgatggcctgttttggtacttcgagaacggtgtctccgagcctctcccggtcctgatcaaccaggcgaagtggggaaggaaattcaaatcgttcaacgccgctgagcagtcttggctccgtgacggcgagtatctggccggcccgcagcccactccggctgctcagtaa

SEQ ID NO: 361890 - DNA, 219 bp, Pseudomonas aeruginosa
atggctacaaaggatcacgaattcacagtaggcaaaggacaaacgatctgggccggaaagtcccactaccccgacctagtgcgtttagttgttccgaaggatcaagcagttgccctggcacagaagattctccgcgcctatgagctggcccgtcccgaagacatgtacttggacgagatccccctctacggtgagttggaccccctagaagaggaataa

SEQ ID NO: 361891 - DNA, 270 bp, Pseudomonas aeruginosa
atggtcatccatctggcccatccagcggtctacgttcagctgaagctgagggagaacttcctcggcttcttcaatatagaactcagccatctccgggttgtattcaatcgccggcgaggcagaaggctgctgcgcatgcttggtggtggactcttgtacatcatcgctttcagagtttcccggtttagcatgcgaaactggagtgacctgagcgacctcaacgtactcagcctcttccgctccgcaccccaatgcctggacaacctctag

SEQ ID NO: 361892 - DNA, 384 bp, Pseudomonas aeruginosa
atgctggtgacgctgctgttcctggcgatgaacggccacctggtggtgttcgaggtaatcgccgagagcttcgtcaccctgccggtgggcgagggcctgagcggcaaccatttctggatcatcgccggcaagctcagctgggtgatgggcgcggcgctgctgctggcgctgccggcgatcaccgcgctgctggtggtgaacctcgccttcggcgccatgacccgcgcggcgccgcaactgaacatcttctccatcggctttccgttgaccctggtgctgggcctggtgatcctctggatcggcaccgccgacctgctcagccagtaccaggtgctggccggcgaggccctgcaattcctccgtgaactggtgcgggcgaaatag

SEQ ID NO: 361893 - DNA, 324 bp, Pseudomonas aeruginosa
atggcttgtgatatccagtcgatgggtctcgacgtggcgatggatgagcatggcgcggcattcgactttttcactgagcatgttcgttccttagagagcttgggtgaggcgactaagcagcgatacgcactgcttggttttgttcagtatcgtcacggtctgctgtgccagaagctctccatccagtggaagcgccaaatgcagatcgcccacaccgctcacccgatcatcgaatccgttgcaggcttcatcttcgagcgagctgtactcaccatgaatcgtcacaaccagcgtctcgaacacacctaccccttcctccgctga

SEQ ID NO: 361894 - DNA, 660 bp, Pseudomonas aeruginosa
gtgaccaccaacggccagggccagcaggagtattcggttagcctgcagatcctgctgatcatgaccgcgctgggcttcatcccgacgttcgtcatgctgatgaccagcttcacccggatcatcatcgtcttctccatcctgcgccaggctctgggcctgcaatcgacgccgtcgaaccaggtgctggtggggctggcgctgttcctgaccatgttcgtcatggccccggtgttcgacaagatcaacagccaggccctgcagccctacctgaacgagcagattcccgcccaggaagccctgcaaaaggccgaggtaccgctgaaggcgttcatgctggcgcagactcgtacctccgacctggagctgttcgtccgcctgtccaagcgcaccgacatcggcagcccggaggcgacgccgctgaccatcctggtcccggccttcgtcacgtccgagctgaagaccgcgttccagatcggcttcatgatcttcatcccgttcctgatcatcgacctggtggtgtccagcgtgctgatggcgatgggcatgatgatgctgtcgccgctgatcatttccctgccgttcaagatcatgctgttcgtcctggtggatggctgggcgctgatcatcgggacgctggcgggcagtttcggcaccgtctag

SEQ ID NO: 361895 - DNA, 759 bp, Pseudomonas aeruginosa
ttgctgttcttctacggcaaggtgctgtgcacggatctgccctggcttcaggagatcggaagacctcggccgtcgcggcgcttgccggtggtgctgaccccggatgaagtggttcgcatcctcggttttctggaaggcgagcatcgtttgttcgcccagcttctgtatggaacgggcatgcggatcagtgagggtttgcaactgcgggtcaaggatctggatttcgatcacggcacgatcatcgtgcgggagggcaagggctccaaggatcgggccttgatgttacccgagagcttggcacccagcctgcgcgagcagctgtcgcgtgcacgggcatggtggctgaaggaccaggccgagggccgcagcggcgttgcgcttcccgacgcccttgagcggaagtatccgcgcgccgggcattcctggccgtggttctgggtttttgcgcagcacacgcattcgaccgatccacggagcggtgtcgtgcgtcgccatcacatgtatgaccagacctttcagcgcgccttcaaacgtgccgtagaacaagcaggcatcacgaagcccgccacaccgcacaccctccgccactcgttcgcgacggccttgctccgcagcggttacgacattcgaaccgtgcaggatctgctcggccattccgacgtctctacgacgatgatttacacgcatgtgctgaaagttggcggtgccggagtgcgctcaccgcttgatgcgctgccgcccctcactagtgagaggtag

SEQ ID NO: 361896 - DNA, 192 bp, Pseudomonas aeruginosa
atgctgcccgatgtgattcacactcctggagccaagggccaggattgggaagatatcatcgtggttgagaaggtcgttggacagccattgccgcaacgcttccacctcctgcgtgcgaaagcatgcgaaggtgggatcttcatgggcttcaagccagtcaacgcagatggcttgctcagtgcctgtgcgtga

SEQ ID NO: 361897 - DNA, 504 bp, Pseudomonas aeruginosa
gtggtcgcctcggtgccgacaccggcgccgatcacaaccagccccgctccggccaagaagcctgaatccaccactgtgctccccccagcagcaccggccaaggatggccactcctcttctcctcccgcggcttcggcaccgatcaagcccttggcttccgccgtgaagtccacgccgcccactccggccaccgtggcttccgcccctccggtcaaggtgctcacgccggcggagccgagccgacagttggcacagtcctggtcagccgagacgggatcaaccctgcgcgacaccttggaagcctgggccaagcacgcacgctggaccgtccgctgggagccgcaggatctcaactatccgatcgaagctcctctgaccttccacggctccttcgaggacgcggtatccgaactgttcccgctgtatgacgctgccgaacggtccttcctggtgaacgccagccggccgcagtccctgatcatcatcaaggagcgcaagaactga

SEQ ID NO: 361898 - DNA, 207 bp, Pseudomonas aeruginosa
atgtaccaggagttgctcggcctgatctcacgctacggcggtgaggtgacgtccaaggcctttgaggacgagtcgaccctctgcgagctgctggaacagatgctgcctgatgatgaggtagagcaagccaggaaacaggtgctcgaacttcatgccaagcgccgccaaccgggcagcctggactcgccggcgagcctgaaggtgtaa

SEQ ID NO: 361899 - DNA, 702 bp, Pseudomonas aeruginosa
atggcgcctccagcaagccaaggtcgagcagcgcgtcggtacgagcgcgcccgtcacgccagtagcagcagcccagcacgcaggccagcagcgccaggagcaggccacgcccgccgccgccgggcgatcccagccaggcgagcgccaccagcagcgtggccagcgccgccgagccgagcagcaggccgcgcaggtccaggcgctgcgccgcatgcttgtgcctgggcagccagcgcatcgccagggccagcaccagcagcgccggcgccacgctggcgaagaagatcccacgccaggacaggctgtccaccagccagccgccgagggcaggcgccacggcgggaacgatcagcgccaccagcatcacccgtgcggtcaggccggcccgtgccgacgacgggacattccgataggccatggcctggccgagggggatcagtaacccgccggccaacccctggcacaggcgccagacgatcaacgtcgccgccgatccagccaggccgcaacccagcgaagcgctggcgaaaccggccagtgccagcagcatcagtcgccgttctcccaggcgcgaagcgagccagacgctcaacggaatcaccagggtcaagccgagcaggtaggtgttgccgatccacgccagggtcgccaccgaagcgccaagggaacgcccgatgtccgggtaggcgacgctggcgatga

SEQ ID NO: 361900 - DNA, 1152 bp, Pseudomonas aeruginosa
atgaccgcctcttcgccgagtctctcgccgaccctcgaactcgcctgcgagttgatccgccgcccctccgtcacgcccctcgacgccgactgccaggccctgatgatgcgccgcctggaagccgccggcttcgccctggagccgatgcgcattgaggaggtggacaacttctgggcacggcgcggcggcgacggcccggtgctgtgcttcgccgggcacaccgacgtggtccccaccggcccgctgcaggcctggcagcaccaacccttcgacgccctgatcgacgaccagggcatgctctgcggacgcggcgcggcggacatgaaaggcagcctggcgtcgatgatcgtcgccgtcgagcgcttcgtcgccgaccacccgaagcacaagggcgccatcgccttcctcatcaccagcgacgaggaaggcccggcccaccacggcaccaaggcggtggtcgaacgcctcgccgcacgcggcgagcgcctggactggtgcatcgtcggcgaaccgtcgagcaccagcctggtcggcgacgtggtgaagaacggccgccgcggctcccttggcgccaagctgaccatccgcggcgtacagggccatgtggcctacccgcacctggcgaagaacccgatccacctggccgccccggcgctggccgaactggcggcggaacactgggacgacggcaatgccttcttcccgccgaccagcttccaggtttccaacctgaactccggcaccggcgccaccaacgtcatccccggtgaactgaccgcgctgttcaacttccgcttctccactgaatccaccgtcgaaggcctgcagaaacgcgtcgaggcgatcctcgacaagcacggcctggactggcacgtcgaatgggcgctgtccggcctgccgttcctcaccgagccgggcgaactgctcgatgcggtggccgccagcatcagggcggtcaccggccgcgaggcccggccctcgaccagcggcggcacctccgacggacgcttcatcgccaccatgggcacccaggtggtcgaactcggcccggtcaacgccaccatccaccaggtcaacgagcgggtcctggccagcgacctggagctgctcaccgaaatctactaccagaccctggtgaggctgctcgcctga

SEQ ID NO: 361901 - DNA, 342 bp, Pseudomonas aeruginosa; identical to SEQ ID NO: 358810

SEQ ID NO: 361902 - DNA, 675 bp, Pseudomonas aeruginosa
atggtacagcaaatcaataatgctgccgagtcggacggggcccgcccgatcatcttcgataccatcgtgaaccgcgacatccgggcggtcctggcgcaatccaacggtttcatgatcgatatcttcgccacctttctttcgcctctggaacaggagctttcggccgactcgtcctattcggtcggcaagtcccactccatcggccacaactccaactacatggatcgcatcgaggcggtgaacttcgccctcgacaacgacgacggcgcccgcacccactactacgacaaggccgacctgatcctggtcggcgtctcgcgctgcggcaagacgcccacctgcctgtacatggccctgcagtatggcatccgcgccgccaactacccgttgacggaagaggacatggagcgcctgcaactgccgaacgccctcaagcagtacaagcacaagctgttcggcctgaccatcgaccccgaccgcctcaccgcgatccgcaacgaacgcaagcccaacagtcgctacgccagcttcgcccagtgcgaattcgaggtacgcgaggtcgaaagcctgttccgccgcgaaaacatcgcctacatcaactccacgcatttctcggtggaggagatttccgcaaagatcctcgtcgaaaaaggcgtggaacggcgcttcaaataa

SEQ ID NO: 361903 - DNA, 477 bp, Pseudomonas aeruginosa
  misc_feature (15)..(24): n is a, c, g, or t
atgctccctatgtcnnnnnnnnnnccctatgtcctgcaacacgccctgtcgctgacccgcgcctacaacgccgagctctatgtcgtccatgtggtggagcccctcgggctgttcgccgagtcggtcctgcagacctaccttgacaccgagcgtctccaggacctgcgggcgcaagggctggacaacgtcatggaaagcatcgagaagcgggtcctggaagggtttcgcgatgaactcggcgagttgccccaggatgcggcgctggtcaagagcgtgcgggtggtgcagggcgacccgccgcagatgatcctcgatgaggcggaaaagctggccgtggacctgatcgtcgccggcagccatagccacggcacccagctcgacacgccgctgggccggactgccgcgcgtctggtgcaactggcggaggtaccggtgtacctggtgccgatgttgcagcaccgtagtcgcgacctgtag

SEQ ID NO: 361904 - DNA, 582 bp, Pseudomonas aeruginosa
atggatatgaaccgtcggcaattcttcaaggtctgcggtataggcccgagccttgcggcgctcgggatggcccccacggaggccttcgccgaccaggtccgccacttcaagctggcgcacacggtcgagacccgcaacacctgtacctactgttcggtcggttgcggcctgatcatgtacagccagggcgacggcgccaagaacgtcgcgcagaacatcatccatatcgagggcgacgccgaccatccggtcaaccgcggcaccctctgcccgaaaggcgccggcctgctggactacatccacagcccgaaccgcctgaagtatccggaagtgcgcgaggccggctccagcgagtggaagcgcatcgagtgggacgaagccctcgagcgcatcgccaagctgatgaaggaagaccgcgatgccaacttcgtcgagaagaacgagcagggccagaccgtcaaccgctggttgaccaccggcttcctcgccgcgtccgcctcgtccaacgaggccggctacatcacccacaaggtgatgcgctccctcggcatcctgggattcgacaaccaggcgcgtgtctga

SEQ ID NO: 361905 - DNA, 480 bp, Pseudomonas aeruginosa
atgttcacggcgatgacagccagcagaagcaggatgccggcgctcaagaccacgcccacaaagctgtcgatgggcgaccaggccgacaggttgttgatggcctgcttccagatcaggaagcccacatcgacgatgcccgacggcgtgatcgaggagataccggaagcctgctcgccaatcctggacagcgactggatgatcgagttggcaaagttcggcccattgcgcagcaaccagaggaagaagccgaagaacaggatgaacctgatgaactcggcgaagaactcaccaatgtcagccttgcgcagcgccatgaagccgaaggtgatgaccagcgagatcgtgcccagcgtccagaacaagaacgtcgcggcattcatcaccaccgtctgccaggccgtggcccgcgtggcgaactccgttaccacttggtcaagcatcccctggttggtgagctgggccgacgcggctgtggagtag

SEQ ID NO: 361906 - DNA, 978 bp, Pseudomonas aeruginosa
atgtccaagacccacctgttcgacctcgacggcaagatcgccttcgtttccggcgccagccgcggcatcggcgaggcgatagccaagctgctggcccagcaaggcgcccacgtgatcgtctcgagccgcaagatcgatggctgccaggcggtcgccgacgcgatcaccgcggagggcggcaaggccaccgcgatcgcctgccacatcggcgagatggagcagatccagaacgtcttcgcacagatccgcgagcagttcggccgcctcgacatcctggtcaacaacgccgccacgaacccgcagttctgcaacgtactggaaaccgacctcggcgccttccagaagaccgtcgacgtcaacatccgcggctactacttcatgtccatcgagggcggcaagctgatgaaggaacacggcggcggcagcatcatcaacgtggcctcgatcaacggcgtatcgcccggcgagttccagggcatctactcggtgaccaaggccgccgtgatcagcatgaccaaggtcttcgccaaggaatgcgcgcagttcggcatccgctgcaacgccctcctgccagggttgaccgacaccaagttcgcttcggcgctggtgaagaacgacgcgatccgcaacctcgccctgcagcgcatcccgctcaagcgcgtggccgagccgagcgaaatggcaggcgccgtgctctacctggctagcgaagcgtccagctacaccaccggcgtggcgctgaacgtcgacgtcaacatccgcggctactacttcatgtccatcgagggcggcaagccagggctccctcttttcatttcaggattgccaatgcctcgcaccagcgcgggacaggcgccccacggctattcacctgcgttctcgggtagccggacgagtacccccataggtgttacccgccgcctccacttcagttgccgacccgccagccaccgttcaccgacaccaccgttccggtga

SEQ ID NO: 361907 - DNA, 2445 bp, Pseudomonas aeruginosa
atgcgcctgctgaagttcctgtggtggacttgcgtcaccctgatttgtggagtgctgctcagtttcagcggcgcctatctctatctgagtcccagcctgccctcggtggaagctctgcgtaacgtccagctgcagatccccctcaaggtctacagcgaggacggcaagctgatctccgagttcggcgagatgcgccggacgccgatccgcttcgccgacatcccgcaggacttcatccatgccctgctgtccgccgaggacgacaatttcgccaaccattatggcgtcgatgtgaaaagcctaatgcgcgccgccgcgcaattattgaaaagcggtcacatccagactggcggcagcaccatcaccatgcaggtagcgaagaactacttccttaccaatgaaagaagcttctcgcgaaagatcaatgaaatcctcctggccctgcagatcgagcgacagctgaccaaggacgagatcctcgagctctacgtcaacaagatctacctgggcaaccgtgcctatggcatcgaggctgccgcacaggtctattacggcaagccgatcaaagacttgagcctggccgagatggcgatgatcgccggcctgccgaaagcgccctcgcgctacaacccgctggtcaacccgacccgcagtacggagcggcgcaactggatcctcgagcgcatgctcaagctcggcttcatcgaccagcaacgctaccaggccgccgtcgaggagccgatcaacgcctcctaccacgtgcagacccccgaactgaatgcgccctacatcgccgagatggcccgtgccgagatggtcggccgctacggcagcgaggcctataccgagggctacaaggtcatcaccacggtccgcagcgacctgcagaacgccgccagccaatcggtccgcgacggcctcatcgactatgaccagcgccacggctaccgcggcccggagacccgcctgccgggccagacccgcgacgcctggctcaagcacctgggccagcagcgcagcatcggcggcctggagccggcgatcgtcacccaggtggaaaagagcgggatcatggtgatgacccgcgacggcaaggaagaagccgtgacctgggacagcatgaaatgggcccgccccttcctcagcaacaacagcatgggcccgatgccgcgccagcccgccgacgtggcccaggccggcgaccagatccgcgtgcagcgccaggaagacggcaccctgcgcttcgtacagactcccgccgcacagagcgcgctgatctccctggacccgaaggacggggcgatccgctcgctggtcggcggcttctccttcgagcagagcaactacaaccgcgcgatccaggccaagcgccagccgggctccagtttcaagccgttcatctacagcgcggccctggacaacggcttcaccgccgccagcctggtcaacgatgcgccgatcgtgttcgtcgacgagtacctggacaaggtctggcgaccgaagaacgacaccaataccttcctcggcccgatcccgctgcgcgaagccctgtacaagtcccgcaacatggtctcgatccgcgtcctgcagggcctgggcatcgagcgggcgatcagctacatcaccaagttcggcttccagcgcgacgaactgccgcgcaacttctccctggccctgggtaccgcgacagtcacaccgatggaaatcgccggcgcctggagcgtattcgccaacggcggctacaaggtcaatccgtacgtcatcgaacgcatcgagagccgcgacggacaggtgctgtaccaggccaatccgccccgcgtgccggtggaagaacaggtcgctgcgccggatgcggaagacgccgggaaacctggcgaccccgagcatccggagagcgccgaaggcgaaggttcgatcgaagcccagcaagtcgccgccaaggcccagaccaccttcgagccgaccccggccgaacggatcatcgatgcccgtaccgcctatatcatgaccagcatgctgcaggacgtgatcaagcgcggtaccgggcgccgccgccctggcgctgaagcgcaccgacctggccggcaagaccggcaccaccaacgattccaaggatggctggttctccggctacaactccgactacgtgaccagcgtctgggtcggcttcgaccagccggagaccctgggtcgccgcgagtacggcggtaccgtcgcgctgccgatctggatcaggtacatgggcttcgccctcaaggacaagccgatgcacaccatggccgagccgccaggcatcgtcagcctgcgcatcgacccggtaaccggccgttcggccgcgccgggcactcccggcgcctatttcgagatgttcaagaacgaggacaccccgccctcggtcaacgaactgccgccgggcagcttccctggcagcccgctgccggatga

SEQ ID NO: 361908 - DNA, 684 bp, Pseudomonas aeruginosa
atggttgaaggccggcgtgatccacaaaggccagctccaggcaacggatgctggaacacctcaaggcggaatcatctcgcctactttggcaaacatggtgctcgatggcctggaatcacagctcaagcgacacctgggcgtgacaagggcgaagaagctgaaactcaatgtggtgcgctatgcggacgacttcgtcatcaccggtgtctctcccgaggtactggagaaagaagtcaaaccctgggtagagcagttcctggcggtacgcgggctgcagctctctctggagaaaacgcggatcgcccacatagatcagggcttcgacttcctcggttggaacttccgcaagtacaacgggaagcttctgatcaaacccagccagaagaacgcgaaagcgttctacggcaaggtgaaggaggtcatcgaaaccagcaggacggcaaggcaagaggacttgatccgaacgctgaatccgattctgcgcggctgggcgctgtatcaccagccagtggttgccaagcaaacgttcagccgcatggacaacagagtgtttctcaagctctggcgttgggcgaaacggcggcacccgaacaagtcactggattggatcaggaggcgatatttccggattcacggggacaagacttgggtgttcgctaccacggtgctggaaagcaacggtaa

SEQ ID NO: 361909 - DNA, 183 bp, Pseudomonas aeruginosa
atgatcaggtcgatcatccgattgcactgggtgaagcgcgcctcagcggcggccgggaacaccgggttgaagatcgtgcccagcggcgccaccacactgatcgggcggaacgaaccctcgttcgacggcaccgggctgggtagcgtggcagcgtcgagcaacaacttgcggaaggcggcgtag

SEQ ID NO: 361910 - DNA, 132 bp, Pseudomonas aeruginosa
atggatacgttccaactcgactcgcgcttcaagcccgccggcgaccagccggaagccatccggcagatggtcgaggggctggaggcggggctttcgcaccagaccctgctgctgtctcttatacacatctga

SEQ ID NO: 361911 - DNA, 537 bp, Pseudomonas aeruginosa
gtggttgcaggccctcgcacgcctgagtcgctcgatcaggaatatccgccgaccgaagccacccacgaagccaagcgcaacatctacgagcgcctgctggcctacgacaccaaggtcgtcgacggtgtgcaggtggaaaacttcgacaagctggtgggggcgctggctgaaagctggacggtggcagacgacaaaacctcgatcacctttcatttgcgcagtggcgtcaagagcgcagcgggcaacaccctgtccgccgacgatgtgatgtggtcgttcgaaaggggctggaacaagaacgcgaatttccgctggtacatgagccagatcctcggcatcaaatcctttgaagaagcgttcaagaagcaggatgaaatgaccgtcacggtcaccttgcccaagacctctccgctgatcgagcgaatctgggtcaacaatgacctcggcattctggacgccactgctgcccgcaagaacgtcaccagtgacgacccttacgcctgtctcttatacacatctgacgctgccgacgaatag

SEQ ID NO: 361912 - DNA, 264 bp, Pseudomonas aeruginosa
atgcgtgcgcaacggaggtgcggccagatcctcgcagacacactgcgtaccatccgtgccaaaccgggttcggagcatggcgtgctgtcggaaaagctgctgccatccaccctccagcctggacgggtcgataccacgaccttcgagctccagataagcatggcatcccacgcctccgagaggctggccatcctgacggcccacccaatacgcatactgcacgtcagtcagcccaaaggcttctgcaccgtcgattggcgttga

SEQ ID NO: 361913 - DNA, 267 bp, Pseudomonas aeruginosa
atgcagacgcgacagttgtcgaagcacctcgatgcccgtgaagccggaatgctccatgtcctgccaaaggcgcgtttgcaacgcccgggcacgctgcgggaaggtcgtgccaccatcgaggcgaacctcgaggacgttgacggcgatgaagtcgccgacgatatgctggatctgctcatggaccggcgggcgattgaacagtgtcaggttgatgcagaagtcgggctggcgagaccagagccggaggacctcagtaaagacggctag

SEQ ID NO: 361914 - DNA, 789 bp, Pseudomonas aeruginosa
atgcaactcgatggccgatacccattgctcggggtcattgcgccactgcccctgcggcaggaccaacgccgctccggtggtgaaggcgcagaaaatgtccagcaccgagaggtcgaaggtgtagttcaccagaccgaagaatctgtcgttctcgtcaagaccgaactggcgattgaaaccttggatggtgttcaggacaccccgatgagtaagcatgacgcccttcggccgccccgtggtgcccgaggtatagagcacataggccaactgcgttgcggtgtctcggtgcgctgccgcggcgatggcctcttgcagggccgaggccagttcctcgggcggcaaggcgtccatggcgccaacgagcatcggctggatgccgtcgggccactgagcgtcgatatgttcgcaatcggtcagcagcagtttcgcaccgacgtccgccagcatggtgtctcttcgctcgacgggttggcctacgtctatggggacgtaggcaccctccgccagcaggacgcccaggacggcagcgatctgcgcgggccctttgtcgagaaacaaggcgacgggttggcccggcccgcagccggcggcacgcaggtcacgggcgatggccacggcccatgcagcaagctgaccgtagttccattcgcttgcgccgcacagcaaagcagggcgctcgggaaaatccagtgcgcggcggcagaagccaccatgcaggtagcccaagggcaagggggcattgcgctctgtgttgatgcgttcgcgctgcagtcgcgtggattcgggtag

SEQ ID NO: 361915 - DNA, 783 bp, Pseudomonas aeruginosa
gtgattccggcgcggcctggtgtcgcaccggcgagacggatgctgttgtccggaagctcggcgatcgggctgagggcggcggccaggcgcggctccagggcgttgagctggaggcggacacgctggatgtcggcgagcaaggcgcgggcgtccgtcgacttgtgtccggcctggctcttcacctgcttgcgctggcggaccagccggcgcagttccgcgcgctgttcgagcacttccttcaggtcggcctggaggatggccttttccgcttcgctggcaatggtgaaggtcaccccttcgcggaccgcggcgtcgagcaggcgaccgggaagggccttgggcagcttgcggaacagcgcgtcgagatccggcgcctgctgctggcctacgctcttgaagaagccctccatggtccggctgatgcccagggtcaacgccgggttgagcgtggcctgggcgctgtcggcaagcgctcgggtggcctccggcaagccgtcgagagcgggcagcttgcccagctccagcgagtcgcgctgctgcgcccactctttcagcttggagagccagagatggccgggcggcccgagctgcgcgtattgcgcgatcagttcggcctgggtgttcaacggcagagtctggaacaatgggcgatcgtattgcggattttcctccaggaaggcgagcacggcctcgctggcctcgtcgctgcggcagatatccttcaggcaggcgtactgggtggcgaaggccagtcccaattgctcggcctgctggaaatcgtag

SEQ ID NO: 361916 - DNA, 1194 bp, Pseudomonas aeruginosa
atgaaggctgcagcatatggcgagcgcactaatgcggccactgccttcgtttccaccaactcaatctgccaaggcttgcaggttcctattttgtggcctgcaatttttaacaccggacaccagatcgtattcgcgcacacatccttcaagtggaccaatctcgcaagcaataacgctggtgtgactgtggccatcgtgggtatttcatccacgccacaacctattaaaaggttgttctccgtgagtgaggatggctccgtgcaggagcggcaagttgactatatcaatgcctaccttgtgccggggcgcgtcaactcggtggagcaggagcgtcgaccgatttcatctgtatcgcccatgctgtttggcaacatgccgcgtgatggtggtgcatttgttttggacggcgaggaacgagcacgtgtgctgatgcagcaccccgaactcgaacgcttcgttcgcccgtacatgggctctgaacagatgatccagggaaaacctcggtggtgcctgtggattgaggacgacgatgcgccttatgcgcagcaacacccctacctgaagacggtgttggaccaagtacgggattttcgcctatcaagtgctgccagttctacccgcgacttcgcggcacggcctcatcgcttcgtccaaattgccggtaccgctaagcagcattcgcttgtcgtggcgaaagtctcgtccgagcgccgaccatacctgcctgtggaccttttagacggcagcgtgatcgttagcgatctcttgttcgcgctgtatgacgcgccgctatggaacttggcggtgttggcgtcacgacttcatctcgtgtggattgcaaccgtgtgcggaaaaatgaaaaccgacttccggtattcgaacaccatcggctggaataccttcccactgcctaagttgacagagaagaatatcgatgacctcaccagatgcgcacaagagatcctgctagcgcgtgagcgccactacccgcagactcttgccgaactctatgcgcctgacgcaatgccgaccgatctacttcgcgcacatgagcgtaacgatgaagttgtggagagaatctatataggtcgcttattcaagaatgacacggagcgccttgaaaaactctttgagctctattcacgcatgtccggtcaagcgggtgccgggcagcgccgagtcaaacgagcgtaa

SEQ ID NO: 361917 - DNA, 246 bp, Pseudomonas aeruginosa
atgcgacaactctttgaattgctcgaggttggccagccagtgttcgacacccaggtcgaaggggttggcggcgacggcgacaatggacagctcggtcgcctccttgtcggtcagtccgatctgttcacgaagtcgacctaccacgttgtcgcgtttgacctgcaggttggactggtagtcctgctcgtcctctacatcggccacctcatcgaagcggctgaggacgaacactgtgcggggcagtag

SEQ ID NO: 361918 - DNA, 1497 bp, Pseudomonas aeruginosa
ttgccgcatcgaagggccgtcggtgtacgacctggcgcgcaacttcatcgaccgctggaacggccagcaggcctacctggccaagacgccggcgctacaggatacggcgctggtacgcagcgccctggaagccgtgatgaagtggctgaacagcctggccgccgccgcgggattggagaactacctggacgagaagcgcaacctccggctcgaactggacccacccacgccctgctggatcaacgcgccggaacagttgccgcaagagccggaggtgcgccgcggcggcatgaccgtacaggtactgcgcagcgccgcggcgcgcatgctcgaacaggagcaggccggccgcctcggcgcgggagtgaacctgcccttgcaggtcggcgtctccaccgaaggagtccagagcaactgcaaggacgccatgctcctggcgatttccggggcgcagcagttcatctatatcgagaaccagttcttccagagcgagttcggcaaggaaggcgaagttttcaaggatctgcccctttcaggccccatggccagtctgcgcgacgttggcagcctgcgacgcgacttcgtcgtccggatacgcttggaggaagccctggagcagcgcgacctctggctgctggactgggccgaagtggagaagatcgcccaggagcctggcaccgaggcccgccagttcctcaagtcgatgctcgccatgtggggcgtgaacgcccagggctggctcacccacaagctcggcgaggcccagcacggcctgctcaacgagatcggcgaagccctggcgcggcgcatcgaacgggccatccagcgcgagcacccgttccacgtctacctggtcctgccggtgcacccggagggcgcgctgaacgtgccgaacatcatgcaccaggtgcacctgacccagcagagcctggtgttcggcgaacagagcctggtcaagcgcattcagcggcagatggcgctcaaggccctggaaggcaagtccgacccggcccaggcccgggaaatcatcgagcgcaaggacgctcgcggtcgcccggtctacgaacagcaggactggagccgctacctgaccctgctcaacctgcgcacctgggcggtgctcggcgggcgggtggtcaccgaacagatctacgtgcacagcaagctgctgatcgccgacgaccgggtggccatcctcggcagcgccaatatcaacgaccgcagcctgcaaggcgagcgcgactccgagctggcggtgatggtgcgcgacagcgagccgctgacggtcaggctggacggcaagaacgacgccatcgtcggcaaggccatccaccagttgcgggtgaatttgtggaagaagcattttggcttgagccaggggccaggcggtttcgtcaagccggccagcgagttgagtgcttatctgtccatcccggcggctcaagaggcctgggaagctatacaaacattagccaaggagaatactcgtgcctatga

SEQ ID NO: 361919 - DNA, 1602 bp, Pseudomonas aeruginosa
  misc_feature (1476)..(1485): n is a, c, g, or t
atgatccaagaaactattgcccagcttaccgggcatttgaagtttgttgttgactcccgcccactgcgtgaattcgaacgcaatctagccagagtacagaccaagctaagccagtttgccaagactgcaaaccagaagattcaattcaagcccatgctgaatgccaatgtaatggcccaacagaagggtgcatttcagcaactaatgcagcaagccaagcttcagcgcatcactaacgataacgcccatcgtagtgttatggctaacatgaaacagcagcaacaggccgctatgggtaatgccaagcttcagctagctaatgcccgcattcagcagcaagccgctattgctggagcccgcctgacagcagcaacagcagccgctgagcgtagagcccaagctgcccgtctgacaatgaaccaacgtattgccgctgctactacccgtcaacgccgtctagatgaactccacgccatccgcgtacagagggctcaactcggcctacaacgcgctcaggcagcttctagagccggaggcggtgggttcggtggggtcggagtcaatgctggtgctatcgcttccatgatgcccggtggtgggttctcttccctgatctctggtagtggtgctgccgctgctggtctgggagcgctggctggtgctacagcaggcgcaatcatcggcctccgcatgctggctacagaagctcagaaggctggagactggcaggctcacgcatccgcacagatgaaggtgtttgatagtcaagctgtccagcagaacatggaatggctcttcaatatcgccaatgacctaggcgtctccgcccgggacacacagcaaggcgtaatgcgggctcttattggtatgcgtgatggcggcatgagcacaaacgcagccaagcagtctacatacgatgtaatggcctatgcccgggcttccggcctagacacagccactgtagacctcgtattccgtgcgatgggccagatgctgtcgaagggtcaagtttatagtgaagagcttaagtctcagttcgccgaacatatgcccggagctatgaagattgctgctcaagcttgggcagaactaaacaacctcccagccgacgaaggctctatgaaacgcctttccaaggatatggaagatgggaagatcgccggggctatggtggctccattcattgagcgcatgacctcgattatgggtagtcgtgccaacgatggaggccgcctcgatatcatccggcagagcggagacgcagcaatcgcccgccgtgagaacgtaatgcaacagaacctagccggtgcatggaacgccaatggcggggaactgaagaacgctgttcaagagttccaaggtgcggcggttcctcttctccgtgagcttggccctctgctaaaagctctcgctccgtacagtgctgctatcgtcaagagcactacggatatggccgtttctctggctcagttcctnnnnnnnnnnagttccttccggggattacagccgggatcgaaggattctccgagaacccatacttcaaacgaatctctgagtctatcgataagtataaccaagctttcgccagcttcttcgacgtag

SEQ ID NO: 361920 - DNA, 147 bp, Pseudomonas aeruginosa
gtgatcaagcgtcagttcggttacgtgaaggtgcgtttccgtggtttggccaagaacacggctcaattgatgacgctgttcgccctgtcgaacctgtggatggcccgccgacatttgctggcgaatgtgggacaggtgcgcctgtaa

SEQ ID NO: 361921 - DNA, 327 bp, Pseudomonas aeruginosa; identical to SEQ ID NO: 326054

SEQ ID NO: 361922 - DNA, 471 bp, Pseudomonas aeruginosa
atgtccaccttcgaaggcccgatgatggcgatcaagaccgtcaacgccctctcccactacaccgactggaccatcggccacgtacacgccggcgccctcggctgggtcgcgatggtttccatcggctcgctctaccacctgatcccgaaggtcttcggccgcgagaagatgtacagcctgggcctgatcaacgcgcacttctggctggccaccatcggtaccgtgctttacatcgcctcgatgtgggtcaacggcatcacccagggcctgatgtggcgcgcggtcaacgaggacggcaccctgacctactccttcgtcgaagcgctggccgccggccaccccggcttcatcgtgcgcatgctcggcggtttcatcttcctgctcggcatgttcctgatggcctacaacacctggcgcaccgtcagtgccgccaagccggccgaatacgaagccgccgcacagatcgcctga

SEQ ID NO: 361923 - DNA, 279 bp, Pseudomonas aeruginosa
atggtcgtcgatgattacccggaggcgattaccaagacgctccaagcgctggaggatgtctggctccttgcattcgtacacgagcgcgtccaggcggaggcccggatcatgctcaacctcctcgagcgtttgcaggatcaaccggcgagcttcaaaacccagccactcatagtgcttctggaatggggtcatgtcgtggttgaggtacttttctgctggcgtcccacgcggtgggaggatccctttgtcgttctcgaaacgatctgcgtaggcttgtga

SEQ ID NO: 361924 - DNA, 249 bp, Pseudomonas aeruginosa
atgaaagcaatgaagcaacgcatcgccaagttcagcccggtcgcctcgttccgcaacctgtgcatcgccggttccgtcactgccgcgacttcgctgccggccttcgccggggtgatcgacaccagcgcggtcgaggccgcaatcaccgagggcaagggtgatatgtccagcatcggcggctatatcgtcggcgccctggtgattctggccgtcgctggcctggtctacagcatgttgcgcaaggcgtaa

SEQ ID NO: 361925 - DNA, 477 bp, Pseudomonas aeruginosa
atgccgggtttggatgtagggacggcttgtctgctggccaatactcccgagttcaaacctacaagaatcaaaactgtcagttggctaaccctcctgaacaacgagcgcctggcgctggccggcgggctcgatgccctgcgtgcgcaactgccctccagccactttgccttctaccgctacggcgatggcgtggtaatccaggccggtgcctatccctatatcgcgggtgatgcggaagactccagacccgctccgtatgtgctgctgaaccacgcgctcaaaggcattcgctatgaaaccgtcggctcgctacacggcggctcccacgacggcgaattgcggctggtgggctgggcggccgatcaatggctgaaacggctggatgtggaagacagcgaactcccccgctggcgcgacaaattgctcaacactgagccatgcttggacgcgacgaactcactgccggagcgcccgtag

SEQ ID NO: 361926 - DNA, 843 bp, Pseudomonas aeruginosa
atgacccagccctcgaaacggaatgggcaggttccgctggacgacgccctggagcgccatcgcgacgcgctgaaggacctgttcccgctgccgccctcccggccgaaatcgcgcaaggcaagcaaggcggccggcgtcgcgctattgctggcgctggccatcggcgccctggcctggctggacccggcctacaagcgcgagcgcttcgccaccgccatcggtgagcggcgcgacgtgaccctggccgacggcagccagctcctgctcgacagcggcagccagatcgaggtcagttggcacccgctcagccgtcgggtcgcgttgcgcgcggggcaggtgcttttcgaggtatccccggcgcgctatcggcccttcgtggtgtccgcgggttcgaccgacatccgcgtgctcggcacccggttcaacgtgcgccgcctggacgacgatgtccgcgtgaccctggagcgtggccgggtggaggtcggcacctcggctacggcgcaagcgccagtcgtgctcctgccgggccagcaggtcgatgccattggcgggcaactgatgccgctggccaaggtcgatgccgccacggcgatggcctggaaagacgaccgcctggtcttcgagcgcacgcccctgggcgaagccgtcgcgctgctgcgccattatcgcaaggcgcccattctcctggacgaccccagcctggcctccctccggctgaccggcgtcttcgccgcgcacaacgccgaccggctgctcgacctgctgccgagcatccttcccgtggccgtgtcgcggcaggaggacggcagcgtcgagatccaacgcaaatcgacgcgaaaataa

SEQ ID NO: 361927 - DNA, 402 bp, Pseudomonas aeruginosa
atgctcaagctggagaagctgattgatatcactcttgaacatttctctgtggtagtcgccatcaaagcgctgtccagcctttcggctatcggagaacttgctcttcagccagtaacggaaaaaactatcgatttcatcttcccgataggcgttcaccgccctcacgtgcgtatcccagagctcgttatagttaccagagtcaagttcaagcttgtcgatctgccccaggagctttcctttcaatatctcgtaaggcttgagtcgtacaccacggtcattgatgacctcgaacaccatcggtacatgggtagaatcgacggacagattgatgagcaccaggcggtaaaggaagtagtgaacgaaggtctcgaacttgtgcttgctgttcaaacgggtagatag

SEQ ID NO: 361928 - DNA, 285 bp, Pseudomonas aeruginosa
atgcactgcggcgcacaattaaaaaacccgctgcgctcgaaccacctcagtcatgaaacgctttatctcgcgacttacggtcgtatgattctgcttacacactgcctcaaactcagctttaagaaccgagttgattcggaagttaacccgatcatcaatctcgtcccctacccgctccaaagcttcacgccctttttccaaagcaatgcgttccttgccctgctcggcaaagccctgaatcctctggaaccattcgtcagcatcaaaactcataaaaccccctga

SEQ ID NO: 361929 - DNA, 1533 bp, Pseudomonas aeruginosa
gtgccgcgcctcgccacatcccggcggcaagccgcgggatgcgcgccactgccgtccgcccacaccggttcgcggtacgcgcgccacgcgcccgagcgcacgctgctgtacgcgttggtagaggcgcactacccggacttcattgcacggatcgaagcggagggccgctcgctgcccgggtatgtccgcgaggcgttcgatgcctacctgcgttgcggcgtgctcgagcacggcttcctgcgggtggtgtgcgagcactgccgtgcagagaggctggtggccttctcctgcaagaagcgcgggttctgcccgagttgcggcgcgcgacgcatggccgagagtgcgcggcacctggtcgaggaggtgttcggcccgcggcctgtgcggcaatgggtgctgagctttccgtaccccttgcgtttcctgttcgccagcaagccagaagccattggcccggtgctgggcatcgtgcagcgcgtgatcgccggctggttggccgatcaagccggcatcgaccgcgccagcgcccagtgcggcgcggtgacgctgatccagcgtttcggcagcgcgctgaacctgaacatccacttccacatgctgtggctcgacggcgtgtacgtggaagccaccgagctgccgcggcgcgaactgcgcctgcaccgcgcccgtgcgcccaccaccgcgcagttgacccagctggcagctaccatcgcgcaccgggtgtgtcggcacctgacgcgcaaaggctggctcgaaggggagggcgaatcggccttcctggcagacagcgctgcaggcgacgacggcatggatgggctgcggatgagttcgatcacctaccgcatcgccaccggccgcgacgctggctgcaaggtcgtcacgctgcaaacgctgcccggtgacgccggttcgctggagggcgaagccggcaaggtcggcggcttctcactgcatgccggcgtggcggccgaagcacacgaaagccacaagctcgaaaagctgtgccgctacatcacgcgcccggcgatcagcgagaagcggctgtcgatagcgctccagggcagggtgcgttaccagctcaagaccccgtggcgcaatggcaccacgcatgtggaatgggatccggtggatttcatcgccaagctggcggcgctggtcccgccaccgcgcgcccacctgacccgcttccacggggtgtttgccccgaacgccgccctgcgcgcacagttgacgccatcggggcgcggcaggcggcatgacgccgctgtggagccggcggacgcaagcgcgaacgacgcgccgcgcagccccgaggagaagcgccgttcgatgagctgggcgcaacgcctcaagcgggtcttttccatcgacgtcaccgcctgcgtccactgcggtggcaccgtgcggatcgtcgccagcatcgaggaacctgccgccatccgcgccatccttggccacttcgtgaagcagggcgcgcgggaagaagcgcactacaggcccgcagcgcgcgcaccgccagtgcaagccgcgtga

SEQ ID NO: 361930 - DNA, 1533 bp, Pseudomonas aeruginosa; identical to SEQ ID NO: 361929

SEQ ID NO: 361931 - DNA, 189 bp, Pseudomonas aeruginosa
atgttcgtggtgttcgggtccgtcgtgttgggtgcgctggtgcatagcccttgtgcgtaccagggcaggcgagcatcggcgaacatgcccgacgtgactttcgaggcatccagggcgggaatgtcgttctgtaccaacgtgctgcccgcgatcactcgcccggtcgagttcacatttaccttggtgtag

SEQ ID NO: 361932 - DNA, 1059 bp, Pseudomonas aeruginosa
atgaataccctgttgatgcactgccggccaggcttcgaaggtgaagtctgcgccgaaatcgccgagcatgcagccactctcgagattcccggctacgccaagagcaagccggccagcgcccacgtcgagttcgtctgccaggacgccgacggcgccgagcgcctgatgcgccgcctgcgtttcgccgacttgatcttcccgcgccagtgggcgcgcggacccggcttcatcgaattgccggaaagccagcgcatcgaggtgctgctggcggaactggcgagttatccggtctgcggcagcctctggctggaggtgctggacaccaatgccggcaaggaggtctcgaccttctgccgcaagttcgagaaaccgctgcgcgccgcgctggtgaaggccgggcggttgcaggaggacccggcgctgccgcgcctgctgctgaccttccgctccggccgggaggtcttcgtcggcctcgccgagccgcgcaacagcgcgctctggccgatgggcatcccgcgcctgaagtttccccgcgaggcgccgagccgttcgacgctgaagctggaggaagcctggcaccagttcatcccgcgcagcgaatgggacaagcgcctggcgccggatatgctcgccgtggacctcggtgcggcgccgggcggctggacctggcaactggttaaccgggagatgcgggtgaccgccgtggacaacgggccgatggcggagaacctgatgtattccgggctggtcgaccaccagaaggtcgacggctaccagtaccgcccgcgccaacgggtcgactggatggtctgcgacatcgtcgagaagccggcacgcaccggtgcgttgatcgagacctggatcggcgaagggctttgccgcgaggcggtggtcaacctcaagctgccgatgaagcagcgctacgccgaggtgcgcaagatcctccagcgcctgcgcgagagcttcgacgcgcgcggcctgaaggtagtgatcggctgcaagcagctgtatcacgaccgcgaggaagtgacctgccatctacgccgccttgaacgctga

SEQ ID NO: 361933 - DNA, 240 bp, Pseudomonas aeruginosa
atgacccattctgtcgacgccattctcgacgccaccggcctgaactgtcccgagccggtgatgatgctgcacaacaaggtccgcgacctggcgcccggcggcctgctcaaggtgatcgccaccgatccctcgacccgccgcgacatccccaagttctgcgtgttcctcggtcacgagctggtcgagcagcaggaagaggcgggcacctatctctactggatccgcaagaaggccgactag

SEQ ID NO: 361934 - DNA, 1311 bp, Pseudomonas aeruginosa
atgaacgcagcaatccatccccgtccggccgcggaacgcgcgccgtcctactacgccgccacgctcaacgaggaaaccgactatccgaccctgctgggcgcggtgacggtcgacatcgccatcatcggcggcggcttcaccggcgtcgccacggcggtcgaactggccgagcgtggctacaaggtggccctggtcgagacccatcgcatcggctggggcgccagcgggcgcaacggcggccaggtcaccggcagcctgtccggcgacgcggcgatgcacaagcagatgcgccagtggctgggcgccgaggtcgaggacttcatctggcacctgcgctggcgcggccacgagatcatccgccagcgggtggagaagtacggcatcgcctgcgacctccgccatggccacctgcacgcggcgatgaaggccagccacatgggcgagctgcaggcctcctacgaggaggcggtgcgccgcggcatgggcgaccaggtgctcctgctggacaaggccggcgtccaggcccacctggagaccgagctgtactgcggcgcgctgaagaacacccgcaacatgcacctgcacccgctcaacctgtgcatcggcgaggccagggcggcggccggcctcggcgcgctgatcttcgaacattccgaggtcctggatatcgtccacggcccgcggccggcggtgatcacccgcgagggaaggatcgaggcgcagcagatcctgcttgccggcgatgtctaccacaagctcgaacgcaggcagctcaaggggatgatcttcccggccatgggcggaatcgttaccacccggccgctgggcgagctggcacgggagatcaacccgcaggggctggcggtctacgattgccgcttcgtcctcgattactaccgccccaccgccgacggccgcctgctgttcggtggcggcgccaactactcgggccgcgactcgcgggacatcgccgccgagctgcggccatgcatcgagcgcaccttcccgcgcctgaagggcgtggagatcgagttccagtggagttgcgccatgggcatcgtgatgaaccgcatcccccagctcggcaagctctccgacaacgtctggtactgccagggctactcggggcatggcgtggccaccagccacatcatgggcgaaatcatggccaaggcgatgagcgggagcctggagcagttcgacaccttcgcccgttgcaagcacctcagggtgccgctgggcgacctcttcggcaatccgatgctggccgccgggatgtggtactaccagctcatggagaagctgcgctga

SEQ ID NO: 361935 - DNA, 1365 bp, Pseudomonas aeruginosa
atgaacttcgcctgcgaacaagaagcccaggatttcctggccgccaatcccgatatcgaactcttcgaactgttcatcctcgacgccaatggcgtgccacgcggcaaactgctgcaccgcgacgaactgctggccgtctaccgcagcggccggccgctgccgagcaccatcctggggctgacaatgaacggcgaggatgtcgaggactccggcctggtctgggacgtcggcgacatcgactgccgcgcctaccccctgtccggcagcctggtgcgcctgccctggcggcagatcccgacggcggcggtgcaggtcagcatgcacccgagcgagggcctgcccgccagcgtcgccgatccgcgccacctcctggtgcgcaccatcgacgcgctgaagagcgagggctatcacccggtgatggccgccgagctggagttctacctgctcgaccgtcagcgcgacgccaacggccgcccgcaaccggctcgcgacgccgatggcggccgcccgcgggcgacccaggtctacggcctgcgcgaactggagcagatcgagccgttcctcgccgacctctatgccgcatgcaaggcgcagggcctgccggcacgcacggcgatctcggaatacgccccgggccaggtggaaatcaccctcgaccacggcgacgccctagtcgccatggaccaggcgatccgctacaagcgcctggtcaagggcgtcgcgcacaagcacggaatgctcgcctgcttcatggccaagccgttcgacgacctggccggcaccggcatgcacctgcacgtcagcctggccgacgaacaaggccacaacctgttcgccagcgacgaccccgccggcacgccgttgctgcgccaggcggtcggcggcatgctcgccagcctgctcgactcgctcctgctgttctgtcccaacgccaactcctaccggcgcttccaggccaacagctacgcgccgctggcgcagacctggggcgtcgacaaccgcaccgtgagcctgcgcgtgccgggcggcccggcctccagtcggcatatcgagcaccgcatctgcggcgccgacgccaacccctacctggccgccgcggcgcttctcgccggggtccaccgcggcatccgcgaaggcatcgatccgggcgcgccggtggagggcaatggctacgcccaggccggcaagcgcctgcccaccgactggctgaccgccctcgacgccctgcaaggctccgagtgggcgcgggaagccttcggcgagccgttcctcggcgtctacctggcggtgaagcgcgcggaataccggcaattcatgggcgaggtcggcgagcaggactggcgctggtacctgacccaggcctga

SEQ ID NO: 361936 - DNA, 1398 bp, Pseudomonas aeruginosa
atgaccttccgacccttctggctggaccaggccctacgctccgaacatgcggccccctgcccgccgctggccggcgatacccgcgccgacctgtgcatcgtcggcggcggctacactggcctgtggaccgccatcatgctcaaggagcacgatcccgggctcgacgtggtgctggtcgaggccgacctctgcggcgccggcgccagcggccgcaacggcggctgcgcgctgtcctggtcggccaagttcttcaccctggaacggctgttcgggctcaccgaggcgatccgcctggtcaaggcctccgaggacagcatccgggccatcggcgccttctgccagcgctacgacgtcgaggccgactaccggctggacggcaccctctataccgccaccaacccggcccaggtcggcagcaccgacagcgtgatcgccgccctggaacgccatggcatcaactccttcgtcaagcgcccgctggccgacgtgcaacgcctggccggctcgcgccggcacctggaaggctggttctcgccggctgccgcgacggtgcagccaggcaagctggttcgcggcctgcgccgggtcgccctgcaactgggggtacgcctgtacgaaggtacgccgatgcgaggactggagcacggccgcccggcggaagtggtcaccccccacgggcgggtcgtcgccgaccgcgtggtgctggcgctgaacgcctggatggcgagggccttcccgcagttcgaacgcagcgtggcgatcgtctccagcgacatgctcatcaccgagccacgaccggacctgctgcaggagatcggcctgaccagcggggtcagcgtgctcgactcgcggatcttcgtgcattactaccacaacaccccggacggccggctgatgctcggcaagggcggcaacaccttcgcctacggcggacgcatgctgccggtgttcgaccgcccctcaccgtatctcgggcaactacgcggcagtttgcgggagttcttccccgagttcgccgaggtcgccatcgaggccagctggaacggtccatcggatcgctcggtgaccggcctgccgttcttcggccggctcgacggccgcgacaatgtgttctatggcttcggctactccggcagcggcgtcggcccatgccacatgggcgggcagatcctttcttcgctggcgctcggcctggacaatccctggacccgttcgccgctgacccagggaccgctcggtcgcttcccgccggagccgatccgctatgtcggttcgctgatggtgcgcaacgcgatccgccgcaaggagcgcgccgaagacgtcggccggcgcccgcgtcatctcgacgtacgcctggccaggttcgccgccgccgcgggcaaggccgacaaggggtga

SEQ ID NO: 361937 - DNA, 354 bp, Pseudomonas aeruginosa; identical to SEQ ID NO: 353162

SEQ ID NO: 361938 - DNA, 1389 bp, Pseudomonas aeruginosa
atgaatcaacgtcccgggacggcgctgccgtcctctcccgtgtccagcttccagcgctggcgcctgcagatattcgcgatcacctggctggcctacgccgccttctatttcacccgcaaggccttttccgtcgccaagctcggcatcgccgaagatccgggcttccagttggacaagatggcgatggccgatctcgacgccatctacctcgccgcctatgccgtcggccagttcacctggggcgtgctggccgaccgcttcggcccgcgcatcgtggtgttcggcggcctgctgatctccgcactggccgcgctggtcatgggcaccttcgccaccctgccgatcttcgccacttgcatggtggtccagggactggcgcagtccaccggctggtcggggctgtgcaagaacatcggcagtttcttcgccacccacgaacgcggtcgggtgctcggcctgtggagcacctgctacgccttcggcggactggtcgcctcgccgttcgccggctggtgggcgtacagcgtgttcggtacctggcacgcggcgttctactccagcgccgcggtggtcggcggcgtggccctgctgttcctgttgttgcagcgcaaccgcccggaggacgtcggccatccacccgtcgaaccgcaggtcgcgagcgaggccgtgcgctatgccggcttcaggccggaaggcggcaacggcggcaacggcggcaacggcggcaacggcggcagcctgcaggtactcgccaaggtggtgcgcaaccgcacggtgctctgcctcggcctggcctacttcctgctcaagccggcgcgctacgcgatcctcctgtggggaccggtgatcgtctacgaacgcatgccggcgctcggcaaggtcggcgcggcgatcgttcccaccgccttcgaggtagccggcctgctcggcccgatcctgatcggcttcgcctcggacaagctgttcggcgcacggcgcatgccggcctgcgtgatcagcctgctggcgctgaccgtctgcctggcgctgttcgtcccggcgatgaccaccggcagcattccgatagtggtcggcctgctgttcatgatgggactgaccctgtacggcccggactcgatgatctgcggctccgccgccatcgacttcggcaccggcgaggccgccggcaccgcctccggcttcgtcaatggctgcggttcggtgggcgcgatcctcggtggcctgctgcccggctatttcgacacctacacggtgttcatcggcttcaccgtcgccgccctgatcgccaccgcggtgctcctcccgcactggaacagccgacccgacggtgttgtgaaaggccacaggaacatccccagcctgggggacttccgcccgatccgctcctga

SEQ ID NO: 361939 - DNA, 882 bp, Pseudomonas aeruginosa; identical to SEQ ID NO: 353164

SEQ ID NO: 361940 - DNA, 180 bp, Pseudomonas aeruginosa; identical to SEQ ID NO: 353165

SEQ ID NO: 361941 - DNA, 1146 bp, Pseudomonas aeruginosa
atggacatgtttcgcctgggattggtggtcaatcccctggccgggctgggtggcccggtcgccttgaagggcagcgacggggtggctgccgaggccctggccagaggcgccgaaccacgtgcgctggagcgcacccggatagccctggagtgcctgttgccgctggtcgagaagatcgagttcctgacctttcccggggccatgggcggcgagttgctcgagcgcatgggcttccgccatcgcctgctcggcgagtggcagggagcggtcagcagcgcggcggatacccggttggcggtcgagcgtttgcaggaggccggcgtcgccctgatcctgttcgccggtggtgatggcacagcacgggatgttgccggggtggtgcgcgagcaacagccggtgctcggcattccggccggggtgaagatccactccggggtctatgccatcagtccgcgcgcggccggcgaattggccaggcgcctggtcgagggcggcctggtgcgcctggccagcggcgaggtgcgcgatctcgacgaagaggcgctgcgcgccggccgcgtcgccgcgcgttggtacggcgagatgacggtgccggaggagggccacttcatgcagcacgtgaagcaggcagggatggagtccgaggagctggtgctggtggacctcgccgattggctggcggaaagctgggaagacggcgtgcgttatgtgctcggaccgggctcgaccctgcatggcctggcgcgcaacctcggcctggaaaccaccctgctgggcgtcgacgtgctggagaatggcgcggtgctcgcccgcgacgtcgacgaggcgcggctgttcgaactggtggacggtcatccggcgttcctgctggtcaccgccatcggcggccagggccacgtgatcggtcgcggcaaccagcagatcagtccccgggtgttgcgcgccatcggcctggagcgcatgcgggtggtcgccaccaagcgcaagctggggaccctcgggggccgcccgttgctggtcgacagcggcgacccggtgctggacgacagcttcccggacgccatccgggtctgggccggctacaaggaagaactgctgtatccgctgggatacgcgaaggaccaggacacgcccgcgggcgcttag

SEQ ID NO: 361942 - DNA, 597 bp, Pseudomonas aeruginosa; identical to SEQ ID NO: 325072

SEQ ID NO: 361943 - DNA, 282 bp, Pseudomonas aeruginosa; identical to SEQ ID NO: 353167

SEQ ID NO: 361944 - DNA, 552 bp, Pseudomonas aeruginosa
atgcctcactggctggtaatcgatctggaggccactaccgcggaaggcggctggcccctggaggaaatggaaatcatcgagatcggcgccaccctggtcgccgccgcggacgcccgcgaactggatcacttccagcgtttcgtacggccggtcaggcggccgctgctgacccacttctgccgcgacctcacgcatatcagccaggccaacgtcgatggcgccgcccatctcgacacggtctgggaagccttcgagcgctggctcgcccagcatcgtccgcgactggccggctgggccagctggggcgactacgaccgccgccagctggagcaggaatggcgccagcacgggctgaccagccagctcagcgaagtgccgcacgtcaatctcaagcaacgcttcggcgaagtccgccagctgccccgcccggtcggcctgaacgcggccctgcaactggccgggatgagtttccagggccagcagcaccgcgccctggaggatgcccgcaataccgcacggctgctgccgctggtattgccggtggagcattga

SEQ ID NO: 361945 - DNA, 867 bp, Pseudomonas aeruginosa
atgactgcggtcgcatttctcggcctgggcacgatgggctacccgatggccgggcacctgcagcgcgagggctatcacgtctgcgtctacaatcgctcgtcggccaaggcgctgcgctgggtcgaggagtacgccggacgatacgccgatacgccgcgcgaggcctgtgccggcgccgaactggtgttctgctgcgtcggtaacgacgacgacctgcgtgccgtggcgctgggcgagcagggcgccttcgccggaatggcgccgggcagcctgttcgtcgaccacaccaccgcttcggcggaagtcgcccgcgagctgtcgctgctggctgccgagcgtgagctgggctttctcgacgcgccggtctccggcggccaggcgggcgcggtcaacggcgccctgacggtgatggtcggtggcgaggaggccttctatcgacgcgccgaaccgctgctgcgcagctatgcgcggatggtccggcgaatgggcgacgtgggtagcgggcaattgaccaagatggtcaaccagatctgcgtcgcggggctgctccagggcttggccgaggcgctgcacttcgcccagtgcgccggtctcgacggcgaggcggcgatgcaggtgatcggcaagggcgcggcccagtcctggcaactggaaaaccgccaccagagcatgctggccggagagttcgacttcggcttcgccgtggactggatgcgcaaggacctgtcgatcctgctcgccgaggcgcgacgcaacggcgcgcagttgccggtcacggcgctggtcgaccagttctacgccgaagtgcaggcgatgggcggcggtcgttgggatacctccagcctgatcgcccggctgcgttcgtga

SEQ ID NO: 361946 - DNA, 342 bp, Pseudomonas aeruginosa; identical to SEQ ID NO: 353169

SEQ ID NO: 361947 - DNA, 756 bp, Pseudomonas aeruginosa
atgcggttgcacaagcgctcgctggtctgggggctcgcgctgagcgggctggccgtcgtgctggcggccgcctggtgggcgagccaggcgtcgcgggggccggctctgtggagcgagctgcgggtgccgccggcgtttgccatcccgcgcgatttcgacctgggcgaataccgcttgagctggggcggcaagagcctcgccctgtcagtggcgggtagcgcccggccgccgttgtgggagagcgagggcggttttctcggggccgggcgggaaagcgccggtcgcctgcagttgcgctgccaggagcagagcctggagagcttcgagctggtcggtcgacgcttgtccctgaaggggcacctgcgctgcgccgatggccggctcagcgcctacgagctgtcgttcgagccgcgccagggcggcgtggaggtgcgcgtcgcgctggcggacagcgagctgaaccgggtcgccctgtcctggcggcgtggagcgggggagcgcttgtccggtatcgtcgatgacgaggcggaaggtcgctcctgggtcttgccggccggggtcgccggctactggagttccgctggcaacgccttcctcggccactcgacggcggcgcaatccctcgacctgcgcgagccgggccgggtgcaatggcgggctgcgacggagtcggccagggcctggctgttcgctgccggcaaccgcgagcagtggcagcttcgcagcgcgcgtctcgaggcggaaacgcgccgctga

SEQ ID NO: 361948 - DNA, 255 bp, Pseudomonas aeruginosa
atgcaatgtagagccggctgcggcgcctgctgcatagcaccgtcgatttcctctccgctgccgggcatgccggccggcaagcccgcgggcgtacgctgcctgcacctggacgaaaaccatctctgcgggctgttcggccgaccggagcgaccggctgtgtgcggccagttcggcgccgatccggaaatctgcggcgacagccgtgagcaggcgctggccctgatcgcggagtgggaagtcatcactgccgcgtga

SEQ ID NO: 361949 - DNA, 609 bp, Pseudomonas aeruginosa
atgcgtggcattttgcgtatgaccgtgctggctgccgcagtgttcggggtggccggcaatgcgctggccgaagactggaagctggccaaggacgaggatggcgtgaaggtctacctcagcagtgtccagggctccaagtacaaggcttatcgcggcgttaccgacatcaaggccgacgtggcgaccatcgaggcgctgcaggaggacgtcaagggttcctgcaagtggatccatgcctgcgccgagatgaaactcctgaagcaggaaggcgccgacgcctggacttactcgaagatcgacatgccctggccggtcaccggtcgcgacgtggtcatccatgtcaccaccgagaagaccgcggatggcaccgtgacccgtcacctgaaggccgatccgacctatatccccgaggaaaagggccagatccgcgtgcccaagctggtcggcgagtggaagttgcagccgaaggggcagggcgtgacggaagtgacctaccaggtggaaaccgagccgggtggcagcattccttcctggttggccaacagcttcgtggtcgacgcgccgctgaacaccctcaagggcctgcgtagcgccgccgagaagcgctga

SEQ ID NO: 361950 - DNA, 1287 bp, Pseudomonas aeruginosa
atggctgacaaaaaagcgcagttgatcatcgagggctcagcccccgtcgaactgcccgtcctatccggtaccatgggtcccgatgtagtggatgtacggggcctcaccgccacgggccacttcaccttcgatcctggcttcatgtcgaccgcctcctgcgagtcgaagatcacctatatcgacggcgacaaaggcgtcctcctccatcgcggctaccccatcgagcaactggcggagaaatccgactacctggaaacctgctacctgctgctgaacggcgagctgcccaccgccgcgcagaaggaacagttcgtcggcaccatcaagaaccacaccatggttcacgagcagctgaagaccttcttcaacggcttccgccgcgacgcccatccgatggccgtgatgtgcggcgtgatcggcgccctctcggccttctaccacgactccctggacatcaataacccgaagcatcgcgaagtctccgcgcatcgcctgatcgccaagatgccgaccatcgccgccatggtgtacaagtactccaagggcgagccgatgatgtatccgcgtaacgacctgaactacgcggaaaacttcctgcacatgatgttcaacaccccctgcgagaccaagccgatcagccccgtgctggccaaggccatggaccgcatcttcattctccacgccgaccacgagcagaacgcctccacctccacggtgcgtctggccggctcctccggcgccaatccgttcgcctgcatcgcctccggcatcgccgccctgtggggaccggcccatggcggcgcgaacgaagcggtgctgcgcatgctcgacgagatcggcgacgtgtccaacatcgacaagttcgtcgagaaggccaaggacaagaacgatccgttcaagctgatgggcttcggccatcgtgtctacaagaacttcgacccgcgcgccaaggtcatgaagcagacctgcgacgaggtcctccaggaactgggcatcaacgacccgcaactggaactggcgatgaagctggaagaaatcgcccgccacgacccctacttcgtggaacgcaacctgtacccgaacgtcgacttctactcggggatcatcctcaaggcgatcggcattccgaccagcatgttcaccgtgatcttcgccctggcgcgtaccgtcggctggatctcgcactggcaggaaatgctctccggtccctacaagatcggccgcccgcgccagctctataccggccacacccagcgcgacttcaccgccctcaaggatcgcggctga

SEQ ID NO: 361951 - DNA, 387 bp, Pseudomonas aeruginosa; identical to SEQ ID NO: 319769

SEQ ID NO: 361952 - DNA, 375 bp, Pseudomonas aeruginosa; identical to SEQ ID NO: 319770

SEQ ID NO: 361953 - DNA, 1773 bp, Pseudomonas aeruginosa
atggctagcattcgtacactttcctttgacgccatcatcgtcggtggcggtggcgccggcatgcgtgccgcgctgcaactggcccagggcggccacaagaccgccgtggtgaccaaggtcttcccgacccgttcccacaccgtatccgcacagggcggcatcacctgcgccatcgcttcggccgacccgaacgacgattggcgttggcacatgtacgacaccgtcaagggctccgactacatcggtgaccaggacgcgatcgaatacatgtgttccgtcggtcccgaggccgtgttcgagctcgagcacatgggcctgccgttctcccgtaccgaaaccggccgcatctaccagcgtccgttcggcggccagtccaaggacttcggcaagggtggccaggccgcccgtacctgcgccgccgccgaccgtaccggccacgcgctgctgcacaccctgtaccaggccaacctgaagaatggcacctcgttcctcaacgagtggtacgcggtcgacctggtgaagaaccaggacggcgcggtggtcggcatcatcgccatctgcatcgagaccggcgagaccgtctatatccgttccaaggccgtggtcctggccactggcggtgccggccgtatctacgcctccaccaccaacgcgctgatcaacaccggtgacggcgtgggcatggccctgcgtgccggcgtgccggtgcaggacatcgagatgtggcagttccacccgaccggcatcgccggcgccggtgtactggtcaccgaaggttgccgcggcgaaggcggctacctgatcaacgcccacggcgagcgcttcatggagcgttatgcgccgaacgcgaaggacctggccggtcgcgacgtggtcgctcgttccatggtcaaggaagtcctggccggcaacggcgtgggcccgaacaaggaccacgtgctgctgaaactcgaccacctcggcgaggaagtcctgcacagccgcctgcccggcatctgcgaactgtccaagaccttcgcccacgtcgacccggtcgtcgcgccgatcccggtgatcccgacctgccactacatgatgggtggcgttgccaccaacatccatggccaggccatcacccaggatgccaatggcaacgaccagatcgtcgaaggcctgttcgccgtaggcgaagtggcctgcgtatcggtacacggcgccaaccgcctgggcggcaactcgctgctcgacctggtggtattcggccgtgccgccggtctgcacctggaaaaagcgctgaaagaaggcatcgacgcccgcggcgcttccgagagcgacctggaagcctccttcaagcgcctgaacggcgtgaacgagcgcaccagcggcgaagaagtcgctccgctcaagcgcgagctgcaaagctgcatgcagaactacttcggtgtattccgcaccggcgagtacatgcagaagggcatcgcccagctggccgacctgcgcgagcgtatcgccaacgtcaagatcaacgacaagagccaggcattcaacaccgcgcgcatcgaagcgctggaactgcaaaacctcctcgaggtggccgaggccaccgcgatcgcggccgagcaccgcaaggagtcccgtggcgcccacgcccgtgaagacttcgaggagcgcgacgacgagaactggctgtgccacaccctgtacttcccgggtgagaagcgcgtatccaagcgttccgtcaacttcgcgccgaagaccgttccggcattcgaacccaaggttcggacttactaa

SEQ ID NO: 361954 - DNA, 708 bp, Pseudomonas aeruginosa
atgttgcaagtgagtgtttatcgttacaaccccgacaaagatgctgcgccgtacatgcaggatttccaggtcgacaccaacggcaaggacgtgatggtcctcgacgtgctggcgctgatcaaggaacaggacgagggcttctcctaccgtcgttcctgccgtgaaggcgtctgcggctccgatggcatgaacatcaacggcaagaacggcctggcctgcatcaccccgctgtcggccgccggcctgaagggcggcaagctggtgatccgtccgctgcccggcctgccggtcattcgtgacctggtcgtggacatgagcatcttctacaagcaatacgagaaggtgaagccgttcctgcagaacgatacgccggccccggccattgagcgtctgcagaccccggaagagcgcgagaagctggacggtctgtacgagtgcatcctgtgcgcctgctgctcgacctcctgcccgtccttctggtggaaccccgacaagttcctcggtccggccgcactgctgcaagcctatcgtttcctggccgacagccgtgacaccaagaccgaagagcgcctggcttcgctggacgacccgttcagtgtgttccgctgccgcggaatcatgaactgcgtgaacgtttgcccgaagggtctgaacccgaccaaggcgatcggccacgtgcgtaatatgctgctgcagagcggaacctga

SEQ ID NO: 361955 - DNA, 2832 bp, Pseudomonas aeruginosa
atgcacgaaagcgtaatgcagcggatgtggaacagtgcccatctatccggtggtaacgctgcctacgtcgaagagctctacgagctctacctgcacgaccctaacgctgtgccagaagagtggcgcacgtatttccagaagcttcccgccgatggcaatcccgcccccgacgtctcgcactccacagtgcgcgatcatttcgtcttgctggccaagaaccagcgccgtgcccagccggtttccgccggtagcgtgagcagcgagcacgagaagaaacaggtcgaagtccttcgtctcattcacgcttaccgtctccgcggccaccaggcttccaccctcgacccgctcggcctgtggcagcgtcccgcgcctgccgacctgtcgatcgaccactacggtctgacgggtgccgatctggataccactttccgcaccggtgagctttacatcggcaaggaagaggcgaccctgcgtgaaatcgtcgacagcctgaagagcacctattgcggtaccttcggcgccgagttcatgcacatcgtcgattccgagcagcgcaagtggttcctccagcgcctggaaagcgtgcgtggccgtcccggcttctccgccgaggcgcgtgcgcacctgctcgagcgcctgaccgcggccgaaggcctggagaagtacctgggcaccaagtacccgggcaccaagcgtttcggcctggaaggcggcgaaagcctgatcccgatggtcgacgagatcatccagcgctgcggttcctacggcgccaaggaaatcgtaatcggcatggcccaccgcggtcgcctgaacgtcctggtcaacaccctgggcaagaacccgcgcgacctgttcgacgagttcgaaggcaagaagatcgtcgagctgggctccggtgacgtgaagtaccaccagggcttctcctcgaacgtgatgaccagcggcggcgaagtccacctggcgctggcgttcaacccgtcccacctggagatcgtttccccggtggtcgagggttccgttcgtgcccgccaggaccgccgcaaggacagctccggcgacaaggtggtaccgatttccatccacggcgatgccgccttcgcggggcagggcgtggtcatggaaaccttccagatgtcgcagacccgcgcctacaagaccggtggcaccatccacctggtgatcaacaaccaggtcggcttcaccaccagccgccaggacgatgcgcgttccaccgagtacgccaccgacgtggcgaagatgattcaggcgccgatcttccacgtcaacggcgacgatcccgaagccgtgctgttcgtcacccagctggccgtcgactatcgcatgcagttcaagcgtgacgtggtcatcgacctggtctgctaccgtcgccgcggccacaacgaggcggacgagccgagcggcacccagccgctgatgtaccagcagatcgccaagcagcgtactacccgcgagctgtacgccgacgcgctggtgaacgccggcgtgctcagcgccgagcaggttcagtcgaagatcgacgactaccgcgatgccctggacaacggcctgcacgtggtgaagagcctggtcaaggagcccaacaaggaactgttcgtcgactggcgtccgtacctgggccatgcctggaccgcgcgtcacgacacccgcttcgacctgaagaccctgcaggaactgtccagcaagatgctggaagtgccggaaggcttcgtggttcagcgccaggtttcgaagatctacgaagatcgccagaagatggcggccggtggcctgccgatcaactggggcttcgccgagaccctggcctacgcgaccctgctgttcgaaggccatccggtacggatgaccggccaggacgtcggccgtggcaccttctcgcaccgtcacgcggtgctgcacaaccagaaggatgactcggtctacgtaccgctggccaatctgttcgacggccagccgcgcctggatatctacgattcgttcctttcggaagaggccgtgctggcgttcgaatacggtttcgccaccaccacgccgaattcgctggtgatctgggaagcccagttcggcgacttcgccaacggcgcccaggtggtcatcgaccagttcatcaccagtggcgaaagcaaatggggccgactctgcggcctgaccatgctgctgccgcacggctatgaggggcagggtccggagcactcctccgcgcgcctggagcgctacctgcagctctgcgccgagcagaacatccaggtctgcgtgccgaccaccccggctcaggtctaccacatgctccgccgtcaggtgatccgcccgctgcgcaagccgctggtggtgatgacgccgaagtccctgctgcgtcacaagctcgccatctcgaccctggaagatctggccaacggttccttccagaccgtgatcccggaaatcgacagcctggatccgaagaaggtcgaccgcgtcgtgctgtgcagcggcaaggtgtactacgacctgctggagaagcgtcgcgcggaaggccgcgaagataccgcgatcgtccgtatcgagcagctgtatccgttcccggaagacgacctggcggaagttctggctccctacaagaacctcaagcacatcgtctggtgccaggaagagccgatgaaccagggcgcctggttctgcagccagcatcacatgcgtcgtgtcatcgccgcgcacaagaagggcctcaatctcgagtacgccggccgcgaaggctccgctgctccggcttgcggctacgcctcgatgcacgccgagcagcaggaaaaactgctgcaagacgcctttactgtttaa

SEQ ID NO: 361956 - DNA, 1230 bp, Pseudomonas aeruginosa
atggctatcgaaatcaaagccccaaccttcccggaatcggtcgccgacggcaccgtcgccacctggcacaagaagccgggcgaagcggtcaagcgcgacgaactgatcgtcgacatcgagaccgacaaggtggtcatcgaggttctcgccgaggctgacggcgtgctggccgagatcatcaagaacgaaggcgacaccgttctgagcaacgagctgctcggcaagctgaacgaaggcggcgccgccgctccggccgctccggctgccgctgcgcccgccgccgctccggctgcccaggccgccgctccggccgccgctggcggcgacgacgccatcctgtccccggccgcgcgcaagctggccgaggaggccggcatcgatccgaacagcatcgccggcaccggcaagggcggtcgcgtgaccaaggaagacgtggtcgctgcggtcgaagcgaagaagaacgccccggccgccctggccaagcctgccgccccggctgccgaggcgccgatcttcgccgccggcgaccgtgtcgagaagcgcgtgccgatgacccgcctgcgggccaaggtcgccgagcgcctggtcgaggcgcagtccgccatggccatgctgaccaccttcaacgaggtcaacatgaagccgatcatggacctgcgttcgaagtacaaggacctgttcgagaagaagcacaacggcgtgcgcctgggcttcatgtccttcttcgtcaaggccgccaccgaggcgctgaagcgcttcccgggggtcaacgcttccatcgacggcaacgacatcgtctaccacggctaccaggacatcggcgttgccgtttccagcgaccgcggcctggtggttccggtactgcgtaacgccgagttcatgagcctggccgagatcgagggcggcatcgccaacttcggcaagaaggcgaaggaaggcaagctgaccatcgaagacatgaccggcggcaccttcaccatctccaacggtggcgtgttcggttccctgctgtcgaccccgatcgtcaacccgccgcagaccgccatcctcggcatgcacaagatccaggagcgcccgatggccgtgaacggccaggtggtgatcctgccgatgatgtatctggcgctgtcctacgaccaccgtctgatcgacggcaaggaagcggtgagcttcctggtggcgatcaaggacctgctggaagatccggctcgcctgctgctggacgtctga

SEQ ID NO: 361957 - DNA, 1437 bp, Pseudomonas aeruginosa
atgagccagaaattcgacgtggtagtgattggtgccggccccggcggttacgttgccgccatccgcgctgcccagctgggcctgaagaccgcctgcatcgagaagtacatcggcaaggaaggcaaggtggcgctcggcggtacctgcctgaacgttggctgcatcccgtccaaggcgctgctggacagctcctacaagtaccatgaggccaaagaggccttcaaagtccatggtatcgaagccaagggcgtcaccatcgacgttccggcgatggttgcgcgcaaggccaacatcgtcaagaacctgaccggcggcatcgctaccctgttcaaggccaacggcgtgacctccttcgaaggccacggcaagctgctggccaacaagcaggtggaagtgaccggtctggacggcaagacccaggtcctggaagccgagaacgtgatcatcgcttccggctcccgcccggtggagatcccgccggccccgctgaccgacgacatcatcgtcgactccaccggcgccctggaattccaggccgtgccgaagaagctgggtgtgatcggcgccggcgtcattggcctggagctgggttcggtatgggcccgcctgggtgccgaggtgaccgtgctggaagccctggacaagttcctcccggctgccgacgagcagatcgccaaggaagccctgaaggtcctgaccaagcaaggcctgaacattcgcctgggcgcccgcgtgaccgcttcggaagtgaagaagaagcaggtcaccgtgaccttcaccgatgccaacggcgagcagaaggaaaccttcgacaagctgatcgtcgcggtcggccgtcgcccggtgaccaccgacctgctggccgccgacagcggcgtgaccctggacgagcgtggcttcatctacgtcgacgaccactgcaagaccagcgttccgggcgtcttcgccatcggtgacgtggttcgcggcgcgatgctcgcgcacaaggcctcggaagagggcgtgatggtcgccgagcgcatcgccggccacaaggcgcagatgaactacgacctgatcccgtcggtcatctacacccacccggaaatcgcctgggtcggcaagaccgagcagaccctcaaggccgagggcgtcgaagtcaacgtcggcaccttcccgttcgccgccagcggtcgcgcgatggctgccaacgacaccaccggcctggtcaaggtcatcgccgatgcgaagaccgaccgcgtcctgggcgtccacgtgatcggcccgagcgccgccgagctggtacagcaaggcgcgatcggcatggaattcggcaccagcgccgaagacctgggcatgatggtcttctcccacccgacgctgtccgaggccctgcacgaagctgccctggcggtgaatggccatgccatccacatcgccaaccgcaagaagcgctga

SEQ ID NO: 361958 - DNA, 1167 bp, Pseudomonas aeruginosa
atgaatctccacgaatatcagggtaagcagctgttcgctgaatacggcctgcctgtatccaagggctttgccgtagacacccccgaagaggccgcagaagcctgcgacaagatcggcggcagcgagtgggtcgtcaaagctcaggtgcacgccggcggccgcggtaaagcgggcggtgtgaagctggtgaagagcaaagaggacgccaaggcgttcgcccagcagtggctgggcaagaacctggtgacctaccagaccgacgccaacggccagccggtcagcaagatcctggtggagtcctgcaccgacatcgacaaggagctgtacctcggcgccgtcgtcgatcgttccagccgccgcatcgtgttcatggcttccaccgaaggtggcgtggacatcgagaaggtcgcccacgacactcccgagaagatcctcaaggtcaccatcgacccgctggtcggcgcgcagccgtaccagggccgcgagctggccttccaactgggcctgaagggcgaccagatcaagcagttcacccatatcttcgtcggcctggcgaagctgttccaggactacgacctggccctgctggaagtgaacccgctggtgatcaagaaagacggcaacctgcactgcctggatgccaagatcaacatcgacagcaacgccctgtaccgtcagccgaagctgcgcgccatgcacgacccgtcccaggacgacgcccgtgaagcccatgcgcagaagtgggagctgaactacgtcgcgctggaaggcaacatcggctgcatggtcaacggcgccggcctggccatgggtaccatggacatcgtcaacctgcacggcggcaagccggccaacttcctcgacgttggcggcggtgcgaccaaggagcgcgtgaccgaagcgttcaagatcatcctgtccgacagcaacgtgaaggctgtcctggtgaacatcttcggcggcatcgtgcgttgcgacatgatcgccgaaggcatcatcggcgccgtcaaagaagtcggcgtgaaggttccggttgtcgtccgcctggaaggcaacaacgctgaactgggtgccaaggtcctggccgaaagcggcctgaacatcatcgcggcaaccagcctgaccgacgctgcccagcaagtcgtcaaggccgcggagggtaagtaa

SEQ ID NO: 361959 - DNA, 888 bp, Pseudomonas aeruginosa; identical to SEQ ID NO: 353182

SEQ ID NO: 361960 - DNA, 1314 bp, Pseudomonas aeruginosa
atgactcatttgaaagggttcgacctgctcgcccttggcttcatgacgttcgcgctttttctcggcgcgggtaacatcatctttcctcccagtgccggcatggcggcgggcgaacacgtatggagcgcggctttcggcttcctccttaccggtgtcggcctgccgttgctgacggtggtcgccctggcccgggtcggaggcggtattggccgcctgacccagccgatcgggcggcgcgcgggagtagcgtttgccatcgccgtctatcttgccatcggcccgctgttcgccaccccgcgtacagccgtggtgtccttcgagatgggcgtcgcgcccttcaccggggacggcggcgcgccattgctcgtctataccgtcgcttacttctccgtggttctgttcctggtgctgaacccgggtcgccttgtcgaccgggtcggaaaggtcatcacgccggtgctgctgtcggccctgctggtccttggcggcgcggcgatcttcgcgccggcgggagagatcggcagcagttccggcgagtaccagagcgcgcccctggtgcagggtttcctgcagggctacctgaccatggataccctcggtgccctggtcttcggtatcgtcatcgccaccgccattcgcgaccgcggcatcagcgacagccggctggtcacgcgctattccatgatcgccggggtcatcgccgccaccggcctgtccctggtctacctggcgctgttctatcttggcgccaccagccagggcatcgccggcgacgcccagaatggcgtacagatcctcaccgcctatgtgcagcagacctttggcgtttccggcagcctgttgctggcggtggtcatcaccctggcctgcctgaccacggcggtagggctgatcacggcgtgcggcgagttcttcagcgacctgctgccggtttcgtacaagacggtggtgatcgtgttctcgctgttcagcctgctggtcgccaaccagggactgacccagttgatcagcctttcggtaccggttctggtgggactctatccgctcgccatcgtgctgatcgccctgagcctgttcgaccggctctgggtgtcggccccgcgggtgttcgtgccggtgatgatcgtcgcgctgctcttcggcatcgtcgacgggctgggggcggccaagctgaacgggtgggtgccggacgtcttcgccaagctcccgctcgccgatcagagccttggctggctgctgccggtatccattgcgctggtcctggcagtcgtttgcgatcggctgctgggcaagccgcgcgaagcggtcgcctga

SEQ ID NO: 361961 - DNA, 765 bp, Pseudomonas aeruginosa
atgaccgccgaactcggcattttcaacgggcacctgccgcaacacctgctggcggcgctctggttcctgttctgctgggtgggctacacccgctacgccacctggaagggccgcgacaccgcttgcctggccagcgtcctgcacctctaccgggaggactggatgcgccggctgctgctgcgtgacaaccgtatcgccgacgccagcgtgatcggcaacctggagcgcaacgcgtcgttcttcgcttccagcacgctgatcatcctcgccggcatcctcaccctgctgggctccaccgaccgcgccgtctcggtactggccgacctgccgttcgtggaggaggccagccggggactgtcggaactgaagctgctgtgcctggcagtggtcttcgtctatgccttcttcaccttcagctggtgcatgcgccagtacaacttcgcggcgatcctggtcggctcggcaccgatgatcggcgagcgcaacgtcggcgagctggagcgcaaatcctttgccgagcgtgccgcccgggtcatctcgctggcggccaaccagttcaacttcggcttgcgctcgtactatttcggcctggccatgctcgcctggttcatcaactcctggttcttcatgctggtgacggccggcgtggtgctggtcctgtatcgccgcgagttccattcggacgtgctggaggtgatggtctacaccgagaccgcaatcgccgaaagcccgcgggaaggcgagggcgaggtgcccagaggctga

SEQ ID NO: 361962 - DNA, 237 bp, Pseudomonas aeruginosa; identical to SEQ ID NO: 319780

SEQ ID NO: 361963 - DNA, 474 bp, Pseudomonas aeruginosa
atgtcggaaaatcctctcctcgagcgcgcccggcgctttctctcggccttgcgtcattgccaggtgctggggttgacggtcgaggccgccgacgagaaaggactgaccctgcgcctgccctacagccaggcgatcatcggcaacccggaaagcggggtcgtccacggcggcgcgatcaccaccctgatggacaccacctgcggtatttccacggtctgcgtgctgccggacttcgagatctgcccgacgctcgacctgcgcatcgactatatgcatcccgccgaaccgcacaaggatgtctatggcttcgccgagtgctaccgggtcacgccgaacgtgatcttcacccgcggcttcgcctaccaggacgatccgggccagcccatcgcccatgtcgtcggcgccttcatgcgcatgggcggttcggctcgctccggggcggccaggccggccgcgcagggaggtgcggcatga

SEQ ID NO: 361964 - DNA, 447 bp, Pseudomonas aeruginosa; identical to SEQ ID NO: 353187

SEQ ID NO: 361965 - DNA, 1230 bp, Pseudomonas aeruginosa
atggatgccttgctgattctgggcggcctgctgctgatggtcgccggctatatctgggtcatcgtcctggccttcggtaccggtctgctgtggggttacggcagccttttcccgccggtggcgctggcctatatcggcgtgcactggcgtacggcgcgcaagggcgtcgggctggccgcgctgggttgcatcccgctggtggtcggcctggcgctgctggccagtcacgacgctgcgcgactggaggcgatcctcagcctgcgctggctgaagccggaggccaggccgccggcggaactggccatcgcgctcagcggggagttcaacggcaagcctttcgcgccgcagagcggcgagttgatcggcggcgtgctgagcctgcgccaggggcacgatttctacgcccagcgcgagctgcagatccgccttccggcacagccgctcggggcgctgcgcctggacgtgctgcccgaggacggcggcgcgttgccagaagtcgagctgagctggctgcaaccggagcaggacctgcccgaggcgcgtcgtctcctgcgtggctataccttgcacctggacctgcggcccaaggcgccgaaccgcctggagggcgagttccacctgagcctgccgagcgactaccggaccaccctcagcggccacgtcgagctatataccgaccggctgcgctatcggcacggcaaggtcgacctgggctacgactccgacgataccctggccctggtcttgcgcgactatctgcagcggcgcttcgccagccgcgacgtcagcctcgtgcgggcgccgtcctggcgcgcggccagccatgcgcggccgctgcgtatcgaggccctggtggccggccagactcaggtgctggagctgacgctggagaagaacgcccggcgggagtggacggtgcgcggcgacgcgttccccgccttgccggcggagcctgcgaccgtggccgcggcggcgccgcccgagccgcaggcgctgccggcgccgggcaacgccaccctcgacctggagctggtccaggtcgaaccgcagcgctacagccagcgcctggtcaaggccactacggtacgcgggcgtatcgccgagggccgtttcaccggcctcgacagcgaggggcgcctggtgatccgccgggaaatgcccggtgcgggggaggcgagctacctgttgcacccggcggagatcgcccgtctcgaactgctcgaacgctag

SEQ ID NO: 361966 - DNA, 1905 bp, Pseudomonas aeruginosa
atgagcgtggaaacccaaaaagagacactgggctttcagactgaagtgaagcaactgcttcacctgatgattcattctctctattcgaacaaggaaatcttcctccgcgaactgatttccaacgcctcggacgccgccgacaagctgcgtttcgaagccctggccaatcccgagctgctcgagggcggcgccgagctgaagatccgcgtcagcttcgacaaggaagccaacaccgtcaccctggaagacaacggcatcggcatgagccgcgaggatgtggtgactcacctgggcaccatcgccaagtccgggaccgccgacttcctgaagaacttgtctggcgaccagaagaaggattcgcacctgatcggccagttcggcgtcggtttctacagcgccttcatcgtcgccgacaaggtcgatgtctactcccgtcgcgccggccagccggccagcgaaggcgtgcactggtcgtcgaagggcgagggcgagttcgacgtcgccaccatcgacaagcccgagcgcggcacccgcatcgtcctccacctgaaaaagggcgaggaggagttcgccgatggctggcgcctgcgcaacgtgatcaagaaatactccgatcacatcgctttgccgatcgagctacccaaggaattccacggcgaagaggccgacaagccggccgagccggaatgggaaacggtcaaccgcgccagcgcgctgtggacccgtccgcgcgccgaggtgaaggacgaggaataccaggagttctacaagcacgtcgcccatgacttcgagaacccgctgagctggagccacaacaaggtcgaaggcaagctggaatacacctcgctgctctacgtgccgggccgcgcgccgttcgacctgtaccatcgcgaggcgccacgaggcctgaagctgtacgtacagcgcgtgttcatcatggaccaggccgacgagttcctgccgctgtacctgcgcttcatcaagggtgtggtcgactccaacgacctgtcgctgaacgtctcccgggaaatcctgcagaaggatccggtgatcgactcgatgaagtcggcgttgaccaagcgcgtgctggacatgctggagaaactggcgaagaacgagccggagcagtacaagaccttctggaagaacttcggccaggtcctcaaggaaggcccggcggaagacttcggcaacaaggagaagatcgccggcctgctgcgcttcgcctccaccggcgacgattcgggcgagcagagcgtagcgctggccgactacatcggtcggatgaaggaaggccaggacaagatctactacctcaccggcgagagctactcgcaggtgaagaacagcccgcacctggaagtcttccgcaagaagggcatcgaggtgctgctgctcaccgatcgcatcgacgagtggctgatgagctacctgccggagttcgacggcaagcagttcgtcgatgtcgcccgcggcgacctggacctgggcagcctggactcggaagaggacaagaaggcccaggaagaagtcgccaagagcaaggaaggcctgatcgagcgcctgaagaaggtgctcgacgagcaggtcagcgaagtccgcgtctcccaccgcctgaccgattcgccggcgatcctcgccatcggcgaacaggaccttggcctgcagatgcgccagatcctcgaggccagtgggcagaaagtgccggactcgaagccgatcttcgagatcaacccgcagcatccgctgatcgagaagctggatgcggagccggacgaggaccgctttggcgagctgtcgcatattctcttcgaccaggccgccctggccgcgggggacagcctcaaggatccgggcgcctacgtacgccgactgaacaagctgctggtggagctgtccgcttaa

SEQ ID NO: 361967 - DNA, 726 bp, Pseudomonas aeruginosa
atgagtgagattcgtgtagagccggtcgcctacgacatcgatgggcagccgtacgaaggtcaactggtgtacgacgccagccacgcgggaccgcgcccgggcctgctgatggcgccgaactggatgggcgtgagcgccgccgcgctggacatcgcccggcaggtcgccggccgtgggcacgtggtgctggtcgcggacctctacggcagggacgtgcgtccgcagaacggcgacgaggcgggcgcggcgatgatgccgctgaagaacgaccgggccctgctgcgcaagcgcatgcaggcagcgctggcggccttgcgcggacaggcgctcgcggctgtcgatacgacccgccaggccgccttcggtttctgcttcggcggttgctgcgcgctggagctggctcgcgacggcgccgagctgaaggccttcgtgtccttccatggcaccctggatacgccggacccggcgcatgccaggaatatcaagggcgcggtactggtcctcgacggcgcctccgatccgctggtgccgcgcgagcagttgccggccttcgccagggagatgaccgatgccggcgtcgactggcagctcaccagctacggcggcgcggtgcattccttcaccgatccgaacgccaaggtgccgggcaagatgcactatgacgccaggacctcccggcgtgccttccaggcgatggacgacctgctggcggaagtcttcgcctga

SEQ ID NO: 361968 - DNA, 822 bp, Pseudomonas aeruginosa
atgagcagtcatcgcccgcaacatcgcctgtccgttcccgatatccagcgccgcaagggtgccggcagcctggtggcgctgaccgcctacagcacgcccatggcccgcctcctcgatccgcacgccgacctgctgctggtcggcgattcgctgggcatggtgctctatggcatgcccagtaccctgggagtgagcctggagatgatggtcgcccacaccctggcggtgatgcgcggcagccggcgcgcctgcgtggtggccgacttgccgttcgccagctaccaggaatcgccccgacaggcgttccgcaacgccgcacgcctgctggccgacagcggcgcccaggcggtgaagctggaaggcggtgaggaaatggaagaaaccgtggacttcctggtacgccgtggcataccggtgctcgcccatatcggcctgatgccgcagcaggtcaacgccatgggcggcttcaaggcccaggggcgtgacccggaaagcgccgaacgggtacgccgcgacggcctcgccatgcagcgcggcggcgccttcgcggtggtcatcgaaggcgtaggcgagccgctggcccgtcgccttagcgaagaactggcgatcccctgcatcggtatcggcgcctcgccggcctgcgacggccaggtactggtcagcgaggacctgctcgggctaagcggcgaacaggtaccgcgcttcgtcgaacgctacgcgcgcctcgaccgggaaatcgacgaggcggcccggcgcttcgccgaggacgtgcgcgaacggcgcttccccgaggccaggcattgcttcgccatgcgcgagtga

SEQ ID NO: 361969 - DNA, 1302 bp, Pseudomonas aeruginosa
atgaagaaggcaacacgcatcggcctctgggcctccggcagcctcgtcgcgctcgccgccatcgccctcggctacgcctggcaaccggccatcgcgccactggaaggcacacccggtcccttcagcgccgagcagatcgcccgcggcgaacgcctcgccgccctcggcgactgcgcggtctgccacactcgcgaaggcggcccgcgcaacgccggcggacgggccttgccgacgccgttcgggacgatctacagcagcaacctcacgccggatcgcgcgagcggcatcggtggctggtcctaccccgccttcgagcgggccatgcggcatggcgtagcccgcgacggcagctatctgtatccggcgttcccttacaccgccttcaccaggactcgcggcgaagacctgaaggccctgtacgcctacctgatgagccagccggcggtgcacagcgaaacgcctgccaaccagttgccgttccccttcgaccaacgccagctgatggccggctggaacctgctgttcctggagcccggcgcctaccgcgacgagccgacgcgcaaccagcaatggaaccgcggcgcctatctcgccgaaggcctcggccattgcagcgcctgccactcgccgcgcaatgcgctcggcgcggaaaagtccggtagcgcgcacttcgccggcggcgaggcggagggctggaccgcgccagccttgaacgccagttcgccggcgcccatcgcctggagcgaggaggccctctacgcctacctccgccacggctattcggcctaccacggggtcgccagcgggccgatggcgccagtggtcggcgaaggcctggccaagcagtcggacgaggacctgcgggccctggcccattaccttgcgtcctacgccgctgccccggccggggaaaccgatcagcaacaggcgcaacgcctcgaccggcagggctacggccgcgtgcaaccgcccagcggcagcggcgcgcgcctgttcgccggggcctgcctggcctgccaccatgacggcgacggaccgcgcttcttcggcgtgcgtccatccctggcgctgaacagcaatgtgcatgcggacagcccggacaacctgctgcggatcatcctcgacggcatccacagcccggccaccggcgacctcggctatatgcccggcttccgccatagcctcgacgaccggcaagtcgccgccctggccaactacctgcgcgagcgtttcgccggcaagcccgcctggccggacctcgcggccaaggcggcaagcctgcgccgacaggcggcgccctga

SEQ ID NO: 361970 - DNA, 2247 bp, Pseudomonas aeruginosa
atgagcctggccaatccctcgcgacgcggcttcctcaaggccggcggcctgctgctggtcaccgtcaacctgcccgccccgctactcgccctcgccgagcagggcgccaccgacctgccgctggaccaggtcgactcgttcatcgccatcgccgcggacggcaaggtcaccgccttctgcggtcacgtcgaccttggtaccggcatccgcacggcactggcgcagatcgtcgccgaagagttggacgtcgcgttcgagcaggtcgagatgatcctcggcgacacccgtcgcacaccggaccaggggccgaccatcgccagcgccagcatccaggtcagcgccgtgccgctgcgccaggccgccgccgaagcccggcgcttcctcctgcgtcaggccggaagccatttcccggtgcatccggacagcctgcgcagcgaaaacggccaggtcttcgccgccgccaatccgcagcgacggatcggctacggcgagttgctgcgaggccagcgcttcaacctgaacatcgacggcaaggcgccgctcaagccgcgcagcgagtaccgtctggtcggcaagccggtgcgtcgggtggacatcccggcgaagctgaccggtcaactgacctatgtccacgacatgcgcttgcccggcatgctgcatgggcgagtggtacgcccgccctataccggcgcggatgtcagcgccccgctcggcagcggcctgctggcggtggacgaaagctcggtcgccgggctgccggggctggtcaaggtggtcgtgatcggcgacttcgtcggcgtggtctgcgaacgcgaggagcaggcgatccgcgccgcgcgccagctcaaggtgcgctggaaggactggcagggcctgccgccgctggaacccgaccggctcgaggacacgcttcgccggcatccgaagaagccacgcacgctgcacgactcacccggtctcgagcagcacctcgcgggcatcgcccggccgctgtcggccacctatgtctggccctaccagttgcacgcctccatcggcccttcctgcgccctcgccgaggtcgatgcgcagcgcgctcgcgtctggtccggcacgcagaacccgcacgacctgcgcaacgacctggccaggctgctgcagcgcgagaccggggacatcgaggtgatccgcatggaagccgccggctgctacggacgcaacggcgccgacgacgtcagcgccgacgccgtgctcctggcgcagacggtgggccggccggtgcgggtacaactgatgcgcgaacaggaacatggctgggaaccgaaaggcaccgcgcaactgatcgaggtccgcggcggtctcgacgagcaaggccgggtggcggcctacgacttcgccacctgctacccctccaacggtgcgccgaccctggccctgctcctcaccaggcggatcccggccaccccgcaggtggccgacatgggcgaccgcaccgcgatcccgcaataccgctacccgcggatgcgggtggtggccaacgacgccgtccccatcgtccgcgcgtcctggatgcgcggcgtctcggcgctgccgaacgtgttcgcccatgagtcctacgccgacgaactggcgcacctggccggcatcgaccccatcgccttccgccgccgctacctggacgaccagcgcgccctggcgctgatcgacgccctggtcgcccgcgccggctggcagccacgcacctcccccaacccagaggcgcgccgggacggcgtgctgaagggacgcggcttcgcctatgcgcgctacttccacagcaagtttcccggtttcggcgccgcctgggccgcctggatcgtcgacgtcgaggtgaacccggagaacggcgcggtgcgcgtcgccaaggtctgggtcgcccatgactgcgggcagatggtcaatcccgatggggtcaggcaccaggtccacggcaacgtcatccagtccaccagccgggtactcaaggagttcgccaccttcgaccgccgcggcgtcaccagcctggaatggggcggctacccgatcctcggcttccccgaactgccggagatcgacgtgctgctgctcgaccgccccgagcagccaccgatgggcgctggcgagtcagcctcggtgcccagcgccgcggccatcgccaatgcgatcttcgacgctaccggagcgcgcctgcgacaggtgccgttcactccggaacgcgtactcgcggcgctgcgcagcgcgcaggcctga

SEQ ID NO: 361971 - DNA, 423 bp, Pseudomonas aeruginosa
atgtcccgtaccaccccgtaccgcctcgacgaccagatcggcttcatcctgcgccaggccaaccagcgctatgcagcgttgttcgccaatggcatcggcaacggcctgacacccacccagtgggccgccctggtccgcctcggcgagaccggaccctgcccgcagaaccagctcggccggctcaccgccatggacgccgcgaccatcaagggcgtcgtcgagcgcctggacaaacggggactgatccagcgcagcgccgatccggacgacggccggcgcctgctggtcagcctcagtcctgccggacgcgccgaactcgaggccggcctggcggccgcccgcgagatcaaccggcaggccttggctcccctctccccgcaagaacaggaaaccctgcgcgggttgctcgctcgcctgacctga

SEQ ID NO: 361972 - DNA, 783 bp, Pseudomonas aeruginosa
gtgatctatccgcgccattccgaagggcgcaaccccgaaccctacgtcgtcgagctgctgcaactggcgctggccaggagcggcggcgactaccgcctggagcccagcgcgcagcccatgccgcagtcccgtgcgcaactgcgcctggagcaggacgatccgggcctgcaggtgatgtgggcgcagtcccgcgacgacctggaagagaccctgctgccgatccgcattccgatctatcgcggcctgatcggctggcgcattcccctggtcagcgccgccaacaaggacctcctggcctcggtgcggaccctcgacgatctccgccgcctgcgcttcggccagcgccaggactgggccgacacaccgatcctgcgcgccaacggcctggaggtgaagaccagccagagctacgagagcctgttccgcatgctcgatgccggccgcttcgaggtcttcccccgcgaggtcgtagtgatcgacggagaactggaggacgcctcccgcgccgggctgcacctggcgatcgaccagcacctggccctgcactaccccgcggccttctatttcttcgtttcgcgtcaacgcccggaactggccgaggccattcgccagggcctggagaaggcgattgccgacggtagcttcgaacggctgttcgagcgacatttcaagacgcggctggaaaagcttgcccttcggcagcggagaataatcgagctgaaaaacccctatcttccaggaaaaactccttttcagcgcgaggcactctggtaccggccgtga

SEQ ID NO: 361973 - DNA, 1035 bp, Pseudomonas aeruginosa
atggctggcccccgtacgcgtgccctgttttcgacattgttcgccctgtccctggtgacatccttgacccatgccagggattatcgctacagcgacgctcacgtgcactacgtggatttcttccaggaaagcgaaggcatgccgcgcctgctggaggcgatggacaaaggccgggtcgaccatgtgatgctcagcggcgtcgcggtcgccaagaaatggcacgaggacgagccgaagcggccgcgctactacgctggcgacgatgccggagcctattggtacagcgccaccgacgtgatcgtggcggcggcggtgaaatccctgccagccgagcagcggcggcgcgtgcatccgttcctgaccggtttcaacccgaccgacaagaacgccgacgcgcacatccgtcgcatgctggagctggacccgggactctggcagggcatcggcgagatctttacccggcacgacgacctcaccgcgctgacctacggcgacgtgccgagggccaacaatgaggcgctggcgcgggtctatcacctggccgccgaattcgacctgccggtgttgctgcacgccaacgtcacttccaagcgcgaacgtaacccgctgtacctggcggaaatcgaggagcccctgcgcaatcacccgcatgtgcggttcatctgggcccatgccgggaccagcatggagatccatcgccaccagaagaaactggacttcctcctgccgacccttgggcgtctgctgcagcgttacccgaacctctacatcgacctgtcctggtcggtgttgcgcccgtacctgctggacgagcagggcaagcccgacccgcagtggctggcactggtcgagcggtttccgcaacgcttcatgctcggttccgatgtggtcggccagttcgacagcctgcccgagttgatggcgagcttcgatccgttcctcgacgccttgcccgagcaggtcgctcgccaggtggcgcgggacaacttcctggcggtgctgccgcgccagcccgccgatccgcgaggcgaataa

SEQ ID NO: 361974 - DNA, 477 bp, Pseudomonas aeruginosa
atgtccttcatccgttcttgcatcagtcgttccgtcttcctgctcggcgccggcgtcgccgtggcggcgcaggccgaggtgcgtatcgacggccccatcgaatatggcgtgttcgaaagccgctaccaggatttccagcccggcgaacgggtattgacccgtagcgagcagaacatccagcagaccaccgaagtcccggccaagctcggcaccaagttcggcatgcgttatcaactcagcggcaagcaggaaggcgatacgcctttgacgctgctctacctcaccccgggcgtggtcactccggatggccagcggcatgacaagttcgaagtggtgcagaagctggtgccgggcgcgccgaccgatgtcatggcctacgaattcaccgagccgcacgaagtggtgaagggcgaatggcggttgatggtgttccagggcgatcgcctgctggcgtcgaaatccttcgacgtgcgctga

SEQ ID NO: 361975 - DNA, 441 bp, Pseudomonas aeruginosa; identical to SEQ ID NO: 319795

SEQ ID NO: 361976 - DNA, 1626 bp, Pseudomonas aeruginosa
atgtctttgcgcagtatgcccatcgcgacccgtgccgccctgagtttcgccctgatcaccgctctgctggtcatcaccggcatcttttccctgaaccgaatgggttcgctcaacgaagcctcttcggacatcagcgacaactggctgcctagcgtccgcgaaagcgccgagttgaacgttctgctcgccgaactgcggcaggtgcaactggcccatgtgctggcggcggacgacagcagcaaacgcttcctggaaagccgcatgacggaaatcggcaaggaactgaccgatcgcgagggcgcctaccaacggctgatcagtggtgccgacgagcgctcgatctacgagcgctacctggctacccggcagacgctcctgcaaagccagcagaccctggtgcagatgtcgcgcagcaagccgctggaagagacccgccagtacaccgaaagcaccttgctcgaccagtaccgcgccacccagcagcaactgcaggcgctgatcgacttcaacgtcaagggcgccagccaggccagccacacggccgatgaggtctatcacagcgccttcgccgcagtgatcggcgtactgctggtcgccggcctcgctaccgtggtactggcttggctgttcacccgcagcatcacccaaccgatcggcgaggcgctgcgagtggccgaggtgatcgcttccggcgacctcaccagccgcatcgacacctctggccgcgacgaaccggccaagttgctggtcgccctccagggcatgcaggcacaactgcgccagaccatccagcagatcggcagctcggcgacccaactggcctccgccgcggaggaactcagcgccgtcaccgagcagggcaaccgctcgctgacccagcagaacgacgaaatccagatggccgccaccgcggtcaacgagatgaccgccgccgtcgaggaagtggcgcgcaacgccagctccacctcggacgcctcgtccgcctccgagcaatcggcgcagaacggacgccagcgggtactggagacggtccaggcgatccgcctgatgagcgaagaagtggacaatacctcggcgctggtcggcggcctggcggaaaaggcccaggacatttccaaggtcctcgacgtgatccgcggtatcgccgaacagaccaatctcctggcgctcaacgcggccatcgaggcggctcgcgccggcgagcagggccgcggtttcgccgtggtcgccgacgaggttcgcgccctcgcccatcgcacccaggaatccacccgcgagatcgagcagatgatcgccaacatccaggaaggcaccggcgccgcggtcggcgccatggacagcagcagcgtacgcgcccgcaacatgctggagatcgccgaagccgccggcctggcgctgaacgagatcgcggagcgggtcggccagatcaacgagcgtaccctggtgatcgccagcgcctccgagcagcaggcccaggtggcccgcgaggtcgaccgcaacctggtgaacatccgcgacatctcgctgcagacgtccgccggctccaaccagaccgccgccgccagccaggaactgtcgcaactggccatcgacctgaacaacatggtcacccgcttcgtcgtctga

SEQ ID NO: 361977 - DNA, 1218 bp, Pseudomonas aeruginosa
atgcgtcgcgtcgttatcaccggtctgggcatcgtttcctgcctcggcaatgacaaagacaccgtttccgccaacctccgtgcgggtcggcccggcattcgcttcaatccgtcctacgccgagatgggcctgcgcagccacgtttccggttcggtcgacctgaacctcgaagagctgatcgatcgcaaggtcttccgcttcatgggcgatgccgccgcttacgcctacctggcgatggagcaggcgatcaaggactccggcctgactccggaacagatttccaacccccgcaccggcctgatcgccggctccggcggcgcttccaccctgaaccagatggaagccatcgacaccctgcgcgagaaaggcgtcaaacgcatcggcccataccgcgtgacccgcaccatgggcagcaccgtatcggcctgcctggccacgccgttccagatcaagggcgtcaactactcgatctcctccgcctgcgccaccagcgcgcattgcatcggccaggccatggaacagatccagttgggcaagcaggacgtggtcttcgccggcggcggcgaagaggaacactggagccagagctgcctgttcgacgccatgggcgccctctccacccagtacaacgagacgccggaaaaggcctcccgcgcctacgacgccaagcgtgacggcttcgtcatcgccggcggcggcggcatggtggtggtcgaggagctggagcatgcgctcaagcgcggcgccaagatctacgccgagatcgtcggctacggcgccacctccgacggctacgacatggtcgccccgagcggcgaaggcgcgatccgctgcatgcagcaggcgctggccaccgtcgacgcgccgatcgactacctgaacacccacggcacctccaccccggtcggcgacgtcgccgagatccgaggcgtgcgcgaagtgttcggcgacaaggcgccggccatcagctcgacgaagagcctgtccggccactcgctgggcgccgccggcgtacacgaggcgatctattgcctgctgatgatggaaggcggcttcatcgccggctccgccaacatcgacgaactcgacccggaagtggccgacctgccgattctccgcgagacccgcgagaacgccaagctcgataccgtcatgagcaacagcttcggcttcggcggcaccaacgccaccctggtcctcaagcgctggcagggttga

SEQ ID NO: 361978 - DNA, 516 bp, Pseudomonas aeruginosa; identical to SEQ ID NO: 353202

SEQ ID NO: 361979 - DNA, 1956 bp, Pseudomonas aeruginosa
atgagccagcgccacggctgggacatccgtacccgcatgctggcgattagcctgggcccggcgctgctgctgaccctgttgctcaccgcctacttcacctactcgcgcctgcaggacctgcgccaggaactgacccataccggccagttgatcgccgaccagttggcgccggccgccgaatacggcgtgatcgccggcaacacgcccgtgctgcagaagctgctgcaggccaccctcgacaccccgcatgtgcgcttcatcgaggtacgcgaccgcaacgacaatatcctggtgtacgtcgaacagttgtccggcgcgttgcagaacgccgcgccgatcgacatcttccactccaccatccagcgccagcgcatcgccctggccagcgacccgctgctggacggcgccagcgaaggcgacggccagtccggcgaggactacctcggccgggtggtggtcggcatgtccaacgacgccttcagccagcggcaacaggaaatcctcctgaaggccgccctgctggccgccttcgccctgatcctcaccttcctcgtcgcgcgccgcctggcgcagcgcctgtcggcgccgatcagtaccatgggccaggcggtcgaggcgatccagagcggcgactacaagaccagcctgccgatcctcgacgacggcgagatcggcgacctggcccgtcacatcaacaatctcgccagcgggctggaccgcgcgagccgggaacaggaacaggcgatcggccaattgatcagcgcccgcgaggaagcggagcaggcgaaccgggcgaagtccgacttcctggcgatgatgagccacgagcttcgcaccccgatgaacggcgtgctgggcatgctgcaactgctggaaaccaccgagcagacccgcgaacaggccgagtacacggcgctggccaccgagtccaccgaacacctgctgaaggtcatcaacgacattctcgatttctcaaggatcgaacgcggcgcgctggaactggagtgcattcccttcaacctgctggaactggtgcaaggctccgccctggtgttccagcacagcgcccagcaacgcggactggcgctggaattgcagatccaggccggcctggagaatatcgaggtctgcggcgatccgacgcgtatccgacagatcctggtgaatctgctgggtaatgcgctgaaattcaccgaggaaggcgccatccatctcagcctggagtggcaggcgctcgatcacgacgtactgtggctgacctgcgcggtgcacgacagcggcatcggcatctcgccggaacgcctggaacatatgttcgacgccttccagcaggcggattcgtcgatttcccggcgctacggcggcaccgggctcggcctggcgatcgccaggaccctggcggaacggatgggcggcaccctgcaggcagagagcaaggaaggctcgggatcgaccttcaccctggagattccgctgcccttccagcagtcgccggcgcaccggcagcaggccgctggcgacgccgccccgattgccgccggtcaggaaatcctcctggtcgaggacaatccggtgaaccagacagtcatagaagccatgttgcgcagcctcggctatcgcgtcaccctggtcgccgacggtatccaggcggtacgcagcgccgagcgccagcgctacgacgcgatcctgatggactgccgcctgccggtgctcgacggctactcggcgacacgggaaatcagggcccaggagaacggccggcgggtaccgatcatcgccctgaccgccaacgccctgcagggcgatcgggagaactgcctgcaggcgggaatgaacgattacctggccaagccattcaaacgggcggaattgcaacgcatactgcaacgctggatcggctcgcagccggaacgccccgtgacgtcgaacgaaaccggacgaggggagccggaatga

SEQ ID NO: 361980 - DNA, 930 bp, Pseudomonas aeruginosa
atgcgtcgcttgcgccccgcccgtcgggctttccaggcgctgctcgcgctggtcgtctgctgtctcgcgcatgtcggcgaggccgcgcaactggtcctggtcagcgccaaccagggggccgcggtgaacgcctttcgcgacgccctgtcgcagcgacggccgcaggaccaggtggaactgcgcacgcccgcggccctggcggaggggatggtcttcaccgacgacacccgcctgctcctgctcggccccgaggccctggcctggcgcctgcgccagcaccgggcgccaccgaccctggcgctgctgctcaaccgggtcgatggccagcgcctgctgccaggcgccaacgggcatggcggacacggcgtcggagggctctgcgtactctggagcgacccgccggcggcccgccagctccgcctggcgcgcctgatcctgccgggcatccagcgcatcggcgtgctctacggcaaggacagcgaattcctcctcgacgagcttcgccgcgaggcccgcagccaggggctcgagctgttcgtcgccagcagcagcggcaacgacgacccgcgcccgctgcagttcctgctcggcaatagtgacctgctgctcggcatcgacgacaaacagctgtacaactcgcagagcatcaagagcctgctgctcggcagctacgccaagaaccgcgcgctgctcggacccaccgcagccttcgtcaaggccggcagcctggcgagcagctacagcgaccaggaggactggctggacaccctcgacgaactgctcggccaggcgcccaggcactggcccctcagcctctatccagggcatttcaaggtgctcggcaatcggcaggtagcccgttccctgggtatcgacctggccagcgacgccgacctcggccggcgcctcgccgaaggagaagaaccatga

SEQ ID NO: 361981 - DNA, 2118 bp, Pseudomonas aeruginosa
gtgcccatcgcttcgcgtgctcccgtctccctgaccctgctggccctgctggccctgctgttcggcagcaagctcgcggccgccgacctgttcaacgatcccagcggcgttcccgaagtattgaccgcgacacgcctgaaacaatccccggcggaagttcccggcagcatcagcgtgctcgaccgcgagctgatcgtcgccagcggcgcccgcgacattcccgaactgatgcgcctggtcccgggcatgatggtcggctacctgtccggcaaccagcccacggtcaactaccacggcaccagcatgtcgggggcgcggcgcctgcaagtactgatcgacggtcgctcggtgtaccgcccgggcctcgccagcgtcgactggagcgacctgccgctggccctcgaggatgtcgagcggatcgaagtgttccgcggtccgaataccgtcagctacggcgccaacgcattgatgggggtgatcaacatcatcacccgggcccccggcgagtcgcccggcacgcgcctgaaatacaccgcaggccagcgcggcatccgcgactggtacgccagccagagcatcgccctggaagacagcgacttccgcctgtcgctgtccggccaggaagacgacggcttcgaccacgacctcgacggtcacgccctgcgcgacggccgccggctcagccgcttcaacctcaacgccagccacagcctggcgccgaaccagagcctggagtggcaactggcggccaaggaaggctcgaaccagcacccctacgcctaccgctcgccgtttccccaggttcccgacgacgtcgacaactccgatacgctcgcccacgactatgccggttcgctgcgctggaacgtcgacctcgacccacgccacagcttctatatacaaggctacgcgcagcactgggagcgccggcaggaatggaacgcctgcgaggcgggcatcgccttcagcccgcaactggcgcaactctgggaactgaacccggactacctgcgcaggttcgccgacgaccctacccggctgccgcccggcagcgcccaggagctgcaactggcgacccaggtcctcgaccagctacgcaacggcggactgcgcccggtctgcggacgggtcgaccgcaacatccgggaaagccgctacgacctggagatgcaggacaccctcagcctgggcgacaacctgcgcctgctgaacggcctgagctaccgctacgaccaggcaaactccgagaccttctacggcggcagggtcagcagccagatctggcggctgttcagccagttggagtggcatgccggcgaacactggctgctgcagggcggcgggatgctcgaagacgtcgagggctccggcagctcgttcagcccgcggctggcggtgaactacctgttcaacccccagcacagtctgcgcgcggtctattcggaggcggtgcggtcgccgggcatgtacgaaaacgacgtcgactggcgctaccgggtccgccacctgacaccggcgccctacgggcagagcgaagcctactacttcgccagcgcccacggccccggcgacctgggcaaggaacacacccgttcgcgcgagatcggctacaacggttttttccgcgagaccgggctggccatggatgtgcgcctgttccacgaggaaatcaccggactgatcagcgatccgctcagcgtcgtcgacttcagcccggacaacggcgatcgcatccgcttctccggcgcggaaggccagctcgactggcgcctgggcctgcgcgaccgcctgcgcgccacctacgcctatctcgactacgacgccaccagtcgctacgaccggcgcctgaccgcccgccacggcggctcggccggctggatgcgcgactggggccaaggctggtccagcgccctcttctattacggcgacgattcgctcaatggacatcgtttcgaacgcgtcgacctgcgcctggccaagcgcattcccctgggcaaggccgccctggaattggccggcgtgctccaacagcgtctcgacgaccaaccgctgacttttcccgacaaccgctacgacagccgccacctgctctacttcagcgccgaggtgacgttctag

SEQ ID NO: 361982 - DNA, 1023 bp, Pseudomonas aeruginosa
atgacagagcagcaaccgattgccgtgctcggcggcggcagtttcggcaccgccatcgccaacctgctggccgagaacggccaggcggtccgccagtggatgcgcgacccggaacaggccgaggcgatccgcacacgacgcgagaacccgcgctacctgaaaggggtcaaggtgcatcccggagtcgacccggtcaccgacctggagcgcaccctggccgattgccaactgatcttcgtcgccttgccctccagcgccctgcgcaaggtgctgcaaccacaccaggcggcattgacggacaagctgctggtgagcctgaccaagggcatcgaggcgcacaccttcaagctgatgagtgagatcctcgaggaaatcgccccgcaagcccgcatcggggtgatttccggcccgaacctggcgcgcgagatcgcagagcacgagctgaccgccacggtggtcgccagcgaggacgacgagctgtgcgcccgcgtccaggcggccctgcacggccgcaccttccgcgtctacgccagccgcgaccgcttcggcgtggaactcggcggtgcgctgaagaacgtctacgcgatcatggccggcctggccgcggcgatggacatgggcgagaacacccgcagcatgctgatcacccgcgcgctggcggaaatgacccggttcgccgtcaagctcggtgccaacccgatgacctttctcggcctcgccggcgtcggcgacctgatcgtcacctgttcctcgccgaagagccgcaactaccaggtcggccacgccctcggcgaggggctcagcctggaggaggcggtatcgcgcatgggcgagaccgcggagggtgtgaacactctcaaggtactcaaggaaaagtccgacgagatgcaggtgtacatgccgctggtcgccggtctccatgcgatcctcttcgaaggccgcaccctggcgcaggtcatccagctgctgatgcgcggcgagccgaagaccgacgtcgatttcattcccaccaccggcttctga

SEQ ID NO: 361983 - DNA, 465 bp, Pseudomonas aeruginosa
gtgaagctctggctgttgcgccacggcgaggccgaaccgcacgccagccgggactccgagcggcgcctgaccgcccatggacgcaaggaagtgctgcagagcgccgcgcggctggccgggttgccgctggacgggattctcgccagcccctacgtgcgcgcccagcagaccgccgagctggtgcgcgaggcactgggcctggtcgagccggtcggcaccgccccctggttgacccccgacgacgatccgcgcgaggtgctcggtttcctcgacgagcgcagcgagcgcaatctcctgctggtcagccaccagcccctggtcggagcgctgggcggtctgctggtgcatggcaaccggcgtgatccgttgccgatgagcactgcctcgctggccgagctggaaggcgacttcgccgccgccgggctgatgaccctggtctcgctgcatcacccgcggcacggctag

SEQ ID NO: 361984 - DNA, 1668 bp, Pseudomonas aeruginosa
gtggtcactgcaaatcgtctgccgctcgaagtcttcttcgagcgcgaaaagcgtcatccgcaacggcgttacctggtgcagcccatcggtggcggccgggtcgaggagctgagctggggcgaggtgggcgaccaggcgcggcgtgcagccgcctggttgcgcagcctggatctccccgccggcagccgtatcgcgatcatctcgaagaactgtgcgcactggatcgtcactgacctggcgatctggatggccgggcacgtttccgtccccctctatcccaatctcaccgccgagtcggcgcgccaggtgctggagcattccgagtcggcggtggtcttcgtcggcaagctcgacgactggccggcgatggcgcccggagtccccgagggcataccgaccgtggccatgccgttgcacccggaagggcgtttcgaccgccagtggagcgacctgcaggcctgcgcgccgctcgaaggcgacacgccgaccgccgccgagcaactcgccaccctgatctacacctctggaaccaccggcgtgcccaagggggtgatgcacaacttcagcagtttcgccttcgccgccagccgcggcgtggaactgttcggcactcgcgaagacgaccggatgctctcctacctgccgctgtgccacgtggcggagcggatgttcgtcgagatggggtcgctctacgggggaaccacggtgttcttcgccgaaagcctggacaccttcctcgaggacatgaagcgtgcgcggccgaccctgctgttcggcgtgccgcgcatctggaccaagttccagatgggggtgtattcgaagatgccggcgcagaagctcgaccgcctgctgaagctgccgatcctcggccgcatcgtcggtcgcaaggtgctcgccgggctaggcctggacgcggtgcgctacgcgctctgcggcgcggcgccggtacccgaggcgctgctgctctggtatcgccgcctgggcctggacgtgctcgaggtctacgggatgaccgagaacagcggctactcccacgtctgccggcccggccggcagaagaccggctggatcggccagaacagccccggcgtcgaggtacgcatcagcgacgagggcgaggtgcaggtgcgtagcggcgcaaccatggtcggctactacaaggagccggagaagaccgccgaggtgctcacctccgacggtttcctgcgcaccggcgacaagggcgagcaggacgccgacggcaacctgcgcctgaccgggcggatgaaggaaatcttcaagaccagcaagggcaagtacgtggcgccggcgccgatcgagaatcgcctggcggtgcacgatcgcatcgagcaggtctgcgtggtcggcgagggcctcagcgcgccgctggggctctgcgtgctctccgaggtcggtcgccgggaggccctcaacggtacccgcggggcgctggaaagcagcctgcgggcgcacctggaacaggtcaacggtgcgctcgacaagcacgagcgcctggtcggcctggttctggtgcaggaaacctgggcggtggacaacggtttcctcacgccgaccttgaagatcaagcgcaatatggtggaaggtgcctatggctcgcgcttccacgaatgggtggaacgccgcgaggccgtgctctggcacgaatga

SEQ ID NO: 361985 - DNA, 438 bp, Pseudomonas aeruginosa
atgagcctctggcgacaaacgcccgacctggagcaactgaacgcctcgcagaagaacagcatcggcgacctgcttggcatccgcttcgaagccttcgacgacgagtcgctgaccgccagcatgccggtcgactcgcgtacccaccagccgttcggcctgctgcacggcggcgcctcggtggtcctcgcggaaagcctgggctcgatggccagctacctgtgcgtcgacaccagccagtactactgcgtcggcctggaagtgaacgccaaccacctgcgcggcctgcgcagcggccgggtcactgcggtggccagggcgatccacctggggcgtaccacccatgtctgggacatccgcctcagtggcgacgacggcaagccgagctgcatcgcccgcctgaccatggcggtggtgccgctggcgggcagggcgggctga

SEQ ID NO: 361986 - DNA, 642 bp, Pseudomonas aeruginosa
atgcaggaattgtctgtcttgctgaccctggcggcggtgttcgccgtcgccctggtcagccccggtcccgatgtcgccctggtggtgcgcacgtccctgcaccaggggcggcgggccggcctggccagcgcgctggggctggcctgcgggattctcctgcataccaccctggtgctgaccggcgtgtcgctgctgctcagccgtacgcctgtgctgttcgccatcctgcaggcgctcggcgcgctgtacctggcctggctcggcgtcggcgcgctgcgcgcctggctgcggcgcggcgacggccagccgggccggctcgacggggcgctgccgccgtcgcccctggggccctggctgcgtggggtggcgaccaatctgttcaatcccaaggcgctggtgttcttcatcgccttgctcggcagcctgattcctgcgcagatgtcgctcggcggcaagctggcggtggcggcgctgctgttcggcatgggcgcctgctggttcggcctgctcagcctgacccttacccgcccggccctgcaggcccgcctgttgcgcgcggtgccctggctggacgcggcctgcggggtggtgttcctgctggtggcggcggcgatcctcgagcatctcgtccgctctgcctga

SEQ ID NO: 361987 - DNA, 813 bp, Pseudomonas aeruginosa
atgtcgcaatcggttttcttcgcccacgccaacggcttcccgtcggctacctacgccaagctgttcgaggcgttggcgccggagtaccgggtggatcacctggaaatgcacgggcacgacccgcgtttcccggtgaacgacaactgggacaacctggtggacgaactgctgcaccatctcgccagcctggaacagccggtctggggcgtcggccattccctcggcggcgtgctgcactaccacgcggcgctgcgccggccggaactctaccgcggcgtggtgatgctcgattcgccggtgctgaccctcgccgaccgcctggtgatccgtgccgccaagcgcttcggcttcatcgaccggatcactccggccgggcgcaccctggggcgtcgcgaggcgttccccgacctggaagaggcgcgggcctacttctccggcaaggcgctgttccgccgtttcgaccccgattgcctggaggcctacgtacgccacgggctggccgacagcggcggcggttccggcctgcgcctgcgcttcgatccggccaccgagatcagcatctaccgcagcgtgccgcacagcagtccggggcgtgcgcggcagttgcaggtgccgctggcgatggtgcgcgggcggcacagcaaggtggtgttgccgcaccacacccggctgatccgggcgatgccgcgcggcgagttcatgtcgctgcccggcggccacatgttcccgctggagcgcccgcgggaaaccgccgaactgctgaaaggcgtgttcgatcgctggtcgcgggcgaccgaggagcgttcggcatga

SEQ ID NO: 361988 - DNA, 861 bp, Pseudomonas aeruginosa
atgagcctgcaggtcgaggaagtacgcatcagcctgccgcacatcgaactggccgcgcatctgttcggtccgccggacggcaagccggtgatcgccctgcatggctggctggacaacgccatgagcttctcgcgcctggcgccgaagctcgctgggctgcgtatcgtcgccctcgacttcgccggccacgggcattctgcgcatcgtgccgagggtgccagctacctgctctgggactacgcgctggacgtgctgatggtggccgagcaactgggctgggagcggttttccctgttggggcactcgatgggcgccatcgtctcggtgctgctcgccggggccttgcccgagcgcatcgagcggctggcgttgatcgatggcctgattccctacactggcgaagccgacaaggcgccgcagaagctcggcgaagcgctgaaggcgcaactggcgctacgccacaagcgcaagccggtctatgccgagctggaaaaagccgtggaagcgcggatgcgcggggtcggcgagatctcccgggaggccgccgaactgctcgcccagcgcggcctggaaccggtgcccggtggctatacctggcgcaccgacgcgcgcctgaccctaccgtcgccgctgcgcctgacccaggcccacgcgctgaacttcgtgcgcagcgtggaatgcccggtcagcctggtactggccgaacagggcatgctggcggtggagccgcgcatgcgggcgctgctggagaccctgccgttcgagcggcaccacctgccgggcgggcatcacctgcatctggacgatgaggccggggcgcaggcggtggccagagtcttcgcggccttcttcgcgcgctga

SEQ ID NO: 361989 - DNA, 663 bp, Pseudomonas aeruginosa
atgatcgatctctacaccgccgccacgccgaacggccacaaggtttccatcgccctcgaggaaatgggcctgccctacagggtgcacgcgctgtcgttcgacaagaaggagcagaaggctccggaattcctcaggatcaatcccaacggccgcatcccggccatcgtcgaccgcgacaacgacgacttcgccgtcttcgagtcgggcgcgatcctcatctacctcgccgagaagaccgggcaactgatgcccgccgacgtcaagggtcgctcgcgggtgatccagtggctgatgttccagatgggtggggtcggcccgatgcaggggcaggccaacgtgttcttccgttatttcccggagaagttgcagggcgccatcgaccgctaccagcatgagacccggcgcctctacgaagttctcgacggtcgcctgggcgaggccgagtacctcgccggcgactacagcattgccgatatcgccacctatccctgggtgcgcatccacgactggtccggtgtcgccgtcgacgggctggacaacctgcaacgctggatcgccgccatcgaggcgcgtcccgcggtgcagcgcggactgctggtgccgcggcgggagaaggagggcgacgacgccatccgtaccgcccagtcgatgctgacccgttga

SEQ ID NO: 361990 - DNA, 807 bp, Pseudomonas aeruginosa
atgcgagggttcctgttgctatccctgggcgttttcagcttttcggcgctggccgccgaccttcccggcagccatgacctggacgtcctgccgcgcttcccgcgcgccgagatcgtcgacttccgccaggcgccgagcgaggagcggatctacccgctaggggcgatcagccgcatcagcggtcgcctgcgcatggagggcgaggtgcgcgccgaaggcgagctgaccgcgctgacctaccgcttgccgcccgagcacagcagtcaggaggcgttcgccgcggcgcgcactgcgctgctcaaggccgacgccacgccgttgttctggtgcgagcggcgcgactgcggctccagcagcctgctggccaacgccgtgttcggcaatgccaagctgtacggcccggacgagcagcaggcctacctgctggtgcgcctggcggcgccacaggagaacagcctggtggcggtctactcgatcacccgcggcaatcgccgcgcctacctgcaggccgaggaactcaaggccgatgcgccgctgggggaactgctgccgagcccggcgaccctgctgcgcctgctcaaggccaacggcgaactgaccctcagccatgtgccggcggagccggccggctcctggctggagttgctggtgcggaccctgcgcctggataccggtgtgcgggtcgagctgtccggcaagcacgcccaggagtggcgcgacgccctgcgcgggcagggcgtgctgaacagccgcatggagctgggccagtcggaggtcgagggcctgcacctcaactggctgcgttga

SEQ ID NO: 361991 - DNA, 1068 bp, Pseudomonas aeruginosa; identical to SEQ ID NO: 353214

SEQ ID NO: 361992 - DNA, 648 bp, Pseudomonas aeruginosa
gtgaccattcccctcaagcgctccctggtggacatcgccctggagcagatccgccagcgcatcgacgccggccattggccgctcggccaacgcctgccgccggagccggaactcgccgagctgctcggcatgagccgcaacaccgtgcgcgaagcggtgcgcgtgctgaccttctccggcgtgctggaagtccgccagggcgacggcacctacgtgcgcgcctgcgccgatccgctggaaaccatgctggtgctggcgcgcagcgcggtgcagcactccctggaggcacgcgggatgatcgagatcgaggcggcgcgcctggctgccgttcgccgcgacgacagcgacctgagcgcattgcgcgagcatctcgacgcttcgcgccagcgctacggcagcgacgacctgcaggactacatcgagcacgacgtccgcttccaccaacggatggtcgatgccgcccacaatccggtgctcagcgaactctaccgctacttctcgcaggtcatccggacctcgctggaacgcaccatggccgacccacaaagggcccagccctgcttcgagctgcaccagcaactgctcgatgccatagaacgcggagacccggacgctgccgccgcggccaaccgcgcactgctgatctga

SEQ ID NO: 361993 - DNA, 867 bp, Pseudomonas aeruginosa
atgcgcggcaacgacgagcgccggagtccggcggaaggtgccagtacggaagcggaagtgtccgccttcgaagctgtgctgatcgacccgatgcaggagaaagacgaggaactcaaggaccgccagttcgtcaccgcgctggcccgcgggttggaattgctgcgctgtttcacaccacgggaaagcctgctgggcaaccaggaactggcgaagaagaccggcctgccgaagccgacggtgtcgcgtctgacccacaccctgacccggctgggctatctgcgtcacctgccgcatagcggcaagtaccagttggaagtgggcgtgatgtcgttcggctacgcgatgctctcgaacctgtcgattcgcgcgctcgctcgccctttgatggaagagatggccggctacgccaaggccgcggtggccatggcggcccgtgaccggctgagcatggtctacctcgacgtggtgcatggcgaggccaacctgaccatgcgtcgccaggtcggcagccacctctcgctgcaccgcagcgcgatcggtcgggcctgcctggcggcgatgccggaggacgagcgggagttcatcctcgggcacatccgcaagcgccacccggaagactggccggaagtgcgcaaggggctggagcgggccttccgcgactatgccgactacggcttctgcctgtcgctcggcgagtggcaacgcgacgtcaacgcggtgggcgtggccttgcaccacgagagccatgggctgctggcgttcaactgcggcgggccgagtttccacctcaagcgcgagaaactggaggacgacatcggcccgcgcctgctgcacatggtccacaacatcgaggccgccacccgctga

SEQ ID NO: 361994 - DNA, 1155 bp, Pseudomonas aeruginosa
atgattcgtgatccggaaaccctgaacctgctgctggacagcatccgccagttcgtccgcgaaagcctggtgcctcatgagcaggaggtggcggaaaccgaccgcatccccgaggcgatcatcgcccgcatgcgcgagatgggcctgttcggcctgtcgatcccggaggcctacggcggcctcggggtgaccatggaggaagaggtgagcatcgccttcgaactggggcggacctcgccggcgttccgttcgctgctgggcaccaacaatggcatcggctcccagggcatcgtcatcgacggcaccgaagaacagaagcggcgctacctgccgcgcctggcgtcgggcgaactgctcagttcgttctgcctcaccgaaccggactccggttccgacgccgcctcgctgaagaccacggcggtgcgtgacggccagcactacgtgctcaacggtaccaagcgcttcatcaccaacgccccgcaggccggcatctacaccgtgatggcacgcaccgacccggcgatccgtggcgccggcggaatctccgctttcgtcgtcgagcgcggtacgcccgggctgtccctgggcaagccggatcgcaagatgggacagaagggcgcgcatacctgtgacgtgatcttcgacgactgccgggtgcctgccagccagttgatcggcggggtcgagggcgtcggcttcaagaccgcgatgaaggtgctcgacaagggccgcctgcacatcgccgcggtctgcgtgggggtcgccgagcggatgctcgaggatgcgttgcgctatgctctggaacgcaagcagttcggccagccgatcgccgagttccagttgatccaggcaatgctcgccgacagcaaggccgaggcctacgcggcgcgctgcatggtcatcgacgccgcgcggcagcgcgacgaaggccgcgatgtcggtaccgaggcgtcctgcgccaagctgttcgcctcggaaatgtgcggccgcgtcgccgaccgcgcggtgcagatcttcggcggcgccggctatatcggcgactatgggatcgagcgcttctatcgcgacgtgcgactgttccgcatctacgagggcaccacgcagatccagcaactactgatcgcccgcaacatgatccgcgccgcccagggctag

SEQ ID NO: 361995 - DNA, 1695 bp, Pseudomonas aeruginosa
atgaacagccacgagattctcttgatcctggcctttttcgccctggtcctggtgcctgcaccgttcctcgggcgctactgcttcaaggtgatggaaggccaacgcaatctcctcagcgcgccgctggcgccactggagcgcgtctgctatcgcctgttcggcgtcgatccggcgagcgagcaggactggaagacctacaccctggcgctgctggcattcaacctggccggcctggtcctgctgttctcgatcctcatgctgcagggcagcctgccgctgaacccgcagcacctgccgggcctggaatggaccctggcgttcaacaccgcggtcagtttcgtcaccaacaccaactggcaggcctacagcggcgaggcctcgctgagctacttcagccagatggtcggcctcacggtgcagaacttcgtcagcgcggcggtcggcctctgcgtgctggtggccctggcgcgcggcatcagccgccgctccacacgacagctgggcaacttctgggtcgacctgacccgcggcaccctctacgtgctgctgccgctgtgcctgctgctggcgctgctgctggtctggcagggcgtgccgcagaccttcttcgactacgtccatgccaccaccttgcaaggcgccgagcagaccatcccgctcggcccggcggccagccagatcgccatcaagcaactgggcaccaacggcggcggcttcttcggcgtcaactcgactcatccgttcgagaacccgagtgcctggagcaacctgttcgaagtggcctcgatcatcctgatcccggcggcgctggtattcaccttcggccattacgtgaaggacctgcgccagagccgcgcgatcctcggctgcatgctgctgctgttctgcctcggcctgagcctgtcgctgtgggccgaataccagccgaacccggcgctggcgcagttgccggtcgagcagggcgcaccgatggagggcaaggagagtcgcttcggcaccgccgccagcatgctctgggcgatcaccaccaccgccgcctcgaacggctcggtgaacgccatgcacgacagcctgagccccctgggcggcatgctgccgctgctgaacatgatgctcggcgaggtgatcttcggcggcgtcggcgccggcctctacggcatgctgctgttcgtcctgatcgcggtgttcctcgccggcctgatggtcgggcggacgccggagtacctgggcaagaagctcgaggcgaaggaggtccgcctgctggtcttcaccctgctggtgatgcctgtcggcgtgctggtgctcggcgccattgccgccagcctgccgggaccggcctcggcggtgaccaaccccggcccgcacggcttcagccaactgctctacgcctacacctcggggagcgccaacaacggctcggcgtttgccggtttcggtgccaacacgccgttccacaacctgatgatcggcctggccatgctcattggccgcttcggctacatcctgccgatcctcgccatcgccggcagcctggcggcgaagaaggccagcccggtggggccgaacagtttcccgacccatggtccgctgttcgtcagcctgctcaccgtgaccatcctgctggtcggcggcctgaccttcctgccgaccctggccctcggcccgatcgctgaacaactgagcctcggcttctga

SEQ ID NO: 361996 - DNA, 2073 bp, Pseudomonas aeruginosa
atgaacgctcagacccaggcgtccaagaacgccttgcacaaatcgctcgaacgtcgccacaacgcgtccaccagcctcgccgccttgtggcggccggcgctgctgcaagccttcgtcaagctcgacccgcgccagttgctgcgctcgccggtgatgctggtggtcgaactgaccgccgtgctcaccaccttgctgtgcttcatccccgaccaggcggtgccgacctcggtggcgctgcagatcgccctctggctgtggttcaccgtgctcttcgccaacttcgccgaagcgctcgccgaggggcgtggcaaggcccgcgcggacagtctcaaggccggcagccagggcctctccgccaataagcggcgcgccgacggcagtttcgagagcgtcgctgccagcagcctgcgcaagggcgacgtggtacgggtccaggccggcgagatgattcccggcgacggcgaagtcatcgaaggcgtggcggcggtcaacgaggccgccatcaccggcgaatcggcgccggtgatccgcgagtccggcggcgaccgctcggcggtgaccggcaacacccaggtggtgtccgactggctgctggtacggatcggcgccaacccgggcgagtcgaccctggaccggatgatcgccctggtggaaggcgccaagcggcagaagacccccaacgaagtagcgctggacatcctgctgatcggcctgaccctgatcttcctgctggtggtggtgaccctcaagccgttcgccctgttcgccggcggcaacctgccgctggtgttcctggtggcgctgctggtgacgctgatcccgaccaccatcggcggcctgctctcggccatcggcatcgccggtatggaccgcctggtgcgcctgaacgtgatcgccaagtccggtcgcgcggtggaggcggccggcgacgtccacgtgctgctgctcgacaagaccggcaccatcaccttcggcaaccgccgctgcagcgcgctgtacgccgcgccgggggtgagcggcaaggaactggccgagggcgcgttgctggcctcgctggccgatgacacgccggaaggcaagtcgatcgtcgaatacctgcgcatcctgcatccgatcgaggagccgcgccgcgaggagctgacgccgatcgccttcagcgcggaaacccgcctgtccggggtcgactggaacggccaggtgtaccgcaagggggcggtggatgcggcgctgcgcttcatcgacctgccgcgggagaagatgcccgaggtgctttcgcgggaggtggacaagatcgcccagagcggcggcaccccgctgctggtggtagccaacggccggctgctcggcgccattcacctgaaggacgtggtcaagccgggcattcgcgagcgcttcgccgaactgcgccggctgggcatccgcactgtgatggtgaccggcgacaacccgctgaccgccgctgccatcgccgccgaggctggggtcgacgacgtgatcgccgaggctaccccggagaagaaactggcgcggattcgccaggagcagggcgaaggtcgcctggtggcgatgtgcggcgacggtgccaacgacgccccggcgctggcccaggccgacgtcggcatggccatgaacgacggcacccaggccgcccgcgaggcggccaacctggtcgacctggacagcgacccgaccaagctgctcgacgtggtccaggtgggcaaggagttgctggtcacccgcggcgcgctgaccaccttctccatcgccaacgacgtggccaagtacttcgccatcctgccggcgctgttcgtcggcatctacccgcagctcgacgtgctcaacgtgatgcgcctgcaaagcccgcagagcgcgatcctgtcggccatcgtgttcaacgcgctgatcatcgtcgcgttgatcccactggccttgcgcggcgtgcgggtgcaggcggcggacgcttcgcaactgctgcagcgcaacctgctgatctatggcgtcggcggcctggtggcgccgttcctcgggatcaaggcgatcgacctgctgctgaccgccgtcggcctggcatga

SEQ ID NO: 361997 - DNA, 552 bp, Pseudomonas aeruginosa; identical to SEQ ID NO: 353223

SEQ ID NO: 361998 - DNA, 693 bp, Pseudomonas aeruginosa; identical to SEQ ID NO: 353225

SEQ ID NO: 361999 - DNA, 909 bp, Pseudomonas aeruginosa
atgcagcaactgttgaacgagattctcgatgaagtccgcccgctgatcgggcgcggcaaggtcgccgactacattcccgcgctcgccggcgtcgagccgaaccaactggggatcgccgtgtacagccgcgacggcgagctgttccatgccggcgacgccctgcggccgttttccatccagagcatttccaaggtgttcagcctggtccaggcgatccagcattccggcgaggacatctggcaacgcctcggccacgagccctccggccagcctttcaactccctggtgcagctggagttcgagcgcggcaagccgcgcaatccgttcatcaatgccggcgccctggtgatctgcgacatcaaccagtcgcgtttcgccgcgccggcgcaatcgatgcgcgatttcgtccggcgcctgtgcggcaacccggaagtggtgtcggactcggtggtggcgcgctcggagtaccagcaccgctcgcgcaacgcggcggcggcctacctgatgaaatcgttcggcaacttccacaacgacgtcgaggcggtgctgctcagctatttccatcattgcgcgttgcgcatgagctgcgtcgacctggcgcgggcgttctgcttcctcgccgacaagggcttctgcaagcacagcggcgagcaggtgctcaacgagcggcagaccaagcaggtcaacgcgatcatggccaccagcgggctctacgacgaggccggcaactttgcctaccgggtcggcctgccgggcaagagcggcgtcggcggcggcatcatcgcggtggtgccggggcgcttcacggtctgcgtctggtcgccggagctgaacgccgcgggcaattcgctggcgggtatcgccgcgctggaaaagctcagcgagcggatcggctggtcgatcttctga

SEQ ID NO: 362000 - DNA, 606 bp, Pseudomonas aeruginosa; identical to SEQ ID NO: 353227

SEQ ID NO: 362001 - DNA, 1038 bp, Pseudomonas aeruginosa
atgagcaaacaggtcgccctggtattgggctccggcggtgcgcgcggctacgcgcacatcggcgtgatcgaggaactcgaggcgcgcggctatgagatcacctgcatcgccggttgttccatgggctcggtgatcggcggcatctacgccgccggcaagctgcgcgagtaccgcgagtgggtggaaagcctggattacctcgacgtgctgcgcctgctcgacgtcagcttccgcctcggcgcgatccgcggcgagcgggtgttcggcaagatccacgagatcctcggggaggtgaacatcgaggacctgtcgatcccctacacggcggttgccaccgacctcaccaaccagcaggaaatctggttccaggaaggctgcctgcaccaggccatgcgcgcctcggcggcgatccccagcctgttcaccccggtcatgcagggcagccgcatgctggtcgacggcggcctgctcaacccgttgccgatcgtgccggtggtgtcggcccacagcgacctgatcatcgcggtcaacctcaacgccaccaaccagaagcaataccacctgccggtgatcgagcgtccggccgcgctcaaggggcgcttcgacagcatgatcgagagcctcggccacaaactctcgttcttccgccgccacggcgacgacaataccccgccggagctgagcgccgacgccctgctccatccggttccggcggaatccgaggagcccgccgagccgcaactgcaacagccggccgcggcgccgcaaggcaaggactcgccgaagtcggccagcggcaccacggtggtggaaagcagcggtccggcatcgctgctggaactggtcaaccagagcttcgaggtgatgcagacctcgttggcgcagtacaagatcgccggctacccgccggacatcctgatcaacgtgccgaagcgggtctgccgcttcttcgagttctacaaggcgccggagctgatcgccctcggccggcagatcgccagcgacaccctggaccgctacgaggaagacaacgcctga

SEQ ID NO: 362002 - DNA, 279 bp, Pseudomonas aeruginosa
atgaaaacctggatcgttctgcccgtccttgccctgaccctggccggctgcgccggcaagaccgcctaccgggagaactgtgccgaccagctggacgcggcctggaaggaactcgacctggccaaggccgaaggcttcgccggcaccgtcagctactcgaaggccctgaccctgctcaccggggccaagacccagcagcagttcgaagcctacgagggctgcaccagcaaggccgagaaggcgcgcttctatatccgcgagtcgcgcgccgggcgctga

SEQ ID NO: 362003 - DNA, 1035 bp, Pseudomonas aeruginosa
atgagcgaggcgatccgcctgacccagtacagccacggcgccggctgcggctgcaagatttcgcccaaggtactggaggtgatcctcgccggcagcggcgcgcagaacctcgatccgaagctctgggtcggcaacgcctcgcgcgacgacgcggctgtctacgccctcgacgaggagcgcggggtggtctccaccaccgatttcttcatgccgatcgtcgacgaccccttcgatttcggccgtatcgccgcgaccaacgccatcagcgacatctacgccatgggtggcgacccgctgatggccatcgccatcctcggctggccggtcaacgtgctggccgcggaagtcgcccgcgaggtgatcgccggcggccgcaaggtctgcgaggaagccggcatcccgctggccggcggacactccatcgacgcccccgagccgatcttcggcctggccgtgaccggcgtggtggagaagcgtttcatgaaacgcaacgacaccgccgaggccggctgcaggctgtacctgaccaagccgctgggcatcggcatcctcaccactgccgagaagaaggccaggctgcgcgccgaggacgtcggcgtggcgcgcgactggatgtgcaccctgaacaggcccggcgcgcgcttcggtcgattggccggggtcaaggcgatgaccgacgtcaccggtttcggcctgctcggccacctggtggaaatggccgacggcagcaagctcaccgcgcgcgttgagtacgccgcggtgccgcgcctggccagtgccgaatattacctggagcagggctgcgtgcccggcggcaccctgcgcaacttcgacagctatggcgagcgcatcgcgccactgccggaggtgcagaagctgttgctttgcgatccgcagaccagcggcggcctgctggtggcggtggctccggaaggcgaggcggagttcctcgccgtggcggcggaactcggcctgcaactggcgccgatcggcgaactggtcgagcgacagagtctcgcggtacaggtgctgtaa

SEQ ID NO: 362004 - DNA, 1110 bp, Pseudomonas aeruginosa
atgcgcgacaacacccagcactaccgcgagctgtttctcgacgatatccccctgatggatgtgcgcgccccggtggagtaccacaagggcgcctttcccaacacggtcaaccggccgctgatgaacgacatcgagcggcagaaggtgggcaccagctataagcagcacggccagcaggccgccatcgcccttggtcacgaactggtctgcggggcgctcaaggccgaacggctggcggcctggaaagccttcgccgaagccaacccgaacggctacctgtattgcttccgcggcggcctgcgctcgcagatcgtccagcagtggctgaagcaggacgccggcatcgactacccacgggtgatcggcggctacaaggcgttgcgcaacttccttttcgaaaccacccgcgcggcggtcgacgagtgcgatttcgtgctggtcggcggcctcaccggttgcggcaagaccgaggtgatcgcggcgctggacaacagcctcgatctcgaaggccacgccaaccaccgcggctccagctttggccggcgagccacgccgcagccggcgcagatcgacttcgagaaccgcctggccatcgacatcctgaagaagcgtcatcgtggcgtcggccagttcgtcctcgaggacgaggggcggatcgtcggcagctgctccttgccgctggagctgtaccagggcatgcagggctacccgctggtctggctggaggatgccttcgagcagcgtgtcgagcgtatcctcagggactacgtgatcgacctgcgcagcgagttcgagcgcgtggtgggcgtggaggagggcttcgccgccttctccgcctacctgcagaagagcctcgccggcatcgtcaagcgcctcggcggcgagcgctaccagcggctggcggcgatcctcgtgcaggcgctggaagagcagggccgcgacggctcggtggatacccatcgcggctggatcgaggggctgctcaaggagtactacgacccgatgtacgccttccagcggcagagcaaggaagaccgcgtcgagttccgtggcaaccaggccgaggtgatcggctacctgcgccagcgtcaggcgttgcggccatcgtag

SEQ ID NO: 362005 - DNA, 348 bp, Pseudomonas aeruginosa
atgaactatcgaggaagctgccactgcggaaccatcgcctacgaagtcgaaggcgacctcgaccaggtgatccagtgcaactgttcactgtgcagccggcgcggctggctgctgtggttcgtcccgcgcgaccgtctggcgctgaagacgccggccagcgcgatgcacacctacaccttcaacacccatcgcctgcagcatcacttctgccccacctgcggctgcgcgccgttcagcgaaggcataggcccggacggccaggcgatggccgcggtcaacgcgcgctgcctggaggacatcgacgccaacgcgctcccggtacagcactacgatggccgcaacgcctga

SEQ ID NO: 362006 - DNA, 609 bp, Pseudomonas aeruginosa; identical to SEQ ID NO: 353233

SEQ ID NO: 362007 - DNA, 408 bp, Pseudomonas aeruginosa
atgcgtcccgtattgccgctgttgctgtcgctgagtctgtgcgcccccgccctggccgactggagcggcccgatcgagcagccgctctggtcgttgccggcggcgccgggcctgtcgcgctggctgatcgtgcacaacctgtcgagcgcggcggccgacggcctgtaccacgtcgaggtcctggagcgccgccagggccagcagccctggcagttccagcgcctggccgcgcacctggcgctgaccgaacaggcgctgcgcgcgagtatcgtggcgccgctgaaacgcggcggggtgtatccggaaagctaccagttcgcctatcgccagtggcaggaacgccaggccgcgggccaggcgccggtgtgccggcgcacggtcgacgagtgcctgcgggcgccggactga

SEQ ID NO: 362008 - DNA, 1959 bp, Pseudomonas aeruginosa
atgctggggttgctgcgcaggcgtctggccgatctcggcacggcgaagaaactggccatcggttttaccctggtcctgctattgaccgcgctggtggccgcgctcgcggtgctctcgctgcatgcgctggggcagcgcttcgcgcgcctgcaggagatgagcgcgatcaatcgcgacgtgctggaggttcgccaggccgagaaggactttgccctgcacggggaaaagagcgacgccgagcgcttgcgccagcgcctggccgcgacccttgaacgggtgggccggctcaaggccgacggcgacgccgatcaggcgcttggcatggccgaggtggagcaggtgctggcggcatacctcgaagcgttcggccgcttcgagcagtccatccagggacgccagttggcttgggaaagcgccagctggtcgctgaacggcgccgccaacagcctcgatatcctccagtccagcctggccgaggatggcgcctatgcgctgaaggagagccaggggcacgacggcgagccgctgttgcagcaggcggcccaggtcgcccaggtcaatcgcctggtccttcaggggctggacgaggcccgctcgcgtctcgaagcgcgcgccgcggatgcgcaggaggggccgccgaaatcgctgcgcgaggcgctggagctggcagccctgctggagcaggcgatcaccgacgatgcctacgtgtcggtggtcaaggacgtgctgaccaatatccgcggtttcgccgacaagctcgccgagtatcgcgccagccagcgccaggagcggcagatgtacgccgccatgggcgagcgcgccgggcaggtgatggcgcgtgtcgaccgtagctgggaggcgcagcagcaggccatgctccacagcctgcggacaaactccctgctgatcgtcggcgccgccgtgctggcgctgctggtgggcctgggcgcggccttcggcatcagcctgctgatcgtccgtccgctgcgccaggcgatgggtgtggcgcagcggatcgccgaaggcgacctggcggtacgggtcgacagcgagcggcgcgacgaggttggccaactgatggccgcgatgcgcgccatgaccggcagcctgcgcggtatcgtcagccagttgcaggacggcgtcgggcggattgccggcgcttccgaggcgctgtccggcgttaccacgcgcacccgcctgggaatcgacagccagcgggcggaaaccgaacaggtggccacggcgatgaaccagatggccgccaccgtccatgaagtggcgcacaacgccgaggaagccgcgggggcggcggaaagcgccgacggcaaggtcagcgtcggccaggaggtggtacgccagaccctggagcggatcgagcgactggccgaggcggtgcgcgcggccaccgccagcgtcgaggcgctgagcgccgacagccagcgcatcggcagcatgctggacgtgatcaagagcgtggccgagcagaccaacctgctggcgctgaacgccgccatcgaggcggcgcgggccggcgaccagggtcgaggcttcgccgtggtcgccgacgaggtgcgggcgctggcgcggcgcacccaacagtccacggccgagatcgagaccctgatcggtgccttgcagaatggcacgcagcaggcggtgcagcgtatgcagcgcagccaccagttggtggaccagagcgtcgacgacgcgttgcagaccgaggcggcgctgggcaacatcgctacggcggtggcgctgatccagcagatgaaccagcagatcgccgcggcctccgagcagcagagcgcggtcgccgaggagatcaaccgcagcgtcacggcgatccgcgaggtggccgatcagtcggcccaggccatgcagtcgacggcttcgtccagcgaacaactggcggagctggggcgcgaactacagggcatggtcaggcatttccgcttgtag

SEQ ID NO: 362009 - DNA, 1005 bp, Pseudomonas aeruginosa
atgacctcccagatcaatcggcaataccagttggcccagcgtcccagcgggctgcccggccgcgacaccttcagtttcgtcgagaccccgctcggcgagccggccgagggccagatcctggtgaagaacgagtacctgtcgctggacccggcgatgcgcggctggatgaacgacgcccgctcctacatcccgccggtggggatcggcgaggtgatgcgcgcgctcggcgtcggcaaggtgctggtttcgaagcaccccggcttccaggccggcgactacgtcaacggcgccctcggcgtgcaggactatttcgtcggcgagcccaagggtttctacaaggtcgacccgtcccgcgcgccgctgccacgctatctctcggcgctgggcatgaccggcatgaccgcctacttcgcgttgctcgacgtcggccagccgaagaacggcgagaccgtggtgatctccggcgccgccggtgcggtgggcagcgttgccgggcagatcgccaggctcaagggctgccgggtggtgggcatcgccggcggcgccgagaaatgtcgcttcctggtcgaagaactgggcttcgacggcgccatcgactacaagaacgaagacctcgccgccggactcaagcgcgaatgcccgaagggtatcgatgtgttcttcgacaacgtcggcggcgaaatcctcgacacggtgctcacccgtatcgccttcaaggcacgcatcgtcctctgcggggcgatcagccagtacaacaacaaggaagcggtgcgcggcccggccaactacctgtcgctgctggtcaatcgggcgcgcatggaaggcatggtggtgatggactatgcccagcgcttcccagaaggcctgaaggagatggccacctggctggcggaaggcaagctgcaatcgcgcgaggacatcgtcgaaggcctggagaccttccccgaaacgctgctcaagctgttcagcggggaaaacttcggcaagttggtgttgaaggtctga

SEQ ID NO: 362010 - DNA, 762 bp, Pseudomonas aeruginosa
atgagcaaacttctttccggccaggtcgcactggtcactggcggtgcggcgggcatcggccgcgctaccgcgctggccttcgccgccgccggggtcaaggtggtggtcgccgacctggacagcgccggcggcgagggcacggtcgaagcgatccgccaggcgggaggcgaagccctcttcattcgctgcgacgtcacccgcgacgccgaggtcaaggcgctggtagagggttgcgcggcggcctacggccatctcgactacgccttcaacaacgccggcatcgagatcgagcagggcaagctggccgacggcaacgaagccgagttcgacgccatcatggctgtcaacgtgaagggcgtctggttgtgcatgaagcaccagatcccgctgatgctggcccagggcggcggcgcgatcgtcaacaccgcctcggtcgccgggctcggcgcggcgccgaagatgagcatctacgctgcttccaagcacgcggtgatcggcctgaccaaatcggcggcgatcgagtacgcgaagaagggcatccgcgtcaacgccgtgtgtccggcggtgatcgacaccgacatgttccgccgcgcctacgaggccgatccgcgcaaggccgagttcgccgccgcgatgcatccgctgggtcgggtcggacgggtcgaggaaatcgccgccgcggtgctctacctgtgcagcgaccacgcgggcttcaccaccggtatcgccttgccagtggacggcggggcgacggcgatctga

SEQ ID NO: 362011 - DNA, 894 bp, Pseudomonas aeruginosa
atgaccgccgatcccatcctgaccctgttcctccccatcgccctgggcatcatcatgctcggtctcggactgtccctgaccccggccgacttcctccgcgtggtgcgctacccgaagccggtgctggtcggcctggtgtgccagatcgtcctgctgcccctggcctgtttcctgatcgtccagggcttcgccctcgaggcggccctggcggtcggcatgatgttgctggcggcctcgcccggcggcaccaccgccaacctctacagccacctggcgcatggcgacgtggcactgaacatcaccctgaccgcggtgaactcggtgatcgccatcctcaccatgccgctgatcgtcaatctgtcgctgcaatacttcatgggcgacgggcaggcgattcccctgcagttcggcaaggtcatgcaggtgttcgtcatcgtcctcggcccggtggccatcggcatgctggtgcgcaaccgcctgccggccgtggcggatcggctgcagaagccggtgaagatcctttccgcgctgctgttgctggtgatcatcctgctggcgctggccaaggactggcagaccttcgtcacctacgcgccggtggtcgggctggccgcgctggccttcaacctgctgagcctggcggtgggctactgggtaccgcgcctgctgcgcctgccgaaggcccaggcggtggccatcggcatggagatcggcatccacaacggcaccctggcgatcgccctggcgctgagtccgagcctgctgaacaacagcaccatggcgattccgccggcgatctacggggtgttgatgttcttcaccgcggcggccttcggctggtgggtcagccgtggccaccaggccgcgccggcgcccgtgacggcgccggactga

SEQ ID NO: 362012 - DNA, 1203 bp, Pseudomonas aeruginosa
atgaccgaaaccacccagccccagccccagcctcgtctgcgtccgttcgccgactcctctcccgccgccgtggtggccggcttcgtcgccatgctcaccggctacaccagctcgctggtactgatgttccaggccgggcagaacgccggcctcagcagcgcgcagatttcctcgtggatctgggccctgtcgatcggcatgggcctggcgaccatcggcctgaccctgcgctaccgggtgccgatcgtgatcgcctggtccacccccggcgcggcgctgctgatcagcagcctgcccggagtgccgtacagcgaggcgatcggcgccttcatcgtctgcgccctcctgatcaccctgtgcggcgtcaccggcagcttcgaacgcctgatgcgccaggttccctcctcgctggcctcggcgctgctggccggggtgctgttccgcatcggcatcgagatctgcaacgccgccgagcaacagaccctgctggtgctggcgatgttcttcagctatctgctgtgcaaacgcttctcgccgcgctatgcggtgttcgctgcgctactggtgggggtgctgctggccgggatactgggccaactggacttcagcaggttccgcctggaactggcggtaccggagtggaccatgccgagcttctccctggccgccaccatcagcatcggcatcccgttgttcatcgtcgccatggcgtcgcagaacatgcccggcatcgccgtgctgcgcgccgacggctaccaggtgccggcctcgccgctgatctcgagcaccggcatcgcctcgatcctgctggcgccgttcggctcccacgggatcaacctggcggcgatcagcgcggcgatctgcaccggtccctcggcccacgaggacccgcacaagcgctataccgcggcgctctggtgcggcttcttcaactgcgtcgcgggaaccttcggcgccaccctggcagcgttgttcgcggcgttccccaaggcactggtgctgtccatcgccgctatcgccctgctcggctcgatcatgaacggcctggccaattcgatggccgacgagcgccagcgcgaggccgcgctggtgaccttcatggtcaccgcctccggcttcaccctgctgtccatcggctcggcgttctggggcctggtggccggcctgctgactcagttcgtgctcaactggcggcgcggctga

SEQ ID NO: 362013 - DNA, 477 bp, Pseudomonas aeruginosa; identical to SEQ ID NO: 327678

SEQ ID NO: 362014 - DNA, 1167 bp, Pseudomonas aeruginosa; identical to SEQ ID NO: 326087

SEQ ID NO: 362015 - DNA, 603 bp, Pseudomonas aeruginosa; identical to SEQ ID NO: 319843

SEQ ID NO: 362016 - DNA, 435 bp, Pseudomonas aeruginosa; identical to SEQ ID NO: 326088

SEQ ID NO: 362017 - DNA, 741 bp, Pseudomonas aeruginosa; identical to SEQ ID NO: 326090

SEQ ID NO: 362018 - DNA, 2109 bp, Pseudomonas aeruginosa
atgagcctgtccccactggcttatgccgactccttgcgcatcggcacaatcgacttcgtttctcccgacgaaatcaaggtgctgatcgacatcgaggcacccgagggcgtggcgctcaatacgggtacgccgcgcccattcccgcgcatcaacggttatgtactgatccccagcgacgagggacatctggttgcccaagttgagtggatcaccatcgagcgctcgcaataccccaagcgcacgggtatgcaggacttcggtctggtggacttaccctatcccttacgcaagatgagcctgaacccgctgggctgcctggtgtatggaggcagcgggacggatggcaaagatacctaccgcttccgacgcggtattgagagctaccccaccgttggcgatgcagtgctgctgcccacgcaaaatcaactgaaggccatcgtcgagtctggcgagaaccgccatgtgctgatcggtaccagcccgctcgccgccaacgccaaggtcaaaatcgacccggatcgcctgtttggccgccatttggcggtgctgggcaacaccggtagcggcaagtcttgctcggtcgcggggctgatccgctggtccatggacgaagcccgcaaagcccgaggcggcgaccctaatgcccgctttatcgtgcttgaccctaacggcgaatacgccaacaccttccgtgacatgagcaaggttcgggtgtatgccgtcgaggccagcgagggggtggagcaactacaaatacctctgtggttttggaatagcgtcgaatggagtgcattcacccaggctagcgccaagactcaacgcccgacattggtgcaggcgctgagatccgtccgtgacggagtgttcactgcaactgttacgcccagtcatgagatgcgtcgctatctgcgcaccctggtcagcatcctgcaattggagcgcaatgccggcagcccatgggcgcggtttccacttcccaagaacttcctggagaagctcaagaagtggcaggaaggactgggcgatcaggatacctttacggacgacgaaaagacggtgctcggttctgtcagggacaagctcacggccttgatcaatgctcgcggcggtcaatacccaacctatgacttcacacgcggcgagattgacgagctgctttcggtgatccaggcagcgcacgccaccttcggcggcggcgacaccgacatcctacccatcgatgccgatgtgccgcgccagtttacgggcgaccagttactgaggagtcttgaagccacggcagagctgctaggcgtgtctgagtacgtcgggaccatgcagatgcgcatccgcaccattctgtcggacagtcgcatgaaggtcgtctcaggcgatgctaaggatctgacattggatgactggttgcgaagctacatcggcgatgatcaggcctccaacggctccgtgactgtcatcgacctctcgctcgtgcctgcagaggtggtgcacatcatcacggccgtgattgcgcgcatgacactagaggccctgcagcgctatcgcaagatgcaccacggcaagatcttacccaccgtgcttgtgatggaagaagcacacaccttcatcaagcgctacaaggacgactcggagagtcagaactcggctgccatttgctgccaggtgttcgagaagatagcccgcgaaggtcgtaagttcggactgggactggtgttgtcctcccagcgccctagcgagttgtcgccgaccgtgctgtcccagtgcaacagctttttgctgcaccgcatcagcaacgaccgtgaccaggaactggtgcacaagctggtgcccgacaacctgcgaggcctgctgcgtgacttgccctctcttccctctcgacacgccattttgctcggttgggcgtcggaactgccggtgctggtgcagatgaacgcgctgcctgagcagcatcgaccgaaatcggatgacccggatttctgggcggtgtggtctgggaaggacaataaagaccagacggtcgagcgtccggtggattggaaaacgattgtagatgactggcagcaaatcagtgctccagcgcaagagcaaggtttggagaacagcgatgagtaa

SEQ ID NO: 362019 - DNA, 1362 bp, Pseudomonas aeruginosa
atgaccgtcaatacgctcaagactcgagatgatcacatgccgctgcagttcgcagcagacggcgacacgttcaagctgcaggcaggttcagaggcttcctggttgagcggtgaaaccttcggccacaaggagctgcgcagccgcatcgagccttggctgacgtcattgttccagtcggagcacctttcgctgctggccggctcgggcctaacccatgctgtgcattacctggccgccggaaaaggcgctgccggtatgggcgccttgacactgagtaaccaccaggccgaaatcgatcatgcagcagagaaagcggcggaagcggctgggcgtgagaaaggaaatctggaagatcagctgcgcattgccaacgaattgctgcgtggtctggagattctgcagaaggacagcgaggccgaagctctgagtaacgagcttcaagccggcatgcaggacttcgcgaagtcgattctgggcagcgaagcgggcatctccaccgcagaagaaggcaggcgcgagcaggccttcaataccctggtcaccttcctgatgagctttgccagccgcaccggggtgcgagaccggctgaatatctttaccaccaactacgaccggctgatcgaggccggcgcggagctggccgggctgcatctgctagatcggttcctaggtaacctgatgccaatcttccgctcctcgcggctggatctggacatgcactacaacccaccaggcattcgcggcgaaccgcgctatttggaaggcgtggcgcgctataccaagcttcatggttcggtggactgggtgcaaacgggcaaggacatccgccgaatcggtctgccgttcggggcggcgagcgtcgaaccttatttgcaggcaccgggcttaggcggagccactgcccatcggctgatgatctatcccaacgcggccaaggacagggagaccgccgactatccctacgtggaactgttccgtgatctggcggccgctgtgtgtcgtccgaacagcacgttggtgacctacggttacagctttggcgatgagcatatcaaccgcgttatccgcgacatgctcaccatcccctcgacgcatctggttgtgatctcgtatgacgatccacttggtcgcatcatgcagacctatgaggagatgggccggccatcgcagattagcttgctgatcggccccgcattggctgatctgaccacgctgaccgagaactacctgcccaaggccgccatcgacaagaccaccttccgcatgagcgaactgttaaagcagcgttggggggccggtcaatcccctgcggagcgtcctgctattgacgtcggcatcgtggatgtgagtgatctgatatga

SEQ ID NO: 362020 - DNA, 534 bp, Pseudomonas aeruginosa
gtgaaggttgtgattgccgatggctttgagtttcgtttcgctgatgcgatagacgcctacgtatttgacgaaaaggacagctccaagcctacttttcacggtgcgccgatgaagggggtcgatatcgtagccgagttcgaggacgcctatgtttacgtcgaactgaaagactacgacgatccgtcaggctacgacgtggcaagagcagctaacgatgatgagcgtgaggcgcgtcaggatagcttcaagtggctcaagaactatctgaagtacaaattcagagactctcatctctatcgtcttgctgagggcaaagtcgataaacctgttcactttatctgcgtcttgaccttcgataatgcactgaatggcaggatgctgaaggagctgaagcgggagctgcctgtcggaaagaaaccaaggcgctggatccaggcattggctacgagctgccaagtcgtaaatctcgaaaaatggaacgaggttttcccgaaatggcctgcgacccgtatcgcgccagcggaaaacgcctag

SEQ ID NO: 362021 - DNA, 1149 bp, Pseudomonas aeruginosa
atgatcaccaacctgaagctcaagaactttactgccttcaccgatctggcgatcgacttctcaccgggtatcaacatcatcatcggcgaaaatggcacgggtaaaacccagttgctcaaggccattcttgcgctgtgcgggccagaggtccgcactgagcagcccggtgaacagctagccagcaaactctgccgcctttaccaaccccttagtgggaaagtcggcgagctacgccgcagaggtacgagtggggaagccgtgttgaaagcagcgttttcacaggggcaagaactcatagtgcgtttcaacggtagtgccactaccgtcaagactcccaaggtgctaggccctgctattgctccggctacgttcctccccacaaaggaagtgctttcccttgtgcgtggtcttaccgccgaacaacccgacttagcgaccatcgaacgaatcttcgacgatggctatctggatctggcaagtcagctcaaaaaagagggtattgaggatctgcgcagtaaggtgcagctcaaccctcgttttgccaccatcgtcccgcgattggctaacttgataggcggacaatatctcctagagaaggggcgctttgtctttcaaccagggcgttaccaagagaaaaaagcatctacgcgcaccagcgaagccaagaatgctctgatgtatcaagacagtactgaatggaggttcatcccggctagcaagaggcgtctctccagcactatgacagctgaaggtttccgcaagatcggcgtgctgcagcggttgctcagcaacggcagtctaaatccgggaacggccggcccgctgttatgggacgagcctgaatccaacctcaaccccaaattgatgaaggatcttgtacaggcactgctggagatcgcccgcaacgggcagcaagtgattctcgccacccatgattacgtattgctcaaatggttcgatttgctgatggacaaaggcaagggagatcaggtgaggttctttagcctctaccgcgatgcctctactctcgaagtcatgtccacgaaaacagatgactatctggctatcaatccgaatcccatagacgacgcttttggctacctgatcaaccaggaaatcgagaacgacatgggaggactgggcaagtga

SEQ ID NO: 362022 - DNA, 1809 bp, Pseudomonas aeruginosa
atggataccagcaaactcaagaaatttgcccaatacgcgcgtcgcatcttgcttgatcaggtgagcggtaagttggatgtggtactggcaccgcaaagtgctgcacgccgtgagcgagcccaggtagtggctgagctggaaaaactgatcagcatctccggtcgcgagcatgtggaagagcgtgttgcctacacctggtttaaccgcttctgtgccttgcgcttcatggacgtcaaccgctacacacgtatcggcgtggtgtcgccggctgaggggcagttccagcccgagatcctggctgaagccaagatggggcacatcgacgaagagatggtatcggctcaggttcgtcagagggtcctggatcttctcgtgggtcgcgcaccaagtaacgactcgcaaggtgaggcctatcgcctactggtagttgccgtgtgcaatgcctggcaccagtccatgcccttcctgtttgagcgaatcgacgattacaccgagctgctaatgcccgatgatttgctttcgggcaattccatcctcgcatacacacgcgaggccatgacgcccgacgcctgcgaggatgtcgaggtggtcggctggctctaccagttctacatctccgagaagaaagatgcggtgttcgaggggttgaagaggaatcagaagatcaccccagagaacatcccggccgccactcagctgttcaccccgcactggattgtgcgctacctggtagacaactctctgggccgactctggctactcaaccggcccaactcacggctggcagagcaaatggagtactacatcccgccagagaagccagagagtgatttcctcaagatcaccggtccagagggcataaaagtctgcgacccggcgtgcggctccggccacatgctctcctacgccttcgacctgctttatgcgatgtatgaggaggagggctttgacccggctgaaatcccggaaaagattctcacccacaacctcttcggcatcgagctggatgagcgtgctggtgagttggccgctttcgcgctcaccatgaaggctcgtgcccgccagcggcgcttcttcaataaaggcgtcgaacccaacatctgcgtgctggaaaaggtgagctttagtcgcgaagagctggacgagtacattggttttgtcggccgtgacttgttcacctacggcctgcgcgaaacgctggagcagttcagcgaagccgacaacttcggttcgctgattgtgcccaaggtcgccaacgtggccgatgtgctggccacgctggagagcaaggacatgagcagcaacctgttcctggctgagacgcacaaaaaagtcctgattgttctgcgcatggctgacgcgttgagtccgcgttacgcagtggtcgtggccaacccaccttatatgggcggtaagggtatgaatccacgcttaagcacttgggccaaacagaatttccccagcagcaaatccgatttgtttgcgatgttcatcgaacgcaatctggatctagcggtgaagggcggagctgtcgccatgatcaccatgcagagctggatgttcctttcctcattcgaatccctgcgaggtcgtatcctaaatcagcacaccatcctatccatggcgcacttgggggcacgggccttcgatagcatcggtggtgaggttgtttcgaccacggcctttgtgctggaaaacgctcacaagcccgattaccggggcgcctatatgcgcctggtggatggaaattcggaagcagaaaagatggaaatgttggccactgccatcgctcaaggacgggttgcatga

SEQ ID NO: 362023 - DNA, 552 bp, Pseudomonas aeruginosa
ttggttgccgagcgttacctgtcactgcgcgactggtcgcagacccgtacagaggtacgtaatggcaacctcctgcaggcgcgtacagccagcgctgctaagcgcattagcatcgagttgttcgggcgacttgtactgcttgatgtcgaagagctggaagctctggtcgaaggtaaccggcgtgagcgcagttacctgctctggtcggcggtctgtcgccgttatgggttcatccgtgatttcgccattgaggtactgcacgagtactacctcaaccgacgtcaccagatcatgactgctgactacgaggctttctacaacgctaaggcactttggcataaggagctggacgagattgcaatctctacccaaaagcgtctgcgccatggtgtatttcagatgctgcgcgaggctgatctgctttccgaacaaggtcagatccaatctgtgctgcttagcccgtatctagcccggctgatagccaagcatgggcgtgagcatctgttggtttttcctgccacggatagcgaaattcagaggtggcttcaatga

SEQ ID NO: 362024 - DNA, 258 bp, Pseudomonas aeruginosa
atggctgcgtgggatggggtttctataggcgcattgctgttgatggggacaatcttgctagtgcttgtactccagtgcctggggctacgcgagctctggaaaatggctctcgacttcaaaaggtatgtgcgttgggctcgcatttgggagatggaaaatcgggagctgcgttcagcactgcgggctgagaaagcgcacattgtgcagttgcaaaggaaactggtgattctgcaggagttgattccggcagagggctaa

SEQ ID NO: 362025 - DNA, 231 bp, Pseudomonas aeruginosa
atgcccccccactcccggccctggctggagaatattgactcgcgggtgacgattagcgagtcggatcagctcccatacattgatgtccaacttgtcacagataatggaaagctcatttgcaaaagcaatgttagtgtcacggagatgcttctgatatacgtattgctcactgccctgagcgagtcttgcctggacatgtattacgtgaattggttcagaatgatcgtgtaa

SEQ ID NO: 362026 - DNA, 1395 bp, Pseudomonas aeruginosa
ttgaccattctagatttccgtgaaatagcaaaaccattcaaatccaaaaaagaagagtatggcggccatctcgacaattttgaaaaatttgcacaagaatttttccgcgaattatatgacgctcacctaatagaagtagcaacacgcggagctgatcgcggtagagatctgctactcgaggtaactattgagggcatacatcaaaaatggctggttagttgcaagcatacggcacatacaggcaatgcagtaggagcgattgagaaaaatatttccgaccgtttcgcctcctcgggcgcggatgtctttgtctgtttttactcacacatcgccacatcctctctacaggagacgcttcacaatctaaagctgcatagtaaaaattttgactttaccatctttaacagcgctcgaattgaaactgaactactctcagcccaaagtggtaaaggttggtttctagccgcacgacactttccatcctcatttacaagactattccagaattttcttcacccaatatctcactacaaagaaagtgatgtacatgacaattcgaatggccgcctagagctcccaggccccggcgggggaataatctcatacaacaaccaaaccgaaagacaagccggcattaactatctggttgagcatgcaaatgaatcagtaacatttgccttgcatgaggctttctttgctcaggtattatttgatatcacgcgacaatggcctacctgcttctcttactgggaagcctgccctattcacgagataagaacctcagatatatttcctacttttgatacttcagcagtggtagaactgctctacgaagcacctggattagctctagtcgtctgtttcttttggacatggtgggacgagcaacgtgctattgacgtctatcaggacgcatatacccaagcactcgggtctactatcaccgaagccaacgcgcgaaccaatttaggaattcgcatggcattaatacactgccccatgtcattacgagacaaaatcactagatttgtagctttcgcaaagccaagccttcgcgaacttagcacatgggaaaaattatctcgcactgcgtatttcaataacagagagcctgagctacgcgaaattctccttaatatttatcaaaaggccattaaaaacgctgcccagtgcagagtaaaagcgcacccagagtgcacaacactagatcaactcaacgattacagctatgtacttggacataagtatgtgcataaagagctggagagattcattggagagctgcatggctttaattacactcccctaaaaaatctagagaatggaggtgtggcttggcgaattaaaccatccgaacactatgaatggttcgccgataaaatcacctctcgataa

SEQ ID NO: 362027 - DNA, 1668 bp, Pseudomonas aeruginosa
atgcagcttgcggcgcaagacccgcccggcaagcgggcgctaaaacccttggtcgaccttgccagcgagggcaagcccagaattcatctagtgggtgactacaatacggggaagtcgagcttcatcaagcgactgcttctggatgcgggcttgccggtgccgtccaacctaaaggtcgcggcaaaacctatgaccgatacggtgcacgcctatgattggaacggcgtgttgctggtggacagcccaggtttccaaagcagccacgagacgcacacccatcaggcatgggatgccctggccaacgccagtgcagttatctttctgttgcagcccaatctaatcctcggcgatgacctgccattgcgcacggtcattcacggcgactcggcacgaggtatcgtcgacaagcaggacagcacttattttatcgtcaatcgatcagacgagcttggcgtagatccagagctatcgcccgagctctatgcgcaattggtggagcgtaaacgagtggagttgcgccaggccttggcttctcgtgctatccacagctcagatgaccggatcttctttatggcgagcgatccctatgggttggtgggggatcgcgtcgatgccgatgctacggcattcgacccttaccgagcgtgggatggcttcaggccgtttatggaagcattgcgtgctgtgcgacaggatcttttggcttcggggccagcgcgatccattttgcagggcggcgtctatcgactatggcagcacgcactcagcatacagcgtgacattgaccagcaacgccggcagatcgaagagcttaaacagttacggcacatcgttgagcagtgcgttgccgagggcgaccagataggcagccgctacctactgactctgcagactttggcgcacgaacaggcgcaagatctcaagcaggcactgttggcggagcaggatccggccagattgaagatcagggccgagcagttgcagagttggtgggaagaccctgagctcaaggtccgcctggatcactggcaacaagagttcagcgaggcgcttgagggttggcaacgcaaatccaacgagcgaatcgcccgacgggtcggctccgttgcctttcgccaggcctttccgggcgcgcaacaggggccgggcggcttcaatgatgccaaaggcaaaggttgggtattcgaggtcttcgacaaggtcggtcgctccatgagcggggcgacgcgcgacgtcgtatacggcatcggcaaatccctcggcttcaagttccggccatggggtgcggtcaatctggccaagacgctgacgaaggtcggcgctgtcatgggggtggtgggcgttgcggcggatgtggcgtttatattcatcgaggagaagcgccagggagatcgcgaaaaagccaggcaaaacttggcaaaattcctggatcggtcggagcaagagttaattgtcagcgtcagtcaggggtcggacgacaatcctggtttgttccagggcaagaacgacctagtagcgagcttgacggcatttgatggagagcttgccaacgaacaaacggcgctgaagcagaaagctgcggcggcagaggagcaggtagaggcctaccgcgctcagtgtgataaggcgttggcattgcttggcaaaaaaggggatgaacttgagtaa

SEQ ID NO: 362028 - DNA, 1767 bp, Pseudomonas aeruginosa
atgaacttgagtaactcgaccgtgcaactcgtcgatcaactttggcagcatttgcagggatatgctcacactgcgcaggtcgtcagccaataccatgaccaatggcagcagttttccggccagacggcgattcgcatcgtgatcttcggcgcctacgacgcagggaaaagcagcctgctcaagcgcttgctggtggacgccggctgcctggtgcccgattgggtgaccatcagtgcccggcgcgagaccttcgaaagccgcgaagtgctggcgggttcaatcacctttgttgactcgcccgggcttagcagcggcaatgatgagcacgacactataagccgtaaagcgttgcagctggccgatgcttacatttgggtgatgccgccgcaattggttacctcaggccagtcggatttcgtgactttcctcaatggcggcttcttccatccgcagctgccgtccgccgcggtaaccgccgcgaccatcgcggtcgtttcgcgaatggacgaggcagggatcgacccgggcgatagccctgacggatttgctgcactggtcgagaagaaaaccgccgaactctcgagcatgctggataacgatcgcattgccggccagttggccggcctgcattgcatcgtggccgatccttaccagttggtgggtaacacccgggagccggatcctaccctgtatgacattggccgtgagtgggatggcatttcggcgctgcgcgcctccctggaagcgctcgaaggtgaccagaggcggctacggcaattggccggcctgcgcttcgtatgcgctgtcgcccgcgaactggaagaagcggtacggctgcagaacagcacgctacagttggagaccgagcgcctgagtaacgattcggagcggtatgggctatttcgccagcagctggccagcctgacggattacacaaagacggacttgaaggcgcgggtcgatgaagcgctgagatccgccggtcgctcagcaaccgtggatacccagctgcccttcgtccgtctggaaaagacgctgtccgagatcattgaccaatgggcgagcgcgagttgctccaaattgcaaaagctggcccaggagttcgagcttgaactgcagcaacgcgcgattgtagtggatatgagtgctctgctcgccgcggtgcaggcccaggacaacgccaagggtgactcgaacgagcaacccaactcgttcaagcagaaccgcaagcggctgttcggctttgtccccgccctggcgaaatccgccaagggattggccgaagttgacctgggaatgtcgctcgaggacgcgaggaaaaagctgctcgagctagagaagctcaagggcaaggcgcttgagggagccatcgagaagatcttcaagtccaaggagcagatggagaaggccagcagttatgtgcgctgggcatcagctatcagcgtggttggccctctggtggggcaattggcctctttcggtagcgacctgcttgaggatcacactaatcaacagcaagcagcagcgcgtatcgagcagcgcaagctgatctgtcagcagctcgatgagcaggccgataatatccgcgagcaggctcagcaggttttttctgagttgagccgcgcactggacgagcaactggaggctcgccagcagcactgcttacaaagccggcaggcggtattggagcagtggcaggaagcagaggcattcgtgcaagagctacacctactactatcgtatgtaacgcgcatgtgcgacgcctag

SEQ ID NO: 362029 - DNA, 1026 bp, Pseudomonas aeruginosa
atgcagtattttgaagggagtgttgtgtatgaggctgtgcctggatgggttgccgcggcgctcgggttgggttaccggtggcgtcaaaatggaggtcaggcccgccgtatcgggttgttgtcgatgccctgcgagtcggaggctgccgggataattgcgctgggggcgttgcggagcgatctggagtgcatgacggcaaaccacttggatacgcacttcgatcttctgttgcgggcctgccatgagcgcgtggcagtacatacgcgctgggcggactctcccgaagaactcacgtgggatgtgcggaacgctgttgacgacacccgctggcgttttgttgcctacgatggtgaccgagatgtcattgttctcgagagcgccacgcatcggtctgtcattaaacgcaaaggcaaaaacatccctaacccgaatggcacctgcagccgctatatcatgcggaacaacgccatcggctggcagttgcgcgattgtcctctaccgcagctgcctccggaggggaagccactggaaccctccatgtacagcgatctgccaggttgcttcggtcttatcttggaagaaaacctgcgtcgatcctatgacggactggtgctggtcggacagggggctgcgcgtgactccacctatatgcagaagtattatgcggcgggctttgtgtccgctgactgccagcttccacttggcgatctgctgaccctgcatcacagtgagcggaattacatacggcgcctgcgcttcttcagcgagcgcacatctcaagacgcaggcgcacacgcagccagtgtagttgtggctgacggtatatcggcactgctctgtgcggagaaattgtttcccgccagcgacatcattggcgtctgcaaccgtgatgcttctgtcgaggtcatcctccagctaaaggattggctgaacggcaccatacgttactacactgacaccagccactatctgtcgggcgagatgcctgccggcatgctgttgcgtgtgttgcaacggaggtcatga

SEQ ID NO: 362030 - DNA, 1608 bp, Pseudomonas aeruginosa
atgcccgcccagaccaccgcacggctgcagttcctggcgagcaatccgccgacccatgaactttatattggcgaatctccgctattttctgcgattcgccaccatatgcgggtactacattcatcgctttaccggccagaaggagatgcataccagaacgaaacggcgctgatgctccgtttcgagatgcagaagtggctaacatcgcctttgatgcctgatgttggcttgttccagcggtgtggtcttgctgatgacgggcggatccgtcagcagtggggggggcaggccgcgcagaccgttgagcaactgaaagacttgattgcccggtacgcggaggagggatccgtactcaatacggagttcgtccggctgtttgtcgatcttgtcggtgagtacgccgaagatcgcattagaatctggtgccatcacaaggagcgcgacctctatcgtgacctactcgaagggctggccgaacttgatgacggggtattcgtcagcacgttggcggagtaccgcaagagtagcccggccgatgctttgatccggtttgggccattacgcacgcgcggcttcggcagtgtgccggaggcactgatcacttcaccgtcataccgccgattggtccgcctcgtctgggcaggattggaggatgaggacaggtttgccgacgatccggtgctaccttcccacaactacctagtcatcctgccctcggtccggaacacaatcaccgggaatcaggggggcgtgacagtaccgcctgggaccgaaccggcggatgatcttgtgtaccttgaccagaaggcaccaaccggaaaaaccctgcatcggagtgtgctggtggagtttcccgctgagtacggcgtactgctgcgccccggctcccgcttgctggtgctcactcccagtcgcactgatgctgaggccattggctaccgacacatcggcgacgttgaggtcggtgattacctgctgatccatgatgctgacgcggacctcggtgaggtaagtgtcgatgccaccaaggcgccgctggctgccctatggaaaaaggcgctggctgacacctggagacgacatcctggcgtgtgtgctcagaaaatgcagcaagccggcatcagcctcttggacttgtcccgtgcggtccagaaatggacagcaatgaatggcacggtaattcgcgcgcccttgcgtaagaagcatttcgaggcactgctgacaaaagtgcttgatccggagcttattcctccggtggtggtgaagggcaggacggttgcaggctggcggcgagcttgggcggaggtcgagtccacacgggtaaccgcaattcagcatggggtggtggagaatgccatcgtcaatgagcaactggtagcagagcttcgcaaggacttgccagccattcgcgacatgatttcactggatgatgtctatcgtcaccagcttccggctgtatgcggactgactggcagcgtggcatttaaacccgttatcagcctctctccggactttgctgcgccggcagagctgctgggaaaatcgctgaagttgccgatcgctgagcagtttcggacagactgtggaggtgatcatctgtgcgcatga

SEQ ID NO: 362031 - DNA, 1668 bp, Pseudomonas aeruginosa
gtgtaccgtaaactcgaaagcgccgaggctggctggaccgtcatccactctctggacttggctccgagcaaccacaacaggcgtaccgagctcgactttgtgatcctgattcccgacgtcggcattctctgcgtagaggtcaaatcacatcgtgagatcggtttcgacggcgaccgctggtacccagaaagcataaccaaatcgccgttccgccaggtgcaggatgcgcgttttgccttgcgccggcggctggtagaccggctcgcgtctttttctcgcgtcccggtggttcactgctgcatttttccacgggcggatttccccgtgccatccaacctgtcggttcagccgtacgaggtgatggatcgcggtcggttcgagggctgtgctacgagcgatgcactgtgtgatgcgctgaaatccatggccctgaggatcatcgatgcggatccgacgatcaccccgcttaaagcaccgcttacggtgcagcaagtggaggatttcgtcagtttctgtttccctatccgcacgcgccggccagaaaatagcgccgagatacgttaccgcgaggaagagcttgagaagcttctgtgcgagcagcagcgcccggtgcttcgtctgacagagcacaactcccaggtgcttgtggaaggcggagctggtaccggcaagtctttgattggtctcgaggtcgctcggcgaaaggccgcccaagggctccgtgtggggtatctgtgcttcaacaggttgatcggccaatgggccaccaaccagcttgagggcgatcgcaatccgctcttggtcggcggctccgccctgagcctgctgatgtccttgacgggggtcagtgtcccggacgatcccgatgatgatttctggtctggcctaccgttggagatccaggatcgtctcacggccccctcgtgcacgcatgatgctcagttcgactacctggtcattgacgaggcacaggacatacttgggcgtccggacctgctggactgcattcaactgctgctggaaggtggcctggagggtggccgctacctgatgttgggcgactttcgcaaccaagtaatgactggctccaccgtacttgaggagccccttgccgcggtgcggcgtcatgccgcccgttgggtactcacggaaaactgccggaactacaaggcgatcggtcagatcgcgatgaaactctcgagggccgaccggagtacatactccgggtacatgcgtcagggcggtggcctgcatgcatggaacctttacttatacaaagacgcagcggatcaggtccaccagatcatctcgtgtatggatgcggccctcgccagtgggtttcgtgaagaggacattaccgtgctctccttcgggggagaacagcaatcggtgctgcccctgcttcgcgagacgtaccgccgtccgttcgtctccaccgggactgcggatgttaagggtatccgctggtccactgttcccgcctacaagggcctcgagaacaaggtcatcatcatcaccgatgtgattccttccaacagcgggttcgatcggagccgcttctacacgggtattacccgggcgcaggagcggctccatctcttttgtcatgcgtcaggcgcttcactgctagtcgaatgggccacaagtgcaggaaaagaatatgaataa

SEQ ID NO: 362032 - DNA, 3714 bp, Pseudomonas aeruginosa
atgaataaagaacgatctgccgaaattgagtttctgcgcggtgaattggtggggcctgcacgtccgctggaggttgttcgccccggcgccattgtggcccttgacgcgcaaggctgctttcggctggccaatgatgccaacgggactctgtactaccaatgtgatggtagcgaagttccgcaggaaatcgtccactaccgtggcgaaacacccaatcagcgctatggcgcaggtttgttgcacccgcgcaatgatgtgcgtgaggctgtaattgacggaccagtggatgccgaaccgtccggtgaacaaacagcagtcggggaaccggacaaggaggcgtctgctgaaactgtgcaggcggtggtctccgatccggaagaaccgttgtggcatgcggtgcccgtgagtggtgaagcgggtgccgaggtcggcggcgtggaggcggatgatgacgatttcgaggtcagcagtgccgacatgtaccaaccgtcagtcatgggcatcagcttctgtctcgaggaaggggacggtgaatttgtggtgtcgctgccccccatgaagaagttcttctggcagctgccggaggcggccccattcccggttaatgggcggtacgagccctgtatcaagatcaccgctacggaggctggtgagcaccggacagaggcgtggcggcgtgtgccggcgaccactgtgaacacgtccgaacggtttctgctggccagcctggaacccggtaaatccgtatcgaggaacctttccctgccgggtgagctggctttgcagatccaggtgtttcctcggcgcatgcatggtaagtggatcatcacctgtgtactgcgcaaccagctggatgccagcaccatgaagagcaaggtggagagggtcaggggtgtgctcttccaggcttgcttcgaagtgcgtgcgcagggcggcgcggtcttcagtcgttatcctgagggcgtcaggcctttcgggcagctcgatgctgacgagcagacgctctccttgctttatcgtgatgaggctacttgggcaatcgggcatggctgtgcggcaggatgggatcgtgttgaaggtgcgacaccagacgtgctcttcgccgatgtgatgccggcggtagaactgccaagcatgacgcctgacatcagagggcagaacggcgagccagtcacgctgtcaatgcgcgagctggcggggctgccgtcttcctccgagggcggtgcgggctgggagagtctcgaccgtctcaccgaagagtatgcggcgtggatcgaggcgcgagaggtggacagtgcgggactggagctccatttgcgcgaggtggccgtacgccatcttgagggctgccggaggtgtctcgaacgtatccgcaacggcattgccattttgcaggaagatgaaactgcgttggaggcgttccgtctggcgaatcaaagcatgatgctgcaacagatagcctccaaacagatcgcacgccgccccttggtccgttctgacggctacgtgttggcagcggaagtactgaaaggccagccccgcaccccatggacagtctgggccgatggctcagagaaagctcacatcggcaactggcgtgcattccaggcggcttttttgctgatgagcattgtcgggctggttgatgggcgcagtgacgaccgagaagtcgtcgacctgatctggttccccacaggtggaggcaagaccgaggcctatctcgcggtcgcagccttttacatgttccatcagcggctgattgcgcgccacgacgacgaactccgccgtgacggcaccaacgttttcatgcgctataccttgcgcatgctgaccacccagcaattccagcgtgccgccagcctgatctgcgcgatggagcagatccgcatgcgtagaaaggaagagcgcacccacccacagctaggggaaaccagttttacgctggggttgtggattggagctgggggctcgccgaatacctgggcagacgccactattgcgattcggaagtacgagcgtaacgatgtatctggcaatcctctggtgctcaccgaatgcccttggtgtcgaagcacaatcggccggctggagccgggagcaggtggccgccgcactcataaaaacagcaacaatctggctggattggcattctccggcaatcgtccgtacctgaagtgttccgacgtctgctgtgaatttggtggcgagcggaacagacttccagtcgaggtgatcgatgaggccatctataacgagccgccatccatgttcatcggtacggcagacaaatttgccatgatggcttggaagccggaaaccggtgctctatttggctttcatcacgatggaaaaggaaatgttcccttggtcaggcagccaccagggttgatcatccaagatgaatttcacctgatttccgggccattgggcacactatatggtctgtatgaaggtgtgatcgaacagttttgtaccgcagaggtggaccggcacctgatccggccaaaaatcattgcctcgacggccaccatacgtggcgcaactgaacaggtacgcactgtttatgcccgccagaatctgcagctgtttcccagtccggggttagtgatgggggactcgtttttcggccgctatgccaggaccaacgacggccagctagaagaggggcgcctctaccttggcatccatgccaccggttaccggtcctttctgactgcgcaggtccgcaccttctcggcagcgctgttcagggcggggatgttcgaggaccgaaaagatgcatggtggactctgctggcgttctacaacagccttcgcgagctgggtggtgctcagaccctgttccattctgacattgctgcgcgcatgaaggactactcgttccgctatggactcaaaggcagtacgcaacgctacctcaatacagtcgaggagctgaccagccgtcaaagtcaggcacagctggttgagcttatggatcggctggcattggactgggatgacaaaaattctattgatgcctgcctggcgtccaacatcattgaggtcggggtcgacatcgaccggctggcgttgatggccgttgtcggccaacccaagtcaaccgcgcaatacattcaggtcacgggccgggtcggccggcgctgggatacccgaccaggcttgattctgagcatgttcaatccgagcaagagccgtgatcgctcgcatttcgagcagttccacagctatcaccgccgcctgtatgagcgtgtagagcctacctcggctacgccgttttcggtcgaggcggttgaacgtgccctgaccggcgtccttttggtctgggccaggcaatgccatgacgctaagtcacccggtgaggcctttggtgattatgacggccatctggaggaggcgtttgagctgctgctcgagcgttgtgaagtcatcatggaaaaacagccgaaggagtcggctcgtgtgtgcgatgccatgcgcaaggtatacagcgaactccgcaggaaatggcaggctaaccctcaggagtggtgggcgtacccgcagaaaaaggatggcgagtatttgatgctgtggtccggcgtgtttgcaacccgcgaacagaaactgaaaggcgcgcgggttctcagcagcatgcgcaatgtcgatggcactgcccgcgcggtgatcagtgacaactattttgcggaggagcatacaaaacatggccagtga

SEQ ID NO: 362033 - DNA, 1938 bp, Pseudomonas aeruginosa
atggccagtgagatccgactggggcaattgattgctccctttggcccgggaagcatctacaccgacaagaacggtattcccaacatcgtctgcggtttggacttctggcataaacagagggacgagcgggggcactgggcggcggatgaggcggcgatgcgcaagcacgtgatcgatgaaccccggctttccgcactgctccacgttcctcaattccgccagccgccggagtattgctttgacgaccagaatcccggtctctccagattggaggttcagactcaccgctttcccacttggtatgtcgacagcttcagcgggaaaatgcgtcgtttcagccttggtacgctgaaactggctcctctcgaaaagggggggaaacaggcgcgctggcgtccggtgcgtttcatcagtgtctgcagcaacgggcatatcggggacttcccatggaaagactggtgcggatgcgtgtgtccgggggatggtggtctggtcctgaatgattcgggcggcccggacctgcggtctgtaagggtatcgtgcgcgagttgtggacaatcaaagtcgctggctggctccatggccatgagtcgtgatcaggaaagaaacacgatcacaggatccgggcttcatgcagtgggtattacttgcagcggagaacgcccttggctaggccggacagcccagccatgcgacgcccctccggtggccgtactgatcaaccagtcgaacatttatttcggcaagactctgtcctcgatctacctgccggacatgaccggcgaacaaaccgtcgccgatattggaaagatactgcggcgcgaagatatggatctgagcgacatcaagctcttttaccaagctgggcggccgatgcctgccttggccatgcttcgcgatattttgaagcctcatttcgacccgattcccgatgacgaatcgatgataacagccatcaagtccctcatccgagggggcacggtggcgggggagggatgcctgcccgtcacgcaggaatcggagagcctgatgttccggcgggccgagtacaacgttctgcgcaatgaggtggggcccggtgtggatgacgaactcagggtcatccccagccgtgttccggataacttgaaacgctggttcggacgggtcaacctggtcgagcgcctgcgcgagacgcgcgtgttttgtgggttcgaacgcttgatacgggcgagggacccactcgaggccatgccatcatcggccatgaatcagctttttctgtatccgccagagtccgcgcaccagtggttgcccgccatcaagaattatggcgaagggatttttgtcgagctgaacgaggatgccgtacgtcaatggctcgctgaaaatgccggttggctggaggagcggctcgaccaagagtttgtagatcgcatggggaacgagccgaatctccagccgcctctccggagcaacgattggtcgatgcaatgggccgcccgttaccttctggttcacactctggcgcacatcatgatcaatcagatggtgtttgagtgcggttactcgtctgctgcgctgaaggagcgcattttcgtgtcgagcgatccaaaggcaccgatggcagcctttcttatatatacagctgctggggactcggaggggagtctgggcggattggtccgaatcggccggcctgagttgtttgagcccatggtgtgccgggccctctcgcgagcgtcttggtgttccgccgatcccgtgtgctcggaagacctgggtggtacggggtcgcggcgggtgaataaggcagcctgtcatgcctgcgttctgcttcctgagactgcatgcgagacgatcaatagcggattggatcgcgctatggtcatcggaacgccgcaggctcctaaatatgggttcctgtctgatctgattcggagcttttcatctgactag

SEQ ID NO: 362034 - DNA, 171 bp, Pseudomonas aeruginosa; identical to SEQ ID NO: 342422

SEQ ID NO: 362035 - DNA, 156 bp, Pseudomonas aeruginosa
atgctctttatacttgaaccccatggagttagtcgtcttattctccctagtaacctctccctcaaggacaaccgtctccccatgaaccaattcaggaaaaagaatatcatcaacgtcctcttcctccgccttgcaaaaaatactcttattccttaa

SEQ ID NO: 362036 - DNA, 1284 bp, Pseudomonas aeruginosa
atgtctgtcgtgaaacgtcactggcgccgttttctggtcgccgccctggtgctgatcgtcggtgccgccctgctgctctggagccgaccggcggcccaggcgaaactggaagccctggacctcgacgacggcggccacgccacccttgccgaacccggcgagaagccgcgctcgcgggtggtggtgatcgccgcccccgaacagcaactgaacgacgcccagatgctgaacctggctcacgacagcgccgcccgggtgatccagtacttccccccggaaaacagcgattgcagggcgcagcagtcccggctcgaagcggtcattgcccgcctcggcggcaagccgaacctggtcgccggcatcggcccgggctcgaccaccgcctggcgctggctcgccagccaggacgacgacaaggccaaggcgctctcggtcggcttcgacattgccctggccgagcgcgactgcgacgccccgctgccgcatcaggcggcgcacggccagtggctgctggcctggaacgacaacccggacgacgacaccgcggtcttcgtccgcaagcagtcgagcgcggaaaccagcatcagcgactacgacaccccgctgtccgacgtgctcgcccatcagctgcgcctgcaactgcaaggcaacgccgaggccctgccggtactcgaggtccccgcggcgcaaccctcggacatcgtcaccctgttctattccggcgacggcggctggcgcgacctggacaaggactctgccgagcatatggcgagcatgggctacccggtggtcggcatcgataccctgcgctactactggcaacacaagagcccggaacagagcgccgccgacctctccaagctgatgcaacactaccgcgagaagtggggcgcgaaacgtttcgtcctggccggctactcgttcggcgccgacatcctgccggcgatctacaaccgcctgcccggaaaggaccagcagcaagtgaaagccatgctcctgctggcgctggcgcggaccggcagcttcgagatcgaagtggaaggctggctgggcaaggccggcgaggaagccgccaccggcccggaaatggccaggttgccggcggccaaggtgttctgcatctatggcgccgaagaaaaggacgaaagcggctgtacccaatcccaggccgtcggcgagaagctcgaactgccgggcggccaccacttcgacgaggactacctgtccctggcgaagaagatgctccaggccatccgcgaccgcgagaacgctcccgacgcctga

SEQ ID NO: 362037 - DNA, 273 bp, Pseudomonas aeruginosa
atgagcatggcacttatagatcttgcaagaaattttttggatgaatcgttaagcgggaagagtttcacaaaaaaattctttgaaatgtggcgtagcgaaggtgcgtcaggcatgctgaaaaaggatgatgataatcttggcgcttgcctcaggcttatgtttggaatggcagattgcttcacggatggaccgaaggataatgatggtgagataaatgaagaggagctaaagcaggaggttagagagtttttgaagaaatataaatatatctag

SEQ ID NO: 362038 - DNA, 1113 bp, Pseudomonas aeruginosa
atggctgatctcaagatccgcaacctgcagaaaggcttcgacggccaggccatcatcaagggcatcgacctcgacgtccgcgaccgcgagttcgtagtcttcgtcggcccctccggctgcggcaagtcgaccctgctgcgcctgatcgccggcctcgaagaggccagcggcggcagcatcgccctcgacggcacggacatcaccgacaccccgccggcgaagcgcgacctggcgatggtcttccagacctacgcgctgtacccgcacatgacggtgcgcaggaacctctccttcgccctcgacctggccggcgtcgacaagcgcgaggtcgccgccaaggtcgacgccgccgcacgcatcctcgaactgcaagcgctgctggagcgcaagccgcgccagctctccggcggccagcggcagcgggtggcgatcggccgggcgatcgtgcgcaacccgaagatattcctcttcgacgaaccgctatccaacctcgacgccgccctgcgcgtgcagatgcgcctggaactggcgcggctgcaccaggaactggcggcgaccatgatctatgtgacccacgaccaggtcgaggcgatgaccctggcggacaaggtcgtggtgctcaacggcgggcgcgtcgagcaggtcggctcgccgctggagctttaccaccatccggccaacctgttcgtcgccggcttcctcggcacgccgaagatgggcttcctgcgcggccatctgagccgcaaccagggcgagcgctgcgaggtcgccctcgaatgcggcgcgcgcgtcggcctgccgctatgcgccggcgagctggccaccggcagcccggtgaccctcggtatccgcccggaacacctgaacatcgcccgcccgggccatgccttccagggcctgctgcgggtcgccgccgacgtcagcgagcgcctgggcagcgacagcttctgccatgtccgcgccgactcgggggaaatgctcaccctgcgcgtgcgcggcgatttcgcaccggactacggcgcccccctggagctgggcttcgatccggcgcactgccatctgttcgacagcaacggccaggccctcgacaaacgactgcaacaggcggcctga

SEQ ID NO: 362039 - DNA, 321 bp, Pseudomonas aeruginosa; identical to SEQ ID NO: 322269

SEQ ID NO: 362040 - DNA, 507 bp, Pseudomonas aeruginosa
atgactgatagcgatcgggaacagcagcgggagattctcgcactcctcaacaccgtttatcctgccaagatgttccgacacgatttggttaaagggctccctgcaattgaggaagagagtctgctaggcctggtcaagcaccttgaagagttgggttatgtggaggcggcattccacgtcagccatgatggccgtcaacgcgtgcggttcttgcatgccacgattacagccagaggcagtgactacctcaaggatgatggcggacttacagccgaacgggataccgtcaccattcggctgcatgccgataccatccgcgatctcattattgctcagatcgctatgtcggatgctgaatcgagtgtcaagtctcagctgatggcgcaggtgaaaagcctaccggcaaaaggtctagaggcagtggtaagcagtcttgctcgggaggggctggctcgcttgccgaacgccattcaatggctgcaaacaacgatttctgccgcactgtag

SEQ ID NO: 362041 - DNA, 516 bp, Pseudomonas aeruginosa
atgaagaaagaacgacgcgaactggaagactgggaaaagcaggagtgcgcatcgctcaaggctgctattgctgatttcaatgccgggaagccgcgcgagaagcggatcactcaggaagagctagcccacgaactgaagatgagtcagggaaccttgaacagccatttgaacggcagccggccgctcaacaaggaaatggctgcgaagatttatctcttcatgggaatccccgcctcccgatacagcaaacgcctcgcagatgagctcgaggacatcgccaaggccgttccgttatctgagacgacactcagtggccttggggctttgccgggcggtgatcgtgagcaaggcgacaatatgaccaccctccagcgattgaagggcaaggccacaccaagaagtctcgaagcactgaagcgcatcgaagaggcggccatgaatggccacctgaaggaagaggacattgtccttctagaagggattgcggctcgatttgaagaactcaacaaaaactag

SEQ ID NO: 362042 - DNA, 546 bp, Pseudomonas aeruginosa
atggtctgctacgccagcgagcaggctggcaagcggagctacagtcttgagcgaggcttgaacaaccctggcaaggcgctacagctcgccattgaaaatcagtttgacctcgccgggaccgtggcactagatgaacttgtcgccaatgacgaccgccacctcgggaacatcatctacaccccggcaaaccatgagttctggctaattgaccatgggcgagccctcaccgggacctactgggcgctttgggggctcgacgatccggcagtcgctgtgaggaaccaactcgcggactccggcgcttcggtatgggaccaagcaaagcgaaaaggtatcatcgacaaggcacgtgacctggtcaccaaatgcgctctgctttgcttagatgagcttgaccatgatggtcatttcgccaaaattgacccagccacggacaggcaggaaatcattgatttcttgcgcgaacgcattcatcacacggtgccactcctatgcaatcgactacagatggggcatctgtctttcacgcagccgaagctttcctga

SEQ ID NO: 362043 - DNA, 825 bp, Pseudomonas aeruginosa
atggcagtccaccttgagccaatcacattctctggagagaggattaccatcgcggtcgcggtagtgcccgaggatgaaactcccccgaaggtcatcagtaccctccttccggaacccctagagcaggtatttggccaatacggcaagcatctcttcaatcttgcaggcaacgtgatatccgagctccaggcatatctgttcactggcggccctctggaatcctgggagccatccatgcaaggagtgtttgtcgggaaggtaattccgacccggaacacatcaatccagaccatcatcaaatccgctctgactcactcttccctgttcagcgcaaaaggaaatgatgcggccagaggggacgcagccgaccgctctctgaacaagttccaggaagagataaaaaagttggtgctcgcctcccgcgagggaatgaaggtccgcttcaatcagaagatgccgctgtacggcggcaaggcgaaggtgtcgatcacctacgttgggactcacctggcgataaacttggcaacactcgatacgaccctgacctcgcactcgcaacagcgcgatgcagctcaccggaaaatcaatcagcttctagcgctccgagagattgcaatcggtcacaagcatgaccagttgatgatggggttgtggacgccaaagcgagatctgagcgagcatcaagaagacttgttcgatgcgtacacgacagagctcgaattcgcgtcgaatcgcgccggcgttcaatacattctggccgatggcgcaattgatctagggcaagccgcccttcccttcgcgaagaaaatcctggaagacgcctaa

SEQ ID NO: 362044 - DNA, 429 bp, Pseudomonas aeruginosa
atgcgaaaggtcatcgctcctctgctctattgcgcagcagctgcagcggccgccgagccaaccttcattcagaagctggacgggctcgcggcgcaatgctcgctcgatgggagggggaaatacacggaagctgaactggccctacgcgactacggcgaacacagccagaaattcaagcgcgcccttgatcaagcctataaggtggccggcaactgcgtgaaagaaaacctgccgaaagggaaggatgaattcaaggcagaggctatgaggtcgccactattgaaagaccgaatggctgacgcatatgcggcttgggttggctacatgaactggcttagcaccccgcacccatggggcactgatagtgatcagaaatctgcttatgaagcagcaaggaatagacttcaggcagaaatcgatattcagtaa

SEQ ID NO: 362045 - DNA, 192 bp, Pseudomonas aeruginosa
atgaccaattcccctctccccgccctgctctaccgcctcaacctgaacatcaacgccattggctcggctgtcgaggaactggcgatctggatcgagcaacgcagttccaccgagacctccgactccgtgaagctccatctggggacgctgattgagaatgcagacttcattcggaggcgctggtggaactga

SEQ ID NO: 362046 - DNA, 411 bp, Pseudomonas aeruginosa
atgagcaacgacgaccagggattggccgaaggcgaaagctccgtagatccaagaatccttcagaactatctgagaaaggagatttggcgcttcgaatgggagcagaagctggcccggcgagccatgcaattggttgggtttttctaccttatgctggttgggttcatcttcctcggtaatggtcgcttcgtctttgggaggtggtatgtcgtgctcagttttaagtcccatgcagccactgacattcctatcattctggctttggcatctataccaacggtcttgctcatagctttgatgcgttacttccaccatcgggagaaagcatcagagggacaggaatcgccgttgccgttgagcatgcaaacggcaaaggaccttctcgacatcatgaaggaccaaaagcagtag

SEQ ID NO: 362047 - DNA, 465 bp, Pseudomonas aeruginosa
atgagatacagcaccgcgcttgacgtcctgaaggctcattgggacttcaagcttccagtcgaccccatcgccattgccgagaggatgggcattgaggttcaggcaggttcaccgcttgaccgcgaaagcggccattacagctatcgcgatggtgatccgctgattacctacaatcctgctgattccgcggtacgccgtcgcttcacgatagctcatgagatcgggcatcacataaatggcgatgttgacgccccgcgtgataccgacaagcagatgagcgctagcgtgcgcgaccctagagaggttgcggcaaaccgctttgctgcatcgcttctgatgcctgccgccttggtgaagcacatgattttcgaagagaaggttgccgatcttaaaaagctggcagccaccttcggtgtttcgaccgccgcaatggaatatcgcctgagaaacctcggcatcctatga

SEQ ID NO: 362048 - DNA, 276 bp, Pseudomonas aeruginosa
atgatcagtgatgagcagttggcggagattgagcgcttcctgtcatttggcgggtcaatgctcaaggtcaaaagcgatgcagtaaagggccttatcgcccgcctgcgcgctgctgaggctgatgctaagcggtggcgccatgctcgtaacatcctgaccatcgaagcaattgagactgctcagtccgattttatcaacttcgggcttcctcctgccgaaagcgaaagcattcgtgcagatcatgccatcgacgcagccatggagcgcacgccatga

SEQ ID NO: 362049 - DNA, 822 bp, Pseudomonas aeruginosa
atgaatgagttggctttattcgctggagctggtggaggcattctcggcggccacctcctcggatggcgcacggtctgcgctgtcgagttcgagccctacgccgcaagcgttcttgtcgccagacaaaatgacggaattctcccgcccttcccgatctgggatgacgttcggacctttgacggaagaccttggcgaggccttgttgacgtggtttctggcggattcccgtgtcaggacatatcagctgccgggaatggcgccggaatcgatggtgagcgatcaggcctttggagagaaatggcacgaatcgtcggtgaggtacgaccgcgattcgtcttcgtggagaactcaccgctccttgttcgaagaggacttgccgtggtcctcggtgaccttaccgaactggggtatgacgctagatggtgtgttatgggagccgccgacgtcggggcgccccatcagcgtgatcgcatctggattttggcccacgccaacggtctgcgggaactacaaccgaccatatcctggaaagaaatcggggtttggccttgcggcagcagttcggacatggccaacgccggtggcgtcaatgagcaagggaagctcaaaagcaagtcttgtccggaaatccggagcagatcggagcaacgaccgtctagatcacgcagtcatggcttcagacaatggccaactgaacccaacatgggtcgagtggctgatggggtggcctctagagtggaccgacttaaagcccttgggaacggacaagttccacgagtggcatcggcagcattcacctatctcgcgaccagatggatctga

SEQ ID NO: 362050 - DNA, 576 bp, Pseudomonas aeruginosa
atggctgataagaactgctccatgtgcggcggcaagggctattactgcgagcacagcaccgtagaaacctgctggtgcgtgaagccgactgctgaagatgacgttattgagatcaaggctgaagcggagaggacgaaggatcttgctcgtatcgccaacatgcttcgcgaggatgctgaggtcttttccagttgcgattacgaagtggagcattacgacaaggcggcggatggcatcgaatggctgattgccgaggtggaacatctgcgcaggttcgccgccgaggcatatcaagtgctcggcgctctggacgccccggagaatgttctggacaacgcttccgatgcagccaatggagttccactgcgacacgaaacgctactgccgttcttcgctgaagactatgaggcgctgcgcaaggacgccgtgcgctaccggtggctgcgggatagctgcactcgtcaatgggacgtcatgtaccgagacattgagatagttatcaacggggatggagccgatgactgtgaagacctggacggcatcatcgacgcagccctagaaggagcaacgcaatga

SEQ ID NO: 362051 - DNA, 357 bp, Pseudomonas aeruginosa
atgaacgaccgcacactactcgaactggcggcgcgggcggcgggtttacgctcgcactggttcttcggcgaaggagaaggccttcaggtcagtaggaagaatgaaggccaccgatttaactggaacccgctcaccgacgacggcgacgcgctgcgcctggctgttacgcgcggactcgtagtaaccccagaccgagaaaaccaacgaaccctggtatcgaactcagcaggccatgaatactgcgcgatctattgggacaagctaggcgagatggcagcaaccaggctggcaatcaccgaggccgccgccgagatcggcaagtcaataacccagccgggcgccactagctctccctga

SEQ ID NO: 362052 - DNA, 408 bp, Pseudomonas aeruginosa
atgaaaagggttttgatggggcttatcctattgagcagctcgaatataacttgggcagaagccccctcaagtaaataccaggagtgtctgggtcgagtgaccttcgagataccggaggagatggagtgggcaacttatgatgcctcacgagtctggcagatatccaaagggggggggcataactttaccgccgaggtgaccgccgtaggtgacaacggcagctatgactacgacagtatgattttttacgtttccgaaaaggttgataaaaatgaattccataacgcctcaaactacataaaaggaacagcagaaatataccaagaccatcttagagaaaacataaaactagataagaaagcaataagtacgctccaaaaaaaacaagagcgaagagaaaagtattga

SEQ ID NO: 362053 - DNA, 945 bp, Pseudomonas aeruginosa
atgagcgaagggcgccagttgctcggctggggcatggccggcggcgtctgggaggccatgcagagcaaggccagcgcgagggcgcggctggaggcggacggcctgctgcgggtggccagcgcgaccacggatatcggcaccggcacctacacggtgatgacccagatcgccgccgacgccgctggcatggcgccggaagaggtgcgcttccagcttggcgacagtgcgttgcccaaggctccattgcagggcggctcgttcaccgtctcgtcggtcggttccgccgtccgcctggcctgcctgcgcctgcgccaggccctggtcgcccatgccagggcccgccatccggagctggccggcgccgccgaagagcgcttccgcatatgccgtggccatctggaagcgggcgatacgcgatacgccctggccgacctgctgcaagggctgccggaagacgcgttgcaggtggaggtggaagctgaaccctcggcgcggcgcaaaggctacgccaccgcgacccattcggcggtattcgtcgaggtgcggatcgatgaagccctcggtaccctgcgtgtgagccgggtggtcagcgcggtcgcggcggggcgggtgatcaacccgaagaccgctcgcagccagatactcggcggggtggtctggggcctgggcatggccttgcaggaggaaacccaggtcgaccatgcgctgggccgctgcatgaaccacaacctcgccgagtaccacatcccggttaacgccgatattggcgatatcgaggtgatcttcgtcgacgaacccgacgatatcgttaacgaactgggctccaagggcgtcggcgaaataggtatcgtcggcgtcgccgccgcagtggcgaatgccgtgtaccacgccaccggccgccgcctgcgcgacttcccgctgaccgtcgacaagttgctcggctga

SEQ ID NO: 362054 - DNA, 201 bp, Pseudomonas aeruginosa
atgaaattcctgaaagagttgagcgacctgaacgaaggcaccctggtgctgacatcaaccgagcgggttgcccgccacctgaggctacagtccgcattgctgcagtccatgtccggcaaaaaagcctggttcaacaaagggcgaattcaaaccgtcacgtcgtggattgaaaatgcgtgtgaatcgcccctggtttcgtag

SEQ ID NO: 362055 - DNA, 327 bp, Pseudomonas aeruginosa
atgagtgacatcgctctccgtgggttctgcaagccgaggatgtgggctcagtacggcgacaaccacaagggtgtatgtctggtctttctgcgtgaccggattgaatcgctcattgatcaccagttttcctccagccatatcattgcctcgggccctgttcggtatctgaatcggggtattgctcgtaacctcgatgagcagcagtacacaatcaacgttgacagccttgagaccgtggggcgggatgcatacttccggctccatctacaaacccattttcggcagctgttctttgagaagatgactgattggagggggggagaatga

SEQ ID NO: 362056 - DNA, 1062 bp, Pseudomonas aeruginosa
atggatagcggcagtgctgccgactcatctaccggaattaccaagacagcggttagcaatgcgaccgtgataattactgacgagtccaaacagaaagagctgacaggcactgatgccgagacgactgtcgccgctcttaatagggatacggtcaatgctcatgtcgctgcgcaaaagatagacataaaagaactggagcagcaagcgcgtgctgagcaagtcattaagacagctgtcactgcccaggcattcaagttcagtgatgacgtttaccgtacgatgttcctagatgagcatccaatttatcgtgtagagctgaacgcagaaggaaaggtggttttcgacgagtttggacacgcggtagtgcacaaactgtcgccagaggaaaaagcgaacatgcaagcaggttcgggtggtcaggtacgagttggggtcaatgggattttcaatgatgctgatgctgccgcctactatgctgaccagcataacggaggtgtcgtccagcctctttacattgttcatttcccacaggccgacagcatggtgggtgagctgatggtagcgggctatcagaaattcctggagaacaacttttggggtctgagcaactccacccaggaagttcaaaatctgatgaggcaatatggaatcagtggcctgctcctggatgctcacagccggggttcaatgacggtgggcaatgcgatggggtcacttatcaatgatggtgacagcggaattctcgccaataccgacattaatttttatggaccggctttcagcgcccagagagcagctgatctcctttatcagcttagtggtggcaccaaggaccttgtgaaccttcaaaaccacaaggatgactttgttggctcgatactaggcggaaacccagcgacgcattcgcttcgtcccgacagtagcaataaagtcaaggagtggattcgtatgttctcaagtcccaatactgttcatagctgctatggctttgcagggcgagaatgcaccgatagatataatgatgcgaggactatagaaatcaggacaaggatcgaaagatga

SEQ ID NO: 362057 - DNA, 255 bp, Pseudomonas aeruginosa
atgcggatatgttatttgtctttaattttctttgttgggttggcatcgggttgcgtgaccgtaagcggtaactatcgggtgtcggcgattgatgcgaatggtgccgagctggtcaagggtatatctgcgcaggggcgaacgatttattccgtgcgtaatgcgatctgctcccaacatagcaacgctacggtcatcatcaccgacatgcagacggggaaagccctgtcaggtgaaagtccatacaagtgccgctaa

SEQ ID NO: 362058 - DNA, 609 bp, Pseudomonas aeruginosa
atgggaagaccaatgccgccagttgatctgcttgagtccctgttgctcacactgagcccggctatcggcgtgtgggattgggttcagcgcgagatccttgctgacaccggcagcattcataaccccgatcacggccacctgattgacgccaacatcggcgtgctctgggcatcgacgggattcgcgaagcaggggcgggtcgtccttggccaagccgagcaggtgatgttccgcgctggaggctggcagaaggcccggcaagagcagcagatgcgggaatggttcggtgaagagccggacttcctcatcaccctggcggctgactactgctcgcagtgttcggacgtggagttttgctcgcttttggagcatgaactatttcacatagcccagaagacagacgagttcggcgcgccaaaattcagctcggacgggatgccgagtctctacctgcgcgggcatgacgtgaatgagttcgtcggggtggtgcgccgctacggcgccagtgaggcagtgcaagagatgatcgacgctgccagcaagccgccagaagtggcaaagatcaacatcgcgagggcctgcggaacctgtctgctcaagtcggcctga

SEQ ID NO: 362059 - DNA, 597 bp, Pseudomonas aeruginosa
atgagacttttttcatatgtggttgccagggactatggcttcgcgccgaatccatttcatggatattgcacgctggcaacttgcaagccgcagataagaaagcatgctgatgtgggggattatatagttggtatcactcctcgagcatctggaaataacatatgctatgtgatggaagttacctcgaagattacttttgatgagtactggagtggcggccggtatcaggtaaaaaagccatcctttaatatgtcttataagtattcatttggtgataatatatactacaggaagaatgatgggacttggcatcaggaaaattcgcatcatacccatgaggacggtagtcctattcaggagaatattgatgcggatactggggttacggataaagtcctaataagtgataatttttcttattgggggaaagacgctgttgagctgccgtcggaattcagtgcattagttgttgctcgtgctcataaatgtgacttttccagggattttattgagaagttcttgatttggtataggagccaggagaaagggcaaatatctattccggaaagatggttaggtagagggactttcagatga

SEQ ID NO: 362060 - DNA, 906 bp, Pseudomonas aeruginosa; identical to SEQ ID NO: 339158

SEQ ID NO: 362061 - DNA, 1425 bp, Pseudomonas aeruginosa
atgtggacttttgactttagcttgtctgatgacggtgttttctcctgggattataagttcagccctcctgcatacaaagggctaaagccctcgtctgaaagtaaagcaggtgacaggctggagcttgttaaggcggctgaagaggacgacacggatggtgtgccagcaatcttcctttcccctgaaatgcttcaaggtataggtcccataaaggggaagatttatgcatatcaccgtcgaaccgagatacttaaggaaacagggtctgcaaagctcattaccgactggatcagatcccaggcaggtgtaagggtttatcgagaccaagtccgcgtattcaactatggggagccgggagatgactggctcggcttgaatgtccgtaggattaacaggcctgctggaaaactgggtacggacagtttgctagggtatattgatcttgacttgtctctcagttctgggttgaaagaaaagacgaaccgagaaggtttcgatgagaatttaacctatagaaatcttcagcgggtagtgctcagcatttttgataagtttgagcgtttgcacggaccgcaccggaaagaaattgataaggccatcaagggtgagactaaaatagttcctgttgaagaggcttttgagtcgttaaaagaaattgcgaagaaaaataatattgagtctgaggttaaaccggtagttgactcattgcaagcacagttaaatagctatcgcactgtaatgctcaattctggcatggcaggtttgaacctgtctttggcctttcatgagatggttcatggggtcgataccctcacaaggcagcttgaggcgaacagtggtaagagtactttagaacaaacaattaccaaccttcgaaagcttctcgatactttcaaacctttgctgaataaagagcgcccaaggaagataactgccagggaactagtggccagggctcttgatatgaactcaggacgcttcaagaggcacgaacttgtactctcgaaccgcgtttcggatgatggggtttctttccctgtaagtgggcctttgaatcttttgatgggggctataaataacattatcgataatgctatttattgggcaagatatcaagctcaaaaagtcggaagacaaggcgcagtgctaattatgtcgagttgggatagcgagcgcaggagtggttcgttggcgataattgataacggccctggcttcgaacttcccctagatcaactgtgcacgccgtttgtttcaaaccgagccgagggtatgggattaggtctctattattcaaaaatggtaatggagtcgattgatgggagcctggtcctgtgctcggcggaggaactacgagacgaatttgagttttctgaagcttatgacggcgccgcggttattttccagttcaaggaggaaaaatga

SEQ ID NO: 362062 - DNA, 1029 bp, Pseudomonas aeruginosa
atgaccatcgtaaccgtaggaatcgacctggcaaagaacgtctttgccgtacacggcgtggatgcggcaggcaagccagccctcgtgcgcccgagcgtagcgcgcagcaacctgctggaactcatcgccaccttgcccccgtgcctgatcggcatggaggcatgctccggcgcccaccactgggcccgggaattcgagaagctcggccacaccgtgcgcctgatggcccccaagttcgtcgccccctaccgcctctcgggcaaacgcggcaagaacgacgcggccgatgccgcagcgatctgcgaagccgtcacccgcccccagatgcgtttcgtgccccacaagagcatcgagcagcaaggccagctcatggtgcaccgcacacgccagggattcgtggaacaacgcaccgccacgctcaaccgcattcggggtctgctctcggagctgggcatcgtgctgcccctcaaagccgccaccgtgcgccgtgaagcgctggcacgcctcgaagagctgcccggctgggccaacactgtcatcggcgatctcttgagtgaagtcacccggcttgatgaacgcatcaccgagtacgaccgccacatcgccctcatggcccgccacagcacccaggcgcagcagttgatgcaactcggcggtattggccagaccaccgccatggcactcatcagcaccgtgggcaatggccacgacttcgcctgcgggcgcagcttcagcgcctggctgggcttggtgcccgggcaatacagctcgggcggcaagcagagattgggacgcatcaccaaagccggagatgcctacctgcgcagcctgctggtgatgggagccagagcggtgcttgccgctgccatgaacacccgcacgcccaagcaagaccccatcagccgctgggcccgcagcctggccgagcgccgaggctactggcgcgccgtggtggccattgccgccaagaacgcccgcatgtgctgggccgtgctgcagcgcggagatgccttcaagatgcccgcgtga

SEQ ID NO: 362063 - DNA, 864 bp, Pseudomonas aeruginosa
atgcgcttcattcacgcactattactggcagggatcgctcactctgcatatgcgtcggaaaaattaaccttcaagaccgatcttgagaagctagagcgcgaaaaagcagctcagatcggtgttgcgatcgtcgatccccaaggagagatcgtcgcgggccaccgaatggcgcagcgttttgcaatgtgctcaacgttcaagtttccgctagccgcgctggtctttgaaagaattgactcaggcaccgagcggggggatcgaaaactttcatatgggccggacatgatcgtcgaatggtctcctgccacggagcggtttctagcatcgggacacatgacggttctcgaggcagcgcaagctgcggtgcagcttagcgacaatggggctactaacctcttactgagagaaattggcggacctgctgcaatgacgcagtattttcgtaaaattggcgactctgtgagtcggctagaccggaaagagccggagatgggcgacaacacacctggcgacctcagagatacaactacgcctattgctatggcacgtactgtggctaaagtcctctatggcggcgcactgacgtccacctcgacccacaccattgagaggtggctgatcggaaaccaaacgggagacgcgacactacgagcgggttttcctaaagattgggttgttggagagaaaactggtacctgcgccaacgggggccggaacgacattggtttttttaaagcccaggagagagattacgctgtagcggtgtatacaacggccccgaaactatcggccgtagaacgtgacgaattagttgcctctgtcggtcaagttattacacaactcatcctgagcacggacaaatag

SEQ ID NO: 362064 - DNA, 324 bp, Pseudomonas aeruginosa
atggatgtctggctgagggaaggccacttcatctggcgtggaaccaagatcgatatggaaccgatcagctttcccgcgcgccaggctttcaccgatcagaccattcctcgcttcatcaagcagttgtggggctcaactgatttcctgaaagggatggtagccgccggcggtggaactaccgttcttggccgccctctcttgaagcgccacatcacctgcccgatctacagcgcaaaagaccctgacaagtcgattgtccgcgggtactaccgcttcatggtcagtcagtatttcaaagagcatgctttgatccgccaggggtaa

SEQ ID NO: 362065 - DNA, 453 bp, Pseudomonas aeruginosa
atgacgaatgactggattcccacttcgcatgacaactgctcgcaagtagcggggccgttctatcacggcaccaaagccaaactcacggttggtgacttgctttccccaggacacccgtctcactttgagcaaggtcgcaagctcaaacacatctactttgccgccctgatggaaccagccatctggggagcggagcttgcgatgtcgctgtcaagcctagaggggcgcggccacatctacatcgttgaaccgctcggcccatttgaggacgacccgaaccttacaaacaagaaattcccgggaaatccaaccaagtcctatcgcaccactgagccgctgcggattgttgggatcgtagaagactggcaaggccactcaccggaggtgttacagggcatgttggcgtctctggaggatcttcagcgtcgtggcctcgccatcattgaggactaa

SEQ ID NO: 362066 - DNA, 420 bp, Pseudomonas aeruginosa
gtgctctttctgaaggtgctgaaggatgcgaatatcaagaacccggtcatcgctacaggattgccgaccgaattcttcgccacccacgcggctgagttcgaggccgatctgaaaaagtgggcacgagaagacggctaccatccagagctggtcaagatccttccccagttcgctggcccatggttcgatccagagctcgaggacgaagagggtaacccgcttgatcccaacgaaatggtcaaaggtaagtacggcatcatcgatatcggctacggcacgatcgacggtgggcagttcaataatggtcgtgtcagtgatatccgatacggcgaatccagtggcgtctctgacatccacaaagcgatctacacctctctgagtaaccctgagcagttgaacgagctcatcacgaagaagtga

SEQ ID NO: 362067 - DNA, 945 bp, Pseudomonas aeruginosa
atgaaaaactggttgattttgattctcggtctgccgaccgccaatgccaccgaacgcatgcgagcttggcgcgctttgaaagccagcggcgcggcagtcatacgcgatggcgcctacctattgccgaatagcggtgtctgtcgtgaagtgcttgcgtctgtcgaacgtgacattctggcgatcaacggcaccgcctatgtcctgcctgtcgtcgaccctgacggtgaacgctttatcgagttgttcgaccgtagcgatgactacggcaagcttggtgtagagatcgaagaatgccgtggacagttgaatgctgaaaatgcgctggcgacgaccaaacaaattcgtaagctacgcaaagcctacgatcagatagccagcatcgattactttccaggtaagccgaagcagcagattgattcggctttgcaggagttggagacagcagtcagcagagccctgtctccggatgagccgcacagcagtaaccaaccaataccggcactcaatcttgacgaatatcaggggcgtatctgggcaacgcgcaaacgtccctgggtcgaccggctagcgtgtgcctggctgattcgccgcttcattgacccgcaagctcagatcctttggctgaacactccacaggactgtccggtagatgcgttgggttttgattttgatgacgcgaccttcagccatgctggtaaccgcgtgaccttcgaaaccctgcaagccagttttcaaatccagaaaccaggtctagggcgcattgctgcccttgtgcattacctcgatgtcggcggtattcagccggtggaggctgctggcattgagcgggtgctggcagggctgcgcgaaaccataaccgacgacgaccatttgctggcagcagcaagtgccatcttcgacggcctgctcgccgggttcgtgaaagaggagaaacccaatgagtaa

SEQ ID NO: 362068 - DNA, 744 bp, Pseudomonas aeruginosa
atgacgacggctcatacaaccccgcagtcctcactcaagagccgaagcagtagcctggatctgatcaagtggctggcgatgctgaccatggttatcgatcacttgcgcttggtgtggccggagatgagcaatctgttcattctggggcggctctcttttccgctgttctgtgtcgccattgccgccaacgtggcgcgctccaaatcgggcgaatggctgactgccgcgaacggtcgatacctcgcgttgatgctgttgttcgccgccatttcagaagtgccttatcgctacatcagcacctcgggatcattcaacgtgttggttaccctggcattggggctggtgattgcctggggatggcagcatcgtactttgttgagcgcagcaatggcgttgatggccaccgcagttgcctatgcgctggatgatccattgatgtatggattttacggggcacttgttccagcggctgtcctagtagcaatcaagagccccggtgttctttggttgctgccagcggctctatgcctgttgagcaatacccgcagtagcatcgtaaccagggcgttggacttggaagtctattcattgttggccttgagcactgcgttcgccgctcccctgatcggactctggctactgcgtcagactttcaccttcaaggtctggccagtgcggcaatggggctactggttttatccagggcaccttgccgctctgcaagcgctacggtttctgatctga

SEQ ID NO: 362069 - DNA, 438 bp, Pseudomonas aeruginosa
gtgtttgaactcaccagctacgctggcctgttcctggcggcattcggtgccgcgacgttactgcccatgcagtctgaagccgtattggtcgggatgttgctctccgaccggtatatcgtctctacgctcttggcggtcgccacctttggcaacgttcttggctctgcactgaactgggtgctgggccgttccgttgaacgattgcgccacaagcgatggtttcccgtgagtgagagcaagctcgaaaaagcccagcagtcctatctgcgctacgggcgctggtcattactgctcagttgggtgcccatcattggcgatccgctgacggtcgtcgccggagtcatgcgcgagccattctggagtttcctgctgattgtcatcctggccaagggcgtgcgttatctcgtgctgaccgcagtcacactggggtggacatga

SEQ ID NO: 362070 - DNA, 1137 bp, Pseudomonas aeruginosa
atgcccaacttcgctgaactgctgcaacaaggcggggctcacgcctggctgtatttcccgagtgctattctgctcggagccttgcatgggcttgaaccgggccattcaaaaaccatgatggcggccttcatcgtggccattcgcggctcggtaaaacaagccgtattgttgggcttggccgcgacgctgtcgcacaccgctgttgtgtggttggtcgctatcggcggcatgtacctgggcaaaggtctggacgctcaaaccaccgagccttacttccaactcgcgtcctctgctctgatcatcgtgattgcactatggatgctatggcgtacctggcgcggcgagcagatgtttaagttcgagcaaggggatgatcaccaccacggcgagcatgaccatggtcatcacgatgagactcatcgtatcgatacaggccatggtcgcatcgaactgtcgatcttcgaagatggcatgccaccgcattggcgcctgaaggcactgaccgggcatgcgtggcctgcttcagacgttcgtctgaccactacccgcccagacggcagcactcaaacgttctctttcgtcgaacgcgaaggcttcttggagtcgatggtcgatatcccggaaccgcatgaattcagtgcgcgcttgagtcttgggcatgccggccactcccatgattacgacctggaataccaggagcatgatcatgggcatgcgcattcagagctggaaggtctggagttgtcaattgatggttatcaggatgcgcatgaacgtgcacatgccaacgatatccgtaagcgcttcaccaatcgtgaggtgaccacgggccagatcgtcatgttcggtttgacgggcggtttgattccttgtccggctgccatcaccgttctgttgctgtgtcttcaggttaaagaagtcgcgctgggaggcatgcttgtcctgtgcttcagcatcggtttggcgctcaccttggtggccgtaggtgctgcggcagctattggcgctaagcaggcttctaaccgctggccatggctgggcaccgtggctcgtcgtgcgccgtacctgtccagtgtgttgatcatcggtgtcggcctgtacgtgggcttccatggctggatcggcctgaacgcataa

SEQ ID NO: 362071 - DNA, 645 bp, Pseudomonas aeruginosa
atgagcagacgtgcaatcgtcctcgtcatcagcattcttactgcgctcggcttcgctgctgcggcattcgtttatgatcgatattcggcaagcgaagaaactccgccagcggccccggcaaccagctccttggtgcgcttccattcgccagttatcggtgccgctaatgcgccagtaaccattgttgagttcttcgatccgtcctgcgaagcctgccgtgccttctttccactggttaagcagatcctggctgagaacccgaaagatgtgcgcttggtgctgcgttacgtcctcttccatgaaggctctgaaacagcggcaagaatccttgaaactgcgcgtaagcagggggtctatgagccggttctggaggcaatcatcgcggctcaaccgcaatggcacagtgaccctcaggtgctcaaagcctgggaggctgctgaagctgcaggcttagatgtggaaaaggcccgcgcagagatgatggctaccgatatcaccgaaacgcttaaaacagacgcccaggatgcccaagctgctgccgtgcgccagacgcccacgttctttgtgaatggcaagccgctcctgagctttggtgcacagccactgattgatctggttaaagctgaaatcgaacaaagcaaataa

SEQ ID NO: 362072 - DNA, 345 bp, Pseudomonas aeruginosa
atgaaagcagcattgcaactcgcaattgaacaagcctttcagcaggcccggcaggccatgcaggaacagcgcagcgcagatgcctttcaatggttagagcgcgagcacatcctgacccaacgccaacccgtgctgcatgctgggtcacactggctgatgcttgtgctcggctggcagaccggcgattaccgcgaggtcgcggggcaactaccacgtattttcgcggccctgctgttctccaaaatctgggtgcctatcggcaatacaggccgctccagggtcagtgctttcaagcccatgccggttcccgaagaaccacagaccttgcttgccgatgacaagtaa

SEQ ID NO: 362073 - DNA, 477 bp, Pseudomonas aeruginosa
atgcaaattgatatctctacccagctgccatgctcactggcagaggtgatcgcccaggtgcgcacgccacgtctgctgcatcaggttgcatcaccgttgctgagtttcagcccgctgactcccgttgagtttcctggcacctggagcgagggcacttactgggtcaagctgaagttattcggcgtacttcccattggccgtcaggcgattgtgattacatacccgcagacggaaaatgctcagattttcatgctaagagacaacggctacagcccgctgatcagcaagtgggatcacctcattacggcacaagaggtcaacggcggaacgctttaccgagatagcgtgaccatcaaggcgggcgtcctcactccgttcgtctggctatttgcgcgcctgttctacgcccaccgtcagcgccgctgggcaaccttggcggcaaatggctttaactacggaaactctcagccgctgtag

SEQ ID NO: 362074 - DNA, 297 bp, Pseudomonas aeruginosa
atgcaccattactgccatgagctggaatatacgcagtgcgcctgccagctccagctcgtcagcgaaatgctggcttacacggcgggagtgagcagcatgcccgaatcacgcaaggtgattcgggtggacgcttacgagcatccaaacaagatcaaccggcgtcacccccagccggcttgtcacatcagcccggcgctatcgatctatctgagtgcaccgtcctatgagctggcagtcatgaacattcggcctgatcaaggctggagctctctcgacctacccgtcggattctattga

SEQ ID NO: 362075 - DNA, 1326 bp, Pseudomonas aeruginosa
atgcttaataaaaccaaactatcccttgcagtattttcggcgattgtcagtgcagctccgctcatggcggccgcagaagagcaagccgaaggttttgtagaaggtagcagtttcaatattctcaaccgtaacttctacatgaatcgtgactttcgtaaaggtcagtcgagcaacactgacaatggttatactgaagcttgggcacacgggatcattggccagttcgagtcgggctttacccaaggcaccgtaggctttggtattgatgccttcgccatgctcggccttaaactggataccggggatggtcgatatggcccaggtggtactgttaatctgctgccggtaaatagtgatggtgaagccgaagataactactccaaagtgggtggtgcagtaaaagcccggctattcgacaccgttgtcaaagtgggtgatgtgttccccatgacgccggtggttcactacggtgactcccgcctgctaccggaaagctttcgcggcgttacggttgagaacacaagctttgatggtttgacccttcagggtggccgcctgcatgccatgagccagccgcaggtcagcaccatgcgtgatgagttcgcaaccttctatgcgggctctgtcgcgtctccatgggttgcctatttcggcggtgactattcgctaaatgacaacctgagctttagtctctatagcagccaactcaaggatgcttggaagcagcactatgccggtacgtccttcacctacccgctgaccgacagtgtttccttgttcggtggcttgaactactacaaagctgttgatgacggccagcagctgttgggtgagttcgataacgacatttacagcggcaaagtgggtgtgcagttcggtgcacacagcgttgccctgtcgcaccagcgcaacaacggcgacgatgacttcgactacctgcgccagtctgattccatcttcctcgacaactctattcagtacagcgacttcaactcgccgaaagagaagtcctggatgctgcgctacgacctagatatggccagctatggcgttcctggactgaccttcatgacgcgctatgcgctgggtacagatgcggactattccgacgccaacagtgtgtatatgcgtcgtgatgccgatggcaacccgctgactgaccagaagcgctgggaacgcaacatcgaagccaagtacgtcgtccaaacgggctcactgaaagagatgtccttccgtgttcgccagatgactacccgcgcaacggattacgagtcggatctggacgaggttcgtctgatcgtcgagtacccactgagcgtgctctaa

SEQ ID NO: 362076 - DNA, 969 bp, Pseudomonas aeruginosa
atgagtagggatgcacttgaacaaaaccagataccgatctatttcgtcgcggtcattgcagcggcaatcggtgggttaatagctactgcagcggcgcagagcctgaacgcattagtgaccccgactatcgccgtgctgatgtacgcgatgtttctgcaaattccctttcttgatctccgcaaaagtcttagcaacaaacgcttcatgtcagccttgcttatcgccaatttcgtactgattccactgctggtatgggcactcaccagagggctcgcagaacacccggcaatcctaataggcgctcttctagttttgctcaccccgtgtatcgactacgtggtggtctttactcacattggcaaaggcgactcgcgtgcgattcttgcagcaacccccatcctcttgctgttgcagcttgtgctgttgcctgtgtacttggctttcatgctaggggagcaatcccgagtcgttatctcgatagcgcctttcgctgaagcctttctcgcactgattgtcgtgcctttattgctcgcggttgctacagcagccttggctaagcgctcacggttcgtaggtcgctggaacaccgtatgggcatggatgccagtccctgcgatggcggcagttctcattgcggtggttgggtcgcaaatctcgccggtggttcgtgatatcgaccagcttttaccggtgatcccggtgtacatcggtttcatgcttttggcccccgtagtgggcgcactggcttcaagagcttataaactgcccgcctcgacggcgagagcggttactttcagtacctccacacgtaactcgttggtggttcttccgctggccctggcattgcctgaagaagtacgggggcttgcagccgcagcggtcatcacccagacgctggttgagttggtgggtgagcttgtctacatccgggcagttccgattcttatttggcgtaaaaaaagccgctga

SEQ ID NO: 362077 - DNA, 3123 bp, Pseudomonas aeruginosa
atgtacgaacgattaattcgcttcgccatcgaccagcgctggctagtcttgctggctgtgctcggcatggcagcgttgggtgtttacagctaccagaagttgccgattgatgcggttcccgacatcaccaacgtgcaggtgcagatcaataccgaggcaaagggctactcgccactggaaaccgagcaacgcgtgacctttccgattgaatcggtaatggctgggctgcccaacttacaggaaacgcgttcaatctcacgttacgggttgtcgcaggtcaccgtcattttcgaagacggcacagacatctacttcgctcgtcagttggtgaatgagcggatacaggaagcgcgtggaaatctacccagtgatctgtcgccgagcatggggccaatcgcttctggtctgggcgagatctacatgtggaccatcgaggcgcaagacggtgcgaagaagccggatggcagcacctatacaccgatggatctgcgtgagattcaggactggatcgtcaagccgcaactgcgaaccgtcaaaggtgttaccgagatcaacaccattggcggttatgccaaggagttccaggtttcacccaagccggagcgcctggtcgcacatggcctcagcctgcaggacattgtggttgcgttggagagcaataatgccaacgttggtgcgggctacatcgaacgcagcggcgagcagtacctgatccgcgctccgggacaagtcggcaatatcgctgacatcgccaacatcatcatcaagaacaccgatggtgttcctgtgcgcatcggtgatgtggccgaggttggcctgggtaaggagctgcgcaccggtgccgctactgagaacggccaggaggtggtgctcggcactgcctttatgttgattggtgagaacagccgctatgtatcgcaggctgtcggccagcgcataaaggagatcaatcgcaacctgccgaaaggagtcatagcgaagacggtctatgaccgcactgtattggtcgataaggccatcaatacggtgaagaagaatctgatcgaaggcgctctgctggttatcgctatcctgttcctgttcctgggtaacattcgggcggccctcatcaccgcaatggtgattccgctgtcgatgctgttcacctttacgggcatggtcagcaacaaggtcagcgcgaacctgatgagccttggcgcactcgatttcggcatcatcatcgatggtgccgtggtgatcgtagagaactgcgtgcgtcgtttggctcacgcccaggccgcagcaggccgaacgttgacccgtaatgagcgcttccatgaggtgttcgcggcgtcgaaggaggcgcgtcgtccactgctgttcggccaactgatcattatggtggtgtacctgccgatatttgcgctgaccggcgtggaaggcaagatgttccacccaatggcgttcaccgtggtgacagccctgttcggagccatgatcctctcggtgacattcgtcccggcagctgttgcactgttcctcaatggcaacgtcagtgaaaaagaaaatcggctaatggcctgggtcaagcaaggctacgcgccgttgctagattgggtcatggtcagcaagccgttagtgctgaccattgcgacagtcatcatggtgctttctggtttagctgcttcgcggatgggcagtgagttcgtgccgagcctggatgagggcgatatcgctttgcatgccctgcgtattcctggcactagcctttcgcaagcaattgaaatgcaggtgcaactcgaacaacgaatcaaatcctttgccgaggttgatacggtgttcgccaagcttggaaccgctgaagtcgcaaccgatccaatgccgccgaacgtggcggacaactttgtcatgctaaagccgcgcgaccagtggcccgatcctgatcgcagcaaagccgatttggttgcggcgatgcaggaggcggttgaacaggtttccggcaacaactatgagttcactcagcccattcagatgcgcttcaacgagctgatctccggcgtacgcagtgacgtcgcagtgaaagtgtttggcgatgacatggatgtgatgaacgagaccgccgagcaaatcgctgaggtgctggagggtattccaggagcagctgatgtgaaggtcgaacagaccaccggtctgccgatgctcagcgtacaaatcgaccgtgagaaagccgcacgattcggtttgaatgtctcggagattcaggacgccatttccaccgccatcggcgggcgcgaggcgggtgcactgtttgaaggtgaccggcgtttcgatatccaagttcgcctggcggacgagtggcgcaatgatgtcgacaagatccagcagctgcctattcgtctggccaatggcgatgggctggatggcccagggtttgtgcgcctggctgatgtggcgagcgtggtgtccgcaccggggccgaaccagatcagccgtgaaagtggcaagcgtcgcgtggtggtcaccgccaacgttcgcggccgcgatattggctcttttgtcgccgaggccgagagcaagatcgccctggcggttagcgtccctacaggctactggacgacctggggcggcaccttcgagcagcttcagtcggcagccaagcgcctgcagattgtcgtaccggtctcgttgctgctggtgttcacgctgctcttcatgatgttcggcaatgtcaaagatggcctgctggtattcaccggcgtgcccttcgcgctgaccggcgggatcatggccttgtggctgcgtgatattccgctctcgatctctgcgggggtgggtttcattgcgttgtcgggtgtcgcggtactcaacggcctggtgatgatttcctttattcgcagtttgcgtgagaacggcatggggctggacgaggctattcgtgaaggcgcgttgactcgtttgcggccggtgctgatgactgctttggttgcgtctctgggctttattccaatggccactgccatcggtacgggcgcagaagttcagcgccctctggcgacggtggtgattggcggaatcctgtcttcaaccgtgctgacgctgctggttttgccattgctctaccgcttggcccatcgtctgcgctaa

SEQ ID NO: 362078 - DNA, 342 bp, Pseudomonas aeruginosa
atgaaacaagttacagctatttttcgcccgatccggcttgaggccgtcgagcaagctttgcatgcactgccacacctgcctggatttaccatcctgcccgcccatggtcatccacgtggccacggcaaggatcacagctacatcgccgacgagtggaaccccgacgcccatcagcatctcgtgctgctggcgttctgttcagaagaagttgccgatgagatcgtccatgccatcgagaaggccgcccacacaggtgtacccggtgatggaatcgtcgccgtggcccctttgaccgacgcattgcgcatccgtactggagagcgcggtgatgctgcgctttag

SEQ ID NO: 362079 - DNA, 1590 bp, Pseudomonas aeruginosa
atggcatcaacaactcccagaaagcagtggctgatgattgtggctgttgtcgtcatcggtttagccgtggcgggcctgattctaagtggtagccctggtaagtccggggaggaaggccatggccatgatgagagtcatgaggatgtatcggctcacgcagatcccgagcaccacggggaggcttcggccgacgagcatgaagaggccgatgagcatgcagataaagagcaccatgaaactgtagaacccaccaagggcgagcatggcggcaagcttttcaccgagggtgattatgcgcttgaagtgacgatttttgaggagggcgtagagcctcagttcaggctctatacctacctggacggcaagcttctaaatcctgctgaaagcacggtgcaagtgaccttgttgcgtcttggccaacctgcgcaaatcatcaatttcagcaaagagaataactacctacgtggcgatgccgcggttgtagagccgcattcattccaggtttccatcagcgccacgcacagtggcaagagctattcgttcggttacgagcaggttgagggccgcgtgaccatgacggatgcgcagcttgagcagggtggcgtcacgctcgccactgctggtcccgcgaaaatcgcctccacgctgcaagtgctcggcgaggttcgttacaacggtgaccgcacggttcaggtgaccccgcaacttgccgggcgcgtcgactcggtggcggttagtgctggcgatacggtcagcaagggtcaggtattggccaaaatctccagccaggcgctggccgaactgcgtggcgagctactggccgcccagcaacgctctgcgcttgcccgcacgacctatgcacgtgaaaagcaattgtgggaagagaagatttccgccgagcaggacttcctgcaggcgcaagttgccatgcaggaagctgctatcgcagtgcagcgcgtccagcaacaaatcgcttcgctgggcggtgcaccggccaaaggccagaatctcaccgaattcgagattcgtgcccctatcgatggcgtgataaccagcaaaagcatctctgttggtgaagtactcaaagaggattccgcagtctttaccgtctcggatttgtcgaccgtatgggtggactcaaccgtcgcggcgaaagacttgggcgtaatcgccgaagggcaaaacgttgtcgtgagctccagcgcattcgccgccacggctaagggctccatttcctatgtcagcgctctggttggggcgcaaacccgctcagcgactgctcgcatcgtgctagctaacccagatcggctatggcggcctggtttgccagtgacggtcgaggtgattgccgaggagaacaacgttcccgttgcagtagcggtcgaagcgatccagaccgttcgcgattggcaggtagtgttcggccgcttcgataaccagctagaagctcggcctcttgagctgggcaaatccgacggccgcttcgtcgaggttatctcgggtctgaaggcgggcgatcgatacgcgctgaagaacagcttcctgatcaaagctgagcttggcaaagccggcgcgagccatgaccactaa

SEQ ID NO: 362080 - DNA, 909 bp, Pseudomonas aeruginosa
gtggcgattgatctggagcgtaagaaaaacatcttgcgcgctgaggtcatccaggccttttactcagccctgcgtgcccaggaaggactgcagctttccactcagtcgttagaccttgcccgtcgcggacttcaggtggtcgaagggcgcgtaaaggccggcaaggcttcgccaatcgaaatttcgcgtgctcaggtgcagctttcggaaattcaactggagctgaatcgcgcacgcctcaatcaaagcaatgcctacaagcaactggcgctcataacgggtgccgagacaccgaacttcgcgcatgtcgagggtgatcttgagcgcctgccgtacctgccgtcgcaggctgagatgcttgcacgcataacagatacagcggacctacggctggccagcacgcacatccagcgtgccgagtcttccttggaactcgaaaagtcgcagcgcattccagacctcaccgtcagtgttggcagccaatacgacgaagggcttggcgagcgcgtcaatttgctcggcttgtcgatgcctattccgttgttcaaccgtaaccaaggcaatgtgctggccgctgctcaaggagctgaccaagcgcgggatttgcgcaatgccgcagaactccgcctgcgcgcggaagcccagcaggcatttgagcagtgggaaagcgctagaagtgaagtcgactcgatcagcggcacactgctgccgaccgcgcagcaagcagtagagggcgcagtacgtggattcgagatgggcaagtttgcctttatcgatgtactcgatgctcagcgcaccctcgtaagcatgcgctcccagtacctgaataccctggatgaagctatctcggcctgggtgagcttggagaagatttacggctcccaactcaacatcgaattcaaaaaataa

SEQ ID NO: 362081 - DNA, 675 bp, Pseudomonas aeruginosa
atgcgaatccttattgtcgaggacgagcccaagactgccgaatacttacaccaaggtttaagcgaaagtggctatgtagttgataaggcagccactggcgtggacggtctccaccttgttaggcaacacgcttacggcttggtagtgcttgatgtaaacctgcctgaaattgatggctggggcgtgcttgagcatatacgcagtaacagcagtacacgcgtgataatgctgactgcacgcgggcgcttagtggataaaattaaaggcctggatttgggggcagatgattatttagtcaaaccgttcgagttccctgaattacttgcgcgaattcgtacattgctacggcgaagcgagcaaattccagtaccggaagtgctgcgggtagccgaccttgagcttgatccggcgaggcaccgcgcgttccgtggtgagcagcgcatcgacctgaccactaaagagtttgcgttgctgcacctactgatgcgccgctctggggaagtgctatcgcgcacccagatcatttcgctggtctgggatatgaattttgactgcgacacaaacgtcgtcgaagtctccatccgcaggctacgcgccaaaattgatgatccgttcgataacaaactgatccacaccctcaggggtgttgggtacgtgcttgaggaacgggcatga

SEQ ID NO: 362082 - DNA, 1404 bp, Pseudomonas aeruginosa
atgaagccggccagtctatccatgcgccttggcctgtcggtcagcgtgatgggggcggcactggttgttctgctagcggcactcgcctacttcgcgcttacccatgagctggactcgttggccaagcagagtcttgacggcaaactggagcagattcagcacaatctcgccgaagacatgagtgcacatgcaattgcccagcaacctcacgagttgctggatctggtcatggggcatgacaacctgcacctgacgatctacgggaaaaagtcaggcaccaaattactcctgaatctgggtgagaaatccagggagcccattcttgccaacataccagcaggcgatacccctagttaccaaagctggtcggatactgagggaaacaacttcctgaccgcatccaaggtgatgctgctcaacgacggcggccacgtcagggtcttactctcaattgatcgatctgccgacgaagcactgctcagtgcctacctcaagtcaacactgatcgcactccctcttctgctcgcgctgattggcatgggcgcatggtggatcgtgcagcgaggcctttctccgctccggcaatttcgccaggttgcatcgctgatctccacacaggatctgacccaccgaatttccgtggataagcttccacaagaactcagcgcgctggcccacggcatcaacttcatgctgcatcgacttgatggcggcgttcagcagctatcgcaattctctgatgacttggcccatgagttgcgttcgcccatcaccaacctgatgggcaaagcccaggtaactctctccagagagcgtccgccagaggaatacaaagccgtactggagtgctgtacagaagagcttgagcgcgtcacccggattgtttccgacatgctgtttctcgctcaagtcagccacccggcgtccctggttcccttcgagaagattgccctagaagatgaggcaagacgcgttgtggatctgttcagcatctccgcggaagagaagcagatcagcctgagcattgtcggagcaggcctaaccttcggtgatcggctgatggtgcagcgcgcgatttcaaacctgttgtccaatgcgattcgacatagccccatcggcgcaaacatttcgttgctgatcgaaaagcacagcgaaaccgtatcgttctcggtggaaaaccccgggattggcattcccgcacaacacatccctcatttgttcgaacgcttctaccgtgtcgataccagccgctctcgtgccgaaggtggaacagggcttggcctggcaattgttcgctcgatcatgagcctgcatcagggcacggtcgaggtcagcagcctgccaggcagcttcaccgtgttccgtttgatcttccccaaagtccgcaatggttcctcgacctag

SEQ ID NO: 362083 - DNA, 1260 bp, Pseudomonas aeruginosa
atgaagaagaccctcttggcagtcgcggtgagtactggggtactcagtcttagccagccagcctccgctgaattttttgcagacagcaaagccggtctggaagcgcgtaacttctatttcaatcgcgacttccgccaagactcagccagccaatcaaagcaggaggaatgggcccagggcttcctgctgcgctacgaatccgggttcaccgaagggacagtcggcgtgggtatcgacgccatcggcatgctgggtctcaagctggactccagcgctgatcgttcaggcacgggccttctaaaacgcaacaaagaagcacctcgtgcagcgcaggatgaatatggtgagatgggcttaaccgcgaagctgcgcgcttcaaacagcgtgctgaaactgggcacgctgcaacctcgactgccaaccgtccaagcaaacgattcgcgcctgctgccacagacctttcaaggcgggcacctgaattcgctggagattgccggcctgaccttcgatgccggccagctcaaacaagtaagccagcgcgactcatccgatagcgaagacctcagcattaccagcggcgcagcccgcgctatcagcggcggcggaacccagaatagcgatgaattcaacttcgccggagcaacctacaagtggaacagcaacctagccaccggctacaactacggcaatctagacggtttctacaagcagcatattttcacggtcctgcacaccttgccgctaggtgacaagcaatcgctgaaaactgatctgcgctacgctcgctccaccgacgagggcaacagcaacgtcgacaacaaggcattcggggcgatgttcacctatgcatttagcggtcacgcactcggtgttggttaccagagcatgagcggagacaccggctacgcctacatcaacggcaccgatccgttcctggtcaactatgtgcaaatcggtgacttcgccaacaaagacgaaacctcatggcaggcccgctatgacttcaactttgccagcgttggcatccctggcttgacgttcatgacccgttacctgaccggcgacaatattgatctaggcgcaggcggtgccgatggtaaggagtgggagcgcaatactgacatcgcctatgtctttcaggacggtgcgctgaaaaacctgggcgttaaatggcgcaacgccacactacgttcaaccaacttcggcaacgacgttgatgagaaccgcctgatcgtgagctacacccttccactgctgtaa

SEQ ID NO: 362084 - DNA, 207 bp, Pseudomonas aeruginosa
atgaaatcgatcaaaaccctgtttgtagttgctgccctgagtgtttccagcctggcgatggccgaaggcggtgctgatcgcacgtttgcacgcatggaacaagcccgccaggtctcgctggaagcctatcagttggccaagcagcagaacgatgaagctcctgtcgccggcagccaagccaaacaggcggaacacgccagctgctga

SEQ ID NO: 362085 - DNA, 795 bp, Pseudomonas aeruginosa
ttgagcctgatcgccctacagactgcatttgaaacttacctgacaggtgacagtgccctgccctccaacgagcttttggagcagatccgaggtagcacagcgctgagtgctctcgaaggcctgcagatctaccacaacgcttaccgttcgcgcctgcttgcggtcttgcgagaagacttccctgccctgcttcactggatcggcaacgaatcattcgagcagctcgcactggcctacttggccgcctggccaccacgacatttcagcattcgctggctgggcgagaagctgcccgagttcattagcagctacgtcgaagaaccccaactatcgccgatgcgcgaactcgcggaactggaatgggcctttacactggccttcgacgctcaggatgtcgaagcgctttcgctggagaccatgagtgatttttcggctgaagactggatttcactcagggtttccctgactgcatctgcccggtggttgcagctgcagtacaacacgctggagttgtggaaagccgccaagtccggcagcttgctgcctgatattacccgcctgccaacgaacctagcctgtcttgtttggcgtcatgaactcgtctgccagtaccggagcctggagccagcggaggcttcggcattgcagtttctcatcgagggcggatcgttcgctgaactctgcgagtcgttgagcgccacgcatggcgagcaagctcccttgcaagccgcgacctggttgaagttgtgggtcaacgacggtttgctaaagcgcggccagctattacacgaatga

SEQ ID NO: 362086 - DNA, 2280 bp, Pseudomonas aeruginosa; identical to SEQ ID NO: 328385

SEQ ID NO: 362087 - DNA, 861 bp, Pseudomonas aeruginosa
atgagtgagtttaaaatagatagtatttacgcattattgggactaatctcaaaaacaaaaaaagacggtcacaccctatatttcagaggacaaaaaagaaaatataagacggtcatgccatcaatcgaccgagatggcttgttagaaaatgaagacaagctttttaaggagttcattatcagaaaccctgatgagttcaaaggccaaagatcgacttttgaaatccttacaaaaatgcagcactacggtttacctacgcgacttctagatatcacgacaaaccctcttgttgcgttgttttttgctgtggaacttgatgaaaaaacagaatccgaaccaggcgacttcataatctacgtgataccagacaaatttataaaatattatgactcagatactgtcagcgtagtttccaatgtcgtaaaaagaccatcagacaagttagacattagtagaatttctcgaaagttttcagagaacgagactaaggagcagtgggttaacaggttcaatcgccacattcacatcaaatatctgctacatgagataaaaaatgaaaagccgtacttctctcatgttatacaaaaagatcaccttcagtcgatctggtgcgttaagccactactcaacaatcgaagaataataaagcaagacggagcttttcttctatttggcatagataaaacaaaaagaaagcttgccaactacaaaaaatcagagtttcaacccctgagataccaggtcgagaacaaagcagaacttagagagcagctagaattactggggttttcaaaagataaaatttacccagaaatggatacaaccgcagattaccttaaggaaaaatataaaaaatcgtaa

SEQ ID NO: 362088 - DNA, 387 bp, Pseudomonas aeruginosa
atgagtgcgggaagtcagccgaccgggacggtccatccgcgttccctgtcgctcctgacacatgaaggtatcgacacgggcgaactgcacagcaaatcatgggacaacctgccgctggccccggatgtggtcatcactgtgtgcgcaaatgctgccggggaaacctgcccggcttatcttggtccggtactgcgtgcgcattggggtgttgacgatcccgctcatgccacagggaccgaagcggaaatcgaagccgcgttcacgacggcctaccgtatcttgcgacgtcgcatcgaagccttcctcgcgctgccgttggagcaacttgtacacgaccggacacgcttgaaggtggaactggatcggattggagcgctttcagcgtag

SEQ ID NO: 362089 - DNA, 369 bp, Pseudomonas aeruginosa
atgaagaggatcgaagtgtttgacccatcgctgtgttgcagcaccggcgtctgcggcgtggatgttgaccaagccctggtgacttttgccgctgatgtcgattgggcgaagcagaacggcgcgtacatcgagcgctacaacctggcgcagcagccacagatgtttgccgacaatgcgaccgtaaaaggatttttgcagcgctccggtcaggatgctctgccactgatcctggtcgatggtgaagtggccctcgcggggcgttatccaaagcgggctgaattggccctctggatcggcattgatcaaccggcagacgccgccaaaccgacaacgggcggttgctgctccggcccgcgtggctgctgctga

SEQ ID NO: 362090 - DNA, 1767 bp, Pseudomonas aeruginosa
atgatgaaattcctgcaacttcctccccgttttctgtttttcacaggcaagggcggcgtcggcaagacgtcgattgcctgcgccacggccattcagttagccgaagctggaaagcgcgtcctcctggtcagtaccgacccggcatccaatgtcgggcaggtatttggtgtcgatatcggtaatcgcgtcacaccgattccggcggttccacgtctttctgctctggagattgatcccgaggcagcggccagtgcctatcgggagcgcctggtcggcccggtccgcggcgtgcttcccgatgacgtggtgaagggcatcgaagaatcgttgtccggcgcgtgcactaccgaaattgccgcatttgacgagttcaccgcgctactgaccaacgcggcactcacggcggattacgagcacatcatctttgatacggcacccaccggccacactatccgcttgctgcaactgccgggtgcgtggagcggtttcctggaagccggcaagggcgatgcctcgtgcctcggcccattggccggtctggaaaagcagcgtactcagtacaaggcggctgttgaagccttggctgatccgctgcaaacccgcttggtgctagtcgctcgcgcccagcaggcgaccttgcgcgaggtcgcccgaacccacgaagaactggccgctataggcctcaaacagcaacatctcgtcatcaacggcatcctgcctcacattgaagccgctaccgacccactcgccgctgcaatccacgaacgggaacaaacggcgctgaagaacatcccggctacgttgactgcgcttccgcgtgatcacgtagaacttaagcccttcaatctcgtcggccttgaagcactgcggcagttactgaccgaccttcctccacaagcacccgcagcggttgattccccgatcgaactcgacgagccaagcgtggccgagttgatcgacggcatcgcggcggatggacacgggctggtcatgttgatgggcaagggtggagtaggcaagacaaccctggcggccgccatcgcggtcgaactggcgcatcgcggcttgccggtgcatctgacgacctccgatcctgctgcccacttgaccgacacactggattcctcgctcgacaatctgactgtgagccgaatcgatccgcatgccgagaccgagcgctatcgccagcacgtcctggaaaccaagggcgctcaactcgatgccgaaggccgcgcgctgttggaagaggatctgcgttcgccctgcacggaagagattgcggtcttccaggcgttctcacgcatcattcgcgaggctgggaaaaagttcgttgtcatggacacggctccgaccgggcacaccttgctactgctcgacgcgacgggcgcgtatcaccgcgaagtgtcacgacaaatgggcaagaccggcgtgcacttcacgacgccgatgatgcaattgcaggatccgaagcagacgaaggtactcgtcgtcacgctggcagagacgacgccggtactggaggccgccaacctgcaagctgacttgcgccgtgccgggatcgagccatgggcctggatcatcaacacaagtgtggcggcgtctttggccaagtcgccgttactgcgtcagcgtgcggccaacgagctacgcgaaatcagcgccgtggccaatcagcacgcggcccgttacgcggttgttccgcttctgaaggaagaaccgatcggcgcagaacgactgcgtgcgcttgtcaaggtgaacgtcaaatga

SEQ ID NO: 362091 - DNA, 552 bp, Pseudomonas aeruginosa
atgatgccttctactgtcacccctgaattccccgcagccggggaattccatctcagtctgcgcgtcgccgatctgggtcgcagcacccgcttttacagcgcctttctgggtgtctcgcccaaagacagcacggcgcggtacagcaccttcatcgtgccgcatctgcgactcaacctggtattgctggtcaatgatcgcgacgaagcactcgacacctacagcctttaccacttgggcttgggtgtggccggaaaagccgaaatgctcgctgcctatcacgccgccgtggcggtgggtgccgagatcgtcaaaccgccgcgcacgacttggcgcggcatcccgttacacgagctgtggctgcgcgaccccaccggctacctcatcgaggtctacgcccgcttgaccgatgaagaactcgcagaaatgcctgcggacaaggagccggtattcctgctcgatgggcaaaccgagcaatctgagcaccaaaccaaggagattgaccacgttgatccggaactacatgacgcccgatccggtaaccgttcaacctga

SEQ ID NO: 362092 - DNA, 453 bp, Pseudomonas aeruginosa
atgacgcccgatccggtaaccgttcaacctgaaactccggttgaggacatcgcaagactgctgctggctcatcgcatcaacggcgtaccggtggtcgacggcgcgggtcggctgatcggcgttgtgaccgcggacttgattcaccggggagcggacgaacggcttgaaccccgtgaatcgatttggaaggagaactcctggatttcctttcttggcccaaaggggacacagcgcgacaaggccgaggggcgtactgccgcagaggtaatgaccacggaagtgcacagcgtcgcgcctgtcatgcatccgtccgttgcagtccggctgatggtggatcatcacttgacatcccttcctgtcgtggaggatgggaaagtgatcggcgtcatctcccggattgacctcttaagccttcttaaagaactcgaaaacccgctgaaaagagggaattga

SEQ ID NO: 362093 - DNA, 1287 bp, Pseudomonas aeruginosa
atgattgccgcactactgattttttttgccactatcgccctggtgatctggcagccgcgcgggctgggcattggctggagtgcgacgcttggcgctgtcgtggcattactgtccggtgtcgttcacatcggtgacattcctgtcgtctggcagatcgtctggaacgccacagccgcattcattgccatcatcatcattagcctgttactcgatgaggctggctttttcgaatgggcagccttgcacgtcgcacgctggggcggagggaaaggacgtctgctgtttgcgctgatcatcctgctgggtgcagccgtcgccgcgctttttgccaacgatggcgcagcgctgattctcacgccaatcgtcatggccatgttgttggcactggggttcagtccggcggcaacgctcgcgttcgtcatggcggcagggttcatcgcagatgccgccagcctgccgcttgtcgtatccaacctggtcaacatcgtctctgccgactttttcaatatcgggttcaatgactacgctgcggtgatgattccggtgaatattgtcgccatcattgcctctctggccgtgctgtcgatctatttccgccgcagcatccccgcacgctacgacgtgaatcagttgaaacagccgaatgaggccattcgcgatgtggctacgtttcgtttcggctgggtggttctggccctgctgctggtcggattcttcggccttgagccgctaggcgtgccggttagcgccgtggctgccgcaggcgccctgctgttgctcgtcgtcgctgcgcgcgggcatgtcatcagcacccgcaaggtgatccgtgaagcgccttggcaaattgtcgttttctcgctgggaatgtatctcgtggtctatgggttgcgtaaccaaggcctgacggagcatatcgcaaggctgctggattacttcgcacaaggcggtgtatggggcgccgcctttggcactggcttcctcacagcgctgctgtcctcggccatgaacaacatgccgacggtactggtgggcgccctgtccattgatgccacaagcgcaacgggcgtggtgaaggacgcgatgatctacgccaatgtgatcggtagtgacctggggccaaaggtcaccccgatcggctcgctggcgacgttgctttggctgcatgtgctggcgcgcaagggaatgacaatcacatgggggtattacttcaaggtgggcattgtgctaaccgtccccgtactcgcggcgaccctggcagcgctggcactgcgcctgagtctcacttga

SEQ ID NO: 362094 - DNA, 267 bp, Pseudomonas aeruginosa
gtggcgctgctcggcgccagccgggcggcggtgcgcgcgaccctcgagcatttctcgccgcagcagctggccctgcgtttcgagcgcgacggtcgccggccgttgctggccacctcgggcagccgctggcgtgcctatggtcgctaccaccagtcgctatgccaggacgacgattggagcgagcgtctgttggcgcgtgatttcgcccaggcctacgaagagcaggttcgcctgatttccaccctctacaccgagcaccaaggatga

SEQ ID NO: 362095 - DNA, 2628 bp, Pseudomonas aeruginosa
atgatcaacgtagacctgcaacaactgattcaggcgctggatgccgacacccggcgcgacctcgaaggctcggccgagcgctgcgtagcccgtggcggcagcaaggtactggtggaggacctgttgctgggcctgctggagcgtccccagggactgctggcgcgcgccctgcaggatgccgcggtggacgccggcgaactcaacgccgcgttgcaagcgcggggcgagcatagtgcctcgcgcaatccggtgttcgcgcccgagctggtgcagtggctgcaggatgcgctgttgctggccaacctcgaactgggccgtagccagatcgaccaggcggcattgatcctggccctgctacgcaacccgttgcgctatgccggcagccgctaccagccgctgctggcgcggctcgacatcgagcggttgaaggatttcgcgctctcgcagccgctggagggcgcgcccagcggcaagccgggcggcggcgagtccctgttgcagcgtttcacccacaaccttacccagcaggcgcgcgacggcaagctcgatccggtgctctgtcgcgacggggctattcgccagatggtcgacatcctggcccgtcggcggaaaaacaaccccatcgtggtcggcgaggccggcgtcggcaagaccgccatcgtcgaaggcctggcctcgcggatcgccgcaggggaagtgccgccggcgctgagggacgtcgagctgttgtccctcgacatgggcctgttgcaggccggtgccagcgtgaagggcgagttcgagcggcgcctgaaaggcgtcatcgacgaagtgaaggcagcgctcaggccgaccatcctgttcatcgacgaggcccatacgctgatcggcgcgggcggtcaggccggcggctcggatgccgccaacctgctcaagccggccctggcacgtggcgagttgcgcaccatcgcggcgacgacctgggccgaatacaagaagtatttcgagaaggacccggcgctggcccggcgcttccagcccgtgcagttgcatgagccgagcgttgccgaggcggtgacgatcctgcgtggcctggcccgggtttacgaggaaagccacggtatctacctgcgcgacgacgcggtggtggccgccgccgaactgtccgcccgctacctggcgggtcgccagttgccggacaaggccgtcgacgtcctcgacaccgcctgtgcgcgggtgcgcatcagcctggcggcggcgccggagagtctcgagcgcctgcgcggcgagctggccgaaggcgagcgccagcgccaggccctgcgccgcgatgccgaggcaggcctgccgatcgaccacgataccctgcaggcgctggaggagcgcctggcccaggcggaaagcgagcggcacgtacaggaggaccagtggagccgccagcgcgaactcgccgagcgcctgctcgccctgcgccagcaattggccagggcccgcgaggcgaaccgggaagagcagggcggcgaggcggacgcggagactttcccggccgacgagcatggcggtgtcgaagccctggaaaaggcccttcacgaaacccgccaggcgctcgccgatgcccaggcccaggggcggctggtcagcttcgaggtctgcccgcgcctggttgccgaggtgatcggcgcctggaccggcgtaccggtggaacaactggcgcgggaacacaacgccaaggtgatggggttcgccgacgacctgcgggcgcggatccgtggccaggaacaggcggtcagcgccctggaccgcgcgatgcgcgccaccgcggccgggctgaacaagcccgatgcgccggtcggcgtgttcctgctggtgggcccgagcggggtgggcaagaccgagaccgcgctggcgctggccgacctgctgtatggcggcgagcgtttcatcaccaccatcaacatgtccgagttccaggagaagcacaccgtctcgcgcctgatcggcgcgccgcccggctatgtcggctatggcgagggtggcatgctcaccgaggcggtacgccagaagccctattcggtgatattgctggacgaggtggagaaggccgatccggacgtgctcaacctgttctaccagatcttcgacaagggcgtggccaacgatggcgaagggcgcgagatcgatttccgcaataccttgatcctgatgacctccaacctcgccagcgagcacatcgccgcgctttgccaggacggcgcgcggccttccgccgaactcctggaggaaaccatccggccggcgctcagccggcatttcaagccggcgctgctggcgcgcatgcgcgtggtgccttactacccggtgggcggcccggtactgcgcgagctgatcgagatcaagctggaacgcctcggcgagcgtctggcccgccgtcaactggctttcgactacagccaggcgctggtggaccacctggccgagcgttgcacccagagcgacagcggcgcacggttgatcgaccacctgctggacacgcacctgctgccgctggtggccgaccgtttgctggaagcgatggcgcgcgacgagcgtctcgagcgggtccatgcgacgctgggcgagcacggccgcgtgctctgcgagttcgcctga

SEQ ID NO: 362096 - DNA, 1008 bp, Pseudomonas aeruginosa; identical to SEQ ID NO: 360093

SEQ ID NO: 362097 - DNA, 981 bp, Pseudomonas aeruginosa
atgagccagatgagcttttccgactttgagtacgccggcaagcgcaagcaaacccgccgagagcgcttcctcgccgaaatggatcaggtggtgccctgggcaggcctgctggagctgatcgaaccgttctaccccaaggccggcggcggtagaaaaccctatcctctggaaaccatgctgcgcatccatctgttgcagaactggttctccctgagcgacccggccatggaggaagcgctctacgaaatcacgcccatgcgccagttcgcacgcctgacgctgagcgcgccaatccccgaagacaccacgatcatgaacttccggcacttgctggagaagcatcagctcgcaccggcaatccttgcggtcatcaatggttatctgcaggaaaaaggcctgtcgctgcgccaaggcaccatcgtcgatgccaccattattcatgcccccagctcgaccaaaaataaagaaggcaagcgtgatcccgagatgcaccagaccaagaaaggcggtcagtatttcttcgggatgaaggcgcacatcggtgccgatgtcgagtccggcctggtgcatcacgtccatggcaccgctgccaatgtggccgatgtcacgcaggtggctgaactgctgcatggcgaagaaaacgccgtgtatgcagatgccggttacaccggtgtcgaaaggcgcgaagagcatgaaaatcggggggtgatctggcagattgcagcgcgtcgcagcacctattccaagctgaaccagcgcagcgtactgtacaaagccaagcgcaagatcgagttctgcaaggctcagacacgggccaaggtcgagcatccgtttcgcgtgatcaagcggcagtttggttacgtgaaaatacgttttcgtgggctgatgaaaaacacggctcagttgaccacgctgttcgccctggcaaacctgtggagggttcgaaaacagctcatgggtatgggtgaggttcgcgtttaa

SEQ ID NO: 362098 - DNA, 981 bp, Pseudomonas aeruginosa; identical to SEQ ID NO: 362097

SEQ ID NO: 362099 - DNA, 141 bp, Pseudomonas aeruginosa
atgctcaagaacgcgttaatgatcagtgctgcaatgatgctggggatggcaagcctcaaggcgtcagccgctgtaaacctggtgaccagcatcaagcctctgctgaatcgccccgggtttcgtggaggcctcaactcttga

SEQ ID NO: 362100 - DNA, 1371 bp, Pseudomonas aeruginosa
atggttgataccacctccgcagtcagcgaacagcctccgtcgcaagctgctcagcagccgatcggcttgtttgaagcgtttctgttttggctcaagctgggcttcatcagctttggtggacccgccgggcagatttcgatcatgcatcaggagctggttgagcgacggcggtggatcagcgaaaagcgatttctgcatgcgctcaactactgcatgttgttgcctggaccagaggctcagcaactcgccacgtacatcggctggctcatgcaccgttcatggggcggtgtgattgccggtgcgttgttcgtgctgccgtcattgttcatcctgatcgctttgtcctgggtctacgtcgccttcggtgaggtgcccgtggtggctgggattttctatggcatcaaaccggcggtcactgccatcgtcgttcacgcggctcaccggatcgggtcgcgtgcactgaagaacggctggctgtgggccatggccgccgcttcgttcgtggccatctttgccctcaacgccccattcccgcttatcgtgctggtagccgccatcattggctatttaggcggtcgctttgctccaagtaaattcgtgatcggaggtggccatggcgccacgaagaacagctatggacctgccctgatcgatgacaacaccccaacgcctgagcatgcccgcttcagctggggacacctgctgcgactactgctggtcggtgctgcgctctgggtcctgcccatggggctgctgacgctgtcgtttggctgggacggtactctgacgcaaatgagctggttcttcaccaaggccgccctgatgacgtttggcggtgcatacgctgtgctgccctatgtctaccagggcgctgtcgggcactacgggtggctgacacccacccagatgatcgatggcctcgccttaggggaaaccacgccagggccactgatcatggtagtcgccttcgtaggcttcgtcgggggttacgtgcatccaatgtttggcgcagaacacccgttcctcgccggcgcaatcgcggcgagcctcgtcacctggttcactttcctgccgtcgttcatcttcattctcgccggtggcccattggtagagtcgacgcacaacgagatgaagttcaccgcaccactgaccggcatcaccgcagcagttgtgggggtaatcctgaatctggcgctgttcttcggctaccacgtgctttggccaaaggggttcgctggaacattcgactggccttcagcgctgatcgcgatcgctgcagcgattgccttgttccgcttcaagcgtggcgtcatccaggtactgcttgcctgtgccctggccggtctggcagttcatatgttgcgtatctga

SEQ ID NO: 362101 - DNA, 942 bp, Pseudomonas aeruginosa
atgagcgaatggtcgctactgattctcgggcttcccacggctaacgccacggagcgaatgcgcgcttggcgaaccctcaaggcttctggtgctgcagtactacgagatggcgtatacctgctgccacaacaaagcacggctcgcgaagcgttcgaagccgtggaacgagacgtgctggcgatcaatggcacggcatttctgctgtctctgcctgagcgtgaggagcgcttcagtgggttgttcgacagaagcgaggactacgccaagctgatggaagaaattgcaggctgccgagcggatctttcaccggacaacgccctgcaaaccgcgcggcaggtgcgcaagcttcgaaaggctttcagccaattggcggcgatcgatttcttccctggcgtgctcaaggctcagactgactcgaccctgcaggcgcttgagaccgcaatcagccgtgcactgtcatccgatgagcccagtgcgcacgacgagacaatcatcagacttgagcgcagcgaatacctgggtcgccgctgggcgactcgaaaacgcccctgggtggataggctggcgtgtgcctggctcatccgtcgcttcatcgatgctgacgcccaattcctttggctggaaagtcccagcgactgcccgaccgatgcgttgggcttcgacttcgatggcgcgaggttcagccatgtcggccagcgggtgtcgttcgagaccctcatcgaaagctttgcggttgaacaaccaggcctgtctcggttggcagctgttgttcattacctggatgtaggtggaagccagccctccgaggcacctggcatcgagcgcgtcctcgcgggtttgagagaaagcattggcgatgacgatcaactgacaacggtcgccggaggcatcttcgatggcctgctgacggctttcgcaagtgaggaaaaacaaaatggttga

SEQ ID NO: 362102 - DNA, 1176 bp, Pseudomonas aeruginosa
atgactgccgccctcacgcgctattggcactactccagaggtctcaccatgggtttcgcagaactacttcagcagggtaccgcccacgcttggctctacttcccaagcgccatcctgctcggcgccctgcatggccttgagccagggcactccaaaacaatgatggcagccttcatcgtcgctgtgcgaggaactgccaagcaggcggctctcttggggctggctgccacgttctcccatacagccgtggtctggctcgtcgccatggcagggatgtacctgggcggcaaccttgatgctgaaaccaccgagccctacttccagctaggctcagcagccatcatcatcgccgtcgcattgtggatgcttctgcgcacctggcgcggagagcaaatgtggaaattcgagcaaggtgacgggcacgatcacggccatgagcatgcccatgatgagacacgccgcgtcgacactgggcatggacgtgttgaactgtcgatatttgaaatcgggcaaccacctcggtggcgactgaaaaccttagatggccatccatggcaggccgctcaagttaaggccctcacgactcggccgaacggtgaaacaatgtcgttcgccttcgagaaacgtgacggcttcctggaatccattgactcgattcctgagcctcatgagttttcagtacgcctgaccttgggtcattccgaccatgctcatgactacgatctggagtttgccgaagcgcatgatcaccaccaccatggcgaactcgatcagctcgaactgagcgtcgatggctatcaggatgcgcacgagcgcgcccatgcaaacgacatcaaaaagcgtttcgccaaccgtgatgtgactaccggccagatcatcctgttcggtttaactggcggcctgatcccatgcccggcagcgatcactgttttgctactgtgcctgcaggtcaaggaaatcgcactcggggccgtgctggtactgtgtttcagcatcggcctcgccatgaccctggtaactgttggggtcgcagcagcggtcggagcgaaacgcgcctccaatcgctggccctggttgggagctgtggctcgtcgagcaccgtacctgtccagcatgatcatcatcgccgtaggcatctacgtgggtatcaacggctggatcggactcactagctaa

SEQ ID NO: 362103 - DNA, 276 bp, Pseudomonas aeruginosa
atgtctcacaccatgaagaatcagcgtcagttgctgactcgggtcaagaagatcaaagggcaggctgccgccctggaggcagcgttggagcaggaaaaggattgcctgggaatccttcagcagattgccgcgatccggggggcggtgaatgggctgatggccgaggtggtggaaggccatatccgtgagcatctggcggcagagcatctggatgcggctcagcgactagaggaggcagacaaaatctcctcggtactcaggtcttacttgaagtga

SEQ ID NO: 362104 - DNA, 210 bp, Pseudomonas aeruginosa
atgcgactgactaaccttttcctgattggcgtaatggcagtgggcatcagcggccaagcctttgcagagggcggggccgagcgctcactgaaattcaacaaagaattccgcgatgaccagaaacgcctttggggcgagaaggaaaaggaggcagagcagtcgaagccttcgtccacccagcaaaaggagggccctaaaagccagtcctga

SEQ ID NO: 362105 - DNA, 1395 bp, Pseudomonas aeruginosa
atgaggcagttgagcctggctgccaagctgggattgaaagtcggcttcatgagcgtgcttcttctggtactgtgcgcgtccattggctatgtgatgctcggccaagcgctggagagcacggcccgttcagcgcttgaaaccaaaatgagcggcatggcccataacattgcgaccatcgaagatgtatcgggggtgaccgctgattcccacctgctcgtcgatctcgcgatggggcacaacaatctgtatgtcagcattttcgactctgctgacagcaaggctccattactgaccatcggctccaaacaagtgagtttcgagctccatcgcttccctgctcgggacgaattggccttccatgagtggcaggatcaatcgggaaatccgatgctcagtgcggcgcagatcatgcgcttgaaagacggcacccagattggcgtctacatgactgtggacgagtcgtcggacgcacagctcctgggcgccatggtcacttgggcgctgaccgcatcaccgttcattctggccgttattttgattgtggcctggtggactgtccgacgtggcttgctgccgttgacccgttttctcaaggtagcgtccaagatttccaccgacaatctgggccaccgcctgcccactgacaagctgccggcagagcttcgacatctggcggatggcatgaactttatgctccatcgcctggatggtggggtacagcaactctcgcaattctcggacgatctggcccacgagctcagggcaccgctgtcaaatctcatggggaaagcacaagtagcgttgtcgcgtgaacgctcatccgctgaataccgtgatgtgctcgaatcctgcctggaggagctggaccgcatgacgcgcatggttgcggacatgcttttcctggcccatgtgagccagccagctgccttggtggaatttgagaccgtggccttggtggatgaagtgcagagggtctgcgacctgtttgccttctcggccgaggaaaacggagtagcactgcagatttcagggagcgccgatgtcgtgaatggcaaccgactcatgatccagcgagcagtttcgaatctgctatccaacgctattcgttattgcccgaaaggcgaatcggtccaggtcaaagtccaccgtggcagcgatcagattcagttgagcgtcggtaaccctggacgcggtattcccgatcaacatctgcctcatctgtttgagcgcttctatcgcgtggacagaggccgagcacgtagcgaggggggcacaggtctcggtctagcgatcgtgcgctccatcatgagcctgcaccaaggcactgccaaggttgaagtcagcggtgacaggtatacctggttccatctcagctttccgaccagccatctgtga

SEQ ID NO: 362106 - DNA, 675 bp, Pseudomonas aeruginosa
atgcgcgttctagttgtggaagatgaaactaaaactgccgaatatcttcagcaaggattgaccgagagcggttatatcgttgaccgtgcaagtaatggcgtagacgctcttcacctgttcaaccataacacctacggcctggtcattctcgatgtaaatctgccagaagttgatggttgggaagtgctggagaccatcaggaaaaccagccgcgtgcgcatcatcatgctcaccggacgaggccggcttcatgaaaagctcaagggtttggacggcggagcggatgattacctggtgaagcccttcgagttcccggagttgctcgctcgcgtccgctcactccagcgccgcggcgatgacatgattgaaagcaatacgctcaaggtcgccgacctggagcttgaccccggccgtcaccgcgcatttcgcggcgacctgcgcatcgagttgaccaccaaggagtttgccctgctgcacctgctgatgagtcgcgcaggcgaagccctgacgcgatcccagatcatctcgctcgtgtgggacatgaatttcgattgcgatactaacgtgatcgacgttgcaatcaggcgcctgcgtgcgaagatcgatgacccgttccaggtcaagctcatccatacgatgcgcggtgttgggtacgtggtagaggaccgctcatga

SEQ ID NO: 362107 - DNA, 1113 bp, Pseudomonas aeruginosa
atgaacaatgaaagatacctgcgctgtgtaaagagtctctcttttttcaccgcaattattatttccgggcccgccatgagtgctgagaagttctctgttgcagaagaccagattcaggctttgggtatcaaggtttcaccggtccaaagcatgaagcagacggtcagcagtcgttatcctggccaagttgtcgtgccgccaaaggctgaacagatcgtcagctccccgctggaaggtgttgtcgttcagttactggtgggcgaataccaacccgtacgcaaaggcgaccccgtagccaggctttccagcccagccatgagccagcttcagttgcaactgttgcaggctgcgtcccgtgcaacgcttgcccgtcaggcctattcccgtgagcagacgctttttgatgaggggattattcccaagcgccgggctcaggaagcacaggccacgctgaaggaagccgaagcgacgttggtccagacgaaagcggagctggcgttggcaggtctgaccccgccgatgatggagcaagtcgtccgttcaggtattccatctgaccggataatccttaccgccgtccaggatgggatcgtcagtgcaatctccgttcgccctgggcagcgtgtagatggcgctacatcgttgctcaacatcacccaggtcgacgccctgtggctggatgtgcaagtgccttctcaggccagtatcggtatccagcccggtgcaccggtaacgatcgtcgacaagaatgtgagcgggcgagtgatcaacctgagtccgaccgttacagcagacaaccagtttgtagtgctgcgggccgagatcgaaaaccctgggcgcgctatacgcccgggtgagttggtaactgtcgagatcccggtccagtccgccggtaattcttgggatatccccatctccgcagtggcgcgcaacaaggctgactccgttgtgttcgtccgtacgcctgagggtttcgaagcgcgccctgtgaaggttgaggccagtgccgggcagcttgtgcgcgtgcagggcaacatccgtgagcaggatcaggttgccgttgctggcgttattgcgctgaaaggtgcctggctggaagaggacggagagtaa

SEQ ID NO: 362108 - DNA, 303 bp, Pseudomonas aeruginosa
atgcctgacatctggttgacgctgctctgcaccccgagccttgaagaaaaaatcatcgaccatttgctggtgtcagtcggcacgaggatcttcaccagcgctactgtcgctgcccatggtctgtccacggatgccctgaatccagttgaacgcgtgatggggcgtgcccgtgccgtgcagatccaattggtcgttgagcaacagcatcttgagccgttgctggactcgctcaggcaggagtttcccaacacgggcgtgcgctattggacagttcgggtcagtgagtttggggagtttatgtga

SEQ ID NO: 362109 - DNA, 1236 bp, Pseudomonas aeruginosa
atgaaacgcattttacccctggtggttctgatgggactgagttccgttgcaggcgctcagccagtcgcacccatgaacatcctgcccaaacctctggcgatgtcgttgctcaatgcggatccgcgcgtcgcgtcggccagatcgaccatggatgcagccatgcttgaggcggggattattcgtaagtcgccctacgagtggaatgcgacagcaaccggccagcagcggcgtgtcgatgctggtcccaactacaacgagtggaacgttggcattcagcgcaccattcggctgcctggcaaaggccaggcagaccaggatatcagtggtgccacggtcaaattggcggatgcgacttatggtgaggtacgtcacgagactgcgcgtgagctcatgacgatgtggctcgattggctggcctctgaacacgctctcgaaatcgccaacaaagggttggcctcggccaaggaaagtcttgctgcggttgaaaagcgtaaccgtgcgggggacgcatcgaagcttgatgtcagtctcgtgaaagccgaaattgctgatcaacttcgccagggtaacgaggcgaaggtcaaagctgcagccagttgggcgacgttgtcacggcgattcccgggtatcgaccgaaaggtcgtggctttaccggtgccatcgtcagagcttggtcagtatgaaacctggcgtgagcggatcctcgccgaaagtgatgtactgcgcagggtagaggccagcttgctgaaaagtgaaggccagtcggcacgtgccaaggcagacaagatcccagacccgacgctgggtgtgttcactgcttcggagcagggcgctagggaaagaatctacggcgtgaccttcagcatgccgattccaagcggtactcgcagtgctcgttacagccaggcaatggcccaagagagtgctgcccgccaggacgtagacctcatcaagcgagaactggaagctgcgattgccagtgatgtggagatggcctcaggcgcctatgaaaacttccgcattgctacagagggggctgaggccatggctcagaacgaggcacaaatgcaacgcgcctacgaattgggtgaggctgacctgcagtccctgctgctatctcgacgtcaagcagtgacatcggcatcgaatgcactgcaggcgcatgtcgatactttgcggactcacttgtcactgctgatcgatgcccattggatatgggggttggacgaaagctga

SEQ ID NO: 362110 - DNA, 738 bp, Pseudomonas aeruginosa
atgagagacacgtttgctaccttctacgcaggaccagtcaactctccgtgggttggctacttcggcggtgactatgagctcaacaagtacacgactgtcagcttgtacaccagccgcctgaaagatgcgtgggaccaaagttactttggaacatcgttcacctacccgatatctgatgagctggctctgctggcaggcttcaactactatcgtgccgtggatgaaggcaagaagctgctgggtgagttcgataataacatttggagcggcaaagtcggtgtgcgcttcggcgctcatacggtgtcgctcactcatcaacgcaataatggtgacgacgacttcgactatctccgtcagtcggactcgatctacctggataactctatccaatacagcgatttcaactcaccgaaagagcgctcttggatggttcgctacgatctgaacatggcgaaatacgggattccagggctcagcttcatggcacgctacggcaagggtacggacgctgactactcgaacgcaaacaatgtgtatatgcgtcgagatgcgggcggcaatccactcaccgaccaaaagcgctgggagcgtgatatcgaagtcaagtatgtcgtccaaaccggttcgatgaaggatatgtccttccgtattcgtcaagcaaacacccgatccactcagttcgagtctgatctcgatgagttccgcctgatcgtggagtacccactcagtatcttgtaa

SEQ ID NO: 362111 - DNA, 330 bp, Pseudomonas aeruginosa
atgaatattttgaaaggtttcgtcgctgccgcactattttttttcgccgcttccgtcagtgcgcagaacaacgttaaagacatcaatgcccgactggaacaagtcggcaaagacgccaccgctcgatatgctcagagccttaataaacctatgccagagctgaaggattatcgttatggcatggacatggatattgctaaactggtgcatgtctcgcagaatgtcatgtattgcggaaacgtccgaagcatcatgagctttgaagattcgaagggtgagttgcatatggtgagatatattgttaagggtaattgctataacaataaataa

SEQ ID NO: 362112 - DNA, 276 bp, Pseudomonas aeruginosa
atggaactgaatgacgccatgggccaagcgctacgaaatgctcgtgttcgtaagggcttgacacaggaggactttggcagcatcagcagtcgaacctacatcagctccttggagcgggggatgaaaggggtaacagtcaacaaactgacctcaattgccgacatgatgggtgtgcacccgcttagcattttagctgagggttttttgctgcaatctgggggcagtcttgacgagctgctagcccgcgtccgaaccgaaattggtgatgagcactga

SEQ ID NO: 362113 - DNA, 2595 bp, Pseudomonas aeruginosa
atggaaaagaagctcgaaaaatacaacaaaatgcgtgatttcaaggagagtccagagcctgctggcctcacaaaatctagcaggcgcaagggcaaagcgcatgcattgcagttttgcattcagaagcatgatgcctcgcgcttgcattacgactttcgcttagagttggacggtacgctcaagagttgggcggtaccaaaggggccgtcactggatcccaaggtcaagcgcctggcggtgcatgtcgaagaccatccgctggattacgctaccttcgaaggcagcatacccgaaggccactatggtgctggcgacgtcatcgtctgggaccgcggcatgtggattcctctgggcgacccggtcgaggcctacgcaaagggccgcctcaagtttgaactgcagggcgagaagctgagcggtctatggaacctggttcgcacgcacatgccgggcaagcaggagcaatggtttcttatcaagcatcaagacagttccgctcggcctgaagatatttacgacgtggttgtcgccgaacccgacagcgtgatcagcgaacgggcaatcgttgccaaatcacccaacacatcaattacagccaaggccaagcccaccaagaaagctgcagagcctgtacggcaaacaaagctctcgccactcaccggtgcgcgcaaggcgaaactgccgggctacatcaagccgcagctggcgactctggtggaaaagcctcctagcggtcgatggatctatgagtgcaaattcgatggttttaggatgcttgccaggatagaagatcaaaaggttcgactctttacacgaaacgggcacgactggacccacaaattgccaaggcaggccaaggcattgctttccttaggattgaattcagcttggctagacggtgaaattgtggtcatcgacgaccaaggcataccggattttcaggccttgcaaaacgctttcgaggcaggccagagtggcaatatcttctattacttgttcgatctgccctatttcaatggcgtggacctgcgcgaggtgccggtcgaggaacgccgggctgcgctcttggcgatcctaaagtccggcaaagagcccctactgcgtttttccgaggccttcatcgaagaccctaatgacttgctcaccagcgcctgtcatatgcagttggagggtctgatcggcaagcgcctcggctcgtcctacgcttctgggcgcagcagtgactggattaaactcaagtgtaagcgtcgccaggaattcatcatcgttggcttcaccgatcccacaggctcacgcaatgcattcggcgccctgctcctggggctgcatgatcgagacagcggtgagttgcgctacgtcggcaaagtcggcaccgggtttacggaggcgactctcaagagcatccatgatcgaatcaagcctctccgaaccaagaaacctgcagtggctaacccgcccagaagtgcagagctcactcgtgtgcattggcttaaaccgcagttgctggcagaagtggcctatgccgaaatgaccaaggacggctcggtgcgtcatgcggtgttccatggccttcgtgatgacaagcctgccagcgacatcacggtggagcagccgactatcattaaaaatatccatgggaaaaatatcgatgccaaagcttcctcagccaagaagaaggccccgactgcgccgtctcagatcaattctgaacatagcaagatacacatcacccacccggatcgcgtcattgacgctaccagcggcacaaccaaagtccaactcgcggaatattacgcaagcgtggccgagtggattctcccgcagctcaaggaccgccctgtagctttagtgcgagcgcctgatggaattaccggagaactgtttttccagaagaacgccgagcgccttaaggttcccggcatcatctccctcgatcataaactcacgggccagccaatgatggtcattaacaacgtcgagaccttaataggggcggtgcagatcaacacagtcgagctacatacctggaacgccacctcggaccatctcgacaaacctgaccgcttcgtccttgacctcgacccggacccggcgctgccatggaaaagtatggtcgaagccacccagctgacactcacagtgctcgatgagttggggctcaaggcgttcctcaagactagcggcggtaagggaattcacttggtggtaccgctgacccgcaagcatggctgggatgaggtcaagaacttcagccacgctatcgtcagccacatggctaaaatgctgcctgagcgattttccgcagtatcagggccgaaaaaccgtgtcgggcggatcttcatcgattacctgcgcaacggattgggcgcgaccacgatctgcgcctacgcagcgcggacccgcgaggggctgcctgtgtcggttccgatatttcgagaagaagtgaaggagcttaagggcggtaacctgtggaacatacaaaatgtgcttgggcgattggctgaagtaggcaatgaaccttgggcggacataaagaaaacccggcagacgattactgccgagatgcgccggcgggtgggcatgaagaagctctga

SEQ ID NO: 362114 - DNA, 1134 bp, Pseudomonas aeruginosa
atgctccctaggttttgggcaaccgtgtggtccctgagtaatcaaggacatgccctagcggagaacacccgtaagacaaccctgcgtcacatagatgttttctactctttctgtgatgaccggtacggggttgattcgttcgattcagctgtgagtagccgtgatgcggccagaacgcaggagttggtggaggcgttttatctgaatctgacatccgccaaaaactactcaacaacggctgttcagcgatgggatgctgtcagagggttcatggtgcacctggcctctcatcgatcagcttcgtgcgaagcatggcgttctcttcgatcgaccttgtctgcgatgggaaggatgagaaagcctcagagggggcgggtaaggtttatccgctcgattccagcgagcacattgtttgatctgcttgaggttggaaatcctgcttcagatcgaaaccccttccaaggtgtgcgcattaagaacaggaattggctgatccttaacatgcttctgctggtaggactcaggcgcagcgagttgatgctgctgacttgtgatgctctcaaatctgacgtagatacgaagtctcaagaggttgtgtattggctggacgttacggccgggacagaatctgaaacccgatctactgccccaagcatgaaaactgagcaggcacataggcaagtaccaatttcgccggaacttgcaaacctttatcaacagtacatagccgagagcagatacgactcgtcagagcacggctacgcttttacagcggctacaggagctcctctatctgctgaggctgtaaccaagattttccacgcactgtcaggcgcaatctcacccaaggcattaaaaaaattcagtgatcgcacaggcggaaaggcacatatatccccccatgatcttcggcatacctgcgcaacagcatattacgcgacgttcatggattgtgaacaagacagggaacttacgttccagcgtatgcgtgcattttttggctggtccgtaaattcggctatgccagagcattatgcccgcgcagcaattcaagaagatctcatgcaggcgtggggtcggctatttgacttaaaaataagcgcgttgcgagatattcaacatgagagcatataa

SEQ ID NO: 362115 - DNA, 1500 bp, Pseudomonas aeruginosa
atgagagcatataagggtaagagcgcttcaactaccgtgaattgtgcgggaagtagtgctgaaacttttattctcgaatgggcctggccactgccgccagcaattatttctctttacgataagtacactgatgttacttatgtggttgaggctgacgaaaatgagtggaagttcagttataaagggggtgctgaatcgatttcattcgcgagcggctccgcgggcgctttgcagagaaggctagcaatgttgacgtctgggcatcaaagtcctagtagtcttcatcgtgctgcaaggttattggtccgcaaatgggagagtgtttgtacgctggttacgacccctgcggaagagctaagaaatgcttggaatgagcatgtcacagactcatctttttcaggtgttatgaaacgtctccttaaaatggcttgcgatgctgaggtggggcattggaatgggagggccctaagtctagttcgtagcttgaatacccatgcaaatgcaggaatggcacgcaggaagaacacccttataagtcgggaagaacttgtaaatataagcttgcaggcagatattgtaagatcattagatgcagaagcatggagtgctgaagtcgaaaatgaatatttagaaggggcggccgctttggtgtttatatatcaacacggtgttcgacctgtgcaggtgttgtgcttggatactgagcatgtaagattttttaaggatgcaaatgatgaaagtgcttgcattgtttcgtttcacgcagccaagcagcgtgatgagcagcaatttgaaattgttcgtcaggttaaaccagagtgggtccagatagtaaaaagactgtgggagtctgcaaaagctgcaggcagaaaacgactattcgaagcaaccaactctacggctctttgggcggaagccaaggctttctgccggcgttatggagttaacctggattgtaccgctccacagttgcgtcatactgcagcgcagtcattggcagatgccgggcatagtcgcgaaagcatttgtaagttcttaggtcatgtctatacgggtacttctggagcttatatacacgctagcatgcaacaagccgacctcgtcaattcggcgcttggggcatctaagttgtatgcgaaactccaaagcattgcttcaggtagatttgcttctcttgaggaaattctaaacgcgcaagaagatcagcagataggagctgtcgtaggcaattccctcattgcaggagtagggctatgtcagacaggtcagagccattgtgcctataatccagtaacgtcttgttatggatgtgcaaagtttatgccctctttgcaaaaggaacctcatctgcaggccgttgacggcatgcgacaacaggttaggaggtttttggacattggtatcagtgcggaaagcccagcttatctccagctcactcgtgcgctctcaggagctcagcaaattttagacaatatcgatcagattgcgggggcgaagtaa

SEQ ID NO: 362116 - DNA, 1935 bp, Pseudomonas aeruginosa
atggccgtgattgaatctccgtccaatgagccatcggcgaaatatctatttgagaagtttgtcaccagtgtgcgcagagctgttgaggcaaaaggagtaatctgggacattcctctgaatgactgtggccaaccgataaaaggtacagattgggatcttcgaatccttaacgatagtcacgacaggcatgcatatggtacagggggcttcggagtagatatagaaactcatcaactggccctaaccgcaggctggcctgaagcacgccttccagccagtcgagtgcttccaacaatagtccaagacttcatcaaggctataatcgggagtatttgcttgagtggtcgcacagcggattgcgcgcaagtagtagctaaggcagcaaggcgactattctcaagtaccgtactaactccatatgagatctcacgagaaaattttgaagcgctactatctattaagtcgtggagtgaaaaggcctcgcgggatatagctactgtggccaagattattgatgaaaacatgatctcaaacttctgtcctgttcgcccaacggtaaagcgagatcgaaggccagggcttttagccggctacctggtacgaaaagatgcatccaagcttcctgaggcagactcgctattcgagttgactagaatcgtgttttgtgagcgcgcaagaacatataatgatttaatttattttttagttatcaggatattaatacttacgggtttgcgtattaatgaggtgttaacgctgcctgaagactgcctgacatgggtcgagcatgtagatgtggtcaccaataaaagcgcatccgatatcggcggggtaggacgttctttgagattgcgctattattcagagaaaaaacgaaacaaaactcctggcactctgattgaaagtttttattttgtgccaaaaagatttgagcagctcattgaaagcacgatactggaagcgaggcttgctacgaagccatttaggggggttctggaaaatcaatatctaaatcagtctcaaacgttcggatctgacctgcgaatatttagaacggattcaggaggtactgtagggacatggcaacggctatttcttactgccgggtgtattaagaaatggcctttgtcgagcgccgctgtttctggtgattcagttattaccacgccgcgcgagcttagaatgtacacttcgcttggtatggtgaaaggtaatggttcactttccttctttaagaagtatggctcaacttcggaaatgaagaaattgtctatcaaacctcattcgttgcgacacttgatgaatactgagttgtttcgccagaacgtttcagatacagtcatcacacatcagtttggccgagtgtcagtagcacagagttatgagtacgatcatcgtagccttgctgaaaaactcaaattcgtcgaactgcccactgtagcgcagcagtttattcccgcaggtagcactcacgaattagtggcaaaaatggtcgtgagcggcatagctgttagtagccatatcggagaatctttcaagagaattcaactagaacatggtgatgaggcagcgtttgcatacctcgcagccaactcagatggatttcatgtaactccttacggcttctgcaccaacagcttctcccttaatccttgctcgagacatctcaagtgtttcgatggatgcaggcattttgcagcaagtggcttgccccatcatcggcagacgttgattgatttgaaagaaagtctagtgattatgcgctgctctgctgagggcaagccggtgagaacaacaggtcgagcgaatcaaattgcgcatgcatccaaactcattgatggtgtgcaaaaagcaattgaagctcagccatatgaaacaatttatcccgatggagtcgattactcaagacttgacaaaaaggacatcttctcatga

SEQ ID NO: 362117 - DNA, 1131 bp, Pseudomonas aeruginosa
atgtatttttatgtagatgagagtgggcaaacgggtctgaatctgttcgacccgcagcagccgattttatactatggtgtactgtcctcgccgcacaatgtggatgaggtcgctaatgatgaaattcaagaactacgcgaacgctttggcgttgcaagattgcactcaagtgagttgggcatggggcgactgaccagtattgcctctgaactctcggcattgcaagcaaagctagacttgaccatagatatttatcggatatccaaacctgatcatgctttgataagtttttttgaccagctctttgatcaggggctcaacaaggcagttccatggtcagcatattggactcctttacgtttcgtagtattagcgaagcttgcatacctatttgatgaggatttgattaaactagccaggaaggctcgaatcgagaaaaagaccgaaaaagcaaatactatattgcaagaggtatgtaacacgctgctgtgtcggattgactatcttcccgaccctagaagtcgcgaaataatacgagatgctcttacatgggcctgcaagcatcctgatgaaatccattacaacatatacagcaacaatgatcgccttcaaatatctcctaatttaatcggcttccagtcagtcatgcatggtattgcactcagactgaaagtcggcggaggggatgccgctgcaatcgtggttgacaggcaaggtgagtttaatcgcgctcaagaatgggtcgctaacttttataggagcgcgaaagataagggtgggccatgggaagttgggccgggcctgcctaaaatggatctatccaacatccccgacattcctatcacgtgcacccctggcgatatgagtgctggtttagaattggtggatatttatctttggttgatgaagcgtctttttgagaaaaaagatttgagccctgagttgctagagcttttagcgcctcaaatggaaaaaggaatgactgacgaggtttcgtttgctggaataatgaaacgatgggagccagttctgatgaatcttcctgatccaagccccgaagaggaaaagcgtgcgcgacaactcatggcccgtcatgaagagtatcgaaaaaatcatcttgatggaatatag

SEQ ID NO: 362118 - DNA, 2154 bp, Pseudomonas aeruginosa
atgccgacacctgtaggtcgaaccgaaacggaggttctagctgatcttgtgcagctaactgcctcacctggctacgttcatgcgattgccttcatatgtcaccgggacaacctggtcctgtaccgcgatgagctgaacccgaaggatatggctcatctgttcaccaacgaccgattattgaggactgagatcacgactttgcttgggttgatggtccgccaggctttggacatgagcgtgcccaccgtagaggtcctgggatatttggtagaacgcaccgacacgctgatgttggagctacaccacgcactttctcgaccgatgctttcatctctgacggcccaagcggtcagcggtagcacagccgagataggctgggacggtatgtccatgcgggagccgattttttatggaaccgagtccgcatatagtttccagtaccgagatttacttcccacaaagtacggcgcggacgatacctggctcgttgaaaaaatgggcttcaccatcacccaggcccagttggtcgctagcacaatgtgtaacctaatggacgagaaggcgtgcgcgacttttgccaagtccagagccccagtgattgacccccacatattgataggagcgttcgaatattcagcacagcttgttgcggactcaagcgggctggatgttcccattgtcgaagctgttttcggtgcattgacgctaactggcgataacctgcagttccaaaccattggcgatttcaacgcggtcgctgccacaccgttgctgccaaccggtcgcggtactgtgttgctgttccagcactacgcaatttatgaggcactttatgagtcgccctttttttggatgtgggccgacaagccgtaccggccgactgctatggagcatcgcggtgcatttgcagagcagttctcagcgctgagattgagagccgttttcggtcaggacaacgtgcataccaatgtgaatttgttcaagggcaaggacgttgcgggtgaagcagacgtgctggtggtgttcggggatcgactgatcatcatccaagccaaggcgaaaaagctgacccttgaggctagaaaaggcaatgacggacaactaaagtccgacttcgccgctgccattcagcagtcctacgatcagggatggatttgcgccaatattatcgtggagggagagtgcagactggagaatgatcaaggtcgagaattgaagcttcctcatcctcctaaagagatctatcttttcagcgtcgtttctgaacactatccggcattagcttttcaatccagtcagtacctaacttaccagacgactgaggtgatcaaagcgccactcgttatggacgtcttcctcttggacgctattgcggagatgttaacgtcaccgctgaggttcctcagctacattcgtctacggattgccgcagccggtaaggtgaatctgagtcatgaactgacggccttgggattccatcttaaacgaaacatgtggcttgatgaggaattcagctacgtgatgattgatgactcatatgcagtcgatctcgataccgctatgactgtacggcgggaggggcatcccggcaagcatacacctgaaggcatactgactagattggcaggcacgcgctatgagcaggttatttctcagatcgaagctgaggccaatcctgcaacgcttgaactcggacttcagcttttagccatgaatgaggatgctgcttttaatgtgcatcgtgggctggaagccattactcgtatgacgcgagaggatgggcaggggcacgactttacgatcggggctgagcaaggtaactccgggatctgcttccactctaatagaatgccgtcgccggcagcgatgcgccggctgcaattccattgccacaagcgtaagtacattatgcgatcagatacttggtttggcttggctgtcgacggggattgtgacattcaattcggcgtaactttgaattttccctggactgagtctgatcagatggacgaactcaccagagatgctcaggcgccagcgccaatatcatcgttaaagtctctcatacgccagtcgaatgggaggaaagtgggtcggaacgaaccctgcccctgccggagtgggaaaaaatacaaaaagtgctgtatgtcttag

SEQ ID NO: 362119 - DNA, 741 bp, Pseudomonas aeruginosa
ttgaacgtacaaagccgggacacggcccctacaaagccacgcaacgcagaacaagacttgatcaagtggatcgctctcctcacgatggtttttgaccacatgcgtttggtatggcctggtgcagaggatcttttcgtcctgggtagactttcgtttcccctgttctgcctcgctatcgcaatcaacgtcgcacgcacccagccgggcgaactcttcacccgtagtaatggccgatatctcgcgctgatggtgctgttcgctgccatctcggaggtcccgtaccgaatgatcagtagctcaggcacgtttaacgtgcttttcacgctgatcttggggttgatggttgcctggggagtccaccaccggaactggtccagcctcttgatggctgccatagcactcggtttcgccagtgttttcgcagatccactgatgtacgggttttacggggtattggtaccagcggctttagtacttgcgatcaagcgcccggaatttttcgcgatggtcccggttgtactgtgcgtgctagccaattcgcgtacagggcttttttcgcaagccatccacttggagcccgctgccttggccgccctcatactggctgctctggcgccacttctcggactgatagttctgtggtcgcgtatgcctttcagggttccgcctgtgactcagtggagctattggttttatccaggacacctcgctgccttgctcggtattcgctccctaatgtga

SEQ ID NO: 362120 - DNA, 444 bp, Pseudomonas aeruginosa
atgatgttggcccttggcagttacctaggtctattcctggccgcattcggtgctgcgactctgcttccaatgcagtccgaggcagtgcttgcagggatgctggtctctgagtattacgatcccctgctgcttttgaccgttgccaccttgggcaacgtgctgggttctgtggtgaactggctgctagggttgggggttgagcgttaccgggatcgccgctggttcccagtaggtcctgacaagctgcagaaagcgcagaacgtgtaccaccgctatggctactggtctctcctgctcagctgggtcccgctgataggagaccccctgacccttgtcgcgggcatcatgagagagccgctctggcgctttcttctgatcgtctcggtggccaagggcgctcggtacctcattctcaccatgcttgtcctgggaagtatgccttga

SEQ ID NO: 362121 - DNA, 306 bp, Pseudomonas aeruginosa
atgaccgagccagtccatgaacatatccatggccacacccatactcatcagagtcacgaagcaatcatcaaacgcctgaaacgtgctgacggccatctgcgcagcatcattaccatgatcgaagaaggccgtgagtgcgtagacatcgcccagcagctacatgctgtcgaaaaggcagtttgccaagccaagcgcacgctcattcaagaccatatcgatcactgcctggaagattcggttaccgctttgagcaatggtgatcgatccgcaatcgacgaattcaagcagatcaccaaatacctctaa

SEQ ID NO: 362122 - DNA, 297 bp, Pseudomonas aeruginosa
ttgaccctcaaacctggcgagggtcgtgagatcaagctggagatgctcaagggcagcgtggtttcttaccaatggacggcctccggtccagtcaaccacgatacccacggtgagacttacaacgctgcgcaaggcgatttccacagttacagcaaggggcgtcaggtcaaaggcgataacggcgagctgacagcgctgttcgatggaacccacggctggttctggcgtaaccgcacctcgggcaatgtgaccatcgcgctgcagacatcaggcgactatctgaacgtcaagaagtaa

SEQ ID NO: 362123 - DNA, 1446 bp, Pseudomonas aeruginosa
atgcgtttacgggactttttcgttggaagggatgcaactgcgcgccttatgcagttcgatttgctgcgctggttttccattgtgagtgtcctgatcatcactctggtcgcattgggcctgggtttcatcgcctctcgattcgttgtgaacgaaagcatccagcgcgatgcggccctcactgcacaattcattcagtcgctggcttccagtgagttgagcaaacattacttgccaaaccgtcagatgggggaggtgttggaccctcgggccgatatcgttctatcgaaccaggagcgcattcggcgacaaactgcccgccgagagtttctggcacacatcgacaacatttcgaagcaacctgattcgttactgatcaacatctacgcccctgacaacgtcgtgatctggtcaagcaatccagcactggtcggcatgcaaatatgggatgacgaggaactggcccgttccttcgcaaccagaaagcgtgtgttcgcgacctatcacagtgcggtacctgaaagagaggagcagaacttcccaaggcctccacaagggctgttcattgaaaactacattcccatgctcaatgcttctggcgaagcggttgcccttattgaaatttacaaggagccctcggatctgatcgccagaacgcagcgcggctatttgttgatgtggctggccacttcgattgggggagcgctgatctacctggctttgtaccgggtcgtgcggaaagcggcaggccttctcatcgcccagcaaaagcagattatcgaaaatgaaacgctagtcgcgatgggtgagatgtcttccgctgttgcccatagtctgcgtaatcctctggcgagtattcgatcgagtgcggagctcatgcaggcgatggcacccgatgggctgcaacgtaacctgaatgacgtgatcaatcaggttgatcgcatgtcgcaatgggtccgcgacctccttgtgacatccggcccatcagccggagccagcgaaaacgttgatcccatggccgtggtagaagagtctttggcttctttccagtcgcaaatccgcagtagcggcgttgaagttgaacttgtagcagccaatgaccagccagcggttctgagccagcgcctcctgctcctgcaggtcctgaacagcctgttctccaacgctcttgaggcaatgccaaaagggggccttctcaccatcgaagtgctcagacattcctccgaaccgaaactgaccatcgcgatcgccgacaccggtagcgggatgtcggtatcacaacgcaaaaggctctttcagccattcacaacgaccaagcaaggtggtttgggcattgggttggtgatggtcaaacgcatcatggagcgctttggtggacaggtagacatccacagtgcgcagaacgaggggacccaggttcgtcttacttttgcccttgcggctcagtga

SEQ ID NO: 362124 - DNA, 726 bp, Pseudomonas aeruginosa
atgcggctggcgggcgtacagggcctgctccagggcatccagtacgaagtcggtcttcatgctggtactgactcgccaccccacgatgcgccgcgcaaagacgtcgatcacgaaggccacatacagccatccctgccaggtcgacacgtaagtgaaatccgacacccacagctggttggggcggtcggcctggaattggcgctggacacgatccagcggacagagcgacttgtctccggccaccgttgtccgcacgacctggccgcgccttatgccctgcaatccagctcgacgcatcaaccgctccaccgtgcatctggctgcctcgatgccttctcgccggagctgcttccaaaccttaaccgcgccatagcactgcatgttggcattccacacgcgctggacttccaggatcagtgcctcgtcgcgccgagcacggcaggagcgcaatgccggattgcgcaggcgggccgcatgcttgcggtaaccggacggggcgacctgcaagacacggcagatcgactcgaccccgagacggtcacggtactgatcgacaaatgccctcaggacttggtgcggcggtcgagctccgcctgggcaaaatacgcgctggccagacgcaggatctcgttggccttgcgcaattcgcgattctcgcgctccagggctttgatgcgctcacgctcttcggtggtcgcccccggacgttggccggcgtcggtctga

SEQ ID NO: 362125 - DNA, 1200 bp, Pseudomonas aeruginosa
atgaatgaaaatgccaagatctctctgcgcaaaaaacttttcggaatatttaacaattccaacccttcaataaacagcatcgtatcgagcgaaacccaaacaagacttaacgatcttgcaaaggccattcagaaaacaaaatcaaactggctatcattcgaagactcgcgcgcatttatattcactatattatttactgcctttggcaaagctgtgaaggctggtctcgacccagagaaaacccactaccacgaattaatcaacgaagaagaagaagccgatagactaataaagatcatcgatggaataccatatactctcgacgtttacttcccactaccctatctaaaccgagacattgacttagatatcaggattggcaatatagctgaattgaaaaaaagccgtatattggacattcaaaagccgaacggattcaatttcgaggcgcaaagctattatttccgagcgactattcaagggtacgttggcgcattcgtccatagcattggattcgtcgaggctcttggaaggttcaagaccttcattgaacgcggtgtttcacatggctttctctcaatcgataaacaccctatctacaaggaagaaataacgtcagtaccctccgaaactttaaaagcttggttcaggcagccaaacgtgacggaccaagaacctataaacattcaattacctatcgatatatcaaaccttatcaaaagggtgtcgtttaataaggatcgtgtaaaaccgagcgaaagcatagtaacaaatcagaagcatgcggaagaaaccattagatcccttgcaacactctggaactctgagagtcatttagcaaatcgtcttactgcagcttcagagtggcacttcgactcactagccacagagcaggagacaataaagcttatacaagtatgcattggactcgagtctatatttggagacgacaacagcggagatggtttgacagagagcctttccgaccgatgctcttatctaattgccgagaaccatcaacaacgcaaagaaataaagaatgagttccgagaactctacagactccgatcaaaaatagtacatggtgtaagtagaaatctcacgtctgagcagcagcggtacctctcctacggcgagaatttattaaagaaatcgatcaatagagaactcgctctgtgcattgcacctagccaaggttag

SEQ ID NO: 362126 - DNA, 948 bp, Pseudomonas aeruginosa
ttgagttccttaaatatcctgaaagagttgctgaacgatcacttttctcgcgatgcagtagagcgggcggaagagataaaacgtgagctatttcctgatcgtctgttcaagtatcgaacgtttgatgctgatgggcggaatctggaggcgcttgaaaacaataagctttggtgttctagtccgttcggttttaatgatccttacgactgctctctgcactttgcgatgaagaagcttccagatgttatgcggcgggcattagagaaattaaataacagtctttctgagcgtgttgggtcggctctgttcaatcctagtgaactggatgagatttcccggtctgaagatcctgctaaaactactacagaagttttgaagcgtaaggggttggaggagctagctgcttcttatttttatgatcaactgcaaagtatggtgcatgagcctagagataagctcgaaaaaagcatgagagatggtctgtatgtaggctctctctgtgagcgccatgactcgatgctcatgtgggctcactacacagagaaccataaaggatttgcaattgaatataatttaagatcaaaagaagcagagggttttattgaccgattgtggccggttttctatcaggaagatgtatatgatgttagtggaactatattcggggagagagctgatcacatcaatgatatgttcatgatcggcgctgcaacggttaagtcggacgagtgggcatatgagagagagtggcgaatagtcctgttacgaaaccctccaggaaagggggtgctattagatgttcctaagcctgccgcgatttatctcggcgctcaaattgaagataaaaataaggaaaagataatcaaagctgcagcagagcgtgatattgctgtgttctgtatggagcgtgagcgtggcagtttcaggttgagtgctcgccagctttaa

SEQ ID NO: 362127 - DNA, 579 bp, Pseudomonas aeruginosa
atggctgataccgcgcctgactgggacgccatccacgccgagtaccgtgctggccaactgtcgaacgtcatgctcggcaagaagcacggcgtgacggagggcgccattcgcaagagggcgaaggctgaaggctggcagaaggatctggccggcgaagttcgccaccaggtgaaagagaagctggtacgagaggaggtacgagcccccaacgcgcgggacaaggaagtcgtcgaagccgccgcaaatactggggtggacgtggtacgaaggcaccggcgcgacatcgccaagggccacggcctggtcaacctgctgttccagcaactggagcaggcggcgaccgcgcgggacgagttggaggatgccgtcatcgaggagacggccggcgacgagaacaaccagcgccgcaaccggatgctgaaggcgctgagcctgcccacgcacgccggcgtgctgcgcgacctgtctaccgcgctgaagaacctggtcccgctggagcgccaagcttacaacctggacgacgtgaacaccgaggagacctacgaggagcgcttggcgaggctgctgggaagtgggtaa

SEQ ID NO: 362128 - DNA, 408 bp, Pseudomonas aeruginosa
gtgtgccaactggtggagttgctcctgcagcagggtgtgttcgcggaggcggcggacctgccggccatcctgcactgggagcgcgagtacccgctgccgcgcggccgcgctgacttcgtcctgttccatgcggacggcagcatcacggtgctggaggtgaagaaggcgggcgacgagcagcgcgccatcctcggcgccattggccaggtgatcagctacgccgtgcaggtgggctacgccaggctgccgacggccatccggatgatggtggccgccgacatggtcggtgctgactcgttgctgatgagccaggcctgcgccgcggctggtgtgcagtggttgccgctcggcacgatggaggagcaccagcgcccatggatagcagtgatgagggggagcaatggctga

SEQ ID NO: 362129 - DNA, 471 bp, Pseudomonas aeruginosa
gtgatcatcggcatcgatcccggcctaagcggctgcatcgtcctgctcggcccgaagaacacctacctacgccacctgcacatgccgaccatgaaggtgggtagcaagaaccgcgtcaacggcgctgccgttgcggcattcctgagcgcgcagcaggtgcaccatgcatacctggagcaggtaggtgccatgccgggtggtggtgagcgcaccatgggcgccgcatcggccttcagcttcgggcatggcgccggcgtcgttgaggggctgctgcagggcctgggtattccctacaccctggtgccgccgcagacctggaagaaacgcgccgcgctgcagggccaggacaaggacgccgcgcgtgctcgcgccatccagctctatccgggcgtgcgagaccttgatctgaaggcgaagggccaggccctggctgacgccatgcttatcgcgcgctttggcgcgacgtcgtga

SEQ ID NO: 362130 - DNA, 306 bp, Pseudomonas aeruginosa
atgagtaagtttaagcctggagacctggccatgatcgttgcatgccggctgcccgacctgatcgggaagaccgtagaactggttctacccgtatgcccgggcgaggaggctggccatggcggcaggaagtggatgaacacgagcagtcacctaggctgggtcgtcgcgggagaggggctctacgttctgactgtgagcggccgcgtggagcttgaccggttcacgttgatgcccgagcacaagctaatgcccctcggcggcgatcttctgccagagaaacggcggagcagggaggtggtggcgtga

SEQ ID NO: 362131 - DNA, 321 bp, Pseudomonas aeruginosa
atgggcaagatcgtctcgaaggccgtccgggattctgcccgcgacgagcagtgcacggtgaacatcgccggagtctgcagctaccgcaccgacaccacggtgttcgcccatctaccggacgagagtaagggcatgggcaccaaggccgacgacctgagtggctgctacgcctgcatggcctgccacgacgtgctcgatggccgccgtcgacattcgctgagcgccgaggagcgcgagtggtacatgcggcgcgcaatggtgcgcacctggcgccgcttgctggagaagaaaatcatcaccatcaagggagtagcggcatga

SEQ ID NO: 362132 - DNA, 240 bp, Pseudomonas aeruginosa
atgtccccgttgagagaggcccggaaacggcgcggttggactctccaggatgtggttgctcgcttgctcgagcagggctgctccctggataccggcaacctctcgcgcattgagcgcgggaagcaaaccgcctcgacgactgccgcagagaagctctgccaggtgttcgggggggaactgacagaactccagattttgtatccggagcgattcagaaaacccccagaacaagctgcgtag

SEQ ID NO: 362133 - DNA, 633 bp, Pseudomonas aeruginosa
atgaaaattggcgactcaatcagagctgcgcgcaaagcgaagaaatggacgctggagaagctggcccacgaagttgggaccgatccaggcaacctctcccggcttgagcgcaacctgcagtccgtaaacaaagaggtgatggacaagatcctttgggtcttgggcctatccgtgtccgtggaaggcccgggcatcagcagcgaggacaaagcccccgccagccgagaccaggtcccactgatctcgtgggtcaaagctggatgctggagcgaagttgctgacatctatgcagatagcgacgcagaggcactgctgccctgtcccgtcagccacagctaccgagcgttcgctctgaaaattcgcaccgaatcgatgttcaatccccacgagcgtcactccttccgcgatggggacgtgatttttgtcgatcccatggttgaaccagttcatcgctccttagtcgtgatcaagcttgagggcgcacaggaagcgacgttccggcagttgatcatcgagggcaatcagaagtacctgaaggccctgaacccggcctggcctgagccgatcattctcgctaacgaaaacacgacgctctgcggcgtggccatcgccaagcacgaaccgctgatctag

SEQ ID NO: 362134 - DNA, 864 bp, Pseudomonas aeruginosa
atgcctaattttggatttcatatagcacccacccatcctgtggcagggcgcctgatttatgattctaaaaaattatcagaaaatatattaaagcagcagagcgatgaacgggttttttcaagggggcaagagcaaaaaaggctttctgaaggtgacgtagtcggtggtgcgccttgctgtaaagctatccatattacacttggttttgatgggactaataataacgataaggctgatgattcatcggtttctccatcttgcagtaatgtcgctaggctaattcatgcaagtattgggggcggcaatgatataaacagtagggggatttttaagtactattgcccaggtgtgggtacggtgtttccggatattaaagaatttacgccttcaaacatgggattaattggtgctgagggaggcgaaaatcgaataaactgggggctggttcagttggttgatgctcttttctatactttattaaaaagtaggcttaaactaaatgaggttcagggcctagtagaagaaatgtccactaactggaccgtcagtacgctcactggtggtttattggaaaacggcgagaaaaaacgccgagctgccttggagccaaaactcaaggaactggaagaaaagcttcgacagcgtcagaactctggacagaccgcatatcctggccatgcgcttgtatgtctacggattctcccgtggggcggcagaagcacgagcctttgccaactggctgcaggagctaacccgggtcagcgatgccgatggtcgggtggaatatcgctttgccggtctgccgatctcgatcgagttcctcggccttttcgataccgtggcggcagttgggctggcggatag

SEQ ID NO: 362135 - DNA, 5196 bp, Pseudomonas aeruginosa
atgtttaagtggttaagggcgcggctgagtgaaaagcaggtacagccaacccttaaaagtgagccagtgttttcggagaccgagaacttgcaatccgtggaaggggtatctcctctaccgtccggtattctcgattattggcacgaggtattgattaaggatgacctcgacggtttgcaatcggctgacgtacgtattcctctcagcaactccgagcagttggcacgtcctggatttgatctggggtttggaaagtaccgcagacaggctctggatttcatcgtcgagcgagacgagcaggagcggcgaaaaagtgtcgaggaggagtctagcgaaaacgcactggctagcgaggtagcaaccgccgatttgactgagccgccgcccgcttgtccgctaccttcggaaccagaggagcggaggattccgatggcgctggtgttccacgttacggaaaaagccaagatgcgggttatctggcctcagccgagggatgaggaaggaaaaggagctgaagataaatctgcagacgagaaaactccccgcctgaatatcgttttctggtttccgtttgatttgaacgcagataaagagatctgccttcctcgggacgagcgcgattgttatccgcgtatcgttcgccaatggcttgatccccagccgttgatcgcgcatcaggacatgcccgctgcgatcggctatttcgagacctatcgtcaggctttgaaggcctttttctcagagcagggccgtacatctgatctggaacgctatgtggagggctgtttcaacctctttgctcgggttcaggccgacggggaggactacccttcatccgatcttgcggggcactgggttgcggtgccgaggactccaagctacgcgacgcgggccttgtcgagggtctaccgggcgctgccacgggcgaatagcatcggtgcattggatcagttgatctcacctgggcgcctacggcttccgctacgggtggatgccacggcatcggcagatgtccttttccgtcatctggcaatggtggacaaggcggctaagccagaaacgccggatgaagcacgttccgccgacccattgaacagctcccaacgccgtgcgctgcacgcgcttgtaggcctgggtaagaacgagggtgtgattgcggtgagcggccctcccggtaccggcaagaccgctatgttgcgggcgatgattgctaaccagtgggtgctggctgcctacgatcaggccgaacattgtcctgtaaccgtagtgtgcggcgctaccaaccagagcgtcgagaacgtcatgggaacctttgatggtgcggtgggggatcggcatccgttggcacggcgttggctcgtttccaagggaaaacgcttgctgggattcacggcaagcgccccttcgaagagcaagctcaagaagcatcgtgacaagttcactgtcctcgaggcttccgaggctgctttgccgatacaaggtgttggtgcgagctgcacttacatcaaggggaatgaacgtgcaaaggccgctctggagatgtctaggtgcttcgaaggcgcgttctcttcactcgaaaccctattcggcgtgctattcacagcagagcataaaacccgcgtaagcgactgcacgcgccagctggcgcggttgagaaaagtagaggaggctgctggcgatacagccgcggatgatgcctctttgcggcgagacatcctcgatctcctcggaatactggccgagatcctcgggcaaggagtgcgcaaggctgtcgacctccaagcacgtgtggatatttccatgtcgctggagcagttacagagcctgttgccaagcgaggggtgggcagcggagcgcgcggattccgtatcgaagagatggtgtgaggcacaggatgcgccgtctcgtctggctatcagggaagaactgctggatgtgctgtggcgccctgtaatcttccaattggcggcacgctactgggaggtgcgttggcttatccgcgcgattgaaaaaggggctcccatctctcgccgggaggccttgcgccgcgccgccatgttgctgccctgcatggttgccacactgcacagtgctccgcggctgttgagtgaggggcagcagccgctgttcggctttgccgacctgctgatcattgatgaagctgggcaagccgcgccggagttgggcgtgcctattctaagcctggcacgccaagcggtggtggtgggggatctcaaacaactttcgccagtgtcatcgctgacaccggagctcgaactgcggcaggtgcttgatcgctggggggatgaagcgaccctagatgccctgtgtgtgcgtggcgccgatgcggcgaccggttcgatcatgaaactggcggcgaccggagcgtcgtatgcggaggtgcggcctgacgggacgttgcgcgatggcctgttgctgcgcgaacactatcgctgtgcccgctcgatcatccaggtatgcattgatctgctgtaccacgaccatgaccgggatacccaaggcatggtgctcaatcgggagttggtgccgatggtcgatgatccgcgcccagggtttctgggcgatggtgatctacctacgctggatacggatgaggagcaggcgctgctggcacgcatgaaaggttcctttccgttaccgcctttgggcttctaccagactggcgggccgaacgacgggccagtgaagggcgactcctggtccaatcctggcgaagttcaggcgattgtgcgctggttgaaggaaaccggcttgccgctagcacgctgggctgcgcgtgccgaggggcgggcgggagagcaggtgccgctggaaaaactggtggccatcgtgactccgtttcgaggccaggccaaggctattcgccgggctattggcgagcagctggatccacactgcgaggggctcagcgaccgattgaccatcggcactgtgcacacgctacaaggcgctgagaaaccagtggtgctgttcagcgcggtgaacaaggacagtcgtgctacctgccggcaggaagacaaccatcgccagcgggtattcatcgatcgtgatgacggacgcttacttaatgtcgcgatcagccgtgcgcagaaaagcttcattctgttcggccattccgagttgttcttttcgcagcaggtgatgaacgttgggaacgatctgccgtcagcgatcgttggacgttgtctggcgggggttgatgagccacaacgtgcgcaactgaccggtgtggtgcgccgcccggcccacaaactcgggcccagggcactgatggtcgtcgagtccgcgcataaggcaggaatcatccaggagctgatgccggcatacgtgcaggtattcggttgtggtgggcatatccgggaactgccgggggcagggacgattcgctggtgcgatggcctgcgaccccgctggcaactcagccagcgcgaaggtagcgatctgcagagcgcactgtgcaacgctgctacccgcctgctgcagtgtgatgaactggttctaggtaccgatgacgacgctcagggcgaggctatcgcttggcacattctgcaagtgcttcaggatgcgccctggttcctgcatgtcaaacgaatcaggcggatacgtttccacgcgctgacacagcccgaactagagcgggcgtttcacgccggcgtatcggttccgctcgttggcgagacggcgcagcaacgcgccgccagcgccctgcgtgcattaaacatggggctggcctatggtgccattgctacccgggtgttggataacctgatcggttcggtctacttgcaccatggtgtagtggggggcggtagggtgaaggggcccctgttgcgtgccttggccgggtatggtgactctcctggcctgccgaataagcgccacactctggccatcgagctcaaggtcgatgagcgaaccgtccccgcgcggttgatggtgcgacgaggtaagacggggtggttgccttggggcagtgatcgtctggaggatgcccaccgcttgctggagcacttgccggaggctgtgattgcatccgaaccctgtctactggaggttgaggagcgcctgctgccggcgccggaagtgctgggaaccggcctggtactgcaagaggcattcaggcgcctgggctggttgccttcgaagaccatgaaggcgctgcaggggctgtatgaattgcgttctgttgatgacgaagagagtccactatctccctttggcgaaggttgggcctgcgaggatgccggcgggcggttgcgtctaaccgcattggggcgagctagggccaagtcgttgttggaaaatccctggctggaaggaatcagttcgaatgccctgctgtatgacttcgaccaggcgttgaaccgctttgccgaaaaaacgaacgctagcgagcaggattacgctgactttctcggcacttgggcaaggcgcttcgatgatcgcaaggaggctgatacttctccgcccatagccttgccgtatagcgtcacgcttgatgccgaggggaatgccttggcgctgtttagcggccagccggaagtgcccatagggggctgggagccggtaagcgctgcgccgccgagctgtgcatcgggaaagggcgcagacgaagagcctgtgccgatcgcggcgggcgcacgtactggcgctcatggcgctttggttccgctgaatattgcgataggagccgatagcccggcaatgcaggcattttccgcccaccagcgtcagctatacgacctgatgtcgaagctcgccctggcgtcggcgctgcgtgatggtgaggcccaggttacacggcgcgtctatccgttggcatggcctcagatggaaacgcatcggcaggtcgagataggcatcgaggttacaaccgccagaccgggccactaccgtggctggttcgatctggatccagaaggtctgtcccgttatacggccctgtggggcgatgaggacaccgaacgactgctggcaggtggagccgtcctgagcctgcagcctctggctgacgatgccttgcgtacgagttcgttgccagagcccactgtggatcgattattgacctggatggaaacgcgagggcatggccggccttccacgtttgccactcatgtggaaggtttgctgcgcagcacgagacgcgaaaagacagggggagagggaaatgactag

SEQ ID NO: 362136 - DNA, 1032 bp, Pseudomonas aeruginosa
atgactagcggcttccaggcaatggcgcaggtacgcagcgcctaccagatcatgttgagcaatgccggggatgccggcgccatggcggccttcatcgaggcgcacaatactcatcaggcgacctatgtggaagccttcgaggtcggtggcgtgtcctacccacgcactgatgggcacaagctgagcgagcaagaggcgcgcgcagccatctcccgattactggccagcggctactcagcactggatctgcggccttccgtcgttgaggcagcctacccgttggcggaagaagtgttacgccaggaagtggaagccgcggtacggctggctgaaggtatcaatcagttaaactggcgaagcgagacccttgatgccgagcgtcgccaagccattcgtgacctgctgcgcatgccgaccctggcgggccgttatcaagaccttaagcacgccaaggagcaggccagggccaatgaactgaaccccatgcgaggcttcgatgccgaccacctaatcccggataaggtgttgcgaggtgctttgagcagggacaactctgccaccctggagcaaagcttcgcgcactttatgcaggactcgcagaaccgtggctctcaacatcggttcgtgaccgatgcgcagcgaagtgcggccaaggtcttgcgtggcgaccgttctcagcctgcccagaatcccacgatgggggcttatctagagcgcgctttcaaatggatggaacaggtatacgtaaccgctgacctcggggtggacatcgccgtcaaatcttcgtggttatccagtcgagatgacttcaataacttcagcgtaaagggcttcgcgcttgcacaggcgggctttatgacctggcgcgagcgccaggaggtcggccgggcggttgccacggcgctgatgattgaggcgcgggagttctacactgcagccggattgcaaatggaggcggagttgcctctgtttcaagacctctcggtgagtgtcacccaggcccctatcccgaacttggggggctcggtatga

SEQ ID NO: 362137 - DNA, 855 bp, Pseudomonas aeruginosa
atgtttcacctggaggcatgcttcagtgggactgttcaagcaatggtggccgatgagtatggccacatctgggcaatcaccgatgaggatctgctgtttaccaatcacttacccggtgatgctgagggctgggagccccaggttgcgcaccctcagttggtggtttcggatacctggtatgcgcggcgcctgacgtttgtgctcaatgggcaggcccagcccgaacttgcggaatgcctggcatgggttaatggcgctttgctaatcggcacattccagcgccgcctttatcaatgggagtctggcggcatggcgctgcttgagttcgatggccatgttcccggagcccttggaggcatcaacaacatcgtgatgacccggcatggcatctatgctctgggctatggcggcactctgtggcgaaggcaacaggaaggtatgtggcggatgctgaaagggccttggcccgaagagtcttcagcattcgtcaatctgatcgctggcgttgaaggccctgccggagagctatgggccatagcggccggaggttcggttatctctgtaagcgatgatgtggtaacgaccatagctcaagtttccggagagccgttgggcattgtgcgtttccagctgcaatggcttgtgtctactctcgatggttgctacgcgttagttgaggatggtggcgttctaccgatcaagctcggattggttatggggaagggcattaatgcaggtttcgctttggtggcatttgatgccgaacctttaaagccagacagtgctggcattcatgtatggctgcgcacacggagccaggatcgttggcttcgtcagttggtgtgttttccgtga

SEQ ID NO: 362138 - DNA, 1563 bp, Pseudomonas aeruginosa
  misc_feature (1484)..(1493): n is a, c, g, or t
atggcgcagctattcgtagcaaaaaacggaatcaacccttctagccagatatttaaatcaataaagctattggagagcattcccgacgtcaggataaaaaggctaatttctctcgcagatccacaatgcattgcgtcagacggcgaatatctcaacgcactagataactataccttagggaactacagtggcgactataaaattacgactgatacaataggcgtagtttccgcaaaattcgcccagctgaactccccgcctccgagtggagaggatgcctctgtagcacagaaaatagttggctgcatattcaatatgctcacaagccctgcccaaagaaaatcacttgcacctacattgagaaaactgtcgctgtatgcgggtcagccaatcgcaattcaaatggctgaatttattaaaaatggacaagattacttatttgatgacgaaatagacgagttggccttccttgcggcgatcggtggaaattcagacaatcctcggaactcaaaattactcagaaagctcaatcctgatttttcagcgccgcgctcagactcagtcacaagaaaactctatgccgcgctggaatcaggctatgaggaaggagttgctcttattgatagccttggaataccgaactccagggcacagacatacaaaggtcatcttgcacatataaacaatgatcttgaaacggcaattaatcactacaaggcggcaattgcatgtagcaacggtttctcacgagaccgcataaacaagaatttatttagagcgcttttcaacagctcccgcatacaagagtgcgtagaccttgtcgcagacatgcagctcaattctaccttaactgaaaattcctaccctctaatagagttaagtaaacagatggtttataccccggatctaagctttagcatccgggctgcgatggtaatacacctcacatctaagcttgatcctgagtgggagcgagtcctgtcggattattacgaaaacattatgtactcccttggggttagcagaccatcagagctaactaaatcagctccaagcatagcagtagatgagctaatttatttcctcagattcatatgtattccaagaatactcgacgacacgaccgaatttgagaatcctgatgaaattgatcaggaaaggatactgatctactccagcgaaattagaagcattacaaaagatggaagggttaccgacgctctaaaccatattgaagcgagcaatatctatgtcgatgaagatggattaaaggattatgtcgagcaaagtataaaggagcgtttcagcaaatatagagagctaagcgaatctccggaaatggaagcgcaagccgaacaaatggtgaaaaatatagaaaggattctgagcgaaagaatcgagcttaaaaacattgagttccccgccattgatcgaaagggaattcttagtaacatgctgcattattttgtccacaattttgcacnnnnnnnnnnattttgcactaaatcccgcttatggcttggatactcacttaagctcaagtattcggcatgggaaatttga

SEQ ID NO: 362139 - DNA, 471 bp, Pseudomonas aeruginosa
atgttagtccatatcattgaagatgatgacctaaaagccaataggctgctctcattcttaaaatccctatatgacagctttcagttcgtggttaatgcgagctaccaaagcggaatgaaggctatggagttggaggttcccgacattctaatactagacatgacgctacccacttttgatagaaagccgcatcagaaggaaggaagactgcgccccttgggcggttacgagatcatgcgcaagataaagctgcgcaatgtgcagacaaaagtcataattgtaacgcagctccccttttttgatgataaaagagagatatctcttgaggaaattaccgagaaatcaatagtggagtttcctggaatctttatgagaagcatatacttcgaccaaagcgatgtttcctggcagaaagatcttaaatccactattgactccataattcacgcgccggcctcaaccaatgattaa

SEQ ID NO: 362140 - DNA, 333 bp, Pseudomonas aeruginosa
atgacttcggatctaagtgaagaagaaatgcgcagggcgctttttggtgatgctgagcccgcaccgctggtgacgcctcctccagtgccggaggcgactgctgaactcgtgttcgagaaaccgaaggcgtctttgcagaaaaagaaggtggcaaaggccttcacacccaggttgcaagtgaccctgatggtcggcaacgaatatgaaggcaagatgtttgagttgatccatcaagccgacaccctgaacaagttgctggcggaacagcaggcggtgaaggctgcccggaagaaatttcgctacgtcgagatggtggaggttaagtcgatgtag

SEQ ID NO: 362141 - DNA, 1107 bp, Pseudomonas aeruginosa
atgtccccactagccactgcgctcatgaattcccggatcgaacattcgatgtccagattcagggccgcagaatgcgcaggggtgagcgaacgaacctggagatattacgagcagggtcagcgctcaccgcgcaaaagcgtcgtacgaaatttttttgaccgatcggggatttcgatgccctcgaacatcgccaagctgctgaaggttgcgcgatcagcccgcgtgctaagcattacgtctctcaagggaggggtcggtaagtcgcccattaccgttgacgtagcagcatgtttggtggagcgaggaagcaacgtcgcaatcattacgcacgactgttgttttgaagatgacgcttcaaatgggaagcaccccaaggcccattcactggctgcaggtgtcgacttctttggctatacagacgtgttttttagcgtggccgaaaaaagtagtttcaccaagcgactgcgacacatcgtggatcatggatcccccatggatcgcagcggactggaattcgaaatgggtggaacacttggttcaatggtcgaaaggatcgcatcctccagaatgttcaaggacatcaaggctgactatgactatgtcctgcttgaccttaatctcaaggtcgacctcattcgcgcgcattcagacctggttgtgatcatcatcgacagcgcttgccatcaatcagtggatagcgcacagcgattgaatttgcgattgctcacaagcaagggcggacgccgtacaccgagatgctttgggttagtcacgcgcaatgatgtaggtggcagaagccaggaattggaggagttttgtggaagcttggagatttctcctgcactggcagaagggctggaagcaaggcggctcagctccagtaaattccgagaacatattctcaaggacatcaagtccctgcctttgactcgcctgatgactcacttgaccaatgctcatgaagtcgtgatcgacaaatacaacagtgatcaaccattcatggagggtttttcgtacttcgattccgtcctggatatcgcccccgattcgcacgcggcggacgagatacgtcggttggcgacagagctcgttgattatcggttatag

SEQ ID NO: 362142 - DNA, 2847 bp, Pseudomonas aeruginosa
ttgagtaaggaatacgtttggggcccttcgtttttcggccggatactgtcgttgtcagcaccatggtcactgcgtcttgcagacggcttttttgagctggatgtccatggcgagcgcgttgtgattcgatcccacgaagtatccagcttgcaggcgacaagaggtctgttctcgggccaagtgagttacccgggcggcaccgtaggcgggttaccgaacgcttcagtttcggggctcaacgcggtcataaaagatgtcactaaggcccacgagcgactgcgcgaggagacgctgcgtgaggccgaaaaacgcacactggcgcggcatgaacgctttcgaatcgcgtacatgcagattcgagactggcttggggaagctgctcgtatcttcaatgatgcgatggcacagcggcgatgggtgactcatgaacagcagatcggtttgcaggcaactaggccaagactgggaatccctgagacagatttgaatgaactacttcaagaccatgacttgagggttgctctgagcattcgccttgaagatatcgagcgcgtgcttactttgtggcgagcggactggagcattaagtggcgcgagtttaataaagagcacaccaaacgagaactcgttgcttgtgaagcgctcctgtcaaaagttgaaaagcggcctcttaacgatgagcaggcgcgggcggtgatctgctttgataatcgcattctggtagcggcctcagcgggctccggcaagacctcgaccatggttgccaaagcagcgtacgcgattgatcgaggtttttttcagccaaaagaaatcgtcatgctggccttcaataaggatgctgccaaagagctagcggagcgcgctgagcagtcgttcaagcggctgaagatggatggcgtcacggtacgcgccaagacgttccaccggctcggcctcgccatcattggctatgccaccaaaaagaaaccacgagttcctgagtgggttgtaaaagagccgttggcatttaagaagctggaggaattggtcgatcatctcaaagacaactcggtggcgttccgcagtcgctgggatctgttccgcctggtcttcggtcgggatcttcccgactttaaatccatgaaagcacctccaaaggccgggacaaaagctggccgactcaatccgatccaaggtgatccggtgaagagcctggaggagtgcatgattgcgaactggcttcactataacggtgtcgagtacgtctatgaacgcccctacgagcatgacactgctactgcgactcacagccagtaccatcctgacttttactacccaaagattggcttgtatcacgagcattttgctttggacgagcagggacagccaccggggcacttcgaggggtatctgcaagacgcgctatggaagcgcgcgctgcaccgtgagcgtggtacccatctgatcgaaacaacatcgcaccaaatccgacagaacacgtgggttgaacatctcacccacgaactcaccagccgggggattgagctcgacccaaaccctgatcgtcctgttcctccagaccgccagccgccgctatccaccactaagctgattggtctcatccgcaccttcattgctcatgtcaaaagcaactgcctgacggaagatgagttgctcaagcgggtagatgagcttcctatggggctgttcaaacatcgctacaggatgttcctcgacatattctggccggttatggaagcgtggaacaaggcgctcaagaatgatggaggtctcgatttcgaggacatgttggtgcaggccgccgagcatgtggagcagggcagatgcgtaccgaacttccgactggtcatggccgatgagtttcaagatgcatcaaaagcgagagcgcgcctttgtcgggcgctggtgagcgtcccgggtcgccacttctttgctgtcggcgacgactggcaatctatcaacagattcgccggcgctgatgtgtctgtgatgactgagttcagggagtacttcggatctggccagttgttaaagctggagcagaccttcaggtgcccccaggctttgtgtgacgtatccagccgcttcgtgagtagaaacccggtgcagctgactaagacggtgtactcgaagactcccgctgtggggcctgcgcttagggcggtaatggtgccggatgcagatagtattgatcacggcatcaacagcttcctggaaggcctggtagctgggctgaaagatggcacgatccctaaagcagatgaccggttgatcaaggtctgcattctcggaaggtacaacaaagagatcaaattcgtccccggcaactggaaggcgcgcttcggtcaatttattgaagtgtcattcttaagcatacatcgctccaagggtaccgaggctgactacgtgatcttgccatcgatggtgagcatgaagcgtggccgcagcttccccagcaccatgactgacgacccagtccttggtctcgtcatgcccaatggggattcttatccgttcgcagaagagcgccgcctcttttacgttgcgttgacccgggctagacgtacagtggtgatgtacaccgttgcgagcaaggtctcgattttcataaaggaactggcgagcgacaatgcgcttcaggttgaggacgtacacggagctccggtcaggctccatccatgcccccgttgctgcgtcggcgacttggtcgtgcaggagagcaagaacggcccgttcgttcgatgcaccaacttcccggagtgcgattacaagcctcccaagaaaaagcccgtgaagaaagctcggtatacaggcaatcgatacggcaaaaaaaggttccgcgtgtag

SEQ ID NO: 362143 - DNA, 639 bp, Pseudomonas aeruginosa
atgactcgtattcgacttcgagaaccatgcattccacccccactcacaggctggctgctcgtcgatgttcatggactaccacggtattgggctacagtctggacagcgttagatggcgccgcgctgcgagattcgactttgtcagcacgcctctcggtcatcgaattgctttaccgctcggtcaagctccaactgggtgaagactgccttgatcgactgatcacggagatgtgtttcgataaactggagcaatgcctcgaagggttcttcgtcagcctgcgcaaccgcagtacgcaggctggcggagatcattccagtgattggcgcgttgcccttgctttcgtcagaaactgcgtcgaacggctggcgcgcggcggtacagcaataacgcccctacacgaagtgcactcacggctgcttcggttggaacggttatatggctcactgaatctccgtcgtcagcgtaggcctgatattgcgcgtgctttaccagctgtggtcatcgaggacctttacgagctaattcgaccagactcaccccgcaatccgttccgtacagaaaccctacgttggcgaaattttgctctggtattgttgatgctgcaccaggccttcgccgcagcgaggccctcgtgttag

SEQ ID NO: 362144 - DNA, 843 bp, Pseudomonas aeruginosa
atgaaagaaaaacttccagtgatcagtgaaactttatccgaagcactgaagttggaggttccgaagcttcctagacttccttcccttgtccgatatcttgacgattttgccgatgagtggaggactatacggaatgtgactgattgcgaccaatggtctcttcaggcggacggcgttgagttcacgcttgatttcggtgctttcccccagccgcttaaggtacttttaaagcattgggtaatatgggagctggcccgcgtggccacaactagcgtaaaaatctatttccactctctaaggcagctccacggtcaagaaggttatagtccactctcggagtttataacccgaaccccacaggatttgcgtgaatattggcacgaaaccctgctcatccgacacaaagcctccgtattacgagctctgaagtcgcttttatttttcatatgtgaaatgtccctcggatacctaacccctggtcatgtcgatttcgttggagcgttccggtggcctagaaatgataagtacgcagcagtacgaactggcgatgttttccttggggccgatgaggaagttgccatcgtcgattttctggatgaggcaaataacctaatacgttactctccagatcaagttgctgactcgcaactcagggtagcatgcattctttgtattgcgtatcagtatgcgatgcgtccgatccagatcgccaaagtgcgtttatcggacgttagaatctatccaggcactgatgacgatggccccgctgttcatatcacgtttctccgagttaaacagcgctcgaacagtaatcgctgcaagccgagcgttacaagtggatga

SEQ ID NO: 362145 - DNA, 2001 bp, Pseudomonas aeruginosa
atgcgggttgcgcacatcgttgacaccttggaggaggctgggacgctgcagagtacctatgcgcttgtgtttcatttcgaggacacagaggaggagtttgatcgtctagaggccccagcaacggttgctccagatgatctggttcgcttcgaaatcacttccgaacagtccgcgactatttatcttgaggcgggttttgcacatgccttccgaacaccatcgaacatcgccgagcgtgcaattgttaagataaccctgcaggccattcacattctatcagatggcgcacttccttcgaggctggctactgaagcattggtgaaggtcgtacctaatgatcgtggcaggcagttccacctcatgcatgcccatgcgttcactgactacatcagctctgccctgccccccaaagcgctggaggtcgatgacatcgacagcgcaagactgcgcctaggattgggttggtcggttcacgatggcgataacaatgttgcaggcgccaaggagtgccgcacacttctaaatagcttggtcgataagcgcgtcgaacacgtgactgctcaattaaacacgctcgaccgcggaaacctcatagagcggctgctcatcaatcacgtggttggtgaggtgaccgaacagctttggaagcgcacatcgggtgcggtgttggggcttcatggcgacactccagcaactcgtagggcggtggtagagcaattgtccaaatcggctgcagctcagatcagcagtcgggtacttatcgaaatggcactctgtgcggccccagtctcaggaggccaggtggcggcgaatcttgacattgaggcgttactcgctgaaatcgcgcttctgattcgcttagggagttggtccgatgggatttactacggtgtactcgaaccgcagttaagagtctcatcgctgggcgacatcctgctcactgacaaattttcgaatagcgttgtcgagccgatgctcagcacagccataggggataggtacgtacgctctgcacctcgtcaaaagcgttattactctgcgccgacgatagccggctcagttgcccacctgctcgagccagagtttgtaaaagcttgggacgctgagatggggttcactgtcgacgatgctcgtcagatgatcgacctactggaggatgagggcattgaaaggcacgcgcctgtcatgtcgctcacacgtagccaattagtagggctcctcaccagcgtatgcgatgcgaacaaggtagatcgattcctcgatcgcttcagcttggccccgcgccctaggtgggacaccccacccagcggtttcaagggcagagacattctcccctggcgatttggtcgcaggctgtcggtggtaacccgtcccatacttcaaatcgacttggctgacgatccaatattcgtgataacgccctctctacttcgcaccggcttcttctatgtcttacgaggagcgcactcaggcacgcttgaccaggagttcttcgcttcccccgaaatgcgcgacgcctggtggggtaaagcgaacgaagggcacacattcaatgcagaggttgcggaaaagctgcgagctgcagggtggcatacagaagagaacatagagatgtcggcaatcttgaaacgcaagctagagcgcgactacggcgatgtcgatgtgctcgcgtggcgggacgggagtgacgaggtgttagttatcgaatgtaaggacctcacctttcgccgcaattattccgagatcgcagctctactctctgactaccaaggcgaacgcaagaatgggaaaccggacaaactacttcgacatctcaatcgtgtagatcgcctaagacagggtttgcctgagcttgggcgccatacaaggattgaggcaccgacgattaaatcgtgtctggttgtcggaggattagtgccgatgcagttcgcgtcagtaccggcccttcagggaacatttgtcggggatgccgaaacgcttttgaggcagattgagcgctag

SEQ ID NO: 362146 - DNA, 399 bp, Pseudomonas aeruginosa
atgtcactgatcgtccaactgagtgaccacttcaaacggctttatgcgaatttccctcggcaggatcagcagctgattgcggaattcatcgtccactgccaagtgcacggattggtgaacctcgaaggcaagcttgcgcgaacgtctaacgtgcctggggttgatcccgattatcacgccaagcgccagttcgcgatcgataactacttgtggcattaccacatcggaatcccctattaccaggcggctcggaatcaattcattagctataagacatccgattgggtggtgcatttccaacggttcccggggaataaggaaattcggttggtggattatggcttccacgatccaatgcacatgcctaagcctgagtacttcgtttttaccaacagctga

SEQ ID NO: 362147 - DNA, 825 bp, Pseudomonas aeruginosa
atgaaaacactaattaagaagttgggggatcttgctctcgcggggcgatgggatattgactttcatttgccacctgtagagattgcaaaatttcctccagaaattactgttcgtgtcgacgaggtagcggacataagtaagctaaagcacgatcctgggcgagagccggatgaactgttccagtacattgatattgcaagtgttgatgtggctacaggtgtcgtggcaaatcctcaggagctacgtggagatgaagcgccgtcaagagcgagaaagttggtgcaggcgttcgatgttattgtatcgacatgccgcccgactagaggggcgatagcggttattcccgtcgatcttcatggtcaaattgcatcgaccgcttttacagttgtgcggcctaagcccggggtgaatccattttatttacattatgctcttcggcttccaagtactttggagcaatttagaaagtggagtactggctcaagttatcctgcgatattagatgatgatgttaagaaaactataatccccttgccgtccccggaggtccaggatcagatcgctttaaaagtgcttgcagctctttatgaaaggtcgtccgcgattgaggctgcgaatgctagttggaatggcgcgcttgaaaatataacgagcacgctttgcggtcatgtggaattgtctcatgctatgccagcgaatcaagatgcaatatgtactattgctggtgttcgcgagaagcttgcgagtctggcgcctttaagctcggatgcagatgcctctctttctgagatcaatgatctttttgaggaggcggcagattcgtaa

SEQ ID NO: 362148 - DNA, 1863 bp, Pseudomonas aeruginosa
atggcagccctcggtaatttctttattatagaaccagacgattggttgttttcgtctcatggcgatgttgcagagtgtaagaggagggcgaaagagtatttcgaccgccatggaagttatgatggagcggagttttatattgaggagtttgtccgtcagtgggcgctagtccagcttattgatagctatagctacccaaaggattggttgggggagcggatagttattgaggagccagttaaaatgggctctacagagaaagaggctgatatatctataaagaactctaatcgcaggacgtttctttatattgagacgaaaaagcgcggaatctctgaagatgagttcaaagaggctgagcgacagcttgagacgtatttggcgtctacgcatacagcaactattgggcttgtaactgacggtgatcttgttagaacaattaggaagaaaattgatccgaatgatttcgagtatattccagatcttccatcgtatgggctagaggctaaggcgaaatatcagcttgtgcgagagttgccggcggccggtgattcgcgaacgacagggctgaagatactagatagcgagtatgagagagttctattcgattgtcatagtgctgctcgcgatgttgatggccttcatgatgatgaagctcttgatgagatttgtaaggttatctataccaaaatctacgacgagcgacaaaccacaaaacagccagaaggcactccgtttcgttttcaaacatatggggccagtaactcttcagaggtggcgtcgaacattcgagtgctctatgaagaggcaaggagtgcagatatagagatttattctaaaagaattcctggctatgagcgttctcgtggggttttcaaggcccaaataaagttaagcgatacggctttgtatcgtgtggttgagagaattcaagagttttctctgattgatagcaaggccgatatcaaggggcgtgcttttcagaaagtgctcgcgcccgcaattcgagctggcatggggcagtattttacacctgatccgattgttgagcttgcagtgggggttattcaacctaaggccgaccagttaatcctcgatccattttgcggttcgggccattttcttactaagaccttgcagcatgtaatggagtatcaaggcgggacgcttacccagcatgatcttcacgagtttaagttctttcatttgcatggcatcgagaaatctgatcgcatggttagaatagcgatgaccgacatgatgttgaatgacgatgggcatacaaatattcgaaatcaggatgcgctgttaagttttgataactatcctgatattactgctcttcgtcaggattcagaaaagagtactgtgactatagatcctgctgtttttgatgttgtgcttactaatcctccgtttggaagcatcatgcgtcaggaaaccatggagatgttagggcgttttgatcttggccataaaaagaaatcgttgccgctcgaagttcttggccttgaacgtagttttcagtttttaaagcccggcggtcgaatggcgatagttttgcctgagcatatgatgaagggtaagagtgctgcttttgtgcggaaatggctttatggtgttgcacacataaaggcaattttcttttttcctgaagaggcatttactccattcggcgcaatggttaagacctgcctgtgtatatttcagaagtttaaaaaaggtgagactcctggggatgaggataccacctttctttgtgaggttgaaaatctcgggtatgaggctacaggtaagcccaaagctgggtcggaagtcgctgccgccatttccgcatttcataacagtggtgggtgggtatga

SEQ ID NO: 362149 - DNA, 1068 bp, Pseudomonas aeruginosa
atgaccgccctgaagaacgaccgtttcctccgtgccctgctcaagcagcccgtcgacgtcacccctgtctggatgatgcgccaggccggtcgctacctgccggagtaccgcgcaacccgcgccaaggccggtgacttcatgagcctgtgcatgaaccccgagctggcctgcgaagtgaccctgcaaccgctggatcgctacccgcaactggacgcggcgatcctcttctccgacatcctcaccatccccgatgccatgggccagggcctgttcttcgaggctggcgaaggtccgcgcttcaagaaagtggtgaacaaccaggctgacatcgacgccctgccgattcctgacgcggagaaggacctggggtacgtgatggatgccgtgcgcaccattcgtcgcgagctgaacggccgcgtgccgctgattggcttctccggcagtccctggaccctggccacctacatggtcgagggcggctccagccgtgacttccgcaagtccaaggcgatgctctacgacaacccgcaggccatgcatgccctgctggacaagctggcccagtcggtgaccgcctacctcaacggccagatcatggccggcgcgcaggtggtgcagatcttcgactcctggggcggcgcgctgtccgcggcggcctaccaggagttctccctggcctacatgaagaagatcctcgacggcctgattcgcgagtacgaggggcgtcgtgtgccggtgctcctcttcaccaagggaggtggtctctggctggaatccatggccgataccggcgccgaagccctgggcctggactggacctgcgacatcggcagcgcccgcgcccgtgtcggcgacaaggtcgccctgcagggcaacatggacccctccgtgctccacgccaccctggcggccattcgcgccgaagtggaccgcatcctcgcggcctacgaccagggctcgggccatgtgttcaacctgggccacggcatcaccccggaagtcgacccggcccacgccagtgccttcttcgaggcggtacacgagctatcggcccaatatcacaactga

SEQ ID NO: 362150 - DNA, 1905 bp, Pseudomonas aeruginosa
atgaccctatcgcgactcagccttgccatcctttccgtcctcgccggtgccccggcattcgccgacgacagcggcgtcgacctcgaccagggctggaaccagacccagaagaccgcctggctggaagccggccagggctcgcggatgctgccgctggcctggctggtggcgctggagcagcgcgccagcgaagaaccgctgatgtccgatgcgctgatccgccagtacggctatgtcccgcacaccctcggcggttccagcgtgaaggtggtgcagggctacgcggtcgaccgcagcgacgacagcgacctgaccttcaccaagctgcgctggaaagccctgcagggctccagggaaccctgggtcggaccgacctgcagcatgtgccacacttcgcacatcagctaccagggcacccagctgaccgtctacggcgggcagaccatgggcgacctcgccggcttccagctggagatcctcggcgccctgcagagcacccgcgccgacaccagcaagttcgagcgcttcgcccgcaaggtgctcggcgccgatggcctggtcagcggctacaacgacgccaacaaggcacgcctgcaggcagccctggacgccaccatcgtgcgcctgcgcgacggctcgcacttcaacctgccgcacgatcccgagttcggcccgggccgcctggacgccatcggttcgatcttcaactcggtgggctacgaactgcatgccaacgagcagatctacggcgccgaggacgcccccgtgagctatccgttcctgtggaacgtaccgcagctggaccgcgtacagtggaccggcttcaacccgaaccacatcaacgtggtcgagatcgacaaccgcaagttcgacgtcggcgccctggcgcgcaacgccggcgaggcggtcggggtattcgccgacgtcaaggtgctcagcccgatccagtcggcgctgcacatcggctacccgtcgagcatcaacgtcgacaacctgatccgcatcgaagaccagctcggccaactgaagccgccggcctggccgaaccagctgttcggcgccccggagccgaccagggtcgccgagggccgcgagctgtaccggcaacattgctccagctgccacacgccgctggaccgcaacgacctgcggaccccggtgaagaccgtgctcacccacctgcaggcgcgcggcgaggtcgcgccgataggcaccgacccgtggaccgcctgcaacagcatcgcccagctgaagaccggctacgtgcgcggcaagccctacctgtccttcgtcggcaccggccagcgcggtttctacggcaagcaggcctatgcggtggacgtgctccaggaagtggtggtccaggccctggccgcgcgcggcctgagcgtcgccctgggtgccttccagaccgccgccctgggcatcttcgacgggcagttgccgccgctgatcagtccggtgccggacagccccgacgccgacagcgccgaagcgaccgctgcggacgcgccaggcgccctgctcctggccgaaaacgtcgcggccggcagcgacaaggcccggcgcctggagcagtgcctggcgatgaccagcgacctgatggcctacaaggcgcgcccgctgaacggtatctgggccagcccgccctacctgcacaacggctcggtggcgaccctctacgacctgctgctgccgccggacctgcggccacggaccttctacaccggcagcgtcgagttcgacccggtcaacgtcggctacatcaccgatgccggcggcgccaaccgcttcctcttcgacagcggcaagccgggcaacgccaatggcggccacgactacggcaacgcgcagttcaacgagcagcagcgccgcgccctggtcgagtacatgaagaccctctga

SEQ ID NO: 362151 - DNA, 873 bp, Pseudomonas aeruginosa
atgagtcaggaggcagaaactgccccgcgatctcttgctgctcgtttggagagtatccgtaggtcatcgcttcctaagcagcccccagagaatttacctcatcagttgttcttacctgggctgagtgagctgtatcgggcaattcccaatcatattgcgcgctctagtctgttcgctccggtcgctcgcggcagcaagcgcatgcacaaggcgacggttctattcagccgcaaggatgcagtaatcactttttggggcgagcagctggacgaaactcaggccgatgtctggatgcagttaatgtacgaggcagtcaaagtaccgctgggcgagcctgttccgattaatcgggccaagctgctacgtgctatcggcaggcaaacaggaaactacgaataccagtggctgcatcgaacgatggaggcactgacttttgcgatgttgattgcgcaagttacaaagcagggaaaactcaaatttgaagttggtcgaagtgaatctctgcacatgatcgacaagtttgcctttgacccagggcgagagtgctacaccgtcagtgtcgacccccgttggcggcatctgttcagtaatcgggaatttgcgctgatcgactggcataagcggttgcagattcgaaaagggcaggatatggccagagccttacagcgtttggtggctacttcaaacgaggctgtgcagcgttattcgcttgtttggcttaaagagttactacagtactttagccctatgcgcaaatttcgcgcttctctattggctgcgatgcgtgaattggagcgggttgaggtgattgcagcggggcgtatcgagaaaagtagcaaaggagaagaacaagctgtctggcagcggctgtga

SEQ ID NO: 362152 - DNA, 792 bp, Pseudomonas aeruginosa
atggctcgccctcgaaactctaaggaaaagcagcgccttcagttaaaaaccgttgcactcatgaactccttaagaatccgagttggcgcacaaaatccatgtcagttcagcgactggtttgacagagagacagtccacctcggctggacagatacaaaagactcaaacaagtggtacaagtacttcaagggcgatgtcggccagaaccccacgcggatactgcacctacttgggtcactattcccagattgcgcaggtctatttcacgaagggccagaacgactctggactgctctttggtcagactcaacagaagagctatggagcatctgcacttatacatgctgcgcatttgagggcgacgaggaaggcagcctcgacgtcatgacggggaacactatatttttcagagaatccgcaaccaattttgaaataaatttaatatcaaaattactaaacagcgaaccctacaccttaagcgatctcagcgaatcaattgccctatacaaaattcaccagacaatcaacaaaatccataaaacagaagaaatatcgccctaccgctgtataaagatgtgcctggacgctgaaaatatatcttctgagctaaaggagctaggcatatatgacttcatatatctagaactcacaaaaactgaaatttcacgacttagagatgagtcgttttatcgcatgagcactggagccagcgacatcgcccagtatgccctcaaccctttcggtcaacgatccgtgcaagaccgaatggttgagctaggcgtctggctgtag

SEQ ID NO: 362153 - DNA, 387 bp, Pseudomonas aeruginosa
atgaagcacgacaaagtgaccagaaagcacacgcatctacgagtgccggtacttccagaagaaaaggcgttgattgagaagcaagcgaaggcggctggcagatcagttgcggcttatctgcgtgcgctcgggatgggatacgaagtgggcagcatccttgacgcttgtatggtcggggacctggtgaagatcaatgccgatcaggggcgtttaggcggactgctgaaaatgtggctgaccaatgacgagcgcttcgcaggcttcgaggaagcacagatgcgccgaaccattggggtggtgctgtcaaaaatcgaggaaacgcagcaggcgctattgcaactggccatgaaagtgtatggagacgacgatgaaaattttagcggctaa

SEQ ID NO: 362154 - DNA, 780 bp, Pseudomonas aeruginosa
atgaaaattttagcggctaaaaaactgtggcttctagcctgcatcaccagctcgttcatcagtttgaacgccaaggcgggcattcccgtcatcgacggcggcaatctcacccaaaacgtgctgactgccatggaaagcgtggcgcagacactgaaacagatcgagcaatatcagacgcagttgcagcaatacgaaaatatgctgcagaacacggccgcacccacggcctacatctgggaccaggccagccaaacgatggacaggctgcgcagcgccatcgacaccctggactactacaagcgcagcttgggcagcatcgacggctacctcggcaagttccaggacgtcgcctactacagagcatcaccttgcttctccaacgccggctgcagcgaagccgagtgggcggcgatgaacgagaaccggcgccttgcctccgagtcgcagaaaagggccaacgacgcgctgtttcgtggcctggatcagcagcaggctgcgctgcagcatgacgccgacacgctgcagcaattgcaacgccaggctcagggcgcgaccggtcagatgcaggccatcggctacgccaaccaactggccagccagcaagccaatcagctgctgcagattcgcggcctgctagtcgcccagcaaaacgtcattgccacacgcatgcaggccgaggccgacctggaggccaagcagcaagccgcccacgccgcctcgactgaggggcgcatagcgcccacccaggcccccaagaactggttggacatgaaccgctaa

SEQ ID NO: 362155 - DNA, 240 bp, Pseudomonas aeruginosa
atgaaaaaactaaccccgctactactcacccttctggcgcttgtcggatgcgatgaccagccaaacggccaagccattcccgaagtcagcgatgccaactgcaccctggaggagatcaaccagatcgaggacaggacggcccgggcagagtttgccggccagtgctccagacgttcgggcgccatccagcctaccgagcaacccaagaactggctcgaactgaacagctctcaggggtga

SEQ ID NO: 362156 - DNA, 1398 bp, Pseudomonas aeruginosa
atgaaaacgctcaagaacaccagcctgatcggctgctgtctgctgtttgtcctttactccggtagcgccgcagcccaactcaccaaccagggcatgctggatcaggtcattaccgagttcagcagccgtgcttccacttggcaggctgtcatcctcagtgctgcgtcctggttgttctggacgctgggtaccatatccctcgcctggacattcggcatgatggccttgcgcaaggccgacctggccgagttcttagccgagttctgccgtttcatcctgttcttcggcttctacctgtggctactcaggaacgggccggagtttgcgtcctcgataattcgatcgctgcagaagctgggcgaacaggcatccggcataagctcggtgacaccatccggcatcgtggatatcgggttcatgctgtggaagcagacgctcgccgcgctatcggcctggagtccagtagatagcctgatcggtgtcctcttaagcctggccatcactgtcatgcttgcgctcatcgcgatcaacatgttgataatgttggtgtccggctggttgctgatctatgccggcatcttcttcctgggcttcggcggctcccgctggacgtccgacatggccatcaactactacaagaccgtcctgggtgtggccgtccaattgtttgccatggtgctgctggttggcattggcagcgacctgctcaccagtttctacgccaagatgactaggggcgtcctcaacttcgaggagctgggggtcatgctgatcttctgcctctgtctgctgcttctgaccaataaggtgccgcctatgctcgccggcatcatcacggggagcagttcgggcactgggggcattggcaacttcggggccggcgcagcggtcggagcagcaatgggaacggtcggcatggcttctgccgcgatgagcatggcaggttccactgccatggccggagcccagaatgtggccgggggtgtttcagccatcaaagcagcaatgcagaaggcgcagggagcaatggataacggcggcatgcccattttccaaggctctgcagggcaaggtgacaacagatcggacagcccgctggccgaagccatgggggactctggcggcagtgcgctacagcaagccgccaaactggccgtagacaccactgctgaacttgccaaaggtgcaggtgcagtcatcggggagaaagctgccaagctcagcagtaactttatggggcaagcccagcagaccctcggcggccagatggcagcagccattcggggccaagaagacgatcagctcaacagcatcggtccaggaagcgaaagcggtgactcgccagaggacgagattgccgagttcgttaatcgcggccgccgagacgaaaaattttag

SEQ ID NO: 362157 - DNA, 2406 bp, Pseudomonas aeruginosa
gtggcaaacaatccagtgcagatcgtactaaacgctcaaaactatgtccaaagagcagaaatagtcccaggaggaagtaataaagacttcttcgcaggccgggactctgacttcaagcaacataaagacgcactggcgcagtcacttgatacattgataccaagcaagctaaccgaaagtccgttggtttttgcccacgtggagctgcaagagacagcgtgggcaaaaagccatcgaccagtaaaccaggtttttccgaagagcaagatacgctccacgcctggcaacgcactgggaaccttaattgtagagctagcaccatcagacattaagacaattcgagaaaagatcatctctgcagagaatgaaacacgatgggagaaagaccctaagtcagagaagctagtacctaaaccttcaaggctcagaagcgaagtaggggcaatcaaagaaatcagactctactctgaccacgacagaagaaagttcagtatagagcaggccgttcaatggctatcagaccctagaacgggtggcgcatattatgttgagacatttatccccaccgacagcctagaagatagcaaatcaaagagagcctctgaagaaaacgccctcctagaagatcttatgcgaggcatcggcaagctagagcttcccattgaaataagcagattaaaaagcgagtggactaagaatcaaatatttatcgctcaactgaaagagccatatagaagccaaatagacgcccacaaaagacttattaattttattgattcgcacccaatagttcgagcaatcctactccctccagttctacagtcttccaacacgaaccaagaagagacaagccttaaaacattcccaagcatttcacaagaaagagcctaccctattgtagggattatcgacaccggcgtatccgcaattaatcacctggccccatggcaggcaggggctactgactttatagaccccgcatttcaagatacctctcacggaacatttattgccggccttatcgccggaggtaaacacctaaatcctagtacagaacttgatgaagctgactgcaaattttacgacttagggctacaccccacatacgattatgagagctattacccgcgaggcttttttgacttcctggagcagcttgatgcagagatcgttaccgcagcccagcaaggagtaagggtattcaacatgagtctttctgtgactcttcccgttgaagattctagctatagtctgttcgcaaatatccttgaccaaatcgctgatcgccacgatgtcatctttgtacttccgtctggaaacctagacggagcaaccgcacgggaagcatggccagacgatgaagatcagtgccttaaacttcttgctgaatacagacatcaaggcaaggatagaatcttccaaccagccgacagtgtaagatcaatcacagttggtgctcttgaccctgcgagcaaagaaggggcactcaagccatctcgatacactagacgaggccctggcccatcgttaggcgcaaagccagatgttgctcatattggcggcaaactggagccagaccacggactatactcattaaccccaagaggcggcgtctcttcaaactgcggaactagctttgctgctccactcgtagcgaagagtcttgcgactctagatcacttaattgaaggtaaagttccaagagaagcgctgtccgcccttctaatccacaactcaaaagttccagactggatgacatctaaaaaactttctagaatagcaaaggatttcgttggagctggaataccaagccaagcagcccgctccttggaaatagatgacaaccagataacactagtattcaatggcatactcaaaccaagccatgaattggtattcgactttacatggcctgcatgcctagtcaaaaatggtgcatgcaccggaaaagtaaaagtaaccacagtctacagcccagccattgatagaaattttggcgccgagttcattctaaccaacattgacacctggctacgacaagaagttatagacaagaaaacaggagaggtatctttcaaagggcgcctgaagaccgaggctgacaaaagtatagagaaagagcgaattgctcatggagccaaatggtggcctgtaaaaacttttgaaaccacattcccgcgaggtgtcggggagtcttcgcaatggcgtttagtcttggaaccactaaacagaaatggatttactcttccagaagaaggtgtaccgttttctactgtcatgaccattagcgaccccaaaggcaatggtcgagtctttgacgaggttcgccagcagctgcaggcatccggcgtagaaatttccgacattcgaaccgctctgagcaaccgcttgcgtcaagagaactaa

SEQ ID NO: 362158 - DNA, 1188 bp, Pseudomonas aeruginosa
atggaacactacccaatcgtcctcgcgctgagcagggcagccctgcagacacctaacactgcggtggagaatcatttgcgccgcctcataaaggcgctagaaaaggacgggcaagccgagcaagccgacgggctcaacaagctggttcgcaacacgggaaaaagcgttgcaatccaacccagcagagttgtgctttcgctggccgcgatgggaggcgagatgcttaccccaagcgtcaagcccccagtcgacaaggagaccagcgcccctctagccgaaatagtcttccctagcgagacgctcgacgctcaccctatattcgaagagaacttatccgccagcatcgatagccttctggaagaatggaagaacattgacaaacttaaagggtcaggaataaatcccgctcttgcgttaatgctatttggcgccccgggcacagggaaaacttttttagcccaccacatagcccgagagttaaattaccccctagtagtagcaaaactagacggcctgatttcctcctttctaggaacaaccgccagaaacatatctaacctttttgcctttgctaatagatataaatgcatacttctactggacgagttcgatgctgttgccaagctccgcgacgacccaaatgagctaggagaactaaaaagagttgtcaacactcttcttcaatgcctagataccaggaacaacataggcttcaccatttccattacgaaccatgaagcactattagacccagctatttggcgacgcttcgacatcagaatcgagatacccaagccgatacaccaaacaagagagcaaatactgctgcgcaacctcccaaagaatctgaaactaaaaaaatctcagataaattttctaacctggataacagatggctatagcggctcagacatcgcaaaattatcaaacttcataaagagaaagatagcaatacaaggaagtaaatttgatttttttgagacagtacgctcctacataatcctgagcgccaaagaccaggaaaataataggcgtcaggcagttataggccgaccagaagaactagctatagaattaaatagagaccctgagcactccatgtctcaagaggcacttgctgagttatttgggaaagctcaatccactatcagtcgatggctgaagagcgaaaagaaacacaaggagtaa

SEQ ID NO: 362159 - DNA, 981 bp, Pseudomonas aeruginosa
atggacgccggcgtattcgtcagccgcaacgaagcggaatcgacctccttcgccaaagccctgcagatgtacgccgagcaggtgactagcaagaaacgcagtagcgattccgagctatcacgcatccaggccctgcagcgccacccactggccctgagatcgctggccagcattcgcggcgccgacatggccagctaccgcgatcaacgcctcagagaggggctggcagcggccaccgtgcgccgcgagcttgctttgatttctcatgtcttcaccatcgcacgcaaagagtggcgaatggagtccttgagcaaccccgtggagctgattcgccagcccagtgttgatgacgctagagatagacgcatcttgagcgcagacgtctggacactgcggaacggcgtactgattagcgagcacctggacgagctggaaatgatctgtcgccactcgcgctcgaccgagctaccccagatcgttcggttcgccgtcgaaaccggcatgcgccgtagcgagattgcgagcttggtacgaaccaacatcgatgtgaagaaacgcactgcgatgctgccactcaccaagaatggctctgcccgcggcgtcccgctctcaagccaagcggttgaaataatcaagagccaacccaagctcgatgatggccgagtattcaagagcaggcccgacaccattacaaaggccttcaacgatgcattagccaatgcacgccaagcctatgtgaaaggactcactcttcgacttcaggacgaagggctccctccgtcaaagatcaatcaactgatcgatagcactcctttcttggtcaacctccgctttcacgacctgcgccatgaggccacctcacgcctagccgaaacctttcccctccttgagctgacaaagatcaccggccatcaagacactcgcatgctgatgcgctactaccacccccgaatagaagacctagcccagaagctccggtag

SEQ ID NO: 362160 - DNA, 1203 bp, Pseudomonas aeruginosa
atggcgaaaatcaagctgaccaaaagcgctgttgacgctgcacaggcccagacctgcgacgttgaactccgggacacggtcgttccgggcttcttgtgcaaggttacaccaaccgggcgcaaggtattcatgcttcagtaccgcacgaactccggcgtgcggcgcaagcctgcgctcggccagttcggcgagctgaccgtcgagcaggcccggtcgctggcgcaggactggctggccgaagtccggcgcggcggcgaccccggacacgacaaggccgaagcccgcaaggcgccaacggtcaaggaactgtgcggccggttcatggaggatcactccaaggtgcgcaacaagccgagcacgcaggacagttaccagtaccagatcaacaaatacatcgtcccggccttcggcagcaagaaagcccacgaggtcacgcgccacgacatcactgcgctgatgaagcgcatggagaagtcgcccacacaggccaatcgcgtgctggcctgccttcgcaagatgttcaacctggccgagctgtggggttaccgtcccgatggctcgaatccatgccgtcacgtgtccaagtacccggagaaaggctcaacccgcctcatcaccgatgaacagatggtcaagctgttcgcctatctggacaaggcggaggccgaggaactggaacatccgacctacctgctggccatccgcctgcaattcgagtttgcagcccgcatgtcggagatcctgttgctgcaatgggactggctcgacctgcccaacagtcgggtcgtctggccggacagcaagaccggtgatatgtccaagcccttgagcgcggaagcccgccgcttgctgcagaacgcgcctcgctacggcaagtcgccctatgtctgcccggcgaccatgaaccacgacaagccgctcagcccccacgcctactacagcgcttggcggcgcatcctcgatcgcgccggcgtgccgcatgtcggcacgcacggcatccgccaccgttcagcgaccgacatcgccaactccggtatcccggtcaaggtcggcatggcgcttaccgcgcacaagaccgtggcgatgttcatgcgctacgtccacaccgaggacgacccggtgcgcaaggccgccgagcttgtggccacccggcgcaagtcggttgtcggcgctcgccagaagcaagaacaggcaatcgcatga

SEQ ID NO: 362161 - DNA, 1560 bp, Pseudomonas aeruginosa
atgtcatcaatgctggacaggttctacgagcgatccgctcatctgaataccttgctgaacagcaatcctgccgaggcggtgaaacaggcccgggagatcaatctcgatctcgatacagatgagcgattcaatctgatggttctgcgcgcagccatcctggtagatggtggcacattgactcaacagcaggatgcgattgaagaagggctcgccctgtttcgtgaacttcacagccgatttccaactgccgacgtcacctacaacctcgccaacggactggtcgccgcgacaggtttcccgcctcgcgatgaatattggttgaatcatcaggagttctctagagagcaccgtgctgaagcacgacgatgcttttggaaagtcgctcaggacgtggatgcagacccaacactgcgaactcaagcctggacgaacctcgccaaccaattcagcagtagctttcggcttggtgaagcgcatgatggatggcttgccgcattggaaattgatccgcagaacggagttgccgcaagctcagcggcccgtagtttgctttggctttatgagcgaggcggctgttcagacgttacgcgtatcgaggcgatcatgttggccaagattgcggaccggcatcgagatcgagtcatccaatacgccggtgcacaggccgcggaacagatcgctgcgttcgcaagcgaaatgggagatccgccaccgcgatcaccgcaccaagatccattcatctgttgggtcgagcgtgaacgactgacgcttgcgccagtcgtcgaactcatcgaccccaccttgggcaagttggactggctagtgcttcctgggattctggagcgtgaatcggatgcaggcggtatgccaccgcctgtgttcgccatgttcaacatgctgaagagcgacttcatcctcgcgcgtgacttgctatggcgggctatcgacgaagatgcgtggccagcgacggggcgatttggggacactcttgactacgctacctatggcccagatgcctctgcgctcatcttggcgcaccgtacggctctcgacctgctcgacaagatcgctgtagcggcgaaccactacttcgagcttgggcaatcaccagacaaggtctacttcggaaaattgtggcggggaaaacctgacaagaccaccggtgcgcacccactcgccgaaaacgtggagaaggcgattcgcgggggaacaattgccctctatggcctggtagagcttgccgaggactatgacagcagcgcaggcatcttgcgttctcaaaaggacctccgcaacgcaggcacgcaccgattcgtggtattgcatgacattggcgacccagcgcacagcaggcaagcgcctgaaatcgaacaccaccgaagggaaccgtttacccaggaagtattacgcgctttgcgtgttgctaggtcggccatccaaatgcttgcgctttcgatttcgcagcacgaacaaggtttggcacagcggacaggcggccttgttgggtcactgatcgtccccgaccacgactggattcgcggacgagacgacaggacttaa

SEQ ID NO: 362162 - DNA, 1026 bp, Pseudomonas aeruginosa
atgccgtttgagatcagaccttggggagcgattgcggaaaactacgaatgcacaattctgctcggcaacggcgccagtatctccgtcagtccgagcttctcgtacggctcattgctgcaacatgccgccgagcagaacctgctccccgacgatgcccagcggttgttcgagttctttcagaccaacgacttcgagttggttcttcggctcgtctggcaagcgtcgaacgtaaatcgttcgctacgaataccggacgaacggacacacgccgcctacgtcgtccttagggactgcctcatccagactgtccgcgacattcacccagagcacggtgcggtaagcgcctacctgccgaatatctatcagttcctgaaacggtccagaaccgtcatctcgctcaactacgacctagtgttgtactgggctatgacttacgggttggatatcgacgaccatcatgcgttcaaagactgctttgtgggaggcggcgccttcgacgatgactggcagcgattcaggcaaccgatccgaggagatcgttcaacctcgctcgttttctatccgcatggcagtttggtgttgtgtcgaaacttggtcgaacaggagcgcaagatccacaaccttcaggacgggttgctggaggctgtcctgcaacgctggcaagacggagaggtcgtgcctttgttcgtgagcgagggaacgtggtcacagaaagttgcctccatccagaacagctactacctctccaccgtctacagagaggttctgaaatcgcagcgggacacgctagtggtctacggctggggcttcgccgagcaagacattcacctcctgcaacgcatgaaggacacgggcatcaatcgtgtagcggtgtcagtattccgaggcgatcaggcgtactgcaaccgggtcttccagatgatccatgacgtattgggagcgcatgtcgaagtggagttcttcgactgtgaaagcccgggttgctggattcacccaacccaccagcaagcacgccctgtcgcatag

SEQ ID NO: 362163 - DNA, 783 bp, Pseudomonas aeruginosa
atgatcggacaaagaacccgctattcgttcgcgcagttcctggagttgcaggagcccatgaactccatcgtgcttctgggtaaatacggcgtgcagaacttgtcgttgtcccacggacaactgttgtacggtctactaaacacgctgcgcgatctcgatgaccgcacgctcatgctggcgttggccgaggtcgttgcgactacaggcgatctgcgagctagagtcaatccgaagtatcggttcgacgaacgtttgcatgatctgacgcagtgcctactgctggacggctacatcatccagggcaagaagctacttcaaactgatccgtcgattgccgatgcagcaccgttggaggacgacctgatcgacgccttgcagaactcaagggctcctcgtgcgctggaaatcatcgccaagataaacgactcgggtagcgcgttccgggcgacaccgcctgactacaacgcgtcgctcgtgaatgcccgtgtggcgctggaaacgctagcaggtgacgtggccgtccatgttgcctcgcagcaccagacgccagccacctacaacccatcgaagtggggcgaggtgcttgcattcctgcgaagctgtggcgagatcacagtcgaggaggaaaaaggcctggccggcgtgttcggttttctgagtcctggcgctcaccgccccgtgggagtccctgaagaccagatgacgcgacttggccgttctttcgcactcaatatgtgctggttcctactcaagaatcatcttgtgcgaatttcgcagccttga

SEQ ID NO: 362164 - DNA, 729 bp, Pseudomonas aeruginosa
atgaaaacccgtcttctcgccgtcgccgttgccgcgttgatcggtgccatgcccgtcgcgcaggcgcagtgggtcgtcatcgacccgaccaatctcgtgcagaacacgctgaccgcgattcgcacgctggagcagatcaacaaccagatccagcagctccagaacgaagcgcagatgctgacgaatcaggcgcgcaatctcgcgagcctgccgttcaacgtcgccaaccgcctgcgcgcgacgctcgccaccaccgagcggctgatcgcacaggcgcagggtttggcctacgacctccagcgcatggaccaggatttcgcgcgcctgtacccggagcagtacgccgcgaccgtgagcggagaccggatgtaccaggacgcgcgcgaacgctggaataacacgctcagcggcttgcataccgccatgcggatgcaggcacaggtgtcgcagaacctcgccagcgacgagagcgtgttgagcgacctggtggaccgcagccagtccgcgacgggcgccttgcaggccatgcaggcgaccaaccagctccttgccctgcaggccaagcagtccatccaggcgcagcagctccagctcacgcaggaccgtgcgacggcgctggaactggcgcggcaggctgcggccgttgagcgtggccgcgaggtgacgcggcgctttctgggcaccggcacgatgtacacgccgcagcccgtgaccttctacggcaactga

SEQ ID NO: 362165 - DNA, 294 bp, Pseudomonas aeruginosa
atgaaacgcgcgcccgtcctgttcgtcttcgcatgcctgttggccggttgcggccggccgcaggcgctgtccgtggaggcgctggccgccgaaccggcgcggctgcacgcgctgcgcgcgcaatgccggcgtggcgagcacgacgcctcgttctgcgcgcgggtcgcccacgccgacctgcggcgcttcctgtccgggcaggccggtgcggacgaataccggacgctcgcagacctgccgccgatccccgccagcttcgacgaaccccttgctgccgtggaggaacggccatga

SEQ ID NO: 362166 - DNA, 654 bp, Pseudomonas aeruginosa
atgacaaagtttgagaccacgacctgctaccactgcgatgccgaaggcactgggcgggaacatgtgccaccaaaatgtctgttcccgaagggaagcgactggtcaaaattgatgacagtgccgtcctgcgtgacgcacaacaacgccacctcgaaggcggacgaatatctgaagtttttgttgggcgcgagcgcctcgaacatccccgccacgatcaggagcagcacggccaggagcgtcgtcaggctcgcgcagaggcgcagcggcaatctgcaccgctacggcttccgatgggacagcgaggcgctggtaatagagaaggacttcctgctcaactttgaactcctgagcgcatgcctgcaaaagatggcgcgcgcgctctatttttatcaccaccgcggccggcgaaagctcctggacgacttgacagtctggccgctattcatccccgtcgcccctaacgtcgcccccgaacttgcatcagcagtgtgcgaggttcgggcatcaactgccctagatttccagcagctacctaagctcggggcgcatcaagagatcttcgcataccaagtcattgaggcactgggggtcgtcgtcataaacatggagttctacggctcgcaccgggcgtcggtaatgggtgcagctacatga

SEQ ID NO: 362167 - DNA, 519 bp, Pseudomonas aeruginosa
atgaatgacaacgagcagagcgcaagcgaactatggctggaggcgtgcgcacccggctttcgagatcttcccgacccagaccgccgcgcgattttcgatttcgccttcctctggagcctcttcgaagcacagatcatgggcaattccgcccgtgccgaccgcatccgggagcgagtcgacgcttgggcggcggacggcacgcttgaagccggtatttacgacgtggagcttgcctattttcgaaaccgctacttcgccgatggcgcgttgacctatcacttcccctatctcaatctccgaccatcggaccatcccggcctcgttcaagccgtcattgaaggtgcgaacaacgacccgcgcgatcggatgcttggcctgctaatgattgtctggcggctgcgcaacaaccttttccacggtgcaaaatgggcctatcagctccgcgaccaacgggagaatttcacgcatgcaaacagcatcttgatgcgtattcttgagcgtcatggtcagcttggttga

SEQ ID NO: 362168 - DNA, 858 bp, Pseudomonas aeruginosa
gtgaagttcggcttcgtggcgaaacaccgaggggcctggccggtcaatctgatgtgcgaggcgctcggtgtctcgcgaggcggcttctacgcctggctcacacgacccaggagccggcgtagcctcagcgacgaggtgctgggtgcgcaagtgcatcagagctttgtacgcagcgaccgcacctacggcgcacgccgtgtgtggcacgacgtgctggagcaaggccagacctgtgggctgcatcgtattgagcggctcatgcgggagcaggcgctgcgtgcgagaccgcgaaggcgtggactacccaaggaccgtggcgcgcgtggtgctgtggctgacaacgtgctggaccgtcagttccaggcagatggtccgaaccagaaatgggtggccgacttcacctatatctggacggcagaaggctggctttacgtagctgcggtactggacctgtactcccgtcgaatcgtgggctggtcgatgcaggagagcatgacctcgcagctcgtggtggacgcgctgatgatggctgtgtggcgccggggcaggccagtggcactgctgcaccactcggaccagggtagccaatacacaagcgagcacttccagaggctgctggacgaacagggcatcacttgcagcatgagtcgggctggcgaggtctgggacaactcggccatggagagcttcttcagttctctgaagaccgagcgcacggcccgtaaggtgtacaggacacgaggccaggcccgctcagatgtgttcgattacatcgagtgcttctacaacccgacgcgtcggcattcgacgctcggatatctcagtcccgtacagttcgagcaagctcaagaagcttag

SEQ ID NO: 362169 - DNA, 294 bp, Pseudomonas aeruginosa
atggagagaagaaggacattcagtcgcgagttcaaactcgaggcggtcaaactggtcgttgagcgtggcgtgtctgtggcccaggcagccaaagacttggacgttcacgagaacgtgctgcgcaagtgggtgcgtgagctgaggcaggagcctcaggaggcgttccctggcaacggcaaacaaaaggcgcaggatgctgagatagcacggctgcacaaggaagtggccaagctcaagatggagcgcgacatattgaaaaaagccgcggcctacttcgcgaaggagtcgatgtga

SEQ ID NO: 362170 - DNA, 1077 bp, Pseudomonas aeruginosa
atgcttgacactgttccatccggccctattgaagacgaaagcgttgagattgaaaacgagatagtaaatgtcatcgttcatagcctcaaccgcaccaaaggcggcttcgtaatcgatgacagaaaagaagttctcgaaatcggaaaaactgtccaaaggcttatagatcagctctcaaaaatatactccaataaaaccggaaaatctcacggcagattcgaggatgacacagacctttatccagtctcaaagttcttaacagcttatttcattgaaaaagcagatgactttgtcactactacctaccgaatggctgacaacctgcgcaaagaagcccaaggcactgcctccactggcggccatgtattctttgctcacttcaaaagaatcgcagataacgctgagttcttaatcgtcgccattctcaatgacgaactaggcacagctctcaacaaggccaaagatgtagttgacgcgatgcatcttgatatcaagggattccgcctagctggccgagtgaatctcacaaactggtcgcaaggcgaagataagtacctcagcttcattaagggccgaggacaagataaggtttcggacttcttcaaaaacttcctcgggtgcaataactccattgctgcagtccttgaaacacagaagctaaactctattcttgagagctttgctagttcccaagggtttgatgaagagaaaaaatccgaattccttcggaacgcctacaatatctgcaagagacatgctgatagcgacactccttttgagctggagaccttctcaaatgagttgtggccaagtaatccagaagacttgagcaacgctttcgaagaatcgggggaaaatatatcggatggttttatccccgacaaaagatcattgcgctcgctggttaagttcagtggagcaacaaagaattggcgcattgtttttgaccgggaagcactaacaaatgatgaaatttacttcaacccggaagaccaaacgctcctgatcaaaaacctaccagaagaactcgtgcgcagattaatatcagaagaaaatcaagatggcgaagaggattaa

SEQ ID NO: 362171 - DNA, 1182 bp, Pseudomonas aeruginosa
atggcgaagaggattaactttcaagacatgctgccaatttaccgcagcatggaaaaacttgaagactccaagtacaagttaatcattagcaatgaggaaatccttaactcactgactctagctctagatgaaagcaactccgaggactctggaatagctgtaatccagggagactacgagaacataaaaatcaacaattcctttgtgctttcagtgcgcgcgccaagaaaaggaatggggattcttgctgaaaatcttgatacctacctaaaggctaatggcgccaaatccaaggaaagaaacaattactacttaatagactgtgactattcgccaagcgaccccacggcaccaatcataatcaacaagtatcgcgacatacttagacttataagtttcctaagtgaatccgcccattacctagacacatcaaaagaggaattgattttctacaagaacggtagatttatagtccccatatcctactcaagcaccgatctaaagaacctaaaatcacagccgcttgaattgattgaaaaactgatatccgacaagcttcataaagagcaaaaactaaaaatactagaagaaactctgatttccatgcttgagggagtcaagccagcagagcgcttcaagtttatgctagagaacctagacgaactctactcaaaagccctaaccggctataatatttttgctgcagacttcacgtttgagaaagcggtctcagaggtcaatacatttaaagtagacacaataacaaaaatccacaaagccattaccgacatccaggctcaagtcctcggaatccctgtcgcaacgtttgtcgccctaagccagctaaagaaaacaacaagcctaaactctcaattcgcagcgaacacagcgatatatgtaggcgcaataatattctgcgctctcctaattggattcttagtcaatcaaaaagccacactagacaccatatctagcgaagtagatcgccaagaagacagcttcaaaaagaaatttggggacaacaaaaaaccctacgaaactgagttcaaaaaaatccgatccagactgctatcccagtatgcagccctgtatggaatcggagcattagacatcctaatgttcctctcatccagcatttactacattgttcacacccgtccgatctacgacatccttttctaa

SEQ ID NO: 362172 - DNA, 264 bp, Pseudomonas aeruginosa
atgggcaatgcggcaccccacaagctactggacgatgtttcagaacctggcggcaaggcggccaccccggcctttttccaagcaaacgcctcggcgcccgcgctttcgaaacggcaactgatactgctcgccagcctctccgtggtgttccatggcgggctctggtggctgatcaacgccacgccggcaccggtcgagatcccgccgaaggttccggaaatggtcatcgagttcgccagtcccggcggaagttcagttccatag

SEQ ID NO: 362173 - DNA, 282 bp, Pseudomonas aeruginosa
atgaacgagaacaacagcgaagttggctatcgggtgagctttgctttgatcgatgaggaggggattcggcatggcgtagcgttgccaaacgccatgcatcttctcttcgagcggaaccggcaaccgctgctgccgaggattggagaaagcctcacgctcatgagcgatctggtcgacctccatgcgcgcagctatcgcgttatcgatattgagcatggcatcagctccgatcatggatcggtgttaggccatcaggtcgtagttgttctacgtgttgcctga

SEQ ID NO: 362174 - DNA, 315 bp, Pseudomonas aeruginosa
atgtctgcctgctggccgctgcagggtctgacgccggcgcagaaggctgtgctgatcagcctggcggacaacgcgaacgacgagggcgtgtgctggccttcggtggcgaagatcgccgagcgcacctgcctgtccgaacgtgccgtgcagcaggccatcaaggtgctgaacgagtgcagggtgctgagcattgaagcgcgccaggggcgctcgacgatgttcaccgtaacccccgcagcatttgaacccccgcagaaggttcacccccgcaggaaatgcaccccacccccgcagatgctgcacccagaaccgtaa

SEQ ID NO: 362175 - DNA, 174 bp, Pseudomonas aeruginosa
atgactttaagccgggagaaagtagctgagatattcggcgttaatccttacgaggtgagtgacgaactgttagccgatatcaaaaatatattcactctccatgagaggtatttactaagcctctacaagaaattcactgatcaactcgatattgacatacgcgcggaagagtga

SEQ ID NO: 362176 - DNA, 489 bp, Pseudomonas aeruginosa
atggctgaacatgagccctgcattggccagtcggatgactggtacacgccgccggacatgctgcaggcaatcggcgagcacttcgaccttgacccctgcagccctggttcttcgcactgggtgccggctgaccgtgtattcaccatcagcgacgacggtcttgcccagccttgggatgggttcgttttcatgaaccctcccttcggcgggcgaaacggccacgtcccctggctggagaagttcctggcacacggtaacggcatcgccatcgtccgcgcatataccagcgcagcgtggttccacgagcacgccgtcaaggctgacgcgatgctcttcccacgcggaaagacgaagttcgtcaggccagatggcagtatcggcggatcgcctgggcatggcgttgttcttctggccagaggcgagcgagctaaggctgcgctgcaacgttccggtctcgggctctatatcgatcttggaggtgctgcatga

SEQ ID NO: 362177 - DNA, 402 bp, Pseudomonas aeruginosa
atggctgatcagaagaattatcgcgagcaggctgccgaggcatgcattcgcttttcggcggtgctggacgagattaacgcgttcaagtcgcagatagccgaagcgctagaaaagtgtgagaagccattcgagatgttggccggccaatgtgggccagatccgatctatgtggcgcagacgcatcttggacgctatttccagaacggcggccgcctcccagttgattcatggctcggcgaagagcctgtcgacgaacttgatagcgacatcttcgagtgtgaggcctgcttagaggctttcaagctatgcatccaacgcaagaagctccggcagaagcgcggtcaggcgctgagacttgtccgctactacggacgcaaagctcgtgaggtgacccgtggctga

SEQ ID NO: 362178 - DNA, 549 bp, Pseudomonas aeruginosa
atgagcattgactggagcaaggcaccggatggtgcgactcactgggagccaacaggacctgatttctgtgaaggctggatgaagaaagaagggaatgactggttcttttggggggaagaaagtgaaaaatggaaattctggggtgatgtatccgcagagcgtgaggagacattcgaggctagaccgcaagaggcatgggaaggccagggcctgccgccggtgggcatcgaggccgaggtcatctgggacagcacggatgttgcgtactatcgggtcaagatcctcgctcacgacgaggaccgcgtcgtgttccgctggtgcgaaggcgaaagcaaggggcagtacgggtcatatgatgttctgaacttcggaattctcccgactttccgcccgctccgtacaccagagcaaatcgccgtcgaggagcgctcgaaagagtgcgaccgcatcttcgccatcctttcgagcgtcgagcgcgagggaaaccgaagcgacatggcggaagcactctacgacgccggctatcgccgccaggaggaagggaaatga

SEQ ID NO: 362179 - DNA, 399 bp, Pseudomonas aeruginosa
atgagcgaaaccgtagaagtgaagacctgcgaacttgaagggccggcgctggattgggcggtggccacagcgcaaggatggatacgctacgaagaggatagcgttgaacttggatggtactggcataccgatccagagaatgcaccatatgggcctataatttatctaggagactggagaccatcaaataactggtctcaatgcggcccactgatcgagaagtaccgcttcgagttctgctggtatggcgaaccgctgaacttcttcatagccttcggcttcgacatcccagctgatgcaacgtcgacaggtcccacccatctaatagcagcatgccgcgccatcgttacagccaagctaggcgaaaccgtcagcgtccccgccgaactcatcaagtaa

SEQ ID NO: 362180 - DNA, 933 bp, Pseudomonas aeruginosa
atgaagccattccataaaatatcgattggcgctcgcaaacctgatttacatggaggtttgcgggtggctatcgggcacttagctgtggatgaaaagaacatcgaaggcagctttatgggggcacctaatgtttcgcgtcaacggttgaaggggctttcagaactgctaaacgatgtggtgaagtacggcacccgttaccctgagcaacgtgtggacttgctggttcttccagaggtctcagtgccgcatcagtgggcgacggttatcaccaagtgggcaaaagatcatcaggtgggtgtcatctgcggacttgaacatcgtattgataatcgaaatcgagcgtggaacgaacttctggcagccctgccttttcgcggagaaaacggatcgaaggaatgtgcaccgatccggcgcttgaagaatcactattcacccgaagaagaatttcagctgattaacaactccctcttaattccgaaactgccgacgaagagccgctatcaactctttcaatggcgaggggcaagctttgccgtctataactgctatgaactggcgagcgtggaagaccgttgcctcttcaaaggcatggtcgatttcatcgtttgctccgaattcaacaaggatgttaactatttttccaatattgtagagtcggccgctcgcgatcttcactgctatgtaatccaggtcaacagcgctcagttcggagactctcgtgtcgtcagcccatcaaggactgaaacactcaatccccttcgtattaagggaggtgacaatcagacatttttaacgatgagacttccattacaacaattgcgtagtcaccaactcaagaaatatgggcttcaaaaggactcgaaggaatacaaaccgacaccgccggattttgacattgctgaggttaagaagagaattcacctgggacgatga

SEQ ID NO: 362181 - DNA, 1917 bp, Pseudomonas aeruginosa
atgattcacttcgagaaaaattcgctcggcttgcgaaaacgcttggccgagtttgaatgcgaaggtgattttgaagagcagctccgaatagtcgtaaaggtcgcaagatctaaagaaccacataaaactgccgagttcaaatcttggttagacgacatccgcttcgacgtcattccaaagggcgtggaaggtcccgaaaagccgggggaggggcaaggctcgtttgtgtcgaatgtcacaaccgcgccagtgcattgggctgcgaaagtgaactacatgttcgacggccctattgagttgcatctgttgtcggtactatggctgatgacggaagggaccgaatatgacgataccctctccagacattgctttggctcccggcttcaccagttcgtcgggaatgacgatgatcactcggcatacctgttcaagaaatatcacgaactatatgcgacatggcgggactccggtattcaaaaagcccgagaccttctctctgaagaccggcagagcgtctacatggtcggtctcgacgtccaagaatattattatcgcatccagctcaactgggagagtcttcgcacacagatcaagcggccggttcaaaaaggcccgctatacaacttcttcatggggcgccaggttctgggtgccaaactttttaaatgcattgaagaaatatgtaagagctaccgatccaagctcaatccaatgcttgcgataacacaccctgatttaccggaagaggctacatgcctcccgattgggctcagtgcgtcccccgtgattgcgaactggtacctgaaggagtttgatgacgtaatcttggagaagatcaggccggcttactacggacgctatgtcgacgacatactcatggttgtagcgatgcagcaggcaccagatccaaacgaccctatcatgagcttcatggataaagtctttgtagatgccggagtcctgaagtgggatgaagaaaactcacgattcgaactttgttccagaccaggtcttttcttgcaaagacagaaatgtattttgcaattcttcgacgcagaacactcaaccgcagggctcgacaagttccaaaagcagatcgaggaaaatgccagtgactttgcgttgttgccggtggacggggatgagagccccgttgcacaggttgcctacaaccttatgtatgacggttcagtaaacaaattccgtagcgtgaaagctgtggcagaaaatcgctgggaacttgcagcccatcttgcaaagcaaatccagctccacctgatgacggaggggcctgtcgatcaagacttgaaggacgagctattccgatttttcaagggccgtaacgcgattgagtactgggacatgtgggaacgtgtgatcagttttctggtggttgctggggacgttaagggcgcagagctttttagcctagcgttgcgtggcgagatcatgaaagtaacgcacggaacctccagctcgcgttcggagagagatcgcttaagtatcacccaaaaccttcggcaagcgctgaaaacacatctcaaactctgcatggagctgagcgttgccgtaaccagcacaattggaaatggagccacctccgctactcggctatggagggagtcgaatctcattcgacatcatctagtggcaatccctctgctgaattacaccaactacgacggaaatctggcatcgcctcgggacgcctccagcctgcggattaacttaaagaaggcagtcatgagcccaaggtttgtgcattttgacgagtgtcttgggttcgtcgagtccggctgtactaaacccagcaagaaggattcggtaaccggcgcaaacgacgtctataaactcttccatgggtctgagattggggatgtaacgagccaactcgttggtgaggtagactcgaaatga

SEQ ID NO: 362182 - DNA, 2001 bp, Pseudomonas aeruginosa
atgcttgcgaacatcaaaggactggtcgaacgactggagctttctcctgcaaaggccatgatgccgctcttcgaggccatttctaattcaatcgatgccattgaagaacatgacgatggcttttataagcataaaattcttatccagctgactgtctcgcatgatttggcgtaccaagccggagaccgaacgttatccatcgatggcttcgatatcaccgacgacggtgttggattcaacgatgtaaacatggcctctttcgaagaggcgcacacgctctccaaggtcaaattgggtggtaagggtgttggacgttttacctacctgaaggtcttttcgcatgttcacctccgcagtgtgttcagtcgtaaaagtgaaacattcctgcgcgagtttgagttttcgttcgccaaggacatggaaggtgctagagaagttcgcccaacgaacgaacctctcggaaccaagctttcagttcgaggaatggctgacaaataccgaccagggtggccgagtgacccaagcgtggtcgccgaacgaattcttgcacacttcctcattcgctttgccgcccgctcatgcccaccgatgacactggagtgtccggggcacttgcctatagacctacaccaactgttcaacactaccgttcagtcccacatcaacgagtgcttcttcacagtccttgggcacgagtttgccttgcaggcctatcgccaccatgacggacgagcgcgccatgatttgcatctttgcgccaatggccgtgaggtcaccacgagcaagctgcgcgaggtccttcctgagttgccagaacgactcctcgatgaagcgcaggaaccctacacgcttatcgtactggttaccggcgagtatctggatgctcacgccaatacagaacgcaccaaaattgcattccaatccgatgaagagctagacattgatacaacattggttcccagagcgacactcaatcgaggtattgcggaagcacttcgcccgctcttggccaatgacctaaagtcgactaacgaggaaaagattgcccaagtagagcggtttgtagagcaggctcccgaataccgggtgctgactcatgatcgatatcgacacttgatcgagcaacgtgtgcagcctggcctcaaggacgaacaactcgatcatgcacttctgcaaattcggcgggaggtcgaagacgccatgcgcaaagaggagcgccatgtcgcggcgctaatcgagagggagtcctttgatcaataccaagaacgtatccggcaactcatggaagacatcaatgacgtcggaaaagccaagctggccgactacattgctcaccgaaggacaattctcgacctaatcgatcagagtctgaaacgcgttcaaacagatagcaaatacccttttgagcgcgtattgcacaagatgatcttcccaatgggagtgacctctagagagatattcctcgaccagcaaaatctctggatgatcgacgaacggctctgcttccacaccgtcctgacctcagacaagaagctcaacaaagtatctgggcttgaaagcacatcgggcaaagagccggatgtctttgctttcttctacgacacccccataggtgtatcggagccggataacctgcccggaggtggggtggttattgttgagtttaagcgccctggacgagacgattacgacaaagatccagcagatcaaatcatccagcgcttctgggagattgaccaaggaaacgtcaaagatatagatggaagaccaataaacccggaacgcctaaggtataccggatacctaattgcagaccttaccccgacgcttcgtcgacaagtagccatgcgttatcacaggacagcggacaacgaaggttactttgccaccctccctgagggtaatgggtatatcgagataatttcgtacgacaaactagttagggatgcaaaacgaagaaaccgggtactgttcgataagctaggccttcataagcactga

SEQ ID NO: 362183 - DNA, 726 bp, Pseudomonas aeruginosa
atgcaggatgcactgcgaacactgcaccaaagctttttgaccgaccccggctcgggcaaggccaacagcatcattcgccacatggtcgcggagacgttgcggcgcttggagggcggccaagcggaaccggtacagttcgtacgcgacaacttcgtcgccgcctgccatccggatggcaatccgcagttgatcgactccaacaaatgggtccctcgcaccaaggatcttcgcgctgcactcagcgcccgtactcatctgctcacccacggatatacgctggttttgcgcgatgtcaccgggggcggaaaaggtaatatcagccagttctggctagccctggaggagcgcgcgctcgatatcgatgatgccgacgaagcgcccacttctacgctcgacatcacctaccggcgcaccgaaaaaggcgaagtcaaacccgcccactggctacgctggtggctgaagaatggcgaggtgcgcaatcgcagcggcaaaggtaagtttttcctcggcagtatcttgctgctatccgctggctgggtcgtgatgtatgcgctgtcgattttcgggatgtggctatcgaacgagccgttaaccctcggccacgtggtcaagctgttggtgaccactgccatgtttgggctcgtctggcatggtttatcgcccttggtggcaactgctcgatcatcgggtggtcagcgcgcccagtgctgtcgtagcgtttgctga

SEQ ID NO: 362184 - DNA, 813 bp, Pseudomonas aeruginosa
atgccagttagaaccctaggagagttttacctaggtgccgagccaatctggtacgatgtattctatggaaaccttcacaaaaatgagcattttcaacgaatcagcaacaacatagcagctgaaaaaaacgtcatacttaccggcggtgccctcacaggaaaaacaactctcttaaagctactaacaataacttccgccgacttcgggtggccgttcttcattgaggaaatcacacctgaaaaagcaaatcttctaaagcgcgagattgattctgaaggtagacgcgttctgctcttcatagataatgctgccgatgcgtgggaggcgataaacctcctctcagacagcccgaatatcacggtaattgcagctgaacgcgactacatatacgacagcgtcgcccatagattttcgcgtcgaaaatttgagcacatagatgttacaggtttaactccactagacgtgcaggcagtccgggacaaaataccggcagggctaaaacgacgagaagttttcaagcctcttcccagagagttagatgttgaaacccccccaaccttttttgaggttatcgacagtgctattgcggaccactctctgacagacaggtttattgacgcgctcaaaagccttaaaattgagtcaccctttaagcatgacctactcgtaatgtgctgctacttgtactcttgtcgcgtaccgacatctttagacgtggcaatcgcttactctcgaaaccatactactgatcctcaagaggtacttgaaactctcagatcaatgggaagcttcctttccgcgtatgaaggttaa

SEQ ID NO: 362185 - DNA, 252 bp, Pseudomonas aeruginosa
atggctcgtcgctggggaatttcccctggcgactcggagcaaggcacccagttcgccgtcggcgccgaggtcgttccttggcagagtgttgcgggccgcaacacccagttcgccgccggcgccgaggtcaggacctggcgaagtgattcgggccgaatcacccagttcgccgtcggcgccgaggtcgttccttggcagagtgttgcgggccgcaacacccagttcgccgccggcgccgaggtcaggacctga

SEQ ID NO: 362186 - DNA, 231 bp, Pseudomonas aeruginosa
atgacaaagctgcaccacgaaaaccggaccgagccgtttttcatcactgtggaagtagaggctgagctgatcgctgccggataccagtttgaaccgccaagccacttcgctaccatgcgcttgcccgaagtactggccggccttaccgatgcggagctggcgacctggcccagcgagctatcgaagggagaggtcgaacgccggcagcgcagcgcattcaaggcagaatga

SEQ ID NO: 362187 - DNA, 219 bp, Pseudomonas aeruginosa
atgaacggccccgagcgcaagcccattaccggctacctgtggggcggactggctgtgctgacctgcccctgccacctgcccatcctcgccgtcgtgctggccggtacgaccgccggcgcgttcctcggcgagcattgggtcatcgcggcgctcggtttgaccggcttgttcctgctgtccctgtcgcgggcgctgcgggcgttcagggaaagatcatga

SEQ ID NO: 362188 - DNA, 549 bp, Pseudomonas aeruginosa
atgaccgaaccgaagagccttgaaaactggctgtatgagaaggcaggccccgcctatgacgccttgaaggccgacccggcccgcgccgccacgcctgaccaggtgcgttacaccctggccgagctgctggccgaggccgaagccgccggcggatatccactgccgccggaacaacgcgaatgggtagatgcgccggccgttggtcgcgagtggccggcctgtgatgccttggaagctgaccaggtgcgcgcacgcctacatgacgacgcgatggtcgaaacgttccgcaaagacccggcctatgccgtggaactgctgaacagcatccttgaggatggcgacaagggcgagctactgattgcacttcgccagatgacgaaggctgctggccgtgaaatgctgacaccgtttgacccggccaaatggctgaccagcaccgagaccgtggccgcgttcctggccgaagccgaggccaccggcgaccaggcctatgtcgagcacgcccgcgcagttgcagcgcgggccaaagtcatgcacggcatcgagtag

SEQ ID NO: 362189 - DNA, 273 bp, Pseudomonas aeruginosa
atgacgccgagaggatttttcgattgcctggaccttgccgctaccgagcagcgccaggcacaggcggttgaggttgagccggtcgacgatcaatcgactgatgcagaccccgcggcagaagttgcggcctttgttgatcgacccgcctcgcccgtcattgaggccaccaagccggcggccaggtcgggcggcaacgccagcagctacggcagcagcgcgagaagcacgccgctggccgaggccgccggcttctacggcaccggcagccgataa

SEQ ID NO: 362190 - DNA, 1590 bp, Pseudomonas aeruginosa
atgaaagcactgcacaaggcggcgctgatcggcgtcgccctcgcgctttactccaccgccgcgtcggcccagctcaccaaccaagggatgcttgaccaggtggtgacggagttcgccacgcgggccacgtcctggcagacggtggtgatgaatgccgcgatgttcctgttctggacgctgggcacgatctcgctggttttcacgttcggcttcatggcgctgcgcaaggccgacattggcgagttcttcgccgagttcatcaggttcatcctgttcttcggcttcttcctctggctgttgcgctatggcccgaccttcgccaactcgatcatccagtcactggcccggcttggtgagcaggcgtctggggtggcgtcggtgacaccctcgggcatcgtggatattggcttcatgatcttgaagcaggcattcaggaactcgtcgatctggtcgcccgtggatagcttcatcggtgtggccttgagcgtcggcatcctgatcctgctggccgttgtcgccgtgaatatgttgctgcttctcgtgtcaggctggctgctgatgtacgccggtatcttcttccttggcttcggcggctcgcgttggacgtcagacatggcgatcaactactacaagaccgtgctgggcgtggccgtgcagatcatgacgatggtgctcctggtcggcatcgggaacgacctgctttccagcttctacgccaggatgaacaccggcaccctgaactttgaagagctgggcgtgatgctcgttttctgcgtggcgttgctcatgctggtcaatcgcgtgcccccgcttgtcgccggcatcatcaccggctcgggtatcggtggcgctggtggcatcggcaacttcggtgcaggtgccgccatcggtgcggctatgggcgcggcgagcatggccgccggagcggcaagcgtggctggcgcggccgtgatgggcggtgcagcctcggccgccggcggcatgtcggcgattaaagcagcgttcgagaaagcaggggccagcgccggtggcgaatcgggcggaatgcccatgtttggtggtggtgctggcggtgattccgatgctggatcgttcgcgcaggcggcgggctttggtggcggcggttccagtgccggcacaagtacgccgctcggccaggcggccggcttctataactcgggaagctccagcagttcgggcagcagcggccagagcaaggtggcacagcagaccagccacgccgacagctcgggcagcggttccagctcgaaggccagcagcgacgccggcagctcgaaggccggccaaggtgcgggcagccttctcgcggcgacggctgcgaacctggcgcatggcattggcgacgttgcgaaggccaaggcggccagcatccgcgacgccgctgccgaacgcatcgccgacaccactggcggaaagatcgccgccgcgatccgggcgagcagccagacagaccaggcggccgaggatgtgcccagcttcggcggcaacagcctggcaggggccgattcggctgctgctgatcctgatgatgaagtggccacgttcgccaaccgcgacaaggaggtatga

SEQ ID NO: 362191 - DNA, 684 bp, Pseudomonas aeruginosa
atgcaatacctcgtcaattcgccggacgctaccagcttcctcgacaccgcccagctggacagcggcctgtccgccatcctcggcgaccccaagggcatcgacgcccatgtcgcgccggacgtacagagcgcccacatcgtcctcaaggaggccgctaagaagattgcggcactggtcggcgacccgacccggacggacgtgcagcgccatcacgccgccaagcagcttgccgacaaggtgacgacccatctggagaagtccaaggccgcactggaggcccacgccgagaagttgaaggcgtcggcgctggcgcaggctgatttgcatctcggccccagctcggagcgcagcgccctgcacagtgagattcgtagctgggtgcgcgagcaggccaagacgccggaagggttgctgcaagtgaagcaggcgatggcggacaacgacgacgttgcagccatcctctggcactcgccctcgttcctcgtcgggctggctcccagcgtccatgaagggctgcgcctcgaagccctgcaatcccgcaagcccgagctgtacgcgaacctgagcaatagcgtcggcctcgccaagctggcgggcaagtatgaagccgccatccgcaaggttgcgccgagcttctacacgcccagcctcgcggagcaggccagcaaacgagtggaaatctag

SEQ ID NO: 362192 - DNA, 444 bp, Pseudomonas aeruginosa
atgtccattcacgacgaaatcaagcggcatatggccctggcgttcttcgggtccgactatgccgatcaggccgaagaatgcggccacgcgctcggcggcgagatcatggaccagttaccggcagtgatagacccggcggcccttcacgcggccgacactctggccgccagcatgttgcacgctaacggcctgaagtcggcgcccttcgacctggaatcgctgttcctgcgcgccgtcgaaatcgccgaaaacagcgacgataagggcgaccgggaacactcgccggagatgttcggccactactgcgccatgcaagcgatggggcacggggtcgggctttccgatgccttcggccggcgggtctatgacgctatccgcgtgccctataccgagttcgggggatattccctagagcgcgattatttcgaaccgggggagtcttga

SEQ ID NO: 362193 - DNA, 282 bp, Pseudomonas aeruginosa
atggaactaaccgcatatctccagcacggcaaagccggcggcccgtatcggaccgagcgtgtcccggtaatggaacagccggccaacatggtccccgctgttcgctcccgcaccggctacggcaaagacttgccgaccccgtacctgatcgactgggaagggttacggcgccgggtctatgccgtctgctattcgaacgttgcgagcctctacattcgcacgaaccgcgacacggacaacggcggccggatcttcgtcactatcgaccgggagggcgcgtaa

SEQ ID NO: 362194 - DNA, 345 bp, Pseudomonas aeruginosa
atgccgacaatccaggttgcttcggcggaaggccccgcccccgcagaagtgttcgagacgttctggttccccctagacggggaccggttcctgttcgccctcactcagatgcacggcaacaccggagtcgccgtcactgagtacctcagcggtttgagggccgtctaccgcctcctggacgagcgcggcgacgagatcgacccacgagaacacgccccacactccctatgcgttatgggcgggtacgccctgcgccatctagccgctgtgcacggcgaggtgaagatcaaagccgccattctggagggtcaacgaggcggcgccctgaacgaactcgatttctaa

SEQ ID NO: 362195 - DNA, 195 bp, Pseudomonas aeruginosa
atgaccaagctcgccgaaatcatccgcaccaaggcccaagagatcgtcgataacgccatcgacgcagttgacgcaatgaacctcgccgacgagtgcggcgccagcgatcaagactgggaaaacgagacgaccacctgggagttcaccgacggcagcaagctgattgtctccggctccgaataccgcgccgagtaa

SEQ ID NO: 362196 - DNA, 765 bp, Pseudomonas aeruginosa
atgaacagaagtcacgtcattgaggctctacgggccgccgattggtccaatacccccatcggcaacaaggccctgatccaagccgcaatcgaacatctggaggcgcagccctcttcggcgttccgcccatctcgggtgatcggctaccgccctggcatgggcgaggtgaccgtctacgtggccggcggcgttccgggctacatgaacatcggcgatacggtttacgtctccgaccgagcaccgggagagcagccaagcgccgccctagccagggtcgcggagctggaggcaaagctagacgagttggagaagcagaagccactgctacacatcaaccctcttgtggttgacgagttgttgggacgggcaaagcgctcgcccggtggccttacttggtcgaaggaaccgtgcaggccttggacgctccctctctacaccgcgcccgcccaggctcagcacagcgtgccagggatcgctgagtctgtgtccgaatgcttggccctggcgcagaccgtttttgcacgcctggaagggctaatgccgcgcgggaagaaactgccggaaaagcatgttgcaagacgcttgctggccgagttggagacgcttgccaaactcgcagccgcgcccagcgagaaacgcttctgtgagtactccggatgctccgacaaggcgcatccaggcacatcgctctgcatcgcacatcactcgaagaaggcgcgggagcagttgctcgctgccactacagatcagggagacgcccaatga

SEQ ID NO: 362197 - DNA, 486 bp, Pseudomonas aeruginosa
atgatcgagcttcgccctatcacccgagacatggccgatgcgttcatccggcaacaccatcggcatcacaacgtccccgtcggggcgctgtggcggcaagccgttcacgatgacgatggcaacctggtcggtgtagccgtcatcggtcgaccagtcgcgcgcgccctggatgacgggttgactgcggaagtcacccgcctgtgcacggatggcactccgaacgcttgtagcatgctgtatgcggcagcgcggaggaccgcccaggacaaaggctatcgacgcggcctgacctacatcctggccaacgaaagcggtggcagcctccgcgcatctggttggcgcctgctgtgggaagtgaagggcaggagttggaactgcccgagcagaccgcgcacggacaagcacccaaccgaagacaaacaggcttggggctggggttcctggccgctcgccaccgcacccggcaaggaggtaggtcatgagtga

SEQ ID NO: 362198 - DNA, 672 bp, Pseudomonas aeruginosa
atgaaagaacgtccgatcctattcagcgggccgatggttcgagccatcctggaaggccggaagacggtcacccggcgcatcgcaaagcccgtcaagcatcctgatctaggaaacatctacgccccgggcgccttggtgctggagcacgagcctcagcatgttgtcgaccgagcatgcccctacggccagcccggcgatcggttgtgggtgcgcgagacgtggactgacgtgaacatgtgcggcgcaccggcgctggcatatcgggcggacgaggatatccgcgatcttatggaggagccgggctttctggatgatcgcggagccttcaactacgacgacccgcgcgtcaagccatatccattcgcctgctggtacgccgaacttgatcaggcgcgctggcggccgagcatccatatgccgcgttgggcctctcgcatcctgctggagatcacctccgtgcgcgtcgagcgcttgcaggacattagcgaagagcaggctattgctgagggacctcctggcctggccttccctgctccccctggttcgcactgggtcactgaagacgggcggcggcgcgcgttcatgcgcctttgggatgacgtcaacggcgccggcgcctgggacgccaacccctgggtctgggtcgtcgagttcaagcgggtgacgccatga

SEQ ID NO: 362199 - DNA, 648 bp, Pseudomonas aeruginosa
atggcatgcggtgaccctcagcctgtccgacgtcaccagtcgcaaggaagtcgaactgtcgctgatcgagcgcgagaagttctggtcggacgcggtccaggcggtgcccgataccctctacatccacgacctgcacgcgcgccgggtgatcttcagcaaccatcacctgggccagcaactgggctacaaccaggaagaactggcgcggatgggcgagaacttctgggaaaccctgctgcaccccgacgaccaggaatactactggcgcatccgcaacctgcagcacgtggtcggcgacggcctgctgctcgacagccagctgcgctggcgccaccgcgacggccgctggcactggttcgacatccgcgagcaggccttcagccgcgaccgcagcggtcgcgtggcgcgcctgatcggcgtggccaaggacatcaccttcaccgtcgaggcgaacaacgcgctgcgcgagaacggccgacgctaccgcatgctggcggaaaacatcagcgacgtgatcttctccaccgacgccgaactcaacgccagctacgtcagcccctcggtacagcaccggctacagcccggaatgggcgctgctcaacggcctccaccagaccgccaccaacccgcgccagctcggccgcctga

SEQ ID NO: 362200 - DNA, 885 bp, Pseudomonas aeruginosa
ttgctgcgcctggagcaggcctgtgagcccgatcccccggagctgctgcaattgcgccaggcgttcgccgccgagggccagccgctgccggcgcaatgcgtgccggcgctgggcgaggcgcggatcgctttcttccacaccgaccacctcggtacccccctgcaactgagcgacgagcgtggccaactgcgttggcagggcgttccggacgactggcgggcggtggcgccggaacgacagccgggtgcgcagccgatccgcttccaggggcagtaccacgatgaggaaagcggcctctactacaaccgctaccgttactacctgccggaagccgggcgctatgccagccaggacccgctcggcctgggcggtgggcccaacccctatgcctacgcgctgaacgcgcccacgctggcctacgatcccaccggcctgatcatcccgctggtggtgatcggcgccttcgccgcccgcgccgcgatcggagcggcgctgggcgccggcatcgagctggggatgcagaccggcaagcaggtgctggggcagataaaggacaactgggacagcgatcgcgacctcaccgatatcaagtggaagtgcatcgacatcaactggaaacacgtcggcgcctcggcggccatcggcaccgtggcgccgggcatgctcagcaccggcaagaccgtggtgcagtccgccaaggcgatcaggaccctttccggacaggcggccaacaccgccaaccgcgcggccaagctggccgcgcgcaaggccgcccatgccgataccatcaagaaggccgtggccacccaggccgcctggcagacgggcaagcagatcgtcaaatgcccgctgaaggacgaagaagaggagtgcccgccgcaatga

SEQ ID NO: 362201 - DNA, 219 bp, Pseudomonas aeruginosa
atgaccgacgaccgcgtaatgtccgctgccagttacacgggcgccgggatatctgttttgtccggcctcactctgactgatgttggaattatcgtcggtatcgccacggccatcctgacgttcattgccaacatcgtatggcaggtaaggaaagatcgaagggagaaggagctgtacgagttggagaggcaggcccttcatgagaagcttggccggtga

SEQ ID NO: 362202 - DNA, 225 bp, Pseudomonas aeruginosa
atgagaaaacgagaacttcaggttctggaaaacgtgttcgtggctgagatcgaaggccgacttccattccagaccaaatccaagatcgcccaagacctggccgagcgcggatttcttcagcgcgggagccgcatgatcggtcgcgttgaggtcagcggctattacctgacgcatgccggtcgatacgcctattgcgcgtcgtgccctgagccggaggagttgtga

SEQ ID NO: 362203 - DNA, 186 bp, Pseudomonas aeruginosa
atgacgcgcaacgagtacgacgagatggaagccactgcaaacgtggcattggccggccttctggctggtgaaggccagtgggtaagcaatcccaacgaacttgtcaggcatgcattcgacatagccgaagccttcaacgcggagaagaagcgccgactcggcgaacgtccggaatgggacaactga

SEQ ID NO: 362204 - DNA, 186 bp, Pseudomonas aeruginosa; identical to SEQ ID NO: 362203

SEQ ID NO: 362205 - DNA, 345 bp, Pseudomonas aeruginosa
atgaacgaccgcgaactactcgaactggcggcgcgggcggcggggattgatccagtcttggctgaaccgatcaatttcagtactggggttgaatattactggaacccgcgtgatgacgacggcgatgcattgcgcttagcggtgcgactgaacctggatatccgctacgaaagctatgacgcaggcgtcgccgtcatagtgggcggcgcttgggacggcgcgccggaagcggtacacgaaatattcgaacgtgacggcccgcgtgcaactcggcgagcaatcgtccgcgcagccgcagagatcggcaagtcaatgacccagccgggcgccactagctctccctga

SEQ ID NO: 362206 - DNA, 267 bp, Pseudomonas aeruginosa; identical to SEQ ID NO: 352711

SEQ ID NO: 362207 - DNA, 129 bp, Pseudomonas aeruginosa
atgaagatcccggcgctgtcgctgagcccggtgagctggccgatggcctggccggaaagcaccgtgccggtggcggtgaagcccaggtacatcaggcacaccagggcgatcgggatgcaggcgccgtag

SEQ ID NO: 362208 - DNA, 1449 bp, Pseudomonas aeruginosa
atgacagccatagcggacctactaaatgcgttcaatgagctgcgcagccatgcctcgcagtacattgaggaaagttttcgcctgacgatggagggcggatcgcttagtggggctgtaaaagctagccttcagaatatttacatgctcaccgatcaactgaacgttgaggctcccaccctcataatatctggtgagaccgtagatgcgtctgagctgtcagagagcacatttgatgaggaaccatggaggttggcctttggcaagacgcctctggcgcagcagatgcgagcaagggatgatgagaataccttgctattctttactatcgagggttttcatcaatggttggaacgtatcgatccttttcagtatccaaccagcaatgagcccgaccttacccgcccgacgacaattcgtgtcaatggactgactatggccttcgggggaccactactttgggtcttacctccgagtgataaagcccccgacgtgccaacggtcggcaaactgcctaatcaggcagaagttcacgggttgatccataccaatgcaatgaggcccctccgggtgtgtccgagctcctatgcattaaattggggtgagcttgacagctccgaggctgcaccaatggttcggttgagctcccgcgttcttgccgcatgtctagtccaagagctaaaactctcagatgttggctatgaaaccacgcttcgtggaactaagcgtctttcattaccactttctgataattctcaaggggtgaggcctgagacccttttacagcttttcgatgctgtctgctgggtttatgaagaacgacctgagactcgcctcaggttggtcatggatcgactgtctattgacatcgaacaagggcagaccttgctggcaggtgctgaaaagtacttggcagcagcgctacagcaggctcgtgatagctacacttttgtaatccttgatcgcaaggatgcctatcacaaagaggttcgcgagctcatgaaagacatgaagtcgcaagccgatctttacgcgaccaaggtaagagatctgataaacgctcttactcgagatattctcggagttttagtttttattggattctcttttgttggaaaatttgatcaaaaaaacattcaggctcttttgaaaagcacagagctttcagtgctggtcaaatttctagcctgttatctagcgctttcttgtgttctgcaatttgcctcccacataagggatgcaagtcttgcgtatcaggaaagcagaacctggcttgacgtattgcagcactattcttcgcaatctgataagcaagaccggtttctaacaccaatagaccgtcgcagggttactctttttatagcgatggggattattggggccatctattctgtcttatttttgatcacgtggaacttgccgtttttcatcgagctaatgttagctcagtag

SEQ ID NO: 362209 - DNA, 714 bp, Pseudomonas aeruginosa
ttgtccgcgcggcacggccatcgccagttggtagcggtatggcgtctcgccgctgatctccaggccgttgagcttgagctggcggaggttccatacgctggaggcgaagtcgccgacgaaggcgtcggcctggccggtggccagcgcctgcagggctgccgctaccgaaggcagcggcagcagggtgaggtcgggatgctgggcgatcagcagttcgtgaggagcatagtggtcgaccaccgcgaccttgagcccgtagagctcgtcgatgcgcttcggcatcgggccgttcttgcgtgccaggatgatgatcgggaagtccaggtagggccgggtgtagctcaggtactcctggcgctccggggtagccatgatgccgggcagcaggtccagccgaccgtccttggcctgctccaggacctgcgtccaggtcttcggttcgacaggcgccaggctgacgcccaggcgttcctgcagcaggctgacgtagccggcggcgagtccctggtagcggccctgttcgtcgcggtattcgaatggcggccaggaggtgtccacgcccaggcggatgctcgggtgctcggccagccaggcccgttcctcgggcgtgagcgtgagggcgccggccagccccggccagcagcaggccagacacaggagaagcacggcctgcagacgctgcatgaggcggtctcgcggtggacgggaatataa

SEQ ID NO: 362210 - DNA, 633 bp, Pseudomonas aeruginosa
atggctgtaccactggatggcgttttaactcaggcgcaacgtgacagtctggaaatagtcagtttcattttccacattatcgagccggaagccgatgatgaagatgtcgtgttccttgatgaagtgcagttacaggccaagcaaaaggagtttttcctggctcgtttgcgcgaaattgccgagggaacgcagtatgtatttaagcaggacgcggtgcacttgaaagagaaatgccagcaactggtagaagcaccagacagatttattgaactttctcgtcaggtcaccacagatttttctgggcgccatcgtggacagatgtctgcaggtgtattcattgtctctgccgtgaaatatctggcttctgcacataactggcgacaactcatcttcttggtgaagatggataaacagccctcgttcacttacagctatcaggagaaagacggccgacgggttgccatcgtcaatgaagtgcctaactcgctaaatgaaagcaagagcgcaatacagaagagtgctctagtagacgcatctgaccagtttggttgggatgtgctggcctttgacagggtaaaaaagccaggtttgagcgactatttccgaggcttcttagcccacttacgcacctga

SEQ ID NO: 362211 - DNA, 333 bp, Pseudomonas aeruginosa
atgcgatgcgtcctcgtcctgtgtgccgcgctgctggccgcttgcggcgagcagccggccgacaaccttgccgatgccctggccgccgatcccgtgcggctgaaggcattgcgcgcgcaatgcgcggcccatccacaacaggtcatgcaggccacgggcgaggaagcttgccgcgccgccgccgaagccttccggcggcgcttcttttccggcgaggccgggccggatgaataccagacgctggccgacctaccgccgatcccgcccagcttcgaggaaccggccgatggcatcgcgccggccttgcctgccgcaccggagaacacgccatga

SEQ ID NO: 362212 - DNA, 600 bp, Pseudomonas aeruginosa
atgacggcccaatccaccatcgtgcgcacgcctgaagccgcaccgcatcctcgctcgcgcctgcgcgctcgcatcgtgctggcgggcttcgccgccgtcggcctcgctgcgctggcctgggcggctttcgtgcagccgctgccacgcctgatctacaacccgtccgacagcgttccggtcggctggtatcgcgtcgatccacagcgccacggtgccgacgcgctgccacgtcccttatctgtgggcagcgtcgtcctgaccacattgccgccagatgttgccgcgctcgcttcgcagcgcggctacctgccggcacacgttccgctgctcaaacgtgtgggcgtggtcgcgccgcaacacgtttgcatcgtcgccgggcaggtacgcatcgacggcgcacctgcggccaccgcgctgcctgccgacaggctgggccggccgctgccatccttgcagctttgccgccgccttgaagcgggcgaactgttcctgttgagcgtgaccaatccggcgtcgttcgacagccggtatttcgggcctgtcagcgcatccgacgtgatcggcgttgcgcatccgatctgggtggagacacgcccatga

SEQ ID NO: 362213 - DNA, 291 bp, Pseudomonas aeruginosa
atgcagaagcgaaccgtccagcgcggccgaccggccggctctaccaccttcgacgccgaactggctcaagccttcggcgcggcagtgcgtgcgctgcgcacggaacacggcatcgctcaggaaacgctggccaaccaggccggcattgagcgttcgcacatgggcaagatcgagcgcggcgatcatgcgccgaccctggcgatcatcttcaagatcgccagggcgatggaatgcagtaccgcggtactgatggtcgagacggaaagccggcttcaaaccgccgaggcatag

SEQ ID NO: 362214 - DNA, 1155 bp, Pseudomonas aeruginosa
atggctgacaaacatgaggtcgttttctacccggttggaaacggcgataccactcaaatcatcttggcgggcggacggcgagttctgttcgacttttgccaccgcggccaggcggaagatcctggcacgccggaaatcgatctgagggcgcgtctcaaggccgatctcaagaaagccgaacgcgactacttcgacgtagtagcgttcacgcatgccgaccttgatcacatccaaggcagcaccgagttcttcgagctgcaacatgcgaagaaatatcacggcgagggacgcatcaagatcagggaactctgggtccccgcagcaatgcttctggaggaagcagacaacgaccaccagatggaagaattcgtcctgcttcgacaagaggctcggcaccggctgctggaaggcaaggacatcttggtgttctcacagccgcaagccctgatggattggctcgttcccctactgaaagagcgaggcgaggcagcagacgcgcgcgatcatttgttcattgatgcggggaccatcgtgccgggcttcacgctggacaaagacaaggtggagttcttctgtcattcacccttcatcaagcactgcgacgacggcgacatcatccgcaaccgcgccgccctcgtattcaacgtgcgcttccgggccgacgggcaacactacgactatctggaagtcggcgacgcggcctgggaagaacttgaagaaatcgtcgagatcacgaagtatcacaagaacgacgatcggctcgcatgggacttgtacaacatccctcaccactgcagctacaaggcgctgagcgacgagaaaggcgacagggaaacgactcctaagcctttggtgaaggacctcttgctgcttggcaaacaacagtcgtacatagttagctgcagcaagcccatccccgatgcaagcgactcgtatacgcagaagcagccccctcacattcaagcgcgcaaggcctacgagcgctatctgaaagaggtaggcggccgcaagttccttgtgacgatggaagagccgaacggcaacaagccggaacctattaccttcgagatcacgggcggaggtgtaagctggattcgctcatcctcgatcggggctcccgctgtcatcctgtcttcgccgccgcgggcaggttga

SEQ ID NO: 362215 - DNA, 2256 bp, Pseudomonas aeruginosa
atggctgacgaataccacgaactggcaaatgtcgccgaggttgcggacgcggcggctctgaagattccgcgcgccaagcaattgcatgacgccgtcatgcggcatcgcgactactctgtcatacggcttgtggatcacaaggaaggcgatacgccgacgcttgaatgcctcatcgtcgatgtcgagtgcgatggtgtcccgtcaaagaaccggattggcattcagtatcgggaacgcttggcgctgtgcgtgcctagcgatcccaagcaactcgtaaacgtactggcgctgcgcaaggattttccaatcctgatgcatcagaaccagggcgttccagatgcccctgccagtctgtgcctttacttcgagccgtctacggcggtgcatcggacatggacgccacagagcttcctacggcgcattcaatggtggctcgaaaagagcgctaggggcgaactgcatccggcggatcagccagtcgagaacctgttcttttctaccccgtacgaactggttcttccatgggatcttgaggcccttcgcaagaacgaagaaatccgcttcatgcttgctcgcagcgccgagcgtcccaataggggctttactctttttctcgaagcgatccccaagaacgcgcaggtcaagacgggcacgactgcgccgatcgaattgacgttgccgcccatcgttcatggtttcgtagagcgcgatccggcgacattgggacaactctccgacatcctctcaaagcgcggcgtcgaactgctgtccgttctggcatctgcgctgcaggcgcgtgtcggtcccaaaggagccgccgcttccgccgaagacaacagcactgtcatcctgttgcgtattcccatctgtcgagcggaaggcgaagcccccacagggcttacgcatcgcgccttcatcgcgctggtgggcgggctgcaactcggcgaatcaacgggtgccttgttctcccacaacggtcaatatttcagtgctgccggcgtactagggtccgagccggcgaccgcatggcgcgaacagccggtgtttccgatggacgtcctacagaggaacgatgcccaggcggccaggagacagtcgggcatcgcggaagcggggccacgcgctgtactggtcggcgccggctctctcggcagcgcaatgcttaacctctggtcacgcgccggctggggagaatggactgtcatcgacaaggaccacatcaagccgcataacctgtcacggcacgtcgcgtacgcgcagcatattggcgaccccaaggctgaggttatggcgggcctgaacgctgcagttatgcatggcgccacggaaatcacaccgctgaacgccgatgccagcgacttgcagcagagcgccgtcaagaacgcactcaccaatacacaacttgtcatcgatgcgtcaaccacgctggagtatccccgcgcggtgagcaccatcgatgcaatcgccaggcacatttcggtgttcatcacaccaaatggaaacgcagcagtattgctcgctgaggatgcccagcgcacgctccgcctgcggacattggaggcgcaatactaccgcgcgctgatccagcaggaatgggggcgagcccacctcaccggcaacgtgggttcgttctggagcggggcgagctgtcgggacatttccatggtcatgcccttctcgcggatcatgggccaggccagcacgcttgcggagcagatccaggctgcattcgctttcgaggacccaatgatccgcgtgtggcaacgcgatcccatgcgaggctccgtcgaagtcgaggacgttccggtctcaccggaacgctgcatgtccctcggcgaatggagcctgttcatcgatttgggcgtggaacagcaactaagagcgctgcgcacaaagggcttcccgaacgaaaccggtggtgtcctgcttggttactacgacttcaacatcggtgccgtcatggttgtcgcagcgcttccggcaccgccggacagcaaagcaagtcgcgcgtcgtttgaacgcggcattgccgggctggcagaaacggttgccgacgcatccaggcgtacggccggcattgtcggctacatcggagagtggcacagccacccgcccggccactcggccacgcccagccatgatgatctcatccaactcgtacacctggcactgggcatgagcgacgacgggcttccagcggtccaactgatcgtgggcgaacacgaccttcgggtgttgcaaggagtggtgagatga

SEQ ID NO: 362216 - DNA, 705 bp, Pseudomonas aeruginosa
atgaaagacactcaagactacagcagcaagacgctcaagtatcgcaacctcggctggctggttgccactctcgttcttgatgtccttgttctgcttgtcatcgcattccataccgcgatcgaagagctgacgccgacgacggtcatggcgatccgcgcgagcctgaccgcgctgcttcccatcccggcgctgatcctctcatcgctgatctctgcggaccacaaggcgatcctggtcttctggcgcctgtcgcatcctctgcccggtgcgcgagccttctccattcatgcgcctgcggacacacgcatcgacttagctgcgcttcggaagaatgtcggtgagttccctaccgcagcaagagatcaaaatgcaaagtggtacagcttgtacaagctggttgactccgacccatcggtcgtcgatagccacaagaactacctgctgttccgggacattgcggccatgtccctgctgcttgtcccagccgtgcctttggcaatgcacttcgctgatatcgacaccgcacggatgaaagtctccgctgccctctttttcgggcagtacctcttgactgcgtttgccgcgaggaccactggcatccgctttgtgcagaacgtcctggccgttcatgccagccgcaaggtttcgggctcgaagccgcaagcaaggaagaccgtgtcagcacaacaaggactgggcaattga

SEQ ID NO: 362217 - DNA, 528 bp, Pseudomonas aeruginosa
atgatccctgccgagctgacaccggcccagttcgaggagcacgtgaaagcatggctcctggcggtggggcaaacactggccagcttcgacgtcatgcgcctcgaatccgtcgcgggcagcagcggcgagtatgagatcgatgtaactgcgcgatttgtcgttttcggcggagccgaaattcaggtgctcgtcgaatgcaagcatcacaagcaccccatcaagagagacgtcgtgatggttttggaatccaagctgagggacacgaaggcccacaaagggatgatcttttcgacagctccctttcagcgtggcgcactcaagtttgctgagaaccaccggattgcgacattgcacgtctccgatgcggggggtcagtacatgacgaagtccgtcgcgagcgaacgccccaccacaacaccaggctcggccgttgcctggctctgtacccccaacgaagagggaacacagttctcgattgtgtctgggcgggaaaacgagaaacttggtcaatggctgatttcagcctag

SEQ ID NO: 362218 - DNA, 897 bp, Pseudomonas aeruginosa
gtgacgatcgtgaagagtttttcagtcggcaacggcgatatgttctacatcaagcataacagcgacaacttcacaatcatcgactgcaagctatccgacgagaccgccgacgagattattgaagaacttaaggcggaatccaaaaacaaagggatcactcgctttatctgcacccacccggaccaggatcatttcggcggaatcgagctgcttgacgatgccatgccaatcgtcaatttttacgttgtgaagaaccaagccgttaaagacgtcgatacaaaatcctttgagagatactgcaccctgagagacagcgataaggccttctatattcacaaaggctgcagtagaaaatggatgaatttgagcagtgacgaacgtagctcttccggcatcagcatcctatggccagacactgagaacgccgacttcaaggaagccctggaggcttgcgacgcgggagagtcctacaacaacacttccgcggttatcagatacagccttcaaaacggcgcaagtgttatgtggctaggcgatctcgaaaccgattttatggagcgaatcactgaccacatcaaacttgagaagacaacgatagtgtttgccgcacatcatggtcgacaatctggaaagattccagactcatggttgaagaagctcgatcctcagatcatcgtgatcggcgaggctccctcccgccacttgaactactacacgggctacatgaagattacccaaaatagagcgggacacatcacaatggagtgcgtgggcgacaaagtccatttctatgtttccaacgccaactacacgcatgacaagctggataatgaaggaatgagcagctttccgaactatgtcggcagcattacggttgaaacagagtacaccctataa

SEQ ID NO: 362219 - DNA, 801 bp, Pseudomonas aeruginosa
gtgtacctggataaggtccagccgcgcaccggtcccgtcgacccggcgaagcagaagattttcacccgtggccagcggatggagccctacgtcatcgacctgctggccgaagagaccggcctgaagatcgtcggccgcggtaaccgctaccgcgaccagcagcacgacttcatggccgccgagatcgacgccgaggccgccagcggcgaaaacatcgagatcaagacggtcagccccttcaaggcgaaggaatggggtgaggttcagaccgatgccattccagtccactacaccgcccaggccatgcacggcctgatggtcaccggccgccaggtctgcatcttcggcgttctgatcggcggcgacgacttccgcgtgtaccgcgtcgagcgggacgacgaaaccatcgcggcgattcgcgagaaggaggtcgagttctggggacgcatccagcgcctggatccgcctgaagcaaccgctgtcagcgacatgctccggctgttcgaacgtgacgccggaaccagcatcgaggccgatggcaaggtcgtggaggtgttcaaccgcttgcgcgaactgaaagccaaggccaagggcctggagtacgagatcgagtccgcagaggagcgcatcaagctcttcatgcaggaccacgcccaactcacggtcaacggcaagtcggtactgacgtggaagtcccagaccaccaaccgcttcgaccaatccgccttcaaggaagctcaccccgcgctgttcgagcagttcaagaagaccagcgaatcccgcgttttccgcctcaagtaa

SEQ ID NO: 362220 - DNA, 645 bp, Pseudomonas aeruginosa
atgccaaattgggtaaccaatagggttaaggctccgcagcaagtcatccaggcgatggtcagcgaagaaggccgcatcgacttcggaaaaatcatcaagttcggcggcgagtttccatgggacggtgtttcggtcgatgcagaaaccgctgctgagcgcgtactgaacctgccactgaattcgcatcccttggtcggcagcctgcagaaatccagtcgtgaccgcgttgacgtttcaaagctgagcgatgagagcttcgagcagttcatccagatgctgcgcaatcaccgccagaccggctacttgcacgacatggactttgccagatcggcctggggcaccaagtggaatgcctatgagtccagggttgacggacctgagtccgcaagctttgaaacagcatggtctttccctgagccgatcttcctcaagctgagctcgatgttccctgaggcaaccatcgaactcaactacgcagacgaagacatcggcagtaactgcggcacggtcaggttcaagggtggagaggcaatttatcgcgacgagtctgcgggctggaacagcatgtccggggccgaccgcgagaggtggaccagctttgcctacgaggtcaagggttgggagcgcgaccaagaagacgactga

SEQ ID NO: 362221 - DNA, 1191 bp, Pseudomonas aeruginosa
atgatttatattcgcactggaaagccgggtcacggtaaaacgcttaatactattcgtgagattgacgaaaaggcatttgctgaaagtagggtggtttactatcacaacattccggaacttaagaccgataagttaaaggcgtcctggttcgaatttgaggacccttataagtggtttgagttgcccaatgacgcgattatcgtcgttgacgaggcgcaaggttggttcggtgtgcgcgatccgcgccagaagccgccagagcatgtaagccgcttcgaactgattcggcatcagggccatgaaatgcacttggttacgcaggacccgcgattcatcgacgtgcatatccggcgtttggcgaatgggcatgttcacttctggcgggtgttcaagtcccagcaactgttgaggttcgagtccgatacggtcattgatgcggtcgagaagaaaaccagcttcaaggatgcggacaagaccacgatcaagctcgataagaagtacttcggcatgtaccggagtacgcagggcaagcaccatttcaaagtgcaactgccgaagaagttcattgcggcatgcgtggtcctggtcgttgcggcgttcctggtctaccgggcatatgagcgttaccaggaagaacagcagcaagctgcggcggaagcagctcctggtgcggcatccgtggtcgactcggtgacggacaaggtcggttcgatcctgaacccggtttcggcggcaggtggcggcggccaggaaaaggtgttgacggaagcgcagtacctggagcttcgcaagccgcgtgtgccggacttgccggcgtcggcgccgatctacgacgagttgaccaagccggtgacgtacccgaagccgttctgtgtgtcgtcgcgcaatgaggacctagtgcgccgcaacgcttcgaagatggagttggggtatcgtgatggcgtgttgaacgggtgtcgctgcaacacgcagcaaggcacgcggattcggctgtcgttctcggcctgcatgaactatgtggagaacggggcgttcgatccggcgattcctgatcgctcgatcgatcagcgcatggttcagcatcagccggcatcgcagcagttccaggtgcagcaggtgcagccgcgggatgcgttcgggacgcgggtcactgtagtgcctgatagcagccgttcgccccgcacgttgtga

SEQ ID NO: 362222 - DNA, 1287 bp, Pseudomonas aeruginosa
atgctcgacaagttgcacctcttcgttcctttccgtctcgagcacatcgaactgctcggggtggaagggcgtgcggacccggtgcatgtcgttgatctggagagcctaggcgtgccgctccagggtcagatcagtcgaggggagggcggagagctacaggccgactacctgcggcatgtttgggagtcgctgagcacgggcttcacgccgcttgcgttcaaggtttttcaccagtcgctgggcaagcgtctgatgcccggcgtagagctgaaagccagcccggcgaagttgctccaggggcacaacgtgttcggtccgacctgtatccagaagggggccgaggtgatgtttaagtggctacacgccacgtatcccgacctgttcgccaagctcgatgttccggcgactcaggtctacgccctggattgcacgtattccagccggttgccggatgagcgcaccgcgctccaggtcatccaggcgctgaccaacgtcagcaacggccacaccaagagtcgcggcgacaactaccagacgtccgcgtactggggcgcgaaagaatcccgtctaaagcgcctgaaggcgtatctcaagcacactgagtttcaggctcagttggacgaattgaagcgggcagggcgggccgatctgtcggccgctcggtctgctcgggtcatgtctgacccacggttgcaggagtgggtgcgctacctgctccgcatggaagccacggtgatgcaccgctggcttgagcgtcggggcattccgtcccggctgaatgacttgatcgcgtaccagcagcagctttcgggggagggtcgctgtttgatccaagagtgctggcaggcggttacaggcgatttgttcgcggcctttgagggtatccagatgagcgtaattgatgatgaaaaagtgctggccgcactgctagagaagttcaccaaagaaggcaagggccggtataccaagcaacgcgaagaggcgggagttgtcgttccctcggtcttcatccctggtaagccagatgatagctatgcccggaacctgttccggacgtatcgcagcctcaaggactacggctggcaggagaccatggattcgatggctcgccggacgttctaccgccatgtctctgacttgtgtgaggcgggtctttccaaggcggccttgcagaaacttcatggggagcgagcgaacaacgttgtgccgctgctgcggttcgtgcaagtcgatttcagcgcccagcgccccgactggtacgtcgagccgaccgtggaggccgcctga

SEQ ID NO: 362223 - DNA, 147 bp, Pseudomonas aeruginosa
atggagtctgaagaccggtccgtatccgaggagttccgctcaatattcaagaggatagagtccctaccagaagaggaccgggcacgaatcaaaatggcactaaagggcctgctgctagccatcgatcacgagaggctaggcaactga

SEQ ID NO: 362224 - DNA, 555 bp, Pseudomonas aeruginosa
atgatcgacccagcagacaagcaaacccaagccctccccctggagcagccgaagcgcgggcgcggtcggccagccaccggcaaagccctgtccgatgcagagcgggcgcggcgctaccgggcgaacaagaaaaagcgtgacgatcaaccgtcacgaaaagacaacgaggacgggaaagaagcgctgcaccggagaacagtgatccagcaagctgagcaaatacgggcgcttgaacagcaactggtgcagcagcgcgaggaatacaacgacctggtgcacaagctcatgactgaacgcgaccagctcaagcgcgacttggctgccaagccaaggcgtcaccgcgatcaacctgccgccgaactgccagagagcgcctacgaggacgaacccggggcgaagacctggacgctccagggacgcagcggaagcggcaaatggcagaacctggccgcaggcctggaccgcaaagaagccagccggcaactggatcgagtgatcgacaacaagatcctaggcgctacgaaaggccgccaataccgcatcgtcgaagaataa

SEQ ID NO: 362225 - DNA, 327 bp, Pseudomonas aeruginosa; identical to SEQ ID NO: 347604

SEQ ID NO: 362226 - DNA, 555 bp, Pseudomonas aeruginosa; identical to SEQ ID NO: 362224

SEQ ID NO: 362227 - DNA, 228 bp, Pseudomonas aeruginosa
atggtgaacaggatgacgaaggccacggcgaacagcatcggcgtctcgaaggtcagcgaaccctcccacatggtggtcacccagttgaacaccttcaccccggtgggcaccgcgatcagcatggtggcgtacatgaagaacagctcgccggtgaccgggatgccgaccacgaacatgtggtgcgcccagaccacgaaggagaggaaggcgatgctggcggtggcgtag

SEQ ID NO: 362228 - DNA, 345 bp, Pseudomonas aeruginosa
atgtacacctcggggtggccgaagaaccagaacacgtgctggaacagcaccgggtcgccgccgccggcggcgctgaagaagctggtgccgaagtggatgtccatcagcatcatggtcaccacgccggccagcacaggcatcaccgcgatcaaaaggaacgcggtgatcagccaggtccagacgaacagcggcatcttcatcagggtcatgcccggggcgcgcaggttgaggatggtggcgatcacgttgatcgcgcccatgatcgagctgatcccggccaggtggatggcgaagatgaagaaggtcacgctgtgcggggcgaaggtggtcgacagcggcgcatag

SEQ ID NO: 362229 - DNA, 297 bp, Pseudomonas aeruginosa
atgaacaaggtgctgaccagcaggccgaaggccgccggcagcagccagaagctgaagttgttcatccgcggcagggccatgtccggcgcgccgatcatcagcgggatcatccagttggccaggccgacgaaggccggcatcaccgcgccgaagaccatgatcaggccgtgcatggtggtcatctggttgaagaacgccggctcgacgatctgcaggccgggctggaacagctcggcgcggatcaccatggccatcgagccgccgagcaggaacatcatgaagctgaaccacaggtag

SEQ ID NO: 362230 - DNA, 600 bp, Pseudomonas aeruginosa
gtgagtcaaagtaagttaaacggcatggaaatgtatttctttcgggcatcagtggctgattttaagaaaattcaaggaagtccgattgcctattggctgtcaagcgaaatgatgagtcgatttgagtcaggtaaaaaaatttcagacgtcgggaaagcattgactggtcttcaaacaggtaatactgaactttttttaaggtgttggtgggaagtaagttatcgcacgattggggttgcagttaaagatagaaaggaagctatgcagtcccaatgcaagtggtttttctgtagcaaggggggggattttagaaaatggtcaggcaacaggcagtatgtggttaactggctaaatgatggtgaagagataaaggacaaaaaagagagtgatctgcgttctggaaaaattacagcaaataactcaaagtgctggaatcaagagtattattttgagcgcggtattagctggaatatgataacctctggagcggctgcttttagagaatataaaagtgggactatttttgatattagtagtccgacccttttccttaggggggggtcaggatttttatgggtacttatcctacttgaactctaa

SEQ ID NO: 362231 - DNA, 1032 bp, Pseudomonas aeruginosa
atgtgtctgcaccccggcaggccgagcgcctccgctacaaaaacaacaggggaatcccgacatgccgcagcacgccttgccttccgccgcctgcacctgagccacgcgtccgaccctcgtcccacgccctcactctcgccgcggaacccgtcccatgaacagccccagcctgcccgccgtcgaacgactcgacgtgcaagccttcatcaatgcccagccgctttcgccgtaccaatggcggatcgtcctgctgtgcttcctgatcgtcttcctcgatggcctcgacaccgccgcgatgggcttcatcgcgccggcgctgacccaggactggggcatcgaccgcgccagcctcggtccggtaatgagcgccgcgctgatcggcatggtcttcggcgccctcggttccggaccgctggccgaccgctacggacgcaagctggtattggtcgcggcggtcttcctcttcggcctgttcagcctggcctcggcctacagcaccaacgtcgagcaactgctggcgctgcgcttcctcaccggcctcggcctcggcgcggcgatgcccaacgccaccaccctgctttccgaatacacccccgagcgcctcaagtcgctgctggtgaccagcatgttctgtggcttcaacctgggcatggcctgcggcggattcgtctcggcgaagctgatcccgctgttcggctggcacagcctgctgctgctcggcggcctgctaccgctggtcctggcggtagtcctgctgttccgcctgccggaatcggcgcgctacctggtggtccgcaaccgcggcagcgagcgggtacgccaggtgctggcccccatcgccccggcgcaggtggcgctggcacggagtttccacgtccccgagcagcagacggtgcaggcccgcaacgtgttcgcggtgatcttttccggtacctacagcgccggcaccctgctgctctggctgacctacttcatgggtctggtgatcgtctacctgctcaccagctggctgccgaccctgatgcgcgatag

SEQ ID NO: 362232 - DNA, 1062 bp, Pseudomonas aeruginosa
atgccccgcctttccgccctgctgttcctcgccctcgcaccctggctggcccaggccgaggagaccctgcgcgtctacaactggaacgactacatcgacccgcaggtgctcgagtccttccagaaggacaccggcatccgcgtcgagtaccacaccttcgccaccgccgaggaactggacaaggcgctgcgcagtggcgaggcgatcgacgtcgccgtcccctcccacgacaccctgccggccctgctgaaggacaacctgctgcggccgctggacttcacccagctgcccaaccgcagccatctcgaccgtcaattgctgagcaaactggccgcggtcgatcctgacaatcgccacgccgtcccctatctatggggtgccgtaggcctggccatcaataccccgcaggccgaagccgcctatggcgggccgctgcccaacagctggagcctgctgttcgacgccagccagagccagcgcctgaaaagctgcggcatcagcctgctggacgcgccggacgaaaccctggcgatcctcctcaactaccagggccgcaacctcggtcgtactgcgccgagccaggtacgccgcgccgccgaggcgctgcacggactgcgaccgaacctgcgctacgtcgacagcgagcgctacatcgccgacctcgaaggcggtcgcctctgcctggccatggcctgggtcggcgacgccctgcgcgcggccaaggcgggccagccggtaagtttcgaggtaccgcaggaaggctcggtgctgttcatcgacaacctggtgatcccggccggcgcccagcatccacgcgaggcgcaccgtttcatcgactacctgatgcaaccgaagatcgccgcacagatcaccgccgccaccctctaccccagcggcaacgccgacaccgccggcttcctcgatcccgccctgcgccagcaacccggcctgtatccggaccgcgacaccagccgccgcctgttcgccctggaaacgccgccggaaaaactccggccggtggtcgacgagatctggaaggccttccgcggcgccagccactga

SEQ ID NO: 362233 - DNA, 1026 bp, Pseudomonas aeruginosa
atgcctcggaccaggtcatctgtcgcgtcgaagaagccaaaatcaatttgttttttcaacaacaaaggaggtgtaggaaagacaacgctggtggctaatcttgccgcagagcttactttaaatcacagtaaaaaagttttggtaatcgatgccgacccacagtgcaacctaactcagtatgttcttactgacgaagagttcatcgacacatactccaacaaagacccttccacgatattcagcgttattcatcctctctccaccggccgaggatatactacagaccttcctatcagtaagactcagaactttgggttcgatgtgatcattggagaccccagactagccctcaaagaagatcttttagctcaagattggcgagaagccaaggctggcggcatccgtggactcaggacaacattggtgttccacaatgtaattgagcaggcctctggttacgactatatcttctttgacatggggccatcacttggcgcaattaaccgcgcaatactattggcggtggattgcttcctagtcccaatgtcaatagatatattctcaagctgggctttaaaaaacattggcgaagcagtaaaggtttgggagaaagatctggagttcggcatgcgcaactccgaagacccatctgaactaccctctgtcacaataaagaaacttcgattcttaggctacgtcacccaacaacacaaagagcgcaaagaaaaagagaacaccagaattgttgaagcatacaacaatataagcaaaaagcttccagagatagtaaacaagaacctcagtagcttctacccatccactcttaatcctcacataggcgaaatcaagcatctagccagcttagctcctaaatcccagacccttcatcaacccatgattaacgtgactgctgttggcagttacgcctccatgcgaaagcaagccagggagatctatagcaccctagctaaacgctttatggaaaacgtcagaaaaattgacaaggaagctatggagaaaccctga

SEQ ID NO: 362234 - DNA, 891 bp, Pseudomonas aeruginosa
gtgcctactatcaaccccgacttgataaatgatttagcaaaccgccgagccgctatcttcgtgggagcaggtgtttctgccggagccactaacgtcaacgggactcgtatgaaagcttggccagaatttctgacggaagcggccaacttgttagaagaccgaaagctaacaaagaatgctgtagacctcattaaaaaccaagattatctaatggcctgcgaaatcataagccgaggacttggagtagaggcttggcgaaaaatactaactgacgaatataatcaaagaggcaatcctagcgaacttcataaactacttatgagccttaaccagaggctagttctcaccaccaatttcgacctatacctagaaacagcatggaacgaagtaaacaccaaagaaacccaccacccacagataaagaaatcaataaccgaagactgctttcaagcatttcgcgattctcaaaattacatattcaaaatacacggctccatcgatgttattgactccgtaatattcacaaagaaagactacactgagaaagcttacggaaactgggcctattcaaaatttattgaaacagttctactcacccataccgttatatttatcggcttctctctgaatgaccctgccatatctcaagttattgaaaactatgcccacaacatccctcacgcccgccctcattacatcttcctctcaggcaaaccaacagataaatttattgaaataaacaaggagctacgaaaaatctacataatcccttatagcgcaaagaacggtcacgcagaactcacagaaattttcaaaaaaatagtttctgaagttgactcgcgtcgccgagaaattggcactgaaatgattaagtccctcggaggagcttaa

SEQ ID NO: 362235 - DNA, 141 bp, Pseudomonas aeruginosa; identical to SEQ ID NO: 339930

SEQ ID NO: 362236 - DNA, 1479 bp, Pseudomonas aeruginosa
atggaacgtagcgagattcgagagtccgcaaaacttgccttactcaccaaggtaagaacacatgactatggccaatacctgttcaaggcaagcattcaaagaattcgtggattccaaggcgaagatataaattttgaatttcccgtcactgcgttaattggtcctaacggcagcggaaagtcttctgtactaggagtggctgggtgtgcatataagccaatcaaacctggaaatttcttccccaagagtgccattggtgatgaatcgatggctgggtggcgaatcgagtatgagctagtagataagcgactgaatgcgcgacaactgatcagaagaactagtagcttccgccaagctaagtgggctcgcgatgaagtcgtagatcgccccgtattattttttggtattgagcgcacagttccagcaggcgagaaagctagatataagaaactcacaaaggcctcttacgtccatacaagcgcaattgaagcgctaaacccggatgtagctcgccaagttgctcatatcttagggaaagatgttggtgagttccgtataacatctattaaccaagaggaccaattcctcataggccgttccggaaacaaccagtactctgagtttcattttggcgcaggtgagtcatcgattatccgcatgatcacccagatagagcgcgcacccgaaaacgccttaatactcatcgaagaaattgaaaacggcttacatcctatcgctactcgccggatggttgaatatctaatcgatgttgcaggacgcaagtcagtgcaaaccatattcacaacccatagtgaccatgctctacttcccctacctaacgaagcaatatgggcatgcatttcaggaaagcttaaacagggaaaactgtcagtagaggcactgcgggcagtatctgggcgagtggacaaacgtctagctatattcgtagaggacgagttcgccaaagcttggacagaaagtattcttagagaaactcttggcattgattattaccaagtagaggttcacgctgttgctggcgatggcacagcagtatctacgcacagagctcatacgcgcaaccccgcaattaactttcgatcgctctgcataatagacggcgactccgaacagaccggtgataacgaacctagcaatggaatagtgcgacttcctgggcatcaaccagagctaacagtatacgaggacgttcaagcgaaccttgaaagcgatctagtcgtacttactctttcatgccaacgccccccagaggctcaaggagatgtcgcacgcgcaatagaggaggtaattagcactaaccgagaccctcatctactctatgttcaattaggaatgagaattggtcttgtgcaagaaactattgtccgaggtgcatttctagccctatggatccgccacaatcaagctttctgcaaccatcttgccgagaaagtacgcgaactcctcgcgaacccttaa

SEQ ID NO: 362237 - DNA, 1215 bp, Pseudomonas aeruginosa
atgaaaaatatattcccaggacacttccccgaagagaccataaacattgaagaactttggggcagttgtatatttgcactagacaccaacgtattactaaatctatatagatattctgatgccacaaaagaaaaattaattgaagcactcacagccataaaggacagactgtggataccttaccgggtagcagaagagtacttagaaaaccgcctaaacacaatattagaacagcaaaacaaatatgaaacaacaataaaagaaattgaaaaaatacaacaagaactaatcaaccctaggcagcatccttttgtttccacaaaaaccttaaaagagtgcaacaaagcacttgaaaatctaaccaaagagctcgagcaaaataagaacatacatacacagcgcataaccaaagacgacattaagaaaataatatccgacctactagaaagcaaggttggcgcgcaatcagatagagagaccctaaatctaatcattgaagaaggaaaagaaagatacaaacaaaaaataccccccggttacagagactcgaaaaaatttgaaaagagcgagacagaaaatctaaaggagcaatgccgaccttttggcgatctaataatttggaagcaaataatagcacattcaaaaaatcacaataagcctaccatcctaattactgatgacaacaaagaagattggtggcttcgcctacagggaagaaccatcagccccagacccgagttaattgatgagtttaagaaagagactgggttttgcttttacatgtatctcccagataggttcttggaactggcaaataagtacatcctcaagaaggcggtatcccctgaagctatccaagagataaaggaagtttcctcacaacaaccagaacaaacggaaacactgtcacactcggaaaatttcttcccgattatcttttacgaaaatggcaagaaaaagcctttcggatcattcgaccccgccactatacccgtatcatcagatagtttctcactaaaagttcaaaggatgctcaccgccgaacgcttatcactactagctgcacagttggaaaaatacatcaatcaagatacattaaccacagaacagtataataaattttacaaaatccaaaacaagttaaatcagtacaaacaagagatagagcatattgacagattgctagaacaactagaggaagatacccccaaataa

SEQ ID NO: 362238 - DNA, 615 bp, Pseudomonas aeruginosa
atgcaactccctgcgccgctaggactccagcacggacctgagcggccatcgagttcgtcagtgcaaggagcttttcatggcaacaccccagcccgtcgatgcccgcacgcagccctggcgcgagacgcccggcggcgacctggtggcgctcggtcggccggttcgccaggcgttgcacctggttcgccacaacccggcacagggtcgggtgctcagccggcgcgagacgatcctgctggtcctgttcgccctgaccctgcacggagcggtgatccattggctgagccagcagagaaccccggcgctgcccgaggtgccgccacaggtgccgccgatgaccatcgagttcaccgcctcggcgccgccggtggtggaaccgccgccgcccgagccgttgccgccggtggtcgaggaaccgccaccgccggtggtcgacgagaacgcggtgaagccgccgccgccgaagccggtgccaaagccgaaacccaagcccaagccgcaaccccggcccaagccggcgccgaaggccgtcgagccggctccgcccgcgccgccgcaaccagggtcgggtgctcagccggcgcgagacgatcctgctggtcctgttcgccctga

SEQ ID NO: 362239 - DNA, 2157 bp, Pseudomonas aeruginosa
atgaaaaaaaacaacaatcaagaaagatcaaccagcatgatctcccatcttattgttgtcccttccgatagcagaagaacgggggaaagtatactccaaggcttctcaaatttcttatttccagactattataaaatactaagatgcctatccctcttccctcatgacgtctcagacatatatctaaaagaagatgattacgtcatctcaaagtccttaggaagcccactaaacataaatttcctaagagccgatcttttagaagaatacctttcttacgtcgacaaaaaattactagtaatatggagcagttctaaaacagtcaaaaccacctcaaaggttatacttgaccttagcccaagccttccccacatatccacatccaaaacacaaaataccattcatatagacgagctaaccactgccaaaaaacatgaaatagtggcagagctattattagatgccggaagagaagataaagacctagaaaccttcagagacatcctcgagtcaaagaaatacactcagaaatcaatgtcttcaatcgaggttaaactccacaattgcacgaccccattaatcgatatactcctcaattacggattagatttaaaaatatccggaatccccccgtcaaaatccataaccccgcacatctccgcaatggttcagctttcagaagttattgatggactacgtccgcctagccttttagacatcccccacaggaagaacgacgcaatagttcactgccctgcgatctacaccttcttatataacattgacggccaaacatggaaaaaacttacaaaaaaaattaaccaatcacgaagagacttccttgagaactcgataataaagaacaaagggtacggaaatagcaccagccctagaagatcaaaactattcaacccctatcatgacaaaagaattgccccaatacttcgcgaaaagcaagaggagttacttttatatactgcaacaattgcagtagtagcctcaaaccagtttattcctgctttccgtctaccaaactccgccatgttaaaccacgacctcctgcgagaaataggaaaaattttacaatccaataacccagactggagaagccaactaaacttaaaaatgtcaaaatactgtaaaagactcgaagccgaaataccaaaagagctaacatctaaaatatttaaaaacagggagaagatactagctgcttgtgatcttcctatagaatggctccctataggacagctcccagctatgtaccgattcgaactatcacgagtaccggttacacctggaaatgtaatgaatcaggtactattatctcaaccacaaatcatcctaccgtattcttctttaactgacattctaatcatcagatccttcgacaaggacgacccacttaggaaccatatcgatgaaatcattaccatcggaaaattatcacaaaagacaaaaggcctcaacattacaatagtagatatagagtctaaggatgacctcataaaatcactaaactcattcaaaggggcaatggtaatatttgattgccacggagggcacggaggagaaaagcagccagcatggttaaacattggcggcaagaaccttgatttatggcacctataccgggaagcacgcatccccaggatagttgtgctcgcagcatgtagcacccatcccatagacgggtcgcatggctccgtagcgaatggttttttagaatccggcgcctacagtgtgctaggaaccttcgccccgatagactcaagacatagctctatctttattctccgcctcctacatagaatttcggcttacatgccaataatcttgaagctacgccacattacttggcgcgaggtaataaccggactactgcgaatgtcctatgtccgagatgtacttgatgacttgttaaggcaaaagatattaacccaatcaaaatacgaggaaattcatatcattgccaacgaactaataaatcttcgcgaggacaaacaatggttcgaaaaattcaggaaaatcatacagcttgaattagaagcatcagatgaatatttgagaaaactttgggacgaacgattcagctttgtagaatcaatgttatttgttcaattaggccgcccagaaaacctaactataactcagtag

SEQ ID NO: 362240 - DNA, 300 bp, Pseudomonas aeruginosa; identical to SEQ ID NO: 270461

SEQ ID NO: 362241 - DNA, 219 bp, Pseudomonas aeruginosa
atgacgtccgaggcaaatgactgctgggtggtgtattcgcccaacgagtcggccaccagcgacagcgccggtttctggtccaacgagttcggctgggtccagttcgaccaggcaacgcacttctcgctcgaagaggccttggacgcagagcttccagtctcggtcggccgggatgcacgcttcgtcacatggcaggacgcccggcagcactacggctga

SEQ ID NO: 362242 - DNA, 693 bp, Pseudomonas aeruginosa
atgggggcagcatgggcggggttcgcgcgcgcggcagcaatcaatcggcatccgggcgtttccctttgtccgcgccgcctggcgcctgccacaggcacttggggccgcgcaggtgctcgggggtgtcagcgcggcgacggctggggcggctccaggcgccgccgccgcgcgtgccgaccagccgccagccggcggcgcgcaggctggcaccgccttcctcgggcaagagtaggtgatcagccgcgtgtagcccagtgccttggccgccttccaggcggcgccgtagagcttgctgcaggcgttcggtgcgccgttggtgcagagcctggtgacttcgagggtccagccgtcgtccaggtgacgggcgaccgggcggccgacgatggccacgccgcagatgccgtcgctgccgggcagcgcgaccgcgatggcgaacttcgccccttgaaccgaccggtggtggcggtggtgctccgaaggcattggcacagcgcaaggacaccggcagcaggtgcagcgatggcgaggacggtggcttgcccatgcgcatcagtcgccgcagaagcaggcgatcggctcctcggctgcatcgaacaagtcgccctgatcggcagcgaagcgcgccaggtcggcgtagctcgggccatcggcgcggaaccgggcgccgctgggcttgctcgccaggttcagtga

SEQ ID NO: 362243 - DNA, 342 bp, Pseudomonas aeruginosa
atgagccagcactacttcgagacccatcacaagggacttcccatcacggtcatgctcggctgggatcggccactgcgctatttcttcatgacgatccgcaagcctgccgagctgatcgacagcaccatgaaggtcgaggacgaggatttcctgtacagcaacctgcacgaggaagacccgttcggccacggcctggactactaccgtgcggtcctgggccatttccacatcgacgtgccgagcagcatgttcaccgaagtccagaaggactacgcggggaacgtcagcaatcgcgtcgtcaagcatgaggccgatggttcgttcaccgaactgagcgcctga

SEQ ID NO: 362244 - DNA, 651 bp, Pseudomonas aeruginosa
atgcctgcaacttcatccgaccagcccctgtaccgcatcgacgaatgcagcgacctcatggccgatgcctgcgtttgcgggaaccagggcgacttgatctttctctcggtctgggcgcgcgacaccgccatccagcagttcatcgggcggctcaccctgggccgcagcgaggacggcctggaccagttccacgtcgtcaccgaccagggcggttcgctgcccgtgttcgtcggctcggtcgagcgccttgaaaagcgcctgacccgcagctatcgccgcacgctgttcggctcgatggtcaatctctggctgttcgaccggcgctgcatccggcccgacaagagttcggccagcgccttggcgctgttgccgcgctccgcggccgatccaacgtcacgcctgtggcacctggtcaaggacacatgcccgctgccgctgctggaccactggcaaacgccagtcctggcgctgctgcgcgagcgcgaaatgctgtgctccctgcgcatggccctcgggccgctgcaagggttccggctcgccatcgacgtgcccgcgctcaccgaagcgctgggcgacctcatccgccagggcgtgctcaccgcctatccctatccggccaggatttggacgccggaagtggaatcggtttga

SEQ ID NO: 362245 - DNA, 1110 bp, Pseudomonas aeruginosa
atggcactcatgttccccaggctcgctcggaatttcgccaagaacgggtactacccgaccgacgaagccacccttgaaagaaccctcggcgcactggcatccggtgacgggtcgatgtgcattcttgacccctgcgcaggcgaaggcgttgccatcgccgaagccgcccaggccctcgggcctgagctggccagcgcctatgccgtcgagttcgaccaggagcgggccacccacgcccggctgctggtcgatcactgcatccacggtgacctgatggacaccatgatctcgcggcaggccttcggcctcctgtggctcaacccgccgtatggcgatctcgcaagggacaccagcggcaacctgggctacgaaggcaagggccgcgcccggctggaaaagctcttctaccagcgcacgctgcccctgttgcagtacggcggcatcctggtcttcatcctgccgtcctacgtgctggatcaggagatggtcggctggctgacacgccatttcacggacctgtccgtgttccaggcggtggacaagcagttcaagcaggtcgtggtgttcgggcgtcgtgtccggcagcgcgaccaggcgggcgatgacgtgaaagcgtcccgcgcccggctgctgcaaatcggcctgggcgaacaggaggcggaagaattgccgcccgaatggacgctgctgccgtatgtggtccccacggcccaggccgagccggagtatttctaccggatcagcatggaaccggagcagttcgccgacgaagtgcggcgcctcaaaggcctgtggcctgcgttcgagacccatctgggcgcgacccagcagaccttgcgtgctccggcacgcgccttgtcccagtggcacctggcactggccctcgcggccggcgcgatctccggtgtcgtgcagtcgcccaccggccgcaccctggccgtcaagggcgacacgttcaagcagaagtcttccgccgtggaataccgcgagcgcgacgacggctccttggccgagacccgaatcctgacggacaagttcgtgccggtgattcgggcctgggacctcacacccagctcttccacgctgggacaggttctcaccatccactga

SEQ ID NO: 362246 - DNA, 318 bp, Pseudomonas aeruginosa
atgctgtccatcttccaggggcgcaagcccaaggttccaccactcttcgcaccgggcacgctcaagctgagtgagaaggtgcattggctggcaagcaagagcctcatcgaccctttgccttatgtgcagcgccatgtgcgcggcgactggggcgaggccagtgaggccgagtgccagttgaacgacgtcgcgctggagcaaagcgctcccatgacgtcgcgcttccagatcacaccgaagctgttcctgctcgtcatcaccagtgacgaccagcgcaccacggtcgtgcaactgcccgaagaaggggccgtgaactga

SEQ ID NO: 362247 - DNA, 300 bp, Pseudomonas aeruginosa
atgtccaccgttgcccaacacgcttttcccaggttcaaccccggccaggtcgtcatgacctcgggcgtcgccagcctggttcaacaaggccagctcaatccccgtccgtacctgttgcggcatctgtctgccgactggggcgacctcgacgacagcgaccggcgccagaacgacgccgcgctgaagtcgggtgaggcccgcctgttctctgcctatgaggtcggcccgagcctgaaggtctgggtcatcaccgaatgggatcgcagcgtcaccacggtgctgctgcccagcgagtactga

SEQ ID NO: 362248 - DNA, 372 bp, Pseudomonas aeruginosa
atgaacccaatccgcgccggatggctgcgcccgcgctggctgttcagccggcgcgcggcgaaggtgctgctgtggacggtggtgctcgtcgtcgccgccgtgggtgccaacatcctcggcatctacctcgtcggcagcgtggccggctgggagcggtggctggcggctgcttcgggctacttcctggtatggcggctgtgcgtgtacgcggcaacggcctatggatggttctggatgcgccgccgggtgctggcccgcgaagaccaaaccgggacggatgggcaggcgcggcgccggctgatccgcaccgaggtcgccggcgtcgtcgccatcgtcgcgctggaaaccagcctgttgatgcaggccgcttga

SEQ ID NO: 362249 - DNA, 1098 bp, Pseudomonas aeruginosa
atgagcacacctcccgaccgcagcgccgtcaagttcgacctgtttgccgatgccgcgcgcaagcgcaagatcgaagcgctgggcgatccgctgcagctcattgcccggcacattgactttgaccacctcacgcaggtcatcgatgacctgctgccccggggagacggacgcaagggcggacgcccgccgtaccccacatccgtcatggtgcgcatcctggtcttgaagtacctgaaccaactgagcgacgagcaggtggaataccaactactcgaccgcatgagctaccagcgcttttgcttgctggaggacagcgccaccatccccgaccgcaataccgtctggcattaccagcagcgcctgggcgccgatggtgtgacggccttgttccaggcggtcgatggccagttgctgggccacgggttcattgcacgctgcgggcagatcatcgacgccaccctggtgcccgcgcccatccagcacttcaccaaggatgagaaagagcagttggcccagggcaagacccccgaggactggagcgatgccaagcgccggcaaaaagacctggacgccacccataccaagaaacacggcaagagttaccacggctacaagctgagcatcaatgtagacgtcaagcacaagttcatccgcaagatcgccaccggcacggccagcgagcacgacagcaggcacttcgatgaggtgctcgacgagcacaacaccagccgggatgtctatgccgacaagggctacccgagcgcacggcgcagcgaaatgctccaggtgctgggctggcgggagcatatccagcgcaaggcccagaagagcaagcccctgagcgcatgccagaagaagcgcaacacgcgcattgccaggatccgtgcccgagtggagcacccctttgcccaaatgcgccacatgggcggcaagctcattcgcaccatcggccaggtgcgcgctgcggtggccatgaccatgatggcggcctgctacaacctcaagcgcctggccaggttcctcgaagatggggtggatgcgttctacaagggcgggccatcaaagagcgaggtgcgcctgcaggggatcaatgcgtga

SEQ ID NO: 362250 - DNA, 453 bp, Pseudomonas aeruginosa
atggcggaagacctactgcaggaggtcttcctgaagtcgatgcgtcaggggctgcgcttttgtgagctgaccaatccgcgtgcctggttgttcgaggtggcgcgcaacgcattgattgattcggtaagcttaaacaaaccgtttgaagagctgcccgaacatctggaggccgagctgggaagcgagcgcgcgcccatcgatgaattagatatttgcattgagcgcatcttgtcggaactggcggcagaagatcgttccatcatccagagctgcgatcttcagggaaaaactgtgcgttcatacgctcaagactacagactcacactggctgccgccaagtctcgcatcctcagggccagaaagcgactgcgtgacagtcttgttgagcgctgccaagtgggctttgatgagacagggcgggtttgctgtcatgtgccacgcacgctgagctga

SEQ ID NO: 362251 - DNA, 861 bp, Pseudomonas aeruginosa
atgactgtcccgcctaacgcccaagggggctgctgcagccagccaagacctgttgcagcagccccaagccctgattcaaaatcgtggaatcgcaggtattttttcagcatcgcggctctggcagcactttggtgggcggcttattcctacatcctccctgcctcaaactggatcgcatttgatttgcttggggtttctgctgattcgcacgcaggcgcttcgctggagttcttcatttatgacacagtgaagattcttttgcttttgacgatgctgatttacgtcatcgcctggcttcgcgcttccatgaatacagagcgggtgcgagattatctcgtcggtaagcggcgcggacttggctatcttttaggggcatcattcggcgcagcaacgcctttttgttcctgctccagcatcccgctgtttttggggttcaccacggctcgcatccccattggcattaccatgtcgtttttgatcacctccccgctcattaacgaaattgcggttgtgttgctgtgggggttgcttggctggaaattcacgctcatttatctggcagttggcatgggggcaggcatcctgggcgggttcttgatggacagtctaaaagcggagcgctggttgcaaccatttgtgatcgatgctatgggaaaatcgccgaatgccatgcagcacaccaacggcatgggcaaggctgaaaaactctcggtacgacaacggcatgattttgcttatgcggaaatgatctccattttcaagaaagtctggaagtgggtcgtcattggcgtcggtatcggtgccgcattgcatggttttgtgcctgacaactggtttgctgacaacctagggaaggtctga

SEQ ID NO: 362252 - DNA, 990 bp, Pseudomonas aeruginosa
gtgacccgacccaaacagatgacgcttgccacggaatcggacgccggcttcgaacgccatcgcaaggcgactcgccgtgatgtgtttctggccgaaatggacaaggtggtgccgtgggatcggttgtgcgcggtggtggaaccgcactatccgaagacgcccgaacgcggcggtcgtcaaccgattgggttggaacggatgctgcggattcacctgctgcagcagtggtacgcactgtcggatccggcggccgaagaggcgctgtacgactcgcaagccatgcgccgatttgtcggcatcgacctggggcgcgaaggcgcacccgacgagaccaccatttgcaagtttcggcacctgctggaaaagcatcagctggcacagccgctgtttgacgtgatcacgacgtacctgggcgaacacggaatgaagctctccgaaggcacgatcgtggacgcgacgatcattcatgcggcaccgtcgacgaagaacaaggatcacaagcgcgactcggacatgcaccaaacccgcaagggcaaccagtggtacttcggcatgaaggcgcacatcggcgtcgatgaacgaaccggattggtgcacaccgtaaccaccacggcagccaacgtcggcgatgtcaccgaaatcgccaacttgctgcacggcagggaaaaagcggtctacggtgactccggctatcgcggtgccgccaagcgcgtgaaacccaaacgcggccgacatttctacatcgccgagcagcgcagcaaggtcaaagccatcgccgatgccaagttgcgagagatcaccgagcgcatcgagcatctgaaagcatcgatacgtgccgcggtcgaacacccctttcgggtagtcaagcgacagttcggtcacaccaaggctcgttaccgcggcttggccaagaatcatgggcaaatggtcacgctgtttgccttggccaacctgtggatggccagaaagcaactgcttgccgcaggatag

SEQ ID NO: 362253 - DNA, 189 bp, Pseudomonas aeruginosa
atggagagcctgcttctgaaaggcctgcctatcggcaccacactggctttctgcatgagttctgtggctgccagcattcctgaattcatgatgctgcgtcagatcatgaccatcaaactgcaagcgacctttattctctatctatgggtggtcttcaccctggttgggtggctactcaatgcgatgtag

SEQ ID NO: 362254 - DNA, 234 bp, Pseudomonas aeruginosa
atggatatcaaagtgctcggcacaggctgtgccaattgcaaggccaccatcgcactgatcattcaggttacccaagacaaaggcctgcaagccgaagtaagcaaggttgaggacctacgtgagatcatgtcttacggcgtgatgagcacgccaggcgttgtgatcaatgggaaagtcgtgcatgccggcggcgtgccaccacgcaacatgattgagcagtggctgggcgcatag

SEQ ID NO: 362255 - DNA, 507 bp, Pseudomonas aeruginosa
gtgcctagcttctggccgaacgcgccttcgccaccctcgaacgcttcctgcatatcgaagccgccaagcatcgtgctgttgatagccgctggcgtggcgctgatctgggccaattctccgattgcccccggctatcacgcgctctggcatctgccggtgtcacttggcatcggcagcctcactgtctcccagtcgctgcacttcgtgatcaacgacggcctgatgactatcttcttcctagtcgtgagcatggaaatccgccgcgaaatccatgaaggtgccttgagtaatctgcgccaggccagcttgccgatcatcgcgtcgctggacggcgtgacacgctgcagcgatgagcggcgggaagatggccgcagatggagaagacgactctcggcccaacaatttagcgaatcgaccgaatcgttttcccagttcggcgcctctataggacaagtggggcgccgtagggcctccatcaattccgggatcagcgatccccagccttga

SEQ ID NO: 362256 - DNA, 468 bp, Pseudomonas aeruginosa
atgtcttgttacattcgttcgatggtcgctgggtttgccgccactgtggtgctgtcgctgctgttgctgatgaaggtggcaatgggattgatgcccgagttgaatcccgtcgccatgctcacggacatggcacacgcaaacatgggtatgccggcctccccgatggtcggatgggtggcgcacttcatgatcggtaccgtcctgtggggcattctgttcaagctgctgtatggccttctccccggtggaaatgcgtttctcaaaggcatatccctctccgtgctggcttggctgctgatgatgatcctgccgatgccgatggtcggcgcgggtctgttcgggatgaagctcggcatgatggcgccggtgatgaccctgatgatgcacctcatttggggtgcggtgctgggttacacctatggtcgcctgcaagccaattcgagtgctaccagggctgttacgccttga

SEQ ID NO: 362257 - DNA, 162 bp, Pseudomonas aeruginosa
atgagcagcagctaccgcagtgaggatacgaacatgatgaaggaaacggaggtcacaaccgaaagcgagatggcgccggataacagtacgctgtatgtcgggctgggcggctatgtgacagccaccagcgttttagcaggtttgtctgcccggtttgcgtga

SEQ ID NO: 362258 - DNA, 483 bp, Pseudomonas aeruginosa
atgggcgtgatcgcgtggatcgcggtagccatgcatgttgactacattctttttcccggactgggcgctctggcccatgacgtcatcaagcgaccgcacggcacctgggccaaagcgccggggatgctcgttctcacaccgcttctcaccggattgggcatcctgatcttgcgactattcgatctgcatgtgccaccggcgctcgccgtgggcctgctgccgttcgttgttccagtggtcgactgccgattcgctgtcgctgtgggcattggcaccttgtctctgaacatgctgttcctagtatggcgcaggctgagaaaacacgtctcccaccgtcttaacggcgaggccgagccggtcgagtacgttcatttctggatggcctcctgcgttatgccacccaacgccttcgacatgttttccgcgacggggccgcagttgtcggcgccgtggcgcgacgcgagatacttcggatcgttgtag

SEQ ID NO: 362259 - DNA, 456 bp, Pseudomonas aeruginosa
atggcccacgcccctggtgcactctcgacctacctgcacgggatggactggttccgcaaggaatcgggcttcacgccggccgagcaagaagtcgtgttgctggtcatcagccggatcaacgactgccactactgcgtggccgctcacagcatgatcgccgagaaggtatcgaaggtgccgccgcaggcgctccaggcgatccgtgagggcacggcgattgatgacccgaagttgcgcgccctggctgacttcgtcaaagaaatggtggaatcgcggggcaatccgtcccaggccagtttgcagagcttcaccggcgcaggctacagcgagccgcaggcgttgcaagtggtgctcgctatcgccatcaagacgctctcgaactacaccaaccacctgttcgacacccctatggaactagcctttgcgtcctacgctctgccggcggtgacgaaatga

SEQ ID NO: 362260 - DNA, 1332 bp, Pseudomonas aeruginosa
atgaatcgccacaccacgcggcaggatctaccgcgcgcccaacttctggccgagcgcgctttcgccaccctcgaacgtttcctgcacatagaagccgctagcggcatcgtgctcttgatagccgccgccgtggcactgatctgggccaattctccgtttgcgcccggctatcacgcgctctggcatctgccggtgtcacttggcatcggcagcctcactgtctcccagtcgctgcacttcgtgatcaacgacggcctgatgaccattttcttcctggtcgtgggcatggaaatccgccgcgaaatccatgaaggcgccttgagcaatctgcgccaggccagcctgcctatcatggcggcgctgggcggcgtggccgtgcccgcgctgatctatgtggccttgaataccgacccatctcgcttgcagggttgggccgtgcccacggccaccgacatcgccttcgccgtgggcgtgctcgccctgctgggccggagcattccgggcaacgtgcgcgtctttctactggcgctggcgatcatcgacgacatcatcgcgctgttctattcgggcggcctggacctgtcgggatttctcgtcgccgcgatgggcatcctcgtggtgctgggatttcagcgcatgggcgtcggctcggccttcgcctacgtgctgcctggcgccatcgtctggaccggcctgttgatgaccggggcgcatccaacattggcaggtgtcgttctcggtatgctcacgccggtgctttcgcggcccacgcgtgaacacccgctggacatggtggcgtacgcggcgcagaagctgcgcaaccacgatgacgccaacgatacgcaccaccttgccatgccgctcaagcaattgcggctggcccagcgcgagctgctgccccctgtggtgcgcgtacaaacggcgctgcacccttgggtggcgtttggaattatgccgctgttcgcgctagccaacgcaggtgtgagcatggacggcattgacctgtccgccgcaggcccgcagtgggtgatggccggcgtcggcctggcactgctgctgggcaagccgttgggcgtggtcggcgtgagctggctgatggtccgcttgggctggtgccggctaccacccggcgtgtcgtggggcggtatcgtcctcattggcctgcttgcgggcgtgggcttcacgatgtcgatcttcattgccatgctcgcgttcgacaatgaaaccctgctgggcgcggccaagttgggcgtgctggcagggtcgttgctggcagccttgctggggttggcttggggcgcgatgtatcggcgcaccacaaaagccgcgtga

SEQ ID NO: 362261 - DNA, 867 bp, Pseudomonas aeruginosa
atgaagaacgagaacaaggtgctggcctgcgtcgatcaatccaggtatgcggactatgtggctgactgcgcggcatgggcggcacaccgtatgaatgcgcccctggagtttttgcatgtcatcgacagccacccagagcgaggaatgggcgatgaccgcagcggtgcgatcggtatcgacgcccaggaaagtctgctggccaaactgtcagcagaggatgaaacccgcgccaagagcgcacgggaacaaggccgcttgttcctaaatcggctgcgtgagcgggcgatggccatcggggccaccgatgtcgatgtgcgccagcgtcacggcgatttggaagaaactgtcgtagagcaggcgaagggcgtacgactactggtactgggccggcgcggcgccgacgcggccacatcgcagcgtagtgaattggggcaccatgtggagcacatggttcgcgcgctgaatcggcctatcctgaccgtgaccgaagatttcaaggcaccccagcgagtgatgatcgcttttgacggcggtgtcgtcacgcggcgcggagttgaaatggtggcgggcagtccattgtttcgcggcttgcccattctgttgctgatgtcaggcacgcaacgcaaagatgcatccaagtcactggagtgggccaggggcgccttggaggtggcgggcttcgaggtgacgtcttctatgacgccaggtgaggcgcaggaagtcattgttcggacaatacaagagcaggccattgatatgttgatcatgggggcattcgggcattcgccactgcgcagtttggtggttggcagcaagacaaccgagcttttgaaagcctcaacaattcccaccttattgctgagatag
